United States Patent Application Publication US 2021/0199660 A1 - sequence listing, part 15

SEQ ID NO: 203346 - DNA, 120 bp, Artificial Sequence
  ENSG00000114735_94 (sequence is synthesized)
gcccagagtttcactgtttctgggtaccttcatttctgggaactaactgtgctttggaaagagagaaatgagaagcaaaaccctagggccccagtatcacccctcctttctgtcttcctt

SEQ ID NO: 203347 - DNA, 120 bp, Artificial Sequence
  ENSG00000114735_95 (sequence is synthesized)
ccgcttagtcacagccaagagctcagtacctcagcctcccttagggccactaggtggggcagaatacaaggtcaggcgaggacacagcatctgggacgagtcctttcctgccaacagcct

SEQ ID NO: 203348 - DNA, 120 bp, Artificial Sequence
  ENSG00000114735_96 (sequence is synthesized)
ccgtgaggggtcctaggattgctgagggctgagaccaccttcccaaagttggggaaggggtaactgaggctgtcatctggcctgtctcacctgtcttacctgcaggcccatcattcctgc

SEQ ID NO: 203349 - DNA, 120 bp, Artificial Sequence
  ENSG00000114735_97 (sequence is synthesized)
acagtcatttattaggcaccaactgtaagccaggcccaggaggttggatggttcaggtggggccctggccttgcagaactcatggacttgcacatagactcctcctgacaggcccctcat

SEQ ID NO: 203350 - DNA, 120 bp, Artificial Sequence
  ENSG00000114735_98 (sequence is synthesized)
gagtagctgggtccttacgatttttctggtcagcagtggggagccgtgggaggcattaggctctggggaagccaagcaacatcacatgtacacagcatagagactcacacacccttgcac

SEQ ID NO: 203351 - DNA, 120 bp, Artificial Sequence
  ENSG00000114735_99 (sequence is synthesized)
aggcacccacacgtacgtgtatgttcatgggcgtgggccttgagcaccgggtcccgtgagccactgcacctggccaactgggtccatgtccataatcataggtgtccacgcagggcctcc

SEQ ID NO: 203352 - DNA, 88 bp, Artificial Sequence
  ENSG00000114735_100 (sequence is synthesized)
ggtccatgtccataatcataggtgtccacgcagggcctcccttggatgggggagctccaggctctggaaaccaagccagggttgcatg

SEQ ID NO: 203353 - DNA, 120 bp, Artificial Sequence
  ENSG00000114735_101 (sequence is synthesized)
cagaggcccaaccactgcctccaagtcatgggagcgcagagcccatgtaagctcaaacactgccccatgtcatagaaaagagggccaaagatggggctgggcgtggtggctcactcctgt

SEQ ID NO: 203354 - DNA, 120 bp, Artificial Sequence
  ENSG00000114735_102 (sequence is synthesized)
agactccgcatcagaaaaaaaaaaaaaagaaagaaaagagagccaaagctcagagagggcccatgacttgcccagtgtcacacagcaaggtgaggcaggtctgggagggaaatgaaccag

SEQ ID NO: 203355 - DNA, 120 bp, Artificial Sequence
  ENSG00000114735_103 (sequence is synthesized)
accttatccacatccctgacctttttggcttcatgcttggagcttggcaccccctgagaaccacactccgttgacctctgggaaatggaggctggtgattctcccagcaaacccgcctgg

SEQ ID NO: 203356 - DNA, 120 bp, Artificial Sequence
  ENSG00000114735_104 (sequence is synthesized)
gaactaaccacaggctcctcccagctttcactaaccaaccccaggatttccaataccggtgctttgcttagctgtactgggcacctggaactcattctccctgccaccctccctccctga

SEQ ID NO: 203357 - DNA, 120 bp, Artificial Sequence
  ENSG00000114735_105 (sequence is synthesized)
ttccttgaataaaattcagccttccaaattttactcaaatgcttctactttctctgaccctctggaactttcccctgttgccagcctccctccagcatctgtcccctcattcccacctcc

SEQ ID NO: 203358 - DNA, 120 bp, Artificial Sequence
  ENSG00000114735_106 (sequence is synthesized)
tgtttacttccctacaaaagccaaaaattgacccctagagcctgagactctggatggaggatcttcgtagctggggccacacccaggccagcccagcccttcagactctgccagtcacag

SEQ ID NO: 203359 - DNA, 120 bp, Artificial Sequence
  ENSG00000114735_107 (sequence is synthesized)
tggggtgggccctggagctggaagaggaaacagagcctctgccagagtcaccacctgcccccaaccctacttctcctccgaaggcccaacaaggtcctgtgcgccctccaagggcagagg

SEQ ID NO: 203360 - DNA, 120 bp, Artificial Sequence
  ENSG00000114735_108 (sequence is synthesized)
aggctgctggctgtggctgtgggaggagacctggagcactgtgcccgaggcaaagctggccccgtggagtttgctattccagcttttatttactcctctgtaccctgagcaccatcaact

SEQ ID NO: 203361 - DNA, 120 bp, Artificial Sequence
  ENSG00000114735_109 (sequence is synthesized)
gggtgccaggcctgtgcctatatttggcagggtgaggggtgggggccagacaaattgtagaggagcctcaggtctttggggtgttgcccctccactacatggccccagaccaagttctct

SEQ ID NO: 203362 - DNA, 120 bp, Artificial Sequence
  ENSG00000114735_110 (sequence is synthesized)
gccagtttgcagagctcttcccttccacttggtcttgaggaggggccagagaggctgcctttaccccatgagctctgaaccctctcactatctggctgtcccctcattctctcaccaccc

SEQ ID NO: 203363 - DNA, 120 bp, Artificial Sequence
  ENSG00000114735_111 (sequence is synthesized)
actcccactcccgatgggagcctcaggcctggcttaggaaccctgcccacagctgtactaatgcccttggctttgctatagggaaagaacacagccactccacactctgggacagccagc

SEQ ID NO: 203364 - DNA, 120 bp, Artificial Sequence
  ENSG00000114735_112 (sequence is synthesized)
ttgcgtccatcccctagtgcagagggctagtttagggaaggacattaggaccctgactgtgcacctgactcaggggccccggagaagatttggtgggctaagggtgggcaggagaataca

SEQ ID NO: 203365 - DNA, 120 bp, Artificial Sequence
  ENSG00000114735_113 (sequence is synthesized)
actcacagccaagcggaaggtggctttcagctccccccttctcattttttcttactgtggctgcaccagggctgtgcccctcatggaaggttcactttcctgcttatctagtctcagatg

SEQ ID NO: 203366 - DNA, 120 bp, Artificial Sequence
  ENSG00000114735_114 (sequence is synthesized)
ttacagtttttcttgttatgtattatacagagagatggcctaactggttcttgctgctgcatgggcaagccattaatttacaggggtttatcttataactggacacctttttgttttctc

SEQ ID NO: 203367 - DNA, 120 bp, Artificial Sequence
  ENSG00000114735_115 (sequence is synthesized)
gttttctcttacaagatgtgcttgttgttgcttctcttggattttctacattgacattttaccactgaaaataatgacaatgacaaatttgtcttttcctttctttcttttttttttttt

SEQ ID NO: 203368 - DNA, 80 bp, Artificial Sequence
  ENSG00000114735_116 (sequence is synthesized)
ttctttcttttttttttttttgagacaaagtgccaggttcaagcgattctcttggctcagcctcccgagtagctgggatt

SEQ ID NO: 203369 - DNA, 120 bp, Artificial Sequence
  ENSG00000114735_117 (sequence is synthesized)
agccaccacacccggcctgtcttttcctttttaatacttatggctcttatttattttccttgtttaatagcttggctgagaccttcaatacaatattgaaaaactgtaacgactagagca

SEQ ID NO: 203370 - DNA, 120 bp, Artificial Sequence
  ENSG00000114735_118 (sequence is synthesized)
tttgtatattgtttctcacttggggtgcctctggtccctccctgtcaagtgcacttgctattgattttggatagatggcccttttctacttaaaaatggttcagtctagttctggctgac

SEQ ID NO: 203371 - DNA, 120 bp, Artificial Sequence
  ENSG00000114735_119 (sequence is synthesized)
tctgattttttgtttattttagaggctttttttttcatctttcattcatgcaacagaccttcagtgagctgattgccaggactacactgtcatactgtggtaccaaagaaaaattgacac

SEQ ID NO: 203372 - DNA, 120 bp, Artificial Sequence
  ENSG00000114735_120 (sequence is synthesized)
ggtccctactcataaggagttcatggcctggtggaggatacaggcaggcaaatagatccttatccttaggccatggggcatgcattcagtcaccatctgctggcactgtgccaggcacaa

SEQ ID NO: 203373 - DNA, 120 bp, Artificial Sequence
  ENSG00000114735_121 (sequence is synthesized)
ggaatgggcactattcaggcaggcccccatcacagtctggtggggtccaagcagttcacatcccctctcactcaagttcccacagagtagttgcaatggtgagctgaggttttctctgct

SEQ ID NO: 203374 - DNA, 120 bp, Artificial Sequence
  ENSG00000114735_122 (sequence is synthesized)
gcagaggccaggtgggtaagtaaccaaaagtgcctgagagctaatcccctggagcagcctgaaaccaaggaagacagagagttggtagacacatgcccagctccctcaccccttgggtgg

SEQ ID NO: 203375 - DNA, 120 bp, Artificial Sequence
  ENSG00000114735_123 (sequence is synthesized)
gacaaccgtggcttgtgttttctgccagctcccaactgaagactgagcctcagttgcctacagaaggaacccactcataaacccacctacctcctttggcttcctttccttccctgtctc

SEQ ID NO: 203376 - DNA, 120 bp, Artificial Sequence
  ENSG00000114735_124 (sequence is synthesized)
acccacctacctcctttggcttcctttccttccctgtctcaccccctctcccattttatatcaataagtgtgaaggctgagattttatccgactttctttttttttttttgagacagagt

SEQ ID NO: 203377 - DNA, 120 bp, Artificial Sequence
  ENSG00000114735_125 (sequence is synthesized)
gcaaacaagttagtctatcatagtctatcatattctcaaggatcatggcagaaggcacagaactctgggttcagaaacagacaacagattattgtttacagtaacggcagtagacagagt

SEQ ID NO: 203378 - DNA, 120 bp, Artificial Sequence
  ENSG00000114735_126 (sequence is synthesized)
aaaagcattttcttgcaccacttccctgaaccgcagttcctacagagtgatgtgatgatggcccggtgatgcctgcatatgcattgggttgcactacggtggagaaactgcatgctgaat

SEQ ID NO: 203379 - DNA, 120 bp, Artificial Sequence
  ENSG00000114735_127 (sequence is synthesized)
ttaggggacccacgtcttttataataagctgcaagcaaacctgcccaggtgggagatgttatctttagtatacgggacaataaaatctgccttttgctctggagggagatactacctcta

SEQ ID NO: 203380 - DNA, 120 bp, Artificial Sequence
  ENSG00000114735_128 (sequence is synthesized)
tcttctaaggttactcactataataatcacccttgtaaagattatttagaacaagggcaaccagtgcctctactggcaagtgtgcagaaataggagagaaccatggggaattgtctctca

SEQ ID NO: 203381 - DNA, 120 bp, Artificial Sequence
  ENSG00000114735_129 (sequence is synthesized)
ataccttactggtgcttcttggcattacttcccaaataatctatttgcatttggatgcttgtctcagagtggtttctgcaggaaaaaacccaagatagagagacaacactatataggcat

SEQ ID NO: 203382 - DNA, 120 bp, Artificial Sequence
  ENSG00000114735_130 (sequence is synthesized)
cgatgtatttctggggtgactctctttcctccagacctctcctgcaaacaacgcaggggagccacgcaaaggaagaggtttccacacctgggattgatactgctgggactccagggcagg

SEQ ID NO: 203383 - DNA, 120 bp, Artificial Sequence
  ENSG00000114735_131 (sequence is synthesized)
tgctctaaaggactcttagaatttcatttttaatgtttaatatttggtccatctagaatttatggtggaaggtgtgaggtagacgttgcacttttttttccttccaaattgctccaatat

SEQ ID NO: 203384 - DNA, 120 bp, Artificial Sequence
  ENSG00000114735_132 (sequence is synthesized)
cacttactggaaattgtgctttgtctgttaccactctcttctaatctgcctgtggcctgttccttagagtgtatcacaaacatacaagtgatcaatttccaataaattgattaaagaatt

SEQ ID NO: 203385 - DNA, 120 bp, Artificial Sequence
  ENSG00000114735_133 (sequence is synthesized)
ggcaggtatgcatgggaggtggggatcggaacggggtgtttcgactgcaaccgcctggagacctggccggtaccattctccatagtgcagatggggaaacagggttggagagagggggcc

SEQ ID NO: 203386 - DNA, 120 bp, Artificial Sequence
  ENSG00000114735_134 (sequence is synthesized)
tcatctgggtcgttaacaatgcggtgcgtagctgtgagggagtttacacttctgacttcgggccttggctcctgggacggcgcactggtgcaagagccgcttctggagtctggtggactc

SEQ ID NO: 203387 - DNA, 120 bp, Artificial Sequence
  ENSG00000114735_135 (sequence is synthesized)
ggctcctgaaagactctgggtatgaatgggatgggtctcctaggtctgtccccagcaggctcctctgctcctaatgtgtactgggcaggccctggcagaggtcagcacaggaccctcacc

SEQ ID NO: 203388 - DNA, 61 bp, Artificial Sequence
  ENSG00000114735_136 (sequence is synthesized)
tgcagtggcatgaccgcggctcgctgcaacttccgcctgcttgaatcagtatgcccggcca

SEQ ID NO: 203389 - DNA, 66 bp, Artificial Sequence
  ENSG00000114735_137 (sequence is synthesized)
gcctgggacagtttctacctgagtgacgctgggcaagtcgcttcccttctctgaccctacttgtat

SEQ ID NO: 203390 - DNA, 120 bp, Artificial Sequence
  ENSG00000114735_138 (sequence is synthesized)
cgctgggcaagtcgcttcccttctctgaccctacttgtatctgaagatgtggcacttagcaggtgcttaataaacgctagtttggacttttatctggaagcaaaggggaccgctgatttt

SEQ ID NO: 203391 - DNA, 120 bp, Artificial Sequence
  ENSG00000114735_139 (sequence is synthesized)
aaaccttcagttaaacttgcttgtgacctctttaaatatacaattgtaaattttttagttggtggtttacgctgatgtcccggattataggttaaattaggaggaaattttcagcatgta

SEQ ID NO: 203392 - DNA, 120 bp, Artificial Sequence
  ENSG00000114735_140 (sequence is synthesized)
catccatgacagtacacacacaatgtcagattcaaagctcccaattaaaggcaatcatctgcctcttgtaacatcagttaagatcatgtaacatctggtccctgctgtgtgttgagctgc

SEQ ID NO: 203393 - DNA, 120 bp, Artificial Sequence
  ENSG00000114735_141 (sequence is synthesized)
ctcccaggccttggatattcatagactaatgcattgcttgccatgggtttggtgtgattttcccccatcttatggattaagaaagtgaaaatcagaaataatgacttgctcaagatcaca

SEQ ID NO: 203394 - DNA, 120 bp, Artificial Sequence
  ENSG00000114735_142 (sequence is synthesized)
cacgctaggttagacacagatctgtcctgtccccacatatgtgccctaacctaccaccaacccgtttattagcagagactgagctatgggctcagcccactccagctaaaaatgtgaaga

SEQ ID NO: 203395 - DNA, 120 bp, Artificial Sequence
  ENSG00000114735_143 (sequence is synthesized)
aaacgtaagtggccaagacaagaatgatcaaataggtgggtaaggctctaaatggagtcaagggggtgtcagagcaagagcacaactattctcaggcaatgtattggtagaagggggggt

SEQ ID NO: 203396 - DNA, 120 bp, Artificial Sequence
  ENSG00000114735_144 (sequence is synthesized)
atatccaggttttctgttcactaagagtgcttagctgagactgatgggatttttctgaaggaacgtcttagcgcctggcacacactgtaacagtttgttggatgaatgaatatatctctg

SEQ ID NO: 203397 - DNA, 120 bp, Artificial Sequence
  ENSG00000114735_145 (sequence is synthesized)
cctaagtgttctgggatagacacctggaagcctggtgttagctgtgtaaccttaggcaggatgctgccccctctgggcccagatgatgagagggttgggcctccagaccagtgctgggca

SEQ ID NO: 203398 - DNA, 120 bp, Artificial Sequence
  ENSG00000114735_146 (sequence is synthesized)
ggcattatccacataagacacctgggttgggggccttgggcccagtgagccagccacttatattctctgtggggacagtttcagagcctgaggccggcactttggacccagcccttgacc

SEQ ID NO: 203399 - DNA, 120 bp, Artificial Sequence
  ENSG00000114737_0 (sequence is synthesized)
ctcgtctggcccgcccccctcgccctcgcaggcggtccgcgccactgcctctcagtccctgtcctgcgcccgcgcgccccgggagcctacccagcacgcgctccgcgcccactggttccc

SEQ ID NO: 203400 - DNA, 120 bp, Artificial Sequence
  ENSG00000114737_1 (sequence is synthesized)
tccctccagccgccgccgtccagccgagtccccactccggagtcgccgctgccgcggggacatggtcctctgcgttcagggacctcgtcctttgctggctgtggagcggactgggcagcg

SEQ ID NO: 203401 - DNA, 120 bp, Artificial Sequence
  ENSG00000114737_2 (sequence is synthesized)
gcccctgtgggccccgtccctggaactgcccaagccagtcatgcagcccttgcctgctggggccttcctcgaggaggtggcagagggtaccccagcccagacagagagtgagccaaaggt

SEQ ID NO: 203402 - DNA, 120 bp, Artificial Sequence
  ENSG00000114737_3 (sequence is synthesized)
gctggacccagaggaggatctgctgtgcatagccaagaccttctcctaccttcgggaatctggctggtattggggttccattacggccagcgaggcccgacaacacctgcagaagatgcc

SEQ ID NO: 203403 - DNA, 120 bp, Artificial Sequence
  ENSG00000114737_4 (sequence is synthesized)
agaaggcacgttcttagtacgtgacagcacgcaccccagctacctgttcacgctgtcagtgaaaaccactcgtggccccaccaatgtacgcattgagtatgccgactccagcttccgtct

SEQ ID NO: 203404 - DNA, 120 bp, Artificial Sequence
  ENSG00000114737_5 (sequence is synthesized)
ggactccaactgcttgtccaggccacgcatcctggcctttccggatgtggtcagccttgtgcagcactatgtggcctcctgcactgctgatacccgaagcgacagccccgatcctgctcc

SEQ ID NO: 203405 - DNA, 120 bp, Artificial Sequence
  ENSG00000114737_6 (sequence is synthesized)
caccccggccctgcctatgcctaaggaggatgcgcctagtgacccagcactgcctgctcctccaccagccactgctgtacacctaaaactggtgcagccctttgtacgcagaagcagtgc

SEQ ID NO: 203406 - DNA, 120 bp, Artificial Sequence
  ENSG00000114737_7 (sequence is synthesized)
ccgcagcctgcaacacctgtgccgccttgtcatcaaccgtctggtggccgacgtggactgcctgccactgccccggcgcatggccgactacctccgacagtaccccttccagctctgact

SEQ ID NO: 203407 - DNA, 120 bp, Artificial Sequence
  ENSG00000114737_8 (sequence is synthesized)
cggggcaatctgcccaccctcacccagtcgcaccctggaggggacatcagccccagctggacttgggcccccactgtccctcctccaggcatcctggtgcctgcatacctctggcagctg

SEQ ID NO: 203408 - DNA, 120 bp, Artificial Sequence
  ENSG00000114737_9 (sequence is synthesized)
gcccaggaagagccagcaagagcaaggcatgggagaggggaggtgtcacacaacttggaggtaaatgcccccaggccgcatgtggcttcattatactgagccatgtgtcagaggatgggg

SEQ ID NO: 203409 - DNA, 120 bp, Artificial Sequence
  ENSG00000114737_10 (sequence is synthesized)
agacaggcaggaccttgtctcacctgtgggctgggcccagacctccactcgcttgcctgccctggccacctgaactgtatgggcactctcagccctggtttttcaatccccagggtcggg

SEQ ID NO: 203410 - DNA, 120 bp, Artificial Sequence
  ENSG00000114737_11 (sequence is synthesized)
taggacccctactggcagccagcctctgtttctgggaggatgacatgcagaggaactgagatcgacagtgactagtgaccccttgttgaggggtaagccaggctaggggactgcacaatt

SEQ ID NO: 203411 - DNA, 120 bp, Artificial Sequence
  ENSG00000114737_12 (sequence is synthesized)
atacactatttatttatttattctccttggggttggtgtcaggggcgagccaaccccacctctatgccctgagccctggtagtccagagaccccaactctgccctggcttctctggttct

SEQ ID NO: 203412 - DNA, 120 bp, Artificial Sequence
  ENSG00000114737_13 (sequence is synthesized)
tccctgtggaaagcccatcctgagacatcttgctggaaccaaggcaatcctggatgtcctggtactgacccacccgtctgtgaatgtgtccactctcttctgcccccagccatatttggg

SEQ ID NO: 203413 - DNA, 120 bp, Artificial Sequence
  ENSG00000114737_14 (sequence is synthesized)
gaggatggacaactacaataggtaagaaaatgcagccggagcctcagtccccagcagagcctgtgtctcaccccctcacaggacagagctgtatctgcatagagctggtctcactgtggc

SEQ ID NO: 203414 - DNA, 120 bp, Artificial Sequence
  ENSG00000114737_15 (sequence is synthesized)
gcaggccccggggggagtgcctgtgctgtcaggaagagggggtgctggtttgagggccgccactgcagttctgctaggtctgcttcctgcccaggaaggtgcctgcacatgagaggagag

SEQ ID NO: 203415 - DNA, 120 bp, Artificial Sequence
  ENSG00000114737_16 (sequence is synthesized)
aaatacacgtctgataagacttcatgaaataataattatagcaaagaacagtttggtggtcttttctcttccactgatttttctgtaatgacattatacctttattacctctttatttta

SEQ ID NO: 203416 - DNA, 120 bp, Artificial Sequence
  ENSG00000114737_17 (sequence is synthesized)
acatggtcctctgcgttcaggggtgagcacccccttgtaagctcagggctactgttgggtgtcagggaacaaagttttagactgctgcgctccaaagcgggcacacacatgtacctagaa

SEQ ID NO: 203417 - DNA, 120 bp, Artificial Sequence
  ENSG00000114737_18 (sequence is synthesized)
tgcgttcaggggtaagcgcggctctctgcccccttcccggccaccacgaggggcgcacgggagaacaggggcttcgtgctagctgccgggcattgggagggcttgacgggccagaggtga

SEQ ID NO: 203418 - DNA, 120 bp, Artificial Sequence
  ENSG00000114737_19 (sequence is synthesized)
ctgagcgcagacggacctcaggagcaaggctctgtgtggggctgtgacactcccactccccgcccccacacacttacctcaattcccactgtggattgggaaaccgggggctggccggct

SEQ ID NO: 203419 - DNA, 120 bp, Artificial Sequence
  ENSG00000114737_20 (sequence is synthesized)
aaaggaggaactcacagggtgggctcagcctgggttctcattggagcagatggatgctaacggcacggcgtcccccaagatgtggccaacaatcccagatattcttctgggcccagagca

SEQ ID NO: 203420 - DNA, 120 bp, Artificial Sequence
  ENSG00000114737_21 (sequence is synthesized)
ctctacgctagcctgcctgctgccctgcctgctagtaaccttggaccagcccctggccccctctgtcctggtgtcccctctcctgccccaggctagcaagtaggctcttcttgggaagcc

SEQ ID NO: 203421 - DNA, 120 bp, Artificial Sequence
  ENSG00000114737_22 (sequence is synthesized)
agccgcagatccttgcctttcctcaggctggcacctgatggtctgcaactctcgggaggccctgggtttggcctggtcctgcttggggtacccccacaatcgtctcacaaccctgtctca

SEQ ID NO: 203422 - DNA, 120 bp, Artificial Sequence
  ENSG00000114737_23 (sequence is synthesized)
gcccagtctgggatcccaatgtgagaaggaccttggctcctgcctctcatcttcaaatttcccagacttgaggtaagggacagtggagaggggatgctgataagacagagtcttgacctg

SEQ ID NO: 203423 - DNA, 120 bp, Artificial Sequence
  ENSG00000114737_24 (sequence is synthesized)
agctgagcattcctggccatccactctgtcctgaacctcagcaaccccttcaaccaaagggtctgatgctggccatggtgatgtgacaggagctcaggaagctccaaggagagaggaaga

SEQ ID NO: 203424 - DNA, 120 bp, Artificial Sequence
  ENSG00000114737_25 (sequence is synthesized)
aggtataaatgggtgttctgcactcagggaggactgggtggctgtgcttatcgcaactggcctggtgccaagtgagggagggtggaaggtgaggccaaggaagaggacatggaggtgctg

SEQ ID NO: 203425 - DNA, 120 bp, Artificial Sequence
  ENSG00000114737_26 (sequence is synthesized)
ggaagactacttctcccttgctgtctccagcaagttccttcctcctgtctgcattctgggactcctgaatacctgccccaccactgccttccaccccaggagcctccccctgcattccgg

SEQ ID NO: 203426 - DNA, 120 bp, Artificial Sequence
  ENSG00000114737_27 (sequence is synthesized)
agctaccacatcagccccaaaggtgcccacacctacatgtgggatctgaggaccggctaagctatctggacgtggccacccacagaggttccagcctgactggctagccaccaaccatgc

SEQ ID NO: 203427 - DNA, 120 bp, Artificial Sequence
  ENSG00000114737_28 (sequence is synthesized)
tcctgggaaggtagctctgggccccagcaagcaggtcatctcaaaatttggcctccagctctccaagagggatttccaagatcccacagtacagccagggtaggtgtggaaaagtttttg

SEQ ID NO: 203428 - DNA, 120 bp, Artificial Sequence
  ENSG00000114737_29 (sequence is synthesized)
tcaggctgtggtgtgccagagttgtgtggccctttctcactgtgagtggtcatagggccatgatttgttagaacctagagggtcacctataacctacacaggagtcaggtctggctcctg

SEQ ID NO: 203429 - DNA, 120 bp, Artificial Sequence
  ENSG00000114737_30 (sequence is synthesized)
ccaccagctcctgcctgcgccttcctgcctcacaagcaatactggcgctgtttgcccatgctgtcctctctacctggggtcccttcccccagctccttcctttggcctggaagacacagc

SEQ ID NO: 203430 - DNA, 120 bp, Artificial Sequence
  ENSG00000114737_31 (sequence is synthesized)
tcaggagcaagcagaccctgactcccccgtgacacctgcagttttatgactttgcattataattactcttagtgtcatcttccccagccagtctggttctccttgagggcaaggccatgg

SEQ ID NO: 203431 - DNA, 120 bp, Artificial Sequence
  ENSG00000114737_32 (sequence is synthesized)
tttcattatggcggtgtcctgaggcccagccagggactagacccagaactaaggcttggagatgtattttgcaaggagtgagggaggagcagctgtcttcctggggaagtagagccagtc

SEQ ID NO: 203432 - DNA, 120 bp, Artificial Sequence
  ENSG00000114737_33 (sequence is synthesized)
cctgctgccctcccaaggaggaagccctagtatcaccctgctgggtgggcttcccctaggagaaagctgctactcagattttggtcggctcagttcccccaaccccagccatccaagaat

SEQ ID NO: 203433 - DNA, 120 bp, Artificial Sequence
  ENSG00000114737_34 (sequence is synthesized)
atggtgttactgaacctctcagtgcatgggttggtgggaccctttattgcggaaaagggaaactgaagcccagtgaagagcaagctttgtacaagatcgtagagcctggtagggctggct

SEQ ID NO: 203434 - DNA, 120 bp, Artificial Sequence
  ENSG00000114737_35 (sequence is synthesized)
tgccagggtgggaactggagtgtggattaggtccctgcccttggtgggagctcatactgacaggaggtgagacttgccagtgcctttagaggccactgtccaccccagaccctccactgg

SEQ ID NO: 203435 - DNA, 120 bp, Artificial Sequence
  ENSG00000114737_36 (sequence is synthesized)
gaagcagaggccaggataggctgacttgtatgggtaggggattatttcagtctctaagtcctggccagtgtggacctaggtccctctgagagacactcctatccatggggaggtagcgtg

SEQ ID NO: 203436 - DNA, 120 bp, Artificial Sequence
  ENSG00000114737_37 (sequence is synthesized)
tgacctcaggcagcctaccataatcctggggcttctctggaggaccccacacagatctatcataggataaatctacttgtctgtcgtagatctatctcaactaggaccattcatcagtgg

SEQ ID NO: 203437 - DNA, 120 bp, Artificial Sequence
  ENSG00000114737_38 (sequence is synthesized)
gccatttaatcagcccacttcagccaggagggcacaaacatgaagctactttgcactgaatcctatcagtgtggtgagaacattagacatgcctatagggaatgatctgtgtttttggtt

SEQ ID NO: 203438 - DNA, 120 bp, Artificial Sequence
  ENSG00000114737_39 (sequence is synthesized)
gatataaaatagagagcaattaattactgtttagtaaatgcagggcagtggaaaagaatctttcaaaagaggatccccacatggaaacaatcaaggtggcttttgtgatgacaagtgggg

SEQ ID NO: 203439 - DNA, 120 bp, Artificial Sequence
  ENSG00000114737_40 (sequence is synthesized)
aacgagatactggactaactgagcccatggctgggtagaggggaagctgaggctcatagtgagatgggccagccagaggtcatgaaactagtctggggcataggggggtctctggagatg

SEQ ID NO: 203440 - DNA, 120 bp, Artificial Sequence
  ENSG00000114738_0 (sequence is synthesized)
ctgcggccgccagctcccgcgaccgcctctcctgcccctcgccggtacctcagcaaggtgccactagaagcgccaggctggggccgcctctgagcgccccgcgggggccatggatggtga

SEQ ID NO: 203441 - DNA, 120 bp, Artificial Sequence
  ENSG00000114738_1 (sequence is synthesized)
aacagcagaggagcaggggggccctgtgcccccgccagttgcacccggcggacccggcttgggcggtgctccgggggggcggcgggagcccaagaagtacgcagtgaccgacgactacca

SEQ ID NO: 203442 - DNA, 120 bp, Artificial Sequence
  ENSG00000114738_2 (sequence is synthesized)
gttgtccaagcaggtgctgggcctgggtgtgaacggcaaagtgctggagtgcttccatcggcgcactggacagaagtgtgccctgaagctcctgtatgacagccccaaggcccggcagga

SEQ ID NO: 203443 - DNA, 120 bp, Artificial Sequence
  ENSG00000114738_3 (sequence is synthesized)
ggtagaccatcactggcaggcttctggcggcccccatattgtctgcatcctggatgtgtatgagaacatgcaccatggcaagcgctgtctcctcatcatcatggaatgcatggaaggtgg

SEQ ID NO: 203444 - DNA, 120 bp, Artificial Sequence
  ENSG00000114738_4 (sequence is synthesized)
tgagttgttcagcaggattcaggagcgtggcgaccaggctttcactgagagagaagctgcagagataatgcgggatattggcactgccatccagtttctgcacagccataacattgccca

SEQ ID NO: 203445 - DNA, 120 bp, Artificial Sequence
  ENSG00000114738_5 (sequence is synthesized)
ccgagatgtcaagcctgaaaacctactctacacatctaaggagaaagacgcagtgcttaagctcaccgattttggctttgctaaggagaccacccaaaatgccctgcagacaccctgcta

SEQ ID NO: 203446 - DNA, 120 bp, Artificial Sequence
  ENSG00000114738_6 (sequence is synthesized)
tactccctattatgtggcccctgaggtcctgggtccagagaagtatgacaagtcatgtgacatgtggtccctgggtgtcatcatgtacatcctcctttgtggcttcccacccttctactc

SEQ ID NO: 203447 - DNA, 120 bp, Artificial Sequence
  ENSG00000114738_7 (sequence is synthesized)
caacacgggccaggccatctccccggggatgaagaggaggattcgcctgggccagtacggcttccccaatcctgagtggtcagaagtctctgaggatgccaagcagctgatccgcctcct

SEQ ID NO: 203448 - DNA, 120 bp, Artificial Sequence
  ENSG00000114738_8 (sequence is synthesized)
gttgaagacagaccccacagagaggctgaccatcactcagttcatgaaccacccctggatcaaccaatcgatggtagtgccacagaccccactccacacggcccgagtgctgcaggagga

SEQ ID NO: 203449 - DNA, 120 bp, Artificial Sequence
  ENSG00000114738_9 (sequence is synthesized)
caaagaccactgggacgaagtcaaggaggagatgaccagtgccttggccactatgcgggtagactacgaccaggtgaagatcaaggacctgaagacctctaacaaccggctcctcaacaa

SEQ ID NO: 203450 - DNA, 120 bp, Artificial Sequence
  ENSG00000114738_10 (sequence is synthesized)
cagactgaaatgtgctcaggccctggccaggagggcccagggtcattcttttaacaaaaggattattttgttgtgttttaatttgtcactcggaacttcaggatggaggaccctgaccct

SEQ ID NO: 203451 - DNA, 120 bp, Artificial Sequence
  ENSG00000114738_11 (sequence is synthesized)
aaacctccttcagatctctggcccaggctcaagccctagagatgggcagggcctaggggctgggagctgcctgctgccatagcagcacctttagctaggttggcccgagtgaggcctctg

SEQ ID NO: 203452 - DNA, 120 bp, Artificial Sequence
  ENSG00000114738_12 (sequence is synthesized)
tgctgtcctgccctggtgcatggccttagctttctaggccactgggagttgtggctgggcttcccatcttccacagagacatctccctgtgggatgggcagatgggcctggccttgagaa

SEQ ID NO: 203453 - DNA, 120 bp, Artificial Sequence
  ENSG00000114738_13 (sequence is synthesized)
aggcattggccattggttgccatggtgaccagggaccacgttgctgcctgtgaatgctgagtgagcgagtaagggaggaggggcgattgagggttcacctctgccttggggaggctgatt

SEQ ID NO: 203454 - DNA, 120 bp, Artificial Sequence
  ENSG00000114738_14 (sequence is synthesized)
tctcacacactggctggccctctcattctcactcctccttgggccctgaggctgctggatccggtctgcctgcctccctgtgcagtccagccctgccttgctgcagccccagcccagatg

SEQ ID NO: 203455 - DNA, 120 bp, Artificial Sequence
  ENSG00000114738_15 (sequence is synthesized)
gcactcagcgctctcccctgagggagtccctgggcctagccatcccctcactattcccgacccaaagggtgacttttcatctgaacttaaggtgggagatatttttaacttttttccact

SEQ ID NO: 203456 - DNA, 120 bp, Artificial Sequence
  ENSG00000114738_16 (sequence is synthesized)
ttggaaaatgtcactgtgacaaaagccagcatactttccctgcacccatctgctcaccagatctcaggcaggaaagcccctctctgttgaagtcaggggctatcttttggtatacttgtg

SEQ ID NO: 203457 - DNA, 120 bp, Artificial Sequence
  ENSG00000114738_17 (sequence is synthesized)
tgaaagtggctggttgggagcagagctaagtggcttcccattaacctgaggtctctttctttactctgggtcagacctgaggttggggaaggcgactgagccatgctcagaatgtctggt

SEQ ID NO: 203458 - DNA, 120 bp, Artificial Sequence
  ENSG00000114738_18 (sequence is synthesized)
cctggcttgggcctgagtagggcagagagggcctttcctggctgatcagagcttaccagccccaccccaccatggtagccttagggtgctgagtgcctgatactgcctgacaagtgcctg

SEQ ID NO: 203459 - DNA, 120 bp, Artificial Sequence
  ENSG00000114738_19 (sequence is synthesized)
acacgcagcctagttccttcctggcccctctctcactggctgggaaaccctagaccatgtcagataggacaacactgctgggttttacatccagatagtaataaacaccatttcatcatt

SEQ ID NO: 203460 - DNA, 120 bp, Artificial Sequence
  ENSG00000114738_20 (sequence is synthesized)
gggctgagcggtggggcccgggcggggtgcgcgggccccgtcgccgggtctggggccctgagcagtgaaaggaaatactttgacagatttccaagaactttccaggaaaacggggcgggg

SEQ ID NO: 203461 - DNA, 120 bp, Artificial Sequence
  ENSG00000114738_21 (sequence is synthesized)
ccccgcgagctgaccaatcgcgacgctgaaggtggagccgagcggtcggggagggccaatagcagcgcgtggacccggggctgaagctacccagaggggcagggagtacttgctgcattt

SEQ ID NO: 203462 - DNA, 120 bp, Artificial Sequence
  ENSG00000114738_22 (sequence is synthesized)
gatcctctacaactggtgttgctcccgttatgcggacagaagacagccccagggaacaaatgctaggaaatggcagggtgagaaaactgaggcatggagaggttacaatataacttagat

SEQ ID NO: 203463 - DNA, 120 bp, Artificial Sequence
  ENSG00000114738_23 (sequence is synthesized)
ctcccagctggcaagtaatggtttaagccaggagcctacacacttcctcctacttcctctatgggtgctggtgatctgccgactcctagacatccagctttaaggtcctcagtgaagctt

SEQ ID NO: 203464 - DNA, 120 bp, Artificial Sequence
  ENSG00000114738_24 (sequence is synthesized)
actctcggccctgggatttctgcggccgccagctcccgcgaccgcctctcctgcccctcgccggtacctcagcaaggtgcgttgccgccaggtgccactagaagcgccaggctggggccg

SEQ ID NO: 203465 - DNA, 120 bp, Artificial Sequence
  ENSG00000114738_25 (sequence is synthesized)
gtcggcgtgtgcaagcgccccgtgttgggacggccgctcctggaccctaggactctgtgtgtcgggtgtcggattgggtggcatggggtgagatctggagcgggacttagggcagggcgg

SEQ ID NO: 203466 - DNA, 120 bp, Artificial Sequence
  ENSG00000114738_26 (sequence is synthesized)
ggtgcagaggacagttccagaaatgagtgggtccactgaggtcaagccggcggtcaccacagccagaaagatccagacaagaacgttttctttgaaagagttgaaggagaaagcacgccc

SEQ ID NO: 203467 - DNA, 120 bp, Artificial Sequence
  ENSG00000114738_27 (sequence is synthesized)
caacttttcgaatcaggcagaccatccagtcttggctggcactggtttctggccggccctgccagtcaggggagaagagactacagatttgagaaagcaagcagagacagccccagatgg

SEQ ID NO: 203468 - DNA, 120 bp, Artificial Sequence
  ENSG00000114738_28 (sequence is synthesized)
ctttgaaagtatctcctacaggtcagtgattatgcagtctatgtgtaaaccaaagggttccaagggttttggccttccaactatttttgtgtgtgtgtgaatatgacagcactgtgcacc

SEQ ID NO: 203469 - DNA, 120 bp, Artificial Sequence
  ENSG00000114738_29 (sequence is synthesized)
ctcaggccgttcgtcccgcactcccagcttgccccgggctcgcagcccagcccagttcagaggctccaaggctggggtgtgttggaaaagtctgggcgggactcactcttcccctttccc

SEQ ID NO: 203470 - DNA, 120 bp, Artificial Sequence
  ENSG00000114738_30 (sequence is synthesized)
agtcacctctggcccgtcaagccctcccaatgcccggcagctagcacgaagcccctgttctcccgtgcgcccctcgtggtggccgggaagggggcagagagccgcgcttacccctgaacg

SEQ ID NO: 203471 - DNA, 120 bp, Artificial Sequence
  ENSG00000114738_31 (sequence is synthesized)
cagaggaccatgtccccgcggcagcggcgactccggagtggggactcggctggacggcggcggctggagggaaccagtgggcgcggagcgcgtgctggatttccaagaactttccaggaa

SEQ ID NO: 203472 - DNA, 120 bp, Artificial Sequence
  ENSG00000114739_0 (sequence is synthesized)
ggctcggctccgtggccgccgctcaggagccattttggactcggttcagctcccctcccccccacccctccccccgttcatggcccctccggactcggcccctgcgcccggggcccgggc

SEQ ID NO: 203473 - DNA, 120 bp, Artificial Sequence
  ENSG00000114739_1 (sequence is synthesized)
agcccggccccgccgaccggcccttggagcccgaacgctgctcggggacgaaggcgcaggaagcgcgcagggaacgagaccgaaggaaggagcgggaaggagagcgcagccgccgcctgg

SEQ ID NO: 203474 - DNA, 120 bp, Artificial Sequence
  ENSG00000114739_2 (sequence is synthesized)
gctccgggtgtgcgcggggcggcgccgcggaacatgacggcgccctgggtggccctcgccctcctctggggatcgctgtgcgccggctctgggcgtggggaggctgagacacgggagtgc

SEQ ID NO: 203475 - DNA, 120 bp, Artificial Sequence
  ENSG00000114739_3 (sequence is synthesized)
cgccggctctgggcgtggggaggctgagacacgggagtgcatctactacaacgccaactgggagctggagcgcaccaaccagagcggcctggagcgctgcgaaggcgagcaggacaagcg

SEQ ID NO: 203476 - DNA, 120 bp, Artificial Sequence
  ENSG00000114739_4 (sequence is synthesized)
gctgcactgctacgcctcctggcgcaacagctctggcaccatcgagctcgtgaagaagggctgctggctagatgacttcaactgctacgataggcaggagtgtgtggccactgaggagaa

SEQ ID NO: 203477 - DNA, 120 bp, Artificial Sequence
  ENSG00000114739_5 (sequence is synthesized)
cccccaggtgtacttctgctgctgtgaaggcaacttctgcaacgaacgcttcactcatttgccagaggctgggggcccggaagtcacgtacgagccacccccgacagcccccaccctgct

SEQ ID NO: 203478 - DNA, 120 bp, Artificial Sequence
  ENSG00000114739_6 (sequence is synthesized)
cacggtgctggcctactcactgctgcccatcgggggcctttccctcatcgtcctgctggccttttggatgtaccggcatcgcaagcccccctacggtcatgtggacatccatgaggaccc

SEQ ID NO: 203479 - DNA, 120 bp, Artificial Sequence
  ENSG00000114739_7 (sequence is synthesized)
tgggcctccaccaccatcccctctggtgggcctgaagccactgcagctgctggagatcaaggctcgggggcgctttggctgtgtctggaaggcccagctcatgaatgactttgtagctgt

SEQ ID NO: 203480 - DNA, 120 bp, Artificial Sequence
  ENSG00000114739_8 (sequence is synthesized)
caagatcttcccactccaggacaagcagtcgtggcagagtgaacgggagatcttcagcacacctggcatgaagcacgagaacctgctacagttcattgctgccgagaagcgaggctccaa

SEQ ID NO: 203481 - DNA, 120 bp, Artificial Sequence
  ENSG00000114739_9 (sequence is synthesized)
cctcgaagtagagctgtggctcatcacggccttccatgacaagggctccctcacggattacctcaaggggaacatcatcacatggaacgaactgtgtcatgtagcagagacgatgtcacg

SEQ ID NO: 203482 - DNA, 120 bp, Artificial Sequence
  ENSG00000114739_10 (sequence is synthesized)
aggcctctcatacctgcatgaggatgtgccctggtgccgtggcgagggccacaagccgtctattgcccacagggactttaaaagtaagaatgtattgctgaagagcgacctcacagccgt

SEQ ID NO: 203483 - DNA, 120 bp, Artificial Sequence
  ENSG00000114739_11 (sequence is synthesized)
gctggctgactttggcttggctgttcgatttgagccagggaaacctccaggggacacccacggacaggtaggcacgagacggtacatggctcctgaggtgctcgagggagccatcaactt

SEQ ID NO: 203484 - DNA, 120 bp, Artificial Sequence
  ENSG00000114739_12 (sequence is synthesized)
ccagagagatgccttcctgcgcattgacatgtatgccatggggttggtgctgtgggagcttgtgtctcgctgcaaggctgcagacggacccgtggatgagtacatgctgccctttgagga

SEQ ID NO: 203485 - DNA, 120 bp, Artificial Sequence
  ENSG00000114739_13 (sequence is synthesized)
agagattggccagcacccttcgttggaggagctgcaggaggtggtggtgcacaagaagatgaggcccaccattaaagatcactggttgaaacacccgggcctggcccagctttgtgtgac

SEQ ID NO: 203486 - DNA, 120 bp, Artificial Sequence
  ENSG00000114739_14 (sequence is synthesized)
catcgaggagtgctgggaccatgatgcagaggctcgcttgtccgcgggctgtgtggaggagcgggtgtccctgattcggaggtcggtcaacggcactacctcggactgtctcgtttccct

SEQ ID NO: 203487 - DNA, 120 bp, Artificial Sequence
  ENSG00000114739_15 (sequence is synthesized)
ggtgacctctgtcaccaatgtggacctgccccctaaagagtcaagcatctaagcccaggacatgagtgtctgtccagactcagtggatctgaagaaaaaaggaaaaaaagttgtgttttg

SEQ ID NO: 203488 - DNA, 120 bp, Artificial Sequence
  ENSG00000114739_16 (sequence is synthesized)
ggaaaaaaagttgtgttttgttttggaaatcccataaaaccaacaaacacataaaatgcagctgctattttaccttgactttttattattattattataattattataattattattatt

SEQ ID NO: 203489 - DNA, 120 bp, Artificial Sequence
  ENSG00000114739_17 (sequence is synthesized)
atcagtttttaccagcatattgctctactgtatcacaaacagcggacacgtcagcaggcgttgaggtgctgagctgtggatgcagaaccagcgccatgctgaagagcctcagccacctcc

SEQ ID NO: 203490 - DNA, 120 bp, Artificial Sequence
  ENSG00000114739_18 (sequence is synthesized)
tgtcctttgggattcgtttttcccgctttctctttgtttgtcgtctcagaatctgtgacacaaagaaacccatctcctgtcttaggaaacctaatgctgcaaactctacctagaggaacc

SEQ ID NO: 203491 - DNA, 120 bp, Artificial Sequence
  ENSG00000114739_19 (sequence is synthesized)
tttgaagactgttacataagaacataccttcctcagaagaggagtttcctctgccctctgcccttctcccctgcctccctccctcccctccttttattttgttttagtgagcttaagaaa

SEQ ID NO: 203492 - DNA, 120 bp, Artificial Sequence
  ENSG00000114739_20 (sequence is synthesized)
cagcagatgtgtctttcacggatctaacgggtgttgtcctgatcgagaaaaaaactgggatgagaatggtttggactggagttggaaggggaggacggtactgggggtagggtttggaac

SEQ ID NO: 203493 - DNA, 120 bp, Artificial Sequence
  ENSG00000114739_21 (sequence is synthesized)
agagctacactggactcgggcacattcggagcagcatcctttagtatggaggctacttctcaggtaaccaggaattgaggggaaggaccttgtggaggccgagcattaacagcaagagcg

SEQ ID NO: 203494 - DNA, 120 bp, Artificial Sequence
  ENSG00000114739_22 (sequence is synthesized)
gggtttggagaaagtctgagattgggtgcagccctgacttacctgctggccctgaccagtttcttttcactaacttggccttgggcataggatgaaacattttttctgccctaattttaa

SEQ ID NO: 203495 - DNA, 120 bp, Artificial Sequence
  ENSG00000114739_23 (sequence is synthesized)
aactaggtgagggtagaatcatcacaggttaggaatacattcttcataagacacgatgctgtaaatacccttaatggacgaaaagttgaaatacttttgtttcctcttggagcagttcag

SEQ ID NO: 203496 - DNA, 120 bp, Artificial Sequence
  ENSG00000114739_24 (sequence is synthesized)
ggaaatgcccacaggggattgtcctgcacagatagggcaagaggatttcctgggtggagtctgccaaggcctgcctcgctggggaccccagagtcctgcacctctggttccgccccaggt

SEQ ID NO: 203497 - DNA, 120 bp, Artificial Sequence
  ENSG00000114739_25 (sequence is synthesized)
ggtgacattactgtccccgttctgtggctcgtggacaagactttctccagaccccttaaagtggtacatattctaaaaaactgtttttctattatgccataaccttgctctagtcagtga

SEQ ID NO: 203498 - DNA, 120 bp, Artificial Sequence
  ENSG00000114739_26 (sequence is synthesized)
atgttcctaatgctgctgtttcaacatttgaattctttttaatttatgaaacatgctaaattttttttttcaaacaaaacacacacatccacatatacacatgcttcgctatgtggcttc

SEQ ID NO: 203499 - DNA, 120 bp, Artificial Sequence
  ENSG00000114739_27 (sequence is synthesized)
caaggtttaaattttgaaaagtaaaagaattaaaacttcacgaccacagatcacctcaaaccagaaatacctcagaattttctacttatgtaaggtttattatatattttgttagttgtg

SEQ ID NO: 203500 - DNA, 120 bp, Artificial Sequence
  ENSG00000114739_28 (sequence is synthesized)
ttgtcttgtagtaagtatattttaatgtaagttggcttttgtgacaaggaagtttaaaagaaatagagaaaaagaaaaaagtttgcatcttctagggagtgctaccatttttgtttgata

SEQ ID NO: 203501 - DNA, 120 bp, Artificial Sequence
  ENSG00000114739_29 (sequence is synthesized)
acgcccccttgtaaataattgtcatcaactgtaggttggctgtctgggccaagtctgggcatttatcagtcttgtttgtgaaggcttttccttctggtttctttagatcattttatttaa

SEQ ID NO: 203502 - DNA, 120 bp, Artificial Sequence
  ENSG00000114739_30 (sequence is synthesized)
aaacagtgcatctcttcatcgtgagggtaggcaaggcgggggccgtggggagaggttgacctgggtgagaactgaagaggccgcctcctcttgggttgtttggagcttcacatgtaattc

SEQ ID NO: 203503 - DNA, 120 bp, Artificial Sequence
  ENSG00000114739_31 (sequence is synthesized)
acatgtaacatgtaacttgatcggtcagtgttcagaatgacaagtaaccccgcttaaacttggtagaaggatggcccttagacctgaatggggtgattttacttgggatttaacttcttc

SEQ ID NO: 203504 - DNA, 120 bp, Artificial Sequence
  ENSG00000114739_32 (sequence is synthesized)
agcaaattaacagcaacgttggaagagatctgtggcgcctctgtgaagcacaccgtgactcaggccagtcttttagtgcagcgtgtctgggagtgaagggttttgcccttgctggtcttg

SEQ ID NO: 203505 - DNA, 120 bp, Artificial Sequence
  ENSG00000114739_33 (sequence is synthesized)
gagtccacagtgtgaggggcactgcacatgcctgggcatctacctagtgtgctatgttcagtgtctggggcttactgccccggggtcctttcctctgggtgttggggcacagggtgctat

SEQ ID NO: 203506 - DNA, 120 bp, Artificial Sequence
  ENSG00000114739_34 (sequence is synthesized)
gggaggcccatttgcttccctctcggagctcagtttttgcttcatgggtcaaaatgtgggctggccaagtggttacaggaacagggtttcggtaagctatgttgtctttttttttttttt

SEQ ID NO: 203507 - DNA, 120 bp, Artificial Sequence
  ENSG00000114739_35 (sequence is synthesized)
tttttttttttttaatggtttgattttgtgctgtggtattttttttcccttagaataatttttaatggcaaaacaggccttacagcagttgcttttctttaccatttatttctttaagaa

SEQ ID NO: 203508 - DNA, 120 bp, Artificial Sequence
  ENSG00000114739_36 (sequence is synthesized)
gctttaaaatatttattgaaaagtgccatatctaatttctttagctttcgcctcaggcagtgcaggcatctttacttttcatcctcagaagaaacaaacgactaacaaatgtagcaaatt

SEQ ID NO: 203509 - DNA, 120 bp, Artificial Sequence
  ENSG00000114739_37 (sequence is synthesized)
tactgcaggaatagttaggtcatgatactacctgaacactaaaccccagcctctttgtttggttttagttcctctgggtggtttttcttttgtgtgctggcttgattcttgtgagaagtt

SEQ ID NO: 203510 - DNA, 120 bp, Artificial Sequence
  ENSG00000114739_38 (sequence is synthesized)
ttgacctggccaagggagggttgagccatggttctggtgtgggactttgcggtcaagacacagtacagacaggtcaggcctgcgtgccttttctctgggtggcctccccgttaggcccac

SEQ ID NO: 203511 - DNA, 120 bp, Artificial Sequence
  ENSG00000114739_39 (sequence is synthesized)
cgtacgctcagccactatagtgtccctgtggggccttgccatcagattgtgtgtcaggagatggtacctttttggtgtggctggggaggagtgtggtccatgccagttctttgggcttca

SEQ ID NO: 203512 - DNA, 120 bp, Artificial Sequence
  ENSG00000114739_40 (sequence is synthesized)
ggccactcttcccctcatgctgtggtgtaaagtgcacccatcaggtggtatatctggttctgatggcaagaagaaggtgggggatctccttatagggcatgggtctaggagcacagatgg

SEQ ID NO: 203513 - DNA, 120 bp, Artificial Sequence
  ENSG00000114739_41 (sequence is synthesized)
gccttttgccccgggtaaatgcttgtctgtttgctgtcatgtgttctttgaggagtgagccatctcgagccctgctttgaatttactgggtcatagagcctctgcctgtgctcttttcca

SEQ ID NO: 203514 - DNA, 120 bp, Artificial Sequence
  ENSG00000114739_42 (sequence is synthesized)
taatgacttcatgtgacatgcacttttggtgggctcagataattggtttctttttgtttttgacctcaggctctgtggcagactggggaaaatggggcctggcatcattttccctgtcaa

SEQ ID NO: 203515 - DNA, 120 bp, Artificial Sequence
  ENSG00000114739_43 (sequence is synthesized)
tgggaggggctgttccatgcagggtgggaggggaccaagttagcagagagtagccaaggatccttgcttcttcctttctagtgtgctgtcatccaagcaggctcctggctgtagggatgg

SEQ ID NO: 203516 - DNA, 120 bp, Artificial Sequence
  ENSG00000114739_44 (sequence is synthesized)
gccttggggaagaatcttctttgaaagcatctatgataactgagaagtcatccctagttggagaaatccagtaatgagcagaaggaggaagcaagtgaggacagaggccattgtattaca

SEQ ID NO: 203517 - DNA, 120 bp, Artificial Sequence
  ENSG00000114739_45 (sequence is synthesized)
gtgtcacgcagagggccctcaatgatggggcattggggaaggctgtagacatagtcatcagaacatcctggcctggcataagctgggttttctcctgggaccattggtcctcagcaggag

SEQ ID NO: 203518 - DNA, 120 bp, Artificial Sequence
  ENSG00000114739_46 (sequence is synthesized)
ttctttgcatgagttgctcaggggcaagggctgcaagtgggctgtgcttaggagaaagtgacacctggcagtgagggaagatggtgagcattattagcctttgttgtccagcatggcctt

SEQ ID NO: 203519 - DNA, 120 bp, Artificial Sequence
  ENSG00000114739_47 (sequence is synthesized)
cttgtcctgtctgctctggagaggagcctgtgggaccagtcctgcctggggagggcatacccacacgtgccagctgattctgactctgaatacatcatgtccggacttgggggtgtttct

SEQ ID NO: 203520 - DNA, 120 bp, Artificial Sequence
  ENSG00000114739_48 (sequence is synthesized)
cagccttgaacatcttcaggaggatagagactcttgctcacatattcttagcaaagggaagggtctctcatctccaggccacagagatagttcttccattgccctaagaggctaggctaa

SEQ ID NO: 203521 - DNA, 120 bp, Artificial Sequence
  ENSG00000114739_49 (sequence is synthesized)
ccctcttgacataacttagacagcaaagcacttcatcctgtagttgggctctgtcacctttctcttcagttggccacattctcgtttcctccatcctgctatgctttgtgtgctcgggct

SEQ ID NO: 203522 - DNA, 120 bp, Artificial Sequence
  ENSG00000114739_50 (sequence is synthesized)
gtgtgtggggtttttccctggtggaaggaagcccagctgtgtattgaatgtccttcatgtgttgtgtgtggctcagaaagcctgtcacttggcccctgtgctctgagccgtgagggtggg

SEQ ID NO: 203523 - DNA, 120 bp, Artificial Sequence
  ENSG00000114739_51 (sequence is synthesized)
gaggtggctgttccattaaagtgggagtattggatggccctcttgaaactagaattttgccttttttagtatgcagtataaagtttccagcatctattggtaacacaaagatttgctggt

SEQ ID NO: 203524 - DNA, 120 bp, Artificial Sequence
  ENSG00000114739_52 (sequence is synthesized)
ttttaaaataatacagtaagcataagtatgtaagtttttagaattggtactagaagttggacagctagttattctcgagaactttatttcactagaaaaatatactaattggaaagcagt

SEQ ID NO: 203525 - DNA, 120 bp, Artificial Sequence
  ENSG00000114739_53 (sequence is synthesized)
ttccaggagttaactcagtttaattttcagtctcagttattttagcctgttgagtttttgatggcacacctttggagagatggccacgcctgattcccatttcaggggcatcagaccata

SEQ ID NO: 203526 - DNA, 120 bp, Artificial Sequence
  ENSG00000114739_54 (sequence is synthesized)
cctttttaagaagctccgtgaatctagtcatctacccttcatcctgggcgaacagccaaaaagagaaggggacaaggtgtctttttctccttctcactggggtgacatgaattcttttag

SEQ ID NO: 203527 - DNA, 120 bp, Artificial Sequence
  ENSG00000114739_55 (sequence is synthesized)
ttaatggctgtttgcaaattctaaactaatgaaatacttagcagctaacatgttcaatctagtaatgatgagtttaaatctcaattgacagtaatgttttagataaacaggcccagtaat

SEQ ID NO: 203528 - DNA, 120 bp, Artificial Sequence
  ENSG00000114739_56 (sequence is synthesized)
tcagttgatgaactgtatatcttctcagtctagatttgtaaatgtttaatgaattcagggttataagcatagttctttaagtaagattccagatagttgatttgcaaccagcagtctacc

SEQ ID NO: 203529 - DNA, 120 bp, Artificial Sequence
  ENSG00000114739_57 (sequence is synthesized)
tatgaatgtatcccaaacctttagaagattggaaaagatttttgaaataatgatttagttttgtaggaaaaacacccccttgaaaattaattcggttgacccagtaacattttttaaaac

SEQ ID NO: 203530 - DNA, 120 bp, Artificial Sequence
  ENSG00000114739_58 (sequence is synthesized)
aattggtggctccaaaaggcctgccaacaaagaaaagtccaaattatctagtgggacattttgaatgttttatgtttattttgggtccactgtaaactttggttcaaaaaagaatttgaa

SEQ ID NO: 203531 - DNA, 120 bp, Artificial Sequence
  ENSG00000114739_59 (sequence is synthesized)
tttaaagaatttaccattatttaaattattaccaagtttttacattttcatgatggtattttccaggtatgaatgaaacatgactttttgattgtggtacttcctgtatcccctgtagtg

SEQ ID NO: 203532 - DNA, 120 bp, Artificial Sequence
  ENSG00000114739_60 (sequence is synthesized)
ccaaaaccagtgatactttatttgctcctatggcagctcatagaggtaaccgaagtgatttttcctcagtaattgaaacacatattctctaaatgccaatgtgtggtgatgggccctgca

SEQ ID NO: 203533 - DNA, 120 bp, Artificial Sequence
  ENSG00000114739_61 (sequence is synthesized)
ctgccttcatttctctagggcagtgtctttggattgtctagggcctaggtaattctgagaactactgtaaaccaaccacagggcactaaagcaatgtacacaccactctttgtgtgtatg

SEQ ID NO: 203534 - DNA, 120 bp, Artificial Sequence
  ENSG00000114739_62 (sequence is synthesized)
gaaggggttatataaacctgggctatgctggacatctacagaagagtattacattcacttgcaaagtttacatttttgagctcacagttatgaaaaatatgacccacaagtttttcaggc

SEQ ID NO: 203535 - DNA, 120 bp, Artificial Sequence
  ENSG00000114739_63 (sequence is synthesized)
aggtgaggatgggtcttcttgcaaatgcatgagttctgtcttgagtcctgggaacttctctgttggttgagtgtgggctcattccctgactctcctaatcatgtttgcgtcagaatgtta

SEQ ID NO: 203536 - DNA, 120 bp, Artificial Sequence
  ENSG00000114739_64 (sequence is synthesized)
gcattgtaaataaaagaataggttgtataatagatacacaacacttgaaactttactttaaaaaaatcgatagttctacatatatatttagttatatcacttgacagatttcttctacac

SEQ ID NO: 203537 - DNA, 120 bp, Artificial Sequence
  ENSG00000114739_65 (sequence is synthesized)
agtgtggagattgttttataccacagattatttttataaagttagtgaatttgaatgattttgtaatcagagctaatgagctttacctttcaagagaaacgtacactggagcatgagtgg

SEQ ID NO: 203538 - DNA, 120 bp, Artificial Sequence
  ENSG00000114739_66 (sequence is synthesized)
tgtggaacttttacttagtgtttatatggattcttgtgatacactggcagactggagtcaatttgcgggtcttttttggccaaaactccacttgtggttgtgtaggacagtgatattcag

SEQ ID NO: 203539 - DNA, 120 bp, Artificial Sequence
  ENSG00000114739_67 (sequence is synthesized)
ctcagcttcttgtggattgggaggagagagggcctgcaatgtgttttacattggtgcttcctcctgagatttctgttgaacaaagggttctgaggtcaaaaattagtttgtaagcctttg

SEQ ID NO: 203540 - DNA, 120 bp, Artificial Sequence
  ENSG00000114739_68 (sequence is synthesized)
ccataggacatagtcatgtgagagtgtttgggggaacagaaattgtataggggtgcctattggggtgggatgggactcgaataagattcaggtacaaaaactttgaaatgagaatctggt

SEQ ID NO: 203541 - DNA, 120 bp, Artificial Sequence
  ENSG00000114739_69 (sequence is synthesized)
ggtttgagtaatccaccagactgaattatctaagatcacattatccaggttggggggcagaattacccagttaagtaattgttcagaaaagtggggagggtggcatgtggatgcagtgat

SEQ ID NO: 203542 - DNA, 120 bp, Artificial Sequence
  ENSG00000114739_70 (sequence is synthesized)
ccaattaaatggagagctgccaggcacattttgtcctctctggtcagtgagaatggttgggttggctcgctgcttcaatctgtggaatcagccaggagcccagtgaggaagctcagaacc

SEQ ID NO: 203543 - DNA, 120 bp, Artificial Sequence
  ENSG00000114739_71 (sequence is synthesized)
ccagtaacagcagagcatctttcagatagctccagagttttcctgcttttctgaggaagctcagcatcactgccacaatacggaaagtggtcttcattttagcctatttatttttaggca

SEQ ID NO: 203544 - DNA, 120 bp, Artificial Sequence
  ENSG00000114739_72 (sequence is synthesized)
gagagtggatggttatttgtgtgggacttttggtggcgatatataatgaataattaagttaatttctggtatgcataatggccagtcctgaggcccagctgaagacctgtcccccagacc

SEQ ID NO: 203545 - DNA, 120 bp, Artificial Sequence
  ENSG00000114739_73 (sequence is synthesized)
ctgcccgctggcttcaggctgctgcttctagacagaggtgcactggacgggatagttttatcaagagaatccctaatgtgtcattttaaaccagctgtgctttttattcattctggttga

SEQ ID NO: 203546 - DNA, 120 bp, Artificial Sequence
  ENSG00000114739_74 (sequence is synthesized)
gcgtataggtttacactttaccctttttatacttggaataaatttagttccagcagatctagtagcactccagaaaccaaccccatctgttccccataaaaagaacattttctctgctct

SEQ ID NO: 203547 - DNA, 120 bp, Artificial Sequence
  ENSG00000114739_75 (sequence is synthesized)
ccagccacgtgtcttggaatgtaattctgttgtgcctttgtttttatcactctcttcgccccaaaagcaactgctgtaagcttttttctacttgtcttttctagtccccaacctctacct

SEQ ID NO: 203548 - DNA, 120 bp, Artificial Sequence
  ENSG00000114739_76 (sequence is synthesized)
ttttcctttttcccagccctaatttctggatgcacttctgtgatccaggtattttaagaaccagttacctcagacctcatgttgaacagtgtcgccatctgggtcctcttgatactgcag

SEQ ID NO: 203549 - DNA, 120 bp, Artificial Sequence
  ENSG00000114739_77 (sequence is synthesized)
acttttaacgtacacatgcaggaaccctgctgagcgtgggcacttgttttaaagcaaaactcttcccaaggactgaagaaagggcttctggcaagctcgtcatggcattgtggtgggatg

SEQ ID NO: 203550 - DNA, 120 bp, Artificial Sequence
  ENSG00000114739_78 (sequence is synthesized)
ggtctagagtgtcatctgaatggtgcttcctgtgttcctctttgaattctgccattttcagtattcttgtgtgtctgaataggcaaagcgatttaattggctggtcttgcacgcaaatta

SEQ ID NO: 203551 - DNA, 120 bp, Artificial Sequence
  ENSG00000114739_79 (sequence is synthesized)
gttccaaagataagctctttgtaacacatttccagtcgctaatgctcaaatgtagaacattcctttaaatggcaggataaaaaacccactatccaccatagtgcattttgggaagatgtc

SEQ ID NO: 203552 - DNA, 120 bp, Artificial Sequence
  ENSG00000114739_80 (sequence is synthesized)
tgtagcatatgttgctgtgaaattaggccttgtgggatatggctgtttgtcattttgatgtattttaaataaatatatatattttttaaagagccttttttaccagttcaaaaagtttaa

SEQ ID NO: 203553 - DNA, 120 bp, Artificial Sequence
  ENSG00000114739_81 (sequence is synthesized)
ttaaccagcagtcaccgcatctgaatttttgtctctggggcatagatggcagaccaagattaaaagtggtaactcagctatacgagcatgggctaccttcctgggctctcctgcagtcct

SEQ ID NO: 203554 - DNA, 120 bp, Artificial Sequence
  ENSG00000114739_82 (sequence is synthesized)
gtagacctgctgttccgcagaccatgggacacaaggtcagtgtgttcccagtgagggtcccaagtcagtcatcttaagtgtttgttctctgccccattcagtggactgttgacttcagtc

SEQ ID NO: 203555 - DNA, 120 bp, Artificial Sequence
  ENSG00000114739_83 (sequence is synthesized)
cctgcaagtgctttagcccgagtggggttttctcagagcactgccacgagttaagtgtgtgtttagccaaataatttctccgtaagggaaaaatgcagtcacccaaattttaccaacaat

SEQ ID NO: 203556 - DNA, 120 bp, Artificial Sequence
  ENSG00000114739_84 (sequence is synthesized)
gacagagatgagagtagaaaagattaggcaacatctgagttttaacttgaaaagtgtccaagtcatcatgaaaggccgactgggagcaagtgattattagagattcttcaggagacctca

SEQ ID NO: 203557 - DNA, 120 bp, Artificial Sequence
  ENSG00000114739_85 (sequence is synthesized)
tctgaaaatgttaagactgccagtgagggaaggaattgttaaaatgccagcggcttttttttcctctttttttctgtaattctgtaaaaatgcagagaaagttgagtggtacttcagaat

SEQ ID NO: 203558 - DNA, 120 bp, Artificial Sequence
  ENSG00000114739_86 (sequence is synthesized)
tgagggagagggttaccgcagagtagaaatatatttctagatttcagttccacaccacaaatccacaacaatgccatttttcaactgtacaaaaatctgcttatgaactggacatgatct

SEQ ID NO: 203559 - DNA, 120 bp, Artificial Sequence
  ENSG00000114739_87 (sequence is synthesized)
taatggtagtgtcaaaggccaagtttttcacctgttaatatttttccacatttgtccttgaatctgaataactttatacagtactgtaaatttaacttacatcgagtttgttgtcaattc

SEQ ID NO: 203560 - DNA, 120 bp, Artificial Sequence
  ENSG00000114739_88 (sequence is synthesized)
ttatgaaaagagctttctgcatgtaacacatacggttaaagaacacagcaaaggacaaaatttgcaggaacagttttggaaccaacagaaaatgtcaccttttatttgccatcttatata

SEQ ID NO: 203561 - DNA, 120 bp, Artificial Sequence
  ENSG00000114739_89 (sequence is synthesized)
tatctatcagttttaccagctacttctaaatttgtacattatttgtaagggaaagaaggaaaaccctaagacttgtctaacttagtggagaatgtgtgtgttgggcttaggatggatagc

SEQ ID NO: 203562 - DNA, 120 bp, Artificial Sequence
  ENSG00000114739_90 (sequence is synthesized)
taagtcttattgagctgtgttacctaacttgtatataaaaattgtaattaaaagtttgggttcacctgtttctcacagtttaaaatgatgagtaattgcaaactctggaaatgtgactag

SEQ ID NO: 203563 - DNA, 120 bp, Artificial Sequence
  ENSG00000114739_91 (sequence is synthesized)
tatatgatttaaggctgtagaagcaaggaagctctttcaagtgctaaaactaaagacttctagtttttggctcaaataagtactgtttgtataccaggatatgtgagatgtaaatgtagt

SEQ ID NO: 203564 - DNA, 120 bp, Artificial Sequence
  ENSG00000114739_92 (sequence is synthesized)
aggtcacttttcacccttgtagctataaaataaaaattttgtagaacagaaatagcttgtactactgaattaacaaaagttatactaaagtatcatgtttaaaaaaaatatatatatata

SEQ ID NO: 203565 - DNA, 120 bp, Artificial Sequence
  ENSG00000114739_93 (sequence is synthesized)
agtatcatgtttaaaaaaaatatatatatatatacagagttaagcttgttgctgttaccctgtctggatttgaaaagtgtgctgatttatatatatatattacacacacacacacacaca

SEQ ID NO: 203566 - DNA, 120 bp, Artificial Sequence
  ENSG00000114739_94 (sequence is synthesized)
cacacacacacacacacacacatacacctaaaatggcctaaagcagacatccatgtaattacagttgcaaaatgaaaacattttggaaagaacattgtatcatagttcattcatttgcag

SEQ ID NO: 203567 - DNA, 120 bp, Artificial Sequence
  ENSG00000114739_95 (sequence is synthesized)
tggatctttgttcctttttactgtggtaattttagaaatgagtgtcaagtttgaaattagatctgctaagttggggttttgctgcttgaactctgcactgggtcctcaaataaaccgatg

SEQ ID NO: 203568 - DNA, 120 bp, Artificial Sequence
  ENSG00000114739_96 (sequence is synthesized)
tgaatgtagttttttccccctgtgtgaagaagcagttacaccccaacaataggaggaaaaatctagaactatttcaagttttatctttttgtatatgaaaataaaataataataaaacaa

SEQ ID NO: 203569 - DNA, 120 bp, Artificial Sequence
  ENSG00000114739_97 (sequence is synthesized)
ttaaaaggcagaggtggcctgtggttggagtattgccagaggctataaatagctgagtgtgtgaagaaggagagtctggggaagagagaggaatgggggaggcccctgggtctccaggtg

SEQ ID NO: 203570 - DNA, 120 bp, Artificial Sequence
  ENSG00000114739_98 (sequence is synthesized)
gcagcagagccctgtggtgagggaggggcatgggctctgaacataaagctcttgtaggcatggtgtgacttgatgggctgggagtcatacaggggacttgtgttatgagggattgtcata

SEQ ID NO: 203571 - DNA, 120 bp, Artificial Sequence
  ENSG00000114739_99 (sequence is synthesized)
ggcagtaggggatggttgtggctgtaatatagccaatgtgccaggcagtgttctaaccactcttaaagtgcattaactcaattagttcctacaactaccctagctgtgaagtattggagt

SEQ ID NO: 203572 - DNA, 120 bp, Artificial Sequence
  ENSG00000114739_100 (sequence is synthesized)
aggacttgaagtctggcccgctcacggctgccatttttcgctgggttgcctgtaggaggatctggtcagatgggggtcaggtgacatctttttgaaatggagtcttgctcttgttgccca

SEQ ID NO: 203573 - DNA, 120 bp, Artificial Sequence
  ENSG00000114739_101 (sequence is synthesized)
gccaccgtgcctggcccagctgacatcttgaacccttgggtcctctgagatttggaactcccagcctcttcacttgggtactgcccatggtagtggcaagtgggtggtccctgacttatc

SEQ ID NO: 203574 - DNA, 120 bp, Artificial Sequence
  ENSG00000114739_102 (sequence is synthesized)
agtggcctggagagaggaggttactctgttggcctcccttgtttgggctcctgcctcagcacagaggcttgttgcttgtctgaatggagatggaaactctttgaggacctagggcttggg

SEQ ID NO: 203575 - DNA, 120 bp, Artificial Sequence
  ENSG00000114739_103 (sequence is synthesized)
ctgcaggctgaggccatccttgttgtcccctcctttcgacatgttgctctagccatgatacctatacccttctgtccttctgtctgtccacccatccatctatgatgtgtttggaatgat

SEQ ID NO: 203576 - DNA, 120 bp, Artificial Sequence
  ENSG00000114739_104 (sequence is synthesized)
tctgccacttaggacggcaagggtcctgcctttgtcggctttccagtcttgtggggaaagcctgacatttagaaagtagttgtcgagtacatgtgtaatgttttatttctcatacaagtg

SEQ ID NO: 203577 - DNA, 120 bp, Artificial Sequence
  ENSG00000114739_105 (sequence is synthesized)
ttcattgtgttatttcctcttgagattatttttggttatattattggtacactttttggatgtctgaaataatcctttaagcaacaacaggccattagtcaagggtggttaagttaggtg

SEQ ID NO: 203578 - DNA, 120 bp, Artificial Sequence
  ENSG00000114739_106 (sequence is synthesized)
gcaggggaagcacaagggccagtggaaatagagagtttgcctggtctcaggggagagggaagagccgaaatcagaggaaggtgggtaaccttacggccagaggtggtaacttccgactta

SEQ ID NO: 203579 - DNA, 120 bp, Artificial Sequence
  ENSG00000114739_107 (sequence is synthesized)
cgctaagcctagaagccaaacacattcaagggtgtgacattatggtgtggctgcagtgaggggaggaaggtaggggagtgcccagcttccctgtctgcagtgcagcttcatggctggccc

SEQ ID NO: 203580 - DNA, 120 bp, Artificial Sequence
  ENSG00000114739_108 (sequence is synthesized)
cacaagtctcaggtctccacggacccccactagaactgctgccgtggatgcagtggggcccagcctggggagaggaggccctgtggcctctgggcagggtgcttcgaataacccagtaat

SEQ ID NO: 203581 - DNA, 120 bp, Artificial Sequence
  ENSG00000114739_109 (sequence is synthesized)
tgggtgctgctgcaggcagacagggacaatgtaggtgcaagcctcagtcctggccccggtgtgcttgttcagcctttggtctactacccccaccccaccctctcaggttctccctctaaa

SEQ ID NO: 203582 - DNA, 120 bp, Artificial Sequence
  ENSG00000114739_110 (sequence is synthesized)
ccttaaagccacatgcttgatgaagggcctggctggggaagccagtgtgtacccttgtaagcctctctgtggaccctgaggcccttcctttagaagaggctgagtcccagctgactgact

SEQ ID NO: 203583 - DNA, 120 bp, Artificial Sequence
  ENSG00000114739_111 (sequence is synthesized)
ggtcaggaggccatgcattttcctttcacaggtgtcagagcctaggccacctggtgcaggatgaccagagctgtggctgggcactgccattctgattgggtgacatttcggacccttagg

SEQ ID NO: 203584 - DNA, 120 bp, Artificial Sequence
  ENSG00000114739_112 (sequence is synthesized)
tgctacctggatccttgagattcgttgcttgctcctgcccctggaagaagcatcctgtcacttcagggagttgcagaaaggggttgggtttgacaggagaatggccgctccagtggtggg

SEQ ID NO: 203585 - DNA, 120 bp, Artificial Sequence
  ENSG00000114739_113 (sequence is synthesized)
gggcttctttcacctgacagccagtcagtatccttctctctggggtataccctgggaaatcaagctctttcctcatgaaggccaacagtaggggtggagatgagcgtgaggatgtcctta

SEQ ID NO: 203586 - DNA, 120 bp, Artificial Sequence
  ENSG00000114739_114 (sequence is synthesized)
ggctacgctagtgttcagggtactttgccctcccccagggtcagggcagggttcgtgttctttcctactccagtcagcctttcaggctgatggcgaagtagggctcttggctgctggtgg

SEQ ID NO: 203587 - DNA, 120 bp, Artificial Sequence
  ENSG00000114739_115 (sequence is synthesized)
gctggctgtctggtgggattgactctgacccctccctccttcctgggatgggaatagtggtaggagaagaccagccaggagtggtgccaggtcactggcctatgtgggcccaaaaagtgt

SEQ ID NO: 203588 - DNA, 120 bp, Artificial Sequence
  ENSG00000114739_116 (sequence is synthesized)
ggataggatggctggatgcttggtgcaactatcctctcgggtgtctgtgtggggttctggcagtgaggttgtaaatgccaccacctgcctccattgtgggcggcctataatggggtgctg

SEQ ID NO: 203589 - DNA, 120 bp, Artificial Sequence
  ENSG00000114739_117 (sequence is synthesized)
agactggggctgggactggaggttgttttgtaggggatggtgaggaagatggatttggggaatgtttgaaatcaagtttgaaggaaagtgtttgaatgggcaggtgggggttgaagtcgt

SEQ ID NO: 203590 - DNA, 120 bp, Artificial Sequence
  ENSG00000114739_118 (sequence is synthesized)
tgtccacctggatggcacttcctgcagcaggtggaagggggttcagaagtgatggggagtgccctggggtcatcaggagcctagccaggagaatgatctgtgattgcaggttaagccacc

SEQ ID NO: 203591 - DNA, 120 bp, Artificial Sequence
  ENSG00000114739_119 (sequence is synthesized)
agctagctctcctctgcctgaggcatgtattccccttggtgactctgggaggcttaccctgtacacgcaggcctcattccttaagttctccagccctgccgagcaccaggtgtggttgct

SEQ ID NO: 203592 - DNA, 120 bp, Artificial Sequence
  ENSG00000114739_120 (sequence is synthesized)
gggtgtagaaaggacacttacagggtcctttccattccgtatgggcagggagttgtggaggacccactggcatggtctccctggggaactgttgtgagaagggggcttgggggcagagac

SEQ ID NO: 203593 - DNA, 120 bp, Artificial Sequence
  ENSG00000114739_121 (sequence is synthesized)
aggagcagcaggaagccactcccctttgtagttttcccaggtggtccttgagatctttatcacaatcacctgagacagacaggggtgattaaaagcacatattctgcccccattcccatt

SEQ ID NO: 203594 - DNA, 120 bp, Artificial Sequence
  ENSG00000114739_122 (sequence is synthesized)
gggatgggtctggattgggcctggaaatacgtatttgaatgaacactgctcccctttcccacacctgcaacatacagtgattccgatgtgcactggggttttaagggggcctcttcatcg

SEQ ID NO: 203595 - DNA, 120 bp, Artificial Sequence
  ENSG00000114739_123 (sequence is synthesized)
gtttctgctgcagcagggaagtagcccccacccccacgcaggagcctcaggtgttggtgccctttctgtgcatctggactctgtctgtctggctgtttatccatccttctgtggcattag

SEQ ID NO: 203596 - DNA, 120 bp, Artificial Sequence
  ENSG00000114739_124 (sequence is synthesized)
gtttcctgcctcctcccttttgcttaggcctaggggcagctgtgatgggctgcagaatgaggtgggggctggtgccagctggcacacgtaaattaagaggtgtgggacggatgggtggcc

SEQ ID NO: 203597 - DNA, 120 bp, Artificial Sequence
  ENSG00000114739_125 (sequence is synthesized)
tacgtccaggggtgagtgcaggaggttggtgaccccaacccaccacccggcctccctccctcagggtggcctggcacccaggactgggagtaggggtttgggtggtggtcccaggggcat

SEQ ID NO: 203598 - DNA, 120 bp, Artificial Sequence
  ENSG00000114742_0 (sequence is synthesized)
aacatgcaagatggcggcccatcaccggcagaacacagcagggcggaggaaagtgcaggtttcctatgttattcgagatgaagtggagaagtacaaccgaaatggagtcaatgctctgca

SEQ ID NO: 203599 - DNA, 120 bp, Artificial Sequence
  ENSG00000114742_1 (sequence is synthesized)
gctggatccagcactaaatagacttttcacagccggtcgagactctatcataagaatatggagtgtcaatcagcacaagcaagatccatatatagcatctatggaacaccatactgattg

SEQ ID NO: 203600 - DNA, 120 bp, Artificial Sequence
  ENSG00000114742_2 (sequence is synthesized)
ggtaaacgacattgtactctgttgtaatgggaaaacattaatatctgcttcttctgacacgacagtaaaagtatggaatgcacacaagggattttgcatgtcaacattaaggacacataa

SEQ ID NO: 203601 - DNA, 120 bp, Artificial Sequence
  ENSG00000114742_3 (sequence is synthesized)
ggattacgtaaaggccttagcatatgccaaggataaagaactagtagcatcagctgggttggacagacaaatattcctttgggatgtgaatactctaacagcattgactgcctcaaataa

SEQ ID NO: 203602 - DNA, 120 bp, Artificial Sequence
  ENSG00000114742_4 (sequence is synthesized)
cactgtcacaacttcttctttaagtggaaacaaagattccatttatagcctggccatgaatcaactgggaacaatcattgtatcagggtccactgaaaaggtgttacgggtatgggatcc

SEQ ID NO: 203603 - DNA, 120 bp, Artificial Sequence
  ENSG00000114742_5 (sequence is synthesized)
aagaacatgtgcaaaactaatgaagcttaaagggcacacggataatgtgaaggcattgctattaaacagagatggcacgcaatgcctgtcaggcagttctgatgggacaattcgcctttg

SEQ ID NO: 203604 - DNA, 120 bp, Artificial Sequence
  ENSG00000114742_6 (sequence is synthesized)
gtcccttggccagcagagatgtatagcaacataccgagtccatgatgaaggtgtttgggcgctgcaagtcaatgatgccttcacacatgtgtattctggtggaagggacaggaagattta

SEQ ID NO: 203605 - DNA, 120 bp, Artificial Sequence
  ENSG00000114742_7 (sequence is synthesized)
ttgtacagacctaagaaaccctgacattcgggtgctaatttgtgaagaaaaagcaccagttctcaagatggagcttgatagatcagctgatcctcctcctgcaatttgggttgcaacaac

SEQ ID NO: 203606 - DNA, 120 bp, Artificial Sequence
  ENSG00000114742_8 (sequence is synthesized)
taagtctacagtaaataaatggactttgaaaggaattcataattttagagcctctggagattatgacaatgactgtacaaatcctataacacctctttgtacacaacctgaccaggttat

SEQ ID NO: 203607 - DNA, 120 bp, Artificial Sequence
  ENSG00000114742_9 (sequence is synthesized)
taaagggggtgctagtattattcagtgccacattcttaatgataagagacatatattaaccaaagataccaataataatgtggcatattgggatgtattgaaggcatgtaaagttgaaga

SEQ ID NO: 203608 - DNA, 120 bp, Artificial Sequence
  ENSG00000114742_10 (sequence is synthesized)
tctgggcaaagtggattttgaagatgaaattaagaaaagatttaaaatggtgtatgtgccaaattggttctcagtagacttaaaaacagggatgttaactattactttggatgaaagtga

SEQ ID NO: 203609 - DNA, 120 bp, Artificial Sequence
  ENSG00000114742_11 (sequence is synthesized)
ttgttttgctgcctgggtttctgcaaaagatgctggtttcagcagccctgatgggtcagatccaaaattgaatttaggaggacttttactccaagcactcctggaatattggcctagaac

SEQ ID NO: 203610 - DNA, 120 bp, Artificial Sequence
  ENSG00000114742_12 (sequence is synthesized)
acatgtgaatccaatggatgaagaggaaaatgaagtaaaccatgtaaatggggagcaggagaaccgagtgcagaagggaaatggatattttcaagtgcccccacatacacccgtgatctt

SEQ ID NO: 203611 - DNA, 120 bp, Artificial Sequence
  ENSG00000114742_13 (sequence is synthesized)
tggtgaagctggaggtcgcacactgttcaggctgctctgccgagattccgggggtgagactgagtctatgcttcttaatgaaacagtgccacaatgggtaattgacatcactgtggataa

SEQ ID NO: 203612 - DNA, 120 bp, Artificial Sequence
  ENSG00000114742_14 (sequence is synthesized)
aaatatgcccaaattcaacaaaattcctttctacctccaacctcatgcatcttcaggagcaaaaaccttaaaaaaagatagactctctgctagtgacatgctccaagtccgaaaagttat

SEQ ID NO: 203613 - DNA, 120 bp, Artificial Sequence
  ENSG00000114742_15 (sequence is synthesized)
ggaacatgtttatgaaaaaattatcaacttggataatgagtctcaaaccactagctcttctaataatgaaaaaccaggagaacaggaaaaagaagaagatattgctgtgttggcagagga

SEQ ID NO: 203614 - DNA, 120 bp, Artificial Sequence
  ENSG00000114742_16 (sequence is synthesized)
ttgaacttttgtgccaggaccaggttttggatccaaatatggaccttcgaacagtgaaacacttcatatggaagagcggtggagacctcaccctccattaccgtcagaagtccacgtgaa

SEQ ID NO: 203615 - DNA, 120 bp, Artificial Sequence
  ENSG00000114742_17 (sequence is synthesized)
ggctgggctaatgctcctggatattcatttacgaccttcctctatggccccaagagtagtcctaggaagcccactgatccccaacgggagcaagacttctaacggctgattggtatggac

SEQ ID NO: 203616 - DNA, 120 bp, Artificial Sequence
  ENSG00000114742_18 (sequence is synthesized)
cgagattatctttcaattgaagtgactaatcgagatgtaatatagaaaccagtctccatgtgtagattaagctgtccccagggaagcagagtgcaagagcagaagagccccaagcagact

SEQ ID NO: 203617 - DNA, 120 bp, Artificial Sequence
  ENSG00000114742_19 (sequence is synthesized)
atgtctttcaagatgtacagaagactgacaacaggccagtgcagactttgcttcctccttttgtttcaaaggaccttatctacccattaacacttgttagagacacctcagtcgggccac

SEQ ID NO: 203618 - DNA, 120 bp, Artificial Sequence
  ENSG00000114742_20 (sequence is synthesized)
aactgtctctgtttcaactttaagcccacacactctgtagcttttctaaaacagtacattccattcatgcagtagatatgaaggctttttccaagtttgtcatataaagtaatcaaattg

SEQ ID NO: 203619 - DNA, 120 bp, Artificial Sequence
  ENSG00000114742_21 (sequence is synthesized)
ttttcaccgtttaagacagttatttttaatgggaatttgctgttgcacaatttgagaaccagcccatttcataataaaagattaatgttgggcttgttgttaatattgcatctcagatgt

SEQ ID NO: 203620 - DNA, 120 bp, Artificial Sequence
  ENSG00000114742_22 (sequence is synthesized)
gttcttgtaggaagatctgttgaaattccaggtgctggatcatagcacttggactgttgggccggagtttgtgcagcccatgcctagcgatgctgcacctcccatgatgtcctggctttg

SEQ ID NO: 203621 - DNA, 120 bp, Artificial Sequence
  ENSG00000114742_23 (sequence is synthesized)
tggcaaccccagggaggtgcagcagtttcactccttcctccactgtgtccagttttatttacacaaagcgagctgagaccacaggttcttgctctggatgagcagcatgacaccatcaaa

SEQ ID NO: 203622 - DNA, 120 bp, Artificial Sequence
  ENSG00000114742_24 (sequence is synthesized)
atttaagaccatgatgaaatttcagtttcattcaaatgttacctaaaatttatggtgtcagaataaagggagatcatagtgagttaatttgatattcatatcctggaagtatacatattt

SEQ ID NO: 203623 - DNA, 120 bp, Artificial Sequence
  ENSG00000114742_25 (sequence is synthesized)
gtttttccaaagttttatatgcaggtttttgttgtacctgtatccagatcttcttttcactgttctaacaatctaacactttcatagaatcatttggatcttgtatagagtgtaacttat

SEQ ID NO: 203624 - DNA, 120 bp, Artificial Sequence
  ENSG00000114742_26 (sequence is synthesized)
tggggataaacacttcaacttttggcagaaaatactttggattctccccaaggtcatttgtattcagagtaaatcagtggtccacccccataaaactgtaagacaagcctcctgtatgaa

SEQ ID NO: 203625 - DNA, 120 bp, Artificial Sequence
  ENSG00000114742_27 (sequence is synthesized)
gccagaagcacaagtgccttcagagggcagttgattccagtccagttgcctccctagcttgtgtgtggcctgcctccaccatagcagggactagggagggaggcagggaacgttttttct

SEQ ID NO: 203626 - DNA, 120 bp, Artificial Sequence
  ENSG00000114742_28 (sequence is synthesized)
tttctacatcttcacaggttcggctgggggcagctgataggcctaaggccataccttactatttaagatactctgatcgcacaactgcagagacagggttccctcactgctagtcagctt

SEQ ID NO: 203627 - DNA, 120 bp, Artificial Sequence
  ENSG00000114742_29 (sequence is synthesized)
cttttggaaactggacaggccattgccacctgcactttgaagaagtgagcaaagacgtggccacatttctaataagttgaaatggtctttctcccttcctcagagagcaaccagcttctt

SEQ ID NO: 203628 - DNA, 120 bp, Artificial Sequence
  ENSG00000114742_30 (sequence is synthesized)
tttttttaaaagtcctttctatctgttggatacaacagtgtgcttttggtgcacattttttagcaatagttgtgaattaatggcaaagaaaaaaaaaattatttaccagccctcagttgt

SEQ ID NO: 203629 - DNA, 120 bp, Artificial Sequence
  ENSG00000114742_31 (sequence is synthesized)
gtttgcccgaggggcctttgagcaaagaaatgggttttgctgggtcattttgccctgtgtgctaagccttgggtggctgcattcccctcctgtcatagatctgacccccagcatgattgt

SEQ ID NO: 203630 - DNA, 120 bp, Artificial Sequence
  ENSG00000114742_32 (sequence is synthesized)
atttctttcccctccagtcaaaccgtaatacagtttccagaaaattcgacagtctgcaatgccaaaagggtaaaaatctgtatttcacagttgtatagaataaaggctttagttaaaata

SEQ ID NO: 203631 - DNA, 120 bp, Artificial Sequence
  ENSG00000114742_33 (sequence is synthesized)
attctgagcccgggattgcttgtcgccgctcttctgtaggagtggacttgcggggtcgggataggctcgttccccgcccacttgcctcccccttgccctgtctttcttcgaagcgctctg

SEQ ID NO: 203632 - DNA, 120 bp, Artificial Sequence
  ENSG00000114742_34 (sequence is synthesized)
ccctcgctgcgtcggagccgaggcctccaggggtttcccaggggggtgggcgttggaggagtgagcggcttgtgcgggggcgtggcgaggcggcggagcgccaacggccctgcggggttt

SEQ ID NO: 203633 - DNA, 120 bp, Artificial Sequence
  ENSG00000114742_35 (sequence is synthesized)
catcttccccaagcattcattcttgcccattcactccctatccttcctcccagaggtaacaactattaataaattaatgcatagccttcagtacttttttctttgcatacaagcatatat

SEQ ID NO: 203634 - DNA, 120 bp, Artificial Sequence
  ENSG00000114742_36 (sequence is synthesized)
tatttgtgtacatagatgtgtctacagttcattttatattgcacaaaatctcttatactgttctgcaacttttttttcacctaaaaaaatgtatcctggacatcttttcatgtctgtaca

SEQ ID NO: 203635 - DNA, 120 bp, Artificial Sequence
  ENSG00000114742_37 (sequence is synthesized)
tcttttcatgtctgtacatgtgaatcattcctttttaatgactgtgtaagattctactgtataaatgtaccataatttatttaatcagtcccctattaatggacatttaggttgtttcca

SEQ ID NO: 203636 - DNA, 120 bp, Artificial Sequence
  ENSG00000114742_38 (sequence is synthesized)
atgttttctattacaaatagtgctgcagtgaacatccttgtacatatatctttgtgtgctttttaggataaattcctagaagtggaattgctggatccaaggttatgcacattttaaatt

SEQ ID NO: 203637 - DNA, 120 bp, Artificial Sequence
  ENSG00000114742_39 (sequence is synthesized)
ttgatagatactgccaaattgccctccacaaaggctgtagtagtctacattctcaccaacagtgtatgagtgcccatttccccacacctgcaccaacactggatacttctaatctttgct

SEQ ID NO: 203638 - DNA, 120 bp, Artificial Sequence
  ENSG00000114742_40 (sequence is synthesized)
aaaaaataggcaaatagtatctcattatttttatgtggattaaaaacaaattaatagtgaggttaagcatcttttcatattggccatttgtttttcttctgtgaattacctgtttgtatt

SEQ ID NO: 203639 - DNA, 120 bp, Artificial Sequence
  ENSG00000114742_41 (sequence is synthesized)
ctttacccatttttctattgggtcatttttcttactgatttgtggggtggtggtttatattgaatattaaccctttaactattatctgtgtctcaattaaattttcactttgttcctttt

SEQ ID NO: 203640 - DNA, 120 bp, Artificial Sequence
  ENSG00000114742_42 (sequence is synthesized)
gccaggtgaaaagttttactttttatataatcaaattgatccttgatggctcttagtttcatgtcttgtttaggtatttcctactccaaagtaacaaaaatattctcctatattctcttc

SEQ ID NO: 203641 - DNA, 120 bp, Artificial Sequence
  ENSG00000114742_43 (sequence is synthesized)
tagttcttttatgataattatgtctagctctctaatctattagaatttagtcttctgtttggtgtgaagtaggatttagactttttccaaagggacagctagtgtgctagcacaatttat

SEQ ID NO: 203642 - DNA, 120 bp, Artificial Sequence
  ENSG00000114742_44 (sequence is synthesized)
tgaaaatctgtcctttttctacttatctgggatgctatgtttatcatgtactaaatttctgtatacacatgggtctgcttctagactctcttatgtactgttggtctattttgtatcttt

SEQ ID NO: 203643 - DNA, 120 bp, Artificial Sequence
  ENSG00000114742_45 (sequence is synthesized)
ctaaagccatatgaaaaggaatttaatctttagaaccttcagaaactttattttctgtcccggatatacctctaagacttaaagccaatgtgacacctgatggatattccatggtcttct

SEQ ID NO: 203644 - DNA, 120 bp, Artificial Sequence
  ENSG00000114742_46 (sequence is synthesized)
ctatgcctgagcaccccataagccactaatttctttgagtgtgaaactcacctgggacgcattgctgactttagccctgtggcttattcttgagaggagacatccagacaggatgtgaca

SEQ ID NO: 203645 - DNA, 120 bp, Artificial Sequence
  ENSG00000114742_47 (sequence is synthesized)
tgaaggcttggaggggattaataccctgagaaaagatgaccacgtaattttatccttcatctaagaatgtggtttacttcatggtagacatctgggttcttggctgaagtttccactctt

SEQ ID NO: 203646 - DNA, 120 bp, Artificial Sequence
  ENSG00000114742_48 (sequence is synthesized)
tcttaacacctcagacctcactgtgatgtcagagggaaagaaaatgggaggactttgattggccttttcagttggatgatgggcctcaccagcacagaatgtgtggctttgctcaaaggt

SEQ ID NO: 203647 - DNA, 120 bp, Artificial Sequence
  ENSG00000114742_49 (sequence is synthesized)
gaatgctgtgggtttctctcaagacacttaagtttttgtttgggcctttaggtatcaactccaatattttaatgtagaattgagattctggtttgtatggcttaaaaaattaaagtttgt

SEQ ID NO: 203648 - DNA, 120 bp, Artificial Sequence
  ENSG00000114742_50 (sequence is synthesized)
ttccctttaataccttgtactgttatctaagaagagccatgctacaatttcatattacctctaatgttacatatatttttctgatgaattttctcgaaggctgacttaggtaatttgata

SEQ ID NO: 203649 - DNA, 120 bp, Artificial Sequence
  ENSG00000114742_51 (sequence is synthesized)
gcttactatacatttcatagaaagtcacttttaattgtaagataattattacttgcaagtcatgttttcctattaacattattttcatttatcaactaatagaaactgttataccttttt

SEQ ID NO: 203650 - DNA, 120 bp, Artificial Sequence
  ENSG00000114742_52 (sequence is synthesized)
gcttctacttttagaggggctctaaggagccctgggcctctcctacctaaagcccaccctaaagctcctctttactgctggggagattttcagagaagggatacatagacaaatgtggat

SEQ ID NO: 203651 - DNA, 120 bp, Artificial Sequence
  ENSG00000114742_53 (sequence is synthesized)
gtgctggtagcttttttttctgacaagaaaaaagacacatggtcttcttgatttgcaaaaagcatgtgccatgtttatgatttagagtgaaggtgtgcggagaaatggcagaactgtttt

SEQ ID NO: 203652 - DNA, 120 bp, Artificial Sequence
  ENSG00000114742_54 (sequence is synthesized)
ttaaatcaagatgcactcaaaacgtatcctcagaggaatggctgaaagatggcctggtgtttctggcatagtcacaaaagatgtacatctcactaagctcaatttcattcccgcatgcat

SEQ ID NO: 203653 - DNA, 120 bp, Artificial Sequence
  ENSG00000114742_55 (sequence is synthesized)
ggaagccgtgacagcaagaattggataccaggcataggggaggagtgagcaagctggatcacctgatgagagtccctgagttaatgataaggttttagatattagagactttgaaatttt

SEQ ID NO: 203654 - DNA, 120 bp, Artificial Sequence
  ENSG00000114742_56 (sequence is synthesized)
cggttgatgtagtggttgttgaggttttcttgtttgttttttgactttatttttcttgccactttaaacaggctggcaaagcttgtagagcataacatgatcaaataacaaattttgtaa

SEQ ID NO: 203655 - DNA, 120 bp, Artificial Sequence
  ENSG00000114742_57 (sequence is synthesized)
atccaatggatgaagaggaaaatgaagtaaaccatgctggttgaggaatcattgagtcccatcgactgaggcttactctgctgaagattctctgctggccaccaggagtgagcaacaatg

SEQ ID NO: 203656 - DNA, 120 bp, Artificial Sequence
  ENSG00000114742_58 (sequence is synthesized)
atacaggctgtcctagacttccttgtggctgaagtagctggttatgtttttgttctgaatctcaaacattaatctcttttattaaaatcctctaaaatacagtcattttttccatgaaat

SEQ ID NO: 203657 - DNA, 120 bp, Artificial Sequence
  ENSG00000114742_59 (sequence is synthesized)
agaccacaagttgctgtgtttcttattttcagaaatttaacttgtttttaacctttatttctaactctggtggacttagaggacatttgaatttaatcttgcaatgtttgaagcttgtgg

SEQ ID NO: 203658 - DNA, 120 bp, Artificial Sequence
  ENSG00000114744_0 (sequence is synthesized)
gaaggcggggtcggcgctgccgggtgaaatcgtaggacagtgaagatgctgctggaattgtccgaggagcataaggaacacctggccttcctgcctcaagtggacagcgcggtggtcgcc

SEQ ID NO: 203659 - DNA, 120 bp, Artificial Sequence
  ENSG00000114744_1 (sequence is synthesized)
gagtttgggcggattgctgtggaattcctgagacgcggcgcaaacccaaaaatctacgaaggcgccgccagaaaactcaatgtgagtagtgacactgtccagcatggtgtggaaggatta

SEQ ID NO: 203660 - DNA, 120 bp, Artificial Sequence
  ENSG00000114744_2 (sequence is synthesized)
acgtatctcctcactgagagctcaaagctcatgatttctgaactggatttccaagactctgtttttgttctgggattctctgaagaattaaacaaattgttgcttcagctttatctggac

SEQ ID NO: 203661 - DNA, 120 bp, Artificial Sequence
  ENSG00000114744_3 (sequence is synthesized)
aacagaaaagagatcagaacgattctgagtgaattggcaccaagccttcccagttatcataaccttgaatggcgactagatgtacagcttgcaagtagaagtctcaggcaacagattaaa

SEQ ID NO: 203662 - DNA, 120 bp, Artificial Sequence
  ENSG00000114744_4 (sequence is synthesized)
ccagcagtgactataaagctacaccttaatcaaaatggagatcacaacaccaaagttctgcagacagacccagccaccctgctccatttggttcaacaactggaacaagcattggaagag

SEQ ID NO: 203663 - DNA, 120 bp, Artificial Sequence
  ENSG00000114744_5 (sequence is synthesized)
atgaagacaaatcactgtaggagagttgttcgcaacatcaagtagtaccagttttaaggttttaattcatttgaatcacttatgaattgatgatatacagcaattacttttcaaaattaa

SEQ ID NO: 203664 - DNA, 120 bp, Artificial Sequence
  ENSG00000114744_6 (sequence is synthesized)
ttttttattaattcatgatgataaatacatagtattcctcagtatctattccaagatactgaggtcataatcagaagctaagctgggtgcagtggctcatgccagttatcccagcacttt

SEQ ID NO: 203665 - DNA, 120 bp, Artificial Sequence
  ENSG00000114744_7 (sequence is synthesized)
tctcaaaaataataataataataataaagtaaaaataaaaataaaaaagtaatcagaagctaaagtaaagttcctttcctggtgctaactgtggtcttcttgacacattaagatgtattt

SEQ ID NO: 203666 - DNA, 120 bp, Artificial Sequence
  ENSG00000114744_8 (sequence is synthesized)
tgtattttaagagtctcatgctctaccgttggaactagccagatggccattattttgtattttaaatacataaataggattgaatcaactagaaatgaatctatatgttctgtatatatg

SEQ ID NO: 203667 - DNA, 120 bp, Artificial Sequence
  ENSG00000114744_9 (sequence is synthesized)
aatgactatcttgtttttgctacttcttttgactgcttaattttattattttcatctttattgatcaaatttgaaaataaaattcacaatgtaatactactactatgcagaattttctaa

SEQ ID NO: 203668 - DNA, 120 bp, Artificial Sequence
  ENSG00000114744_10 (sequence is synthesized)
acagttcagtatttttgacttttaaaaacaccccacagtgttaatagccacagaatattgaacatcaataggatttttaatgctatattgttataggcagtttattcatttttctttgta

SEQ ID NO: 203669 - DNA, 120 bp, Artificial Sequence
  ENSG00000114744_11 (sequence is synthesized)
tatgaagatgataagtatcatattgcctaagtttgagtgatcatggttaattaattggcttaaatagtactcaaatttgtgtggtcgtatattgtattttatcaaggactaattcttcca

SEQ ID NO: 203670 - DNA, 120 bp, Artificial Sequence
  ENSG00000114744_12 (sequence is synthesized)
ccatacccaaagcatctaggagacactctgtcatttacatttacaaataatggatgcagagaaatataatcaattcttgattgtcctggatacaaattatagtcactttttataatttga

SEQ ID NO: 203671 - DNA, 120 bp, Artificial Sequence
  ENSG00000114744_13 (sequence is synthesized)
tttagtagggaaccaaaagcttttggtctgaaaaactcaggtgctgatttgtcaggtcagcctgagagagtgcagagatactgaggtcagcttagggagaagaattgtatggaagggtgg

SEQ ID NO: 203672 - DNA, 120 bp, Artificial Sequence
  ENSG00000114744_14 (sequence is synthesized)
aaatgagggttcagtcttaactatgtgtccaagaccttatcctgagagtcttcatggaataatctagaaagggctgtagaagcaatcaaactctaaactgcgctctagactttgtcaata

SEQ ID NO: 203673 - DNA, 120 bp, Artificial Sequence
  ENSG00000114744_15 (sequence is synthesized)
ctttgcttcgtaagaattagggattttcatatcagagtgataccatgttgcaatctctttagagaagagagagcctagcagggaataggctagtggaagaaaaacatacttgagatggtt

SEQ ID NO: 203674 - DNA, 120 bp, Artificial Sequence
  ENSG00000114744_16 (sequence is synthesized)
acccattggtccctgcaggcatctgggccacccttttcctgtaggtatatattctgccgttgtgaaacaactatattattagatgtcagcaaactataatcagaaataatttttaattat

SEQ ID NO: 203675 - DNA, 120 bp, Artificial Sequence
  ENSG00000114744_17 (sequence is synthesized)
agtggcaacttgattaatgaagctctcatatacaacctcacaaacaaaaagaaactttattacgtgaaatagtagcatatgtcattgggtttaaaagcaacatgcctgcaaaacatatga

SEQ ID NO: 203676 - DNA, 120 bp, Artificial Sequence
  ENSG00000114744_18 (sequence is synthesized)
taaaaaatacctctgtaagggtttttatttgtccaccttcgatggaaggtaaacatggctgatcccagccaagatgaaacaatagccctttgtctcctcagaacaacctatctccaactc

SEQ ID NO: 203677 - DNA, 120 bp, Artificial Sequence
  ENSG00000114744_19 (sequence is synthesized)
tttgtccactgttcttaccccaattaaaacaagaaagcatgtgctaatccttttttaatttttatcaacctgccttggcctcctttcactgtactccattattccttctgtgatgttcta

SEQ ID NO: 203678 - DNA, 120 bp, Artificial Sequence
  ENSG00000114744_20 (sequence is synthesized)
ccttcttcaccttttgagaccagggtgagttgggagcagtttgcctaccttcttttagaatctggggcttatcttttagtacaagccattgaataagcctcttccttttttttgctcaaa

SEQ ID NO: 203679 - DNA, 120 bp, Artificial Sequence
  ENSG00000114744_21 (sequence is synthesized)
cattccacatccttgtggattcccctgcattgtttgttttatataacatttgatatttgttgtagcttgtatatgaacataattttctttagaggtagtcactgttctctccagtatgac

SEQ ID NO: 203680 - DNA, 120 bp, Artificial Sequence
  ENSG00000114744_22 (sequence is synthesized)
ccaggtttcttgactctgagtaatgcaccttctataactatctaaatttctattgaagctttttggattatgagtatgctgacttttcacgattggctggtgcatgtttagacttaaatg

SEQ ID NO: 203681 - DNA, 120 bp, Artificial Sequence
  ENSG00000114744_23 (sequence is synthesized)
tcatatccttcatgtctcaaagccaaaatagtaacatctcatctcagaacagagctgtgaccacatgccaatatatgtgtcacaaagtctacatatgttacattccttggaagtctcctt

SEQ ID NO: 203682 - DNA, 120 bp, Artificial Sequence
  ENSG00000114744_24 (sequence is synthesized)
aaatgtttcacaaaatgtcaacaagcttgttttgttattgatatttccgagattgggcacatttaagacagtaaacgggaaaggtggtgaagatgctataagaagatgctgtatcttgag

SEQ ID NO: 203683 - DNA, 120 bp, Artificial Sequence
  ENSG00000114744_25 (sequence is synthesized)
aattgaaaaatgagaatctgacatggtttgaaaaatcatgaagggtatatataaaggatgcatgtgtaggagccattaaaattcataacagtatgtgccccttcagcgttttaatcttat

SEQ ID NO: 203684 - DNA, 120 bp, Artificial Sequence
  ENSG00000114744_26 (sequence is synthesized)
gaagtggttaagagataagtcttcggagttggacaaaaggatttgaatttaggttctgtggattattatgggtccttgataaattctcaaagcctttttttttgttcatctctaaaatag

SEQ ID NO: 203685 - DNA, 120 bp, Artificial Sequence
  ENSG00000114744_27 (sequence is synthesized)
gaatataggattacctaccacattgactcgtaaggactatatgagaccatgtatatagaatgtttaacatagtaccaggctttacaaagaactcaataaatgtttaccattattgaaata

SEQ ID NO: 203686 - DNA, 120 bp, Artificial Sequence
  ENSG00000114744_28 (sequence is synthesized)
aatcctgcccgtcccttaagtagctgtgagattgttaaagcttctattaaatcagttttctcatggtaaaatgtacataataccaccttactttcagaaatactgaaaagtgttttgtat

SEQ ID NO: 203687 - DNA, 120 bp, Artificial Sequence
  ENSG00000114744_29 (sequence is synthesized)
aaatataccaaagtctgtggaatagctgggtcaactgtaaattgcaagtatttggttatcattattagttgttcagatatccgcttttgctaaaaaaaaaaaaaaaagtgttgttttacc

SEQ ID NO: 203688 - DNA, 120 bp, Artificial Sequence
  ENSG00000114744_30 (sequence is synthesized)
cctgggtaagaggcagtctctgggattaagtcaatccctgtcgagttcctcttctgccagacttgaaggagctacgtattcaagagaagggctacgcacctgatactagtctccacagtt

SEQ ID NO: 203689 - DNA, 120 bp, Artificial Sequence
  ENSG00000114744_31 (sequence is synthesized)
tgcattttgttaaggttacttggtgggaaataccaaaggcatttggctgggagtggaatgacaaggagcaggagcctctggccaacttactgtttttcatgcagtgtttgaaaacatgta

SEQ ID NO: 203690 - DNA, 120 bp, Artificial Sequence
  ENSG00000114744_32 (sequence is synthesized)
ataatgaatagtgtttatttttaaatacaaatatgaacaagataaatactacagtagtaatttatttgctcgtttttacttttctttctcaggaaaactcaatgtgagtagtgacactgt

SEQ ID NO: 203691 - DNA, 120 bp, Artificial Sequence
  ENSG00000114744_33 (sequence is synthesized)
ccttgaatggcgactagatgtacagatgtagaaaagtgcacaggtcaatgtaccgctcaatgaattatcacatggtgcatttaactgtgactcacaccccagaagcatcctccttgcctc

SEQ ID NO: 203692 - DNA, 120 bp, Artificial Sequence
  ENSG00000114744_34 (sequence is synthesized)
tgtcctgtttattgtattctttaccaccttaactaagatgcggtttgaaactttgtttttttaatgttcatttttaagccatttcacaaatcattcattttcttttattttcagtgtgtt

SEQ ID NO: 203693 - DNA, 120 bp, Artificial Sequence
  ENSG00000114745_0 (sequence is synthesized)
agatgggagggaggctgttgcaggctctcaggggggagagatggtgctggttctgggctagaagataaaaagataaaaagaaaacccaggagacatcaaggagctggcatttcttgtaga

SEQ ID NO: 203694 - DNA, 120 bp, Artificial Sequence
  ENSG00000114745_1 (sequence is synthesized)
caggattagaagatgagtatagggaagaggtatgagttaaggctaggagattaaatggtgaagccatcaactggggtgggaggcgcaggcgagagtgagctgggtggaagaagggatgat

SEQ ID NO: 203695 - DNA, 120 bp, Artificial Sequence
  ENSG00000114745_2 (sequence is synthesized)
gacaagaagggataatgatagtgattggatgagctggtttggggtagctcaagaaacggggatgctaatttggggctcagggtgcgcagaagccaccggagaagacgcccttgccagggg

SEQ ID NO: 203696 - DNA, 120 bp, Artificial Sequence
  ENSG00000114745_3 (sequence is synthesized)
gagtggggcaagaaaaggcaggaccgcctgatataactgaggacagcgaagggtggcaggagagtagcagggcagacggtctctgggtcaggggcggggagtcacgagggagccctcgga

SEQ ID NO: 203697 - DNA, 120 bp, Artificial Sequence
  ENSG00000114745_4 (sequence is synthesized)
cagcgcccgggccacgcaccataagggaggagtcattgctgctcatctcgggccgctcgcggctccgagtccgggtctggtggggcggtgcagagcgggattcccgaggcagggtcgtgg

SEQ ID NO: 203698 - DNA, 120 bp, Artificial Sequence
  ENSG00000114745_5 (sequence is synthesized)
gcactctatcgcggcgggcggttgaaggcgttacagtccttggaaaccgagctgctagccggttgctaggagcgtccagtgtctggagtgggaggaacaaaacgcctcacgtcacaaggc

SEQ ID NO: 203699 - DNA, 120 bp, Artificial Sequence
  ENSG00000114745_6 (sequence is synthesized)
gcaggaatcgagcgccgagagagcgagtcggtgctactggcgtcgggtcggtccgggtaggcgcagcgggactggacctgggtgccgagcggagccgctgccatgggcctgggcgtcagc

SEQ ID NO: 203700 - DNA, 120 bp, Artificial Sequence
  ENSG00000114745_7 (sequence is synthesized)
gctgagcagcccgcaggcggcgccgagggcttccacctccacggggtgcaggagaactccccagcccagcaggcgggcctggagccctactttgacttcatcatcaccattgggcactcg

SEQ ID NO: 203701 - DNA, 120 bp, Artificial Sequence
  ENSG00000114745_8 (sequence is synthesized)
aggctgaacaaggagaatgacaccctgaaggcactactgaaagccaatgtggagaagcccgtgaagctggaggtgttcaatatgaagaccatgagggtgcgcgaggtggaggtggtgccc

SEQ ID NO: 203702 - DNA, 120 bp, Artificial Sequence
  ENSG00000114745_9 (sequence is synthesized)
agcaacatgtggggcggccagggcctactgggtgccagtgtgcgcttctgcagcttccgcagggccagtgagcaggtgtggcatgtgctggatgtggaaccatcttcacctgctgccctt

SEQ ID NO: 203703 - DNA, 120 bp, Artificial Sequence
  ENSG00000114745_10 (sequence is synthesized)
gccggcctgcgcccctacacagactatgtggttggttcggaccagattctccaggagtccgaggacttctttacgctcatcgagtctcatgaggggaagcccttgaagctgatggtgtat

SEQ ID NO: 203704 - DNA, 120 bp, Artificial Sequence
  ENSG00000114745_11 (sequence is synthesized)
aactccaagtcagactcctgccgggaggtgactgtaactcccaacgcagcctggggtggagagggcagtctgggatgtggcattggctatgggtatctacaccggatcccaactcagccc

SEQ ID NO: 203705 - DNA, 120 bp, Artificial Sequence
  ENSG00000114745_12 (sequence is synthesized)
cccagctaccacaagaagccacctggcaccccaccaccttctgctctaccacttggtgccccaccacctgatgctctaccacctggacccacccccgaggactctccttccctggagaca

SEQ ID NO: 203706 - DNA, 120 bp, Artificial Sequence
  ENSG00000114745_13 (sequence is synthesized)
ggttccaggcagagtgactacatggaggccctgctgcaggcacctggctcctccatggaggatccccttcctgggcctgggagtcccagccacagtgctccagaccctgatggacttccc

SEQ ID NO: 203707 - DNA, 120 bp, Artificial Sequence
  ENSG00000114745_14 (sequence is synthesized)
catttcatggagactcctcttcagcccccacctccagtgcagcgagttatggacccaggcttcctggacgtgtcgggaatttctctcttggacaacagcaatgccagtgtgtggcccagc

SEQ ID NO: 203708 - DNA, 120 bp, Artificial Sequence
  ENSG00000114745_15 (sequence is synthesized)
gccctcttccacagaactgaccaccacagctgtctcaacctcagggccagaggacatctgctccagcagcagttctcatgagcggggtggtgaggctacatggtctgggtcagagtttga

SEQ ID NO: 203709 - DNA, 120 bp, Artificial Sequence
  ENSG00000114745_16 (sequence is synthesized)
ggtctccttcctggacagcccaggtgcccaagcccaggcggaccacctgcctcagctgactcttcctgacagtctcacctctgcagcctcaccagaagatgggctgtccgccgagctgct

SEQ ID NO: 203710 - DNA, 120 bp, Artificial Sequence
  ENSG00000114745_17 (sequence is synthesized)
tgaagctcaggctgaggaggaaccagcaagcacagagggcctagatactgggacggaggctgaggggctggacagccaggcccagatctctaccacagaataacaccctgggctgtgaca

SEQ ID NO: 203711 - DNA, 120 bp, Artificial Sequence
  ENSG00000114745_18 (sequence is synthesized)
aggcccatgatgacatttcatgaggcccagatgtgggcaggcagcccgggctgcactatgcggtcaggattccttgctgctttggtgggacatgaggcctcagtgggtggtgagaggggg

SEQ ID NO: 203712 - DNA, 120 bp, Artificial Sequence
  ENSG00000114745_19 (sequence is synthesized)
ccatgggccttgtgggaggatatcttttggccgtgtaccctcaggtccagtgcttggtcctgctctggtcactggggcttcccaggaggcagcagggtctggtcataatccagtgtgaag

SEQ ID NO: 203713 - DNA, 120 bp, Artificial Sequence
  ENSG00000114745_20 (sequence is synthesized)
atgaggtgaggaaggaaggggttgctgtccagtgttggcctggtcgctttgattcttcctgcacagctcagcccaccccatctgtactggaagggaccctggagccctgggaccaccccc

SEQ ID NO: 203714 - DNA, 120 bp, Artificial Sequence
  ENSG00000114745_21 (sequence is synthesized)
tttcaagtcccaaacactgagtcctctgtcatgtgtccttgtccctaggctacaatgctacacttggctcaggctgatcaccatgctagtcacaggagggagagagaggcagtgtacttg

SEQ ID NO: 203715 - DNA, 120 bp, Artificial Sequence
  ENSG00000114745_22 (sequence is synthesized)
cccccatctcctggagggaggtgcgttggaaattctaggcccttcagcagagacccatttgtgcccagaccacaatatttcttcttcctcagggactacatgccacagacctgtatcccc

SEQ ID NO: 203716 - DNA, 120 bp, Artificial Sequence
  ENSG00000114745_23 (sequence is synthesized)
agtggcaactcctgttagctcccaaacttaaacagtgatctcttctaaatatacaaggcatctacccagccccaatagtgaataaaagtcacaaatttaagttcaacaccctaagcaatt

SEQ ID NO: 203717 - DNA, 120 bp, Artificial Sequence
  ENSG00000114745_24 (sequence is synthesized)
tctcaaagccagtctacctgactaggtctatccacgcacggttcccaaccccaagggggaattaggggattagattaagagtaggtaaagacccttttgttctttcctgttgtaggggag

SEQ ID NO: 203718 - DNA, 120 bp, Artificial Sequence
  ENSG00000114745_25 (sequence is synthesized)
gaagctgttctccccaccccaggtgcctttggaggttaaggctaggttaggccctgcactccacctggggacggcccctcatcacctgaagtcctctgctgtgttgactggaccctcagt

SEQ ID NO: 203719 - DNA, 120 bp, Artificial Sequence
  ENSG00000114745_26 (sequence is synthesized)
tcccacactgctaattactatgaaagctgctctggcctcgtcttctagcttgtgcctagttgaaagtctcacctttacaggatcatttgtaatgctggtgtacatgcagggaactcacaa

SEQ ID NO: 203720 - DNA, 120 bp, Artificial Sequence
  ENSG00000114745_27 (sequence is synthesized)
gctgtgtcaggtatgcaggacaaggaatgtctgctctggggggcacaggccaactatatggagggagggtcccaaattagcaaacccttcatttaaagcaaacccttgtcaagcctacca

SEQ ID NO: 203721 - DNA, 120 bp, Artificial Sequence
  ENSG00000114745_28 (sequence is synthesized)
gagcagctgatacgtgtgcataacagtgaggcattgtgtcctggatcgtctgggagcccagtgtcaagtctgctggaatgcaggaagtagaacagaatcgccacaggactgttctggggc

SEQ ID NO: 203722 - DNA, 120 bp, Artificial Sequence
  ENSG00000114745_29 (sequence is synthesized)
cagcttcccttaactctgtagcctggcagtctgacccaaagttgccctcacccaaaggttctggctcttccctccctcacttttactttcccttcccccataagttggaggataaaatgg

SEQ ID NO: 203723 - DNA, 120 bp, Artificial Sequence
  ENSG00000114745_30 (sequence is synthesized)
gtatcaatgctaatatttccagggagaacatgaaaccagaggtttctttctttctctgtaatctgctatgaaagaaaataacaaatgaaaataaatgtgtactacactttgaaatatttt

SEQ ID NO: 203724 - DNA, 120 bp, Artificial Sequence
  ENSG00000114745_31 (sequence is synthesized)
gtaactcccaacgcagcctggggtggagagggcaggtacttcgtggggttggagggctgcagggccaggtgggtggggcctgaccattgggcatggacctcagagttctatggtggagat

SEQ ID NO: 203725 - DNA, 120 bp, Artificial Sequence
  ENSG00000114745_32 (sequence is synthesized)
cggtgggagcctcctgggagaggcggcctcgcgggactcccggaccctggctagtccgcggccgcggtcgggcccagcgcccgccccaagtgccagcagtgccggaagcggagcgttttc

SEQ ID NO: 203726 - DNA, 120 bp, Artificial Sequence
  ENSG00000114745_33 (sequence is synthesized)
ctggtccggccgccgggaatggcgctcctcccgggtgaagaatgcaccactaccagtcgggacgcactcgtgcacttagcacacatttacgctcgcctgccgcgggccgctctccgtgct

SEQ ID NO: 203727 - DNA, 120 bp, Artificial Sequence
  ENSG00000114745_34 (sequence is synthesized)
gggcctgggaagagagtcagccacgccgaggacagtcccgggggccggggttaaccgagtggacgcagctgcgggggagcccgtcggcgcgcgtcctgccagtcgtagggtgcaggagaa

SEQ ID NO: 203728 - DNA, 120 bp, Artificial Sequence
  ENSG00000114745_35 (sequence is synthesized)
gtcccacagggggccccagtctacccttccctccctttttttctaaagggagtcccagccctgtctccccttcttccagggctgtactcagagcctgactggggccctgcccagtgctca

SEQ ID NO: 203729 - DNA, 120 bp, Artificial Sequence
  ENSG00000114745_36 (sequence is synthesized)
gcttctgagctctgtggggtggacagaggacatatggcctcttggaggtggcaacaaggcccaaggggcctgcctcctggggcatgagggatatgagggccctggccaaggggcagctca

SEQ ID NO: 203730 - DNA, 120 bp, Artificial Sequence
  ENSG00000114745_37 (sequence is synthesized)
gtatacagatggggagtctgtagtccagagaagagaggtagcctccttcaggtcacacagcaaattggacacagagcagagtctatgcctactgccactgtgctattcacatgatgacca

SEQ ID NO: 203731 - DNA, 120 bp, Artificial Sequence
  ENSG00000114745_38 (sequence is synthesized)
actccaggcccctttctttcctcagaaacaggcagtgtgggaacctctttgaggttgggtgaggggtatcaccaggggctgaggagattacagtctcacaggctgggccagatgccctag

SEQ ID NO: 203732 - DNA, 120 bp, Artificial Sequence
  ENSG00000114745_39 (sequence is synthesized)
gggatcctgaggctgaccggtatttcagaagtacccttttcagcccccttattgctggtagtaggtggggatagcaaaggtagggagggccgtgggacaagcccctggattgaatgtttc

SEQ ID NO: 203733 - DNA, 120 bp, Artificial Sequence
  ENSG00000114745_40 (sequence is synthesized)
gcagcccgcaggcggcgccgagggcttccacctccacggggatgtggaaccatcttcacctgctgcccttgccggcctgcgcccctacacagactatgtggttggttcggaccagattct

SEQ ID NO: 203734 - DNA, 120 bp, Artificial Sequence
  ENSG00000114745_41 (sequence is synthesized)
gagggggtacatgcaggagtggagtgggagccttggagcagtggccagggaagactgagggcaggatgtggtctcattccagtgtcccagagagggcagctcattactacctgaacagtg

SEQ ID NO: 203735 - DNA, 120 bp, Artificial Sequence
  ENSG00000114745_42 (sequence is synthesized)
agaagggtgctgtccatgagaagtgtctggttttgttgaggctttagccctggaagcaggcctcaggtgctatgcgtttctcacagtccgaggacttctttacgctcatcgagtctcatg

SEQ ID NO: 203736 - DNA, 120 bp, Artificial Sequence
  ENSG00000114745_43 (sequence is synthesized)
actaccttggcccatccccacagtgaccctgctgagggctgctgcccactaaggcccttgccccatctcaggcccagacttgtctgagggtcctagcctgggcatgaggtggccttggag

SEQ ID NO: 203737 - DNA, 120 bp, Artificial Sequence
  ENSG00000114745_44 (sequence is synthesized)
ttcatggagactcctcttcagcccccacctccagtgcagcgagttatggacccaggtactgggcaggccctggagaggagtgggccccaggcttggggctggactttggcagctatgtca

SEQ ID NO: 203738 - DNA, 120 bp, Artificial Sequence
  ENSG00000114745_45 (sequence is synthesized)
aaactttccccaggccttgctgacccctcatatctcatgtataccaagatatttaatagttgcatatcatccaatctagtatacagatggggagtctgtagtccagagaagagaggtagc

SEQ ID NO: 203739 - DNA, 120 bp, Artificial Sequence
  ENSG00000114745_46 (sequence is synthesized)
ggaaggtagcaagaggccatggagtgaaccctgagaatgtccggaacagttcatgccagacatgtgttctggctggcacactgggagtgctgatggttcctgaaatgggggagagggcta

SEQ ID NO: 203740 - DNA, 120 bp, Artificial Sequence
  ENSG00000114745_47 (sequence is synthesized)
ctcagcaaccctatcattaggtactgtgtatcttacttttaattgtggggaaactgaggctaggagaggttcaataatgtgtttatagtcatatagctgggcagctggagccaggggttg

SEQ ID NO: 203741 - DNA, 120 bp, Artificial Sequence
  ENSG00000114745_48 (sequence is synthesized)
agcccggggtcagattccagagcctggtgctgagccttatcatggtactgccctctgctggacaggctgtagacctgggggagataggggaatggaggggtgaaatgagggagtatgggc

SEQ ID NO: 203742 - DNA, 120 bp, Artificial Sequence
  ENSG00000114757_0 (sequence is synthesized)
aggaagcgagaaagagttcggcgaagaaggagtgagttctagagacgccccgcgagcaggacccgcgcctgcaggagagcctggccgacccggctcctcgccttctctgcgcgctctccc

SEQ ID NO: 203743 - DNA, 120 bp, Artificial Sequence
  ENSG00000114757_1 (sequence is synthesized)
gcgtccgctttcagcaccccgagcggagaacagttcccggcagcccgcagcgctgccgagtggccgccggccggccgagtacccggagctccagggggctcaggagcaccctctgagaac

SEQ ID NO: 203744 - DNA, 120 bp, Artificial Sequence
  ENSG00000114757_2 (sequence is synthesized)
ccgctgtgcacccaccttttcccctcttttggtgggcaagtaagcacgggggaaaagcatccggtggcctcagggagccctgaagaaaccgaagcagaatgtaccagggacacatgcaga

SEQ ID NO: 203745 - DNA, 120 bp, Artificial Sequence
  ENSG00000114757_3 (sequence is synthesized)
aaagtaaagaacaaggatatggaaaactaagcagtgatgaagacctcgaaataattgttgatcaaaagcagggaaaaggctctagggcggcagataaggctgttgccatggtgatgaagg

SEQ ID NO: 203746 - DNA, 120 bp, Artificial Sequence
  ENSG00000114757_4 (sequence is synthesized)
agataccgagggaggagtctgctgaagaaaagcccctccttactatgacatcacagctggtgaatgagcaacaagaaagcagacccctcctgagtccctccatcgatgactttctctgtg

SEQ ID NO: 203747 - DNA, 120 bp, Artificial Sequence
  ENSG00000114757_5 (sequence is synthesized)
aaaccaaatcggaagcaatagcaaggccagtaacatccaatacagctgtattgaccactggcttagatctcctcgacctgagtgaaccagtctctcaaacccaaaccaaagccaagaagt

SEQ ID NO: 203748 - DNA, 120 bp, Artificial Sequence
  ENSG00000114757_6 (sequence is synthesized)
cagagccctcatcaaaaacctcatccctcaagaaaaaggccgatggatctgacctcatcagcacggatgctgagcagagaggccagcctctcagagtcccggagacttcatccttagatc

SEQ ID NO: 203749 - DNA, 120 bp, Artificial Sequence
  ENSG00000114757_7 (sequence is synthesized)
tagacattcaaacacaactggaaaaatgggacgatgttaagtttcatggagatcgaaataccaagggacatccaatggcagagagaaaatcatcctcatctagaactggatcaaaagagc

SEQ ID NO: 203750 - DNA, 120 bp, Artificial Sequence
  ENSG00000114757_8 (sequence is synthesized)
tcttatggtcctcagaacacagatctcaaccagaactgagtggtggaaaaagcgccctcaactctgagtcggcttcagaattggaattagtggctccgactcaggctcgactgaccaaag

SEQ ID NO: 203751 - DNA, 120 bp, Artificial Sequence
  ENSG00000114757_9 (sequence is synthesized)
aacatcgctggggaagcgcattactttctagaaaccactccttagaagaagagtttgaaagggcaaaagcagcagtggagtcagatacagagttttgggataagatgcaagcagaatggg

SEQ ID NO: 203752 - DNA, 120 bp, Artificial Sequence
  ENSG00000114757_10 (sequence is synthesized)
aagaaatggctcggaggaactggatatctgagaaccaagaagcccagaaccaagtaaccatctcggctagtgagaagggatattactttcacactgaaaaccccttcaaggactggcctg

SEQ ID NO: 203753 - DNA, 120 bp, Artificial Sequence
  ENSG00000114757_11 (sequence is synthesized)
gagcatttgaagaaggcttaaaaaggctgaaggaaggggatctgccagtcaccatcctgttcatggaagcagcaattcttcaggaccctggagatgcagaggcatggcagttcctcggga

SEQ ID NO: 203754 - DNA, 120 bp, Artificial Sequence
  ENSG00000114757_12 (sequence is synthesized)
taacccaggcggagaatgaaaatgaacaagcagctattgtcgccctccagaggtgcttagaattacagcccaacaacttaaaagctttgatggccttggctgtgagttatactaacactg

SEQ ID NO: 203755 - DNA, 120 bp, Artificial Sequence
  ENSG00000114757_13 (sequence is synthesized)
gccatcagcaggatgcctgtgacgctctgaagaattggattaagcaaaatccaaagtacaaataccttgtgaaaagcaagaagggatctccaggcctcacccggcggatgtctaagtccc

SEQ ID NO: 203756 - DNA, 120 bp, Artificial Sequence
  ENSG00000114757_14 (sequence is synthesized)
cagttgatagctctgttctggaaggggtgaaggaattatatctggaagctgcccaccaaaatggagatatgatcgacccagacctgcagacaggtctaggggttctgttccacctgagtg

SEQ ID NO: 203757 - DNA, 120 bp, Artificial Sequence
  ENSG00000114757_15 (sequence is synthesized)
gagaatttaatagagcaatagatgcatttaacgctgccttaactgttcggccagaggactattcactatggaaccgcctcggggcgaccttggcgaacggagaccgcagcgaggaagccg

SEQ ID NO: 203758 - DNA, 120 bp, Artificial Sequence
  ENSG00000114757_16 (sequence is synthesized)
tggaggcctatacgcgagcactggagattcagccaggattcatccggtccagatacaacctaggaataagctgcatcaacctgggcgcctacagagaagcggtcagcaattttctcactg

SEQ ID NO: 203759 - DNA, 120 bp, Artificial Sequence
  ENSG00000114757_17 (sequence is synthesized)
ccctcagtttgcaaagaaagagcaggaatcagcagcaagttcctcatcctgcaatctctgggaatatctgggctgccctcagaattgcgctctctctgatggaccaaccagaactcttcc

SEQ ID NO: 203760 - DNA, 120 bp, Artificial Sequence
  ENSG00000114757_18 (sequence is synthesized)
aggcggctaatcttggtgacctggatgtcctcttaagagctttcaacttggatccttgaagaaagaataataccagtactaataatccctgatctgtgtgattgtactgaaaaatcaaaa

SEQ ID NO: 203761 - DNA, 120 bp, Artificial Sequence
  ENSG00000114757_19 (sequence is synthesized)
actattttattatgaatttcaaaaggataaatcaaatattcaaaaggccatggtcatatagcccaaggaaattaattcctgtggacaatgcccagtctctgttcagatccaaaagcacaa

SEQ ID NO: 203762 - DNA, 120 bp, Artificial Sequence
  ENSG00000114757_20 (sequence is synthesized)
aatgttgtatatagagtcaaagtcaggctcaaaagaagaattaagagactcaagacaaaccaagataaagtaactgtgtgttgaatactctttccacaagttgcaagcatattgcaacac

SEQ ID NO: 203763 - DNA, 120 bp, Artificial Sequence
  ENSG00000114757_21 (sequence is synthesized)
atgttctttgggttttttgtctccccttgcagctgatgacacatctgaggaacttgttcatgggaaacatggaaaaagcactgcctcagattgggaaattctgactgtttctgaactgtc

SEQ ID NO: 203764 - DNA, 120 bp, Artificial Sequence
  ENSG00000114757_22 (sequence is synthesized)
ttcttttgcaagactgaacatagtttgggccattggtgcatgcacatatattaacttgtgactaaagacagacattgcttaaacctgttccaattttaacttttactgtagccctttgat

SEQ ID NO: 203765 - DNA, 120 bp, Artificial Sequence
  ENSG00000114757_23 (sequence is synthesized)
tccagagagggagctttgctggcaaaagcagtttttgcactagaaatttttgctgttcccaatctaaacttttctggtattgtatatatgcactttaatatcttatttatgccttgctgg

SEQ ID NO: 203766 - DNA, 120 bp, Artificial Sequence
  ENSG00000114757_24 (sequence is synthesized)
agttttgttttgttgctccaatttttaacttgggggtgaaagatttaagaactcagcctcactagatcaacggaccaaataaacaattcctgaagacagtttttcatagtgtaggatttt

SEQ ID NO: 203767 - DNA, 120 bp, Artificial Sequence
  ENSG00000114757_25 (sequence is synthesized)
gaagaagtgtttttcttaaagcagatacgatgacataaggcgtaaatatggcaaacagatcttttcattcacgtgctttctgggtctgtatgaacataagtaagacacaaggtactgtct

SEQ ID NO: 203768 - DNA, 120 bp, Artificial Sequence
  ENSG00000114757_26 (sequence is synthesized)
cttcatgcattctctgcaggaagaaagtttgatggtatcgtgatttctattgagttcaaattaacttgcttaagtgtcatactttactggctttgccctgcacaccaatattccttttaa

SEQ ID NO: 203769 - DNA, 120 bp, Artificial Sequence
  ENSG00000114757_27 (sequence is synthesized)
accataaatattttaaataatatttcttaagagtgataaataacattttttcctaaaaattatgttttcttagtttcataataatctgcactgttcatccccttgcattctaagtgatag

SEQ ID NO: 203770 - DNA, 120 bp, Artificial Sequence
  ENSG00000114757_28 (sequence is synthesized)
aagagcaacactttcaaaccaaatctcactgaatgccagtgatttcatatgaaagatgcatgcctctttggctctttgaacatttagcaagtattgggaattttctattagcagtggtgt

SEQ ID NO: 203771 - DNA, 120 bp, Artificial Sequence
  ENSG00000114757_29 (sequence is synthesized)
tttaattggttgaattccacttagttctccacagtgttttgtatgtgtttggggcttggtgattattttgaaagatacattttttaaagaattaggaacattttttgcaaaatgctaatc

SEQ ID NO: 203772 - DNA, 120 bp, Artificial Sequence
  ENSG00000114757_30 (sequence is synthesized)
agaatataattttcccaatgtcaggtatagaagttatcccattcttctttacctggtctccttccttcgtctagaaccttccccacagtagctaatcctaacaactttttatttatgttc

SEQ ID NO: 203773 - DNA, 120 bp, Artificial Sequence
  ENSG00000114757_31 (sequence is synthesized)
tttgataataatagctcatcccgctcatgattatagctacccacaaaaaataaaacaacaacaacaaaaaagactccacagaattgggatcaaaacagtctaattggctggggaataagc

SEQ ID NO: 203774 - DNA, 120 bp, Artificial Sequence
  ENSG00000114757_32 (sequence is synthesized)
ttctactgaggagtaaatgtgcacacgtgcttatcaattgaatgcgaggtacaggaataaaatcctctcctctgttacatctgaagtccttgggttgtgagagggcctcaagttaacaga

SEQ ID NO: 203775 - DNA, 120 bp, Artificial Sequence
  ENSG00000114757_33 (sequence is synthesized)
aaccacaagtccttgaggcttacatatgttataacctattctagtttataaagacaaaaagctgaggccactgtgaggagtgccaggttttgatagtcattgtcaaagttgacttgggcc

SEQ ID NO: 203776 - DNA, 120 bp, Artificial Sequence
  ENSG00000114757_34 (sequence is synthesized)
aggtggtagctccagctggtcagcagaaggcagaggcattcaggcactcatcatgggtagcagcgaccacccagtctcagaccgtgcttctctacagtctcagcagcaaagtaaagctca

SEQ ID NO: 203777 - DNA, 120 bp, Artificial Sequence
  ENSG00000114757_35 (sequence is synthesized)
acaatgctttcaagaatggtattgtaagaattgtagaattcgagaaacccagtctggtaaggactcttggggccagcctccaagccatggcagggcctgcttgaatatgcctgattaagc

SEQ ID NO: 203778 - DNA, 120 bp, Artificial Sequence
  ENSG00000114757_36 (sequence is synthesized)
atcctttccttccctgctccttcctcctgccatctctgtaccttgaccagaaagtcggcatgaatagttcatggacaaaggattgaatagcctctgaacaaaggattcaaagcaaacttt

SEQ ID NO: 203779 - DNA, 120 bp, Artificial Sequence
  ENSG00000114757_37 (sequence is synthesized)
taattaatttgttgctaaatggtggcaaattttgtggcccaagttttattttgctattggaacacaaactccaaggagctgttttagggaagactaaacaatcttccattcttaccatta

SEQ ID NO: 203780 - DNA, 120 bp, Artificial Sequence
  ENSG00000114757_38 (sequence is synthesized)
tttggcaatttgcagagcatttagtagtactttctctagtgtatgtagtatctgtcagatctaagatttttataggctgtcaagaagtccagaattacggcccaagaggaaaagagttgc

SEQ ID NO: 203781 - DNA, 120 bp, Artificial Sequence
  ENSG00000114757_39 (sequence is synthesized)
aagtccagaattacggcccaagaggaaaagagttgcatttttcaataatattttttataaaattaagttaaaaccattattaaaacatgagtgacaggccaggtgcggtggctcacgcct

SEQ ID NO: 203782 - DNA, 62 bp, Artificial Sequence
  ENSG00000114757_40 (sequence is synthesized)
tgaccaacatggtgaaaccccgtctttattaagaatacaaaaattagccgggtgtagtggta

SEQ ID NO: 203783 - DNA, 120 bp, Artificial Sequence
  ENSG00000114757_41 (sequence is synthesized)
agtttataggaatagagcaccaccaagaaatcagtagcaagactttagaacagtctttttgtataaatcatatacagtaaatgttttgtttcttagaagtgcatctactttattttttgg

SEQ ID NO: 203784 - DNA, 120 bp, Artificial Sequence
  ENSG00000114757_42 (sequence is synthesized)
cagaacaatttttggcatcttatcttcatggcatgaaattgtcatttaaattactctttccgtttgaaaggggagggtatccttatttcccttctgaggtactctgagaaggctttgagt

SEQ ID NO: 203785 - DNA, 120 bp, Artificial Sequence
  ENSG00000114757_43 (sequence is synthesized)
ttcctttttcatgtattaatgtataacagcctaacagctcctagaagagggtattcttactagaatggctacatacgggtgacttcagttacatacaggtgacttccagggactgacttc

SEQ ID NO: 203786 - DNA, 120 bp, Artificial Sequence
  ENSG00000114757_44 (sequence is synthesized)
gcctgtagattggatgaaaataaagagaaagccagtgattattgctgagtttcaaaatataaccatttctagtaggctacttctacatgctgttgtaccttcctggtgaggaggagacag

SEQ ID NO: 203787 - DNA, 120 bp, Artificial Sequence
  ENSG00000114757_45 (sequence is synthesized)
agggataggggagaggaggaggaataaaaatccctctcactgggccaatcatactgattcattccctttacttcctccaaaactcactccccatgactcctgaaaaatgggtagatctcg

SEQ ID NO: 203788 - DNA, 120 bp, Artificial Sequence
  ENSG00000114757_46 (sequence is synthesized)
tccaccaggaaattttaatagaatactatgcaccgtgctttctcagtcaatctggattcctactagaacagaaaagtaaggaaacataactgggtaggaatgtccacttacgtttcacaa

SEQ ID NO: 203789 - DNA, 120 bp, Artificial Sequence
  ENSG00000114757_47 (sequence is synthesized)
actcacttttagagtttcatgccactttcctcattcttctctttaagatactattatattgaacgtgggacccatgtctaaatacttgtatagataaatatttcttgtatattcttccca

SEQ ID NO: 203790 - DNA, 120 bp, Artificial Sequence
  ENSG00000114757_48 (sequence is synthesized)
tacaagcaagacttgaatacagttgtagctagtcccacttttataataaaagcttccaaactctttatcataaactttgtctgtgagcttgggaatacagagaaagcaagttgatcattc

SEQ ID NO: 203791 - DNA, 120 bp, Artificial Sequence
  ENSG00000114757_49 (sequence is synthesized)
tgagacccttcctcatttgccctgaatcagttccccaagattggactgtactttaagctagttgttgtagcagtggtggttgttgttttatatcttgagatacttctagaacattctaga

SEQ ID NO: 203792 - DNA, 120 bp, Artificial Sequence
  ENSG00000114757_50 (sequence is synthesized)
aacagggtattctaaaggcttactttatatgccatcctttttgaaccctcttattttagaaattattacacgtgcacacttatgatttcaaccttgtaaaataatttcaaattcatttcg

SEQ ID NO: 203793 - DNA, 120 bp, Artificial Sequence
  ENSG00000114757_51 (sequence is synthesized)
tcatttcgtatccacattttactgcagtttccctatcatcatctcaatagttatagaactggttgaaattaaactgttttgaactaagaagtagatatatatatatatatatatatatat

SEQ ID NO: 203794 - DNA, 120 bp, Artificial Sequence
  ENSG00000114757_52 (sequence is synthesized)
ttttttttaaagagtgttcatagataaactctggcataaagtttgtaaaaaagcaattttttaaaagcaaaacgtataacctcaggtacaaaaatattgcatgcattagtattgcaaatt

SEQ ID NO: 203795 - DNA, 120 bp, Artificial Sequence
  ENSG00000114757_53 (sequence is synthesized)
tgcctactcaaatattaaccaaagcatgcaagataacttgactgaatttaaatttacacagtgcatgattaagtctcataggttagcctgttgttccttgcctctatacaagggagcatt

SEQ ID NO: 203796 - DNA, 120 bp, Artificial Sequence
  ENSG00000114757_54 (sequence is synthesized)
tttatgaactttgtgttacagtttttctatttgcttttcttatcctatccttgagattgttttcatgctatcacactgaactttacagatattcacacatctggtttctacagtgttacc

SEQ ID NO: 203797 - DNA, 120 bp, Artificial Sequence
  ENSG00000114757_55 (sequence is synthesized)
agtgccaaactaatcctctgaagaatctgggacatctaaacactttttcaaaaaccagttgaggcacaacagatcccaaacttaaacaaatccaagtgtctgaatgctactaaactaaat

SEQ ID NO: 203798 - DNA, 120 bp, Artificial Sequence
  ENSG00000114757_56 (sequence is synthesized)
catgttgactgcctcagcacataaaggtttcgactttaaattcttaataatgcatttcaaaatttttctaaaagtttgggaataaattagaaaaactgatattctaaataaggcgaggag

SEQ ID NO: 203799 - DNA, 120 bp, Artificial Sequence
  ENSG00000114757_57 (sequence is synthesized)
gttggggtaatgtcaggcacatcaaaatcatcacacaacgaagtagatatggggccttaattttcataaatgtcacatagcaagtgtgtggggtatcacaacattgttctgatacagccc

SEQ ID NO: 203800 - DNA, 120 bp, Artificial Sequence
  ENSG00000114757_58 (sequence is synthesized)
tgtttgtatggtagttgagctgcttgggctaaatgtcccttgagaaactggacttgatcaacaggtctaaaaacactgatatttagggagtgatgaggtgatttcacggtcactcagaac

SEQ ID NO: 203801 - DNA, 120 bp, Artificial Sequence
  ENSG00000114757_59 (sequence is synthesized)
caactctgaaatcttctcactgccttttcccataacccctattttatgaggagaccagaaagggagagagcaaagctcagtgagaccatgtggtcttacattagtaacagctttgttact

SEQ ID NO: 203802 - DNA, 120 bp, Artificial Sequence
  ENSG00000114757_60 (sequence is synthesized)
cactccatataccccggtaccctcacacacataccatgaactcaaagacagaattctacacataacacacatagcaaagacgattgtggggaggcattaaacagttaagaggaaaaaaaa

SEQ ID NO: 203803 - DNA, 120 bp, Artificial Sequence
  ENSG00000114757_61 (sequence is synthesized)
aaacacagaaaattaaactgtgaggtttaacaacctctcatgtggtattttgccttgaacgaagtttccactacctgcagcttctgcagaaataccaaaataacacagtctagagacaag

SEQ ID NO: 203804 - DNA, 120 bp, Artificial Sequence
  ENSG00000114757_62 (sequence is synthesized)
tgtcccaatgtcagaactgttttctcaggaccttctctataagagaaaactaacttgcaatgctgcagaatgtcagagcaaaaccctgatgagctccgtgggatacttaatagaagcctg

SEQ ID NO: 203805 - DNA, 120 bp, Artificial Sequence
  ENSG00000114757_63 (sequence is synthesized)
cactcaaaataatattaagatggaaacaacaacaacaattaggcagttctttgctcaactataaaatgtgtatcattcattgggggagggggaggggtcgtgttctttggatttcttgga

SEQ ID NO: 203806 - DNA, 120 bp, Artificial Sequence
  ENSG00000114757_64 (sequence is synthesized)
aagggaaatggtataacacaaaaagactaagaggtatacacactcagctcggtaattcgagcatttggcattttcactgagatatatagcatttctgcatggataccatacaagaattct

SEQ ID NO: 203807 - DNA, 120 bp, Artificial Sequence
  ENSG00000114757_65 (sequence is synthesized)
gccatgtgagaaatgtgttcatgatggactacattaccagtagttaagggaaatacagcaaacttaagtttttaccaacttcctttcatgttccctatatatcatctaacccaaactttc

SEQ ID NO: 203808 - DNA, 120 bp, Artificial Sequence
  ENSG00000114757_66 (sequence is synthesized)
aatttacattgcccaaatttgtttacattggttgaaaaaaaactgattaatttattaaactttttacaaactgtaacaaacatttaactatttagaaaagacatttctacatattttata

SEQ ID NO: 203809 - DNA, 120 bp, Artificial Sequence
  ENSG00000114757_67 (sequence is synthesized)
tatctatgaatattgcatctctaatctaatctaaaaatgttgttttgagacaattcttctgtgatgcttcctcctcatgctcataaatgtttaaagtcttgggatttcattttcaggctg

SEQ ID NO: 203810 - DNA, 120 bp, Artificial Sequence
  ENSG00000114757_68 (sequence is synthesized)
aaatagataacaagaaaaaaatttaagtttaaatgtttacattgcgttactaaattaataccaattcaaattaagtgacctatagtaaattaatggcaatgggggggaggggattttaaa

SEQ ID NO: 203811 - DNA, 120 bp, Artificial Sequence
  ENSG00000114757_69 (sequence is synthesized)
gtgattggcatattatgtgatactgtatcagtgatttagtgaaataatatgtatcatagcacaactctgttgggtattaaggcttcatcttagtatttccctgcgttgctctttgaaata

SEQ ID NO: 203812 - DNA, 120 bp, Artificial Sequence
  ENSG00000114757_70 (sequence is synthesized)
aaattactaccataaaaataacctcttatcatattgatgtgtttaatttactcagttggcttctaatttgcgtaacaagattaaggtagtatttttgtactattattggaagcatgcctt

SEQ ID NO: 203813 - DNA, 120 bp, Artificial Sequence
  ENSG00000114757_71 (sequence is synthesized)
ccctttttcacattattaaattgtatttatatttgtgcaattttaaactatgttttcaaataaactttgtctgcggcttcgaggtcttttcaggaatctttcaaaatgggatttggggat

SEQ ID NO: 203814 - DNA, 120 bp, Artificial Sequence
  ENSG00000114757_72 (sequence is synthesized)
cagaactccttctgatcaaatggaatccaatttgtactactggctaaaggtccttttattaaatattgaatatcactacatatgattttgcatgagctatctggaaatcaggaatgcatt

SEQ ID NO: 203815 - DNA, 120 bp, Artificial Sequence
  ENSG00000114757_73 (sequence is synthesized)
caggaatgcatttttggatataaaacaaaactttaaaaatcttcctcctttgttaattttttaagactaaaatattatttaacctgaaattgaattttgtgattctttttagaataaaaa

SEQ ID NO: 203816 - DNA, 120 bp, Artificial Sequence
  ENSG00000114757_74 (sequence is synthesized)
ggaggagggaggagagctgaagatccctgcctgggctggctgagctaagcaaagtgggaagctgagtgcttgaaagaggattatgctcgcactagaaataagcaatctgtggttctctgg

SEQ ID NO: 203817 - DNA, 120 bp, Artificial Sequence
  ENSG00000114757_75 (sequence is synthesized)
tcagcaagttctggcaaggaagccactgccagtggcataaagaattctgggatgtctgacagtgaaatggatggaaggacccacattccatctctacttaatgcccttttgtccagaaac

SEQ ID NO: 203818 - DNA, 120 bp, Artificial Sequence
  ENSG00000114757_76 (sequence is synthesized)
gggtcatgcaaatgagctacttgtaaagaacaaggatatggaaaactaagcagtgatgaagacctcgaaataattgttgatcaaaagcagctggtgaatgagcaacaagaaagcagaccc

SEQ ID NO: 203819 - DNA, 120 bp, Artificial Sequence
  ENSG00000114757_77 (sequence is synthesized)
agtgctaaccagaacatgtcatctttgagtctgaagccactggtccaggtctcagtaggagcttttgtccagctggtgaatgagcaacaagaaagcagacccctcctgagtccctccatc

SEQ ID NO: 203820 - DNA, 120 bp, Artificial Sequence
  ENSG00000114757_78 (sequence is synthesized)
cacttggaaggtggagagattagctttctttttccttctagttcagtcctttggctactgtgaaagaccacgcagaagctgtggacttgctttttgtgcttgacaaaagtgcatagatag

SEQ ID NO: 203821 - DNA, 120 bp, Artificial Sequence
  ENSG00000114757_79 (sequence is synthesized)
agaggaattaagccaaacatactctagtggagctgtctatattacaccaaacaaattgaataatgctgaagtgttggccagctggtgaatgagcaacaagaaagcagacccctcctgagt

SEQ ID NO: 203822 - DNA, 120 bp, Artificial Sequence
  ENSG00000114757_80 (sequence is synthesized)
actatacacaagtggcttcttccctgctatgcaccagtggcatgcacaaaccaaaaagaagcagaatgatctgaaaaactggtgaatgagcaacaagaaagcagacccctcctgagtccc

SEQ ID NO: 203823 - DNA, 120 bp, Artificial Sequence
  ENSG00000114757_81 (sequence is synthesized)
aacattagaatatcttgtaataaataataagttaaagatctctcctgacacagtcattgttgatttcactgttatagggaaaaggctctagggcggcagataaggctgttgccatggtga

SEQ ID NO: 203824 - DNA, 120 bp, Artificial Sequence
  ENSG00000114757_82 (sequence is synthesized)
ggatatggaaaactaagcagtgatgaagacctcgaaataattgttgatcaaaagcaggtagtaggtgtaaccttgaagaaaaagtggcactgtcttcaaaaaagtgacctgaccctggct

SEQ ID NO: 203825 - DNA, 120 bp, Artificial Sequence
  ENSG00000114757_83 (sequence is synthesized)
agcaccagcagaccaagtttgccataagcttacaagtgtgggcttggaaggcagatgaggttcggatcctgtgagtcctagctttgggaccataaccctccaggctctgttttctgctgg

SEQ ID NO: 203826 - DNA, 120 bp, Artificial Sequence
  ENSG00000114757_84 (sequence is synthesized)
atcagccattttattcctccccagaagcctcttttatctattagggggggaagaaaaacacagatgatgtggcatgttcttaaatccatctccattcatttttcctgtctcccagtcaga

SEQ ID NO: 203827 - DNA, 120 bp, Artificial Sequence
  ENSG00000114767_0 (sequence is synthesized)
gagttctgcggccgctgctacacgcctggtgggcagcatgtcggcaacagcggctgctcgtaagcggggaaagccggcctctggggccggggctggcgcgggggccggcaagcggcggcg

SEQ ID NO: 203828 - DNA, 120 bp, Artificial Sequence
  ENSG00000114767_1 (sequence is synthesized)
aaaggccgactctgcgggggacaggggcaaatccaagggtggcggcaagatgaatgaggagatctccagcgactctgagagcgagagcctagctccaaggaagcctgaggaggaggagga

SEQ ID NO: 203829 - DNA, 120 bp, Artificial Sequence
  ENSG00000114767_2 (sequence is synthesized)
ggaggagctggaggaaactgcacaggaaaagaagctgcgcttggccaagctctacctagagcagctccgtcagcaagaggaggagaaggctgaggcccgtgcatttgaggaggaccaggt

SEQ ID NO: 203830 - DNA, 120 bp, Artificial Sequence
  ENSG00000114767_3 (sequence is synthesized)
ggcggggcgcctgaaggaggatgtgcttgagcagaggggcaggctgcagaagttggtggcaaaagagatccaggccccagcctcagctgacattcgcgttttacgggggcaccagctctc

SEQ ID NO: 203831 - DNA, 120 bp, Artificial Sequence
  ENSG00000114767_4 (sequence is synthesized)
tatcacatgtttggtcgtcacccccgatgactcagccatcttctctgctgccaaagactgcagcatcattaagtggagcgtggagagtggacggaagctgcatgtgattcctcgagccaa

SEQ ID NO: 203832 - DNA, 120 bp, Artificial Sequence
  ENSG00000114767_5 (sequence is synthesized)
gaagggtgccgagggaaagccccctggccacagcagccacgtcctctgcatggccatctcctccgacggcaagtaccttgcctctggtgaccgcagcaagctcattctcatttgggaggc

SEQ ID NO: 203833 - DNA, 120 bp, Artificial Sequence
  ENSG00000114767_6 (sequence is synthesized)
tcgctccgtgaaggtgtggaatgtggcagagaactcctacgtggagacgctcttcggacaccaggacgctgtggctgcactggatgccttgagccgggagtgctgtgtgacggctggggg

SEQ ID NO: 203834 - DNA, 120 bp, Artificial Sequence
  ENSG00000114767_7 (sequence is synthesized)
ccgggatgggactgtacgtgtgtggaagatccccgaggagtcccagcttgtcttctatggccaccagggctccatcgactgcatccacctaatcaatgaggagcacatggtgtccggcgc

SEQ ID NO: 203835 - DNA, 120 bp, Artificial Sequence
  ENSG00000114767_8 (sequence is synthesized)
ggacgatggctctgtggccttgtggggtctctccaagaagcgaccacttgccctgcagcgtgaagctcacgggctgcggggagagccaggcctggagcagcccttctggatatcgtcggt

SEQ ID NO: 203836 - DNA, 120 bp, Artificial Sequence
  ENSG00000114767_9 (sequence is synthesized)
ggcagccctcctcaacacagaccttgtggccacaggctcccacagctcctgtgtgcggctttggcagtgtggggaaggcttccggcagcttgaccttctctgtgacatccccctggtggg

SEQ ID NO: 203837 - DNA, 120 bp, Artificial Sequence
  ENSG00000114767_10 (sequence is synthesized)
ttttatcaacagcctcaagttctccagctctggggacttcctggtggctggggtagggcaggagcacaggcttggccgatggtggagaatcaaagaggctcggaattctgtctgcatcat

SEQ ID NO: 203838 - DNA, 120 bp, Artificial Sequence
  ENSG00000114767_11 (sequence is synthesized)
cccactccgcagggtccctgtacccccagctgctggttcctgacactcttatcctccttatttaagtccttcccaggctatgccccaccctctttgtattaaaagcctcctcttttgggc

SEQ ID NO: 203839 - DNA, 120 bp, Artificial Sequence
  ENSG00000114770_0 (sequence is synthesized)
atgctcgggagcgtggttgagcggctggcgcggttgtcctggagcaggggcgcaggaattctgatgtgaaactaacagtctgtgagccctggaacctccactcagagaagatgaaggata

SEQ ID NO: 203840 - DNA, 120 bp, Artificial Sequence
  ENSG00000114770_1 (sequence is synthesized)
tcgacataggaaaagagtatatcatccccagtcctgggtatagaagtgtgagggagagaaccagcacttctgggacgcacagagaccgtgaagattccaagttcaggagaactcgaccgt

SEQ ID NO: 203841 - DNA, 120 bp, Artificial Sequence
  ENSG00000114770_2 (sequence is synthesized)
tggaatgccaagatgccttggaaacagcagcccgagccgagggcctctctcttgatgcctccatgcattctcagctcagaatcctggatgaggagcatcccaagggaaagtaccatcatg

SEQ ID NO: 203842 - DNA, 120 bp, Artificial Sequence
  ENSG00000114770_3 (sequence is synthesized)
gcttgagtgctctgaagcccatccggactacttccaaacaccagcacccagtggacaatgctgggcttttttcctgtatgactttttcgtggctttcttctctggcccgtgtggcccaca

SEQ ID NO: 203843 - DNA, 120 bp, Artificial Sequence
  ENSG00000114770_4 (sequence is synthesized)
agaagggggagctctcaatggaagacgtgtggtctctgtccaagcacgagtcttctgacgtgaactgcagaagactagagagactgtggcaagaagagctgaatgaagttgggccagacg

SEQ ID NO: 203844 - DNA, 120 bp, Artificial Sequence
  ENSG00000114770_5 (sequence is synthesized)
ctgcttccctgcgaagggttgtgtggatcttctgccgcaccaggctcatcctgtccatcgtgtgcctgatgatcacgcagctggctggcttcagtggaccagccttcatggtgaaacacc

SEQ ID NO: 203845 - DNA, 120 bp, Artificial Sequence
  ENSG00000114770_6 (sequence is synthesized)
tcttggagtatacccaggcaacagagtctaacctgcagtacagcttgttgttagtgctgggcctcctcctgacggaaatcgtgcggtcttggtcgcttgcactgacttgggcattgaatt

SEQ ID NO: 203846 - DNA, 120 bp, Artificial Sequence
  ENSG00000114770_7 (sequence is synthesized)
accgaaccggtgtccgcttgcggggggccatcctaaccatggcatttaagaagatccttaagttaaagaacattaaagagaaatccctgggtgagctcatcaacatttgctccaacgatg

SEQ ID NO: 203847 - DNA, 120 bp, Artificial Sequence
  ENSG00000114770_8 (sequence is synthesized)
ggcagagaatgtttgaggcagcagccgttggcagcctgctggctggaggacccgttgttgccatcttaggcatgatttataatgtaattattctgggaccaacaggcttcctgggatcag

SEQ ID NO: 203848 - DNA, 120 bp, Artificial Sequence
  ENSG00000114770_9 (sequence is synthesized)
ctgtttttatcctcttttacccagcaatgatgtttgcatcacggctcacagcatatttcaggagaaaatgcgtggccgccacggatgaacgtgtccagaagatgaatgaagttcttactt

SEQ ID NO: 203849 - DNA, 120 bp, Artificial Sequence
  ENSG00000114770_10 (sequence is synthesized)
acattaaatttatcaaaatgtatgcctgggtcaaagcattttctcagagtgttcaaaaaatccgcgaggaggagcgtcggatattggaaaaagctgggtacttccagagcatcactgtgg

SEQ ID NO: 203850 - DNA, 120 bp, Artificial Sequence
  ENSG00000114770_11 (sequence is synthesized)
gtgtggctcccattgtggtggtgattgccagcgtggtgaccttctctgttcatatgaccctgggcttcgatctgacagcagcacaggctttcacagtggtgacagtcttcaattccatga

SEQ ID NO: 203851 - DNA, 120 bp, Artificial Sequence
  ENSG00000114770_12 (sequence is synthesized)
cttttgctttgaaagtaacaccgttttcagtaaagtccctctcagaagcctcagtggctgttgacagatttaagagtttgtttctaatggaagaggttcacatgataaagaacaaaccag

SEQ ID NO: 203852 - DNA, 120 bp, Artificial Sequence
  ENSG00000114770_13 (sequence is synthesized)
ccagtcctcacatcaagatagagatgaaaaatgccaccttggcatgggactcctcccactccagtatccagaactcgcccaagctgacccccaaaatgaaaaaagacaagagggcttcca

SEQ ID NO: 203853 - DNA, 120 bp, Artificial Sequence
  ENSG00000114770_14 (sequence is synthesized)
ggggcaagaaagagaaggtgaggcagctgcagcgcactgagcatcaggcggtgctggcagagcagaaaggccacctcctcctggacagtgacgagcggcccagtcccgaagaggaagaag

SEQ ID NO: 203854 - DNA, 120 bp, Artificial Sequence
  ENSG00000114770_15 (sequence is synthesized)
gcaagcacatccacctgggccacctgcgcttacagaggacactgcacagcatcgatctggagatccaagagggtaaactggttggaatctgtggcagtgtgggaagtggaaaaacctctc

SEQ ID NO: 203855 - DNA, 120 bp, Artificial Sequence
  ENSG00000114770_16 (sequence is synthesized)
tcatttcagccattttaggccagatgacgcttctagagggcagcattgcaatcagtggaaccttcgcttatgtggcccagcaggcctggatcctcaatgctactctgagagacaacatcc

SEQ ID NO: 203856 - DNA, 120 bp, Artificial Sequence
  ENSG00000114770_17 (sequence is synthesized)
tgtttgggaaggaatatgatgaagaaagatacaactctgtgctgaacagctgctgcctgaggcctgacctggccattcttcccagcagcgacctgacggagattggagagcgaggagcca

SEQ ID NO: 203857 - DNA, 120 bp, Artificial Sequence
  ENSG00000114770_18 (sequence is synthesized)
acctgagcggtgggcagcgccagaggatcagccttgcccgggccttgtatagtgacaggagcatctacatcctggacgaccccctcagtgccttagatgcccatgtgggcaaccacatct

SEQ ID NO: 203858 - DNA, 120 bp, Artificial Sequence
  ENSG00000114770_19 (sequence is synthesized)
tcaatagtgctatccggaaacatctcaagtccaagacagttctgtttgttacccaccagttacagtacctggttgactgtgatgaagtgatcttcatgaaagagggctgtattacggaaa

SEQ ID NO: 203859 - DNA, 120 bp, Artificial Sequence
  ENSG00000114770_20 (sequence is synthesized)
gaggcacccatgaggaactgatgaatttaaatggtgactatgctaccatttttaataacctgttgctgggagagacaccgccagttgagatcaattcaaaaaaggaaaccagtggttcac

SEQ ID NO: 203860 - DNA, 120 bp, Artificial Sequence
  ENSG00000114770_21 (sequence is synthesized)
agaagaagtcacaagacaagggtcctaaaacaggatcagtaaagaaggaaaaagcagtaaagccagaggaagggcagcttgtgcagctggaagagaaagggcagggttcagtgccctggt

SEQ ID NO: 203861 - DNA, 120 bp, Artificial Sequence
  ENSG00000114770_22 (sequence is synthesized)
cagtatatggtgtctacatccaggctgctgggggccccttggcattcctggttattatggcccttttcatgctgaatgtaggcagcaccgccttcagcacctggtggttgagttactgga

SEQ ID NO: 203862 - DNA, 120 bp, Artificial Sequence
  ENSG00000114770_23 (sequence is synthesized)
tcaagcaaggaagcgggaacaccactgtgactcgagggaacgagacctcggtgagtgacagcatgaaggacaatcctcatatgcagtactatgccagcatctacgccctctccatggcag

SEQ ID NO: 203863 - DNA, 120 bp, Artificial Sequence
  ENSG00000114770_24 (sequence is synthesized)
ttgtctttgtcaagggcacgctgcgagcttcctcccggctgcatgacgagcttttccgaaggatccttcgaagccctatgaagttttttgacacgacccccacagggaggattctcaaca

SEQ ID NO: 203864 - DNA, 120 bp, Artificial Sequence
  ENSG00000114770_25 (sequence is synthesized)
ggttttccaaagacatggatgaagttgacgtgcggctgccgttccaggccgagatgttcatccagaacgttatcctggtgttcttctgtgtgggaatgatcgcaggagtcttcccgtggt

SEQ ID NO: 203865 - DNA, 120 bp, Artificial Sequence
  ENSG00000114770_26 (sequence is synthesized)
tccttgtggcagtggggccccttgtcatcctcttttcagtcctgcacattgtctccagggtcctgattcgggagctgaagcgtctggacaatatcacgcagtcacctttcctctcccaca

SEQ ID NO: 203866 - DNA, 120 bp, Artificial Sequence
  ENSG00000114770_27 (sequence is synthesized)
tcacgtccagcatacagggccttgccaccatccacgcctacaataaagggcaggagtttctgcacagataccaggagctgctggatgacaaccaagctcctttttttttgtttacgtgtg

SEQ ID NO: 203867 - DNA, 120 bp, Artificial Sequence
  ENSG00000114770_28 (sequence is synthesized)
cgatgcggtggctggctgtgcggctggacctcatcagcatcgccctcatcaccaccacggggctgatgatcgttcttatgcacgggcagattcccccagcctatgcgggtctcgccatct

SEQ ID NO: 203868 - DNA, 120 bp, Artificial Sequence
  ENSG00000114770_29 (sequence is synthesized)
cttatgctgtccagttaacggggctgttccagtttacggtcagactggcatctgagacagaagctcgattcacctcggtggagaggatcaatcactacattaagactctgtccttggaag

SEQ ID NO: 203869 - DNA, 120 bp, Artificial Sequence
  ENSG00000114770_30 (sequence is synthesized)
cacctgccagaattaagaacaaggctccctcccctgactggccccaggagggagaggtgacctttgagaacgcagagatgaggtaccgagaaaacctccctctcgtcctaaagaaagtat

SEQ ID NO: 203870 - DNA, 120 bp, Artificial Sequence
  ENSG00000114770_31 (sequence is synthesized)
ccttcacgatcaaacctaaagagaagattggcattgtggggcggacaggatcagggaagtcctcgctggggatggccctcttccgtctggtggagttatctggaggctgcatcaagattg

SEQ ID NO: 203871 - DNA, 120 bp, Artificial Sequence
  ENSG00000114770_32 (sequence is synthesized)
atggagtgagaatcagtgatattggccttgccgacctccgaagcaaactctctatcattcctcaagagccggtgctgttcagtggcactgtcagatcaaatttggaccccttcaaccagt

SEQ ID NO: 203872 - DNA, 120 bp, Artificial Sequence
  ENSG00000114770_33 (sequence is synthesized)
acactgaagaccagatttgggatgccctggagaggacacacatgaaagaatgtattgctcagctacctctgaaacttgaatctgaagtgatggagaatggggataacttctcagtggggg

SEQ ID NO: 203873 - DNA, 120 bp, Artificial Sequence
  ENSG00000114770_34 (sequence is synthesized)
aacggcagctcttgtgcatagctagagccctgctccgccactgtaagattctgattttagatgaagccacagctgccatggacacagagacagacttattgattcaagagaccatccgag

SEQ ID NO: 203874 - DNA, 120 bp, Artificial Sequence
  ENSG00000114770_35 (sequence is synthesized)
aagcatttgcagactgtaccatgctgaccattgcccatcgcctgcacacggttctaggctccgataggattatggtgctggcccagggacaggtggtggagtttgacaccccatcggtcc

SEQ ID NO: 203875 - DNA, 120 bp, Artificial Sequence
  ENSG00000114770_36 (sequence is synthesized)
ttctgtccaacgacagttcccgattctatgccatgtttgctgctgcagagaacaaggtcgctgtcaagggctgactcctccctgttgacgaagtctcttttctttagagcattgccattc

SEQ ID NO: 203876 - DNA, 120 bp, Artificial Sequence
  ENSG00000114770_37 (sequence is synthesized)
cctgcctggggcgggcccctcatcgcgtcctcctaccgaaaccttgcctttctcgattttatctttcgcacagcagttccggattggcttgtgtgtttcacttttagggagagtcatatt

SEQ ID NO: 203877 - DNA, 120 bp, Artificial Sequence
  ENSG00000114770_38 (sequence is synthesized)
ttgattattgtatttattccatattcatgtaaacaaaatttagtttttgttcttaattgcactctaaaaggttcagggaaccgttattataattgtatcagaggcctataatgaagcttt

SEQ ID NO: 203878 - DNA, 120 bp, Artificial Sequence
  ENSG00000114770_39 (sequence is synthesized)
atacgtgtagctatatctatatataattctgtacatagcctatatttacagtgaaaatgtaagctgtttattttatattaaaataagcactgtgctaataacagtgcatattcctttcta

SEQ ID NO: 203879 - DNA, 120 bp, Artificial Sequence
  ENSG00000114770_40 (sequence is synthesized)
tcatttttgtacagtttgctgtactagagatctggttttgctattagactgtaggaagagtagcatttcattcttctctagctggtggtttcacggtgccaggttttctgggtgtccaaa

SEQ ID NO: 203880 - DNA, 120 bp, Artificial Sequence
  ENSG00000114770_41 (sequence is synthesized)
ggaagacgtgtggcaatagtgggccctccgacagccccctctgccgcctccccacggccgctccaggggtggctggagacgggtgggcggctggagaccatgcagagcgccgtgagttct

SEQ ID NO: 203881 - DNA, 120 bp, Artificial Sequence
  ENSG00000114770_42 (sequence is synthesized)
cagggctcctgccttctgtcctggtgtcacttactgtttctgtcaggagagcagcggggcgaagcccaggccccttttcactccctccatcaagaatggggatcacagagacattcctcc

SEQ ID NO: 203882 - DNA, 120 bp, Artificial Sequence
  ENSG00000114770_43 (sequence is synthesized)
gagccggggagtttctttcctgccttcttctttttgctgttgtttctaaacaagaatcagtctatccacagagagtcccactgcctcaggttcctatggctggccactgcacagagctct

SEQ ID NO: 203883 - DNA, 120 bp, Artificial Sequence
  ENSG00000114770_44 (sequence is synthesized)
ccagctccaagacctgttggttccaagccctggagccaactgctgctttttgaggtggcactttttcatttgcctattcccacacctccacagttcagtggcagggctcaggatttcgtg

SEQ ID NO: 203884 - DNA, 120 bp, Artificial Sequence
  ENSG00000114770_45 (sequence is synthesized)
ggtctgttttcctttctcaccgcagtcgtcgcacagtctctctctctctctcccctcaaagtctgcaactttaagcagctcttgctaatcagtgtctcacactggcgtagaagtttttgt

SEQ ID NO: 203885 - DNA, 120 bp, Artificial Sequence
  ENSG00000114770_46 (sequence is synthesized)
actgtaaagagacctacctcaggttgctggttgctgtgtggtttggtgtgttcccgcaaaccccctttgtgctgtggggctggtagctcaggtgggcgtggtcactgctgtcatcaattg

SEQ ID NO: 203886 - DNA, 120 bp, Artificial Sequence
  ENSG00000114770_47 (sequence is synthesized)
aatggtcagcgttgcatgtcgtgaccaactagacattctgtcgccttagcatgtttgctgaacaccttgtggaagcaaaaatctgaaaatgtgaataaaattattttggattttgtaaaa

SEQ ID NO: 203887 - DNA, 120 bp, Artificial Sequence
  ENSG00000114770_48 (sequence is synthesized)
ctgctccatcagtgccgaggtgtgtgggaacaggcttcactgcaccgccatcttactgagttgcttcacgtgaggaaaagggggctttggccctgtgactcagttccacattttggattg

SEQ ID NO: 203888 - DNA, 120 bp, Artificial Sequence
  ENSG00000114770_49 (sequence is synthesized)
ctgtatacagtggtgacccaagcaatggatataaacctaaaaatctgagggaggggagaggtggaatacagtagttcttggaatctgaagtctcctatttgatcaggttatttcctggga

SEQ ID NO: 203889 - DNA, 120 bp, Artificial Sequence
  ENSG00000114770_50 (sequence is synthesized)
cttggcaaaaatctgattggtggggatctcctaggacctagtggacatctggtattaatttaatctcaggaaaaacaagaaattaacccagagagagtctgggttttggaattcagcgta

SEQ ID NO: 203890 - DNA, 120 bp, Artificial Sequence
  ENSG00000114770_51 (sequence is synthesized)
gctacctccagaccgtggtgtctggcctccatttttgtctgtcattcagctctgacttacagctgcagtcacctttgctataaggcacctgggtagaagggtggatgggcttcacatcaa

SEQ ID NO: 203891 - DNA, 120 bp, Artificial Sequence
  ENSG00000114770_52 (sequence is synthesized)
tttttttcttcctttagggtgggggattggtttggctttcttttgttgtggttttttgttttatttttgtcaagattgatttttagatgcaaggacttgaaaagacccagaaggatgcca

SEQ ID NO: 203892 - DNA, 120 bp, Artificial Sequence
  ENSG00000114770_53 (sequence is synthesized)
ccagtttttccttgaggcctaggattttttattctgtcccgagcagaggtaattcctcacaacttagtgcaccagtagcaccagccattttgagcagagtacctctttggggagcttttc

SEQ ID NO: 203893 - DNA, 120 bp, Artificial Sequence
  ENSG00000114770_54 (sequence is synthesized)
gttttgttttgtttttaattctctttccttagcagcaaggtcttttttcctagagaatctactccgttgcagaatcattgcaacctcaggagccctcactgattgagtgctgtcagcctg

SEQ ID NO: 203894 - DNA, 120 bp, Artificial Sequence
  ENSG00000114770_55 (sequence is synthesized)
atatactactttggactctggaaacagatatgggttctattctctatttctactgtgtgtcgttaaacaaccgtcggagaccagatgacctgttagatggctagtcctgtataactcgac

SEQ ID NO: 203895 - DNA, 120 bp, Artificial Sequence
  ENSG00000114770_56 (sequence is synthesized)
tctgtatgtttcaatgtatgttactgcaatgcttcacctgctgtacagtgtttgtgagatgctctttgaagatggtacttttatattttttcattttcaataaaagtacattccttccca

SEQ ID NO: 203896 - DNA, 120 bp, Artificial Sequence
  ENSG00000114770_57 (sequence is synthesized)
cgggtctgagagaaacgcccacctgggaggctgtgcagcgggtggctcggggcaccctgctcaacccgcagcggagccgccagcgaccttcgaagaattctgatgtgaaactaacagtct

SEQ ID NO: 203897 - DNA, 120 bp, Artificial Sequence
  ENSG00000114770_58 (sequence is synthesized)
ccttcacgatcaaacctaaagagaagattggcattgtggggcggacaggatcagaacactggggcacacagccaagtacgaaagaggagcagcacccacaactctgctacccagagagaa

SEQ ID NO: 203898 - DNA, 120 bp, Artificial Sequence
  ENSG00000114770_59 (sequence is synthesized)
cctcagtggctgttgacagatttaagcttccttccactgtatagcctgatgtgttttgctacgtgagtgtacgccctaggcttgtctccctggtcttgatccagtgtctcatctttgcac

SEQ ID NO: 203899 - DNA, 120 bp, Artificial Sequence
  ENSG00000114770_60 (sequence is synthesized)
ggccacggccagctctaacactcttattctgttgcagaggttgtgctcagctttgggctaggtagcagtcttagagatgccttcaggtctgttgaaaggggtcgatggattttggcaaca

SEQ ID NO: 203900 - DNA, 120 bp, Artificial Sequence
  ENSG00000114770_61 (sequence is synthesized)
gctggaaggatgaaagggcagtgttgccagagaagaaatggaactggcttgatttctgggtgggggtgaaatggaactgactccagttctgcacaggactgtgcttctcggttgtgtgtt

SEQ ID NO: 203901 - DNA, 120 bp, Artificial Sequence
  ENSG00000114770_62 (sequence is synthesized)
aacatgaactgacagtcggtgcaggcagatgtgtcttgcagtgctatgagtgggtgagagcacgttgtgtggcccgggctggtgagccagcaccgggaacataccaagtgcctggaggca

SEQ ID NO: 203902 - DNA, 120 bp, Artificial Sequence
  ENSG00000114770_63 (sequence is synthesized)
gttatcacatgtttggcaggtctgtggcaaataagccctgagaaaactagaggactgtcgaggattttagagtctgacctggagtccgtttaagtttggcttatagtgtgactgtgtggc

SEQ ID NO: 203903 - DNA, 120 bp, Artificial Sequence
  ENSG00000114770_64 (sequence is synthesized)
aagtgttggggtggcagccgtggttttccccagtctgtactgatgcagagtagacaagagagcctttgacgttcactctgtttcctgggcacctgtttcttacacctgctgtgctgcctt

SEQ ID NO: 203904 - DNA, 120 bp, Artificial Sequence
  ENSG00000114770_65 (sequence is synthesized)
acacttgagaccttgattaaatctattctctacacatttgccttgaggcatcggagcagtagtactgcttgtactgtgcgttttccatatgtgggtaagctggaggttcatggttttggt

SEQ ID NO: 203905 - DNA, 120 bp, Artificial Sequence
  ENSG00000114770_66 (sequence is synthesized)
aagtatgtgcctaagatgcatggcaattaggtaaaactaatttgcagttttgtttttgtttttatttttttaacgtttgatgcctcttgttaaagttttgatctcttttctgaagcagag

SEQ ID NO: 203906 - DNA, 120 bp, Artificial Sequence
  ENSG00000114770_67 (sequence is synthesized)
aacactacttttctggtattgggtttctatattattaataattgaccaactaacatactttatataaaagttttaagtaagaaggaccatgtaactgaaatgttgtgttatgtaatttac

SEQ ID NO: 203907 - DNA, 120 bp, Artificial Sequence
  ENSG00000114770_68 (sequence is synthesized)
caaaatggcaaacattttcatagagccagcttcccccaagaagagcttctgtcattgtttcactacagggctggtggctgctctgatctcatagaattcattcctctgggtagcaccata

SEQ ID NO: 203908 - DNA, 120 bp, Artificial Sequence
  ENSG00000114770_69 (sequence is synthesized)
tgcaggctttgcgaataaagtgatcatgggctttcttgattccatttggccaatgcaagaacttcattggctcccctctaaaaaaaattccatggattgctgggatttttattttttatt

SEQ ID NO: 203909 - DNA, 120 bp, Artificial Sequence
  ENSG00000114770_70 (sequence is synthesized)
ttttgaaaaaaatggtacctatccgtattcagcttggtggcttcacagtccctcccctgaacatccgtatattccttattctctcatttatggtgcagaacactggggtactaacctcta

SEQ ID NO: 203910 - DNA, 120 bp, Artificial Sequence
  ENSG00000114770_71 (sequence is synthesized)
ggaaactgttctagctgccagggaaagctaagagccctcctttaacaggaaagcagcagcatgctttttcttctctctgccgtttcagggaagagcaccttaaggccagtgttatttcat

SEQ ID NO: 203911 - DNA, 120 bp, Artificial Sequence
  ENSG00000114770_72 (sequence is synthesized)
gggattctgccctagagctgagaaagtaatggactcatccataatctcttttatagatttgaaagtgtaaacaatacacacttccttttttggaactccaattctaatatgtttcttttt

SEQ ID NO: 203912 - DNA, 120 bp, Artificial Sequence
  ENSG00000114770_73 (sequence is synthesized)
ccaggctggttttgagattagtactagcagtgagtaaacctcctgtctgtggacttaaatccttttgaggaacatttcgttttagatttttacaagttttctaatctggcacgactttca

SEQ ID NO: 203913 - DNA, 120 bp, Artificial Sequence
  ENSG00000114770_74 (sequence is synthesized)
aactagcttaatctgttcttacagaaacctgtgtaaggacagactgcccacatacgggctccccaaataaaatggcatttttatttcttgtccctgctcgggtttcaccgaaccttggta

SEQ ID NO: 203914 - DNA, 120 bp, Artificial Sequence
  ENSG00000114770_75 (sequence is synthesized)
gccataatcagaacaaatgaaacacagtcaagttgttgtgttctgtttgtttttacctgccagccagctgatgctgacatttatacaccaagatgatccaaggttttggtgacgccggtg

SEQ ID NO: 203915 - DNA, 120 bp, Artificial Sequence
  ENSG00000114770_76 (sequence is synthesized)
gggactgccgctatatgtgcagggtgcccgggggtcatagtaatgttaatggagtaccagaatctctaacagtgtggtcctgtgtagccacattgctacacttacagagatgctttgggg

SEQ ID NO: 203916 - DNA, 120 bp, Artificial Sequence
  ENSG00000114770_77 (sequence is synthesized)
cctttttggattaagacagttctaaaagaccaggcctcacctatgatctgtgtataaagaattagcatcgcactgtagatctgcaagagaaggccgcctcctgcagtgctctctcttggt

SEQ ID NO: 203917 - DNA, 120 bp, Artificial Sequence
  ENSG00000114770_78 (sequence is synthesized)
gaatgctaactctgctcgagggccttttggggaaaggacagtgtaaaacccttagagaggtaagtttcccacccttccaacctctctccacctgcagcttgcttggtgctgtcaggatct

SEQ ID NO: 203918 - DNA, 120 bp, Artificial Sequence
  ENSG00000114770_79 (sequence is synthesized)
ggatttggggggagtctctctgtagtggaaccagtgacagaagctgttctttagaattttcaggatggctgtattctgcggtcagaatgagagagtcaagctgggcagaatctctcgcca

SEQ ID NO: 203919 - DNA, 120 bp, Artificial Sequence
  ENSG00000114770_80 (sequence is synthesized)
agagttcaggtaaggtaatgtttattcactgggaatgctttccacagccagacagctatgctaacagtctcaagttttcttccagtttgtttagatttaaatgatacatttgtaactttt

SEQ ID NO: 203920 - DNA, 120 bp, Artificial Sequence
  ENSG00000114770_81 (sequence is synthesized)
taaaaactaaattttggttggatttttcatgaaaacctcttttttctttatcccctaaaaaatggtttgaaatgtcattgttatttaaaaacccgatgtgttggaacttctttaatctgc

SEQ ID NO: 203921 - DNA, 120 bp, Artificial Sequence
  ENSG00000114770_82 (sequence is synthesized)
tgtttcctctttttccccccctttgaaagtttcgcatagtgtaaacattcactatgtcttttaccttccctgctcctcccatctgggaggcgctgatgctattacccagtgctgaaaaat

SEQ ID NO: 203922 - DNA, 120 bp, Artificial Sequence
  ENSG00000114770_83 (sequence is synthesized)
tcgggagtggggcgggcccatgggagggtctctggatttttgatagcctgctttgtttgctctcttctgtactattaaactgctgatgtttattttcaggaatgttttgcaaatgcactt

SEQ ID NO: 203923 - DNA, 120 bp, Artificial Sequence
  ENSG00000114770_84 (sequence is synthesized)
ctttctctggtttgcaagagtctcaggaaaaacgaacaaatttcctggagagtcaggaaaggtggaaacaaatgaaccctcagcctgcattgtatgcccccaatcccccgcagttccccc

SEQ ID NO: 203924 - DNA, 120 bp, Artificial Sequence
  ENSG00000114770_85 (sequence is synthesized)
cagttctcccccttcacagccttctgcctggaaggaggcctggtgggcgcctgatggatgactgactgttgtcccagctggaaccatttggtctcatgccttctttcattcagcatgtat

SEQ ID NO: 203925 - DNA, 120 bp, Artificial Sequence
  ENSG00000114770_86 (sequence is synthesized)
ctattgagtgccacaggtatgcccgtgtattgaaaatgtcagagataagagatgagcagacaccctacactgcagcgctgccaacagagttaacctgtaaagaagcagggcggccagcac

SEQ ID NO: 203926 - DNA, 120 bp, Artificial Sequence
  ENSG00000114770_87 (sequence is synthesized)
tagctaggactacaatctcgtgccaccatgcctggctaacttttaaattttttatagtgatggggttttggagggttacacagactagtctcaaactcctggcctgaggccatcctccca

SEQ ID NO: 203927 - DNA, 120 bp, Artificial Sequence
  ENSG00000114770_88 (sequence is synthesized)
cctcagcctcccaaagtgttgtgatgacaggcataagccactgtacactgcctactttttactttttaaatgtggctactagaaaaatttaaattacattatgtggcttacatttgcagc

SEQ ID NO: 203928 - DNA, 120 bp, Artificial Sequence
  ENSG00000114770_89 (sequence is synthesized)
ttgcattatatttctattggacagtgctgaactagagtgttgatctactgtaggttagccattgattttgtattaggcatttagatccctgtaagctgttgggtttaatgattttttcct

SEQ ID NO: 203929 - DNA, 120 bp, Artificial Sequence
  ENSG00000114770_90 (sequence is synthesized)
ttggaagattttcctttatgcagtaaaattatggagacacagagtatgtagtattacatattaccagtttgctctcctgaatccctgctggtagcatattaaaaatcagtttaatgttca

SEQ ID NO: 203930 - DNA, 120 bp, Artificial Sequence
  ENSG00000114771_0 (sequence is synthesized)
aggtttactttctgtgtttctagagaccaagaagcgggacgttcaccatgggaagaaaatcgctgtaccttctgattgtggggatcctcatagcatattatatttatacgcctctcccag

SEQ ID NO: 203931 - DNA, 120 bp, Artificial Sequence
  ENSG00000114771_1 (sequence is synthesized)
ataacgttgaggagccatggagaatgatgtggataaacgcacatctgaaaactatacaaaatttggctacatttgtggagctcctgggacttcaccattttatggattcctttaaggttg

SEQ ID NO: 203932 - DNA, 120 bp, Artificial Sequence
  ENSG00000114771_2 (sequence is synthesized)
tcgggagctttgatgaagtcccaccaacctcagatgaaaatgtcactgtgactgagacaaaattcaacaacattcttgttcgggtatatgtgccaaagagaaagtctgaagcactaagaa

SEQ ID NO: 203933 - DNA, 120 bp, Artificial Sequence
  ENSG00000114771_3 (sequence is synthesized)
gggggttgttttacatccatggtggaggctggtgcgtgggaagtgctgctctaagtggttatgacttgctgtcaagatggacagcagacagacttgatgctgtcgtcgtatcaaccaact

SEQ ID NO: 203934 - DNA, 120 bp, Artificial Sequence
  ENSG00000114771_4 (sequence is synthesized)
acagattagcacctaagtatcatttcccaattcaatttgaagatgtatataatgccttaaggtggttcttacgtaaaaaagttcttgcaaaatatggtgtgaaccctgagagaatcggta

SEQ ID NO: 203935 - DNA, 120 bp, Artificial Sequence
  ENSG00000114771_5 (sequence is synthesized)
tttctggagatagtgcaggagggaatttagctgcagcagtgactcaacagctccttgatgacccagatgtcaagatcaaactcaagatccagtctttaatttatcctgcccttcagcctc

SEQ ID NO: 203936 - DNA, 120 bp, Artificial Sequence
  ENSG00000114771_6 (sequence is synthesized)
atgtagatttaccgtcatatcaagaaaattcaaattttctatttctatccaaatcactcatggtcagattctggagtgaatattttaccactgatagatcacttgaaaaagccatgcttt

SEQ ID NO: 203937 - DNA, 120 bp, Artificial Sequence
  ENSG00000114771_7 (sequence is synthesized)
ccagacaacatgtacctgtggaatcaagtcatctcttcaaatttgttaattggagttccctgctccctgagaggtttataaaaggacatgtttataacaatccaaattatggcagttctg

SEQ ID NO: 203938 - DNA, 120 bp, Artificial Sequence
  ENSG00000114771_8 (sequence is synthesized)
agctggctaaaaaatatccagggttcctagatgtgagggcagcccctttgttggctgatgacaacaaattacgtggcttacccctgacctatgtcatcacctgtcaatatgatctcttaa

SEQ ID NO: 203939 - DNA, 120 bp, Artificial Sequence
  ENSG00000114771_9 (sequence is synthesized)
gagatgatggactcatgtatgtcacccgacttcgcaacactggggttcaggtgactcataaccatgttgaggatggattccatggagcattttcatttctgggacttaaaattagtcaca

SEQ ID NO: 203940 - DNA, 120 bp, Artificial Sequence
  ENSG00000114771_10 (sequence is synthesized)
gacttataaatcagtatattgagtggctaaaggaaaatctatagtaaaacatgtagctataacatattttaaaaataaaatctgaaaacctcagaaaatttgcattagaaattggtcttt

SEQ ID NO: 203941 - DNA, 120 bp, Artificial Sequence
  ENSG00000114771_11 (sequence is synthesized)
cttagaatggtctagttaagttccacatgtagcataattcttaaataggcacttttctgttttttttttcttactgtgggatttcatttcaattttctacattgtctatctgctttttct

SEQ ID NO: 203942 - DNA, 120 bp, Artificial Sequence
  ENSG00000114771_12 (sequence is synthesized)
gagattttccttcttacactgttaatcttattttaaaaaatattacattcttgtatactttatttttgtgagttggctactatttacgatgcaagagaataaatgtgagcaaatattgcc

SEQ ID NO: 203943 - DNA, 120 bp, Artificial Sequence
  ENSG00000114779_0 (sequence is synthesized)
gctggatggggcccggcctcttcccagcgttcctcctccggccccaggtcaccgccagcacgcgcctgcttcccgtctgcgcgagtccacgcagctccccaggcccttcaccagcacagc

SEQ ID NO: 203944 - DNA, 120 bp, Artificial Sequence
  ENSG00000114779_1 (sequence is synthesized)
agcagcaggcatggcagcaagcgtggagcagcgcgagggcaccatccaggtgcagggccaggccctcttcttccgagaggccctgcccggcagtgggcaggctcgcttctctgtactgct

SEQ ID NO: 203945 - DNA, 120 bp, Artificial Sequence
  ENSG00000114779_2 (sequence is synthesized)
gctgcatggtattcgcttctcctccgagacctggcagaacctgggtacactgcacaggctggcccaggctggctaccgggctgtggccattgacctgccaggtctggggcactccaagga

SEQ ID NO: 203946 - DNA, 120 bp, Artificial Sequence
  ENSG00000114779_3 (sequence is synthesized)
agcagcagcccctgcccctattggggagctggcccctggcagcttcctggcggctgtggtggatgccttggagctgggccccccggttgtgatcagtccatcactgagtggcatgtactc

SEQ ID NO: 203947 - DNA, 120 bp, Artificial Sequence
  ENSG00000114779_4 (sequence is synthesized)
cctgcccttcctcacggcccctggctcccagctcccgggctttgtgccagtggcccccatctgcactgacaaaatcaatgctgccaactatgccagtgtgaagactccagctctgattgt

SEQ ID NO: 203948 - DNA, 120 bp, Artificial Sequence
  ENSG00000114779_5 (sequence is synthesized)
atatggagaccaggaccccatgggtcagaccagctttgagcacctgaagcagctgcccaaccaccgggtgctgatcatgaagggggcggggcacccctgttacctggacaaaccagagga

SEQ ID NO: 203949 - DNA, 120 bp, Artificial Sequence
  ENSG00000114779_6 (sequence is synthesized)
cctgctctgagctctctcttgcacgctctctcttctctcccaggctctggctcatgcacatgcaacaggtgcgtctgtctatatgtctgggttcttgtcttttgtggtctgtttgtcttt

SEQ ID NO: 203950 - DNA, 120 bp, Artificial Sequence
  ENSG00000114779_7 (sequence is synthesized)
tctacctctttctcttgcagtgatagactgagggggtaaaatcaagagaaaaaactctcaggaatcaaggaacataatcctgtggagggtaatccattacatgagcttctcctgttcttc

SEQ ID NO: 203951 - DNA, 120 bp, Artificial Sequence
  ENSG00000114779_8 (sequence is synthesized)
cactttcctgcctggctttcactccttcccctgctctgcccagcctttccctcccacccactcctccttctgcaaatgccctgaaggccagcccttaccccaacacccacttccccacct

SEQ ID NO: 203952 - DNA, 120 bp, Artificial Sequence
  ENSG00000114779_9 (sequence is synthesized)
ccttaggccccagatacatacatgcccacatgcacgcttacatgtttagagccatccttgtttccaaatatgacccttcgcttgagggcaactgcataggtacatctaactctggactgg

SEQ ID NO: 203953 - DNA, 120 bp, Artificial Sequence
  ENSG00000114779_10 (sequence is synthesized)
catgcacattgtcatgtgcagctttgcatatacacacatgcatacatgagcctccacacaagcacttgcacacatgtggactcctaaccatgctaacctcactggctgggaaggtgggga

SEQ ID NO: 203954 - DNA, 120 bp, Artificial Sequence
  ENSG00000114779_11 (sequence is synthesized)
ccccatgggccagcccttgcaggaggcccttttgcaaggcttagggtgtggccagccctgaaagctacttggacacaggtttcagctggccccagcccagaagtgacccccagaaaggga

SEQ ID NO: 203955 - DNA, 120 bp, Artificial Sequence
  ENSG00000114779_12 (sequence is synthesized)
gggccaccgctttgccccctgcttttacccttccttctgggtgctctacacctcaggttaccaggcctgaggcatctcagccaagcttgtttcctgctctgaggcttgtggggtgggagc

SEQ ID NO: 203956 - DNA, 120 bp, Artificial Sequence
  ENSG00000114779_13 (sequence is synthesized)
ctccggccccaggtcaccgccagcacgcgcctgcttcccgtctgcgcgagtccacgcagctccccagatcaagaagctgaggccccaggttacacactaaagtaaatggcagaggcagaa

SEQ ID NO: 203957 - DNA, 120 bp, Artificial Sequence
  ENSG00000114779_14 (sequence is synthesized)
ataacacctatgtcctcctgaccccaaggcatgttcttaaagttctggaaacctcctggaggcttccttgctgctcctctgggactgccaccctgggcagggtgttctgtggcccctcat

SEQ ID NO: 203958 - DNA, 120 bp, Artificial Sequence
  ENSG00000114779_15 (sequence is synthesized)
cccggcgccagcggccgcgtcggcgcggatgtccccgcccgcctctggttcgggcctcagcgagattactggaggattagatccggatcccgtccccgggcagcggccgccgcggccagc

SEQ ID NO: 203959 - DNA, 120 bp, Artificial Sequence
  ENSG00000114779_16 (sequence is synthesized)
gccgccccgcgagttgcgagctccgggctggccctgctctgacaggctcgccccgccccacacgacacgcctgccactcctgcccccaggtcgctgaagagttcgaaaccgtgctcagca

SEQ ID NO: 203960 - DNA, 120 bp, Artificial Sequence
  ENSG00000114779_17 (sequence is synthesized)
ccgcgtttggggcatgtgagaccgagaggctttgggaaactgacgccgctgtgagaacgagtttagcggagtctatggacgctgcgagcttgtggccacaagagggcgccccggagcacg

SEQ ID NO: 203961 - DNA, 120 bp, Artificial Sequence
  ENSG00000114779_18 (sequence is synthesized)
actcagcagactactgtgccaagccctgtgctaaactgtgttctggggcagacaccaatctgtgcccccacccactgggccagcttgtctctctccctcatatggggtggtcccaggaag

SEQ ID NO: 203962 - DNA, 120 bp, Artificial Sequence
  ENSG00000114779_19 (sequence is synthesized)
ctactcatggcgcctgccctggttggcgatgtgttaccaacgtctggcctgtcccagcccaaggctccgcgtggcgaccaggcccagcactgggaggctgtgcagagcgtggcgtttact

SEQ ID NO: 203963 - DNA, 120 bp, Artificial Sequence
  ENSG00000114779_20 (sequence is synthesized)
gcttattgctactctgcagaggttggcaacatctgacccgctctactggcaggaaacaggctcgggggcattgggaaaacgatcaaggccacttggctggacactggcggagcctcgcac

SEQ ID NO: 203964 - DNA, 120 bp, Artificial Sequence
  ENSG00000114779_21 (sequence is synthesized)
tcaaacctgtcgggcctcaactccgtgccaggccaacaagttgccctgggcagttcaagctggggataagggggatggggagcaggaagacagcagcaaggatgcgatcccgaaggaact

SEQ ID NO: 203965 - DNA, 120 bp, Artificial Sequence
  ENSG00000114779_22 (sequence is synthesized)
cttaaggggcaggcttctgggcagggtttggggaggtctcattagggacagggccaggttcctataacatgtagcccctccccactccaggggtgggggcggtgggatctggaggaccca

SEQ ID NO: 203966 - DNA, 120 bp, Artificial Sequence
  ENSG00000114784_0 (sequence is synthesized)
gagaagccgcagcgccgcctcttctctcgcgccctcgcctcttcctccgcctcctccttcgcctcttcctgcctcctcccggcttccgccgccgccactccagcctaatcccaaccccag

SEQ ID NO: 203967 - DNA, 120 bp, Artificial Sequence
  ENSG00000114784_1 (sequence is synthesized)
ggcgaagcgttttcttatttatttccgttttctcgccactacagcctcctgacaaggtgatccgggcgggccccgcaggaattttatcccctcaccggcctcacactagtatcgcatgtc

SEQ ID NO: 203968 - DNA, 120 bp, Artificial Sequence
  ENSG00000114784_2 (sequence is synthesized)
cactatccagaacctccaatctttcgacccctttgctgatgcaactaagggtgacgacttactcccggcagggactgaggattacattcatataagaatccagcaacggaacggcagaaa

SEQ ID NO: 203969 - DNA, 120 bp, Artificial Sequence
  ENSG00000114784_3 (sequence is synthesized)
gacactgactactgttcagggcattgcagatgattatgacaaaaagaaacttgtgaaagctttcaaaaagaaatttgcctgtaatggtactgtgattgaacatcctgaatacggagaggt

SEQ ID NO: 203970 - DNA, 120 bp, Artificial Sequence
  ENSG00000114784_4 (sequence is synthesized)
aaacatctgccagtttctcttggaggttggcattgtaaaggaggaacagcttaaggttcatggattctaaaatgaacctaaatacgtggagaatttcttgaatagttttgttctctaaac

SEQ ID NO: 203971 - DNA, 120 bp, Artificial Sequence
  ENSG00000114784_5 (sequence is synthesized)
ccggtttggctgccttgtgaaatgattccctgcagtaaacggacttttcatttatttaatcattcaaacttccattcacatctgcatgattacagaaaacatggggtatgtagactagta

SEQ ID NO: 203972 - DNA, 120 bp, Artificial Sequence
  ENSG00000114784_6 (sequence is synthesized)
acacataagaaaattgcagtaagatggtaacaaaacctcatattgtctttacatgtttccaatggaaaatgttttgagtgtttattgttcagtttattacgtttcacttgattaaatttt

SEQ ID NO: 203973 - DNA, 120 bp, Artificial Sequence
  ENSG00000114784_7 (sequence is synthesized)
tttgttgttgtattaaaccatgtacgttgcagcttaacaataaaaaaaaatctatgaatctttgtgagcaattatgctcccaaatctaagcaagtaaaatacacattttgtctttcttaa

SEQ ID NO: 203974 - DNA, 120 bp, Artificial Sequence
  ENSG00000114784_8 (sequence is synthesized)
ccagtttctcttggaggtgagtgattgggtgctttatgtgtaaccttgagattgcttttaaaattgtatttaaaggcaacatgatttgttttctactaagtaaaaaatcatacgaatgaa

SEQ ID NO: 203975 - DNA, 120 bp, Artificial Sequence
  ENSG00000114784_9 (sequence is synthesized)
ggaaattaggtgaaataaagacatggtagttatttggaaagcaaagacctttatctggtttattttgtcattagagtattctgatcatttctttatatacacacacaggctatttcttgg

SEQ ID NO: 203976 - DNA, 120 bp, Artificial Sequence
  ENSG00000114784_10 (sequence is synthesized)
catattgaacgataacattatttatctataacagcgtttttctacaatggacatagctgttcaaatgtttctctttttgtgagagtatcttgggggttttattaatactccacccccatc

SEQ ID NO: 203977 - DNA, 120 bp, Artificial Sequence
  ENSG00000114784_11 (sequence is synthesized)
tccattcctaccggcaaaaacagcaaaggcactagaaccttcattgatgactgtctggattggtagtataatgtatttctggaaagtacttcttaaaaaatatttttctactttggattt

SEQ ID NO: 203978 - DNA, 120 bp, Artificial Sequence
  ENSG00000114784_12 (sequence is synthesized)
acttgtgaaagctttcaaaaaggtaaagggattaggaagaaaggattagagttactgatgcacacctctgaactggattatgattcacacctttatatcggcgtggatgaaaataactag

SEQ ID NO: 203979 - DNA, 120 bp, Artificial Sequence
  ENSG00000114784_13 (sequence is synthesized)
accaagaaagttgttctcatttttgtaattaacatgtaaatatttagttattctcccagtgtggtctctcattttaaaagaagattcgcgttgcttttaaataaatttaaatgtgaaata

SEQ ID NO: 203980 - DNA, 120 bp, Artificial Sequence
  ENSG00000114784_14 (sequence is synthesized)
tttagttcttgatgttacacataaaatcatttcctggtttacaaattaatttggaaggattgtggattataggagacaaaatctgtttctctaaatatgatctagcttactgaaatggct

SEQ ID NO: 203981 - DNA, 120 bp, Artificial Sequence
  ENSG00000114784_15 (sequence is synthesized)
aattctgttcatacggtgaaataaaacctcatagtagttgactaaattttgttgtatatttatgcacttttccagaaatttgcctgtaatggtactgtgattgaacatcctgaatacgga

SEQ ID NO: 203982 - DNA, 120 bp, Artificial Sequence
  ENSG00000114790_0 (sequence is synthesized)
agaactctgcgctactgcccacgcatctcacaaagtctactacgccgcgcgttctcggtttcaacgcacctccaggattcagggcttcctaagctgcaattcagcagggctcccttgctt

SEQ ID NO: 203983 - DNA, 120 bp, Artificial Sequence
  ENSG00000114790_1 (sequence is synthesized)
gttctcactctgtgcccccggcaacgaccccgcgcgcctacactcccgtgccgcctcagctactagtccgcaacttctagccccaaaacgctggagctcagaacccagctcaggcaagac

SEQ ID NO: 203984 - DNA, 120 bp, Artificial Sequence
  ENSG00000114790_2 (sequence is synthesized)
taactcggtgttgctcctcccggcgctgacttcgaggcccggctatggacggcgagagcgaggtggatttttctagcaacagcataacccctttgtggcggaggcggtcgattcctcagc

SEQ ID NO: 203985 - DNA, 120 bp, Artificial Sequence
  ENSG00000114790_3 (sequence is synthesized)
cccaccaggttctgggccggagcaagccgaggccccagtcctaccagagccccaacgggttactaattacggatttcccggtggaggacggagggacgctcctcgcagcgcagattcccg

SEQ ID NO: 203986 - DNA, 120 bp, Artificial Sequence
  ENSG00000114790_4 (sequence is synthesized)
cccaggtgcccaccgcctcggacagcaggacggtacataggagccccctgcttctgggcgcccagcggagagcggtggccaatggtgggacggcatccccggagtacagggctgcctctc

SEQ ID NO: 203987 - DNA, 120 bp, Artificial Sequence
  ENSG00000114790_5 (sequence is synthesized)
ctcgacttcgacggcccaagtcacccaagctccccaaagcggtgcctggcggctccccgaaatccccagcaaatggcgcggtgaccttgcctgcgccgccgccgccgccggttctgcgcc

SEQ ID NO: 203988 - DNA, 120 bp, Artificial Sequence
  ENSG00000114790_6 (sequence is synthesized)
ccccgcggactcctaacgcgcccgccccctgcacccccgaggaggaccttactgggttgactgccagcccggtgccttcgcccactgcaaatggccttgccgctaataacgactctcctg

SEQ ID NO: 203989 - DNA, 120 bp, Artificial Sequence
  ENSG00000114790_7 (sequence is synthesized)
ggtcaggttcgcagtccggccggaaggcaaaggaccccgaacgggggctctttcctgggccccagaaaagttcttcggaacaaaaactccccctccaaaggctgccctcccaggagaacg

SEQ ID NO: 203990 - DNA, 120 bp, Artificial Sequence
  ENSG00000114790_8 (sequence is synthesized)
agctcctcgagaatccttccgtggttttgagtacaaacagccccgccgccctcaaagtggggaagcagcagatcattccgaagagtctggcctcggaaattaaaataagtaaatccaaca

SEQ ID NO: 203991 - DNA, 120 bp, Artificial Sequence
  ENSG00000114790_9 (sequence is synthesized)
atcaaaatgtggagccccacaagagactcctcaaggtgcgcagcatggtggagggcctaggaggacccctgggtcacgcaggggaggagagtgaggtcgataacgacgtggatagcccag

SEQ ID NO: 203992 - DNA, 120 bp, Artificial Sequence
  ENSG00000114790_10 (sequence is synthesized)
ggtctctgcggagaggcttgcggtccacgtcttatcgcagggcagtggtcagtggctttgattttgacagtcctaccagctcgaagaagaagaacagaatgtcccagcctgttctgaaag

SEQ ID NO: 203993 - DNA, 120 bp, Artificial Sequence
  ENSG00000114790_11 (sequence is synthesized)
tggtgatggaagacaaggagaagttttccagtctgggaaggataaagaaaaaaatgctgaaaggacaaggaacatttgatggggaagaaaatgctgtcctgtatcaaaactacaaggaaa

SEQ ID NO: 203994 - DNA, 120 bp, Artificial Sequence
  ENSG00000114790_12 (sequence is synthesized)
aggcccttgacattgattctgatgaagagtcagagcccaaagaacagaagtcagatgaaaaaattgtgattcaccataagccattgagatccacatggagccaactctctgcggtgaaaa

SEQ ID NO: 203995 - DNA, 120 bp, Artificial Sequence
  ENSG00000114790_13 (sequence is synthesized)
gaaagggattatctcagacagtaagccaggaggaaagaaagagacaagaggctatctttgaagtcatatcctctgaacattcatatttactcagcttggagatcttgatacgaatgttta

SEQ ID NO: 203996 - DNA, 120 bp, Artificial Sequence
  ENSG00000114790_14 (sequence is synthesized)
aaaattctaaagaactgagtgatacaatgactaaaaccgagaggcaccatcttttctccaatattacagatgtctgtgaggcaagcaaaaagttctttatagagttggaagcaagacatc

SEQ ID NO: 203997 - DNA, 120 bp, Artificial Sequence
  ENSG00000114790_15 (sequence is synthesized)
agaataatatcttcatagatgacataagtgacattgtggaaaaacacacagcatccacatttgacccatatgtgaaatactgcacaaatgaagtctaccaacaacgaacactacaaaaat

SEQ ID NO: 203998 - DNA, 120 bp, Artificial Sequence
  ENSG00000114790_16 (sequence is synthesized)
tgttagctaccaatccatcctttaaggaagtattgtcaaggattgagtcccatgaagactgtaggaacttacccatgatctcttttctcattctccccatgcagagggtgacccgccttc

SEQ ID NO: 203999 - DNA, 120 bp, Artificial Sequence
  ENSG00000114790_17 (sequence is synthesized)
ccctgctgatggatactatctgtcaaaaaacacctaaggactctccgaagtatgaagtctgcaaaagagccttgaaggaagttagcaagttggttcgactatgcaatgagggcgcccgga

SEQ ID NO: 204000 - DNA, 120 bp, Artificial Sequence
  ENSG00000114790_18 (sequence is synthesized)
agatggaaaggactgagatgatgtacacaattaactcccagctggaatttaaaattaagccttttcctttagtctcctcttcccggtggttggtaaaaagaggtgaattgacagcctatg

SEQ ID NO: 204001 - DNA, 120 bp, Artificial Sequence
  ENSG00000114790_19 (sequence is synthesized)
ttgaagacactgtgcttttctcaagaaggacatccaaacagcaagtctacttctttctctttaacgatgtgctcattatcaccaagaagaagagtgaagaaagttacaacgtcaatgatt

SEQ ID NO: 204002 - DNA, 120 bp, Artificial Sequence
  ENSG00000114790_20 (sequence is synthesized)
attccttaagagatcagctattggtggaatcttgtgacaatgaagagcttaattcttctccagggaagaacagctccacaatgctctattcaagacagagctctgccagtcacctcttta

SEQ ID NO: 204003 - DNA, 120 bp, Artificial Sequence
  ENSG00000114790_21 (sequence is synthesized)
gggacacagcagcgggaagccgcctgcagaccgaacctcactgacccaggtggaaatcgttaggtcatttactgctaagcagccagatgaactctccctgcaggtggctgacgtcgtcct

SEQ ID NO: 204004 - DNA, 120 bp, Artificial Sequence
  ENSG00000114790_22 (sequence is synthesized)
catctatcaacgtgtcagcgatggctggtatgagggggaacgactacgagatggagaaagaggctggtttcctatggaatgtgccaaggagataacatgtcaagctacaattgataagaa

SEQ ID NO: 204005 - DNA, 120 bp, Artificial Sequence
  ENSG00000114790_23 (sequence is synthesized)
tgtggagagaatgggacgcttgctaggactggagaccaacgtgtagtctctcagatggtcttttgttactgcaagatttgcacgacacttaccgggctggttggttctgggctagtttta

SEQ ID NO: 204006 - DNA, 120 bp, Artificial Sequence
  ENSG00000114790_24 (sequence is synthesized)
ttgttaattttgtcacagcctatttaattaaaagaacgaaaacacttgcctttaagcttgccaggttgttctgctctctcatgagaagagcttggatacagtgagtttgcacagctcagt

SEQ ID NO: 204007 - DNA, 120 bp, Artificial Sequence
  ENSG00000114790_25 (sequence is synthesized)
ttttacctaaccacacacttgcagacctcctgaggtacacagaatagctgagcagttcacttcagggatcaggtcatctctgctcctcctagtttcaccatgttctggcaataaaaaaca

SEQ ID NO: 204008 - DNA, 120 bp, Artificial Sequence
  ENSG00000114790_26 (sequence is synthesized)
catattatatcctggttttctctatccttgcattactaaggtgactgtctctctttatacatccttgtatggttctcccagtattagcaagattgtatatctgtaaagaatgtccagttt

SEQ ID NO: 204009 - DNA, 120 bp, Artificial Sequence
  ENSG00000114790_27 (sequence is synthesized)
tgtaaatatttccctgcctttttttttctttttttacatctgattttaatgcttcgttaacttcaaaaggaactggtagagttcagaaggtgagctgttgtttttctaaacctcttccca

SEQ ID NO: 204010 - DNA, 120 bp, Artificial Sequence
  ENSG00000114790_28 (sequence is synthesized)
ggaaggggacattgacacttgaatttttgtcacctttttcctcattagaaggaaagtagaaagccttactttaggatttttaaaaaaaaatccatctcaccccatattgttcttaaataa

SEQ ID NO: 204011 - DNA, 120 bp, Artificial Sequence
  ENSG00000114790_29 (sequence is synthesized)
gtatagactaattaacctaagctacctttaacaacgtagaatttagatgggttcatatatgtgagaaaaacctgaatataggacaggggtcctacttttttccccacctctgtcgcccag

SEQ ID NO: 204012 - DNA, 66 bp, Artificial Sequence
  ENSG00000114790_30 (sequence is synthesized)
tttcatcatgttggccaggatggtctcttaactcctgccctcaagtgatccaccagagaggagatc

SEQ ID NO: 204013 - DNA, 87 bp, Artificial Sequence
  ENSG00000114790_31 (sequence is synthesized)
ccaaatgagctgataaaaaactgacgtgaggctgctttgccttcaataatacctagttttcagctgttccaactcgtttccaaatag

SEQ ID NO: 204014 - DNA, 120 bp, Artificial Sequence
  ENSG00000114790_32 (sequence is synthesized)
aatacctagttttcagctgttccaactcgtttccaaatagaaattagctggaacacactacagtaatctcaaggaagggaaaattaggccttaaaagataccaagaagtcagcatggtac

SEQ ID NO: 204015 - DNA, 120 bp, Artificial Sequence
  ENSG00000114790_33 (sequence is synthesized)
ccaattgaaaccttttgaccttagtgggaattcattctatttgcactaaaagccttaacttgctgtattcagagtccctcttaactgtgagtttctatagaactttactttttccactag

SEQ ID NO: 204016 - DNA, 120 bp, Artificial Sequence
  ENSG00000114790_34 (sequence is synthesized)
tgcacagagagagaaaggttatcttaatagtcggtttcatggagatgaaggatgggagattaagaggggggaaatgatttttactggcagctatattccctctctgttctatttgcttta

SEQ ID NO: 204017 - DNA, 120 bp, Artificial Sequence
  ENSG00000114790_35 (sequence is synthesized)
acaaagggataaaacctggcaaagtgtacattattggaggactcaaatctgtatgtgacatgtcccaactactgtccgctaactagttatccaaattgtaaagctacagaagcccagttg

SEQ ID NO: 204018 - DNA, 120 bp, Artificial Sequence
  ENSG00000114790_36 (sequence is synthesized)
aggggtaagtgtgcctggctcacacagcctgcaccctgtcacctcggcaatgagccagtgtggggcactggggacttctaacccttggattgctctttttgacctgtgcataccttctaa

SEQ ID NO: 204019 - DNA, 120 bp, Artificial Sequence
  ENSG00000114790_37 (sequence is synthesized)
ttgtaaaatatatttcagaccgtgagtaccttgagatctgagcaactgtgttaatgaagtaatagcaatggtccacagtgaaagatgtgttggggtttgcaaaacaagcattccgtcacc

SEQ ID NO: 204020 - DNA, 120 bp, Artificial Sequence
  ENSG00000114790_38 (sequence is synthesized)
tctttaataatgtcacagactttttaaaagagaggctatcaagttgtaatataatctgtcatgttttatttaggaaggaaggtaaatttgtgcttgcacggggatcattttgtattattt

SEQ ID NO: 204021 - DNA, 120 bp, Artificial Sequence
  ENSG00000114790_39 (sequence is synthesized)
ttgctaatacccagttgaagctaaaaagcaactatttgaatcctgtgaattaatttataagaatgttaaacagctttggaaatacatgcatcttatgaatcatagccttatttagcaaga

SEQ ID NO: 204022 - DNA, 120 bp, Artificial Sequence
  ENSG00000114790_40 (sequence is synthesized)
tcaatgttaaagtgttgttatatggcaagtatttaacacattcacagtgtttgtttgatttcaactgtgaattgtcttaagttttttcaaacctagttgtttctatggacacctgctctg

SEQ ID NO: 204023 - DNA, 120 bp, Artificial Sequence
  ENSG00000114790_41 (sequence is synthesized)
aattgtacattgacttcattactaaagaacaaaaatgttcatttttgtcccagtaaattgagactgcttgtacactttcagaaaaatatgtgaatttataaagattttgtagatacttgt

SEQ ID NO: 204024 - DNA, 120 bp, Artificial Sequence
  ENSG00000114790_42 (sequence is synthesized)
gggccggcgccggcgccgcggtcggcggcagcgctctcctaagctctcgcggctgcgcttcggtcccggacccgggccacccacggggtagtgggtgctcctcggccccggacattgcaa

SEQ ID NO: 204025 - DNA, 120 bp, Artificial Sequence
  ENSG00000114790_43 (sequence is synthesized)
agcttttactttcagtaaacttaaaaggatttcaatttagctttggtcactgggtttttctccttttgtagccttttcctttagtctcctcttcccggtggttggtaaaaagaggtgaat

SEQ ID NO: 204026 - DNA, 120 bp, Artificial Sequence
  ENSG00000114796_0 (sequence is synthesized)
gttgtgagctgcggcagagactggtggctggaggagacgccggcgctggagagtgcgctgcgccgcccgccgctgagggaccgcggggttagccactgctggctgcttccagtgttcgcc

SEQ ID NO: 204027 - DNA, 120 bp, Artificial Sequence
  ENSG00000114796_1 (sequence is synthesized)
gagaggtaccgggggtgacagctccgggaccggccgaaaggcgaggaaccggtgtggaaattaaaagaacacacatattttgactggggctttgatcaaccaaatgctaaaaagccacat

SEQ ID NO: 204028 - DNA, 120 bp, Artificial Sequence
  ENSG00000114796_2 (sequence is synthesized)
aaagaagatccctaatagtcatttctcaacaattatatagtcaactgatgtaacaatggtactaatattgggacgcagactaaacagagaggatcttggggtgcgtgattccccagcaac

SEQ ID NO: 204029 - DNA, 120 bp, Artificial Sequence
  ENSG00000114796_3 (sequence is synthesized)
taagcgaaaagtttttgaaatggaccccaaatctctgacaggtcatgagttttttgacttctcttcaggatcatcccatgccgaaaacatactccagatatttaatgaatttcgtgatag

SEQ ID NO: 204030 - DNA, 120 bp, Artificial Sequence
  ENSG00000114796_4 (sequence is synthesized)
ccgcttattcacagatgttatcatttgtgtggaaggaaaagaatttccttgccatagagctgtgctctcagcctgtagcagctacttcagagctatgttttgtaatgaccacagggaaag

SEQ ID NO: 204031 - DNA, 120 bp, Artificial Sequence
  ENSG00000114796_5 (sequence is synthesized)
ccgagaaatgttggttgagatcaatggtattttagctgaagctatggaatgttttttgcagtatgtttatactggaaaggtgaagatcactacagagaatgtacagtatctctttgagac

SEQ ID NO: 204032 - DNA, 120 bp, Artificial Sequence
  ENSG00000114796_6 (sequence is synthesized)
atcaagcctctttcagattagtgttctccgtgatgcatgtgccaagttcttggaggagcaacttgatccttgtaattgcttaggaatccagcgctttgctgatacccattcactcaaaac

SEQ ID NO: 204033 - DNA, 120 bp, Artificial Sequence
  ENSG00000114796_7 (sequence is synthesized)
actcttcacaaaatgcaaaaattttgcgttacagacttttgaggatgtatcccagcacgaagaatttcttgagcttgacaaagatgaacttattgattatatttgtagtgatgaacttgt

SEQ ID NO: 204034 - DNA, 120 bp, Artificial Sequence
  ENSG00000114796_8 (sequence is synthesized)
tattggtaaagaggagatggtttttgaagccgtcatgcgttgggtctatcgtgccgttgatctgagaagaccactgttacacgagctcctgacacatgtgagactccctctgttgcatcc

SEQ ID NO: 204035 - DNA, 120 bp, Artificial Sequence
  ENSG00000114796_9 (sequence is synthesized)
caactactttgttcaaacagttgaagtggaccaattgatccagaattctcctgagtgttatcagttgttgcatgaagcaagacggtaccacatacttgggaatgaaatgatgtccccaag

SEQ ID NO: 204036 - DNA, 120 bp, Artificial Sequence
  ENSG00000114796_10 (sequence is synthesized)
gactaggccacgcaggtccactggctattctgaggtgatagttgtcgttggaggatgtgagcgagttggaggatttaatcttccatacactgagtgctacgatcctgtaacaggagaatg

SEQ ID NO: 204037 - DNA, 120 bp, Artificial Sequence
  ENSG00000114796_11 (sequence is synthesized)
gaagtctttggctaagcttccagaatttaccaaatcagagtatgcagtctgtgctctaaggaatgacattcttgtttcaggtggaagaatcaacagccgtgatgtctggatttataactc

SEQ ID NO: 204038 - DNA, 120 bp, Artificial Sequence
  ENSG00000114796_12 (sequence is synthesized)
acagttaaatatttggatcagagttgcctctctcaataaaggcagatggcgtcacaaaatggctgtcctccttggtaaagtatatgttgtcggtggctatgatgggcaaaacagacttag

SEQ ID NO: 204039 - DNA, 120 bp, Artificial Sequence
  ENSG00000114796_13 (sequence is synthesized)
cagcgtagaatgttatgattccttttcaaatcgatggactgaagttgctccccttaaggaagccgtgagttctcctgcagtgactagctgtgtaggcaaactgtttgtgattggtggagg

SEQ ID NO: 204040 - DNA, 120 bp, Artificial Sequence
  ENSG00000114796_14 (sequence is synthesized)
acctgatgataatacttgttctgataaggttcaatcttatgatccagaaaccaattcttggctacttcgtgcagctatcccaattgccaaaaggtgtataacagctgtatccctaaacaa

SEQ ID NO: 204041 - DNA, 120 bp, Artificial Sequence
  ENSG00000114796_15 (sequence is synthesized)
cctgatctatgttgccggtggactgaccaaggcaatatactgttacgatccagttgaagattactggatgcacgtacagaatacattcagccgtcaggaaaactgtggtatgtctgtgtg

SEQ ID NO: 204042 - DNA, 120 bp, Artificial Sequence
  ENSG00000114796_16 (sequence is synthesized)
taatggtaaaatatatatcctgggcggaagacgggaaaatggagaagccacagacactattctctgttatgatcctgcaacaagtatcatcacaggggtagctgcaatgcccaggccagt

SEQ ID NO: 204043 - DNA, 120 bp, Artificial Sequence
  ENSG00000114796_17 (sequence is synthesized)
gtcctatcatggctgtgtgactattcatagatacaatgagaaatgctttaaactctgaagacaggatacctcaccgaagaagccacactgatccaagatgggaggttttaaaaactctac

SEQ ID NO: 204044 - DNA, 120 bp, Artificial Sequence
  ENSG00000114796_18 (sequence is synthesized)
agtgggaacttcacatatctcctttgtgccatatgcaaaaaatagtaaaaataataatttggtgcctttctcctcaaaatatcaatctttcaaactataataaagcctttcctataattg

SEQ ID NO: 204045 - DNA, 120 bp, Artificial Sequence
  ENSG00000114796_19 (sequence is synthesized)
aaaaaaaaaacttttttgttaaaggtaatggtggttgttacttggcctttgaagagtgtacctttgtaagtatttgtaagaagtctatgtgaattaggaaatgtctgtctgcataccttt

SEQ ID NO: 204046 - DNA, 120 bp, Artificial Sequence
  ENSG00000114796_20 (sequence is synthesized)
taggagcgtgtgaatggtgtcttcacttattatgtatgtttatctgtatgtatattccttattttgtcatatatgtagagaaaattgcatgacttgaggcatcatttaggttgaagaagt

SEQ ID NO: 204047 - DNA, 120 bp, Artificial Sequence
  ENSG00000114796_21 (sequence is synthesized)
taatgcttaggatgcattctaggagaaaaaatcagttttaaaaacctttgttgttaacaaagtatatccagattggttaattttattgaagggtttttttctgtaattgataaaaatgta

SEQ ID NO: 204048 - DNA, 120 bp, Artificial Sequence
  ENSG00000114796_22 (sequence is synthesized)
atgacaacaattcaggcatcataaaatactgaactattgtgactttattcttagaattgctgtcttacattaaacatgtttttagggggaagttaggtaggagatagaaaaataagtgcc

SEQ ID NO: 204049 - DNA, 120 bp, Artificial Sequence
  ENSG00000114796_23 (sequence is synthesized)
cctacaagggggattaaaattacaagttaattcctaagagaaaaatggaatggcctttgaaggaaaaatgacccactatggctctcaaagtttttatgcatcatctcttcaatcctctaa

SEQ ID NO: 204050 - DNA, 120 bp, Artificial Sequence
  ENSG00000114796_24 (sequence is synthesized)
gaaagcctcttttcttaacttgataaagcagtggaaacccattttgcaatattgttttgtgaaaaacagggacagacagccaggtacagagactcacacctgtactcccaactactcagc

SEQ ID NO: 204051 - DNA, 120 bp, Artificial Sequence
  ENSG00000114796_25 (sequence is synthesized)
gaggattgcttgagcccaggagtctgaggctacagtgagctatgaacgcacacggcaccctagcctgggcaacaggttgcgacactgtctcaagagaaaagaaaaagaaaaatagggata

SEQ ID NO: 204052 - DNA, 120 bp, Artificial Sequence
  ENSG00000114796_26 (sequence is synthesized)
aaaatagggataggttttccttcctagcccagtagagtttgacctcattagtatggtgctttgggtgaggacctcttccttgattatcccactttctagtgaacagctaaaattcctgag

SEQ ID NO: 204053 - DNA, 120 bp, Artificial Sequence
  ENSG00000114796_27 (sequence is synthesized)
agtctctactgttaaggtacctttaataggataaagcagggaccacctatctcagtgggtccatttttcttttaaaattagttatctgaaaaaacttagcagtagttcccatctttaagg

SEQ ID NO: 204054 - DNA, 120 bp, Artificial Sequence
  ENSG00000114796_28 (sequence is synthesized)
taagtctttcatttggtccccattgtgtaaaatactaatcaacattttcaagcttctgtacaacagactgcttttgtctagatttctcaactccactttataaagcttatcagttttcag

SEQ ID NO: 204055 - DNA, 120 bp, Artificial Sequence
  ENSG00000114796_29 (sequence is synthesized)
agaggaatgtgaattttttttctaatgcaaataaatggatatggcaggaactacagcataagtgattattgtgattctgggtggacggatataatttacaacatttagggatgttctagg

SEQ ID NO: 204056 - DNA, 120 bp, Artificial Sequence
  ENSG00000114796_30 (sequence is synthesized)
agtttgacttccagtcactgttgtctttcacattataatttgtatatttcttgtgatagaagggatgatgcaaatatgtaattaaagtgtcaccagatttctgttaaaaccaaggttgaa

SEQ ID NO: 204057 - DNA, 120 bp, Artificial Sequence
  ENSG00000114796_31 (sequence is synthesized)
ataaaaagcctaacattggtaagctacattgttttctcattttagaatgattcagagatttcagatagacattttttaaactttaatgcttagctagaatctacattctgaggaaaactc

SEQ ID NO: 204058 - DNA, 120 bp, Artificial Sequence
  ENSG00000114796_32 (sequence is synthesized)
taaaaaacttaaaaatttttagggaatttttatttttcaaatcataattttaaaatgatagataccattttgtgataacaacaattcagaaaacaattttctatcctcttagttgaaaga

SEQ ID NO: 204059 - DNA, 120 bp, Artificial Sequence
  ENSG00000114796_33 (sequence is synthesized)
atgtaggtacagtttggatacttgtactttaattttagagtaaacatctgcattatactcttatagataatagaattatttagttaagaaattctttacagtaaatgagataatgtgtga

SEQ ID NO: 204060 - DNA, 120 bp, Artificial Sequence
  ENSG00000114796_34 (sequence is synthesized)
aaaagtattttgtaaatgctgaggattctacaaatgatagttgttattttcatgtgtatttgtaagatcatgtccatttcatgaatataggacttcacataaaaaaagactttctcaaga

SEQ ID NO: 204061 - DNA, 120 bp, Artificial Sequence
  ENSG00000114796_35 (sequence is synthesized)
aggacttcacataaaaaaagactttctcaagacaactttatattctagtatttttctgttgtaaaaagtattaactatttacttttattttgttatacatttattttaatatccatgtgt

SEQ ID NO: 204062 - DNA, 120 bp, Artificial Sequence
  ENSG00000114796_36 (sequence is synthesized)
aaacagaatttttttaaacacagacctcacaccaatattaattttttctctacataatttaaaactacataaattaagtacttaaaatttatattgaaggccaccaagaacttaggttga

SEQ ID NO: 204063 - DNA, 120 bp, Artificial Sequence
  ENSG00000114796_37 (sequence is synthesized)
attgaaggccaccaagaacttaggttgaatcttagaaaatttaaataactatttttaaagttacccaacttaatattttaattttttaatatttatcttcctttactaattcttgataaa

SEQ ID NO: 204064 - DNA, 120 bp, Artificial Sequence
  ENSG00000114796_38 (sequence is synthesized)
aagaattttagagtagaattaatatatcaaaaggggtatatcaaccaaattggtgtcagattgtattcattctctcatcacataaagatttttcttttgataggtgatgctcatatgaac

SEQ ID NO: 204065 - DNA, 120 bp, Artificial Sequence
  ENSG00000114796_39 (sequence is synthesized)
ctttggtttagaatctatatatgtacatgtgtatgtatgtagatagtatggttgtatacacacatatataccaaacaccatgaattttagcagtctgtgatgatcagcaaaaaagcacat

SEQ ID NO: 204066 - DNA, 120 bp, Artificial Sequence
  ENSG00000114796_40 (sequence is synthesized)
aaagtaaaaattagttgaccatgctaaattcaattctggaatttttttttatttgggcatttctagaactttttacatttgaaagtacatgatgagtattagtaacgatgacttatgtat

SEQ ID NO: 204067 - DNA, 120 bp, Artificial Sequence
  ENSG00000114796_41 (sequence is synthesized)
aatcagaatctttatgacaatttagttttacaaggtcagaagagatgagtttgctaaacccagctgtgatacctcagttggaaagggaattcaaaggtatgctttgtagaacagaaaagt

SEQ ID NO: 204068 - DNA, 120 bp, Artificial Sequence
  ENSG00000114796_42 (sequence is synthesized)
atagtttttttttcatgaactttaatcattttctgtttttcctctatgtgagtcagctacaaaagtggtctaatttttacaacagtagaacttcctccttttctactgtaatcttcccac

SEQ ID NO: 204069 - DNA, 120 bp, Artificial Sequence
  ENSG00000114796_43 (sequence is synthesized)
tgactttactgcacaggtatgaaatactagtgtattggatcttcagtaacctttttatttcctagatgattgaaatataggtatttactccatttaaaccaggtgataagatgatgtaaa

SEQ ID NO: 204070 - DNA, 120 bp, Artificial Sequence
  ENSG00000114796_44 (sequence is synthesized)
tactcagggagggtattaacttgttacttttgctcgtttggggtgtaaagtgccatgactgaataatcttcaattcatgattctagagtaagtttaatttggaaaaaggggcttcacaca

SEQ ID NO: 204071 - DNA, 120 bp, Artificial Sequence
  ENSG00000114796_45 (sequence is synthesized)
tggtggtggttgaacattgattcttttatacttaaaaagatgaaaatgttttgtggactgatacattttatcttactgaatatgaattgtttatgtatctctactgtcaaatagcctttt

SEQ ID NO: 204072 - DNA, 120 bp, Artificial Sequence
  ENSG00000114796_46 (sequence is synthesized)
tgaaactcaggaaagacaaaggttcaattacaccacttttgtcaataagcaaaccaggtattttttttttctcctgttgtctggatatggcaatagattttttaaattgctgtgagaacc

SEQ ID NO: 204073 - DNA, 120 bp, Artificial Sequence
  ENSG00000114796_47 (sequence is synthesized)
catatatgaaaagagaggagttgaattgtgtgtgccttttatgtcttgagatttatatgtggaaaagacgacatctacttcaaactgtatttttttcgtttttttttttttttggggaag

SEQ ID NO: 204074 - DNA, 120 bp, Artificial Sequence
  ENSG00000114796_48 (sequence is synthesized)
ttacaggcgtgagccaccacccccggcctgtattttcagagaggagagcttggtgtttttgtggtgccaagtggtaagataatgtctctttgaggcttcctatggactgcctttatttta

SEQ ID NO: 204075 - DNA, 120 bp, Artificial Sequence
  ENSG00000114796_49 (sequence is synthesized)
tttagtaaactcaagacaccagttaacctcaacagagttttggccttattagaatttgttgtgcatcttattgaaagccaggtttacatcacctcaccccattattctttttagttaaat

SEQ ID NO: 204076 - DNA, 120 bp, Artificial Sequence
  ENSG00000114796_50 (sequence is synthesized)
aaatttaccatgccaagtaaccagaatggagcaaattggttgatctttaaggcagtaggtttgactagctagctatcattattgtcacatctaatgctaggcaccagaaaccatttgagc

SEQ ID NO: 204077 - DNA, 120 bp, Artificial Sequence
  ENSG00000114796_51 (sequence is synthesized)
caggagtgtgaatgaataattccagagacactttagacattttttaatgttttatatgaacattttacatttgtgtgattgccttagatattaaattttcctagtgctgataaaaacagc

SEQ ID NO: 204078 - DNA, 120 bp, Artificial Sequence
  ENSG00000114796_52 (sequence is synthesized)
aacattcataacttattttatatattgttccaaagaaaagaatttgttttaatggtttcaaaataactgcacctgaatttgtttatgtgccttaagttctctagtgctatttcaactttt

SEQ ID NO: 204079 - DNA, 120 bp, Artificial Sequence
  ENSG00000114796_53 (sequence is synthesized)
ttttcaatctaaatgaagcttaccttagataaggttcatatttgtttcctatagagtaaataaacttccccttcttaaattgtgtaataagcaccaacgtgtggttgcttggcagaatga

SEQ ID NO: 204080 - DNA, 120 bp, Artificial Sequence
  ENSG00000114796_54 (sequence is synthesized)
gaatgttaagggagattgttggatgtttggagtttcattatattttttgtttttattttttgatacctaggtgctttttaaaatattcagacaaatatctatcttacattgattaaaccc

SEQ ID NO: 204081 - DNA, 120 bp, Artificial Sequence
  ENSG00000114796_55 (sequence is synthesized)
gtgtaaattcatttgcagtatctacatcgaatgtcaaaaaagtatacttatttttgttccatacttatgtacaattttttccctcttcaggctttttcatttacctttttgaaaaagcac

SEQ ID NO: 204082 - DNA, 120 bp, Artificial Sequence
  ENSG00000114796_56 (sequence is synthesized)
ttactctccccttccctatcacccctcccccaaggtttctttatttaaatttttattgagagttgttggagctctaagacaatacaaatttagagttgaacaaaagtataatctgcttta

SEQ ID NO: 204083 - DNA, 120 bp, Artificial Sequence
  ENSG00000114796_57 (sequence is synthesized)
caactagtatagacctaaggtcatttgctttcaattagaggctccagagtcttcatagtggaaagaatgctttgtatttaattgttcttagttaagttgtagcacgtgaatacttactta

SEQ ID NO: 204084 - DNA, 120 bp, Artificial Sequence
  ENSG00000114796_58 (sequence is synthesized)
agcacgtgaatacttacttacatgttttgtttaaatatacttcttgcatagtttaattttttaaaagttgtatctaataaaatgtcttttaaccattattacttgactatatggttgtat

SEQ ID NO: 204085 - DNA, 120 bp, Artificial Sequence
  ENSG00000114796_59 (sequence is synthesized)
gagaggtaccgggggtgacagctccgggaccggccgaaaggcgaggaaccggaagcccgggggagtgcgaccgcctcaaatccagccttcttgtttggtgggacgaccgtcggttctgtc

SEQ ID NO: 204086 - DNA, 120 bp, Artificial Sequence
  ENSG00000114796_60 (sequence is synthesized)
ggacccgccctcaagttctggacaccccgggtgaagactgttaacgcggcggggattgggcgcctgcggcagcttgtgggcggtacccgagggagagttcgagtttttattggtgtggaa

SEQ ID NO: 204087 - DNA, 81 bp, Artificial Sequence
  ENSG00000114796_61 (sequence is synthesized)
agcagtacaaaagaaaaataaatctaagagggaccaagtacataatcattattaatacactggaatttcaattttaaaata

SEQ ID NO: 204088 - DNA, 120 bp, Artificial Sequence
  ENSG00000114796_62 (sequence is synthesized)
gggcccgtgaagccccattaaagcgattgcgaaatgcactcggcactgtcacctgaccgttacccccgcccccgtcccctgcgagcctttgtttaccacgatcgcgacacccggcccgct

SEQ ID NO: 204089 - DNA, 120 bp, Artificial Sequence
  ENSG00000114805_0 (sequence is synthesized)
gagaaagcaggttgtggcggcggcgccctgctcttccccgctcgtctggggcttctgctggctagtggggagaagtgctcttctaggggggcttttctggcccttggcaggggtttggag

SEQ ID NO: 204090 - DNA, 120 bp, Artificial Sequence
  ENSG00000114805_1 (sequence is synthesized)
ttggagtcacaggggccaataactcatcaccccagcacttcggaggtggctccttgtgccacggactccgaggagtccttcagctactgaacactcaaagctgaggagggcaatttggtt

SEQ ID NO: 204091 - DNA, 120 bp, Artificial Sequence
  ENSG00000114805_2 (sequence is synthesized)
ttgatgctgtgccagaaatcttctgacaatgagttactggaacttggaaaaaaggaactgtgtgcagtaccgcaggcattttctggtggacaacagtgtgtttcatgttgaaagatgcat

SEQ ID NO: 204092 - DNA, 120 bp, Artificial Sequence
  ENSG00000114805_3 (sequence is synthesized)
gagtgtgatgcagtccgggacacagatgatcaagctgaaacgtggaaccaaagggcttgtccgcctcttttacctggatgagcaccggacacgcctccgatggcgaccctctaggaagag

SEQ ID NO: 204093 - DNA, 120 bp, Artificial Sequence
  ENSG00000114805_4 (sequence is synthesized)
tgagaaggcaaaaatacttattgattccatttacaaagtgactgagggccggcagtctgaaatattccacagacaagctgaggggaacttcgaccccagctgctgcttcaccatctacca

SEQ ID NO: 204094 - DNA, 120 bp, Artificial Sequence
  ENSG00000114805_5 (sequence is synthesized)
tggcaaccacatggagtccctggacctcatcacctccaaccccgaggaggcccgcacctggatcacaggcctcaagtacctgatggctggcatcagtgatgaagactcccttgccaaaag

SEQ ID NO: 204095 - DNA, 120 bp, Artificial Sequence
  ENSG00000114805_6 (sequence is synthesized)
gcagaggacccatgaccaatgggtgaagcagacctttgaggaagctgataagaatggtgacggcttgctgaatattgaagagatacatcagctgatgcataaactgaatgttaatctgcc

SEQ ID NO: 204096 - DNA, 120 bp, Artificial Sequence
  ENSG00000114805_7 (sequence is synthesized)
ccgaagaaaagtcagacaaatgtttcaggaagccgacacagatgagaatcagggaactttgacatttgaagagttctgtgttttttacaaaatgatgtctttgagacgagacctttattt

SEQ ID NO: 204097 - DNA, 120 bp, Artificial Sequence
  ENSG00000114805_8 (sequence is synthesized)
gttacttttgagctacagtgacaagaaagatcacctaactgtggaagaactggctcagtttttgaaggtggagcaaaagatgaataatgtgacaacggactattgtcttgacatcataaa

SEQ ID NO: 204098 - DNA, 120 bp, Artificial Sequence
  ENSG00000114805_9 (sequence is synthesized)
gaagtttgaagtttcagaagaaaataaggtgaaaaatgttcttggcatagaaggcttcacgaacttcatgcgtagtcctgcctgtgacatatttaacccattgcaccatgaagtgtacca

SEQ ID NO: 204099 - DNA, 120 bp, Artificial Sequence
  ENSG00000114805_10 (sequence is synthesized)
agacatggatcagcccctctgcaactactacattgcttcctctcacaatacatacctgactggagaccagctcctttctcagtccaaagtggatatgtatgcacgggtgctgcaagaggg

SEQ ID NO: 204100 - DNA, 120 bp, Artificial Sequence
  ENSG00000114805_11 (sequence is synthesized)
ctgtcgctgtgtggaagttgactgttgggatggcccagatggagagccagtagtacatcatggttacactctcacttcaaaaattctcttcagagatgttgtggagaccatcaacaagca

SEQ ID NO: 204101 - DNA, 120 bp, Artificial Sequence
  ENSG00000114805_12 (sequence is synthesized)
tgcctttgtgaagaatgagtttcctgttatattgtctatcgagaatcactgcagtatccagcagcaaaggaagattgctcagtacctgaaaggaatattcggagacaaactggacctgtc

SEQ ID NO: 204102 - DNA, 120 bp, Artificial Sequence
  ENSG00000114805_13 (sequence is synthesized)
atctgttgatacaggggagtgcaagcagcttccaagccctcaaagtttgaaaggcaaaattctagtgaagggtaagaagttgccttatcaccttggggatgatgcagaggaaggggaagt

SEQ ID NO: 204103 - DNA, 120 bp, Artificial Sequence
  ENSG00000114805_14 (sequence is synthesized)
ttctgatgaggacagtgcagatgaaattgaagacgagtgcaaattcaagctccattatagtaatgggaccactgagcatcaggtggaatctttcataaggaaaaaactggagtcactgtt

SEQ ID NO: 204104 - DNA, 120 bp, Artificial Sequence
  ENSG00000114805_15 (sequence is synthesized)
aaaagaatctcaaattcgagataaagaagatcctgatagtttcacagtgcgggcactactgaaggccacgcatgaaggcttaaatgcacacctgaagcagagtccagatgtaaaggaaag

SEQ ID NO: 204105 - DNA, 120 bp, Artificial Sequence
  ENSG00000114805_16 (sequence is synthesized)
tggaaagaaatcacatggacgatccctcatgaccaactttggaaaacataagaaaactacaaaatcacggtctaaatcttacagtactgatgatgaggaagacacacagcagagtactgg

SEQ ID NO: 204106 - DNA, 120 bp, Artificial Sequence
  ENSG00000114805_17 (sequence is synthesized)
caaggagggtggccagctgtacagattgggtcgccgaaggaaaaccatgaagctctgccgagaactctctgatttggttgtgtacacaaactccgtggccgctcaggacattgtggatga

SEQ ID NO: 204107 - DNA, 120 bp, Artificial Sequence
  ENSG00000114805_18 (sequence is synthesized)
cggaaccacaggaaatgtgttatcattcagtgaaacaagagcacatcaggttgttcagcaaaaatcagagcagttcatgatttataatcaaaagcaactcacgaggatttacccctctgc

SEQ ID NO: 204108 - DNA, 120 bp, Artificial Sequence
  ENSG00000114805_19 (sequence is synthesized)
ctaccgcattgattccagtaacttcaaccctctcccctactggaacgcaggctgccagctagtggcactgaattatcaatctgaaggacgaatgatgcagttaaaccgagccaaattcaa

SEQ ID NO: 204109 - DNA, 120 bp, Artificial Sequence
  ENSG00000114805_20 (sequence is synthesized)
ggcaaatggcaattgtggctatgtcctcaaaccccagcaaatgtgcaaaggtactttcaaccctttctctggtgaccctcttcctgccaaccccaaaaagcagctcatcctgaaagttat

SEQ ID NO: 204110 - DNA, 120 bp, Artificial Sequence
  ENSG00000114805_21 (sequence is synthesized)
cagtggacagcaactccccaaacctccagactccatgtttggagatcgaggcgagatcattgacccttttgttgaagttgaaattattggattgccagtagattgttgtaaagatcaaac

SEQ ID NO: 204111 - DNA, 120 bp, Artificial Sequence
  ENSG00000114805_22 (sequence is synthesized)
ccgtgtggtagatgacaatggatttaaccctgtgtgggaagaaacactgacatttacagtacacatgccagaaatagctttggttcggttccttgtgtgggatcacgatcccattggacg

SEQ ID NO: 204112 - DNA, 120 bp, Artificial Sequence
  ENSG00000114805_23 (sequence is synthesized)
agactttgttggacaaagaactgtgaccttcagcagcttagtgcctggctaccggcatgtctatttggaaggactgacagaagcatccatatttgtacacataaccatcaatgaaatcta

SEQ ID NO: 204113 - DNA, 120 bp, Artificial Sequence
  ENSG00000114805_24 (sequence is synthesized)
tggaaagaacagacaactccagggtctgaagggactgttcaataagaatcctaggcacagttcttcagaaaacaattcccattatgtacggaagcgatccattggagatagaattctgcg

SEQ ID NO: 204114 - DNA, 120 bp, Artificial Sequence
  ENSG00000114805_25 (sequence is synthesized)
acgcacagctagcgccccagccaaaggcaggaaaaagagcaaaatgggcttccaagaaatggtggagataaaggattctgtgtccgaggccacaagagatcaagatggcgtgctgaggag

SEQ ID NO: 204115 - DNA, 120 bp, Artificial Sequence
  ENSG00000114805_26 (sequence is synthesized)
ttctgggagctttgtcgctgcctgtatctgaaacagcaaaagacattgaaggaaaagaaaactctctagcagaagataaagatggcagaagaaaagggaaagcaagtataaaagatccac

SEQ ID NO: 204116 - DNA, 120 bp, Artificial Sequence
  ENSG00000114805_27 (sequence is synthesized)
attttctaaatttcaacaaaaagttatcatcctcctccagtgctctgctccacaaagataccagccaaggggacaccattgtatctactgcccacatgtcagtcacaggagaacagctgg

SEQ ID NO: 204117 - DNA, 120 bp, Artificial Sequence
  ENSG00000114805_28 (sequence is synthesized)
gcatgtcaagtcctaggggtgggagaaccacatcaaatgccacaagcaattgccaggaaaacccctgtcccagcaagtctctctccccaaagcagcatttggctcccgatcctgtagtta

SEQ ID NO: 204118 - DNA, 120 bp, Artificial Sequence
  ENSG00000114805_29 (sequence is synthesized)
accccacacaagatctgcatggtgtgaaaatcaaggaaaagggtaatcctgaggactttgtggaagggaaaagcatcttgtcaggaagcgtcctttctcatagcaacctagaaattaaga

SEQ ID NO: 204119 - DNA, 120 bp, Artificial Sequence
  ENSG00000114805_30 (sequence is synthesized)
acctggaaggtaataggggtaagggccgagctgcaacatccttttctttgtcagacgtctccatgctctgttctgacatacctgacctacattcaactgcaattctgcaggagagtgtaa

SEQ ID NO: 204120 - DNA, 120 bp, Artificial Sequence
  ENSG00000114805_31 (sequence is synthesized)
tttcccatcttattgacaatgtcactttaacaaatgagaatgagccgggcagttccatctcagccctgattggccagtttgatgagaccaacaatcaggctctcacagttgtttctcatc

SEQ ID NO: 204121 - DNA, 120 bp, Artificial Sequence
  ENSG00000114805_32 (sequence is synthesized)
ttcataataccagtgtgatgtcaggccattgtcccttgcctagcctgggcctaaaaatgcccatcaagcatggtttttgcaagggaaaatccaagtcttccttcctgtgctcatctccgg

SEQ ID NO: 204122 - DNA, 120 bp, Artificial Sequence
  ENSG00000114805_33 (sequence is synthesized)
agctgatagcactctcgagttctgagaccaccaaacatgcaacgaacacagtttatgaaactacctgcactcccatctctaaaaccaaaccagatgatgacctttctagtaaggccaaga

SEQ ID NO: 204123 - DNA, 120 bp, Artificial Sequence
  ENSG00000114805_34 (sequence is synthesized)
cagcggccttagaaagcaacctgcctggatcccctaatacttctcgtggctggttaccaaaaagtcctaccaagggagaagactgggaaacactgaagagctgcagccctgcctcttccc

SEQ ID NO: 204124 - DNA, 120 bp, Artificial Sequence
  ENSG00000114805_35 (sequence is synthesized)
ctgatttgaccctggaggatgtaatagctgatcccactctctgtttcaattctggggagagcagccttgtggaaattgatggagaatcagaaaatctttctctaacaacctgtgaatata

SEQ ID NO: 204125 - DNA, 120 bp, Artificial Sequence
  ENSG00000114805_36 (sequence is synthesized)
ggagagagggcacaagtcaacttgcttctcctttaaaactcaagtacaatcagggtgtggtagaacactttcaaagaggtttgagaaacggctactgtaaagagaccctccgcccttctg

SEQ ID NO: 204126 - DNA, 120 bp, Artificial Sequence
  ENSG00000114805_37 (sequence is synthesized)
tccctgaaatattcaacaatattcaagatgtcaaaactcaaagtatttcttatctagcctatcagggtgctggctttgtgcataatcatttctcagattcagatgcaaaaatgttccaga

SEQ ID NO: 204127 - DNA, 120 bp, Artificial Sequence
  ENSG00000114805_38 (sequence is synthesized)
cctgtgtgccccagcaatctagtgctcaagatatgcatgtccctgtacccaagcagttggcacatcttcctttgcctgctctgaaactgcctagtccttgcaaatccaaaagtctggggg

SEQ ID NO: 204128 - DNA, 120 bp, Artificial Sequence
  ENSG00000114805_39 (sequence is synthesized)
acttaacatcagaggacattgcctgcaattttgagagcaagtaccagtgtattagtaagagttttgttacaactggcattagagacaagaagggcgtgactgtgaagacaaagtcgttag

SEQ ID NO: 204129 - DNA, 120 bp, Artificial Sequence
  ENSG00000114805_40 (sequence is synthesized)
agcctatagatgccctgaccgagcagcttcggaagcttgtgtcctttgaccaggaagacaactgccaagtgctatattcaaagcaggatgccaatcagctcccccgggcactggtcagga

SEQ ID NO: 204130 - DNA, 120 bp, Artificial Sequence
  ENSG00000114805_41 (sequence is synthesized)
agttgtcatccagaagtcagagcagagtgcgcaatattgctagtcgtgccaaggagaaacaggaagccaacaagcagaaagttccaaaccccagcaatggggcaggagtggttcttagaa

SEQ ID NO: 204131 - DNA, 120 bp, Artificial Sequence
  ENSG00000114805_42 (sequence is synthesized)
acaaaccctcagcacccacccctgcagtgaatcgccactccaccggctcctacatcgcaggctacctgaagaacacgaaagggggtggccttgaaggccggggcatcccagagggggcat

SEQ ID NO: 204132 - DNA, 120 bp, Artificial Sequence
  ENSG00000114805_43 (sequence is synthesized)
gcacggctcttcactatggccacgttgaccagttttgttcagataattctgttttgcagactgagccaagcagtgatgataaaccagaaatttattttcttttgagactgtgaattattt

SEQ ID NO: 204133 - DNA, 120 bp, Artificial Sequence
  ENSG00000114805_44 (sequence is synthesized)
aaaactgcattcttaaggttttcaaggtattctgtagaatgtcagagttttcagtaaataagttccttggctttggaatgattttcaaatgtatttttaaacttgtatttgggtctccct

SEQ ID NO: 204134 - DNA, 120 bp, Artificial Sequence
  ENSG00000114805_45 (sequence is synthesized)
ttgacttcatgtgttctccctgttaatgcgtttgtatatagatttggtgacatttcccatgtacctattatgatctttctcccttgagttgttgtaaactgtatcagtatgaaatatgtg

SEQ ID NO: 204135 - DNA, 120 bp, Artificial Sequence
  ENSG00000114805_46 (sequence is synthesized)
catgccctagatgtgaaactcctcagcagctcgggttataatgtgtgtgtgtttcaccaagatgtcctttactgtgtcctcagattgcagtcacaaatgtagtcatttttactctctaac

SEQ ID NO: 204136 - DNA, 120 bp, Artificial Sequence
  ENSG00000114805_47 (sequence is synthesized)
tgttgagttgattaagagactttgcaaacgacaaagggatgaattccttactttaatctgttatcatttttcctatgtttccctctttgttcagaagcccagatgcatttttataactca

SEQ ID NO: 204137 - DNA, 120 bp, Artificial Sequence
  ENSG00000114805_48 (sequence is synthesized)
gttttaaaaactttaaaatagttaccttgccttttaggatgttcttatcccacccataatgagagttgaaaggggatggatagctgctccccatgcccttcccactttttggaataggcc

SEQ ID NO: 204138 - DNA, 120 bp, Artificial Sequence
  ENSG00000114805_49 (sequence is synthesized)
gtgagggtgtgaggaagaaggctgtcttttgtacataaggacaaaattgtttgttttacataaattttgttacatatttttgctaatggctttgtatgtaacaagaagcgagttgccaaa

SEQ ID NO: 204139 - DNA, 120 bp, Artificial Sequence
  ENSG00000114805_50 (sequence is synthesized)
ctacctgttgtacttttgaattttctgattgaattacagactgcgaacaacggctttcagaatgagggacttccatcagactctaatgataatagtagcacaaattgaaaacttccccaa

SEQ ID NO: 204140 - DNA, 120 bp, Artificial Sequence
  ENSG00000114805_51 (sequence is synthesized)
agctttcacagaatattttctcataataaaatccaagtgaacagataattagaagaaacccttttccttcagggaaccaagcaactctattttagtactgacatgcattattttcactgt

SEQ ID NO: 204141 - DNA, 120 bp, Artificial Sequence
  ENSG00000114805_52 (sequence is synthesized)
gaattcacttttttattgcatgttcagatgtccctctttgttttttttttttgtaacattaactgcaatgatgttcttcctggaattcatgaaaatataattaaaacacatttttaaaca

SEQ ID NO: 204142 - DNA, 120 bp, Artificial Sequence
  ENSG00000114805_53 (sequence is synthesized)
ataatgccttgagggctttaacgcgctgcacgaagcatgcatgtctcatacccaaagtagccacagcgcctgcattcccacaatagcggcagccccgagcagatgcttccagcgtgctta

SEQ ID NO: 204143 - DNA, 120 bp, Artificial Sequence
  ENSG00000114805_54 (sequence is synthesized)
tctggctgtgcttttcactttgggacaaagttctataatcatatctcatggatttattttctccacactataaagcctgaattgtgaagatctcatcatgccataaagggcagcatgagc

SEQ ID NO: 204144 - DNA, 120 bp, Artificial Sequence
  ENSG00000114805_55 (sequence is synthesized)
caagttctgggggctgctaaggatttctttgccttttttccccccaccctttttggaaatgtgtatcaggaaaaggctttgcctttagagagaaattgtactgctcttgccaataatgtg

SEQ ID NO: 204145 - DNA, 120 bp, Artificial Sequence
  ENSG00000114805_56 (sequence is synthesized)
aagacattgaaggaaaagaaaactctctagactctagcttttgcaggccgactgagcaggctaaagcagaaatgtgcaaagtgcctttccccagacagttagaatgtgtaatgaagatgg

SEQ ID NO: 204146 - DNA, 120 bp, Artificial Sequence
  ENSG00000114805_57 (sequence is synthesized)
aaatttccgagacctgaatccccaaacccagactgatctctcttctcttcttgaatataaaagtaagctggcaagatttaaaaaactgaacccaaataaatattcatcatttttttcttc

SEQ ID NO: 204147 - DNA, 80 bp, Artificial Sequence
  ENSG00000114812_0 (sequence is synthesized)
gcggggccgcccgccgcgggctcagggcagaccatgcgcccgccaagtccgctgcccgcccgctggctatgcgtgctggc

SEQ ID NO: 204148 - DNA, 120 bp, Artificial Sequence
  ENSG00000114812_1 (sequence is synthesized)
cgctggctatgcgtgctggcaggcgccctcgcctgggcccttgggccggcgggcggccaggcggccaggctgcaggaggagtgtgactatgtgcagatgatcgaggtgcagcacaagcag

SEQ ID NO: 204149 - DNA, 120 bp, Artificial Sequence
  ENSG00000114812_2 (sequence is synthesized)
tgcctggaggaggcccagctggagaatgagacaataggctgcagcaagatgtgggacaacctcacctgctggccagccacccctcggggccaggtagttgtcttggcctgtcccctcatc

SEQ ID NO: 204150 - DNA, 120 bp, Artificial Sequence
  ENSG00000114812_3 (sequence is synthesized)
ttcaagctcttctcctccattcaaggccgcaatgtaagccgcagctgcaccgacgaaggctggacgcacctggagcctggcccgtaccccattgcctgtggtttggatgacaaggcagcg

SEQ ID NO: 204151 - DNA, 120 bp, Artificial Sequence
  ENSG00000114812_4 (sequence is synthesized)
agtttggatgagcagcagaccatgttctacggttctgtgaagaccggctacaccattggctacggcctgtccctcgccacccttctggtcgccacagctatcctgagcctgttcaggaag

SEQ ID NO: 204152 - DNA, 120 bp, Artificial Sequence
  ENSG00000114812_5 (sequence is synthesized)
ctccactgcacgcggaactacatccacatgcacctcttcatatccttcatcctgagggctgccgctgtcttcatcaaagacttggccctcttcgacagcggggagtcggaccagtgctcc

SEQ ID NO: 204153 - DNA, 120 bp, Artificial Sequence
  ENSG00000114812_6 (sequence is synthesized)
gagggctcggtgggctgtaaggcagccatggtctttttccaatattgtgtcatggctaacttcttctggctgctggtggagggcctctacctgtacaccctgcttgccgtctccttcttc

SEQ ID NO: 204154 - DNA, 120 bp, Artificial Sequence
  ENSG00000114812_7 (sequence is synthesized)
tctgagcggaagtacttctgggggtacatactcatcggctggggggtacccagcacattcaccatggtgtggaccatcgccaggatccattttgaggattatgggtgctgggacaccatc

SEQ ID NO: 204155 - DNA, 120 bp, Artificial Sequence
  ENSG00000114812_8 (sequence is synthesized)
aactcctcactgtggtggatcataaagggccccatcctcacctccatcttggtaaacttcatcctgtttatttgcatcatccgaatcctgcttcagaaactgcggcccccagatatcagg

SEQ ID NO: 204156 - DNA, 120 bp, Artificial Sequence
  ENSG00000114812_9 (sequence is synthesized)
aagagtgacagcagtccatactcaaggctagccaggtccacactcctgctgatccccctgtttggagtacactacatcatgttcgccttctttccggacaattttaagcctgaagtgaag

SEQ ID NO: 204157 - DNA, 120 bp, Artificial Sequence
  ENSG00000114812_10 (sequence is synthesized)
atggtctttgagctcgtcgtggggtctttccagggttttgtggtggctatcctctactgcttcctcaatggtgaggtgcaggcggagctgaggcggaagtggcggcgctggcacctgcag

SEQ ID NO: 204158 - DNA, 120 bp, Artificial Sequence
  ENSG00000114812_11 (sequence is synthesized)
tccagcttccaagccgaagtctccctggtctgaccaccaggatcccaggggcccaaggcggcccctcccgccccttcccactcaccccggcagacgccggggacagaggcctgcccgggc

SEQ ID NO: 204159 - DNA, 120 bp, Artificial Sequence
  ENSG00000114812_12 (sequence is synthesized)
gcggccagccccggccctgggctcggaggctgcccccggccccctggtctctggtccggacactcctagagaacgcagccctagagcctgcctggagcgtttctagcaagtgagagagat

SEQ ID NO: 204160 - DNA, 120 bp, Artificial Sequence
  ENSG00000114812_13 (sequence is synthesized)
gggagctcctctcctggaggattgcaggtggaactcagtcattagactcctcctccaaaggccccctacgccaatcaagggcaaaaagtctacatactttcatcctgactctgccccctg

SEQ ID NO: 204161 - DNA, 120 bp, Artificial Sequence
  ENSG00000114812_14 (sequence is synthesized)
ctggctcttctgcccaattggaggaaagcaaccggtggatcctcaaacaacactggtgtgacctgagggcagaaaggttctgcccgggaaggtcaccagcaccaacaccacggtagtgcc

SEQ ID NO: 204162 - DNA, 120 bp, Artificial Sequence
  ENSG00000114812_15 (sequence is synthesized)
tgaaatttcaccattgctgtcaagttcctttgggttaagcattaccactcaggcatttgactgaagatgcagctcactaccctattctctctttacgcttagttatcagctttttaaagt

SEQ ID NO: 204163 - DNA, 120 bp, Artificial Sequence
  ENSG00000114812_16 (sequence is synthesized)
gggttattctggagtttttgtttggagagcacacctatcttagtggttccccaccgaagtggactggcccctgggtcagtctggtgggaggacggtgcaacccaaggactgagggactct

SEQ ID NO: 204164 - DNA, 120 bp, Artificial Sequence
  ENSG00000114812_17 (sequence is synthesized)
gaagcctctgggaaatgagaaggcagccaccagcgaatgctaggtctcggactaagcctacctgctctccaagtctcagtggcttcatctgtcaagtgggatctgtcacaccagccatac

SEQ ID NO: 204165 - DNA, 120 bp, Artificial Sequence
  ENSG00000114812_18 (sequence is synthesized)
ttatctctctgtgctgtggaagcaacaggaatcaagagctgccctccttgtccacccacctatgtgccaactgttgtaactaggctcagagatgtgcacccatgggctctgacagaaagc

SEQ ID NO: 204166 - DNA, 120 bp, Artificial Sequence
  ENSG00000114812_19 (sequence is synthesized)
agatacctcaccctgctacacatacaggatttgaactcagatctgtctgataggaatgtgaaagcacggactcttactgctaacttttgtgtatcgtaaccagccagatcctcttggtta

SEQ ID NO: 204167 - DNA, 120 bp, Artificial Sequence
  ENSG00000114812_20 (sequence is synthesized)
tttgtttaccacttgtattattaatgccattatccctgaatcccccttgccaccccaccctccctggagtgtggctgaggaggcctccatctcatgtatcatctggataggagcctgctg

SEQ ID NO: 204168 - DNA, 120 bp, Artificial Sequence
  ENSG00000114812_21 (sequence is synthesized)
gtcacagcctcctctgtctgcccttcaccccagtggccactcagcttcctacccacacctctgccagaagatcccctcaggactgcaacaggcttgtgcaacaataaatgttggcttgga

SEQ ID NO: 204169 - DNA, 120 bp, Artificial Sequence
  ENSG00000114812_22 (sequence is synthesized)
cagacatctaggcttgatctgaaatgggggactttctgggaggggacagaaggcccagaataccttccagtcatgccaagtgggccacccagagccctgtgattgctctactcatgggtc

SEQ ID NO: 204170 - DNA, 120 bp, Artificial Sequence
  ENSG00000114812_23 (sequence is synthesized)
tccctaactccttcatggtcctcgtctgcctaagaaacccattcttccactcggtcctctgaaccccaggaggaatggccacccctcccctcttctcttcttcttcatttctacttcccc

SEQ ID NO: 204171 - DNA, 120 bp, Artificial Sequence
  ENSG00000114812_24 (sequence is synthesized)
ctcttccaccctcttctcagtcccagtctccctccacacttccatctgggccccactccacagtccacagccctccactcccccacattgagcagactcttgaaactcaagcaagaattc

SEQ ID NO: 204172 - DNA, 120 bp, Artificial Sequence
  ENSG00000114812_25 (sequence is synthesized)
accttccagctaccttcaatacaaattggcattagatgaatgagtgggtggggtgggagtgtggatgggcaggttggtggatggctaagtaggcagcaggataaatgggttaagtaagga

SEQ ID NO: 204173 - DNA, 120 bp, Artificial Sequence
  ENSG00000114812_26 (sequence is synthesized)
tatctttactttacagggaggaaatgacatacactcccttctccttgagggttttggagcaggtcaccatgggcagggagaagggggcacaatgtccatggaccagggcttggaaaggtg

SEQ ID NO: 204174 - DNA, 120 bp, Artificial Sequence
  ENSG00000114812_27 (sequence is synthesized)
tcaggactgttccccctgcttgggaggactggaggaagaggcaggtttttttgcgggagcaacaaggcttgaagacagagctaaagaaacatgaaaaatatgaaaagggaggctgtggga

SEQ ID NO: 204175 - DNA, 120 bp, Artificial Sequence
  ENSG00000114812_28 (sequence is synthesized)
aggcaagtagggtctgcatgctcacagatgggagtaggagattgagtatcagtgctattgacacaagacaaacctgggacgtcccacaaggccttccagtcctgggattcttcttggcct

SEQ ID NO: 204176 - DNA, 120 bp, Artificial Sequence
  ENSG00000114812_29 (sequence is synthesized)
ggcttctctttggagagtctgtgctgtggttctaagattcctggctagaatgtcacagactgctggatttaggattctattctggaatcctgtgattctccctgatgagactaagactca

SEQ ID NO: 204177 - DNA, 120 bp, Artificial Sequence
  ENSG00000114812_30 (sequence is synthesized)
cattcctggtgtgactgcattctctcctgccaggtgtgtaggcggagcttcccttcctgtctgagaaggaaaggctgggggggacggggggggcatctgcagtctgctgaggggcagcac

SEQ ID NO: 204178 - DNA, 120 bp, Artificial Sequence
  ENSG00000114812_31 (sequence is synthesized)
atcgggcctgtgcacccttatcctctcctttgccgatgggaccttatttcccccaacttacaatggttcaaaagggcctgaatctgaggcaaacagagctggccatggtcagggccaggt

SEQ ID NO: 204179 - DNA, 120 bp, Artificial Sequence
  ENSG00000114812_32 (sequence is synthesized)
ctgtgtggtgagacagaaaggaaacagttgtcagcaggcaaaaggggtgggggcagttggagatgaagctcctcaaggagaagctgtcagctcccactctacacctccccataagccttt

SEQ ID NO: 204180 - DNA, 120 bp, Artificial Sequence
  ENSG00000114812_33 (sequence is synthesized)
gatttaaagaaagcctccatctgttagcctccggtgtgtgggatagttttgcagccgaagaggggtgggcattgctcaggatcttggcatggctgagaaccaggtccaggaaggagtggg

SEQ ID NO: 204181 - DNA, 120 bp, Artificial Sequence
  ENSG00000114812_34 (sequence is synthesized)
aggggcaaggccagctcctctgcccccagcttgctgtgggacctcaggccttgggctagacttccttggactgactgctaaggcaggagagacagagtcagagaccctccctatccacac

SEQ ID NO: 204182 - DNA, 120 bp, Artificial Sequence
  ENSG00000114812_35 (sequence is synthesized)
cccacctctcctagccagggagcaatgggttcacactgcctggatcagctatgaggtcaggtggctgggaggcctgaaccaggaagagctctgggccatgggaggcgggtgagcatttag

SEQ ID NO: 204183 - DNA, 120 bp, Artificial Sequence
  ENSG00000114812_36 (sequence is synthesized)
aatgaatgctgaccctactgagcacacaaagctgtgaagaaggagctggtccttcagagcacgctgggagtatatgcactggtgtggggaggtaggaggagggggatgcaaccccagaga

SEQ ID NO: 204184 - DNA, 120 bp, Artificial Sequence
  ENSG00000114812_37 (sequence is synthesized)
aggtggcaacttctggagaagcagacacagcagaaaaaacacagatagagggcgatactgattaattttgggttgtccctggtgatcaggtatgaacttgggtccccatcaccctcccaa

SEQ ID NO: 204185 - DNA, 120 bp, Artificial Sequence
  ENSG00000114812_38 (sequence is synthesized)
gtggccctgggcatatgtggtcagcacccagttagaaagacttgtttcctagtacgtcttctctcatggtctctcatggatgcactatacttcatagtacccaaaacacttccaagttca

SEQ ID NO: 204186 - DNA, 120 bp, Artificial Sequence
  ENSG00000114812_39 (sequence is synthesized)
tagtgggcctctgtttctataatttgactatgtcgagcatacacttactgcattatacaaattggaaaaactgagaccaggagaggaggaaccagaatctcttgttgcctaagagatttt

SEQ ID NO: 204187 - DNA, 120 bp, Artificial Sequence
  ENSG00000114812_40 (sequence is synthesized)
ctactgctcttgatggctgagagcatcctctactgcaatgatgaggtaagcctctcctagaccagggggcccaggcaacagaactcccaatagtggatttcagctaacatgtccctgtta

SEQ ID NO: 204188 - DNA, 120 bp, Artificial Sequence
  ENSG00000114812_41 (sequence is synthesized)
tctcctccagaagggtgagaatagagggggtttctttctctctcatgcttccctccaggccaggagggctgggggcagaagggcagaggcactgcagctgtggaacaggagcagacaagg

SEQ ID NO: 204189 - DNA, 120 bp, Artificial Sequence
  ENSG00000114812_42 (sequence is synthesized)
gcataatattcagaggaacctacagtccatcctcatacttcctggtcattgtccccatcttctgtgcctccagctgcccccatgccacaccctatcatatccacatgtgtggacacacat

SEQ ID NO: 204190 - DNA, 120 bp, Artificial Sequence
  ENSG00000114812_43 (sequence is synthesized)
gaactacgtgggtcaagagtaaaggagctgtggcttccccccaatcagaagggcactggatgatggatgaactctgtgtggtgcgtcttcacactgacaccaggaggataaggaagtgac

SEQ ID NO: 204191 - DNA, 120 bp, Artificial Sequence
  ENSG00000114812_44 (sequence is synthesized)
tccctcagctgagtggctggcatgtgccaggctagagcagcttggctatggcagaacatccagccccaccgtgtggacggtaaggaagggtggatcccccaggagaacaattctgaaaga

SEQ ID NO: 204192 - DNA, 120 bp, Artificial Sequence
  ENSG00000114812_45 (sequence is synthesized)
atcagatgccttcccagccactcactgcctccaacctggccatccagccctccaacagaggagaggaagggtagtgtgggcccccctccagagccaggggaaggcaacccatccccactg

SEQ ID NO: 204193 - DNA, 120 bp, Artificial Sequence
  ENSG00000114812_46 (sequence is synthesized)
gtagccagtccctctccctccctccccaccctgcccaccagccattcactggtgggtcacatggcaaagtgaggtctgcctctccaatcctcacacccatcatataccctcaagtgtcca

SEQ ID NO: 204194 - DNA, 120 bp, Artificial Sequence
  ENSG00000114812_47 (sequence is synthesized)
agtgtccctcccacagtggagcccagcgtggcccaggcgtgccccgacccctccactgttgccccccagcagcacatactccccagctcctgccaggccagcttcccctggagaaggcag

SEQ ID NO: 204195 - DNA, 120 bp, Artificial Sequence
  ENSG00000114812_48 (sequence is synthesized)
gtggctgagctcttccatgtgttgcagcctagtctcccctaggatggccctgcacctggggacagggcaccagagagtggggcctgcacacaggaatgaggcttctggggccacacacga

SEQ ID NO: 204196 - DNA, 120 bp, Artificial Sequence
  ENSG00000114812_49 (sequence is synthesized)
ggttgaggcccttgggagcccagttgcacaggtggatggggtacctgggggtggggctcgtatttcaggatgggatcccctttgaggcggggcctgccctctggaggacacatgctcccc

SEQ ID NO: 204197 - DNA, 120 bp, Artificial Sequence
  ENSG00000114812_50 (sequence is synthesized)
attttcccagcttactagtggaaaagcagcttctttcccacagttccagcaaaagccccagggctgatgctcattggcccaggttggggcatgtgaccattggcaagactcccattggcc

SEQ ID NO: 204198 - DNA, 120 bp, Artificial Sequence
  ENSG00000114812_51 (sequence is synthesized)
ccagccccaccgtgtggacggcagagatgaggaaactggtgtggggttgccggggccagcaaccacttttctaaagccaaagacgcagaaggtgctgccagtccaacgcttcctccatgg

SEQ ID NO: 204199 - DNA, 120 bp, Artificial Sequence
  ENSG00000114812_52 (sequence is synthesized)
aggccttcacccacccacacccatctaagagttcccaagacctgttttttctggctattcctagacagccatcacccccactcacatgtcttccacaagggcggccaggcggccaggctg

SEQ ID NO: 204200 - DNA, 120 bp, Artificial Sequence
  ENSG00000114812_53 (sequence is synthesized)
tctccttgctgagtgctgccttcaccaagtttcctcaaaaggagaaaagagagtgctcctggggcctctcctccctccacagaggaagcaccaccacagcctgaggttgtcctggcccag

SEQ ID NO: 204201 - DNA, 120 bp, Artificial Sequence
  ENSG00000114812_54 (sequence is synthesized)
cttggaagggaatggaggtaaggaagggtggatcccccaggagaacaattctgaaagaacaaagaagtgatgtttattccgaagaatctgcaaggaaacaattatttctgattcacctac

SEQ ID NO: 204202 - DNA, 120 bp, Artificial Sequence
  ENSG00000114812_55 (sequence is synthesized)
acctcatcctccctggagcaggtctcccgaggcttgaagggccagggcacccaacaggtgctgagcgcgccccaccaggtcacccgggagcagggaacaccaaggaacccagagtcgggc

SEQ ID NO: 204203 - DNA, 120 bp, Artificial Sequence
  ENSG00000114812_56 (sequence is synthesized)
ctctttcgagccctcgcttcctctcgcctggcttcttcggcgcgaaggatgaattggggttgttgaaaattgatcaaacaacccgatctctgtcagcgcctggacacttgctgggcccca

SEQ ID NO: 204204 - DNA, 120 bp, Artificial Sequence
  ENSG00000114812_57 (sequence is synthesized)
gctcgcagcctgggaagataagtggcacttcctgtctcgtaatcggatttgcgcgcacgaaccctcggagacgcacagggcggccaggcggccaggctgcaggaggagtgtgactatgtg

SEQ ID NO: 204205 - DNA, 120 bp, Artificial Sequence
  ENSG00000114841_0 (sequence is synthesized)
ggggggtacccaacctatacgcagacccattgagcagccagactgccctaaacagggctatggagtccttgtcccttctaagagctgtggacaccttgcctccagttcccctcacagtcc

SEQ ID NO: 204206 - DNA, 120 bp, Artificial Sequence
  ENSG00000114841_1 (sequence is synthesized)
tttcttccttctgcagtgatcactgagtacctgtgtgaatgccaacaagaaaaataaaaccacagtttggattcaggaaaggttgcaccaccatcaggtcttgaagggagcttcggctgg

SEQ ID NO: 204207 - DNA, 120 bp, Artificial Sequence
  ENSG00000114841_2 (sequence is synthesized)
ggcatctccctgagaagcagcatggagcagcctaacagtaaaggctatagcctgggaaggacccctcagggcccagagtgcagcagtgctcctgcagtccaagtggggacccacaggggc

SEQ ID NO: 204208 - DNA, 120 bp, Artificial Sequence
  ENSG00000114841_3 (sequence is synthesized)
ctagagtataacccggggaagattcttccaggatcagactatgggttgggaaatcctccagcccttgaccccaagctcccacatttacccctgcccccggccccacccacactctcagac

SEQ ID NO: 204209 - DNA, 120 bp, Artificial Sequence
  ENSG00000114841_4 (sequence is synthesized)
ttggggcagccacggaagtcacccctgacaggcactgataagaagtacccgctgatgaagcagcgtgggttctactccgacatcctcagccctggaaccttagatcaacttggggaggta

SEQ ID NO: 204210 - DNA, 120 bp, Artificial Sequence
  ENSG00000114841_5 (sequence is synthesized)
tgtcgtggcccccgaatgagccagaacctcctgcggcaggctgaccttgacaagttcaccccaagagtcggaagctttgaggttcctgaagacttccaggagcgcatggagcagcagtgc

SEQ ID NO: 204211 - DNA, 120 bp, Artificial Sequence
  ENSG00000114841_6 (sequence is synthesized)
atcgggtccaccacccggctgctcgcccagactgacttcccactgcaggcctacgagcccaagatgcaggtgcctttccaggtgctgccaggccagcatcctcgcaagattgagatcgag

SEQ ID NO: 204212 - DNA, 120 bp, Artificial Sequence
  ENSG00000114841_7 (sequence is synthesized)
aggaggaaacagcagtacctgagcctggacattgagcagttgctgttcagccagggcatcgactccaacaagctcatgcccaggcacctggaccaccagcacccccaaaccatcgaacag

SEQ ID NO: 204213 - DNA, 120 bp, Artificial Sequence
  ENSG00000114841_8 (sequence is synthesized)
ggccatgacccaatcttccccatctacctcccactgaaggtatttgacaatgaggactttgactgccggactcccagagagtggatcaacatgggcttggagccagggtctctggacagg

SEQ ID NO: 204214 - DNA, 120 bp, Artificial Sequence
  ENSG00000114841_9 (sequence is synthesized)
aaacctgtcccgggaaaagccctcttgcccactgatgacttcctggggcatgaggaccccaagagtcagaagctgaagtacaaatggtgcgaggtcggcgtcctggactacgacgaggag

SEQ ID NO: 204215 - DNA, 120 bp, Artificial Sequence
  ENSG00000114841_10 (sequence is synthesized)
aagaagctatacctggtacacaagacagacgagaaaggcctggtgcgagatgagatggggaggcccatcctgaatgcaggggtcaccactgaaggaaggccaccccttcaggtctgtcag

SEQ ID NO: 204216 - DNA, 120 bp, Artificial Sequence
  ENSG00000114841_11 (sequence is synthesized)
tactgggtgccacggatccagcttctcttctgcgctgaggacccttgcatgttcgcacaacgtgtggtccaggccaacgccctgcgcaagaacacggaagcactgctgctctacaacttg

SEQ ID NO: 204217 - DNA, 120 bp, Artificial Sequence
  ENSG00000114841_12 (sequence is synthesized)
tatgtggactgcatgccctctgacggccagcatgtcatcagtgaacagagcctgagcaagatcaagcagtgggccctgagcacgcctcggatgcgcaaaggcccctcggttctagagcac

SEQ ID NO: 204218 - DNA, 120 bp, Artificial Sequence
  ENSG00000114841_13 (sequence is synthesized)
ctcagcagtcttgccagagaagtgagcctggactatgagcgcagcatgaacaagatcaactttgaccacgttgtctcttccaagcccgagaccttctcctacgtcaccctccccaagaag

SEQ ID NO: 204219 - DNA, 120 bp, Artificial Sequence
  ENSG00000114841_14 (sequence is synthesized)
gaggaggagcaggtgcctgagcgagggctggtgagtgtccccaagtaccacttctgggagcagaaggaggacttcactttcgtgtccctgctcacacggccagaggtcatcacggccctc

SEQ ID NO: 204220 - DNA, 120 bp, Artificial Sequence
  ENSG00000114841_15 (sequence is synthesized)
agcaaggtgagggccgagtgcaacaaggtgaccgccatgtccctgttccactcgagcctctccaagtacagccacctggaggaatttgagcagatccagtcacagaccttctcccaggtg

SEQ ID NO: 204221 - DNA, 120 bp, Artificial Sequence
  ENSG00000114841_16 (sequence is synthesized)
cagatgttcctcaaggacagctggatcagctcgctaaaggtggccatgcgcagcagcctgcgcgacatgagcaagggctggtacaacctctacgagaccaactgggaggtgtacctcatg

SEQ ID NO: 204222 - DNA, 120 bp, Artificial Sequence
  ENSG00000114841_17 (sequence is synthesized)
tccaagctgcgcaagctgatggagctggtgaagtacatgctgcaggacacactgcgcttcctggtgcaggactcacttgccagcttctcacagttcatcagcgacacctgttgcagcgtg

SEQ ID NO: 204223 - DNA, 120 bp, Artificial Sequence
  ENSG00000114841_18 (sequence is synthesized)
ctcaactgcaccgatgacatggtctggggtgacgacttaattaacagcccctacaggccccggaagaatcccctgttcatcatggacctggtgctggacagctctggggtgcactatagc

SEQ ID NO: 204224 - DNA, 120 bp, Artificial Sequence
  ENSG00000114841_19 (sequence is synthesized)
accccactggagcagtttgaggcatctctgctgaacctcttcgacaagggcatcctggccacccatgccgtgccccagctggagaagctggtgatggaggacatcttcatcagcggtgac

SEQ ID NO: 204225 - DNA, 120 bp, Artificial Sequence
  ENSG00000114841_20 (sequence is synthesized)
cccctgctggagtccgtgggccttcatgagccactggtggaagagctacgggccaccattgccagtgccgtgtccaaggccatgatcccactgcaggcctacgccaaggagtaccgaaag

SEQ ID NO: 204226 - DNA, 120 bp, Artificial Sequence
  ENSG00000114841_21 (sequence is synthesized)
tacctggagctgaacaacaatgacattgcctcctttctcaaaacctaccagacgcagggcctgttggcccaggaggtgcgggaggtagtgctcacccacctgcgggagaaggagatcctg

SEQ ID NO: 204227 - DNA, 120 bp, Artificial Sequence
  ENSG00000114841_22 (sequence is synthesized)
gacagctcgctgcccagcagcatcatcattgggcctttctacatcaacaccgacaatgtcaagcagagcctgtccaagaaacgcaaggccctggccacttccgtgctggacatccttgcc

SEQ ID NO: 204228 - DNA, 120 bp, Artificial Sequence
  ENSG00000114841_23 (sequence is synthesized)
aagaacctgcataaggaggtggatagcatctgcgaggagttccgcagcatcagccgcaagatctatgagaagcccaacagcattgaggagctggctgagctgcgagagtggatgaagggc

SEQ ID NO: 204229 - DNA, 120 bp, Artificial Sequence
  ENSG00000114841_24 (sequence is synthesized)
atcccggagaggctggtgggcctggaggagcggattgtgaaggtcatggatgactaccaggtcatggatgaattcctctacaacctcagctcagatgacttcaatgacaaatggattgcc

SEQ ID NO: 204230 - DNA, 120 bp, Artificial Sequence
  ENSG00000114841_25 (sequence is synthesized)
agcaactggccttctaagatccttgggcagatagagctggtgcagcagcagcatgtggaggatgaggagaagttccgcaaaatccagatcatggatcagaacaacttccaagagaagctg

SEQ ID NO: 204231 - DNA, 120 bp, Artificial Sequence
  ENSG00000114841_26 (sequence is synthesized)
gaagggctgcagctggtagtagctggcttctccatccatgtggagatttcacgtgcacacgagatcgccaacgaggtgcggcgtgtcaagaagcagctgaaggactgccagcagctggcc

SEQ ID NO: 204232 - DNA, 120 bp, Artificial Sequence
  ENSG00000114841_27 (sequence is synthesized)
atgctctacaacaaccgcgagcgcatcttcagcttgcccatcaccaattatgacaagctctccaggatggtgaaggagttccaaccctacctggacctttggaccacagcgtctgactgg

SEQ ID NO: 204233 - DNA, 120 bp, Artificial Sequence
  ENSG00000114841_28 (sequence is synthesized)
ctgcgctggtcggagagctggatgaatgaccccctctctgccatcgatgctgagcagctggagaagaacgtggttgaagccttcaagaccatgcacaagtgcgtgaagcagtttaaggac

SEQ ID NO: 204234 - DNA, 120 bp, Artificial Sequence
  ENSG00000114841_29 (sequence is synthesized)
atgccagcctgccaggaagtggccttggacatccgggcccgcatcgaggagttcaaaccatacatcccactgatccaggggctgcgcaaccctggcatgcggatccggcactgggagaca

SEQ ID NO: 204235 - DNA, 120 bp, Artificial Sequence
  ENSG00000114841_30 (sequence is synthesized)
ctgtccaaccagatcaacatcaatgtcaggcccaaggccaacctgacctttgctcgctgcctggagatgaacctgcaggaccatatcgagagcatcagcaaggtggctgaggtggctggc

SEQ ID NO: 204236 - DNA, 120 bp, Artificial Sequence
  ENSG00000114841_31 (sequence is synthesized)
aaggagtacgccatcgagcaggcactggacaagatggagaaggagtggtcgaccatcctgttcaatgtactgccctacaaggcgacagacacctacatcctgaagagcccggacgaggcc

SEQ ID NO: 204237 - DNA, 120 bp, Artificial Sequence
  ENSG00000114841_32 (sequence is synthesized)
tcacagctgctggacgaccacatcgtcatgacccagaatatgtcattttcaccctacaagaagccctttgagcagcgcatcaactcctgggagaacaaactgaagctgacccaggaggtt

SEQ ID NO: 204238 - DNA, 120 bp, Artificial Sequence
  ENSG00000114841_33 (sequence is synthesized)
ctggaggagtggctgaactgtcagcggtcctggctctacctggagcccatctttagctctgaggacatcaaccagcagctgcctgtggagagcaagcgctaccagaccatggagcggatc

SEQ ID NO: 204239 - DNA, 120 bp, Artificial Sequence
  ENSG00000114841_34 (sequence is synthesized)
tggaagaagatcatgaagaatgcctacgagaaccgggaggtgatcaatgtgtgttccgacctgagaatgctggacagcctgcgggactgcaacaagattctggacctggtgcagaagggc

SEQ ID NO: 204240 - DNA, 120 bp, Artificial Sequence
  ENSG00000114841_35 (sequence is synthesized)
ctcagcgagtatctggagaccaagaggagcgccttccccagattctacttcctgtcagatgatgaactactagagatcttgtcgcagacaaaggaccccacggccgtgcagccacacctg

SEQ ID NO: 204241 - DNA, 120 bp, Artificial Sequence
  ENSG00000114841_36 (sequence is synthesized)
cgcaagtgcttcgagaacatcgctcggctgctattccaggaggacctggagatcacgcacatgtactcagccgagggggaggaggtacagttgtgcttctccatctacccctccagcaac

SEQ ID NO: 204242 - DNA, 120 bp, Artificial Sequence
  ENSG00000114841_37 (sequence is synthesized)
gtggaggactggctgcgggaggtggagcgcagcatgaaggccagtgtgcacgacatcattgagaaggccatcagggcctaccccacgatgcccaggacccagtgggttctgaactggcct

SEQ ID NO: 204243 - DNA, 120 bp, Artificial Sequence
  ENSG00000114841_38 (sequence is synthesized)
ggccaggtgaccatcgctgggtgccagacctactggaccatggaggtggcagaggctctggaggccggcaacctcagaagccaactgttcccccagctctgccagcagctcagtgatctg

SEQ ID NO: 204244 - DNA, 120 bp, Artificial Sequence
  ENSG00000114841_39 (sequence is synthesized)
gtggcccttgtgcgggggaagctgtcccgcatgcagcgggcagtgctgtcagcgctaatcgtcattgaggtccatgccaaggacgtggtgagcaagctaatccaggagaacgtggtcagc

SEQ ID NO: 204245 - DNA, 120 bp, Artificial Sequence
  ENSG00000114841_40 (sequence is synthesized)
gtgaatgacttccagtggatctcacagctgaggtactactggacaaataatgacctgtatatccgtgctgtgaatgctgagttcatctatggctatgagtacctgggcaacagtgggagg

SEQ ID NO: 204246 - DNA, 120 bp, Artificial Sequence
  ENSG00000114841_41 (sequence is synthesized)
ctggtgatcacgcccctcaccgacaggtgctacctgacactgaccggagctctgcacctcaagtttgggggtgccccagctggcccagctggcacaggcaaaactgagaccaccaaagac

SEQ ID NO: 204247 - DNA, 120 bp, Artificial Sequence
  ENSG00000114841_42 (sequence is synthesized)
ctgggtaaggccttggccatacagaccgttgtgttcaactgctctgaccagctcgacttcatggccatgggcaagttcttcaagggcctggccagtgctggggcctgggcctgcttcgac

SEQ ID NO: 204248 - DNA, 120 bp, Artificial Sequence
  ENSG00000114841_43 (sequence is synthesized)
gagttcaatcgcatcgacatcgaggtgctgtctgtggtggcgcagcagatcaccaccatccagaaggcgcagcagcagcgggtggaacgcttcatgtttgagggtgtggagatcccactg

SEQ ID NO: 204249 - DNA, 120 bp, Artificial Sequence
  ENSG00000114841_44 (sequence is synthesized)
gtgccatcctgcgcagtgtttatcaccatgaacccgggctacgctggccgcacggagctgcctgacaatctgaaggcgctcttccgacccgtggccatgatggttccagattacgccatg

SEQ ID NO: 204250 - DNA, 120 bp, Artificial Sequence
  ENSG00000114841_45 (sequence is synthesized)
atcactgagatctccctctattcctttggctttaatgaggccagtgtgctggctaagaagatcacaaccaccttcaagctgtcttctgagcagctcagctcccaggatcactatgacttc

SEQ ID NO: 204251 - DNA, 120 bp, Artificial Sequence
  ENSG00000114841_46 (sequence is synthesized)
gggatgagagccgtgaaaactgtgatctcggctgctgggaacctcaagcgagaaaaccccagcatgaatgaggagctgatctgcctccgggccatccgtgatgtgaacgtgcccaagttc

SEQ ID NO: 204252 - DNA, 120 bp, Artificial Sequence
  ENSG00000114841_47 (sequence is synthesized)
ctgcaggaggacctcaagctcttctctggcatcgtgtccgacctgtttcccaccatcaaggaggaggacacggactacggcatcctggatgaggccatccgcgaggcctgcaggaacagc

SEQ ID NO: 204253 - DNA, 120 bp, Artificial Sequence
  ENSG00000114841_48 (sequence is synthesized)
aacctcaaggatgtggagggcttcctgacaaagtgcatccagctctacgagaccacggtggtacgacacggcctcatgctcgtcgggcccacaggctccggcaagagtacttgttacaga

SEQ ID NO: 204254 - DNA, 120 bp, Artificial Sequence
  ENSG00000114841_49 (sequence is synthesized)
gtcctggcagctgccatgacgtcactgaaagggcagccatccatcagtggtggcatgtacgaggctgtcaactactacgtgctcaaccccaagtccatcacgatgggccagctgtacggg

SEQ ID NO: 204255 - DNA, 120 bp, Artificial Sequence
  ENSG00000114841_50 (sequence is synthesized)
gagtttgacctcctcacccatgagtggacagacgggatattctcctcgttcatccgggcgggggccatcacctccgacaccaacaagaagtggtacatgttcgatgggccggtggatgcc

SEQ ID NO: 204256 - DNA, 120 bp, Artificial Sequence
  ENSG00000114841_51 (sequence is synthesized)
atctggattgagaacatgaacacggtgctggatgacaacaagaagctgtgcctcagctctggggagatcatcaagctcacagaggcaatgaccatgatgttcgaggtgcaagacctggcg

SEQ ID NO: 204257 - DNA, 120 bp, Artificial Sequence
  ENSG00000114841_52 (sequence is synthesized)
gtggcttcaccagctacagtctcccgctgtggcatggtgtacctggagcccagcatcctggggctcatgcccttcatcgagtgctggctgaggaagctgcctcccttgctgaagccctat

SEQ ID NO: 204258 - DNA, 120 bp, Artificial Sequence
  ENSG00000114841_53 (sequence is synthesized)
gaggagcatttcaaggccctctttgtcagcttcctggaggaatccatctccttcgttcggtcctcagtgaaggaggtgatcgcctcaaccaactgcaacctgaccatgagcctcctcaag

SEQ ID NO: 204259 - DNA, 120 bp, Artificial Sequence
  ENSG00000114841_54 (sequence is synthesized)
tttctgcctagagagggcctcaagaaaataccctctgaaaagctgagtcgcatcgtagagttgatcgagccctggttcatcttctccctgatctggagcgtgggtgccactggggacagc

SEQ ID NO: 204260 - DNA, 120 bp, Artificial Sequence
  ENSG00000114841_55 (sequence is synthesized)
agtggccgcaccagtttcagccactggctaaggctcaagatggagaacgaacagctgactctgcttttcccagaagaggggctggtgttcgattacaggctggaggacgcgggcatcagt

SEQ ID NO: 204261 - DNA, 120 bp, Artificial Sequence
  ENSG00000114841_56 (sequence is synthesized)
ggcaccaacgacagtgaggatgaagaggaggaatacaagcaggttgcctgggtgaagtggatggactcctcagctccattcaccatggtaccagacaccaactactgcaacatcattgtg

SEQ ID NO: 204262 - DNA, 120 bp, Artificial Sequence
  ENSG00000114841_57 (sequence is synthesized)
cccaccatggacaccgtgcagatgtcccatttactggacatgctgctcaccaacaagaagcccgtgctgtgcattgggccaacaggcacggggaagacgctcaccatctctgacaagctc

SEQ ID NO: 204263 - DNA, 120 bp, Artificial Sequence
  ENSG00000114841_58 (sequence is synthesized)
ctcaagaacctggcactggattacatcagccacttcctcaccttctcagcccgcacttcagccaaccagacccaggacttcattgacagcaagctggacaagaggcggaagggtgtgttt

SEQ ID NO: 204264 - DNA, 120 bp, Artificial Sequence
  ENSG00000114841_59 (sequence is synthesized)
ggaccacctctggggcgcaactttatcttcttcatcgatgacctgaacatgccggccctggagacctacggtgcacagccacccatcgagctgttgcgccagtggatggaccacggcggc

SEQ ID NO: 204265 - DNA, 120 bp, Artificial Sequence
  ENSG00000114841_60 (sequence is synthesized)
tggtacgaccgcaagatcattggtgccttcaagaacctagtggacatcaactttgtctgtgccatgggccccccgggtggaggcaggaacaccgtcaccccgcggctgatgcgtcacttc

SEQ ID NO: 204266 - DNA, 120 bp, Artificial Sequence
  ENSG00000114841_61 (sequence is synthesized)
aactacctgtctttcgctgagatggacgaggtcagcaagaaacgcatcttctccaccatcctgggcaactggttggatggactccttggagaaaaaagctaccgggagcgtgtgcctggg

SEQ ID NO: 204267 - DNA, 120 bp, Artificial Sequence
  ENSG00000114841_62 (sequence is synthesized)
gccccccacattgcccacttcacggagccccttgtggaagccaccatcatggtgtatgcaaccatcacctcccagctgctgcccactccagccaagtcccactacaccttcaacctgagg

SEQ ID NO: 204268 - DNA, 120 bp, Artificial Sequence
  ENSG00000114841_63 (sequence is synthesized)
gacctctccaaggtcttccaaggcatgctcatggctgacccggccaaggtcgaggaccaagtgcagctgctgcgactgtggtatcacgagaactgccgcgtgttccgggaccgactggtg

SEQ ID NO: 204269 - DNA, 120 bp, Artificial Sequence
  ENSG00000114841_64 (sequence is synthesized)
aatgaggaggaccgcagctggttcgaccagctcctcaagcgctgcatggagcagtgggaggtgaccttcaacaaggtctgccccttccagcccattctttacggggacttcatgtcacca

SEQ ID NO: 204270 - DNA, 120 bp, Artificial Sequence
  ENSG00000114841_65 (sequence is synthesized)
ggctccgatgtcaagtcctacgagctcatcaccagtgagagtaagatgatgcaggtgatagaggagtacatagaggactacaaccagatcaacacggccaagctgaagctggtcctcttc

SEQ ID NO: 204271 - DNA, 120 bp, Artificial Sequence
  ENSG00000114841_66 (sequence is synthesized)
atggacgccatgagccacatctgtcgcatcagccgcaccctacgccaggcgctgggcaatgcactcctgctgggcgtgggtggcagcggccgcagctccctcacaaggctcgcctcgcac

SEQ ID NO: 204272 - DNA, 120 bp, Artificial Sequence
  ENSG00000114841_67 (sequence is synthesized)
atggccgagtacgagtgcttccagattgaactatccaagaactacggcatgtccgagtggcgagatgatgtgaagaaggtcctgctcaaggcgggcctacagaacctacccatcaccttc

SEQ ID NO: 204273 - DNA, 120 bp, Artificial Sequence
  ENSG00000114841_68 (sequence is synthesized)
ctcttctcagacacccagatcaagaacgaatccttcctggaagatatcaacaacgtcctaaactctggtgacattcccaatctgtatactgcggacgagcaggaccagatcgtcagcacc

SEQ ID NO: 204274 - DNA, 120 bp, Artificial Sequence
  ENSG00000114841_69 (sequence is synthesized)
atgcggccctatatccaggagcagggcctacagcccaccaaggccaacctcatggctgcttacacagggcgtgtgcgcagcaacatccacatggtgctgtgcatgagccccatcggagag

SEQ ID NO: 204275 - DNA, 120 bp, Artificial Sequence
  ENSG00000114841_70 (sequence is synthesized)
gtcttccgagctcgtctgaggcagtttccctccctggtcaactgctgtaccatcgactggtttaacgagtggccggcagaagccctgaagtctgtggccaccgtgttcctcaatgagatc

SEQ ID NO: 204276 - DNA, 120 bp, Artificial Sequence
  ENSG00000114841_71 (sequence is synthesized)
ccagaactggaatcctcccaggaagaaatccaaggactgatccaggtctgtgtgtacatccaccagtcggtgtccaagaagtgcatcgagtacctggcagagctgacccgccacaactat

SEQ ID NO: 204277 - DNA, 120 bp, Artificial Sequence
  ENSG00000114841_72 (sequence is synthesized)
gtgacccccaagagctacttggagctgcttcatattttctccatcctcatcgggcagaagaaactggagctgaaaactgccaagaaccgcatgaagagcggcctcgacaagctgctgcgc

SEQ ID NO: 204278 - DNA, 120 bp, Artificial Sequence
  ENSG00000114841_73 (sequence is synthesized)
acttctgaggatgtagccaagatgcaggaggacctggagagtatgcaccccctgctggaggaggctgccaaggacaccatgctcaccatggagcagatcaaggtggatacggccatcgcc

SEQ ID NO: 204279 - DNA, 120 bp, Artificial Sequence
  ENSG00000114841_74 (sequence is synthesized)
gaggagacccggaattcagtgcagacagaggagatcaaagccaatgagaaggccaagaaggcacaagctattgctgacgatgcccagaaggacctggacgaggcgttgccagccctggat

SEQ ID NO: 204280 - DNA, 120 bp, Artificial Sequence
  ENSG00000114841_75 (sequence is synthesized)
gcggctctggccagcctgcgcaacctcaacaagaacgatgtgaccgaggtacgtgccatgcagcggccacccccgggtgtgaaactggtcatagaagctgtgtgcattatgaaaggcatc

SEQ ID NO: 204281 - DNA, 120 bp, Artificial Sequence
  ENSG00000114841_76 (sequence is synthesized)
aagcccaagaaggtgcctggagaaaagccaggcaccaaggtggatgactactgggagcctggcaaggggctgctgcaggacccgggccacttccttgagagcctcttcaagtttgacaag

SEQ ID NO: 204282 - DNA, 120 bp, Artificial Sequence
  ENSG00000114841_77 (sequence is synthesized)
gacaacattggggatgtggtgatcaaagccatccagccgtacatcgataatgaagagttccagccagccaccattgccaaggtgtccaaggcttgcacctccatctgccagtgggtgcgc

SEQ ID NO: 204283 - DNA, 120 bp, Artificial Sequence
  ENSG00000114841_78 (sequence is synthesized)
gccatgcacaagtaccactttgtggccaaggccgtggagcccaagcggcaagccctgctggaggcccaggatgacctgggggtgacacagaggatcctggatgaggcaaaacagcgcctt

SEQ ID NO: 204284 - DNA, 120 bp, Artificial Sequence
  ENSG00000114841_79 (sequence is synthesized)
cgtgaggtggaggacggcatcgccacaatgcaggctaagtaccgggaatgcattaccaagaaggaggagctggagctgaagtgtgagcagtgtgagcagcggctgggccgagctggcaag

SEQ ID NO: 204285 - DNA, 120 bp, Artificial Sequence
  ENSG00000114841_80 (sequence is synthesized)
ctcatcaacgggctgtcggatgagaaggtgcgctggcaggagacggtggagaacctgcagtacatgctcaacaacatctccggcgatgtcctggtggccgctggctttgtggcctacctg

SEQ ID NO: 204286 - DNA, 120 bp, Artificial Sequence
  ENSG00000114841_81 (sequence is synthesized)
ggccccttcacgggccagtaccgcacggtgctctacgacagctgggtcaagcagctcaggagccacaatgtcccacacacctccgagcccacgctaatcgggacgctggggaaccctgtg

SEQ ID NO: 204287 - DNA, 120 bp, Artificial Sequence
  ENSG00000114841_82 (sequence is synthesized)
aagatccgatcgtggcagatcgctggcctccccaacgacacactgtcagtggagaacggggtcatcaaccagttttcccagcgctggacccacttcattgaccctcagagccaggccaac

SEQ ID NO: 204288 - DNA, 120 bp, Artificial Sequence
  ENSG00000114841_83 (sequence is synthesized)
aaatggatcaagaacatggagaaggacaatgggctggatgtgttcaagttgagtgaccgcgacttcctgcgcagcatggagaacgccatccgctttggcaagccatgtctcctggagaac

SEQ ID NO: 204289 - DNA, 120 bp, Artificial Sequence
  ENSG00000114841_84 (sequence is synthesized)
gtgggcgaggagctagacccagccctggagccagtgctgctcaagcagacgtacaagcagcagggaaacacggtgctgaagctgggggacacggtgatcccctaccatgaggacttcagg

SEQ ID NO: 204290 - DNA, 120 bp, Artificial Sequence
  ENSG00000114841_85 (sequence is synthesized)
atgtacatcaccaccaagctgcccaacccacactacacgcccgagatctccaccaaactcaccctcatcaacttcaccctgtcgcccagtggcctagaggaccagctactgggccaggta

SEQ ID NO: 204291 - DNA, 120 bp, Artificial Sequence
  ENSG00000114841_86 (sequence is synthesized)
gtggcagaggagcgacccgacctggaggaggccaagaaccagctgattatcagtaatgccaagatgcgccaggagctgaaggacattgaggaccagatcctgtaccggctcagctcctcc

SEQ ID NO: 204292 - DNA, 120 bp, Artificial Sequence
  ENSG00000114841_87 (sequence is synthesized)
gagggcaaccctgtagatgacatggaactcatcaaggtgctggaagcctccaagatgaaggctgctgagatccaggccaaagtcaggattgcagagcagacggagaaggacatcgacctg

SEQ ID NO: 204293 - DNA, 120 bp, Artificial Sequence
  ENSG00000114841_88 (sequence is synthesized)
acgcgcatggagtacatacccgtggccatccgcacccagatcctcttcttctgtgtgtccgacctggccaacgtggaccccatgtaccagtactcccttgagtggtttctcaacatcttc

SEQ ID NO: 204294 - DNA, 120 bp, Artificial Sequence
  ENSG00000114841_89 (sequence is synthesized)
ctctcgggcatcgccaactcagagagagcagacaacctgaagaagcgcatctccaacatcaaccgctacctgacctacagcctctacagcaacgtctgccgcagcctctttgagaagcac

SEQ ID NO: 204295 - DNA, 120 bp, Artificial Sequence
  ENSG00000114841_90 (sequence is synthesized)
aagctgatgtttgccttcctgctgtgtgttcgcatcatgatgaacgagggcaaaatcaaccagagtgagtggcgatacctcctgtctgggggctccatctcgatcatgactgagaatccg

SEQ ID NO: 204296 - DNA, 120 bp, Artificial Sequence
  ENSG00000114841_91 (sequence is synthesized)
gcaccggactggctgtcagaccgggcttggcgagacatcctagcactctcgaacctgccaaccttttcctccttctcttccgacttcgtgaagcacctctcagaattccgggtcatcttc

SEQ ID NO: 204297 - DNA, 120 bp, Artificial Sequence
  ENSG00000114841_92 (sequence is synthesized)
gacagccttgagccccaccgggagcctttgcctggcatctgggaccagtacctagaccagttccagaagctgctagtcctccgctgcctgcgtggggacaaggttaccaacgccatgcag

SEQ ID NO: 204298 - DNA, 120 bp, Artificial Sequence
  ENSG00000114841_93 (sequence is synthesized)
gactttgtggccaccaacctggagccacgcttcattgaaccccagacagccaatctgtcagtggtgttcaaagactccaactccaccacacccctcatctttgtgctgtcacccggcaca

SEQ ID NO: 204299 - DNA, 120 bp, Artificial Sequence
  ENSG00000114841_94 (sequence is synthesized)
gaccctgctgccgacctctacaagtttgccgaagaaatgaagttctccaaaaagctctctgccatctccctgggccaggggcagggccctcgggcagaagccatgatgcgcagctccata

SEQ ID NO: 204300 - DNA, 120 bp, Artificial Sequence
  ENSG00000114841_95 (sequence is synthesized)
gagaggggcaaatgggtcttcttccagaactgccacctggcaccaagctggatgccagccctagaacgcctcatcgagcacatcaaccccgacaaggtacacagggacttccgcctctgg

SEQ ID NO: 204301 - DNA, 120 bp, Artificial Sequence
  ENSG00000114841_96 (sequence is synthesized)
ctcaccagcctgcccagcaacaagttcccagtgtccatcctgcagaacggctccaagatgaccattgagccgccacgcggtgtcagggccaacctgctgaagtcctatagtagccttggt

SEQ ID NO: 204302 - DNA, 120 bp, Artificial Sequence
  ENSG00000114841_97 (sequence is synthesized)
gaagacttcctcaactcctgccacaaggtgatggagttcaagtctctgctgctgtctctgtgcttgttccatgggaacgccctggagcgccgtaagtttgggcccctgggcttcaacatc

SEQ ID NO: 204303 - DNA, 120 bp, Artificial Sequence
  ENSG00000114841_98 (sequence is synthesized)
ccctatgagttcacggatggagatctgcgcatctgcatcagccagctcaagatgttcctggacgaatatgatgacatcccctacaaggtcctcaagtacacggcaggggagatcaattac

SEQ ID NO: 204304 - DNA, 120 bp, Artificial Sequence
  ENSG00000114841_99 (sequence is synthesized)
gggggccgtgtcactgatgactgggaccggcgctgcatcatgaacatcttggaggacttctacaaccctgacgtgctctcccctgagcacagctacagcgcctcgggcatctaccaccag

SEQ ID NO: 204305 - DNA, 120 bp, Artificial Sequence
  ENSG00000114841_100 (sequence is synthesized)
atcccgcctacctacgacctccacggctacctctcctacatcaagagcctcccactcaatgatatgcctgagatctttggcctgcatgacaatgccaacatcacctttgcccagaacgag

SEQ ID NO: 204306 - DNA, 120 bp, Artificial Sequence
  ENSG00000114841_101 (sequence is synthesized)
acgttcgccctcctgggcaccatcatccagctgcaacccaaatcatcttctgcaggcagccagggccgggaggagatagtggaggacgtcacccaaaacattctgctcaaggtgcctgag

SEQ ID NO: 204307 - DNA, 120 bp, Artificial Sequence
  ENSG00000114841_102 (sequence is synthesized)
cctatcaacttgcaatgggtgatggccaagtacccagtgctgtatgaggaatcaatgaacacagtactagtacaagaggtcattaggtacaatcggctgctgcaggtgatcacacagaca

SEQ ID NO: 204308 - DNA, 120 bp, Artificial Sequence
  ENSG00000114841_103 (sequence is synthesized)
ctgcaagacctactcaaggcactcaaggggctggtagtgatgtcctctcagctggagctgatggctgccagcctgtacaacaatactgtgcctgagctctggagtgccaaggcctaccca

SEQ ID NO: 204309 - DNA, 120 bp, Artificial Sequence
  ENSG00000114841_104 (sequence is synthesized)
tcgctcaagcctctgtcatcatgggtcatggacctgctgcaacgcctggactttctgcaggcctggatccaagatggcatcccagctgtcttctggatcagtggattcttcttcccccag

SEQ ID NO: 204310 - DNA, 120 bp, Artificial Sequence
  ENSG00000114841_105 (sequence is synthesized)
gctttcttaacaggcactctgcagaattttgcccgcaaatttgtcatctccattgacaccatctcctttgatttcaaggtgatgtttgaggcaccatcagagttaacacaaagaccccaa

SEQ ID NO: 204311 - DNA, 120 bp, Artificial Sequence
  ENSG00000114841_106 (sequence is synthesized)
gtagggtgctatatccatggattattcctggaaggtgcccgctgggatccagaggccttccagctggctgagtctcagcccaaggagctgtacacagagatggccgttatctggctcttg

SEQ ID NO: 204312 - DNA, 120 bp, Artificial Sequence
  ENSG00000114841_107 (sequence is synthesized)
ccaacacccaaccgcaaggcccaggaccaggacttttacctgtgccccatctacaagacactgactcgtgctggaacactatcaaccacaggacactctaccaactatgtcattgctgtg

SEQ ID NO: 204313 - DNA, 120 bp, Artificial Sequence
  ENSG00000114841_108 (sequence is synthesized)
gagatccccacccatcagccccagcgacactggataaagcgtggtgtggccctcatctgtgccctggactactagactcagacagaagggctggggccattaaagctgaattttctaagc

SEQ ID NO: 204314 - DNA, 120 bp, Artificial Sequence
  ENSG00000114841_109 (sequence is synthesized)
gctgatgcatccccgcactgctcggtggaaccggtggtggatgtgcatgcaccctggcggcatctgctgctccctttgcataagacgggagggtatacgtttcctgagctgatctgactc

SEQ ID NO: 204315 - DNA, 120 bp, Artificial Sequence
  ENSG00000114841_110 (sequence is synthesized)
gcaaccacagccacttgggaggatgacagtaataagccccatccctggggtcatgaggcccaggggttgagatgcattctattaagtgagttaataatgcacataaaattcttgacagtg

SEQ ID NO: 204316 - DNA, 120 bp, Artificial Sequence
  ENSG00000114841_111 (sequence is synthesized)
ggtcctggggtggctgtccacaccccctccctggcaaccccaggtgccacagtgggtagggccagccccaggcccctagcccagcctcccagagcccaccccacggggctgcccctccag

SEQ ID NO: 204317 - DNA, 120 bp, Artificial Sequence
  ENSG00000114841_112 (sequence is synthesized)
tcttccgacttcgtgaagcacctctcagaattccgggtcatcttcgacagccttgagccccaccggttagctgggccccagaatatggcaggatgagcccatcgaggggatgagtcccta

SEQ ID NO: 204318 - DNA, 120 bp, Artificial Sequence
  ENSG00000114841_113 (sequence is synthesized)
ggaaaggcttgtctgggcgccttctctaaggggccacccagggttgccctgtggctgtggccacatctcctctgtgcctccagtgccatacccctgggatagcccactctccccagctgt

SEQ ID NO: 204319 - DNA, 120 bp, Artificial Sequence
  ENSG00000114850_0 (sequence is synthesized)
gttagcggatacggcggccgcaggggcggagtcaagggcctttgcccgccttggcggccggctctacgttccctgttctcgcctgcagctccgccatggctcctaaaggcagctccaaac

SEQ ID NO: 204320 - DNA, 120 bp, Artificial Sequence
  ENSG00000114850_1 (sequence is synthesized)
agcagtctgaggaggacctgctcctgcaggatttcagccgcaatctctcggccaagtcctccgcgctcttcttcggaaacgcgttcatcgtgtctgccatccccatctggttatactggc

SEQ ID NO: 204321 - DNA, 120 bp, Artificial Sequence
  ENSG00000114850_2 (sequence is synthesized)
gaatatggcatatggatcttattcagtctgctgttttgtatagtgtgatgaccctagtaagcacatatttggtagcctttgcatacaagaatgtgaaatttgttctcaagcacaaagtag

SEQ ID NO: 204322 - DNA, 120 bp, Artificial Sequence
  ENSG00000114850_3 (sequence is synthesized)
cacagaagagggaggatgctgtttccaaagaagtgactcgaaaactttctgaagctgataatagaaagatgtctcggaaggagaaagatgaaagaatcttgtggaagaagaatgaagttg

SEQ ID NO: 204323 - DNA, 120 bp, Artificial Sequence
  ENSG00000114850_4 (sequence is synthesized)
ctgattatgaagctacaacattttccatcttctataacaacactctgttcctggtcgtggtcattgttgcttccttcttcatattgaagaacttcaaccccacagtgaactacatattgt

SEQ ID NO: 204324 - DNA, 120 bp, Artificial Sequence
  ENSG00000114850_5 (sequence is synthesized)
ccataagtgcttcatcaggactcatcgccctcctgtctactggctccaaatagaccatgtcagcttcaccccctggctttgtgtctatgggtggcctgtggtatatggaaaagtagcagg

SEQ ID NO: 204325 - DNA, 120 bp, Artificial Sequence
  ENSG00000114850_6 (sequence is synthesized)
gtggtcagggtgggagacacaagatgtttttatagtctagagcctttaaaaaacccagcagaatgtaattcagtatttgtttattggctgttttttgacagattgttgaaattaaatgaa

SEQ ID NO: 204326 - DNA, 120 bp, Artificial Sequence
  ENSG00000114850_7 (sequence is synthesized)
ttgaaagggaaactcagagtactaggacgtttattaaaaggaaaaaaatgtcttgcaatgtgctgtaatcacaagaggagaaaataacttgtttccttgatctgtcagaggtcacagtaa

SEQ ID NO: 204327 - DNA, 120 bp, Artificial Sequence
  ENSG00000114850_8 (sequence is synthesized)
cctgggccgagctgttattatttattatataatagtagtaggaagttaataactggttctctgtgttccaagcacaatattacaacttcttttgaaccgtaaatatcagaatgaatcctc

SEQ ID NO: 204328 - DNA, 120 bp, Artificial Sequence
  ENSG00000114850_9 (sequence is synthesized)
ttcccaggggattgaacagaagcttaatgtttacaagtgtttgaatttgtgatctgaaataacacaaaattaaaaacatgatttctctaattttccaactagaggaagagaaacttgtgg

SEQ ID NO: 204329 - DNA, 120 bp, Artificial Sequence
  ENSG00000114850_10 (sequence is synthesized)
aaaagttctttttttttcttttttttttcttaaagaagggcagccaaggtagtaacctaaaaatagtgcccaggcatatgagagttgtcctacgaggttaaagaacacactgttccactg

SEQ ID NO: 204330 - DNA, 120 bp, Artificial Sequence
  ENSG00000114850_11 (sequence is synthesized)
tatggctttggccctgagtggccagggaggtcaacttgaccctgccatgttggtttgacttactaagacacaggaatcactgttttccttgaccagggtctcacaccctggaggaatgtt

SEQ ID NO: 204331 - DNA, 120 bp, Artificial Sequence
  ENSG00000114850_12 (sequence is synthesized)
aagtaagagaaagaacctctttcctgaatattgacatgtaaaagaccaaagtaatttttctgaacttctgcaattctgagaactctccaaggaatttacagtgattttagtgcttgtcag

SEQ ID NO: 204332 - DNA, 120 bp, Artificial Sequence
  ENSG00000114850_13 (sequence is synthesized)
catttttccatgaggactttcatacatttgactctttagttcacaggttcccattgattgtgagcaagatatttatctctttagcccttggggatccagctgagagcaatctcttgcatt

SEQ ID NO: 204333 - DNA, 120 bp, Artificial Sequence
  ENSG00000114850_14 (sequence is synthesized)
tttttacccgtgtatgtacagatatcatttcttgtgtatgccatgacttgaaaaagtttgggaagctctttagcaatatcagctaaaaggatatgaaatcacaggtgatagcagttgtca

SEQ ID NO: 204334 - DNA, 120 bp, Artificial Sequence
  ENSG00000114850_15 (sequence is synthesized)
ataaaaattattcatcgggagtttaacttccacttccatgctatcggatgtgttgggctccatgcaagaacttggaagaaaaacaggcaggaatgcatttgcataatgacccagatcatc

SEQ ID NO: 204335 - DNA, 120 bp, Artificial Sequence
  ENSG00000114850_16 (sequence is synthesized)
attttctgcaactgagaattatatttcatcattgcttctagaagtctgcaattctttacttttctttggtgcattattatctaggtgccatcactggataatgtggagtgactagagaag

SEQ ID NO: 204336 - DNA, 120 bp, Artificial Sequence
  ENSG00000114850_17 (sequence is synthesized)
atgtggagtgactagagaagtcacatatcactgtaaggtacagttagggtaacactttagaggtttattatttttaaaaaacttttcttgaactcctggccaacatggtgaaaccccgtc

SEQ ID NO: 204337 - DNA, 120 bp, Artificial Sequence
  ENSG00000114850_18 (sequence is synthesized)
tacttgggaggctgaagcaggagaactgcctgaacccaggaggcagaggttgcggtgagtcgagatcgtgctactactgcctgggtggcaagggtgagactccatctcaaaaaagaaaca

SEQ ID NO: 204338 - DNA, 120 bp, Artificial Sequence
  ENSG00000114850_19 (sequence is synthesized)
gtggcaagggtgagactccatctcaaaaaagaaacaaaaaaacccaaaaagttttctttactgttggttaaaaaaaaaagccagaccatagtttgactggtggcatggaatttgtgtatc

SEQ ID NO: 204339 - DNA, 120 bp, Artificial Sequence
  ENSG00000114850_20 (sequence is synthesized)
aaataaatgcatttgcttatttgacaaaccatcagtgtccactatttgttaccagagttgggccactatcttttaaaattgctggtgaaaacttgccactagatggcagtgcctgtatag

SEQ ID NO: 204340 - DNA, 120 bp, Artificial Sequence
  ENSG00000114850_21 (sequence is synthesized)
atggggaaaaaattgccaccattcttggtataatacagtgtagcttagatgaggtggtgaaataggggtatcagccgaatattcctaatatagtttctcttgaattaataaactgaagat

SEQ ID NO: 204341 - DNA, 120 bp, Artificial Sequence
  ENSG00000114850_22 (sequence is synthesized)
ttgtaggaaaatgagtgagcaaaatttgtttactgttgtgaatttttcctacagcactgtttttaatcttgatgttttccaactttctgtactaatagatacatttctgtgcataagatt

SEQ ID NO: 204342 - DNA, 120 bp, Artificial Sequence
  ENSG00000114850_23 (sequence is synthesized)
ataaagcatatactcacagttcagtagttttcgttaaggatttactgtgtgagtactttactgtgaggaattgcagaaccttttcccctctactcttgtctaaaagttctgtgtggcaca

SEQ ID NO: 204343 - DNA, 120 bp, Artificial Sequence
  ENSG00000114850_24 (sequence is synthesized)
cagagatgcgacctactcaatctgacttagtaaaaccatgctgtagaatttttgtcttaaaaagaccacatacccagcacccatgaaataaaagattcatctgtaattgggattcaaagt

SEQ ID NO: 204344 - DNA, 120 bp, Artificial Sequence
  ENSG00000114850_25 (sequence is synthesized)
gattaaattcctttgttcatactcataaatagcactaaagtgttataacattttcatttacctatttttagttccttcattttaacttaataaaaatcttggattgatattctttttttt

SEQ ID NO: 204345 - DNA, 120 bp, Artificial Sequence
  ENSG00000114850_26 (sequence is synthesized)
aggcgtgagccaccgcgcccggcctagattgatattcttaagcaataaaagtttactggttgtcctatttgccatattattgaaacttggaaaggataatttgaaacaaggtttgaagtt

SEQ ID NO: 204346 - DNA, 120 bp, Artificial Sequence
  ENSG00000114850_27 (sequence is synthesized)
ggaaaggataatttgaaacaaggtttgaagttaactgaaatatggagattgaatttatactcaattcttgtgaaaagtcttgcttaataagtatgattaaactttgcttcttaaaatttg

SEQ ID NO: 204347 - DNA, 120 bp, Artificial Sequence
  ENSG00000114850_28 (sequence is synthesized)
cagcccctcaaccagctgctattccaggattcagctcatgtgggcctccactgtatgggactgtttcctgtgaggcatggccatctgtgtatcgggaagccctcacaagtgggcatctga

SEQ ID NO: 204348 - DNA, 120 bp, Artificial Sequence
  ENSG00000114850_29 (sequence is synthesized)
aatctctccagctcccctgagctcggggaggcacggagcctcttctttgggcacagtgttgtcgcttgggattgtcctgtgcagcactcggggaggtcacttgttaaaaggttatactgg

SEQ ID NO: 204349 - DNA, 120 bp, Artificial Sequence
  ENSG00000114850_30 (sequence is synthesized)
cacagtgtatccttttcaaggttgattatcttttttagaagtcaagaaacagtagttcattttggttttgacttgtctggatattttagtggaaagaaaaactgctctgggagtcagtcc

SEQ ID NO: 204350 - DNA, 120 bp, Artificial Sequence
  ENSG00000114850_31 (sequence is synthesized)
attaaatagtgctgactttagataactttctggacatttaaaataacagctattggtttaagattcttttaagtttatgaattatgactgtatgataaagtattacaaagtagtctatgg

SEQ ID NO: 204351 - DNA, 120 bp, Artificial Sequence
  ENSG00000114850_32 (sequence is synthesized)
gaatctgtgtccttgcctccttaaaaaaaagctccaaagagccaaagcaaacctgtcatttttgatagcttctgaaataataagcccctgtacctgttatttttgggctctgggggttgg

SEQ ID NO: 204352 - DNA, 120 bp, Artificial Sequence
  ENSG00000114850_33 (sequence is synthesized)
attttggaatggcctgtgtttcgcatgctagtaccctgatgaatgaaatttgaagtctgacttgtgattacgttgagccagagtttgttctcattttagaagttgaaatctcatctggac

SEQ ID NO: 204353 - DNA, 120 bp, Artificial Sequence
  ENSG00000114853_0 (sequence is synthesized)
actcagcagtggtcaggtcacacggctagaggggcacagtggggcctgggcctctggtccctactcctctggtccctctgtctcctggccctgggccagtcaccttagatgatttgatcg

SEQ ID NO: 204354 - DNA, 120 bp, Artificial Sequence
  ENSG00000114853_1 (sequence is synthesized)
ctgcggttgtagtcctgggatttaaatctcctgccctgggtggccctatgcagcatgaggccgccagttgctggttgagaagacaactgactccccggcggctgagttctcgctggtgga

SEQ ID NO: 204355 - DNA, 120 bp, Artificial Sequence
  ENSG00000114853_2 (sequence is synthesized)
ggacgtggcgctgcactttgcctgcttgatgggccgcctgaacgagcagcgcctcttccagcctgacctctgcgacgtggacttggtgctggtgccccagcgcagcgtctttccggcaca

SEQ ID NO: 204356 - DNA, 120 bp, Artificial Sequence
  ENSG00000114853_3 (sequence is synthesized)
caagggtgtgctagccgcctacagccagttcttccactcactcttcacccagaacaagcagctgcagcgtgtggagctgtccctggaggcactggcacctggtggcctgcagcagatcct

SEQ ID NO: 204357 - DNA, 120 bp, Artificial Sequence
  ENSG00000114853_4 (sequence is synthesized)
caacttcatctatacgtccaagctgctggtcaacgcggccaacgtccacgaggtgctcagcgccgcctcattgctgcagatggctgacatcgctgcgtcctgccaagagctgctggacgc

SEQ ID NO: 204358 - DNA, 120 bp, Artificial Sequence
  ENSG00000114853_5 (sequence is synthesized)
ccgctctctaggcccaccaggtccgggcactgtggccctggcccagccggctgccagctgcactccagctgcgccgccctactactgtgacatcaagcaggaggccgacaccccaggcct

SEQ ID NO: 204359 - DNA, 120 bp, Artificial Sequence
  ENSG00000114853_6 (sequence is synthesized)
gcccaagatctatgcccgcgagggccctgacccttactcggtgcgtgttgaggacggggcagggactgctggtggcacagtgcctgccaccattgggccagcccagcccttctttaagga

SEQ ID NO: 204360 - DNA, 120 bp, Artificial Sequence
  ENSG00000114853_7 (sequence is synthesized)
ggagaaggagggtggtgtcgaggaggccggtgggcccccagccagcttgtgcaagctggagggtggagaagagttggaggaagagcttgggggttctggcacctacagccgcagggagca

SEQ ID NO: 204361 - DNA, 120 bp, Artificial Sequence
  ENSG00000114853_8 (sequence is synthesized)
atcccagatcatcgtggaggtgaacctcaacaaccagacactgcacgtgtccacggggccagaggggaagccaggtgccgggccaagcccagccaccgtggttctgggccgggaggacgg

SEQ ID NO: 204362 - DNA, 120 bp, Artificial Sequence
  ENSG00000114853_9 (sequence is synthesized)
gctgcagagacactcggacgaggaggaggaggacgacgaggaggaggaggaggaagaagaggaagaggaaggtggtggcagtggacgggaggaggaggaggaggaagagggtggcagtca

SEQ ID NO: 204363 - DNA, 120 bp, Artificial Sequence
  ENSG00000114853_10 (sequence is synthesized)
gggagaagaggaagaagaggaggaggacgggcacagtgagcaggaagaggaagaggaggaggaagaggaggaagggcctagtgagcaggatcaagagagctctgaggaggaggaggggga

SEQ ID NO: 204364 - DNA, 120 bp, Artificial Sequence
  ENSG00000114853_11 (sequence is synthesized)
ggagggggaggctgggggcaagcaggggccacggggaagccgaagcagccgggcagacccccctccccacagtcacatggccacacggtcccgggagaacgcccggcgccggggtacccc

SEQ ID NO: 204365 - DNA, 120 bp, Artificial Sequence
  ENSG00000114853_12 (sequence is synthesized)
tgaacctgaagaagctgggcggcggggtgggaagaggccaaagccaccccctggagtggcctctgcatcggcccgagggccgccagccactgatgggctgggggccaaggtgaagctgga

SEQ ID NO: 204366 - DNA, 120 bp, Artificial Sequence
  ENSG00000114853_13 (sequence is synthesized)
ggagaagcagcaccatccatgccagaagtgcccacgagttttcaacaaccgctggtacctggagaaacacatgaatgtgacccacagccgcatgcagatctgcgaccagtgcggcaagcg

SEQ ID NO: 204367 - DNA, 120 bp, Artificial Sequence
  ENSG00000114853_14 (sequence is synthesized)
cttcctgctggagagcgagctgctgctgcacaggcagacagactgcgagcgcaacatccagtgtgtgacatgtggcaaagctttcaagaagctttggtccctccatgagcataacaagat

SEQ ID NO: 204368 - DNA, 120 bp, Artificial Sequence
  ENSG00000114853_15 (sequence is synthesized)
tgtgcacggctacgcagagaagaagttctcatgcgagatctgtgagaagaagttctacaccatggcccacgtgcgtaagcacatggttgcccacaccaaggacatgcccttcacctgcga

SEQ ID NO: 204369 - DNA, 120 bp, Artificial Sequence
  ENSG00000114853_16 (sequence is synthesized)
gacctgcggaaagtccttcaagcgcagcatgtccctcaaggtgcactcactgcagcactcaggggagaagccgttcagatgtgagaactgcaatgagcgcttccagtacaagtaccagct

SEQ ID NO: 204370 - DNA, 120 bp, Artificial Sequence
  ENSG00000114853_17 (sequence is synthesized)
gcggtcacacatgagcatccacattggccacaagcagttcatgtgccaatggtgcggcaaggacttcaacatgaagcagtacttcgatgagcacatgaagacccacacaggagagaagcc

SEQ ID NO: 204371 - DNA, 120 bp, Artificial Sequence
  ENSG00000114853_18 (sequence is synthesized)
gtacatctgcgagatctgtggcaagagcttcaccagccggcccaacatgaagcggcaccggcgcacgcacacgggcgagaagccgtacccgtgcgacgtgtgtggccagcgcttccgctt

SEQ ID NO: 204372 - DNA, 120 bp, Artificial Sequence
  ENSG00000114853_19 (sequence is synthesized)
ctccaacatgctcaaggcccacaaggagaagtgcttccgcgtcagccacaccctggccggcgacggcgtccccgctgccccaggcctgcccccaacccagccccaggcgcacgcactgcc

SEQ ID NO: 204373 - DNA, 120 bp, Artificial Sequence
  ENSG00000114853_20 (sequence is synthesized)
cctgctcccggggctgccccagaccctgccgcccccgccccacctgccgcccccgcctccgctcttccccaccactgccagccccggcgggaggatgaacgccaacaactagctgccgag

SEQ ID NO: 204374 - DNA, 120 bp, Artificial Sequence
  ENSG00000114853_21 (sequence is synthesized)
ctgcacccgtgcacccgctggggcctggagtcagggcccactccaggagggacccactgccttcccggggagcacagtagtgcgggcctgggccctgctccacctccagaagtggctgga

SEQ ID NO: 204375 - DNA, 120 bp, Artificial Sequence
  ENSG00000114853_22 (sequence is synthesized)
ctgtgactccttgaagcctttacttttttttttttttggaagtgaaggaaaaagaaactatttacagcactcccctccaggtgaggggggtgctgggggtctgcagcagaaagaaagggg

SEQ ID NO: 204376 - DNA, 120 bp, Artificial Sequence
  ENSG00000114853_23 (sequence is synthesized)
cctgggcagcaggtgtggccagtccctctgccaaggcctgtgccagaggggttggccagttggagcctgggtcagcctcagcagcctatccccatgtcctctatgcccctaatttgcttc

SEQ ID NO: 204377 - DNA, 120 bp, Artificial Sequence
  ENSG00000114853_24 (sequence is synthesized)
ctcatcttggagggtttggggagaagttggcgtgccacccccacaacccctgaggaggtgtagacccagtctgagagccgcaagcactgaggcagggcctgagactggacctgggtgagc

SEQ ID NO: 204378 - DNA, 120 bp, Artificial Sequence
  ENSG00000114853_25 (sequence is synthesized)
gtggggggtggagggtggcgaggtgcggagactgcagaccagtgcttcactgtgtggagtggggcaggcaggggctggaccccagggacttgccttccccacccactctgctgccagcag

SEQ ID NO: 204379 - DNA, 120 bp, Artificial Sequence
  ENSG00000114853_26 (sequence is synthesized)
gcccagggatccctgacctgcaccaggtggcaccaagggtcctgagtcctggagatgtccccagaagctgctgtgcctcacagcgctgtgagccagaccctccttgggcagacaggctga

SEQ ID NO: 204380 - DNA, 120 bp, Artificial Sequence
  ENSG00000114853_27 (sequence is synthesized)
ctggcagcaccagctttgggggcagagtcctaggatgaggcttgggcagtgctggtagggtttcaaggtgctattagtggggcaggggcagggcggctgctcacagagcaccccagttcc

SEQ ID NO: 204381 - DNA, 120 bp, Artificial Sequence
  ENSG00000114853_28 (sequence is synthesized)
tcaccagctactctggccatatatcccacaccagaaggaacaagtgtggctgtgtccatctctgctcccccaaaggcccgctctaggccttatcctccctctaggtcctgccacaacctg

SEQ ID NO: 204382 - DNA, 120 bp, Artificial Sequence
  ENSG00000114853_29 (sequence is synthesized)
tccctggctggctccagcgtcctcgtccctcctgggcctgtgcaccggtgggtggggcgcccatagcactgccggtaaaggagcctgcatgttcaggcccctcgggggattggggggact

SEQ ID NO: 204383 - DNA, 120 bp, Artificial Sequence
  ENSG00000114853_30 (sequence is synthesized)
ggggaggcgcagcctagacccaattgcttgcccccatgaggctagcactaataggaaacccttttttgttgtcatttaatgtctttattcctgcctttaatatggggaggaaggttccat

SEQ ID NO: 204384 - DNA, 120 bp, Artificial Sequence
  ENSG00000114853_31 (sequence is synthesized)
aagctacatgtttcctagttaagctctttcctattgtgtttatacagttttgtttgttatactctttgcaccttaaacccccaccactccccgacactattgccttcccagcatggctgg

SEQ ID NO: 204385 - DNA, 120 bp, Artificial Sequence
  ENSG00000114853_32 (sequence is synthesized)
agtgggaagaggcttgggccccgggggaatggttagggggactgaacccctctgaccttatgaggcccatggcactggggcagggagctggggacattttaatcatcaataaacgaagca

SEQ ID NO: 204386 - DNA, 120 bp, Artificial Sequence
  ENSG00000114853_33 (sequence is synthesized)
ctttattctgtacagatttgggcaggcccaaggtgcccgagtgatctgaggatttataatccaagccacaccaccctggttgttctctgggcttggagggtacagtgccagcagcttcct

SEQ ID NO: 204387 - DNA, 120 bp, Artificial Sequence
  ENSG00000114853_34 (sequence is synthesized)
tgcccaattgatgttggagctgtagacgtacgctcaggcgctcctgctgtcctgggggagagaaggttcgcccctccccgaggaagaaggcttctggtcaggacccccaccccaaggctg

SEQ ID NO: 204388 - DNA, 120 bp, Artificial Sequence
  ENSG00000114853_35 (sequence is synthesized)
gggactccaggctcctgctttactgtagctctttttcttccttgcactccttgatctttgggcttccgtgatgtcctcagggtccccccctccctgttgctatttttaatctctagtccc

SEQ ID NO: 204389 - DNA, 120 bp, Artificial Sequence
  ENSG00000114853_36 (sequence is synthesized)
agtgcctggcagctctttggagctggctcacattttcccaaaaaaagttgatctctcccagtgggctgtaggcagggtcctccatgggtttccaacccccatcactggcaccaggatctc

SEQ ID NO: 204390 - DNA, 120 bp, Artificial Sequence
  ENSG00000114853_37 (sequence is synthesized)
ccacaggcactggtggtgtcatcacctgctggccccactacagcctgagtaggcctgagtggccgtggccaggctgagacctgtcaggccatactgacaagcagaggtcagagacactgg

SEQ ID NO: 204391 - DNA, 120 bp, Artificial Sequence
  ENSG00000114853_38 (sequence is synthesized)
tggggagctggcaatgaaaccctgtcctgggacatgggtttcatgttcttgtacacttcccctctgggatcaggtgaggggtccagacagctgaccagacagcttgacagctggtcaaga

SEQ ID NO: 204392 - DNA, 120 bp, Artificial Sequence
  ENSG00000114853_39 (sequence is synthesized)
cggtcacgggagctctaggtgggcacaaccaacccctctcctgggaggcccctgccccactggggataggagcctgtgtccctggtgctaagcactctcttcacttgggccattgttggt

SEQ ID NO: 204393 - DNA, 120 bp, Artificial Sequence
  ENSG00000114853_40 (sequence is synthesized)
gggggctcctttccggccagaccacaaggccagaagcaataatggcacctcagcagttccagtatggataggggttcctgttttactagcttttacatctttttatttaaaacaaaacaa

SEQ ID NO: 204394 - DNA, 120 bp, Artificial Sequence
  ENSG00000114853_41 (sequence is synthesized)
cacaaaaaaacaatgtgcccccagatgtcagaatgaggcgactagggcaccatactcactttccagggctgggggaagggggacgcaggatcatcccctcccaaggagatctgtgggggt

SEQ ID NO: 204395 - DNA, 120 bp, Artificial Sequence
  ENSG00000114853_42 (sequence is synthesized)
cccaccgtccatctggacttctcagcctgtttggctagaactcaggcctggagtctgggtctgccccctccccggctccttggggctctctggtctcaggccagctggcgatgggtggct

SEQ ID NO: 204396 - DNA, 120 bp, Artificial Sequence
  ENSG00000114853_43 (sequence is synthesized)
agagtgatgaactcaagccctgtggccacagttctgggagccttcaaccctggctcatgctgccatagtctccacggtgcccttcacagagggcttggtagtggcagaatggccatgccc

SEQ ID NO: 204397 - DNA, 120 bp, Artificial Sequence
  ENSG00000114853_44 (sequence is synthesized)
aggtgtgtgttgagaccattgacaactgctcgtgtacaggcaccccacagccccagagcatggggcacagcaggcatgcgagtgagaggatgaaggggaataaagtcagtacaactcgtg

SEQ ID NO: 204398 - DNA, 120 bp, Artificial Sequence
  ENSG00000114854_0 (sequence is synthesized)
agcaagctgtcctgtgagccgccagcatggatgacatctacaaggctgcggtagagcagctgacagaagagcagaaaaatgagttcaaggcagccttcgacatcttcgtgctgggcgctg

SEQ ID NO: 204399 - DNA, 120 bp, Artificial Sequence
  ENSG00000114854_1 (sequence is synthesized)
aggatggctgcatcagcaccaaggagctgggcaaggtgatgaggatgctgggccagaaccccacccctgaggagctgcaggagatgatcgatgaggtggacgaggacggcagcggcacgg

SEQ ID NO: 204400 - DNA, 120 bp, Artificial Sequence
  ENSG00000114854_2 (sequence is synthesized)
tccgcatgtttgacaaaaatgctgatggctacatcgacctggatgagctgaagataatgctgcaggctacaggcgagaccatcacggaggacgacatcgaggagctcatgaaggacggag

SEQ ID NO: 204401 - DNA, 120 bp, Artificial Sequence
  ENSG00000114854_3 (sequence is synthesized)
acaagaacaacgacggccgcatcgactatgatgagttcctggagttcatgaagggtgtggagtagatgctgaccttcacccagagctgcctatgcccagcctccaactccagctgagtcc

SEQ ID NO: 204402 - DNA, 120 bp, Artificial Sequence
  ENSG00000114854_4 (sequence is synthesized)
tggggttggggagggggtcggggtcccaggacctgagcctggccatgtcctcaaccccaaatcccccgactccctccccagatctgtcctgggggatgcaaataaagcctgctctcccaa

SEQ ID NO: 204403 - DNA, 120 bp, Artificial Sequence
  ENSG00000114854_5 (sequence is synthesized)
taaaatgggcataagggctacacaagcctggcgtttggtgtgaggatgcggtgagaacatgggggttcgtgtcgaaggtgctgcctgcagtacctaccctggcctctgtaacggccatgc

SEQ ID NO: 204404 - DNA, 120 bp, Artificial Sequence
  ENSG00000114854_6 (sequence is synthesized)
cagctgtccttcgggccacccagcttgagtttcatcaggggccgaaagggcattgagtggtcactgactattgttactgagggtcaccttggtcctgaagggggtgcccacctgtcaccc

SEQ ID NO: 204405 - DNA, 120 bp, Artificial Sequence
  ENSG00000114854_7 (sequence is synthesized)
tggccctgagcccagtcgcagtgaggccagctgggtcacgtcagggctttgggggcagggagggaggactgagacctccactctgtggcctggaaatagcctgcctcctccagctccagc

SEQ ID NO: 204406 - DNA, 120 bp, Artificial Sequence
  ENSG00000114854_8 (sequence is synthesized)
cttctcacctgtggaatgggttggtttcctcagcagcagctatacctgagtctgagccttgagattccctttcctttctaggtagagcagctgacagaagagcagaaaaatgagttcaag

SEQ ID NO: 204407 - DNA, 120 bp, Artificial Sequence
  ENSG00000114857_0 (sequence is synthesized)
gacggcgttccgttagcggcgttggggtttggctgcagtggcagtgctttctcttctgctcacggggacccgctcaggctggaggccagccagctcttgccgccacctcggtcgcgatgg

SEQ ID NO: 204408 - DNA, 120 bp, Artificial Sequence
  ENSG00000114857_1 (sequence is synthesized)
gggcgcaggaccggccgcagtgccacttcgacatcgagatcaaccgggagccggttggtcgcattatgtttcagctcttctcagacatatgtccaaaaacatgcaaaaacttcctttgct

SEQ ID NO: 204409 - DNA, 120 bp, Artificial Sequence
  ENSG00000114857_2 (sequence is synthesized)
tgtgctcaggagagaaaggccttgggaaaacaactgggaagaagttatgttataaaggttctacgttccatcgtgtggttaaaaactttatgattcagggtggggacttcagtgaaggta

SEQ ID NO: 204410 - DNA, 120 bp, Artificial Sequence
  ENSG00000114857_3 (sequence is synthesized)
atggaaaaggtggagaatcaatttatggtggatattttaaagatgaaaactttattctcaaacatgacagagcgttccttttatcaatggcaaatcgagggaaacataccaatggttccc

SEQ ID NO: 204411 - DNA, 120 bp, Artificial Sequence
  ENSG00000114857_4 (sequence is synthesized)
agtttttcattaccacaaagcctgctccacacctggatggggtgcatgtagtctttggactggttatttctggttttgaagtaatcgaacaaattgaaaatctgaagaccgatgctgcaa

SEQ ID NO: 204412 - DNA, 120 bp, Artificial Sequence
  ENSG00000114857_5 (sequence is synthesized)
gcagaccatatgcagatgtgcgagttattgactgtggagtacttgccacaaaatcaataaaagatgtttttgagaaaaaaaggaagaaaccaactcattcagaaggctcggattcctctt

SEQ ID NO: 204413 - DNA, 120 bp, Artificial Sequence
  ENSG00000114857_6 (sequence is synthesized)
ccaattcctcctcttcttcagaatcatcttcagaaagtgaacttgaacatgagagaagcagaaggaggaaacataagaggaggccaaaagttaaacgttctaaaaagaggcgaaaggaag

SEQ ID NO: 204414 - DNA, 120 bp, Artificial Sequence
  ENSG00000114857_7 (sequence is synthesized)
caagcagttcagaagagccaaggaataaacatgcaatgaacccaaaaggtcactctgagaggagtgataccaatgaaaaaaggtcagttgattccagtgctaaaagggaaaaacctgtgg

SEQ ID NO: 204415 - DNA, 120 bp, Artificial Sequence
  ENSG00000114857_8 (sequence is synthesized)
tccgcccagaagagattcctccagtgcctgagaaccgatttttactgagaagagatatgcctgttgttactgcagaacctgaaccgaagattcctgatgttgcacccattgtaagtgatc

SEQ ID NO: 204416 - DNA, 120 bp, Artificial Sequence
  ENSG00000114857_9 (sequence is synthesized)
agaaaccatctgtatcaaagtctggacggaagattaaaggaaggggcacaattcgctatcacacacctccaagatcaagatcctgttctgagtcagatgatgatgacagcagtgaaactc

SEQ ID NO: 204417 - DNA, 120 bp, Artificial Sequence
  ENSG00000114857_10 (sequence is synthesized)
ctcctcactggaaagaggaaatgcagagattaagagcatatagaccacctagtggagaaaaatggagtaaaggagataagttaagtgacccctgttcaagccgatgggatgaaagaagct

SEQ ID NO: 204418 - DNA, 120 bp, Artificial Sequence
  ENSG00000114857_11 (sequence is synthesized)
tgtctcagagatccagatcatggtcctataatggatattattcagaccttagtacagcaagacactctggccaccataaaaaacgcagaaaagaaaaaaaggttaagcataaaaagaaag

SEQ ID NO: 204419 - DNA, 120 bp, Artificial Sequence
  ENSG00000114857_12 (sequence is synthesized)
ggaaaaagcagaaacactgcagaagacacaaacaaacaaagaagagaaggattcttataccgtctgacatagaatcctcaaaatcttccactcgaagaatgaaatcctcttgtgatagag

SEQ ID NO: 204420 - DNA, 120 bp, Artificial Sequence
  ENSG00000114857_13 (sequence is synthesized)
aaaggagttctcgttcttcctcattgtcatctcatcactcatcaaagagagactggtctaaatctgataaggatgtccagagctctttaacccattccagcagagactcatacagatcaa

SEQ ID NO: 204421 - DNA, 120 bp, Artificial Sequence
  ENSG00000114857_14 (sequence is synthesized)
aatctcactcacagtcttattctagaggaagctcaagatcaaggactgcgtcaaagtcctcatcacattctcgaagtagatcaaagtccagatctagttccaagtctgggcaccgaaaga

SEQ ID NO: 204422 - DNA, 120 bp, Artificial Sequence
  ENSG00000114857_15 (sequence is synthesized)
gagcatcaaaatcaccaagaaaaacagcttctcagttaagtgaaaataaaccagttaaaacagaacctttaagagcaaccatggcacaaaatgaaaatgtagtagtacaaccagttgtag

SEQ ID NO: 204423 - DNA, 120 bp, Artificial Sequence
  ENSG00000114857_16 (sequence is synthesized)
cagaaaatattcctgtaataccactgagtgacagtccccccccttcaagatggaagcctggacagaaaccttggaagccctcttatgagcgaattcaggaaatgaaagctaaaacaaccc

SEQ ID NO: 204424 - DNA, 120 bp, Artificial Sequence
  ENSG00000114857_17 (sequence is synthesized)
atttgctacccatccaaagcacttacagtttagcaaatattaaagagactggtagctcatcatcctaccataaaagagaaaaaaattcggaaagtgatcagagcacttattcaaaataca

SEQ ID NO: 204425 - DNA, 120 bp, Artificial Sequence
  ENSG00000114857_18 (sequence is synthesized)
gtgatagaagttcagaaagctcaccaaggtcaaggagcagatcttctaggagtagatcttattccagatcatatacaagatcacgtagtctagctagttcacattcaaggtctaggtctc

SEQ ID NO: 204426 - DNA, 120 bp, Artificial Sequence
  ENSG00000114857_19 (sequence is synthesized)
catcatctagatctcattcacgaaataaatacagtgatcattcacagtgtagtagatcatcttcatatacttctattagcagtgatgatggaaggcgagctaagaggagacttagatcca

SEQ ID NO: 204427 - DNA, 120 bp, Artificial Sequence
  ENSG00000114857_20 (sequence is synthesized)
gtgggaaaaaaaatagcgtttcacataaaaagcatagcagcagctctgaaaagacacttcacagtaaatatgtcaaaggtagagacaggtcttcatgtgtgagaaagtatagcgagagca

SEQ ID NO: 204428 - DNA, 120 bp, Artificial Sequence
  ENSG00000114857_21 (sequence is synthesized)
gatcatctttagattattcttcagacagtgagcagtcaagtgttcaggccacacagtcagcccaggaaaaagagaagcagggccaaatggaaagaacacataataaacaagaaaaaaaca

SEQ ID NO: 204429 - DNA, 120 bp, Artificial Sequence
  ENSG00000114857_22 (sequence is synthesized)
gaggtgaagaaaaatccaagtctgaacgggaatgccctcattcaaaaaaaagaactttgaaagagaatctttctgatcaccttagaaatggcagtaagcccaaaaggaagaattatgctg

SEQ ID NO: 204430 - DNA, 120 bp, Artificial Sequence
  ENSG00000114857_23 (sequence is synthesized)
gtagtaaatgggactctgagtcaaattcagaacgagatgtcactaaaaacagtaaaaatgactcccatccatcctctgacaaggaagaaggtgaggccacatccgattctgaatcagagg

SEQ ID NO: 204431 - DNA, 120 bp, Artificial Sequence
  ENSG00000114857_24 (sequence is synthesized)
ttagtgaaattcacatcaaagtcaaacccacaaccaagtcgtccacaaatacttcactgcctgatgataatggtgcttggaaatcaagcaaacagcgcacatcaacttctgactctgagg

SEQ ID NO: 204432 - DNA, 120 bp, Artificial Sequence
  ENSG00000114857_25 (sequence is synthesized)
ggtcctgttccaattcggaaaacaataggggaaagccacaaaagcacaaacatgggtcaaaggaaaatcttaaaagagaacacaccaaaaaagtgaaagagaaattgaaagggaaaaaag

SEQ ID NO: 204433 - DNA, 120 bp, Artificial Sequence
  ENSG00000114857_26 (sequence is synthesized)
acaaaaagcataaggctccaaaacgaaagcaagcatttcactggcagcctccactagaatttggtgaagaggaggaggaggagattgatgacaagcaagttactcaggaatcaaaagaga

SEQ ID NO: 204434 - DNA, 120 bp, Artificial Sequence
  ENSG00000114857_27 (sequence is synthesized)
aaaaagtttctgaaaacaatgaaaccataaaagataatattctaaaaactgagaaatccagtgaagaggacctttcaggtaaacatgatacagtgactgtttcatcagatcttgatcagt

SEQ ID NO: 204435 - DNA, 120 bp, Artificial Sequence
  ENSG00000114857_28 (sequence is synthesized)
ttactaaagatgatagtaaactcagtatttctcccacagctttaaatactgaggaaaatgtggcctgtttacaaaacattcagcacgttgaagaaagtgttcccaatggagtggaagatg

SEQ ID NO: 204436 - DNA, 120 bp, Artificial Sequence
  ENSG00000114857_29 (sequence is synthesized)
tgcttcaaacagatgacaacatggagatctgcactcctgataggagttccccagcaaaagtagaggagacttcccctctaggaaatgcacggcttgataccccagatataaacattgttt

SEQ ID NO: 204437 - DNA, 120 bp, Artificial Sequence
  ENSG00000114857_30 (sequence is synthesized)
gaaagtaaagtgttgggtgaagtggggaaacaggacagcagctctgctagcttggctagtgctggagaaagtaccgggaagaaggaggtggctgagaagagccagatcaacctcattgat

SEQ ID NO: 204438 - DNA, 120 bp, Artificial Sequence
  ENSG00000114857_31 (sequence is synthesized)
aagaaatggaagcccctgcaaggtgtggggaacctggcagcacctaatgctgccacatccagtgctgtggaagttaaggtgttgaccactgtgcctgaaatgaaaccacaaggcttgaga

SEQ ID NO: 204439 - DNA, 120 bp, Artificial Sequence
  ENSG00000114857_32 (sequence is synthesized)
atagaaattaaaagcaaaaataaagttcggcctgggtctctctttgatgaagtaagaaagacagcacgcttaaaccgtagaccaagaaatcaggagagttcaagtgatgagcagacgcct

SEQ ID NO: 204440 - DNA, 120 bp, Artificial Sequence
  ENSG00000114857_33 (sequence is synthesized)
agtcgggatgatgatagccagtccaggagtccaagtagatctcgaagtaaatctgaaaccaaatcaagacacagaacaaggtctgtctcctatagtcactcaagaagtcgatcgagaagt

SEQ ID NO: 204441 - DNA, 120 bp, Artificial Sequence
  ENSG00000114857_34 (sequence is synthesized)
tccacatcatcttatcgatcaagaagctactctagaagtcggagcagaggatggtacagcagaggccgaaccagaagccggagcagttcctaccggagttacaaaagtcacaggacgtcc

SEQ ID NO: 204442 - DNA, 120 bp, Artificial Sequence
  ENSG00000114857_35 (sequence is synthesized)
agcaggagcagatccaggagcagctcatatgatccccacagtcgatccaggtcctacacctacgatagctactatagcaggagtcggagtcgaagtagaagccagagaagtgacagttac

SEQ ID NO: 204443 - DNA, 120 bp, Artificial Sequence
  ENSG00000114857_36 (sequence is synthesized)
caccgaggcagaagttataatcggcggtccaggagttgtagatcttatggctctgacagtgaaagtgaccgaagttactctcatcaccggagccccagtgagagcagcagatacagttga

SEQ ID NO: 204444 - DNA, 120 bp, Artificial Sequence
  ENSG00000114857_37 (sequence is synthesized)
aaacgtccggatacaaattatatcttatttgtaaatatctggcaacttagcttaagaaatgtaatgacagtctgttgttctatttcaatatcagaggtgaatttcaaaaatagacacttc

SEQ ID NO: 204445 - DNA, 120 bp, Artificial Sequence
  ENSG00000114857_38 (sequence is synthesized)
ttaattgttactggttcatttacatgtggggagaagaatttaaaatacagatatgtctcctaaaaatatttttatgccacattttacagtagccaactatggaaatgaatttcattttct

SEQ ID NO: 204446 - DNA, 120 bp, Artificial Sequence
  ENSG00000114857_39 (sequence is synthesized)
tgaatcaagaaatcgtgaaatttatctatgtataatttgcaatattattttaagtctatttcactctatcttacgtatcccttagaatacagattctttttgcctgtttttccagtttta

SEQ ID NO: 204447 - DNA, 120 bp, Artificial Sequence
  ENSG00000114857_40 (sequence is synthesized)
gcatatatgctgccaagcatagaactgtgaaggagaactgttaaaggcggccaaatatttatatactgattacatagagtcttgtacatatgtgctctaaaaacaaaccacccagaattg

SEQ ID NO: 204448 - DNA, 120 bp, Artificial Sequence
  ENSG00000114857_41 (sequence is synthesized)
atactgttggtaaccaggagtataaggcagtggctctggggttcttaattcattcctaacttctttgatacttcacaggattaggaaagtggtcatcatacatcccacacagtctgtatt

SEQ ID NO: 204449 - DNA, 120 bp, Artificial Sequence
  ENSG00000114857_42 (sequence is synthesized)
acttcaggcttgtgggcaaggttaggaagaatcaatcagccttaactataaatacctgcactgtctctgaggacttactattttatgttctttttaatcaataccgatcagaagtttagg

SEQ ID NO: 204450 - DNA, 120 bp, Artificial Sequence
  ENSG00000114857_43 (sequence is synthesized)
ttataaaaacaattctacttcatgctttggtgcttggtaatttttggtgcgtctttaagcattactcttatatatcatatattaaaataccataaaaatgaaattcagacaaaatcactg

SEQ ID NO: 204451 - DNA, 120 bp, Artificial Sequence
  ENSG00000114857_44 (sequence is synthesized)
gcaccaaaaatggtttattctgagctgtcttcactttgactatttggggggcttctctcaagtacagatgtgggttggggtcccctggagcaggcaggattggcagtaagagatattggc

SEQ ID NO: 204452 - DNA, 120 bp, Artificial Sequence
  ENSG00000114857_45 (sequence is synthesized)
cactcaagtctactgtgtgtgtgtgcctctggaagagtgaagaatggacttcaaaagtaacatcaaaaatctaactgccaccatcctggagacattttgcagggctttcctttcaagtct

SEQ ID NO: 204453 - DNA, 120 bp, Artificial Sequence
  ENSG00000114857_46 (sequence is synthesized)
ttcaagtacaggatattaccacaacagcagctgaactgttgtaaccagcatgtttttcctatttccactgtgacctgcagctgactcaaagccttgcgtgacctgacccaggtgcaagag

SEQ ID NO: 204454 - DNA, 120 bp, Artificial Sequence
  ENSG00000114857_47 (sequence is synthesized)
agagacaggggaagagggatagagggtatagcataaattacatattttcatggctttgggtggttcctccaaaaataattggacctgtaaaaactagtgtgtgtgtgtgtgtgtgtgtgt

SEQ ID NO: 204455 - DNA, 120 bp, Artificial Sequence
  ENSG00000114857_48 (sequence is synthesized)
gtgtgtggtttttttttttaatctttactttgaatttgttccccaagtgtacttaatcaccttagtgccagtttaatccagttatgcagaagaaattcatattggttgcctgatgtagag

SEQ ID NO: 204456 - DNA, 120 bp, Artificial Sequence
  ENSG00000114857_49 (sequence is synthesized)
ctcagcaccaccctaccacaggccttgtctggtgtatttgggaagtggaaaagagccctcagttggagggagctgacaacccttggtggagggagggtgcccttgaatgtattaaaacta

SEQ ID NO: 204457 - DNA, 120 bp, Artificial Sequence
  ENSG00000114857_50 (sequence is synthesized)
tcacccaaagaaggtatgaaaacagggtaaggtggtcagttgtttgccaggtcaatagacagaaagtacattagaaaacaggacttaggccaaacaaacaatactggatactgaatacaa

SEQ ID NO: 204458 - DNA, 120 bp, Artificial Sequence
  ENSG00000114857_51 (sequence is synthesized)
aacagtatgatttatattaaaggtttccaaaggttgcctgcaaaggagaatattactactagtcagcaggaaaaaaatgcattcagaacccaagcagaaactgccaaatgtaattaggtt

SEQ ID NO: 204459 - DNA, 120 bp, Artificial Sequence
  ENSG00000114857_52 (sequence is synthesized)
aagaaaagttacccttgggcagtgtattagttttctattgctgtgtgacaaattaccccaaatttagcagtttaaaaaacaatacccatagcagttctgtagctcatgagtctggcacag

SEQ ID NO: 204460 - DNA, 120 bp, Artificial Sequence
  ENSG00000114857_53 (sequence is synthesized)
tgtggctggattctctgctcagggtcttaaaggctgaaataagggttggcaggacaacattccttcatggaggctctggggaagaatctgcttctaagttcattcaggttgttggcggaa

SEQ ID NO: 204461 - DNA, 120 bp, Artificial Sequence
  ENSG00000114857_54 (sequence is synthesized)
ttcagttctttgctggctctcagctggaggcccctctctcacctcaaggctgcctgcattccttcttatgtggtcccctccagcttcaaaccagccttcctgctctttctcatgcttcat

SEQ ID NO: 204462 - DNA, 120 bp, Artificial Sequence
  ENSG00000114857_55 (sequence is synthesized)
atctctctcccgtcctcctgttttaggggcatatgattagctcaagcccacagatatattttaaggttgattgtgcgatagaacataattgcaggagtactgtctcatctcatcatattc

SEQ ID NO: 204463 - DNA, 120 bp, Artificial Sequence
  ENSG00000114857_56 (sequence is synthesized)
acgggttctggagattagctcattgaaagtgggaggggcattttcaaattctgcctaccacaggcaataactgcccatctcagctgtaggtggaatttttacccagaaaagataggccct

SEQ ID NO: 204464 - DNA, 120 bp, Artificial Sequence
  ENSG00000114857_57 (sequence is synthesized)
agaagcctcatttcttttctccatggaaaaggacagccctctgctgcagcgttcaacttgtgtgtttactgacagagtgaactacagaaatagcttttcttcctaaaggggattgttcta

SEQ ID NO: 204465 - DNA, 120 bp, Artificial Sequence
  ENSG00000114857_58 (sequence is synthesized)
cattttgaagttattttttaataaaattgaattatgttgtgtattgtgcttcttaataggaaatgcattattggactgtttttgtaacatcctgtttattgcaaatagctagtatcgttc

SEQ ID NO: 204466 - DNA, 120 bp, Artificial Sequence
  ENSG00000114857_59 (sequence is synthesized)
aaaaactgtataaaatacttttgtacatattagcaatgtctaatttgtatacacttcagttaaatttccctaaaacttgaaaggggaccttgtagaaattaaaatatatacttagtctaa

SEQ ID NO: 204467 - DNA, 120 bp, Artificial Sequence
  ENSG00000114857_60 (sequence is synthesized)
atggaaaaggtggagaatcaatttatggtggatattttaaaggtaaggcttaatatttttcttcaaacagatgaaaactttattctcaaacatgacagagcgttccttttatcaatggca

SEQ ID NO: 204468 - DNA, 120 bp, Artificial Sequence
  ENSG00000114857_61 (sequence is synthesized)
ctaatgctgcatgaaaatactttatttgcatgaatttggggataaattatattgtaatatataatttttaattgacaagattaattaaggctaactttatggttaaacatgactttcagc

SEQ ID NO: 204469 - DNA, 120 bp, Artificial Sequence
  ENSG00000114857_62 (sequence is synthesized)
atggaggttaggcaactatatacatgaaaactcctatcttcctgcctaaaactgtcaacatattcttttgtttatagagaatgtggtcttttgcaaaatgaaaaggtaagagaacgaagc

SEQ ID NO: 204470 - DNA, 120 bp, Artificial Sequence
  ENSG00000114857_63 (sequence is synthesized)
tcagtaacacaaactccaattctgttcccttgcacccttcctaataaatttatggacagtctgggtcaggttgtggctggatttctatattgcttgaagacttggaaaattctgtgtatt

SEQ ID NO: 204471 - DNA, 120 bp, Artificial Sequence
  ENSG00000114857_64 (sequence is synthesized)
atttcatacatgcttctgtatcttttttcatttcccaatgggttattaatttcacatcagagaaaagagtctagttgtggggttttttttcccctaaaccaagcaatttctttgaataaa

SEQ ID NO: 204472 - DNA, 120 bp, Artificial Sequence
  ENSG00000114857_65 (sequence is synthesized)
agttgaaatttcgtttttcaaaggtttgtatgttttcttttgtatattagaactatgactgtgtttattctcataatagtagcatctgcataaatctaactattgcacttgccccaaaaa

SEQ ID NO: 204473 - DNA, 120 bp, Artificial Sequence
  ENSG00000114857_66 (sequence is synthesized)
gccttagaaaagtcagttgcagagatttgtaatgaaatctaatattactaggttttaacgctataatagcttcagtgttataatagtcttttatatttcctttgggggaaaatggattac

SEQ ID NO: 204474 - DNA, 120 bp, Artificial Sequence
  ENSG00000114857_67 (sequence is synthesized)
tactctttttcagaagcctgttcccaaggtaatcactttttaaagttttctgtgtttctgtttgttctgaagaagatttgtttgtatgaatgttaaaaggacatataagttagttttcaa

SEQ ID NO: 204475 - DNA, 120 bp, Artificial Sequence
  ENSG00000114857_68 (sequence is synthesized)
ggatattcctgctggaattaaaataactctaagtgatctttatcacagatttttttttcctttgaactagtaggaaacagctatttagctggttctgttatgtagcaatttaaaactaat

SEQ ID NO: 204476 - DNA, 120 bp, Artificial Sequence
  ENSG00000114857_69 (sequence is synthesized)
gctgtaggccactttgtggttgttccttgtggcagatacttttgtaccttaaaattgtattttgctatttaaatttttgtttcacagggctttcttccttagataattttgtgatacaat

SEQ ID NO: 204477 - DNA, 120 bp, Artificial Sequence
  ENSG00000114857_70 (sequence is synthesized)
ttgtgatacaattgagtatacacatacttaatttagatatgttcctgtaacttaatataacataatttttttgtcttacagtctagcttcaattaagttgaataataaatttaccgtata

SEQ ID NO: 204478 - DNA, 120 bp, Artificial Sequence
  ENSG00000114857_71 (sequence is synthesized)
ctaaaaagattattgaacttcttccatgtatagcacattaggcaagctaattggaaatttggaggaagtaagctagagatttttctaaaattttattagttttccctgaaagttaataat

SEQ ID NO: 204479 - DNA, 120 bp, Artificial Sequence
  ENSG00000114857_72 (sequence is synthesized)
ttaaatatcatttagccaaagtatgttactactaaaagtgactgttctaaggctgtttgtgtgaagtattaaatatatgttcttttcctcaaggctttaattagtatcttttggcctttt

SEQ ID NO: 204480 - DNA, 120 bp, Artificial Sequence
  ENSG00000114857_73 (sequence is synthesized)
tatgcttttgttatttgattagcttaaatttttcttttctgagtgttcagtcaagttatctgtactgaccagaagaggaatttcatcttttgctttctatttattacttgaacattactt

SEQ ID NO: 204481 - DNA, 120 bp, Artificial Sequence
  ENSG00000114857_74 (sequence is synthesized)
taatgtctcattactctaaggctctctctctctttgcctttatctctttaattctgttgttatgtgcattgaaacattttaagaaaaaaaaaaactttctgctttatctgtatagcagca

SEQ ID NO: 204482 - DNA, 120 bp, Artificial Sequence
  ENSG00000114857_75 (sequence is synthesized)
gtacatgtaaaacaagtgcattttatttttcatggttaatcctgggaactatattttaacttcagtggcttgtttccaccaagttcctgtacatcttctggtgggggagtggggttatta

SEQ ID NO: 204483 - DNA, 120 bp, Artificial Sequence
  ENSG00000114857_76 (sequence is synthesized)
aactttagaccatccttttggtaacttcaatcattacctttgatgggatgatctgagattgggtcttttacttaactctgtcacatagcagactgtcgtggagaggcattttttaaaata

SEQ ID NO: 204484 - DNA, 120 bp, Artificial Sequence
  ENSG00000114857_77 (sequence is synthesized)
tggaggccagccaggtgaagagctcgcccgcatgcgtgcgcgctgcgtgggagccgcgaggcccggggcgggagggggcctcgtcttggcctcctgcgctgtcgcgacgggccggcgtga

SEQ ID NO: 204485 - DNA, 120 bp, Artificial Sequence
  ENSG00000114857_78 (sequence is synthesized)
gtgaggcaccgtggcgcggacttcgtctcagccccgccctcgcccctgccctcgcccccgccctcgcccctgccctgaccgcttttctccccctctctcccagctcttgccgccacctcg

SEQ ID NO: 204486 - DNA, 120 bp, Artificial Sequence
  ENSG00000114857_79 (sequence is synthesized)
gcagtgccacttcgacatcgagatcaaccgggagccggacctggcagctctaacatctgacctcatttcctgacatcctggccctttgattctctgatctgcactaatatcctcatcata

SEQ ID NO: 204487 - DNA, 120 bp, Artificial Sequence
  ENSG00000114857_80 (sequence is synthesized)
tctagttgcttcatacaacaaacagtttggttttattttcaggtctgtggacatgtcattgattacagttaattgtcttgattactgtttatagcttaattatcaaaccagttgtttctt

SEQ ID NO: 204488 - DNA, 120 bp, Artificial Sequence
  ENSG00000114857_81 (sequence is synthesized)
atgggaaaagtatgtataattctataaactcaattttattacctgttattgaaaaaggatagcactttttaaactttaaattgaaatctggcaaatctaggagtaggtagcataggcatt

SEQ ID NO: 204489 - DNA, 120 bp, Artificial Sequence
  ENSG00000114857_82 (sequence is synthesized)
tcatttcaaagatttgtgtgttttcagttttcgggtgaaaatagtcctaagaactctttttttaagagatagggtcttgctctgttatccaggctggaatacagtggcacaattatagct

SEQ ID NO: 204490 - DNA, 90 bp, Artificial Sequence
  ENSG00000114857_83 (sequence is synthesized)
tttaaattttttgtagagacagggtcttccgctatgttgaccaggctggtctctgactcctgtcctcaagcaatcctcccacctaagacc

SEQ ID NO: 204491 - DNA, 120 bp, Artificial Sequence
  ENSG00000114857_84 (sequence is synthesized)
acaatgcctggcctcctggaactcttaaaataaaaaagttaggatcatttaacaattttcctatcaaaattctagtctttgggtttttcactgggttgatattgttctctttgtgaaaat

SEQ ID NO: 204492 - DNA, 120 bp, Artificial Sequence
  ENSG00000114857_85 (sequence is synthesized)
catataactcttttgagtgagacttgtaagctatcgttaattatgctgttgttttagtaactaattttatgtgcttttattatgaaatgcaaacattatacattttaatcagtgacttgg

SEQ ID NO: 204493 - DNA, 120 bp, Artificial Sequence
  ENSG00000114857_86 (sequence is synthesized)
gataagtaagaactttgagtataagcacaatcctgtgtctgttatattttaaatgttaaagggattggatacaattctggacttttcattaaagattcagtgaaagattcacagtcagac

SEQ ID NO: 204494 - DNA, 120 bp, Artificial Sequence
  ENSG00000114857_87 (sequence is synthesized)
agtatgatataaaatgtggtcagtgaatacttgttggatgagtgaatattataggtccagaatgtatgaaaaagcaaagtaccacgtaagacattttattttgtttttatgcagtttatt

SEQ ID NO: 204495 - DNA, 120 bp, Artificial Sequence
  ENSG00000114857_88 (sequence is synthesized)
ttattaatattatagttacttagtgaattcctttacaatgaatgccaaagtactgtctgattgcttttgttctggaatgtttttggtgttattactgtttgaaataagtaggttgtgaag

SEQ ID NO: 204496 - DNA, 120 bp, Artificial Sequence
  ENSG00000114857_89 (sequence is synthesized)
atgacttttttgatggtatttcttgtaatgggacttgacatatattttacagatgaagttaattgaggactctgagaattttgattattgcagcagttataacattccaaggtttccttc

SEQ ID NO: 204497 - DNA, 120 bp, Artificial Sequence
  ENSG00000114857_90 (sequence is synthesized)
agcgaattgaagctatcaaaaatgatttctgtgttagtatatttttaatgttcattatggcttaaagtaggtgattatttgcaggtaatggaaaaggtggagaatcaatttatggtggat

SEQ ID NO: 204498 - DNA, 120 bp, Artificial Sequence
  ENSG00000114857_91 (sequence is synthesized)
ctcatttcagtgtggaattagtcatttctgtataagggcaaaaggttctctgataatggtataaaactatagattgtttttggagtagcagtgacacttgtcaatttctaagatttataa

SEQ ID NO: 204499 - DNA, 120 bp, Artificial Sequence
  ENSG00000114857_92 (sequence is synthesized)
ggcttaaataccttgcacacatgttttttaaagtagattcaggggtcgggaaaactgaaaaatcactgtctttaagtacaagagaaaaatggaaatgcataaatattgaaaggttttaca

SEQ ID NO: 204500 - DNA, 120 bp, Artificial Sequence
  ENSG00000114857_93 (sequence is synthesized)
atttgaaatgttctttgtggttttttcttttttaggtatgttttcataagcatatataaatttaaacatttttgatagcctctggccttaacttactgagcatgtgtcaccattgcacag

SEQ ID NO: 204501 - DNA, 120 bp, Artificial Sequence
  ENSG00000114857_94 (sequence is synthesized)
ctctttaaacagccgcttttaagatcaatgcaatttttcttttaattgaagattttgaaagattaagagttagtgagatgagctctctgcctcttttagtagaattgaatagtctggatt

SEQ ID NO: 204502 - DNA, 120 bp, Artificial Sequence
  ENSG00000114857_95 (sequence is synthesized)
gtggatattatttctctccgcccttttgtaaccctctttggctaatgtcctctgttcatccacgtattagccaagtgccagtaaccctgctttacattgggatttctactcctggaatgt

SEQ ID NO: 204503 - DNA, 120 bp, Artificial Sequence
  ENSG00000114857_96 (sequence is synthesized)
aggttgagaaccccagagggcttctttttgttaaatacttttagtattcttaatatgtaatctaatccaattaaagtgcagacttatatttctgtatcttgagttgcagatgcaagtaat

SEQ ID NO: 204504 - DNA, 120 bp, Artificial Sequence
  ENSG00000114857_97 (sequence is synthesized)
ggactttaatcattcatatcaggtttaggcactatgggcaggctgagttgtccttgaaatagtcattcgtgtcttcatttgttttctgcactactgctataaaggaccaagtttgcctat

SEQ ID NO: 204505 - DNA, 120 bp, Artificial Sequence
  ENSG00000114857_98 (sequence is synthesized)
tcttggcagttttcatttgaattaaaaactaaacttgaatgtcataaagatagctattccatcctcaaattgagtctcaagtagtatgttgctgcatcgctacactactctggaatgttt

SEQ ID NO: 204506 - DNA, 120 bp, Artificial Sequence
  ENSG00000114857_99 (sequence is synthesized)
tattccaccattttctccaaaggtttgccataaagtggtttttacagcctttctatcagccaagatggcaaattgaattgggctctttatgttttaagaaaaatttgcaggctttcccca

SEQ ID NO: 204507 - DNA, 120 bp, Artificial Sequence
  ENSG00000114857_100 (sequence is synthesized)
atactgcaggatctgtgagtcatgggaggaacggatcaaagaaggagaaggaatgtatctaatcaggaaaccatacatcgtttttacttctaaatatttggggctgatcccttacactgt

SEQ ID NO: 204508 - DNA, 120 bp, Artificial Sequence
  ENSG00000114857_101 (sequence is synthesized)
acagagtgagactccatctcaaaataaacaaacaaataaaaataaaagcactctttacatctttcatataatagagtcactagcttctgtaccaatttcttgtctttagtgtactttggt

SEQ ID NO: 204509 - DNA, 120 bp, Artificial Sequence
  ENSG00000114857_102 (sequence is synthesized)
actttggtaaagttttataattaaagcacatttctatcttgaagttaccatccaaggtggtttctggatgctagtttaatgatttaaacactagtggctcactaattcactagatagttt

SEQ ID NO: 204510 - DNA, 120 bp, Artificial Sequence
  ENSG00000114857_103 (sequence is synthesized)
ttgttctgttttctttttgctgcctgtttttatttttataattacattggcatgaatttccacttttcaatcttctaaggaatatttgagatttttgcttttaaaacttaatatttcctt

SEQ ID NO: 204511 - DNA, 120 bp, Artificial Sequence
  ENSG00000114857_104 (sequence is synthesized)
taaaattctggaacttcttaagttgacattttaatttttttaaattaaattctgtagtgctcttacagaaccgaatattcttaatgtaagtataagcattacaaatccttgtagaataaa

SEQ ID NO: 204512 - DNA, 120 bp, Artificial Sequence
  ENSG00000114857_105 (sequence is synthesized)
tatttttagcattgttacgaaggttaaaaactgggttttgttcacttacatgtcttaaaattgccttaaaatgaatacagaaatttatatggcagcttctagtacagttgactgctttaa

SEQ ID NO: 204513 - DNA, 120 bp, Artificial Sequence
  ENSG00000114857_106 (sequence is synthesized)
catggcctgacatctagtgatatttttctctctttcaaatttctgttttctagctcttaaatatctgtttctcattcttataaatcaagatgcttgtagtatataattctgagactaatt

SEQ ID NO: 204514 - DNA, 120 bp, Artificial Sequence
  ENSG00000114857_107 (sequence is synthesized)
atctgcttttgaattttttccactgcaattcatataatgtgaagatctgtgaaaatgctatgggaaaactagcttgggttcaaaatatcttaaccaaatataccctgtaggcttcccaag

SEQ ID NO: 204515 - DNA, 120 bp, Artificial Sequence
  ENSG00000114857_108 (sequence is synthesized)
agtgactgtctgacagttggtgactgtagaagaagctggttgggtgttttctgggccaaggaaatttaaaatgtctgcaatgttatccatcattactttttgctgtcagaagggatggca

SEQ ID NO: 204516 - DNA, 120 bp, Artificial Sequence
  ENSG00000114857_109 (sequence is synthesized)
gattgaagcttttctccctatcgcattttcagagttgccgtgtcagagcttcaccttgggtgaaggaagatgggcaggaattctggaaacagaactcctgagacctacctctgcctgcct

SEQ ID NO: 204517 - DNA, 120 bp, Artificial Sequence
  ENSG00000114857_110 (sequence is synthesized)
aaaaatgtggactgactcagtatgagaaataacaagaaaacatttaagtgtttggggcaaatgttaatcactttctttccatagggcaaataggaggtgcttttcttatttaattacgct

SEQ ID NO: 204518 - DNA, 120 bp, Artificial Sequence
  ENSG00000114857_111 (sequence is synthesized)
gataaattttgagggtttttttttttaagtgttttgttttgttgttttggagttgagagtaactttaatttttatgtgtattcatgctgtgtatttatggctacaagtcaaactgatttc

SEQ ID NO: 204519 - DNA, 120 bp, Artificial Sequence
  ENSG00000114857_112 (sequence is synthesized)
atatgtatgcatacatatagtctaatagagatgattgtaattcattataatcttgagttttttaaattagtaagatggctactattgctgttttggggtttttaaggttagatatatatc

SEQ ID NO: 204520 - DNA, 120 bp, Artificial Sequence
  ENSG00000114857_113 (sequence is synthesized)
atgtttaactttttcccctatctttttatctttacttctttgttctctacatgctgtgtttaaacctttctgctctcttcacctgaacacatcgtgtttgacatcatctttgtgttgatg

SEQ ID NO: 204521 - DNA, 120 bp, Artificial Sequence
  ENSG00000114857_114 (sequence is synthesized)
atcgagatcaaccgggagccgggtgagctggaaactggggagcgctgctggggccgaggcctgccttggcgaaggggaggggtctaccctcagcaaccctcccccggcctttttgggagc

SEQ ID NO: 204522 - DNA, 120 bp, Artificial Sequence
  ENSG00000114857_115 (sequence is synthesized)
gggtaggaggcgcaggcaactttccgttttctcttgagagaaaatcagtgggagaggaaggtggcctgggcacacccctaactcgcagtccgggcctcttcctgccaaaccccacacacc

SEQ ID NO: 204523 - DNA, 120 bp, Artificial Sequence
  ENSG00000114857_116 (sequence is synthesized)
ccgctgcatctccggactgagtcctcgtagccagcctggcgccaagaaaaggaggtgcagttctttgaggactttttctctcccagtgtctccgtgaggcagacactcccgatccgattt

SEQ ID NO: 204524 - DNA, 120 bp, Artificial Sequence
  ENSG00000114857_117 (sequence is synthesized)
ccggttatcttgcttggtgctatgaagtttcaactagtaggaaatattgtgtgtttcctaatcacgatatatcactaatatgttaattttgcctctatttttccttaagaatctttagct

SEQ ID NO: 204525 - DNA, 120 bp, Artificial Sequence
  ENSG00000114857_118 (sequence is synthesized)
agaatttcgtggttcctgggaaaatggcttagtgaagatcttttgtgataaaccagagcattttgtaccagcagaattgcagcatgcatgcacttagcattaatgtttgtctttagggaa

SEQ ID NO: 204526 - DNA, 120 bp, Artificial Sequence
  ENSG00000114857_119 (sequence is synthesized)
tccagacatttgttagtgtattttttttaaatgaaacatttccttctaaagcatagttatttcattctaagtagcagagcgtgcagggtttcaaactgttttcttagctttttttgttat

SEQ ID NO: 204527 - DNA, 120 bp, Artificial Sequence
  ENSG00000114857_120 (sequence is synthesized)
ccgtgacaaaagttttaattggagacatatatatatgtgttgtctttgtgcaacatcttgttctgcatattcttatgagagcctgctactgttctagggtctggagatagagcagcgcat

SEQ ID NO: 204528 - DNA, 120 bp, Artificial Sequence
  ENSG00000114857_121 (sequence is synthesized)
attttaataagttggtcagacaaggccattttgagaagatgagatttaagcaggtatcagaaggagatgaagtgagccgtatttaagaagagcattcgtggtagagggaaacagcacagc

SEQ ID NO: 204529 - DNA, 120 bp, Artificial Sequence
  ENSG00000114857_122 (sequence is synthesized)
cctgaggtgaggagtagtatacagtcaggcgccaaatgacatttctatctttaacaatggtcttatatataatacctttttttggtaactttttaatgtttagctgtgtttagatataca

SEQ ID NO: 204530 - DNA, 120 bp, Artificial Sequence
  ENSG00000114857_123 (sequence is synthesized)
aatacttcattgtgttaaagttgcctacggtattcagtggagtaacatcctgtacaggtttgtagcctaggagcaaatagactatatagcttaggtgtgtagtaggccgtaccatctagg

SEQ ID NO: 204531 - DNA, 120 bp, Artificial Sequence
  ENSG00000114857_124 (sequence is synthesized)
tgtgtttaaatacattccatgatgttcacacaatgacgaaattgcctaattacacatttctcagaatccgtcctggttattaaacaatggaggactgtacttgcatgtttgagggacagc

SEQ ID NO: 204532 - DNA, 120 bp, Artificial Sequence
  ENSG00000114857_125 (sequence is synthesized)
agggtgcccagtgtggctggagtagaagaggaaagagaatagtaagaaatggcctgtaggactgactcagtgaggtaggaagatattaaagggtttcgagcaaagggatgagataatcct

SEQ ID NO: 204533 - DNA, 120 bp, Artificial Sequence
  ENSG00000114857_126 (sequence is synthesized)
ggaaatttggttgccttctctctctttttaatgtttttagccttgattgatcttttttttttttttttttaaataagtgttactagaaagccttgatggaccttaatctttattttgtag

SEQ ID NO: 204534 - DNA, 88 bp, Artificial Sequence
  ENSG00000114857_127 (sequence is synthesized)
tactagaaagccttgatggaccttaatctttattttgtagtgaatccatgctttagataacagggttattttctattaagaattaaaa

SEQ ID NO: 204535 - DNA, 88 bp, Artificial Sequence
  ENSG00000114857_128 (sequence is synthesized)
aaataaaaaaattagctgggcatggtggctctcttagttttactgaaggactgcttgagcctgggaagcagaggttgcagtgagtaga

SEQ ID NO: 204536 - DNA, 120 bp, Artificial Sequence
  ENSG00000114857_129 (sequence is synthesized)
ctgtagtcccagctatttgggaggctgagactgaaggactgcttgagcctgggaagcagaggttgcagtgagtagagattataccactgcatgtcagcctgggtgacggagtgagaccct

SEQ ID NO: 204537 - DNA, 120 bp, Artificial Sequence
  ENSG00000114857_130 (sequence is synthesized)
ttacatagtaccacaaagcctgctccacacctggatgggtaagagttacattcttactacattggggaagtgtttgggtggccagccataaagagagattggaccatggttgagccctca

SEQ ID NO: 204538 - DNA, 120 bp, Artificial Sequence
  ENSG00000114857_131 (sequence is synthesized)
agggagcgctcttgatgtctggcttaatctcatagcaaaagctattccttaggatcacagaatatacttgttttgagaccccatggctctcatgtgactgaaggagtcaatctgtgctca

SEQ ID NO: 204539 - DNA, 120 bp, Artificial Sequence
  ENSG00000114857_132 (sequence is synthesized)
tggatgggcttctcagcaatataattctttttattttttatttttctcttcagttttccaaaatgggtcggatagtaagcagtacaatatcatgtgtccctgtaaggaaggttcccaagt

SEQ ID NO: 204540 - DNA, 120 bp, Artificial Sequence
  ENSG00000114857_133 (sequence is synthesized)
accaagcgaaatctgaatgttaccagactctttaccctaaaatggttaagaaccattgttttaaaggcagaaaactgaggcccagtttgcataatcgtttccttttatgaagcagatttc

SEQ ID NO: 204541 - DNA, 120 bp, Artificial Sequence
  ENSG00000114857_134 (sequence is synthesized)
attttccatggttatgggaaggtattgctgttagatcaaagtatactgctgtgtttgaatgggtttaattgagtatgaaaggaggaacatgtgaaaccatcagtgagtatgctgagaaat

SEQ ID NO: 204542 - DNA, 120 bp, Artificial Sequence
  ENSG00000114857_135 (sequence is synthesized)
cattaagactttaaaaaggaaaattttatgtggattacaggtgaatctcagccttgcccatctcttttaatgccttgtttgaaataacttcacctgaacctaaaataaaagttaaaaact

SEQ ID NO: 204543 - DNA, 120 bp, Artificial Sequence
  ENSG00000114857_136 (sequence is synthesized)
caaactaactcgttaactttgtgatatttttcaatgcagaaaagaaattaacatttttctctttaattatggtaagtctcatttggggcaattgttaaatgtttccagtacttgttttgg

SEQ ID NO: 204544 - DNA, 120 bp, Artificial Sequence
  ENSG00000114857_137 (sequence is synthesized)
aaatatatcctcatgctgtcacctagtgcccatgttctaagctagaacactcctgagatcctaaaaagaaataggaacatatgagtatctgagtgggaaaatttagtgtttgttgttgcc

SEQ ID NO: 204545 - DNA, 120 bp, Artificial Sequence
  ENSG00000114859_0 (sequence is synthesized)
gcactctgctctcggcctcccgggctgcggggacgggacggctgccggcgcggactttgcgggccgggagccgagtccaggacagagccggaaccgccgagggaggcgagagggcagtgc

SEQ ID NO: 204546 - DNA, 120 bp, Artificial Sequence
  ENSG00000114859_1 (sequence is synthesized)
gcggagatggcggccgcggcggcggaggaagggatggagccacgggcgctgcagtacgagcagaccctgatgtatggccggtacactcaggaccttggggcctttgccaaagaggaagct

SEQ ID NO: 204547 - DNA, 120 bp, Artificial Sequence
  ENSG00000114859_2 (sequence is synthesized)
gctcggattcgcctgggagggcctgaaccctggaaaggtcccccttcctctcgggctgccccagagctcttggaatatggacggagccgttgcgcccgatgccgcgtctgttctgtccgc

SEQ ID NO: 204548 - DNA, 120 bp, Artificial Sequence
  ENSG00000114859_3 (sequence is synthesized)
tgccacaagttcctagtatccagggttggtgaagattggatcttcctggtcctgctggggcttctcatggcattggtcagctgggtcatggactatgccattgctgcctgtctgcaagcc

SEQ ID NO: 204549 - DNA, 120 bp, Artificial Sequence
  ENSG00000114859_4 (sequence is synthesized)
cagcagtggatgtcccggggcttgaacaccagcatcttgctccagtacctggcctgggtcacctaccctgttgtcctcatcactttctcagccggattcacacagatcctggcccctcag

SEQ ID NO: 204550 - DNA, 120 bp, Artificial Sequence
  ENSG00000114859_5 (sequence is synthesized)
gctgtcggctctggcatccctgagatgaagaccatcttgcggggagtggtgctgaaagaatacctcacactcaagacctttatagctaaggtcattgggctgacctgcgccctaggcagc

SEQ ID NO: 204551 - DNA, 120 bp, Artificial Sequence
  ENSG00000114859_6 (sequence is synthesized)
gggatgccgcttggcaaagagggcccttttgtgcatatcgcaagcatgtgtgctgcccttctcagcaagttcctctccctctttgggggtatctatgagaatgaatcccggaacacagag

SEQ ID NO: 204552 - DNA, 120 bp, Artificial Sequence
  ENSG00000114859_7 (sequence is synthesized)
atgctggctgccgcctgtgccgtgggggtgggctgctgcttcgcggcacctattggaggcgtcctcttcagcatcgaggtcacctccaccttctttgcagtgcggaactactggcggggc

SEQ ID NO: 204553 - DNA, 120 bp, Artificial Sequence
  ENSG00000114859_8 (sequence is synthesized)
ttcttcgctgccaccttcagtgccttcatcttccgggtcttggcagtctggaaccgggatgaagagactattacagccctcttcaaaacccgattccggctcgacttcccctttgacctg

SEQ ID NO: 204554 - DNA, 120 bp, Artificial Sequence
  ENSG00000114859_9 (sequence is synthesized)
caggagctgccagcctttgctgtcattggtattgctagtggcttcggtggagccctctttgtctacctgaaccggaagattgtccaggtgatgcggaagcagaaaaccatcaatcgcttc

SEQ ID NO: 204555 - DNA, 120 bp, Artificial Sequence
  ENSG00000114859_10 (sequence is synthesized)
ctcatgaggaaacgcctgctcttcccggctctggtgaccctgctcatctccacgctgaccttcccccctggctttggacagttcatggctggacagctctcacagaaagagacgctggtc

SEQ ID NO: 204556 - DNA, 120 bp, Artificial Sequence
  ENSG00000114859_11 (sequence is synthesized)
accctgtttgacaatcggacgtgggtccgccagggcctggtggaggagctagaaccacccagcacctcacaggcctggaacccaccacgtgccaacgtcttcctcaccctggtcatcttc

SEQ ID NO: 204557 - DNA, 120 bp, Artificial Sequence
  ENSG00000114859_12 (sequence is synthesized)
attctcatgaagttctggatgtctgcactggccaccaccatcccagttccctgtggggccttcatgcctgtctttgtcattggagcagcatttgggcgtctggtgggtgaaagcatggct

SEQ ID NO: 204558 - DNA, 120 bp, Artificial Sequence
  ENSG00000114859_13 (sequence is synthesized)
ggttcccagatggaattcatacggacagcagcacctaccggattgtgcctgggggctacgctgtggtcggggcagctgcgctggcaggagcggtgacacacacagtgtccacggctgtga

SEQ ID NO: 204559 - DNA, 120 bp, Artificial Sequence
  ENSG00000114859_14 (sequence is synthesized)
tcgtgttcgagctcacaggccagattgcccacatcctgcctgtcatgatcgccgtcatcctggccaacgctgtcgcccagagtctgcagccctccctctatgacagcatcatccgaatca

SEQ ID NO: 204560 - DNA, 120 bp, Artificial Sequence
  ENSG00000114859_15 (sequence is synthesized)
agaaactgccctacctgcctgagctcggctggggccgccaccagcagtaccgggtgcgtgtggaggacatcatggtgcgggatgttccccatgtggccctcagctgcaccttccgggacc

SEQ ID NO: 204561 - DNA, 120 bp, Artificial Sequence
  ENSG00000114859_16 (sequence is synthesized)
tgcgtttggcactgcacaggaccaagggccgaatgctggccctagtggagtcccctgagtccatgattctgctgggctccatcgagcgttcacaggtggtggcattgttgggggcccagc

SEQ ID NO: 204562 - DNA, 120 bp, Artificial Sequence
  ENSG00000114859_17 (sequence is synthesized)
tgagcccagcccgccggcggcagcacatgcaggagcgcagagccacccagacctctccactatctgatcaggagggtccccctacccctgaggcttctgtctgcttccaggtgaacacag

SEQ ID NO: 204563 - DNA, 120 bp, Artificial Sequence
  ENSG00000114859_18 (sequence is synthesized)
aagactcagccttcccagcagcccggggggagacccacaagcccctaaagcctgcactcaagagggggcccagtgtcaccaggaacctcggagagagtcccacagggagcgcagagtcgg

SEQ ID NO: 204564 - DNA, 120 bp, Artificial Sequence
  ENSG00000114859_19 (sequence is synthesized)
caggcatcgccctccggagcctcttctgtggcagtccaccccctgaggctgcttcggagaagttggaatcctgtgagaagcgcaagctgaagcgtgtccgaatctccctggcaagtgacg

SEQ ID NO: 204565 - DNA, 120 bp, Artificial Sequence
  ENSG00000114859_20 (sequence is synthesized)
cggacctggaaggcgagatgagccctgaagagattctggagtgggaggagcagcaactagatgaacctgtcaacttcagtgactgcaaaattgatcctgctcccttccagctggtggagc

SEQ ID NO: 204566 - DNA, 120 bp, Artificial Sequence
  ENSG00000114859_21 (sequence is synthesized)
ggacctctttgcacaagactcacactatcttctcactgctgggagtggaccatgcttatgtcaccagtattggcagactcattggaatcgttactctaaaggagctccggaaggccatcg

SEQ ID NO: 204567 - DNA, 120 bp, Artificial Sequence
  ENSG00000114859_22 (sequence is synthesized)
agggctctgtcacagcacagggtgtgaaagtccggccgcccctcgccagcttccgagacagtgccaccagcagcagtgacacggagaccactgaggtgcatgcactctgggggccccact

SEQ ID NO: 204568 - DNA, 120 bp, Artificial Sequence
  ENSG00000114859_23 (sequence is synthesized)
cccgtcatggcctcccccgggagggcagcccttccgacagcgacgacaaatgccaatgagcccctcgtgggtggcctaggatggtgctagccatgcccgtcagcccagaatgtgcatctt

SEQ ID NO: 204569 - DNA, 120 bp, Artificial Sequence
  ENSG00000114859_24 (sequence is synthesized)
tcattccttctgccttcggaaggcaggaggcagctacagctggaggctgcaccccagccccctccagacctggggtgccagcttctcccagttcatcctacctggaatctgacccactac

SEQ ID NO: 204570 - DNA, 120 bp, Artificial Sequence
  ENSG00000114859_25 (sequence is synthesized)
ccacctgcaacaagtcttccagaggcaggaagataggccctgccctggcaggatgggttggggtcacttgacccctgctccccctttgaggggaaaggggtggaactaagatgggtttat

SEQ ID NO: 204571 - DNA, 120 bp, Artificial Sequence
  ENSG00000114859_26 (sequence is synthesized)
aactggaacctccaatgaccagatgtatatagagatttacaaagatttttatattaatttaataaaacaaattcttaaatagaacaaaataaacacctaatgagccacttatatatagaa

SEQ ID NO: 204572 - DNA, 120 bp, Artificial Sequence
  ENSG00000114859_27 (sequence is synthesized)
ggccctagtggagtcccctggtgaggccaggaggggtcccaggtgctaggggcattgcccagggtcgaagcttcgggaaggggcagggagctcaggaccagtctccttggttccaaaggg

SEQ ID NO: 204573 - DNA, 120 bp, Artificial Sequence
  ENSG00000114859_28 (sequence is synthesized)
aatggaccagcacttgccaggtgggggcttccctctggtgtgtggcctgcatgcaaggccccccactctgagtgtgagagaaggacggggctggagggctccctctcagctcctgagtcc

SEQ ID NO: 204574 - DNA, 120 bp, Artificial Sequence
  ENSG00000114859_29 (sequence is synthesized)
taacctttacatagcttgcccttctaagcacctgccacgcagtgctcactcctcgaagcctctccacagtgccatgggaaaggcactattatcacccccgtttgaaagatgggggagtcg

SEQ ID NO: 204575 - DNA, 120 bp, Artificial Sequence
  ENSG00000114859_30 (sequence is synthesized)
aaacacaagtagctggcccaaagtcacacagctagagggcagagcgatgatctgaacccaagccatctgcttccagagtccttccccttgccatcacctgggaggcctgggggtcccagg

SEQ ID NO: 204576 - DNA, 120 bp, Artificial Sequence
  ENSG00000114859_31 (sequence is synthesized)
gtagctaggagggttacggggtggctgggagggttacgcccacctgatcagcgaggtagacttctcctgggtggcgctgtgggctgcctggggccaggtggagcctcttcgcctttgaac

SEQ ID NO: 204577 - DNA, 120 bp, Artificial Sequence
  ENSG00000114859_32 (sequence is synthesized)
ctcaggaggctgaggtgggaggactgcacgagcccaggagttcaagtccaacctgggcaacatagtgagactgtcttctaacacaaaaattttatttatttatttatttttagacggagt

SEQ ID NO: 204578 - DNA, 71 bp, Artificial Sequence
  ENSG00000114859_33 (sequence is synthesized)
aggttcaagtgattctcctgcctcagccctcccgagtagccgggattacaggagcgtgccaccacgtctga

SEQ ID NO: 204579 - DNA, 120 bp, Artificial Sequence
  ENSG00000114859_34 (sequence is synthesized)
gaaaatttttttaactaaaaaaaattgtttaaaaaaaatactgtaatgagagaagagctgaagtgtggaagaaatgaatgttttcagaaaaagaagagtgattatgtgaagctgcaggct

SEQ ID NO: 204580 - DNA, 120 bp, Artificial Sequence
  ENSG00000114859_35 (sequence is synthesized)
ggaagctggagtacacagtagaatgtgaggctataaagacaggctggggttggcttgggaagggtctcatgggccttctagggagtctgggctgtactcaagtttgacaaagggcatagg

SEQ ID NO: 204581 - DNA, 120 bp, Artificial Sequence
  ENSG00000114859_36 (sequence is synthesized)
ataagcagggccagactggagggaagggaggcagaaagaacccatcaggctgttgcagccccagtcttagtgaggatagtgaggctacagtcagtaatggccaggatgtttaggaagtga

SEQ ID NO: 204582 - DNA, 120 bp, Artificial Sequence
  ENSG00000114859_37 (sequence is synthesized)
attggtaaggcttggtgactgtcaggggcaagtggtttgcaaacctgaaaggcatatcgcccgccagaagctcacctggttaggattgtggagaaaaagaaaattcaagggaactattta

SEQ ID NO: 204583 - DNA, 120 bp, Artificial Sequence
  ENSG00000114859_38 (sequence is synthesized)
ataggctccttgggagaagatgagaggggttatttgaccataagaagacaaggctaagggattagtaacataggaagccttataataaaagcgtttccctctgaagtcagacaaggaaat

SEQ ID NO: 204584 - DNA, 120 bp, Artificial Sequence
  ENSG00000114859_39 (sequence is synthesized)
taaagctaacttgtagcacgtaggactccagttagccagaaggaatcgctaaccacatgacaactgtgttataggtattcaagaaacacagaagaacttttttttttttttttttttgag

SEQ ID NO: 204585 - DNA, 120 bp, Artificial Sequence
  ENSG00000114859_40 (sequence is synthesized)
agtgcagtggcacgatcatggctcactatagcctctgcctcctgggctcaggtgatcctcacaactcagcgcccccaagtagctgggactgcaggcatgcaccactatgtctggcttttt

SEQ ID NO: 204586 - DNA, 120 bp, Artificial Sequence
  ENSG00000114859_41 (sequence is synthesized)
tgatcctcacaactcagcgcccccaagtagctgggactgcaggcatgcaccactatgtctggctttttgtggagacagggtttcgcatattgcaggctagtctcaaactcctgggctcaa

SEQ ID NO: 204587 - DNA, 120 bp, Artificial Sequence
  ENSG00000114859_42 (sequence is synthesized)
ttacaggcatgagccatcgcgcccagaagagcttattctaaaattgaacttcttgcccctctaagtactgtcatgccatgggtggagaaatttaggaaagttctggaaatccctccctaa

SEQ ID NO: 204588 - DNA, 120 bp, Artificial Sequence
  ENSG00000114859_43 (sequence is synthesized)
agaatttcaaatgtgtaagaacatttaaaaagtgttaaggcaatttaagtgagttctgagtaattggtacacaagaagctgttattactgctcatcttgattcaaacattaagcgaagag

SEQ ID NO: 204589 - DNA, 120 bp, Artificial Sequence
  ENSG00000114859_44 (sequence is synthesized)
aaggagaactggctgacaatttctgaacccctggtgattatatgtgaaagcttaggggagggcttaaagcaagaaaaacatgggaagatgggggtgaccgttgtcctcctggactgcaag

SEQ ID NO: 204590 - DNA, 120 bp, Artificial Sequence
  ENSG00000114859_45 (sequence is synthesized)
ctgcatctcaacagaacttgggatgctgcttggaccctagaaaaggcagactgtatgagaggcatagcgtgcttcaggccaagactggaatgccagagcaggggagagagactccaaacc

SEQ ID NO: 204591 - DNA, 120 bp, Artificial Sequence
  ENSG00000114859_46 (sequence is synthesized)
tggccagccaggtaggagggcaactgagaagcagtggaacgagaggcataggattcagggcccaagtgcccttaaggtcggtgtgggctctcccttctcggtatatctgcaactaaacag

SEQ ID NO: 204592 - DNA, 120 bp, Artificial Sequence
  ENSG00000114859_47 (sequence is synthesized)
gactggggttgtgcgtccctctccggtgtgatgaaaagtgactggggctgcacagccactcctgaggacccgcctggaacaagtcacttcactgttgagccccatgctgcttctcctaat

SEQ ID NO: 204593 - DNA, 120 bp, Artificial Sequence
  ENSG00000114859_48 (sequence is synthesized)
gcttagttctcaggacagtactggaattaaatgataatgtaagacctagcacggagcctggccaatcactagatttcacgtgtgaacagttgttctgtcccacgtccccctttctaacat

SEQ ID NO: 204594 - DNA, 120 bp, Artificial Sequence
  ENSG00000114859_49 (sequence is synthesized)
gggactaagaattactcccccatcctatttctccgtcagtgtaagcaatataaggattttgagtatcaagttcctgaggcctggacacagaaacattctcattattattacgattgttat

SEQ ID NO: 204595 - DNA, 120 bp, Artificial Sequence
  ENSG00000114859_50 (sequence is synthesized)
tattttccctccagcagtcctgtctccttccctcccaatctggggcacccctcctattccacaccaaccttgtcctgggcccctgtggcctgtcatttagagctgcccctcgtccatcaa

SEQ ID NO: 204596 - DNA, 120 bp, Artificial Sequence
  ENSG00000114859_51 (sequence is synthesized)
agtgcctgcctctattctccctgcccttcggccctccctgctgtcagctcaggtcctgtggcgtgccctttcccctgggctccaccacttcccctcacctcccctctccctataacctca

SEQ ID NO: 204597 - DNA, 120 bp, Artificial Sequence
  ENSG00000114859_52 (sequence is synthesized)
actcctcatctttctggtttggctctaacaaaactgaagaagttggaatcctgtgagaagcgcaagctgaagcgtgtccgaatctccctggcagtaagtatgcctgctcttctagcatct

SEQ ID NO: 204598 - DNA, 120 bp, Artificial Sequence
  ENSG00000114859_53 (sequence is synthesized)
caggcacttcactgagaaatcagccagcagtgttttccaggctgactgagcatttttatattcatatgaattacctgaaaattggcatttttaagtttatagtcagcggtagaggacatt

SEQ ID NO: 204599 - DNA, 120 bp, Artificial Sequence
  ENSG00000114859_54 (sequence is synthesized)
tgggaatcaaagactaaggcctcctcaggtcctctgggctggcccatataggaatgctccctggagagtgtttgagcctcaggttccccccatgacccatggggatagatgagatctctt

SEQ ID NO: 204600 - DNA, 120 bp, Artificial Sequence
  ENSG00000114859_55 (sequence is synthesized)
gcgtgagccactgtgcccggccgagatttttttttttttaatctccagaacacagctctctcagtgtgaccctgaggattgggagtggggagggcgagacatgacttcccttgggactga

SEQ ID NO: 204601 - DNA, 120 bp, Artificial Sequence
  ENSG00000114859_56 (sequence is synthesized)
ggagggcgagacatgacttcccttgggactgacatccttcagagagagggcagccagctgaacctgctccctacgcacctctggtcaactttacaagtgaccccagcttcccccaacatt

SEQ ID NO: 204602 - DNA, 120 bp, Artificial Sequence
  ENSG00000114859_57 (sequence is synthesized)
gaccttcactctaagtcactgcagagagacaaagagaggcagaaacttctccaccccatcacacaatatgccctgatgggcttctgagggtggagggtggaataacaactcggagggccc

SEQ ID NO: 204603 - DNA, 120 bp, Artificial Sequence
  ENSG00000114859_58 (sequence is synthesized)
caagggagggcttggaggatggactttctgctgctgctacccacctacagagtcaggggctgacagaaaggtctttgggtcagacccctgctcttagaataaccccagtccaccatcagc

SEQ ID NO: 204604 - DNA, 120 bp, Artificial Sequence
  ENSG00000114859_59 (sequence is synthesized)
cttggggctatcgtatcataaacagcaaaggagaccttctgtcaggactgagtgttttcatgaaagagccaaggctctgctctgacctcagccctgagatatgcgaggccacccagccct

SEQ ID NO: 204605 - DNA, 120 bp, Artificial Sequence
  ENSG00000114859_60 (sequence is synthesized)
aaagccaacagccccagtgtgactgtgggaccccttgttccccgtgggatcccatggcctcttcccttcatcctgtcggtttcccagcctgaggcaccctgttcactctagctctcacag

SEQ ID NO: 204606 - DNA, 120 bp, Artificial Sequence
  ENSG00000114859_61 (sequence is synthesized)
gaggactgggaataaacctcctgcgtccatgccacactcgtctagacatggaggaaggcgtcttggcttcttggccactgaccactttccccagccagtctgactgcccagattcaggca

SEQ ID NO: 204607 - DNA, 120 bp, Artificial Sequence
  ENSG00000114859_62 (sequence is synthesized)
tcatctcggccactcccacagggcacagcttcttgcatcccctctccaagtgatcctcttgcctagattgcgctttgtcccagtgaataccctcagggaccctttccttcacccatgccc

SEQ ID NO: 204608 - DNA, 120 bp, Artificial Sequence
  ENSG00000114861_0 (sequence is synthesized)
aggaggggggtgggcgccagcgccccggcgaacggcaaagagggagccgctcccgctcggggggccgctggagtgcccagcgggaacccgaaagtttgtaagaggaagagagcgcgcggc

SEQ ID NO: 204609 - DNA, 120 bp, Artificial Sequence
  ENSG00000114861_1 (sequence is synthesized)
gagcgagcgggccgggggcagcggcagcggcgccggggaccatggtgctgccggcgcctcctccgcgggcgtgaaggcggcgctcctactccctccccggactccgcggtgtcccagaag

SEQ ID NO: 204610 - DNA, 120 bp, Artificial Sequence
  ENSG00000114861_2 (sequence is synthesized)
gaagcttttgttgacaattccagtttccgaacaaaacatttcggcaatggtgagggcttcgatcccttctctgatttgctgtcagccatgaacggatggatgtgatgcctgctagccaaa

SEQ ID NO: 204611 - DNA, 120 bp, Artificial Sequence
  ENSG00000114861_3 (sequence is synthesized)
aggcttccctctgtgtgttgcagtcctgtggcattatgcatgccccctcccagtgaccccaggctttttatggctgtgagacacgttaaaatttcaggggtaagacgtgaccttttgagg

SEQ ID NO: 204612 - DNA, 120 bp, Artificial Sequence
  ENSG00000114861_4 (sequence is synthesized)
tgactataactgaagattgctttacagaagccaaaaaaggtttttgagtcatgatgcaagaatctgggactgagacaaaaagtaacggttcagccatccagaatgggtcgggcggcagca

SEQ ID NO: 204613 - DNA, 120 bp, Artificial Sequence
  ENSG00000114861_5 (sequence is synthesized)
accacttactagagtgcggcggtcttcgggaggggcggtccaacggagagacgccggccgtggacatcggggcagctgacctcgcccacgcccagcagcagcagcaacaggcacttcagg

SEQ ID NO: 204614 - DNA, 120 bp, Artificial Sequence
  ENSG00000114861_6 (sequence is synthesized)
tggcaagacagctccttcttcagcagcaacagcagcagcaagttagtggattaaaatctcccaagaggaatgacaaacaaccagctcttcaggttcccgtgtcagtggctatgatgacac

SEQ ID NO: 204615 - DNA, 120 bp, Artificial Sequence
  ENSG00000114861_7 (sequence is synthesized)
ctcaagttatcactccccagcaaatgcagcagatcctccagcaacaagtgctgagccctcagcagctccaggttctcctccagcagcagcaggccctcatgcttcaacagcagcagcttc

SEQ ID NO: 204616 - DNA, 120 bp, Artificial Sequence
  ENSG00000114861_8 (sequence is synthesized)
aagagttttataaaaaacaacaggaacagttgcagcttcaacttttacaacaacaacatgctggaaaacagcctaaagagcaacagcaggtggctacccagcagttggcttttcagcagc

SEQ ID NO: 204617 - DNA, 120 bp, Artificial Sequence
  ENSG00000114861_9 (sequence is synthesized)
agcttttacagatgcagcagttacagcagcagcacctcctgtctttgcagcgccaaggccttctgacaattcagcccgggcagcctgcccttccccttcaacctcttgctcaaggcatga

SEQ ID NO: 204618 - DNA, 120 bp, Artificial Sequence
  ENSG00000114861_10 (sequence is synthesized)
ttccaacagaactgcagcagctctggaaagaagtgacaagtgctcatactgcagaagaaaccacaggcaacaatcacagcagtttggatctgaccacgacatgtgtctcctcctctgcac

SEQ ID NO: 204619 - DNA, 120 bp, Artificial Sequence
  ENSG00000114861_11 (sequence is synthesized)
cttccaagacctccttaataatgaacccacatgcctctaccaatggacagctctcagtccacactcccaaaagggaaagtttgtcccatgaggagcacccccatagccatcctctctatg

SEQ ID NO: 204620 - DNA, 120 bp, Artificial Sequence
  ENSG00000114861_12 (sequence is synthesized)
gacatggtgtatgcaagtggccaggctgtgaagcagtgtgcgaagatttccaatcatttctaaaacatctcaacagtgagcatgcgctggacgatagaagtacagcccaatgtagagtac

SEQ ID NO: 204621 - DNA, 120 bp, Artificial Sequence
  ENSG00000114861_13 (sequence is synthesized)
aaatgcaggttgtacagcagttagagctacagcttgcaaaagacaaagaacgcctgcaagccatgatgacccacctgcatgtgaagtctacagaacccaaagccgcccctcagcccttga

SEQ ID NO: 204622 - DNA, 120 bp, Artificial Sequence
  ENSG00000114861_14 (sequence is synthesized)
atctggtatcaagtgtcactctctccaagtccgcatcggaggcttctccacagagcttacctcatactccaacgaccccaaccgcccccctgactcccgtcacccaaggcccctctgtca

SEQ ID NO: 204623 - DNA, 120 bp, Artificial Sequence
  ENSG00000114861_15 (sequence is synthesized)
tcacaaccaccagcatgcacacggtgggacccatccgcaggcggtactcagacaaatacaacgtgcccatttcgtcagcagatattgcgcagaaccaagaattttataagaacgcagaag

SEQ ID NO: 204624 - DNA, 120 bp, Artificial Sequence
  ENSG00000114861_16 (sequence is synthesized)
ttagaccaccatttacatatgcatctttaattaggcaggccattctcgaatctccagaaaagcagctaacactaaatgagatctataactggttcacacgaatgtttgcttacttccgac

SEQ ID NO: 204625 - DNA, 120 bp, Artificial Sequence
  ENSG00000114861_17 (sequence is synthesized)
gcaacgcggccacgtggaagaatgcagtgcgtcataatcttagtcttcacaagtgttttgtgcgagtagaaaacgttaaaggggcagtatggacagtggatgaagtagaattccaaaaac

SEQ ID NO: 204626 - DNA, 120 bp, Artificial Sequence
  ENSG00000114861_18 (sequence is synthesized)
gaaggccacaaaagatcagtggtaacccttcccttattaaaaacatgcagagcagccacgcctactgcacacctctcaatgcagctttacaggcttcaatggctgagaatagtatacctc

SEQ ID NO: 204627 - DNA, 120 bp, Artificial Sequence
  ENSG00000114861_19 (sequence is synthesized)
tatacactaccgcttccatgggaaatcccactctgggcaacttagccagcgcaatacgggaagagctgaacggggcaatggagcataccaacagcaacgagagtgacagcagtccaggca

SEQ ID NO: 204628 - DNA, 120 bp, Artificial Sequence
  ENSG00000114861_20 (sequence is synthesized)
gatctcctatgcaagccgtgcatcctgtacacgtcaaagaagagcccctcgatccagaggaagctgaagggcccctgtccttagtgacaacagccaaccacagtccagattttgaccatg

SEQ ID NO: 204629 - DNA, 120 bp, Artificial Sequence
  ENSG00000114861_21 (sequence is synthesized)
acagagattacgaagatgaaccagtaaacgaggacatggagtgactatcggggcgggccaaccccgagaatgaagattggaaaaaggaaaaaaaaaaaaacacgtcaaaagttagcagtg

SEQ ID NO: 204630 - DNA, 120 bp, Artificial Sequence
  ENSG00000114861_22 (sequence is synthesized)
aaattgttctccatttgttgtacagtctggaggattttcactacgttttgacaactctgaaatgtgttaactcttagtgccatcaagaaccccatttgggagtatttttgatttttctac

SEQ ID NO: 204631 - DNA, 120 bp, Artificial Sequence
  ENSG00000114861_23 (sequence is synthesized)
tttttgttgaaaaaaggaatttgtactctgtgcattggatggacttgtttggtacttgggattttcctctcttaaccgtcaacatcagtgttgtaaatttgctaaactgattcactttta

SEQ ID NO: 204632 - DNA, 120 bp, Artificial Sequence
  ENSG00000114861_24 (sequence is synthesized)
gcagcagactttgaactgcagtcctgccaacgttggacactgaggacgcccgacagagcttgtgcacctaagctgcagaccaagcctttgcccagaatttaaggattccaatggacgacc

SEQ ID NO: 204633 - DNA, 80 bp, Artificial Sequence
  ENSG00000114861_25 (sequence is synthesized)
gttgggatggggaaggcctttgtgtgtgtattggggggaggggttaaaaaataattatcccaaactttttaatgtattgc

SEQ ID NO: 204634 - DNA, 120 bp, Artificial Sequence
  ENSG00000114861_26 (sequence is synthesized)
gggttaaaaaataattatcccaaactttttaatgtattgctttttttttttttttttttccttctactataccattttaagttctgacctcaggcctccatttgggccgatggcctcttg

SEQ ID NO: 204635 - DNA, 120 bp, Artificial Sequence
  ENSG00000114861_27 (sequence is synthesized)
gaggcttaaagttttctgtaccttgtgatgaatgttaataggtgtttttattatacaaagctgaatgtcatttctcgtttgtagctttctgtcactcattccatcttccttcagacatca

SEQ ID NO: 204636 - DNA, 120 bp, Artificial Sequence
  ENSG00000114861_28 (sequence is synthesized)
ccacgtttctctaaagtcagaaaacattccgttttggtctttttcaaaaaggtcccaaatgctgcactctacacatgaaggccctctcacacagacgtgacgtcctgccagaaagagaat

SEQ ID NO: 204637 - DNA, 120 bp, Artificial Sequence
  ENSG00000114861_29 (sequence is synthesized)
gaatgacagaaaaaaaaaagagagacaaactctaggaacaatgccgattcattccacgcagcagtattgggggtggttcgggggaggggtgtttcggattttctttttttcttttctttt

SEQ ID NO: 204638 - DNA, 120 bp, Artificial Sequence
  ENSG00000114861_30 (sequence is synthesized)
ctttttttttttttgcagcaaccattaataaatgccaccacattctaccagcacaaggaaacataggcagcactgaaaaaaaaaaaaaagctcatattaattagactgacaatatggcct

SEQ ID NO: 204639 - DNA, 120 bp, Artificial Sequence
  ENSG00000114861_31 (sequence is synthesized)
tggaaggctctcccttgtggaaccaagttgccatgggccttgggtgctctgcgataacgggtgtgggttggttttgtttgcaaaatggccaaaaaaaaaaaccggcttccccgagcagct

SEQ ID NO: 204640 - DNA, 120 bp, Artificial Sequence
  ENSG00000114861_32 (sequence is synthesized)
gccctgaaagtaggggtggcggcggcggcgctgagtttatacattagttcagacctacttggtggcattaaactgtttgaatgcaaattcgatttcagattgaacttgttaagggagtta

SEQ ID NO: 204641 - DNA, 120 bp, Artificial Sequence
  ENSG00000114861_33 (sequence is synthesized)
acgagggctgagttcagcaaatgctaaagtgttaatttcaaatatgcaaatttggtactgcagtttgttatgcaatattatatcaccaacccagtatcacaaaaactcatagaagatatc

SEQ ID NO: 204642 - DNA, 120 bp, Artificial Sequence
  ENSG00000114861_34 (sequence is synthesized)
atgtaggccctgggctttgggggggtcccaaacatggtatgcagaaatgtgatggttacaggtcagtacaacctcagtccttagaacccctccacacttcagctctgcacccactttcct

SEQ ID NO: 204643 - DNA, 120 bp, Artificial Sequence
  ENSG00000114861_35 (sequence is synthesized)
gtcatttatttatataggactgtagttttttttagttcgagagcctttcgaagcttaatttatattctttctttgtaccttttttctaaaattaccaaagatattacacaaaggtaaatt

SEQ ID NO: 204644 - DNA, 120 bp, Artificial Sequence
  ENSG00000114861_36 (sequence is synthesized)
atgttctctgttttatgctttatctgatgaagccaaatatcctcttattgttgatcaaaggaggcaaaagaatttagaggcaaatgacaagcgataggctattgcaacctgagaaagaga

SEQ ID NO: 204645 - DNA, 120 bp, Artificial Sequence
  ENSG00000114861_37 (sequence is synthesized)
actcattctcttaaagagattttatggggctactgcagataaaaataggacacaatattaaaggagctacagaaggaagggagtcccatctcaaaaaaaaaatgaatgtatgccactgca

SEQ ID NO: 204646 - DNA, 120 bp, Artificial Sequence
  ENSG00000114861_38 (sequence is synthesized)
attagagtatccaataaaggagacagtttagagtcaggacagaaaagcttccataattgaactagattacataatagtatttctagaaaaagagatatttttagattgtatgccactttt

SEQ ID NO: 204647 - DNA, 120 bp, Artificial Sequence
  ENSG00000114861_39 (sequence is synthesized)
gtttaagaactgtgctgtgatcactgtattaattttggtttatcttggcatatatccttcagtttgtttttatttttaatttttcctttttttccgattaggctttggtcagcatttttc

SEQ ID NO: 204648 - DNA, 120 bp, Artificial Sequence
  ENSG00000114861_40 (sequence is synthesized)
atttaaagaaaagtaacactcccatccactcataagcttggtacaaaaacttctctggcagttacttttgaagcttcactctgctttctgtataaagggcagtctgtggtcacgcaagac

SEQ ID NO: 204649 - DNA, 120 bp, Artificial Sequence
  ENSG00000114861_41 (sequence is synthesized)
aaaaaaaaaaaaaaaaaaaaaaaacttttccaggcagcttcatgatgtgcaggcagtagccagacagggtcatgggaagggggccctgtgcttctaaactgagtggttgctggttagttt

SEQ ID NO: 204650 - DNA, 120 bp, Artificial Sequence
  ENSG00000114861_42 (sequence is synthesized)
gagtggttgctggttagtttggtattcaaaagaggataaaaatctggtagattagttcattctcagcatgtgtagctagacatgagtaaagataacagcatgagaaactgttagtacgca

SEQ ID NO: 204651 - DNA, 120 bp, Artificial Sequence
  ENSG00000114861_43 (sequence is synthesized)
tacctcagttcaaacctttagggaatgattaaaatttaaaaaaaaaacatttcactcagttgcacttagtcgtatgtcttgcatgcttagtctaaagactgtagcaaaaaaaaaaaaaaa

SEQ ID NO: 204652 - DNA, 120 bp, Artificial Sequence
  ENSG00000114861_44 (sequence is synthesized)
agaaaaattagattttacatatctttgcaggtatcacagccttgcagaagaaccaactgaaaaaaaaattctcaggctttacagcaagcaaacttcactatgatttttacaattctgatt

SEQ ID NO: 204653 - DNA, 120 bp, Artificial Sequence
  ENSG00000114861_45 (sequence is synthesized)
ctgtatcccctgggggttatcccagttgcttctttaggatggggtttattacgttgtacatatatcccgatgtgtctgtgtgaatctttgtcttttttgggggagggcagagggcggttc

SEQ ID NO: 204654 - DNA, 120 bp, Artificial Sequence
  ENSG00000114861_46 (sequence is synthesized)
tttttttagatattgttcctaaaaaggaataaatgcatacacctgtttgtcaaaacacctttgctttttgtgcaactgctttatattaacgatactaaaaaaaaatagctttggaaaaaa

SEQ ID NO: 204655 - DNA, 120 bp, Artificial Sequence
  ENSG00000114861_47 (sequence is synthesized)
aactactgtatgtaacggaattgcagaatatgctgcacatgtattttatttagttatccttgctttaagaatattggatgacatttcctgacatgtgggagggagaaactccctaacttt

SEQ ID NO: 204656 - DNA, 120 bp, Artificial Sequence
  ENSG00000114861_48 (sequence is synthesized)
gggagaaactccctaactttttttttctgcttttaaactgtaacatagttgaagatttcttttttctgttctcattgattggagcattttgtacaggttttgtgtgtgtgtgtgtgtgtg

SEQ ID NO: 204657 - DNA, 120 bp, Artificial Sequence
  ENSG00000114861_49 (sequence is synthesized)
ttaatctgttttttgatacattcctatcccttgtgtttatcctaccactgccttcctggctatcttaaacaagttcatacatttgaaaagaaaaaaaaatgttgtttaaaaaatgttttc

SEQ ID NO: 204658 - DNA, 120 bp, Artificial Sequence
  ENSG00000114861_50 (sequence is synthesized)
tcctgctgcagtaaatattttgcatgatgaaattccagggtcacacttttccaagtttatcagtgaagtagtgattaacaatggggagtgtcaaaactattgaacttttgtataaaaaaa

SEQ ID NO: 204659 - DNA, 120 bp, Artificial Sequence
  ENSG00000114861_51 (sequence is synthesized)
aaaaaactttacaaggtgccaagatgtaaagaaaatctgttactttttttttctcaaagaaaagcatacattagggaggtagtcccgtgtgtcagacaaatgcactgtcaggaatgagga

SEQ ID NO: 204660 - DNA, 120 bp, Artificial Sequence
  ENSG00000114861_52 (sequence is synthesized)
tccaacctacctgtccctagagtccgtcttgtaagatgagttaggctgccccttggaccagccacaaaatggaatatcaaggcttatgtacatacgtgaagagttaccaccagtcctgcc

SEQ ID NO: 204661 - DNA, 120 bp, Artificial Sequence
  ENSG00000114861_53 (sequence is synthesized)
acctttggacagctctaacaccatccccagcatccagtcagacctagtaaagaaaaccttggattcttaacccaagataggctgtaaatcactagcttttttttcctcatgaaaaaaaat

SEQ ID NO: 204662 - DNA, 120 bp, Artificial Sequence
  ENSG00000114861_54 (sequence is synthesized)
agagttaaaaaatatttcctctcttttccatattccagctgaactccgtttccaaaggcacaaagaagagtgtgcttattcagattttgaatctttttggtaccttttggttaatgacat

SEQ ID NO: 204663 - DNA, 120 bp, Artificial Sequence
  ENSG00000114861_55 (sequence is synthesized)
agcctcctgaaattctggatgtcttcaaagtcagttttgcttctttatcctgaaaatcagatttacaatgctgaaggcatttcttgggcccagtgtagctcacgcaatctctgctaccca

SEQ ID NO: 204664 - DNA, 120 bp, Artificial Sequence
  ENSG00000114861_56 (sequence is synthesized)
taagccttgatgaagatgatacagtccggactgtgagcatggtgcttcatgtatatgtgctgccagtaacaagaatttttttgttttgttttgttttgttttgataaggcataaaagaaa

SEQ ID NO: 204665 - DNA, 120 bp, Artificial Sequence
  ENSG00000114861_57 (sequence is synthesized)
ctcattccttgacatcaactgtaattccatcattccatgtctgcggatacagacaataaaaaaaatgttgtgtagtcagtactaattactgacattataagcattctcaaatgcaataaa

SEQ ID NO: 204666 - DNA, 120 bp, Artificial Sequence
  ENSG00000114861_58 (sequence is synthesized)
aatgctggttgttcacgctggtagtaaaagttgccacagcctaagtttgtttccctttctgacctgctgatattgtatgttaggcatatgccttaggtttatcaccagctgcttccaatg

SEQ ID NO: 204667 - DNA, 120 bp, Artificial Sequence
  ENSG00000114861_59 (sequence is synthesized)
cagaattaaaatcaatcttaaagctttcatgatcagggaaggctgaagctcttatcctcaggatttccaagtgaaagtatccacttagagaattgggaagtaaaaaaaaaagagcaagag

SEQ ID NO: 204668 - DNA, 120 bp, Artificial Sequence
  ENSG00000114861_60 (sequence is synthesized)
atgttatcttttctcttgaggaagcacactcttatttttttcatcaaattttataaagaaaaacaaaatgtttaataactagcattaagagcaaactaaaatttcagaggaaagcaattt

SEQ ID NO: 204669 - DNA, 120 bp, Artificial Sequence
  ENSG00000114861_61 (sequence is synthesized)
catgaataattcattaaaatttcacatctgcaagattagtcatccaaataaaatgctaatgtcaaaaacatgcaccgtctataatattctcatcaagaaatctttttgcatataatgata

SEQ ID NO: 204670 - DNA, 120 bp, Artificial Sequence
  ENSG00000114861_62 (sequence is synthesized)
aatgcttagattagaacaaatgattttataaaaatattctatcaaaagtatgctagataattgcattcattgaagaaaacagaacttcagtacctaaatattccagaaaaaccatcttaa

SEQ ID NO: 204671 - DNA, 120 bp, Artificial Sequence
  ENSG00000114861_63 (sequence is synthesized)
ttttgagattttaaaaaaataattagatgcatttaggaaatgtgctgtttctttttaatattactctatagtatatattctagggattaatgaatttgagcatcacctttcaataaaaaa

SEQ ID NO: 204672 - DNA, 120 bp, Artificial Sequence
  ENSG00000114861_64 (sequence is synthesized)
ttaaattgccaatatgaaagcagtattttaagtggccaaaccgtggtaacataaaaccattacatatataattcagagcacataattcagggcaaaggatgacttgaaaattaacctccc

SEQ ID NO: 204673 - DNA, 120 bp, Artificial Sequence
  ENSG00000114861_65 (sequence is synthesized)
agtctttattctgcaaaacacccaccgatgctgaggatacaagtgaacattctttcccagcattgttttgaaaagcccatattagcaaagttgtgtgtgtgtgtctgtgtgtgtgttttt

SEQ ID NO: 204674 - DNA, 120 bp, Artificial Sequence
  ENSG00000114861_66 (sequence is synthesized)
aacaagtagattttgctattaagttgcaaactagtgtcctctttgaattaacaattatgccctatctagaaaccccttagtctcaataattagcaaaacatttgaacctttaattctcac

SEQ ID NO: 204675 - DNA, 120 bp, Artificial Sequence
  ENSG00000114861_67 (sequence is synthesized)
ctggctactgagactataatcttagggttaattcaaattcctgtaattaccaggcttaaacctaaatactgcttacagcctatacattagtaaaatttaaaaatgtacagatacttcttt

SEQ ID NO: 204676 - DNA, 120 bp, Artificial Sequence
  ENSG00000114861_68 (sequence is synthesized)
taataaactggaggacctaaaccaagtatgacgatatgttagtgaagattttgctggttgaggcatagtacattttaacttatatttcaggaattgttctcaagcaggaacactctttta

SEQ ID NO: 204677 - DNA, 120 bp, Artificial Sequence
  ENSG00000114861_69 (sequence is synthesized)
catatttatttcaggcttgtcactctcataaacgaggcagcaaacccaaaatattggctcttcttataaataggcgcctttatataaagaacataaaactcttaagactaatttcacacc

SEQ ID NO: 204678 - DNA, 120 bp, Artificial Sequence
  ENSG00000114861_70 (sequence is synthesized)
aacacaggcagcttcataatagtaaccacctctccctccccactaaaaaagataaaaacaaagtataattagtctttcttattagatttttgtctttgatgatattacgtatttatgtgt

SEQ ID NO: 204679 - DNA, 120 bp, Artificial Sequence
  ENSG00000114861_71 (sequence is synthesized)
agggtagtaatcacaatttatccttcatcttcattgtagttgaatcaaataaaagtattctttattcaaataatgtgaagttgggtgtctcaaaccttcatttaatgaattgatgaaagg

SEQ ID NO: 204680 - DNA, 120 bp, Artificial Sequence
  ENSG00000114861_72 (sequence is synthesized)
tttaagacaaaattcacgttggagggaaattaagttacatacaaaaacactggttttaactgtgggacaatatttggattagaaaaccatctctagatataacctacttatatttatttt

SEQ ID NO: 204681 - DNA, 120 bp, Artificial Sequence
  ENSG00000114861_73 (sequence is synthesized)
ctagatataacctacttatatttatttttaaatggtattttattttttaaaataacaaaacccaatgttgtcttatttccactttgattgtaaaatgacattcaatgcttaataccaaaa

SEQ ID NO: 204682 - DNA, 120 bp, Artificial Sequence
  ENSG00000114861_74 (sequence is synthesized)
atcacagcttggtgctggggctcagcatggccaggtggctaaccagggcttggtgtcaactacatttgggatgatgacacttggaggacacagagccactgtgcagcaggagtcgccact

SEQ ID NO: 204683 - DNA, 120 bp, Artificial Sequence
  ENSG00000114861_75 (sequence is synthesized)
aaacaaaattagtaggaatggctgaaaagacaggactgaccccaacaccattagctggagaaaaaaaaattccatttcattgcaactatgttattgtttactttaccatacacatcctaa

SEQ ID NO: 204684 - DNA, 120 bp, Artificial Sequence
  ENSG00000114861_76 (sequence is synthesized)
tatggttacctccccgtcagaggaggccaagccaggggttgagaggccccctccgggagaaagctcctaactgcttctcagacaataagaaacaaacggtacaactccacaaaaggcttc

SEQ ID NO: 204685 - DNA, 120 bp, Artificial Sequence
  ENSG00000114861_77 (sequence is synthesized)
ccggaaaataagtgtcaaataaatcctacggaactctcgcttctgccactgagctctgtatatgcaaacctgtttttatgccatcgcttccccaggctgagctgcgtttgtttggaaatg

SEQ ID NO: 204686 - DNA, 120 bp, Artificial Sequence
  ENSG00000114861_78 (sequence is synthesized)
ttttcttttttccttttttttttttcccccctcacttcatctgagggctctggattaattccttgagacatatctttgcatacatatctcatgagttatgtttcctggagccttttacta

SEQ ID NO: 204687 - DNA, 120 bp, Artificial Sequence
  ENSG00000114861_79 (sequence is synthesized)
tatggctgtgagacacgttaaaatttcaggacaggatattgctgtgttgcccaggctggagcgccgtggcacgattatagctcactgtaatttcgaactcctgggctcaagtgatcctcc

SEQ ID NO: 204688 - DNA, 120 bp, Artificial Sequence
  ENSG00000114861_80 (sequence is synthesized)
gcggcccggccctcgcccgggagtgcgtgtgtgcgcgcgtgtgtgcgcgagtgagtgtgtgcgcggggtgcgcgcgcgggcgggagtgggcgcgcgcggggaaaggcccgaaaacacctt

SEQ ID NO: 204689 - DNA, 120 bp, Artificial Sequence
  ENSG00000114861_81 (sequence is synthesized)
agacctggagcggtttagatatgtgtggcattaatagatttctttaagtgctaaatgcaactttgaaaattacctgcaagctccaactgatctttcaactttgaaagtgaagaattactt

SEQ ID NO: 204690 - DNA, 120 bp, Artificial Sequence
  ENSG00000114861_82 (sequence is synthesized)
gaggaattcttgtggtttctttgtcatttagtgagagcccagccagctactgtggaggcaaacctccctgaggttgcctacaaagggcaatgttccagtgtgttttctcttcgagtgtgc

SEQ ID NO: 204691 - DNA, 120 bp, Artificial Sequence
  ENSG00000114861_83 (sequence is synthesized)
ttcagccgcacagtacttcctgtttattcaaacatcttttttaccactcggcaacccccgcttcgcagaaacagccagaacccatctacagcaagaagacggaaatccaaaggcagacag

SEQ ID NO: 204692 - DNA, 120 bp, Artificial Sequence
  ENSG00000114861_84 (sequence is synthesized)
agtccgcctgcacgccgaggccgccggaccccacgcccggcccgcgcgggcgccccgagcccggctccgcgcgcctggcggctacatggagagtgtcaggttcccgtgtcagtggctatg

SEQ ID NO: 204693 - DNA, 120 bp, Artificial Sequence
  ENSG00000114861_85 (sequence is synthesized)
cgcggccacgtggaagggtgccattcgcaccaacctctcactgcataagtgctttatcagagtagaggatgagtttgggtccttttggacagttgatgatgaagagtttaaacgtggccg

SEQ ID NO: 204694 - DNA, 120 bp, Artificial Sequence
  ENSG00000114861_86 (sequence is synthesized)
gttcaactcttcctcctgtttttcaagctgacttgctgtgccttcagcagtttacttttcttcacagtatttgctgaattactccggtgacggaagacaggactgtgacaatcattttgg

SEQ ID NO: 204695 - DNA, 120 bp, Artificial Sequence
  ENSG00000114861_87 (sequence is synthesized)
ggcgggttaaggagtgttccattaggcaagctaggcatctggagataaacaggtagtttggttgatggtggagaaagaaaatgtaaaggacagccagtcaaagccagatccagggcatat

SEQ ID NO: 204696 - DNA, 120 bp, Artificial Sequence
  ENSG00000114861_88 (sequence is synthesized)
ccctggaatacgggacgatgtgttctttaaaaatacatgtgacaaaatcctctaaagtctgcaaaatctgaattttcttcttcttcttttttttttcttttaaagcatcctgcctatgta

SEQ ID NO: 204697 - DNA, 120 bp, Artificial Sequence
  ENSG00000114861_89 (sequence is synthesized)
aatgtcaccacaaaaatatctcaagagcaggtttcccgaaaccctgttggtgtgtatttgtctgcgtgaatgagctgtgtttggctagggcttggtctagccagggcgcactgcgtgtgc

SEQ ID NO: 204698 - DNA, 120 bp, Artificial Sequence
  ENSG00000114861_90 (sequence is synthesized)
gagagatggttttcctgaccgcccactttcatggcgcccaggctgtgtgccttttgatactgcaacgcagagcagctgcaggggatgctaataaaatgcaggattttggacactgagcaa

SEQ ID NO: 204699 - DNA, 120 bp, Artificial Sequence
  ENSG00000114861_91 (sequence is synthesized)
tgcaactttgtgagatcctggggaaggtgctgagactttggctcgggccgatttcccggtctctggatccttgcagggattccctgagccgcatcctctcttccctccacgcgcactcgc

SEQ ID NO: 204700 - DNA, 120 bp, Artificial Sequence
  ENSG00000114861_92 (sequence is synthesized)
gggtcctcggagcccgctgccctctctgtcctggcccctcggcctactcacccgtcccgtccccttcagttccccccagcctgcacggggaagacttgctgagggtcgccccggtttctt

SEQ ID NO: 204701 - DNA, 120 bp, Artificial Sequence
  ENSG00000114861_93 (sequence is synthesized)
gaaggcaaaatcaccttactacagcatgttccatgagggccacatggcaattaaggcagtttttctttaagtgtatctacatctacacttaaaaggccactggaataggaagaattcatg

SEQ ID NO: 204702 - DNA, 120 bp, Artificial Sequence
  ENSG00000114861_94 (sequence is synthesized)
cacacatgaaacaagcccacaacaacagtggagaacattcgctgtgcatgaatctgaccttcaggaaccatttttagttcatcaaaattagtgatgctgagaaatcgggacatcagtgca

SEQ ID NO: 204703 - DNA, 120 bp, Artificial Sequence
  ENSG00000114861_95 (sequence is synthesized)
taatgactgtgaaattaggaatgagagctcgctatgcaaatgacaggacaaatcatgtgaaaaagttcccgtgtcagtggctatgatgacacctcaagttatcactccccagcaaatgca

SEQ ID NO: 204704 - DNA, 120 bp, Artificial Sequence
  ENSG00000114861_96 (sequence is synthesized)
gggacaccggagagccccaggcggcactaggggttctccgtccccaaagagccagccggggtggcgcgagcctagcgataaggcaccgggagcgaggaatgtgcccatcctcaggccgtg

SEQ ID NO: 204705 - DNA, 120 bp, Artificial Sequence
  ENSG00000114861_97 (sequence is synthesized)
ctgatgctgtataccacctaaaaattgccatctacctttgcgggggacccagtggtcgatatagtaatcctgcagaagataatggcctttctaattatcaggccctgattctgaagctag

SEQ ID NO: 204706 - DNA, 120 bp, Artificial Sequence
  ENSG00000114861_98 (sequence is synthesized)
caggcatttgaatgctgctaccccccatgatagctttatggttttcaagaatagggttcataacggggatcatatttgtgggaaggtgacctaatgcaggggttggtaaaatttgtaagg

SEQ ID NO: 204707 - DNA, 120 bp, Artificial Sequence
  ENSG00000114861_99 (sequence is synthesized)
ggccagataggaaatattgtcatcctcatgagccatacagtcttttttgcaactagtcaactctgcctttagagcacaaaagcagccatagataatatacaagcaaaggggtgtcactgt

SEQ ID NO: 204708 - DNA, 120 bp, Artificial Sequence
  ENSG00000114861_100 (sequence is synthesized)
gctccagtgagactttatttacaaaaacagacagtaagccatatttggcctgaagactatagtaggctgtcccttgattggatgcatcaaaaacggacatttgacctgtaaacctgacac

SEQ ID NO: 204709 - DNA, 120 bp, Artificial Sequence
  ENSG00000114861_101 (sequence is synthesized)
ctcgctgggtaccactccgtctgaccttgagcaaaccatttatctgcgagaaacaggaataaaaaatatatacctgcccttactaccttgaaagatggtgttgtaaggatgaaacaagat

SEQ ID NO: 204710 - DNA, 120 bp, Artificial Sequence
  ENSG00000114861_102 (sequence is synthesized)
ataatgcatgtgaaagcactttgaaaatttcgaaactccttacgaatgtgatgatcggctctacagtcattctggttcaccttgtggagtgtgacttcttcacctttttaatcacattgg

SEQ ID NO: 204711 - DNA, 120 bp, Artificial Sequence
  ENSG00000114861_103 (sequence is synthesized)
gctttcatgagcgaaatgagtgtgggggaaagctctcttattttctgagtaatgtggtttgtctgtacgttccttctattttacagttgatggactagctgttgaaatgtctttcttttt

SEQ ID NO: 204712 - DNA, 120 bp, Artificial Sequence
  ENSG00000114861_104 (sequence is synthesized)
agtatcaaatatggatgaagggatatgcgggtagattatggtaggctaaagatcaaatgccaatgaagaacgattaaatttcctttaatcatcagaatctgagagtgctgtaagatctca

SEQ ID NO: 204713 - DNA, 120 bp, Artificial Sequence
  ENSG00000114861_105 (sequence is synthesized)
cctttaatataggccttaataaataataatgctttggatgcctacaagtatgtttaaatttcacaagtcttgcatgtcaaaacagagagacaggctcagcaaatatgcttccctgggcta

SEQ ID NO: 204714 - DNA, 120 bp, Artificial Sequence
  ENSG00000114861_106 (sequence is synthesized)
tactaattaagaaggcaagtcatacttaaacaaacagctttgggaatagagggttaatcagaatcccaattcatgaatcttctagttttttttttccctcagagaaaattgtagtgtcat

SEQ ID NO: 204715 - DNA, 120 bp, Artificial Sequence
  ENSG00000114861_107 (sequence is synthesized)
ctttagatatgttttcatgtcattatattagttaagaattgttttctagtaagagagatataagtataaaaaattatttaagtattctgtcgtaaaaacatctgggaagagcagtttgtg

SEQ ID NO: 204716 - DNA, 120 bp, Artificial Sequence
  ENSG00000114861_108 (sequence is synthesized)
tcttctatctttctactctgcttattcaagtgcgttccttcatcttcaaggtcacatggtggctgctggctctcaggccattgcctctacatccaagacaaaaagtagttttcctggctg

SEQ ID NO: 204717 - DNA, 120 bp, Artificial Sequence
  ENSG00000114861_109 (sequence is synthesized)
aggcaggcctttttaaagcactttccctgtagccttatccaatgatgcctgcttacatcctattagccacccctaactgtaagggtgtctgggaaatgcatccttagacttgaacaattt

SEQ ID NO: 204718 - DNA, 120 bp, Artificial Sequence
  ENSG00000114861_110 (sequence is synthesized)
gatgtcccaggtaaattctgggttctagtactaagaaaaggtgaatgcttactgagcaaccattatggttacttttacgaaatcatgctgtcaattttgcttacatgtttaatttttatt

SEQ ID NO: 204719 - DNA, 120 bp, Artificial Sequence
  ENSG00000114861_111 (sequence is synthesized)
tattttcaatgaatgccttctgttgactgtgccttgtttgaattttacatgttagaattttagcctgtttaattctcagcagagatacagctcagtaaatattttaagaccacaatattc

SEQ ID NO: 204720 - DNA, 120 bp, Artificial Sequence
  ENSG00000114861_112 (sequence is synthesized)
ttactgaaagtgccatggcaaatctgagaaatacatttctttattaagagagctataaagcaaaatttaaactctcgaatatgctagtctagtgggttttccttcctgtggatgtaagat

SEQ ID NO: 204721 - DNA, 120 bp, Artificial Sequence
  ENSG00000114861_113 (sequence is synthesized)
ttcattaaggcttgagtactagcatgaggtcttagtggcacgcactcacacccaattctgttccccctatatgggcaggggacattgctgacagctttgcattgtccctctgttcttatg

SEQ ID NO: 204722 - DNA, 120 bp, Artificial Sequence
  ENSG00000114861_114 (sequence is synthesized)
tagactcaaggacgggacagaactctccatcctacctttctgtgatttgttgctccctgtatctctgctgaaagcttaccgtgggagtggggtgcacgggacaagtaagccactcctgtc

SEQ ID NO: 204723 - DNA, 120 bp, Artificial Sequence
  ENSG00000114861_115 (sequence is synthesized)
caaattttctgtcccaaattggcctgtacatgattcttgtgagccactttttatcccataaaatgaatagaatgagacttccctatgctttgtattaataatatattctctgcctatact

SEQ ID NO: 204724 - DNA, 120 bp, Artificial Sequence
  ENSG00000114861_116 (sequence is synthesized)
ggcctgtgacgagtagtcataaaacttagggtaatggatgcattcgcagaaactccttggatgcctcctgtggatacaggatagcagcatggttaagagtgtctgctttgaagttagatt

SEQ ID NO: 204725 - DNA, 120 bp, Artificial Sequence
  ENSG00000114861_117 (sequence is synthesized)
ggcttagactcagattccaccttttccacttcctggctgaacaaccctaggcaagttacttaacctttctgtgccacggcctccttatctggaaaaggggataaaaatagaagccagctc

SEQ ID NO: 204726 - DNA, 120 bp, Artificial Sequence
  ENSG00000114861_118 (sequence is synthesized)
actctgaagagttagagaggtgatgcttgtaaagagcttagcacggatcctggtacatcataaatgccagcattgtactaggcaccccaggtgatacagtggaaatctctgtctctgaca

SEQ ID NO: 204727 - DNA, 120 bp, Artificial Sequence
  ENSG00000114861_119 (sequence is synthesized)
cttgggagttggaagtcctgcaggtccccttgtggggagcagttgctgagacgaagatgagtggacctgtgtgtcagcctaacccttccccattttgaataaaattattctttggagaaa

SEQ ID NO: 204728 - DNA, 120 bp, Artificial Sequence
  ENSG00000114861_120 (sequence is synthesized)
tgacccacctgcatgtgaagtctacagaacccaaagccgcccctcagcccgtaagtattgatccccaccaaggggaaaaaaacaaaactcacagtattccttttctacttccccacccca

SEQ ID NO: 204729 - DNA, 120 bp, Artificial Sequence
  ENSG00000114861_121 (sequence is synthesized)
aatggaggaaggaggaccagcctactttggtggagctttgagttttgagggccttagattcatgcgactgtttctggttatcctttatgatgaaggtcatatgctaggcatttggggaga

SEQ ID NO: 204730 - DNA, 120 bp, Artificial Sequence
  ENSG00000114861_122 (sequence is synthesized)
tctttaaaggcagaatgattggtgcccaagcaaggtactgaaatacattatgagagctccctggaaaaagaaaatctttctgaatggtaggaacgcagagaagacagctaaaccatgaca

SEQ ID NO: 204731 - DNA, 120 bp, Artificial Sequence
  ENSG00000114861_123 (sequence is synthesized)
gcaaagcaaagaggcatttcagctcgggtaagctgagagacagtggtgtgtaggaaaaagagcagggagtagtagtccagtctaactcttaacagaggaaagacataggaaacctagtgt

SEQ ID NO: 204732 - DNA, 120 bp, Artificial Sequence
  ENSG00000114861_124 (sequence is synthesized)
tggaatagtcagaggctaaattatggagaggctctaatggttactaaggagtttgaaatgaaaattattccttcacagttaggagaccaaacacagtatactgaaattacatttaatttg

SEQ ID NO: 204733 - DNA, 120 bp, Artificial Sequence
  ENSG00000114861_125 (sequence is synthesized)
taagaatctcctctttcttgccttattcccttttactggaccttgaagggtgtcatcccagcacaggctgttaataccgaagcagaaggatcgtgtctgaacctaaaagtttgtcttgga

SEQ ID NO: 204734 - DNA, 120 bp, Artificial Sequence
  ENSG00000114861_126 (sequence is synthesized)
cctccttccttgtaataaatcgatctctttaacggtcatattcctcttacgtttctaaaattctcctagtagctttaactgattattcaaaatggagacagtgctttgcttcttgatttt

SEQ ID NO: 204735 - DNA, 120 bp, Artificial Sequence
  ENSG00000114861_127 (sequence is synthesized)
aagatttgtaaaatttaaaggtacactgcctttatttgattttgcttggagtcactgtgtgaaaattaattgagcgttgacaatctatagttagtaccagcgattttaatcaatatgcaa

SEQ ID NO: 204736 - DNA, 120 bp, Artificial Sequence
  ENSG00000114861_128 (sequence is synthesized)
tgatgcagcgtaatggcaaagtattggtttatctgttttgactgatttttttctataaataaagcaaacatacacccatatatgtatgatttatggtgatagaaataaaacggagtcaga

SEQ ID NO: 204737 - DNA, 120 bp, Artificial Sequence
  ENSG00000114861_129 (sequence is synthesized)
gtgtttgcttcgaaatcgctgcctgcagccccccattcccgcgcagctcccgccccctgtgagaataaggactaaataaacagttgtaactccaaaccttgcgcccgtgatcgtatcccc

SEQ ID NO: 204738 - DNA, 120 bp, Artificial Sequence
  ENSG00000114861_130 (sequence is synthesized)
ttttcttcatcatactcccatttggatcccaggaatgactcaagaaatttgcttctttcctcaattaaaatggaaacaattttgcaactgtttgtttgagggaagactggctttacaaga

SEQ ID NO: 204739 - DNA, 120 bp, Artificial Sequence
  ENSG00000114861_131 (sequence is synthesized)
agcttccctctgtgtgttgcagtcctgtggcattatgcatgccccctcccagtgaccccaggctttttatggctgtgagacacgttaaaatttcaggatttacaagcaacacatgacaga

SEQ ID NO: 204740 - DNA, 120 bp, Artificial Sequence
  ENSG00000114861_132 (sequence is synthesized)
gaaaacaaaaaaatcagccagcttctcctgacattcaacagcagcccacgtctaaatagtgaaaaagtttatttgctttttctgaagatgtgctaagtgattttgcagttagagtggtac

SEQ ID NO: 204741 - DNA, 120 bp, Artificial Sequence
  ENSG00000114861_133 (sequence is synthesized)
taggcctgcatttattaaataaatgtgttctctaactcaagtgttaagtgtgtattatgaaacctcaaagccaatttcggtgattgcaatgtgcaaatatttttaaaattatgtaattaa

SEQ ID NO: 204742 - DNA, 120 bp, Artificial Sequence
  ENSG00000114861_134 (sequence is synthesized)
ataggacttggcctgcaaggtccaccaaagtaatttattaattgaatagtctgatttaattgtatgttattttcgtttattcagggaagtgcctgcatctcttgcagagataggagcctc

SEQ ID NO: 204743 - DNA, 120 bp, Artificial Sequence
  ENSG00000114861_135 (sequence is synthesized)
ttgtatgcctgtcactggaggtacagaggtcctctccaagaaatctttagcacccaattaaatattaaccaagaagaggggacttgttccttctgtccctgaaactctattttcatgcct

SEQ ID NO: 204744 - DNA, 120 bp, Artificial Sequence
  ENSG00000114861_136 (sequence is synthesized)
gcttattgagagtagcttttgttgttgctattgttgtataaataagaaaggaatttaaagaattatttcttagcaaacgtgtggcagatgctttcttcggcagctgtcgttctagagggg

SEQ ID NO: 204745 - DNA, 120 bp, Artificial Sequence
  ENSG00000114861_137 (sequence is synthesized)
agttgcatcacaatactctagcctgagggacagagtgagactctgtctcaaaaaagtaaaataaaaataaaaagccaacaccattaaaagttttagtcatagaatattgagaacaggaaa

SEQ ID NO: 204746 - DNA, 120 bp, Artificial Sequence
  ENSG00000114861_138 (sequence is synthesized)
catagaatattgagaacaggaaagatcagagatgggatgaaaactctgagattgtgaaccagaaagtcatcaagattacctaagagcatcacagattctagctttctcaaaacttgtgaa

SEQ ID NO: 204747 - DNA, 120 bp, Artificial Sequence
  ENSG00000114861_139 (sequence is synthesized)
accaaaactgagctcacagactaccttttgaaccttgtactcagaacgacttaggcttctaagtcctgattcttcgtccagaaaacatcattactgaagaccatgcagagaaagtaaccc

SEQ ID NO: 204748 - DNA, 120 bp, Artificial Sequence
  ENSG00000114861_140 (sequence is synthesized)
tatagcttagaaaagggagaacatgagaaagcagccaagtgtcactactccatactttctcacaagtctgcagaaattgcttggaaaaataaatgtgcatttcataatgcagaaacctga

SEQ ID NO: 204749 - DNA, 120 bp, Artificial Sequence
  ENSG00000114861_141 (sequence is synthesized)
ctcatattcgaaagcccgtctaaaccatgtgactaccaagcaggaccaaattgagtccttcctacccacaggcacttggtcccccctggcccccagttagctcttcaaaaccaagcttgg

SEQ ID NO: 204750 - DNA, 120 bp, Artificial Sequence
  ENSG00000114861_142 (sequence is synthesized)
gacaggtgccacgagtcgtttttaaagcaaaatctttcaacacctcttagaaacttgtatttgccagccatgctacaattaactcaaactgaagattatcgagtacacccataattagta

SEQ ID NO: 204751 - DNA, 120 bp, Artificial Sequence
  ENSG00000114861_143 (sequence is synthesized)
gagctcactgccttccccagcacgacctcctaggctgctgccttcctttctgttggagtctggagtcaggctaactcctaaaaatctgcagagaggtctctggagggaggacccaagcct

SEQ ID NO: 204752 - DNA, 120 bp, Artificial Sequence
  ENSG00000114861_144 (sequence is synthesized)
gttactacctaagccagaattttacacctagtttccttgaatagagaagtccaaccccagaggtgtgcacacacacccgccctgcaaatcagtgacggggagaaagcctgacttttcttg

SEQ ID NO: 204753 - DNA, 120 bp, Artificial Sequence
  ENSG00000114861_145 (sequence is synthesized)
ggttttgctagtgggggaaattgctcatttggaagggcaccagcaagcttaaaacaaaacttagctaggaactcagcagtcgactgtgtttaactttgagtttttatgtttttcttacac

SEQ ID NO: 204754 - DNA, 120 bp, Artificial Sequence
  ENSG00000114861_146 (sequence is synthesized)
cttccacacacagaggtaaagaaaccgtaaaagtagtatgtgacagtaaatgccatttctctcaggagaaagcaaattctgtattgtgttttttaataaaaatggctcagtgaaaaaaca

SEQ ID NO: 204755 - DNA, 120 bp, Artificial Sequence
  ENSG00000114861_147 (sequence is synthesized)
catgcccggcctattttattctcttctacttcaaataagtaatattcatttcctaacttgaagcagattatttcccattttatagaacattcaaaacttgaaggaaaaaaatcaaaaacc

SEQ ID NO: 204756 - DNA, 120 bp, Artificial Sequence
  ENSG00000114861_148 (sequence is synthesized)
tcagttgcagatctcccgtattctgtaaaagaatgtcacaataaaaaaaattaacagatcccaagcctgtatttgatagatttaataaaggttattcataatgctgttaaggattatttt

SEQ ID NO: 204757 - DNA, 120 bp, Artificial Sequence
  ENSG00000114861_149 (sequence is synthesized)
ctgccaactgattgattgattgatagaaacaaatgacagctggtggggtcaggcccattgtgtttaatatgagtaataaataggccacacatatttgcaggagttctcgtcatccacgaa

SEQ ID NO: 204758 - DNA, 120 bp, Artificial Sequence
  ENSG00000114861_150 (sequence is synthesized)
gctgcatgagggagctcagtaggctcttcctgggctgtctagtatggtagctactagccacatggggctctttccatttacatttattaaagtttaattttaataaaaatcaagtaaaaa

SEQ ID NO: 204759 - DNA, 120 bp, Artificial Sequence
  ENSG00000114861_151 (sequence is synthesized)
cagctctttggttgtgctagcatattgcagaaattctgctggacacttcttcagatctacaccagcgtatcccaactggtgtcacctaaaatactcagcttcactggtattgctaaggac

SEQ ID NO: 204760 - DNA, 120 bp, Artificial Sequence
  ENSG00000114861_152 (sequence is synthesized)
ttctctccctctttgaggttgacaaggcctgatgggcgatcaaagcctataggtgagacatcacaatgaaataaatgtcttgactcagggtttctcacactccctcaggtaggtaacccc

SEQ ID NO: 204761 - DNA, 120 bp, Artificial Sequence
  ENSG00000114861_153 (sequence is synthesized)
tttttgagcctgtaaacacccatgtagcagcctttggaaaagagaccgctgccagagatatcttacactgcatcctaagtgaattcacgcaggactcaccgtgtgtttcggttcatggta

SEQ ID NO: 204762 - DNA, 120 bp, Artificial Sequence
  ENSG00000114861_154 (sequence is synthesized)
aacataccatctacatagaggaagaaacggtgcccacgcatcctctgtgttactcctgctagatgtggttcctgggttgctctggttttctgaaggtcttctaagacgttgtttttttcc

SEQ ID NO: 204763 - DNA, 120 bp, Artificial Sequence
  ENSG00000114861_155 (sequence is synthesized)
cctgtttattcttggatcttgacgttcatagaacagtttgttgttgataaaatgcagttgtgctataaggaagctacatttatattgttttgatactcttaaagtgtccaatctctaggt

SEQ ID NO: 204764 - DNA, 120 bp, Artificial Sequence
  ENSG00000114861_156 (sequence is synthesized)
gtatttgattgggaaaatagtgccattgtggttgaaatgctctgatggaagactcccattataccagcatcagcagtgtggaggggccagccagtaaagtgatctctctctggttggaat

SEQ ID NO: 204765 - DNA, 120 bp, Artificial Sequence
  ENSG00000114861_157 (sequence is synthesized)
atgtagagaaaaggagacaacaccgtcgcccagaagtggaggttgccatattacttgcacaaacctcatgccgttaggtcttcagccacagccgatatttgcagagatgtatctccagcg

SEQ ID NO: 204766 - DNA, 120 bp, Artificial Sequence
  ENSG00000114861_158 (sequence is synthesized)
atctatctccagagatggaacctggagaaatgaccaaacttgacacagccttcaatggttggataaatagctcattaacccaattagtagagaaagctgtgcaatccaagcactagcact

SEQ ID NO: 204767 - DNA, 120 bp, Artificial Sequence
  ENSG00000114861_159 (sequence is synthesized)
gtttgtaggagttattaatggagaacacaatgtattattaaggggcaggggtttttgtttttctttttttggttttaagtcaagagattgtcggccaggcacagtggctcatgcctataa

SEQ ID NO: 204768 - DNA, 79 bp, Artificial Sequence
  ENSG00000114861_160 (sequence is synthesized)
gggaggctaaggcaagagtagcgagaccctgtctctacaaaaaaaattcaatgaattagccaggcatggtggcatgcac

SEQ ID NO: 204769 - DNA, 120 bp, Artificial Sequence
  ENSG00000114861_161 (sequence is synthesized)
gcatggtggcatgcacctgtggtcaacagctactccagaggcagaggtgggacgattgcttgaggcaaggaggttgaggctgcagtgagccctgttcatgccactgcactccagcctggg

SEQ ID NO: 204770 - DNA, 120 bp, Artificial Sequence
  ENSG00000114861_162 (sequence is synthesized)
gaatttactattgaaagagaacactgcacacagacgtacatgtacgtgccttgaaagctcaggctttctacccattctatagttccatttttttttttctgtattagtgagagtccttta

SEQ ID NO: 204771 - DNA, 120 bp, Artificial Sequence
  ENSG00000114861_163 (sequence is synthesized)
tttaatcttgaggaccatatagatggcattattatctcaaggatctatgcagaaaagacccggcatgtgaaaccttgctactgacagctattcgcaaaaactttctgaaagtgcttgagg

SEQ ID NO: 204772 - DNA, 120 bp, Artificial Sequence
  ENSG00000114861_164 (sequence is synthesized)
cctcacactgccgccagcctgggagccctgagagccagcaggcttccaagcgcctgtagtttctcccttacaaactctcaactttcttccgttgtgtgaaaattgcctctcccgccccaa

SEQ ID NO: 204773 - DNA, 120 bp, Artificial Sequence
  ENSG00000114861_165 (sequence is synthesized)
aagtttatttagaccagtcattttcaaagtggccgttggaaccagtttgtgggttaaggattttagtgtagtggcttgtacccaagacttttaaaaaatggaatcagcggccaggcacag

SEQ ID NO: 204774 - DNA, 120 bp, Artificial Sequence
  ENSG00000114861_166 (sequence is synthesized)
ggaccattgcagatgctaatctttgttgtgcaagcgaaggctcacttggaaggaaatactcagcccctctctgggcagcatttgagttccttatggatgccgagtcgcgaaacaagttat

SEQ ID NO: 204775 - DNA, 120 bp, Artificial Sequence
  ENSG00000114861_167 (sequence is synthesized)
tttttttaatgtatccttctttatgaggagaatgctacccaaaaatgtattaaaggaatattaagtcgtccagagactgtcttgctaccaagaactgtgcaatggaattctttttaccaa

SEQ ID NO: 204776 - DNA, 120 bp, Artificial Sequence
  ENSG00000114861_168 (sequence is synthesized)
cattagactcctacactagagttagataacgttttctcacattgagtttagaagatctgccttgtcagggaagccaaggttttgtatgtgagagtttaaatctgatgtgaagctcaaaaa

SEQ ID NO: 204777 - DNA, 120 bp, Artificial Sequence
  ENSG00000114861_169 (sequence is synthesized)
attcacaagacaaaaagtccttcaagacagttgcccacccaggatgagagattcttatcttgaaagaagggacaaactctgtcattgttttctggtgtaatcttttcagataattcctgc

SEQ ID NO: 204778 - DNA, 120 bp, Artificial Sequence
  ENSG00000114861_170 (sequence is synthesized)
ggtgatctgaggatttataaaaggcataataggacataggataacttcctctgttggcttgtttgttttaatcatactctgaaggatggactatctcagttttggtccatgtgcaacgtt

SEQ ID NO: 204779 - DNA, 120 bp, Artificial Sequence
  ENSG00000114861_171 (sequence is synthesized)
gataaaatatggtgacatcctcgccccccttctcaccccactcccctcttataactattaattatttccaagtcattgtatccaaatacccttgctgggctgattacaaagtgtattgat

SEQ ID NO: 204780 - DNA, 120 bp, Artificial Sequence
  ENSG00000114861_172 (sequence is synthesized)
ttagtctgggctcatcctatgctttcgtcttaattcattttctttttgctctaccagaagacccaaaatgaaacttatttcttcctcttccctacctccccaccccacaagccctcatct

SEQ ID NO: 204781 - DNA, 120 bp, Artificial Sequence
  ENSG00000114861_173 (sequence is synthesized)
gtgaggcttgggcagaataatgaaattaatataaacatttcatttggttgcatttgaccttatgcagtccacttctgaggggctggaattgcgctcatgtctgctcacaggtattttcca

SEQ ID NO: 204782 - DNA, 120 bp, Artificial Sequence
  ENSG00000114861_174 (sequence is synthesized)
agttagcattttcttttttgtcactgctctttaaacaggaatgccggaggagcattctggattccctttgaaaggcatctgtacattcaaaccgtctacacttcaccattggttgtacgt

SEQ ID NO: 204783 - DNA, 120 bp, Artificial Sequence
  ENSG00000114861_175 (sequence is synthesized)
tttctgctactgaaaatatattgaagaatcgctgcaaaatttttccattccatcccctttcccccacccccgttttccacagcaagaatcaatttggagggagatgtgtaaactagaatt

SEQ ID NO: 204784 - DNA, 120 bp, Artificial Sequence
  ENSG00000114861_176 (sequence is synthesized)
tttaaagaaatagtaagacttcaggtgttttctacccagggatagcctacataattgagaaagaggagttcctgctatttttctgttccagagagaaatgtatcaaatcttttttagaat

SEQ ID NO: 204785 - DNA, 120 bp, Artificial Sequence
  ENSG00000114861_177 (sequence is synthesized)
tccactggagttttgattctcaaagtggaaatacccatccctttgggtccaggaaaagaaaactcagctcacagtttcagaaatttggactgtttttttcccccctctgtctttctattt

SEQ ID NO: 204786 - DNA, 120 bp, Artificial Sequence
  ENSG00000114861_178 (sequence is synthesized)
gaaacgtctcacaattaaagagcaagaaaaatataaaaaaggaactcaactagttaccattcaaaaggtgtcagctaaaatctcactgcaaagggaaaaaaaaaggtttaacatcttgcc

SEQ ID NO: 204787 - DNA, 120 bp, Artificial Sequence
  ENSG00000114861_179 (sequence is synthesized)
actggctgcatcccccaccccccttagactttggattagtcattgtatgagagagagggagaaaaaaaaaatcactttttttttttttttggaaaagtaaagtaaacagcctccaactgc

SEQ ID NO: 204788 - DNA, 120 bp, Artificial Sequence
  ENSG00000114861_180 (sequence is synthesized)
tgaaccttgacaacccaaattaaggaagcaggagagatcaaacagaactgctgctgggtggttgtcaggagctgctacacggagaaccctggactattcgatcaagcagcaaggctatat

SEQ ID NO: 204789 - DNA, 79 bp, Artificial Sequence
  ENSG00000114861_181 (sequence is synthesized)
cactctatcacccaggctggaatgcagtgctatcttcccacctcagcctcctaggtagctgggactacaggcatgtgcc

SEQ ID NO: 204790 - DNA, 120 bp, Artificial Sequence
  ENSG00000114861_182 (sequence is synthesized)
tgggactacaggcatgtgccaccacacatggctaatttgtgtgtgtgtgtatgtgtgtgcgttaatggagacagagtttcaccatgttgtccagcctggtttcaaactcctggcctcaag

SEQ ID NO: 204791 - DNA, 120 bp, Artificial Sequence
  ENSG00000114861_183 (sequence is synthesized)
ttttttttttttttttttttttaaatcaggtatttgtttctctccacctctgattcagtttctattcacagagacccactactgctcctgagtctcagtgtcagctcactggctaagaga

SEQ ID NO: 204792 - DNA, 120 bp, Artificial Sequence
  ENSG00000114861_184 (sequence is synthesized)
tgctgccagtttttgatgtctcaacttaggatggttatagaataatggaaactagggcagtctaccaaaaaattaaagaaaaagtaataaaaattcaatcctaccaaacaatctatattt

SEQ ID NO: 204793 - DNA, 120 bp, Artificial Sequence
  ENSG00000114861_185 (sequence is synthesized)
atagtagcctgttgtttttatagctgtattttagcaagattttatatttgcatcaatttcggtctggaaaaatgacacatgccaacgttcataaccgttcctgatgtctccacattttcc

SEQ ID NO: 204794 - DNA, 120 bp, Artificial Sequence
  ENSG00000114861_186 (sequence is synthesized)
atagccctttttatttcaacagcatttcactgggctgcattagaggccatttgaatatttcatttcctattaattatgcactgtgactctcagtgtcattataaaaaagagccctaatgt

SEQ ID NO: 204795 - DNA, 120 bp, Artificial Sequence
  ENSG00000114861_187 (sequence is synthesized)
aacaaaggatgaaaagaaccatcaagcagtgtgaccaaaagaaaatattccaaagcttgtcacgtatgaccggcttaacatctctaatttgaaatccattgcattcatcttaaattaaag

SEQ ID NO: 204796 - DNA, 120 bp, Artificial Sequence
  ENSG00000114861_188 (sequence is synthesized)
cttaaggaatctacctttaccttgtttcttttgctgcatgttttaggtgactgaatttttagttaaaatattaatggattctgaaggtagaaagtctttcttttttaagtcgtcaaaatg

SEQ ID NO: 204797 - DNA, 120 bp, Artificial Sequence
  ENSG00000114861_189 (sequence is synthesized)
tgcacaacgttaagtatttagttatatctgtaatttttgcatttcacctttaaaccctggttaaagacatagctgttaatgaaaactgtgcacttcagttaataggttaatagccattaa

SEQ ID NO: 204798 - DNA, 120 bp, Artificial Sequence
  ENSG00000114861_190 (sequence is synthesized)
ctattcagctaataattcttaactattaatcactacaactctcttttcattttattggtgttacggaagaaaatatagtgtaggtgttaatttatcaaaaagaacaggattatcagaatt

SEQ ID NO: 204799 - DNA, 120 bp, Artificial Sequence
  ENSG00000114861_191 (sequence is synthesized)
tcatattacatttctagctttcagaaagatcatcatcatcgtgattaaataaggcaaaatcattttttttttactaatctccttgattataacaggctcatgtaatatttttttttccca

SEQ ID NO: 204800 - DNA, 120 bp, Artificial Sequence
  ENSG00000114861_192 (sequence is synthesized)
gagctatttctgctgaccaaattatccagtgtatggtagccgtgatcattttaaaaacaaaacaaaatacagtggcatttttaacaaaacaaatgtttgtctaacatttgaattctccat

SEQ ID NO: 204801 - DNA, 120 bp, Artificial Sequence
  ENSG00000114861_193 (sequence is synthesized)
tcttgcagaaacaattgttttgctttaattttctgaacttggggggggatgtagggttccacttaaagtccacaatgctgtgttttctttatgttggttagataaaggaaactttaaact

SEQ ID NO: 204802 - DNA, 120 bp, Artificial Sequence
  ENSG00000114861_194 (sequence is synthesized)
atagtaaataaccaaaaaaaaaaagtgaaattcccaaagtcagcttgggcaacatttgctgaactcccaagttgagcacggaagcatgcctagtgacagtgacctacatggtcactgaag

SEQ ID NO: 204803 - DNA, 120 bp, Artificial Sequence
  ENSG00000114861_195 (sequence is synthesized)
atgtgatataatttatgatatatataatatattggatccattagcgagcataatgaagtagtgaaatgaaagggtatttgtgaaatcagttcaaacatcctgctaggattatgattaaat

SEQ ID NO: 204804 - DNA, 120 bp, Artificial Sequence
  ENSG00000114861_196 (sequence is synthesized)
gattaatgaaatgctcctgcataagcattttcaaacagtaattcatgcagaggctgataaaaatcctccaatcatatttccttcagtcgtgaaccttatctcgaccattttatataaatc

SEQ ID NO: 204805 - DNA, 120 bp, Artificial Sequence
  ENSG00000114861_197 (sequence is synthesized)
tatattcataattcaagcttgtgacagattccatctttcttattcttgttgtcctttgccttccttctggcttcatttgatttctcttatcttgatgacataattaactgctgaagctat

SEQ ID NO: 204806 - DNA, 120 bp, Artificial Sequence
  ENSG00000114861_198 (sequence is synthesized)
gggaaaaaaaaaaaataaggagtcttagggaatccaaaaggggtttattcatttatatatacacaacagcagtgcaaaatcaccatatgtgttaatccacaaatactgtgtttaaacatc

SEQ ID NO: 204807 - DNA, 120 bp, Artificial Sequence
  ENSG00000114861_199 (sequence is synthesized)
attaaggacataactgtgtcctgcaaaagagacacagaaccaggctctcactgcgtttcattatcttcaaccccttgtagatccactgctagcggagtaatcaagtaagtgaaggccttg

SEQ ID NO: 204808 - DNA, 120 bp, Artificial Sequence
  ENSG00000114861_200 (sequence is synthesized)
ctttttgtccgtttggatcttttatcagtttggcgagggtgactttgaagagcgatggtgcagcctggaggaatttcttgagggcagtgatgcccagcttccagtagcatctggcatgtc

SEQ ID NO: 204809 - DNA, 120 bp, Artificial Sequence
  ENSG00000114861_201 (sequence is synthesized)
gtttgggttcttagcaaatgttaaacagatgaatccagctccttccaatgaatgtattttataagtgggtttagtactatttccttaccaaagtccctcaacactcagggagtccactgg

SEQ ID NO: 204810 - DNA, 120 bp, Artificial Sequence
  ENSG00000114861_202 (sequence is synthesized)
gtcctggtctgtggtcttgtttcattggtgacagcttattagaatgaaagcctctttctttacttccagtgaagcaaacagtgtcatcgagtggatggaatcctagacatctcaacagtg

SEQ ID NO: 204811 - DNA, 120 bp, Artificial Sequence
  ENSG00000114861_203 (sequence is synthesized)
tgcaaatgtgattagtgaagttatatccagggctgtgtcttttgccttccaggcattttaattcagttgctttttggtctgtatttgtcaaataaacatgtatttatttgcgtgtaagga

SEQ ID NO: 204812 - DNA, 120 bp, Artificial Sequence
  ENSG00000114861_204 (sequence is synthesized)
aattaagtagtgagcggggtttgggtttggacgtgcagcagactgaggaattgccacggggtactcccagctgaaccggctctgaatgtagctaactcaactgtcagaactgcatgaagg

SEQ ID NO: 204813 - DNA, 120 bp, Artificial Sequence
  ENSG00000114861_205 (sequence is synthesized)
cctcctcaccatgaacggggtaagacgtgaccttttgaggtgactataactgaagattgctttacagaagccaaaaaagaaagaaataaaaggtttgttggaaatatacaatttaaaaag

SEQ ID NO: 204814 - DNA, 120 bp, Artificial Sequence
  ENSG00000114861_206 (sequence is synthesized)
atggacaaaaaaatcagcatcatctttcacactgcaagaagcatgtagacttcagatgccaggagcttctcagtaaataccacgcctcaaatttgaaacctgggaattattaagagtcag

SEQ ID NO: 204815 - DNA, 120 bp, Artificial Sequence
  ENSG00000114861_207 (sequence is synthesized)
tatagatgcacagaaatatgcctacaaaggtactatgggaataactgattatatacataaaagtcgccaggcaaattcagaaaaccaaatgaagccattttgaaaatttggattctatgg

SEQ ID NO: 204816 - DNA, 120 bp, Artificial Sequence
  ENSG00000114861_208 (sequence is synthesized)
attaagtggggagggaaaccctctgaagagctcctactgccctttgctctcccgataatcttaaattactacaatttaattgcaacttcaaggcattcagcatgagctgtttcttctcca

SEQ ID NO: 204817 - DNA, 120 bp, Artificial Sequence
  ENSG00000114861_209 (sequence is synthesized)
aagatcagtgggtacgtccaccatgtttgaacttcttagcctagcttggattgtgctaacaagtataacgtagaggctttggctgctagatggtgttagaccaaagaactggtttcacgt

SEQ ID NO: 204818 - DNA, 120 bp, Artificial Sequence
  ENSG00000114861_210 (sequence is synthesized)
tgtctcagttaagggaagcaaaaaagcatttcatccctcctgttttgtatacccaccagtccccctgccctgcttgctggtctttgttgcatcacatgctagtagcttttaggtggcaat

SEQ ID NO: 204819 - DNA, 120 bp, Artificial Sequence
  ENSG00000114861_211 (sequence is synthesized)
gcatattaaccctcacaaaccatttgcttatgcttattgcattttattttctttttcctgttccctgtattggatgtctgttctgcccccaaccccgtctccttttgttgccactccatc

SEQ ID NO: 204820 - DNA, 120 bp, Artificial Sequence
  ENSG00000114861_212 (sequence is synthesized)
tggctttgcatggttgactcatcccatgtagttttgcatttcaccaatagcagtgccacagctttctgcaacgaaactaaattgtgtgatttgtacatgtattgctctcgtttctctttg

SEQ ID NO: 204821 - DNA, 120 bp, Artificial Sequence
  ENSG00000114861_213 (sequence is synthesized)
gaacaccagtgccttgaataatgcttttttgacgtctttaatgcaaatattcgttctattttgattcagcagcttacggggaccctagaactaaatacttgtgcttaacccataatcccc

SEQ ID NO: 204822 - DNA, 120 bp, Artificial Sequence
  ENSG00000114861_214 (sequence is synthesized)
cctctctccccaccccaagtaaaaagggaatttttggttagttaaaatgtgtgtatatactattggggtagatttcttatttgttcactcactataataatacaaatgtaatgaagtgaa

SEQ ID NO: 204823 - DNA, 120 bp, Artificial Sequence
  ENSG00000114861_215 (sequence is synthesized)
tgactaaaatgttccaagcatagtaaagaaataggtcatattgcatacacttcctttaaagaccactgataaatgtaggtaattgcctactgggaggcacccttttccctcagtatgccc

SEQ ID NO: 204824 - DNA, 120 bp, Artificial Sequence
  ENSG00000114861_216 (sequence is synthesized)
tatgtaattttttaatatttttatccttacgaggctagagattttctgacaacagtatgttagtttcatttggtccgtgaatggagatggcagcaaatattctcagaccctcccagatct

SEQ ID NO: 204825 - DNA, 120 bp, Artificial Sequence
  ENSG00000114861_217 (sequence is synthesized)
ggctaagacatccccttatttaggaacgaccctcccctggcataccctactctccatcgcctgttggcaataaacgtgccttgtggatattccttaaaagccttcctgccatccctctag

SEQ ID NO: 204826 - DNA, 120 bp, Artificial Sequence
  ENSG00000114861_218 (sequence is synthesized)
attaaattttaattccgttaaacttttttcttaagtgcacaaagcatcatactccctggaggcaaacacatcgggctgcttcagcgttagcgggatgcttagcattttgaatattgtggc

SEQ ID NO: 204827 - DNA, 120 bp, Artificial Sequence
  ENSG00000114861_219 (sequence is synthesized)
aaaaaaattaaaagttcacttattaatatttatcagcagtatcataatttccatcctcttatttcagaatttcacttgaggcaaaaataccacaagtgtaattactctagcacagctatt

SEQ ID NO: 204828 - DNA, 120 bp, Artificial Sequence
  ENSG00000114861_220 (sequence is synthesized)
aatgtgctggatgataggccactgcgtcacatgaccttctattgttcatgggtttaaagagaaagcagggctttgtatttctttttcttcttttaaagtcgactgtagcatcttggcttt

SEQ ID NO: 204829 - DNA, 120 bp, Artificial Sequence
  ENSG00000114861_221 (sequence is synthesized)
tgtctggggtggggaggatctggggtctggttcactttgtaaaagtaaaccatgtctgtttaaacaatagaggtgtttaagaagactctttagttttcctgcagattgttcaagattaca

SEQ ID NO: 204830 - DNA, 120 bp, Artificial Sequence
  ENSG00000114861_222 (sequence is synthesized)
tgataatcacacggagtatttatttcctactgacaaaccaagtacttgttacatcaccaatggtaccaggagatgaagacgcgggttttgagcaggagcgagattaccacccaaaaagga

SEQ ID NO: 204831 - DNA, 120 bp, Artificial Sequence
  ENSG00000114861_223 (sequence is synthesized)
gctacctgaggcagcccagcttctagcaaactttttacatgttgcacatttcagttcttaaatgaaggctactccagtgtcatttcattaaagtacctgggtgtagtactcaagtccccc

SEQ ID NO: 204832 - DNA, 120 bp, Artificial Sequence
  ENSG00000114861_224 (sequence is synthesized)
ctcaagagttcataagtaagcagtatccttttggccagtggtcctgtttttgcccctacccagactgttcgagaagcatattctatagataaatctgacatttgtcatccaataccattg

SEQ ID NO: 204833 - DNA, 120 bp, Artificial Sequence
  ENSG00000114861_225 (sequence is synthesized)
cagtcctctgcagcatacattctcaatgggggctgtatcacccctagattggttctgagatactgcaatgtcttgtgtccttccaaaggaccataatacttgagcaaatatgaacatttc

SEQ ID NO: 204834 - DNA, 120 bp, Artificial Sequence
  ENSG00000114861_226 (sequence is synthesized)
ttggggtgagggcagaaagagagaaacaaaagtctaaaaagggacaataatgaaaaaacagttgagacctttagtatgatgggaacaggatgaggaaggaggagatactgacaggagccc

SEQ ID NO: 204835 - DNA, 120 bp, Artificial Sequence
  ENSG00000114861_227 (sequence is synthesized)
tgggtcttgctctgcattaaacagatatttatggacattaaacagatatttatggagcacgactctgtaccctacaggcccagaatagtcttaaggctcctgggaattgatgataggcca

SEQ ID NO: 204836 - DNA, 120 bp, Artificial Sequence
  ENSG00000114861_228 (sequence is synthesized)
tttacccagtttcagtttagaggcagattcactggccttagcatttcagtaattatatttatttatttttagcctgaaccagatttaataggagaaactactttctgcgtttcttttaat

SEQ ID NO: 204837 - DNA, 120 bp, Artificial Sequence
  ENSG00000114861_229 (sequence is synthesized)
tacttgtagtttacacagtaactttagaagagtaaatgaaagcatgcttcgatgctgccactgtaaataccattcattagtaacttattttccctggagtcttgtgaagtgtgaatttaa

SEQ ID NO: 204838 - DNA, 120 bp, Artificial Sequence
  ENSG00000114861_230 (sequence is synthesized)
agcctgctctatctggaatatggaatagtattaagattacaagcacattttatattcatgagccggaaaggcaaaaaaaaaaaaaaagtgatcctccatcctctgaattctcttaactat

SEQ ID NO: 204839 - DNA, 120 bp, Artificial Sequence
  ENSG00000114861_231 (sequence is synthesized)
gtgactaatttcaattagtatgctttgtcattacagaactgttcaggtttcatctctgaacatttgcttttggcatcttcttcagtagcccaaaactgtcctgccgttttccaagaacac

SEQ ID NO: 204840 - DNA, 120 bp, Artificial Sequence
  ENSG00000114861_232 (sequence is synthesized)
tttccgtccataatgaggcaaggggaataaattgatacaaattcatgatttgagaagtggattgtttccctctcttctacgagtttggatccctgatcagtagacagacacataagacaa

SEQ ID NO: 204841 - DNA, 120 bp, Artificial Sequence
  ENSG00000114861_233 (sequence is synthesized)
ctttctactgtgcaaattaaataaggattctgccagcaggccttcctttccattaccgcctatttccatttttcaagacaagtaaaaataatagtggaacaatatcttcaaaaaaattac

SEQ ID NO: 204842 - DNA, 120 bp, Artificial Sequence
  ENSG00000114861_234 (sequence is synthesized)
tagagcaacataatgcatgatatacaatatataaaataggacagcagaatccactacagaaataaaacatgggacttgggacagattgcattatgctctgaaaagtgaagtaactaaggg

SEQ ID NO: 204843 - DNA, 120 bp, Artificial Sequence
  ENSG00000114861_235 (sequence is synthesized)
taaccgtaaagcttcgtatttatagactgcctttcccctgaggatctcagagtggttaatgttccaggagcgagggtgcttatggacttctgcaccattacttaagcaacttcatttttt

SEQ ID NO: 204844 - DNA, 120 bp, Artificial Sequence
  ENSG00000114861_236 (sequence is synthesized)
ggcagaggtgccagcttgatatgaaaccacatgctgtgcaaggaccatttatataattaactccatttttgtaacacacctgcttctaagtggacatcaactaccaaaaaaaaaaaaaaa

SEQ ID NO: 204845 - DNA, 120 bp, Artificial Sequence
  ENSG00000114861_237 (sequence is synthesized)
cgtggtttgaggcaagtctcttgggatctcttgaacctcgatttctgaatttgtaaaatgaggaattgaactaactcccgagttctgacactttgaggatcgtgggctcttttgcaaatc

SEQ ID NO: 204846 - DNA, 120 bp, Artificial Sequence
  ENSG00000114861_238 (sequence is synthesized)
tcttgacagttgcagaccctccctggccccaaaacataggctaaaacttttgcatgcagtttcaagaagtggaatgatcccagtttaagaacacctgaactaggccattttctcaattac

SEQ ID NO: 204847 - DNA, 120 bp, Artificial Sequence
  ENSG00000114861_239 (sequence is synthesized)
aacatgcttctttaaaagcaagttgtaaaatattattcaccccaggtgagtgagcagcatgtgaaactgcttagctcgggcttccttgtgtggtcttctattgtttgttcatttactctt

SEQ ID NO: 204848 - DNA, 120 bp, Artificial Sequence
  ENSG00000114861_240 (sequence is synthesized)
taaacagaatacaccatagtcattattctggcctaagattggaggtaataccttgaaggtgcatcactgttgttcaccataatgtctcctctttactgcttttttggaggggagcgagga

SEQ ID NO: 204849 - DNA, 120 bp, Artificial Sequence
  ENSG00000114861_241 (sequence is synthesized)
tgagatgaataagtatgaagaacagcagaatttgtatccgttttgtttttaaggtaaaagtcattacaagtagttttaggacatgaaataactacattttgagggctgttaaacaagagg

SEQ ID NO: 204850 - DNA, 120 bp, Artificial Sequence
  ENSG00000114861_242 (sequence is synthesized)
ggatgcattaacaaaggagtgagctttaattgtacctagtcaagtaccagaggtgaacatttgttttacttagttgtttcaaagggttacagacctgggttttaaatctctgattcaaac

SEQ ID NO: 204851 - DNA, 120 bp, Artificial Sequence
  ENSG00000114861_243 (sequence is synthesized)
cacatttggaacaaaaacctgaaatagggtagcacccagaagccttaaaaatcagctgtccctgttgttgttgttgttattgaagtattcaactatttttatcttacatccaaattgtaa

SEQ ID NO: 204852 - DNA, 120 bp, Artificial Sequence
  ENSG00000114861_244 (sequence is synthesized)
tgtggcctaaatatcatgacagtcttgttcatagaatttgaggcaaatatcccattacagaatcaggtctgctgtatcactagtaagaaaggactgagtaatgtagagacatgaattttt

SEQ ID NO: 204853 - DNA, 120 bp, Artificial Sequence
  ENSG00000114861_245 (sequence is synthesized)
attttcaagactttaggctttgattcagccctctgattaccagagctcctgcgtatgctaaaactgattgaaatttcaatttgttagccttttccctgttggaaagtctaataaatagta

SEQ ID NO: 204854 - DNA, 120 bp, Artificial Sequence
  ENSG00000114861_246 (sequence is synthesized)
aaaggaccacaagacaggcatactcagcatgtggcctgaatcatccgtaaactggatatctagaccatcaacaatcaagaacccaggcagagttttccttttaaataattgtctgcattt

SEQ ID NO: 204855 - DNA, 120 bp, Artificial Sequence
  ENSG00000114861_247 (sequence is synthesized)
ctctcccccaccccccaccattggtacataatttgcatgtgtaggctcatgtttcaggtttcatatgtttaaagttgcttttctaccctttgccatttctgacattcacgtgaatgcatt

SEQ ID NO: 204856 - DNA, 120 bp, Artificial Sequence
  ENSG00000114861_248 (sequence is synthesized)
tcagtatatggatgtatcatcagttatatgaagtcagttttcctgtggtcagacgatcctgttccaacccatacaaattagactcttccgaaatacctagcaggccctgtctctgattgc

SEQ ID NO: 204857 - DNA, 120 bp, Artificial Sequence
  ENSG00000114861_249 (sequence is synthesized)
tgcccattaaggtggtcttgaaatgccaccctggctgaatttcttacttatttatgtgtaaatggttatctccagacgccctgcagaacttctccctggaaggcttttctttgggtgata

SEQ ID NO: 204858 - DNA, 120 bp, Artificial Sequence
  ENSG00000114861_250 (sequence is synthesized)
acagtgtgtgccacattatacataatgacagcattaaagggtggggatggaaaggacaggccaccccctggactactatctcctgggagctagacccgctgcctagtttatgcttaaaca

SEQ ID NO: 204859 - DNA, 120 bp, Artificial Sequence
  ENSG00000114861_251 (sequence is synthesized)
tcctggtaacttatattttcctttttgtttctccatttcacttaatgattttctatgtattgttgcagacatctcaacagtgagcatgcgctggacgatagaagtacagcccaatgtaga

SEQ ID NO: 204860 - DNA, 120 bp, Artificial Sequence
  ENSG00000114861_252 (sequence is synthesized)
caacagggctgcatgatacgaagtagttctctttatagcctcctgtattcactcttgatataccctttacaaactcaacaaccttttacaaggttaaagactgggagagaatgacataat

SEQ ID NO: 204861 - DNA, 120 bp, Artificial Sequence
  ENSG00000114861_253 (sequence is synthesized)
gctctttctttcctgactatttttagtcctaatgtgtatgataaataatactgtgataatattgcttacctttcctcatttttttcttcctatggatgatatttccatttcaactcagta

SEQ ID NO: 204862 - DNA, 120 bp, Artificial Sequence
  ENSG00000114861_254 (sequence is synthesized)
ggaattcaacatccaaaagcattaagtgaaaatgcatttacagtgtgtatttttatgattatattctgatttttctcattcaatttctatttcttataaacacaaagttttgtgctgtgt

SEQ ID NO: 204863 - DNA, 120 bp, Artificial Sequence
  ENSG00000114861_255 (sequence is synthesized)
cattttctctagatttgagaggaccgtttccttctaactccttgtttaattcactcttgttttcaaatatgtctttggatataatcagctaagtaagcagccgggtggtgtcaggatagt

SEQ ID NO: 204864 - DNA, 120 bp, Artificial Sequence
  ENSG00000114861_256 (sequence is synthesized)
tttataggctaaacgtagattggaacctctctctgcttactgtgacattgtttcgtgttgccttctttttcttcctgttatcacaagtagtaagagaatgtggggatggtgcctttgtaa

SEQ ID NO: 204865 - DNA, 120 bp, Artificial Sequence
  ENSG00000114861_257 (sequence is synthesized)
ttctgcatctacagaattgtcccctgatgtttgcatcacgacaccgtcatcatttgtgaatcggtcttggtaatatttgtaccaatttcatgccaataaaagtcagactgctgaaacacg

SEQ ID NO: 204866 - DNA, 120 bp, Artificial Sequence
  ENSG00000114861_258 (sequence is synthesized)
atgaagtgtaatctctgcagtaacatatcagagacactggtaggtaattcactagtcatggcattgattgataggcttagcagtctgctataactattagcccctgcagcattaggaaga

SEQ ID NO: 204867 - DNA, 120 bp, Artificial Sequence
  ENSG00000114861_259 (sequence is synthesized)
agcatatttgaaatctaaggggtgcctctgtgtgtgcccaagatggcataaatgtaaatataaatatttctggtgtcaggttcttgcagtaaagtgaactaccagtgttatttccatctc

SEQ ID NO: 204868 - DNA, 120 bp, Artificial Sequence
  ENSG00000114861_260 (sequence is synthesized)
tctgaatcaggaggttggttttgtccccccactccctcacctcaagtggctagagaattcagtcatgttggactagaacacaatttttttttatcagagagatgatggcttaaaactgat

SEQ ID NO: 204869 - DNA, 120 bp, Artificial Sequence
  ENSG00000114861_261 (sequence is synthesized)
gtcattatgaggtttaaatcaactttctgcttgcttgaacatggtcacctgggtatggatgtacaaggacaaaaaaaggttgatcaactctgtttgtctttgagccagtgatacctgggg

SEQ ID NO: 204870 - DNA, 120 bp, Artificial Sequence
  ENSG00000114861_262 (sequence is synthesized)
ttgtaaaattgagttccatgaacagtaatctgtcatctgtccccacaacatacattttttaaacctgtgcctgcattttcttttataatgaaggggccagttgtcctggaaaaagaaatg

SEQ ID NO: 204871 - DNA, 120 bp, Artificial Sequence
  ENSG00000114861_263 (sequence is synthesized)
tgccaccatgcctggctaatgatttttaatttttaatttaatttaatttaatttttttgtagaggtggggtctcactaggtttcccaggctgatcttgaactcctggccccaagtgatcc

SEQ ID NO: 204872 - DNA, 120 bp, Artificial Sequence
  ENSG00000114861_264 (sequence is synthesized)
gtgctaggattacaagtgtgagccactcactctttgcattattttttgatagttgtattagatttgcattttcaggacatttagccatttatatgatactctcccccttttaactctaac

SEQ ID NO: 204873 - DNA, 120 bp, Artificial Sequence
  ENSG00000114861_265 (sequence is synthesized)
ctcccccttttaactctaaccctattgtactttttagtaatacaggtatgttcagtgctcagtaccagttcttcagtccttatgtcaatgtctgtagtcattttgtctaaacttcatttc

SEQ ID NO: 204874 - DNA, 120 bp, Artificial Sequence
  ENSG00000114861_266 (sequence is synthesized)
tgttagattttttggaaaaggctcatgggtactgtattccctgaattcttgaattttcgtaacagtttgctgtgttctttatacttaaaccacaatctttactgaattaaaaatgttgcc

SEQ ID NO: 204875 - DNA, 120 bp, Artificial Sequence
  ENSG00000114861_267 (sequence is synthesized)
tcacattttttctttgcatatcttaaatatgttactcctttttcttctggcataataagtcttaagtccagtaattttattagattatatcttagtgtcggtcatttggagcaaatatgc

SEQ ID NO: 204876 - DNA, 120 bp, Artificial Sequence
  ENSG00000114861_268 (sequence is synthesized)
ttcagtgtccagggtccttttgcaatatgtagtttcagaatatttttttaatttcaggaatgtttctttgaattatagttttaggtatttggacaattttcttcctttgctttcctctcc

SEQ ID NO: 204877 - DNA, 120 bp, Artificial Sequence
  ENSG00000114861_269 (sequence is synthesized)
agggattcctacttttttttctttcttcttttagttttgagctttgtcacccaggctggagtacagtagcatgatcttggctcgctgcaacctgtgcctcccaggttcaaacgattctca

SEQ ID NO: 204878 - DNA, 120 bp, Artificial Sequence
  ENSG00000114861_270 (sequence is synthesized)
ctcaagcagtcctcccaccttggcctcacaaagtggtgggataacaggcgtgagccaccacacctgacccagggattcctattttctatatgttggatctcctttacctgtcttcagtat

SEQ ID NO: 204879 - DNA, 120 bp, Artificial Sequence
  ENSG00000114861_271 (sequence is synthesized)
tcgatactttcccttaaatccttctctctctcttaatttctgtttgattttgtttttcattttaaccttctagttttttttaaagcgttatttgttgtatctatttgctatctgtccctc

SEQ ID NO: 204880 - DNA, 120 bp, Artificial Sequence
  ENSG00000114861_272 (sequence is synthesized)
tagtgtattttcttatttctagaatgatttttctttttttcaagtttattctttcttcccccatttctcagccagtcgaattcttatttatgtaattcttttttgtttattttcttttgt

SEQ ID NO: 204881 - DNA, 120 bp, Artificial Sequence
  ENSG00000114861_273 (sequence is synthesized)
attttcttttgttttgtttttttaagatagggtctcactctgtcattcaggctgaagtgcagtggtgccatttcagctcactgcaacctgtgcccccaggctcaagcgatcctcccacct

SEQ ID NO: 204882 - DNA, 120 bp, Artificial Sequence
  ENSG00000114861_274 (sequence is synthesized)
tagctgggatcacaggcacgcaccaccacacccagctatttctttgtatttttttgtggggacagcgtctcgccatcttgccctggctggcttcaaactcgtgagtgcaagtgatcctcc

SEQ ID NO: 204883 - DNA, 120 bp, Artificial Sequence
  ENSG00000114861_275 (sequence is synthesized)
ctgggattacaggtgtgagccactgtacgtggcttgatttatgtaattctttcaggccgtatatcttattcttaatgtcttttagctcattttgaagtaataggttacagacaagtaatg

SEQ ID NO: 204884 - DNA, 120 bp, Artificial Sequence
  ENSG00000114861_276 (sequence is synthesized)
taggttacagacaagtaatgacatgtctgataaatgctttcattttgtgtaagatgttattctgttcctttttttttatcactttgtatagaattttacctcaaaatttttatattgctc

SEQ ID NO: 204885 - DNA, 120 bp, Artificial Sequence
  ENSG00000114861_277 (sequence is synthesized)
atttttacgtgaaagtgatttttctgaacttttagcagggtggctgtattaagagagatcttctaattccttagagctctctctcttttgggttactttctactacttggctactggcat

SEQ ID NO: 204886 - DNA, 120 bp, Artificial Sequence
  ENSG00000114861_278 (sequence is synthesized)
gctttctaaaatatctttactgtattcttctctactttggggaggcctttctcttatctttcctcttggttttctctgtcctttttgattttgattctgttgccaggagtttttcctcag

SEQ ID NO: 204887 - DNA, 120 bp, Artificial Sequence
  ENSG00000114861_279 (sequence is synthesized)
tgtggagtcctatgctagaatggagacctcacagcccagttttgagagttcataagcactagactcctcccagctctgcagacttttcttaatacgggccctttgctctgaccctttgtt

SEQ ID NO: 204888 - DNA, 120 bp, Artificial Sequence
  ENSG00000114861_280 (sequence is synthesized)
ggaacgggaaataccccacagccctaagttcagctgctattttaaacttggctcaccatactgtccatttagtacttattggcaatactggggttctttttctcagttctttccgttgct

SEQ ID NO: 204889 - DNA, 120 bp, Artificial Sequence
  ENSG00000114861_281 (sequence is synthesized)
gcattgccgccctctgcttcttcccacctaggtgctactattctgtaggacttgaggctagtcttagcttttccacatctgttgtattacagtgttcaaagtgacactggtcacttgatt

SEQ ID NO: 204890 - DNA, 74 bp, Artificial Sequence
  ENSG00000114861_282 (sequence is synthesized)
attacaggcacgtgccaccatgcctggccaatttttatatttttagtcaagacagagtttcactattttggcca

SEQ ID NO: 204891 - DNA, 72 bp, Artificial Sequence
  ENSG00000114861_283 (sequence is synthesized)
tgattaattacaggcacgtgccaccatgcctggccaatttttatatttttagtcaagacagagtttcactat

SEQ ID NO: 204892 - DNA, 73 bp, Artificial Sequence
  ENSG00000114861_284 (sequence is synthesized)
tgtgagtgttacagttcttcaaggcggcatgtccggagtttcttctttctgatgttcggatgtgtttggagtt

SEQ ID NO: 204893 - DNA, 64 bp, Artificial Sequence
  ENSG00000114861_285 (sequence is synthesized)
tgggttcgtggtctcgctggctcaggcgtgaagctgcagaccttcgcggtgagcagtctcgctg

SEQ ID NO: 204894 - DNA, 120 bp, Artificial Sequence
  ENSG00000114867_0 (sequence is synthesized)
ggcgcagatcgcccggcgcggctccgccccctgcgccggtcacgtgggggcgccggctgcgcctgcggagaagcggtggccgccgagcgggatctgtgcggggagccggaaatggttgtg

SEQ ID NO: 204895 - DNA, 120 bp, Artificial Sequence
  ENSG00000114867_1 (sequence is synthesized)
tgtggactacgtctgtgcggctgcgtggggctcggccgcgcggactgaaggagactgaaggccctcggatgcccagaacctgtaggccgcaccgtggacttgttcttaatcgagggggtg

SEQ ID NO: 204896 - DNA, 120 bp, Artificial Sequence
  ENSG00000114867_2 (sequence is synthesized)
ctggggggaccctgatgtggcaccaaatgaaatgaacaaagctccacagtccacaggccccccacccgccccatcccccggactcccacagccagcgtttcccccggggcagacagcgcc

SEQ ID NO: 204897 - DNA, 120 bp, Artificial Sequence
  ENSG00000114867_3 (sequence is synthesized)
ggtggtgttcagtacgccacaagcgacacaaatgaacacgccttctcagccccgccagcacttctaccctagccgggcccagcccccgagcagtgcagcctcccgagtgcagagtgcagc

SEQ ID NO: 204898 - DNA, 120 bp, Artificial Sequence
  ENSG00000114867_4 (sequence is synthesized)
ccctgcccgccctggcccagctgcccatgtctaccctgctggatcccaagtaatgatgatcccttcccagatctcctacccagcctcccagggggcctactacatccctggacaggggcg

SEQ ID NO: 204899 - DNA, 120 bp, Artificial Sequence
  ENSG00000114867_5 (sequence is synthesized)
ttccacatacgttgtcccgacacagcagtaccctgtgcagccaggagccccaggcttctatccaggtgcaagccctacagaatttgggacctacgctggcgcctactatccagcccaagg

SEQ ID NO: 204900 - DNA, 120 bp, Artificial Sequence
  ENSG00000114867_6 (sequence is synthesized)
ggtgcagcagtttcccactggcgtggcccccaccccagttttgatgaaccagccaccccagattgctcccaagagggagcgtaagacgatccgaattcgagatccaaaccaaggaggaaa

SEQ ID NO: 204901 - DNA, 120 bp, Artificial Sequence
  ENSG00000114867_7 (sequence is synthesized)
ggatatcacagaggagatcatgtctggggcccgcactgcctccacacccacccctccccagacgggaggcggtctggagcctcaagctaatggggagacgccccaggttgctgtcattgt

SEQ ID NO: 204902 - DNA, 120 bp, Artificial Sequence
  ENSG00000114867_8 (sequence is synthesized)
ccggccagatgaccggtcacagggagcaatcattgctgaccggccagggctgcctggcccagagcatagcccttcagaatcccagccttcgtcgccttctccgaccccatcaccatcccc

SEQ ID NO: 204903 - DNA, 120 bp, Artificial Sequence
  ENSG00000114867_9 (sequence is synthesized)
agtcttggaaccggggtctgagcctaatctcgcagtcctctctattcctggggacactatgacaactatacaaatgtctgtagaagaatcaacccccatctcccgtgaaactggggagcc

SEQ ID NO: 204904 - DNA, 120 bp, Artificial Sequence
  ENSG00000114867_10 (sequence is synthesized)
atatcgcctctctccagaacccactcctctcgccgaacccatactggaagtagaagtgacacttagcaaaccggttccagaatctgagttttcttccagtcctctccaggctcccacccc

SEQ ID NO: 204905 - DNA, 120 bp, Artificial Sequence
  ENSG00000114867_11 (sequence is synthesized)
tttggcatctcacacagtggaaattcatgagcctaatggcatggtcccatctgaagatctggaaccagaggtggagtcaagcccagagcttgctcctcccccagcttgcccctccgaatc

SEQ ID NO: 204906 - DNA, 120 bp, Artificial Sequence
  ENSG00000114867_12 (sequence is synthesized)
ccctgtgcccattgctccaactgcccaacctgaggaactgctcaacggagccccctcgccaccagctgtggacttaagcccagtcagtgagccagaggagcaggccaaggaggtgacagc

SEQ ID NO: 204907 - DNA, 120 bp, Artificial Sequence
  ENSG00000114867_13 (sequence is synthesized)
atcaatggcgccccccaccatcccctctgctactccagctacggctccttcagctacttccccagctcaggaggaggaaatggaagaagaagaagaagaggaagaaggagaagcaggaga

SEQ ID NO: 204908 - DNA, 120 bp, Artificial Sequence
  ENSG00000114867_14 (sequence is synthesized)
agcaggagaagctgagagtgagaaaggaggagaggaactgctccccccagagagtacccctattccagccaacttgtctcagaatttggaggcagcagcagccactcaagtggcagtatc

SEQ ID NO: 204909 - DNA, 120 bp, Artificial Sequence
  ENSG00000114867_15 (sequence is synthesized)
tgtgccaaagaggagacggaaaattaaggagctaaataagaaggaggctgttggagaccttctggatgccttcaaggaggcgaacccggcagtaccagaggtggaaaatcagcctcctgc

SEQ ID NO: 204910 - DNA, 120 bp, Artificial Sequence
  ENSG00000114867_16 (sequence is synthesized)
aggcagcaatccaggcccagagtctgagggcagtggtgtgcccccacgtcctgaggaagcagatgagacctgggactcaaaggaagacaaaattcacaatgctgagaacatccagcccgg

SEQ ID NO: 204911 - DNA, 120 bp, Artificial Sequence
  ENSG00000114867_17 (sequence is synthesized)
ggaacagaagtatgaatataagtcagatcagtggaagcctctaaacctagaggagaaaaaacgttacgaccgtgagttcctgcttggttttcagttcatctttgccagtatgcagaagcc

SEQ ID NO: 204912 - DNA, 120 bp, Artificial Sequence
  ENSG00000114867_18 (sequence is synthesized)
agagggattgccacatatcagtgacgtggtgctggacaaggccaataaaacaccactgcggccactggatcccactagactacaaggcataaattgtggcccagacttcactccatcctt

SEQ ID NO: 204913 - DNA, 120 bp, Artificial Sequence
  ENSG00000114867_19 (sequence is synthesized)
tgccaaccttggccggacaacccttagcacccgtgggcccccaaggggtgggccaggtggggagctgccccgtgggccggctggcctgggaccccggcgctctcagcagggaccccgaaa

SEQ ID NO: 204914 - DNA, 120 bp, Artificial Sequence
  ENSG00000114867_20 (sequence is synthesized)
agaaccacgcaagatcattgccacagtgttaatgaccgaagatataaaactgaacaaagcagagaaagcctggaaacccagcagcaagcggacggcggctgataaggatcgaggggaaga

SEQ ID NO: 204915 - DNA, 120 bp, Artificial Sequence
  ENSG00000114867_21 (sequence is synthesized)
agatgctgatggcagcaaaacccaggacctattccgcagggtgcgctccatcctgaataaactgacaccccagatgttccagcagctgatgaagcaagtgacgcagctggccatcgacac

SEQ ID NO: 204916 - DNA, 120 bp, Artificial Sequence
  ENSG00000114867_22 (sequence is synthesized)
ctacggaaaagccaacagtgactgtgaacttccgaaagctgttgttgaatcgatgtcagaaggagtttgagaaagacaaagatgatgatgaggtttttgagaagaagcaaaaagagatgg

SEQ ID NO: 204917 - DNA, 120 bp, Artificial Sequence
  ENSG00000114867_23 (sequence is synthesized)
atgaagctgctacggcagaggaacgaggacgcctgaaggaagagctggaagaggctcgggacatagcccggcggcgctctttagggaatatcaagtttattggagagttgttcaaactga

SEQ ID NO: 204918 - DNA, 120 bp, Artificial Sequence
  ENSG00000114867_24 (sequence is synthesized)
agatgttaacagaggcaataatgcatgactgtgtggtcaaactgcttaagaaccatgatgaagagtcccttgagtgcctttgtcgtctgctcaccaccattggcaaagacctggactttg

SEQ ID NO: 204919 - DNA, 120 bp, Artificial Sequence
  ENSG00000114867_25 (sequence is synthesized)
aaaaagccaagccccgaatggatcagtatttcaaccagatggaaaaaatcattaaagaaaagaagacgtcatcccgcatccgctttatgctgcaggacgtgctggatctgcgagggagca

SEQ ID NO: 204920 - DNA, 120 bp, Artificial Sequence
  ENSG00000114867_26 (sequence is synthesized)
attgggtgccacgccgaggggatcagggtcccaagaccattgaccagatccataaggaggctgagatggaagaacatcgagagcacatcaaagtgcagcagctcatggccaagggcagtg

SEQ ID NO: 204921 - DNA, 120 bp, Artificial Sequence
  ENSG00000114867_27 (sequence is synthesized)
acaagcgtcggggcggtcctccaggccctcccatcagccgtggacttccccttgtggatgatggtggctggaacacagttcccatcagcaaaggtagccgccccattgacacctcacgac

SEQ ID NO: 204922 - DNA, 120 bp, Artificial Sequence
  ENSG00000114867_28 (sequence is synthesized)
tcaccaagatcaccaagcctggctccatcgattctaacaaccagctctttgcacctggagggcgactgagctggggcaagggcagcagcggaggctcaggagccaagccctcagacgcag

SEQ ID NO: 204923 - DNA, 120 bp, Artificial Sequence
  ENSG00000114867_29 (sequence is synthesized)
catcagaagctgctcgcccagctactagtactttgaatcgcttctcagcccttcaacaagcggtacccacagaaagcacagataatagacgtgtggtgcagaggagtagcttgagccgag

SEQ ID NO: 204924 - DNA, 120 bp, Artificial Sequence
  ENSG00000114867_30 (sequence is synthesized)
aacgaggcgagaaagctggagaccgaggagaccgcctagagcggagtgaacggggaggggaccgtggggaccggcttgatcgtgcgcggacacctgctaccaagcggagcttcagcaagg

SEQ ID NO: 204925 - DNA, 120 bp, Artificial Sequence
  ENSG00000114867_31 (sequence is synthesized)
aagtggaggagcggagtagagaacggccctcccagcctgaggggctgcgcaaggcagctagcctcacggaggatcgggaccgtgggcgggatgccgtgaagcgagaagctgccctacccc

SEQ ID NO: 204926 - DNA, 120 bp, Artificial Sequence
  ENSG00000114867_32 (sequence is synthesized)
cagtgagccccctgaaggcggctctctctgaggaggagttagagaagaaatccaaggctatcattgaggaatatctccatctcaatgacatgaaagaggcagtccagtgcgtgcaggagc

SEQ ID NO: 204927 - DNA, 120 bp, Artificial Sequence
  ENSG00000114867_33 (sequence is synthesized)
tggcctcaccctccttgctcttcatctttgtacggcatggtgtcgagtctacgctggagcgcagtgccattgctcgtgagcatatggggcagctgctgcaccagctgctctgtgctgggc

SEQ ID NO: 204928 - DNA, 120 bp, Artificial Sequence
  ENSG00000114867_34 (sequence is synthesized)
atctgtctactgctcagtactaccaagggttgtatgaaatcttggaattggctgaggacatggaaattgacatcccccacgtgtggctctacctagcggaactggtaacacccattctgc

SEQ ID NO: 204929 - DNA, 120 bp, Artificial Sequence
  ENSG00000114867_35 (sequence is synthesized)
aggaaggtggggtgcccatgggggagctgttcagggagattacaaagcctctgagaccgttgggcaaagctgcttccctgttgctggagatcctgggcctcctgtgcaaaagcatgggtc

SEQ ID NO: 204930 - DNA, 120 bp, Artificial Sequence
  ENSG00000114867_36 (sequence is synthesized)
ctaaaaaggtggggacgctgtggcgagaagccgggcttagctggaaggaatttctacctgaaggccaggacattggtgcattcgtcgctgaacagaaggtggagtataccctgggagagg

SEQ ID NO: 204931 - DNA, 120 bp, Artificial Sequence
  ENSG00000114867_37 (sequence is synthesized)
agtcggaagcccctggccagagggcactcccctccgaggagctgaacaggcagctggagaagctgctgaaggagggcagcagtaaccagcgggtgttcgactggatagaggccaacctga

SEQ ID NO: 204932 - DNA, 120 bp, Artificial Sequence
  ENSG00000114867_38 (sequence is synthesized)
gtgagcagcagatagtatccaacacgttagttcgagccctcatgacggctgtctgctattctgcaattatttttgagactcccctccgagtggacgttgcagtgctgaaagcgcgagcga

SEQ ID NO: 204933 - DNA, 120 bp, Artificial Sequence
  ENSG00000114867_39 (sequence is synthesized)
agctgctgcagaaatacctgtgtgacgagcagaaggagctacaggcgctctacgccctccaggcccttgtagtgaccttagaacagcctcccaacctgctgcggatgttctttgacgcac

SEQ ID NO: 204934 - DNA, 120 bp, Artificial Sequence
  ENSG00000114867_40 (sequence is synthesized)
tgtatgacgaggacgtggtgaaggaggatgccttctacagttgggagagtagcaaggaccccgctgagcagcagggcaagggtgtggcccttaaatctgtcacagccttcttcaagtggc

SEQ ID NO: 204935 - DNA, 120 bp, Artificial Sequence
  ENSG00000114867_41 (sequence is synthesized)
tccgtgaagcagaggaggagtctgaccacaactgagggctggtggggccggggacctggagccccatggacacacagatggcccggctagccgcctggactgcaggggggcggcagcagc

SEQ ID NO: 204936 - DNA, 120 bp, Artificial Sequence
  ENSG00000114867_42 (sequence is synthesized)
ggcggtggcagtgggtgcctgtagtgtgatgtgtctgaactaataaagtggctgaagaggcaggatggcttggggctgcctgggcccccctccaggatgccgccaggtgtccctctcctc

SEQ ID NO: 204937 - DNA, 120 bp, Artificial Sequence
  ENSG00000114867_43 (sequence is synthesized)
cccctggggcacagagatatattatatataaagtcttgaaatttggtgtgtcttggggtggggaggggcaccaacgcctgcccctggggtccttttttttattttctgaaaatcactctc

SEQ ID NO: 204938 - DNA, 120 bp, Artificial Sequence
  ENSG00000114867_44 (sequence is synthesized)
gggactgccgtcctcgctgctgggggcatatgccccagcccctgtaccacccctgctgttgcctgggcagggggaagggggggcacggtgcctgtaattattaaacatgaattcaattaa

SEQ ID NO: 204939 - DNA, 120 bp, Artificial Sequence
  ENSG00000114867_45 (sequence is synthesized)
acttgcctgaaaccggctcctcgacggccgccgcccgcctggccttttagggcctgactcccgcccttcctggcctacactcctgggcggcggcaggcctagcttctggcccagtgcggg

SEQ ID NO: 204940 - DNA, 120 bp, Artificial Sequence
  ENSG00000114867_46 (sequence is synthesized)
ttccccggcggcaggcgtatcctgtgtgcccctgggccaggcccgaacccggtgtccccgggtggggggtggggacgccacggccgaagcagctagctccgttcgtgatccgggagcctg

SEQ ID NO: 204941 - DNA, 120 bp, Artificial Sequence
  ENSG00000114867_47 (sequence is synthesized)
gtgccagcgagacctggaatttccggtctggttggtctggggccccgcggagccaggttgataccctcacctcccaaccccaggccctcggatgcccagaacctgtaggccgcaccgtgg

SEQ ID NO: 204942 - DNA, 120 bp, Artificial Sequence
  ENSG00000114867_48 (sequence is synthesized)
ttgttcttaatcgagggggtgagtgaggggtctgtttcagtaggtcaggggttggttggaagtgatgcgggtttgacagcatgttggtggggacaggctgtatcttttctgcttcaccct

SEQ ID NO: 204943 - DNA, 120 bp, Artificial Sequence
  ENSG00000114867_49 (sequence is synthesized)
tggtgttcagtacgccacaagcgacacaaatgaacacgccttctcagccccgccagggaggattcaggtctctgcagcacttctaccctagccgggcccagcccccgagcagtgcagcct

SEQ ID NO: 204944 - DNA, 120 bp, Artificial Sequence
  ENSG00000114867_50 (sequence is synthesized)
tctagatgggggtcctgggccccagggtgtgcagccactgacttggggactgctggtggggtagggatgagggagggaggggcattgtgatgtacagggctgctctgtgagatcaagggt

SEQ ID NO: 204945 - DNA, 120 bp, Artificial Sequence
  ENSG00000114867_51 (sequence is synthesized)
ctcttaagggtgggagctggggcagggactacgagagcagccagatgggctgaaagtggaactcaaggggtttctggcacctacctacctgcttcccgctggggggtggggagttggccc

SEQ ID NO: 204946 - DNA, 120 bp, Artificial Sequence
  ENSG00000114867_52 (sequence is synthesized)
ctggtctcttcctgctgtgccctgcacccctcaggaggcagtccagtgcgtgcaggagctggcctcaccctccttgctcttcatctttgtacggcatggtgtcgagtctacgctggagcg

SEQ ID NO: 204947 - DNA, 120 bp, Artificial Sequence
  ENSG00000114867_53 (sequence is synthesized)
ggggtgggggtgggggagaccaggcagtctccagcctctggatcttcctacccccatctgtgtcagggcaaagtgcagccgcctgctgccaaattgagacagggcccctgggctgtcccc

SEQ ID NO: 204948 - DNA, 120 bp, Artificial Sequence
  ENSG00000114867_54 (sequence is synthesized)
gggggctgtcacggggagggggtatgtggattgttaaggctcttgccgcagatctgctccccttatttcaccagcttgggtttctgccccacctgggcttcccctcttgctgaactctgg

SEQ ID NO: 204949 - DNA, 120 bp, Artificial Sequence
  ENSG00000114867_55 (sequence is synthesized)
gaaaaaatcattaaagaaaagaagacgtcatcccgcatccgctttatgctgcaggacgtgctggatctgcgaggggtgtgtgtccccctcctccccactgccagcctgctgcctccagtt

SEQ ID NO: 204950 - DNA, 120 bp, Artificial Sequence
  ENSG00000114867_56 (sequence is synthesized)
ctccagcctgggtgacaaaagcaaaactgtctcaaaaaaaaaaccaaaaaacagtatgggttccttgaccatcctggtcagcataactttagggggttaagcggggtgaaaaccatctaa

SEQ ID NO: 204951 - DNA, 120 bp, Artificial Sequence
  ENSG00000114867_57 (sequence is synthesized)
ggacacagaggtggccttagcttgaaataattgtccccatgtctagaaaatgttcctgggggttccatagttgatgccctagccatgccacgttgccccagaaggagagtggggacctgg

SEQ ID NO: 204952 - DNA, 120 bp, Artificial Sequence
  ENSG00000114867_58 (sequence is synthesized)
gtttggagggagatggagtagtggtgagagaactgtggaggctgtcagcattaggtttttctcttcttgtagggagattacaaagcctctgagaccgttgggcaaagctgcttccctgtt

SEQ ID NO: 204953 - DNA, 120 bp, Artificial Sequence
  ENSG00000114867_59 (sequence is synthesized)
gagatcctgggcctcctgtgcaaaagcatggtgagtgagggccaggagtccagagatgcctcccacggtgtggttttggctgtttgctgtggccctgaagcttcatggtccattggtgga

SEQ ID NO: 204954 - DNA, 120 bp, Artificial Sequence
  ENSG00000114867_60 (sequence is synthesized)
gaggtgggtgtcagccttggcctcccagttctgaaccggggtaagggtatattgctccactcatccctgtcttcttgtagttgagactcccctccgagtggacgttgcagtgctgaaagc

SEQ ID NO: 204955 - DNA, 120 bp, Artificial Sequence
  ENSG00000114867_61 (sequence is synthesized)
atggagttgggttaattctagcatttgaggctggccagtcttctttcttgtctcctgttggcaaccttacctcttaactgcgggccttttccattgcagaaggtggagtataccctggga

SEQ ID NO: 204956 - DNA, 120 bp, Artificial Sequence
  ENSG00000114902_0 (sequence is synthesized)
gccgccatcgctctcccgggcttagaaggcccggctactgacgcgcagtgccagaccttacccctcacggtccttaagtctcggtcgccctcgcctcgcagcctgccacccgcgctcagc

SEQ ID NO: 204957 - DNA, 120 bp, Artificial Sequence
  ENSG00000114902_1 (sequence is synthesized)
tgcccgcctcctcagccagccatgctggagcatctgagctcgctgcccacgcagatggattacaagggccagaagctagctgaacagatgtttcagggaattattcttttttctgcaata

SEQ ID NO: 204958 - DNA, 120 bp, Artificial Sequence
  ENSG00000114902_2 (sequence is synthesized)
gttggatttatctacgggtacgtggctgaacagttcgggtggactgtctatatagttatggccggatttgctttttcatgtttgctgacacttcctccatggcccatctatcgccggcat

SEQ ID NO: 204959 - DNA, 120 bp, Artificial Sequence
  ENSG00000114902_3 (sequence is synthesized)
cctctcaagtggttacctgttcaagaatcaagcacagacgacaagaaaccaggggaaagaaaaattaagaggcatgctaaaaataattgaggttttcatgattcagcacctgcttttgtt

SEQ ID NO: 204960 - DNA, 120 bp, Artificial Sequence
  ENSG00000114902_4 (sequence is synthesized)
tctgtgagatgagctaaattgctttcataccccagataagagctaaaaccacctaatgctcttatggcacagctgtgtatagatttagttctctttatacttcatttctagcccagttgg

SEQ ID NO: 204961 - DNA, 120 bp, Artificial Sequence
  ENSG00000114902_5 (sequence is synthesized)
gttttgatttatataagtagtttagaccttctcttcataatcttgctctgagatggggaacagaacacacaagtatgaagtttctttcaggtgtaaataatgaaaaataaatgcctcata

SEQ ID NO: 204962 - DNA, 120 bp, Artificial Sequence
  ENSG00000114902_6 (sequence is synthesized)
aatgatagtacaatgtaactatcaaagttttataattcattatgagttaaccattttaatgtttccaattaaacctcatagtgcaagttctttgtctaaagggtcttctgttgattattc

SEQ ID NO: 204963 - DNA, 120 bp, Artificial Sequence
  ENSG00000114902_7 (sequence is synthesized)
tgcaaggaagataattaataaaagcctaagttagaagttcgtgcttctggccaggtgcagtggctctcacctataatcccagcacttgaggaggctaaggcaggaggatgacttgagccc

SEQ ID NO: 204964 - DNA, 120 bp, Artificial Sequence
  ENSG00000114902_8 (sequence is synthesized)
aggagtttgagacatttcatggtatgtaattaatagttgtcattagaacattagttccatgagaacggggactttgttttgctcactgctgtctacccagtacatagaagagtacacgat

SEQ ID NO: 204965 - DNA, 120 bp, Artificial Sequence
  ENSG00000114902_9 (sequence is synthesized)
gcattgttaagtacttaagatttattgaatgagaactgcattgtacaatatggtgccactagacacgtctatttaattaaaattaaaatataaaactctaaaactagccatgattcaaag

SEQ ID NO: 204966 - DNA, 120 bp, Artificial Sequence
  ENSG00000114902_10 (sequence is synthesized)
gttcaatagctatatgtgactagtggctaccatataaaacatttccatcacaaagttccatttatcagatcttatatagaaccttgaataaaatttaatagacaagtgattttgtattta

SEQ ID NO: 204967 - DNA, 120 bp, Artificial Sequence
  ENSG00000114902_11 (sequence is synthesized)
acatttcacctttattgaatgcctataaggccatttgaataacggatcatgtacaaagcaacaggaaaaaaaaaactgcaagcagtaaaggttgtgcaggtgatattcagtaacactgca

SEQ ID NO: 204968 - DNA, 120 bp, Artificial Sequence
  ENSG00000114902_12 (sequence is synthesized)
gtgtagccagagcaaggacataaaacttccttagctttgtaagtctgtggaaatcaaaacttctaaaagagaaaaccgaaatcagaattactgacactttaggccaggcatggtgcctca

SEQ ID NO: 204969 - DNA, 60 bp, Artificial Sequence
  ENSG00000114902_13 (sequence is synthesized)
atcagaattactgacactttaggccaggcatggtgcctcaagcctgtaatcccagcattt

SEQ ID NO: 204970 - DNA, 68 bp, Artificial Sequence
  ENSG00000114902_14 (sequence is synthesized)
atcccagctactcgggaggctgagggaggggaacttgaacccaggaggcgtagactccatctcaaaaa

SEQ ID NO: 204971 - DNA, 120 bp, Artificial Sequence
  ENSG00000114902_15 (sequence is synthesized)
agagtaacacatcaaagtctctgaactgtggccaaaggtatattcggaagaaaattcacagtcttaaagatgagtttttaaattaatttaggaagatgaattaagcactcaagtaaaaac

SEQ ID NO: 204972 - DNA, 120 bp, Artificial Sequence
  ENSG00000114902_16 (sequence is synthesized)
tcaagtaaaaacgataaaagtgggaagaaaagatgtttaaacaaaataaaaatatacagtatggtaattaataagaaagtatgggggaagtcaggtgtggtggttcatgcctataatccc

SEQ ID NO: 204973 - DNA, 120 bp, Artificial Sequence
  ENSG00000114902_17 (sequence is synthesized)
tcccagcactttcagaggccgatgcaggaggactgcttgaatgcagtttgagaccagcctgggcaacacagacttcctctccacaaaaaattttaaaaattagccaggtgtggtggtgca

SEQ ID NO: 204974 - DNA, 60 bp, Artificial Sequence
  ENSG00000114902_18 (sequence is synthesized)
tagccaggtgtggtggtgcatgcctgtggtcctagctacttgaggctcactgcactccag

SEQ ID NO: 204975 - DNA, 120 bp, Artificial Sequence
  ENSG00000114902_19 (sequence is synthesized)
aaaaaaaaaaaaaagatatgggtgagattcctttaattctaataaaatacctactttataccaatacattagaaaaattaagtaaaactgatgactctccagaacgatgtggatttccaa

SEQ ID NO: 204976 - DNA, 120 bp, Artificial Sequence
  ENSG00000114902_20 (sequence is synthesized)
aacatgcacggaaaggtgaatagctcaaggataccaagtttgccaaagatttgttcccaactgggcattgggacttgatggttttgcaagttgagttctagcaaacccttcaaagtgaaa

SEQ ID NO: 204977 - DNA, 120 bp, Artificial Sequence
  ENSG00000114902_21 (sequence is synthesized)
ataagagttatcagaaaccaggctgtgagcactgtaaaagggcaggaagtattgttttattcaccactatatccccagctcctggcagagaacctggcacacagtaaactctaaataaaa

SEQ ID NO: 204978 - DNA, 78 bp, Artificial Sequence
  ENSG00000114902_22 (sequence is synthesized)
aaattagccgggcatggtggcgggcaactgtagtcccagctactcgagaggatgaggctgagattgggccactgcact

SEQ ID NO: 204979 - DNA, 120 bp, Artificial Sequence
  ENSG00000114902_23 (sequence is synthesized)
cctgggtgacagagcaagactgtgtcttaaaaaaaaaaaaaaattgttaagtggctgtaaagggaacatttcattagagtatttgtgtgtgtgtgtaattttcaaagatagatatatttt

SEQ ID NO: 204980 - DNA, 120 bp, Artificial Sequence
  ENSG00000114902_24 (sequence is synthesized)
tttcattagagtatttgtgtgtgtgtgtaattttcaaagatagatatatttttagttatagaaactgaaaacagggctgggcacagtggctcattcctgtaatcctggcactttgggagg

SEQ ID NO: 204981 - DNA, 120 bp, Artificial Sequence
  ENSG00000114902_25 (sequence is synthesized)
ccaggagttctgagatcagcctgggcaatgtggtgtaaccctgtctctacaaaaaatacaaaaactagccaggtgtggtggcacacgcctgtggtctcagctactagggaggctcaggca

SEQ ID NO: 204982 - DNA, 72 bp, Artificial Sequence
  ENSG00000114902_26 (sequence is synthesized)
gcacacgcctgtggtctcagctactagggaggctcaggcaggaataccacttgagccccagactgacagagt

SEQ ID NO: 204983 - DNA, 120 bp, Artificial Sequence
  ENSG00000114902_27 (sequence is synthesized)
ggagcaatatttatttttagagtccctcgaatacagaagtgaaaatgtactattcaagacttgtatttaacttcataaaatttctttcctagatgggtattacctcttattaaacaacta

SEQ ID NO: 204984 - DNA, 120 bp, Artificial Sequence
  ENSG00000114902_28 (sequence is synthesized)
ataaaatatgtgctatataatcatacatttaaaacatggaaagacaactaatatcttacagtacatgaagacaaacttcaggagacaaacattaaatatatccaaaaactaaatggacct

SEQ ID NO: 204985 - DNA, 120 bp, Artificial Sequence
  ENSG00000114902_29 (sequence is synthesized)
ggactttgcttacaaattgcttaaatggaaatgaaatttgtgtttaagaaatgttttcactgatggaaaaataaatctaacaaaaccattatgtaaaaacatactgatttacaaagccaa

SEQ ID NO: 204986 - DNA, 120 bp, Artificial Sequence
  ENSG00000114902_30 (sequence is synthesized)
ggcacaaacaaggtgccgtgaatatttgctggttgcatgaatgaggacagcagtcccaccctgtcccgggagtgcctagaattccactgtttgtggccaacccagaatacataacctggg

SEQ ID NO: 204987 - DNA, 120 bp, Artificial Sequence
  ENSG00000114902_31 (sequence is synthesized)
ggccggagagccagctgggacccagaggcccgggttcctcagaacggtttctctccaaaacgtgggcatcccacctggctgacggattacaagggccagaagctagctgaacagatgttt

SEQ ID NO: 204988 - DNA, 120 bp, Artificial Sequence
  ENSG00000114902_32 (sequence is synthesized)
ggagacgcgggggcgccggcggccgttgggccgcgcaagtactgtcaaggacagttttcgggacgggggacgcggctccaggcacccaacagcactgacggcgaacacttcacgggcgcg

SEQ ID NO: 204989 - DNA, 120 bp, Artificial Sequence
  ENSG00000114902_33 (sequence is synthesized)
cgatgcctcgacaaggcggccgccaccaccacctcagctgccctcgcgggcagcacggcgcggcaaaagcgcacgtcgcctagcgatggcgcggggcggggacacgggctgtaccggccc

SEQ ID NO: 204990 - DNA, 120 bp, Artificial Sequence
  ENSG00000114902_34 (sequence is synthesized)
gctcgctgcccacgcagatggtgagggcgcaacccggggacctctgcacgccgttcttgtgcctggcagcttcgaagcccatgttggagcaccgacccggtgctgcgctgttccgggccc

SEQ ID NO: 204991 - DNA, 120 bp, Artificial Sequence
  ENSG00000114902_35 (sequence is synthesized)
ggatggttaccgtccaccctctttcccgaattgcctcctgggtccccttctcttctactccgcgagaatctcctgtccattctccgtgagggtgtttcagttcctcccgggaagcccaga

SEQ ID NO: 204992 - DNA, 120 bp, Artificial Sequence
  ENSG00000114902_36 (sequence is synthesized)
atttaatatcttgcccaggcccttaggagagcgggagaccctgatgttggggttaccctgtgccagagttgtgaggtcagggcaggaattgtatgttctcggcggtggaaccaattcttt

SEQ ID NO: 204993 - DNA, 120 bp, Artificial Sequence
  ENSG00000114902_37 (sequence is synthesized)
atgccaaaatagtgtcagatggtgcgaactatataaaaggacacagcttatttcctttggcggctactctggctaataatcttaaggtcaaagccagcaggagttttcatggtgctcacg

SEQ ID NO: 204994 - DNA, 75 bp, Artificial Sequence
  ENSG00000114902_38 (sequence is synthesized)
ctggggcgatttcggctcactgcaccttctgcctcccgggtttaatagattttcctgcctcagcctcccgagtag

SEQ ID NO: 204995 - DNA, 120 bp, Artificial Sequence
  ENSG00000114904_0 (sequence is synthesized)
agaactgctcccggcccggatcgctatggcagcggcgtcgtcgcgggccgggccccagcaatcccgcccgggcccggctgcctcaacagccgcccccactgccccctctcgggcatgaac

SEQ ID NO: 204996 - DNA, 120 bp, Artificial Sequence
  ENSG00000114904_1 (sequence is synthesized)
cgagcttcttgttgccgcccgctgccctacccgccgctgccgccgcatcccgactctgggccagcgctgggaacatgcccctggccgcctactgctacctgcgggtcgtgggcaagggga

SEQ ID NO: 204997 - DNA, 120 bp, Artificial Sequence
  ENSG00000114904_2 (sequence is synthesized)
gctatggagaggtgacgcttgtgaagcaccggcgggacggcaagcagtatgtcatcaaaaaactgaacctccgaaatgcctctagccgagagcggcgagctgctgaacaggaagcccagc

SEQ ID NO: 204998 - DNA, 120 bp, Artificial Sequence
  ENSG00000114904_3 (sequence is synthesized)
tcttgtctcagttgaagcatcccaacattgtcacctacaaggagtcatgggaaggaggagatggtctgctctacattgtcatgggcttctgtgaaggaggtgatttgtaccgaaagctca

SEQ ID NO: 204999 - DNA, 120 bp, Artificial Sequence
  ENSG00000114904_4 (sequence is synthesized)
aggagcagaaagggcagcttctgcctgagaatcaggtggtagagtggtttgtacagatcgccatggctttgcagtatttacatgaaaaacacatccttcatcgagatctgaaaactcaaa

SEQ ID NO: 205000 - DNA, 120 bp, Artificial Sequence
  ENSG00000114904_5 (sequence is synthesized)
atgtcttcctaacaagaacaaacatcatcaaagtaggggacctaggaattgcccgagtgttagagaaccactgtgacatggctagcaccctcattggcacaccctactacatgagccctg

SEQ ID NO: 205001 - DNA, 120 bp, Artificial Sequence
  ENSG00000114904_6 (sequence is synthesized)
aattgttctcaaacaaaccctacaactataagtctgatgtttgggctctaggatgctgtgtctatgaaatggccaccttgaagcatgctttcaatgcaaaagatatgaattctttagttt

SEQ ID NO: 205002 - DNA, 120 bp, Artificial Sequence
  ENSG00000114904_7 (sequence is synthesized)
atcggattattgaaggaaagctgccaccaatgccaagagattacagcccagagctggcagaactgataagaacaatgctgagcaaaaggcctgaagaaaggccgtctgtgaggagcatcc

SEQ ID NO: 205003 - DNA, 120 bp, Artificial Sequence
  ENSG00000114904_8 (sequence is synthesized)
tgaggcagccttatataaagcggcaaatctccttctttttggaggccacaaagataaaaacctccaaaaataacattaaaaatggtgactctcaatccaagccttttgctacagtggttt

SEQ ID NO: 205004 - DNA, 120 bp, Artificial Sequence
  ENSG00000114904_9 (sequence is synthesized)
ctggagaggcagaatcaaatcatgaagtaatccacccccaaccactctcttctgagggctcccagacatatataatgggtgaaggcaaatgtttgtcccaggagaaacccagggcctctg

SEQ ID NO: 205005 - DNA, 120 bp, Artificial Sequence
  ENSG00000114904_10 (sequence is synthesized)
gtctcttgaagtcacctgccagtctgaaagcccatacctgcaaacaggacttgagcaataccacagaactagccacaatcagtagcgtaaatattgacatcttacctgcaaaagggaggg

SEQ ID NO: 205006 - DNA, 120 bp, Artificial Sequence
  ENSG00000114904_11 (sequence is synthesized)
attcagtgagtgatggctttgttcaggagaatcagccaagatatttggatgcctctaatgagttaggaggtatatgcagtatttctcaagtggaagaggagatgctgcaggacaacacta

SEQ ID NO: 205007 - DNA, 120 bp, Artificial Sequence
  ENSG00000114904_12 (sequence is synthesized)
aatccagtgcccagcctgaaaacctgattcccatgtggtcctctgacattgtcactggggaaaagaatgaaccagtgaagcctctgcagcccctaatcaaagaacaaaagccaaaggacc

SEQ ID NO: 205008 - DNA, 120 bp, Artificial Sequence
  ENSG00000114904_13 (sequence is synthesized)
gcgtgtgccaccacgcccaggatcaagttgctggtgaatgtattatagaaaaacagggcagaatccacccagatttacagccacacaactctgggtctgaaccttccctgtctcgacagc

SEQ ID NO: 205009 - DNA, 120 bp, Artificial Sequence
  ENSG00000114904_14 (sequence is synthesized)
gacggcaaaagaggagagaacagactgagcacagaggggaaaagagacaggtccgcagagatctctttgctttccaagagtcgcctcctcgatttttgccttctcatcccattgttggga

SEQ ID NO: 205010 - DNA, 120 bp, Artificial Sequence
  ENSG00000114904_15 (sequence is synthesized)
aagtggatgtcacatcaacacaaaaagaggctgaaaaccaacgtagagtggtcactgggtctgtgagcagttcaaggagcagtgagatgtcatcatcaaaggatcgaccattatcagcca

SEQ ID NO: 205011 - DNA, 120 bp, Artificial Sequence
  ENSG00000114904_16 (sequence is synthesized)
gagagaggaggcgactaaagcagtcacaggaagaaatgtcctcttcaggcccttcagtgaggaaagcgtctctgagtgtagcagggccaggaaaaccccaggaagaagaccagcccttgc

SEQ ID NO: 205012 - DNA, 120 bp, Artificial Sequence
  ENSG00000114904_17 (sequence is synthesized)
ctgcccgacggctctcctctgactgcagcgtcactcaggaaaggaaacagattcattgtctgtctgaggatgagttaagttcttctacaagttcaactgataagtcagatggggattacg

SEQ ID NO: 205013 - DNA, 120 bp, Artificial Sequence
  ENSG00000114904_18 (sequence is synthesized)
gggaagggaaaggtcagacaaatgaaattaatgccttggtacaattgatgactcagaccctgaaactggattctaaagagagctgtgaagatgtcccggtagcaaacccagtgtcagaat

SEQ ID NO: 205014 - DNA, 120 bp, Artificial Sequence
  ENSG00000114904_19 (sequence is synthesized)
tcaaacttcatcggaaatatcgggacacactgatacttcatgggaaggttgcagaagaggcagaggaaatccattttaaagagctaccttcagctattatgccaggttctgaaaagatca

SEQ ID NO: 205015 - DNA, 120 bp, Artificial Sequence
  ENSG00000114904_20 (sequence is synthesized)
ggagactagttgaagtcttgagaactgatgtaattcgtggcctgggagttcagcttttagagcaggtgtatgatcttttggaggaggaggatgaatttgatagagaggtacgtttgcggg

SEQ ID NO: 205016 - DNA, 120 bp, Artificial Sequence
  ENSG00000114904_21 (sequence is synthesized)
agcacatgggtgaaaagtatacaacttacagtgtgaaagctcgccagttgaaattttttgaagaaaacatgaatttttgagcatttgtcctaatctgctgccagaattaaagacctattt

SEQ ID NO: 205017 - DNA, 120 bp, Artificial Sequence
  ENSG00000114904_22 (sequence is synthesized)
ttagaggattttggcttaaaaagcaagggcaaacagtcatttggaagccactcaccactgttttatatctcttttttatatctctttggcgtttccctacagaaaagaaattggacagaa

SEQ ID NO: 205018 - DNA, 120 bp, Artificial Sequence
  ENSG00000114904_23 (sequence is synthesized)
cagaataatatgaagcaggatcacaaaagaaaaaaaactttggctttcatattctctttgtgaggacaaatctgttgtttgtttgattactgtttactgagccttaatccaccaagttta

SEQ ID NO: 205019 - DNA, 120 bp, Artificial Sequence
  ENSG00000114904_24 (sequence is synthesized)
aaatgctggattgaaaattttatattgtaatgtagagataaaagcagtaggagaaacaaatgacataatatgtcgtcataattcctgctattgttaataaccttaaggagtagttgataa

SEQ ID NO: 205020 - DNA, 120 bp, Artificial Sequence
  ENSG00000114904_25 (sequence is synthesized)
attataaaattttaaaaagtcaattcagttctagaaatagatttaaagaatatgaagttctatctagtacttgagcagctgtatttcttttctacacattgatggacttttaatatttta

SEQ ID NO: 205021 - DNA, 120 bp, Artificial Sequence
  ENSG00000114904_26 (sequence is synthesized)
ttctcatttaatataaacctcatctagggtatatacaaattaaaactgagacacattggctttgtaaatcagtatgtttttacataatggttttgttagatttatttttccatcagtgaa

SEQ ID NO: 205022 - DNA, 120 bp, Artificial Sequence
  ENSG00000114904_27 (sequence is synthesized)
aacatttcttaaacacaaatttcatttccatttaagcaatttgtaagcaaagtccaggtccatttagtttttggatatatttaatgtttgtctcctgaagtttgtcttcatgtactgtaa

SEQ ID NO: 205023 - DNA, 120 bp, Artificial Sequence
  ENSG00000114904_28 (sequence is synthesized)
gatattagttgtctttccatgttttaaatgtatgattatatagcacatattttattagttgtttaataagaggtaatacccatctaggaaagaaattttatgaagttaaatacaagtctt

SEQ ID NO: 205024 - DNA, 120 bp, Artificial Sequence
  ENSG00000114904_29 (sequence is synthesized)
tgaagttaaatacaagtcttgaatagtacattttcacttctgtattcgagggactctaaaaataaatattgctccagaaatgttttcaggtgttttttttttgagacagagtttcactct

SEQ ID NO: 205025 - DNA, 120 bp, Artificial Sequence
  ENSG00000114904_30 (sequence is synthesized)
catgatctcaactcactgcaacctccacttctggggctcaagtggtattcctgcctgagcctccctagtagctgagaccacaggcgtgtgccaccacacctggctagtttttgtattttt

SEQ ID NO: 205026 - DNA, 120 bp, Artificial Sequence
  ENSG00000114904_31 (sequence is synthesized)
cacctggctagtttttgtattttttgtagagacagggttacaccacattgcccaggctgatctcagaactcctgggctcaagcaatccactcacctcagcctcccaaagtgccaggatta

SEQ ID NO: 205027 - DNA, 120 bp, Artificial Sequence
  ENSG00000114904_32 (sequence is synthesized)
cagccctgttttcagtttctataactaaaaatatatctatctttgaaaattacacacacacacaaatactctaatgaaatgttccctttacagccacttaacaattttttttttttttta

SEQ ID NO: 205028 - DNA, 78 bp, Artificial Sequence
  ENSG00000114904_33 (sequence is synthesized)
gtgcagtggcccaatctcagcctcatcctctcgagtagctgggactacagttgcccgccaccatgcccggctaatttt

SEQ ID NO: 205029 - DNA, 120 bp, Artificial Sequence
  ENSG00000114904_34 (sequence is synthesized)
tacaggcgtgagccaccgcgcccggcacacttaacagatttttatttagagtttactgtgtgccaggttctctgccaggagctggggatatagtggtgaataaaacaatacttcctgccc

SEQ ID NO: 205030 - DNA, 120 bp, Artificial Sequence
  ENSG00000114904_35 (sequence is synthesized)
acaatacttcctgcccttttacagtgctcacagcctggtttctgataactcttattttcactttgaagggtttgctagaactcaacttgcaaaaccatcaagtcccaatgcccagttggg

SEQ ID NO: 205031 - DNA, 120 bp, Artificial Sequence
  ENSG00000114904_36 (sequence is synthesized)
aacaaatctttggcaaacttggtatccttgagctattcacctttccgtgcatgttttggaaatccacatcgttctggagagtcatcagttttacttaatttttctaatgtattggtataa

SEQ ID NO: 205032 - DNA, 84 bp, Artificial Sequence
  ENSG00000114904_37 (sequence is synthesized)
tcagcccctcaagtagctaggaccattttttgtggagaggaagtctgtgttgcccaggctggtctcaaactgcattcaagcagt

SEQ ID NO: 205033 - DNA, 120 bp, Artificial Sequence
  ENSG00000114904_38 (sequence is synthesized)
ctaatttttaaaattttttgtggagaggaagtctgtgttgcccaggctggtctcaaactgcattcaagcagtcctcctgcatcggcctctgaaagtgctgggattataggcatgaaccac

SEQ ID NO: 205034 - DNA, 120 bp, Artificial Sequence
  ENSG00000114904_39 (sequence is synthesized)
ttaccatactgtatatttttattttgtttaaacatcttttcttcccacttttatcgtttttacttgagtgcttaattcatcttcctaaattaatttaaaaactcatctttaagactgtga

SEQ ID NO: 205035 - DNA, 120 bp, Artificial Sequence
  ENSG00000114904_40 (sequence is synthesized)
ttaagactgtgaattttcttccgaatatacctttggccacagttcagagactttgatgtgttactcttttggcattggttctaaaatgtcaatcattcttttttttttttttttgagatg

SEQ ID NO: 205036 - DNA, 68 bp, Artificial Sequence
  ENSG00000114904_41 (sequence is synthesized)
ttttttgagatggagtctacgcctcctgggttcaagttcccctccctcagcctcccgagtagctggga

SEQ ID NO: 205037 - DNA, 120 bp, Artificial Sequence
  ENSG00000114904_42 (sequence is synthesized)
ttgaggcaccatgcctggcctaaagtgtcagtaattctgatttcggttttctcttttagaagttttgatttccacagacttacaaagctaaggaagttttatgtccttgctctggctaca

SEQ ID NO: 205038 - DNA, 120 bp, Artificial Sequence
  ENSG00000114904_43 (sequence is synthesized)
ctgcagtgttactgaatatcacctgcacaacctttactgcttgcagttttttttttcctgttgctttgtacatgatccgttattcaaatggccttataggcattcaataaaggtgaaatg

SEQ ID NO: 205039 - DNA, 120 bp, Artificial Sequence
  ENSG00000114904_44 (sequence is synthesized)
ttaaatacaaaatcacttgtctattaaattttattcaaggttctatataagatctgataaatggaactttgtgatggaaatgttttatatggtagccactagtcacatatagctattgaa

SEQ ID NO: 205040 - DNA, 120 bp, Artificial Sequence
  ENSG00000114904_45 (sequence is synthesized)
cctttgaatcatggctagttttagagttttatattttaattttaattaaatagacgtgtctagtggcaccatattgtacaatgcagttctcattcaataaatcttaagtacttaacaatg

SEQ ID NO: 205041 - DNA, 120 bp, Artificial Sequence
  ENSG00000114904_46 (sequence is synthesized)
attacgtactcctaagagagaaggtggacagtctacatctggcaggcctaatgcagtaaaccttttaaatgtcagctccatttatttttgggacagggccagcttgttatatcttttcac

SEQ ID NO: 205042 - DNA, 86 bp, Artificial Sequence
  ENSG00000114904_47 (sequence is synthesized)
gtgcagtggtgcgatctcagcttactgcagcctccccctcccgggttcaagcaattcttatcaagttgctggtgaatgtattatag

SEQ ID NO: 205043 - DNA, 80 bp, Artificial Sequence
  ENSG00000114923_0 (sequence is synthesized)
ctccggcgcctgcgtccgcccggccagcccggctctgcgctgcgagaggccggacggcagtcgcggctgcgctcgggaga

SEQ ID NO: 205044 - DNA, 120 bp, Artificial Sequence
  ENSG00000114923_1 (sequence is synthesized)
gagcgcgggggacatggggcgcggcggcccgcctgggcctcgcaggctccggagccccgagtgagcgagagcgtccccagccgcctacctggccatggccaacggagtgatcccgccgcc

SEQ ID NO: 205045 - DNA, 120 bp, Artificial Sequence
  ENSG00000114923_2 (sequence is synthesized)
cgggggcgcctcccccctaccccaggtccgggtgcccttggaggagccccctctaagtccagacgtggaggaggaggacgatgacttgggcaagaccttggctgtgagcaggtttgggga

SEQ ID NO: 205046 - DNA, 120 bp, Artificial Sequence
  ENSG00000114923_3 (sequence is synthesized)
cctcatcagcaagcccccggcctgggaccccgagaagcccagccgcagctacagcgagcgggactttgagtttcaccggcacacatcccaccacacccaccacccgctctcagcgcgcct

SEQ ID NO: 205047 - DNA, 120 bp, Artificial Sequence
  ENSG00000114923_4 (sequence is synthesized)
gcctccaccccacaagctgcggcggctgccccccacctctgcccggcacaccaggagaaagaggaagaaggagaaaacctctgctcctccctccgaggggacccctcccatccaggagga

SEQ ID NO: 205048 - DNA, 120 bp, Artificial Sequence
  ENSG00000114923_5 (sequence is synthesized)
ggggggagctggagtggatgaggaagaggaggaagaggaggaagaggaaggagaatctgaggcagaacctgtggagcccccccactcagggaccccacagaaggcaaagttctccattgg

SEQ ID NO: 205049 - DNA, 120 bp, Artificial Sequence
  ENSG00000114923_6 (sequence is synthesized)
aagtgacgaggatgacagtccaggcctccctgggagggctgctgtcaccaagcccctgccctcggtgggcccacacactgacaagagcccccagcactccagcaggccgtgctctgagct

SEQ ID NO: 205050 - DNA, 120 bp, Artificial Sequence
  ENSG00000114923_7 (sequence is synthesized)
gagggacggtgatggaaccaccgacctggccctgtcaagtccaaggctgctgtgttgcctccccagctcccccagcccccgggcccgggcctcccgactcgctggggagaaaagccggcc

SEQ ID NO: 205051 - DNA, 120 bp, Artificial Sequence
  ENSG00000114923_8 (sequence is synthesized)
ctggagcccatcggccagttatgacctgcgggagcgactgtgcccaggcagtgccctgggcaacccaggtggtccagagcagcaggtgcccacagatgaggcggaggcccagatgctggg

SEQ ID NO: 205052 - DNA, 120 bp, Artificial Sequence
  ENSG00000114923_9 (sequence is synthesized)
ttctgcagacctggacgacatgaagagtcaccgactggaggacaaccctggtgtgcggcgacacttagtgaaaaagccctcccggacgcagggcgggaggggcagtcccagcggcctggc

SEQ ID NO: 205053 - DNA, 120 bp, Artificial Sequence
  ENSG00000114923_10 (sequence is synthesized)
ccccatccttcgcaggaagaagaagaagaaaaagctggaccggaggcctcatgaggtgttcgtggagctgaacgagctgatgctggaccgcagccaggagccccactggcgggagacggc

SEQ ID NO: 205054 - DNA, 120 bp, Artificial Sequence
  ENSG00000114923_11 (sequence is synthesized)
ccgctggatcaagtttgaggaggacgtggaggaggagacggagcgctgggggaagccccatgttgcctcgctctccttccgtagccttctggagctcaggaggaccatcgcccatggagc

SEQ ID NO: 205055 - DNA, 120 bp, Artificial Sequence
  ENSG00000114923_12 (sequence is synthesized)
tgccctcctggacctggagcaaaccaccctgccaggcattgcacacctcgtggtggagaccatgattgtgtctgaccagatccggccggaggacagggccagcgtcctacgtaccctgct

SEQ ID NO: 205056 - DNA, 120 bp, Artificial Sequence
  ENSG00000114923_13 (sequence is synthesized)
actgaagcacagccatcccaacgatgacaaggacagtggcttctttccccgaaacccatcgagctccagcatgaactcggttctggggaatcatcacccaactcccagccatggccctga

SEQ ID NO: 205057 - DNA, 120 bp, Artificial Sequence
  ENSG00000114923_14 (sequence is synthesized)
tggggcggtgcctaccatggctgatgacctgggggagccagccccactctggccacatgaccctgacgccaaggagaagcccctccacatgcctgggggagatggtcaccgggggaaaag

SEQ ID NO: 205058 - DNA, 120 bp, Artificial Sequence
  ENSG00000114923_15 (sequence is synthesized)
cctgaagctgctggagaagatccctgaagatgctgaggccacggttgtgcttgtgggttgtgtgcctttcttggagcagcctgcagcagccttcgtgcgtctgaatgaggctgtactcct

SEQ ID NO: 205059 - DNA, 120 bp, Artificial Sequence
  ENSG00000114923_16 (sequence is synthesized)
ggagtctgtgcttgaggtccctgtcccggtccgcttcctcttcgtgatgctggggcccagccacaccagcactgactatcacgagcttgggcgctccattgccacccttatgtctgacaa

SEQ ID NO: 205060 - DNA, 120 bp, Artificial Sequence
  ENSG00000114923_17 (sequence is synthesized)
ctaagtgccatcagcgagttcctggatggcagcattgtgatccccccgtccgaggtggagggccgtgacctgctgcgctccgtggctgctttccagcgagagctgcttaggaagcggcga

SEQ ID NO: 205061 - DNA, 120 bp, Artificial Sequence
  ENSG00000114923_18 (sequence is synthesized)
gagcgtgaacagaccaaagtcgagatgaccacacggggtggctacacggcccctgggaaagaactgtctttggagttggggggctctgaggcaacccctgaagatgaccccttgctgcgg

SEQ ID NO: 205062 - DNA, 120 bp, Artificial Sequence
  ENSG00000114923_19 (sequence is synthesized)
acgggctcggtatttggggggcttgtgcgggatgtgaggcgccggtacccgcactaccccagtgacctgcgagatgcgctgcactcccagtgtgtggccgctgtgctcttcatctacttc

SEQ ID NO: 205063 - DNA, 120 bp, Artificial Sequence
  ENSG00000114923_20 (sequence is synthesized)
gcagccctcagccctgccatcaccttcggggggctgctgggagagaagaccgaggggctgatgggcgtgtccgagctgatcgtgtccaccgctgtgctcggcgtcctcttctctctgctg

SEQ ID NO: 205064 - DNA, 120 bp, Artificial Sequence
  ENSG00000114923_21 (sequence is synthesized)
ggagctcagccgctgcttgtggttggcttctctgggccgctgcttgtgtttgaggaagccttcttcaagttctgccgagcccaggacctggagtacctcactggccgggtgtgggttggt

SEQ ID NO: 205065 - DNA, 120 bp, Artificial Sequence
  ENSG00000114923_22 (sequence is synthesized)
ctctggctggtggtcttcgtccttgccctggtggccgccgaaggcagcttcctggtccgctacatctcgcctttcacccaggagatctttgcctttctcatctcactcattttcatctac

SEQ ID NO: 205066 - DNA, 120 bp, Artificial Sequence
  ENSG00000114923_23 (sequence is synthesized)
gagaccttctacaagctctacaaggtgttcacagagcacccactgctgccgttctacccccctgagggggccctggaggggtccctggatgctggtctggagccaaatggcagtgccctg

SEQ ID NO: 205067 - DNA, 120 bp, Artificial Sequence
  ENSG00000114923_24 (sequence is synthesized)
ccccccaccgagggcccccccagcccgaggaaccagcccaatacggcactgctctcactcatcctcatgctcgggaccttcttcatagccttcttcctgcgcaagttcaggaacagccgc

SEQ ID NO: 205068 - DNA, 120 bp, Artificial Sequence
  ENSG00000114923_25 (sequence is synthesized)
ttcctggggggcaaggctcgtcgcatcatcggggactttggcatccccatctccatcctggtgatggtcctggtggattactccatcacagacacctacacgcagaagctgacagtgcct

SEQ ID NO: 205069 - DNA, 120 bp, Artificial Sequence
  ENSG00000114923_26 (sequence is synthesized)
acagggctctcagtgacctctcccgataagcgctcgtggttcatcccacccctgggcagtgcccgtcctttcccgccgtggatgatggtggcagccgctgttcccgccctcctcgtcctc

SEQ ID NO: 205070 - DNA, 120 bp, Artificial Sequence
  ENSG00000114923_27 (sequence is synthesized)
atcctgatcttcatggagacacagatcacggcgcttatcgtcagccagaaggcgcggaggctgctcaagggctccggtttccacctggacctgctcctcattggctccctgggggggctc

SEQ ID NO: 205071 - DNA, 120 bp, Artificial Sequence
  ENSG00000114923_28 (sequence is synthesized)
tgtgggctgtttgggttgccctggctcacggctgccacggtccgctccgtcacccatgtcaatgcgttgacagtgatgcgtactgccatcgcgcctggtgacaagccccagatccaggag

SEQ ID NO: 205072 - DNA, 120 bp, Artificial Sequence
  ENSG00000114923_29 (sequence is synthesized)
gtgcgggagcagcgggtcactggtgtgctcatcgccagcctcgtgggcctgtccatcgtcatgggggctgtgctgcgtcggatcccattggctgtgctctttgggatcttcctgtacatg

SEQ ID NO: 205073 - DNA, 120 bp, Artificial Sequence
  ENSG00000114923_30 (sequence is synthesized)
ggggtcacgtccctgtctggtatccagctgtcccagcgtttgttgctcatcctcatgccggcaaaacaccatcctgagcagccctatgtgaccaaggtgaagacgtggcggatgcatctg

SEQ ID NO: 205074 - DNA, 120 bp, Artificial Sequence
  ENSG00000114923_31 (sequence is synthesized)
ttcacctgcatccagctgggctgcatcgcactgctctgggtggtcaagtccacggcggcctcactcgcctttcccttcctgctgctgctcacggtgcctctgaggcattgccttctgccc

SEQ ID NO: 205075 - DNA, 120 bp, Artificial Sequence
  ENSG00000114923_32 (sequence is synthesized)
cggctcttccaggacagggagctgcaggcgctggactcggaagatgctgaaccaaacttcgatgaggatggccaggatgagtacaatgagctgcacatgccagtgtgacccttgaagaca

SEQ ID NO: 205076 - DNA, 120 bp, Artificial Sequence
  ENSG00000114923_33 (sequence is synthesized)
gtgcccctcagagaccccaagaccttagggattgacacctgggcctcaggcagagcccagccctgggctggggggctcctcaggacccagagatgtgcctggaaccactcctgatgccat

SEQ ID NO: 205077 - DNA, 120 bp, Artificial Sequence
  ENSG00000114923_34 (sequence is synthesized)
ggctagagtggcccccctgacttctgcccggggtgttgacctcgcctcacctttcacagaccagaccggcacaggctttgagctcattataaccacactccttgtctcgtgtctgcctca

SEQ ID NO: 205078 - DNA, 80 bp, Artificial Sequence
  ENSG00000114923_35 (sequence is synthesized)
agcccggctctgcgctgcgagaggccggacggcagtcgcggctgcgctcgggagagagcgcgggggacatggggcgcggc

SEQ ID NO: 205079 - DNA, 80 bp, Artificial Sequence
  ENSG00000114923_36 (sequence is synthesized)
cgcgcgtgggggccgcgccggccggggcgggggctccccgctaggccccctcagtggcccctccttctcacctgggtctc

SEQ ID NO: 205080 - DNA, 120 bp, Artificial Sequence
  ENSG00000114923_37 (sequence is synthesized)
ccggcctgggaccccgagaagcccagccgcagctacagcgagcgggactttgagtgtgggtagcctggggacccctagtgcggccgccctcgccaccatcaccttcatcgccaccatcac

SEQ ID NO: 205081 - DNA, 120 bp, Artificial Sequence
  ENSG00000114923_38 (sequence is synthesized)
cgcgctcacctccggcttggtcacccagtgccatcctgtgccggacactgtgctggactctgtgctgggccacatgccgtgttcagtcatcctgcctcccccacccatcgcctgtccgcc

SEQ ID NO: 205082 - DNA, 120 bp, Artificial Sequence
  ENSG00000114923_39 (sequence is synthesized)
ccaccttcagctctggttggacagaagccaccccgtccaggctcccaccttgtaggagagccgaggggtctggtagggagcggaggccgaggtctcggccaccgggagaatgacgagccc

SEQ ID NO: 205083 - DNA, 120 bp, Artificial Sequence
  ENSG00000114923_40 (sequence is synthesized)
actggagaaggaccctgagcccaatggggcactgagccctgggcctggggataccaatagctggggctttgggagggatccagcccccagtcctcgagactcactggccccggaagactt

SEQ ID NO: 205084 - DNA, 120 bp, Artificial Sequence
  ENSG00000114933_0 (sequence is synthesized)
gtacagccccggcagccctgccttcttggctggagagtatattcagggatttccccttaataatcaccgaccctgggagcactttttagtttccaaaataaaaatatgatcctcacccct

SEQ ID NO: 205085 - DNA, 120 bp, Artificial Sequence
  ENSG00000114933_1 (sequence is synthesized)
cttgcttgacagggaaaggctctcgccggagcccaggggggagcagtagcagcggcagccgagcttcctagtccattgccagcgcctctcactctgatctgtcagcccagccgagggaac

SEQ ID NO: 205086 - DNA, 120 bp, Artificial Sequence
  ENSG00000114933_2 (sequence is synthesized)
aggggggaaggagaaaaaaaaaagcagctgaaagacaatctgcttcatcctgattctgcggcattccaaactgtggtatccttgggggttctcttaacattgctatggtgcagaagattt

SEQ ID NO: 205087 - DNA, 120 bp, Artificial Sequence
  ENSG00000114933_3 (sequence is synthesized)
aaaatcagctgatgttcacaaggaatagagtcacgtgatgtatgaagggaaacatatacacttctctgaggttgacaataagcccttgtgctcatatagccccaaactgtgcaagcagag

SEQ ID NO: 205088 - DNA, 120 bp, Artificial Sequence
  ENSG00000114933_4 (sequence is synthesized)
gcgactcaacggctacgccttctgtatcagacacgttctggaggacaagactgcccccttcaagcaatgtgaatatgtggccaagtataacagccaacgctgcaccaaccccatccccaa

SEQ ID NO: 205089 - DNA, 120 bp, Artificial Sequence
  ENSG00000114933_5 (sequence is synthesized)
atcagaggatcgtaggtactgcaacagccacttgcaggtacttggctttatcccgaaaaaagagaggaagaaaaagaatgatcctatagatgaggtgaaggtcaggcaccagatggatac

SEQ ID NO: 205090 - DNA, 120 bp, Artificial Sequence
  ENSG00000114933_6 (sequence is synthesized)
catggcctttagcctgacagtgcccacgttggccttgaagatgcccaacggactggatggaatgtccctctctccacctggggcaagggtccctctccactacctggaaaccgaattgga

SEQ ID NO: 205091 - DNA, 120 bp, Artificial Sequence
  ENSG00000114933_7 (sequence is synthesized)
agacccatttgctttcaatgaggaagatgatgacctaaagaaaggggcaactgtgagaaagaagttgcagagcaagttggcccagaatcggcagcgccagagagagacagagattttaaa

SEQ ID NO: 205092 - DNA, 120 bp, Artificial Sequence
  ENSG00000114933_8 (sequence is synthesized)
agttcgacaagagcactttagtccccctcctgcaccttcacagcagcagcctccgcagcagcactcccacctgtcacctttatctacttctttaaaacctccagcgccaccgcagggttc

SEQ ID NO: 205093 - DNA, 120 bp, Artificial Sequence
  ENSG00000114933_9 (sequence is synthesized)
agtctgcaagtcacctcaacctcagaacaccagcctaccaatgcagggagtggcacccaccacacacactatagcacaagcacggcagttgtctcacaagaggcctctgcccctcctgcc

SEQ ID NO: 205094 - DNA, 120 bp, Artificial Sequence
  ENSG00000114933_10 (sequence is synthesized)
atccagtagggctcccactgtggacccacccaggactgaccggatcctcatgaaagccacagccttctctccacacttctcatgtataagccgactgcagagactggtgaaactgtgcac

SEQ ID NO: 205095 - DNA, 120 bp, Artificial Sequence
  ENSG00000114933_11 (sequence is synthesized)
ccagaaacatcagttggacactgatctgtttccccatttaggtttggactggtctgaagagagcggagaggaaccagaggactcagagcaggcctcgccctaccaggttgcatggtccat

SEQ ID NO: 205096 - DNA, 120 bp, Artificial Sequence
  ENSG00000114933_12 (sequence is synthesized)
ccgggaaaccctcagatatcaaagacatgcgtcagatgatgatgatgcggagagtaggagctccagggtgactcaactttgcacttactttcagcagaaatataagcacctctgccgcct

SEQ ID NO: 205097 - DNA, 120 bp, Artificial Sequence
  ENSG00000114933_13 (sequence is synthesized)
ggagcgggcagaatctcgtcaaaagaaatgccggcatacgtttaggaaagctttgctgcaggcggccagtaaagaaccagaatgcactggtcagttaatacaagaactgcggagagctgc

SEQ ID NO: 205098 - DNA, 120 bp, Artificial Sequence
  ENSG00000114933_14 (sequence is synthesized)
atgcagtcgaaccagcataagccggaccaagctgagggaggtggaaccagcagcatgcagtggaaccgtgaagggtgaacagtgcgctaacaaagcccttccattcaccagacattgttt

SEQ ID NO: 205099 - DNA, 120 bp, Artificial Sequence
  ENSG00000114933_15 (sequence is synthesized)
ccaacatatcctcttgaaccactctcagcagctcttctcaagttgcacagccaagtttgcagatggacagcagtgctctgtgccagtttttgacattacacatcagacacctctgtgtga

SEQ ID NO: 205100 - DNA, 120 bp, Artificial Sequence
  ENSG00000114933_16 (sequence is synthesized)
agaacatgccaaaaaaatggataatttcttgagaggagataactcccgtaaagttcagcaccagcagcagaggaaacccaggaaaaaaaccaagcctcctgcactaaccaaaaaacacaa

SEQ ID NO: 205101 - DNA, 120 bp, Artificial Sequence
  ENSG00000114933_17 (sequence is synthesized)
gaagaagagaaggcgtggacctcgtcgaccccaaaaacccattccacctgcagtcccccaagggaacctcagcatgcccgccagcgtctcactgccagtggaggcctctcacatccggag

SEQ ID NO: 205102 - DNA, 120 bp, Artificial Sequence
  ENSG00000114933_18 (sequence is synthesized)
cccatccacgccagagctgagtgctgatgagttgccggatgacattgccaatgagatcactgacattccacatgacttggaattgaaccaggaggacttttcagatgtcctgccacggct

SEQ ID NO: 205103 - DNA, 120 bp, Artificial Sequence
  ENSG00000114933_19 (sequence is synthesized)
acctgatgacttacaagattttgatttttttgaagggaagaatggagacctcctcccaactaccgaagaggctgaggagcttgaacgggccttgcaggctgtaacttctctcgagtgcct

SEQ ID NO: 205104 - DNA, 120 bp, Artificial Sequence
  ENSG00000114933_20 (sequence is synthesized)
gagtaccattggggtccttgcccagtcagatggtgtgccagtccaggagttgtcagatagaggaataggggtgttctccacaggtactggagcttcaggaatacaatccttgagccgaga

SEQ ID NO: 205105 - DNA, 120 bp, Artificial Sequence
  ENSG00000114933_21 (sequence is synthesized)
ggtgaacacagacctaggggagctattgaatgggcgtatagtacatgataatttttctagtctagagctggatgagaacctgctccgttctgctaccttgtcaaacccacctacacccct

SEQ ID NO: 205106 - DNA, 120 bp, Artificial Sequence
  ENSG00000114933_22 (sequence is synthesized)
ggcagggcagatccaggggcagttctctgccccagccaacgttggccttacttctgccactctgatcagccagagtgcacttggggagagagccttcccaggacagtttcatggacttca

SEQ ID NO: 205107 - DNA, 120 bp, Artificial Sequence
  ENSG00000114933_23 (sequence is synthesized)
tgacggcagccatgcctcccagaggccacatcctgcccagctgctgagcaaggcagatgacctaatcacctcacgacagcaatacagcagtgatcactcacactcctcaccccatggaag

SEQ ID NO: 205108 - DNA, 120 bp, Artificial Sequence
  ENSG00000114933_24 (sequence is synthesized)
ccattatgatagtgagcatgtgccgtctccctacagtgaccatatcacctctccccacacaacatcgtactctggtgataatatggcagctaccttttcagcagagatgcccatcatggc

SEQ ID NO: 205109 - DNA, 120 bp, Artificial Sequence
  ENSG00000114933_25 (sequence is synthesized)
gcagcacttgctcccaacccaacttgaggtgccacttggaggcgtggtaaaccccagaactcactggggcaatctccctgtcaaccttggagacccctctccatttagcaaccttctcgg

SEQ ID NO: 205110 - DNA, 120 bp, Artificial Sequence
  ENSG00000114933_26 (sequence is synthesized)
cgcagatggacatcttctttccacttccctatccacgccacccaccacttcgaactcagagaccacacagcctgccttcgccaccgtgacccccagcagctccagtgtgcttccggggtt

SEQ ID NO: 205111 - DNA, 120 bp, Artificial Sequence
  ENSG00000114933_27 (sequence is synthesized)
accacagaccagcttcagtggcatggggccttctgctgaactaatggcctccacctctcccaagcagcaactccctcagttcagcgcagcctttggccaccagctgagttctcacagtgg

SEQ ID NO: 205112 - DNA, 120 bp, Artificial Sequence
  ENSG00000114933_28 (sequence is synthesized)
cattcctaaggacctgcagcccagccacagctctatagcccctcctacaggcttcacagtaacaggtgccacagctacaagtaccaataatgcatcttctccctttccctcccctaactg

SEQ ID NO: 205113 - DNA, 120 bp, Artificial Sequence
  ENSG00000114933_29 (sequence is synthesized)
agggtgtctgtgtgtttgcaggcaggtggggaacccagtgttttctatctttgtttcctctttagcacccctctccccttttcctaaagaagatataacagatggggatcagaggggcac

SEQ ID NO: 205114 - DNA, 120 bp, Artificial Sequence
  ENSG00000114933_30 (sequence is synthesized)
cccccttcccagttcaatgagtggccctgcagtggacctcgctacagtgttcacatgtgctccttagcactggtgctcattccctcctggcaggcccactccgccccagtggtttcctta

SEQ ID NO: 205115 - DNA, 120 bp, Artificial Sequence
  ENSG00000114933_31 (sequence is synthesized)
gtggttcagcacagtgactggataggattgatttttagcagcaagtcctagaagtggaagatacctcagaataccagtgccctttactatttcctagtattcagatcagtgctttccatt

SEQ ID NO: 205116 - DNA, 120 bp, Artificial Sequence
  ENSG00000114933_32 (sequence is synthesized)
ctgttgccaggtttttacataggtggttctagatagaatgatcttattaattgagttcctgtataagagacagcaaatggtgtgtggcaggtcaagattctgacctagcaccaactgcta

SEQ ID NO: 205117 - DNA, 120 bp, Artificial Sequence
  ENSG00000114933_33 (sequence is synthesized)
aacaccacagtgaggccaggattccattcgtaattgtgatcatgtttaactaaaagaaaaaaatgtgtcttttgactgcctgtgagtatgcgtgtgcccacgcgtgtgtttttgtgcagt

SEQ ID NO: 205118 - DNA, 120 bp, Artificial Sequence
  ENSG00000114933_34 (sequence is synthesized)
gcaggaagcagctgtcccattagtttgatttttttttgttctccccttccccctacttaatgagtataaaactcttacttttctcctgtcctacatctcacagtcctaataaggttggtc

SEQ ID NO: 205119 - DNA, 120 bp, Artificial Sequence
  ENSG00000114933_35 (sequence is synthesized)
cttcttttcctcaagtttcctgaatagggagggtggtggactggtcgtgtgagtagcacaacctttttctgctaaaagttagcccaagaagaaacagaacatagaaagcttggattcccg

SEQ ID NO: 205120 - DNA, 120 bp, Artificial Sequence
  ENSG00000114933_36 (sequence is synthesized)
tcagtgaggtagggatgtcctaaaaagcttgcctgggatgactgcaggctgccggggttctggggcctgatggtcactttgtcttttcagacatttgtttgtttctaaatccctctctca

SEQ ID NO: 205121 - DNA, 120 bp, Artificial Sequence
  ENSG00000114933_37 (sequence is synthesized)
tggaatacatttgcaagatgtaattaaagaaaatattttgatgtgaaaaagcaggataggtcagatagatttgaaaagatgggatctgtcaactccttgatccatcttttgcttttgaat

SEQ ID NO: 205122 - DNA, 120 bp, Artificial Sequence
  ENSG00000114933_38 (sequence is synthesized)
ttttcatgtttacagtagtgattctttggtaagatttgtaaaatgttaagacacttgtagaatcagtgtaccagttgtgaagtgatgtgtaatatctgaaggatacacattttaaagttt

SEQ ID NO: 205123 - DNA, 120 bp, Artificial Sequence
  ENSG00000114933_39 (sequence is synthesized)
ctttcaaagcagaatatggaaattagatataaattttattcgccctttggtccttttaaaataattcaagtacttgggtttaagtaaatttgaaaatagctttgggaaatgtttttaaaa

SEQ ID NO: 205124 - DNA, 120 bp, Artificial Sequence
  ENSG00000114933_40 (sequence is synthesized)
tgccaggattttaggggttaaagatcatatggggtagtttaggaagtttgtgactatgagatgaatttgtgaggtttcttgcctaccttttttcccccccagagaagggtggaactagat

SEQ ID NO: 205125 - DNA, 120 bp, Artificial Sequence
  ENSG00000114933_41 (sequence is synthesized)
tttaaaggcatctctactctgcttttgctgagtagtttcactgtcccttgagataccattggctatttatacctgagtctagtctaattcacatatatatatattttaaaagttgagaga

SEQ ID NO: 205126 - DNA, 120 bp, Artificial Sequence
  ENSG00000114933_42 (sequence is synthesized)
acatacctattgatgtggttcaataattcatttgtcagggaatatttgatcttaattcctttctaataggtagtgattggatgtattttcctacttcctgtatgtaatctctttatgcca

SEQ ID NO: 205127 - DNA, 120 bp, Artificial Sequence
  ENSG00000114933_43 (sequence is synthesized)
tgctagttctaaccagtcccttcttttgaaagcttttctttctctgctttttaaaggaatgatggtgatcagcaggcattatgcagataccacgtgcctgaggttatggaggggaaatgt

SEQ ID NO: 205128 - DNA, 120 bp, Artificial Sequence
  ENSG00000114933_44 (sequence is synthesized)
cacatgactgtatgaaatcattatatgccctattttgtatttattgatgtttctttttgtgggccaaaaatatgtttgtaatatatttagtttttttaaaatcatggtaattgattggaa

SEQ ID NO: 205129 - DNA, 120 bp, Artificial Sequence
  ENSG00000114933_45 (sequence is synthesized)
gatttatttttaatagctttgccttttttgcagagtgcaaaatttctaaattataacttatgtcataaagcaaaattatatttggtatcaccataaatttctattctgaatggtgagaac

SEQ ID NO: 205130 - DNA, 120 bp, Artificial Sequence
  ENSG00000114933_46 (sequence is synthesized)
agataatttgaatatttctcacctgtgagtctatattagtaagcttttttattttaatgtactgtaatgaagtggtcacgagtagttacctcggctcaaaaatgtcatttagtttgttaa

SEQ ID NO: 205131 - DNA, 120 bp, Artificial Sequence
  ENSG00000114933_47 (sequence is synthesized)
actattttcacaaccatcataagcataactagataactgtccattcccagcagttcagtttagtctccattgtgtatttaaaggttgtcgcagagcagcacattgacttcctcatcagcc

SEQ ID NO: 205132 - DNA, 120 bp, Artificial Sequence
  ENSG00000114933_48 (sequence is synthesized)
ctttgacaaggaagggaaagtcgtgggtagtcgatttgaactttttctgtctacttgtcccctcatgttagctgcttgaaattcttcagttatgatacaaagctgagtttgcagtaagtt

SEQ ID NO: 205133 - DNA, 120 bp, Artificial Sequence
  ENSG00000114933_49 (sequence is synthesized)
gcacattttattgtttgcaattttctgttttatgtgcatttaaaagcccttctctgctttctagtaaggaggcatgaaattatcaggaatgttgctagttacagcttcacaccaaaaact

SEQ ID NO: 205134 - DNA, 120 bp, Artificial Sequence
  ENSG00000114933_50 (sequence is synthesized)
ttgagtaaatacattttcgtttggatgcccatgatgaaagctgaggaaagtggttgaggaattatcaacaacaaacttttcctcttattttatctagttcaaaacagatatcaaagtttg

SEQ ID NO: 205135 - DNA, 120 bp, Artificial Sequence
  ENSG00000114933_51 (sequence is synthesized)
caatttgctttgctcttgctgtttcttatgagtccctttttggaagagaggagaacatctataagcccagagagatctgtgtttttcttttacttaatagagccattctcgtctattagt

SEQ ID NO: 205136 - DNA, 120 bp, Artificial Sequence
  ENSG00000114933_52 (sequence is synthesized)
aggaactttgctattaatatgtatagaaaggaatgaagtggcttttactccagaaatatgaaaattagtatcttttaaaatagcacttatgctatcacaaggcaatactggaatgaaaaa

SEQ ID NO: 205137 - DNA, 120 bp, Artificial Sequence
  ENSG00000114933_53 (sequence is synthesized)
caaatcttatataaggtcctaaataggtagaaactagcttttattctagtgttgaacccaggagaaatagtggcaaagaagtttcactctgtttctgcagttctttgggactatttataa

SEQ ID NO: 205138 - DNA, 120 bp, Artificial Sequence
  ENSG00000114933_54 (sequence is synthesized)
aggccagttagattgtgttactgtgatttaatttacaaagttgctgcagttaatggatacattctgtgctctgagaatctgaattccattctaatgtgtgatattcactggctatgatca

SEQ ID NO: 205139 - DNA, 120 bp, Artificial Sequence
  ENSG00000114933_55 (sequence is synthesized)
gtagtatctgaagaaaagatgggctttttctcctttactctctctacataattattaatattattttaattaaagtacttaagacattgttttttcttctgtaaaaatggcttagcaatt

SEQ ID NO: 205140 - DNA, 120 bp, Artificial Sequence
  ENSG00000114933_56 (sequence is synthesized)
tgcacatctgggtaggttatgtagctagtaaacaactcaatagtaagtagcaattatacttaacccaccaagtgacagactatgcaatggaaaaattttctaattatcgtcacatagctt

SEQ ID NO: 205141 - DNA, 120 bp, Artificial Sequence
  ENSG00000114933_57 (sequence is synthesized)
agacagcaaaggattattttctctggtgacctaccatgtgtgatataactgctttataaatgacttcctgagcaatttcatgttggcaggcagtgtggtgtgtctagtgcccctctatga

SEQ ID NO: 205142 - DNA, 120 bp, Artificial Sequence
  ENSG00000114933_58 (sequence is synthesized)
ttactgtctttagtggcttgaggctaaagaaagctgatactttatctttgccaaataattatttataagatttatttttaaataagcccaatctctcacctgcagttaagaatcatcatt

SEQ ID NO: 205143 - DNA, 120 bp, Artificial Sequence
  ENSG00000114933_59 (sequence is synthesized)
ttctgtgactgacactaaagctcttccttatcagagcttgttctcaatctgtgatcacagtccacagtggcaaagacaactctttgattaggaaggaaaccatgtttgggatgcacagag

SEQ ID NO: 205144 - DNA, 120 bp, Artificial Sequence
  ENSG00000114933_60 (sequence is synthesized)
gtgccctgtccatacggttttcttcttacatgaaagaattgacctttctgttgacctataccattctgtttttataaagtgggattagaatttgagcatatctagtaaatgccgtgtggt

SEQ ID NO: 205145 - DNA, 120 bp, Artificial Sequence
  ENSG00000114933_61 (sequence is synthesized)
cagtccgctgatgcttgcccgccgtctttgccgtgccttggcatcctaggggtgctggtgatggtcagtgggcatcatcggtcagcagtgcacgtgtaaggcaatctcctctcctccagg

SEQ ID NO: 205146 - DNA, 120 bp, Artificial Sequence
  ENSG00000114933_62 (sequence is synthesized)
ttagttcagaaggtcgctatgggttggtattgcaaaaagatgagtatatgaacactaaacttattaagaggtttgaaattcattaaaaattagttttcagtttcttcatctttcttttca

SEQ ID NO: 205147 - DNA, 120 bp, Artificial Sequence
  ENSG00000114933_63 (sequence is synthesized)
gacttctttaaaaatactgttcttaatctggtatatatagaaatctaatattatggtcttctaaatggtcaacagaactctccagtttaatgaggcaatttagaggattccttgaaagaa

SEQ ID NO: 205148 - DNA, 120 bp, Artificial Sequence
  ENSG00000114933_64 (sequence is synthesized)
aatttcatcatactgaacagtcctcatttgtatctcttttgttaccagtatttacattgttccaaggatttttttcctgacaaaaaatatatttctcgggagtggagagttttttatata

SEQ ID NO: 205149 - DNA, 120 bp, Artificial Sequence
  ENSG00000114933_65 (sequence is synthesized)
tatatatgaaagaacatagatgtttccccccgcccaatacattaactgaatcttcactggcattctgtagaaaagttaaaacagtttaataatgtcttaacatctttatacattttccta

SEQ ID NO: 205150 - DNA, 120 bp, Artificial Sequence
  ENSG00000114933_66 (sequence is synthesized)
tattctggaggaaaccagaatcatgtttagtagattaaagtaacattttaaatactacctttccaataatttgtaataaaataccagtgaaggacatgtttggatatctgttaagcattt

SEQ ID NO: 205151 - DNA, 120 bp, Artificial Sequence
  ENSG00000114933_67 (sequence is synthesized)
ttccctgactaatgaattaggaaagaaaacataaaacataaatgaatagttatgtctcttctaataaacagtgtcattaatgctgcagttgtgggtcaaacttagggagccttatttcta

SEQ ID NO: 205152 - DNA, 120 bp, Artificial Sequence
  ENSG00000114933_68 (sequence is synthesized)
aatagcaaaaattctgttttcacttcagcccttatttttttttgttagtttttctctgcactgtgatacagagctaataagaggaaatgtgacgtttcagagagagagcaagcaaattgg

SEQ ID NO: 205153 - DNA, 120 bp, Artificial Sequence
  ENSG00000114933_69 (sequence is synthesized)
gtatgacttttttaccctatgttccccaatactggggatgtttggctactttgaacagcagtttttagtgatctaaagtttagatcaatactcgtataagagaaaaatctaactctcagt

SEQ ID NO: 205154 - DNA, 120 bp, Artificial Sequence
  ENSG00000114933_70 (sequence is synthesized)
gagctccatagggcagcacagctttccatcttctctttcgccttcttgcgtctgcccaccacagtcccgaagaatgcacacgcacatatgatctgtacccatcccgcccgaagagtcata

SEQ ID NO: 205155 - DNA, 120 bp, Artificial Sequence
  ENSG00000114933_71 (sequence is synthesized)
gaatcctcttctttcacttgtttcttttttcttcgtttgtttgtttttgtttgtttgttttttaagctggggaccactgaagtaagctctgtatgcacccaaagttccccttggaaaaat

SEQ ID NO: 205156 - DNA, 120 bp, Artificial Sequence
  ENSG00000114933_72 (sequence is synthesized)
tttcaacacgcagtgcagaaggctccagtgcagctaaatgccacaccattggttctacctgggggaatagactgatttgccctaaaatgactccaacctgcatcattaaggtacagttgg

SEQ ID NO: 205157 - DNA, 120 bp, Artificial Sequence
  ENSG00000114933_73 (sequence is synthesized)
ctccagtggattagtgctgaaatgatgggaagtctgacacttgttgacattgtcttcatctgtttggaagggttgaatctgttcctctcaacagtgatagttcttttcactgtatagtat

SEQ ID NO: 205158 - DNA, 120 bp, Artificial Sequence
  ENSG00000114933_74 (sequence is synthesized)
tgagtatgtctcagggattccttgtggaaattagggcagtttttaaaataagaaaatagttttaaaagaaactaaaggtgactcatcattgaagagagcggaagaaagaggaaacatttg

SEQ ID NO: 205159 - DNA, 120 bp, Artificial Sequence
  ENSG00000114933_75 (sequence is synthesized)
gttttgtagcccacagtgtcttgcataggactttttcctttctcctccaggctctcatctcagcttcagaatacagaatcctttcccatcacgcacagctttaaaacttttatttaaaaa

SEQ ID NO: 205160 - DNA, 120 bp, Artificial Sequence
  ENSG00000114933_76 (sequence is synthesized)
tttccttccccaatgagctttcagaatacttattgtagattttaagagaaaaggtatattaatttatgctattaacatcacctcataaattataagttttatactaaagctgtatcgagt

SEQ ID NO: 205161 - DNA, 120 bp, Artificial Sequence
  ENSG00000114933_77 (sequence is synthesized)
gtaatgaattatgttgcctatgtgtttaatagctaaatatatatgagcttttttttttttttttttttttgacaaaacaaactagtgaagcacctttttacactggatctctgccgtgtc

SEQ ID NO: 205162 - DNA, 120 bp, Artificial Sequence
  ENSG00000114933_78 (sequence is synthesized)
aaggtgtatagctatcctttgctaccttgcagatatataaaataaaaggatatcctggggcctcaaaatgtagaacacctttagaccatttataactgttcctagaactgttgagaatca

SEQ ID NO: 205163 - DNA, 120 bp, Artificial Sequence
  ENSG00000114933_79 (sequence is synthesized)
tgttctttagtaaatgatctgtggtttacacttaagatggctagaagcttagttacagggtacatagaaatacatagatcaagtaaaactccaactactgtagctggaatttgtaaacta

SEQ ID NO: 205164 - DNA, 120 bp, Artificial Sequence
  ENSG00000114933_80 (sequence is synthesized)
agtttgtaagacctcttttatttcctatggagttattctttaatttacagtttattctgtaagttgggaagtaaaatagagaaaataataaatctagatgttctcagtgtcttattcagg

SEQ ID NO: 205165 - DNA, 120 bp, Artificial Sequence
  ENSG00000114933_81 (sequence is synthesized)
aactttttatccctcctcactaaggaattcccactgtgactttaaaatagaactaaattacttgtgtgcatgtatatgtctgtattttttacacacatgcaaaaatatacattgggggca

SEQ ID NO: 205166 - DNA, 120 bp, Artificial Sequence
  ENSG00000114933_82 (sequence is synthesized)
cgtgtgtgagagatatgaatgtgtgcttatataaaaatagataaaggtaaccgaatgtattgtagaaacatgatttatttagttgagggtattggagttactttctcattgtctctgttg

SEQ ID NO: 205167 - DNA, 120 bp, Artificial Sequence
  ENSG00000114933_83 (sequence is synthesized)
tataaatacaccaaattaatcattatgttatcttatgttaaaaggctagctctgatatcatgtgcattttatgttaacctttggattaacttatattatgctatgttcataaaatgacat

SEQ ID NO: 205168 - DNA, 120 bp, Artificial Sequence
  ENSG00000114933_84 (sequence is synthesized)
gagaaacaggaggttctaagatcagcctctcactttcgagcataaaaataagagagggagacagacagccccagacatgagctgtgtttatctattgtggtgatgggaccacagatctat

SEQ ID NO: 205169 - DNA, 120 bp, Artificial Sequence
  ENSG00000114933_85 (sequence is synthesized)
tgaatcttttttatgttaattatagatttctttatattcgagtaagaaaatattgttgatcatcttttcttggtgaagttaagaaaaagtataggcctttcataaacaatttttggaagg

SEQ ID NO: 205170 - DNA, 120 bp, Artificial Sequence
  ENSG00000114933_86 (sequence is synthesized)
ggctgctttgtttaaggagttggtgggatcatttcaccgtgcatatttcaaagctggggtgatttcatttatttccaaaatttttcaaaaaacttttactcagttctgctgttatttatt

SEQ ID NO: 205171 - DNA, 120 bp, Artificial Sequence
  ENSG00000114933_87 (sequence is synthesized)
aacttaagagtgctcccatccccatatttcagctataggaaaattgtgctacccctgattcatatggaattaaaaaaaaatacatccctttattttgagttttaagttgttattttgcta

SEQ ID NO: 205172 - DNA, 120 bp, Artificial Sequence
  ENSG00000114933_88 (sequence is synthesized)
tacatttattactggagtatctggtggtctgaaatagtcaaaagtagagttggtattaaatgttccaatgacatttatttttaatacttaaaaaatcatgtactttgaaatatgtcaaag

SEQ ID NO: 205173 - DNA, 120 bp, Artificial Sequence
  ENSG00000114933_89 (sequence is synthesized)
caacttctgataatatacctgaatttgtagttgtctcttgagcatcatttacttcatcttagatatagtgaagatctaggaaagctctatatgctgttcttttctacagttgtatttttg

SEQ ID NO: 205174 - DNA, 120 bp, Artificial Sequence
  ENSG00000114933_90 (sequence is synthesized)
cagcatctcctggtttcattcactcttgttttgggatttttttttagatctgcatatttcttgtacatatgcatgcaaatgaaagaagggagtttgtactggtgccatttctcccttcag

SEQ ID NO: 205175 - DNA, 120 bp, Artificial Sequence
  ENSG00000114933_91 (sequence is synthesized)
ttgctggttaatgggatttgctagaaaaaattctcccggttgaagggtgaaaacagacccttatgtgtatatctgtacagagatgtgtatatgggatgtggtggcactttgctgaatgtg

SEQ ID NO: 205176 - DNA, 120 bp, Artificial Sequence
  ENSG00000114933_92 (sequence is synthesized)
aacttgccttgtcaatggaaagattgaaaagtattatgtttatttatacatttgtataaatctatatatacacgtatgtatatgtgtgtgtatagataaagctatatacatatatttccc

SEQ ID NO: 205177 - DNA, 120 bp, Artificial Sequence
  ENSG00000114933_93 (sequence is synthesized)
ttaaaaatgtgtgtgtataataggtaaacagcctttgttaagcaagattaatgtctatggaaagttctggattattctgtaagccagaggaggtgacagtctagagtacatcatcagaac

SEQ ID NO: 205178 - DNA, 120 bp, Artificial Sequence
  ENSG00000114933_94 (sequence is synthesized)
atactaaaatggaagtcctttggattatagttttgtttatggatattacacaatgaatgcttgtctgaacagttcttacttgccagttccactattcttcatcttcaccaccttctactg

SEQ ID NO: 205179 - DNA, 120 bp, Artificial Sequence
  ENSG00000114933_95 (sequence is synthesized)
gtcagtctttcatcacttaaaaaaaaaaaaaaaatcacacatcattgtggtttttttcccccttaattctgtctcttctagccagaagcatctggcttaagcatatttcatcaacttctc

SEQ ID NO: 205180 - DNA, 120 bp, Artificial Sequence
  ENSG00000114933_96 (sequence is synthesized)
tgttatttcttttaaagatctttatctctgaaattttcccagaagatacaagttttggtaatattatcaataggaattttgagacttgggcattcatctttgtctcaaaaacaaacagaa

SEQ ID NO: 205181 - DNA, 120 bp, Artificial Sequence
  ENSG00000114933_97 (sequence is synthesized)
agccaaccttcaaataaaacaaatttgaaagttttagctcaataatttggggacattttacttaaattacaaaagaacataattatgattttatgatcgatattagtgttaggtttattt

SEQ ID NO: 205182 - DNA, 120 bp, Artificial Sequence
  ENSG00000114933_98 (sequence is synthesized)
ccacacttactgtcattaatttgtcatttacatatttttatttgctttgtagtttaatcataacttcaccatttacattttaatggaaagcatacaaggtcacatgttagcctcttgaat

SEQ ID NO: 205183 - DNA, 120 bp, Artificial Sequence
  ENSG00000114933_99 (sequence is synthesized)
tctgtaactaactcatttttctcatgatgaaactgctttgatgaattcctgtgtgatgaattctgctatatttccttttgacttttctcagtttgtgacattctgtattaactttgctgc

SEQ ID NO: 205184 - DNA, 120 bp, Artificial Sequence
  ENSG00000114933_100 (sequence is synthesized)
agctctctagaaaacttgcatccctatatattgtgcctttaaagctcttatgcacacacagacaaaagtgtatatatacatgtcagagcatgtgtacatatgctttcgtatgtactcaca

SEQ ID NO: 205185 - DNA, 120 bp, Artificial Sequence
  ENSG00000114933_101 (sequence is synthesized)
cagtatgtctctagtatatattgtgggagtagatatatagatattcaaaggcaatgaaatattgctctccagatatatatgtatataaatagtgttgatataactgtatatacacatgta

SEQ ID NO: 205186 - DNA, 120 bp, Artificial Sequence
  ENSG00000114933_102 (sequence is synthesized)
tatgtatgagttttaaatggcaatcttttacatttagcaaaatgctgcccctactggaatattgtcactgcagtggcagttgtatgtaatgatttaaaatacattatcaaaagttattta

SEQ ID NO: 205187 - DNA, 120 bp, Artificial Sequence
  ENSG00000114933_103 (sequence is synthesized)
aagaacatttaaagtctcatctaaagacatccacacactatttatttatcttccttttccttttattgttgtgtttttcttaactgaaagggagactgtcattttaaaaatgccatctgt

SEQ ID NO: 205188 - DNA, 120 bp, Artificial Sequence
  ENSG00000114933_104 (sequence is synthesized)
cccatgagagtaagaaagagctggagattcacttgaggagctttgtgcatttttcctctctctgaagtggagatgttccacagaccagactgtttatttcacttataaagcaatcctaat

SEQ ID NO: 205189 - DNA, 120 bp, Artificial Sequence
  ENSG00000114933_105 (sequence is synthesized)
atttccgttagtgtatgtcagccaccatctcctagatcaacttaattcaccaatttgcctcctcctttcattaataaataatgattattgagatcattttgcctgggggaagttaactac

SEQ ID NO: 205190 - DNA, 120 bp, Artificial Sequence
  ENSG00000114933_106 (sequence is synthesized)
tcccatgctgcagggaaatatatcacctaattgttattttgccttgttcaaaattcaaatttgaaagaaggcagctctctcatgaagctgtcttaagcacattttagttaagggccctcc

SEQ ID NO: 205191 - DNA, 120 bp, Artificial Sequence
  ENSG00000114933_107 (sequence is synthesized)
tctttctttcttttttttttttttttgcgagttccaagttgcatgtgcttgaaatagatttaattcttattccccacagtttaggtatttttcattagtacatcaatttgacacactgaa

SEQ ID NO: 205192 - DNA, 120 bp, Artificial Sequence
  ENSG00000114933_108 (sequence is synthesized)
catcaatttgacacactgaatgcaagactattaaggaagaacgattaaatattattttattttgtgaagagttggcagcagattacatctcaagaacttgcagagagaggaaggtagatg

SEQ ID NO: 205193 - DNA, 120 bp, Artificial Sequence
  ENSG00000114933_109 (sequence is synthesized)
gacaatcctaaattgtaagatgttacaaaaaacagtgaagtaagagtactcctgaagactaaaatagagaggctggggtttgagccattttactgagtagcttagctggaacctgatatc

SEQ ID NO: 205194 - DNA, 120 bp, Artificial Sequence
  ENSG00000114933_110 (sequence is synthesized)
agaagtagcctttaacaaaaagcctcttggcaattgtatggtactaacaactagagtactgaagtgtaagttgaaaccaagttgcagtgggaaatcaaaggtgaggtagcttatttgaaa

SEQ ID NO: 205195 - DNA, 120 bp, Artificial Sequence
  ENSG00000114933_111 (sequence is synthesized)
ccagcaaatgagacaggttggacagttttaaaatctcttctaacaaagaaactgcacggtagcaaggactagcggttctcaaagcccttctttttcagtgttctcattcaccttggcacc

SEQ ID NO: 205196 - DNA, 120 bp, Artificial Sequence
  ENSG00000114933_112 (sequence is synthesized)
caagtatgtttaacaggccatgcattaaaaataaatacaaaaatataaaagccgcttaaagggaacttacaaactgacaatctctcctctgtatttgtgttcatagtggctgggagttta

SEQ ID NO: 205197 - DNA, 120 bp, Artificial Sequence
  ENSG00000114933_113 (sequence is synthesized)
attatatgcacaaaagttaggagccacttgtttctgcacagactgtaggagcaagatgaggagatgggcaggttttggtaagagcccccagttctggtggacaggcatacttgtggcatt

SEQ ID NO: 205198 - DNA, 120 bp, Artificial Sequence
  ENSG00000114933_114 (sequence is synthesized)
gggtgcggcattgctgggaggaccacgtcttgggaggcgattgacttttggtttgtaatttccctttaaacaagaagagatggctcacattttccatatatatctcaatgaatgtactgt

SEQ ID NO: 205199 - DNA, 120 bp, Artificial Sequence
  ENSG00000114933_115 (sequence is synthesized)
attactgttttaaaaatttgatgaaataataatgaattggtctccttttgttatctggtccttgtttaatttgtttaagggtttttgtatacaaaagtttacatttttatgtatattttt

SEQ ID NO: 205200 - DNA, 120 bp, Artificial Sequence
  ENSG00000114933_116 (sequence is synthesized)
cttgtgtaaaaactgatgtaatatgtgtatgaaacactgtatgtattatctgtatatagtgtgacaaaatcatttttctttctttcttttggatgtattaataaatcttgctgtgaagta

SEQ ID NO: 205201 - DNA, 120 bp, Artificial Sequence
  ENSG00000114933_117 (sequence is synthesized)
ctggcccccctttgctctgcctccaagatggtaggaaagttgtcgtttcggagggcagaggagcagctctctggtgttatgtcctcgcagtgcctgtagtggtgctgtaggaggctgctg

SEQ ID NO: 205202 - DNA, 84 bp, Artificial Sequence
  ENSG00000114933_118 (sequence is synthesized)
gcccagccgagggaacaggggggaaggagaaaaaaaaaagcagctgaaagatcttcactctcacccaggctggagtctccgggt

SEQ ID NO: 205203 - DNA, 120 bp, Artificial Sequence
  ENSG00000114942_0 (sequence is synthesized)
cgcagttccgccggaagtggccccagcctcgaggccgggcgtcttcggtcatctccggcgcttctagggctggttcccgtcatcttcgggagccgtggagctctcggatacagccgacac

SEQ ID NO: 205204 - DNA, 120 bp, Artificial Sequence
  ENSG00000114942_1 (sequence is synthesized)
catgggtttcggagacctgaaaagccctgccggcctccaggtgctcaacgattacctggcggacaagagctacatcgaggggtatgtgccatcacaagcagatgtggcagtatttgaagc

SEQ ID NO: 205205 - DNA, 120 bp, Artificial Sequence
  ENSG00000114942_2 (sequence is synthesized)
cgtgtccagcccaccgcctgccgacttgtgtcatgccctacgttggtataatcacatcaagtcttacgaaaaggaaaaggccagcctgccaggagtgaagaaagctttgggcaaatatgg

SEQ ID NO: 205206 - DNA, 120 bp, Artificial Sequence
  ENSG00000114942_3 (sequence is synthesized)
gccgatgtggaagacactacaggaagtggagctacagatagtaaagatgatgatgacattgacctctttggatctgatgatgaggaggaaagtgaagaagcaaagaggctaagggaagaa

SEQ ID NO: 205207 - DNA, 120 bp, Artificial Sequence
  ENSG00000114942_4 (sequence is synthesized)
cgtcttgcacaatatgaatcaaagaaagccaaaaaacctgcacttgttgccaagtcttccatcttactagatgtgaaaccttgggatgatgagacagatatggcgaaattagaggagtgc

SEQ ID NO: 205208 - DNA, 120 bp, Artificial Sequence
  ENSG00000114942_5 (sequence is synthesized)
gtcagaagcattcaagcagacggcttagtctggggctcatctaaactagttccagtgggatacggaattaagaaacttcaaatacagtgtgtagttgaagatgataaagttggaacagat

SEQ ID NO: 205209 - DNA, 120 bp, Artificial Sequence
  ENSG00000114942_6 (sequence is synthesized)
atgctggaggagcagatcactgcttttgaggactatgtgcagtccatggatgtggctgctttcaacaagatctaaaatccatcctggatcatggcatttaaataaaagattgaaagatta

SEQ ID NO: 205210 - DNA, 120 bp, Artificial Sequence
  ENSG00000114942_7 (sequence is synthesized)
gccggaagtggccccagcctcgaggccgggcgtcttcggtcatctccggcgcttctagggctggttcccgtcatcttcgggagccgtggagcgtggggcgcccacaatttgcgcgctctc

SEQ ID NO: 205211 - DNA, 120 bp, Artificial Sequence
  ENSG00000114942_8 (sequence is synthesized)
tccggcgcttctagggctggttcccgtcatcttcgggagccgtggaggtacgaacttaagacatgcctattttattaatttacttccaaacgcaacgaaaggtccatggacaatttgtgg

SEQ ID NO: 205212 - DNA, 120 bp, Artificial Sequence
  ENSG00000114942_9 (sequence is synthesized)
gccatttaattcagggcccccaattcgtacgtggagaagtgggaatgcaaaagtactttgacctttaaccttcggtccggcgcggtggagggaaacgcctccgtctctatataaggaatt

SEQ ID NO: 205213 - DNA, 120 bp, Artificial Sequence
  ENSG00000114942_10 (sequence is synthesized)
gtaaaatcatctttgtatagagctgaagaataagactgctctcgaagtttatcaggatgttcacatgacaaaactggacccaggctactttagttttgttgggatattgtaagctaaatt

SEQ ID NO: 205214 - DNA, 120 bp, Artificial Sequence
  ENSG00000114942_11 (sequence is synthesized)
tttctgtaaccttagaaggccaagagactgaagccctccattttttcacagaacaggtagaacatggacagcagcaattcaacttttccccacactgccctgccaatgtgcctcgacctt

SEQ ID NO: 205215 - DNA, 120 bp, Artificial Sequence
  ENSG00000114942_12 (sequence is synthesized)
gacctggggggcccacctctggggtgagagggtggctcattcattcagtccttggccattcttctgaaactgccaacaagggtggaagtttggggaagtggactccagttcactaagaat

SEQ ID NO: 205216 - DNA, 120 bp, Artificial Sequence
  ENSG00000114942_13 (sequence is synthesized)
ggaactgagcatacttaatgaaatctcaaacagaaatgttcatactgaaagagtaaatcatagtgagtattgaaaataatgtctcacatggtactaatgcttgtcgggtgaggagttgaa

SEQ ID NO: 205217 - DNA, 120 bp, Artificial Sequence
  ENSG00000114942_14 (sequence is synthesized)
ttccacagctactggtctgcagctgttcttatggtagcagttgtggcattcctctgtgggaaagaaactgttaacacaaacacctctttcttagcaaaacagaaagtgggtatatatgtg

SEQ ID NO: 205218 - DNA, 120 bp, Artificial Sequence
  ENSG00000114942_15 (sequence is synthesized)
tgacagacacaagatgtatctgtagttttgtttggctaaggagatagtctcaaaacaaattgagatggatttgtttgtgtcttggagtagggtgaaaaaaatacaattcattatttgaat

SEQ ID NO: 205219 - DNA, 120 bp, Artificial Sequence
  ENSG00000114942_16 (sequence is synthesized)
gcgctctctttctgctgctccccagctctcggatacagccgacaccatgggtttcggagacctgaaaagccctgccggcctccaggtgtgtgtgaatgtttctgtgtccttggcaggtat

SEQ ID NO: 205220 - DNA, 120 bp, Artificial Sequence
  ENSG00000114948_0 (sequence is synthesized)
atcctcaggcccggcggcagcccccgcagtcgctgaagcggccgcgcccgccgggggagggagtagccgctggggaggctccaagttggcggagcggcgaggacccctggactcctctgc

SEQ ID NO: 205221 - DNA, 80 bp, Artificial Sequence
  ENSG00000114948_1 (sequence is synthesized)
tcctctgcgtcccgccccgggagtggctgcgaggctaggcgagccgggaaagggggcgccgcccagccccgagccccgcg

SEQ ID NO: 205222 - DNA, 120 bp, Artificial Sequence
  ENSG00000114948_2 (sequence is synthesized)
agctagcccggcgctctcgccggccacacggagcggcgcccgggagctatgagccatgaagccgcccggcagcagctcgcggcagccgcccctggcgggctgcagccttgccggcgcttc

SEQ ID NO: 205223 - DNA, 80 bp, Artificial Sequence
  ENSG00000114948_3 (sequence is synthesized)
cccaacgcggccccgccggctcggtgcctgccagcgccccggcccgcacgccgccctgccgcctgcttctcgtccttctc

SEQ ID NO: 205224 - DNA, 120 bp, Artificial Sequence
  ENSG00000114948_4 (sequence is synthesized)
tccttctcctgctgcctccgctcgccgcctcgtcccggccccgcgcctggggggctgctgcgcccagcgctccgcattggaatgaaactgcagaaaaaaatttgggagtcctggcagatg

SEQ ID NO: 205225 - DNA, 120 bp, Artificial Sequence
  ENSG00000114948_5 (sequence is synthesized)
aagacaatacattgcaacagaatagcagcagtaatatcagttacagcaatgcaatgcagaaagaaatcacactgccttcaagactcatatattacatcaaccaagactcggaaagccctt

SEQ ID NO: 205226 - DNA, 120 bp, Artificial Sequence
  ENSG00000114948_6 (sequence is synthesized)
atcacgttcttgacacaaaggcaagacaccagcaaaaacataataaggctgtccatctggcccaggcaagcttccagattgaagccttcggctccaaattcattcttgacctcatactga

SEQ ID NO: 205227 - DNA, 120 bp, Artificial Sequence
  ENSG00000114948_7 (sequence is synthesized)
acaatggtttgttgtcttctgattatgtggagattcactacgaaaatgggaaaccacagtactctaagggtggagagcactgttactaccatggaagcatcagaggcgtcaaagactcca

SEQ ID NO: 205228 - DNA, 120 bp, Artificial Sequence
  ENSG00000114948_8 (sequence is synthesized)
aggtggctctgtcaacctgcaatggacttcatggcatgtttgaagatgataccttcgtgtatatgatagagccactagagctggttcatgatgagaaaagcacaggtcgaccacatataa

SEQ ID NO: 205229 - DNA, 120 bp, Artificial Sequence
  ENSG00000114948_9 (sequence is synthesized)
tccagaaaaccttggcaggacagtattctaagcaaatgaagaatctcactatggaaagaggtgaccagtggccctttctctctgaattacagtggttgaaaagaaggaagagagcagtga

SEQ ID NO: 205230 - DNA, 120 bp, Artificial Sequence
  ENSG00000114948_10 (sequence is synthesized)
atccatcacgtggtatatttgaagaaatgaaatatttggaacttatgattgttaatgatcacaaaacgtataagaagcatcgctcttctcatgcacataccaacaactttgcaaagtccg

SEQ ID NO: 205231 - DNA, 120 bp, Artificial Sequence
  ENSG00000114948_11 (sequence is synthesized)
tggtcaaccttgtggattctatttacaaggagcagctcaacaccagggttgtcctggtggctgtagagacctggactgagaaggatcagattgacatcaccaccaaccctgtgcagatgc

SEQ ID NO: 205232 - DNA, 120 bp, Artificial Sequence
  ENSG00000114948_12 (sequence is synthesized)
tccatgagttctcaaaataccggcagcgcattaagcagcatgctgatgctgtgcacctcatctcgcgggtgacatttcactataagagaagcagtctgagttactttggaggtgtctgtt

SEQ ID NO: 205233 - DNA, 120 bp, Artificial Sequence
  ENSG00000114948_13 (sequence is synthesized)
ctcgcacaagaggagttggtgtgaatgagtatggtcttccaatggcagtggcacaagtattatcgcagagcctggctcaaaaccttggaatccaatgggaaccttctagcagaaagccaa

SEQ ID NO: 205234 - DNA, 120 bp, Artificial Sequence
  ENSG00000114948_14 (sequence is synthesized)
aatgtgactgcacagaatcctggggtggctgcatcatggaggaaacaggggtgtcccattctcgaaaattttcaaagtgcagcattttggagtatagagactttttacagagaggaggtg

SEQ ID NO: 205235 - DNA, 120 bp, Artificial Sequence
  ENSG00000114948_15 (sequence is synthesized)
gagcctgccttttcaacaggccaacaaagctatttgagcccacggaatgtggaaatggatacgtggaagctggggaggagtgtgattgtggttttcatgtggaatgctatggattatgct

SEQ ID NO: 205236 - DNA, 120 bp, Artificial Sequence
  ENSG00000114948_16 (sequence is synthesized)
gtaagaaatgttccctctccaacggggctcactgcagcgacgggccctgctgtaacaatacctcatgtctttttcagccacgagggtatgaatgccgggatgctgtgaacgagtgtgata

SEQ ID NO: 205237 - DNA, 120 bp, Artificial Sequence
  ENSG00000114948_17 (sequence is synthesized)
ttactgaatattgtactggagactctggtcagtgcccaccaaatcttcataagcaagacggatatgcatgcaatcaaaatcagggccgctgctacaatggcgagtgcaagaccagagaca

SEQ ID NO: 205238 - DNA, 120 bp, Artificial Sequence
  ENSG00000114948_18 (sequence is synthesized)
accagtgtcagtacatctggggaacaaaggctgcagggtctgacaagttctgctatgaaaagctgaatacagaaggcactgagaagggaaactgcgggaaggatggagaccggtggattc

SEQ ID NO: 205239 - DNA, 120 bp, Artificial Sequence
  ENSG00000114948_19 (sequence is synthesized)
agtgcagcaaacatgatgtgttctgtggattcttactctgtaccaatcttactcgagctccacgtattggtcaacttcagggtgagatcattccaacttccttctaccatcaaggccggg

SEQ ID NO: 205240 - DNA, 120 bp, Artificial Sequence
  ENSG00000114948_20 (sequence is synthesized)
tgattgactgcagtggtgcccatgtagttttagatgatgatacggatgtgggctatgtagaagatggaacgccatgtggcccgtctatgatgtgtttagatcggaagtgcctacaaattc

SEQ ID NO: 205241 - DNA, 120 bp, Artificial Sequence
  ENSG00000114948_21 (sequence is synthesized)
aagccctaaatatgagcagctgtccactcgattccaagggtaaagtctgttcgggccatggggtgtgtagtaatgaagccacctgcatttgtgatttcacctgggcagggacagattgca

SEQ ID NO: 205242 - DNA, 120 bp, Artificial Sequence
  ENSG00000114948_22 (sequence is synthesized)
gtatccgggatccagttaggaaccttcacccccccaaggatgaaggacccaagggtcctagtgccaccaatctcataataggctccatcgctggtgccatcctggtagcagctattgtcc

SEQ ID NO: 205243 - DNA, 120 bp, Artificial Sequence
  ENSG00000114948_23 (sequence is synthesized)
ttgggggcacaggctggggatttaaaaatgtcaagaagagaaggttcgatcctactcagcaaggccccatctgaatcagctgcgctggatggacaccgccttgcactgttggattctggg

SEQ ID NO: 205244 - DNA, 120 bp, Artificial Sequence
  ENSG00000114948_24 (sequence is synthesized)
tatgacatactcgcagcagtgttactggaactattaagtttgtaaacaaaacctttgggtggtaatgactacggagctaaagttggggtgacaaggatggggtaaaagaaaactgtctct

SEQ ID NO: 205245 - DNA, 120 bp, Artificial Sequence
  ENSG00000114948_25 (sequence is synthesized)
tttggaaataatgtcaaagaacacctttcaccacctgtcagtaaacgggggagggggcaaaagaccatgctataaaaagaactgttccagaatcttttttttccctaatggacgaaggaa

SEQ ID NO: 205246 - DNA, 120 bp, Artificial Sequence
  ENSG00000114948_26 (sequence is synthesized)
ctaaatgatttggcatgatttttttttctttactaccgatgacaaactccagtggcatgaagatctaattttcaaaagggtaaaaactgcatggcatatatacaacaagctagcaagcca

SEQ ID NO: 205247 - DNA, 120 bp, Artificial Sequence
  ENSG00000114948_27 (sequence is synthesized)
attctcagcaaaacctgcaacagaattcctaaagtgaagatgacagatgaacacaaagaagctgcctgggcctcttcacttaaacatgtccccacaccccatcctctcggagccccactt

SEQ ID NO: 205248 - DNA, 120 bp, Artificial Sequence
  ENSG00000114948_28 (sequence is synthesized)
cttaccccccacctcccaccctctataatccccactccccattggagaccaggccagggcagaactccacggaccttgctcttgttgattcactttccccattgtgttttctcctggact

SEQ ID NO: 205249 - DNA, 120 bp, Artificial Sequence
  ENSG00000114948_29 (sequence is synthesized)
gagcatcctttggaaatgggagctggaatttgaacaatgatgctattgtatagttcttttataaatgtaaatatggaaataagagattttgacacatcattttcacttgtctgtattgag

SEQ ID NO: 205250 - DNA, 120 bp, Artificial Sequence
  ENSG00000114948_30 (sequence is synthesized)
atattttccttgtaaaggttctctgtaaacttgagttgattttttgctccccatcttttttgtttcttgtctctctttctctgtctctgtccttctctcttgtaacgtgttatacaatga

SEQ ID NO: 205251 - DNA, 120 bp, Artificial Sequence
  ENSG00000114948_31 (sequence is synthesized)
ctcttgggcttgcttaaaaagacagatatagccacagatgcagggagtttgggcacaaaacacgtgcagtttaaagttggtgtgcgttaaaccaaaaataaaaggggggacataaacaac

SEQ ID NO: 205252 - DNA, 120 bp, Artificial Sequence
  ENSG00000114948_32 (sequence is synthesized)
aaaataacccatatcaaagacacaaaattatgtaaatggaaatatatgtactaagtttcgaaaattttttgatgtcattataaacctatgtaaataatgtaagaaagtagacaccctttc

SEQ ID NO: 205253 - DNA, 120 bp, Artificial Sequence
  ENSG00000114948_33 (sequence is synthesized)
agattaatcacaaaagtgccaagctcatgattttggttttcggttttgacaattttctttccctgtctttaatgtgaaaggaggataaacttaaagccttaaataaaaaaatttttttaa

SEQ ID NO: 205254 - DNA, 120 bp, Artificial Sequence
  ENSG00000114948_34 (sequence is synthesized)
atgttaaaagcttggaaaaaattaagctttccattttatttgtatttgttagtgtcaatatttcatccatgctcattttcctgcctcaaaatatatatggtagaaccctattggaaaagt

SEQ ID NO: 205255 - DNA, 120 bp, Artificial Sequence
  ENSG00000114948_35 (sequence is synthesized)
ggtaatgggaatagaaggagcagttacctttgtatccgcattgttaaaataggcttttatgctgtgctgtgctttcaagaaaccttgtttgacctctggcattttactgatcagtggacc

SEQ ID NO: 205256 - DNA, 120 bp, Artificial Sequence
  ENSG00000114948_36 (sequence is synthesized)
gttgcactggattataatgggattctactatatacaaatccacattgttcttctccctccagccagatttgcagatgtaatctgggctttccaagtccctctgagtttccttcactttta

SEQ ID NO: 205257 - DNA, 120 bp, Artificial Sequence
  ENSG00000114948_37 (sequence is synthesized)
ctgatttttttcttctaaatatggtcaagatagcttctgtcacatgttaagtaaataagctgaagaaatttggtcccggctttgttttaatgtacaaaccggtatgtgatcacttcagtg

SEQ ID NO: 205258 - DNA, 120 bp, Artificial Sequence
  ENSG00000114948_38 (sequence is synthesized)
agcatccctctatagatgggctttagtaaagactgtcccaaagagcccctacttctctaatgcccccccccttttttttttaggaaaagaacatgcagttttactcatcacttcttcatg

SEQ ID NO: 205259 - DNA, 120 bp, Artificial Sequence
  ENSG00000114948_39 (sequence is synthesized)
acaccaaatccattgctaggtttagctcctggtcccttttcagcaagattcatgttatccgtcttacaactttgattttggaaagtattatgtcctaaaaatgcactgcttaacacagtg

SEQ ID NO: 205260 - DNA, 120 bp, Artificial Sequence
  ENSG00000114948_40 (sequence is synthesized)
gggtttttttcccccgaggtgtctttaactggggaagtaccacaaacatagagcagagactttaatttctatattctacaatagaccatcaccaaacatcttatcatgttgttgctttct

SEQ ID NO: 205261 - DNA, 120 bp, Artificial Sequence
  ENSG00000114948_41 (sequence is synthesized)
gagtaataggtgctacgcaggtaggcgggctttctctaggactaggtgtacgtttattttgtaataacagggctatctacaaggcctctcagccttactcctggcttcataggacacagg

SEQ ID NO: 205262 - DNA, 120 bp, Artificial Sequence
  ENSG00000114948_42 (sequence is synthesized)
tagcatccctctagtcattggcaatggctctttcagctcggaggaagcttggaggaaactcagattacttggtatcttttcctgttgctgcattgcttagtgtttccttgttgctgggtc

SEQ ID NO: 205263 - DNA, 120 bp, Artificial Sequence
  ENSG00000114948_43 (sequence is synthesized)
ctactctctagtagatactaaactgctgtgaagtacaccatacacatttcactaagattccagagccaccttggtgacataacagaaacaaaatcatgttggttacaaaacaaattaaat

SEQ ID NO: 205264 - DNA, 120 bp, Artificial Sequence
  ENSG00000114948_44 (sequence is synthesized)
ctctattgttaacttttaagcatttcacaaacaacattgtaaatgtgcgatgttacgttttaaatcagaccacagtggtccccaaatattatgtacatatggcaaatgtcagtgtaactt

SEQ ID NO: 205265 - DNA, 120 bp, Artificial Sequence
  ENSG00000114948_45 (sequence is synthesized)
tttgttacactggcaatttcataggtaatcgaacctatgctccaatgttaaattatttgtgtatatgtaaaatacacaagctttaagctatgtgtgtatgaatatgaaagttaatgcaac

SEQ ID NO: 205266 - DNA, 120 bp, Artificial Sequence
  ENSG00000114948_46 (sequence is synthesized)
catatcaattgtaaaaatggattataattatttttgatggtattaggttatgtagtttcaaactctttgctgtattttgttttgcacctgccattcatttgctaatttttgtggcgtgga

SEQ ID NO: 205267 - DNA, 120 bp, Artificial Sequence
  ENSG00000114948_47 (sequence is synthesized)
gattcttttttattaatttgagctcacagcacaagtgtatcactgtttaatgttacccaacaagagttagtgttaagtgatgatcaagttcccatttcacctgctctacttttgctgcat

SEQ ID NO: 205268 - DNA, 120 bp, Artificial Sequence
  ENSG00000114948_48 (sequence is synthesized)
taattaatgacacccggatgaggagacgtgcgctaacttcattgctcatctgggatagtgcatgagcccattgaattagagctgctcctactagataactgagcagtacacataagtgca

SEQ ID NO: 205269 - DNA, 120 bp, Artificial Sequence
  ENSG00000114948_49 (sequence is synthesized)
tgttatgaaacatgaatcacatagagcagtggagttttaccaagtggtgtgtgtggtttttgttttttactatgcaaagatgggaaatgcacaaacttttcaaagactagtgtctgaaga

SEQ ID NO: 205270 - DNA, 120 bp, Artificial Sequence
  ENSG00000114948_50 (sequence is synthesized)
actttacaaacaatacttgaaccctttctttaaagttatcccatcatgttttatagtcattgttgcttccattgttagtttccattttcaagtgctttgtaattttttaagtgcactacc

SEQ ID NO: 205271 - DNA, 120 bp, Artificial Sequence
  ENSG00000114948_51 (sequence is synthesized)
tgaaattttgtttgaaattaataaattcattcgtatcttgttggctgcctatgaatggagattcagtagtcattgtatgcatctttaagtcaaatgtgtattaaaactttcgttaacgta

SEQ ID NO: 205272 - DNA, 120 bp, Artificial Sequence
  ENSG00000114956_0 (sequence is synthesized)
ggaagtgatcgctgtgtgaatcgtgggtgggatggccgcgggccgcctctttctaagtcggcttcgagcacccttcagttccatggccaagagcccactcgagggcgtttcctcctccag

SEQ ID NO: 205273 - DNA, 120 bp, Artificial Sequence
  ENSG00000114956_1 (sequence is synthesized)
aggcctgcacgcggggcgcgggccccgaaggctctccatcgaaggcaacattgctgtgggaaagtccacgtttgtgaagttactcacgaaaacttacccagaatggcacgtagctacaga

SEQ ID NO: 205274 - DNA, 120 bp, Artificial Sequence
  ENSG00000114956_2 (sequence is synthesized)
acctgtagcaacatggcagaatatccaggctgctggcacccaaaaagcctgcactgcccaaagtcttggaaacttgctggatatgatgtaccgggagccagcacgatggtcctacacatt

SEQ ID NO: 205275 - DNA, 120 bp, Artificial Sequence
  ENSG00000114956_3 (sequence is synthesized)
ccagacattttcctttttgagccgcctgaaagtacagctggagcccttccctgagaaactcttacaggccaggaagccagtacagatctttgagaggtctgtgtacagtgacaggtatat

SEQ ID NO: 205276 - DNA, 120 bp, Artificial Sequence
  ENSG00000114956_4 (sequence is synthesized)
ttcatctacctccaggcttctccccaggtttgtttgaagagactgtaccagagggccagggaggaggagaaaggaattgagctggcctatctagagcagctgcatggccaacacgaagcc

SEQ ID NO: 205277 - DNA, 120 bp, Artificial Sequence
  ENSG00000114956_5 (sequence is synthesized)
tggcttattcacaagacaacgaagctccactttgaggctctgatgaacattccagtgctggtgttggatgtcaatgatgatttttctgaggaagtaaccaaacaagaagacctcatgaga

SEQ ID NO: 205278 - DNA, 120 bp, Artificial Sequence
  ENSG00000114956_6 (sequence is synthesized)
gaggtaaacacctttgtaaagaatctgtaaccaataccatgaagttcaggctgtgatctgggctccctgactttctgaagctagaaaaatgttgtgtctcccaaccacctttccatcccc

SEQ ID NO: 205279 - DNA, 120 bp, Artificial Sequence
  ENSG00000114956_7 (sequence is synthesized)
agcccctctcatccctggagcactctgccgctcaagagctggtttgttaattattgttagactttgccattgttttcttttgtacctgaagcattttgaaaataaagtttacttaagtta

SEQ ID NO: 205280 - DNA, 120 bp, Artificial Sequence
  ENSG00000114956_8 (sequence is synthesized)
gcgggccccgaaggctctccatcgaaggcaacattggtaacatcctcaagcaaatcagaatgagagcacccattcaggaaacctgaacagggaaggtgaacccctgtcctgaccaaaatt

SEQ ID NO: 205281 - DNA, 120 bp, Artificial Sequence
  ENSG00000114956_9 (sequence is synthesized)
caagccccatgctcagtgctgcctgtttgatcttgcacagatcctgcactgctatggtcactgatgattataatttgaaaaattatcttcttttttaaagacaacactatacagatttgt

SEQ ID NO: 205282 - DNA, 120 bp, Artificial Sequence
  ENSG00000114978_0 (sequence is synthesized)
atttcgggtctgcgaggtggggtaggcgggcaaggcgggcgccgaggtttgcaaaggctcgcagcggccagaaacccggctccgagcggcggcggcccggcttccgctgcccgtgagcta

SEQ ID NO: 205283 - DNA, 120 bp, Artificial Sequence
  ENSG00000114978_1 (sequence is synthesized)
aggacggtccgctccctctagccagctccgaatcctgatccaggcgggggccaggggcccctcgcctcccctctgaggaccgaagatgagcttcctcttcagcagccgctcttctaaaac

SEQ ID NO: 205284 - DNA, 120 bp, Artificial Sequence
  ENSG00000114978_2 (sequence is synthesized)
attcaaaccaaagaagaatatccctgaaggatctcatcagtatgaactcttaaaacatgcagaagcaactctaggaagtgggaatctgagacaagctgttatgttgcctgagggagagga

SEQ ID NO: 205285 - DNA, 120 bp, Artificial Sequence
  ENSG00000114978_3 (sequence is synthesized)
tctcaatgaatggattgctgtgaacactgtggatttctttaaccagatcaacatgttatatggaactattacagaattctgcactgaagcaagctgtccagtcatgtctgcaggtccgag

SEQ ID NO: 205286 - DNA, 120 bp, Artificial Sequence
  ENSG00000114978_4 (sequence is synthesized)
atatgaatatcactgggcagatggtactaatattaaaaagccaatcaaatgttctgcaccaaaatacattgactatttgatgacttgggttcaagatcagcttgatgatgaaactctttt

SEQ ID NO: 205287 - DNA, 120 bp, Artificial Sequence
  ENSG00000114978_5 (sequence is synthesized)
tccttctaagattggtgtcccatttcccaaaaactttatgtctgtggcaaagactattctaaagcgtctgttcagggtttatgcccatatttatcaccagcactttgattctgtgatgca

SEQ ID NO: 205288 - DNA, 120 bp, Artificial Sequence
  ENSG00000114978_6 (sequence is synthesized)
gctgcaagaggaggcccacctcaacacctcctttaagcactttattttctttgttcaggagtttaatctgattgataggcgtgagctggcacctcttcaagaattaatagagaaacttgg

SEQ ID NO: 205289 - DNA, 120 bp, Artificial Sequence
  ENSG00000114978_7 (sequence is synthesized)
atcaaaagacagataaatgtttcttctagaacacagttacccccttgcttcatctattgctagaactatctcattgctatctgttatagactagtgatacaaactttaagaaaacaggat

SEQ ID NO: 205290 - DNA, 120 bp, Artificial Sequence
  ENSG00000114978_8 (sequence is synthesized)
aaaaagatacccattgcctgtgtctactgataaaattatcccaaaggtaggttggtgtgatagtttccgagtaagaccttaaggacacagccaaatcttaagtactgtgtgaccactctt

SEQ ID NO: 205291 - DNA, 120 bp, Artificial Sequence
  ENSG00000114978_9 (sequence is synthesized)
gttgttatcacatagtcatacttggttgtaatatgtgatggttaacctgtagcttataaatttacttattattcttttactcatttactcagtcatttctttacaagaaaatgattgaat

SEQ ID NO: 205292 - DNA, 120 bp, Artificial Sequence
  ENSG00000114978_10 (sequence is synthesized)
ctgttttaggtgacagcacaatggacattaagaatttccatcaataatttatgaataagtttccagaacaaatttcctaataacacaatcagattggttttattcttttattttacgaat

SEQ ID NO: 205293 - DNA, 120 bp, Artificial Sequence
  ENSG00000114978_11 (sequence is synthesized)
aaaaaatgtatttttcagtatccttgagatttagaacatctgtgtcacttcagataacattttagtttcaagtttgtatggtagtgtttttatagataagatacgtctattttttcaaaa

SEQ ID NO: 205294 - DNA, 120 bp, Artificial Sequence
  ENSG00000114978_12 (sequence is synthesized)
ttcatgattgcagtttaaatcatcatatgacgtgtgggtgggagcaaccaaagttatttttacagggactttattttttgatctttatttgagattgttttcatatctatctaaattatt

SEQ ID NO: 205295 - DNA, 120 bp, Artificial Sequence
  ENSG00000114978_13 (sequence is synthesized)
aggagtgtgtgtatcagaagtaattttttaatgtcttctaaggatggtcttccaggcttttaaactgaaaagcttaattcagatagtagcttttggctgagaaaaggaatccaaaatatt

SEQ ID NO: 205296 - DNA, 120 bp, Artificial Sequence
  ENSG00000114978_14 (sequence is synthesized)
aataaatttagatctcaaaaccactatttttattatttcattatttttcagaggccttaaaattctggataagagaatggaggaaaatactcagagtacttgattattttatttcctttt

SEQ ID NO: 205297 - DNA, 120 bp, Artificial Sequence
  ENSG00000114978_15 (sequence is synthesized)
attaaaaaattacttctatgtttttattgtctcttgagccttagttaagagtagtgtagaaatgcatgaacttcatcctaataaggataaaacttaaggaaaaccacaataaaccatgaa

SEQ ID NO: 205298 - DNA, 120 bp, Artificial Sequence
  ENSG00000114978_16 (sequence is synthesized)
ggtgtacacatcttataacacagataaagttttggtgtgctacctattcttgagagagtgagtgagtgtatgtgtttaaaggaaacaaaatgggagaaataagttttaaaaaaatcctca

SEQ ID NO: 205299 - DNA, 120 bp, Artificial Sequence
  ENSG00000114978_17 (sequence is synthesized)
ttttgttaatattcaaaagatggactgagcttccacttgggttttatcttgttttaattgtttttgtatcaaaacttgaaattcctctatttctattgggatataaaagccttccccttc

SEQ ID NO: 205300 - DNA, 120 bp, Artificial Sequence
  ENSG00000114978_18 (sequence is synthesized)
agtgaagaaaacatttattttttatttgattcctaggatttagtaaactctagctgtctatttaaaatgtactgaggcacaacaagtattatactggaagacttgccaaactggcaaagc

SEQ ID NO: 205301 - DNA, 120 bp, Artificial Sequence
  ENSG00000114978_19 (sequence is synthesized)
tttaagttcatcagcattctatgtggttcagagctgtgatttttgcaaagtattttaccaacctcctcgatggctttgataaaggttagatttgatgtttttttttagatttatttttct

SEQ ID NO: 205302 - DNA, 120 bp, Artificial Sequence
  ENSG00000114978_20 (sequence is synthesized)
aacatttcatctgatttagttagcatccacatatcattgaggaattaaagtgtgggacagtcattattaaaaaaaagagagaaaagccctctattagacattccacaatccatgttttaa

SEQ ID NO: 205303 - DNA, 120 bp, Artificial Sequence
  ENSG00000114978_21 (sequence is synthesized)
gcttatccaaaggtccaaatgtcagccattctgtatgttcatgttgatcatttgcgaacaagaaagcaggtttctaggtatcacttaggatgtgaactgcctctcaactttaaaccctgt

SEQ ID NO: 205304 - DNA, 120 bp, Artificial Sequence
  ENSG00000114978_22 (sequence is synthesized)
tagctttacttttttaagtccacaagtgatgaaactagtttctcagctaggcttgtactttcctcattatttctagtatttcaaatattctcaaacaaaagagttaccacttttctccat

SEQ ID NO: 205305 - DNA, 120 bp, Artificial Sequence
  ENSG00000114978_23 (sequence is synthesized)
ttattttcagttatggaaatgttccctctcttcaccactaagctccaaagcaaatgaaagacgatcacatgtcaggacagtagtaaaggcagcttataaatgggacataaatcagagatg

SEQ ID NO: 205306 - DNA, 120 bp, Artificial Sequence
  ENSG00000114978_24 (sequence is synthesized)
tgttggtattttgagactcaagactgtccttttttaaaataaaaataaaaacattaccaggttcccaagccaatctggcttaaccaacagtgcactgaaatattagtgtttacctccaag

SEQ ID NO: 205307 - DNA, 120 bp, Artificial Sequence
  ENSG00000114978_25 (sequence is synthesized)
gctagggagccaaggggaggaggagaattggaggaaggggagataatgggaagaggatggcgccttcctgagttggctagagggccaacctttgataacagtttgacgaaatcaatcttt

SEQ ID NO: 205308 - DNA, 68 bp, Artificial Sequence
  ENSG00000114978_26 (sequence is synthesized)
gaaatcaatctttttgactcttctcacttttatctccccatgcccaaggtttgcctgttccataacac

SEQ ID NO: 205309 - DNA, 120 bp, Artificial Sequence
  ENSG00000114978_27 (sequence is synthesized)
tttatctccccatgcccaaggtttgcctgttccataacactcactcccttcccccttgctaatcagaagccatctcctctcagtgtctgatctctgctcttcatacatgattacagtcat

SEQ ID NO: 205310 - DNA, 120 bp, Artificial Sequence
  ENSG00000114978_28 (sequence is synthesized)
ggggtagagagtgcttgctaaattatgcagttaatcctatggtgctttaattttcaggccttcaaaaaacacttgtacagtgatgtgcagatttttaaacagttgaacttccttgtacta

SEQ ID NO: 205311 - DNA, 120 bp, Artificial Sequence
  ENSG00000114978_29 (sequence is synthesized)
cagtttttgtattgacagccaaatttgtctttcattcttcagattgtgaataaagtgatttttacagggcttccagcaaagtttttcctttcatctaaggcttgtagaaccctagcttat

SEQ ID NO: 205312 - DNA, 120 bp, Artificial Sequence
  ENSG00000114978_30 (sequence is synthesized)
atagctgcttacatgagaaatgcaaaatctgtattcaccatgactttagtaacaaaggtaaagttttttagtagtgccaaggcaagaggaacaatcttggtggtagtactaagttttgtc

SEQ ID NO: 205313 - DNA, 120 bp, Artificial Sequence
  ENSG00000114978_31 (sequence is synthesized)
aatattgtggtttcctgattgtattgttggctttctctctgagcattgaggtatactagaagtagagcttctcaaacataatatcattacctcataagcattaacaaatcaggcccaaag

SEQ ID NO: 205314 - DNA, 120 bp, Artificial Sequence
  ENSG00000114978_32 (sequence is synthesized)
agcgtaagtcctagaaatttgttttaaagcagccctagtcatggtgctggtgctaccgccttgttttaggagcctgcctcctgtcagtatgaaaccctcacctgaaaaatgccagcctgg

SEQ ID NO: 205315 - DNA, 120 bp, Artificial Sequence
  ENSG00000114978_33 (sequence is synthesized)
acaccaaacactgagccccttcaacaggcacattatttccccctgagatccataagggaatttagtttctactattgtagagttctgaaaagaggtaaaatagtagtcctttggtcatcc

SEQ ID NO: 205316 - DNA, 120 bp, Artificial Sequence
  ENSG00000114978_34 (sequence is synthesized)
tatttttgctttcaattttgatatttcagactgtaaaaggccttgggggatgatagtacatgtggtagcagtaatttttttgaagcaactgcactgacattcatttgagttttctctcat

SEQ ID NO: 205317 - DNA, 120 bp, Artificial Sequence
  ENSG00000114978_35 (sequence is synthesized)
tatcagattctgttccaaacaagtattctgtagatccaaatggattaccagtgtgctacagacttcttattatagaacagcattctattctacatcaaaaatagtttgtgtaagttagtt

SEQ ID NO: 205318 - DNA, 120 bp, Artificial Sequence
  ENSG00000114978_36 (sequence is synthesized)
ttggttaccatctaaaatatttttaaatgttctttacataaaaatttatgttgtgttttaaaatccttaggggctttatctatttttctaagtcagttaactgtacttctaaaaaaagta

SEQ ID NO: 205319 - DNA, 120 bp, Artificial Sequence
  ENSG00000114978_37 (sequence is synthesized)
ttttgtatctacttttgtaacttcgtcagaataaaatatattgaaagcaagaaatgactgattaaagtatgtatatcaacacacatttctatttaaatatagaaacttgagagttttgca

SEQ ID NO: 205320 - DNA, 120 bp, Artificial Sequence
  ENSG00000114978_38 (sequence is synthesized)
aagattggtgagttaacattgtcgaagtattctttctttttttaaaattttattttattaatataaatagagttgggggggtttgctgtgttgtccaggttggtctcaaactcctggcct

SEQ ID NO: 205321 - DNA, 120 bp, Artificial Sequence
  ENSG00000114978_39 (sequence is synthesized)
gcctcccacagtgctgggattacaggtttgagccaccgtatccagcctgtttctctttttgaatgataaatctgctctttttaacattgttatacttgtagagactgccaaattctcctc

SEQ ID NO: 205322 - DNA, 120 bp, Artificial Sequence
  ENSG00000114978_40 (sequence is synthesized)
ggttaaatttctgttttaatatgcatttaaaaaatgttgatgagattgagcattttagcctttttgtttgttttattgatcattgtgtgttttctgtttatatctttcatctatttctgt

SEQ ID NO: 205323 - DNA, 120 bp, Artificial Sequence
  ENSG00000114978_41 (sequence is synthesized)
gtaaaggatattagcgctttgtcgtatgtgttgtatatctttttccccgggttaccttttgtctcattttgttcatggagtatttttgctgtacacaaccttactattttgtcctattat

SEQ ID NO: 205324 - DNA, 120 bp, Artificial Sequence
  ENSG00000114978_42 (sequence is synthesized)
acacaaccttactattttgtcctattatatcttttatgacttgattttaatataacaattagaaagcttttccctgcttcaagattataaaaatatttattcatgttttctttttttatt

SEQ ID NO: 205325 - DNA, 120 bp, Artificial Sequence
  ENSG00000114978_43 (sequence is synthesized)
caggcatgagccaccacgcctggctgggaagttttttttccctgaatgctacattaatttttttccaaatggaaatactagtcagtttgtcccattaccatttattaaacacatttgcct

SEQ ID NO: 205326 - DNA, 120 bp, Artificial Sequence
  ENSG00000114978_44 (sequence is synthesized)
tttctcccctgattatcttatgtgcacaacaaattgccatatatttttgcatgttttagtctctttatctgttcctatagaaattccacacgttggtgactgtggctctgcatctgttag

SEQ ID NO: 205327 - DNA, 120 bp, Artificial Sequence
  ENSG00000114978_45 (sequence is synthesized)
agtttcattattgtcggtgttaaatgccgccccaggagaatgtgcgttgccgcagtttgagaagcttgaagttaagatgctggccttggagtcggatcgttctgtccagttctgattctg

SEQ ID NO: 205328 - DNA, 120 bp, Artificial Sequence
  ENSG00000114978_46 (sequence is synthesized)
tctcttgtcctcggtagaatcctgtgtttttaatcattatgtaatataccatacagcattattatatagtacattgcagtattataaataatttggaaagttaaaacaaattcatagtcc

SEQ ID NO: 205329 - DNA, 120 bp, Artificial Sequence
  ENSG00000114982_0 (sequence is synthesized)
gtggccgagcgcgcggccgtaagaccgcgggtgactagcatgcagatacccatgctctgactttctgcccctccactgacatggcccaccggggtggggagagggacttccagacttcag

SEQ ID NO: 205330 - DNA, 120 bp, Artificial Sequence
  ENSG00000114982_1 (sequence is synthesized)
ctcgacgcatgggcacctcgctgctcttccagctttcagtgcatgaacgggagctggacctggtttttctggatcatagctatgccaagccttggagtgcccacccagatgccagtagtg

SEQ ID NO: 205331 - DNA, 120 bp, Artificial Sequence
  ENSG00000114982_2 (sequence is synthesized)
cccgccccacccgcatgctctttgtcactccccggcggcagcacgaaagtaccattgaatcagacgtcccaatagatgtggagacggtcacatcaacgcctatgccactctatgacaatc

SEQ ID NO: 205332 - DNA, 120 bp, Artificial Sequence
  ENSG00000114982_3 (sequence is synthesized)
agaaggcacgcagcgtgatgaatgagtgtgaacggcatgtcatctttgccaggactgatgcagatgcccctcctccaccagaggactgggaggagcatgtcaacaggactggctggacaa

SEQ ID NO: 205333 - DNA, 120 bp, Artificial Sequence
  ENSG00000114982_4 (sequence is synthesized)
tggcccagaacaagctattcaacaagatcctcaaagccctgcagtctgaccggcttgcccgcttggccaacgaaggggcttgtaatgagccagtgctgcgccgtgttgctgtggacaagt

SEQ ID NO: 205334 - DNA, 120 bp, Artificial Sequence
  ENSG00000114982_5 (sequence is synthesized)
gtgcaaggagagtgcggcaggctctggcaagtgtgagctgggataccaagctgatccagtggctgcacaccacccttgtggagaccttgagtctgcccatgctggcagcctacctggatg

SEQ ID NO: 205335 - DNA, 120 bp, Artificial Sequence
  ENSG00000114982_6 (sequence is synthesized)
ctttgcagacgctgaaggggaagatcccaaccttgattgaccggatgcttgtgtcatccaacacaaagactggggctgcaggagctgaggccttgtctctcctactgaagaggccctggg

SEQ ID NO: 205336 - DNA, 120 bp, Artificial Sequence
  ENSG00000114982_7 (sequence is synthesized)
accctgctgtgggtgtgctttctcataacaaaccaagcaaactccctggctctccgctgattctcatcgcctcctctggtccctccagctctgtgtttcccacttcacgccgccaccgct

SEQ ID NO: 205337 - DNA, 120 bp, Artificial Sequence
  ENSG00000114982_8 (sequence is synthesized)
tctggcaatctcagctgtcctgcttgggcaaggtcatccctgtagccacccatctgctgaacaatggcagtggggtaggagttctacagtgtctcgagcatatgattggggcagtgagaa

SEQ ID NO: 205338 - DNA, 120 bp, Artificial Sequence
  ENSG00000114982_9 (sequence is synthesized)
gcaaagtgctggagattcacagccatttcccacacaaacccattatcttgattggctggaacacaggagctttggtggcctgtcatgtgtcagtaatggagtatgtcactgcagttgtct

SEQ ID NO: 205339 - DNA, 120 bp, Artificial Sequence
  ENSG00000114982_10 (sequence is synthesized)
gccttgggtttcctctgcttactgtggatggccccagaggggatgtagatgatcccctcttggatatgaagactccagtcctctttgtcattggtcagaattcccttcaatgtcaccctg

SEQ ID NO: 205340 - DNA, 120 bp, Artificial Sequence
  ENSG00000114982_11 (sequence is synthesized)
aagccatggaggacttccgggagaagattcgagctgagaacagcttggtggtggttgggggagctgatgacaatctcagaataagcaaagcaaagaagaaatcagaagggttgactcaga

SEQ ID NO: 205341 - DNA, 120 bp, Artificial Sequence
  ENSG00000114982_12 (sequence is synthesized)
gcatggtggacagatgtattcaggatgagattgtggactttctgactggagtgctcactcgtgctgagggtcacatgggctctgaacctcgggatcaggatgctgagaagaagaagaagc

SEQ ID NO: 205342 - DNA, 120 bp, Artificial Sequence
  ENSG00000114982_13 (sequence is synthesized)
cccgcgatgtggcccgcagagacttggcctttgaagtccctgagcggggcagtcgacctgcctccccagctgccaagctgcccgcctcaccctcaggctcagaggatctctccagtgtgt

SEQ ID NO: 205343 - DNA, 120 bp, Artificial Sequence
  ENSG00000114982_14 (sequence is synthesized)
ccagcagccccacctccagtcccaagaccaaagtgaccacagtgacctctgcccagaagtccagtcagattggaagttctcagctgctgaagagacatgtgcagcggacagaagctgtgc

SEQ ID NO: 205344 - DNA, 120 bp, Artificial Sequence
  ENSG00000114982_15 (sequence is synthesized)
tgacccacaaacaagctcaagttcccatttcatcagaaccaccagaggaaggagagaaagaggatcttagggttcagctgaagcgacaccatccctcgagtccccttcctggcagtaaga

SEQ ID NO: 205345 - DNA, 120 bp, Artificial Sequence
  ENSG00000114982_16 (sequence is synthesized)
cctccaaacgaccgaagatcaaggtgtcccttatctcccaaggggacacagctggagggccttgtgctccttcccaaggaagtgctccagaagctgcaggtgggaagcccatcaccatga

SEQ ID NO: 205346 - DNA, 120 bp, Artificial Sequence
  ENSG00000114982_17 (sequence is synthesized)
cactggggcaggcttcagcaggggccaaggagctcacaggacttctcaccacagccaagtccagttcttctgaaggtggagtctcagccagcccagtcccttcagtggtctccagcagca

SEQ ID NO: 205347 - DNA, 120 bp, Artificial Sequence
  ENSG00000114982_18 (sequence is synthesized)
ctgcacccagtgccttgcacacactgcagagccgcctggtggccacatctcctggcagctccctcccaggggccacatcagccagcagcctcctccaaggcctcagcttcagcttgcagg

SEQ ID NO: 205348 - DNA, 120 bp, Artificial Sequence
  ENSG00000114982_19 (sequence is synthesized)
atatcagcagcaagacctctggccttccagcaaatccctccccaggaccagccccacaggccaccagtgtgaagttgcccacccccatgcagagcctgggtgccatcaccacgggcacca

SEQ ID NO: 205349 - DNA, 120 bp, Artificial Sequence
  ENSG00000114982_20 (sequence is synthesized)
gcaccattgtccgtaccattcctgtggccaccactctctcctccttgggtgccactcctggtgggaagcccacagccatccaccagctgctgaccaatgggggcctcgctaagttggcaa

SEQ ID NO: 205350 - DNA, 120 bp, Artificial Sequence
  ENSG00000114982_21 (sequence is synthesized)
ggctcaggagcagccccatccgaggagtcctcttcccaggtgctgccctccagctcacagcgcctgcctccagcaccctgaagatgctgtgtgatatgtcctccttaccaagttggtgat

SEQ ID NO: 205351 - DNA, 120 bp, Artificial Sequence
  ENSG00000114982_22 (sequence is synthesized)
ggctgcctcatggtgggccctggacaggtgtgtggtcctgctgagctgtccacgtgtcggaagacctgtttaagacagtcatttttgcctctccgccaactgtcttcagagaaaccatta

SEQ ID NO: 205352 - DNA, 120 bp, Artificial Sequence
  ENSG00000114982_23 (sequence is synthesized)
ggttaggtgatacggtgccagcaagggaagcaccatcgtccaggatctgcaaatctggttcctgggaaccccagactcctcagcagatctggctgtacatggatcagaaccacttcttcc

SEQ ID NO: 205353 - DNA, 120 bp, Artificial Sequence
  ENSG00000114982_24 (sequence is synthesized)
cccgcttaagctgtggtttgacccaagggtcagcatataggactgcctgctgcatttaatgaaggtgtttccttttggaagtctgtgctaccctctgcgcctagttgggaggagacatcc

SEQ ID NO: 205354 - DNA, 120 bp, Artificial Sequence
  ENSG00000114982_25 (sequence is synthesized)
atctggtctgggatttcgggagttagaatggaaagctctttgctaaagactggagtcatcctggcctgccaactggtggttcagagccggacgggcttgttttggacatcactgttgcct

SEQ ID NO: 205355 - DNA, 120 bp, Artificial Sequence
  ENSG00000114982_26 (sequence is synthesized)
tcactcagcagccacgggagagtgctccccatgcaactccaccttagaaaccacgtcagatactgagtagcttgctgactcctggaaacttctggtttttgttagtatcataatgaaggc

SEQ ID NO: 205356 - DNA, 120 bp, Artificial Sequence
  ENSG00000114982_27 (sequence is synthesized)
aaagagaactaggctgtcatctttcagcctctttgacttactctagatgttgggagcagtggttgccaggtgaaacctgggccctttgtctttttcaccatgctttgggcagtttctgta

SEQ ID NO: 205357 - DNA, 120 bp, Artificial Sequence
  ENSG00000114982_28 (sequence is synthesized)
tccagagagtccgcaggttcagataagctgaagaagagtaatagaacagcaaaggaagtggcttgaaggatgtgctagtaagccctgtggtttgtgcttaggtctctgctctgctaccca

SEQ ID NO: 205358 - DNA, 120 bp, Artificial Sequence
  ENSG00000114982_29 (sequence is synthesized)
aggaactggtggttcagctggagataaaaagaagaatttgccaagtcagagaagaaaccccaaccccggaaaatcctctgtctccagtctctggaggtgaagcagggacaataagctaag

SEQ ID NO: 205359 - DNA, 120 bp, Artificial Sequence
  ENSG00000114982_30 (sequence is synthesized)
gtagtatcttggccatcccaggaaacttgtggcattaggacgatgaaggccatgcttcagtgttttcgtttctatttcatgagactttttgtcttcctgcttacaagtgggaagatgatt

SEQ ID NO: 205360 - DNA, 120 bp, Artificial Sequence
  ENSG00000114982_31 (sequence is synthesized)
gacagtgactctactatgcagggctgttggtaccaacctgagccctataggtggcagtccctggagaagtggtcacagaagatggagctctgatcccctgcttacctcttcacaacactt

SEQ ID NO: 205361 - DNA, 120 bp, Artificial Sequence
  ENSG00000114982_32 (sequence is synthesized)
gtgtgcaaagatagttttagatttggtttagaagctatcctccagaacaggctcccatacttagaatgtttctagttaaggtaataaattaggcaacccaagtgtgactccactcaagtg

SEQ ID NO: 205362 - DNA, 120 bp, Artificial Sequence
  ENSG00000114982_33 (sequence is synthesized)
tccttttctgtaggcaggaagggcccacaacatggcttaaaatgtagtccatggttctggcccacagtacagtgtgtatctataccaggtcacctgtgttcaatctgggagccttcctgg

SEQ ID NO: 205363 - DNA, 120 bp, Artificial Sequence
  ENSG00000114982_34 (sequence is synthesized)
ccagtctgagtggcagccagaagggagctcatagtgtctaggagtctcaggcaaggtaggtcagggtactgtgggcaggggggatgtgtgtgataggagagggtaccctaaaccccatac

SEQ ID NO: 205364 - DNA, 120 bp, Artificial Sequence
  ENSG00000114982_35 (sequence is synthesized)
cttccctccctgacctgaaaagctgatctcaacagggattcacacagaattaggctgtgtttttgcattagctggtaggtgactttctcaaaattcttaaattcagaaagtatttagtaa

SEQ ID NO: 205365 - DNA, 120 bp, Artificial Sequence
  ENSG00000114982_36 (sequence is synthesized)
acttgaggaaggtatgaaatctggaggaggcatccaggacccaggggtttgatagctttacaggtaggatcataccacaccaaaagagcagtggacaataagactatatgagctatatga

SEQ ID NO: 205366 - DNA, 120 bp, Artificial Sequence
  ENSG00000114982_37 (sequence is synthesized)
agcttttaggaatcatttaggacagacagagccctaaacaacccattcatgacttaagttgttggctcagtgtatgctggggacaaagaaaaactaacaagccgacctgcctttatgata

SEQ ID NO: 205367 - DNA, 120 bp, Artificial Sequence
  ENSG00000114982_38 (sequence is synthesized)
aattctagtgtgcttacaagggatgacttcctgaggtgtgatctgtccaccttgaagaactccacaactgaagaaggggagctgtgagaacgtggattgttctacaacttgcacagggta

SEQ ID NO: 205368 - DNA, 120 bp, Artificial Sequence
  ENSG00000114982_39 (sequence is synthesized)
acagaggaagtggctgaggcctagagtcacgttttccagttcccttcgcaaactatatttcttggaacgcgaaaggaagctttacctatttcatagaagacctggaatccataacctcag

SEQ ID NO: 205369 - DNA, 120 bp, Artificial Sequence
  ENSG00000114982_40 (sequence is synthesized)
aaggcaatattattgatagaaaatgtggaaggatcaggaagttcttagattcttggatgacagatgcatgttgatgccctatggagatgtccttgtgttttgaggtcactgaggtaggaa

SEQ ID NO: 205370 - DNA, 120 bp, Artificial Sequence
  ENSG00000114982_41 (sequence is synthesized)
gacctgtctactcttggtttcaccactagaacagtcttgggctggatgggttatagagctgagcggctgtgatggttctgtttttacattaacaaaaacaattaaaaacaccaaaaacaa

SEQ ID NO: 205371 - DNA, 120 bp, Artificial Sequence
  ENSG00000114982_42 (sequence is synthesized)
ttgttttgctgaccccttttgcttactctgtagtctttgccctttttccattcttttgtttgcttctcatggtgttttcttttttgtctcttagtgtggttctttctttcactacggtct

SEQ ID NO: 205372 - DNA, 120 bp, Artificial Sequence
  ENSG00000114982_43 (sequence is synthesized)
tggctctgctgcttttttgtatgtctgtggcattgcctgagtctcagtttccttgtgtgtttttctccctgcctcctgtcctgtgtttatctggtggctacaagcctaccagccacatat

SEQ ID NO: 205373 - DNA, 120 bp, Artificial Sequence
  ENSG00000114982_44 (sequence is synthesized)
cagcatagaacctgaaactcctttcccctacaccctccttcctactctgattttagccagtgcatttgtcccctaagcaatccttctagctggttatgtcctgactgttgcctcatgcca

SEQ ID NO: 205374 - DNA, 120 bp, Artificial Sequence
  ENSG00000114982_45 (sequence is synthesized)
ggacccctcctccctcctcatgtgactgctaccttcctccccacaccagtctttgcttccctgtgctacaagaggactagggtggacttctgggtttaaagaggagggaatctttgagga

SEQ ID NO: 205375 - DNA, 120 bp, Artificial Sequence
  ENSG00000114982_46 (sequence is synthesized)
agcttgaaagataacctaagagtccaaaaagcttggctgtatacatgatgagcctgtttgattcagtggaagtggaagcccatgtgtgaacagatggcctttgtctgtactagtacacat

SEQ ID NO: 205376 - DNA, 120 bp, Artificial Sequence
  ENSG00000114982_47 (sequence is synthesized)
gacctggggactaggttgtgacatgggccagtgttgccctgttacttttgggtgggagccgtgaggttgcctggttgaggtactctctctcctagtagctactcatagccagcttttagt

SEQ ID NO: 205377 - DNA, 120 bp, Artificial Sequence
  ENSG00000114982_48 (sequence is synthesized)
cctggtgacactcctcttcattgcctccatttggcaagtggatcctcaactgtgggctcttagggcagggtgggactcttgagagcctttggaaaactctactttttagagaggactgga

SEQ ID NO: 205378 - DNA, 120 bp, Artificial Sequence
  ENSG00000114982_49 (sequence is synthesized)
tgacctgctcctccatgagttctcatagaatgtttgatgtctccaactgtgtgatgatgtggggagggcttcagacaggaagatgatcacattttttgagtctgagaaggactgtttact

SEQ ID NO: 205379 - DNA, 120 bp, Artificial Sequence
  ENSG00000114982_50 (sequence is synthesized)
cattctgttgaatcctctatttttgttgttgttgccattggccttggctaggcagggtcaggatgtcttctgtcttttaattcctaccaactcagggccccttctcttccgattccagtg

SEQ ID NO: 205380 - DNA, 120 bp, Artificial Sequence
  ENSG00000114982_51 (sequence is synthesized)
caggatgagggatgagaagggtgccatcctctaagaagggcaaagtggggtcccccacggacagggcctgagtgaagtggtcctgaagcatgggcagtctcctttgaggggtggccctgt

SEQ ID NO: 205381 - DNA, 120 bp, Artificial Sequence
  ENSG00000114982_52 (sequence is synthesized)
acgtagagtggttatcctgtgtgttctacattctacacatggctgtgttggtgctggtattgactgagtgtctgttgggattttttggattgtggaggatctcaactcagctccatgtct

SEQ ID NO: 205382 - DNA, 120 bp, Artificial Sequence
  ENSG00000114982_53 (sequence is synthesized)
tccctcccaggtatcttgtggcccagcattctccccttccaacacagaatttttggtctgctgcttctgggtggtcctgggaaagcatccctggagctaaatccataggatgggcctctg

SEQ ID NO: 205383 - DNA, 120 bp, Artificial Sequence
  ENSG00000114982_54 (sequence is synthesized)
ggtcttagagtgatcatagaggcttgacgtgaagctggaattagcttgggcagagggattccttggccttgaataaatgcagtgagtaaatgtcctggtctgcaagtgagtaaatgttcc

SEQ ID NO: 205384 - DNA, 120 bp, Artificial Sequence
  ENSG00000114982_55 (sequence is synthesized)
agtctacaggtgctgtatcctctactgtaaggagaaatagccgataggacatatatgtatagtcagcctttcttatccacaggagattggttctaggaccctcaccactaccaaaatcca

SEQ ID NO: 205385 - DNA, 120 bp, Artificial Sequence
  ENSG00000114982_56 (sequence is synthesized)
tggatgctcaagtcccttatatgaaattatgtcataccgttggaattctatatccacaggtttctatccgtggttgtttgaatctgcaaatctgctgtgaagctcacagataattgagag

SEQ ID NO: 205386 - DNA, 120 bp, Artificial Sequence
  ENSG00000114982_57 (sequence is synthesized)
ctgactgtggttttactttgctgttttaagcacatctgcctgaataaaactggaaatggtgctacactgggcattagcaaaatgagacatttttctgtctgtgcttgtctctctctttgt

SEQ ID NO: 205387 - DNA, 120 bp, Artificial Sequence
  ENSG00000114982_58 (sequence is synthesized)
ttgtctctctctttgtcctacccactaaccctactttgaaaggcctgttgcctgagcccagcagggccaaggcattgcagaaaccctctcctggccaggcatggtgactcacacctgtaa

SEQ ID NO: 205388 - DNA, 120 bp, Artificial Sequence
  ENSG00000114982_59 (sequence is synthesized)
agggagcgggaggcgggaggcgggggccaggcggctcctcctcgtcgcgaactctggatgaccttggccaaatcgcttcagttccccgagctggcgacttcgtctgtaaaatgtgactag

SEQ ID NO: 205389 - DNA, 120 bp, Artificial Sequence
  ENSG00000114982_60 (sequence is synthesized)
ttgtcactccccggcggcagcacgaaagtaccatatgattgttaaatacctgtgaagtatgtgtggcccggtcctatttcctcacctgtttacagtgaatcagacgtcccaatagatgtg

SEQ ID NO: 205390 - DNA, 120 bp, Artificial Sequence
  ENSG00000114982_61 (sequence is synthesized)
gagaggattttctcaggattgactgggggagattgtatgaggcatttggatgttaaattcaggcatctcttaagcagcataaggatagcaggcttgaatgtggctatctctgtgagacag

SEQ ID NO: 205391 - DNA, 120 bp, Artificial Sequence
  ENSG00000114982_62 (sequence is synthesized)
ggtcattttgaccttttgtgggtagcatggaattcgcagatatttcttctcagttctccctctgtttcccaggctggagtgcggtggcacactcttggctcactgcaacctctgcctcct

SEQ ID NO: 205392 - DNA, 120 bp, Artificial Sequence
  ENSG00000114982_63 (sequence is synthesized)
agcttcctgagtagctgggactacagatcccaaccttgattgaccggatgcttgtgtcatccaacacaaagactggggctgcaggagctgaggccttgtctctcctactgaagaggccct

SEQ ID NO: 205393 - DNA, 120 bp, Artificial Sequence
  ENSG00000114982_64 (sequence is synthesized)
gatgccatgttgatggacaactagaacacagatcctgccacgtgatcccttcctcctgtgttagcgcctgcctccagcaccctgaagatgctgtgtgatatgtcctccttaccaagttgg

SEQ ID NO: 205394 - DNA, 120 bp, Artificial Sequence
  ENSG00000114982_65 (sequence is synthesized)
agagctgcaagagagctgtgttacagtgttagagataagcctggaagctggcaatgtaactacagaccagtctggttcagttaaaagacagcattagccgggcgcggtggctcacgcctg

SEQ ID NO: 205395 - DNA, 120 bp, Artificial Sequence
  ENSG00000114982_66 (sequence is synthesized)
agggcatagatgacccagctggggaggaggccaagggactgtgttatgtgggggagaagctctccaggaaaggaaagcctcagtagaaggtggagagtgtgactcaaaaattctgcttct

SEQ ID NO: 205396 - DNA, 120 bp, Artificial Sequence
  ENSG00000114988_0 (sequence is synthesized)
atgaagggtcgttggtgggaaagatggcggcgactctgggaccccttgggtcgtggcagcagtggcggcgatgtttgtcggctcgggatgggtccaggatgttactccttcttcttttgt

SEQ ID NO: 205397 - DNA, 120 bp, Artificial Sequence
  ENSG00000114988_1 (sequence is synthesized)
tggggtctgggcaggggccacagcaagtcggggcgggtcaaacgttcgagtacttgaaacgggagcactcgctgtcgaagccctaccagggtgtgggcacaggcagttcctcactgtgga

SEQ ID NO: 205398 - DNA, 120 bp, Artificial Sequence
  ENSG00000114988_2 (sequence is synthesized)
atctgatgggcaatgccatggtgatgacccagtatatccgccttaccccagatatgcaaagtaaacagggtgccttgtggaaccgggtgccatgtttcctgagagactgggagttgcagg

SEQ ID NO: 205399 - DNA, 120 bp, Artificial Sequence
  ENSG00000114988_3 (sequence is synthesized)
tgcacttcaaaatccatggacaaggaaagaagaatctgcatggggatggcttggcaatctggtacacaaaggatcggatgcagccagggcctgtgtttggaaacatggacaaatttgtgg

SEQ ID NO: 205400 - DNA, 120 bp, Artificial Sequence
  ENSG00000114988_4 (sequence is synthesized)
ggctgggagtatttgtagacacctaccccaatgaggagaagcagcaagagcgggtattcccctacatctcagccatggtgaacaacggctccctcagctatgatcatgagcgggatgggc

SEQ ID NO: 205401 - DNA, 120 bp, Artificial Sequence
  ENSG00000114988_5 (sequence is synthesized)
ggcctacagagctgggaggctgcacagccattgtccgcaatcttcattacgacaccttcctggtgattcgctacgtcaagaggcatttgacgataatgatggatattgatggcaagcatg

SEQ ID NO: 205402 - DNA, 120 bp, Artificial Sequence
  ENSG00000114988_6 (sequence is synthesized)
agtggagggactgcattgaagtgcccggagtccgcctgccccgcggctactacttcggcacctcctccatcactggggatctctcagataatcatgatgtcatttccttgaagttgtttg

SEQ ID NO: 205403 - DNA, 120 bp, Artificial Sequence
  ENSG00000114988_7 (sequence is synthesized)
aactgacagtggagagaaccccagaagaggaaaagctccatcgagatgtgttcttgccctcagtggacaatatgaagctgcctgagatgacagctccactgccgcccctgagtggcctgg

SEQ ID NO: 205404 - DNA, 120 bp, Artificial Sequence
  ENSG00000114988_8 (sequence is synthesized)
ccctcttcctcatcgtctttttctccctggtgttttctgtatttgccatagtcattggtatcatactctacaacaaatggcaggaacagagccgaaagcgcttctactgagccctcctgc

SEQ ID NO: 205405 - DNA, 120 bp, Artificial Sequence
  ENSG00000114988_9 (sequence is synthesized)
ctggagttttgaatgcagggaccccgcattcccatggttgtgcatggggacatctaactctggtctgggaagccacccaccccagggcaatgctgctgtgatgtgcctttccctgcagtc

SEQ ID NO: 205406 - DNA, 120 bp, Artificial Sequence
  ENSG00000114988_10 (sequence is synthesized)
cttccatgtgggagcagaggtgtgaagagaatttacgtggttgtgatgccaaaatcacagaacagaatttcatagcccaggctgccgtgttgtttgactcagaaggcccttctacttcag

SEQ ID NO: 205407 - DNA, 120 bp, Artificial Sequence
  ENSG00000114988_11 (sequence is synthesized)
ttttgaatccacaaagaattaaaaactggtaacaccacaggctttctgaccatccattcgttgggttttgcatttgacccaaccctctgcctacctgaggagctttctttggaaaccagg

SEQ ID NO: 205408 - DNA, 120 bp, Artificial Sequence
  ENSG00000114988_12 (sequence is synthesized)
atggaaacttcttccctgccttaccttcctttcactccattcattgtcctctctgtgtgcaacctgagctgggaaaggcatttggatgcctctctgttggggcctggggctgcagaacac

SEQ ID NO: 205409 - DNA, 120 bp, Artificial Sequence
  ENSG00000114988_13 (sequence is synthesized)
acctgcgtttcactggccttcattaggtggccctagggagatggctttctgctttggatcactgttccctagcatgggtcttgggtctattggcatgtccatggccttcccaatcaagtc

SEQ ID NO: 205410 - DNA, 120 bp, Artificial Sequence
  ENSG00000114988_14 (sequence is synthesized)
tcttcaggccctcagtgaagtttggctaaaggttggtgtaaaaatcaagagaagcctggaagacatcatggatgccatggattagctgtgcaactgaccagctccaggtttgatcaaacc

SEQ ID NO: 205411 - DNA, 120 bp, Artificial Sequence
  ENSG00000114988_15 (sequence is synthesized)
aaaagcaacatttgtcatgtggtctgaccatgtggagatgtttctggacttgctagagcctgcttagctgcatgttttgtagttacgatttttggaatcccactttgagtgctgaaagtg

SEQ ID NO: 205412 - DNA, 120 bp, Artificial Sequence
  ENSG00000114988_16 (sequence is synthesized)
taaggaagctttcttcttacaccttgggcttggatattgcccagagaagaaatttggctttttttttcttaatggacaagagacagttgctgttctcatgttccaagtctgagagcaaca

SEQ ID NO: 205413 - DNA, 120 bp, Artificial Sequence
  ENSG00000114988_17 (sequence is synthesized)
gaccctcatcatctgtgcctggaagagttcactgtcattgagcagcacagcctgagtgctggcctctgtcaacccttattccactgccttatttgacaaggggttacatgctgctcacct

SEQ ID NO: 205414 - DNA, 120 bp, Artificial Sequence
  ENSG00000114988_18 (sequence is synthesized)
tactgccctgggattaaatcagttacaggccagagtctccttggagggcctggaactctgagtcctcctatgaacctctgtagcctaaatgaaattcttaaaatcaccgatggaaccaaa

SEQ ID NO: 205415 - DNA, 120 bp, Artificial Sequence
  ENSG00000114988_19 (sequence is synthesized)
attttatgacatgaacacatagcaagtcttagatttaagttttaacccttagtctagtgttacctgcatttgtgttttccaagtctgttgattgctgatgtgggcttgaggggttttgca

SEQ ID NO: 205416 - DNA, 120 bp, Artificial Sequence
  ENSG00000114993_0 (sequence is synthesized)
gggacagctcggaggagctggggcggagccgcagggcctggcggccgccgagtgaagtgtgactccgtgggcctggcgtggaggcgggggcgctaggctgcagctggctcggaatcgggg

SEQ ID NO: 205417 - DNA, 120 bp, Artificial Sequence
  ENSG00000114993_1 (sequence is synthesized)
ctggtttcctgtctggaagggaaggggcctgcagaagggagcggggacagcagcagacaggcacacccctgccttcctctctccctctcctcccttctctggaaaagcgagctgggagaa

SEQ ID NO: 205418 - DNA, 120 bp, Artificial Sequence
  ENSG00000114993_2 (sequence is synthesized)
cagctgccaccaaagcgagactggacactctgtgcctagagccccctctgcagctggcctttcctcctgggaccccacttatcctcacttcgctttctttttcttccctgcctggctccc

SEQ ID NO: 205419 - DNA, 120 bp, Artificial Sequence
  ENSG00000114993_3 (sequence is synthesized)
ggcagggccccggagcagcagtgggcgaggaaaatttgtcacagcagccagaggggtttaacaggagtgcagagggataagggcagcttctgccctctgcccaagagctggccacctctt

SEQ ID NO: 205420 - DNA, 120 bp, Artificial Sequence
  ENSG00000114993_4 (sequence is synthesized)
taaagactgagggaacagtgggaggaggaactgtgggacagtgtggtacctatctgtcccccctctggaggggttgacaagggaaagggcaccggggggcacagagatgcaggacagatt

SEQ ID NO: 205421 - DNA, 120 bp, Artificial Sequence
  ENSG00000114993_5 (sequence is synthesized)
gcacatcctggaggacctgaatatgctctacattcggcagatggcactcagcctggaggacacggagttgcagaggaagctagaccatgagatccggatgagggaaggggcctgtaagct

SEQ ID NO: 205422 - DNA, 120 bp, Artificial Sequence
  ENSG00000114993_6 (sequence is synthesized)
gctggcagcctgctcccagcgagagcaggctctggaggccaccaagagcctgctagtgtgcaacagccgcatcctcagctacatgggcgagctgcagcggcgcaaggaggcgcaggtgct

SEQ ID NO: 205423 - DNA, 120 bp, Artificial Sequence
  ENSG00000114993_7 (sequence is synthesized)
ggggaagacaagccggcggccttctgacagtggcccgcccgctgagcgctccccctgccgcggccgggtctgcatctctgacctccggattccactcatgtggaaggacacagaatattt

SEQ ID NO: 205424 - DNA, 120 bp, Artificial Sequence
  ENSG00000114993_8 (sequence is synthesized)
caagaacaaaggtgacttgcaccgctgggctgtgttcctgctgctgcagctgggggaacacatccaggacacagagatgatcctagtggacaggaccctcacagacatctcctttcagag

SEQ ID NO: 205425 - DNA, 120 bp, Artificial Sequence
  ENSG00000114993_9 (sequence is synthesized)
caatgtgctcttcgctgaggcggggccagactttgaactgcggttagagctgtatggggcctgtgtggaagaagagggggccctgactggcggccccaagaggcttgccaccaaactcag

SEQ ID NO: 205426 - DNA, 120 bp, Artificial Sequence
  ENSG00000114993_10 (sequence is synthesized)
cagctccctgggccgctcctcagggaggcgtgtccgggcatcgctggacagtgctgggggttcagggagcagtcccatcttgctccccaccccagttgttggtggtcctcgttaccacct

SEQ ID NO: 205427 - DNA, 120 bp, Artificial Sequence
  ENSG00000114993_11 (sequence is synthesized)
tcacaccacactcaccctggcagcagtgcaagatggattccgcacacatgacctcacccttgccagtcatgaggagaaccctgcctggctgcccctttatggtagcgtgtgttgccgtct

SEQ ID NO: 205428 - DNA, 120 bp, Artificial Sequence
  ENSG00000114993_12 (sequence is synthesized)
ggcagctcagcctctctgcatgactcagcccactgcaagtggtaccctcagggtgcagcaagctggggagatgcagaactgggcacaagtgcatggagttctgaaaggcacaaacctctt

SEQ ID NO: 205429 - DNA, 120 bp, Artificial Sequence
  ENSG00000114993_13 (sequence is synthesized)
ctgttaccggcaacctgaggatgcagacactggggaagagccgctgcttactattgctgtcaacaaggagactcgagtccgggcaggggagctggaccaggctctaggacggcccttcac

SEQ ID NO: 205430 - DNA, 120 bp, Artificial Sequence
  ENSG00000114993_14 (sequence is synthesized)
cctaagcatcagtaaccagtatggggatgatgaggtgacacacacccttcagacagaaagtcgggaagcactgcagagctggatggaggctctgtggcagcttttctttgacatgagcca

SEQ ID NO: 205431 - DNA, 120 bp, Artificial Sequence
  ENSG00000114993_15 (sequence is synthesized)
atggaagcagtgctgtgatgaaatcatgaaaattgaaactcctgctccccggaaaccaccccaagcactggcaaagcaggggtccttgtaccatgagatggctattgagccgctggatga

SEQ ID NO: 205432 - DNA, 120 bp, Artificial Sequence
  ENSG00000114993_16 (sequence is synthesized)
catcgcagcggtgacagacatcctgacccagcgggagggcgcaaggctggagacacccccaccctggctggcaatgtttacagaccagcctgccctgcctaacccctgctcgcctgcctc

SEQ ID NO: 205433 - DNA, 120 bp, Artificial Sequence
  ENSG00000114993_17 (sequence is synthesized)
agtggccccagccccagactggacccaccccctgccctgggggagaccccgaaccttttccctggatgctgtccccccagaccactcccctagggctcgctcggttgcccccctcccacc

SEQ ID NO: 205434 - DNA, 120 bp, Artificial Sequence
  ENSG00000114993_18 (sequence is synthesized)
tcagcgatccccacggaccagaggcctctgcagcaaaggccaacctcgcacttggctccagtcaccagtgtgagagagaaaggtgctggcataggatctgcccagaagagaaaatgaccc

SEQ ID NO: 205435 - DNA, 120 bp, Artificial Sequence
  ENSG00000114993_19 (sequence is synthesized)
atgcgcagttgggctctggatacggcgctgtctatagcaagttggccagtctggcctcctgttcctctgctggacctggggtaggctgcaggggtgggcagaagcccctcttaaattgtg

SEQ ID NO: 205436 - DNA, 120 bp, Artificial Sequence
  ENSG00000114993_20 (sequence is synthesized)
gttgccatggtaccgagggactcattcctggggctcgctgggacctccctaaacccttcctggaagaaaactggaaccaactctgccctacctccctgcactaaccagctttgaggatgg

SEQ ID NO: 205437 - DNA, 120 bp, Artificial Sequence
  ENSG00000114993_21 (sequence is synthesized)
cactgaagaacccttggagcaaacatacctcccttgtgactcccacatcaaccattaaagttatttaacagcagccttcacctggctcctgaggacagggtgcctctctctgcctggtct

SEQ ID NO: 205438 - DNA, 120 bp, Artificial Sequence
  ENSG00000114993_22 (sequence is synthesized)
gcagcgggagattcccggccggactggcggacgagcgtcgagagacagaagccgaggagaggaggctaagccgggcggcgcggggagcgcactgagcaggcaaagtcgcagggccgccag

SEQ ID NO: 205439 - DNA, 120 bp, Artificial Sequence
  ENSG00000114993_23 (sequence is synthesized)
catgttctcccgaaaccaccggagccgggtcaccgtggccaggggctccgccctggagatggagttcaaacgcggccgcttccgactcagcctcttcagcgacctgcccgaggacacgga

SEQ ID NO: 205440 - DNA, 120 bp, Artificial Sequence
  ENSG00000114993_24 (sequence is synthesized)
ggcaaagcaggggtccttgtaccatgagatggtcttatcagagcctgtagccccagggggcccaggtgaggggctgctcctgcaggataacgcaatctccactgagatccaggctttgct

SEQ ID NO: 205441 - DNA, 120 bp, Artificial Sequence
  ENSG00000114993_25 (sequence is synthesized)
tgtggccactaggcttaggcggatagcctcgcagaggagcctaggtggggagggggacgaagaaggaacatttgggactgtgggatgttgaaatggtctcttcggaggctgccgggattg

SEQ ID NO: 205442 - DNA, 120 bp, Artificial Sequence
  ENSG00000114993_26 (sequence is synthesized)
aaactgggcaaggtcccagggcccgagtagagccagagcgtgctacgcggcgatccctgagccacggggttttcagcgcccgggaagccaggcttgccaggttggggcggctggcggggc

SEQ ID NO: 205443 - DNA, 120 bp, Artificial Sequence
  ENSG00000114993_27 (sequence is synthesized)
agggcttctcggtccgtcccaagtccaggtaggcgctcgcgacccgcgcgggcagggagaacgcgctcccacagtgctcgcgaggtgcagtgcgcccctgggggctccggggccgtcggg

SEQ ID NO: 205444 - DNA, 120 bp, Artificial Sequence
  ENSG00000114993_28 (sequence is synthesized)
tttctcaaactaagctggaacccctctcgggaagctccaacctcctgcaaaccccatgactctagaacctgcatgaggcgtcgtttccctgcccccttccagttgtgcctgcccctcact

SEQ ID NO: 205445 - DNA, 120 bp, Artificial Sequence
  ENSG00000114993_29 (sequence is synthesized)
tccctcttctccctcagattccaatttatatctactttaccacttcccatttctctccaggtccaattgcccttctttgctccctatcccttttatgggctttcctgcctactttttgtc

SEQ ID NO: 205446 - DNA, 120 bp, Artificial Sequence
  ENSG00000114993_30 (sequence is synthesized)
agttctgagggacctctggctggagcatccttgcctacctttgtgtcttccctgccttgctcaatccctttttccctgtctcaagctgctcctcctcccctgactcaggactggctgtct

SEQ ID NO: 205447 - DNA, 120 bp, Artificial Sequence
  ENSG00000114993_31 (sequence is synthesized)
catccccagcccttttttgccattccttcctactctggtcagtaggaggcaaatgagagggctcagcaaaagccccacaagctcattcttctaaggcaggcgtgatcaaggctgcctgat

SEQ ID NO: 205448 - DNA, 120 bp, Artificial Sequence
  ENSG00000114993_32 (sequence is synthesized)
agtcttatcagggacctgggagagaccttggtgttttaccaccactgtgtgttgcccagaggcgcatttgtgagtagccagggcaggacttagaaaagtcggtgtgtctggtgaaaggta

SEQ ID NO: 205449 - DNA, 120 bp, Artificial Sequence
  ENSG00000114993_33 (sequence is synthesized)
gctgatctgaagggtagcaagtaatgcaaaagcactaatttgctaagccctgtctgtgatccagtaagactggctatctggcttttggaaaattaatttcctcaacgctggttcacaaaa

SEQ ID NO: 205450 - DNA, 120 bp, Artificial Sequence
  ENSG00000114993_34 (sequence is synthesized)
tcaccaatttaccacatactgacaatagtttgttatatctggggttcaccttcagaggcagggagtgggaaaggaaataagaaaccacttaaggaaagcctacccattcaaacaaattag

SEQ ID NO: 205451 - DNA, 120 bp, Artificial Sequence
  ENSG00000114993_35 (sequence is synthesized)
attgtgcattctaaaagggctcagcttctggatgtaaaatgtaagcaacactgacattagactgttgatctgacaagtctataatgacttaagtgatgccatgataaaaccaaaatattg

SEQ ID NO: 205452 - DNA, 120 bp, Artificial Sequence
  ENSG00000114993_36 (sequence is synthesized)
gggaaaatatttggcaaattattctaagaatatgccaatttggataaagtggtcatttggagaactggtttttaggaaagtggcctacttactccactgaggctgctaggggaaatagtc

SEQ ID NO: 205453 - DNA, 120 bp, Artificial Sequence
  ENSG00000114993_37 (sequence is synthesized)
gagagaggagccctgagcttgtgccttatgtgtgagttaatgtggcttgagtgtccctggtgtccccaagcctggcaaactgctgggttcaatgaacaactttcccttatagtccctcag

SEQ ID NO: 205454 - DNA, 120 bp, Artificial Sequence
  ENSG00000114993_38 (sequence is synthesized)
ccctgcctgtcggcctggctgggaacctggtggctgaggcgctgggatcagggggatcctagagtcgttgggaccagagcaagggggaatagtggctagaggccaggccaggacattgtg

SEQ ID NO: 205455 - DNA, 120 bp, Artificial Sequence
  ENSG00000114999_0 (sequence is synthesized)
tgagccgccttctcggccgcctggtccctgcggcggctgcccggcggcccgggcgcgcggcgcttcgccatgtacaccttcgtggtacgcgatgagaacagcagcgtctacgccgaggtc

SEQ ID NO: 205456 - DNA, 120 bp, Artificial Sequence
  ENSG00000114999_1 (sequence is synthesized)
tcccggctgctcctcgccaccggccactggaagaggctgcggcgagacaaccccagattcaacctgatgctgggagagaggaatcggctgcccttcgggagactgggtcacgagcccggg

SEQ ID NO: 205457 - DNA, 120 bp, Artificial Sequence
  ENSG00000114999_2 (sequence is synthesized)
ctggtacagttggtgaattactacaggggtgctgacaaactgtgtcgcaaagcttctttagtgaagctaatcaagacaagccctgaactggctgagtcctgcacatggttccctgaatct

SEQ ID NO: 205458 - DNA, 120 bp, Artificial Sequence
  ENSG00000114999_3 (sequence is synthesized)
tatgtgatttatccaaccaatctcaagactccagttgctccagcacagaatggaattcagccaccaatcagtaactcaaggacagatgaaagagaattctttctcgcctcttataacaga

SEQ ID NO: 205459 - DNA, 120 bp, Artificial Sequence
  ENSG00000114999_4 (sequence is synthesized)
aagaaagaggatggagagggcaacgtttggattgcaaagtcatcagccggtgccaaaggtgaaggcattctcatctcctcagaggcttcagagcttctcgatttcatagacaaccagggc

SEQ ID NO: 205460 - DNA, 120 bp, Artificial Sequence
  ENSG00000114999_5 (sequence is synthesized)
caagtgcacgtgatccagaaatatcttgagcaccctctgctgcttgagccaggtcatcgcaagtttgacatccgaagctgggtcttggtggatcatcagtataatatctacctctataga

SEQ ID NO: 205461 - DNA, 120 bp, Artificial Sequence
  ENSG00000114999_6 (sequence is synthesized)
gagggtgtgcttcggactgcttcagaaccatatcatgttgataatttccaagacaaaacctgccatttgaccaatcactgcattcaaaaagagtattcaaagaactacgggaagtatgaa

SEQ ID NO: 205462 - DNA, 120 bp, Artificial Sequence
  ENSG00000114999_7 (sequence is synthesized)
gaaggaaatgaaatgttcttcaaggagttcaatcagtacctaacaagtgctttgaacattaccctagaaagtagtatcttactacaaatcaaacatataataaggaactgcctcctgagc

SEQ ID NO: 205463 - DNA, 120 bp, Artificial Sequence
  ENSG00000114999_8 (sequence is synthesized)
gtggagcctgccattagcaccaagcacctcccttaccagagcttccagctcttcggctttgacttcatggtcgatgaggagctgaaggtgtggctcattgaggtcaacggtgcccctgca

SEQ ID NO: 205464 - DNA, 120 bp, Artificial Sequence
  ENSG00000114999_9 (sequence is synthesized)
tgtgctcagaagctctatgcagaactgtgccaaggcatcgtggacatagccatttccagtgtcttcccacccccagatgtggagcaacctcagacccagccagctgccttcatcaagctg

SEQ ID NO: 205465 - DNA, 120 bp, Artificial Sequence
  ENSG00000114999_10 (sequence is synthesized)
tgacagagggcactccctgctgccttggaaaaagcacggggtcctgctccagggaatggtgaaatgactggattgctctttatccagcccacagcaggggaaagaaaggcaactcgcaaa

SEQ ID NO: 205466 - DNA, 120 bp, Artificial Sequence
  ENSG00000114999_11 (sequence is synthesized)
gatgagatggaagaaggcacgtgagcagaggaggcagctcccaaagagagggctgctcagggggcttcccagatgtagctctcagcagtgctgttgagacttttgaaaacaactttggta

SEQ ID NO: 205467 - DNA, 120 bp, Artificial Sequence
  ENSG00000114999_12 (sequence is synthesized)
cacaaaggcagctttgtgagcagagctccttcccctctccccgggaacggcagggcactgggacctctggtcggtgcctcccacccactgcagccctagtgccttagctccatgcccggc

SEQ ID NO: 205468 - DNA, 120 bp, Artificial Sequence
  ENSG00000114999_13 (sequence is synthesized)
tgcagccccactgctctggactatggattggacgtcagagcatattggaggttgcctgtgtgttccccacccatcccttcggtaacactctgccacactaagctctgtacaagcatgcac

SEQ ID NO: 205469 - DNA, 120 bp, Artificial Sequence
  ENSG00000114999_14 (sequence is synthesized)
caacagtccttagttttgtgctgtgcactggcctctcggcaaaggtggtttccctcatcaccttcctgatggtgtttggtcagtcacctgtcagggtttgtgcgggttgggccccaaaac

SEQ ID NO: 205470 - DNA, 120 bp, Artificial Sequence
  ENSG00000114999_15 (sequence is synthesized)
agcatatgctgctctaagtctgctctctgcatgttttagaaacaaagtggcaagtctgccctgaacctgtaagcatcaaataagcatgagagagaaaaaaacatgatatattgctttact

SEQ ID NO: 205471 - DNA, 120 bp, Artificial Sequence
  ENSG00000114999_16 (sequence is synthesized)
taataggttgaatatggtaggtctttgaaaatatgatgattcaattttctcaattttctttgctttaaccaaaattctaaatgcagttttgcctagttccctttttttttctttttttac

SEQ ID NO: 205472 - DNA, 120 bp, Artificial Sequence
  ENSG00000114999_17 (sequence is synthesized)
ttttttttaaacgtttgtaaaaacctctttgaggatgaggagtcagtaaaattccactccccaagtggccctgccccagacaaaggttgctttccccctttttgttctttttatgccccc

SEQ ID NO: 205473 - DNA, 120 bp, Artificial Sequence
  ENSG00000114999_18 (sequence is synthesized)
aagcactttctgcagtagctagagggacaggtttccttccaggaaggattcgagttcctgtgcctgtgggtattaggagagtatatatcctgcctgaatggggaagtcttctaaaatggg

SEQ ID NO: 205474 - DNA, 120 bp, Artificial Sequence
  ENSG00000114999_19 (sequence is synthesized)
aaagaagtggtttcatctccacacagtgtcttgtaaatctcaacaaatgtgtactgttagaagtggcttccgcttactggattaactaatactttataggcttttcaggaggccacatca

SEQ ID NO: 205475 - DNA, 120 bp, Artificial Sequence
  ENSG00000114999_20 (sequence is synthesized)
ctagcagtagggagaacaagatgtcatttgtgttcagtgtaagctgagtaaacaggcccttcctagagtgtcctggaaatcacagcaacccattgaaaactgccctccccaccagaacgt

SEQ ID NO: 205476 - DNA, 120 bp, Artificial Sequence
  ENSG00000114999_21 (sequence is synthesized)
gctacgttctttcttcatgcctatgtgtgctccattcctcatttctacttggctcaagaaaacatttctgcagtcaggtgagacttttacaaaagaggagaaaatcaatgcctccttgaa

SEQ ID NO: 205477 - DNA, 120 bp, Artificial Sequence
  ENSG00000114999_22 (sequence is synthesized)
catgatgagatgtgagaacttacaatgaaaaaggcaataatgatagaaattatttcttaggtacagcaatagttgataggatgtgagggtgttaccttggggtgaagtggagaaggtccc

SEQ ID NO: 205478 - DNA, 120 bp, Artificial Sequence
  ENSG00000114999_23 (sequence is synthesized)
aggtgaattggctctcatggaaatttggaattacaaaataaacgtcctgggggttacccagaatacagatttaaaagtttgcctgtagagcaaaataaaacagtcagttgtagtcattaa

SEQ ID NO: 205479 - DNA, 120 bp, Artificial Sequence
  ENSG00000114999_24 (sequence is synthesized)
tccttgaggcccaacgcagccgatgggttggtgtttgggaaattctgagatgggagtgagatctgatcggatcctgggaagatgtatacccagttagaacgtgtagggttctgggtccct

SEQ ID NO: 205480 - DNA, 120 bp, Artificial Sequence
  ENSG00000114999_25 (sequence is synthesized)
ggcaagtctaggtgggcgggtgacagggaaagcatgggcatttttgtattgctgtcacatgctaacagaggtttgtaattatcttttggacccaaattatagagacattcacgagttttc

SEQ ID NO: 205481 - DNA, 120 bp, Artificial Sequence
  ENSG00000114999_26 (sequence is synthesized)
tagccctcacagtaacagagctaagaattcagatgtcaggaagtctgtgaatcttgatggattttctgagaaacctgactcaatggcatatataagagggaagtaagacttttaagaaaa

SEQ ID NO: 205482 - DNA, 120 bp, Artificial Sequence
  ENSG00000114999_27 (sequence is synthesized)
gaaaaagttatgcctcattcctcatgtggcttccaataagtatcttaggaacttatttcctttttaaaaaatattttttaaatttttaaaatttgattttaaatttcaaataaatttaaa

SEQ ID NO: 205483 - DNA, 120 bp, Artificial Sequence
  ENSG00000114999_28 (sequence is synthesized)
taaattttaaataaattttaaataaaattttacagagacgtggtctcactgtgttgcccaggctggattgcagtggctattcgcagttgtaatcatagcacactgcagcctcgaatttct

SEQ ID NO: 205484 - DNA, 120 bp, Artificial Sequence
  ENSG00000114999_29 (sequence is synthesized)
agctgagactacaggtgcacaccaccaagcctggctttatgtatttatttctgttcatgcggaatgattggttcagaactgttcctttcccttccatgatgtccttgacacagaaggtta

SEQ ID NO: 205485 - DNA, 120 bp, Artificial Sequence
  ENSG00000114999_30 (sequence is synthesized)
ctttcccttccatgatgtccttgacacagaaggttatgcctggctcccagtcaggcttcatacttttggtccatgtaagtgctacccgttgctgggggaggagtcatggtttatttggaa

SEQ ID NO: 205486 - DNA, 120 bp, Artificial Sequence
  ENSG00000114999_31 (sequence is synthesized)
atgtcagttgcaatcatggttctgtcatttgactgcacagtatcagaggagcctgttaacctctctgtgccttagtttcttagcccatgaaagagatcattgcctgacccagggactacc

SEQ ID NO: 205487 - DNA, 120 bp, Artificial Sequence
  ENSG00000114999_32 (sequence is synthesized)
tcaagggcttttgatgaggacaagtgacagtaggaagatgcaagagcctttagtaccaaggttctcaacactgactacatgctggaatgactgtgaagcttttaaaaaatgttagtgccc

SEQ ID NO: 205488 - DNA, 120 bp, Artificial Sequence
  ENSG00000114999_33 (sequence is synthesized)
actcttcccctgtacccccggacagttaaatcagaacctcagacagcaatatgccttgagatgccttgaaccatgcttgagaaggaaggacaaacacattattatcttggaagaattgca

SEQ ID NO: 205489 - DNA, 120 bp, Artificial Sequence
  ENSG00000114999_34 (sequence is synthesized)
taaggcttatgacttaaaaaaaaaaattctttttggaaacacaagcatttctttaaggatgaccggatgttgccgtatgtatttatggcacaagcaggtgttgtctaagcagtttctctg

SEQ ID NO: 205490 - DNA, 120 bp, Artificial Sequence
  ENSG00000114999_35 (sequence is synthesized)
tttgcttgtcatagcagcatttggaaactcaaacatgctttcatttacataaatagtttatgaagctttgacaacaaatgtaaacagacacgaaattataaatctgctaaatatgtatta

SEQ ID NO: 205491 - DNA, 120 bp, Artificial Sequence
  ENSG00000114999_36 (sequence is synthesized)
agggtattaattattgaaagtccctttccccaaaactcaactcctatggcaattatgaactccattttaccaagaacatttaagtgcctcagcatctgtatgatatagtggagcaggtgc

SEQ ID NO: 205492 - DNA, 120 bp, Artificial Sequence
  ENSG00000114999_37 (sequence is synthesized)
tgacataggtaccagctgacatgatgtgtcactagctctgtgggatgattgccacatacatggaacacctgggagtgctggaaatgtactgtgatcgaagtgacaaagtgtgttttcatt

SEQ ID NO: 205493 - DNA, 120 bp, Artificial Sequence
  ENSG00000114999_38 (sequence is synthesized)
cacagtggaggctacatcaagcaaggggaggtccagccctcttgcaagtgtggtgagaggctctactagcaaagacatgggcaccggagtaggtcccgtgtagcatgcgggtgctgtaga

SEQ ID NO: 205494 - DNA, 120 bp, Artificial Sequence
  ENSG00000114999_39 (sequence is synthesized)
gaaaattcagtgacgtacatggctctggttctggacacaaaatctgtactggagaggaaatgactgctgaaataaggcgattgtatgaatatttaaaatgcctggaacactaaagtaaag

SEQ ID NO: 205495 - DNA, 120 bp, Artificial Sequence
  ENSG00000114999_40 (sequence is synthesized)
taatgatatttcaagtgtttttgtgctctttggttcttgttgtaggtattgactgtcctgggatatcactggtcatttaaattcaccatataattagccgggcatggtggcatgtggtgg

SEQ ID NO: 205496 - DNA, 120 bp, Artificial Sequence
  ENSG00000114999_41 (sequence is synthesized)
tggctgaggtgggaggatcgcttgaggctgaggtgtgaggctgcagtgaaccatgttcacaccactgtactctagcttgagcaacagagcaagaccctgtctcaaaagtaaataaataat

SEQ ID NO: 205497 - DNA, 120 bp, Artificial Sequence
  ENSG00000114999_42 (sequence is synthesized)
aaagtaaatataaatccatgatgccgttactcaggggtagacagactttctgtaaaaggccagataataaatctgctaggctttgcaaaccatgtagggccttttttgcatactttttgt

SEQ ID NO: 205498 - DNA, 120 bp, Artificial Sequence
  ENSG00000114999_43 (sequence is synthesized)
ttttttctccaactcttagctcataggccgtataaaagcaggccagatgtgcagtaatttgctgaccccaggatgttacccaatacataagccaacagattgtccttcaaaactgatgag

SEQ ID NO: 205499 - DNA, 120 bp, Artificial Sequence
  ENSG00000114999_44 (sequence is synthesized)
cttctcagtgaagcactgagactatttcagctgccaaagtcccagcccatcgtttcttacgtgtcttgtgtatcgagttcttgtaaagcatttcaccaaggccaggtttttaaataccta

SEQ ID NO: 205500 - DNA, 120 bp, Artificial Sequence
  ENSG00000114999_45 (sequence is synthesized)
taaacctcacacacctgagatgcttagtcttgtggatagaaagagtttcattaatgcaaattgttattaacttgtaacttcttgtgcaataaggctgaatgctttggacatctttccttt

SEQ ID NO: 205501 - DNA, 120 bp, Artificial Sequence
  ENSG00000114999_46 (sequence is synthesized)
gtatggctggcctgccttctgtggctgcttccacttcataaatatacctctggcacagaggaggtttccatgccagaagccctgtgtaggcactccactccaaacaggtttcacatacac

SEQ ID NO: 205502 - DNA, 120 bp, Artificial Sequence
  ENSG00000114999_47 (sequence is synthesized)
tatgacacattcccagtggactcagcagagattgcatgggcagggtgcagggtgcagggtgcaagcagacatggatccaggcaggcacctacttaggaccctgagagtggacaggcccaa

SEQ ID NO: 205503 - DNA, 120 bp, Artificial Sequence
  ENSG00000114999_48 (sequence is synthesized)
agcctttggaagacttctcttaaagactggtcccacttcctgtcagtagctacacctccttcttaacctgaagttctcccataacccatattttagaagtgttttccccaaagcatccct

SEQ ID NO: 205504 - DNA, 120 bp, Artificial Sequence
  ENSG00000114999_49 (sequence is synthesized)
ccatatcttagtctattttgtattgccataacagaatgttacagagaagtgtatgtggctcacggttctggaggatgagaagtccaatatcaaggggctatatctggtgagggccttctt

SEQ ID NO: 205505 - DNA, 120 bp, Artificial Sequence
  ENSG00000114999_50 (sequence is synthesized)
gctgcctcagcatggcagaaggcatcacatggcaagagaggaatggagtctaactcaccctttaactagcaacccattcctgtgataactaacccactcctggcataacatcattaattt

SEQ ID NO: 205506 - DNA, 120 bp, Artificial Sequence
  ENSG00000114999_51 (sequence is synthesized)
attcatgagggtagagctctcgtgacctaacctcttacaggtcccacctctcaacactattgcagtagagattaagtttccaacacatttactttggggaacacattcaaaccatagcag

SEQ ID NO: 205507 - DNA, 120 bp, Artificial Sequence
  ENSG00000114999_52 (sequence is synthesized)
tccctgaaggcaaaggaaaatgaacccctctccaatgcaatacatagtagcagaacttgaagattgttgcaagcataattcctttcaaaaattatgagaggacatcagtgggcataatag

SEQ ID NO: 205508 - DNA, 120 bp, Artificial Sequence
  ENSG00000114999_53 (sequence is synthesized)
agtaacaacctctgaaaaccctctcttccataaaagcaatgagaacactagcaaaactgtctagacattaaccagaggcttgcagcaatccatttattcaagaaaaggcctgtaatccca

SEQ ID NO: 205509 - DNA, 120 bp, Artificial Sequence
  ENSG00000114999_54 (sequence is synthesized)
aaaaaaaaaaaaaaaaaaaaaggaaagggttgcatctgggtaagaaaagcaagctttctgacattttaatgtaccctattcccactccccctttccccagctccacaacagcctcggcca

SEQ ID NO: 205510 - DNA, 120 bp, Artificial Sequence
  ENSG00000114999_55 (sequence is synthesized)
cagcctcggccacacaatcatgctgacatccagcagcagagcagccaccgtagggctcagaaggggattggaactcctccaaagcttcattaccagagaattgccatttggcctttttgg

SEQ ID NO: 205511 - DNA, 120 bp, Artificial Sequence
  ENSG00000114999_56 (sequence is synthesized)
aacagcaattgttgaacatctcagcttcctaaggtggctgtaacagttggaacaaacaaactgaccaaaagacttagaaggaaaaactgggaatgagatttctataggacgttttgaaaa

SEQ ID NO: 205512 - DNA, 120 bp, Artificial Sequence
  ENSG00000114999_57 (sequence is synthesized)
gcttcaacctattcctaagaatgcagaaggccacacacatgtgtaggactgtgcacatgcccagaagagacctgagaattccccagctctttcgtctgaccttaagtgtctgcacaaaca

SEQ ID NO: 205513 - DNA, 120 bp, Artificial Sequence
  ENSG00000114999_58 (sequence is synthesized)
gagaggacagaggcagaaggagggaaagagggagggaggaaaggtaggaaggggagaaagagagaggaagaaagagaaaggaaagaaaggcaggcagaaagaaggagaaagggagggagg

SEQ ID NO: 205514 - DNA, 120 bp, Artificial Sequence
  ENSG00000114999_59 (sequence is synthesized)
gagggaaaggagggagggaagaaaagagaaagattgagaaagaaaaaagagaaagaagaaagaaaagaaaaaaggaaagaaagttagtttataaaatagaaccaagtagaaattttagag

SEQ ID NO: 205515 - DNA, 120 bp, Artificial Sequence
  ENSG00000114999_60 (sequence is synthesized)
ttgcaaagtacaaaaatgcaaatgaaagatttacttgagaagtttaaaaaatgtgtgaactggtaaaagaagtaatcagcaaattagaagtcatttgagattatccagtctgtggaacag

SEQ ID NO: 205516 - DNA, 120 bp, Artificial Sequence
  ENSG00000114999_61 (sequence is synthesized)
aaaaaaaaaatcagcaaagaaaaatgatcagtgcttcagacacccgtcagacaccatcaaacataccaacatacacataataggagtcctagaatagataagtgagagagagggaagggg

SEQ ID NO: 205517 - DNA, 120 bp, Artificial Sequence
  ENSG00000114999_62 (sequence is synthesized)
ataaaacatatactggaagaaatagtggccaaaacctttcccactttgaggaaaaacattaaagtgaatccaagaagctcaacaaattctaagcaggaaagactcaaagagtccacctca

SEQ ID NO: 205518 - DNA, 120 bp, Artificial Sequence
  ENSG00000114999_63 (sequence is synthesized)
agacacaccagccactaagtaaataattttaaatatatagtaaaaaatgacaaggaaacagaaatgttacactagaaaatatataagaaaagagaaggaagtaatgaaaaatagaggaga

SEQ ID NO: 205519 - DNA, 120 bp, Artificial Sequence
  ENSG00000114999_64 (sequence is synthesized)
aaaaaaaggcaagaggcctaaagaaaccaacagtaaaatggtagataaatcctgccttatcagtaatttcattaaatgcaaatgaattaaatactccaatcagaaggtagagattggcaa

SEQ ID NO: 205520 - DNA, 120 bp, Artificial Sequence
  ENSG00000114999_65 (sequence is synthesized)
attgattttttttaaaaatcatgatccaactatatgctatctacaaaaaacacacttcattttatttttatttttattatttagagacagagtcttgctctgttgcctaggttggagtct

SEQ ID NO: 205521 - DNA, 120 bp, Artificial Sequence
  ENSG00000114999_66 (sequence is synthesized)
agtggtgtaatgatagctcactgcagcctcaaacttctggtttcaagtaatcttcccaccttagccacccaagtagctggaactataggtgcctgccaccatacttggctaatttaaaac

SEQ ID NO: 205522 - DNA, 120 bp, Artificial Sequence
  ENSG00000114999_67 (sequence is synthesized)
aatttttttagagataggacctggcttacttcaaaacttacctggctaatttcacttcacataacgatcttcagttccatccatgttgttggaagtgacaggatctcactctttatggct

SEQ ID NO: 205523 - DNA, 120 bp, Artificial Sequence
  ENSG00000114999_68 (sequence is synthesized)
tccattcatctgctgatggacacttaggtcgcttccaaatcttggctattgcaaacaaggctgcagtaaacatgggagtgcagatatctctccaaaaaaaatttttttttttttagagat

SEQ ID NO: 205524 - DNA, 120 bp, Artificial Sequence
  ENSG00000114999_69 (sequence is synthesized)
cagatatctctccaaaaaaaatttttttttttttagagatagggtcgtactgtgtttcccaagctggtcttgaactcccgtcctcaggcaatcctcctgcctcagtctcccctaagcagc

SEQ ID NO: 205525 - DNA, 120 bp, Artificial Sequence
  ENSG00000114999_70 (sequence is synthesized)
tgggattacaggcatcagccaatgcacctggcaaaacacactttagattcaaaaacacaaacaggttgaaagtaaaatgatggaaaaagatataccatgcaaacagtaactcaaagagaa

SEQ ID NO: 205526 - DNA, 120 bp, Artificial Sequence
  ENSG00000114999_71 (sequence is synthesized)
gtggagtagctatactaatgttagacaacataaactttaagaaaaaaattgtttctatagacaaagaaggacttttttttaatagttccaacttttattttaaattctggaggtacatac

SEQ ID NO: 205527 - DNA, 120 bp, Artificial Sequence
  ENSG00000114999_72 (sequence is synthesized)
acaggtttgttacatgggtcctgaggttggggtacagatcccattacccaagtagtaagcatagtacctaatggttagctttccaatccttgcacccctccctcccttctccctcttgtc

SEQ ID NO: 205528 - DNA, 120 bp, Artificial Sequence
  ENSG00000114999_73 (sequence is synthesized)
atctttagtgtctcttgttgccatttttgtgtccatgtgtatctaatgtttggctcccacttatgagactgtgcaatatttggttttctgttcctgtgttatttcacttaggataatggc

SEQ ID NO: 205529 - DNA, 89 bp, Artificial Sequence
  ENSG00000114999_74 (sequence is synthesized)
tgattccatgtctttgctcttgtgaatagcactgtgataaacatataggtgcatgtgtctttctggtagaatgaattgggctatgttga

SEQ ID NO: 205530 - DNA, 78 bp, Artificial Sequence
  ENSG00000114999_75 (sequence is synthesized)
ttcttttggatatatacccagtaatgggaggctatgttgaatggtagctctgtttttgtttgtttgtttgtttgtttg

SEQ ID NO: 205531 - DNA, 77 bp, Artificial Sequence
  ENSG00000114999_76 (sequence is synthesized)
tctgttttaaattctttgagaaatctccaaacttctttccacagtggttcaaccaatttacattcctgccagcagtg

SEQ ID NO: 205532 - DNA, 120 bp, Artificial Sequence
  ENSG00000114999_77 (sequence is synthesized)
gagaaatctccaaacttctttccacagtggttcaaccaatttacattcctgccagcagtgtataagcattctctttttttccttagcctcttcagcatctgttattttttgactttttaa

SEQ ID NO: 205533 - DNA, 120 bp, Artificial Sequence
  ENSG00000114999_78 (sequence is synthesized)
tgagatgatatcttattgtggttgtgatttccatttctctgttgattagtgatgatgaacattgtctcatatgtttcttggccacttgtatgccaaggacattttatattgataaaaggg

SEQ ID NO: 205534 - DNA, 120 bp, Artificial Sequence
  ENSG00000114999_79 (sequence is synthesized)
tcagtccattaggaaaatatgacaattataaacatatgtacctagcaatacagcctaaagatacatgacataaaaacttagagaattgaaggaagaaacagacaatttaactacaatagt

SEQ ID NO: 205535 - DNA, 120 bp, Artificial Sequence
  ENSG00000114999_80 (sequence is synthesized)
tggaaccctcaaaactccatttcaataatagctagagcaactaggcagaagatcaacaagaaaatagaaaacactataaaccaactagacttgacaaatatctacaaggcactccaccca

SEQ ID NO: 205536 - DNA, 120 bp, Artificial Sequence
  ENSG00000114999_81 (sequence is synthesized)
acagcagcaaaatacacatccttctcaagtgcacatggaacattctctggggtagatcacatgctaggccataaaacaagtctcagtaaatttaaaagaattgaaattatactacatatg

SEQ ID NO: 205537 - DNA, 120 bp, Artificial Sequence
  ENSG00000114999_82 (sequence is synthesized)
ttctctgaccatgttggaataaaatcagaaatcagtaacaaattttgttaatttctgtattaatgaagaaatatacaagtaaagaggttggactaataataattcttttaaaacttccca

SEQ ID NO: 205538 - DNA, 120 bp, Artificial Sequence
  ENSG00000114999_83 (sequence is synthesized)
cagggaaaagcccaggaccagattgtaagccagatggtaaggaattaacaccaatatttcatagagtctcctaaaaaatagaagagaagaaaatactcctcaattgagaagagtgtcctc

SEQ ID NO: 205539 - DNA, 120 bp, Artificial Sequence
  ENSG00000114999_84 (sequence is synthesized)
aactttatgaggtcactcttaataccctgataccaaaaccagacaaagatgtcacaagaaaagcaaatagcagaccaataatctcttgggaatacaaacggaaaaaatcttcaacaaaat

SEQ ID NO: 205540 - DNA, 120 bp, Artificial Sequence
  ENSG00000114999_85 (sequence is synthesized)
actagtaaaccaaatccagcaacatagaaaaaggattatacattatgactaagtgggacttatcctaagattacaaagtttggaataactcatgttctcttgtaagtggaagctaggctg

SEQ ID NO: 205541 - DNA, 120 bp, Artificial Sequence
  ENSG00000114999_86 (sequence is synthesized)
agcacggtggctcactcctataatctcagcacttttaggaggccaaggtgggcagatcaaatgaggccaggagtttgagtccagcctgggcaacatgattaaatctggtctctataaaaa

SEQ ID NO: 205542 - DNA, 90 bp, Artificial Sequence
  ENSG00000114999_87 (sequence is synthesized)
cccagctactctgatgaagaggaggttgcagtgagcagagatcgcacaactgctctctgtcctaggtgacagagcaagtcctgtctcaaa

SEQ ID NO: 205543 - DNA, 120 bp, Artificial Sequence
  ENSG00000114999_88 (sequence is synthesized)
tgctctctgtcctaggtgacagagcaagtcctgtctcaaaaaaattaaaaagtgggagctaaacattgggtacacatggacataaagttgggaagaggccagtcgcggtggctcacgcct

SEQ ID NO: 205544 - DNA, 120 bp, Artificial Sequence
  ENSG00000114999_89 (sequence is synthesized)
aaaaaaaaaaaaaaaaaaaagatgggaacagcagacactggggactactagagccaggagagaaggaggggagcaaagattgaaaactacctattggatactgtgctcgctacctgggtg

SEQ ID NO: 205545 - DNA, 120 bp, Artificial Sequence
  ENSG00000114999_90 (sequence is synthesized)
gctcgctacctgggtgacaggttcaaccataccccagacctcagcatcacccaatatacctttgtaacaaattcgcacatgtacccccctgattctaaaataaacgttgagaaggggaaa

SEQ ID NO: 205546 - DNA, 120 bp, Artificial Sequence
  ENSG00000114999_91 (sequence is synthesized)
agaaagaatgcaaggtttttttaacatacaaaatttacttaatataatataccactttaatagaaaaaagaggacaaaaagcacatgatcatttcaatatacactgaaaaagcatttggc

SEQ ID NO: 205547 - DNA, 120 bp, Artificial Sequence
  ENSG00000114999_92 (sequence is synthesized)
aatacacaacactctttcttggaaaaaacctttcaacaaactagaaataaattacttcctcaacatgataaagagcatctttggaaaaacccacagcctacatcatattaatggtgatgt

SEQ ID NO: 205548 - DNA, 120 bp, Artificial Sequence
  ENSG00000114999_93 (sequence is synthesized)
gaaagctccagttgggagctttcttcccaatatcaggcacaaaacaagtatatttattcttgtcacttcaacattgtattaaatgttctagacagagcaattcgacaaaaggaaggaaag

SEQ ID NO: 205549 - DNA, 120 bp, Artificial Sequence
  ENSG00000114999_94 (sequence is synthesized)
aagactgcgcattcagattggaaagggagaagtatgatgatctctctttgcagacgacaagataccatatagaaaaagtcctaagaaatccacttacgctgttagaactaataaagagtt

SEQ ID NO: 205550 - DNA, 120 bp, Artificial Sequence
  ENSG00000114999_95 (sequence is synthesized)
tagcaagattgccagacacaagatcaatatacaaaactcaatggtatttctacatattacaaacaatttgaagttaagaaaacaattccatttatatcaacaccaaaaagaatgaaatac

SEQ ID NO: 205551 - DNA, 120 bp, Artificial Sequence
  ENSG00000114999_96 (sequence is synthesized)
ttaggaataaatttaacaaaagttcatttctacaccaaatactacaaaacatctctgaaagaaattaaagaacacctaaataaatggaaagacatcccatgtttatggattgggagataa

SEQ ID NO: 205552 - DNA, 120 bp, Artificial Sequence
  ENSG00000114999_97 (sequence is synthesized)
ttattgttaggatgaaaataggccccaaattgatctaccaattgaacacaatcctgatcaagaatctcagccttctttgcagaaattgacaagctgggccgggtgtggtggctcacacct

SEQ ID NO: 205553 - DNA, 120 bp, Artificial Sequence
  ENSG00000114999_98 (sequence is synthesized)
acaaaaaaaaaaaaaaaagagaaagaaattgacaagctaagctgacgctaaaatccatattgaaatacaaaggatcaaataaatctggagaaagaagaacaaagttggaggatgtgcact

SEQ ID NO: 205554 - DNA, 120 bp, Artificial Sequence
  ENSG00000114999_99 (sequence is synthesized)
aggatgtgcacttcctgatttcaaaatttattacaaagctgtattaatcaaatctgtgtagtttgtagacagatatacagataaatgtagatagacatacagatcaagagaatagaactg

SEQ ID NO: 205555 - DNA, 120 bp, Artificial Sequence
  ENSG00000114999_100 (sequence is synthesized)
agagtcaaaaataaacccttgcatctatagtgaactgattttcgacaaggaggccaagacaatttgatgagggaaagaatagtctttttaacaaatggtgttaggacaactggatatcca

SEQ ID NO: 205556 - DNA, 120 bp, Artificial Sequence
  ENSG00000114999_101 (sequence is synthesized)
catgcaaaggaataaagtgatatgcctttctcacaccatatacaaaaattagctcagaatgagtcaaagacttaaatgtaagagttgaaactacaaaactcttagtagaaaatataggtg

SEQ ID NO: 205557 - DNA, 120 bp, Artificial Sequence
  ENSG00000114999_102 (sequence is synthesized)
aaaatccccatgattgaaaaatatctagtatttgatagcacaacagggtgactgcagtcagcaataatttgttgtaccttcaaaaataactgaggaagtacaattggaatgttcatgaca

SEQ ID NO: 205558 - DNA, 120 bp, Artificial Sequence
  ENSG00000114999_103 (sequence is synthesized)
gaaatgatgaatgcttgaggtgatggaaaccccatctaccctcctgtgatgattacatcgtatgcctatatgaaaacatctcatatacctcataaatatgctaattatgtacccataaat

SEQ ID NO: 205559 - DNA, 120 bp, Artificial Sequence
  ENSG00000114999_104 (sequence is synthesized)
ttttttttaaatcctcatgaccttggattacacaatgatgtcttagatatgatataaaaagacaggcaacaaaagaaaaaaactacacttcaaaattaaaacgttttgcttcaaaggaca

SEQ ID NO: 205560 - DNA, 120 bp, Artificial Sequence
  ENSG00000114999_105 (sequence is synthesized)
ccagcaagaaagtaaaaacccacagaatgggagaaaaatatttgcaaatcatggatctgacaaggactagtataggctatataaagaactacaactactcagttggccgggcgcgcgcgg

SEQ ID NO: 205561 - DNA, 120 bp, Artificial Sequence
  ENSG00000114999_106 (sequence is synthesized)
tggctcatgcctgtaatcccagcatttagggaggcaaggcgagaggatcactagaggccggaagttcaagaccagcctgtgcaacagactcccggctcgaattttttataaaaagtgata

SEQ ID NO: 205562 - DNA, 120 bp, Artificial Sequence
  ENSG00000114999_107 (sequence is synthesized)
taggaatgaaaagtaccagctgaactaggaaaggggaagttgacagtaaggagggactatcaggggcaggaggatactgggtagtggtggtttaattcattgttttaattgtggtgatgg

SEQ ID NO: 205563 - DNA, 120 bp, Artificial Sequence
  ENSG00000114999_108 (sequence is synthesized)
ctgcatggttgtatacataggtcaaaacttaacgcgtacactttaaatgtgtggtttattgtatgccagttataacgcaatatagctgttaaacacaaacacaataaagttgaaaaacca

SEQ ID NO: 205564 - DNA, 120 bp, Artificial Sequence
  ENSG00000114999_109 (sequence is synthesized)
ctctccccgagggaattaccttcatccacatggttgaagctggctgggcaccaccatacccacatgtccacgggtaggaaagcgcaggagataggaggggactagcggctcctttgtaag

SEQ ID NO: 205565 - DNA, 120 bp, Artificial Sequence
  ENSG00000114999_110 (sequence is synthesized)
agttgcccagatcggttcaactcacatcctattgacctgagcatagtctcatggcctccctctctgcacagtcatctgggaattgcatcttctctccggggagccatgttccttgccaga

SEQ ID NO: 205566 - DNA, 120 bp, Artificial Sequence
  ENSG00000114999_111 (sequence is synthesized)
attcaccagaggtgggggccaattgtattccaaagacaaggggagaatcgatacggaggaagagtcacctctaccttggagggcaacccagagagagcaatgttctatgtccaggagaga

SEQ ID NO: 205567 - DNA, 120 bp, Artificial Sequence
  ENSG00000114999_112 (sequence is synthesized)
aaacagtttttagaaataggtgtggtcagaattcaaatgggtaaaaactgaatacgggccatttggaattgactggtcatttatgagcttccatagacagagcctttgggagggggctgt

SEQ ID NO: 205568 - DNA, 120 bp, Artificial Sequence
  ENSG00000114999_113 (sequence is synthesized)
gtaaaactcaaatcgttggaggaatgaagagctgcagtgtaaagttgctggattttcttcttttgaatagtacctgggacaacttttcattggtatacaagtttatgatgtagaatggtg

SEQ ID NO: 205569 - DNA, 120 bp, Artificial Sequence
  ENSG00000114999_114 (sequence is synthesized)
actccatggaaggacccatttgaacacccagaaatcttagaatatggagactgtgcctggaggctccctttggttaaccggtgtcaggaagaccctagcaaagagaattcatgatctgaa

SEQ ID NO: 205570 - DNA, 120 bp, Artificial Sequence
  ENSG00000114999_115 (sequence is synthesized)
attgtgtttttacaagtgggaagttggttctgcagttgggatagtctgtgggtacaagtgtagtcactttgactgctgtgagggaggatgccacagtgataggagacccttgggaggact

SEQ ID NO: 205571 - DNA, 120 bp, Artificial Sequence
  ENSG00000114999_116 (sequence is synthesized)
tgataggagacccttgggaggactctatctggcagggggctttgctgagtcacttcctttcctatttccccgtgtataggccagataggcccagtgtggtagctcatgcttgtaatccca

SEQ ID NO: 205572 - DNA, 120 bp, Artificial Sequence
  ENSG00000114999_117 (sequence is synthesized)
aaagatgtcctcccctgatgccacatcctgttccaatgatcacgccttctccagttcccttcacagccaagcttctggagagcagcttctgcacaagctgtcttctattcctctgttccc

SEQ ID NO: 205573 - DNA, 120 bp, Artificial Sequence
  ENSG00000114999_118 (sequence is synthesized)
atccatgttccagtccattccaggctggctcccatcctgattgcctcacagaaactgttctttgcaggtccccagccaagtccttattgccacctccagcagcctctttctgtccccacc

SEQ ID NO: 205574 - DNA, 120 bp, Artificial Sequence
  ENSG00000114999_119 (sequence is synthesized)
cccttggacctgtcagcagcattcgaggcaaccgacagcacttgctgagctgctctcctgtcatggctggacacgtggtgctgggcaggcttgcctggtgaggtgtgggcaagctggact

SEQ ID NO: 205575 - DNA, 120 bp, Artificial Sequence
  ENSG00000115008_0 (sequence is synthesized)
ttccctgtaaattccccgttttgacgacgcacttgtagccacgtagccacgcctacttaagacaattacaaaaggcgaagaagactgactcaggcttaagctgccagccagagagggagt

SEQ ID NO: 205576 - DNA, 120 bp, Artificial Sequence
  ENSG00000115008_1 (sequence is synthesized)
catttcattggcgtttgagtcagcaaagaagtcaagatggccaaagttccagacatgtttgaagacctgaagaactgttacagtgaaaatgaagaagacagttcctccattgatcatctg

SEQ ID NO: 205577 - DNA, 120 bp, Artificial Sequence
  ENSG00000115008_2 (sequence is synthesized)
tctctgaatcagaaatccttctatcatgtaagctatggcccactccatgaaggctgcatggatcaatctgtgtctctgagtatctctgaaacctctaaaacatccaagcttaccttcaag

SEQ ID NO: 205578 - DNA, 120 bp, Artificial Sequence
  ENSG00000115008_3 (sequence is synthesized)
gagagcatggtggtagtagcaaccaacgggaaggttctgaagaagagacggttgagtttaagccaatccatcactgatgatgacctggaggccatcgccaatgactcagaggaagaaatc

SEQ ID NO: 205579 - DNA, 120 bp, Artificial Sequence
  ENSG00000115008_4 (sequence is synthesized)
atcaagcctaggtcagcaccttttagcttcctgagcaatgtgaaatacaactttatgaggatcatcaaatacgaattcatcctgaatgacgccctcaatcaaagtataattcgagccaat

SEQ ID NO: 205580 - DNA, 120 bp, Artificial Sequence
  ENSG00000115008_5 (sequence is synthesized)
gatcagtacctcacggctgctgcattacataatctggatgaagcagtgaaatttgacatgggtgcttataagtcatcaaaggatgatgctaaaattaccgtgattctaagaatctcaaaa

SEQ ID NO: 205581 - DNA, 120 bp, Artificial Sequence
  ENSG00000115008_6 (sequence is synthesized)
actcaattgtatgtgactgcccaagatgaagaccaaccagtgctgctgaaggagatgcctgagatacccaaaaccatcacaggtagtgagaccaacctcctcttcttctgggaaactcac

SEQ ID NO: 205582 - DNA, 120 bp, Artificial Sequence
  ENSG00000115008_7 (sequence is synthesized)
ggcactaagaactatttcacatcagttgcccatccaaacttgtttattgccacaaagcaagactactgggtgtgcttggcaggggggccaccctctatcactgactttcagatactggaa

SEQ ID NO: 205583 - DNA, 120 bp, Artificial Sequence
  ENSG00000115008_8 (sequence is synthesized)
tcctttactgttagtcatttgctgagcatgtactgagccttgtaattctaaatgaatgtttacactctttgtaagagtggaaccaacactaacatataatgttgttatttaaagaacacc

SEQ ID NO: 205584 - DNA, 120 bp, Artificial Sequence
  ENSG00000115008_9 (sequence is synthesized)
ctatattttgcatagtaccaatcattttaattattattcttcataacaattttaggaggaccagagctactgactatggctaccaaaaagactctacccatattacagatgggcaaatta

SEQ ID NO: 205585 - DNA, 120 bp, Artificial Sequence
  ENSG00000115008_10 (sequence is synthesized)
aggcataagaaaactaagaaatatgcacaatagcagttgaaacaagaagccacagacctaggatttcatgatttcatttcaactgtttgccttctacttttaagttgctgatgaactctt

SEQ ID NO: 205586 - DNA, 120 bp, Artificial Sequence
  ENSG00000115008_11 (sequence is synthesized)
aatcaaatagcataagtttctgggacctcagttttatcattttcaaaatggagggaataatacctaagccttcctgccgcaacagttttttatgctaatcagggaggtcattttggtaaa

SEQ ID NO: 205587 - DNA, 120 bp, Artificial Sequence
  ENSG00000115008_12 (sequence is synthesized)
ttcttgaagccgagcctcaagatgaaggcaaagcacgaaatgttattttttaattattatttatatatgtatttataaatatatttaagataattataatatactatatttatgggaacc

SEQ ID NO: 205588 - DNA, 120 bp, Artificial Sequence
  ENSG00000115008_13 (sequence is synthesized)
aaccccttcatcctctgagtgtgaccaggcatcctccacaatagcagacagtgttttctgggataagtaagtttgatttcattaatacagggcattttggtccaagttgtgcttatccca

SEQ ID NO: 205589 - DNA, 120 bp, Artificial Sequence
  ENSG00000115008_14 (sequence is synthesized)
tagccaggaaactctgcattctagtacttgggagacctgtaatcatataataaatgtacattaattaccttgagccagtaattggtccgatctttgactcttttgccattaaacttacct

SEQ ID NO: 205590 - DNA, 120 bp, Artificial Sequence
  ENSG00000115008_15 (sequence is synthesized)
gggcattcttgtttcaattccacctgcaatcaagtcctacaagctaaaattagatgaactcaactttgacaaccatgagaccactgttatcaaaactttcttttctggaatgtaatcaat

SEQ ID NO: 205591 - DNA, 120 bp, Artificial Sequence
  ENSG00000115008_16 (sequence is synthesized)
gtttcttctaggttctaaaaattgtgatcagaccataatgttacattattatcaacaatagtgattgatagagtgttatcagtcataactaaataaagcttgcaacaaaattctctgaca

SEQ ID NO: 205592 - DNA, 120 bp, Artificial Sequence
  ENSG00000115009_0 (sequence is synthesized)
agaatataacagcactcccaaagaactgggtactcaacactgagcagatctgttctttgagctaaaaaccatgtgctgtaccaagagtttgctcctggctgctttgatgtcagtgctgct

SEQ ID NO: 205593 - DNA, 120 bp, Artificial Sequence
  ENSG00000115009_1 (sequence is synthesized)
actccacctctgcggcgaatcagaagcagcaagcaactttgactgctgtcttggatacacagaccgtattcttcatcctaaatttattgtgggcttcacacggcagctggccaatgaagg

SEQ ID NO: 205594 - DNA, 120 bp, Artificial Sequence
  ENSG00000115009_2 (sequence is synthesized)
ctgtgacatcaatgctatcatctttcacacaaagaaaaagttgtctgtgtgcgcaaatccaaaacagacttgggtgaaatatattgtgcgtctcctcagtaaaaaagtcaagaacatgta

SEQ ID NO: 205595 - DNA, 120 bp, Artificial Sequence
  ENSG00000115009_3 (sequence is synthesized)
tgcctcactggacttgtccaattaatgaagttgattcatattgcatcatagtttgctttgtttaagcatcacattaaagttaaactgtattttatgttatttatagctgtaggttttctg

SEQ ID NO: 205596 - DNA, 120 bp, Artificial Sequence
  ENSG00000115009_4 (sequence is synthesized)
tgtttagctatttaatactaattttccataagctattttggtttagtgcaaagtataaaattatatttgggggggaataagattatatggactttcttgcaagcaacaagctatttttta

SEQ ID NO: 205597 - DNA, 120 bp, Artificial Sequence
  ENSG00000115009_5 (sequence is synthesized)
tttcttgcaagcaacaagctattttttaaaaaaaactatttaacattcttttgtttatattgttttgtctcctaaattgttgtaattgcattataaaataagaaaaatattaataagaca

SEQ ID NO: 205598 - DNA, 89 bp, Artificial Sequence
  ENSG00000115009_6 (sequence is synthesized)
cgtctttggcctttttaaaggcttacaactttaaggggaccacgtgaaagggtcgtgataaatcgagcaagcgcggggaacgtgactgg

SEQ ID NO: 205599 - DNA, 120 bp, Artificial Sequence
  ENSG00000115009_7 (sequence is synthesized)
tttaaaaatgtttgcctttttagagtttcattcagaaattactgatgttttgaacataagatcttattttaaagagaaagaaatgatgtggcaaagatagctttgtcttagtacatatct

SEQ ID NO: 205600 - DNA, 120 bp, Artificial Sequence
  ENSG00000115009_8 (sequence is synthesized)
actttaaagttcactttaaacaggactggaataaggcaaaaccttttttaaaaattttttttggtcaaacggaactagtatagggcaaaaatcactttctaaggctattaaagtgatata

SEQ ID NO: 205601 - DNA, 120 bp, Artificial Sequence
  ENSG00000115009_9 (sequence is synthesized)
ttaggaaaatagggaagatacacatttcgaaatgagcatcttctaccagaaagtgtttgagaccaaaagtaaaatctcagactaattatactatcacatataattttcttgatttatata

SEQ ID NO: 205602 - DNA, 120 bp, Artificial Sequence
  ENSG00000115020_0 (sequence is synthesized)
gagaagccgcatcaaccatgtaagcagcttcgcttcctgccgcaaccgtccgcggcctgaggagcccaccgccgctctcgggggccgacttccgggggctgagccgttgaagcggaggct

SEQ ID NO: 205603 - DNA, 120 bp, Artificial Sequence
  ENSG00000115020_1 (sequence is synthesized)
ggggcggggggcagccggcgcggccggggcaggaggcgcagactcatgaaatggccacagatgataagacgtccccaacactggactctgctaatgatttgcctcgatctcctactagtc

SEQ ID NO: 205604 - DNA, 120 bp, Artificial Sequence
  ENSG00000115020_2 (sequence is synthesized)
cttctcatctcacacactttaaacctttgactcctgatcaagatgagcccccttttaaatcagcttatagttcttttgtaaatctctttcgttttaacaaagagagagcagaaggaggcc

SEQ ID NO: 205605 - DNA, 120 bp, Artificial Sequence
  ENSG00000115020_3 (sequence is synthesized)
agggagaacagcagcctttgagtggaagttggaccagccctcagctcccttcgaggacacagtctgttaggtcacccacaccttataaaaagcagcttaatgaggaactccagcggcgct

SEQ ID NO: 205606 - DNA, 120 bp, Artificial Sequence
  ENSG00000115020_4 (sequence is synthesized)
cttcagcattagacacaagaaggaaagcagaacctacctttggaggtcatgaccctcgtacagctgttcagcttcgaagcctcagcacagtattaaaacgcctcaaggaaatcatggagg

SEQ ID NO: 205607 - DNA, 120 bp, Artificial Sequence
  ENSG00000115020_5 (sequence is synthesized)
ggaaaagccaggatagtgacctgaaacaatactggatgccagatagccaatgtaaagagtgctatgactgtagtgagaaatttacaacctttaggcgcagacaccattgccgactatgtg

SEQ ID NO: 205608 - DNA, 120 bp, Artificial Sequence
  ENSG00000115020_6 (sequence is synthesized)
ggcagattttctgcagtcgttgctgtaatcaagaaatccctggaaaatttatgggctatacaggagacctccgagcttgcacatattgtagaaaaatagccttaagttatgctcattcca

SEQ ID NO: 205609 - DNA, 120 bp, Artificial Sequence
  ENSG00000115020_7 (sequence is synthesized)
cagacagtaattctattggggaagacttgaatgctctttcagattctgcttgctctgtgtctgtgcttgatccaagtgaaccccgaacacctgttgggagtaggaaagccagccgtaaca

SEQ ID NO: 205610 - DNA, 120 bp, Artificial Sequence
  ENSG00000115020_8 (sequence is synthesized)
tatttttagaggatgatttggcctggcaaagtttgattcatccagattcctcaaatactcctctttcaacaagacttgtatctgtgcaagaggatgctgggaaatctcctgctcgaaata

SEQ ID NO: 205611 - DNA, 120 bp, Artificial Sequence
  ENSG00000115020_9 (sequence is synthesized)
gatcagccagcattactaacctgtcactggatagatctggttctcctatggtaccttcatatgagacatctgtcagtccccaggctaaccgaacatatgttaggacagagaccactgagg

SEQ ID NO: 205612 - DNA, 120 bp, Artificial Sequence
  ENSG00000115020_10 (sequence is synthesized)
atgaacgcaaaattcttctggacagtgtgcagttaaaagacctgtggaaaaaaatctgccatcacagcagtggaatggagtttcaggatcaccgctactggttgagaacgcatcccaact

SEQ ID NO: 205613 - DNA, 120 bp, Artificial Sequence
  ENSG00000115020_11 (sequence is synthesized)
gcattgtaggaaaggaattagtcaactggctaatccgaaatgggcatattgccacaagggcacaagctatagcaattggacaagcaatggttgatggacgttggctggattgtgttagtc

SEQ ID NO: 205614 - DNA, 120 bp, Artificial Sequence
  ENSG00000115020_12 (sequence is synthesized)
atcacgaccagcttttcagagatgagtatgcgctgtatagaccactgcagagtacagaattttctgagacgccttctcccgacagtgactcagtgaactccgtggaaggacactctgagc

SEQ ID NO: 205615 - DNA, 120 bp, Artificial Sequence
  ENSG00000115020_13 (sequence is synthesized)
catcctggtttaaagacataaagtttgatgacagtgacacagaacagatagctgaagaaggtgacgataatttggctaattctgccagtcctagcaagcgcacatcagtcagcagtttcc

SEQ ID NO: 205616 - DNA, 120 bp, Artificial Sequence
  ENSG00000115020_14 (sequence is synthesized)
agtccacagtggacagtgactcagccgcttctatcagcctgaacgtggagctggacaacgtgaacttccatatcaagaagccctccaagtacccacatgtgccccctcaccctgctgacc

SEQ ID NO: 205617 - DNA, 120 bp, Artificial Sequence
  ENSG00000115020_15 (sequence is synthesized)
aaaaagagtatttgatttctgacactggaggacaacagctctcaataagtgacgctttcatcaaagaatccttatttaatcgccgagtagaggaaaaatccaaagagctgcctttcacac

SEQ ID NO: 205618 - DNA, 120 bp, Artificial Sequence
  ENSG00000115020_16 (sequence is synthesized)
ctttgggctggcatcataacaacctggagctcctgagggaggagaatggggagaaacaagccatggagaggttgctttcagctaatcataaccacatgatggcactactccagcagttgc

SEQ ID NO: 205619 - DNA, 120 bp, Artificial Sequence
  ENSG00000115020_17 (sequence is synthesized)
tccatagtgactcactgtcatcatcttggagggacatcatcgtgtcattggtctgccaggttgttcagacagtccgacctgatgtcaagaaccaggatgatgacatggatatccgtcagt

SEQ ID NO: 205620 - DNA, 120 bp, Artificial Sequence
  ENSG00000115020_18 (sequence is synthesized)
ttgtccacatcaaaaaaatcccaggtggaaagaagtttgattctgtggttgtcaatggctttgtttgtaccaagaacattgcacataaaaagatgagttcttgtattaaaaaccccaaaa

SEQ ID NO: 205621 - DNA, 120 bp, Artificial Sequence
  ENSG00000115020_19 (sequence is synthesized)
ttcttctgttgaagtgttccattgagtatctctacagagaagaaactaagtttacttgcattgatcctattgtgcttcaggaaagggaattcttgaagaattatgtccagcgaatagttg

SEQ ID NO: 205622 - DNA, 120 bp, Artificial Sequence
  ENSG00000115020_20 (sequence is synthesized)
atgttcgacccaccttggttcttgttgagaaaacagtgtctcggattgcccaggacatgttattggaacatggcattactttggtcattaatgtaaagtcacaagttttggaacgaatca

SEQ ID NO: 205623 - DNA, 120 bp, Artificial Sequence
  ENSG00000115020_21 (sequence is synthesized)
gtcgaatgacccaaggtgatttagtgatgtcaatggaccagctgcttacgaaaccacacctgggcacttgtcacaaattttatatgcagatatttcagttgcctaatgaacaaaccaaga

SEQ ID NO: 205624 - DNA, 120 bp, Artificial Sequence
  ENSG00000115020_22 (sequence is synthesized)
cactgatgttttttgaaggttgtccacagcacctaggctgtacaatcaagctaagaggaggctctgattatgagctggctcgagttaaggagatcctaatatttatgatctgtgttgctt

SEQ ID NO: 205625 - DNA, 120 bp, Artificial Sequence
  ENSG00000115020_23 (sequence is synthesized)
atcattctcaactagaaatatcctttctcatggatgaatttgctatgcctcccacattaatgcaaaacccttcattccattccctgattgagggacgagggcatgagggggctgtccaag

SEQ ID NO: 205626 - DNA, 120 bp, Artificial Sequence
  ENSG00000115020_24 (sequence is synthesized)
agcagtacggtggaggttccatcccctgggatcctgacatccctcctgagtctctgccctgtgatgatagcagtttgctggaattgaggattgtgtttgagaagggtgagcaggaaaata

SEQ ID NO: 205627 - DNA, 120 bp, Artificial Sequence
  ENSG00000115020_25 (sequence is synthesized)
aaaatcttccgcaggctgttgcctctgtgaagcatcaagaacatagcacaacagcttgcccggcgggtctcccttgtgctttctttgcacctgtaccggaatcattgttgccactccctg

SEQ ID NO: 205628 - DNA, 120 bp, Artificial Sequence
  ENSG00000115020_26 (sequence is synthesized)
tggatgaccaacaagatgctttaggcagcgagcagccagagactttgcagcaaacagttgtgctgcaggatcccaaaagccagataagagcctttagagaccctctacaggatgacactg

SEQ ID NO: 205629 - DNA, 120 bp, Artificial Sequence
  ENSG00000115020_27 (sequence is synthesized)
gattatatgttactgaggaagtcacctcctctgaagataaacgaaagacttattctttggcctttaagcaggaattaaaagatgtgatcctctgtatctccccagtaatcacattccgag

SEQ ID NO: 205630 - DNA, 120 bp, Artificial Sequence
  ENSG00000115020_28 (sequence is synthesized)
aaccctttcttttaactgaaaaggggatgagatgctctacccgagattattttgcagagcaggtttactggtctcctctcctcaataaagaattcaaagaaatggagaacaggaggaaga

SEQ ID NO: 205631 - DNA, 120 bp, Artificial Sequence
  ENSG00000115020_29 (sequence is synthesized)
aacagctgctcagggatctctctggacttcagggcatgaatggaagtattcaggccaagtctattcaagtcttaccctcacatgagctagtgagcactagaattgctgagcatctgggcg

SEQ ID NO: 205632 - DNA, 120 bp, Artificial Sequence
  ENSG00000115020_30 (sequence is synthesized)
atagccagagcttgggtagaatgctggccgattatcgagccagaggaggaagaattcagcccaaaaattcagacccttttgctcattcaaaggatgcatcaagtacttcaagtggccaat

SEQ ID NO: 205633 - DNA, 120 bp, Artificial Sequence
  ENSG00000115020_31 (sequence is synthesized)
caggaagcaaaaatgagggtgatgaagagagagggcttattctgagtgatgctgtgtggtcaacaaaggtggactgtctgaatcccattaatcaccagagactttgtgtgctcttcagca

SEQ ID NO: 205634 - DNA, 120 bp, Artificial Sequence
  ENSG00000115020_32 (sequence is synthesized)
gctcttctgcccagtccagcaatgctcctagtgcctgtgtcagtccttggattgtaacaatggaattttatggaaagaatgatcttacattaggaatatttttagagagatactgtttca

SEQ ID NO: 205635 - DNA, 120 bp, Artificial Sequence
  ENSG00000115020_33 (sequence is synthesized)
ggccttcttatcagtgtccaagcatgttctgtgatacccccatggtacatcatattcggcgctttgttcatggccaaggctgtgtgcagataatcctgaaggagttggattctccagtac

SEQ ID NO: 205636 - DNA, 120 bp, Artificial Sequence
  ENSG00000115020_34 (sequence is synthesized)
ctggatatcagcatacaattcttacatattcctggtgtagaatctgcaaacaggtaacaccagttgttgctctttccaatgagtcctggtctatgtcatttgcaaaataccttgaactta

SEQ ID NO: 205637 - DNA, 120 bp, Artificial Sequence
  ENSG00000115020_35 (sequence is synthesized)
ggttttatgggcaccagtatactcgcagagccaacgctgagccctgtggtcactccatccatcatgattatcaccagtatttctcctataaccagatggtggcgtctttcagttattctc

SEQ ID NO: 205638 - DNA, 120 bp, Artificial Sequence
  ENSG00000115020_36 (sequence is synthesized)
ccattcggcttcttgaagtatgtgttccactccccaaaatattcattaagcgtcaggccccattaaaagtgtcccttcttcaggatctgaaggacttctttcaaaaagtttcacaggtat

SEQ ID NO: 205639 - DNA, 120 bp, Artificial Sequence
  ENSG00000115020_37 (sequence is synthesized)
atgttgccattgatgaaagacttgcatctttgaaaactgatacatttagtaaaacaagagaggaaaaaatggaagatatttttgcacagaaagagatggaagaaggtgagttcaagaact

SEQ ID NO: 205640 - DNA, 120 bp, Artificial Sequence
  ENSG00000115020_38 (sequence is synthesized)
ggattgagaagatgcaagcaaggctcatgtcttcctctgtagatacccctcagcaactgcagtcggtctttgagtcactcattgccaagaaacaaagtctctgtgaagtgctgcaagctt

SEQ ID NO: 205641 - DNA, 120 bp, Artificial Sequence
  ENSG00000115020_39 (sequence is synthesized)
ggaataacaggttgcaggaccttttccaacaggaaaagggtagaaagagaccttcagttcctccaagtcctggaagactgagacaaggggaagaaagcaagataagtgcgatggatgcat

SEQ ID NO: 205642 - DNA, 120 bp, Artificial Sequence
  ENSG00000115020_40 (sequence is synthesized)
ctccacggaatatttctccaggacttcagaatggagaaaaagaggatcgcttcttaacaactttgtccagccagagctccaccagttctactcatctccaattgcctacgccacctgaag

SEQ ID NO: 205643 - DNA, 120 bp, Artificial Sequence
  ENSG00000115020_41 (sequence is synthesized)
gatgggcatttgctgggatccacagacagccaagtgaaggaaaagtcaaccatgaaagccatctttgcaaatttgcttccaggaaatagctataatcctattccatttccttttgatcca

SEQ ID NO: 205644 - DNA, 120 bp, Artificial Sequence
  ENSG00000115020_42 (sequence is synthesized)
gataaacactacttaatgtatgaacatgaacgagtgcccattgcagtctgcgagaaggaacccagctccatcattgcttttgctctcagttgtaaagaataccgaaatgccttagaggaa

SEQ ID NO: 205645 - DNA, 120 bp, Artificial Sequence
  ENSG00000115020_43 (sequence is synthesized)
ttgtctaaagcgactcagtggaacagtgccgaagaagggcttccaacaaatagtacttcagatagcagaccaaagagtagcagccctatcagattacctgaaatgagtggaggacagaca

SEQ ID NO: 205646 - DNA, 120 bp, Artificial Sequence
  ENSG00000115020_44 (sequence is synthesized)
aatcgtacaacagaaacagaaccacaaccaaccaaaaaggcttctggaatgttgtccttcttcagagggacagcagggaaaagccccgatctctcttcccagaagagagagaccttacgt

SEQ ID NO: 205647 - DNA, 120 bp, Artificial Sequence
  ENSG00000115020_45 (sequence is synthesized)
ggagcagatagtgcttactaccaggttgggcagacgggcaaggaggggaccgagaatcaaggcgttgagcctcaagatgaagtagatggaggagatacacaaaagaagcaactcataaat

SEQ ID NO: 205648 - DNA, 120 bp, Artificial Sequence
  ENSG00000115020_46 (sequence is synthesized)
cctcatgtggaacttcaattttcagatgctaatgccaagttttactgtcggctctactatgcgggagagtttcataagatgcgtgaagtgattctggacagcagtgaagaagatttcatt

SEQ ID NO: 205649 - DNA, 120 bp, Artificial Sequence
  ENSG00000115020_47 (sequence is synthesized)
cgttccctctcccactcatcaccctggcaggcccggggaggcaaatcaggagctgccttctatgcaactgaggatgatagatttattttgaagcaaatgcctcgtctggaagtccagtcc

SEQ ID NO: 205650 - DNA, 120 bp, Artificial Sequence
  ENSG00000115020_48 (sequence is synthesized)
ttcctcgactttgcaccacattacttcaattatattacaaatgctgttcaacaaaagaggcccacggcgttggccaaaattcttggagtttacagaattggttataagaactctcagaac

SEQ ID NO: 205651 - DNA, 120 bp, Artificial Sequence
  ENSG00000115020_49 (sequence is synthesized)
aacactgagaagaagttagatctccttgtcatggaaaatcttttctacgggagaaagatggcacaggtttttgatttgaagggctctcttaggaatcggaatgtaaaaactgacactgga

SEQ ID NO: 205652 - DNA, 120 bp, Artificial Sequence
  ENSG00000115020_50 (sequence is synthesized)
aaagagagttgtgatgtggtcctgctagatgaaaatctcctaaagatggttcgagacaaccctctatatattcgttctcattccaaagctgtgctgagaacctcgatccatagtgactcc

SEQ ID NO: 205653 - DNA, 120 bp, Artificial Sequence
  ENSG00000115020_51 (sequence is synthesized)
catttcctttctagccacctcattatagattattctttgctggttgggcgagatgatactagcaatgagctagtagttggaattatagattatattcgaacatttacatgggacaaaaag

SEQ ID NO: 205654 - DNA, 120 bp, Artificial Sequence
  ENSG00000115020_52 (sequence is synthesized)
cttgagatggttgtgaaatcaacaggaattttaggtggacaaggtaaaatgccaacagtggtgtctccggagttgtacaggactaggttttgtgaggcaatggacaagtatttcctaatg

SEQ ID NO: 205655 - DNA, 120 bp, Artificial Sequence
  ENSG00000115020_53 (sequence is synthesized)
gtaccagaccactggacaggcttgggtctgaattgctgaaatcaagcacatattttgaaatggactgtgaaggaaaaggggacaggaacaaaggaccaaaaataagctacatgttttatt

SEQ ID NO: 205656 - DNA, 120 bp, Artificial Sequence
  ENSG00000115020_54 (sequence is synthesized)
tcttcatcgtgttcaccactgtatgccaaggcttttcagttctgtggctgtttagactgtccgtaatggaatggtaaaactccatgaatttgcactttggtttttgatacctgtggagct

SEQ ID NO: 205657 - DNA, 120 bp, Artificial Sequence
  ENSG00000115020_55 (sequence is synthesized)
gtctgtaggttgggaagtggcatgaaaattttcttaagctaaaatacagacatgtttcaaagggctaaagttggagatgagtagatagggtgaaaaatgggttaaatttgctagcttaat

SEQ ID NO: 205658 - DNA, 120 bp, Artificial Sequence
  ENSG00000115020_56 (sequence is synthesized)
tgttttaagaagaaaacagtgtctcataaattgactatcctggcatcacatttaacatgttatctacttagaaagcatttgtagagctgctgaatttgttttgtgtttttctgtaataat

SEQ ID NO: 205659 - DNA, 120 bp, Artificial Sequence
  ENSG00000115020_57 (sequence is synthesized)
ttaatgttacttattatcagaatttctgaaacctttacaaaaattctgatttattccattaatggccggttaaacacgtgggcatttattgttttattgaggaatttgacttaaactggg

SEQ ID NO: 205660 - DNA, 120 bp, Artificial Sequence
  ENSG00000115020_58 (sequence is synthesized)
aatcctgtcatgttgtttatctttccagcttgcctgtttttgagtatgtttgatgtttttaaaattttgtcttctctgtggaagacaggaggctacagcaattaactttaagcctccttt

SEQ ID NO: 205661 - DNA, 120 bp, Artificial Sequence
  ENSG00000115020_59 (sequence is synthesized)
tagagatatttttaaaacttgtttaaaatttttgtgcaattcatatattaaattgcacttacttgcatacgctcatattctagggttttttctctatttttagggtatcatagtaaatca

SEQ ID NO: 205662 - DNA, 120 bp, Artificial Sequence
  ENSG00000115020_60 (sequence is synthesized)
ttagtaaatgagtctgtagttactaaaccctaatggaataattattaatgaaagatttttgaaatataaaaaataaattaggcccaatccaagaaattgagtgagaaggaaacacttgtt

SEQ ID NO: 205663 - DNA, 120 bp, Artificial Sequence
  ENSG00000115020_61 (sequence is synthesized)
ttattcacagaggtaaagtgtcttttcaatataaccagcaatttaggtggcatctataaaataaaaaatttctactgtggacatccccttttccaactttctacataatggctagttctg

SEQ ID NO: 205664 - DNA, 120 bp, Artificial Sequence
  ENSG00000115020_62 (sequence is synthesized)
ccccttttccaactttctacataatggctagttctgactactaagaaatgttaagaaataggccaagtgcggtggctcacgcctataatcctatcactttgggaggcctaggcaggcaga

SEQ ID NO: 205665 - DNA, 66 bp, Artificial Sequence
  ENSG00000115020_63 (sequence is synthesized)
tactaaaaagacaaaaaattagctgggcatggtggcatatacctgtaaccccaactacttggggga

SEQ ID NO: 205666 - DNA, 89 bp, Artificial Sequence
  ENSG00000115020_64 (sequence is synthesized)
caaaacgaaacaaaaaaagaaagttattcttagtaaggaacttcttgtttaatagcatttttgtttattttaaaaagtgatcagaagta

SEQ ID NO: 205667 - DNA, 120 bp, Artificial Sequence
  ENSG00000115020_65 (sequence is synthesized)
taatagcatttttgtttattttaaaaagtgatcagaagtagtaaactatctttgaggaaatactgtaaccccagaatatttcctcttgacttctttttgtaacaaggataatttagggat

SEQ ID NO: 205668 - DNA, 120 bp, Artificial Sequence
  ENSG00000115020_66 (sequence is synthesized)
ttataaagttgtaaggatttcactgtttttggactgcctataataatagcacattaaccttcacataataagaaatctggacaagttcagttacacagtatgatgaatacttgaattagg

SEQ ID NO: 205669 - DNA, 120 bp, Artificial Sequence
  ENSG00000115020_67 (sequence is synthesized)
aacattgtggaaaatttgctttagagaatcaaggcagtagtttggtatttggtgcttattaaaaatgtggtttgttttgaactggaagcaagttgaccaaggacttatgactaatgtgat

SEQ ID NO: 205670 - DNA, 120 bp, Artificial Sequence
  ENSG00000115020_68 (sequence is synthesized)
gctaagttccacttggccccttttaaaaacgtgtatgtgccttttgaagatacacaaaacactgaggattttagttttgaaatcaaagactattaaaggagctgtacagaggtaaaaaaa

SEQ ID NO: 205671 - DNA, 120 bp, Artificial Sequence
  ENSG00000115020_69 (sequence is synthesized)
taaatgtggaacattattaacttactttgtgtctaggaacaatggattttgtatctgatttaaaatgccaacactgttttgtctctgttcattttttctgtgaggatacttaaggttatt

SEQ ID NO: 205672 - DNA, 120 bp, Artificial Sequence
  ENSG00000115020_70 (sequence is synthesized)
attcctgtctgtttcctgtactcccctagtcatgagcacttgaagtacaaggtgtctccccctaggtgcaattaggttgtttctttgtttttagtttcaattctatgtgcatagcaggaa

SEQ ID NO: 205673 - DNA, 120 bp, Artificial Sequence
  ENSG00000115020_71 (sequence is synthesized)
tgctccacaggaatggcttctgacaataatctgtcctgttgattttgttttccttgcccatgacttgaacaactgtgttttaaagtactgtagtctagtaggtaactttgtggcaaaaat

SEQ ID NO: 205674 - DNA, 120 bp, Artificial Sequence
  ENSG00000115020_72 (sequence is synthesized)
tttcaatataatacattctgaaacaatagttgctgccttgcaaaggtaatctctcattttaaaattggacagtattaatgaaggggaaatatacaatttatttctattgagtggtagaac

SEQ ID NO: 205675 - DNA, 120 bp, Artificial Sequence
  ENSG00000115020_73 (sequence is synthesized)
tatatgtctggtcccttgctgctcttgtttaggccactatcatagatatatttcaaatattgtactactcagtgttaagtattgaatgactgtttccctttccttcaaggcctagagtat

SEQ ID NO: 205676 - DNA, 120 bp, Artificial Sequence
  ENSG00000115020_74 (sequence is synthesized)
attctgaaaatttaggaatgaggaagaaatcttaatacttccttccttaacatacaacatgagtcccgagaataattgatagtagcaagagaaaactatgtcagtaacatgttgctttgt

SEQ ID NO: 205677 - DNA, 120 bp, Artificial Sequence
  ENSG00000115020_75 (sequence is synthesized)
ataaaaatcttatttataaatgtgaagctttttgatgccatcaaaacttattaaaaaataggatttacttttttctaattctgacctaagaaaaataatgagaacaagctgttgcaagct

SEQ ID NO: 205678 - DNA, 120 bp, Artificial Sequence
  ENSG00000115020_76 (sequence is synthesized)
cttttgtagtctattgaatattttatagatattcaaaatttcctacaaactataattttttccatgatttagcagtgagtgattttctagctttggctcttattaggtattgtaaatagt

SEQ ID NO: 205679 - DNA, 120 bp, Artificial Sequence
  ENSG00000115020_77 (sequence is synthesized)
agggttatatcgatatcagcttttgtgatggcattgtggtcatcagcttcatgacattttacccatttgcagtgatcctgtgtaaaactgccaaggaaagtaattacctgtaggagtttg

SEQ ID NO: 205680 - DNA, 120 bp, Artificial Sequence
  ENSG00000115020_78 (sequence is synthesized)
ctgagcttgaagagtgaaaactgttgtgaatgagcctgatcataaaacggaccaggccattcattattcctcaagtgttaatatactgacttatgcagtattcaaaccatctagtgcaat

SEQ ID NO: 205681 - DNA, 120 bp, Artificial Sequence
  ENSG00000115020_79 (sequence is synthesized)
gtttttgtttttgttttttttttggtaacacaggtgcagtgtattatagaaaaaataaaaactacaatcattagcagttttaatactgctgtgtcagttttgtaaaaaatgtacattatg

SEQ ID NO: 205682 - DNA, 120 bp, Artificial Sequence
  ENSG00000115020_80 (sequence is synthesized)
tcttttgacatgttgaattttaaactagggaaatgacattgtaaatcatagtagcctcttttaatttaatatgaaaaatgccactatattgaaagtacttaatgtattgtatatatttct

SEQ ID NO: 205683 - DNA, 120 bp, Artificial Sequence
  ENSG00000115020_81 (sequence is synthesized)
ctactttggttctagctattttatatgattgacatgttatttaaaagataactgccttgaacttttggagacttgtactgtaaataaagaaatcttaacaataaactcagaatctactta

SEQ ID NO: 205684 - DNA, 120 bp, Artificial Sequence
  ENSG00000115020_82 (sequence is synthesized)
tagaccactgcaggtacttttcagtgtttactgccaattagaatgtagcaagcttattttatagtctttcttcatcagtgggaataaaaagtagtttattagaagatgatttttctaaca

SEQ ID NO: 205685 - DNA, 120 bp, Artificial Sequence
  ENSG00000115020_83 (sequence is synthesized)
ttttttcctgctgtttgaggaaagttaaaactttttttacttggtaggcagcagtgatgaaaaagctgccattagaatcaaacattttattgtttactttaaatttgatcagacaataaa

SEQ ID NO: 205686 - DNA, 120 bp, Artificial Sequence
  ENSG00000115020_84 (sequence is synthesized)
agtccatttactggcctttaatctacctgcactggctgcccaggacctctctgctcttacctcctactgctctctcttcactcatcctgctgctgccccactggcctcctgactgggcct

SEQ ID NO: 205687 - DNA, 120 bp, Artificial Sequence
  ENSG00000115020_85 (sequence is synthesized)
aaaaggtaggaggtagtcaccatctggaatccaaacacaggctggacagctgggccataggatctcatgccagcctgtccttctggcttcctctgtcccacgtggctgagggtatttggt

SEQ ID NO: 205688 - DNA, 120 bp, Artificial Sequence
  ENSG00000115020_86 (sequence is synthesized)
gattccttttatttcttgttttctccctcagcaccaccatgcccagtgtaaagcttgtagtctttaaaaggaactacatctgactgctcttcccataatgtgcaacttccaaggtggcat

SEQ ID NO: 205689 - DNA, 120 bp, Artificial Sequence
  ENSG00000115020_87 (sequence is synthesized)
ttctttgcatttataacatggatgttctgctctattcttttctctttcttcatttaacattttaaagcctatttgcctttgccgttacccagtaacataatatttcactaaacccattaa

SEQ ID NO: 205690 - DNA, 120 bp, Artificial Sequence
  ENSG00000115020_88 (sequence is synthesized)
gatgcttgaactagattgggggaaaatcattcacacattccaaaatatctccataataattcataatgcttattatgtatattctatatttattaaaacaatttcttctctaatgtaaaa

SEQ ID NO: 205691 - DNA, 120 bp, Artificial Sequence
  ENSG00000115041_0 (sequence is synthesized)
aaacatgaggcagctgccagccggcctgggcagtcttgtctgcctcggctgtgaagtggggaggctggcaacagttttcttcagcgcccaggatgcagccggctaaggaagtgacaaagg

SEQ ID NO: 205692 - DNA, 120 bp, Artificial Sequence
  ENSG00000115041_1 (sequence is synthesized)
cgtcggacggcagcctcctgggggacctcgggcacacaccacttagcaagaaggagggtatcaagtggcagaggccgaggctcagccgccaggctttgatgagatgctgcctggtcaagt

SEQ ID NO: 205693 - DNA, 120 bp, Artificial Sequence
  ENSG00000115041_2 (sequence is synthesized)
ggatcctgtccagcacagccccacagggctcagatagcagcgacagtgagctggagctgtccacggtgcgccaccagccagaggggctggaccagctgcaggcccagaccaagttcacca

SEQ ID NO: 205694 - DNA, 120 bp, Artificial Sequence
  ENSG00000115041_3 (sequence is synthesized)
agaaggagctgcagtctctctacaggggctttaagaatgagtgtcccacgggcctggtggacgaagacaccttcaaactcatttacgcgcagttcttccctcagggagatgccaccacct

SEQ ID NO: 205695 - DNA, 120 bp, Artificial Sequence
  ENSG00000115041_4 (sequence is synthesized)
atgcacacttcctcttcaacgcctttgatgcggacgggaacggggccatccactttgaggactttgtggttggcctctccatcctgctgcggggcacagtccacgagaagctcaagtggg

SEQ ID NO: 205696 - DNA, 120 bp, Artificial Sequence
  ENSG00000115041_5 (sequence is synthesized)
cctttaatctctacgacattaacaaggatggctacatcaccaaagaggagatgctggccatcatgaagtccatctatgacatgatgggccgccacacctaccccatcctgcgggaggacg

SEQ ID NO: 205697 - DNA, 120 bp, Artificial Sequence
  ENSG00000115041_6 (sequence is synthesized)
cgccggcggagcacgtggagaggttcttcgagaaaatggaccggaaccaggatggggtagtgaccattgaagagttcctggaggcctgtcagaaggatgagaacatcatgagctccatgc

SEQ ID NO: 205698 - DNA, 120 bp, Artificial Sequence
  ENSG00000115041_7 (sequence is synthesized)
agctgtttgagaatgtcatctaggacacgtccaaaggagtgcatggccacagccacctccacccccaagaaacctccatcctgccaggagcagcctccaagaaacttttaaaaaatagat

SEQ ID NO: 205699 - DNA, 120 bp, Artificial Sequence
  ENSG00000115041_8 (sequence is synthesized)
cacacacacacacacacacacacagccattcatctgggctggcagaggggacagagttcagggaggggctgagtctggctaggggccgagtccaggagccccagccagcccttcccaggc

SEQ ID NO: 205700 - DNA, 120 bp, Artificial Sequence
  ENSG00000115041_9 (sequence is synthesized)
gccgagtccaggagccccagccagcccttcccaggccagcgaggcgaggctgcctctgggtgagtggctgacagagcaggtctgcaggccaccagctgctggatgtcaccaagaaggggc

SEQ ID NO: 205701 - DNA, 120 bp, Artificial Sequence
  ENSG00000115041_10 (sequence is synthesized)
tcgagtgcccctgcaggggagggtccaatctccggtgtgagcccacctcgtcccgttctccattctgctttcttgccacacagtgggccggccccaggctcccctggtctcctccccgta

SEQ ID NO: 205702 - DNA, 120 bp, Artificial Sequence
  ENSG00000115041_11 (sequence is synthesized)
gccactctctgcccactacctatgcttctagaaagcccctcacctcaggaccccagagggaccagctggggggcaggggggagagggggtaatggaggccaagcctgcagctttctggaa

SEQ ID NO: 205703 - DNA, 120 bp, Artificial Sequence
  ENSG00000115041_12 (sequence is synthesized)
ggggtcccaggatcccctgctactccactgacctggaagagctgggtaccaggccacccactgtggggcaagcctgagtggtgaggggccactgggccccattctccctccatggcagga

SEQ ID NO: 205704 - DNA, 120 bp, Artificial Sequence
  ENSG00000115041_13 (sequence is synthesized)
aggcgggggatttcaagtttagggattgggtcgtggtggagaatctgagggcactctctgccagctccacagggtgggatgagcctctccttgccccagtcctggttcagtgggaatgca

SEQ ID NO: 205705 - DNA, 120 bp, Artificial Sequence
  ENSG00000115041_14 (sequence is synthesized)
gtgggtggggctgtacacaccctccagcacagactgttccctccaaggtcctcttaggtcccgggaggaacgtggttcagagactggcagccagggagcccggggcagagctcagaggag

SEQ ID NO: 205706 - DNA, 120 bp, Artificial Sequence
  ENSG00000115041_15 (sequence is synthesized)
tctgggaaggggcgtgtccctcctcttcctgtagtgcccctcccatggcccagcagcttggctgagccccctctcctgaagcagtgtcgccgtccctctgccttgcacaaaaagcacaag

SEQ ID NO: 205707 - DNA, 120 bp, Artificial Sequence
  ENSG00000115041_16 (sequence is synthesized)
cattccttagcagctcaggcgcagccctagtgggagcccagcacactgcttctcggaggccaggccctcctgctggctgaggcttgggcccagtagccccaatatggtggccctggggaa

SEQ ID NO: 205708 - DNA, 120 bp, Artificial Sequence
  ENSG00000115041_17 (sequence is synthesized)
gaggccttgggggtctgctctgtgcctgggatcagtggggccccaaagcccagcccggctgaccaacattcaaaagcacaaaccctggggactctgcttggctgtcccctccatctgggg

SEQ ID NO: 205709 - DNA, 120 bp, Artificial Sequence
  ENSG00000115041_18 (sequence is synthesized)
atggagaatgccagcccaaagctggagccaatggtgagggctgagagggctgtggctgggtggtcagcagaaacccccaggaggagagagatgctgctcccgcctgattggggcctcacc

SEQ ID NO: 205710 - DNA, 120 bp, Artificial Sequence
  ENSG00000115041_19 (sequence is synthesized)
cagaaggaacccggtcccaggccgcatggcccctccaggaacattcccacataatacattccatcacagccagcccagctccactcagggctggcccggggagtccccgtgtgccccaag

SEQ ID NO: 205711 - DNA, 120 bp, Artificial Sequence
  ENSG00000115041_20 (sequence is synthesized)
aggctagccccagggtgagcagggccctcagaggaaaggcagtatggcggaggccatgggggcccctcggcattcacacacagcctggcctcccctgcggagctgcatggacgcctggct

SEQ ID NO: 205712 - DNA, 120 bp, Artificial Sequence
  ENSG00000115041_21 (sequence is synthesized)
ccaggctccaggctgactgggggcctctgcctccaggagggcatcagctttccctggctcagggatcttctccctcccctcacccgctgcccagccctcccagctggtgtcactctgcct

SEQ ID NO: 205713 - DNA, 120 bp, Artificial Sequence
  ENSG00000115041_22 (sequence is synthesized)
ctaaggccaaggcctcaggagagcatcaccaccacacccctgccggccttggccttggggccagactggctgcacagcccaaccaggaggggtctgcctcccacgctgggacacagaccg

SEQ ID NO: 205714 - DNA, 120 bp, Artificial Sequence
  ENSG00000115041_23 (sequence is synthesized)
gccgcatgtctgcatggcagaagcgtctcccttggccacggcctgggagggtggttcctgttctcagcatccactaatattcagtcctgtatattttaataaaataaacttgacaaagga

SEQ ID NO: 205715 - DNA, 120 bp, Artificial Sequence
  ENSG00000115041_24 (sequence is synthesized)
gccgcgcctcgaagtttgccggctgactcggaaagttgcgctcgggctcggccgccgcgtccggtccccgcgtccagcctccggcctgacccgctcgccgccgccgccgccctccacggg

SEQ ID NO: 205716 - DNA, 80 bp, Artificial Sequence
  ENSG00000115041_25 (sequence is synthesized)
gcctgccgggggcatgtgagccgtcgccgcccccgagaggccgtgcgggctgcaggggccccggtgcctccgaggcagcg

SEQ ID NO: 205717 - DNA, 120 bp, Artificial Sequence
  ENSG00000115041_26 (sequence is synthesized)
cgtgggcgaggggtgcgcccgggccccagggccccaggcagcccggcttgccatgggcatccagggcatggagctgtgcgccatggccgtggtggtgctgctgttcatcgccgtcctcaa

SEQ ID NO: 205718 - DNA, 120 bp, Artificial Sequence
  ENSG00000115041_27 (sequence is synthesized)
aggccagcctgggaccccagcctgggctacatcgcccctgtctctattggaggtgtgttttcattcattcacacccttccccattcattgagtgcctgcttcacacaggccactgagctc

SEQ ID NO: 205719 - DNA, 120 bp, Artificial Sequence
  ENSG00000115041_28 (sequence is synthesized)
ccagtgggacccacagagcatgggtacagagagctgggaccacactgcggttttccagttggctaggaagacagagccaggctgcagagtccaacaaaccaggctccaccctgcccactg

SEQ ID NO: 205720 - DNA, 120 bp, Artificial Sequence
  ENSG00000115041_29 (sequence is synthesized)
ctcacgccctgagtaagccggggcacctcattgatcctttctaagccttccgtgagaagccaggctggaacctgtccacagggcacatttgaagatgggaaataatgtgtgcagtgcctg

SEQ ID NO: 205721 - DNA, 120 bp, Artificial Sequence
  ENSG00000115041_30 (sequence is synthesized)
gtgatcaggaggccccaccctcagcccctccttggtcctgttcagtgcaccccaaggattggtgctggctctttgccttgggctgcattctggtggtgtgttaacgagagaacgggcaga

SEQ ID NO: 205722 - DNA, 120 bp, Artificial Sequence
  ENSG00000115041_31 (sequence is synthesized)
aatcactgccctgggcttgccatgggtgatatttggtgtttgccgagtataacagggctgaacagacaatggcagcctcatgcggcccccacgatctcacacacacattcagacacctca

SEQ ID NO: 205723 - DNA, 120 bp, Artificial Sequence
  ENSG00000115041_32 (sequence is synthesized)
cactcacacctatgcacacacaccggtgcctctaccacacacaagcttgcacactcatcatgcacacataggtaggcataccatacacacttgcatactcacatacacacaccacatgca

SEQ ID NO: 205724 - DNA, 120 bp, Artificial Sequence
  ENSG00000115041_33 (sequence is synthesized)
ggcacccacacaccatgcacactcatgggatcacacatgtgagtatggtgcgtataagagtctgcctctgactttaaggaaaaggtgcagacttgcccttgacagctgcatcttgtttgc

SEQ ID NO: 205725 - DNA, 120 bp, Artificial Sequence
  ENSG00000115041_34 (sequence is synthesized)
tctcttggaccctctctagctgtgtgatttccagggagcgtttgtcccctggccaggagaatgggcatgatcggggtcccagcctcctaggcttgatgggggtcatgagtggaggggatc

SEQ ID NO: 205726 - DNA, 120 bp, Artificial Sequence
  ENSG00000115041_35 (sequence is synthesized)
aactgaggggtctgggcaaacagcaggcacagtggctgacagccacagccagaggtccatgcctgtgcacaaagggactggctgctacgcaccagatccccgtcctttacccacaaatgc

SEQ ID NO: 205727 - DNA, 120 bp, Artificial Sequence
  ENSG00000115041_36 (sequence is synthesized)
cactccagggtgctcccagcacgattccagccccctcccttttgccaccaccacctctgcttccccacagagcccctacccatctgtgatgctgtcaccttggctgagacttgtccccaa

SEQ ID NO: 205728 - DNA, 120 bp, Artificial Sequence
  ENSG00000115041_37 (sequence is synthesized)
ccccttcccatggaagcgctagcacctgtgaatgcatgagtgagttccacatgcacccccaacttctcggggatgggggtggcaggttttgcaggtagcagaaacatgatgaggtcacta

SEQ ID NO: 205729 - DNA, 120 bp, Artificial Sequence
  ENSG00000115041_38 (sequence is synthesized)
aaagcacatgcacatagctcgaccgggaaggaccgccttcagggcactgttcattctgcatcagaatgaaaatgcgcctgctctcccttagggtgggggcgagagcacggtggccatcgc

SEQ ID NO: 205730 - DNA, 120 bp, Artificial Sequence
  ENSG00000115041_39 (sequence is synthesized)
gatttcctccacttcagtcttccagggttttcttggtggcaacaagtatttaaggggtgctgcagtggtaccctccctccatccctcaggtcctgcagatgctcagcctcatcctcccgt

SEQ ID NO: 205731 - DNA, 120 bp, Artificial Sequence
  ENSG00000115041_40 (sequence is synthesized)
ctctctctggcaggcagaggtggctcaggacgggtggggctggtgtgcatcctttgccgaagctttctgcacacccgtgacagcagcagctatgctgagtggggtggacggggagaaagg

SEQ ID NO: 205732 - DNA, 120 bp, Artificial Sequence
  ENSG00000115041_41 (sequence is synthesized)
tgacagaggggccggcatggcgtgttcaagtcagggcgggggggaccacccctgcacggcccacccctgcatgccccatcccacctcacggaagcttcctagagggcagggcctttccac

SEQ ID NO: 205733 - DNA, 120 bp, Artificial Sequence
  ENSG00000115041_42 (sequence is synthesized)
acccagctgtcaggacacgtttgctgaacaacttgtcaaaggcgcacaggagacagggccagggctgggccagggcaccagcgatgggtttgttcccctgcatggatgtgtttaccggac

SEQ ID NO: 205734 - DNA, 120 bp, Artificial Sequence
  ENSG00000115041_43 (sequence is synthesized)
cttgtgccggcactgggagcagatgtgaacgacacatccaagagcctatttgattgtgcaaggaaggcagtgtggagctcatcaccctgatttaccagagcgtccatggcagctcagaga

SEQ ID NO: 205735 - DNA, 120 bp, Artificial Sequence
  ENSG00000115041_44 (sequence is synthesized)
ggtcacgtgactcagcagatggcacaagaagcgggggttggggtgggggaggctcgggcccagagctccacggtgcccaccctgacgagcgtctttggtgggagctgagggacgagggag

SEQ ID NO: 205736 - DNA, 120 bp, Artificial Sequence
  ENSG00000115041_45 (sequence is synthesized)
cccagggacctcacggacagaggagccgggactccaatgtgccctttgtctcccttggccatagctcccgggtctcctctcttcagtccaaacacgtcccgtgtgtgtcccgcaaggagg

SEQ ID NO: 205737 - DNA, 120 bp, Artificial Sequence
  ENSG00000115041_46 (sequence is synthesized)
ccgggctggtgtggtcacactgagggctttgtgcacgtgtgaagtgctgcgcggtgtgcagatgaggcatcccccctctttgggagctggcacaggctctgggtgcaaagaacaatgggg

SEQ ID NO: 205738 - DNA, 120 bp, Artificial Sequence
  ENSG00000115041_47 (sequence is synthesized)
cccattcagtgcagccccactgtgtgctctgcgaggcccagcacggtgtcctgagccttggggtcctgtgggaggggggcggcccagacactgtgcccttgtactggggtttttccattc

SEQ ID NO: 205739 - DNA, 120 bp, Artificial Sequence
  ENSG00000115041_48 (sequence is synthesized)
agcagaagtggggccagagacacatgtcgggaacagctgggagtgaaagccaaggcccagcctgggagtcctggaggcttgggtgaggtagaacgtcggcaaggagtggacaggacccag

SEQ ID NO: 205740 - DNA, 120 bp, Artificial Sequence
  ENSG00000115041_49 (sequence is synthesized)
ggtcctggagacagtgggcaagggctagagcatctgtggctgggccctgggtggccaattctgggtgtgaagaccccaggatggagtcaggaggtggccagcagtggggcctctaagagg

SEQ ID NO: 205741 - DNA, 120 bp, Artificial Sequence
  ENSG00000115041_50 (sequence is synthesized)
ggagcccaggagactcagagcacaggcagcctggccccaccctacccaggagaggcgccccatcctcagcctagaagctccttggaccctcttccatgacccggaagctgggactctggc

SEQ ID NO: 205742 - DNA, 120 bp, Artificial Sequence
  ENSG00000115041_51 (sequence is synthesized)
ctgccctgcatgcctcccctgcatctaaagcctctccctgcaggatgcctctccagaggcatggccagtgccacaactggacagacctgtttctcaagtttgatgcccacaagggctgtg

SEQ ID NO: 205743 - DNA, 120 bp, Artificial Sequence
  ENSG00000115041_52 (sequence is synthesized)
ggacttgggtttcttcaactggaataataatgtcacccacaaataacctggggtcccagctgcagacaaccgaaacagggtgggctccaggcctcaggaagttcacagaaactccggagg

SEQ ID NO: 205744 - DNA, 120 bp, Artificial Sequence
  ENSG00000115041_53 (sequence is synthesized)
accagagaacgaggtctgaatgggacgaagccagggccccacctagcgccttgggagatgcctggcatcctggaccactctggcaggaacgctctagcagctgctgcacgcttctgtgtg

SEQ ID NO: 205745 - DNA, 120 bp, Artificial Sequence
  ENSG00000115041_54 (sequence is synthesized)
aaacatgaggcagctgccagccggcctgggcagtcttgtctgcctcggctgtgaagtggggaggctggcaacagttttcttcagcgcccaggatgcagccggctaagcaggctcgtttca

SEQ ID NO: 205746 - DNA, 120 bp, Artificial Sequence
  ENSG00000115041_55 (sequence is synthesized)
tcgacgaggaaactgagggccggggagcggcagagtcaggacctttctgaacaccggcacacctgccctgaatgcatccacagctgcagggccttggggaccaccggagatggttgtgtg

SEQ ID NO: 205747 - DNA, 120 bp, Artificial Sequence
  ENSG00000115041_56 (sequence is synthesized)
tgtcccagcctcttacaggacaggtgtcaggagcccaaagtggaggcagctgccctggtccaagtccacagtgagaggacccactgccctgagctggtgtggagactgcatgtatagcag

SEQ ID NO: 205748 - DNA, 120 bp, Artificial Sequence
  ENSG00000115041_57 (sequence is synthesized)
aattacgtctgggtccaagcaaacatgaggcagctgccagccggcctgggcagtcttgtctgcctcggctgtgaagtggggaggctggcaacagttttcttcagcgcccaggatgcagcc

SEQ ID NO: 205749 - DNA, 120 bp, Artificial Sequence
  ENSG00000115041_58 (sequence is synthesized)
ggctaagggtgccaagaggatcagctgaggtgatggcatgaagccctttgagcatggcaacactacacatggaaaatgtgccttctctcctgtcacctcaagtctccccagcaaccacca

SEQ ID NO: 205750 - DNA, 120 bp, Artificial Sequence
  ENSG00000115041_59 (sequence is synthesized)
ataggcagagacacattgagcgaccctgcatgactacagagatgggaatttccagagtcaggctgcacacagatgtgcacacagccagctctgacctccagcagaagacagtcctcccct

SEQ ID NO: 205751 - DNA, 120 bp, Artificial Sequence
  ENSG00000115041_60 (sequence is synthesized)
cctttgcctttcctctgcgggccttaactgccaaaggtcactctgggagcttggccactcctgcccctgccagactggcagagtgggtggcctgagtcctgcacttacatctggttcttc

SEQ ID NO: 205752 - DNA, 120 bp, Artificial Sequence
  ENSG00000115041_61 (sequence is synthesized)
aaacatgaggcagctgccagccggcctgggcagtcttgtctgcctcggctgtgaagtggggaggctggcaacagttttcttcagcgcccaggatgcagccggctaagtcacctctgccac

SEQ ID NO: 205753 - DNA, 120 bp, Artificial Sequence
  ENSG00000115041_62 (sequence is synthesized)
atctgctctggaaggctttctgggagtttctctggagcacagttgatgagaaccatggagactgaactagcggctcgagggtttcaccttggcacactcctgacagtctgactccatctt

SEQ ID NO: 205754 - DNA, 120 bp, Artificial Sequence
  ENSG00000115041_63 (sequence is synthesized)
ctctcaggggacctagagtgtagggagccacgaggcaaaatgtccggtccaggtcctggaggtttgttccaagtgctcagcctctgtctgtggtgtggaaactctcgggatgatggtgtg

SEQ ID NO: 205755 - DNA, 120 bp, Artificial Sequence
  ENSG00000115041_64 (sequence is synthesized)
gtgtttgcggcagagactggactgtgttcagggggagaggaaggcatgggggacagccctgcctcctacattcccgcagtgacagttttctcaggcactgggaagtcgccgcccctccct

SEQ ID NO: 205756 - DNA, 120 bp, Artificial Sequence
  ENSG00000115042_0 (sequence is synthesized)
gcttttctctcgggtgatccggccgagtggccctgggttagcagctgctgcatttccccggctggctgcggtcactggtggcagtgctcaggcgcccgccgcccttgaccttcggccccg

SEQ ID NO: 205757 - DNA, 120 bp, Artificial Sequence
  ENSG00000115042_1 (sequence is synthesized)
cgagctctaaccctacagcgcaggaagatcggccgccgcggccaggctctgatgctggtgtctggtagaagaaggttactcacagttctgctgcaggctcagaagtggccctttcaaccc

SEQ ID NO: 205758 - DNA, 120 bp, Artificial Sequence
  ENSG00000115042_2 (sequence is synthesized)
tccagagacatgagactagtgcagttccgggcaccccacctggtggggcctcacttgggcctggagacagggaatggtggaggggttatcaacctcaatgcctttgaccccacactcccg

SEQ ID NO: 205759 - DNA, 120 bp, Artificial Sequence
  ENSG00000115042_3 (sequence is synthesized)
aagacgatgacgcagttcctagagcagggagaggccaccctctcagtggcaagaagagccctggctgcccagttgccagtcctaccacggtcggaggtaaccttcctggctccagtcaca

SEQ ID NO: 205760 - DNA, 120 bp, Artificial Sequence
  ENSG00000115042_4 (sequence is synthesized)
cgaccagataaggtggtgtgtgtgggcatgaattatgtggaccactgcaaagaacagaacgtgcccgtgcccaaggagcccatcatcttcagcaagtttgccagctccatcgtggggccc

SEQ ID NO: 205761 - DNA, 120 bp, Artificial Sequence
  ENSG00000115042_5 (sequence is synthesized)
tatgatgaggtggtcctcccaccacagagccaggaggtagattgggaagtggagctggccgtggtcattggaaagaaaggcaagcacatcaaggccacagatgctatggcccacgtggcc

SEQ ID NO: 205762 - DNA, 120 bp, Artificial Sequence
  ENSG00000115042_6 (sequence is synthesized)
ggcttcactgtggctcatgacgtgagtgctcgtgactggcaaatgagacgtaatgggaaacaatggctgctgggaaaaaccttcgacaccttctgccctctgggccctgccttggtgacc

SEQ ID NO: 205763 - DNA, 120 bp, Artificial Sequence
  ENSG00000115042_7 (sequence is synthesized)
aaggacagtgtagcagatccacacaacttaaagatctgctgccgagtgaatggggaagtggtccagagcggcaacaccaaccagatggtattcaagacagaggacctgatagcctgggtc

SEQ ID NO: 205764 - DNA, 120 bp, Artificial Sequence
  ENSG00000115042_8 (sequence is synthesized)
tcccagtttgttaccttttacccaggggatgtcatcctaactgggacccccccaggtgtcggtgtattcaggaaacctcctgtctttctcaagaagggggatgaagtccagtgtgagatt

SEQ ID NO: 205765 - DNA, 120 bp, Artificial Sequence
  ENSG00000115042_9 (sequence is synthesized)
gaagaactaggtgtcatcatcaacaaggtggtgtgatggctcctgcacaggccctgcacataggatgagggcatctgctcccactcagcctagcccagggaaaggcccagtgacaggtgt

SEQ ID NO: 205766 - DNA, 120 bp, Artificial Sequence
  ENSG00000115042_10 (sequence is synthesized)
ggacaggtgccagccctgcaagccgcctcttctcggtagaagggagaaggacagagctctcttcaataaattcgtcaggtcaaagcagcagctttgcttctgctgtttgtcttcttttgg

SEQ ID NO: 205767 - DNA, 120 bp, Artificial Sequence
  ENSG00000115042_11 (sequence is synthesized)
gctttgtttcatgggacaagttggggcattttgtgggactggggaagaagagagcaaatacacacacatatgccaaaaagatgctgctgggctggggaaaagacaattcgtgtcgtcccc

SEQ ID NO: 205768 - DNA, 120 bp, Artificial Sequence
  ENSG00000115042_12 (sequence is synthesized)
ttgtttatcacatcaaagaagggaaaaagcaagagatggcaagggacaatcaagcctcaatgattatatttatagctaagggtttgcagcctcctctccatcttctggctctaggacaca

SEQ ID NO: 205769 - DNA, 120 bp, Artificial Sequence
  ENSG00000115042_13 (sequence is synthesized)
gctgtgttctggggctcagaagtctcagcacaggctccttctcacagttctagctacaagtgaactgccggatgaactgttctagtttttcctgattgtccaggctggcaaaagtagggg

SEQ ID NO: 205770 - DNA, 120 bp, Artificial Sequence
  ENSG00000115042_14 (sequence is synthesized)
acaggtggagcctggggcctgcagggctcggcgtctgctgcagaacctgggccatggaagatgggccgtgagtgcactcaccacagggactgtgtccacatggcccaggggccaggcctg

SEQ ID NO: 205771 - DNA, 120 bp, Artificial Sequence
  ENSG00000115042_15 (sequence is synthesized)
tcccccagaaacctgccttgagacctctgaccccttaggcctcagtgtttgagtgcaaatgctgcctcaaagcagccccaataccccacctagaaggatgagccagtgatttgggagacc

SEQ ID NO: 205772 - DNA, 120 bp, Artificial Sequence
  ENSG00000115042_16 (sequence is synthesized)
aagaggcaggaaaccatcccaccttctccaacccatcaccacgtctattgctggaagacaccaagtaaatcccagggtcttaatgaggcaccatcaggccagccctgtggggtgatggga

SEQ ID NO: 205773 - DNA, 120 bp, Artificial Sequence
  ENSG00000115042_17 (sequence is synthesized)
acatagctgggtttccctgagccactctattggggtgggagcagggggacagaagatggtgacactggctcctctcacccctaggtctctgaaggtccagatagcactgatggcaagctt

SEQ ID NO: 205774 - DNA, 120 bp, Artificial Sequence
  ENSG00000115042_18 (sequence is synthesized)
tgggtctgcacactctggaaagaagagagaagtgaaggctctaggtagggaggacagggagacactgggcacaggcttctctcctcttgtttaaagaagcccagggagggatagatctcc

SEQ ID NO: 205775 - DNA, 120 bp, Artificial Sequence
  ENSG00000115042_19 (sequence is synthesized)
caggagcctgggctgactggttgggactcaccaaagatcccttcttcctgggcggtggcctgcaggaactggaacagctgttggagaggagaagaaaaagaagacatcaaaaagaaaatc

SEQ ID NO: 205776 - DNA, 120 bp, Artificial Sequence
  ENSG00000115042_20 (sequence is synthesized)
tagtgctgggtggatatagagtatgaagatgtggagctgggaaaacagaggatgtggtgggatggggaaggaaaggttgtggaaggcctgcaccccgtctcagttcctccactgcttcgt

SEQ ID NO: 205777 - DNA, 120 bp, Artificial Sequence
  ENSG00000115042_21 (sequence is synthesized)
cccagattctgtttttgttttcctgaatcagacttagtctccctccattctcccgtcccctgtgtgcccccatcctggtcctgcctcactggacagcctctccgcggccttcctcctccc

SEQ ID NO: 205778 - DNA, 120 bp, Artificial Sequence
  ENSG00000115042_22 (sequence is synthesized)
tgctccagaattctacttggtgccccccaaccccactcgactcattgtccacctggcctctgaggccaggcaccctcattcccctctcccacccaccccacccaaggaagcccagcacag

SEQ ID NO: 205779 - DNA, 120 bp, Artificial Sequence
  ENSG00000115042_23 (sequence is synthesized)
accatctcatctcactccaccatcacttctttgccaaatgcatttccaaacaccctcatgagctttgctgatctctttgccatctctccctgccccactccgatggctcctcctgcctgg

SEQ ID NO: 205780 - DNA, 120 bp, Artificial Sequence
  ENSG00000115042_24 (sequence is synthesized)
tgaagactgccctgggtatcccagaactgaacctgcagcagccagcacagctgaccttggggcgataagcagccagggaaaggctttcttaaaaaaaaacaaaaaacaaaaccaataact

SEQ ID NO: 205781 - DNA, 120 bp, Artificial Sequence
  ENSG00000115042_25 (sequence is synthesized)
cagtaagcagattaaacaaaggtagagacggagccctccacccctctcacacactcatcctcacacccagctataccacaccccacaaatgttgcttatgtttccttggtcattctgtcc

SEQ ID NO: 205782 - DNA, 120 bp, Artificial Sequence
  ENSG00000115042_26 (sequence is synthesized)
atcctcctgtctgtccaaagccaaggacactgctctactctaaattttttgtcccgaagcccccaaatactgcaaccctgacccaatgcacgaagccaccccaaaatacagcagaggaca

SEQ ID NO: 205783 - DNA, 120 bp, Artificial Sequence
  ENSG00000115042_27 (sequence is synthesized)
ccaggactttcattttccctcagtatggcccatcctttgggtatgccaactccatgtccaccaagcactgcatgtaggacagggcacagtttggaggccttggtccagccactgccccag

SEQ ID NO: 205784 - DNA, 120 bp, Artificial Sequence
  ENSG00000115042_28 (sequence is synthesized)
acccaccttggctctctcctcactaacacccgagaagcccagacttcccagtgtttagcaacagattaaactctaagccaacaacaacagaacagggtggagtgagtggaaagcaaatga

SEQ ID NO: 205785 - DNA, 120 bp, Artificial Sequence
  ENSG00000115042_29 (sequence is synthesized)
aatgttaaaaaaaaaaaaaaagcaatacttgcattctcattagtaggaacatgtgagatgaagcatgttatgttattaggcattctcttgattcggtaaacacaagctgaataaatttat

SEQ ID NO: 205786 - DNA, 120 bp, Artificial Sequence
  ENSG00000115042_30 (sequence is synthesized)
aaatatcagcattaagcgagatttaacggggagctgtttatcttctgcctgtcaggcaggcggcaacactctccatgtatcactcgccagccgtgcagtcctcactctcttgcccaggta

SEQ ID NO: 205787 - DNA, 120 bp, Artificial Sequence
  ENSG00000115042_31 (sequence is synthesized)
agctggggaagagcctgctgccgcccagctctggttgtggaagggctggcaccaaggagctgcgagcttacctcaactcatctcacctcaccatgccggctgcgaggcggcccgtgcagt

SEQ ID NO: 205788 - DNA, 120 bp, Artificial Sequence
  ENSG00000115042_32 (sequence is synthesized)
ccgtgcgcaggaggtcacactcccatgctgcatcccagcccctccagaagcagagcatgacctgggtgactttgaggatgctatttaacctctctaagctaaagctcctcgactgcagca

SEQ ID NO: 205789 - DNA, 120 bp, Artificial Sequence
  ENSG00000115042_33 (sequence is synthesized)
tcaacagatcagtgccgacctgttaaggccgtcgagagcatcaaatgctactgttcagcaggtgcctgacacatagtaggtccacaagcaaatgattttcctgcttgcatcatttctagc

SEQ ID NO: 205790 - DNA, 120 bp, Artificial Sequence
  ENSG00000115042_34 (sequence is synthesized)
acagagctggaggaaatggcgaggtgcaggtggccgctgggccctgctgttctacatgggagcaagacagctgctaggtgaaggggaatgaccaggcagccacagggaggacatgtggcc

SEQ ID NO: 205791 - DNA, 120 bp, Artificial Sequence
  ENSG00000115042_35 (sequence is synthesized)
tcaggaagcctgggtgtgtatcctggttctgctaggaacacgtgtggggctttgtgtgggtgactctctggctccccaagcctccctttcctactgttatatccttaaagtgcctctgag

SEQ ID NO: 205792 - DNA, 120 bp, Artificial Sequence
  ENSG00000115042_36 (sequence is synthesized)
gccaaagcctttgtggcaattgtcaaatgagtccatatgcagtgagtaccgtgttgagggaggacaaggtcaccaagagctgagaatgtttctccgactgatgagacctagatattgggt

SEQ ID NO: 205793 - DNA, 120 bp, Artificial Sequence
  ENSG00000115042_37 (sequence is synthesized)
acatggaggtccccggtccctttgtgattcctgcagcctgttgcctccttgcctggaccccgcctcagctcagaaagccaattccctagattccaaaggccttcccagaccaattagcat

SEQ ID NO: 205794 - DNA, 120 bp, Artificial Sequence
  ENSG00000115042_38 (sequence is synthesized)
gtcctgcagctgtcagctccctgtgcctagcctggacctcagctcatgtctagcacccagtctcccaaccccacacatattcacaaataaaagaaaataacaaatgacatgaattcttca

SEQ ID NO: 205795 - DNA, 120 bp, Artificial Sequence
  ENSG00000115042_39 (sequence is synthesized)
cagcgcaggaagatcggccgccgcggccagcagagccaagcacagtgggaactttcagaaagcactggttgaaggaacgctggaatccctgggacttactgcgtagcatgtagtagttgc

SEQ ID NO: 205796 - DNA, 120 bp, Artificial Sequence
  ENSG00000115042_40 (sequence is synthesized)
ccaggtcagtgtctccccactgccctccctagtcactgggcccatcacaagggcattctgagctcagtattgagcctactggagccacctctcgctcaatagcgcattcagcagaaactc

SEQ ID NO: 205797 - DNA, 120 bp, Artificial Sequence
  ENSG00000115042_41 (sequence is synthesized)
tacaggattgtacacacagtagtaacactggccttggaaaaaaaaagttaatgtacgtgttttcctggttacaaaagcaatgcaccttcactgtagataataaaatagagataaacatta

SEQ ID NO: 205798 - DNA, 120 bp, Artificial Sequence
  ENSG00000115042_42 (sequence is synthesized)
aaaaattatgtcacccataatcccactgcccatggctcggaatattaatgtttttctgtctaccttcccagtgtttctccgctcctgtatatgtttatactgtacatatacttacctttt

SEQ ID NO: 205799 - DNA, 120 bp, Artificial Sequence
  ENSG00000115042_43 (sequence is synthesized)
tacagcgcaggaagatcggccgccgcggccaggtaggacgagcctggctgggtctaggccagaagggtgtccgtggcgccggtctcccgcggagcgcagaactagtaccggatccccagc

SEQ ID NO: 205800 - DNA, 120 bp, Artificial Sequence
  ENSG00000115042_44 (sequence is synthesized)
ctggctactaacatgggataacagcttagagatcccttgccataggtgttggtgtcacccatgatctaacctcctgtatggccaaatcccctgcccccataggccacagatgctatggcc

SEQ ID NO: 205801 - DNA, 120 bp, Artificial Sequence
  ENSG00000115053_0 (sequence is synthesized)
agtctcgagctctcgctggccttcgggtgtacgtgctccgggatcttcagcacccgcggccgccatcgccgtcgcttggcttcttctggactcatctgcgccacttgtccgcttcacact

SEQ ID NO: 205802 - DNA, 120 bp, Artificial Sequence
  ENSG00000115053_1 (sequence is synthesized)
ccgccgccatcatggtgaagctcgcgaaggcaggtaaaaatcaaggtgaccccaagaaaatggctcctcctccaaaggaggtagaagaagatagtgaagatgaggaaatgtcagaagatg

SEQ ID NO: 205803 - DNA, 120 bp, Artificial Sequence
  ENSG00000115053_2 (sequence is synthesized)
aagaagatgatagcagtggagaagaggtcgtcatacctcagaagaaaggcaagaaggctgctgcaacctcagcaaagaaggtggtcgtttccccaacaaaaaaggttgcagttgccacac

SEQ ID NO: 205804 - DNA, 120 bp, Artificial Sequence
  ENSG00000115053_3 (sequence is synthesized)
cagccaagaaagcagctgtcactccaggcaaaaaggcagcagcaacacctgccaagaagacagttacaccagccaaagcagttaccacacctggcaagaagggagccacaccaggcaaag

SEQ ID NO: 205805 - DNA, 120 bp, Artificial Sequence
  ENSG00000115053_4 (sequence is synthesized)
cattggtagcaactcctggtaagaagggtgctgccatcccagccaagggggcaaagaatggcaagaatgccaagaaggaagacagtgatgaagaggaggatgatgacagtgaggaggatg

SEQ ID NO: 205806 - DNA, 120 bp, Artificial Sequence
  ENSG00000115053_5 (sequence is synthesized)
aggaggatgacgaggacgaggatgaggatgaagatgaaattgaaccagcagcgatgaaagcagcagctgctgcccctgcctcagaggatgaggacgatgaggatgacgaagatgatgagg

SEQ ID NO: 205807 - DNA, 120 bp, Artificial Sequence
  ENSG00000115053_6 (sequence is synthesized)
atgacgatgacgatgaggaagatgactctgaagaagaagctatggagactacaccagccaaaggaaagaaagctgcaaaagttgttcctgtgaaagccaagaacgtggctgaggatgaag

SEQ ID NO: 205808 - DNA, 120 bp, Artificial Sequence
  ENSG00000115053_7 (sequence is synthesized)
atgaagaagaggatgatgaggacgaggatgacgacgacgacgaagatgatgaagatgatgatgatgaagatgatgaggaggaggaagaagaggaggaggaagagcctgtcaaagaagcac

SEQ ID NO: 205809 - DNA, 120 bp, Artificial Sequence
  ENSG00000115053_8 (sequence is synthesized)
ctggaaaacgaaagaaggaaatggccaaacagaaagcagctcctgaagccaagaaacagaaagtggaaggcacagaaccgactacggctttcaatctctttgttggaaacctaaacttta

SEQ ID NO: 205810 - DNA, 120 bp, Artificial Sequence
  ENSG00000115053_9 (sequence is synthesized)
acaaatctgctcctgaattaaaaactggtatcagcgatgtttttgctaaaaatgatcttgctgttgtggatgtcagaattggtatgactaggaaatttggttatgtggattttgaatctg

SEQ ID NO: 205811 - DNA, 120 bp, Artificial Sequence
  ENSG00000115053_10 (sequence is synthesized)
ctgaagacctggagaaagcgttggaactcactggtttgaaagtctttggcaatgaaattaaactagagaaaccaaaaggaaaagacagtaagaaagagcgagatgcgagaacacttttgg

SEQ ID NO: 205812 - DNA, 120 bp, Artificial Sequence
  ENSG00000115053_11 (sequence is synthesized)
ctaaaaatctcccttacaaagtcactcaggatgaattgaaagaagtgtttgaagatgctgcggagatcagattagtcagcaaggatgggaaaagtaaagggattgcttatattgaattta

SEQ ID NO: 205813 - DNA, 120 bp, Artificial Sequence
  ENSG00000115053_12 (sequence is synthesized)
agacagaagctgatgcagagaaaacctttgaagaaaagcagggaacagagatcgatgggcgatctatttccctgtactatactggagagaaaggtcaaaatcaagactatagaggtggaa

SEQ ID NO: 205814 - DNA, 120 bp, Artificial Sequence
  ENSG00000115053_13 (sequence is synthesized)
agaatagcacttggagtggtgaatcaaaaactctggttttaagcaacctctcctacagtgcaacagaagaaactcttcaggaagtatttgagaaagcaacttttatcaaagtaccccaga

SEQ ID NO: 205815 - DNA, 120 bp, Artificial Sequence
  ENSG00000115053_14 (sequence is synthesized)
accaaaatggcaaatctaaagggtatgcatttatagagtttgcttcattcgaagacgctaaagaagctttaaattcctgtaataaaagggaaattgagggcagagcaatcaggctggagt

SEQ ID NO: 205816 - DNA, 120 bp, Artificial Sequence
  ENSG00000115053_15 (sequence is synthesized)
tgcaaggacccaggggatcacctaatgccagaagccagccatccaaaactctgtttgtcaaaggcctgtctgaggataccactgaagagacattaaaggagtcatttgacggctccgttc

SEQ ID NO: 205817 - DNA, 120 bp, Artificial Sequence
  ENSG00000115053_16 (sequence is synthesized)
ctgccaaggaggccatggaagacggtgaaattgatggaaataaagttaccttggactgggccaaacctaagggtgaaggtggcttcgggggtcgtggtggaggcagaggcggctttggag

SEQ ID NO: 205818 - DNA, 120 bp, Artificial Sequence
  ENSG00000115053_17 (sequence is synthesized)
gacgaggtggtggtagaggaggccgaggaggatttggtggcagaggccggggaggctttggagggcgaggaggcttccgaggaggcagaggaggaggaggtgaccacaagccacaaggaa

SEQ ID NO: 205819 - DNA, 120 bp, Artificial Sequence
  ENSG00000115053_18 (sequence is synthesized)
agaagacgaagtttgaatagcttctgtccctctgctttcccttttccatttgaaagaaaggactctggggtttttactgttacctgatcaatgacagagccttctgaggacattccaaga

SEQ ID NO: 205820 - DNA, 120 bp, Artificial Sequence
  ENSG00000115053_19 (sequence is synthesized)
cagtatacagtcctgtggtctccttggaaatccgtctagttaacatttcaagggcaataccgtgttggttttgactggatattcatataaactttttaaagagttgagtgatagagctaa

SEQ ID NO: 205821 - DNA, 120 bp, Artificial Sequence
  ENSG00000115053_20 (sequence is synthesized)
agagctaacccttatctgtaagttttgaatttatattgtttcatcccatgtacaaaaccattttttcctacaaatagtttgggttttgttgttgtttcttttttttgttttgtttttgtt

SEQ ID NO: 205822 - DNA, 120 bp, Artificial Sequence
  ENSG00000115053_21 (sequence is synthesized)
ttttgcgttcgtggggttgtaaaagaaaagaaagcagaatgttttatcatggtttttgcttcagcggctttaggacaaattaaaagtcaactctggtgccagacgtgttacttcctaaag

SEQ ID NO: 205823 - DNA, 120 bp, Artificial Sequence
  ENSG00000115053_22 (sequence is synthesized)
agtgtttcccctggaatgtcactggagagcatggcaaagccagctctgccacttgcttcacccatcccaatggaaatggcttagtgcgtgtttccagtatcccagccctaactaacttgg

SEQ ID NO: 205824 - DNA, 120 bp, Artificial Sequence
  ENSG00000115053_23 (sequence is synthesized)
ttgaaatgctggtgaggggacctgctcctgcagccctggtgctgacttgaaggctgctgcagcttctcctacttttagcaggtctgaggattatgtcctgaagaccactctggaaagagg

SEQ ID NO: 205825 - DNA, 120 bp, Artificial Sequence
  ENSG00000115053_24 (sequence is synthesized)
atgtcctgaagaccactctggaaagaggtgcaggaacagattagtcaggtttcctaggacaaggaagagcttcagggaagagcagtggctaactcctgtaatcccaacacttggggaggc

SEQ ID NO: 205826 - DNA, 120 bp, Artificial Sequence
  ENSG00000115053_25 (sequence is synthesized)
tcacgtgaacccgggaagcagagtgagctgagcacacactactatactccaggctgggtaacaaagcgagactcccatctcccaaaaagcagttctggaatagaactcacgctagatgga

SEQ ID NO: 205827 - DNA, 120 bp, Artificial Sequence
  ENSG00000115053_26 (sequence is synthesized)
tagaccagtggacactttggaaccttggggctggggaggaaactgcccatccagtaaacccccaaaaagccatttgttctgcactacgtatattgcttattctttctggtcttaagtact

SEQ ID NO: 205828 - DNA, 120 bp, Artificial Sequence
  ENSG00000115053_27 (sequence is synthesized)
tgcctctcaacctccctttttagtaaaagacaaggccacgtgagaggcgggactatcaacattgtgatgaatttacttgaaacccagtgcccaaaatcaatgtaggtagccaagtccaaa

SEQ ID NO: 205829 - DNA, 120 bp, Artificial Sequence
  ENSG00000115053_28 (sequence is synthesized)
aacctgttctagtccaactagtgaaatcaaactgtgatacttggataagcttagaaggaaacgtgaagaatacgtagctgctttgggtttactctggttcagttgggctgttgaaatctt

SEQ ID NO: 205830 - DNA, 120 bp, Artificial Sequence
  ENSG00000115053_29 (sequence is synthesized)
aacatccttgggcttatcacctactgcttgtcagccctgttccatgtccaggggatgggggtggtgacaatccagttccaagaccctcatgctctagagaggaaggtggccagccagggt

SEQ ID NO: 205831 - DNA, 120 bp, Artificial Sequence
  ENSG00000115053_30 (sequence is synthesized)
tgtaactacgatgaaaaagcagtgggagggtctcctatgaggcaagcctaaggacaaaaaggaaggccttgcagcctgtattctggataaggaattaaaagctcagttaattgaagccca

SEQ ID NO: 205832 - DNA, 120 bp, Artificial Sequence
  ENSG00000115053_31 (sequence is synthesized)
gattttattcaggtatgtcttattgtagtggttgagtgtttcacaagctcttcattgacatgtcaagatgtcatttggctaagtatttgaatgtgagtgtaagacgagatctgggaattt

SEQ ID NO: 205833 - DNA, 120 bp, Artificial Sequence
  ENSG00000115053_32 (sequence is synthesized)
cgccgcgcgccttccgctctccacggggcctgcagcccgggacctgctgcccgccacccgctacccagggcttcctgccggccgccagcgccacctgaccctccgacgagagcccagcac

SEQ ID NO: 205834 - DNA, 120 bp, Artificial Sequence
  ENSG00000115053_33 (sequence is synthesized)
acctgaccctccgacgagagcccagcactgcccaacccaggccttctgtagggtcccctcctctccacgtatggccccattatccccacgtggtccccctcctccccatggctgccccat

SEQ ID NO: 205835 - DNA, 120 bp, Artificial Sequence
  ENSG00000115053_34 (sequence is synthesized)
gcccatgtagggtccccgttttccttgcgtgggttcttcgtcctccccatgtggggtcccggccctctccaggcttctggaaggccggtgagctggagacaagcatggtcagggagcccc

SEQ ID NO: 205836 - DNA, 120 bp, Artificial Sequence
  ENSG00000115053_35 (sequence is synthesized)
gggaaggctgagcaacggcaggaaagggacgggctcagcgcatttctgggaagtaaagtggcgggatcccgaggcagcaggagtcctggcacccaggaccacagtttgagaggcctggcg

SEQ ID NO: 205837 - DNA, 120 bp, Artificial Sequence
  ENSG00000115053_36 (sequence is synthesized)
caaaatgaaaatgcagggctcctgctcagcagtaactcagacgtcaagatggcgacagcagagcttccacccaagcccggagccccgccaggtgcaggccgcacacccgcgaacccgccc

SEQ ID NO: 205838 - DNA, 120 bp, Artificial Sequence
  ENSG00000115053_37 (sequence is synthesized)
tgctgcatctgcgagtggggcgcccagggaggcgaggggctctgggggctgcctggagaggcctgaccccttcctttcccggaggccgctcccgagctatgccaaacccgggctgccgcg

SEQ ID NO: 205839 - DNA, 120 bp, Artificial Sequence
  ENSG00000115053_38 (sequence is synthesized)
gcgctgccacctgctggccacctcgggcccctgccgcgtccctcggagagaaggaccttgtgtggagtgggcaagcggcttggtggcccggacctcaccttcacagaagagaagctagcc

SEQ ID NO: 205840 - DNA, 120 bp, Artificial Sequence
  ENSG00000115053_39 (sequence is synthesized)
ggggagggagttcacatcggctacagcaccccagtgacggtggcagcacgttactgtcgctcttgaactgtcctgtgccttacatcagtaaggtagagatgatgaccccccactacaggc

SEQ ID NO: 205841 - DNA, 120 bp, Artificial Sequence
  ENSG00000115053_40 (sequence is synthesized)
ttgtaacccatttcccttggtttcctcttatttttttaaatcatttttttcctttggtttcctcttaatgtgggaattaaatgagctacagtgtttacaagagtacttggcactgcttgt

SEQ ID NO: 205842 - DNA, 120 bp, Artificial Sequence
  ENSG00000115053_41 (sequence is synthesized)
cagtgttatagtgtaaattcctgagttaggcaagcaagagcacttttatacagaacaagaattattagatgcacctaaattaacgtaaagggatctttcttcactgaaactagattaggt

SEQ ID NO: 205843 - DNA, 120 bp, Artificial Sequence
  ENSG00000115053_42 (sequence is synthesized)
ccctaattactccctatatacagttgtaatgttttgaattggtacattcactttttttgttatgcgcgtctactctaggttgaactccagtgtacctaacagagagtttgacatcagctg

SEQ ID NO: 205844 - DNA, 120 bp, Artificial Sequence
  ENSG00000115053_43 (sequence is synthesized)
tgacaacatggagggaccacttgtgtgttgacactgctatatctccatatttagcaccgagccttgtacattataggatctcaaattatttgttgaatagagctatgtgtgtttttcccc

SEQ ID NO: 205845 - DNA, 120 bp, Artificial Sequence
  ENSG00000115053_44 (sequence is synthesized)
ttactcaaatgtaggtgaagatcaaggacatgataccccaagtcatactcttatttggaatagtaatttccaatcttgaatgagagctctaaaatcattttgcattggaatacagtaggc

SEQ ID NO: 205846 - DNA, 120 bp, Artificial Sequence
  ENSG00000115053_45 (sequence is synthesized)
tgtaggcatgttttatactttaaatgacttgaccatgtgcgttttgaactcagatgattctaggaaaacagaccagtcatcagcctatgtaagaacaaccagcaggacattgcaacacgt

SEQ ID NO: 205847 - DNA, 120 bp, Artificial Sequence
  ENSG00000115053_46 (sequence is synthesized)
actaggtacttaatatgttgagtaacagaaatggatttagcttacgtcatgagtatttgtatattaactcaagcactgaaattcttaggaataagatattactgttgtgaccgaagctgg

SEQ ID NO: 205848 - DNA, 120 bp, Artificial Sequence
  ENSG00000115053_47 (sequence is synthesized)
ttctggctacttggtggcgaggtgaagagcttctgcaggtgctgggggcggcgaacgcggcgggaaagacagagtcactgagcgcggggagggggcgctgggcctcggggtggagagatg

SEQ ID NO: 205849 - DNA, 120 bp, Artificial Sequence
  ENSG00000115053_48 (sequence is synthesized)
agaccaaacttttgcgacgcgtacgagctgggactcgactcctgacgcacgtgcccgggagcgcggcctgccacgtgggccgcgccgcgtgggtcctggaatctccagagggaccgggtg

SEQ ID NO: 205850 - DNA, 120 bp, Artificial Sequence
  ENSG00000115053_49 (sequence is synthesized)
ccttgggccgggaaatggcggtatcggccctagtcggagtcccggctgcgctcggatgtctccgccccggcctggcaagccgacacgtggtgggccccggaaggtggctctgccgcgtgc

SEQ ID NO: 205851 - DNA, 120 bp, Artificial Sequence
  ENSG00000115053_50 (sequence is synthesized)
cttttgcgctgtgtttcgggcacgtggtggcctaccaggtacccccacgtggccgcgccgcctctttaaggggcggggttgtctcgctgggaaaggcataagcttcatgagaaaatcaag

SEQ ID NO: 205852 - DNA, 120 bp, Artificial Sequence
  ENSG00000115053_51 (sequence is synthesized)
tttttttaagtgccttaatgatcttcaccgttaatttggattcagatgagggtggtagaataaagtaccgggatttgtagtattaaaacacggttgtgcttaactaaggcaggtaaaaat

SEQ ID NO: 205853 - DNA, 80 bp, Artificial Sequence
  ENSG00000115073_0 (sequence is synthesized)
agaaagccccgcggggctcgcgtaggctgcaggctcggggagggagggcagcggcgccgcgtcgggagccgccgccgtcc

SEQ ID NO: 205854 - DNA, 120 bp, Artificial Sequence
  ENSG00000115073_1 (sequence is synthesized)
cccgcctgctgggcagggccggcgcggcccggccatggagtcctacgacatcatcgccaaccagcctgtggtcatcgacaacggttcgggggtgattaaagctggctttgcaggagacca

SEQ ID NO: 205855 - DNA, 120 bp, Artificial Sequence
  ENSG00000115073_2 (sequence is synthesized)
gattcccaaatactgtttcccaaactatgtcgggcggccgaagcacatgcgggtgatggctggagccctggagggggacctcttcatcggaccaaaagcagaggagcaccgggggctgct

SEQ ID NO: 205856 - DNA, 120 bp, Artificial Sequence
  ENSG00000115073_3 (sequence is synthesized)
gaccatccgctaccccatggagcacggcgtggtgcgagactggaacgacatggaacgcatctggcagtacgtctactccaaggatcagctgcagaccttctcggaggagcatcctgtgct

SEQ ID NO: 205857 - DNA, 120 bp, Artificial Sequence
  ENSG00000115073_4 (sequence is synthesized)
cctcacggaggccccgctcaacccgagtaagaaccgggagaaggcggcagaggtgttctttgagaccttcaacgtgccggccctgttcatctccatgcaggctgtgctcagtctgtacgc

SEQ ID NO: 205858 - DNA, 120 bp, Artificial Sequence
  ENSG00000115073_5 (sequence is synthesized)
aacaggacgcacgacaggagtggttctagactcaggggacggggtcactcatgctgtgcccatctatgagggctttgccatgcctcactccatcatgcgggtggacattgccggccgcga

SEQ ID NO: 205859 - DNA, 120 bp, Artificial Sequence
  ENSG00000115073_6 (sequence is synthesized)
cgtctcccgctacctccgactcctgctgcgcaaggaaggggttgacttccatacctcggctgagtttgaggttgtccggacaatcaaagagcgagcgtgctacctgtccatcaacccaca

SEQ ID NO: 205860 - DNA, 120 bp, Artificial Sequence
  ENSG00000115073_7 (sequence is synthesized)
gaaggatgaggctctggagacggagaaggtgcagtacacgttgccagacggcagcacgcttgatgtggggcctgcacgattccgggcccccgagctgctgttccagccggaccttgtcgg

SEQ ID NO: 205861 - DNA, 120 bp, Artificial Sequence
  ENSG00000115073_8 (sequence is synthesized)
ggatgagagtgaggggctccatgaggtggtggccttcgccatacacaagtccgacatggacctgcgccggacgctgttcgccaacatcgtgctctcaggtggctcaacgcttttcaaagg

SEQ ID NO: 205862 - DNA, 120 bp, Artificial Sequence
  ENSG00000115073_9 (sequence is synthesized)
aggatatcaaaatcaagatctcagccccgcaggaacggctgtactccacatggattggcggctccatcctggcctcgctggacacttttaagaagatgtgggtgtccaaaaaggagtatg

SEQ ID NO: 205863 - DNA, 120 bp, Artificial Sequence
  ENSG00000115073_10 (sequence is synthesized)
aagaggatggctcccgtgctattcatcgcaaaactttctagtgcccaaggagggcggggcatgttgggagagggggagggaggggagacagagcctttaaccctttttggtcttggctcg

SEQ ID NO: 205864 - DNA, 120 bp, Artificial Sequence
  ENSG00000115073_11 (sequence is synthesized)
tatactaggcttagggtcccctgcatgccctgaacccctgggtgggtggcacagcagtgcccccctgcagccttcccctctacacaggacatgcacacacaagtaacattgagctgcatg

SEQ ID NO: 205865 - DNA, 120 bp, Artificial Sequence
  ENSG00000115073_12 (sequence is synthesized)
gacaggagccttgagctggcgtgtgggaattgagcgccatgtcaggctgttgtgggtatccccctggcagggccagctaggcctgtggttccctgctccgactctcagggctgcctccct

SEQ ID NO: 205866 - DNA, 120 bp, Artificial Sequence
  ENSG00000115073_13 (sequence is synthesized)
gagctccagggccagaatgcctggatgcctgggtagccagtttggggagtgggctgcaaggggcagccagcagctcccactggtgtgtcactgcatccattgccacctcctgttcgtgac

SEQ ID NO: 205867 - DNA, 120 bp, Artificial Sequence
  ENSG00000115073_14 (sequence is synthesized)
ctgacagggtgacacagcccctttcacactctgtcctcctatcttcctgggtagatgccctggtgtagggctgagtactgaatggtcttccatccccagcaagggggtgcagcccagggt

SEQ ID NO: 205868 - DNA, 120 bp, Artificial Sequence
  ENSG00000115073_15 (sequence is synthesized)
caggcccttcagagccagggcagaggatgcacggtggctagagccgctgcactatccttttcagagcacttcatccacttgctcctccctctaccctcggcaccctgggtgggaaagggt

SEQ ID NO: 205869 - DNA, 120 bp, Artificial Sequence
  ENSG00000115073_16 (sequence is synthesized)
tgatgctcatcatttattgaggggaagccacttaataaggagtcagacctaaaagggggtgggggacattttcttacctcacccaagaaagaggtcgtcacttttgctgtggccagggcc

SEQ ID NO: 205870 - DNA, 120 bp, Artificial Sequence
  ENSG00000115073_17 (sequence is synthesized)
ccacctccctctctcagatatgtacaataatttaacacggttgcctgaaaaaaacttttgtaaatcattatagtaataattatggacaaggcccagtgtgtggctctgttttcttgtggc

SEQ ID NO: 205871 - DNA, 120 bp, Artificial Sequence
  ENSG00000115073_18 (sequence is synthesized)
gggagaggcgtaggtcagggggcacaggtggcccaggaggggccgtgttgggcggctgcaaggtgccggcgctggccagaggggagctggcagagtgtgaggagaatgtgggggatgtgc

SEQ ID NO: 205872 - DNA, 120 bp, Artificial Sequence
  ENSG00000115073_19 (sequence is synthesized)
cggcagtgagaatggggaagaagagagcctgcagattgcggggcacactgccaccctctctgatccccccagctgaagctagctgggctctaagagcctaagaagctggtgggcaggtga

SEQ ID NO: 205873 - DNA, 120 bp, Artificial Sequence
  ENSG00000115073_20 (sequence is synthesized)
gcccatgctgagttcaggacccgccacagaccctgggacacccagtgagcaggggtggttctggtcagggcaggtgaggttctggtcagggcaggtgagggtcagcttccaggagggcgg

SEQ ID NO: 205874 - DNA, 120 bp, Artificial Sequence
  ENSG00000115073_21 (sequence is synthesized)
aaaaacagccccttgatgactgttcctctagggagtccctcgtgtcctctcttcagactagataatgcagatgtgccagggttcctcccctgggtgaggaggtccccgtgcctcagtggc

SEQ ID NO: 205875 - DNA, 120 bp, Artificial Sequence
  ENSG00000115084_0 (sequence is synthesized)
agatctccgggcctccgcggccatagctgactgtgccgtcccttcccctcacccgctccacgccctcctgggccgagtggagttgggtggtgtcgggagcctctccctgaggggcaccgc

SEQ ID NO: 205876 - DNA, 120 bp, Artificial Sequence
  ENSG00000115084_1 (sequence is synthesized)
gtcttcaggagctgggcctccagtgcggcgcgatgtcaggcgcggtgacagctctgtgagtccgaggccgcggccgtggcgctgggcggctgcggggcctgaccggtccgctcatggtgc

SEQ ID NO: 205877 - DNA, 120 bp, Artificial Sequence
  ENSG00000115084_2 (sequence is synthesized)
cgccacgacgccatcgcggggcaggaaggccaggggtgctgagttcttcacctccttttagactgagatctgccaagttttccggcattgctcttgaggatctcagaagggctcttaaga

SEQ ID NO: 205878 - DNA, 120 bp, Artificial Sequence
  ENSG00000115084_3 (sequence is synthesized)
caagactgcaaatggtgtgtgtatttgtcatgaaccgaatgaattcccagaacagtggtttcactcagcgcaggcgaatggctcttgggattgttattcttctgcttgttgatgtgatat

SEQ ID NO: 205879 - DNA, 120 bp, Artificial Sequence
  ENSG00000115084_4 (sequence is synthesized)
gggttgcttcctctgaacttacttcgtatgtttttacccagtacaacaaaccattcttcagcacctttgcaaaaacatctatgtttgttttgtaccttttgggctttattatttggaagc

SEQ ID NO: 205880 - DNA, 120 bp, Artificial Sequence
  ENSG00000115084_5 (sequence is synthesized)
catggagacaacagtgtacaagaggacttcgcggaaagcatgctgctttttttgcagatgctgaaggttactttgctgcttgcacaacagatacaactatgaatagttctttgagtgaac

SEQ ID NO: 205881 - DNA, 120 bp, Artificial Sequence
  ENSG00000115084_6 (sequence is synthesized)
ctctgtatgtgcctgtgaaattccatgatcttccaagtgaaaaacctgagagcacaaacattgatactgaaaaaacccccaaaaagtctcgtgtgaggttcagtaatatcatggagattc

SEQ ID NO: 205882 - DNA, 120 bp, Artificial Sequence
  ENSG00000115084_7 (sequence is synthesized)
gacagcttccgtcaagtcatgcattggaagcaaagttgtctcgcatgtcatatcctgtgaaagaacaagaatccatactgaaaactgtggggaaacttactgcaactcaagtagcgaaaa

SEQ ID NO: 205883 - DNA, 120 bp, Artificial Sequence
  ENSG00000115084_8 (sequence is synthesized)
ttagcttttttttttgctttgtgtggtttttggcaaatttgtcatatcaagaagcactttcagacacacaagttgctatagttaatattttatcttcaacttccggactttttaccttaa

SEQ ID NO: 205884 - DNA, 120 bp, Artificial Sequence
  ENSG00000115084_9 (sequence is synthesized)
tccttgctgcagtatttccaagtaacagtggagatagatttaccctttctaaactattagctgtaattttaagcattggaggcgttgtactggtaaacctggcagggtctgaaaaacctg

SEQ ID NO: 205885 - DNA, 120 bp, Artificial Sequence
  ENSG00000115084_10 (sequence is synthesized)
ctggaagagacacagtaggttccatttggtctcttgctggagccatgctctatgctgtctatattgttatgattaagagaaaagtagatagagaagacaagttggatattccaatgttct

SEQ ID NO: 205886 - DNA, 120 bp, Artificial Sequence
  ENSG00000115084_11 (sequence is synthesized)
ttggttttgtaggtttgtttaatctgctgctcttatggccaggtttctttttacttcattatactggatttgaggacttcgagtttcccaataaagtagtattaatgtgcattatcatta

SEQ ID NO: 205887 - DNA, 120 bp, Artificial Sequence
  ENSG00000115084_12 (sequence is synthesized)
atggccttattggaacagtactctcagagttcctgtggttgtggggctgctttcttacctcatcattgataggcacacttgcactaagccttacaatacctctgtccataatagctgaca

SEQ ID NO: 205888 - DNA, 120 bp, Artificial Sequence
  ENSG00000115084_13 (sequence is synthesized)
tgtgtatgcaaaaggtgcagttttcttggttattttttgcaggagctatccctgtatttttttcattttttattgtaactctcctatgccattataataattgggatcctgtgatggtgg

SEQ ID NO: 205889 - DNA, 120 bp, Artificial Sequence
  ENSG00000115084_14 (sequence is synthesized)
gaatcagaagaatatttgcttttatatgcagaaaacatcgaattcagagagttccagaagacagcgaacagtgtgagagtctcatttctatgcacagtgtttctcaggaggatggagcta

SEQ ID NO: 205890 - DNA, 120 bp, Artificial Sequence
  ENSG00000115084_15 (sequence is synthesized)
gttagctgtctgttgtctgtagcccagcttgataatggaactatacagcgaagagacaatctctggcaagtttttgtagaaaaaatgtttcagtgcctagtctgaaaaataacagtttga

SEQ ID NO: 205891 - DNA, 120 bp, Artificial Sequence
  ENSG00000115084_16 (sequence is synthesized)
gttctttgaaactctaaaatatatttttctcatacctgttttcttcattttcataatgaagcactttgctatgtagctgtgtacatatcactacagttataggaagtttcagtctacagt

SEQ ID NO: 205892 - DNA, 120 bp, Artificial Sequence
  ENSG00000115084_17 (sequence is synthesized)
ccatccaaaggaccaacctgccttacacatctcaaggaattcagctgttgaaatcatttgaactaatcaaggaataaatcctaatgttctgggactttattttcacatgttaaatgctgg

SEQ ID NO: 205893 - DNA, 120 bp, Artificial Sequence
  ENSG00000115084_18 (sequence is synthesized)
aatatattatgaaaatgttttcaagaaatcacttaagtgttcatagaccagtatttctgacaggtaaaatgctaaaataagctacctgtaataagtgtggattatatttttgggttttgt

SEQ ID NO: 205894 - DNA, 120 bp, Artificial Sequence
  ENSG00000115084_19 (sequence is synthesized)
agaatattgcaaattaaccacacaaaaaatgtttaatttatgcaacaagcatgtttgtgcaaatttcatgggactttaaaaagaataagtatttgagaaaatatctggttcacttacact

SEQ ID NO: 205895 - DNA, 120 bp, Artificial Sequence
  ENSG00000115084_20 (sequence is synthesized)
acatttactgtattattcttttatagcattaggtgccttgtattttaaatctgtgacaaaccatggcaaatttttaaaggggaagtattattataaaatgaagaaatatgtatttctaaa

SEQ ID NO: 205896 - DNA, 120 bp, Artificial Sequence
  ENSG00000115084_21 (sequence is synthesized)
ggctatattgctgtaaacttaattgataaagctctgtttaatttagagttttgaagaaatagtctcccttcaattaagaaattttcataatggaatgatttaaattgaagtgacaaagag

SEQ ID NO: 205897 - DNA, 120 bp, Artificial Sequence
  ENSG00000115084_22 (sequence is synthesized)
tattattaaaatacaatgtttatacgtctatttgtgtattgtagatgtatcaagtgatttctaatttttttcacatatgaatgtgccagattactctagaactagatgtctcttctttaa

SEQ ID NO: 205898 - DNA, 120 bp, Artificial Sequence
  ENSG00000115084_23 (sequence is synthesized)
ataattttagttttcctgaataaatttgtaatggttaaagtaccaagtaagtaaggcgagaagggattctgtttttaaaatcacatcagaacttttcctctactaagattataaattaaa

SEQ ID NO: 205899 - DNA, 120 bp, Artificial Sequence
  ENSG00000115084_24 (sequence is synthesized)
tgtaaaatactcctaattgcaattcttaaacttaggccttacatgtacttattatgcaactgctcctggactctattcaccatagatatcagtaaacgtatgtcccaggattcacaggct

SEQ ID NO: 205900 - DNA, 120 bp, Artificial Sequence
  ENSG00000115084_25 (sequence is synthesized)
tttgattaatcaatattcttttcaagtttgctgtgaagagtttagttctcttcaaaatttcttaactaatctgatttttaagaattctctttgcagtgtttagcttcctattcacattct

SEQ ID NO: 205901 - DNA, 120 bp, Artificial Sequence
  ENSG00000115084_26 (sequence is synthesized)
taaaattgctttggtgttaccatgagtctaaaatgaagtttagccttccttttgtttcattctgagaacttctatattatattacctttaaaaattgtttatgatattaaatttaaaata

SEQ ID NO: 205902 - DNA, 120 bp, Artificial Sequence
  ENSG00000115084_27 (sequence is synthesized)
caaacagctctctttttttttttttttttttttaatcatccagcccaaagtggcaaaaacagctcttttctcatttggcaccaccaataacgcaagttaaaaataatgttgagtttatta

SEQ ID NO: 205903 - DNA, 120 bp, Artificial Sequence
  ENSG00000115084_28 (sequence is synthesized)
tacttttgacctgtttagctcaacagggtgaaggcatgtaaagaatgtggacttctgaggaattttcttttaaaaagaacataatgaagtaacattttaattactcaaggactacttttg

SEQ ID NO: 205904 - DNA, 120 bp, Artificial Sequence
  ENSG00000115084_29 (sequence is synthesized)
gttgaagtttataatctagatacctctactttttgtttttgctgttcgacagttcacaaagaccttcagcaatttacagggtaaaatcgttgaagtagtggaggtgaaactgaaatttaa

SEQ ID NO: 205905 - DNA, 120 bp, Artificial Sequence
  ENSG00000115084_30 (sequence is synthesized)
aattattctgtaaatactatagggaaagaggctgagcttagaatcttttggttgttcatgtgttctgtgctcttatcatcacacaggtcatgtgttgttactcaggattctggaagtact

SEQ ID NO: 205906 - DNA, 120 bp, Artificial Sequence
  ENSG00000115084_31 (sequence is synthesized)
aagccgtagttaacaggctggatagatcttcagccaatcttctttcattatactgctgcttttctgtttcttaaaaaacaaaaatcaatgaacaacttcttcagaaggaagcaccactgt

SEQ ID NO: 205907 - DNA, 120 bp, Artificial Sequence
  ENSG00000115084_32 (sequence is synthesized)
tcaattggttaactgaaagtatgaatcactgccgctttgcttgcccacctgtttgctttttctcacaggttttatttatctgaatgattgttgcatttgaatactgtagccatggtgagt

SEQ ID NO: 205908 - DNA, 120 bp, Artificial Sequence
  ENSG00000115084_33 (sequence is synthesized)
gagcagttgaagacttcctttctgcaccttcatagttaagggttcatcttctcaagaaataaagttgtgctgggttgtttcaattctgtagatcacctagaaactaggtaacaaggccct

SEQ ID NO: 205909 - DNA, 120 bp, Artificial Sequence
  ENSG00000115084_34 (sequence is synthesized)
tggatcacaatgagcacattgcaggtctttggaaatgctgggaaggggttacattcaagtaactgctgacgtccttcctctctgtcagacccatgttggcctgtaattatatttttctga

SEQ ID NO: 205910 - DNA, 120 bp, Artificial Sequence
  ENSG00000115084_35 (sequence is synthesized)
atctaaaaacaaatagaaatttctgatatcttttcagtctccttcttttctttccattcatcacttaaatctcattattgtataacgtttcaaattatgacctggattgaaggaagtctg

SEQ ID NO: 205911 - DNA, 120 bp, Artificial Sequence
  ENSG00000115084_36 (sequence is synthesized)
gaagtctgttttgtcagggactttgttaggtgaacatcagaatctcaactacaacaaagctgaaaaatgaggcagccttaacagtaaatgcttttgggccgggcgtggtggctcacgcct

SEQ ID NO: 205912 - DNA, 120 bp, Artificial Sequence
  ENSG00000115084_37 (sequence is synthesized)
cgtctcaaaaaaaaaaaaagtgaatacttttgaaatgaatgctttttgaagcttagaagaaccattaggtttatgtaatgcacccatacttattcctttaaataaattttaatttaaaaa

SEQ ID NO: 205913 - DNA, 120 bp, Artificial Sequence
  ENSG00000115084_38 (sequence is synthesized)
cattgagatattggcttctgtcaacctgatttaattaattctttacattaagctgattttccccctggcagctgacaaataagttcattgttcttgtagaagtgagctcacaaggttaaa

SEQ ID NO: 205914 - DNA, 120 bp, Artificial Sequence
  ENSG00000115084_39 (sequence is synthesized)
tgtgaatgttctcaaaggtacacagccttgtttcagaagaattttaatgcccgctgtaaaatcaatcatgcagagccaatttgaggtatgactccagggtatgcaaggtatgacttctct

SEQ ID NO: 205915 - DNA, 120 bp, Artificial Sequence
  ENSG00000115084_40 (sequence is synthesized)
tagaaaatttttttccacatattagcaaataaatgaaatgtcattttcatattaagtaagtatagttatgatcttcgtttctacctactctccttttgaaatattctttattactaaata

SEQ ID NO: 205916 - DNA, 120 bp, Artificial Sequence
  ENSG00000115084_41 (sequence is synthesized)
tttaggaggagttaacagaaataattacctgtaacatctgcagataaacttacatagctaacattgtgtgctgacttttttaaatggtgaagtggcattaatgagatgttcagtttacag

SEQ ID NO: 205917 - DNA, 120 bp, Artificial Sequence
  ENSG00000115084_42 (sequence is synthesized)
aatttgaagtttgagttctattttaatagtctgccgtgtcccccaaatcccatttagataaattgaggttgatttttcacatagacttgcaatttttagacaccacattttttttatagt

SEQ ID NO: 205918 - DNA, 120 bp, Artificial Sequence
  ENSG00000115084_43 (sequence is synthesized)
aacagcctcatttgcctgtacaataactaataatacagtatttcataggtacattgtatgtgcacaggaaatttttctttaaatcttaagagcctttaataaacgggatattttaatatt

SEQ ID NO: 205919 - DNA, 120 bp, Artificial Sequence
  ENSG00000115084_44 (sequence is synthesized)
ttaatgttactacatttaaaaaatagtgttttcctacaaaattttctgtattcagtatacgttaactatgaaaatgtcaaacaatgaaatcattgaaatatatttaaggaaaaattacca

SEQ ID NO: 205920 - DNA, 120 bp, Artificial Sequence
  ENSG00000115084_45 (sequence is synthesized)
accaaaagtaatgagtaccctctatgtgcatatttactggaatgttcatgtgaaatggtaacatttccaataacagcattttgaatctggggtgacacaaacatgatttttatttttgag

SEQ ID NO: 205921 - DNA, 120 bp, Artificial Sequence
  ENSG00000115084_46 (sequence is synthesized)
ctagggattttgatggagaagcacctagatgaagacaccatttcattcatgatattttaaaattagaaaagtaaagcttctaaattgaaactcttaacaggtcacttcatgaaattttta

SEQ ID NO: 205922 - DNA, 120 bp, Artificial Sequence
  ENSG00000115084_47 (sequence is synthesized)
gttttaaatttaattttacatgagatgtctttctgaagagctacttttattaactttcacttagatcgttgtatgctaggcattcagtatttctctacttgattttcctatgcctagttg

SEQ ID NO: 205923 - DNA, 120 bp, Artificial Sequence
  ENSG00000115084_48 (sequence is synthesized)
tgattacagcaagtatttaataataaagtcagtcatgtgagagtatccattaatttcagtgggtccttggaaggcaggcagaagatttctgtccaagagtcttatttttgacatgagatg

SEQ ID NO: 205924 - DNA, 73 bp, Artificial Sequence
  ENSG00000115084_49 (sequence is synthesized)
caagctcaagccatcctcccacctcagtctcctgagtagttgggactactggcatgtgcccccattcctgatt

SEQ ID NO: 205925 - DNA, 120 bp, Artificial Sequence
  ENSG00000115084_50 (sequence is synthesized)
cctcagtctcctgagtagttgggactactggcatgtgcccccattcctgattagtttttttgtatttttggtagagatggggtcttgctatattgcctaatttttgtgtttttagtagag

SEQ ID NO: 205926 - DNA, 120 bp, Artificial Sequence
  ENSG00000115084_51 (sequence is synthesized)
gtttttgccaccatttgcttacttggaatagctttcacatttatttttcttatgaagaaatccagtgtcagtcagaccatgtaacatcaaagcaaaatttcattgaagcctatccttgtc

SEQ ID NO: 205927 - DNA, 120 bp, Artificial Sequence
  ENSG00000115084_52 (sequence is synthesized)
ttaattattctaaaataaagtacaataaagtgaattattttgccctttgtagtagcatagtgttaagttatatatatattttaatatgcatactcctaagtaaagtttcagagaccacat

SEQ ID NO: 205928 - DNA, 120 bp, Artificial Sequence
  ENSG00000115084_53 (sequence is synthesized)
gctggagagcagtggctttcagacagcatcagcatcacctgaaggccttgttgaatacacattattggaagagaggggagaacacaggctcatgcctgtaattccagtgctttgggagac

SEQ ID NO: 205929 - DNA, 120 bp, Artificial Sequence
  ENSG00000115084_54 (sequence is synthesized)
tgaggcaggaggatcacgtgagcccaggagttcaagatcaggctgggcaatacagcaagacccctgtctctacaaaaacaaaaacaaaaaacaaacaggcatggtagtgcatacctgtag

SEQ ID NO: 205930 - DNA, 120 bp, Artificial Sequence
  ENSG00000115084_55 (sequence is synthesized)
aggatcacttgaacccaggagttcgaggctgcagtgagttattattgggccactgcagtccagcctgggcagcaaagtgagaccctgtctgttaaaaaaacaaaaccaaaaacttgattg

SEQ ID NO: 205931 - DNA, 120 bp, Artificial Sequence
  ENSG00000115084_56 (sequence is synthesized)
taaaaaaacaaaaccaaaaacttgattgctgggggccaccctagagtttctgattcagtaggtctggcggtggggatggtgggcctggtaatttgcctttctaacaagcgtccaggtaat

SEQ ID NO: 205932 - DNA, 120 bp, Artificial Sequence
  ENSG00000115084_57 (sequence is synthesized)
gccccagctgctggtcccaggaccacactttgcagattattactctgagaagagcactaactctgacgttggattccttctgttcctcattagtgaatttatttgggggagattattcaa

SEQ ID NO: 205933 - DNA, 120 bp, Artificial Sequence
  ENSG00000115084_58 (sequence is synthesized)
tctggtagatccgcatttacttagctgtgaagtggaggttaatgcaacctgcctgagactgtgagaatgagaaactctaattgaaataccaggcccagcgtgcctggatgcttgaaaaat

SEQ ID NO: 205934 - DNA, 120 bp, Artificial Sequence
  ENSG00000115084_59 (sequence is synthesized)
gctgactcccatggtccgtccttccctcactcttctcagctataaagtgagaagcgaaattcagtatcttttaagattcctctcaggtgtaaaatgctgtgattctaaaagtttaatttt

SEQ ID NO: 205935 - DNA, 120 bp, Artificial Sequence
  ENSG00000115084_60 (sequence is synthesized)
gtagttccagagacaatgccaaacacctgtgtgtgcttagtgctttgtaaagagtggtaataacagtgacaccacataggccgtagttttgtagttccagagacaatgccaaacacctgt

SEQ ID NO: 205936 - DNA, 120 bp, Artificial Sequence
  ENSG00000115084_61 (sequence is synthesized)
gtgtacttagtgctttgtaaagagtgaataacagtgacaccacataggccatagttttgtagttccagagacaatgccaaacacctatgtgtacttagtgctttgtaaagagtggtaata

SEQ ID NO: 205937 - DNA, 120 bp, Artificial Sequence
  ENSG00000115084_62 (sequence is synthesized)
acagtgacaccacataggccgtaattttgtttttgcttttgttagggtgttcagcatcttgactccttaaataaggttttcagtcagatttataaagcagcattgaagaagttgtattat

SEQ ID NO: 205938 - DNA, 120 bp, Artificial Sequence
  ENSG00000115084_63 (sequence is synthesized)
atttgagtacagttggaatccatggcagttttatggaggccaaatatatcagatgaataggctaatttccctgagttgctggccttattagtccctactctgttgccccctggttaccta

SEQ ID NO: 205939 - DNA, 120 bp, Artificial Sequence
  ENSG00000115084_64 (sequence is synthesized)
atgcatgttcaaaaggtatagttttcatcacctgcttgatcttgattttcagacagcatcaaatcagttgcaaaacaaatccaagctaaaattttgagtgtatgattaatttactatagc

SEQ ID NO: 205940 - DNA, 73 bp, Artificial Sequence
  ENSG00000115084_65 (sequence is synthesized)
ccaagctaaaattttgagtgtatgattaatttactatagcatgtaattatgcacattgcccaggctgaagtgc

SEQ ID NO: 205941 - DNA, 75 bp, Artificial Sequence
  ENSG00000115084_66 (sequence is synthesized)
tatccagtattttatttaaaagttgtcactagggtgttcactattgtgaatttataatcttaaaagttggggatg

SEQ ID NO: 205942 - DNA, 120 bp, Artificial Sequence
  ENSG00000115084_67 (sequence is synthesized)
gttcactattgtgaatttataatcttaaaagttggggatgctaaaagtaccagactaaaatactacgaggttttctcatcttttaattccattttgttagaaaaaaataatcacaaccgg

SEQ ID NO: 205943 - DNA, 120 bp, Artificial Sequence
  ENSG00000115084_68 (sequence is synthesized)
ggttcttttacctttccccagccatctagactgctttactgcaatgttgggaagattgcatacaataaaaactgtagctagttgattgggatttgggaaaattgaatcaagcatttgcat

SEQ ID NO: 205944 - DNA, 120 bp, Artificial Sequence
  ENSG00000115084_69 (sequence is synthesized)
tcatccagaatggtcttaaactgctgactgtggggtgcccacaggatgagcactggtggcatgggtgggaggaatttccttggatactgcaattgcatttgaaagatctattttccaaaa

SEQ ID NO: 205945 - DNA, 120 bp, Artificial Sequence
  ENSG00000115084_70 (sequence is synthesized)
cctgagcagagagaggctaggaggaatgcagacaggacattgaaaatgcgaattccctttactagtagaacatgaaatatctgataatggtttaaaaaaaataagtgccaggatacattg

SEQ ID NO: 205946 - DNA, 120 bp, Artificial Sequence
  ENSG00000115084_71 (sequence is synthesized)
catattcaaattagtatatgaggttaggcaacaattcttatatgggaccaggtatatttaatttgcctttctttgcagtcatcctagtaaatccttgtaaagggttattttatatacaat

SEQ ID NO: 205947 - DNA, 120 bp, Artificial Sequence
  ENSG00000115084_72 (sequence is synthesized)
tttgtagtatattctaaatcccctttggcaaataaagctgaagttatctagtgtcagcatactgtgatttgtatatttatataagacaagattgcatcattctgattaagttgcagcatt

SEQ ID NO: 205948 - DNA, 120 bp, Artificial Sequence
  ENSG00000115084_73 (sequence is synthesized)
ttagttttatctgataggcctgtattgagtaatcagtagctatgtgcaaatattaagtcaacttaattaccagacccagaaggccagaggtaatcaaagagtactttcggaagatgaaat

SEQ ID NO: 205949 - DNA, 120 bp, Artificial Sequence
  ENSG00000115084_74 (sequence is synthesized)
atttataatgagttatggaaacaatgttttagaaatgtttttcttggtgtaatttaatgcagatttttacctcaattttgttaaaaaacttgataatttgatccctccatctatttaata

SEQ ID NO: 205950 - DNA, 120 bp, Artificial Sequence
  ENSG00000115084_75 (sequence is synthesized)
tttaatattttcagattctagagtatttaaaatttaaacacaattataaaattaattataattcctacttatgttagctatgatttagggccaaaactaccctggttttgtcttgcaact

SEQ ID NO: 205951 - DNA, 120 bp, Artificial Sequence
  ENSG00000115084_76 (sequence is synthesized)
tgaaacattgtgtattttaaactatataatttgggaacattattttatagactgtggataaccaaatataagatttgtgatttttaatgcttcatttgtgtaaaatcatttgtatattct

SEQ ID NO: 205952 - DNA, 120 bp, Artificial Sequence
  ENSG00000115084_77 (sequence is synthesized)
atttatagtatgcattttctagctcattaaaagtacagaaaaacctcaaatctgtccttatacaaatatttgatttctagtttccttttattaaaacattttcactcattcattctttca

SEQ ID NO: 205953 - DNA, 120 bp, Artificial Sequence
  ENSG00000115084_78 (sequence is synthesized)
attgattttctataattagttgtttgagaggcaatacagccttagaggctaaaggggctaaagcctggactccagttccgtcttctccacatactagctgtgtggccctgtgcaaggttc

SEQ ID NO: 205954 - DNA, 120 bp, Artificial Sequence
  ENSG00000115084_79 (sequence is synthesized)
ttaatctcttgatgctccagctttcttatttgtgaaatgggattacagtagaacctcccttatgagggtgttaaaatagtaaatacttggtaaatataaagtatgtataatagtgcctga

SEQ ID NO: 205955 - DNA, 120 bp, Artificial Sequence
  ENSG00000115084_80 (sequence is synthesized)
ttttaagttctagggcactatattatcagtagctaaggttaacaacccttcttgttgagttgtcctaagtggtttattccatagtagttgctcccatacaatgtgggtagttgaactgag

SEQ ID NO: 205956 - DNA, 120 bp, Artificial Sequence
  ENSG00000115084_81 (sequence is synthesized)
tgatcaccagttgcttcagacagtttttttttctatggcgttgagctattcacaggactgacttaaaaacaaaccaacagaagttttagctaaggaaacctcccagagtgcttttgtgca

SEQ ID NO: 205957 - DNA, 120 bp, Artificial Sequence
  ENSG00000115084_82 (sequence is synthesized)
accaacaatataggattgaagtgtgagacaattaggttgtttaatcatgactttaaactctgctatttgataccggtaggaagttagggtatcaaaattaataaatgcttgatatacctc

SEQ ID NO: 205958 - DNA, 120 bp, Artificial Sequence
  ENSG00000115084_83 (sequence is synthesized)
aaagagttagaattcattaagtcctataacacttcagctatttacatatatacacaaacttacaaacacacacaggttgggaagttcttcagaatttagcattgcctcatgctcaaaatt

SEQ ID NO: 205959 - DNA, 120 bp, Artificial Sequence
  ENSG00000115084_84 (sequence is synthesized)
atgaatagagttattttacactgtgatatatgtatatacaaaggctagtaaatatccagataagagtttactgtatgcattgatttttttcaaataagtgttttgcagttttatattcat

SEQ ID NO: 205960 - DNA, 120 bp, Artificial Sequence
  ENSG00000115084_85 (sequence is synthesized)
ataaatgaggttaagtattattttgtcaagtactcagtatatttctacagaatttctggttgtattatttatagtttctttttaaagatagaaactgaaaactgtgcttaagatttcaca

SEQ ID NO: 205961 - DNA, 120 bp, Artificial Sequence
  ENSG00000115084_86 (sequence is synthesized)
tagaataatgatggagtaaataaagtattgttattttgggctaagctgggattagagacttgtctgagttagaactctaacatgtagaatttaaaaaatgaatttctgtgatattttatg

SEQ ID NO: 205962 - DNA, 120 bp, Artificial Sequence
  ENSG00000115084_87 (sequence is synthesized)
tgtacatcattggaagtagcctaatccaaggttttttaaatatgagcctttaagattcaaatttgtactgagcatcttaaacccctaaacaatgaaatgctaatgtcaatgttattagcc

SEQ ID NO: 205963 - DNA, 120 bp, Artificial Sequence
  ENSG00000115084_88 (sequence is synthesized)
ctctcctatgccattataataattgggatcctgtgatggtgggaatcagaagaatatttgcttttatatgcagaaaacatcgaattcagagttccagaagacagcgaacagtgtgagagt

SEQ ID NO: 205964 - DNA, 120 bp, Artificial Sequence
  ENSG00000115084_89 (sequence is synthesized)
cccaaaccgggacggagtgcccaccagcagcaccacctcctgccctcggtggcagcaggagcgccttgaccgaaaccgtgaaggtctctaggggcggagggagcgggagctgacaggggc

SEQ ID NO: 205965 - DNA, 120 bp, Artificial Sequence
  ENSG00000115084_90 (sequence is synthesized)
gccggagccctgcgcccaccgctggcaattgaggaagccgtgcgtgcgccctcgcctcggctccccggggaggcgtcgctgccttaactgtcttccccgctccaaaacagaaggatgatt

SEQ ID NO: 205966 - DNA, 120 bp, Artificial Sequence
  ENSG00000115084_91 (sequence is synthesized)
tcttttcccagctgtttcttttaaaatgactggatgttttgatagaggtgggtggaggagcatggagaatccttttcttttaccacttgaagagattggaaaggtgccttcaagacccac

SEQ ID NO: 205967 - DNA, 120 bp, Artificial Sequence
  ENSG00000115084_92 (sequence is synthesized)
agcaaatcacttactctccgataaccaaattccactccagcagatcagggacagaaaagacacttttagaaacagtgtctagacgctgtccccagggatggattcctctggatggagagg

SEQ ID NO: 205968 - DNA, 120 bp, Artificial Sequence
  ENSG00000115084_93 (sequence is synthesized)
aagatgacttcagaaactgagggagagagacccacttgagactaggcagcaaacagtgaagaagaaatgagcaacatggtgtgcaggagcaaagtttcctactgtatatctctactctaa

SEQ ID NO: 205969 - DNA, 120 bp, Artificial Sequence
  ENSG00000115084_94 (sequence is synthesized)
gtgtacaatgcctataaatggaaagtatgctttcttggctttcctttagcctattttccaagcaagaactattgttgttggtaatttaggtgcatggaatagtaagttgaagtcttgaat

SEQ ID NO: 205970 - DNA, 120 bp, Artificial Sequence
  ENSG00000115084_95 (sequence is synthesized)
attgtcagtgtttaattttgtcttcccattgttcttattcctgctagttttcacaaatagaaaacttacattgaaggggaaaattgccttaatgataattgtgggtgtgttttttcctct

SEQ ID NO: 205971 - DNA, 85 bp, Artificial Sequence
  ENSG00000115084_96 (sequence is synthesized)
tcagaagaatatttgcttttatatgcagaaaacatcgaattcagagatggaaagatctcgggtcactgcaacctctacctcctgg

SEQ ID NO: 205972 - DNA, 65 bp, Artificial Sequence
  ENSG00000115084_97 (sequence is synthesized)
ccgccccagcatcatttttcaagggtctctagggtgaccaggtgtccgggtttgccaaggacagt

SEQ ID NO: 205973 - DNA, 120 bp, Artificial Sequence
  ENSG00000115084_98 (sequence is synthesized)
tctctagggtgaccaggtgtccgggtttgccaaggacagtcccagtttctacctgctgtcctaggacaatcatgaatagtgcccctttcagtttcaaaagtgtcatagtttagacattaa

SEQ ID NO: 205974 - DNA, 120 bp, Artificial Sequence
  ENSG00000115084_99 (sequence is synthesized)
attacctgaccacccttatatgccccatgtttcttaacatctaggctgctgacaaaattcacattttctgactgtcagtctagtgttctctatactagactgatacggatccacaaagga

SEQ ID NO: 205975 - DNA, 120 bp, Artificial Sequence
  ENSG00000115085_0 (sequence is synthesized)
atccaggaaataggttagtttcagacaagcctgcttgccggagctcagcagacaccaggccttccgggcaggcctggcccaccgtgggcctcagagctgctgctggggcattcagaaccg

SEQ ID NO: 205976 - DNA, 120 bp, Artificial Sequence
  ENSG00000115085_1 (sequence is synthesized)
gctctccattggcattgggaccagagaccccgcaagtggcctgtttgcctggacatccacctgtacgtccccaggtttcgggaggcccaggggcgatgccagaccccgcggcgcacctgc

SEQ ID NO: 205977 - DNA, 120 bp, Artificial Sequence
  ENSG00000115085_2 (sequence is synthesized)
ccttcttctacggcagcatctcgcgtgccgaggccgaggagcacctgaagctggcgggcatggcggacgggctcttcctgctgcgccagtgcctgcgctcgctgggcggctatgtgctgt

SEQ ID NO: 205978 - DNA, 120 bp, Artificial Sequence
  ENSG00000115085_3 (sequence is synthesized)
cgctcgtgcacgatgtgcgcttccaccactttcccatcgagcgccagctcaacggcacctacgccattgccggcggcaaagcgcactgtggaccggcagagctctgcgagttctactcgc

SEQ ID NO: 205979 - DNA, 120 bp, Artificial Sequence
  ENSG00000115085_4 (sequence is synthesized)
gcgaccccgacgggctgccctgcaacctgcgcaagccgtgcaaccggccgtcgggcctcgagccgcagccgggggtcttcgactgcctgcgagacgccatggtgcgtgactacgtgcgcc

SEQ ID NO: 205980 - DNA, 120 bp, Artificial Sequence
  ENSG00000115085_5 (sequence is synthesized)
agacgtggaagctggagggcgaggccctggagcaggccatcatcagccaggccccgcaggtggagaagctcattgctacgacggcccacgagcggatgccctggtaccacagcagcctga

SEQ ID NO: 205981 - DNA, 120 bp, Artificial Sequence
  ENSG00000115085_6 (sequence is synthesized)
cgcgtgaggaggccgagcgcaaactttactctggggcgcagaccgacggcaagttcctgctgaggccgcggaaggagcagggcacatacgccctgtccctcatctatgggaagacggtgt

SEQ ID NO: 205982 - DNA, 120 bp, Artificial Sequence
  ENSG00000115085_7 (sequence is synthesized)
accactacctcatcagccaagacaaggcgggcaagtactgcattcccgagggcaccaagtttgacacgctctggcagctggtggagtatctgaagctgaaggcggacgggctcatctact

SEQ ID NO: 205983 - DNA, 120 bp, Artificial Sequence
  ENSG00000115085_8 (sequence is synthesized)
gcctgaaggaggcctgccccaacagcagtgccagcaacgcctcaggggctgctgctcccacactcccagcccacccatccacgttgactcatcctcagagacgaatcgacaccctcaact

SEQ ID NO: 205984 - DNA, 120 bp, Artificial Sequence
  ENSG00000115085_9 (sequence is synthesized)
cagatggatacacccctgagccagcacgcataacgtccccagacaaaccgcggccgatgcccatggacacgagcgtgtatgagagcccctacagcgacccagaggagctcaaggacaaga

SEQ ID NO: 205985 - DNA, 120 bp, Artificial Sequence
  ENSG00000115085_10 (sequence is synthesized)
cattgaacttggctgcggcaactttggctcagtgcgccagggcgtgtaccgcatgcgcaagaagcagatcgacgtggccatcaaggtgctgaagcagggcacggagaaggcagacacgga

SEQ ID NO: 205986 - DNA, 120 bp, Artificial Sequence
  ENSG00000115085_11 (sequence is synthesized)
agagatgatgcgcgaggcgcagatcatgcaccagctggacaacccctacatcgtgcggctcattggcgtctgccaggccgaggccctcatgctggtcatggagatggctgggggcgggcc

SEQ ID NO: 205987 - DNA, 120 bp, Artificial Sequence
  ENSG00000115085_12 (sequence is synthesized)
gctgcacaagttcctggtcggcaagagggaggagatccctgtgagcaatgtggccgagctgctgcaccaggtgtccatggggatgaagtacctggaggagaagaactttgtgcaccgtga

SEQ ID NO: 205988 - DNA, 120 bp, Artificial Sequence
  ENSG00000115085_13 (sequence is synthesized)
cctggcggcccgcaacgtcctgctggttaaccggcactacgccaagatcagcgactttggcctctccaaagcactgggtgccgacgacagctactacactgcccgctcagcagggaagtg

SEQ ID NO: 205989 - DNA, 120 bp, Artificial Sequence
  ENSG00000115085_14 (sequence is synthesized)
gccgctcaagtggtacgcacccgaatgcatcaacttccgcaagttctccagccgcagcgatgtctggagctatggggtcaccatgtgggaggccttgtcctacggccagaagccctacaa

SEQ ID NO: 205990 - DNA, 120 bp, Artificial Sequence
  ENSG00000115085_15 (sequence is synthesized)
gaagatgaaagggccggaggtcatggccttcatcgagcagggcaagcggatggagtgcccaccagagtgtccacccgaactgtacgcactcatgagtgactgctggatctacaagtggga

SEQ ID NO: 205991 - DNA, 120 bp, Artificial Sequence
  ENSG00000115085_16 (sequence is synthesized)
ggatcgccccgacttcctgaccgtggagcagcgcatgcgagcctgttactacagcctggccagcaaggtggaagggcccccaggcagcacacagaaggctgaggctgcctgtgcctgagc

SEQ ID NO: 205992 - DNA, 120 bp, Artificial Sequence
  ENSG00000115085_17 (sequence is synthesized)
tcccgctgcccaggggagccctccacgccggctcttccccaccctcagccccaccccaggtcctgcagtctggctgagccctgcttggttgtctccacacacagctgggctgtggtaggg

SEQ ID NO: 205993 - DNA, 120 bp, Artificial Sequence
  ENSG00000115085_18 (sequence is synthesized)
ggtgtctcaggccacaccggccttgcattgcctgcctggccccctgtcctctctggctggggagcagggaggtccgggagggtgcggctgtgcagcctgtcctgggctggtggctcccgg

SEQ ID NO: 205994 - DNA, 120 bp, Artificial Sequence
  ENSG00000115085_19 (sequence is synthesized)
agggccctgagctgagggcattgcttacacggatgccttcccctgggccctgacattggagcctgggcatcctcaggtggtcaggcgtagatcaccagaataaacccagcttccctcttg

SEQ ID NO: 205995 - DNA, 120 bp, Artificial Sequence
  ENSG00000115085_20 (sequence is synthesized)
ggtgcctgtggagcggaagaagctctctctccactgtctctgggagtcctcagtggatataggtctcatgagaggggctggacgtccccagctcaggccttgctgaccctgtggccttta

SEQ ID NO: 205996 - DNA, 120 bp, Artificial Sequence
  ENSG00000115085_21 (sequence is synthesized)
gcctcagagacgaatcgacaccctcaactcagatggatacacccctgagccaggtgagcgggcagaggtggggacgcgggttggggctcatgctgagccgagatcagggtcgctgtcagg

SEQ ID NO: 205997 - DNA, 120 bp, Artificial Sequence
  ENSG00000115085_22 (sequence is synthesized)
gctgtggggtttcacggggggcgctgtgggccgggccaggctgtggcagttggcttggttaacacctgtgcacacatgtgcccacacccatcacacctgcctgtgcacatgtacgtccca

SEQ ID NO: 205998 - DNA, 120 bp, Artificial Sequence
  ENSG00000115085_23 (sequence is synthesized)
acacgtttgttgagtacctactatgtgtcagtcacgttccgaggtcactgtgtgtatgagccaccgaaccctcctgacatgccttatgaagtggctatggtgattaacctcactttacag

SEQ ID NO: 205999 - DNA, 120 bp, Artificial Sequence
  ENSG00000115085_24 (sequence is synthesized)
atgagagagggaggggtctgtctatggggatgtgaggcagtggtagaggcgggatgtgaacccacgatgggccccagagctcacattcctaaaatggtctgctgcgggtgctcctgtttc

SEQ ID NO: 206000 - DNA, 120 bp, Artificial Sequence
  ENSG00000115085_25 (sequence is synthesized)
tcatgggtgggcccagacctgaacatgtgtatgcacagagaagacacatagttacatgtgcacctagaggctcgcttttggaggcctcgtaaatgtggctgtgtgctgcatacgcagaca

SEQ ID NO: 206001 - DNA, 120 bp, Artificial Sequence
  ENSG00000115085_26 (sequence is synthesized)
gggacgggcccggccataggcgtacacgtacgaatgcacacacatgcacaccccagctggcacagtaacggtgccacgtggataccaatgcacacgcccctagagtccaccctcatgtgg

SEQ ID NO: 206002 - DNA, 120 bp, Artificial Sequence
  ENSG00000115085_27 (sequence is synthesized)
cttcatggggcacccacagctgtggccaggagtgtatgccagtgtgtgcgtgtggatgtgcaggaacacgcatgggcacccacctgcttgtgcatgctccagggacggcacccttgtctg

SEQ ID NO: 206003 - DNA, 120 bp, Artificial Sequence
  ENSG00000115085_28 (sequence is synthesized)
gcaagtatggccgcccctgccgtggtgggagcaccgccgcctggggcagaggggagtggcttcaccgggctgtgggacgggagccgggatgtctgtctcacagcagtttgcctgggaaac

SEQ ID NO: 206004 - DNA, 120 bp, Artificial Sequence
  ENSG00000115085_29 (sequence is synthesized)
agactctggggcaggacgttgcacgctggaggattccctgagagagctcgggacacctgacgggggtgggatggggcctgggcagggggaggctgtggagctgaagttcccaacccaggg

SEQ ID NO: 206005 - DNA, 120 bp, Artificial Sequence
  ENSG00000115085_30 (sequence is synthesized)
gagctgcagtggggtccccgatccctgagtccactggcccctgacaggctgcccctggggagggtgtcactttggattctttttggcgatgggctgttcccggtgagcgatccggctgtg

SEQ ID NO: 206006 - DNA, 120 bp, Artificial Sequence
  ENSG00000115085_31 (sequence is synthesized)
agccgtcctcagcagacgctccaggctgcagggacattgagcgccttggtcccagcctgggtggcgactacagttgtctaccacacaactcaagggagaagagagatgggtgggtggggg

SEQ ID NO: 206007 - DNA, 120 bp, Artificial Sequence
  ENSG00000115085_32 (sequence is synthesized)
tgtggggccgagcagggccggtgcccctcgcccacgtgcctcccgtggccgggtcgggcaggaagcagatcgacgtggccatcaaggtgctgaagcagggcacggagaaggcagacacgg

SEQ ID NO: 206008 - DNA, 120 bp, Artificial Sequence
  ENSG00000115085_33 (sequence is synthesized)
cttggcccatcatcagcagatctggaggtgatgggggcctggcctggcttccccagtccctgcagcttctctgcaaggctctgaggtgtggagcccatagggtgtgttgcgggggaaccg

SEQ ID NO: 206009 - DNA, 120 bp, Artificial Sequence
  ENSG00000115085_34 (sequence is synthesized)
ggggtctggaggggcgtggccgaagaggggcagtcgagggttttggggggataggagggaggaaaaggtcgtcttccccattcagtcccctttggaagctggagaggtggggcactggtt

SEQ ID NO: 206010 - DNA, 120 bp, Artificial Sequence
  ENSG00000115085_35 (sequence is synthesized)
ggggaagaacctgaaaggaggcctcagaggcaggggctccgtggtggcggtcgccttccgcaggctgagcgatgctatggtgctctactatgccagatgggaaggtcttcaagctggaga

SEQ ID NO: 206011 - DNA, 120 bp, Artificial Sequence
  ENSG00000115085_36 (sequence is synthesized)
tcacccagttcatagcctttgcagctgccccctacccccacacccagctctccaacacaccagggtttgctgtcctgctccagtgtgccacaccctgccatcccacctgtgggcctgtgc

SEQ ID NO: 206012 - DNA, 120 bp, Artificial Sequence
  ENSG00000115085_37 (sequence is synthesized)
ctcagcatctaaaacctcagccatcactcaacacatggaccctgcaacacgcaaacaggtccatactctgctactcaacctatgacactgacactcagggcatgagatgattctccagta

SEQ ID NO: 206013 - DNA, 120 bp, Artificial Sequence
  ENSG00000115085_38 (sequence is synthesized)
cccaacactccagtccccaccagccagcacacagcacccaactaccagacaggtgagcactgaggtaccaaatactcatctattccagcccccacctctgcctggttgaagcccaacctt

SEQ ID NO: 206014 - DNA, 120 bp, Artificial Sequence
  ENSG00000115091_0 (sequence is synthesized)
gttgcggaagtgatagccgccgaccgagcctgctgctttcttgctactgcttcggcttcccggctaccccccggacggtgaaggcggcccagctgtggatggtcagatagcccttgtctc

SEQ ID NO: 206015 - DNA, 120 bp, Artificial Sequence
  ENSG00000115091_1 (sequence is synthesized)
ccgccgccaatctctggcccctagcagcacggagcagacggcggcagcagcagcagcaggcgaggaggaagatggcgggacggctgccggcctgtgtggtggactgtggcacggggtata

SEQ ID NO: 206016 - DNA, 120 bp, Artificial Sequence
  ENSG00000115091_2 (sequence is synthesized)
caaaactaggatatgctggaaatacagaaccacagtttatcatcccttcctgtattgctattaaggagtcagcaaaagtgggtgatcaagctcaaaggagggtgatgaaaggtgttgatg

SEQ ID NO: 206017 - DNA, 120 bp, Artificial Sequence
  ENSG00000115091_3 (sequence is synthesized)
acctagacttcttcattggtgatgaagcaatagaaaaacctacatatgcaacaaagtggccaatccgccatggtatagttgaagattgggacttaatggaaaggtttatggagcaagtga

SEQ ID NO: 206018 - DNA, 120 bp, Artificial Sequence
  ENSG00000115091_4 (sequence is synthesized)
tctttaaatatttaagggcagaacctgaagaccattattttcttttgactgaacctccattgaatactccagaaaacagggaatatactgctgaaataatgtttgagtccttcaatgttc

SEQ ID NO: 206019 - DNA, 120 bp, Artificial Sequence
  ENSG00000115091_5 (sequence is synthesized)
caggcttgtacattgctgtgcaggctgttcttgccttagctgcatcttggacctcaagacaagtaggagaacggacgttgaccggtacggtaatagacagtggagatggtgtcactcatg

SEQ ID NO: 206020 - DNA, 120 bp, Artificial Sequence
  ENSG00000115091_6 (sequence is synthesized)
tcattcctgtggctgaagggtatgtgattggcagctgtattaaacacattccaatcgcaggacgagatataacatattttattcagcaactgctgagagaccgagaagtaggaatccctc

SEQ ID NO: 206021 - DNA, 120 bp, Artificial Sequence
  ENSG00000115091_7 (sequence is synthesized)
cagaacaatccttggaaactgctaaggcagtaaaggagcgctatagttatgtctgcccagatttagtaaaagaatttaacaagtatgatacagatgggtcaaaatggattaaacagtata

SEQ ID NO: 206022 - DNA, 120 bp, Artificial Sequence
  ENSG00000115091_8 (sequence is synthesized)
ctggaatcaatgctatctcaaagaaagagttttctatcgatgttggttatgagagatttttgggacctgaaatcttttttcatccagagtttgctaatccagactttacacaacctatct

SEQ ID NO: 206023 - DNA, 120 bp, Artificial Sequence
  ENSG00000115091_9 (sequence is synthesized)
cagaagttgtagatgaagtaattcagaattgtcctattgatgtcagacgtcctctctacaagaatattgtcctctctggaggttcaaccatgttcagggactttggacgtcgcttgcaaa

SEQ ID NO: 206024 - DNA, 120 bp, Artificial Sequence
  ENSG00000115091_10 (sequence is synthesized)
gagatttgaaaagaactgtagatgcccggctgaaattaagtgaggaattgagtggtggtagattgaagccaaaacctattgatgtacaagtcattacacaccacatgcagcgatatgcag

SEQ ID NO: 206025 - DNA, 120 bp, Artificial Sequence
  ENSG00000115091_11 (sequence is synthesized)
tttggtttggaggatcaatgctggcttccacgcctgagttctaccaagtatgccacaccaaaaaggattatgaagaaattggacctagcatttgtcgtcacaatccagtgtttggagtca

SEQ ID NO: 206026 - DNA, 120 bp, Artificial Sequence
  ENSG00000115091_12 (sequence is synthesized)
tgtcgtaaaattggcttcatagttattggggttagggaggtggggaagagataatctttctgattacctgttttgtctggatggctggttttgaggttttaaacctgacttgaaatagta

SEQ ID NO: 206027 - DNA, 120 bp, Artificial Sequence
  ENSG00000115091_13 (sequence is synthesized)
acaccaaacatgattatacaggaatattttaataagtgtatcaccatgcagatgtagaagagagcgaaagtgattgtgtttttctttagattgaatatttgaatcttatgtgtaacaaaa

SEQ ID NO: 206028 - DNA, 120 bp, Artificial Sequence
  ENSG00000115091_14 (sequence is synthesized)
agaagtgggttttagttctttctgtgccctgatattttgtatattaatgaattatccaagattcgatgggatttatcagtgtgtagatagctctataatgcttgaattgtacacttctaa

SEQ ID NO: 206029 - DNA, 120 bp, Artificial Sequence
  ENSG00000115091_15 (sequence is synthesized)
gtgtgcagtgcaagagcttgtttatatttcatactttttatactttgaggaaaaaaagtcaaagaaaaattgtatttgagggaaaaaaccatgaccaagtaaaggataaattcaaaaaat

SEQ ID NO: 206030 - DNA, 120 bp, Artificial Sequence
  ENSG00000115091_16 (sequence is synthesized)
agcctcatgagacttggcatacacactcgtgggattccagttattatggagtgcttccatccctctccaccccttccccccaaaaggttttctttgcaagtgcttttggaactaagagct

SEQ ID NO: 206031 - DNA, 120 bp, Artificial Sequence
  ENSG00000115091_17 (sequence is synthesized)
agtatcttggattaactgatgcctgctagtgctttctgattactcgcattctgtttcttgctttaaaagaagagtaaagacaagagtgttggaccagtattgcagttctgtagtgtcatt

SEQ ID NO: 206032 - DNA, 120 bp, Artificial Sequence
  ENSG00000115091_18 (sequence is synthesized)
tcttataaaaaacaaaacaacaacaataatttatcaaaattggcatatttaaagcctaacattctaataaaggcacaaatttctttttaatacttgtttcagcctctttaatctctttat

SEQ ID NO: 206033 - DNA, 120 bp, Artificial Sequence
  ENSG00000115091_19 (sequence is synthesized)
aagttaactaataaatctattttcttcagacttctgcaatagttctttaaaatcacaacagttagcaagctgacttttgtaatgtgctcaatacaaatacttgtgaacttttaatatgtt

SEQ ID NO: 206034 - DNA, 120 bp, Artificial Sequence
  ENSG00000115091_20 (sequence is synthesized)
gagtgctttcattttgataactggatctccatttgatattttcatttgtataactcatttgcagtctgaaaattttttttagtgccagtccctgaacatatcattgaaagttaattttct

SEQ ID NO: 206035 - DNA, 120 bp, Artificial Sequence
  ENSG00000115091_21 (sequence is synthesized)
ctggattatgaagaaaaagtgatgaaaataaattaaaactgaattaccttttctaatgttttttttttttaagtaatgtaattctattttgtttttatgtatgtgatatctgtttctgtt

SEQ ID NO: 206036 - DNA, 120 bp, Artificial Sequence
  ENSG00000115091_22 (sequence is synthesized)
gatatctgtttctgttgagatttgggagttattgaaatctctgtaatgtgtatggtagaaaatttcttgtgaccttaaaattttaccagttatttatagaaagagaaaatgggaaatgtt

SEQ ID NO: 206037 - DNA, 120 bp, Artificial Sequence
  ENSG00000115091_23 (sequence is synthesized)
ttataggctttttactagcagtatcagtgaacacttgaactccattattcatgaaaataacacgttaggattggaatacgtctattcaaaagtgaaagaatataaagtgtttagtttttt

SEQ ID NO: 206038 - DNA, 120 bp, Artificial Sequence
  ENSG00000115091_24 (sequence is synthesized)
gtttttactctaaagatagaattggggagtaaacttcagtttttgtttagagtggatctgaatatttaaaatcctataataatttttgtgaatcttcattctttgagtatgggattgtaa

SEQ ID NO: 206039 - DNA, 120 bp, Artificial Sequence
  ENSG00000115091_25 (sequence is synthesized)
aagacaaactatatcctacagtagtatcatcatcagtatcaaaggtctcctttttttacttggaaaagtaattcacaaacattataaaaatactattcaaacagtaccaaagagtagatt

SEQ ID NO: 206040 - DNA, 120 bp, Artificial Sequence
  ENSG00000115091_26 (sequence is synthesized)
agcaaaagtaagtttttttccctagcctgtctcatttttccatcattacacagactacttggaatgtcttagatgtccttgtattgtaattttctgtgtaggtagaaataaatgtagctt

SEQ ID NO: 206041 - DNA, 120 bp, Artificial Sequence
  ENSG00000115091_27 (sequence is synthesized)
cctggcccaataaaatattgttagcattgtcataaatatgtcttttccaccggcgatggttgggtagttaagtgaataagctagaaagacatgtttataaagctatttgatgacaatctc

SEQ ID NO: 206042 - DNA, 120 bp, Artificial Sequence
  ENSG00000115091_28 (sequence is synthesized)
aggcatatttatacagagatgttcttaactgtttgctacaaaaacatgaagatcaaaaactttcttgaagcttacgcttaacttatttggggaaacaaaactccagcccttcttgtgtat

SEQ ID NO: 206043 - DNA, 120 bp, Artificial Sequence
  ENSG00000115091_29 (sequence is synthesized)
gttctgatatccctttgctctacttttagaggagtgaaccctaataggatggtagcagcattcttgtttctttatatctctcctctgtgattgtataccgttttttcaacttaaagcaac

SEQ ID NO: 206044 - DNA, 120 bp, Artificial Sequence
  ENSG00000115091_30 (sequence is synthesized)
ttcagctggaaatatgtagaggttggccaaggtgaactaaatagtctgtaacattgattagatatcaagcaacgtgagcatggtagcaaaagcactaactgaagccagtgatttaatttt

SEQ ID NO: 206045 - DNA, 120 bp, Artificial Sequence
  ENSG00000115091_31 (sequence is synthesized)
taattctgattctgataattgatgatatagctcctcgaactttgttttttgttaaaacttggaaaatatatttgtattattttggacaaattatttgaactctctggaccttgattcaat

SEQ ID NO: 206046 - DNA, 120 bp, Artificial Sequence
  ENSG00000115091_32 (sequence is synthesized)
ttatatataaggtaaaggcattatactggattatcctgcaatttctttgagttgttagaatataatgtagcttattaatagcaatattagcagtgtagtagattctgactgcaaaaccta

SEQ ID NO: 206047 - DNA, 120 bp, Artificial Sequence
  ENSG00000115091_33 (sequence is synthesized)
gccttttctattgattcattagtggtagtaaaggtattatctgatttatcctttttaataggcagtgctttgatcaagtgggaaatagtaatggacaaataaaatcaatgatcattatct

SEQ ID NO: 206048 - DNA, 120 bp, Artificial Sequence
  ENSG00000115091_34 (sequence is synthesized)
aacttgatgcctgcttttcaaaaagtgagcaaatttcacatcttcacccttagacattaattcatggcacctactataagtactcatcctcttcttacctatcttcttttctataggaga

SEQ ID NO: 206049 - DNA, 120 bp, Artificial Sequence
  ENSG00000115091_35 (sequence is synthesized)
taaagtggttattcagaccccccaatacaattttttggtttgttttcacagctacttaaaagattaaaataactattcttgcagatatttctaggaatatttttagaaataatatgaaat

SEQ ID NO: 206050 - DNA, 120 bp, Artificial Sequence
  ENSG00000115091_36 (sequence is synthesized)
acagggataataggccaattatgatctttatttttaatttctacagaaaagtactagagaatatatctatagaaacttctttcagataaccctaaagatgatactagaatgtttataaaa

SEQ ID NO: 206051 - DNA, 120 bp, Artificial Sequence
  ENSG00000115091_37 (sequence is synthesized)
ttattgagaagattatttgtgttataaagcttatttgtaccatagtaaaggatgtttttgttcctcttcattctgggctaatctgtcaatactgaagtccagtcttttcccccttttctt

SEQ ID NO: 206052 - DNA, 120 bp, Artificial Sequence
  ENSG00000115091_38 (sequence is synthesized)
accagctcaaccttgattcctgtgacccattctttctgatctttcgtagttcatagtcaccaggcatgagtaccttggatagccctctgaagtctgttaccacccagatttccaactcgg

SEQ ID NO: 206053 - DNA, 120 bp, Artificial Sequence
  ENSG00000115091_39 (sequence is synthesized)
gttaattggtactaattctattagctggtataaataatccaaaatctgtgcagactctgggagcaaaatgttctactcagtttggaatactgtgccttaaaatatatttcattgtaacag

SEQ ID NO: 206054 - DNA, 120 bp, Artificial Sequence
  ENSG00000115091_40 (sequence is synthesized)
caccttgtatatatagttggccaaggacagagttgttacaagttacgtggaactttcatagcaaatcttgacagtaaataccttgttcttgtattaggtctatatcctgaattgaccttt

SEQ ID NO: 206055 - DNA, 120 bp, Artificial Sequence
  ENSG00000115091_41 (sequence is synthesized)
agcaagaatctttagatctgctggagggctgggatggcttttggacttcagtgaaaaagaatttctgctactcattgttgataacgcttcagtactgtataaatgtttatccttttccac

SEQ ID NO: 206056 - DNA, 120 bp, Artificial Sequence
  ENSG00000115091_42 (sequence is synthesized)
gtaatttgttttctatgatatgagaacttttattataatttgcctcagtcttgatagaatcttaacaaaaataaaatctgtggtcgtctgaggtattctccatgctataacccagtttag

SEQ ID NO: 206057 - DNA, 120 bp, Artificial Sequence
  ENSG00000115091_43 (sequence is synthesized)
ctgatgcatttggagcttgggtgctgaaattaaatataacctatttgagttaaggatttattactagtgctccagtggtcacaggaacaataaaaaaggaacaacgatagaaatacgtga

SEQ ID NO: 206058 - DNA, 120 bp, Artificial Sequence
  ENSG00000115091_44 (sequence is synthesized)
tctaggaaagaaggcaactgaaaaacctgaaagaaaaaaaatgaaagattaaaagtatacgatattctattttgatttagcaattacttgttttctagtgttctgtcaatttttggtgac

SEQ ID NO: 206059 - DNA, 120 bp, Artificial Sequence
  ENSG00000115091_45 (sequence is synthesized)
ttttataattacattaaaactaagatgctgaattaaaataaagtttctcttttattcaagcaccaacattcacttatattacctatatattgcatcaagttttgagccttcaatcccaga

SEQ ID NO: 206060 - DNA, 120 bp, Artificial Sequence
  ENSG00000115091_46 (sequence is synthesized)
agcattgattgactgtctactgtggttcaagtactgtgcataaagatgaataaatattctgtccttggcttagtctaatagtaaaggcactcttagaggagggacaaatattttgcctag

SEQ ID NO: 206061 - DNA, 120 bp, Artificial Sequence
  ENSG00000115091_47 (sequence is synthesized)
ataagatttgagagatagtaagtgcggaatttctcttcataaaaatggtagtgttagttgtttagagggagaagtccagctatgtaaggtgaaagtggggcttataaaagtggatctatt

SEQ ID NO: 206062 - DNA, 120 bp, Artificial Sequence
  ENSG00000115091_48 (sequence is synthesized)
gtttaaaaattagtactttgctcctaaaatttttacctaagtgttacatccaacaacagatgaaagtaattcgacagtagcatctgctttattcatttcatatttccagtgcctgacata

SEQ ID NO: 206063 - DNA, 120 bp, Artificial Sequence
  ENSG00000115091_49 (sequence is synthesized)
ttgcttggcatatagtagtttagtggatgtgtttgatgaatgaatgagtaaaaattatttttcatgttaaaataaaactttgaattacatgagtatacaacttttgttccttcaaaatac

SEQ ID NO: 206064 - DNA, 120 bp, Artificial Sequence
  ENSG00000115091_50 (sequence is synthesized)
ccatatttgtcaaatatgaccgaattacgactttttttctgttccactagtttctaccttagaagtgacattctgcgtaaggtagtgggggattactaagtgatcatgacttttctgaag

SEQ ID NO: 206065 - DNA, 120 bp, Artificial Sequence
  ENSG00000115091_51 (sequence is synthesized)
caggtcttaaataattatctaagccttcagtcatttcaaaatctctgtagtgtaaatgatcacaggctctaaatcagattgttgtacaaggtaattgacatgtcctgaaatgtaacattc

SEQ ID NO: 206066 - DNA, 120 bp, Artificial Sequence
  ENSG00000115091_52 (sequence is synthesized)
aacattaacagtagaaacaggcctcatttctccctctggcttttattgatcaattttgatattgtccagatcccatgttaaaccacttgatttagagatgacttaattctaaacttcctc

SEQ ID NO: 206067 - DNA, 120 bp, Artificial Sequence
  ENSG00000115091_53 (sequence is synthesized)
catttttaattaataagattcaaggttgcagtaaattgttaatcttatttggaattatattagaaagtcgatatcggaattggaaccacacatctttttcttattgtgggtacatgggat

SEQ ID NO: 206068 - DNA, 120 bp, Artificial Sequence
  ENSG00000115091_54 (sequence is synthesized)
cagttactgaacagaacatgaaataacacatctggcaaagttaaattatacgaattaatgttacttttaaaaaactttaaatgctgcactataatttggccatttgtccagttatagcta

SEQ ID NO: 206069 - DNA, 120 bp, Artificial Sequence
  ENSG00000115091_55 (sequence is synthesized)
tgttttgctcaccgtttaaaacttttataaacaattcaaaatgtttcttttactgtaggtttgtactgcaattaagaaaattacaaattgcaatatctggaatggaagtatattaatggc

SEQ ID NO: 206070 - DNA, 120 bp, Artificial Sequence
  ENSG00000115091_56 (sequence is synthesized)
tttaatgcaatcttccacatttttagctttaggacagaaatagcctttataaaatatgtaaatcttacaaatcatgctcctaaaagcaaatgtaaacctctaagtttgtcttaataaaat

SEQ ID NO: 206071 - DNA, 82 bp, Artificial Sequence
  ENSG00000115091_57 (sequence is synthesized)
tttatgtattttctttccacagatactacatttaaaattgaataaagtactccagggaactagttttttttttttcgattaa

SEQ ID NO: 206072 - DNA, 120 bp, Artificial Sequence
  ENSG00000115091_58 (sequence is synthesized)
actacggtgggcagcgccgcccaaagggcgctggggacggtcgtcttgggggtggtccccgggcccgacccatccggctttcctttccctccgcgcccgtttttgccagtcggtttgggg

SEQ ID NO: 206073 - DNA, 61 bp, Artificial Sequence
  ENSG00000115091_59 (sequence is synthesized)
aagaaagaggtttaattggacttattgtcttacatgatggcagcaggcaaagagagaatga

SEQ ID NO: 206074 - DNA, 120 bp, Artificial Sequence
  ENSG00000115091_60 (sequence is synthesized)
atgaggaagacgcaaaagcagaaatccctgataaaaccatcagaccttgtgcaacttattcactccatgagaacagtatgggggaaaccaccctcatgattcaattctctctcaccaggt

SEQ ID NO: 206075 - DNA, 85 bp, Artificial Sequence
  ENSG00000115091_61 (sequence is synthesized)
gtcactatgttactattgccaaattattctccatagtggttacatcagtgtatactctcacagcgttatatgaaagtttccattt

SEQ ID NO: 206076 - DNA, 120 bp, Artificial Sequence
  ENSG00000115091_62 (sequence is synthesized)
cagtgtatactctcacagcgttatatgaaagtttccatttacccagatttttgccagctcatagtatatgtatgactttacatgtttgctattctgatagttataaaatggtatatatca

SEQ ID NO: 206077 - DNA, 120 bp, Artificial Sequence
  ENSG00000115091_63 (sequence is synthesized)
tcataattttgagttttctctgatttcagtgtcttcaatctgaatctgttagagaccagtattagtggtttctaaaaggccttttgtttttgaactgaaaactttgtttaaccttttatt

SEQ ID NO: 206078 - DNA, 120 bp, Artificial Sequence
  ENSG00000115091_64 (sequence is synthesized)
attaagtgaggaattgagtggtggtagattgaaggttggttttcccaattattggtgagaaggttgagggtgccttccttgattaggatgagaaatatttgccagcattcactctgattt

SEQ ID NO: 206079 - DNA, 120 bp, Artificial Sequence
  ENSG00000115091_65 (sequence is synthesized)
agaaaaataagaggaacctgtcaggtattctaatggaaatggttaatgttatagatttatgtctgtgatattctggatcatttgattcttctaggatattgtctgtatttctggaaaata

SEQ ID NO: 206080 - DNA, 120 bp, Artificial Sequence
  ENSG00000115091_66 (sequence is synthesized)
attcttagtaatacctgtggaaagactttttttttaaatacctctctcatagataattaatatagtagatttctttgcatacaccaacaatcaaattaattatggatccacaaaatgttt

SEQ ID NO: 206081 - DNA, 120 bp, Artificial Sequence
  ENSG00000115091_67 (sequence is synthesized)
tatactatagaaggacagcaaagctgagttgagattgatgccattgttgagtagtcaagcctgctctcaaaaactgactttagctcccacatagcaacctcaaagtgtgcagtcaaatcg

SEQ ID NO: 206082 - DNA, 120 bp, Artificial Sequence
  ENSG00000115091_68 (sequence is synthesized)
gtggtttaataaagtaacctttgtattacatgtcctggacctttaggcttgaggttaaaaaaaatcaaaattaatttaaaattcttagatgtctactttctatatttagagatagattct

SEQ ID NO: 206083 - DNA, 120 bp, Artificial Sequence
  ENSG00000115091_69 (sequence is synthesized)
tcatttttttcatccttgttaaatattgaagcagaacgttgatttagaggaatgatatggcttttttcaaagctgtttgaaaaaaggtatttcatgtgaataaaataccttctgcttgga

SEQ ID NO: 206084 - DNA, 120 bp, Artificial Sequence
  ENSG00000115091_70 (sequence is synthesized)
agattaccaagaatgaggactttatctgagacttccataatcattcagaattacttaaaagtaaagcacagcactctagggtttgctgattgttgagaaattgcatgatggctgactgtt

SEQ ID NO: 206085 - DNA, 120 bp, Artificial Sequence
  ENSG00000115091_71 (sequence is synthesized)
gtcagtgcctatattttgattatcttgagtaaacctatccctaggaatgcagtaaaaagtatatgttttgggtggaaggcaaaatattgaactctgtccctataatgtcatgacttcaca

SEQ ID NO: 206086 - DNA, 120 bp, Artificial Sequence
  ENSG00000115091_72 (sequence is synthesized)
cttcaggaagtctactcaatagacttttaaaatgttgtgtttgcttttgcatccccttcccaaccaaccaaaccaccagcccacccccattcatccattcatttgcccatccgtctactc

SEQ ID NO: 206087 - DNA, 120 bp, Artificial Sequence
  ENSG00000115091_73 (sequence is synthesized)
cccttacccacatatctatctaccctacctcctacctaaaaaagaagtcattgggttttgcaagtataaattctctgtactgagaatcctactaaccacattgattatgtgaatgaacat

SEQ ID NO: 206088 - DNA, 120 bp, Artificial Sequence
  ENSG00000115091_74 (sequence is synthesized)
agtgcatgttctggtttttttgttagaatacttaaaagattgaagttgattgtcctaatggtatggttatggatgtattaaagtagctgtttagtttttaataactcattacagatatat

SEQ ID NO: 206089 - DNA, 120 bp, Artificial Sequence
  ENSG00000115091_75 (sequence is synthesized)
aagtacaaaacaatgctgtatgtttctgagtatagtattttaaaaaagtgagattgtttaacatttttaagctctttttacacttgtaaataagaaataaatttacccagtgatcagtac

SEQ ID NO: 206090 - DNA, 120 bp, Artificial Sequence
  ENSG00000115091_76 (sequence is synthesized)
cgtatcgacatattgaaagaaacagattgggtgtcccttttttgaattgcttcataccagaagtgttgcaggttttgagtttttctggattttggagtatttgcattatatactggttca

SEQ ID NO: 206091 - DNA, 120 bp, Artificial Sequence
  ENSG00000115091_77 (sequence is synthesized)
acatccttaatccaaaaatctgaaattctgagcatttcctttgaacatcatgttggtgctcaaaaagtttttggatcttggagcattttggattttcagacttgggatgctcatcatgta

SEQ ID NO: 206092 - DNA, 120 bp, Artificial Sequence
  ENSG00000115091_78 (sequence is synthesized)
taggaaaaaccttgtgttttggaggactctgccttcttcaccttagttttacttgctagtaacttttatagatcttaatagcatgcctttatctatctatctctggctttattttccttc

SEQ ID NO: 206093 - DNA, 120 bp, Artificial Sequence
  ENSG00000115091_79 (sequence is synthesized)
agtctgtaatttttaatggcaaccaaacagttttgaaaaaagccatatcattctgtttctataaataggtgtgtgtacacacacacacacactaaattgtagatatgatggttcattatc

SEQ ID NO: 206094 - DNA, 120 bp, Artificial Sequence
  ENSG00000115091_80 (sequence is synthesized)
cccaaacattttagtatatttctaaaatcaagaacatattacaattatcaaaatcatgaaattaaccttgatccagtgttatctagttatagaactgattctaattttaccggttgtttc

SEQ ID NO: 206095 - DNA, 120 bp, Artificial Sequence
  ENSG00000115091_81 (sequence is synthesized)
cttattgtgttgcttcagtctgttacatactcaatgttttttgtctttcatgaatgaatgtgacatttttgaagagtacagccatttattttgtagcatatccttcagcttgggtttgtt

SEQ ID NO: 206096 - DNA, 120 bp, Artificial Sequence
  ENSG00000115091_82 (sequence is synthesized)
taatatttctgcttgagtaggttcagattatgtacttttggcagtgatgccacagaattgatattgtatcatttttagtgcattgtatcagtagacacatgatagaatttgtcctgtgtg

SEQ ID NO: 206097 - DNA, 120 bp, Artificial Sequence
  ENSG00000115091_83 (sequence is synthesized)
tgaattttgagcttttggttgaagttgtgtctgccaggttttttcactataaagttattatgttttcctttatatttaataagaatctaatgaggagacactttcagactatcctgtttc

SEQ ID NO: 206098 - DNA, 120 bp, Artificial Sequence
  ENSG00000115091_84 (sequence is synthesized)
tcttttaagtttcagtcactagtttttagcatccattgtgattcttccctaaaacagttattactgtggtagttgctaaatggagttttgcaatttctgtcattccttctatgtttttaa

SEQ ID NO: 206099 - DNA, 120 bp, Artificial Sequence
  ENSG00000115091_85 (sequence is synthesized)
gacttgttttactataagcaagagttttcccttctcccacattcatttattcttttagtaatatctatatgaactcctgatttctcattttgtggtctatatctttaatatcactgtaat

SEQ ID NO: 206100 - DNA, 120 bp, Artificial Sequence
  ENSG00000115091_86 (sequence is synthesized)
atcataatatcagtaataccactcatcattaattttaatcccacatttttttttttttcagatttgaccagtgggagttattcaaatggctcttaggtttttttttttgatgcagccaca

SEQ ID NO: 206101 - DNA, 120 bp, Artificial Sequence
  ENSG00000115091_87 (sequence is synthesized)
tctttttttttgcctacttctgtacttcccggcacagcaaggtgtttcaggctgatcttgtactttctcttttctggccctggaatcagccctttttttctccttttctttcttcaagac

SEQ ID NO: 206102 - DNA, 120 bp, Artificial Sequence
  ENSG00000115091_88 (sequence is synthesized)
acccttgtcttattcctgttagtggagaacgttactaagaaaccaagctttgtgctcattgctgttggggtatcactgagtctaggccttctcagtgattagagctaggggtgtgtgtgt

SEQ ID NO: 206103 - DNA, 120 bp, Artificial Sequence
  ENSG00000115091_89 (sequence is synthesized)
gtttatacatctatatctaattctctacataaattaaaaccatgaatttttacagacgtctccagttatagaaggttcactctagttttctgcccttccatattgtaatgcccttctctg

SEQ ID NO: 206104 - DNA, 120 bp, Artificial Sequence
  ENSG00000115091_90 (sequence is synthesized)
acagtgagaaacctggctcctattatctataatatgtttatgtttttgcttaatcctggaatatgtatatgatagtttcagaattgttaatccacaccactgtgaaaaatagacccaaaa

SEQ ID NO: 206105 - DNA, 120 bp, Artificial Sequence
  ENSG00000115091_91 (sequence is synthesized)
ctagaattcaatatttgcttatattttatcttcagcctgaaggcttataagattcaaaatactatgctcacaagttgcttgtgttagtccctttcctcaccttagtgtgcttatgtttga

SEQ ID NO: 206106 - DNA, 120 bp, Artificial Sequence
  ENSG00000115091_92 (sequence is synthesized)
aaaaagtacaattagtttaatttgtttttgttgtactttgttttgccccaacctccccttcttttaaggtgttattttttagtatgtaaaacactaacatttagattcttaaagtcagaa

SEQ ID NO: 206107 - DNA, 120 bp, Artificial Sequence
  ENSG00000115091_93 (sequence is synthesized)
ctgtataaaacatgtgctcattgttatttcccttccatttattctgctctgttccctccctgtctcttccacagtgttcccaacccctttcctctgagacagccaatctcaattgtttct

SEQ ID NO: 206108 - DNA, 120 bp, Artificial Sequence
  ENSG00000115091_94 (sequence is synthesized)
ggtttgtaagataccacctgaatttagtacagatattatttttgtatatgtacatttaaggttaaatgacacagaagttgttatttgaatttactatgaagatgatcatactatgtcttt

SEQ ID NO: 206109 - DNA, 60 bp, Artificial Sequence
  ENSG00000115107_0 (sequence is synthesized)
accgccttcgccgcggaccttcagctgccgcggtcgctccgagcggcgggccgcagacac

SEQ ID NO: 206110 - DNA, 120 bp, Artificial Sequence
  ENSG00000115107_1 (sequence is synthesized)
acccagccaccaaaatgccagaagagatggacaagccactgatcagcctccacctggtggacagcgatagtagccttgccaaggtccccgatgaggcccccaaagtgggcatcctgggta

SEQ ID NO: 206111 - DNA, 120 bp, Artificial Sequence
  ENSG00000115107_2 (sequence is synthesized)
gcggggactttgcccgctccctggccacacgcctggtgggctctggcttcaaagtggtggtggggagccgcaaccccaaacgcacagccaggctgtttccctcagcggcccaagtgactt

SEQ ID NO: 206112 - DNA, 120 bp, Artificial Sequence
  ENSG00000115107_3 (sequence is synthesized)
tccaagaggaggcagtgagctccccggaggtcatctttgtggctgtgttccgggagcactactcttcactgtgcagtctcagtgaccagctggcgggcaagatcctggtggatgtgagca

SEQ ID NO: 206113 - DNA, 120 bp, Artificial Sequence
  ENSG00000115107_4 (sequence is synthesized)
accctacagagcaagagcaccttcagcatcgtgagtccaatgctgagtacctggcctccctcttccccacttgcacagtggtcaaggccttcaatgtcatctctgcctggaccctgcagg

SEQ ID NO: 206114 - DNA, 120 bp, Artificial Sequence
  ENSG00000115107_5 (sequence is synthesized)
ctggcccaagggatggtaacaggcaggtgcccatctgcggtgaccagccagaagccaagcgtgctgtctcggagatggcgctcgccatgggcttcatgcccgtggacatgggatccctgg

SEQ ID NO: 206115 - DNA, 120 bp, Artificial Sequence
  ENSG00000115107_6 (sequence is synthesized)
cgtcagcctgggaggtggaggccatgcccctgcgcctcctcccggcctggaaggtgcccaccctgctggccctggggctcttcgtctgcttctatgcctacaacttcgtccgggacgttc

SEQ ID NO: 206116 - DNA, 120 bp, Artificial Sequence
  ENSG00000115107_7 (sequence is synthesized)
tgcagccctatgtgcaggaaagccagaacaagttcttcaagctgcccgtgtccgtggtcaacaccacactgccgtgcgtggcctacgtgctgctgtcactcgtgtacttgcccggcgtgc

SEQ ID NO: 206117 - DNA, 120 bp, Artificial Sequence
  ENSG00000115107_8 (sequence is synthesized)
tggcggctgccctgcagctgcggcgcggcaccaagtaccagcgcttccccgactggctggaccactggctacagcaccgcaagcagatcgggctgctcagcttcttctgcgccgccctgc

SEQ ID NO: 206118 - DNA, 120 bp, Artificial Sequence
  ENSG00000115107_9 (sequence is synthesized)
acgccctctacagcttctgcttgccgctgcgccgcgcccaccgctacgacctggtcaacctggcagtcaagcaggtcttggccaacaagagccacctctgggtggaggaggaggtctggc

SEQ ID NO: 206119 - DNA, 120 bp, Artificial Sequence
  ENSG00000115107_10 (sequence is synthesized)
ggatggagatctacctctccctgggagtgctggccctcggcacgttgtccctgctggccgtgacctcactgccgtccattgcaaactcgctcaactggagggagttcagcttcgttcagt

SEQ ID NO: 206120 - DNA, 120 bp, Artificial Sequence
  ENSG00000115107_11 (sequence is synthesized)
cctcactgggctttgtggccctcgtgctgagcacactgcacacgctcacctacggctggacccgcgccttcgaggagagccgctacaagttctacctgcctcccaccttcacgctcacgc

SEQ ID NO: 206121 - DNA, 120 bp, Artificial Sequence
  ENSG00000115107_12 (sequence is synthesized)
tgctggtgccctgcgtcgtcatcctggccaaagccctgtttctcctgccctgcatcagccgcagactcgccaggatccggagaggctgggagagggagagcaccatcaagttcacgctgc

SEQ ID NO: 206122 - DNA, 120 bp, Artificial Sequence
  ENSG00000115107_13 (sequence is synthesized)
ccacagaccacgccctggccgagaagacgagccacgtatgaggtgcctgccctgggctctggaccccgggcacacgagggacggtgccctgagcccgttaggttttcttttcttggtggt

SEQ ID NO: 206123 - DNA, 120 bp, Artificial Sequence
  ENSG00000115107_14 (sequence is synthesized)
gcaaagtggtataactgtgtgcaaataggaggtttgaggtccaaattcctgggactcaaatgtatgcagtactattcagaatgatatacacacatatgtgtatatgtatttacatatatt

SEQ ID NO: 206124 - DNA, 120 bp, Artificial Sequence
  ENSG00000115107_15 (sequence is synthesized)
ccacatatataacaggatttgcaattatacatagctagctaaaaagttgggtctctgagatttcaacttgtagatttaaaaacaagtgccgtacgttaagagaagagcagatcatgctat

SEQ ID NO: 206125 - DNA, 120 bp, Artificial Sequence
  ENSG00000115107_16 (sequence is synthesized)
gcccaccccacccccacaacttcccttttgctacttccccaaggctcttgcagagctagggctctgaaggggagggaaggcaacggctctgcccagagccatccctggagcatgtgagca

SEQ ID NO: 206126 - DNA, 120 bp, Artificial Sequence
  ENSG00000115107_17 (sequence is synthesized)
gcggctggtctcttccctccacctggggcagcagcaggaggcctggggaggaggaaaatcaggcagtcggcctggagtctgtgcctggtcctttgcccggtggtgggaggatggagggat

SEQ ID NO: 206127 - DNA, 120 bp, Artificial Sequence
  ENSG00000115107_18 (sequence is synthesized)
tgggctgaagctgctccacctcatccttgctgagtgggggagacattttccctgaaagtcagaagtcaccatagagcctgcaaatggatcctcctgtgagagtgacgtcacctcctttcc

SEQ ID NO: 206128 - DNA, 120 bp, Artificial Sequence
  ENSG00000115107_19 (sequence is synthesized)
agagccattagtgagcctggcttgggaacaagtgtaatttccttccctcctttaacctggcgatgagcgtcctttaaaccactgtgccttctcaccctttccatcttcagtttgaatgac

SEQ ID NO: 206129 - DNA, 120 bp, Artificial Sequence
  ENSG00000115107_20 (sequence is synthesized)
tcccaggaaggcctagagcagaccctttagaaatcagcccaagggggagagcaagagaaaacactctagggagtaaagctccccgggcgtcagagttgagccctgcctgggctgaaggac

SEQ ID NO: 206130 - DNA, 120 bp, Artificial Sequence
  ENSG00000115107_21 (sequence is synthesized)
tgtcttcacgaagtcagtcctgaggaaaaatattggggactccaaatgtcctctggcagaggacccagaaaaccacactggctccaacttcctcctcatggggcattacacttcaaaaca

SEQ ID NO: 206131 - DNA, 120 bp, Artificial Sequence
  ENSG00000115107_22 (sequence is synthesized)
gtggggagcaacttttccaccaaagctacaaacctaaaatgctgctgccccaaagcacaagagggaagagcaccgccggggccacaggacgtctgtcctccagtcacaggccatccttgc

SEQ ID NO: 206132 - DNA, 120 bp, Artificial Sequence
  ENSG00000115107_23 (sequence is synthesized)
tgctccctactgactctagcttacttcccctgtgaagaaacaggtgttctcggctgagcccccaaccctctgcagaaccaggttgatctgccacagaaaaagcatctttgaagacaaaga

SEQ ID NO: 206133 - DNA, 120 bp, Artificial Sequence
  ENSG00000115107_24 (sequence is synthesized)
gggtgaggtcttcatgagtctcctgggcccaaagccatcttctgatggaaggaagagagtagggccagtgaaggctgcccagagagaatgtcacagatgaggctgcccctgccccccccc

SEQ ID NO: 206134 - DNA, 120 bp, Artificial Sequence
  ENSG00000115107_25 (sequence is synthesized)
cgccagggaggtttcatgagctcatgtctatgcagcacataagggttcttcagtgaaaagcaggagaagagcccactgcaaggatagctcattaggcacatgaccgatgcagggaaggcc

SEQ ID NO: 206135 - DNA, 120 bp, Artificial Sequence
  ENSG00000115107_26 (sequence is synthesized)
atgccggggaagctcttcctgcaggtattttccatctgctgtgccaaggctgagcggcagaaacttgtctcataaattggcactgatggagcatcagctgtggcccacagagagccttgc

SEQ ID NO: 206136 - DNA, 120 bp, Artificial Sequence
  ENSG00000115107_27 (sequence is synthesized)
tgagaagggggcaggtaaagcagagattttagcattgccttggcataacaagggcccatcgattccctactaatgagaggcagggagagcatgggcaatggagacccaccaatgatcccc

SEQ ID NO: 206137 - DNA, 120 bp, Artificial Sequence
  ENSG00000115107_28 (sequence is synthesized)
aaccccggtgggtactggctgcctgccctgggccagggaatggctccttataccaaagatgctggcacatagcagaacccagtgcacgtcctccccttcccacccacctctggctgaagg

SEQ ID NO: 206138 - DNA, 120 bp, Artificial Sequence
  ENSG00000115107_29 (sequence is synthesized)
tgctcaagagggaagcaattataaggtgggtggcaggagggaacaggtgccacctgctggacaatcacacgaaaggcaggcgggctgtgtactgggccctgactgtgcgtccactgctgt

SEQ ID NO: 206139 - DNA, 120 bp, Artificial Sequence
  ENSG00000115107_30 (sequence is synthesized)
cttccctacctcaccaggctactggcagcagcatcccgagagcacatcatctccacagcctggtaaattccatgtgcctctgggtacaaaagtgcctcaacgacatgctctggaaatccc

SEQ ID NO: 206140 - DNA, 120 bp, Artificial Sequence
  ENSG00000115107_31 (sequence is synthesized)
aaatgccacagtctgaggttgatatctaaaatctatgccttcaaaagagtctctgttttttttttttaacctggtagacagtataaaagcagtgcaaataaacacctaaccttctgcaaa

SEQ ID NO: 206141 - DNA, 120 bp, Artificial Sequence
  ENSG00000115107_32 (sequence is synthesized)
gccttcgccgcggaccttcagctgccgcggtcgctccgagcggcgggccgcagagatgacatttattcattttatgcatcctgggttctactggtcgtcccacctcagttcctgtagcaa

SEQ ID NO: 206142 - DNA, 120 bp, Artificial Sequence
  ENSG00000115107_33 (sequence is synthesized)
agagacttgagtctgagccactaattatcacccgtgaggtttcctccccgagcaggaagcagcaggccagagctgcgctctctcagtgcactctccaaccaagcatcagtcaccactccc

SEQ ID NO: 206143 - DNA, 120 bp, Artificial Sequence
  ENSG00000115107_34 (sequence is synthesized)
ggtccagcccctgtggccaagagctggcgtgcaggctgcgggaggcagctggctgtgcaagaccctggcagggccctcgcctcctgagaaaccgagagtcagaaccaaagccaggctgtc

SEQ ID NO: 206144 - DNA, 120 bp, Artificial Sequence
  ENSG00000115107_35 (sequence is synthesized)
gtggaacccgaagacctgaatctcagtcccaagacccccacttacctgccccgcatcatcagacaagtttcctaggccctcggagcttctgctgctcacttgtgcctgtgtccaccccat

SEQ ID NO: 206145 - DNA, 120 bp, Artificial Sequence
  ENSG00000115109_0 (sequence is synthesized)
tttctcggcgtctaccgaggagccgcccctttctcagccttgctcggctcttccccgctctggtcgccggggctgcgccgtccccagctcagtgacaaaaatgctgagtttcttccgtag

SEQ ID NO: 206146 - DNA, 120 bp, Artificial Sequence
  ENSG00000115109_1 (sequence is synthesized)
aacactagggcgtcggtctatgcgtaaacatgcagagaaggaacgactccgagaagcacaacgcgccgccacacatattcctgcagctggagattctaagtccatcatcacgtgtcgggt

SEQ ID NO: 206147 - DNA, 120 bp, Artificial Sequence
  ENSG00000115109_2 (sequence is synthesized)
gtcccttctggatggtactgatgttagtgtggacttgccaaaaaaagccaaaggacaagagttgtttgatcagattatgtaccacctggacctgattgaaagcgactattttggtctgag

SEQ ID NO: 206148 - DNA, 120 bp, Artificial Sequence
  ENSG00000115109_3 (sequence is synthesized)
atttatggattcagcacaagtagcacattggttggatggtacaaaaagcatcaaaaagcaagtaaaaattggttcaccctattgtctgcatcttcgagttaagttttattcctcagaacc

SEQ ID NO: 206149 - DNA, 120 bp, Artificial Sequence
  ENSG00000115109_4 (sequence is synthesized)
aaataaccttcgtgaggagctaacccggtatttatttgttcttcagttaaaacaagatattctcagtggaaaattagactgtccctttgatacagcagtgcaattggcagcttataatct

SEQ ID NO: 206150 - DNA, 120 bp, Artificial Sequence
  ENSG00000115109_5 (sequence is synthesized)
gcaagctgaacttggtgactatgatcttgctgagcatagtcctgaacttgtctcagagttcagattcgtgcctattcagactgaagagatggaactggctatttttgagaaatggaagga

SEQ ID NO: 206151 - DNA, 120 bp, Artificial Sequence
  ENSG00000115109_6 (sequence is synthesized)
atacagaggtcaaacaccagcacaggctgaaaccaattatctgaataaagccaaatggctagaaatgtatggggttgatatgcatgtggtcaaggctagagatgggaatgactatagttt

SEQ ID NO: 206152 - DNA, 120 bp, Artificial Sequence
  ENSG00000115109_7 (sequence is synthesized)
aaattaaccttggtggttgtagaagatgatgatcagggcaaagaacaggaacatacatttgtctttagactggatcatccaaaagcatgcaaacatttatggaaatgtgctgtggagcat

SEQ ID NO: 206153 - DNA, 120 bp, Artificial Sequence
  ENSG00000115109_8 (sequence is synthesized)
catgctttcttccgccttcgaggccccgtccaaaagagttctcatcgatcaggatttattcgactaggatcacgatttagatatagtgggaaaacagagtatcagaccacaaaaaccaat

SEQ ID NO: 206154 - DNA, 120 bp, Artificial Sequence
  ENSG00000115109_9 (sequence is synthesized)
aaagcaagaagatcaacatcctttgaaagaaggcccagcaaacgatattctagacgaactctacaaatgaaagcatgtgctacaaaacctgaagaacttagtgttcacaataatgtttcg

SEQ ID NO: 206155 - DNA, 120 bp, Artificial Sequence
  ENSG00000115109_10 (sequence is synthesized)
acccaaagtaatggctcccaacaggcttgggggatgagatctgctctgcctgtgagtccttccatttcctctgctcctgtgccagtggagatagagaatcttccacagagtcctggaaca

SEQ ID NO: 206156 - DNA, 120 bp, Artificial Sequence
  ENSG00000115109_11 (sequence is synthesized)
gaccagcatgacaggaaatggctctctgctgccagcgactgctgtcaacgtggtggaaaccagtggaacacaagggccttgcccccaccccagaccgcacatagaaactacactgacttt

SEQ ID NO: 206157 - DNA, 120 bp, Artificial Sequence
  ENSG00000115109_12 (sequence is synthesized)
gttcatgagcacaatgtgaagaatgcaggaatccgtcatgatgttcattttcctggccatacagccatgactgagatatgagtgttgagcctcttaggctttgggactctttgtcatgca

SEQ ID NO: 206158 - DNA, 120 bp, Artificial Sequence
  ENSG00000115109_13 (sequence is synthesized)
agttgatggtatacattatctggtgtttataaaggattaatcacattaggagtatttgggagaatttacagtgagtcactagttgttcagtgctgtttgtaattgaattcttccatgaaa

SEQ ID NO: 206159 - DNA, 120 bp, Artificial Sequence
  ENSG00000115109_14 (sequence is synthesized)
gtaagcgcgaggcccggcggcggcgccgcagtacagtccgctgcgctcctagccgagtggacccttcctcgcccgcgcctgcggtagcggccttgtccccggggaggcgggcgggggccg

SEQ ID NO: 206160 - DNA, 120 bp, Artificial Sequence
  ENSG00000115109_15 (sequence is synthesized)
cacccagaccctagggcggccggcccctctctcgtcgggccggcagggcattaatcccgccggagggaggggcggcggcggccaatgaggcagggccgccgagtttcggtcgataccgcg

SEQ ID NO: 206161 - DNA, 120 bp, Artificial Sequence
  ENSG00000115109_16 (sequence is synthesized)
cgacgggccggggcggagggcccggggcagccgggttaatgtttgccgagcggacgcgctccccgagccgcgggtacccctcgctggtccgctgggctgccgtccagcgggagagacaaa

SEQ ID NO: 206162 - DNA, 120 bp, Artificial Sequence
  ENSG00000115109_17 (sequence is synthesized)
agtcgcaagggaaggggaaaaacgaactgagtttgtgtcactgtcttggtggacttttcgagctaacctgtatttgagaaaaacttcagtctcttgggaaaggagaggcagtgacaaaaa

SEQ ID NO: 206163 - DNA, 120 bp, Artificial Sequence
  ENSG00000115109_18 (sequence is synthesized)
acatcaccagactgtatctcaggagaaggtttgtgtttgtgaacaaggtgcccattattcccccaccacatgccatccaaagagatcgaggttaaaagaatcagacacactaaaaacaca

SEQ ID NO: 206164 - DNA, 120 bp, Artificial Sequence
  ENSG00000115109_19 (sequence is synthesized)
gtggaagcatgtctaggcataatatatcagccttttgagatatttattaaaaacttgttcttatacactattttaatatgtctaaagtgacacataccttaatttaagtgcctaagattt

SEQ ID NO: 206165 - DNA, 120 bp, Artificial Sequence
  ENSG00000115109_20 (sequence is synthesized)
taatataatttttaattacaaacacttttactttttaataaacacgaatattttaacttaccaaaagatttagagatcacattaataatgtggctcatgtatagagaaatctgaatggtt

SEQ ID NO: 206166 - DNA, 120 bp, Artificial Sequence
  ENSG00000115109_21 (sequence is synthesized)
ggttagttttgaatggttaactgattaacattcagttatcataacagttaaccagtggttaactgaatggttacattactactgaatggttctataaaatgaaaaacatatttactttgt

SEQ ID NO: 206167 - DNA, 120 bp, Artificial Sequence
  ENSG00000115109_22 (sequence is synthesized)
cttttcatttgactggcttttctctttcatctcatacacctgacagattacccaggtttgcaacagtctcataatctgatcctgtataacctttaaaataaaattctgaagccaaaacca

SEQ ID NO: 206168 - DNA, 120 bp, Artificial Sequence
  ENSG00000115109_23 (sequence is synthesized)
tcgtgaggagctaacccggtaagaacaccatctagaattgtgccagggttattttgatagttttgaaagactgtctttatattgtttccaatttatagccagctaataaaatggattcct

SEQ ID NO: 206169 - DNA, 120 bp, Artificial Sequence
  ENSG00000115109_24 (sequence is synthesized)
gtcccctggtaacaagacctcaaataatagaattttattctgggacgtgttttttaagtgtatgattcttttcctttagcattttcaaaataaagagttggtttcttagcatcctccaaa

SEQ ID NO: 206170 - DNA, 120 bp, Artificial Sequence
  ENSG00000115109_25 (sequence is synthesized)
cagcatgacaggaaatgcattcctctgaatattgatttgctgaatagcccagacttattggaagcaacgattggtgatgtaattggggcatctgacactatggaaacatcccaagcactg

SEQ ID NO: 206171 - DNA, 120 bp, Artificial Sequence
  ENSG00000115109_26 (sequence is synthesized)
aatgacgttaatgtagccaccaggcttccgggattaggggaacctgaagttgaatatgagacattaaaagacacctcagagaagctcaaacagcttgagatggagaacagtcctttgctg

SEQ ID NO: 206172 - DNA, 120 bp, Artificial Sequence
  ENSG00000115109_27 (sequence is synthesized)
tcccctcgatccaacatcgatgttaacataaacagccaggaggaagtggtgaagttgactgagaaatgccttaataatgtcattgagagcccaggattgaatgtcatgagagttcctcct

SEQ ID NO: 206173 - DNA, 120 bp, Artificial Sequence
  ENSG00000115109_28 (sequence is synthesized)
gacttcaagagtaacattttgaaggctcaagtagaagcagtgcataaggttacaaaagaagatagcttattaagtcataaaaatgccaatgttcaggatgctgccacaaacagtgctgtg

SEQ ID NO: 206174 - DNA, 120 bp, Artificial Sequence
  ENSG00000115109_29 (sequence is synthesized)
ttaaatgagaataatgtgcccctccccaaagagtctcttgagactctgatgcttatcacacctgccgacagtggttctgttctaaaggaagctacagatgaattggatgccttgcttgca

SEQ ID NO: 206175 - DNA, 120 bp, Artificial Sequence
  ENSG00000115109_30 (sequence is synthesized)
tctctaactgagaatctaattgatcacacagttgcacctcaggtgtcttccacatccatgatcacaccccggtggattgttccgagtggtgccatgtctaatggacttgcgggatgtgaa

SEQ ID NO: 206176 - DNA, 120 bp, Artificial Sequence
  ENSG00000115109_31 (sequence is synthesized)
atgcttttgacagggaaggagggacatggtaataaagatggaatctcactgatctctcccccagcgccattcttggtagatgctgtgaccagctctggtcccattttggcagaagaagct

SEQ ID NO: 206177 - DNA, 120 bp, Artificial Sequence
  ENSG00000115109_32 (sequence is synthesized)
gtcctgaagcagaagtgtttactgaccactgagctctgagggcctgtagctggaatacgcatctctccagcattccgtcctgggatccgtttcagctagaatatgttggattcaggagct

SEQ ID NO: 206178 - DNA, 120 bp, Artificial Sequence
  ENSG00000115109_33 (sequence is synthesized)
tgtccattatttgtaggtaaaaaaagctgcacgtagatttgacttcaactccgtaaaaaagacagctgtattttccgtccaactggaattgttgaatcacactgcatagctgcccaaaag

SEQ ID NO: 206179 - DNA, 120 bp, Artificial Sequence
  ENSG00000115109_34 (sequence is synthesized)
agagtgtttggtcttgaactttctatacttttataaatgttacaaattcccgaaagaagggaatttctttttctggggtttccttcaaactcttggctccacctagcggttctatttgtt

SEQ ID NO: 206180 - DNA, 120 bp, Artificial Sequence
  ENSG00000115109_35 (sequence is synthesized)
cataacaacttcataacaagcctgcctctggtagtcaacagccttttgaaagctatttccatctagtatcagggtgagagcatccttgatctggctgcctgttagagaaattgcactttt

SEQ ID NO: 206181 - DNA, 120 bp, Artificial Sequence
  ENSG00000115109_36 (sequence is synthesized)
cctgacttacctagaaatcaagaatttaggaaattaatgtggacactataaaggcagacttagggccaacttttttttttttttacaattattacaacactaaagagaagtttagaatat

SEQ ID NO: 206182 - DNA, 120 bp, Artificial Sequence
  ENSG00000115109_37 (sequence is synthesized)
agagagtttttaaatgtctcccattcttttgatttcttactgtactggctatcttaatatttcaagtttacatcaagataaaccctgagaagaactacggagaaatcaaataaaatcctg

SEQ ID NO: 206183 - DNA, 120 bp, Artificial Sequence
  ENSG00000115109_38 (sequence is synthesized)
tcatatttttttcaccctgcctttccacaggaagcactcacaggcaccacacacgtatcatgtaacttatcagtggggtgggttactgttgaagagaccctggggcatttacctcaggca

SEQ ID NO: 206184 - DNA, 120 bp, Artificial Sequence
  ENSG00000115109_39 (sequence is synthesized)
tctgcactcctccgagcccggtggagaatgcaggctgctgtagtctcaggtaatgaaggcacagcacagcagtactccacattgtttcctatttggacatagacttcatttcctttcagt

SEQ ID NO: 206185 - DNA, 120 bp, Artificial Sequence
  ENSG00000115109_40 (sequence is synthesized)
aacaaatacaccaagaccaaaataggcaataggaacaggggtgaagggatgttgtttcttaaatacctaccatgtatgaagctatacacagcatataccgaaagaacctgcattgcacta

SEQ ID NO: 206186 - DNA, 120 bp, Artificial Sequence
  ENSG00000115109_41 (sequence is synthesized)
ggaattctgtgttagtttaaaagagatctctaaaacttccccatccctttgggcctgtacaaagaaattctggatgttaaaataatatatactcatcacagaaaaataaagtatagcaat

SEQ ID NO: 206187 - DNA, 120 bp, Artificial Sequence
  ENSG00000115109_42 (sequence is synthesized)
gtccatctgtaattctaatacccagaaataacgctatttagctttataattttcgaatgaacaaggtaaacctcggttgccatggggaagaaggatgatgtggaaaccatattggtaaag

SEQ ID NO: 206188 - DNA, 120 bp, Artificial Sequence
  ENSG00000115109_43 (sequence is synthesized)
ttgttaatccctcgttatggagaactgatcttaagctatacctcctggaatttgctttctagttttctgtcctgcaatatgtatataattaagcactaatttgtactgcttagcataaaa

SEQ ID NO: 206189 - DNA, 120 bp, Artificial Sequence
  ENSG00000115109_44 (sequence is synthesized)
gaacatccagtcttagatccttaaaacttcatggattggactttcctgggctccttataacataatcgtgtgtccaggcaaacgcacactagtgtctgactggaaagctcaggaatttta

SEQ ID NO: 206190 - DNA, 120 bp, Artificial Sequence
  ENSG00000115109_45 (sequence is synthesized)
atcttgcactgtttcccagggagctgtagtgattggaacccacgtttgcacaaaacatttttgcagaaggaaagtcaacacttcttgctggctgcctccccttagccattatgctaaaaa

SEQ ID NO: 206191 - DNA, 120 bp, Artificial Sequence
  ENSG00000115109_46 (sequence is synthesized)
cagcttctgagtttcactggtggggctcttgccagttcttaattataggacatattttctcaaagctgaaggtgacacctagaaccaggggcttgacccaggacatgatggaatgagcat

SEQ ID NO: 206192 - DNA, 120 bp, Artificial Sequence
  ENSG00000115109_47 (sequence is synthesized)
caaattttcagtgtcttggcaaccgtagatgtcctacagggttaccgttgtgctgctcaccacagagcagctgaggcattatgccttggaagacctaaatctcccatccagttcaggagg

SEQ ID NO: 206193 - DNA, 120 bp, Artificial Sequence
  ENSG00000115109_48 (sequence is synthesized)
tgacaacatccttattttaaacttcctaaaattaggaattaggtagttggacatagtctgtgacctttatgtcgttggatacctgtattcttgacagttagaatattggtagggactttg

SEQ ID NO: 206194 - DNA, 120 bp, Artificial Sequence
  ENSG00000115109_49 (sequence is synthesized)
ttaaaattcacttgaatttcaagctcagaggaaactttgtctcatgccctgacatgaagtggcaaacacggaagttcatacttgaatgctgaattggccccgacagattaaatgcgtgtt

SEQ ID NO: 206195 - DNA, 120 bp, Artificial Sequence
  ENSG00000115109_50 (sequence is synthesized)
ggggattggtttcctgtcatagctgctgctgctgccatgcgcagagctgctgtaacagctcttcctgttctgctcccctgagaacagtgtggtggggagaggcagggctgaggtggtcta

SEQ ID NO: 206196 - DNA, 120 bp, Artificial Sequence
  ENSG00000115109_51 (sequence is synthesized)
cgaatgtggcaggtagggaaggggagatgtctgtctcttgagaagagagaggcatgtgtgccggcatccttgatgggttcaaagagaaaggttggagatgatagtgggtgagaagcaggc

SEQ ID NO: 206197 - DNA, 120 bp, Artificial Sequence
  ENSG00000115109_52 (sequence is synthesized)
tggtgagactgggctgaggttggagaaggggcagccgggggcactgctgagggtttgccgtgcacgcctcggacggagcacggtggggtggcggggagcagatagtgctgcctccctgcg

SEQ ID NO: 206198 - DNA, 120 bp, Artificial Sequence
  ENSG00000115109_53 (sequence is synthesized)
ggcagacaggagaggaacctcaactcagtccatttcatagccctgataggggaagtgggagttgacaggatggtttaaaataagacgtgaaggtttcagttacctgctctagactttgcc

SEQ ID NO: 206199 - DNA, 120 bp, Artificial Sequence
  ENSG00000115109_54 (sequence is synthesized)
tgagaacttgtaaattaatcagtgagacctaatttgtgacatgtcagtagcatcatcttttgacacacaggaggtcatggtcatttcattcctactcttcaggagacactgctgaacaga

SEQ ID NO: 206200 - DNA, 120 bp, Artificial Sequence
  ENSG00000115109_55 (sequence is synthesized)
ggaatgattctgttccttgtgtgcttacttccttaacatttatacattgttttaagaaaaaacttttaaaaatatttcttatagtctcctaacatttgtctctagcctttgcctttgtac

SEQ ID NO: 206201 - DNA, 120 bp, Artificial Sequence
  ENSG00000115109_56 (sequence is synthesized)
aatcacagatatcctatggagatttaaggatgaaagccctgagttgttcttgggttcttggatctggactacttgttatcttatgcttctcacttctggctaaaacttgcacctcttctt

SEQ ID NO: 206202 - DNA, 120 bp, Artificial Sequence
  ENSG00000115109_57 (sequence is synthesized)
ctcttagctaagccccaaaatgaagatttccttcagaagtcttgttagcagaattatttatcagtcacagagagaaaaatctgctatttttctaagtaagagtctcgagaagcagagttt

SEQ ID NO: 206203 - DNA, 120 bp, Artificial Sequence
  ENSG00000115109_58 (sequence is synthesized)
ttgtcttgtcattgagaggagtcagcagtcttgttctgtaaaggaccagagatggtaaatactgtcccactcagctctgctggcgcagtacagcagcagcagccccagcacagctgtgtt

SEQ ID NO: 206204 - DNA, 120 bp, Artificial Sequence
  ENSG00000115109_59 (sequence is synthesized)
cctgcggagtcccctttacaaagccgctgacccctgatgtgaaactttgtagagcagcagagtggctgcgtgaaacgggaggctggcaggtcctcagataggttctgcagtgttacctgt

SEQ ID NO: 206205 - DNA, 120 bp, Artificial Sequence
  ENSG00000115109_60 (sequence is synthesized)
cacttggaggcagccaacacttctggacattgcatccttattcacacatgtggcagctgaacgaggtgctgttgtgggtgtctcagctctgagggtctttgtgagctcccactgttgtgg

SEQ ID NO: 206206 - DNA, 120 bp, Artificial Sequence
  ENSG00000115109_61 (sequence is synthesized)
gtgtctcagctctgagggtctttgtgagctcccactgttgtgggtgtctcagctctgagggtctttgtgagttcccaccaacttttaattattcatgcccttgaccatgtggttgcttgg

SEQ ID NO: 206207 - DNA, 120 bp, Artificial Sequence
  ENSG00000115109_62 (sequence is synthesized)
agacctggggtcttctgcagactgaagaagacacatttctagattatttgtcctttttatcctctcaaaaatttaaacactgtacctcttcagtggtcagaagaaagttggaaacttttc

SEQ ID NO: 206208 - DNA, 120 bp, Artificial Sequence
  ENSG00000115109_63 (sequence is synthesized)
ctacatattaggcgttagtatgaggacatttgtttgaattatagaaatttgccctgagctgaactgggttgtgttaacacattggtagagctatgattccttcccagttctaagagatac

SEQ ID NO: 206209 - DNA, 120 bp, Artificial Sequence
  ENSG00000115109_64 (sequence is synthesized)
gatctgtaagtccctatgtcaccacattgcttgagatgatcattcagttacttgtcaggatttctcctcttcagagagatttttttttatagcacagattcctttgccccttttatctcc

SEQ ID NO: 206210 - DNA, 120 bp, Artificial Sequence
  ENSG00000115109_65 (sequence is synthesized)
ttatctggatatgataagtggttatgagggtctcactaactattttgtgtttaccttttatatgtgtaaaactttgcagtagcatttaaagtgtaatttatttttctatcaagtgcacta

SEQ ID NO: 206211 - DNA, 120 bp, Artificial Sequence
  ENSG00000115109_66 (sequence is synthesized)
ttcatttagtgtgttccagttttatatgacttgtattagaaacactgcactgagttgtttgtacactgaaatgagaactctagatgtaactctattcaaataaaccttcgtgagacattc

SEQ ID NO: 206212 - DNA, 120 bp, Artificial Sequence
  ENSG00000115109_67 (sequence is synthesized)
taagtaaatgttccattatacatcagtgatacctttttatcttcctttgaaataagatatttaaatcagcttctccaataatattttttgtactagttcaacttttaaatttaattcaga

SEQ ID NO: 206213 - DNA, 120 bp, Artificial Sequence
  ENSG00000115109_68 (sequence is synthesized)
agagttatgccctcttgcctttttgacttaaggtaacactgaaatatttaagataacataattgaggtcattaaacttgtgtgtcatttataagacattaaacatttaagagtcttcaaa

SEQ ID NO: 206214 - DNA, 120 bp, Artificial Sequence
  ENSG00000115109_69 (sequence is synthesized)
tggaaaagagatatctgattcagagaacagtgttttccaaggattgtgactgaagacttccttaatggtgtaataatgtacctcctcataaaaacaggtttgacagctgtagctcatttt

SEQ ID NO: 206215 - DNA, 120 bp, Artificial Sequence
  ENSG00000115109_70 (sequence is synthesized)
ttgttgttgaaggaagttttatttgttttgtttttaactacttttaataaagaattgagatccagtgtatgattaagatttgtaagaaattgcagattccttaataaagctcgcatctac

SEQ ID NO: 206216 - DNA, 120 bp, Artificial Sequence
  ENSG00000115109_71 (sequence is synthesized)
gaacctccatactgttctttaaagttgctgtactaatttacattcccaccagcagcgtaagagggttaccctttctatgggtcctcaccagcatctgttattgcctatcttttttattaa

SEQ ID NO: 206217 - DNA, 120 bp, Artificial Sequence
  ENSG00000115109_72 (sequence is synthesized)
aaaaccattttaactggagcgagatgatgtctcatcatagtttggatttacatttccctgatgattttgagcattttttcatataccttcccctacatgaatttgttgcacttctttcct

SEQ ID NO: 206218 - DNA, 120 bp, Artificial Sequence
  ENSG00000115112_0 (sequence is synthesized)
gggttcggagcgcgaagccgccgctgggtcctcggcgcgccccgcgtctgcgcttgctgccgcgccccggtcggcgcgctgggagttccagccatgctcttctggcacacgcagcccgag

SEQ ID NO: 206219 - DNA, 120 bp, Artificial Sequence
  ENSG00000115112_1 (sequence is synthesized)
cactacaaccagcacaactccggcagctacctgcgtgatgtgctcgctctgcccatcttcaagcaggaggaaccccagctgtcccccgagaacgaggcccgcctgccacccctgcaatat

SEQ ID NO: 206220 - DNA, 120 bp, Artificial Sequence
  ENSG00000115112_2 (sequence is synthesized)
gtgttgtgtgctgccacgtccccagccgtgaagctgcatgaagagacgctgacctacctcaaccaaggtcagtcttatgaaatccgactactggagaatcggaagctgggagactttcaa

SEQ ID NO: 206221 - DNA, 120 bp, Artificial Sequence
  ENSG00000115112_3 (sequence is synthesized)
gatctgaacacaaaatatgtcaagagcatcatccgtgtggtcttccatgaccgccggctgcagtatacggagcaccagcagctggagggctggcggtggagtcggccaggggaccggatc

SEQ ID NO: 206222 - DNA, 120 bp, Artificial Sequence
  ENSG00000115112_4 (sequence is synthesized)
ctggacatcgatattccactgtctgttggtatcttggaccccagggccagcccgacccagctgaatgcagtcgagtttttgtgggaccctgcgaagagagcttctgcattcattcaggta

SEQ ID NO: 206223 - DNA, 120 bp, Artificial Sequence
  ENSG00000115112_5 (sequence is synthesized)
cactgcatcagcacagaattcacccccaggaagcacgggggcgagaagggagtgccctttcgagtccagattgacacgtttaagcagaacgagaatggggagtacacggagcacctgcac

SEQ ID NO: 206224 - DNA, 120 bp, Artificial Sequence
  ENSG00000115112_6 (sequence is synthesized)
tcagccagctgccagatcaaggtgttcaagccgaagggagccgatcggaaacagaagactgaccgggagaagatggagaaaagaactgcccaagagaaggagaaataccagccgtcctat

SEQ ID NO: 206225 - DNA, 120 bp, Artificial Sequence
  ENSG00000115112_7 (sequence is synthesized)
gaaaccaccatcctcacagagtgctctccatggcccgacgtggcctaccaggtgaacagcgccccgtccccaagctacaatggttctccaaacagctttggcctcggcgaaggcaacgcc

SEQ ID NO: 206226 - DNA, 120 bp, Artificial Sequence
  ENSG00000115112_8 (sequence is synthesized)
tctccgacccacccggtggaggccctgcccgtgggcagtgaccacctgctcccatcagcttcgatccaggatgcccagcagtggcttcaccgcaacaggttctcgcagttctgccggctc

SEQ ID NO: 206227 - DNA, 120 bp, Artificial Sequence
  ENSG00000115112_9 (sequence is synthesized)
tttgccagcttctcaggtgctgacttgctgaagatgtcccgagatgatttggtccagatctgtggtcccgcagatgggatccggctcttcaacgccatcaaaggccggaatgtgaggcca

SEQ ID NO: 206228 - DNA, 120 bp, Artificial Sequence
  ENSG00000115112_10 (sequence is synthesized)
aagatgaccatttatgtctgtcaggagctggagcagaatcgagtgcccctgcagcagaagcgggacggcagtggagacagcaacctgtctgtgtaccacgccatcttcctggaagagctg

SEQ ID NO: 206229 - DNA, 120 bp, Artificial Sequence
  ENSG00000115112_11 (sequence is synthesized)
accaccttggagctgattgagaagatcgccaacctgtacagcatctccccccagcacatccaccgagtctaccggcagggccccacgggcatccatgtggtggtgagcaacgagatggtg

SEQ ID NO: 206230 - DNA, 120 bp, Artificial Sequence
  ENSG00000115112_12 (sequence is synthesized)
cagaacttccaagatgaatcctgttttgtcctcagcacaattaaagctgagagcaatgatggctaccacatcatcctgaaatgtggactctgagcagcagtggacctcatacctgtctcc

SEQ ID NO: 206231 - DNA, 120 bp, Artificial Sequence
  ENSG00000115112_13 (sequence is synthesized)
agctcccagccctgtggatccccgtggatgtagacattgccccactgtaagctgtggcctcaccaggcaagctgaggccaggagggaccctgcccagtctgtgaaagctacagagcacca

SEQ ID NO: 206232 - DNA, 120 bp, Artificial Sequence
  ENSG00000115112_14 (sequence is synthesized)
accagcagaagcctgtggacaccaagtacggtgtacagaaagccagtggctcctttctcccttcctcttggcctccagattttgaatggttccttgttcttttctattggtccaaccctg

SEQ ID NO: 206233 - DNA, 120 bp, Artificial Sequence
  ENSG00000115112_15 (sequence is synthesized)
acgttctaaaagggcaaacagtggagacgtctgctctgaaatccctcatcccttagttggaagctgattgggtatcttggtgctgcctgtattggtcccttctgaccactctcctgcctc

SEQ ID NO: 206234 - DNA, 120 bp, Artificial Sequence
  ENSG00000115112_16 (sequence is synthesized)
cagagaaagctctgcttcaccctggaagctggtacctttacctcctcctctgggagttggctgcatggccagcactgccgacttgatgggagcagtttgccctcattctcctgtttcagg

SEQ ID NO: 206235 - DNA, 120 bp, Artificial Sequence
  ENSG00000115112_17 (sequence is synthesized)
tttgcttcccttctcagtgaccctggtgagcatccgcctttcctgttcttggatgaattgatgggagtggggctattctgtgccttctacctctttcttctctacgttgtttctaaggat

SEQ ID NO: 206236 - DNA, 120 bp, Artificial Sequence
  ENSG00000115112_18 (sequence is synthesized)
ctgctgctgcggaacccaaagatgtgctcctgtctctgcactggcgcattggcatggtagatgccacaatgtatgtgcacggcctttctcagagacattagttctgaggccctttgtggg

SEQ ID NO: 206237 - DNA, 120 bp, Artificial Sequence
  ENSG00000115112_19 (sequence is synthesized)
gaggttagggggatggtaatagaaaaagactattttatttcctggcaatcacgggtaaggaggattaggaatgagtattccattcctaggtgtcatcagatgaccttgaccaccacaata

SEQ ID NO: 206238 - DNA, 120 bp, Artificial Sequence
  ENSG00000115112_20 (sequence is synthesized)
ccaggccctcttggatggacttatagaaagttagagaagaccttgttgaaccgctgctaaacttgccacaggagcgatgtgttttctctgagtgcccctcacttacatgtttatctttgt

SEQ ID NO: 206239 - DNA, 120 bp, Artificial Sequence
  ENSG00000115112_21 (sequence is synthesized)
ttgtagaggctatgtttaggatattttgcctgcatcagaatgggtgcatcatctttcttaatggcctaactatcgggaaatttgagtgtcagtaactgtggtagactcagaaattcgtct

SEQ ID NO: 206240 - DNA, 120 bp, Artificial Sequence
  ENSG00000115112_22 (sequence is synthesized)
ttgtcttgcctctggttcctgggatccagtgatctctactggcccagggcttcagctcttggttaatttaggttcatggggaaccctctgaccacctgaatgggatgtcatagcttctaa

SEQ ID NO: 206241 - DNA, 120 bp, Artificial Sequence
  ENSG00000115112_23 (sequence is synthesized)
atggagcttctgtggaatgaagtgctagactgaaggactaccagaataaaacagggtctacaatggggagaacttgttttatagatgaggaaaccaaggctcagaggggcaaagtcacct

SEQ ID NO: 206242 - DNA, 120 bp, Artificial Sequence
  ENSG00000115112_24 (sequence is synthesized)
gcatggtagcacatagtgatagggtagcgatataaatttatcatataaaccaggacatctcggaataaaaggggctctgttagtcattatgttgggtaatagccgtggcattcctacaga

SEQ ID NO: 206243 - DNA, 120 bp, Artificial Sequence
  ENSG00000115112_25 (sequence is synthesized)
acagagtgaggacaggctcctgattcctcttccttctttagaggagaagcggggagtgggttaactaacagctttattgagatgtcattcacatgccattcagtttacccattgctagtg

SEQ ID NO: 206244 - DNA, 120 bp, Artificial Sequence
  ENSG00000115112_26 (sequence is synthesized)
tccaattgtattcacagaaccaccatcaattcacagaattacagtcaacgttggtacattttcatcacccccagtaaaaccccgtacccttggtctgtcactcctgctttcctaactcct

SEQ ID NO: 206245 - DNA, 120 bp, Artificial Sequence
  ENSG00000115112_27 (sequence is synthesized)
gcagtccaaggcagccatgaatctactttctatgtaagattaacctactctggacatttcatatatctggaatcatgtgatatctcttttgtgactggcttcttccactgaatgttttct

SEQ ID NO: 206246 - DNA, 120 bp, Artificial Sequence
  ENSG00000115112_28 (sequence is synthesized)
agggccgtccaagttgaggatgtatcagtacttcattcttttgtattgctgaataatacttcattgtatagatagaccacatttgtttattgattcatcagttgatggacatttgtgtgt

SEQ ID NO: 206247 - DNA, 120 bp, Artificial Sequence
  ENSG00000115112_29 (sequence is synthesized)
ttttactttttggctactctgaatgatgctgctatgaacatatttctacaagattttgtgtggacatatgttttcatttcttttagcaatatacataggagtggaattgctaggtcttac

SEQ ID NO: 206248 - DNA, 120 bp, Artificial Sequence
  ENSG00000115112_30 (sequence is synthesized)
agtaactccgtgttttaactttttgagaaactgccagactgttttctatagcagctgtaccattttacattcccaccagcaatgtatccaggtttcaatttgtctacatcctcatcaaca

SEQ ID NO: 206249 - DNA, 120 bp, Artificial Sequence
  ENSG00000115112_31 (sequence is synthesized)
cttgctattatctgtctttttgcttttagcatcctaatgagtatgaaatgctatcttgtggttttgatttgcattcccctgatggcaactgatgctgagtgtcttttcctgtgcttacgg

SEQ ID NO: 206250 - DNA, 120 bp, Artificial Sequence
  ENSG00000115112_32 (sequence is synthesized)
gccatgcgtatttctttggagaaaggtctatccaggtcctttgcctatttttaattgagttgtctttttttttttaagttttctgttttcctaaccactagactaccagggatgagcctt

SEQ ID NO: 206251 - DNA, 120 bp, Artificial Sequence
  ENSG00000115112_33 (sequence is synthesized)
ctttttattattgagttgggtgagctatttgtatattctagacgccagtcttttatcaggtatatgactggtaaaaatgttctccccttctgtggattgttttcagtttcttgttggtgt

SEQ ID NO: 206252 - DNA, 120 bp, Artificial Sequence
  ENSG00000115112_34 (sequence is synthesized)
cctttgagacacaaaactttttaactttgatgatttccaagatacgtattttttttctattgtcacttgtgcttttggtgccatatctagaaaaccattgcctaatccaaggtcaagaag

SEQ ID NO: 206253 - DNA, 120 bp, Artificial Sequence
  ENSG00000115112_35 (sequence is synthesized)
attaatgcctgtgttttcttctaagaactatacttttagttctcacaatggtctttgatccatttcgagtatatttttatatatgatgtgatgtaggggtccagcttcattcttttgctt

SEQ ID NO: 206254 - DNA, 120 bp, Artificial Sequence
  ENSG00000115112_36 (sequence is synthesized)
gtggatctccacttgtcccactgctgattattgagaaaaatatcctttctccacggaattgtcttggcatccttgctaaaggcctctgcttcttactggatcttctttcctgggacatgg

SEQ ID NO: 206255 - DNA, 120 bp, Artificial Sequence
  ENSG00000115112_37 (sequence is synthesized)
tgtcgttgggaagcttaccttttttttttttttacttagtctgtgtttggttccaccagttttatgctgcctttctactctgttcttgctgtctccctctttacctgagtcaacggtact

SEQ ID NO: 206256 - DNA, 120 bp, Artificial Sequence
  ENSG00000115112_38 (sequence is synthesized)
ctagctccacacactagtccttggaggaaggttgagaccaatgatttcctgttatgagtcatgaggaaactgaatcacctagaagtggaataatgtgctcagggtcaccatagcccatta

SEQ ID NO: 206257 - DNA, 120 bp, Artificial Sequence
  ENSG00000115112_39 (sequence is synthesized)
gtggaaggaccaggactagacctttagtcttctgaggtccagccccttaggctgtctgtcatcactgtacccaagtgatgtcactaccaaggccaaatgatggtgggctaaattttaatt

SEQ ID NO: 206258 - DNA, 120 bp, Artificial Sequence
  ENSG00000115112_40 (sequence is synthesized)
ctcaaaagtgtaggaggctaatattgtcttctaagttccaaaagaagatgtaataaaagtctgttaccttaagtgtgctattagtagagtcttccatttttctggcatgcccctggcatc

SEQ ID NO: 206259 - DNA, 120 bp, Artificial Sequence
  ENSG00000115112_41 (sequence is synthesized)
tgctcttcttaccttctcgtggttgtagttaaagcttatagcttatgaaagaatagaaaataataaataccaaaaaaaagtacacatggtaatttggtaccaaaatatctcagctgccta

SEQ ID NO: 206260 - DNA, 120 bp, Artificial Sequence
  ENSG00000115112_42 (sequence is synthesized)
atttagcagctcatcccttccacaggggtcagatgagctaaagctccaggttttatttttcatttgattgacatacagaaaagccatagcccttcccacagctgtccagggtctttcctg

SEQ ID NO: 206261 - DNA, 120 bp, Artificial Sequence
  ENSG00000115112_43 (sequence is synthesized)
tgagtccggaggtgctggcctattgagcaggacagctcttcccagggcattcccaccaacctgtggcttctgaactgtagcttctttttacagtgaaccccagagggaaataagacagac

SEQ ID NO: 206262 - DNA, 120 bp, Artificial Sequence
  ENSG00000115112_44 (sequence is synthesized)
acatgtgctcaggccaccatcttgaactggaagcccaaagctgagttccttactcttaggtcgtcacggtttttgcggggtatctgcaaggttgagataaaccctttcctgtttaccagg

SEQ ID NO: 206263 - DNA, 120 bp, Artificial Sequence
  ENSG00000115112_45 (sequence is synthesized)
ttgtcctttctggatgaagggacagaggctgttgaatggaggaataataggtttgctggaggaggggcatggtatgcctgtggaaaggacaggatggggtggggaggtcgaggctttgac

SEQ ID NO: 206264 - DNA, 120 bp, Artificial Sequence
  ENSG00000115112_46 (sequence is synthesized)
ttggggtcctaaacaaaggtcaggtgttgccctagtgacctcttgcccagacagcccagagccccttacacagagctattaacctagggaaggctttaccagcagtggactggagccagc

SEQ ID NO: 206265 - DNA, 120 bp, Artificial Sequence
  ENSG00000115112_47 (sequence is synthesized)
cagggtcacaagtttccaagtccagcattgcttcaggggctggcctgagtaactgaagatctgaaaatcattaacaagtcgatgaaataaacggaaaagcctcttaggctgttgtcagtg

SEQ ID NO: 206266 - DNA, 120 bp, Artificial Sequence
  ENSG00000115112_48 (sequence is synthesized)
gagcagagggagaaagtccctaggcgctcagagggggtgagaaagcagtggatgattgggcgggggtgggggattagatgttgacactgcctggggtgtaggaagaggaacagagaaccc

SEQ ID NO: 206267 - DNA, 120 bp, Artificial Sequence
  ENSG00000115112_49 (sequence is synthesized)
agagtcagggtcctagatcccagaccctcgctcagtatgagtctctttgcctctctgggtctctatctcctcctcttacaaatacaggcttggtgatctctgaagatggcaccaacctgc

SEQ ID NO: 206268 - DNA, 120 bp, Artificial Sequence
  ENSG00000115112_50 (sequence is synthesized)
gcaccaacctgccatgaaatgaatctgaggggttttcccatttttccctccatcaaaatcgtacaaaaagctggacgtggtggcccatgcctctaatcctagcattttgggaggccgagg

SEQ ID NO: 206269 - DNA, 120 bp, Artificial Sequence
  ENSG00000115112_51 (sequence is synthesized)
ttgacgccaagagttcgagaccagcctgggcatcgtagtgagactccatctctgtctttttgaaaataaaaaatctttgaaaattgcacaacaggcaggagacctttacgtgtgcccatc

SEQ ID NO: 206270 - DNA, 120 bp, Artificial Sequence
  ENSG00000115112_52 (sequence is synthesized)
ctggttgtacacagtgccaccagtgctcctgcagtgcaaggcggcatgcttcttgacatgggtcagattgtgtccatcgtgtctttgggaatcagccctagctcctaactgggctgacta

SEQ ID NO: 206271 - DNA, 120 bp, Artificial Sequence
  ENSG00000115112_53 (sequence is synthesized)
cttcctccgcaaacttatgggggctcccagatattccttgccagccaggggccagacacagtgcaggcacagtctgtgtcattggtgcacatgtgcgtgtttacatgtgtacctgggttc

SEQ ID NO: 206272 - DNA, 120 bp, Artificial Sequence
  ENSG00000115112_54 (sequence is synthesized)
cttcccttgcccatgaatttgccatgagcacagccagaagcagcctcagcttggcaaggtgtggagatgactgctgttcccttcgcatttggggaaaacaggctccctcggtagctcgat

SEQ ID NO: 206273 - DNA, 120 bp, Artificial Sequence
  ENSG00000115112_55 (sequence is synthesized)
gatcctcttttgatcttgtgtgacctcctggagagtggatgaagctggtggccttagcttttctagacagtgtaagtggcactgggcaaggcccccagagcagggcaaggtctctagagc

SEQ ID NO: 206274 - DNA, 120 bp, Artificial Sequence
  ENSG00000115112_56 (sequence is synthesized)
gggtctcccacatgactggcttcacacaggcacttccgctcgggttgcatgctctgtgtcatcttaccggtccagggttgcaggtaggaaatgtttgtaccctcttctgattgccacctc

SEQ ID NO: 206275 - DNA, 120 bp, Artificial Sequence
  ENSG00000115112_57 (sequence is synthesized)
cttcccatcgccccttagggacagggcttgagggccagtgaggcgctggtcaggcaccccaggcctccttgggacctgcccaggggcaccctgagagctcctgaaacccccacttagctt

SEQ ID NO: 206276 - DNA, 120 bp, Artificial Sequence
  ENSG00000115112_58 (sequence is synthesized)
ccagacctttctgcaaaagctcctcctggctttcctccctcccccaatctatgggtcacagctaacagatctgagggcaactgctgtgctagtggccagggctgcacctgccatccccgg

SEQ ID NO: 206277 - DNA, 120 bp, Artificial Sequence
  ENSG00000115112_59 (sequence is synthesized)
ctctgccactttagggccttctagaggcagtgtccttaggaagtagctctgaggcatgggttttctgctcctgtgcagggcagctgatgggataaggtggggaaggacggtcagtgcttg

SEQ ID NO: 206278 - DNA, 120 bp, Artificial Sequence
  ENSG00000115112_60 (sequence is synthesized)
ggccccagctggccagcctggcgatggggaaaccaaaccatgtcccccagcgaagggccagagtgggaacctgtcctcatgcccttcgtcctgaggagccctgaggtgggcagcaggggc

SEQ ID NO: 206279 - DNA, 120 bp, Artificial Sequence
  ENSG00000115112_61 (sequence is synthesized)
caggggaagttttcaggccttcatcaaagagaacaacatcctcagctccgcacccctcatcctgtatcagcacttaccggtgtgtgactgcccttgtcagctagcatacggtgggcccac

SEQ ID NO: 206280 - DNA, 120 bp, Artificial Sequence
  ENSG00000115112_62 (sequence is synthesized)
ctggcccactggctgtttatgccactgatttatgatagggaatattatctttgaacccaatgaagtgttttctcccccatcacaaaaaaaaaaattcttatttttagtagacatgtattt

SEQ ID NO: 206281 - DNA, 120 bp, Artificial Sequence
  ENSG00000115112_63 (sequence is synthesized)
accaaaaatatgtactcaattattgtattttggattttatcaatttaaaaattgtggaaatttgtttgctcttacgccaacataatattgattttgcctcttggctctgaaagcccaaaa

SEQ ID NO: 206282 - DNA, 120 bp, Artificial Sequence
  ENSG00000115112_64 (sequence is synthesized)
tatttaccgtctagcccgttacagaaaaagtctgctgactactgagccagacctccattacctccatccctgttggattatttaaagaaagcctcagacagtaagggcttttttaaaaga

SEQ ID NO: 206283 - DNA, 120 bp, Artificial Sequence
  ENSG00000115112_65 (sequence is synthesized)
ataaaatgacttggtttgcgcttggaagcaggggaagcattcagatgagcggtttctgcattaaccctgcctatcacgcatctcgtgtcctgtgtggctggcgagccccccttggaaggt

SEQ ID NO: 206284 - DNA, 120 bp, Artificial Sequence
  ENSG00000115112_66 (sequence is synthesized)
tctggtgcttcagctggctcctgcagagtccaccccgcctcgtggtgggaatgcagagccctttgctttccttcttgccgcctgcttcctgttcctggggacccgctgggcctttggtct

SEQ ID NO: 206285 - DNA, 120 bp, Artificial Sequence
  ENSG00000115112_67 (sequence is synthesized)
gcatcccctggccaggtccctcagggttgatgcgtggagaaggactttgagcagtggtgggcagcagtggcctcctggccagctcacactcttgtcctgggaggggcagcctgatctcac

SEQ ID NO: 206286 - DNA, 120 bp, Artificial Sequence
  ENSG00000115112_68 (sequence is synthesized)
ctccacctagtaccttggggactgaggaccttttggcttctctggagcctgcaagcctcttcccatgtgtccagctgctcttcctgctacaaaggggactgctcacagtggcctcagctt

SEQ ID NO: 206287 - DNA, 120 bp, Artificial Sequence
  ENSG00000115112_69 (sequence is synthesized)
ggtggttttgaggggccgccccccggccctccataagggtatcctgggcctgagaattctgcatctgccattggaggatggacagcctcaaatggaaggagtcccacgggagatgggtcc

SEQ ID NO: 206288 - DNA, 120 bp, Artificial Sequence
  ENSG00000115112_70 (sequence is synthesized)
gaggtccggctgtggccatccagccccctgtggcttgtccagcctctgtgcacccctggtgtcttcactccaggggcagacagcagccactgcagttcctttcttcgtgagtaacagtag

SEQ ID NO: 206289 - DNA, 120 bp, Artificial Sequence
  ENSG00000115112_71 (sequence is synthesized)
tgatagcagctggggctaacaggctaggctttgtgttctgcgcatttggtcagcttctcactcgatcctccctaaagcaatggggaggcccccactagcccagttttcaggaagtcaact

SEQ ID NO: 206290 - DNA, 120 bp, Artificial Sequence
  ENSG00000115112_72 (sequence is synthesized)
gggaggttagatgggggccagggtcccacagctactgatggcccgagccaggttgagcttcctggtgtccagtccggatcccacttgcagatctcatgctctcagataggtgggacaagt

SEQ ID NO: 206291 - DNA, 120 bp, Artificial Sequence
  ENSG00000115112_73 (sequence is synthesized)
tcttttgtcacagtgctggctctgtcctgaggcctcattgctggctgggtgtgctctgctgggaaaagctttgcggggcttgcttggttaaccacagaagagaaggggactgtttggggt

SEQ ID NO: 206292 - DNA, 120 bp, Artificial Sequence
  ENSG00000115112_74 (sequence is synthesized)
gcctctctgcagcctccccgtgctgggtggaagcacggttactgtgttctctaatgttcatgtatttaaaatgatttctttctaaagatgtaacctccacacctttctccagattgggtg

SEQ ID NO: 206293 - DNA, 120 bp, Artificial Sequence
  ENSG00000115112_75 (sequence is synthesized)
actcttttctaaaggtggtgggagtatctgtcggggtggtgtggcccttggatgggtcaggtgggtgtgagaggtcctggggaggtgggcgttgagctcaaagttgtcctactgccatgt

SEQ ID NO: 206294 - DNA, 120 bp, Artificial Sequence
  ENSG00000115112_76 (sequence is synthesized)
ttttgtacctgaaataaagcatattttgcacttgttactgtaccatagtgcggacgagaagtctgtatgtgggatctgtgcttgggttagaatgcaaataaaactcacatttgtaagaaa

SEQ ID NO: 206295 - DNA, 120 bp, Artificial Sequence
  ENSG00000115128_0 (sequence is synthesized)
gttgatgtcctgcatctaacgcggtgtaacccccgaagccgagcgagctccggaggaatttcagtatctgctacggtaacttcatcagcccgccaagatggcgatgcaagcggccaagag

SEQ ID NO: 206296 - DNA, 120 bp, Artificial Sequence
  ENSG00000115128_1 (sequence is synthesized)
ggcgaacattcgacttccacctgaagtaaatcggatattgtatataagaaatttgccatacaaaatcacagctgaagaaatgtatgatatatttgggaaatatggacctattcgtcaaat

SEQ ID NO: 206297 - DNA, 120 bp, Artificial Sequence
  ENSG00000115128_2 (sequence is synthesized)
ggacatctttgatgccaagaatgcatgtgatcacctatcgggattcaatgtttgtaacagataccttgtggttttgtactataatgccaacagggcatttcagaagatggacacaaagaa

SEQ ID NO: 206298 - DNA, 120 bp, Artificial Sequence
  ENSG00000115128_3 (sequence is synthesized)
gaaggaggaacagttgaagcttctcaaggagaaatatggcatcaacacagatccaccaaaataaatgttttctacattttcatttggactaaatcccacgaatgacaactaccacctttt

SEQ ID NO: 206299 - DNA, 120 bp, Artificial Sequence
  ENSG00000115128_4 (sequence is synthesized)
tttcctttttaattaatactaaatattgtgatttcttatttgaggttcaaaatgacctgcttgaaactttgatacatattggaatacattatgttaataaacttgtagctttttgtgaaa

SEQ ID NO: 206300 - DNA, 120 bp, Artificial Sequence
  ENSG00000115128_5 (sequence is synthesized)
atgaggccaccctgtgctgtgtgcagtgcgacaacccttaccaagagccttgagactagcagattgagatcagagagatgagatctttttgaaggggggagaaaacctactgagacccta

SEQ ID NO: 206301 - DNA, 120 bp, Artificial Sequence
  ENSG00000115128_6 (sequence is synthesized)
atgatccagctcaatgagagccaagaagaggatttgagtttcctcaaagcattcattgaagtagtaatgaatgctttgaggaaactggttgagaagggaaagaactaacatttattgcat

SEQ ID NO: 206302 - DNA, 120 bp, Artificial Sequence
  ENSG00000115128_7 (sequence is synthesized)
acctgttatttgtaaagctagcttgttacactgtgttttttgtatgcagcagctctataattttctcaacaatcatcactgtctctttaaataaccccagaatttctgaataaactaagt

SEQ ID NO: 206303 - DNA, 120 bp, Artificial Sequence
  ENSG00000115129_0 (sequence is synthesized)
agaggcagtcctggggctctggggctcgggctttgtcaccgggacccgcaggagccagaaccactcggcgccgcctggtgcatgggaggggagccgggccaggagtaagtaactcatacg

SEQ ID NO: 206304 - DNA, 120 bp, Artificial Sequence
  ENSG00000115129_1 (sequence is synthesized)
ggcgccggggacccgggtcgggctgggggcttccaactcagagggagtgtgatttgcctgatcctcttcggcgttgtcctgctctgccgcatccagccctgtaccgccatcccacttccc

SEQ ID NO: 206305 - DNA, 120 bp, Artificial Sequence
  ENSG00000115129_2 (sequence is synthesized)
gccgttcccatctgtgttccgggtgggatcggtctggaggcggccgaggacttcccaggcaggagctcggggcggaggccgggtccgcggcagaccagggcagcgaggcgctggccggca

SEQ ID NO: 206306 - DNA, 120 bp, Artificial Sequence
  ENSG00000115129_3 (sequence is synthesized)
gggggcgctgcggtgccagcctgaggctgggctgctccgcgaggatacagcggcccctgccctgtcctgtcctgccctgccctgtcctgtcctgccctgccctgccctgtcctgtcctgc

SEQ ID NO: 206307 - DNA, 120 bp, Artificial Sequence
  ENSG00000115129_4 (sequence is synthesized)
cctgccctgccctgtgtcctcagacaatatgttagccgtgcactttgacaagccgggaggaccggaaaacctctacgtgaaggaggtggccaagccgagcccgggggagggtgaagtcct

SEQ ID NO: 206308 - DNA, 120 bp, Artificial Sequence
  ENSG00000115129_5 (sequence is synthesized)
cctgaaggtggcggccagcgccctgaaccgggcggacttaatgcagagacaaggccagtatgacccacctccaggagccagcaacattttgggacttgaggcatctggacatgtggcaga

SEQ ID NO: 206309 - DNA, 120 bp, Artificial Sequence
  ENSG00000115129_6 (sequence is synthesized)
cgaagggctcctcatgcctatcccagagggattgaccctgacccaggctgcagccatcccagaggcctggctcaccgccttccagctgttacatcttgtgggaaatgttcaggctggaga

SEQ ID NO: 206310 - DNA, 120 bp, Artificial Sequence
  ENSG00000115129_7 (sequence is synthesized)
ctatgtgctaatccatgcaggactgagtggtgtgggcacagctgctatccaactcacccggatggctggagctattcctctggtcacagctggctcccagaagaagcttcaaatggcaga

SEQ ID NO: 206311 - DNA, 120 bp, Artificial Sequence
  ENSG00000115129_8 (sequence is synthesized)
aaagcttggagcagctgctggattcaattacaaaaaagaggatttctctgaagcaacgctgaaattcaccaaaggtgctggagttaatcttattctagactgcataggcggatcctactg

SEQ ID NO: 206312 - DNA, 120 bp, Artificial Sequence
  ENSG00000115129_9 (sequence is synthesized)
ggagaagaacgtcaactgcctggctcttgatggtcgatgggttctctatggtctgatgggaggaggtgacatcaatgggcccctgttttcaaagctactttttaagcgaggaagtctgat

SEQ ID NO: 206313 - DNA, 120 bp, Artificial Sequence
  ENSG00000115129_10 (sequence is synthesized)
caccagtttgctgaggtctagggacaataagtacaagcaaatgctggtgaatgctttcacggagcaaattctgcctcacttctccacggagggcccccaacgtctgctgccggttctgga

SEQ ID NO: 206314 - DNA, 120 bp, Artificial Sequence
  ENSG00000115129_11 (sequence is synthesized)
cagaatctacccagtgaccgaaatccaggaggcccataagtacatggaggccaacaagaacataggcaagatcgtcctggaactgccccagtgaaggaggatggggcaggacaggacgcg

SEQ ID NO: 206315 - DNA, 120 bp, Artificial Sequence
  ENSG00000115129_12 (sequence is synthesized)
gccaccccaggcctttccagagcaaacctggagaagattcacaatagacaggccaagaaacccggtgcttcctccagagccgtttaaagctgatatgaggaaataaagagtgaactggaa

SEQ ID NO: 206316 - DNA, 120 bp, Artificial Sequence
  ENSG00000115129_13 (sequence is synthesized)
aacggctcctttctcttctcttagcagcacccagcttgcccacccatgctcaagatgggcgggatgccagcctgttacataaatgtgccaaaagcctggccatgcctggaaaatggacca

SEQ ID NO: 206317 - DNA, 120 bp, Artificial Sequence
  ENSG00000115129_14 (sequence is synthesized)
atccgcccgccaagaggttgggtctcgttccctagagagaaggaagtttcctctccttgaagtgagagctagaatcgcactttctgtcaagctgagagaaagactcttttccagaggcta

SEQ ID NO: 206318 - DNA, 120 bp, Artificial Sequence
  ENSG00000115129_15 (sequence is synthesized)
aaaggacaagaaaatctgatttgcttgcttctaactttgcgttttaaagggggaaggaggaaaggaaagagggggagggtggttctgcttagccccacccctccggctaccccaggtcca

SEQ ID NO: 206319 - DNA, 120 bp, Artificial Sequence
  ENSG00000115129_16 (sequence is synthesized)
gccgtccattccggtggaggcagaggcagtcctggggctctggggctcgggctttgtcaccgggacccgcaggagccagaaccactcggcgccgcctggtgcatgggaggggagccgggc

SEQ ID NO: 206320 - DNA, 120 bp, Artificial Sequence
  ENSG00000115129_17 (sequence is synthesized)
ttgtgttaaagaaataattattcaatgatacttgttaaagcacattaaggaagactttatttagcaccatcgctacaggtttagggaccactgcaatgagttcttgcagtggaggagaca

SEQ ID NO: 206321 - DNA, 120 bp, Artificial Sequence
  ENSG00000115129_18 (sequence is synthesized)
gaaaattggtccagccgtccattccggtggaggcagaggcagtcctggggctctggggctcgggctttgtcaccgggacccgcaggagccagaaccactcggcgccgcctggtgcatggg

SEQ ID NO: 206322 - DNA, 120 bp, Artificial Sequence
  ENSG00000115137_0 (sequence is synthesized)
agcggtgcacaagaagagaccgaggcgggtggccccgagagagccagggccatggaggccaacatgccgaagcggaaggagcccggcaggtctctccgcatcaaagtcatctccatgggc

SEQ ID NO: 206323 - DNA, 120 bp, Artificial Sequence
  ENSG00000115137_1 (sequence is synthesized)
aacgccgaagtggggaaaagctgtattataaagcgatactgtgagaaaagattcgtgtctaaatacctggcaacaattggaattgactatggagtcacaaaggtacacgtcagagacaga

SEQ ID NO: 206324 - DNA, 120 bp, Artificial Sequence
  ENSG00000115137_2 (sequence is synthesized)
gaaatcaaagttaacatctttgatatggctggacatcccttcttctatgaggttcgaaatgagttttacaaggacacacagggtgtgatactggtctatgatgttgggcagaaagactcc

SEQ ID NO: 206325 - DNA, 120 bp, Artificial Sequence
  ENSG00000115137_3 (sequence is synthesized)
tttgacgcccttgatgcgtggctggcagaaatgaagcaagagcttggacctcatggaaacatggaaaatattatatttgtagtttgtgccaacaagattgattgtaccaaacatcgctgt

SEQ ID NO: 206326 - DNA, 120 bp, Artificial Sequence
  ENSG00000115137_4 (sequence is synthesized)
gtagatgaaagtgaaggacgtctttgggctgaaagcaaagggttcctgtactttgaaacttcagcacaaactggagaaggcattaatgagatgttccagaccttttatatatccatagtt

SEQ ID NO: 206327 - DNA, 120 bp, Artificial Sequence
  ENSG00000115137_5 (sequence is synthesized)
gatttatgtgaaaatggcgggaaacgccctaccaccaatagcagtgctagtttcaccaaagaacaagcagatgccattcgcagaattcgaaatagtaaagacagttgggacatgctggga

SEQ ID NO: 206328 - DNA, 120 bp, Artificial Sequence
  ENSG00000115137_6 (sequence is synthesized)
gtcaaacctggggcctcaagggatgaagtcaataaagcgtatcggaaacttgctgtgcttcttcaccctgacaaatgtgtagcacctggcagtgaagatgccttcaaagcagttgtgaat

SEQ ID NO: 206329 - DNA, 120 bp, Artificial Sequence
  ENSG00000115137_7 (sequence is synthesized)
gctcggacagccctcctgaaaaacatcaagtagaaagtacagaaaaaagccacatgtgggactcaaatgcaaacagactttccctagaggtgaaataaccaacgtggagttttccttccc

SEQ ID NO: 206330 - DNA, 120 bp, Artificial Sequence
  ENSG00000115137_8 (sequence is synthesized)
agaatctcactgctcttttcattcatgtgttgtcatttgtatatcagtaattcaggtacccatttcatagacattttactgagaaatgacctgcatttgtatgaagtgaactgagcgtca

SEQ ID NO: 206331 - DNA, 120 bp, Artificial Sequence
  ENSG00000115137_9 (sequence is synthesized)
caccctgtacttcatttcatatttctagataattctgaatttttttctcattcgtcagctctgtaattatagtatcacttagacatttcacttggggaaatccacaaggttcctggagga

SEQ ID NO: 206332 - DNA, 120 bp, Artificial Sequence
  ENSG00000115137_10 (sequence is synthesized)
gggaagagaggacaagaggaccctttcactttttcttttttacggaattcatcatcagagaagaaaataacaaaaatggaagcaaacaacatcagaacccctgtaagtttggtgtgacct

SEQ ID NO: 206333 - DNA, 120 bp, Artificial Sequence
  ENSG00000115137_11 (sequence is synthesized)
tacagacaagttgctgcttttacaatgagttccttaggtggtattttaacccatcgatctataatgatgactcttggcagccctttgggagtttgtaaaatgaggtgatacagttctgaa

SEQ ID NO: 206334 - DNA, 120 bp, Artificial Sequence
  ENSG00000115137_12 (sequence is synthesized)
ttgagcattcctttatgatattcactctgttcctcttctgcagccaccagtgggagagacaagccagtcctaagagaaaaggtggtggcagccacaaattctaggtacactggctgctgc

SEQ ID NO: 206335 - DNA, 120 bp, Artificial Sequence
  ENSG00000115137_13 (sequence is synthesized)
ctatcctgtccctggatctgaggcctttcccttgccatagaaatggttgctggtagcagtagagagcactgtgcacctgggaatgaggaatcaggccccaagacagaagtacttggagga

SEQ ID NO: 206336 - DNA, 120 bp, Artificial Sequence
  ENSG00000115137_14 (sequence is synthesized)
ctcaggaggctgagacaggaggattgcttaagcccaggagctcaagtcccacctgggcaacatagtaagatcttgtctcttaaagaaaaaaaaaaaaggtacttagaggtcgcacttaaa

SEQ ID NO: 206337 - DNA, 120 bp, Artificial Sequence
  ENSG00000115137_15 (sequence is synthesized)
gaaaaaaaaaaaaggtacttagaggtcgcacttaaagattatgcacatcagcagaggaaaggccagccaagcttggggcaagcttgatgcagtaggagagactccttatgaggcttagcc

SEQ ID NO: 206338 - DNA, 120 bp, Artificial Sequence
  ENSG00000115137_16 (sequence is synthesized)
cttgtcttactgccagcctttgccacaggcaggtgagaaaggcagggccactcctcagcaaagttggcctcttctacacttcctcaccagtgttgtttcttccttttttcccctcttccc

SEQ ID NO: 206339 - DNA, 120 bp, Artificial Sequence
  ENSG00000115137_17 (sequence is synthesized)
cttcccgtcttgtgttttttctgaaccccacatctgccatcatttctctcctctagagtccctggcttctggccactgcctcctccctcttctaagccttggcctgaatctggttgatca

SEQ ID NO: 206340 - DNA, 120 bp, Artificial Sequence
  ENSG00000115137_18 (sequence is synthesized)
gaggcaagtgtggatcctttgggtggcagtcaggggagatctcagggcctctgttgggaggaatctctgtaattcctgcttgggctccaaatttctgaagagtaatatttttaaactata

SEQ ID NO: 206341 - DNA, 120 bp, Artificial Sequence
  ENSG00000115137_19 (sequence is synthesized)
gcttacaaaatacattctctgaccacagtctcctccttgatatacaagggatggatgaagttcatgtattaggactggcactccttacggtgcttatagaactagtctcaccacttgact

SEQ ID NO: 206342 - DNA, 120 bp, Artificial Sequence
  ENSG00000115137_20 (sequence is synthesized)
cacactaattcacatttttatatactttcaattagctgtactaattggggcttgaaagtatataaaatcttcctgtcctgtgaattttaaaaagctatcccatatcgattgccaaagagc

SEQ ID NO: 206343 - DNA, 120 bp, Artificial Sequence
  ENSG00000115137_21 (sequence is synthesized)
atctaccttacctcctaagaagaaaagccactttcttccaatccaagcccactgcagccttgtggattttccacacagcagcttttcactgtatgcctgtacttgggctgcactgagctt

SEQ ID NO: 206344 - DNA, 120 bp, Artificial Sequence
  ENSG00000115137_22 (sequence is synthesized)
gtcttcaggaaaccagagcgttgctttatcatcgcacttttcatcttggtaatatcaaaacaactttttaaatgaactgattgatatatgttatttcttgcgaggttttcctctggcctt

SEQ ID NO: 206345 - DNA, 120 bp, Artificial Sequence
  ENSG00000115137_23 (sequence is synthesized)
taactggcttctgaggctacagaactccaacccagagttcttcgggacctaaattttgcttaaggaaggcctttatcatgctgaaagcactcagacatgtctgtcctcacagcagaatgt

SEQ ID NO: 206346 - DNA, 120 bp, Artificial Sequence
  ENSG00000115137_24 (sequence is synthesized)
agaagtcatatgaatgagggatcgtgcacggtagcgtcagcccgaattgacacgacaactctgaatgtgtggccctctatgaaagctggtgccagttttcatcactgttattaaatacta

SEQ ID NO: 206347 - DNA, 120 bp, Artificial Sequence
  ENSG00000115137_25 (sequence is synthesized)
gattgggaacctcattcagccgtattgcacagatgagcaattacagcagagaaaattcattagtgctcccactcatatccttatgtgtgagttggtgaaatttagcctgagcttgattct

SEQ ID NO: 206348 - DNA, 120 bp, Artificial Sequence
  ENSG00000115137_26 (sequence is synthesized)
taggtcttgagactcagtttccaacaccttcattattaatgttaagaatggccatataccacttcatttacgtaaaaggaataaaataagcaagttaagcttcagggtcctagaattttt

SEQ ID NO: 206349 - DNA, 120 bp, Artificial Sequence
  ENSG00000115137_27 (sequence is synthesized)
ctgatttctataatccttcagcagaatattaagaaataaagcatgatctgcaatggaaaggtttttttggcactaacttcatgcagaatttcacagacatctatgcattaatttaaattc

SEQ ID NO: 206350 - DNA, 120 bp, Artificial Sequence
  ENSG00000115137_28 (sequence is synthesized)
ttggtgcaaatgtgtgctttgtagttcaaccttattaaaaattcttcagccagttaggatttcaaaatacattagtgagagtaacagctagcagaataattacaatggctaaaacgtttt

SEQ ID NO: 206351 - DNA, 120 bp, Artificial Sequence
  ENSG00000115137_29 (sequence is synthesized)
tatagagaatcttgtttttcaaaaaagaataaaaagtttgaatagctattattaaagaaaagccatgtcttcaacatctgagtcaccaagaagtaacactttttaaacttgttagaaatc

SEQ ID NO: 206352 - DNA, 120 bp, Artificial Sequence
  ENSG00000115137_30 (sequence is synthesized)
cctggaggcatttcaaattcatcttctaacctacctaagcactttaaaatacagcctccttctgttcctctgttccccttcatgcctccttttgaattgatatctcagctgtcaatattt

SEQ ID NO: 206353 - DNA, 120 bp, Artificial Sequence
  ENSG00000115137_31 (sequence is synthesized)
ctttgacttcagcattgttattttatttctctatatcaatgtgtccttagttttcttagcctgttaatttaaaaatccagacttgggggtcattgtgttgctacccaagagaaaatgcta

SEQ ID NO: 206354 - DNA, 120 bp, Artificial Sequence
  ENSG00000115137_32 (sequence is synthesized)
cagttttatagattgcacatcattctttaaggcatacttttacctcaggaaacttactctagtatgttctcatatattgaattctcaactaagtaactatttctttatacctataaacta

SEQ ID NO: 206355 - DNA, 120 bp, Artificial Sequence
  ENSG00000115137_33 (sequence is synthesized)
gtacctaattcactgttagttaaatgagctatagataaggcagctaaatttctgaaagatagccagagtaagtaagcagccactgcaagctctgaatcagttttttaaaaaaaagaaaaa

SEQ ID NO: 206356 - DNA, 120 bp, Artificial Sequence
  ENSG00000115137_34 (sequence is synthesized)
aaaaaaaaaggagctgtgccccattgaacaatgacaacatcacaaggggaagggagggattttgccaaaagttagaaaggtggagctgtaagccatgtgcttgttgcctttgacagtgac

SEQ ID NO: 206357 - DNA, 120 bp, Artificial Sequence
  ENSG00000115137_35 (sequence is synthesized)
agtgcgcgtcttacaactaattccactaggcatgggaatgtcacctcctttgccactgtaccccatcaagcttactctgaatcaaaggttttgtaaaacttttgaaaatgaacttagctg

SEQ ID NO: 206358 - DNA, 120 bp, Artificial Sequence
  ENSG00000115137_36 (sequence is synthesized)
caaaatatagctaaccactttccattgcaagctttgcaaagtgaagagaggttcgtacttctcataattggtatttagcacaattgtaagatacagttttactgtttgtacatcgttttt

SEQ ID NO: 206359 - DNA, 120 bp, Artificial Sequence
  ENSG00000115137_37 (sequence is synthesized)
ttccattaaacttttctagagaagacaaaagcttacactggtgacatggataagtgagatggtgtctaacgagcagtgcaatattaggcggtgcaatagaggccctgttggcaagatgag

SEQ ID NO: 206360 - DNA, 120 bp, Artificial Sequence
  ENSG00000115137_38 (sequence is synthesized)
ttttgctggagagctggacagtgttggttagcttcctgcattgattgcccctgggcgttcttcccccttaactgtgaaagcagagtctataaatgaactctttgctcttacaaggtaatt

SEQ ID NO: 206361 - DNA, 120 bp, Artificial Sequence
  ENSG00000115137_39 (sequence is synthesized)
tacatattttctttctgttgaaataactgaaaatgttaaatctaccagtttatgtcttgtaaacagagtgtcatatgtatttaagttgtgtatttttataaagtaaagccaagtatcaaa

SEQ ID NO: 206362 - DNA, 120 bp, Artificial Sequence
  ENSG00000115137_40 (sequence is synthesized)
gtctccctcccccggctccccacgctcccaaccgcccgcgcctgctgccaggcagcggcggggatggcgagcagcggaggcgaggcggtgacgagagcagcggctccgccattggacgag

SEQ ID NO: 206363 - DNA, 120 bp, Artificial Sequence
  ENSG00000115137_41 (sequence is synthesized)
acatctttgatatggctggacatcccttcttctatgagatgaggaaactgagacgcagagaggttaagtgacttgcccaagatcacaaaactagttcgaaatgagttttacaaggacaca

SEQ ID NO: 206364 - DNA, 120 bp, Artificial Sequence
  ENSG00000115137_42 (sequence is synthesized)
gtcactcttccggagatggtgtctggggtggcctctaagccttgaatgtacccccaaaagagtaagaaggcctgggtccccatgaggggccgtcggcctagataccttgcccgcgttcta

SEQ ID NO: 206365 - DNA, 120 bp, Artificial Sequence
  ENSG00000115137_43 (sequence is synthesized)
gggagagatccagaattatatgaaacaaccaatattgatatcatgtgtaaaattgcataattttagcttgatcgtggcttgccttcagagccttgagttaatagacaactgttgatcttt

SEQ ID NO: 206366 - DNA, 120 bp, Artificial Sequence
  ENSG00000115137_44 (sequence is synthesized)
taggttatcctgttaaatagtggtaggaaatttcattgccaatatttcaaacatttcaataagacattttgactttcagaggacttttgctttttacctcatactttagcctaaaatgtg

SEQ ID NO: 206367 - DNA, 120 bp, Artificial Sequence
  ENSG00000115138_0 (sequence is synthesized)
ggaggggaagaagagccgcgaccgagagaggccgccgagcgtccccgccctcagagagcagcctcccgagacaggcacttgctggattctccaaaagtatctgcagtggctgttccacca

SEQ ID NO: 206368 - DNA, 120 bp, Artificial Sequence
  ENSG00000115138_1 (sequence is synthesized)
ggaggggtcccaccaatcttgtttgcttctgcagagcctcagcctgcctggaagatgccgagatcgtgctgcagccgctcgggggccctgttgctggccttgctgcttcaggcctccatg

SEQ ID NO: 206369 - DNA, 120 bp, Artificial Sequence
  ENSG00000115138_2 (sequence is synthesized)
gaagtgcgtggctggtgcctggagagcagccagtgtcaggacctcaccacggaaagcaacctgctggagtgcatccgggcctgcaagcccgacctctcggccgagactcccatgttcccg

SEQ ID NO: 206370 - DNA, 120 bp, Artificial Sequence
  ENSG00000115138_3 (sequence is synthesized)
ggaaatggcgacgagcagcctctgaccgagaacccccggaagtacgtcatgggccacttccgctgggaccgattcggccgccgcaacagcagcagcagcggcagcagcggcgcagggcag

SEQ ID NO: 206371 - DNA, 120 bp, Artificial Sequence
  ENSG00000115138_4 (sequence is synthesized)
atggagcacttccgctggggcaagccggtgggcaagaagcggcgcccagtgaaggtgtaccctaacggcgccgaggacgagtcggccgaggccttccccctggagttcaagagggagctg

SEQ ID NO: 206372 - DNA, 120 bp, Artificial Sequence
  ENSG00000115138_5 (sequence is synthesized)
actggccagcgactccgggagggagatggccccgacggccctgccgatgacggcgcaggggcccaggccgacctggagcacagcctgctggtggcggccgagaagaaggacgagggcccc

SEQ ID NO: 206373 - DNA, 120 bp, Artificial Sequence
  ENSG00000115138_6 (sequence is synthesized)
tacaggatggagcacttccgctggggcagcccgcccaaggacaagcgctacggcggtttcatgacctccgagaagagccagacgcccctggtgacgctgttcaaaaacgccatcatcaag

SEQ ID NO: 206374 - DNA, 120 bp, Artificial Sequence
  ENSG00000115138_7 (sequence is synthesized)
aacgcctacaagaagggcgagtgagggcacagcggggccccagggctaccctcccccaggaggtcgaccccaaagccccttgctctcccctgccctgctgccgcctcccagcctgggggg

SEQ ID NO: 206375 - DNA, 120 bp, Artificial Sequence
  ENSG00000115138_8 (sequence is synthesized)
atcagcctcttaaagctgcctgtagttaggaaataaaacctttcaaatttcacatccacctctgactttgaatgtaaactgtgtgaataaagtaaaaatacgtagccgtcaaataacagc

SEQ ID NO: 206376 - DNA, 120 bp, Artificial Sequence
  ENSG00000115138_9 (sequence is synthesized)
acctcagaggctgcccggcctgccccacacgggggtgctaagcctcccgcccgttctaagcggagacccaacgccatccataattaagttcttcctgagggcgagcggccaggtgcgcct

SEQ ID NO: 206377 - DNA, 120 bp, Artificial Sequence
  ENSG00000115138_10 (sequence is synthesized)
tcggcaggacagtgctaattccagcccctttccagcgcgtctccccgcgctcgtcccccgtctggaagcccccctcccacgccccgcggccccccttcccctggcccggggagctgctcc

SEQ ID NO: 206378 - DNA, 120 bp, Artificial Sequence
  ENSG00000115145_0 (sequence is synthesized)
aagtgcagggacggaggccgaagcggagcggtctagggagccgcggccgcgggtcacccggcgggtagcagttgctgagtgtcagctagacagcagcgactagggctcgggcgccggcga

SEQ ID NO: 206379 - DNA, 120 bp, Artificial Sequence
  ENSG00000115145_1 (sequence is synthesized)
gatgcctttgttcaccgccaaccccttcgagcaagacgtggaaaaagccacgaatgagtacaacactacagaagattggagtcttattatggacatatgtgacaaagttggaagtactcc

SEQ ID NO: 206380 - DNA, 120 bp, Artificial Sequence
  ENSG00000115145_2 (sequence is synthesized)
taatggagcgaaagattgcctaaaagccataatgaaaagggtaaatcataaggttccacatgttgctctgcaagcactaactcttcttggggcttgtgtggcaaactgtggaaagatatt

SEQ ID NO: 206381 - DNA, 120 bp, Artificial Sequence
  ENSG00000115145_3 (sequence is synthesized)
tcatttagaagtatgttcccgtgattttgcaacagaagtacgtgctgtgattaaaaataaggcacatcctaaagtatgtgaaaaactgaaatctttaatggtggagtggtcagaagaatt

SEQ ID NO: 206382 - DNA, 120 bp, Artificial Sequence
  ENSG00000115145_4 (sequence is synthesized)
tcagaaggaccctcagtttagtctgatatctgcaactattaaatctatgaaagaagaaggaattacttttcctccagcaggttctcagactgtctcagctgctgccaagaatggtacgtc

SEQ ID NO: 206383 - DNA, 120 bp, Artificial Sequence
  ENSG00000115145_5 (sequence is synthesized)
atcgaacaaaaacaaagaggatgaagacatagctaaagctattgaattatcgctgcaagaacagaaacagcaacacacagaaacaaaatccttatatccatcttcagaaattcagttaaa

SEQ ID NO: 206384 - DNA, 120 bp, Artificial Sequence
  ENSG00000115145_6 (sequence is synthesized)
taataaggttgcacggaaagtgagagctttatatgattttgaagctgttgaggacaatgaactcacctttaaacatggtgaaataattattgttttggatgacagtgatgccaattggtg

SEQ ID NO: 206385 - DNA, 120 bp, Artificial Sequence
  ENSG00000115145_7 (sequence is synthesized)
gaaaggagaaaatcacagaggaataggacttttcccatccaattttgtaacaactaatttaaacatagagactgaggcagcggctgtggacaaattgaatgtaattgatgatgatgtgga

SEQ ID NO: 206386 - DNA, 120 bp, Artificial Sequence
  ENSG00000115145_8 (sequence is synthesized)
ggaaattaagaaatcagagcctgagcctgtttatatagatgaggataagatggatagagccctgcaggtacttcagagtatagatccaacagattcaaaaccagactcccaagacctttt

SEQ ID NO: 206387 - DNA, 120 bp, Artificial Sequence
  ENSG00000115145_9 (sequence is synthesized)
ggatttagaagatatctgccaacagatgggtccaatgatagatgaaaaacttgaagaaattgataggaagcattcagaattgtctgaattgaatgttaaagtcctggaagctctggaact

SEQ ID NO: 206388 - DNA, 120 bp, Artificial Sequence
  ENSG00000115145_10 (sequence is synthesized)
atataacaaattggtgaatgaagcaccagtgtactcagtctattcaaagctccaccctccagcacattacccacctgcatcatctggggttccaatgcagacatatccagttcaatcaca

SEQ ID NO: 206389 - DNA, 120 bp, Artificial Sequence
  ENSG00000115145_11 (sequence is synthesized)
tggtggaaactatatgggtcagagcattcaccaagtaactgttgcccaaagctatagcctaggacccgatcaaattggtccactgagatctctgcctccaaatgtgaattcctcagtgac

SEQ ID NO: 206390 - DNA, 120 bp, Artificial Sequence
  ENSG00000115145_12 (sequence is synthesized)
agcacagcctgctcaaacttcatatttaagcactggacaagacactgtttccaatcctacttatatgaaccagaactctaacctacagtcagctactggtacaactgcttacacacagca

SEQ ID NO: 206391 - DNA, 120 bp, Artificial Sequence
  ENSG00000115145_13 (sequence is synthesized)
aatggggatgtctgtggatatgtcatcttatcagaacactacttccaatttgcctcaactggcaggctttccggtgacagttccagctcatccagttgcacagcagcacacaaattacca

SEQ ID NO: 206392 - DNA, 120 bp, Artificial Sequence
  ENSG00000115145_14 (sequence is synthesized)
tcagcagcctctcctttagaaacaaatcaagcattttcttgaaagccttcataagtgtattattcagtccttgtgataccaacctgaaaatattaaaacttttttccctctcaactcaaa

SEQ ID NO: 206393 - DNA, 120 bp, Artificial Sequence
  ENSG00000115145_15 (sequence is synthesized)
aggaccatgaataaataaagcacaaaaacctctcttattctacaaggccataaaaggttttttttttttttttttttcagtccagtttgtttgaagtcaatcttttcatcagaggcagct

SEQ ID NO: 206394 - DNA, 120 bp, Artificial Sequence
  ENSG00000115145_16 (sequence is synthesized)
taaagatgctttcagttagttttgtcttactttcagatttctctacataaatctagatactcattaagtagccttatgacaaacagtatgagatacttatgacaaactcgctctgtcacc

SEQ ID NO: 206395 - DNA, 120 bp, Artificial Sequence
  ENSG00000115145_17 (sequence is synthesized)
caggctggagtgcagtagcatgatcgacagagtgagtttgtcaaaagtatctcatacttataaacagtatgagataggaggattaaaatattattttaaagaaaccactgtttcccccta

SEQ ID NO: 206396 - DNA, 120 bp, Artificial Sequence
  ENSG00000115145_18 (sequence is synthesized)
aaatgtcataagagcactgaagaacttgaaatatttttttcagagtttctcacacactttaaaagtctaacttttttgtgtgtaagcatttagcttgccagcatatttctttttggctcc

SEQ ID NO: 206397 - DNA, 120 bp, Artificial Sequence
  ENSG00000115145_19 (sequence is synthesized)
ttaaattgcggttgtgtttgcagtattgtcacttttgctctcactgttatgttgaataataattagcatataattgtctacagaagcaagagcaatctggaaggaacaaaaatgttttct

SEQ ID NO: 206398 - DNA, 120 bp, Artificial Sequence
  ENSG00000115145_20 (sequence is synthesized)
gtgattaacagtgaagaccttgtaaatgcagatgtgtgataaagcatttagtcagtcccccaaacagtcatgccaactgtgaaggaatgtcccacaaaacatttccattccctgaggaaa

SEQ ID NO: 206399 - DNA, 120 bp, Artificial Sequence
  ENSG00000115145_21 (sequence is synthesized)
aacattttctttcctacatgtatctctggtatttagaattgtcactaataaccttttcaagtgattttggctattctctaatgaagatatggtccatttgtttttcttcctgcaatgtgg

SEQ ID NO: 206400 - DNA, 120 bp, Artificial Sequence
  ENSG00000115145_22 (sequence is synthesized)
tgttgtgagatataccaagcatggatgataagtgtgtttttagtggtgtgttgtttttttaaagaggtgattcaagtaccgttgctaagctgtcaacataccaagctgttgaaaaaattg

SEQ ID NO: 206401 - DNA, 120 bp, Artificial Sequence
  ENSG00000115145_23 (sequence is synthesized)
accatttctttcagaagtaattctcagcctgtggaataatagcaggtgaagacttcatagaaggcgacagattgatagggaggctattgaagcagtttttctgaagcctgcattttgagt

SEQ ID NO: 206402 - DNA, 120 bp, Artificial Sequence
  ENSG00000115145_24 (sequence is synthesized)
tagtttatagtgctaatagattctatataactgtgagagtttggtagtaaaccagtagggattgttttctctcctaaaaatttgcacactacttcattgtctaccaactttttacatatt

SEQ ID NO: 206403 - DNA, 120 bp, Artificial Sequence
  ENSG00000115145_25 (sequence is synthesized)
ggaaaatagaaattgcaaatacatacatgtatggaaacatattcagattgggaaaaacaatggacattagtttttaaaaagttacgtggaagcaagatttctatatttgtttttttaaag

SEQ ID NO: 206404 - DNA, 120 bp, Artificial Sequence
  ENSG00000115145_26 (sequence is synthesized)
gaagcagtcattctttctactaaatccatttcaagctagttctctgaaaattttgccatttatctacagaaatttgattataaatatgttcctttttcaaagaaactttattctagaaca

SEQ ID NO: 206405 - DNA, 120 bp, Artificial Sequence
  ENSG00000115145_27 (sequence is synthesized)
aaatagtctatatggtacttgatctacatttaagtggaaaaattagcagtatttgaaagctcagtttatgtcattgtcttaacttcagatacaaataactgaacagaaagttttaacctt

SEQ ID NO: 206406 - DNA, 120 bp, Artificial Sequence
  ENSG00000115145_28 (sequence is synthesized)
taatatctcatgttctgttttttattcagtattttcctttatgttaattcaattatatacttctgaatggcaccttactttttggaaacaaatcttctgttatttacaaaataataattt

SEQ ID NO: 206407 - DNA, 120 bp, Artificial Sequence
  ENSG00000115145_29 (sequence is synthesized)
ttaaaaaacatttaaaaaaaatccaaagctgctctcgataatagtcaacatttgcatatatatggaatttcttactttttttctcccaaactctatttaataaacttattttaatgtttg

SEQ ID NO: 206408 - DNA, 120 bp, Artificial Sequence
  ENSG00000115145_30 (sequence is synthesized)
tgtatttcatgtataattgtgatctcaattataaaagtttaattcagcatgtctttgagccaatataattactgcacacccactaaattgggatcagccattataaataatgtagtttta

SEQ ID NO: 206409 - DNA, 120 bp, Artificial Sequence
  ENSG00000115145_31 (sequence is synthesized)
gaataataaaacatgacacatatatatatatataaatatatagtatatattggcacatcggtgaaagtttatatgtgcagaagtttttttctttctcaagttaaaaattattttttgcca

SEQ ID NO: 206410 - DNA, 120 bp, Artificial Sequence
  ENSG00000115145_32 (sequence is synthesized)
tatgtaattttgtgttgcaggctgtcgagagataaaaatgattttaaatctgtgtactgatgattctttcggtgttaagaaacacagggttgtgtacttccctttttatgggcttatgga

SEQ ID NO: 206411 - DNA, 120 bp, Artificial Sequence
  ENSG00000115145_33 (sequence is synthesized)
ttctatttatattaagacctgtttataattgttttctgccaaagggaattgtctaacttcagatttctacattgggttcatacttactgttttatatcagaaataaaaaaatagcttctg

SEQ ID NO: 206412 - DNA, 120 bp, Artificial Sequence
  ENSG00000115145_34 (sequence is synthesized)
ctttttcatatgaaatcttggtacatcagaaagaattcctgaaaatttataatagaatgaattttattaatgcagaaaaataccccagggtgttaaaatatatgaagtgtgggatatatt

SEQ ID NO: 206413 - DNA, 120 bp, Artificial Sequence
  ENSG00000115145_35 (sequence is synthesized)
aaaatgtagtcaaccaatactgtcttctaatttggtaatttatttataaaattacttaaacattaggtaattatatttgttaggatttgaaattatttgtagttaaattgtcatgctgtt

SEQ ID NO: 206414 - DNA, 120 bp, Artificial Sequence
  ENSG00000115145_36 (sequence is synthesized)
tgtcatgctgtttgaaataattgatacttgtctacgtaatacattttactgtatgttttgaagatggttataatttcactttcaaaatttaaaaaatcaattttaaatgttttaaaaaca

SEQ ID NO: 206415 - DNA, 120 bp, Artificial Sequence
  ENSG00000115145_37 (sequence is synthesized)
tatagcttagggattttttttaaaaaggttttcttagtaaaaacataaatttaaaagcccctgagttctaggagagggcttattgaattgctataagaaagctggagttactttgataag

SEQ ID NO: 206416 - DNA, 120 bp, Artificial Sequence
  ENSG00000115145_38 (sequence is synthesized)
taataaattataaatagcactgatctataatgctttatttctatcggaaggtactttttcttctttcatcatcagttttagccagttagtaaatgggaatactcagttttagggatttga

SEQ ID NO: 206417 - DNA, 120 bp, Artificial Sequence
  ENSG00000115145_39 (sequence is synthesized)
gaatactcagttttagggatttgatttttgtttggtttaattttctttcaaaaattaaaagtatatttctaaaagttttccccagaggccagatacagtggctcatgcctataatcccag

SEQ ID NO: 206418 - DNA, 120 bp, Artificial Sequence
  ENSG00000115145_40 (sequence is synthesized)
tattgcttgaggctaggagtttgagaccaacctggcaacatggcaagaccctatctctacaaaaattttaaaacttagccaggtgtggtagtgcacctgtagtcccagctagtcagtagg

SEQ ID NO: 206419 - DNA, 120 bp, Artificial Sequence
  ENSG00000115145_41 (sequence is synthesized)
ctgaggtgggagtattgcttgaggctgcagtgaggtgtgatcacgccactgcactccggcctgacagaatgagatcctgtctcaaaaagaaaattccccagaagaagaattctaatttta

SEQ ID NO: 206420 - DNA, 120 bp, Artificial Sequence
  ENSG00000115145_42 (sequence is synthesized)
tcaagctgaattaaagtttgagagtcttttttttaaaatcttactgtgtcaaaagaggcattatgttgcttgtgtgatatagtgaatagtgtccctccaaatttcatgtacacctggaat

SEQ ID NO: 206421 - DNA, 120 bp, Artificial Sequence
  ENSG00000115145_43 (sequence is synthesized)
gtcacaatgtgacttaacagtagccacccctcacccccgcccttatctgtggtggatacatttgcaagatccccagtggatgcctgaaaccgcagatagtactgaaccttatatatactg

SEQ ID NO: 206422 - DNA, 120 bp, Artificial Sequence
  ENSG00000115145_44 (sequence is synthesized)
tttgttttcctatgcatacatatccctatgataaagtttatgaatttggcacttaacagcagaactaataagatgaaagagttgtaacaatatactctaataaaagttatttaaaatgta

SEQ ID NO: 206423 - DNA, 120 bp, Artificial Sequence
  ENSG00000115145_45 (sequence is synthesized)
attgataggtgagatttttcgtgcaggaataaaaagtatagttttggggggttcacttgtgttttggcaaacagtaaagtagggaaagtttttgtggaactgtacaattcatggaaattg

SEQ ID NO: 206424 - DNA, 120 bp, Artificial Sequence
  ENSG00000115145_46 (sequence is synthesized)
tttttcagtttcccaggcttttaacaaatttatagcaaggtggtgctttttatcttgtttttgtttttctaaaaaacaagctctgacaagttttattaaataaaaattttgcatggctta

SEQ ID NO: 206425 - DNA, 120 bp, Artificial Sequence
  ENSG00000115145_47 (sequence is synthesized)
tctggggttccaatgcaggtgagcatgttttttgagaacattttctaaattataaacaacttttaaaagtaaaagaaaatgttttatagcatagtattaagatttcttttgtctgtgaat

SEQ ID NO: 206426 - DNA, 120 bp, Artificial Sequence
  ENSG00000115145_48 (sequence is synthesized)
aaaattataaaatttatctttgattgtttcagtaaatattggctaaacaattaacattcaccagagcaaattagacagatactgatatttcacaaatacattttagttcagttttaacat

SEQ ID NO: 206427 - DNA, 120 bp, Artificial Sequence
  ENSG00000115145_49 (sequence is synthesized)
ttaatttaaaactggattgatgatcattatggtatgatatgatattaaatgtatgcattgttttgatgctatatttagtagacaggtggtagaccctgtccttaaggagctgttgtcctg

SEQ ID NO: 206428 - DNA, 120 bp, Artificial Sequence
  ENSG00000115145_50 (sequence is synthesized)
aaaataagtagggcacatataaatgtccaaagagacctaaaccatttttgctgtttcctgaggatacatgtcttttgcccataactcttctttacttttgtcctgtttgtcttaaaggta

SEQ ID NO: 206429 - DNA, 120 bp, Artificial Sequence
  ENSG00000115145_51 (sequence is synthesized)
gagaataaggtagacattgccagggaagccctggcacccttataccatttctttttcagctttttctctcaagtttctttcttaggaaggagttggatgagtcatccagggatgagggta

SEQ ID NO: 206430 - DNA, 120 bp, Artificial Sequence
  ENSG00000115145_52 (sequence is synthesized)
aagaaggttatcattcttatagtgactttaagtgatggtgggcttcccttcaagggagtgtatagttttctgtggctctacagcaagacatctttactgagtaataggcaacctggatag

SEQ ID NO: 206431 - DNA, 120 bp, Artificial Sequence
  ENSG00000115145_53 (sequence is synthesized)
attgcaatccactacttaaaagtacaccacctgtctttctcccagctctctgtaaaaataaaagaacagccaaacaaatcaaatttccatagatttggcactgtgatttgacagctctcc

SEQ ID NO: 206432 - DNA, 120 bp, Artificial Sequence
  ENSG00000115155_0 (sequence is synthesized)
atcggaggggggtcgggaggaggaggaggaggcagcggcagagaagagagaggcgtgtgagccgtgctccaccggctagctccttcccgctgctcctgcctggcagtgccaggcagccca

SEQ ID NO: 206433 - DNA, 120 bp, Artificial Sequence
  ENSG00000115155_1 (sequence is synthesized)
caccagcatggccttgctcatccacctcaagacagtctcggagctgcggggcaggggcgaccggatcgccaaagtgactttccgagggcaatccttctactctcgggtcctggagaactg

SEQ ID NO: 206434 - DNA, 120 bp, Artificial Sequence
  ENSG00000115155_2 (sequence is synthesized)
tgaggatgtggctgactttgatgagacatttcggtggccggtggccagcagcatcgacagaaatgagatgctggagattcaggttttcaactacagcaaagtcttcagcaacaagctcat

SEQ ID NO: 206435 - DNA, 120 bp, Artificial Sequence
  ENSG00000115155_3 (sequence is synthesized)
cgggaccttccgcatggtgctgcagaaggtggtagaggagagccatgtggaggtgactgacacgctgattgatgacaacaatgctatcatcaagaccagcctgtgcgtggaggtccggta

SEQ ID NO: 206436 - DNA, 120 bp, Artificial Sequence
  ENSG00000115155_4 (sequence is synthesized)
tcaggccactgacggcacagtgggctcctgggacgatggggacttcctgggagatgagtctcttcaagaggaagagaaggacagccaagagacggatggactgctcccaggctcccggcc

SEQ ID NO: 206437 - DNA, 120 bp, Artificial Sequence
  ENSG00000115155_5 (sequence is synthesized)
cagctcccggcccccaggagagaagagcttccggagagccgggaggagcgtgttctccgccatgaagctcggcaaaaaccggtctcacaaggaggagccccaaagaccagatgaaccggc

SEQ ID NO: 206438 - DNA, 120 bp, Artificial Sequence
  ENSG00000115155_6 (sequence is synthesized)
ggtgctggagatggaagaccttgaccatctggccattcggctaggagatggactggatcccgactcggtgtctctagcctcagtcacagctctcaccactaatgtctccaacaagcgatc

SEQ ID NO: 206439 - DNA, 120 bp, Artificial Sequence
  ENSG00000115155_7 (sequence is synthesized)
taagccagacattaagatggagccaagtgctgggcggcccatggattaccaggtcagcatcacggtgatcgaggcccggcagctggtgggcttgaacatggaccctgtggtgtgcgtgga

SEQ ID NO: 206440 - DNA, 120 bp, Artificial Sequence
  ENSG00000115155_8 (sequence is synthesized)
ggtgggtgacgacaagaagtacacatccatgaaggagtccactaactgcccctattacaacgagtacttcgtcttcgacttccatgtctctccggatgtcatgtttgacaagatcatcaa

SEQ ID NO: 206441 - DNA, 120 bp, Artificial Sequence
  ENSG00000115155_9 (sequence is synthesized)
gatttcggtgattcactccaagaacctgctgcgcagtggcaccctggtgggctccttcaaaatggacgtgggaaccgtgtactcgcagccagagcaccagttccatcacaagtgggccat

SEQ ID NO: 206442 - DNA, 120 bp, Artificial Sequence
  ENSG00000115155_10 (sequence is synthesized)
cctgtctgaccccgatgacatctcctcggggctgaagggctacgtgaagtgtgacgttgccgtggtgggcaaaggggacaacatcaagacgccccacaaggccaatgagaccgacgaaga

SEQ ID NO: 206443 - DNA, 120 bp, Artificial Sequence
  ENSG00000115155_11 (sequence is synthesized)
tgacattgaggggaacttgctgctccccgagggggtgccccccgaacgccagtgggcccggttctatgtgaaaatttaccgagcagaggggctgccccgtatgaacacaagcctcatggc

SEQ ID NO: 206444 - DNA, 120 bp, Artificial Sequence
  ENSG00000115155_12 (sequence is synthesized)
caatgtaaagaaggctttcatcggtgaaaacaaggacctcgtggacccctacgtgcaagtcttctttgctggccagaagggcaagacttcagtgcagaagagcagctatgagcccctgtg

SEQ ID NO: 206445 - DNA, 120 bp, Artificial Sequence
  ENSG00000115155_13 (sequence is synthesized)
gaatgagcaggtcgtctttacagacctcttccccccactctgcaaacgcatgaaggtgcagatccgagactcggacaaggtcaacgacgtggccatcggcacccacttcattgacctgcg

SEQ ID NO: 206446 - DNA, 120 bp, Artificial Sequence
  ENSG00000115155_14 (sequence is synthesized)
caagatttctaatgacggagacaaaggcttcctgcccacactgggcccagcctgggtgaacatgtacggctccacacgtaactacacgctgctggatgagcatcaggacctgaacgaggg

SEQ ID NO: 206447 - DNA, 120 bp, Artificial Sequence
  ENSG00000115155_15 (sequence is synthesized)
cctgggggagggtgtgtccttccgggcccggctcctgctgggcctggctgtggagatcgtagacacctccaaccctgagctcaccagctccacagaggtgcaggtggagcaggccacgcc

SEQ ID NO: 206448 - DNA, 120 bp, Artificial Sequence
  ENSG00000115155_16 (sequence is synthesized)
catctcggagagctgtgcaggtaaaatggaagaattctttctctttggagccttcctggaggcctcaatgatcgaccggagaaacggagacaagcccatcacctttgaggtcaccatagg

SEQ ID NO: 206449 - DNA, 120 bp, Artificial Sequence
  ENSG00000115155_17 (sequence is synthesized)
caactatgggaacgaagttgatggcctgtcccggccccagcggcctcggccccggaaggagccgggggatgaggaagaagtagacctgattcagaacgcaagtgatgacgaggccggtga

SEQ ID NO: 206450 - DNA, 120 bp, Artificial Sequence
  ENSG00000115155_18 (sequence is synthesized)
tgccggggacctggcctcagtctcctccactccaccaatgcggccccaggtcaccgacaggaactacttccatctgccctacctggagcgaaagccctgcatctacatcaagagctggtg

SEQ ID NO: 206451 - DNA, 120 bp, Artificial Sequence
  ENSG00000115155_19 (sequence is synthesized)
gccggaccagcgccgccgcctctacaatgccaacatcatggaccacattgccgacaagctggaagaaggcctgaacgacatacaggagatgatcaaaacggagaagtcctaccctgagcg

SEQ ID NO: 206452 - DNA, 120 bp, Artificial Sequence
  ENSG00000115155_20 (sequence is synthesized)
tcgcctgcggggcgtcctggaggagctgagctgtggctgctgccgcttcctctccctcgctgacaaggaccagggccactcatcccgcaccaggcttgaccgggagcgcctcaagtcctg

SEQ ID NO: 206453 - DNA, 120 bp, Artificial Sequence
  ENSG00000115155_21 (sequence is synthesized)
catgagggagctggaaaacatggggcagcaggccaggatgctgcgggcccaggtgaagcggcacacggtgcgggacaagctgaggctgtgccagaacttcctgcagaagctgcgcttcct

SEQ ID NO: 206454 - DNA, 120 bp, Artificial Sequence
  ENSG00000115155_22 (sequence is synthesized)
ggcggacgagccccagcacagcattcccgacatcttcatctggatgatgagcaacaacaagcgtgtcgcctatgcccgtgtgccctccaaggacctgctcttctccatcgtggaggagga

SEQ ID NO: 206455 - DNA, 120 bp, Artificial Sequence
  ENSG00000115155_23 (sequence is synthesized)
gactggcaaggactgcgccaaggtcaagacgctcttccttaagctgccagggaagcggggcttcggctcggcaggctggacagtgcaggccaaggtggagctgtacctgtggctgggcct

SEQ ID NO: 206456 - DNA, 120 bp, Artificial Sequence
  ENSG00000115155_24 (sequence is synthesized)
cagcaaacagcgcaaggagttcctgtgcggcctgccctgtggcttccaggaggtcaaggcagcccagggcctgggcctgcatgccttcccacccgtcagcctggtctacaccaagaagca

SEQ ID NO: 206457 - DNA, 120 bp, Artificial Sequence
  ENSG00000115155_25 (sequence is synthesized)
ggcgttccagctccgagcgcacatgtaccaggcccgcagcctctttgccgccgacagcagcggactctcagacccctttgcccgcgtcttcttcatcaatcagagtcagtgcacagaggt

SEQ ID NO: 206458 - DNA, 120 bp, Artificial Sequence
  ENSG00000115155_26 (sequence is synthesized)
gctgaatgagaccctgtgtcccacctgggaccagatgctggtgttcgacaacctggagctctatggtgaagctcatgagctgagggacgatccgcccatcattgtcattgaaatctatga

SEQ ID NO: 206459 - DNA, 120 bp, Artificial Sequence
  ENSG00000115155_27 (sequence is synthesized)
ccaggattccatgggcaaagctgacttcatgggccggaccttcgccaaacccctggtgaagatggcagacgaggcgtactgcccaccccgcttcccacctcagctcgagtactaccagat

SEQ ID NO: 206460 - DNA, 120 bp, Artificial Sequence
  ENSG00000115155_28 (sequence is synthesized)
ctaccgtggcaacgccacagctggagacctgctggcggccttcgagctgctgcagattggaccagcagggaaggctgacctgccccccatcaatggcccggtggacgtggaccgaggtcc

SEQ ID NO: 206461 - DNA, 120 bp, Artificial Sequence
  ENSG00000115155_29 (sequence is synthesized)
gacctaaagcgggtgaacctggcccaggtggaccggccacgggtggacatcgagtgtgcagggaagggggtgcagtcgtccctgatccacaattataagaagaaccccaacttcaacacc

SEQ ID NO: 206462 - DNA, 120 bp, Artificial Sequence
  ENSG00000115155_30 (sequence is synthesized)
ctcgtcaagtggtttgaagtggacctcccagagaacgagctgctgcacccgcccttgaacatccgtgtggtggactgccgggccttcggtcgctacacactggtgggctcccatgccgtc

SEQ ID NO: 206463 - DNA, 120 bp, Artificial Sequence
  ENSG00000115155_31 (sequence is synthesized)
agctccctgcgacgcttcatctaccggcccccagaccgctcggcccccagctggaacaccacggtcaggcttctccggcgctgccgtgtgctgtgcaatgggggctcctcctctcactcc

SEQ ID NO: 206464 - DNA, 120 bp, Artificial Sequence
  ENSG00000115155_32 (sequence is synthesized)
acaggggaggttgtggtgactatggagccagaggtacccatcaagaaactggagaccatggtgaagctggacgcgacttctgaagctgttgtcaaggtggatgtggctgaggaggagaag

SEQ ID NO: 206465 - DNA, 120 bp, Artificial Sequence
  ENSG00000115155_33 (sequence is synthesized)
gagaagaagaagaagaagaagggcactgcggaggagccagaggaggaggagccagacgagagcatgctggactggtggtccaagtactttgcctccattgacaccatgaaggagcaactt

SEQ ID NO: 206466 - DNA, 120 bp, Artificial Sequence
  ENSG00000115155_34 (sequence is synthesized)
cgacaacaagagccctctggaattgacttggaggagaaggaggaagtggacaataccgagggcctgaaggggtcaatgaagggcaaggagaaggcaagggctgccaaagaggagaagaag

SEQ ID NO: 206467 - DNA, 120 bp, Artificial Sequence
  ENSG00000115155_35 (sequence is synthesized)
aagaaaactcagagctctggctctggccaggggtccgaggcccccgagaagaagaaacccaagattgatgagcttaaggtataccccaaagagctggagtccgagtttgataactttgag

SEQ ID NO: 206468 - DNA, 120 bp, Artificial Sequence
  ENSG00000115155_36 (sequence is synthesized)
gactggctgcacactttcaacttgcttcggggcaagaccggggatgatgaggatggctccaccgaggaggagcgcattgtgggacgcttcaagggctccctctgcgtgtacaaagtgcca

SEQ ID NO: 206469 - DNA, 120 bp, Artificial Sequence
  ENSG00000115155_37 (sequence is synthesized)
ctcccagaggacgtgtcccgggaagccggctacgactccacctacggcatgttccagggcatcccgagcaatgaccccatcaatgtgctggtccgagtctatgtggtccgggccacggac

SEQ ID NO: 206470 - DNA, 120 bp, Artificial Sequence
  ENSG00000115155_38 (sequence is synthesized)
ctgcaccctgctgacatcaacggcaaagctgacccctacatcgccatccggctaggcaagactgacatccgcgacaaggagaactacatctccaagcagctcaaccctgtctttgggaag

SEQ ID NO: 206471 - DNA, 120 bp, Artificial Sequence
  ENSG00000115155_39 (sequence is synthesized)
tcctttgacatcgaggcctccttccccatggaatccatgctgacggtggctgtgtatgactgggacctggtgggcactgatgacctcattggggaaaccaagatcgacctggagaaccgc

SEQ ID NO: 206472 - DNA, 120 bp, Artificial Sequence
  ENSG00000115155_40 (sequence is synthesized)
ttctacagcaagcaccgcgccacctgcggcatcgcccagacctactccacacatggctacaatatctggcgggaccccatgaagcccagccagatcctgacccgcctctgcaaagacggc

SEQ ID NO: 206473 - DNA, 120 bp, Artificial Sequence
  ENSG00000115155_41 (sequence is synthesized)
aaagtggacggcccccactttgggccccctgggagagtgaaggtggccaaccgcgtcttcactgggccctctgagattgaggacgagaacggtcagaggaagcccacagacgagcatgtg

SEQ ID NO: 206474 - DNA, 120 bp, Artificial Sequence
  ENSG00000115155_42 (sequence is synthesized)
gcgctgttggccctgaggcactgggaggacatcccccgcgcaggctgccgcctggtgccagagcatgtggagacgaggccgctgctcaaccccgacaagccgggcatcgagcagggccgc

SEQ ID NO: 206475 - DNA, 120 bp, Artificial Sequence
  ENSG00000115155_43 (sequence is synthesized)
ctggagctgtgggtggacatgttccccatggacatgccagcccctgggacgcctctggacatctcacctcggaagcccaagaagtacgagctgcgggtcatcatctggaacacagatgag

SEQ ID NO: 206476 - DNA, 120 bp, Artificial Sequence
  ENSG00000115155_44 (sequence is synthesized)
gtggtcttggaggacgacgacttcttcacaggggagaagtccagtgacatcttcgtgagggggtggctgaagggccagcaggaggacaagcaggacacagacgtccactaccactccctc

SEQ ID NO: 206477 - DNA, 120 bp, Artificial Sequence
  ENSG00000115155_45 (sequence is synthesized)
actggcgagggcaacttcaactggcgctacctgttccccttcgactacctggcggcggaggagaagatcgtcatctccaagaaggagtccatgttctcctgggacgagaccgagtacaag

SEQ ID NO: 206478 - DNA, 120 bp, Artificial Sequence
  ENSG00000115155_46 (sequence is synthesized)
atccccgcgcggctcaccctgcagatctgggatgcggaccacttctccgctgacgacttcctgggggccatcgagctggacctgaaccggttcccgcggggcgcaaagacagccaagcag

SEQ ID NO: 206479 - DNA, 120 bp, Artificial Sequence
  ENSG00000115155_47 (sequence is synthesized)
tgcaccatggagatggccaccggggaggtggacgtgcccctcgtgtccatcttcaagcaaaagcgcgtcaaaggctggtggcccctcctggcccgcaatgagaacgatgagtttgagctc

SEQ ID NO: 206480 - DNA, 120 bp, Artificial Sequence
  ENSG00000115155_48 (sequence is synthesized)
acgggcaaggtggaggctgagctgcatttactgacagcagaggaggcagagaagaacccagtgggcctggcccgcaatgaacctgaccccctagagaaacccaaccggcccgacacgagc

SEQ ID NO: 206481 - DNA, 120 bp, Artificial Sequence
  ENSG00000115155_49 (sequence is synthesized)
ttcatctggttcctgaaccctctcaagtcggctcgctacttcttgtggcacacgtatcgctggctgctcctcaaactgttgctgctcctgctgctgctcctcctcctcgccctgttcctc

SEQ ID NO: 206482 - DNA, 120 bp, Artificial Sequence
  ENSG00000115155_50 (sequence is synthesized)
tactctgtgcctggctacctggtcaagaaaatcctcggggcctgagcccagtggcctcctggccggcccgacacggccttcgtctggttcctcaaccctctcaagtccatcaagtacctc

SEQ ID NO: 206483 - DNA, 120 bp, Artificial Sequence
  ENSG00000115155_51 (sequence is synthesized)
atctgcacccggtacaagtggctcatcatcaagatcgtgctggcgctgttggggctgctcatgttggggctcttcctctacagcctccctggctacatggtcaaaaagctccttggggca

SEQ ID NO: 206484 - DNA, 120 bp, Artificial Sequence
  ENSG00000115155_52 (sequence is synthesized)
tgaaggccgccagctcccgccagccgctccccagccctgccgcatttcctttcagtggcttggactctttcccatctcccctggggagcctgaggagcccagcgtccactcttcatgcct

SEQ ID NO: 206485 - DNA, 120 bp, Artificial Sequence
  ENSG00000115155_53 (sequence is synthesized)
tgggccgagcctgcctcctgcttgcgggggccgcctgtcctcactgccccaggctgcggcttgcccagtcccgcccctctgacccctgcctgtgggctggggagccttggatggggtggg

SEQ ID NO: 206486 - DNA, 120 bp, Artificial Sequence
  ENSG00000115155_54 (sequence is synthesized)
gacctggaatgggtctctcttgccccacctggctgaggcgccacccttcttcaggcccaggctccagaggaagactcctgaaaccctccccaggtcttccaagtacaggattgaagcttt

SEQ ID NO: 206487 - DNA, 120 bp, Artificial Sequence
  ENSG00000115155_55 (sequence is synthesized)
agtgaaattaaccaaggaccatgggtcagtgcccagggctttaaaaagaatgaacgagcaaaaggtatccccgccgtgacccctgcagatagcaccggtctttgatccgcagcaggggcc

SEQ ID NO: 206488 - DNA, 120 bp, Artificial Sequence
  ENSG00000115155_56 (sequence is synthesized)
agaccctgcccacaagtcccagcgcggctgcttctgccactgctgggctccacttggctcctctcacttcccagggggtcgcctgtcctgcctgtgggtttccatggcttcccagagctc

SEQ ID NO: 206489 - DNA, 120 bp, Artificial Sequence
  ENSG00000115155_57 (sequence is synthesized)
cctctgccccagccagcgcctccaggcccagctgaggagctgtgagaagcagcagaggggactccccatcccgggcacaccctgtcctcccacccctgcccccttgcccttccagccctt

SEQ ID NO: 206490 - DNA, 120 bp, Artificial Sequence
  ENSG00000115155_58 (sequence is synthesized)
tcagctgcagctgggagctggcccgtcaagtgctgcccctgcctgtgtctgggtttctgttggctgtttttcttttcttgagtggtgatttttctctaaataaaagaagtcaagcactga

SEQ ID NO: 206491 - DNA, 120 bp, Artificial Sequence
  ENSG00000115155_59 (sequence is synthesized)
ccagactatctgccccgagagaaaaggacactaagagcctcctttggcatgtgactgtcgggggctgagcttgattgtgtgtccaaacagctccctcctaatactatcctggaatgcaca

SEQ ID NO: 206492 - DNA, 120 bp, Artificial Sequence
  ENSG00000115155_60 (sequence is synthesized)
atactgacagccccagactgggaggcaccagggagatcatttggtctagtctttatcttttctagaggaagaagtcaacgcccagagaggggtagccacttgcctagggtcacacagcaa

SEQ ID NO: 206493 - DNA, 120 bp, Artificial Sequence
  ENSG00000115155_61 (sequence is synthesized)
gcctcctgaggggtccagtgctcctgcccctgcccttcactgtcataggaccctcaggcagcctggcaggggcactgaagatgagcagggcatgggagcctgctcaggcagcccttctcc

SEQ ID NO: 206494 - DNA, 120 bp, Artificial Sequence
  ENSG00000115155_62 (sequence is synthesized)
atgatgaccgatactcaggatggccctagcgagagctcccagatcatgaggtccctcactcccctgatcaacagggaggaggcatttggggaggctggggaggcggggctgtggcccagc

SEQ ID NO: 206495 - DNA, 120 bp, Artificial Sequence
  ENSG00000115155_63 (sequence is synthesized)
ccgtgagttctgcccaggccctgtgagctcaccagagccacagactcacagcccagaggtggcttcttccttcaggaactgaagaacccccatgaacaccaacatctccaggttctgaga

SEQ ID NO: 206496 - DNA, 120 bp, Artificial Sequence
  ENSG00000115159_0 (sequence is synthesized)
ttttttttttttgggtggcggggggttgcaagtgggaagcctgctgttcagctgccggggctctccgcctccccccacctgtatgaggctgggtctggggaacctgtgctcagcattcca

SEQ ID NO: 206497 - DNA, 120 bp, Artificial Sequence
  ENSG00000115159_1 (sequence is synthesized)
ccccctggagcttgggcttggtcttccctgcgggtccctgcgctgacattcaggcggggagccaggaggcctggcgcgcctccagagcccgccgggggagccgggcgagggttctgggct

SEQ ID NO: 206498 - DNA, 120 bp, Artificial Sequence
  ENSG00000115159_2 (sequence is synthesized)
ctgacggcggggtcgcagggtcgcccgcctcctggacacgtctgtaggcctagggaagcctgccggccgggaggtacagagtaggagaagccagatcccagggcggacaacgagaagtcg

SEQ ID NO: 206499 - DNA, 120 bp, Artificial Sequence
  ENSG00000115159_3 (sequence is synthesized)
tcaggctaagaaatggcatttcaaaaggcagtgaaagggacgattcttgttggaggaggtgctcttgcaactgttttaggactttctcagtttgctcattacagaaggaaacaaatgaac

SEQ ID NO: 206500 - DNA, 120 bp, Artificial Sequence
  ENSG00000115159_4 (sequence is synthesized)
ctggcctatgttaaagcagcagactgcatttcagaaccagttaacagggagcctccttccagagaagctcagctactgactttgcaaaacacatctgaatttgatatccttgttattgga

SEQ ID NO: 206501 - DNA, 120 bp, Artificial Sequence
  ENSG00000115159_5 (sequence is synthesized)
ggaggagcaacaggaagtggctgtgcgctagatgctgtcaccagaggactaaaaacagcccttgtagaaagagatgatttctcatcagggaccagcagcagaagcactaaattgatccat

SEQ ID NO: 206502 - DNA, 120 bp, Artificial Sequence
  ENSG00000115159_6 (sequence is synthesized)
ggtggtgtgagatatctgcagaaggccatcatgaagttggatattgagcagtataggatggtaaaagaagcccttcatgagcgtgccaacctgctagaaattgctccccatttatcagct

SEQ ID NO: 206503 - DNA, 120 bp, Artificial Sequence
  ENSG00000115159_7 (sequence is synthesized)
ccattgcctataatgcttccagtttacaagtggtggcagttaccttactactgggtaggaatcaagctgtatgatttggttgcaggaagcaattgcctaaaaagcagttatgtcctcagc

SEQ ID NO: 206504 - DNA, 120 bp, Artificial Sequence
  ENSG00000115159_8 (sequence is synthesized)
aaatcaagagcccttgaacatttcccaatgctccagaaggacaaactggtaggagcaattgtctactatgacggacaacataacgatgcacggatgaaccttgccattgctctgactgct

SEQ ID NO: 206505 - DNA, 120 bp, Artificial Sequence
  ENSG00000115159_9 (sequence is synthesized)
gccaggtatggggctgccacagccaattacatggaggtagtgagcttgctcaagaagacagacccccagacagggaaagtgcgtgtgagcggcgcacggtgcaaggatgtcctcacaggg

SEQ ID NO: 206506 - DNA, 120 bp, Artificial Sequence
  ENSG00000115159_10 (sequence is synthesized)
caggaatttgacgtgagagccaaatgtgttatcaatgccacgggacctttcacggactctgtgcgcaaaatggatgataaagacgcagcagctatctgccagccaagtgctggtgtccat

SEQ ID NO: 206507 - DNA, 120 bp, Artificial Sequence
  ENSG00000115159_11 (sequence is synthesized)
attgtgatgcctggttattacagcccagagagcatgggacttcttgacccagcgaccagtgatgggcgagttattttcttcttaccctggcaaaagatgacgatcgctggcactactgat

SEQ ID NO: 206508 - DNA, 120 bp, Artificial Sequence
  ENSG00000115159_12 (sequence is synthesized)
actccaactgatgttacacaccatccaattccttcagaagaagatatcaacttcattttgaatgaagtgcgtaattacctgagttgtgatgttgaagtgagaagaggggatgtcctggca

SEQ ID NO: 206509 - DNA, 120 bp, Artificial Sequence
  ENSG00000115159_13 (sequence is synthesized)
gcatggagtggaatccgtcctcttgttacagaccccaaatctgcagatactcagtctatctcccgaaatcatgttgttgatatcagtgagagtggccttattactatagcaggtggaaag

SEQ ID NO: 206510 - DNA, 120 bp, Artificial Sequence
  ENSG00000115159_14 (sequence is synthesized)
tggacaacttatcggtctatggcagaagataccataaatgctgctgtcaaaactcataatttaaaagcaggaccaagtagaacagttgggcttttccttcaagggggtaaagattggagc

SEQ ID NO: 206511 - DNA, 120 bp, Artificial Sequence
  ENSG00000115159_15 (sequence is synthesized)
cccacactctacattaggcttgtgcaggattatggacttgaaagcgaggtggcacagcatcttgccgccacctatggtgataaggcctttgaggtggccaaaatggcaagtgtgactggc

SEQ ID NO: 206512 - DNA, 120 bp, Artificial Sequence
  ENSG00000115159_16 (sequence is synthesized)
aaaaggtggcctattgttggagtacgtcttgtgtcagaatttccatatattgaagcagaggtgaaatatgggattaaggagtatgcctgcactgctgtggatatgatttcacgtcgtact

SEQ ID NO: 206513 - DNA, 120 bp, Artificial Sequence
  ENSG00000115159_17 (sequence is synthesized)
cgcctggcctttctaaatgtccaggcagcagaggaagccctacccaggattgttgaactgatgggcagggaactgaattgggatgattataagaagcaggaacaacttgaaacagccagg

SEQ ID NO: 206514 - DNA, 120 bp, Artificial Sequence
  ENSG00000115159_18 (sequence is synthesized)
aagtttctatattatgaaatgggctataaatctcgatcagaacagttaacagatcgctctgaaattagcctactgccttcagacattgacaggtataagaagagatttcataagtttgat

SEQ ID NO: 206515 - DNA, 120 bp, Artificial Sequence
  ENSG00000115159_19 (sequence is synthesized)
gcagaccagaaaggctttattaccattgttgatgttcagcgtgtattagagagtatcaatgtccaaatggatgaaaatacactccatgaaattctaaatgaagttgatttgaataaaaat

SEQ ID NO: 206516 - DNA, 120 bp, Artificial Sequence
  ENSG00000115159_20 (sequence is synthesized)
ggacaggttgaactcaatgaatttttgcagctgatgagtgctattcaaaaaggaagggtatctggaagccggcttgctatactaatgaaaactgcagaagagaacctcgacagaagagtt

SEQ ID NO: 206517 - DNA, 120 bp, Artificial Sequence
  ENSG00000115159_21 (sequence is synthesized)
ccaattccagtggaccgtagttgtggaggattgtgagtctgggcagtaaatccacagccaacaaacatagaaacgacaaatcaccatgtaacaaccagagatgactgaaaccactctgaa

SEQ ID NO: 206518 - DNA, 120 bp, Artificial Sequence
  ENSG00000115159_22 (sequence is synthesized)
ataatgaatgtggatagctgccttttttaacactagaaaacattccaaaactttaaggtgttggtgtatttgccagctttatttgctgtactttatttgtatttgccattcagtctagct

SEQ ID NO: 206519 - DNA, 120 bp, Artificial Sequence
  ENSG00000115159_23 (sequence is synthesized)
tttaagtatatttttttctttttctcattttcaatgcacattagttttgcatctgttttgtgacctgttagatgtgacacattctctttttgtttattcccttattctaaatgagttcta

SEQ ID NO: 206520 - DNA, 120 bp, Artificial Sequence
  ENSG00000115159_24 (sequence is synthesized)
aaaacataatattttggcaaaaattgaaaaaagctggagacattttgtgacatgcatacagatagcatgtgttattaaaaagagttgcctattgaaatgatcatgtttctggagaaatta

SEQ ID NO: 206521 - DNA, 120 bp, Artificial Sequence
  ENSG00000115159_25 (sequence is synthesized)
gaaatgatagtgtttctggagatttctcagccccatcttcctccagcttgtctaccttcctcatgcaaacaatattccacatttttatatctagagcatgactggctaactggagaggga

SEQ ID NO: 206522 - DNA, 120 bp, Artificial Sequence
  ENSG00000115159_26 (sequence is synthesized)
aggaaaagtttagatctggttactggagcaagtctcaaagagaaactctgaaagcttccagaatcacaggtataagataaggatagcattgacatttgctgggagttacagtgatagttt

SEQ ID NO: 206523 - DNA, 120 bp, Artificial Sequence
  ENSG00000115159_27 (sequence is synthesized)
catctcagcagttcatttttttcttcagtcactgctggttttctttgactattatagttgccaggaagatccttgctcttcttactttaaaaccagcatttaagtggcaatttggatgta

SEQ ID NO: 206524 - DNA, 120 bp, Artificial Sequence
  ENSG00000115159_28 (sequence is synthesized)
ataggatgagaccaaatttatctaattattacagtagtaatacatttaagagttaaaaatgtgtttttatatatccacatatgataacaaaagattcaattcccaagcctaaattttgaa

SEQ ID NO: 206525 - DNA, 120 bp, Artificial Sequence
  ENSG00000115159_29 (sequence is synthesized)
gcatgtggtattgtcaaatctagcttaccatcttttttgggggtacttgcaaccatagtaaaggaagatggaatagactttagttaactttaattataattatatgttaaataaggcaca

SEQ ID NO: 206526 - DNA, 120 bp, Artificial Sequence
  ENSG00000115159_30 (sequence is synthesized)
taaccagtttccaaggtcatcatggttgcttaaagtctttccccttctgtactccatggaaatattctcagtaaaccaaaaacaaaaatggaaaaataatcaccaacccccatcccgaca

SEQ ID NO: 206527 - DNA, 120 bp, Artificial Sequence
  ENSG00000115159_31 (sequence is synthesized)
cacacacagagtccaaagcaaaagtcagtgtgtattgaatttaacaagtaatgcagtttgggatgcttttgctacattttggtggcattttaactagttatctgaatatttattaatcgt

SEQ ID NO: 206528 - DNA, 120 bp, Artificial Sequence
  ENSG00000115159_32 (sequence is synthesized)
acttcctcttgtaaagttaactacttacttttttgttgttgtttttttaacatcaggttctgtatctaataggagatgtaacactttatttcatggcaggtttttattgcagagacttga

SEQ ID NO: 206529 - DNA, 120 bp, Artificial Sequence
  ENSG00000115159_33 (sequence is synthesized)
agtcttagttttttaaactggcacataaaacactttttgctgttatttttatttatgtcaatactgcagagtatctttatgccttattcaagtggattctgagcctgtatgtcacaatgt

SEQ ID NO: 206530 - DNA, 120 bp, Artificial Sequence
  ENSG00000115159_34 (sequence is synthesized)
aaacactggaggttcactcacctacgcactcacccaccacctctgaaagaaacagaaactgcagagaaagacagcatcttagctcattttgtttttaaatgaggttttagacgcttgcca

SEQ ID NO: 206531 - DNA, 120 bp, Artificial Sequence
  ENSG00000115159_35 (sequence is synthesized)
cttcctaagggaaatcctaaaacagagcaagtgatgctcccaggtatcactgtgaacttttttctttcaaagtgtgaatttttacactggctttttcatttttttaaagtaattgaagct

SEQ ID NO: 206532 - DNA, 120 bp, Artificial Sequence
  ENSG00000115159_36 (sequence is synthesized)
tgtggctttacaacttagtgttttttgctatccagataacaagtttcattgtttagaacccagtgacacttaataggtagataaattgtcctttaaaatatcccagatgatatacacaat

SEQ ID NO: 206533 - DNA, 120 bp, Artificial Sequence
  ENSG00000115159_37 (sequence is synthesized)
atggtacatttgtgctctctctctctgtttttctctctttctctttctagttagatcaagataacgatgacttgtaccctccctgattctgttacagtagggcccgggcagatctgtgtt

SEQ ID NO: 206534 - DNA, 120 bp, Artificial Sequence
  ENSG00000115159_38 (sequence is synthesized)
tgttaaacaggccttgtttgtgcatgctttgctatgaatgaagttcctttaaggacaaagaaaagcacacttttcttcttttgagcatatctgcttttactttaaatctgctaatttcta

SEQ ID NO: 206535 - DNA, 120 bp, Artificial Sequence
  ENSG00000115159_39 (sequence is synthesized)
aaatgtagagtccttcaccaatcccagagactcaatttggaaatgaactgatttcaagccgttactgtgaataaagcaccccagcattttgtataagctcttaattaaacctgtacagct

SEQ ID NO: 206536 - DNA, 120 bp, Artificial Sequence
  ENSG00000115159_40 (sequence is synthesized)
tctttacctgatttaagaaagggagacaagcaataggggggaataagcttcttcaaaattcattccaagcacaaaagaaattttttccctttgcatataaacttgacatcagttgattct

SEQ ID NO: 206537 - DNA, 120 bp, Artificial Sequence
  ENSG00000115159_41 (sequence is synthesized)
gttggggtcggggtgggtatgcagggattgccttttattatcaagtgatttatttcaagagcctttgaggggattcaggtgaaggaacccccatctgtgctggagagttggatactcctt

SEQ ID NO: 206538 - DNA, 120 bp, Artificial Sequence
  ENSG00000115159_42 (sequence is synthesized)
taaatagcccccaccacagtcataacaataatgataatgctggattatttgttaagccaaggttgtctgcctcatatccatcatgctgtttgcaatattcttgctttcaatcaatttata

SEQ ID NO: 206539 - DNA, 120 bp, Artificial Sequence
  ENSG00000115159_43 (sequence is synthesized)
ctgagtgtaactttaggatttctgctattaaatgcatgctctctatcctgcttcagtttctggctttgctttgtctgtttcaaaatatgtagcttcctcttttgtacaacaaaaaactca

SEQ ID NO: 206540 - DNA, 120 bp, Artificial Sequence
  ENSG00000115159_44 (sequence is synthesized)
ttctcacttttactaaatatactgtaggagtcatcattgatgttatttttctcttatgtatctgtaaagatttttggcatatgaatgtaatattaaagtcaatgatgctataacttgcga

SEQ ID NO: 206541 - DNA, 120 bp, Artificial Sequence
  ENSG00000115159_45 (sequence is synthesized)
tgtttgcatcatgtcaacctttttgaaggagtgaaaaagccctactatgtttttaaatagcaagtgtaagctcagtgctagagtggatatacacaccgcatgttttcatatgtggcactt

SEQ ID NO: 206542 - DNA, 120 bp, Artificial Sequence
  ENSG00000115159_46 (sequence is synthesized)
ttatgtatcatgttgggttattgttctagactggactgttaaatactatgtttgaggctgggttgtcatttttataactgtcttggtgttttatggccattatttattacttttgataca

SEQ ID NO: 206543 - DNA, 120 bp, Artificial Sequence
  ENSG00000115159_47 (sequence is synthesized)
cagaatgagctgcatgcatttatagagcaataagaggatgtatttaatgtgccttgtttttaactgaataagaactggaagcatgaatcaataaaactgattaaaatggtctatttgcta

SEQ ID NO: 206544 - DNA, 120 bp, Artificial Sequence
  ENSG00000115159_48 (sequence is synthesized)
gcattttgatgttacttgcagtcagataactttgattactgttgaagtttaaaaaaagtttgaaaatatttttacaaactgtgtttttgatgacacaaaagtgaaatatctacagagata

SEQ ID NO: 206545 - DNA, 120 bp, Artificial Sequence
  ENSG00000115159_49 (sequence is synthesized)
gatgtaattttataagactgccagaattatttgtattaatttgttgctgtagcctttagggcatgacttctgtatttgtgcaatcctattctacaattacattcatcctattacaactca

SEQ ID NO: 206546 - DNA, 120 bp, Artificial Sequence
  ENSG00000115159_50 (sequence is synthesized)
gagtgacagccccgcgcgcctcgctgggagcacccgggccgaggctctgattctggggggaggccgactccaccctggctggaggaactgggtgctcctgcccgctggcccctcgcgcgt

SEQ ID NO: 206547 - DNA, 120 bp, Artificial Sequence
  ENSG00000115159_51 (sequence is synthesized)
tctctaagattatgttgagtttctaaaacttggtttgtgttaaatctgttcattgatttggagactgacagatataaaagatgtaaaacttttttacatgttcatagccttctatgaaga

SEQ ID NO: 206548 - DNA, 120 bp, Artificial Sequence
  ENSG00000115159_52 (sequence is synthesized)
gtgtggaagaatcacaacaatgaagagaagatatgtttcttggggagcatgttcaatctaattcaagtagatacatggagtcgtgaagataaattctgatcacaccgcattctggtcatc

SEQ ID NO: 206549 - DNA, 120 bp, Artificial Sequence
  ENSG00000115159_53 (sequence is synthesized)
attacctagttgaagaggtttattggagaagaactatcagtgttttaaagcagtggtcttcaaacgggggcacacaaagactttccaaggggggtacataaatataaatagttttaaggt

SEQ ID NO: 206550 - DNA, 120 bp, Artificial Sequence
  ENSG00000115159_54 (sequence is synthesized)
gattctggggggaggccgactccaccctggctggaggaactgggtgctcctgcccgctggcccctcgcgcgtgaggatctatctcaggtgtgtgcttcctgggagaccccttcccccgcc

SEQ ID NO: 206551 - DNA, 120 bp, Artificial Sequence
  ENSG00000115159_55 (sequence is synthesized)
tgcgctagatgctgtcaccagagggtcagcggaatcgacttaagaaactgtaaaactttaagaagagaactacgcctgtgagatttactagactgattttgaaaaagactactgataagg

SEQ ID NO: 206552 - DNA, 120 bp, Artificial Sequence
  ENSG00000115159_56 (sequence is synthesized)
attagtacagcacccagaggtcttcggagcaaagctgttaaagaagtggggtccatttgagccccaactttgccttccttaggtccccttgggcttgtctagccctaggagttccaacaa

SEQ ID NO: 206553 - DNA, 120 bp, Artificial Sequence
  ENSG00000115163_0 (sequence is synthesized)
ggacttctgccaagcaccggctcatgtgaggctcgcggcacagcgttctctgggctccccagaagccagcctttcgctcccggacccggcagcccgagcaggagccgtgggaccgggcgc

SEQ ID NO: 206554 - DNA, 120 bp, Artificial Sequence
  ENSG00000115163_1 (sequence is synthesized)
ccgccggagccgaaagcccgaggccccgaggaggcgcagcccgagcccgaccccgacccccggcccctcccggcggggcccctccttaggcgcttcctcccatcaacacagtcggcggag

SEQ ID NO: 206555 - DNA, 120 bp, Artificial Sequence
  ENSG00000115163_2 (sequence is synthesized)
ggcgcttcctcccatcaacacagtcggcggagacaaggttggctaaaggagatccgaaagcttcagaagagcacacacctcttgataaggaagctgcccttcagccgcctggcaagagaa

SEQ ID NO: 206556 - DNA, 120 bp, Artificial Sequence
  ENSG00000115163_3 (sequence is synthesized)
atatgtgttaaattcactcgtggtgtggacttcaattggcaagcccaggccctattggccctacaagaggcagcagaagcatttctagttcatctctttgaggacgcctatctcctcacc

SEQ ID NO: 206557 - DNA, 120 bp, Artificial Sequence
  ENSG00000115163_4 (sequence is synthesized)
ttacatgcaggccgagttactctcttcccaaaggatgtgcaactggcccggaggatccggggccttgaggagggactcggctgagctcctgcacccagtgtttctgtcagtctttcctgc

SEQ ID NO: 206558 - DNA, 120 bp, Artificial Sequence
  ENSG00000115163_5 (sequence is synthesized)
tctggactttgctgtctctgaacagtatgtgtgtgttgctttaaatatttttcttttttttgagaaggagaagactgcatgactttcctctgtaacagaggtaatatatgagacaatcaa

SEQ ID NO: 206559 - DNA, 120 bp, Artificial Sequence
  ENSG00000115163_6 (sequence is synthesized)
caccgttccaaaggcctgaaaataattttcagataaagagactccaaggttgactttagtttgtgagttactcatgtgactatttgaggattttgaaaacatcagatttgctgtggtatg

SEQ ID NO: 206560 - DNA, 120 bp, Artificial Sequence
  ENSG00000115163_7 (sequence is synthesized)
ggagaaaaggctatgtacttattattttagctctttctgtaatatttacattttttaccatatgtacatttgtacttttattttacacataagggaaaaaataagaccactttgagcagt

SEQ ID NO: 206561 - DNA, 120 bp, Artificial Sequence
  ENSG00000115163_8 (sequence is synthesized)
tgcctggaaggctgggcatttccatcatatagacctctgcccttcagagtagcctcaccattagtggcagcatcatgtaactgagtggactgtgcttgtcaacggatgtgtagcttttca

SEQ ID NO: 206562 - DNA, 120 bp, Artificial Sequence
  ENSG00000115163_9 (sequence is synthesized)
gaaacttaattggggatgaatagaaaacctgtaagctttgatgttctggttacttctagtaaattcctgtcaaaatcaattcagaaattctaacttggagaatttaacattttactcttg

SEQ ID NO: 206563 - DNA, 120 bp, Artificial Sequence
  ENSG00000115163_10 (sequence is synthesized)
taaatcatagaagatgtatcataacagttcagaattttaaagtacattttcgatgcttttatgggtatttttgtagtttctttgtagagagataataaaaatcaaaatatttaatgaaaa

SEQ ID NO: 206564 - DNA, 120 bp, Artificial Sequence
  ENSG00000115163_11 (sequence is synthesized)
ggagaccccgggtgacggggcccggcgccgctaactggagcgaaccccagcgtccgccgacatggcctggaccaagtaccagctgttcctggccgggctcatgcttgttaccggctccat

SEQ ID NO: 206565 - DNA, 82 bp, Artificial Sequence
  ENSG00000115163_12 (sequence is synthesized)
atctcggctcactgcaacctccaagaccctgtctctatttttttttaaataaagaaataaaaattctgtgtaacttcataaa

SEQ ID NO: 206566 - DNA, 120 bp, Artificial Sequence
  ENSG00000115165_0 (sequence is synthesized)
gtacttttagcttcccccatcctgcaaggccactcaaccatgtgctagctggagtgatctttattcacaatgtctttacaaaggctcctgcaacacagcagcaatggcaatttggcggac

SEQ ID NO: 206567 - DNA, 120 bp, Artificial Sequence
  ENSG00000115165_1 (sequence is synthesized)
ttctgcgctgggccagcgtatagctcttactccacactcaccggcagccttacgatggacgataatagaaggattcaaatgctagcagacacggtggctactctgcctcggggacgaaag

SEQ ID NO: 206568 - DNA, 120 bp, Artificial Sequence
  ENSG00000115165_2 (sequence is synthesized)
cagcttgctttgaccagatcaagttctttaagtgacttttcctggtctcaaagaaagcttgttactgtggagaagcaggataatgaaacatttggatttgaaattcagtcttacaggccc

SEQ ID NO: 206569 - DNA, 120 bp, Artificial Sequence
  ENSG00000115165_3 (sequence is synthesized)
cagaatcagaatgcctgctcctcggaaatgttcactttgatatgcaaaatacaggaggacagcccagctcactgtgctggcctgcaagctggtgatgtccttgcaaatatcaatggtgtg

SEQ ID NO: 206570 - DNA, 120 bp, Artificial Sequence
  ENSG00000115165_4 (sequence is synthesized)
agcacagaaggttttacctacaaacaagtcgttgacctgatcagatcgtccggaaacctgctaacgatagagactcttaatggaacaatgattctgaaaagaacggagcttgaagcaaag

SEQ ID NO: 206571 - DNA, 120 bp, Artificial Sequence
  ENSG00000115165_5 (sequence is synthesized)
ctgcaggttttaaagcaaactttgaaacaaaaatgggtggagtacagatctctgcagttacaggaacatcgtctgcttcatggtgatgcagctaattgccccagtttggaaaacatggac

SEQ ID NO: 206572 - DNA, 120 bp, Artificial Sequence
  ENSG00000115165_6 (sequence is synthesized)
ttggatgaattgtctttgtttggacccctgcctgggccaggcccagcccttgtggaccggaatcgattatccagtgagagcagctgtaagagctggctgagctccatgacgatggacagt

SEQ ID NO: 206573 - DNA, 120 bp, Artificial Sequence
  ENSG00000115165_7 (sequence is synthesized)
gaagatggctaccagacgtgtgtgtctgaggactccagcaggggtgccttcagtcggcagacgagtacagatgatgagtgctttatccccaaggagggggatgattttctgaggaggtca

SEQ ID NO: 206574 - DNA, 120 bp, Artificial Sequence
  ENSG00000115165_8 (sequence is synthesized)
tcttcaaggaggaaccggagcatcagtaacaccagcagcggatccatgtctcccttgtgggagggcaacttatcaagcatgtttgggaccctgccccggaagagcagaaagggaagtgtc

SEQ ID NO: 206575 - DNA, 120 bp, Artificial Sequence
  ENSG00000115165_9 (sequence is synthesized)
agaggaagaaagtcgcttttgacggattgtggtgtcctttcaaattagcttatttcacaaatatctctagactcacccagatcccagcttggtgggaaagtgcagaagaattgcaaaact

SEQ ID NO: 206576 - DNA, 120 bp, Artificial Sequence
  ENSG00000115165_10 (sequence is synthesized)
gacatcccatttcacagcaatagtgacctttatttaaattgttgtgttatagtttatgcttcttaaatcatttttcaacctaaacagccaatttctaagcagacaggaaaactaaataat

SEQ ID NO: 206577 - DNA, 120 bp, Artificial Sequence
  ENSG00000115165_11 (sequence is synthesized)
aagttaattaatataacaaagatgcaggttcctgctcattccagtaatgtctttgaaagcaaaactaatatttattttctagattatccctgtgaataattgagaactttttggagtcaa

SEQ ID NO: 206578 - DNA, 120 bp, Artificial Sequence
  ENSG00000115165_12 (sequence is synthesized)
gtatgaataaaggtgtggcagaatataataatctggactattttctataggataattgctgggttataaaatcttaggtttgcttatgcccagtagctcctgcggaggcttaataatagg

SEQ ID NO: 206579 - DNA, 120 bp, Artificial Sequence
  ENSG00000115165_13 (sequence is synthesized)
caattttgaatttgttcaaacctgtaatggcttgtaaacaaagatgaccatcagctgtttctcacatctatagtgacaataaagcgggaagtataagatttaataggaggggttaaggtt

SEQ ID NO: 206580 - DNA, 120 bp, Artificial Sequence
  ENSG00000115165_14 (sequence is synthesized)
catgagaaccatggaaagatgtggtctgagatgggtgctgcaaagatcataataaagtcatttttatagacagtctaaacaaaatgggtggggatgtcgtgttttttgcccaattcagct

SEQ ID NO: 206581 - DNA, 120 bp, Artificial Sequence
  ENSG00000115165_15 (sequence is synthesized)
tttgttctgcctgaacattaatggcaagtctagaactctccgaatcctacagctttgtaattttttttctacaaatgtctaacatccaaaactgagggttgggaaaaggacttccctcct

SEQ ID NO: 206582 - DNA, 120 bp, Artificial Sequence
  ENSG00000115165_16 (sequence is synthesized)
gtagtttttttcatattacttctcactttatatcttatattctaaatagctatcacctcagcagtcttttgcctattggttatgttagtatcacattacttctagcctttcaattactcc

SEQ ID NO: 206583 - DNA, 120 bp, Artificial Sequence
  ENSG00000115165_17 (sequence is synthesized)
atgttttatttaatatccattgaagtctatgaattctctgttctggtggcacagctattcataacctatattctagagtagacaatctggactatgtaataaatagtctgctgattttaa

SEQ ID NO: 206584 - DNA, 120 bp, Artificial Sequence
  ENSG00000115165_18 (sequence is synthesized)
ctttactgcctctctccagccagctccagcactacaggacagagattggaattaaatgtcacgtggaaaaaagccaacatggcattctgttaagaagatagacaacctaagtgacgtcta

SEQ ID NO: 206585 - DNA, 120 bp, Artificial Sequence
  ENSG00000115165_19 (sequence is synthesized)
tcctgcttcaaagacaaaactcaggaggctgtacattcatttagagcagagtagacgaaacctcctattctctggcttgggaaccaggaggaatcactgactgagatttgccaaccagac

SEQ ID NO: 206586 - DNA, 120 bp, Artificial Sequence
  ENSG00000115165_20 (sequence is synthesized)
ggaacatagctctccagactgttttttcctctctcttcctctctctctctctctctctctacgcacacacacagacgcacacacacagacacacacacagaatcttacatactacaattt

SEQ ID NO: 206587 - DNA, 120 bp, Artificial Sequence
  ENSG00000115165_21 (sequence is synthesized)
acataaatgtcagttatttttaattgtgacagttatttttaatgatagatctgtgccaaatgtgatactttaattttcatgcagtttcttttttaaacatttttattacagaaagcttgt

SEQ ID NO: 206588 - DNA, 120 bp, Artificial Sequence
  ENSG00000115165_22 (sequence is synthesized)
ttagagaatgatggagcctatgacttttattcagtgtgtggctgtttgggggtagtttttcagtgtgttgagtactattaaggaaagaaaacattgaagatgataacaaaacctctgcga

SEQ ID NO: 206589 - DNA, 120 bp, Artificial Sequence
  ENSG00000115165_23 (sequence is synthesized)
actttaggcaggtagtttggtgtgtgagctagtttcgaaccctgggaacattcctttccacatcgcctgagtctgacagcccggatcaaaaacaagcaggctttgtgtcaagacgtggca

SEQ ID NO: 206590 - DNA, 120 bp, Artificial Sequence
  ENSG00000115165_24 (sequence is synthesized)
ggtgtttagagggatgcagatgcttggccacccgtggaagtagctattggacagacacactcatccgtgaggacacatcaagctagatcctgaaggggagatagaagtgtcatataggca

SEQ ID NO: 206591 - DNA, 120 bp, Artificial Sequence
  ENSG00000115170_0 (sequence is synthesized)
gaagagatgtgggcctctggggccgctggattcagtaacttccgtcgggttctagactggctcggctctgtccagtttgtgccagatagtctcccaccccctccccacccctcctttccc

SEQ ID NO: 206592 - DNA, 120 bp, Artificial Sequence
  ENSG00000115170_1 (sequence is synthesized)
ctggagatttgaacgctgcttgcatgggagaaaagctacttagagaagaaaacgttccacttagtaacagaagaaaagtcttggttaaaaagttgtcatgaatttggcttttggagagag

SEQ ID NO: 206593 - DNA, 120 bp, Artificial Sequence
  ENSG00000115170_2 (sequence is synthesized)
gcagcaagcctggagcattggtaagcgtcacactgccaaagtgagagctgctggagaactcataatcccaggaacgcctcttctactctccgagtaccccagtgaccagagtgagagaag

SEQ ID NO: 206594 - DNA, 120 bp, Artificial Sequence
  ENSG00000115170_3 (sequence is synthesized)
ctctgaacgagggcacgcggcttgaaggactgtgggcagatgtgaccaagagcctgcattaagttgtacaatggtagatggagtgatgattcttcctgtgcttatcatgattgctctccc

SEQ ID NO: 206595 - DNA, 120 bp, Artificial Sequence
  ENSG00000115170_4 (sequence is synthesized)
ctcccctagtatggaagatgagaagcccaaggtcaaccccaaactctacatgtgtgtgtgtgaaggtctctcctgcggtaatgaggaccactgtgaaggccagcagtgcttttcctcact

SEQ ID NO: 206596 - DNA, 120 bp, Artificial Sequence
  ENSG00000115170_5 (sequence is synthesized)
gagcatcaacgatggcttccacgtctaccagaaaggctgcttccaggtttatgagcagggaaagatgacctgtaagaccccgccgtcccctggccaagccgtggagtgctgccaagggga

SEQ ID NO: 206597 - DNA, 120 bp, Artificial Sequence
  ENSG00000115170_6 (sequence is synthesized)
ctggtgtaacaggaacatcacggcccagctgcccactaaaggaaaatccttccctggaacacagaatttccacttggaggttggcctcattattctctctgtagtgttcgcagtatgtct

SEQ ID NO: 206598 - DNA, 120 bp, Artificial Sequence
  ENSG00000115170_7 (sequence is synthesized)
tttagcctgcctgctgggagttgctctccgaaaatttaaaaggcgcaaccaagaacgcctcaatccccgagacgtggagtatggcactatcgaagggctcatcaccaccaatgttggaga

SEQ ID NO: 206599 - DNA, 120 bp, Artificial Sequence
  ENSG00000115170_8 (sequence is synthesized)
cagcactttagcagatttattggatcattcgtgtacatcaggaagtggctctggtcttccttttctggtacaaagaacagtggctcgccagattacactgttggagtgtgtcgggaaagg

SEQ ID NO: 206600 - DNA, 120 bp, Artificial Sequence
  ENSG00000115170_9 (sequence is synthesized)
caggtatggtgaggtgtggaggggcagctggcaaggggagaatgttgccgtgaagatcttctcctcccgtgatgagaagtcatggttcagggaaacggaattgtacaacactgtgatgct

SEQ ID NO: 206601 - DNA, 120 bp, Artificial Sequence
  ENSG00000115170_10 (sequence is synthesized)
gaggcatgaaaatatcttaggtttcattgcttcagacatgacatcaagacactccagtacccagctgtggttaattacacattatcatgaaatgggatcgttgtacgactatcttcagct

SEQ ID NO: 206602 - DNA, 120 bp, Artificial Sequence
  ENSG00000115170_11 (sequence is synthesized)
tactactctggatacagttagctgccttcgaatagtgctgtccatagctagtggtcttgcacatttgcacatagagatatttgggacccaagggaaaccagccattgcccatcgagattt

SEQ ID NO: 206603 - DNA, 120 bp, Artificial Sequence
  ENSG00000115170_12 (sequence is synthesized)
cagatttgggcctggcagtcatgcattcccagagcaccaatcagcttgatgtggggaacaatccccgtgtgggcaccaagcgctacatggcccccgaagttctagatgaaaccatccagg

SEQ ID NO: 206604 - DNA, 120 bp, Artificial Sequence
  ENSG00000115170_13 (sequence is synthesized)
tggattgtttcgattcttataaaagggtcgatatttgggcctttggacttgttttgtgggaagtggccaggcggatggtgagcaatggtatagtggaggattacaagccaccgttctacg

SEQ ID NO: 206605 - DNA, 120 bp, Artificial Sequence
  ENSG00000115170_14 (sequence is synthesized)
atgtggttcccaatgacccaagttttgaagatatgaggaaggtagtctgtgtggatcaacaaaggccaaacatacccaacagatggttctcagacccgacattaacctctctggccaagc

SEQ ID NO: 206606 - DNA, 120 bp, Artificial Sequence
  ENSG00000115170_15 (sequence is synthesized)
taatgaaagaatgctggtatcaaaatccatccgcaagactcacagcactgcgtatcaaaaagactttgaccaaaattgataattccctcgacaaattgaaaactgactgttgacattttc

SEQ ID NO: 206607 - DNA, 120 bp, Artificial Sequence
  ENSG00000115170_16 (sequence is synthesized)
atagtgtcaagaaggaagatttgacgttgttgtcattgtccagctgggacctaatgctggcctgactggttgtcagaatggaatccatctgtctccctccccaaatggctgctttgacaa

SEQ ID NO: 206608 - DNA, 120 bp, Artificial Sequence
  ENSG00000115170_17 (sequence is synthesized)
ggcagacgtcgtacccagccatgtgttggggagacatcaaaaccaccctaacctcgctcgatgactgtgaactgggcatttcacgaactgttcacactgcagagactaatgttggacaga

SEQ ID NO: 206609 - DNA, 120 bp, Artificial Sequence
  ENSG00000115170_18 (sequence is synthesized)
cactgttgcaaaggtagggactggaggaacacagagaaatcctaaaagagatctgggcattaagtcagtggctttgcatagctttcacaagtctcctagacactccccacgggaaactca

SEQ ID NO: 206610 - DNA, 120 bp, Artificial Sequence
  ENSG00000115170_19 (sequence is synthesized)
aggaggtggtgaatttttaatcagcaatattgcctgtgcttctcttctttattgcactaggaattctttgcattccttacttgcactgttactcttaattttaaagacccaacttgccaa

SEQ ID NO: 206611 - DNA, 120 bp, Artificial Sequence
  ENSG00000115170_20 (sequence is synthesized)
aatgttggctgcgtactccactggtctgtctttggataataggaattcaatttggcaaaacaaaatgtaatgtcagactttgctgcattttacacatgtgctgatgtttacaatgatgcc

SEQ ID NO: 206612 - DNA, 120 bp, Artificial Sequence
  ENSG00000115170_21 (sequence is synthesized)
gaacattaggaattgtttatacacaactttgcaaattatttattacttgtgcacttagtagtttttacaaaactgctttgtgcatatgttaaagcttatttttatgtggtcttatgattt

SEQ ID NO: 206613 - DNA, 120 bp, Artificial Sequence
  ENSG00000115170_22 (sequence is synthesized)
tattacagaaatgtttttaacactatactctaaaatggacattttcttttattatcagttaaaatcacattttaagtgcttcacatttgtatgtgtgtagactgtaactttttttcagtt

SEQ ID NO: 206614 - DNA, 120 bp, Artificial Sequence
  ENSG00000115170_23 (sequence is synthesized)
catatgcagaacgtatttagccattacccacgtgacaccaccgaatatattactgatttagaagcaaagatttcagtagaattttagtcctgaacgctacggggaaaatgcattttcttc

SEQ ID NO: 206615 - DNA, 120 bp, Artificial Sequence
  ENSG00000115170_24 (sequence is synthesized)
agaattatccattacgtgcatttaaactctgccagaaaaaaataactattttgttttaatctactttttgtatttagtagttatttgtataaattaaataaactgttttcaagtcaaaca

SEQ ID NO: 206616 - DNA, 120 bp, Artificial Sequence
  ENSG00000115170_25 (sequence is synthesized)
gataaacggatccagggcctggttttcagttctataggacttgtccaagaagctatttgtattcatctatcatgaaagatcaaattacatgctaatattctgaaagtaacaccccgccag

SEQ ID NO: 206617 - DNA, 120 bp, Artificial Sequence
  ENSG00000115170_26 (sequence is synthesized)
aaaccctccagcagcagtgaagtctatataaaaccaagccttggcaatttgcacattgccagttccgacagagtgtggtgttaaaaatatttaacaggtcatttttgaaccgtagaaaag

SEQ ID NO: 206618 - DNA, 90 bp, Artificial Sequence
  ENSG00000115170_27 (sequence is synthesized)
gaagcgaatagcgtttcagagatattgggcggctcaagggtcttactctgtcgcccagtctgtaatgcagtgctgtgaccatagccagtc

SEQ ID NO: 206619 - DNA, 88 bp, Artificial Sequence
  ENSG00000115170_28 (sequence is synthesized)
ctgcagcgcccggctgcctcgcactccgcctcccccggctcagcccccggccgcggcgggacccggaatggcgtgatctcggctcacc

SEQ ID NO: 206620 - DNA, 120 bp, Artificial Sequence
  ENSG00000115170_29 (sequence is synthesized)
gcccccggccgcggcgggacccgaggtgggctcagccttctttccttcaattcctgtttcagtctcattttcatggactggtccccaaacttgtctgcattggaagcacctggggagttt

SEQ ID NO: 206621 - DNA, 120 bp, Artificial Sequence
  ENSG00000115183_0 (sequence is synthesized)
gcagctgctggagcggcggccgcctcgggagccggaggagaggcagccgcggagcgccgagctggcctcgccccgaggcccggccctgggtgtggggaaccgcgctgaggagctggaaac

SEQ ID NO: 206622 - DNA, 120 bp, Artificial Sequence
  ENSG00000115183_1 (sequence is synthesized)
ggagctggaaactttcccggcaggagctgactgctgggcaggaacgtctctcaggagaaagagtggaagagaaaattgtgaactaaggccccctgcccccttttcctggtgcatgtgaag

SEQ ID NO: 206623 - DNA, 120 bp, Artificial Sequence
  ENSG00000115183_2 (sequence is synthesized)
ttatcaaaaacagaaacaagtgttgaaaatgttaaaggctgtgctgaagaagagccgagagggaggaaagggaggcaagaaggaagcaggaagtgactttggtccagagacttctccagt

SEQ ID NO: 206624 - DNA, 120 bp, Artificial Sequence
  ENSG00000115183_3 (sequence is synthesized)
cctgcaccttgaccacagtgctgactctcctgtgagcagtcttcccacagcagaggacacctatagggtgagcttggccaaaggtgtctcgatgtctctgccttcctcacctttgctgcc

SEQ ID NO: 206625 - DNA, 120 bp, Artificial Sequence
  ENSG00000115183_4 (sequence is synthesized)
tcgacagtctcacttggtgcaatcaagagtgaacaaaaaatccccaggtcccgtcaggaagcccaagtatgtggaaagccccagagtgcctggagatgcagttataatgccattcagaga

SEQ ID NO: 206626 - DNA, 120 bp, Artificial Sequence
  ENSG00000115183_5 (sequence is synthesized)
agtagccaagccaacagagcctgatgagcatgaagcaaaggccgataatgaaccgagctgttcgccggcagctcaagaactgttgacaaggctgggatttttactgggagaagggatccc

SEQ ID NO: 206627 - DNA, 120 bp, Artificial Sequence
  ENSG00000115183_6 (sequence is synthesized)
aagtgccacacacataaccattgaagacaaaaatgaaaccatgtgcacagctctgagtcaaggcatcagtccttgctccacactaacaagcagcaccgcatctcctagcaccgatagccc

SEQ ID NO: 206628 - DNA, 120 bp, Artificial Sequence
  ENSG00000115183_7 (sequence is synthesized)
ctgctcaaccttgaatagctgtgtcagcaagacggcagccaacaaaagtccctgtgagaccattagcagccctagttccaccctggaaagcaaggacagtggaattatagccacaattac

SEQ ID NO: 206629 - DNA, 120 bp, Artificial Sequence
  ENSG00000115183_8 (sequence is synthesized)
aagttcatccgaaaatgatgaccggagtggctccagtttggaatggaataaagatggaaacctaagattaggggttcagaagggagtgcttcatgaccgcagggcagataactgctcccc

SEQ ID NO: 206630 - DNA, 120 bp, Artificial Sequence
  ENSG00000115183_9 (sequence is synthesized)
agtggcagaagaggagaccaccgggtcagcagagagcacgctgcccaaagcagaatcctcagctggagatggtccagtcccttattctcagggctccagctcactaataatgccacggcc

SEQ ID NO: 206631 - DNA, 120 bp, Artificial Sequence
  ENSG00000115183_10 (sequence is synthesized)
caactcagttgcagcaacaagctcaaccaaattggaagatctgagttatttagacgggcagagaaatgctcctctacggacgtcaattagattaccatggcacaatacggccggaggtag

SEQ ID NO: 206632 - DNA, 120 bp, Artificial Sequence
  ENSG00000115183_11 (sequence is synthesized)
ggcacaggaagttaaagcacgatttgctccctacaagccacaagacattttgttgaaacccttgttgtttgaagtaccaagcataacaacagactctgtgtttgtgggaagggattggct

SEQ ID NO: 206633 - DNA, 120 bp, Artificial Sequence
  ENSG00000115183_12 (sequence is synthesized)
ctttcaccagatagaagaaaacttgaggaacacagaactggcagaaaacagaggcgcggtggtggttggcaatgtgggatttgggaagacggcaatcatttccaagttggtggccctgag

SEQ ID NO: 206634 - DNA, 120 bp, Artificial Sequence
  ENSG00000115183_13 (sequence is synthesized)
ctgccacggaagccgcatgaggcagattgcttccaacagcccgggttcatcacctaaaacctctgaccccactcaggatcttcatttcactccgttgctttcaccgagttcttccacaag

SEQ ID NO: 206635 - DNA, 120 bp, Artificial Sequence
  ENSG00000115183_14 (sequence is synthesized)
tgcttccagcacagctaaaacacctcttgggtctatcagtgctgaaaaccagagaccaagagaggatgcagtgaaatatcttgcttctaaggtggtggcctaccactactgccaggctga

SEQ ID NO: 206636 - DNA, 120 bp, Artificial Sequence
  ENSG00000115183_15 (sequence is synthesized)
caacacgtacacttgcctggtgcccgagtttgtgcacagcatcgcagctttgctctgccggtcccatcagctggccgcctacagagaccttctgataaaggagccccaactacagagcat

SEQ ID NO: 206637 - DNA, 120 bp, Artificial Sequence
  ENSG00000115183_16 (sequence is synthesized)
gctgagcctccgatcctgtgtgcaggacccggtggcagctttcaagaggggagtgctggagccactcacaaacctgagaaatgagcagaaaattcctgaagaagaatacattattttgat

SEQ ID NO: 206638 - DNA, 120 bp, Artificial Sequence
  ENSG00000115183_17 (sequence is synthesized)
agatggcttaaatgaagctgagtttcataaacctgattatggagatacgctttcttcatttattaccaaaattatttctaaatttcctgcctggttgaagttgattgtgactgtaagagc

SEQ ID NO: 206639 - DNA, 120 bp, Artificial Sequence
  ENSG00000115183_18 (sequence is synthesized)
aaattttcaggaaatcataagtgcgctgccatttgtcaagctttccttagatgacttcccagacaacaaagacatccacagtgacctgcacgcctacgtccagcacagggtgcacagcag

SEQ ID NO: 206640 - DNA, 120 bp, Artificial Sequence
  ENSG00000115183_19 (sequence is synthesized)
ccaggacatcctcagcaacatctccctgaatggcaaggccgatgccacactcattggaaaagtgagcagccacctggtgctgcggagcctcggctcctacctgtacctcaagctcaccct

SEQ ID NO: 206641 - DNA, 120 bp, Artificial Sequence
  ENSG00000115183_20 (sequence is synthesized)
ggaccttttccagaggggccacttggtcattaagagtgccagctacaaggtggtgcccgtgtctctctctgagctctatttgcttcagtgcaacatgaagttcatgacccagtccgcctt

SEQ ID NO: 206642 - DNA, 120 bp, Artificial Sequence
  ENSG00000115183_21 (sequence is synthesized)
tgagagggcacttccgattctcaacgtggccctcgcatccctccaccccatgacagacgagcagatctttcaggctattaatgctggccacatccagggggagcagggatgggaagactt

SEQ ID NO: 206643 - DNA, 120 bp, Artificial Sequence
  ENSG00000115183_22 (sequence is synthesized)
tcagcagaggatggacgccctctcctgcttcctcattaagaggcgagacaaaacccgcatgttctgccacccgtccttcagggagtggcttgtatggagagcagacggggaaaacacggc

SEQ ID NO: 206644 - DNA, 120 bp, Artificial Sequence
  ENSG00000115183_23 (sequence is synthesized)
cttcctgtgtgagcccaggaacgggcacgcgctcttggcattcatgttctcgcgtcaggagggcaagttgaaccgccagcagaccatggagcttggccaccacatcctgaaggcgcacat

SEQ ID NO: 206645 - DNA, 120 bp, Artificial Sequence
  ENSG00000115183_24 (sequence is synthesized)
tttcaagggcctcagtaagaagacgggaatttcttcaagccatctccaagccctgtggatcggctacagcaccgaggggctgtccgccgccctggcctctctcaggaatctctatactcc

SEQ ID NO: 206646 - DNA, 120 bp, Artificial Sequence
  ENSG00000115183_25 (sequence is synthesized)
caacgtgaaggtgagccgtctcctgattttgggaggggccaacgtgaactacaggacagaagtgttaaataatgccccaatcctgtgcgtccagtctcaccttggccacgaggaagttgt

SEQ ID NO: 206647 - DNA, 120 bp, Artificial Sequence
  ENSG00000115183_26 (sequence is synthesized)
cactctgctcctggaatttggtgcctgcctggacggaacgtcagagaacggcatgactgccctctgttacgcagcagctgctggccacatgaagctggtgtgtctgctgaccaagaaggg

SEQ ID NO: 206648 - DNA, 120 bp, Artificial Sequence
  ENSG00000115183_27 (sequence is synthesized)
agtgagagtggaccacttggataagaagggccagtgtgcgcttgtccacagtgccctacggggccacggtgacattctccagtacctgctgacttgtgagtggtcgccgggtcctcccca

SEQ ID NO: 206649 - DNA, 120 bp, Artificial Sequence
  ENSG00000115183_28 (sequence is synthesized)
gccaggcaccctgaggaagagccacgccctgcagcaggcgctgaccgcggcggccagcatgggccacagctcggtggtccagtgcttgctggggatggagaaggaacatgaagtagaagt

SEQ ID NO: 206650 - DNA, 120 bp, Artificial Sequence
  ENSG00000115183_29 (sequence is synthesized)
caatggcaccgacacattgtggggagaaacagccctgactgccgccgcaggaagagggaagctggaggtctgtgagctgctgctggggcatggagctgctgtgtcgcggacaaacaggag

SEQ ID NO: 206651 - DNA, 120 bp, Artificial Sequence
  ENSG00000115183_30 (sequence is synthesized)
aggggttccacctttgttttgtgcagcacgccaggggcattggcagattgttagactgctgttggaacgcggctgtgatgtgaacctaagtgacaagcaaggccggacgcccctcatggt

SEQ ID NO: 206652 - DNA, 120 bp, Artificial Sequence
  ENSG00000115183_31 (sequence is synthesized)
tcttctctagacaaagagggtctgtcagcattaagctgggcttgtctgaaaggtcacagggcagtggtccagtatctggttgaagaaggagctgcaatagaccagacagacaagaatggc

SEQ ID NO: 206653 - DNA, 120 bp, Artificial Sequence
  ENSG00000115183_32 (sequence is synthesized)
cgcacacccttggacctggctgccttctatggcgatgccgagactgtgctgtacctggtggagaagggagccgtgatcgagcatgtggaccacagcgggatgcggcccttggacagagcc

SEQ ID NO: 206654 - DNA, 120 bp, Artificial Sequence
  ENSG00000115183_33 (sequence is synthesized)
atcggctgccggaacacatctgtagtggtggcgctactcagaaagggagccaagttaggaaatgctgcttgggcgatggccacttccaaacctgatatcttgattatacttttacagaaa

SEQ ID NO: 206655 - DNA, 120 bp, Artificial Sequence
  ENSG00000115183_34 (sequence is synthesized)
ttaatggaggaaggaaatgtgatgtacaaaaaagggaaaatgaaagaggcagcccagaggtaccagtatgccttaagaaagtttcctcgagaaggattcggagaggacatgagacccttc

SEQ ID NO: 206656 - DNA, 120 bp, Artificial Sequence
  ENSG00000115183_35 (sequence is synthesized)
aatgaattaagggtttccctctatctcaatttgtcgcgatgccgaagaaaaacaaatgactttggcatggcagaggaatttgcttccaaggctctcgaattgaagcccaagtcctatgaa

SEQ ID NO: 206657 - DNA, 120 bp, Artificial Sequence
  ENSG00000115183_36 (sequence is synthesized)
gccttttatgccagagcaagagcgaagagaaatagcaggcaattcgtggcagctctggctgacctgcaagaggctgtgaaactctgtcccaccaatcaggaagtcaagaggcttctggcc

SEQ ID NO: 206658 - DNA, 120 bp, Artificial Sequence
  ENSG00000115183_37 (sequence is synthesized)
cgcgtagaagaggagtgcaaacaactccagaggagtcaacagcaaaaacagcagggcccgctaccagctccactcaacgactccgagaacgaagaggacaccccaacccctggcttaagt

SEQ ID NO: 206659 - DNA, 120 bp, Artificial Sequence
  ENSG00000115183_38 (sequence is synthesized)
gaccactttcactctgaggagactgaagaggaagaaacttctccccaggaagaatctgtttccccaactcccaggtcccagccatcctcatctgtcccttcctcatacatccgaaacctt

SEQ ID NO: 206660 - DNA, 120 bp, Artificial Sequence
  ENSG00000115183_39 (sequence is synthesized)
caagaagggttacagtccaaaggaaggccggtatcgccacagagcagggcaggaatcggcaagtccctgagagagcctgtggcccagccagggctgctcctgcagccctccaagcaggcc

SEQ ID NO: 206661 - DNA, 120 bp, Artificial Sequence
  ENSG00000115183_40 (sequence is synthesized)
cagatcgtgaaaaccagccagcacctgggctctggccagtcggcagtgagaaatggcagtatgaaagttcagatctcttctcagaaccctcctccaagtcccatgccagggagaatcgct

SEQ ID NO: 206662 - DNA, 120 bp, Artificial Sequence
  ENSG00000115183_41 (sequence is synthesized)
gccactcctgctgggagcagaacccagcatttagagggaacaggtactttcactacaagagctggttgtggccactttggggatcggctgggccccagccagaatgtccgcctgcagtgt

SEQ ID NO: 206663 - DNA, 120 bp, Artificial Sequence
  ENSG00000115183_42 (sequence is synthesized)
ggtgagaatggccctgcacaccctttaccaagtaagacgaaaaccacagagaggcttctgtctcattcctccgtggctgtggacgcagcccctccaaaccaaggtgggctggcgacctgc

SEQ ID NO: 206664 - DNA, 120 bp, Artificial Sequence
  ENSG00000115183_43 (sequence is synthesized)
agcgacgtgcgacacccagcttccctcaccagctcaggctcttctggttctccatccagcagcataaagatgtcaagttcaaccagtagtttgacttcgagcagcagtttttcagatggc

SEQ ID NO: 206665 - DNA, 120 bp, Artificial Sequence
  ENSG00000115183_44 (sequence is synthesized)
ttcaaggtccaaggaccagatactagaattaaagacaaggttgtaacccacgttcagagcggtacagctgagcacagaccccgcaacacgccgttcatgggcatcatggataagactgcg

SEQ ID NO: 206666 - DNA, 120 bp, Artificial Sequence
  ENSG00000115183_45 (sequence is synthesized)
aggttccaacagcagagcaatcctccaagccgcagctggcactgtccggcaccagaggggctgctgacaaacacgtcttctgcagctggcctgcagtctgctaacactgagaagccctct

SEQ ID NO: 206667 - DNA, 120 bp, Artificial Sequence
  ENSG00000115183_46 (sequence is synthesized)
ctcatgcaagtgggaggatataataaccaagccaaaacctgttctgtttctaccctgagtgcaagtgtccacaatggggcacaagtgaaggagctagaagaaagcaagtgccaaattcca

SEQ ID NO: 206668 - DNA, 120 bp, Artificial Sequence
  ENSG00000115183_47 (sequence is synthesized)
gtccactctcaagagaacaggataactaagactgtttctcatctgtaccaggaaagtatctccaaacagcagcctcatattagtaatgaagcccacaggagccacctcactgcagccaaa

SEQ ID NO: 206669 - DNA, 120 bp, Artificial Sequence
  ENSG00000115183_48 (sequence is synthesized)
ccaaagcgatcatttatagagtcaaatgtgtgaaccttaagaaatccccatttgtggaatttggaaacgtgtgttgactcctggtggtaaattaaatagtttttttcatcagaaaaatta

SEQ ID NO: 206670 - DNA, 120 bp, Artificial Sequence
  ENSG00000115183_49 (sequence is synthesized)
ttttttagccattttttttctttggggtggatctgatgccattgatatatctaaaatgtgggataaaacttctttaatagctagaaatcaccataaataagaatgctaaacagaattgaa

SEQ ID NO: 206671 - DNA, 120 bp, Artificial Sequence
  ENSG00000115183_50 (sequence is synthesized)
aattatatcaacttaaaattttaagacagcccagaagacattaatgactctcacttatgaaattgtttggcttttgccactttcttccttgcctttgctatatggtagaatcacagaact

SEQ ID NO: 206672 - DNA, 120 bp, Artificial Sequence
  ENSG00000115183_51 (sequence is synthesized)
tacttagagaataaatatgtctattgttcaagagtaacaggtttaactcatgaccaagtgatgtacatccaagtgatgtattctggaaacgatggaattttacagttacagttccattga

SEQ ID NO: 206673 - DNA, 120 bp, Artificial Sequence
  ENSG00000115183_52 (sequence is synthesized)
gtcaaatcccattttatatatacataaaaattaagttctgagtgagttctagctaaatataagtgcgactgtaaacgcagccaatttttttaagcagaatatgagaacacctaagtattc

SEQ ID NO: 206674 - DNA, 120 bp, Artificial Sequence
  ENSG00000115183_53 (sequence is synthesized)
tcttcatagcagttcctataaagggattaaacacttatttctgtgttatggttcttattcatatatttttatagcacttttggaacctatatttgtgcttgaaggtgtttttgatatttg

SEQ ID NO: 206675 - DNA, 120 bp, Artificial Sequence
  ENSG00000115183_54 (sequence is synthesized)
gaaacagtataagccatttggagtcatgattggtggtcaagtggattcaagctaaaatactaagaccagcattcttagtggcgcttataaattagctctcacctggtttccaaactgctt

SEQ ID NO: 206676 - DNA, 120 bp, Artificial Sequence
  ENSG00000115183_55 (sequence is synthesized)
ttaacaatggtagtgctcctggaacaatccttccaagctcctctaaggacaatatttaattcagatactaaaggtaagactggttgttacttttgttttgttgtacaattagtactttat

SEQ ID NO: 206677 - DNA, 120 bp, Artificial Sequence
  ENSG00000115183_56 (sequence is synthesized)
agtcacatgttgtatatattaaatagcccagttttattcagacttgtaaatagaactatttcaatgtagttaatctaaaaacaaaaaagaaaaccccagtcacgatttgcatgttctctg

SEQ ID NO: 206678 - DNA, 120 bp, Artificial Sequence
  ENSG00000115183_57 (sequence is synthesized)
taagcttcatccatgctggttattgcactgaatgatatattattagggcatgttaacagtataccagtaacagcactttatctcatttatatgaacacctttgaggtgctacttaagtcc

SEQ ID NO: 206679 - DNA, 120 bp, Artificial Sequence
  ENSG00000115183_58 (sequence is synthesized)
aagctctgatgtattattcatttgtaaagataaggtacaggaatgaaccttggtttaaaggtatttttatatgaaaatggtgtgttattggaagatgttaaaatgctaatttgagagaag

SEQ ID NO: 206680 - DNA, 120 bp, Artificial Sequence
  ENSG00000115183_59 (sequence is synthesized)
taggagtgtatctgttttatatgttgggatgtgaaatttattttctaaaattgaggagaaggaagttatatatttgcagaatgttttaaagtgaattgttgtaatgaagttcctgtgaac

SEQ ID NO: 206681 - DNA, 120 bp, Artificial Sequence
  ENSG00000115183_60 (sequence is synthesized)
atcattatggttttgtacaaataggaacctctgatgtcattcttcaacgtttgttcctgtgtgtacaattgtactttgtatgaacagctttatcatttttataggctttccatgagtttt

SEQ ID NO: 206682 - DNA, 120 bp, Artificial Sequence
  ENSG00000115183_61 (sequence is synthesized)
gctgtaactactatggcttatttattttctttaatatttgtgaaagtcttactcctttgttagttttgtttctgcacaactactgtacttttccatatggaataaagactattaatagaa

SEQ ID NO: 206683 - DNA, 120 bp, Artificial Sequence
  ENSG00000115183_62 (sequence is synthesized)
gaggaagacactacattgcatacctcttcagaggatgaacgaagcaataaccatcttctccctttccttgagcagggaagccattgttcagttaaatgagttctgggctgttgtgtattg

SEQ ID NO: 206684 - DNA, 120 bp, Artificial Sequence
  ENSG00000115183_63 (sequence is synthesized)
aaatttatttcaacagtttggttctgggtttttgcagtggggaggtagggaaaagcagaaagaagcagaacgtaagaaaatgtccacattaaccttctagtcaccacccagagaataatg

SEQ ID NO: 206685 - DNA, 120 bp, Artificial Sequence
  ENSG00000115183_64 (sequence is synthesized)
gccacatgaattaaagaggctaaaagaatgccttcataatgctaccagtacttttacctttatagcaccgttcttctcatctggttgctttggtatacgctttcctgtgcctttttagct

SEQ ID NO: 206686 - DNA, 120 bp, Artificial Sequence
  ENSG00000115183_65 (sequence is synthesized)
gttgagattttggagggtcagtggggtgaggaaaagatttataggagatgaggcagagacaaaataagatgagatcaaatggtccatctatcaggaaagcacttcccctccaagggagca

SEQ ID NO: 206687 - DNA, 120 bp, Artificial Sequence
  ENSG00000115183_66 (sequence is synthesized)
gcagcatgcaccctgccacctcccagatgtgatgtgtgcatctgaatagcaatgcaggatggagcttctaccctggtgaaggtctctgcactgcaagggagggtgtcatgcattgattga

SEQ ID NO: 206688 - DNA, 120 bp, Artificial Sequence
  ENSG00000115183_67 (sequence is synthesized)
attgaatcaggttgcagtgttcgtgaaacatcacaaaaacagagctcccaggtcttccgtacagaggtcaaataacccatttgtcttctgcagacttcaaatgaaaggaagtctgcctgt

SEQ ID NO: 206689 - DNA, 120 bp, Artificial Sequence
  ENSG00000115183_68 (sequence is synthesized)
ttgccatttctgttgtacaaatgtgcatcctcactaaattattgctaagactgaccttttaataaaaaggaaaatcacaaaggaggggaaccgaacaaagatactgctttctcaaaattt

SEQ ID NO: 206690 - DNA, 120 bp, Artificial Sequence
  ENSG00000115183_69 (sequence is synthesized)
ggaagaccacatatacatttatatagataaagctccatgaatccatatctatacacacatatctctttagattttttttttaaaacttccgttttcctgttcttagttttattgttttag

SEQ ID NO: 206691 - DNA, 120 bp, Artificial Sequence
  ENSG00000115183_70 (sequence is synthesized)
agtctgccagcgcctgctctgttctttgcaggcagcactgactccatgtgtagctgagagagtggagcattggcttttacattccttgatgtttactttataacagtcagctcatttgtt

SEQ ID NO: 206692 - DNA, 120 bp, Artificial Sequence
  ENSG00000115183_71 (sequence is synthesized)
gaggagcggtgagctcccgattgtagaagcctagacagcacagagagtgacctgctcccaggttaggaagtaagatgtcagatgtttgcagatctctgtctcagtctcacttaatcacca

SEQ ID NO: 206693 - DNA, 120 bp, Artificial Sequence
  ENSG00000115183_72 (sequence is synthesized)
ttatacacaatgtgtaagtagctcacggtgtttctgcggggagggtgtggaaagcagaggctggtgttgaaggacagtctggagtggtatcagtggccaggaaccacgccagagaggaac

SEQ ID NO: 206694 - DNA, 120 bp, Artificial Sequence
  ENSG00000115183_73 (sequence is synthesized)
cacagcctcttgctgtggggtggggccgggtagtgctgctgaaagctcccccaggtgactctgagcagcagcggaggctgagccactgttctagagccaccagtcagctgtgtggggaaa

SEQ ID NO: 206695 - DNA, 120 bp, Artificial Sequence
  ENSG00000115183_74 (sequence is synthesized)
tggccaccacagcaagtttctgtgaagaagtagtagtatgatttcatggagacaaactaggacgatacttgaggattgtgtgggggaccctgagtagggaaagccctttccacgtggctg

SEQ ID NO: 206696 - DNA, 120 bp, Artificial Sequence
  ENSG00000115183_75 (sequence is synthesized)
gctttgacacaaacacaccattccagatgtggggagggtcactattttggtttgatgtatggagcccttggtcaggagcagctctgggtagggcactgtgatgaaaatgctattcactaa

SEQ ID NO: 206697 - DNA, 120 bp, Artificial Sequence
  ENSG00000115183_76 (sequence is synthesized)
tactgtcaagcagtgaatagtgccaggaactatccaagcagtttcgccctctgccttaatccctaccacagccctgaaagtctcagtgacaatcccatgattttacagatgaggaaacca

SEQ ID NO: 206698 - DNA, 120 bp, Artificial Sequence
  ENSG00000115183_77 (sequence is synthesized)
aggcaccgagcagctaaatggcttcccccaggactgccttgtggtactcgccgtggggacctagcagctggctccagggctgtgctcttcagcactcctcccacagtgtcccgagagctc

SEQ ID NO: 206699 - DNA, 120 bp, Artificial Sequence
  ENSG00000115183_78 (sequence is synthesized)
aggcaggggttagagaggttgtggccgagctgtagggtaggagagagaagccatgacatctcggagtacagcagatgacacagcacagggactgcgtgctgagaacacatgcctgcacgg

SEQ ID NO: 206700 - DNA, 120 bp, Artificial Sequence
  ENSG00000115183_79 (sequence is synthesized)
tggccgctgcaggaactgaggaggttatgctaaggcctcatttaattaattttccccacatcccacccggaagggaggaatgagttttcgctgctcggatgccttcgtttctcattactt

SEQ ID NO: 206701 - DNA, 120 bp, Artificial Sequence
  ENSG00000115183_80 (sequence is synthesized)
ttttcagtaaaataacaaggacagatttgagtgcccaggtcagtgggaaaggattagcaacagcctcgccggcgtcctgctccctccctcatcgtgctgtggtccttgcagctgggctcc

SEQ ID NO: 206702 - DNA, 120 bp, Artificial Sequence
  ENSG00000115183_81 (sequence is synthesized)
tgctggtgctgacctccagccgtggggccacggaggaattgggatcctttccgcagggcctctgaagtgcctctgaatgcgtgtttgttttgcaggaaatgctgcttgggcgatggccac

SEQ ID NO: 206703 - DNA, 120 bp, Artificial Sequence
  ENSG00000115183_82 (sequence is synthesized)
ttccaaacctgatatcttgattatacttttacagaaattaatggaggaaggaaatgtgatgtacaaagtaagtggttccgcccttttctttgccattgaaactgcctgggagcaccctct

SEQ ID NO: 206704 - DNA, 120 bp, Artificial Sequence
  ENSG00000115183_83 (sequence is synthesized)
taattgggtacataatggctacagctgtgctactgcacagtctccatgtaatagaagtgcaaaaagtggctgggtggggtggctcacgcctgtaactccagcacttttggaggccgaggt

SEQ ID NO: 206705 - DNA, 87 bp, Artificial Sequence
  ENSG00000115183_84 (sequence is synthesized)
agcaacagagtgagactcagtctcagaagaaaaaaaaaaaaagtgccaagaggtgctgacctggcctcatgcccgttgttggcttaa

SEQ ID NO: 206706 - DNA, 120 bp, Artificial Sequence
  ENSG00000115183_85 (sequence is synthesized)
aagaggtgctgacctggcctcatgcccgttgttggcttaatatctttccggcagaatcttaaaggtagaaagcacctctctttgtgtctgagagccattatttctgagctaatccttgag

SEQ ID NO: 206707 - DNA, 120 bp, Artificial Sequence
  ENSG00000115183_86 (sequence is synthesized)
gttgtagtggtgacttcctgtctgaagccatggcgtgaagctgagtcacctctaggtcaactgaacatcatagagaaggttcctcagcccttcacattctgagttcagaacaccatgctg

SEQ ID NO: 206708 - DNA, 120 bp, Artificial Sequence
  ENSG00000115183_87 (sequence is synthesized)
aggcacagtcatgagacgtgggagaggaacacccagcagacatttctagaagaaaagggttattctgtctcctaagcctttcctaatttttaatatctattaatttctagaatttgaaag

SEQ ID NO: 206709 - DNA, 120 bp, Artificial Sequence
  ENSG00000115183_88 (sequence is synthesized)
tgttgttagagatttttacttaatacagtcaagtaatacctcagttactcagaagactgaattaattttttccattttcccttggaaatggaaatatgatttacagatcaataaacttca

SEQ ID NO: 206710 - DNA, 120 bp, Artificial Sequence
  ENSG00000115183_89 (sequence is synthesized)
ctttaaatttttccaaataagacatcagtttaggtcagaggtcagcaaactttttttgtaaagggccagacagtaaatgttttaggctttgcagactgtgtggcctctgtcacaactccc

SEQ ID NO: 206711 - DNA, 120 bp, Artificial Sequence
  ENSG00000115183_90 (sequence is synthesized)
cagttctgatgtgggggcacagatagcacagagtgaatgaacacagctgtgtcccaataaaactttatttgtaaacacaggtggctggccagacttagtatccaagctatagtttgccaa

SEQ ID NO: 206712 - DNA, 120 bp, Artificial Sequence
  ENSG00000115183_91 (sequence is synthesized)
cccctggtttagatagatatgcaggccatttgcataggtcactattctttgcagctctgtgattagacagaattaaaagattataggggaaaaactagattatgaccatgttaatccttt

SEQ ID NO: 206713 - DNA, 120 bp, Artificial Sequence
  ENSG00000115183_92 (sequence is synthesized)
ttactgttaggcagctgtatttggtatgttgtagattttttccttctcattttttaaaatagtaacaaataaataggcaatatagcatgacccagcagggttcctggcttggaatcagct

SEQ ID NO: 206714 - DNA, 120 bp, Artificial Sequence
  ENSG00000115183_93 (sequence is synthesized)
tgaaattgagttgagtgtattgttgtggctttgaagtgcttttaatatggattggtaggcaattatgtcagaaataggaagccattttcaacaggcttcatacctgctgtgcaatgggac

SEQ ID NO: 206715 - DNA, 120 bp, Artificial Sequence
  ENSG00000115183_94 (sequence is synthesized)
tgactgagcaaatggatttttttagctttgaaaatgatgtgtggtgctgttctgatttttaaagcccatgttttaattcctcttagaagaaaaattattattctgcagcaagctctctag

SEQ ID NO: 206716 - DNA, 120 bp, Artificial Sequence
  ENSG00000115183_95 (sequence is synthesized)
gtttatctacaagatgctacttgtcctaggaataggatcagtttttcatctgatttctattacacttagcattcaaatagatttgagatcattcttgaaataattttcaaaaatacatac

SEQ ID NO: 206717 - DNA, 120 bp, Artificial Sequence
  ENSG00000115183_96 (sequence is synthesized)
cagaaggtaatctgattcattaagtttggtaattatcaatctagcagtttacagacaccttattgtaaaaccagcttctttctcactgtgtaaccacaggatgcgggtgcatgtgaggac

SEQ ID NO: 206718 - DNA, 120 bp, Artificial Sequence
  ENSG00000115183_97 (sequence is synthesized)
agtgaagccctcatgtgccagcccagttagtgaactagctcccaccttgacacttgtttggatgctttcaatgttctgtcgtgggtttgcaggggggagtaaactccccacggtgttcca

SEQ ID NO: 206719 - DNA, 120 bp, Artificial Sequence
  ENSG00000115183_98 (sequence is synthesized)
agtcttccagcaacagagcccttctccagcagtgaaggccagcccttctccagaccagatcctgggccctcctgtccaatttgcttgcacatttacatgaacctggcatgtgggaaacag

SEQ ID NO: 206720 - DNA, 120 bp, Artificial Sequence
  ENSG00000115183_99 (sequence is synthesized)
acggctgctacgctcctcgcatgatgttgaaggaatgcacttgggtttcgtttccttggcctcagtaatgagaagcaaatgcagtctgctcctctgcagcttcccaacactgttgctgct

SEQ ID NO: 206721 - DNA, 120 bp, Artificial Sequence
  ENSG00000115183_100 (sequence is synthesized)
ggcactgccgtccccggattcaggagagtccaacccaagcctattgtggtgggcctgccttctgtgttaggtttgctcagagggtctgccagtaactaatttgtaaccggtcgtggggaa

SEQ ID NO: 206722 - DNA, 120 bp, Artificial Sequence
  ENSG00000115183_101 (sequence is synthesized)
ctcatagtcgatttgtaactagtagatctgtttcagtagtacttcctaccttttttttaactgtgtcctcctgccccagtctgttgagctgcttgcttctgtgccctgctgccggaatag

SEQ ID NO: 206723 - DNA, 120 bp, Artificial Sequence
  ENSG00000115183_102 (sequence is synthesized)
atgcagtgtctgcgctcctctctgaggctgcccctccaccgggctgtgaggttccaccatctggccttcttggggcactgttactaccactgttttcatagtggattcttctcctaatga

SEQ ID NO: 206724 - DNA, 120 bp, Artificial Sequence
  ENSG00000115183_103 (sequence is synthesized)
tattaatcaaccatcattatctcctcactttaaaacaagatagaaaacggaactttcccttcctccctctctggctgtgcctcagagcgctgctaccctttagaacaaaactagacgggc

SEQ ID NO: 206725 - DNA, 120 bp, Artificial Sequence
  ENSG00000115183_104 (sequence is synthesized)
cagtgctttctgattcaaattctaagttttctgttaatggaaattttctaataaacagtagagagaataggcaacacagccacatgcctggtattcctcttcagcagcgatgaccattct

SEQ ID NO: 206726 - DNA, 120 bp, Artificial Sequence
  ENSG00000115183_105 (sequence is synthesized)
gccagcccatccggccagtgtcacccttcacagtgcttgactgacacttggttcaggccgggtgttccgcaggtgtgaaacaatttgctttctggctttgtcatctcataatgttcatgt

SEQ ID NO: 206727 - DNA, 120 bp, Artificial Sequence
  ENSG00000115183_106 (sequence is synthesized)
caaaatgtgctttgaggtaggaagggacctcctgtagagcggctttggcatgaggtcgacccgccctggggtggctccttttccctgtgttggcttggggccactgccccttcatgtttg

SEQ ID NO: 206728 - DNA, 120 bp, Artificial Sequence
  ENSG00000115183_107 (sequence is synthesized)
gctcacatggtccagaagcatcagggctcttttaacccagaatagtcaagccttggtttccttacccctgcagttttccagagcagctaaaaaacatccaagctggcaaaccattcttcc

SEQ ID NO: 206729 - DNA, 120 bp, Artificial Sequence
  ENSG00000115183_108 (sequence is synthesized)
tactccaaacattaggagcttttaccagtaagcaaggggtgggaagcttttcctttcttgaagatgctgccagcgtagtttcccttgtagctgccatcctgggtgcatgacttgcaaaac

SEQ ID NO: 206730 - DNA, 120 bp, Artificial Sequence
  ENSG00000115183_109 (sequence is synthesized)
tgatatgtgagtgacaataagccagatggcctttgcaaaagctctgcttattttgatttttgtggttccttacaaaaggcgaagtgagcattgatctttgttggtgctgttgtagctcaa

SEQ ID NO: 206731 - DNA, 120 bp, Artificial Sequence
  ENSG00000115183_110 (sequence is synthesized)
cggcaacatcactgtgttgtttcctcattttatttttcctaaaacctttacccattatctgcagattttcacatctaagcaaaataggttcatatgagtccagttacctagacaattaat

SEQ ID NO: 206732 - DNA, 120 bp, Artificial Sequence
  ENSG00000115183_111 (sequence is synthesized)
aaaaaagagcaaaatgttgagtgactatgtcataggttacttattgttaagttacagctttgtaagcagcttgctttgtaaatttttcatcccctgatggatgctgattttagaaggtga

SEQ ID NO: 206733 - DNA, 120 bp, Artificial Sequence
  ENSG00000115183_112 (sequence is synthesized)
gagacgtgttagaaggatgtgaatatcgttttatttattggccataattaagtgcctttgggctttttgggtacagggttaaactacagctcaacatttaaatcaaatccaaccataaaa

SEQ ID NO: 206734 - DNA, 120 bp, Artificial Sequence
  ENSG00000115183_113 (sequence is synthesized)
ttctcttaagtacaaaaaaaccagatgaccaacctcagggagaacccaagaaaaggtgggctttcccagcattgctgtgcagcattctgagaatacagcttgatttttctacatctttgc

SEQ ID NO: 206735 - DNA, 120 bp, Artificial Sequence
  ENSG00000115183_114 (sequence is synthesized)
aaatcctggttttgactttcactactgtgggatgtgcacaggaagttttccaccaaattttccacgtcgttcccctggcttgtttaatgagagcttggatttcagttttactccaacacc

SEQ ID NO: 206736 - DNA, 120 bp, Artificial Sequence
  ENSG00000115183_115 (sequence is synthesized)
taaatagcctgggtctctaccagcatgccactagggttttacttcatttcagcctcctgtgggcattggacacccggcactctgtgagggtaacatgaaagataggcccttttcttaccc

SEQ ID NO: 206737 - DNA, 120 bp, Artificial Sequence
  ENSG00000115183_116 (sequence is synthesized)
aagctgatgtctgaagtacccgttttcacatgactcggaattaggaattgccgtcagataacactgggctcttctcactcaccctttgcacttggagtttttgttttactgtttccttaa

SEQ ID NO: 206738 - DNA, 120 bp, Artificial Sequence
  ENSG00000115183_117 (sequence is synthesized)
cctgtcacagtcccttaattagaatgtattgctagaggacagggtgcgttgtccaactttgtgcgcattttatagaaacacacaaaatcaccagacaaagcagctgtagtgtgaactcat

SEQ ID NO: 206739 - DNA, 120 bp, Artificial Sequence
  ENSG00000115194_0 (sequence is synthesized)
agtcgctgcagttcgctccactctggtggccccgccgccctgcggggatcccgggggtcggcgggctgctcggacttggcgcggggccggcccggcctctctcttcctcggtggggccta

SEQ ID NO: 206740 - DNA, 120 bp, Artificial Sequence
  ENSG00000115194_1 (sequence is synthesized)
gacggtcggggcaccgggaacatggagccctctccagccgctgggggcttggagaccactcgcctggtgagcccccgggaccgcggtggcgccggaggcagcctgcgtttgaagagtctc

SEQ ID NO: 206741 - DNA, 120 bp, Artificial Sequence
  ENSG00000115194_2 (sequence is synthesized)
ttcacagagccctcagagcccctccctgaggagtccaaacctgtggagatgcccttccaccactgccacagggacccccttccgccgccgggccttacccctgagaggctgcatgcacgg

SEQ ID NO: 206742 - DNA, 120 bp, Artificial Sequence
  ENSG00000115194_3 (sequence is synthesized)
aggcagctatatgctgcctgtgccgtttgctttgtcttcatggctggggaggtggtcggcgggtatctggcacacagcctggccatcatgaccgatgcagcccacttgctggcggatgtg

SEQ ID NO: 206743 - DNA, 120 bp, Artificial Sequence
  ENSG00000115194_4 (sequence is synthesized)
ggcagcatgatgggcagcctcttctccctctggctctccacccgtccagccacccgcaccatgacctttggctggcaccgttcagagactctgggggctttggcctctgtggtctccctc

SEQ ID NO: 206744 - DNA, 120 bp, Artificial Sequence
  ENSG00000115194_5 (sequence is synthesized)
tggatggtcactggcatcctcctgtacctggccttcgtccgcctgctgcacagcgactaccacatcgaggggggtgccatgctgctgaccgccagcatcgcagtctgtgccaacctgtta

SEQ ID NO: 206745 - DNA, 120 bp, Artificial Sequence
  ENSG00000115194_6 (sequence is synthesized)
atggcctttgtgctgcaccaggctgggcccccccacagccacgggtctaggggagcagagtatgcaccgctggaggaggggcctgaagagcccctgcccctggggaacaccagcgtccgg

SEQ ID NO: 206746 - DNA, 120 bp, Artificial Sequence
  ENSG00000115194_7 (sequence is synthesized)
gcggcatttgtgcacgtgctgggggacctcctgcagagctttggggtactggctgcctccatcctcatctacttcaagcctcaatacaaggcagccgaccccatcagcaccttcctcttc

SEQ ID NO: 206747 - DNA, 120 bp, Artificial Sequence
  ENSG00000115194_8 (sequence is synthesized)
tccatctgtgcccttggatccaccgctcccaccctccgagacgttcttcgaatcctcatggaaggtaccccccgcaatgtggggttcgaacctgtgcgggatacgctgttgtcggtgcca

SEQ ID NO: 206748 - DNA, 120 bp, Artificial Sequence
  ENSG00000115194_9 (sequence is synthesized)
ggagtccgggcaacccatgagctgcacctgtgggcccttacgctcacttaccatgttgcctctgcacacctggccatcgactccaccgctgaccctgaagccgtcctggctgaagcctca

SEQ ID NO: 206749 - DNA, 120 bp, Artificial Sequence
  ENSG00000115194_10 (sequence is synthesized)
tcccggctctactcccggtttggattctccagctgcaccctgcaggtcgagcagtatcagccggagatggcccagtgcctgcgctgccaggaacccccccaagcctgagccatggccctg

SEQ ID NO: 206750 - DNA, 120 bp, Artificial Sequence
  ENSG00000115194_11 (sequence is synthesized)
ccctcaccccactgccaggccgaggctcagccccagactctcagcatctgctgccctgatcacagagacgggaccgagccaggtccataccccttcctctctccctcctaccacctgcca

SEQ ID NO: 206751 - DNA, 120 bp, Artificial Sequence
  ENSG00000115194_12 (sequence is synthesized)
gggagtggggtgggagtcaggggaatagatgtgactagttcaggggcggggactcccaggcctcagtgtggcagggtgtgttgaaggcctgtggtgccatctccccatggttcatgtgga

SEQ ID NO: 206752 - DNA, 120 bp, Artificial Sequence
  ENSG00000115194_13 (sequence is synthesized)
gccacgaacatcctttccctgcagtccatttgtctgtgtggcaggctggctggctgggggcatctgcctgtctatgtgctgttggtgtgcctatgcctgggggaggtcagtaggggcccc

SEQ ID NO: 206753 - DNA, 120 bp, Artificial Sequence
  ENSG00000115194_14 (sequence is synthesized)
ggtcagtaggggccccctccccacatggccctcgctctgtctatgcaggggccccaaagcccgcactttgtccgtgtgtcttagccctgtggttttgtctgtgtgtgtgtgtgtgtgtgt

SEQ ID NO: 206754 - DNA, 120 bp, Artificial Sequence
  ENSG00000115194_15 (sequence is synthesized)
gtgttcttggtgctgtggcctgtgtgtctctgtgcctatgtggctgtgctatggtttctatgagtctgctccatccatgtgtctgtttgggggtctatctctccatccctctgttggtgc

SEQ ID NO: 206755 - DNA, 120 bp, Artificial Sequence
  ENSG00000115194_16 (sequence is synthesized)
tgtgcccttggctatccctgaaagagggaggactccgctgcagctccaccaataaacttgtgtctcactgcatctttcagcctgtgtgctgactcctcaggagggggaagtcaaataggt

SEQ ID NO: 206756 - DNA, 120 bp, Artificial Sequence
  ENSG00000115194_17 (sequence is synthesized)
cacttgagaacaacagaatccctcctgtcccttcccagcctctggagtgacctcccacagacctcctgtcccttcccagcccctccaccctcagatggagggtaaaagccaccagtctct

SEQ ID NO: 206757 - DNA, 120 bp, Artificial Sequence
  ENSG00000115194_18 (sequence is synthesized)
ttactccccttcccctggctcacagcatgcctgggtccttggctcagggacagtcccatgtgccctgggcttggttgcaggagaatgctggaaggtaaggagccaaggaatccctgggag

SEQ ID NO: 206758 - DNA, 120 bp, Artificial Sequence
  ENSG00000115194_19 (sequence is synthesized)
tcagtcgttctcagaggtccctgcatgccagtgggcctcaggctggctggagggaggctgggtccctttgagggagaatggctagaccatagcactgatgtgggcttggttctcaggcca

SEQ ID NO: 206759 - DNA, 120 bp, Artificial Sequence
  ENSG00000115194_20 (sequence is synthesized)
tctaaggtgtccagcggtagggacccctcaaccctgatagcagccaaccctgagtccaggtttaggctgtgaacaccaaggacctcttttacacctattccccctttgtcttaagaactg

SEQ ID NO: 206760 - DNA, 120 bp, Artificial Sequence
  ENSG00000115194_21 (sequence is synthesized)
catattttgacacattaagtcttaaaatcaggctcattaagggattgttgattttctctttaaaaaaaatcaaactcaagctggacatagtggcctgtgcctgtaatctcagccctttgg

SEQ ID NO: 206761 - DNA, 120 bp, Artificial Sequence
  ENSG00000115194_22 (sequence is synthesized)
ccaccagacacacagacacgcacacacagctctccatgggctgccctgcgtgtgcctgagaagggtctgggatagagacctaaaattcagtcagcagatctctgtcaagggcctgccatg

SEQ ID NO: 206762 - DNA, 120 bp, Artificial Sequence
  ENSG00000115194_23 (sequence is synthesized)
ggccagccactctgatgagggctttcatcaacatgattgcatttaaacctcacagccaccccatgaggtaggtagcattacccctagtttaccattaatgcagtcaatcccaacaggtga

SEQ ID NO: 206763 - DNA, 120 bp, Artificial Sequence
  ENSG00000115194_24 (sequence is synthesized)
cttgcccaagtcacatatctatttaagtaacagggccagcttccgaatccacatgtgtggcaccaagtctggtattctttcccccaggctgcattgtttatctctcttgcaaaatgctgt

SEQ ID NO: 206764 - DNA, 120 bp, Artificial Sequence
  ENSG00000115194_25 (sequence is synthesized)
acatgggaccatagcttgagttactggaattgtttcagtcttttttgatctgtctctgtttctctgtgtctctctctctcacatagacacatacacacacacacacatgcacgtgcgctc

SEQ ID NO: 206765 - DNA, 120 bp, Artificial Sequence
  ENSG00000115194_26 (sequence is synthesized)
gtgcatgttggagacaaggagtctccatccactggatgcagtgttctgggggcagtttcaccctctttgaagtagcacagggaaccaacaaccctttaaaagatcattagtacctacagg

SEQ ID NO: 206766 - DNA, 120 bp, Artificial Sequence
  ENSG00000115194_27 (sequence is synthesized)
tctagtgatggggcacagttaggtaaattacagcacctccaccctgaggtatcacataactgttaaaaatgatgcttgtgaagactgtacagcaactatgaaaaatgtttatggtataat

SEQ ID NO: 206767 - DNA, 120 bp, Artificial Sequence
  ENSG00000115194_28 (sequence is synthesized)
gctgagaaaaaagctgaatataaaattgcatctacattatgattcaactattaaaaatatatatggtgagtcatgagctgacaaaggatttttgagtttcttccagatgcaagaagcaat

SEQ ID NO: 206768 - DNA, 120 bp, Artificial Sequence
  ENSG00000115194_29 (sequence is synthesized)
cagagtcatgcaatttgtatgccaaaaatattataatttgtgggatatttgatggaaactctagagggacaatgagacagatatttaacaactggattgtcctgggaaatcgggtggtat

SEQ ID NO: 206769 - DNA, 120 bp, Artificial Sequence
  ENSG00000115194_30 (sequence is synthesized)
ggctgctgaaatgttgagctgtatgttgacacttaatgacaggagagaataggagactggaaagagtttagtgtgttagcatggttgattggggtgagtctctccaacatttgatttgac

SEQ ID NO: 206770 - DNA, 120 bp, Artificial Sequence
  ENSG00000115194_31 (sequence is synthesized)
gagggcttagcaggcctgcggcccaaggcagcgtaggagcgttgctgccaggccttggggcagggattcccaccgagcccctcttccccagcaggagggcaccacccatcttgatggccc

SEQ ID NO: 206771 - DNA, 120 bp, Artificial Sequence
  ENSG00000115194_32 (sequence is synthesized)
aactcactccaggaaacacaatgggtttgctgaccgtggcggatgagagtggcggcaggtgcgaggggagagaacattgagcatttgaagcttcgacttgaggctcggccaccgactttg

SEQ ID NO: 206772 - DNA, 120 bp, Artificial Sequence
  ENSG00000115194_33 (sequence is synthesized)
ctgctctcaaaccaccccacttctgtccctcagaggtgggacagtggggagaggaggaagaggactcagaggctggagaaggaagagaaaaggcgttgctgtgggaaagacctggcaagg

SEQ ID NO: 206773 - DNA, 120 bp, Artificial Sequence
  ENSG00000115194_34 (sequence is synthesized)
aaaaggcagcggaaccccagagagcagggtagacgcctgcggcccaggagaaccgagcaaggcaaggagctcaaagggagagctctgagtgtgcagggcacctctggccctgtgccgact

SEQ ID NO: 206774 - DNA, 120 bp, Artificial Sequence
  ENSG00000115194_35 (sequence is synthesized)
cctcacctgggtctggccctttacctgggagtcgttctcttaagccaggagggcaccacccatcttgatggcccaactcactccaggaaacacaatgggtttgctgaccgtggcggatga

SEQ ID NO: 206775 - DNA, 120 bp, Artificial Sequence
  ENSG00000115194_36 (sequence is synthesized)
gggtggcaggagaaccgccaacgcgccccgccggcccccgcgcctgccgccaccgtccacctgcccctctgagcggccgtccgacctccctgcccacccccgtgggccatcttgtctgtc

SEQ ID NO: 206776 - DNA, 120 bp, Artificial Sequence
  ENSG00000115194_37 (sequence is synthesized)
aaagggaattccagccgaggtccggggccagtaggtcagggctgacttcttttaaaaaccctattttcttgttattaaaataaatcattgtagaaaataaaatacagatgaatgaaaaaa

SEQ ID NO: 206777 - DNA, 120 bp, Artificial Sequence
  ENSG00000115194_38 (sequence is synthesized)
ataacataacagtagttaattatacctgtagtcccatcacctgagaaaaccccaaatcacatttttggtgtatatcccccaatttattttccatgcctatacacactacatgatattttc

SEQ ID NO: 206778 - DNA, 120 bp, Artificial Sequence
  ENSG00000115204_0 (sequence is synthesized)
gagggacggtgggggtgaccccctctcctcttggcttgacaggaagcatggcactctggcgggcataccagcgggccctggccgctcacccgtggaaagtacaggtcctgacagctgggt

SEQ ID NO: 206779 - DNA, 120 bp, Artificial Sequence
  ENSG00000115204_1 (sequence is synthesized)
ccctgatgggcctgggtgacattatctcacagcagctggtggagaggcggggtctgcaggaacaccagagaggccggactctgaccatggtgtccctgggctgtggctttgtgggccctg

SEQ ID NO: 206780 - DNA, 120 bp, Artificial Sequence
  ENSG00000115204_2 (sequence is synthesized)
tggtaggaggctggtacaaggttttggatcggttcatccctggcaccaccaaagtggatgcactgaagaagatgttgttggatcaggggggctttgccccgtgttttctaggctgctttc

SEQ ID NO: 206781 - DNA, 120 bp, Artificial Sequence
  ENSG00000115204_3 (sequence is synthesized)
tcccactggtaggggcacttaatggactgtcagcccaggacaactgggccaaactacagcgggattatcctgatgcccttatcaccaactactatctatggcctgctgtgcagttagcca

SEQ ID NO: 206782 - DNA, 120 bp, Artificial Sequence
  ENSG00000115204_4 (sequence is synthesized)
gtccaatgtgttgctgttatctggaactcctacctgtcctggaaggcacatcggctctaagcctgcctcactccatcgtttccaccttgcagtgatgcagcttgaccctggaacggtcag

SEQ ID NO: 206783 - DNA, 120 bp, Artificial Sequence
  ENSG00000115204_5 (sequence is synthesized)
acaacctcctcaaagtgggcataccagtttccacggggttgggttgccggtcagagcttaagaggactagcaccctgcaatgcccctcttcactctaaaatgtacactgactgctttaga

SEQ ID NO: 206784 - DNA, 120 bp, Artificial Sequence
  ENSG00000115204_6 (sequence is synthesized)
gcccttgataatagtcttattcccaccacatactaggcactccataaatatctgttgaaccttcatgaccttatcaactttacacccatatcccagcaaatgccactcatccccactctt

SEQ ID NO: 206785 - DNA, 120 bp, Artificial Sequence
  ENSG00000115204_7 (sequence is synthesized)
catagacacatttgttactctaaccctgcctaggcttcttgtagctccagctctttagagactcccggaaccctttatatggtgcctcagtaaatatgttattaaatatgtaatccggaa

SEQ ID NO: 206786 - DNA, 120 bp, Artificial Sequence
  ENSG00000115204_8 (sequence is synthesized)
acgtgggagggaggctcggcgctcaggaagcatggcactctggcgggcataccagcgggccctggccgctcacccgtggaaagtacaggtcctgacagctggtgagtgtccctctaggac

SEQ ID NO: 206787 - DNA, 120 bp, Artificial Sequence
  ENSG00000115204_9 (sequence is synthesized)
ttgagtgggaccagggcagactgatttggaagccagaggcttgccccactgcaccaccctcacttcctgtttctattcggctctcttgaagggttggctgtctttcatcctacactgtcc

SEQ ID NO: 206788 - DNA, 120 bp, Artificial Sequence
  ENSG00000115204_10 (sequence is synthesized)
tcagccctgaaggataaaggcattgccccaggaggcctcaacttggaaaacattttaccgtatgcaaagcactttcatatacgttatggcatagggcccccacaaaggtgtgtgagctag

SEQ ID NO: 206789 - DNA, 120 bp, Artificial Sequence
  ENSG00000115204_11 (sequence is synthesized)
gagggttacttgagtccacattagatcacacctaataagtgctgaatcaagactcttaccccagtttttcttggtattttttattgtgaaacatacaaaagaatgattaagatgtgtatg

SEQ ID NO: 206790 - DNA, 120 bp, Artificial Sequence
  ENSG00000115204_12 (sequence is synthesized)
tgccagtagctatacctgccgacccaggcctcctggactgaaggacacgcttcctgctcctcactccaagaagccacttcttgcccctctgccttctgcgcatgaaactcaaaagccaca

SEQ ID NO: 206791 - DNA, 120 bp, Artificial Sequence
  ENSG00000115204_13 (sequence is synthesized)
tgggcaggtgtggagaatgtctctggctggcgggctgacagcccaggggaagaagacaggttttacagggataaaaaagggggtaagtgcaggtagggccccaggccatggaggagagga

SEQ ID NO: 206792 - DNA, 120 bp, Artificial Sequence
  ENSG00000115204_14 (sequence is synthesized)
gctgagggttatggtgcaggaatgtgctctttgaacccaagtctgtgtgtgacattcatactgggaagtgggagctgcttggaggcgcaagtgttaatttgttccttctctgtctcccca

SEQ ID NO: 206793 - DNA, 120 bp, Artificial Sequence
  ENSG00000115204_15 (sequence is synthesized)
tctagaactgtcctgggattggggggtcctcctgacatgggaaacccttccgttgggattactctttcattcccaggatgggcaccataaatagggaagccatcacccaactgttcacct

SEQ ID NO: 206794 - DNA, 120 bp, Artificial Sequence
  ENSG00000115204_16 (sequence is synthesized)
ttttcttgtgtgcagaagttggggtagggccaggcaagacagtgagtctggggtcaggtggtggggcagccatccaacctttacattttctcttgcagctatggcctgctgtgcagttag

SEQ ID NO: 206795 - DNA, 120 bp, Artificial Sequence
  ENSG00000115204_17 (sequence is synthesized)
atactttctgactctgacttccctttactgctcaatgcaaagttcctggacctgggtctgctcatcccagtttctgacagaatacacatgaggtgtcaccatcattggggaggtgagggc

SEQ ID NO: 206796 - DNA, 120 bp, Artificial Sequence
  ENSG00000115204_18 (sequence is synthesized)
tttgaggcagcaggaagggactagtcatttgtttccacaatgaagccctggggttcagagtaccagagcctcagtggaggtcagcagatgtccctccctccttggaatggcagcccatcc

SEQ ID NO: 206797 - DNA, 120 bp, Artificial Sequence
  ENSG00000115204_19 (sequence is synthesized)
cctaagccaacctgccgccctcttttttcttagtgtccacttcccctattctgatacttggggcagggagcttagtgaggtagaggcctagggctccctcactgcagcctgctgctatct

SEQ ID NO: 206798 - DNA, 120 bp, Artificial Sequence
  ENSG00000115204_20 (sequence is synthesized)
acagagtggggagggtgagctgtgttgggggtaggtggggatttcagcactcataggactttaatttctcttccctaggggggctttgccccgtgttttctaggctgctttctcccactg

SEQ ID NO: 206799 - DNA, 120 bp, Artificial Sequence
  ENSG00000115204_21 (sequence is synthesized)
ccccttcattacaggtatgttgcacccctaccccacccatcaaggaagacccacgttaccaacagttggagacaaaatgattctcatttcaaccttgagctaccttagacccccaaacgg

SEQ ID NO: 206800 - DNA, 120 bp, Artificial Sequence
  ENSG00000115204_22 (sequence is synthesized)
aacactgagccgtgatcagagttcctcagattcccaagcgtgttattcagaatgtcttgccatttccggaaactgtcccagagtgtctgcccactgaccttcttcatctccctagggagg

SEQ ID NO: 206801 - DNA, 120 bp, Artificial Sequence
  ENSG00000115204_23 (sequence is synthesized)
atcctgcttctaccacccttgtctccatcccacctgagctccgtctttgatggcatatctggagggacagtggctggggtgctgcagcctaggttagacagagaggtagaccagaaggcc

SEQ ID NO: 206802 - DNA, 120 bp, Artificial Sequence
  ENSG00000115204_24 (sequence is synthesized)
aagtaggagcctggtcagacactcacaataaagacagttgctgaactgcacccaaaaagatagtggcactgaagatgtgtggttcaaatgcttgaaggtgaaggatcgtgggaacagggg

SEQ ID NO: 206803 - DNA, 120 bp, Artificial Sequence
  ENSG00000115204_25 (sequence is synthesized)
ggtgaaggatcgtgggaacaggggaaaatatggaacgcttcagagggaacagggccaaaatgtacatgagtagcatagctaaaacgaatacagactggctgggcacggtggctcacacct

SEQ ID NO: 206804 - DNA, 120 bp, Artificial Sequence
  ENSG00000115204_26 (sequence is synthesized)
gaggcaagaggtttgcttgagtccaggagtttcacaccagcctgggcaatatagtgagacctcatctctacagaaaatacaaaaaattagccagtcacatggtaacatgtgcccgtagtc

SEQ ID NO: 206805 - DNA, 77 bp, Artificial Sequence
  ENSG00000115204_27 (sequence is synthesized)
tgagatggaggttgctgtgaactgagattgtgccactgcatttcagcctggtgacagagtgagacgaccctgtctcc

SEQ ID NO: 206806 - DNA, 120 bp, Artificial Sequence
  ENSG00000115204_28 (sequence is synthesized)
ggagggaggctcggcgctcaggaagcatggcactctggcgggcataccagcgggccctggccgctcacccgtggaaagtacaggtcctgacagctggcctcctggactgaaggacacgct

SEQ ID NO: 206807 - DNA, 120 bp, Artificial Sequence
  ENSG00000115204_29 (sequence is synthesized)
aggccctttggggcctcacttgggcaggaacacccagcaggggagcagccacaggggcctcctggtgccactgacctctgagcccatctcagcccatgccaggaataccctggcctcctt

SEQ ID NO: 206808 - DNA, 120 bp, Artificial Sequence
  ENSG00000115204_30 (sequence is synthesized)
ggtcctccttgagagaaggcctgggttcagttccaactgcactccttaccaagtcatctcatctctcaaagactcatcattaaatgggggtgtaggctgggtgccgtggctcacacctat

SEQ ID NO: 206809 - DNA, 120 bp, Artificial Sequence
  ENSG00000115204_31 (sequence is synthesized)
tgcccgggaagagggtgtggaagttggggcttttccactagtgggcaggaagtggtcccaaattgatctgctcagaggcaggctcccttccccctggccgctggatctgttcgggagtga

SEQ ID NO: 206810 - DNA, 120 bp, Artificial Sequence
  ENSG00000115204_32 (sequence is synthesized)
cggcatgagaactggcacctacccaggggcatgatgtcacacctgcgccagcatctgctcgctgggctccacgcccagcctgtcattgggcatcactgcccagcagcccctagccctgcc

SEQ ID NO: 206811 - DNA, 120 bp, Artificial Sequence
  ENSG00000115204_33 (sequence is synthesized)
ctcggcgctcaggaagcatggcactctggcgggcataccagcgggccctggccgctcacccgtggaaagtacaggtcctgacagctgcccatcccaggagatgtcctgacaacacctgtg

SEQ ID NO: 206812 - DNA, 120 bp, Artificial Sequence
  ENSG00000115204_34 (sequence is synthesized)
acagtgactatgatactgcctcctaagcaaggacacaccccagtgatgagaaataggcaaaccatggtcttgaaatgcctaggagtataggctggggtttggagggaaatagttggatga

SEQ ID NO: 206813 - DNA, 120 bp, Artificial Sequence
  ENSG00000115204_35 (sequence is synthesized)
cctcaggaaatagaaaaaaacaggcagctgctttttggagagagtggagatgagatcagtgcctacctggaacaaaaccctctggcattctagactggctgaatatgtagtgtagggact

SEQ ID NO: 206814 - DNA, 120 bp, Artificial Sequence
  ENSG00000115204_36 (sequence is synthesized)
tctggcattctagactggctgaatatgtagtgtagggactttatcatctgtcagaaaatctcctttaagaagaagcgatcaagaagtttagtcctggccaggtgtggtggctcacgcctg

SEQ ID NO: 206815 - DNA, 81 bp, Artificial Sequence
  ENSG00000115204_37 (sequence is synthesized)
gtcagaagttcaagaccagcctggccaatgtatggtgaaaccccgtctctaccaaaaatgtaaaaaattagccaggtgtga

SEQ ID NO: 206816 - DNA, 120 bp, Artificial Sequence
  ENSG00000115204_38 (sequence is synthesized)
cctgtacagatgagaaaatagacctggaggaaacccaagtctatcaacagcagagaccacaacccatgtcagtgcaaagaagccaagtgttgcactaccctattgggatccagctcacat

SEQ ID NO: 206817 - DNA, 120 bp, Artificial Sequence
  ENSG00000115204_39 (sequence is synthesized)
tgagccagttttgttttttgagctgttacgcaagtgccttctgtcgaagagaagctttactcaattctacagggcagcccccttcctattttcagtggtagaaaagatgagacctgggga

SEQ ID NO: 206818 - DNA, 120 bp, Artificial Sequence
  ENSG00000115204_40 (sequence is synthesized)
tccacacttgaggctgtagattggtgctggcagccctgcttctgcaactgagtctcagccctagtcttgaccttgttctttttctctaacaagccttttctctttctaaccctccctccc

SEQ ID NO: 206819 - DNA, 120 bp, Artificial Sequence
  ENSG00000115204_41 (sequence is synthesized)
caccatcttcacctgagttcaattcatccttcaaggtcccggctcaaattccaccttcaccaaagagcttcccagttttctccagtaaaaaatagtttccctcccttgtgttcccaaggg

SEQ ID NO: 206820 - DNA, 120 bp, Artificial Sequence
  ENSG00000115207_0 (sequence is synthesized)
ccctttttgacactgcaactcccatgaggccctgcagcgtccctggcgccgctgaagacgccctggaactcggctggcttcggagggctcggtgactctggccgcgctgcattatggaat

SEQ ID NO: 206821 - DNA, 120 bp, Artificial Sequence
  ENSG00000115207_1 (sequence is synthesized)
acagagtctaagagaaaactagcccggcaccgactccggaccaagcacacgtgtttaccttgtgcactggggtgggggcgtcagtgaagagcagctaacaagatttcgtcataagaccgc

SEQ ID NO: 206822 - DNA, 120 bp, Artificial Sequence
  ENSG00000115207_2 (sequence is synthesized)
gaccagacaggcggcgccatcttcgaacttagacttccggaaggactttggcgagggggcagccattttggggggtgctgatggatacctgcggggtcggctatgttgccctgggggagg

SEQ ID NO: 206823 - DNA, 120 bp, Artificial Sequence
  ENSG00000115207_3 (sequence is synthesized)
ccggccccgtggggaacatgactgtggtagactctcctggacaagaggtgctaaatcagcttgatgtcaagacctcttcagaaatgaccagtgcagaggcttccgtagagatgtcattac

SEQ ID NO: 206824 - DNA, 120 bp, Artificial Sequence
  ENSG00000115207_4 (sequence is synthesized)
ctacccctttgcctggatttgaggattctcctgatcagaggaggctccctccagagcaggaaagcctctccagactggaacagccagatctttcttcagagatgtcaaaggtctcaaagc

SEQ ID NO: 206825 - DNA, 120 bp, Artificial Sequence
  ENSG00000115207_5 (sequence is synthesized)
ctagggcctcaaagcctggccggaagagaggtggtaggacacgaaaaggccccaaaaggccccaacagcctaatcctccatcagccccactggttcctggtctcttagatcaatccaacc

SEQ ID NO: 206826 - DNA, 120 bp, Artificial Sequence
  ENSG00000115207_6 (sequence is synthesized)
ctctgtccacccccatgcctaagaaacgaggtcgaaagtccaaggcagagctgctgctgctgaagttgtcaaaagacctagatcggccagaatctcaatctccaaagaggccccctgagg

SEQ ID NO: 206827 - DNA, 120 bp, Artificial Sequence
  ENSG00000115207_7 (sequence is synthesized)
actttgagaccccttctggggaacgaccccgccgaagggctgcccaagtggcacttctgtatcttcaggaactggctgaagagctctcaacagccctgcctgcccctgtgtcctgtcctg

SEQ ID NO: 206828 - DNA, 120 bp, Artificial Sequence
  ENSG00000115207_8 (sequence is synthesized)
agggccccaaggtgagcagccccaccaaaccgaagaagatccggcagccagcagcctgtccaggtggagaagaggtggatggtgctccacgggatgaagacttttttctccaggttgagg

SEQ ID NO: 206829 - DNA, 120 bp, Artificial Sequence
  ENSG00000115207_9 (sequence is synthesized)
ctgaagatgtggaagaaagtgagggcccaagtgagagctcatctgaacctgagcctgtagtgccccgaagcaccccacgaggatctacttcagggaaacagaaaccacactgccgaggaa

SEQ ID NO: 206830 - DNA, 120 bp, Artificial Sequence
  ENSG00000115207_10 (sequence is synthesized)
tggctcccaatggcttaccaaatcatatcatggctcctgtttggaagtgcctccatctcaccaaggacttccgagagcagaaacattcatactgggagtttgctgagtggattcctttag

SEQ ID NO: 206831 - DNA, 120 bp, Artificial Sequence
  ENSG00000115207_11 (sequence is synthesized)
cctggaagtggcacttgttatctgagcttgaggccgctccctacctgccccaggaggagaagtctccattgttttctgtacaacgtgaagggctacctgaagatggcaccctctaccgaa

SEQ ID NO: 206832 - DNA, 120 bp, Artificial Sequence
  ENSG00000115207_12 (sequence is synthesized)
taaacagatttagctcgatcacagcacatccagagcgctgggatgtgtccttcttcacggggggaccgctctgggctctggactggtgcccagtgccagagggggcaggagcctcgcaat

SEQ ID NO: 206833 - DNA, 120 bp, Artificial Sequence
  ENSG00000115207_13 (sequence is synthesized)
atgtggctcttttctccagccctgacatgaatgagacacacccactgagccagcttcattcgggtcctgggctgctccagctctggggccttgggaccttgcagcaagaaagctgtcctg

SEQ ID NO: 206834 - DNA, 120 bp, Artificial Sequence
  ENSG00000115207_14 (sequence is synthesized)
gcaacagggcccactttgtctatgggattgcttgtgacaacggctgcatctgggacctcaagttctgccccagtggagcatgggaacttccaggcacccctcggaaggctcctctcctgc

SEQ ID NO: 206835 - DNA, 120 bp, Artificial Sequence
  ENSG00000115207_15 (sequence is synthesized)
cccggttgggtctcttggctctggcctgctcagacgggaaagtactgctattcagtctaccccatccggaggccctgctggctcagcaacccccagatgcagtgaagcctgccatatata

SEQ ID NO: 206836 - DNA, 120 bp, Artificial Sequence
  ENSG00000115207_16 (sequence is synthesized)
ctacagacccctctgagtgtggtcagtgccttagcctggcctggatgcctaccaggccccaccaacacctagctgctggatattataatggcatggtggttttctggaaccttcccacta

SEQ ID NO: 206837 - DNA, 120 bp, Artificial Sequence
  ENSG00000115207_17 (sequence is synthesized)
actcacccctgcagcggatacggctctctgatggctccttaaagctctaccccttccagtgtttcctagcccatgaccaggctgtgcgtacccttcaatggtgcaaagctaacagccatt

SEQ ID NO: 206838 - DNA, 120 bp, Artificial Sequence
  ENSG00000115207_18 (sequence is synthesized)
tccttgtctctgcggggagtgaccggaaaatcaaattctgggaccttcgacgtccttacgaacccataaactctatcaagcgcttcttgagtacagaactggcctggctgcttccctaca

SEQ ID NO: 206839 - DNA, 120 bp, Artificial Sequence
  ENSG00000115207_19 (sequence is synthesized)
atggtgtcactgtggctcaggacaactgctatgcctcttatggactctgtgggattcattatattgacgctggttaccttggtttcaaggcctacttcactgctcctcgaaaaggcaccg

SEQ ID NO: 206840 - DNA, 120 bp, Artificial Sequence
  ENSG00000115207_20 (sequence is synthesized)
tttggagtctttcaggatccgactggcttgggacaatagctgcaggagatatatccggggagctcattgctgctatattaccagatatggcactgaatccaataaatgtcaagcgacctg

SEQ ID NO: 206841 - DNA, 120 bp, Artificial Sequence
  ENSG00000115207_21 (sequence is synthesized)
tagagcgaagatttcctatatataaagcagatctgataccgtatcaggacagtcctgaaggtccagaccattcttctgcttcatctggggtccccaaccctcctaaggctcgaacttaca

SEQ ID NO: 206842 - DNA, 120 bp, Artificial Sequence
  ENSG00000115207_22 (sequence is synthesized)
ctgaaactgtcaaccatcactacttgctctttcaagacacagatttgggttcattccatgatctgctccgtagagaaccaatgctgcgcatgcaggagggagaggggcattctcaactct

SEQ ID NO: 206843 - DNA, 120 bp, Artificial Sequence
  ENSG00000115207_23 (sequence is synthesized)
gcctggacaggctgcagctggaggctattcataaggtacgtttcagcccaaacctggactcctatggatggctggtatctggggggcagtcagggctggttcgaatccattttgtccgtg

SEQ ID NO: 206844 - DNA, 120 bp, Artificial Sequence
  ENSG00000115207_24 (sequence is synthesized)
gactcgcctccccactgggccaccgtatgcagcttgaaagccgagcccacttcaatgctatgttccaaccatcctcccccactagacggcctggcttctctccaaccagccatcgccttc

SEQ ID NO: 206845 - DNA, 120 bp, Artificial Sequence
  ENSG00000115207_25 (sequence is synthesized)
tgcccactccctagccttggcccacaccagatccttggagtgaagtcggtcaagaacaaatggcccctatgcacagagccataggaactgggggccttccctggacagtgatcatgccag

SEQ ID NO: 206846 - DNA, 120 bp, Artificial Sequence
  ENSG00000115207_26 (sequence is synthesized)
gcctggacctttaggcctgcctccccaggactccttagatcccactctttctacagacttctgtgatcacagccccctgcgggcaggggggctctccctccaccaactctcaaggctcct

SEQ ID NO: 206847 - DNA, 120 bp, Artificial Sequence
  ENSG00000115207_27 (sequence is synthesized)
cagcctaagactatggctcatgagaaacactcaggcctgacctaggcttgggagtcaaactgctcatattgagcatattgttaagtgggtaaagccaagtaaaggtactgggtgtttttg

SEQ ID NO: 206848 - DNA, 120 bp, Artificial Sequence
  ENSG00000115207_28 (sequence is synthesized)
tgaccacttgtgaatgggtgtatggagaactgaaaagggtatctgcatgaaggctcctgtctgactattccaggatccaatattactgccttctgaaacttcctctttagggtaaccatc

SEQ ID NO: 206849 - DNA, 120 bp, Artificial Sequence
  ENSG00000115207_29 (sequence is synthesized)
atgtatgcccacgagggtgatagtaattcgtgagactgaagttgcttagagtacttctttgaccaaggaataccacagacaccctaccgatagaacagtggctcagatcttacttgctcc

SEQ ID NO: 206850 - DNA, 120 bp, Artificial Sequence
  ENSG00000115207_30 (sequence is synthesized)
tgcttacgaagtattcccaatcactggtcatctgaccctacttgaacactcctgaacagtcatgttttttaaaatcttcctttatatcaagtcagagagtatacttctataaatttcact

SEQ ID NO: 206851 - DNA, 120 bp, Artificial Sequence
  ENSG00000115207_31 (sequence is synthesized)
catggatgttaggaaatctagtcatcttccctgtgattgccctgttaagtatttaaccatagctatcatgtgtttcccaaatcttctctagattaaatatcttcagttacttcaaccatt

SEQ ID NO: 206852 - DNA, 120 bp, Artificial Sequence
  ENSG00000115207_32 (sequence is synthesized)
ggtaacgcggaagcctgtgtccgggcgtaggcgctgcatacgtagcgtccctcgaactcggcgaacctacagtagtccttgttagaaaaaccagggctcctctcccgcacaggctagggg

SEQ ID NO: 206853 - DNA, 120 bp, Artificial Sequence
  ENSG00000115207_33 (sequence is synthesized)
agaaatctaccttcacgcccaggactgaagaagggcaggtgatggcccctagagtggttgtgggtcaatctctttcagctgtgtcccagcctcttcctcgaggaggctctttaaccccga

SEQ ID NO: 206854 - DNA, 120 bp, Artificial Sequence
  ENSG00000115207_34 (sequence is synthesized)
gggttgtgccccgcgcgctgcaacgccattggcgtaaccaagggccagttgtgtttccctgtctagtccttttgtcccgtggcaagttggctgcctgttggggaagtcagaggtggcgac

SEQ ID NO: 206855 - DNA, 120 bp, Artificial Sequence
  ENSG00000115207_35 (sequence is synthesized)
tgttggatcctaacccacatgccctcccaaattctggtagagtacaaactagtgtcaggtctcccggccctgatatcccagaaaatcttagcacagagttgtatataatcttccctaccg

SEQ ID NO: 206856 - DNA, 73 bp, Artificial Sequence
  ENSG00000115207_36 (sequence is synthesized)
accgcgaccagacaggcggcgccatcttcgaacttagacttccggaaggactttggcgaggagacaaagtctt

SEQ ID NO: 206857 - DNA, 120 bp, Artificial Sequence
  ENSG00000115207_37 (sequence is synthesized)
tcatcgtgatcatttatttatgcaagtgtttttcagcttgagtgtgcgtcagaatcccctgaagagcttgttaaaacacaaggtgctggccccatccagaattgctgattcggggcagcc

SEQ ID NO: 206858 - DNA, 120 bp, Artificial Sequence
  ENSG00000115207_38 (sequence is synthesized)
gtgaggtggggttggacactgccatgggagggtggttgaggacagcaggatggggtctggacaggatagggggaagggcttggattgggctgagacaaggggagcttacctctggcagcc

SEQ ID NO: 206859 - DNA, 120 bp, Artificial Sequence
  ENSG00000115207_39 (sequence is synthesized)
ccagctactccagaggctgaggtgggataaccacttgagcctgggaggtcacggctgcagtgaaccgtcgatcatgccactgcactccatcctgggtgacagaccccatctcaaataata

SEQ ID NO: 206860 - DNA, 120 bp, Artificial Sequence
  ENSG00000115207_40 (sequence is synthesized)
tgacagaccccatctcaaataataataatataagacagactttgggaaggaaaggaggaagatacaagtggaagccaaggactctgttctcacttgtaaactgtttttgatattcaggct

SEQ ID NO: 206861 - DNA, 120 bp, Artificial Sequence
  ENSG00000115207_41 (sequence is synthesized)
cttttgcagtcttacagctgtactctttcagcacatttccttttatctcccccttcttccctcttctgtgctctcaagactttccccctcttgctgccacagatgcagtgaagcctgcca

SEQ ID NO: 206862 - DNA, 120 bp, Artificial Sequence
  ENSG00000115207_42 (sequence is synthesized)
tgttgaggaagctgaacagaaaataggtaacagattttgcattttcgatggaggagtagagcagaaggtgaagaagtcattatagtggttgaaacacaaatcttttaagatgctgatagg

SEQ ID NO: 206863 - DNA, 120 bp, Artificial Sequence
  ENSG00000115207_43 (sequence is synthesized)
gcagtgattggagggggaggtattgccaaagaagataaaaactgggaaagagctgtctctgggactttgtccaacctgtagaatttgctcccttatattttcttcaatttgatcctcaga

SEQ ID NO: 206864 - DNA, 120 bp, Artificial Sequence
  ENSG00000115211_0 (sequence is synthesized)
agtgcggggcggggcctcggggcccgtcggaaattgtagtccgattggggctgcgcgcttcgcttctgcggctcagcctccagcccaggtggcgctgtggaccctgcagccgcggagcga

SEQ ID NO: 206865 - DNA, 120 bp, Artificial Sequence
  ENSG00000115211_1 (sequence is synthesized)
ggcagcggggcggctccgtgaccacggcgggcggagcctaggactgagggcgatggctgctgtggccgtggctgttcgcgaggactcgggatccgggatgaaggcggagcttccccctgg

SEQ ID NO: 206866 - DNA, 120 bp, Artificial Sequence
  ENSG00000115211_2 (sequence is synthesized)
gcctggggcagtggggagggaaatgaccaaagaagaaaagctgcagcttcggaaggaaaagaaacagcagaagaagaaacggaaggaagaaaagggggcagaaccagagactggctctgc

SEQ ID NO: 206867 - DNA, 120 bp, Artificial Sequence
  ENSG00000115211_3 (sequence is synthesized)
tgtatctgcagcccaatgtcaagtaggcccaaccagagaactgccagaatcgggcattcagttgggcactcctcgggagaaagttccagctggtcggagtaaggccgaacttcgggctga

SEQ ID NO: 206868 - DNA, 120 bp, Artificial Sequence
  ENSG00000115211_4 (sequence is synthesized)
gcgtcgagccaagcaggaggccgagcgggccctgaaacaggcaagaaaaggggaacaaggaggaccacctcctaaggccagccccagcacagctggagaaaccccctcaggagtgaagcg

SEQ ID NO: 206869 - DNA, 120 bp, Artificial Sequence
  ENSG00000115211_5 (sequence is synthesized)
tctccctgagtaccctcaggttgatgacctacttctgagaaggcttgttaaaaaaccagagcgtcaacaggttcctacacgaaaggattatggatccaaagtcagtctcttctctcacct

SEQ ID NO: 206870 - DNA, 120 bp, Artificial Sequence
  ENSG00000115211_6 (sequence is synthesized)
accccagtacagcagacaaaactctctgacccagtttatgagcatcccatcctctgtgatccacccagccatggtgcgactcggcctgcagtactcccagggcctggtcagtggctccaa

SEQ ID NO: 206871 - DNA, 120 bp, Artificial Sequence
  ENSG00000115211_7 (sequence is synthesized)
agcttcctgactcagtgccgtcccctgtcagcgagcatgcacaacgccatcaagttccttaacaaggaaatcaccagtgtgggcagttccaagcgggaagaggaggccaagtcagaactt

SEQ ID NO: 206872 - DNA, 120 bp, Artificial Sequence
  ENSG00000115211_8 (sequence is synthesized)
cgagcagccattgatcggtatgtgcaagagaagattgtgctagcagctcaggcaatttcacgctttgcttaccagaagatcagtaatggagatgtgatcctggtatatggatgctcatct

SEQ ID NO: 206873 - DNA, 120 bp, Artificial Sequence
  ENSG00000115211_9 (sequence is synthesized)
ctggtatcacgaattcttcaggaggcttggacagagggccggcggtttcgggtggtagtggtggacagccggccatggctggaaggaaggcacacactacgttctctagtccatgctggt

SEQ ID NO: 206874 - DNA, 120 bp, Artificial Sequence
  ENSG00000115211_10 (sequence is synthesized)
gtcccagcctcctacctgctgattcctgcagcctcctatgtgctcccagaggtttccaaggtgctattgggagctcatgcactcttggccaacgggtctgtgatgtcacgggtagggaca

SEQ ID NO: 206875 - DNA, 120 bp, Artificial Sequence
  ENSG00000115211_11 (sequence is synthesized)
gcacagttagccctggtggctcgagcccataatgtaccagtgctggtttgctgtgaaacatacaagttctgtgagcgtgtgcagactgatgcctttgtctctaatgagctagatgaccct

SEQ ID NO: 206876 - DNA, 120 bp, Artificial Sequence
  ENSG00000115211_12 (sequence is synthesized)
gatgatctgcaatgtaagcggggagaacatgttgcgctggctaactggcagaaccacgcatccctacggttgttgaatctagtctatgatgtgactcccccagagcttgtggatctggtg

SEQ ID NO: 206877 - DNA, 120 bp, Artificial Sequence
  ENSG00000115211_13 (sequence is synthesized)
atcacggagctggggatgatcccttgcagttctgtacctgttgttctacgagtcaagagcagtgaccagtgacgggggaaacacagggttaataaatgccatactccctaccctcagcaa

SEQ ID NO: 206878 - DNA, 120 bp, Artificial Sequence
  ENSG00000115211_14 (sequence is synthesized)
atgccaacccagcagccggctgcgccgagtactcgtgcccccaaaccctcccggagtctctctggctcactttgtgccctgttttctgatgcagactcgggatccgggatgaaggcggag

SEQ ID NO: 206879 - DNA, 120 bp, Artificial Sequence
  ENSG00000115211_15 (sequence is synthesized)
ggactgagggcgatggctgctgtggccgtggctgttcgcgagggtgagtgaagagccgggcctgcctactggtacgcggagccgacgagctccggacagctagtgccgggccttgagcgc

SEQ ID NO: 206880 - DNA, 120 bp, Artificial Sequence
  ENSG00000115211_16 (sequence is synthesized)
ctttgggccccgccgctccgttccagcgccacgctgggctccggtctacacagtctcgagcgcagtcccgcgccgcgcaccggctggttgctgtgaggagggtcggtgacccctccattc

SEQ ID NO: 206881 - DNA, 120 bp, Artificial Sequence
  ENSG00000115211_17 (sequence is synthesized)
cttcatctcaaagaaaaaaaaaaaaaagatttattacttgttgtctgtttttgtttctttcccttcttttcacaggtgttgagatttattacttgtcttaatgttgctgtcctgtaagta

SEQ ID NO: 206882 - DNA, 120 bp, Artificial Sequence
  ENSG00000115211_18 (sequence is synthesized)
aagcgctacgcaggaggctgtgccagctttattccgccccagctcccatcccgtgtcggtttatttctcagtaaagccaggagattttacagaggtcttgcaaccctagggatatatgat

SEQ ID NO: 206883 - DNA, 120 bp, Artificial Sequence
  ENSG00000115211_19 (sequence is synthesized)
tctgtccctggaggagaaacgtcagcctctgtggatgtaagcttgcaacaggtagcttgtggaagttaggaagaactagggatttaaccatgtggaaatcttgtaagcatccaatagtat

SEQ ID NO: 206884 - DNA, 120 bp, Artificial Sequence
  ENSG00000115211_20 (sequence is synthesized)
ggaagtgggtttggtgcctggctagaaagagcctagggaaatggactggagggaggaaaggtgctgggtgcaaagtgagaaggataggtgcttgggtcagagtagtcttactgttcactt

SEQ ID NO: 206885 - DNA, 120 bp, Artificial Sequence
  ENSG00000115211_21 (sequence is synthesized)
cctttccagctttatcccatcctttttaaactctgggccattggtcctgttcccttgttttgtcaaggttcctacacgaaaggattatggatccaaagtcagtctcttctctcacctacc

SEQ ID NO: 206886 - DNA, 120 bp, Artificial Sequence
  ENSG00000115211_22 (sequence is synthesized)
ccagtacagcagacaaaactctctgacccagtttatgaggtaggatcctatgaaattgtcataacttttgagtctgaggagttttagtaagtcagtattgaaagtttctagtaatctgag

SEQ ID NO: 206887 - DNA, 120 bp, Artificial Sequence
  ENSG00000115211_23 (sequence is synthesized)
atggactctgtaggaaaaagtatgaacccaaggcagaactgtagaggagtggggaaatctgctagtgaagggagttccttttcatcaggggcaggtgggcagtagatgctcaagctccct

SEQ ID NO: 206888 - DNA, 120 bp, Artificial Sequence
  ENSG00000115211_24 (sequence is synthesized)
ttcaaagtatgtgacaccgccatcccatcagcatcccatcctctgtgatccacccagccatggtgcgactcggcctgcagtactcccagggcctggtcagtggctccaatgcccggtgta

SEQ ID NO: 206889 - DNA, 120 bp, Artificial Sequence
  ENSG00000115211_25 (sequence is synthesized)
ttgccctgcttcgtgccttgcagcaggtatgtcccatcctgttctctcttatgatccaaccccacctcccccaatactaccccagcttctgtcacccaaggtcatctctgggggacagag

SEQ ID NO: 206890 - DNA, 120 bp, Artificial Sequence
  ENSG00000115211_26 (sequence is synthesized)
ggaatactcctaccctcagaacattttcctcagtgaagcttacccccagcccccgttcagagatctttattaaggggtattttgcagatcaccttgtgtaccctataggtgattcaggat

SEQ ID NO: 206891 - DNA, 120 bp, Artificial Sequence
  ENSG00000115211_27 (sequence is synthesized)
agctcgcccaatctttgtcttgtactctttttcctgcttttctatctctcttttcattttgtgttctattttctttttaaagactttttttttaaatgtgaaggctttgtaagttgtgaa

SEQ ID NO: 206892 - DNA, 120 bp, Artificial Sequence
  ENSG00000115211_28 (sequence is synthesized)
gagttgcgcagatataaggtattgctgttgtattatagcttcctgactcagtgccgtcccctgtcagcgagcatgcacaacgccatcaagttccttaacaaggaaatcaccagtgtgggc

SEQ ID NO: 206893 - DNA, 120 bp, Artificial Sequence
  ENSG00000115211_29 (sequence is synthesized)
agttccaagcgggaagaggaggtgatgagtatgagaaataaggaaggcatgcacctgtgggtaaaattaagaaacatgttaaaaactcccgggaaggccaacgtaagcctttttttgccc

SEQ ID NO: 206894 - DNA, 120 bp, Artificial Sequence
  ENSG00000115211_30 (sequence is synthesized)
tagtcaagggttaaggaatggtttggccattctgacttgtgccatctctgagccctctataggcttgtcatcatacacatattcaagcacctggcatgatcatcagagggataaaagtgt

SEQ ID NO: 206895 - DNA, 120 bp, Artificial Sequence
  ENSG00000115211_31 (sequence is synthesized)
taagtacagaggaaaaggactccaaagttggcggtgaaaaggtgtagtagtatagacataatctcaccttcccaaagttacagttttgtttttgttttgagataaggatggagtgcagcg

SEQ ID NO: 206896 - DNA, 120 bp, Artificial Sequence
  ENSG00000115211_32 (sequence is synthesized)
ctcactgcagtcttgacctcctgggctcaggtgatcttcccacctccgcctctgagtagctgggactactggtgtgtgccaccatgcccagctagttttttatttttcttgtagagatgg

SEQ ID NO: 206897 - DNA, 120 bp, Artificial Sequence
  ENSG00000115211_33 (sequence is synthesized)
ttgtagagatgggatatcgctacattgcccaggctggaactcctgggctcaagcagttccccctgtctcggcctcccaaagtactgggatcataggcatgagccactgtgcccagccaca

SEQ ID NO: 206898 - DNA, 120 bp, Artificial Sequence
  ENSG00000115211_34 (sequence is synthesized)
catgagccactgtgcccagccacaattatttaaaaatattagaattatatagccctggcttggtgccatggctcaatgcctgcaatctcagcactaaggcaggaggatcacttgagccca

SEQ ID NO: 206899 - DNA, 90 bp, Artificial Sequence
  ENSG00000115211_35 (sequence is synthesized)
acccccaccccgggcatggtggcatgcgcatgtagttccagctacttaggctgaggtgagaggactgcttgagtgcgtgcgcgcgcgcac

SEQ ID NO: 206900 - DNA, 120 bp, Artificial Sequence
  ENSG00000115211_36 (sequence is synthesized)
gcacgcacacacacacacacacacacagctacttaggaggctgaggtgagaggactgcttgaacacacacacacacacacacacccgggcatggtggcatgcgcatgtagttccagctac

SEQ ID NO: 206901 - DNA, 90 bp, Artificial Sequence
  ENSG00000115211_37 (sequence is synthesized)
ggtgagaggactgcttgaacacacacacacacacacacacccgggcatggtggcatgcgcatgtagttctgcttgagcccaggaggttga

SEQ ID NO: 206902 - DNA, 120 bp, Artificial Sequence
  ENSG00000115211_38 (sequence is synthesized)
gggtgacagaatgaaaccctgtgtcaaaaaaaataattatatagctctgtttctatttaattggaaaaacactgacagtatattacagcagtctagctattgcaaaaacattacattaaa

SEQ ID NO: 206903 - DNA, 120 bp, Artificial Sequence
  ENSG00000115211_39 (sequence is synthesized)
ctagcaaccaggaagagggaacaagacaaaagtaacttcaaagtttacttttcctgtgggagatttggtgggtcagtggtcaggtgttttcacagaagaaaagccatcattaagatttat

SEQ ID NO: 206904 - DNA, 74 bp, Artificial Sequence
  ENSG00000115211_40 (sequence is synthesized)
agatttattaggccggggggcagttcacgaggtcaggagttcacaatcatcctggctaacacagtgaaaccccg

SEQ ID NO: 206905 - DNA, 120 bp, Artificial Sequence
  ENSG00000115211_41 (sequence is synthesized)
acccagagttctgaattgttcctgcaaccccattatcctatccctatttccttttctaccctattctcccgttttctccacctcatcctgtttttcttgatgccccttataccctaagag

SEQ ID NO: 206906 - DNA, 120 bp, Artificial Sequence
  ENSG00000115211_42 (sequence is synthesized)
caaattacacatttcaagacctacagtgtcctgaaaacatgatgattatctttcaggagtgaagcgtctccctgagtaccctcaggttgatgacctacttctgagaaggcttgttaaaaa

SEQ ID NO: 206907 - DNA, 120 bp, Artificial Sequence
  ENSG00000115216_0 (sequence is synthesized)
atcatacacgtctaagggcagagtgaacttccatcctgaaggctccgcgcttagttttcgcagattaatagctcaccaagaatttatcatcttttctttccactaactcgaaaccaatct

SEQ ID NO: 206908 - DNA, 120 bp, Artificial Sequence
  ENSG00000115216_1 (sequence is synthesized)
aaattctttccaaacatcttctcaacgtagtctcctttgatgaaatttactgtttcggattctagacttggctcttaccaacttaactttcggttaatagcttaatacctctgattcagg

SEQ ID NO: 206909 - DNA, 120 bp, Artificial Sequence
  ENSG00000115216_2 (sequence is synthesized)
tttttgcatttgtcaactaccattgaatgataatttcaatgagttcgttcttatgaggatcaaatgaaataacatctgtgaaaacctcttacaaagtttaagcaaatagtgctaagcaat

SEQ ID NO: 206910 - DNA, 120 bp, Artificial Sequence
  ENSG00000115216_3 (sequence is synthesized)
caccaagcgttaactactaattttcagtgttaggcattagaactgtcatggcgccttcaagaagaggtaggaggccctctctgcgtccagcagaaccatctggggcacctggaccgggcg

SEQ ID NO: 206911 - DNA, 120 bp, Artificial Sequence
  ENSG00000115216_4 (sequence is synthesized)
gtggggtggacagagagacgagccccagctgggaccgaaaacatcgacccctccgagaggtctcggccggaccggcgcaaggggaggagagcgggtggaagcccaccccagcgaacgccc

SEQ ID NO: 206912 - DNA, 120 bp, Artificial Sequence
  ENSG00000115216_5 (sequence is synthesized)
gagggccgggccccgcccacccagaacgtcacccaatggaaacctgccggcggtgcggcaccgcccatcgttggtccgggcgccgcgagggcggggcccgcagttcggttgcgctgcgga

SEQ ID NO: 206913 - DNA, 120 bp, Artificial Sequence
  ENSG00000115216_6 (sequence is synthesized)
gcgcagctgtgagggagtcgctgtgatccggggccccggaacccgagctggagctgaagcgcaggctgcggggcgcggagtcgggagtgcaggcctgagtgttccttccagcatgtcgga

SEQ ID NO: 206914 - DNA, 120 bp, Artificial Sequence
  ENSG00000115216_7 (sequence is synthesized)
gggggagtcccagacagtacttagcagtggctcagacccaaaggtagaatcctcatcttcagctcctggcctgacatcagtgtcacctcctgtgacctccacaacctcagctgcttcccc

SEQ ID NO: 206915 - DNA, 120 bp, Artificial Sequence
  ENSG00000115216_8 (sequence is synthesized)
agaggaagaagaagaaagtgaagatgagtctgagattttggaagagtcgccctgtgggcgctggcagaagaggcgagaagaggtgaatcaacggaatgtaccaggtattgacagtgcata

SEQ ID NO: 206916 - DNA, 120 bp, Artificial Sequence
  ENSG00000115216_9 (sequence is synthesized)
cctggccatggatacagaggaaggtgtagaggttgtgtggaatgaggtacagttctctgaacgcaagaactacaagctgcaggaggaaaaggttcgtgctgtgtttgataatctgattca

SEQ ID NO: 206917 - DNA, 120 bp, Artificial Sequence
  ENSG00000115216_10 (sequence is synthesized)
attggagcatcttaacattgttaagtttcacaaatattgggctgacattaaagagaacaaggccagggtcatttttatcacagaatacatgtcatctgggagtctgaagcaatttctgaa

SEQ ID NO: 206918 - DNA, 120 bp, Artificial Sequence
  ENSG00000115216_11 (sequence is synthesized)
gaagaccaaaaagaaccacaagacgatgaatgaaaaggcatggaagcgttggtgcacacaaatcctctctgccctaagctacctgcactcctgtgacccccccatcatccatgggaacct

SEQ ID NO: 206919 - DNA, 120 bp, Artificial Sequence
  ENSG00000115216_12 (sequence is synthesized)
gacaccatcttcatccagcacaacggactcatcaagattggctctgtggctcctgacactatcaacaatcatgtgaagacttgtcgagaagagcagaagaatctacacttctttgcacca

SEQ ID NO: 206920 - DNA, 120 bp, Artificial Sequence
  ENSG00000115216_13 (sequence is synthesized)
gagtatggagaagtcactaatgtgacaacagcagtggacatctactcctttggcatgtgtgcactggagatggcagtgctggagattcagggcaatggagagtcctcatatgtgccacag

SEQ ID NO: 206921 - DNA, 120 bp, Artificial Sequence
  ENSG00000115216_14 (sequence is synthesized)
gaagccatcagcagtgccatccagcttctagaagacccattacagagggagttcattcaaaagtgcctgcagtctgagcctgctcgcagaccaacagccagagaacttctgttccaccca

SEQ ID NO: 206922 - DNA, 120 bp, Artificial Sequence
  ENSG00000115216_15 (sequence is synthesized)
gcattgtttgaagtgccctcgctcaaactccttgcggcccactgcattgtgggacaccaacacatgatcccagagaacgctctagaggagatcaccaaaaacatggatactagtgccgta

SEQ ID NO: 206923 - DNA, 120 bp, Artificial Sequence
  ENSG00000115216_16 (sequence is synthesized)
ctggctgaaatccctgcaggaccaggaagagaaccagttcagactttgtactctcagtcaccagctctggaattagataaattccttgaagatgtcaggaatgggatctatcctctgaca

SEQ ID NO: 206924 - DNA, 120 bp, Artificial Sequence
  ENSG00000115216_17 (sequence is synthesized)
gcctttgggctgcctcggccccagcagccacagcaggaggaggtgacatcacctgtcgtgcccccctctgtcaagactccgacacctgaaccagctgaggtggagactcgcaaggtggtg

SEQ ID NO: 206925 - DNA, 120 bp, Artificial Sequence
  ENSG00000115216_18 (sequence is synthesized)
ctgatgcagtgcaacattgagtcggtggaggagggagtcaaacaccacctgacacttctgctgaagttggaggacaaactgaaccggcacctgagctgtgacctgatgccaaatgagaat

SEQ ID NO: 206926 - DNA, 120 bp, Artificial Sequence
  ENSG00000115216_19 (sequence is synthesized)
atccccgagttggcggctgagctggtgcagctgggcttcattagtgaggctgaccagagccggttgacttctctgctagaagagaccttgaacaagttcaattttgccaggaacagtacc

SEQ ID NO: 206927 - DNA, 120 bp, Artificial Sequence
  ENSG00000115216_20 (sequence is synthesized)
ctcaactcagccgctgtcaccgtctcctcttagagctcactcgggccaggccctgatctgcgctgtggctgtccctggacgtgctgcagccctcctgtcccttccccccagtcagtatta

SEQ ID NO: 206928 - DNA, 120 bp, Artificial Sequence
  ENSG00000115216_21 (sequence is synthesized)
ccctgtgaagccccttccctcctttattattcaggagggctgggggggctccctggttctgagcatcatcctttcccctcccctctcttcctcccctctgcactttgtttacttgttttg

SEQ ID NO: 206929 - DNA, 120 bp, Artificial Sequence
  ENSG00000115216_22 (sequence is synthesized)
cacagacgtgggcctgggccttctcagcagccgccttctagttgggggctagtcgctgatctgccggctcccgcccagcctgtgtggaaaggaggcccacgggcactaggggagccgaat

SEQ ID NO: 206930 - DNA, 120 bp, Artificial Sequence
  ENSG00000115216_23 (sequence is synthesized)
tctacaatcccgctggggcggccggggcgggagagaaaggtggtgctgcagtggtggccctggggggccattcgattcgcctcagttgctgctgtaataaaagtctactttttgctaaaa

SEQ ID NO: 206931 - DNA, 120 bp, Artificial Sequence
  ENSG00000115216_24 (sequence is synthesized)
ggttgcgctgcggagcgcagctgtgagggagtcgctgtgatccggggccccggaacccgagctggagctgaagcgcaggctgcggggcgcggagtcgggaggcctgagtgttccttccag

SEQ ID NO: 206932 - DNA, 120 bp, Artificial Sequence
  ENSG00000115216_25 (sequence is synthesized)
gggctctgtttgtgctccctctgctcccttggcggctgcccagtgcatgcagtcgtgggagcaaaccctcttcccctatcttccctgcctaattatgcctgcttagcttctgccctgcca

SEQ ID NO: 206933 - DNA, 120 bp, Artificial Sequence
  ENSG00000115216_26 (sequence is synthesized)
gccctccgcctgcttgccccttcataacctgcttgtttcctgtggattctgcctggctggccacttacctcctggattcatgttctccctcatcatcaggctagttcccagatcatactg

SEQ ID NO: 206934 - DNA, 120 bp, Artificial Sequence
  ENSG00000115216_27 (sequence is synthesized)
ccctaaccacgacacttatctcctacctctttctcctagtgcttatccagctatttaaatcatcaggcataatggagattcagagtgtggggattatctttatggtgaccagcaggagac

SEQ ID NO: 206935 - DNA, 120 bp, Artificial Sequence
  ENSG00000115216_28 (sequence is synthesized)
ctggcccttgctcctcttaacccttgggttccccctgcccttaatttcccagtggcccctctaacagcccagtgcccccacagctacctgcactcctgtgacccccccatcatccatggg

SEQ ID NO: 206936 - DNA, 120 bp, Artificial Sequence
  ENSG00000115216_29 (sequence is synthesized)
gaggtggccgccgctggctccctgggccccagcctggttcccgcgcgggccgcggctgccttccagacgcagggcatgcgacctgttggagtgtgaaattctaggggccgggttcctccc

SEQ ID NO: 206937 - DNA, 120 bp, Artificial Sequence
  ENSG00000115216_30 (sequence is synthesized)
tgtatgcagtgtacaacatttctgtgtgctgtgtctgtgtggtatttgtgtgtccatttgtctggggcttggctgctccatcgctcacaacttttctctgttttcctccctcccgcttac

SEQ ID NO: 206938 - DNA, 120 bp, Artificial Sequence
  ENSG00000115216_31 (sequence is synthesized)
tccaaattgggcctggtcctggttcctcgttcagctctgtggcagacagtgttgaggaataagggggtagaacaggagtctaaaatgttttggtggattaaaagtggaacagattcaagg

SEQ ID NO: 206939 - DNA, 120 bp, Artificial Sequence
  ENSG00000115216_32 (sequence is synthesized)
gtattagctcaattctgagctgttttgagtttcactcagcaaaggtgggtaagaaggaggctacctcctgagctgtatgttaatacttcttatccttatttatccaagttcctgaggtct

SEQ ID NO: 206940 - DNA, 120 bp, Artificial Sequence
  ENSG00000115216_33 (sequence is synthesized)
ccaattgtcccagattaggaagggctgcctgtgtttttatgttatttgcagggtggatgaaaaaactaaaaccaaatattttcatgtgagcagggattagaggtacctgggatttaggga

SEQ ID NO: 206941 - DNA, 120 bp, Artificial Sequence
  ENSG00000115216_34 (sequence is synthesized)
aggtgaacgcagtacaagtgaaaatttttccttaaacttcattgcttctagaccagcctgaagcccctgtgtatctgttaatttagtctggtgcttttgttgctcctgatttagggacat

SEQ ID NO: 206942 - DNA, 120 bp, Artificial Sequence
  ENSG00000115216_35 (sequence is synthesized)
tagatgagaagcagtaggcctaagaaaggggaggtaggtggcatccatgtgtggtctgtagttcaggacaggaaagggaatatgtttgtgcctgttgagggtcatcagaaaggagacttc

SEQ ID NO: 206943 - DNA, 120 bp, Artificial Sequence
  ENSG00000115216_36 (sequence is synthesized)
aggagagaatttggcttttggggcctctctctggagtgagactattcttcattgatgatggtcagattgtgggtgtctcccctactcccagtggctcctgacactatcaacaatcatgtg

SEQ ID NO: 206944 - DNA, 120 bp, Artificial Sequence
  ENSG00000115216_37 (sequence is synthesized)
gggattctttacccctttgcctgcatgccttctttgacatttaatctgactatcccttcataatatcccactccatcatgccctccagacatgatcccagagaacgctctagaggagatc

SEQ ID NO: 206945 - DNA, 120 bp, Artificial Sequence
  ENSG00000115216_38 (sequence is synthesized)
accaaaaacatggatactagtgccgtactggctgaaatccctgcaggaccaggaagagaaccagttcagactttgtgagtaactgagagggtctgaaaggggcagattggtcacgaccac

SEQ ID NO: 206946 - DNA, 120 bp, Artificial Sequence
  ENSG00000115216_39 (sequence is synthesized)
tcttgaggctctgtaaactgtccattctctgggaatgcttgaatttgctattttgcttgtttctttccttccatctcctttctcttttctcgtccaggtactctcagtcaccagctctgg

SEQ ID NO: 206947 - DNA, 120 bp, Artificial Sequence
  ENSG00000115216_40 (sequence is synthesized)
tagggacatattcaggggtgggggaggtgacaaggcagtaacacattgactcacatagaatgactatcttagaccctaaagcagtgggtggatctgactgacagtttagccctagtgggg

SEQ ID NO: 206948 - DNA, 120 bp, Artificial Sequence
  ENSG00000115216_41 (sequence is synthesized)
gtgtagagaagggatggatagtgaatgccaaggttagttctagctggataaattagccaagggtttcagctggataagttggctgagggtgctacaggtctagccttaaggctgtctcac

SEQ ID NO: 206949 - DNA, 120 bp, Artificial Sequence
  ENSG00000115216_42 (sequence is synthesized)
ggctgagggtgctacaggtctagccttaaggctgtctcactgaaacattttggagtctggagtcatctgttctgaatagcgcccacatagtttatatttttttattttttgagacagagt

SEQ ID NO: 206950 - DNA, 120 bp, Artificial Sequence
  ENSG00000115221_0 (sequence is synthesized)
gctttacctgtccaggtagcctctgttttcatttcagtcttaatgaaaactttctaacttatatctcaagtttcttttcaaagcagtgtaagtagtatttaaaatgttatacttcaagaa

SEQ ID NO: 206951 - DNA, 120 bp, Artificial Sequence
  ENSG00000115221_1 (sequence is synthesized)
agaaagactttaacgatattcagcgttggtcttgtaacgctgaaggtaattcattttttaatcggtctgcacagcaagaactgaaacgaatggggattgaactgctttgcctgttctttc

SEQ ID NO: 206952 - DNA, 120 bp, Artificial Sequence
  ENSG00000115221_2 (sequence is synthesized)
tatttctaggaaggaatgatcacgtacaaggtggctgtgccctgggaggtgcagaaacctgtgaagactgcctgcttattggacctcagtgtgcctggtgtgctcaggagaattttactc

SEQ ID NO: 206953 - DNA, 120 bp, Artificial Sequence
  ENSG00000115221_3 (sequence is synthesized)
atccatctggagttggcgaaaggtgtgataccccagcaaaccttttagctaaaggatgtcaattaaacttcatcgaaaaccctgtctcccaagtagaaatacttaaaaataagcctctca

SEQ ID NO: 206954 - DNA, 120 bp, Artificial Sequence
  ENSG00000115221_4 (sequence is synthesized)
gtgtaggcagacagaaaaatagttctgacattgttcagattgcgcctcaaagcttgatccttaagttgagaccaggtggtgcgcagactctgcaggtgcatgtccgccagactgaggact

SEQ ID NO: 206955 - DNA, 120 bp, Artificial Sequence
  ENSG00000115221_5 (sequence is synthesized)
acccggtggatttgtattacctcatggacctctccgcctccatggatgacgacctcaacacaataaaggagctgggctcccggctttccaaagagatgtctaaattaaccagcaacttta

SEQ ID NO: 206956 - DNA, 120 bp, Artificial Sequence
  ENSG00000115221_6 (sequence is synthesized)
gactgggcttcggatcttttgtggaaaaacctgtatccccttttgtgaaaacaacaccagaagaaattgccaacccttgcagtagtattccatacttctgtttacctacatttggattca

SEQ ID NO: 206957 - DNA, 120 bp, Artificial Sequence
  ENSG00000115221_7 (sequence is synthesized)
agcacattttgccattgacaaatgatgctgaaagattcaatgaaattgtgaagaatcagaaaatttctgctaatattgacacacccgaaggtggatttgatgcaattatgcaagctgctg

SEQ ID NO: 206958 - DNA, 120 bp, Artificial Sequence
  ENSG00000115221_8 (sequence is synthesized)
tgtgtaaggaaaaaattggctggcggaatgactccctccacctcctggtctttgtgagtgatgctgattctcattttggaatggacagcaaactagcaggcatcgtcattcctaatgacg

SEQ ID NO: 206959 - DNA, 120 bp, Artificial Sequence
  ENSG00000115221_9 (sequence is synthesized)
ggctctgtcacttggacagcaagaatgaatactccatgtcaactgtcttggaatatccaacaattggacaactcattgataaactggtacaaaacaacgtgttattgatcttcgctgtaa

SEQ ID NO: 206960 - DNA, 120 bp, Artificial Sequence
  ENSG00000115221_10 (sequence is synthesized)
cccaagaacaagttcatttatatgagaattacgcaaaacttattcctggagctacagtaggtctacttcagaaggactccggaaacattctccagctgatcatctcagcttatgaagaac

SEQ ID NO: 206961 - DNA, 120 bp, Artificial Sequence
  ENSG00000115221_11 (sequence is synthesized)
tgcggtctgaggtggaactggaagtattaggagacactgaaggactcaacttgtcatttacagccatctgtaacaacggtaccctcttccaacaccaaaagaaatgctctcacatgaaag

SEQ ID NO: 206962 - DNA, 120 bp, Artificial Sequence
  ENSG00000115221_12 (sequence is synthesized)
tgggagacacagcttccttcagcgtgactgtgaatatcccacactgcgagagaagaagcaggcacattatcataaagcctgtggggctgggggatgccctggaattacttgtcagcccag

SEQ ID NO: 206963 - DNA, 120 bp, Artificial Sequence
  ENSG00000115221_13 (sequence is synthesized)
aatgcaactgcgactgtcagaaagaagtggaagtgaacagctccaaatgtcaccacgggaacggctctttccagtgtggggtgtgtgcctgccaccctggccacatggggcctcgctgtg

SEQ ID NO: 206964 - DNA, 120 bp, Artificial Sequence
  ENSG00000115221_14 (sequence is synthesized)
agtgtggcgaggacatgctgagcacagattcctgcaaggaggccccagatcatccctcctgcagcggaaggggtgactgctactgtgggcagtgtatctgccacttgtctccctatggaa

SEQ ID NO: 206965 - DNA, 120 bp, Artificial Sequence
  ENSG00000115221_15 (sequence is synthesized)
acatttatgggccttattgccagtgtgacaatttctcctgcgtgagacacaaagggctgctctgcggaggtaacggcgactgtgactgtggtgaatgtgtgtgcaggagcggctggactg

SEQ ID NO: 206966 - DNA, 120 bp, Artificial Sequence
  ENSG00000115221_16 (sequence is synthesized)
gcgagtactgcaactgcaccaccagcacggactcctgcgtctctgaagatggagtgctctgcagcgggcgcggggactgtgtttgtggcaagtgtgtttgcacaaaccctggagcctcag

SEQ ID NO: 206967 - DNA, 120 bp, Artificial Sequence
  ENSG00000115221_17 (sequence is synthesized)
gaccaacctgtgaacgatgtcctacctgtggtgacccctgtaactctaaacggagctgcattgagtgccacctgtcagcagctggccaagcccgagaagaatgtgtggacaagtgcaaac

SEQ ID NO: 206968 - DNA, 120 bp, Artificial Sequence
  ENSG00000115221_18 (sequence is synthesized)
tagctggtgcgaccatcagtgaagaagaagatttctcaaaggatggttctgtttcctgctctctgcaaggagaaaatgaatgtcttattacattcctaataactacagataatgagggga

SEQ ID NO: 206969 - DNA, 120 bp, Artificial Sequence
  ENSG00000115221_19 (sequence is synthesized)
ctattcttctcatcggggttgtcctactgtgcatctggaagctactggtgtcatttcatgatcgtaaagaagttgccaaatttgaagcagaacgatcaaaagccaagtggcaaacgggaa

SEQ ID NO: 206970 - DNA, 120 bp, Artificial Sequence
  ENSG00000115221_20 (sequence is synthesized)
ccaatccactctacagaggatccacaagtacttttaaaaatgtaacttataaacacagggaaaaacaaaaggtagacctttccacagattgctagaactactttatgcatgaaaaaagtc

SEQ ID NO: 206971 - DNA, 120 bp, Artificial Sequence
  ENSG00000115221_21 (sequence is synthesized)
tgtttcactgatatgaaatgttaatgcactatttaatttttttctctttgttgcttcaaaatgaggttggtttaagataataataggacatctgcagataagtcatcctctacatgaagg

SEQ ID NO: 206972 - DNA, 120 bp, Artificial Sequence
  ENSG00000115221_22 (sequence is synthesized)
tgacagactgttggcagtttcaaaataatcaagaagagaaatatccttagcaaagagatgactttggggatcatttgaggaatactaactctgttgcattaatgcttcaaaaaatcatca

SEQ ID NO: 206973 - DNA, 120 bp, Artificial Sequence
  ENSG00000115221_23 (sequence is synthesized)
aatgattcatgggggcctgatttgcatttgaaaaatgtttgaaattagagtctcatttgtttcaggaatgcagctacctgagttttttgtctcggcaaagtcacaaagcccatatactca

SEQ ID NO: 206974 - DNA, 120 bp, Artificial Sequence
  ENSG00000115221_24 (sequence is synthesized)
cattgtgtgtctatacttgccaattaattctaaacttgtaggaaatatgccctctcttaaaggagaattttttttaaatctctgagaaatgagattctgagtttatttcagctaaaaggt

SEQ ID NO: 206975 - DNA, 120 bp, Artificial Sequence
  ENSG00000115221_25 (sequence is synthesized)
tgcaattcttctgaagatatctcaaatataaggttgaaagttaagtgttaataatttttgtgaatttatacacacctaaacgttaagtacacaaatattttatttgttttacaaataagg

SEQ ID NO: 206976 - DNA, 120 bp, Artificial Sequence
  ENSG00000115221_26 (sequence is synthesized)
aataagtaatttataaattaagaagttacctataaaaataaaaagataacaaccctatcatatagcttatttttaaattacctgaaaaacgatattctacactgtttcctttttgactct

SEQ ID NO: 206977 - DNA, 120 bp, Artificial Sequence
  ENSG00000115221_27 (sequence is synthesized)
gagttttcaaactgttacttctcccatatttctcaatccatttcactcagttgcacagtcttttaaaccctgtaattgtcataccaaagtttctttttaaaaaaaaattactttaaatgc

SEQ ID NO: 206978 - DNA, 120 bp, Artificial Sequence
  ENSG00000115221_28 (sequence is synthesized)
ttagtttattcaaagagcgatccaataatataaaaggaacatgtgttaaacacaataaaattttaaatggctctaaatcaagcacatcaagagtatacaagtcttaaaggctttttaata

SEQ ID NO: 206979 - DNA, 120 bp, Artificial Sequence
  ENSG00000115221_29 (sequence is synthesized)
catactcttttcccatctatgtaacccaacttgcacatttcagctgcatgtggtgaatatgcatcatatatttactttaagaggtaagattttacttgcaaaatacatgtgcaaattagg

SEQ ID NO: 206980 - DNA, 120 bp, Artificial Sequence
  ENSG00000115221_30 (sequence is synthesized)
gatccatcagttgatggaagagatggactctagaatattatttcttgtggttattactcctttacaaagcactttcgtctcacttgatcctcataaggaaactaaggctcagaatgagta

SEQ ID NO: 206981 - DNA, 120 bp, Artificial Sequence
  ENSG00000115221_31 (sequence is synthesized)
gagctgggttcagaatctagctcttctaactccaagccatctcctctttccactgcaggaaactgcctcttttgtcagtgaaataatagaaagattgtgttagttaagtgataactgtca

SEQ ID NO: 206982 - DNA, 120 bp, Artificial Sequence
  ENSG00000115221_32 (sequence is synthesized)
tttgtttgaaaatgttcgagactgaacaaatagcatttaaactgctggcatatagatgagatattgtacttttgtgcaatgtttattacctttgattaaattgtaatgtgaagcttttac

SEQ ID NO: 206983 - DNA, 120 bp, Artificial Sequence
  ENSG00000115221_33 (sequence is synthesized)
taggtgaatagttcattatgtagtggaggcttcgtggttgtccattgaattgtcacagcaaaatctataagtttcttcaattctacaagatagatccatatacctttgatcacttggaga

SEQ ID NO: 206984 - DNA, 120 bp, Artificial Sequence
  ENSG00000115221_34 (sequence is synthesized)
ctctttttttgctggtttctagataactcaggtaaatcagacctttacagagtacagggctaggtgaaagaattactgaaaaatcaccttgaaaatccgaagggctgatataccctttat

SEQ ID NO: 206985 - DNA, 120 bp, Artificial Sequence
  ENSG00000115221_35 (sequence is synthesized)
gttcctgactgatgcgcagaacctgggggaaatctacagcaatatacaggttgcaatgctgataacacaacagcaatcctctcctctacgtggacttactgttgtttttttaattattat

SEQ ID NO: 206986 - DNA, 120 bp, Artificial Sequence
  ENSG00000115221_36 (sequence is synthesized)
tggaatgggattttagaaaatagaagttacctttgtgtgtgttttagggaaggtagagaagaatctgctctttctctgaatactgttttgaccccaggcaggaccttggaaaggccaaaa

SEQ ID NO: 206987 - DNA, 120 bp, Artificial Sequence
  ENSG00000115221_37 (sequence is synthesized)
cattaacagtagtacttctgttcactgaagagttatgttacatgaagataaaatggttttgtcgtgtttattattgtattttgtgttgatataaataaacatggtaatttaaacaatgaa

SEQ ID NO: 206988 - DNA, 120 bp, Artificial Sequence
  ENSG00000115221_38 (sequence is synthesized)
atgttgaagttgcttttaaacacagcttttctgctttacctgtccaggtagcctctgttttcatttcagtcttaatgaaaactttctaacttatatctcaagtttcttttcaaagcagtc

SEQ ID NO: 206989 - DNA, 120 bp, Artificial Sequence
  ENSG00000115221_39 (sequence is synthesized)
cttggtgtgtaacctgcactctgtactgttttcagggctataagtaggagaacgaagcaacaactagtgtaatacatgtgaaataacatacacttggtgaaagcagtgcacattttctaa

SEQ ID NO: 206990 - DNA, 120 bp, Artificial Sequence
  ENSG00000115221_40 (sequence is synthesized)
tgtgggattaacaagttgccccagctcgattctcaccatcctcagaggttcccaccagagcataggtggacggtgggacatgtgggaagttagatctgctatgaatcccatgatcccaga

SEQ ID NO: 206991 - DNA, 120 bp, Artificial Sequence
  ENSG00000115221_41 (sequence is synthesized)
acctccccaacttctcaaaaatcctggtgctggtaaagcaatacaggcagctcattctattctcagccacagcctcagaaaggagggacccagaccagaacagtagccacataggatttg

SEQ ID NO: 206992 - DNA, 120 bp, Artificial Sequence
  ENSG00000115221_42 (sequence is synthesized)
aggccatcctttcatgttccatgggtaacaactagtcaggtatggcttggttggtgcttgttaacctttggcttattttttgtcatttataaaatgctagtgacattcaaagaaaacagc

SEQ ID NO: 206993 - DNA, 120 bp, Artificial Sequence
  ENSG00000115221_43 (sequence is synthesized)
taactcttgtaaaaccaggaaaaaatttcagagctctttggacatgcatgatctcctcaatagacccctatgtatccagctgcttttcctgaacagaccatgaggctgctatgcttgtgc

SEQ ID NO: 206994 - DNA, 120 bp, Artificial Sequence
  ENSG00000115221_44 (sequence is synthesized)
acatgttattccctctgcctggaatatccttccttcctagcctgctgagaaactcttcattatccttgaaaagccagttcagtcattactgcccccagagagccttctttgacctctgcc

SEQ ID NO: 206995 - DNA, 120 bp, Artificial Sequence
  ENSG00000115221_45 (sequence is synthesized)
aggctctgaagcaattgtctttcccttcagttgcatacgcagatgtgttcttgtgcatctctatgtagaaatatgttttcttacatctgtctgtctttcttgcacaatcctcaggtccag

SEQ ID NO: 206996 - DNA, 120 bp, Artificial Sequence
  ENSG00000115221_46 (sequence is synthesized)
ccagacctggtttattatctctgtttcctgatagcacagtgcctataacacagtgggtgccaactaatgtatgaaatagaggccgggcacgttggctcacgcctataatcccagcatttt

SEQ ID NO: 206997 - DNA, 120 bp, Artificial Sequence
  ENSG00000115221_47 (sequence is synthesized)
tttaaaaatgtaacttataaacacagggaaaaacaaaaggttggtttaagataataataggacatctgcagataagtcatcctctacatgaaggtgacagactgttggcagtttcaaaat

SEQ ID NO: 206998 - DNA, 120 bp, Artificial Sequence
  ENSG00000115226_0 (sequence is synthesized)
ggctggctctccgggacggtcacatcccgctgcaggggcgggcggaggccgccgcactgcctcccgcaccggggacccaggccagcgtccgggcaacgccccctgctcccggacagactc

SEQ ID NO: 206999 - DNA, 80 bp, Artificial Sequence
  ENSG00000115226_1 (sequence is synthesized)
ccggacagactccgtggcccgctcgagccctgggggctccgcagacccgcgcccgctccgcccgcagctcggccccgcgc

SEQ ID NO: 207000 - DNA, 120 bp, Artificial Sequence
  ENSG00000115226_2 (sequence is synthesized)
agcgccaccgagtcgggcgatgggccgccctctgggcaccgagcagccccccgaggcctgaccaaccgcgaggaccggcggaggagccccgcctggatgtcaagcggatgccaagcggat

SEQ ID NO: 207001 - DNA, 120 bp, Artificial Sequence
  ENSG00000115226_3 (sequence is synthesized)
gccacagttccccccccagcggactccgtggggacatggcttcgctggtgcccctttccccatatctaagccccacggtcctcctgctggtcagctgtgacctgggcttcgtgcgagcag

SEQ ID NO: 207002 - DNA, 120 bp, Artificial Sequence
  ENSG00000115226_4 (sequence is synthesized)
accggcctccctctcctgtgaatgtgacggtcactcacctcagagccaactcggccactgtgtcctgggacgtcccagaaggcaacatcgtcattggctactccatttcccagcaacggc

SEQ ID NO: 207003 - DNA, 120 bp, Artificial Sequence
  ENSG00000115226_5 (sequence is synthesized)
agaatggccccgggcagcgtgtgattcgggaggtgaacaccaccacccgggcctgtgccctctggggcctggctgaagacagtgactacacagtgcaggtcaggagcatcggccttcggg

SEQ ID NO: 207004 - DNA, 120 bp, Artificial Sequence
  ENSG00000115226_6 (sequence is synthesized)
ccggctaccttcaaacagttcaagcccaggtgacatcacagtggaaggtctggatggagagcggccactgcagactggggaagtggtcatcattgtggtggtgttgctcatgtgggctgc

SEQ ID NO: 207005 - DNA, 120 bp, Artificial Sequence
  ENSG00000115226_7 (sequence is synthesized)
tgtaattgggctgttctgccgtcagtatgacatcatcaaggacaatgactccaacaacaatcccaaggagaagggaaaggggccggaacagagtcctcagggaaggccagtggggacaag

SEQ ID NO: 207006 - DNA, 120 bp, Artificial Sequence
  ENSG00000115226_8 (sequence is synthesized)
acagaaaaagtcaccatctatcaacaccatcgacgtttgagtgaagaaacacacccagaagagagatgcactaacaactggggatagggatggggtcagggggagcccaagatggtgatc

SEQ ID NO: 207007 - DNA, 120 bp, Artificial Sequence
  ENSG00000115226_9 (sequence is synthesized)
tgcccgagactcccagagggtaatgccactcccacaatctcaggcctggtacccatcctctttccactgtgagcagagccagaaggtaggtctgttcagagtctgtgcccctggacctgg

SEQ ID NO: 207008 - DNA, 120 bp, Artificial Sequence
  ENSG00000115226_10 (sequence is synthesized)
ggagtggatatcagatgggatatctccttccattccccggtccaggggagagtcactagttgtaccctactccattaggtcccaaatgggggccccatttcacctgtatcaggactctga

SEQ ID NO: 207009 - DNA, 120 bp, Artificial Sequence
  ENSG00000115226_11 (sequence is synthesized)
gcatccccagctgccccacatcttgcctctggccctcagagaggggtgtttctgtgggtactcctcttaccccagcaaataaaaggaattgtctgaccctagaggcagatgctgcactgc

SEQ ID NO: 207010 - DNA, 120 bp, Artificial Sequence
  ENSG00000115226_12 (sequence is synthesized)
actactccaatgtcttccatggagcctcaggtgctccccctctcacctggcagccccttcagctgctagtgatatcacttgttggacatttttccaataaaggttcttggacaaactgga

SEQ ID NO: 207011 - DNA, 120 bp, Artificial Sequence
  ENSG00000115226_13 (sequence is synthesized)
gagaaaatagggctgttgtgagctgtggggagcccaggagagctgctgccccccgacctccgtgcgttctgggcagtccttgaccccccacaactcctgccatctccaggagccccgcct

SEQ ID NO: 207012 - DNA, 120 bp, Artificial Sequence
  ENSG00000115226_14 (sequence is synthesized)
ttcggcacatttcttcacttaagtgggggggatctggaagctggcgtatcctggctcaggctgcccttttcacgctactcccccggagtgcttggatgttgaagagtctctggttgagcc

SEQ ID NO: 207013 - DNA, 120 bp, Artificial Sequence
  ENSG00000115232_0 (sequence is synthesized)
gaagcagcgcgagcacccgaagctcccggctggcggcagaaaccgggagtggggccgggcgagtgcgcggcatcccaggccggcccgaacgctccgcccgcggtgggccgacttcccctc

SEQ ID NO: 207014 - DNA, 120 bp, Artificial Sequence
  ENSG00000115232_1 (sequence is synthesized)
ctcttccctctctccttcctttagcccgctggcgccggacacgctgcgcctcatctcttggggcgttcttccccgttggccaaccgtcgcatcccgtgcaactttggggtagtggccgtt

SEQ ID NO: 207015 - DNA, 120 bp, Artificial Sequence
  ENSG00000115232_2 (sequence is synthesized)
tagtgttgaatgttccccaccgagagcgcatggcttgggaagcgaggcgcgaacccggcccccgaagggccgccgtccgggagacggtgatgctgttgctgtgcctgggggtcccgaccg

SEQ ID NO: 207016 - DNA, 120 bp, Artificial Sequence
  ENSG00000115232_3 (sequence is synthesized)
gccgcccctacaacgtggacactgagagcgcgctgctttaccagggcccccacaacacgctgttcggctactcggtcgtgctgcacagccacggggcgaaccgatggctcctagtgggtg

SEQ ID NO: 207017 - DNA, 120 bp, Artificial Sequence
  ENSG00000115232_4 (sequence is synthesized)
cgcccactgccaactggctcgccaacgcttcagtgatcaatcccggggcgatttacagatgcaggatcggaaagaatcccggccagacgtgcgaacagctccagctgggtagccctaatg

SEQ ID NO: 207018 - DNA, 120 bp, Artificial Sequence
  ENSG00000115232_5 (sequence is synthesized)
gagaaccttgtggaaagacttgtttggaagagagagacaatcagtggttgggggtcacactttccagacagccaggagaaaatggatccatcgtgacttgtgggcatagatggaaaaata

SEQ ID NO: 207019 - DNA, 120 bp, Artificial Sequence
  ENSG00000115232_6 (sequence is synthesized)
tattttacataaagaatgaaaataagctccccactggtggttgctatggagtgccccctgatttacgaacagaactgagtaaaagaatagctccgtgttatcaagattatgtgaaaaaat

SEQ ID NO: 207020 - DNA, 120 bp, Artificial Sequence
  ENSG00000115232_7 (sequence is synthesized)
ttggagaaaattttgcatcatgtcaagctggaatatccagtttttacacaaaggatttaattgtgatgggggccccaggatcatcttactggactggctctctttttgtctacaatataa

SEQ ID NO: 207021 - DNA, 120 bp, Artificial Sequence
  ENSG00000115232_8 (sequence is synthesized)
ctacaaataaatacaaggcttttttagacaaacaaaatcaagtaaaatttggaagttatttaggatattcagtcggagctggtcattttcggagccagcatactaccgaagtagtcggag

SEQ ID NO: 207022 - DNA, 120 bp, Artificial Sequence
  ENSG00000115232_9 (sequence is synthesized)
gagctcctcaacatgagcagattggtaaggcatatatattcagcattgatgaaaaagaactaaatatcttacatgaaatgaaaggtaaaaagcttggatcgtactttggagcttctgtct

SEQ ID NO: 207023 - DNA, 120 bp, Artificial Sequence
  ENSG00000115232_10 (sequence is synthesized)
gtgctgtggacctcaatgcagatggcttctcagatctgctcgtgggagcacccatgcagagcaccatcagagaggaaggaagagtgtttgtgtacatcaactctggctcgggagcagtaa

SEQ ID NO: 207024 - DNA, 120 bp, Artificial Sequence
  ENSG00000115232_11 (sequence is synthesized)
tgaatgcaatggaaacaaacctcgttggaagtgacaaatatgctgcaagatttggggaatctatagttaatcttggcgacattgacaatgatggctttgaagatgttgctatcggagctc

SEQ ID NO: 207025 - DNA, 120 bp, Artificial Sequence
  ENSG00000115232_12 (sequence is synthesized)
cacaagaagatgacttgcaaggtgctatttatatttacaatggccgtgcagatgggatctcgtcaaccttctcacagagaattgaaggacttcagatcagcaaatcgttaagtatgtttg

SEQ ID NO: 207026 - DNA, 120 bp, Artificial Sequence
  ENSG00000115232_13 (sequence is synthesized)
gacagtctatatcaggacaaattgatgcagataataatggctatgtagatgtagcagttggtgcttttcggtctgattctgctgtcttgctaaggacaagacctgtagtaattgttgacg

SEQ ID NO: 207027 - DNA, 120 bp, Artificial Sequence
  ENSG00000115232_14 (sequence is synthesized)
cttctttaagccaccctgagtcagtaaatagaacgaaatttgactgtgttgaaaatggatggccttctgtgtgcatagatctaacactttgtttctcatataagggcaaggaagttccag

SEQ ID NO: 207028 - DNA, 120 bp, Artificial Sequence
  ENSG00000115232_15 (sequence is synthesized)
gttacattgttttgttttataacatgagtttggatgtgaacagaaaggcagagtctccaccaagattctatttctcttctaatggaacttctgacgtgattacaggaagcatacaggtgt

SEQ ID NO: 207029 - DNA, 120 bp, Artificial Sequence
  ENSG00000115232_16 (sequence is synthesized)
ccagcagagaagctaactgtagaacacatcaagcatttatgcggaaagatgtgcgggacatcctcaccccaattcagattgaagctgcttaccaccttggtcctcatgtcatcagtaaac

SEQ ID NO: 207030 - DNA, 120 bp, Artificial Sequence
  ENSG00000115232_17 (sequence is synthesized)
gaagtacagaggaattcccaccacttcagccaattcttcagcagaagaaagaaaaagacataatgaaaaaaacaataaactttgcaaggttttgtgcccatgaaaattgttctgctgatt

SEQ ID NO: 207031 - DNA, 120 bp, Artificial Sequence
  ENSG00000115232_18 (sequence is synthesized)
tacaggtttctgcaaagattgggtttttgaagccccatgaaaataaaacatatcttgctgttgggagtatgaagacattgatgttgaatgtgtccttgtttaatgctggagatgatgcat

SEQ ID NO: 207032 - DNA, 120 bp, Artificial Sequence
  ENSG00000115232_19 (sequence is synthesized)
atgaaacgactctacatgtcaaactacccgtgggtctttatttcattaagattttagagctggaagagaagcaaataaactgtgaagtcacagataactctggcgtggtacaacttgact

SEQ ID NO: 207033 - DNA, 120 bp, Artificial Sequence
  ENSG00000115232_20 (sequence is synthesized)
gcagtattggctatatatatgtagatcatctctcaaggatagatattagctttctcctggatgtgagctcactcagcagagcggaagaggacctcagtatcacagtgcatgctacctgtg

SEQ ID NO: 207034 - DNA, 120 bp, Artificial Sequence
  ENSG00000115232_21 (sequence is synthesized)
aaaatgaagaggaaatggacaatctaaagcacagcagagtgactgtagcaatacctttaaaatatgaggttaagctgactgttcatgggtttgtaaacccaacttcatttgtgtatggat

SEQ ID NO: 207035 - DNA, 120 bp, Artificial Sequence
  ENSG00000115232_22 (sequence is synthesized)
caaatgatgaaaatgagcctgaaacgtgcatggtggagaaaatgaacttaactttccatgttatcaacactggcaatagtatggctcccaatgttagtgtggaaataatggtaccaaatt

SEQ ID NO: 207036 - DNA, 120 bp, Artificial Sequence
  ENSG00000115232_23 (sequence is synthesized)
cttttagcccccaaactgataagctgttcaacattttggatgtccagactactactggagaatgccactttgaaaattatcaaagagtgtgtgcattagagcagcaaaagagtgcaatgc

SEQ ID NO: 207037 - DNA, 120 bp, Artificial Sequence
  ENSG00000115232_24 (sequence is synthesized)
agaccttgaaaggcatagtccggttcttgtccaagactgataagaggctattgtactgcataaaagctgatccacattgtttaaatttcttgtgtaattttgggaaaatggaaagtggaa

SEQ ID NO: 207038 - DNA, 120 bp, Artificial Sequence
  ENSG00000115232_25 (sequence is synthesized)
aagaagccagtgttcatatccaactggaaggccggccatccattttagaaatggatgagacttcagcactcaagtttgaaataagagcaacaggttttccagagccaaatccaagagtaa

SEQ ID NO: 207039 - DNA, 120 bp, Artificial Sequence
  ENSG00000115232_26 (sequence is synthesized)
ttgaactaaacaaggatgagaatgttgcgcatgttctactggaaggactacatcatcaaagacccaaacgttatttcaccatagtgattatttcaagtagcttgctacttggacttattg

SEQ ID NO: 207040 - DNA, 120 bp, Artificial Sequence
  ENSG00000115232_27 (sequence is synthesized)
tacttctattgatctcatatgttatgtggaaggctggcttctttaaaagacaatacaaatctatcctacaagaagaaaacagaagagacagttggagttatatcaacagtaaaagcaatg

SEQ ID NO: 207041 - DNA, 120 bp, Artificial Sequence
  ENSG00000115232_28 (sequence is synthesized)
atttaaaagacactgtttacaagaaaaaatgaattttgtttggacttcttttactcatgatcttgtgacatattatgtcttcatgcaaggggaaaatctcagcaatgattactctttgag

SEQ ID NO: 207042 - DNA, 120 bp, Artificial Sequence
  ENSG00000115232_29 (sequence is synthesized)
atagaagaactgcaaaggtaataatacagccaaagataatctctcagcttttaaatgggtagagaaacactaaagcattcaatttattcaagaaaagtaagcccttgaagatatcttgaa

SEQ ID NO: 207043 - DNA, 120 bp, Artificial Sequence
  ENSG00000115232_30 (sequence is synthesized)
atgaaagtataactgagttaaattatactggagaagtcttagacttgaaatactacttaccatatgtgcttgcctcagtaaaatgaaccccactgggtgggcagaggttcatttcaaata

SEQ ID NO: 207044 - DNA, 120 bp, Artificial Sequence
  ENSG00000115232_31 (sequence is synthesized)
catctttgatacttgttcaaaatatgttctttaaaaatataattttttagagagctgttcccaaattttctaacgagtggaccattatcactttaaagccctttatttataatacatttc

SEQ ID NO: 207045 - DNA, 120 bp, Artificial Sequence
  ENSG00000115232_32 (sequence is synthesized)
ctacgggctgtgttccaacaaccattttttttcagcagactatgaatattatagtattataggccaaactggcaaacttcagactgaacatgtacactggtttgagcttagtgaaattac

SEQ ID NO: 207046 - DNA, 120 bp, Artificial Sequence
  ENSG00000115232_33 (sequence is synthesized)
ttctggataattatttttttataattatggatttcaccatctttctttctgtatatatacatgtgtttttatgtaggtatatatttaccattcttcctatctattcttcctataacacac

SEQ ID NO: 207047 - DNA, 120 bp, Artificial Sequence
  ENSG00000115232_34 (sequence is synthesized)
ctttatcaagcatacccaggagtaatcttcaaatcttttgttatattctgaaacaaaagattgtgagtgttgcactttacctgatacacgctgatttagaaaatacagaaaccatacctc

SEQ ID NO: 207048 - DNA, 120 bp, Artificial Sequence
  ENSG00000115232_35 (sequence is synthesized)
actaataactttaaaatcaaagctgtgcaaagactagggggcctatacttcatatgtattatgtactatgtaaaatattgactatcacacaactatttccttggatgtaattctttgtta

SEQ ID NO: 207049 - DNA, 120 bp, Artificial Sequence
  ENSG00000115232_36 (sequence is synthesized)
ccctttacaagtataagtgttaccttacatggaaacgaagaaacaaaattcataaatttaaattcataaatttagctgaaagatactgattcaatttgtatacagtgaatataaatgaga

SEQ ID NO: 207050 - DNA, 120 bp, Artificial Sequence
  ENSG00000115232_37 (sequence is synthesized)
cgacagcaaaattttcatgaaatgtaaaatatttttatagtttgttcatactatatgaggttctattttaaatgactttctggattttaaaaaatttctttaaatacaatcatttttgta

SEQ ID NO: 207051 - DNA, 120 bp, Artificial Sequence
  ENSG00000115232_38 (sequence is synthesized)
atatttattttatgcttatgatctagataattgcagaatatcattttatctgactctgccttcataagagagctgtggccgaattttgaacatctgttatagggagtgatcaaattagaa

SEQ ID NO: 207052 - DNA, 120 bp, Artificial Sequence
  ENSG00000115232_39 (sequence is synthesized)
ggcaatgtggaaaaacaattctgggaaagatttctttatatgaagtccctgccactagccagccatcctaattgatgaaagttatctgttcacaggcctgcagtgatggtgaggaatgtt

SEQ ID NO: 207053 - DNA, 120 bp, Artificial Sequence
  ENSG00000115232_40 (sequence is synthesized)
ctgagatttgcgaaggcatttgagtagtgaaatgtaagcacaaaacctcctgaacccagagtgtgtatacacaggaataaactttatgacatttatgtatttttaaaaaactttgtatcg

SEQ ID NO: 207054 - DNA, 120 bp, Artificial Sequence
  ENSG00000115232_41 (sequence is synthesized)
ttataaaaaggctagtcattctttcaggagaacatctaggatcatagatgaaaaatcaagccccgatttagaactgtcttctccaggatggtctctaaggaaatttacatttggttcttt

SEQ ID NO: 207055 - DNA, 120 bp, Artificial Sequence
  ENSG00000115232_42 (sequence is synthesized)
cctactcagaactactcagaaacaactatatatttcaggttatctgagcacagtgaaagcagagtactatggttgtccaacacaggcctctcagatacaaggggaacacaattacatatt

SEQ ID NO: 207056 - DNA, 120 bp, Artificial Sequence
  ENSG00000115232_43 (sequence is synthesized)
gggctagattttgcccagttcaaaatagtatttgttatcaacttactttgttacttgtatcatgaattttaaaaccctaccactttaagaagacagggatgggttattcttttttggcag

SEQ ID NO: 207057 - DNA, 120 bp, Artificial Sequence
  ENSG00000115232_44 (sequence is synthesized)
gtaggctatataactatgtgattttgaaatttaactgctctggattagggagcagtgaatcaaggcagacttatgaaatctgtattatatttgtaacagaatataggaaatttaacataa

SEQ ID NO: 207058 - DNA, 120 bp, Artificial Sequence
  ENSG00000115232_45 (sequence is synthesized)
ttgatgagctcaaatcctgaaaaatgaaagaatccaaattatttcagaattatctaggttaaatattgatgtattatgatggttgcaaagtttttttgtgtgtccaataaacacattgta

SEQ ID NO: 207059 - DNA, 120 bp, Artificial Sequence
  ENSG00000115232_46 (sequence is synthesized)
aaaaaaagaatttgaattgatatctaaaaacagaatttgaattgatatttcatcttgacttttaaagccctagaggctaattgttagtaacatcaatttctattaggatatccgtttggc

SEQ ID NO: 207060 - DNA, 120 bp, Artificial Sequence
  ENSG00000115232_47 (sequence is synthesized)
cacacagcaggaggttagagcaatggagcattactgagttcctccccctgtcagatcagcagcagcattagattctcatagaagtgcgaaccatatggtgaactggtatgtgagggatct

SEQ ID NO: 207061 - DNA, 83 bp, Artificial Sequence
  ENSG00000115232_48 (sequence is synthesized)
gaagtgcgaaccatatggtgaactggtatgtgagggatctagagtgccatgttcctcaacatcctgaaaccattcccccatcc

SEQ ID NO: 207062 - DNA, 120 bp, Artificial Sequence
  ENSG00000115232_49 (sequence is synthesized)
tggggaccacaggtttaaagcatggccacatttctttatattaaaattctagtttgtacatttcttttagaaacaattacatgttactttggaatcatttcttccatgcttcctccataa

SEQ ID NO: 207063 - DNA, 120 bp, Artificial Sequence
  ENSG00000115232_50 (sequence is synthesized)
agactgataagtcttggatgcaatctgtaaagaaaatacattatttcatcaacttattttgttgtttttcacatacacctaataagtatggtacacaatgccaatgccaaatacaaattg

SEQ ID NO: 207064 - DNA, 120 bp, Artificial Sequence
  ENSG00000115232_51 (sequence is synthesized)
ataacaaacacagcattcccaacagagctgtaatctagaaaactgagaaggtctgattgataaatcatcaacaacaataattgctctaaaacctccttaactgacttccttgattgtcca

SEQ ID NO: 207065 - DNA, 120 bp, Artificial Sequence
  ENSG00000115232_52 (sequence is synthesized)
atgctctccattacctctgtaaaacagtcagttatgcctctagaacacccatgtctagtgggcacccctgcatgcttcttctaaccactgagtgtcacaatgcctaccaagaatgcgttt

SEQ ID NO: 207066 - DNA, 120 bp, Artificial Sequence
  ENSG00000115232_53 (sequence is synthesized)
gcaggttcctaaacctgtttataccagttgctatgtaaaattgttcccaagggaagttgaatgctctgtaaaggcctaataaaagcaaattactgaacaaaacatgttacagtaattatg

SEQ ID NO: 207067 - DNA, 120 bp, Artificial Sequence
  ENSG00000115232_54 (sequence is synthesized)
agtgagaggaaactaagatggaaggataaaaatctaacactttactattcagatggctccactaaaagatttaagatcttgatccatttttaaaaatccaaaatggaagttgtagacatt

SEQ ID NO: 207068 - DNA, 120 bp, Artificial Sequence
  ENSG00000115232_55 (sequence is synthesized)
atctgtagtttatgcacaacaataaattagaaagccaatgtagacacgcataaccaaagaaaatgccttgggtctacataacagttgaataaatgtaaagttgctttttatttattgaaa

SEQ ID NO: 207069 - DNA, 120 bp, Artificial Sequence
  ENSG00000115232_56 (sequence is synthesized)
ttttacacaaaggtaattgttcaaaaaatagctgctataaatgtttacatatagaatcttaattcttctcatggtttggaagactgatatgttttaaagtaaaaattgtgtaacatcttc

SEQ ID NO: 207070 - DNA, 120 bp, Artificial Sequence
  ENSG00000115232_57 (sequence is synthesized)
atcatgtctcttaaacttgagtattacaacttaatttttgccactcaaaattccacatatatttcaataaaatatcaatatttaggtggctatactgcataagatgaatgaaaatctata

SEQ ID NO: 207071 - DNA, 120 bp, Artificial Sequence
  ENSG00000115232_58 (sequence is synthesized)
gttaacttaggtattgaaaatatcaacccaagtatgttattttaaatttctagttgaggggcaaaggaagaatatcagtctatatttttcattaaattatgataattgggaaatttaaga

SEQ ID NO: 207072 - DNA, 120 bp, Artificial Sequence
  ENSG00000115232_59 (sequence is synthesized)
atttaatatccccttaaatcagatagacaatattcccaagatttcttactctctttctaacattctaggatatgtatgaaagggcacagttgtactcaaccccaaatctctcagttttct

SEQ ID NO: 207073 - DNA, 120 bp, Artificial Sequence
  ENSG00000115232_60 (sequence is synthesized)
taaaaacacactgtgaattcaggaatgttttttgactccatgaagatcaggcactatatcaagtttggggttgacagtgtctgcacatattaacagttatattaaaatgcttacaaagaa

SEQ ID NO: 207074 - DNA, 120 bp, Artificial Sequence
  ENSG00000115232_61 (sequence is synthesized)
aatgctttcttcagtttaagttgactttttttaagtttaggattgtttaggagtatagaaatatgctaaagatatttaattgctgaaagtgttcatactataccaggcaagggcatgctc

SEQ ID NO: 207075 - DNA, 120 bp, Artificial Sequence
  ENSG00000115232_62 (sequence is synthesized)
attccaatcttctcctaaattttcctctgtataacaaaatatgccccacattccattggacttttttccctaagctaacattattagaaatgttttccctaagctaacattattagtcag

SEQ ID NO: 207076 - DNA, 120 bp, Artificial Sequence
  ENSG00000115232_63 (sequence is synthesized)
gctcttgctgagcccagagccatcccgcgctctgcgggctgggaggcccgggccaggacgcgagtcctgcgcagccgaggttccccagcgccccctgcagccgcgcgtaggcagagacgg

SEQ ID NO: 207077 - DNA, 120 bp, Artificial Sequence
  ENSG00000115232_64 (sequence is synthesized)
gagcagaattggggtgaatgtcaacagagcatgtcagaggatatctgcagcaaaactaaaatccaacaatgcgtctttaggagctaagaaacatatgaatgcaaattcataattttctaa

SEQ ID NO: 207078 - DNA, 120 bp, Artificial Sequence
  ENSG00000115232_65 (sequence is synthesized)
ccaccctcactcaaaaaaaatccctcagcacgcaaagaaaaattttattggttggcaaaactttggccaagtatttgagttcaattatgggtgctaataagactttggtctttcttcctt

SEQ ID NO: 207079 - DNA, 120 bp, Artificial Sequence
  ENSG00000115232_66 (sequence is synthesized)
ggaatgtgatgtcacagagcagcttatattacatatattcctattttgccttcggatacccaaaagataaaaaagtgaatattgattctcagttgcaataaaactcagtcttgatttctg

SEQ ID NO: 207080 - DNA, 120 bp, Artificial Sequence
  ENSG00000115232_67 (sequence is synthesized)
aaatggatccatcgtggtaggtattggaactggtccacagatccatcgtgaaatcagctatcctgggtgcagctttcacatcatttggtctacttttattttattcagacttgtgggcat

SEQ ID NO: 207081 - DNA, 120 bp, Artificial Sequence
  ENSG00000115232_68 (sequence is synthesized)
aaaggaatatgaaacatgcaagacttttattagcaacaatttttatatttttgaaatttttatataaagattaagcaaataactaaagattttaatgttgttaatagaaacctagaggaa

SEQ ID NO: 207082 - DNA, 120 bp, Artificial Sequence
  ENSG00000115232_69 (sequence is synthesized)
tagaggaaagttcataaatctttataaaagcaatttttaaaatttgtatttttaattgttccctctttcatatttcaggttagtctttaaaaagctgtttaataaagagaattccagata

SEQ ID NO: 207083 - DNA, 120 bp, Artificial Sequence
  ENSG00000115232_70 (sequence is synthesized)
gcagagctcggatcagaccccagtggtctggctgtagagcccgcgctctaatcattttgttacactgcctctcagatgcttccactctgctttcttccatgtgcaaactattgtgtgcaa

SEQ ID NO: 207084 - DNA, 120 bp, Artificial Sequence
  ENSG00000115232_71 (sequence is synthesized)
tcctgtatatgatgatgatagtattttatttttttctgtctgagaagactgttatttttcataaaagagagttttcttatgtgatatgaattaaggttcataaggttagttttcgaagtt

SEQ ID NO: 207085 - DNA, 120 bp, Artificial Sequence
  ENSG00000115232_72 (sequence is synthesized)
aatgatgaaaatgagcctgaaacgtgcatggtggagaaaatgaacttaactttccatgtaagaaaagttaattgtgttaatatttgtaacaacctaaaaggatgtcactgatgcattgct

SEQ ID NO: 207086 - DNA, 120 bp, Artificial Sequence
  ENSG00000115232_73 (sequence is synthesized)
tacttctgggatgatattcttttcaataaccatccttaaacatatgttacaaactttttatttccttcctgtccaaaacagttgtttcatttttcccattaggaagagaagcaaataaac

SEQ ID NO: 207087 - DNA, 120 bp, Artificial Sequence
  ENSG00000115232_74 (sequence is synthesized)
tattgttttccttcctatagaagatggagccagaatggcatgctaagttttttcttttctttagtgttatatatgacttctcctcaattgtcacccattgatctttaccactgttaataa

SEQ ID NO: 207088 - DNA, 120 bp, Artificial Sequence
  ENSG00000115232_75 (sequence is synthesized)
tggatgatattcaaaataccttatttcagtgattctaaggcaccattgattagaaactgcattattatttatgtgtccctaaaagctacctattaagctgttacacccaccatttttctg

SEQ ID NO: 207089 - DNA, 120 bp, Artificial Sequence
  ENSG00000115232_76 (sequence is synthesized)
taaagttttcagtttcaactccatctcatcttgcctccttaatataaaagggattccctttctgttaatatcgttctcccttttccttatggcaatgattgcagtactctgacaactatg

SEQ ID NO: 207090 - DNA, 120 bp, Artificial Sequence
  ENSG00000115232_77 (sequence is synthesized)
ctagagaaatttcttatgataccttctcttcatctctccccgtctctccgtgtgtaaagcacattttagactctctcagcgtattaaggacaggatccagctaagccaagacttgagaat

SEQ ID NO: 207091 - DNA, 120 bp, Artificial Sequence
  ENSG00000115232_78 (sequence is synthesized)
tttatttccatctttgacctatcaaccctcttaaagaacaggctaaggagcatatcaggaatagcaattggaattgatcccatatcccgtcgtttaacctaaaggcctaaaaaaaaaagt

SEQ ID NO: 207092 - DNA, 120 bp, Artificial Sequence
  ENSG00000115232_79 (sequence is synthesized)
gatagttttacttacaatatacaatctaaaagaaaaggaaaattggcatcttcatcgttaatgtagtataattttccattcccaaaaccgtcatccaaaactcatgttatatgggtccat

SEQ ID NO: 207093 - DNA, 120 bp, Artificial Sequence
  ENSG00000115232_80 (sequence is synthesized)
ctttttgcagtcatttctcaatgtctcagatttgtgacaagttgaaaaatgtgtactgatagaggggagaagtttcatgtttcaaagccaaagacaagtttgttgcacacaggcaagtgg

SEQ ID NO: 207094 - DNA, 120 bp, Artificial Sequence
  ENSG00000115232_81 (sequence is synthesized)
ggaaagaggaaggaatattaaataacaagacctatcttgttccaaagtgttactgctatatatattgcttaacttttttccccttaaagcaaccctgggtcatggttgacattgttccta

SEQ ID NO: 207095 - DNA, 120 bp, Artificial Sequence
  ENSG00000115232_82 (sequence is synthesized)
gtttatgtatgaggactgtggctcagagttgcaaatacctttttaaaagttacttagctagtgactgataggtgggaactaaagtcaaactagggtctgaatgcgtccaaagtctaagcc

SEQ ID NO: 207096 - DNA, 120 bp, Artificial Sequence
  ENSG00000115232_83 (sequence is synthesized)
attttcttccatgtatgtatcttcaatgcaaataaaattaagtgaatggtttaatatgttgtctgctgagctgatgggtcatctgtaaacggtgaataaaattggtacttctttatattt

SEQ ID NO: 207097 - DNA, 120 bp, Artificial Sequence
  ENSG00000115233_0 (sequence is synthesized)
aagtgcttcgcggcggaggcccgggcaactcttttgaatggaatcgggctgattcatcgccggtttgcagacagagccgcgtcgggtgtgcgccgctgctgctgttgcctctgtcttcgc

SEQ ID NO: 207098 - DNA, 120 bp, Artificial Sequence
  ENSG00000115233_1 (sequence is synthesized)
gtcaccacagaggcaagacaagggtccatatcgcggcatccggctcccgcccgtcttcaggagagaaagaaaaaataaaatatacttggggaagttgtacctgccagaattagcaagagc

SEQ ID NO: 207099 - DNA, 120 bp, Artificial Sequence
  ENSG00000115233_2 (sequence is synthesized)
tttctttaagaagacatttgtcaaactcaacaaattgaaggttaacaccttaagagttgtagttactgaccagaaatatggacagacttcttagacttggaggaggtatgcctggactgg

SEQ ID NO: 207100 - DNA, 120 bp, Artificial Sequence
  ENSG00000115233_3 (sequence is synthesized)
gccaggggccacctacagatgctcctgcagtggacacagcagaacaagtctatatctcttccctggcactgttaaaaatgttaaaacatggccgtgctggagttccaatggaagttatgg

SEQ ID NO: 207101 - DNA, 120 bp, Artificial Sequence
  ENSG00000115233_4 (sequence is synthesized)
gtttgatgcttggagaatttgttgatgattataccgtcagagtgattgatgtgtttgctatgccacagtcaggaacaggtgtcagtgtggaggcagttgatccagtgttccaagctaaaa

SEQ ID NO: 207102 - DNA, 120 bp, Artificial Sequence
  ENSG00000115233_5 (sequence is synthesized)
tgttggatatgttgaagcagacaggaaggccggagatggttgttggttggtatcacagtcaccctggctttggttgttggctttctggtgtggatatcaacactcagcagagctttgaag

SEQ ID NO: 207103 - DNA, 120 bp, Artificial Sequence
  ENSG00000115233_6 (sequence is synthesized)
ggagagagctgtggcagtggttgtggatcccattcagagtgtaaaaggaaaggttgttattgatgccttcagattgatcaatgctaatatgatggtcttaggacatgaaccaagacaaac

SEQ ID NO: 207104 - DNA, 120 bp, Artificial Sequence
  ENSG00000115233_7 (sequence is synthesized)
aacttcgaatctgggtcacttaaacaagccatctatccaggcattaattcatggactaaacagacattattactccattactattaactatcggaaaaatgaactggaacagaagatgtt

SEQ ID NO: 207105 - DNA, 120 bp, Artificial Sequence
  ENSG00000115233_8 (sequence is synthesized)
gctaaatttgcataagaagagttggatggaaggtttgacacttcaggactacagtgaacattgtaaacacaatgaatcagtggtaaaagagatgttggaattagccaagaattacaataa

SEQ ID NO: 207106 - DNA, 120 bp, Artificial Sequence
  ENSG00000115233_9 (sequence is synthesized)
ggctgtagaagaagaagataagatgacacctgaacagctggcaataaagaatgttggcaagcaggaccccaaacgtcatttggaggaacatgtggatgtacttatgacctcaaatattgt

SEQ ID NO: 207107 - DNA, 120 bp, Artificial Sequence
  ENSG00000115233_10 (sequence is synthesized)
ccagtgtttagcagctatgttggatactgtcgtatttaaataaagcaacgaaaaacgctattaatgatgccttcagtgtatattcctctgttgttcctaatgctcaaaatcaagggacct

SEQ ID NO: 207108 - DNA, 120 bp, Artificial Sequence
  ENSG00000115233_11 (sequence is synthesized)
ctgaaggtgtacttggctaaatgtaagacatctggcatcatttgcagcactgtaacaccttcagtctcagttgtgcaattacttctgtttctttagtcagggtctttgcagattctaaag

SEQ ID NO: 207109 - DNA, 120 bp, Artificial Sequence
  ENSG00000115233_12 (sequence is synthesized)
ttatacatgaatacatcaaagtggacaaattttgttaagatcccatttaatatttgaaaaaatcagtagcacaaatatattttgattgtcacttacaaaataaaatacatttacagtcta

SEQ ID NO: 207110 - DNA, 120 bp, Artificial Sequence
  ENSG00000115233_13 (sequence is synthesized)
attacttctactctgtgtagatacccatagtcactgactgtaatataagtgcaactggaccaaaggcaactactgaaaagagagagagaaaaaaattacagctactgccagaagtgtttg

SEQ ID NO: 207111 - DNA, 120 bp, Artificial Sequence
  ENSG00000115233_14 (sequence is synthesized)
tgtattttttttaaaacagctttgtattaaactaatttgaagagctttgcttaaaaatagcttccttcggatgtaaaaattgggaactatagattggtgctttacaaatttagtctagtc

SEQ ID NO: 207112 - DNA, 120 bp, Artificial Sequence
  ENSG00000115233_15 (sequence is synthesized)
tttcagtgacctagcagttgatatgaaaacacaaattttaaaataaatagcatattggatgaactgtattctactcatgaaagaagccaaaaaattatggtttaaactgagttttaagta

SEQ ID NO: 207113 - DNA, 120 bp, Artificial Sequence
  ENSG00000115233_16 (sequence is synthesized)
ataaaccagattcgtcattaaaatgaaatgatagatccttgacccttgggcatgcttggaataaatacggaactcagtattgtttttaaaactattttgcttttataatctaagacagat

SEQ ID NO: 207114 - DNA, 120 bp, Artificial Sequence
  ENSG00000115233_17 (sequence is synthesized)
gtacaaaaaacatgcagtttttattttgtattggcagcttccaaatatttagtatctatttccaagagttgcaattagtaaagcaaccatggtactgaaatctgcacatcccacaagcta

SEQ ID NO: 207115 - DNA, 120 bp, Artificial Sequence
  ENSG00000115233_18 (sequence is synthesized)
attatatttgcaaggtcagagtgaatacatattttcagaaaaataaagggttatataaatatgtgtcttctacttggctgttatatcacagtttgttgatctggagtataatgtgtacaa

SEQ ID NO: 207116 - DNA, 120 bp, Artificial Sequence
  ENSG00000115233_19 (sequence is synthesized)
ttcacaaatttgtctgataacagaaagtggtgtgtgattgtgtttattttactaaccagtatattcacagcaatcacttccaaatatctctccagtaaagatgtgttaattacaaaacag

SEQ ID NO: 207117 - DNA, 120 bp, Artificial Sequence
  ENSG00000115233_20 (sequence is synthesized)
acaaggtcttctattatattaaagctactaacaagaagacagcaggaatcacacatgtaaatagcatcatcaacccctattttagtcctctgttttgatctgtgagttgcgcatagacca

SEQ ID NO: 207118 - DNA, 120 bp, Artificial Sequence
  ENSG00000115233_21 (sequence is synthesized)
aaggtgctattaaagactgagtgtatgaaataggcagcattatatgaacaaaatttattcaacaagaaaacagacctttaacatgaatttaacaagcctgagaaattataaactatcata

SEQ ID NO: 207119 - DNA, 120 bp, Artificial Sequence
  ENSG00000115233_22 (sequence is synthesized)
tgctgcagattcatgcagtgataataaacaaaaaaggaaagtaagaggtttccctaagctagccaaactgctaatggttttgttataagctgtctactgttgcagtgacctctgaaaagt

SEQ ID NO: 207120 - DNA, 120 bp, Artificial Sequence
  ENSG00000115233_23 (sequence is synthesized)
ctcaaggcacttgtaccagaaaaaattaaatggtcaggcgggtgaatagagattcaatgtattgtgtaggccttcagcatggaaaggaatttttcaaagtctagcatcatattcctgaaa

SEQ ID NO: 207121 - DNA, 120 bp, Artificial Sequence
  ENSG00000115233_24 (sequence is synthesized)
atattcttcatactttagctcagaggttttcgttattatatattaaggagatagtttttgtgtaaagttttttggttaagttactgtttgagtttataagatataaactgaactaattta

SEQ ID NO: 207122 - DNA, 120 bp, Artificial Sequence
  ENSG00000115233_25 (sequence is synthesized)
atgtctatatacttcaaaatgaactgtttagaaaattcagagagctcaaaaaaatggattatttcccctaccaacccatacattaattaattcttgggagttctttgttcagtgtgttat

SEQ ID NO: 207123 - DNA, 120 bp, Artificial Sequence
  ENSG00000115233_26 (sequence is synthesized)
atctaagatttctgttcttaaccatggagtgaccattttgctgtcattctattgcatcatgctgtaaatacacaaacatggagaaacgctttcagcttatacacaccatcgagtgctcac

SEQ ID NO: 207124 - DNA, 120 bp, Artificial Sequence
  ENSG00000115233_27 (sequence is synthesized)
tagggcttttttttttttaatcttacggtggcataattaacaccttcttcacccattgctcattagcgcactggacattaatgagtctattttgataggttgctctaaaggataaatcca

SEQ ID NO: 207125 - DNA, 120 bp, Artificial Sequence
  ENSG00000115233_28 (sequence is synthesized)
cttattttcacagtgcaaaaagcaattataaaattataccaaaattaaaatgtagactatattgccatgtttatattttattgcatactaaatctaattttggtctgcaggttgttgaac

SEQ ID NO: 207126 - DNA, 120 bp, Artificial Sequence
  ENSG00000115233_29 (sequence is synthesized)
atgttagtttccttaagacagttgctatagtgatggcagcaaattcctttaatcttagtgtaaagtagtcattttctataggccatcattgctactcaggaattgtcaatgaaagcatct

SEQ ID NO: 207127 - DNA, 120 bp, Artificial Sequence
  ENSG00000115233_30 (sequence is synthesized)
atctcattttattaagttcttgaatttttctcttagtttcttaagaaaatttaaaaaatttgtttttaacagatcatgatatctactgaactagtattttcatttcctttttatgaagtt

SEQ ID NO: 207128 - DNA, 120 bp, Artificial Sequence
  ENSG00000115233_31 (sequence is synthesized)
acctgcttataatatttcagagaaataatatagacttctacaagtaaaatagctgtctgctattttagtttcaaagcattcagtataaaaaagtatataggaattttgttgtgatatata

SEQ ID NO: 207129 - DNA, 120 bp, Artificial Sequence
  ENSG00000115233_32 (sequence is synthesized)
atgaaattttcataattttgtagtagctttttctccctctcacaaatgaatttactgaaatcttgaaatgggccaaaatgatgctttgctcctaaatatttactgttaacagttagggtg

SEQ ID NO: 207130 - DNA, 120 bp, Artificial Sequence
  ENSG00000115233_33 (sequence is synthesized)
tttatgttcttttttagtatgagtgtgaggaaattttacttctatatttttaacaattgtttgaagttatttatgataacatctgactaaaatatgtctgatagtacttgtttttattgc

SEQ ID NO: 207131 - DNA, 120 bp, Artificial Sequence
  ENSG00000115233_34 (sequence is synthesized)
ttgcttttttaaaaaagagaatatgtttagaaaaaaattttaagtataagcatgtaggccatatttatatataaacatgaaagttaagtgtggattaaggttattgtataaaaagaaaaa

SEQ ID NO: 207132 - DNA, 120 bp, Artificial Sequence
  ENSG00000115233_35 (sequence is synthesized)
ttcacaaactattaattcatgttctggggatacttggctttattttgatgcaagaggaatgaatctttgggaaaatgttaactgttcaaaataaaagtaaaattcagagttgatattgta

SEQ ID NO: 207133 - DNA, 120 bp, Artificial Sequence
  ENSG00000115233_36 (sequence is synthesized)
ggccgaatgagtagacagaagcttagactgattaacttgtcatcatgttttagtctaggtttgtattttttgttattgtctttggacccatcatagcaatcttttacaaagggtgatttt

SEQ ID NO: 207134 - DNA, 120 bp, Artificial Sequence
  ENSG00000115233_37 (sequence is synthesized)
ctttctttaaatcttgttctttagcatacagcatacagtaatacttattacaagcagaattttcagacttgattagatttggttggcttaactatttttaatctcttaatatcctcaagt

SEQ ID NO: 207135 - DNA, 120 bp, Artificial Sequence
  ENSG00000115233_38 (sequence is synthesized)
aataattgtataaataagaacaaatctagttgacacagcttttaaaacattgataaatcttaatcgttcagcacttttaaaggcaaaatatagaaatactgttacttagtatatgatctt

SEQ ID NO: 207136 - DNA, 120 bp, Artificial Sequence
  ENSG00000115233_39 (sequence is synthesized)
gctgtaagattgtttcatgtgataaatctattgagttaaattcccttaaagtggcaatctgtcttaaagtcacatgactttacataaaactttacagtgttgaaaagctttagcaagtat

SEQ ID NO: 207137 - DNA, 120 bp, Artificial Sequence
  ENSG00000115233_40 (sequence is synthesized)
gtgattcttgttaatctctttatatgtaagagctaacagatgttattgtatcataggagaatttgaagtatttctgtacacacaaaaagaatatacttattgtaatatctttaccatgaa

SEQ ID NO: 207138 - DNA, 120 bp, Artificial Sequence
  ENSG00000115233_41 (sequence is synthesized)
tttaggaccatatcattccataccattttcttggcttaaagcatggatgaccttggttttcttatattgtgccttttatacttgacagtggcttggacatttaaggccatcagacaaggt

SEQ ID NO: 207139 - DNA, 120 bp, Artificial Sequence
  ENSG00000115233_42 (sequence is synthesized)
ataaagtctttcatagtcacaagaagtaaaaggtatctgactagaagagaatatgtgggcaagtgccttgctggctgtaattttgttgtcatttcaagtactgtggtggtgtaattgatg

SEQ ID NO: 207140 - DNA, 120 bp, Artificial Sequence
  ENSG00000115233_43 (sequence is synthesized)
tgacagggctgggctttagatgtggtcccttaacttgtgctcactttcagttttagtttctctgtcattcattttgattaggtaaaatttaggtgacaaacatatgcacaccagtgaaag

SEQ ID NO: 207141 - DNA, 120 bp, Artificial Sequence
  ENSG00000115233_44 (sequence is synthesized)
ctgtttggtgtaagtttagtaatgacatatttcaataataaagatgcaaagttaatttttttctttactgcttcatgaaaattgcaataattggtgtcaccttacattacaagatagagg

SEQ ID NO: 207142 - DNA, 120 bp, Artificial Sequence
  ENSG00000115233_45 (sequence is synthesized)
gtggtgtgctgatggcacagtcagcaggaggttcttttttattaatattataattaaatgattttctggatatagtccagaaacagatgcacgtcgatcatgccttgtccactgttgctt

SEQ ID NO: 207143 - DNA, 120 bp, Artificial Sequence
  ENSG00000115233_46 (sequence is synthesized)
ttcaggtaagacccagaaggcaggcctgggaggtctggggaggcagccgtgctaggccgccgccagccccgtgctttcctgagtcacgttgcccagctgagttgccacaggaggcctggg

SEQ ID NO: 207144 - DNA, 120 bp, Artificial Sequence
  ENSG00000115233_47 (sequence is synthesized)
tgtgtgtaaactacaagcctttttgtagttagccaaagagaaagaaattatccccaagaaaatcacctaacagataactctatggtaagaatcttaccttattgatgtttgttatcttgc

SEQ ID NO: 207145 - DNA, 120 bp, Artificial Sequence
  ENSG00000115233_48 (sequence is synthesized)
attagacacttgccatctttgctcattttcaagttctctgtttacaaaactattaagaaggtgtgaaatgcagccaaacttcccagtttatggggaatgtctgatgattacatttcctac

SEQ ID NO: 207146 - DNA, 120 bp, Artificial Sequence
  ENSG00000115233_49 (sequence is synthesized)
atgttcattgttcgcacatgaagaaatttggcagctgtgagattataaagttcagagtatccaaatctaaccctcactgggattttggttccctgctttctgccaccaccatctcacctc

SEQ ID NO: 207147 - DNA, 120 bp, Artificial Sequence
  ENSG00000115233_50 (sequence is synthesized)
cttttgtaactctttttgtggtaaatgctgtgttggcatttcttaaggttagtgatccttaaattttcttgtttttttttccatttatcagatgctatgaataaatcatagattaaaagt

SEQ ID NO: 207148 - DNA, 120 bp, Artificial Sequence
  ENSG00000115233_51 (sequence is synthesized)
tcacctgatacagagtcttgtcttcaggccataacatacccaaactgttaagatttcttacgtgtgaaattctcaataaagaggttttatattggtgccattattgggagaggagggcag

SEQ ID NO: 207149 - DNA, 120 bp, Artificial Sequence
  ENSG00000115233_52 (sequence is synthesized)
tagtggtagccaatctaaatgttataattatttcagaattactctgccagaaagttatgatcatacatagaagagtttgtagctaactttgaaagtagtggaaagtggttttcatgtatt

SEQ ID NO: 207150 - DNA, 120 bp, Artificial Sequence
  ENSG00000115233_53 (sequence is synthesized)
gtttgggttaatttaattttgattatatttggtttttagttcaggtaatttttttgttgaaaacttcaaatgacaatttcttcatggttactaaagatcactcatgtggagtagtttcag

SEQ ID NO: 207151 - DNA, 120 bp, Artificial Sequence
  ENSG00000115233_54 (sequence is synthesized)
atttttttctgaatacatgtattacttttagagatgtaaagatgtgaaattactaagagagaaacccatgtgatttgtttagtggatcaaaagtcggtagctcctttgatcctaagtgcc

SEQ ID NO: 207152 - DNA, 120 bp, Artificial Sequence
  ENSG00000115233_55 (sequence is synthesized)
gagagcaacagaacagaattagtaccacagtgccgtaagtgccacctcaggtacttccatctcccatctcctgaagaattcagtaacagtttgcaaatggtcaacacaatcatttagtga

SEQ ID NO: 207153 - DNA, 120 bp, Artificial Sequence
  ENSG00000115233_56 (sequence is synthesized)
tcctgtttgatattttcaatactttctgtgtatttcttgtctgttttcaaaatgatgatgctgatagtttttattgccctgaaggttattctgaagtttagcataattttatttgttcag

SEQ ID NO: 207154 - DNA, 120 bp, Artificial Sequence
  ENSG00000115233_57 (sequence is synthesized)
taaattatttgaataaaagttgtatgaatgaaaattctggtcatcattatttttggtgattatcctgcagtgggaatagaggatttataattttaaactctgtcctttgtgtttcattca

SEQ ID NO: 207155 - DNA, 120 bp, Artificial Sequence
  ENSG00000115234_0 (sequence is synthesized)
catcggatcgcagggctcccaaaatggcgagtgaggctgcggggactcgctgagcagcggagggggagcgtgcagagccgctgcggccctcacagtccggagcccggccgtgccgtgccg

SEQ ID NO: 207156 - DNA, 120 bp, Artificial Sequence
  ENSG00000115234_1 (sequence is synthesized)
tagggaacatgcacttttccattcccgaaaccgagtcccgcagcggggacagcggcggctccgcctacgtggcctataacattcacgtgaatggagtcctgcactgtcgggtgcgctaca

SEQ ID NO: 207157 - DNA, 120 bp, Artificial Sequence
  ENSG00000115234_2 (sequence is synthesized)
gccagctcctggggctgcacgagcagcttcggaaggagtatggggccaatgtgcttcctgcattccccccaaagaagcttttctctctgactcctgctgaggtagaacagaggagagagc

SEQ ID NO: 207158 - DNA, 120 bp, Artificial Sequence
  ENSG00000115234_3 (sequence is synthesized)
agttagagaagtacatgcaagctgttcggcaagacccattgcttgggagcagcgagactttcaacagtttcctgcgtcgggcacaacaggagacacagcaggtccccacagaggaagtgt

SEQ ID NO: 207159 - DNA, 120 bp, Artificial Sequence
  ENSG00000115234_4 (sequence is synthesized)
ccttggaagtgctgctcagcaacgggcagaaagttctggtcaacgtgctaacttcagatcagactgaggatgtcctggaggctgtagctgcaaagctggatcttccagatgacttgattg

SEQ ID NO: 207160 - DNA, 120 bp, Artificial Sequence
  ENSG00000115234_5 (sequence is synthesized)
gatactttagtctattcttagttcgagaaaaagaggatggagccttttcttttgtacggaagttgcaagagtttgagctgccttatgtgtctgtcaccagccttcggagtcaagagtata

SEQ ID NO: 207161 - DNA, 120 bp, Artificial Sequence
  ENSG00000115234_6 (sequence is synthesized)
agattgtgctaaggaagagttattgggactctgcctatgatgacgatgtcatggagaaccgggttggcctgaacctgctttatgctcagacggtatcagatattgagcgtgggtggatct

SEQ ID NO: 207162 - DNA, 120 bp, Artificial Sequence
  ENSG00000115234_7 (sequence is synthesized)
tggtcaccaaggaacagcaccggcaactcaaatctctgcaagagaaagtctccaagaaggagttcctgagactggcccagacgctgcggcactatggctacttgcgctttgatgcctgtg

SEQ ID NO: 207163 - DNA, 120 bp, Artificial Sequence
  ENSG00000115234_8 (sequence is synthesized)
tggctgacttcccagaaaaggactgtcctgtggtggtgagcgcgggcaacagtgagctcagcctgcagctccgcctgcctggccagcaactccgagaaggctccttccgggtcacccgca

SEQ ID NO: 207164 - DNA, 120 bp, Artificial Sequence
  ENSG00000115234_9 (sequence is synthesized)
gtgcgcctggaactggcttttgaatacctcatgagcaaggaccggctacagtgggtcaccatcactagcccccaggctatcatgatgagcatctgcttgcagtccatggttgatgaactg

SEQ ID NO: 207165 - DNA, 120 bp, Artificial Sequence
  ENSG00000115234_10 (sequence is synthesized)
atggtgaagaaatctggcggcagtatcaggaagatgctgcgccggcgggtggggggtactctgagacgctcagacagccagcaagcagtgaagtccccaccactgcttgagtcacctgat

SEQ ID NO: 207166 - DNA, 120 bp, Artificial Sequence
  ENSG00000115234_11 (sequence is synthesized)
gccacccgggagtctatggtcaaactctcaagtaagctgagtgccgtgagcttgcggggaattggcagtcccagcacagatgccagtgccagtgatgtccacggcaatttcgccttcgag

SEQ ID NO: 207167 - DNA, 120 bp, Artificial Sequence
  ENSG00000115234_12 (sequence is synthesized)
ggcattggagatgaggatctgtaatctccactgcttggatgtctgccctctaccccagaggaatttacagaaacttgccctgtgcctgtgtcccccatgctaggggcggaggggtctttt

SEQ ID NO: 207168 - DNA, 120 bp, Artificial Sequence
  ENSG00000115234_13 (sequence is synthesized)
ccttcttctttcctacctaccccttttctcttggccaggggcctcgtatcctacctttccttgtcccctgggctggctgcacagaggattgccccttctcttttcagagctggccctcga

SEQ ID NO: 207169 - DNA, 120 bp, Artificial Sequence
  ENSG00000115234_14 (sequence is synthesized)
tgccaaattagcatttagtattttgcacaaagtctaagggaccatggctgcctgccttggggaggaaccatatctccctctgggccgcttctggcctcttggagccatgggccaaaggcc

SEQ ID NO: 207170 - DNA, 120 bp, Artificial Sequence
  ENSG00000115234_15 (sequence is synthesized)
aaggggatgggcagaggtctgtgtttggtctggcccagttccccatcattaaactcagcctgactgctgcctacctctggttccctctcactgcccctgcttcccccatcacagcatgga

SEQ ID NO: 207171 - DNA, 120 bp, Artificial Sequence
  ENSG00000115234_16 (sequence is synthesized)
ctactatgctaagggtaaggccaaattgcctgccattgccaattcagcatagacatggctttgttagtgtttcctttattataaagcactgaaataagttaaataaacaggtgggaggct

SEQ ID NO: 207172 - DNA, 120 bp, Artificial Sequence
  ENSG00000115234_17 (sequence is synthesized)
gggcagtcccccagccggtttgtccacagcccctgggggcagtggaggtgaatacagggcccttctcactgagctcgtgaagtgcctcagtcaaggcaaggtcccctggtccatatgggc

SEQ ID NO: 207173 - DNA, 120 bp, Artificial Sequence
  ENSG00000115234_18 (sequence is synthesized)
ccccccgcccatggggttgggctggtccttatagtgcctacgttagtctgtgtggagcccctggccagcgggggagaaaaaggtggcttctggtccgtctgtataaaacatggggaagaa

SEQ ID NO: 207174 - DNA, 89 bp, Artificial Sequence
  ENSG00000115234_19 (sequence is synthesized)
ctttcaacagtttcctgcgtcgggcacaacaggtagggctttgggtgggaccaagatttaaggaaaggaccttgctggaaggtcatgtt

SEQ ID NO: 207175 - DNA, 120 bp, Artificial Sequence
  ENSG00000115234_20 (sequence is synthesized)
atattgaggactatggggagagacttaaaaacagctggttctgtggaagggcctgatttaatttctagatctaggaaggctcttgtttgatctgttatgcagttagcaaagtaaatagtg

SEQ ID NO: 207176 - DNA, 120 bp, Artificial Sequence
  ENSG00000115234_21 (sequence is synthesized)
tacgaggatgtgtaactctgtgtactagcaaaacaatttgggcactaacatctatgagaaatactagtataacactagtcttaatatcagtggagagaacttaatttgtatctgatgtgc

SEQ ID NO: 207177 - DNA, 120 bp, Artificial Sequence
  ENSG00000115234_22 (sequence is synthesized)
tttagattaacatcattgttatttccctagttctatagactggactcacctagatggcagccaagggtggggcaggtgaagaatttatgcaaacagtgagtgaggtgaggccagctgggg

SEQ ID NO: 207178 - DNA, 120 bp, Artificial Sequence
  ENSG00000115234_23 (sequence is synthesized)
aatgagggccaactccactttgggctccctatccggacaggtggctcttgccctttagactacagttcccagcatgcccaggcgattgcgtcccagaaccgacgtcccaccgccttccca

SEQ ID NO: 207179 - DNA, 120 bp, Artificial Sequence
  ENSG00000115234_24 (sequence is synthesized)
gtctccctttacccgctcttcttgttcccgtaggctgtagttcccctttaatcactgccacagggtagggccctggtttatcttgtctgacatttccgggaactccctaagaagcttaat

SEQ ID NO: 207180 - DNA, 120 bp, Artificial Sequence
  ENSG00000115234_25 (sequence is synthesized)
gtccgcgcaacaactgctccttcctgttcttatattctggttttctgtccagtcttactgctctagtagcctttacccctgcatggacaaaccaacccctccccccactacctccaccca

SEQ ID NO: 207181 - DNA, 120 bp, Artificial Sequence
  ENSG00000115234_26 (sequence is synthesized)
gagtataagattgtgctaaggaagagttattgggactctgcctatgatgacgatgtcatggagaaccgggttggcctgaacctgctttatgctcaggtgagcttggagctgcctcagaac

SEQ ID NO: 207182 - DNA, 120 bp, Artificial Sequence
  ENSG00000115234_27 (sequence is synthesized)
ccttcccctgaagaaaataacgggtgactcactctcccaagaaaactgctgtcgtgtctttgttcccaatttgtggggaagttcctagaatactatcagtgctgctggcacaatatctac

SEQ ID NO: 207183 - DNA, 120 bp, Artificial Sequence
  ENSG00000115234_28 (sequence is synthesized)
agtctattcttagttcgagaaaaagaggatggagccttttcttgtgagtttctctggacttgactgcagtacaagggtacttcagtagagtttgcagcccccctaactccccacccccac

SEQ ID NO: 207184 - DNA, 120 bp, Artificial Sequence
  ENSG00000115234_29 (sequence is synthesized)
ccccagaatgaacattgcctcagggcacttctttcttgatttcccttcctttaaatctcactatattttcatttttttttttttaacctgtagttgtacggaagttgcaagagtttgagc

SEQ ID NO: 207185 - DNA, 120 bp, Artificial Sequence
  ENSG00000115239_0 (sequence is synthesized)
gtctctcgttttcggacggctgcagcatcgcggtggggatcgaaagcgggggcttctgggacgcagctctggagacgcggcctcggaccagccatttcggtgtagaagtggcagcacggc

SEQ ID NO: 207186 - DNA, 120 bp, Artificial Sequence
  ENSG00000115239_1 (sequence is synthesized)
agactggtcaaacaaatggattttacagaggcttacgcggacacgtgctctacagttggacttgctgccagggaaggcaatgttaaagtcttaaggaaactgctcaaaaagggccgaagt

SEQ ID NO: 207187 - DNA, 120 bp, Artificial Sequence
  ENSG00000115239_2 (sequence is synthesized)
gtcgatgttgctgataacaggggatggatgccaattcatgaagcagcttatcacaactctgtagaatgtttgcaaatgttaattaatgcagattcatctgaaaactacattaagatgaag

SEQ ID NO: 207188 - DNA, 120 bp, Artificial Sequence
  ENSG00000115239_3 (sequence is synthesized)
acctttgaaggtttctgtgctttgcatctcgctgcaagtcaaggacattggaaaatcgtacagattcttttagaagctggggcagatcctaatgcaactactttagaagaaacgacacca

SEQ ID NO: 207189 - DNA, 120 bp, Artificial Sequence
  ENSG00000115239_4 (sequence is synthesized)
ttgtttttagctgttgaaaatggacagatagatgtgttaaggctgttgcttcaacacggagcaaatgttaatggatcccattctatgtgtggatggaactccttgcaccaggcttctttt

SEQ ID NO: 207190 - DNA, 120 bp, Artificial Sequence
  ENSG00000115239_5 (sequence is synthesized)
caggaaaatgctgagatcataaaattgcttcttagaaaaggagcaaacaaggaatgccaggatgactttggaatcacacctttatttgtggctgctcagtatggcaagctagaaagcttg

SEQ ID NO: 207191 - DNA, 120 bp, Artificial Sequence
  ENSG00000115239_6 (sequence is synthesized)
agcatacttatttcatcgggtgcaaatgtcaattgtcaagccttggacaaagctacacccttgttcattgctgctcaagagggacacacaaaatgtgtggagcttttgctctccagtggg

SEQ ID NO: 207192 - DNA, 120 bp, Artificial Sequence
  ENSG00000115239_7 (sequence is synthesized)
gcagatcctgatctttactgtaatgaggacagttggcagttacctattcatgcagctgcacaaatgggccatacaaaaatcttggacttgttaataccacttactaaccgggcctgtgac

SEQ ID NO: 207193 - DNA, 120 bp, Artificial Sequence
  ENSG00000115239_8 (sequence is synthesized)
actgggctaaacaaagtaagccctgtttactcagcagtgtttgggggacatgaagattgcctagaaatattactccggaatggctacagcccagacgcccaggcgtgccttgtttttgga

SEQ ID NO: 207194 - DNA, 120 bp, Artificial Sequence
  ENSG00000115239_9 (sequence is synthesized)
gtgaacattcttttgaaatatggagcccagataaatgaacttcatttggcatactgcctgaagtacgagaagttttcgatatttcgctactttttgaggaaaggttgctcattgggacca

SEQ ID NO: 207195 - DNA, 120 bp, Artificial Sequence
  ENSG00000115239_10 (sequence is synthesized)
tggaaccatatatatgaatttgtaaatcatgcaattaaagcacaagcaaaatataaggagtggttgccacatcttctggttgctggatttgacccactgattctactgtgcaattcttgg

SEQ ID NO: 207196 - DNA, 120 bp, Artificial Sequence
  ENSG00000115239_11 (sequence is synthesized)
attgactcagtcagcattgacacccttatcttcactttggagtttactaattggaagacacttgcaccagctgttgaaaggatgctctctgctcgtgcctcaaacgcttggattctacag

SEQ ID NO: 207197 - DNA, 120 bp, Artificial Sequence
  ENSG00000115239_12 (sequence is synthesized)
caacatattgccactgttccatccctgacccatctttgtcgtttggaaattcggtccagtctaaaatcagaacgtctacggtctgacagttatattagtcagctgccacttcccagaagc

SEQ ID NO: 207198 - DNA, 120 bp, Artificial Sequence
  ENSG00000115239_13 (sequence is synthesized)
ctacataattatttgctctatgaagacgttctgaggatgtatgaagttccagaactggcagctattcaagatggataaatcagtgaaactacttaacacagctaatttttttctctgaaa

SEQ ID NO: 207199 - DNA, 120 bp, Artificial Sequence
  ENSG00000115239_14 (sequence is synthesized)
aatcatcgagacaaaagagccacagagtacaagtttttatgattttatagtcaaaagatgattattgattgtgagataggttaggttttggggggccagtagttcagtgagaatgtttat

SEQ ID NO: 207200 - DNA, 120 bp, Artificial Sequence
  ENSG00000115239_15 (sequence is synthesized)
aaaaaaaaaaaaaaaaaaaattgtaaacatcacttatattactttattgcagcttcatcaccagtacattatatgttgtaatatttatttacctgatcattttgatcattttctgcttta

SEQ ID NO: 207201 - DNA, 120 bp, Artificial Sequence
  ENSG00000115239_16 (sequence is synthesized)
ctgatcattttgatcattttctgctttattttgctaataaactgtgatgttacttctagtgctaaacatggcatatttccacctatgattcgtgtttacctggtattaggagctcagaat

SEQ ID NO: 207202 - DNA, 120 bp, Artificial Sequence
  ENSG00000115239_17 (sequence is synthesized)
ggaatgcataaagcttcactggaagtgtatacaactgtggtgtagaatctgttattattatcattattattttatttagacttgactatctcttatgtttattaaagaacatgttttcct

SEQ ID NO: 207203 - DNA, 120 bp, Artificial Sequence
  ENSG00000115239_18 (sequence is synthesized)
aaaactgcgagcctgaaaaacctggctcaagcgcccctcgtgaggcgggcagcgggagtggccgggctctgggccccaggaggcaggcgacggaggcgcggagggtgcggggcgcaggcg

SEQ ID NO: 207204 - DNA, 120 bp, Artificial Sequence
  ENSG00000115239_19 (sequence is synthesized)
gccaggcccgggtgtccggcggagggggcggtgccctcggcgtctccgtgactgcgcctctgcgcccgcgtcttgccgcggctcccgggatgcgcggaggcggtggcgatggcgatgatg

SEQ ID NO: 207205 - DNA, 120 bp, Artificial Sequence
  ENSG00000115239_20 (sequence is synthesized)
aaagacaagtcttattctgttacatcgtttagggctgaatttataatggggggaaggttcttagaggagaacagctgtgcatccctgggagttgggcagaaacaagccatacttgtacac

SEQ ID NO: 207206 - DNA, 120 bp, Artificial Sequence
  ENSG00000115239_21 (sequence is synthesized)
ttgtacactcagtttagggataacttggggtgtttgggctttatccttttaggattattaaattatatgtctgtaaggatggtcaatttacatttggcaagatagtccaaatgggaggaa

SEQ ID NO: 207207 - DNA, 120 bp, Artificial Sequence
  ENSG00000115239_22 (sequence is synthesized)
ataatggcaaatccactgatgtcattggtgctgtcacccatgagaaggaaagttcctactctctctgaggttcctcttgtcatctcttagacagctacatagaaagtcaattcagttaat

SEQ ID NO: 207208 - DNA, 120 bp, Artificial Sequence
  ENSG00000115239_23 (sequence is synthesized)
gttacataaatacttaacatgccctggttttctgtctgccctcctcattgagattttgtaagaataggtatgtggtgtttgtttcaagtacgaacccttggcatgttttgtttctaatat

SEQ ID NO: 207209 - DNA, 120 bp, Artificial Sequence
  ENSG00000115239_24 (sequence is synthesized)
tgcgggtgcgggtccttagatgagaaaattcgaagtagcgatgagatgtgagaaatggcggtgttcctgactgacctgccttcttgcagcttttcttctttttctccgcatttggcattt

SEQ ID NO: 207210 - DNA, 120 bp, Artificial Sequence
  ENSG00000115239_25 (sequence is synthesized)
gtacacttcatttttcccgcttgaggcttatctccatctcttctgctgtggaccgtggccatctcgttacttaacagcttctgactaacgcagggcagtttgttcagcgactgcaactct

SEQ ID NO: 207211 - DNA, 120 bp, Artificial Sequence
  ENSG00000115239_26 (sequence is synthesized)
gtgttaggggaaacctggggtgaggtagcccgccatctccccgtaggtgaataccgcaagcctccgaatttggcgtggtgggcgactctcgtggaatgggcagctagacatcacaaccct

SEQ ID NO: 207212 - DNA, 90 bp, Artificial Sequence
  ENSG00000115239_27 (sequence is synthesized)
gtatgtttactgaagcactattcacaatagcaaagactttgaaccaagccaaatacccattaatgattgactggataaagaaaatgtggc

SEQ ID NO: 207213 - DNA, 120 bp, Artificial Sequence
  ENSG00000115239_28 (sequence is synthesized)
agagactaaccaccggcatcttaagcagcttcggaaggagtgcccgggctgggttagagatggcgggcaggtggcagggaaaatctacagaaatgttaccccaagccatgtgctttggcc

SEQ ID NO: 207214 - DNA, 120 bp, Artificial Sequence
  ENSG00000115239_29 (sequence is synthesized)
atttctaacggggccgaggaaggagaaaagagcaggagtcgtcactcgtgtccagatacggaggcggtgtaccagcaccgcaggtagcaaagcacctagaaacacgttttgttctgcttt

SEQ ID NO: 207215 - DNA, 120 bp, Artificial Sequence
  ENSG00000115239_30 (sequence is synthesized)
ggaaattagatttttgcctatataacagcagccagaggaatgtaattcatatttgattttatgtcctgaaaaaaaagtcttttgcctttcaaataaaagcagaaagtttacaatagaagt

SEQ ID NO: 207216 - DNA, 120 bp, Artificial Sequence
  ENSG00000115239_31 (sequence is synthesized)
gatgcctctagtcctgcatcatccagagcggcaggcggagctggggtccggactgcgagatggaggaggggcggcgctgcggccacccggcaggagacagacgcaataaaaggaagttaa

SEQ ID NO: 207217 - DNA, 120 bp, Artificial Sequence
  ENSG00000115239_32 (sequence is synthesized)
aaaatgtccacggacaccaaaattcatggatgctcctcaagttcggcagtctgccctgaagataggaaaacgtcctatacacacatacaaaagattcatctgaaaactacattaagatga

SEQ ID NO: 207218 - DNA, 120 bp, Artificial Sequence
  ENSG00000115239_33 (sequence is synthesized)
cttgcagtctgctgaggggaacatccaaaactatctgaagccccgggctgaaccaggctctgcagacattggtggtgtcctagaaggctcttgctgaggtcttatgtctgaaaagaaacc

SEQ ID NO: 207219 - DNA, 120 bp, Artificial Sequence
  ENSG00000115239_34 (sequence is synthesized)
ctcggaaacccacttgagtctgtcttgcatttcacatgaaacaaggcttcattctgcaaaaatatctgggaccttcaaattcacaagtggattttctgctcaggggagagctaccaatcg

SEQ ID NO: 207220 - DNA, 120 bp, Artificial Sequence
  ENSG00000115239_35 (sequence is synthesized)
gttgaaaggtatgttacagctctaagaagctgcatccatttcctgtaggatccatagtttctggttctggttccagggaactccttcaaatgaactggtcgccatatgaattgatgctac

SEQ ID NO: 207221 - DNA, 120 bp, Artificial Sequence
  ENSG00000115239_36 (sequence is synthesized)
acattttttccttctgtcttgtattattcctccggctcaagaacctgccagagatggaatctccctatgttccccaggctgatcttgaatttctgagctcaagcgatcctcctgccttgg

SEQ ID NO: 207222 - DNA, 120 bp, Artificial Sequence
  ENSG00000115239_37 (sequence is synthesized)
ataggcgtgagccaccatgcctggccagagagcattttagtaaggataaaaagttttattggcctcaggctgaagtttgcaattatattccaaatacccaaagtgggtatattattgacg

SEQ ID NO: 207223 - DNA, 120 bp, Artificial Sequence
  ENSG00000115239_38 (sequence is synthesized)
aagtgggtatattattgacgttgtcctgagagagggacagacagtttgactgtgttgctttctttggagtcagttttggggctgttaaggattacctggaaacattagatgaagctgggg

SEQ ID NO: 207224 - DNA, 120 bp, Artificial Sequence
  ENSG00000115239_39 (sequence is synthesized)
ggttccagggtaagtatcactttacctgtgtggtttacaccccttcctccatggctggtttctgttcctggggctgttcgtccccctgtaattcccgtcaaccacttctccttctctatg

SEQ ID NO: 207225 - DNA, 120 bp, Artificial Sequence
  ENSG00000115239_40 (sequence is synthesized)
aattgaaaaggtggagagcaggtgattgctggatccctaatgctcagcaagggggacgcatccacataacgtgagaacgaacgaatgaatgaacgctgcataaaagcagctttggcttgg

SEQ ID NO: 207226 - DNA, 120 bp, Artificial Sequence
  ENSG00000115241_0 (sequence is synthesized)
gcctcgcgcctttcaccggcaccttgcgtcggtcgcgccgcggggcctgctcctgccgcgcgcacccccggggcttcggctccggcacgggtcgcgcccagctttcctgcacctgaggcc

SEQ ID NO: 207227 - DNA, 120 bp, Artificial Sequence
  ENSG00000115241_1 (sequence is synthesized)
gggtcgcgcccagctttcctgcacctgaggccgccggccagccgccgccatgggtgcctacctctcccagcccaacacggtgaagtgctccggggacggggtcggcgccccgcgcctgcc

SEQ ID NO: 207228 - DNA, 120 bp, Artificial Sequence
  ENSG00000115241_2 (sequence is synthesized)
gctgccctacggcttctccgccatgcaaggctggcgcgtctccatggaggatgctcacaactgtattcctgagctggacagtgagacagccatgttttctgtctacgatggacatggagg

SEQ ID NO: 207229 - DNA, 120 bp, Artificial Sequence
  ENSG00000115241_3 (sequence is synthesized)
ggaggaagttgccttgtactgtgccaaatatcttcctgatatcatcaaagatcagaaggcctacaaggaaggcaagctacagaaggctttagaagatgccttcttggctattgacgccaa

SEQ ID NO: 207230 - DNA, 120 bp, Artificial Sequence
  ENSG00000115241_4 (sequence is synthesized)
attgaccactgaagaagtcattaaagagctggcacagattgcagggcgacccactgaggatgaagatgaaaaagaaaaagtagctgatgaagatgatgtggacaatgaggaggctgcact

SEQ ID NO: 207231 - DNA, 120 bp, Artificial Sequence
  ENSG00000115241_5 (sequence is synthesized)
gctgcatgaagaggctaccatgactattgaagagctgctgacacgctacgggcagaactgtcacaagggccctccccacagcaaatctggaggtgggacaggcgaggaaccagggtccca

SEQ ID NO: 207232 - DNA, 120 bp, Artificial Sequence
  ENSG00000115241_6 (sequence is synthesized)
gggcctcaatggggaggcaggacctgaggactcaactagggaaactccttcacaagaaaatggccccacagccaaggcctacacaggcttttcctccaactcggaacgtgggactgaggc

SEQ ID NO: 207233 - DNA, 120 bp, Artificial Sequence
  ENSG00000115241_7 (sequence is synthesized)
aggccaagttggtgagcctggcattcccactggtgaggctgggccttcctgctcttcagcctctgacaagctgcctcgagttgctaagtccaagttctttgaggacagtgaggatgagtc

SEQ ID NO: 207234 - DNA, 120 bp, Artificial Sequence
  ENSG00000115241_8 (sequence is synthesized)
agatgaggcggaggaagaagaggaagacagtgaggaatgcagcgaggaagaggatggctacagcagtgaggaggcagagaatgaggaagatgaggatgacaccgaggaggctgaagagga

SEQ ID NO: 207235 - DNA, 120 bp, Artificial Sequence
  ENSG00000115241_9 (sequence is synthesized)
aggagcctggctctgacagtggtacaacagcggtggtggccctgatacgagggaagcagttgattgtagccaacgcaggagactctcgctgtgtggtatctgaggctggcaaagctttag

SEQ ID NO: 207236 - DNA, 120 bp, Artificial Sequence
  ENSG00000115241_10 (sequence is synthesized)
acatgtcctatgatcacaaaccagaggatgaagtagaactagcacgcatcaagaatgctggtggcaaggtcaccatggatgggcgagtcaacgggggcctcaacctctccagagccattg

SEQ ID NO: 207237 - DNA, 120 bp, Artificial Sequence
  ENSG00000115241_11 (sequence is synthesized)
gggaccacttctataagagaaacaagaacctgccacctgaggaacagatgatttcagcccttcctgacatcaaggtgctgactctcactgacgaccatgaattcatggtcattgcctgtg

SEQ ID NO: 207238 - DNA, 120 bp, Artificial Sequence
  ENSG00000115241_12 (sequence is synthesized)
atggcatctggaatgtgatgagcagccaggaagttgtagatttcattcaatcaaagatcagccagcgtgatgaaaatggggagcttcggttattgtcatccattgtggaagagctgctgg

SEQ ID NO: 207239 - DNA, 120 bp, Artificial Sequence
  ENSG00000115241_13 (sequence is synthesized)
atcagtgcctggcaccagacacttctggggatggtacagggtgtgacaacatgacctgcatcatcatttgcttcaagccccgaaacacagcagagctccagccagagagtggcaagcgaa

SEQ ID NO: 207240 - DNA, 120 bp, Artificial Sequence
  ENSG00000115241_14 (sequence is synthesized)
aactagaggaggtgctctctactgagggggctgaagaaaatggcaacagcgacaagaagaagaaggccaagcgagactagcagtcatccagacccctgcccacctagactgttttctgag

SEQ ID NO: 207241 - DNA, 120 bp, Artificial Sequence
  ENSG00000115241_15 (sequence is synthesized)
ccctccggacctgagactgagttttgtctttttcctttagccttagcagtgggtatgaggtgtgcagggggagctgggtggcttcactccgcccattccaaagagggctctccctccaca

SEQ ID NO: 207242 - DNA, 120 bp, Artificial Sequence
  ENSG00000115241_16 (sequence is synthesized)
ctgcagccgggagcctctgctgtccttcccagccgcctctgctcctcgggctcatcaccggttctgtgcctgtgctctgttgtgttggagggaaggactggcggttctggtttttactct

SEQ ID NO: 207243 - DNA, 120 bp, Artificial Sequence
  ENSG00000115241_17 (sequence is synthesized)
gtgaactttatttaaggacattcttttttattggcggctccatggccctcggccgcttgcacccgctctctgttgtacactttcaatcaacactttttcagactaaaggccaaaacctaa

SEQ ID NO: 207244 - DNA, 120 bp, Artificial Sequence
  ENSG00000115241_18 (sequence is synthesized)
cccaattccagacgttccagggcaagaacaggtccctttgttcatttactttccagggtctggccctcattatcatttcctgcgtggtgctgtttttctgtattctgtcattcttttttc

SEQ ID NO: 207245 - DNA, 120 bp, Artificial Sequence
  ENSG00000115241_19 (sequence is synthesized)
ccagtaggtactgtattggtttataatctcaccaggacttgttttaatccaaagagcctctatctttttttatttttattttttaaaatttttaggctgggcacgcggtaggtcacacct

SEQ ID NO: 207246 - DNA, 120 bp, Artificial Sequence
  ENSG00000115241_20 (sequence is synthesized)
aaaaaacaaaaaagtgtacccagttgagctgattctttatctttttttcactggagaactaagtatacaggtgagaaaagacgagatatttatacccgagagaattgatggtgaaatcca

SEQ ID NO: 207247 - DNA, 120 bp, Artificial Sequence
  ENSG00000115241_21 (sequence is synthesized)
tttttttggatcagaacttccccaaacagtgtccttcaaatagggttcaggggtgctaagatatttatcccctcaacccttggggttcactccagtatggcatataaatattgtatcact

SEQ ID NO: 207248 - DNA, 120 bp, Artificial Sequence
  ENSG00000115241_22 (sequence is synthesized)
ttctatgtgtggggagcagtgctccaggtgaccttccttcctttccttctaggggaggaagttgccttgtactgtgccaaatatcttcctgatatcatcaaagatcagaaggcctacaag

SEQ ID NO: 207249 - DNA, 120 bp, Artificial Sequence
  ENSG00000115241_23 (sequence is synthesized)
gaaggcaagctacagaaggtctgtctgcttacaccgcccattcctcacttgtgtaggcttttcccttgttctctagcccttgggcttttcctttctttttgtcctctagctgctgctgct

SEQ ID NO: 207250 - DNA, 120 bp, Artificial Sequence
  ENSG00000115241_24 (sequence is synthesized)
tatttactcttgaagaattctgttcctaaaacgagcttattggccgccttttagacttgccttattattcctaggcctctgagctgtttttatctgtgagtgtctcttagtgtggtggct

SEQ ID NO: 207251 - DNA, 120 bp, Artificial Sequence
  ENSG00000115241_25 (sequence is synthesized)
cacactcttaatttgtattccatccttgtgctcaggattgtatatagggagttcattttgtactagtcttagactattttgcttatattcaggctttagaagatgccttcttggctattg

SEQ ID NO: 207252 - DNA, 120 bp, Artificial Sequence
  ENSG00000115241_26 (sequence is synthesized)
cttgtttgaggggaaatcagcattttaagaaatattctttaatattacttatcaattctaagataggatggctttctagggacctggggagtccttatgttaaagaaacctatgatgttc

SEQ ID NO: 207253 - DNA, 120 bp, Artificial Sequence
  ENSG00000115241_27 (sequence is synthesized)
agagaattatcttcgttgagtggcatctgagctgtaagcattgtatatacattatcttttgtcattgtgatggggtcttcctggttcctgctagtatttatgtgcttttttttcccctca

SEQ ID NO: 207254 - DNA, 120 bp, Artificial Sequence
  ENSG00000115241_28 (sequence is synthesized)
agactggagcagttattagccccaatagccaatcattaagcctaaatcctaattcacagtagcattgtgggcttcctggatcctcagccagaatagggtttttacaacttaacaataaaa

SEQ ID NO: 207255 - DNA, 120 bp, Artificial Sequence
  ENSG00000115241_29 (sequence is synthesized)
aatgagacgtcagaggggaagtatagtaactagtgttgttttgattaagaaggggatgaaacacaaaaaccaaaagaagtctgtggaggaggaggagctagggcatgttcttctgagact

SEQ ID NO: 207256 - DNA, 120 bp, Artificial Sequence
  ENSG00000115241_30 (sequence is synthesized)
tgagcgagaggaaccttgggagtgggaggttgtggggaagttagaggctgcaagggctgttgaggtagtgagagggacggatcccatgaggagtctggcatgggggctctgatttagcct

SEQ ID NO: 207257 - DNA, 120 bp, Artificial Sequence
  ENSG00000115241_31 (sequence is synthesized)
cttccctgcagtggacaatgaggaggctgcactgctgcatgaagaggctaccatgactattgaagagctgctgacacgctacgggcagaactgtcacaagggccctccccacagcaaatc

SEQ ID NO: 207258 - DNA, 120 bp, Artificial Sequence
  ENSG00000115252_0 (sequence is synthesized)
ggtgaggtggtgagcagtggatatatgcctgtcaaagtcaatagcaaatctgtcagagtcttccctcagctttgtacatcagcactgttttgatagataagagaggctactgtataagtg

SEQ ID NO: 207259 - DNA, 120 bp, Artificial Sequence
  ENSG00000115252_1 (sequence is synthesized)
tgtaagatttgtaatggactgaggaatgcttgttctagctgctgaaactgactgtaactgtattgtcttaggagcatcatcatggggtctagtgccacagagattgaagaattggaaaac

SEQ ID NO: 207260 - DNA, 120 bp, Artificial Sequence
  ENSG00000115252_2 (sequence is synthesized)
accacttttaagtatcttacaggagaacagactgaaaaaatgtggcagcgcctgaaaggaatactaagatgcttggtgaagcagctggaaagaggtgatgttaacgtcgtcgacttaaag

SEQ ID NO: 207261 - DNA, 120 bp, Artificial Sequence
  ENSG00000115252_3 (sequence is synthesized)
aagaatattgaatatgcggcatctgtgctggaagcagtttatatcgatgaaacaagaagacttctggatactgaagatgagctcagtgacattcagactgactcagtcccatctgaagtc

SEQ ID NO: 207262 - DNA, 120 bp, Artificial Sequence
  ENSG00000115252_4 (sequence is synthesized)
cgggactggttggcttctacctttacacggaaaatggggatgacaaaaaagaaacctgaggaaaaaccaaaatttcggagcattgtgcatgctgttcaagctggaatttttgtggaaaga

SEQ ID NO: 207263 - DNA, 120 bp, Artificial Sequence
  ENSG00000115252_5 (sequence is synthesized)
atgtaccgaaaaacatatcatatggttggtttggcatatccagcagctgtcatcgtaacattaaaggatgttgataaatggtctttcgatgtatttgccctaaatgaagcaagtggagag

SEQ ID NO: 207264 - DNA, 120 bp, Artificial Sequence
  ENSG00000115252_6 (sequence is synthesized)
catagtctgaagtttatgatttatgaactgtttaccagatatgatcttatcaaccgtttcaagattcctgtttcttgcctaatcacctttgcagaagctttagaagttggttacagcaag

SEQ ID NO: 207265 - DNA, 120 bp, Artificial Sequence
  ENSG00000115252_7 (sequence is synthesized)
tacaaaaatccatatcacaatttgattcatgcagctgatgtcactcaaactgtgcattacataatgcttcatacaggtatcatgcactggctcactgaactggaaattttagcaatggtc

SEQ ID NO: 207266 - DNA, 120 bp, Artificial Sequence
  ENSG00000115252_8 (sequence is synthesized)
tttgctgctgccattcatgattatgagcatacagggacaacaaacaactttcacattcagacaaggtcagatgttgccattttgtataatgatcgctctgtccttgagaatcaccacgtg

SEQ ID NO: 207267 - DNA, 120 bp, Artificial Sequence
  ENSG00000115252_9 (sequence is synthesized)
agtgcagcttatcgacttatgcaagaagaagaaatgaatatcttgataaatttatccaaagatgactggagggatcttcggaacctagtgattgaaatggttttatctacagacatgtca

SEQ ID NO: 207268 - DNA, 120 bp, Artificial Sequence
  ENSG00000115252_10 (sequence is synthesized)
ggtcacttccagcaaattaaaaatataagaaacagtttgcagcagcctgaagggattgacagagccaaaaccatgtccctgattctccacgcagcagacatcagccacccagccaaatcc

SEQ ID NO: 207269 - DNA, 120 bp, Artificial Sequence
  ENSG00000115252_11 (sequence is synthesized)
tggaagctgcattatcggtggaccatggccctaatggaggagtttttcctgcagggagataaagaagctgaattagggcttccattttccccactttgtgatcggaagtcaaccatggtg

SEQ ID NO: 207270 - DNA, 120 bp, Artificial Sequence
  ENSG00000115252_12 (sequence is synthesized)
gcccagtcacaaataggtttcatcgatttcatagtagagccaacattttctcttctgacagactcaacagagaaaattgttattcctcttatagaggaagcctcaaaagccgaaacttct

SEQ ID NO: 207271 - DNA, 120 bp, Artificial Sequence
  ENSG00000115252_13 (sequence is synthesized)
tcctatgtggcaagcagctcaaccaccattgtggggttacacattgctgatgcactaagacgatcaaatacaaaaggctccatgagtgatgggtcctattccccagactactcccttgca

SEQ ID NO: 207272 - DNA, 120 bp, Artificial Sequence
  ENSG00000115252_14 (sequence is synthesized)
gcagtggacctgaagagtttcaagaacaacctggtggacatcattcagcagaacaaagagaggtggaaagagttagctgcacaaggtgaatctgatcttcataagaactcagaagactta

SEQ ID NO: 207273 - DNA, 120 bp, Artificial Sequence
  ENSG00000115252_15 (sequence is synthesized)
gtaaatgctgaagaaaaacatgatgagacacattcataggcccgaaacaccttaaagacttctgtcattttaaacatgagaggacaatgaaatcagcatgaaaacatcctaaattctcaa

SEQ ID NO: 207274 - DNA, 120 bp, Artificial Sequence
  ENSG00000115252_16 (sequence is synthesized)
ctttccacaaagctatggctcttctttcaacatagaattggattgggccattttaattgactcctatacaaggaattaagaagaacataaattttgagctagtaactctggccaaataaa

SEQ ID NO: 207275 - DNA, 120 bp, Artificial Sequence
  ENSG00000115252_17 (sequence is synthesized)
tacactcaagtttttatcagagtttttggccagtgcttctgccatttttttccctccacaatttggccttcttcaatcaagccagataaatttttgagacaaaagtcagacagtttttaa

SEQ ID NO: 207276 - DNA, 120 bp, Artificial Sequence
  ENSG00000115252_18 (sequence is synthesized)
tttttcttgctttgaaccctgtcataatgactgtgcaatacatgtgcagaagatgaggtattttaaaatttacttccttgcactgtcttacacagagtgctataactataaatttttcaa

SEQ ID NO: 207277 - DNA, 120 bp, Artificial Sequence
  ENSG00000115252_19 (sequence is synthesized)
ggtcttaaataaaaggaagcaaaaacaaaattattgaaaaattttttttgttgtgctggggaatatactatttagattgtccttcttattttaaatgcatgggaacagaatgacaggtgg

SEQ ID NO: 207278 - DNA, 120 bp, Artificial Sequence
  ENSG00000115252_20 (sequence is synthesized)
cacctttgtaaactctcatactgggaaatggcagtgaaacctttttctgaacccgtggaccagcctgcgtccgtccccatggtttcaaagcacgaatgcattacctccatggttgtggtt

SEQ ID NO: 207279 - DNA, 120 bp, Artificial Sequence
  ENSG00000115252_21 (sequence is synthesized)
acaagcaagtcacatgctatctacagttcatgataacaagaccgtcaaccattgctggagacagacactagaatggaaaatgaaatttgccagcgggatgtttatcccatcagaatgtaa

SEQ ID NO: 207280 - DNA, 83 bp, Artificial Sequence
  ENSG00000115252_22 (sequence is synthesized)
aatgtctatgaaaatgaaaacccacacttttctgtacagataacattatttgatgtgacttttatattttactacacagaaac

SEQ ID NO: 207281 - DNA, 120 bp, Artificial Sequence
  ENSG00000115252_23 (sequence is synthesized)
cattatttgatgtgacttttatattttactacacagaaacaaactgcagccctcagaggccctgcttccttgtcatgttttgcctgagcatgtgcaaagtctttcctttgcttaaagctg

SEQ ID NO: 207282 - DNA, 120 bp, Artificial Sequence
  ENSG00000115252_24 (sequence is synthesized)
aaaaactacctttatgcattgttagctgacaagaaagatcaagcacaattagatgttgtaacttttcactgtacaagcattgcaatgattgtgagcttcagtgaatttatctttgtgaaa

SEQ ID NO: 207283 - DNA, 120 bp, Artificial Sequence
  ENSG00000115252_25 (sequence is synthesized)
ggtaaaaattggctggaaagaatcaggagtagccataaattaaatcatgcaaaggaggatccatgcatcctaacaagttttctgctgcatctgcttccttcctgggctccacaatgttaa

SEQ ID NO: 207284 - DNA, 120 bp, Artificial Sequence
  ENSG00000115252_26 (sequence is synthesized)
gcaatattttagaaaagggtacaattggaagcttttaagcctgagtggtgagattttataactcacaacttagatctcttttaatgtgtaagccatattctatatgcatatttattatgc

SEQ ID NO: 207285 - DNA, 120 bp, Artificial Sequence
  ENSG00000115252_27 (sequence is synthesized)
atcattgtaatttaagatatatttggatgtaggctgtataaatgcttttaattgttctgtgaatagatccttagctttagtttcacctgaatcttgtgcaaaacacagctaaataattga

SEQ ID NO: 207286 - DNA, 120 bp, Artificial Sequence
  ENSG00000115252_28 (sequence is synthesized)
attgtattatagacattatgaggtaattgatcttttaaatgtaaggagtaagattgatctataataatgtgctggggaaaacatttatagatatgtacatcatggttactttttgtcctt

SEQ ID NO: 207287 - DNA, 120 bp, Artificial Sequence
  ENSG00000115252_29 (sequence is synthesized)
tcaaatggactttttatttctatttatggagagactgtaactactgcttttaatgtctttttaaagcaagctatttaccagcttgaaaatatcatgcatttaaaatagaatctatctggg

SEQ ID NO: 207288 - DNA, 120 bp, Artificial Sequence
  ENSG00000115252_30 (sequence is synthesized)
gagtctaattactattgttcctatttgagccagttgtctttcagtaaagctatagaatctctcaaagaagtaaatagaaatactacttcttaaatgtcataggaagcatatccactttgt

SEQ ID NO: 207289 - DNA, 120 bp, Artificial Sequence
  ENSG00000115252_31 (sequence is synthesized)
ttctattagtactttaagatctataagaccttattactaaaaagtagaggaatataaagaattcatcaatttctgtatatgggctttaacctaattttccaggttatgcgacttataaag

SEQ ID NO: 207290 - DNA, 120 bp, Artificial Sequence
  ENSG00000115252_32 (sequence is synthesized)
agtaaaaaaaaaaaaaagaaaaaaaagttttactccttcagaagtattgtcatgctactgctgtacttattttcctaatctctctctatctgctatactccctccttttctttctttttc

SEQ ID NO: 207291 - DNA, 120 bp, Artificial Sequence
  ENSG00000115252_33 (sequence is synthesized)
actccctccttttctttctttttcttttaagcttttatatttattccttcctttgttttcctctctgtaagacagctactactgagcactaattagtagaaagtcagagtggaggttatc

SEQ ID NO: 207292 - DNA, 120 bp, Artificial Sequence
  ENSG00000115252_34 (sequence is synthesized)
tgtgcatgtctttctgcaaacattactgttgaggccatctgaagagagggattgataggttaggctgttgcaccgtgaatgtcctgctttgcatttttaacctcagctccccaacatata

SEQ ID NO: 207293 - DNA, 120 bp, Artificial Sequence
  ENSG00000115252_35 (sequence is synthesized)
tatcttgcagtttatatgccttttcatttaaccgaaacctcttttatttaatttttaacataacaacctacaattcttgtgtttttattatgctgtatttttctgtgtttcttattacat

SEQ ID NO: 207294 - DNA, 120 bp, Artificial Sequence
  ENSG00000115252_36 (sequence is synthesized)
gtgattgctaaataaatcatatttgagggaaaacattgtgaaacatttggtgttttatgcaattcaatttagtgaggcattgaaaagttggagaaattgggggaaacccaaaggagacca

SEQ ID NO: 207295 - DNA, 120 bp, Artificial Sequence
  ENSG00000115252_37 (sequence is synthesized)
acttaaaaattgatatgagtttggtaagaaagtgctttttgttccattaaataaatactgattgaattacttattattatacctattattcataagctcctggctggaagcatggtgcat

SEQ ID NO: 207296 - DNA, 120 bp, Artificial Sequence
  ENSG00000115252_38 (sequence is synthesized)
atatgcatatggcaatatttcctctagaaatttcaagtcttataaaggagataatctacacagactgtaatttatacctaataactagaatgccacataaaaaagtaaccagttgcaaat

SEQ ID NO: 207297 - DNA, 120 bp, Artificial Sequence
  ENSG00000115252_39 (sequence is synthesized)
aaaatgcacctatgtatatttgaggaggtaaaaaactgcttctgtcttcagagctttcaggactaagtggtgcatcagttggcatttagtaaataaaaacaagtttataaacattgccta

SEQ ID NO: 207298 - DNA, 120 bp, Artificial Sequence
  ENSG00000115252_40 (sequence is synthesized)
gagggacttagcctttcggagcttgaccagcatgtggaaggagagctctcatggctgcaataacttagggagttcctacctggatgacactggggtaggaagttttctgtttgttttgtt

SEQ ID NO: 207299 - DNA, 120 bp, Artificial Sequence
  ENSG00000115252_41 (sequence is synthesized)
ctgtttcggagggtcccgtgcacttctcttgcctggatcaacgtgactcttggtggtttttgcacaccctgctctgtgggggagtgccccaacgtgcctgtcttatgtggcctctatgga

SEQ ID NO: 207300 - DNA, 120 bp, Artificial Sequence
  ENSG00000115252_42 (sequence is synthesized)
cacactgctcagctggcagagaacagggaagttttctcccagcacccaaaaagagaaagaggaaactactttttctttctgggctccttgcagcacaatagatcaggataagcttccaca

SEQ ID NO: 207301 - DNA, 120 bp, Artificial Sequence
  ENSG00000115252_43 (sequence is synthesized)
tttcctctctggagtttctggagtggtttccaggaagaagttaaaccttcacctttaaatggatgaccatgtcacaatcaggaagaaacatctccaaagacccatctttagactaagatg

SEQ ID NO: 207302 - DNA, 120 bp, Artificial Sequence
  ENSG00000115252_44 (sequence is synthesized)
acacctttaagtaaaacctcgtgcatggtggcagctctaatttgaccaaaagacttggagattttgattatgcttgctggaaatctaccctgtcctgtgtgagacaggaaatctattttt

SEQ ID NO: 207303 - DNA, 120 bp, Artificial Sequence
  ENSG00000115252_45 (sequence is synthesized)
gcagattgctcaataagcatcatgagccacataaataacagctgtaaactccttaattcaccgggctcaactgctaccgaacagattcatctagtggctacatcagcaccttgtgctttc

SEQ ID NO: 207304 - DNA, 120 bp, Artificial Sequence
  ENSG00000115252_46 (sequence is synthesized)
agatatctgtttcaatggcattttgtggcatttgtctttaccgagtgccaataaattttctttgagcagctaattgctaattttgtcatttctacaataaagcttggtccacctgttttc

SEQ ID NO: 207305 - DNA, 120 bp, Artificial Sequence
  ENSG00000115252_47 (sequence is synthesized)
acaatgattcctattccacttgttctacctacactgtatctgatcactgcataagagatagtagaaatggcattatctttaaagtagtgatattttcaagccatgaagtttagtgacttg

SEQ ID NO: 207306 - DNA, 120 bp, Artificial Sequence
  ENSG00000115252_48 (sequence is synthesized)
ctgaaatgggctagggaatctaatttcaaatgggcaaaaagataaacaaactattttgctttaattttctagttcagtgttttaggggtaaatcaaaaccatccaaatgtcagatcagaa

SEQ ID NO: 207307 - DNA, 120 bp, Artificial Sequence
  ENSG00000115252_49 (sequence is synthesized)
gaattctgatgtgcttcagtgcacagaacagtaacagatgagctgcttttggggagagcttgagtactcagtcggagcatcatcatggggtctagtgccacagagattgaagaattggaa

SEQ ID NO: 207308 - DNA, 120 bp, Artificial Sequence
  ENSG00000115252_50 (sequence is synthesized)
aaaggattcatagagcaggctgtgtgcagctgccgtattttccactggttaaattggcagttacctactgtgtggagttgctaggagaaggagcatcatcatggggtctagtgccacaga

SEQ ID NO: 207309 - DNA, 120 bp, Artificial Sequence
  ENSG00000115252_51 (sequence is synthesized)
aacagactgaaaaaatgtggcagcgcctgaaaggaatagccatatgtgagtggaaagatcttgaattgttcctgctcttcttgacagaagaaaataaaaactaagatgcttggtgaagca

SEQ ID NO: 207310 - DNA, 120 bp, Artificial Sequence
  ENSG00000115252_52 (sequence is synthesized)
gaaggtgaataagcatgcttacagcatcagttgatgtacatattcttgcaataacaacctgtggagctgtgttcttctgagcatcatcatggggtctagtgccacagagattgaagaatt

SEQ ID NO: 207311 - DNA, 120 bp, Artificial Sequence
  ENSG00000115255_0 (sequence is synthesized)
aggctgcgggaaagcggtgcgcgtgcagcggggtgggtgccctggtccgcgggcgagctcgagcagccaaccccgggcgcgtcggggccatggacggcctgaggcagcgcgtggagcact

SEQ ID NO: 207312 - DNA, 120 bp, Artificial Sequence
  ENSG00000115255_1 (sequence is synthesized)
tcctggagcaaaggaacctggtcaccgaagtgctgggggcgctggaggccaagaccggggtggagaagcggtatctggctgcaggagccgtcactctgctaagcctgtatctgctgttcg

SEQ ID NO: 207313 - DNA, 120 bp, Artificial Sequence
  ENSG00000115255_2 (sequence is synthesized)
gctacggagcgtctctgctgtgcaatctcatcggatttgtgtaccccgcatatgcctcaatcaaagctatcgagagcccaagcaaggacgacgacactgtgtggctcacctactgggtgg

SEQ ID NO: 207314 - DNA, 120 bp, Artificial Sequence
  ENSG00000115255_3 (sequence is synthesized)
tgtacgccctgtttgggctggccgagttcttcagcgatctactcctgtcctggttccctttctactacgtgggcaagtgcgccttcctgttgttctgcatggctcccaggccctggaacg

SEQ ID NO: 207315 - DNA, 120 bp, Artificial Sequence
  ENSG00000115255_4 (sequence is synthesized)
gggctctcatgctgtatcagcgcgtcgtgcgtccgctgttcctaaggcaccacggggccgtagacagaatcatgaacgacctcagcgggcgagccctggacgcggcggccggaataacca

SEQ ID NO: 207316 - DNA, 120 bp, Artificial Sequence
  ENSG00000115255_5 (sequence is synthesized)
gtgaagcagccccctgagcctcacaaggacctcctggctggtgaggagggggccgcgccaggctcccaggcctccacagagtcttcagcgcatcccccaacagcagcccctgccagtccc

SEQ ID NO: 207317 - DNA, 120 bp, Artificial Sequence
  ENSG00000115255_6 (sequence is synthesized)
tcgggtccaggcaaggccctgggggtctccttaaatgccacctcgggcaagtcccagtcccagtcctcggccacccccagctctggatcccagggccagctgccctctggctctggctgt

SEQ ID NO: 207318 - DNA, 120 bp, Artificial Sequence
  ENSG00000115255_7 (sequence is synthesized)
ggctcccgcctgtccggcagggcccagggccagcgtcgggcacagggcagctcccactggtctcggcaacacacccagccgcctggtacttcctccagcccctcccagtcagccctcccg

SEQ ID NO: 207319 - DNA, 120 bp, Artificial Sequence
  ENSG00000115255_8 (sequence is synthesized)
tcctcggggcccctgcagccacccaacgtcacctccagcccggtctcacccatggtccagtctcccagcagcagcaacatccccacgcagccccccagcaagtcctctggcaagccggag

SEQ ID NO: 207320 - DNA, 120 bp, Artificial Sequence
  ENSG00000115255_9 (sequence is synthesized)
gacgcagcccccaagaccagcggacagcgccagaaggaatcgtcgaaacagcctgccagcagcgcctcagtgcccgagctggtcccctgccattccgggacctctctggagtacacttcg

SEQ ID NO: 207321 - DNA, 120 bp, Artificial Sequence
  ENSG00000115255_10 (sequence is synthesized)
gagtccaccaccgagatcacctgcagctggccacaccacaggcccccgtgcctgcagcactactggtgcctgaaacacctggcctgctaggaggctccaataaagctaacccggaccaga

SEQ ID NO: 207322 - DNA, 120 bp, Artificial Sequence
  ENSG00000115255_11 (sequence is synthesized)
gatgggggatgtgaggggaagactcagtcccttccctggggaaacgagccctgtccgggggctgatggtggagggcccaccctgaagggtgtctgatggtggagacccaagcctgctcca

SEQ ID NO: 207323 - DNA, 120 bp, Artificial Sequence
  ENSG00000115255_12 (sequence is synthesized)
ataggatgtccgatggtggagggctcaccctacaggatgtctgatggtggagggcccaccctgaagggtgtctgatggtggagacccaagcctgctcaaataggatgtctgatggtggag

SEQ ID NO: 207324 - DNA, 120 bp, Artificial Sequence
  ENSG00000115255_13 (sequence is synthesized)
ggctcacttaaagggtgtctgatggtggagacccaggcttattccaataatatgtctgatggcacagggcccacccctaaagtgtgtctgacggtggagacccaggcctgtcccagtagg

SEQ ID NO: 207325 - DNA, 120 bp, Artificial Sequence
  ENSG00000115255_14 (sequence is synthesized)
acgtctgatggtggagggctcactctagagggtatctgatggcgaaaacccaggcccatcccaataggacgtctgatggtggcgggcccaccctaaagggtgtctgatggtggagaccca

SEQ ID NO: 207326 - DNA, 120 bp, Artificial Sequence
  ENSG00000115257_0 (sequence is synthesized)
cccactcggcggtttggcgggagggaggggatttgcgcaggccccgctcccgccccgcctccatgcggcccgccccgattgcgctgtggctgcgcctggtcttggccctggcccttgtcc

SEQ ID NO: 207327 - DNA, 120 bp, Artificial Sequence
  ENSG00000115257_1 (sequence is synthesized)
gcccccgggctgtggggtgggccccggtccgagcccccatctatgtcagcagctgggccgtccaggtgtcccagggtaaccgggaggtcgagcgcctggcacgcaaattcggcttcgtca

SEQ ID NO: 207328 - DNA, 120 bp, Artificial Sequence
  ENSG00000115257_2 (sequence is synthesized)
acctggggccgatcttccctgacgggcagtactttcacctgcggcaccggggcgtggtccagcagtccctgaccccgcactggggccaccgcctgcacctgaagaaaaaccccaaggtgc

SEQ ID NO: 207329 - DNA, 120 bp, Artificial Sequence
  ENSG00000115257_3 (sequence is synthesized)
agtggttccagcagcagacgctgcagcggcgggtgaaacgctctgtcgtggtgcccacggacccctggttctccaagcagtggtacatgaacagcgaggcccaaccagacctgagcatcc

SEQ ID NO: 207330 - DNA, 120 bp, Artificial Sequence
  ENSG00000115257_4 (sequence is synthesized)
tgcaggcctggagtcaggggctgtcaggccagggcatcgtggtctctgtgctggacgatggcatcgagaaggaccacccggacctctgggccaactacgaccccctggccagctatgact

SEQ ID NO: 207331 - DNA, 120 bp, Artificial Sequence
  ENSG00000115257_5 (sequence is synthesized)
tcaatgactacgacccggacccccagccccgctacacccccagcaaagagaaccggcacgggacccgctgtgctggggaggtggccgcgatggccaacaatggcttctgtggtgtggggg

SEQ ID NO: 207332 - DNA, 120 bp, Artificial Sequence
  ENSG00000115257_6 (sequence is synthesized)
tcgctttcaacgcccgaatcggaggcgtacggatgctggacggtaccatcaccgatgtcatcgaggcccagtcgctgagcctgcagccgcagcacatccacatttacagcgccagctggg

SEQ ID NO: 207333 - DNA, 120 bp, Artificial Sequence
  ENSG00000115257_7 (sequence is synthesized)
gtcccgaggacgacggccgcacggtggacggccccggcatcctcacccgcgaggccttccggcgtggtgtgaccaagggccgcggcgggctgggcacgctcttcatctgggcctcgggca

SEQ ID NO: 207334 - DNA, 120 bp, Artificial Sequence
  ENSG00000115257_8 (sequence is synthesized)
acggcggcctgcactacgacaactgcaactgcgacggctacaccaacagcatccacacgctttccgtgggcagcaccacccagcagggccgcgtgccctggtacagcgaagcctgcgcct

SEQ ID NO: 207335 - DNA, 120 bp, Artificial Sequence
  ENSG00000115257_9 (sequence is synthesized)
ccaccctcaccaccacctacagcagcggcgtggccaccgacccccagatcgtcaccacggacctgcatcacgggtgcacagaccagcacacgggcacctcggcctcagccccactggcgg

SEQ ID NO: 207336 - DNA, 120 bp, Artificial Sequence
  ENSG00000115257_10 (sequence is synthesized)
ccggcatgatcgccctagcgctggaggccaacccgttcctgacgtggagagacatgcagcacctggtggtccgcgcgtccaagccggcgcacctgcaggccgaggactggaggaccaacg

SEQ ID NO: 207337 - DNA, 120 bp, Artificial Sequence
  ENSG00000115257_11 (sequence is synthesized)
atcactacggatacgggctgctggacgccgggctgctggtggacaccgcccgcacctggctgcccacccagccgcagaggaagtgcgccgtccgggtccagagccgccccacccccatcc

SEQ ID NO: 207338 - DNA, 120 bp, Artificial Sequence
  ENSG00000115257_12 (sequence is synthesized)
tgccgctgatctacatcagggaaaacgtatcggcctgcgccggcctccacaactccatccgctcgctggagcacgtgcaggcgcagctgacgctgtcctacagccggcgcggagacctgg

SEQ ID NO: 207339 - DNA, 120 bp, Artificial Sequence
  ENSG00000115257_13 (sequence is synthesized)
agatctcgctcaccagccccatgggcacgcgctccacactcgtggccatacgacccttggacgtcagcactgaaggctacaacaactgggtcttcatgtccacccacttctgggatgaga

SEQ ID NO: 207340 - DNA, 120 bp, Artificial Sequence
  ENSG00000115257_14 (sequence is synthesized)
acccacagggcgtgtggaccctgggcctagagaacaagggctactatttcaacacggggacgttgtaccgctacacgctgctgctctatgggacggccgaggacatgacagcgcggccta

SEQ ID NO: 207341 - DNA, 120 bp, Artificial Sequence
  ENSG00000115257_15 (sequence is synthesized)
caggcccccaggtgaccagcagcgcgtgtgtgcagcgggacacagaggggctgtgccaggcgtgtgacggccccgcctacatcctgggacagctctgcctggcctactgccccccgcggt

SEQ ID NO: 207342 - DNA, 120 bp, Artificial Sequence
  ENSG00000115257_16 (sequence is synthesized)
tcttcaaccacacaaggctggtgaccgctgggcctgggcacacggcggcgcccgcgctgagggtctgctccagctgccatgcctcctgctacacctgccgcggcggctccccgagggact

SEQ ID NO: 207343 - DNA, 120 bp, Artificial Sequence
  ENSG00000115257_17 (sequence is synthesized)
gcacctcctgtcccccatcctccacgctggaccagcagcagggctcctgcatgggacccaccacccccgacagccgcccccggcttagagctgccgcctgtccccaccaccgctgcccag

SEQ ID NO: 207344 - DNA, 120 bp, Artificial Sequence
  ENSG00000115257_18 (sequence is synthesized)
cctcggccatggtgctgagcctcctggccgtgaccctcggaggccccgtcctctgcggcatgtccatggacctcccactatacgcctggctctcccgtgccagggccacccccaccaaac

SEQ ID NO: 207345 - DNA, 120 bp, Artificial Sequence
  ENSG00000115257_19 (sequence is synthesized)
cccaggtctggctgccagctggaacctgaagttgtcagctcagaaagcgaccttgcccccgcctgggtccctgacaggcactgctgccatgctgcctccccaggctggccccagaggagc

SEQ ID NO: 207346 - DNA, 120 bp, Artificial Sequence
  ENSG00000115257_20 (sequence is synthesized)
gagcaccagcacccgacgcctggcctgccagggatgggccccgtggaaccccgaagcctggcgggagagagagagagagaagtctcctctgcattttgggtttgggcgggagtgggctgg

SEQ ID NO: 207347 - DNA, 120 bp, Artificial Sequence
  ENSG00000115257_21 (sequence is synthesized)
ggggagaggctggagcaccccaaaagccaggggaaagtggagggagagaaacgtgacactgtccgcctcgggcaccgcgtccaacctcagagtttgcaaataaaggttgcttagaaggtg

SEQ ID NO: 207348 - DNA, 120 bp, Artificial Sequence
  ENSG00000115257_22 (sequence is synthesized)
gctgggggtgtgggggacaggcctgaggcctcagtttacccatctgtaaaacgagggctggaccccgtgacctctgagccccgacctcgcctgctggccgcccacccaccccccagcagg

SEQ ID NO: 207349 - DNA, 120 bp, Artificial Sequence
  ENSG00000115257_23 (sequence is synthesized)
agtaggtgtgcagtcacccgggagatgtcggtgtccagtgacaggcgcacagtaggtgtgcaattccctgagagatgtgaaccagtccagggccccgcgtgggagctgaaggggagggag

SEQ ID NO: 207350 - DNA, 120 bp, Artificial Sequence
  ENSG00000115257_24 (sequence is synthesized)
cccggggactaccaggaccaggctgccgagagcctccttttcctcctgtgcccacccgcgacccctgtccagggacgttgtaccgctacacgctgctgctctatgggacggccgaggaca

SEQ ID NO: 207351 - DNA, 120 bp, Artificial Sequence
  ENSG00000115257_25 (sequence is synthesized)
taaatatcaagagtcccagcccacccctgcctcagccaagctcagcttctgggactcccagagagcacctgctggggaaggacaaagaagggggctgttaccggccctcgggggcttcag

SEQ ID NO: 207352 - DNA, 120 bp, Artificial Sequence
  ENSG00000115257_26 (sequence is synthesized)
ctacgtgagaccgcgggtggctgtgggcgagggctgccccaggtgccgaggctggcaccaccctagggacgcctcccggccccctcatatccccacctgcccccaggaccccctggccag

SEQ ID NO: 207353 - DNA, 120 bp, Artificial Sequence
  ENSG00000115257_27 (sequence is synthesized)
gtgtgaccaaggtgagtggcagcccgaggagggcaggggtggcaggccaggccgacgccccctccccgcccctcctggtttcccagggccgcggcgggctgggcacgctcttcatctggg

SEQ ID NO: 207354 - DNA, 120 bp, Artificial Sequence
  ENSG00000115257_28 (sequence is synthesized)
gcgttgctatggcgccgggggcggatcttccctgacgggcagtactttcacctgcggcaccggggcgtggtccagcagtccctgaccccgcactggggccaccgcctgcacctgaagaaa

SEQ ID NO: 207355 - DNA, 120 bp, Artificial Sequence
  ENSG00000115257_29 (sequence is synthesized)
attacgcaaaagaatgattctgattaggccggacaggaggccgggctgattctcgaaggaggggtgtgttggaaagtgggagaggtcaaacaaagggtaggacgcgttatcgcaacagtg

SEQ ID NO: 207356 - DNA, 120 bp, Artificial Sequence
  ENSG00000115263_0 (sequence is synthesized)
gcatagaatgcagatgagcaaagtgagtgggagagggaagtcatttgtaacaaaaactcattatttacagatgagaaatttatattgtcagcgtaatatctgtgaggctaaacagagctg

SEQ ID NO: 207357 - DNA, 120 bp, Artificial Sequence
  ENSG00000115263_1 (sequence is synthesized)
gagagtatataaaagcagtgcgccttggtgcagaagtacagagcttaggacacagagcacatcaaaagttcccaaagagggcttgctctctcttcacctgctctgttctacagcacacta

SEQ ID NO: 207358 - DNA, 120 bp, Artificial Sequence
  ENSG00000115263_2 (sequence is synthesized)
ccagaagacagcagaaatgaaaagcatttactttgtggctggattatttgtaatgctggtacaaggcagctggcaacgttcccttcaagacacagaggagaaatccagatcattctcagc

SEQ ID NO: 207359 - DNA, 120 bp, Artificial Sequence
  ENSG00000115263_3 (sequence is synthesized)
tacagcaagtatctggactccaggcgtgcccaagattttgtgcagtggttgatgaataccaagaggaacaggaataacattgccaaacgtcacgatgaatttgagagacatgctgaaggg

SEQ ID NO: 207360 - DNA, 120 bp, Artificial Sequence
  ENSG00000115263_4 (sequence is synthesized)
acctttaccagtgatgtaagttcttatttggaaggccaagctgccaaggaattcattgcttggctggtgaaaggccgaggaaggcgagatttcccagaagaggtcgccattgttgaagaa

SEQ ID NO: 207361 - DNA, 120 bp, Artificial Sequence
  ENSG00000115263_5 (sequence is synthesized)
cttggccgcagacatgctgatggttctttctctgatgagatgaacaccattcttgataatcttgccgccagggactttataaactggttgattcagaccaaaatcactgacaggaaataa

SEQ ID NO: 207362 - DNA, 120 bp, Artificial Sequence
  ENSG00000115263_6 (sequence is synthesized)
atatcactattcaagatcatcttcacaacatcacctgctagccacgtgggatgtttgaaatgttaagtcctgtaaatttaagaggtgtattctgaggccacattgctttgcatgccaata

SEQ ID NO: 207363 - DNA, 120 bp, Artificial Sequence
  ENSG00000115263_7 (sequence is synthesized)
aataaattttcttttagtgttgtgtagccaaaaattacaaatggaataaagttttatcaaaatattgctaaaatatcagctttaaaatatgaaagtgctagattctgttattttcttctt

SEQ ID NO: 207364 - DNA, 120 bp, Artificial Sequence
  ENSG00000115263_8 (sequence is synthesized)
attttggatgaagtaccccaacctgtttacatttagcgataaaattatttttctatgatataatttgtaaatgtaaattattccgatctgacatatctgcattataataataggagaata

SEQ ID NO: 207365 - DNA, 120 bp, Artificial Sequence
  ENSG00000115263_9 (sequence is synthesized)
gaagaactggtagccacagtggtgaaattggaaagagaactttcttcctgaaacctttgtcttaaaaatactcagctttcaatgtatcaaagatacaattaaataaaattttcaagcttc

SEQ ID NO: 207366 - DNA, 120 bp, Artificial Sequence
  ENSG00000115263_10 (sequence is synthesized)
ttatctatatatggatctggattacagaagcaattagtagtcttgcaaagtaaggaaataattcctattgatgaaaaacagtatataaaagttaaacccattttgtttttggtactaagt

SEQ ID NO: 207367 - DNA, 120 bp, Artificial Sequence
  ENSG00000115263_11 (sequence is synthesized)
attaataatagagccaaacaggttacatttgtatccccttatagttgcattataattaggtattaaatctttggccaaaccaggccacctctgagagtaaataggatgtttttaataact

SEQ ID NO: 207368 - DNA, 120 bp, Artificial Sequence
  ENSG00000115263_12 (sequence is synthesized)
gagctagagataaggaaaaagaagaaacagtgctgaaaacttcaaatatgtaaagaaaacatataatatttaaagcttaactttaaacatttacatatgtgatcaacatatatttatata

SEQ ID NO: 207369 - DNA, 120 bp, Artificial Sequence
  ENSG00000115263_13 (sequence is synthesized)
gaagactgaaagtgaccaaacctaagatgttgataaaatgatattcaaagtacaaataggtaaaaacatccatatatttaactacatatccaattttgtatggggctgtcatatagatat

SEQ ID NO: 207370 - DNA, 120 bp, Artificial Sequence
  ENSG00000115263_14 (sequence is synthesized)
ctactaaataatctaagttgaaaaacaaccaagaccatcaattacttgcttagatcttaacacagccaaacagacccctgaaccatctcattttcttccgattttttttggagagatgaa

SEQ ID NO: 207371 - DNA, 120 bp, Artificial Sequence
  ENSG00000115263_15 (sequence is synthesized)
atatgagagacggagaatttatgttcaactctgatttttaaattagatttaaaacaagcttactgaaatttaaagagatctcaagatgaaagagaactagaataatggttggtttttaaa

SEQ ID NO: 207372 - DNA, 120 bp, Artificial Sequence
  ENSG00000115263_16 (sequence is synthesized)
ctagaagattgaaaagggcatgaaattatgcaggcttggtattagatcccagctctgctactttctctttccagtagtcactggtccacatgggtttttatcaggtatttcacagtacac

SEQ ID NO: 207373 - DNA, 120 bp, Artificial Sequence
  ENSG00000115263_17 (sequence is synthesized)
cctttaaaaacagaatcctttactgtttcctcaagacacttgtgcatgttaccagtggtagacaatctgtgatcatttattgaaaatatctaatcaaacgctaattttaacacttatttt

SEQ ID NO: 207374 - DNA, 80 bp, Artificial Sequence
  ENSG00000115266_0 (sequence is synthesized)
gagaccccggagcccgcgcgctccgaggccaccccgggccgggatttccggtggggcccgcggagccgcgcagagggagg

SEQ ID NO: 207375 - DNA, 120 bp, Artificial Sequence
  ENSG00000115266_1 (sequence is synthesized)
cccgcggagccgcgcagagggaggaggccccagacccaggcgccccgccagcccagctgcacgtaagcggacgctgcaggagctgaagatggcgagctccgtggcgccctacgagcagct

SEQ ID NO: 207376 - DNA, 120 bp, Artificial Sequence
  ENSG00000115266_2 (sequence is synthesized)
ggtgaggcaggtggaggccttgaaggctgagaacagccacctgaggcaggagctaagggacaactccagccacctgtccaagctggagacagagacgtcgggcatgaaggaggtcctgaa

SEQ ID NO: 207377 - DNA, 120 bp, Artificial Sequence
  ENSG00000115266_3 (sequence is synthesized)
gcacctacagggaaaactggagcaggaggcccgagtgctggtgtcctcggggcagacggaggtgctggagcagctgaaggccctacagatggacatcaccagcctgtacaacctcaagtt

SEQ ID NO: 207378 - DNA, 120 bp, Artificial Sequence
  ENSG00000115266_4 (sequence is synthesized)
ccagccgcccaccctgggcccggagcctgccgcccggacccccgagggcagcccagtacacggctccgggccctccaaggacagctttggggagctgagccgggccaccatccggctgct

SEQ ID NO: 207379 - DNA, 120 bp, Artificial Sequence
  ENSG00000115266_5 (sequence is synthesized)
ggaggaactggaccgggaacggtgtttcctgctgaatgagattgagaaggaggagaaggagaagctctggtactactctcagctgcagggcctgtccaagcgcctggacgagctgccgca

SEQ ID NO: 207380 - DNA, 120 bp, Artificial Sequence
  ENSG00000115266_6 (sequence is synthesized)
cgtggagacgcagttctcgatgcagatggacctgatccggcagcagcttgagttcgaggcccagcacatccgctcgctgatggaggagcgcttcggcacctcggacgagatggtgcagcg

SEQ ID NO: 207381 - DNA, 120 bp, Artificial Sequence
  ENSG00000115266_7 (sequence is synthesized)
ggcacagatccgcgcctcgcgcctggagcagattgacaaggagctgctggaggcgcaggaccgagtgcagcagacggagccccaggccttgctggcggtgaagtcggtgccggtggacga

SEQ ID NO: 207382 - DNA, 120 bp, Artificial Sequence
  ENSG00000115266_8 (sequence is synthesized)
ggaccccgagacagaggtccccacacaccctgaggatggcacccctcagccgggcaacagcaaggtggaggtggtcttctggctgttgtccatgttggcgacgcgcgaccaggaggatac

SEQ ID NO: 207383 - DNA, 120 bp, Artificial Sequence
  ENSG00000115266_9 (sequence is synthesized)
agcgcgcacgctgctggccatgtccagctcgcccgagagctgcgtggccatgcgccgctcgggctgtctgcctctgctgctgcaaatcctccacggcaccgaggccgcggccgggggtcg

SEQ ID NO: 207384 - DNA, 120 bp, Artificial Sequence
  ENSG00000115266_10 (sequence is synthesized)
cgccggggccccaggggcaccgggcgccaaggacgcacgcatgcgcgccaacgcggcgctgcacaacatcgtcttctcgcagccggaccagggcctggcgcgcaaggagatgcgcgtcct

SEQ ID NO: 207385 - DNA, 120 bp, Artificial Sequence
  ENSG00000115266_11 (sequence is synthesized)
gcacgtgctggagcagatccgggcctactgcgagacctgctgggactggctgcaggcccgagacggcgggcccgagggaggtggcgccggcagcgccccgatccccatcgagccgcagat

SEQ ID NO: 207386 - DNA, 120 bp, Artificial Sequence
  ENSG00000115266_12 (sequence is synthesized)
ctgccaggccacctgtgctgttatgaagctgtcctttgatgaggagtaccgccgtgccatgaacgagctaggtgggctgcaggccgtggcagagctgctgcaggttgactatgagatgca

SEQ ID NO: 207387 - DNA, 120 bp, Artificial Sequence
  ENSG00000115266_13 (sequence is synthesized)
caagatgacccgggacccgctgaacctggcgctgcgccgctacgcgggcatgaccctcaccaacctcacctttggggacgttgccaacaaggccaccctgtgtgcgcgccgcggctgcat

SEQ ID NO: 207388 - DNA, 120 bp, Artificial Sequence
  ENSG00000115266_14 (sequence is synthesized)
ggaggccatcgtggcccagctggcctccgacagtgaggagctccaccaggtggtgtccagcatccttcggaacttgtcctggagggccgacatcaacagcaagaaggtgctgagggaggc

SEQ ID NO: 207389 - DNA, 120 bp, Artificial Sequence
  ENSG00000115266_15 (sequence is synthesized)
gggcagcgtgactgccctggtgcagtgtgtcctgcgggccaccaaggagtccaccctgaagagcgtgctgagcgccctgtggaatctgtctgcacacagcacagagaacaaggcggccat

SEQ ID NO: 207390 - DNA, 120 bp, Artificial Sequence
  ENSG00000115266_16 (sequence is synthesized)
ctgccaggtggatggcgccctgggcttcctggtgagcaccctgacctacaagtgtcagagcaactcgctggccatcatcgagagcggcggcggcatcctccgcaatgtgtccagcctcgt

SEQ ID NO: 207391 - DNA, 120 bp, Artificial Sequence
  ENSG00000115266_17 (sequence is synthesized)
cgccacccgtgaggactacaggcaggtgctccgggatcacaactgtctgcagacgctgctgcagcatctgacttcgcacagcctgaccatcgtgagcaacgcgtgcggcacgctctggaa

SEQ ID NO: 207392 - DNA, 120 bp, Artificial Sequence
  ENSG00000115266_18 (sequence is synthesized)
cctgtcggcccgcagcgcccgtgaccaggagctgctgtgggacctgggcgccgtgggcatgctgcgtaatctggtgcactccaagcacaagatgatcgccatgggcagcgccgccgccct

SEQ ID NO: 207393 - DNA, 120 bp, Artificial Sequence
  ENSG00000115266_19 (sequence is synthesized)
gcgcaacctgctggcccatcggcccgccaagcaccaggcggccgccaccgccgtgtccccaggcagctgcgtgcccagcctgtacgtgcgcaagcagcgggcgctggaggccgagctgga

SEQ ID NO: 207394 - DNA, 120 bp, Artificial Sequence
  ENSG00000115266_20 (sequence is synthesized)
cgcacggcacctcgcgcaggcgctggagcacctggagaagcagggcccgccggcagccgaggccgccactaagaagccgctgccgcccctgcgacacctggacggcctggcccaagacta

SEQ ID NO: 207395 - DNA, 120 bp, Artificial Sequence
  ENSG00000115266_21 (sequence is synthesized)
tgcttccgattcgggctgctttgacgacgacgatgcaccgtcatccctggctgcggccgcggccaccggggagccagccagccctgccgcgctgtccctcttcctgggcagccccttcct

SEQ ID NO: 207396 - DNA, 120 bp, Artificial Sequence
  ENSG00000115266_22 (sequence is synthesized)
gcaggggcaggcgctggctcgcaccccgcccacccgccgaggcggcaaggaggcagagaaggacaccagtggggaggcagccgtggcggccaaggccaaggccaagctggcgcttgcagt

SEQ ID NO: 207397 - DNA, 120 bp, Artificial Sequence
  ENSG00000115266_23 (sequence is synthesized)
ggcgcgcatcgaccagctggtggaggacatctccgccctgcacacctcgtccgacgatagcttcagcctcagctctggagacccgggacaggaggcgccacgggagggccgcgcccagtc

SEQ ID NO: 207398 - DNA, 120 bp, Artificial Sequence
  ENSG00000115266_24 (sequence is synthesized)
ctgctcgccatgccgcggcccggagggcgggcggcgagaggcaggaagccgggcgcacccgctgctgcggctcaaggcggcccacgccagcctctccaacgacagcctcaacagcggcag

SEQ ID NO: 207399 - DNA, 120 bp, Artificial Sequence
  ENSG00000115266_25 (sequence is synthesized)
tgccagcgacgggtactgcccacgcgaacatatgctgccctgcccgctggccgcactggcttcgcgccgcgaggaccccaggtgtgggcagcctcggcccagccggcttgaccttgacct

SEQ ID NO: 207400 - DNA, 120 bp, Artificial Sequence
  ENSG00000115266_26 (sequence is synthesized)
gcccggctgccaggccgagcccccggcccgcgaggccacctccgccgacgcccgcgtgcgcaccatcaagctgtcgcctacctatcagcacgtgccactgcttgagggtgcctcaagggc

SEQ ID NO: 207401 - DNA, 120 bp, Artificial Sequence
  ENSG00000115266_27 (sequence is synthesized)
gggtgcagagcccctcgcggggcctggaatctctccaggggcccggaagcaggcctggctgccggcagaccacctgagcaaggttcccgagaagctggcggctgccccgctgtctgtggc

SEQ ID NO: 207402 - DNA, 120 bp, Artificial Sequence
  ENSG00000115266_28 (sequence is synthesized)
cagcaaggcactgcagaaactggcggcgcaagaggggccactctcgctgtcccgatgcagctccctttcctcgctgtcctcggccggccgcccaggccccagcgagggtggtgacctgga

SEQ ID NO: 207403 - DNA, 120 bp, Artificial Sequence
  ENSG00000115266_29 (sequence is synthesized)
tgacagtgactcctccctggaggggctggaggaggccggccccagcgaggctgagctggacagcacgtggcgggcgcccggggccacctcgctgcccgtagccattccggctccccggcg

SEQ ID NO: 207404 - DNA, 120 bp, Artificial Sequence
  ENSG00000115266_30 (sequence is synthesized)
taaccgaggccggggcctgggggtggaagacgccacgccgtccagctcgtcggagaactacgtgcaggagacaccgcttgtgctgagccgctgcagctctgtgagctcgctgggcagctt

SEQ ID NO: 207405 - DNA, 120 bp, Artificial Sequence
  ENSG00000115266_31 (sequence is synthesized)
cgagagcccgtccatcgccagctccatccccagtgaaccttgcagcgggcagggcagcggcaccatcagccctagcgagctgcccgacagccccggacagaccatgcctcccagccggag

SEQ ID NO: 207406 - DNA, 120 bp, Artificial Sequence
  ENSG00000115266_32 (sequence is synthesized)
caagacgccaccgctggcgcccgcgccacagggtccccccgaggccacccagttcagcctgcagtgggagagctacgtgaagcgcttcctggacatcgccgactgccgggagcgctgccg

SEQ ID NO: 207407 - DNA, 120 bp, Artificial Sequence
  ENSG00000115266_33 (sequence is synthesized)
gctgccatctgagctggacgcaggcagcgtgcgctttaccgtggagaagccagacgagaacttctcgtgcgcctccagcctcagcgcgctggccttgcacgagcactacgtgcagcagga

SEQ ID NO: 207408 - DNA, 120 bp, Artificial Sequence
  ENSG00000115266_34 (sequence is synthesized)
cgcgctggccttgcacgagcactacgtgcagcaggacgtggagctgcggctgctgccctcggcctgccccgagcgcggcgggggcgccgggggcgccggcctccactttgcagggcaccg

SEQ ID NO: 207409 - DNA, 120 bp, Artificial Sequence
  ENSG00000115266_35 (sequence is synthesized)
ctcgccctcgcggcgccgcggaccaggagctggaactgctgcgggagtgcctgggagccgccgtgcctgcccggctgcgcaaggtggcctccgcgctggtgccaggtcgccgcgcactcc

SEQ ID NO: 207410 - DNA, 120 bp, Artificial Sequence
  ENSG00000115266_36 (sequence is synthesized)
gcccgtctacatgttggtgcccgccccggccccggcccaggaggacgactcctgcactgactccgcggagggcacgccggtcaacttctctagcgccgcctcgctcagcgacgagacgct

SEQ ID NO: 207411 - DNA, 120 bp, Artificial Sequence
  ENSG00000115266_37 (sequence is synthesized)
gagacgctgcagggaccccccagggaccagcccgggggaccagcgggcaggcaaagacccaccggccgccccacctctgccagacaggccatggggcaccggcacaaggcgggaggcgcc

SEQ ID NO: 207412 - DNA, 120 bp, Artificial Sequence
  ENSG00000115266_38 (sequence is synthesized)
cgcggagcagtctcggggcgcgggcaagaacagagcagggctggagctgcccctgggccggcccccgagcgcccccgcagacaaggacggctcaaagcccggccggacccgcggggacgg

SEQ ID NO: 207413 - DNA, 120 bp, Artificial Sequence
  ENSG00000115266_39 (sequence is synthesized)
ggcgctccagtcgctgtgcctcacgacgcccactgaggaggccgtgtactgcttctacggcaacgactcggacgaggagcccccggcggccgcgcccacgccaacccaccggcgcacatc

SEQ ID NO: 207414 - DNA, 120 bp, Artificial Sequence
  ENSG00000115266_40 (sequence is synthesized)
ggccatccctcgcgcttttacgcgggagcgtccgcagggccggaaggaggcccctgccccgtccaaggctgcaccagctgccccgccgcccgcccggacccagcccagcctcattgctga

SEQ ID NO: 207415 - DNA, 120 bp, Artificial Sequence
  ENSG00000115266_41 (sequence is synthesized)
cgagaccccgccctgctactccctgagctcctccgccagctccctcagcgagcccgagccctcggagccgccggccgtccatccacgaggccgggagcccgcggtcaccaaggacccggg

SEQ ID NO: 207416 - DNA, 120 bp, Artificial Sequence
  ENSG00000115266_42 (sequence is synthesized)
ccgtgtctggcctgcggcgccgcaagccccgagccacccggctggatgagcggcccgcagaggggtcccgggaacgcggcgaggaggcagcgggctcggaccgggcctccgacctggata

SEQ ID NO: 207417 - DNA, 120 bp, Artificial Sequence
  ENSG00000115266_43 (sequence is synthesized)
cggaccgggcctccgacctggatagcgtggagtggcgcgccatccaggagggcgccaattcaattgtcacgtggctgcaccaggcagcagctgccacgcgggaggcctcgtccgagtccg

SEQ ID NO: 207418 - DNA, 120 bp, Artificial Sequence
  ENSG00000115266_44 (sequence is synthesized)
actccatcctgtccttcgtatccgggctgtcagtgggatccaccctacagccccccaagcacaggaagggacgacaggcggagggagaaatgggcagtgcccggcggccagagaaaaggg

SEQ ID NO: 207419 - DNA, 120 bp, Artificial Sequence
  ENSG00000115266_45 (sequence is synthesized)
gcgcagcctcagtcaagaccagcgggagcccccgttcccctgcaggccccgagaagccacgtggcacacagaagaccacgcccggggtgccagctgtgctccggggacgaacagtgatct

SEQ ID NO: 207420 - DNA, 120 bp, Artificial Sequence
  ENSG00000115266_46 (sequence is synthesized)
atctacgtccccagcccggcaccccgtgcccagcccaaagggacccccggcccccgcgccacaccgcggaaggtggcgcccccttgcctggcacagcccgcggctccagccaaagtcccg

SEQ ID NO: 207421 - DNA, 120 bp, Artificial Sequence
  ENSG00000115266_47 (sequence is synthesized)
ccgggcagcagcggtcgcggagcctacaccggcctgccaagacctcggagctggcgacgctgagccagccccccagaagcgccacaccgcccgcccgcctcgccaagaccccctcctcca

SEQ ID NO: 207422 - DNA, 120 bp, Artificial Sequence
  ENSG00000115266_48 (sequence is synthesized)
ctcctccagctcctcccagacctcgcccgcctcccagcccctgcccagaaagcgccccccggtcacccaggctgctggggccctgcccggccccggagcctccccggtgcccaaaacgcc

SEQ ID NO: 207423 - DNA, 120 bp, Artificial Sequence
  ENSG00000115266_49 (sequence is synthesized)
cccttctggcgaagcagcacaagacgcagagatcgcccgtgcggatcccgttcatgcagaggccggcccggcgtgggccgccaccgctggctcgggcagtcccggagccgggccccaggg

SEQ ID NO: 207424 - DNA, 120 bp, Artificial Sequence
  ENSG00000115266_50 (sequence is synthesized)
gggaccgaggcgggcccgggggcgcgcgggggccgcctgggcctggtgcgtgtggcctcagccctctccagcggcagcgagtcctccgaccgctcgggcttccggcgacagctaaccttc

SEQ ID NO: 207425 - DNA, 120 bp, Artificial Sequence
  ENSG00000115266_51 (sequence is synthesized)
cagctaaccttcatcaaggagtcgccgggcttgcggcgccgccgctccgagctgtcctcggccgagtccgcggcctctgccccccagggcgcctcgccccgccgcggccggcccgcgctg

SEQ ID NO: 207426 - DNA, 80 bp, Artificial Sequence
  ENSG00000115266_52 (sequence is synthesized)
ccgtcttcctctgctcctcgcgctgcgaagagctccgagcggcaccccggcagggcccggccccggcccggcagcggccc

SEQ ID NO: 207427 - DNA, 120 bp, Artificial Sequence
  ENSG00000115266_53 (sequence is synthesized)
gcaccacctccgagagcccgtcccgcctgcctgtgcgcgcgcccgccgcccggccggagactgtcaagcgctacgcgtcgctgccgcacatcagcgtggcccgcaggcccgacggcgccg

SEQ ID NO: 207428 - DNA, 120 bp, Artificial Sequence
  ENSG00000115266_54 (sequence is synthesized)
ctcagccgacgccgcgcgccgcagcagcgacggggagccccggccgctccccagggtggccgcgccgggcacgacctggcggcgcatccgagatgaggacgtgccccacatcctgcgcag

SEQ ID NO: 207429 - DNA, 120 bp, Artificial Sequence
  ENSG00000115266_55 (sequence is synthesized)
cgagatgaggacgtgccccacatcctgcgcagcacgcttcccgccacggccctgccactgcggggctccacgcccgaggacgccccggccgggcccccgccgcgcaagaccagcgacgcc

SEQ ID NO: 207430 - DNA, 120 bp, Artificial Sequence
  ENSG00000115266_56 (sequence is synthesized)
aggtcgccgcccccaagaccaactccagcacgtccccgagcctggagaccagggagccccccggggcccccgccggcggccagctctccctcctcggcagcgacgtggacggtcccagcc

SEQ ID NO: 207431 - DNA, 120 bp, Artificial Sequence
  ENSG00000115266_57 (sequence is synthesized)
tcgccaaggctcccatctccgcacccttcgtgcacgagggcctgggggtcgccgtggggggcttccccgccagccggcacggctcccccagccgctcggcccgagtaccccccttcaact

SEQ ID NO: 207432 - DNA, 120 bp, Artificial Sequence
  ENSG00000115266_58 (sequence is synthesized)
atgtgcccagccccatggtggtcgcagccaccaccgactcggccgcggagaaagccccggccactgcctccgccaccctcctggaatagtggcctaggccggccttctggaacgttctct

SEQ ID NO: 207433 - DNA, 120 bp, Artificial Sequence
  ENSG00000115266_59 (sequence is synthesized)
cccggccctgcggcgcggtctggctgccccatgggcctgcgctgtagacgtcccccataggtcgccccagggcctctgcccacccgagccccaccactctcagaacccccgcccagcgca

SEQ ID NO: 207434 - DNA, 120 bp, Artificial Sequence
  ENSG00000115266_60 (sequence is synthesized)
cggcgacctcgcgcctcaccggaagaccttgcctctgtgccgcggaggtccaggaggaaacggggcggccgctaggcctcaagtcccgaccgtggagcgctggcaagggcgtcctggccc

SEQ ID NO: 207435 - DNA, 120 bp, Artificial Sequence
  ENSG00000115266_61 (sequence is synthesized)
agccctgagcgcgcggcccttcccctgtcggaagccgttgcttgaccccgggcgagggaggcggtagcctccgggtccgggtctgggtctgggtccgctgcttcgcagggacagcgctgg

SEQ ID NO: 207436 - DNA, 120 bp, Artificial Sequence
  ENSG00000115266_62 (sequence is synthesized)
gcccgccgcaggtggggcgaggctgggggagggcggcgccgcggcgggcctgccagctgggggcctttgcggcgcgcaggggcgaagcctgtaatcactgcagccgccggtaattcgcta

SEQ ID NO: 207437 - DNA, 120 bp, Artificial Sequence
  ENSG00000115266_63 (sequence is synthesized)
ggtaattcgctaatgagggctttgcagggattgttttcattctcagccccagctgtgggagtgcgggtgggggtgtggccgagccccggcaggaagccccgcccagacggtgttcaggga

SEQ ID NO: 207438 - DNA, 120 bp, Artificial Sequence
  ENSG00000115266_64 (sequence is synthesized)
acccggagcccaagcgctccggcggagcccaaaagggtgggggtgggaggggcagaggccaacggatccccctgcctgtcgcaccccttggcgggagacgggaaggcagcgggctgcgta

SEQ ID NO: 207439 - DNA, 120 bp, Artificial Sequence
  ENSG00000115266_65 (sequence is synthesized)
cgatgggaccctggtgcagacgccgggccggctgacatttggaccccatcccagaggagatgctggctaccagctggggcgaccccaagggtcgctggagtcagtatcggcccggcgcag

SEQ ID NO: 207440 - DNA, 120 bp, Artificial Sequence
  ENSG00000115266_66 (sequence is synthesized)
ccgcggcgggcgaggccaatggaaaggagactgaggggagtcccggcagtgagcccgaggccctgggacctggagcccgcgctggcctctccccagcggagcctgcacgttacggagacc

SEQ ID NO: 207441 - DNA, 120 bp, Artificial Sequence
  ENSG00000115266_67 (sequence is synthesized)
atcacatgtgggcgtggtcagtgcccaggaccgcaccgctgctcatcttgtcccttttcaattcccttctggttcatgatgcataaagcgctaggccctagaactccagaaacagcacag

SEQ ID NO: 207442 - DNA, 120 bp, Artificial Sequence
  ENSG00000115266_68 (sequence is synthesized)
ctggggcggggacccagccttgccctccacccgaggctctgggacaaggcgggaggttcgggggccttccggcaggtgaacgcagggctggagagtatttggtgccagatgaggtgaaag

SEQ ID NO: 207443 - DNA, 120 bp, Artificial Sequence
  ENSG00000115266_69 (sequence is synthesized)
cttatagaagggcctgaggggctcggctgcctcatcccctggcgggggaggctgggagctgggcctcctgcgtggggtgggactcgcaggggccgggtctccgtgactggggcaacgcct

SEQ ID NO: 207444 - DNA, 120 bp, Artificial Sequence
  ENSG00000115266_70 (sequence is synthesized)
cgtcctgcagagggagccgacgacctcttttctgcagaaaagctccagcaggcgctgccttcacccacggatctgcccaggctgaaggcacacgctcaatgccccacgtgccttctccag

SEQ ID NO: 207445 - DNA, 120 bp, Artificial Sequence
  ENSG00000115266_71 (sequence is synthesized)
gaggaacgaagcagggtttgagggttgggtggatggagctcagaaggaaaccccagccccaccacggatgacaccatccctcccgtcccatccccagcatgggcaaggccagcctttctg

SEQ ID NO: 207446 - DNA, 120 bp, Artificial Sequence
  ENSG00000115266_72 (sequence is synthesized)
gcagaaggagctgtcctcaactcagggccgctgtgagcaaagctgaccccagcccccacccccagttaacactgctgcttctctgaatgcatgtcacgctgcaccccatgctccgggccc

SEQ ID NO: 207447 - DNA, 120 bp, Artificial Sequence
  ENSG00000115266_73 (sequence is synthesized)
acaccctgcaggacaaggagctccagacaggacgtccataagtcaccgaggtgtgccacccagcaggtgctggaggtgcccaatgctccctcctaggacctcgcagccaggcaaggctgt

SEQ ID NO: 207448 - DNA, 120 bp, Artificial Sequence
  ENSG00000115266_74 (sequence is synthesized)
caggttgttttgggggaagagggggtcatggatggctgagcagagagcggggaaaatgcaggctgagtggggcgacctcctgcctgccaggagccccctttcaggacacagcgggggtct

SEQ ID NO: 207449 - DNA, 120 bp, Artificial Sequence
  ENSG00000115266_75 (sequence is synthesized)
cacacttgctgtccccatccatggcccgagggggaacctggtggtctcttctgagcttttggacttggggatgccaaacacgtgctcaccctcacactcgccccggcccgctgcgcccct

SEQ ID NO: 207450 - DNA, 120 bp, Artificial Sequence
  ENSG00000115266_76 (sequence is synthesized)
aattgccaaagggtagggaaatggcgaagccagccaccaggtcgctggtgacagggccagggttatgcaggaaggtggtgcggcattgccttccacatatgtaagtctctgggcggcgcc

SEQ ID NO: 207451 - DNA, 120 bp, Artificial Sequence
  ENSG00000115266_77 (sequence is synthesized)
ctcccagctccctgcctctgtttccccatgtgggccgtggggaactcccagagctacctcttgggggagcgtggtggcagcgatgatggggagacgcctggaagctcacagaacttgggt

SEQ ID NO: 207452 - DNA, 120 bp, Artificial Sequence
  ENSG00000115266_78 (sequence is synthesized)
ctggctggctcctgcccgtgacgccttgcccagcagcaaggtgcgcaacatggctgccagccccgcctcccacccccaccccgagtcctgagctcactttcgccttctccatcccctgcc

SEQ ID NO: 207453 - DNA, 120 bp, Artificial Sequence
  ENSG00000115266_79 (sequence is synthesized)
gtgggggccacagccacacctcaccgcccagtccagctgtctccagaaggggacaggcagtccgcggtctctggacaatcaactcaaggtacgcccactgcaaggcctccctcccaccgc

SEQ ID NO: 207454 - DNA, 120 bp, Artificial Sequence
  ENSG00000115266_80 (sequence is synthesized)
ggcccctgcctggccacctggcctctctgcaccagggtgacaaggggtcctcgtctgccccccaatgctccagggccagtcctaaggagctgagggtctgaggacgcagggagggtggag

SEQ ID NO: 207455 - DNA, 120 bp, Artificial Sequence
  ENSG00000115266_81 (sequence is synthesized)
gtgtcctgaggctgatggacagtgaccgccactggcccccaacatgaccacacgtgggtgctgaactcggggcgccgtgcccaccggcatggtcctcccgagctccgacagcattacctc

SEQ ID NO: 207456 - DNA, 120 bp, Artificial Sequence
  ENSG00000115266_82 (sequence is synthesized)
acccggccccatctgttgccccggtccagccctgatggcgcgcgcctggtctgtctgattcccctagccgccaccccacgtttctgtaccgggtctctgcagtgttaaacggacgtgtaa

SEQ ID NO: 207457 - DNA, 120 bp, Artificial Sequence
  ENSG00000115266_83 (sequence is synthesized)
atagtggtaaatagtgaaagcctgtccttccctaaatgtaaagccatctgtccggcgtaaggacgacaccgtcagctgtccgactcgcacacatttaataaactgagctcttgcattgcc

SEQ ID NO: 207458 - DNA, 120 bp, Artificial Sequence
  ENSG00000115266_84 (sequence is synthesized)
gggtttggggagcaggaggcagacatgtgttgctttgcacgtcatctggtccttccacctggctgggcatgggatggtgacctcagctggaacatggggctcgagccagaccccagggtc

SEQ ID NO: 207459 - DNA, 120 bp, Artificial Sequence
  ENSG00000115266_85 (sequence is synthesized)
tccctgcgtgtagcccccaaccccaagcctgatccccactggagacctgaacagccttggacatcatcggatcagggtgggaggtgccagcctctgccacctgacttccagtccctgtgc

SEQ ID NO: 207460 - DNA, 120 bp, Artificial Sequence
  ENSG00000115266_86 (sequence is synthesized)
ccctcccaccctgcccttgggcactcctgccctgcaggttcctcagaggggcaacccaaagccagagaggggcgggtcttgtcgggcctccagcctggacttcccagcccctctggggca

SEQ ID NO: 207461 - DNA, 120 bp, Artificial Sequence
  ENSG00000115266_87 (sequence is synthesized)
gcatctgggtgccagacctcggttcctagggcctcgtttctccctctgggaacagccaaatggtggtccctgagactcaggacagaccaagaaggagccggatgacatggcaagccacac

SEQ ID NO: 207462 - DNA, 120 bp, Artificial Sequence
  ENSG00000115266_88 (sequence is synthesized)
actgcgtcccctgagcaggacgggacagcccgactccatcctcccacctgcgactgagcccccacccctactcctgtcccagccgtgcccctggtgacatttgggtgggaggggagggga

SEQ ID NO: 207463 - DNA, 120 bp, Artificial Sequence
  ENSG00000115266_89 (sequence is synthesized)
tgagggggcacctgggggtcagagaacaaatgacgggtgaatacatgtgtgtggccaggtggaggagggaggggaggagcaggtgggctggacagggccggtgtgaggaaggggctcagg

SEQ ID NO: 207464 - DNA, 120 bp, Artificial Sequence
  ENSG00000115266_90 (sequence is synthesized)
ctggcagggggaggtggcagagggatgggctgccattggtgcgtctgagacaaaggcggagggaggaggcgagcgctgatgggaaaggaacaaagagggaaggggggcgtgaaggggggc

SEQ ID NO: 207465 - DNA, 120 bp, Artificial Sequence
  ENSG00000115266_91 (sequence is synthesized)
tccggcgggagggccgagccgagggaggaggcgccggccagctggacagagggaggaggccaggccagagccagaagacggccagaggcacaaagaagccagcgcgctggcagagtcaag

SEQ ID NO: 207466 - DNA, 120 bp, Artificial Sequence
  ENSG00000115266_92 (sequence is synthesized)
ggatggggcaggggctgccggggccagcagggaccagctgaaggctgcgcagggggtgcgggccacacaggtagccaccctgagctcagccaccgatggagggtcgtggggctgctgcgg

SEQ ID NO: 207467 - DNA, 120 bp, Artificial Sequence
  ENSG00000115266_93 (sequence is synthesized)
tgatggcggtgggcttgggtccatctgtcctgccgtttctgcacagcttaggtgtcacccactggccttcgtggtgttttcattgtccatcggcagggacagctggtggtctgtccgccc

SEQ ID NO: 207468 - DNA, 120 bp, Artificial Sequence
  ENSG00000115266_94 (sequence is synthesized)
cgcgtgtctggctgtcagcctctgggcaggcttgcttttatgggggagggtcctgtctgtctgtctgtcgccctctctggctgtgagcctgggggtgctgggctggccagtcggcttgct

SEQ ID NO: 207469 - DNA, 120 bp, Artificial Sequence
  ENSG00000115266_95 (sequence is synthesized)
gggttaggctgtcccagctgtctgtgtgtttgtccggctgtcaggatgtgtcctgggggctgggaaggagaggccgacccatcgtctgtcggtcgactggtcagttggacgttcagctgt

SEQ ID NO: 207470 - DNA, 120 bp, Artificial Sequence
  ENSG00000115266_96 (sequence is synthesized)
ctgtacgtctgtctgctggcccctctgtctccccttggggccacctctcactccacctgcccctctgcgccccggattgcctggccaccaccacgtgggcctgtacttgtccacaccagt

SEQ ID NO: 207471 - DNA, 120 bp, Artificial Sequence
  ENSG00000115266_97 (sequence is synthesized)
gactcctgcctgagaccccccccaacccaggatcaggcaggacggctggggcttaggtcaggggccgtctgtccggaaggcatcaccgcgccctccccagaccatcagctgaaccctctg

SEQ ID NO: 207472 - DNA, 120 bp, Artificial Sequence
  ENSG00000115266_98 (sequence is synthesized)
tcccgggggatgggcgactaggacctccagcctttgctgcctgccttctggcgttggaggctgcagtaccaggctccggccgaggcctgtgggggcatttgacgttgggaaaagacccgc

SEQ ID NO: 207473 - DNA, 120 bp, Artificial Sequence
  ENSG00000115266_99 (sequence is synthesized)
gcagagtaaacgctcgggaagtcgctgaatgcatggatggatcgtgggtaactctggaaagttgggtgcagactttgagattctttttttgcagttgatcgcaaagttaatatgggggcc

SEQ ID NO: 207474 - DNA, 120 bp, Artificial Sequence
  ENSG00000115266_100 (sequence is synthesized)
aatatgggggccgggcgctgtgactcacacctgtgatcccagcactttggaaggcagaagcaggagaattgcttgagcccaggaatttggggctgcagtgagctgagatcatgctactgc

SEQ ID NO: 207475 - DNA, 120 bp, Artificial Sequence
  ENSG00000115266_101 (sequence is synthesized)
acaacagagcgagaccctgtctcgtcagttttatttttaaaaagggcagaagcacagctgaaaggtgtggtgctccaggaactacctcgcctcccttcccaaggctgagtgagagaggcc

SEQ ID NO: 207476 - DNA, 120 bp, Artificial Sequence
  ENSG00000115266_102 (sequence is synthesized)
accccatcatcccatcttagagaggctgggaaaggaagtcccaactttgcagccatttgcaaagctcccgggatccttcaggcctggggcgggcgggttgcgggaccttcgggagtcacc

SEQ ID NO: 207477 - DNA, 120 bp, Artificial Sequence
  ENSG00000115267_0 (sequence is synthesized)
caaactctgtaagaactgcctgacagaaagctggactcaaagctcctacccgagtgtgcagcaggatcgccccggtccgggaccccaggcgcacaccgcagagtccaaagtgccgcgcct

SEQ ID NO: 207478 - DNA, 120 bp, Artificial Sequence
  ENSG00000115267_1 (sequence is synthesized)
gcggccccgcgcgccgccccgctgcccacctgcccgcctgcccacctgcccaggtgcgagtgcagccccgcgcgccggcctgagagccctgtggacaacctcgtcattgtcaggcacaga

SEQ ID NO: 207479 - DNA, 120 bp, Artificial Sequence
  ENSG00000115267_2 (sequence is synthesized)
tcgtcattgtcaggcacagagcggtagaccctgcttctctaagtgggcagcggacagcggcacgcacatttcacctgtcccgcagacaacagcaccatctgcttgggagaaccctctccc

SEQ ID NO: 207480 - DNA, 120 bp, Artificial Sequence
  ENSG00000115267_3 (sequence is synthesized)
ttctctgagaaagaaagatgtcgaatgggtattccacagacgagaatttccgctatctcatctcgtgcttcagggccagggtgaaaatgtacatccaggtggagcctgtgctggactacc

SEQ ID NO: 207481 - DNA, 120 bp, Artificial Sequence
  ENSG00000115267_4 (sequence is synthesized)
tgacctttctgcctgcagaggtgaaggagcagattcagaggacagtcgccacctccgggaacatgcaggcagttgaactgctgctgagcaccttggagaagggagtctggcaccttggtt

SEQ ID NO: 207482 - DNA, 120 bp, Artificial Sequence
  ENSG00000115267_5 (sequence is synthesized)
ggactcgggaattcgtggaggccctccggagaaccggcagccctctggccgcccgctacatgaaccctgagctcacggacttgccctctccatcgtttgagaacgctcatgatgaatatc

SEQ ID NO: 207483 - DNA, 120 bp, Artificial Sequence
  ENSG00000115267_6 (sequence is synthesized)
tccaactgctgaacctccttcagcccactctggtggacaagcttctagttagagacgtcttggataagtgcatggaggaggaactgttgacaattgaagacagaaaccggattgctgctg

SEQ ID NO: 207484 - DNA, 120 bp, Artificial Sequence
  ENSG00000115267_7 (sequence is synthesized)
cagaaaacaatggaaatgaatcaggtgtaagagagctactaaaaaggattgtgcagaaagaaaactggttctctgcatttctgaatgttcttcgtcaaacaggaaacaatgaacttgtcc

SEQ ID NO: 207485 - DNA, 120 bp, Artificial Sequence
  ENSG00000115267_8 (sequence is synthesized)
aagagttaacaggctctgattgctcagaaagcaatgcagagattgagaatttatcacaagttgatggtcctcaagtggaagagcaacttctttcaaccacagttcagccaaatctggaga

SEQ ID NO: 207486 - DNA, 120 bp, Artificial Sequence
  ENSG00000115267_9 (sequence is synthesized)
aggaggtctggggcatggagaataactcatcagaatcatcttttgcagattcttctgtagtttcagaatcagacacaagtttggcagaaggaagtgtcagctgcttagatgaaagtcttg

SEQ ID NO: 207487 - DNA, 120 bp, Artificial Sequence
  ENSG00000115267_10 (sequence is synthesized)
gacataacagcaacatgggcagtgattcaggcaccatgggaagtgattcagatgaagagaatgtggcagcaagagcatccccggagccagaactccagctcaggccttaccaaatggaag

SEQ ID NO: 207488 - DNA, 120 bp, Artificial Sequence
  ENSG00000115267_11 (sequence is synthesized)
ttgcccagccagccttggaagggaagaatatcatcatctgcctccctacagggagtggaaaaaccagagtggctgtttacattgccaaggatcacttagacaagaagaaaaaagcatctg

SEQ ID NO: 207489 - DNA, 120 bp, Artificial Sequence
  ENSG00000115267_12 (sequence is synthesized)
agcctggaaaagttatagttcttgtcaataaggtactgctagttgaacagctcttccgcaaggagttccaaccatttttgaagaaatggtatcgtgttattggattaagtggtgataccc

SEQ ID NO: 207490 - DNA, 120 bp, Artificial Sequence
  ENSG00000115267_13 (sequence is synthesized)
aactgaaaatatcatttccagaagttgtcaagtcctgtgatattattatcagtacagctcaaatccttgaaaactccctcttaaacttggaaaatggagaagatgctggtgttcaattgt

SEQ ID NO: 207491 - DNA, 120 bp, Artificial Sequence
  ENSG00000115267_14 (sequence is synthesized)
aatagactcaagaaagaaaacaaaccagtgattccccttcctcagatactgggactaacagcttcacctggtgttggaggggccacgaagcaagccaaagctgaagaacacattttaaaa

SEQ ID NO: 207492 - DNA, 120 bp, Artificial Sequence
  ENSG00000115267_15 (sequence is synthesized)
ctatgtgccaatcttgatgcatttactattaaaactgttaaagaaaaccttgatcaactgaaaaaccaaatacaggagccatgcaagaagtttgccattgcagatgcaaccagagaagat

SEQ ID NO: 207493 - DNA, 120 bp, Artificial Sequence
  ENSG00000115267_16 (sequence is synthesized)
ccatttaaagagaaacttctagaaataatgacaaggattcaaacttattgtcaaatgagtccaatgtcagattttggaactcaaccctatgaacaatgggccattcaaatggaaaaaaaa

SEQ ID NO: 207494 - DNA, 120 bp, Artificial Sequence
  ENSG00000115267_17 (sequence is synthesized)
gctgcaaaagaaggaaatcgcaaagaacgtgtttgtgcagaacatttgaggaagtacaatgaggccctacaaattaatgacacaattcgaatgatagatgcgtatactcatcttgaaact

SEQ ID NO: 207495 - DNA, 120 bp, Artificial Sequence
  ENSG00000115267_18 (sequence is synthesized)
ttctataatgaagagaaagataagaagtttgcagtcatagaagatgatagtgatgagggtggtgatgatgagtattgtgatggtgatgaagatgaggatgatttaaagaaacctttgaaa

SEQ ID NO: 207496 - DNA, 120 bp, Artificial Sequence
  ENSG00000115267_19 (sequence is synthesized)
ctggatgaaacagatagatttctcatgactttattttttgaaaacaataaaatgttgaaaaggctggctgaaaacccagaatatgaaaatgaaaagctgaccaaattaagaaataccata

SEQ ID NO: 207497 - DNA, 120 bp, Artificial Sequence
  ENSG00000115267_20 (sequence is synthesized)
atggagcaatatactaggactgaggaatcagcacgaggaataatctttacaaaaacacgacagagtgcatatgcgctttcccagtggattactgaaaatgaaaaatttgctgaagtagga

SEQ ID NO: 207498 - DNA, 120 bp, Artificial Sequence
  ENSG00000115267_21 (sequence is synthesized)
gtcaaagcccaccatctgattggagctggacacagcagtgagttcaaacccatgacacagaatgaacaaaaagaagtcattagtaaatttcgcactggaaaaataaatctgcttatcgct

SEQ ID NO: 207499 - DNA, 120 bp, Artificial Sequence
  ENSG00000115267_22 (sequence is synthesized)
accacagtggcagaagaaggtctggatattaaagaatgtaacattgttatccgttatggtctcgtcaccaatgaaatagccatggtccaggcccgtggtcgagccagagctgatgagagc

SEQ ID NO: 207500 - DNA, 120 bp, Artificial Sequence
  ENSG00000115267_23 (sequence is synthesized)
acctacgtcctggttgctcacagtggttcaggagttatcgaacatgagacagttaatgatttccgagagaagatgatgtataaagctatacattgtgttcaaaatatgaaaccagaggag

SEQ ID NO: 207501 - DNA, 120 bp, Artificial Sequence
  ENSG00000115267_24 (sequence is synthesized)
tatgctcataagattttggaattacagatgcaaagtataatggaaaagaaaatgaaaaccaagagaaatattgccaagcattacaagaataacccatcactaataactttcctttgcaaa

SEQ ID NO: 207502 - DNA, 120 bp, Artificial Sequence
  ENSG00000115267_25 (sequence is synthesized)
aactgcagtgtgctagcctgttctggggaagatatccatgtaattgagaaaatgcatcacgtcaatatgaccccagaattcaaggaactttacattgtaagagaaaacaaagcactgcaa

SEQ ID NO: 207503 - DNA, 120 bp, Artificial Sequence
  ENSG00000115267_26 (sequence is synthesized)
aagaagtgtgccgactatcaaataaatggtgaaatcatctgcaaatgtggccaggcttggggaacaatgatggtgcacaaaggcttagatttgccttgtctcaaaataaggaattttgta

SEQ ID NO: 207504 - DNA, 120 bp, Artificial Sequence
  ENSG00000115267_27 (sequence is synthesized)
gtggttttcaaaaataattcaacaaagaaacaatacaaaaagtgggtagaattacctatcacatttcccaatcttgactattcagaatgctgtttatttagtgatgaggattagcacttg

SEQ ID NO: 207505 - DNA, 120 bp, Artificial Sequence
  ENSG00000115267_28 (sequence is synthesized)
attgaagattcttttaaaatactatcagttaaacatttaatatgattatgattaatgtattcattatgctacagaactgacataagaatcaataaaatgattgttttactctgcattgaa

SEQ ID NO: 207506 - DNA, 120 bp, Artificial Sequence
  ENSG00000115267_29 (sequence is synthesized)
tatccatgtaattgagaaaatgcatcacgtcaatatgaccccagaattcaagtgagtccagaaagacccatttttacatttttccacaaggggtgaagcaggttgcattgtaaatgttct

SEQ ID NO: 207507 - DNA, 120 bp, Artificial Sequence
  ENSG00000115267_30 (sequence is synthesized)
ttcaaaatagtgcaaatgagattcatttattttacaacttcctctcctttagcctctcaattatattcctattttaaatgtctatgttttaaataaactgcactggggcaggaaaagaga

SEQ ID NO: 207508 - DNA, 120 bp, Artificial Sequence
  ENSG00000115267_31 (sequence is synthesized)
agtgtaagaaccaaagccattttgatccaaggcacgtatttttgtatgctcatcatttgttctcaaatttttgaacaactaaagtcaagttaatataaccaacagacttgaaagaagtta

SEQ ID NO: 207509 - DNA, 120 bp, Artificial Sequence
  ENSG00000115267_32 (sequence is synthesized)
ggaagcaggagggaaggaaggaatgccgtgtagaataccgcaggcatgcggatgagctccaggtccaataacccatgaactacacactggtattttgtcagttctccatgatgattcttt

SEQ ID NO: 207510 - DNA, 120 bp, Artificial Sequence
  ENSG00000115267_33 (sequence is synthesized)
aggaagattcttcaaattctgcctagtgattgagaattcaataaagcagaaagacacaatgctaaacaccaagatttttagaatcaaaattttaagagtggaacatatgtgatagatcat

SEQ ID NO: 207511 - DNA, 120 bp, Artificial Sequence
  ENSG00000115267_34 (sequence is synthesized)
ctattttatcaccttaacaaatgaggaaattgatgcctgggaaaatatcaactgatcaaagaccatttttcatccaaccaacactctttctactaccttattttaaaaacaatatgacta

SEQ ID NO: 207512 - DNA, 120 bp, Artificial Sequence
  ENSG00000115267_35 (sequence is synthesized)
ccagaaattttatcaagattatgtaacattaaatatacacaaatacattggaagaaagtattttagtggttataaaaaatctgctgcatattcttctgaacatttttatacattttaagc

SEQ ID NO: 207513 - DNA, 120 bp, Artificial Sequence
  ENSG00000115267_36 (sequence is synthesized)
aatgtattaagcatttgataaaaggattgttttgtcaatatatctcaaccttacctaatgtgagattttaaacagcattcaataatagtaataacataacattttatagctccttctcct

SEQ ID NO: 207514 - DNA, 120 bp, Artificial Sequence
  ENSG00000115267_37 (sequence is synthesized)
acattatttgtaaatctcacttaaactgctatcttatttttcttttcgtagtatgcatcctatgtttccaaaaatatcatatgaaagacaaattgaaagttaactattaattaattataa

SEQ ID NO: 207515 - DNA, 120 bp, Artificial Sequence
  ENSG00000115267_38 (sequence is synthesized)
ttaaaagtaccttgccataacaaaagcacattctaagcctttcgaaatgtcaacatattaaaatatattaaagcaatctctattgcgggctctccattttgttttcaaaataacaataac

SEQ ID NO: 207516 - DNA, 120 bp, Artificial Sequence
  ENSG00000115267_39 (sequence is synthesized)
agctatttatattgtataaaatcttgcattgcaatacaatttacattctattcagaacttcaaagtatttaaatatattcaggcaatctctattaggaacctctagtttgttttcaaaat

SEQ ID NO: 207517 - DNA, 120 bp, Artificial Sequence
  ENSG00000115268_0 (sequence is synthesized)
aggcgcggaccaaagcgatctcttctgaggatccggcaagatggcagaagtagagcagaagaagaagcggaccttccgcaagttcacctaccgcggcgtggacctcgaccagctgctgga

SEQ ID NO: 207518 - DNA, 120 bp, Artificial Sequence
  ENSG00000115268_1 (sequence is synthesized)
catgtcctacgagcagctgatgcagctgtacagtgcgcgccagcggcggcggctgaaccggggcctgcggcggaagcagcactccctgctgaagcgcctgcgcaaggccaagaaggaggc

SEQ ID NO: 207519 - DNA, 120 bp, Artificial Sequence
  ENSG00000115268_2 (sequence is synthesized)
gacgcacctgcgggacatgatcatcctacccgagatggtgggcagcatggtgggcgtctacaacggcaagaccttcaaccaggtggagatcaagcccgagatgatcggccactacctggg

SEQ ID NO: 207520 - DNA, 120 bp, Artificial Sequence
  ENSG00000115268_3 (sequence is synthesized)
cgagttctccatcacctacaagcccgtaaagcatggccggcccggcatcggggccacccactcctcccgcttcatccctctcaagtaatggctcagctaataaaggcgcacatgactcca

SEQ ID NO: 207521 - DNA, 120 bp, Artificial Sequence
  ENSG00000115268_4 (sequence is synthesized)
cgatctcttctgaggatccggcaagatggtgagtgttgcgatttggcgcgtctctgccgggcctatccggctccatccaacctctgaccgtctcgcgggggccgcagttcgtccccgcgg

SEQ ID NO: 207522 - DNA, 120 bp, Artificial Sequence
  ENSG00000115268_5 (sequence is synthesized)
ctacggcggcttgctcccgaccctgcaggcggctggatgttggggcgaggggcggacttggtgggtgtcgggacgacgcggggctgggaaggcctgtccgggccttcatgtccgggtcct

SEQ ID NO: 207523 - DNA, 120 bp, Artificial Sequence
  ENSG00000115268_6 (sequence is synthesized)
cgtaacccggagccgcgagtgatccccggggacgggtcgaagcggtgtgtccctgtcgggcttctgtccccggcggcgccgcgcgtcttccgcggtgtcctcgggcccggtggccccggg

SEQ ID NO: 207524 - DNA, 120 bp, Artificial Sequence
  ENSG00000115268_7 (sequence is synthesized)
gcgatctcttctgaggatccggcaagatggcagaagtagagcagaagaagaagcggaccttccgcaagttcacctaccgcggcgtggacctcgaccagctgctggacatgtcctatgcgt

SEQ ID NO: 207525 - DNA, 120 bp, Artificial Sequence
  ENSG00000115268_8 (sequence is synthesized)
tcttctgaggatccggcaagatggcagaagtagagcagaagaagaagcggaccttccgcaagttcacctaccgcggcgtggacctcgaccagctgctggacatgtcctagttggtcttga

SEQ ID NO: 207526 - DNA, 120 bp, Artificial Sequence
  ENSG00000115268_9 (sequence is synthesized)
actcctgggctcaagcgaccctcccgcctcaacctcccgaagtgctgggatcacaggcgggagccactgcgccctacctgccttcccctgcgtttttagaggcctttggcccgagctgta

SEQ ID NO: 207527 - DNA, 120 bp, Artificial Sequence
  ENSG00000115268_10 (sequence is synthesized)
ctcttctgaggatccggcaagatggcagaagtagagcagaagaagaagcggaccttccgcaagttcacctaccgcggcgtggacctcgaccagctgctggacatgtcctaaggcctttgg

SEQ ID NO: 207528 - DNA, 120 bp, Artificial Sequence
  ENSG00000115268_11 (sequence is synthesized)
ggcaagatggcagaagtagagcagaagaagaagcggaccttccgcaagttcacctaccgcggcgtggacctcgaccagctgctggacatgtcctagtaagggcggccgcgggggtcgcgg

SEQ ID NO: 207529 - DNA, 120 bp, Artificial Sequence
  ENSG00000115268_12 (sequence is synthesized)
gcaggggctgggccagcggtggggcttgtccgggtgagggcggcggggcgggggtccaagcgcctctgcggcggtgggcgggcacggtctccgcgcgggtttggaactgagtgtggtctt

SEQ ID NO: 207530 - DNA, 120 bp, Artificial Sequence
  ENSG00000115268_13 (sequence is synthesized)
gcgcccagaaaactgtccagagacgttgaggtttttgcttatttgcaacctgccccccgttgttcacttttccgcggcttagttggaaggtgtagcccctgtctgtagcccacgtgactt

SEQ ID NO: 207531 - DNA, 120 bp, Artificial Sequence
  ENSG00000115268_14 (sequence is synthesized)
agaataaggggctgcgttagactccttagattttaagggcggtggaggtcgctgggtcctttccaggcagggtggtggtgggcatctggcttgcgcttttattttttaatttttgattat

SEQ ID NO: 207532 - DNA, 120 bp, Artificial Sequence
  ENSG00000115268_15 (sequence is synthesized)
attttttaatttttgattattttgaggcggagtctcatcctgtcgcccaggctggagtgcaatggctccgtcccagctcactgcagcctcccactcccgggttcaagcgattctcttgcc

SEQ ID NO: 207533 - DNA, 120 bp, Artificial Sequence
  ENSG00000115268_16 (sequence is synthesized)
tcacacggtggctcttgcatgtgaggggtgagtcgcgcatatctggcgggggtgccagagggacttggcgtgttcattgtagtcactacaatggacagtgacaggtccactgcggctctg

SEQ ID NO: 207534 - DNA, 120 bp, Artificial Sequence
  ENSG00000115268_17 (sequence is synthesized)
tgtgtgcggccgtccctgccggctggggtgggctggggtcgcctgatgcaggcgggatcagctgacacccagctttgctcttggtctcccgcagcccgagatgatcggccactacctggg

SEQ ID NO: 207535 - DNA, 120 bp, Artificial Sequence
  ENSG00000115271_0 (sequence is synthesized)
agtgcgcctttcagcctcacctgcagctgcgcctccttgcacctgcgcctgtgctttttctcccagcactgcggacgcgactcgagggtgacgctcgctccgctcgtcccgctcgtcatg

SEQ ID NO: 207536 - DNA, 120 bp, Artificial Sequence
  ENSG00000115271_1 (sequence is synthesized)
gcctacccgggatacggaggagggtttggaaattttagcattcaggtgccaggaatgcagatgggacagccagtgccagaaacaggcccagctatactcctcgatggatactctgggcca

SEQ ID NO: 207537 - DNA, 120 bp, Artificial Sequence
  ENSG00000115271_2 (sequence is synthesized)
gcatattcagacacttattcctcagctggtgactccgtgtatacttacttcagtgctgttgctggacaggatggtgaagtggatgctgaagaacttcagagatgtttgacacagtctgga

SEQ ID NO: 207538 - DNA, 120 bp, Artificial Sequence
  ENSG00000115271_3 (sequence is synthesized)
attaatggaacttactctcccttcagtttggaaacctgcagaattatgattgccatgttggatagagatcacacaggaaaaatgggatttaatgcattcaaagagctatgggcagctctt

SEQ ID NO: 207539 - DNA, 120 bp, Artificial Sequence
  ENSG00000115271_4 (sequence is synthesized)
aatgcctggaaggaaaacttcatgactgttgatcaagatggaagtggcacagtagaacatcatgagttgcgtcaagccattggtcttatgggttataggttgagtcctcaaacattaact

SEQ ID NO: 207540 - DNA, 120 bp, Artificial Sequence
  ENSG00000115271_5 (sequence is synthesized)
actattgttaaacgttatagcaagaatggcagaattttctttgatgattatgttgcttgctgtgtgaagcttcgagcattgacagatttctttaggaaaagagaccacttgcaacaaggg

SEQ ID NO: 207541 - DNA, 120 bp, Artificial Sequence
  ENSG00000115271_6 (sequence is synthesized)
tctgcgaatttcatatatgacgattttttgcagggcactatggcaatttgaatgcttagaattttaaacctgaagagacactgtgaattcttttgtttggaagaagtgaactggactact

SEQ ID NO: 207542 - DNA, 120 bp, Artificial Sequence
  ENSG00000115271_7 (sequence is synthesized)
ttaaaacttttaagggttttctatgttcttcctacctgttaaacctcttccctttctgtgtgtttttattttagcagatagttcaaagcaataaaagatttcttttttaatttgaggtat

SEQ ID NO: 207543 - DNA, 120 bp, Artificial Sequence
  ENSG00000115271_8 (sequence is synthesized)
atatgtgcatattgtcataaaatattgtatgattaattgatttaaataatgcttagccttaattttagataatgtaaatttagaggaatgtactttacaagatagattgtataagaagcc

SEQ ID NO: 207544 - DNA, 120 bp, Artificial Sequence
  ENSG00000115271_9 (sequence is synthesized)
ctttacaagatagattgtataagaagccaaataatgaaagcctagaaaaaactaatttatacttatctgaaggttacaaattagacttttaaattttctttgtagttggtggtgtttgag

SEQ ID NO: 207545 - DNA, 120 bp, Artificial Sequence
  ENSG00000115271_10 (sequence is synthesized)
ggttggctagaaatgaaagcctggattttgtgccatgtttgtaatatagtttgttccttgatcaaataatcagagaaaagaaacttaaagatctttgtctgtgaagaagaaaattatctc

SEQ ID NO: 207546 - DNA, 120 bp, Artificial Sequence
  ENSG00000115271_11 (sequence is synthesized)
cctagttcaatctgtagtgaaataagactacagaaggcattgttttttccttttttattttttgtattatatatttttcttaaatatgttttattgtcttctctaagcaaaaagttctta

SEQ ID NO: 207547 - DNA, 120 bp, Artificial Sequence
  ENSG00000115271_12 (sequence is synthesized)
ataaacatagtatttctctctgcgtcctatttcattagtgaagacatagttcacctaaaatggcatcctgctctgaatctagactttttagaaatggcatatgtttttgatgatatgtca

SEQ ID NO: 207548 - DNA, 120 bp, Artificial Sequence
  ENSG00000115271_13 (sequence is synthesized)
acattcaaaattgtcctaattaaattgttgtttaaatgtaatgtcaactctttataaacttaaaaataaacaagtaattaaccactctaattgttcagaaattttacatttgacttattt

SEQ ID NO: 207549 - DNA, 120 bp, Artificial Sequence
  ENSG00000115271_14 (sequence is synthesized)
gacaacattaacattagtggtggctttgccattaaaaacccagtaagtattttgagtgcatctatgtgatgtggtgttttgagcatagtaggcaccacagcaacttttctgcgtggtact

SEQ ID NO: 207550 - DNA, 120 bp, Artificial Sequence
  ENSG00000115271_15 (sequence is synthesized)
ccctggtataagatgttataattaatgtaatttctttcttggcaaacacctcatgtctgtcttagtgaagatttaataaaccacttatttttcttatgctttaaatgtgtattttctaac

SEQ ID NO: 207551 - DNA, 120 bp, Artificial Sequence
  ENSG00000115271_16 (sequence is synthesized)
ctaacagtgagtgacataattttatgactgctgaccaaattaatttatagattttataaaatcccatgtttcttaatggatggaggatagatggcaatatcttgaacaaaatcttttata

SEQ ID NO: 207552 - DNA, 120 bp, Artificial Sequence
  ENSG00000115271_17 (sequence is synthesized)
aacttacagaattttaaatcagccttcacttaaaaaaatcctggaaaggaagtaacgcatagtcacttgacactgataattttatataatttgctgtcaaattcacttggtcagttttat

SEQ ID NO: 207553 - DNA, 120 bp, Artificial Sequence
  ENSG00000115271_18 (sequence is synthesized)
aaaaatgtgtgaataggtaatacacataattttgttctctggcttttttatgaacatatatttgataatgtgagaggacattaactgagctgggaaattaaagaaacagaattctaatta

SEQ ID NO: 207554 - DNA, 120 bp, Artificial Sequence
  ENSG00000115271_19 (sequence is synthesized)
gaagtgttgtaggaaaaagcaaatgtgaaaacactaagtgtcgttcacatcgaatggtgataatgtcgctcagcaacctgtaatcttaacatccaggttatacagatggtcgttactgaa

SEQ ID NO: 207555 - DNA, 120 bp, Artificial Sequence
  ENSG00000115271_20 (sequence is synthesized)
ctattctgcggtcgattatgattatctctcttacttggaggctcacagttgaggtaaaacttttaaaatgacaaatggtattattcatgtaagcttctgccaggtgacactctatattag

SEQ ID NO: 207556 - DNA, 120 bp, Artificial Sequence
  ENSG00000115271_21 (sequence is synthesized)
aactctttaacacaattttcatttaaaaatgttcttatgacttttggtcatagaaggtctatgaaggagcttccatggccaaacatatttagaaactctcactttctaaagcttgacaag

SEQ ID NO: 207557 - DNA, 120 bp, Artificial Sequence
  ENSG00000115271_22 (sequence is synthesized)
gtatattagcatctgaaaccccaaggttaataaaatcagtcatgtttaattttatttgacccagttttttccaaactttttgaccacagaacccctttctctagcaaaacctaacattct

SEQ ID NO: 207558 - DNA, 120 bp, Artificial Sequence
  ENSG00000115271_23 (sequence is synthesized)
atgccgatccaacttaattgccaggcaactcttctgcactttacattaaacagacaaacttatgttaacaaaaacattaggcctagagaatattttaccagaatttttatactgaaatac

SEQ ID NO: 207559 - DNA, 120 bp, Artificial Sequence
  ENSG00000115271_24 (sequence is synthesized)
agttcactttttcgatgctttaaaaataactgatatttttatgatgaacatgactgtaatatgaatatagtatagtagtttgcactggttaacttacaccccagttcttttacgatgatg

SEQ ID NO: 207560 - DNA, 120 bp, Artificial Sequence
  ENSG00000115271_25 (sequence is synthesized)
taaattattgaataatgtacactcttaatgtataagtgcttttatttatacagtaaacatgtttccatgtcattttgagaatttttttaataaacattcaaatagcttgctgtaaagttt

SEQ ID NO: 207561 - DNA, 120 bp, Artificial Sequence
  ENSG00000115271_26 (sequence is synthesized)
tgtatcatacaaaatctgttacatatatatatattatgagatgcttcagttcaaataacagtgcagtaattcacctatatctaaaagactgccaaattattaaatgtcaggtattgcact

SEQ ID NO: 207562 - DNA, 120 bp, Artificial Sequence
  ENSG00000115271_27 (sequence is synthesized)
tctattctgagtggcagtttacacattttaaattacatcaagggtaaatcaatagtatggaaatcttaatttggtccactttaaatgtaatttcaaggatttctcatttgacctatttac

SEQ ID NO: 207563 - DNA, 120 bp, Artificial Sequence
  ENSG00000115271_28 (sequence is synthesized)
acatgcatccagaaaaaagtaacaaaaaatgtagtcaagttatgtttatttccaaaaaaggcatttaccctagaagaaagtagaatctgttaatacagtttaaagtctgtggagttaaaa

SEQ ID NO: 207564 - DNA, 120 bp, Artificial Sequence
  ENSG00000115271_29 (sequence is synthesized)
aaaataacaaaaaatcaatttgtgattatttctttaagtaaaatataagacattaagtttgcctgtaatcttatggcattactaaactggacaaacaaaataaatactctttgtcggaaa

SEQ ID NO: 207565 - DNA, 120 bp, Artificial Sequence
  ENSG00000115271_30 (sequence is synthesized)
tgccaacgtgcgggtccgcccttggctcctgctccctgcgtccgcgcctggtactcggcggcgccggattccggggctgttgggggccagggcctgggcgagcattgatcctgggctgac

SEQ ID NO: 207566 - DNA, 120 bp, Artificial Sequence
  ENSG00000115271_31 (sequence is synthesized)
tgaatctgtgtgcaaaagtgactaagttccctttatccccctggaattcccatgagttgaggatcatctgaatttgagttgcatccatgaacagttttatcccttggtttcttatttgcg

SEQ ID NO: 207567 - DNA, 120 bp, Artificial Sequence
  ENSG00000115271_32 (sequence is synthesized)
tggaaggcattttcataacgaagtactggtttagtaaaagcagtaaataggagtctccatgcaagagaaattggagtttcctaacatgcatgtgatttaaaaaataaaaataaaaaataa

SEQ ID NO: 207568 - DNA, 120 bp, Artificial Sequence
  ENSG00000115271_33 (sequence is synthesized)
tacccgggatacggaggagggaagctgactgccaagctatgaaaaagtggaagagccatgtgaaagggcccatgtggaggagaactggggcccctggccaacaagtttggaaattttagc

SEQ ID NO: 207569 - DNA, 120 bp, Artificial Sequence
  ENSG00000115271_34 (sequence is synthesized)
gggagttaccctcggctggtgaatgtaggcaggcctggctgagggtggtgagactgcgagggacaggtgagagatgaagctcagaagacatctttgcagagatgtggagaagacaggagg

SEQ ID NO: 207570 - DNA, 120 bp, Artificial Sequence
  ENSG00000115271_35 (sequence is synthesized)
ctcctccggcggatattttgttttcccagcaggttctgccttaacaataaggtcctttgtaggccaaaatgtgcagggcataaaagcatgtgatttgggactttccaaaggggaagtgaa

SEQ ID NO: 207571 - DNA, 120 bp, Artificial Sequence
  ENSG00000115271_36 (sequence is synthesized)
gaacttactctcccttcagtttggaaacctgcagaattatgattgccatgttggatgtatccttgaatagaaatagaaaatactagaataaagagtaattgctttctgactatcaagcca

SEQ ID NO: 207572 - DNA, 120 bp, Artificial Sequence
  ENSG00000115271_37 (sequence is synthesized)
gtggttagatttcagtgcctgtagtaaactagtgaatttaaaaatactttgtaagatcctgtttaaattctaggctttctagtttttatgcagaagtctgttcatataatgagtttggct

SEQ ID NO: 207573 - DNA, 120 bp, Artificial Sequence
  ENSG00000115271_38 (sequence is synthesized)
tcatttcctccagcaagtttataataatatgtgttttctccctttattcactgttaaatctaattagtttaaaggcttcaaatattaaggaatataaatgataaaaacgttatgttattt

SEQ ID NO: 207574 - DNA, 120 bp, Artificial Sequence
  ENSG00000115271_39 (sequence is synthesized)
ttttctcatatctctgttgccagggctattcaatcacttaatatttaattgaatatgaaattattctttttgtgtacctgggtgcactaaatatttgaaactatgtattttaaattacaa

SEQ ID NO: 207575 - DNA, 120 bp, Artificial Sequence
  ENSG00000115274_0 (sequence is synthesized)
atttctagtcccctttcctcgcaggacctcatgagtaagctgtggcggcgtgggagcacctctggggctatggaggcccctgagccgggagaagccctggagttgagcctggcgggtgcc

SEQ ID NO: 207576 - DNA, 120 bp, Artificial Sequence
  ENSG00000115274_1 (sequence is synthesized)
catggccatggagtgcacaagaaaaaacacaagaagcacaagaagaaacacaagaagaaacaccatcaggaagaagacgccgggcccacgcagccgtcccctgccaagcctcagctcaaa

SEQ ID NO: 207577 - DNA, 120 bp, Artificial Sequence
  ENSG00000115274_2 (sequence is synthesized)
ctcaaaatcaagcttgggggacaagtcctggggaccaagagtgttcctaccttcactgtgatcccagaggggcctcgctcaccctctccccttatggttgtggataatgaagaggaacct

SEQ ID NO: 207578 - DNA, 120 bp, Artificial Sequence
  ENSG00000115274_3 (sequence is synthesized)
atggaaggagtcccccttgagcagtaccgtgcctggctggatgaagacagtaatctctctccctctccacttcgggacctatcaggagggttagggggtcaggaggaagaggaggaacag

SEQ ID NO: 207579 - DNA, 120 bp, Artificial Sequence
  ENSG00000115274_4 (sequence is synthesized)
ccagaaggcgcggagtcaaccttcccctatgctgccgctgcctgtagctgagggctgcccacctcccgccctcacagaggagatgctgctgaagcgcgaggagcgggcgcggaagcggcg

SEQ ID NO: 207580 - DNA, 120 bp, Artificial Sequence
  ENSG00000115274_5 (sequence is synthesized)
gctccaggcggcgcggcgggcagaagagcacaagaaccagactatcgagcgcctcaccaagactgcggcgaccagtgggcggggaggccgggggggcgcacggggcgagcggcggggagg

SEQ ID NO: 207581 - DNA, 120 bp, Artificial Sequence
  ENSG00000115274_6 (sequence is synthesized)
gcgggctgcggctccggcccccatggtgcgctactgcagcggagcacagggttccaccctttccttcccacctggcgtccccgcccccacggcagtgtctcagcggccatccccctcagg

SEQ ID NO: 207582 - DNA, 120 bp, Artificial Sequence
  ENSG00000115274_7 (sequence is synthesized)
cccgccgccgcgctgctctgtccccggctgtccccatccgcgccgctacgcttgctcccgcacaggccaggcactctgtagtcttcagtgctaccgcatcaacctgcagatgcggctggg

SEQ ID NO: 207583 - DNA, 120 bp, Artificial Sequence
  ENSG00000115274_8 (sequence is synthesized)
ggggcccgagggtcctggatccccccttttggctacgtaaggcccttaacccggactctgcgccccgtcccatgcccgctcttgagtatcttccccaccctattaaattacatccggtgc

SEQ ID NO: 207584 - DNA, 120 bp, Artificial Sequence
  ENSG00000115274_9 (sequence is synthesized)
aggacctcatgagtaagctgtggcggcgtgggagcacctctggggctatggaggcccctgagccgggtaagcgcgaatagatcaagcaatttaggtcgtgttagaaaagaagtcccgttc

SEQ ID NO: 207585 - DNA, 120 bp, Artificial Sequence
  ENSG00000115275_0 (sequence is synthesized)
gcaggcgctggctggcaggtgtcgctaaccggacggtggtcgccagggcgagaggcgggagccggagaggtgaggcaggacccgggctccactgccgcctctccgagctcttgtgacgcg

SEQ ID NO: 207586 - DNA, 120 bp, Artificial Sequence
  ENSG00000115275_1 (sequence is synthesized)
tcttgtgacgcggacctcagtgccaggatggctcggggcgagcggcggcgccgcgcagtgccggcagagggagtgcggacagccgagagggcggctcggggaggccccgggcgacgggac

SEQ ID NO: 207587 - DNA, 120 bp, Artificial Sequence
  ENSG00000115275_2 (sequence is synthesized)
gggccgcgtagcacggctggaggagtggctctggccgtcgtggtcctgtctttggccctgggtatgtcggggcgctgggtgctggcgtggtaccgtgcgcggcgggcggtcacgctgcac

SEQ ID NO: 207588 - DNA, 120 bp, Artificial Sequence
  ENSG00000115275_3 (sequence is synthesized)
tccgcgcctcctgtgttgcctgccgactcctccagccccgccgtggccccggacctcttctggggaacctaccgccctcacgtctacttcggcatgaagacccgcagcccgaagcccctc

SEQ ID NO: 207589 - DNA, 120 bp, Artificial Sequence
  ENSG00000115275_4 (sequence is synthesized)
ctcaccggactgatgtgggcgcagcagggcaccaccccggggactcctaagctcaggcacacgtgtgagcagggggacggtgtgggtccctatggctgggagttccacgacggcctctcc

SEQ ID NO: 207590 - DNA, 120 bp, Artificial Sequence
  ENSG00000115275_5 (sequence is synthesized)
ttcgggcgccaacacatccaggatggggccttaaggctcaccactgagttcgtcaagaggcctgggggtcagcacggaggggactggagctggagagtgactgtagagcctcaggactca

SEQ ID NO: 207591 - DNA, 120 bp, Artificial Sequence
  ENSG00000115275_6 (sequence is synthesized)
ggtacttctgccctccctttggtctccctgttcttctatgtggtgacagatggcaaggaagtcctactaccagaggttggggccaaggggcagttgaagtttatcagtgggcacaccagt

SEQ ID NO: 207592 - DNA, 120 bp, Artificial Sequence
  ENSG00000115275_7 (sequence is synthesized)
gaacttggtgacttccgctttacacttttgccaccaaccagtccaggggatacagcccccaagtatggcagctacaatgtcttctggacctccaacccaggactgcccctgctgacagag

SEQ ID NO: 207593 - DNA, 120 bp, Artificial Sequence
  ENSG00000115275_8 (sequence is synthesized)
atggtaaagagtcgcctaaatagctggtttcagcatcggcccccaggggccccccctgaacgctacctcggcttgccaggatccctgaagtgggaggacagaggtccaagtgggcaaggg

SEQ ID NO: 207594 - DNA, 120 bp, Artificial Sequence
  ENSG00000115275_9 (sequence is synthesized)
caggggcagttcttgatacagcaggtgaccctgaaaattcccatttccatagagtttgtgtttgaatcaggcagtgcccaggcaggaggaaatcaagccctgccaagactggcaggcagt

SEQ ID NO: 207595 - DNA, 120 bp, Artificial Sequence
  ENSG00000115275_10 (sequence is synthesized)
ctactgacccaggccctggagagccatgctgaaggctttagagagcgctttgagaagaccttccagctgaaggagaagggcctgagctctggcgagcaggttttgggtcaggctgccctc

SEQ ID NO: 207596 - DNA, 120 bp, Artificial Sequence
  ENSG00000115275_11 (sequence is synthesized)
cgtacctctttttacagcagtgccctcccggtcattcttcccacgaggcttcctttgggatgaaggctttcaccagctggtggttcagcggtgggatccctccctcacccgggaagccct

SEQ ID NO: 207597 - DNA, 120 bp, Artificial Sequence
  ENSG00000115275_12 (sequence is synthesized)
tggccactggctggggctgctaaatgctgatggctggattgggagggagcagatactgggggatgaggcccgagcccgggtgcctccagaattcctagtacaacgagcagtccacgccaa

SEQ ID NO: 207598 - DNA, 120 bp, Artificial Sequence
  ENSG00000115275_13 (sequence is synthesized)
ccccccaaccctacttttgcctgtagcccatatgctagaggttggtgaccctgacgacttggctttcctccgaaaggccttgccccgcctgcatgcctggttttcctggctccatcagag

SEQ ID NO: 207599 - DNA, 120 bp, Artificial Sequence
  ENSG00000115275_14 (sequence is synthesized)
ccaggcaggcccactgccactatcttaccgctggcggggacgggaccctgccttaccaaccttactgaaccccaagaccctaccctctgggctggatgactacccccgggcttcacaccc

SEQ ID NO: 207600 - DNA, 120 bp, Artificial Sequence
  ENSG00000115275_15 (sequence is synthesized)
ttcagtaaccgagcggcacctggacctgcgatgttgggtggcactgggtgcccgtgtgctgacgcggctggcagagcatctgggtgaggctgaggtagctgctgagctgggcccactggc

SEQ ID NO: 207601 - DNA, 120 bp, Artificial Sequence
  ENSG00000115275_16 (sequence is synthesized)
tgcctcactggaggcagcagagagcctggatgagctgcactgggccccagagctaggagtctttgcagactttgggaaccacacaaaagcagtacagctgaagcccaggccccctcaggg

SEQ ID NO: 207602 - DNA, 120 bp, Artificial Sequence
  ENSG00000115275_17 (sequence is synthesized)
gctcgttcgggtggtgggtcggccccaacctcaactgcagtatgtagatgctcttggctatgtcagtctttttcccttgctgctgcgactgctggaccccacctcatcccgccttgggcc

SEQ ID NO: 207603 - DNA, 120 bp, Artificial Sequence
  ENSG00000115275_18 (sequence is synthesized)
cctgctggacattctagccgacagccgccatctctggagcccctttggtttacgctcccttgcagcctccagctccttttatggccagcgcaattcagagcatgatcccccctactggcg

SEQ ID NO: 207604 - DNA, 120 bp, Artificial Sequence
  ENSG00000115275_19 (sequence is synthesized)
gggtgctgtgtggctcaatgtcaactacctggctttgggagcactccaccactatgggcatctggagggtcctcaccaggctcgggctgccaaactccacggtgagctccgtgccaacgt

SEQ ID NO: 207605 - DNA, 120 bp, Artificial Sequence
  ENSG00000115275_20 (sequence is synthesized)
ggtaggcaatgtatggcgccagtaccaggctacaggctttctttgggagcagtacagtgaccgcgatgggcgaggcatgggctgccgccctttccacggctggaccagccttgtcttact

SEQ ID NO: 207606 - DNA, 120 bp, Artificial Sequence
  ENSG00000115275_21 (sequence is synthesized)
ggccatggctgaagactactgaagggagggagaggaggggagccaagacactcatgccactctggctctgaagggacaaaggcttctggcttttgcccccagccccttggataccagtaa

SEQ ID NO: 207607 - DNA, 120 bp, Artificial Sequence
  ENSG00000115275_22 (sequence is synthesized)
ttcaaaccttcctcatttcatctcaggtgtctccttgctgtcatcccacatagccctggggtgaatgtgaatccagagtctatttttctaaataaattggaaaaaacattttgaactcta

SEQ ID NO: 207608 - DNA, 120 bp, Artificial Sequence
  ENSG00000115275_23 (sequence is synthesized)
ggcgggaggcggaggcggaggcgcaggcgctggctggcaggtgtcgctaaccggacggtggtcgccagggcgagaggcgggagccggagagatggcaaggaagtcctactaccagaggtt

SEQ ID NO: 207609 - DNA, 120 bp, Artificial Sequence
  ENSG00000115275_24 (sequence is synthesized)
caactgtgtagagttcttagtgtaggacatagtacaaaagtatactgttatctcccagggcacccagtgcaaggctctttatctcatcccgcttgggtgtacctggttaccctcagtgac

SEQ ID NO: 207610 - DNA, 120 bp, Artificial Sequence
  ENSG00000115275_25 (sequence is synthesized)
cctcattactgccagacgtatgttgtttacattacccctgcctactgttcctttccctcactaaggctgattctcaagagggaattcaagagagaatgccaatctaacactgttcttttc

SEQ ID NO: 207611 - DNA, 120 bp, Artificial Sequence
  ENSG00000115275_26 (sequence is synthesized)
cccccaagtatggcaggtaactgggggaaaagaatgttgggggatggaaggggtggttattcccattttcaccagtctccatgtcccctgcctgagacctcccaacctgactcctgaaca

SEQ ID NO: 207612 - DNA, 120 bp, Artificial Sequence
  ENSG00000115275_27 (sequence is synthesized)
ctttgtatttctctttataatgcccactgccttctcttgaataatatttcctatttatcttctccccttcaagctacaatgtcttctggacctccaacccaggactgcccctgctgacag

SEQ ID NO: 207613 - DNA, 120 bp, Artificial Sequence
  ENSG00000115282_0 (sequence is synthesized)
gtcactgtagatgcgatggcgccgattccaaagactgtggggcggatcaagctagactgctctctacggcccagctgcccactggaggtcgctgctgcacccaaactttgcaaggaattc

SEQ ID NO: 207614 - DNA, 120 bp, Artificial Sequence
  ENSG00000115282_1 (sequence is synthesized)
ggtccagaggattacggcgaagaggacatagtggattttcttcgacggcttgtggagagtgatccccagggcctgcaccggatccatgtggatgggagcagcgggcggctgcagctgtgg

SEQ ID NO: 207615 - DNA, 120 bp, Artificial Sequence
  ENSG00000115282_2 (sequence is synthesized)
caccatgattacctcctgggccacttggatgatgaagggaaatcaactggacagagtgacaggggcaagggggctgagggactgggcacctactgtggtctccgcaagtccttcctgtat

SEQ ID NO: 207616 - DNA, 120 bp, Artificial Sequence
  ENSG00000115282_3 (sequence is synthesized)
cctccccaagagtctgagccctgccctcaaagcccctctgcctctgccaccttccccagtgtctcagacagcctgcttcaggtggccatgccccagaagctcctggtgacagaagaggaa

SEQ ID NO: 207617 - DNA, 120 bp, Artificial Sequence
  ENSG00000115282_4 (sequence is synthesized)
gccaatcgcctggctgaggagctggtggctgaggaggagcgcatgaaacagaaagcagagaaaaagcgactcaagaagaagcgtcaaaaggaacggaagcgacaggagcgtttggagcag

SEQ ID NO: 207618 - DNA, 120 bp, Artificial Sequence
  ENSG00000115282_5 (sequence is synthesized)
tactgtggggagcccaaggccagcactacctcagatggagatgagagccccccatccagccctggaaacccagttcagggacagtgtggtgaagaagaggactcactggatctatctagc

SEQ ID NO: 207619 - DNA, 120 bp, Artificial Sequence
  ENSG00000115282_6 (sequence is synthesized)
acttttgtgtctctggctttgcgcaaggttggggattggcccctcagtgcccgcagagagaagggactgaaccaggagccccaaggcaggggtctggccctccagaagatgggtcaagag

SEQ ID NO: 207620 - DNA, 120 bp, Artificial Sequence
  ENSG00000115282_7 (sequence is synthesized)
gaagagagccctccaagagaggagaggccccagcagagtccaaaggtacaggcatctccgggactgctggcagctgccttacaacagagccaggaactggcaaagttgggtaccagcttt

SEQ ID NO: 207621 - DNA, 120 bp, Artificial Sequence
  ENSG00000115282_8 (sequence is synthesized)
gctcaaaatggtttctaccatgaggccgtggtcctcttcacccaggccttgaagctcaacccccaggaccaccggttatttggaaatcgttccttctgccatgagcggttgggtcagcca

SEQ ID NO: 207622 - DNA, 120 bp, Artificial Sequence
  ENSG00000115282_9 (sequence is synthesized)
gcgtgggccctggctgatgcccaggtggcccttaccctacggcctggctggccccggggcctcttccgcctgggcaaggccttgatgggactacagcgcttcagagaggcagctgctgtg

SEQ ID NO: 207623 - DNA, 120 bp, Artificial Sequence
  ENSG00000115282_10 (sequence is synthesized)
tttcaggaaactctgagaggtgggtcccagcctgacgcagcccgagagctccgctcttgccttctccacctcacactgcagggtcagcgaggaggaatctgtgcaccacctctgtcacct

SEQ ID NO: 207624 - DNA, 120 bp, Artificial Sequence
  ENSG00000115282_11 (sequence is synthesized)
ggggccctccagccacttccccatgctgagctggcaccctcaggcctaccttccctcaggtgccctcgaagcactgctttgaggtcccctggcctgtctccactcttgcattatccttca

SEQ ID NO: 207625 - DNA, 120 bp, Artificial Sequence
  ENSG00000115282_12 (sequence is synthesized)
tgtcaccgaagccaccccaaccagcccctctcccagactcagagtagaaggccccatcctctcaagccccaggacccttcaaagggctgggacatcctgggacttgggctccagcatctg

SEQ ID NO: 207626 - DNA, 120 bp, Artificial Sequence
  ENSG00000115282_13 (sequence is synthesized)
caggccagatgagggggcaccggtccctcatagggcagggccatgtatatatcccttggtgggggacatagtgtggtgacagttcactgcatattttgagaccttattctctagatccat

SEQ ID NO: 207627 - DNA, 120 bp, Artificial Sequence
  ENSG00000115282_14 (sequence is synthesized)
agttaatgatgccctggcagtcattcctcttgccatggggaagcttctgatgagagaaaggagccccacatccactgaaacatcctttggttctcaagcttcttctggaggcagtaagga

SEQ ID NO: 207628 - DNA, 120 bp, Artificial Sequence
  ENSG00000115282_15 (sequence is synthesized)
aaaataaaacccaccaaggctcaagaagggaactatagaaaagttcaggtttttaggctatagcagagacagtgagaaagcatctgggcctttctcttcctcttggtccaggggacctca

SEQ ID NO: 207629 - DNA, 120 bp, Artificial Sequence
  ENSG00000115282_16 (sequence is synthesized)
ttcaccaactagagcttggtgtacaggaacggggtcacagtgctgagggggcttgagtcccacctttcagcttgatggatgctcacctcttctcagccccagctcgtgccctgtttttct

SEQ ID NO: 207630 - DNA, 120 bp, Artificial Sequence
  ENSG00000115282_17 (sequence is synthesized)
agccatagcccccagattactcacagctcctcatgccatttcctgtccagattgctatgtatgactctgacctctcttgtccagtggtctggtgctcacctcctctcactgctagaatat

SEQ ID NO: 207631 - DNA, 120 bp, Artificial Sequence
  ENSG00000115282_18 (sequence is synthesized)
tcaccaagggtttgcatttgggaagtcccttaccagctcctgcttagagctggtagggccatacatgtccacactcccaactggtggctctcccgctgaatggggcctcagcaggtgccc

SEQ ID NO: 207632 - DNA, 120 bp, Artificial Sequence
  ENSG00000115282_19 (sequence is synthesized)
aagctgctacaaccttggccactctgtttctccaccccagcactgggcatggtaattagcctttccccatgttaatttattcagttttttcaagggtcaactgaattccccacttcctgg

SEQ ID NO: 207633 - DNA, 120 bp, Artificial Sequence
  ENSG00000115282_20 (sequence is synthesized)
gtaagaagcatgatctccttttaatttcacgtctaagatcctggcagcttcccctagctggttcctctgtagtcctgctgggactgtcagctcatttaaatgtgggtctgcagaaggctt

SEQ ID NO: 207634 - DNA, 120 bp, Artificial Sequence
  ENSG00000115282_21 (sequence is synthesized)
taggtctcccccaacccccttacctttcacagaggaacctttcatcaggataaatgattattgctgccctgtgggtcttgctcaatactgttcatacctggagagagaaggtattgaaac

SEQ ID NO: 207635 - DNA, 120 bp, Artificial Sequence
  ENSG00000115282_22 (sequence is synthesized)
atctcctttatgtgtgactttcccaaatttttaaaaattgtttatggtttaggccccttaaatactgtgtagcaggatgaagtctaccattaccagctgggtcaccttggatgggtctgt

SEQ ID NO: 207636 - DNA, 120 bp, Artificial Sequence
  ENSG00000115282_23 (sequence is synthesized)
caacatctaagcctcagttccctcacctgtaaaaatgagggtagtccctacctcataagggatattgtgaggatggaaagcgaaagtgtgagaaaatacctcccaagtgcctggtacata

SEQ ID NO: 207637 - DNA, 120 bp, Artificial Sequence
  ENSG00000115282_24 (sequence is synthesized)
gtgggtgctaaataaaccactttttgtctgcaactgtcctacatagtcatgcttcccacaataggaagagaggagtgtgggtgaattggtgctgaaattcacaaaatccagagttctggg

SEQ ID NO: 207638 - DNA, 120 bp, Artificial Sequence
  ENSG00000115282_25 (sequence is synthesized)
acaaaatccagagttctgggactggattctcaaagtgtgctttctaggctagcagcatcagcatcatccaggaacttactagaaatgcaatttctcaggctgggcacggtggctcacgcc

SEQ ID NO: 207639 - DNA, 120 bp, Artificial Sequence
  ENSG00000115282_26 (sequence is synthesized)
agagccctccagccacttccccatgctgagctggcaccctcaggcctaccttccctcaggtgccctcgaagcactgctttgaggtcccctggcctgtctccactcttgcattatccttca

SEQ ID NO: 207640 - DNA, 120 bp, Artificial Sequence
  ENSG00000115282_27 (sequence is synthesized)
gtaaaagcgaccctcagtttcccccagtcctgctcattttggtcacgcctctttgaagtcagctgtgcagaaacccgcgacggatgggcgccagacggggctctggaggctttggggagt

SEQ ID NO: 207641 - DNA, 120 bp, Artificial Sequence
  ENSG00000115282_28 (sequence is synthesized)
ataagcttctagtaccaaagtgtcacaatggttgtggtactaggagcaggggccagttttagaaagggtacttttaagcaccttgacacctaatcttttctttctgatccctctgggacc

SEQ ID NO: 207642 - DNA, 120 bp, Artificial Sequence
  ENSG00000115282_29 (sequence is synthesized)
ggaggatgatcctgatgtaacagatgctcgaagtgggtagaattgagcagacaagggtctctgagttgaggattagggagtgggtacgagttccttgggaaaagatggaggccgggcgcg

SEQ ID NO: 207643 - DNA, 120 bp, Artificial Sequence
  ENSG00000115282_30 (sequence is synthesized)
ccctccaagagaggagaggccccagcagagtccaaaggagaaggatttggggaggctgagacctcaagacctgcttgactttgcaccctatccccaggcatctccgggactgctggcagc

SEQ ID NO: 207644 - DNA, 120 bp, Artificial Sequence
  ENSG00000115282_31 (sequence is synthesized)
gtaggtgggggcttggccagggcagggcagagtgttgaggactcagacctttggccaccttctgtctttatcaggttatttggaaatcgttccttctgccatgagcggttgggtcagcca

SEQ ID NO: 207645 - DNA, 120 bp, Artificial Sequence
  ENSG00000115282_32 (sequence is synthesized)
ccctttcatgtttgctctccatttccctgtttctctctttttctgtcacctgcccttcgtccttcaggaagccaatcgcctggctgaggagctggtggctgaggaggagcgcatgaaaca

SEQ ID NO: 207646 - DNA, 120 bp, Artificial Sequence
  ENSG00000115282_33 (sequence is synthesized)
gaaagcagagaaaaagcgactcaagaagaaggtggctagagcatggctggagggtgcaggggagccaaagggatttgggagagggaaagaggaaactttgtgggaacaggagagagctca

SEQ ID NO: 207647 - DNA, 120 bp, Artificial Sequence
  ENSG00000115282_34 (sequence is synthesized)
agatggcctgcagtggactctcttgccaggaggacacaaggggcccagggactggggggtctctcacaggccatctggtgcagtggttctggaatcctactgtgctgcctaggtaggaat

SEQ ID NO: 207648 - DNA, 120 bp, Artificial Sequence
  ENSG00000115282_35 (sequence is synthesized)
ctgcctccttacatgaggcctcttgctggtgcctctcttgtctgctttttcacctgcaaaatgaggataataatgatgcctgtctcatagagctgcaaagatggaatgcgaaatcttagc

SEQ ID NO: 207649 - DNA, 120 bp, Artificial Sequence
  ENSG00000115282_36 (sequence is synthesized)
ggcacactgtcatgctgaggcgggtatcagggagaattggctgggactgcaataccaagcctcaggtggctaaggagggggcggggaaggatgggtggaatgagaggcatgggctctcct

SEQ ID NO: 207650 - DNA, 120 bp, Artificial Sequence
  ENSG00000115282_37 (sequence is synthesized)
gagaggccccagcagagtccaaaggtacaggtgaggtggctgaagaaccttattcagctggaaccgtggaaggggcacaaggagctgctggggaggcacagggtctaaggattgacacag

SEQ ID NO: 207651 - DNA, 120 bp, Artificial Sequence
  ENSG00000115282_38 (sequence is synthesized)
ggtccagtgggagttctctggctctagggtcaagagacctacagtcaggccccatcactgtcaccatgaccccgggtggtttcctgtctaggaagatagggctgataccatcttgtaggg

SEQ ID NO: 207652 - DNA, 120 bp, Artificial Sequence
  ENSG00000115282_39 (sequence is synthesized)
ctgtcatgaggattacatgagttgggtaatgctaattgcagtgttacctgtttaaacaaaggagaaggatttggggaggctgagacctcaagacctgcttgactttgcaccctatcccca

SEQ ID NO: 207653 - DNA, 120 bp, Artificial Sequence
  ENSG00000115286_0 (sequence is synthesized)
gtctgaaggccgaggccaagatggcggtgctgtcagctcctggcctgcgcggcttccggatccttggtctgcgctccagcgtgggcccggctgtgcaggcacgaggtgtccatcagagcg

SEQ ID NO: 207654 - DNA, 120 bp, Artificial Sequence
  ENSG00000115286_1 (sequence is synthesized)
tggccaccgatggcccaagcagcacccagcctgccctgccaaaggccagagccgtggctcccaaacccagcagccggggcgagtatgtggtggccaagctggatgacctcgtcaactggg

SEQ ID NO: 207655 - DNA, 120 bp, Artificial Sequence
  ENSG00000115286_2 (sequence is synthesized)
cccgccggagttctctgtggcccatgaccttcggcctggcctgctgcgccgtggagatgatgcacatggcagcaccccgctacgacatggaccgctttggcgtggtcttccgcgccagcc

SEQ ID NO: 207656 - DNA, 120 bp, Artificial Sequence
  ENSG00000115286_3 (sequence is synthesized)
accaacaagatggccccagcgcttcgcaaggtctacgaccagatgccggagccgcgctacgtggtctccatggggagctgcgccaacggaggaggctactaccactattcctactcggtg

SEQ ID NO: 207657 - DNA, 120 bp, Artificial Sequence
  ENSG00000115286_4 (sequence is synthesized)
gtgaggggctgcgaccgcatcgtgcccgtggacatctacatcccaggctgcccacctacggccgaggccctgctctacggcatcctgcagctgcagaggaagatcaagcgggagcggagg

SEQ ID NO: 207658 - DNA, 120 bp, Artificial Sequence
  ENSG00000115286_5 (sequence is synthesized)
ctgcagatctggtaccgcaggtagcgccgccgccgccgccgccggagcctgtcgccgtcctgtccccagcctgcttgtgtcccgtgaggttgtcaataaacctgccctcgggctgccgcc

SEQ ID NO: 207659 - DNA, 120 bp, Artificial Sequence
  ENSG00000115286_6 (sequence is synthesized)
ctcctccctccctgcggactgtgctccctgtctggggactgcgctcctccctccttggggaccgtgctcctccctccctccctgcggaccgcgctcctccctccctggggaccgcgctcc

SEQ ID NO: 207660 - DNA, 120 bp, Artificial Sequence
  ENSG00000115286_7 (sequence is synthesized)
tccctccctgcggaccgcgctcggccctccctggggaccgcgcccctccctcccagcggaccgcgctcctccctccctggggacctcgctcctccctccctccctgcggactgtgctgct

SEQ ID NO: 207661 - DNA, 120 bp, Artificial Sequence
  ENSG00000115286_8 (sequence is synthesized)
ggtggggcctggccgccctttcccaggccctgcagtggccttgtcctttctcacctgtttccactcctgctgtccccgttgggccctgggcttcgtcctcttgctcaagccctttgttct

SEQ ID NO: 207662 - DNA, 120 bp, Artificial Sequence
  ENSG00000115286_9 (sequence is synthesized)
gaacctgcgtggcagccgggactgggggatccccagcaaagagctctggcttggggctcagaaagagggtcatcgggtcctcgtgggatgcccgggctctgggccacctcccctccctcc

SEQ ID NO: 207663 - DNA, 120 bp, Artificial Sequence
  ENSG00000115286_10 (sequence is synthesized)
gcccagcctccctgcctccatctccgtccagggcagccccgggccctgctccccactgctaagtgtgtctgctgagcgctggcccccattgagtcctgagggctggggccgggggccggg

SEQ ID NO: 207664 - DNA, 120 bp, Artificial Sequence
  ENSG00000115286_11 (sequence is synthesized)
ttagtgaggtcagcgtcttgtccgagaggtccctgtgacagcccgggatgagccacgggtggagggcagtggggccttgcccaggggaggaccccactcttcctgcagggacctcccctg

SEQ ID NO: 207665 - DNA, 120 bp, Artificial Sequence
  ENSG00000115286_12 (sequence is synthesized)
cgccggctcccagtccctggcactgcgcccacccagggctgtcagcctccaccttcagaggccggcccgggaaacccttccaaagccgagccggctgcgctgtgcacgcggtcacgcggg

SEQ ID NO: 207666 - DNA, 120 bp, Artificial Sequence
  ENSG00000115286_13 (sequence is synthesized)
ctctccgggcttctccgagccggccgctcctcgggctccccgcccggcttgcgatgaacggtcgccgttattgcgtccagagtacagtcggggaaaccgaggcccgctcctggcctgcgc

SEQ ID NO: 207667 - DNA, 120 bp, Artificial Sequence
  ENSG00000115286_14 (sequence is synthesized)
gcccctgtgagggagtcccacacccccagcagacggcgggctcccccatcctatggatgggccgactcggagcgctgcctcttagtggagcctgtcccctgtgagaagtcggcgatgtat

SEQ ID NO: 207668 - DNA, 120 bp, Artificial Sequence
  ENSG00000115286_15 (sequence is synthesized)
tcaggcatcagagggatcagagggagcaggggaagctgagtggaattcctgacacacgcctggtttacagcagtttcatatggtcctacctggcacaaaccaaagacctgcagttagaaa

SEQ ID NO: 207669 - DNA, 120 bp, Artificial Sequence
  ENSG00000115286_16 (sequence is synthesized)
taccaagcgagaaggttcctgggggccaaggacactgtcccgcgccctcagccttacagaagggcacgcaggactccctgggacccggggtggccggatttggcaaatgaaaacgtggga

SEQ ID NO: 207670 - DNA, 120 bp, Artificial Sequence
  ENSG00000115286_17 (sequence is synthesized)
ggcttagtttgactgtgaggttagggtgaatttgaccatcaggaaaactgttagtagtaattgtttagtacgagtatatcccaacaatatttgggctatactgacactaaaaagagcatt

SEQ ID NO: 207671 - DNA, 67 bp, Artificial Sequence
  ENSG00000115286_18 (sequence is synthesized)
caggcatgagccaccatgcctggccaatatttattatttttattttttagagacagagtctcactgc

SEQ ID NO: 207672 - DNA, 120 bp, Artificial Sequence
  ENSG00000115286_19 (sequence is synthesized)
gcagccttgacctcctgggctcaagcggtcccccaaccttagcctctcagagtgctgggattacagatgtactccactgtgcctactttttaaaatttctgtagagatcaggtcttgata

SEQ ID NO: 207673 - DNA, 120 bp, Artificial Sequence
  ENSG00000115286_20 (sequence is synthesized)
aaatttctgtagagatcaggtcttgataagtttacccttttaaagcgagcagttcagtggtttttaggccaccacctctaattccagaacattctcatcacccccaaatgaaatgctgtc

SEQ ID NO: 207674 - DNA, 120 bp, Artificial Sequence
  ENSG00000115286_21 (sequence is synthesized)
cccatcagcagtcactctgcatccccttccgagccccggtgcccacacctcccctccctgtctctgtggatgggcccgtcctggacatttcacagaaacaggatcacacgccgcatggcc

SEQ ID NO: 207675 - DNA, 120 bp, Artificial Sequence
  ENSG00000115286_22 (sequence is synthesized)
ttctgtgtccggcgtctctcactgagcgcgacgtcctcaaggtgcatccgtgctgtggcctgtgtccgagcctcgtgccttttcttggctgaataatatcccactgtgtggacatattac

SEQ ID NO: 207676 - DNA, 120 bp, Artificial Sequence
  ENSG00000115286_23 (sequence is synthesized)
taatctaattctaaacagttaattagaatattccagagttttcataaccgtctcccactgctgggcattcagggtatgtccatttttacggctgtgggaagcagtgctgggagtggagtc

SEQ ID NO: 207677 - DNA, 120 bp, Artificial Sequence
  ENSG00000115286_24 (sequence is synthesized)
tgtgtggtctcctggggtttccagctccctgccccgggtggaccccagcgcctcactgacagagccggaatcaggcgagggtgaggctcagccgccccatagacaggggctgggtgttgg

SEQ ID NO: 207678 - DNA, 120 bp, Artificial Sequence
  ENSG00000115286_25 (sequence is synthesized)
cactgtggctgtctgaagtggctttttgttgacacatgtgatctgacacatcccagccccgggaatcggtggtcaggagccccctcgggaggggagcacttttccccgagttatcagcca

SEQ ID NO: 207679 - DNA, 120 bp, Artificial Sequence
  ENSG00000115286_26 (sequence is synthesized)
cgtgtgagcttgcgccccactggtcccacagaggctctgggagcctgtgcgtgtttgctcattgcttctccgtgacaagttccagcctcgtaggtgcctggcctgcagttgaaggcgggt

SEQ ID NO: 207680 - DNA, 120 bp, Artificial Sequence
  ENSG00000115286_27 (sequence is synthesized)
ggggatggggcgaggcctcgtggagggagggtgggcaggcgggtcttcggcacactcccctcacggtgcctccccaacagctgcgccaacggaggaggctactaccactattcctactcg

SEQ ID NO: 207681 - DNA, 120 bp, Artificial Sequence
  ENSG00000115286_28 (sequence is synthesized)
ccgggaacattctttatatctggtgatcccgtgggactcttgcacctcacgtggtcccacgagggccatccccccgggcgttcaccttgacagtggtccacggtaggcaggcttggaggt

SEQ ID NO: 207682 - DNA, 120 bp, Artificial Sequence
  ENSG00000115286_29 (sequence is synthesized)
ggcgctcatgtgggacaggggacagagtcctgttcttggccaccctgtgctgcgtgcggcattagctcatgcgcagagagcccagccctgagtcccgagtctgggggtttgggcaagcga

SEQ ID NO: 207683 - DNA, 120 bp, Artificial Sequence
  ENSG00000115286_30 (sequence is synthesized)
gaggcacatcctggtgcctctcaaaagtggaggaacaggctctgactttggattccgcttccctggaaagggcgttgatttgttcagcgttctgcacggttcaggtcaccccgggggcag

SEQ ID NO: 207684 - DNA, 120 bp, Artificial Sequence
  ENSG00000115286_31 (sequence is synthesized)
tggagagggcagcctgggcctccctgtgacttgacagcacagagaggtccatcctggggtcaggagctctgcccatgcccctggcgtcttcccctgcagtgcagaccaatggggcaagtt

SEQ ID NO: 207685 - DNA, 120 bp, Artificial Sequence
  ENSG00000115286_32 (sequence is synthesized)
aacggacctcagaggttgtctgaaggccgaggccaagatggcggtgctgtcaggtgagcgcggcaccggcggcgggtgtggggccgcgcgggtctggggccgtgggagcctcgggtgtcg

SEQ ID NO: 207686 - DNA, 120 bp, Artificial Sequence
  ENSG00000115286_33 (sequence is synthesized)
atggcccaagcaggtgaagctggccttctgggggaggtcgtaccccctcgccccacccccatcccttccttattttctgcatcagtgccgcagccactgaggtgcatggatggggcaggg

SEQ ID NO: 207687 - DNA, 120 bp, Artificial Sequence
  ENSG00000115286_34 (sequence is synthesized)
agggggtcacacatcccagtccctgacctcatgtgggtccaggcctctggcagcggccgtgggggctcgcatccgcctctgggaagcacctgcgtggctgacgcctcctgtgcccgtgtg

SEQ ID NO: 207688 - DNA, 120 bp, Artificial Sequence
  ENSG00000115286_35 (sequence is synthesized)
cgacgtcatgatcgtggccggcacactcaccaacaagatggccccagcgcttcgcaaggtaggcctcgtcccagccgcccagccgcccccagagtgagctgcgcacggaccccgcctctc

SEQ ID NO: 207689 - DNA, 120 bp, Artificial Sequence
  ENSG00000115286_36 (sequence is synthesized)
cgtgcccgtggacatctacatcccaggctgcccaccgccgaggccctgctctacggcatcctgcagctgcagaggaagatcaagcgggagcggaggctgcagatctggtaccgcaggtag

SEQ ID NO: 207690 - DNA, 120 bp, Artificial Sequence
  ENSG00000115286_37 (sequence is synthesized)
gggaagcgcctggaggccggccctgcgtgctgcccgcagctcactgttcccaccccgtggtcctctctgcagctcctggcctgcgcggcttccggatccttggtctgcgctccagcgtgg

SEQ ID NO: 207691 - DNA, 120 bp, Artificial Sequence
  ENSG00000115286_38 (sequence is synthesized)
acagtccacgcagtggcaaaggctggacagtcaggaggaaaaccctgtgggcccggctcagtgccgtcagagctcaccgccacctggggtgggaaggcattctctgagccctgtgcagat

SEQ ID NO: 207692 - DNA, 120 bp, Artificial Sequence
  ENSG00000115286_39 (sequence is synthesized)
ggcagctggggcaggcctcctgcagacccaggtgactgacagggcggtgagggcgcatgcccagggatcttaccttggtcatgtgtggagggcctgctgccagtttccttctgtggatga

SEQ ID NO: 207693 - DNA, 81 bp, Artificial Sequence
  ENSG00000115286_40 (sequence is synthesized)
aagacccgcggcccccacgtgcgcactccgatgacctttccgcctcgggtgatctgggggtgcacggcgcaacacgaccac

SEQ ID NO: 207694 - DNA, 120 bp, Artificial Sequence
  ENSG00000115286_41 (sequence is synthesized)
gcctcgggtgatctgggggtgcacggcgcaacacgaccacggaggccgaaagcgcagcggaacctcccggctccaggttccggtttccgcatgcgctccgagccgctttgggcggcggcc

SEQ ID NO: 207695 - DNA, 120 bp, Artificial Sequence
  ENSG00000115286_42 (sequence is synthesized)
catgcacactcacatgcgcacatgtgcatgcaagctcacatgtatggacagatgtgtacacggaccacacgcacactcacgcacacaatgcacatatgcacactcgcacacatgcacact

SEQ ID NO: 207696 - DNA, 120 bp, Artificial Sequence
  ENSG00000115286_43 (sequence is synthesized)
tgcacacacatgcacacacaagcacatgtgcacacacgcttgcacacatacacacatgcacacttgcactcatgcacactcatgcgcacatatacacatgcacacgcacactcgcacaca

SEQ ID NO: 207697 - DNA, 120 bp, Artificial Sequence
  ENSG00000115286_44 (sequence is synthesized)
cgtgcacatatatgcacagtcatgcacacacatgcacactcacacacatgcacacacgtccttgtgtggacacatgcatgtgtgcctgttggcatgcatgcacacaggcacactcactga

SEQ ID NO: 207698 - DNA, 120 bp, Artificial Sequence
  ENSG00000115286_45 (sequence is synthesized)
tgcacacacacccctgcggccgtggagcagggcggaccctcccggaggcccctgtgctggcctggtggcctgtggttccatctgaggattcggaccctgctggagatgacccctccgttt

SEQ ID NO: 207699 - DNA, 120 bp, Artificial Sequence
  ENSG00000115286_46 (sequence is synthesized)
ccgtcattctctttctggcgtccgtgtgttcctcttgtttctcttttaaggtgaaagcagtgttttaagttaaaaggagcgcgtgtgaaggcagtagatccttctcggtacccgtttaaa

SEQ ID NO: 207700 - DNA, 120 bp, Artificial Sequence
  ENSG00000115286_47 (sequence is synthesized)
gcctcccctgcctgtggcgccagcccccacgcagcccctgccatccccctgcagcgtgagcacgtgcagctccctccagctcctgcggcacttgctgcgacagcccgggttcaacaatcc

SEQ ID NO: 207701 - DNA, 120 bp, Artificial Sequence
  ENSG00000115286_48 (sequence is synthesized)
cccattgatggacgttcactgtttccttttgttttttgtttcctaaacaatgccacggcgaacgtcctgccagggccgcagtggtcgagacaaggatagtttttaatgcaggatagttct

SEQ ID NO: 207702 - DNA, 84 bp, Artificial Sequence
  ENSG00000115286_49 (sequence is synthesized)
gcaggatagtttctaatggagggaacctgagacatggccagcggccgtcccaacacaggcttctggcgggcaggtggacctggc

SEQ ID NO: 207703 - DNA, 120 bp, Artificial Sequence
  ENSG00000115286_50 (sequence is synthesized)
ccgtcccaacacaggcttctggcgggcaggtggacctggccatttctgcccgggcagccctgcctcactctgtagcctgaccctgtcacccgccaacacatgcagcagggcccctgccag

SEQ ID NO: 207704 - DNA, 120 bp, Artificial Sequence
  ENSG00000115286_51 (sequence is synthesized)
gtctcagagccgcgtgcagggagagcgggaacggtgggggaaatgagaagccacagggatggaggagaggggagggagtggccaaggagatctgagagggcttcctggaggcgtcgcact

SEQ ID NO: 207705 - DNA, 120 bp, Artificial Sequence
  ENSG00000115286_52 (sequence is synthesized)
tggtatgtggacccagatctagttaacgcagagagttcccggttagacctgcgctactactcgcctgtagcccacgcgctcagagagtggctggagccccctgttgaaatggtgggactt

SEQ ID NO: 207706 - DNA, 120 bp, Artificial Sequence
  ENSG00000115286_53 (sequence is synthesized)
aggatacactgggttcgaggaactatgtgatgaggacagatctcacccgtttctctctattttatgtatttgaatgtggctggtggggcgcgctttacaactcttggggcccggaggcca

SEQ ID NO: 207707 - DNA, 120 bp, Artificial Sequence
  ENSG00000115286_54 (sequence is synthesized)
cctgcaggagccgctgtgcctctcacctctgccggctgccgccccgggacatgagtcgggggttctgggtgctccacgtggagtctcacgctgggccacgcggggctccgggggtggcgt

SEQ ID NO: 207708 - DNA, 120 bp, Artificial Sequence
  ENSG00000115289_0 (sequence is synthesized)
agtggccggctgggatcagcctttaagatggcgtctcctcaggggggccagattgcgatcgcgatgaggcttcggaaccagctccagtcagtgtacaagatggacccgctacggaacgag

SEQ ID NO: 207709 - DNA, 120 bp, Artificial Sequence
  ENSG00000115289_1 (sequence is synthesized)
gaggaggttcgagtgaagatcaaagacttgaatgaacacattgtttgctgcctatgcgccggctacttcgtggatgccaccaccatcacagagtgtcttcatactttctgcaagagttgt

SEQ ID NO: 207710 - DNA, 120 bp, Artificial Sequence
  ENSG00000115289_2 (sequence is synthesized)
attgtgaagtacctccaaactagcaagtactgccccatgtgcaacattaagatccacgagacacagccactgctcaacctcaaactggaccgggtcatgcaggacatcgtgtataagctg

SEQ ID NO: 207711 - DNA, 120 bp, Artificial Sequence
  ENSG00000115289_3 (sequence is synthesized)
gggtcacccagcccactggggaagagccagcactgagcaacctcggcctccccttcagcagctttgaccactctaaagcccactactatcgctatgatgagcagttgaacctgtgcctgg

SEQ ID NO: 207712 - DNA, 120 bp, Artificial Sequence
  ENSG00000115289_4 (sequence is synthesized)
agcggctgagttctggcaaagacaagaataaaagcgtcctgcagaacaagtatgtccgatgttctgttagagctgaggtacgccatctccggagggtcctgtgtcaccgcttgatgctaa

SEQ ID NO: 207713 - DNA, 120 bp, Artificial Sequence
  ENSG00000115289_5 (sequence is synthesized)
accctcagcatgtgcagctcctttttgacaatgaagttctccctgatcacatgacaatgaagcagatatggctctcccgctggttcggcaagccatcccctttgcttttacaatacagtg

SEQ ID NO: 207714 - DNA, 120 bp, Artificial Sequence
  ENSG00000115289_6 (sequence is synthesized)
tgaaagagaagaggaggtaggggccaagcccccaccccatcccactccccttccctccccagatatttatgtgaaatgaactgcagctttattttttgaaataaaaacttttaaaaagca

SEQ ID NO: 207715 - DNA, 120 bp, Artificial Sequence
  ENSG00000115289_7 (sequence is synthesized)
ggacgcctgcgcgttgtgtcgccgacgttgtgtagtctcccctgggaaaggagggtcaggcgagtccacgtgagggaagcccccgctgtgcgcggagccctctgctgggcggagggggag

SEQ ID NO: 207716 - DNA, 120 bp, Artificial Sequence
  ENSG00000115289_8 (sequence is synthesized)
tgccagcccccaggagctaatccccggctgatggcgcagggcgcggggcttggccgtctagtgtgatgaaggaggcgacccccaaggtgggaaggcgcacgggttggggtttgagggtgg

SEQ ID NO: 207717 - DNA, 120 bp, Artificial Sequence
  ENSG00000115289_9 (sequence is synthesized)
gcttgaggtgacgggtttggtaggactcacgtaggcagaaggccaaagatgagggaaggacaaaaagtgaggaagggctaatactttattcttttttttctttttttgagacggagtctt

SEQ ID NO: 207718 - DNA, 120 bp, Artificial Sequence
  ENSG00000115289_10 (sequence is synthesized)
atcctacagtcctcaggggaagggtgggctgaggggccctttgaataatataagaacattccccactgactactacttcctcattctctccttagccatcccctttgcttttacaataca

SEQ ID NO: 207719 - DNA, 120 bp, Artificial Sequence
  ENSG00000115290_0 (sequence is synthesized)
gcagatagctcggccgcgcgtctcagccgccggggccccgagcgcaggcggcgaggccaccacacctgcagagcgctcgggctgcctagccggcacctcgcctcccgccgcgcaaacccc

SEQ ID NO: 207720 - DNA, 120 bp, Artificial Sequence
  ENSG00000115290_1 (sequence is synthesized)
ttctccccacgcgccgagtctcccatgacgcccgagccccccggccggcgacaatgaccacttccctgcaagatgggcagagcgccgcgagcagggcggctgcccgggattcgccgctgg

SEQ ID NO: 207721 - DNA, 120 bp, Artificial Sequence
  ENSG00000115290_2 (sequence is synthesized)
ccaggtgtgtggcgctgcccaggggaggggcgacgcccacgacctggcgccggccccctggctgcacgcgcgagcgctcctgccccttccggacgggacccgcggctgtgctgcagacag

SEQ ID NO: 207722 - DNA, 120 bp, Artificial Sequence
  ENSG00000115290_3 (sequence is synthesized)
acaggagaaaaaagaaagatcttgatgttccggaaatgccatctattccaaacccttttcctgagctatgctgttctccatttacatctgtgttgtcagcagacctatttcccaaagcaa

SEQ ID NO: 207723 - DNA, 120 bp, Artificial Sequence
  ENSG00000115290_4 (sequence is synthesized)
attcaaggaaaaaacaggtgattaaagtatacagtgaagatgaaaccagcagggctttagatgtacccagtgacataacggctcgagatgtttgtcagctgttgatcctgaagaatcatt

SEQ ID NO: 207724 - DNA, 120 bp, Artificial Sequence
  ENSG00000115290_5 (sequence is synthesized)
acattgatgaccacagctggaccctttttgagcacctgcctcacataggtgtagaaagaacaatagaagaccacgaactggtgattgaagtgctatccaactgggggatagaagaagaaa

SEQ ID NO: 207725 - DNA, 120 bp, Artificial Sequence
  ENSG00000115290_6 (sequence is synthesized)
acaaactatactttagaaaaaattatgccaaatatgagttctttaaaaacccaatgtatttttttccagagcatatggtatcttttgcaactgaaaccaatggtgaaatatcccccacac

SEQ ID NO: 207726 - DNA, 120 bp, Artificial Sequence
  ENSG00000115290_7 (sequence is synthesized)
agattttgcagatgtttctgagttcaagcacatatcctgaaattcatggtttcttacatgcgaaagaacagggaaagaagtcttggaaaaaaatttacttttttctaagaagatctggtt

SEQ ID NO: 207727 - DNA, 120 bp, Artificial Sequence
  ENSG00000115290_8 (sequence is synthesized)
tatatttttctactaaaggaacatcaaaggaaccgcggcatttgcagtttttcagcgaatttggcaatagtgatatttatgtgtcactggcaggcaaaaaaaaacatggagcaccgacta

SEQ ID NO: 207728 - DNA, 120 bp, Artificial Sequence
  ENSG00000115290_9 (sequence is synthesized)
actatggattctgctttaagcctaacaaagcgggagggccccgagacctgaaaatgctctgtgcagaagaagagcagagtaggacgtgctgggtgaccgcgattagattgcttaagtatg

SEQ ID NO: 207729 - DNA, 120 bp, Artificial Sequence
  ENSG00000115290_10 (sequence is synthesized)
agaattatatgcatccatatcaaggtagaagtggctgcagttcacagagcatatcacctatgagaagtatatcagagaattccctggtagcaatggacttctcaggccagaaaagcagag

SEQ ID NO: 207730 - DNA, 120 bp, Artificial Sequence
  ENSG00000115290_11 (sequence is synthesized)
ttatagaaaatcccactgaagccctttcagttgcggttgaagaaggactcgcttggaggaaaaaaggatgtttacgcctgggcactcacggtagccccactgcctcttcacagagctctg

SEQ ID NO: 207731 - DNA, 120 bp, Artificial Sequence
  ENSG00000115290_12 (sequence is synthesized)
ccacaaacatggctatccaccggtcccagccatggtttcaccacaaaatttctagagatgaggctcagcgattgattattcagcaaggacttgtggatggagttttcttggtacgggata

SEQ ID NO: 207732 - DNA, 120 bp, Artificial Sequence
  ENSG00000115290_13 (sequence is synthesized)
gtcagagtaaccccaaaactttcgtactgtcaatgagtcatggacaaaaaataaagcactttcaaattataccagtagaagatgacggtgaaatgttccacacactggatgatggccaca

SEQ ID NO: 207733 - DNA, 120 bp, Artificial Sequence
  ENSG00000115290_14 (sequence is synthesized)
caagatttacagatctaatacagctggtggagttctatcaactcaataagggcgttcttccttgcaagttgaaacattattgtgctaggattgctctctagacaagccagaagtgactta

SEQ ID NO: 207734 - DNA, 120 bp, Artificial Sequence
  ENSG00000115290_15 (sequence is synthesized)
ttaaactattgaaggaaaaggactcaagaaaaataataaaagaccataaataagggcgaaaacattaccatgtgaaaagaatgtatttcacctgcaagttacaaaaaaatagtttgtgca

SEQ ID NO: 207735 - DNA, 120 bp, Artificial Sequence
  ENSG00000115290_16 (sequence is synthesized)
ttgcaaataagcaaagacttggattgactttacattcatcatttaaaattcattagttaaaattaaaccttaggaaaaaaatgacttggtgtgttcttgtgtgatttttacattgctata

SEQ ID NO: 207736 - DNA, 120 bp, Artificial Sequence
  ENSG00000115290_17 (sequence is synthesized)
atattttcttcaaatatgcatatttaaaacatgtctcccttatttaccatatagcaacatcagaattctgaaacacaaaatatgaaataaattgggagtcaggaataattatttgtgcac

SEQ ID NO: 207737 - DNA, 120 bp, Artificial Sequence
  ENSG00000115290_18 (sequence is synthesized)
agtcaggaataattatttgtgcactaaatttcaattatactattttttaatgttaagaaatatgataataacttatcaattaaaagaaactatccacaacctgttaatgaaactaaaaac

SEQ ID NO: 207738 - DNA, 120 bp, Artificial Sequence
  ENSG00000115290_19 (sequence is synthesized)
ttttccgggtttatgatcatcttaaaatgaaatcatattttgagatagtagctttaaaccattttgaaatatgttgattttttccaggtaatttaaaaatattattaaatagttaattat

SEQ ID NO: 207739 - DNA, 120 bp, Artificial Sequence
  ENSG00000115290_20 (sequence is synthesized)
cttttctatatactttatataatatgagccttgtcacagagtggtacatgttcgccttagcacactttttattcctgacagcaattatattttacattctgttttatgtaaattacatcc

SEQ ID NO: 207740 - DNA, 120 bp, Artificial Sequence
  ENSG00000115290_21 (sequence is synthesized)
agttgtttcattgcactgagccctgagattcccaaggagtaaccataaaagatttcttttattttgtccatgacctacgagacaggatcattctaagaagagcaggcatgagtttgagtg

SEQ ID NO: 207741 - DNA, 120 bp, Artificial Sequence
  ENSG00000115290_22 (sequence is synthesized)
atctgtcatttctactagctgtacatgcagccattgtaccatcttcacacgtggtctgtttatgagatttagtgtttgtgagatcctgaggcctcatagaaagaacaatagaagaccacg

SEQ ID NO: 207742 - DNA, 120 bp, Artificial Sequence
  ENSG00000115295_0 (sequence is synthesized)
ggctccgtgggcggccacgggagacagcgccggcgggagcgcgcctctcggcctttcctccgcgcccccgcgtccccagccggccgctccgagaggacccggaggaggcaggtggctttc

SEQ ID NO: 207743 - DNA, 120 bp, Artificial Sequence
  ENSG00000115295_1 (sequence is synthesized)
ggaggaggcaggtggctttctagaagatgaccatagaggaccttccagattttccattagaaggaaatcctttgtttggaagatacccatttatattttctgcttctgataccccagtta

SEQ ID NO: 207744 - DNA, 120 bp, Artificial Sequence
  ENSG00000115295_2 (sequence is synthesized)
tcttttccatttctgcagcaccaatgccttcagactgtgaattttctttctttgatcctaatgatgcatcatgccaggaaattctttttgatcccaaaacttcagtttcagaattatttg

SEQ ID NO: 207745 - DNA, 120 bp, Artificial Sequence
  ENSG00000115295_3 (sequence is synthesized)
ccattttgagacagtgggttcctcaggtccaacaaaacattgacattattggaaatgagattcttaagagaggttgcaatgtgaatgatagagatggattgacagatatgactcttttac

SEQ ID NO: 207746 - DNA, 120 bp, Artificial Sequence
  ENSG00000115295_4 (sequence is synthesized)
attatacctgcaaatctggagctcatggtattggtgatgtggaaacagctgtaaaatttgcaactcagcttattgacctgggagcagacattagtttgcggagtcgctggacaaacatga

SEQ ID NO: 207747 - DNA, 120 bp, Artificial Sequence
  ENSG00000115295_5 (sequence is synthesized)
atgctttgcattatgctgcttattttgatgtccctgaacttataagagtgattttgaaaacatcgaaaccaaaagatgtggatgccacttgcagtgattttaattttggaacagctttgc

SEQ ID NO: 207748 - DNA, 120 bp, Artificial Sequence
  ENSG00000115295_6 (sequence is synthesized)
atattgcagcatacaacttgtgtgcaggtgctgtgaagtgcctcttggagcagggagcaaatcctgcatttaggaatgacaaaggacagatccctgctgatgttgttccagacccagtag

SEQ ID NO: 207749 - DNA, 120 bp, Artificial Sequence
  ENSG00000115295_7 (sequence is synthesized)
atatgccgttagagatggctgacgccgcagccactgctaaggaaatcaagcagatgcttctagatgcggtgcctctgtcatgtaacatctcaaaggccatgctcccaaattatgatcatg

SEQ ID NO: 207750 - DNA, 120 bp, Artificial Sequence
  ENSG00000115295_8 (sequence is synthesized)
tcactggcaaggcaatgcttacgtcacttggcctgaagttgggggatcgtgttgttattgcaggacagaaggttggtacattaagattttgtggaacaactgaatttgcaagtgggcagt

SEQ ID NO: 207751 - DNA, 120 bp, Artificial Sequence
  ENSG00000115295_9 (sequence is synthesized)
gggctggcattgaactggatgaaccagaaggaaaaaataatggaagtgttggaaaagtccagtactttaaatgtgcccccaagtatggtatttttgcacctctttcaaagataagtaaag

SEQ ID NO: 207752 - DNA, 120 bp, Artificial Sequence
  ENSG00000115295_10 (sequence is synthesized)
caaaaggtcgaaggaagaatataacacacactccttctacaaaagctgctgtacctctcatcaggtcccagaaaattgacgtagctcatgtgacgtcaaaagtaaatactggattaatga

SEQ ID NO: 207753 - DNA, 120 bp, Artificial Sequence
  ENSG00000115295_11 (sequence is synthesized)
catcaaaaaaagatagtgcttctgagtcaacactttcattgcctcctggtgaagaacttaaaactgtgacagagaaagatgttgccctgcttggatctgtcagcagctgctcctctacat

SEQ ID NO: 207754 - DNA, 120 bp, Artificial Sequence
  ENSG00000115295_12 (sequence is synthesized)
cttctttggaacacagacagagctaccccaagaaacagaatgcaatcagcagtaacaagaagacaatgagcaaaagcccttccctttcatccagagccagtgctggtttgaattcctcag

SEQ ID NO: 207755 - DNA, 120 bp, Artificial Sequence
  ENSG00000115295_13 (sequence is synthesized)
caacatctacagcaaataatagccgttgcgagggggaactccgcctcggagagagagtgttagtggtaggacagagactgggcaccattaggttctttgggacaacaaacttcgctccag

SEQ ID NO: 207756 - DNA, 120 bp, Artificial Sequence
  ENSG00000115295_14 (sequence is synthesized)
gatattggtatggtatagagcttgaaaaaccccatggcaagaatgatggttcagttggaggtgtgcagtattttagctgttctccaagatatggaatatttgctcccccatccagggtgc

SEQ ID NO: 207757 - DNA, 120 bp, Artificial Sequence
  ENSG00000115295_15 (sequence is synthesized)
aaagagtaacagattccctggataccctttcagaaatttcttcaaataaacagaaccattcttatcctggttttaggagaagttttagcacaacttctgcttcttcccaaaaggagatta

SEQ ID NO: 207758 - DNA, 120 bp, Artificial Sequence
  ENSG00000115295_16 (sequence is synthesized)
aggggtctcaggtcctgctcacgagctccaatgagatgggtactgttaggtatgtgggccccactgactttgcttcaggtatctggcttggacttgagctccgaagcgccaagggaaaaa

SEQ ID NO: 207759 - DNA, 120 bp, Artificial Sequence
  ENSG00000115295_17 (sequence is synthesized)
atgatgggtcagtgggtgacaagcgctatttcacctgtaagccgaaccatggagtcttagttcgaccgagcagagtgacctatcggggaattaatgggtcaaaacttgtggatgagaatt

SEQ ID NO: 207760 - DNA, 120 bp, Artificial Sequence
  ENSG00000115295_18 (sequence is synthesized)
tgagaattgttaagcttctaaaatattaaataagctcaaatatatatatttggtgtaaataaagagtccatggtaaatggtttactttatttagccatattaaaattttgaaaatatagt

SEQ ID NO: 207761 - DNA, 120 bp, Artificial Sequence
  ENSG00000115295_19 (sequence is synthesized)
taaaaaccattataacaattcagagagagttctttacaaagccatgaatatgaactatggggaatcatggttcttttaaagcaattttcaaaataagtaccaattaaagctttaggttcc

SEQ ID NO: 207762 - DNA, 120 bp, Artificial Sequence
  ENSG00000115295_20 (sequence is synthesized)
aagaagattctgggactcaggaagaaaaagtgccatcaggtgaccagctgttgcatttcttgcttattctgttttgtttttgcacatcataatggatttttcttagtgccctaattgtga

SEQ ID NO: 207763 - DNA, 120 bp, Artificial Sequence
  ENSG00000115295_21 (sequence is synthesized)
agggtttctctagctttggttatgtgtaatgttcacgtgacctttttttgtcaatcatttttggaatttttctttctttctgtgctttattactaataagtccaatgagtgagtagtagc

SEQ ID NO: 207764 - DNA, 120 bp, Artificial Sequence
  ENSG00000115295_22 (sequence is synthesized)
tagatgactagtatgtagttttatattttggtaaaattatttgccctttcagaaatgcctcatctaaagatacatgataattttggagttggaaggggccttagaggctctccagctctg

SEQ ID NO: 207765 - DNA, 120 bp, Artificial Sequence
  ENSG00000115295_23 (sequence is synthesized)
cttcttgcccattgccaaatactgaaatggaagcccgtcttacctggggtcactaactggttggttaactgagctaagaatagactgtgggtctcctcacttgtggcccagtgctctttc

SEQ ID NO: 207766 - DNA, 120 bp, Artificial Sequence
  ENSG00000115295_24 (sequence is synthesized)
tgctatacaaaatgtctaatctcagatttttcttctgctgcttgactgcttcatctggatgaactacaaaaaacccatgattaaggtttatgaattcaagtaataattagattttttttg

SEQ ID NO: 207767 - DNA, 120 bp, Artificial Sequence
  ENSG00000115295_25 (sequence is synthesized)
cacagacttacttaacttccttattggatatgtttgtaacacataaacacaaagcacttttcaaacatgatgcacttttatctttgtgaataatttactgtcctttcctcctgggatatg

SEQ ID NO: 207768 - DNA, 120 bp, Artificial Sequence
  ENSG00000115295_26 (sequence is synthesized)
agaaacattttaaaaaacgtatttaacagaagagagcaaataaagatatatcaggaaggatgtattagttatttacttaaatgtttataatatctggattttttttgttttgttactcat

SEQ ID NO: 207769 - DNA, 120 bp, Artificial Sequence
  ENSG00000115295_27 (sequence is synthesized)
agaactggtgttgtttgctgtttttatttctctaattgttgcagagttctgcctgttacaaagctacagaactgtattgtttttattttccttcttgagcacatgttaacaaactaagct

SEQ ID NO: 207770 - DNA, 120 bp, Artificial Sequence
  ENSG00000115295_28 (sequence is synthesized)
tcacattagagtgatgtcataatgtaaaatgtttgcattgtggttaggtattgaagtttatgtcctgtctgtgtaaagattcatcttttattgtaaatatttagactttaccacagaaat

SEQ ID NO: 207771 - DNA, 120 bp, Artificial Sequence
  ENSG00000115295_29 (sequence is synthesized)
attggaacagtttgctttataagattaaaaagcatccttcagaatggagcttgccttgtgcttagaaataatatgttgaactattttgcaatatactattttaaatctaaattctgtcac

SEQ ID NO: 207772 - DNA, 120 bp, Artificial Sequence
  ENSG00000115295_30 (sequence is synthesized)
ttcgctgcctttttaaaatagtgtggtatttcaaatattgctagagctattttcctgaaatacatttgcaaaataaggctgctttgtaatcaaggaatatttttattgattgaaggaaat

SEQ ID NO: 207773 - DNA, 120 bp, Artificial Sequence
  ENSG00000115295_31 (sequence is synthesized)
gactgtactgcgattcaaaagtaaacttattttattatacagattatttcttaaaaactctatttataccttaacatgaaatccatgaccacaccaaacttggttattcataatttttcc

SEQ ID NO: 207774 - DNA, 120 bp, Artificial Sequence
  ENSG00000115295_32 (sequence is synthesized)
tgttaaatataaaacactgtaagttaaaaacagtaatgccaacattgaatttatttttgaggtcaaagaaccagttgttctctttatatttagatgaggatgattgagtccatatactat

SEQ ID NO: 207775 - DNA, 120 bp, Artificial Sequence
  ENSG00000115295_33 (sequence is synthesized)
gtatgtttacatatactatacatgcacattaggtgttttcatttgtgttttgcttatgaaatgtcatttaaagttcacttcttgagcatcaataaaaagggaagctgtgtggttttggaa

SEQ ID NO: 207776 - DNA, 120 bp, Artificial Sequence
  ENSG00000115295_34 (sequence is synthesized)
acattatctctgagagcactcgcagatgctgagcctgcagagacagagaaactggcagctgaccagggtcagggatggtcatgtattcaaatattgtgggttttagtcaagtgtgctcca

SEQ ID NO: 207777 - DNA, 120 bp, Artificial Sequence
  ENSG00000115295_35 (sequence is synthesized)
cccgattcaacaatgtgatgtgactgctcctagcaactattttgatatggtgaatgttgttaagcataggacctaagaagaggtggcagtctctttcctctccgcacttggcaggccacc

SEQ ID NO: 207778 - DNA, 120 bp, Artificial Sequence
  ENSG00000115295_36 (sequence is synthesized)
gacactcttgaaccatatctcaaatctgaagtctcctggcttcagtaaggcccttttatggggtccagacagtcctgaaccagcctgaagatgctagtggacatccccatttattactgc

SEQ ID NO: 207779 - DNA, 120 bp, Artificial Sequence
  ENSG00000115295_37 (sequence is synthesized)
ttgcctaacaggaccattttgttgtctaagcttacgaatgttatcacatttcagttcaatctttctgattctcttctgatggactgctgctctgcttgtatatgtgtctttagtttggtg

SEQ ID NO: 207780 - DNA, 120 bp, Artificial Sequence
  ENSG00000115295_38 (sequence is synthesized)
atgctgactctagaagtaagaactatgtgtacatagtataattttggaaaatatataaatgcaaagaagaaagcaaaaacaaaaaaacctcaatgagtcccactacttatgcatgctgtt

SEQ ID NO: 207781 - DNA, 120 bp, Artificial Sequence
  ENSG00000115295_39 (sequence is synthesized)
acaatctgagctcagtgaattttctttctttgatcctaatgatgcatcatgccaggaaattctttttgatcccaaaacttcagtttcagaattatttgccattttgagacagtgggttcc

SEQ ID NO: 207782 - DNA, 120 bp, Artificial Sequence
  ENSG00000115295_40 (sequence is synthesized)
agggaggcctgctgaagcctgccaccaccaccaggttttctgtaattggatctgcacaggggcctcagggagtgcagtatgaaaacacccatttccatgcactcccaaccaacacgctga

SEQ ID NO: 207783 - DNA, 120 bp, Artificial Sequence
  ENSG00000115295_41 (sequence is synthesized)
tgctgtatcttttgcattgcttggtagagttttaacacgtaggagaaaaggtgtgataagtgtattgagaagcgttcttcctccctcctttgcaagcgcaattaaaaatgtcaccagtga

SEQ ID NO: 207784 - DNA, 120 bp, Artificial Sequence
  ENSG00000115295_42 (sequence is synthesized)
acaaaacattgacattattggaaatgaggtaaggaattcttacattttaagttttgcattgttaggattgttaatggtatagatttttttccccatctgaaaggaagatggtaataaagg

SEQ ID NO: 207785 - DNA, 120 bp, Artificial Sequence
  ENSG00000115295_43 (sequence is synthesized)
agaaaccctttaaaagttctgatatttatttgtatttccaggattttcatggggcagtgagttaatactatatattcttctgattatttcttcatgctctgtacttctgacatttgtaga

SEQ ID NO: 207786 - DNA, 120 bp, Artificial Sequence
  ENSG00000115295_44 (sequence is synthesized)
ctcctggcgggtgcagggaggggcatttttcatatttccttctttgtaaaattaattttgtaaacttttatgcatttcataaagggatttgattaccatcatgttctatttacacttttg

SEQ ID NO: 207787 - DNA, 120 bp, Artificial Sequence
  ENSG00000115295_45 (sequence is synthesized)
gttggtttggtaaatatataggcttgaatgtagtctttaagaatattagattttttgagggagggttccttgaccagtatgttgctgtgttgtaggaagagagtgcttatacttttttca

SEQ ID NO: 207788 - DNA, 120 bp, Artificial Sequence
  ENSG00000115295_46 (sequence is synthesized)
atctttaagaatttccttcagcctgctgacaagttcagttttcattattgttgttgagtacagatttaaaaatttacccttaagatatgctcatactgtctatacattttactgagaagt

SEQ ID NO: 207789 - DNA, 120 bp, Artificial Sequence
  ENSG00000115295_47 (sequence is synthesized)
aattcagatacgatagactaacttggttcctcagcattggtttgaaagcaataggtacctcagtagttaggttgtaaccatattttccttgactgcttcagattcttaagagaggttgca

SEQ ID NO: 207790 - DNA, 120 bp, Artificial Sequence
  ENSG00000115295_48 (sequence is synthesized)
atgtgaatgatagagatggattgacagatatgactcttttacattatacctgcaaatctggagctcatggtattggtaagtgtgtggtaaatctatcagttgcttatgtcatctgcactt

SEQ ID NO: 207791 - DNA, 120 bp, Artificial Sequence
  ENSG00000115295_49 (sequence is synthesized)
gtgcttagataatctatatttatgcccatatattgtctgggggaaggcacccagctgatgatgataatattgcctgaagagctgaggattcagttaggtccttccaaaaaccatattccc

SEQ ID NO: 207792 - DNA, 120 bp, Artificial Sequence
  ENSG00000115295_50 (sequence is synthesized)
tttaatcaaggaggtctttataccctcctgatacctcttaacttttctggatcaggcctcatgcctgattgcataatagatgagagtaactagtaacaccctaaaatctttctgagggtt

SEQ ID NO: 207793 - DNA, 120 bp, Artificial Sequence
  ENSG00000115295_51 (sequence is synthesized)
tataacaaggtttgacagtccaaggtcagtctttgcatactgatccctaatcttaagaccccagtcttgagacctaaggtctgttcctacatatgtaacatatgtgcatattttccaaaa

SEQ ID NO: 207794 - DNA, 120 bp, Artificial Sequence
  ENSG00000115295_52 (sequence is synthesized)
ttgcttgagtagctgaaggagtttaagggcagtcagtttatgctccagtttattgaagatattcaagagttcttaggcagaatggaagaagctgctaagaagaaacacccaggacataaa

SEQ ID NO: 207795 - DNA, 120 bp, Artificial Sequence
  ENSG00000115295_53 (sequence is synthesized)
cagagaagcaagggaaggagaaaacaatctgagccctgggaattatacagcagatcgaaagctgctttgcgtcgcagttggagcagcacccccaccgcaggtggcattgaagggagcgtg

SEQ ID NO: 207796 - DNA, 120 bp, Artificial Sequence
  ENSG00000115295_54 (sequence is synthesized)
ttttcatgcaacaacacaggagccatctgctgcaatgaaattagcaaagtcaaattgtgtgttctttagggactcattttaaaaaccattaaagacagattgacaacacacttcatacaa

SEQ ID NO: 207797 - DNA, 120 bp, Artificial Sequence
  ENSG00000115295_55 (sequence is synthesized)
aatctttctgattctcttctgatggactgctgctctgcttgtatatgtgtctttagtttggtgcctctcatcttttagttatgctgactctagaaaattttctttctttgatcctaatga

SEQ ID NO: 207798 - DNA, 120 bp, Artificial Sequence
  ENSG00000115295_56 (sequence is synthesized)
ataaacagaaccattcttatcctggtaagactacacagttttgtgttcctaatcaatatttctttgctttcatttattgaaaaatttttattatgaggtattgtatacaaaagggtctat

SEQ ID NO: 207799 - DNA, 120 bp, Artificial Sequence
  ENSG00000115295_57 (sequence is synthesized)
aaactgtatttgtatagtttttgtaataatagaacaaacatctgttacctgtcccctggctgaagaagatgataacctgacctgtagaaacccctgagtaccccatcccatctcatctgc

SEQ ID NO: 207800 - DNA, 120 bp, Artificial Sequence
  ENSG00000115295_58 (sequence is synthesized)
cttgctcttcatataccccatcctcaggtggaggagtcttgaattgtacattaattattcccttgattctctttatttttgtcacccatatatagatatatcaataaataatatgtgttc

SEQ ID NO: 207801 - DNA, 120 bp, Artificial Sequence
  ENSG00000115295_59 (sequence is synthesized)
agtaacgctttcttgttaccagatgacagagagtcaggctgtcagagttcacgactttaggtgcacagtttcaccctgtctggtccttgggagacggagaaggggtcaggagaaaacgtg

SEQ ID NO: 207802 - DNA, 120 bp, Artificial Sequence
  ENSG00000115295_60 (sequence is synthesized)
ggtgaagaggcagcaaagccgcaggagatatgaactaattgctcaacgtgggtgtagcacggattaggccttttacagcaagcgctgccagcagggaactggtggatgtactcttgacca

SEQ ID NO: 207803 - DNA, 120 bp, Artificial Sequence
  ENSG00000115297_0 (sequence is synthesized)
agtcactgccccagccggagctggccaaccctctccacccgggacttgggcagcggcgccggcagcccagcgtctatttgcgcttaagagccagcaaggaagctccaggggccccagctg

SEQ ID NO: 207804 - DNA, 120 bp, Artificial Sequence
  ENSG00000115297_1 (sequence is synthesized)
gccgtgctcccccgggatgcaagtccctgcgctgacgcccggcagcggctggcacgggcgcggctgctccgggtgcacagggatgctgctgtttcggggaccccggcgccctgccttggc

SEQ ID NO: 207805 - DNA, 120 bp, Artificial Sequence
  ENSG00000115297_2 (sequence is synthesized)
cagccccgcgggcccctgaggccactctccggagcgcgccgccgctgggcttctggcgctgcctgaggcatcctccccaaccaccgaacctccggcggttctcctcggcccagaccgatg

SEQ ID NO: 207806 - DNA, 120 bp, Artificial Sequence
  ENSG00000115297_3 (sequence is synthesized)
gagccggggatgctgggtccacacaacctcccacaccacgagccaatcagcttcggcatcgatcagatcctgagcggccccgaaaccccagggggcggtctaggcctgggtcgcgggggc

SEQ ID NO: 207807 - DNA, 120 bp, Artificial Sequence
  ENSG00000115297_4 (sequence is synthesized)
cagggtcatggggagaatggggcgttctcgggtggataccacggagcctcgggctacggtcccgccggctcacttgccccgctgcccggcagctccggagtgggcccaggcggcgtgatc

SEQ ID NO: 207808 - DNA, 120 bp, Artificial Sequence
  ENSG00000115297_5 (sequence is synthesized)
gctgcctgtgccgccgcccgctgggggggcgcctgcagtgcctgggccctcgggtttgggcggcgccggaggcctagcgggactcaccttcccctggatggacagcggccgccgctttgc

SEQ ID NO: 207809 - DNA, 120 bp, Artificial Sequence
  ENSG00000115297_6 (sequence is synthesized)
gacagcggccgccgctttgccaaggaccggctcacggctgcgctctcgcccttctctgggacgcgccgcataggccacccctaccaaaaccggacccctccgaagcggaagaagccgcgc

SEQ ID NO: 207810 - DNA, 120 bp, Artificial Sequence
  ENSG00000115297_7 (sequence is synthesized)
acgtccttctcccgctcacaggtgctggagttggagcggcgcttcctgcgccagaagtacctggcctctgcggagagggcggcgctggccaaggccttgcgcatgaccgacgcacaggtc

SEQ ID NO: 207811 - DNA, 120 bp, Artificial Sequence
  ENSG00000115297_8 (sequence is synthesized)
aaaacgtggttccagaaccgacgcaccaagtggcggcgccagacggcggaggagcgcgaggccgagcggcaccgcgcgggccggctgctcctgcatctgcagcaggacgcgttgccacgg

SEQ ID NO: 207812 - DNA, 120 bp, Artificial Sequence
  ENSG00000115297_9 (sequence is synthesized)
gccgctgcccccggaccctctctgcctgcacaactcgtcgctcttcgcgctgcagaacctgcagccctgggccgaggacaacaaagtggcttcagtgtccgggctcgcctcggtggtgtg

SEQ ID NO: 207813 - DNA, 120 bp, Artificial Sequence
  ENSG00000115297_10 (sequence is synthesized)
agcgacgcccgtccgatcggcgtggagcgccgggcccggagcggtggagcgcgcggctgcctgcgtccatggtctagtggcagccgggcgcgtgaggagcggcaggccttgaggctgtcg

SEQ ID NO: 207814 - DNA, 120 bp, Artificial Sequence
  ENSG00000115297_11 (sequence is synthesized)
tcgagggctcctccaccaccggccggctcccaagccagcgttgcgcagatgcacggccagctcagaggcggcctttcccgccatttttcacttcactgccgttacgccctcgctggaacc

SEQ ID NO: 207815 - DNA, 120 bp, Artificial Sequence
  ENSG00000115297_12 (sequence is synthesized)
tgaggcgccgagagggcgggacctgcaggacagtagccaatgaggtgcggggagggggccgggctggccaatgggagctgctttcctgagggactcgaaattctccggcgggtggtcggg

SEQ ID NO: 207816 - DNA, 120 bp, Artificial Sequence
  ENSG00000115297_13 (sequence is synthesized)
agctggggctctgaggggctctagcggcgttgcgcgcggtgccggctgggtctgtaccaaaggtgtgaaggaaagaagacaccgaccacggcgaagcaatagagggggtgctggagcgcg

SEQ ID NO: 207817 - DNA, 120 bp, Artificial Sequence
  ENSG00000115297_14 (sequence is synthesized)
agaggctggctgattgtgaccgaaaccagagggttgtccaccccgggcatctcatccctcaactgtaaaataatcgctaaggattccttcctgactttgagcctcacgttgtcatgtgtg

SEQ ID NO: 207818 - DNA, 120 bp, Artificial Sequence
  ENSG00000115297_15 (sequence is synthesized)
ttcagcctgctggccacatcctccggcaacacgcccgggcaggaggcgagtcggatacttacacacccaacgaaagagaaaatctggctccggtgtcacatagggacagagaagggagag

SEQ ID NO: 207819 - DNA, 120 bp, Artificial Sequence
  ENSG00000115297_16 (sequence is synthesized)
gaggaaacagtggacaaagttaatgggcccagtggagttagggtgaagagaatttggaaaataatttggaagtgacaagcttaagaagaatcaaaggtaattccaagactggaaatgtgc

SEQ ID NO: 207820 - DNA, 120 bp, Artificial Sequence
  ENSG00000115297_17 (sequence is synthesized)
agcatcaggaaatcaatggtgctgtggatgatgaaagggaaattgggaagactggagcaaaattaactgtataggcaaaactaaatgttatacctagagagaataaatcctggagaagtg

SEQ ID NO: 207821 - DNA, 120 bp, Artificial Sequence
  ENSG00000115297_18 (sequence is synthesized)
attcatggccagaggtcacaaggtcaccaagcggcttaggtctttccccacctcccttctctgacagctccaggccattttttgagtttgggtggggtaaaatgtttatgggaaacaagg

SEQ ID NO: 207822 - DNA, 120 bp, Artificial Sequence
  ENSG00000115297_19 (sequence is synthesized)
cggccaggatccaaccaaggcctcagtgaggtcccacgtgtcccccgtggcgagatttcgccctcccgccgttgaggaggaagagtgtgagaacagacttcctaggcacagaatggaggg

SEQ ID NO: 207823 - DNA, 120 bp, Artificial Sequence
  ENSG00000115297_20 (sequence is synthesized)
gcagagtcctgcattgaggactccctgcacttggggtccggggctcaccgggcgccgttccccagccgcttcttacgcagccgggaaaccacaacgagatttggtcttcgagagcattta

SEQ ID NO: 207824 - DNA, 120 bp, Artificial Sequence
  ENSG00000115297_21 (sequence is synthesized)
gaatccgggagttggccagaaggatccatcgagaggcgaagagtgggggctgggggaggaggcacctgcggaggaagccggtgaggcggaggcagcccaaaggcggaggccgcccaaagg

SEQ ID NO: 207825 - DNA, 120 bp, Artificial Sequence
  ENSG00000115297_22 (sequence is synthesized)
cggtgagcatctccgctgactcagcggcccatgctcgggcccctcccgcgctgagcctggctcctaacaccctggccccctgtccccctccccgcacatctccgccagccagccttcccc

SEQ ID NO: 207826 - DNA, 120 bp, Artificial Sequence
  ENSG00000115306_0 (sequence is synthesized)
agtccctccctcggccgcctctcctcccggagcgagcgcgcagccctgcgcagcagcgcccactggtcccgtcctgtgagccccggccccagccgcggacagacccgcggagtcgcctcc

SEQ ID NO: 207827 - DNA, 120 bp, Artificial Sequence
  ENSG00000115306_1 (sequence is synthesized)
cggcccacccgcccggccgccgaggagcgggaggaggacgggaccccggcgcccccaccccatccccgggagaactctaagaaggagctgatgtggaggagcagctgagacagttcaaga

SEQ ID NO: 207828 - DNA, 120 bp, Artificial Sequence
  ENSG00000115306_2 (sequence is synthesized)
tgacgaccacagtagccacagactatgacaacattgagatccagcagcagtacagtgatgtcaacaaccgctgggatgtcgacgactgggacaatgagaacagctctgcgcggctttttg

SEQ ID NO: 207829 - DNA, 120 bp, Artificial Sequence
  ENSG00000115306_3 (sequence is synthesized)
agcggtcccgcatcaaggctctggcagatgagcgtgaagccgtgcagaagaagaccttcaccaagtgggtcaattcccaccttgcccgtgtgtcctgccggatcacagacctgtacactg

SEQ ID NO: 207830 - DNA, 120 bp, Artificial Sequence
  ENSG00000115306_4 (sequence is synthesized)
accttcgagatggacggatgctcatcaagctgctggaggtcctctctggagagaggctgcctaaacccaccaagggacgaatgcgcatccactgcttagagaatgtggacaaggcccttc

SEQ ID NO: 207831 - DNA, 120 bp, Artificial Sequence
  ENSG00000115306_5 (sequence is synthesized)
agttcctgaaggagcagagagtccatcttgagaacatggggtcccatgacatcgtggatggaaaccaccggctgacccttggcctcatctggaccatcatcctgcgcttccagatccagg

SEQ ID NO: 207832 - DNA, 120 bp, Artificial Sequence
  ENSG00000115306_6 (sequence is synthesized)
atatcagtgtggaaactgaagacaacaaagagaagaaatctgccaaggatgcattgctgttgtggtgccagatgaagacagctgggtaccccaatgtcaacattcacaatttcaccacta

SEQ ID NO: 207833 - DNA, 120 bp, Artificial Sequence
  ENSG00000115306_7 (sequence is synthesized)
gctggagggacggcatggccttcaatgcactgatacacaaacaccggcctgacctgatagattttgacaaactaaagaaatctaacgcacactacaacctgcagaatgcatttaatctgg

SEQ ID NO: 207834 - DNA, 120 bp, Artificial Sequence
  ENSG00000115306_8 (sequence is synthesized)
cagaacagcacctcggcctcactaaactgttggaccccgaagacatcagcgtggaccatcctgatgagaagtccataatcacttatgtggtgacttattaccactacttctctaagatga

SEQ ID NO: 207835 - DNA, 120 bp, Artificial Sequence
  ENSG00000115306_9 (sequence is synthesized)
aggccttagctgttgaaggaaaacgaattggaaaggtgcttgacaatgctattgaaacagaaaaaatgattgaaaagtatgaatcacttgcctctgaccttctggaatggattgaacaaa

SEQ ID NO: 207836 - DNA, 120 bp, Artificial Sequence
  ENSG00000115306_10 (sequence is synthesized)
ccatcatcattctgaacaatcgcaaatttgccaattcactggtcggggttcaacagcagcttcaggcattcaacacttaccgcactgtggagaaaccacccaaatttactgagaagggga

SEQ ID NO: 207837 - DNA, 120 bp, Artificial Sequence
  ENSG00000115306_11 (sequence is synthesized)
acttggaagtgctgctcttcaccattcagagcaagatgagggccaacaaccagaaggtctacatgccccgggaggggaagctcatctctgacatcaacaaggcctgggaaagactggaaa

SEQ ID NO: 207838 - DNA, 120 bp, Artificial Sequence
  ENSG00000115306_12 (sequence is synthesized)
aagcggaacacgaaagagaactggctttgcggaatgagctcataagacaggagaaactggaacagctcgcccgcagatttgatcgcaaggcagctatgagggagacttggctgagcgaaa

SEQ ID NO: 207839 - DNA, 120 bp, Artificial Sequence
  ENSG00000115306_13 (sequence is synthesized)
accagcgtctggtgtctcaggacaactttgggtttgaccttcctgcagttgaggccgccacaaaaaagcacgaggccattgagacagacattgccgcatacgaggagcgtgtgcaggctg

SEQ ID NO: 207840 - DNA, 120 bp, Artificial Sequence
  ENSG00000115306_14 (sequence is synthesized)
tggtagccgtggccagggagctcgaggccgagaattaccacgacatcaagcgcatcacagcgaggaaggacaatgtcatccggctctgggaatacctactggaactgctcagggcccgga

SEQ ID NO: 207841 - DNA, 120 bp, Artificial Sequence
  ENSG00000115306_15 (sequence is synthesized)
gacagcggctcgagatgaacctggggctgcagaagatattccaggaaatgctctacattatggactggatggatgaaatgaaggtgctagtattgtctcaagactatggcaaacacttac

SEQ ID NO: 207842 - DNA, 120 bp, Artificial Sequence
  ENSG00000115306_16 (sequence is synthesized)
ttggtgtggaagacctgttacagaagcacaccctggttgaagcagacattggcatccaggcagagcgggtgagaggtgtcaatgcctccgcccagaagttcgcaacagacggggaaggtt

SEQ ID NO: 207843 - DNA, 120 bp, Artificial Sequence
  ENSG00000115306_17 (sequence is synthesized)
acaagccctgtgacccccaggtgatccgagaccgcgtggcccacatggagttctgttatcaagagctttgccagctggcggctgagcgcagggcccgtctggaagagtcccgccgcctct

SEQ ID NO: 207844 - DNA, 120 bp, Artificial Sequence
  ENSG00000115306_18 (sequence is synthesized)
ggaagttcttctgggagatggcagaagaggaaggctggatacgggagaaggagaagatcctgtcctcggacgattacgggaaagacctgaccagcgtcatgcgcctgctcagcaagcacc

SEQ ID NO: 207845 - DNA, 120 bp, Artificial Sequence
  ENSG00000115306_19 (sequence is synthesized)
gggcgttcgaggacgagatgagcggccgcagtggccactttgagcaggccatcaaggaaggcgaagacatgatcgcggaggagcacttcgggtcggagaagatccgtgagaggatcattt

SEQ ID NO: 207846 - DNA, 120 bp, Artificial Sequence
  ENSG00000115306_20 (sequence is synthesized)
acatccgggagcagtgggccaacctagagcagctctcggccattcggaagaagcgcctggaggaggcctccctgctgcaccagttccaggcagatgctgatgacattgatgcctggatgc

SEQ ID NO: 207847 - DNA, 120 bp, Artificial Sequence
  ENSG00000115306_21 (sequence is synthesized)
tggacatcctcaagattgtctccagcagcgacgtgggccacgatgagtattccacacagtctctggtcaagaaacacaaggacgtggcggaagagatcgccaattacaggcccacccttg

SEQ ID NO: 207848 - DNA, 120 bp, Artificial Sequence
  ENSG00000115306_22 (sequence is synthesized)
acacgctgcacgaacaagccagcgccctcccccaggagcatgccgagtctccagacgtgaggggcaggctgtcgggcatcgaggagcggtataaggaggtggcagagctgacgcggctgc

SEQ ID NO: 207849 - DNA, 120 bp, Artificial Sequence
  ENSG00000115306_23 (sequence is synthesized)
ggaagcaggcactccaggacactctggccctgtacaagatgttcagcgaggctgatgcctgtgagctctggatcgacgagaaggagcagtggctcaacaacatgcagatcccagagaagc

SEQ ID NO: 207850 - DNA, 120 bp, Artificial Sequence
  ENSG00000115306_24 (sequence is synthesized)
tggaggatctggaggtcatccagcacagatttgagagcctagaaccagaaatgaacaaccaggcttcccgggttgcagtggtgaaccagattgcacgccagctgatgcacagcggccacc

SEQ ID NO: 207851 - DNA, 120 bp, Artificial Sequence
  ENSG00000115306_25 (sequence is synthesized)
caagtgagaaggaaatcaaagcccagcaggacaaactcaacacaaggtggagccagttcagagaactggttgacaggaagaaggatgccctcctgtctgccctgagcatccagaactacc

SEQ ID NO: 207852 - DNA, 120 bp, Artificial Sequence
  ENSG00000115306_26 (sequence is synthesized)
acctcgagtgcaatgaaaccaaatcctggattcgggaaaagaccaaggtcatcgagtccacccaggacctgggcaatgacctggctggcgtcatggccctgcagcgcaagctgaccggca

SEQ ID NO: 207853 - DNA, 120 bp, Artificial Sequence
  ENSG00000115306_27 (sequence is synthesized)
tggagcgggacttggtggccattgaggcaaagctgagtgacctgcagaaggaggcggagaagctggagtccgagcaccccgaccaggcccaggccatcctgtctcggctggccgagatca

SEQ ID NO: 207854 - DNA, 120 bp, Artificial Sequence
  ENSG00000115306_28 (sequence is synthesized)
gcgacgtgtgggaggagatgaagaccaccctgaaaaaccgagaggcctccctgggagaggccagcaagctgcagcagttcctacgggacttggacgacttccagtcctggctctctagga

SEQ ID NO: 207855 - DNA, 120 bp, Artificial Sequence
  ENSG00000115306_29 (sequence is synthesized)
cccagacagcgatcgcctcggaggacatgccaaacaccctgaccgaggctgagaagctgctcacgcagcacgagaacatcaagaacgagatcgacaactacgaggaggactaccagaaga

SEQ ID NO: 207856 - DNA, 120 bp, Artificial Sequence
  ENSG00000115306_30 (sequence is synthesized)
tgagggacatgggcgagatggtcacccaggggcagaccgatgcccagtacatgtttctgcggcagcggctgcaggccctggacactggatggaacgagctccacaagatgtgggagaaca

SEQ ID NO: 207857 - DNA, 120 bp, Artificial Sequence
  ENSG00000115306_31 (sequence is synthesized)
gacaaaatctcctatcccagtcacatgcctaccagcagttcctcagagacacgaagcaagccgaagcctttcttaacaaccaggagtatgttctggctcacactgaaatgcctaccacct

SEQ ID NO: 207858 - DNA, 120 bp, Artificial Sequence
  ENSG00000115306_32 (sequence is synthesized)
tggaaggagctgaagcagcaattaaaaagcaagaggacttcatgaccaccatggacgccaatgaggagaagatcaatgctgtggtggagactggccggaggctggtgagcgatgggaaca

SEQ ID NO: 207859 - DNA, 120 bp, Artificial Sequence
  ENSG00000115306_33 (sequence is synthesized)
tcaactcagatcgcatccaggagaaggtggactctattgatgacagacataggaagaatcgtgagacagccagtgaacttttgatgaggttgaaggacaacagggatctacagaaattcc

SEQ ID NO: 207860 - DNA, 120 bp, Artificial Sequence
  ENSG00000115306_34 (sequence is synthesized)
tgcaagattgtcaagagctgtctctctggatcaatgagaagatgctcacagcccaggacatgtcttacgatgaagccagaaatctgcacagtaaatggttgaagcatcaagcatttatgg

SEQ ID NO: 207861 - DNA, 120 bp, Artificial Sequence
  ENSG00000115306_35 (sequence is synthesized)
cagaacttgcatccaacaaagaatggcttgacaaaatcgagaaggaaggaatgcagctcatttcagaaaagcctgagacggaagctgtggtgaaggagaaactcactggtttacataaaa

SEQ ID NO: 207862 - DNA, 120 bp, Artificial Sequence
  ENSG00000115306_36 (sequence is synthesized)
tgtgggaagtccttgaatccactacccagacaaaggcccagcggctctttgatgcaaacaaggccgaacttttcacccagagctgtgcagatctagacaaatggctgcacggcctggaga

SEQ ID NO: 207863 - DNA, 120 bp, Artificial Sequence
  ENSG00000115306_37 (sequence is synthesized)
gtcagattcagtctgatgactatggcaaagacctgaccagtgtcaatatcctgctgaaaaagcaacagatgctggagaatcagatggaagtgcggaagaaggagatcgaagagctccaaa

SEQ ID NO: 207864 - DNA, 120 bp, Artificial Sequence
  ENSG00000115306_38 (sequence is synthesized)
gccaagcccaggccctgagtcaggaagggaagagcaccgacgaggtagacagcaagcgcctcaccgtgcagaccaagttcatggagttgctggagcccttgaacgagaggaagcataacc

SEQ ID NO: 207865 - DNA, 120 bp, Artificial Sequence
  ENSG00000115306_39 (sequence is synthesized)
tgctggcctccaaagagatccatcagttcaacagggatgtggaggacgagatcttgtgggttggagagaggatgcctttggcaacttccacggatcatggccacaacctccagactgtgc

SEQ ID NO: 207866 - DNA, 120 bp, Artificial Sequence
  ENSG00000115306_40 (sequence is synthesized)
agctgttaataaagaaaaatcagaccctccagaaagaaatccaggggcaccagcctcgcattgacgacatctttgagaggagccaaaacatcgtcactgacagcagcagcctcagcgctg

SEQ ID NO: 207867 - DNA, 120 bp, Artificial Sequence
  ENSG00000115306_41 (sequence is synthesized)
aggccatcagacagaggcttgccgacctgaagcagctgtggggtctcctcattgaggagacagagaaacgccacaggcggctggaggaggcgcacagggcccagcagtactactttgacg

SEQ ID NO: 207868 - DNA, 120 bp, Artificial Sequence
  ENSG00000115306_42 (sequence is synthesized)
gaagcctggatgagcgagcaggagctgtacatgatgtcagaggagaaggccaaggatgagcagagtgctgtctccatgttgaagaagcaccagatcttagaacaagctgtggaggactat

SEQ ID NO: 207869 - DNA, 120 bp, Artificial Sequence
  ENSG00000115306_43 (sequence is synthesized)
gcagagaccgtgcatcagctctccaagaccagccgggccctggtggccgacagccatcctgaaagtgagcgcattagcatgcggcagtccaaagtggataaactgtacgctggtctgaaa

SEQ ID NO: 207870 - DNA, 120 bp, Artificial Sequence
  ENSG00000115306_44 (sequence is synthesized)
gaccttgctgaagagagaagaggcaagctggatgagagacacaggttattccagctcaaccgggaggtggacgacctggagcagtggatcgctgagagggaggtggtcgcagggtcccat

SEQ ID NO: 207871 - DNA, 120 bp, Artificial Sequence
  ENSG00000115306_45 (sequence is synthesized)
gaactgggacaggactatgagcatgtcacgatgttacaagaacgattccgggagtttgcccgagacaccgggaacattgggcaggagcgcgtggacacggtcaatcacctggcagatgag

SEQ ID NO: 207872 - DNA, 120 bp, Artificial Sequence
  ENSG00000115306_46 (sequence is synthesized)
ctcatcaactctggacattcagatgccgccaccatcgctgaatggaaggatggcctcaatgaagcctgggccgacctcctggagctcattgacacaagaacacagattcttgccgcttcc

SEQ ID NO: 207873 - DNA, 120 bp, Artificial Sequence
  ENSG00000115306_47 (sequence is synthesized)
tatgaactgcacaagttttaccacgatgccaaggagatctttgggcgtatacaggacaaacacaagaaactccctgaggagcttgggagagatcagaacacagtggagaccttacagaga

SEQ ID NO: 207874 - DNA, 120 bp, Artificial Sequence
  ENSG00000115306_48 (sequence is synthesized)
atgcacactacatttgagcatgacatccaggctctgggcacacaggtgaggcagctgcaggaggatgcagcccgcctccaggcggcctatgcgggtgacaaggccgacgatatccagaag

SEQ ID NO: 207875 - DNA, 120 bp, Artificial Sequence
  ENSG00000115306_49 (sequence is synthesized)
cgcgagaacgaggtcctggaagcctggaagtccctcctggacgcctgtgagagccgcagggtgcggctggtggacacaggggacaagttccgcttcttcagcatggtgcgcgacctcatg

SEQ ID NO: 207876 - DNA, 120 bp, Artificial Sequence
  ENSG00000115306_50 (sequence is synthesized)
ctctggatggaggatgtcatccggcagatcgaggcccaggagaagccaagggatgtatcatctgttgaactcttaatgaataatcatcaaggcatcaaagctgaaattgatgcacgtaat

SEQ ID NO: 207877 - DNA, 120 bp, Artificial Sequence
  ENSG00000115306_51 (sequence is synthesized)
gacagtttcacaacctgcattgaacttgggaaatccctgttggcgagaaaacactatgcatctgaggagatcaaggaaaaattactgcagttgacggaaaagaggaaagaaatgatcgac

SEQ ID NO: 207878 - DNA, 120 bp, Artificial Sequence
  ENSG00000115306_52 (sequence is synthesized)
aagtgggaagaccgatgggaatggttaagactgattctggaggtccatcagttctcaagagacgccagtgtggccgaggcctggctgcttggacaggagccgtacctatccagccgagag

SEQ ID NO: 207879 - DNA, 120 bp, Artificial Sequence
  ENSG00000115306_53 (sequence is synthesized)
ataggccagagcgtggacgaggtggagaagctcatcaagcgccacgaggcatttgaaaagtctgcagcaacctgggatgagaggttctctgccctggaaaggctgactacattggagtta

SEQ ID NO: 207880 - DNA, 120 bp, Artificial Sequence
  ENSG00000115306_54 (sequence is synthesized)
ctggaagtgcgcagacagcaagaggaagaggagaggaagaggcggccgccttctcccgagccgagcacgaaggtttcagaggaagccgagtcccagcagcagtgggatacttcaaaagga

SEQ ID NO: 207881 - DNA, 120 bp, Artificial Sequence
  ENSG00000115306_55 (sequence is synthesized)
gaacaagtttcccaaaacggtttgccagctgaacagggatctccacggatggcagaaacggtggacacaagcgaaatggtcaacggcgctacagaacaaaggacgagctctaaagagtcc

SEQ ID NO: 207882 - DNA, 120 bp, Artificial Sequence
  ENSG00000115306_56 (sequence is synthesized)
agccccatcccctccccgacctctgatcgtaaagccaagactgccctcccagcccagagtgccgccaccttaccagccagaacccaggagacaccttcggcccagatggaaggcttcctc

SEQ ID NO: 207883 - DNA, 120 bp, Artificial Sequence
  ENSG00000115306_57 (sequence is synthesized)
aatcggaaacacgagtgggaggcccacaataagaaagcctcaagcaggtcctggcacaatgtttattgtgtcataaataaccaagaaatgggtttctacaaagatgcaaagactgctgct

SEQ ID NO: 207884 - DNA, 120 bp, Artificial Sequence
  ENSG00000115306_58 (sequence is synthesized)
tctggaattccctaccacagcgaggtccctgtgagtttgaaagaagctgtctgcgaagtggcccttgattacaaaaagaagaaacacgtattcaagctaagactaaatgatggcaatgag

SEQ ID NO: 207885 - DNA, 120 bp, Artificial Sequence
  ENSG00000115306_59 (sequence is synthesized)
tacctcttccaagccaaagacgatgaggaaatgaacacatggatccaggctatctcttccgccatctcctctgataaacacgaggtgtctgccagcacccagagcacgccagcatccagc

SEQ ID NO: 207886 - DNA, 120 bp, Artificial Sequence
  ENSG00000115306_60 (sequence is synthesized)
cgcgcgcagaccctccccaccagcgtcgtcaccatcaccagcgagtccagtcccggcaagcgggaaaaggacaaagagaaagacaaagagaagcggttcagcctttttggcaaaaagaaa

SEQ ID NO: 207887 - DNA, 120 bp, Artificial Sequence
  ENSG00000115306_61 (sequence is synthesized)
tgaactcctttccttcacctcctgcccttctcttaccttttcagtgaaattccagcatgcaagctcagaaccaacacattactctctgtgcctaatgttcctcaatgtggttgatttttt

SEQ ID NO: 207888 - DNA, 120 bp, Artificial Sequence
  ENSG00000115306_62 (sequence is synthesized)
tttttttttaatttatagagcatttcggggggggtgggggaaacacacctaaacactttatctccaagttacaaaagtttgaggtgcagagggaaggccagattttttttttaatgaaat

SEQ ID NO: 207889 - DNA, 120 bp, Artificial Sequence
  ENSG00000115306_63 (sequence is synthesized)
tatatagattagatctcagtatttaaactgttcctcaattttgtgaggctgtgttggaaataacccgcctctagtgctgttggtatgcaaggcagcggtgcttaatcaatatttcctgtg

SEQ ID NO: 207890 - DNA, 120 bp, Artificial Sequence
  ENSG00000115306_64 (sequence is synthesized)
ctcaccagaggcaaaatgtaccaatatcctgacaccattctctctccatttacttctggtggttaccctgactcttgactcttagaagtgcccgagatggggctaacctttattaaacag

SEQ ID NO: 207891 - DNA, 120 bp, Artificial Sequence
  ENSG00000115306_65 (sequence is synthesized)
atcgcatattatgatcttgctgcagccacagtgcagctccacattaactctacagaccaaaccatttgtatctggcatcacttactaacacacgacatgcggcttttctgcatcaactgc

SEQ ID NO: 207892 - DNA, 120 bp, Artificial Sequence
  ENSG00000115306_66 (sequence is synthesized)
tatgacggttaagaatgtcagtatacaagaaggaatagaaaactgatactgttttaaataatctgtaatttcaattttttttttttgctgaaatacattatattgtacgtttgagataat

SEQ ID NO: 207893 - DNA, 120 bp, Artificial Sequence
  ENSG00000115306_67 (sequence is synthesized)
tctagtacaaagtataataaaactagatgtataataaaccctttaaatcattggtaagtgtacaagtggtggaactgaagcatttactggacaaagtaatgttactctaatggttacttg

SEQ ID NO: 207894 - DNA, 120 bp, Artificial Sequence
  ENSG00000115306_68 (sequence is synthesized)
ctcgtgcgttgccacactgtgttataatttgcttcatttccttgctatttgatacatagtgtgcatttctctgtcactgtaactattgtaatgacaaattttcatcttactgcacaatca

SEQ ID NO: 207895 - DNA, 120 bp, Artificial Sequence
  ENSG00000115306_69 (sequence is synthesized)
aaatgacattgataggaatgaactccagaggctgggcctgaacagggaggtggtcgctcaggcctggtgctcagtcgtacgacctgtacctctcaacttttgccctatctgttaaatata

SEQ ID NO: 207896 - DNA, 120 bp, Artificial Sequence
  ENSG00000115306_70 (sequence is synthesized)
tgctatgtcattaaatgcttttaaatctagcacggtgactagttgttgttcttcctctgctgcgtgtgcatgcccagtagggaaactgcaaagggagaaatgacaaacaagaaacatttt

SEQ ID NO: 207897 - DNA, 120 bp, Artificial Sequence
  ENSG00000115306_71 (sequence is synthesized)
acaaccagtctgggctcacttttgcattttttatgcatgtctggtgcacaagctttgaaaactacagcaaacagtaataaatgtgactgttttgtagttatacattcaggctttatcttt

SEQ ID NO: 207898 - DNA, 120 bp, Artificial Sequence
  ENSG00000115306_72 (sequence is synthesized)
tatttatgaaaaagttaccagagcacttgtgaaacctgaactctgagataggggttggcaaatttgttctgtaaagggacagagatagtaaatattttaggctttgtaggccgtaactgt

SEQ ID NO: 207899 - DNA, 120 bp, Artificial Sequence
  ENSG00000115306_73 (sequence is synthesized)
ctctgttgctcaattctgctgttgcgtaatacaaaggcagccattgacggtatgtgaatgcctgggcatggctgtgttccagtaaaactatttaaggacataaatttgaatttcatataa

SEQ ID NO: 207900 - DNA, 120 bp, Artificial Sequence
  ENSG00000115306_74 (sequence is synthesized)
ctttgacatgccatacaatattttgattttcttaatgatttcaaaatgtaaagtctattttatacagatcagaccaaaaagaagaaaaaaaaaaaacaggcaagaggttaggtttggccc

SEQ ID NO: 207901 - DNA, 120 bp, Artificial Sequence
  ENSG00000115306_75 (sequence is synthesized)
atgggccatagtttgctgacttcagcatagagtcgtgggttatttacaagtgacatacttttcctgggttatctgggtatgttgactccatgccacttgcataaagcagcaatggatatt

SEQ ID NO: 207902 - DNA, 120 bp, Artificial Sequence
  ENSG00000115306_76 (sequence is synthesized)
agtattatggatgtccagtaagttattccacaaagaccatgcctaaggtggcatcagccctgggctccacagctgcgtggcatcaaagctttctcttaactctcttacctctaggcaaac

SEQ ID NO: 207903 - DNA, 120 bp, Artificial Sequence
  ENSG00000115306_77 (sequence is synthesized)
tgagacctcaccatcctctcccctgcttcccacgacagtcctttgcccttgccatgctcagggttggaatcaagttgttctattctcaacagaccaaaatgtttagttaaggcaaagtat

SEQ ID NO: 207904 - DNA, 120 bp, Artificial Sequence
  ENSG00000115306_78 (sequence is synthesized)
cttggaaacaattgtgattaattacagtcttgtactcttgacaaagctgtgcagatggcaataagttcataccagcaatcctggagtcccataataaatacgtacatgtggaacatcgtg

SEQ ID NO: 207905 - DNA, 120 bp, Artificial Sequence
  ENSG00000115306_79 (sequence is synthesized)
cacataatttcaacagttcgcagatctgtagttatgaagccagggtttggtggtatttgctctctcttggtgcatttgataaggatccactgaggcctgaatgtggaagatgatgggcag

SEQ ID NO: 207906 - DNA, 120 bp, Artificial Sequence
  ENSG00000115306_80 (sequence is synthesized)
cgagaggagcgtcagaagaccccagtcaagacgtgttcgccatcagaggttacaggccgcacagcctgatgagcttcaagcctggcagggtaaatagtttttgggttttttgtttttttt

SEQ ID NO: 207907 - DNA, 120 bp, Artificial Sequence
  ENSG00000115306_81 (sequence is synthesized)
ttattcttccactatcatgttttttgaggattttgcatatttcttgttgccataatgctgtgctattttaccctgattttcagtgatacaatatgggtgacaatactggcccctccataa

SEQ ID NO: 207908 - DNA, 120 bp, Artificial Sequence
  ENSG00000115306_82 (sequence is synthesized)
atctgaagagtaagaagtagtgaaaataaggcttaggatatgaaatggcgttgtcacttgaatcaaggccactttttgtcctacttgagcatctcaagttgggatgcatcttctgatggc

SEQ ID NO: 207909 - DNA, 120 bp, Artificial Sequence
  ENSG00000115306_83 (sequence is synthesized)
acttccggaactggctgtggtttttttgggtgtaccgagagtgccagtgactgtgcttcttacaattcctggcatcttgagtaggtgaaacactgtatcagactgggtgatgggcacatt

SEQ ID NO: 207910 - DNA, 120 bp, Artificial Sequence
  ENSG00000115306_84 (sequence is synthesized)
gtcatttcaccaagttcctggaactgttagaattgcttgtgtatggggatcctatgttagttcccctggatacattgttttatcagtcggaattcttaaataaagacatacttcccttca

SEQ ID NO: 207911 - DNA, 120 bp, Artificial Sequence
  ENSG00000115306_85 (sequence is synthesized)
ggtgtgcgcgctgcgcccgcgagctcccgggctcggcaaccgtggcatgcttaggattggccatatttaaaagttctgaagtagaacctgcgcctcctctctgcttctccctcctcctca

SEQ ID NO: 207912 - DNA, 120 bp, Artificial Sequence
  ENSG00000115306_86 (sequence is synthesized)
gtaatttatttcgagcttccaggcaagggccacggaagaagggaaagcaagaaattagatgcctgtgtggtaactcctcgcggagctaaggtggactctcttgcagccaacttcccatca

SEQ ID NO: 207913 - DNA, 120 bp, Artificial Sequence
  ENSG00000115306_87 (sequence is synthesized)
gatcaccctgctggacttgcagaccggaatggggctcgcctaaggagccgagcgctgcggaggctgctgcgtgttggatgggagtgggagggggctggagcgagatttccagggcgcagt

SEQ ID NO: 207914 - DNA, 120 bp, Artificial Sequence
  ENSG00000115306_88 (sequence is synthesized)
cctccggggcgttacgccgggcataatggaattgcagaggacgtctagtatctccgggccgctgtcgccggcgtacacggggcaggtgccttacaactacaaccagctggaaggcagatt

SEQ ID NO: 207915 - DNA, 120 bp, Artificial Sequence
  ENSG00000115306_89 (sequence is synthesized)
ctacaaaaactttaatagcagacggacagccagtgaccagccatggtctggactgtgaagttcactaccatttgtcaagaatcaccctttccaaatcctctgggttttgactttttggct

SEQ ID NO: 207916 - DNA, 120 bp, Artificial Sequence
  ENSG00000115306_90 (sequence is synthesized)
tccacttcacccaaaatgttaaaatttttacttaattcatagccttccttggtttcatatttgtttgcatttaattcatgtttgagtctcttaactgatggatgcccacttgccttaaag

SEQ ID NO: 207917 - DNA, 120 bp, Artificial Sequence
  ENSG00000115306_91 (sequence is synthesized)
cagcatacttattttttgtttatttattgtgagctttttactttattaagattttacagcgaaacccttacatgagtaattgaaatgaaattaaatgagattacagcataatgaagaaga

SEQ ID NO: 207918 - DNA, 120 bp, Artificial Sequence
  ENSG00000115306_92 (sequence is synthesized)
aaactagaatctaacaggtatgacacattcagttattctaacagggcacagtactgtgctatatgtagccgcctttacagatgttattaacctatagtagtttactattaactaggaaga

SEQ ID NO: 207919 - DNA, 120 bp, Artificial Sequence
  ENSG00000115306_93 (sequence is synthesized)
ctggtgtatgaggagggagacattctgtaataagattaaaacctaaagtcagctgtgtaacattccatgaaagatgcattcatttattgaagatgacaaaaaagggagtcagatatattc

SEQ ID NO: 207920 - DNA, 120 bp, Artificial Sequence
  ENSG00000115306_94 (sequence is synthesized)
tggaagctattttaattttaggcacacaatctcatacattttgagacccttgggtcatttattactttttacaaactagttcctctctttttttctgccaagtcctgaattgaaaactgt

SEQ ID NO: 207921 - DNA, 120 bp, Artificial Sequence
  ENSG00000115306_95 (sequence is synthesized)
aggcttccttgcacagatgttgcagccagcctcaggagtaaagtgcccgctgactgctgccgccacctctgtctcgctccctgtcagtgctgctggcacgtgggacgcggcaggtgacag

SEQ ID NO: 207922 - DNA, 120 bp, Artificial Sequence
  ENSG00000115306_96 (sequence is synthesized)
ccgttctcagcatgttttagaagcttgcctcacagacttccatgcctctccattcagccgatgacttcagggtgtcaaactgttttaatttttcaaacaaatggaacagaagccattgtg

SEQ ID NO: 207923 - DNA, 120 bp, Artificial Sequence
  ENSG00000115306_97 (sequence is synthesized)
gttcatcctgattacttgaacgttgcacttggtggaccgtgcctgggagcgctcgcatgccccctggcttcagaagtcatgtcagtgtctctgtagacaaactccactgtacatcttgga

SEQ ID NO: 207924 - DNA, 120 bp, Artificial Sequence
  ENSG00000115306_98 (sequence is synthesized)
ttaatcttctgattcattgttcattttctcaagactttttgtggaattctctgataaaggaagcttttaggatggtatctatcaggccaccagcaggaattgaaaatgttttcacaaaaa

SEQ ID NO: 207925 - DNA, 120 bp, Artificial Sequence
  ENSG00000115306_99 (sequence is synthesized)
tccttttccttagaaataaaagctggtgacagagatggtttccttgtaccgataaaaacaaaaccaaatccatattatacatcaaaaccttgtgagacattcacttgctcttttgccata

SEQ ID NO: 207926 - DNA, 120 bp, Artificial Sequence
  ENSG00000115306_100 (sequence is synthesized)
tttagatgtgtcagtggaatcagaaacctgttttgatatgtgttctctatgagttaagtctgatttgtctttttatttcatgatgcatgtcttttttttcttttgtcaggataacgtcat

SEQ ID NO: 207927 - DNA, 120 bp, Artificial Sequence
  ENSG00000115306_101 (sequence is synthesized)
atagcatcttgtttgtttttccttatctctatgtacatatctatctacttctgactgtagatgggtatatagatagatgccaagcttcttatgttctgggggtagtatgcatcattattg

SEQ ID NO: 207928 - DNA, 120 bp, Artificial Sequence
  ENSG00000115306_102 (sequence is synthesized)
ggtctctgccttaaaacacatcaaaattcattttagacaaaaaaacttctgctttgtctttggtcattagggagctctaatgtgtgtttgtggctccaagttacattttgtgtttcattg

SEQ ID NO: 207929 - DNA, 120 bp, Artificial Sequence
  ENSG00000115306_103 (sequence is synthesized)
atctatatgtatatatgtgatgttttcatatatatatgtgtgtgtgtttaaattttgtatcatcaggactgacacccaatttgacactttttgtatctagaagaccctccaaaaaaggaa

SEQ ID NO: 207930 - DNA, 120 bp, Artificial Sequence
  ENSG00000115306_104 (sequence is synthesized)
ccacataagcacacaagaaaagagtgctatgatgttcttagcatttgctatcatgcctatttttatctagatttttaaatgtagcttgtcataacaaaattttaattacaattggcttgt

SEQ ID NO: 207931 - DNA, 120 bp, Artificial Sequence
  ENSG00000115306_105 (sequence is synthesized)
atgagaagaaaaagtatttttattgttttgagtgatgacgcagagactcagtgaacttgaaaatagcattgcttcgtgcactttgaataccaatcaggtgttttctgtgctactagttgt

SEQ ID NO: 207932 - DNA, 120 bp, Artificial Sequence
  ENSG00000115306_106 (sequence is synthesized)
cacgttgcattcatgttcacctcctgatttaagtatctcgggtgtgcccagccactaaagcactctggactaatcgctaaagagaagcaacgtggggggtggggttgcgagggatgtgtt

SEQ ID NO: 207933 - DNA, 120 bp, Artificial Sequence
  ENSG00000115306_107 (sequence is synthesized)
cacatgtacccatcatttgatcatagcactgtgattgcttttgatgtgtgtctctagtggtgtgctgtctgttggcatgcttaaagcacatgtccattaaaattcattttgttcctttta

SEQ ID NO: 207934 - DNA, 120 bp, Artificial Sequence
  ENSG00000115306_108 (sequence is synthesized)
ttttacagacactgctgcagtaaataatctatgcatatttcgtatcctaaatatgcaagaatgtatatgtaggatcaattccccaaagtaggatcataaaatcagaaggtaccacattta

SEQ ID NO: 207935 - DNA, 120 bp, Artificial Sequence
  ENSG00000115306_109 (sequence is synthesized)
taattttcatgggtactgcccatttaccttctgtaggagctgtagtctgttacactcctgtctacagagaatgagctcactgacaaatatatcatcacacttggatttttgccaactaat

SEQ ID NO: 207936 - DNA, 120 bp, Artificial Sequence
  ENSG00000115306_110 (sequence is synthesized)
agatgacacattacagtatctccatgaagcatcttttcatgtttaagacccatttgcatttcctgctttctgaatgttttcttcatgccagtttctgtgttggtttgttggtttttttct

SEQ ID NO: 207937 - DNA, 120 bp, Artificial Sequence
  ENSG00000115306_111 (sequence is synthesized)
tttctttctttctttctttctttcttttatttatgactgtcatagctgaaaaagataactcaaccaaaatatgtagatgtaagtagaagtgtaccattggctccatttaccaaatcacaa

SEQ ID NO: 207938 - DNA, 120 bp, Artificial Sequence
  ENSG00000115306_112 (sequence is synthesized)
ttctcaatgtatatttttagttttgcaaggtttttgttgaaatttggctatttcaagtttcaccttctttaacgttaattagttattttaaccacatagggtgccacgtttttatacttt

SEQ ID NO: 207939 - DNA, 120 bp, Artificial Sequence
  ENSG00000115306_113 (sequence is synthesized)
ttgagtgtaaatgtcccacggtgagaactcttacaggcgatacatacattgtattcacatagcaatgagaagtcattttcaaaatgtgctcttcatggcagtttcccattcatcataaaa

SEQ ID NO: 207940 - DNA, 120 bp, Artificial Sequence
  ENSG00000115306_114 (sequence is synthesized)
acatttatctttaccccgagatagcagattaggtatttattttttggactgtatctgaatatgtcccactcagatatcccaggctgcctccaggggactttccctgactaaactctcctg

SEQ ID NO: 207941 - DNA, 120 bp, Artificial Sequence
  ENSG00000115306_115 (sequence is synthesized)
cctgtcttcctgtagcatttcatttgttttatcattcataaagaacttaataatgtagttgaacagatttatagaaaacgggtttttgtgacttggatctccccagtgaaattgagggct

SEQ ID NO: 207942 - DNA, 120 bp, Artificial Sequence
  ENSG00000115306_116 (sequence is synthesized)
ccttaaggggcatgggccatattttgactctgtgctccctttagtgtatgagcagaacagaatagggcttggggtgatggtgggaaggccgccatgggctgacctggctcatcccctaca

SEQ ID NO: 207943 - DNA, 120 bp, Artificial Sequence
  ENSG00000115306_117 (sequence is synthesized)
aagtcttttttcctaataatccattttccacattgccatgagggtaaagggttccaatcaaaaccaccattaaactgcatagtttctagtcttccctcagccctgatgctaattatgata

SEQ ID NO: 207944 - DNA, 120 bp, Artificial Sequence
  ENSG00000115306_118 (sequence is synthesized)
gtttgcatagacataacttaaacttgtgattctccctccttccagagctttttgtagccctttttccccccaaaattagttttgttcaaaatcaagcattgggcccagccattaagataa

SEQ ID NO: 207945 - DNA, 120 bp, Artificial Sequence
  ENSG00000115306_119 (sequence is synthesized)
gacctaataagtgagagatacagttcccaagagtttacagatccaggtgttcacatggtggtggccagtctaccgtttatcttgtcaaggttgttactgctaatttggtgtcactttggt

SEQ ID NO: 207946 - DNA, 120 bp, Artificial Sequence
  ENSG00000115306_120 (sequence is synthesized)
cttgggcagcagtggtgggcgacgtatctaatgagcgtgccattgacttctccatgtttgtctgtgtacgaggggtgcaggttgtctgtaatccactaaagtgtcagccacacccagctt

SEQ ID NO: 207947 - DNA, 120 bp, Artificial Sequence
  ENSG00000115306_121 (sequence is synthesized)
tagtaactcgctaatcgcacaccctgggtgtatcagccaggggctgctacagttaatggtacacagttgatggtacacaggctgaaaatgataatgaatcaagaccctactacatttcca

SEQ ID NO: 207948 - DNA, 120 bp, Artificial Sequence
  ENSG00000115306_122 (sequence is synthesized)
aagccgaaaagccatgagggttacaatttaaatgagcttgggaaggaacgctcccgaagacgtctccagcctgaagggtcagagccgctggaagcctggctgtctctgggctttctcgtc

SEQ ID NO: 207949 - DNA, 120 bp, Artificial Sequence
  ENSG00000115306_123 (sequence is synthesized)
tcagtgcagcaaggcaccgtgatcaaccaacccgtgatggggaaggccctggttctgtctttgtttgggggtaaatagctgtgtggtgttgagtgactgtgattggcttttccagctcct

SEQ ID NO: 207950 - DNA, 120 bp, Artificial Sequence
  ENSG00000115306_124 (sequence is synthesized)
ttaacacaaactacaacccactcacgatacaacttcggcagatgtggtcaaattgatgtttgttgacttgcctcatttccttccagctcttaagttccaaagtctaactgggatggtaga

SEQ ID NO: 207951 - DNA, 120 bp, Artificial Sequence
  ENSG00000115306_125 (sequence is synthesized)
tgtgaaatgcatgattgtcgtcctaatttctgcatgtgtttatgacaatgtgttgaggggagggggaggagagccagagagcattttcaggaaccgaggtctttccttgtcttactctgg

SEQ ID NO: 207952 - DNA, 120 bp, Artificial Sequence
  ENSG00000115306_126 (sequence is synthesized)
gggaatgccatgtagctctgatagagttgtctatcggtctgtttgtgaatgccctttcgcttaaacttccagcccttctggtggcatccttggttgtaaggtggctgctgtataacgtcc

SEQ ID NO: 207953 - DNA, 120 bp, Artificial Sequence
  ENSG00000115306_127 (sequence is synthesized)
actctctttcatatttaatatgtgtgattgttactgttgtctttttgttttaaagtaaccataagaggagatgatctgagttatatttattgatcagaggaatagagtgcagtaaaactc

SEQ ID NO: 207954 - DNA, 120 bp, Artificial Sequence
  ENSG00000115306_128 (sequence is synthesized)
atactggcatttcgcttttctcatttccctgtaaatgggcgggtattaatccattcccaccttctaatgtccttgatgtccagctggctttgtgggtgtgcaatggttttactgtactgc

SEQ ID NO: 207955 - DNA, 120 bp, Artificial Sequence
  ENSG00000115306_129 (sequence is synthesized)
ctcgatctgtgccaggcatttatacacagccacatgtgcgagtcaggtagagcgtatgtggtcacccccatggctcacggagttagctgaatggcctctccgctgtccctagatggcaga

SEQ ID NO: 207956 - DNA, 90 bp, Artificial Sequence
  ENSG00000115306_130 (sequence is synthesized)
ccctcgcccagtgtgaccctttttttcctcctaattgcccacccatgaaattttcatgccatagatacattatatatctatgctaatatg

SEQ ID NO: 207957 - DNA, 120 bp, Artificial Sequence
  ENSG00000115306_131 (sequence is synthesized)
ttttcatgccatagatacattatatatctatgctaatatgaaaaagaatacaattttttgcctcatccccaaaatgaattttcattccttgtgggggcaatatcacccccattgtgtatg

SEQ ID NO: 207958 - DNA, 120 bp, Artificial Sequence
  ENSG00000115306_132 (sequence is synthesized)
tacaaggagacctggctgggtgggtaactggcctaggcgtaattagactttgatgcaggtcattcatttccttatttatttaagagccttgagtctttttgatatttttctgacatagac

SEQ ID NO: 207959 - DNA, 120 bp, Artificial Sequence
  ENSG00000115306_133 (sequence is synthesized)
cactattaaagggttcttgccttagagggtaggccaatttgttcatttaaagcatgggctttggagtcatacccacttggttcaagtcctcttggtttcttcatttttttcctgtgccac

SEQ ID NO: 207960 - DNA, 120 bp, Artificial Sequence
  ENSG00000115306_134 (sequence is synthesized)
caccagcaaaactttagtttattcacctgtaaaatagggctaataatagtatctacttcaaaaggttgctgaggaggatggaatgagaaagcaaataaagcaccgcaccccagaaagaaa

SEQ ID NO: 207961 - DNA, 120 bp, Artificial Sequence
  ENSG00000115306_135 (sequence is synthesized)
gatgccccttaaaatcatccaccctgttcccatgacgctgtcatgttcgaaggttgtctcacttctatttaaatgtgtccttgagagccagctgaccattttataaggtagtcagttcca

SEQ ID NO: 207962 - DNA, 120 bp, Artificial Sequence
  ENSG00000115306_136 (sequence is synthesized)
tatttggagagctgtcaactctaatggccaaaattattcagagcacagagtgttatttatagcaattcaagaacagctgccctaagtttgtaagaattcttttatttttgacaaatctta

SEQ ID NO: 207963 - DNA, 120 bp, Artificial Sequence
  ENSG00000115306_137 (sequence is synthesized)
cattccaaaatatcaaagcatactattccttatactcaaaaatatacaaattaacctgtgtacttagtgcctgtgatacattaactggcctgacctgtaccaagatgggttagtattaca

SEQ ID NO: 207964 - DNA, 120 bp, Artificial Sequence
  ENSG00000115306_138 (sequence is synthesized)
cgcaaggattttacatctgaaaagcaaaagctgaatctggtaaaggcacatttaatacagtaacgagtaagtttgccattggtccattagttcgtggaacatgtccttactttgtgattt

SEQ ID NO: 207965 - DNA, 120 bp, Artificial Sequence
  ENSG00000115306_139 (sequence is synthesized)
ctcattcccttgttgctggtgaacacctagagcacactttctccatggccccagtgagggtgaggagtgttttaccctaaaattgccctgaaaatcaggaaagcgttctgtggctctgaa

SEQ ID NO: 207966 - DNA, 120 bp, Artificial Sequence
  ENSG00000115306_140 (sequence is synthesized)
atctgtactttgagatttcaaatgaaatttcagatgaagtttattccaaatgatttttttctaatgtctttaattgtgacaagtaaatcaaagtcatgacttgagaagttaagtttactg

SEQ ID NO: 207967 - DNA, 120 bp, Artificial Sequence
  ENSG00000115306_141 (sequence is synthesized)
ttaattctaactacataactcacatttttgttgcctttatagtggaatctgattatgaagcatgcatcatttagagtcatcttgattgtggacaaaggaaacctaacccagagtggttta

SEQ ID NO: 207968 - DNA, 120 bp, Artificial Sequence
  ENSG00000115306_142 (sequence is synthesized)
agtgacaaagaggatttattggtcacacagtaggcaaattcagtctttaagcaagacttactcctggacttaaatggtgtgaccaggatctagtttctttctctctactctggctttatt

SEQ ID NO: 207969 - DNA, 120 bp, Artificial Sequence
  ENSG00000115306_143 (sequence is synthesized)
ttctagtgcaggctctgttcacaagcaggctccatcctgtagtcccaagatggctgccccaggtccctggcccccttggactatggacatccagcagaaaagaggatgcttttctgctta

SEQ ID NO: 207970 - DNA, 120 bp, Artificial Sequence
  ENSG00000115306_144 (sequence is synthesized)
ccatggcccggatatatcagtctcactggcgtgattgatcatgacttggatcatgtgcttctcccgctggtgttggagaatctcatgtgctgttaacttctaaacaggatgcacccctta

SEQ ID NO: 207971 - DNA, 120 bp, Artificial Sequence
  ENSG00000115306_145 (sequence is synthesized)
gagtgaaagtttggtcagtctcaaccaaacaagttggctagaaagattggaatataacagaaaagaggaagaggagaatggatgttgggggtacagctaacaatgtactacagaaaaact

SEQ ID NO: 207972 - DNA, 120 bp, Artificial Sequence
  ENSG00000115306_146 (sequence is synthesized)
attcagctgctttaggataatttgtctcttgagtggtgttgatttaaagatctttcttgagctggcctgaatgaatgattaatcagtcactctagaattggggcttcattatcattcatt

SEQ ID NO: 207973 - DNA, 120 bp, Artificial Sequence
  ENSG00000115306_147 (sequence is synthesized)
aacatggaactctatggagatcatgaccctggcttgtgctagtaaagtgatttgtattttaatctctcacctctttttcttgtattttcatttgagtctttaggccagtatgctagtgat

SEQ ID NO: 207974 - DNA, 120 bp, Artificial Sequence
  ENSG00000115306_148 (sequence is synthesized)
ggccagttacctttgatcttgagtcttactttctgattccaggctatgtattatctcctttctaaaggaccattttgtttgcaaactacagaacagttccttgttctttgcatgtggtct

SEQ ID NO: 207975 - DNA, 120 bp, Artificial Sequence
  ENSG00000115306_149 (sequence is synthesized)
ttcctacagtttgagaggagagcctccagctgtccttagtatccatcatttgtcttaacctttctaggatgtttacctaggtccctcagtaactgtagtcataataatagcaagcactca

SEQ ID NO: 207976 - DNA, 120 bp, Artificial Sequence
  ENSG00000115306_150 (sequence is synthesized)
atatagtacttatactgtgtgccaggcactgtgggaaatgccggcatatattaacagttaatcccataacaatcatatgagagagattattactgtctacattgtatagatgataaaaca

SEQ ID NO: 207977 - DNA, 120 bp, Artificial Sequence
  ENSG00000115306_151 (sequence is synthesized)
ggttccagagagattaagaagcttgcccaagggcttactgctgctaagtggctgaaggcatactaactctgcagtgtatactctttttcagtattcagtaaagtaaaaaaaaaaaaaaaa

SEQ ID NO: 207978 - DNA, 120 bp, Artificial Sequence
  ENSG00000115307_0 (sequence is synthesized)
gccttcccaagagcccctgcggccgggcgcgaaaatggcggcggcggcgacggccgggcgctcctgaagcagcagttatggagcttccctcagggccggggccggagcggctctttgact

SEQ ID NO: 207979 - DNA, 120 bp, Artificial Sequence
  ENSG00000115307_1 (sequence is synthesized)
cgcaccggcttccgggtgactgcttcctactgctcgtgctgctgctctacgcgccagtcgggttctgcctcctcgtcctgcgcctctttctcgggatccacgtcttcctggtcagctgcg

SEQ ID NO: 207980 - DNA, 120 bp, Artificial Sequence
  ENSG00000115307_2 (sequence is synthesized)
cgctgccagacagcgtccttcgcagattcgtagtgcggaccatgtgtgcggtgctagggctcgtggcccggcaggaggactccggactccgggatcacagtgtcagggtcctcatttcca

SEQ ID NO: 207981 - DNA, 120 bp, Artificial Sequence
  ENSG00000115307_3 (sequence is synthesized)
accatgtgacacctttcgaccacaacatagtcaatttgcttaccacctgtagcacccctctactcaatagtccccccagctttgtgtgctggtctcggggcttcatggagatgaatgggc

SEQ ID NO: 207982 - DNA, 120 bp, Artificial Sequence
  ENSG00000115307_4 (sequence is synthesized)
ggggggagttggtggagtcactcaagagattctgtgcttccacgaggcttccccccactcctctgctgctattccctgaggaagaggccaccaatggccgggaggggctcctgcgcttca

SEQ ID NO: 207983 - DNA, 120 bp, Artificial Sequence
  ENSG00000115307_5 (sequence is synthesized)
gttcctggccattttctatccaagatgtggtacaacctcttaccctgcaagttcagagacccctggtctctgtgacggtgtcagatgcctcctgggtctcagaactgctgtggtcacttt

SEQ ID NO: 207984 - DNA, 120 bp, Artificial Sequence
  ENSG00000115307_6 (sequence is synthesized)
atcaagtaaggtggcttcgtcctgttcatcgccaactaggggaagcgaatgaggagtttgcactccgtgtacaacagctggtggccaaggaattgggccagacagggacacggctcactc

SEQ ID NO: 207985 - DNA, 120 bp, Artificial Sequence
  ENSG00000115307_7 (sequence is synthesized)
cagctgacaaagcagagcacatgaagcgacaaagacaccccagattgcgcccccagtcagcccagtcttctttccctccctcccctggtccttctcctgatgtgcaactggcaactctgg

SEQ ID NO: 207986 - DNA, 120 bp, Artificial Sequence
  ENSG00000115307_8 (sequence is synthesized)
ctcagagagtcaaggaagttttgccccatgtgccattgggtgtcatccagagagacctggccaagactggctgtgtagacttgactatcactaatctgcttgagggggccgtagctttca

SEQ ID NO: 207987 - DNA, 120 bp, Artificial Sequence
  ENSG00000115307_9 (sequence is synthesized)
tgcctgaagacatcaccaagggaactcagtccctacccacagcctctgcctccaagtttcccagctctggcccggtgacccctcagccaacagccctaacatttgccaagtcttcctggg

SEQ ID NO: 207988 - DNA, 120 bp, Artificial Sequence
  ENSG00000115307_10 (sequence is synthesized)
cccggcaggagagcctgcaggagcgcaagcaagcactatatgaatacgcaagaaggagattcacagagagacgagcccaggaggctgactgagctcaaaggaacaggatggcacccagag

SEQ ID NO: 207989 - DNA, 120 bp, Artificial Sequence
  ENSG00000115307_11 (sequence is synthesized)
ccgcaggacggagactgggggcagccctcacccaactcacaacaggctggatgggtgggtggtaaaaagggaaggatgaggctcccccaatgtcacattaaattcatggttttcattcaa

SEQ ID NO: 207990 - DNA, 120 bp, Artificial Sequence
  ENSG00000115307_12 (sequence is synthesized)
acaacatagtcaatttgcttaccacctgtagcaccgtgagtgagagcgaggccgagagcgccacggggcggttccctggggcccagctgaaggcccccctgtccccactcgcgttcccca

SEQ ID NO: 207991 - DNA, 120 bp, Artificial Sequence
  ENSG00000115307_13 (sequence is synthesized)
tggaggatactgagccttacccctaaccccgatcctctacccaacatgtcagttttttttttcattttcctcaatatttttcttcttgctttctcttctcctggttcccagcctctactc

SEQ ID NO: 207992 - DNA, 120 bp, Artificial Sequence
  ENSG00000115307_14 (sequence is synthesized)
tcagtccctacccacagcctctgcctccaaggcattcgatgcgtgtttaatgatgatgactccgcaagccctctgacattgtgatcacctcagtttcccagctctggcccggtgacccct

SEQ ID NO: 207993 - DNA, 120 bp, Artificial Sequence
  ENSG00000115307_15 (sequence is synthesized)
gagaggctcacctcaaggtcaaggaattagtggcctctgccctgtccatttgtagatctttatatcaaggttctaccacagaggcaacacaaagtatttacagtatttactattttccca

SEQ ID NO: 207994 - DNA, 120 bp, Artificial Sequence
  ENSG00000115307_16 (sequence is synthesized)
cccaccatgcaaagaggtaccaaagtggggaatggtgacagcctctaccctgggtgcccacaacatagccctggattgtttctttgcaggtggcttcgtcctgttcatcgccaactaggg

SEQ ID NO: 207995 - DNA, 120 bp, Artificial Sequence
  ENSG00000115307_17 (sequence is synthesized)
gaagcgaatgaggagtttgcactccgtgtacaacaggtggtcgggtgcacagacagggtggaggcggggtccctgcttaggaggagagggaggaaagcttgagatcttgacacttccagt

SEQ ID NO: 207996 - DNA, 120 bp, Artificial Sequence
  ENSG00000115310_0 (sequence is synthesized)
tcttttggtagcctgccctctccctgcaaatgcagctccatttggtatgagcaacaaggcaaatgcctaaaacaatcaacagatagaaggaaagcattaatgctggagtattagtagcct

SEQ ID NO: 207997 - DNA, 120 bp, Artificial Sequence
  ENSG00000115310_1 (sequence is synthesized)
agttacagattgcactgcgtcagactgttccacacccagaagacgtcaggtgacttcagtcctgctgcagttgtgcagcagaggagactgcagacttcggttgaggaaacgggtatttca

SEQ ID NO: 207998 - DNA, 120 bp, Artificial Sequence
  ENSG00000115310_2 (sequence is synthesized)
tgtctcagggagtaggtttgtgcagttacagcttttctgttggtatgcataattaataattggagctgcaaagcagatcgtgacaagagatggacggtcagaagaaaaattggaaggaca

SEQ ID NO: 207999 - DNA, 120 bp, Artificial Sequence
  ENSG00000115310_3 (sequence is synthesized)
aggttgttgacctcctgtactggagagacattaagaagactggagtggtgtttggtgccagcctattcctgctgctttcattgacagtattcagcattgtgagcgtaacagcctacattg

SEQ ID NO: 208000 - DNA, 120 bp, Artificial Sequence
  ENSG00000115310_4 (sequence is synthesized)
ccttggccctgctctctgtgaccatcagctttaggatatacaagggtgtgatccaagctatccagaaatcagatgaaggccacccattcagggcatatctggaatctgaagttgctatat

SEQ ID NO: 208001 - DNA, 120 bp, Artificial Sequence
  ENSG00000115310_5 (sequence is synthesized)
ctgaggagttggttcagaagtacagtaattctgctcttggtcatgtgaactgcacgataaaggaactcaggcgcctcttcttagttgatgatttagttgattctctgaagtttgcagtgt

SEQ ID NO: 208002 - DNA, 120 bp, Artificial Sequence
  ENSG00000115310_6 (sequence is synthesized)
tgatgtgggtatttacctatgttggtgccttgtttaatggtctgacactactgattttggctctcatttcactcttcagtgttcctgttatttatgaacggcatcaggcacagatagatc

SEQ ID NO: 208003 - DNA, 120 bp, Artificial Sequence
  ENSG00000115310_7 (sequence is synthesized)
aaataattagtaggagttcatctttaaaggggatattcatttgattatacgggggagggtcagggaagaacgaaccttgacgttgcagtgcagtttcacagatcgttgttagatctttat

SEQ ID NO: 208004 - DNA, 120 bp, Artificial Sequence
  ENSG00000115310_8 (sequence is synthesized)
ttttagccatgcactgttgtgaggaaaaattacctgtcttgactgccatgtgttcatcatcttaagtattgtaagctgctatgtatggatttaaaccgtaatcatatctttttcctatct

SEQ ID NO: 208005 - DNA, 120 bp, Artificial Sequence
  ENSG00000115310_9 (sequence is synthesized)
atctgaggcactggtggaataaaaaacctgtatattttactttgttgcagatagtcttgccgcatcttggcaagttgcagagatggtggagctagaaaaaaaaaaaaaaaagcccttttc

SEQ ID NO: 208006 - DNA, 120 bp, Artificial Sequence
  ENSG00000115310_10 (sequence is synthesized)
agtttgtgcactgtgtatggtccgtgtagattgatgcagattttctgaaatgaaatgtttgtttagacgagatcataccggtaaagcaggaatgacaaagcttgcttttctggtatgttc

SEQ ID NO: 208007 - DNA, 120 bp, Artificial Sequence
  ENSG00000115310_11 (sequence is synthesized)
taggtgtattgtgacttttactgttatattaattgccaatataagtaaatatagattatatatgtatagtgtttcacaaagcttagacctttaccttccagccaccccacagtgcttgat

SEQ ID NO: 208008 - DNA, 120 bp, Artificial Sequence
  ENSG00000115310_12 (sequence is synthesized)
atttcagagtcagtcattggttatacatgtgtagttccaaagcacataagctagaagaagaaatatttctaggagcactaccatctgttttcaacatgaaatgccacacacatagaactc

SEQ ID NO: 208009 - DNA, 120 bp, Artificial Sequence
  ENSG00000115310_13 (sequence is synthesized)
caacatcaatttcattgcacagactgactgtagttaattttgtcacagaatctatggactgaatctaatgcttccaaaaatgttgtttgtttgcaaatatcaaacattgttatgcaagaa

SEQ ID NO: 208010 - DNA, 120 bp, Artificial Sequence
  ENSG00000115310_14 (sequence is synthesized)
attattaattacaaaatgaagatttataccattgtggtttaagctgtactgaactaaatctgtggaatgcattgtgaactgtaaaagcaaagtatcaataaagcttatagacttaaaata

SEQ ID NO: 208011 - DNA, 120 bp, Artificial Sequence
  ENSG00000115310_15 (sequence is synthesized)
acagcagatgcatccagagatccttatgtttttattcattcattaggaacactgcttggttatcttgagttgccagtttaatagttttttgagtgtttattcctcccaaatcattccgtt

SEQ ID NO: 208012 - DNA, 120 bp, Artificial Sequence
  ENSG00000115310_16 (sequence is synthesized)
ctttttgaaaagttgtatatttcccttttcagctctcatttcactcttcagtgttcctgttatttatgaacggcatcaggtaatttcctaactaactgctgacttcagaatagagcactc

SEQ ID NO: 208013 - DNA, 120 bp, Artificial Sequence
  ENSG00000115310_17 (sequence is synthesized)
actctattacatgggatttacggatgtattagtgcccattttcaatgtcttacaaaaatgagaagtgtgatggtttcttaagcctttagcttgacacatagtagtggttaataagattct

SEQ ID NO: 208014 - DNA, 120 bp, Artificial Sequence
  ENSG00000115310_18 (sequence is synthesized)
ctcctcctgtgctcgtggggagctggccgagtggaaaacgtccacattgacccaaccgcagtgaagggagagcgcctccagtggtgtggtgcgtggagaaatgggaaggagagagttctg

SEQ ID NO: 208015 - DNA, 120 bp, Artificial Sequence
  ENSG00000115310_19 (sequence is synthesized)
atgagaccctttttgctcttcctgctgcatctgagcctgtgatacgctcctctgcagaaaatatggacttgaaggagcagccaggtaacactatttcggctggtcaagaggatttcccat

SEQ ID NO: 208016 - DNA, 120 bp, Artificial Sequence
  ENSG00000115310_20 (sequence is synthesized)
ctgtcctgcttgaaactgctgcttctcttccttctctgtctcctctctcagccgcttctttcaaagaacatgaataccttggtaatttgtcaacagtattacccactgaaggaacacttc

SEQ ID NO: 208017 - DNA, 120 bp, Artificial Sequence
  ENSG00000115310_21 (sequence is synthesized)
aagaaaatgtcagtgaagcttctaaagaggtctcagagaaggcaaaaactctactcatagatagagatttaacagagttttcagaattagaatactcagaaatgggatcatcgttcagtg

SEQ ID NO: 208018 - DNA, 120 bp, Artificial Sequence
  ENSG00000115310_22 (sequence is synthesized)
tctctccaaaagcagaatctgccgtaatagtagcaaatcctagggaagaaataatcgtgaaaaataaagatgaagaagagaagttagttagtaataacatccttcataatcaacaagagt

SEQ ID NO: 208019 - DNA, 120 bp, Artificial Sequence
  ENSG00000115310_23 (sequence is synthesized)
tacctacagctcttactaaattggttaaagaggatgaagttgtgtcttcagaaaaagcaaaagacagttttaatgaaaagagagttgcagtggaagctcctatgagggaggaatatgcag

SEQ ID NO: 208020 - DNA, 120 bp, Artificial Sequence
  ENSG00000115310_24 (sequence is synthesized)
acttcaaaccatttgagcgagtatgggaagtgaaagatagtaaggaagatagtgatatgttggctgctggaggtaaaatcgagagcaacttggaaagtaaagtggataaaaaatgttttg

SEQ ID NO: 208021 - DNA, 120 bp, Artificial Sequence
  ENSG00000115310_25 (sequence is synthesized)
cagatagccttgagcaaactaatcacgaaaaagatagtgagagtagtaatgatgatacttctttccccagtacgccagaaggtataaaggatcgttcaggagcatatatcacatgtgctc

SEQ ID NO: 208022 - DNA, 120 bp, Artificial Sequence
  ENSG00000115310_26 (sequence is synthesized)
cctttaacccagcagcaactgagagcattgcaacaaacatttttcctttgttaggagatcctacttcagaaaataagaccgatgaaaaaaaaatagaagaaaagaaggcccaaatagtaa

SEQ ID NO: 208023 - DNA, 120 bp, Artificial Sequence
  ENSG00000115310_27 (sequence is synthesized)
cagagaagaatactagcaccaaaacatcaaacccttttcttgtagcagcacaggattctgagacagattatgtcacaacagataatttaacaaaggtgactgaggaagtcgtggcaaaca

SEQ ID NO: 208024 - DNA, 120 bp, Artificial Sequence
  ENSG00000115310_28 (sequence is synthesized)
tgcctgaaggcctgactccagatttagtacaggaagcatgtgaaagtgaattgaatgaagttactggtacaaagattgcttatgaaacaaaaatggacttggttcaaacatcagaagtta

SEQ ID NO: 208025 - DNA, 120 bp, Artificial Sequence
  ENSG00000115310_29 (sequence is synthesized)
tgcaagagtcactctatcctgcagcacagctttgcccatcatttgaagagtcagaagctactccttcaccagttttgcctgacattgttatggaagcaccattgaattctgcagttccta

SEQ ID NO: 208026 - DNA, 120 bp, Artificial Sequence
  ENSG00000115310_30 (sequence is synthesized)
gtgctggtgcttccgtgatacagcccagctcatcaccattagaagcttcttcagttaattatgaaagcataaaacatgagcctgaaaaccccccaccatatgaagaggccatgagtgtat

SEQ ID NO: 208027 - DNA, 120 bp, Artificial Sequence
  ENSG00000115310_31 (sequence is synthesized)
cactaaaaaaagtatcaggaataaaggaagaaattaaagagcctgaaaatattaatgcagctcttcaagaaacagaagctccttatatatctattgcatgtgatttaattaaagaaacaa

SEQ ID NO: 208028 - DNA, 120 bp, Artificial Sequence
  ENSG00000115310_32 (sequence is synthesized)
agctttctgctgaaccagctccggatttctctgattattcagaaatggcaaaagttgaacagccagtgcctgatcattctgagctagttgaagattcctcacctgattctgaaccagttg

SEQ ID NO: 208029 - DNA, 120 bp, Artificial Sequence
  ENSG00000115310_33 (sequence is synthesized)
acttatttagtgatgattcaatacctgacgttccacaaaaacaagatgaaactgtgatgcttgtgaaagaaagtctcactgagacttcatttgagtcaatgatagaatatgaaaataagg

SEQ ID NO: 208030 - DNA, 120 bp, Artificial Sequence
  ENSG00000115310_34 (sequence is synthesized)
aaaaactcagtgctttgccacctgagggaggaaagccatatttggaatcttttaagctcagtttagataacacaaaagataccctgttacctgatgaagtttcaacattgagcaaaaagg

SEQ ID NO: 208031 - DNA, 120 bp, Artificial Sequence
  ENSG00000115310_35 (sequence is synthesized)
gtactgcagtttattcaaatgatgacttatttatttctaaggaagcacagataagagaaactgaaacgttttcagattcatctccaattgaaattatagatgagttccctacattgatca

SEQ ID NO: 208032 - DNA, 120 bp, Artificial Sequence
  ENSG00000115310_36 (sequence is synthesized)
gttctaaaactgattcattttctaaattagccagggaatatactgacctagaagtatcccacaaaagtgaaattgctaatgccccggatggagctgggtcattgccttgcacagaattgc

SEQ ID NO: 208033 - DNA, 120 bp, Artificial Sequence
  ENSG00000115310_37 (sequence is synthesized)
cccatgacctttctttgaagaacatacaacccaaagttgaagagaaaatcagtttctcagatgacttttctaaaaatgggtctgctacatcaaaggtgctcttattgcctccagatgttt

SEQ ID NO: 208034 - DNA, 120 bp, Artificial Sequence
  ENSG00000115310_38 (sequence is synthesized)
ctgctttggccactcaagcagagatagagagcatagttaaacccaaagttcttgtgaaagaagctgagaaaaaacttccttccgatacagaaaaagaggacagatcaccatctgctatat

SEQ ID NO: 208035 - DNA, 120 bp, Artificial Sequence
  ENSG00000115310_39 (sequence is synthesized)
gtgataaaccagataaagggtggctttatatgatggtgcagtcataaatctaaccagggatacctttattttatgaaatctcactgtgatatgatttgaagctagaaatggttcctagct

SEQ ID NO: 208036 - DNA, 120 bp, Artificial Sequence
  ENSG00000115310_40 (sequence is synthesized)
attgttccgggagccgtcaccacagtaggtccctcggctcagtcggcccagcccctctcagtcctccccaacccccacaaccgcccgcggctctgagacgcggccccggcggcggcggca

SEQ ID NO: 208037 - DNA, 120 bp, Artificial Sequence
  ENSG00000115310_41 (sequence is synthesized)
gcagctgcagcatcatctccaccctccagccatggaagacctggaccagtctcctctggtctcgtcctcggacagcccaccccggccgcagcccgcgttcaagtaccagttcgtgaggga

SEQ ID NO: 208038 - DNA, 120 bp, Artificial Sequence
  ENSG00000115310_42 (sequence is synthesized)
gcccgaggacgaggaggaagaagaggaggaggaagaggaggacgaggacgaagacctggaggagctggaggtgctggagaggaagcccgccgccgggctgtccgcggccccagtgcccac

SEQ ID NO: 208039 - DNA, 120 bp, Artificial Sequence
  ENSG00000115310_43 (sequence is synthesized)
cggcgcgcccctgatggacttcggaaatgacttcgtgccgccggcgccccggggacccctgccggccgctccccccgtcgccccggagcggcagccgtcttgggacccgagcccggtgtc

SEQ ID NO: 208040 - DNA, 120 bp, Artificial Sequence
  ENSG00000115310_44 (sequence is synthesized)
gagcccggtgtcgtcgaccgtgcccgcgccatccccgctgtctgctgccgcagtctcgccctccaagctccctgaggacgacgagcctccggcccggcctccccctcctcccccggccag

SEQ ID NO: 208041 - DNA, 120 bp, Artificial Sequence
  ENSG00000115310_45 (sequence is synthesized)
agtccctgccctcccctggggagggtgagtcacgccaaactgggcggagagtccgctggcctcactcctagctcatctgggcggcggcggcaagtggggacagggcgggtggcgcatcac

SEQ ID NO: 208042 - DNA, 120 bp, Artificial Sequence
  ENSG00000115310_46 (sequence is synthesized)
agggcctctgaggactgctgcagacacagctgaggcagcccggctccaggctcgctggaggggctgtgtctggggagatgcttctctataaaaagcttagagagagttgtcatcgaaaat

SEQ ID NO: 208043 - DNA, 120 bp, Artificial Sequence
  ENSG00000115310_47 (sequence is synthesized)
aacaagactattctggatatgagtaacactgaggaataagatactaagccattaaagaagggtataaaaattatgtctgacacaggatatggagagaaatatgatgaagatgaaatatga

SEQ ID NO: 208044 - DNA, 120 bp, Artificial Sequence
  ENSG00000115310_48 (sequence is synthesized)
tgctgggattatagctgtgatccaccgtggccagcccaagaagtctttagcatactctgccaccagactaaatcaggttcgccatgttgcccaagctggtcccgaactcctgacctcaag

SEQ ID NO: 208045 - DNA, 120 bp, Artificial Sequence
  ENSG00000115317_0 (sequence is synthesized)
tctggcagcgcgcagctgaccaggaagacgtggatcccgagaaagaggcgcaggacgaggaggcagaacccgactggcgcgtagagcagcagcacgagcagtaggaagcagtcacccgga

SEQ ID NO: 208046 - DNA, 120 bp, Artificial Sequence
  ENSG00000115317_1 (sequence is synthesized)
agcctgggggcgagaggcgaagtggtcaggcgccgaaggccgagagcacgcggggatcggtctcttcccgccgggtctcttaccggtgcgagtcaaagagccgctccggccccggccctg

SEQ ID NO: 208047 - DNA, 120 bp, Artificial Sequence
  ENSG00000115317_2 (sequence is synthesized)
agggaagctccataactgctgcttcaggagcgcccggccgtcgccgccgccgccattttcgcgcccggccgcaggggctcttgggaaggcggagtctttgggcatccgcccggggtgagg

SEQ ID NO: 208048 - DNA, 120 bp, Artificial Sequence
  ENSG00000115317_3 (sequence is synthesized)
ggacccgaagtcctgaggcgcgccggaagggctagcggtcccagcataccccgcggccccttgggccgtctcacaactcgcgtccggcggagaccacaattcccggcattcgtggggcag

SEQ ID NO: 208049 - DNA, 120 bp, Artificial Sequence
  ENSG00000115317_4 (sequence is synthesized)
ggaggagtcggcctcccggaatcctggtcccggcgtgcacttctgaaggacttcaggtaccggcgtgccccgcgtcctactgtccgcctgctcgcgtcctgggtgccgcctctgagtagg

SEQ ID NO: 208050 - DNA, 120 bp, Artificial Sequence
  ENSG00000115317_5 (sequence is synthesized)
gcgggcgaggaggcagccaaggcggagctgatggctgcgccgagggcggggcggggtgcaggctggagccttcgggcatggcgggctttggggggcattcgctgggggaggagaccccgt

SEQ ID NO: 208051 - DNA, 120 bp, Artificial Sequence
  ENSG00000115317_6 (sequence is synthesized)
ttgacccctgacctccgggccctgctgacgtcaggaacttctgacccccgggcccgagtgacttatgggacccccagtctctgggcccggttgtctgttggggtcactgaaccccgagca

SEQ ID NO: 208052 - DNA, 120 bp, Artificial Sequence
  ENSG00000115317_7 (sequence is synthesized)
tgcctgacgtctgggaccccgggtccccgggcacaactgactgcggtgaccccagataccaggacccgggaggcctcagagaactctggaacccgttcgcgcgcgtggctggcggtggcg

SEQ ID NO: 208053 - DNA, 120 bp, Artificial Sequence
  ENSG00000115317_8 (sequence is synthesized)
ctgggcgctgggggggcagtgctgttgttgttgtggggcgggggtcggggtcctccggccgtcctcgccgccgtccctagcccgccgcccgcttctccccggagtcagtacaacttcatc

SEQ ID NO: 208054 - DNA, 120 bp, Artificial Sequence
  ENSG00000115317_9 (sequence is synthesized)
aacggctcaggattcgtggtggctgccgatgggctcattgtcaccaacgcccatgtggtggctgatcggcgcagagtccgtgtgagactgctaagcggcgacacgtatgaggccgtggtc

SEQ ID NO: 208055 - DNA, 120 bp, Artificial Sequence
  ENSG00000115317_10 (sequence is synthesized)
acagctgtggatcccgtggcagacatcgcaacgctgaggattcagactaaggagcctctccccacgctgcctctgggacgctcagctgatgtccggcaaggggagtttgttgttgccatg

SEQ ID NO: 208056 - DNA, 120 bp, Artificial Sequence
  ENSG00000115317_11 (sequence is synthesized)
ggaagtccctttgcactgcagaacacgatcacatccggcattgttagctctgctcagcgtccagccagagacctgggactcccccaaaccaatgtggaatacattcaaactgatgcagct

SEQ ID NO: 208057 - DNA, 120 bp, Artificial Sequence
  ENSG00000115317_12 (sequence is synthesized)
attgattttggaaactctggaggtcccctggttaacctggatggggaggtgattggagtgaacaccatgaaggtcacagctggaatctcctttgccatcccttctgatcgtcttcgagag

SEQ ID NO: 208058 - DNA, 120 bp, Artificial Sequence
  ENSG00000115317_13 (sequence is synthesized)
tttctgcatcgtggggaaaagaagaattcctcctccggaatcagtgggtcccagcggcgctacattggggtgatgatgctgaccctgagtcccagcatccttgctgaactacagcttcga

SEQ ID NO: 208059 - DNA, 120 bp, Artificial Sequence
  ENSG00000115317_14 (sequence is synthesized)
gaaccaagctttcccgatgttcagcatggtgtactcatccataaagtcatcctgggctcccctgcacaccgggctggtctgcggcctggtgatgtgattttggccattggggagcagatg

SEQ ID NO: 208060 - DNA, 120 bp, Artificial Sequence
  ENSG00000115317_15 (sequence is synthesized)
gtacaaaatgctgaagatgtttatgaagctgttcgaacccaatcccagttggcagtgcagatccggcggggacgagaaacactgaccttatatgtgacccctgaggtcacagaatgaata

SEQ ID NO: 208061 - DNA, 120 bp, Artificial Sequence
  ENSG00000115317_16 (sequence is synthesized)
gatcaccaagagtatgaggctcctgctctgatttcctccttgcctttctggctgaggttctgagggcaccgagacagagggttaaatgaaccagtgggggcaggtccctccaaccaccag

SEQ ID NO: 208062 - DNA, 120 bp, Artificial Sequence
  ENSG00000115317_17 (sequence is synthesized)
cactgactcctgggctctgaagaatcacagaaacactttttatataaaataaaattatacctagcaacatattatagtaaaaaatgaggtgggagggctggatcttttcccccaccaaaa

SEQ ID NO: 208063 - DNA, 120 bp, Artificial Sequence
  ENSG00000115317_18 (sequence is synthesized)
ggctagaggtaaagctgtatccccctaaacttaggggagatactggagctgaccatcctgacctcctattaaagaaaatgagctgctgccatcttttgtgggcagttagtcaggtgctgc

SEQ ID NO: 208064 - DNA, 120 bp, Artificial Sequence
  ENSG00000115317_19 (sequence is synthesized)
ggcggagaccacaattcccggcattcgtggggcagggaggagtcggcctcccggaatcctggtcccggcgtgcacttctgaaggacttcaggcaccctttcttgggccgcgaggtcccta

SEQ ID NO: 208065 - DNA, 120 bp, Artificial Sequence
  ENSG00000115317_20 (sequence is synthesized)
ttcccctaattcaaggatgtttggtcaagtttctgagcagttctttgttggctatctctcaatatccaaccagatctccccaacacttgctggtacttttgttcgggtgcccccatcccc

SEQ ID NO: 208066 - DNA, 120 bp, Artificial Sequence
  ENSG00000115317_21 (sequence is synthesized)
gagagtttctgcatcgtggggaaaagaagagtgagcctgccttatggggaaacgggttcctttaatgtggtggaaataggggaagggcattcagtgggacttcctggagggtggtctact

SEQ ID NO: 208067 - DNA, 120 bp, Artificial Sequence
  ENSG00000115317_22 (sequence is synthesized)
gggagaagagggcagggaaggaaggatgtagctgggtggggctcatttgtccctctgtcacagattcctcctccggaatcagtgggtcccagcggcgctacattggggtgatgatgctga

SEQ ID NO: 208068 - DNA, 120 bp, Artificial Sequence
  ENSG00000115317_23 (sequence is synthesized)
acaaatgatgggggaggggggagaggctgtgtggtacaagcaccaactgatatatggtggatgagcctatatagagcttaggctgcaaaaatgtggccacttattcatgggctgagaaag

SEQ ID NO: 208069 - DNA, 120 bp, Artificial Sequence
  ENSG00000115318_0 (sequence is synthesized)
gaagtcctaggactgatctccaggaccagcactcttctcccagcccttagggtcctgctcggccaaggccttccctgccatgcgacctgtcagtgtctggcagtggagcccctgggggct

SEQ ID NO: 208070 - DNA, 120 bp, Artificial Sequence
  ENSG00000115318_1 (sequence is synthesized)
gctgctgtgcctgctgtgcagttcgtgcttggggtctccgtccccttccacgggccctgagaagaaggccgggagccaggggcttcggttccggctggctggcttccccaggaagcccta

SEQ ID NO: 208071 - DNA, 120 bp, Artificial Sequence
  ENSG00000115318_2 (sequence is synthesized)
cgagggccgcgtggagatacagcgagctggtgaatggggcaccatctgcgatgatgacttcacgctgcaggctgcccacatcctctgccgggagctgggcttcacagaggccacaggctg

SEQ ID NO: 208072 - DNA, 120 bp, Artificial Sequence
  ENSG00000115318_3 (sequence is synthesized)
gacccacagtgccaaatatggccctggaacaggccgcatctggctggacaacttgagctgcagtgggaccgagcagagtgtgactgaatgtgcctcccggggctgggggaacagtgactg

SEQ ID NO: 208073 - DNA, 120 bp, Artificial Sequence
  ENSG00000115318_4 (sequence is synthesized)
tacgcacgatgaggatgctggggtcatctgcaaagaccagcgcctccctggcttctcggactccaatgtcattgaggtagagcatcacctgcaagtggaggaggtgcgaattcgacccgc

SEQ ID NO: 208074 - DNA, 120 bp, Artificial Sequence
  ENSG00000115318_5 (sequence is synthesized)
cgttgggtggggcagacgacccctgcccgtgacggaggggctggtggaagtcaggcttcctgacggctggtcgcaagtgtgcgacaaaggctggagcgcccacaacagccacgtggtctg

SEQ ID NO: 208075 - DNA, 120 bp, Artificial Sequence
  ENSG00000115318_6 (sequence is synthesized)
cgggatgctgggcttccccagcgaaaagagggtcaacgcggccttctacaggctgctagcccaacggcagcaacactcctttggtctgcatggggtggcgtgcgtgggcacggaggccca

SEQ ID NO: 208076 - DNA, 120 bp, Artificial Sequence
  ENSG00000115318_7 (sequence is synthesized)
cctctccctctgttccctggagttctatcgtgccaatgacaccgccaggtgccctggggggggccctgcagtggtgagctgtgtgccaggccctgtctacgcggcatccagtggccagaa

SEQ ID NO: 208077 - DNA, 120 bp, Artificial Sequence
  ENSG00000115318_8 (sequence is synthesized)
gaagcaacaacagtcgaagcctcagggggaggcccgtgtccgtctaaagggcggcgcccaccctggagagggccgggtagaagtcctgaaggccagcacatggggcacagtctgtgaccg

SEQ ID NO: 208078 - DNA, 120 bp, Artificial Sequence
  ENSG00000115318_9 (sequence is synthesized)
caagtgggacctgcatgcagccagcgtggtgtgtcgggagctgggcttcgggagtgctcgagaagctctgagtggcgctcgcatggggcagggcatgggtgctatccacctgagtgaagt

SEQ ID NO: 208079 - DNA, 120 bp, Artificial Sequence
  ENSG00000115318_10 (sequence is synthesized)
tcgctgctctggacaggagctctccctctggaagtgcccccacaagaacatcacagctgaggattgttcacatagccaggatgccggggtccggtgcaacctaccttacactggggcaga

SEQ ID NO: 208080 - DNA, 120 bp, Artificial Sequence
  ENSG00000115318_11 (sequence is synthesized)
gaccaggatccgactcagtgggggccgcagccaacatgaggggcgagtcgaggtgcaaatagggggacctgggccccttcgctggggcctcatctgtggggatgactgggggaccctgga

SEQ ID NO: 208081 - DNA, 120 bp, Artificial Sequence
  ENSG00000115318_12 (sequence is synthesized)
ggccatggtggcctgtaggcaactgggtctgggctacgccaaccacggcctgcaggagacctggtactgggactctgggaatataacagaggtggtgatgagtggagtgcgctgcacagg

SEQ ID NO: 208082 - DNA, 120 bp, Artificial Sequence
  ENSG00000115318_13 (sequence is synthesized)
gactgagctgtccctggatcagtgtgcccatcatggcacccacatcacctgcaagaggacagggacccgcttcactgctggagtcatctgttctgagactgcatcagatctgttgctgca

SEQ ID NO: 208083 - DNA, 120 bp, Artificial Sequence
  ENSG00000115318_14 (sequence is synthesized)
ctcagcactggtgcaggagaccgcctacatcgaagaccggcccctgcatatgttgtactgtgctgcggaagagaactgcctggccagctcagcccgctcagccaactggccctatggtca

SEQ ID NO: 208084 - DNA, 120 bp, Artificial Sequence
  ENSG00000115318_15 (sequence is synthesized)
acgagtgccatgggcattaccacagcatggacatcttcactcactatgatatcctcaccccaaatggcaccaaggtggctgagggccacaaagctagtttctgtctcgaagacactgagt

SEQ ID NO: 208085 - DNA, 120 bp, Artificial Sequence
  ENSG00000115318_16 (sequence is synthesized)
gtcaggaggatgtctccaagcggtatgagtgtgccaactttggagagcaaggcatcactgtgggttgctgggatctctaccggcatgacattgactgtcagtggattgacatcacggatg

SEQ ID NO: 208086 - DNA, 120 bp, Artificial Sequence
  ENSG00000115318_17 (sequence is synthesized)
tgaagccaggaaactacattctccaggttgtcatcaacccaaactttgaagtagcagagagtgactttaccaacaatgcaatgaaatgtaactgcaaatatgatggacatagaatctggg

SEQ ID NO: 208087 - DNA, 120 bp, Artificial Sequence
  ENSG00000115318_18 (sequence is synthesized)
tgcacaactgccacattggtgatgccttcagtgaagaggccaacaggaggtttgaacgctaccctggccagaccagcaaccagattatctaagtgccactgccctctgcaaaccaccact

SEQ ID NO: 208088 - DNA, 120 bp, Artificial Sequence
  ENSG00000115318_19 (sequence is synthesized)
ggcccctaatggcaggggtctgaggctgccattacctcaggagcttaccaagaaacccatgtcagcaaccgcactcatcagaccatgcactatggatgtggaactgtcaagcagaagttt

SEQ ID NO: 208089 - DNA, 120 bp, Artificial Sequence
  ENSG00000115318_20 (sequence is synthesized)
tcaccctccttcagaggccagctgtcagtatctgtagccaagcatgggaatctttgctcccaggcccagcaccgagcagaacagaccagagcccaccacaccacaaagagcagcacctga

SEQ ID NO: 208090 - DNA, 120 bp, Artificial Sequence
  ENSG00000115318_21 (sequence is synthesized)
ctaactgcccacaaaagatggcagcagctcattttctttaataggaggtcaggatggtcagctccagtatctcccctaagtttagggggatacagctttacctctagccttttggtgggg

SEQ ID NO: 208091 - DNA, 120 bp, Artificial Sequence
  ENSG00000115318_22 (sequence is synthesized)
gaaaagatccagccctcccacctcattttttactataatatgttgctaggtataattttattttatataaaaagtgtttctgtgattcttcagagcccaggagtcagtgctggtggttgg

SEQ ID NO: 208092 - DNA, 120 bp, Artificial Sequence
  ENSG00000115318_23 (sequence is synthesized)
agggacctgcccccactggttcatttaaccctctgtctcggtgccctcagaacctcagccagaaaggcaaggaggaaatcagagcaggagcctcatactcttggtgatctattcattctg

SEQ ID NO: 208093 - DNA, 120 bp, Artificial Sequence
  ENSG00000115318_24 (sequence is synthesized)
tgacctcaggggtcacatataaggtcagtgtttctcgtccccgccggatctgcactgccaactgggattgggttcgaacagcttcataaacatcttcagcattttgtaccatctgctccc

SEQ ID NO: 208094 - DNA, 120 bp, Artificial Sequence
  ENSG00000115318_25 (sequence is synthesized)
caatggccaaaatcacatcaccaggccgcagaccagccctatagagaaaaatggacagagagaaaggaaggagtacaaagcctagttcaaggacacatgcacaccttgcccatccccata

SEQ ID NO: 208095 - DNA, 120 bp, Artificial Sequence
  ENSG00000115318_26 (sequence is synthesized)
tcacactgcagcctctccctcaccggtgtgcaggggagcccaggatgactttatggatgagtacaccatgctgaacatcgggaaagcttggttctcgaagctgtagttcagcaaggatgc

SEQ ID NO: 208096 - DNA, 120 bp, Artificial Sequence
  ENSG00000115318_27 (sequence is synthesized)
tgaaagtacacagatcaccctattagccaaacccaggcattctccccatcctgagttccacctcaagtctctcatcaacacattgataaatatatggacaggacatgggctaggtactac

SEQ ID NO: 208097 - DNA, 120 bp, Artificial Sequence
  ENSG00000115318_28 (sequence is synthesized)
aaaatacaatggcaactcactttctgtcttctagcaataaagtgcaacatgtacataaaagatgtacaccacatgagggcaccaaatgacaaacagtgttaaatcaatagcactaatgtc

SEQ ID NO: 208098 - DNA, 120 bp, Artificial Sequence
  ENSG00000115318_29 (sequence is synthesized)
attctagaatactaagagaagctttaaggggaaagaacttaagttgagcctaaaaggatggatctgatattaaccatataaaacaagaacagcataaataaaaaacatgggagtaggaaa

SEQ ID NO: 208099 - DNA, 120 bp, Artificial Sequence
  ENSG00000115318_30 (sequence is synthesized)
gggatgggagggaaagacgttcattctcttttccatagcttgtttctccatcttcccaccttcctgtagagctctcagtccctccacttctacccacccttctccacagtgcatctatct

SEQ ID NO: 208100 - DNA, 120 bp, Artificial Sequence
  ENSG00000115318_31 (sequence is synthesized)
atactgagtgcttagttctttgcctatcactttctatccgttgtctctctcctctgtgtctttctggttttctctctctcattcccacagtctcccttcctctcacatcctgtctgtctg

SEQ ID NO: 208101 - DNA, 120 bp, Artificial Sequence
  ENSG00000115318_32 (sequence is synthesized)
ggtcttcctctctctctacgtgtctcttgctcagtctctatctctttttattgacccttctctgactctcgatctctcatagttgtctcttatctctgggtctctcaggctgtgcctcta

SEQ ID NO: 208102 - DNA, 120 bp, Artificial Sequence
  ENSG00000115318_33 (sequence is synthesized)
tgacctgtgcctcagcccttatttaatgtgtttctctccctgtctcttggtccctggggctctttctctcctgttgtctctcgctgtctctgtcttactcagtgtctgtttttctttcgt

SEQ ID NO: 208103 - DNA, 120 bp, Artificial Sequence
  ENSG00000115318_34 (sequence is synthesized)
gacttctccctctctttctgactctgggccccactcaatctgtttctctcacgcacactttgtctctggggcacccaggccttccctgccatgcgacctgtcagtgtctggcagtggagc

SEQ ID NO: 208104 - DNA, 120 bp, Artificial Sequence
  ENSG00000115318_35 (sequence is synthesized)
cccgggcttctgaggcgtctaccttcccaggtagggctgtacaaggagttctccagcatctccagggcagaaagcttaggccttccctgccatgcgacctgtcagtgtctggcagtggag

SEQ ID NO: 208105 - DNA, 120 bp, Artificial Sequence
  ENSG00000115318_36 (sequence is synthesized)
caagcagggttccttaagggcggcgggacacatgaaaggtgccactgggattctttccctgcttgtggccccgcccccaggtagagcatcacctgcaagtggaggaggtgcgaattcgac

SEQ ID NO: 208106 - DNA, 120 bp, Artificial Sequence
  ENSG00000115325_0 (sequence is synthesized)
ctctgggtcctccctccccgtggagctggccactgccgcgccccctccccctccctggccctcccggctcgttcaatgaagctttctcttcccgcggcatggaggccaggcctctgcggt

SEQ ID NO: 208107 - DNA, 120 bp, Artificial Sequence
  ENSG00000115325_1 (sequence is synthesized)
cagggagctgacatgcaagcggcggccgggcggcggggcggccccggtggtggcgggaagcggttcaaccccagccctccctccgagtcccgggccagcggagtctaaacagcccggctc

SEQ ID NO: 208108 - DNA, 120 bp, Artificial Sequence
  ENSG00000115325_2 (sequence is synthesized)
gggcggggctgggggcgggcccggccagggtaaataaagccccggaggcccgtgtgggtctctccggtgcccggggcgctttcggggtgatgtcatggctttcactctgacgtcaccttg

SEQ ID NO: 208109 - DNA, 120 bp, Artificial Sequence
  ENSG00000115325_3 (sequence is synthesized)
ggcatatgacgtcacgcgcagccaccacgcccagaggccagggccctcgcgccaaaaccgaggactttcggtggagccactggcgcgcccccacgacggcgggtaggggcctggggtgct

SEQ ID NO: 208110 - DNA, 120 bp, Artificial Sequence
  ENSG00000115325_4 (sequence is synthesized)
gcagctcccggctaatccgggggtctccaccattccttctcgctcctctccctcaccccaccgcgacccccccagcggctgccggcgggggccggggaggggcggaaactcctccaggga

SEQ ID NO: 208111 - DNA, 120 bp, Artificial Sequence
  ENSG00000115325_5 (sequence is synthesized)
acccggccccgcctcccgccccgcctcccgccgcagggccaggaagcgcggaaggaaccgccgggggccatggacggagcagtgatggaagggccgctttttttgcagagtcagcgcttt

SEQ ID NO: 208112 - DNA, 120 bp, Artificial Sequence
  ENSG00000115325_6 (sequence is synthesized)
gggaccaagaggtggaggaagacctgggccgtgctctacccggccagtccccacggcgtagcgcggctcgagttctttgaccataaggggtcgagctctgggggtggccgagggagctcg

SEQ ID NO: 208113 - DNA, 120 bp, Artificial Sequence
  ENSG00000115325_7 (sequence is synthesized)
cgccgcctggactgcaaagtgatccgtctggctgagtgtgtgagtgtggcccccgtcaccgtggagaccccccctgagcccggcgccactgccttccgcctggacactgctcagcgctcg

SEQ ID NO: 208114 - DNA, 120 bp, Artificial Sequence
  ENSG00000115325_8 (sequence is synthesized)
cacctgctggcggccgacgcgccgtccagtgcagcctgggtgcagacgctgtgccgaaacgcctttccgaaaggcagctggactctggcgcctaccgataacccacctaagctttctgcc

SEQ ID NO: 208115 - DNA, 120 bp, Artificial Sequence
  ENSG00000115325_9 (sequence is synthesized)
ctggagatgctggagaactccttgtacagccctacctgggaaggatcccaattctgggtaacggtgcagaggactgaggccgccgagcgctgtggcctgcatggctcctacgtgctgagg

SEQ ID NO: 208116 - DNA, 120 bp, Artificial Sequence
  ENSG00000115325_10 (sequence is synthesized)
ggcccagagtcagatactggagccactcctgtcctggccctacactctgttgcgtcgctatggccgggacaaggtcatgttctctttcgaggccggccgccgctgcccctcaggccctgg

SEQ ID NO: 208117 - DNA, 120 bp, Artificial Sequence
  ENSG00000115325_11 (sequence is synthesized)
aaccttcaccttccagacggcacagggaaatgacatcttccaggcagttgagactgccatccaccggcagaaggcccagggaaaggccggacaggggcacgatgttctcagagctgactc

SEQ ID NO: 208118 - DNA, 120 bp, Artificial Sequence
  ENSG00000115325_12 (sequence is synthesized)
ccatgaaggggaggtggcagaggggaagttgccttccccacctggcccccaagagctcctcgacagtcccccagccctgtatgctgagcccttagactccctgcgcattgctccatgccc

SEQ ID NO: 208119 - DNA, 120 bp, Artificial Sequence
  ENSG00000115325_13 (sequence is synthesized)
ttcccaggactccctatactcagaccccttggacagcacgtctgctcaggcaggagagggagtacaacggaagaaacctctctattgggacttgtatgagcatgcgcagcagcagttgct

SEQ ID NO: 208120 - DNA, 120 bp, Artificial Sequence
  ENSG00000115325_14 (sequence is synthesized)
gaaggccaagctgacagaccccaaagaggatcccatctatgatgaacctgagggcctggccccagtccctccccagggcctttatgatctgcctcgggagcccaaggatgcatggtggtg

SEQ ID NO: 208121 - DNA, 120 bp, Artificial Sequence
  ENSG00000115325_15 (sequence is synthesized)
ccaagctcgggtgaaggaggagggctatgagctcccctacaaccctgccactgatgactacgctgtgccaccccctcggagcacaaagcccctccttgctcccaagccccagggcccagc

SEQ ID NO: 208122 - DNA, 120 bp, Artificial Sequence
  ENSG00000115325_16 (sequence is synthesized)
cttccctgaacctggtactgcaactggcagtggcatcaaaagccacaactcagccctgtacagccaggtccagaagagcggggcctcagggagctgggactgtgggctctctagagtagg

SEQ ID NO: 208123 - DNA, 120 bp, Artificial Sequence
  ENSG00000115325_17 (sequence is synthesized)
gactgacaagactggggtcaagtcagagggctctacctgagaaggacggcaaggctgaggtggctaagggggaccatggggaggtggcactagggatcaaagaagatggttagaaccagc

SEQ ID NO: 208124 - DNA, 120 bp, Artificial Sequence
  ENSG00000115325_18 (sequence is synthesized)
agaagccagagggtgggaggggccatgctgtgtgagaccaggggaccagagggatgggagagtcaagggaaggacaatcccaggaagtcctaagaagtggggcagatggcagggctgagg

SEQ ID NO: 208125 - DNA, 120 bp, Artificial Sequence
  ENSG00000115325_19 (sequence is synthesized)
atgggctctgcatcccccaaagccatcccttccctacttccccaaatgaagggacggctgtgggaccaggtctgtggaaagtggtgcatggtcagaatgggtgcagtttgaggggcctgt

SEQ ID NO: 208126 - DNA, 120 bp, Artificial Sequence
  ENSG00000115325_20 (sequence is synthesized)
gtggaggcctcagggagatgttggactgtgcctggatccttactcctgcattgttctttgccagagacctatttaaaaattttaaaattctcattaaagtcagcttgggtttaagaagtt

SEQ ID NO: 208127 - DNA, 120 bp, Artificial Sequence
  ENSG00000115325_21 (sequence is synthesized)
cccgcgcctgggagtggcctcgcgaggccggcgcgcgccccggggccgaggaatccgcctgcccgcccaggcgtcggccacgagagagcgggagcctcgctggtccccatttcagaggtg

SEQ ID NO: 208128 - DNA, 120 bp, Artificial Sequence
  ENSG00000115325_22 (sequence is synthesized)
aggaaccgccgggggccatggacggagcagtgatggaagggccgctttttttgcagagtcagcgctttgggaccaaggtagtctggcgcatggatgccgaaccttatccgggctagtagt

SEQ ID NO: 208129 - DNA, 120 bp, Artificial Sequence
  ENSG00000115325_23 (sequence is synthesized)
tgggggcagttacagaggcagagaaatggggctgcctcagaccgacccccgctccccgctgaggaaattacgggtttctcgatgctctctactacagaaaggcagctggactctggcgcc

SEQ ID NO: 208130 - DNA, 120 bp, Artificial Sequence
  ENSG00000115325_24 (sequence is synthesized)
gtggcctcgcgaggccggcgcgcgccccggggccgaggaatccgcctgcccgcccaggcgtcggccacgagagagcgggagcctcgctggtccccatttcagcatcccgcagaccacgtg

SEQ ID NO: 208131 - DNA, 120 bp, Artificial Sequence
  ENSG00000115325_25 (sequence is synthesized)
gctgttgtgggcgctccagcctttgtcgcacacttgcgaccagccgtcaggaagcctgacttccaccagcccctccgtcacgggcaggggtcgtctgccccacccaacggcgggtcgaat

SEQ ID NO: 208132 - DNA, 120 bp, Artificial Sequence
  ENSG00000115339_0 (sequence is synthesized)
agctcacctgggagactccaagtggaagccgagcctcggttctgcctctccaggcaacgcgggaggcccagcgggaaggcaggaggcggcggcggaggaggagctctactgagccgcaac

SEQ ID NO: 208133 - DNA, 120 bp, Artificial Sequence
  ENSG00000115339_1 (sequence is synthesized)
tgtggcgacagcaaccggagtcgcagccgccgccacctgcacctggcgcctagcccacgtccagcgcctgcccggccgccgcttcccgccaccctgccctgcccacccgccaggtactac

SEQ ID NO: 208134 - DNA, 120 bp, Artificial Sequence
  ENSG00000115339_2 (sequence is synthesized)
cattaaagataccttcttctcagcaaatctatgataaaaaatataagtaacagaagaagaaataactgttatttgtcaagtgacaagcttttaatgtcagaatggctcacctaaagcgac

SEQ ID NO: 208135 - DNA, 120 bp, Artificial Sequence
  ENSG00000115339_3 (sequence is synthesized)
tagtaaaattacacattaaaagacattaccataaaaagttctggaagcttggtgcagtaatttttttctttataatagttttggttttaatgcaaagagaagtaagtgttcaatattcca

SEQ ID NO: 208136 - DNA, 120 bp, Artificial Sequence
  ENSG00000115339_4 (sequence is synthesized)
aagaggaatcaaggatggaaaggaacatgaaaaacaaaaacaagatgttggatttaatgctagaagctgtaaacaatattaaggatgccatgccaaaaatgcaaataggagcacctgtca

SEQ ID NO: 208137 - DNA, 120 bp, Artificial Sequence
  ENSG00000115339_5 (sequence is synthesized)
ggcaaaacattgatgctggtgagagaccttgtttgcaaggatattatacagcagcagaattgaagcctgtccttgaccgtccacctcaggattcaaatgcacctggtgcttctggtaaag

SEQ ID NO: 208138 - DNA, 120 bp, Artificial Sequence
  ENSG00000115339_6 (sequence is synthesized)
cattcaagacaaccaatttaagtgttgaagagcaaaaggaaaaggaacgtggggaagctaaacactgctttaatgctttcgcaagtgacaggatttctttgcaccgagatcttggaccag

SEQ ID NO: 208139 - DNA, 120 bp, Artificial Sequence
  ENSG00000115339_7 (sequence is synthesized)
acactcgacctcctgaatgtattgaacaaaaatttaagcgctgccctcccctgcccaccaccagtgtcataatagtttttcataatgaagcgtggtccacgttgcttagaactgtccaca

SEQ ID NO: 208140 - DNA, 120 bp, Artificial Sequence
  ENSG00000115339_8 (sequence is synthesized)
gtgtgctctattcttcacctgcaatactgctgaaggaaatcattttggtggatgatgctagtgtagatgagtacttacatgataaactagatgaatatgtaaaacaattttctatagtaa

SEQ ID NO: 208141 - DNA, 120 bp, Artificial Sequence
  ENSG00000115339_9 (sequence is synthesized)
aaatagtcagacaaagagaaagaaaaggtctgatcactgctcggttgctaggagcaacagtcgcaacagctgaaacgctcacatttttagatgctcactgtgagtgtttctatggttggc

SEQ ID NO: 208142 - DNA, 120 bp, Artificial Sequence
  ENSG00000115339_10 (sequence is synthesized)
tagaacctctgttggccagaatagctgagaactacacggctgtcgtaagtccagatattgcatccatagatctgaacacgtttgaattcaacaaaccttctccttatggaagtaaccata

SEQ ID NO: 208143 - DNA, 120 bp, Artificial Sequence
  ENSG00000115339_11 (sequence is synthesized)
accgtggaaattttgactggagtctttcatttggctgggagtcgcttcctgatcatgagaagcaaagaaggaaagatgaaacctacccaattaaaacacccacttttgcaggaggacttt

SEQ ID NO: 208144 - DNA, 120 bp, Artificial Sequence
  ENSG00000115339_12 (sequence is synthesized)
tttccatatcaaaagaatattttgagtatattggaagctatgatgaagaaatggaaatctggggaggtgaaaatatagaaatgtctttcagagtatggcaatgtggtgggcagttggaga

SEQ ID NO: 208145 - DNA, 120 bp, Artificial Sequence
  ENSG00000115339_13 (sequence is synthesized)
ttatgccttgctctgttgttggacatgtttttcgcagcaaaagccctcatagctttccaaaaggcactcaggtgattgctagaaaccaagttcgccttgcagaagtctggatggatgaat

SEQ ID NO: 208146 - DNA, 120 bp, Artificial Sequence
  ENSG00000115339_14 (sequence is synthesized)
aagatttgaaataaaacaccgccttcagtgtaaaaattttacatggtatctgaacaacatttatccagaggtgtatgtgccagaccttaatcctgttatatctggatacattaaaagcgt

SEQ ID NO: 208147 - DNA, 120 bp, Artificial Sequence
  ENSG00000115339_15 (sequence is synthesized)
tggtcagcctctatgtctggatgttggagaaaacaatcaaggaggcaaaccattaattatgtatacatgtcatggacttgggggaaaccagtactttgaatactctgctcaacatgaaat

SEQ ID NO: 208148 - DNA, 120 bp, Artificial Sequence
  ENSG00000115339_16 (sequence is synthesized)
tcggcacaacatccagaaggaattatgtcttcatgctgctcaaggtctcgttcagctgaaggcatgtacctacaaaggtcacaagacagttgtcactggagagcagatatgggagatcca

SEQ ID NO: 208149 - DNA, 120 bp, Artificial Sequence
  ENSG00000115339_17 (sequence is synthesized)
gaaggatcaacttctatacaatccattcttaaaaatgtgcctttcagcaaatggagagcatccaagtttagtgtcatgcaacccatcagatccactccaaaaatggatacttagccaaaa

SEQ ID NO: 208150 - DNA, 120 bp, Artificial Sequence
  ENSG00000115339_18 (sequence is synthesized)
tgattaagtgttccttaaaattaagttgaaaaaggaaatattctttctcataaaactgtgactaggcatacactgtagtttttgaaaattatgcaaaagcagctaaatgtaacttattcc

SEQ ID NO: 208151 - DNA, 120 bp, Artificial Sequence
  ENSG00000115339_19 (sequence is synthesized)
aagtgcatttttcttatttatatctttatgtagcactactacagaaattctgcaagtttctgtttcaaagcacaataactagtaataccaaagactatttcaaaatgtccagatgtaggg

SEQ ID NO: 208152 - DNA, 120 bp, Artificial Sequence
  ENSG00000115339_20 (sequence is synthesized)
gaagagatgtttacagtatgatgaaaataattttccaagtaaagtgatgtttgtgtgttttgtacacttagggatatatatatatagctacattcacacactcacaatttaaaatatttc

SEQ ID NO: 208153 - DNA, 120 bp, Artificial Sequence
  ENSG00000115339_21 (sequence is synthesized)
ccctagttttttggggggataggaagaaagatttgttactgtatttttttaactacataaaaatagatcaataaatgtcagcattggcctctgtgtacaaaccaagagcttttacagatc

SEQ ID NO: 208154 - DNA, 120 bp, Artificial Sequence
  ENSG00000115339_22 (sequence is synthesized)
cagaatttattagtttaaaatgcaggtgaacttttttttgcgtttggtttacttgtctgtcaaatgtttccttaaacatgaaactgaataaggagaagagtatttttaacacttaaattt

SEQ ID NO: 208155 - DNA, 120 bp, Artificial Sequence
  ENSG00000115339_23 (sequence is synthesized)
cttggcaaattttaaaacattttttagtctgtaatacactccacttgaagcacttaagtcttccttaaatgacttttcttaagtaatgatactgtgtgttttcccaaagcacttttaaaa

SEQ ID NO: 208156 - DNA, 120 bp, Artificial Sequence
  ENSG00000115339_24 (sequence is synthesized)
aaatttttataaattactatctgttgaaaaggtgtccttttcctttcttctagtatttttttcttaccaaaattcactaatcttgaatgtttgtgatattaaatttcaaatgcagaatac

SEQ ID NO: 208157 - DNA, 120 bp, Artificial Sequence
  ENSG00000115339_25 (sequence is synthesized)
ttgactcatttaaagctaaattttgttactgattcaattataattgtaatggatttttgactttgtaatggattcttttcatcaaaaagccttatttttttatctatgtggaaaacacaa

SEQ ID NO: 208158 - DNA, 120 bp, Artificial Sequence
  ENSG00000115339_26 (sequence is synthesized)
taaaaaatcctcaacactattgtaatcatttggttaagtttttttcctcttttgggtaaaatctgtaattgataataggtgggggaaaatgaattttgtatgctgaatttctaagcgcct

SEQ ID NO: 208159 - DNA, 120 bp, Artificial Sequence
  ENSG00000115339_27 (sequence is synthesized)
attgtttgtaaaaccatcagatatttcttatggcacaaaaaatgaggaatagcaaaattcctgtgttcaatatttagaaaattttgtattaatttctgataaagttccttaagcatctga

SEQ ID NO: 208160 - DNA, 120 bp, Artificial Sequence
  ENSG00000115339_28 (sequence is synthesized)
agtgtgtcggttgcccctggagagatcccgaaaggggcgccctgggccaaggggcaggtggcgcctcgggggggagcccggtcacaccctctcgcccacggtgcccccgccagtccctat

SEQ ID NO: 208161 - DNA, 120 bp, Artificial Sequence
  ENSG00000115339_29 (sequence is synthesized)
ggggcggcccctgaggagctggacggagaccaaagacctggggttccttcaggagtcacaagtactattgggttggaaaatctgggagaataatagtttacttactgatgaaactgctgt

SEQ ID NO: 208162 - DNA, 120 bp, Artificial Sequence
  ENSG00000115339_30 (sequence is synthesized)
acatgagccagcagttgctgccctcccgaagtggtcctcggaggcagcgcaccccttcattttggcgaaccgaggaggaagggaggaaccgtgtgggggaaatctagaacttctggttcc

SEQ ID NO: 208163 - DNA, 120 bp, Artificial Sequence
  ENSG00000115339_31 (sequence is synthesized)
ccaaggacccagcagactgtgttctggctacaaggtgatcactgccaccaggtcagtgcaggattcctccaatgtagatgggccgggagccacaacttgcgcggagcagcagcctcgccg

SEQ ID NO: 208164 - DNA, 120 bp, Artificial Sequence
  ENSG00000115339_32 (sequence is synthesized)
accactcagagagaagccgcgcgacagccaggcttggcccggacggcgcccccaccctgcgcgcgcgatccaaggttctcacctggagcgctcaggggttccttcaggagtcacaagtac

SEQ ID NO: 208165 - DNA, 120 bp, Artificial Sequence
  ENSG00000115339_33 (sequence is synthesized)
actggctatcgcggctcatagtatgtaatcgtttcctaaaaagtcctatttttcttttcctttgctcctgttgtcccatattagggtttaataaacttgctgtcctgttcttagggtcaa

SEQ ID NO: 208166 - DNA, 120 bp, Artificial Sequence
  ENSG00000115339_34 (sequence is synthesized)
ttgcaagcaatattttatcaaaccaaattctgcttttttaactttatgacttctataggctccctacagacacttcaagtaaagctaatgaattctctttttactattagatcttgtatt

SEQ ID NO: 208167 - DNA, 120 bp, Artificial Sequence
  ENSG00000115339_35 (sequence is synthesized)
tggaaattaaatatagcagatatattaaacaatgaaatatattgtgttctaatcggctggtacatatgattacagatgtgtgcactctactttttgtgctttctgaaacttaattgctgg

SEQ ID NO: 208168 - DNA, 120 bp, Artificial Sequence
  ENSG00000115350_0 (sequence is synthesized)
cgcagcacgctcaaggccgggatggcggcggcggcggcggcaggaagcgggacgccccgagaggaggagggacctgctggggaggcagcggcctcgcagccccaggccccaacgagtgtg

SEQ ID NO: 208169 - DNA, 120 bp, Artificial Sequence
  ENSG00000115350_1 (sequence is synthesized)
ggccccaacgagtgtgcctggggctcgtctctcgaggttgcctctggcgcgagtgaaggccttggtgaaggcagatcccgacgtgacgctagcgggacaggaagccatcttcattctggc

SEQ ID NO: 208170 - DNA, 120 bp, Artificial Sequence
  ENSG00000115350_2 (sequence is synthesized)
acgagccgcggaactgtttgtggagaccattgcaaaagatgcctactgttgcgctcagcagggaaaaaggaaaacccttcagaggagagacttggataatgcaatagaagctgtggatga

SEQ ID NO: 208171 - DNA, 120 bp, Artificial Sequence
  ENSG00000115350_3 (sequence is synthesized)
atttgcttttctggaaggtactttagattgattgccgagcggggcagttttgtgagccttcatctgaagccttcagttcacccctctgcacaggcctcagctttgaagaacggagtcttt

SEQ ID NO: 208172 - DNA, 120 bp, Artificial Sequence
  ENSG00000115350_4 (sequence is synthesized)
tcctgttctgccttcacctatgccgggataagcagagatctcatcaattagctcttctctgcaaggtcttccactatttctgtctgtcttccatatcaagcctggatgcagctgctgctg

SEQ ID NO: 208173 - DNA, 120 bp, Artificial Sequence
  ENSG00000115350_5 (sequence is synthesized)
cttagagcagagatgaagaaagtgttctgcataagtggcttcctgaatgatgaggaccagaataaaggtttttgatcaacctcagtccagtgtgttttataatctcgcctttgttcctac

SEQ ID NO: 208174 - DNA, 120 bp, Artificial Sequence
  ENSG00000115350_6 (sequence is synthesized)
cctgtgactggagagtcaccatacctggtcacagaccttcctgatcttccctgccagccattctaacatacagtcctttcattaattttgttcttttatttttccagcacatcaccagaa

SEQ ID NO: 208175 - DNA, 120 bp, Artificial Sequence
  ENSG00000115350_7 (sequence is synthesized)
agtggttccagaatttatggaacaccacttgccctcaggagttcaaataaatatggtcctagattgaaagccagttaaattttttttaagttttatttattgacatatccacatactcta

SEQ ID NO: 208176 - DNA, 120 bp, Artificial Sequence
  ENSG00000115350_8 (sequence is synthesized)
tatttcaccaatttaaagtgtacaattcagtggtatttagtatattcacaaatatgtacaccagtcatcacagtcgattttagaacattttatttatttatttattattattatacttta

SEQ ID NO: 208177 - DNA, 120 bp, Artificial Sequence
  ENSG00000115350_9 (sequence is synthesized)
atctccagggcctcgtacagaacttgtaggagtctttagtgaatgagggagaatactgggaagagggtagcggaatggatcttcatgaagtccaggacaatcttagcttccagaacattt

SEQ ID NO: 208178 - DNA, 120 bp, Artificial Sequence
  ENSG00000115350_10 (sequence is synthesized)
caaaagccatgtatccttattctcccagggtgttctcattacctccttcaagccttattacctttagaaatatcttgatttattccactcttttttactcctttgttctgcatctccctg

SEQ ID NO: 208179 - DNA, 120 bp, Artificial Sequence
  ENSG00000115350_11 (sequence is synthesized)
tcaacctaggcccctggtccttttgatagatattttttaaatgtcttattagatagatagactaccatggccaactctatgtctagactattgagcattcttttaatttgcagatttttc

SEQ ID NO: 208180 - DNA, 120 bp, Artificial Sequence
  ENSG00000115350_12 (sequence is synthesized)
ttcagcctctctttccacctactcatttttcttaaaattaacttttgttagtcctacctaaggcaggcactccttgtgacagactttctgtaagttctgcagtcaaaaatgtttggagcc

SEQ ID NO: 208181 - DNA, 120 bp, Artificial Sequence
  ENSG00000115353_0 (sequence is synthesized)
gagctgagcaacccgaaccgagaggtgcccgcgaaactgcaggcggcggcagcggcagcaaaagagaaggaaaaatctccagctggatacgaagctccagaatcctggccataggctcag

SEQ ID NO: 208182 - DNA, 120 bp, Artificial Sequence
  ENSG00000115353_1 (sequence is synthesized)
aacttttacaggtcgcgctgcaatgggcccccacttcgctcctaagtcctcacgcagcacagggctttgcctttccctgcggaggaaggagaaataggagttgcaggcagcagcaggtgc

SEQ ID NO: 208183 - DNA, 120 bp, Artificial Sequence
  ENSG00000115353_2 (sequence is synthesized)
ataaatgcgggggatctcttgcttcctagaactgtgaccggtggaatttctttccctttttcagtttaccgcaagagagatgctgtctccagacttctgaactcaaacgtctcctgaagc

SEQ ID NO: 208184 - DNA, 120 bp, Artificial Sequence
  ENSG00000115353_3 (sequence is synthesized)
ttgaaagtggaggaattcagagccaccgcgggcaggcgggcagtgcatccagaagcgtttatattctgagcgccagttcagctttcaaaaagagtgctgcccagaaaaagccttccaccc

SEQ ID NO: 208185 - DNA, 120 bp, Artificial Sequence
  ENSG00000115353_4 (sequence is synthesized)
tcctgtctggctttagaaggaccctgagccccaggcgccagccacaggactctgctgcagaggggggttgtgtacagatagtagggctttaccgcctagcttcgaaatggataacgtcct

SEQ ID NO: 208186 - DNA, 120 bp, Artificial Sequence
  ENSG00000115353_5 (sequence is synthesized)
cccggtggactcagacctctccccaaacatctccactaacacctcggaacccaatcagttcgtgcaaccagcctggcaaattgtcctttgggcagctgcctacacggtcattgtggtgac

SEQ ID NO: 208187 - DNA, 120 bp, Artificial Sequence
  ENSG00000115353_6 (sequence is synthesized)
ctctgtggtgggcaacgtggtagtgatgtggatcatcttagcccacaaaagaatgaggacagtgacgaactattttctggtgaacctggccttcgcggaggcctccatggctgcattcaa

SEQ ID NO: 208188 - DNA, 120 bp, Artificial Sequence
  ENSG00000115353_7 (sequence is synthesized)
tacagtggtgaacttcacctatgctgtccacaacgaatggtactacggcctgttctactgcaagttccacaacttctttcccatcgccgctgtcttcgccagtatctactccatgacggc

SEQ ID NO: 208189 - DNA, 120 bp, Artificial Sequence
  ENSG00000115353_8 (sequence is synthesized)
tgtggcctttgataggtacatggccatcatacatcccctccagccccggctgtcagccacagccaccaaagtggtcatctgtgtcatctgggtcctggctctcctgctggccttccccca

SEQ ID NO: 208190 - DNA, 120 bp, Artificial Sequence
  ENSG00000115353_9 (sequence is synthesized)
gggctactactcaaccacagagaccatgcccagcagagtcgtgtgcatgatcgaatggccagagcatccgaacaagatttatgagaaagtgtaccacatctgtgtgactgtgctgatcta

SEQ ID NO: 208191 - DNA, 120 bp, Artificial Sequence
  ENSG00000115353_10 (sequence is synthesized)
cttcctccccctgctggtgattggctatgcatacaccgtagtgggaatcacactatgggccagtgagatccccggggactcctctgaccgctaccacgagcaagtctctgccaagcgcaa

SEQ ID NO: 208192 - DNA, 120 bp, Artificial Sequence
  ENSG00000115353_11 (sequence is synthesized)
ggtggtcaaaatgatgattgtcgtggtgtgcaccttcgccatctgctggctgcccttccacatcttcttcctcctgccctacatcaacccagatctctacctgaagaagtttatccagca

SEQ ID NO: 208193 - DNA, 120 bp, Artificial Sequence
  ENSG00000115353_12 (sequence is synthesized)
ggtctacctggccatcatgtggctggccatgagctccaccatgtacaaccccatcatctactgctgcctcaatgacaggttccgtctgggcttcaagcatgccttccggtgctgcccctt

SEQ ID NO: 208194 - DNA, 120 bp, Artificial Sequence
  ENSG00000115353_13 (sequence is synthesized)
catcagcgccggcgactatgaggggctggaaatgaaatccacccggtatctccagacccagggcagtgtgtacaaagtcagccgcctggagaccaccatctccacagtggtgggggccca

SEQ ID NO: 208195 - DNA, 120 bp, Artificial Sequence
  ENSG00000115353_14 (sequence is synthesized)
cgaggaggagccagaggacggccccaaggccacaccctcgtccctggacctgacctccaactgctcttcacgaagtgactccaagaccatgacagagagcttcagcttctcctccaatgt

SEQ ID NO: 208196 - DNA, 120 bp, Artificial Sequence
  ENSG00000115353_15 (sequence is synthesized)
gctctcctaggccacagggcctttggcaggtgcagcccccactgcctttgacctgcctcccttcatgcatggaaattcccttcatctggaaccatcagaaacaccctcacactgggactt

SEQ ID NO: 208197 - DNA, 120 bp, Artificial Sequence
  ENSG00000115353_16 (sequence is synthesized)
gcaaaaagggtcagtatgggttagggaaaacattccatccttgagtcaaaaaatctcaattcttccctatctttgccaccctcatgctgtgtgactcaaaccaaatcactgaactttgct

SEQ ID NO: 208198 - DNA, 120 bp, Artificial Sequence
  ENSG00000115353_17 (sequence is synthesized)
gagcctgtaaaataaaaggtcggaccagcttttcccaaaagcccattcattccattctggaagtgactttggctgcatgcgagtgctcatttcaggatgaattctgcagcacagctgcgg

SEQ ID NO: 208199 - DNA, 120 bp, Artificial Sequence
  ENSG00000115353_18 (sequence is synthesized)
acccggaagactcattttcctggagccccgtgttacttcaataaagttatctcagattagcctcctgcagctggaggctcctatcaccccagcctacgcttgacagggtgaacaaaagaa

SEQ ID NO: 208200 - DNA, 120 bp, Artificial Sequence
  ENSG00000115353_19 (sequence is synthesized)
tacatttatacatcatgagattgagaacctcgggcttccacattatgtccccggtgactgtcctgagcagccgacgcaagcagaatatgtccactgatacctgctagttctcttacagac

SEQ ID NO: 208201 - DNA, 120 bp, Artificial Sequence
  ENSG00000115353_20 (sequence is synthesized)
caggaattgggagacttgcactacatttaatgtgtagttgaccctcttttcctacttgtaaacaaggggactgaactagataatctaagtgttccttcgaatcttaacatcccgtggttc

SEQ ID NO: 208202 - DNA, 120 bp, Artificial Sequence
  ENSG00000115353_21 (sequence is synthesized)
aaggattgtatgagttttttgtttgttttacaaaaaaaaacaaaacgaagaataaaagaatagaaaagaataggagcagtgagtcttgtaactaatacccagttcctggagatgtagcaa

SEQ ID NO: 208203 - DNA, 120 bp, Artificial Sequence
  ENSG00000115353_22 (sequence is synthesized)
ctgctaaggccatctgtaactatccatctcagacattctccgatttatcttaaaatcctgagtacattccttctcatggaaggttttggcttttgacagagcagaggacttcatgccaag

SEQ ID NO: 208204 - DNA, 120 bp, Artificial Sequence
  ENSG00000115353_23 (sequence is synthesized)
gcctgcatccatccagctttagcaggcagaatttcatagctgcagaacactgtcagagaagacaaatgtgggctccctgctttaaccttttgggtattttagggtgggggccctaacctt

SEQ ID NO: 208205 - DNA, 120 bp, Artificial Sequence
  ENSG00000115353_24 (sequence is synthesized)
cattcttagttttacactagcatcgtgctcatatgtgcgacaagcaagaaggctgcactttgcagctgcacttctgggaagagggcatcttgcatcttcccttcagactctctgaatgtc

SEQ ID NO: 208206 - DNA, 120 bp, Artificial Sequence
  ENSG00000115353_25 (sequence is synthesized)
tcctccctgctccatggctttgccagcttcctgtctctaaggggtagaatgactcatcaaccctaaaggacagtcagtcttccaagagccatgaactgaatgctttatatcctaatttag

SEQ ID NO: 208207 - DNA, 120 bp, Artificial Sequence
  ENSG00000115353_26 (sequence is synthesized)
atttagagtttccagaaggtgagcatgcagttttgttttgtttttttttctgtctcccaaatctgtgttttttccagatatggctggaagcagaagcttcatgtaacatccatgaatgtc

SEQ ID NO: 208208 - DNA, 120 bp, Artificial Sequence
  ENSG00000115353_27 (sequence is synthesized)
ctcctggtagtttgcataatggatgcacatgtgccgcatccataacattaaggggagaataatgcatggtttacagcctttgccagccctgctggctctaattctaccagggcatccaca

SEQ ID NO: 208209 - DNA, 120 bp, Artificial Sequence
  ENSG00000115353_28 (sequence is synthesized)
ggcctgggggaagaagaaacagtataagccagaaaacctcaagaactacattctctaaagcagcatggaaagttttaaataaactaagtgaagccagatcattgcagatatataaatgga

SEQ ID NO: 208210 - DNA, 120 bp, Artificial Sequence
  ENSG00000115353_29 (sequence is synthesized)
agacaaaatttagaagcaacaaaagttagtgccctaagcattagtcatacttccaatagagaatcttgctgtgtatggattactcactttggaagaatgtaaagagctaacatgattatg

SEQ ID NO: 208211 - DNA, 120 bp, Artificial Sequence
  ENSG00000115353_30 (sequence is synthesized)
agaagtacctgagaagatggtgtcaagaagttggggacaccccatctatggaagagaaggttagagttgagctcaacgaggattaactgagtgcctcctctggactttgccctgaactgg

SEQ ID NO: 208212 - DNA, 120 bp, Artificial Sequence
  ENSG00000115353_31 (sequence is synthesized)
gaacacacagcccctgcagctcttgaagagcctaccttattggccatcactaactaactcaccagtcctagtgagtctaagctgcccagcagtcttggaggcatctgagaggacagattc

SEQ ID NO: 208213 - DNA, 120 bp, Artificial Sequence
  ENSG00000115353_32 (sequence is synthesized)
tccacagaattctaaaaacccacactcaacatgggcagtcaagccaaagactgggacctttggagagcctctggaatgagagttctctggggtacttccaaagggagctggcagtcagtc

SEQ ID NO: 208214 - DNA, 120 bp, Artificial Sequence
  ENSG00000115353_33 (sequence is synthesized)
caggggacctaaaggaatttggttgaacagtatcatctctgtgcatagtaagagggaatgttgggtggtccgggcagtttccaatatggcaaagcatctgcttggacagtgccagcaagc

SEQ ID NO: 208215 - DNA, 120 bp, Artificial Sequence
  ENSG00000115353_34 (sequence is synthesized)
cttcctctgacccagtctccaatgtccactaacttataaaaatgtcatcaactcccacatgtaagaaacaccatgatttgtactgtgcatgggtcacattcttattctagaaatgcatca

SEQ ID NO: 208216 - DNA, 120 bp, Artificial Sequence
  ENSG00000115353_35 (sequence is synthesized)
ccctgtgtttatccaagtgtgtttacttggtgtaatgtccagtagtaatagaatatgaaatatcaaggaaccatctttgttacgtgacttccaaaatgtgagatctcattgctgtcactg

SEQ ID NO: 208217 - DNA, 120 bp, Artificial Sequence
  ENSG00000115353_36 (sequence is synthesized)
tgatatttgtattgtgtgaatctcttcctcctcttcctcctcatgctttctcagggaggagccctgatgtatatcatgaactcacagttcctagaccacagtaattgaggggcggtgggg

SEQ ID NO: 208218 - DNA, 120 bp, Artificial Sequence
  ENSG00000115353_37 (sequence is synthesized)
gggcctttatcggagaagctagagaacaagagtccttctcctccttatcccccaacaggacactaagagacaaggactgagtggaatcctggagaaaggggactcaggaactgacctcat

SEQ ID NO: 208219 - DNA, 120 bp, Artificial Sequence
  ENSG00000115353_38 (sequence is synthesized)
tggcctgatttgtgaggagaggagtataagtggagaggggccattcctgaggtttccgtgttttccagcctggtctcctggaaagaatctttatacagaaataaagtatgtgtttcactc

SEQ ID NO: 208220 - DNA, 120 bp, Artificial Sequence
  ENSG00000115353_39 (sequence is synthesized)
tcatctactgctgcctcaatgacaggtgaggatcccaaccccatgagctctccaggggccacaagaccatctacatacacagtggccaagcggccatcctaaatgagtaaacccagctgt

SEQ ID NO: 208221 - DNA, 120 bp, Artificial Sequence
  ENSG00000115353_40 (sequence is synthesized)
gagacaagagggacaagtggggactgcagctaacttatcatcacacaactcagcctggctgattatcaccatccaggaatgggagcccggagtggactgattttctttttttcttttcca

SEQ ID NO: 208222 - DNA, 120 bp, Artificial Sequence
  ENSG00000115353_41 (sequence is synthesized)
ctgagcaaggtcccagcgggagaaagaacacagctttacaagccatacagaacctgtgaacatgttcaagccagaaggtttcctcaaaagggaaaaaaaaaatctccgaattaaagctcg

SEQ ID NO: 208223 - DNA, 120 bp, Artificial Sequence
  ENSG00000115355_0 (sequence is synthesized)
ggggtgtgatgcggcactgcggttctgaggccgttactccggcttctccatagagggcggagaaggctggagcgcggcggtgattttgtgccagggattcccagagacgcgctgaaaggc

SEQ ID NO: 208224 - DNA, 120 bp, Artificial Sequence
  ENSG00000115355_1 (sequence is synthesized)
tggcagggcttaggaagctggggggttagggacacacattcaagcccccacccccgggaggggaagggggctggaggcgaggcttgagggcggcggaggaatggtgtctgctcgggggga

SEQ ID NO: 208225 - DNA, 120 bp, Artificial Sequence
  ENSG00000115355_2 (sequence is synthesized)
aggggcgagccctgcctgttggtactgaggggctgcgggcagtggaggctccgcgggtcgaaagcggctccatgcccatcggtgggtggaacgtgtagaggtcggaacgccgaggtcgag

SEQ ID NO: 208226 - DNA, 120 bp, Artificial Sequence
  ENSG00000115355_3 (sequence is synthesized)
tctggtggcgcctcggtatccttaacgtggtctctgtttaacgtatttcatttagcccccgttgggattgattcattgggagcagtttcgctggtctggatcctccaggagctggacaac

SEQ ID NO: 208227 - DNA, 120 bp, Artificial Sequence
  ENSG00000115355_4 (sequence is synthesized)
cttgacgggctttttgtcttgggttccagccccctttcccttcctcctcctccagatgccttttctctgcccctcctcgcccggtacagacatttccagcgcaggctgctgctcgtggtg

SEQ ID NO: 208228 - DNA, 120 bp, Artificial Sequence
  ENSG00000115355_5 (sequence is synthesized)
tccgtcgtcgaagccacttcttgggatttcggctcgtttcactctggggtgttttttgaggagggagagtgcccccctcctccacgatgggatttttctcccttgccgaaatggactttc

SEQ ID NO: 208229 - DNA, 120 bp, Artificial Sequence
  ENSG00000115355_6 (sequence is synthesized)
attgatttctacttacttccacgtttagtgaccaattccctaggcgtatttttgtggtagttccttttttcaaatacatactctgtaaaatggagaacgaaatttttactccccttctgg

SEQ ID NO: 208230 - DNA, 120 bp, Artificial Sequence
  ENSG00000115355_7 (sequence is synthesized)
agcagttcatgaccagccctttggtcacttgggttaaaacgtttggacctctggccgcaggaaatgggaccaaccttgatgaatatgtggctttggtggatggggtattcttgaaccagg

SEQ ID NO: 208231 - DNA, 120 bp, Artificial Sequence
  ENSG00000115355_8 (sequence is synthesized)
tcatgctccaaattaatcctaaattggagagtcagagagtaaataaaaaagtcaataatgatgcctcacttagaatgcacaatctatccattttggtgagacagataaaattttattacc

SEQ ID NO: 208232 - DNA, 120 bp, Artificial Sequence
  ENSG00000115355_9 (sequence is synthesized)
aggagactttgcagcaattgatcatgatgtcgttgccaaatgtcttaatcattggcaaaaatcccttttctgaacaaggcacagaagaagttaaaaaactgcttttacttttattgggtt

SEQ ID NO: 208233 - DNA, 120 bp, Artificial Sequence
  ENSG00000115355_10 (sequence is synthesized)
gtgcagttcagtgtcagaaaaaagaggaatttattgaaagaattcaaggtttagattttgatacaaaagcagcggttgccgcacatattcaagaggtaactcataatcaggaaaatgtgt

SEQ ID NO: 208234 - DNA, 120 bp, Artificial Sequence
  ENSG00000115355_11 (sequence is synthesized)
ttgacctgcaatggatggaagtgactgatatgtcgcaggaggacatagaaccactcttgaaaaatatggcattgcatctaaaaagacttatagatgagagagatgaacattcagagacta

SEQ ID NO: 208235 - DNA, 120 bp, Artificial Sequence
  ENSG00000115355_12 (sequence is synthesized)
tcatagaactctctgaagagcgggatggtctccattttctaccccatgcctcttcatctgcacagtcaccctgtggttctccaggcatgaagcgaacagaaagtcgacaacatctgtcgg

SEQ ID NO: 208236 - DNA, 120 bp, Artificial Sequence
  ENSG00000115355_13 (sequence is synthesized)
tggaactggcagatgctaaagccaagataagaaggcttaggcaggaattggaggaaaagactgagcagttgttggattgtaaacaagaacttgagcaaatggaaatagaactcaaaaggc

SEQ ID NO: 208237 - DNA, 120 bp, Artificial Sequence
  ENSG00000115355_14 (sequence is synthesized)
tgcaacaagagaacatgaatttgctttcggatgctcgctctgccagaatgtaccgagatgaattagatgcacttcgagagaaagcagtcagagtcgataagcttgaaagtgaagtcagca

SEQ ID NO: 208238 - DNA, 120 bp, Artificial Sequence
  ENSG00000115355_15 (sequence is synthesized)
gatataaagagagactacatgatattgaattttataaggcaagagttgaggaattaaaagaagacaatcaagttttattagaaacaaaaaccatgttggaagaccaactagagggaactc

SEQ ID NO: 208239 - DNA, 120 bp, Artificial Sequence
  ENSG00000115355_16 (sequence is synthesized)
gtgctcgttctgataaattacatgaattagaaaaagagaacttacaactgaaagctaaacttcatgatatggaaatggaacgagatatggatagaaaaaagattgaagaattaatggaag

SEQ ID NO: 208240 - DNA, 120 bp, Artificial Sequence
  ENSG00000115355_17 (sequence is synthesized)
aaaatatgactttggaaatggcacagaaacaaagtatggatgaatcattacatcttggctgggaactggaacagatatccagaactagtgaactttccgaagcaccccagaaatccctgg

SEQ ID NO: 208241 - DNA, 120 bp, Artificial Sequence
  ENSG00000115355_18 (sequence is synthesized)
gccatgaggtgaatgagttgacatcaagtagattattgaagctagagatggaaaatcaaagtttgacaaaaaccgtagaagagcttcggactactgtggattctgtagaaggcaatgctt

SEQ ID NO: 208242 - DNA, 120 bp, Artificial Sequence
  ENSG00000115355_19 (sequence is synthesized)
ccaaaatcctgaaaatggaaaaagaaaatcaaaggctcagtaaaaaggttgagattcttgaaaatgagattgttcaagaaaagcaaagtcttcagaattgtcagaatttaagcaaggatc

SEQ ID NO: 208243 - DNA, 120 bp, Artificial Sequence
  ENSG00000115355_20 (sequence is synthesized)
taatgaaggagaaagctcagcttgaaaaaacaatagaaacactgagagaaaattcagagagacagattaagatactggaacaggaaaatgaacatctgaatcaaacagtgtcttccttaa

SEQ ID NO: 208244 - DNA, 120 bp, Artificial Sequence
  ENSG00000115355_21 (sequence is synthesized)
ggcagcggtcccagataagtgcagaagcaagagtgaaagacattgaaaaagaaaacaaaattcttcatgaatctatcaaagaaacaagtagcaagctaagcaagattgaatttgaaaaaa

SEQ ID NO: 208245 - DNA, 120 bp, Artificial Sequence
  ENSG00000115355_22 (sequence is synthesized)
gacaaattaaaaaagaattggaacattataaagaaaaaggagaacgagctgaagaacttgaaaatgaattgcatcatcttgaaaaagaaaatgaattattacagaaaaaaataactaatt

SEQ ID NO: 208246 - DNA, 120 bp, Artificial Sequence
  ENSG00000115355_23 (sequence is synthesized)
taaaaattacttgtgaaaaaattgaggccttagaacaagaaaattcagagctagaaagagaaaatagaaaattaaaaaaaacattggatagctttaaaaatctgacctttcagttagaat

SEQ ID NO: 208247 - DNA, 120 bp, Artificial Sequence
  ENSG00000115355_24 (sequence is synthesized)
ccctagaaaaagagaattcccaacttgatgaggaaaacttagaactgcgaaggaatgtagaatctttgaagtgtgcaagcatgaaaatggctcagctacagctagaaaacaaagaactgg

SEQ ID NO: 208248 - DNA, 120 bp, Artificial Sequence
  ENSG00000115355_25 (sequence is synthesized)
aaagtgaaaaagagcaacttaagaagggtttggagctcctgaaagcatctttcaagaaaacagaacgcttagaagttagctaccagggtttagatatagaaaatcaaagactgcaaaaaa

SEQ ID NO: 208249 - DNA, 120 bp, Artificial Sequence
  ENSG00000115355_26 (sequence is synthesized)
ctttagagaacagcaataaaaaaatccagcaattagagagtgaactacaagacttagagatggaaaatcaaacattgcagaaaaacctagaagaactaaaaatatctagcaaaagactag

SEQ ID NO: 208250 - DNA, 120 bp, Artificial Sequence
  ENSG00000115355_27 (sequence is synthesized)
aacagctggaaaaagaaaataaatcattagagcaagagacttctcaactggaaaaggataagaaacaattggagaaggaaaataagagactccgacaacaagcagaaattaaagatacca

SEQ ID NO: 208251 - DNA, 120 bp, Artificial Sequence
  ENSG00000115355_28 (sequence is synthesized)
cattagaagaaaataatgtgaagattggaaatttggaaaaagaaaacaaaaccctatccaaagaaattggtatatataaagaatcttgtgtccgtctgaaagaactagaaaaagaaaata

SEQ ID NO: 208252 - DNA, 120 bp, Artificial Sequence
  ENSG00000115355_29 (sequence is synthesized)
aggagcttgtgaaaagagcaactattgatataaaaacgttggttacactacgtgaggatttggtgagtgaaaagttgaagacccaacagatgaacaatgatctcgaaaaattaactcatg

SEQ ID NO: 208253 - DNA, 120 bp, Artificial Sequence
  ENSG00000115355_30 (sequence is synthesized)
agcttgagaagatagggttaaataaggagcgactcttacatgatgaacaaagtactgatgacagtaggtataaacttttggaatcaaaattagaatccactcttaagaagtctcttgaaa

SEQ ID NO: 208254 - DNA, 120 bp, Artificial Sequence
  ENSG00000115355_31 (sequence is synthesized)
taaaagaagaaaaaattgctgctttagaagctcgattagaagaatccacgaattataaccagcaattgcgccaagaacttaaaacagtgaaaaaaaattatgaagctctcaaacagagac

SEQ ID NO: 208255 - DNA, 120 bp, Artificial Sequence
  ENSG00000115355_32 (sequence is synthesized)
aagatgaggaaaggatggtacagagctctcctccaatatctggtgaagacaacaaatgggagcgagaaagtcaagaaacgactagagaacttctgaaagttaaagacagattaattgaag

SEQ ID NO: 208256 - DNA, 120 bp, Artificial Sequence
  ENSG00000115355_33 (sequence is synthesized)
tagaaagaaataatgctacactgcaagcagagaagcaagcgttgaaaactcaactgaagcaacttgagacacagaacaataatttgcaggctcagattcttgcacttcagaggcagacag

SEQ ID NO: 208257 - DNA, 120 bp, Artificial Sequence
  ENSG00000115355_34 (sequence is synthesized)
tgtcattacaagaacagaataccactcttcaaacacagaatgccaagcttcaggttgaaaattccacccttaattcccaaagtacctcactcatgaaccagaatgcccaactcctaatcc

SEQ ID NO: 208258 - DNA, 120 bp, Artificial Sequence
  ENSG00000115355_35 (sequence is synthesized)
agcagtcttccttagaaaatgaaaatgaatctgtaatcaaagagcgagaagacctaaaatctctctatgattctctgatcaaagatcatgaaaagctggaacttcttcatgaacgtcagg

SEQ ID NO: 208259 - DNA, 120 bp, Artificial Sequence
  ENSG00000115355_36 (sequence is synthesized)
cttcagagtatgaatctcttatctctaaacatggaactctgaagtctgcccacaaaaatcttgaggtggaacatagagaccttgaagaccgttacaatcagttattaaaacagaaaggac

SEQ ID NO: 208260 - DNA, 120 bp, Artificial Sequence
  ENSG00000115355_37 (sequence is synthesized)
agttggaagatttggaaaaaatgctcaaagtagaacaggaaaaaatgctgcttgaaaataaaaatcatgaaacagtagctgcagaatacaagaaactttgtggtgaaaatgataggctga

SEQ ID NO: 208261 - DNA, 120 bp, Artificial Sequence
  ENSG00000115355_38 (sequence is synthesized)
atcatacctatagtcaacttttaaaagagactgaagttttacaaactgaccataaaaatttgaaaagtcttctgaataattccaaactggaacaaacaagattagaagctgaattttcaa

SEQ ID NO: 208262 - DNA, 120 bp, Artificial Sequence
  ENSG00000115355_39 (sequence is synthesized)
aactaaaggaacaataccaacaattggatattacatcaaccaagctgaataaccagtgtgagttgctaagccaacttaaaggaaatttagaagaagaaaatcggcatctactagatcaaa

SEQ ID NO: 208263 - DNA, 120 bp, Artificial Sequence
  ENSG00000115355_40 (sequence is synthesized)
atgaattaagacgtcagaaggagaaactagaagagaaaattatggatcaatacaaattttatgacccatctcctcctagaaggagaggcaactggattactctaaaaatgagaaaattga

SEQ ID NO: 208264 - DNA, 120 bp, Artificial Sequence
  ENSG00000115355_41 (sequence is synthesized)
taaagtctaagaaagatattaatcgggaacgccagaaatctctaacattaacacccacccgctcagactccagtgaaggatttcttcagctccctcatcaagacagtcaagatagttctt

SEQ ID NO: 208265 - DNA, 120 bp, Artificial Sequence
  ENSG00000115355_42 (sequence is synthesized)
cagtaggttcaaactctttagaagatggccagaccttggggaccaagaaaagcagcaccatgaatgacctggtgcagtccatggtcctagcaggacagtggacaggtagtactgagaatt

SEQ ID NO: 208266 - DNA, 120 bp, Artificial Sequence
  ENSG00000115355_43 (sequence is synthesized)
tggaggttcctgatgatatttcaacgggtaaaaggagaaaagaattgggagctatggccttctctactacagccatcaacttttcaactgtcaactcttctgcaggcttcagatccaagc

SEQ ID NO: 208267 - DNA, 120 bp, Artificial Sequence
  ENSG00000115355_44 (sequence is synthesized)
agttggttaataataaagatactacatcctttgaagacataagtccacaaggtgttagtgatgattctagtacgggatcaagagttcatgcttcaagaccagccagccttgatagtggca

SEQ ID NO: 208268 - DNA, 120 bp, Artificial Sequence
  ENSG00000115355_45 (sequence is synthesized)
gaacatccactagcaatagcaataataatgcttcactacatgaagtcaaagcaggtgcagttaataaccaaagcaggccacaaagccacagcagtggagaatttagcctgcttcatgacc

SEQ ID NO: 208269 - DNA, 120 bp, Artificial Sequence
  ENSG00000115355_46 (sequence is synthesized)
atgaggcttggtccagcagtggtagcagtccaatccagtacttgaaaagacagaccagatcaagcccagtgctccagcacaaaatatctgaaacactggagagtcgacatcacaagatca

SEQ ID NO: 208270 - DNA, 120 bp, Artificial Sequence
  ENSG00000115355_47 (sequence is synthesized)
aaactggttcccctggaagtgaagttgttactctacaacagtttttggaagaaagcaataagcttacctcagtacagataaagtcctcaagtcaagagaatcttttagatgaagtaatga

SEQ ID NO: 208271 - DNA, 120 bp, Artificial Sequence
  ENSG00000115355_48 (sequence is synthesized)
aaagtttgtctgtctcttctgactttttgggaaaagacaaaccagttagctgtggtctggccaggtcagtaagtggaaaaaccccaggggacttctatgatagacggacaactaagcctg

SEQ ID NO: 208272 - DNA, 120 bp, Artificial Sequence
  ENSG00000115355_49 (sequence is synthesized)
agtttttgagacctggtcctcgaaaaactgaagatacctacttcattagttctgcgggaaaacctacaccaggcactcaaggaaaaataaaattagtaaaagaatcttctctgtcacgac

SEQ ID NO: 208273 - DNA, 120 bp, Artificial Sequence
  ENSG00000115355_50 (sequence is synthesized)
aatcaaaagatagtaacccttatgcaactttacctcgtgcaagcagcgtgatctcaactgccgaaggaactacacgaaggacaagcatccatgattttttgaccaaggacagtagactgc

SEQ ID NO: 208274 - DNA, 120 bp, Artificial Sequence
  ENSG00000115355_51 (sequence is synthesized)
ctatatcagttgattcaccaccagctgctgctgacagcaacaccactgcagcatctaatgtggacaaagtacaagaaagcagaaattcaaaaagcaggtctagggagcaacaaagctcct

SEQ ID NO: 208275 - DNA, 120 bp, Artificial Sequence
  ENSG00000115355_52 (sequence is synthesized)
aattctattacccactacatgacatgtgggccaagtgagagaaaagtgtccttcagtttctcagtatgaagcctttatttctgaagtaacaagacacctagcaactataggaatcatttt

SEQ ID NO: 208276 - DNA, 120 bp, Artificial Sequence
  ENSG00000115355_53 (sequence is synthesized)
taaaaatctttaaggagacttttaacagtccttcgtgaatagagcaggcaagaaatacaaaccttcattccttgaatcaaggagcactactggattcaactgccaaaattttttaaaggt

SEQ ID NO: 208277 - DNA, 120 bp, Artificial Sequence
  ENSG00000115355_54 (sequence is synthesized)
tttaggacttactataccttgtactgttaagatctactgaataaaggacgttctctcactaaggaccaggtgttttaaggttaagtgtttaaagaagtactccaagaacaatctgctttt

SEQ ID NO: 208278 - DNA, 120 bp, Artificial Sequence
  ENSG00000115355_55 (sequence is synthesized)
ttcatcatttgttttatgaatttatccatgtttgcttaatgcttctgctaagtgttagccaaaatctagccatttatatttagttgtgtaaacctaaattaaatgctgtagtattttgtg

SEQ ID NO: 208279 - DNA, 120 bp, Artificial Sequence
  ENSG00000115355_56 (sequence is synthesized)
gaatgtactatatagcaagatacagagaaaattgttttggcatgtcagagccttatttggttagcagactgcatgtgttgatactttttttttcttaaagccaattattttgatgcaaaa

SEQ ID NO: 208280 - DNA, 120 bp, Artificial Sequence
  ENSG00000115355_57 (sequence is synthesized)
gaaattcagtttataagataaatctgaaaaatccataatgaaataggagttataaaaaatttatagtgatattaatctttccatatttcccattaagcaacactaagcattcataagtta

SEQ ID NO: 208281 - DNA, 120 bp, Artificial Sequence
  ENSG00000115355_58 (sequence is synthesized)
acccatggtaaagagtgtttttctgaaacttttttttagtaagatggtttttcagcaaatggcattcccaagataaagctgttgtgctttaactcatttcttttctttggtattgggtta

SEQ ID NO: 208282 - DNA, 120 bp, Artificial Sequence
  ENSG00000115355_59 (sequence is synthesized)
tgtatgcgtgtgcatttttttaacttgagagctgactgttgcttaagaagttttcttatggcaaaaataatgtaaataagttactatgatctgcattttgccagaaactcatttataatt

SEQ ID NO: 208283 - DNA, 120 bp, Artificial Sequence
  ENSG00000115355_60 (sequence is synthesized)
aaggctatcatttattaatgatttttttctcctttatgatattacattaaagttgataactgttattggtacttttgaaatatttgtatgcatttgttacctttaaacatttggaagaag

SEQ ID NO: 208284 - DNA, 120 bp, Artificial Sequence
  ENSG00000115355_61 (sequence is synthesized)
cacaaaaaaatagatttagttaacccagggaaacatcaatttttttagtagttccaattttatatcacagttttattttcttatgaaatcaaaaaatgcattgatactcattaatgcaaa

SEQ ID NO: 208285 - DNA, 120 bp, Artificial Sequence
  ENSG00000115355_62 (sequence is synthesized)
ttcattatttaacatcaatatcagagtaatcttcaaggtctgaaatgagaaacatactgactttttaaaattttaacagtgtacttcttaggctttcattaccagctctgaagaactttt

SEQ ID NO: 208286 - DNA, 120 bp, Artificial Sequence
  ENSG00000115355_63 (sequence is synthesized)
gctctgaagaactttttggaataattccatattccatagtgtgtggtttatgagttgtgggtttcatcactaacccagtaaccataagaaaagtctctctctctctctctctctctctct

SEQ ID NO: 208287 - DNA, 120 bp, Artificial Sequence
  ENSG00000115355_64 (sequence is synthesized)
ttctctctctctttcgtaggccagtagcaatgttgtgttcacagtctaatttccaaaagaccatcaataaaaaagagagcatgtttaaattgaaatggaacttagagaacttgagcttac

SEQ ID NO: 208288 - DNA, 120 bp, Artificial Sequence
  ENSG00000115355_65 (sequence is synthesized)
ttacgtacttcaatgccaccggtaacttaggttttaccaccaaatgctgttaacgttaaatcattttgaaaatcttggatgaaaggtgctatgtaaatggaaatacaaaggattcttact

SEQ ID NO: 208289 - DNA, 120 bp, Artificial Sequence
  ENSG00000115355_66 (sequence is synthesized)
aacatacaaaaataatgcacaacagaaatatctaaaaccttttccgtagactttgaaacatctctctctctcataactccctggattcaagtagcacattggtaataggtatcagagcag

SEQ ID NO: 208290 - DNA, 120 bp, Artificial Sequence
  ENSG00000115355_67 (sequence is synthesized)
tctagagacaattgcatgtcaaaaaatgtacattcatttttaggtggataaaagtaaacatagaaattatgttatggctaaatacagttagtgggtaacttagatttatattagctagca

SEQ ID NO: 208291 - DNA, 120 bp, Artificial Sequence
  ENSG00000115355_68 (sequence is synthesized)
tctaatttgcacaactagaacacatcccagaacaattactgaaaagctgaaatttaatgggtggtgatgtagcccaatgagggcgaatgacattacagcttgacctctccagaacactaa

SEQ ID NO: 208292 - DNA, 120 bp, Artificial Sequence
  ENSG00000115355_69 (sequence is synthesized)
tatcctaaaatacagaacatgctgggttaagtgcattagtgcttcaagcagaaaatgctgaaaacaacgtgtaaagtactgaatctgagtaggctgaccctgagaagggacaattaaaga

SEQ ID NO: 208293 - DNA, 120 bp, Artificial Sequence
  ENSG00000115355_70 (sequence is synthesized)
gacaaccaagggaacacattgagactacaaaaatatgaataatctcaattatattcatcacacttttttcataccatttcaagaaacgactagacagtagtaaccacatgaatattttac

SEQ ID NO: 208294 - DNA, 120 bp, Artificial Sequence
  ENSG00000115355_71 (sequence is synthesized)
tttctccagtataccttgagaagcaaactttgtaggaagccactcttctcccctaaacaacttctgccaaacaataataaagccaactggaaacgaatcggagccattttcattttccta

SEQ ID NO: 208295 - DNA, 120 bp, Artificial Sequence
  ENSG00000115355_72 (sequence is synthesized)
accggggcctgacatgctttaaattatctggctgtattctaaatcaacacctaacccctcaaggaaactgaagaatcaatatacagggtaatagctttggctcagagctccaataatgtg

SEQ ID NO: 208296 - DNA, 120 bp, Artificial Sequence
  ENSG00000115355_73 (sequence is synthesized)
cttcagatctgtccatgtggaaatgctttcatccaaatttttaaattggtggttaccaaagagttcacaaaacaggtttgtatgtagcacctttcatgcaaggcatgcaaaaagcctatt

SEQ ID NO: 208297 - DNA, 120 bp, Artificial Sequence
  ENSG00000115355_74 (sequence is synthesized)
ttaaaatcactgtgcatattatagagttgtagccacctcacaatgaagtactacagcctgtgctgtcttaatggtttatgtcaggaaatgaaaaagatactgtaccaaatctggaattac

SEQ ID NO: 208298 - DNA, 120 bp, Artificial Sequence
  ENSG00000115355_75 (sequence is synthesized)
aatggggagtaataatgtatactaaatgacttttgtattttaagttactttttgtgagtggtgaatttttgtgtttttcttttcagctacacttagtcctgagatgtattttttctttaa

SEQ ID NO: 208299 - DNA, 120 bp, Artificial Sequence
  ENSG00000115355_76 (sequence is synthesized)
gtcttgaatgaatacaaaaggagcccattttataatataaaccttgatgtacatgttgagatatttggacaatgaaaatgccttaaaaggaatgcatatggataaagttgcacttataac

SEQ ID NO: 208300 - DNA, 120 bp, Artificial Sequence
  ENSG00000115355_77 (sequence is synthesized)
acccttcaacaaaatctaattttaaattgtctttttcttttctattaagggttttctttttcagtgtctaccattgtacttataactgttattaaataccaaatcaaataatataaaagc

SEQ ID NO: 208301 - DNA, 120 bp, Artificial Sequence
  ENSG00000115355_78 (sequence is synthesized)
tgtaacatttcctttaaaactaatgctaataagggatttagagttgaatggcaaaatgtttattacttggcaatacctgatgtcagtcacaggcatccaactcatgacaagagataccac

SEQ ID NO: 208302 - DNA, 120 bp, Artificial Sequence
  ENSG00000115355_79 (sequence is synthesized)
tgtttgttttttaaaaaacatttttcattttgtttctccttcaaaaattaagttggactaacattcacgtatcaaactaatataaaaagaaataaaaccaagaggtgatttttgtaacaa

SEQ ID NO: 208303 - DNA, 120 bp, Artificial Sequence
  ENSG00000115355_80 (sequence is synthesized)
cagaccttggggaccaagaaaagcagcatggttgcactgaaaagactgccctttttgaggaacagaccgaaggataaagacaaaatgaaggcctgctaccgtcgttccatgtccatgaat

SEQ ID NO: 208304 - DNA, 120 bp, Artificial Sequence
  ENSG00000115355_81 (sequence is synthesized)
aagtgctctttttaaaaatctggggttttaataactacttacatttttgtattatttagtatcagtcatctcacaaatatttaaacgcttattatatgctaggttctgatctatttgcta

SEQ ID NO: 208305 - DNA, 120 bp, Artificial Sequence
  ENSG00000115355_82 (sequence is synthesized)
gagttagagtagtaaataagatagtttattttttatgaatgttaaaggcttaagcaagcatttaataattttctaatgttacaaatgactattgtattttatgttttaaaaatcaggtcc

SEQ ID NO: 208306 - DNA, 120 bp, Artificial Sequence
  ENSG00000115355_83 (sequence is synthesized)
tatatgggttatataggtgtttgccattctcaaaactaccgaattacacttaaaatctgtacattagcaacttcatgcaaattataactctgtttttaaagatgacattatctttgggaa

SEQ ID NO: 208307 - DNA, 120 bp, Artificial Sequence
  ENSG00000115355_84 (sequence is synthesized)
atataaagattttgattaatgatacataaagtaatcatttttaatacttacttgaaagaacaatgggtttaaaatgagaagccttcggctgggcgcagtggctcaacgcctgtaatccca

SEQ ID NO: 208308 - DNA, 120 bp, Artificial Sequence
  ENSG00000115355_85 (sequence is synthesized)
gtctcaaaaaaatatataaaatgaaaggattcgagttttattctcagctcccctttcttaataactgcatatatttatagcctttctaagcctagaataaggacctcatgggaaattcat

SEQ ID NO: 208309 - DNA, 120 bp, Artificial Sequence
  ENSG00000115355_86 (sequence is synthesized)
gtaaaatagagactagaaatgatgccactcatctattgttattagtgtgttaaaagtaaaaacaaaacaaacaaaacccggaaactaggatcatagggtaccccttagatttcttgagaa

SEQ ID NO: 208310 - DNA, 120 bp, Artificial Sequence
  ENSG00000115355_87 (sequence is synthesized)
acttgacattacattctatcttggcatctttttagtctcacctcattattttctaactcattggtagcaatattaattgttgagtcataggctttcttaagttgtacattagatgttgaa

SEQ ID NO: 208311 - DNA, 120 bp, Artificial Sequence
  ENSG00000115355_88 (sequence is synthesized)
ctataaaacatttctatccctgccttaatacaaaggttggggttaacttaaaatttattataagaatctcctagggtaaactagtgcttcaagatagtttaataattcaagataagaata

SEQ ID NO: 208312 - DNA, 120 bp, Artificial Sequence
  ENSG00000115355_89 (sequence is synthesized)
gtaatattaaatttaagttgaagagaaagagttattaagttaaatctggcaaatttggtcatgtatgatgagcaagttaatagcaatccaaggatatatcttatccaggattttctagtg

SEQ ID NO: 208313 - DNA, 120 bp, Artificial Sequence
  ENSG00000115355_90 (sequence is synthesized)
tgattgtaatctactttaagagagccaactcagaactaaaaaatcctgaatacgatatatccttaaaattaataaagtgtcaaatctttgtgctttacgtaggcatctctgtgaaatttc

SEQ ID NO: 208314 - DNA, 120 bp, Artificial Sequence
  ENSG00000115355_91 (sequence is synthesized)
taacctggttatagatagctgtaaaaagaattgttagtcattagcaacatatctatatccactgttaatccaggggcatttgcacgacaaacgataggatttgacatgactattactctg

SEQ ID NO: 208315 - DNA, 120 bp, Artificial Sequence
  ENSG00000115355_92 (sequence is synthesized)
gcacataagtagagtatgttttatatttctaggaggaaaggatttacattttaaaaagcataaatcatacatattattcatcacatttaaaagtaaattgcctttcgtattcaccagatc

SEQ ID NO: 208316 - DNA, 120 bp, Artificial Sequence
  ENSG00000115355_93 (sequence is synthesized)
aagcagcagtgagtgcttaaactctttaaacatcgtattgatttagaatcctttctaaagattttttaaaacttcagtagtcctttgggggaatagtctgatgaatggcatttcttttta

SEQ ID NO: 208317 - DNA, 120 bp, Artificial Sequence
  ENSG00000115355_94 (sequence is synthesized)
atttaacatcataaaattaattgtgtactgcattagtgtacagccacacaattttctgaggtaaatcatacacagatatactatcatttggccagaggggtaaaatattgcagaaagaaa

SEQ ID NO: 208318 - DNA, 120 bp, Artificial Sequence
  ENSG00000115355_95 (sequence is synthesized)
gttaaaataagagctggaatacctctgccacttgctatttctgttaatatgggcaagccttttacctttgcttcatacttcacaggacagttacaaggagcaagttagaaatatgagatg

SEQ ID NO: 208319 - DNA, 120 bp, Artificial Sequence
  ENSG00000115355_96 (sequence is synthesized)
tcattttcataattatatataacttaatcagaataataaggcattctataatgaggtttctgctcatatactttgatggtgtcacattggaacaaagttacatttggggaagcaaaaata

SEQ ID NO: 208320 - DNA, 120 bp, Artificial Sequence
  ENSG00000115355_97 (sequence is synthesized)
ggtatgaatttgaaggggtgttattcaatgatttagaaattacagaaggttaagaaaattattgaaggattgcttggtaaaggatctaaaatagagaggtgctggcgggcacggtggcac

SEQ ID NO: 208321 - DNA, 66 bp, Artificial Sequence
  ENSG00000115355_98 (sequence is synthesized)
aggatctaaaatagagaggtgctggcgggcacggtggcacacccctgtaatcccaccactttgggg

SEQ ID NO: 208322 - DNA, 120 bp, Artificial Sequence
  ENSG00000115355_99 (sequence is synthesized)
ttttttgttttgtttttggtagagacatcgtttcactgtgttgcccaggctggaaatattattggaagattgtttctgtgtgtagttatttccattaatgttaaaatagaaaaattaaaa

SEQ ID NO: 208323 - DNA, 120 bp, Artificial Sequence
  ENSG00000115355_100 (sequence is synthesized)
ttgctttagagtgcttcattattgacataagaatttaacatttaacttgcagtagaatgttttataaagtcttcttgattttttaaattgcctggtttgaatatgttatatgataatggg

SEQ ID NO: 208324 - DNA, 120 bp, Artificial Sequence
  ENSG00000115355_101 (sequence is synthesized)
aaaatcaatagtcttagcatatttttaactttaatttgctattttgtacatattaactaccagtatttttcatctctaaaatgcgtaattgaaaagaaatttgaacctaaaatataaata

SEQ ID NO: 208325 - DNA, 120 bp, Artificial Sequence
  ENSG00000115355_102 (sequence is synthesized)
ttagcccttttttatggtagtatttttctccttttttatcttaaaggaagtcctttcttttttcattaagcttatactgtactgtttatcatcttttccttcatgctttttatatcttct

SEQ ID NO: 208326 - DNA, 120 bp, Artificial Sequence
  ENSG00000115355_103 (sequence is synthesized)
gaatctttaaataaagtttgtatagttctcatatagcatattatcatttattgagctggatttgtctttgtgtttagaaagtgaaatttaccccaaaagatgcacaaggataagaaatca

SEQ ID NO: 208327 - DNA, 120 bp, Artificial Sequence
  ENSG00000115355_104 (sequence is synthesized)
tgtctgcatattttatacagctacagaaattagcatggaatgctacttgaatttctatactaatttcttaaattttagcatttggatattaacactattttatcctttattcagcgatta

SEQ ID NO: 208328 - DNA, 62 bp, Artificial Sequence
  ENSG00000115355_105 (sequence is synthesized)
gcgatctctgctcactgcaacctccacccccccaggcacgcctggcaaattttttgtatttt

SEQ ID NO: 208329 - DNA, 120 bp, Artificial Sequence
  ENSG00000115355_106 (sequence is synthesized)
ggcgtgagccaccacgcctggcctgcaaggcattttataactatttgaacctgaattttaaaaaatatattattcacttatttattcattcatttactcaaaaaatatattgaatgcttt

SEQ ID NO: 208330 - DNA, 120 bp, Artificial Sequence
  ENSG00000115355_107 (sequence is synthesized)
gtatgaggctctgtttaggctctgagtatgatagtaaaagcaagtctttgcccttatggagcttacaatagttgtcagtttgacaaaataaggaagcaggctatggcagacaattgttag

SEQ ID NO: 208331 - DNA, 120 bp, Artificial Sequence
  ENSG00000115355_108 (sequence is synthesized)
actgataaaagattgacatggtttactaagcatttctaaataaagcttgaaagtaaatttggctgttcatataattagcacacagtcaacaaatgttattactcatgaagtattaatctc

SEQ ID NO: 208332 - DNA, 120 bp, Artificial Sequence
  ENSG00000115355_109 (sequence is synthesized)
agtgtgaaacaagtgcacattgcattaacagatgtaaatattgcttgcttaattcattgactttctgttctacttactagtgaagcaagattagttggctgccataggtttttacctgtc

SEQ ID NO: 208333 - DNA, 120 bp, Artificial Sequence
  ENSG00000115355_110 (sequence is synthesized)
agcgcaaggaacaagtatttttttttaagtttttttgtcactttaaatttaattttactagtgaattatgttctaggaattacttttttagtttgaagccttttgtggtaggaatacaac

SEQ ID NO: 208334 - DNA, 120 bp, Artificial Sequence
  ENSG00000115355_111 (sequence is synthesized)
ttccccacagttttcttgaaaattaatgactaaatgcctattctatgatgagccactcaaaaattatctctgattgtctgtcattctcattcttatagaaatacctggtgcatgctgttc

SEQ ID NO: 208335 - DNA, 120 bp, Artificial Sequence
  ENSG00000115355_112 (sequence is synthesized)
ttatagtggctgctctgtattttgtgtctctcttatctttaagcttttcttatattttctttcttctttctaccttccaactaaatacagagagaaaagtgtccttcagtttctcagtat

SEQ ID NO: 208336 - DNA, 120 bp, Artificial Sequence
  ENSG00000115355_113 (sequence is synthesized)
tttgcagaggtcagtcttcctctaatataaggagctagaagaattttttttttcaagtggcactgaatttgcattatgtatatgtccactgatacatatacgtgcatatttctagtcata

SEQ ID NO: 208337 - DNA, 120 bp, Artificial Sequence
  ENSG00000115355_114 (sequence is synthesized)
catgtaacttactcgtaaatttccagtgctttctaaaaattggcaggaaaaaaaccctttattttatatgccatagagattttttcccaaagaagtttacttaagaagaatataacaaaa

SEQ ID NO: 208338 - DNA, 67 bp, Artificial Sequence
  ENSG00000115355_115 (sequence is synthesized)
acggacacagggaggggaacaacactcactggagcctgtcaggggaggccaggtcgggaaatttagg

SEQ ID NO: 208339 - DNA, 120 bp, Artificial Sequence
  ENSG00000115355_116 (sequence is synthesized)
ggcacacatttacctatgtaacaaacatgcataccctgcacgtgtaccccagaactttaaaaataaataaataaataaataaaaaactaggaagggaaaagcattattatcttgttaagt

SEQ ID NO: 208340 - DNA, 120 bp, Artificial Sequence
  ENSG00000115355_117 (sequence is synthesized)
tattatcttgttaagtgtcatttgctaagtagcccatgcatgaactgttgaatgaaagttaagaatgacaactaaatatgatagttaagatgtttttgaccagtgaattgtttttgatat

SEQ ID NO: 208341 - DNA, 120 bp, Artificial Sequence
  ENSG00000115355_118 (sequence is synthesized)
atatctgttatttaggaccaccaagtaattggaaattgattttcttccttgtaatttataacctttacttcaatgctttatgtaaataaaagaggttcctgaggcttcaagagattggat

SEQ ID NO: 208342 - DNA, 120 bp, Artificial Sequence
  ENSG00000115355_119 (sequence is synthesized)
ggtagttccacatttttctttttgatgtgtttggcttctgtggccttggaagctagaacacctctactgtaaactgtgctctttatgtgtatctctctgtgtctctgctccctgatagtg

SEQ ID NO: 208343 - DNA, 120 bp, Artificial Sequence
  ENSG00000115355_120 (sequence is synthesized)
ctttatgctaactcatatgtaatagaatgttttttgatttttttcacttttcctattaaataagattaaaactttttaaaaagtatctttattttacagcagcttcttcttttttcacct

SEQ ID NO: 208344 - DNA, 120 bp, Artificial Sequence
  ENSG00000115355_121 (sequence is synthesized)
taaaccaagagtaattaatagttcacttttacaatcactctaatgtttcatttttatttggggttagtgtatgagctctttaatccataagtgctaaggattaggataaggctggatagt

SEQ ID NO: 208345 - DNA, 120 bp, Artificial Sequence
  ENSG00000115355_122 (sequence is synthesized)
tgtttcttcccttaacttccccatacctgactttagatgcagggaatactgtaattgtaggatcataaactgggaccttcatagataaatgagactgggcttcatagtctttatttctag

SEQ ID NO: 208346 - DNA, 120 bp, Artificial Sequence
  ENSG00000115355_123 (sequence is synthesized)
acatgctggggttgcttttctacttgttggcagcagggttttttttacgtgtgttggttctctctaaagcagtagttttctctaaaggttctctctaaagcagtctttttggtctcaagc

SEQ ID NO: 208347 - DNA, 120 bp, Artificial Sequence
  ENSG00000115355_124 (sequence is synthesized)
ctcctcaccactgttaaaaattaatgaggattggtttaatgtggattatatctattggtatttaccatattagaaactaaaactatgaagttttaaaaacttaagtctggccaggtgcgg

SEQ ID NO: 208348 - DNA, 66 bp, Artificial Sequence
  ENSG00000115355_125 (sequence is synthesized)
aactatgaagttttaaaaacttaagtctggccaggtgcggtggctcacgttcgaaaccagcctggc

SEQ ID NO: 208349 - DNA, 120 bp, Artificial Sequence
  ENSG00000115355_126 (sequence is synthesized)
ttcatggaatacaggacattaactgtatagatgcttgtattcctcctcttcttgacatctctgcaatgtgcagagttccttgtctgatctgttcttcaagaccagccagccttgatagtg

SEQ ID NO: 208350 - DNA, 120 bp, Artificial Sequence
  ENSG00000115355_127 (sequence is synthesized)
gaaggtacaattattattaagatacttattcttgccatcaaggaatatatagttttggaatcgaatgtataagtaaataaatttaaaagcaacgaaataaatttagtaggccgggcacgg

SEQ ID NO: 208351 - DNA, 120 bp, Artificial Sequence
  ENSG00000115355_128 (sequence is synthesized)
gtgagactctgtctctaaataaataaagtggtagagttgtaaacagaggtgatcactcttgtcttttctcttttaatacctgtttgatgtcttctgtcttctctttcaatatggttgttt

SEQ ID NO: 208352 - DNA, 120 bp, Artificial Sequence
  ENSG00000115355_129 (sequence is synthesized)
ttcaatatggttgtttacaggattatgttttcaggcctcttatccattcattctgtatgctgagcattcccatacatcatctcacctgagatccttttttttctctgtttactgtatgtt

SEQ ID NO: 208353 - DNA, 120 bp, Artificial Sequence
  ENSG00000115355_130 (sequence is synthesized)
tctatcaggatagaccagaagcaactcagacgtcaccaattcaacatacccaaaatcagacgcagtaaatgatttttaaatgtttgttgactccagccgataccaaagtgaatgagattt

SEQ ID NO: 208354 - DNA, 120 bp, Artificial Sequence
  ENSG00000115355_131 (sequence is synthesized)
gttctctgtattcaatgacattaaaatctgattgagaagaaaatatttacataaaaattaattccagtaaaagaatgtggtgaaactctcatatacatactttaggtttttatttagtgt

SEQ ID NO: 208355 - DNA, 120 bp, Artificial Sequence
  ENSG00000115355_132 (sequence is synthesized)
tgtcttcagggtcttcaggtttaagaaatggatcataaatagtggtttatgatacactgaattgtgttcatataccatcctttttgtgaaaaaagtatttattaataattattcatttat

SEQ ID NO: 208356 - DNA, 120 bp, Artificial Sequence
  ENSG00000115355_133 (sequence is synthesized)
ctaccattcagaaagataattgcaatactgacagtcacatccatcaccctcttgccactctgtcacgagtatcctgtgccataagtatgtcattttttttactgtaactactctgtaccc

SEQ ID NO: 208357 - DNA, 120 bp, Artificial Sequence
  ENSG00000115355_134 (sequence is synthesized)
aataaaaaggatattttgggactttggtcttccgggttccttgagaattaattattgcttttgataatctaagccataatccggagctctgttcactcaatgattttgttgcttcattac

SEQ ID NO: 208358 - DNA, 120 bp, Artificial Sequence
  ENSG00000115355_135 (sequence is synthesized)
caggattagttttaaagggagaatggggcagtaagaagaggataatttcatttgcctctttaacaaaaatgcttttataagacccatttatggcatgaatatttgtggtcataaattatc

SEQ ID NO: 208359 - DNA, 120 bp, Artificial Sequence
  ENSG00000115355_136 (sequence is synthesized)
tgaggttcattgaatttatatggtcccaaaggtgacctaaacaatatttttaagcttatggaaatattgctagcttgtgtcagtgttttcacaagtaaatgagaaaaataaggaggttgg

SEQ ID NO: 208360 - DNA, 120 bp, Artificial Sequence
  ENSG00000115355_137 (sequence is synthesized)
cataaggttttcctattgttaaatcttaacagtttaaaggatgccttttattctggatttatggcctttctagcattctagtatgtatttttttaaataaaataatgtcctcatttggca

SEQ ID NO: 208361 - DNA, 120 bp, Artificial Sequence
  ENSG00000115355_138 (sequence is synthesized)
gttatggctaatactatgtccaactagttatttagtgatgatgatacatttatattaacgcagatgatgatcacagttttcaaaaatagtatacttaatgaatatatttttgcatttaag

SEQ ID NO: 208362 - DNA, 120 bp, Artificial Sequence
  ENSG00000115355_139 (sequence is synthesized)
gctttccaaaaaagaaaatagtagctttaggaacttttcagaaacgatactatttcttagagacaggtgatacaggagtgtctttttttgtgtggaacacaggaacctgaaaggatgtat

SEQ ID NO: 208363 - DNA, 120 bp, Artificial Sequence
  ENSG00000115355_140 (sequence is synthesized)
aagaaccccaaattgctagtaaacagattgcagttaggttttctcttctccttttcttttaaattagtattattctgattttcttcctgtgtgtttttcaagtcatccccacagctttgg

SEQ ID NO: 208364 - DNA, 120 bp, Artificial Sequence
  ENSG00000115355_141 (sequence is synthesized)
caacaatacaaaagtgtgaaactgaaaatatagttgatgtaagtggaaaaatcattgccgtgaagcataagaatttgcttaaggctaatttcgtagttttattgccacatgttgaggttg

SEQ ID NO: 208365 - DNA, 120 bp, Artificial Sequence
  ENSG00000115355_142 (sequence is synthesized)
gctggaaagaaaataaatcattagagcaagagacttctcaactggaaaaggataagaaacaattggagaaggaaaataagagactccgacaacaagcagaaattaaagataccacattag

SEQ ID NO: 208366 - DNA, 120 bp, Artificial Sequence
  ENSG00000115355_143 (sequence is synthesized)
gtaccatttacaccagtggtcctctcatatacttgacatcccaacacatactataggttcttgtgcccaaaatgatttagctatagacatgcctgagcctctatatgcccaggctagaaa

SEQ ID NO: 208367 - DNA, 120 bp, Artificial Sequence
  ENSG00000115355_144 (sequence is synthesized)
ctcaagaacaggaaggtcacattttctaaaccaaacttttgccactattaggatgcctagtgatgcattcggaatgttggcaaaagatagcataggaccatttactgtggcccattcatc

SEQ ID NO: 208368 - DNA, 120 bp, Artificial Sequence
  ENSG00000115355_145 (sequence is synthesized)
tcagccattcttatccctgaatacagaattagttagtaacataagtgggttacctcctaggccagttatcagaataactgaccaggcttctgcctctttggataaacctgcacagaaaga

SEQ ID NO: 208369 - DNA, 120 bp, Artificial Sequence
  ENSG00000115355_146 (sequence is synthesized)
aaatgaacagttttctgatcatcagaaccctagtaacagtaacctacagttttctataaatagcaacaatcttgtcacttctgcatgcctctatcctgatgacacagaagctgcattgtt

SEQ ID NO: 208370 - DNA, 120 bp, Artificial Sequence
  ENSG00000115355_147 (sequence is synthesized)
ggtttctgaggataatcaaactgtttggtatgaatatggttgtatatgatcaaaactgcacaatataatatattgatgttatttgatatacactgcttctctaatatgatttgaaaagtt

SEQ ID NO: 208371 - DNA, 120 bp, Artificial Sequence
  ENSG00000115355_148 (sequence is synthesized)
gctgttaacaaaatatcatttggctaggtttttattttttatttaaaattgttgcacagtgttcagctgtacatgatggcatgtatattaatgtgaatgtgtaaccacaccaaaacctgc

SEQ ID NO: 208372 - DNA, 120 bp, Artificial Sequence
  ENSG00000115355_149 (sequence is synthesized)
atgaaatattaattactttgtccattttctgcatgcctttaaaaaccttaaccatacatgctcctccttcacattttttgttgcctgataagattgttactttgatatccagaagcatgt

SEQ ID NO: 208373 - DNA, 120 bp, Artificial Sequence
  ENSG00000115355_150 (sequence is synthesized)
taaaacagttgcatgctctcttaccaagaagacatttccaagtcatatttgctttgttgcttctggaaaaaaatgttcatttcctccctcccttcctcctcttcccacccctcacttgct

SEQ ID NO: 208374 - DNA, 120 bp, Artificial Sequence
  ENSG00000115355_151 (sequence is synthesized)
ctgactgtcactcctttttttcttccagaatgtgtactttatattacatatgtacagtatcagtagggaaaatgtaaaaagatgttgttttcttttgtcatttaattaggccatctgtcc

SEQ ID NO: 208375 - DNA, 120 bp, Artificial Sequence
  ENSG00000115355_152 (sequence is synthesized)
ttgttttcttttgtcatttaattaggccatctgtcctgttttaaagaaatagttaataattcaacactttatataacaaatattaactaatacccatatttataaaacatttttcagatt

SEQ ID NO: 208376 - DNA, 120 bp, Artificial Sequence
  ENSG00000115355_153 (sequence is synthesized)
cttagaaaaccccatcaaatttaaatgtgatttacacagtgactaggaacatttgtatttattgtttcttctctgcacttttcatcatctgataaatacaagagctcaagtaactgtctt

SEQ ID NO: 208377 - DNA, 120 bp, Artificial Sequence
  ENSG00000115355_154 (sequence is synthesized)
ttcttcaagatggcttctatacttgaaatcagttaatacaatagtttttccagttctttttttatagagagtcaaagagaaataaaccaaattatattcattgtgttggaaatttgtatt

SEQ ID NO: 208378 - DNA, 120 bp, Artificial Sequence
  ENSG00000115355_155 (sequence is synthesized)
gttggaaatttgtatttttacttctaatcaaaaagggtagcaagtttacaaagtggtaaaaattgttacttctataattaatctattattaaattatacatgtatatccttaaaacagaa

SEQ ID NO: 208379 - DNA, 120 bp, Artificial Sequence
  ENSG00000115355_156 (sequence is synthesized)
aatcacactaaaatgtaaaattagaacttgtaaccatttaaacaagtatgtttctagtagaacaaattttagaactaagaataaatacactctttagcttaaaaaaaaaaaaaaaagtaa

SEQ ID NO: 208380 - DNA, 120 bp, Artificial Sequence
  ENSG00000115355_157 (sequence is synthesized)
gaaaatatttgttaactttgactccagtgcaaagaacttttatttttgtgttcacagcacttttaaagcaaattagctaaatttgaatctctaactcccagattgctaaaaacaaaaaaa

SEQ ID NO: 208381 - DNA, 120 bp, Artificial Sequence
  ENSG00000115355_158 (sequence is synthesized)
cccataaccctgatccatttacttccagagaaatacacattggcattctctctggaatgttttttgccatttggatttagcctatagctgataaggactcagcctggcacctggaaggaa

SEQ ID NO: 208382 - DNA, 120 bp, Artificial Sequence
  ENSG00000115355_159 (sequence is synthesized)
tgccttcaaatgtgaccatgtggggatgaaattatgttatacttgttgttgttgttgttgtattaagtggttattaactggaccaaagaaaaaatctgtagagaatatttcctaatgaaa

SEQ ID NO: 208383 - DNA, 120 bp, Artificial Sequence
  ENSG00000115355_160 (sequence is synthesized)
gataatgaaccttatttagagagtacacattaaatacagaatgggaatgctaggactcttgcctttaataggtgaatgcgtcattgccagcaagcatgttttctctatcctgcatctcat

SEQ ID NO: 208384 - DNA, 120 bp, Artificial Sequence
  ENSG00000115355_161 (sequence is synthesized)
agttacctctaccatttcttcaaacctaatactcccttctgcctcttttaagataattgcttcatctaaatgttctctgttttagccaaggtcatttataaagtatgcctgcacagtctt

SEQ ID NO: 208385 - DNA, 120 bp, Artificial Sequence
  ENSG00000115355_162 (sequence is synthesized)
acagtcttcaaaggtaattttcttaccatttttgtataagattaaagttataagagttgcattttaccattggtttaaaatgccaatttaaaatacatattagtttaaaatattaaaaat

SEQ ID NO: 208386 - DNA, 78 bp, Artificial Sequence
  ENSG00000115355_163 (sequence is synthesized)
atacatattagtttaaaatattaaaaatatctgttttaaaggatgaactttaagaaaccaatttttgggccaggcggc

SEQ ID NO: 208387 - DNA, 82 bp, Artificial Sequence
  ENSG00000115355_164 (sequence is synthesized)
gaaaccagtttttgggcaatgttgagtatttcagatattttccatttctgtctggaaaatcatatctcaccaaactattggc

SEQ ID NO: 208388 - DNA, 120 bp, Artificial Sequence
  ENSG00000115355_165 (sequence is synthesized)
taagtggataacatgttaaaggaattttaatgtaaacagggttttaagagttagcatagggcagtgttaattatacagttgttacccttgttacagataggaatacaggacattaactgt

SEQ ID NO: 208389 - DNA, 120 bp, Artificial Sequence
  ENSG00000115355_166 (sequence is synthesized)
atagatgcttgtattcctcctcttcttgacatctctgcaatgtgcagagttccttgtctgatctgttgtaggtgacccaatcaatagcattttgggggatctggggggatatgtcattct

SEQ ID NO: 208390 - DNA, 120 bp, Artificial Sequence
  ENSG00000115355_167 (sequence is synthesized)
atttaactaaaacactcctggcatatccatctagaactcattttcaaatctaaatatgcactttatcctcctctttgaatctcaactattgtttcagaagtgtcctattctaaagtgtct

SEQ ID NO: 208391 - DNA, 120 bp, Artificial Sequence
  ENSG00000115355_168 (sequence is synthesized)
caatgaactatctggaaatttgctttctaatctgggcatgctcatcttgtgaaagtatgcatgattgcttcctcaaagcattctgtaatcagaatgtaaaagctcatcagcatcatcagc

SEQ ID NO: 208392 - DNA, 120 bp, Artificial Sequence
  ENSG00000115355_169 (sequence is synthesized)
atggattttcagtgccttgctttttaaaataattatttctaaattgttgtttattaggtaagtatgttggacaatttaaatgcaaaacaaaactcttactatacttttcaaaatatagca

SEQ ID NO: 208393 - DNA, 120 bp, Artificial Sequence
  ENSG00000115355_170 (sequence is synthesized)
aactgttacaccatcacttccacctctttctcttggccaaaagcattccaaattcaagaagaaggaaaatagattccacttctttacgggaaaagtgagaagtcacattgcaagagggca

SEQ ID NO: 208394 - DNA, 120 bp, Artificial Sequence
  ENSG00000115355_171 (sequence is synthesized)
taggtacagggaagaaaataaatgcattcagttttttaatgaatctaccacatatgttatgtttcaatttaacaacatacagataaataaaaccaacgtagtatgatattcacagttaca

SEQ ID NO: 208395 - DNA, 120 bp, Artificial Sequence
  ENSG00000115355_172 (sequence is synthesized)
aaatttttcaaaatgtttattttttgcggggggcggccggggtggtggtgtaggcagggcgggtatgtgttatttgcttttgcttttttaatacagatctctgggctctactcgagacct

SEQ ID NO: 208396 - DNA, 120 bp, Artificial Sequence
  ENSG00000115355_173 (sequence is synthesized)
gaatttgaatgctggggcccacaaatctactctacaagggacgccaaatttttagaatcactactttgggccttctgctaacttctgtttgaacctctggcctagctaaggcatatttcc

SEQ ID NO: 208397 - DNA, 120 bp, Artificial Sequence
  ENSG00000115355_174 (sequence is synthesized)
agtttctactaactgcgtagaaaaggcccaatgctgctggcagcccacctactagtaatgccagctgttaataccaactattgactaaattacccgatttcccttgatcaagctacaaaa

SEQ ID NO: 208398 - DNA, 83 bp, Artificial Sequence
  ENSG00000115355_175 (sequence is synthesized)
ttgactaaattacccgatttcccttgatcaagctacaaaaactatacacagacttttaaggtttcttgaaaaccgtgaatgga

SEQ ID NO: 208399 - DNA, 66 bp, Artificial Sequence
  ENSG00000115355_176 (sequence is synthesized)
cagtagatggggaaattatgagacatactaagtacttagtgtgtgctacacacatgctactagata

SEQ ID NO: 208400 - DNA, 120 bp, Artificial Sequence
  ENSG00000115355_177 (sequence is synthesized)
actaagtacttagtgtgtgctacacacatgctactagatactttacatatgctaattaatccttgcaacagccttgttgggtgggagctatcctcatttcatagatctgagaacttactt

SEQ ID NO: 208401 - DNA, 120 bp, Artificial Sequence
  ENSG00000115355_178 (sequence is synthesized)
gtctaacatttcatagaaataaaatattagatatttgaatctagcttttggactatactataagttaaacagttttaaagacagaaagcagtgtttggggagtagataatatattatata

SEQ ID NO: 208402 - DNA, 120 bp, Artificial Sequence
  ENSG00000115355_179 (sequence is synthesized)
aggtgtcatcactaaaataatcatgctctgataaaagtacaatcatctaattgttcaaacagtggaacacttaaatctttgtgtagtacttcatatttttcagttgatttatgttaaatg

SEQ ID NO: 208403 - DNA, 120 bp, Artificial Sequence
  ENSG00000115355_180 (sequence is synthesized)
gagggcggagaaggctggagcgcggcggtgattttgtgccagggattcccagagacgcgctgaaaggctggcagggcttaggaagctgggggcccccgttgggattgattcattgggagc

SEQ ID NO: 208404 - DNA, 120 bp, Artificial Sequence
  ENSG00000115355_181 (sequence is synthesized)
cgaaactccatctcaaaaagaaaaaaaaagaaagttctgtaaggagaaaagaggaatcatagacaatctaatatagatataagaaaacaaaaaactaaaatgttactatataaatacagt

SEQ ID NO: 208405 - DNA, 120 bp, Artificial Sequence
  ENSG00000115355_182 (sequence is synthesized)
aaaaaactaaaatgttactatataaatacagttataaaataggaaaacaggatgccacccaggtagcagaagatcagaggctataattgactgtaaaaacagaataagacattaacaaca

SEQ ID NO: 208406 - DNA, 120 bp, Artificial Sequence
  ENSG00000115355_183 (sequence is synthesized)
aacaaaaataagcaagttattttttatttgaatcatgtgcttaaatatctctgttctttatttgccaaaatgttgacttaaagataaatggaggaaaagtatgaaacaaaggaaaagaaa

SEQ ID NO: 208407 - DNA, 120 bp, Artificial Sequence
  ENSG00000115355_184 (sequence is synthesized)
atatattaatatataatggttttgaaaaatgtaagggcacgagatgagaacaataagttctatacagtgaacatttactttattattaaagaacagaaggtagaaaagtagagatagtaa

SEQ ID NO: 208408 - DNA, 120 bp, Artificial Sequence
  ENSG00000115355_185 (sequence is synthesized)
gtggaggcttattttaaggagcttgactgtgaaggagagagagaaaatgggagattagaagtaaagcaattctaagagaaaaactaatagaagaaatttgaggatgtttataggctacag

SEQ ID NO: 208409 - DNA, 120 bp, Artificial Sequence
  ENSG00000115355_186 (sequence is synthesized)
ggcagaaaccaatagcgaagtaaagattttagtatcatatggcaattggaagtatgtaatttcctttcagccattgtaaatgttgaaaatagttggagacccttacaaatcttagacaca

SEQ ID NO: 208410 - DNA, 70 bp, Artificial Sequence
  ENSG00000115355_187 (sequence is synthesized)
tgttgaaaatagttggagacccttacaaatcttagacacaggtagaactgccttgcataaaaattcttag

SEQ ID NO: 208411 - DNA, 74 bp, Artificial Sequence
  ENSG00000115355_188 (sequence is synthesized)
atttgagaccagcctgacgcatagtggccggcgcctgtaatcccagctactgaggcaggagaattgcttgaacc

SEQ ID NO: 208412 - DNA, 88 bp, Artificial Sequence
  ENSG00000115355_189 (sequence is synthesized)
ttcttagcttaactgtctgtgactgcagagagtgaggaagagagaaagaagagtggaaatggaagggcaggaaagatgaaaagagaga

SEQ ID NO: 208413 - DNA, 120 bp, Artificial Sequence
  ENSG00000115355_190 (sequence is synthesized)
aagagtggaaatggaagggcaggaaagatgaaaagagagaaagagaaaaactgtattacatactatgagaacattagcctttggaaaacattagggaagaggttttattaatggcatcta

SEQ ID NO: 208414 - DNA, 120 bp, Artificial Sequence
  ENSG00000115355_191 (sequence is synthesized)
atcagttacatggcctttaaggaaaacttctaagattcagctgatttccctgtattggcaaggatggctagtgtccttgaggctttaacagagaagagagagctaaataaattagatgcc

SEQ ID NO: 208415 - DNA, 120 bp, Artificial Sequence
  ENSG00000115355_192 (sequence is synthesized)
tccaactttatataaatataaaagtagtagaaatttctgcttttgttacagaagcatgttacttactaatgttgtcttcaaccttttaataccacaataaataagctattgtgtaaacat

SEQ ID NO: 208416 - DNA, 120 bp, Artificial Sequence
  ENSG00000115355_193 (sequence is synthesized)
gtctttaaaaatacagaaatctgattgctaaaatttagcattggttcataattcttttgttgtatcactaaaacagtatgttgactatgaagaagaattttcattgtgtccccaaagatc

SEQ ID NO: 208417 - DNA, 120 bp, Artificial Sequence
  ENSG00000115355_194 (sequence is synthesized)
aaataaggagcgactcttacatgatgaacaaagtactgatgacaggtgagtactaagtctacttggcaaacagttgaaaatttttttttttttttgctcatacatgaattctttctgtac

SEQ ID NO: 208418 - DNA, 120 bp, Artificial Sequence
  ENSG00000115355_195 (sequence is synthesized)
ctcatacatgaattctttctgtactagctatagaaaacatttatatatttcaccctatttctggttccttccttcccttaaggaaagttctgtagccgggtgcggtggctcacacctata

SEQ ID NO: 208419 - DNA, 120 bp, Artificial Sequence
  ENSG00000115355_196 (sequence is synthesized)
agcatatggtgaactttgagacacgatgttttaagcccctaatttggttcattggccagaaatattcaggtggtttaagaattggatcttgaaaggaatgctaatgttatgggctcagcc

SEQ ID NO: 208420 - DNA, 120 bp, Artificial Sequence
  ENSG00000115355_197 (sequence is synthesized)
cattatcacaacctagatattttacctgttaaaattgtgaaactttagtttttcattctgtcaaccatgtattgtcacttgtcttcagtactgaaatccaagccacattgtgtattcttt

SEQ ID NO: 208421 - DNA, 120 bp, Artificial Sequence
  ENSG00000115355_198 (sequence is synthesized)
gataatttggtaaaataagagagaaaatgagaatctggtttcctaagagaggaaaaaagactttactgtgaagttatgtgcatttgatgcagaaatgtttcttattaacctttatatcta

SEQ ID NO: 208422 - DNA, 120 bp, Artificial Sequence
  ENSG00000115355_199 (sequence is synthesized)
gaaataaatggctcaaaatttgaaactcgttaagtaatagcagatttcagaagagaaaatttcaaacagttctgattggtgaggactcttgctgtagtaaataatttaaatgcctgtaat

SEQ ID NO: 208423 - DNA, 120 bp, Artificial Sequence
  ENSG00000115355_200 (sequence is synthesized)
acatcctttgaagacataagtccacaaggtgttagtgatgattctagtacgggatcaagagttcatgccaaggtcatttataaagtatgcctgcacagtcttcaaagcttcaagaccagc

SEQ ID NO: 208424 - DNA, 120 bp, Artificial Sequence
  ENSG00000115355_201 (sequence is synthesized)
gccgccgcacctggcctgtatcttttttttttaacttaagtattaagtatagcagcagcccctaaccttttttgcagtagggatcattttcatggaggacagttttttccacggaccagg

SEQ ID NO: 208425 - DNA, 120 bp, Artificial Sequence
  ENSG00000115355_202 (sequence is synthesized)
gcgggggccattagattctcataaggagtgggcaacttagatcccttgtatggcagttcacaatagggttcgtgctcctaagaaaatctaatgctgccgccagtctgacaggaggcagag

SEQ ID NO: 208426 - DNA, 120 bp, Artificial Sequence
  ENSG00000115355_203 (sequence is synthesized)
ctcaggtggtaatgcttgcctgcccaccgctcacctgccatgcagactggttcctaacagggcacagacctgtactggtcctcggcccaggggttggggaccctgaagcatagtactgaa

SEQ ID NO: 208427 - DNA, 120 bp, Artificial Sequence
  ENSG00000115355_204 (sequence is synthesized)
tgtgtatactgactaagacaaacctgtagttaatagtgaatgatcccaagcaggtatttgaaaacaaatctctagttattaggttgctttttttcttttcttttctttcattaatctgta

SEQ ID NO: 208428 - DNA, 120 bp, Artificial Sequence
  ENSG00000115355_205 (sequence is synthesized)
tgggtttcatgtttcttttgagagagagagagtgtgctgagagagtgagttgtgtgggtgtgtgaactggaataaattagggagccctgatgtctagaagttaggtttggcctttgaagg

SEQ ID NO: 208429 - DNA, 120 bp, Artificial Sequence
  ENSG00000115355_206 (sequence is synthesized)
gccaaggaagcgttttaggggaaaagcatactgcatgtatgatttgggaaatggtgaggggactagccttagtggaggaaccaagttgaggaatagtacaatacagtattttaaaatctt

SEQ ID NO: 208430 - DNA, 77 bp, Artificial Sequence
  ENSG00000115355_207 (sequence is synthesized)
ccaagttgaggaatagtacaatacagtattttaaaatcttaggtcatttattcctttgccttttaaaaactattttg

SEQ ID NO: 208431 - DNA, 120 bp, Artificial Sequence
  ENSG00000115355_208 (sequence is synthesized)
gccactgcactccagcctggccaacacagtgaaactctgtctcgaaaaaacaactattttgctaaattggaggtccccaaaacagtttctttctcatggaccatttgtagaccatgactg

SEQ ID NO: 208432 - DNA, 120 bp, Artificial Sequence
  ENSG00000115355_209 (sequence is synthesized)
gtttctttctcatggaccatttgtagaccatgactgaaagttttgttaacttgactattaataattccttacctttctgtatgtgtatctttcctctaacttggttcattgcatctcaaa

SEQ ID NO: 208433 - DNA, 120 bp, Artificial Sequence
  ENSG00000115355_210 (sequence is synthesized)
tgtatgtgtggctattttttgtcttctattttactttttattatatttctaatttaatttttgtttgtcttagtgcttttgtaataggtatctattattttgcctttaattggtgggttt

SEQ ID NO: 208434 - DNA, 120 bp, Artificial Sequence
  ENSG00000115355_211 (sequence is synthesized)
ataatggagttagcattgagccttttggagcacttttctggtacactgaaaaagacaaattaaaccgatattgtggtaatcttattctactctcactaatagaaatttatatacttagag

SEQ ID NO: 208435 - DNA, 120 bp, Artificial Sequence
  ENSG00000115355_212 (sequence is synthesized)
ttgtcctgtgtggggactttttaaaaaattagagaaattgatgattggaaaaaagattttcttaccaaatttaaaaactgcttacttaaggtaagtttctatgactaaatttaattcatt

SEQ ID NO: 208436 - DNA, 120 bp, Artificial Sequence
  ENSG00000115355_213 (sequence is synthesized)
aattagaagacattgttctttgggatttttctctcattttaaagggctttcatctcaaaagagaaagtgatacttgtcacccataattaatcaagtgaactatttaaattaccttaggag

SEQ ID NO: 208437 - DNA, 120 bp, Artificial Sequence
  ENSG00000115355_214 (sequence is synthesized)
gggagtacagattaagaagccttactatactgaattgatagtatgggagtgaaagccatagtagataagtctgtcactggtcaagggaaatacgtgactgtatatcagcccactttggaa

SEQ ID NO: 208438 - DNA, 120 bp, Artificial Sequence
  ENSG00000115355_215 (sequence is synthesized)
tttcttgagtctctaggcctaagtagatctggagcaattactactccagaatactgattaaaacaaattaaaaccaacttctgtgacccaatcttaaggcttagtgacaatgggtaaaat

SEQ ID NO: 208439 - DNA, 120 bp, Artificial Sequence
  ENSG00000115355_216 (sequence is synthesized)
gttccatcacagatcagtgctgtccattgaatctattaaacaatcttcttttgtttcagttactggtcatgaggttggcaaccatgtaagtgaatgttctagattagcataatattaagt

SEQ ID NO: 208440 - DNA, 120 bp, Artificial Sequence
  ENSG00000115355_217 (sequence is synthesized)
ccccaggtctctataccaagaacaggaattgatttgcctaatacagtagttctcaaatgagatcagacccctgctagcacagagattccttcaaggttgtctgtcaggtcagaattattt

SEQ ID NO: 208441 - DNA, 120 bp, Artificial Sequence
  ENSG00000115355_218 (sequence is synthesized)
tcataataatactaagatgtcctttgcctttttatgcgtgtgttgctaaagcactgatgatgcaaaagcaaaggtaagtaaaactgctgacattttagtatgaatcaaggaattgtacca

SEQ ID NO: 208442 - DNA, 120 bp, Artificial Sequence
  ENSG00000115355_219 (sequence is synthesized)
aattgtgtgggcaatcattgtattcttctcgttacacacttgtaaggtataataaataaacccagtttcacttaaaaatgtccttgatgaagcaataaaagttattttgttgggtcttga

SEQ ID NO: 208443 - DNA, 73 bp, Artificial Sequence
  ENSG00000115355_220 (sequence is synthesized)
gcatcaccatgcccagctaattttttggtatttttagtacatgcatgatctgccctcctcggcctccctaagt

SEQ ID NO: 208444 - DNA, 120 bp, Artificial Sequence
  ENSG00000115355_221 (sequence is synthesized)
tacaggtgtgagccactgtgcccggcccggaactgaatttttaacttaaaaaatttttaactaaatagccacctatgctactggctgttacattggacaacatagttctggccaaatcac

SEQ ID NO: 208445 - DNA, 120 bp, Artificial Sequence
  ENSG00000115355_222 (sequence is synthesized)
caaatcacttttgggtttatttcttttctgtgtcaacaggtcttttatgcctttccaacactggctgtctaatctaatcattttcatcataattgatttcttttgttaaaaaaactagga

SEQ ID NO: 208446 - DNA, 120 bp, Artificial Sequence
  ENSG00000115355_223 (sequence is synthesized)
aactaggaagggaaaaatagtaaagacatggaatgaacccaaatgccctcaatgatagattggataaagaaactgtgttacatataaaccatgggatactatgcagccatgaaaaggaat

SEQ ID NO: 208447 - DNA, 120 bp, Artificial Sequence
  ENSG00000115355_224 (sequence is synthesized)
tggagtcataaaattccccccaaaacaccactagttctttttgtttgtttgtttgagatggaatctcactctgtagcctaggctggagtacagtggcgtgatatcatctcactgaaacct

SEQ ID NO: 208448 - DNA, 84 bp, Artificial Sequence
  ENSG00000115355_225 (sequence is synthesized)
acaacactagttcttatcaacgttttttcatagcatttggaatcaaatttttagtggtgaaaataccttagaaatcatatggaa

SEQ ID NO: 208449 - DNA, 120 bp, Artificial Sequence
  ENSG00000115355_226 (sequence is synthesized)
aaatttttagtggtgaaaataccttagaaatcatatggaaccgatgtgtcccaaacatttaagaaaaaaaacaatactttctgtaagtgaaatcttacatagatgccccaaattttaaaa

SEQ ID NO: 208450 - DNA, 120 bp, Artificial Sequence
  ENSG00000115355_227 (sequence is synthesized)
aatgaatttcatttaaagtaaaagtgaaacaactctgactcaattgagcaattgcacttatttcctctaagacacctccagttttcaaaaggattatttgtaaaactattcgaagattca

SEQ ID NO: 208451 - DNA, 120 bp, Artificial Sequence
  ENSG00000115355_228 (sequence is synthesized)
gtaccctaattttataaatgatgaagctggatagctttcagtattcctggcctagctttctagaaattataaacatattcttatgcactgcatcccctttgaccaaagcaattttagctt

SEQ ID NO: 208452 - DNA, 120 bp, Artificial Sequence
  ENSG00000115355_229 (sequence is synthesized)
taaccaatgtaaggaggaacattatttgcctataaaatatgcatcaagccctggttttcttagtaaataatacaaatacttcattccagatggttttgctactacatgcaagattatgtt

SEQ ID NO: 208453 - DNA, 120 bp, Artificial Sequence
  ENSG00000115355_230 (sequence is synthesized)
taagactgtaggtgaccatttagtaaataaacatagtaaggctatctggcactaagagggggggaaatgtaattgttatagtttttttaaaaattatagctttcctaggaatattactta

SEQ ID NO: 208454 - DNA, 120 bp, Artificial Sequence
  ENSG00000115355_231 (sequence is synthesized)
tagctttaaaatataaaaatcgatctttaagtattgagatgcctatgagattaataattttcccagacagttacagattccttctccttgccctactcagtgagagtgtatttcttatct

SEQ ID NO: 208455 - DNA, 120 bp, Artificial Sequence
  ENSG00000115355_232 (sequence is synthesized)
atcattttaaggtattcttacaggttttgaaatgcaaataacaagtcttgataacaattagataacgacttattgggcaaatctttgtcttttgtgtttataatattgggtttgtactaa

SEQ ID NO: 208456 - DNA, 120 bp, Artificial Sequence
  ENSG00000115355_233 (sequence is synthesized)
gtaggaaagtatgcttttgagatgggaattgaatagtgaaagtatattggtagctggatcagtaaaattaaaactcagcttttatctaattacagctattgtagcatacgtgtattctaa

SEQ ID NO: 208457 - DNA, 120 bp, Artificial Sequence
  ENSG00000115355_234 (sequence is synthesized)
ttttatatgtatgggaaattggtgtgttatcaataaatagttgttactagagaataagtctaccattctgctctgataaccttatcaattttgtattttattggtttagatttttatgtt

SEQ ID NO: 208458 - DNA, 120 bp, Artificial Sequence
  ENSG00000115355_235 (sequence is synthesized)
taagagggtagaagtcacatctataaaaaattgctctcgtgttaacttctctgtgtgctcaaagagatttgtgggctgtttttcatgtacatgttgatcctacagggaagtattatacta

SEQ ID NO: 208459 - DNA, 120 bp, Artificial Sequence
  ENSG00000115355_236 (sequence is synthesized)
ttatacattttcaaccagtgttttgttttcataggcacccaaagaaatatatatgttatctaaatatgtatatatttatttttttccttaagaaaggaaaaaagagcgtagacatcaatt

SEQ ID NO: 208460 - DNA, 120 bp, Artificial Sequence
  ENSG00000115355_237 (sequence is synthesized)
atttccagggttagtaaatgtatttttgacagctgtgtaatggaattattttttatcctcaaaatatctgactatttcctaagcaaaatggtaggataataaactgacttctcttttggg

SEQ ID NO: 208461 - DNA, 120 bp, Artificial Sequence
  ENSG00000115355_238 (sequence is synthesized)
gaacctacatgacagaaagggtagccattacagtagatactcagaatttgttcccctgtgtctctttattgtgcttatttttagacggaagattttgaatttgtgtgctaaaaatgtgtg

SEQ ID NO: 208462 - DNA, 120 bp, Artificial Sequence
  ENSG00000115355_239 (sequence is synthesized)
ttcacaaaaatagggaaatatattactttagttttccactttaatggtttttatttgaatgattctttttccagaaaaatttagattttttttttgcatcctaaatacttagctgaggtg

SEQ ID NO: 208463 - DNA, 120 bp, Artificial Sequence
  ENSG00000115355_240 (sequence is synthesized)
ctaaaaacaaatacgttaatttccacttcaaatgcagttttatgcttaaaaaatatatgtatattttgaaaatgacggtattccaaaatagtgtttgtcaggttgctgtttttcatgagg

SEQ ID NO: 208464 - DNA, 120 bp, Artificial Sequence
  ENSG00000115355_241 (sequence is synthesized)
actagctcctttccaaaccacaaatctgcttctgtattttcagttccacctctcagtttctttagattttttttcggtgtcctaattctgttgtaaatgacctataaaattaaaggaaaa

SEQ ID NO: 208465 - DNA, 120 bp, Artificial Sequence
  ENSG00000115355_242 (sequence is synthesized)
aagcagcaacctgaaataattatcaaaacatgatctgtattggatttggaggaactttcaaatcattttaaaaatataaaacgttatacaaataactaaaatcttttccaggcctccttt

SEQ ID NO: 208466 - DNA, 120 bp, Artificial Sequence
  ENSG00000115355_243 (sequence is synthesized)
aaggcaatgctagttttctaaaaactaaaagcactacaacttccaacagaactacctagaacaacccaggctcttgttttgctttgcagggtcagaggggagattgtttcattgcttttg

SEQ ID NO: 208467 - DNA, 120 bp, Artificial Sequence
  ENSG00000115355_244 (sequence is synthesized)
gtgttttccctaagcaagtcaactctaatgagagttgtcatttttcttattcctagttccagtttctagttgagtctatgaaatatgttaagtcaatctgtattatacatgattgaaaaa

SEQ ID NO: 208468 - DNA, 120 bp, Artificial Sequence
  ENSG00000115355_245 (sequence is synthesized)
caatttccatattctatgtaaataaaattttataatggttttttattacaaaaatatctttatatccattttgctattttatgtagatactacatcctttgaagacataagtccacaagg

SEQ ID NO: 208469 - DNA, 120 bp, Artificial Sequence
  ENSG00000115361_0 (sequence is synthesized)
gtattccctcgcgaccagcctgtggcgtggttggggctccggaagggcgcgcgcgagcgcttttttgggaggacaccacaggtggacgcctcagctgatcgtcctccctcccggggaccc

SEQ ID NO: 208470 - DNA, 120 bp, Artificial Sequence
  ENSG00000115361_1 (sequence is synthesized)
tgccccgagtcgccgagtagccgcagagtcgcctccgtcgccccgccgcccctgtgtttcggacatggccgcacgccttctccgagggtccctacgcgtcctgggcggccaccgtgcgcc

SEQ ID NO: 208471 - DNA, 120 bp, Artificial Sequence
  ENSG00000115361_2 (sequence is synthesized)
gcgccagctgcccgccgcgcgatgttctcattccggaggggaagaacgtctagaaactccttctgctaaaaaattaacagatataggaattcgaagaatcttttctccagagcatgacat

SEQ ID NO: 208472 - DNA, 120 bp, Artificial Sequence
  ENSG00000115361_3 (sequence is synthesized)
tttccggaaaagtgtaaggaagtttttccaagaagaagtgattcctcatcactcagaatgggagaaagctggagaagtaagtagggaggtttgggaaaaagctggaaaacaaggactgct

SEQ ID NO: 208473 - DNA, 120 bp, Artificial Sequence
  ENSG00000115361_4 (sequence is synthesized)
tggtgtcaatattgcagagcatcttggtggaattggaggggatctgtactccgcagctattgtctgggaggagcaagcttattcaaattgttcaggcccaggttttagtattcattcagg

SEQ ID NO: 208474 - DNA, 120 bp, Artificial Sequence
  ENSG00000115361_5 (sequence is synthesized)
tattgtcatgtcctatattacaaaccatggctcagaagaacagattaagcactttattccccagatgactgcaggcaaatgtattggtgcaatagcaatgacagagcctggagctggaag

SEQ ID NO: 208475 - DNA, 120 bp, Artificial Sequence
  ENSG00000115361_6 (sequence is synthesized)
tgacttacagggaataaaaacaaatgctaaaaaggatggaagtgactggattctcaatggaagcaaggtgttcatcagtaatgggtcattaagtgatgttgtgattgtagttgcggtcac

SEQ ID NO: 208476 - DNA, 120 bp, Artificial Sequence
  ENSG00000115361_7 (sequence is synthesized)
aaatcatgaagctccctcccctgcccatggtattagcctttttctggtggaaaatggaatgaaaggatttatcaagggacgaaagctacataaaatgggattaaaagcccaggataccgc

SEQ ID NO: 208477 - DNA, 120 bp, Artificial Sequence
  ENSG00000115361_8 (sequence is synthesized)
agaactattctttgaagatatacggttgccagctagtgccctacttggagaagagaataaaggcttctattacatcatgaaagagcttccacaggaaaggctgttaattgctgatgtggc

SEQ ID NO: 208478 - DNA, 120 bp, Artificial Sequence
  ENSG00000115361_9 (sequence is synthesized)
aatttcagctagtgaattcatgtttgaagaaaccaggaactatgttaaacaaagaaaagcttttggcaaaacagttgctcacctacagacagtgcaacataaattagcagaattaaaaac

SEQ ID NO: 208479 - DNA, 120 bp, Artificial Sequence
  ENSG00000115361_10 (sequence is synthesized)
agtgtagcttacgactgtgtacagctccatggaggttggggatacatgtgggagtacccaattgcaaaagcttatgtggatgccagagttcagccaatctatggtggtacaaatgaaata

SEQ ID NO: 208480 - DNA, 120 bp, Artificial Sequence
  ENSG00000115361_11 (sequence is synthesized)
atgaaggagctgattgcaagagagattgtctttgacaagtagacatctgcccacatcctggagtcctattacagctaatctcgttttaaatctgctcaagataaaatgtaacttggaaag

SEQ ID NO: 208481 - DNA, 120 bp, Artificial Sequence
  ENSG00000115361_12 (sequence is synthesized)
cgaggaaacactaaacatgtttttacctgctctctctatagagaaggaaataaaatataaatataagattaacacagtggaaggacaaatctttgaagccaaaattctagttttccaata

SEQ ID NO: 208482 - DNA, 120 bp, Artificial Sequence
  ENSG00000115361_13 (sequence is synthesized)
taaggtttaacttacagttttttatgtagccaaaggtaaacggttttctgaatcttgcctaggtgtttcatttatctctaaaattctaaaaagcataaatcattcaaatcttcaaaccaa

SEQ ID NO: 208483 - DNA, 120 bp, Artificial Sequence
  ENSG00000115361_14 (sequence is synthesized)
ggcagaaataattttatgtcgctatagtataaaaacattaataagatagcacattgacttttaaagggaaaagtaaatataacttagcatgtaaactcatttcggctaccatttgctcca

SEQ ID NO: 208484 - DNA, 120 bp, Artificial Sequence
  ENSG00000115361_15 (sequence is synthesized)
aattccctagaacagtggtttttaccactgtactccaaccccgtttttaagcaatggaactctttcttcaaacaaaagcttatgcagaacatctctgtgaaacgctgctgagtgagaact

SEQ ID NO: 208485 - DNA, 120 bp, Artificial Sequence
  ENSG00000115361_16 (sequence is synthesized)
gctttcattgaagctggaagccatcataccttactgccttgaaacccctaggactcagctaagtatttgcctaaccctgaccagggaatgccttggttctgtcaattgctgacatctgag

SEQ ID NO: 208486 - DNA, 120 bp, Artificial Sequence
  ENSG00000115361_17 (sequence is synthesized)
aacacagaataatccatcatttttaatttcaagatattggtacattttataggtatcaaagcaatggcttttcttttgcaacagttaatgtatttattaacttaataattactttatgtc

SEQ ID NO: 208487 - DNA, 120 bp, Artificial Sequence
  ENSG00000115361_18 (sequence is synthesized)
ttctataaaccaggctgttaatacaatgatgacaaacaaaactggcaagatcactaaaaaataagtgaataaacaaataagtagtaaaataaggtaagaagtaaatatgtaaaagagata

SEQ ID NO: 208488 - DNA, 120 bp, Artificial Sequence
  ENSG00000115361_19 (sequence is synthesized)
atttcaagcataagtgcaatgtaaataataaagtaagcatttaaaattcaaaagtgaggaaatgacatttgatttaagacttaaaagtaattacaaaaaataaaccattaatttaaagta

SEQ ID NO: 208489 - DNA, 120 bp, Artificial Sequence
  ENSG00000115361_20 (sequence is synthesized)
agacttttaaggttgagtcttgttttgtaaacacaccactcacctttctgaaatgaccaaacaaacaaacaaacaaacaaatgttttctaatcttggaagattgaaaattcagtgtaaaa

SEQ ID NO: 208490 - DNA, 120 bp, Artificial Sequence
  ENSG00000115361_21 (sequence is synthesized)
tgtaaaagattataccgctcatgcactcttgcacattttttgaatgtgggataataagaaaatccttttaagttgctgaaataggtgctattgaaaattaaagagatagtttttttttcc

SEQ ID NO: 208491 - DNA, 120 bp, Artificial Sequence
  ENSG00000115361_22 (sequence is synthesized)
tgtcaatgcttatggttacttttcccccttagaaaagatatttgaaagagaacagcagagtagaaatatacttccatcaaatatattagaaatttaatatacaagaacaaataaagattg

SEQ ID NO: 208492 - DNA, 120 bp, Artificial Sequence
  ENSG00000115361_23 (sequence is synthesized)
cagttgaaaaatgggcaaagaatttgaagcaataattcatcaaaaaagaaatgcaaatatgtttttttaaatgagaaaagttcatccttagtaacaatcaaatgcaaattaaactgatct

SEQ ID NO: 208493 - DNA, 120 bp, Artificial Sequence
  ENSG00000115361_24 (sequence is synthesized)
gcgttttgggaggaggtggtcaccccctgggcccggctgcaggagcgcgggctgcgatctgtgtcccagttcgagctgtgaacccggcgttccccacggcttagactcgccgcgcggtag

SEQ ID NO: 208494 - DNA, 120 bp, Artificial Sequence
  ENSG00000115361_25 (sequence is synthesized)
tgaacttgggacccggactcagtgcccgggctgcggcgcggaccagaattgtccaggacaaactgggctagaaatgacctggcgagggttccatcaaacaaggaaattagctttagatat

SEQ ID NO: 208495 - DNA, 120 bp, Artificial Sequence
  ENSG00000115361_26 (sequence is synthesized)
atcaacaaatctaactaaatacagaggattaatgaagacagagtctaagtagttcagtgactactaaggtggtgtttataatatgatcaaaagtttcagatactgtctgatgcataaaat

SEQ ID NO: 208496 - DNA, 120 bp, Artificial Sequence
  ENSG00000115361_27 (sequence is synthesized)
gggtaaacaaattggaagcatggagaattcattatttaataagggtgaaggaactggcaaatttgcgaatgacagcattggtgtaagctactctaattttatttgagagctatgaaacaa

SEQ ID NO: 208497 - DNA, 120 bp, Artificial Sequence
  ENSG00000115361_28 (sequence is synthesized)
gaactctggtagaccactgttattgtgttggaaccagaaattttaaaattagtaaaaacaaaaagagaaaacactcaggaatgtcataggtttgtgatgagataggccactaccaaacaa

SEQ ID NO: 208498 - DNA, 120 bp, Artificial Sequence
  ENSG00000115361_29 (sequence is synthesized)
tttgataggaccttaatacattgttgttataatagtcgttttttattgctattttatgctctaatttttcttcttttttcattctaagagcttattcaaattgttcaggcccaggtttta

SEQ ID NO: 208499 - DNA, 120 bp, Artificial Sequence
  ENSG00000115361_30 (sequence is synthesized)
ttttggagacagtaaatttacaacatatattacttaagatctgtggtagcttcttctatatttcattttgcatgccccctcactaatatggcaaaggttgttttagcttccaaacagccc

SEQ ID NO: 208500 - DNA, 120 bp, Artificial Sequence
  ENSG00000115361_31 (sequence is synthesized)
ttattaaaccagaaaaagacaaggtgaggctcacattgcccaaatgtgggacaaatattaataatacttaaactttatgttgataaaagattgggggaaaagctttctcatatagatcaa

SEQ ID NO: 208501 - DNA, 83 bp, Artificial Sequence
  ENSG00000115361_32 (sequence is synthesized)
agcaagagattgcttgagcccagaagtttgagaccaacctaggcaacaaagtgagaccctgtctctataaaagtaaaaactaa

SEQ ID NO: 208502 - DNA, 120 bp, Artificial Sequence
  ENSG00000115361_33 (sequence is synthesized)
caacaaagtgagaccctgtctctataaaagtaaaaactaaaaaaattagctgggcatggtggtgtgccctttggtcccagctactcactcaggaggctgaagagggagaatcacttgagc

SEQ ID NO: 208503 - DNA, 120 bp, Artificial Sequence
  ENSG00000115361_34 (sequence is synthesized)
ttgttttttaatacaaccattacaactggagagaggagagggaagaaaaaatattttgataccagtctttttaaaattttttttattgtactttattttttaagatggagtctcgctctg

SEQ ID NO: 208504 - DNA, 69 bp, Artificial Sequence
  ENSG00000115361_35 (sequence is synthesized)
ttttattgtactttattttttaagatggagtctcgctctgtcattcaaggagtgcaatggcgtgatctc

SEQ ID NO: 208505 - DNA, 120 bp, Artificial Sequence
  ENSG00000115361_36 (sequence is synthesized)
atctacattgggtattttctcctaatgctatccctcccctacccccctaccctccacaggccctggtgtgtgatgttcccttccccgtatccatgtgttctcatttttcaactctcactt

SEQ ID NO: 208506 - DNA, 120 bp, Artificial Sequence
  ENSG00000115363_0 (sequence is synthesized)
agcataacctgtttgtgaaactgcaaaaaggttgacatggctgaagcagaagatgggttggtactgaatggttgggagagatatgtagcggctgaccctgaaggacgttgcagcccatgc

SEQ ID NO: 208507 - DNA, 120 bp, Artificial Sequence
  ENSG00000115363_1 (sequence is synthesized)
tatggagacctgattttattttgtaagaggtgggcaacccctgaagcattttagtgatgcgaacagatgtgtctgttaccaagcaaagccagttaaagaaggtcacagaggaggaatgat

SEQ ID NO: 208508 - DNA, 120 bp, Artificial Sequence
  ENSG00000115363_2 (sequence is synthesized)
cacaaagagtctgagaagccaactggggccaaacaagttttagaacctctactggctgatgccaacatcatcagagatgaactgttcttaccagaaacttctctgctcctgacaccccac

SEQ ID NO: 208509 - DNA, 120 bp, Artificial Sequence
  ENSG00000115363_3 (sequence is synthesized)
ctctccccagaagagaagaaggagagtggccacgttgattcagccaagcacctccaggaggtcccctctggatgtcccatgaggctgcccctcagccacagcccagagcacgtggagatg

SEQ ID NO: 208510 - DNA, 120 bp, Artificial Sequence
  ENSG00000115363_4 (sequence is synthesized)
gctttgctcagcaacatcctagcggcctattcctttgtctcagaaaatcctgagcgagcagctctgtactttgtttctggcgtgtgcatcgggctggtgctgaccctggctgctctggtg

SEQ ID NO: 208511 - DNA, 120 bp, Artificial Sequence
  ENSG00000115363_5 (sequence is synthesized)
ataaggatctcttgccacacagactgcaggcggcgtcccgggaagaagttcctgcaggacagagagagcagcagcgacagcagcgacagcgaggatggcagtgaggacaccgtgtccgat

SEQ ID NO: 208512 - DNA, 120 bp, Artificial Sequence
  ENSG00000115363_6 (sequence is synthesized)
ctctccgtgcggagacaccgccgcttcgagaggactttgaacaagaatgtgttcacctctgcggaggagctggagcgcgcccagcggctggaggagcgcgagcgcatcatcagggagatc

SEQ ID NO: 208513 - DNA, 120 bp, Artificial Sequence
  ENSG00000115363_7 (sequence is synthesized)
cctgaggtgcccgggaccaggagcctgaatcgctactattagggagcagcaggaccccggaaaccactggaggccgcctggaaaggagagcgtctgcagggacagtgggcacaaggaact

SEQ ID NO: 208514 - DNA, 120 bp, Artificial Sequence
  ENSG00000115363_8 (sequence is synthesized)
gaacccagctctgctaatattgtgatttcagagaaaaagcaggacatgccccttttctagccaggaggattgctcctttttggccaaatgtatggagaagtagaaaaatcaaagcagttc

SEQ ID NO: 208515 - DNA, 120 bp, Artificial Sequence
  ENSG00000115363_9 (sequence is synthesized)
atcaccctttccaggtctcggaatggtgctgaaaaatcctctccaacactgtggatggagatcggagaaacgcgactgtggtttctcttgatttctgaggatctcagaagtttcagcaga

SEQ ID NO: 208516 - DNA, 120 bp, Artificial Sequence
  ENSG00000115363_10 (sequence is synthesized)
cttccttgctctgtgttattcctttgcaaaaggaaagatcattatagcatgagggctgggaatagcagggtgaacttaacccaataaatgcaatttcctaaatgacttcatgctatggag

SEQ ID NO: 208517 - DNA, 120 bp, Artificial Sequence
  ENSG00000115363_11 (sequence is synthesized)
gtgattctgattcaaatagcatgatccatgcttattatttaaggctgatttttaaaatcttgtgttgcaagggcaacctcgtccattttaactggcacctcagggattaaaatcctactt

SEQ ID NO: 208518 - DNA, 120 bp, Artificial Sequence
  ENSG00000115363_12 (sequence is synthesized)
tttagtgtagttcccacctcattcatgaaaatgaatagaactattgtattatgggagatgtgtcagtgaactagaaaatgtcaataacctcaaaggatgaagggtttttattttaaatag

SEQ ID NO: 208519 - DNA, 120 bp, Artificial Sequence
  ENSG00000115363_13 (sequence is synthesized)
tttataaaatatatattgacatgcatatttgaaaatgctgcataaaaataaaagtggtgtgttttccccctctttggagacaagaaaattttattatgactctagataattgtgatttta

SEQ ID NO: 208520 - DNA, 120 bp, Artificial Sequence
  ENSG00000115363_14 (sequence is synthesized)
aacactttgtttttttttttttttttaattggatttcaaagaaaagaatggaaatgagaggtaaggattaaagccaaagttaggatgggaattaaaaaaataaacattacataaaatctt

SEQ ID NO: 208521 - DNA, 120 bp, Artificial Sequence
  ENSG00000115363_15 (sequence is synthesized)
actgactcgggctcctgcagcttctgcggggcttggcgccgccgtccgtgagcacccaggccgggaccccacatccccaggccagccctgaccccggcggcccctccgccgggattcctt

SEQ ID NO: 208522 - DNA, 120 bp, Artificial Sequence
  ENSG00000115363_16 (sequence is synthesized)
tccgaggtactggtgccggcccaagacccgggcagcgctttgtcgtgtccgcccctcagtgatcagctccgggtccccctgctcggccccgcgcgccccaagcgcagtccccggaagtgc

SEQ ID NO: 208523 - DNA, 120 bp, Artificial Sequence
  ENSG00000115363_17 (sequence is synthesized)
attctcagtaaagacacactacgtaatcaaagctactgctctgctttgctgagctttgagatgaaaggtctccaggttgggagttaagcttgtcattctctaatttgaaaaatgaagggt

SEQ ID NO: 208524 - DNA, 120 bp, Artificial Sequence
  ENSG00000115363_18 (sequence is synthesized)
gttcctacagaccattttgttgctccctgccctgccccaggttgggggaaagcctcagcctcagcctcagcctcccctctcccctccttttttttaaaaaataaatatgtatctcttgca

SEQ ID NO: 208525 - DNA, 120 bp, Artificial Sequence
  ENSG00000115364_0 (sequence is synthesized)
gtagtcttgacgtgagctagctggcatggcggcctgcattgcagcggggcactgggctgcaatgggcctaggccggagtttccaagccgccaggactctgctccccccgccggcctctat

SEQ ID NO: 208526 - DNA, 120 bp, Artificial Sequence
  ENSG00000115364_1 (sequence is synthesized)
cgcctgcagggtccacgcggggcctgtccggcagcagagcactgggccttccgagcccggtgcgttccaaccgccgccgaaaccggtcatcgtggacaagcaccgccccgtggaaccgga

SEQ ID NO: 208527 - DNA, 120 bp, Artificial Sequence
  ENSG00000115364_2 (sequence is synthesized)
acgcaggttcttgagtcctgaattcattcctcgaaggggaagaacagatcctctgaaatttcaaatagaaagaaaagatatgttagaaaggagaaaagtactccacattccagagttcta

SEQ ID NO: 208528 - DNA, 120 bp, Artificial Sequence
  ENSG00000115364_3 (sequence is synthesized)
tgttggaagtattcttcgtgttactacagctgacccatatgccagtggaaaaatcagccagtttctggggatttgcattcagagatcaggaagaggacttggagctactttcatccttag

SEQ ID NO: 208529 - DNA, 120 bp, Artificial Sequence
  ENSG00000115364_4 (sequence is synthesized)
gaatgttatcgaaggacaaggtgtcgagatttgctttgaactttataatcctcgggtccaggagattcaggtggtcaaattagagaaacggctggatgatagcttgctatacttacgaga

SEQ ID NO: 208530 - DNA, 120 bp, Artificial Sequence
  ENSG00000115364_5 (sequence is synthesized)
tgcccttcctgaatatagcacttttgatgtgaatatgaagccagtagtacaagagcctaaccaaaaagttcctgttaatgagctgaaagtaaaaatgaagcctaagccctggtctaaacg

SEQ ID NO: 208531 - DNA, 120 bp, Artificial Sequence
  ENSG00000115364_6 (sequence is synthesized)
ctgggaacgtccaaattttaatattaaaggaatcagatttgatctttgtttaactgaacagcaaatgaaagaagctcagaagtggaatcagccatggcttgaatttgatatgatgaggga

SEQ ID NO: 208532 - DNA, 120 bp, Artificial Sequence
  ENSG00000115364_7 (sequence is synthesized)
atatgatacttcaaaaattgaagctgcaatatggaaggaaattgaagcgtcgaaaaggtcttgattctgagaatgaatttggttagttgcagaagatacattggctctaagaggatatat

SEQ ID NO: 208533 - DNA, 120 bp, Artificial Sequence
  ENSG00000115364_8 (sequence is synthesized)
agaccaatttaatttcatttataagaacatagtaattaagtgaactaagcattcattgttttattaatactttttttctaaaataaaacttgtacaccagtttattactctaaaaagaga

SEQ ID NO: 208534 - DNA, 120 bp, Artificial Sequence
  ENSG00000115364_9 (sequence is synthesized)
gagaattacacatgccaaatggaccaatgtccatttgcttattggaggcaaagctacaatagaagtcagagcatcaccagaatggtctttaatgagcatggaacctgagcaaagggaata

SEQ ID NO: 208535 - DNA, 120 bp, Artificial Sequence
  ENSG00000115364_10 (sequence is synthesized)
ggtgggatgaattttttttttaattgtgaaacaattcataagcacaatatgatttacagaataataaacattcatgtacccactatcaggttaagaaatagaacatttattaatatgtag

SEQ ID NO: 208536 - DNA, 120 bp, Artificial Sequence
  ENSG00000115364_11 (sequence is synthesized)
gaatgttaagaaataaaacatttaataagatctcagaagactccagtaaatctgcaattgtatctctctcctttttaaatgtaaatatcatcttgacttgttaattattcccttgcattt

SEQ ID NO: 208537 - DNA, 120 bp, Artificial Sequence
  ENSG00000115364_12 (sequence is synthesized)
cttttagtttactgccaacacatatattcttcaacaatatatttaattttgaaaaacctgaaaaaaaaaacctgttagcaagtataaaggggcagtattactattattgcatgaaggctt

SEQ ID NO: 208538 - DNA, 120 bp, Artificial Sequence
  ENSG00000115364_13 (sequence is synthesized)
caagggaaacgttacagtctttgggtcatagtctggcttcagcttcctctgagagtttacagaggccaattttgagcaaattcatggctaaggttatgagtgagttctgctaaacagaag

SEQ ID NO: 208539 - DNA, 120 bp, Artificial Sequence
  ENSG00000115364_14 (sequence is synthesized)
gctcaccacaaggtatctggcaggattatactgggtagctggatgttgcagaaatgtggttagaggaagtaaactgttttttgatgctcacagcatgatgaatcaaactctgtatcttag

SEQ ID NO: 208540 - DNA, 120 bp, Artificial Sequence
  ENSG00000115364_15 (sequence is synthesized)
gattaggttaaaacaatacctttggtatgatatgagtgttgttgctgatccatgcagcatggattggaaagctggggtataagcacacatgctaaagaaaaacatgtaatttggtccata

SEQ ID NO: 208541 - DNA, 120 bp, Artificial Sequence
  ENSG00000115364_16 (sequence is synthesized)
ctcacctggatatactgttcctcaggttaaaaaatacagtactatcctaaatcttgaaggcaactctcagcctatccattgagttaccttcagatctgccctctggttcctagctgtctt

SEQ ID NO: 208542 - DNA, 120 bp, Artificial Sequence
  ENSG00000115364_17 (sequence is synthesized)
gggactaacttctttcctgcgctcagctgttttctggattccatgttttccattttattgagtactaacttgttttgctgcagcacatcctttggtagcttctagaggaagtttgtgtgg

SEQ ID NO: 208543 - DNA, 120 bp, Artificial Sequence
  ENSG00000115364_18 (sequence is synthesized)
aggtaaaatttttgagaccttgcatgtctcatgtttgattgatactttatacgtttaggtaggaggtaattttccttcaggactttaaaaatattgttgctccattttctttgtttctat

SEQ ID NO: 208544 - DNA, 120 bp, Artificial Sequence
  ENSG00000115364_19 (sequence is synthesized)
tgttgtattgagaaatccaatgccattttgatttccccatcataaatttcatgatgatgtgtcttggtgtgggtctatatttatccattgtattgggttttaggtgaacccttccagata

SEQ ID NO: 208545 - DNA, 120 bp, Artificial Sequence
  ENSG00000115364_20 (sequence is synthesized)
gtaactcatttctgtcagttctgggaaacacttagcattggttgatgatttattctctgctgctttgttctcccaactattatttggatgttggatatccagcactgggtatctattttc

SEQ ID NO: 208546 - DNA, 120 bp, Artificial Sequence
  ENSG00000115364_21 (sequence is synthesized)
ttacctccctcccttgaccccagtctctgttttttagctctttagctcaatcttccaactctttgctattgtattttaaaatcttaagaccccttcttgatttgtagaagttccttttct

SEQ ID NO: 208547 - DNA, 120 bp, Artificial Sequence
  ENSG00000115364_22 (sequence is synthesized)
tacaaccaaaaagcctttatctatggatttgttcacagataaggggtattcaatatagtgtatttttttttcatttaaaattgtttgcgcatctatttcctccaaatttctttctgtatt

SEQ ID NO: 208548 - DNA, 120 bp, Artificial Sequence
  ENSG00000115364_23 (sequence is synthesized)
tattttttgttgtctatatttcagacttttccaggatatctgataatctttggctgtcttcttatggttgaaagagggactaaaaagcttggaaagcctttgggttgtgggaaggggctg

SEQ ID NO: 208549 - DNA, 120 bp, Artificial Sequence
  ENSG00000115364_24 (sequence is synthesized)
tctttaggattatctgaatgggcttttttgggagtcccctcctccacatgaatattttggttttgtcagattccctagaatagaggcttccaatctccttcctggaggggtctgtccagg

SEQ ID NO: 208550 - DNA, 120 bp, Artificial Sequence
  ENSG00000115364_25 (sequence is synthesized)
aaggagattgtctaggggtctgtcagacagcagctttcagctacttccttgatctttttcactaatgattatatagtcatctaactactgtcaacaagtaatagatatcctatccttcac

SEQ ID NO: 208551 - DNA, 120 bp, Artificial Sequence
  ENSG00000115364_26 (sequence is synthesized)
ttgtttagattatttgctgagataacctctcaaaagaacctctcaaaataaaaggttaacaagagcctatatcttatatttttcttctctttatcttgttagaagatagctattaaaacc

SEQ ID NO: 208552 - DNA, 120 bp, Artificial Sequence
  ENSG00000115364_27 (sequence is synthesized)
tgttctttttctgtcttgataaacacacttcaatcttggtagaatggtagatgggacagtatattttaggacctaaagctctgcaaatgtatgatcagcttgtaagtacaggtgctcaaa

SEQ ID NO: 208553 - DNA, 120 bp, Artificial Sequence
  ENSG00000115364_28 (sequence is synthesized)
aacatgtaaacaatcatgctttttactctgtaggaatatctttaaaattcttgtgaatttttccccagaagtaaagcaaatcttcccccagaaataaaattaaatgtgcataatctaaag

SEQ ID NO: 208554 - DNA, 120 bp, Artificial Sequence
  ENSG00000115364_29 (sequence is synthesized)
ctttttttttttattgtggtaggatatatatataaaacataatttgccattgtaaacattttaaatttacaagtcagaggcattaattacatcacaatgttgtgaaattattactactat

SEQ ID NO: 208555 - DNA, 120 bp, Artificial Sequence
  ENSG00000115364_30 (sequence is synthesized)
ttccaaaattttctcatcaccccaaactgaaactctgtaactgttgagcaataacctcattcctgtatctctcccaaccccaggtaacctcaaatctttctttttatctttgagacaagg

SEQ ID NO: 208556 - DNA, 120 bp, Artificial Sequence
  ENSG00000115364_31 (sequence is synthesized)
tctcattctatcactcaggtaggagtgcagtggtgtgatcatagctcattgcagcctcaaaatcctgggctcaagcaatcctccttgagtagctaagactataggcacacattaactgcg

SEQ ID NO: 208557 - DNA, 120 bp, Artificial Sequence
  ENSG00000115364_32 (sequence is synthesized)
gatgtggtcttgctatgtttcccatgctggtcttgagttcctggcctcaagcagtccttaagattcatccatgttgtggcatgtgtcagaatttcatttgtttttatgactaaataatat

SEQ ID NO: 208558 - DNA, 120 bp, Artificial Sequence
  ENSG00000115364_33 (sequence is synthesized)
tccattgtatgtatatacattttgttcatccatcttctgatgaacactgggatatgtctaccttttggctattgtgaataatgctgcagtaaacattgacataacaagtatgtatttgat

SEQ ID NO: 208559 - DNA, 120 bp, Artificial Sequence
  ENSG00000115364_34 (sequence is synthesized)
tgcctgtttctaagttcttttgggtatacatcttgagtagaattgctagataatgtcatgttttatttctcttgtgatttcttcttcgatcccctggttgagtgtgttaatttctacatg

SEQ ID NO: 208560 - DNA, 120 bp, Artificial Sequence
  ENSG00000115364_35 (sequence is synthesized)
tttatgaatttcccactgtttttttgttattgatttccaagttcattccattgtgattagagaagatacttagtatgattttaatgtttttgagaattggtgtgtggcctgatagatggt

SEQ ID NO: 208561 - DNA, 120 bp, Artificial Sequence
  ENSG00000115364_36 (sequence is synthesized)
ctgtcctggagaatgttcctcatacacttgagcaaaatatttatcatgctattgttgactgtagttttctatatgtctcttaggtcaaggtggtttacaatgtgttaaggttctcttttt

SEQ ID NO: 208562 - DNA, 120 bp, Artificial Sequence
  ENSG00000115364_37 (sequence is synthesized)
ttaaaaaaatttttgcacagagtatctttttctatgtgttccatgtatttgtgtctttggagctatagtctcttgtagacagcatatcactatcttgttttgttttgttttttctgtcca

SEQ ID NO: 208563 - DNA, 120 bp, Artificial Sequence
  ENSG00000115364_38 (sequence is synthesized)
ttctgccaatttctgccttttgattggaaaatttaatccatttgcatttaaagtaattaaggaaggactttcttctaccatttaacacttcttctatatgtcatatacttttttggcccc

SEQ ID NO: 208564 - DNA, 120 bp, Artificial Sequence
  ENSG00000115364_39 (sequence is synthesized)
tcatttcctctttatggccttcttttctgtttttttgtagtgaactagtctgattctctttccactcccctttgtgtatatttgttagatgttttatttgtggttgctatggggattata

SEQ ID NO: 208565 - DNA, 120 bp, Artificial Sequence
  ENSG00000115364_40 (sequence is synthesized)
gttaacatcctacacttaaaacaatctaatttaaactgataccaatttaccttcaatagcatacaaaatctctactcctgtaaagctctgcccctgccccccttatgttattgatggcac

SEQ ID NO: 208566 - DNA, 120 bp, Artificial Sequence
  ENSG00000115364_41 (sequence is synthesized)
aaattgcctaataaataatttatagttatttgtatgagtttgtcttttaaatcatttaggaaataaaaagtggagttagaaaacagtatgatagtaatactgacttttatatttgtcaat

SEQ ID NO: 208567 - DNA, 120 bp, Artificial Sequence
  ENSG00000115364_42 (sequence is synthesized)
atatttatcttattttggatccttatttcattatatagatttgagttactgtctagtgcccttccatttcggcccaaaggattcccttatgcatttcttgcagggcaagtctaattgtaa

SEQ ID NO: 208568 - DNA, 120 bp, Artificial Sequence
  ENSG00000115364_43 (sequence is synthesized)
taaactccctcagcttttgttttatctgagaatgtcttgatttctcccttatttttgatggataattttgccagatacatgaatttttggtaacagtatttttctttcagcactttaaat

SEQ ID NO: 208569 - DNA, 120 bp, Artificial Sequence
  ENSG00000115364_44 (sequence is synthesized)
atgtcatcccactaccttctgacttcatggtttctcatgagatattagatgttataaaatttgaggattcctcattcttgatgagtcagttctgtcttattgcttttcggatttgctcag

SEQ ID NO: 208570 - DNA, 120 bp, Artificial Sequence
  ENSG00000115364_45 (sequence is synthesized)
cttttgtcttttgacagtttgattataacgcggctcagtgtgggtctctgagtttatcccacttagagtttgttgagtttcttggagtcatagatttatgtcttttatcaaattttggac

SEQ ID NO: 208571 - DNA, 120 bp, Artificial Sequence
  ENSG00000115364_46 (sequence is synthesized)
atatttggctattatttcttcaatttttttcactgcttctttcttttccttctgaaatattcttaatgtatatgttggtctgtttgatgctgtctcaccagtttcttaggctgtgttctc

SEQ ID NO: 208572 - DNA, 120 bp, Artificial Sequence
  ENSG00000115364_47 (sequence is synthesized)
ttttgttcctcagacttgattattgcagttgcccttctttttatttttttcaagtttgttgattcttctccctgttcagatcaactgttgaactcctctagtgaatttatttcagttact

SEQ ID NO: 208573 - DNA, 120 bp, Artificial Sequence
  ENSG00000115364_48 (sequence is synthesized)
gtacttttcagctccaagatttatctttggttcctttttataacgtctgtgtctttattgatattctcattttgttcatatgtctctttcttcctttagttctttgtccatgttttcctt

SEQ ID NO: 208574 - DNA, 120 bp, Artificial Sequence
  ENSG00000115364_49 (sequence is synthesized)
tagctctttgggcttatttaagacaattgtttaaagtctttgcatagtaagtccaatgtctgtgtttcttcagggatggttttcattattttgttttcaatgagccatactttcctgtgt

SEQ ID NO: 208575 - DNA, 120 bp, Artificial Sequence
  ENSG00000115364_50 (sequence is synthesized)
ctttgtatgctgtctttttgttgttgaaaactgtatgtttgaacatcataacgtggtggccctgaaaatcagatattccccccttcctgagagttagttttatttttattattgaagatt

SEQ ID NO: 208576 - DNA, 120 bp, Artificial Sequence
  ENSG00000115364_51 (sequence is synthesized)
gtagcagtctattgctacatgtgcagtcatttccaaactatttttgcaaagactgtattccttctgtgtgtcatcactgaagtctctgttccttagtttgtgtttaatagtttgacatag

SEQ ID NO: 208577 - DNA, 120 bp, Artificial Sequence
  ENSG00000115364_52 (sequence is synthesized)
atttccttgaaaggagttaaaactagcagaaaaatctctctcccagtctttccagtctttgtagattggttctgtgctgggcttttccattaatacttagccaggcttgtactgagccta

SEQ ID NO: 208578 - DNA, 120 bp, Artificial Sequence
  ENSG00000115364_53 (sequence is synthesized)
acaatcaggcccaaaagcgtagggtctttgcagatcttgtctgagcatgcttcttgctgtgtatgcacgtagttttctaaatctccctgtatgtgctgttgaatattctaatttcccaaa

SEQ ID NO: 208579 - DNA, 120 bp, Artificial Sequence
  ENSG00000115364_54 (sequence is synthesized)
gaaactcctttgcagctttttctcacagaacatagatggttttttggatatcttgaccatagtctttcgacccaggtgtttgcggttgttagttcaccttacacttttttcaagcattgc

SEQ ID NO: 208580 - DNA, 120 bp, Artificial Sequence
  ENSG00000115364_55 (sequence is synthesized)
ctactgcttacgatgagtgctctgtcaatcctttaagtagccccagacaggctaccagagacttaaacaagaatttgtaagttctgctcagcttcctctagaaatggggatcagggtcca

SEQ ID NO: 208581 - DNA, 120 bp, Artificial Sequence
  ENSG00000115364_56 (sequence is synthesized)
agacagaatgcagttgctgatttcaagactgctgcaacaccagggagcttgtgggggaagggcaagcagaaatgtcacaaagctttcttgccattttaaagttgcctgttcttgactcag

SEQ ID NO: 208582 - DNA, 120 bp, Artificial Sequence
  ENSG00000115364_57 (sequence is synthesized)
catttgcttcattgctataaactttttactgtttttcagagttctgataaaattggctatgcctgttcctgctttaaaaaatatatatatattttttagggattggggtctcactatact

SEQ ID NO: 208583 - DNA, 120 bp, Artificial Sequence
  ENSG00000115364_58 (sequence is synthesized)
aggctggtcttgaacttctggcctcaagccatcctctcatttcagcttcccaaagtgctgcaattacacgcgtgaaccaccacacccagcccctgcttgtttttcaatgtgcctactcca

SEQ ID NO: 208584 - DNA, 120 bp, Artificial Sequence
  ENSG00000115364_59 (sequence is synthesized)
tccaccatgttgctcaagtatgtatattttctaaactaccttgtagtgttgtgatgggaaataaatccctgagccttttgaataactcagagagatcaaaaacttagtttatcctattcg

SEQ ID NO: 208585 - DNA, 120 bp, Artificial Sequence
  ENSG00000115364_60 (sequence is synthesized)
aaggattagaaaaatgatatatctttcactttttcagggataggctcctcattagaaggctcctatgtgccgatgctgtacaagacatttcatttctcttaatgtttacaacaagcttgt

SEQ ID NO: 208586 - DNA, 120 bp, Artificial Sequence
  ENSG00000115364_61 (sequence is synthesized)
tgccaaggctgatcttgaactcctggcctcaaacgatcctcccagctcagtctcacaaagtgttgggatgtctggccaactaatgactatcttaactcttgtgtttcaatgtttatgcct

SEQ ID NO: 208587 - DNA, 120 bp, Artificial Sequence
  ENSG00000115364_62 (sequence is synthesized)
tcttttatcttgactgattgtatgactatgtcttctagaacaatgttgaacagaaatggtgagagcagacatccttgctttaatatttcaccattatatatgatgttaggtatagatttt

SEQ ID NO: 208588 - DNA, 120 bp, Artificial Sequence
  ENSG00000115364_63 (sequence is synthesized)
tctcacagatgccttttatcagattgaggaatttatattcctactttgccgaaaggtttttgtagtatgagggggtgctgaattttgtcaaacactttttcggtaataattgagatgatt

SEQ ID NO: 208589 - DNA, 120 bp, Artificial Sequence
  ENSG00000115364_64 (sequence is synthesized)
ggttctgcagtcatcgagatgtggattttctcctttattctgttcgtgagtgattacactggttgactaatgttaaaacaaccttactttccaggaataaaccctattatcttttttata

SEQ ID NO: 208590 - DNA, 120 bp, Artificial Sequence
  ENSG00000115364_65 (sequence is synthesized)
tcaaaactagggccgccattaccaacatgtgaccttgagaaggcaatcaacgctgagagcttcattcctctgatacataaagatttataatcacctttgagtttgaagataacttggatt

SEQ ID NO: 208591 - DNA, 120 bp, Artificial Sequence
  ENSG00000115364_66 (sequence is synthesized)
tggagatcagaggcaaccccagcgttggtcccccgtgggacgccgggttgggggagattgcggggctctgcgggatctcagggttggcacgagagttctgacctccgtcgtccgctcccg

SEQ ID NO: 208592 - DNA, 120 bp, Artificial Sequence
  ENSG00000115364_67 (sequence is synthesized)
cttgattctgagaatgaatttggtaccttcgagattcaatctcttctaaaatccactgagttttttcatctactgagaagtttccacttgtggatgtctcatctttgcctgttaataaat

SEQ ID NO: 208593 - DNA, 120 bp, Artificial Sequence
  ENSG00000115364_68 (sequence is synthesized)
aaaattgacttcatactacaaattctcaaaagaaaaaagtaaaatgctttgaaaataaaggtaatatcatggatgtataaacatatgcatatgtaaatacataaatatgcttaaattttg

SEQ ID NO: 208594 - DNA, 120 bp, Artificial Sequence
  ENSG00000115364_69 (sequence is synthesized)
acgcaggtgaggcactgccctggcgctaggccggcaactggggtcggtgcgcgcgtgagcgcgttcgcgttcgaggtcccggctctaaggtgggggctgcacctccccctgcacgagcag

SEQ ID NO: 208595 - DNA, 120 bp, Artificial Sequence
  ENSG00000115364_70 (sequence is synthesized)
gtgtgtaggattcaagagccagcgcaccacactgttctttctttctcacttctccccaagccagcattgaacttctttgcagttttattgagtcagaacttcaagtaggggttccccata

SEQ ID NO: 208596 - DNA, 120 bp, Artificial Sequence
  ENSG00000115364_71 (sequence is synthesized)
ttttaaactcttttctctgtggtatttgtcctgtaccagagtttttctctgaggtatatcctgtttatacctgtttacgtccaagagctcttcttttctctcaaaagacccttaaccctg

SEQ ID NO: 208597 - DNA, 120 bp, Artificial Sequence
  ENSG00000115364_72 (sequence is synthesized)
gataggaatcgattggccaacttaaaaaatttgctatggtttaggttggaagttttggcagacaaagcacagtaaaactggccactaaattgtgtctgaaacttactcatcaaaatagtg

SEQ ID NO: 208598 - DNA, 120 bp, Artificial Sequence
  ENSG00000115365_0 (sequence is synthesized)
gagaagggcttcaggacgcgggaggcgcacttgcttcaagtcgcgggcgtgggaacggggcttgcttccggcgtcatggctcaaagggccttcccgaatccttatgctgattataacaaa

SEQ ID NO: 208599 - DNA, 120 bp, Artificial Sequence
  ENSG00000115365_1 (sequence is synthesized)
tccctggccgaaggctactttgatgctgccgggaggctgactcctgagttctcacaacgcttgaccaataagattcgggagcttcttcagcaaatggagagaggcctgaaatcagcagac

SEQ ID NO: 208600 - DNA, 120 bp, Artificial Sequence
  ENSG00000115365_2 (sequence is synthesized)
cctcgggatggcaccggttacactggctgggcaggtattgctgtgctttacttacatctttatgatgtatttggggaccctgcctacctacagttagcacatggctatgtaaagcaaagt

SEQ ID NO: 208601 - DNA, 120 bp, Artificial Sequence
  ENSG00000115365_3 (sequence is synthesized)
ctgaactgcttaaccaagcgctccatcaccttcctttgtggggatgcaggccccctggcagtggccgctgtgctatatcacaagatgaacaatgagaagcaggcagaagattgcatcaca

SEQ ID NO: 208602 - DNA, 120 bp, Artificial Sequence
  ENSG00000115365_4 (sequence is synthesized)
cggctaattcacctaaataagattgatcctcatgctccaaatgaaatgctctatgggcgaataggctacatctatgctcttctttttgtcaataagaactttggagtggaaaagattcct

SEQ ID NO: 208603 - DNA, 120 bp, Artificial Sequence
  ENSG00000115365_5 (sequence is synthesized)
caaagccatattcagcagatttgtgaaacaattttaacctctggagaaaacctagctaggaagagaaacttcacggcaaagtctccactgatgtatgaatggtaccaggaatattatgta

SEQ ID NO: 208604 - DNA, 120 bp, Artificial Sequence
  ENSG00000115365_6 (sequence is synthesized)
aagcccagtgtagactacgtctgccagctgaaattcccttctggcaattaccctccatgtataggtgataatcgagatctgcttgtccattggtgccatggcgcccctggggtaatctac

SEQ ID NO: 208605 - DNA, 120 bp, Artificial Sequence
  ENSG00000115365_7 (sequence is synthesized)
atgctcatccaggcctataaggtattcagagaggaaaagtatctctgtgatgcctatcagtgtgctgatgtgatctggcaatatgggttgctgaagaagggatatgggctgtgccacggt

SEQ ID NO: 208606 - DNA, 120 bp, Artificial Sequence
  ENSG00000115365_8 (sequence is synthesized)
tctgcagggaatgcctatgccttcctgacactctacaacctcacacaggacatgaagtacctgtatagggcctgtaagtttgctgaatggtgcttagagtatggagaacatggatgcaga

SEQ ID NO: 208607 - DNA, 120 bp, Artificial Sequence
  ENSG00000115365_9 (sequence is synthesized)
acaccagacacccctttctctctctttgaaggaatggctggaacaatatatttcctggctgacctgctagtccccacaaaagccaggttccctgcatttgaactctgaaaggatagcatg

SEQ ID NO: 208608 - DNA, 120 bp, Artificial Sequence
  ENSG00000115365_10 (sequence is synthesized)
ccacctgcaactcactgcatgaccctttctgtatattcaaacccaagctaagtgcttccgttgctttccaaggaaacaaagagtcaaactgtggacttgattttgttagcttttttcaga

SEQ ID NO: 208609 - DNA, 120 bp, Artificial Sequence
  ENSG00000115365_11 (sequence is synthesized)
atttatctttcattcagttcccttccattatcatttacttttacttagaagtatccaaggaagtcttttaactttaatttccatttcttcctaaagggagagtgagtgatatgtacagtg

SEQ ID NO: 208610 - DNA, 120 bp, Artificial Sequence
  ENSG00000115365_12 (sequence is synthesized)
ttttgagattgtatacatatattccagaacttggaggaaatcttatttaagtttatgaatataaccatctgttactgttctaaaaatgtttaaaagaaactcaatacagataaagataaa

SEQ ID NO: 208611 - DNA, 120 bp, Artificial Sequence
  ENSG00000115365_13 (sequence is synthesized)
tttttcctccaactggagggcagacaattttctgacttgcttttctctaggtggttcattttgaaaggggacagaaatataactaaatgcttccaggagaaaaattccaagagttacaat

SEQ ID NO: 208612 - DNA, 120 bp, Artificial Sequence
  ENSG00000115365_14 (sequence is synthesized)
ctggacttggtacctaaatatcattttttaaattcttgatgcctatttggactagaggtaaacatactttcagattggcctgtttttgtcggtaaggcatacagccttcagaagccaaca

SEQ ID NO: 208613 - DNA, 120 bp, Artificial Sequence
  ENSG00000115365_15 (sequence is synthesized)
tttttaatcaaaaacttataaaacatgatgatcattgtgaaaattctgagttgaaggttagtttaagataagctaacaataacagtctgtgttttctctaaaataatctgagttttttgg

SEQ ID NO: 208614 - DNA, 120 bp, Artificial Sequence
  ENSG00000115365_16 (sequence is synthesized)
aactctttatttaaatatgtgtgtttttcagtattcaaataagatcaggaagccaattttctatgtatgaatatgctttaacctaggatttcagtccactctgactgactttctaaactt

SEQ ID NO: 208615 - DNA, 120 bp, Artificial Sequence
  ENSG00000115365_17 (sequence is synthesized)
tttccttcctatcaatttatctgaactttggtcttttcactaaattgtacagtattctacttctgtttaaaaaggggagatgagaaagggaatactatctaaccaataacttgaacaaaa

SEQ ID NO: 208616 - DNA, 120 bp, Artificial Sequence
  ENSG00000115365_18 (sequence is synthesized)
acactaaactaagcatttaatagaaatgctttttattgaggaggtattatccagagttcatgcttagaacaaatgcatctttgcgtatcctagacttaacaattcatcagtttctgagac

SEQ ID NO: 208617 - DNA, 120 bp, Artificial Sequence
  ENSG00000115365_19 (sequence is synthesized)
cacagaatcaggttttccgtagtagataaagactctctggtgcttcaaattctgttcaagtgttttgactcatcagcttctactctttctattactgcctttgcctggcttgttttgtct

SEQ ID NO: 208618 - DNA, 120 bp, Artificial Sequence
  ENSG00000115365_20 (sequence is synthesized)
ctttgcaactgattttgcaaaaaaaaattgtagctttaaaataacagggtctaagtattttaaatgtgcctatttcacagctctcttggtcacaaaaacatgctatttttattggaactt

SEQ ID NO: 208619 - DNA, 120 bp, Artificial Sequence
  ENSG00000115365_21 (sequence is synthesized)
caaaccaaatccccactgagtgtgtactggttcctgcaggtagcagtctcctattatctcctgtttagcaccaaaagagctaatattattggaaactgaccttttaaaggccactggcag

SEQ ID NO: 208620 - DNA, 120 bp, Artificial Sequence
  ENSG00000115365_22 (sequence is synthesized)
taggatttaaaaagcagcccactgctcagtttccaggatcagcttcctccttctgtcacttgtgtaagttggcactaccttgtgcctctcagattgctgaagtgctgctggtaagcatgt

SEQ ID NO: 208621 - DNA, 120 bp, Artificial Sequence
  ENSG00000115365_23 (sequence is synthesized)
gcatgctctgcctttcttgtgaaagttttcaatcagcgatatcagcacttacagtaagaagtaaaagtagtgcacagcaaagctaatttgcctttgcctggggtgttcagcttgaaagaa

SEQ ID NO: 208622 - DNA, 120 bp, Artificial Sequence
  ENSG00000115365_24 (sequence is synthesized)
taaagctcatttggtttagttaaatgtcttactctactgtgcctatgcttttagctgcgttactaagcaagggaaaaataacagtttctctgagccagagaagacttgatcacagttctc

SEQ ID NO: 208623 - DNA, 120 bp, Artificial Sequence
  ENSG00000115365_25 (sequence is synthesized)
cttgatcacagttctccaagcatcgtgatagcaatgcttaaccccaggaagatttcaaggcagggagaagaacatttcaaataagattcttgttaacccatttatgcctagtgttccatt

SEQ ID NO: 208624 - DNA, 120 bp, Artificial Sequence
  ENSG00000115365_26 (sequence is synthesized)
tgtgggagtcatttacatcctactgctcaaagtcattgccaaggtctgatttttcacacaaaaaattgcaacccccagcataaatgggttagctactgtcatcagttagcaaattcatcc

SEQ ID NO: 208625 - DNA, 120 bp, Artificial Sequence
  ENSG00000115365_27 (sequence is synthesized)
acacaaacacaattagagtttggtttttttttaagcttttcaaaacttactaaactggcacaattttatatgtatgctatttgttgtatttatgcttaagagcaaaaaagttttgatggg

SEQ ID NO: 208626 - DNA, 120 bp, Artificial Sequence
  ENSG00000115365_28 (sequence is synthesized)
attttaaattcaggcaaagcctacaacgctgagacaatcccctaacaacatggtagtaactaaagaaacttttatactaggcttcttagttttaaaaggaagtggcatcattgtttcagt

SEQ ID NO: 208627 - DNA, 120 bp, Artificial Sequence
  ENSG00000115365_29 (sequence is synthesized)
tctagtttgtatttttctctcagatatttttcttctttaaaaatctttcccagaagttggttcctagaaaactcaataccatcatctcttatctctatacagggactaggtaataaaacc

SEQ ID NO: 208628 - DNA, 120 bp, Artificial Sequence
  ENSG00000115365_30 (sequence is synthesized)
ttcaaaggttgtcaaaggtcatcaagcagtgttcatttatcctgtcacatgtttctgtttctatagtaatttagaaattgcaaatagttaacttttcatcatgtaaaaagttaacattat

SEQ ID NO: 208629 - DNA, 120 bp, Artificial Sequence
  ENSG00000115365_31 (sequence is synthesized)
cctatttccatagataccatggacggcggtgtggcctgagttgtcagtctttaatcctgagtcatgtggctctcttttcatctttgatgtcagttccaattatttggcatcaaaaacctt

SEQ ID NO: 208630 - DNA, 120 bp, Artificial Sequence
  ENSG00000115365_32 (sequence is synthesized)
catggtaggtagagttttaggtaaaagtggatctagggttactttctttattaacatttcctaaataactgaattgagagacatactctgctactatgtcctcaggttaatttttgtctg

SEQ ID NO: 208631 - DNA, 120 bp, Artificial Sequence
  ENSG00000115365_33 (sequence is synthesized)
atcttacgatgccctgccttttactagctactttagaaatagaaaatgtgaagagtgactatttacatgtatactcctttggctgctagaactcatctgtagtcctttattatttacact

SEQ ID NO: 208632 - DNA, 120 bp, Artificial Sequence
  ENSG00000115365_34 (sequence is synthesized)
gaattccaatttcatttctgcttccgctaagtaagagcacctcattcctgtgttttctctactattgagctgtagacgaactgtttctctaattataaagcaaactgtttgggatattca

SEQ ID NO: 208633 - DNA, 120 bp, Artificial Sequence
  ENSG00000115365_35 (sequence is synthesized)
gggaaactaccccaatgttatgttgtcatttaatgggaaaggctgggatcatatgtatttctatgttctgtaaagtatttgacttactagttctcaataaaattttattaggactatata

SEQ ID NO: 208634 - DNA, 120 bp, Artificial Sequence
  ENSG00000115365_36 (sequence is synthesized)
actgtccggggctgcggggtgagaggccagggccgagaagggcttcaggacgcgggaggcgcacttgcttcaagtcgcgggcgtgggaacggggttgcaaaacggggcctctttgtccgg

SEQ ID NO: 208635 - DNA, 120 bp, Artificial Sequence
  ENSG00000115365_37 (sequence is synthesized)
gtgggttaagggccctggcagctttttcgcgaaggcgccatgtcctagcagttgggccgcagtgggcccgaggtccactcggaccgccgagacggctcgatggccctggagctggaggaa

SEQ ID NO: 208636 - DNA, 120 bp, Artificial Sequence
  ENSG00000115365_38 (sequence is synthesized)
gggggatacctgggcgccgccgccgccctcgcaactcggccgaggcccctatctcaacctagtttctgtttttcccctgttctgcaggcttgcttccggcgtcatggctcaaagggcctt

SEQ ID NO: 208637 - DNA, 120 bp, Artificial Sequence
  ENSG00000115365_39 (sequence is synthesized)
agagtttgggatggcagcctcagaaggacaaacttaggccaaggagggagggagttggggtggagactgagcttctccagttggaggtctggagctaggactcttcattgaaaccggaga

SEQ ID NO: 208638 - DNA, 120 bp, Artificial Sequence
  ENSG00000115365_40 (sequence is synthesized)
gaaggaaaaggagagagtgaggctgactttttaactgaactccaaaattctctgagcaatagaatgggcctaatatgtaccaggcttgcttccggcgtcatggctcaaagggccttcccg

SEQ ID NO: 208639 - DNA, 120 bp, Artificial Sequence
  ENSG00000115365_41 (sequence is synthesized)
atgaggattgatctcaggaataaaatatgtccagaagcatgttttaaaaagttaacccgtaacaggaatccatacaggaatccatacaggggagattgatttggattttgattcacaaca

SEQ ID NO: 208640 - DNA, 120 bp, Artificial Sequence
  ENSG00000115365_42 (sequence is synthesized)
ccttaaagttttgtgttttttttttttcattcagtaagtctttgcgtaaagcctgccacagaaagtattgctgtgctttacttacatctttatgatgtatttggggaccctgcctaccta

SEQ ID NO: 208641 - DNA, 120 bp, Artificial Sequence
  ENSG00000115368_0 (sequence is synthesized)
attccgctactgcgcaaagatggtggaggaggagaacatccgcgtggttcgttgtggcggcagcgagttgaactttaggagagctgtgttctctgcagattctaagtatatcttctgtgt

SEQ ID NO: 208642 - DNA, 120 bp, Artificial Sequence
  ENSG00000115368_1 (sequence is synthesized)
ctctggagactttgttaaagtttacagcacagttacagaagagtgtgtacacatactgcatggacacagaaatctggtgactggaatccagcttaaccccaacaaccatctacagctgta

SEQ ID NO: 208643 - DNA, 120 bp, Artificial Sequence
  ENSG00000115368_2 (sequence is synthesized)
ttcttgttcccttgatggcacaattaaactgtgggactatatagatggcatcttaataaagactttcatagttggatgtaaacttcatgccctctttactcttgcccaagctgaggattc

SEQ ID NO: 208644 - DNA, 120 bp, Artificial Sequence
  ENSG00000115368_3 (sequence is synthesized)
tgtctttgttatagtgaataaagaaaaaccagatatatttcagctggtttcagtgaaactgccaaaatcctcaagccaggaagtagaagccaaggagctgtcctttgttttggattacat

SEQ ID NO: 208645 - DNA, 120 bp, Artificial Sequence
  ENSG00000115368_4 (sequence is synthesized)
aaaccagtcacccaagtgcattgcctttggaaacgagggagtatatgttgctgcagtacgggaattttacttgtctgtttattttttcaaaaagaaaacaacatcaaggtttactttatc

SEQ ID NO: 208646 - DNA, 120 bp, Artificial Sequence
  ENSG00000115368_5 (sequence is synthesized)
atcatcaagaaataagaagcatgctaaaaacaattttacatgtgtagcatgtcacccaacggaagactgcatcgcatctggtcacatggatggcaaaattcgtctttggaggaattttta

SEQ ID NO: 208647 - DNA, 120 bp, Artificial Sequence
  ENSG00000115368_6 (sequence is synthesized)
tgatgataagaaatatacgtacacatgtttacattggcaccatgatatggttatggatttggctttttcagtgacaggcaccagtctgctgagtggcggtcgtgaatctgtacttgtaga

SEQ ID NO: 208648 - DNA, 120 bp, Artificial Sequence
  ENSG00000115368_7 (sequence is synthesized)
gtggcgcgatgcaacagagaagaataaggagtttctcccgcgtttaggagctactattgaacatatctcagtctcgcctgcaggagatttattctgcacttctcactctgataataagat

SEQ ID NO: 208649 - DNA, 120 bp, Artificial Sequence
  ENSG00000115368_8 (sequence is synthesized)
aataattattcaccgaaaccttgaagcatccgcagtaattcaaggcctagtgaaagataggagtatcttcactggtttgatgattgatccaagaactaaagctttggttttgaatggaaa

SEQ ID NO: 208650 - DNA, 120 bp, Artificial Sequence
  ENSG00000115368_9 (sequence is synthesized)
acctggccacctgcagttttattctctccagagtgataaacagttatacaatttagatattatacagcaagaatatattaatgattatggtctgatccaaattgaactaacaaaggctgc

SEQ ID NO: 208651 - DNA, 120 bp, Artificial Sequence
  ENSG00000115368_10 (sequence is synthesized)
atttggctgctttggtaactggcttgcaacagtggaacagcggcaagaaaaggaaactgagcttgaattgcaaatgaaactgtggatgtataataagaaaacacaagggtttattcttaa

SEQ ID NO: 208652 - DNA, 120 bp, Artificial Sequence
  ENSG00000115368_11 (sequence is synthesized)
attaacatgccacacgaagactgcattacagctctctgtttctgtaatgcagaaaaatctgaacagcccaccttggttacagctagcaaagatggttacttcaaagtatggatattaaca

SEQ ID NO: 208653 - DNA, 120 bp, Artificial Sequence
  ENSG00000115368_12 (sequence is synthesized)
gatgactctgacatatacaaaaaagctgttggctggacctgtgactttgttggtagttatcacaagtatcaagcaactaactgttgtttctccgaagatggttctttactagcagttagt

SEQ ID NO: 208654 - DNA, 120 bp, Artificial Sequence
  ENSG00000115368_13 (sequence is synthesized)
tttgaggaaatagtcacaatatgggattctgtaacatgggaacttaaatgtacattttgccaacgagctgggaaaataaggcacctttgctttgggagattgacgtgttcaaagtatcta

SEQ ID NO: 208655 - DNA, 120 bp, Artificial Sequence
  ENSG00000115368_14 (sequence is synthesized)
cttggtgctactgaaaatggcattctttgctgttggaatctgctgagctgtgcattggagtggaatgcaaaattaaatgttagagttatggaacccgatcctaattcagagaatattgct

SEQ ID NO: 208656 - DNA, 120 bp, Artificial Sequence
  ENSG00000115368_15 (sequence is synthesized)
gcaatctctcagtcttcagtgggttcagacttgtttgtatttaaacctagtgagccaaggccattgtatattcaaaagggtatctccagagagaaagtccagtggggagtgtttgttcca

SEQ ID NO: 208657 - DNA, 120 bp, Artificial Sequence
  ENSG00000115368_16 (sequence is synthesized)
cgagatgtccctgaatccttcacctcagaagcttaccagtggctaaatagatcccagttttacttcctaacaaaatcacagagtttattgacattcagtacaaagtctccagaagaaaaa

SEQ ID NO: 208658 - DNA, 120 bp, Artificial Sequence
  ENSG00000115368_17 (sequence is synthesized)
ctcacaccaacaagcaaacagctgctagcagaagaaagtcttcccacaaccccattttatttcatattgggaaaacacaggcaacagcaggatgaaaaactaaacgaaactttagagaat

SEQ ID NO: 208659 - DNA, 120 bp, Artificial Sequence
  ENSG00000115368_18 (sequence is synthesized)
gagctggtacaactacccttaacagaaaacatacccgcaattagtgagcttcttcacactccagcccatgtcctgccatctgctgctttcctgtgctccatgtttgtaaattcattgctg

SEQ ID NO: 208660 - DNA, 120 bp, Artificial Sequence
  ENSG00000115368_19 (sequence is synthesized)
ctgtctaaagagactaagagtgctaaggaaattcctgaagatgtagatatggaagaagaaaaagaaagtgaagattcagatgaagaaaatgattttaccgaaaaagtccaggatacaagt

SEQ ID NO: 208661 - DNA, 120 bp, Artificial Sequence
  ENSG00000115368_20 (sequence is synthesized)
aacacaggtttaggagaagacattatacatcagttgtcaaaatctgaagaaaaagaactgagaaaatttaggaaaatagactacagctggatagctgccctttaagccttggagatgggg

SEQ ID NO: 208662 - DNA, 120 bp, Artificial Sequence
  ENSG00000115368_21 (sequence is synthesized)
aggatccttggactttgtgtttttgattgtatgttgatattctaaaaacatctattttaatgttatttctgttctaaaaataagataataaatattaacaaactttgcttttttaaaaaa

SEQ ID NO: 208663 - DNA, 120 bp, Artificial Sequence
  ENSG00000115368_22 (sequence is synthesized)
gtatcttcactggtttgatgattgatccaagaactaaagctttggttttgaatggaaaacctggccacctgcagttttattctctccagagtgataaacagttatacaatgtaagatttt

SEQ ID NO: 208664 - DNA, 120 bp, Artificial Sequence
  ENSG00000115368_23 (sequence is synthesized)
gatcattagccttgaaattaatgaaagctctttacagtaccactggagtcaagcaatttgtttagtagcttttaaaacaagatcctgtgcatatgtttacttgaacatagtattatccgt

SEQ ID NO: 208665 - DNA, 120 bp, Artificial Sequence
  ENSG00000115368_24 (sequence is synthesized)
ggttacttagttcagttgttcagagcataattccattgaggccacagttgcaggttacatgtaagccagttggcactcctgtacgtgctgtctctgtcttttgtttcagaatgccctcct

SEQ ID NO: 208666 - DNA, 120 bp, Artificial Sequence
  ENSG00000115368_25 (sequence is synthesized)
ctcttctgagcattttatgttacagtgattttatattcccttgaattactatatttgtattagtaactaagaagcctcttcattgctttagcatgtatttatggtatagatttttttagg

SEQ ID NO: 208667 - DNA, 120 bp, Artificial Sequence
  ENSG00000115368_26 (sequence is synthesized)
ggaagttattgattaaggatggatttgcattgccattcacttttattccaaaggaaataaagtagcaccgatcttttctttccaaaattaaatgagctacttctaaaaatcaaagttaag

SEQ ID NO: 208668 - DNA, 120 bp, Artificial Sequence
  ENSG00000115368_27 (sequence is synthesized)
taacttttctacgggatccaagtacatattttatgcttgccgtcctctgagggtttgacaaaagtttatcgctgtgtgtagtgtttgaatgtttttaatagcaaaactattattttgtta

SEQ ID NO: 208669 - DNA, 120 bp, Artificial Sequence
  ENSG00000115368_28 (sequence is synthesized)
aaattgaaatttgtgaagtccatatactaagttttatagccaaaaaaacgtatacacaattcataaaagctttgtttcggatgactgaaagtgagtaaaattagagaagggcagttttat

SEQ ID NO: 208670 - DNA, 120 bp, Artificial Sequence
  ENSG00000115368_29 (sequence is synthesized)
cagatttggttgaggtgcaggggcagcagttctggacttaggagtcacagtgtttgtgtattaaccattgttttgacagtaattatatgtttgacttgttacattttactagtccatatt

SEQ ID NO: 208671 - DNA, 120 bp, Artificial Sequence
  ENSG00000115368_30 (sequence is synthesized)
tatgattctcatatgcagtaattgtgatataaatttcctagtttgtataattttttgacttggatagataatatggttttactccaacatttttacattcctcttctctgagtccatgtc

SEQ ID NO: 208672 - DNA, 120 bp, Artificial Sequence
  ENSG00000115368_31 (sequence is synthesized)
tctatttgcagaaatcctaaaattgccactttctttaaaaatattaaaattctttgtaaacattataagcaaagtattttcctataacaacgacaacaaaatctagcagaaacttagtat

SEQ ID NO: 208673 - DNA, 120 bp, Artificial Sequence
  ENSG00000115368_32 (sequence is synthesized)
taataaaactaagtacactgggacaaaagtaagcctatgtgttagtaaggtcttctggtgctaccaaagtatggtccacagaccagtgtcctaaaccattagttaccattctgtataaga

SEQ ID NO: 208674 - DNA, 120 bp, Artificial Sequence
  ENSG00000115368_33 (sequence is synthesized)
gtacagaatgtgagtgtcacaaaacactttgacattgcctcagcatccaagcatattataatttctattgtattttatgaaagtattggtccttgatggattggaagaaatttttttaag

SEQ ID NO: 208675 - DNA, 120 bp, Artificial Sequence
  ENSG00000115368_34 (sequence is synthesized)
cagaatattcttcagtcacttgagaagcactcccttaatgctcatataaggtaaaaggagtttggctaataaaactgagtaagctgagttctggcaggaagagcaacaagctcttgtgtg

SEQ ID NO: 208676 - DNA, 86 bp, Artificial Sequence
  ENSG00000115368_35 (sequence is synthesized)
aagctgagttctggcaggaagagcaacaagctcttgtgtgggtgtttttgttttgttttgtttggttttggtttttttttctggcg

SEQ ID NO: 208677 - DNA, 120 bp, Artificial Sequence
  ENSG00000115368_36 (sequence is synthesized)
aagtgctgagattacaggtggcagccactgcaccttggtgcttttcatatctcattcaaaaccttaccatctccctcttcaagacagaaagttggcttttttcctctctcttttagttaa

SEQ ID NO: 208678 - DNA, 120 bp, Artificial Sequence
  ENSG00000115368_37 (sequence is synthesized)
aacttgaaatggatggatctgcttcttgcagaaagctgtgaaaagattgttttgcagaagcaatataaataaatgactctacctctttaaggttaacagtgaattaatgaatagaaaatg

SEQ ID NO: 208679 - DNA, 120 bp, Artificial Sequence
  ENSG00000115368_38 (sequence is synthesized)
agtggctctttacattttacagttcctcaaaatttaacattttggttttaatctgaagccaacagtttttagaatgggcatttaaattgcttttgtcattattgtgctcatttggagatg

SEQ ID NO: 208680 - DNA, 120 bp, Artificial Sequence
  ENSG00000115380_0 (sequence is synthesized)
agacccacggggctgccctcccctgcgcactcccctcgctgcccgggcccggagcgcagcgcggccgcacaggtatttttgctgtgctgtgcaaggaactctgctagctcaagattcaca

SEQ ID NO: 208681 - DNA, 120 bp, Artificial Sequence
  ENSG00000115380_1 (sequence is synthesized)
atgttgaaagcccttttcctaactatgctgactctggcgctggtcaagtcacaggacaccgaagaaaccatcacgtacacgcaatgcactgacggatatgagtgggatcctgtgagacag

SEQ ID NO: 208682 - DNA, 120 bp, Artificial Sequence
  ENSG00000115380_2 (sequence is synthesized)
caatgcaaagatattgatgaatgtgacattgtcccagacgcttgtaaaggtggaatgaagtgtgtcaaccactatggaggatacctctgccttccgaaaacagcccagattattgtcaat

SEQ ID NO: 208683 - DNA, 120 bp, Artificial Sequence
  ENSG00000115380_3 (sequence is synthesized)
aatgaacagcctcagcaggaaacacaaccagcagaaggaacctcaggggcaaccaccggggttgtagctgccagcagcatggcaaccagtggagtgttgcccgggggtggttttgtggcc

SEQ ID NO: 208684 - DNA, 120 bp, Artificial Sequence
  ENSG00000115380_4 (sequence is synthesized)
agtgctgctgcagtcgcaggccctgaaatgcagactggccgaaataactttgtcatccggcggaacccagctgaccctcagcgcattccctccaacccttcccaccgtatccagtgtgca

SEQ ID NO: 208685 - DNA, 120 bp, Artificial Sequence
  ENSG00000115380_5 (sequence is synthesized)
gcaggctacgagcaaagtgaacacaacgtgtgccaagacatagacgagtgcactgcagggacgcacaactgtagagcagaccaagtgtgcatcaatttacggggatcctttgcatgtcag

SEQ ID NO: 208686 - DNA, 120 bp, Artificial Sequence
  ENSG00000115380_6 (sequence is synthesized)
tgccctcctggatatcagaagcgaggggagcagtgcgtagacatagatgaatgtaccatccctccatattgccaccaaagatgcgtgaatacaccaggctcattttattgccagtgcagt

SEQ ID NO: 208687 - DNA, 120 bp, Artificial Sequence
  ENSG00000115380_7 (sequence is synthesized)
cctgggtttcaattggcagcaaacaactatacctgcgtagatataaatgaatgtgatgccagcaatcaatgtgctcagcagtgctacaacattcttggttcattcatctgtcagtgcaat

SEQ ID NO: 208688 - DNA, 120 bp, Artificial Sequence
  ENSG00000115380_8 (sequence is synthesized)
caaggatatgagctaagcagtgacaggctcaactgtgaagacattgatgaatgcagaacctcaagctacctgtgtcaatatcaatgtgtcaatgaacctgggaaattctcatgtatgtgc

SEQ ID NO: 208689 - DNA, 120 bp, Artificial Sequence
  ENSG00000115380_9 (sequence is synthesized)
ccccagggataccaagtggtgagaagtagaacatgtcaagatataaatgagtgtgagaccacaaatgaatgccgggaggatgaaatgtgttggaattatcatggcggcttccgttgttat

SEQ ID NO: 208690 - DNA, 120 bp, Artificial Sequence
  ENSG00000115380_10 (sequence is synthesized)
ccacgaaatccttgtcaagatccctacattctaacaccagagaaccgatgtgtttgcccagtctcaaatgccatgtgccgagaactgccccagtcaatagtctacaaatacatgagcatc

SEQ ID NO: 208691 - DNA, 120 bp, Artificial Sequence
  ENSG00000115380_11 (sequence is synthesized)
caatacttttcggattaaatctggaaatgaaaatggagagttctacctacgacaaacaagtcctgtaagtgcaatgcttgtgctcgtgaagtcattatcaggaccaagagaacatatcgt

SEQ ID NO: 208692 - DNA, 120 bp, Artificial Sequence
  ENSG00000115380_12 (sequence is synthesized)
ggacctggagatgctgacagtcagcagtatagggaccttccgcacaagctctgtgttaagattgacaataatagtggggccattttcattttagtcttttctaagagtcaaccacaggca

SEQ ID NO: 208693 - DNA, 120 bp, Artificial Sequence
  ENSG00000115380_13 (sequence is synthesized)
tttaagtcagccaaagaatattgttaccttaaagcactattttatttatagatatatctagtgcatctacatctctatactgtacactcacccataattcaaacaattacaccatggtat

SEQ ID NO: 208694 - DNA, 120 bp, Artificial Sequence
  ENSG00000115380_14 (sequence is synthesized)
aaagtgggcatttaatatgtaaagattcaaagtttgtctttattactatatgtaaattagacattaatccactaaactggtcttcttcaagagagctaagtatacactatctggtgaaac

SEQ ID NO: 208695 - DNA, 120 bp, Artificial Sequence
  ENSG00000115380_15 (sequence is synthesized)
ttggattctttcctataaaagtgggaccaagcaatgatgatcttctgtggtgcttaaggaaacttactagagctccactaacagtctcataaggaggcagccatcataaccattgaatag

SEQ ID NO: 208696 - DNA, 120 bp, Artificial Sequence
  ENSG00000115380_16 (sequence is synthesized)
catgcaagggtaagaatgagtttttaactgctttgtaagaaaatggaaaaggtcaataaagatatatttctttagaaaatggggatctgccatatttgtgttggtttttattttcatatc

SEQ ID NO: 208697 - DNA, 120 bp, Artificial Sequence
  ENSG00000115380_17 (sequence is synthesized)
cagcctaaaggtggttgtttattatatagtaataaatcattgctgtacaatatgctggtttctgtagggtatttttaattttgtcagaaattttagattgtgaatattttgtaaaaaaca

SEQ ID NO: 208698 - DNA, 120 bp, Artificial Sequence
  ENSG00000115380_18 (sequence is synthesized)
gtaagcaaaattttccagaattcccaaaatgaaccagatatcccctagaaaattatactattgagaaatctatggggaggatatgagaaaataaattccttctaaaccacattggaactg

SEQ ID NO: 208699 - DNA, 120 bp, Artificial Sequence
  ENSG00000115380_19 (sequence is synthesized)
acctgaagaagcaaactcggaaaatataataacatccctgaattcaggacttccacaagatgcagaacaaaatggataaaaggtatttcactggagaagttttaatttctaagtaaaatt

SEQ ID NO: 208700 - DNA, 120 bp, Artificial Sequence
  ENSG00000115380_20 (sequence is synthesized)
taaatcctaacacttcactaatttataactaaaatttctcatcttcgtacttgatgctcacagaggaagaaaatgatgatggtttttattcctggcatccagagtgacagtgaacttaag

SEQ ID NO: 208701 - DNA, 120 bp, Artificial Sequence
  ENSG00000115380_21 (sequence is synthesized)
caaattaccctcctacccaattctatggaatattttatacgtctccttgtttaaaatgtcactgctttactttgatgtatcatatttttaaataaaaataaatattcctttagaagatca

SEQ ID NO: 208702 - DNA, 120 bp, Artificial Sequence
  ENSG00000115380_22 (sequence is synthesized)
agatgctgtgttcccctcctcagagaagaagaaaacgcactagagagtgggagcatccccaaggctgaagcgcatccaggacatcacatgtcaacgtgtcctctctggcgtggggtcccc

SEQ ID NO: 208703 - DNA, 120 bp, Artificial Sequence
  ENSG00000115380_23 (sequence is synthesized)
gcgagtctgggaaacgaggagctggcaagggagggcaagcgggggcggcaaagagggcccctggagcagggggcgcggacctcgctgcgctgcgcgctctaccgccgggctcgcaacgct

SEQ ID NO: 208704 - DNA, 120 bp, Artificial Sequence
  ENSG00000115380_24 (sequence is synthesized)
gggctcagcgctcgcgcctccctcagctctctcctccgccccccttcgccctccccctttccctccctttctcctcctcctcctgccgccgcggccgctgccggacttcgccagatcaga

SEQ ID NO: 208705 - DNA, 120 bp, Artificial Sequence
  ENSG00000115380_25 (sequence is synthesized)
gacccacggggctgccctcccctgcgcactcccctcgctgcccgggcccggagcgcagcgcggccgcacagcctgctttgtaggtgcagtataaaatgcacgctgaatgtcttttgtatg

SEQ ID NO: 208706 - DNA, 120 bp, Artificial Sequence
  ENSG00000115380_26 (sequence is synthesized)
agacccacggggctgccctcccctgcgcactcccctcgctgcccgggcccggagcgcagcgcggccgcacaggtatttttgctgtgctgtgcaaggaactctgctagctcaaggtgagta

SEQ ID NO: 208707 - DNA, 120 bp, Artificial Sequence
  ENSG00000115380_27 (sequence is synthesized)
tactgggaaagccttaacgttctagagaacagagttttgcagccccacctccatcccccggggtgtgggactggggggcaggaaatgcaccgtcccctttgaaatggattactgtttttt

SEQ ID NO: 208708 - DNA, 120 bp, Artificial Sequence
  ENSG00000115380_28 (sequence is synthesized)
ttacgtctttgctgcctcgttcgttggctaccgagaaggttcaggagggggaggggagatgagaaagcagattggaagttgagtatggtggagcctcagcctctcccaccctcctttcct

SEQ ID NO: 208709 - DNA, 120 bp, Artificial Sequence
  ENSG00000115380_29 (sequence is synthesized)
acttcgccagatcagacccacggggctgccctcccctgcgcactcccctcgctgcccgggcccggagcgcagcgcggccgcacaggtatttttgctgtgctgtgcaaggaactctgctag

SEQ ID NO: 208710 - DNA, 120 bp, Artificial Sequence
  ENSG00000115380_30 (sequence is synthesized)
ctttcaaaagttcattgggctcaccacctaagataggaaccaacatgtaatcatttgtgcagggctaaaaatgggatccgttcaaaaactaaaaccaaagaaagttacatgtttccaaaa

SEQ ID NO: 208711 - DNA, 120 bp, Artificial Sequence
  ENSG00000115380_31 (sequence is synthesized)
cattcaacaaattaatgggtgtaaggaactggaaaacctggactcctaccacatgcagataaaaccaatacgtgcagaataagactcaagtcaagtaagaacgttaaacaccataaagac

SEQ ID NO: 208712 - DNA, 120 bp, Artificial Sequence
  ENSG00000115380_32 (sequence is synthesized)
agacccacggggctgccctcccctgcgcactcccctcgctgcccgggcccggagcgcagcgcggccgcacaggtatttttgctgtgctgtgcaaggaactctgctagctcaagcctgctt

SEQ ID NO: 208713 - DNA, 120 bp, Artificial Sequence
  ENSG00000115386_0 (sequence is synthesized)
agaagccaactcagactcagccaacagagattgttgatttgcctcttaagcaagagattcattgcagctcagcatggctcagaccagctcatacttcatgctgatctcctgcctgatgtt

SEQ ID NO: 208714 - DNA, 120 bp, Artificial Sequence
  ENSG00000115386_1 (sequence is synthesized)
tctgtctcagagccaaggccaagaggcccagacagagttgccccaggcccggatcagctgcccagaaggcaccaatgcctatcgctcctactgctactactttaatgaagaccgtgagac

SEQ ID NO: 208715 - DNA, 120 bp, Artificial Sequence
  ENSG00000115386_2 (sequence is synthesized)
ctgggttgatgcagatctctattgccagaacatgaattcgggcaacctggtgtctgtgctcacccaggccgagggtgcctttgtggcctcactgattaaggagagtggcactgatgactt

SEQ ID NO: 208716 - DNA, 120 bp, Artificial Sequence
  ENSG00000115386_3 (sequence is synthesized)
ctggagcagtgggtccctggtctcctacaagtcctggggcattggagccccaagcagtgttaatcctggctactgtgtgagcctgacctcaagcacaggattccagaaatggaaggatgt

SEQ ID NO: 208717 - DNA, 120 bp, Artificial Sequence
  ENSG00000115386_4 (sequence is synthesized)
gccttgtgaagacaagttctcctttgtctgcaagttcaaaaactagaggcaactggaaaatacatgtctagaactgatccagcaattacaacggagtcaaaaattaaaccggaccatctc

SEQ ID NO: 208718 - DNA, 120 bp, Artificial Sequence
  ENSG00000115386_5 (sequence is synthesized)
tccaactcaactcaacctggacactctcttctctgctgagtttgccttgttaatcttcaatagttttacctaccccagtctttggaaccctaaataataaaaataaacatgtttccacta

SEQ ID NO: 208719 - DNA, 120 bp, Artificial Sequence
  ENSG00000115386_6 (sequence is synthesized)
tactggtgccagaatctcttactgtcaatgctcccaaaactcaccgcttgcccccaccccttttgcttaaatgacgtggttcttatctcagatcctgatataaagctcctacagctacct

SEQ ID NO: 208720 - DNA, 120 bp, Artificial Sequence
  ENSG00000115386_7 (sequence is synthesized)
gggaggggaagctgccactctccagtgtgttcagtggctgcaatgagatgagactgaaccccttgctatactatcatcagccccaaactttccaatctactttatcccattattcagcac

SEQ ID NO: 208721 - DNA, 120 bp, Artificial Sequence
  ENSG00000115386_8 (sequence is synthesized)
attcccagcacaaagaacctggtggtcagtgacagcatcatcacggacattactctgctgtcctttttctgacccgtcctcttggaggactcagtatatccgtcacaacttcctcctcca

SEQ ID NO: 208722 - DNA, 120 bp, Artificial Sequence
  ENSG00000115386_9 (sequence is synthesized)
tccacctgtttctgttctctcctgcttagctccagggatggaactgggactgggatagaggaaaggtgaactcctcattaaggaaatggatgtttggtttttgtcctgagtcctaaagcc

SEQ ID NO: 208723 - DNA, 120 bp, Artificial Sequence
  ENSG00000115386_10 (sequence is synthesized)
aagccaactcagactcagccaacaggtaagtgggcattacaggagaagggcgtctctaacatgcactgtagatctaaaatcttcgggaagatacagcatgagtttctgtccaagaggttt

SEQ ID NO: 208724 - DNA, 120 bp, Artificial Sequence
  ENSG00000115386_11 (sequence is synthesized)
tagctgtaatgaagcctcagtgggatccaaagttgtttttcagttactgagtctgtataatccccactctcaagagaaacatttgaaggtgtgggtgtctcagaggaccttcctggtctc

SEQ ID NO: 208725 - DNA, 120 bp, Artificial Sequence
  ENSG00000115392_0 (sequence is synthesized)
gtctagagcttttctgtgtttctccggacttcgagccatggcggtgacggaagcgagcctgttgcgccagtgccccctgcttctgccccagaaccggtcgaaaaccgtgtatgagggatt

SEQ ID NO: 208726 - DNA, 120 bp, Artificial Sequence
  ENSG00000115392_1 (sequence is synthesized)
catctcggctcagggaagagacttccaccttaggatagtgttgcctgaagatttacaactgaagaatgcaagattattatgtagttggcagctgagaacaatacttagtggataccatcg

SEQ ID NO: 208727 - DNA, 120 bp, Artificial Sequence
  ENSG00000115392_2 (sequence is synthesized)
aatagtacaacagagaatgcagcactctcctgatctaatgagctttatgatggagttgaagatgcttttggaagttgccttaaagaatagacaagagctgtatgcactacctcctcctcc

SEQ ID NO: 208728 - DNA, 120 bp, Artificial Sequence
  ENSG00000115392_3 (sequence is synthesized)
ccagttctactcaagccttattgaagagataggaactcttggttgggataaacttgtgtatgcggatacctgcttcagtaccatcaagttaaaagcagaagatgcttctggtagagagca

SEQ ID NO: 208729 - DNA, 120 bp, Artificial Sequence
  ENSG00000115392_4 (sequence is synthesized)
tttaatcactctcaagttgaaggcaaagtatcctgcagaatcaccagattattttgtggattttcctgttccattttgtgcctcctggacacctcagagctccttaataagcatttatag

SEQ ID NO: 208730 - DNA, 120 bp, Artificial Sequence
  ENSG00000115392_5 (sequence is synthesized)
tcagtttttggcagcaatagaatcactaaaggcattctgggatgttatggatgaaatcgatgagaagacctgggtacttgagccagaaaaacctccacggagtgcaacagcacgcagaat

SEQ ID NO: 208731 - DNA, 120 bp, Artificial Sequence
  ENSG00000115392_6 (sequence is synthesized)
tgcattaggtaataatgtttccataaatatagaggtagaccccaggcatcctactatgcttcctgagtgcttctttcttggagctgaccatgtggtaaaacccctgggaattaagctgag

SEQ ID NO: 208732 - DNA, 120 bp, Artificial Sequence
  ENSG00000115392_7 (sequence is synthesized)
gaacatacatttgtgggatccagaaaatagtgtgttacaaaatttgaaagatgttttagaaattgattttccagctcgtgctatcctggaaaaatctgattttactatggattgtggaat

SEQ ID NO: 208733 - DNA, 120 bp, Artificial Sequence
  ENSG00000115392_8 (sequence is synthesized)
ttgttatgcttatcaacttgacggtaccattcctgatcaagtgtgtgataattctcagtgtggacaacctttccatcaaatatgcttatatgagtggctgagaggactactaactagtag

SEQ ID NO: 208734 - DNA, 120 bp, Artificial Sequence
  ENSG00000115392_9 (sequence is synthesized)
acagagttttaacatcatatttggtgaatgtccatattgtagtaagccaattaccttaaaaatgtctggaaggaaacactgaaataagaatacaacatttcggtgaagagctggaaactt

SEQ ID NO: 208735 - DNA, 120 bp, Artificial Sequence
  ENSG00000115392_10 (sequence is synthesized)
aaaaaattatcaaaaggaattttggtatcatcttcagagaaaaaataaagcaagaaatactaacatcaaaaggacaggtatgatgatgcgataataataaacatctgcgtttgtctcttc

SEQ ID NO: 208736 - DNA, 120 bp, Artificial Sequence
  ENSG00000115392_11 (sequence is synthesized)
actaagagtaaactgggaaattgtaggccaaagtccagttgaactttctaagtctgtgatccccgtgctgactgtggaagtgtatttataccaagatggagatcttgacttcttgaatat

SEQ ID NO: 208737 - DNA, 120 bp, Artificial Sequence
  ENSG00000115392_12 (sequence is synthesized)
atctggactggtaaaatcttgatgaggctcataaaatgagtttgggaattgtgtatagctgattttttgtgggaaactgtttacttcattcaaaggttcttgagactcttgatatttctg

SEQ ID NO: 208738 - DNA, 120 bp, Artificial Sequence
  ENSG00000115392_13 (sequence is synthesized)
tcttctccttgtgctttcctatggaaaaaatacatatatagtttagtttgttagacgtgagttatccaagtatttattttgtgtagtgtgtaagaatgctaaataaaatgttatacaaga

SEQ ID NO: 208739 - DNA, 120 bp, Artificial Sequence
  ENSG00000115392_14 (sequence is synthesized)
ggacttcgagccatggcggtgacggaagcgagcctgttgcgccagtgccccctgcttctgccccagaaccggtcgaaaaccgtgtatgagggattcatctcggctcagagctccttaata

SEQ ID NO: 208740 - DNA, 120 bp, Artificial Sequence
  ENSG00000115392_15 (sequence is synthesized)
tattagtatattaatggtagtttttattttttgtctgagacggagttttgctcttgttgcccagtatgtagtgtaatggcgcgatctcggttcaccgcaataatgatagttattttaaat

SEQ ID NO: 208741 - DNA, 120 bp, Artificial Sequence
  ENSG00000115392_16 (sequence is synthesized)
cattctgaactgtataattttgttttttaacataatacatataattttgattttctaatcaagtagttaagaaacattctgtatcaaatgtggctttagaaaccaagagtagagcatgca

SEQ ID NO: 208742 - DNA, 120 bp, Artificial Sequence
  ENSG00000115392_17 (sequence is synthesized)
attattaaattttttttttttaatctgaagtggtaaaacccctgggaattaagctgagcaggaacatacatttgtggtaggtaccttggcaatataatttttactttttggtgattttac

SEQ ID NO: 208743 - DNA, 120 bp, Artificial Sequence
  ENSG00000115392_18 (sequence is synthesized)
aaagttcacagcataatttttttccccatgctttcagggatccagaaaatagtgtgttacaaaatttgaaagatgttttagaaattgattttccagctcgtgctatcctggaaaaatctg

SEQ ID NO: 208744 - DNA, 120 bp, Artificial Sequence
  ENSG00000115392_19 (sequence is synthesized)
agccttattgaagagataggaactcttggttgggataaagacaaggttttgctgtattgcccaggcgagtctcacactcctgggctgaaatgattctcctgcctcagcctcccaaaatgc

SEQ ID NO: 208745 - DNA, 120 bp, Artificial Sequence
  ENSG00000115392_20 (sequence is synthesized)
tgggattaacaggtgttcgctgccatgcctggcctaggatgaataaatgactttcgatttagctgctgttacttaatcatttgttttatactgtttaaaaataaagaatgttttagcaga

SEQ ID NO: 208746 - DNA, 120 bp, Artificial Sequence
  ENSG00000115414_0 (sequence is synthesized)
gcccgcgccggctgtgctgcacagggggaggagagggaaccccaggcgcgagcgggaagaggggacctgcagccacaacttctctggtcctctgcatcccttctgtccctccacccgtcc

SEQ ID NO: 208747 - DNA, 120 bp, Artificial Sequence
  ENSG00000115414_1 (sequence is synthesized)
ccttccccaccctctggcccccaccttcttggaggcgacaacccccgggaggcattagaagggatttttcccgcaggttgcgaagggaagcaaacttggtggcaacttgcctcccggtgc

SEQ ID NO: 208748 - DNA, 120 bp, Artificial Sequence
  ENSG00000115414_2 (sequence is synthesized)
gggcgtctctcccccaccgtctcaacatgcttaggggtccggggcccgggctgctgctgctggccgtccagtgcctggggacagcggtgccctccacgggagcctcgaagagcaagaggc

SEQ ID NO: 208749 - DNA, 120 bp, Artificial Sequence
  ENSG00000115414_3 (sequence is synthesized)
aggctcagcaaatggttcagccccagtccccggtggctgtcagtcaaagcaagcccggttgttatgacaatggaaaacactatcagataaatcaacagtgggagcggacctacctaggca

SEQ ID NO: 208750 - DNA, 120 bp, Artificial Sequence
  ENSG00000115414_4 (sequence is synthesized)
atgcgttggtttgtacttgttatggaggaagccgaggttttaactgcgagagtaaacctgaagctgaagagacttgctttgacaagtacactgggaacacttaccgagtgggtgacactt

SEQ ID NO: 208751 - DNA, 120 bp, Artificial Sequence
  ENSG00000115414_5 (sequence is synthesized)
atgagcgtcctaaagactccatgatctgggactgtacctgcatcggggctgggcgagggagaataagctgtaccatcgcaaaccgctgccatgaagggggtcagtcctacaagattggtg

SEQ ID NO: 208752 - DNA, 120 bp, Artificial Sequence
  ENSG00000115414_6 (sequence is synthesized)
acacctggaggagaccacatgagactggtggttacatgttagagtgtgtgtgtcttggtaatggaaaaggagaatggacctgcaagcccatagctgagaagtgttttgatcatgctgctg

SEQ ID NO: 208753 - DNA, 120 bp, Artificial Sequence
  ENSG00000115414_7 (sequence is synthesized)
ggacttcctatgtggtcggagaaacgtgggagaagccctaccaaggctggatgatggtagattgtacttgcctgggagaaggcagcggacgcatcacttgcacttctagaaatagatgca

SEQ ID NO: 208754 - DNA, 120 bp, Artificial Sequence
  ENSG00000115414_8 (sequence is synthesized)
acgatcaggacacaaggacatcctatagaattggagacacctggagcaagaaggataatcgaggaaacctgctccagtgcatctgcacaggcaacggccgaggagagtggaagtgtgaga

SEQ ID NO: 208755 - DNA, 120 bp, Artificial Sequence
  ENSG00000115414_9 (sequence is synthesized)
ggcacacctctgtgcagaccacatcgagcggatctggccccttcaccgatgttcgtgcagctgtttaccaaccgcagcctcacccccagcctcctccctatggccactgtgtcacagaca

SEQ ID NO: 208756 - DNA, 120 bp, Artificial Sequence
  ENSG00000115414_10 (sequence is synthesized)
gtggtgtggtctactctgtggggatgcagtggctgaagacacaaggaaataagcaaatgctttgcacgtgcctgggcaacggagtcagctgccaagagacagctgtaacccagacttacg

SEQ ID NO: 208757 - DNA, 120 bp, Artificial Sequence
  ENSG00000115414_11 (sequence is synthesized)
gtggcaactcaaatggagagccatgtgtcttaccattcacctacaatggcaggacgttctactcctgcaccacagaagggcgacaggacggacatctttggtgcagcacaacttcgaatt

SEQ ID NO: 208758 - DNA, 120 bp, Artificial Sequence
  ENSG00000115414_12 (sequence is synthesized)
atgagcaggaccagaaatactctttctgcacagaccacactgttttggttcagactcgaggaggaaattccaatggtgccttgtgccacttccccttcctatacaacaaccacaattaca

SEQ ID NO: 208759 - DNA, 120 bp, Artificial Sequence
  ENSG00000115414_13 (sequence is synthesized)
ctgattgcacttctgagggcagaagagacaacatgaagtggtgtgggaccacacagaactatgatgccgaccagaagtttgggttctgccccatggctgcccacgaggaaatctgcacaa

SEQ ID NO: 208760 - DNA, 120 bp, Artificial Sequence
  ENSG00000115414_14 (sequence is synthesized)
ccaatgaaggggtcatgtaccgcattggagatcagtgggataagcagcatgacatgggtcacatgatgaggtgcacgtgtgttgggaatggtcgtggggaatggacatgcattgcctact

SEQ ID NO: 208761 - DNA, 120 bp, Artificial Sequence
  ENSG00000115414_15 (sequence is synthesized)
cgcagcttcgagatcagtgcattgttgatgacatcacttacaatgtgaacgacacattccacaagcgtcatgaagaggggcacatgctgaactgtacatgcttcggtcagggtcggggca

SEQ ID NO: 208762 - DNA, 120 bp, Artificial Sequence
  ENSG00000115414_16 (sequence is synthesized)
ggtggaagtgtgatcccgtcgaccaatgccaggattcagagactgggacgttttatcaaattggagattcatgggagaagtatgtgcatggtgtcagataccagtgctactgctatggcc

SEQ ID NO: 208763 - DNA, 120 bp, Artificial Sequence
  ENSG00000115414_17 (sequence is synthesized)
gtggcattggggagtggcattgccaacctttacagacctatccaagctcaagtggtcctgtcgaagtatttatcactgagactccgagtcagcccaactcccaccccatccagtggaatg

SEQ ID NO: 208764 - DNA, 120 bp, Artificial Sequence
  ENSG00000115414_18 (sequence is synthesized)
caccacagccatctcacatttccaagtacattctcaggtggagacctaaaaattctgtaggccgttggaaggaagctaccataccaggccacttaaactcctacaccatcaaaggcctga

SEQ ID NO: 208765 - DNA, 120 bp, Artificial Sequence
  ENSG00000115414_19 (sequence is synthesized)
agcctggtgtggtatacgagggccagctcatcagcatccagcagtacggccaccaagaagtgactcgctttgacttcaccaccaccagcaccagcacacctgtgaccagcaacaccgtga

SEQ ID NO: 208766 - DNA, 120 bp, Artificial Sequence
  ENSG00000115414_20 (sequence is synthesized)
caggagagacgactcccttttctcctcttgtggccacttctgaatctgtgaccgaaatcacagccagtagctttgtggtctcctgggtctcagcttccgacaccgtgtcgggattccggg

SEQ ID NO: 208767 - DNA, 120 bp, Artificial Sequence
  ENSG00000115414_21 (sequence is synthesized)
tggaatatgagctgagtgaggagggagatgagccacagtacctggatcttccaagcacagccacttctgtgaacatccctgacctgcttcctggccgaaaatacattgtaaatgtctatc

SEQ ID NO: 208768 - DNA, 120 bp, Artificial Sequence
  ENSG00000115414_22 (sequence is synthesized)
agatatctgaggatggggagcagagtttgatcctgtctacttcacaaacaacagcgcctgatgcccctcctgacacgactgtggaccaagttgatgacacctcaattgttgttcgctgga

SEQ ID NO: 208769 - DNA, 120 bp, Artificial Sequence
  ENSG00000115414_23 (sequence is synthesized)
gcagaccccaggctcccatcacagggtacagaatagtctattcgccatcagtagaaggtagcagcacagaactcaaccttcctgaaactgcaaactccgtcaccctcagtgacttgcaac

SEQ ID NO: 208770 - DNA, 120 bp, Artificial Sequence
  ENSG00000115414_24 (sequence is synthesized)
ctggtgttcagtataacatcactatctatgctgtggaagaaaatcaagaaagtacacctgttgtcattcaacaagaaaccactggcaccccacgctcagatacagtgccctctcccaggg

SEQ ID NO: 208771 - DNA, 120 bp, Artificial Sequence
  ENSG00000115414_25 (sequence is synthesized)
acctgcagtttgtggaagtgacagacgtgaaggtcaccatcatgtggacaccgcctgagagtgcagtgaccggctaccgtgtggatgtgatccccgtcaacctgcctggcgagcacgggc

SEQ ID NO: 208772 - DNA, 120 bp, Artificial Sequence
  ENSG00000115414_26 (sequence is synthesized)
agaggctgcccatcagcaggaacacctttgcagaagtcaccgggctgtcccctggggtcacctattacttcaaagtctttgcagtgagccatgggagggagagcaagcctctgactgctc

SEQ ID NO: 208773 - DNA, 120 bp, Artificial Sequence
  ENSG00000115414_27 (sequence is synthesized)
aacagacaaccaaactggatgctcccactaacctccagtttgtcaatgaaactgattctactgtcctggtgagatggactccacctcgggcccagataacaggataccgactgaccgtgg

SEQ ID NO: 208774 - DNA, 120 bp, Artificial Sequence
  ENSG00000115414_28 (sequence is synthesized)
gccttacccgaagaggacagcccaggcagtacaatgtgggtccctctgtctccaagtacccactgaggaatctgcagcctgcatctgagtacaccgtatccctcgtggccataaagggca

SEQ ID NO: 208775 - DNA, 120 bp, Artificial Sequence
  ENSG00000115414_29 (sequence is synthesized)
accaagagagccccaaagccactggagtctttaccacactgcagcctgggagctctattccaccttacaacaccgaggtgactgagaccaccattgtgatcacatggacgcctgctccaa

SEQ ID NO: 208776 - DNA, 120 bp, Artificial Sequence
  ENSG00000115414_30 (sequence is synthesized)
gaattggttttaagctgggtgtacgaccaagccagggaggagaggcaccacgagaagtgacttcagactcaggaagcatcgttgtgtccggcttgactccaggagtagaatacgtctaca

SEQ ID NO: 208777 - DNA, 120 bp, Artificial Sequence
  ENSG00000115414_31 (sequence is synthesized)
ccatccaagtcctgagagatggacaggaaagagatgcgccaattgtaaacaaagtggtgacaccattgtctccaccaacaaacttgcatctggaggcaaaccctgacactggagtgctca

SEQ ID NO: 208778 - DNA, 120 bp, Artificial Sequence
  ENSG00000115414_32 (sequence is synthesized)
gtccatgctgatcagagctcctgcacttttgataacctgagtcccggcctggagtacaatgtcagtgtttacactgtcaaggatgacaaggaaagtgtccctatctctgataccatcatc

SEQ ID NO: 208779 - DNA, 120 bp, Artificial Sequence
  ENSG00000115414_33 (sequence is synthesized)
ccagctgttcctcctcccactgacctgcgattcaccaacattggtccagacaccatgcgtgtcacctgggctccacccccatccattgatttaaccaacttcctggtgcgttactcacct

SEQ ID NO: 208780 - DNA, 120 bp, Artificial Sequence
  ENSG00000115414_34 (sequence is synthesized)
gtgaaaaatgaggaagatgttgcagagttgtcaatttctccttcagacaatgcagtggtcttaacaaatctcctgcctggtacagaatatgtagtgagtgtctccagtgtctacgaacaa

SEQ ID NO: 208781 - DNA, 120 bp, Artificial Sequence
  ENSG00000115414_35 (sequence is synthesized)
catgagagcacacctcttagaggaagacagaaaacaggtcttgattccccaactggcattgacttttctgatattactgccaactcttttactgtgcactggattgctcctcgagccacc

SEQ ID NO: 208782 - DNA, 120 bp, Artificial Sequence
  ENSG00000115414_36 (sequence is synthesized)
atcactggctacaggatccgccatcatcccgagcacttcagtgggagacctcgagaagatcgggtgccccactctcggaattccatcaccctcaccaacctcactccaggcacagagtat

SEQ ID NO: 208783 - DNA, 120 bp, Artificial Sequence
  ENSG00000115414_37 (sequence is synthesized)
gtggtcagcatcgttgctcttaatggcagagaggaaagtcccttattgattggccaacaatcaacagtttctgatgttccgagggacctggaagttgttgctgcgacccccaccagccta

SEQ ID NO: 208784 - DNA, 120 bp, Artificial Sequence
  ENSG00000115414_38 (sequence is synthesized)
ctgatcagctgggatgctcctgctgtcacagtgagatattacaggatcacttacggagagacaggaggaaatagccctgtccaggagttcactgtgcctgggagcaagtctacagctacc

SEQ ID NO: 208785 - DNA, 120 bp, Artificial Sequence
  ENSG00000115414_39 (sequence is synthesized)
atcagcggccttaaacctggagttgattataccatcactgtgtatgctgtcactggccgtggagacagccccgcaagcagcaagccaatttccattaattaccgaacagaaattgacaaa

SEQ ID NO: 208786 - DNA, 120 bp, Artificial Sequence
  ENSG00000115414_40 (sequence is synthesized)
ccatcccagatgcaagtgaccgatgttcaggacaacagcattagtgtcaagtggctgccttcaagttcccctgttactggttacagagtaaccaccactcccaaaaatggaccaggacca

SEQ ID NO: 208787 - DNA, 120 bp, Artificial Sequence
  ENSG00000115414_41 (sequence is synthesized)
acaaaaactaaaactgcaggtccagatcaaacagaaatgactattgaaggcttgcagcccacagtggagtatgtggttagtgtctatgctcagaatccaagcggagagagtcagcctctg

SEQ ID NO: 208788 - DNA, 120 bp, Artificial Sequence
  ENSG00000115414_42 (sequence is synthesized)
gttcagactgcagtaaccactattcctgcaccaactgacctgaagttcactcaggtcacacccacaagcctgagcgcccagtggacaccacccaatgttcagctcactggatatcgagtg

SEQ ID NO: 208789 - DNA, 120 bp, Artificial Sequence
  ENSG00000115414_43 (sequence is synthesized)
cgggtgacccccaaggagaagaccggaccaatgaaagaaatcaaccttgctcctgacagctcatccgtggttgtatcaggacttatggtggccaccaaatatgaagtgagtgtctatgct

SEQ ID NO: 208790 - DNA, 120 bp, Artificial Sequence
  ENSG00000115414_44 (sequence is synthesized)
cttaaggacactttgacaagcagaccagctcagggagttgtcaccactctggagaatgtcagcccaccaagaagggctcgtgtgacagatgctactgagaccaccatcaccattagctgg

SEQ ID NO: 208791 - DNA, 120 bp, Artificial Sequence
  ENSG00000115414_45 (sequence is synthesized)
agaaccaagactgagacgatcactggcttccaagttgatgccgttccagccaatggccagactccaatccagagaaccatcaagccagatgtcagaagctacaccatcacaggtttacaa

SEQ ID NO: 208792 - DNA, 120 bp, Artificial Sequence
  ENSG00000115414_46 (sequence is synthesized)
ccaggcactgactacaagatctacctgtacaccttgaatgacaatgctcggagctcccctgtggtcatcgacgcctccactgccattgatgcaccatccaacctgcgtttcctggccacc

SEQ ID NO: 208793 - DNA, 120 bp, Artificial Sequence
  ENSG00000115414_47 (sequence is synthesized)
acacccaattccttgctggtatcatggcagccgccacgtgccaggattaccggctacatcatcaagtatgagaagcctgggtctcctcccagagaagtggtccctcggccccgccctggt

SEQ ID NO: 208794 - DNA, 120 bp, Artificial Sequence
  ENSG00000115414_48 (sequence is synthesized)
gtcacagaggctactattactggcctggaaccgggaaccgaatatacaatttatgtcattgccctgaagaataatcagaagagcgagcccctgattggaaggaaaaagacaggacaagaa

SEQ ID NO: 208795 - DNA, 120 bp, Artificial Sequence
  ENSG00000115414_49 (sequence is synthesized)
gctctctctcagacaaccatctcatgggccccattccaggacacttctgagtacatcatttcatgtcatcctgttggcactgatgaagaacccttacagttcagggttcctggaacttct

SEQ ID NO: 208796 - DNA, 120 bp, Artificial Sequence
  ENSG00000115414_50 (sequence is synthesized)
accagtgccactctgacaggcctcaccagaggtgccacctacaacgtcatagtggaggcactgaaagaccagcagaggcataaggttcgggaagaggttgttaccgtgggcaactctgtc

SEQ ID NO: 208797 - DNA, 120 bp, Artificial Sequence
  ENSG00000115414_51 (sequence is synthesized)
aacgaaggcttgaaccaacctacggatgactcgtgctttgacccctacacagtttcccattatgccgttggagatgagtgggaacgaatgtctgaatcaggctttaaactgttgtgccag

SEQ ID NO: 208798 - DNA, 120 bp, Artificial Sequence
  ENSG00000115414_52 (sequence is synthesized)
tgcttaggctttggaagtggtcatttcagatgtgattcatctagatggtgccatgacaatggtgtgaactacaagattggagagaagtgggaccgtcagggagaaaatggccagatgatg

SEQ ID NO: 208799 - DNA, 120 bp, Artificial Sequence
  ENSG00000115414_53 (sequence is synthesized)
agctgcacatgtcttgggaacggaaaaggagaattcaagtgtgaccctcatgaggcaacgtgttatgatgatgggaagacataccacgtaggagaacagtggcagaaggaatatctcggt

SEQ ID NO: 208800 - DNA, 120 bp, Artificial Sequence
  ENSG00000115414_54 (sequence is synthesized)
gccatttgctcctgcacatgctttggaggccagcggggctggcgctgtgacaactgccgcagacctgggggtgaacccagtcccgaaggcactactggccagtcctacaaccagtattct

SEQ ID NO: 208801 - DNA, 120 bp, Artificial Sequence
  ENSG00000115414_55 (sequence is synthesized)
cagagataccatcagagaacaaacactaatgttaattgcccaattgagtgcttcatgcctttagatgtacaggctgacagagaagattcccgagagtaaatcatctttccaatccagagg

SEQ ID NO: 208802 - DNA, 120 bp, Artificial Sequence
  ENSG00000115414_56 (sequence is synthesized)
aacaagcatgtctctctgccaagatccatctaaactggagtgatgttagcagacccagcttagagttcttctttctttcttaagccctttgctctggaggaagttctccagcttcagctc

SEQ ID NO: 208803 - DNA, 120 bp, Artificial Sequence
  ENSG00000115414_57 (sequence is synthesized)
aactcacagcttctccaagcatcaccctgggagtttcctgagggttttctcataaatgagggctgcacattgcctgttctgcttcgaagtattcaataccgctcagtattttaaatgaag

SEQ ID NO: 208804 - DNA, 120 bp, Artificial Sequence
  ENSG00000115414_58 (sequence is synthesized)
tgattctaagatttggtttgggatcaataggaaagcatatgcagccaaccaagatgcaaatgttttgaaatgatatgaccaaaattttaagtaggaaagtcacccaaacacttctgcttt

SEQ ID NO: 208805 - DNA, 120 bp, Artificial Sequence
  ENSG00000115414_59 (sequence is synthesized)
cacttaagtgtctggcccgcaatactgtaggaacaagcatgatcttgttactgtgatattttaaatatccacagtactcactttttccaaatgatcctagtaattgcctagaaatatctt

SEQ ID NO: 208806 - DNA, 120 bp, Artificial Sequence
  ENSG00000115414_60 (sequence is synthesized)
tctcttacctgttatttatcaatttttcccagtatttttatacggaaaaaattgtattgaaaacacttagtatgcagttgataagaggaatttggtataattatggtgggtgattatttt

SEQ ID NO: 208807 - DNA, 120 bp, Artificial Sequence
  ENSG00000115414_61 (sequence is synthesized)
ttatactgtatgtgccaaagctttactactgtggaaagacaactgttttaataaaagatttacattccacaacttgaagttcatctatttgatataagacaccttcgggggaaataattc

SEQ ID NO: 208808 - DNA, 120 bp, Artificial Sequence
  ENSG00000115414_62 (sequence is synthesized)
ctgtgaatattctttttcaattcagcaaacatttgaaaatctatgatgtgcaagtctaattgttgatttcagtacaagattttctaaatcagttgctacaaaaactgattggtttttgtc

SEQ ID NO: 208809 - DNA, 120 bp, Artificial Sequence
  ENSG00000115414_63 (sequence is synthesized)
acttcatctcttcactaatggagatagctttacactttctgctttaatagatttaagtggaccccaatatttattaaaattgctagtttaccgttcagaagtataatagaaataatcttt

SEQ ID NO: 208810 - DNA, 120 bp, Artificial Sequence
  ENSG00000115414_64 (sequence is synthesized)
agttgctcttttctaaccattgtaattcttcccttcttccctccacctttccttcattgaataaacctctgttcaaagagattgcctgcaagggaaataaaaatgactaagatattaaaa

SEQ ID NO: 208811 - DNA, 120 bp, Artificial Sequence
  ENSG00000115414_65 (sequence is synthesized)
acctaagctttgttgatataaccgattcaagcatcggcctgaggtggaccccgctaaactcttccaccattattgggtaccgcatcacagtagttgcggcaggagaaggtatccctattt

SEQ ID NO: 208812 - DNA, 120 bp, Artificial Sequence
  ENSG00000115414_66 (sequence is synthesized)
ttgaagattttgtggactcctcagtaggatactacacagtcacagggctggagccgggcattgactatgatatcagcgttatcactctcattaatggcggcgagagtgcccctactacac

SEQ ID NO: 208813 - DNA, 120 bp, Artificial Sequence
  ENSG00000115414_67 (sequence is synthesized)
gatgtcgattccatcaaaattgcttgggaaagcccacaggggcaagtttccaggtacagggtgacctactcgagccctgaggatggaatccatgagctattccctgcacctgatggtgaa

SEQ ID NO: 208814 - DNA, 120 bp, Artificial Sequence
  ENSG00000115414_68 (sequence is synthesized)
gaagacactgcagagctgcaaggcctcagaccgggttctgagtacacagtcagtgtggttgccttgcacgatgatatggagagccagcccctgattggaacccagtccacagctattcct

SEQ ID NO: 208815 - DNA, 120 bp, Artificial Sequence
  ENSG00000115414_69 (sequence is synthesized)
aatcttcatggaccagagatcttggatgttccttccacagttcaaaagacccctttcgtcacccaccctgggtatgacactggaaatggtattcagcttcctggcacttctggtcagcaa

SEQ ID NO: 208816 - DNA, 120 bp, Artificial Sequence
  ENSG00000115414_70 (sequence is synthesized)
cccagtgttgggcaacaaatgatctttgaggaacatggttttaggcggaccacaccgcccacaacggccacccccataaggcataggccaagaccatacccgccgaatgtaggacaagaa

SEQ ID NO: 208817 - DNA, 120 bp, Artificial Sequence
  ENSG00000115414_71 (sequence is synthesized)
cagcacacctgtgaccagtatgtacacaaccaccctcatgcctcctacccccgaggttcctagagctaggctctcctgaggcaatgctttccttctcaattcatattcttccaggagggg

SEQ ID NO: 208818 - DNA, 120 bp, Artificial Sequence
  ENSG00000115414_72 (sequence is synthesized)
ttaacttgctatttttccagatcatggttctgaagaccctgtgacacgtcccagttcacctactgtcttgtgagtcagaatatacaaataactttttggtcctgactttccccaccccta

SEQ ID NO: 208819 - DNA, 120 bp, Artificial Sequence
  ENSG00000115414_73 (sequence is synthesized)
ctcctgcacatgctttggaggccagcgggtaagactggatgtgccaggctccctacaagttagataagataaagggtgggctcctgcaaggatgtgtcgtacacacaggaggggcagaga

SEQ ID NO: 208820 - DNA, 120 bp, Artificial Sequence
  ENSG00000115414_74 (sequence is synthesized)
cccttcggaagtattaaaataccacatttcctgttggcatacaactgctgacatagagctctagagcagctctatgtctaccttacatgccattcattctttctattactcttagtagaa

SEQ ID NO: 208821 - DNA, 120 bp, Artificial Sequence
  ENSG00000115414_75 (sequence is synthesized)
tatttcccaaatctaagtatctcctccccttccccctattccagagaccagaccaccacatcatgctgggtgttagataaatatgtttaatcttcttcttatttatcctaacaagcagat

SEQ ID NO: 208822 - DNA, 120 bp, Artificial Sequence
  ENSG00000115414_76 (sequence is synthesized)
atttaaaggaaattatcaactaagcaagaaattttcagaaagtaagacatgtatttgttcaaatactggcttctcacaggaaagtgtattttaccacattctttacttgagcatactgta

SEQ ID NO: 208823 - DNA, 120 bp, Artificial Sequence
  ENSG00000115414_77 (sequence is synthesized)
tgtagaaaagttattttagtggaaggtgttgataattaagtggaagtagttgtatgctttgagaagcataccttttttctttcatcaatggaactttaaaaagtttctcactcacccacc

SEQ ID NO: 208824 - DNA, 120 bp, Artificial Sequence
  ENSG00000115414_78 (sequence is synthesized)
atcaaattgatgaacagtcattgttgcctgaatcgattattatcattgctgctacttcctggagcttaatgcgctttgcttttttggctctaacctctctcggctagacgagcttcccca

SEQ ID NO: 208825 - DNA, 120 bp, Artificial Sequence
  ENSG00000115414_79 (sequence is synthesized)
aaatgcattaaccaattacaggtatccaagatgcaaagaaacatgatggaaaatagtctttgggaaaattaatctggcagcaggggtgttcaggggcctgtcttggctccaccaggggca

SEQ ID NO: 208826 - DNA, 120 bp, Artificial Sequence
  ENSG00000115414_80 (sequence is synthesized)
gcccatggaaactactatgatcttgtttcacccccagtgattacatggggagggaggtgctcccaattctgatggaggagaattggagattggaatttagattgaattcagtatctctct

SEQ ID NO: 208827 - DNA, 120 bp, Artificial Sequence
  ENSG00000115414_81 (sequence is synthesized)
ctgtctctctctctctctctctcccattaacacttacaacgactgtgattgtatgaccttagaactcagtcattctggtatgaaattgtgtgatggagaatgaatttgctgggaagttga

SEQ ID NO: 208828 - DNA, 120 bp, Artificial Sequence
  ENSG00000115414_82 (sequence is synthesized)
ttttggtctcacttcagcatcttctcattatttatgcacatgaaacctttcatgtgcgacacttattctattctcaagtgctaaatgaaacatttaagacaggagtggaaactgttcact

SEQ ID NO: 208829 - DNA, 120 bp, Artificial Sequence
  ENSG00000115414_83 (sequence is synthesized)
ttctcatatgaaagcaagattcagtgattctgtaaggaggtagtcactggtattgtgttaggtattaaggggcatatgtgcttaaacagagaaatatgtctaaaatatttaaattctaat

SEQ ID NO: 208830 - DNA, 120 bp, Artificial Sequence
  ENSG00000115414_84 (sequence is synthesized)
ataaaaaagaaagtgactgtattatttagggctgcattttagttgtaagaaaaaagtccaactcaagcaaaaatggcccacacaatggaacagtcccaggacccaccggcttcaggggct

SEQ ID NO: 208831 - DNA, 120 bp, Artificial Sequence
  ENSG00000115414_85 (sequence is synthesized)
gctccagcaatggcgcccggactccctcttgctccgcgtgccttcccatgcactggcttcgtgcttcagcggggtctctgctgatggtgccattgatgactgacctccatgagcttgctt

SEQ ID NO: 208832 - DNA, 120 bp, Artificial Sequence
  ENSG00000115414_86 (sequence is synthesized)
taccccctgccagcttaagaacagtagtgaaagagaacatgtgtgtcctcccatttccagtaaaaacttcaggcaggagcctcactggctcagcttggtcccgtttccatctcccatgcc

SEQ ID NO: 208833 - DNA, 120 bp, Artificial Sequence
  ENSG00000115414_87 (sequence is synthesized)
atctccggccaggtgacaggctaccatgtcactgcctagggaagtttaggaagagagtggcaaagtggtgcattagaaagaacatggccaggtcaccccacctcctgggcggcaggccca

SEQ ID NO: 208834 - DNA, 120 bp, Artificial Sequence
  ENSG00000115414_88 (sequence is synthesized)
actccaccagtggtccactgtgtgacttccctgctccctctaagcaagtcactcctctcctctgggtctctgtttccttacctataaaatgagaacgtttcttcatgtgatctcaagtcc

SEQ ID NO: 208835 - DNA, 120 bp, Artificial Sequence
  ENSG00000115414_89 (sequence is synthesized)
ttctatcatctagtgcagagaacttgttgaggaagttgggattggaatgagcctcagcagatgggcaaggtttgaataggaagagaagagacatttcaggagaaagaaacaacatagaga

SEQ ID NO: 208836 - DNA, 120 bp, Artificial Sequence
  ENSG00000115414_90 (sequence is synthesized)
gacagatgtaggtataagatatggtaataagccaaaatgtattaagagttataaatgcatgaaatcatcatcaaagcttgcttagtgattaactgcttatattttgccagtgcatatgat

SEQ ID NO: 208837 - DNA, 120 bp, Artificial Sequence
  ENSG00000115414_91 (sequence is synthesized)
gtgacatttttctttaactcaaacactaaattacgatgtcctcaggttatcataaaccccatttgacttcatgcctctactctctcagggctggcgctgtgacaactgccgcagacctgg

SEQ ID NO: 208838 - DNA, 120 bp, Artificial Sequence
  ENSG00000115414_92 (sequence is synthesized)
gtgccaaggaagcatgtttggaagacacaggttcttccaaacatgaagcaaacaagagaatactgtttgactcgaagtaatattttgcatcatagaaaaatgatgggaaattttacttgt

SEQ ID NO: 208839 - DNA, 120 bp, Artificial Sequence
  ENSG00000115414_93 (sequence is synthesized)
agcaacacctgtcatttatatgatgttagaatcattttcctaagctccctagcatgtcagagatactatttacactgaaaaatagtgaagcagagatactattcaaattaattagtggta

SEQ ID NO: 208840 - DNA, 120 bp, Artificial Sequence
  ENSG00000115414_94 (sequence is synthesized)
aatagaatgtgtttcatttcagccggttctccccatcctgggcagcctgagaccctcccctcccctactattctcaggctgcttctatttttcagcaaagtgttaagtgcagtgtagctc

SEQ ID NO: 208841 - DNA, 120 bp, Artificial Sequence
  ENSG00000115414_95 (sequence is synthesized)
atggtttctttttttcccagcttttgagccaacaactctgattaactattcctatagcatttactatatttgtttagtgaacaaacaatatgtggtcaattaaattgacttgtagactga

SEQ ID NO: 208842 - DNA, 120 bp, Artificial Sequence
  ENSG00000115414_96 (sequence is synthesized)
cataatgcattagcgttatggccatgatgttgtcatgagttttgtatgggagaaaaaaaatcaatttatcacccatttattattttttaaccttcttcatgcaagcttattttctactaa

SEQ ID NO: 208843 - DNA, 120 bp, Artificial Sequence
  ENSG00000115414_97 (sequence is synthesized)
aacagttttggaattattaaaagcattgctgatacttacttcagatattatgtctaggctctaagaatggttttgacatcctaaacagccatatgatttttaggaatctgaacagttcaa

SEQ ID NO: 208844 - DNA, 120 bp, Artificial Sequence
  ENSG00000115414_98 (sequence is synthesized)
attgtaccctttaaggatgttttcaaaatgtaaaaaatatatatatatatatattccctaaaagaatattcctgtttattcttctagggaagcaaactgttcatgatgcttaggaagtct

SEQ ID NO: 208845 - DNA, 120 bp, Artificial Sequence
  ENSG00000115414_99 (sequence is synthesized)
tttcagagaatttaaaacagattgcatattaccatcattgctttaacattccaccaattttactactagtaacctgatatacactgctttattttttcctctttttttccctctattttc

SEQ ID NO: 208846 - DNA, 120 bp, Artificial Sequence
  ENSG00000115414_100 (sequence is synthesized)
gccaccagttactccggttaaatatggatgtttcatgggggaagtcagcaattggccaaagattcagatagggtggattggggggataaggaatcaaatgcatctgctaaactgattgga

SEQ ID NO: 208847 - DNA, 120 bp, Artificial Sequence
  ENSG00000115414_101 (sequence is synthesized)
gaaaaacacatgcaagtattcttcagtacactctcatttaaaccacaagtagatataaagctagagaaatacagatgtctgctctgttaaatataaaatagcaaatgttcattcaatttg

SEQ ID NO: 208848 - DNA, 120 bp, Artificial Sequence
  ENSG00000115414_102 (sequence is synthesized)
aagacctagaatttttcgtcttaaataccaaacacgaataccaaattgcgtaagtaccaattaattataagaaatatatcaccaaaatgtaccatcatgatcttccttctaccctttgat

SEQ ID NO: 208849 - DNA, 120 bp, Artificial Sequence
  ENSG00000115414_103 (sequence is synthesized)
aaactctaccatgctccttctttgtagctaaaaacccatcaaaatttagggtagagtggatgggcattgttttgaggtaggagaaaagtaaacttgggagcattctaggttttgttgctg

SEQ ID NO: 208850 - DNA, 120 bp, Artificial Sequence
  ENSG00000115414_104 (sequence is synthesized)
tcactaggtaaagaaacacctctttaaccacagtctggggacaagcatgcaacattttaaaggttctctgctgtgcatgggaaaagaaacatgctgagaaccaatttgcatgaacatgtt

SEQ ID NO: 208851 - DNA, 120 bp, Artificial Sequence
  ENSG00000115414_105 (sequence is synthesized)
cacttgtaagtagaattcactgaatggaactgtagctctagatatctcacatggggggaagtttaggaccctcttgtctttttgtctgtgtgcatgtatttctttgtaaagtactgctat

SEQ ID NO: 208852 - DNA, 120 bp, Artificial Sequence
  ENSG00000115414_106 (sequence is synthesized)
gtttctctttgctgtgtggcaacttaagcctcttcggcctgggataaaataatctgcagtggtattaataatgtacataaagtcaacatatttgaaagtagattaaaattttttttaaat

SEQ ID NO: 208853 - DNA, 120 bp, Artificial Sequence
  ENSG00000115414_107 (sequence is synthesized)
atatcaatgatggcaaaaaggttaaagggggcctaacagtactgtgtgtagtgttttatttttaacagtagtacactataacttaaaatagacttagattagactgtttgcatgattatg

SEQ ID NO: 208854 - DNA, 120 bp, Artificial Sequence
  ENSG00000115414_108 (sequence is synthesized)
tcctgctgtcacagtgagatattacaggatcacttacggagagacaggtacagcagtaaaatgctattttacactctgattaaatcagattctgttgtggataacctgaaagcccaacag

SEQ ID NO: 208855 - DNA, 120 bp, Artificial Sequence
  ENSG00000115414_109 (sequence is synthesized)
tgaacaaagaattaaagaaactttggcaagtccattcaacggagcccttgttttttccaagaaaatacgtaagatatagatgatataatttgttctaaaacccaaataaaaagttgttta

SEQ ID NO: 208856 - DNA, 120 bp, Artificial Sequence
  ENSG00000115414_110 (sequence is synthesized)
tatactacaactagagggggaacggcagagctgaggaaataaaaggattgtaaattcacaaacatattatcagtggtggaaataagtgatttttattttttcttctctttacttttctgt

SEQ ID NO: 208857 - DNA, 120 bp, Artificial Sequence
  ENSG00000115414_111 (sequence is synthesized)
attttccaaattttatttaaaaggaatgtattctgttaaaagttttaaaaaggacacaatgcatgcaatcctgggttgagggcttaccttctcccacttctaatgctactctactactca

SEQ ID NO: 208858 - DNA, 120 bp, Artificial Sequence
  ENSG00000115414_112 (sequence is synthesized)
gtgacattttaaagctgaaatgttaaaacagcgctaactgtaattttctctcaatgtttatacacttaccaaggtttgctacatgcataaatacccctttctgttcaagatagcgctctt

SEQ ID NO: 208859 - DNA, 120 bp, Artificial Sequence
  ENSG00000115414_113 (sequence is synthesized)
taaaagggaataagcaagaagatgtgatttacatgctgctataaatgtggtaattcaattaatcagtaatacccaagtagctctaaacccctcacactctgaactaaccctttttcatac

SEQ ID NO: 208860 - DNA, 120 bp, Artificial Sequence
  ENSG00000115414_114 (sequence is synthesized)
gttcttgggtgtctgaatgcccacgacatgtcttttgcaattacacatagggaaagtgaacttgttggttagtttatgtcttgagctgagccctttacgaacatcttttttccttctcag

SEQ ID NO: 208861 - DNA, 120 bp, Artificial Sequence
  ENSG00000115414_115 (sequence is synthesized)
tgccaagcgaggaatttacagagaaagaagttgtgaaaccaccatagttagttgctgtgctttgaatttcttttgctcaaatggcctcagcgaaatcttatttgcctatagcaaatctac

SEQ ID NO: 208862 - DNA, 120 bp, Artificial Sequence
  ENSG00000115414_116 (sequence is synthesized)
aaaaaattttcctagaccgtcttttctacaactggatggtaaagttgattgaagtgtgcctcatgtagctttatgtttggggcatttgaagggctatggctggaccagagtgtaatataa

SEQ ID NO: 208863 - DNA, 90 bp, Artificial Sequence
  ENSG00000115414_117 (sequence is synthesized)
ggcatttgaagggctatggctggaccagagtgtaatataaatgcttaatagagaggggaaaagaagagtgtaagaaccattatagggctg

SEQ ID NO: 208864 - DNA, 75 bp, Artificial Sequence
  ENSG00000115414_118 (sequence is synthesized)
gcaccacaaaacaattataacaatttgaatctgacattgcaaatcagctttaccacttccaaggtatagaaaatc

SEQ ID NO: 208865 - DNA, 120 bp, Artificial Sequence
  ENSG00000115414_119 (sequence is synthesized)
attgcaaatcagctttaccacttccaaggtatagaaaatccaggtctatgagactaacatcacattgtaaaaatcaaatcgtggtagaatatctttaaattaatataaatacatccccat

SEQ ID NO: 208866 - DNA, 120 bp, Artificial Sequence
  ENSG00000115414_120 (sequence is synthesized)
aataagtgatgcaacattgcatattttctaaaccaagaaaaattaagcaagtgtttaagtgatttttccttttgatagtgggttaattggacttcatcaaagaaaatggtatctgcaaaa

SEQ ID NO: 208867 - DNA, 120 bp, Artificial Sequence
  ENSG00000115414_121 (sequence is synthesized)
tgcaccaccaggtgcccatgggagcagcggctttatgccctactgaatgaattatgcttcactgggctattgattcccgtgtaagggtgaaaaagaattattaggaaagatcctctttaa

SEQ ID NO: 208868 - DNA, 120 bp, Artificial Sequence
  ENSG00000115414_122 (sequence is synthesized)
agaggaatggtaagaaacaataaaacttaggtgatatttaaggaaacaagtctgattaaaagaaattttggagtatcctggcttatacacaagaccataaagcaagacatttgaagagga

SEQ ID NO: 208869 - DNA, 120 bp, Artificial Sequence
  ENSG00000115414_123 (sequence is synthesized)
tactaaagttgtggattatttcctaagctctgactccctgtgattaccctcactatgtataaagaaaagaagtttggcattacagagcttacttataaaaaggaacccaaactcgggcat

SEQ ID NO: 208870 - DNA, 120 bp, Artificial Sequence
  ENSG00000115414_124 (sequence is synthesized)
ttcatagcagcatgattctgagcacacgtgggtaagacctttcttctctggttagatatcatatgctggtgtataattagcttaaatgattgtgatttagacacctaggaaataatcaat

SEQ ID NO: 208871 - DNA, 120 bp, Artificial Sequence
  ENSG00000115414_125 (sequence is synthesized)
agggcaattgctttccataatactttatcttcttgtgctttatttctgaagcagagtagaatgctaaagatgtatcctagtgacagcataaaccctagaggtgacagtctgtattattgc

SEQ ID NO: 208872 - DNA, 120 bp, Artificial Sequence
  ENSG00000115414_126 (sequence is synthesized)
ttttcgcttctcttttctgcttctgttgggagccagttttcttcttacgccgcattacagagagaacgtcaaatttagcagccatatctgccatagggtccaaataaagagacaataaaa

SEQ ID NO: 208873 - DNA, 120 bp, Artificial Sequence
  ENSG00000115414_127 (sequence is synthesized)
acattattctctcttttttggatggaatactgcgtgaaatggttatccatacaaagatactttatgtagaatagaaaaaggaggccgggtgcagtggctcacacatgtaatcctagtgct

SEQ ID NO: 208874 - DNA, 120 bp, Artificial Sequence
  ENSG00000115414_128 (sequence is synthesized)
ttgggaggctaagccgggagcactgattgaggccaggagttcatgatcagcctgggcaatgaagtgagaccccgtctctacaaaaaaatatgaaaaaattagcgaggtgtggtgacacat

SEQ ID NO: 208875 - DNA, 120 bp, Artificial Sequence
  ENSG00000115414_129 (sequence is synthesized)
gtagtcccagctactcaagaggctgaggtagaggatcacttgagcctacgagttcaaggctgcagtgagctatgataactccactgcactgccgcctggatgacacagagagaccgtttc

SEQ ID NO: 208876 - DNA, 120 bp, Artificial Sequence
  ENSG00000115414_130 (sequence is synthesized)
tttctaaattaattaattaacaattttaagaaagaaaaagggccattgcttatttttccatacaaaagtaaaataaatcataatggccaataagccaatgtaacttttttttttaaggga

SEQ ID NO: 208877 - DNA, 120 bp, Artificial Sequence
  ENSG00000115414_131 (sequence is synthesized)
aagcaaaacttgtaaaacctaaaatctcttagagttttggcatttacccaaatgttttcagtgattctgagaattggtggatataaaacacatttctcagcaaacactttcttcattttg

SEQ ID NO: 208878 - DNA, 120 bp, Artificial Sequence
  ENSG00000115414_132 (sequence is synthesized)
catcccttactgtacgtactttcttgtactgaatctttgcttgaccagggaacccacctagcccaacaagaacaatccattctacttcttggaactcactttattttccttttcccccat

SEQ ID NO: 208879 - DNA, 120 bp, Artificial Sequence
  ENSG00000115415_0 (sequence is synthesized)
gctgagcgcggagccgcccggtgattggtgggggcggaagggggccgggcgccagcgctgccttttctcctgccgggtagtttcgctttcctgcgcagagtctgcggaggggctcggctg

SEQ ID NO: 208880 - DNA, 120 bp, Artificial Sequence
  ENSG00000115415_1 (sequence is synthesized)
caccggggggatcgcgcctggcagaccccagaccgagcagaggcgacccagcgcgctcgggagaggctgcaccgccgcgcccccgcctagcccttccggatcctgcgcgcagaaaagttt

SEQ ID NO: 208881 - DNA, 120 bp, Artificial Sequence
  ENSG00000115415_2 (sequence is synthesized)
catttgctgtatgccatcctcgagagctgtctaggttaacgttcgcactctgtgtatataacctcgacagtcttggcacctaacgtgctgtgcgtagctgctcctttggttgaatcccca

SEQ ID NO: 208882 - DNA, 120 bp, Artificial Sequence
  ENSG00000115415_3 (sequence is synthesized)
ggcccttgttggggcacaaggtggcaggatgtctcagtggtacgaacttcagcagcttgactcaaaattcctggagcaggttcaccagctttatgatgacagttttcccatggaaatcag

SEQ ID NO: 208883 - DNA, 120 bp, Artificial Sequence
  ENSG00000115415_4 (sequence is synthesized)
acagtacctggcacagtggttagaaaagcaagactgggagcacgctgccaatgatgtttcatttgccaccatccgttttcatgacctcctgtcacagctggatgatcaatatagtcgctt

SEQ ID NO: 208884 - DNA, 120 bp, Artificial Sequence
  ENSG00000115415_5 (sequence is synthesized)
ttctttggagaataacttcttgctacagcataacataaggaaaagcaagcgtaatcttcaggataattttcaggaagacccaatccagatgtctatgatcatttacagctgtctgaagga

SEQ ID NO: 208885 - DNA, 120 bp, Artificial Sequence
  ENSG00000115415_6 (sequence is synthesized)
agaaaggaaaattctggaaaacgcccagagatttaatcaggctcagtcggggaatattcagagcacagtgatgttagacaaacagaaagagcttgacagtaaagtcagaaatgtgaagga

SEQ ID NO: 208886 - DNA, 120 bp, Artificial Sequence
  ENSG00000115415_7 (sequence is synthesized)
caaggttatgtgtatagagcatgaaatcaagagcctggaagatttacaagatgaatatgacttcaaatgcaaaaccttgcagaacagagaacacgagaccaatggtgtggcaaagagtga

SEQ ID NO: 208887 - DNA, 120 bp, Artificial Sequence
  ENSG00000115415_8 (sequence is synthesized)
tcagaaacaagaacagctgttactcaagaagatgtatttaatgcttgacaataagagaaaggaagtagttcacaaaataatagagttgctgaatgtcactgaacttacccagaatgccct

SEQ ID NO: 208888 - DNA, 120 bp, Artificial Sequence
  ENSG00000115415_9 (sequence is synthesized)
gattaatgatgaactagtggagtggaagcggagacagcagagcgcctgtattggggggccgcccaatgcttgcttggatcagctgcagaactggttcactatagttgcggagagtctgca

SEQ ID NO: 208889 - DNA, 120 bp, Artificial Sequence
  ENSG00000115415_10 (sequence is synthesized)
gcaagttcggcagcagcttaaaaagttggaggaattggaacagaaatacacctacgaacatgaccctatcacaaaaaacaaacaagtgttatgggaccgcaccttcagtcttttccagca

SEQ ID NO: 208890 - DNA, 120 bp, Artificial Sequence
  ENSG00000115415_11 (sequence is synthesized)
gctcattcagagctcgtttgtggtggaaagacagccctgcatgccaacgcaccctcagaggccgctggtcttgaagacaggggtccagttcactgtgaagttgagactgttggtgaaatt

SEQ ID NO: 208891 - DNA, 120 bp, Artificial Sequence
  ENSG00000115415_12 (sequence is synthesized)
gcaagagctgaattataatttgaaagtcaaagtcttatttgataaagatgtgaatgagagaaatacagtaaaaggatttaggaagttcaacattttgggcacgcacacaaaagtgatgaa

SEQ ID NO: 208892 - DNA, 120 bp, Artificial Sequence
  ENSG00000115415_13 (sequence is synthesized)
catggaggagtccaccaatggcagtctggcggctgaatttcggcacctgcaattgaaagaacagaaaaatgctggcaccagaacgaatgagggtcctctcatcgttactgaagagcttca

SEQ ID NO: 208893 - DNA, 120 bp, Artificial Sequence
  ENSG00000115415_14 (sequence is synthesized)
ctcccttagttttgaaacccaattgtgccagcctggtttggtaattgacctcgagacgacctctctgcccgttgtggtgatctccaacgtcagccagctcccgagcggttgggcctccat

SEQ ID NO: 208894 - DNA, 120 bp, Artificial Sequence
  ENSG00000115415_15 (sequence is synthesized)
cctttggtacaacatgctggtggcggaacccaggaatctgtccttcttcctgactccaccatgtgcacgatgggctcagctttcagaagtgctgagttggcagttttcttctgtcaccaa

SEQ ID NO: 208895 - DNA, 120 bp, Artificial Sequence
  ENSG00000115415_16 (sequence is synthesized)
aagaggtctcaatgtggaccagctgaacatgttgggagagaagcttcttggtcctaacgccagccccgatggtctcattccgtggacgaggttttgtaaggaaaatataaatgataaaaa

SEQ ID NO: 208896 - DNA, 120 bp, Artificial Sequence
  ENSG00000115415_17 (sequence is synthesized)
gtgccctgttgaaggaccagcagccggggaccttcctgctgcggttcagtgagagctcccgggaaggggccatcacattcacatgggtggagcggtcccagaacggaggcgaacctgact

SEQ ID NO: 208897 - DNA, 120 bp, Artificial Sequence
  ENSG00000115415_18 (sequence is synthesized)
tccatgcggttgaaccctacacgaagaaagaactttctgctgttactttccctgacatcattcgcaattacaaagtcatggctgctgagaatattcctgagaatcccctgaagtatctgt

SEQ ID NO: 208898 - DNA, 120 bp, Artificial Sequence
  ENSG00000115415_19 (sequence is synthesized)
atccaaatattgacaaagaccatgcctttggaaagtattactccaggccaaaggaagcaccagagccaatggaacttgatggccctaaaggaactggatatatcaagactgagttgattt

SEQ ID NO: 208899 - DNA, 120 bp, Artificial Sequence
  ENSG00000115415_20 (sequence is synthesized)
ctgtgtctgaagttcacccttctagacttcagaccacagacaacctgctccccatgtctcctgaggagtttgacgaggtgtctcggatagtgggctctgtagaattcgacagtatgatga

SEQ ID NO: 208900 - DNA, 120 bp, Artificial Sequence
  ENSG00000115415_21 (sequence is synthesized)
acacagtatagagcatgaatttttttcatcttctctggcgacagttttccttctcatctgtgattccctcctgctactctgttccttcacatcctgtgtttctagggaaatgaaagaaag

SEQ ID NO: 208901 - DNA, 120 bp, Artificial Sequence
  ENSG00000115415_22 (sequence is synthesized)
gccagcaaattcgctgcaacctgttgatagcaagtgaatttttctctaactcagaaacatcagttactctgaagggcatcatgcatcttactgaaggtaaaattgaaaggcattctctga

SEQ ID NO: 208902 - DNA, 120 bp, Artificial Sequence
  ENSG00000115415_23 (sequence is synthesized)
agagtgggtttcacaagtgaaaaacatccagatacacccaaagtatcaggacgagaatgagggtcctttgggaaaggagaagttaagcaacatctagcaaatgttatgcataaagtcagt

SEQ ID NO: 208903 - DNA, 120 bp, Artificial Sequence
  ENSG00000115415_24 (sequence is synthesized)
gcccaactgttataggttgttggataaatcagtggttatttagggaactgcttgacgtaggaacggtaaatttctgtgggagaattcttacatgttttctttgctttaagtgtaactggc

SEQ ID NO: 208904 - DNA, 120 bp, Artificial Sequence
  ENSG00000115415_25 (sequence is synthesized)
agttttccattggtttacctgtgaaatagttcaaagccaagtttatatacaattatatcagtcctctttcaaaggtagccatcatggatctggtagggggaaaatgtgtattttattaca

SEQ ID NO: 208905 - DNA, 120 bp, Artificial Sequence
  ENSG00000115415_26 (sequence is synthesized)
tctttcacattggctatttaaagacaaagacaaattctgtttcttgagaagagaatattagctttactgtttgttatggcttaatgacactagctaatatcaatagaaggatgtacattt

SEQ ID NO: 208906 - DNA, 120 bp, Artificial Sequence
  ENSG00000115415_27 (sequence is synthesized)
ccaaattcacaagttgtgtttgatatccaaagctgaatacattctgctttcatcttggtcacatacaattatttttacagttctcccaagggagttaggctattcacaaccactcattca

SEQ ID NO: 208907 - DNA, 120 bp, Artificial Sequence
  ENSG00000115415_28 (sequence is synthesized)
aaagttgaaattaaccatagatgtagataaactcagaaatttaattcatgtttcttaaatgggctactttgtcctttttgttattagggtggtatttagtctattagccacaaaattggg

SEQ ID NO: 208908 - DNA, 120 bp, Artificial Sequence
  ENSG00000115415_29 (sequence is synthesized)
aaaggagtagaaaaagcagtaactgacaacttgaataatacaccagagataatatgagaatcagatcatttcaaaactcatttcctatgtaactgcattgagaactgcatatgtttcgct

SEQ ID NO: 208909 - DNA, 120 bp, Artificial Sequence
  ENSG00000115415_30 (sequence is synthesized)
gatatatgtgtttttcacatttgcgaatggttccattctctctcctgtactttttccagacacttttttgagtggatgatgtttcgtgaagtatactgtatttttacctttttccttcct

SEQ ID NO: 208910 - DNA, 120 bp, Artificial Sequence
  ENSG00000115415_31 (sequence is synthesized)
tatcactgacacaaaaagtagattaagagatgggtttgacaaggttcttcccttttacatactgctgtctatgtggctgtatcttgtttttccactactgctaccacaactatattatca

SEQ ID NO: 208911 - DNA, 120 bp, Artificial Sequence
  ENSG00000115415_32 (sequence is synthesized)
tgcaaatgctgtattcttctttggtggagataaagatttcttgagttttgttttaaaattaaagctaaagtatctgtattgcattaaatataatatgcacacagtgctttccgtggcact

SEQ ID NO: 208912 - DNA, 120 bp, Artificial Sequence
  ENSG00000115415_33 (sequence is synthesized)
gcatacaatctgaggcctcctctctcagtttttatatagatggcgagaacctaagtttcagttgattttacaattgaaatgactaaaaaacaaagaagacaacattaaaacaatattgtt

SEQ ID NO: 208913 - DNA, 120 bp, Artificial Sequence
  ENSG00000115415_34 (sequence is synthesized)
tctaattgctgaggtttagctgtcagttctttttgccctttgggaattcggcatggtttcattttactgcactagccaagagactttacttttaagaagtattaaaattctaaaattcta

SEQ ID NO: 208914 - DNA, 120 bp, Artificial Sequence
  ENSG00000115415_35 (sequence is synthesized)
gtgcagttggacgccgggcgaggacgggccgtctgtgctgacccgcgaatagtgatcccagaggaagaacgcgtcctgagtattccaagtgcgagcagtgccacctgttctcggagatgg

SEQ ID NO: 208915 - DNA, 120 bp, Artificial Sequence
  ENSG00000115415_36 (sequence is synthesized)
cactgctcagcacgattgtccttgccagtcgtgctctggcagtgaagaggacttgtgaaatataattttcctctagaaggcactgcaccttcccatttaccgtcactttctcccgtttcc

SEQ ID NO: 208916 - DNA, 120 bp, Artificial Sequence
  ENSG00000115415_37 (sequence is synthesized)
tgttgaagatgcttgtattttacttttccattgtaattgctatcgccatcacagctgaacttgttgagatccccgtgttactgcctatcagcattttactactttaaaaaaaaaaaaaaa

SEQ ID NO: 208917 - DNA, 120 bp, Artificial Sequence
  ENSG00000115415_38 (sequence is synthesized)
aaactgcaccgcgcaaagccaggggcgtgggcgggcccgggctgctctacctgcgctcggaaagctagggctccaaagcgttcctgagcggtttttgaccgcgaatgtgatagtgctcat

SEQ ID NO: 208918 - DNA, 120 bp, Artificial Sequence
  ENSG00000115415_39 (sequence is synthesized)
gggcatcatgcatcttactgaagatccacggggtaggaaactgctcactcagcatcctccccatggaagctcaagcatgggaacagcttcgggcctggtgcagctaaggaacattggccg

SEQ ID NO: 208919 - DNA, 120 bp, Artificial Sequence
  ENSG00000115415_40 (sequence is synthesized)
tggtttcaccaaaggaggtgccatctaggtaatgggagggcagtggcaggagccactggcttagactggaagtgaaaatgaaagcacctggaggctgctggagtaaggtgccatcaggca

SEQ ID NO: 208920 - DNA, 120 bp, Artificial Sequence
  ENSG00000115415_41 (sequence is synthesized)
tgtaaagtttagaagcagcagagtgtgctcatagaaaaagaaaaaaaaaggaatttgctgtatgtgataacaactaacattcatgtacttgagctcatttcactaaacacagcttcagag

SEQ ID NO: 208921 - DNA, 120 bp, Artificial Sequence
  ENSG00000115415_42 (sequence is synthesized)
tgggagtttgagcacatagtcccaccattccatgtgtgtgaagtccctcttcatcgccgccagtcagctcatacagatagtgcgtttgggacatgaaattgcagatcttatacttacccc

SEQ ID NO: 208922 - DNA, 120 bp, Artificial Sequence
  ENSG00000115415_43 (sequence is synthesized)
aaatgagcccccgataggatttaataaaccaccacaaatgtttgtggttgtggttcactctctggaacatattgtggaaatgatggttttgaaaagacaatgccaattctttcctttgca

SEQ ID NO: 208923 - DNA, 120 bp, Artificial Sequence
  ENSG00000115415_44 (sequence is synthesized)
tcaggtttgttatctgcagatcaaggatgtgagtcaatgtaatctgcaacccgttcttggaaggaatcacatttcccacaggagtaagcatccacattctcttagggtcatcccagagta

SEQ ID NO: 208924 - DNA, 120 bp, Artificial Sequence
  ENSG00000115415_45 (sequence is synthesized)
gcagaccgagcctgaggacgcctatagaaactgccagaccccaacctctggttcaagggcagctacccaggctggctgagggtcacagcttaccagacaggacaagatctgagtcagtgc

SEQ ID NO: 208925 - DNA, 71 bp, Artificial Sequence
  ENSG00000115419_0 (sequence is synthesized)
tagcgcccgcatccgctgcgggagtccgagccggaaccacacccaagtagctgccctttcctcttctgtca

SEQ ID NO: 208926 - DNA, 120 bp, Artificial Sequence
  ENSG00000115419_1 (sequence is synthesized)
cggaaccacacccaagtagctgccctttcctcttctgtcatctcaccgccccaccacagaccgcgttccccgaggaaaccggccgcccacgcccggagcatcctcccctgttgagcgggc

SEQ ID NO: 208927 - DNA, 120 bp, Artificial Sequence
  ENSG00000115419_2 (sequence is synthesized)
gctgacggacccggcggcatgatgcggctgcgaggctcggggatgctgcgggacctgctcctgcggtcgcccgccggcgtgagcgcgactctgcggcgggcacagcccttggtcaccctg

SEQ ID NO: 208928 - DNA, 120 bp, Artificial Sequence
  ENSG00000115419_3 (sequence is synthesized)
cggctgccgccgcgcgactccacccgtggtggggcgggggcggctggccggcggagcccctcgcgcggggcctgtccagctctccttcggagatcttgcaggagctgggcaaggggagca

SEQ ID NO: 208929 - DNA, 120 bp, Artificial Sequence
  ENSG00000115419_4 (sequence is synthesized)
tctccttcggagatcttgcaggagctgggcaaggggagcacgcatccgcagcccggggtgtcgccacccgctgccccggcggcgcccggccccaaggacggccccggggagacggacgcg

SEQ ID NO: 208930 - DNA, 120 bp, Artificial Sequence
  ENSG00000115419_5 (sequence is synthesized)
tttggcaacagcgagggcaaagagctggtggcctcaggtgaaaataaaataaaacagggtctgttacctagcttggaagatttgctgttctatacaattgctgaaggacaagagaaaata

SEQ ID NO: 208931 - DNA, 120 bp, Artificial Sequence
  ENSG00000115419_6 (sequence is synthesized)
cctgttcataaatttattacagcactcaaatctacaggattgcgaacgtctgatcccaggttgaaagagtgtatggatatgttaagattaactcttcaaacaacatcagatggtgtcatg

SEQ ID NO: 208932 - DNA, 120 bp, Artificial Sequence
  ENSG00000115419_7 (sequence is synthesized)
ctagacaaagatctttttaaaaaatgtgttcagagcaacattgttttgttgacacaagcatttagaagaaagtttgtgattcctgactttatgtcttttacctcacacattgatgagtta

SEQ ID NO: 208933 - DNA, 120 bp, Artificial Sequence
  ENSG00000115419_8 (sequence is synthesized)
tatgaaagtgctaaaaagcagtctggaggaaaggttgcagattatattcctcaactggccaaattcagtcccgatttgtggggtgtgtctgtttgtacagtagatggacagaggcattct

SEQ ID NO: 208934 - DNA, 120 bp, Artificial Sequence
  ENSG00000115419_9 (sequence is synthesized)
actggagataccaaagttcccttctgtcttcagtcctgtgtaaaacctttgaaatatgccattgctgttaatgatcttggaactgaatatgtgcatcgatatgttggaaaagagccgagt

SEQ ID NO: 208935 - DNA, 120 bp, Artificial Sequence
  ENSG00000115419_10 (sequence is synthesized)
ggactaagattcaacaaactatttttgaatgaagatgataaaccacataatcctatggtaaatgctggagcaattgttgtgacttcactaataaagcaaggagtaaataatgctgaaaaa

SEQ ID NO: 208936 - DNA, 120 bp, Artificial Sequence
  ENSG00000115419_11 (sequence is synthesized)
tttgactatgtcatgcagtttttgaataagatggctggtaatgaatatgttggattcagtaatgcaacgtttcagtctgaaagagaaagtggagatcgaaattttgcaataggatattac

SEQ ID NO: 208937 - DNA, 120 bp, Artificial Sequence
  ENSG00000115419_12 (sequence is synthesized)
ttaaaagaaaagaagtgttttccagaaggcacagacatggttggtatattagacttctacttccagctgtgctccattgaagtgacttgtgaatcagccagtgtgatggctgcgacactg

SEQ ID NO: 208938 - DNA, 120 bp, Artificial Sequence
  ENSG00000115419_13 (sequence is synthesized)
gctaatggtggtttctgcccaattactggtgaaagagtactgagccctgaagcagttcgaaatacattgagtttgatgcattcctgtggcatgtatgacttctcagggcagtttgctttc

SEQ ID NO: 208939 - DNA, 120 bp, Artificial Sequence
  ENSG00000115419_14 (sequence is synthesized)
catgttggtcttcctgcaaaatctggagttgctgggggcattcttttagttgtccccaatgttatgggtatgatgtgctggtctcctcctctggataagatgggcaacagtgttaaggga

SEQ ID NO: 208940 - DNA, 120 bp, Artificial Sequence
  ENSG00000115419_15 (sequence is synthesized)
attcacttttgtcacgatcttgtttctctgtgtaatttccataactatgataatttgagacactttgcaaaaaaacttgatcctcgaagagaaggtggtgatcaaagggtaaagtcagtg

SEQ ID NO: 208941 - DNA, 120 bp, Artificial Sequence
  ENSG00000115419_16 (sequence is synthesized)
ataaatcttttgtttgctgcatatactggagatgtgtctgcacttcgaagatttgctttgtcagctatggacatggaacagcgggactatgattctagaacagcactccatgtagctgct

SEQ ID NO: 208942 - DNA, 120 bp, Artificial Sequence
  ENSG00000115419_17 (sequence is synthesized)
gcagagggtcatgttgaagttgttaaatttttgctggaagcctgcaaagtaaaccctttccccaaggacaggtggaataacactcccatggatgaagcactgcactttggacaccatgat

SEQ ID NO: 208943 - DNA, 120 bp, Artificial Sequence
  ENSG00000115419_18 (sequence is synthesized)
gtatttaaaattctccaagaataccaagtccagtacacacctcaaggagattctgacaacgggaaggaaaatcaaaccgtccataagaatcttgatggattgttgtaatggtctcaaatc

SEQ ID NO: 208944 - DNA, 120 bp, Artificial Sequence
  ENSG00000115419_19 (sequence is synthesized)
ccaagatttaaatcacttacctatttaattgtggaaaatgattatgaagaacatgtgtatttctatctggtagtgatgtatattttacatttgtcatttcagtgttactggagttttctt

SEQ ID NO: 208945 - DNA, 120 bp, Artificial Sequence
  ENSG00000115419_20 (sequence is synthesized)
gaaaaaatagaaataaaacaatctccctccataatgtgagcaatattacctcgtgcattgtataatttgatgtaaaagaaatagttaccaatgctagcttgtgtggtcttccatgattta

SEQ ID NO: 208946 - DNA, 120 bp, Artificial Sequence
  ENSG00000115419_21 (sequence is synthesized)
tttgtgttttgtgaattttcaatttatggtgatgatctgctgatatgcatttataaagtaagctctgttgtacagtctgtccaaatgggtcaaggttgcctttagaagcaaatagtgtga

SEQ ID NO: 208947 - DNA, 120 bp, Artificial Sequence
  ENSG00000115419_22 (sequence is synthesized)
ttttcaagacttcaaatacaaatttagtttaagtgtttgaacaactatatgcacttacggttgtgtgtttaaaatgtctctctcaccccctagcttcatgatgtgactcttaaaaaacta

SEQ ID NO: 208948 - DNA, 120 bp, Artificial Sequence
  ENSG00000115419_23 (sequence is synthesized)
taatagttaacaactgttagtaagatagaccaattctgattagactttatcagggaatctgtttaagatatgtttggtgaccaaaacgtatgtgtgaatgtagttataatgcttttgaaa

SEQ ID NO: 208949 - DNA, 120 bp, Artificial Sequence
  ENSG00000115419_24 (sequence is synthesized)
aattttcctttttctatatccccttagtccagcctctcttctcagacatttagctatctgcctctttcctttagctgggaaagtgagagctggcatactatgcagtttttatgttttcca

SEQ ID NO: 208950 - DNA, 120 bp, Artificial Sequence
  ENSG00000115419_25 (sequence is synthesized)
tagtaagtcagaaaatgcctcctatttctggcatcagaactttgccatttgtctacagaagacgaaccagagacaaaattactaagtataaattagtcaagtttatcagtctaaaaaacg

SEQ ID NO: 208951 - DNA, 120 bp, Artificial Sequence
  ENSG00000115419_26 (sequence is synthesized)
aagggatgtgcaactgcagctctttaagaagttttttttttttagcttctagggtaaagataaattcagaaatgctctaagctaccaaagttattctgaaagtatgggaactgctacaac

SEQ ID NO: 208952 - DNA, 120 bp, Artificial Sequence
  ENSG00000115419_27 (sequence is synthesized)
taacaaacatttgtttccaagcctgtcattaagagtctgcatcaagagatttgtcctccttgggggaccactggatcattccagatttcttgtgatttttctattgtgtaattcttggtg

SEQ ID NO: 208953 - DNA, 120 bp, Artificial Sequence
  ENSG00000115419_28 (sequence is synthesized)
ggctctgtagtttaataataagaaaaaggccatttcattttaaattgtgacctataattctttgtcttgggttggtaattcaggattcatttggaaagtgggtaaaaggggcttcaaaaa

SEQ ID NO: 208954 - DNA, 120 bp, Artificial Sequence
  ENSG00000115419_29 (sequence is synthesized)
acggatagaacaggattttctaggagttacacatacattttatcctgtcatacctcgagataaagtggcatgttagtgaggagttctgatattaagcacacacacacatgcacacaaatg

SEQ ID NO: 208955 - DNA, 120 bp, Artificial Sequence
  ENSG00000115419_30 (sequence is synthesized)
gacttctctgaagctgtgtttagtgaaatgagctcaagtacatgaatgttagttgttatcacatacagcaaattcctttttttttctttttctatgagcacactctgctgcttctaaact

SEQ ID NO: 208956 - DNA, 120 bp, Artificial Sequence
  ENSG00000115419_31 (sequence is synthesized)
ttacatgcctgatggcaccttactccagcagcctccaggtgctttcattttcacttccagtctaagccagtggctcctgccactgccctcccattacctagatggcacctcctttggtga

SEQ ID NO: 208957 - DNA, 120 bp, Artificial Sequence
  ENSG00000115419_32 (sequence is synthesized)
aaccacggccaatgttccttagctgcaccaggcccgaagctgttcccatgcttgagcttccatggggaggatgctgagtgagcagtttcctaccccgtggatctagcaagccatggagac

SEQ ID NO: 208958 - DNA, 120 bp, Artificial Sequence
  ENSG00000115419_33 (sequence is synthesized)
aggtagcatttgtaagatgctgcacaggagcagcattatccccaaagatattacagggtagacacgttttaactgaaatcaatcaagataactttattcaaagagcagcccgctttgtgt

SEQ ID NO: 208959 - DNA, 120 bp, Artificial Sequence
  ENSG00000115419_34 (sequence is synthesized)
gactaaaatgaaacaagacagttgaattgtgtgacttgaagattaccaatgattttgaggcttttctataataaaaagaggttctaaccattatttgggaacaaagagagttttcatctt

SEQ ID NO: 208960 - DNA, 120 bp, Artificial Sequence
  ENSG00000115419_35 (sequence is synthesized)
ttttcagatcaaaaccattctgtaaaatctttgttgtttaattaaatgtgccgttatttacccctgatgttatttatgactatgtgccgattcctgctcgggctgtttgctgttggctgg

SEQ ID NO: 208961 - DNA, 120 bp, Artificial Sequence
  ENSG00000115419_36 (sequence is synthesized)
taataatatatttgatttaaatgctgttgactgtgctattaactgctgccgtcagtaaactccaaagatctttttgttttggctttagtatcatatgtgctttttctgtatcctgagcgc

SEQ ID NO: 208962 - DNA, 120 bp, Artificial Sequence
  ENSG00000115419_37 (sequence is synthesized)
tctatatgatcatgttaatttaaagctttatacacattgttgtttttgctggtctcatctttggtaatatgctataccccactgctgcccgacactgccctttagctgcagagctggatt

SEQ ID NO: 208963 - DNA, 120 bp, Artificial Sequence
  ENSG00000115419_38 (sequence is synthesized)
agctgttgaccatttgatgctgttgtctgtctggcagggactgaatgacctgatgtcagatttagattcttcctggggattacacagctatgaatgtatttgcttctaaaacctcccaaa

SEQ ID NO: 208964 - DNA, 120 bp, Artificial Sequence
  ENSG00000115419_39 (sequence is synthesized)
gtgaatctaatcttaaaactacaagttgtaagtattctgaaattgggaaacatttattttaaatgcaatcaggtagtgttgctttttacagcataataaatatatgtatcaaaaaaaaaa

SEQ ID NO: 208965 - DNA, 120 bp, Artificial Sequence
  ENSG00000115419_40 (sequence is synthesized)
aagaagtgttttccagaaggcacagacatggttggtatattagacttctacttccaggtaatctaattatgtaaatcgtatatataaatggatgtgtcggctgggcacggtggctcacgc

SEQ ID NO: 208966 - DNA, 120 bp, Artificial Sequence
  ENSG00000115419_41 (sequence is synthesized)
ggaccattggactatgaaagtctccaacaagaacttgctttaaaagagacagtatggaaaaaagtgtcacctgagtcaaatgaggacatctctacaactgtagtatatagaatggaaagt

SEQ ID NO: 208967 - DNA, 120 bp, Artificial Sequence
  ENSG00000115419_42 (sequence is synthesized)
ctgggagagaaaagctaaagaaatgggttctagtttcagaatgtttcttcatttaatctttcaaacatctttagcttttttttgcaagttataaatatttatttgaggtattttttgttc

SEQ ID NO: 208968 - DNA, 120 bp, Artificial Sequence
  ENSG00000115419_43 (sequence is synthesized)
tcaatcttgggtgctggagccataaagcttttttttccttttaatctttgtataaaggcagtagattaagaagtgcatttgttggtctttaaaaagtatttacaagtacataaatttgct

SEQ ID NO: 208969 - DNA, 120 bp, Artificial Sequence
  ENSG00000115419_44 (sequence is synthesized)
atttaagcaaatttgaatatcacatgggataataacaaatcttagtgtttagaggctggcacttcctagtctagttctgccattaaaagactgagtatctttggccaaatcagggtaaat

SEQ ID NO: 208970 - DNA, 120 bp, Artificial Sequence
  ENSG00000115419_45 (sequence is synthesized)
cttaaaagtgggtaggacttcggtcaactaaaatcttcagaatgtcctcaagtttatattaaagtaatctctttggaagaaatatttcagatctgtatgaaataccaaataaaatagatt

SEQ ID NO: 208971 - DNA, 120 bp, Artificial Sequence
  ENSG00000115419_46 (sequence is synthesized)
gtaattaaaatgttaactatgtggtcagataatcccattttacaatagtaacagaaaattgtaattcttagttctaaaattcacaaattaaactcataagttttgttgcattttgttttt

SEQ ID NO: 208972 - DNA, 120 bp, Artificial Sequence
  ENSG00000115419_47 (sequence is synthesized)
tcttttccatttttaaaactaatgtgatgtctttagtggcaatagaaggtacttctatgctaaatacaaaactaaaaaggcaaaataatgaaccccaaattattttatttaaaatagcag

SEQ ID NO: 208973 - DNA, 120 bp, Artificial Sequence
  ENSG00000115419_48 (sequence is synthesized)
tggattataaaattagcttgtgtttacatttatgccatttttggtgatagattggctttacattttaaaaaatttatttaaaaatttatcaaatgctttaaaatatgactcctacttttt

SEQ ID NO: 208974 - DNA, 120 bp, Artificial Sequence
  ENSG00000115419_49 (sequence is synthesized)
ttattttgcaactcctctgttctgtcagagttgttatatacaggagtgtcttatgttactaaaacattccagccaaagaatttcagatgtgagataatgatgtttcatcaataaaaagct

SEQ ID NO: 208975 - DNA, 120 bp, Artificial Sequence
  ENSG00000115419_50 (sequence is synthesized)
ataatggttagttactcagaaggagaaacagtgagtgtcttcaagtgaattgttcacctaaacaattttattttcatattatccacataactttttctatgttatatttaaatatgaatg

SEQ ID NO: 208976 - DNA, 120 bp, Artificial Sequence
  ENSG00000115419_51 (sequence is synthesized)
aatggcaaattttggtttttagcttttacattttattatcttaattttataaatgctaatatttcttttgtgataagttatagcatctcataaagtttgttctatttgaagttttttaga

SEQ ID NO: 208977 - DNA, 120 bp, Artificial Sequence
  ENSG00000115419_52 (sequence is synthesized)
ttgagaaatgaatttagtctgcaggtagtaagtatgctactaaaatacgttagatctaaatccttttatttggtataaaaatgcaatattgagaatcaaaacttgtttttaagagaacta

SEQ ID NO: 208978 - DNA, 120 bp, Artificial Sequence
  ENSG00000115419_53 (sequence is synthesized)
tagattctacacaacctgatttcaagtaattattcatagtatttatagttgtcttggcaaagtgattgtaaaattctgtaggacctattcacacttcttccttcttccatatacttctct

SEQ ID NO: 208979 - DNA, 120 bp, Artificial Sequence
  ENSG00000115419_54 (sequence is synthesized)
ggttttccccatagttcccctataatttcaagtttgttgaaacctgttaattttagtgggggattagaagaaaaacttggtggtttcttagcatgatggtgtatgtatgtggtaatggaa

SEQ ID NO: 208980 - DNA, 120 bp, Artificial Sequence
  ENSG00000115419_55 (sequence is synthesized)
agtctgtaaaagtaaatatagtgtagcaaaaaagatttcactgagtattttagatactagtgcaaataaagatagaaaatcttgatcataatgtcttaagtttgggaactgtgatattaa

SEQ ID NO: 208981 - DNA, 120 bp, Artificial Sequence
  ENSG00000115419_56 (sequence is synthesized)
gaaaagaaattcccttctagaggtgctggccaaaaagccttttgggctaacttaagtattaaatttatatatttaaataattatattttaagttgtagaggattttcccaaggattttat

SEQ ID NO: 208982 - DNA, 120 bp, Artificial Sequence
  ENSG00000115419_57 (sequence is synthesized)
gcttacttgaatgttctttgaatgttcagatgcatatcctaactggatgcttctcaaggccttactgcatatttgtgttgcatatttatgttagttgcaccagggccatttgtagtttgg

SEQ ID NO: 208983 - DNA, 120 bp, Artificial Sequence
  ENSG00000115419_58 (sequence is synthesized)
gcaaccgaatgccttaattggaaaaaaggcattgtggtttcccctatgatctaaattgttacattttaccatttcattccgaagttggttttactttattaaatgaagatttagttttca

SEQ ID NO: 208984 - DNA, 120 bp, Artificial Sequence
  ENSG00000115419_59 (sequence is synthesized)
tatcgtatacatagctgtatagatttcaaaattaggttgttaatttgtgtcacttactatttttgtgttggtaatgctttaaatgcatacttaaaaatgaagtactgttatctaagctac

SEQ ID NO: 208985 - DNA, 120 bp, Artificial Sequence
  ENSG00000115419_60 (sequence is synthesized)
tgtgtttagaaaatgttaagaatgagcagaaatttttatagaaaagtataaacggaagaagagataagatactgcgaataggccctcaaacttaaaaaagaaaaaactttgccagtttta

SEQ ID NO: 208986 - DNA, 120 bp, Artificial Sequence
  ENSG00000115419_61 (sequence is synthesized)
aggacatattttgattctttcagtattcttaacacctttttaaacaaagttcttgatagtacccactattattgggtttgttttatgccattattgattcttgatattcaagcatttaca

SEQ ID NO: 208987 - DNA, 120 bp, Artificial Sequence
  ENSG00000115419_62 (sequence is synthesized)
atgtagcatatttgattttcttttttctttctttttttggcatcattaacatttcatttgaaatgcatattgttcttgaagtactttgtttttagcataaatgttgtgcattttatctta

SEQ ID NO: 208988 - DNA, 120 bp, Artificial Sequence
  ENSG00000115419_63 (sequence is synthesized)
gtgtttggatgaaaacatttgtgttgtttagctttcatttgctttgtatatttaataatgtacctttattttccagtatgcctacattttgtattgcacaataaatttattttaagctga

SEQ ID NO: 208989 - DNA, 120 bp, Artificial Sequence
  ENSG00000115419_64 (sequence is synthesized)
cctttaatggtgatttgctatgctatacggtgattctgcttttaaaacaaaattgcatctttgaaggccactgcttcctgtgtaatggaaaaaggggatttataaacatcatttgtttga

SEQ ID NO: 208990 - DNA, 120 bp, Artificial Sequence
  ENSG00000115419_65 (sequence is synthesized)
aatttccataactatgataatttgagacactttgcaaaaaaacttgatcctcgaagagaaggtggtgatcaaaggcttggacctttcttcactcaagtgcactaataaattatgtatgtt

SEQ ID NO: 208991 - DNA, 120 bp, Artificial Sequence
  ENSG00000115419_66 (sequence is synthesized)
gaatgaagatggtaagaattacataaacattggttgaaaaaagaaatgtctcattttcctatgtaaatctaagtcgttttaaacattttttgattaaaattaaaagtatttgtcatgtga

SEQ ID NO: 208992 - DNA, 120 bp, Artificial Sequence
  ENSG00000115419_67 (sequence is synthesized)
tgtttaatcttattttctctggcaagaaactagtctgaactggttcttttaaaaatgcagtttgaactttgcttctaaagctgtatattaatttttgagagagaggcttgttttcaaggt

SEQ ID NO: 208993 - DNA, 120 bp, Artificial Sequence
  ENSG00000115419_68 (sequence is synthesized)
tcccataatattttaaagtacaatgttttgggttttttgagggtaaagtaaaagaaaatatgttttaaaaactttagttgtcaaattattttattttaagcctattttagaaattagaga

SEQ ID NO: 208994 - DNA, 120 bp, Artificial Sequence
  ENSG00000115419_69 (sequence is synthesized)
aaaaatcaataataataaatatatacagtattattgaaatatagtcttaaaggtcgtctgacatgtagattctgactgacaatatttctcttattatgttttcaaatttttgtcatgctc

SEQ ID NO: 208995 - DNA, 120 bp, Artificial Sequence
  ENSG00000115419_70 (sequence is synthesized)
tcatgctcatttcaaggtaatcagtgaaagaaaaagaaagaaacaatgagaaacttgtccagaaagtgggtaatagtgacactaagatgccatattcatgttcaagtgttgggtagaagt

SEQ ID NO: 208996 - DNA, 120 bp, Artificial Sequence
  ENSG00000115419_71 (sequence is synthesized)
ttggagattgcattcagtttgagtagagcacatcctttgtcctgtcattgcttatattgatccccaattcatctgcatgacttgcacgctttctcagcatggtctctagttcttttccac

SEQ ID NO: 208997 - DNA, 120 bp, Artificial Sequence
  ENSG00000115419_72 (sequence is synthesized)
aaggtgatttaggtgacatcataaaatgagagggcttcagacagacctgtgttcctcacatttacatacctgcattgtctgctcctctcctctcttcagacatattgatacataggcttt

SEQ ID NO: 208998 - DNA, 120 bp, Artificial Sequence
  ENSG00000115419_73 (sequence is synthesized)
tggctattttcattttcttcaaaacagtaaagaactaaaggcaactttggcgattaaagccttgatttggttgaatgagaatttttactttgatgttcctgtatttgcatatatttatta

SEQ ID NO: 208999 - DNA, 120 bp, Artificial Sequence
  ENSG00000115419_74 (sequence is synthesized)
tttatcttcattaatgtgtttctattagtttgattacttaaagatttaatggacatgtgtgtaatggatcccaaagaatcaaatagtattttaaactactactatttaagtagaaactag

SEQ ID NO: 209000 - DNA, 120 bp, Artificial Sequence
  ENSG00000115419_75 (sequence is synthesized)
tataaaactgtaaatactactataagacattggctttttccagacatggatccaaaaaatttctgcatctactttgaaagtttgttatgtatggttgtatttacttttgttttatcttct

SEQ ID NO: 209001 - DNA, 120 bp, Artificial Sequence
  ENSG00000115421_0 (sequence is synthesized)
attggcgtcggccgcgctgtattgtcataaatagagccggttttgtggtgttttcactactcggttggatgcctcagccatagtaagtgggaaagtgagcgagcaagcgagctactagcg

SEQ ID NO: 209002 - DNA, 120 bp, Artificial Sequence
  ENSG00000115421_1 (sequence is synthesized)
accggaggaaagtgaacagggggagaagggaacagcaagaacaggactccagagcgataaacactcgctggagagggagacgcaggaagcgatgaaagagatgtctgcaaacaccgtgct

SEQ ID NO: 209003 - DNA, 120 bp, Artificial Sequence
  ENSG00000115421_2 (sequence is synthesized)
ggacagccagcgtcaacaaaagcattatggaattacctccccaattagtttggcatctcctaaagaaattgatcatatttacacacagaaattaattgacgccatgaaaccatttggagt

SEQ ID NO: 209004 - DNA, 120 bp, Artificial Sequence
  ENSG00000115421_3 (sequence is synthesized)
gtttgaagatgaggaagaattgaaccacaggctggtggttcttggtaaattgaacaatttagtaaaagaatggatttctgatgtcagcgagagtaagaacctcccaccttctgttgtggc

SEQ ID NO: 209005 - DNA, 120 bp, Artificial Sequence
  ENSG00000115421_4 (sequence is synthesized)
tactgttggtggtaaaattttcacatttggatcctataggcttggagtacacaccaaaggagctgacattgatgcactttgtgtagctccaagacatgtggaaagatctgatttttttca

SEQ ID NO: 209006 - DNA, 120 bp, Artificial Sequence
  ENSG00000115421_5 (sequence is synthesized)
gtctttttttgaaaaattgaaacatcaagatggcattagaaacttaagagctgtagaagatgcctttgtacctgttataaaatttgaatttgatggtattgaaattgatctagtctttgc

SEQ ID NO: 209007 - DNA, 120 bp, Artificial Sequence
  ENSG00000115421_6 (sequence is synthesized)
aagactggcaatacaaaccatatcagataatttagatctaagagacgactctcgcctgagaagccttgatataaggtgtattcgcagcttaaatggttgtagagttactgatgaaatttt

SEQ ID NO: 209008 - DNA, 120 bp, Artificial Sequence
  ENSG00000115421_7 (sequence is synthesized)
gcatttagtgccaaataaagaaacttttagactcaccctaagagctgtcaaattatgggcaaaacgacgtggtatttattccaacatgctaggattccttggtggtgtctcctgggcaat

SEQ ID NO: 209009 - DNA, 120 bp, Artificial Sequence
  ENSG00000115421_8 (sequence is synthesized)
gctagttgcaagaacttgccaattgtatccaaatgcagcagcatctactttagttcataagttctttttagttttttccaagtgggaatggccaaatcctgtgctgctgaagcaaccaga

SEQ ID NO: 209010 - DNA, 120 bp, Artificial Sequence
  ENSG00000115421_9 (sequence is synthesized)
agaaagcaatttgaatttgcctgtctgggatcctcgggtaaatccatcagataggtatcatctcatgcccataatcacccctgcctacccacaacagaattctacgtataatgtgtccac

SEQ ID NO: 209011 - DNA, 120 bp, Artificial Sequence
  ENSG00000115421_10 (sequence is synthesized)
atcaactcgaacagtaatggtagaagaatttaaacaaggtcttgcagtcacagatgaaattcttcaaggaaagtcagattggtccaaactacttgagccaccgaatttctttcaaaagta

SEQ ID NO: 209012 - DNA, 120 bp, Artificial Sequence
  ENSG00000115421_11 (sequence is synthesized)
tagacattatatagtattgactgccagcgcatcaacagaagaaaaccatctagagtgggttggattagtagaatctaaaatccgtgtacttgttggaaacttggaacggaatgaatttat

SEQ ID NO: 209013 - DNA, 120 bp, Artificial Sequence
  ENSG00000115421_12 (sequence is synthesized)
tactcttgcccatgtgaatccccagtcattcccagggaataaggaacatcataaagacaacaattacgtatcaatgtggttccttgggataatttttcggagagtagaaaatgcagaaag

SEQ ID NO: 209014 - DNA, 120 bp, Artificial Sequence
  ENSG00000115421_13 (sequence is synthesized)
tgtcaacatagacttgacatatgatatacagtcatttactgatacagtgtacagacaggcaaacaatataaatatgctaaaggagggaatgaaaattgaagcaactcatgtaaagaaaaa

SEQ ID NO: 209015 - DNA, 120 bp, Artificial Sequence
  ENSG00000115421_14 (sequence is synthesized)
acaacttcaccactaccttcctgcagaaattcttcaaaagaagaaaaagcaaagtctctctgatgtcaatcgaagctcgggcggacttcaatccaaaagattgtctctggatagcagttg

SEQ ID NO: 209016 - DNA, 120 bp, Artificial Sequence
  ENSG00000115421_15 (sequence is synthesized)
tctggatagctccagagacactgataatggaacaccttttaattctccagcgtccaagtctgatagcccttctgtaggagaaacagaaaggaatagtgctgagcctgctgctgtaattgt

SEQ ID NO: 209017 - DNA, 120 bp, Artificial Sequence
  ENSG00000115421_16 (sequence is synthesized)
ggagaagccactgagtgtaccaccagcccaaggactttccattccagtgattggcgcaaaagttgactctacagtaaaaactgtatcaccccccactgtgtgtaccattcctaccgtagt

SEQ ID NO: 209018 - DNA, 120 bp, Artificial Sequence
  ENSG00000115421_17 (sequence is synthesized)
aggacgaaatgtcattcctagaatcacaacacctcacaaccctgcccagggacaaccgcatctgaatggaatgtcaaatataactaagactgttacacctaagagatcccattccccatc

SEQ ID NO: 209019 - DNA, 120 bp, Artificial Sequence
  ENSG00000115421_18 (sequence is synthesized)
catagatgggactcctaagaggttgaaagacgtagaaaagtttattcgacttgaatcaacatttaaggacccccgcactgctgaagaaagaaaaagaaaatcagtggatgccattggagg

SEQ ID NO: 209020 - DNA, 120 bp, Artificial Sequence
  ENSG00000115421_19 (sequence is synthesized)
agaatctatgcctattccaactattgatacatcacgcaaaaagagactacccagtaaagaactaccagattcatcatctccagttccagcaaacaacatccgtgtcatcaaaaattccat

SEQ ID NO: 209021 - DNA, 120 bp, Artificial Sequence
  ENSG00000115421_20 (sequence is synthesized)
tcgactgacccttaatcggtaaaagcagtgcctcctcacttaagtgaacaagcaatcatttagtggcatagatgcagccacttgttttttaaatagaagtggctgtcatacgtgaaataa

SEQ ID NO: 209022 - DNA, 120 bp, Artificial Sequence
  ENSG00000115421_21 (sequence is synthesized)
ggtgaaagtgacagccttcagtctaataaccttgaagtggtttttgaactgtcaaactttgacctgtagatgctgtagcattctctcactgattgctacatacacttctctgaggatcac

SEQ ID NO: 209023 - DNA, 120 bp, Artificial Sequence
  ENSG00000115421_22 (sequence is synthesized)
ctgctgtcaaattgccatctacagtattacagctttgcatttgggggttttactgccttaactttcaatgcttgttatgggaaccagttcttagccacttggacactgataacaagtcct

SEQ ID NO: 209024 - DNA, 120 bp, Artificial Sequence
  ENSG00000115421_23 (sequence is synthesized)
tgttttgttttttgtgtttttctttttttgtcttatgttgtaatcattgtatagagctaaaaaaattgaaaacaaacaaaaaaattgtcttgtattttccaaatgttaatacatttactt

SEQ ID NO: 209025 - DNA, 120 bp, Artificial Sequence
  ENSG00000115421_24 (sequence is synthesized)
atacatttactttagcattgaagccactttgaaacctgagataaatgaatgtgaggtatcttttctgctttcctcatttgtgtagatgtactgtctgttctgttgatttaaattattttt

SEQ ID NO: 209026 - DNA, 120 bp, Artificial Sequence
  ENSG00000115421_25 (sequence is synthesized)
ttccagattggcacatgaaatatttaaacttttttgtgtgcctttctgtccaaatgttgcatagttaccagggaagattagtccagtgattacataagagttgggcaccataaattctct

SEQ ID NO: 209027 - DNA, 120 bp, Artificial Sequence
  ENSG00000115421_26 (sequence is synthesized)
atattttgcctcccatggaggcctttgaaatgcatctttattaaaaatcaaaatataaccaggatactgaaagtcagtatatgaatggtaaaattgttacatatcctatttcatgccatt

SEQ ID NO: 209028 - DNA, 120 bp, Artificial Sequence
  ENSG00000115421_27 (sequence is synthesized)
cttgttagttgactggtattttttactgaggagcaactcattccagcatcaacaataagataacctttaagtatggcacacttgtatttttgaggtgtaaaattaacttggcatgataat

SEQ ID NO: 209029 - DNA, 120 bp, Artificial Sequence
  ENSG00000115421_28 (sequence is synthesized)
tcctgatcattatttaccccacaacttcaaatagtttcttcacggactaggcatgcagaaataagcagtggattttattgaaacctaaaggcattttgaatgacattgttaccaaccatt

SEQ ID NO: 209030 - DNA, 120 bp, Artificial Sequence
  ENSG00000115421_29 (sequence is synthesized)
aattggctcaggacctttgtaatttttatttaactatatgagttgtctttttttacgctgcttttttcaatgcatttcttaatattttttaagtttcatgaatgcatgctcagtttatta

SEQ ID NO: 209031 - DNA, 120 bp, Artificial Sequence
  ENSG00000115421_30 (sequence is synthesized)
atgttgattcagtgttttgtaaatgaagtcgtatgtattttcagagtatttttgtatgtactgtaagataccatcttttcaaagagaaacgtttaaaacctttattgtctctccttagtc

SEQ ID NO: 209032 - DNA, 120 bp, Artificial Sequence
  ENSG00000115421_31 (sequence is synthesized)
taattttttaaatatggattatgcttgaattactatatttaaaatgaaaatgtatagattacacagccaggaatgctagtatctaccaccttctttagatttcactcagcatttagtagg

SEQ ID NO: 209033 - DNA, 120 bp, Artificial Sequence
  ENSG00000115421_32 (sequence is synthesized)
tccagtaggaaaaacccaaaatggtacattgagtagtgtggggaagacacctcgtgtattataggactcacgggatgccatctagcaagtggagaaatagcagtccattttctcttgcaa

SEQ ID NO: 209034 - DNA, 120 bp, Artificial Sequence
  ENSG00000115421_33 (sequence is synthesized)
gccctttaccattgagttgaaattcttgaattgccagagagccgtatcctccaggtcccactcctgttcattgccccttaggtctccaaaatgtaaattctaatgtttaccttgtaccat

SEQ ID NO: 209035 - DNA, 120 bp, Artificial Sequence
  ENSG00000115421_34 (sequence is synthesized)
ggaaaacatgaaaagagtcttagaagtaaagaacaacaaggaaaaaaatgtttgttctattattccctttttatatagcagcaaaagataagaataaaatcacataaccaagttgaagct

SEQ ID NO: 209036 - DNA, 120 bp, Artificial Sequence
  ENSG00000115421_35 (sequence is synthesized)
tccttggcaaagctgttgtcttagctgactctttccctttattcagatgttttgggattgttctacaaatagtctatttgagcaaaaatgaatgattatgaaagaaccgaagaattatca

SEQ ID NO: 209037 - DNA, 120 bp, Artificial Sequence
  ENSG00000115421_36 (sequence is synthesized)
cctgacttcaacttttgaaagctttagtaaggaatttgattaaattttatatactggatgtgtatgcatttctgcatttcatatcttttgcttttaaatcagccttcaaagtatctttag

SEQ ID NO: 209038 - DNA, 120 bp, Artificial Sequence
  ENSG00000115421_37 (sequence is synthesized)
gaattccttctgtatccatgtttaccccattatgtaaatagatctttggagtgactagtggagtttttctttaataaggaagcaacaagtctaaccttgtactataggataggcatttat

SEQ ID NO: 209039 - DNA, 120 bp, Artificial Sequence
  ENSG00000115421_38 (sequence is synthesized)
tttagattaaggagcccattcaacatgtcaatgagtcaacattagagtcctcaaagatagcattcttcaacctgtttggtaactgaggagttgataaaatacttttgagatggtggggtt

SEQ ID NO: 209040 - DNA, 120 bp, Artificial Sequence
  ENSG00000115421_39 (sequence is synthesized)
tgtcagaaataaaatattttctatcctgaccagtaggtagaactttgagtacatttcgttaacttggtgggaagcttccattgtactagttccaagtaaaaaaggagaaagtatgatctg

SEQ ID NO: 209041 - DNA, 75 bp, Artificial Sequence
  ENSG00000115421_40 (sequence is synthesized)
ttgtactagttccaagtaaaaaaggagaaagtatgatctgggattttgtgttatgatgagaggcactaagtacat

SEQ ID NO: 209042 - DNA, 120 bp, Artificial Sequence
  ENSG00000115421_41 (sequence is synthesized)
gtttgttttcaagtgtgaaaaaatacctagaagtatattttatgaagtcaaataatctgttcttcagtatatagacacatgttcattttcacaagggcattacattttaatttgctcatt

SEQ ID NO: 209043 - DNA, 120 bp, Artificial Sequence
  ENSG00000115421_42 (sequence is synthesized)
tttcagtagctctggagaatatgtatgaaaggaaaacaattacctgctagcttaaaccttagggacttaaccaattcaagatagaggtacatggcttaaaactttgtaaaactgggacag

SEQ ID NO: 209044 - DNA, 90 bp, Artificial Sequence
  ENSG00000115421_43 (sequence is synthesized)
aaactgggacaggagaagaagacaagagtttcactctgtcacccagtctggagcacagtggcatgatctcacctcactgcaacctctgcc

SEQ ID NO: 209045 - DNA, 85 bp, Artificial Sequence
  ENSG00000115421_44 (sequence is synthesized)
agcctcccaagtagctggaattacaggcctgtgccatgcccagctaattttcgtattttcagtagaaatgggacacctcaagtga

SEQ ID NO: 209046 - DNA, 89 bp, Artificial Sequence
  ENSG00000115421_45 (sequence is synthesized)
cagccaggagaatgaattttaaaaatctatgttagtgtttaaaatgagtgctttgttttaaagcagcaatttagtagcattattaaaat

SEQ ID NO: 209047 - DNA, 120 bp, Artificial Sequence
  ENSG00000115421_46 (sequence is synthesized)
gctttgttttaaagcagcaatttagtagcattattaaaatgcttacttcactatagtagcaattaggtaaagatgggcaatatcaaaatgggctaaacttattttccactatgttccaca

SEQ ID NO: 209048 - DNA, 120 bp, Artificial Sequence
  ENSG00000115421_47 (sequence is synthesized)
cctttgaaataggaattcctaacttgagaatcatgaacccttagggaatcctttataattgtgtataagaagttctagtttacatgcatttttcttggggaaagtgcatagtttagatca

SEQ ID NO: 209049 - DNA, 120 bp, Artificial Sequence
  ENSG00000115421_48 (sequence is synthesized)
gcttctcgaagtggcaaaagtatgggagttagggttaggaaccaccaggattgaataatcctggaatattatataattttctacttttgattttgctgtggtatatttctgaaaatgtgc

SEQ ID NO: 209050 - DNA, 120 bp, Artificial Sequence
  ENSG00000115421_49 (sequence is synthesized)
tgtggctcctaactagtaaaatgggctggtgagggactctggaattctgaatttctaagtttataacctaaaatgaaactgtaaagtcctcggtatttagaaaaatgcttaatctcagat

SEQ ID NO: 209051 - DNA, 120 bp, Artificial Sequence
  ENSG00000115421_50 (sequence is synthesized)
ttacagatggcctcatgataacttagattcgttaacagggtcaaactttagttcaacaaatttcaacccaatattatcacagtacaatagcttagaatgatcattagaaatggtagaaaa

SEQ ID NO: 209052 - DNA, 120 bp, Artificial Sequence
  ENSG00000115421_51 (sequence is synthesized)
tagaataaatcattaaagatcccaaaatgttgagttctgtagcatgaaaactctcttgctcctccatgtttgtagttcaggccagaacaaactaaacagaccaataaatataaaagtgat

SEQ ID NO: 209053 - DNA, 120 bp, Artificial Sequence
  ENSG00000115421_52 (sequence is synthesized)
agtttagggaaaaaaaaaaactttgtataaataaaattgtatgtgtgttcaaataactacctattaaatcatccaaagcttagaatttaaattggtcatagtagcaaatagtgcagatga

SEQ ID NO: 209054 - DNA, 120 bp, Artificial Sequence
  ENSG00000115421_53 (sequence is synthesized)
tggaagaaaaccagtctcaataatggttttttttttccaattgcataaggtcacgtcatcccccaaattgtctattttttcttttctttttttttaagatggagtctcgctccgtcaccc

SEQ ID NO: 209055 - DNA, 120 bp, Artificial Sequence
  ENSG00000115421_54 (sequence is synthesized)
ccgtgcccagcccctattttttctgaaataatttttcggatatacttttatatttgaaattagttgaacataagatgatcatcaagcttgctataagttttaagctattgctacatttga

SEQ ID NO: 209056 - DNA, 120 bp, Artificial Sequence
  ENSG00000115421_55 (sequence is synthesized)
acaaagacccacgtacttatcttagaaagtacttaggatatctttgagattaatggtgctacatcactctacagtactatgtaaaatgaatggagctgctgttcctttctagctagctgt

SEQ ID NO: 209057 - DNA, 120 bp, Artificial Sequence
  ENSG00000115421_56 (sequence is synthesized)
ttgtgtagttcatattaatttaccctgccttttatttggattgtctgatttcttagttgtacacatgaacctcattatttgcctggaataagtaatcaaataaaattgctttgataaata

SEQ ID NO: 209058 - DNA, 120 bp, Artificial Sequence
  ENSG00000115421_57 (sequence is synthesized)
ttcaccttgtaaagagcagaaaaaaaaagaatgtcacagatagtaggtcctaataataattaacaaatatattgattttctaggacgtggtatttattccaacatgctaggattccttgg

SEQ ID NO: 209059 - DNA, 75 bp, Artificial Sequence
  ENSG00000115421_58 (sequence is synthesized)
ctagtggattcatgaataggattgtgatgtgatggaagtgtattaaaaatatttgttttgtgagagggttgtggg

SEQ ID NO: 209060 - DNA, 120 bp, Artificial Sequence
  ENSG00000115421_59 (sequence is synthesized)
aagtgtattaaaaatatttgttttgtgagagggttgtgggtgggtgggtggccggtggtgatagtggggagatagtaaaagtatatgcatttcagaaaaattaggcagaacccttggttc

SEQ ID NO: 209061 - DNA, 120 bp, Artificial Sequence
  ENSG00000115421_60 (sequence is synthesized)
agatgggactcctaagaggttgaaagacgtagaaaaggtaaagttacaactttagtggtaattcagtagttgatattttttatagttaatactaaagaaacaattttccatagctgttgg

SEQ ID NO: 209062 - DNA, 120 bp, Artificial Sequence
  ENSG00000115421_61 (sequence is synthesized)
ctgagtttctccttgatttacagaagtcattactgataacaaaatctcatttcttgtgtgttgatatgccctgcttccagtaggtggtggtaaaactatatttgttagaatctgaattga

SEQ ID NO: 209063 - DNA, 120 bp, Artificial Sequence
  ENSG00000115421_62 (sequence is synthesized)
tttaaccaaaaagatcacccaaactgtagaaattaacggtggcagttgaattcaatctaatttaaattatcttctcttaccaatccatgtttatagtaatttttataatagtgtaaccaa

SEQ ID NO: 209064 - DNA, 120 bp, Artificial Sequence
  ENSG00000115421_63 (sequence is synthesized)
taactagttttccagtttatatagatttatatgggtttttgtaggtacataatagcaatctatttcaatgtttatattttagtttattcgacttgaatcaacatttaaggacccccgcac

SEQ ID NO: 209065 - DNA, 120 bp, Artificial Sequence
  ENSG00000115421_64 (sequence is synthesized)
tgctgaagaaagaaaaagaaaatcagtggtaaatatattaatagtgtgcttcagaatatttattgtaaagcgccatgtatcaggaaaagtgccatattagaaagtaggtcagattagatt

SEQ ID NO: 209066 - DNA, 120 bp, Artificial Sequence
  ENSG00000115423_0 (sequence is synthesized)
gagtaaggatgacttttcgggccacagatagtgaatttgacctgacaaatattgaagagtatgccgaaaattctgcactttcaagactgaataatataaaagccaaacaaagagtgagtt

SEQ ID NO: 209067 - DNA, 120 bp, Artificial Sequence
  ENSG00000115423_1 (sequence is synthesized)
atgtgacatccacagaaaatgaatctgatacacaaatcctaacgtttaggcacattacaaaagctcaggagaagacaagaaaacgacagcagcctataaaactagagcctttgccagtgc

SEQ ID NO: 209068 - DNA, 120 bp, Artificial Sequence
  ENSG00000115423_2 (sequence is synthesized)
taaaagtctaccaagatcataagcagccagaatacatacatgaacagaaccgatttcagttaatgactgcaggaatcattaaacgtccagtaagcatagcaaaaaaaagttttgccacat

SEQ ID NO: 209069 - DNA, 120 bp, Artificial Sequence
  ENSG00000115423_3 (sequence is synthesized)
catctactcagtttcttgagcatcaagatgctgtgaaaaaaatgcagattcatcggccctatgttgaggtgttctctccctctcctcctaaactgccacatactggtattggaaaaagag

SEQ ID NO: 209070 - DNA, 120 bp, Artificial Sequence
  ENSG00000115423_4 (sequence is synthesized)
gtctctttgggactagatcttcagcttaccctaagtacacttttcacgaccgagaagaagttgttaaagccaacattcgtgatcccttgcaaatcattaaaataatacgtgaaaatgaac

SEQ ID NO: 209071 - DNA, 120 bp, Artificial Sequence
  ENSG00000115423_5 (sequence is synthesized)
atcttggatttctttatatgatccctgcagtgccaagatcatccattgaatatgatacatataatctaaaagttgtaagttatgagaacatcaataaaaatgactactatactattagcc

SEQ ID NO: 209072 - DNA, 120 bp, Artificial Sequence
  ENSG00000115423_6 (sequence is synthesized)
aaagggcagtaacacacatttataatgaagacattgaatttatcgaaattgatcgatgggaacaggaatatctgtatcacagagaactcactaagattcccatattttcactgttccgga

SEQ ID NO: 209073 - DNA, 120 bp, Artificial Sequence
  ENSG00000115423_7 (sequence is synthesized)
aatggaaggcttttagtgtatggaggaagaatgtccgctccaagaaaatcactggatgtcaaaaatctctacaaaaaaatttgttcattgttaatcctcatttgcgaccagctcttctta

SEQ ID NO: 209074 - DNA, 120 bp, Artificial Sequence
  ENSG00000115423_8 (sequence is synthesized)
aaataaatgaattgtgttatcatttgagttttatgggactttgttatattgaaaagtgtcacacctacaccctgcaggaatttaaggccgcacaagtcatacggctagcagaggtgacag

SEQ ID NO: 209075 - DNA, 120 bp, Artificial Sequence
  ENSG00000115423_9 (sequence is synthesized)
aacgcctaggagaatttcgaaatgaggcaaaatatgtagtcaggagggcttgtcgatttgctttgcgtgctgcaggatttgttcctgatgactgtgcatttggaccttttgaggattatc

SEQ ID NO: 209076 - DNA, 120 bp, Artificial Sequence
  ENSG00000115423_10 (sequence is synthesized)
ataaagtgcagagcagtggaagtttcattaatacaccacatgagttgcccacttatggagactctgagaaaatgacatatacagaacaggccagcaaaaggcattattgcatgaggctga

SEQ ID NO: 209077 - DNA, 120 bp, Artificial Sequence
  ENSG00000115423_11 (sequence is synthesized)
cgtgctttattcgtctaaacgactatctaattgagaacacaatgcacatcttaacggtaaatgctgttaattcgcttttgaaccatctcactgacaagctaaaacgaacaccttcagcag

SEQ ID NO: 209078 - DNA, 120 bp, Artificial Sequence
  ENSG00000115423_12 (sequence is synthesized)
atgtcattcagaaatggattactgaagagaagcctgaagtccctgataaaaaggggacccttatggtggaaaagcaagaagaagatgaatctctcatccccatgtttctcacagaactaa

SEQ ID NO: 209079 - DNA, 120 bp, Artificial Sequence
  ENSG00000115423_13 (sequence is synthesized)
tgttgacagtccagtcactgctctttgagccttctctggaagactttctggatggtattttgggtgcagttaatcactgtcaaaacactgtgttatcagttcctaatctcgtgcctgatt

SEQ ID NO: 209080 - DNA, 120 bp, Artificial Sequence
  ENSG00000115423_14 (sequence is synthesized)
cgtattttgatgctttcaccagcccttatattaacaacaaacttgaaggaaaaacctgtggaactgggccaagtttagcagcagtatttgaggatgataagaattttcacacaattattt

SEQ ID NO: 209081 - DNA, 120 bp, Artificial Sequence
  ENSG00000115423_15 (sequence is synthesized)
ctcaaataaaggaaaccattcaggccgcatttgaatcagcccgcatctatgcagctacctttgaaaagttccagatattcttcaaggaaaatgaaagtcttgatttacaagctcttaaac

SEQ ID NO: 209082 - DNA, 120 bp, Artificial Sequence
  ENSG00000115423_16 (sequence is synthesized)
ttcaggaacctgatattaacttttttagtgaacaactggaaaaatatcacaaacagcacaaggacgcagtagcgctcagacccaccagaaatgtaggattgctgctcattgatactaggc

SEQ ID NO: 209083 - DNA, 120 bp, Artificial Sequence
  ENSG00000115423_17 (sequence is synthesized)
ttctaagagaaaaattaattccatcacctttgcgatgcttagaggtgctaaattttatgcttcctcgtcaaagcaagaaaaaagtggatgccattatctttgaggcacaagatgcagagt

SEQ ID NO: 209084 - DNA, 120 bp, Artificial Sequence
  ENSG00000115423_18 (sequence is synthesized)
ataaacttgagtttgttccaactactaccacagaatatgttcatagcttattatttcttgatgaaattcaggaacggattgaaagccttgaagatgaggggaatatagtgactcaaatgt

SEQ ID NO: 209085 - DNA, 120 bp, Artificial Sequence
  ENSG00000115423_19 (sequence is synthesized)
acaagcttatggaacaatatcaggtgcccacacctcctgaagactttgctgtttttgcaactatgaagccatccattgttgctgttcggaatgccattgataaatcagtgggtgatagag

SEQ ID NO: 209086 - DNA, 120 bp, Artificial Sequence
  ENSG00000115423_20 (sequence is synthesized)
aatcaagcattaagcaattttgtgtgcatttgggtagtgatcttgaagaattaaacaacgaagtgaatgaagtaaaactgcaagcacaggatccacagattttagatatctctgctgacc

SEQ ID NO: 209087 - DNA, 120 bp, Artificial Sequence
  ENSG00000115423_21 (sequence is synthesized)
aagacaaaataaggctcatattgaataatctgcaatctgttctggctgatcttcagaaacgtgcatttcagtataagtcctatcagaagaattttaaggtagaagtgtccaagtttgaag

SEQ ID NO: 209088 - DNA, 120 bp, Artificial Sequence
  ENSG00000115423_22 (sequence is synthesized)
ctttggaagaagtcagtgctgaactgaagctcaaacaattgctctgggattctttctctgaatgggataaactccaacaagaatggttaaagtccaaatttgattgcctggatccagaag

SEQ ID NO: 209089 - DNA, 120 bp, Artificial Sequence
  ENSG00000115423_23 (sequence is synthesized)
tcctaaacggtcaagtttctaaatatgctaaatttgtgactcaactggaaaaaggcttgccacccaacagtgtagtgccccagctcaaatacaaggtggaaaaaatgaaagaaaagcttc

SEQ ID NO: 209090 - DNA, 120 bp, Artificial Sequence
  ENSG00000115423_24 (sequence is synthesized)
cagttatcattgacttgaggaacccgactttgaaggcaagacattgggcagctattgaacaaacagttgatgccactctagtggatgctgaaattccattaaccttggagaggctctccc

SEQ ID NO: 209091 - DNA, 120 bp, Artificial Sequence
  ENSG00000115423_25 (sequence is synthesized)
agttgcatgtttttgactttggtcaagaaatccaggacatatctggacaggcttctggagaagctgccttagaagcaattcttaaaaaggtggaggactcttggaaaacaactgaatttg

SEQ ID NO: 209092 - DNA, 120 bp, Artificial Sequence
  ENSG00000115423_26 (sequence is synthesized)
tcattctgcctcaccgtgactccaaagatgtgtttatactgggcggcacagatgacatacaggtccttcttgatgatagcaccatcaatgttgcaactcttgcctcatcacgttaccttg

SEQ ID NO: 209093 - DNA, 120 bp, Artificial Sequence
  ENSG00000115423_27 (sequence is synthesized)
gtccactgaaaactcgagtggatgaatggcaaaaacaacttgctttatttaatcaaacactggaagagtggctgacctgccagagaaactggctctacctagaaagtattttcaatgctc

SEQ ID NO: 209094 - DNA, 120 bp, Artificial Sequence
  ENSG00000115423_28 (sequence is synthesized)
cagacattcagaggcaattgcctgcagaggccaagatgttccttcaggtggataagtcatggaaagaaatcatgagaaaggtgaatcggctgcctaatgctcttcgagccgctactcagc

SEQ ID NO: 209095 - DNA, 120 bp, Artificial Sequence
  ENSG00000115423_29 (sequence is synthesized)
caggacttctggaaacttttcaaaacaataatgcattacttgaccaaattcagaagtgcctagaggcatacttagaatcaaaaagagttatctttccaaggttttacttcttgtcaaatg

SEQ ID NO: 209096 - DNA, 120 bp, Artificial Sequence
  ENSG00000115423_30 (sequence is synthesized)
atgaacttctggagattttggcccagacacgaaatccacaggccgtgcagccacacttaaggaaatgcttcgactccatttcaaagctcgaatttgctctcatgcctcctgccgaaggaa

SEQ ID NO: 209097 - DNA, 120 bp, Artificial Sequence
  ENSG00000115423_31 (sequence is synthesized)
agattcctggtattgatggagaaccagaaaaggtttatactaatgatattttagcaatgctgtcaccagagggagaaagggttagcttggggaaaggcctcaaggcccgaggcaatgtag

SEQ ID NO: 209098 - DNA, 120 bp, Artificial Sequence
  ENSG00000115423_32 (sequence is synthesized)
aggaatggcttggtaaagtggaagaagccatgttcacatctctgcgtcgcctgtgcaaagctgccatcgctgactatcaggggaaactgaggacagactgggtggttgctggccaccctt

SEQ ID NO: 209099 - DNA, 120 bp, Artificial Sequence
  ENSG00000115423_33 (sequence is synthesized)
ctcaagttatcctgactgtttctcaaattatgtggtgccgtgatttgactgaatgtctggaaacagaacacagtaatcatatacaggccctgaagaattttgaaaaagtaaattttgaga

SEQ ID NO: 209100 - DNA, 120 bp, Artificial Sequence
  ENSG00000115423_34 (sequence is synthesized)
gattaaatgccctagctgcaatagttcaaggcagtcttcctaaattacacagaaacatcctaactgcattgattactattgatgtgcatgcaagagatatagtcactgaacttgttcaat

SEQ ID NO: 209101 - DNA, 120 bp, Artificial Sequence
  ENSG00000115423_35 (sequence is synthesized)
ccaaggtggagacagttgaatcttttgactggcagagacaactgcgctattactgggatatagacctggataattgtgtggctagaatggcgctctctcagtacacttatggctatgaat

SEQ ID NO: 209102 - DNA, 120 bp, Artificial Sequence
  ENSG00000115423_36 (sequence is synthesized)
atttgggtgcatgcccaagattggttattactccactcacagatcgctgctatctttgcctcatgggagctttgcagcttgaccttgggggtgcaccagctggtcctgctggcactggga

SEQ ID NO: 209103 - DNA, 120 bp, Artificial Sequence
  ENSG00000115423_37 (sequence is synthesized)
aaacagagactaccaaagatctggcaaaagctcttgccatccagtgtgtggtctttaactgttcagatggtttggactacaagatgatggggcgcttcttcagtggcttggcacagtcag

SEQ ID NO: 209104 - DNA, 120 bp, Artificial Sequence
  ENSG00000115423_38 (sequence is synthesized)
gggcctggtgctgctttgatgaatttaatcgaattgacatagaagttctgtccgtcatcgcgcagcaactcattaccattaggaacgccaaagcggcaaagctctctagattcatgtttg

SEQ ID NO: 209105 - DNA, 120 bp, Artificial Sequence
  ENSG00000115423_39 (sequence is synthesized)
aggggcgggaaataaagttggtgatgacttgtgcagccttcatcacaatgaatcctggctatgcagggagaactgaattgccagataatttgaaagccctgtttagaccatttgcgatga

SEQ ID NO: 209106 - DNA, 120 bp, Artificial Sequence
  ENSG00000115423_40 (sequence is synthesized)
tggttccaaattatgccttgattgcagaggtaattctatattctgaaggatttgaatccagtaaaatattagcaagaaaaatgactcagatgtataagctttgcagtgagcagctgtctc

SEQ ID NO: 209107 - DNA, 120 bp, Artificial Sequence
  ENSG00000115423_41 (sequence is synthesized)
agcaggatcactacgactttggcatgagagctgtgaagtctgtcctggtcatggctggatctttaaaaagagaaaacccagacctaaatgaagatgtggtgttgataagagctttacaag

SEQ ID NO: 209108 - DNA, 120 bp, Artificial Sequence
  ENSG00000115423_42 (sequence is synthesized)
actccaatttgccaaaatttctaacagatgatgctcttctgttcagtggaatcatatctgacctttttcctggagtccaaattccagaacatgattatggtattttacaatcaacaattg

SEQ ID NO: 209109 - DNA, 120 bp, Artificial Sequence
  ENSG00000115423_43 (sequence is synthesized)
tggatgtcatgaatagacaaaatcttcagcctgagatgtgtatggttagaaaggtgatacagttttatgaaactatgctagtaaggcatggtgttatgttagtcgggccaacaggaggcg

SEQ ID NO: 209110 - DNA, 120 bp, Artificial Sequence
  ENSG00000115423_44 (sequence is synthesized)
gcaagaccacagtttaccgaatactagcagaaactttagggaatttacaaaaacttgggatagaaaattccttttaccaagcagttaaaacatatgttctcaaccctaaatcaattacca

SEQ ID NO: 209111 - DNA, 120 bp, Artificial Sequence
  ENSG00000115423_45 (sequence is synthesized)
tgggtgaattatatggagaggttaataacttaaccttggaatggaaagatggtttgatggcactaagtgtccgagcagctgtgaatgatacttcagaagaccataaatggatcatcagtg

SEQ ID NO: 209112 - DNA, 120 bp, Artificial Sequence
  ENSG00000115423_46 (sequence is synthesized)
atgggccagtagatgctctttggattgaaaacatgaatacagtgctggatgataacaagatgctttgcctggctaacagtgagaggattaaactcacacctcaaattcacatgctttttg

SEQ ID NO: 209113 - DNA, 120 bp, Artificial Sequence
  ENSG00000115423_47 (sequence is synthesized)
aggtgcaagatctgcgggttgcctcccctgcaacagtcagtcgatgtggaatggtgtttgtggatcctgaagaactgaaatggatgccttatgttaaaacttggatgaagggtatttcta

SEQ ID NO: 209114 - DNA, 120 bp, Artificial Sequence
  ENSG00000115423_48 (sequence is synthesized)
aaaaactgactgaggaaacccaagaatatatattgaatcttttccaacgttatgttgatgaaggtttacattttatcaataaaaagtgcagccaagcaattccacaagtggacatcagca

SEQ ID NO: 209115 - DNA, 120 bp, Artificial Sequence
  ENSG00000115423_49 (sequence is synthesized)
aagttactacactctgttgcttattggagtccttgatacttgggaaagatggagttaacttggcaatggaacaaacaaaattgaacactatactatgtcagacttttgtattctgttatt

SEQ ID NO: 209116 - DNA, 120 bp, Artificial Sequence
  ENSG00000115423_50 (sequence is synthesized)
tgtggtctttgggtggaaacctaactgaaaactactatgattcttttgatacatttattagaacacaatttgatgataatcctgatgccaggcttcccaattctggtgatctgtggagca

SEQ ID NO: 209117 - DNA, 120 bp, Artificial Sequence
  ENSG00000115423_51 (sequence is synthesized)
ttcatatggactttgacaccaaacggctggatccctgggaacgaatcatacctactttcaaatacaaccgagatgttccattttttgaaatgcttgtccccacaactgacacagtgcgct

SEQ ID NO: 209118 - DNA, 120 bp, Artificial Sequence
  ENSG00000115423_52 (sequence is synthesized)
tgggcaagtctgtgattgcaaaaggattgctaaataaaattcaagaatcagctggctatgtccctgtttatctaaatttttctgctcaaacttcatctgcaaggacacaagagatcattg

SEQ ID NO: 209119 - DNA, 120 bp, Artificial Sequence
  ENSG00000115423_53 (sequence is synthesized)
agtcaaaactggagagaaaaagaaaaaatattctaggagcaccgggaaacaaacgaattgtgatttttgttgatgatttaaacatgcccagactggatcgctatggctctcagcctccga

SEQ ID NO: 209120 - DNA, 120 bp, Artificial Sequence
  ENSG00000115423_54 (sequence is synthesized)
ttgaattacttcggcagtatcaagattttgggggattttatgacagaaacaaactgttttggaaagaaatacaggatgtaacaatcatatcggcatgtgcacctccaggcggtggccgca

SEQ ID NO: 209121 - DNA, 120 bp, Artificial Sequence
  ENSG00000115423_55 (sequence is synthesized)
accctgtgactccccgcttcatcagacacttcagcatgctgtgcctcccaatgccctcagagcacagtctgaaacagatttttcaggccatcttaaatggtttcctgagtgactttccac

SEQ ID NO: 209122 - DNA, 120 bp, Artificial Sequence
  ENSG00000115423_56 (sequence is synthesized)
cagctgtaaagcaaactgcatcaagcattgtagaagcctcagttgagatttataacaaaatgagtgttgacctcctgccaacacccgccaagtcccattatgtctttaacttgagggact

SEQ ID NO: 209123 - DNA, 120 bp, Artificial Sequence
  ENSG00000115423_57 (sequence is synthesized)
tatccaaatgtgtgcaaggtatcctccaatgtgatccaggaacaataagagaagaaattcagatatttagactcttttgccatgagtgccaaagggtcttccatgatcgcttgattaata

SEQ ID NO: 209124 - DNA, 120 bp, Artificial Sequence
  ENSG00000115423_58 (sequence is synthesized)
atgaagataagcactatttccatgttattctgacagaaatggccaacaaacattttggaattgcaattgacctggaatattttttgaataagcccatcatatttggagatttcattaagt

SEQ ID NO: 209125 - DNA, 120 bp, Artificial Sequence
  ENSG00000115423_59 (sequence is synthesized)
ttggagcagataaagctgatcggatttatgatgacatgcctgatatagagaaaactgcaaatgttctacaggactatcttgatgattataatctcacaaatcccaaagaagtaaagttgg

SEQ ID NO: 209126 - DNA, 120 bp, Artificial Sequence
  ENSG00000115423_60 (sequence is synthesized)
tgttcttccaggatgctatagaacatgtttcaaggattgctcggatgatacgtcaagaaagaggcaatgccctgcttgttggagtaggaggcacaggaaagcagtcactcacgagacttg

SEQ ID NO: 209127 - DNA, 120 bp, Artificial Sequence
  ENSG00000115423_61 (sequence is synthesized)
cagctcatatatgcggttacaaatgtttgcagattgaactcagccggggatataattatgatagttttcatgaagacctgaggaagttgtacaaaatggctggtgtagaagacaagaata

SEQ ID NO: 209128 - DNA, 120 bp, Artificial Sequence
  ENSG00000115423_62 (sequence is synthesized)
tggttttccttttcactgacacccagattgtagtggaggagttcctagaagatataaataacatcctgaactcaggtgaagtgcctaatttatttgaaaaggatgaactggagcaggttt

SEQ ID NO: 209129 - DNA, 120 bp, Artificial Sequence
  ENSG00000115423_63 (sequence is synthesized)
tagcggccaccagaccaagagcaaaagaagtaggaatttctgaggggaacagagacgaggtgtttcaatactttatcagcaaagtgcgtcagaagctgcacattgttctctgcatgagcc

SEQ ID NO: 209130 - DNA, 120 bp, Artificial Sequence
  ENSG00000115423_64 (sequence is synthesized)
cagttggggaggcctttcggtcccgatgcaggatgtttccatcccttgtgaattgctgcaccattgactggtttgtgcagtggcccagagaagcacttctttctgtgtcaaagacatttt

SEQ ID NO: 209131 - DNA, 120 bp, Artificial Sequence
  ENSG00000115423_65 (sequence is synthesized)
tctcacaagtcgatgctggaaatgaagaactgaaagaaaagcttcccttgatgtgcgtgaacgttcacttgagtgtctccagcatggcagagcgctattacaatgagctgcgcaggcggt

SEQ ID NO: 209132 - DNA, 120 bp, Artificial Sequence
  ENSG00000115423_66 (sequence is synthesized)
actacacgacacccacctcctacctggagcttatcaatctttacctgtctatgctgtctgaaaaaaggaagcagattatttcagcacgagatcgggtgaagaatggtctcaccaagctac

SEQ ID NO: 209133 - DNA, 120 bp, Artificial Sequence
  ENSG00000115423_67 (sequence is synthesized)
tagaaacaaacatactagtagataaaatgaaactagatctttcagctttagagcctgtacttttagcaaaatcagaagatgttgaagccctgatggaaaaattggcagtggatcaagaaa

SEQ ID NO: 209134 - DNA, 120 bp, Artificial Sequence
  ENSG00000115423_68 (sequence is synthesized)
gtgccgatcaggtccgtaacactgtgcaggaggatgaagcaacagcaaaagtcaaagctgaagaaacccaagcaatagctgatgatgctcaaagagatcttgacgaggcactacctgcac

SEQ ID NO: 209135 - DNA, 120 bp, Artificial Sequence
  ENSG00000115423_69 (sequence is synthesized)
tagatgctgccaataaagcactggattccttagataaggcagatatatctgaaatcagagtttttacaaagcccccagatttggtcatgacagtaatggaagcaatctccattcttttga

SEQ ID NO: 209136 - DNA, 120 bp, Artificial Sequence
  ENSG00000115423_70 (sequence is synthesized)
atgccaagcctgattggccatcagcaaagcaacttcttggtgactctaactttctaaaaaggcttttagaatatgataaggagaacataaagcctcagatattggcaaagcttcaaaagt

SEQ ID NO: 209137 - DNA, 120 bp, Artificial Sequence
  ENSG00000115423_71 (sequence is synthesized)
atattaataatcctgattttgtgcctgaaaaagtggagaaagtgtccaaagcatgtaaatctatgtgcatgtgggtaagagctatggatttgtactctcgagtggtcaaggtcgtcgaac

SEQ ID NO: 209138 - DNA, 120 bp, Artificial Sequence
  ENSG00000115423_72 (sequence is synthesized)
caaaaagacaaaagctccgcgccgcacaggctgaacttgacattaccatggctaccctgagagaaaagcaagcattactaagacaagtagaagatcaaatacaggccttacaagatgaat

SEQ ID NO: 209139 - DNA, 120 bp, Artificial Sequence
  ENSG00000115423_73 (sequence is synthesized)
atgacaaaggtgtaaatgaaaaagaaagcctggcaaagaccatggccctgacaaaagcacgtctagtacgtgctggaaagctgacagcagcattagaagatgagcaggttcgatgggaag

SEQ ID NO: 209140 - DNA, 120 bp, Artificial Sequence
  ENSG00000115423_74 (sequence is synthesized)
aaagcatacagaagtttgaggaagaaatatcaaatatcactgggaacgtgttcatagcagcagcttgtgtggcctactatggggctttcacagcccagtacaggcagtcacttatagagt

SEQ ID NO: 209141 - DNA, 120 bp, Artificial Sequence
  ENSG00000115423_75 (sequence is synthesized)
gttggatccaggactgtcagtctctggagatcccaatcgatccttccttcagtctcattaacattcttggagatccctacgagatacggcagtggaacactgatgggctgccccgtgact

SEQ ID NO: 209142 - DNA, 120 bp, Artificial Sequence
  ENSG00000115423_76 (sequence is synthesized)
tgatatcaacagaaaatggcattttggttactcaaggcagaagatggcctttgatgattgatccccaagatcaggcaaaccgttggataaggaacaaggaaagcaaaagtggtttaaaga

SEQ ID NO: 209143 - DNA, 120 bp, Artificial Sequence
  ENSG00000115423_77 (sequence is synthesized)
tcattaagcttacagatagtaatttcttacgaatactcgagaattcaatccgacttggtttacctgtcttactggaagagcttaaggaaaccttggatccagctctagaacccattcttt

SEQ ID NO: 209144 - DNA, 120 bp, Artificial Sequence
  ENSG00000115423_78 (sequence is synthesized)
tgaaacaaatttttatcagtggtggccgactactcatccgtcttggagactcagacattgattatgacaaaaactttaggttctatatgacaaccaaaatgccaaatccccactatctgc

SEQ ID NO: 209145 - DNA, 120 bp, Artificial Sequence
  ENSG00000115423_79 (sequence is synthesized)
ctgaggtatgcattaaagttaccattatcaatttcactgtaacaaaatcaggcctggaggatcagttgttaagtgatgtggtgcgacttgaaaaacccaggttggaagaacaaagaatta

SEQ ID NO: 209146 - DNA, 120 bp, Artificial Sequence
  ENSG00000115423_80 (sequence is synthesized)
agctcatcgtgaggatcaacactgataaaaaccagttgaaaactatcgaagagaaaatcctgagaatgctctttacctctgaaggaaatattctggacaatgaagaacttattgacacac

SEQ ID NO: 209147 - DNA, 120 bp, Artificial Sequence
  ENSG00000115423_81 (sequence is synthesized)
tccaggattcaaagatcacttctggtgccattaaaaccaggctggaagaagcagagtccactgagcagatgatcaatgtggctcgtgagaagtatcgtccagtggccactcaaggctctg

SEQ ID NO: 209148 - DNA, 120 bp, Artificial Sequence
  ENSG00000115423_82 (sequence is synthesized)
taatgtactttgtcattgcaagcctctcagaaatagatcctatgtaccagtactcattaaaatactttaaacagttgttcaataccaccattgaaacttctgtaaagacagaaaatctac

SEQ ID NO: 209149 - DNA, 120 bp, Artificial Sequence
  ENSG00000115423_83 (sequence is synthesized)
aacagcgcctggacgtactactagaacaaactctcctaactgcttatgtcaatgtttcaagaggactttttgagcaacataaactcatctacagctttatgctttgtgttgagatgatgc

SEQ ID NO: 209150 - DNA, 120 bp, Artificial Sequence
  ENSG00000115423_84 (sequence is synthesized)
gtcagcaaggaaccctatctgatgctgaatggaatttctttctccgaggttctgcaggattggaaaaggaacgcccacctaagcctgaagctccctggctacctactgctacatggttcg

SEQ ID NO: 209151 - DNA, 120 bp, Artificial Sequence
  ENSG00000115423_85 (sequence is synthesized)
catgctgtgacttggaagaatcatttccagtttttcacggacttacccaaaatatattgtcacatcctatttccatacgcttaggatcttttgagacttatattaacccacagaaatggg

SEQ ID NO: 209152 - DNA, 120 bp, Artificial Sequence
  ENSG00000115423_86 (sequence is synthesized)
aaggctattctaaaatgaaacacgaagataaacacatgagacaggaaaaggaggcagcacaccaagatccatggagtgcaggattgagttctttccataagctaattcttattaaatgtt

SEQ ID NO: 209153 - DNA, 120 bp, Artificial Sequence
  ENSG00000115423_87 (sequence is synthesized)
gtaaagaagaaaaggtggtttttgctcttacagactttgtgatagaaaatcttggaaaacagtttatagagacaccacctgtggacctgcctaccctgtatcaagacatgtcatgcaaca

SEQ ID NO: 209154 - DNA, 120 bp, Artificial Sequence
  ENSG00000115423_88 (sequence is synthesized)
ctcccctggtattcatcctaagcacaggctcagatcccatgggtgcatttcagaggtttgccagggaaagtggatattcagaacgggtgcagtcaatttcactggggcaaggacaaggac

SEQ ID NO: 209155 - DNA, 120 bp, Artificial Sequence
  ENSG00000115423_89 (sequence is synthesized)
ctattgctgaaaaaatggtcaaggatgcaatgaaatcaggaaactgggtatttttgcaaaattgccatcttgctgtttcttggatgttggcaatggaagagctcattaaaaccttcacag

SEQ ID NO: 209156 - DNA, 120 bp, Artificial Sequence
  ENSG00000115423_90 (sequence is synthesized)
atccagatagtgctatcaaggacacttttcgactttttttaagctccatgcctagtaatacatttcctgttacagttcttcaaaattctgtcaaggtgaccaatgagcctccaaaaggct

SEQ ID NO: 209157 - DNA, 120 bp, Artificial Sequence
  ENSG00000115423_91 (sequence is synthesized)
tacgtgcaaatatcagacgagcatttactgaaatgacaccttcgttttttgaagaaaatatacttggaaaaaaatggagacaaataatatttggcatttgtttcttccatgcaattattc

SEQ ID NO: 209158 - DNA, 120 bp, Artificial Sequence
  ENSG00000115423_92 (sequence is synthesized)
aggagagaaagaagtttggcccccttggttggaatatctgctatgaatttaatgacagtgacagggaatgtgctttactgaatctcaaactctattgtaaagaaggaaagattccctggg

SEQ ID NO: 209159 - DNA, 120 bp, Artificial Sequence
  ENSG00000115423_93 (sequence is synthesized)
atgcactaatttacattactggtgaaattacttatggtggtagagtcacagacagctgggaccaaagatgccttcgtactatcttgaaaagatttttttctcctgaaacattagaagaag

SEQ ID NO: 209160 - DNA, 120 bp, Artificial Sequence
  ENSG00000115423_94 (sequence is synthesized)
attataaatactctgaatcaggcatctattttgcacccatggctgacagcctacaagagtttaaggactacattgaaaatctgcctttgatcgatgacccagaaatttttggaatgcatg

SEQ ID NO: 209161 - DNA, 120 bp, Artificial Sequence
  ENSG00000115423_95 (sequence is synthesized)
aaaatgctaatctagtcttccagtacaaagagaccagcactttaatcaacaccatacttgaggttcagccaaggtcatctactggtggagagggaaaaagcaatgacgaaattgttcaag

SEQ ID NO: 209162 - DNA, 120 bp, Artificial Sequence
  ENSG00000115423_96 (sequence is synthesized)
aacttgttgcttctgtccagaccagagttccagaaaaactggaaatggagggtgcttctgagagcctttttgtcaaggatcttcaaggacgtctgaactccttgaccaccgttcttggac

SEQ ID NO: 209163 - DNA, 120 bp, Artificial Sequence
  ENSG00000115423_97 (sequence is synthesized)
aggaagtggaccggtttaacaacctgctgaagttaattcatacttctctggaaacactcaacaaagccatcgctggatttgtggtgatgtctgaagaaatggaaaaagtgtataacagtt

SEQ ID NO: 209164 - DNA, 120 bp, Artificial Sequence
  ENSG00000115423_98 (sequence is synthesized)
tcctcaacaaccaggttcccgctctgtggtccaacacagcctacccatccctgaagccactaggatcatgggtcaaagaccttatcctgaggacctcatttgtggatctgtggctcaaaa

SEQ ID NO: 209165 - DNA, 120 bp, Artificial Sequence
  ENSG00000115423_99 (sequence is synthesized)
gaggacagcctaagtcctactggatctctggtttcttctttcctcaaggatttctaacaggaactcttcaaaatcatgctcgaaaatacaatttgcctatagatgagctgagtttcaaat

SEQ ID NO: 209166 - DNA, 120 bp, Artificial Sequence
  ENSG00000115423_100 (sequence is synthesized)
acagcgtaattcccacctatcgggatcaagctgcagtgatagaagctgccaagacagtgcaatttggacaagaactgcccatggacatggagttgccctctcctgaggatggtgttcttg

SEQ ID NO: 209167 - DNA, 120 bp, Artificial Sequence
  ENSG00000115423_101 (sequence is synthesized)
ttcatgggatgttcatggatgcttctcgatgggatgataaggagatggtgatagaagatgcattgcccggacagatgaatccagtgctgcctgtggtgcattttgaaccacaacaaaact

SEQ ID NO: 209168 - DNA, 120 bp, Artificial Sequence
  ENSG00000115423_102 (sequence is synthesized)
ataagccaagcccaacactttaccactgcccactttataaaacaggagcccgggcaggaacactctcaaccacaggacattcaaccaattttgtggtaaccgtcctgttaccctccaagc

SEQ ID NO: 209169 - DNA, 120 bp, Artificial Sequence
  ENSG00000115423_103 (sequence is synthesized)
ggtccaaagactactggattgccaagggatcagctttgctctgccagctgagcgaatgaaaaggtgccacctcagccctgaaaaagaaccaggccagagatctttcctaatgggagcaaa

SEQ ID NO: 209170 - DNA, 120 bp, Artificial Sequence
  ENSG00000115423_104 (sequence is synthesized)
aggtttgaataatttatatgtgagcaaaacggtgttaattctgatttgacttaaacgtattgtgacttttatttctcttatgaccttaaaataaagtgtttgagttctttctgttggcaa

SEQ ID NO: 209171 - DNA, 120 bp, Artificial Sequence
  ENSG00000115423_105 (sequence is synthesized)
gcttccgtagaggccagctggttgctacgcagcaacaggaaacattccgcgctaccgagtactttctactcccgaccaggcattgctctctctggagaccctcggcggtggttgctgtat

SEQ ID NO: 209172 - DNA, 120 bp, Artificial Sequence
  ENSG00000115423_106 (sequence is synthesized)
aagatgctgtgaaaaaaatgcagagttgtaagttatgagaacatcaataaaaatgactactatactattagccaaagggcagtaacacacatttataatgaagacattgaatttatcgaa

SEQ ID NO: 209173 - DNA, 120 bp, Artificial Sequence
  ENSG00000115423_107 (sequence is synthesized)
attaaagtataatcaacagataaaaattgtatatatttacaatatataatgtgatgttttgatatacgtatacattgtgaaattgttaatcaagctaattaatgtgtccatcacgtcaca

SEQ ID NO: 209174 - DNA, 120 bp, Artificial Sequence
  ENSG00000115423_108 (sequence is synthesized)
tacatcattttttgtggtgagaataattaagactactcttcaaaccatttagagaacacatttaactgatgtagctttagttttttatagtatcattctaaccaatcaacaatgtctttg

SEQ ID NO: 209175 - DNA, 120 bp, Artificial Sequence
  ENSG00000115423_109 (sequence is synthesized)
agctgctacttaaaaattaatgtttcaaaatctctgtttaagtagtgaatacatttcagactatcacaaagcatatatgtaatattaaaattgaatttagccaattaaattctagtccta

SEQ ID NO: 209176 - DNA, 120 bp, Artificial Sequence
  ENSG00000115423_110 (sequence is synthesized)
acttgtatttattattttgaagagtgttttaatgacttgctagcacattttacagctattgtcacaattttaaagtttgcttaatacctgggtgatgaaataattcatacaacaaacccc

SEQ ID NO: 209177 - DNA, 120 bp, Artificial Sequence
  ENSG00000115423_111 (sequence is synthesized)
acgaggtaggatgtgccagagtagttatgtggctttatcacaaaaacgtttcttcaccttttatttaaccattcattgattgcctgaaggggtccatgaataaaatttttttcaatataa

SEQ ID NO: 209178 - DNA, 120 bp, Artificial Sequence
  ENSG00000115425_0 (sequence is synthesized)
gcccgcctcgaatgtccctgagacccagaagggcctgcgctcagctgctctggcaccccgctgcagggatggcctcctgggctaagggcaggagctacctggcgcctggtttgctgcagg

SEQ ID NO: 209179 - DNA, 120 bp, Artificial Sequence
  ENSG00000115425_1 (sequence is synthesized)
gccaagtggccatcgtcaccggcggggccacgggcatcggaaaagccatcgtgaaggagctcctggagctggggagtaatgtggtcattgcatcccgtaagttggagagattgaagtctg

SEQ ID NO: 209180 - DNA, 120 bp, Artificial Sequence
  ENSG00000115425_2 (sequence is synthesized)
cggcagatgaactgcaggccaacctacctcccacaaagcaggcacgagtcattcccatacaatgcaacatccggaatgaggaggaggtgaataatttggtcaaatctaccttagatactt

SEQ ID NO: 209181 - DNA, 120 bp, Artificial Sequence
  ENSG00000115425_3 (sequence is synthesized)
ttggtaagatcaatttcttggtgaacaatggaggaggccagtttctttcccctgctgaacacatcagttctaagggatggcacgctgtgcttgagaccaacctgacgggtaccttctaca

SEQ ID NO: 209182 - DNA, 120 bp, Artificial Sequence
  ENSG00000115425_4 (sequence is synthesized)
tgtgcaaagcagtttacagctcctggatgaaagagcatggaggatctatcgtcaatatcattgtccctactaaagctggatttccattagctgtgcattctggagctgcaagagcaggtg

SEQ ID NO: 209183 - DNA, 120 bp, Artificial Sequence
  ENSG00000115425_5 (sequence is synthesized)
tttacaacctcaccaaatctttagctttggaatgggcctgcagtggaatacggatcaattgtgttgcccctggagttatttattcccagactgctgtggagaactatggttcctggggac

SEQ ID NO: 209184 - DNA, 120 bp, Artificial Sequence
  ENSG00000115425_6 (sequence is synthesized)
aaagcttctttgaagggtcttttcagaaaatccccgctaaacgaattggtgttcctgaggaggtctcctctgtggtctgcttcctactgtctcctgcagcttccttcatcactggacagt

SEQ ID NO: 209185 - DNA, 120 bp, Artificial Sequence
  ENSG00000115425_7 (sequence is synthesized)
gcccaagggagcaggggacctttctgttgtcaaaaagatgaaggagacctttaaggagaaagctaagctctgagctgaggaaacaaggtgtcctccatcccccagtgccttcacatcttg

SEQ ID NO: 209186 - DNA, 120 bp, Artificial Sequence
  ENSG00000115425_8 (sequence is synthesized)
aggatatgcttctgtactttttaaaagcttatagttggtatggaaaacatttttcttatttttaagtgttattaattatatctatggaaaaactattcctgaaatatatacagtcttatg

SEQ ID NO: 209187 - DNA, 120 bp, Artificial Sequence
  ENSG00000115425_9 (sequence is synthesized)
gtcttatgtcccaatcagagtcttttaacctatgatttaaaaatgtataagtaacagaaattaacatattttaatgactttactttttatttctaagaaaagtatttgaaaaatggaata

SEQ ID NO: 209188 - DNA, 120 bp, Artificial Sequence
  ENSG00000115425_10 (sequence is synthesized)
gaaaagtatttgaaaaatggaataattttaaatcaatgataattctagggatcatgaactcccagaagattttattatttaattgtaaaggtagaggccagacgcagtggctcacgcctg

SEQ ID NO: 209189 - DNA, 63 bp, Artificial Sequence
  ENSG00000115425_11 (sequence is synthesized)
cagaaaaacaacaaaaacaaaaacacaaattagtcgggtgtggtggcacacacctgtagtccc

SEQ ID NO: 209190 - DNA, 75 bp, Artificial Sequence
  ENSG00000115425_12 (sequence is synthesized)
gtccagcctgggctacagagtgagactgcatctcaaaaaaaacccaaaaaacaaaaacaaacaacaacaacaaaa

SEQ ID NO: 209191 - DNA, 120 bp, Artificial Sequence
  ENSG00000115425_13 (sequence is synthesized)
aaaaaaacccaaaaaacaaaaacaaacaacaacaacaaaattataaaggtagaaaataaacctaaattgtgtcgtaattaagattattaaaattagaattatacaatgacttatttttgg

SEQ ID NO: 209192 - DNA, 120 bp, Artificial Sequence
  ENSG00000115425_14 (sequence is synthesized)
tggcaaatactttaggagcaataatgccttatggtaattattgatgtatagtttcttttgtttatgaagtcaaatttgtataaattctcttaattcaaagaaaaagttttatgtgattta

SEQ ID NO: 209193 - DNA, 63 bp, Artificial Sequence
  ENSG00000115425_15 (sequence is synthesized)
ctcaccaaatctttagctttggaatgggcctgcagtggaatacggatcaattgtgttgcccct

SEQ ID NO: 209194 - DNA, 120 bp, Artificial Sequence
  ENSG00000115425_16 (sequence is synthesized)
gcctcccaaggagttatttattcccagactgctgtggagaactatggttcctggggacaaagcttctttgaagggtcttttcagaaaatccccgctaaacgaattggtgttcctgaggag

SEQ ID NO: 209195 - DNA, 120 bp, Artificial Sequence
  ENSG00000115425_17 (sequence is synthesized)
accaatccaagataccttgctaacaactgtcaattaaaagtctacagaattgaaattcagccatgatttttattagccaaaactgaattaaagaatacaaggctggccgggcatggtggc

SEQ ID NO: 209196 - DNA, 120 bp, Artificial Sequence
  ENSG00000115425_18 (sequence is synthesized)
cctcatttggagcaactctggtgagggatgatgagaagaatttatggagtatgccccatgatgtgtcccacacagaggcagacgacgacagaaccctgtacaatttgatagtcattcgta

SEQ ID NO: 209197 - DNA, 120 bp, Artificial Sequence
  ENSG00000115425_19 (sequence is synthesized)
aattggctttgtgaatcctaggtggtaggtccaacaaaaggatgatggcatttatttgcctttatattattttaatacctgtccggggaaaatgcaacactctgacaacagccttagaaa

SEQ ID NO: 209198 - DNA, 120 bp, Artificial Sequence
  ENSG00000115425_20 (sequence is synthesized)
tagcatcccatctggattgttaagaccacagcaactggcacattcgaccaagttcttagggtgaagtctcagtaggccagtccaggtgtaatctcactctggtgggttcagagcgggaag

SEQ ID NO: 209199 - DNA, 120 bp, Artificial Sequence
  ENSG00000115425_21 (sequence is synthesized)
tgttactgggcaccataacacagacgagaaattttccccatcctcagcgggctcaccctcctgcacaaggaatgaactacaggacatgatctcaaacacctacagatgcatcttgcagga

SEQ ID NO: 209200 - DNA, 120 bp, Artificial Sequence
  ENSG00000115425_22 (sequence is synthesized)
agcgtgcacccttcaaggaaagatcctcttctggactcgctatgcagctcagctgaaatggatcaggtctcaaacctgggagtaatgtggtcattgcatcccgtaagttggagagattga

SEQ ID NO: 209201 - DNA, 120 bp, Artificial Sequence
  ENSG00000115425_23 (sequence is synthesized)
actctagctgttcttaactctccagtgagagagtgcctctcaagtcatgccagcaaaaacaatattaatggtgccagcaggtcccagagaggatactcattaactgaccctgcctggtta

SEQ ID NO: 209202 - DNA, 120 bp, Artificial Sequence
  ENSG00000115425_24 (sequence is synthesized)
tgtgttcagtcattaaccaaaaactgtagaaatgaggttgctctgctatgcatggtcagcctgaggaatgaggaactgtggtcatcatcgctcagacatggactgagaacaggcaagagg

SEQ ID NO: 209203 - DNA, 120 bp, Artificial Sequence
  ENSG00000115425_25 (sequence is synthesized)
agagcaggtgtttacaacctcaccaaatctttagctttggaatgggcctgcagtggaatacggatcaattgtgttgcccctgtagggagttatttattcccagactgctgtggagaacta

SEQ ID NO: 209204 - DNA, 120 bp, Artificial Sequence
  ENSG00000115446_0 (sequence is synthesized)
ggcggaagtcggttcccgtgacgcggcgcgccccaagggccggctccgttgagggaagggaagcccgcccggtggcggctggggtcggctgctgggaggaggtggtgggctggttcggac

SEQ ID NO: 209205 - DNA, 120 bp, Artificial Sequence
  ENSG00000115446_1 (sequence is synthesized)
gtgggtcgaggctgtagcaggactccaggaagatgttaccgagtacttcagtgaattccttagtgcaggggaacggagtcttgaattccagggatgcggcaagacacacagccggagcga

SEQ ID NO: 209206 - DNA, 120 bp, Artificial Sequence
  ENSG00000115446_2 (sequence is synthesized)
aacgctacaaatatctgagaaggcttttccgctttcggcaaatggactttgaatttgctgcctggcagatgctctacctgttcacatccccacagagagtttacagaaattttcattatc

SEQ ID NO: 209207 - DNA, 120 bp, Artificial Sequence
  ENSG00000115446_3 (sequence is synthesized)
gaaaacagacgaaggaccagtgggccagagatgaccctgctttcttggtcctgttaagtatctggctctgtgtgtccactataggatttggctttgtgctggacatgggattctttgaga

SEQ ID NO: 209208 - DNA, 120 bp, Artificial Sequence
  ENSG00000115446_4 (sequence is synthesized)
ctttaatgtggttcatctctaacaagtatttagtgaaacgacagagcagagactatgatgtggaatggggctatgcttttgatgtgcatctcaatgctttttatccactcctggtcattt

SEQ ID NO: 209209 - DNA, 120 bp, Artificial Sequence
  ENSG00000115446_5 (sequence is synthesized)
tgcattttatccagctttttttcatcaaccatgttatcctgacagacacatttattggatatttagttggaaataccttatggttggttgcagttggctattatatctatgtaactttcc

SEQ ID NO: 209210 - DNA, 120 bp, Artificial Sequence
  ENSG00000115446_6 (sequence is synthesized)
tgggatacagtgcattgccatttttgaaaaatacagtaattcttctgtatccatttgcacctctgattctgctctacgggctttccctggcactgggatggaacttcacccatactctct

SEQ ID NO: 209211 - DNA, 120 bp, Artificial Sequence
  ENSG00000115446_7 (sequence is synthesized)
gttctttctataagtacagagtgaaataaaaagtgagaagaagattcaatcgtaactgtgtcaacagtattgtgaagtgatcatttcttgtaaaacttgtaaataaactatcatctttgt

SEQ ID NO: 209212 - DNA, 120 bp, Artificial Sequence
  ENSG00000115446_8 (sequence is synthesized)
agatatcttaaaggtgtaaagtttgcaaatttgaagaaatatatattaacactgtggtcaggtacattccttaaaactaattaaatgtacatttctataataaatattttttaaactaaa

SEQ ID NO: 209213 - DNA, 120 bp, Artificial Sequence
  ENSG00000115446_9 (sequence is synthesized)
gtgggtcgaggctgtagcaggactccaggtgaggcctgaggaccactctgccctcccgcggcccgggctcgcgccgggggccatttaatcccgacagcttgcggcctgacgtcgctgcgg

SEQ ID NO: 209214 - DNA, 120 bp, Artificial Sequence
  ENSG00000115446_10 (sequence is synthesized)
cctggcagtgaccatgtcggcgtccggcccctcggccggcgatagagttgcggctaaaatgaaaggacgcccagttacatttgcatcgtagataaagaaagagcatttagtataagcatg

SEQ ID NO: 209215 - DNA, 120 bp, Artificial Sequence
  ENSG00000115446_11 (sequence is synthesized)
tccgaaatgttgcgtgggatgtaggcatactaaaaccttattcgtggcctgtctgaaatccaaatggagctgggtattctgtgtttttatttgctaaatctggcagccgtacccgcggcc

SEQ ID NO: 209216 - DNA, 120 bp, Artificial Sequence
  ENSG00000115446_12 (sequence is synthesized)
ccgggcagggagggagcagctgggctcggccagaccctgccggcgtctggggggcctgcgaagtggaggggagacgggcagccgggcagtggccggcgttccccggagctcggaccggtt

SEQ ID NO: 209217 - DNA, 120 bp, Artificial Sequence
  ENSG00000115446_13 (sequence is synthesized)
ggattggactccgacgctaccgctccctctgctgaactattccggatgtaaaacactagggatcggagtttttcttggttttttaatctcattctagtgaccgagaagcttgctggcagt

SEQ ID NO: 209218 - DNA, 120 bp, Artificial Sequence
  ENSG00000115446_14 (sequence is synthesized)
gcgctgatggatctgtgtgaataggccatttatttgacctcttcagtaacactgttctaaccggctgaaactgctttcttaggcattttcttaaaagcttggtggttaagagcacggaat

SEQ ID NO: 209219 - DNA, 120 bp, Artificial Sequence
  ENSG00000115446_15 (sequence is synthesized)
ttcgagtcagatttccaatcttggctctatcactatcctcggagtcatggggcagtcacatcatccctgtctctgtaatggtagctgcccctggataagtgttattaggtgattcagaag

SEQ ID NO: 209220 - DNA, 120 bp, Artificial Sequence
  ENSG00000115446_16 (sequence is synthesized)
ggtgggctgttgcccttgcctgaggttgcagtctgcggttcccaagccccaagacccgcctcagaactaactgcatttgcttttgactcctggcctttctctagggttgggaagaacatg

SEQ ID NO: 209221 - DNA, 80 bp, Artificial Sequence
  ENSG00000115457_0 (sequence is synthesized)
gaggaagaagcggaggaggcggctcccgcgctcgcagggccgtgccacctgcccgcccgcccgctcgctcgctcgcccgc

SEQ ID NO: 209222 - DNA, 80 bp, Artificial Sequence
  ENSG00000115457_1 (sequence is synthesized)
gctgctgctgctgctactgggcgcgagtggcggcggcggcggggcgcgcgcggaggtgctgttccgctgcccgccctgca

SEQ ID NO: 209223 - DNA, 80 bp, Artificial Sequence
  ENSG00000115457_2 (sequence is synthesized)
cccgccgcggtggccgcagtggccggaggcgcccgcatgccatgcgcggagctcgtccgggagccgggctgcggctgctg

SEQ ID NO: 209224 - DNA, 120 bp, Artificial Sequence
  ENSG00000115457_3 (sequence is synthesized)
gctgctcggtgtgcgcccggctggagggcgaggcgtgcggcgtctacaccccgcgctgcggccaggggctgcgctgctatccccacccgggctccgagctgcccctgcaggcgctggtca

SEQ ID NO: 209225 - DNA, 120 bp, Artificial Sequence
  ENSG00000115457_4 (sequence is synthesized)
tgggcgagggcacttgtgagaagcgccgggacgccgagtatggcgccagcccggagcaggttgcagacaatggcgatgaccactcagaaggaggcctggtggagaaccacgtggacagca

SEQ ID NO: 209226 - DNA, 120 bp, Artificial Sequence
  ENSG00000115457_5 (sequence is synthesized)
gcagcaccggcagatgggcaagggtggcaagcatcaccttggcctggaggagcccaagaagctgcgaccaccccctgccaggactccctgccaacaggaactggaccaggtcctggagcg

SEQ ID NO: 209227 - DNA, 120 bp, Artificial Sequence
  ENSG00000115457_6 (sequence is synthesized)
gatctccaccatgcgccttccggatgagcggggccctctggagcacctctactccctgcacatccccaactgtgacaagcatggcctgtacaacctcaaacagtgcaagatgtctctgaa

SEQ ID NO: 209228 - DNA, 120 bp, Artificial Sequence
  ENSG00000115457_7 (sequence is synthesized)
cgggcagcgtggggagtgctggtgtgtgaaccccaacaccgggaagctgatccagggagcccccaccatccggggggaccccgagtgtcatctcttctacaatgagcagcaggaggctcg

SEQ ID NO: 209229 - DNA, 120 bp, Artificial Sequence
  ENSG00000115457_8 (sequence is synthesized)
cggggtgcacacccagcggatgcagtagaccgcagccagccggtgcctggcgcccctgccccccgcccctctccaaacaccggcagaaaacggagagtgcttgggtggtgggtgctggag

SEQ ID NO: 209230 - DNA, 120 bp, Artificial Sequence
  ENSG00000115457_9 (sequence is synthesized)
gattttccagttctgacacacgtatttatatttggaaagagaccagcaccgagctcggcacctccccggcctctctcttcccagctgcagatgccacacctgctccttcttgctttcccc

SEQ ID NO: 209231 - DNA, 120 bp, Artificial Sequence
  ENSG00000115457_10 (sequence is synthesized)
gggggaggaagggggttgtggtcggggagctggggtacaggtttggggagggggaagagaaatttttatttttgaacccctgtgtcccttttgcataagattaaaggaaggaaaagtaaa

SEQ ID NO: 209232 - DNA, 120 bp, Artificial Sequence
  ENSG00000115457_11 (sequence is synthesized)
caggtttggaaaactgcaatagtcactaagaccattcggggctgtttgggtctagcttggtctagacgggtctgaaactccgcaggacccacccaacaagaagtcattgttccaagccac

SEQ ID NO: 209233 - DNA, 120 bp, Artificial Sequence
  ENSG00000115457_12 (sequence is synthesized)
gactgtggcaggctggagctgttttcaaggcctccttcacctaggctgtgcatacaaaaggttgaagaaagtataaggagacttaatggacgcttgttggacagacatcacgaagcttca

SEQ ID NO: 209234 - DNA, 120 bp, Artificial Sequence
  ENSG00000115457_13 (sequence is synthesized)
ctaataagaccctcatctggtgtgacctgtaggcaaagcacttttctttccacaaacatagttgtggaacatagttagtgacctttggggcagtcagtatctctggctgtgaaatagact

SEQ ID NO: 209235 - DNA, 120 bp, Artificial Sequence
  ENSG00000115457_14 (sequence is synthesized)
ggacatgtggtttcttgatgttctttccttctaaaaccttcacatttctgtatggttttggaacatagacacagaaaatgaatcccagagatgaagacagagtccctgaaacttgcttac

SEQ ID NO: 209236 - DNA, 80 bp, Artificial Sequence
  ENSG00000115457_15 (sequence is synthesized)
aatcccagagatgaagacagagtccctgaaacttgcttactcttttttttttcctccccctggtgccatcacacctcact

SEQ ID NO: 209237 - DNA, 89 bp, Artificial Sequence
  ENSG00000115457_16 (sequence is synthesized)
tcaagtgatcctccttcctcagcctcctgaactggccagttttgtattttttggtggaaatgtgggtctcactatgttgtccaggctgg

SEQ ID NO: 209238 - DNA, 120 bp, Artificial Sequence
  ENSG00000115457_17 (sequence is synthesized)
gcaatcctcccacctcggcctcccgaagcgctgggattacaggcgccagccactgcgcctggcctgaaactcagtcttgttgccatatgcttctctcactgagctacccctcccctcttt

SEQ ID NO: 209239 - DNA, 120 bp, Artificial Sequence
  ENSG00000115457_18 (sequence is synthesized)
cctgcccagctctgccatcttgggtcctggccctggttggttttatggaaagaagtggagcttgggcatggggtgggggcatggagactcgagacggccacttagatggatatttggagg

SEQ ID NO: 209240 - DNA, 120 bp, Artificial Sequence
  ENSG00000115457_19 (sequence is synthesized)
cagagcccattctgacacatgaaagccacggtcacagaacaaggagaggagtgaacattcccatccatacaattttctttaggggctggggttgggcacccagcatggcagggagatccc

SEQ ID NO: 209241 - DNA, 120 bp, Artificial Sequence
  ENSG00000115457_20 (sequence is synthesized)
cgggcaggctgtcagaagtccctgtgccccctgctggctgtgtgaccatgggaaagtcccctccctgtgcagcagcttctcgctgagcttgcgtctggcgcgtgcttcgtgggcctgctg

SEQ ID NO: 209242 - DNA, 120 bp, Artificial Sequence
  ENSG00000115457_21 (sequence is synthesized)
cttgtttctgccccacccgcctatgatcctctgaggtctgagctgagtgagagactcagactcctgtcaccatggggattgggatgccagctgccaggccggggagggtgcagctcttct

SEQ ID NO: 209243 - DNA, 120 bp, Artificial Sequence
  ENSG00000115457_22 (sequence is synthesized)
gaagtggcttaaaccaagcatctttgctttgatcggacattgacatcacctggagctcttcctgggcccgcccccaaattgccatgtggtaggtcaggtttacagctctaacaagcctca

SEQ ID NO: 209244 - DNA, 120 bp, Artificial Sequence
  ENSG00000115457_23 (sequence is synthesized)
ggtgaggctcataatctgtgagccacactcccaccatcattgatttcaaccactggccgagttgtcttcatggtttcgaagtatctcagggaatgaagagtcaggcatggagaaatgccg

SEQ ID NO: 209245 - DNA, 120 bp, Artificial Sequence
  ENSG00000115457_24 (sequence is synthesized)
ttggaaagattctgaaaagccatctagaacaccattgtaaatacattggagaaaatgaagtttaagtaaaccactcaggagcccttctccctcctctatccaccttctgttcatatgcat

SEQ ID NO: 209246 - DNA, 79 bp, Artificial Sequence
  ENSG00000115457_25 (sequence is synthesized)
gcccttctccctcctctatccaccttctgttcatatgcattttaacagtcactgtgcatatgcaatattttccctgtaa

SEQ ID NO: 209247 - DNA, 61 bp, Artificial Sequence
  ENSG00000115457_26 (sequence is synthesized)
gatgatccccattgggatttttataaagctaccctggtggttctaatggcagtctgggctg

SEQ ID NO: 209248 - DNA, 120 bp, Artificial Sequence
  ENSG00000115457_27 (sequence is synthesized)
tataaagctaccctggtggttctaatggcagtctgggctgacctaaagtgtggatgtgtgaagccaggagatgggaacagggctctgctgatggcttaggggtctcacctctccaccccc

SEQ ID NO: 209249 - DNA, 120 bp, Artificial Sequence
  ENSG00000115457_28 (sequence is synthesized)
ttcacccaggcaccttgaccctctaaatattagtttagtattaaaagctatttgtgtacatgccctctaaatgtaagctggctaactccatttggagctcagaagaaaaagtctcgatca

SEQ ID NO: 209250 - DNA, 120 bp, Artificial Sequence
  ENSG00000115457_29 (sequence is synthesized)
cttctcatgggaaacaggctgtctgctgcacctttgggtaactaaagtgatttgcaggagtagttagcttatgcataaaacagagaccttggagtgggaatgcctggcttccatctcagc

SEQ ID NO: 209251 - DNA, 120 bp, Artificial Sequence
  ENSG00000115457_30 (sequence is synthesized)
tgtgcttcttaccagctgtgtgaccttgggcaagttgcttagcccatctgtgcttcagttttatcatctgtaaaccagggataataatggcatctaattcacaaagtggttgtgaggatt

SEQ ID NO: 209252 - DNA, 120 bp, Artificial Sequence
  ENSG00000115457_31 (sequence is synthesized)
aaatgactatatttgttagaaactgaactagcagtgtgtcttgcacacacagtgcctggcacacactgattttgattgcaacatgaggttttacacctgacgctatgactaagcttcagt

SEQ ID NO: 209253 - DNA, 120 bp, Artificial Sequence
  ENSG00000115457_32 (sequence is synthesized)
atgctgggtcccccccactggatgggacctctttgaggctggggactgagtcttttcatcttcgggtgtcctgaatggccttgctaatcagaggggtccctgggcgggcagcatcagcat

SEQ ID NO: 209254 - DNA, 120 bp, Artificial Sequence
  ENSG00000115457_33 (sequence is synthesized)
cacgttggagctcgctagcgatgcagaatttccagctctccagggacctactgcatgggaatctgcattttatcaaggtttcctggcgcatatttgaagttgcgaagctccacccggcag

SEQ ID NO: 209255 - DNA, 120 bp, Artificial Sequence
  ENSG00000115457_34 (sequence is synthesized)
cgcatgggtagctgcaaggggtggctgctcagtggacgccgggttgagggacagaaggaaagttgctggctgcgggctcctccatgctcttctcctctctccccagtgcaagatgtctct

SEQ ID NO: 209256 - DNA, 120 bp, Artificial Sequence
  ENSG00000115457_35 (sequence is synthesized)
aagcatcaccttggcctggaggagcccaagaagctgcgaccaccccctgccaggcagcttctcgctgagcttgcgtctggcgcgtgcttcgtgggcctgctgtcctcactccgggcgtcc

SEQ ID NO: 209257 - DNA, 120 bp, Artificial Sequence
  ENSG00000115459_0 (sequence is synthesized)
gcggctgtgcgcatgagcagatgaggcctagccgaggcggcgggacccccaagtttggaaagctcttttaacggctatgcgaaagttctgtccaaaggctgctcacagcccctgtctgac

SEQ ID NO: 209258 - DNA, 120 bp, Artificial Sequence
  ENSG00000115459_1 (sequence is synthesized)
tggttgtcatgatgaattgagctctctgttacctgcgcatcacaaccgagctgaggcttcgaagacctcagaggacttctctcagcactcacagaaacctcctacaccctcggatggcac

SEQ ID NO: 209259 - DNA, 120 bp, Artificial Sequence
  ENSG00000115459_2 (sequence is synthesized)
aaagggactgttttcttactcttagtctgagtgactgccaaggaaggcaaaggtagagcaactggatctctggctctccacatagcttctgatctcagaccttactaaaatgctttctgg

SEQ ID NO: 209260 - DNA, 120 bp, Artificial Sequence
  ENSG00000115459_3 (sequence is synthesized)
gcccaaggacaaagctcacatgaacaaatgattttgagtcatgaatgaaaaatcttgctctttccatagtaaagaagaattaagagatggacagggtgaaagattgtctgctggatattc

SEQ ID NO: 209261 - DNA, 120 bp, Artificial Sequence
  ENSG00000115459_4 (sequence is synthesized)
tccatcatatgacaaggacaagagtgttctggctttcagaggaatccctatctcagagttgaagaaccatggcattctccaggctctgaccacagaagcttatgaatgggagccacgtgt

SEQ ID NO: 209262 - DNA, 120 bp, Artificial Sequence
  ENSG00000115459_5 (sequence is synthesized)
tgtgagtacagaggtggtcagagcccaagaagaatgggaagctgtggacaccatccagccagagacagggagccaagctagctcagagcagcctgggcagctaatctccttcagtgaggc

SEQ ID NO: 209263 - DNA, 120 bp, Artificial Sequence
  ENSG00000115459_6 (sequence is synthesized)
cctgcagcacttccagactgtggacctttcccccttcaagaaaagaatccagccaactattcgaaggactgggctcgccgccctccgacactacctcttcgggcctccaaagctccacca

SEQ ID NO: 209264 - DNA, 120 bp, Artificial Sequence
  ENSG00000115459_7 (sequence is synthesized)
gcgccttcgggaagaaagggacttggtcctgaccattgctcagtgtggcctggatagccaagacccagtgcatggccgagtcctccagaccatctataagaagctgaccggctccaagtt

SEQ ID NO: 209265 - DNA, 120 bp, Artificial Sequence
  ENSG00000115459_8 (sequence is synthesized)
tgactgtgcccttcatggaaaccactgggaggacctgggctttcagggagcgaatccagccacagacctgagaggcgcaggcttccttgccctcctgcatctgctctacctggtgatgga

SEQ ID NO: 209266 - DNA, 120 bp, Artificial Sequence
  ENSG00000115459_9 (sequence is synthesized)
atccagcaattccctttctgtttgatgtccgtgaacatcacccacattgccatccaggccttgagagaggagtgtctctccagagagtgtaatcggcagcagaaggtcatccccgtggtg

SEQ ID NO: 209267 - DNA, 120 bp, Artificial Sequence
  ENSG00000115459_10 (sequence is synthesized)
aacagcttctatgccgccacattcctccacctcgcacatgtctggaggacacagcggaagaccatctcagactcgggctttgtcctcaaagagttggaagtattggccaagaagagccca

SEQ ID NO: 209268 - DNA, 120 bp, Artificial Sequence
  ENSG00000115459_11 (sequence is synthesized)
cggcggctgctcaagaccctggagctgtacttggccagggtgtcaaagggacaggcctccttgttgggagcacagaagtgctatgggccagaagcccctcccttcaaggatctcaccttc

SEQ ID NO: 209269 - DNA, 120 bp, Artificial Sequence
  ENSG00000115459_12 (sequence is synthesized)
acaggtgagagtgacctgcagtctcactcatccgaaggcgtatggctgatctgacctccgagatgaatggaggcttaaaggctgagctgcaggggctttcagggggtcagtggagccatg

SEQ ID NO: 209270 - DNA, 120 bp, Artificial Sequence
  ENSG00000115459_13 (sequence is synthesized)
tcaggagcctggccaggccgcaccccttgctgtctcagcagatgggatataggaagctcctgggcttagctgtgggaagccaagtaccctcaccggcatgggacatgaggggcagctaga

SEQ ID NO: 209271 - DNA, 120 bp, Artificial Sequence
  ENSG00000115459_14 (sequence is synthesized)
cttcacccccttcccgcagacctgcctccagagcaaggagaattctgccttaatctgttgggctccagtctccgggttgaattccagtgtatcccactgggagtgaatggatcatgaggt

SEQ ID NO: 209272 - DNA, 120 bp, Artificial Sequence
  ENSG00000115459_15 (sequence is synthesized)
gggatggccccatctggatgttctgcagatccccacatgggaggagattcccaagtagaggcagccagaattctgactccctggcagcagcagggctttcaggcaccagtgtctgtgttg

SEQ ID NO: 209273 - DNA, 120 bp, Artificial Sequence
  ENSG00000115459_16 (sequence is synthesized)
ttagaactcagaggaagaggcaggggcagcagccgacagggggcagcatgacccaagcaaggggcctgaggcctcagtgggggtagggcaaggaggtacctcacaggtgggtgtgaggcc

SEQ ID NO: 209274 - DNA, 120 bp, Artificial Sequence
  ENSG00000115459_17 (sequence is synthesized)
ccctctggagtttctggccattcacttacccactctcttctccccctgacccccgctccattgtttatgatggaaaaacggacatttggctaggtgtctctcacggctgctccatcctag

SEQ ID NO: 209275 - DNA, 120 bp, Artificial Sequence
  ENSG00000115459_18 (sequence is synthesized)
cccccacaagctggggcttcctcctgtagatgctgtgcatgccccatgatgagtttctggcctaattgagggaaggaggaaattcataccagcagttttcaaataaaagaattgttctaa

SEQ ID NO: 209276 - DNA, 120 bp, Artificial Sequence
  ENSG00000115459_19 (sequence is synthesized)
tgaattgagctctctgttacctgcgcatcacaaccgatagtaactgtccctactgaaggccccaggagtgctccagccagagctgaggcttcgaagacctcagaggacttctctcagcac

SEQ ID NO: 209277 - DNA, 120 bp, Artificial Sequence
  ENSG00000115459_20 (sequence is synthesized)
atgctacttggttcattttctacacagcaacagaagagccctcctgagattgctattaccatacccgcctgtcaccttgccaaggctggccaatgccgagcgtgttggctcatgcctgta

SEQ ID NO: 209278 - DNA, 120 bp, Artificial Sequence
  ENSG00000115459_21 (sequence is synthesized)
ttgccaaggctggccaatgtgtgttttgtcataggctgtcatggaggccatgatggaggaaaaggaaaggggaggcagatgttgagagctgaggcttcgaagacctcagaggacttctct

SEQ ID NO: 209279 - DNA, 120 bp, Artificial Sequence
  ENSG00000115459_22 (sequence is synthesized)
agttctcggggccaggggagccggcacggaagcggctgtgcgcatgagcagatgaggcctagccgaggcggcgggacccccaagtttggaaagctcttttaacgatagtaactgtcccta

SEQ ID NO: 209280 - DNA, 120 bp, Artificial Sequence
  ENSG00000115459_23 (sequence is synthesized)
tttgacatcttcggagaaaggattcggggagctgccagagaatagtcccaagtaaactttgcagaggacggccagcagcagcacagccaggagcagcaccagcggaagccacatcacgcc

SEQ ID NO: 209281 - DNA, 120 bp, Artificial Sequence
  ENSG00000115459_24 (sequence is synthesized)
ggcgtcgggtcgggtaaatgggacagctccgactgcgctcagcctctaggactgtggctccgcccgggctagttcgctctccagtcaggaggcggaggcagctttgagcactgattaacc

SEQ ID NO: 209282 - DNA, 120 bp, Artificial Sequence
  ENSG00000115459_25 (sequence is synthesized)
aggtgtgctctttcttctggggaggcctaggctgaatgcacagtgtcccaggtccagagagcccaaggtggttgctagactggttttggctgcagttcttccccatccacactttctcaa

SEQ ID NO: 209283 - DNA, 120 bp, Artificial Sequence
  ENSG00000115459_26 (sequence is synthesized)
tagttctcctttctctgccctgactgtcgcccttttctggtcttatacttatgacaagcatatattctgatcaaaaattgggagccagggtccaatagttggactattcaaagttgcaat

SEQ ID NO: 209284 - DNA, 120 bp, Artificial Sequence
  ENSG00000115459_27 (sequence is synthesized)
tgtgcagacaaggtagagtgtgtggtccctgtggctgtagctggctccctagcctacctctctggtgatctctccatctgaggctccttcactttctctccatgggataggggttggggg

SEQ ID NO: 209285 - DNA, 120 bp, Artificial Sequence
  ENSG00000115459_28 (sequence is synthesized)
tactccctagagctgctaggcttgaggccttgactgttgtgtcacccagagccccctcaagccttctgctccccaattctctctgttgcagagttggaagtattggccaagaagagccca

SEQ ID NO: 209286 - DNA, 120 bp, Artificial Sequence
  ENSG00000115459_29 (sequence is synthesized)
gaccttgccgatggcgcaggagattttccgcctgtctcgtcaccacatccagattgaaagaaatcaagggaagggatgatattatgcaagtatatatgatcattaaataggcaatacctg

SEQ ID NO: 209287 - DNA, 120 bp, Artificial Sequence
  ENSG00000115459_30 (sequence is synthesized)
aggaaagttactaaaggtcactgagccttagttcctcatctgtaagatgggaagaagattattaggaaaattaagtggaagcaataataatatcagctgttgcctctggggctgtgcttg

SEQ ID NO: 209288 - DNA, 120 bp, Artificial Sequence
  ENSG00000115459_31 (sequence is synthesized)
ggacggagtcctctatggcgggtccctaatgacaccccatccgtggggaacctgggggacggggagccgcccatggacaagcatggtgaaaggatcagctaagggcccatctaatttaaa

SEQ ID NO: 209289 - DNA, 120 bp, Artificial Sequence
  ENSG00000115459_32 (sequence is synthesized)
ttcctatgcagagaatctaacctccagcaagcagttgaagaatcataccccctccttgcctaaagagggtgcataatgaatacttgattggagaaggatccatttttacaggaaggccgt

SEQ ID NO: 209290 - DNA, 120 bp, Artificial Sequence
  ENSG00000115459_33 (sequence is synthesized)
ttccttaggtccaactatcaggaatttgcctttgagtacttccttgtttaatggaattgttgctcttttcttctctgctacagatagtaactgtccctactgaaggccccaggagtgctc

SEQ ID NO: 209291 - DNA, 120 bp, Artificial Sequence
  ENSG00000115459_34 (sequence is synthesized)
ctaagggggcattgccctgtcccccggattacagtgagccacatgtcaagcccaagagccaggaggtattcttcctctcagtgttaataatcaaagcatcctgacaccagcagccagttt

SEQ ID NO: 209292 - DNA, 120 bp, Artificial Sequence
  ENSG00000115459_35 (sequence is synthesized)
ttatggcatcctggagggctgacctcatagagaggctaccctccttccttagtcacccaaagttgtgaactatgattgtcagttgtgtgtgggccatctgcccacttaggatgcaatttt

SEQ ID NO: 209293 - DNA, 120 bp, Artificial Sequence
  ENSG00000115459_36 (sequence is synthesized)
tgatgtgacagacattccggatgtccaattcccctgtgatgaggtatgagccttgtccagcccttttcctgagggaagcaatgtcagatgaaagacttagaattgcccaaactggctagc

SEQ ID NO: 209294 - DNA, 120 bp, Artificial Sequence
  ENSG00000115459_37 (sequence is synthesized)
cagctgccacatgcacagtattgctgataactgagaaaggttagaacatcgtgttgcattttgaatttctaccattgttggaaccaggtctagtattataagcccctgacccagcctgtg

SEQ ID NO: 209295 - DNA, 120 bp, Artificial Sequence
  ENSG00000115459_38 (sequence is synthesized)
tgtgaggcctaaacaaagcctgagcacttcagctaagaccacccaccaaggtgacacctttagcctcacgcctttgataagctggcccaggtcccagtaactccattgtcagaaacagac

SEQ ID NO: 209296 - DNA, 120 bp, Artificial Sequence
  ENSG00000115459_39 (sequence is synthesized)
cccatcccttctagtggtgctgctgccttttggacacagaatccagctcacagtcccctgtgtggtccccttttggccatcctgtggcttgggtagtaagaggtaagcatttggctgagg

SEQ ID NO: 209297 - DNA, 120 bp, Artificial Sequence
  ENSG00000115459_40 (sequence is synthesized)
tggcttgggtagtaagaggtaagcatttggctgaggcaagttgttcattcagaataaattcacagctgcttaaattttgtcaacaggccgagcgtgttggctcatgcctgtaatcccagc

SEQ ID NO: 209298 - DNA, 60 bp, Artificial Sequence
  ENSG00000115459_41 (sequence is synthesized)
acgcctgtaattccagctactcgggagactgggacaggagaatcgcttgaacccgggagg

SEQ ID NO: 209299 - DNA, 66 bp, Artificial Sequence
  ENSG00000115459_42 (sequence is synthesized)
gatcgcacggttgtcaacagaggcataactgaatggtgaaaccagttttctttttcaatttctttt

SEQ ID NO: 209300 - DNA, 120 bp, Artificial Sequence
  ENSG00000115459_43 (sequence is synthesized)
ccattgctcagtgtgagtgcaatgcgagcccacagggcagttgctgcatctgtggttgggcaagaccgtgtgtgctgaccctgtgaggctaagccaggaatattgcatgtaccatggttg

SEQ ID NO: 209301 - DNA, 120 bp, Artificial Sequence
  ENSG00000115459_44 (sequence is synthesized)
gaaaaatttagaaaccctcattatagttctctttgttctgtaagaaggagcttctattcacctcagggtcaattgcttttcctaatagcttgttttgtaagtgagttatgagatttttgt

SEQ ID NO: 209302 - DNA, 120 bp, Artificial Sequence
  ENSG00000115459_45 (sequence is synthesized)
tttctttttgcttgggtagtggggagaatttcattgaggaatcacccaagaaatctgtatttcattgatttggatcattaccttactagcctcttccctgtgaaacgcttgctttggcct

SEQ ID NO: 209303 - DNA, 120 bp, Artificial Sequence
  ENSG00000115459_46 (sequence is synthesized)
gacctgggctttcagggtaagagggaggagtagctcatcttctttttcatgcctctgattccaggactagagtgagaggccaggtcgttctcttccagtgctatgagggggaagatcttg

SEQ ID NO: 209304 - DNA, 120 bp, Artificial Sequence
  ENSG00000115459_47 (sequence is synthesized)
agatcttgggggagtattccgggaagagggtgcagcaaatgcaaaagccctgagggggcgcctgctagttctgcttgaaaaatagcaagagtaggtcgggcgtggtggctcacgcctgta

SEQ ID NO: 209305 - DNA, 62 bp, Artificial Sequence
  ENSG00000115459_48 (sequence is synthesized)
acttgaggtcctattagggtggggtgcggtggcctgtgcctgtaatcccagcactttgggag

SEQ ID NO: 209306 - DNA, 71 bp, Artificial Sequence
  ENSG00000115459_49 (sequence is synthesized)
aggttaagcccgtctctactaaaaatagaaaatttagccaggcctggtggtatgcgcctgtaatcccagct

SEQ ID NO: 209307 - DNA, 77 bp, Artificial Sequence
  ENSG00000115459_50 (sequence is synthesized)
agtgagccgagattgcgccacggcactcaagccttggtgacagagtaagactctgtctcggaaaaaaaattaaaaat

SEQ ID NO: 209308 - DNA, 82 bp, Artificial Sequence
  ENSG00000115459_51 (sequence is synthesized)
aggcagaggttgcggtgaacagagatcgcactactgcactccagcctaggtgacaaagggagactgtctcagaaaaaaatag

SEQ ID NO: 209309 - DNA, 120 bp, Artificial Sequence
  ENSG00000115459_52 (sequence is synthesized)
agcctaggtgacaaagggagactgtctcagaaaaaaatagccagagtgtggctgaggtggagatgaaagtgacaggaggaaagatcacttggtggtcttttaggctgttgtaaacattta

SEQ ID NO: 209310 - DNA, 120 bp, Artificial Sequence
  ENSG00000115459_53 (sequence is synthesized)
ctgtaagtgatatggaaaacactggagtgatgtgacagaatctggcatttttgggttttttcctctctaaaaaatatttatgaaaattttatcatatattattttactttctgagtgaaa

SEQ ID NO: 209311 - DNA, 120 bp, Artificial Sequence
  ENSG00000115459_54 (sequence is synthesized)
aattttatcatatattattttactttctgagtgaaacagaatcatttcaccagtttttggattgtactattttttttcaaaaccatatcaaattggctgggcatggtggctcacacctat

SEQ ID NO: 209312 - DNA, 120 bp, Artificial Sequence
  ENSG00000115461_0 (sequence is synthesized)
gtagtctctttggaaacttctgcaggggaaaagagctaggaaagagctgcaaagcagtgtgggctttttcccttttttgctccttttcattacccctcctccgttttcacccttctccgg

SEQ ID NO: 209313 - DNA, 120 bp, Artificial Sequence
  ENSG00000115461_1 (sequence is synthesized)
ccgttttcacccttctccggacttcgcgtagaacctgcgaatttcgaagaggaggtggcaaagtgggagaaaagaggtgttagggtttggggtttttttgtttttgtttttgttttttaa

SEQ ID NO: 209314 - DNA, 120 bp, Artificial Sequence
  ENSG00000115461_2 (sequence is synthesized)
ctcccaccctctcggctgcagccaacgcctcttacctgttctgcggcgccgcgcaccgctggcagctgagggttagaaagcggggtgtattttagattttaagcaaaaattttaaagata

SEQ ID NO: 209315 - DNA, 120 bp, Artificial Sequence
  ENSG00000115461_3 (sequence is synthesized)
aatccatttttctctcccacccccaacgccatctccactgcatccgatctcattatttcggtggttgcttgggggtgaacaattttgtggctttttttcccctataattctgacccgctc

SEQ ID NO: 209316 - DNA, 120 bp, Artificial Sequence
  ENSG00000115461_4 (sequence is synthesized)
aggcttgagggtttctccggcctccgctcactgcgtgcacctggcgctgccctgcttcccccaacctgttgcaaggctttaattcttgcaactgggacctgctcgcaggcaccccagccc

SEQ ID NO: 209317 - DNA, 120 bp, Artificial Sequence
  ENSG00000115461_5 (sequence is synthesized)
tccacctctctctacatttttgcaagtgtctgggggagggcacctgctctacctgccagaaattttaaaacaaaaacaaaaacaaaaaaatctccgggggccctcttggcccctttatcc

SEQ ID NO: 209318 - DNA, 120 bp, Artificial Sequence
  ENSG00000115461_6 (sequence is synthesized)
ctgcactctcgctctcctgccccaccccgaggtaaagggggcgactaagagaagatggtgttgctcaccgcggtcctcctgctgctggccgcctatgcggggccggcccagagcctgggc

SEQ ID NO: 209319 - DNA, 120 bp, Artificial Sequence
  ENSG00000115461_7 (sequence is synthesized)
tccttcgtgcactgcgagccctgcgacgagaaagccctctccatgtgcccccccagccccctgggctgcgagctggtcaaggagccgggctgcggctgctgcatgacctgcgccctggcc

SEQ ID NO: 209320 - DNA, 120 bp, Artificial Sequence
  ENSG00000115461_8 (sequence is synthesized)
gaggggcagtcgtgcggcgtctacaccgagcgctgcgcccaggggctgcgctgcctcccccggcaggacgaggagaagccgctgcacgccctgctgcacggccgcggggtttgcctcaac

SEQ ID NO: 209321 - DNA, 120 bp, Artificial Sequence
  ENSG00000115461_9 (sequence is synthesized)
gaaaagagctaccgcgagcaagtcaagatcgagagagactcccgtgagcacgaggagcccaccacctctgagatggccgaggagacctactcccccaagatcttccggcccaaacacacc

SEQ ID NO: 209322 - DNA, 120 bp, Artificial Sequence
  ENSG00000115461_10 (sequence is synthesized)
cgcatctccgagctgaaggctgaagcagtgaagaaggaccgcagaaagaagctgacccagtccaagtttgtcgggggagccgagaacactgcccacccccggatcatctctgcacctgag

SEQ ID NO: 209323 - DNA, 120 bp, Artificial Sequence
  ENSG00000115461_11 (sequence is synthesized)
atgagacaggagtctgagcagggcccctgccgcagacacatggaggcttccctgcaggagctcaaagccagcccacgcatggtgccccgtgctgtgtacctgcccaattgtgaccgcaaa

SEQ ID NO: 209324 - DNA, 120 bp, Artificial Sequence
  ENSG00000115461_12 (sequence is synthesized)
ggattctacaagagaaagcagtgcaaaccttcccgtggccgcaaacgtggcatctgctggtgcgtggacaagtacgggatgaagctgccaggcatggagtacgttgacggggactttcag

SEQ ID NO: 209325 - DNA, 120 bp, Artificial Sequence
  ENSG00000115461_13 (sequence is synthesized)
tgccacaccttcgacagcagcaacgttgagtgatgcgtccccccccaacctttccctcaccccctcccacccccagccccgactccagccagcgcctccctccaccccaggacgccactc

SEQ ID NO: 209326 - DNA, 120 bp, Artificial Sequence
  ENSG00000115461_14 (sequence is synthesized)
atttcatctcatttaagggaaaaatatatatctatctatttgaggaaactgaggacctcggaatctctagcaagggctcaacttcgaaaatggcaacaacagagatgcaaaaagctaaaa

SEQ ID NO: 209327 - DNA, 120 bp, Artificial Sequence
  ENSG00000115461_15 (sequence is synthesized)
agacaccccccccctttaaatggttttctttttgaggcaagttggatgaacagagaagggaagagaggaagaacgagaggaagagaagggaaggaagtgtttgtgtagaagagagagaaa

SEQ ID NO: 209328 - DNA, 120 bp, Artificial Sequence
  ENSG00000115461_16 (sequence is synthesized)
gacgaatagagttaggaaaaggaagacaagcaggtgggcaggaaggacatgcaccgagaccaggcaggggcccaactttcacgtccagccctggcctggggtcgggagaggtgggcgcta

SEQ ID NO: 209329 - DNA, 120 bp, Artificial Sequence
  ENSG00000115461_17 (sequence is synthesized)
gaagatgcagcccaggatgtggcaatcaatgacactattggggtttcccaggatggattggtcagggggagaaaggaaaaggcaaaacactccaggacctctcccggatctgtctcctcc

SEQ ID NO: 209330 - DNA, 120 bp, Artificial Sequence
  ENSG00000115461_18 (sequence is synthesized)
tctagccagcagtatggacagctggacccctgaacttcctctcctcttacctgggcagagtgttgtctctccccaaatttataaaaactaaaatgcattccattcctctgaaagcaaaac

SEQ ID NO: 209331 - DNA, 120 bp, Artificial Sequence
  ENSG00000115461_19 (sequence is synthesized)
aaattcataattgagtgatattaaatagagaggttttcggaagcagatctgtgaatatgaaatacatgtgcatatttcattccccaggcagacattttttagaaatcaatacatgcccca

SEQ ID NO: 209332 - DNA, 120 bp, Artificial Sequence
  ENSG00000115461_20 (sequence is synthesized)
atattggaaagacttgttcttccacggtgactacagtacatgctgaagcgtgccgtttcagccctcatttaattcaatttgtaagtagcgcagcagcctctgtgggggaggataggctga

SEQ ID NO: 209333 - DNA, 120 bp, Artificial Sequence
  ENSG00000115461_21 (sequence is synthesized)
aaaaaaaaagtgggctcgtatttatctacaggactccatatagtcatatataggcatataaatctattctttttctttgtttttttctttcttcctttctttcaaaggtttgcattaact

SEQ ID NO: 209334 - DNA, 120 bp, Artificial Sequence
  ENSG00000115461_22 (sequence is synthesized)
tttcaaagtagttcctataggggcattgaggagcttcctcattctgggaaaactgagaaaacccatattctcctaatacaacccgtaatagcatttttgcctgcctcgaggcagagtttc

SEQ ID NO: 209335 - DNA, 120 bp, Artificial Sequence
  ENSG00000115461_23 (sequence is synthesized)
ccgtgagcaataaactcagcttttttgtggggcacagtactggatttgacagtgattccccacgtgtgttcatctgcacccaccgagccaggcagaggccagccctccgtggtgcacaca

SEQ ID NO: 209336 - DNA, 120 bp, Artificial Sequence
  ENSG00000115461_24 (sequence is synthesized)
gcacgcgcctcagtccatcccattttagtctttaaaccctcaggaagtcacagtctccggacaccacaccacatgagcccaacaggtccacgatggatccaccagtcccaccccagcctt

SEQ ID NO: 209337 - DNA, 120 bp, Artificial Sequence
  ENSG00000115461_25 (sequence is synthesized)
atgcaggagaacagtaagatggatggttccggccagagtcgatgtggggaggaacagagggctgaagggagagggggctgactgttccattctagctttggcacaaagcagcagaaaggg

SEQ ID NO: 209338 - DNA, 120 bp, Artificial Sequence
  ENSG00000115461_26 (sequence is synthesized)
ggaaaagccaatagaaatttccttagcttccccaccatatgtattttctaggatttgagaggaaagagaggaaaatgggggaatgggttgcaaaatagaaatgagcttaatccaggccgc

SEQ ID NO: 209339 - DNA, 120 bp, Artificial Sequence
  ENSG00000115461_27 (sequence is synthesized)
agagccagggaaggtgagtaactttaggagggtgctagactttagaagccagataggaagaatcagtctaaactggccatgctttggaagggacaagactatgtgctccgctgcccacct

SEQ ID NO: 209340 - DNA, 120 bp, Artificial Sequence
  ENSG00000115461_28 (sequence is synthesized)
tcagcctgcaatgagggactgaggcccacgagtctttccagctcttcctccattctggccagtccctgcatcctccctggggtggaggatggaaggaaagctgggacaagcagggaacgc

SEQ ID NO: 209341 - DNA, 120 bp, Artificial Sequence
  ENSG00000115461_29 (sequence is synthesized)
atgattcagggatgctgtcactcggcagccagattccgaaactcccattctccaatgacttcctcaaccaatgggtggccttgtgactgttctttaaggctgaagatatccaggaaaggg

SEQ ID NO: 209342 - DNA, 120 bp, Artificial Sequence
  ENSG00000115461_30 (sequence is synthesized)
ggcttggacactggccaaggagaccccttcgtgctgtggacacagctctcttcactctttgctcatggcatgacacagcggagaccgcctccaacaacgaatttggggctacgaagagga

SEQ ID NO: 209343 - DNA, 120 bp, Artificial Sequence
  ENSG00000115461_31 (sequence is synthesized)
atagcgaaaaagcaaatctgtttcaactgatgggaaccctatagctatagaacttgggggctatctcctatgcccctggacaggacagttggctggggacaggagaagtgctcaatcttc

SEQ ID NO: 209344 - DNA, 120 bp, Artificial Sequence
  ENSG00000115461_32 (sequence is synthesized)
atgagacaaaggggcccgatagggccagcagccacaaggccttgacctgccgagtcagcatgccccatctctctgcacagctgtcccctaaacccaactcacgtttctgtatgtcttagg

SEQ ID NO: 209345 - DNA, 120 bp, Artificial Sequence
  ENSG00000115461_33 (sequence is synthesized)
ccagtatcccaaacctcttccacgtcactgttctttccacccattctccctttgcatcttgagcagttatccaactaggatctgccaagtggatactggggtgccactcccctgagaaaa

SEQ ID NO: 209346 - DNA, 120 bp, Artificial Sequence
  ENSG00000115461_34 (sequence is synthesized)
gactgagccaggaactacaagctccccccacattcctcccagcctggacctaattcttgagaggggctctctcttcacggactgtgtctggactttgagcaggcttctgccccttgcgtt

SEQ ID NO: 209347 - DNA, 120 bp, Artificial Sequence
  ENSG00000115461_35 (sequence is synthesized)
ggctctttgctgccagccatcaggtgggggattagagcctggtgtaagtgcgccagactcttccggtttccaaagttcgtgcctgcgaacccaaacctgtgagtctcttctgcatgcagg

SEQ ID NO: 209348 - DNA, 120 bp, Artificial Sequence
  ENSG00000115461_36 (sequence is synthesized)
agtttctcctgggcagctggtcactccccagagaagctgggccttcatggacacatggaactaagcctcccaaatgggagttctggctgagcccagggtggggagatcctgggaagggag

SEQ ID NO: 209349 - DNA, 120 bp, Artificial Sequence
  ENSG00000115461_37 (sequence is synthesized)
gcactggaggaagacggcacctcttcccccatggcagggtgtgagggaggcaggtttggaatggtgcgagtatggcaatctaagcaggggtctggtctctttgactccaggctggccttt

SEQ ID NO: 209350 - DNA, 120 bp, Artificial Sequence
  ENSG00000115461_38 (sequence is synthesized)
ggccgactgtctgctcacccagagaccttggactccggactatccatggctccgaatctaagtgctgcccactcccatgctcacacccacagaaggtcttcccatcccctttagattcgt

SEQ ID NO: 209351 - DNA, 120 bp, Artificial Sequence
  ENSG00000115461_39 (sequence is synthesized)
gcctcactccaccagtgaggaagatgcctctgtctttcccacgactgccaggagatagggaagcccagccaggactgaccctccttcctccagcctgccctgacccacctggcaaagcag

SEQ ID NO: 209352 - DNA, 120 bp, Artificial Sequence
  ENSG00000115461_40 (sequence is synthesized)
ggcacatggggaggaagagactggaacctttctttgacagccaggcctagacagacaggcctggggacactggccccatgaggggaggaaggcaggcgcacgaggtccagggaggccctt

SEQ ID NO: 209353 - DNA, 120 bp, Artificial Sequence
  ENSG00000115461_41 (sequence is synthesized)
ttctgatcatgccccttctctcccaccccatctccccaccaccacctctgtggcctccatggtacccccacagggctggcctcccctagagggtgggcctcaaccacctgctcccgccac

SEQ ID NO: 209354 - DNA, 120 bp, Artificial Sequence
  ENSG00000115461_42 (sequence is synthesized)
gcaccggttagtgagacagggctgccacggcaaccgccaagcccccctcaaggtgggacagtaccccggacccatccactcactcctgagagggctccggcccagaatgggaacctcaga

SEQ ID NO: 209355 - DNA, 120 bp, Artificial Sequence
  ENSG00000115461_43 (sequence is synthesized)
gaagagctctaaggagaagaaaccccatagcgtcagagaggatatgtctggcttccaagagaaaggaggctccgttttgcaaagtggaggagggacgagggacaggggtttcaccagcca

SEQ ID NO: 209356 - DNA, 120 bp, Artificial Sequence
  ENSG00000115461_44 (sequence is synthesized)
gcaacctgggccttgtactgtctgtgtttttaaaaccactaaagtgcaagaattacattgcactgtttctccactttttattttctcttaggcttttgtttctatttcaaacatactttc

SEQ ID NO: 209357 - DNA, 120 bp, Artificial Sequence
  ENSG00000115461_45 (sequence is synthesized)
ttggttttctaatggagtatatagtttagtcatttcacagactctggcctcctctcctgaaatccttttggatggggaaagggaaggtggggagggtccgaggggaaggggaccccagct

SEQ ID NO: 209358 - DNA, 120 bp, Artificial Sequence
  ENSG00000115461_46 (sequence is synthesized)
tccctgtgcccgctcaccccactccaccagtccccggtcgccagccggagtctcctctctaccgccactgtcacaccgtagcccacatggatagcacagttgtcagacaagattccttca

SEQ ID NO: 209359 - DNA, 120 bp, Artificial Sequence
  ENSG00000115461_47 (sequence is synthesized)
gttgtttttctttttctttttttttttgaagacagcaataaccacagtacatattactgtagttctctatagttttacatacattcataccataactctgttctctcctcttttttgttt

SEQ ID NO: 209360 - DNA, 120 bp, Artificial Sequence
  ENSG00000115461_48 (sequence is synthesized)
acattcataccataactctgttctctcctcttttttgttttcaactttaaaaacaaaaataaacgatgataatctttactggtgaaaaggatggaaaaataaatcaacaaatgcaaccag

SEQ ID NO: 209361 - DNA, 120 bp, Artificial Sequence
  ENSG00000115461_49 (sequence is synthesized)
aaaaaagccgaaaaaaaaaaaaaaaacacctgaatgcggaagagctcggctcccgtttagcattttgtacttaaggaaataaaaaaccaacaaaggatctcacattttcttaaaaagtga

SEQ ID NO: 209362 - DNA, 120 bp, Artificial Sequence
  ENSG00000115461_50 (sequence is synthesized)
ttttcttaaaaagtgaagattgctgtatactatttattcaacttataatttatgttactccttgatctttgtcttttgtcatgacaaagcatttatttaataaagttatgcattcagtta

SEQ ID NO: 209363 - DNA, 120 bp, Artificial Sequence
  ENSG00000115461_51 (sequence is synthesized)
tgtgctccaggagggcagagacacatctgcttcagcctttattactcccctcaccccaaactgcccagccctgggctctggccgtgtgcaccttggcccacgggggctgaccctccggct

SEQ ID NO: 209364 - DNA, 89 bp, Artificial Sequence
  ENSG00000115464_0 (sequence is synthesized)
gcagcccgagcgctctgttaaaatggcggcggcgtcggcggtggccgcggcgtctggtcggtgaagtgactctgctgcttctctcccca

SEQ ID NO: 209365 - DNA, 80 bp, Artificial Sequence
  ENSG00000115464_1 (sequence is synthesized)
gtccttcccccccttccccgccgccggcgcctcggcgcccctccggcctgcgcacctcccctcgctcccctcctctcccc

SEQ ID NO: 209366 - DNA, 80 bp, Artificial Sequence
  ENSG00000115464_2 (sequence is synthesized)
ctccccgccccgccggccggccggccccctcctccgcctctctcccctcccccccgccggtcgggatcagtcagtgtgat

SEQ ID NO: 209367 - DNA, 120 bp, Artificial Sequence
  ENSG00000115464_3 (sequence is synthesized)
ccgaagcgggggagggggggggcggcggccgaacgatgtgcgagaactgcgcagacctggtggaggtgttaaatgaaatatcagatgtagaaggtggtgatggactgcagctcagaaagg

SEQ ID NO: 209368 - DNA, 120 bp, Artificial Sequence
  ENSG00000115464_4 (sequence is synthesized)
aacatactctcaaaatatttacttatatcaattcctggacacagaggcaatgtctatgctgcttcaaggaatataagcatttggagatttttaatcaagtagtgtgtgcacttattaact

SEQ ID NO: 209369 - DNA, 120 bp, Artificial Sequence
  ENSG00000115464_5 (sequence is synthesized)
tagtgattgcccaagttcaagtgctccgggaccagctttgtaaacattgtactaccattaacatagattccacgtggcaagatgagagtaatcaagcagaagaaccactgaatatagata

SEQ ID NO: 209370 - DNA, 120 bp, Artificial Sequence
  ENSG00000115464_6 (sequence is synthesized)
gagagtgtaatgaaggaagtacagaaagacaaaaatcaatagaaaaaaaatcaaactctacaagaatttgtaatctgactgaggaggaatcttcaaagagttctgatccttttagtttat

SEQ ID NO: 209371 - DNA, 120 bp, Artificial Sequence
  ENSG00000115464_7 (sequence is synthesized)
ggagtacagatgagaaggaaaaactcttactatgtgtggcaaaaatttttcaaattcagtttcccttatatactgcttacaagcataatactcaccctactattgaggatatatcaactc

SEQ ID NO: 209372 - DNA, 120 bp, Artificial Sequence
  ENSG00000115464_8 (sequence is synthesized)
aagaaagtaacatattaggggcattctgtgatatgaatgatgtagaagtaccattgcatttgcttcgttatgtatgtttgttttgtgggaaaaatggcctttctctcatgaaggattgct

SEQ ID NO: 209373 - DNA, 120 bp, Artificial Sequence
  ENSG00000115464_9 (sequence is synthesized)
ttgaatatggaactcctgaaactttgccatttcttatagcacatgcgtttattacagttgtgtctaatattagaatatggctacatattcccgctgtcatgcagcacattatacctttta

SEQ ID NO: 209374 - DNA, 120 bp, Artificial Sequence
  ENSG00000115464_10 (sequence is synthesized)
ggacctatgttattaggtatttatgcaagctctcggatcaggagttacgacagagtgcagctcgtaacatggctgacttaatgtggagcacagtcaaagaaccattggatacaacattat

SEQ ID NO: 209375 - DNA, 120 bp, Artificial Sequence
  ENSG00000115464_11 (sequence is synthesized)
gctttgataaagaaagcctagatcttgcatttaagtactttatgtcacctactttgactatgaggttggctggattgagtcagataacaaatcaactccataccttcaatgatgtgtgca

SEQ ID NO: 209376 - DNA, 120 bp, Artificial Sequence
  ENSG00000115464_12 (sequence is synthesized)
ataatgaatcattagtatcggacacagaaacgtccattgcaaaagaacttgcagactggcttattagcaacaatgtggtggagcatatatttggaccaaatttacatattgagattatca

SEQ ID NO: 209377 - DNA, 120 bp, Artificial Sequence
  ENSG00000115464_13 (sequence is synthesized)
aacagtgccaagtgattttgaattttttggcagcagaagggcgactgagtactcaacatattgactgtatttgggctgcagcacagttgaaacattgtagtcggtatatacatgacttat

SEQ ID NO: 209378 - DNA, 120 bp, Artificial Sequence
  ENSG00000115464_14 (sequence is synthesized)
ttccttcactcatcaagaatttggatcccgtaccacttagacatctacttaatctggtctcagctcttgagccaagtgttcatactgaacagacactgtacttggcatccatgttaatta

SEQ ID NO: 209379 - DNA, 120 bp, Artificial Sequence
  ENSG00000115464_15 (sequence is synthesized)
aagcactgtggaataacgcactagcagctaaggctcagttatctaaacagagttcttttgcatctttattaaatactaatattcccattggaaataagaaagaggaagaagagcttagaa

SEQ ID NO: 209380 - DNA, 120 bp, Artificial Sequence
  ENSG00000115464_16 (sequence is synthesized)
gaacagctccatcaccttggtcacctgcagctagtcctcaaagcagtgataatagcgatacacatcaaagtggaggtagtgacattgaaatggatgagcaacttattaatagaaccaaac

SEQ ID NO: 209381 - DNA, 120 bp, Artificial Sequence
  ENSG00000115464_17 (sequence is synthesized)
atgtgcaacaacgactttcagacacagaggaatccatgcagggaagttctgacgaaactgccaacagtggtgaagatggaagcagtggtcctggtagcagtagtgggcatagtgatggat

SEQ ID NO: 209382 - DNA, 120 bp, Artificial Sequence
  ENSG00000115464_18 (sequence is synthesized)
ctagcaatgaggttaattctagccacgcaagccagtcagctgggagccctggcagtgaggtacagtcagaagacattgcagatattgaagccctcaaagaggaagatgaagacgatgatc

SEQ ID NO: 209383 - DNA, 120 bp, Artificial Sequence
  ENSG00000115464_19 (sequence is synthesized)
atggtcataatcctcccaaaagcagttgtggtacagatcttcggaatagaaagttagagagtcaagcaggcatttgcctgggggactcccaaggcatgtcagaaagaaatgggacaagca

SEQ ID NO: 209384 - DNA, 120 bp, Artificial Sequence
  ENSG00000115464_20 (sequence is synthesized)
gcggaacaggaaaggacctggtttttaacactgaatcattgccatcagtagataatcgaatgcgaatgctggatgcttgttcacactctgaagacccagaacatgatatttcaggggaaa

SEQ ID NO: 209385 - DNA, 120 bp, Artificial Sequence
  ENSG00000115464_21 (sequence is synthesized)
tgaatgctactcatatagcacaagggtctcaggagtcttgtatcacacgaactggggacttccttggggagactattgggaatgaattatttaattgtcgacaatttattggtccacagc

SEQ ID NO: 209386 - DNA, 120 bp, Artificial Sequence
  ENSG00000115464_22 (sequence is synthesized)
caccaccaccaccatcaccaccaccacgatgggcatatggttgatgatatgctaagtgcagatgatgtcagttgtagtagctcccaggttagtgcaaaatcagaaaaaaatatggctgat

SEQ ID NO: 209387 - DNA, 120 bp, Artificial Sequence
  ENSG00000115464_23 (sequence is synthesized)
tggctgattttgatggtgaagaatctggatgtgaagaggagctagttcagattaattcacatgcggaactgacatctcacctccaacaacatcttcccaatttagcttccatttaccatg

SEQ ID NO: 209388 - DNA, 120 bp, Artificial Sequence
  ENSG00000115464_24 (sequence is synthesized)
aacatcttagtcaaggacctgtagttcataaacatcaattcaacagtaatgctgttacagacattaatttggataatgtttgcaagaaaggaaatactttgttgtgggatatagtccaag

SEQ ID NO: 209389 - DNA, 120 bp, Artificial Sequence
  ENSG00000115464_25 (sequence is synthesized)
atgaagatgcagttaatctttctgaaggattaataaatgaagcagagaaacttctttgttcgttagtatgttggtttacagatagacaaattcgaatgagattcattgaaggttgccttg

SEQ ID NO: 209390 - DNA, 120 bp, Artificial Sequence
  ENSG00000115464_26 (sequence is synthesized)
aaaacttgggaaacaacagatcagtagtaatttcacttcgtcttcttccaaaactatttggtacttttcagcagtttgggagcagttacgatacacactggataacaatgtgggcagaaa

SEQ ID NO: 209391 - DNA, 120 bp, Artificial Sequence
  ENSG00000115464_27 (sequence is synthesized)
aagaactgaacatgatgaagcttttctttgataatttggtatactacattcaaactgtgagagaaggaagacaaaaacatgcactgtacagccatagtgctgaagttcaagttcgtcttc

SEQ ID NO: 209392 - DNA, 120 bp, Artificial Sequence
  ENSG00000115464_28 (sequence is synthesized)
aattcttgacttgtgtattttcaactctgggatcacctgatcatttcaggttaagtttagagcaagttgacatcttatggcattgtttagtagaagattctgaatgttatgatgatgcac

SEQ ID NO: 209393 - DNA, 120 bp, Artificial Sequence
  ENSG00000115464_29 (sequence is synthesized)
tccattggtttttaaatcaagttcgaagtaaagatcaacatgctatgggtatggaaacctacaaacatcttttcctggagaagatgccccagctaaaacctgaaacaattagcatgactg

SEQ ID NO: 209394 - DNA, 120 bp, Artificial Sequence
  ENSG00000115464_30 (sequence is synthesized)
gcttaaacctgtttcagcatctctgtaacttggctcgattggctaccagtgcctatgatggttgttcaaattctgagctgtgtggtatggaccaattttggggcattgctttaagagcac

SEQ ID NO: 209395 - DNA, 120 bp, Artificial Sequence
  ENSG00000115464_31 (sequence is synthesized)
aatctggtgatgtcagtcgagcagctatccagtatattaactcctattatattaatggtaaaacaggtttggagaaggagcaagaatttattagtaagtgcatggagagtcttatgatag

SEQ ID NO: 209396 - DNA, 120 bp, Artificial Sequence
  ENSG00000115464_32 (sequence is synthesized)
cttctagcagtcttgaacaggaatcacactcaagtctcatggttatagaaagaggactccttatgctgaagacacatctggaagcgtttaggagaaggtttgcatatcatctgagacagt

SEQ ID NO: 209397 - DNA, 120 bp, Artificial Sequence
  ENSG00000115464_33 (sequence is synthesized)
ggcaaattgaaggcactggtattagtagtcatttgaaagcactgagtgacaaacagtctctgccgctaagggttgtatgccagccagctggacttcctgacaagatgactattgaaatgt

SEQ ID NO: 209398 - DNA, 120 bp, Artificial Sequence
  ENSG00000115464_34 (sequence is synthesized)
atcctagtgaccaggtagcagatcttagggctgaagtaactcattggtatgaaaatttacagaaagaacaaataaatcaacaagctcagcttcaggagtttggtcaaagcaaccgaaaag

SEQ ID NO: 209399 - DNA, 120 bp, Artificial Sequence
  ENSG00000115464_35 (sequence is synthesized)
gagagtttcctggaggcctcatgggacctgtcaggatgatttcatctggacacgagttaacaacagattatgatgaaaaagcacttcatgagcttggttttaaggatatgcagatggtat

SEQ ID NO: 209400 - DNA, 120 bp, Artificial Sequence
  ENSG00000115464_36 (sequence is synthesized)
ttgtatctttgggtgcaccaaggagagagcggaaaggggaaggtgttcagctgccagcatcttgcctcccaccccctcagaaggacaacattccaatgcttttgcttttacaagagcctc

SEQ ID NO: 209401 - DNA, 120 bp, Artificial Sequence
  ENSG00000115464_37 (sequence is synthesized)
atttaactactctttttgatttattagagatgcttgcatcatttaaaccaccctcaggaaaagtggcagtggatgatagtgagagcttacgatgtgaagaacttcatcttcatgcagaaa

SEQ ID NO: 209402 - DNA, 120 bp, Artificial Sequence
  ENSG00000115464_38 (sequence is synthesized)
atctgtctaggcgggtctgggagctactgatgcttcttcctacatgtcctaatatgttgatggcattccagaatatctcagatgagcagagtaatgatggatttaattggaaagaacttc

SEQ ID NO: 209403 - DNA, 120 bp, Artificial Sequence
  ENSG00000115464_39 (sequence is synthesized)
tcaaaattaagagcgcccacaagctattgtatgctctggaaattattgaagcactgggaaaacctaatagaagaataaggagggagtctacgggaagttacagtgatctttatccagatt

SEQ ID NO: 209404 - DNA, 120 bp, Artificial Sequence
  ENSG00000115464_40 (sequence is synthesized)
cagatgattcaagtgaagatcaagtggaaaatagtaaaaattcctggagttgcaagtttgttgctgctggagggcttcaacagttattagaaatttttaattctggaattctagagccta

SEQ ID NO: 209405 - DNA, 120 bp, Artificial Sequence
  ENSG00000115464_41 (sequence is synthesized)
aagagcaggaatcatggactgtgtggcagctagactgtcttgcttgcttgctgaagttaatatgccagtttgcagtagatccatccgatttggatttagcttatcatgatgtctttgcct

SEQ ID NO: 209406 - DNA, 120 bp, Artificial Sequence
  ENSG00000115464_42 (sequence is synthesized)
ggtctggtatagcggaaagccataggaaaagaacctggcctggcaaatcaaggaaggctgctggtgatcatgctaagggtcttcatataccacgattaacagaggtatttcttgttcttg

SEQ ID NO: 209407 - DNA, 120 bp, Artificial Sequence
  ENSG00000115464_43 (sequence is synthesized)
tccaaggaaccagtttgattcagcgacttatgtctgttgcttatacgtatgataatctggctcctagagttttaaaagctcagtctgatcacaggtctagacatgaagtttcacattatt

SEQ ID NO: 209408 - DNA, 120 bp, Artificial Sequence
  ENSG00000115464_44 (sequence is synthesized)
caatgtggctcttggtgagttgggctcattgctgttctttagtgaaatctagccttgctgatagcgatcatttacaagattggctaaagaaattgactctccttattcctgagactgcag

SEQ ID NO: 209409 - DNA, 120 bp, Artificial Sequence
  ENSG00000115464_45 (sequence is synthesized)
ttcgtcatgaatcatgcagtggtctctataagttatccctgtcagggctggatggaggagactcaatcaatcgttcttttctgctattggctgcctcaacattattgaaatttcttcctg

SEQ ID NO: 209410 - DNA, 120 bp, Artificial Sequence
  ENSG00000115464_46 (sequence is synthesized)
atgctcaagcactcaaacctattaggatagatgattatgaggaagaaccaatattaaaaccaggatgtaaagagtatttttggttgttatgcaaattagttgacaacatacatataaagg

SEQ ID NO: 209411 - DNA, 120 bp, Artificial Sequence
  ENSG00000115464_47 (sequence is synthesized)
acgctagtcagacaacgctcctcgacttagatgccttggcaagacatttggctgactgtattcgaagtagggagatccttgatcatcaggatggtaatgtagaagatgatgggcttacag

SEQ ID NO: 209412 - DNA, 120 bp, Artificial Sequence
  ENSG00000115464_48 (sequence is synthesized)
aaaccaccctttaaattttcaagggaaggacaggaatttttgagagatatcttcaatctcctgtttttgttgccaagtctaaaggaccgacaacagccaaagtgcaaatcacattcttca

SEQ ID NO: 209413 - DNA, 120 bp, Artificial Sequence
  ENSG00000115464_49 (sequence is synthesized)
agagctgccgcttacgatttgttagtagagatggtaaaggggtctgttgagaactacaggctaatacacaactgggttatggcacaacacatgcagtcccatgcaccttataaatgggat

SEQ ID NO: 209414 - DNA, 120 bp, Artificial Sequence
  ENSG00000115464_50 (sequence is synthesized)
tactggcctcatgaagatgtccgtgctgaatgtagatttgttggccttactaaccttggagctacttgttacttagcttctactattcagcaactttatatgatacctgaggcaagacag

SEQ ID NO: 209415 - DNA, 120 bp, Artificial Sequence
  ENSG00000115464_51 (sequence is synthesized)
gctgtcttcactgccaagtattcagaggatatgaagcacaagaccactcttctggagcttcagaaaatgtttacatatttaatggagagtgaatgcaaagcatataatcctagacctttc

SEQ ID NO: 209416 - DNA, 120 bp, Artificial Sequence
  ENSG00000115464_52 (sequence is synthesized)
tgtaaaacatacaccatggataagcagcctctgaatactggggaacagaaagatatgacagagttttttactgatctaattaccaaaatcgaagaaatgtctcccgaactgaaaaatacc

SEQ ID NO: 209417 - DNA, 120 bp, Artificial Sequence
  ENSG00000115464_53 (sequence is synthesized)
gtcaaaagtttatttggaggtgtaattacaaacaatgttgtatccttggattgtgaacatgttagtcaaactgctgaagagttttatactgtgaggtgccaagtggctgatatgaagaac

SEQ ID NO: 209418 - DNA, 120 bp, Artificial Sequence
  ENSG00000115464_54 (sequence is synthesized)
atttatgaatctcttgatgaagttactataaaagacactttggaaggtgataacatgtatacttgttctcattgtgggaagaaagtacgagctgaaaaaagggcatgttttaagaaattg

SEQ ID NO: 209419 - DNA, 120 bp, Artificial Sequence
  ENSG00000115464_55 (sequence is synthesized)
cctcgcattttgagtttcaatactatgagatacacatttaatatggtcacgatgatgaaagagaaagtgaatacacacttttccttcccattacgtttggacatgacgccctatacagaa

SEQ ID NO: 209420 - DNA, 120 bp, Artificial Sequence
  ENSG00000115464_56 (sequence is synthesized)
gattttcttatgggaaagagtgagaggaaagaaggttttaaagaagtcagtgatcattcaaaagactcagagagctatgaatatgacttgataggagtgactgttcacacaggaacggca

SEQ ID NO: 209421 - DNA, 120 bp, Artificial Sequence
  ENSG00000115464_57 (sequence is synthesized)
gatggtggacactattatagctttatcagagatatagtaaatccccatgcttataaaaacaataaatggtatctttttaatgatgctgaggtaaaaccttttgattctgctcaacttgca

SEQ ID NO: 209422 - DNA, 120 bp, Artificial Sequence
  ENSG00000115464_58 (sequence is synthesized)
tctgaatgttttggtggagagatgacgaccaagacctatgattctgttacagataaatttatggacttctcttttgaaaagacacacagtgcatatatgctgttttacaaacgcatggaa

SEQ ID NO: 209423 - DNA, 120 bp, Artificial Sequence
  ENSG00000115464_59 (sequence is synthesized)
ccagaggaagaaaatggcagagaatacaaatttgatgtttcgtcagagttactagagtggatttggcatgataacatgcagtttcttcaagacaaaaacatttttgaacatacatatttt

SEQ ID NO: 209424 - DNA, 120 bp, Artificial Sequence
  ENSG00000115464_60 (sequence is synthesized)
ggatttatgtggcaattgtgtagttgtattcccagtacattaccagatcctaaagctgtgtccttaatgacagcaaagttaagcacttcctttgtcctagagacatttattcattctaaa

SEQ ID NO: 209425 - DNA, 120 bp, Artificial Sequence
  ENSG00000115464_61 (sequence is synthesized)
gaaaagcccacgatgcttcagtggattgaactgttgacgaaacagtttaataatagtcaggcagcttgtgagtggtttttagatcgtatggctgatgacgactggtggccaatgcagata

SEQ ID NO: 209426 - DNA, 120 bp, Artificial Sequence
  ENSG00000115464_62 (sequence is synthesized)
ctaattaagtgccctaatcaaattgtgagacagatgtttcagcgtttgtgtatccatgtgattcagaggctgagacctgtgcatgctcatctctatttgcagccaggaatggaagatggg

SEQ ID NO: 209427 - DNA, 120 bp, Artificial Sequence
  ENSG00000115464_63 (sequence is synthesized)
tcagatgatatggatacctcagtagaagatattggtggtcgttcatgtgtcactcgctttgtgagaaccctgttattaattatggaacatggtgtaaaacctcacagtaaacatcttaca

SEQ ID NO: 209428 - DNA, 120 bp, Artificial Sequence
  ENSG00000115464_64 (sequence is synthesized)
gagtattttgccttcctttacgaatttgcaaaaatgggtgaagaagagagccaatttttgctttcattgcaagctatatctacaatggtacatttttacatgggaacaaaaggacctgaa

SEQ ID NO: 209429 - DNA, 120 bp, Artificial Sequence
  ENSG00000115464_65 (sequence is synthesized)
aatcctcaagttgaagtgttatcagaggaagaaggggaagaagaagaggaggaagaagatatcctctctctggcagaagaaaaatacaggccagctgcccttgaaaagatgatagcttta

SEQ ID NO: 209430 - DNA, 120 bp, Artificial Sequence
  ENSG00000115464_66 (sequence is synthesized)
gttgctcttttggttgaacagtctcgatcagaaaggcatttgacattatcacagactgacatggcagcattaacaggaggaaagggatttcccttcttgtttcaacatattcgtgatggc

SEQ ID NO: 209431 - DNA, 120 bp, Artificial Sequence
  ENSG00000115464_67 (sequence is synthesized)
atcaatataagacaaacttgtaatctgattttcagcctgtgtcgatacaataatcgacttgcagaacatattgtatctatgcttttcacatcaatagcaaagttgactcctgaggcagcc

SEQ ID NO: 209432 - DNA, 120 bp, Artificial Sequence
  ENSG00000115464_68 (sequence is synthesized)
aatcctttctttaagttgttgactatgctaatggagtttgctggtggacctccaggaatgcctccctttgcatcttatattctgcagaggatatgggaggtgattgaatacaatccttct

SEQ ID NO: 209433 - DNA, 120 bp, Artificial Sequence
  ENSG00000115464_69 (sequence is synthesized)
cagtgtctagattggttggcagtgcagacaccccgaaataaactggcacacagctgggtcttacagaatatggaaaactgggtcgagcggtttcttttggctcacaattatcctagagtg

SEQ ID NO: 209434 - DNA, 120 bp, Artificial Sequence
  ENSG00000115464_70 (sequence is synthesized)
aggacttctgcagcttatcttctggtgtcccttataccaagcaattcattccgtcagatgttccggtcaacaaggtctttgcacatcccaacccgtgaccttccactcagtccagacaca

SEQ ID NO: 209435 - DNA, 120 bp, Artificial Sequence
  ENSG00000115464_71 (sequence is synthesized)
acagtagtcctacatcaggtctacaacgtgctccttggtttgctctcaagagccaaactttatgttgatgctgctgttcatggcactacaaagctagtgccctattttagctttatgact

SEQ ID NO: 209436 - DNA, 120 bp, Artificial Sequence
  ENSG00000115464_72 (sequence is synthesized)
tactgtttaatttccaaaactgagaagctgatgttttccacatatttcatggatttgtggaaccttttccagcctaaactttctgagccagcaatagctacaaatcacaataaacaggct

SEQ ID NO: 209437 - DNA, 120 bp, Artificial Sequence
  ENSG00000115464_73 (sequence is synthesized)
ttgctttcattttggtacaatgtctgtgctgactgtccagagaatatccgccttattgttcagaacccagtggtaaccaagaacattgccttcaattacatccttgctgaccatgatgat

SEQ ID NO: 209438 - DNA, 120 bp, Artificial Sequence
  ENSG00000115464_74 (sequence is synthesized)
caggatgtggtgctttttaaccgtgggatgctgccagcgtactatggcattctgaggctctgctgtgagcagtctcctgcattcacacgacaactggcttctcaccagaacatccagtgg

SEQ ID NO: 209439 - DNA, 120 bp, Artificial Sequence
  ENSG00000115464_75 (sequence is synthesized)
gcctttaagaatcttacaccacatgccagccaataccctggagcagtagaagaactgtttaacctgatgcagctgtttatagctcagaggccagatatgagagaagaagaattagaagat

SEQ ID NO: 209440 - DNA, 120 bp, Artificial Sequence
  ENSG00000115464_76 (sequence is synthesized)
attaaacagttcaagaaaacaaccataagttgttacttacgttgcttagatggccgctcctgctggactactttaataagtgccttcagaatactattagaatctgatgaagacagactt

SEQ ID NO: 209441 - DNA, 120 bp, Artificial Sequence
  ENSG00000115464_77 (sequence is synthesized)
cttgttgtatttaatcgaggattgattctaatgacagagtctttcaacactttgcacatgatgtatcacgaagctacagcttgccatgtgactggagatttagtagaacttctgtcaata

SEQ ID NO: 209442 - DNA, 120 bp, Artificial Sequence
  ENSG00000115464_78 (sequence is synthesized)
tttctttcggttttgaagtctacacgcccttatcttcagagaaaagatgtgaaacaagcattaatccagtggcaggagcgaattgaatttgcccataaactgttaactcttcttaattcc

SEQ ID NO: 209443 - DNA, 120 bp, Artificial Sequence
  ENSG00000115464_79 (sequence is synthesized)
tatagtcctccagaacttagaaatgcctgtatagatgtcctcaaggaacttgtacttttgagtccccatgattttcttcatactctggttccctttctacaacacaaccattgtacttac

SEQ ID NO: 209444 - DNA, 120 bp, Artificial Sequence
  ENSG00000115464_80 (sequence is synthesized)
catcacagtaatataccaatgtctcttggaccttatttcccttgtcgagaaaatatcaagctaataggagggaaaagcaatattcggcctccgcgccctgaactcaatatgtgcctcttg

SEQ ID NO: 209445 - DNA, 120 bp, Artificial Sequence
  ENSG00000115464_81 (sequence is synthesized)
cccacaatggtggaaaccagtaagggcaaagatgacgtttatgatcgtatgctgctagactacttcttttcttatcatcagttcatccatctattatgccgagttgcaatcaactgtgaa

SEQ ID NO: 209446 - DNA, 120 bp, Artificial Sequence
  ENSG00000115464_82 (sequence is synthesized)
aaatttactgaaacattagttaagctgagtgtcctagttgcctatgaaggtttgccacttcatcttgcactgttccccaaactttggactgagctatgccagactcagtctgctatgtca

SEQ ID NO: 209447 - DNA, 120 bp, Artificial Sequence
  ENSG00000115464_83 (sequence is synthesized)
aaaaactgcatcaagcttttgtgtgaagatcctgttttcgcagaatatattaaatgtatcctaatggatgaaagaacttttttaaacaacaacattgtctacacgttcatgacacatttc

SEQ ID NO: 209448 - DNA, 120 bp, Artificial Sequence
  ENSG00000115464_84 (sequence is synthesized)
cttctaaaggttcaaagtcaagtgttttctgaagcaaactgtgccaatttgatcagcactcttattacaaacttgataagccagtatcagaacctacagtctgatttctccaaccgagtt

SEQ ID NO: 209449 - DNA, 120 bp, Artificial Sequence
  ENSG00000115464_85 (sequence is synthesized)
gaaatttccaaagcaagtgcttctttaaatggggacctgagggcactcgctttgctcctgtcagtacacactcccaaacagttaaacccagctctaattccaactctgcaagagctttta

SEQ ID NO: 209450 - DNA, 120 bp, Artificial Sequence
  ENSG00000115464_86 (sequence is synthesized)
agcaaatgcaggacttgtctgcaacagagaaactcactccaagagcaagaagccaaagaaagaaaaactaaagatgatgaaggagcaactcccattaaaaggcggcgtgttagcagtgat

SEQ ID NO: 209451 - DNA, 120 bp, Artificial Sequence
  ENSG00000115464_87 (sequence is synthesized)
gaggagcacactgtagacagctgcatcagtgacatgaaaacagaaaccagggaggtcctgaccccaacgagcacttctgacaatgagaccagagactcctcaattattgatccaggaact

SEQ ID NO: 209452 - DNA, 120 bp, Artificial Sequence
  ENSG00000115464_88 (sequence is synthesized)
gagcaagatcttccttcccctgaaaatagttctgttaaagaataccgaatggaagttccatcttcgttttcagaagacatgtcaaatatcaggtcacagcatgcagaagaacagtccaac

SEQ ID NO: 209453 - DNA, 120 bp, Artificial Sequence
  ENSG00000115464_89 (sequence is synthesized)
aatggtagatatgacgattgtaaagaatttaaagacctccactgttccaaggattctaccctagctgaggaagaatctgagttcccttctacttctatctctgcagttctgtctgactta

SEQ ID NO: 209454 - DNA, 120 bp, Artificial Sequence
  ENSG00000115464_90 (sequence is synthesized)
gctgacttgagaagctgtgatggccaagctttgccctcccaggaccctgaggttgctttatctctcagttgtggccattccagaggactctttagtcatatgcagcaacatgacatttta

SEQ ID NO: 209455 - DNA, 120 bp, Artificial Sequence
  ENSG00000115464_91 (sequence is synthesized)
gataccctgtgtaggaccattgaatctacaatccatgtcgtcacaaggatatctggcaaaggaaaccaagctgcttcttgacattaggtgtagcatgtctacttttaagtccctcacccc

SEQ ID NO: 209456 - DNA, 120 bp, Artificial Sequence
  ENSG00000115464_92 (sequence is synthesized)
caacccccatgctgtttgtataagttttgcttatttgtttttgtgcttcagtttgtccagtgctctctgcttgaatggcaagatagatttataggcttaattcttggtcaggcagaactc

SEQ ID NO: 209457 - DNA, 120 bp, Artificial Sequence
  ENSG00000115464_93 (sequence is synthesized)
cagatgaaaaaaacttgcatcttcagtatacttcctaaagggcaatcagataatggatatgttttatgtaattaagagttcactttagtggctttcatttaatatggctgtctgggaaga

SEQ ID NO: 209458 - DNA, 120 bp, Artificial Sequence
  ENSG00000115464_94 (sequence is synthesized)
acagggttgcctagccctgtacaatgtaatttaaacttacagcatttttactgtgtatgatatggtgtcctctgtgccagttttgtaccttatagaggcagattgcctccgatcgctgtg

SEQ ID NO: 209459 - DNA, 120 bp, Artificial Sequence
  ENSG00000115464_95 (sequence is synthesized)
gttcttattatcaaaattaagtttacttgtatacggaacaaccacaagaaatttgattctgtaaagaatcctctttagctgtggcctggcagtatataaatggtgctttatttaacagaa

SEQ ID NO: 209460 - DNA, 120 bp, Artificial Sequence
  ENSG00000115464_96 (sequence is synthesized)
tacctgtggaggaaataaagcacacttgatgtaaaaataattgttttatttttattgacatgactgattgattgattgctattctgtgcacttaattaaactgattgtgatgacttttca

SEQ ID NO: 209461 - DNA, 120 bp, Artificial Sequence
  ENSG00000115464_97 (sequence is synthesized)
tttccaaaatactcttgacatccagaaaaatctatcatacgtggttcccggttgactttgtacccctcgctgatcctgctgctttatggtagttcaggttcacatgcagaagtactggct

SEQ ID NO: 209462 - DNA, 120 bp, Artificial Sequence
  ENSG00000115464_98 (sequence is synthesized)
gagctctccttccctaacacagatttaaatatagtgtgtagtagaatatatgtttcttctctgctgaaggagatgggttcagattgatctaaatacacagtcatgtatgtgttttacagg

SEQ ID NO: 209463 - DNA, 120 bp, Artificial Sequence
  ENSG00000115464_99 (sequence is synthesized)
agtatgcataaaagccaaaacagatgacagagctcagtaaggaagaccttactatttgtgacatccatcagaattttaacttgagaaactgatttcaaggacctgagggcactcgctttg

SEQ ID NO: 209464 - DNA, 120 bp, Artificial Sequence
  ENSG00000115464_100 (sequence is synthesized)
acctttcccctcctccctcctgcagtctagccaccctatgaaaattatctaataggcagagtggtaccttaatccaagaaagatttggagccacttgcagtaactttttcttttcccaga

SEQ ID NO: 209465 - DNA, 120 bp, Artificial Sequence
  ENSG00000115464_101 (sequence is synthesized)
taaagttctaatactcaaaaaagaagagttgatttaagtcccatatccttcaggaatgaggtataggatataaataaattcaaagtaccacattctaagatatttcactaaacattggaa

SEQ ID NO: 209466 - DNA, 120 bp, Artificial Sequence
  ENSG00000115464_102 (sequence is synthesized)
tgtactttaaaatatagaaaatatgcagttatgactagaaatagctgtaatattgtacctgcagagttgagtatctcactagtataatttataattataacctattctgatttcttttca

SEQ ID NO: 209467 - DNA, 120 bp, Artificial Sequence
  ENSG00000115464_103 (sequence is synthesized)
aatattaggtgtcctagttgcctatgaaggtttgccacttcatcttgcactgttccccaaactttggactgagctatgccagactcagtctgctatgtcaaaaaactgcatcaagctttt

SEQ ID NO: 209468 - DNA, 89 bp, Artificial Sequence
  ENSG00000115464_104 (sequence is synthesized)
tcaggtgccggaaggcaagtccgggcaagtccgagcaagtcgcatcttatgtggatggcggcaggcaaaaaaagaatgagaaccaagcg

SEQ ID NO: 209469 - DNA, 120 bp, Artificial Sequence
  ENSG00000115464_105 (sequence is synthesized)
tgtggatggcggcaggcaaaaaaagaatgagaaccaagcgaaagcggtttctccttataaaaccatcagatctcaagagacttattcacttatcacaagaacagtatgggggaaaccgcc

SEQ ID NO: 209470 - DNA, 80 bp, Artificial Sequence
  ENSG00000115464_106 (sequence is synthesized)
gatgggaattataggcaatataattcaagatgagatttgggtggagacacggccaaactgtatcacattgtatgtggata

SEQ ID NO: 209471 - DNA, 120 bp, Artificial Sequence
  ENSG00000115464_107 (sequence is synthesized)
actgccaaggtagaattttcctcactttaaaaatcaaaattataaaccagattttaatattttgttgataaatttttatttcaatgtagtaaatgtttgaaaaaataatttgtgaataaa

SEQ ID NO: 209472 - DNA, 120 bp, Artificial Sequence
  ENSG00000115464_108 (sequence is synthesized)
catataaattattaaaatgcacatttaaatctatggagtgtatctgcttaaagacatactacttgtgtttaagagccatgactatttgaaaacaggaaaaccaaattttagtaaaatttc

SEQ ID NO: 209473 - DNA, 120 bp, Artificial Sequence
  ENSG00000115464_109 (sequence is synthesized)
catatattgagaccactgattctgtgtgagataattaggaaagaagatttattgtttacccttgcagtgtttatggggggaaaaggtatttacagaattactgttgctagcgagaatata

SEQ ID NO: 209474 - DNA, 120 bp, Artificial Sequence
  ENSG00000115464_110 (sequence is synthesized)
cagtaaagtttaaaacattttggagaattgattttgattcttaaaatgtgtctttttgcaacatatgctctggttacctataaatacattaatttggcccttgaaaacattcacatccta

SEQ ID NO: 209475 - DNA, 120 bp, Artificial Sequence
  ENSG00000115464_111 (sequence is synthesized)
ttctttgttagccttatttttccagtccttgttaactctctcagtgctggataataaacctgcatttcttttaaaacatttgttcagtttcggcatcagtgtcttcccccagcactccct

SEQ ID NO: 209476 - DNA, 120 bp, Artificial Sequence
  ENSG00000115464_112 (sequence is synthesized)
taatctaaattagtaacattttactgtatgaaaaatagttgctgttaactaaaaattcaataggtgagttagacatggcttttcaagtaggattttcagtggcttcagattccatcatac

SEQ ID NO: 209477 - DNA, 120 bp, Artificial Sequence
  ENSG00000115464_113 (sequence is synthesized)
aagcaagtgcttctttaaatggggtaagaactatgcagaggcggcggcacacacttttaaactgtccttcagttaactgtgtggccttcatatgattttactctcgtaactttaacttac

SEQ ID NO: 209478 - DNA, 120 bp, Artificial Sequence
  ENSG00000115464_114 (sequence is synthesized)
tgattcaaactcttaagccatgtgcgacaaaaaaacaagttttaaatacacgtttactatgccttgtatgtacacagcacactctatcaccttggaagctacaagctggtatcattaaat

SEQ ID NO: 209479 - DNA, 120 bp, Artificial Sequence
  ENSG00000115464_115 (sequence is synthesized)
gctgaaaggtaataaagggaacatcttagtggtcttatctctagttgggtatatttttggaaacaatacttgtgatgtttctattactgcctatggctcctatgtaactgaaacaattaa

SEQ ID NO: 209480 - DNA, 120 bp, Artificial Sequence
  ENSG00000115464_116 (sequence is synthesized)
tgatctactgatttaaaaaaggcagttaaatctagagcattagttgccttgtgcagactcccatgacagccatgtcctagaataatggaacactctggaaatgggctagaatgttgagca

SEQ ID NO: 209481 - DNA, 120 bp, Artificial Sequence
  ENSG00000115464_117 (sequence is synthesized)
gcagcctcccaaatcacagtatgcataaaagccaaaacagatgacagagctcagtaaggaagaccttactatttgtgacatccatcagaattttaacttgagaaactgatttcaaggttt

SEQ ID NO: 209482 - DNA, 120 bp, Artificial Sequence
  ENSG00000115464_118 (sequence is synthesized)
gtttttaaaattcttatatttccttttccatttttcagaaaacactatttcaggctttggtctgacttactggttcgtgggcataaaataatgctattagtgactttaagaactaatgag

SEQ ID NO: 209483 - DNA, 89 bp, Artificial Sequence
  ENSG00000115464_119 (sequence is synthesized)
aaaataatgctattagtgactttaagaactaatgaaagcattttgggaggtcgaggccggtggataacgaggtcaggagattgagacca

SEQ ID NO: 209484 - DNA, 120 bp, Artificial Sequence
  ENSG00000115464_120 (sequence is synthesized)
cttgtaagtcaaatatttagaatttcataaaccatttatttattgttcaaagttatgtttcattttgtttttaggcaactacgacatgcccattgttgtatactacgaaattcttggaga

SEQ ID NO: 209485 - DNA, 74 bp, Artificial Sequence
  ENSG00000115464_121 (sequence is synthesized)
acccgtctctacacaaaatagaaaaatctagccgggtgtagtggcacatgcctgtagtcccagccactcggagg

SEQ ID NO: 209486 - DNA, 120 bp, Artificial Sequence
  ENSG00000115464_122 (sequence is synthesized)
ctgaggcaggaggatcgcttgagcctgagaagtggaggctgcagtgagctgtgatctcgccactgcatcccagcctgggtgacatagcgaaaccctgtctcaaaaacaaaacaaaacaag

SEQ ID NO: 209487 - DNA, 120 bp, Artificial Sequence
  ENSG00000115464_123 (sequence is synthesized)
aattcagaaataagattttgagggcactgtttaacaaaagaatctgctcttcacacactttaacattataaatgattattggtagggtgttattaaagttaaaaagtaaacattgatgtg

SEQ ID NO: 209488 - DNA, 120 bp, Artificial Sequence
  ENSG00000115464_124 (sequence is synthesized)
aaggacctttttatatgcattttaaatacttcggctttttctgtaaaagtaatttggggccaagtaaaatcaagttttaaaagtcttgaatttttagagaataaattagttttcatctgt

SEQ ID NO: 209489 - DNA, 120 bp, Artificial Sequence
  ENSG00000115464_125 (sequence is synthesized)
atttttttttatttaaaaaattctatataatgttctatatatattaatgaggtaactaatggaggtagaggctgttaatgtaagcaaaatacattgtgtttcatagtttgtttggggggg

SEQ ID NO: 209490 - DNA, 120 bp, Artificial Sequence
  ENSG00000115464_126 (sequence is synthesized)
ttaccactagtttttccactagctttttattatatatgtttaattatgtaattgttattcactagcttttattatataaatccttttaaataatactactattcatcaactcttgtggca

SEQ ID NO: 209491 - DNA, 120 bp, Artificial Sequence
  ENSG00000115464_127 (sequence is synthesized)
tactattcatcaactcttgtggcataagaatttcagttttttctaccaaacttttacttcatctatgagtcgtgttagaaatagtcattgaaaaaatatacagtaaaatatctagcaaaa

SEQ ID NO: 209492 - DNA, 120 bp, Artificial Sequence
  ENSG00000115464_128 (sequence is synthesized)
tgtattcccagtacattaccagatcctaaagctgtgtccttaatgacagcaaaggtaataaatatatgaactttaaataattctgtcaaaatttactactttaaaatgattgaagctttt

SEQ ID NO: 209493 - DNA, 120 bp, Artificial Sequence
  ENSG00000115464_129 (sequence is synthesized)
ccaagacttactttatagacatttagagtttatggtaaactgttttacaggtggcaaggttttaattatatagatcagtaaacctgaatttatatcccaagaataattaggtcataattt

SEQ ID NO: 209494 - DNA, 120 bp, Artificial Sequence
  ENSG00000115464_130 (sequence is synthesized)
ttagggtgctgttcctttttccatagtaattccatacttttcccattattttgtatttagaacagccatttgaaatagactagttttattcatttgtagggacaaaaatgaaatacatgt

SEQ ID NO: 209495 - DNA, 120 bp, Artificial Sequence
  ENSG00000115464_131 (sequence is synthesized)
tgaaatacatgtgatttcattaagggcacacataatttcccaaaagcctacttatttgacagtatagaaactgaggttaccattgtgaacccggaaaatctgagacaggtctcagttaat

SEQ ID NO: 209496 - DNA, 83 bp, Artificial Sequence
  ENSG00000115464_132 (sequence is synthesized)
aaagtttattttgccaaggttgaggacgcgcccgtgacacagcctcaggaagtcctgatggcacgtgcccaaggtggttggga

SEQ ID NO: 209497 - DNA, 120 bp, Artificial Sequence
  ENSG00000115464_133 (sequence is synthesized)
tgtatgtaggaagtacattagctctgtccagaaaggcagagacaacccaaagcaaggcctctccttcctctggggccttcctggtcacaggtatgtgagagacagatggttgcgttcttt

SEQ ID NO: 209498 - DNA, 120 bp, Artificial Sequence
  ENSG00000115464_134 (sequence is synthesized)
tgagtttctgataagtctttccaaaggaggcaatcagaatatgcatctatctgggtgagcagagggatgactttgaatagtatgagaggccgatttgccctgagcggttcccagcttgaa

SEQ ID NO: 209499 - DNA, 120 bp, Artificial Sequence
  ENSG00000115464_135 (sequence is synthesized)
atcagctgtttatgcttcctataattcttgaacatccacaagtatgagatggctgcagagtcaccagaggtacgtgagccctttagtctgataaacatgccaagagtaccataagaattc

SEQ ID NO: 209500 - DNA, 120 bp, Artificial Sequence
  ENSG00000115464_136 (sequence is synthesized)
acaggtaggatgttttttcagttaatgataataaaaaataagagaacaggtttgcactttgaagaatgtggatttgcaaaggtaagggggaaaacatttagataaatgacaataagcact

SEQ ID NO: 209501 - DNA, 120 bp, Artificial Sequence
  ENSG00000115464_137 (sequence is synthesized)
gaggcaaagaaatattggttatgtttgaggaaggctaagtattaaaaaaaaggtaggtgaagaggagtagtaagaatttcattctttaaaatgcaacagatgtttatgctgctttggttg

SEQ ID NO: 209502 - DNA, 120 bp, Artificial Sequence
  ENSG00000115464_138 (sequence is synthesized)
tatttttagaaaaaaaaaatttttttttaatgcaacagatgtttaaatgtctacctctgtgccaagcactgtggtaggtactagggacacagcagtgaacaagacatactggtttctgtc

SEQ ID NO: 209503 - DNA, 120 bp, Artificial Sequence
  ENSG00000115464_139 (sequence is synthesized)
cccacagcttacaagttacatactgtacaagtacattgttcatattaggtactgctgcaggttctgggctaagaattttaacatttgaactgtgggtattacagtgtgtaagctgtagtg

SEQ ID NO: 209504 - DNA, 120 bp, Artificial Sequence
  ENSG00000115464_140 (sequence is synthesized)
aactggtggaagaggattcaaagaagggtgctgtatagtaaaataggaaaaaaactaagggcttaattaagctaatacagttaaaggaattaaaagatttaacaagccaatataaaggaa

SEQ ID NO: 209505 - DNA, 120 bp, Artificial Sequence
  ENSG00000115464_141 (sequence is synthesized)
atgaattcctaccttttgcagctctttttacctctttcaggcctactcttttgagtatggctgacagtcactttaccattgtctttggacagagaccctggaaagttggttaaagcagtt

SEQ ID NO: 209506 - DNA, 120 bp, Artificial Sequence
  ENSG00000115464_142 (sequence is synthesized)
gcctattctccctaatcttttgtgacctactgctttgtaattttgaagacttaacaatcttagagcaagtacttttttaaaaaaatgtgattaaactatttcttcagactagaatataca

SEQ ID NO: 209507 - DNA, 120 bp, Artificial Sequence
  ENSG00000115464_143 (sequence is synthesized)
cacaaaatagcagagctctgaaggtgaggaatgtttaaaagagcttaatgagagtttaacttcaggatagaaagcaaatacgtttgctttgcacacatgtgcacacacagtctgagtctg

SEQ ID NO: 209508 - DNA, 120 bp, Artificial Sequence
  ENSG00000115464_144 (sequence is synthesized)
aaaacatctatcgtagaggacgagtactaccattttgtggctcagtaagcaaaaatgaaattaagttttcaattttttcaaatcatttgtagtctttcaacactttgcacatgatgtatc

SEQ ID NO: 209509 - DNA, 89 bp, Artificial Sequence
  ENSG00000115464_145 (sequence is synthesized)
cccagctacttgggaggctgagggaggggaatcgcttgaacccgggtggtggaggttgcagctgccaaagaacaagactccatctcaaa

SEQ ID NO: 209510 - DNA, 120 bp, Artificial Sequence
  ENSG00000115464_146 (sequence is synthesized)
tatacagtaattttaaactgggagatgaaatgctaatttctagaagtccatttggttttgaagggtctcatgtcaaaaaaaaaaaaaagtaagtaaaataagacccatcctactgtttta

SEQ ID NO: 209511 - DNA, 120 bp, Artificial Sequence
  ENSG00000115464_147 (sequence is synthesized)
tatactaaaatagtaagttaattaaatgaaaatgaagtacatttgggctttcatttaccaatcctggaatgttgaaaagttgcccaaaagacatttagcaagcaaatgtagctagcaaaa

SEQ ID NO: 209512 - DNA, 120 bp, Artificial Sequence
  ENSG00000115464_148 (sequence is synthesized)
atggcaggttaatacaattataattgaatcaacaatttttgatacatgttgtaaatcgctgtaaagtaatacagaaggaagaaaaacttatttccactaatattttctttcaggcatttg

SEQ ID NO: 209513 - DNA, 120 bp, Artificial Sequence
  ENSG00000115464_149 (sequence is synthesized)
accaccaccaccatcaccaccaccacgatggagacagagtattgctatgttgcccaggctggtcttgaaccccagacctcagtgcttttgccgcagcctcccaaagctctgggattacag

SEQ ID NO: 209514 - DNA, 120 bp, Artificial Sequence
  ENSG00000115468_0 (sequence is synthesized)
ggagtgttgtagagcctcgagcctgcgaggagcgcgccgcccgccagctccctgcgtcccgtcccgcgtccccgcgttcccgcgtcctgcgatccgccgccatggccagtgaggagctgg

SEQ ID NO: 209515 - DNA, 120 bp, Artificial Sequence
  ENSG00000115468_1 (sequence is synthesized)
gtgaggagctggcgtgcaagctggagcgccggctgcggcgcgaggaggccgaggagagtggcccccagctggctcccctcggcgccccagccccggagcccaagcccgagcccgagcctc

SEQ ID NO: 209516 - DNA, 120 bp, Artificial Sequence
  ENSG00000115468_2 (sequence is synthesized)
ccacggccagcgccgacgcggagctgagcgcccagctgagccggcggctggacatcaacgagggcgctgcgcggccccggcgctgcagggtcttcaacccctacacggagttcccggagt

SEQ ID NO: 209517 - DNA, 120 bp, Artificial Sequence
  ENSG00000115468_3 (sequence is synthesized)
tcagccgccgcctcatcaaggacctggagagcatgttcaaactgtatgacgctgggcgggatggcttcatcgacctgatggagctgaagctgatgatggagaagctgggggccccccaga

SEQ ID NO: 209518 - DNA, 120 bp, Artificial Sequence
  ENSG00000115468_4 (sequence is synthesized)
cccacctgggcctgaagagcatgatcaaggaggtggatgaggacttcgatggcaagctcagcttccgggagttcctgctcattttccacaaggccgcggcaggggagctgcaggaggaca

SEQ ID NO: 209519 - DNA, 120 bp, Artificial Sequence
  ENSG00000115468_5 (sequence is synthesized)
gtgggctgatggcgctggcaaagctttctgagatcgatgtggccctggagggtgtcaaaggtgccaagaacttctttgaagccaaggtccaagccttgtcatcggccagtaagtttgaag

SEQ ID NO: 209520 - DNA, 120 bp, Artificial Sequence
  ENSG00000115468_6 (sequence is synthesized)
cagagttgaaagctgagcaagatgagcggaagcgggaggaggaggagaggcggctccgccaggcagccttccagaaactcaaggccaacttcaatacatagtcctgctgaccttgccctc

SEQ ID NO: 209521 - DNA, 120 bp, Artificial Sequence
  ENSG00000115468_7 (sequence is synthesized)
agccagcatctccatccaccaccccgtgccagctcccgtgccagccttcattcctcccagtgtccaagcccctccaggagggtcctggggtgggccagatgcctgcccacctctgtctcc

SEQ ID NO: 209522 - DNA, 120 bp, Artificial Sequence
  ENSG00000115468_8 (sequence is synthesized)
tgcctctgctcctctgcccttcttatagccagaacttgtatcttctcagcaaccttcactttgtccttgtccctttaccattccccatcaaagagtagtctgctatatcaatttgtgtag

SEQ ID NO: 209523 - DNA, 120 bp, Artificial Sequence
  ENSG00000115468_9 (sequence is synthesized)
atatgtctgtctttttgggtcctcagagaaaatgcccattttctcggagaattctctgcactcctctctgcttcacattcaacttccctgttctcatctttggtaggattctgccagttg

SEQ ID NO: 209524 - DNA, 120 bp, Artificial Sequence
  ENSG00000115468_10 (sequence is synthesized)
cttttgcatcttctgttcctgggtaatggtgggtcttaatggaggctgggtggaccactgcccgtccactcttcaacaggaggaacagcatgccaccatagtaacacacattagagaaag

SEQ ID NO: 209525 - DNA, 120 bp, Artificial Sequence
  ENSG00000115468_11 (sequence is synthesized)
gacagaggtctgctccttcctgccacctttctcctggccccttagcattcccccagtccctccctcttcaccttgctccgtctatgtcttcccagctcagccttttccccactcttaaat

SEQ ID NO: 209526 - DNA, 120 bp, Artificial Sequence
  ENSG00000115468_12 (sequence is synthesized)
actgtactacttcactgtaagaacgaaagaatagttaggataccaatgagtaaaagggttcctgttcactctgactctgtgcaaattgtattacagtagaccgctgacgttcccaagtga

SEQ ID NO: 209527 - DNA, 120 bp, Artificial Sequence
  ENSG00000115468_13 (sequence is synthesized)
cagatccagggcctttcaaacatccccaaagtcatggccatactcaccattagccagtttctaacatctgtttcagggtatccagctgtagatgttcttatcccccatacttgtgagttc

SEQ ID NO: 209528 - DNA, 120 bp, Artificial Sequence
  ENSG00000115468_14 (sequence is synthesized)
ttggggttgctcacaaatactaggggtttttgttgtatttttaacaaatatatcctaatgtcatatttattctcttttgtaactgctgtctttacaataaagaaatcatctgcctttcta

SEQ ID NO: 209529 - DNA, 120 bp, Artificial Sequence
  ENSG00000115468_15 (sequence is synthesized)
acaggcatgagccaccacgcctggctggatataccccgtttcgtttctcctttcatctgtccgcagacacccgcgttgtttccaccttttggctgttgtaaactgatttgtttttagagc

SEQ ID NO: 209530 - DNA, 120 bp, Artificial Sequence
  ENSG00000115468_16 (sequence is synthesized)
actctacagcgtgtatccgtggctgtaacgtgagctggtggagcagtcaaggttagacaggaaattttaattaccctggacttatctggaggcctctttcaaagggaggcaatgagggca

SEQ ID NO: 209531 - DNA, 120 bp, Artificial Sequence
  ENSG00000115468_17 (sequence is synthesized)
gccacttaaaggcaggaccccaatgcaacatcttaaaatgcagccgcaaggtttttgcagcatactaaaagcttgtgttttaattccccaaagagagggtgggaagaggaacatttggct

SEQ ID NO: 209532 - DNA, 120 bp, Artificial Sequence
  ENSG00000115468_18 (sequence is synthesized)
atgggaaagttgtctttttcttaagaatctgaaacggtgatgtcatggatgtcctgccagtgccagagtcccgcgttaccaagacaccagtgaaacccaaaaaggtatgacgctgggcgg

SEQ ID NO: 209533 - DNA, 120 bp, Artificial Sequence
  ENSG00000115468_19 (sequence is synthesized)
gctaagtgcaggcggataccccggccttggcggctgcttgcctttctccgtactgtccctgtgaaggccaagatctgtaacgctgacagtccccagacatacgatgggagagttgcagta

SEQ ID NO: 209534 - DNA, 120 bp, Artificial Sequence
  ENSG00000115474_0 (sequence is synthesized)
agtccaagaagagaacctacaaactagacttgtagattaaaattatctgatcaaaaaggcagactctgtaaatttccttaagacctaccttggcataaaggctgacccagcaaaagaact

SEQ ID NO: 209535 - DNA, 120 bp, Artificial Sequence
  ENSG00000115474_1 (sequence is synthesized)
gagaaatacagcctgagatggacagcagtaattgcaaagttattgctcctctcctaagtcaaagataccggaggatggtcaccaaggatggccacagcacacttcaaatggatggcgctc

SEQ ID NO: 209536 - DNA, 120 bp, Artificial Sequence
  ENSG00000115474_2 (sequence is synthesized)
aaagaggtcttgcatatcttcgagatgcttggggaatcctaatggacatgcgctggcgttggatgatgttggtcttttctgcttcttttgttgtccactggcttgtctttgcagtgctct

SEQ ID NO: 209537 - DNA, 120 bp, Artificial Sequence
  ENSG00000115474_3 (sequence is synthesized)
ggtatgttctggctgagatgaatggtgatctggaactagatcatgatgccccacctgaaaaccacactatctgtgtcaagtatatcaccagtttcacagctgcattctccttctccctgg

SEQ ID NO: 209538 - DNA, 120 bp, Artificial Sequence
  ENSG00000115474_4 (sequence is synthesized)
agacacaactcacaattggttatggtaccatgttccccagtggtgactgtccaagtgcaatcgccttacttgccatacaaatgctcctaggcctcatgctagaggcttttatcacaggtg

SEQ ID NO: 209539 - DNA, 120 bp, Artificial Sequence
  ENSG00000115474_5 (sequence is synthesized)
cttttgtggcgaagattgcccggccaaaaaatcgagctttttcaattcgctttactgacacagcagtagtagctcacatggatggcaaacctaatcttatcttccaagtggccaacaccc

SEQ ID NO: 209540 - DNA, 120 bp, Artificial Sequence
  ENSG00000115474_6 (sequence is synthesized)
gacctagccctctaaccagtgtccgggtctcagctgtactctatcaggaaagagaaaatggcaaactctaccagaccagtgtggatttccaccttgatggcatcagttctgacgaatgtc

SEQ ID NO: 209541 - DNA, 120 bp, Artificial Sequence
  ENSG00000115474_7 (sequence is synthesized)
cattcttcatctttccactaacgtactatcactccattacaccatcaagtcctctggctactctgctccagcatgaaaatccttctcactttgaattagttgtattcctttcagcaatgc

SEQ ID NO: 209542 - DNA, 120 bp, Artificial Sequence
  ENSG00000115474_8 (sequence is synthesized)
aggagggcactggagaaatatgccaaaggaggacatcctacctaccgtctgaaatcatgttacatcactgttttgcatctctgttgacccgaggttccaaaggtgaatatcaaatcaaga

SEQ ID NO: 209543 - DNA, 120 bp, Artificial Sequence
  ENSG00000115474_9 (sequence is synthesized)
tggagaattttgacaagactgtccctgaatttccaactcctctggtttctaaaagcccaaacaggactgacctggatatccacatcaatggacaaagcattgacaattttcagatctctg

SEQ ID NO: 209544 - DNA, 120 bp, Artificial Sequence
  ENSG00000115474_10 (sequence is synthesized)
aaacaggactgacagaataagacttatccattttttaatgtattaaatacacccagccagttatgcagctactttttctttactgtatctcatgttttcttttttcaatgctaattatag

SEQ ID NO: 209545 - DNA, 120 bp, Artificial Sequence
  ENSG00000115474_11 (sequence is synthesized)
ctctctacatcacggtaatcatgcctatgcctacataagaatggctgagctaacaatacacattctggaaacataacactctacattacaaagtttgttacctgctgaaatcaatgtaac

SEQ ID NO: 209546 - DNA, 120 bp, Artificial Sequence
  ENSG00000115474_12 (sequence is synthesized)
tcaacttgacagacacttatacagaaatgttgctggtgaatttataagaatgtggtatgatactagtaatgaaggcaaaatggacagtgaagtttaacacaactgaactctaagaaaatc

SEQ ID NO: 209547 - DNA, 120 bp, Artificial Sequence
  ENSG00000115474_13 (sequence is synthesized)
aaccattaatctctcattttcatctgcaaattgaagcaacagtttagtttcaaacctagctccctgggtggaatgacgacttcactatacttagtgaatatcctttaagagctgggattt

SEQ ID NO: 209548 - DNA, 120 bp, Artificial Sequence
  ENSG00000115474_14 (sequence is synthesized)
ttttcaagacaacaaagatcattcatttggttctttatactatgaaacttgagtaagtattacctccttaatttttaacaactaagaacaaaaattaacgagaaaaacaacaaagtacag

SEQ ID NO: 209549 - DNA, 120 bp, Artificial Sequence
  ENSG00000115474_15 (sequence is synthesized)
taaacctaaaagcatttgaacatgacacccgaacacatacatatatgttcacttatttgtggcagaaggtgatcagataagctccagcccaaatggaacctgtggggtggtattttgcat

SEQ ID NO: 209550 - DNA, 120 bp, Artificial Sequence
  ENSG00000115474_16 (sequence is synthesized)
tgcaaggagacgcaaaattttattttaaaactgtcctccataataatcaaacggtgattcatctaaatgacttctagcaacctaagtaaaaacattcccctcctatgtatgattcatttg

SEQ ID NO: 209551 - DNA, 120 bp, Artificial Sequence
  ENSG00000115474_17 (sequence is synthesized)
atcatataaaacatcatgatggctctaattcataaatacaaaaatatatttaagtctttatagatataaagctttacttagatataacttgagtgagtagggaaaaaaatctacagtaga

SEQ ID NO: 209552 - DNA, 120 bp, Artificial Sequence
  ENSG00000115474_18 (sequence is synthesized)
taaagcaaaagataattaggcaacaaagcattttcaaactcaaattcctgtttccaacttcaaatagttttttctataaacacaaaatcagtgtttattcaccagtaggaggttggacta

SEQ ID NO: 209553 - DNA, 120 bp, Artificial Sequence
  ENSG00000115474_19 (sequence is synthesized)
gatgaactctattatttctttctaaatctaatagtctataaaaattatgtttcctctgttttttattttatctatgctaaaatgagccctttcccttatgtccagtttaagatgatcatt

SEQ ID NO: 209554 - DNA, 120 bp, Artificial Sequence
  ENSG00000115474_20 (sequence is synthesized)
tgcatgattttcatttcaataaaaaaaagagaaactgtccttaaaacaaaacaaaaaccaaaaaagtcaccctatcaggtttcaaacagatttgtggctgttcttttctgaaatttccct

SEQ ID NO: 209555 - DNA, 120 bp, Artificial Sequence
  ENSG00000115474_21 (sequence is synthesized)
tattcaggtttctgtgggaaaaatgaaagattaaccttccccactggtgatgacctaggcaggaatcatctcttgaaataaatactagctgagtaaaggcaagcaggtgtgaagagcagg

SEQ ID NO: 209556 - DNA, 120 bp, Artificial Sequence
  ENSG00000115474_22 (sequence is synthesized)
gctcagcagcaagtcacatttttctactatttgaccaaaaggaaaagaaaataaagaagaactctggagtggtctaagactgataatagcagaagaatatcaagaacacagaaacttaat

SEQ ID NO: 209557 - DNA, 120 bp, Artificial Sequence
  ENSG00000115474_23 (sequence is synthesized)
tattgtgaacttttgctgtttgaaaatcttagacattcattcttaagtagaaatcagaccaacagattttcccaacccaagactattgtaacacataaagacagcaagaattcttatttc

SEQ ID NO: 209558 - DNA, 120 bp, Artificial Sequence
  ENSG00000115474_24 (sequence is synthesized)
tataataaattaacaagattcacctaacctttgaaaataaagtagtattgaagacttacatggtatgttttttcctaaaggcactacatcacttacacagttcaccctctcgcttgttaa

SEQ ID NO: 209559 - DNA, 120 bp, Artificial Sequence
  ENSG00000115474_25 (sequence is synthesized)
gtgaagctgcccaaggtgacataagtgaatgagtaaaacctgagatctaaggttccatttaagtcagatgagtttcatattatacttactgtttataataaatttggcatttgaaaacta

SEQ ID NO: 209560 - DNA, 120 bp, Artificial Sequence
  ENSG00000115474_26 (sequence is synthesized)
aatatgacttcccctacacatgccaaaaaaaactattggtaaactactgttatttaataaacactttataaatctataagaaacgtgatccaaaacttttttgcaggagatagaaagttt

SEQ ID NO: 209561 - DNA, 120 bp, Artificial Sequence
  ENSG00000115474_27 (sequence is synthesized)
ctgggaggactgttcattgtttctttcacttatttcaaatcacagtttctaggttaaggattaggttttctatagaaagaccattatcctctgaggaaaaggaagtaacaatggaaaaag

SEQ ID NO: 209562 - DNA, 120 bp, Artificial Sequence
  ENSG00000115474_28 (sequence is synthesized)
ggcggaaattactgggagggaggaatggctgctctgcctttctggatgtgcagctcactaacctggatcatctgggagcttggtcatgaagtcttgcacacatgatcaggaagactactt

SEQ ID NO: 209563 - DNA, 120 bp, Artificial Sequence
  ENSG00000115474_29 (sequence is synthesized)
cggaactaactttaaacgttcctttggaaactgataaagatagcatgacagtttcaacaaactggaggcatgtcgttacctaaaaatctcaggggcctagttttacatatgtacaagccc

SEQ ID NO: 209564 - DNA, 120 bp, Artificial Sequence
  ENSG00000115484_0 (sequence is synthesized)
cttctccgcctccgcctcctcccgacgccggcgccgctttctggaaggttcgtgaaggcagtgagggcttaccgttattacactgcggccggccagaatccgggtccatccgtccttccc

SEQ ID NO: 209565 - DNA, 120 bp, Artificial Sequence
  ENSG00000115484_1 (sequence is synthesized)
gagccaacccagacacagcggagtttgccatgcccgagaatgtggcaccccggagcggggcgactgccggggctgccggcggccgcgggaaaggcgcctatcaggaccgcgacaagccag

SEQ ID NO: 209566 - DNA, 120 bp, Artificial Sequence
  ENSG00000115484_2 (sequence is synthesized)
cccagatccgcttcagcaacatttccgccgccaaagcggttgctgatgctattagaacaagccttggaccaaaaggaatggataaaatgattcaagatggaaaaggtgatgtaaccatta

SEQ ID NO: 209567 - DNA, 120 bp, Artificial Sequence
  ENSG00000115484_3 (sequence is synthesized)
caaatgatggtgctaccattctgaaacaaatgcaagtattacatccagcagccagaatgctggtggagctgtctaaggctcaagatatagaagcaggagatggcaccacatcagtagtca

SEQ ID NO: 209568 - DNA, 120 bp, Artificial Sequence
  ENSG00000115484_4 (sequence is synthesized)
tcattgctggctccctcttagattcttgtaccaagcttcttcagaaagggattcatccaaccatcatttctgagtcattccagaaggccctggaaaagggcattgaaatcttgactgaca

SEQ ID NO: 209569 - DNA, 120 bp, Artificial Sequence
  ENSG00000115484_5 (sequence is synthesized)
tgtctcgacctgtggaactgagtgacagagaaactttgttaaatagtgcaaccacttcactgaactcaaaggtggtttctcagtattcaagtctgctttctccaatgagtgtaaatgcag

SEQ ID NO: 209570 - DNA, 120 bp, Artificial Sequence
  ENSG00000115484_6 (sequence is synthesized)
tgatgaaagtgattgacccagccacagccaccagtgtagatcttagagatattaaaatagttaagaagcttggtgggacaattgatgactgtgagttggtggaagggctggttctcaccc

SEQ ID NO: 209571 - DNA, 120 bp, Artificial Sequence
  ENSG00000115484_7 (sequence is synthesized)
aaaaagtgtcaaattctggcataaccagagttgaaaaggccaagattgggcttattcagttttgcttatctgctcccaaaacagacatggataatcaaatagtggtttctgactatgccc

SEQ ID NO: 209572 - DNA, 120 bp, Artificial Sequence
  ENSG00000115484_8 (sequence is synthesized)
agatggaccgagtgctgcgagaagagagagcctatattttaaatttagtgaagcaaattaaaaaaacaggatgtaatgtccttctcatacagaaatctattctaagagatgctcttagtg

SEQ ID NO: 209573 - DNA, 120 bp, Artificial Sequence
  ENSG00000115484_9 (sequence is synthesized)
agccagttgctcatattgaccaatttactgctgacatgctgggttctgctgagttagctgaggaggtcaatttaaatggttctggcaaactgctcaagattacaggctgtgccagccctg

SEQ ID NO: 209574 - DNA, 120 bp, Artificial Sequence
  ENSG00000115484_10 (sequence is synthesized)
gaaaaacagttacaattgttgttcgtggttctaacaaactggtgattgaagaagctgagcgctccattcatgatgccctatgtgttattcgttgtttagtgaagaagagggctcttattg

SEQ ID NO: 209575 - DNA, 120 bp, Artificial Sequence
  ENSG00000115484_11 (sequence is synthesized)
caggaggtggtgctccagaaatagagttggccctacgattaactgaatattcacgaacactgagtggtatggaatcctactgcgttcgtgcttttgcagatgctatggaggtcattccat

SEQ ID NO: 209576 - DNA, 120 bp, Artificial Sequence
  ENSG00000115484_12 (sequence is synthesized)
ctacactagctgaaaatgccggcctgaatcccatttctacagtaacagaactaagaaaccggcatgcccagggagaaaaaactgcaggcattaatgtccgaaagggtggtatttccaaca

SEQ ID NO: 209577 - DNA, 120 bp, Artificial Sequence
  ENSG00000115484_13 (sequence is synthesized)
ttttggaggaactggttgtccagcctctgttggtatcagtcagtgctctgactcttgcaactgaaactgttcggagcattctgaaaatagatgatgtggtaaacactcgataatctggat

SEQ ID NO: 209578 - DNA, 120 bp, Artificial Sequence
  ENSG00000115484_14 (sequence is synthesized)
aactgactagcaccattatgatcaccagtattgtggctggaatggaagaagatcaccttggtgttccttgtttggaagattatttcctctgaatttctgggcttggtcttccagttggca

SEQ ID NO: 209579 - DNA, 120 bp, Artificial Sequence
  ENSG00000115484_15 (sequence is synthesized)
tttgcctgaagttgtattgaaacaatttaatgaaaatattaaatatttggtttcaaaaggcagatttatcttctcccaacattctgttatttctgatacttttgaaaaactaataaaaac

SEQ ID NO: 209580 - DNA, 120 bp, Artificial Sequence
  ENSG00000115484_16 (sequence is synthesized)
taataaaagaagcgtaaaaagtgagtttacatgttgaggaaaaaaatggcccaatatgctcatcactgataaatgctccctggccttaaaaactaccaacatataatatatatgctgtct

SEQ ID NO: 209581 - DNA, 120 bp, Artificial Sequence
  ENSG00000115484_17 (sequence is synthesized)
taaaagttaatgatccaagtggcacctctctgaacctactttggcttgggaggctgcccagttaaaacaaaaataagttaatggtacagaaagagaatgaaaaatgaaagcctcctttta

SEQ ID NO: 209582 - DNA, 120 bp, Artificial Sequence
  ENSG00000115484_18 (sequence is synthesized)
tcctatcatcctaattccttttcccagtaataatgactgctgtgttggattccttctgcaaataaaagtgtatacatatatgtagcaaatcttacttaaacaaaagggtttcttaactaa

SEQ ID NO: 209583 - DNA, 120 bp, Artificial Sequence
  ENSG00000115484_19 (sequence is synthesized)
gcggccgcgggaaaggcgcctatcaggaccgcgacaagccagcccagatccgcttcagcaacatttccgccgccaaagaagcagcccagtggagggatccttatttctgtttttctgccg

SEQ ID NO: 209584 - DNA, 120 bp, Artificial Sequence
  ENSG00000115484_20 (sequence is synthesized)
tttggacttgccccattttgcatcttaatctcccttagtttttcatcctgcactgtgcatcattcatattggagccgaaagcagttcaaaatgccgaggattgcatgcagtcttcactag

SEQ ID NO: 209585 - DNA, 120 bp, Artificial Sequence
  ENSG00000115484_21 (sequence is synthesized)
ggatctgacgcttgagggctgtcgcttattgcttattggaactggtagaatgcacagtatctttcagctttgttattcttatttaaagaactattaaataaacttcacttggcacaactg

SEQ ID NO: 209586 - DNA, 120 bp, Artificial Sequence
  ENSG00000115486_0 (sequence is synthesized)
aaattctcctggcggcctccgttcagacgcggcagctgtgacccacctgcctcctccgcagagcaatggcggtgtctgccgggtccgcgcggacctcgcccagctcagataaagtacaga

SEQ ID NO: 209587 - DNA, 120 bp, Artificial Sequence
  ENSG00000115486_1 (sequence is synthesized)
aagacaaggctgaactgatctcagggcccaggcaggacagccgaatagggaaactcttgggttttgagtggacagatttgtccagttggcggaggctggtgaccctgctgaatcgaccaa

SEQ ID NO: 209588 - DNA, 120 bp, Artificial Sequence
  ENSG00000115486_2 (sequence is synthesized)
cggaccctgcaagcttagctgtctttcgttttctttttgggttcttgatggtgctagacattccccaggagcgggggctcagctctctggaccggaaataccttgatgggctggatgtgt

SEQ ID NO: 209589 - DNA, 120 bp, Artificial Sequence
  ENSG00000115486_3 (sequence is synthesized)
gccgcttccccttgctggatgccctacgcccactgccacttgactggatgtatcttgtctacaccatcatgtttctgggggcactgggcatgatgctgggcctgtgctaccggataagct

SEQ ID NO: 209590 - DNA, 120 bp, Artificial Sequence
  ENSG00000115486_4 (sequence is synthesized)
gtgtgttattcctgctgccatactggtatgtgtttctcctggacaagacatcatggaacaaccactcctatctgtatgggttgttggcctttcagctaacattcatggatgcaaaccact

SEQ ID NO: 209591 - DNA, 120 bp, Artificial Sequence
  ENSG00000115486_5 (sequence is synthesized)
actggtctgtggacggtctgctgaatgcccataggaggaatgcccacgtgcccctttggaactatgcagtgctccgtggccagatcttcattgtgtacttcattgcgggtgtgaaaaagc

SEQ ID NO: 209592 - DNA, 120 bp, Artificial Sequence
  ENSG00000115486_6 (sequence is synthesized)
tggatgcagactgggttgaaggctattccatggaatatttgtcccggcactggctcttcagtcccttcaaactgctgttgtctgaggagctgactagcctgctggtcgtgcactggggtg

SEQ ID NO: 209593 - DNA, 120 bp, Artificial Sequence
  ENSG00000115486_7 (sequence is synthesized)
ggctgctgcttgacctctcagctggtttcctgctcttttttgatgtctcaagatccattggcctgttctttgtgtcctacttccactgcatgaattcccagcttttcagcattggtatgt

SEQ ID NO: 209594 - DNA, 120 bp, Artificial Sequence
  ENSG00000115486_8 (sequence is synthesized)
tctcctacgtcatgctggccagcagccctctcttctgctcccctgagtggcctcggaagctggtgtcctactgcccccgaaggttgcaacaactgttgcccctcaaggcagcccctcagc

SEQ ID NO: 209595 - DNA, 120 bp, Artificial Sequence
  ENSG00000115486_9 (sequence is synthesized)
ccagtgtttcctgtgtgtataagaggagccggggcaaaagtggccagaagccagggctgcgccatcagctgggagctgccttcaccctgctctacctcctggagcagctattcctgccct

SEQ ID NO: 209596 - DNA, 120 bp, Artificial Sequence
  ENSG00000115486_10 (sequence is synthesized)
attctcattttctcacccagggctataacaactggacaaatgggctgtatggctattcctgggacatgatggtgcactcccgctcccaccagcacgtgaagatcacctaccgtgatggcc

SEQ ID NO: 209597 - DNA, 120 bp, Artificial Sequence
  ENSG00000115486_11 (sequence is synthesized)
gcactggcgaactgggctaccttaaccctggggtatttacacagagtcggcgatggaaggatcatgcagacatgctgaagcaatatgccacttgcctgagccgcctgcttcccaagtata

SEQ ID NO: 209598 - DNA, 120 bp, Artificial Sequence
  ENSG00000115486_12 (sequence is synthesized)
atgtcactgagccccagatctactttgatatttgggtctccatcaatgaccgcttccagcagaggatttttgaccctcgtgtggacatcgtgcaggccgcttggtcaccctttcagcgca

SEQ ID NO: 209599 - DNA, 120 bp, Artificial Sequence
  ENSG00000115486_13 (sequence is synthesized)
catcctgggtgcaaccactcttgatggacctgtctccctggagggccaagttacaggaaatcaagagcagcctagacaaccacactgaggtggtcttcattgcagatttccctggactgc

SEQ ID NO: 209600 - DNA, 120 bp, Artificial Sequence
  ENSG00000115486_14 (sequence is synthesized)
acttggagaattttgtgagtgaagacctgggcaacactagcatccagctgctgcagggggaagtgactgtggagcttgtggcagaacagaagaaccagactcttcgagagggagaaaaaa

SEQ ID NO: 209601 - DNA, 120 bp, Artificial Sequence
  ENSG00000115486_15 (sequence is synthesized)
tgcagttgcctgctggtgagtaccataaggtgtatacgacatcacctagcccttcttgctacatgtacgtctatgtcaacactacagagcttgcactggagcaagacctggcatatctgc

SEQ ID NO: 209602 - DNA, 120 bp, Artificial Sequence
  ENSG00000115486_16 (sequence is synthesized)
aagaattaaaggaaaaggtggagaatggaagtgaaacagggcctctacccccagagctgcagcctctgttggaaggggaagtaaaagggggccctgagccaacacctctggttcagacct

SEQ ID NO: 209603 - DNA, 120 bp, Artificial Sequence
  ENSG00000115486_17 (sequence is synthesized)
ttcttagacgccaacaaaggctccaggagattgaacgccggcgaaatactcctttccatgagcgattcttccgcttcttgttgcgaaagctctatgtctttcgccgcagcttcctgatga

SEQ ID NO: 209604 - DNA, 120 bp, Artificial Sequence
  ENSG00000115486_18 (sequence is synthesized)
cttgtatctcacttcgaaatctgatattaggccgtccttccctggagcagctggcccaggaggtgacttatgcaaacttgagaccctttgaggcagttggagaactgaatccctcaaaca

SEQ ID NO: 209605 - DNA, 120 bp, Artificial Sequence
  ENSG00000115486_19 (sequence is synthesized)
cggattcttcacattctaatcctcctgagtcaaatcctgatcctgtccactcagagttctgaagggggccagatgttgggtgcagatgtagaagcagccagtcacagacccattctatgc

SEQ ID NO: 209606 - DNA, 120 bp, Artificial Sequence
  ENSG00000115486_20 (sequence is synthesized)
aatggacatttatttgaaaaaaattctcaaaagttttttttttttttttgggggggcggggttctaaagctgtttttaactccgagattacaacttagaggaaccaaggaaataaagcaa

SEQ ID NO: 209607 - DNA, 120 bp, Artificial Sequence
  ENSG00000115486_21 (sequence is synthesized)
ataagatttaacaacccaagattaagaggccaggaagaggttagacgcaatgtgaaactgtcctcctaggataaggtttaaagtggctttttgggggctgggtgccgtggctcacgcctg

SEQ ID NO: 209608 - DNA, 71 bp, Artificial Sequence
  ENSG00000115486_22 (sequence is synthesized)
ccagacgtggtggtgggtgcctgtaatccaactacccaggaggctgaggcatgagaatcgcttggtgggca

SEQ ID NO: 209609 - DNA, 120 bp, Artificial Sequence
  ENSG00000115486_23 (sequence is synthesized)
agacttcgtctcaaaataaataaataaagtggctcttggggaaaagcaatttaatgtaccacgatgaatagctaactgttcccaagtgtttgctatgtgcaacacaccgcgtgagcagtg

SEQ ID NO: 209610 - DNA, 120 bp, Artificial Sequence
  ENSG00000115486_24 (sequence is synthesized)
ttacctgcattattacattaggctgagaggtaaaataatttgcccgaagacatacagctagtgacgaatggactgatggtttgaacttaacgtctatttgacttaaggtcctgcaccctg

SEQ ID NO: 209611 - DNA, 120 bp, Artificial Sequence
  ENSG00000115486_25 (sequence is synthesized)
ccacttgtaattttcagaatcactgataatctgaaataatgcagcttaaaacatgttttcttaattaaaagtataattggatggtggtcaggttgtaaatgcacacaaagtaatttatct

SEQ ID NO: 209612 - DNA, 120 bp, Artificial Sequence
  ENSG00000115486_26 (sequence is synthesized)
tcattgcaattttggttccttctttgttcctattatctatatacacccagtgtttcactagcagttatgagagcagtcagaatagcagcatcaaagttaaataaggaaatctagatgatt

SEQ ID NO: 209613 - DNA, 120 bp, Artificial Sequence
  ENSG00000115486_27 (sequence is synthesized)
gctagattttctctaaaaataagcttagtatttggtattattctagcctttggtgagcagaaggggaggtaaagtaagaattaactaaatttagtaagggattagggaatgcttagacat

SEQ ID NO: 209614 - DNA, 120 bp, Artificial Sequence
  ENSG00000115486_28 (sequence is synthesized)
tttgtaggttggggtatacaagggtaactcaggaagctcctcagttcagtgaaaattcaaagggttggcactgagctaggaagcgagaatgcagggttatgaaaaaggatccctgctttg

SEQ ID NO: 209615 - DNA, 120 bp, Artificial Sequence
  ENSG00000115486_29 (sequence is synthesized)
ggagctcatggacttgtagcagagaccggtagtaaattggcagtctcagtaacttctgtaaatgattgcatctctttgcaggcttctcttcccatactctcccccactcctccttggaca

SEQ ID NO: 209616 - DNA, 120 bp, Artificial Sequence
  ENSG00000115486_30 (sequence is synthesized)
aggtctaagttccacctggatatcccacagggctatcaagctcagttcatcctaaacagaacttacattcatccccaactcagacttccttattctttattattgaatggcagctctgta

SEQ ID NO: 209617 - DNA, 120 bp, Artificial Sequence
  ENSG00000115486_31 (sequence is synthesized)
ccttagccaagctgttatctctaggtcatcagccttgactcttcctttttccttgcatttcttaaaattgccaagtcccatcaattttacctcctggatacctcttgaatctattttttt

SEQ ID NO: 209618 - DNA, 84 bp, Artificial Sequence
  ENSG00000115486_32 (sequence is synthesized)
agggtttcactctatactgcagccaccacctcctgggtttaaacgattcttccacttcagcctcccatgtagctgggactacag

SEQ ID NO: 209619 - DNA, 120 bp, Artificial Sequence
  ENSG00000115486_33 (sequence is synthesized)
ggtgtgagccaccgtgcccagccaaatctgttttcattactacctatatctgtattttcaacctttgtattagcatctagttagggatagaccaggacagggccgacatgttagttgtca

SEQ ID NO: 209620 - DNA, 120 bp, Artificial Sequence
  ENSG00000115486_34 (sequence is synthesized)
ggccgacatgttagttgtcaagcagattgccaccctcccccaccactgaggaggccaaatggagtttggtggaaaatctctaattcattcaaggtattatatgggcaagcaatggctgtg

SEQ ID NO: 209621 - DNA, 120 bp, Artificial Sequence
  ENSG00000115486_35 (sequence is synthesized)
gcacagggtcccctgattactttgtaagaatgggtgggagggatgctgattttcaatccttttgcagatcttctctcatagtaacacaatagaagatactttgccactatgttgtttgcc

SEQ ID NO: 209622 - DNA, 120 bp, Artificial Sequence
  ENSG00000115486_36 (sequence is synthesized)
aaactcactgtacctacttgactggtaacaaaagtcccaagagttacttgggagaagacacttgaaaaagtatttttctaaatatgggcaaggatgctgcccttccccaaactgttagta

SEQ ID NO: 209623 - DNA, 120 bp, Artificial Sequence
  ENSG00000115486_37 (sequence is synthesized)
taccacctctctgaccaattttcccaaggaagatattggggtagggtgaggtgtaaagaaaaagtggtcatgtaaatactggtaataaaagctgttcagtggggtagagttgggttgcaa

SEQ ID NO: 209624 - DNA, 120 bp, Artificial Sequence
  ENSG00000115486_38 (sequence is synthesized)
ctgtagccattctaaaaatgggctatcaatgtccttttagccaaaagactttagtatacatcctcctcattctaccctcaggatttggatctttgcccctgatgggtatccatccccttt

SEQ ID NO: 209625 - DNA, 120 bp, Artificial Sequence
  ENSG00000115486_39 (sequence is synthesized)
gaaactttagaaaggcaggttatatacagaatgttcaacctaaagacatttccttaagtcatactttcatgctttctaaactataatcacccttatcatcccctgctgttatgctttccc

SEQ ID NO: 209626 - DNA, 120 bp, Artificial Sequence
  ENSG00000115486_40 (sequence is synthesized)
tctgctccctgtggcctaatgttcctccaccaccttattaaccttcaggatacttttcccctaggctgggcaggacaacactatccccttggtccacaagctccctcaaggttggggaat

SEQ ID NO: 209627 - DNA, 120 bp, Artificial Sequence
  ENSG00000115486_41 (sequence is synthesized)
ctttgtttacttagcaaatactgaacataaccttaaagcggttacttttgaaaacttctcatgctattctaccaacttggaggcacctatccatgctcattcccctaatgtagccaatat

SEQ ID NO: 209628 - DNA, 120 bp, Artificial Sequence
  ENSG00000115486_42 (sequence is synthesized)
ggttatctgcaatgtattggcatctaaaaactcccttatgaaactgccagacttgttctggaacatttcaattacatgcaaaattcaggttctcaagttggaacaagtctaattgacaca

SEQ ID NO: 209629 - DNA, 120 bp, Artificial Sequence
  ENSG00000115486_43 (sequence is synthesized)
aagtctaattgacacacctgcataggttttaaccttgccctccccctacttcccaacagatttccaagttttttgagaaggaaccttgctctggcccaggctggagtgcaatggcgccat

SEQ ID NO: 209630 - DNA, 88 bp, Artificial Sequence
  ENSG00000115486_44 (sequence is synthesized)
accatacccagatttccacggctttttttttaagtctcactctgttaccctggccggagtgtggtggcacgatttcagctcactgcaa

SEQ ID NO: 209631 - DNA, 66 bp, Artificial Sequence
  ENSG00000115486_45 (sequence is synthesized)
cagatttccacggctttttttttaagtctcactctgttaccctggccggagtgtggtggcacgatt

SEQ ID NO: 209632 - DNA, 86 bp, Artificial Sequence
  ENSG00000115486_46 (sequence is synthesized)
gatggtctcgtgatctgcatcacgcctatattactatatagtggcctatattacaggccactccgcctggcctccaaatttccaag

SEQ ID NO: 209633 - DNA, 120 bp, Artificial Sequence
  ENSG00000115486_47 (sequence is synthesized)
tatattacaggccactccgcctggcctccaaatttccaagtttttaagtctccatgcaaacaggcataagcaagcactccttggctctacatttgcaggacaagctggaccaccattcag

SEQ ID NO: 209634 - DNA, 120 bp, Artificial Sequence
  ENSG00000115486_48 (sequence is synthesized)
atgttggtagaaatgtaatccaagtggctattctctatgcatgtagctcctaggttcaagagcagtgtggtctgcggattttctacacaacctgccataaatgaaatttaagcctttgga

SEQ ID NO: 209635 - DNA, 120 bp, Artificial Sequence
  ENSG00000115486_49 (sequence is synthesized)
aatttatagcattttcagctaatttgcattatttatctctgcaagatattgactagaaatcacgtttcagaacttctcagatgaaaacatcatacaacccttaaaactaagctcataatt

SEQ ID NO: 209636 - DNA, 120 bp, Artificial Sequence
  ENSG00000115486_50 (sequence is synthesized)
taaaaatgtatgcagattaataggcttaaattgccaggactttagatagacattaccacttccaggttaatacttttagcggtttttatgccttcaatggtttgaagccctcaaccttag

SEQ ID NO: 209637 - DNA, 120 bp, Artificial Sequence
  ENSG00000115486_51 (sequence is synthesized)
ttgaaaacttaaaaatggcattgaatggctgctgcaataaggacacatgaattttggcttaagtggactaggaggactaaatcttgcttaggcttttaaaaaatgcccacccactgggtc

SEQ ID NO: 209638 - DNA, 120 bp, Artificial Sequence
  ENSG00000115486_52 (sequence is synthesized)
tagggattgaggttattttcctgaattatggctaattatggattacaattcaaggttaaagatacacatatagtattctcaggttattcatatgatagcattttttaagagccaaagtct

SEQ ID NO: 209639 - DNA, 120 bp, Artificial Sequence
  ENSG00000115486_53 (sequence is synthesized)
cacccaggctggagtgcagtggcttgataatggttcgctacagcctccaacttctatgttaaagtgatcctcctacctcagcctttcaaagtgttgggattataggcacgtacctatggc

SEQ ID NO: 209640 - DNA, 120 bp, Artificial Sequence
  ENSG00000115486_54 (sequence is synthesized)
tggccccaaagcactttaacaaatgagtaacagacacagttaaggtagaacctagcattttatttagatcttcattaaactgttggaattgagaaccagacatacgtaataaacctccaa

SEQ ID NO: 209641 - DNA, 120 bp, Artificial Sequence
  ENSG00000115486_55 (sequence is synthesized)
aaatagatcctgaaaggcactttctgcttagggcaagcagtcatggaataagcatgtaaacaagctggcttctctgtaccacaccagccaagtcagctttctccatggccagccgcacca

SEQ ID NO: 209642 - DNA, 120 bp, Artificial Sequence
  ENSG00000115486_56 (sequence is synthesized)
gctctgccctcccttctgttaacaccagccagaccccctgtaggtctaacccaaggtttttctgtaggacaccttggcctacctgggaatgctggaaacatgttgttaaaggaatcatgg

SEQ ID NO: 209643 - DNA, 120 bp, Artificial Sequence
  ENSG00000115486_57 (sequence is synthesized)
tgttgagagaaaaaaaaaaaatcttttaaaagctgccatctgaggtgatggcttctctgtacttacgccataccccagaatacaataaataagcaattagaaaacgttcaagtatgaagg

SEQ ID NO: 209644 - DNA, 120 bp, Artificial Sequence
  ENSG00000115486_58 (sequence is synthesized)
gatttcctcctccccgccaaaagcactgctctctgaaggaagctggtttctctgtagctacaccagctgttcagaaagctcattggacctggttttgaaaataaaacaaagttaaaaccc

SEQ ID NO: 209645 - DNA, 87 bp, Artificial Sequence
  ENSG00000115486_59 (sequence is synthesized)
acctagaggagtgtcttcatgggtggattatgtaccttaggcatctacccagccactggagtagccaaggcacattcgtgctgtgaa

SEQ ID NO: 209646 - DNA, 120 bp, Artificial Sequence
  ENSG00000115486_60 (sequence is synthesized)
cccagccactggagtagccaaggcacattcgtgctgtgaatgtgctttgatgtgttctccagtgggctggtgcttgaactttctccatgtgtttgcagactgctgttgtctgaggagctg

SEQ ID NO: 209647 - DNA, 120 bp, Artificial Sequence
  ENSG00000115486_61 (sequence is synthesized)
ctccagcctgggcgacagagaaagactgtctcaaaaaaaaaagaagaactactttccttttcagtggaacacctgggagaagtctcctaagggaacggggttgaagaggcccagccaaac

SEQ ID NO: 209648 - DNA, 120 bp, Artificial Sequence
  ENSG00000115486_62 (sequence is synthesized)
aaagtctttggcaccttatttcacttctgctgtgatcaatttcatgctgttgacctgtgtgtcacttaagctgtgatcccataattctttttaaaatattaaaataacatttaattttca

SEQ ID NO: 209649 - DNA, 120 bp, Artificial Sequence
  ENSG00000115486_63 (sequence is synthesized)
gccctacgcccactgccacttgactggatggaaactgggcctgtggtgatctcttgacctcttaatcctctccctacaaatcccaggggcactgggcatgatgctgggcctgtgctaccg

SEQ ID NO: 209650 - DNA, 120 bp, Artificial Sequence
  ENSG00000115486_64 (sequence is synthesized)
tacagagcaggtgactcatctctctcagtaatggcacctgttcctactttgcctgaatttgccacatgccttcctttgtccactcatttccctattcagcagaagcagagtcagtggtat

SEQ ID NO: 209651 - DNA, 120 bp, Artificial Sequence
  ENSG00000115486_65 (sequence is synthesized)
caaaagattgagccctagctgctcttgggagatatatggtatagataggcaagaaaggaaaagaaatttaaaaaggaaaggaaagagccggaactggctgacttggtgagtgagccagtg

SEQ ID NO: 209652 - DNA, 120 bp, Artificial Sequence
  ENSG00000115486_66 (sequence is synthesized)
ccctcagcagctgccttggatggtgcctgtgtccttgccttgccactctagcctcccatcagagccctgcagctgatgtactgagaagatgggcactcactgttcaggctctgacaaaac

SEQ ID NO: 209653 - DNA, 120 bp, Artificial Sequence
  ENSG00000115486_67 (sequence is synthesized)
cattattatcacttccacaaaacaaagggtcacctttctgatttgtcttcttcccatttcttctttcctcttgttttactttattctctttcttcttccctgttattttccagttcctga

SEQ ID NO: 209654 - DNA, 120 bp, Artificial Sequence
  ENSG00000115486_68 (sequence is synthesized)
agtttgacttcattatgatgttagccaagcattcaccttttaaagtgtcctctcactcatgacctccgtggggaacgtcccttccacaacacacacacatctcagtcaaattttgtccta

SEQ ID NO: 209655 - DNA, 120 bp, Artificial Sequence
  ENSG00000115486_69 (sequence is synthesized)
aatgcttgatttttcttaattccaaccatatcctggtccagggaaactgggcctgtggtgatctcttgacctcttaatcctctccctacaaatcccaggggcactgggcatgatgctggg

SEQ ID NO: 209656 - DNA, 120 bp, Artificial Sequence
  ENSG00000115488_0 (sequence is synthesized)
atggcgtcccttcctgtcctgcagaaggagagcgtgttccagtcgggagcccatgcctacagaatccctgccctgctctacctgcctgggcagcagtccctgctggccttcgcggaacag

SEQ ID NO: 209657 - DNA, 120 bp, Artificial Sequence
  ENSG00000115488_1 (sequence is synthesized)
cgggcaagcaagaaggatgagcacgcagagctgattgtcctgcgcagaggagactacgacgcacccacccaccaggttcagtggcaagctcaggaggtggtggcccaggcccggctggat

SEQ ID NO: 209658 - DNA, 120 bp, Artificial Sequence
  ENSG00000115488_2 (sequence is synthesized)
ggccaccggtccatgaacccatgccccttgtatgacgcgcagacggggaccctcttcctcttcttcattgccatccctgggcaagtcacggagcaacagcagctgcagaccagggccaat

SEQ ID NO: 209659 - DNA, 120 bp, Artificial Sequence
  ENSG00000115488_3 (sequence is synthesized)
gtgacgcggctgtgccaagtcaccagcactgaccacgggaggacctggagctcccccagagacctcactgatgcggccatcggcccagcctaccgggagtggtccacctttgcagtgggc

SEQ ID NO: 209660 - DNA, 120 bp, Artificial Sequence
  ENSG00000115488_4 (sequence is synthesized)
cggaaacttcaccccatccaaaggccgatcccctctgccttctgcttcctcagccatgaccatgggcgcacgtgggcgcgagggcactttgtggcccaggacaccctggagtgccaggtg

SEQ ID NO: 209661 - DNA, 120 bp, Artificial Sequence
  ENSG00000115488_5 (sequence is synthesized)
gccgaagtcgagactggggagcagagggtggtgaccctcaacgcgagaagccacctccgagccagggtccaggcccagagcaccaatgacgggcttgatttccaggagtctcagctggtg

SEQ ID NO: 209662 - DNA, 120 bp, Artificial Sequence
  ENSG00000115488_6 (sequence is synthesized)
aagaagctggtggagccgccgccccagggctgccaggggagcgtcatcagcttccccagcccccgctcggggcctggctccccagcccagtggctgctctacactcaccccacacactcc

SEQ ID NO: 209663 - DNA, 120 bp, Artificial Sequence
  ENSG00000115488_7 (sequence is synthesized)
tggcagagggccgacctgggtgcctacctcaacccgcgacctccagcccctgaggcctggtcagagccggtactgctggccaagggcagctgtgcctactcagacctccagagcatgggc

SEQ ID NO: 209664 - DNA, 120 bp, Artificial Sequence
  ENSG00000115488_8 (sequence is synthesized)
accggccctgatgggtcccccttgtttgggtgtctgtacgaagccaatgattacgaggagattgtctttctcatgttcaccctgaagcaagccttcccagctgagtacctgcctcagtga

SEQ ID NO: 209665 - DNA, 120 bp, Artificial Sequence
  ENSG00000115504_0 (sequence is synthesized)
gggcgccgtccgcctgaggggctgcagatcccggctaccgcgagcgccgtggctggcttggctgttccatgtggctccggcggggatggaggactcggtggcggcggcggctgctgctgc

SEQ ID NO: 209666 - DNA, 120 bp, Artificial Sequence
  ENSG00000115504_1 (sequence is synthesized)
ggcggcgacggaggagcggctatgagaagggaacggggccagactcagcccgacagcgggattagagccctccagaatacccatcatatagcccctgaggtggcatggtgatgtctccat

SEQ ID NO: 209667 - DNA, 120 bp, Artificial Sequence
  ENSG00000115504_2 (sequence is synthesized)
gagggaaccccttcccactcatcctgtcacgtatatcatagtgttcttgactgggccattcatctaagatgggatttaccctgtgaaacagggagaagacttatggaccccaagcatcat

SEQ ID NO: 209668 - DNA, 120 bp, Artificial Sequence
  ENSG00000115504_3 (sequence is synthesized)
ttcgagttgtagttgagtttttaaaagacatacatgcaaagttcctttgctttggaccctctgcattattaaagctgctgtattgctaacccagaactgctccagtgtcttgactgatca

SEQ ID NO: 209669 - DNA, 120 bp, Artificial Sequence
  ENSG00000115504_4 (sequence is synthesized)
tcatggcttcagtttggaagagactgcagcgtgtgggaaaacatgcatccaagttccagtttgtggcctcctaccaggagctcatggttgagtgtacgaagaaatggcaaccagataaac

SEQ ID NO: 209670 - DNA, 120 bp, Artificial Sequence
  ENSG00000115504_5 (sequence is synthesized)
tggtggtagtttggaccagaagaagccgaaggaagtcttctaaggcacatagctggcaacctggaataaaaaatccctatcgtggtgttgttgtgtggcctgttcctgaaaacattgaaa

SEQ ID NO: 209671 - DNA, 120 bp, Artificial Sequence
  ENSG00000115504_6 (sequence is synthesized)
tcactgtaacactttttaaggatcctcatgcggaagaatttgaagacaaagagtggacatttgtcatagaaaatgaatccccttctggtcgaaggaaagctcttgctactagcagcatca

SEQ ID NO: 209672 - DNA, 120 bp, Artificial Sequence
  ENSG00000115504_7 (sequence is synthesized)
atatgaaacagtatgcaagccctatgccaactcagactgatgtcaagttaaaattcaagccattatctaaaaaagttgtatctgccgctcttcagttttcattatcttgcatttttctga

SEQ ID NO: 209673 - DNA, 120 bp, Artificial Sequence
  ENSG00000115504_8 (sequence is synthesized)
gggaaggaaaagccacagatgaagacatgcaaagtttggctagtttgatgagtatgaagcaggctgacattggcaatttagatgacttcgaagaagataatgaagatgatgatgagaaca

SEQ ID NO: 209674 - DNA, 120 bp, Artificial Sequence
  ENSG00000115504_9 (sequence is synthesized)
gagtgaaccaagaagaaaaggcagctaaaattacagaaattgtaaaccagttgaatgctctgagcagcttagatgaagatcaagatgactgcataaagcaagcaaatatgcgttcagcta

SEQ ID NO: 209675 - DNA, 120 bp, Artificial Sequence
  ENSG00000115504_10 (sequence is synthesized)
aatcagccagttcctctgaagagcttatcaacaaacttaactttttggatgaagcagaaaaggacttggccaccgtgaattcaaatccatttgatgatcctgatgctgcagaattaaatc

SEQ ID NO: 209676 - DNA, 120 bp, Artificial Sequence
  ENSG00000115504_11 (sequence is synthesized)
catttggagatcctgactcagaagaacctatcactgaaacagcttcacctagaaaaacagaagactctttttataataacagctataatccctttaaagaggtgcagactccacagtatt

SEQ ID NO: 209677 - DNA, 120 bp, Artificial Sequence
  ENSG00000115504_12 (sequence is synthesized)
tgaacccattcgatgagccagaagcatttgtgaccataaaggattctcctccccagtctacaaaaagaaaaaatataagacctgtggatatgagcaagtacctctatgctgatagttcta

SEQ ID NO: 209678 - DNA, 120 bp, Artificial Sequence
  ENSG00000115504_13 (sequence is synthesized)
aaactgaagaagaagaattggatgaatcaaatcctttttatgaacctaaatcaactcctcctccaaataatttggtaaatcctgttcaagaactagaaactgaaaggcgagtgaaaagaa

SEQ ID NO: 209679 - DNA, 120 bp, Artificial Sequence
  ENSG00000115504_14 (sequence is synthesized)
aggccccggctccaccagtcctctcaccaaaaacaggagtattaaatgaaaacacagtttctgcaggaaaagatctctctacttctcctaagccaagccctataccaagtcctgttttgg

SEQ ID NO: 209680 - DNA, 120 bp, Artificial Sequence
  ENSG00000115504_15 (sequence is synthesized)
ggcgaaagccaaatgctagtcagtctttgcttgtatggtgtaaagaagttacaaagaactaccgaggagtaaaaatcaccaattttactacatcgtggagaaatggtttatctttttgtg

SEQ ID NO: 209681 - DNA, 120 bp, Artificial Sequence
  ENSG00000115504_16 (sequence is synthesized)
caatattacaccactttagaccagatttaattgactacaagtctctgaatcctcaagatattaaagagaacaacaaaaaggcatacgatggatttgccagcataggaatttcccgattat

SEQ ID NO: 209682 - DNA, 120 bp, Artificial Sequence
  ENSG00000115504_17 (sequence is synthesized)
tggaaccttctgatatggtattattagcaattcctgataaactgactgttatgacttatctctatcaaataagggcacatttcagtggccaagaactaaatgtcgttcagatagaggaaa

SEQ ID NO: 209683 - DNA, 120 bp, Artificial Sequence
  ENSG00000115504_18 (sequence is synthesized)
acagcagtaaaagcacatataaagttggaaactatgaaacagatacaaacagttctgttgatcaagaaaaattctatgcagagcttagtgatctgaagcgggagcctgaactacaacagc

SEQ ID NO: 209684 - DNA, 120 bp, Artificial Sequence
  ENSG00000115504_19 (sequence is synthesized)
ctatcagcggagcagtagacttcttatcacaggatgactctgtatttgtaaatgatagcggggttggagagtcagaaagtgagcatcaaactcctgatgatcaccttagtccaagcacag

SEQ ID NO: 209685 - DNA, 120 bp, Artificial Sequence
  ENSG00000115504_20 (sequence is synthesized)
cctccccttactgtcgcaggactaaaagtgacacagaaccccagaagtctcagcagagctctggaaggacttcaggatctgatgaccctggaatatgttccaatacagattcaacccaag

SEQ ID NO: 209686 - DNA, 120 bp, Artificial Sequence
  ENSG00000115504_21 (sequence is synthesized)
gttttgttaggcaaaaagagactattgaaagctgagactttagaattgagtgacttatatgttagtgataagaagaaggatatgtctccaccctttatttgtgaggagacagatgaacaa

SEQ ID NO: 209687 - DNA, 120 bp, Artificial Sequence
  ENSG00000115504_22 (sequence is synthesized)
aagcttcaaactctagacatcggtagtaacttggagaaagaaaaattagagaattccagatccttagaatgcagatcagatccagaatctcctatcaaaaaaacaagtttatctcctact

SEQ ID NO: 209688 - DNA, 120 bp, Artificial Sequence
  ENSG00000115504_23 (sequence is synthesized)
tctaaacttggatactcatatagtagagatctagaccttgctaagaaaaaacatgcttccctgaggcagacggagtctgatccagatgctgatagaaccactttaaatcatgcagatcat

SEQ ID NO: 209689 - DNA, 120 bp, Artificial Sequence
  ENSG00000115504_24 (sequence is synthesized)
tcatcaaaaatagtccagcatcgattgttatctagacaagaagaacttaaggaaagagcaagagttctgcttgagcaagcaagaagagatgcagccttaaaggcggggaataagcacaat

SEQ ID NO: 209690 - DNA, 120 bp, Artificial Sequence
  ENSG00000115504_25 (sequence is synthesized)
accaacacagccaccccattctgcaacaggcagctaagtgatcagcaagatgaagagcgacgtcggcagctgagagagagagctcgtcagctaatagcagaagctcgatctggagtgaag

SEQ ID NO: 209691 - DNA, 120 bp, Artificial Sequence
  ENSG00000115504_26 (sequence is synthesized)
atgtcagaacttcccagctatggtgaaatggctgcagaaaagttgaaagaaaggtcaaaggcatctggagatgaaaatgataatattgagatagatactaacgaggagatccctgaaggc

SEQ ID NO: 209692 - DNA, 120 bp, Artificial Sequence
  ENSG00000115504_27 (sequence is synthesized)
tttgttgtaggaggtggagatgaacttactaacttagaaaatgaccttgatactcccgaacaaaacagtaagttggtggacttgaagctgaagaagctcctagaagttcagccacaggtg

SEQ ID NO: 209693 - DNA, 120 bp, Artificial Sequence
  ENSG00000115504_28 (sequence is synthesized)
gcaaattcaccctccagtgctgcccagaaagctgtaactgagagctcagagcaggacatgaaaagtggcacagaagatctccggactgaacgattacaaaaaacaacagaacgttttaga

SEQ ID NO: 209694 - DNA, 120 bp, Artificial Sequence
  ENSG00000115504_29 (sequence is synthesized)
aatcctgttgtgttcagcaaagattctacagtcagaaaaactcaacttcagtctttcagccaatatattgagaatagaccagagatgaaaaggcagagatcaatacaggaagatacaaag

SEQ ID NO: 209695 - DNA, 120 bp, Artificial Sequence
  ENSG00000115504_30 (sequence is synthesized)
aaaggaaatgaggagaaggcagcgataactgaaactcagaggaagccatcagaagatgaagtgcttaataaagggttcaaagacaccagtcagtatgtagtaggagaattggcagcacta

SEQ ID NO: 209696 - DNA, 120 bp, Artificial Sequence
  ENSG00000115504_31 (sequence is synthesized)
gagaatgagcaaaagcaaattgacacccgtgccgcgctggtggagaagcgccttcgctatctcatggacacaggaaggaacacagaagaagaagaagctatgatgcaggaatggtttatg

SEQ ID NO: 209697 - DNA, 120 bp, Artificial Sequence
  ENSG00000115504_32 (sequence is synthesized)
ttagttaataagaaaaatgccttaataaggagaatgaatcagctctctcttctggaaaaagaacatgatttagaacgacggtatgagctgctgaaccgggaattgagggcaatgctagcc

SEQ ID NO: 209698 - DNA, 120 bp, Artificial Sequence
  ENSG00000115504_33 (sequence is synthesized)
attgaagactggcagaagaccgaggcccagaagcgacgcgaacagcttctgctagatgagctggtggccctggtgaacaagcgcgatgcgctcgtcagggacctggacgcgcaggagaag

SEQ ID NO: 209699 - DNA, 120 bp, Artificial Sequence
  ENSG00000115504_34 (sequence is synthesized)
caggccgaagaagaagatgagcatttggagcgaactctggagcaaaacaaaggcaagatggccaagaaagaggagaaatgtgttcttcagtagccatcagatcagaaagaatctctccca

SEQ ID NO: 209700 - DNA, 120 bp, Artificial Sequence
  ENSG00000115504_35 (sequence is synthesized)
acattttagagtcttgcttcccaaaccagaaaaagtcagactcattgttgatttaaaacttttaacattttgtttggctggattgtactactttacctctactttaccaccaccaccctt

SEQ ID NO: 209701 - DNA, 120 bp, Artificial Sequence
  ENSG00000115504_36 (sequence is synthesized)
ttcctccctcctttccaaataatatacagaactccaaaatagcttcatttaaggatttttttgtgagttaacaatttccttgaaatcctgtgaaatagatttgcacagacaccttgtgag

SEQ ID NO: 209702 - DNA, 120 bp, Artificial Sequence
  ENSG00000115504_37 (sequence is synthesized)
tgattggtattggaggtgttcaagaaactgttcgaaaaagaacaaaaacacttccctcgttattttctctcattttttgatgagaggaaaatttgaaacattattcttgttgttgttggt

SEQ ID NO: 209703 - DNA, 120 bp, Artificial Sequence
  ENSG00000115504_38 (sequence is synthesized)
aatagcataatgacagtgggaggggtacaaggggataagaaaaatgtcatgatttttttccggtcctgccacatgtaacacttactctgttacctaaattttatagttagatcatatcca

SEQ ID NO: 209704 - DNA, 120 bp, Artificial Sequence
  ENSG00000115504_39 (sequence is synthesized)
atctacttattaaactgtgttctatttaccagtggagtttttctgcagtggttgcgtttcactgtaaggataatggagttcctctcctctgctttcctcagaggatggtcctttaacata

SEQ ID NO: 209705 - DNA, 120 bp, Artificial Sequence
  ENSG00000115504_40 (sequence is synthesized)
gccagaaacaagccctgtggtttgaaggtgagctgtgaggatgggactaattgatatgcaccagtttacaaagacagtcttatcatccgagaatacaccatctttttctctggataatta

SEQ ID NO: 209706 - DNA, 120 bp, Artificial Sequence
  ENSG00000115504_41 (sequence is synthesized)
tttcttacatcatgcttgattcctacattttgttgggtctcaacattggctcacgaatgctgttaatatttattctgtattgataaaaagtctgtcttgccactacaagtaaatccccca

SEQ ID NO: 209707 - DNA, 120 bp, Artificial Sequence
  ENSG00000115504_42 (sequence is synthesized)
tttaatattttcttctttagcatagcactgtcattttttgtgaaaatggttatgtttatttattacaatactgagtcatatataaattttcaataaaagcagaaactttcttaccttaaa

SEQ ID NO: 209708 - DNA, 120 bp, Artificial Sequence
  ENSG00000115504_43 (sequence is synthesized)
aactgggaggctccccagtttgtgggtaacatctgactctccctccccaaagagagactccagcgagagactggggatttggaggtccaagtcatggcagaactgggttgcttgctagga

SEQ ID NO: 209709 - DNA, 120 bp, Artificial Sequence
  ENSG00000115504_44 (sequence is synthesized)
cacaaggttagcatgcccctgtagcagcaatgtgagaatcagaaaaggtgactgtgcatctcaagaagccgaatcaaaaagccaagccaaccacctaaccagtgattttcaagccctcca

SEQ ID NO: 209710 - DNA, 120 bp, Artificial Sequence
  ENSG00000115504_45 (sequence is synthesized)
gatgatggtggcggaggagaaaggcgggggagggggtgctgggcgctgagcggtggctctggcagggcttggtagggtgggggacggtcgcggggcgatctgtcagggagggggtgggcg

SEQ ID NO: 209711 - DNA, 120 bp, Artificial Sequence
  ENSG00000115504_46 (sequence is synthesized)
tgaaactcagaggaagccatcagaagatgaagtgcttaatgtatattaattttttgtgtggtttcatgattgctgataattccaaactgtatgtggaaatagtgcctttatttgttaaaa

SEQ ID NO: 209712 - DNA, 120 bp, Artificial Sequence
  ENSG00000115504_47 (sequence is synthesized)
tgagatgttaggttttttaagatgtcaatctccagtgcattcaaagcagagtgagaggggtgcactgttgaattagtctgcagtgtggtgataattgtcagataaaaaaaaatgaatttt

SEQ ID NO: 209713 - DNA, 120 bp, Artificial Sequence
  ENSG00000115504_48 (sequence is synthesized)
caacactgctgcagccatctccattcacaggacctgtttaggaagtagacttttagcgaggaagccttcaccacaacagccaaactccccagaaaacactagctagtggctctataatgt

SEQ ID NO: 209714 - DNA, 120 bp, Artificial Sequence
  ENSG00000115504_49 (sequence is synthesized)
acgcgcggggcctggccaatggcggcggggcggtggaggttgagctgccgtgggtagggttagtgtgagaggtgcggcgggggagccctccagaatacccatcatatagcccctgaggtg

SEQ ID NO: 209715 - DNA, 120 bp, Artificial Sequence
  ENSG00000115504_50 (sequence is synthesized)
tctgcaacaggcagctaagtgatgtgaggagcattggttaaaaaagaccataagttgttcattgtaatcatggggaggagggaagtaatttgcttgtatttctgctatgttatttttcta

SEQ ID NO: 209716 - DNA, 120 bp, Artificial Sequence
  ENSG00000115504_51 (sequence is synthesized)
cggactgtacattgtgaatacttggtgcacttactgaactgataaagataaattcatacttgtaggaccatttgatcattattcctacagagcagtgttagtgatgaggaaaagtaagat

SEQ ID NO: 209717 - DNA, 120 bp, Artificial Sequence
  ENSG00000115504_52 (sequence is synthesized)
ctgggaatataatttccacatatacatgaataatctgttttttgttaatttatattttataactgtagttgtactctaagattgtattttgtcaatggaagttaattttgttggaaatgt

SEQ ID NO: 209718 - DNA, 120 bp, Artificial Sequence
  ENSG00000115504_53 (sequence is synthesized)
ttgaatataatactgatgtctattatttattgaatacctactaagtatttcaggaacaataattttgttttacttaactccatggagactgaggccaataggcaaggtaacttgtacaag

SEQ ID NO: 209719 - DNA, 120 bp, Artificial Sequence
  ENSG00000115504_54 (sequence is synthesized)
atttccctccggttggcagcgaaggagcccaagtggcctggagccgggacattgccctctctctgcctggagatttccctccactcctcgttccccatccatttcctccctccgactgaa

SEQ ID NO: 209720 - DNA, 120 bp, Artificial Sequence
  ENSG00000115504_55 (sequence is synthesized)
aaatagcattcctcctggctccctaatttgttccaagcacatattgtcggacttgaggctattaattatcgactgaaaaacaaagtttattaaaaaatactccacttctccctctttctg

SEQ ID NO: 209721 - DNA, 120 bp, Artificial Sequence
  ENSG00000115504_56 (sequence is synthesized)
ctaacagggggaggtagggccccgagttaccgtctctctggattgttgttggtgctgactacctgatgtgtcgctccacgtcttcggtgtgaattgtaatttcttccttggtgtcttgca

SEQ ID NO: 209722 - DNA, 120 bp, Artificial Sequence
  ENSG00000115504_57 (sequence is synthesized)
tccttgatgttactggcttttgagccctccagaatacccatcatatagcccctgaggtggcatggtgatgtctccatgagggaaccccttcccactcatcctgtcacgtatatcatagtg

SEQ ID NO: 209723 - DNA, 120 bp, Artificial Sequence
  ENSG00000115504_58 (sequence is synthesized)
cacctttcacattttcaactttatatatgcattattaaggtacattggcattttggtggtaggaaaaatgttgccttaagaaaattaaatagtgatttgtagcttttagaatgtttttaa

SEQ ID NO: 209724 - DNA, 120 bp, Artificial Sequence
  ENSG00000115504_59 (sequence is synthesized)
tgaaatgatagccagtaacaaaattatttgtaagaaatgcttttattaacactgtaagtcttcaatactaaattgtatgtatgtttgtatgtatgcgtgtgtatatgtgtattatatata

SEQ ID NO: 209725 - DNA, 120 bp, Artificial Sequence
  ENSG00000115504_60 (sequence is synthesized)
taaaaaatatatatatatattctgtttggggtttaagggcaagcccatgtcttactcatctttttatctgtcagcatctagcatagtgcttatcacatagcagatactcatctaaacatg

SEQ ID NO: 209726 - DNA, 120 bp, Artificial Sequence
  ENSG00000115504_61 (sequence is synthesized)
cttatcacatagcagatactcatctaaacatgtgttggatggaaccatgaatgacctttgaaatctttaaaaataaagtatgtgggctgggtgtggtggctcatgcctgtatcccagcac

SEQ ID NO: 209727 - DNA, 71 bp, Artificial Sequence
  ENSG00000115504_62 (sequence is synthesized)
ggaggctgaggtaggcagatcacctgagatcaggagtttgtgaccagctgggcgtcatggcgggcatctgt

SEQ ID NO: 209728 - DNA, 120 bp, Artificial Sequence
  ENSG00000115504_63 (sequence is synthesized)
gcaatagttgaacatcttacagcataccaatcatttttgccattctttgtttcagaggctgaattaagggaactccttgttacttataaatagtctcttttgactccagagaatgtacag

SEQ ID NO: 209729 - DNA, 120 bp, Artificial Sequence
  ENSG00000115504_64 (sequence is synthesized)
taatataaacgtgagcacagctggtttcaaaatttaaattgtatattttaggatattataagtgttttatatttcagtgtcttcagtgtagtagtctgtactctgaggtacacacagttc

SEQ ID NO: 209730 - DNA, 120 bp, Artificial Sequence
  ENSG00000115507_0 (sequence is synthesized)
gatcaatcttcatcaggctacatttccaatcacctaaacaaccgagcaagacaagccactccgacaaggttggctgcccggcgggtctctgtgagagatccaggtagatggtgaacggcc

SEQ ID NO: 209731 - DNA, 120 bp, Artificial Sequence
  ENSG00000115507_1 (sequence is synthesized)
ccggcagctgagggcaggccaggcccccagacgcatcagaccctgaaggactgcgtggtgggagccctgcaccgctcctggccccgggccccctggatccgtcggggcgcctccacccag

SEQ ID NO: 209732 - DNA, 120 bp, Artificial Sequence
  ENSG00000115507_2 (sequence is synthesized)
ctgttagcatgatgtcttacctcaaacaacccccatacggcatgaacgggctgggcctggccgggcccgccatggacctcctgcacccatccgtgggctatccggccactccgcggaagc

SEQ ID NO: 209733 - DNA, 120 bp, Artificial Sequence
  ENSG00000115507_3 (sequence is synthesized)
agcggcgggagcgcaccaccttcacgcgttcacagctggacgtgctcgaggcgctcttcgccaagactcgctaccctgacatcttcatgcgggaggaggtggcgctcaagatcaacctgc

SEQ ID NO: 209734 - DNA, 120 bp, Artificial Sequence
  ENSG00000115507_4 (sequence is synthesized)
cggagtctagagtccaggtctggttcaagaaccgccgcgccaaatgccgccagcagcagcagagcgggagcggaaccaagagccgcccagccaagaagaagtcctctccagtgcgggaga

SEQ ID NO: 209735 - DNA, 120 bp, Artificial Sequence
  ENSG00000115507_5 (sequence is synthesized)
gctcgggctccgaaagcagtggccaattcacgccgccagctgtgtccagctctgcctcgtcctctagctcggcgtccagctcttccgccaacccagcggctgcagcggctgcgggactag

SEQ ID NO: 209736 - DNA, 120 bp, Artificial Sequence
  ENSG00000115507_6 (sequence is synthesized)
gtgggaacccggtggcggccgcgtcgtcgctgagtacaccagctgcctcatctatctggagcccggcctccatctcgccaggctcagcgcccgcgtccgtgtcggtgccggagccattgg

SEQ ID NO: 209737 - DNA, 120 bp, Artificial Sequence
  ENSG00000115507_7 (sequence is synthesized)
ccgcgcctagcaacacctcgtgtatgcagcgctccgtagctgcaggcgccgccaccgcagcagcctcttatcccatgtcctacggccagggcggcagctacggccaaggctaccctacgc

SEQ ID NO: 209738 - DNA, 120 bp, Artificial Sequence
  ENSG00000115507_8 (sequence is synthesized)
cctcctcttcctactttggcggcgtggactgcagctcatacctagcgcccatgcactcacatcaccacccgcaccagctcagccccatggcaccctcctccatggcgggccaccatcatc

SEQ ID NO: 209739 - DNA, 87 bp, Artificial Sequence
  ENSG00000115507_9 (sequence is synthesized)
aggctacggtggctctgggcttgccttcaactctgccgactgcttggattacaaggagcctggcgccgctgctgcttcctccgcctg

SEQ ID NO: 209740 - DNA, 120 bp, Artificial Sequence
  ENSG00000115507_10 (sequence is synthesized)
attacaaggagcctggcgccgctgctgcttcctccgcctggaaactcaacttcaactcccccgactgtctggactataaggaccaagcctcatggcggttccaggtcttgtgagcccagg

SEQ ID NO: 209741 - DNA, 120 bp, Artificial Sequence
  ENSG00000115507_11 (sequence is synthesized)
ccgcccgcctttgcctcgtcttctccaaaactgaattttcaccccccaaaaagatgtccattgcctgcactgccgcccccatttttgtgccacttgcttggggggatgtgcaaacccacc

SEQ ID NO: 209742 - DNA, 120 bp, Artificial Sequence
  ENSG00000115507_12 (sequence is synthesized)
ctgccccttggatggggggaccggtgcttcggcttggcctacacattctatacaggagagatgtattatttccccccttcagcccctactaaactcttaagcctccccttccagtctttc

SEQ ID NO: 209743 - DNA, 120 bp, Artificial Sequence
  ENSG00000115507_13 (sequence is synthesized)
tggacagctattaagcacttgcagccttcggaggctctgcgctctgatccgctgtttgagcccaacactttaatttattctttctggacactggagtcactaactggcgtgtttctgccc

SEQ ID NO: 209744 - DNA, 120 bp, Artificial Sequence
  ENSG00000115507_14 (sequence is synthesized)
attggagcacccgcacactactccaaatcaaaaccactaagagttcctcccgcgcagactgctgccccttcagctgccctcgattttgctccacgcctgccggccagagcctcccggcgt

SEQ ID NO: 209745 - DNA, 120 bp, Artificial Sequence
  ENSG00000115507_15 (sequence is synthesized)
ttcttccgccccagcggagtgcgctggggcgcgccagggctaggcccgccggaggagcgcgtccccagccttccgcgcacagagccgcatcccgccccgccctgcgctggactggttcaa

SEQ ID NO: 209746 - DNA, 120 bp, Artificial Sequence
  ENSG00000115507_16 (sequence is synthesized)
gcttccgcctcggcgggaacgctgtacatagtcaggtccgttccagggaccacttaaactttttagttgctgttggttggttgaactgaacatatcttgtcttagcacccaggaaacaga

SEQ ID NO: 209747 - DNA, 120 bp, Artificial Sequence
  ENSG00000115507_17 (sequence is synthesized)
tatacatatatatatacacatatataaaaaacaaaagcaaaaaatattttccctctgtccgtcccccttctgctcttcctcaatcaatggcgctttttctttttcagttgttgcaaagct

SEQ ID NO: 209748 - DNA, 120 bp, Artificial Sequence
  ENSG00000115507_18 (sequence is synthesized)
ggcgctttttctttttcagttgttgcaaagctgccctgccctcttcacatcttctccctctgtgtatttattgaagagaaccgcttggtttcaggaagctgggcgcgggatatccgaagt

SEQ ID NO: 209749 - DNA, 120 bp, Artificial Sequence
  ENSG00000115507_19 (sequence is synthesized)
gtggaggaaacagacaagtcagggtacagaggtgggggttgggcaggggcgcagggctgaccccctcacccggtctaagcacagggtcgcagttccagtttacaaacctaaaacaagaaa

SEQ ID NO: 209750 - DNA, 120 bp, Artificial Sequence
  ENSG00000115507_20 (sequence is synthesized)
accaaaaccagggaacaaaacaacaaaacaaaacaaaatccgtaaaagtacagcattagggaaaaacaaacaaacccaggccccaaacccagttccaactcctctgtcggcttctctctt

SEQ ID NO: 209751 - DNA, 120 bp, Artificial Sequence
  ENSG00000115507_21 (sequence is synthesized)
tcaacacccttgttttgtctagtgagtttttagtgcaccttcgttctccgaaatctgcggagagcccgcgcgcctgtgtatcaattttggctttggccgcttcgtccagtaggtgggaaa

SEQ ID NO: 209752 - DNA, 120 bp, Artificial Sequence
  ENSG00000115507_22 (sequence is synthesized)
gtaatttgtaaatttgatttgtctgatgtgaagatcacaaattacttgttgaaatgtaaggcagtccccctcctcctctttatctacattacttcccgaaaataaatgcaaattaatgaa

SEQ ID NO: 209753 - DNA, 120 bp, Artificial Sequence
  ENSG00000115507_23 (sequence is synthesized)
ggacgctgggctccaacgtttcagtagaagcgcttaagacttgcaaacacccttggtggggacctggaaccccgggagatgccgacgagcaagcaggttggctgcccggcgggtctctgt

SEQ ID NO: 209754 - DNA, 120 bp, Artificial Sequence
  ENSG00000115507_24 (sequence is synthesized)
ccggcagctgagggcaggtaaggagaaagccgcggggccaccccggactccgggagcgcgttggttacccttatctccccctcctcaaatggatcccggcttccccggtccccagcaggt

SEQ ID NO: 209755 - DNA, 120 bp, Artificial Sequence
  ENSG00000115507_25 (sequence is synthesized)
gctcccctcttggtgagccgaggaccccggggcgctgtcgcggcccgcagccccctcccccgcctcctccgaagtaaccaagctgaagtgctaagtttggagaaagtctttgaaaactca

SEQ ID NO: 209756 - DNA, 120 bp, Artificial Sequence
  ENSG00000115507_26 (sequence is synthesized)
cgctgcagcttcgcaaagccgtcgcagctttgagtcccattttccttcggccctagagccctggctgcttcccttccggtccccttcctacaagctggactccctcagcccaggtcttgg

SEQ ID NO: 209757 - DNA, 120 bp, Artificial Sequence
  ENSG00000115507_27 (sequence is synthesized)
gtcccagaagacgggggcgggaacggggctggggggagcttctttagctctaacttctctccttgaacgtcctagcccgagtccctggcttgcttcacagcgatcccgctaagcggggtg

SEQ ID NO: 209758 - DNA, 120 bp, Artificial Sequence
  ENSG00000115507_28 (sequence is synthesized)
atttccaatcacctaaacaaccgagcaagacaagccactccgacaaggttggctgcccggcgggtctctgtgagagatccaggtagatggtgaacggccccggcagctgagggcagcccg

SEQ ID NO: 209759 - DNA, 120 bp, Artificial Sequence
  ENSG00000115507_29 (sequence is synthesized)
agtccctggcttgcttcacagcgatcccgctaagcggggtgtagcgatggccccccagggccccaggcccagtttccagcgcccctccctgacccctgagagtggcaccccgggttcccg

SEQ ID NO: 209760 - DNA, 120 bp, Artificial Sequence
  ENSG00000115507_30 (sequence is synthesized)
tgtcctggggccgcgggttcagctacaaggatggcagcacgcgacttgctgccctccggcttcacaaatccccgagaccctttgaggtgctaggccagtcacccttcaccccctgctggg

SEQ ID NO: 209761 - DNA, 120 bp, Artificial Sequence
  ENSG00000115507_31 (sequence is synthesized)
accctgcggtccgcagcccagactgggcagagagaaggccgggtgcgcgctggcaacgaaggacgctggccgcagctgaggcgctcccgacctcaggccgcatcttggggtcgcccccct

SEQ ID NO: 209762 - DNA, 120 bp, Artificial Sequence
  ENSG00000115507_32 (sequence is synthesized)
ctcagcccgcgcggggcccccgattggcggcctagccccgttacgcactcgcctcgcgttcacatacccggggagggcagtagaaaggtgatcaatcttcatcaggctacatttccaatc

SEQ ID NO: 209763 - DNA, 120 bp, Artificial Sequence
  ENSG00000115507_33 (sequence is synthesized)
acctaaacaaccgagcaagacaagccactccgacaaggtaaatcgcttgatttatttagtttgcaaagtgactctgcaggacttcccagtccccactgcctccacgttgcaccgggagtg

SEQ ID NO: 209764 - DNA, 120 bp, Artificial Sequence
  ENSG00000115507_34 (sequence is synthesized)
ccgcggcaacgccgagccacctcccaactctgcccctcgaattcccccccttgcggcccctcggcgcgatcccaggcgaggcaatgtcctgagaacgtgtggggcttagcaaacaaagtg

SEQ ID NO: 209765 - DNA, 120 bp, Artificial Sequence
  ENSG00000115507_35 (sequence is synthesized)
tctgtgcaataaagtgaaacccagaaggacacgcacaaagccattgaaaaaaaagatagaggtgggaagaaggaagttgggaaaagaaagaaacctgggggtcctagaccagccgccagg

SEQ ID NO: 209766 - DNA, 120 bp, Artificial Sequence
  ENSG00000115507_36 (sequence is synthesized)
ggagccggctgcaacacagggcccactgtctgtttacaatacagggcccactgccggcgcatggggcagagtcgtgggcgtgtgaggtggccagggctgagaaaacgcgcaatatgcgcc

SEQ ID NO: 209767 - DNA, 120 bp, Artificial Sequence
  ENSG00000115507_37 (sequence is synthesized)
ttcccggccggatcaccggcaacctttctccggttgtggtcccaccgccagcgcagagctcatttacttgcggattcgctacccaggggcggctagtatttttcctttttccccaacatg

SEQ ID NO: 209768 - DNA, 120 bp, Artificial Sequence
  ENSG00000115507_38 (sequence is synthesized)
gaatgtgtaatctggacactcgttaggccctgacagaaagagccaaactttccttatgcgaagcggcaggctgcactgaaggagtattcttcctccctaattaaattgtcctctaaatcg

SEQ ID NO: 209769 - DNA, 120 bp, Artificial Sequence
  ENSG00000115514_0 (sequence is synthesized)
gcagccgccggcagctactgcaaggcaaaagccggagtggacgtgtcttttgaaactgctgctctttcacttctcaggcgtcaccgagagctcagcacccaggctgaactctgtaccatt

SEQ ID NO: 209770 - DNA, 120 bp, Artificial Sequence
  ENSG00000115514_1 (sequence is synthesized)
tggaagaatggaagctgatgcatctgttgacatgttttccaaagtcctggagcatcagctgcttcagactaccaaactggtggaagaacatttggattctgaaattcaaaaactggatca

SEQ ID NO: 209771 - DNA, 120 bp, Artificial Sequence
  ENSG00000115514_2 (sequence is synthesized)
gatggatgaggatgaattggaacgccttaaagaaaagagactccaggcactaaggaaagctcaacagcagaaacaagaatggctttctaaaggacatggggaatacagagaaatccctag

SEQ ID NO: 209772 - DNA, 120 bp, Artificial Sequence
  ENSG00000115514_3 (sequence is synthesized)
tgaaagagacttttttcaagaagtcaaggagagtgaaaatgtggtttgccatttctacagagactccacattcaggtgtaaaatactagacagacatctggcaatattgtccaagaaaca

SEQ ID NO: 209773 - DNA, 120 bp, Artificial Sequence
  ENSG00000115514_4 (sequence is synthesized)
cctcgagaccaaatttttgaagctgaatgtggaaaaagcacctttcctttgtgagagactgcatatcaaagtcattcccacactagcactgctaaaagatgggaaaacacaagattatgt

SEQ ID NO: 209774 - DNA, 120 bp, Artificial Sequence
  ENSG00000115514_5 (sequence is synthesized)
tgttgggtttactgacctaggaaatacagatgacttcaccacagaaactttagaatggaggctcggttcttctgacattcttaattacagtggaaatttaatggagccaccatttcagaa

SEQ ID NO: 209775 - DNA, 120 bp, Artificial Sequence
  ENSG00000115514_6 (sequence is synthesized)
cagactctgatgatgattagagctcaataattctttgtaaattgtctttttttttctgcttcagatttaaatgtgtttttaaaattctattaatgtctatacattggtcacctaaatact

SEQ ID NO: 209776 - DNA, 120 bp, Artificial Sequence
  ENSG00000115514_7 (sequence is synthesized)
catattctcgagttttatacagttgtatcacatcgaaaagtgtctttactgttttctgtgtggccatcatgtttaagttgaggaaaactcagttcttaaattatctgggaagggtctgga

SEQ ID NO: 209777 - DNA, 120 bp, Artificial Sequence
  ENSG00000115514_8 (sequence is synthesized)
ttctctatttttgagattgactttatcacaatatgattcttacatctttataccatttacaattgtgttttagatctacagagttagaaattcgaaaactattccaggactaattcttaa

SEQ ID NO: 209778 - DNA, 120 bp, Artificial Sequence
  ENSG00000115514_9 (sequence is synthesized)
tcggcattatttatacaagaggtcaagtaacatttactagcgcaatactgcacttgtaaatgaattataaacgctcttctggaatatatttaaataaccattaaagaactgcttattcat

SEQ ID NO: 209779 - DNA, 120 bp, Artificial Sequence
  ENSG00000115514_10 (sequence is synthesized)
tctggacactgcatgttgatgttgaatcaactgatgccagcagaaagctattttgatttgtgaacatactgccttatttaaagggtcctgattgcttgtattttaagacattcattaaaa

SEQ ID NO: 209780 - DNA, 120 bp, Artificial Sequence
  ENSG00000115514_11 (sequence is synthesized)
agaaaccaggaaacacttttgaaataacagcataaggaacttcactgtctctgctcaataaaatacctgtaactggaagtttatgtggaaattgtcataaaagcatacatccaacaaaaa

SEQ ID NO: 209781 - DNA, 120 bp, Artificial Sequence
  ENSG00000115514_12 (sequence is synthesized)
gatttttgtattgtaacatttattttatgaaattaaggcattttggctgagatgtggaaagtttctcaaaggaaaagcatgtttttttgaagtgtgtaatattagcgtgattttacggca

SEQ ID NO: 209782 - DNA, 120 bp, Artificial Sequence
  ENSG00000115514_13 (sequence is synthesized)
aaatcagatttacagattaaactgatttaataggtaaaactgagtctcaccgtactcctgactataaaagttttcagcttaacgtatactattgacactaattttgtattaatctggaaa

SEQ ID NO: 209783 - DNA, 120 bp, Artificial Sequence
  ENSG00000115514_14 (sequence is synthesized)
cttaaaatggcaatccagtgttgactattccccaatttaagccagattgctcaaatgaattctgacttaagtgattctctttgataaaataaaaattaaaagcagactcttgcaaagaaa

SEQ ID NO: 209784 - DNA, 120 bp, Artificial Sequence
  ENSG00000115514_15 (sequence is synthesized)
acagacaagaataaatatcttgatcactgacacatgctgtacaaataaaattaggaagtcaactctttccatcatgagtaacagaactcaatcgaatgtgacacacagaaatgtctcaaa

SEQ ID NO: 209785 - DNA, 120 bp, Artificial Sequence
  ENSG00000115514_16 (sequence is synthesized)
taggaaaaatgttaacaaaagaaaacaaaaaaaagaaaaatgttcattcaacactaacagaatggaaacgcagttcaagcgtcacggctgagcgagagcacagctgtctcatttccagtc

SEQ ID NO: 209786 - DNA, 120 bp, Artificial Sequence
  ENSG00000115514_17 (sequence is synthesized)
aaagtccggccacgacagcctgcgcactaagaaactgcaactcccacaatgctttgcggccttccagttcggccgtgtacccggaggaaagcaagggtcggacaccttgggttccgggct

SEQ ID NO: 209787 - DNA, 120 bp, Artificial Sequence
  ENSG00000115514_18 (sequence is synthesized)
gctgggcgggaggcgcacgcgcagaactgttcgccacccgaccgcccgccccttcctctggcgtccaaggtgatatcgcgcgaggttcgcagccaataaggaggcggatgtgacggcccg

SEQ ID NO: 209788 - DNA, 120 bp, Artificial Sequence
  ENSG00000115514_19 (sequence is synthesized)
tctgaaattgctataacagtatgcgcctaacaacttatatatacatgtgctgtagtagttacatttcgttctttgtgtttagggtttttaaaattcagaatacctattactgttaaaaat

SEQ ID NO: 209789 - DNA, 120 bp, Artificial Sequence
  ENSG00000115514_20 (sequence is synthesized)
ttgcccagaaaaaaatatgttttaaagacattcaaaattagcccaatctctatattaatccacagtcgagtaaaagaaagatctgcccaagatcgtttttctgagcttggatttgtttgg

SEQ ID NO: 209790 - DNA, 120 bp, Artificial Sequence
  ENSG00000115514_21 (sequence is synthesized)
atatttaggagtaagaagtttttcctcggtaatgctgttcagtttttcttcatgacttccaaatatggcaccatgtgtgcacttctgattcttgtgtaaaatactagacagacatctggc

SEQ ID NO: 209791 - DNA, 120 bp, Artificial Sequence
  ENSG00000115520_0 (sequence is synthesized)
aagaaggggcgtgtcaggctgcgcaggcggccagtccattggctggaagagaccggagccgggctccgggcccgaccagaggagggcggtgctgcagggctggtccgggaggtgacgacc

SEQ ID NO: 209792 - DNA, 120 bp, Artificial Sequence
  ENSG00000115520_1 (sequence is synthesized)
ggcttcggagagtctatcatggcagctcggactggtcatacggccttgagaagggtagtctcgggatgccgtccgaagtcggcgacagcggccggggcgcaggcgcccgtgcggaatggc

SEQ ID NO: 209793 - DNA, 120 bp, Artificial Sequence
  ENSG00000115520_2 (sequence is synthesized)
agatatttagcttcctgtggtatactgatgagcagaactcttccactacatacctcaattttgcctaaggagatatgtgcacgaactttcttcaaaatcactgcaccattaataaacaaa

SEQ ID NO: 209794 - DNA, 120 bp, Artificial Sequence
  ENSG00000115520_3 (sequence is synthesized)
aggaaagaatattcagagagaagaattttaggatattcaatgcaggaaatgtatgatgtagtatcgggagtggaggattacaagcattttgttccttggtgcaaaaaatcagatgttata

SEQ ID NO: 209795 - DNA, 120 bp, Artificial Sequence
  ENSG00000115520_4 (sequence is synthesized)
tcaaagagatctggatattgtaaaacaagattagaaattggatttccacctgtgttggagcgatatacatcagtagtaaccttggtgaaacctcatttagtaaaggcatcttgtactgat

SEQ ID NO: 209796 - DNA, 120 bp, Artificial Sequence
  ENSG00000115520_5 (sequence is synthesized)
gggagacttttcaatcatttggagactatttggcgttttagcccaggtcttcctggctacccaagaacttgtaccttggatttttcaatttcttttgaatttcgatcacttctacattcc

SEQ ID NO: 209797 - DNA, 120 bp, Artificial Sequence
  ENSG00000115520_6 (sequence is synthesized)
cagcttgccacactcttttttgatgaagttgtgaagcagatggtagctgcctttgaaagaagagcatgtaagctgtatggtccagaaacaaatatacctcgggagttaatgcttcatgaa

SEQ ID NO: 209798 - DNA, 120 bp, Artificial Sequence
  ENSG00000115520_7 (sequence is synthesized)
gtccatcacacataaaggcaaaaaagaactggtgccacctgcttctgactttagtttgttcacttttaggaagtattttcatgacatgttttcagaagccagaaagcatttgttaaacgc

SEQ ID NO: 209799 - DNA, 120 bp, Artificial Sequence
  ENSG00000115520_8 (sequence is synthesized)
agctttggttataaacctgcaccattgaaaatttgcacatagaatatagactcacttgtacatagaattatttcttcaagtataattcaaaataatatggacattatcatgttctgcatt

SEQ ID NO: 209800 - DNA, 120 bp, Artificial Sequence
  ENSG00000115520_9 (sequence is synthesized)
cttttaattatcaccttacctgaaagaggttagttaagatattcacacagtatgtattatattaaccatatcacacttaagttattaaattcagactatttgtaacttattgttataggg

SEQ ID NO: 209801 - DNA, 90 bp, Artificial Sequence
  ENSG00000115520_10 (sequence is synthesized)
gttattaaattcagactatttgtaacttattgttatagggcctgccgtatggcttaggatatttgagtaatcatatatttaaagtaaaaa

SEQ ID NO: 209802 - DNA, 81 bp, Artificial Sequence
  ENSG00000115520_11 (sequence is synthesized)
ttagccaagatcgccctgcaaaaacaaaaacaaaaactgttagtgaaggttccctgggacttttgatattttaaaaattgt

SEQ ID NO: 209803 - DNA, 120 bp, Artificial Sequence
  ENSG00000115520_12 (sequence is synthesized)
agtgaaggttccctgggacttttgatattttaaaaattgttcttatgactagtagataaattcattgccataatgaggctagctcccagataaacagtgtattttcttcttttttttttt

SEQ ID NO: 209804 - DNA, 120 bp, Artificial Sequence
  ENSG00000115520_13 (sequence is synthesized)
ttttttggtgagtggtccagagctttaagctacttttccagtagtttgccactttctccgaggtagtttggctgctctttcagtaatgctaattgtgtgtcaaattttgtctacaacagt

SEQ ID NO: 209805 - DNA, 120 bp, Artificial Sequence
  ENSG00000115520_14 (sequence is synthesized)
aggcaacagatgaagataagttggttgaatgtctccagcactatgcatccctattttctatttattgtgtacactcactttcagtaatgtgtttcaaactggtattttttaaaaaacaaa

SEQ ID NO: 209806 - DNA, 120 bp, Artificial Sequence
  ENSG00000115520_15 (sequence is synthesized)
tcaatgtaaggactgaagttgaagtagcaatgtaataaagttaatttgtttattttttgtacagttagtttggttattgaaatcttcctatattgtttaaatgtgtatttgcatagacat

SEQ ID NO: 209807 - DNA, 120 bp, Artificial Sequence
  ENSG00000115520_16 (sequence is synthesized)
agtaaagtgttacagcatttcatgtcttaaaaatatctatgaagatatctaaaatatctatttctatgaagaaacagactttaacaaatataagcaaaattcagttttcttttaaccagt

SEQ ID NO: 209808 - DNA, 120 bp, Artificial Sequence
  ENSG00000115520_17 (sequence is synthesized)
gtgcatttccgtgtctttagaggagaaggcttttttttgcgtttggcatctgagggactcaagagcggcgcgcatcaccttgggcccaaggctgtgttcgtggctcgtttgcctcgtgag

SEQ ID NO: 209809 - DNA, 120 bp, Artificial Sequence
  ENSG00000115520_18 (sequence is synthesized)
aggcggtgaatcatcggcgaagcgactttggaagcaatttggccattggtgcctttgggctcttccggtctcctcccctatggcttgttgctactgctgttggaaagttttaactttgcg

SEQ ID NO: 209810 - DNA, 120 bp, Artificial Sequence
  ENSG00000115520_19 (sequence is synthesized)
tctacctgccagatggtcagatgcgttttcccaatttctgaaagagtgctttgccctcgccatttagtgtttacaaaactaaatacagccagcataagggacttggattttttcactctg

SEQ ID NO: 209811 - DNA, 120 bp, Artificial Sequence
  ENSG00000115520_20 (sequence is synthesized)
ctgtaacttacaggtcctgtaaccttgaagcatagtcagctttcgattttcctgatatttagcttcctgtggtatactgatgagcagaactcttccactacatacctcaattttgcctaa

SEQ ID NO: 209812 - DNA, 120 bp, Artificial Sequence
  ENSG00000115523_0 (sequence is synthesized)
gtatctgtggtaaacccagtgacacgggggagatgacatacaaaaagggcaggacctgagaaagattaagctgcaggctccctgcccataaaacagggtgtgaaaggcatctcagcggct

SEQ ID NO: 209813 - DNA, 120 bp, Artificial Sequence
  ENSG00000115523_1 (sequence is synthesized)
gccccaccatggctacctgggccctcctgctccttgcagccatgctcctgggcaacccaggtctggtcttctctcgtctgagccctgagtactacgacctggcaagagcccacctgcgtg

SEQ ID NO: 209814 - DNA, 120 bp, Artificial Sequence
  ENSG00000115523_2 (sequence is synthesized)
atgaggagaaatcctgcccgtgcctggcccaggagggcccccagggtgacctgttgaccaaaacacaggagctgggccgtgactacaggacctgtctgacgatagtccaaaaactgaaga

SEQ ID NO: 209815 - DNA, 120 bp, Artificial Sequence
  ENSG00000115523_3 (sequence is synthesized)
tggataagcccacccagagaagtgtttccaatgctgcgacccgggtgtgtaggacggggaggtcacgatggcgcgacgtctgcagaaatttcatgaggaggtatcagtctagagttaccc

SEQ ID NO: 209816 - DNA, 120 bp, Artificial Sequence
  ENSG00000115523_4 (sequence is synthesized)
agggcctcgtggccggagaaactgcccagcagatctgtgaggacctcaggttgtgtataccttctacaggtcccctctgagccctctcaccttgtcctgtggaagaagcacaggctcctg

SEQ ID NO: 209817 - DNA, 120 bp, Artificial Sequence
  ENSG00000115523_5 (sequence is synthesized)
tcctcagatcccgggaacctcagcaacctctgccggctcctcgcttcctcgatccagaatccactctccagtctccctcccctgactccctctgctgtcctcccctctcacgagaataaa

SEQ ID NO: 209818 - DNA, 120 bp, Artificial Sequence
  ENSG00000115523_6 (sequence is synthesized)
gtgtcaagcaagattttagccgcagctgcttcttctttggtggatttgaggggtgggtgtcagtggcatgctggggtgagctgtgtagtccttcaataaatgtctgtcgtgtgtcccata

SEQ ID NO: 209819 - DNA, 120 bp, Artificial Sequence
  ENSG00000115523_7 (sequence is synthesized)
cctgggccctcctgctccttgcagccatgctcctgggcaacccagcccctgcctccgcatctgcgtggtgaaggccattggccctcatcggtggatctgcgtttcctcgggcctacactg

SEQ ID NO: 209820 - DNA, 120 bp, Artificial Sequence
  ENSG00000115523_8 (sequence is synthesized)
tctaggattgtgcggggctggtgagagaacaagatctcttctgtgttcaaggcagacttcctgccccctgcaccctgctctctcccaggccttgaggtcagtgtgagccccaagggcaag

SEQ ID NO: 209821 - DNA, 120 bp, Artificial Sequence
  ENSG00000115523_9 (sequence is synthesized)
aagctgcaggctccctgcccataaaacagggtgtgaaaggcatctcagcggctgccccaccatggctacctgggccctcctgctccttgcagccatgctcctgggcaacccaggccttga

SEQ ID NO: 209822 - DNA, 120 bp, Artificial Sequence
  ENSG00000115523_10 (sequence is synthesized)
gagcctcctgtctgctgctcaatggaggggccagcctgtgaccaggtcggggatcggggagcccgggggcaccttgcacagtgatcctgggggagggcttcctagaagggaatctgtgag

SEQ ID NO: 209823 - DNA, 120 bp, Artificial Sequence
  ENSG00000115523_11 (sequence is synthesized)
tccccgtgtgtctgtggatgaatttcagagaacttgtgaaattgtgactctctggaactgtgtaagtcagacggcagagtatacatggttttcatcatgtatcctcaaagagggcttgtc

SEQ ID NO: 209824 - DNA, 120 bp, Artificial Sequence
  ENSG00000115523_12 (sequence is synthesized)
ccagagaagttaggaatcttcccctaaagccctaacatttgtgtccaaggcagagtttgagaagctagttccccaagaggcctgggtcaggactgataaatcccagatctgctacttcca

SEQ ID NO: 209825 - DNA, 120 bp, Artificial Sequence
  ENSG00000115523_13 (sequence is synthesized)
gcaacccaggtaaggccttcccctcgggatcgatcctgatggcccacccagcctcgcactctcaggctggctgaacctggagcttggactctgtgggcacccaggtgcccctgcctcccc

SEQ ID NO: 209826 - DNA, 120 bp, Artificial Sequence
  ENSG00000115523_14 (sequence is synthesized)
ccggccttctcccccgtcatggaggcctggcctcccctcagagccaggcttagtccagtgtgctgcccagcctgtcactggcctggccaaggaggagagacaggccagggattctggtcc

SEQ ID NO: 209827 - DNA, 120 bp, Artificial Sequence
  ENSG00000115523_15 (sequence is synthesized)
tgtgttgctgggggaacagaggagaagagagagtctcgccctcctggctttctagaaggaacgtgagaacacgtgtttgtgctgagagtgggtcagagcggctccagggcaaagcatgtg

SEQ ID NO: 209828 - DNA, 120 bp, Artificial Sequence
  ENSG00000115523_16 (sequence is synthesized)
gacaggtatcctggccccctgcaaggcccagctcctgtcctaggccctggtcacctcctggactcccaccagccaggagaacgggctttccctctccttccgcctgcggaggggaagctg

SEQ ID NO: 209829 - DNA, 120 bp, Artificial Sequence
  ENSG00000115523_17 (sequence is synthesized)
atacccagattcatcctcctcccctgggatggcatagaagagactttaaaaccaaatgagccaagactccaagctctgaccacacctcccaccccaccagtcttctctatgcaccccctc

SEQ ID NO: 209830 - DNA, 120 bp, Artificial Sequence
  ENSG00000115523_18 (sequence is synthesized)
tatctggagcccccagccaggtcctggacccaggtagctacatggcagagcatttaatgtgtgcctggcagccatgggcaccattctccacacagaaggcaggggacaggtgcacaaggc

SEQ ID NO: 209831 - DNA, 120 bp, Artificial Sequence
  ENSG00000115523_19 (sequence is synthesized)
gctgagaccccagcagggctaactgtccttgtctcaggagccctacctggccagtcttgggccaggccttggggactgggagtaggggctgagccccgtctgtacagtctctggccccat

SEQ ID NO: 209832 - DNA, 120 bp, Artificial Sequence
  ENSG00000115523_20 (sequence is synthesized)
gggcaccaggtgccagctcctcgcacccagtactcccattgctagggctgctggaacctgcagggtggcagagctgggcaggactcaccctataaccatgtccactgtggtgctgctgct

SEQ ID NO: 209833 - DNA, 70 bp, Artificial Sequence
  ENSG00000115523_21 (sequence is synthesized)
cccaagcaattctcctgtctaagcctcctgagtacctggggctccaggtgtgcgccaccatgcccagcta

SEQ ID NO: 209834 - DNA, 120 bp, Artificial Sequence
  ENSG00000115524_0 (sequence is synthesized)
agtgcagcccccagctatttttctccgtggcggcggcgacgagcggaagttcttgggagcgccagttccgtctgtgtgttcgagtggacaaaatggcgaagatcgccaagactcacgaag

SEQ ID NO: 209835 - DNA, 120 bp, Artificial Sequence
  ENSG00000115524_1 (sequence is synthesized)
atattgaagcacagattcgagaaattcaaggcaagaaggcagctcttgatgaagctcaaggagtgggcctcgattctacaggttattatgaccaggaaatttatggtggaagtgacagca

SEQ ID NO: 209836 - DNA, 120 bp, Artificial Sequence
  ENSG00000115524_2 (sequence is synthesized)
gatttgctggatacgtgacatcaattgctgcaactgaacttgaagatgatgacgatgactattcatcatctacgagtttgcttggtcagaagaagccaggatatcatgcccctgtggcat

SEQ ID NO: 209837 - DNA, 120 bp, Artificial Sequence
  ENSG00000115524_3 (sequence is synthesized)
tgcttaatgatataccacagtcaacagaacagtatgatccatttgctgagcacagacctccaaagattgcagaccgggaagatgaatacaaaaagcataggcggaccatgataatttccc

SEQ ID NO: 209838 - DNA, 120 bp, Artificial Sequence
  ENSG00000115524_4 (sequence is synthesized)
cagagcgtcttgatccttttgcagatggagggaaaacccctgatcctaaaatgaatgctaggacttacatggatgtaatgcgagaacaacacttgactaaagaagaacgagaaattaggc

SEQ ID NO: 209839 - DNA, 120 bp, Artificial Sequence
  ENSG00000115524_5 (sequence is synthesized)
aacagctagcagaaaaagctaaagctggagaactaaaagtcgtcaatggagcagcagcgtcccagcctccatcaaaacgaaaacggcgttgggatcaaacagctgatcagactcctggtg

SEQ ID NO: 209840 - DNA, 120 bp, Artificial Sequence
  ENSG00000115524_6 (sequence is synthesized)
ccactcccaaaaaactatcaagttgggatcaggcagagacccctgggcatactccttccttaagatgggatgagacaccaggtcgtgcaaagggaagcgagactcctggagcaaccccag

SEQ ID NO: 209841 - DNA, 120 bp, Artificial Sequence
  ENSG00000115524_7 (sequence is synthesized)
gctcaaaaatatgggatcctacacctagccacacaccagcgggagctgctactcctggacgaggtgatacaccaggccatgcgacaccaggccatggaggcgcaacttccagtgctcgta

SEQ ID NO: 209842 - DNA, 120 bp, Artificial Sequence
  ENSG00000115524_8 (sequence is synthesized)
aaaacagatgggatgaaacccccaaaacagagagagatactcctgggcatggaagtggatgggctgagactcctcgaacagatcgaggtggagattctattggtgaaacaccgactcctg

SEQ ID NO: 209843 - DNA, 120 bp, Artificial Sequence
  ENSG00000115524_9 (sequence is synthesized)
gagccagtaaaagaaaatcacggtgggatgaaacaccagctagtcagatgggtggaagcactccagttctgacccctggaaagacaccaattggcacaccagccatgaacatggctaccc

SEQ ID NO: 209844 - DNA, 120 bp, Artificial Sequence
  ENSG00000115524_10 (sequence is synthesized)
ctactccaggtcacataatgagtatgactcctgaacagcttcaggcttggcggtgggaaagagaaattgatgagagaaatcgcccactttctgatgaggaattagatgctatgttcccag

SEQ ID NO: 209845 - DNA, 120 bp, Artificial Sequence
  ENSG00000115524_11 (sequence is synthesized)
aaggatataaggtacttcctcctccagctggttatgttcctattcgaactccagctcgaaagctgacagctactccaacacctttgggtggtatgactggtttccacatgcaaactgaag

SEQ ID NO: 209846 - DNA, 120 bp, Artificial Sequence
  ENSG00000115524_12 (sequence is synthesized)
atcgaactatgaaaagtgttaatgaccagccatctggaaatcttccatttttaaaacctgatgatattcaatactttgataaactattggttgatgttgatgaatcaacacttagtccag

SEQ ID NO: 209847 - DNA, 120 bp, Artificial Sequence
  ENSG00000115524_13 (sequence is synthesized)
aagagcaaaaagagagaaaaataatgaagttgcttttaaaaattaagaatggaacaccaccaatgagaaaggctgcattgcgtcagattactgataaagctcgtgaatttggagctggtc

SEQ ID NO: 209848 - DNA, 120 bp, Artificial Sequence
  ENSG00000115524_14 (sequence is synthesized)
ctttgtttaatcagattcttcctctgctgatgtctcctacacttgaggatcaagagcgtcatttacttgtgaaagttattgataggatactgtacaaacttgatgacttagttcgtccat

SEQ ID NO: 209849 - DNA, 120 bp, Artificial Sequence
  ENSG00000115524_15 (sequence is synthesized)
atgtgcataagatcctcgtggtcattgaaccgctattgattgatgaagattactatgctagagtggaaggccgagagatcatttctaatttggcaaaggctgctggtctggctactatga

SEQ ID NO: 209850 - DNA, 120 bp, Artificial Sequence
  ENSG00000115524_16 (sequence is synthesized)
tctctaccatgagacctgatatagataacatggatgagtatgtccgtaacacaacagctagagcttttgctgttgtagcctctgccctgggcattccttctttattgcccttcttaaaag

SEQ ID NO: 209851 - DNA, 120 bp, Artificial Sequence
  ENSG00000115524_17 (sequence is synthesized)
ctgtgtgcaaaagcaagaagtcctggcaagcgagacacactggtattaagattgtacaacagatagctattcttatgggctgtgccatcttgccacatcttagaagtttagttgaaatca

SEQ ID NO: 209852 - DNA, 120 bp, Artificial Sequence
  ENSG00000115524_18 (sequence is synthesized)
ttgaacatggtcttgtggatgagcagcagaaagttcggaccatcagtgctttggccattgctgccttggctgaagcagcaactccttatggtatcgaatcttttgattctgtgttaaagc

SEQ ID NO: 209853 - DNA, 120 bp, Artificial Sequence
  ENSG00000115524_19 (sequence is synthesized)
ctttatggaagggtatccgccaacacagaggaaagggtttggctgctttcttgaaggctattgggtatcttattcctcttatggatgcagaatatgccaactactatactagagaagtga

SEQ ID NO: 209854 - DNA, 120 bp, Artificial Sequence
  ENSG00000115524_20 (sequence is synthesized)
tgttaatccttattcgagaattccagtctcctgatgaggaaatgaaaaaaattgtgctgaaggtggtaaaacagtgttgtgggacagatggtgtagaagcaaactacattaaaacagaga

SEQ ID NO: 209855 - DNA, 120 bp, Artificial Sequence
  ENSG00000115524_21 (sequence is synthesized)
ttcttcctcccttttttaaacacttctggcagcacaggatggctttggatagaagaaattaccgacagttagttgatactactgtggagttggcaaacaaagtaggtgcagcagaaatta

SEQ ID NO: 209856 - DNA, 120 bp, Artificial Sequence
  ENSG00000115524_22 (sequence is synthesized)
tatccaggattgtggatgatctgaaagatgaagccgaacagtacagaaaaatggtgatggagacaattgagaaaattatgggtaatttgggagcagcagatattgatcataaacttgaag

SEQ ID NO: 209857 - DNA, 120 bp, Artificial Sequence
  ENSG00000115524_23 (sequence is synthesized)
aacaactgattgatggtattctttatgctttccaagaacagactacagaggactcagtaatgttgaacggctttggcacagtggttaatgctcttggcaaacgagtcaaaccatacttgc

SEQ ID NO: 209858 - DNA, 120 bp, Artificial Sequence
  ENSG00000115524_24 (sequence is synthesized)
ctcagatctgtggtacagttttgtggcgtttaaataacaaatctgctaaagttaggcaacaggcagctgacttgatttctcgaactgctgttgtcatgaagacttgtcaagaggaaaaat

SEQ ID NO: 209859 - DNA, 120 bp, Artificial Sequence
  ENSG00000115524_25 (sequence is synthesized)
tgatgggacacttgggtgttgtattgtatgagtatttgggtgaagagtaccctgaagtattgggcagcattcttggagcactgaaggccattgtaaatgtcataggtatgcataagatga

SEQ ID NO: 209860 - DNA, 120 bp, Artificial Sequence
  ENSG00000115524_26 (sequence is synthesized)
ctccaccaattaaagatctgctgcctagactcacccccatcttaaagaacagacatgaaaaagtacaagagaattgtattgatcttgttggtcgtattgctgacaggggagctgaatatg

SEQ ID NO: 209861 - DNA, 120 bp, Artificial Sequence
  ENSG00000115524_27 (sequence is synthesized)
cttaaaagcccacaaaaaggctattcgtagagccacagtcaacacatttggttatattgcaaaggccattggccctcatgatgtattggctacacttctgaacaacctcaaagttcaaga

SEQ ID NO: 209862 - DNA, 120 bp, Artificial Sequence
  ENSG00000115524_28 (sequence is synthesized)
aaggcagaacagagtttgtaccactgtagcaatagctattgttgcagaaacatgttcaccctttacagtactccctgccttaatgaatgaatacagagttcctgaactgaatgttcaaaa

SEQ ID NO: 209863 - DNA, 120 bp, Artificial Sequence
  ENSG00000115524_29 (sequence is synthesized)
tggagtgttaaaatcgctttccttcttgtttgaatatattggtgaaatgggaaaagactacatttatgccgtaacaccgttacttgaagatgctttaatggatagagaccttgtacacag

SEQ ID NO: 209864 - DNA, 120 bp, Artificial Sequence
  ENSG00000115524_30 (sequence is synthesized)
acagacggctagtgcagtggtacagcacatgtcacttggggtttatggatttggttgtgaagattcgctgaatcacttgttgaactatgtatggcccaatgtatttgagacatctcctca

SEQ ID NO: 209865 - DNA, 120 bp, Artificial Sequence
  ENSG00000115524_31 (sequence is synthesized)
tgtaattcaggcagttatgggagccctagagggcctgagagttgctattggaccatgtagaatgttgcaatattgtttacagggtctgtttcacccagcccggaaagtcagagatgtata

SEQ ID NO: 209866 - DNA, 120 bp, Artificial Sequence
  ENSG00000115524_32 (sequence is synthesized)
ttggaaaatttacaactccatctacattggttcccaggacgctctcatagcacattacccaagaatctacaacgatgataagaacacctatattcgttatgaacttgactatatcttata

SEQ ID NO: 209867 - DNA, 120 bp, Artificial Sequence
  ENSG00000115524_33 (sequence is synthesized)
attttattgtttattttgtgtttaatgcacagctacttcacaccttaaacttgctttgatttggtgatgtaaacttttaaacattgcagatcagtgtagaactggtcatagaggaagagc

SEQ ID NO: 209868 - DNA, 120 bp, Artificial Sequence
  ENSG00000115524_34 (sequence is synthesized)
tagaaatccagtagcatgatttttaaataacctgtctttgtttttgatgttaaacagtaaatgccagtagtgaccaagaacacagtgattatatacactatactggagggatttcatttt

SEQ ID NO: 209869 - DNA, 120 bp, Artificial Sequence
  ENSG00000115524_35 (sequence is synthesized)
taattcatctttatgaagatttagaactcattccttgtgtttaaagggaatgtttaattgagaaataaacatttgtgtacaaaatgctaatttgtgtgtgttttttgaacatgacttgta

SEQ ID NO: 209870 - DNA, 120 bp, Artificial Sequence
  ENSG00000115524_36 (sequence is synthesized)
aaatgcggaactttgataaagtattggtttatgtggaataagtggcttaatttcattttctgtcacatggtttatagaaagtagttagctgaataaaaactatataaagtgatggcatct

SEQ ID NO: 209871 - DNA, 120 bp, Artificial Sequence
  ENSG00000115524_37 (sequence is synthesized)
ttgtcaaaattccattgttgtgttaataatgacagcaagaagagtagcctcaggggatgttcccctcaaactagcacaaccattccatcatcgtagaaaagtagcacttttgctaaactg

SEQ ID NO: 209872 - DNA, 120 bp, Artificial Sequence
  ENSG00000115524_38 (sequence is synthesized)
tcttgaatattttgtacttacatagcgcctttcatctcttgatttctcaaaatgctttatgaacacatttaaagaaagtggtttaagtcttgtccaacacttgacaggtctgctgtgttt

SEQ ID NO: 209873 - DNA, 120 bp, Artificial Sequence
  ENSG00000115524_39 (sequence is synthesized)
agcaagtgaggaatttaactttacttcaaaactgctttctgcctattaggagtgaggatacctaagtaatgctgatagaacaggacaatgttgggcttttctccatgttataagccacta

SEQ ID NO: 209874 - DNA, 120 bp, Artificial Sequence
  ENSG00000115524_40 (sequence is synthesized)
ctcagcaatgcatcagtaaatacctattcacccactgtatgccagccactgtgcttatatgcaggggatgcaaaggtgcatgagacctgccctctacctttaagaacagtataatggaga

SEQ ID NO: 209875 - DNA, 120 bp, Artificial Sequence
  ENSG00000115524_41 (sequence is synthesized)
aggggagacaaaccttgtgacagattccttatgtactgtgataatacacagtggcagcagctaaaatgtctaggtttgcttagctttgtattcagtaataataagttgatctaagagttc

SEQ ID NO: 209876 - DNA, 120 bp, Artificial Sequence
  ENSG00000115524_42 (sequence is synthesized)
agcataaactgaatgaaatgccatttaatggtagaggaaccaagcattaaggcagtactacacttaattttttaagcaaatatgtaaagtatattttcaaacttttctaatgttatggcc

SEQ ID NO: 209877 - DNA, 120 bp, Artificial Sequence
  ENSG00000115524_43 (sequence is synthesized)
ccaaatttcttagttttggcctttttactacctatactatttttactgttttgttttgtctccatgtggtagtacttctgtgaactctaaagggaaaaaaaattctgcaagcagcattag

SEQ ID NO: 209878 - DNA, 120 bp, Artificial Sequence
  ENSG00000115524_44 (sequence is synthesized)
ctgcaagcagcattagtatataactactactgtaagtaaaactgcctattgacactttaggagttcctgcttcagaagcttagttaagaaacagcttgtggccgggtgtggtggctcatg

SEQ ID NO: 209879 - DNA, 120 bp, Artificial Sequence
  ENSG00000115524_45 (sequence is synthesized)
aaaaaaaaaaaaattgactttcaacaaattgatagtgagcattaagggtttccaagttggatttgtaactcctcatcattccttgtatgacaactttctgaatatatgtcactatgtagt

SEQ ID NO: 209880 - DNA, 120 bp, Artificial Sequence
  ENSG00000115524_46 (sequence is synthesized)
aaaattaaacactccaaactcatctttctgttgttagaagttttcagcggtacttccatgcaactttaaatctcactgctctctatggttgatgtcaaatgaccttcagtaatgactgag

SEQ ID NO: 209881 - DNA, 120 bp, Artificial Sequence
  ENSG00000115524_47 (sequence is synthesized)
aattgaatacaaatagattacaaagccaaaatttgatgttaaatgactcaggaaattttagttgtattttcaattcaagtacttagtagcctacgtttgcttggcctctggttctttatg

SEQ ID NO: 209882 - DNA, 120 bp, Artificial Sequence
  ENSG00000115524_48 (sequence is synthesized)
gaaaataggctttgtagtggcattgtggagcaaaggagactgttacaccttaattaactttttttactgatgcaaataatttgaggatagagaggagggaagtagtgaaagctatgacct

SEQ ID NO: 209883 - DNA, 120 bp, Artificial Sequence
  ENSG00000115524_49 (sequence is synthesized)
aaaacattgggaccaaatagaggctcacagatatttggattattttatgtgcttattattaaataaggaaagcattttgtgatatgtggaagacgctatgtgaagttttacctatcttct

SEQ ID NO: 209884 - DNA, 120 bp, Artificial Sequence
  ENSG00000115524_50 (sequence is synthesized)
caaagaccttttcttttgtattttcttttggtgtttcttaaagccaaacaaagaaatgttcttaaggagacagggtgggtttttctgtgggcctttgttggtttttctgtgggccatcgc

SEQ ID NO: 209885 - DNA, 120 bp, Artificial Sequence
  ENSG00000115524_51 (sequence is synthesized)
cctctaatggaattgatctctggctgtttgatttttttcatattgtatttttaaaatttgttgtacagtgccctgtgagcaccaagtaccactagatgaataaaacgtattatatctaaa

SEQ ID NO: 209886 - DNA, 120 bp, Artificial Sequence
  ENSG00000115524_52 (sequence is synthesized)
atacataatcaaaaattgttaataaaagttaaaaacgattctgagtctggtcagaatctggggctttctctttccctaggcagctgtaagtttatatttatacatagtcatatatgacat

SEQ ID NO: 209887 - DNA, 120 bp, Artificial Sequence
  ENSG00000115524_53 (sequence is synthesized)
ggtgcagttcaacacatcctctctagattatggtgaaaaagtattccaaaggaagtcttatcagagctagtgtcagaaagaatgacactaccaattgggcatgatcttcagcataggaaa

SEQ ID NO: 209888 - DNA, 120 bp, Artificial Sequence
  ENSG00000115524_54 (sequence is synthesized)
tgtcttagaattttattattttttcctaaattgtgatgctatactacttgtatagctagttaccacatttctaaagcatagtgtgcctctgtgaatcttgttatatactgtttgggcttc

SEQ ID NO: 209889 - DNA, 120 bp, Artificial Sequence
  ENSG00000115524_55 (sequence is synthesized)
tgtaagatattttgaagtttgaaaagcaaatactgaaactttaaccaagagactgacacatctctttgtacaccacgttgcttctgtgtgcatcataataactggtagaagtaatatatt

SEQ ID NO: 209890 - DNA, 120 bp, Artificial Sequence
  ENSG00000115524_56 (sequence is synthesized)
taaagtaatatgtttccagttttaatttatgctttctaagaaataaaaatatgttttctgggtcaacaaaacttaaagcatgaagccctttttagtaacgtgacatcagaataagattat

SEQ ID NO: 209891 - DNA, 120 bp, Artificial Sequence
  ENSG00000115524_57 (sequence is synthesized)
aggtatatttttaaaatcagattttctaaactacaattgttttagaacactgtatgaagaacttatctagtcatagttatttgtagtcaggattttaacagcttgcaacaggtaatgttt

SEQ ID NO: 209892 - DNA, 120 bp, Artificial Sequence
  ENSG00000115524_58 (sequence is synthesized)
tgaatataaatatctttccaaagtgttactaatggtaaagagataattttctaggcttctattctgctgcttgaagtcagaactgctgatggagacaaaggcacgaaagtgagggaaaac

SEQ ID NO: 209893 - DNA, 120 bp, Artificial Sequence
  ENSG00000115524_59 (sequence is synthesized)
tgccatttttgcaaaattgagctctttcggttgttttcgaaataagggaacttagtgttgaaaaaccagagaactttttctttaataagaaactaaaaaagttgcagccacataggttca

SEQ ID NO: 209894 - DNA, 120 bp, Artificial Sequence
  ENSG00000115524_60 (sequence is synthesized)
gtttggctctttggtttccagtggctctcaaatcccctaaggttaaaagaaaacactacagctaccctagggtttctcaaccttggcattattgacatcttgaatcaaataattcattat

SEQ ID NO: 209895 - DNA, 120 bp, Artificial Sequence
  ENSG00000115524_61 (sequence is synthesized)
tgtgggggtgctgtcctgtgccttgcagaatcttgagcagtgttcctgacctctacctattgagatgccagcagcacacccccatcccagtgtaataaccaaaaatgcctccagacattg

SEQ ID NO: 209896 - DNA, 120 bp, Artificial Sequence
  ENSG00000115524_62 (sequence is synthesized)
tctcatgtcccttggagagcaaaatctccctagggtgagaaccactgagaccattgtttaagcaggacttacatgtttaataaaattaaagcatgatatataaagcatttgattttaggc

SEQ ID NO: 209897 - DNA, 120 bp, Artificial Sequence
  ENSG00000115524_63 (sequence is synthesized)
agcagttgtctaggaagtaactagaaatacaacttagcaaatacttaaatgtctaccttggggtaaagctccgcataagtcctggggagagtaagctgtgaaaatgtgtaagatgacccc

SEQ ID NO: 209898 - DNA, 120 bp, Artificial Sequence
  ENSG00000115524_64 (sequence is synthesized)
gcactgatcctcagagcatcttgtgacagttgggagccatgttggcagctcgggcaggagtgctggaggtggcttggtgctccacttgggatgctggtcttcaagcattgtgttctcacc

SEQ ID NO: 209899 - DNA, 120 bp, Artificial Sequence
  ENSG00000115524_65 (sequence is synthesized)
tgtgagctggcgataggtgggttatatggtacggctggaagaggagggcaggcagggcacagaaaccccttcctccccttttaaaaaatttggataggaagccatggagggaatttaatg

SEQ ID NO: 209900 - DNA, 120 bp, Artificial Sequence
  ENSG00000115524_66 (sequence is synthesized)
tgacttgatagagaatttaggtttgcaaggcagtcaagatttgtaggcaggagggaataagtaagtaaaccagagtgagtgtagtcagtgacatctctagtgttcttgctagaataacta

SEQ ID NO: 209901 - DNA, 120 bp, Artificial Sequence
  ENSG00000115524_67 (sequence is synthesized)
agttttaaaatttattttgtggattctaaaaagattttgaaaggacatgcttgggccttggacagttacttttttatagcctggctgattaatgaagttctggaaggaaattttaacatg

SEQ ID NO: 209902 - DNA, 120 bp, Artificial Sequence
  ENSG00000115524_68 (sequence is synthesized)
ttagctgagaggctggcgaggggatttaatctaaataggtttgtgctaggaaaaaacttgtaaatagaagaaattgtttctataactgcccaaactttgaaaaaagttgaaagactatta

SEQ ID NO: 209903 - DNA, 120 bp, Artificial Sequence
  ENSG00000115524_69 (sequence is synthesized)
gaaatgttagatgacttcacatctattcagtgcactgaattagtaatttagtttctaatgggccggtgaatatttcctgtaaaactaagactgtatctttaaggatttttccccctttct

SEQ ID NO: 209904 - DNA, 120 bp, Artificial Sequence
  ENSG00000115524_70 (sequence is synthesized)
ctgtgctgtcattttgtttttatatgcattaaaatatttgttttaaactgctgtagatgtttgtgttcaaacaggttaaattgatcagcaaactcaataaaaagtaagatgtataattat

SEQ ID NO: 209905 - DNA, 120 bp, Artificial Sequence
  ENSG00000115524_71 (sequence is synthesized)
taaagttttccatcaaaaaataatttaaatgattatggaataacataatatttagagcagggcagataaatcagttgaacctgcttattttttatttattgtactctttttcctgttgct

SEQ ID NO: 209906 - DNA, 120 bp, Artificial Sequence
  ENSG00000115524_72 (sequence is synthesized)
ctgttaaaaaatttttttctgttatggactgtattagtctgcttgggttgccatagcaagataccacagactgggtgccttaaacaacagacattgatttttttcgcagttctggaggct

SEQ ID NO: 209907 - DNA, 120 bp, Artificial Sequence
  ENSG00000115524_73 (sequence is synthesized)
atccttttgcagatggtaattctttcccacttttctataagtattcagaaatttatttgtattaagttgtctttagccctttgattttttttggcatgcttctgaatttgcttttctttt

SEQ ID NO: 209908 - DNA, 120 bp, Artificial Sequence
  ENSG00000115524_74 (sequence is synthesized)
taaaaatcccccttactatagatttgtatagatgtggttgaagtcacagatgccatattcttcatctttataatgcaagttttctttccaggtagaaggacaagaaaaaaatgagccaat

SEQ ID NO: 209909 - DNA, 120 bp, Artificial Sequence
  ENSG00000115524_75 (sequence is synthesized)
gccatagaaacgcaaagggttaaaggttttacttttacttttgttttgggtacgctttctatacttggatcaaatgtatttttctgctcaaaatactttcaaattattgaaagttttcat

SEQ ID NO: 209910 - DNA, 120 bp, Artificial Sequence
  ENSG00000115524_76 (sequence is synthesized)
tccaaatcctagatttttaggattgttacccttgagaaactgtttctcacactagagctccccccatagtgctctaaatatagcttagtaaaggcacctactttgctctaagcatactta

SEQ ID NO: 209911 - DNA, 120 bp, Artificial Sequence
  ENSG00000115524_77 (sequence is synthesized)
aaggggcatagtgagcctgatggaagctttcctcaggtgagtgagtttcacaatcaaaattaggtgcctgtttcttaaaattagattctgctgcaggtttacatactagacttttcagcc

SEQ ID NO: 209912 - DNA, 120 bp, Artificial Sequence
  ENSG00000115524_78 (sequence is synthesized)
tgcatgaattagtagggatattctttttttacttgcataattgtaattgatttaaacatgtatgccagaattcacaggcccatactaactgtccttaatttctttcctacagcagtactg

SEQ ID NO: 209913 - DNA, 120 bp, Artificial Sequence
  ENSG00000115524_79 (sequence is synthesized)
tgggactagaggtcttgtggatgagcagcagaaagttcggaccatcagtgctttggccattgctgccttggctgaagcagcaactccttatggtatcgaatcttttgattctgtgttaaa

SEQ ID NO: 209914 - DNA, 120 bp, Artificial Sequence
  ENSG00000115524_80 (sequence is synthesized)
taggaatattctattttagaacttgatagttttgagtataactgtttgagaataaagaatattattttaacagtgattaaaattgtggttttactcactctttctttttaaagatactcc

SEQ ID NO: 209915 - DNA, 80 bp, Artificial Sequence
  ENSG00000115525_0 (sequence is synthesized)
gcgcggggtaccgggctggcggccggccggcgccccctcattagtatgcggacgaaggcggcgggctgcgcggagcggcg

SEQ ID NO: 209916 - DNA, 120 bp, Artificial Sequence
  ENSG00000115525_1 (sequence is synthesized)
tcccctgcagccgcggaccgaggcagcggcggcacctgccggccgagcaatgccaagtgagtacacctatgtgaaactgagaagtgattgctcgaggccttccctgcaatggtacacccg

SEQ ID NO: 209917 - DNA, 120 bp, Artificial Sequence
  ENSG00000115525_2 (sequence is synthesized)
agctcaaagcaagatgagaaggcccagcttgttattaaaagacatcctcaaatgtacattgcttgtgtttggagtgtggatcctttatatcctcaagttaaattatactactgaagaatg

SEQ ID NO: 209918 - DNA, 120 bp, Artificial Sequence
  ENSG00000115525_3 (sequence is synthesized)
tgacatgaaaaaaatgcattatgtggaccctgaccatgtaaagagagctcagaaatatgctcagcaagtcttgcagaaggaatgtcgtcccaagtttgccaagacatcaatggcgctgtt

SEQ ID NO: 209919 - DNA, 120 bp, Artificial Sequence
  ENSG00000115525_4 (sequence is synthesized)
atttgagcacaggtatagcgtggacttactcccttttgtgcagaaggcccccaaagacagtgaagctgagtccaagtacgatcctccttttgggttccggaagttctccagtaaagtcca

SEQ ID NO: 209920 - DNA, 120 bp, Artificial Sequence
  ENSG00000115525_5 (sequence is synthesized)
gaccctcttggaactcttgccagagcacgacctccctgaacacttgaaagccaagacctgtcggcgctgtgtggttattggaagcggaggaatactgcacggattagaactgggccacac

SEQ ID NO: 209921 - DNA, 120 bp, Artificial Sequence
  ENSG00000115525_6 (sequence is synthesized)
cctgaaccagttcgatgttgtgataaggttaaacagtgcaccagttgagggatattcagaacatgttggaaataaaactactataaggatgacttatccagagggcgcaccactgtctga

SEQ ID NO: 209922 - DNA, 120 bp, Artificial Sequence
  ENSG00000115525_7 (sequence is synthesized)
ccttgaatattattccaatgacttatttgttgctgttttatttaagagtgttgatttcaactggcttcaagcaatggtaaaaaaggaaaccctgccattctgggtacgactcttcttttg

SEQ ID NO: 209923 - DNA, 120 bp, Artificial Sequence
  ENSG00000115525_8 (sequence is synthesized)
gaagcaggtggcagaaaaaatcccactgcagccaaaacatttcaggattttgaatccagttatcatcaaagagactgcctttgacatccttcagtactcagagcctcagtcaaggttctg

SEQ ID NO: 209924 - DNA, 120 bp, Artificial Sequence
  ENSG00000115525_9 (sequence is synthesized)
gggccgagataagaacgtccccacaatcggtgtcattgccgttgtcttagccacacatctgtgcgatgaagtcagtttggcgggttttggatatgacctcaatcaacccagaacaccttt

SEQ ID NO: 209925 - DNA, 120 bp, Artificial Sequence
  ENSG00000115525_10 (sequence is synthesized)
gcactacttcgacagtcaatgcatggctgctatgaactttcagaccatgcataatgtgacaacggaaaccaagttcctcttaaagctggtcaaagagggagtggtgaaagatctcagtgg

SEQ ID NO: 209926 - DNA, 120 bp, Artificial Sequence
  ENSG00000115525_11 (sequence is synthesized)
aggcattgatcgtgaattttgaacacagaaaacctcagttgaaaatgcaactctaactctgagagctgtttttgacagccttcttgatgtatttctccatcctgcagatactttgaagtg

SEQ ID NO: 209927 - DNA, 120 bp, Artificial Sequence
  ENSG00000115525_12 (sequence is synthesized)
cagctcatgtttttaacttttaatttaaaaacacaaaaaaaattttagctcttcccactttttttttcctatttatttgaggtcagtgtttgtttttgcacaccattttgtaaatgaaac

SEQ ID NO: 209928 - DNA, 120 bp, Artificial Sequence
  ENSG00000115525_13 (sequence is synthesized)
ttaagaattgaattggaaagacttctcaaagagaattgtatgtaacgatgttgtattgatttttaagaaagtaatttaatttgtaaaacttctgctcgtttacactgcacattgaataca

SEQ ID NO: 209929 - DNA, 120 bp, Artificial Sequence
  ENSG00000115525_14 (sequence is synthesized)
ggtaactaattggaaggagaggggaggtcactcttttgatggtggccctgaacctcattctggttccctgctgcgctgcttggtgtgacccacggaggatccactcccaggatgacgtgc

SEQ ID NO: 209930 - DNA, 120 bp, Artificial Sequence
  ENSG00000115525_15 (sequence is synthesized)
tccgtagctctgctgctgatactgggtctgcgatgcagcggcgtgaggcctgggctggttggagaaggtcacaacccttctctgttggtctgccttctgctgaaagactcgagaaccaac

SEQ ID NO: 209931 - DNA, 120 bp, Artificial Sequence
  ENSG00000115525_16 (sequence is synthesized)
cagggaagctgtcctggaggtccctggtcggagagggacatagaatctgtgacctctgacaactgtgaagccaccctgggctacagaaaccacagtcttcccagcaattattacaattct

SEQ ID NO: 209932 - DNA, 120 bp, Artificial Sequence
  ENSG00000115525_17 (sequence is synthesized)
tgaattccttggggattttttactgccctttcaaagcacttaagtgttagatctaacgtgttccagtgtctgtctgaggtgacttaaaaaatcagaacaaaacttctattatccagagtc

SEQ ID NO: 209933 - DNA, 120 bp, Artificial Sequence
  ENSG00000115525_18 (sequence is synthesized)
aaatgaaatcttcccagtattataaattgtgtatttaaaaaaaagaaacttttctgaatgcctacctggcggtgtataccaggcagtgtgccagtttaaaaagatgaaaaagaataaaaa

SEQ ID NO: 209934 - DNA, 120 bp, Artificial Sequence
  ENSG00000115525_19 (sequence is synthesized)
cttttgaggaactctcgtagtctggttaatttgggtgcttatgtctatgaatctacccaaaacctccttcttggatgctgctgctaggcggagacctctctgtggatgccagtagtgagg

SEQ ID NO: 209935 - DNA, 120 bp, Artificial Sequence
  ENSG00000115525_20 (sequence is synthesized)
gacagagaattaaggcacctggtcctgcaagctgcttgagtccagacaactgtgaacccttctgaagagatgctgggtgtcggtggcttcctccccaaagacaggctgcccctagcttct

SEQ ID NO: 209936 - DNA, 120 bp, Artificial Sequence
  ENSG00000115525_21 (sequence is synthesized)
gtctcttaatggctctagcctctgatatcagaagatctgctactctgttcccagcctgccccagactcggctgccgccatcgctgttctccactctgtggctgctcttgtcactaatgct

SEQ ID NO: 209937 - DNA, 120 bp, Artificial Sequence
  ENSG00000115525_22 (sequence is synthesized)
acctgcctccactttcccttcctgcaactgcttgtgcagccccagtgcagccttggccccagcccattcgaacgtcttcccatctccctcctcctcaccatatgcagggccaggagtcag

SEQ ID NO: 209938 - DNA, 120 bp, Artificial Sequence
  ENSG00000115525_23 (sequence is synthesized)
gtcatagcattcaaagcagagtcccttctgtctcctggggtctgggatccagctcagagtggccaggagagcaaaagtcatatttctctcgttttgtgtctttacagataattttgtatg

SEQ ID NO: 209939 - DNA, 120 bp, Artificial Sequence
  ENSG00000115525_24 (sequence is synthesized)
aattttatttcctactctataagctactgcttgtttaagagaaaatgttttaagattatcacccatcaaatgagtttagaaaattgagactctggaagatggtccacagctcccttgtgg

SEQ ID NO: 209940 - DNA, 120 bp, Artificial Sequence
  ENSG00000115525_25 (sequence is synthesized)
ctcaggtggtgctgggcttacaccacacagctccacccctacatccctcagggggttattggagaagccggaacttcctcagacaacgttcttaatgctacgagcgcctccttgctggta

SEQ ID NO: 209941 - DNA, 120 bp, Artificial Sequence
  ENSG00000115525_26 (sequence is synthesized)
tgaggagacttgcctacctgcttctcaaggctgctgggatgtgtggtgctcaaagcttccacttggtcagcttgcagccattctcaggcctgctcccatccccatccctcctccctgtaa

SEQ ID NO: 209942 - DNA, 120 bp, Artificial Sequence
  ENSG00000115525_27 (sequence is synthesized)
ggcccttcttgcatccttaggttgctttgctcatgtctctcaacttttacttactcaggtggtaagcagataccctaaaaaggtatatttttgtagaccttttatagagtccaccagcca

SEQ ID NO: 209943 - DNA, 120 bp, Artificial Sequence
  ENSG00000115525_28 (sequence is synthesized)
ataggagttggctggagatcattctcaagaacttttcacactttggcattcatttgttggaagttgcatcttcacttcagagctgtgcccccattactcccccaccccacacacactctt

SEQ ID NO: 209944 - DNA, 120 bp, Artificial Sequence
  ENSG00000115525_29 (sequence is synthesized)
ctgaaaacagacctttgctaggtgcctctgggtgttctaaagttgatctccagtaactgagaattcactgccacactaacagctttgtattgcattctagacccgcacacacaccctccg

SEQ ID NO: 209945 - DNA, 120 bp, Artificial Sequence
  ENSG00000115525_30 (sequence is synthesized)
acataaatgaaatcactggttctgaggcaacttaggaagacttacacatgttctgtattttaacatgcttctagaactttgagctgcagaaaatttcagttttagggttttttaatttta

SEQ ID NO: 209946 - DNA, 120 bp, Artificial Sequence
  ENSG00000115525_31 (sequence is synthesized)
atttttgattgatacatagtgatgtgcatattttgagggtccatgtgataatgtaatacatttgtgtaattataaggagcaaatctgtgtaactgggatatctgtcacattaaatatttg

SEQ ID NO: 209947 - DNA, 120 bp, Artificial Sequence
  ENSG00000115525_32 (sequence is synthesized)
tctttatggtagaaacatttgaattattctagtgattttgaaatacacagtaaattattgtaaactataggcattctactgacctatcaaacactaggtcttgtttcttttatcaaactg

SEQ ID NO: 209948 - DNA, 120 bp, Artificial Sequence
  ENSG00000115525_33 (sequence is synthesized)
tatgtttgtacccattaatcaacctctcttcatttccccctacccttcttggcctctggtaactaccaatctactctctatcttcatgagatccacttttttagctcctacataggaatg

SEQ ID NO: 209949 - DNA, 120 bp, Artificial Sequence
  ENSG00000115525_34 (sequence is synthesized)
agaacatgtgatatttgtctttctgtgtttggcttatttcacttaacatcacctccagttccatccatcttgctgcagataacatgatttcaacctttttatggcagaataatattccat

SEQ ID NO: 209950 - DNA, 88 bp, Artificial Sequence
  ENSG00000115525_35 (sequence is synthesized)
cacccattgatggacacttaggttgatttcatgttttggctatgtgaatagcgctgcaataaatatgggagtatagatatatcttcaa

SEQ ID NO: 209951 - DNA, 120 bp, Artificial Sequence
  ENSG00000115525_36 (sequence is synthesized)
gtcacttggagaaggagagattcatacgaactgcgagagcatataaccagcatgtcttgagtcttttacccatgtgcctgttatatggatgctgctgtttttgtaagatgaaatgaccct

SEQ ID NO: 209952 - DNA, 120 bp, Artificial Sequence
  ENSG00000115525_37 (sequence is synthesized)
ttagtatgcggacgaaggcggcgggctgcgcggagcggcgtcccctgcagccgcggaccgaggcagcggcggcacctgccggccgagatgagtgagaatcgtaacattttattggaggaa

SEQ ID NO: 209953 - DNA, 120 bp, Artificial Sequence
  ENSG00000115525_38 (sequence is synthesized)
ggagccatagaaatgttgtcacccaaccctgctttctacagattaccaaacatcctcaaagagattgagtgatttggctgttatcaaatagccaaacacaatgccaagtgagtacaccta

SEQ ID NO: 209954 - DNA, 120 bp, Artificial Sequence
  ENSG00000115525_39 (sequence is synthesized)
atccatcggggaggcgtgatgtggggccgctggtagaaatttgccggtgaccttccctgcaccctctctgcagccagccttgcggagaagacaggttttggcgaccttttgatttcttct

SEQ ID NO: 209955 - DNA, 120 bp, Artificial Sequence
  ENSG00000115525_40 (sequence is synthesized)
tttgagaggaagagatgtagggggctttgcacctttgccagacaggactcctgatcaaaggacagcggtgaaacacagggcagcagacagagcctgtgttctgttggctacagctgtgct

SEQ ID NO: 209956 - DNA, 120 bp, Artificial Sequence
  ENSG00000115525_41 (sequence is synthesized)
ccagcccccgagggcctgcggaagagacaacgtctcagggggaccagacagaagtccaacataaaaagacaatgcttcacaatgccaagtgagtacacctatgtgaaactgagaagtgat

SEQ ID NO: 209957 - DNA, 120 bp, Artificial Sequence
  ENSG00000115525_42 (sequence is synthesized)
gacttgtctcttcccgggccggctgggcgcggcgtttccgcctcgaaccccgcgggcagcgcccagggcacgacaccctcaggcgagcccggctggggcgcgggcggagggtcgtggtcc

SEQ ID NO: 209958 - DNA, 120 bp, Artificial Sequence
  ENSG00000115525_43 (sequence is synthesized)
cgggccgtgtggaccgggcggggggtcccacgcaggcactgtgaagacagtggtgtgcaaagcagagacccctgcttgcatggaatctgcattctagtgggggagacaagacaaacgtgt

SEQ ID NO: 209959 - DNA, 120 bp, Artificial Sequence
  ENSG00000115525_44 (sequence is synthesized)
aattcaaaagtaaaaaacttatgaagaatcacatgtctcatgattagtgttataaagaaaaaagaaagcatgcatacaggaatatccacataagcaattttgcaatgccaagtgagtaca

SEQ ID NO: 209960 - DNA, 120 bp, Artificial Sequence
  ENSG00000115525_45 (sequence is synthesized)
cagccgcttcttcatcgtcttctctcggactctgcagacctacaccgtgcctttaaaggaagcagggccctccctgctgaagcattcagtgagcccaggcaccagcatcttcaaaccgag

SEQ ID NO: 209961 - DNA, 120 bp, Artificial Sequence
  ENSG00000115525_46 (sequence is synthesized)
cttttctctccttagtgctgctccccgctttccaggccttcctgggatatcttagagctcctgaaggtgcggcactcgccttgaggcactttcttctgagctgtgagctatgggcaagca

SEQ ID NO: 209962 - DNA, 120 bp, Artificial Sequence
  ENSG00000115525_47 (sequence is synthesized)
gtggagggggaagagagcagctgaagcagatgccggttcaacttacttaaagatgtgggacaagctctgaggaagcccccaagacaatgatgtctggttgtgcaccattgaagcaagaac

SEQ ID NO: 209963 - DNA, 120 bp, Artificial Sequence
  ENSG00000115525_48 (sequence is synthesized)
agaaaccatcccagagtggaggacatggcccatgtggtcctcctgttctgagtggctatgagatggagttctgtgtgagctctctacagaaaaagccctgtctccaggcaatcagtggag

SEQ ID NO: 209964 - DNA, 120 bp, Artificial Sequence
  ENSG00000115525_49 (sequence is synthesized)
atctgttaaacgagttgaaacaaaagaggacaaggaattgctgtggctttagacgttgccaggacatgtagaaactcactcaggatttactactgcatccactgtcacttaggcgcagga

SEQ ID NO: 209965 - DNA, 120 bp, Artificial Sequence
  ENSG00000115525_50 (sequence is synthesized)
aagaactcagtgcactgctcttggtcagtgtggctccaggaacagtgagggacacaggaagctcttcacagtccctgcccacaagggacttaacgtttgagaagttgaaacaaaaacaca

SEQ ID NO: 209966 - DNA, 120 bp, Artificial Sequence
  ENSG00000115525_51 (sequence is synthesized)
tggtttaaatgaaaacattgccaagcatatgctcaaactataatatcattagtctactgtgtgacaaatatatgttaataaaagtttgaactcagaggggaaagcacttaatctcagcac

SEQ ID NO: 209967 - DNA, 120 bp, Artificial Sequence
  ENSG00000115525_52 (sequence is synthesized)
tccaaaaccaaagacaaccttcttctaaaaacccaccactaactactccacagtatccttctcccatttactgcagctggggtgtgggatgaggtgggctcaacccaacaggctctaggg

SEQ ID NO: 209968 - DNA, 120 bp, Artificial Sequence
  ENSG00000115525_53 (sequence is synthesized)
aaaaagaaaaaaaaagaagaaaattaagtttgaaacctgaaattaacctcttggtgagaatggaaatggaatgaaatttcactcctttccagatgcagcttctgaagaggagacctggca

SEQ ID NO: 209969 - DNA, 120 bp, Artificial Sequence
  ENSG00000115525_54 (sequence is synthesized)
acctggcagcctggcgagcatccagctcgctcacgcacctctttctagtcccgtggccatcagtgagcttctccgggtccctcttgccacttctcagatgttcctttctgtcctaggaga

SEQ ID NO: 209970 - DNA, 120 bp, Artificial Sequence
  ENSG00000115525_55 (sequence is synthesized)
tttgtaaaaccagatacttaggatatgattctctagtggagggttaggcctttaggtctctaaaaattgccattcatgaccttcgggcctagggttttgagatgaatgtgcagtgtgtgt

SEQ ID NO: 209971 - DNA, 120 bp, Artificial Sequence
  ENSG00000115525_56 (sequence is synthesized)
ggccgctctgtgtgtcccgcttccaccagcttggcattaagcacccggagcatcacctgctgggcaggcctggccaggggtgagcccctccattcgggggctcagggtcaaggcagattc

SEQ ID NO: 209972 - DNA, 120 bp, Artificial Sequence
  ENSG00000115525_57 (sequence is synthesized)
cttgcttggctttcctgctgatttcctcatgaagatgccaattcgtatttaaacatttgttatcaatggtggtgtttgtgtgctgatttctataggtagaggctgttgttttaggagcca

SEQ ID NO: 209973 - DNA, 120 bp, Artificial Sequence
  ENSG00000115525_58 (sequence is synthesized)
ggtttgctgggccagctcagacctcttacaaagtgaagatactaatgatcgtcttgcaaggtgccatagtgtcgtgagggtgaactgaggcagtggctatgcatggtgtctgcagcagcg

SEQ ID NO: 209974 - DNA, 120 bp, Artificial Sequence
  ENSG00000115525_59 (sequence is synthesized)
tttctgaggctccaagaatatcagttcctttttcagaaatggggccagattcttcggatgtagacagtgttctcttcacggatgctaacaacttatcaaagctataatatattaagtatc

SEQ ID NO: 209975 - DNA, 120 bp, Artificial Sequence
  ENSG00000115525_60 (sequence is synthesized)
tctgttataataggatagatgcattcctaaaaaaatgtgttaagcaaaaatcagaaaatgaaaataaaaataacaaggccttgaggaaaagcatagttgggatgaacatttaaacctata

SEQ ID NO: 209976 - DNA, 120 bp, Artificial Sequence
  ENSG00000115525_61 (sequence is synthesized)
tttaaacctataccccagtaataatcctcataatgatactgacaaagttgaaaagatatgttgaattcctaataaatatcccagtaaatataggattacacacacacacacacacacaca

SEQ ID NO: 209977 - DNA, 120 bp, Artificial Sequence
  ENSG00000115525_62 (sequence is synthesized)
tctgcctgtgagaaggtagtgaataggaggagtaatgcagggccaattccaaggctgctaaatatggagacaaggataaaaaagcacaaagataggaagaactacctgacaggggttctg

SEQ ID NO: 209978 - DNA, 120 bp, Artificial Sequence
  ENSG00000115525_63 (sequence is synthesized)
agtcagcatttgtccagctgagccaagaggaagactggggtgaatggacacgcataccatattcctccaaggttgcgtttttgttttttggggggttttttgtttgtttttttgtttttt

SEQ ID NO: 209979 - DNA, 82 bp, Artificial Sequence
  ENSG00000115525_64 (sequence is synthesized)
ccaccatttcaccgtattagccaggatggtcatgtttttgttcttgtttttgttttagagacagggtctccctctgtcaccc

SEQ ID NO: 209980 - DNA, 120 bp, Artificial Sequence
  ENSG00000115525_65 (sequence is synthesized)
agtggcacaatcacagctcactacagtgtcaaccttccaggttgaggatcactcgatactcatgcctcagcctcccatgtagctggggccacaggggcacaccaccactcctgacccatt

SEQ ID NO: 209981 - DNA, 120 bp, Artificial Sequence
  ENSG00000115525_66 (sequence is synthesized)
gcacaccaccactcctgacccattttttaaaaaattttttgtataggtggggtctcaccatgttgcccaggctagcctcgaactcctgggctcaagcaaccctctcaccttggcctccca

SEQ ID NO: 209982 - DNA, 120 bp, Artificial Sequence
  ENSG00000115525_67 (sequence is synthesized)
aagtgctgagattataggtgtgacccgccatgcccgcctttcctctgagttttgttgcattcacgcagctcctggctgaggcaaaacattaaaatgcatatggaaatgcaggctgggaaa

SEQ ID NO: 209983 - DNA, 120 bp, Artificial Sequence
  ENSG00000115525_68 (sequence is synthesized)
atgctttgaaaccaatgcaatttctgtgttaaggggacattccctgattctttcaggtaatttgcattctagactgtgacattctgtatctcaactgataaataagcctgtttgtcatcc

SEQ ID NO: 209984 - DNA, 120 bp, Artificial Sequence
  ENSG00000115525_69 (sequence is synthesized)
tgctagatgagaacctgatatatgaaaccttttttttaatcgtggttaaaaaaaacataaaatttaccatcataattatttttaaatgtaccatttggcagcattaagtatatttaaact

SEQ ID NO: 209985 - DNA, 120 bp, Artificial Sequence
  ENSG00000115525_70 (sequence is synthesized)
aaccgaaacgctgtacctattaaacaactccccttttctccctctcttcaaccctggtaaccatgtttttatgaatttgactactttagatacctcatataagtcaggtcatacagtatt

SEQ ID NO: 209986 - DNA, 120 bp, Artificial Sequence
  ENSG00000115525_71 (sequence is synthesized)
tgtctctttgtgactggcttcacttagcataatgtcctcaaagtttaactatgttgtagcatgtatcagaattttatgaaacatgaagtcttagacaccccgaagtacattttcacccca

SEQ ID NO: 209987 - DNA, 120 bp, Artificial Sequence
  ENSG00000115525_72 (sequence is synthesized)
aatgtatttgaacagtgttaggctgggggtgggaggcgggagtccttcttgctttgcctgtgcaatgaaatgaataccctgctgtgtttatctccttgtcatgtgattctcccaggttgt

SEQ ID NO: 209988 - DNA, 120 bp, Artificial Sequence
  ENSG00000115525_73 (sequence is synthesized)
ttcttcaagtttctgagccaaacttaactctaaaaagcaaatattctgtgttaaaagacagtaatcaacacgggagctacatcagacatcataggacaaattgtcatctagaagagtata

SEQ ID NO: 209989 - DNA, 120 bp, Artificial Sequence
  ENSG00000115525_74 (sequence is synthesized)
ctaaaaggttacttttttcaattatttaaaaaaaacaccaaaaattcaagtaatacggaaataagtaaaggagaaagtcccctgtaatttttcatagagaaagaggaaggaatggggggc

SEQ ID NO: 209990 - DNA, 120 bp, Artificial Sequence
  ENSG00000115525_75 (sequence is synthesized)
agctgtgtaagtcaaacatgtttgtaaaactccgtgagtttgaaactagtaaaatagaaagtgaaagcctgctataattatggtggaattgagggtgtcttattgtgttactagagaatt

SEQ ID NO: 209991 - DNA, 120 bp, Artificial Sequence
  ENSG00000115525_76 (sequence is synthesized)
tttttaagtaggtttttaacattttgaccttgttaaaatgctccacttttcaaaacggtcctgacaggatatcctgcttccttccacgcagaagaggtggtttgtgcagaagtgcaggcc

SEQ ID NO: 209992 - DNA, 120 bp, Artificial Sequence
  ENSG00000115525_77 (sequence is synthesized)
tcagaatgctttgcacatgagaggaatggcaagagttgcctatcactgaggatttggggaggagggatcacaggatatgggactgaaaatgagacagggccagatagcaaaaggccttga

SEQ ID NO: 209993 - DNA, 120 bp, Artificial Sequence
  ENSG00000115525_78 (sequence is synthesized)
atgctacactaagcacgaagcagctccttaatttgtgcatcactgaagcaagaatagagtggaggacatggcccgtgtggtcctcgtgttctgagtggctatgacatggagttctgtgtg

SEQ ID NO: 209994 - DNA, 120 bp, Artificial Sequence
  ENSG00000115525_79 (sequence is synthesized)
agctctccatgaagaaaatcccgtctccaggcagtcagtggagatttgatccttaccacaagagcacgtggacaaatttgaattatcgtggatgtatatgggcagaagaaggtctcagag

SEQ ID NO: 209995 - DNA, 120 bp, Artificial Sequence
  ENSG00000115525_80 (sequence is synthesized)
ccataagggtggggccctgttagctctgttggttccactcagcagcccacagtgtgagtgggaccctgccagccctgctagacttgagcattgtctggtgacgctggtccccgccttcat

SEQ ID NO: 209996 - DNA, 120 bp, Artificial Sequence
  ENSG00000115525_81 (sequence is synthesized)
tactgcagcagaggaagtgtggctgtggcagttgtgggttttgtattttctatttaaatatgtcccttaatgtgccagttgttaaaaagactaccagtgggctctgaagggatgcctgga

SEQ ID NO: 209997 - DNA, 120 bp, Artificial Sequence
  ENSG00000115525_82 (sequence is synthesized)
aaagtgtggttcagatgtgaaattgcactcaaaagatgttttaagagagacgagggcacgttgatgtcagtttcggtttgggctgtgtagtagcagcattttgaacttggccctctctcc

SEQ ID NO: 209998 - DNA, 120 bp, Artificial Sequence
  ENSG00000115525_83 (sequence is synthesized)
aaatgtgccctacccacagtctagaaaattaagtttgggctgggcgtggtggctcacatctataatcccagaactttggaaggtggaggcaggtggatcactaggtcaggagtttgagac

SEQ ID NO: 209999 - DNA, 72 bp, Artificial Sequence
  ENSG00000115525_84 (sequence is synthesized)
aaccccgtctgtactgaaaatacaaaaagtagccgggtgtgtcggcttgaaactgggaggcagaggttgcag

SEQ ID NO: 210000 - DNA, 120 bp, Artificial Sequence
  ENSG00000115525_85 (sequence is synthesized)
gtgatgtggggccgctggtagaaatttgccggtgaccttccctgcaccctctctgcagccagccttgcggagaagacaggttttggcgaccttttgatttcttctgaattcaatgccaag

SEQ ID NO: 210001 - DNA, 120 bp, Artificial Sequence
  ENSG00000115525_86 (sequence is synthesized)
gttttcttctagtatgtttataacatactacctcttacatttaggtctttgattcgttttgcattaatttttgtatatggtatattagtccattttcactactgataaagacatacctaa

SEQ ID NO: 210002 - DNA, 85 bp, Artificial Sequence
  ENSG00000115525_87 (sequence is synthesized)
tatattagtccattttcactagaagaggtttaattgtagttacaactccacatggcaggggaagcctcacaatcatggcagaagg

SEQ ID NO: 210003 - DNA, 63 bp, Artificial Sequence
  ENSG00000115525_88 (sequence is synthesized)
caaggaggagcaagtcacgtcttacatgaatggcagcaggcaaaagagagaaaccacaagaac

SEQ ID NO: 210004 - DNA, 120 bp, Artificial Sequence
  ENSG00000115525_89 (sequence is synthesized)
ccacaacacatgggaattatgggagctaccagatgagatttgggtggggacaaagagtcaaaccatatcagtgtgaggtcagggtccaaggtcatccttttgcatgttgttctccagttg

SEQ ID NO: 210005 - DNA, 120 bp, Artificial Sequence
  ENSG00000115525_90 (sequence is synthesized)
gttctccagttgtcccaggaccatttgttgaaaagaactttcctctatttgctgcattctttctttctttgctgcctagagcctttccctgcccttcgcccttctgttactcgtatttta

SEQ ID NO: 210006 - DNA, 120 bp, Artificial Sequence
  ENSG00000115525_91 (sequence is synthesized)
agtcaagtctcagctcagcggttaccccttctaagaggctatccctgatcgtccctctgtgtgtgtgagagagccccctcatgccttaatcctgatgtttatcattgtaggatttcagct

SEQ ID NO: 210007 - DNA, 120 bp, Artificial Sequence
  ENSG00000115525_92 (sequence is synthesized)
gttcatcttccccacttgttttccaggccaggtcttgggagacaggggctgtgtgcttaacatcttacattacttaatatgcacttacatatattcaacttcagggggaaggggagatag

SEQ ID NO: 210008 - DNA, 120 bp, Artificial Sequence
  ENSG00000115525_93 (sequence is synthesized)
tacttgaatcacagtgtaatcttccattacctgtgaactctagattgtacagaaaatccggttataacttgtaattctttgagtacatcagtaatgcaccttaggtttaatgtgaggaac

SEQ ID NO: 210009 - DNA, 120 bp, Artificial Sequence
  ENSG00000115525_94 (sequence is synthesized)
aggactgatagttctcttcaacctaaacatccactggtagacagggaaaagcccagcacccgctccctgccccttctccctgaaccatggaatgtaagtcctttcattaggctactgggc

SEQ ID NO: 210010 - DNA, 120 bp, Artificial Sequence
  ENSG00000115525_95 (sequence is synthesized)
caatttttagacctaagctcatggctggaccaatagtagccttcatagatgccaatgcccttccttgatgggcttcagtgaggactcctgaccaatcactgacgaggggggttgggagga

SEQ ID NO: 210011 - DNA, 120 bp, Artificial Sequence
  ENSG00000115525_96 (sequence is synthesized)
cttctgatgggggagttggcctccctggtcctacacctacctgcctggagaaggagccaaagccacttaagcaaaactgagcagcagcccacagtgtccatctaccatgtcaccccagtg

SEQ ID NO: 210012 - DNA, 120 bp, Artificial Sequence
  ENSG00000115525_97 (sequence is synthesized)
atagtcactccctatttccccctccccacaaatcctaggcaaccagtaatctactttctgtctgtatagatttgcctattatggacatttcatgttattcatttcatggtctcctgtgac

SEQ ID NO: 210013 - DNA, 120 bp, Artificial Sequence
  ENSG00000115525_98 (sequence is synthesized)
tggattctttcacttaggataatgttttgaaggtacacccatgttgtagcatgtatcggtacttcattattatttctggataatacctcattgtatggatatacctcattttgtttatcc

SEQ ID NO: 210014 - DNA, 120 bp, Artificial Sequence
  ENSG00000115525_99 (sequence is synthesized)
attcatcagttagtggacatttgggttgtgtccacttttggctattatgaataatgctgctgtgaacatgtgtatgtaagtatttgtgtacctgttttcagttcttttatgtatatacta

SEQ ID NO: 210015 - DNA, 120 bp, Artificial Sequence
  ENSG00000115525_100 (sequence is synthesized)
ggaatatagttgctgggtcatatggtaactatgttttgctttttgaggaactgccaagctgttttccaaaatggttgcattattttacattcttgtaagcaaggtaccagagtttcagtt

SEQ ID NO: 210016 - DNA, 120 bp, Artificial Sequence
  ENSG00000115525_101 (sequence is synthesized)
tctccgcatctttatcaacatttgttattatctttccttttttactactgtcatcctgatagatgttaagtgatatctcattgtggttttgatttgctgatagctaatgatgctgagcat

SEQ ID NO: 210017 - DNA, 120 bp, Artificial Sequence
  ENSG00000115525_102 (sequence is synthesized)
ctttcccatgtgctctcattgaccgtatgtgtgttttctttggaggaatgcccattcagatcctttgcccatttttaattgggctatttgactttttattcttaaattgtaagagttctt

SEQ ID NO: 210018 - DNA, 120 bp, Artificial Sequence
  ENSG00000115525_103 (sequence is synthesized)
tctgtgttctggataccagtaccctatatctggtatgtgatttccaagtattttctccactctctaagttgtcttttcactttctttagggtatcatttttagcacaaaagtctttaatt

SEQ ID NO: 210019 - DNA, 90 bp, Artificial Sequence
  ENSG00000115525_104 (sequence is synthesized)
aaatgatgatcactctctttgtagaaacccctcagcaattcttttttttggggatggagtctcattctgttgtccaggctagagtctgca

SEQ ID NO: 210020 - DNA, 83 bp, Artificial Sequence
  ENSG00000115525_105 (sequence is synthesized)
aacatgagccactgcacctggccctcttccagtggttcttgcacatgggcaggttggagaattcctggtagagacagtggtga

SEQ ID NO: 210021 - DNA, 120 bp, Artificial Sequence
  ENSG00000115525_106 (sequence is synthesized)
catgggcaggttggagaattcctggtagagacagtggtgagggtgtttataatttaaactgaacaaatactaggagctagtgggagatttgttgggtgcggtctcagcaccggcacttcc

SEQ ID NO: 210022 - DNA, 120 bp, Artificial Sequence
  ENSG00000115525_107 (sequence is synthesized)
tcagtgcttttgatttcatgggtgaaatttcacactcctgagagacaaatgagaccctgccccccagttgaaatcggaaagtaccatacagtgggagtatttttccttttggtggcggga

SEQ ID NO: 210023 - DNA, 120 bp, Artificial Sequence
  ENSG00000115525_108 (sequence is synthesized)
atggagtgagatggttataaagaggccctgctgcagttgtgtcaatccaggagtgggtgctttcctcctatgtctgtgtacagctgtacactctgcatggatgggccagacctaattaag

SEQ ID NO: 210024 - DNA, 120 bp, Artificial Sequence
  ENSG00000115525_109 (sequence is synthesized)
agtcgcatgaaaatggtgatcattgcttaatgggaatatccagattgtgaccaaaattgctgttactgaggttgttcacccaccttgttctccagacatgaacttgcatagcttttggct

SEQ ID NO: 210025 - DNA, 120 bp, Artificial Sequence
  ENSG00000115525_110 (sequence is synthesized)
agttccagaaattagacttacttagatggatataagcctttttgagggtattcaaaagcatataaaaatcaaggaatactctaaagagctccaaaaatgctttggtcagtggttcccttg

SEQ ID NO: 210026 - DNA, 120 bp, Artificial Sequence
  ENSG00000115525_111 (sequence is synthesized)
ttggaataaattcatggcattccagaagggcagctatggaggagatggccctcacttggtcatattccttttgtctttattggtcacattactttatagtctcacccattatattcaaat

SEQ ID NO: 210027 - DNA, 120 bp, Artificial Sequence
  ENSG00000115525_112 (sequence is synthesized)
acatttcagaggtcagctgtcgaggagtgtatgcacatgtatagacatatgcacaaactagctgtctgtgaaactaatgggacgtattcaacttttcacgtaaactccatgtgatgacaa

SEQ ID NO: 210028 - DNA, 120 bp, Artificial Sequence
  ENSG00000115525_113 (sequence is synthesized)
atttgtatttccaaagctgattctatatcagtcatcatggtcttctggattttctattgggcagaagttctagttggaagatgaagcatatatgaaacgacttcatgggactaggaaata

SEQ ID NO: 210029 - DNA, 120 bp, Artificial Sequence
  ENSG00000115525_114 (sequence is synthesized)
gagtaagtgagagaggatgcgaggtgagggcagtttcagcacttaatagccttaaattggacctattcacttgggcttccctagacaaaatgatggtgttagcaccattgaggaatgtct

SEQ ID NO: 210030 - DNA, 120 bp, Artificial Sequence
  ENSG00000115525_115 (sequence is synthesized)
gtggctatttcagagttacttttttgagttggagtgccggatttgcgtagcttttgcaatctataggagtagattgcttcagaaggcagtgcacagggccacatggggtcacacccacag

SEQ ID NO: 210031 - DNA, 120 bp, Artificial Sequence
  ENSG00000115525_116 (sequence is synthesized)
atgttgcttgaggtgaagatagcaaacaagacattaggtatacaggtctgggcttaggtgagaggtccacattagagagatggatttggtcttcagggagccattgtcacccctagtctg

SEQ ID NO: 210032 - DNA, 120 bp, Artificial Sequence
  ENSG00000115525_117 (sequence is synthesized)
ctactactgctatccaaagcttcaccaagtcaggggaaaagaaagattgcctcccagtctttcaccagcacatcctaggatcacaactttacgagaagccagctgcaatgccaagtgagt

SEQ ID NO: 210033 - DNA, 120 bp, Artificial Sequence
  ENSG00000115525_118 (sequence is synthesized)
aggcatcgttcatttgaaggggaaaatggttttatgtgctgcgcttcatctggcaccagtggttgcctgctcctcgtggcagggccgtgctgggtgtcacagagaggaaggagactcatc

SEQ ID NO: 210034 - DNA, 120 bp, Artificial Sequence
  ENSG00000115525_119 (sequence is synthesized)
tcctgccctctggtgtttagctgccctcccccgggcttatggctgctaatccttttccacggaaggatacagctgctgaaactgtggaagaggaatccatttctgctgcatgaaggggca

SEQ ID NO: 210035 - DNA, 120 bp, Artificial Sequence
  ENSG00000115525_120 (sequence is synthesized)
cagacttgaatacagtcaggacaggttgtggtttcacttgtgtaatcctgagagcttgacagcttcgaggagtgtctaacattgctagtaacagagcctagaagcacctgaattccagct

SEQ ID NO: 210036 - DNA, 87 bp, Artificial Sequence
  ENSG00000115525_121 (sequence is synthesized)
agcctgcctgtaaacttgaaagagacaggggctcgctctgtcacccaggtcggagtgtaatggtgtgatcacagctcactgcagcct

SEQ ID NO: 210037 - DNA, 88 bp, Artificial Sequence
  ENSG00000115525_122 (sequence is synthesized)
ttatgcctcagcctcctgagcaaggcagcagacagagcctgtgttctgttggctacagctgtgctccagcccccgagggcctgcggaa

SEQ ID NO: 210038 - DNA, 120 bp, Artificial Sequence
  ENSG00000115525_123 (sequence is synthesized)
aattgcttgacattcagggattagatacaagtgttcgctcaagtactaaaggctgcattcctcgaaatcctagaaagacagagctgggaggggagatgaggctgcaaaccatgcactcat

SEQ ID NO: 210039 - DNA, 120 bp, Artificial Sequence
  ENSG00000115525_124 (sequence is synthesized)
tcttagtcataagaagacgtggaggacatgacatggatactgcctggtgtacagagatggttgatggcctgctttgtcagtgtgtctttgtcctttttatttaaataggttaaacagtgc

SEQ ID NO: 210040 - DNA, 120 bp, Artificial Sequence
  ENSG00000115525_125 (sequence is synthesized)
ccacatggtcccttgcaaatcagaagaagtaatgcctgctgagctgaagtagagggatttgatgaaacttcttgggaagtcaaactcttatactgtggaggctaaagcaatgccatcttg

SEQ ID NO: 210041 - DNA, 120 bp, Artificial Sequence
  ENSG00000115525_126 (sequence is synthesized)
agagttgtgggaggacagggagggaattattatttctggaaagagagggaaagttgggcagcaggttttgagaggaagagatgtagggggctttgcacctttgccagacaggactcctga

SEQ ID NO: 210042 - DNA, 120 bp, Artificial Sequence
  ENSG00000115526_0 (sequence is synthesized)
aggcggcgcgcacggccggataggcgcgagggggccgcgtgaggcggtgccggcgttctggcccccaaagccggtctagcgcgccgggcgtcttccttacttccgctgccgccgccgcca

SEQ ID NO: 210043 - DNA, 120 bp, Artificial Sequence
  ENSG00000115526_1 (sequence is synthesized)
cgtcttccttacttccgctgccgccgccgccacatcccgggacccgacgggccgcggcgcggaggcctcggggcaaggtggggcgggcctcccgagctcccaggaccccgcgcgcttcgc

SEQ ID NO: 210044 - DNA, 120 bp, Artificial Sequence
  ENSG00000115526_2 (sequence is synthesized)
gcccccagggccaggggaggagcctaaggacccggacgagcgccgctccagtaggtgacaagaggaaccaagaacctcagttcaggggaaacacagcaaggaaatgtgagccccaggctg

SEQ ID NO: 210045 - DNA, 120 bp, Artificial Sequence
  ENSG00000115526_3 (sequence is synthesized)
cagaaggaagagtcagtgaatggctgcggtgtgacaacatgcaccaccagtggcttctgctggccgcatgcttttgggtgattttcatgttcatggtggctagcaagttcatcacgttga

SEQ ID NO: 210046 - DNA, 120 bp, Artificial Sequence
  ENSG00000115526_4 (sequence is synthesized)
cctttaaagacccagatgtgtacagtgccaaacaggagtttctgttcctgacaaccatgccggaagtgaggaagttgccagaagagaagcacattcctgaggaactgaagccaactggga

SEQ ID NO: 210047 - DNA, 120 bp, Artificial Sequence
  ENSG00000115526_5 (sequence is synthesized)
aggagcttccagacagccagctcgttcagcccctggtctacatggagcgcctggaactcatcagaaacgtctgcagggatgatgccctgaagaatctctcgcacactcctgtctccaagt

SEQ ID NO: 210048 - DNA, 120 bp, Artificial Sequence
  ENSG00000115526_6 (sequence is synthesized)
ttgtcctggaccgaatatttgtctgtgacaagcacaagattcttttctgccagactcccaaagtgggcaacacccagtggaagaaagtgctgattgttctaaatggagcattttcttcca

SEQ ID NO: 210049 - DNA, 120 bp, Artificial Sequence
  ENSG00000115526_7 (sequence is synthesized)
ttgaggagatccccgaaaacgtggtgcacgaccacgagaagaacggccttcctcggctctcttccttcagtgatgcagaaattcagaagcgattgaaaacatacttcaagttttttattg

SEQ ID NO: 210050 - DNA, 120 bp, Artificial Sequence
  ENSG00000115526_8 (sequence is synthesized)
taagagatcccttcgaaagacttatttctgcatttaaggataaatttgttcacaatccccggtttgagccttggtacaggcatgagattgctcctggcatcatcagaaaatacaggagga

SEQ ID NO: 210051 - DNA, 120 bp, Artificial Sequence
  ENSG00000115526_9 (sequence is synthesized)
accggacagagacccgggggatccagtttgaagatttcgtgcgctacctcggcgatccgaaccacagatggctagaccttcagtttggggaccacatcattcactgggtgacgtatgtag

SEQ ID NO: 210052 - DNA, 120 bp, Artificial Sequence
  ENSG00000115526_10 (sequence is synthesized)
agctctgtgctccctgtgagataatgtacagtgtgattggacaccacgagaccctggaggacgatgccccatacatcttaaaagaggctggcattgaccacctggtgtcatacccgacta

SEQ ID NO: 210053 - DNA, 120 bp, Artificial Sequence
  ENSG00000115526_11 (sequence is synthesized)
cgaaggggactttaagctctttgggtaccagaaaccagactttttgctaaactaatgcataagacctatgaattcaaatatctttattagacctggggctaaccaggtgaagatctgagc

SEQ ID NO: 210054 - DNA, 120 bp, Artificial Sequence
  ENSG00000115526_12 (sequence is synthesized)
ccagaaatgacccttcctccaccacacccctcctttgaggacgcccggggtctcccacaggcctgtgagttgcctcggcatatgacgcagaaccccaactgttacaacttagtttggatg

SEQ ID NO: 210055 - DNA, 120 bp, Artificial Sequence
  ENSG00000115526_13 (sequence is synthesized)
taagatgctctgaggaccctgcccacacccctgcgtgcattaggatgtcgctggcctttgctcacctcagaggggagaaaaggctaaagatttgcagtttgacagcccagcagggaggaa

SEQ ID NO: 210056 - DNA, 120 bp, Artificial Sequence
  ENSG00000115526_14 (sequence is synthesized)
gcatcacacagcgttaggagccgtttccttcaggtgttaaggaaggggatgcccctgaggttctcctggctagtcagggtggcttcacccatcactggtgggttgcaggaacagcaccca

SEQ ID NO: 210057 - DNA, 120 bp, Artificial Sequence
  ENSG00000115526_15 (sequence is synthesized)
ggactctgaggagggacagagaagcaagggggctgctgaaatcgcagagacttttgcagcatcagatctgaggagtaaaacggcacctctggccttcatcttggtgctgcgacaattgtg

SEQ ID NO: 210058 - DNA, 120 bp, Artificial Sequence
  ENSG00000115526_16 (sequence is synthesized)
gaggcaaagcattctttctgtgactattttgttcctgtagacagtcagcgatggccagagggtggtgtggtgtccaggggtccatctttccagaatccatgcctgtgtaatgctggtcca

SEQ ID NO: 210059 - DNA, 120 bp, Artificial Sequence
  ENSG00000115526_17 (sequence is synthesized)
tgcttctgaacctgtgtctgccaagcgcctatttcattcagcacaagacatacgattttagaaggtgaggggaggggaggctttttctacctgagaaggggagtgtctttgagggcctta

SEQ ID NO: 210060 - DNA, 120 bp, Artificial Sequence
  ENSG00000115526_18 (sequence is synthesized)
aaaggaccatggcccaggaatgggggcgctggttgggcttggagctcaggctgctgtggatcccggcgcatcagttctgacttgccttacctgggtggacagcagtgaatctccacctgt

SEQ ID NO: 210061 - DNA, 120 bp, Artificial Sequence
  ENSG00000115526_19 (sequence is synthesized)
cttctccagggagctcccatgttggggctgaagacgagcaggggcaacctgccagcatcacagaattcagtgtagtttatacatttcgattcctttcatctcagcaaaatgggcactgcc

SEQ ID NO: 210062 - DNA, 120 bp, Artificial Sequence
  ENSG00000115526_20 (sequence is synthesized)
agagccatttctgatcacaccaccatcctggaccatgtgactggaaggtgggtaaccaagttcaccagcaataaaacccagcgcccaggtagcctccagcagtgcggcttcctggcaaca

SEQ ID NO: 210063 - DNA, 120 bp, Artificial Sequence
  ENSG00000115526_21 (sequence is synthesized)
aggtaggccctggtgcagggcaagccgcagcgaccatttcagataccgtccacagccaggaccgctgagaactgggacagtttcctgggatgagtgccagcctgagcctgcatggtgccg

SEQ ID NO: 210064 - DNA, 120 bp, Artificial Sequence
  ENSG00000115526_22 (sequence is synthesized)
ccgagcccggggtggaggagggagccaggcttcgcttcaaggcggcctctaccttttctcagaatggtttcctgattgtgtcaatgtgaaagttaaataaaatttatgtgccaaacctga

SEQ ID NO: 210065 - DNA, 120 bp, Artificial Sequence
  ENSG00000115526_23 (sequence is synthesized)
aagaaggagcatgtgcagcttcggtgcgaggggagtcaggggtgggaatgcacgttccctgcctgaggggccccggggtgccctgagcctctgatcttcgctgtcaggaggcctgtccga

SEQ ID NO: 210066 - DNA, 120 bp, Artificial Sequence
  ENSG00000115526_24 (sequence is synthesized)
atgcaataagaaggcgtccttgtgcgggatgctgtgacccgcggaattattgatattgtgcgagcctacaatttacttctttcatccttggctgagaatttgcgtttgtaattgtagatg

SEQ ID NO: 210067 - DNA, 120 bp, Artificial Sequence
  ENSG00000115526_25 (sequence is synthesized)
gagagaggaagaaagggttcagcttgggtccaaggagcatgcagaggaaggcagggaagaaggagcatgtgcagcttcgtgacaagaggaaccaagaacctcagttcaggggaaacacag

SEQ ID NO: 210068 - DNA, 120 bp, Artificial Sequence
  ENSG00000115526_26 (sequence is synthesized)
gggtgggtttcagcgcctgggcccctctccccgccgcggggcgcacggaaaaaccggggaacccgcgggttttgtcctggcgagccacatcccgtgactgggttaaaatgaaaagacaca

SEQ ID NO: 210069 - DNA, 120 bp, Artificial Sequence
  ENSG00000115526_27 (sequence is synthesized)
aagagagaagtggtcttttcccttccctccccattataattaagagcttagtccatcttggctcagaattggaattcagaattcagaattgctcttgaccctgaagaatagaatctcaaa

SEQ ID NO: 210070 - DNA, 120 bp, Artificial Sequence
  ENSG00000115526_28 (sequence is synthesized)
tgggcccctctccccgccgcggggcgcacggaaaaaccggggaacccgcgggttttgtcctggcgagccacatcccgtgacaagaggaaccaagaacctcagttcaggggaaacacagca

SEQ ID NO: 210071 - DNA, 120 bp, Artificial Sequence
  ENSG00000115526_29 (sequence is synthesized)
gcattaatttctggcaaccacactgagaaaggtgtagattaagctggaaaatcacgaagagtgccaagggattggtcagtttttactgggggtctgcaccaggccaggtgggtgctggtt

SEQ ID NO: 210072 - DNA, 120 bp, Artificial Sequence
  ENSG00000115526_30 (sequence is synthesized)
cacagagctaatgggtgtgagcagggatttgaaccaagtctggggttctttgtgcctcactatctctgacatggagtggcggaaggaggaggggattgtgggatggagacaggagacagg

SEQ ID NO: 210073 - DNA, 120 bp, Artificial Sequence
  ENSG00000115526_31 (sequence is synthesized)
acagctggcttgcaaggaatttggcatgcccctgctgggtggtgttgctgataaactacagtacactcggttaaatgtgaagttcagaaaacaacacataggtttttgtttttgtttttt

SEQ ID NO: 210074 - DNA, 120 bp, Artificial Sequence
  ENSG00000115526_32 (sequence is synthesized)
gtgttttggcgacttgaagacctccctagttcgcgggagtagcgggaagagccttcctcgcgttaattatgcaataagaaggcgtccttgtgcgggatgctgtgacccgcggaattattg

SEQ ID NO: 210075 - DNA, 120 bp, Artificial Sequence
  ENSG00000115526_33 (sequence is synthesized)
actatctaggtttatgtaagaacgctctgatgtttgcagaagaacatcgcctaacgatacatttctcagaagtgacaagaggaaccaagaacctcagttcaggggaaacacagcaaggaa

SEQ ID NO: 210076 - DNA, 120 bp, Artificial Sequence
  ENSG00000115526_34 (sequence is synthesized)
agtagggtgagctcggggacgcgcaggcgggtgggtttcagcgcctgggcccctctccccgccgcggggcgcacggaaaaaccggggaacccgcgggttttgtcctggcgagccacatcc

SEQ ID NO: 210077 - DNA, 120 bp, Artificial Sequence
  ENSG00000115526_35 (sequence is synthesized)
aggcatgcagttctgcacttctggctgggaaggtgaaccaggttttccaaaatgtcatttttgctttccaagtctgcaaggcaggaaagggttgggcagtgaatggaaagtagtgcagcc

SEQ ID NO: 210078 - DNA, 120 bp, Artificial Sequence
  ENSG00000115526_36 (sequence is synthesized)
gaccccaggaaacacacgaagccttatacacgggcacctgagggtggtttgcgagccatccggagaaaacccaggcagcttggcagatgcctggttcctgtgagattctaggatgtaaat

SEQ ID NO: 210079 - DNA, 120 bp, Artificial Sequence
  ENSG00000115539_0 (sequence is synthesized)
gcgcgtgcacaaaagagagctgaggggcgggggcgctgcggcacagctggtttgagcaactgaactggaaacaagatgcaggaccccaacgcagacactgaatggaatgacatcttacgc

SEQ ID NO: 210080 - DNA, 120 bp, Artificial Sequence
  ENSG00000115539_1 (sequence is synthesized)
aaaaagggtatcttaccccccaaggaaagtctgaaagaattggaagaggaggcagaagaggagcagcgcatcctccagcagtcagtggtgaaaacatatgaagatatgactttggaagag

SEQ ID NO: 210081 - DNA, 120 bp, Artificial Sequence
  ENSG00000115539_2 (sequence is synthesized)
ctggaggatcatgaagacgagtttaatgaggaggatgaacgtgctattgaaatgtacagacggcggagactggctgagtggaaagcaactaaactgaagaataaattcggagaagttttg

SEQ ID NO: 210082 - DNA, 120 bp, Artificial Sequence
  ENSG00000115539_3 (sequence is synthesized)
gagatctcagggaaggattatgttcaagaagttaccaaagctggcgagggcttgtgggtcatcttgcacctttacaaacaaggaattcccctctgtgccctgataaatcagcacctcagt

SEQ ID NO: 210083 - DNA, 120 bp, Artificial Sequence
  ENSG00000115539_4 (sequence is synthesized)
aatctgcccacgatatttgtttacctggaaggagatatcaaggctcagtttattggtcctctggtgtttggcggcatgaacctgacaagagatgagttggaatggaaactgtctgaatct

SEQ ID NO: 210084 - DNA, 120 bp, Artificial Sequence
  ENSG00000115539_5 (sequence is synthesized)
ggagcaattatgacagacctggaggaaaaccctaagaagccgattgaagacgtgttgctgtcctcagtgcggcgctctgtcctcatgaagagggacagcgattccgagggtgactgaggc

SEQ ID NO: 210085 - DNA, 120 bp, Artificial Sequence
  ENSG00000115539_6 (sequence is synthesized)
tacagcttctatcacatgccgaactttcttgtgacaaattgtctggattttttaaaaaaggaaaaagcaagaatgaatccttgtggtttttagttttgtataaattatgtttcaaatctt

SEQ ID NO: 210086 - DNA, 120 bp, Artificial Sequence
  ENSG00000115539_7 (sequence is synthesized)
tacattttggaaataatcattgctggagattctgttaaatattttggaactctttttttttttaaattatagtatttcctctaaaaaaaattaaaaccagccatttgtatggcaaatgtc

SEQ ID NO: 210087 - DNA, 120 bp, Artificial Sequence
  ENSG00000115539_8 (sequence is synthesized)
ggcctgggcgtccccgcctcggtgtgccgggtcccccaaacctcgtcctccgggactatgtcttctcgcggtctctacccacccgggcctgtgaaggtcttgccggatcccgcctaacaa

SEQ ID NO: 210088 - DNA, 120 bp, Artificial Sequence
  ENSG00000115539_9 (sequence is synthesized)
aagttacctcctctcctgaactcccctaaggcacacctgggcagaggtgttaggaagcggagggtccggcctggggtcttccgcacgtaaagcagcgccacagccggtgttcctggctcc

SEQ ID NO: 210089 - DNA, 120 bp, Artificial Sequence
  ENSG00000115539_10 (sequence is synthesized)
aagggctctgggagacaggcggggcagtgagagatgggaggcgcatttctgttggagagagtgtctatttcctggactcctgttacgatggtgggtcaagttcacttctgcctgtgtatg

SEQ ID NO: 210090 - DNA, 120 bp, Artificial Sequence
  ENSG00000115539_11 (sequence is synthesized)
aggacggaagcacgtttaatctctcatcttagttgcgtaatcaggaacagttacaactgggctctactgattcttagttcaaggaaggcgtgatagacttaaatataaacattttttata

SEQ ID NO: 210091 - DNA, 120 bp, Artificial Sequence
  ENSG00000115540_0 (sequence is synthesized)
agccgcctagacgctggcactatggtcatggcggaggggacggcagtgctgaggcggaacaggccgggcaccaaggcgcaggatttctataattggcctgatgaatcctttgatgaaatg

SEQ ID NO: 210092 - DNA, 120 bp, Artificial Sequence
  ENSG00000115540_1 (sequence is synthesized)
gacagtacactagctgttcaacagtatattcaacagaacataagagcagattgctccaatattgacaaaattcttgaaccacctgaaggccaagatgaaggtgtgtggaagtatgaacat

SEQ ID NO: 210093 - DNA, 120 bp, Artificial Sequence
  ENSG00000115540_2 (sequence is synthesized)
ttaaggcagttctgccttgagctaaatggacttgctgtcaaacttcagagtgaatgccatccagatacttgcactcaaatgacagcaactgaacaatggatttttctttgtgcagctcat

SEQ ID NO: 210094 - DNA, 120 bp, Artificial Sequence
  ENSG00000115540_3 (sequence is synthesized)
aaaactccaaaagagtgtcctgctatagactatactagacacacacttgatggtgctgcatgtcttctgaatagcaataaatattttcccagcagggttagcataaaggaatcatctgta

SEQ ID NO: 210095 - DNA, 120 bp, Artificial Sequence
  ENSG00000115540_4 (sequence is synthesized)
gcgaaactaggatcagtatgccgtaggatttacagaatattttcacatgcttattttcatcatcggcagatatttgatgaatatgaaaatgaaacatttttgtgtcatcggtttactaag

SEQ ID NO: 210096 - DNA, 120 bp, Artificial Sequence
  ENSG00000115540_5 (sequence is synthesized)
tttgtgatgaaatacaatttgatgtccaaggataacctgattgtaccaattttagaagaggaagtacagaattcagtttctggggaaagtgaagcatgaagggaatcataggaaaaatgt

SEQ ID NO: 210097 - DNA, 120 bp, Artificial Sequence
  ENSG00000115540_6 (sequence is synthesized)
actgatcatataattaacattatgtactgtatatatcattttagacacatcaatcatgtatccatattatagcttctttgtttagtataggtttttgtatgctgggtttgccttttaaaa

SEQ ID NO: 210098 - DNA, 120 bp, Artificial Sequence
  ENSG00000115540_7 (sequence is synthesized)
tgggaaatactttttaagttattcataagctgtatattcaccagtgtggcactcatggtttttaaataagattagtattatctgtttataatgcctgttaataaaagaatttacagtttg

SEQ ID NO: 210099 - DNA, 120 bp, Artificial Sequence
  ENSG00000115540_8 (sequence is synthesized)
gtaaaattgctgctaaacaatcattggatcacaatcctcatcagacaaacccatctgtaaaaaaaatgagggagagcttgaggtttcacacaagccatttactaaagaggtagaaatgtt

SEQ ID NO: 210100 - DNA, 120 bp, Artificial Sequence
  ENSG00000115540_9 (sequence is synthesized)
ttctattggttttaccttgagtttagatatcctaaaaaattctgtagtacgtagttttgtcttacctgttaactttccccaattgagataaaagtgttttaaaattctgtttatagtttt

SEQ ID NO: 210101 - DNA, 120 bp, Artificial Sequence
  ENSG00000115540_10 (sequence is synthesized)
tgatatgcatatataattatgtgtatatctaaatacaaatgcaaatgaagcattagtaatacttaaataattttactgtgctacataaagtataacatacttggaaaggatttaccgttc

SEQ ID NO: 210102 - DNA, 120 bp, Artificial Sequence
  ENSG00000115540_11 (sequence is synthesized)
tgcaacaacggactggtacatacaggatgatcacaatggtaaggcacataaattattttcccactggaaacctgccctgtccaccccttctcatttcccttaaccttatcttcaaactac

SEQ ID NO: 210103 - DNA, 120 bp, Artificial Sequence
  ENSG00000115540_12 (sequence is synthesized)
tttagctgagaagcttttcaccagactgagttagtggtggcttatacctatttatatttgtattaattgcttacagattatacctcatattagcaattacattacactacaagaaaatgt

SEQ ID NO: 210104 - DNA, 120 bp, Artificial Sequence
  ENSG00000115540_13 (sequence is synthesized)
atttgcataggctcttgcttatctttgttttgcaaaattgttctacttagaaaacagtccttaaaatagtttgactcttcctgttagtaatatattaatctttcatttaaccagctaggc

SEQ ID NO: 210105 - DNA, 120 bp, Artificial Sequence
  ENSG00000115540_14 (sequence is synthesized)
agcattaaatagaattgaagaaataccatagtatttattttacaccccctctcccacgaagtttatgtttggattacatgcacgtgtgagattatttgcaataattcataggttccaagg

SEQ ID NO: 210106 - DNA, 120 bp, Artificial Sequence
  ENSG00000115540_15 (sequence is synthesized)
tttgttataattcattgtggtaagaatgattgaaatgcagatttaacaatcttataatctattgaatgccatttttgataaagcactggaggtcttattgccaaactgattgtaatgagg

SEQ ID NO: 210107 - DNA, 120 bp, Artificial Sequence
  ENSG00000115540_16 (sequence is synthesized)
cagtaagggtgaaaacattgtacatgttgtgaagaaagtatttaaatccaacttttgaacagatttaacaaacatgaggaacttttttatttagaaggataattttgaagatgaaaatgt

SEQ ID NO: 210108 - DNA, 120 bp, Artificial Sequence
  ENSG00000115540_17 (sequence is synthesized)
attcatcttaattgttttttcaaatttaagggaataatttataccatcttttcagacaagaatgtacagcaaaaataaggggaacagtagtatactgagagtgtgtgtatgtatagtgta

SEQ ID NO: 210109 - DNA, 120 bp, Artificial Sequence
  ENSG00000115540_18 (sequence is synthesized)
tgcctttccaagcttgccagtctttttggctttgaacactgcccatcagctacagtcattactgttccccaacccacaactatcttttaagaagtcttagttcacagtgaaaggaatgat

SEQ ID NO: 210110 - DNA, 120 bp, Artificial Sequence
  ENSG00000115540_19 (sequence is synthesized)
gactttgaaattatggatttatattaatggcactataaaccaatggtaatggtaatttttaaacttgctaaatattgagaaactaaactactaagttaataaattatatatagcagtgta

SEQ ID NO: 210111 - DNA, 120 bp, Artificial Sequence
  ENSG00000115540_20 (sequence is synthesized)
gctgttctctctagatggtgtctcacaatggatttctgttgcttgactattttcttagtgaatatttatactaaggtagtgactgagatttggtgatctggctgagtattttgaaacaca

SEQ ID NO: 210112 - DNA, 120 bp, Artificial Sequence
  ENSG00000115540_21 (sequence is synthesized)
ttttgaataatatggcttagtgttaacggggacttaaatatgatttttttttcttactcatttcaccttccctgtactgtatgtttggaattgatcataaaacatctccaaaagaaaata

SEQ ID NO: 210113 - DNA, 120 bp, Artificial Sequence
  ENSG00000115540_22 (sequence is synthesized)
atcagtttgtagtcttgcttttgtattcatgttgataatcttactaattgtgaagttgattcactactatactaggtaagacctaagtgaaacagttcctgtttttccttaatactgttt

SEQ ID NO: 210114 - DNA, 120 bp, Artificial Sequence
  ENSG00000115540_23 (sequence is synthesized)
tcagaattttgaaaatgtacttatatatacataaatactactaaaaaattaatgagcctggcaaaccattgatttataaaagtaagtgttctaagaggggaacaagacagttctgtgtga

SEQ ID NO: 210115 - DNA, 120 bp, Artificial Sequence
  ENSG00000115540_24 (sequence is synthesized)
taaggaagttaggctccactttttgtttgaattaccctatgtatatccgaaggtaaacttaggcttttctttccaaaagatcgtatagtcaattcattctttttctcctatcacatctgg

SEQ ID NO: 210116 - DNA, 120 bp, Artificial Sequence
  ENSG00000115540_25 (sequence is synthesized)
gaaagtagctaacttttaactatttatgttcccataagtaacccttcttttgtgtgtatacatttccttttctctgacttgagatgtcaaatttggatttctagaacagtttctcagtta

SEQ ID NO: 210117 - DNA, 120 bp, Artificial Sequence
  ENSG00000115540_26 (sequence is synthesized)
tgtcaaatttggatttctagaacagtttctcagttaaattcttgatgacttaacaacttttactatcagaatacaattagaaatccttggtcaggcacaggggctcacgcctgtaatccc

SEQ ID NO: 210118 - DNA, 120 bp, Artificial Sequence
  ENSG00000115540_27 (sequence is synthesized)
cgtgccattgcactccagcctgggtaacgagcaaaactccgtctcaaaaactccgtctcaaaaaaaaaaaatccttgattacattgttagtaaggactgtgttacgattataaacacatt

SEQ ID NO: 210119 - DNA, 120 bp, Artificial Sequence
  ENSG00000115540_28 (sequence is synthesized)
aggactgtgttacgattataaacacatttattggttgatgtcaaattcactgtaatagtagaactaagttttttatgtgagtactttgccctactgtctatatgatgacatcttttttga

SEQ ID NO: 210120 - DNA, 120 bp, Artificial Sequence
  ENSG00000115540_29 (sequence is synthesized)
gcagctaaattttaaattgtatatactttattttgtgaatccttgttgaatgtgctaaaggtttctttgtgtagttcttccatgctatgcgaatattttagtaaaagtagttgattttta

SEQ ID NO: 210121 - DNA, 120 bp, Artificial Sequence
  ENSG00000115540_30 (sequence is synthesized)
acttttcttgtcgggcaactaggtgccgagcagtgctgcgcccggaagctggccgccactgcggggaggttgggccgaggcggcaggcgggcgggctggggcactggtgcccggcctgct

SEQ ID NO: 210122 - DNA, 120 bp, Artificial Sequence
  ENSG00000115540_31 (sequence is synthesized)
cgcaggttctatagaatttgccaagactgctggcctgttttctaccctgattccttaggtggcttctgggacagaattacggttctctaagtatttgcttgcagtatattcaacagaaca

SEQ ID NO: 210123 - DNA, 120 bp, Artificial Sequence
  ENSG00000115540_32 (sequence is synthesized)
gtcgatttcacgcaggttctatagaatttgccaagactgctggcctgttttctaccctgattccttaggtggcttctgggacagaattacggttctctaagtatttgcttgcaggatttc

SEQ ID NO: 210124 - DNA, 120 bp, Artificial Sequence
  ENSG00000115541_0 (sequence is synthesized)
gcgagtctctttgcggcgctacactagagcagagtacgagtctgaggcggagggagtaatggcaggacaagcgtttagaaagtttcttccactctttgaccgagtattggttgaaaggag

SEQ ID NO: 210125 - DNA, 120 bp, Artificial Sequence
  ENSG00000115541_1 (sequence is synthesized)
tgctgctgaaactgtaaccaaaggaggcattatgcttccagaaaaatctcaaggaaaagtattgcaagcaacagtagtcgctgttggatcgggttctaaaggaaagggtggagagattca

SEQ ID NO: 210126 - DNA, 120 bp, Artificial Sequence
  ENSG00000115541_2 (sequence is synthesized)
attatttcctatttagagatggtgacattcttggaaagtacgtagactgaaataagtcactattgaaatggcatcaacatgatgctgcccattccactgaagttctgaaatctttcgtca

SEQ ID NO: 210127 - DNA, 120 bp, Artificial Sequence
  ENSG00000115541_3 (sequence is synthesized)
tgtaaataatttccatatttctcttttataataaactaatgataactaatgacatccagtgtctccaaaattgtttccttgtactgatataaacacttccaaataaaaatatgtaaatga

SEQ ID NO: 210128 - DNA, 120 bp, Artificial Sequence
  ENSG00000115541_4 (sequence is synthesized)
cagacgtaaggaatcgggaattaaacttggaatattggttagtacattcaaatgcgcttccttaacgaataagctgaggtttggtgttaactttcaaagccaaaacgtgttgagatgtat

SEQ ID NO: 210129 - DNA, 120 bp, Artificial Sequence
  ENSG00000115541_5 (sequence is synthesized)
agcacggtggcgttgcctgttgataatgtgattacatttagtttttgtttcaaaacatttctcttcctacaggcaggacaagcgtttagaaagtttcttccactctttgaccgagtattg

SEQ ID NO: 210130 - DNA, 120 bp, Artificial Sequence
  ENSG00000115541_6 (sequence is synthesized)
aaagtcgcttattaagtagagtttatgtcgttttcaagatcattaactgctttggttctaatctgtttcttaaagggaaatgactaatataaagttgcttattttatatgaccaatgcta

SEQ ID NO: 210131 - DNA, 120 bp, Artificial Sequence
  ENSG00000115541_7 (sequence is synthesized)
gcttattttatatgaccaatgctatgatgcttattttatgtgatagtttcagagtattaaaaattgtcctcaataggccgggtgcggtggctctcgcctgtaatctcagcactttgggag

SEQ ID NO: 210132 - DNA, 120 bp, Artificial Sequence
  ENSG00000115541_8 (sequence is synthesized)
tggtgagtcccgcgtggccccgaggcctgcaggcccgggcctgtctgaggcgtacggggatccctgacgcccctcttttgttgggctgggcgggagggattggtggccactcagtgacca

SEQ ID NO: 210133 - DNA, 120 bp, Artificial Sequence
  ENSG00000115541_9 (sequence is synthesized)
gcgcccgatggcaccttggagcggcaaggcccgcccgacccttttctcccccagggctctttgcacgcgcgtgtgctgccggtgtgtaaggcaggggggcgagaacccgggcgcacgcgc

SEQ ID NO: 210134 - DNA, 120 bp, Artificial Sequence
  ENSG00000115541_10 (sequence is synthesized)
catggtgccaggcagggagcttgacccagcgtttcctgaaaatttctggaaaaacctgaagaaggaaaacatttgaccttggaataaactaaggttgaccttaaagctggtctggttgct

SEQ ID NO: 210135 - DNA, 120 bp, Artificial Sequence
  ENSG00000115541_11 (sequence is synthesized)
caccggaggagcgacaacgacccctaacagacgtaaggaatcgggaattaaacttggaatattggcaggacaagcgtttagaaagtttcttccactctttgaccgagtattggttgaaag

SEQ ID NO: 210136 - DNA, 120 bp, Artificial Sequence
  ENSG00000115541_12 (sequence is synthesized)
cgaaggggtagttctttcacctcggctgggcgcctagaaaagcctagaaacagctccttttttcttccgcctccgagtcttcgcgtcagcgtcctgcgcagggcccttggggcgaatcgc

SEQ ID NO: 210137 - DNA, 120 bp, Artificial Sequence
  ENSG00000115541_13 (sequence is synthesized)
tgcgagtctctttgcggcgctacactagagcagagtacgagtctgaggcggagggagtaatgggtggagagattcaaccagttagcgtgaaagttggagataaagttcttctcccagaat

SEQ ID NO: 210138 - DNA, 120 bp, Artificial Sequence
  ENSG00000115548_0 (sequence is synthesized)
aagtcagcgctggagtcggctaggcggctggaaacggcggctgccgccggtgactcagggaggcgggaggcgggggaggagctcttcctgcaggcgtggaaaccatggtgctcacgctcg

SEQ ID NO: 210139 - DNA, 120 bp, Artificial Sequence
  ENSG00000115548_1 (sequence is synthesized)
gagaaagttggccggtattggtggggaggaggtttctcagtctgtccgcagccgacggcagcgatggcagccacgacagctgggacgtggagcgcgtcgccgagtggccctggctctccg

SEQ ID NO: 210140 - DNA, 120 bp, Artificial Sequence
  ENSG00000115548_2 (sequence is synthesized)
ggaccattcgagctgtttcccacaccgacgttaccaagaaggatctgaaggtgtgtgtggaatttgatggggaatcttggaggaaaagaagatggatagaagtctacagccttctaagga

SEQ ID NO: 210141 - DNA, 120 bp, Artificial Sequence
  ENSG00000115548_3 (sequence is synthesized)
gagcatttttagtagaacataatttggttttagctgaacgaaagtcacctgaaatttctgaacgaattgtacagtggcctgcaataacgtacaaacctctgttggacaaagctggtttgg

SEQ ID NO: 210142 - DNA, 120 bp, Artificial Sequence
  ENSG00000115548_4 (sequence is synthesized)
gatccataacttctgttcgctttctgggagatcaacaaagagtatttctttctaaagaccttttgaagcctatacaggatgtaaacagtcttcgactttctcttacggataatcagattg

SEQ ID NO: 210143 - DNA, 120 bp, Artificial Sequence
  ENSG00000115548_5 (sequence is synthesized)
tcagtaaagaatttcaagctttgattgtgaagcatttagatgaaagccatcttttaaaaggtgacaaaaacttagttggttcagaagtaaaaatttatagcttggacccatctactcagt

SEQ ID NO: 210144 - DNA, 120 bp, Artificial Sequence
  ENSG00000115548_6 (sequence is synthesized)
ggttttcagcaaccgttataaatggaaacccagcatcaaaaactcttcaagtcaactgtgaggagattccagcactgaaaattgttgatccgtcactgattcatgttgaagttgtacacg

SEQ ID NO: 210145 - DNA, 120 bp, Artificial Sequence
  ENSG00000115548_7 (sequence is synthesized)
ataaccttgtgacatgtggtaattctgcaagaattggagctgtaaaacgcaagtcttctgagaataatggaaccctggtttccaaacaagcaaaatcttgctctgaggcctctcccagta

SEQ ID NO: 210146 - DNA, 120 bp, Artificial Sequence
  ENSG00000115548_8 (sequence is synthesized)
tgtgtcctgtgcagtctgtacctacaacagtttttaaggagatactgcttggctgtactgcggcaactccacctagtaaggacccaagacagcaaagtactccccaggctgccaactctc

SEQ ID NO: 210147 - DNA, 120 bp, Artificial Sequence
  ENSG00000115548_9 (sequence is synthesized)
cacctaaccttggagcaaaaattcctcaaggatgtcataaacaaagtttaccagaggaaatttcttcctgtctaaatacaaagtctgaagctctgagaacaaaaccagatgtctgcaaag

SEQ ID NO: 210148 - DNA, 120 bp, Artificial Sequence
  ENSG00000115548_10 (sequence is synthesized)
cagggttgctctcaaagtcctctcagattggaactggagacttgaaaattctgactgagccaaaaggcagctgtactcagcctaagacaaacactgatcaggaaaacagattggagtctg

SEQ ID NO: 210149 - DNA, 120 bp, Artificial Sequence
  ENSG00000115548_11 (sequence is synthesized)
ttccacaagcattgactggccttcctaaggagtgcttacctacaaaggcttcttctaaggcagaattggaaattgccaatcctcctgaactgcagaagcacctagaacatgcaccttccc

SEQ ID NO: 210150 - DNA, 120 bp, Artificial Sequence
  ENSG00000115548_12 (sequence is synthesized)
catcggatgtttcaaatgcaccagaagtgaaagcaggtgtcaatagtgatagccctaataactgttcaggaaaaaaggtagaaccttcagctttagcttgccgatcacagaatttaaagg

SEQ ID NO: 210151 - DNA, 120 bp, Artificial Sequence
  ENSG00000115548_13 (sequence is synthesized)
aatcttcagtaaaagtagataatgaaagctgttgttcaagaagcaacaataaaatccagaatgccccatccaggaagtcggttttgacagacccagctaaactcaaaaagctgcaacaga

SEQ ID NO: 210152 - DNA, 120 bp, Artificial Sequence
  ENSG00000115548_14 (sequence is synthesized)
gtggcgaggccttcgtacaggatgattcttgtgtgaacatcgtggcacagttgcctaaatgccgagagtgtcgcttggacagtctccgcaaggataaggagcaacagaaggactcacctg

SEQ ID NO: 210153 - DNA, 120 bp, Artificial Sequence
  ENSG00000115548_15 (sequence is synthesized)
tgttttgccgcttctttcacttcaggaggttacaattcaacaaacatggtgtgttgcgggtagaaggcttcttaacaccaaacaagtatgacaatgaagcaattggcttgtggttacctt

SEQ ID NO: 210154 - DNA, 120 bp, Artificial Sequence
  ENSG00000115548_16 (sequence is synthesized)
taaccaaaaacgttgtggggattgatttggacacagcaaagtacatcttggccaacattggagaccacttctgtcaaatggtgatttctgaaaaggaagctatgtcaactattgagccac

SEQ ID NO: 210155 - DNA, 120 bp, Artificial Sequence
  ENSG00000115548_17 (sequence is synthesized)
acagacaggttgcttggaagcgagctgtcaaaggtgttcgagaaatgtgtgatgtgtgcgacaccaccatcttcaacctgcactgggtgtgtcctcggtgtgggtttggagtatgtgtgg

SEQ ID NO: 210156 - DNA, 120 bp, Artificial Sequence
  ENSG00000115548_18 (sequence is synthesized)
actgctaccggatgaagagaaagaattgccaacagggtgctgcttacaagactttctcttggctaaaatgtgtgaagagtcagatacatgaaccagagaacttaatgcccacacagatca

SEQ ID NO: 210157 - DNA, 120 bp, Artificial Sequence
  ENSG00000115548_19 (sequence is synthesized)
tcaaagccagcctcaaaggaagacctaaaacagacttctttagctggagaaaaaccgactcttggtgcagtgctccagcagaatccctcagtgttggagccagcagctgtgggtggggaa

SEQ ID NO: 210158 - DNA, 120 bp, Artificial Sequence
  ENSG00000115548_20 (sequence is synthesized)
gcagcctccaagccagccggcagcatgaagcctgcctgtccagccagcacatctcctctaaactggctggccgacctaaccagcgggaatgtcaacaaggaaaacaaggaaaaacaacca

SEQ ID NO: 210159 - DNA, 120 bp, Artificial Sequence
  ENSG00000115548_21 (sequence is synthesized)
acaatgccaattttaaagaatgaaatcaaatgccttccacccctcccacctttaagcaaatccagcacagtcctccatacgtttaacagcacaattttgacacccgtaagcaacaacaat

SEQ ID NO: 210160 - DNA, 120 bp, Artificial Sequence
  ENSG00000115548_22 (sequence is synthesized)
tctggtttcctccggaatctcttgaattcttctacaggaaagacagaaaatggactcaagaatacaccaaaaatccttgatgacatctttgcctctttggtgcaaaataagacgacttct

SEQ ID NO: 210161 - DNA, 120 bp, Artificial Sequence
  ENSG00000115548_23 (sequence is synthesized)
gatttatctaagaggcctcaaggactaaccatcaagcccagcattctgggctttgacactcctcactattggctttgtgataatcgcttgctgtgcttgcaagaccccaacaataagagc

SEQ ID NO: 210162 - DNA, 120 bp, Artificial Sequence
  ENSG00000115548_24 (sequence is synthesized)
aactggaatgtgtttagggagtgctggaaacaagggcagccagtgatggtgtctggagtgcatcataaattgaactctgaactttggaaacctgaatccttcaggaaagagtttggtgag

SEQ ID NO: 210163 - DNA, 120 bp, Artificial Sequence
  ENSG00000115548_25 (sequence is synthesized)
caggaagtagacctagttaattgtaggaccaatgaaatcatcacaggagccacagtaggagacttctgggatggatttgaagatgttccaaatcgtttgaaaaatgaaaaagaaccaatg

SEQ ID NO: 210164 - DNA, 120 bp, Artificial Sequence
  ENSG00000115548_26 (sequence is synthesized)
gtgttgaaacttaaggactggccaccaggagaagattttagagatatgatgccttccaggtttgatgatctgatggccaacattccactgcccgagtacacaaggcgagatggcaaactg

SEQ ID NO: 210165 - DNA, 120 bp, Artificial Sequence
  ENSG00000115548_27 (sequence is synthesized)
aatttggcctctaggctgccaaactactttgttcggccagatctgggccccaagatgtataatgcttatggattaatcactcctgaagatcggaaatatggaacaacaaatcttcactta

SEQ ID NO: 210166 - DNA, 120 bp, Artificial Sequence
  ENSG00000115548_28 (sequence is synthesized)
gatgtatctgatgcagctaatgtcatggtctatgtgggaattcccaaaggacagtgtgagcaagaagaagaagtccttaagaccatccaagatggagattctgacgaactcacaataaag

SEQ ID NO: 210167 - DNA, 120 bp, Artificial Sequence
  ENSG00000115548_29 (sequence is synthesized)
cgatttattgaaggaaaagagaagccaggagcactgtggcacatatatgctgcaaaggacacggagaagataagggaatttcttaaaaaggtatcagaagagcaaggtcaagaaaaccca

SEQ ID NO: 210168 - DNA, 120 bp, Artificial Sequence
  ENSG00000115548_30 (sequence is synthesized)
gcagaccacgatcctattcatgatcaaagctggtatttagaccgatcattaagaaaacgtcttcatcaagagtatggagttcaaggctgggctattgtacagtttcttggggatgtggtg

SEQ ID NO: 210169 - DNA, 120 bp, Artificial Sequence
  ENSG00000115548_31 (sequence is synthesized)
tttatcccggcaggagctccacatcaggttcataacttatatagctgcatcaaagtggctgaagattttgtttctccagagcatgttaaacactgcttctggcttactcaggaattccga

SEQ ID NO: 210170 - DNA, 120 bp, Artificial Sequence
  ENSG00000115548_32 (sequence is synthesized)
tatctgtcacagactcataccaatcacgaagataaattacaggtgaagaatgttatctaccatgcagtgaaagatgcagttgctatgctgaaagccagtgaatccagttttggcaaacct

SEQ ID NO: 210171 - DNA, 120 bp, Artificial Sequence
  ENSG00000115548_33 (sequence is synthesized)
taatctccctgcacattggaaatgaattacaggcagctgttcaaactcttcaggcaggattcctgtggactttgagattcatgttacctcatcttcttttttaaactgtacccaacttgt

SEQ ID NO: 210172 - DNA, 120 bp, Artificial Sequence
  ENSG00000115548_34 (sequence is synthesized)
gagggtactctgtctaatgtatatttctagtgtttacagacagtaaatgtgtatatgtagtaactatttacagaacatgcatccttaaactgtgacttctcacctagtgcagaactttta

SEQ ID NO: 210173 - DNA, 120 bp, Artificial Sequence
  ENSG00000115548_35 (sequence is synthesized)
ccaggctgtaaaagcaaaacctcgtatcagctctggaacaatacctgcagttattcttcagctgtttggacaacttagattgggtttataactattaggaatcactgcacagtttatttg

SEQ ID NO: 210174 - DNA, 120 bp, Artificial Sequence
  ENSG00000115548_36 (sequence is synthesized)
ggttgtgttttgtgtctgagtcccctccctcatcccttagggtccagaagagcaatggaggaagtgacagctaatgttgcagttcttattgtatggcataggactggcattatatagcag

SEQ ID NO: 210175 - DNA, 120 bp, Artificial Sequence
  ENSG00000115548_37 (sequence is synthesized)
aaatcaactactgtacaatttcttggggttaaccatctttagttaaatggaattttaatttaaatgacgctttgctaattttaagtgttaagcattttgcattaaaatattcatataata

SEQ ID NO: 210176 - DNA, 120 bp, Artificial Sequence
  ENSG00000115548_38 (sequence is synthesized)
actatcgctcctccctctagctgagtacgcctgaaaccgcacgttctcttccctgccctcccccgctaaccctgcaccgccctcaccctttcctgtgagattcttccgccaagtggaagg

SEQ ID NO: 210177 - DNA, 120 bp, Artificial Sequence
  ENSG00000115548_39 (sequence is synthesized)
ctcatcttcggtcgacagcctacgcggttgaagaacaatccacctcgcccagctcctgtgtttcagccaatgagcggcggaagcggctccgaggggggcgggtccgggaggctgtgcgtg

SEQ ID NO: 210178 - DNA, 120 bp, Artificial Sequence
  ENSG00000115548_40 (sequence is synthesized)
ttttttgcaataatttgatccagaatttttattctcagcagaagagtcaatcagggacctaccatcccccaggtaggtagtggaaagactgtggcagcctttgttgtcttttgtaaaact

SEQ ID NO: 210179 - DNA, 120 bp, Artificial Sequence
  ENSG00000115548_41 (sequence is synthesized)
agacccggtgggcacaaggcctcttgcctgttcctcacttctcaggtctctgttggtgagtcctccatgtgctgtgggtctgcagtgtgctctctcgaggtcctgtccctcgagcccctc

SEQ ID NO: 210180 - DNA, 120 bp, Artificial Sequence
  ENSG00000115548_42 (sequence is synthesized)
agagactgattaaagcagctgcatggttgggatcttgggcaaacttaagtatataagagcatttttccaataaattgtatagtttatccatgctttatagaaatcctgaagctttaaagg

SEQ ID NO: 210181 - DNA, 120 bp, Artificial Sequence
  ENSG00000115548_43 (sequence is synthesized)
tgggtatctgagaaattttcaaaagaattgcttgcgtggtttaactagcttggcagcgggtctttccccctagacactaatagatggcagtgttactctataaaagcttttcctatgaca

SEQ ID NO: 210182 - DNA, 120 bp, Artificial Sequence
  ENSG00000115548_44 (sequence is synthesized)
aaatggttcccatccagaagcaagcattcagaaggatgaaaataatgatgtgttcattttcaaacaccttatatcttattgtaaacatcattaaagagtggtcttttcaaaggttgtgtg

SEQ ID NO: 210183 - DNA, 120 bp, Artificial Sequence
  ENSG00000115548_45 (sequence is synthesized)
attgagctgtgactcttccatgagagtaagtgcaaaggctctttggagagatcatataatccagcctctcttcagttcctgcaacaccccccattttgcaaatgaggaccaggacttgcg

SEQ ID NO: 210184 - DNA, 120 bp, Artificial Sequence
  ENSG00000115548_46 (sequence is synthesized)
gacagtagaaggggcattgacttgttcaggatctccaaggggcagctagtggcaggtctgaaactagtacttagatctcctgatttccaagctagagcccatttccctactcttccccca

SEQ ID NO: 210185 - DNA, 120 bp, Artificial Sequence
  ENSG00000115548_47 (sequence is synthesized)
ctcttaactccccatcacccaacagcccctactgtttcagctttttttcccccttaaaagtccatggtgttttgtttcaggatgttttgttgtctagcactcctttccctttgaccatta

SEQ ID NO: 210186 - DNA, 120 bp, Artificial Sequence
  ENSG00000115548_48 (sequence is synthesized)
tgtttttacaattttggtttcatctcagtttaccatggtttagagtctggttttatcaatgtacagttacccatgactgggatccagtggactttgggccagtggctgggcagcagttat

SEQ ID NO: 210187 - DNA, 120 bp, Artificial Sequence
  ENSG00000115548_49 (sequence is synthesized)
ttccttgctcgttttgcactgtggcactggctggatcagcaggcagccagtcctgctgaggctttgcctcctagtctcctttccttacttttcttgccagctccatcctcttcctattgc

SEQ ID NO: 210188 - DNA, 120 bp, Artificial Sequence
  ENSG00000115548_50 (sequence is synthesized)
ccttagtctaaccaccatcttcaagtttgtgtttatcgtttgcttatatttacaattttaacatatatatttgtattcctgcacaatattctttcagtttttagcctgcttttgaacttc

SEQ ID NO: 210189 - DNA, 120 bp, Artificial Sequence
  ENSG00000115548_51 (sequence is synthesized)
atataaatagaatcagattttttatattcatccatgctgtcatatatcatccatgtgttcatttcattcattttatttctattacattaattgcttttttctgaaattttgctttttact

SEQ ID NO: 210190 - DNA, 120 bp, Artificial Sequence
  ENSG00000115548_52 (sequence is synthesized)
atggaactatttttcaaatacagtgaaaacttgagagtctggtagtgactccatataactcatcacccagttatataacagcttttaactttttgccataatcgtttcattgtcttctct

SEQ ID NO: 210191 - DNA, 120 bp, Artificial Sequence
  ENSG00000115548_53 (sequence is synthesized)
ctttatgttttttcatcatcctctcaactatcctatgatttcaccctaataccaaacgctttacctactcccaggactgatatttcagcaagctggaaagaaaggaaagtacaacagggc

SEQ ID NO: 210192 - DNA, 120 bp, Artificial Sequence
  ENSG00000115548_54 (sequence is synthesized)
tctgggggccctggtcccaagctggagtgaagaaatgtgccctctcaaaagtatagcccctctaaaaccaaagccccaggcaagccagagataaagccttcctccaaaacagtattatgg

SEQ ID NO: 210193 - DNA, 120 bp, Artificial Sequence
  ENSG00000115548_55 (sequence is synthesized)
ggcgttttcagaggctggcaggttagaaaacagccgctgcttgctcactacaagctgtgcttctccctactgcccagtctaagaagcagagtcctggtgttacaatgggttgcccaaagt

SEQ ID NO: 210194 - DNA, 120 bp, Artificial Sequence
  ENSG00000115548_56 (sequence is synthesized)
gactgcagggtaagcttcaggatgattgttgagcaaggtgagctttctcctgtgagcaaggaattagccacagactgaacactgtgggggacctgtctttctggctcactcctcacccct

SEQ ID NO: 210195 - DNA, 120 bp, Artificial Sequence
  ENSG00000115548_57 (sequence is synthesized)
cctcttttacagttgagagaaccaaggaatgcgttgggcagtattccttcttatactcatgatagccatttgacgttccaggtttatgtgtgtgtgtgggtgggtgctttcccttggact

SEQ ID NO: 210196 - DNA, 120 bp, Artificial Sequence
  ENSG00000115548_58 (sequence is synthesized)
ccccatctcgagtggtccttgggctttgtctcttgccccagaactcctaggctgtggcaacaatcaaagcctgagctcacttgatctagcagatgtccttttggcaaatcccagcttcgg

SEQ ID NO: 210197 - DNA, 120 bp, Artificial Sequence
  ENSG00000115548_59 (sequence is synthesized)
taaaaatagcaccaattcctagcattctttggctatggctatggcttcatggcccattcttcaccttataaagagagtcagtgaacttggccatatcgtacttagtacacagtgagtcga

SEQ ID NO: 210198 - DNA, 120 bp, Artificial Sequence
  ENSG00000115548_60 (sequence is synthesized)
ggaacttgctttatatctagtactactatctacttaagtgagggaggaacaagaggaaatctcaccttggtttgatttgatattgtttagaatctataagggactgtccccacagagaaa

SEQ ID NO: 210199 - DNA, 120 bp, Artificial Sequence
  ENSG00000115548_61 (sequence is synthesized)
ggccttagtactgaaaatgaatagatgtgacttctgatcttggcccagctgcctgtcggggtcttgaacacagtgcttaaccttcagtgctgcagtgttctcatcactcttaggtagagc

SEQ ID NO: 210200 - DNA, 120 bp, Artificial Sequence
  ENSG00000115548_62 (sequence is synthesized)
agaactgaatctctgagactcaaagaggtctgagggggtggtattttcaaaaggatttcagtaatgaattatgtaacataatttcatgtttggaaaataagggaaaaatgataaaagctg

SEQ ID NO: 210201 - DNA, 120 bp, Artificial Sequence
  ENSG00000115548_63 (sequence is synthesized)
taccttggaacttgcctctccctgtactcactgtgagtaggtctacgtggtatcaaaacctctaaaagggggaaaatgagttcttgaaatcatgggtttaaaatgtatgtgaaatactgg

SEQ ID NO: 210202 - DNA, 120 bp, Artificial Sequence
  ENSG00000115548_64 (sequence is synthesized)
tctgaaggagcccagggaccttttgcaatgttgacatttcatacgaatattgaattttaaattctgagagaaggtaataaaattagtaggaggaagcttattcttagtgacaggttttag

SEQ ID NO: 210203 - DNA, 120 bp, Artificial Sequence
  ENSG00000115548_65 (sequence is synthesized)
agaagatatttccaccctgcctagtagatgtgtttcagaatcttcacttggccatcatctttgctttttcttaaactatgttcaaataaaggcagcaagttttagcattggcagttgatt

SEQ ID NO: 210204 - DNA, 120 bp, Artificial Sequence
  ENSG00000115548_66 (sequence is synthesized)
ggaaaggggtatgctgttaggcatgttttaaagcttcagtgttgtgccttgtctcttgttgaaaaggaggagtgaccgaagagcatttaaccatgtggcaagcacttcacaactatgatc

SEQ ID NO: 210205 - DNA, 120 bp, Artificial Sequence
  ENSG00000115548_67 (sequence is synthesized)
tcgtttaatccttacagcagttcttgggggtgtgtgtggaatttgatggggaatcttggaggaaaagaagatggatagaagtctacagccttctaaggagagcatttttagtagaacata

SEQ ID NO: 210206 - DNA, 120 bp, Artificial Sequence
  ENSG00000115548_68 (sequence is synthesized)
agcataaaaggagggcttactctttgagccagggcttgtggtctgatatctgctttctcttcttgctctagaagtccttaagaccatccaagatggagattctgacgaactcacaataaa

SEQ ID NO: 210207 - DNA, 120 bp, Artificial Sequence
  ENSG00000115548_69 (sequence is synthesized)
atcaaaaactcttcaagtcaactgtgaggaggtaaagacaacaataactctttgtaagataactcgacaaagcatgataactatacaaagcatttatgattttctaggcactaaatacct

SEQ ID NO: 210208 - DNA, 120 bp, Artificial Sequence
  ENSG00000115548_70 (sequence is synthesized)
attatccagtaactccacgcctttcttcatttatccttcaaaatggcggactttagacgttccacgatcagtaccacgtgcgcctgcgcctcccgcagccatttcgcccagcagcctaag

SEQ ID NO: 210209 - DNA, 120 bp, Artificial Sequence
  ENSG00000115548_71 (sequence is synthesized)
cggatgaagagaaagaattgccaacagggtgagaaccgatttgattctcctccagcccctctacacagttaaatcaagtgtttttgttgatttgtgtttggcgggtttcttgaagcatgt

SEQ ID NO: 210210 - DNA, 120 bp, Artificial Sequence
  ENSG00000115548_72 (sequence is synthesized)
caaagccagcctcaaaggaagacctaaaacaggtatttactgcttatgttaaattcaacatctcttgtaattgtcatttgtctgtttttcaaataacccaaggatttctatcagtgcatt

SEQ ID NO: 210211 - DNA, 120 bp, Artificial Sequence
  ENSG00000115548_73 (sequence is synthesized)
tgaaaggaacctggggatagctatcaagtggaaagagagagagaaagaattcatacagttcatgtgacagttcagagacccgttctgacttttcacattactttcgtagactctactgtg

SEQ ID NO: 210212 - DNA, 120 bp, Artificial Sequence
  ENSG00000115548_74 (sequence is synthesized)
gcctcttgtagtaggttttacatttttgtttcttgaagaagcacaaagttctaaagtagtctacctaataagtagctgtcgaatttgtaaagggtttaaaaaaattttttgtgtattttg

SEQ ID NO: 210213 - DNA, 120 bp, Artificial Sequence
  ENSG00000115548_75 (sequence is synthesized)
cagaattaaaattattaagataagctttaacatttttaaaattactaaatatattttgcctgtgtttatgcagagttgaaggaaatgatgaaatgaacctttagttgcccatcacacaat

SEQ ID NO: 210214 - DNA, 120 bp, Artificial Sequence
  ENSG00000115548_76 (sequence is synthesized)
gtaaaaaatgttaattttctcagtcctcatatgtctctccttggtggcatccctctcctccccaccatcacatgtacgtcttgctgtcccttctccccctcgttccagtaatcagtatgc

SEQ ID NO: 210215 - DNA, 120 bp, Artificial Sequence
  ENSG00000115548_77 (sequence is synthesized)
cgcattgtgtttaataatcagaaatttacatttctataaagctgtggtgtcataaggcaggatgggagagcagaagacttgtaatatttggagtcagaactgaatttgagttcttttcct

SEQ ID NO: 210216 - DNA, 120 bp, Artificial Sequence
  ENSG00000115548_78 (sequence is synthesized)
tccacgtgctagttgtgttactttggctgaagtgagctggtttctatgtgcttcagcttcctcatcagtaatatagaaataagaagcaatattgatgattgggcatcacagaattacatc

SEQ ID NO: 210217 - DNA, 120 bp, Artificial Sequence
  ENSG00000115548_79 (sequence is synthesized)
acatgtaaagagagggcctggaccacaacaggggtttgaatattttttttcctccttcttatgtatgtataaactcactcttgccagtttttaaaattattttcttctacagcagtcatc

SEQ ID NO: 210218 - DNA, 120 bp, Artificial Sequence
  ENSG00000115548_80 (sequence is synthesized)
ttagatttaatttatgggttcttttaagagctcatcacatttttaaagctaagtcaaaatagcattttctctttctctgcatcccatttccttctgaaatcaccgctttacctttcctgc

SEQ ID NO: 210219 - DNA, 120 bp, Artificial Sequence
  ENSG00000115548_81 (sequence is synthesized)
ctgcgtcatttattcgtttttaaccatgttttctgtgcctatcctgaattctgggatgagttcataggggagacaggcacaaactggtcattttaaaccagcatggtacatagagtaata

SEQ ID NO: 210220 - DNA, 120 bp, Artificial Sequence
  ENSG00000115548_82 (sequence is synthesized)
gggatatgtaccagcaggggctggtgaaagggtgcggggggtaataccttgctgtgtttaagttgctgacatctctcctaccttttagttattctctactagtgcgggattactgcagct

SEQ ID NO: 210221 - DNA, 120 bp, Artificial Sequence
  ENSG00000115548_83 (sequence is synthesized)
gtggggatacccagggctaactattaggtggttttgttctggatatttatcttacttgttggtcggctattaggagagaagaaaagaaaaggaagctgtcattcttcagcttatgtaaaa

SEQ ID NO: 210222 - DNA, 120 bp, Artificial Sequence
  ENSG00000115548_84 (sequence is synthesized)
ccccaccccaggctttccccctccttcacctcctgttttattctttattgtttcaggtgaatataatcaggtcaggatgtggccatgggtcttactttttaaagcagatggtcctaagct

SEQ ID NO: 210223 - DNA, 120 bp, Artificial Sequence
  ENSG00000115548_85 (sequence is synthesized)
ggacttttccagtcaggtttttgttgcttcctaccagtccctgttgggtttttgacgagggcatccaggcttggtgattcctatggtaaacttcagcagaggaagtgagggtgtgactac

SEQ ID NO: 210224 - DNA, 120 bp, Artificial Sequence
  ENSG00000115548_86 (sequence is synthesized)
aggctgatgggatttgggagatcagacaaaatgtgctacaaaatcatgcacccctcttacctgaatgaaaagcctgtgctgaaggcagttctaggtgggctagggccgcgtggtgtcaca

SEQ ID NO: 210225 - DNA, 120 bp, Artificial Sequence
  ENSG00000115548_87 (sequence is synthesized)
tagtccccaggtgcctgcttcaaagggcagtgttgttggatcttaagtgccggttaatatctttaggagaatttctaggcctgcttctgtgctttcttgttttggttctgttttctggat

SEQ ID NO: 210226 - DNA, 120 bp, Artificial Sequence
  ENSG00000115548_88 (sequence is synthesized)
ctctggcttctctgtttggccagatagggtctttgctaaaggaacactctgctcttggacaagaatttgggagaattgccaaacagaaagatgtgagtgtttaaccaaaaataaatttcc

SEQ ID NO: 210227 - DNA, 120 bp, Artificial Sequence
  ENSG00000115548_89 (sequence is synthesized)
aaaatgtttttctccatccagtgtactaataggatttgctcatttaatcatatatagacaagaaacaaaatgatgggctgaatacagtttatcggcaggctttctttcttgcttgtcaat

SEQ ID NO: 210228 - DNA, 120 bp, Artificial Sequence
  ENSG00000115548_90 (sequence is synthesized)
attttaatgttagactatttcacataaaggttagagcttctgggttgtcttagacggccaaaagatttggcaccctcacacagccagtagtagtgaggggtgtcacaggccatattcctg

SEQ ID NO: 210229 - DNA, 120 bp, Artificial Sequence
  ENSG00000115548_91 (sequence is synthesized)
cttggcaataacaggctcaagtacggtggggtcagtcaccctgtttcactggtgactggtgtcactggacactccttccagcgcttgtcttcttcacagtccgtcttgctgtaagtaatg

SEQ ID NO: 210230 - DNA, 120 bp, Artificial Sequence
  ENSG00000115548_92 (sequence is synthesized)
agatcttactaggagaggtgatcctttctcctagatgcttacccatgtagtttgagagcaagggtgtgtagcagatgaatggtgaaggttggaggtgctttgggagctcagagaactaag

SEQ ID NO: 210231 - DNA, 120 bp, Artificial Sequence
  ENSG00000115548_93 (sequence is synthesized)
ccgaaactgtcacatcaccatctgagacggagcaccagctccatggaaatataccaatagcagtgtgaagagggactgccttcgggagtggggacagagctggcagagttcagactaaag

SEQ ID NO: 210232 - DNA, 120 bp, Artificial Sequence
  ENSG00000115548_94 (sequence is synthesized)
tatgttactacatgtggtgaactgactggcttggctaggggaattgtcacaacctgaaaagttaaatctgtacctgtcagattgaataggctgaaggtggttgctaaggaacaaggattc

SEQ ID NO: 210233 - DNA, 120 bp, Artificial Sequence
  ENSG00000115548_95 (sequence is synthesized)
taaatgattagggttacacttctaaaaaaagcaggccttgtcttttatgtctgtgttttgtgttagagtgcatttagagatttttgttctctgctttcaagttagaagttagttcatctg

SEQ ID NO: 210234 - DNA, 120 bp, Artificial Sequence
  ENSG00000115548_96 (sequence is synthesized)
atcatctcccagcatatatctgtttttattgccttgagaatctgagcacttcagacgttcatgtatccttggccctgagtgaccatgttctgagtgagttgctaagtttggttttgtcca

SEQ ID NO: 210235 - DNA, 120 bp, Artificial Sequence
  ENSG00000115548_97 (sequence is synthesized)
ctgtcatgtagcaagtggtcctacttgttactagcaagggttgcagggatttggaagattctaggtttcccctgtagttggcaggtttttttttcagcaagggctatgtgtggaaattct

SEQ ID NO: 210236 - DNA, 120 bp, Artificial Sequence
  ENSG00000115548_98 (sequence is synthesized)
aggcaactagaaagatgagtcgtgttcagttttaaaattgtttggcactgaggctgccggttgcaactcaggtgtctttggctgatattcttcagtcattcatgagtcttggatatgaac

SEQ ID NO: 210237 - DNA, 120 bp, Artificial Sequence
  ENSG00000115548_99 (sequence is synthesized)
attcgtaacctgttagctggccccaagtatgtctttaacaagcatttgtttgaatcaaagtgtttctggctaaggatcatttggctcttccagaaaaccggcttggtcaccatattgttc

SEQ ID NO: 210238 - DNA, 120 bp, Artificial Sequence
  ENSG00000115548_100 (sequence is synthesized)
ttttgatattgtcactctgagtctctgctttaccagttactggatcaaggataaacaagtctaatctgcagctgtctttgggactgtttcgtaagtcagattaagtaaaggcaggtttct

SEQ ID NO: 210239 - DNA, 120 bp, Artificial Sequence
  ENSG00000115548_101 (sequence is synthesized)
aataactttaaaacaagttcatttataaggatactgagcctacttatgtttaaaaatctagactaaaatattgtttaaatacagtatttacaaacttatgcagagcctgtcagtcatggt

SEQ ID NO: 210240 - DNA, 120 bp, Artificial Sequence
  ENSG00000115548_102 (sequence is synthesized)
ttatgggaactgacatcacattttcttcgtcattcttctgttggttcattcagctgaagtctttgatactactagtcgtcttctgccaatgggggcacttaagttgaagaaggcctgaca

SEQ ID NO: 210241 - DNA, 120 bp, Artificial Sequence
  ENSG00000115548_103 (sequence is synthesized)
tttatgaactgccaacactgtttagaggaaaaaaatggcttattgggccttagcatgttactgagttgcataatattttgaatgtattctaggtatcagaagagcaaggtcaagaaaacc

SEQ ID NO: 210242 - DNA, 120 bp, Artificial Sequence
  ENSG00000115548_104 (sequence is synthesized)
ggagaccagaaagttggcatatgatctgaaggtgcaggaagctagatcttgaaagtctttggaatggttgtatagagccgagttgtgtttggcccacagctcctggctgcctggctttaa

SEQ ID NO: 210243 - DNA, 120 bp, Artificial Sequence
  ENSG00000115548_105 (sequence is synthesized)
gggcctgtaagtgacgtttggagtcattaagaattgaaggtgtgtgtggaatttgatggggaatcttggaggaaaagaagatggatagaagtctacagccttctaaggagagcattttta

SEQ ID NO: 210244 - DNA, 120 bp, Artificial Sequence
  ENSG00000115556_0 (sequence is synthesized)
gtagaagaggggaggaaacaagccagtgcaaggggagcaaaagagaaaaggagccaggctgggcttcctgatcccacagcatcgcagagctcgggaggcacagctcacagacacaggaaa

SEQ ID NO: 210245 - DNA, 120 bp, Artificial Sequence
  ENSG00000115556_1 (sequence is synthesized)
cacaggactgctattctgctctcctgcccacggtgatctggtgccagctggtggaacagtgggtgatggcgtccctgctgcaagaccagctgaccactgatcaggacttgctgctgatgc

SEQ ID NO: 210246 - DNA, 120 bp, Artificial Sequence
  ENSG00000115556_2 (sequence is synthesized)
aggaaggcatgccgatgcgcaaggtgaggtccaaaagctggaagaagctaagatacttcagacttcagaatgacggcatgacagtctggcatgcacggcaggccaggggcagtgccaagc

SEQ ID NO: 210247 - DNA, 120 bp, Artificial Sequence
  ENSG00000115556_3 (sequence is synthesized)
ccagcttctcaatctctgatgtggagacaatacgtaatggccatgattccgagttgctgcgtagcctggcagaggagctccccctggagcagggcttcaccattgtcttccatggccgcc

SEQ ID NO: 210248 - DNA, 120 bp, Artificial Sequence
  ENSG00000115556_4 (sequence is synthesized)
gctccaacctggacctgatggccaacagtgttgaggaggcccagatatggatgcgagggctccagctgttggtggatcttgtcaccagcatggaccatcaggagcgcctggaccaatggc

SEQ ID NO: 210249 - DNA, 120 bp, Artificial Sequence
  ENSG00000115556_5 (sequence is synthesized)
tgagcgattggtttcaacgtggagacaaaaatcaggatggtaagatgagtttccaagaagttcagcggttattgcacctaatgaatgtggaaatggaccaagaatatgccttcagtcttt

SEQ ID NO: 210250 - DNA, 120 bp, Artificial Sequence
  ENSG00000115556_6 (sequence is synthesized)
ttcaggcagcagacacgtcccagtctggaaccctggaaggagaagaattcgtacagttctataaggcattgactaaacgtgctgaggtgcaggaactgtttgaaagtttttcagctgatg

SEQ ID NO: 210251 - DNA, 120 bp, Artificial Sequence
  ENSG00000115556_7 (sequence is synthesized)
ggcagaagctgactctgctggaatttttggatttcctccaagaggagcagaaggagagagactgcacctctgagcttgctctggaactcattgaccgctatgaaccttcagacagtggca

SEQ ID NO: 210252 - DNA, 120 bp, Artificial Sequence
  ENSG00000115556_8 (sequence is synthesized)
aactgcggcatgtgctgagtatggatggcttcctcagctacctctgctctaaggatggagacatcttcaacccagcctgcctccccatctatcaggatatgactcaacccctgaaccact

SEQ ID NO: 210253 - DNA, 120 bp, Artificial Sequence
  ENSG00000115556_9 (sequence is synthesized)
acttcatctgctcttctcataacacctacctagtgggggaccagctttgtggccagagcagcgtcgagggatatatacgggccctgaagcgggggtgccgctgcgtggaggtggatgtat

SEQ ID NO: 210254 - DNA, 120 bp, Artificial Sequence
  ENSG00000115556_10 (sequence is synthesized)
gggatggacctagcggggaacctgtcgtttaccacggacacaccctgacctcccgcatcctgttcaaagatgtcgtggccacagtagcacagtatgccttccagacatcagactacccag

SEQ ID NO: 210255 - DNA, 120 bp, Artificial Sequence
  ENSG00000115556_11 (sequence is synthesized)
ttggatggggtgctgcccactcagctgccctcgcctgaggagcttcggaggaagatcctggtgaaggggaagaagttaacacttgaggaagacctggaatatgaggaagaggaagcagaa

SEQ ID NO: 210256 - DNA, 120 bp, Artificial Sequence
  ENSG00000115556_12 (sequence is synthesized)
cctgagttggaagagtcagaattggcgctggagtcccagtttgagactgagcctgagccccaggagcagaaccttcagaataaggacaaaaagaagaaatccaagcccatcttgtgtcca

SEQ ID NO: 210257 - DNA, 120 bp, Artificial Sequence
  ENSG00000115556_13 (sequence is synthesized)
gccctctcttccctggttatctacttgaagtctgtctcattccgcagcttcacacattcaaaggagcactaccacttctacgagatatcatctttctctgaaaccaaggccaagcgcctc

SEQ ID NO: 210258 - DNA, 120 bp, Artificial Sequence
  ENSG00000115556_14 (sequence is synthesized)
atcaaggaggctggcaatgagtttgtgcagcacaatacttggcagttaagccgtgtgtatcccagcggcctgaggacagactcttccaactacaacccccaggaactctggaatgcaggc

SEQ ID NO: 210259 - DNA, 120 bp, Artificial Sequence
  ENSG00000115556_15 (sequence is synthesized)
tgccagatggtggccatgaatatgcagactgcagggcttgaaatggacatctgtgatgggcatttccgccagaatggcggctgtggctatgtgctgaagccagacttcctgcgtgatatc

SEQ ID NO: 210260 - DNA, 120 bp, Artificial Sequence
  ENSG00000115556_16 (sequence is synthesized)
cagagttctttccaccctgagaagcccatcagccctttcaaagcccagactctcttaatccaggtgatcagcggtcagcaactccccaaagtggacaagaccaaagaggggtccattgtg

SEQ ID NO: 210261 - DNA, 120 bp, Artificial Sequence
  ENSG00000115556_17 (sequence is synthesized)
gatccactggtgaaagtgcagatctttggcgttcgtctagacacagcacggcaggagaccaactatgtggagaacaatggttttaatccatactgggggcagacactatgtttccgggtg

SEQ ID NO: 210262 - DNA, 120 bp, Artificial Sequence
  ENSG00000115556_18 (sequence is synthesized)
ctggtgcctgaacttgccatgctgcgttttgtggtaatggattatgactggaaatcccgaaatgactttattggtcagtacaccctgccttggacctgcatgcaacaaggttaccgccac

SEQ ID NO: 210263 - DNA, 120 bp, Artificial Sequence
  ENSG00000115556_19 (sequence is synthesized)
attcacctgctgtccaaagatggcatcagcctccgcccagcttccatctttgtgtatatctgcatccaggaaggcctggagggggatgagtcctgaggttgcaactagaaattcagaggg

SEQ ID NO: 210264 - DNA, 120 bp, Artificial Sequence
  ENSG00000115556_20 (sequence is synthesized)
gcttggaatagagaaacctaaagaagcatcatcccctccatccccaacttcctcaaagcccaaagccaagggaaggataaatcaaggctcaaggcttccccagcaaagattagggaaaga

SEQ ID NO: 210265 - DNA, 120 bp, Artificial Sequence
  ENSG00000115556_21 (sequence is synthesized)
gacttgaccccaggactgtactacgactcttaagagaacactgcacagcactcaaagtcccccactggactgcttcctccttagccccactggtataaatacatctctctccaatttggc

SEQ ID NO: 210266 - DNA, 120 bp, Artificial Sequence
  ENSG00000115556_22 (sequence is synthesized)
gaggtgggcatttcacgggaagggttggtgtgctggctttagacggggagaaacatctggaaggatgctcgagagaacaaatggaggtggtgaaaatcaagctttggattgtgcattcct

SEQ ID NO: 210267 - DNA, 120 bp, Artificial Sequence
  ENSG00000115556_23 (sequence is synthesized)
aggcacaaaattacctcattcttcctaacaagcaatctgggacctgattttccaccttttttctcttttcttcccttcctttgttttcataagcctttggtatctttcctgcccttttcc

SEQ ID NO: 210268 - DNA, 120 bp, Artificial Sequence
  ENSG00000115556_24 (sequence is synthesized)
tttgtgtactctatactggagttcccttcttcctcttgctgtaggctcaatcccataccgacatctacaactaatctttcccatcaactctgtgtgaaggcaggttgcaactagaaattc

SEQ ID NO: 210269 - DNA, 120 bp, Artificial Sequence
  ENSG00000115556_25 (sequence is synthesized)
agagaaaagtgaggctgagcagagggacacgcatgctactgagttctgaacccaagtgtcctcccttctggaccacagtctcaaaattctcaaaggagatgagactcagagccattgcga

SEQ ID NO: 210270 - DNA, 120 bp, Artificial Sequence
  ENSG00000115556_26 (sequence is synthesized)
ggtcaggaccaaaatggagggatggggagggaagtgggatggataggttcaggcctgatggactggcaggtaagtcccaagaaaaaagacaaggtagctaaggagagatgaaggagttca

SEQ ID NO: 210271 - DNA, 120 bp, Artificial Sequence
  ENSG00000115556_27 (sequence is synthesized)
agcagtgtccccatggatggagaaggctctatgcagatgtagcttgaaggggtctggatgggtaagtgctggtgagcactgttctctccagagtggggagagtccctaggtagaagatca

SEQ ID NO: 210272 - DNA, 120 bp, Artificial Sequence
  ENSG00000115556_28 (sequence is synthesized)
caactcatgagagggaccatgtagaaaagtgaggggagctgtcagtgtctaacagattgggacagtgttgtgggggtttaggggctgaggagccctggataccagagacacttggaggag

SEQ ID NO: 210273 - DNA, 120 bp, Artificial Sequence
  ENSG00000115556_29 (sequence is synthesized)
atattgaagactggtgggagaatggtaatgaaaccctatgggtcaatggaacttctctttcacaagctatgaaactctcctggaactcagaggccctgacagatttatatttaacaaatt

SEQ ID NO: 210274 - DNA, 120 bp, Artificial Sequence
  ENSG00000115556_30 (sequence is synthesized)
aataaacagattgttaaatggaaggcaatagagaataggagttaaaaatataggttctggagtcagaccatctgaaattatatcctagctccttcacttggtactctggggctaagtatt

SEQ ID NO: 210275 - DNA, 120 bp, Artificial Sequence
  ENSG00000115556_31 (sequence is synthesized)
taacttctatacctcagtctccccatctgtgaaacagggatggtaacagtgcctattctgtctgggttgttgtgaagagataattcatatgtcaatagctaataagcagttctgatttta

SEQ ID NO: 210276 - DNA, 120 bp, Artificial Sequence
  ENSG00000115556_32 (sequence is synthesized)
ttgtgactaatcatggattagattgaatagtcaagatatctttctattaccagcaactgaactagtagcttcaagggatacaaagatgagtggaacatatagtttccaccttaggaagtc

SEQ ID NO: 210277 - DNA, 120 bp, Artificial Sequence
  ENSG00000115556_33 (sequence is synthesized)
agtctagctgaggaattaaggtgtaaatttactgacagtttgaataaccaggatgttgtatagggatataaagccagaacaccactggacacaatggcttatgcctgtaattccagcact

SEQ ID NO: 210278 - DNA, 120 bp, Artificial Sequence
  ENSG00000115556_34 (sequence is synthesized)
gaggccgaggcagggagatcgcttgagcccaagagttcgagaccaggctgggcaacatagtgagagcccgtctccacaaaaaatgcaaaaattagccaggcatggtgatgtgtgctttta

SEQ ID NO: 210279 - DNA, 79 bp, Artificial Sequence
  ENSG00000115556_35 (sequence is synthesized)
catggtgatgtgtgcttttagtatgagaggtcaaggctgcagtgagccatgttcacaccactgcactctagcctgggtg

SEQ ID NO: 210280 - DNA, 120 bp, Artificial Sequence
  ENSG00000115556_36 (sequence is synthesized)
agaagcaagggagtagacaaaatgattctcttctttcttgcccctcagagagacctgagacaccctgaatcccactgtaatctccttggtgccattggtaactctgccaaagtccatctc

SEQ ID NO: 210281 - DNA, 120 bp, Artificial Sequence
  ENSG00000115556_37 (sequence is synthesized)
taggtgacatgaagtctcttagaaattgaggaccaaattgcgctctgcagctctgggctacttcccatctcattttgtgtccctattttcgtatctgtattagagaggtgatctggtgcc

SEQ ID NO: 210282 - DNA, 120 bp, Artificial Sequence
  ENSG00000115556_38 (sequence is synthesized)
atgaacactaaatgtttaggagttccgtgggagttttatggaagcatgtttggatctatctgtctgtaaaattgcttttacagtgcaagtcaaggtcataacatttcccattctccatga

SEQ ID NO: 210283 - DNA, 120 bp, Artificial Sequence
  ENSG00000115556_39 (sequence is synthesized)
tttcacattgcatgcctatatcaaaacatctaatttactgtataaatatatacacctactatgtacccagaaaaatttaaaaaaaaatttttttaattaaaaagataacatttcccatta

SEQ ID NO: 210284 - DNA, 120 bp, Artificial Sequence
  ENSG00000115556_40 (sequence is synthesized)
ttatgaatagtggctcaagggtctaggggcaggaaagctggtctggatggacagagtagagaggcacagtgaaactttctggagccagcttcagatgctggagagaagggtgaagagtag

SEQ ID NO: 210285 - DNA, 120 bp, Artificial Sequence
  ENSG00000115561_0 (sequence is synthesized)
ctccttttccgcgggccccgcccaggcggctgcccgtgacctgcctgggcgcggggaactgaaagccggaaggggcaagacgggttcagttcgtcatggggctgtttggaaagacccagg

SEQ ID NO: 210286 - DNA, 120 bp, Artificial Sequence
  ENSG00000115561_1 (sequence is synthesized)
agaagccgcccaaagaactggtcaatgagtggtcattgaagataagaaaggaaatgagagttgttgacaggcaaataagggatatccaaagagaagaagaaaaagtgaaacgatctgtga

SEQ ID NO: 210287 - DNA, 120 bp, Artificial Sequence
  ENSG00000115561_2 (sequence is synthesized)
aagatgctgccaagaagggccagaaggatgtctgcatagttctggccaaggagatgatcaggtcaaggaaggctgtgagcaagctgtatgcatccaaagcacacatgaactcagtgctca

SEQ ID NO: 210288 - DNA, 120 bp, Artificial Sequence
  ENSG00000115561_3 (sequence is synthesized)
tggggatgaagaaccagctcgcggtcttgcgagtggctggttccctgcagaagagcacagaagtgatgaaggccatgcaaagtcttgtgaagattccagagattcaggccaccatgaggg

SEQ ID NO: 210289 - DNA, 120 bp, Artificial Sequence
  ENSG00000115561_4 (sequence is synthesized)
agttgtccaaagaaatgatgaaggctgggatcatagaggagatgttagaggacacttttgaaagcatggacgatcaggaagaaatggaggaagaagcagaaatggaaattgacagaattc

SEQ ID NO: 210290 - DNA, 120 bp, Artificial Sequence
  ENSG00000115561_5 (sequence is synthesized)
tctttgaaattacagcaggggccttgggcaaagcacccagtaaagtgactgatgcccttccagagccagaacctccaggagcgatggctgcctcagaggatgaggaggaggaggaagagg

SEQ ID NO: 210291 - DNA, 120 bp, Artificial Sequence
  ENSG00000115561_6 (sequence is synthesized)
ctctggaggccatgcagtcccggctggccacactccgcagctaggggctgcctaccccgctgggtgtgcacacactcctctcaagagctgccattttatgtgtctcttgcactacacctc

SEQ ID NO: 210292 - DNA, 120 bp, Artificial Sequence
  ENSG00000115561_7 (sequence is synthesized)
tgttgtgaggactaccattttggagaaggttctgtttgtctcttttcattctctgcccaggttttgggatcgcaaagggattgttcttataaaagtggcataaataaatgcatcattttt

SEQ ID NO: 210293 - DNA, 120 bp, Artificial Sequence
  ENSG00000115561_8 (sequence is synthesized)
aggagtatagacagatatatcttattgtggggaggggaaagaaatccatctgctcatgaagcacttctgaaaatataggtgattgcctgaatgtcgaagactctacttttgtctataaaa

SEQ ID NO: 210294 - DNA, 120 bp, Artificial Sequence
  ENSG00000115561_9 (sequence is synthesized)
cactatataaatgaattttaataaatttttgctttagcacttggccccattgtagattgccctgtgcagtaaactttcaaggtgtcggctgccccagattgcttcatttgctgggtgtgg

SEQ ID NO: 210295 - DNA, 120 bp, Artificial Sequence
  ENSG00000115561_10 (sequence is synthesized)
aaagagttgctatggccaggcatatgggatttggaagctcagcagaagtgacttctgctctgtggttgctgctccccggctttcacagacatggtatggcagccattcttttatctattt

SEQ ID NO: 210296 - DNA, 120 bp, Artificial Sequence
  ENSG00000115561_11 (sequence is synthesized)
aaccaagaggatgctggggaattgtgctgcttgtcctgttggctggtggctgcattatgtcctggggtgtgcatgtgggtctatttagagcttctgtcccttccttcccattgcaagttg

SEQ ID NO: 210297 - DNA, 120 bp, Artificial Sequence
  ENSG00000115561_12 (sequence is synthesized)
cacccagatgagacagctgtagtactaggtctctttcacctctcattgcctgtccctgcttcgagctggttgtcttgtgcgtgggacatgggccttcctatctgtgttttctcaaagtca

SEQ ID NO: 210298 - DNA, 120 bp, Artificial Sequence
  ENSG00000115561_13 (sequence is synthesized)
actaaggtgtggtcatgcatcataaccaacattcactcatctgggacattcttaagatacatttataaatcatttcagcagtagtactttgtatgtgttgagagtttacagagctctttg

SEQ ID NO: 210299 - DNA, 120 bp, Artificial Sequence
  ENSG00000115561_14 (sequence is synthesized)
acatacgcgatcttagtctttacaaataaggaaaacagctcagtttgggaagtatcagagatgggattcaaacccagatcctctggtccaagttgtatgtgcactgaactaatcaggcag

SEQ ID NO: 210300 - DNA, 120 bp, Artificial Sequence
  ENSG00000115561_15 (sequence is synthesized)
gaaaaaagcccagccactgtctcacagattgttttttgtatattgtagcaaaatcctgaaacaatggggtccttccagtctcatcatacaaaatggcaatcttggctgggtgcggtggtt

SEQ ID NO: 210301 - DNA, 120 bp, Artificial Sequence
  ENSG00000115561_16 (sequence is synthesized)
tcatcatacaaaatggcaatcttggctgggtgcggtggttcatgcctataatcccagtgctttacaaggctgaggcaggaggctctcttgagaataggagttcaagaccagcctgggcaa

SEQ ID NO: 210302 - DNA, 120 bp, Artificial Sequence
  ENSG00000115561_17 (sequence is synthesized)
aaaaaaaaatttcatttttgagtccagaggaccctcctattactcttgatttcatcttcagagtgtagttaaaaaattattttaaataattatttttttaaatcagttgtaggttcacag

SEQ ID NO: 210303 - DNA, 120 bp, Artificial Sequence
  ENSG00000115561_18 (sequence is synthesized)
caaaagtggacaaaaagaaatttctcatatatcccctgccctcacacatgcatagcctcccaccactatcagtatcccacaccagagtggtacatttgttacaatcaataaacctccatt

SEQ ID NO: 210304 - DNA, 120 bp, Artificial Sequence
  ENSG00000115561_19 (sequence is synthesized)
gacacatcattatcacccaaagtccatagtttacatgaagattcactctggtgttgtacattgtatgggcttagacaaatgtatgatgatatctacaattatagaatcatacagaatagt

SEQ ID NO: 210305 - DNA, 120 bp, Artificial Sequence
  ENSG00000115561_20 (sequence is synthesized)
ttcactgccctaaaacttctctatgcttcacctgttcatccctttcttccctaatcccctggcaaccactttaaaaaaaaaattaggttcagggggtacatgtgcaggtaaactcgtgac

SEQ ID NO: 210306 - DNA, 120 bp, Artificial Sequence
  ENSG00000115561_21 (sequence is synthesized)
gtactaagcctagtacccaatagttacttttctggtcctgtcccttttcccaccctccaccctcaggtaggccccagtatgttattcctttgtgtccatgttatttcactcccacttgtg

SEQ ID NO: 210307 - DNA, 120 bp, Artificial Sequence
  ENSG00000115561_22 (sequence is synthesized)
ttcctttgtgtccatgttatttcactcccacttgtgagaacatggaatatttggtttcctgttcctatgttagtttgttaaggataatggcctccagccccatccatgttcctgcaaagg

SEQ ID NO: 210308 - DNA, 120 bp, Artificial Sequence
  ENSG00000115561_23 (sequence is synthesized)
acatgatctttctttggcaaccactttttactgtcgccatagttcttccttttctagaatgtcatattggaatcatatagtatgtagccttttcagactggcttctttcacttaataata

SEQ ID NO: 210309 - DNA, 120 bp, Artificial Sequence
  ENSG00000115561_24 (sequence is synthesized)
tgcaattaaggttcctccatgtcatttcatggcttaatagtgcatttatttttagcactgaataatactccattgtctagatgaatagtttatccattcacctattgaaagacttcttgg

SEQ ID NO: 210310 - DNA, 89 bp, Artificial Sequence
  ENSG00000115561_25 (sequence is synthesized)
tggtttgtaaacatctttgtgcaggtttttctatgggcatgtttttaattcatttgaataaataccaagagcttcagtgctggatcata

SEQ ID NO: 210311 - DNA, 120 bp, Artificial Sequence
  ENSG00000115561_26 (sequence is synthesized)
ctgccacaccttttttcgtttttccttttggaacataggaaatacattttttaaatacctgtcttagtttcttttgtgctgctatagcagaatacctgagactgagtaatttattcagag

SEQ ID NO: 210312 - DNA, 120 bp, Artificial Sequence
  ENSG00000115561_27 (sequence is synthesized)
tagaattttatttcatgcagttctggagtctgggaagttcaagattaaggtgctggcagggttggttgtctggtgagggctgcattttctggagggtaggcatgctgtgttctcacgtgg

SEQ ID NO: 210313 - DNA, 120 bp, Artificial Sequence
  ENSG00000115561_28 (sequence is synthesized)
caggaggaagggcaacggagaacgaactgcctcctgtaggcccttttctaagggcacctaatccattcaggagggtggaacctcatggcctaatcacctcttaaaaactccacctcttaa

SEQ ID NO: 210314 - DNA, 120 bp, Artificial Sequence
  ENSG00000115561_29 (sequence is synthesized)
tacttatcacagtggcaacacctgaattttggagaggacgtattcaaaccatagcaaccacctttgtcttgagtttcaagtgtacaacatacaattagtctggccttttaaaaatccact

SEQ ID NO: 210315 - DNA, 120 bp, Artificial Sequence
  ENSG00000115561_30 (sequence is synthesized)
tacctaatccattttggttggttatcaacttgagtgtttttgtaataagttttatttctaagtttatttttgtgtcccctttttcctacaacattgactcttcccttcttgtaccttcta

SEQ ID NO: 210316 - DNA, 120 bp, Artificial Sequence
  ENSG00000115561_31 (sequence is synthesized)
ataatcagaaatttatacctttttcagaatacaaatgattcagtgtttaaatacttctctagtcacagttttttccatgtctcccatctgtttacttattttcactaattcagcccaaaa

SEQ ID NO: 210317 - DNA, 120 bp, Artificial Sequence
  ENSG00000115561_32 (sequence is synthesized)
atgtttactgaacacataccatgttcaggtactctctctgggttacagactcaggatgcaaataataatacaacttataatatgtataaggatgtatcaggatgcaaattataaaataat

SEQ ID NO: 210318 - DNA, 120 bp, Artificial Sequence
  ENSG00000115561_33 (sequence is synthesized)
aatacaactacaggctcatgtagacatcaggctttataaacaaaactggatggaatttgctttatttttacccttttcttcccacctttatataatcaatagtaatttttaactttttat

SEQ ID NO: 210319 - DNA, 120 bp, Artificial Sequence
  ENSG00000115561_34 (sequence is synthesized)
aaaattttataaatttataaaagtaaatttataaaagtaattataacttttttatcattttaatggcatatgtaatttattgcttatttcagcctcacagattcttggcacttcctctgt

SEQ ID NO: 210320 - DNA, 120 bp, Artificial Sequence
  ENSG00000115561_35 (sequence is synthesized)
tcctctgtcattctactaatattaataaatattttattttcccatttcagtgttaagagaaatgaagtgttctctgcaactagcaaactcccttactcctttagaaaaatcacagtgcta

SEQ ID NO: 210321 - DNA, 120 bp, Artificial Sequence
  ENSG00000115561_36 (sequence is synthesized)
tgaatgtcagacaggcatttctctggtcactcttgttttcccttagatgtgaaagcttcctagggtctggattccaccagaagtaaacctgtagtgactcctggtttagccaggaggaag

SEQ ID NO: 210322 - DNA, 120 bp, Artificial Sequence
  ENSG00000115561_37 (sequence is synthesized)
agatggttgccaactctttgacatgttaaagacattgagggtggggcaatgatcttttgatactaccgtgatttcttataaagaagattgtagtaggcatacaatctcagactacagaag

SEQ ID NO: 210323 - DNA, 120 bp, Artificial Sequence
  ENSG00000115561_38 (sequence is synthesized)
gtttttctctagtaaggaaccacctcacattgacacacatacacatattcactgtatctgtcctagtttctctcatttttctgaggaccaatgataagctggctccatactgaacagata

SEQ ID NO: 210324 - DNA, 120 bp, Artificial Sequence
  ENSG00000115561_39 (sequence is synthesized)
ctgtccataggctggtgtgtggggagctctgctcgggtcctgaagccttctctttcctagtgtggcctttacaaggtctggagctctttctcccatttgtgattttcctgggtgtcacag

SEQ ID NO: 210325 - DNA, 120 bp, Artificial Sequence
  ENSG00000115561_40 (sequence is synthesized)
ttactccaagctggcttcctttcctaaaagtcaagagtggcttcaggccactctccagattggtcatgtggtgtgcatgctcattgaattcacatcagtagtaacccagatagcatacaa

SEQ ID NO: 210326 - DNA, 120 bp, Artificial Sequence
  ENSG00000115561_41 (sequence is synthesized)
tttaggaaagtcaatctcttggtcaactagcacagtaattaatttaaaggcacacaaataacttcgggagtccatctgctactgctgtcatttattggaatggctcataatttggctgtc

SEQ ID NO: 210327 - DNA, 120 bp, Artificial Sequence
  ENSG00000115561_42 (sequence is synthesized)
gtagctttttctttaggcattaactcccttctacatttttaacgttttacactgtgcagcttatttcttgaaaagtaagcacaatatctataaccatcttttaaaaaacacaattcttaa

SEQ ID NO: 210328 - DNA, 120 bp, Artificial Sequence
  ENSG00000115561_43 (sequence is synthesized)
aatttttagagtttgcatgattttaaaggaagatactgctctcatatactgctgttgggattttaaactggtgtagactttcttgaaagcaatttggccatagccattcaaaagcccttg

SEQ ID NO: 210329 - DNA, 84 bp, Artificial Sequence
  ENSG00000115561_44 (sequence is synthesized)
tcttgaaagcaatttggccatagccattcaaaagcccttgccttcgccaagtgcgacaggtgggggatcgcttgagcccaggag

SEQ ID NO: 210330 - DNA, 120 bp, Artificial Sequence
  ENSG00000115561_45 (sequence is synthesized)
tagagtgaaatttcaagagactgggcaaagaacaattactaggaacagaacaactaccaggaagctgtaagctgaataattcttagagctaataaaggattgagaagtggttgagctctg

SEQ ID NO: 210331 - DNA, 120 bp, Artificial Sequence
  ENSG00000115561_46 (sequence is synthesized)
gatcaggtaggtagtcctagaaaaaaggctaccacaagcccataccaaccaaccaacaagacttaaaagacttcacggctgatttgcaggtaatttgactgcctgccaaagtaaagatta

SEQ ID NO: 210332 - DNA, 120 bp, Artificial Sequence
  ENSG00000115561_47 (sequence is synthesized)
acactgtttaagggaagactacaaaatgcaggcacccaacaatgaaacatatacagtggccagcatccaataagatactattatgaagaagcaggaaaatgtgaccccaaaacaggagaa

SEQ ID NO: 210333 - DNA, 120 bp, Artificial Sequence
  ENSG00000115561_48 (sequence is synthesized)
aagccaggtaatagaaatagatttaaaaaaaaaaaacacccaaaacccccacaaaaaaagatgattgaatttgcagtcaaggatttttaagcagctattataaatatgttgagattaaag

SEQ ID NO: 210334 - DNA, 120 bp, Artificial Sequence
  ENSG00000115561_49 (sequence is synthesized)
gataacttaaacataatgaggagataaatacaaaatacagaaaacaacaaaatggaatttctagagttgaaagatctgaaatgaagtgaaattaaatgaagaatcactgaatgggtttaa

SEQ ID NO: 210335 - DNA, 120 bp, Artificial Sequence
  ENSG00000115561_50 (sequence is synthesized)
atttgttgtcttcagtgtttggccttggcattgccattcgtaaattgagataagattatggagaagcaaaaaagatgctggggaaatggttgctttattgtttaaactagtctctagtat

SEQ ID NO: 210336 - DNA, 120 bp, Artificial Sequence
  ENSG00000115561_51 (sequence is synthesized)
atgtactactatactactctagtatattgtacacttagattgtttttaaatgataaattgctaagaacacgatattggtacactcttcagtagggtaatctacctgagaaagctgattga

SEQ ID NO: 210337 - DNA, 120 bp, Artificial Sequence
  ENSG00000115561_52 (sequence is synthesized)
aaagtgctgggattatagttgtgagccgctgcacctggcccagaactaatacaatttaacgttttgttgtatttgcctgcttctatattatatatatataaaaaaagcattattacaaaa

SEQ ID NO: 210338 - DNA, 120 bp, Artificial Sequence
  ENSG00000115568_0 (sequence is synthesized)
gacaaaacatagagtaccccggcagccggcaagaggaagagagagtggcttccacatccccaatatcctagaggcggctgagccggaggcggtcgcacaaagcgggccccgggggccgtt

SEQ ID NO: 210339 - DNA, 120 bp, Artificial Sequence
  ENSG00000115568_1 (sequence is synthesized)
ccagccgcggccgaccatagagatgcggctcccgccggctctgggtctggaggtgagtgagcggctgcggggcggaactgggaagggaatgcgtctgtcctttctcttcctcagccctcc

SEQ ID NO: 210340 - DNA, 120 bp, Artificial Sequence
  ENSG00000115568_2 (sequence is synthesized)
tgcccggaagataagcgtatttcttctctggtgcccacctgtctcctacctcaccctgccctcccgcaggtgaaggttcttaatcttgacggctcagcgtcctccttggctccccccgga

SEQ ID NO: 210341 - DNA, 120 bp, Artificial Sequence
  ENSG00000115568_3 (sequence is synthesized)
ggccatgtatggtcaagcttgaagattccccagaacagcgataatattcacatttaagaagccaaaacacacaagtcggtggtgatgacagacccccttttggactcacagccagccagt

SEQ ID NO: 210342 - DNA, 120 bp, Artificial Sequence
  ENSG00000115568_4 (sequence is synthesized)
agcaccggggagatggatggactgtgccctgagctattgctgatccccccgcctctctctaaccgtggaatcctggggcctgtccagagcccctgtccttcccgggaccctgcacctata

SEQ ID NO: 210343 - DNA, 120 bp, Artificial Sequence
  ENSG00000115568_5 (sequence is synthesized)
cctactgagccaggctgcctgctggtagaggccacagcaactgaagagggaccagggaacatggagatcattgtggagacagtagctggaaccctgaccccaggtgctcctggagagacc

SEQ ID NO: 210344 - DNA, 120 bp, Artificial Sequence
  ENSG00000115568_6 (sequence is synthesized)
ccagctcccaaactgcctccaggagagagagaaccttcacaggaagcaggtacacccttgcctgggcaggagacagctgaagaggagaatgtagagaaagaagagaagagtgacacccag

SEQ ID NO: 210345 - DNA, 120 bp, Artificial Sequence
  ENSG00000115568_7 (sequence is synthesized)
aaggactcccaaaaggctgtggataaaggccaaggggctcagcggctggaaggggatgtggtctctggcaccgagtccctcttcaagacccatatgtgtccagagtgtaagcgctgcttt

SEQ ID NO: 210346 - DNA, 120 bp, Artificial Sequence
  ENSG00000115568_8 (sequence is synthesized)
aagaagcggactcatctggtggagcacctgcatctccacttcccagaccccagcctccagtgccctaactgccagaagttcttcaccagtaagagcaagctcaagacccatctgctgcgg

SEQ ID NO: 210347 - DNA, 120 bp, Artificial Sequence
  ENSG00000115568_9 (sequence is synthesized)
gagctgggtgaaaaggcccaccactgcccactgtgccactacagtgcggtggagaggaatgcactcaaccgccacatggccagcatgcatgaagatatttccaacttctactcagacacc

SEQ ID NO: 210348 - DNA, 120 bp, Artificial Sequence
  ENSG00000115568_10 (sequence is synthesized)
tatgcctgtcctgtctgccgtgaggaattccgcctcagccaggccctaaaggagcacctcaagagccacacggcagcagccgcagcagagccattaccccttcgctgctttcaggagggc

SEQ ID NO: 210349 - DNA, 120 bp, Artificial Sequence
  ENSG00000115568_11 (sequence is synthesized)
tgcagctatgcagcacccgaccgcaaggccttcattaagcacctgaaggagacccatggggtgcgggctgtggagtgccgccatcactcatgtcccatgctctttgccacagccgaagcc

SEQ ID NO: 210350 - DNA, 120 bp, Artificial Sequence
  ENSG00000115568_12 (sequence is synthesized)
atggaggcccaccacaagagtcactacgccttccactgcccccactgtgattttgcttgttccaataagcacctattccgtaaacacaagaagcagggccaccctggcagtgaagagctg

SEQ ID NO: 210351 - DNA, 120 bp, Artificial Sequence
  ENSG00000115568_13 (sequence is synthesized)
cgctgcaccttctgcccctttgccaccttcaacccagtggcttaccaggatcatgtaggcaagatgcatgctcatgaaaagatccaccagtgtcctgagtgcaactttgccactgcccac

SEQ ID NO: 210352 - DNA, 120 bp, Artificial Sequence
  ENSG00000115568_14 (sequence is synthesized)
aagagggtgctcatccgacacatgcttctacatacgggtgagaagccccacaagtgtgagctgtgtgacttcacatgccgagacgtgagctacctatccaagcacatgctgacccactcc

SEQ ID NO: 210353 - DNA, 120 bp, Artificial Sequence
  ENSG00000115568_15 (sequence is synthesized)
aacaccaaggattacatgtgcactgaatgtggctatgtcaccaagtggaagcactacctccgtgtgcacatgcgaaaacatgcaggggacctcaggtatcagtgcaaccagtgctcctat

SEQ ID NO: 210354 - DNA, 120 bp, Artificial Sequence
  ENSG00000115568_16 (sequence is synthesized)
cgctgtcaccgggctgatcagctgagcagccacaagctgcggcatcagggcaagtctctgatgtgtgaggtgtgtgccttcgcctgcaagcggaagtatgagctgcagaagcacatggct

SEQ ID NO: 210355 - DNA, 120 bp, Artificial Sequence
  ENSG00000115568_17 (sequence is synthesized)
tcccagcaccaccctggcacaccggccccactctacccttgccactactgcagttaccagagccgccacaagcaggctgtgctgagccatgagaactgcaagcatacccgcctccgtgag

SEQ ID NO: 210356 - DNA, 120 bp, Artificial Sequence
  ENSG00000115568_18 (sequence is synthesized)
ttccactgtgccctctgtgactaccgcaccttcagcaacaccacactcttgttccataaacgcaaggcccatggctatgtacctggagaccaggcctggcagctccgctatgcaagccag

SEQ ID NO: 210357 - DNA, 120 bp, Artificial Sequence
  ENSG00000115568_19 (sequence is synthesized)
gagccagaaggggccatgcagggcccaacacccccaccagattcagagccctcaaaccagctgtcagcccgacctgaggggccaggtcacgaacctgggactgtggtggaccccagcttg

SEQ ID NO: 210358 - DNA, 120 bp, Artificial Sequence
  ENSG00000115568_20 (sequence is synthesized)
gaccaggccctgccagagatgagtgaggaggtcaacactggaagacaggagggcagtgaggctccccatgggggtgacctgggtggcagtcccagcccagcagaggtggaggagggcagc

SEQ ID NO: 210359 - DNA, 120 bp, Artificial Sequence
  ENSG00000115568_21 (sequence is synthesized)
tgcacactacacctagaggccctgggagtagagctggagtctgtgactgagccaccccttgaggaggtcactgaaacagcccctatggagttcaggcccctgggactggaagggccagat

SEQ ID NO: 210360 - DNA, 120 bp, Artificial Sequence
  ENSG00000115568_22 (sequence is synthesized)
ggactggaaggaccagagctatctagctttgaaggtattgggacttctgacttgagtgctgaagaaaatccccttctggaaaagccagtgtctgagccctccacaaatcctccatcctta

SEQ ID NO: 210361 - DNA, 120 bp, Artificial Sequence
  ENSG00000115568_23 (sequence is synthesized)
gaggaggctcctaacaactgggtaggaaccttcaagacaactccacctgctgagacagcacccttgcccccattacctgagtcagagtcattactcaaggccctaaggagacaggacaaa

SEQ ID NO: 210362 - DNA, 120 bp, Artificial Sequence
  ENSG00000115568_24 (sequence is synthesized)
tgatccagggagaggggcgagccttccgctgcccacactgcccttttatcactcgccgggagaaggccctgaatctgcactccaggactgggtgccaaggccgccgagagcccctgctgt

SEQ ID NO: 210363 - DNA, 120 bp, Artificial Sequence
  ENSG00000115568_25 (sequence is synthesized)
gccccgagtgtggggctagcttcaagcaacaacgcggcctcagcacccacctgctgaagaagtgccctgttctactcagaaagaacaagggcttgcccagaccagattcacccatccctc

SEQ ID NO: 210364 - DNA, 120 bp, Artificial Sequence
  ENSG00000115568_26 (sequence is synthesized)
tgcaacctgtgctcccaggtacccaggcctcagaggacacagaaagtgggaagcccccacctgcatcacaagaagcagagctactgcttccaaaagatgctcctttggagcttcccaggg

SEQ ID NO: 210365 - DNA, 120 bp, Artificial Sequence
  ENSG00000115568_27 (sequence is synthesized)
agccagaagaaacagaagagcctcttgccacagtctctggttccccagtccctcctgcaggaaactccttgcccacagaggcccctaagaagcactgctttgacccagtccctcctgcag

SEQ ID NO: 210366 - DNA, 120 bp, Artificial Sequence
  ENSG00000115568_28 (sequence is synthesized)
gaaactcctcacccacggaggcccctaagaagcaccaccttgacccagtccctcctgcaggaaactcctcacccacagaggccctgaagaagcaccgctttgagcagggcaagtttcact

SEQ ID NO: 210367 - DNA, 120 bp, Artificial Sequence
  ENSG00000115568_29 (sequence is synthesized)
gcaactcctgcccattcctttgttcccggctctcctctattacctctcacgtggctgaaggctgcagggggggacgtggcgggggaggaaaacgagggaccccccagacccagcctgatg

SEQ ID NO: 210368 - DNA, 120 bp, Artificial Sequence
  ENSG00000115568_30 (sequence is synthesized)
tgtccccgttgagcaatggggactctgctcccccgaagaatgggagtacagagtccagctctggtgatggggatacagttctggttcaaaagcagaagggggctcgcttctcctgcccta

SEQ ID NO: 210369 - DNA, 120 bp, Artificial Sequence
  ENSG00000115568_31 (sequence is synthesized)
catgtccctttagctgccagcaggaacgggctctgaggactcaccagatccggggctgccccctcgaggagtctggagagctgcactgcagcctctgcccattcactgctcctgctgcca

SEQ ID NO: 210370 - DNA, 120 bp, Artificial Sequence
  ENSG00000115568_32 (sequence is synthesized)
ctgccttaaggctccaccagaagcggaggcaccccactgcagccccagcccgtgggccccggccccatctacagtgtggggactgtggcttcacctgtaaacagagccgttgcatgcagc

SEQ ID NO: 210371 - DNA, 120 bp, Artificial Sequence
  ENSG00000115568_33 (sequence is synthesized)
agcaccggcggctcaagcacgagggggtgaagccccatcagtgccccttctgtgacttttcgaccaccagacggtaccggttagaggctcaccagtcccgacacacaggcattggccgca

SEQ ID NO: 210372 - DNA, 120 bp, Artificial Sequence
  ENSG00000115568_34 (sequence is synthesized)
tcccctgcagctcttgcccccagacgtttggtaccaactcgaaactgcgcttgcaccggttaagggtacatgacaaaacacctacccacttctgtccactttgtgactatagtggctacc

SEQ ID NO: 210373 - DNA, 120 bp, Artificial Sequence
  ENSG00000115568_35 (sequence is synthesized)
ttcgccatgacatcactcgtcatgtcaacagctgccaccaaggcaccccagcctttgcctgctcccagtgtgaagcccagttcagctcagagacagcacttaagcagcatgctctgcgcc

SEQ ID NO: 210374 - DNA, 120 bp, Artificial Sequence
  ENSG00000115568_36 (sequence is synthesized)
gacaccccgagcctgcacagcctgcccctggctctcctgcagagaccactgagggccccctgcactgttcccgctgtgggttgctgtgccccagccctgccagcttacgaggacacaccc

SEQ ID NO: 210375 - DNA, 120 bp, Artificial Sequence
  ENSG00000115568_37 (sequence is synthesized)
gtaaacagcacccacggcttgagtgtggggcctgccaggaggccttccctagccgactggctctggatgagcaccggaggcagcagcatttcagccaccgctgtcagctctgtgactttg

SEQ ID NO: 210376 - DNA, 120 bp, Artificial Sequence
  ENSG00000115568_38 (sequence is synthesized)
ctgcccgggagcgggtgggcctggtaaagcactacctggaacagcatgaggagacttcagcagccgtggcagcctcagatggggatggggatgctggccagcccccgctacactgcccct

SEQ ID NO: 210377 - DNA, 120 bp, Artificial Sequence
  ENSG00000115568_39 (sequence is synthesized)
tttgtgacttcacatgccgccatcagctggtactagatcaccatgtgaaagggcatgggggcactcgtctctacaagtgcaccgattgtgcttacagcaccaagaaccgacagaagatca

SEQ ID NO: 210378 - DNA, 120 bp, Artificial Sequence
  ENSG00000115568_40 (sequence is synthesized)
cctggcacagccgcatccacactggggaaaagccttaccactgtcacctctgcccctatgcctgtgctgatccctctcgtctcaagtaccacatgcggatccacaaggaggaacggaagt

SEQ ID NO: 210379 - DNA, 120 bp, Artificial Sequence
  ENSG00000115568_41 (sequence is synthesized)
acctgtgccctgagtgtggctacaagtgcaagtgggtcaaccagctgaaataccacatgaccaagcatacaggactgaagccataccagtgtcccgagtgtgagtactgcaccaaccggg

SEQ ID NO: 210380 - DNA, 120 bp, Artificial Sequence
  ENSG00000115568_42 (sequence is synthesized)
ctgatgcactgcgtgtgcaccaggagacccggcatcgagaagcacgggctttcatgtgtgagcagtgtggcaaggccttcaagacgcgcttcctgctgcgcacccaccttcgcaagcaca

SEQ ID NO: 210381 - DNA, 120 bp, Artificial Sequence
  ENSG00000115568_43 (sequence is synthesized)
gtgaggccaaaccctatgtgtgcaatgtgtgccaccgtgctttccgctgggctgctggcctgcgccatcatgccctcacccacaccgaccgccaccccttcttttgccgcctctgcaact

SEQ ID NO: 210382 - DNA, 120 bp, Artificial Sequence
  ENSG00000115568_44 (sequence is synthesized)
acaaggccaagcaaaagttccaggtggtcaagcacgtacgcaggcaccaccctgaccaagccgacccaaaccagggtgtgggcaaagaccccaccacccccacagtgcacctgcatgatg

SEQ ID NO: 210383 - DNA, 120 bp, Artificial Sequence
  ENSG00000115568_45 (sequence is synthesized)
tgcagctggaggatcccagccctcctgctcctgccgctccccacactggacctgagggctgaaagcctgccccacctcctgtataggaagagggtatggtctgagatgtgcagactggga

SEQ ID NO: 210384 - DNA, 120 bp, Artificial Sequence
  ENSG00000115568_46 (sequence is synthesized)
ccagcgctagcctgaggagctcagagcctaaggaaagactggcttttggggtacaagggtgactagaaccttcctgggactctggctatagtactttgaaattatcacccatataaaaga

SEQ ID NO: 210385 - DNA, 120 bp, Artificial Sequence
  ENSG00000115568_47 (sequence is synthesized)
gggacatggactataacgttgatttcttattgctgtacattgcgtttttaacctgcaagttctcagtttcttcaccatcactccatcaaagtccctggctataagatctggattttaccc

SEQ ID NO: 210386 - DNA, 120 bp, Artificial Sequence
  ENSG00000115568_48 (sequence is synthesized)
actccatcttctctttccttcttactgtgtcaattcctattttctttcagaatcttctaaaaacagttgtatctaaccgcatgtgctgttgtgcctaatgctctataaagcatgttaaac

SEQ ID NO: 210387 - DNA, 120 bp, Artificial Sequence
  ENSG00000115568_49 (sequence is synthesized)
cgagccccgggatcagggtgggcctgggcgctgggaactctcggaaggaggtactgaagggagcacccagacgagctgggccccggcgctgcagtcgcgtcacggttctggaccccgccc

SEQ ID NO: 210388 - DNA, 120 bp, Artificial Sequence
  ENSG00000115568_50 (sequence is synthesized)
cagttcgctggctcttatgatccagctcctgcccgacgatgtggacactgtcatcacctccattttacagataggaaagctgaggcccagagaagcgaagcgactgtgtctgtccaagac

SEQ ID NO: 210389 - DNA, 120 bp, Artificial Sequence
  ENSG00000115568_51 (sequence is synthesized)
cacgcgcatttaagaagccaaaacacacaagtcggtggtgatgacagacccccttttggactcacagccagccagtagcaccggggagatggatggactgtgccctgagctattgctgat

SEQ ID NO: 210390 - DNA, 120 bp, Artificial Sequence
  ENSG00000115568_52 (sequence is synthesized)
ctgcctcccagcaacccaaccctccctggccctctgcagggccagagcccgccagttagccccctatcatgccctgtgtgtagacaggagtttgcccaaccccaggccctgaagagccac

SEQ ID NO: 210391 - DNA, 120 bp, Artificial Sequence
  ENSG00000115568_53 (sequence is synthesized)
ttcaagattcaccggggcactcctgacaccttctcctgcccagaatctggctgtgtgttctctgctgaagatcgcaagggtctgcagcaccacctgaggcagactcacagagcagttcct

SEQ ID NO: 210392 - DNA, 120 bp, Artificial Sequence
  ENSG00000115568_54 (sequence is synthesized)
gtgccctgttctttccggggctgccccctgcttttcgggagccagcagggcatggagctgcaccggcaggcgcattaccctttccactgcagccactgcagcttcataggctccaacgtc

SEQ ID NO: 210393 - DNA, 120 bp, Artificial Sequence
  ENSG00000115590_0 (sequence is synthesized)
gctggaggtgaaagtctggcctggcagccttccccaggtgagcagcaacaaggccacgtgctgctgggtctcagtcctccacttcccgtgtcctctggaagttgtcaggagcaatgttgc

SEQ ID NO: 210394 - DNA, 120 bp, Artificial Sequence
  ENSG00000115590_1 (sequence is synthesized)
gcttgtacgtgttggtaatgggagtttctgccttcacccttcagcctgcggcacacacaggggctgccagaagctgccggtttcgtgggaggcattacaagcgggagttcaggctggaag

SEQ ID NO: 210395 - DNA, 120 bp, Artificial Sequence
  ENSG00000115590_2 (sequence is synthesized)
gggagcctgtagccctgaggtgcccccaggtgccctactggttgtgggcctctgtcagcccccgcatcaacctgacatggcataaaaatgactctgctaggacggtcccaggagaagaag

SEQ ID NO: 210396 - DNA, 120 bp, Artificial Sequence
  ENSG00000115590_3 (sequence is synthesized)
agacacggatgtgggcccaggacggtgctctgtggcttctgccagccttgcaggaggactctggcacctacgtctgcactactagaaatgcttcttactgtgacaaaatgtccattgagc

SEQ ID NO: 210397 - DNA, 120 bp, Artificial Sequence
  ENSG00000115590_4 (sequence is synthesized)
tcagagtttttgagaatacagatgctttcctgccgttcatctcatacccgcaaattttaaccttgtcaacctctggggtattagtatgccctgacctgagtgaattcacccgtgacaaaa

SEQ ID NO: 210398 - DNA, 120 bp, Artificial Sequence
  ENSG00000115590_5 (sequence is synthesized)
ctgacgtgaagattcaatggtacaaggattctcttcttttggataaagacaatgagaaatttctaagtgtgagggggaccactcacttactcgtacacgatgtggccctggaagatgctg

SEQ ID NO: 210399 - DNA, 120 bp, Artificial Sequence
  ENSG00000115590_6 (sequence is synthesized)
atttgcccatgaaggccagcaatacaacatcactaggagtattgagctacgcatcaagaaaaaaaaagaagagaccattcctgtgatcatttcccccctcaagaccatatcagcttctct

SEQ ID NO: 210400 - DNA, 120 bp, Artificial Sequence
  ENSG00000115590_7 (sequence is synthesized)
ggggtcaagactgacaatcccgtgtaaggtgtttctgggaaccggcacacccttaaccaccatgctgtggtggacggccaatgacacccacatagagagcgcctacccgggaggccgcgt

SEQ ID NO: 210401 - DNA, 120 bp, Artificial Sequence
  ENSG00000115590_8 (sequence is synthesized)
gaccgaggggccacgccaggaatattcagaaaataatgagaactacattgaagtgccattgatttttgatcctgtcacaagagaggatttgcacatggattttaaatgtgttgtccataa

SEQ ID NO: 210402 - DNA, 120 bp, Artificial Sequence
  ENSG00000115590_9 (sequence is synthesized)
taccctgagttttcagacactacgcaccacagtcaaggaagcctcctccacgttctcctggggcattgtgctggccccactttcactggccttcttggttttggggggaatatggatgca

SEQ ID NO: 210403 - DNA, 120 bp, Artificial Sequence
  ENSG00000115590_10 (sequence is synthesized)
cagacggtgcaaacacagaactggaaaagcagatggtctgactgtgctatggcctcatcatcaagactttcaatcctatcccaagtgaaataaatggaatgaaataattcaaacacaaac

SEQ ID NO: 210404 - DNA, 120 bp, Artificial Sequence
  ENSG00000115590_11 (sequence is synthesized)
tccgtacgtcttctcttatggaagtggctgtgtctttttgagggactctgttctttgcctcagttgtctaccaaaggtgccacatttatagtggctttgtagtaaaggactaaagtctta

SEQ ID NO: 210405 - DNA, 120 bp, Artificial Sequence
  ENSG00000115590_12 (sequence is synthesized)
gtgggatgggagatactgttgtggtcacctctggaaaatacattctgctactcttaaaaactagtgacgctcatacaaatcaacagaaagagcttctgaaggaagactttaaagctgctt

SEQ ID NO: 210406 - DNA, 120 bp, Artificial Sequence
  ENSG00000115590_13 (sequence is synthesized)
atcgattttctgaagacagtgcacacacacacacgcacaaacacacacatggtttgcctttcatatctgtgagttccacatcctgggattcaaccaacctgggattgaaaatataaacaa

SEQ ID NO: 210407 - DNA, 120 bp, Artificial Sequence
  ENSG00000115590_14 (sequence is synthesized)
ataaacaaataaaataacagtacaatacaaataatacaaataagaaaccaacacagtgcatcatctactgtcacatgctgcatgacaaagtttcagtcaacagtaggctgcatgtacaat

SEQ ID NO: 210408 - DNA, 120 bp, Artificial Sequence
  ENSG00000115590_15 (sequence is synthesized)
ggtggtcttgtaagattataatggagctgagaaatttctattgcctagtgacatcatagctgtctcaacatcatagtgcaaaatattaccttttctatgtttagatatgtttatatgtac

SEQ ID NO: 210409 - DNA, 120 bp, Artificial Sequence
  ENSG00000115590_16 (sequence is synthesized)
tttcgctcttccttttggagacagttatcactatgacccacataccacattaaaagttactttttttgattccaaactgttggatgtttagaatttaaaaaattgtattttgctaaaaat

SEQ ID NO: 210410 - DNA, 120 bp, Artificial Sequence
  ENSG00000115590_17 (sequence is synthesized)
gctggaggtgaaagtctggcctggcagccttccccaggtgagcagcaacaaggtgagagaatgcagagctgcaggccacgtgctgctgggtctcagtcctccacttcccgtgtcctctgg

SEQ ID NO: 210411 - DNA, 120 bp, Artificial Sequence
  ENSG00000115590_18 (sequence is synthesized)
ggggaggggatcctggcaggatggaggcttgtgagggtcttcagtcatgatccggatctcagaatccagtgtacaaaatacaaatccagtgaatccacattgcatcccgtttgctgttcc

SEQ ID NO: 210412 - DNA, 120 bp, Artificial Sequence
  ENSG00000115590_19 (sequence is synthesized)
gggcttcccagccaagttccaggcccagttcccaatcagttgctttggatgcactggaatgggtggtggggccacgtgacactgattagtaggttgttacggctgaggaagatctttaag

SEQ ID NO: 210413 - DNA, 120 bp, Artificial Sequence
  ENSG00000115590_20 (sequence is synthesized)
gactctcataatgactggccatactggaaaggataacttagttgattagccaaacaatgacttgaaccacagcgtcaaatgaaggctttcctaacggaatctcttttccttacatctttc

SEQ ID NO: 210414 - DNA, 120 bp, Artificial Sequence
  ENSG00000115590_21 (sequence is synthesized)
acaccgccctctgtcactctctccttaccctgctgtagtttccttgcgataagattttcccatctgacacatttgtgtgcgctactgtatttaatgtttgtctacccattagaatgtaaa

SEQ ID NO: 210415 - DNA, 120 bp, Artificial Sequence
  ENSG00000115592_0 (sequence is synthesized)
agttggtctggggctggccacatggagcccgggctggagcacgcactgcgcaggaccccttcctggagcagccttgggggttctgagcatcaagagatgagcttcctagagcaagaaaac

SEQ ID NO: 210416 - DNA, 120 bp, Artificial Sequence
  ENSG00000115592_1 (sequence is synthesized)
agcagctcatggccatcaccagctgtgaccagcagctcagaaagaatccgtgggaaacggagggccaaagccttgagatggacaaggcagaagtcggtggaggaaggggagccaccaggt

SEQ ID NO: 210417 - DNA, 120 bp, Artificial Sequence
  ENSG00000115592_2 (sequence is synthesized)
cagggggaaggtccccggtccaggccagctgctgagtccaccgggctggaggccacattccccaagaccacacccttggctcaagctgatcctgccggggtgggcactccaccaacaggg

SEQ ID NO: 210418 - DNA, 120 bp, Artificial Sequence
  ENSG00000115592_3 (sequence is synthesized)
tgggactgcctcccctctgactgtacagcctcagctgcaggctccagcacagatgatgtggagctggccacggagttcccagccacagaggcctgggagtgtgagctagaaggcctgctg

SEQ ID NO: 210419 - DNA, 120 bp, Artificial Sequence
  ENSG00000115592_4 (sequence is synthesized)
gaagagaggcctgccctgtgcctgtccccgcaggccccatttcccaagctgggctgggatgacgaactgcggaaacccggcgcccagatctacatgcgcttcatgcaggagcacacctgc

SEQ ID NO: 210420 - DNA, 120 bp, Artificial Sequence
  ENSG00000115592_5 (sequence is synthesized)
tacgatgccatggcaactagctccaagctagtcatcttcgacaccatgctggagatcaagaaggccttctttgctctggtggccaacggtgtgcgggcagcccctctatgggacagcaag

SEQ ID NO: 210421 - DNA, 120 bp, Artificial Sequence
  ENSG00000115592_6 (sequence is synthesized)
aagcagagctttgtggggatgctgaccatcactgacttcatcctggtgctgcatcgctactacaggtcccccctggtccagatctatgagattgaacaacataagattgagacctggagg

SEQ ID NO: 210422 - DNA, 120 bp, Artificial Sequence
  ENSG00000115592_7 (sequence is synthesized)
gagatctacctgcaaggctgcttcaagcctctggtctccatctctcctaatgatagcctgtttgaagctgtctacaccctcatcaagaaccggatccatcgcctgcctgttcttgacccg

SEQ ID NO: 210423 - DNA, 120 bp, Artificial Sequence
  ENSG00000115592_8 (sequence is synthesized)
gtgtcaggcaacgtactccacatcctcacacacaaacgcctgctcaagttcctgcacatctttggttccctgctgccccggccctccttcctctaccgcactatccaagatttgggcatc

SEQ ID NO: 210424 - DNA, 120 bp, Artificial Sequence
  ENSG00000115592_9 (sequence is synthesized)
gtggtgctggagacagcacccatcctgactgcactggacatctttgtggaccggcgtgtgtctgcactgcctgtggtcaacgaatgtggtcaggtcgtgggcctctattcccgctttgat

SEQ ID NO: 210425 - DNA, 120 bp, Artificial Sequence
  ENSG00000115592_10 (sequence is synthesized)
gtgattcacctggctgcccagcaaacctacaaccacctggacatgagtgtgggagaagccctgaggcagaggacactatgtctggagggagtcctttcctgccagccccacgagagcttg

SEQ ID NO: 210426 - DNA, 120 bp, Artificial Sequence
  ENSG00000115592_11 (sequence is synthesized)
ggggaagtgatcgacaggattgctcgggagcaggtacacaggctggtgctagtggacgagacccagcatctcttgggcgtggtctccctctccgacatccttcaggcactggtgctcagc

SEQ ID NO: 210427 - DNA, 120 bp, Artificial Sequence
  ENSG00000115592_12 (sequence is synthesized)
cctgctggcatcgatgccctcggggcctgagaagatctgagtcctcaatcccaagccacctgcacacctggaagccaatgaagggaactggagaactcagccttcatcttcccccacccc

SEQ ID NO: 210428 - DNA, 120 bp, Artificial Sequence
  ENSG00000115592_13 (sequence is synthesized)
catttgctggttcagctatgattcaggcttcttcagccctcccaaattgcccttgccctacctgtgctcccagaagccctcgggcatgcccagtgcaccatgggatgatgaaattaagga

SEQ ID NO: 210429 - DNA, 120 bp, Artificial Sequence
  ENSG00000115592_14 (sequence is synthesized)
gaacagctgagtcaagcttggaggtccctgaaccagaggcactaggattaccccagggccatctgtgctccatgcccgcccatccccttgccgcctgactgggtcggatggccccagtgg

SEQ ID NO: 210430 - DNA, 120 bp, Artificial Sequence
  ENSG00000115592_15 (sequence is synthesized)
gtttagtcagggcttctggattcctcggtttctgggctacctatggcttcagccttcagctcctgggagtcccagctgttgttcccagcaacgtcgccactgccctcctactctccaggc

SEQ ID NO: 210431 - DNA, 120 bp, Artificial Sequence
  ENSG00000115592_16 (sequence is synthesized)
tttgtcatttcaaggctgctgaaatgctgcatttcaggggccaccatggagcagccgttatttatagaactgcctgttggaggtggggagtcctccctccattcttgtccagaaaactcc

SEQ ID NO: 210432 - DNA, 120 bp, Artificial Sequence
  ENSG00000115592_17 (sequence is synthesized)
ttagctctcgcagtgagccatgttcttagtctccagggatggatggccttgtatatggacccctgagaatgagcaattgagaaaacaaaacaaaaggaacaatccatgaacttagatttt

SEQ ID NO: 210433 - DNA, 120 bp, Artificial Sequence
  ENSG00000115592_18 (sequence is synthesized)
attggtttcactcaaaatgctgcagtcatttgacctgaacttgtggcaagagacttgtgctttctaaattcaaagactagaaggaaaatggataaaaatcacaagtgccgtttctcttgc

SEQ ID NO: 210434 - DNA, 120 bp, Artificial Sequence
  ENSG00000115592_19 (sequence is synthesized)
ctgctcaatgaccatgttcccacatgctccaagccacatcccctcaaaaagggtccctctagcttgtcctcagtgacccaggaggcagctgaggaccaagtacccagattatccggtgcg

SEQ ID NO: 210435 - DNA, 120 bp, Artificial Sequence
  ENSG00000115592_20 (sequence is synthesized)
ccccttccctcccagcaacccccagccttcagggctgtagcagctgagcaaatgggggcccctccctctcattgcctgacacccaatcagagagaaaccgatcctggcagggcagggtgc

SEQ ID NO: 210436 - DNA, 120 bp, Artificial Sequence
  ENSG00000115592_21 (sequence is synthesized)
gggagtggccaagctcaaagctgagcagccctgtgaaaactgcaagtgtaaggactcacaggtccccactttgtcccattttcagctgaggtcatggagactgtcctagaagggagggac

SEQ ID NO: 210437 - DNA, 120 bp, Artificial Sequence
  ENSG00000115592_22 (sequence is synthesized)
aaagccccggctaaaagctaaggctgcgatgtgacttcagacactctgggaagatttacttgttccctcacaattcaatttccacctgctggaaatccccttagaaggaagcaagctata

SEQ ID NO: 210438 - DNA, 120 bp, Artificial Sequence
  ENSG00000115592_23 (sequence is synthesized)
gctgcatcgctactacaggtcccccctggtgaggagtgggctgggaatcttatgggcacccagaggggcgggggcggaggggagtcctcctggagcctggtgccctagaagcccacgtct

SEQ ID NO: 210439 - DNA, 120 bp, Artificial Sequence
  ENSG00000115592_24 (sequence is synthesized)
ggtggggagaatatgggaagggcagggtttctcatgccatccctgtggggggtacaggatggactggggattagaagtctccgtctactctgagacttgggcaagttgcttagcctctct

SEQ ID NO: 210440 - DNA, 120 bp, Artificial Sequence
  ENSG00000115592_25 (sequence is synthesized)
gtgcctcagtttcctcctttgtgaaatgggattcttcacaacactcatctttctgacttcacaggaggatttaaaaggttatgtgcatgaaaatgggcatagcgagaggaagcagcagat

SEQ ID NO: 210441 - DNA, 120 bp, Artificial Sequence
  ENSG00000115593_0 (sequence is synthesized)
agtgttaaataactgccgcgctggcctgacagtctctgagatgacaatagggagaatggagaacgtggaggtcttcaccgctgagggcaaaggaaggggtctgaaggccaccaaggagtt

SEQ ID NO: 210442 - DNA, 120 bp, Artificial Sequence
  ENSG00000115593_1 (sequence is synthesized)
ctgggctgcagatatcatctttgctgagcgggcttattccgcagtggtttttgacagccttgttaattttgtgtgccacacctgcttcaagaggcaggagaagctccatcgctgtgggca

SEQ ID NO: 210443 - DNA, 120 bp, Artificial Sequence
  ENSG00000115593_2 (sequence is synthesized)
gtgcaagtttgcccattactgcgaccgcacctgccagaaggatgcttggctgaaccacaagaatgaatgttcggccatcaagagatatgggaaggtgcccaatgagaacatcaggctggc

SEQ ID NO: 210444 - DNA, 120 bp, Artificial Sequence
  ENSG00000115593_3 (sequence is synthesized)
ggcgcgcatcatgtggcgggtggagagagaaggcaccgggctcacggagggctgcctggtgtccgtggacgacttgcagaaccacgtggagcactttggggaggaggagcagaaggacct

SEQ ID NO: 210445 - DNA, 120 bp, Artificial Sequence
  ENSG00000115593_4 (sequence is synthesized)
gcgggtggacgtggacacattcttgcagtactggccgccgcagagccagcagttcagcatgcagtacatctcgcacatcttcggagtgattaactgcaacggttttactctcagtgatca

SEQ ID NO: 210446 - DNA, 120 bp, Artificial Sequence
  ENSG00000115593_5 (sequence is synthesized)
gagaggcctgcaggccgtgggcgtaggcatcttccccaacctgggcctggtgaaccatgactgttggcccaactgtactgtcatatttaacaatggcaatcatgaggcagtgaaatccat

SEQ ID NO: 210447 - DNA, 120 bp, Artificial Sequence
  ENSG00000115593_6 (sequence is synthesized)
gtttcatacccagatgagaattgagctccgggccctaggcaagatctcagaaggagaggagctgactgtgtcctatattgacttcctcaacgttagtgaagaacgcaagaggcagctgaa

SEQ ID NO: 210448 - DNA, 120 bp, Artificial Sequence
  ENSG00000115593_7 (sequence is synthesized)
gaagcagtactactttgactgcacatgtgaacactgccagaaaaaactgaaggatgacctcttcctgggggtgaaagacaaccccaagccctctcaggaagtggtgaaggagatgataca

SEQ ID NO: 210449 - DNA, 120 bp, Artificial Sequence
  ENSG00000115593_8 (sequence is synthesized)
attctccaaggatacattggaaaagatagacaaggctcgttccgagggtttgtatcatgaggttgtgaaattatgccgggagtgcctggagaagcaggagccagtgtttgctgacaccaa

SEQ ID NO: 210450 - DNA, 120 bp, Artificial Sequence
  ENSG00000115593_9 (sequence is synthesized)
catctacatgctgcggatgctgagcattgtttcggaggtcctttcctacctccaggcctttgaggaggcctcgttctatgccaggaggatggtggacggctatatgaagctctaccaccc

SEQ ID NO: 210451 - DNA, 120 bp, Artificial Sequence
  ENSG00000115593_10 (sequence is synthesized)
caacaatgcccaactgggcatggccgtgatgcgggcagggctgaccaactggcatgctggtaacattgaggtggggcacgggatgatctgcaaagcctatgccattctcctggtgacaca

SEQ ID NO: 210452 - DNA, 120 bp, Artificial Sequence
  ENSG00000115593_11 (sequence is synthesized)
cggaccctcccaccccatcactaaggacttagaggccatgcgggtgcagacggagatggagctacgcatgttccgccagaacgaattcatgtactacaagatgcgcgaggctgccctgaa

SEQ ID NO: 210453 - DNA, 120 bp, Artificial Sequence
  ENSG00000115593_12 (sequence is synthesized)
caaccagcccatgcaggtcatggccgagcccagcaatgagccatccccagctctgttccacaagaagcaatgaggactgcccagtggaggaggggcgatgtggctggggagctagggaga

SEQ ID NO: 210454 - DNA, 120 bp, Artificial Sequence
  ENSG00000115593_13 (sequence is synthesized)
gactctggaggtggtgggtctctcgggagacccctaatgaggaagttgaggtaatgcttaacattgttgctgtgagaatttactgccctatgtttcccagagccattttggctcaattca

SEQ ID NO: 210455 - DNA, 120 bp, Artificial Sequence
  ENSG00000115593_14 (sequence is synthesized)
agtctattcaattcaagttaactctagcccagcccagatcaactcctcctacaaatattattggatgataggccctagaacccaataaaggagctccaaatgtcgttgggtggggaagca

SEQ ID NO: 210456 - DNA, 120 bp, Artificial Sequence
  ENSG00000115593_15 (sequence is synthesized)
aaatgtagagaaacatttaaagcacactgtaataataaatgcaattataaactatatggaggagggtgcagaggagggaatgtgtctggtgtgtgatgtgtgtgtgtgcagtgggggtat

SEQ ID NO: 210457 - DNA, 120 bp, Artificial Sequence
  ENSG00000115593_16 (sequence is synthesized)
cacagagagtatgacatctgagttgagggtagcaggtgcctggagtctcaggtggctgctcacccatctgtgcaggtgtctctggggctgctggtctcacctgtggtctgcagtagacac

SEQ ID NO: 210458 - DNA, 120 bp, Artificial Sequence
  ENSG00000115593_17 (sequence is synthesized)
aattggctgagcaggatatgtgatactgtgtggttggtgtggagttttgaagaaggggctgtgtttgggccacgtaggctctactcagagacctgaaaccacttcagaatggtgcatatg

SEQ ID NO: 210459 - DNA, 120 bp, Artificial Sequence
  ENSG00000115593_18 (sequence is synthesized)
ctgggttccaactagaattctagaaatatttctagaacacacagagagggaataagtccctctatcacccttattaccaagccttgtggttccctgtgattttagataatgtctgatatt

SEQ ID NO: 210460 - DNA, 120 bp, Artificial Sequence
  ENSG00000115593_19 (sequence is synthesized)
tttctggctatttgcctagtaggatttaaaaaatattttcaaagtgaagctgagagagaatcttggaaacacacatacctgttgatcatgggccctgcagaattggcccttgggggcttt

SEQ ID NO: 210461 - DNA, 120 bp, Artificial Sequence
  ENSG00000115593_20 (sequence is synthesized)
atttggttacatgtgcctgggtggtctttaccagcttagactctatcatgggcccccatgaagctccattctcaatactgaataattattacttcccttgttgagtttctttttctgtca

SEQ ID NO: 210462 - DNA, 120 bp, Artificial Sequence
  ENSG00000115593_21 (sequence is synthesized)
tgccctgggggcttctgctcttctcaccagaaagaacatttgaatctggattcttgtacacctgggttagaccctgttcagaggtgtggccaatttatcccgatctcctggaaggctgtt

SEQ ID NO: 210463 - DNA, 120 bp, Artificial Sequence
  ENSG00000115593_22 (sequence is synthesized)
gtgatttccatctaagaaatgagggtcttgagaatcaaccagtcccaagattagcctgttatcctgttatctactgagaccccaaatttctcaccaatgttttgggagatcctggaaaag

SEQ ID NO: 210464 - DNA, 120 bp, Artificial Sequence
  ENSG00000115593_23 (sequence is synthesized)
atcccttcagtttggggtgtcaccaagacttctacacaacccaggactaccattgacctcagagctgtaccccacatcttgaagtaaattgatcccaccaggtcccacgtttgttatctc

SEQ ID NO: 210465 - DNA, 120 bp, Artificial Sequence
  ENSG00000115593_24 (sequence is synthesized)
tgcctaaatgttagcttctccatcctcaccacatgatgacctgctgtgtccctctgagcactacccagtggctgaaaactctgcaaatgggccacacttttgcaaaatacttgtatctga

SEQ ID NO: 210466 - DNA, 120 bp, Artificial Sequence
  ENSG00000115593_25 (sequence is synthesized)
cacttaggtcttgtttgaagaatttcctttctggaaggttttacaagaagactgatagtctttcaagcccccacatcacaggcttagggacggcactaactttctcccagggatctaact

SEQ ID NO: 210467 - DNA, 120 bp, Artificial Sequence
  ENSG00000115593_26 (sequence is synthesized)
ggctagttcaaattatcactcttttaccttcatataaaatgtctcccccaaacctttttcccttctttgtcattgttatctgctaagcccctggtcatttccccatattcgtagtctttt

SEQ ID NO: 210468 - DNA, 120 bp, Artificial Sequence
  ENSG00000115593_27 (sequence is synthesized)
tttccatcctatctttctaatatttgttgtctttaacaaactgtgttctgtgtctgtgctcctccttccctctcagaccactggaatgcaagtccttcttccctttggaatgtactctgg

SEQ ID NO: 210469 - DNA, 120 bp, Artificial Sequence
  ENSG00000115593_28 (sequence is synthesized)
atcccttcccctgctttgacccccagactttgctccatctattattgcttctccatcctggatccttgacatttgtcaccccactggccttctcaggtgcaatcagtaaaaatgctgaga

SEQ ID NO: 210470 - DNA, 120 bp, Artificial Sequence
  ENSG00000115593_29 (sequence is synthesized)
actcttggatcttaatcttcatgactgagttttttttagttgtatagttatcatctgcctttcttcactttgcatttcttcttgaatccattgcagattgacttccactcccactccttc

SEQ ID NO: 210471 - DNA, 120 bp, Artificial Sequence
  ENSG00000115593_30 (sequence is synthesized)
actaaaagggctcttaccaagatcaaatctaatgggtacattttagttcctatgtgatttggcctttcgatgtcaatcatcactcccagccattgattttggtgacccacttccctgtga

SEQ ID NO: 210472 - DNA, 120 bp, Artificial Sequence
  ENSG00000115593_31 (sequence is synthesized)
tgatcttctgatctagtttctcaggttccttcgctggtcctttttctttccctgcccctgacatattgacatttcctggagttggttttgtccttgattcattctcatgtcattctgcac

SEQ ID NO: 210473 - DNA, 120 bp, Artificial Sequence
  ENSG00000115593_32 (sequence is synthesized)
acagtctctgcatgaactcaggcagacccttcatttaatgaccaccttagggctgatgattctcaaatctgtattccccgatcttgcatttgagctccagccccactcatcctctcggat

SEQ ID NO: 210474 - DNA, 120 bp, Artificial Sequence
  ENSG00000115593_33 (sequence is synthesized)
gttctgcaggcccagcaaactcatcatgtccaaagtgaaactttttctctttcctgtctcctctcctctgatctgttctttcttggaacaccacccaagaacgtcacctcctccatcaga

SEQ ID NO: 210475 - DNA, 120 bp, Artificial Sequence
  ENSG00000115593_34 (sequence is synthesized)
ttgtgagctcctggagggcaggagctgtgtccttctattcatcttcctatccccagaaccttgcacagatcctggaatgtggtaggtgctcagtaaatgtgtgttgaataaatgaatgaa

SEQ ID NO: 210476 - DNA, 120 bp, Artificial Sequence
  ENSG00000115593_35 (sequence is synthesized)
tgaatgaacaaatgaatgaatttgcttacttcaaggcaaaagaaccatgaaactgtattttgagtttctatgttatagcagtcagcaaatcctattaaatactttgtgtttccaagcaaa

SEQ ID NO: 210477 - DNA, 120 bp, Artificial Sequence
  ENSG00000115593_36 (sequence is synthesized)
aggctctggaattctgtgattctaaaagctcctgtgttcttatactttggagatccctgtttagactgtggacatctgcttgagtttacccatccacttccttcccaggagctcagcgct

SEQ ID NO: 210478 - DNA, 120 bp, Artificial Sequence
  ENSG00000115594_0 (sequence is synthesized)
gccccgcgcgccccagggagcggcaggaatgtgacaatcgcgcgcccgcgcaccgaagcactcctcgctcggctcctagggctctcgcccctctgagctgagccgggttccgcccggggc

SEQ ID NO: 210479 - DNA, 120 bp, Artificial Sequence
  ENSG00000115594_1 (sequence is synthesized)
tgggatcccatcaccctccacggccgtccgtccaggtagacgcaccctctgaagatggtgactccctcctgagaagctggaccccttggtaaaagacaaggccttctccaagaagaatat

SEQ ID NO: 210480 - DNA, 120 bp, Artificial Sequence
  ENSG00000115594_2 (sequence is synthesized)
gaaagtgttactcagacttatttgtttcatagctctactgatttcttctctggaggctgataaatgcaaggaacgtgaagaaaaaataattttagtgtcatctgcaaatgaaattgatgt

SEQ ID NO: 210481 - DNA, 120 bp, Artificial Sequence
  ENSG00000115594_3 (sequence is synthesized)
tcgtccctgtcctcttaacccaaatgaacacaaaggcactataacttggtataaagatgacagcaagacacctgtatctacagaacaagcctccaggattcatcaacacaaagagaaact

SEQ ID NO: 210482 - DNA, 120 bp, Artificial Sequence
  ENSG00000115594_4 (sequence is synthesized)
ttggtttgttcctgctaaggtggaggattcaggacattactattgcgtggtaagaaattcatcttactgcctcagaattaaaataagtgcaaaatttgtggagaatgagcctaacttatg

SEQ ID NO: 210483 - DNA, 120 bp, Artificial Sequence
  ENSG00000115594_5 (sequence is synthesized)
ttataatgcacaagccatatttaagcagaaactacccgttgcaggagacggaggacttgtgtgcccttatatggagttttttaaaaatgaaaataatgagttacctaaattacagtggta

SEQ ID NO: 210484 - DNA, 120 bp, Artificial Sequence
  ENSG00000115594_6 (sequence is synthesized)
taaggattgcaaacctctacttcttgacaatatacactttagtggagtcaaagataggctcatcgtgatgaatgtggctgaaaagcatagagggaactatacttgtcatgcatcctacac

SEQ ID NO: 210485 - DNA, 120 bp, Artificial Sequence
  ENSG00000115594_7 (sequence is synthesized)
atacttgggcaagcaatatcctattacccgggtaatagaatttattactctagaggaaaacaaacccacaaggcctgtgattgtgagcccagctaatgagacaatggaagtagacttggg

SEQ ID NO: 210486 - DNA, 120 bp, Artificial Sequence
  ENSG00000115594_8 (sequence is synthesized)
atcccagatacaattgatctgtaatgtcaccggccagttgagtgacattgcttactggaagtggaatgggtcagtaattgatgaagatgacccagtgctaggggaagactattacagtgt

SEQ ID NO: 210487 - DNA, 120 bp, Artificial Sequence
  ENSG00000115594_9 (sequence is synthesized)
ggaaaatcctgcaaacaaaagaaggagtaccctcatcacagtgcttaatatatcggaaattgaaagtagattttataaacatccatttacctgttttgccaagaatacacatggtataga

SEQ ID NO: 210488 - DNA, 120 bp, Artificial Sequence
  ENSG00000115594_10 (sequence is synthesized)
tgcagcatatatccagttaatatatccagtcactaatttccagaagcacatgattggtatatgtgtcacgttgacagtcataattgtgtgttctgttttcatctataaaatcttcaagat

SEQ ID NO: 210489 - DNA, 120 bp, Artificial Sequence
  ENSG00000115594_11 (sequence is synthesized)
tgacattgtgctttggtacagggattcctgctatgattttctcccaataaaagcttcagatggaaagacctatgacgcatatatactgtatccaaagactgttggggaagggtctacctc

SEQ ID NO: 210490 - DNA, 120 bp, Artificial Sequence
  ENSG00000115594_12 (sequence is synthesized)
tgactgtgatatttttgtgtttaaagtcttgcctgaggtcttggaaaaacagtgtggatataagctgttcatttatggaagggatgactacgttggggaagacattgttgaggtcattaa

SEQ ID NO: 210491 - DNA, 120 bp, Artificial Sequence
  ENSG00000115594_13 (sequence is synthesized)
tgaaaacgtaaagaaaagcagaagactgattatcattttagtcagagaaacatcaggcttcagctggctgggtggttcatctgaagagcaaatagccatgtataatgctcttgttcagga

SEQ ID NO: 210492 - DNA, 120 bp, Artificial Sequence
  ENSG00000115594_14 (sequence is synthesized)
tggaattaaagttgtcctgcttgagctggagaaaatccaagactatgagaaaatgccagaatcgattaaattcattaagcagaaacatggggctatccgctggtcaggggactttacaca

SEQ ID NO: 210493 - DNA, 120 bp, Artificial Sequence
  ENSG00000115594_15 (sequence is synthesized)
gggaccacagtctgcaaagacaaggttctggaagaatgtcaggtaccacatgccagtccagcgacggtcaccttcatctaaacaccagttactgtcaccagccactaaggagaaactgca

SEQ ID NO: 210494 - DNA, 120 bp, Artificial Sequence
  ENSG00000115594_16 (sequence is synthesized)
aagagaggctcacgtgcctctcgggtagcatggagaagttgccaagagttctttaggtgcctcctgtcttatggcgttgcaggccaggttatgcctcatgctgacttgcagagttcatgg

SEQ ID NO: 210495 - DNA, 120 bp, Artificial Sequence
  ENSG00000115594_17 (sequence is synthesized)
aatgtaactatatcatcctttatccctgaggtcacctggaatcagattattaagggaataagccatgacgtcaatagcagcccagggcacttcagagtagagggcttgggaagatctttt

SEQ ID NO: 210496 - DNA, 60 bp, Artificial Sequence
  ENSG00000115594_18 (sequence is synthesized)
cccagggcacttcagagtagagggcttgggaagatcttttaaaaaggcagtaggcccaga

SEQ ID NO: 210497 - DNA, 84 bp, Artificial Sequence
  ENSG00000115594_19 (sequence is synthesized)
ggcacacgcctgtaatcccagctacaccacggaggttgcagtgagccgagtttgggccactgcactctagcctggcaacagagc

SEQ ID NO: 210498 - DNA, 120 bp, Artificial Sequence
  ENSG00000115594_20 (sequence is synthesized)
agagcaagactccgtctcaaaaaaagggcaataaatgccctctctgaatgtttgaactgccaagaaaaggcatggagacagcgaactagaagaaagggcaagaaggaaatagccaccgtc

SEQ ID NO: 210499 - DNA, 120 bp, Artificial Sequence
  ENSG00000115594_21 (sequence is synthesized)
atagccaccgtctacagatggcttagttaagtcatccacagcccaagggcggggctatgccttgtctggggaccctgtagagtcactgaccctggagcggctctcctgagaggtgctgca

SEQ ID NO: 210500 - DNA, 120 bp, Artificial Sequence
  ENSG00000115594_22 (sequence is synthesized)
ggcaaagtgagactgacacctcactgaggaagggagacatattcttggagaactttccatctgcttgtattttccatacacatccccagccagaagttagtgtccgaagaccgaatttta

SEQ ID NO: 210501 - DNA, 120 bp, Artificial Sequence
  ENSG00000115594_23 (sequence is synthesized)
ttttacagagcttgaaaactcacttcaatgaacaaagggattctccaggattccaaagttttgaagtcatcttagctttccacaggagggagagaacttaaaaaagcaacagtagcaggg

SEQ ID NO: 210502 - DNA, 120 bp, Artificial Sequence
  ENSG00000115594_24 (sequence is synthesized)
aattgatccacttcttaatgctttcctccctggcatgaccatcctgtcctttgttattatcctgcattttacgtctttggaggaacagctccctagtggcttcctccgtctgcaatgtcc

SEQ ID NO: 210503 - DNA, 120 bp, Artificial Sequence
  ENSG00000115594_25 (sequence is synthesized)
cttgcacagcccacacatgaaccatccttcccatgatgccgctcttctgtcatcccgctcctgctgaaacacctcccaggggctccacctgttcaggagctgaagcccatgctttcccac

SEQ ID NO: 210504 - DNA, 120 bp, Artificial Sequence
  ENSG00000115594_26 (sequence is synthesized)
cagcatgtcactcccagaccacctccctgccctgtcctccagcttcccctcgctgtcctgctgtgtgaattcccaggttggcctggtggccatgtcgcctgcccccagcactcctctgtc

SEQ ID NO: 210505 - DNA, 120 bp, Artificial Sequence
  ENSG00000115594_27 (sequence is synthesized)
tctgctcttgcctgcacccttcctcctcctttgcctaggaggccttctcgcattttctctagctgatcagaattttaccaaaattcagaacatcctccaattccacagtctctgggagac

SEQ ID NO: 210506 - DNA, 120 bp, Artificial Sequence
  ENSG00000115594_28 (sequence is synthesized)
tttccctaagaggcgacttcctctccagccttctctctctggtcaggcccactgcagagatggtggtgagcacatctgggaggctggtctccctccagctggaattgctgctctctgagg

SEQ ID NO: 210507 - DNA, 120 bp, Artificial Sequence
  ENSG00000115594_29 (sequence is synthesized)
gagaggctgtggtggctgtctctgtccctcactgccttccaggagcaatttgcacatgtaacatagatttatgtaatgctttatgtttaaaaacattccccaattatcttatttaatttt

SEQ ID NO: 210508 - DNA, 120 bp, Artificial Sequence
  ENSG00000115594_30 (sequence is synthesized)
tgcaattattctaattttatatatagagaaagtgacctattttttaaaaaaatcacactctaagttctattgaacctaggacttgagcctccatttctggcttctagtctggtgttctga

SEQ ID NO: 210509 - DNA, 120 bp, Artificial Sequence
  ENSG00000115594_31 (sequence is synthesized)
gtacttgatttcaggtcaataacggtcccccctcactccacactggcacgtttgtgagaagaaatgacattttgctaggaagtgaccgagtctaggaatgcttttattcaagacaccaaa

SEQ ID NO: 210510 - DNA, 120 bp, Artificial Sequence
  ENSG00000115594_32 (sequence is synthesized)
ttccaaacttctaaatgttggaattttcaaaaattgtgtttagattttatgaaaaactcttctactttcatctattctttccctagaggcaaacatttcttaaaatgtttcattttcatt

SEQ ID NO: 210511 - DNA, 120 bp, Artificial Sequence
  ENSG00000115594_33 (sequence is synthesized)
aaaaatgaaagccaaatttatatgccaccgattgcaggacacaagcacagttttaagagttgtatgaacatggagaggacttttggtttttatatttctcgtatttaatatgggtgaaca

SEQ ID NO: 210512 - DNA, 120 bp, Artificial Sequence
  ENSG00000115594_34 (sequence is synthesized)
ccaacttttatttggaataataattttcctcctaaacaaaaacacattgagtttaagtctctgactcttgcctttccacctgctttctcctgggcccgctttgcctgcttgaaggaacag

SEQ ID NO: 210513 - DNA, 120 bp, Artificial Sequence
  ENSG00000115594_35 (sequence is synthesized)
tgctgttctggagctgctgttccaacagacagggcctagctttcatttgacacacagactacagccagaagcccatggagcagggatgtcacgtcttgaaaagcctattagatgttttac

SEQ ID NO: 210514 - DNA, 120 bp, Artificial Sequence
  ENSG00000115594_36 (sequence is synthesized)
aaatttaattttgcagattattttagtctgtcatccagaaaatgtgtcagcatgcatagtgctaagaaagcaagccaatttggaaacttaggttagtgacaaaattggccagagagtggg

SEQ ID NO: 210515 - DNA, 120 bp, Artificial Sequence
  ENSG00000115594_37 (sequence is synthesized)
ggtgatgatgaccaagaattacaagtagaatggcagctggaatttaaggagggacaagaatcaatggataagcgtgggtggaggaagatccaaacagaaaagtgcaaagttattccccat

SEQ ID NO: 210516 - DNA, 120 bp, Artificial Sequence
  ENSG00000115594_38 (sequence is synthesized)
cttccaagggttgaattctggaggaagaagacacattcctagttccccgtgaacttcctttgacttattgtccccactaaaacaaaacaaaaaacttttaatgccttccacattaattag

SEQ ID NO: 210517 - DNA, 120 bp, Artificial Sequence
  ENSG00000115594_39 (sequence is synthesized)
attttcttgcagtttttttatggcatttttttaaagatgccctaagtgttgaagaagagtttgcaaatgcaacaaaatatttaattaccggttgttaaaactggtttagcacaatttata

SEQ ID NO: 210518 - DNA, 120 bp, Artificial Sequence
  ENSG00000115594_40 (sequence is synthesized)
ttttccctctcttgcctttcttatttgcaataaaaggtattgagccattttttaaatgacatttttgataaattatgtttgtactagttgatgaaggagttttttttaacctgtttatat

SEQ ID NO: 210519 - DNA, 120 bp, Artificial Sequence
  ENSG00000115594_41 (sequence is synthesized)
aattttgcagcagaagccaaattttttgtatattaaagcaccaaattcatgtacagcatgcatcacggatcaatagactgtacttattttccaataaaattttcaaactttgtactgtta

SEQ ID NO: 210520 - DNA, 120 bp, Artificial Sequence
  ENSG00000115594_42 (sequence is synthesized)
attggcagctcttcacttgtatcttttcatatcaaaaatgggaggtgacacccagtttaaggaaaattccaaggcatttgtctcgactaatgtgaaagatgattacagtggccagaggac

SEQ ID NO: 210521 - DNA, 120 bp, Artificial Sequence
  ENSG00000115594_43 (sequence is synthesized)
acggccgagggattaaagccctaagaggctgtgacacagccatctccaaaaccccactttctccttcctttgagcctccgtaccagctggggcgtccggcaagatgtgagttgtcactct

SEQ ID NO: 210522 - DNA, 120 bp, Artificial Sequence
  ENSG00000115594_44 (sequence is synthesized)
gctgcggcacagacctgaattaacaactctagctagggctgacttcaaaaagcactttcgttttttaataaccaacatcagctcagcaggcttcatttgggaaaagaaaccttgtcggat

SEQ ID NO: 210523 - DNA, 120 bp, Artificial Sequence
  ENSG00000115594_45 (sequence is synthesized)
gtgactccctcctgagaagctggaccccttggtaaaagacaaggccttctccaagacttaaaacacacttcacgcagtcacagaaagagctcatagaccagactgcggggcttcaaagcc

SEQ ID NO: 210524 - DNA, 120 bp, Artificial Sequence
  ENSG00000115594_46 (sequence is synthesized)
gaaacatttaccagatgtgtggcttgagtgtccattcccgcaacaaaaacgctctgcagtaaagctccgagatggctgtgtttgtgttggactgctctagatgcacaaccctcctggaca

SEQ ID NO: 210525 - DNA, 120 bp, Artificial Sequence
  ENSG00000115594_47 (sequence is synthesized)
aagcgtttttcctcagccttcaccacccatggaggaggtgtgattacctctattcacagaaaggagactgggacccaaccaaggcaagtcatttgcttcagaccacagagcaaagaatca

SEQ ID NO: 210526 - DNA, 120 bp, Artificial Sequence
  ENSG00000115594_48 (sequence is synthesized)
aaaatgtggattccatctttctagaagatcgtggcataggggtatatgtttcacaattttaagaacctcttcagaagtgtatgatgatttttacatttattaaatgcatttacttctctc

SEQ ID NO: 210527 - DNA, 120 bp, Artificial Sequence
  ENSG00000115594_49 (sequence is synthesized)
cttcttggaggatggcccatgaagacctccaaacaagctggaggggccagtcacttgctgaagactagcgaagtggagggggaaagcccgagggagctgcagactcgaccactgcgccct

SEQ ID NO: 210528 - DNA, 120 bp, Artificial Sequence
  ENSG00000115594_50 (sequence is synthesized)
agtcacttgctgaagactagcgaagtggagggggaaagcccgagggagctgcagactcgaccactgcgccctcccctcctctccctgcaaggagcccaaggtgtgatcctgccaggcgtt

SEQ ID NO: 210529 - DNA, 120 bp, Artificial Sequence
  ENSG00000115594_51 (sequence is synthesized)
cgttcgctgcatgaccttggccatccttccattcccctgggtgtgaattctcattggcaaagtagacgcaccctctgaagatggtgactccctcctgagaagctggaccccttggtaaaa

SEQ ID NO: 210530 - DNA, 120 bp, Artificial Sequence
  ENSG00000115594_52 (sequence is synthesized)
agtcggagagagcccctggccaggcaccaagctccagaggtcgctctggcgagcgtttgcttcgggatctgatgccctggagtcgccaactcaattcgcgggtcgcagccaggctccatg

SEQ ID NO: 210531 - DNA, 120 bp, Artificial Sequence
  ENSG00000115594_53 (sequence is synthesized)
gagtggtagagatcaaatgattgaataataagtttttaaaattccaacaaagttttctgagttctaaatgaaatatttgtcttttgagggccaatttttgagttagtctataaaatggga

SEQ ID NO: 210532 - DNA, 120 bp, Artificial Sequence
  ENSG00000115594_54 (sequence is synthesized)
aatttttgagttagtctataaaatgggaggtttgcagtggctcatgccttttatctcagtacaaccctgggaggccagggtgagagggtcacttgagcctaggagtttgaggctgcagtg

SEQ ID NO: 210533 - DNA, 120 bp, Artificial Sequence
  ENSG00000115594_55 (sequence is synthesized)
gtgagcaacagaacaagagactgtctcttaaaattaattaattaaaaacatgggaaactcctttaattttaagtaagacaagaaaaaggcattaggagccatacggttgtgaaaagcctt

SEQ ID NO: 210534 - DNA, 80 bp, Artificial Sequence
  ENSG00000115596_0 (sequence is synthesized)
cttctcccgagcgagctccgcaggagacacaggcgctggctgccccgtccgctctccgcctccgccgcgccctcctcgcc

SEQ ID NO: 210535 - DNA, 80 bp, Artificial Sequence
  ENSG00000115596_1 (sequence is synthesized)
cgcgcgccgcggttcgccccgcagcctcgccccctgcccacccgggcggccgtagggcggtcacgatgctgccgccctta

SEQ ID NO: 210536 - DNA, 120 bp, Artificial Sequence
  ENSG00000115596_2 (sequence is synthesized)
cgcccttaccctcccgcctcgggctgctgctgctgctgctcctgtgcccggcgcacgtcggcggactgtggtgggctgtgggcagccccttggttatggaccctaccagcatctgcagga

SEQ ID NO: 210537 - DNA, 120 bp, Artificial Sequence
  ENSG00000115596_3 (sequence is synthesized)
aggcacggcggctggccgggcggcaggccgagttgtgccaggctgagccggaagtggtggcagagctagctcggggcgcccggctcggggtgcgagagtgccagttccagttccgcttcc

SEQ ID NO: 210538 - DNA, 120 bp, Artificial Sequence
  ENSG00000115596_4 (sequence is synthesized)
gccgctggaattgctccagccacagcaaggcctttggacgcatcctgcaacaggacattcgggagacggccttcgtgttcgccatcactgcggccggcgccagccacgccgtcacgcagg

SEQ ID NO: 210539 - DNA, 80 bp, Artificial Sequence
  ENSG00000115596_5 (sequence is synthesized)
cctgttctatgggcgagctgctgcagtgcggctgccaggcgccccgcgggcgggcccctccccggccctccggcctgccc

SEQ ID NO: 210540 - DNA, 120 bp, Artificial Sequence
  ENSG00000115596_6 (sequence is synthesized)
gcagcgccgcctgggagtggggaggctgcggcgacgacgtggacttcggggacgagaagtcgaggctctttatggacgcgcggcacaagcggggacgcggagacatccgcgcgttggtgc

SEQ ID NO: 210541 - DNA, 120 bp, Artificial Sequence
  ENSG00000115596_7 (sequence is synthesized)
gccacacgcgcaccgagtgcaaatgccacgggctgtcgggatcatgcgcgctgcgcacctgctggcagaagctgcctccatttcgcgaggtgggcgcgcggctgctggagcgcttccacg

SEQ ID NO: 210542 - DNA, 120 bp, Artificial Sequence
  ENSG00000115596_8 (sequence is synthesized)
gcgcctcacgcgtcatgggcaccaacgacggcaaggccctgctgcccgccgtccgcacgctcaagccgccgggccgagcggacctcctctacgccgccgattcgcccgacttctgcgccc

SEQ ID NO: 210543 - DNA, 120 bp, Artificial Sequence
  ENSG00000115596_9 (sequence is synthesized)
ccaaccgacgcaccggctcccccggcacgcgcggtcgcgcctgcaatagcagcgccccggacctcagcggctgcgacctgctgtgctgcggccgcgggcaccgccaggagagcgtgcagc

SEQ ID NO: 210544 - DNA, 120 bp, Artificial Sequence
  ENSG00000115596_10 (sequence is synthesized)
tcgaagagaactgcctgtgccgcttccactggtgctgcgtagtacagtgccaccgctgccgtgtgcgcaaggagctcagcctctgcctgtgacccgccgcccggccgctagactgacttc

SEQ ID NO: 210545 - DNA, 120 bp, Artificial Sequence
  ENSG00000115596_11 (sequence is synthesized)
gcgcagcggtggctcgcacctgtgggacctcagggcaccggcaccgggcgcctctcgccgctcgagcccagcctctccctgccaaagcccaactcccagggctctggaaatggtgaggcg

SEQ ID NO: 210546 - DNA, 120 bp, Artificial Sequence
  ENSG00000115596_12 (sequence is synthesized)
aggggcttgagaggaacgcccacccacgaaggcccagggcgccagacggccccgaaaaggcgctcggggagcgtttaaaggacactgtacaggccctccctccccttggcctctaggagg

SEQ ID NO: 210547 - DNA, 120 bp, Artificial Sequence
  ENSG00000115596_13 (sequence is synthesized)
aaacagttttttagactggaaaaaagccagtctaaaggcctctggatactgggctccccagaactgctggccacaggatggtgggtgaggttagtatcaataaagatatttaaaccacca

SEQ ID NO: 210548 - DNA, 120 bp, Artificial Sequence
  ENSG00000115598_0 (sequence is synthesized)
gctcgtgtccctgtcatattttccactctccacgaggtcctgcgcgcttcaatcctgcaggcagcccggtttggggatgtggtccttgctgctctgcgggttgtccatcgcccttccact

SEQ ID NO: 210549 - DNA, 120 bp, Artificial Sequence
  ENSG00000115598_1 (sequence is synthesized)
gtctgtcacagcagatggatgcaaggacatttttatgaaaaatgagatactttcagcaagccagccttttgcttttaattgtacattccctcccataacatctggggaagtcagtgtaac

SEQ ID NO: 210550 - DNA, 120 bp, Artificial Sequence
  ENSG00000115598_2 (sequence is synthesized)
atggtataaaaattctagcaaaatcccagtgtccaaaatcatacagtctagaattcaccaggacgagacttggattttgtttctccccatggaatggggggactcaggagtctaccaatg

SEQ ID NO: 210551 - DNA, 120 bp, Artificial Sequence
  ENSG00000115598_3 (sequence is synthesized)
tgttataaagggtagagacagctgtcatagaatacatgtaaacctaactgtttttgaaaaacattggtgtgacacttccataggtggtttaccaaatttatcagatgagtacaagcaaat

SEQ ID NO: 210552 - DNA, 120 bp, Artificial Sequence
  ENSG00000115598_4 (sequence is synthesized)
attacatcttggaaaagatgatagtctcacatgtcatctgcacttcccgaagagttgtgttttgggtccaataaagtggtataaggactgtaacgagattaaaggggagcggttcactgt

SEQ ID NO: 210553 - DNA, 120 bp, Artificial Sequence
  ENSG00000115598_5 (sequence is synthesized)
tttggaaaccaggcttttggtgagcaatgtctcggcagaggacagagggaactacgcgtgtcaagccatactgacacactcagggaagcagtacgaggttttaaatggcatcactgtgag

SEQ ID NO: 210554 - DNA, 120 bp, Artificial Sequence
  ENSG00000115598_6 (sequence is synthesized)
cattacagaaagagctggatatggaggaagtgtccctaaaatcatttatccaaaaaatcattcaattgaagtacagcttggtaccactctgattgtggactgcaatgtaacagacaccaa

SEQ ID NO: 210555 - DNA, 120 bp, Artificial Sequence
  ENSG00000115598_7 (sequence is synthesized)
ggataatacaaatctacgatgctggagagtcaataacactttggtggatgattactatgatgaatccaaacgaatcagagaaggggtggaaacccatgtctcttttcgggaacataattt

SEQ ID NO: 210556 - DNA, 120 bp, Artificial Sequence
  ENSG00000115598_8 (sequence is synthesized)
gtacacagtaaacatcaccttcttggaagtgaaaatggaagattatggccttcctttcatgtgccacgctggagtgtccacagcatacattatattacagctcccagctccggattttcg

SEQ ID NO: 210557 - DNA, 120 bp, Artificial Sequence
  ENSG00000115598_9 (sequence is synthesized)
agcttacttgataggagggcttatcgccttggtggctgtggctgtgtctgttgtgtacatatacaacatttttaagatcgacattgttctttggtatcgaagtgccttccattctacaga

SEQ ID NO: 210558 - DNA, 120 bp, Artificial Sequence
  ENSG00000115598_10 (sequence is synthesized)
caagccccacaaggaaagccagaggcatgccgtggatgccctggtgttgaatatcctgcccgaggtgttggagagacaatgtggatataagttgtttatattcggcagagatgaattccc

SEQ ID NO: 210559 - DNA, 120 bp, Artificial Sequence
  ENSG00000115598_11 (sequence is synthesized)
tggacaagccgtggccaatgtcatcgatgaaaacgttaagctgtgcaggaggctgattgtcattgtggtccccgaatcgctgggctttggcctgttgaagaacctgtcagaagaacaaat

SEQ ID NO: 210560 - DNA, 120 bp, Artificial Sequence
  ENSG00000115598_12 (sequence is synthesized)
cgcggtctacagtgccctgatccaggacgggatgaaggttattctcattgagctggagaaaatcgaggactacacagtcatgccagagtcaattcagtacatcaaacagaagcatggtgc

SEQ ID NO: 210561 - DNA, 120 bp, Artificial Sequence
  ENSG00000115598_13 (sequence is synthesized)
catccggtggcatggggacttcacggagcagtcacagtgtatgaagaccaagttttggaagacagtgagataccacatgccgcccagaaggtgtcggccgtttcctccggtccagctgct

SEQ ID NO: 210562 - DNA, 120 bp, Artificial Sequence
  ENSG00000115598_14 (sequence is synthesized)
gcagcacacaccttgctaccgcaccgcaggcccagaactaggctcaagaagaaagaagtgtactctcacgactggctaagacttgctggactgacacctatggctggaagatgacttgtt

SEQ ID NO: 210563 - DNA, 120 bp, Artificial Sequence
  ENSG00000115598_15 (sequence is synthesized)
ttgctccatgtctcctcattcctacacctattttctgctgcaggatgaggctagggttagcattctagacacccagttgagctcaggcgtagagaagaggaggatgggataagaactggg

SEQ ID NO: 210564 - DNA, 120 bp, Artificial Sequence
  ENSG00000115598_16 (sequence is synthesized)
gccatccccatgtcatggtgggtgagagctggggccatccccgtggtcatggagggtgagagctgggggttatccccatggtcatggagggtgagggctggtcgggggaggcatccccaa

SEQ ID NO: 210565 - DNA, 120 bp, Artificial Sequence
  ENSG00000115598_17 (sequence is synthesized)
gtcatggtgggtgagagctcggagcatccccatgtcatggtgggtgagatctgggggtatccctgtgtcatggtgggtgagggcgggtggtcatccacatggtcatagtgggtgagagct

SEQ ID NO: 210566 - DNA, 120 bp, Artificial Sequence
  ENSG00000115598_18 (sequence is synthesized)
gggggtatccctacatcatggtgggtgagagctgggagcatccccatgtcatggtgggcgagatctggggggtatccccacgtcatggtggatgagagctgggggaatcaccatgtcatg

SEQ ID NO: 210567 - DNA, 120 bp, Artificial Sequence
  ENSG00000115598_19 (sequence is synthesized)
gtgggtgagatcttgggggatcacctgtcatggtgggtgagagctggggggatcacctgtcatggtgggtgagagttgggattcatccccatgtcatggtgggctgagcccacatggaag

SEQ ID NO: 210568 - DNA, 120 bp, Artificial Sequence
  ENSG00000115598_20 (sequence is synthesized)
cctgtgcttggacagcgtatgcccttttctctgtttttccacaatgaacaattaaactgtaaatgttaaaaatatcagtaatttgtgaaataaattttattctcatttgagcaacataaa

SEQ ID NO: 210569 - DNA, 120 bp, Artificial Sequence
  ENSG00000115598_21 (sequence is synthesized)
atgacagggctcgtgtccctgtcatattttccactctccacgaggtcctgcgcgcttcaatcctgcagcccggtttggggatgtggtccttgctgctctgcgggttgtccatcgcccttc

SEQ ID NO: 210570 - DNA, 120 bp, Artificial Sequence
  ENSG00000115602_0 (sequence is synthesized)
gagttgtgaaactgtgggcagaaagttgaggaagaaagaactcaagtacaacccaatgaggttgagatataggctactcttcccaactcagtcttgaagagtatcaccaactgcctcatg

SEQ ID NO: 210571 - DNA, 120 bp, Artificial Sequence
  ENSG00000115602_1 (sequence is synthesized)
tgtggtgaccttcactgtcgtatgccagtgactcatctggagtaatctcaacaacgagttaccaatacttgctcttgattgataaacagaatggggttttggatcttagcaattctcaca

SEQ ID NO: 210572 - DNA, 120 bp, Artificial Sequence
  ENSG00000115602_2 (sequence is synthesized)
attctcatgtattccacagcagcaaagtttagtaaacaatcatggggcctggaaaatgaggctttaattgtaagatgtcctagacaaggaaaacctagttacaccgtggattggtattac

SEQ ID NO: 210573 - DNA, 120 bp, Artificial Sequence
  ENSG00000115602_3 (sequence is synthesized)
tcacaaacaaacaaaagtattcccactcaggaaagaaatcgtgtgtttgcctcaggccaacttctgaagtttctaccagctgcagttgctgattctggtatttatacctgtattgtcaga

SEQ ID NO: 210574 - DNA, 120 bp, Artificial Sequence
  ENSG00000115602_4 (sequence is synthesized)
agtcccacattcaataggactggatatgcgaatgtcaccatatataaaaaacaatcagattgcaatgttccagattatttgatgtattcaacagtatctggatcagaaaaaaattccaaa

SEQ ID NO: 210575 - DNA, 120 bp, Artificial Sequence
  ENSG00000115602_5 (sequence is synthesized)
atttattgtcctaccattgacctctacaactggacagcacctcttgagtggtttaagaattgtcaggctcttcaaggatcaaggtacagggcgcacaagtcatttttggtcattgataat

SEQ ID NO: 210576 - DNA, 120 bp, Artificial Sequence
  ENSG00000115602_6 (sequence is synthesized)
gtgatgactgaggacgcaggtgattacacctgtaaatttatacacaatgaaaatggagccaattatagtgtgacggcgaccaggtccttcacggtcaaggatgagcaaggcttttctctg

SEQ ID NO: 210577 - DNA, 120 bp, Artificial Sequence
  ENSG00000115602_7 (sequence is synthesized)
tttccagtaatcggagcccctgcacaaaatgaaataaaggaagtggaaattggaaaaaacgcaaacctaacttgctctgcttgttttggaaaaggcactcagttcttggctgccgtcctg

SEQ ID NO: 210578 - DNA, 120 bp, Artificial Sequence
  ENSG00000115602_8 (sequence is synthesized)
cagcaatgggctggcttgtctagacatggttttaagaatagctgacgtgaaggaagaggatttattgctgcagtacgactgtctggccctgaatttgcatggcttgagaaggcacaccgt

SEQ ID NO: 210579 - DNA, 120 bp, Artificial Sequence
  ENSG00000115602_9 (sequence is synthesized)
aagactaagtaggaaaaatccaattgatcatcatagcatctactgcataattgcagtatgtagtgtatttttaatgctaatcaatgtcctggttatcatcctaaaaatgttctggattga

SEQ ID NO: 210580 - DNA, 120 bp, Artificial Sequence
  ENSG00000115602_10 (sequence is synthesized)
ggccactctgctctggagagacatagctaaaccttacaagactaggaatgatggaaagctctatgatgcttatgttgtctacccacggaactacaaatccagtacagatggggccagtcg

SEQ ID NO: 210581 - DNA, 120 bp, Artificial Sequence
  ENSG00000115602_11 (sequence is synthesized)
tgtagagcactttgttcaccagattctgcctgatgttcttgaaaataaatgtggctataccttatgcatttatgggagagatatgctacctggagaagatgtagtcactgcagtggaaac

SEQ ID NO: 210582 - DNA, 120 bp, Artificial Sequence
  ENSG00000115602_12 (sequence is synthesized)
caacatacgaaagagcaggcggcacattttcatcctgacccctcagatcactcacaataaggagtttgcctacgagcaggaggttgccctgcactgtgccctcatccagaacgacgccaa

SEQ ID NO: 210583 - DNA, 120 bp, Artificial Sequence
  ENSG00000115602_13 (sequence is synthesized)
ggtgatacttattgagatggaggctctgagcgagctggacatgctgcaggctgaggcgcttcaggactccctccagcatcttatgaaagtacaggggaccatcaagtggagggaggacca

SEQ ID NO: 210584 - DNA, 120 bp, Artificial Sequence
  ENSG00000115602_14 (sequence is synthesized)
cattgccaataaaaggtccctgaattctaaattctggaagcacgtgaggtaccaaatgcctgtgccaagcaaaattcccagaaaggcctctagtttgactcccttggctgcccagaagca

SEQ ID NO: 210585 - DNA, 120 bp, Artificial Sequence
  ENSG00000115602_15 (sequence is synthesized)
atagtgcctgctgtgatgtgcaaaggcatctgagtttgaagctttcctgacttctcctagctggcttatgcccctgcactgaagtgtgaggagcaggaatattaaagggattcaggcctc

SEQ ID NO: 210586 - DNA, 120 bp, Artificial Sequence
  ENSG00000115602_16 (sequence is synthesized)
gtgaaactgtgggcagaaagttgaggaagaaagaactcaagtacaacccaatgagggcataaggaaatcggaggcatgtttctgtctggctataacagttctcctactagatcctgaggc

SEQ ID NO: 210587 - DNA, 120 bp, Artificial Sequence
  ENSG00000115602_17 (sequence is synthesized)
caaactattcacatgccattgttcctgaataccattgtggacataatcatctaattttggctattccatgcagagatatgctgctgtgactgctgacttgaatgttacgggatccccagc

SEQ ID NO: 210588 - DNA, 120 bp, Artificial Sequence
  ENSG00000115602_18 (sequence is synthesized)
aggagggacctacaaagactggaaactattcttagctccgtcactgactccaagttcatcccctctgtctttcagtttggttgagatataggctactcttcccaactcagtcttgaagag

SEQ ID NO: 210589 - DNA, 120 bp, Artificial Sequence
  ENSG00000115602_19 (sequence is synthesized)
gcaagtgtaagcagaatggagtgtggttccaagagatccatcaagacaatgggaatggcctgtgccataaaatgtgcttctcttcttcgggatgttgtttgctgtctgatctttgtagac

SEQ ID NO: 210590 - DNA, 120 bp, Artificial Sequence
  ENSG00000115602_20 (sequence is synthesized)
ctccctcctatcgttggtttgtctagaacactcagctgcttctttggtcatccttgttttctaactttatgaactccctctgtgtcactgtatgtgaaaggaaatgcaccaacaaccgta

SEQ ID NO: 210591 - DNA, 120 bp, Artificial Sequence
  ENSG00000115602_21 (sequence is synthesized)
aactgaacgtgttcttttgtgctcttttataacttgcattacatgttgtaagcatggtccgttctatacctttttctggtcataatgaacactcattttgttagcgagggtggtaaagtg

SEQ ID NO: 210592 - DNA, 120 bp, Artificial Sequence
  ENSG00000115602_22 (sequence is synthesized)
aacaaaaaggggaagtatcaaactactgccatttcagtgagaaaatcctaggtgctactttataataagacatttgttaggccattcttgcattgatataaagaaatacctgagactggg

SEQ ID NO: 210593 - DNA, 120 bp, Artificial Sequence
  ENSG00000115602_23 (sequence is synthesized)
ttggctcacagttctgcaggctgtatgggaagcatggcggcatctgcttctggggacacctcaggagctttactcatggcagaaggcaaagcaaaggcaggcacttcacacagtaaaagc

SEQ ID NO: 210594 - DNA, 120 bp, Artificial Sequence
  ENSG00000115602_24 (sequence is synthesized)
gcaggcacttcacacagtaaaagcaggagcgagagagaggtgccacactgaaacagccagatctcatgagaagtcactcactattgcaaggacagcatcaaagagatggtgctaaaccat

SEQ ID NO: 210595 - DNA, 120 bp, Artificial Sequence
  ENSG00000115602_25 (sequence is synthesized)
ccaatcacctcccaccaggctccacctcgaatactggggattaccattcagcatgagatttgggcaggaacacagacccaaaccataccacacacattatcattgttaaactttgtaaag

SEQ ID NO: 210596 - DNA, 120 bp, Artificial Sequence
  ENSG00000115602_26 (sequence is synthesized)
ttatcattgttaaactttgtaaagtatttaaggtacatggaacacacgggaagtctggtagctcagcccatttctttattgcatctgttattcaccatgtaattcaggtaccacgtattc

SEQ ID NO: 210597 - DNA, 120 bp, Artificial Sequence
  ENSG00000115602_27 (sequence is synthesized)
cagggagcctttcttggccctcagtttgcagtatacacactttccaagtactcttgtagcatcctgtttgtatcatagcactggtcacattgccttacctaaatctgtttgacagtctgc

SEQ ID NO: 210598 - DNA, 120 bp, Artificial Sequence
  ENSG00000115602_28 (sequence is synthesized)
tcaacacgactgcaagctccatgagggcagggacatcatctcttccatctttgggtccttagtgcaatacctggcagctagccagtgctcagctaaatatttgttgactgaataaatgaa

SEQ ID NO: 210599 - DNA, 120 bp, Artificial Sequence
  ENSG00000115602_29 (sequence is synthesized)
tgcacaaccaaattattgataccaaatgttttttttgtgtacatttctacttctctagctataagtcttaattatacaacaaaatactatttttatatttatgtttggtaaattcaataa

SEQ ID NO: 210600 - DNA, 120 bp, Artificial Sequence
  ENSG00000115602_30 (sequence is synthesized)
ctttcctcatcatttggaaagtcaaattgtttattgcttccctacagttttttctgaatctagcaggattttaatgatatcattataatttgacacaataaaaggacaacatgaaactga

SEQ ID NO: 210601 - DNA, 120 bp, Artificial Sequence
  ENSG00000115602_31 (sequence is synthesized)
aaataattggtggcatcacaaatagccaaagcagggtggagagagtgatccttcctgggtgcaggcaagaaggggatatgttttctacagagttttcaaaacagtgataaagctgtctac

SEQ ID NO: 210602 - DNA, 120 bp, Artificial Sequence
  ENSG00000115602_32 (sequence is synthesized)
aagtcattgtgctttttatcatcactatgcccagacaatgtgaaacatcagagatgaagtgctcttcccacagaggtggactgatccttctccccactcccttggtgtgtctctgaatgc

SEQ ID NO: 210603 - DNA, 120 bp, Artificial Sequence
  ENSG00000115602_33 (sequence is synthesized)
aatgttgtcttggaaaacagctttccaagcatttcactcctgagcacttgccagtttcctcacttgttcttcacatatccaggcaaagacatcctgtttgctatatgaagcattgtatcc

SEQ ID NO: 210604 - DNA, 120 bp, Artificial Sequence
  ENSG00000115602_34 (sequence is synthesized)
cgtataaaaggaaggaaagagagaaatatatttttacactcatcactcctcaggggctgtacaatcatgtagaaattgtttaatgtgcctgtcaaatagccaaagagtgttaaaccctga

SEQ ID NO: 210605 - DNA, 120 bp, Artificial Sequence
  ENSG00000115602_35 (sequence is synthesized)
gttcccacccatgtgtgtggtatggttaggattcatccagatacacagagagaggcacaacaggaggagaaaggataggggtgtggggacagcgggcccccaatatggtgtaatcgtggc

SEQ ID NO: 210606 - DNA, 120 bp, Artificial Sequence
  ENSG00000115602_36 (sequence is synthesized)
aggtctctgcctgaagtgctatgtggggtttttcttgttttaattttgactttaacccctgatttgtaagtttttcataaaataaacagaatcataactcatgtagatggctataagtgc

SEQ ID NO: 210607 - DNA, 120 bp, Artificial Sequence
  ENSG00000115602_37 (sequence is synthesized)
cgtagtgttctgtgggtctctggtgtctgccagtgataagtgtggcaccccaggaaggctgtggaccccatcaaggtgctatgtgagggccatgcttggggtggtggtgggcccagtaga

SEQ ID NO: 210608 - DNA, 120 bp, Artificial Sequence
  ENSG00000115602_38 (sequence is synthesized)
ccctgcagccatccatccagcctgcccactcacactgcccttgtgtactcctgctttgctacgttatcattgatcaatgtccctggttacctatgtgtttgaattatcttcgtgttacag

SEQ ID NO: 210609 - DNA, 120 bp, Artificial Sequence
  ENSG00000115602_39 (sequence is synthesized)
gtgtttaatgattttgctccttctagcttatttgtatttcacctgtttttctttaaatcaacatggttacactctgtttcagcaactgtataaattaaacacaaattattactactgcta

SEQ ID NO: 210610 - DNA, 120 bp, Artificial Sequence
  ENSG00000115602_40 (sequence is synthesized)
tgcctgagctgcccttgctttcattccttccctagtcctttctggaacagttaaatttataaaatgatttgaataaaagtgatttggataaacttctaggaatactatcaggttgaggtc

SEQ ID NO: 210611 - DNA, 120 bp, Artificial Sequence
  ENSG00000115602_41 (sequence is synthesized)
tagctcattctgagctatttggatttacagttgcagggattgatttgtagctgacttagagaaaaacctagctttcctagtgaccaagataactgagagcaattgcttacttttggctgg

SEQ ID NO: 210612 - DNA, 120 bp, Artificial Sequence
  ENSG00000115602_42 (sequence is synthesized)
aattaagaacaaactagcacagaaaatagtaatctggatgttttccatctcagggggcctctagtaggtgaaaaggggcttctaaccttcaagttaagccacagaaggctgatgagattg

SEQ ID NO: 210613 - DNA, 120 bp, Artificial Sequence
  ENSG00000115602_43 (sequence is synthesized)
aaagagaggctggctgttgtatttagtaaagctataaagctgtaagagaaattggctttctgagttgtgaaactgtgggcagaaagttgaggaagaaagaactcaagtacaacccaatga

SEQ ID NO: 210614 - DNA, 120 bp, Artificial Sequence
  ENSG00000115602_44 (sequence is synthesized)
tcttgagtggtttaagatgagcaaggcttttctctgtttccagtaatcggagcccctgcacaaaatgaaataaaggaagtggaaattggcactcagttcttggctgccgtcctgtggcag

SEQ ID NO: 210615 - DNA, 120 bp, Artificial Sequence
  ENSG00000115602_45 (sequence is synthesized)
cagctgcagttgctgattctgtcccacattcaataggactggatatgcgaatgtcaccatatataaaaaacaatcagattgcaatgttccagattatttgatgtattcaacagtatctgg

SEQ ID NO: 210616 - DNA, 120 bp, Artificial Sequence
  ENSG00000115602_46 (sequence is synthesized)
gagcttaatctttagtaatactcattggattcaaagtctaatgagaggctttgtgatggtatactatggtgtacataaatgttgtcgagtggtttttaatctttgtttgcaatactttca

SEQ ID NO: 210617 - DNA, 120 bp, Artificial Sequence
  ENSG00000115604_0 (sequence is synthesized)
tcaggaggcggagatcgctgcttctcacctactttctgaacttggcctccgcagtcgcgacctggcgtgaaggaggagctgccgcccccgccccagcctcggggacgcctctctgaagag

SEQ ID NO: 210618 - DNA, 120 bp, Artificial Sequence
  ENSG00000115604_1 (sequence is synthesized)
aagccatttgaagcagaatccaaaccatgaattgtagagaattacccttgaccctttgggtgcttatatctgtaagcactgcagaatcttgtacttcacgtccccacattactgtggttg

SEQ ID NO: 210619 - DNA, 120 bp, Artificial Sequence
  ENSG00000115604_2 (sequence is synthesized)
aaggggaacctttctatctgaaacattgctcgtgttcacttgcacatgagattgaaacaaccaccaaaagctggtacaaaagcagtggatcacaggaacatgtggagctgaacccaagga

SEQ ID NO: 210620 - DNA, 120 bp, Artificial Sequence
  ENSG00000115604_3 (sequence is synthesized)
gttcctcgagaattgctttgcatgattgtgttttggagttttggccagttgagttgaatgacacaggatcttactttttccaaatgaaaaattatactcagaaatggaaattaaatgtca

SEQ ID NO: 210621 - DNA, 120 bp, Artificial Sequence
  ENSG00000115604_4 (sequence is synthesized)
tcagaagaaataaacacagctgtttcactgaaagacaagtaactagtaaaattgtggaagttaaaaaattttttcagataacctgtgaaaacagttactatcaaacactggtcaacagca

SEQ ID NO: 210622 - DNA, 120 bp, Artificial Sequence
  ENSG00000115604_5 (sequence is synthesized)
catcattgtataagaactgtaaaaagctactactggagaacaataaaaacccaacgataaagaagaacgccgagtttgaagatcaggggtattactcctgcgtgcatttccttcatcata

SEQ ID NO: 210623 - DNA, 120 bp, Artificial Sequence
  ENSG00000115604_6 (sequence is synthesized)
atggaaaactatttaatatcaccaaaaccttcaatataacaatagtggaagatcgcagtaatatagttccggttcttcttggaccaaagcttaaccatgttgcagtggaattaggaaaaa

SEQ ID NO: 210624 - DNA, 120 bp, Artificial Sequence
  ENSG00000115604_7 (sequence is synthesized)
acgtaaggctcaactgctctgctttgctgaatgaagaggatgtaatttattggatgttcggggaagaaaatggatcggatcctaatatacatgaagagaaagaaatgagaattatgactc

SEQ ID NO: 210625 - DNA, 120 bp, Artificial Sequence
  ENSG00000115604_8 (sequence is synthesized)
cagaaggcaaatggcatgcttcaaaagtattgagaattgaaaatattggtgaaagcaatctaaatgttttatataattgcactgtggccagcacgggaggcacagacaccaaaagcttca

SEQ ID NO: 210626 - DNA, 120 bp, Artificial Sequence
  ENSG00000115604_9 (sequence is synthesized)
tcttggtgagaaaagcagacatggctgatatcccaggccacgtcttcacaagaggaatgatcatagctgttttgatcttggtggcagtagtgtgcctagtgactgtgtgtgtcatttata

SEQ ID NO: 210627 - DNA, 120 bp, Artificial Sequence
  ENSG00000115604_10 (sequence is synthesized)
gagttgacttggttctattttatagacatttaacgagaagagatgaaacattaacagatggaaaaacatatgatgcttttgtgtcttacctaaaagaatgccgacctgaaaatggagagg

SEQ ID NO: 210628 - DNA, 120 bp, Artificial Sequence
  ENSG00000115604_11 (sequence is synthesized)
agcacacctttgctgtggagattttgcccagggtgttggagaaacattttgggtataagttatgcatatttgaaagggatgtagtgcctggaggagctgttgttgatgaaatccactcac

SEQ ID NO: 210629 - DNA, 120 bp, Artificial Sequence
  ENSG00000115604_12 (sequence is synthesized)
tgatagagaaaagccgaagactaatcattgtcctaagtaaaagttatatgtctaatgaggtcaggtatgaacttgaaagtggactccatgaagcattggtggaaagaaaaattaaaataa

SEQ ID NO: 210630 - DNA, 120 bp, Artificial Sequence
  ENSG00000115604_13 (sequence is synthesized)
tcttaattgaatttacacctgttactgacttcacattcttgccccaatcactaaagcttttgaaatctcacagagttctgaagtggaaggccgataaatctctttcttataactcaaggt

SEQ ID NO: 210631 - DNA, 120 bp, Artificial Sequence
  ENSG00000115604_14 (sequence is synthesized)
tctggaagaaccttctttacttaatgcctgcaaaaacagtcaagccaggtagagacgaaccggaagtcttgcctgttctttccgagtcttaatcttcagaaacagtgaacgccaaaaaga

SEQ ID NO: 210632 - DNA, 120 bp, Artificial Sequence
  ENSG00000115604_15 (sequence is synthesized)
ataattaactttgtcaaaatcctgctcacaatttgaagatgaaacttgtcattaggttggcgggaatgagactaaagattgcgctgtgggctgtggtcacgtgctcccagaagacctgga

SEQ ID NO: 210633 - DNA, 120 bp, Artificial Sequence
  ENSG00000115604_16 (sequence is synthesized)
attcaaaagaaatggagctattctttttctccctctttcataactggatgcagctgctcatactcaatcccatattcagcaagtgtgaagctggacgtgatgcaaaataaccgatgccct

SEQ ID NO: 210634 - DNA, 120 bp, Artificial Sequence
  ENSG00000115604_17 (sequence is synthesized)
acaaaaagggcgcatctttaagagttttaatgccagtgcttaattcgaatgaggggattttaagtgtctgaagaggcattttctagggaccagtgggtgactgagtaactgaaatgctgc

SEQ ID NO: 210635 - DNA, 120 bp, Artificial Sequence
  ENSG00000115604_18 (sequence is synthesized)
tttcactccctaacaccatggatctggttgtgcataggatgtgggaggaggggctggcagggccgccttcagaggctgcagggcctcagcctcaggatgcatttaatgtatcctggccac

SEQ ID NO: 210636 - DNA, 120 bp, Artificial Sequence
  ENSG00000115604_19 (sequence is synthesized)
agttgcagccaacggttcttgaaagctcggtaaggccctgcaacgcagagcctgcttatgtggatctatttatgggaacttcttaaaaggaccccagaatagctctttatctttcacaag

SEQ ID NO: 210637 - DNA, 120 bp, Artificial Sequence
  ENSG00000115604_20 (sequence is synthesized)
agacacaaattctaattgagttaattatctgggcctttcactttggatgctctgaaacatttgttgattttgtgtgaatgtttatatcaaaatgtttgccaggttgtattagccattgaa

SEQ ID NO: 210638 - DNA, 120 bp, Artificial Sequence
  ENSG00000115604_21 (sequence is synthesized)
tagcaaaaaactgatagttacttgcttgttttttaaaaattacatattaaaaatgcccttggcataaggcagcatggtgtggcagttaagagatgggctgtgcagcccatcctgagctcc

SEQ ID NO: 210639 - DNA, 120 bp, Artificial Sequence
  ENSG00000115604_22 (sequence is synthesized)
agtcctgagtttgctacttacttctgtggcctctggaaccttatccaacctcttggtgcttcagtttcctcatctgtgaaattagaatttataataattgcacctacctcccaggggtaa

SEQ ID NO: 210640 - DNA, 120 bp, Artificial Sequence
  ENSG00000115604_23 (sequence is synthesized)
ctaaatgaataaatataataaagtacttacagtggttcctgacacagactcagcactccgtcagtgttgccatgactatttttattatcattattaatgattacttagatcaattattta

SEQ ID NO: 210641 - DNA, 120 bp, Artificial Sequence
  ENSG00000115604_24 (sequence is synthesized)
gcagtggactaatggaagctacagagcagggaagggaagcagatctagggaggaaggcagttttgatttgaggaggtttgcacatgtagagaagcatactggagaagcatatccagaggg

SEQ ID NO: 210642 - DNA, 120 bp, Artificial Sequence
  ENSG00000115604_25 (sequence is synthesized)
cgaaagatatctctccattgtgcatctgcctcttttgacgttggaagacacatgtcttaccccccaaagggagcccagcactgggagccttcttgatgatctcaaaaataatagctattc

SEQ ID NO: 210643 - DNA, 120 bp, Artificial Sequence
  ENSG00000115604_26 (sequence is synthesized)
aagaaaatcaccaagtgactgtgaaaccgtcagttcggaaggctggttagaacatgtgggagcaacatgaatgttctacaaaagtttaaagcagagattgtttcaaatgggtgtagtaga

SEQ ID NO: 210644 - DNA, 120 bp, Artificial Sequence
  ENSG00000115604_27 (sequence is synthesized)
tattactgaaaaccaaaaaagagtgagattgtcagtgtaagaatgtgatttaatgtttgtagtgcttacaattttgtgtaccaactggatgactaaaaagagtaaaataatttaattaat

SEQ ID NO: 210645 - DNA, 120 bp, Artificial Sequence
  ENSG00000115604_28 (sequence is synthesized)
agctcatattttatgtgtgaaaacatgttagtgaacatatataatcaaaatagatttcattgctattgcatagtctctaatacatagaatgattttgcttttctcttttattatacttgc

SEQ ID NO: 210646 - DNA, 120 bp, Artificial Sequence
  ENSG00000115604_29 (sequence is synthesized)
tttaaaatacttgaaatatattttgcattaaatgcatttcaagttaaatgtcttaaatgtatacattagatgtgtgttttaaaatgcataaaacacgttgaaatacattaatgaaccatt

SEQ ID NO: 210647 - DNA, 120 bp, Artificial Sequence
  ENSG00000115604_30 (sequence is synthesized)
acgcggggcgtctgggtggaggagccggtcctggagcacggctgcgaggagcacccggaccggagggtccccagaccgggacctccgagtcagggaggattctacgccagggagcgcccc

SEQ ID NO: 210648 - DNA, 120 bp, Artificial Sequence
  ENSG00000115604_31 (sequence is synthesized)
ccccagactgagagcgccccagaccgctacactcccggacccggagcttcgcccgaccgcgggcagtgcccacctgcagcctccaccggccggggttagcagccaggagctgccagacgc

SEQ ID NO: 210649 - DNA, 120 bp, Artificial Sequence
  ENSG00000115604_32 (sequence is synthesized)
ggctactgaagatgctgaatttattcagaaaagaaaagattctgcagtctgagttcatgtagtgagagcagagtgaaaaacttgcatcttgaaataaattacatttgtctgaggtgaaaa

SEQ ID NO: 210650 - DNA, 120 bp, Artificial Sequence
  ENSG00000115607_0 (sequence is synthesized)
acaatgtccatggtcatttacaaaataaggttttcctttttcctccagttataatcctttatttttgagctggtgtaacgtggctattgtgtcttctccaggtatctctctggataggaa

SEQ ID NO: 210651 - DNA, 120 bp, Artificial Sequence
  ENSG00000115607_1 (sequence is synthesized)
gaaatatagtagaaccctttgaaaatggatattttcacatattttcgttcagatacaaaagctggcagttactgaaataaggacttgaagttccttcctcttttttttatgtcttaagag

SEQ ID NO: 210652 - DNA, 120 bp, Artificial Sequence
  ENSG00000115607_2 (sequence is synthesized)
caggaaataaagagacagctgaaggtgtagccttgaccaactgaaagggaaatcttcatcctctgaaaaaacatatgtgattctcaaaaaacgcatctggaaaattgataaagaagcgat

SEQ ID NO: 210653 - DNA, 120 bp, Artificial Sequence
  ENSG00000115607_3 (sequence is synthesized)
tctgtagattctcccagcgctgttgggctctcaattccttctgtgaaggacaacatatggtgatggggaaatcagaagctttgagaccctctacacctggatatgaatcccccttctaat

SEQ ID NO: 210654 - DNA, 120 bp, Artificial Sequence
  ENSG00000115607_4 (sequence is synthesized)
acttaccagaaatgaaggggatactcagggcagagttctgaatctcaaaacactctactctggcaaaggaatgaagttattggagtgatgacaggaacacgggagaacaatgctctgttt

SEQ ID NO: 210655 - DNA, 120 bp, Artificial Sequence
  ENSG00000115607_5 (sequence is synthesized)
gggctggatatttctttggcttgttgcaggagagcgaattaaaggatttaatatttcaggttgttccacaaaaaaactcctttggacatattctacaaggagtgaagaggaatttgtctt

SEQ ID NO: 210656 - DNA, 120 bp, Artificial Sequence
  ENSG00000115607_6 (sequence is synthesized)
attttgtgatttaccagagccacagaaatcacatttctgccacagaaatcgactctcaccaaaacaagtccctgagcacctgcccttcatgggtagtaacgacctatctgatgtccaatg

SEQ ID NO: 210657 - DNA, 120 bp, Artificial Sequence
  ENSG00000115607_7 (sequence is synthesized)
gtaccaacaaccttcgaatggagatccattagaggacattaggaaaagctatcctcacatcattcaggacaaatgtacccttcactttttgaccccaggggtgaataattctgggtcata

SEQ ID NO: 210658 - DNA, 120 bp, Artificial Sequence
  ENSG00000115607_8 (sequence is synthesized)
tatttgtagacccaagatgattaagagcccctatgatgtagcctgttgtgtcaagatgattttagaagttaagccccagacaaatgcatcctgtgagtattccgcatcacataagcaaga

SEQ ID NO: 210659 - DNA, 120 bp, Artificial Sequence
  ENSG00000115607_9 (sequence is synthesized)
cctacttcttgggagcactggctctatttcttgccccagtctcagctgccaaagtgatgcacaaagtccagcggtaacctggtacaagaatggaaaactcctctctgtggaaaggagcaa

SEQ ID NO: 210660 - DNA, 120 bp, Artificial Sequence
  ENSG00000115607_10 (sequence is synthesized)
ccgaatcgtagtggatgaagtttatgactatcaccagggcacatatgtatgtgattacactcagtcggatactgtgagttcgtggacagtcagagctgttgttcaagtgagaaccattgt

SEQ ID NO: 210661 - DNA, 120 bp, Artificial Sequence
  ENSG00000115607_11 (sequence is synthesized)
ctcaaaccagatattctggatcctgtcgaggacacactggaagtagaacttggaaagcctttaactattagctgcaaagcacgatttggctttgaaagggtctttaaccctgtcataaaa

SEQ ID NO: 210662 - DNA, 120 bp, Artificial Sequence
  ENSG00000115607_12 (sequence is synthesized)
tggtacatcaaagattctgacctagagtgggaagtctcagtacctgaggcgaaaagtattaaatccactttaaaggatgaaatcattgagcgtaatatcatcttggaaaaagtcactcag

SEQ ID NO: 210663 - DNA, 120 bp, Artificial Sequence
  ENSG00000115607_13 (sequence is synthesized)
cgtgatcttcgcaggaagtttgtttgctttgtccagaactccattggaaacacaacccagtccgtccaactgaaagaaaagagaggagtggtgctcctgtacatcctgcttggcaccatc

SEQ ID NO: 210664 - DNA, 120 bp, Artificial Sequence
  ENSG00000115607_14 (sequence is synthesized)
gggaccctggtggccgtgctggcggcgagtgccctcctctacaggcactggattgaaatagtgctgctgtaccggacctaccagagcaaggatcagacgcttggggataaaaaggatttt

SEQ ID NO: 210665 - DNA, 120 bp, Artificial Sequence
  ENSG00000115607_15 (sequence is synthesized)
gatgctttcgtatcctatgcaaaatggagctcttttccaagtgaggccacttcatctctgagtgaagaacacttggccctgagcctatttcctgatgttttagaaaacaaatatggatat

SEQ ID NO: 210666 - DNA, 120 bp, Artificial Sequence
  ENSG00000115607_16 (sequence is synthesized)
agcctgtgtttgcttgaaagagatgtggctccaggaggagtgtatgcagaagacattgtgagcattattaagagaagcagaagaggaatatttatcttgagccccaactatgtcaatgga

SEQ ID NO: 210667 - DNA, 120 bp, Artificial Sequence
  ENSG00000115607_17 (sequence is synthesized)
cccagtatctttgaactacaagcagcagtgaatcttgccttggatgatcaaacactgaaactcattttaattaagttctgttacttccaagagccagagtctctacctcatctcgtgaaa

SEQ ID NO: 210668 - DNA, 120 bp, Artificial Sequence
  ENSG00000115607_18 (sequence is synthesized)
aaagctctcagggttttgcccacagttacttggagaggcttaaaatcagttcctcccaattctaggttctgggccaaaatgcgctaccacatgcctgtgaaaaactctcagggattcacg

SEQ ID NO: 210669 - DNA, 120 bp, Artificial Sequence
  ENSG00000115607_19 (sequence is synthesized)
tggaaccagctcagaattacctctaggatttttcagtggaaaggactcagtagaacagaaaccactgggaggagctcccagcctaaggaatggtgaaatgagccctggagccccctccag

SEQ ID NO: 210670 - DNA, 120 bp, Artificial Sequence
  ENSG00000115607_20 (sequence is synthesized)
tccagtccctgggatagagatgttgctggacagaactcacagctctgtgtgtgtgtgttcaggctgataggaaattcaaagagtctcctgccagcaccaagcaagcttgatggacaatgg

SEQ ID NO: 210671 - DNA, 120 bp, Artificial Sequence
  ENSG00000115607_21 (sequence is synthesized)
agtgggattgagactgtggtttagagcctttgatttcctggactggactgacggcgagtgaattctctagaccttgggtactttcagtacacaacacccctaagatttcccagtggtccg

SEQ ID NO: 210672 - DNA, 120 bp, Artificial Sequence
  ENSG00000115607_22 (sequence is synthesized)
agcagaatcagaaaatacagctacttctgccttatggctagggaactgtcatgtctaccatgtattgtacatatgactttatgtatacttgcaatcaaataaatattattttattagaaa

SEQ ID NO: 210673 - DNA, 120 bp, Artificial Sequence
  ENSG00000115607_23 (sequence is synthesized)
tctctccctgggtctcagatccctgttgacactgctttctccagcactttcctctctctcccccgtttctcaccaaaaagttttgtgggtaaagtttagttcattatttctgccagagac

SEQ ID NO: 210674 - DNA, 120 bp, Artificial Sequence
  ENSG00000115616_0 (sequence is synthesized)
ggagagcagcgcaccggcatgggcaggcggccggcggcggagggcggctgagggctgctgagggtacgcgcagcggcctctcgtcgccctgcacgtgcctcgccaggcagtgcgcctgct

SEQ ID NO: 210675 - DNA, 120 bp, Artificial Sequence
  ENSG00000115616_1 (sequence is synthesized)
cgcagcgaggacctagccctctggttgcagagacccggtgccgcagcagcggcgggtggctgtcgctgccctgccctgcacggggcagggcggagcgggctgagcagcccgggcgcgatg

SEQ ID NO: 210676 - DNA, 120 bp, Artificial Sequence
  ENSG00000115616_2 (sequence is synthesized)
cgttgagcgctcggagggccaaccgccggtccccttggcggcaaccggcggcacccatggaaccactgggcaactggaggagcctgcgggcgccactgcctccgatgctgttgctgctgc

SEQ ID NO: 210677 - DNA, 120 bp, Artificial Sequence
  ENSG00000115616_3 (sequence is synthesized)
tcctgcaggtggcggggcccgtgggcgccctggcggagaccttgctgaacgcgccgagggccatgggcaccagttccagcccgcctagccctgcgagcgtggtggctcccggaacgacgc

SEQ ID NO: 210678 - DNA, 120 bp, Artificial Sequence
  ENSG00000115616_4 (sequence is synthesized)
tgttcgaggagagccggctgcctgtgtttacgctggattacccccacgtgcagatccccttcgagatcaccctttggatcctgctggcctccctggccaagattggcttccatctgtatc

SEQ ID NO: 210679 - DNA, 120 bp, Artificial Sequence
  ENSG00000115616_5 (sequence is synthesized)
acaagttgcccacaatagtgcctgagagctgccttcttataatggttggacttctactaggtgggattatttttggtgttgatgagaagtctccccctgcaatgaagactgatgtatttt

SEQ ID NO: 210680 - DNA, 120 bp, Artificial Sequence
  ENSG00000115616_6 (sequence is synthesized)
tcttgtacctcctcccacccatcgtgctggatgccggctatttcatgcccactcgcccattctttgagaacattggcacgattttctggtatgctgtggtagggacactttggaattcca

SEQ ID NO: 210681 - DNA, 120 bp, Artificial Sequence
  ENSG00000115616_7 (sequence is synthesized)
ttggcattggggtgtctttgtttggtatctgccagatcgaagcattcggcctcagcgacatcactttgctccagaacctgctctttggcagcttaatctcagctgtcgatcctgtggctg

SEQ ID NO: 210682 - DNA, 120 bp, Artificial Sequence
  ENSG00000115616_8 (sequence is synthesized)
tgcttgctgtctttgagaacattcacgtcaatgagcagctctacatcctggtctttggagagtccctgctgaatgatgcagtaacagtggtcctgtacaacttgttcaagtcgttttgcc

SEQ ID NO: 210683 - DNA, 120 bp, Artificial Sequence
  ENSG00000115616_9 (sequence is synthesized)
agatgaaaaccattgagaccattgatgtgtttgcaggaatcgccaacttctttgttgtgggaatcggtggggtgctgattggcatcttcttgggctttatagcggcatttactactcgat

SEQ ID NO: 210684 - DNA, 120 bp, Artificial Sequence
  ENSG00000115616_10 (sequence is synthesized)
tcacccataatatccgagtgatcgagccactgtttgttttcctgtacagttatttgtcctacatcacagctgaaatgtttcacctctcaggcatcatggcaatcactgcttgtgcaatga

SEQ ID NO: 210685 - DNA, 120 bp, Artificial Sequence
  ENSG00000115616_11 (sequence is synthesized)
ctatgaataagtacgtagaagaaaatgtatctcagaaatcctacacgaccatcaagtacttcatgaagatgctgagcagtgtcagcgaaaccttgatcttcatcttcatgggtgtgtcta

SEQ ID NO: 210686 - DNA, 120 bp, Artificial Sequence
  ENSG00000115616_12 (sequence is synthesized)
ccgtgggcaagaaccacgagtggaactgggccttcgtctgcttcaccctggccttctgcctcatgtggcgagccctgggtgtttttgtcctgactcaggtcattaataggttccggacca

SEQ ID NO: 210687 - DNA, 120 bp, Artificial Sequence
  ENSG00000115616_13 (sequence is synthesized)
ttcccctgacctttaaggaccagttcatcattgcctatggaggacttcgaggtgccatctgttttgcgttagtgtttctccttcctgctgctgtgtttcctcggaaaaaattgtttatta

SEQ ID NO: 210688 - DNA, 120 bp, Artificial Sequence
  ENSG00000115616_14 (sequence is synthesized)
cggctgccattgttgtcatattctttactgtcttcattctgggaataactattcgaccactggtggagtttcttgatgtcaagaggtccaataagaaacaacaagctgtcagtgaagaaa

SEQ ID NO: 210689 - DNA, 120 bp, Artificial Sequence
  ENSG00000115616_15 (sequence is synthesized)
tctattgtcggttgtttgatcatgtgaagactggaattgaagatgtttgtggacattggggtcacaacttttggagagacaagtttaagaagtttgatgataaatatctgcggaagcttt

SEQ ID NO: 210690 - DNA, 120 bp, Artificial Sequence
  ENSG00000115616_16 (sequence is synthesized)
tgattcgggaaaaccaaccaaagtcaagtattgtatctttatataaaaagcttgaaataaaacatgccattgagatggcagagactgggatgataagtactgtccctacatttgcatctc

SEQ ID NO: 210691 - DNA, 120 bp, Artificial Sequence
  ENSG00000115616_17 (sequence is synthesized)
taaatgattgtcgtgaagaaaaaataaggaaggtcacgtccagtgaaactgatgaaattcgagaactcttatcaagaaatctctatcaaatccgtcagcgaactttatcctacaacagac

SEQ ID NO: 210692 - DNA, 120 bp, Artificial Sequence
  ENSG00000115616_18 (sequence is synthesized)
acagtctgacagccgacacaagtgagagacaagccaaggagattctgattcgccggcgacacagtttgcgagaaagcattaggaaggacagcagcttgaatcgagaacacagggcttcca

SEQ ID NO: 210693 - DNA, 120 bp, Artificial Sequence
  ENSG00000115616_19 (sequence is synthesized)
cttcaacctcccgatatttatccttacctaaaaatacgaagcttccagaaaagctacaaaagaggaggactatttctattgcagatggcaatagcagcgactcagacgcagatgccggga

SEQ ID NO: 210694 - DNA, 120 bp, Artificial Sequence
  ENSG00000115616_20 (sequence is synthesized)
ccaccgtgctcaatttgcagcccagagccaggcgcttcttgccagaacagttctccaagaaatccccccagtcctataaaatggaatggaagaatgaggtagatgttgattctggccgag

SEQ ID NO: 210695 - DNA, 120 bp, Artificial Sequence
  ENSG00000115616_21 (sequence is synthesized)
atatgcccagcacccccccaacaccccacagcagagaaaagggcacccagacgtcaggcttactacagcagccccttctctctaaagaccagtctggctcagagagggaagacagtttga

SEQ ID NO: 210696 - DNA, 120 bp, Artificial Sequence
  ENSG00000115616_22 (sequence is synthesized)
ctgaaggcatcccgcccaagccgccaccacggctggtctggagggcatcggaacctggaagccggaaagcccgatttgggagtgagaagccttaagagaagcagcgaaagcagatctgag

SEQ ID NO: 210697 - DNA, 120 bp, Artificial Sequence
  ENSG00000115616_23 (sequence is synthesized)
aaatacttctggagggcgacagattcatgccacggataaatgaggcaaatccgaagaaaaggaaaatcgaataaaaaatagtcccacaaaataccttttgtgactaatgggtagcaatcg

SEQ ID NO: 210698 - DNA, 120 bp, Artificial Sequence
  ENSG00000115616_24 (sequence is synthesized)
tattatttgctggcctgaagagaaaaaatggtaatgtgtgcctttattgaacttgaatgacagaacttgaaatttttaacacatccttcttggtgaagattttaatatattacttatatg

SEQ ID NO: 210699 - DNA, 120 bp, Artificial Sequence
  ENSG00000115616_25 (sequence is synthesized)
cttcaaattttatttatgaaaaaatatgtatatctgtaatcagttgttaagtgaatggcactaaaagtatcgagaacagctttctttcccaggggtgaaggatggcgctcgggggtgact

SEQ ID NO: 210700 - DNA, 120 bp, Artificial Sequence
  ENSG00000115616_26 (sequence is synthesized)
cctaagctcagcgtggaagcttttccctgtcctgacccgatggagcagccggtaagtgaagagcacagctggaagcagagacaccttatgactcaaactgggcaaacaatcggaacgtca

SEQ ID NO: 210701 - DNA, 120 bp, Artificial Sequence
  ENSG00000115616_27 (sequence is synthesized)
tgcagaaggaatggcctgactcctgcagtgcagattggaggccccagaactcctatgaactactgagagtctactggtttttaacttgttcctctgtctactgtgtgtttgggggtgaca

SEQ ID NO: 210702 - DNA, 120 bp, Artificial Sequence
  ENSG00000115616_28 (sequence is synthesized)
tctaaattccatttcttcttcttgtttaaatggtgcagagagaaaggttgcccagacatccaccagcttactgtgttgacagatttgggagcagcttttgatgaagttccacccatgagg

SEQ ID NO: 210703 - DNA, 120 bp, Artificial Sequence
  ENSG00000115616_29 (sequence is synthesized)
gtccatgtggcaagtagggccacagggcagcacctggttacaacttgctggtgggttttatgttgtgcaatactaggaggaggaggcaggtgatctatgctgatctatgatcacctgctt

SEQ ID NO: 210704 - DNA, 120 bp, Artificial Sequence
  ENSG00000115616_30 (sequence is synthesized)
cagtagaatttttctgtagagtgttgtttgaattttgagcctccaggttagaggctccaagcagacaaagaagaaagtttgtagacacaatattctaacattgcacaagttgatgagata

SEQ ID NO: 210705 - DNA, 120 bp, Artificial Sequence
  ENSG00000115616_31 (sequence is synthesized)
tcaagttttgaatattattcaggaagcactttggagaatgtgggagtcctactgttttgcactagtctgtaatttgttacctctccccattcgataatatagtaactcagaattttcata

SEQ ID NO: 210706 - DNA, 120 bp, Artificial Sequence
  ENSG00000115616_32 (sequence is synthesized)
taaaattgaattctactcattagagtactttttaaaagtacagcagaaagaaaagaagtggaacataagcattcaagattaatatttgattctctatctcttaactgtagattttattgg

SEQ ID NO: 210707 - DNA, 120 bp, Artificial Sequence
  ENSG00000115616_33 (sequence is synthesized)
cctgttttttttttctaaataattctttaaaacttgactggaacatgcctctgcatttctgagtgtagaaattaaatgaagccactcacagtcctttgatttcccactgaagatacccca

SEQ ID NO: 210708 - DNA, 120 bp, Artificial Sequence
  ENSG00000115616_34 (sequence is synthesized)
aaggatgcaagtgcctacagtattatcaggaggagaacatgaaaatattaagacaaaaatcctcagcagttgttctccaccccttctccacctccaccagcaaggagaagtcaatctaca

SEQ ID NO: 210709 - DNA, 120 bp, Artificial Sequence
  ENSG00000115616_35 (sequence is synthesized)
cttttttctcatgttctaaagtcttagaatactgctggattgttgagcatgagacagagcaaaggttagatacacaaggtacaagttcataggagcacaattccttgattcagggaaagt

SEQ ID NO: 210710 - DNA, 120 bp, Artificial Sequence
  ENSG00000115616_36 (sequence is synthesized)
agcacagaatgcaatttgaaaactacaggcttaggactctgtgccaaaaatctctattttaaatgaaaatatttatataaaaatacatttattctgcttaacacaaattaaaactgacat

SEQ ID NO: 210711 - DNA, 120 bp, Artificial Sequence
  ENSG00000115616_37 (sequence is synthesized)
aaaattttatgataataacatgattcaagaaatgtgatgtagatttttgagaatgccaaaaatcaggtttcagaaaagctacagtatgaaatctgaaaagcaacagaaattgaaagtgac

SEQ ID NO: 210712 - DNA, 120 bp, Artificial Sequence
  ENSG00000115616_38 (sequence is synthesized)
cttaaagaataaatttcctaatttttcccagtttcctatgtttataactattataaagagtttaactttctggaactgaaggagaaaacatgaaaatgtttatattgcttcttgttaagc

SEQ ID NO: 210713 - DNA, 120 bp, Artificial Sequence
  ENSG00000115616_39 (sequence is synthesized)
aggtagaccaaattccgctttcagtaattcatccatacagaatttggatgactatgtataaaggaaaacttaaatcttaattattatcagtttaaattttttttgtttgttgaatgacaa

SEQ ID NO: 210714 - DNA, 120 bp, Artificial Sequence
  ENSG00000115616_40 (sequence is synthesized)
aggcaataaaaataaatttgactttagctttttttctatactttcctctttttgtaattcttaaattctagtcactagtcattatgagagtattgactaaatattttcacaatctaaata

SEQ ID NO: 210715 - DNA, 120 bp, Artificial Sequence
  ENSG00000115616_41 (sequence is synthesized)
ttgtcacaatctaaatttctgtagtagagagagccgtagccctttgtaaaggctttcgttcgtccaaacaacacttgatccaaccaaagttccaatgtgactgtggatctttgataggtc

SEQ ID NO: 210716 - DNA, 120 bp, Artificial Sequence
  ENSG00000115616_42 (sequence is synthesized)
tttggtgttggttgtaacaaaatttgatttgaactacctataaatgaaaagtcggggtttattactttatatgtaatgctgagaggagactgttgggaacagttatgtcaatgagcaaac

SEQ ID NO: 210717 - DNA, 120 bp, Artificial Sequence
  ENSG00000115616_43 (sequence is synthesized)
tagaaattggcttcaaagtctaatacttttaaaagcatgtgttttgtgtatatgctcacaaaatgtctgtgaagagatttctttcagcttttgctcagctttatggtggggtgtactgtt

SEQ ID NO: 210718 - DNA, 120 bp, Artificial Sequence
  ENSG00000115616_44 (sequence is synthesized)
ttatctgggcggtgagggtattgatttacataaaaactgtagacaaacacagtacgagtctcagcacgttttgcatttattgtactgcccaaattgtttttatgttaaaagtcacgtttc

SEQ ID NO: 210719 - DNA, 120 bp, Artificial Sequence
  ENSG00000115616_45 (sequence is synthesized)
ataatctgcaatatttttgtcaaagtgcacactgtactttcttcttaaaaacgtgattaaagagatcactttgtccggatgaagcagctgttggcattatccgctgaggcttgaacacca

SEQ ID NO: 210720 - DNA, 120 bp, Artificial Sequence
  ENSG00000115616_46 (sequence is synthesized)
aagatggaacaatgtaggtgaaaagtttaggatatgagaagaagagcagtataagacagttccatgtgtttttgactgcgcagccaggggaatgaagggaataactattcgaccactggt

SEQ ID NO: 210721 - DNA, 120 bp, Artificial Sequence
  ENSG00000115616_47 (sequence is synthesized)
gctgccattgttgtcatattctttactgtcttcattctgtcatttcttcaaaagacagttcatccttcattcattcatgccttccaacactgaggacactgagttctctggaatcctgaa

SEQ ID NO: 210722 - DNA, 120 bp, Artificial Sequence
  ENSG00000115616_48 (sequence is synthesized)
actgtctttattatcaacacctttctgctttcgcgcagtaatatgggccagaaatggtgatgacttgcccttgggaagtagtggcagagctgagaaaaagcagatgcagccctctttatt

SEQ ID NO: 210723 - DNA, 120 bp, Artificial Sequence
  ENSG00000115616_49 (sequence is synthesized)
ttggaagactcttcaatgagactttatgtgagaagtgagccaaagcagggcagaggatcagtcgaaggatgactgctaactcttgtgttgtgtggaatgtcagagagcttgtgaggacag

SEQ ID NO: 210724 - DNA, 120 bp, Artificial Sequence
  ENSG00000115641_0 (sequence is synthesized)
gcagcgctccactcggccggcagcggagccgcagccaccagccgcccgcgccctccagccccgtccgggagtccccggcccgctgcggtgcctggctgagaactgtgtcttcctggagac

SEQ ID NO: 210725 - DNA, 120 bp, Artificial Sequence
  ENSG00000115641_1 (sequence is synthesized)
taggctggcattttgactttggggttgctgaaaagccaggagtcaaaatgactgagcgctttgactgccaccattgcaacgaatctctctttggcaagaagtacatcctgcgggaggaga

SEQ ID NO: 210726 - DNA, 120 bp, Artificial Sequence
  ENSG00000115641_2 (sequence is synthesized)
gcccctactgcgtggtgtgctttgagaccctgttcgccaacacctgcgaggagtgtgggaagcccatcggctgtgactgcaaggacttgtcttacaaggaccggcactggcatgaagcct

SEQ ID NO: 210727 - DNA, 120 bp, Artificial Sequence
  ENSG00000115641_3 (sequence is synthesized)
gtttccactgctcgcagtgcagaaactcactggtggacaagccctttgctgccaaggaggaccagctgctctgtacagactgctattccaacgagtactcatccaagtgccaggaatgca

SEQ ID NO: 210728 - DNA, 120 bp, Artificial Sequence
  ENSG00000115641_4 (sequence is synthesized)
agaagaccatcatgccaggtacccgcaagatggagtacaagggcagcagctggcatgagacctgcttcatctgccaccgctgccagcagccaattggaaccaagagtttcatccccaaag

SEQ ID NO: 210729 - DNA, 120 bp, Artificial Sequence
  ENSG00000115641_5 (sequence is synthesized)
acaatcagaatttctgtgtgccctgctatgagaaacaacatgccatgcagtgcgttcagtgcaaaaagcccatcaccacgggaggggtcacttaccgggagcagccctggcacaaggagt

SEQ ID NO: 210730 - DNA, 120 bp, Artificial Sequence
  ENSG00000115641_6 (sequence is synthesized)
cagcgcttcacagctcgcgatgactttgcctactgcctgaactgcttctgtgacttgtatgccaagaagtgtgctgggtgcaccaaccccatcagcggacttggtggcacaaaatacatc

SEQ ID NO: 210731 - DNA, 120 bp, Artificial Sequence
  ENSG00000115641_7 (sequence is synthesized)
tcctttgaggaacggcagtggcataacgactgctttaactgtaagaagtgctccctctcactggtggggcgtggcttcctcacagagagggacgacatcctgtgccccgactgtgggaaa

SEQ ID NO: 210732 - DNA, 120 bp, Artificial Sequence
  ENSG00000115641_8 (sequence is synthesized)
gacatctgaattcaacacagagaagttgctgcttgtgatctcacacacagatttttatgttttctttctcacccaggcaatcttgccttctggtttcttccagccacattgagactttct

SEQ ID NO: 210733 - DNA, 120 bp, Artificial Sequence
  ENSG00000115641_9 (sequence is synthesized)
tctagtgcttttcagtgatactcacgtttgcttaaaccctttagtgctttgtgatagttcagtcccagggaaagagaaaactcgccctaggccctaggtgggaagatggtttgaaatttt

SEQ ID NO: 210734 - DNA, 120 bp, Artificial Sequence
  ENSG00000115641_10 (sequence is synthesized)
tgtaatcgagtaaggcacacccaaatgtaaaaatccttttgaatgatgcctttataaatctttctctcactgtctatttaagtgcaattaacatatgtcacgaacttgaaagttttctaa

SEQ ID NO: 210735 - DNA, 120 bp, Artificial Sequence
  ENSG00000115641_11 (sequence is synthesized)
actcaataaggtaatgaccagttgttatttacagctctgtaacctcccgttgcgtcaagtctaaaccaagattatgtgacttgcaataaagttattcagaacagaatcttttgccaggca

SEQ ID NO: 210736 - DNA, 120 bp, Artificial Sequence
  ENSG00000115641_12 (sequence is synthesized)
ccgccgcagcccggggcgggggcacggcaaccgcgaggcctgggggcgcccgccccccgcgccccacgcccggtgccagcgagccgaggcgtgcatctccttatatggtcaaatgacacg

SEQ ID NO: 210737 - DNA, 120 bp, Artificial Sequence
  ENSG00000115641_13 (sequence is synthesized)
atggtcaaatgacacggcggggtttctcgagggcgggagctgcgcagcgctccactcggccggcagcggagccgcagccaccagccgcccgcgccctccagccccgtccgggagtccccg

SEQ ID NO: 210738 - DNA, 120 bp, Artificial Sequence
  ENSG00000115641_14 (sequence is synthesized)
gcccgctgcggtgccgtgagtacctccaaccccctgcgccccggagggaggccgaggggcttagccaccagggctcggaagtgggggccgaatccggtgcgagacccaaggagaggggag

SEQ ID NO: 210739 - DNA, 120 bp, Artificial Sequence
  ENSG00000115641_15 (sequence is synthesized)
gagacccaaggagaggggagcagagccggagttggggagactgtggctgagaactgtgtcttcctggagactaggctggcattttgactttgggacggagtctcgctttgtcgcccaggc

SEQ ID NO: 210740 - DNA, 120 bp, Artificial Sequence
  ENSG00000115641_16 (sequence is synthesized)
cagctgcacagaaggttggggccatccaaccaggcagtccgcctgcacagcagctgtccctgctcatcgggctggaggacagaagacagaaccctaaaaccacaggttgctgaaaagcca

SEQ ID NO: 210741 - DNA, 120 bp, Artificial Sequence
  ENSG00000115641_17 (sequence is synthesized)
actttggttttcccgccctggaggggaatccaagatgtctaactagtcttctggccccgagagggagaggtggggataggaccttcctttagtcccctccgtagtggaacgaaggattct

SEQ ID NO: 210742 - DNA, 120 bp, Artificial Sequence
  ENSG00000115641_18 (sequence is synthesized)
ttatggtcatctgtggtgttcatttcgtaaagaagcatctgcagggtaagaaggaaaaacgtccaccttgcaaatatatcccaggcacatgcctcctgagaagtgaccccctcctccctc

SEQ ID NO: 210743 - DNA, 120 bp, Artificial Sequence
  ENSG00000115641_19 (sequence is synthesized)
cgcctcccccggcacgtcctggggcttctccagtctcccgctcctgggaccaggcagagatcccggcgtgggcagacccctgccaccgcgcccaggcctcgtccgaaactcgcgcccgag

SEQ ID NO: 210744 - DNA, 120 bp, Artificial Sequence
  ENSG00000115641_20 (sequence is synthesized)
tacaggtcgaggcactgagtctaagtaacactttattgcatggtcccatggtcactgtatgaagtgcagttccaatgttccaatggcctggggcattgccaactggaacagcatcacacc

SEQ ID NO: 210745 - DNA, 120 bp, Artificial Sequence
  ENSG00000115641_21 (sequence is synthesized)
gtgagctgagatggcaccactgaactccagcctggaagacaaagagactccgtctcaaaaaaaaaaagccttcagtcagcaccaggcacctcttccttgctaccttctctcccttttttt

SEQ ID NO: 210746 - DNA, 77 bp, Artificial Sequence
  ENSG00000115641_22 (sequence is synthesized)
cggtccaccttctctgtctttcccatactctttctcttggaatgtaatcctctgcatttgacacagtaacataaact

SEQ ID NO: 210747 - DNA, 120 bp, Artificial Sequence
  ENSG00000115641_23 (sequence is synthesized)
tggaatgtaatcctctgcatttgacacagtaacataaactgacagtgaagccaattttcaggtcatttttcttggcagagcttatcggctctgtcccagtgttatggatccacatcttac

SEQ ID NO: 210748 - DNA, 120 bp, Artificial Sequence
  ENSG00000115641_24 (sequence is synthesized)
accgacttccataaagtgaaagattgcacaaggacataagcaacttgaggccagagacgacatcctgttcatctttatgttctcaacaccctcgcaactgagggcacactgggagccttc

SEQ ID NO: 210749 - DNA, 120 bp, Artificial Sequence
  ENSG00000115641_25 (sequence is synthesized)
agtgtttctgaaaagggcagtaaagcaggagagacacacagtcattacagtaaaaataacattctgagctactagtgtggcagtagtctgtggaataatctcagatagcagtatacagtt

SEQ ID NO: 210750 - DNA, 120 bp, Artificial Sequence
  ENSG00000115641_26 (sequence is synthesized)
gggaagcacggagccaatgtatgggatagaacattgcacagttctctttagaatgggagcatcagtgacctttttgtccttagttttctaagacaatgcaatataataaaatgataggct

SEQ ID NO: 210751 - DNA, 120 bp, Artificial Sequence
  ENSG00000115641_27 (sequence is synthesized)
gagcaacagaaaaatttggtggaaatcaagtctgatatatgctgagcatatgtgaaatcagtttcttaatctgagtgttagtcactgttagaatgtttgataatgtctggaatgagtctt

SEQ ID NO: 210752 - DNA, 120 bp, Artificial Sequence
  ENSG00000115641_28 (sequence is synthesized)
ttggttttatagttgacttgaggttttgcttaaaaagaataatttcatcctttgttagttgttttgctgttttctacttcataatataaaagtaaaagcactccaaatttcattttggaa

SEQ ID NO: 210753 - DNA, 120 bp, Artificial Sequence
  ENSG00000115641_29 (sequence is synthesized)
catcttacttgttcctcattaaaaccatagactctcccaaccttaaattacccattctaaaattaatggttagggggaattccacttctagtaaatagctccaattggactaattctcct

SEQ ID NO: 210754 - DNA, 120 bp, Artificial Sequence
  ENSG00000115641_30 (sequence is synthesized)
ccaaattaacagtcattctggacaaaatatttatttaattgttaagaacactggagcacgatccaaagcaggcagatattggagggcagtagacacttggaagaagagaacgacactggg

SEQ ID NO: 210755 - DNA, 120 bp, Artificial Sequence
  ENSG00000115641_31 (sequence is synthesized)
tgattttcctgtttcggccttttatccaatggcaggcccccgccagggatctaaaactctgttaggaaacctgcagtcttactggcctgaggaaccagaggccagagttcgggacaaaca

SEQ ID NO: 210756 - DNA, 120 bp, Artificial Sequence
  ENSG00000115641_32 (sequence is synthesized)
gcctctggaaagtgaggaagaaaatcctgaaaaggagagccccaagttcgtcgcatgaacttagaaatttctggctgacaactgaaccgtgtatacttaggccagactccaagcagccca

SEQ ID NO: 210757 - DNA, 120 bp, Artificial Sequence
  ENSG00000115641_33 (sequence is synthesized)
gccaaggctaaaagcattgactgacaggactttacagatagtggtttgcagggcttagctgaccgaccctcttcctactgaaggaaattacttgtatataaaccacacaacacaaagtct

SEQ ID NO: 210758 - DNA, 120 bp, Artificial Sequence
  ENSG00000115641_34 (sequence is synthesized)
ctgaaaatttccccagaagcatacaacaaataaacattcattcaggaaaatccactactaagtcttagaaagaacagtgagtctgtggcatttgagccacagcctcatcctatcccatcc

SEQ ID NO: 210759 - DNA, 120 bp, Artificial Sequence
  ENSG00000115641_35 (sequence is synthesized)
ccactccccagcttcatgtgacaaactctattctggaccaatgcagccaaaaattaaggggtctctcttcctccagctaccagtctagggctttgccccaggtgcgacaggctgagaatc

SEQ ID NO: 210760 - DNA, 120 bp, Artificial Sequence
  ENSG00000115641_36 (sequence is synthesized)
gtagagctccaattgcccctaccctagcctgcttagtgcggaggctccacattgggaggggcaatctgagaagaccagcggctatcaacccactcacagagaagggatgtcagtcctgga

SEQ ID NO: 210761 - DNA, 120 bp, Artificial Sequence
  ENSG00000115641_37 (sequence is synthesized)
gaagcaggctgctgtccagcccccagaggagatccaggctctgagactggtaacccagcagttatgcccaaggggactggtatttggtacggagaacgagaaatctttgcctaaggggat

SEQ ID NO: 210762 - DNA, 120 bp, Artificial Sequence
  ENSG00000115641_38 (sequence is synthesized)
tgtcaaaaacaataagacatcttaccagtgagccattaaggaaggggctggtaactccatgctattagtagcaaaaagcaaaatgacagaccagccagaagtttaacacagaaaaccaga

SEQ ID NO: 210763 - DNA, 120 bp, Artificial Sequence
  ENSG00000115641_39 (sequence is synthesized)
gaaagagatagccaagaagagccctcctggaatctggtttatccttgaggttcgggaagtatgtatggacagggctgtatccactcaggagcaatcagatgtgaaacaaacttgaaagca

SEQ ID NO: 210764 - DNA, 120 bp, Artificial Sequence
  ENSG00000115641_40 (sequence is synthesized)
ttctctaaggcatacacagatccatcagcaaagagcagaaatcttattagctcaaagtgcttaagcagaacctctgaccaaacactggctgaacacataaatgtgtttgttcaaagaact

SEQ ID NO: 210765 - DNA, 120 bp, Artificial Sequence
  ENSG00000115641_41 (sequence is synthesized)
aaaggaaatcatatttaaaaaaggaaggtaaaggaacaattacagttgttcctccatatccatggattcctcatctgtggattcaaccaactgtggatcaaaagtatttaggaaaaaaaa

SEQ ID NO: 210766 - DNA, 120 bp, Artificial Sequence
  ENSG00000115641_42 (sequence is synthesized)
tcagcctcagtgactcaggcagcctcctttgtcagcaccgggcctgagtcgctaagcggctctctgactcagatgccctgaggtacaaagttccttgagcttgggtgaatggaaacatta

SEQ ID NO: 210767 - DNA, 120 bp, Artificial Sequence
  ENSG00000115641_43 (sequence is synthesized)
gacattgggttcttctgtgcggttttattatgagaatttgatcaaagccacatttattaagtgtccatctcaagttgcattatactgagttcgcttcctcaagatgaccatctgaaacaa

SEQ ID NO: 210768 - DNA, 70 bp, Artificial Sequence
  ENSG00000115641_44 (sequence is synthesized)
tttttttgtttttgtttttttctgtcctggtcctgtagaatcagaggaagtggaaaacacatatcaggtt

SEQ ID NO: 210769 - DNA, 120 bp, Artificial Sequence
  ENSG00000115641_45 (sequence is synthesized)
tcctgtagaatcagaggaagtggaaaacacatatcaggttgctgaaaagccaggagtcaaaatgactgagcgctttgactgccaccattgcaacgaatctctctttggcaagaagtacat

SEQ ID NO: 210770 - DNA, 120 bp, Artificial Sequence
  ENSG00000115641_46 (sequence is synthesized)
tgtgctctttcctccatctggggacttaatgaccggagcactggctgtggtgacatctagtggctttgctttcctgttgaccttggagatttctctctcagtttttcttgaaggacttgt

SEQ ID NO: 210771 - DNA, 120 bp, Artificial Sequence
  ENSG00000115641_47 (sequence is synthesized)
gagccccctctgaggggcgtggaccctgcgtgtagcctttcggaagcttcttccctctagcgaatgtgatctctgcccacaagcactgggtgagggccttgccaggacttttgtgcttag

SEQ ID NO: 210772 - DNA, 120 bp, Artificial Sequence
  ENSG00000115641_48 (sequence is synthesized)
tatctctaagtacattttctgtattctagcaattagtgcccttatctaactacccagctgcctaccaatactggaactttcttaagggtggtgctctcttcctcttgtctgtttgccccg

SEQ ID NO: 210773 - DNA, 120 bp, Artificial Sequence
  ENSG00000115641_49 (sequence is synthesized)
tggtgagtaacgtggagcaggtgctgtgctcagtcaatatttgatgaatgaatgtgtacatgagagaaccagagttggttcctggataaatgggcacataaaagcacaaagtccttggaa

SEQ ID NO: 210774 - DNA, 120 bp, Artificial Sequence
  ENSG00000115648_0 (sequence is synthesized)
agttgcccgcctgccccggagagccaggcgctaaccagccgctctgcgccccgcgccctgcttgcccccattatccagccttgccccggcgccctgacctgacgccctggcctgacgccc

SEQ ID NO: 210775 - DNA, 120 bp, Artificial Sequence
  ENSG00000115648_1 (sequence is synthesized)
tgcttcgtcgcctcctttctctcccaggtgctggaccagggactgagcgtcccccggagagggtccggtgtgaccccgacaagaagcagaaatggggaagaaactggatctttccaagct

SEQ ID NO: 210776 - DNA, 120 bp, Artificial Sequence
  ENSG00000115648_2 (sequence is synthesized)
cactgatgaagaggcccagcatgtcttggaagttgttcaacgagattttgacctccgaaggaaagaagaggaacggctagaggcgttgaagggcaagattaagaaggaaagctccaagag

SEQ ID NO: 210777 - DNA, 120 bp, Artificial Sequence
  ENSG00000115648_3 (sequence is synthesized)
ggagctgctttccgacactgcccatctgaacgagacccactgcgcccgctgcctgcagccctaccagctgcttgtgaatagcaaaaggcagtgcctggaatgtggcctcttcacctgcaa

SEQ ID NO: 210778 - DNA, 120 bp, Artificial Sequence
  ENSG00000115648_4 (sequence is synthesized)
aagctgtggccgcgtccacccggaggagcagggctggatctgtgacccctgccatctggccagagtcgtgaagatcggctcactggagtggtactatgagcatgtgaaagcccgcttcaa

SEQ ID NO: 210779 - DNA, 120 bp, Artificial Sequence
  ENSG00000115648_5 (sequence is synthesized)
gaggttcggaagtgccaaggtcatccggtccctccacgggcggctgcagggtggagctgggcctgaactgatatctgaagagagaagtggagacagcgaccagacagatgaggatggaga

SEQ ID NO: 210780 - DNA, 120 bp, Artificial Sequence
  ENSG00000115648_6 (sequence is synthesized)
acctggctcagaggcccaggcccaggcccagccctttggcagcaaaaaaaagcgcctcctctccgtccacgacttcgacttcgagggagactcagatgactccactcagcctcaaggtca

SEQ ID NO: 210781 - DNA, 120 bp, Artificial Sequence
  ENSG00000115648_7 (sequence is synthesized)
ctccctgcacctgtcctcagtccctgaggccagggacagcccacagtccctcacagatgagtcctgctcagagaaggcagcccctcacaaggctgagggcctggaggaggctgatactgg

SEQ ID NO: 210782 - DNA, 120 bp, Artificial Sequence
  ENSG00000115648_8 (sequence is synthesized)
ggcctctgggtgccactcccatccggaagagcagccgaccagcatctcaccttccagacacggcgccctggctgagctctgcccgcctggaggctcccacaggatggccctggggactgc

SEQ ID NO: 210783 - DNA, 120 bp, Artificial Sequence
  ENSG00000115648_9 (sequence is synthesized)
tgctgcactcgggtcgaatgtcatcaggaatgagcagctgcccctgcagtacttggccgatgtggacacctctgatgaggaaagcatccgggctcacgtgatggcctcccaccattccaa

SEQ ID NO: 210784 - DNA, 120 bp, Artificial Sequence
  ENSG00000115648_10 (sequence is synthesized)
gcggagaggccgggcgtcttctgagagtcagatctttgagctgaataagcatatttcagctgtggaatgcctgctgacctacctggagaacacagttgtgcctcccttggccaagggtct

SEQ ID NO: 210785 - DNA, 120 bp, Artificial Sequence
  ENSG00000115648_11 (sequence is synthesized)
aggtgctggagtgcgcacggaggccgatgtagaggaggaggccctgaggaggaagctggaggagctgaccagcaacgtcagtgaccaggagacctcgtccgaggaggaggaagccaagga

SEQ ID NO: 210786 - DNA, 120 bp, Artificial Sequence
  ENSG00000115648_12 (sequence is synthesized)
cgaaaaggcagagcccaacagggacaaatcagttgggcctctcccccaggcggacccggaggtgggcacggctgcccatcaaaccaacagacaggaaaaaagcccccaggaccctgggga

SEQ ID NO: 210787 - DNA, 120 bp, Artificial Sequence
  ENSG00000115648_13 (sequence is synthesized)
ccccgtccagtacaacaggaccacagatgaggagctgtcagagctggaggacagagtggcagtgacggcctcagaagtccagcaggcagagagcgaggtttcagacattgaatccaggat

SEQ ID NO: 210788 - DNA, 120 bp, Artificial Sequence
  ENSG00000115648_14 (sequence is synthesized)
tgcagccctgagggccgcagggctcacggtgaagccctcgggaaagccccggaggaagtcaaacctcccgatatttctccctcgagtggctgggaaacttggcaagagaccagaggaccc

SEQ ID NO: 210789 - DNA, 120 bp, Artificial Sequence
  ENSG00000115648_15 (sequence is synthesized)
caaggcaatggctgtgccctatcttctgagaagaaagttcagtaattccctgaaaagtcaaggtaaagatgatgattcttttgatcggaaatcagtgtaccgaggctcgctgacacagag

SEQ ID NO: 210790 - DNA, 120 bp, Artificial Sequence
  ENSG00000115648_16 (sequence is synthesized)
aaaccccaacgcgaggaaaggaatggccagccacaccttcgcgaaacctgtggtggcccaccagtcctaacgggacaggacagagagacagagcagccctgcactgttttccctccacca

SEQ ID NO: 210791 - DNA, 120 bp, Artificial Sequence
  ENSG00000115648_17 (sequence is synthesized)
cagccatcctgtccctcattggctctgtgctttccactatacacagtcaccgtcccaatgagaaacaagaaggagcaccctccacatggactcccacctgcaagtggacagcgacattca

SEQ ID NO: 210792 - DNA, 120 bp, Artificial Sequence
  ENSG00000115648_18 (sequence is synthesized)
gtcctgcactgctcacctgggtttactgatgactcctggctgccccaccatcctctctgatctgtgagaaacagctaagctgctgtgacttccctttaggacaatgttgtgtaaatcttt

SEQ ID NO: 210793 - DNA, 120 bp, Artificial Sequence
  ENSG00000115648_19 (sequence is synthesized)
gaaggacacaccgaagacctttatactgtgatcttttacccctttcactcttggctttcttatgttgctttcatgaatggaatggaaaaaagatgactcagttaaggcaccagccatatg

SEQ ID NO: 210794 - DNA, 120 bp, Artificial Sequence
  ENSG00000115648_20 (sequence is synthesized)
tgtattcttgatggtctatatcggggtgtgagcagatgtttgcgtatttcttgtgggtgtgactggatattagacatccggacaagtgactgaactaatgatctgctgaataatgaagga

SEQ ID NO: 210795 - DNA, 120 bp, Artificial Sequence
  ENSG00000115648_21 (sequence is synthesized)
ggaatagacaccccagtccccaccctacgtgcacccgctctgcaagttcccatgtgatctgtagaccaggggaaattacactgcggtcaagggcagagcctgcacatgacagcaagtgag

SEQ ID NO: 210796 - DNA, 120 bp, Artificial Sequence
  ENSG00000115648_22 (sequence is synthesized)
catttgatagatgctcagatgctagtgcagagagcctgctgggagacgaagagacagcaggcagagctccagatgggcaaggaagaggcttggttctagcctggctctgcccctcactgc

SEQ ID NO: 210797 - DNA, 120 bp, Artificial Sequence
  ENSG00000115648_23 (sequence is synthesized)
agtggatccagtggggcagaggacagagggtcacaaccaatgagggatgtctgccaaggatgggggtgcagaggccacaggagtcagcttgccactcgcccattggttacatagatgatc

SEQ ID NO: 210798 - DNA, 120 bp, Artificial Sequence
  ENSG00000115648_24 (sequence is synthesized)
tctcagacaggctgggactcagagttatttcctagtatcggtgtgccccatccagttttaagtggagccctccaagactctccagagctgcctttgaacatcctaacagtaatcacatct

SEQ ID NO: 210799 - DNA, 120 bp, Artificial Sequence
  ENSG00000115648_25 (sequence is synthesized)
caccctccctgaggttcactttagacaggacccaatggctgcactgcctttgtcagagggggtgctgagaggagtggcttcttttagaatcaaacagtagagacaagagtcaagccttgt

SEQ ID NO: 210800 - DNA, 120 bp, Artificial Sequence
  ENSG00000115648_26 (sequence is synthesized)
gtcttcaagcattgaccaagttaagtgtttccttccctctctcaataagacacttccaggagctttccaatctctcacttaaaactaaggtttgaatctcaaagtgttgctgggaggctg

SEQ ID NO: 210801 - DNA, 120 bp, Artificial Sequence
  ENSG00000115648_27 (sequence is synthesized)
atactcctgcaacttcaggagacctgtgagcacacattagcagctgtttctctgactccttgtggcatcagataaaaacgtgggagtttttccatataattcccagccttacttataaat

SEQ ID NO: 210802 - DNA, 120 bp, Artificial Sequence
  ENSG00000115648_28 (sequence is synthesized)
agccttacttataaattctattctttgaaaaaattattcaggctaggtaaggtggctcatacctataatcccagccctttgagaggccaaggtgggagaattgcttgaggccaggagttt

SEQ ID NO: 210803 - DNA, 86 bp, Artificial Sequence
  ENSG00000115648_29 (sequence is synthesized)
gcaacatagtgagatcccatctctacaaaaaacaaaacaaaaaaattacccaagcatgatggtatatgcctgtagtcgtacctact

SEQ ID NO: 210804 - DNA, 89 bp, Artificial Sequence
  ENSG00000115648_30 (sequence is synthesized)
gctgaggcaggaggatcacttgagccctggaggttggggctgcagtgagccatgatcgcatcactatactcgtaaaaaaattaataata

SEQ ID NO: 210805 - DNA, 120 bp, Artificial Sequence
  ENSG00000115648_31 (sequence is synthesized)
attggaattcggaaggacaggcaggccgggcggactggagacggcggctcgccttgggaccctctgagcttgcgggccccgctgagcacccaaaggccggccctagagtccaggagaaga

SEQ ID NO: 210806 - DNA, 120 bp, Artificial Sequence
  ENSG00000115648_32 (sequence is synthesized)
gcgcagcggcgcggagctcccaggcgttccccgcagcgcgtcctcggtcctggaaccaccgcgccgcgcgtcctggcttccacatctgccccatttgcccgcggatcttgactttttctt

SEQ ID NO: 210807 - DNA, 120 bp, Artificial Sequence
  ENSG00000115648_33 (sequence is synthesized)
ggtggatgggtgggtgagtggatgagccactgattgattgggtagatggatgtatagatggattgatgatgagtgggtggatgaaggagggatggagggatggatggatggatgggtggg

SEQ ID NO: 210808 - DNA, 120 bp, Artificial Sequence
  ENSG00000115648_34 (sequence is synthesized)
taggtgaatacatggatggatgagccactgattgagtgggtggatgggtggatgaatagatgggtggaggatagataggtgggtgtatgggtgggtggatggattgatgcatggatggat

SEQ ID NO: 210809 - DNA, 120 bp, Artificial Sequence
  ENSG00000115648_35 (sequence is synthesized)
gggctgcccattgagtaggtggatgagtggataaatgggtgggtgggtaggtgaatagatgaatagattgataaatagggggatgggtggattggtagatgggtagatggagggatacat

SEQ ID NO: 210810 - DNA, 120 bp, Artificial Sequence
  ENSG00000115648_36 (sequence is synthesized)
tgctgtgtggataggtgggtgaatggatgaaggagggagggatgggcaggtagatggatagattagtggatggatgggtggatgggctgacaaatggcttgttcccagactgtttgtcct

SEQ ID NO: 210811 - DNA, 120 bp, Artificial Sequence
  ENSG00000115648_37 (sequence is synthesized)
gtctttttacctccacaccaagtcactttagagaaattacagcttttaatactttcaaactatgaaattgcacaagcctacttaatggagatacgtcatcacaatattttttgtggaagt

SEQ ID NO: 210812 - DNA, 120 bp, Artificial Sequence
  ENSG00000115648_38 (sequence is synthesized)
cgaagaccacacaccagtgcagtgtgatgggcctttctgctgcttcattagtgtgaggatttccagggccacagtgaggaagaatgttaatgccagtgccagagcaaaggagaaagaagt

SEQ ID NO: 210813 - DNA, 120 bp, Artificial Sequence
  ENSG00000115648_39 (sequence is synthesized)
tggcaaaactgttgatttgcatgacagctgaaatgtaaatactttttaaaaaatatgtgatgtggaagcttcttaaaaggggatatgtccatttttttctaccttttaaatttctgagga

SEQ ID NO: 210814 - DNA, 120 bp, Artificial Sequence
  ENSG00000115648_40 (sequence is synthesized)
aggctgaagggaagttacaaagttacacatgaagacttggccgatgaccagtctggttggttgcgggaggggaccaatccgagaaacctgtggtggcccaccagtcctaacgggacagga

SEQ ID NO: 210815 - DNA, 120 bp, Artificial Sequence
  ENSG00000115648_41 (sequence is synthesized)
agacttccgggtgctagatgattcctgctctggaaactcaccgagccatttcagctgcgctctagaggagcaaacctggggcgttagctcaactcttgcccccctgctgaaggagaccaa

SEQ ID NO: 210816 - DNA, 120 bp, Artificial Sequence
  ENSG00000115648_42 (sequence is synthesized)
aacaatgcttgatcaggaaacaccatctggctttgcccccaggattctgtgactgccctggggagggcgcagtgacctgccaaccaaaattgggcgttgaagggcaagattaagaaggaa

SEQ ID NO: 210817 - DNA, 120 bp, Artificial Sequence
  ENSG00000115648_43 (sequence is synthesized)
atcctgtattttcatttgcacactttggcgccctagtcccagagtcctggagcggcatactgggggtggctgtgcagtcccagcatccccaacccagcatgtatagagagcatccatcct

SEQ ID NO: 210818 - DNA, 120 bp, Artificial Sequence
  ENSG00000115648_44 (sequence is synthesized)
tacatccagctgacccatgcccatgctcctccctgtggctggaggttcaacaataacataagtctcttctttgccctccagatatttctccctcgagtggctgggaaacttggcaagaga

SEQ ID NO: 210819 - DNA, 120 bp, Artificial Sequence
  ENSG00000115648_45 (sequence is synthesized)
tcacggtgaagccctcgggaaagccccggaggaagtcaaacctcccggctctttatgaggggactctgagcctctgctctgaggatctgaaacacacacaccctgacagtgtaaaatcca

SEQ ID NO: 210820 - DNA, 120 bp, Artificial Sequence
  ENSG00000115648_46 (sequence is synthesized)
aaaggagccgcctgaatcatgttgcctcatgtggaaatccttagtccgccgccacgtgaagatggatgtgactagaacggagggcgcgggaggctcacatcagaggagctgctcacgtca

SEQ ID NO: 210821 - DNA, 120 bp, Artificial Sequence
  ENSG00000115648_47 (sequence is synthesized)
ggccaacatcctcctctcctgatcccattcaggaatcttcagacaaaaccatcctgattaggacatttggcaaaagaatgaaagatgaccttaggagagtcccagatagggtcatgacgg

SEQ ID NO: 210822 - DNA, 120 bp, Artificial Sequence
  ENSG00000115648_48 (sequence is synthesized)
ccagacacggcgccctggctgagctctgcccgcctggaggctcccacaggatggccctggggactgctgctgcactcgctttcaggttttcactgcaagtaattcaaacccactctcgct

SEQ ID NO: 210823 - DNA, 120 bp, Artificial Sequence
  ENSG00000115648_49 (sequence is synthesized)
ttttaggaatattaaagcaggttcctttggagtgtgcatgtgtgtgtgtacgtgtgtgtgtgcatgtgtgtgtgcacatgtgtgtgcatgcacatgcctctctgtgaattcctgcttctg

SEQ ID NO: 210824 - DNA, 120 bp, Artificial Sequence
  ENSG00000115648_50 (sequence is synthesized)
catgcctctctgtgaattcctgcttctggctgctttttttttttttttttaatttttgtagagacaggcatctcaccatgtttcccagactggcctcgaactcctgggctcaagcaatcc

SEQ ID NO: 210825 - DNA, 120 bp, Artificial Sequence
  ENSG00000115648_51 (sequence is synthesized)
gttataagtgtgagccactgtgccctgtgaaattggctcctttttatgtgaggtgcaaacctctgcatcccactggcctggtctgagcacctcagaagtcctgggtgctgctgaagttgc

SEQ ID NO: 210826 - DNA, 120 bp, Artificial Sequence
  ENSG00000115648_52 (sequence is synthesized)
caatatttgaaattatattgttttcaaatcttcaaagtaagttgagaactcaaagccaagtttctgaaacccagctgctgattgaatcaccagggtgcttgttaatactacatgttttcc

SEQ ID NO: 210827 - DNA, 120 bp, Artificial Sequence
  ENSG00000115648_53 (sequence is synthesized)
ttcatcgactcaatctaatcatccccttggtgttcgtctgtgagaccccaggcagccagccctgtcgatctgtctcaataggcttcgtccaaatagaaaattaaatgatcatgtgcaata

SEQ ID NO: 210828 - DNA, 75 bp, Artificial Sequence
  ENSG00000115648_54 (sequence is synthesized)
ttggtagtttcttaaagggcgttgaagggcaagattaagaaggaaagctccaagagggagctgctttccgacact

SEQ ID NO: 210829 - DNA, 120 bp, Artificial Sequence
  ENSG00000115648_55 (sequence is synthesized)
tctatgaaattaacgtgtttccattccattccagccaccaaaattgcccgtttgagctcagccctcaaaacaaagatgcctgtgtggctttgcccaacgttgggtcactgttttctgcat

SEQ ID NO: 210830 - DNA, 120 bp, Artificial Sequence
  ENSG00000115648_56 (sequence is synthesized)
aggagacagttactgtgtgtgtgtatgtgtctgtgtctgtgtgtgtgtgtatgtacgtgtacacacttaaagcctgttgcaaaaacaagatgcccaatatatttcttgtttctgatattt

SEQ ID NO: 210831 - DNA, 120 bp, Artificial Sequence
  ENSG00000115648_57 (sequence is synthesized)
attgattcacaacacccttatgtgtaactcccattactattctcatcatggagaagagagaaaaaagtcagtagaagattcagtaacaggtccaagatgacacagcttgtgggccacact

SEQ ID NO: 210832 - DNA, 120 bp, Artificial Sequence
  ENSG00000115648_58 (sequence is synthesized)
cctagttggaattccgactcttgcagttggtttgagcccacatgcttaacctcacacacacacacaccattcagaaagaatatagaagacaccattaataatgattgctttctggtcatg

SEQ ID NO: 210833 - DNA, 120 bp, Artificial Sequence
  ENSG00000115649_0 (sequence is synthesized)
aggctggcaggtggacaggcgggcaaggacagctccgcgagccccctacaactcgtttccttccgttcaccttcgcagggcggcgactggcggcgcgatggacctgaccgggctcctgct

SEQ ID NO: 210834 - DNA, 120 bp, Artificial Sequence
  ENSG00000115649_1 (sequence is synthesized)
ggacgaagaaggcaccttctccctcgccggcttccaggacttcacgttcctcccaggacaccagaagctgagtgcccggatccgaaggaggctctactatggctgggactgggaagccga

SEQ ID NO: 210835 - DNA, 120 bp, Artificial Sequence
  ENSG00000115649_2 (sequence is synthesized)
ctgtagcctggaggagctctccagcccggtggcagacattgctgtcgaactgctccagaaggcagcccccagccctattcgccgactccagaagaaatatgtagctcatgtgtcccggga

SEQ ID NO: 210836 - DNA, 120 bp, Artificial Sequence
  ENSG00000115649_3 (sequence is synthesized)
ggcatgcatctccccatgtgctatgatgctggctctggtgtacattgaacggctccggcaccgaaacccagactacttgcagcatgtgtcatcctctgacttgttcctgatctccatgat

SEQ ID NO: 210837 - DNA, 120 bp, Artificial Sequence
  ENSG00000115649_4 (sequence is synthesized)
ggtggccagtaagtacctctatgatgaaggggaggaggaggaggtcttcaacgacgaatggggagctgctgggggtgtggccgtgcccactctcaatgccttggagaggggcttcctgag

SEQ ID NO: 210838 - DNA, 120 bp, Artificial Sequence
  ENSG00000115649_5 (sequence is synthesized)
tgccatggattggcatctctacactgaccctcgggagatctttgaggtgctgagctggttggagagctgtgtggctgagcagcagggacggtggcgaggctggtacacctacacagacct

SEQ ID NO: 210839 - DNA, 120 bp, Artificial Sequence
  ENSG00000115649_6 (sequence is synthesized)
gtgtgtgctgctggagcagccgacctggcagttggccctgggctccctctgccagcggctggtaaagctgtcttgcctgttagctgtggcatatgtgagcagtgtggccctggctgtggc

SEQ ID NO: 210840 - DNA, 120 bp, Artificial Sequence
  ENSG00000115649_7 (sequence is synthesized)
atcggtggccgtaatacatcagtctttggggctgtcctgcatccctacacctgggccgcctgaccttggactgacctcccgttgcctcctggagccctgcataccttctgtgccacaatg

SEQ ID NO: 210841 - DNA, 120 bp, Artificial Sequence
  ENSG00000115649_8 (sequence is synthesized)
gcctcccccagacccccctgcccctcccactcttcttcataactgccacctttgccagaagctccagagagactccccaacctgccatgcctgcctccaccccaaccgtacagtccccac

SEQ ID NO: 210842 - DNA, 120 bp, Artificial Sequence
  ENSG00000115649_9 (sequence is synthesized)
tgcgctgtccagcccctggtaccatacctatggcctggctcccccctggccttggagcccggtgctcctttcacttcctcagcctcagcaatgttcccttttcagtgtcatggagctggc

SEQ ID NO: 210843 - DNA, 120 bp, Artificial Sequence
  ENSG00000115649_10 (sequence is synthesized)
tcgcctcaagtctttcgttttcccaggctaggtagggctgtgaggaatgcattaagagggtttgggagtttctgagaacctggaggagcaaagcttgattcagatcctgtctgcctcgct

SEQ ID NO: 210844 - DNA, 120 bp, Artificial Sequence
  ENSG00000115649_11 (sequence is synthesized)
gggtccttggcaggtcccctgtcctcctgggtgggagcttatggggtggtggggcagaaggactgaaggtaattcactcctagatcgcagtggctggctgcttggccaggacagtgatgc

SEQ ID NO: 210845 - DNA, 120 bp, Artificial Sequence
  ENSG00000115649_12 (sequence is synthesized)
cgccagggagagcttccgcttggtgaccagggacatgtcccagatggacatagaagcccctctctgcctccctgggattttttagacttttacttttgatttccctaggatggaagagta

SEQ ID NO: 210846 - DNA, 120 bp, Artificial Sequence
  ENSG00000115649_13 (sequence is synthesized)
taggtgggagataagggaagtggggtgagaggagaaaggaaatgttggcatgggcctgtgtgatgtccctgaggcagaagagccggggactgatgggttcaggtgggagctgctgggtga

SEQ ID NO: 210847 - DNA, 120 bp, Artificial Sequence
  ENSG00000115649_14 (sequence is synthesized)
ggcagggaacccttttcactcccattccttagctttagtctaatggagccaaggactgctgggaccttcaaccctgatcttttgtcttccagtcttctcttagtgtcctgctcctaggtt

SEQ ID NO: 210848 - DNA, 120 bp, Artificial Sequence
  ENSG00000115649_15 (sequence is synthesized)
tccctctcttctggttcttctcccaggtattctcttcccaggcctctctggccactgctttgtatcagggtttttcacgcttttgtagaactgaggtttcaataaacagtttcagttgca

SEQ ID NO: 210849 - DNA, 120 bp, Artificial Sequence
  ENSG00000115649_16 (sequence is synthesized)
tgacgaagtaccccgggttccgagtccgggtctaggtccaggcagtcgagcccgttttcttatcccacagtaggcagggcggctagggagtgtggtgctgccccggtatccccgtgtggg

SEQ ID NO: 210850 - DNA, 120 bp, Artificial Sequence
  ENSG00000115649_17 (sequence is synthesized)
gcaggaagtgggcttccagattcccagtatccccggtagggtctgcttctgctcgctcgggaagggcggtggccgtcccattactcaaccaaccctcaacgcactggtcctcccagttcc

SEQ ID NO: 210851 - DNA, 120 bp, Artificial Sequence
  ENSG00000115649_18 (sequence is synthesized)
ctcccctcagtgggtaaacaaacacacaccagcgcttgactcgacagactcgaaaacaacatctactcagaaaagttgtttctttcctatctccttaaactttcccacttccacatatcg

SEQ ID NO: 210852 - DNA, 120 bp, Artificial Sequence
  ENSG00000115649_19 (sequence is synthesized)
aggcgcctggggcttggccacgttccgtgagaccaggagttcgagtccggttcctgcccgcgggtcggggcgggaggctgggccagatgggcggcaggaagtgccaggcgctgacttgca

SEQ ID NO: 210853 - DNA, 120 bp, Artificial Sequence
  ENSG00000115649_20 (sequence is synthesized)
ggcggcacccccgcggcttgtaaacgccgggcggacgcggcacaggcggagtacgcgcctcgcagccgcatctcctttctgctccgcgagggcggcgactggcggcgcgatggacctgac

SEQ ID NO: 210854 - DNA, 120 bp, Artificial Sequence
  ENSG00000115652_0 (sequence is synthesized)
attgtgcagcaggcgggcccccgcgcggtagggccctggacccgcgcggctcccggggatggtgagcaaggcgctgctgcgcctcgtgtctgccgtcaaccgcaggaggatgaagctgct

SEQ ID NO: 210855 - DNA, 120 bp, Artificial Sequence
  ENSG00000115652_1 (sequence is synthesized)
gctgggcatcgccttgctggcctacgtcgcctctgtttggggcaacttcgttaatatgaggtctatccaggaaaatggtgaactaaaaattgaaagcaagattgaagagatggttgaacc

SEQ ID NO: 210856 - DNA, 120 bp, Artificial Sequence
  ENSG00000115652_2 (sequence is synthesized)
actaagagagaaaatcagagatttagaaaaaagctttacccagaaatacccaccagtaaagtttttatcagaaaaggatcggaaaagaattttgataacaggaggcgcagggttcgtggg

SEQ ID NO: 210857 - DNA, 120 bp, Artificial Sequence
  ENSG00000115652_3 (sequence is synthesized)
ctcccatctaactgacaaactcatgatggacggccacgaggtgaccgtggtggacaatttcttcacgggcaggaagagaaacgtggagcactggatcggacatgagaacttcgagttgat

SEQ ID NO: 210858 - DNA, 120 bp, Artificial Sequence
  ENSG00000115652_4 (sequence is synthesized)
taaccacgacgtggtggagcccctctacatcgaggttgaccagatataccatctggcatctccagcctcccctccaaactacatgtataatcctatcaagacattaaagaccaatacgat

SEQ ID NO: 210859 - DNA, 120 bp, Artificial Sequence
  ENSG00000115652_5 (sequence is synthesized)
tgggacattaaacatgttggggctggcaaaacgagtcggtgcccgtctgctcctggcctccacatcggaggtgtatggagatcctgaagtccaccctcaaagtgaggattactggggcca

SEQ ID NO: 210860 - DNA, 120 bp, Artificial Sequence
  ENSG00000115652_6 (sequence is synthesized)
cgtgaatccaataggacctcgggcctgctacgatgaaggcaaacgtgttgcagagaccatgtgctatgcctacatgaagcaggaaggcgtggaagtgcgagtggccagaatcttcaacac

SEQ ID NO: 210861 - DNA, 120 bp, Artificial Sequence
  ENSG00000115652_7 (sequence is synthesized)
cagcaacttcatcctgcaggcgctccagggggagccactcacggtatacggatccgggtctcagacaagggcgttccagtacgtcagcgatctagtgaatggcctcgtggctctcatgaa

SEQ ID NO: 210862 - DNA, 120 bp, Artificial Sequence
  ENSG00000115652_8 (sequence is synthesized)
cagcaacgtcagcagcccggtcaacctggggaacccagaagaacacacaatcctagaatttgctcagttaattaaaaaccttgttggtagcggaagtgaaattcagtttctctccgaagc

SEQ ID NO: 210863 - DNA, 120 bp, Artificial Sequence
  ENSG00000115652_9 (sequence is synthesized)
ccaggatgacccacagaaaagaaaaccagacatcaaaaaagcaaagctgatgctggggtgggagcccgtggtcccgctggaggaaggtttaaacaaagcaattcactacttccgtaaaga

SEQ ID NO: 210864 - DNA, 120 bp, Artificial Sequence
  ENSG00000115652_10 (sequence is synthesized)
actcgagtaccaggcaaataatcagtacatccccaaaccaaagcctgccagaataaagaaaggacggactcgccacagctgaactcctcacttttaggacacaagactaccattgtacac

SEQ ID NO: 210865 - DNA, 120 bp, Artificial Sequence
  ENSG00000115652_11 (sequence is synthesized)
ttgatgggatgtatttttggcttttttttgttgtcgtttaaagaaagactttaacaggtgtcatgaagaacaaactggaatttcattctgaagcttgctttaatgaaatggatgtgccta

SEQ ID NO: 210866 - DNA, 120 bp, Artificial Sequence
  ENSG00000115652_12 (sequence is synthesized)
ttgcactttttgaatctctctttttatgtaaaatagcgtagatgcatctctgcgtattttcaagtttttttatcttgctgtgagagcatatgttgtgactgtcgttgacagttttattta

SEQ ID NO: 210867 - DNA, 120 bp, Artificial Sequence
  ENSG00000115652_13 (sequence is synthesized)
tatgttgtgactgtcgttgacagttttatttactggtttctttgtgaagctgaaaaggaacattaagcgggacaaaaaatgccgattttatttatgaaagtgggtacttaataaatgagt

SEQ ID NO: 210868 - DNA, 120 bp, Artificial Sequence
  ENSG00000115652_14 (sequence is synthesized)
cgttatactatgcataaagaaaaatcctagcagtattgtcaggtggtggtgcgccggcattgattttagggcagataaaagaattctgtgtgagagctttatgtttctcttttaattcag

SEQ ID NO: 210869 - DNA, 120 bp, Artificial Sequence
  ENSG00000115652_15 (sequence is synthesized)
ctgtgttttgctgcgtatctggggcgggggcaggttggggggcacaaagttaacatattcttggttaaccatggttaaatatgctattttaataaattattgaaactcaccagtcatgga

SEQ ID NO: 210870 - DNA, 120 bp, Artificial Sequence
  ENSG00000115652_16 (sequence is synthesized)
gttttcacgacagacagttcggaggagccacggtgcttatgagcagtcgtgggaaggaaagagtctcagctgtgccacggcactgggtgtgccacttggggactgaggctgaagacatgg

SEQ ID NO: 210871 - DNA, 120 bp, Artificial Sequence
  ENSG00000115652_17 (sequence is synthesized)
atatcgtgagctcagagaaatgaggacaattggagcggtgtgagaggtgcacacaaataactctgagatttacagtgccgtcccctagctgagttggtgagggaagaagaggcggaatga

SEQ ID NO: 210872 - DNA, 120 bp, Artificial Sequence
  ENSG00000115652_18 (sequence is synthesized)
ctcccgccagtctaacagcatcgctcctgactgaaggcagaacttgctcctgctccccagctgcatggatgactttcctgaggcacttcctatgggcggcaagtactaaagacggtcgct

SEQ ID NO: 210873 - DNA, 120 bp, Artificial Sequence
  ENSG00000115652_19 (sequence is synthesized)
agtttcctctcaaatgggaggatgcagcagtgccgctacttaactgaacgtctcgacagtctgatggggcggccctcagccttccggagcagcagtgggactgacctgtccagtgaggaa

SEQ ID NO: 210874 - DNA, 120 bp, Artificial Sequence
  ENSG00000115652_20 (sequence is synthesized)
gaaacactgaaccagatggaatggcctttggggatggaaaaaccccagtttacgctcatctcttctctcagctaacttttgtggagccctgttcccaaactggcctgggccagagcaccg

SEQ ID NO: 210875 - DNA, 120 bp, Artificial Sequence
  ENSG00000115652_21 (sequence is synthesized)
agtctaacagcatcgctcctgactgaaggcagaacttgctcctgctccccagctgcatggatgactttcctgaggcacttcctatgggcggcaagtactaaagacggtcgggacgctggt

SEQ ID NO: 210876 - DNA, 120 bp, Artificial Sequence
  ENSG00000115652_22 (sequence is synthesized)
caggaagaggatgccgtgattgtgaaaattcctggagcaggagacaaagtttcattaatatctcttctcgctcttgtggagcggtcctcatgcgttgggcctgtgacttcacgaagctgc

SEQ ID NO: 210877 - DNA, 120 bp, Artificial Sequence
  ENSG00000115652_23 (sequence is synthesized)
aggtttccaggcccgcctggaaatcctgaagggtgagacctgcagtgggctcaggagtctgcatttgtgggtgaccgagggggcctcccctccctctagagtccacactgtggagagcat

SEQ ID NO: 210878 - DNA, 120 bp, Artificial Sequence
  ENSG00000115652_24 (sequence is synthesized)
caggaagggaaaggcctgcatcttgtgctcagtgagctcatcgtctagtgaggaaggcatgtgtgaatctctggacaaggcagcgctgagctgttgtggactagtggtgcaggcaaggga

SEQ ID NO: 210879 - DNA, 120 bp, Artificial Sequence
  ENSG00000115652_25 (sequence is synthesized)
ttatttctgaccaaggatggtgagaaggtttcccatacagactgacgtctggattgagctttgaagaagaaagccaggactggagcagacgacgaggagggaagagtttgaccagatata

SEQ ID NO: 210880 - DNA, 120 bp, Artificial Sequence
  ENSG00000115652_26 (sequence is synthesized)
cacgctgtccggatgcagataacaggaggcgcagggttcgtgggctcccatctaactgacaaactcatgatggacggccacgaggtgaccgtggtggacaatttcttcacgggcaggaag

SEQ ID NO: 210881 - DNA, 120 bp, Artificial Sequence
  ENSG00000115652_27 (sequence is synthesized)
ggtctcagacaagggcgttccagtacgtcagcgatctagtgaatggcctcgtggctctcatgaacagcaacgtcagcagcccggtcaacctggtgagtgctcctctccctccactctgca

SEQ ID NO: 210882 - DNA, 120 bp, Artificial Sequence
  ENSG00000115652_28 (sequence is synthesized)
gttcatttgtgaaaccatgagcagcaccaggctttgcttcatttgccatcggcacacttaggacatttgtgtttgttgcttgctaaatactagaggaaaaacaaacaaacacaaagtaag

SEQ ID NO: 210883 - DNA, 120 bp, Artificial Sequence
  ENSG00000115652_29 (sequence is synthesized)
agtatacaaagaagtaaaacatctgcaaggcacgggtgagtgatgtaatcagtccctccaccttctgaagggcctgggtctaagattgtgtgaagccttttggtggtagtaggtggacgt

SEQ ID NO: 210884 - DNA, 120 bp, Artificial Sequence
  ENSG00000115652_30 (sequence is synthesized)
cgcagcagcagcatcatcagatgtgtgttagaaattcagactctcatgccctagcccaggcccccagatcaggatctgcctgttgacaggctcttcaggtgatccgtgcgtgctgacgct

SEQ ID NO: 210885 - DNA, 120 bp, Artificial Sequence
  ENSG00000115652_31 (sequence is synthesized)
tgagaaacactatttgaaacctaaggctggggggaggggcgtgcagcttccctgctgtgcttctgtatatagctttgtgacagaccatcctgaaccacctgtggtggtgattcgctgcag

SEQ ID NO: 210886 - DNA, 120 bp, Artificial Sequence
  ENSG00000115652_32 (sequence is synthesized)
agtctgcaatgtggcctccatgacacggaggcagggaaagcctccacaggctttcttctgcaggtctggcccacagtcactggtggggctgtgtactgctggccagtggggcctgggccc

SEQ ID NO: 210887 - DNA, 120 bp, Artificial Sequence
  ENSG00000115652_33 (sequence is synthesized)
agcaaggatgtggaacaggccagcctttgccgtcctccgagaggtccctccagctgggtggctgcacatcttgggtctcagggctgtctaggctccgagcacccaggtatggcccacttg

SEQ ID NO: 210888 - DNA, 120 bp, Artificial Sequence
  ENSG00000115652_34 (sequence is synthesized)
gggcatccacctcagggatggccccacaccacgtttgtggtctcacaccggggtcatgctcggtgggcacgtctgcacttgttacctggtgtgggtggtctgccttggagcaaccctctt

SEQ ID NO: 210889 - DNA, 120 bp, Artificial Sequence
  ENSG00000115652_35 (sequence is synthesized)
gtagtgggcggtaactcaggcctgttgagacagaataacctgccccccaccgagctcttgctgggcgcctgcacacagtcagcttggccacagcagttgcaggagcactccctggacttc

SEQ ID NO: 210890 - DNA, 120 bp, Artificial Sequence
  ENSG00000115652_36 (sequence is synthesized)
cttcagtagtatttatttactccccactctggtgatcctctctggtttcacattagcagagtctgagatgatgaggcttcagggactttgccatacttgggcaagggtttcctgacttaa

SEQ ID NO: 210891 - DNA, 120 bp, Artificial Sequence
  ENSG00000115652_37 (sequence is synthesized)
actttttagttattgaggactcagatgagttcattaactgaccaaagttttgatgtttttcacaagcaattttttaggaactgagcgtcttttagtaatgcacgatgtctgggtccatat

SEQ ID NO: 210892 - DNA, 120 bp, Artificial Sequence
  ENSG00000115652_38 (sequence is synthesized)
agttactgtactaaattaaccattccccaaacccatgattgcctcgaaacaacagtgcagggagtctgaggtctaggtggccatccgcatcggcattttggcatgactctgtttaatatt

SEQ ID NO: 210893 - DNA, 120 bp, Artificial Sequence
  ENSG00000115652_39 (sequence is synthesized)
ctcatggccggttttgtcctcatttacataacaaaggcatgctatattttttaaaagtcactttgtcaaaatgacacttgtaaagagcttcaggttaaagaatgtgatctatgcaatttt

SEQ ID NO: 210894 - DNA, 120 bp, Artificial Sequence
  ENSG00000115652_40 (sequence is synthesized)
gaccttaaaagttgccagtttgtcatgtaaaaggcccatggctctcccgtctgccccactgaggatgactgcctgagagtcacccttcttccaactcagataaaccccaccccccagttt

SEQ ID NO: 210895 - DNA, 120 bp, Artificial Sequence
  ENSG00000115652_41 (sequence is synthesized)
caatattaaatcatattgtggatgcaatggaatggcagcttttaatgtctttttataaacctgcacagatgtatgtcatgagtgcactattgtaatgtagcaatactgccatagtgatga

SEQ ID NO: 210896 - DNA, 120 bp, Artificial Sequence
  ENSG00000115652_42 (sequence is synthesized)
agtgactttttgctagtttctataaaggagaaatcatccaaggttagcagggatttgcatttgtgcttgatccttgagaatagaacattttaagcatgttcatatgaaatacgcatttgt

SEQ ID NO: 210897 - DNA, 120 bp, Artificial Sequence
  ENSG00000115652_43 (sequence is synthesized)
cgtaaaggaaaacgcagaaatatctgatttacgaaataccccaataggttttttcaattgaaagcaaaacctatctgcggttttcttttggaagtttatcctgacccagagtgacctgct

SEQ ID NO: 210898 - DNA, 120 bp, Artificial Sequence
  ENSG00000115652_44 (sequence is synthesized)
cctcactggtaacgatggaggaggagaaggagaagggtcagagctttaaaagtcttctaagaattgtagctcatggaaaattggcgtagaaaaagtgcttgtgcttagcagtgaggtgtc

SEQ ID NO: 210899 - DNA, 120 bp, Artificial Sequence
  ENSG00000115652_45 (sequence is synthesized)
atttttacgaagtaactttgttttaacagagccacactttaaagcttctgaaaataagaaccaaaccttggtaagcgaaagtttgcttacttatcttcaccttcatggcctagttgatca

SEQ ID NO: 210900 - DNA, 120 bp, Artificial Sequence
  ENSG00000115652_46 (sequence is synthesized)
caatccatttgaaacatccaaatatccctgaccgtttcatacgaggtgttttggggggtggcgactttaaggttgggggagtagggagtgacgtttctgtttatttcaaccctcagtatt

SEQ ID NO: 210901 - DNA, 120 bp, Artificial Sequence
  ENSG00000115652_47 (sequence is synthesized)
gtttgcctttatctgtgatttgccagtatggggatcacatactggagttcgttcatttccgtggatcttgtttttaaaagtaatcatgtgctttcgtacaggtcaactactgggttcaca

SEQ ID NO: 210902 - DNA, 120 bp, Artificial Sequence
  ENSG00000115652_48 (sequence is synthesized)
atgtaaactccatcttttttgagtgtatgcctgttttaacttatgcttagtttttaattgttaaaggacttcagaaatgcagtggcgaactcagccccatcactcagcttccatcctatt

SEQ ID NO: 210903 - DNA, 120 bp, Artificial Sequence
  ENSG00000115652_49 (sequence is synthesized)
taactatctccaccacacccaaaaaaagcaaatcccagacatcaaatatatcatttcatccataaatactttcgcattgtaaacaccatcttagtttgtaggattttgtttcgacattca

SEQ ID NO: 210904 - DNA, 120 bp, Artificial Sequence
  ENSG00000115652_50 (sequence is synthesized)
attttccatttgggtttttgttttctcctgggggtggtaatttttcttctgggagggcttctatgtggtgcgtggcactagcatattccagcaggcagagcctcacctgcctcccctttt

SEQ ID NO: 210905 - DNA, 120 bp, Artificial Sequence
  ENSG00000115652_51 (sequence is synthesized)
ccggatgcacactccacagtcctgcgcctccgctcctcactgaattggttttctccctgcaccgcgttttcccatatgtagctatattcccattcccgagcggtcttgactctaaaatca

SEQ ID NO: 210906 - DNA, 120 bp, Artificial Sequence
  ENSG00000115652_52 (sequence is synthesized)
atctttttcctgggatttttgatacaaaaaacaatatatggccaatcagtagcttatgttattttaatgtaaattcttgataacttagaaactgccttttcctttaaaagcccacttgtc

SEQ ID NO: 210907 - DNA, 120 bp, Artificial Sequence
  ENSG00000115657_0 (sequence is synthesized)
attcccgtgggcctgcagttggcaggagggtcccgggcccagagccagcggggccgtgctgagacggcgtacgtgccctgcgtgagtgcgtggcggcggcgcgtgcgctaggggagtggg

SEQ ID NO: 210908 - DNA, 120 bp, Artificial Sequence
  ENSG00000115657_1 (sequence is synthesized)
cggtgaggcctggtccacgtgcgtcccttcccgggacccccgcagcttggcgcccagcggctacgtgagccaaggcacccggatgtccgcgcccctctccgagtgaccagtcccggcctc

SEQ ID NO: 210909 - DNA, 120 bp, Artificial Sequence
  ENSG00000115657_2 (sequence is synthesized)
cggtcccgcagtgcccgcagcctcggccggcgtccacgcattgccatggtgactgtgggcaactactgcgaggccgaagggcccgtgggtccggcctggatgcaggatggcctgagtccc

SEQ ID NO: 210910 - DNA, 120 bp, Artificial Sequence
  ENSG00000115657_3 (sequence is synthesized)
tgcttcttcttcacgctcgtgccctcgacgcggatggctctggggactctggccttggtgctggctcttccctgcagacgccgggagcggcccgctggtgctgattcgctgtcttggggg

SEQ ID NO: 210911 - DNA, 120 bp, Artificial Sequence
  ENSG00000115657_4 (sequence is synthesized)
gccggccctcgcatctctccctacgtgctgcagctgcttctggccacacttcaggcggcgctgcccctggccggcctggctggccgggtgggcactgcccggggggccccactgccaagc

SEQ ID NO: 210912 - DNA, 120 bp, Artificial Sequence
  ENSG00000115657_5 (sequence is synthesized)
tatctacttctggcctccgtgctggagagtctggccggcgcctgtggcctgtggctgcttgtcgtggagcggagccaggcacggcagcgtctggcaatgggcatctggatcaagttcagg

SEQ ID NO: 210913 - DNA, 120 bp, Artificial Sequence
  ENSG00000115657_6 (sequence is synthesized)
cacagccctggtctcctgctcctctggactgtggcgtttgcagctgagaacttggccctggtgtcttggaacagcccacagtggtggtgggcaagggcagacttgggccagcaggttcag

SEQ ID NO: 210914 - DNA, 120 bp, Artificial Sequence
  ENSG00000115657_7 (sequence is synthesized)
tttagcctgtgggtgctgcggtatgtggtctctggagggctgtttgtcctgggtctctgggcccctggacttcgtccccagtcctatacattgcaggttcatgaagaggaccaagatgtg

SEQ ID NO: 210915 - DNA, 120 bp, Artificial Sequence
  ENSG00000115657_8 (sequence is synthesized)
gaaaggagccaggttcggtcagcagcccaacagtctacctggcgagattttggcaggaagctccgcctcctgagtggctacctgtggcctcgagggagtccagctctgcagctggtggtg

SEQ ID NO: 210916 - DNA, 120 bp, Artificial Sequence
  ENSG00000115657_9 (sequence is synthesized)
ctcatctgcctggggctcatgggtttggaacgggcactcaatgtgttggtgcctatattctataggaacattgtgaacttgctgactgagaaggcaccttggaactctctggcctggact

SEQ ID NO: 210917 - DNA, 120 bp, Artificial Sequence
  ENSG00000115657_10 (sequence is synthesized)
gttaccagttacgtcttcctcaagttcctccaggggggtggcactggcagtacaggcttcgtgagcaacctgcgcaccttcctgtggatccgggtgcagcagttcacgtctcggcgggtg

SEQ ID NO: 210918 - DNA, 120 bp, Artificial Sequence
  ENSG00000115657_11 (sequence is synthesized)
gagctgctcatcttctcccacctgcacgagctctcactgcgctggcacctggggcgccgcacaggggaggtgctgcggatcgcggatcggggcacatccagtgtcacagggctgctcagc

SEQ ID NO: 210919 - DNA, 120 bp, Artificial Sequence
  ENSG00000115657_12 (sequence is synthesized)
tgtgcatgagtctttacctcaccctgaccattgtggtcactgagtggagaaccaagtttcgtcgtgctatgaacacacaggagaacgctacccgggcacgagcagtggactctctgctaa

SEQ ID NO: 210920 - DNA, 120 bp, Artificial Sequence
  ENSG00000115657_13 (sequence is synthesized)
acttcgagacggtgaagtattacaacgccgagagttacgaagtggaacgctatcgagaggccatcatcaaatatcagggtttggagtggaagtcgagcgcttcactggttttactaaatc

SEQ ID NO: 210921 - DNA, 120 bp, Artificial Sequence
  ENSG00000115657_14 (sequence is synthesized)
agacccagaacctggtgattgggctcgggctcctcgccggctccctgctttgcgcatactttgtcactgagcagaagctacaggttggggactatgtgctctttggcacctacattatcc

SEQ ID NO: 210922 - DNA, 120 bp, Artificial Sequence
  ENSG00000115657_15 (sequence is synthesized)
agctgtacatgcccctcaattggtttggcacctactacaggatgatccagaccaacttcattgacatggagaacatgtttgacttgctgaaagaggagacagaagtgaaggaccttcctg

SEQ ID NO: 210923 - DNA, 120 bp, Artificial Sequence
  ENSG00000115657_16 (sequence is synthesized)
gagcagggccccttcgctttcagaagggccgtattgagtttgagaacgtgcacttcagctatgccgatgggcgggagactctgcaggacgtgtctttcactgtgatgcctggacagacac

SEQ ID NO: 210924 - DNA, 120 bp, Artificial Sequence
  ENSG00000115657_17 (sequence is synthesized)
ttgccctggtgggcccatctggggcagggaagagcacaattttgcgcctgctgtttcgcttctacgacatcagctctggctgcatccgaatagatgggcaggacatttcacaggtgaccc

SEQ ID NO: 210925 - DNA, 120 bp, Artificial Sequence
  ENSG00000115657_18 (sequence is synthesized)
aggcctctctccggtctcacattggagttgtgccccaagacactgtcctctttaatgacaccatcgccgacaatatccgttacggccgtgtcacagctgggaatgatgaggtggaggctg

SEQ ID NO: 210926 - DNA, 120 bp, Artificial Sequence
  ENSG00000115657_19 (sequence is synthesized)
ctgctcaggctgcaggcatccatgatgccattatggctttccctgaagggtacaggacacaggtgggcgagcggggactgaagctgagcggcggggagaagcagcgcgtcgccattgccc

SEQ ID NO: 210927 - DNA, 120 bp, Artificial Sequence
  ENSG00000115657_20 (sequence is synthesized)
gcaccatcctcaaggctccgggcatcattctgctggatgaggcaacgtcagcgctggatacatctaatgagagggccatccaggcttctctggccaaagtctgtgccaaccgcaccacca

SEQ ID NO: 210928 - DNA, 120 bp, Artificial Sequence
  ENSG00000115657_21 (sequence is synthesized)
tcgtagtggcacacaggctctcaactgtggtcaatgctgaccagatcctcgtcatcaaggatggctgcatcgtggagaggggacgacacgaggctctgttgtcccgaggtggggtgtatg

SEQ ID NO: 210929 - DNA, 120 bp, Artificial Sequence
  ENSG00000115657_22 (sequence is synthesized)
ctgacatgtggcagctgcagcagggacaggaagaaacctctgaagacactaagcctcagaccatggaacggtgacaaaagtttggccacttccctctcaaagactaacccagaagggaat

SEQ ID NO: 210930 - DNA, 120 bp, Artificial Sequence
  ENSG00000115657_23 (sequence is synthesized)
aagatgtgtctcctttccctggcttatttcatcctggtcttggggtatggtgctagctatggtaagggaaagggacctttccgaaaaacatcttttggggaaataaaaatgtggactgtg

SEQ ID NO: 210931 - DNA, 120 bp, Artificial Sequence
  ENSG00000115657_24 (sequence is synthesized)
atttaccaaaagcgttttctacacatgagactttgtgcaggctgcagaggtgcctccctgtggaatctgggtgtccgggcttgagcataggcttagtgtgtacatggcaggtagtggaca

SEQ ID NO: 210932 - DNA, 120 bp, Artificial Sequence
  ENSG00000115657_25 (sequence is synthesized)
atcgccgacaatatccgttacggccgtgtcacagctgggaatgatgaggtggaggctgctgctcaggctgcaggcatccatgatgccattatggctttccctgaaggtgagagattcctt

SEQ ID NO: 210933 - DNA, 120 bp, Artificial Sequence
  ENSG00000115657_26 (sequence is synthesized)
tgcagagagtcccctcccctcctggtgttgtcctgctaatccctgacccctgttccctccgtttcgtaagaaacgtgtggtgggtaatatccacagggtacaggacacaggtgggcgagc

SEQ ID NO: 210934 - DNA, 120 bp, Artificial Sequence
  ENSG00000115657_27 (sequence is synthesized)
tacatacatattatatatgcagactcacagaactaatatggcattgtggaggtttttcctaaaacaaatggtattgtgacatagccatcattctcagagttgcttattaacagaacatta

SEQ ID NO: 210935 - DNA, 120 bp, Artificial Sequence
  ENSG00000115657_28 (sequence is synthesized)
tggagatatatttttcttccatgcctgaaggtctccctcattcattgtaattgatacagagaattctgtagtttgagcatggttgatttagccacccacctcttgagggtagaattaatt

SEQ ID NO: 210936 - DNA, 120 bp, Artificial Sequence
  ENSG00000115657_29 (sequence is synthesized)
acctagaacagataccatgaattcaaatctcacaaaacacactttccagttctcaagcccaaacaaggctcttgtgtattcttgaggcctcagccagcagcctgcctccttccattgagg

SEQ ID NO: 210937 - DNA, 120 bp, Artificial Sequence
  ENSG00000115657_30 (sequence is synthesized)
agcattcctccccagcccccatgtactctcagacctttcacatcctggtgctgggctgacgtccctcagctcccaggccctactgaggcgtcccccggctccctgcaggcttcgtgagca

SEQ ID NO: 210938 - DNA, 120 bp, Artificial Sequence
  ENSG00000115657_31 (sequence is synthesized)
gtagggtttggggagggaggagctgtgtggtgtttctcgtgcttggaaaacacaaagctgagaacctcagcacacatgggtggtgcccttccaggtgaaggaccttcctggagcagggcc

SEQ ID NO: 210939 - DNA, 120 bp, Artificial Sequence
  ENSG00000115657_32 (sequence is synthesized)
ccttcgctttcagaagggccgtattgagtttgagaacgtgcacttcagctatgccgatgggtgaggccttccttttgcttcctttgcttttccgttcatttgcacactgccttcctgctt

SEQ ID NO: 210940 - DNA, 120 bp, Artificial Sequence
  ENSG00000115657_33 (sequence is synthesized)
ctcagtgctctgaatccctgcttttggaaaagagcctgggcaggggaggggcagggcctactagcagctctggtgatggaaggtgcctgctgagcaaccccacctttccttgcaggcggg

SEQ ID NO: 210941 - DNA, 120 bp, Artificial Sequence
  ENSG00000115657_34 (sequence is synthesized)
tcgccgacaatatccgttacggccgtgtcacagctgggaatgatgaggtggaggctgctgctcaggctgcaggcatccatgatgccattatggctttccctgaagaaacgtgtggtgggt

SEQ ID NO: 210942 - DNA, 120 bp, Artificial Sequence
  ENSG00000115657_35 (sequence is synthesized)
ggtgttttttaaagtataggattattgtatacatgctctcctaataacttaggtaatgcgggcagagggcaaatctctttcgagctgcacttactttttcagagcttcccactctgttta

SEQ ID NO: 210943 - DNA, 81 bp, Artificial Sequence
  ENSG00000115657_36 (sequence is synthesized)
cgagctgcacttactttttcagagcttcccactctgtttagtatgttgggttctgctctttttttgagacagggtcatgct

SEQ ID NO: 210944 - DNA, 66 bp, Artificial Sequence
  ENSG00000115657_37 (sequence is synthesized)
gagtagctgggattacagatgtgcaccagcatgcctggctaattattagagcatcatgtgatctgc

SEQ ID NO: 210945 - DNA, 120 bp, Artificial Sequence
  ENSG00000115657_38 (sequence is synthesized)
aacactaccctgaaatgcctagaggcagggttgctgggtctaagcccccagacctttcttattcacttgacctgccctcctagctacctggtgttcaatgtcatccccacgctggccgac

SEQ ID NO: 210946 - DNA, 120 bp, Artificial Sequence
  ENSG00000115657_39 (sequence is synthesized)
atcatcattggcatcatctacttcagcatgttcttcaacgcctggtttggcctcattgtgttcctgtgcatgagtctttacctcagtgagtgctgctgggagacaccgtctccctgaact

SEQ ID NO: 210947 - DNA, 120 bp, Artificial Sequence
  ENSG00000115657_40 (sequence is synthesized)
atccagggactcccttggccatgagctgtgcccccactcaagtgacccacctatgggaggctgtggattggtggacttgaatgggctcctagtgctcgtcatgtgatgggcgggtctctt

SEQ ID NO: 210948 - DNA, 120 bp, Artificial Sequence
  ENSG00000115657_41 (sequence is synthesized)
ctgtcaaatcaaaccttaacctagctgaggggctggggaaggacattcttgtcacgttaagtctgagccgtggacacaggtcaaggaagcctcgtttgtgtaacaagatgcagcttgctt

SEQ ID NO: 210949 - DNA, 120 bp, Artificial Sequence
  ENSG00000115657_42 (sequence is synthesized)
tgacagagagctgggggtgtgatgtttgtgtgtgatgtttgaactcaggaaggaggattgagagttggggggaatgacccgagtgccatgtgctgtgcccatgccaaataaatttggttt

SEQ ID NO: 210950 - DNA, 120 bp, Artificial Sequence
  ENSG00000115661_0 (sequence is synthesized)
agcactgcttccggtcggtggcgcttctctctggcccgagccaggtcagtccggcagtgcagatggcccatcccgggctctgggctcctagaccggggtgggccctgccaggagtgggcc

SEQ ID NO: 210951 - DNA, 120 bp, Artificial Sequence
  ENSG00000115661_1 (sequence is synthesized)
tgagcctcgcacgtcctctgaaactacgctatgctctgcttttgcggcgcgatgggcgtgggagcgggggctgcccaaagatgggctggggttggaggaagtggcccggtagccgctgtg

SEQ ID NO: 210952 - DNA, 120 bp, Artificial Sequence
  ENSG00000115661_2 (sequence is synthesized)
tgtcctgaggccgtaaggcgcctgaccccacccctgaagctggcgacggagcagggcctgttttctctacactatagtcatgatccgctgggcccccagcgcatctcctggaagagccca

SEQ ID NO: 210953 - DNA, 120 bp, Artificial Sequence
  ENSG00000115661_3 (sequence is synthesized)
ctcaccctggacgagctcttcggtagcctcagaccgtccttgaagaggatgactgagacattatgggccacgcgctgtgtgtctgctctcggggaactgtcatcattgacaataagcgct

SEQ ID NO: 210954 - DNA, 120 bp, Artificial Sequence
  ENSG00000115661_4 (sequence is synthesized)
acctcttcatccagaaactgggggagggtgggttcagctatgtggacctagtggaagggttacatgatggacacttctacgccctgaagcgaatcctgtgtcacgagcagcaggaccggg

SEQ ID NO: 210955 - DNA, 120 bp, Artificial Sequence
  ENSG00000115661_5 (sequence is synthesized)
aggaggcccagcgagaagccgacatgcatcgcctcttcaatcaccccaacatccttcgcctcgtggcttactgtctgagggaacggggtgctaagcatgaggcctggctgctgctaccat

SEQ ID NO: 210956 - DNA, 120 bp, Artificial Sequence
  ENSG00000115661_6 (sequence is synthesized)
tcttcaagagaggtacgctgtggaatgagatagaaaggctgaaggacaaaggcaacttcctgaccgaggatcaaatcctttggctgctgctggggatctgcagaggccttgaggccattc

SEQ ID NO: 210957 - DNA, 120 bp, Artificial Sequence
  ENSG00000115661_7 (sequence is synthesized)
atgccaagggttatgcccacagagacttgaagcccaccaatatattgcttggagatgaggggcagccagttttaatggacttgggttccatgaatcaagcatgcatccatgtggagggct

SEQ ID NO: 210958 - DNA, 120 bp, Artificial Sequence
  ENSG00000115661_8 (sequence is synthesized)
cccgccaggctctgaccctgcaggactgggcagcccagcggtgcaccatctcctaccgagccccagagctcttctctgtgcagagtcactgtgtcatcgatgagcggactgatgtctggt

SEQ ID NO: 210959 - DNA, 120 bp, Artificial Sequence
  ENSG00000115661_9 (sequence is synthesized)
ccctaggctgcgtgctatatgccatgatgtttggggaaggcccttatgacatggtgttccaaaagggtgacagtgtggcccttgctgtgcagaaccaactcagcatcccacaaagcccca

SEQ ID NO: 210960 - DNA, 120 bp, Artificial Sequence
  ENSG00000115661_10 (sequence is synthesized)
ggcattcttcagcattgcggcagctcctgaactcgatgatgaccgtggacccgcatcagcgtcctcacattcctctcctcctcagtcagctggaggcgcttcagcccccagctcctggcc

SEQ ID NO: 210961 - DNA, 120 bp, Artificial Sequence
  ENSG00000115661_11 (sequence is synthesized)
aacatactacccaaatctgaaaaagcagcatgttgagaagatggccccttgtgccttggaaagaggttcccatccctcattggaatcaccacccattccatccaggacttctcttacact

SEQ ID NO: 210962 - DNA, 120 bp, Artificial Sequence
  ENSG00000115661_12 (sequence is synthesized)
aaaagggaaactggtgggatatggaacatggctctgagcaggactgttgagctcacatagtgttctgactccaaatctgggagcaggagaatgtgtaaacaagaataaagtggaagcagg

SEQ ID NO: 210963 - DNA, 120 bp, Artificial Sequence
  ENSG00000115661_13 (sequence is synthesized)
ttggtgtagatcttagtctcagtgttcctggagtgagagaagaggtgcaaggggcccaaagtcaggttgccatttcaggcgaactgcctgggaaggaggaatggtgcagagtcggcaatg

SEQ ID NO: 210964 - DNA, 120 bp, Artificial Sequence
  ENSG00000115661_14 (sequence is synthesized)
gtgtgacttcattctacaggaggttggttagcagtggacagttctagcttgtcttagatcaaaacttaaagctgcttgggctcaagctggcatctgcctgtgtcaagaactagggccccc

SEQ ID NO: 210965 - DNA, 120 bp, Artificial Sequence
  ENSG00000115661_15 (sequence is synthesized)
taaaaacactcaactagttctttccttccttcactcctggggtgagtagcttagtcaaagctgcctagccggtttgctaggcaagggcctctgggtggagacacctgaggaagctttgag

SEQ ID NO: 210966 - DNA, 120 bp, Artificial Sequence
  ENSG00000115661_16 (sequence is synthesized)
acaggtagattacaggtctcccatcctcagcctaggggcgaggggagtggaggtggcagcggcagctgttttggcctgtgtctccctgatcgttcaagctcatacatggttaatgattaa

SEQ ID NO: 210967 - DNA, 120 bp, Artificial Sequence
  ENSG00000115661_17 (sequence is synthesized)
tgaggcagtgtggtgtggcagtatccagctgccacttcctgcctactctgctgagtaaacaggggccctgtcttagctgggcttcaaacctgttccctagggaagggctctgttccctga

SEQ ID NO: 210968 - DNA, 120 bp, Artificial Sequence
  ENSG00000115661_18 (sequence is synthesized)
atcaccagggaggaaaggcaagggcagggttggcatctcctgctcttttgtgatccaagcctcctcccccgaaccatgtctaccccacagtatgacatcagcatggggcctggggctcct

SEQ ID NO: 210969 - DNA, 120 bp, Artificial Sequence
  ENSG00000115661_19 (sequence is synthesized)
gttagcaaagttgaagctttccccagggccctagcaggagtctcccactagctagcacagaggctgaggccagaaagaaatcacaaacagaggggagatgacctgacttttaatggcaca

SEQ ID NO: 210970 - DNA, 120 bp, Artificial Sequence
  ENSG00000115661_20 (sequence is synthesized)
gccccagctccagcaaagcagcaagacaggaagctatgcaaagctgctcagaggtgcagtggcacaaacaactctaggagatcgcctgtgttccctcccatcccccaagcttatgacgtg

SEQ ID NO: 210971 - DNA, 120 bp, Artificial Sequence
  ENSG00000115661_21 (sequence is synthesized)
gctccatgcccaggaactctgggccagcccagccccactcccaaaccctcataatgcacagaggagcctgggccaagccttgcttccagagttggtaaatgtagaggcagcaggaagaac

SEQ ID NO: 210972 - DNA, 120 bp, Artificial Sequence
  ENSG00000115661_22 (sequence is synthesized)
agggtagcagtctaactttcaaagacagaaaccactggattatactcctacttggaaaggagctgaagactcatccttcaacagtttgtgcctggattttggtcctcatttcctccctat

SEQ ID NO: 210973 - DNA, 120 bp, Artificial Sequence
  ENSG00000115661_23 (sequence is synthesized)
actgagtaaccctaggacttcaatttaaagtccctggggttatgcttcctgggcctggcaagaacccctttgcaggtctcaccttcagcgatggaagggataagggtcatgaacagcaaa

SEQ ID NO: 210974 - DNA, 120 bp, Artificial Sequence
  ENSG00000115661_24 (sequence is synthesized)
cagagcagcagcagcatgaaggggaaggcagcagaagctcaagcactcagagggaacaagaaaccgtgcaaggaaactgtttatttcgaaaggattttgcaataaacatagtgaataggc

SEQ ID NO: 210975 - DNA, 120 bp, Artificial Sequence
  ENSG00000115661_25 (sequence is synthesized)
tgtcctctctcacctgacagaacctagctacacagtatcaagaaggtggattctggagccaggcctgctaaatccacctcgtgtgaccttgataaaccatgtttttttcatcagcttaat

SEQ ID NO: 210976 - DNA, 120 bp, Artificial Sequence
  ENSG00000115661_26 (sequence is synthesized)
ggagatgattattatccctcactgatggagttgtgaggattaaatgagataatgtgtataaaatgtctcacccaatgcggggttgacaagtacttgataagtgttggctattatttattt

SEQ ID NO: 210977 - DNA, 120 bp, Artificial Sequence
  ENSG00000115661_27 (sequence is synthesized)
ttggtttctgttgcatggggcgccaggaaccacaatatgtccccatccacttcaacttccttcctgggaaatgtcactgatactgtacccagttgtaccggatgtggtataatctgtgcc

SEQ ID NO: 210978 - DNA, 120 bp, Artificial Sequence
  ENSG00000115661_28 (sequence is synthesized)
cctgaacaaggtgagtacagctcagtgtcagtagtgaaggcactggctaagcaggggctaagctaaacaggggctgcggaggcctccagctgactggcagtttctctggaccctggtggt

SEQ ID NO: 210979 - DNA, 120 bp, Artificial Sequence
  ENSG00000115661_29 (sequence is synthesized)
gccatgtggctgaggtcagcgtattctttttagcttatggagtctccttttaccacagaagtaaagggagagatgtcacctccactggtccccttctagggactaatcaagttatgctca

SEQ ID NO: 210980 - DNA, 120 bp, Artificial Sequence
  ENSG00000115661_30 (sequence is synthesized)
tctctattacgaccataggacctcaaagatttctatatctctgctcctgaggagctcacggtgtaatattcttcagatttctcttagagccacatcttgggaaggtttctgctaaatggg

SEQ ID NO: 210981 - DNA, 120 bp, Artificial Sequence
  ENSG00000115665_0 (sequence is synthesized)
gattcccacctcgccctgcgccgcgcgccctccgccggcgccaacacctgtcaactctgcgcgctcccaggttcttggagacgccgagtgaggagccgccctgaccgcccggccccgctc

SEQ ID NO: 210982 - DNA, 120 bp, Artificial Sequence
  ENSG00000115665_1 (sequence is synthesized)
cgcactgcaccccgacccaccccgcaccctccctttctgcaccctcgcacccacacccctcgcggttccagggggcggcggccccgggcggagcgctttcgcgtgcagccaccactccag

SEQ ID NO: 210983 - DNA, 120 bp, Artificial Sequence
  ENSG00000115665_2 (sequence is synthesized)
aagacttaatgaagtagccagctgcagaagaatctggatcattagataaaaatggctttccatgtggaaggactgatagctatcatcgtgttctaccttctaattttgctggttggaata

SEQ ID NO: 210984 - DNA, 120 bp, Artificial Sequence
  ENSG00000115665_3 (sequence is synthesized)
tgggctgcctggagaaccaaaaacagtggcagcgcagaagagcgcagcgaagccatcatagttggtggccgagatattggtttattggttggtggatttaccatgacagctacctgggtc

SEQ ID NO: 210985 - DNA, 120 bp, Artificial Sequence
  ENSG00000115665_4 (sequence is synthesized)
ggaggagggtatatcaatggcacagctgaagcagtttatgtaccaggttatggcctagcttgggctcaggcaccaattggatattctcttagtctgattttaggtggcctgttctttgca

SEQ ID NO: 210986 - DNA, 120 bp, Artificial Sequence
  ENSG00000115665_5 (sequence is synthesized)
aaacctatgcgttcaaaggggtatgtgaccatgttagacccgtttcagcaaatctatggaaaacgcatgggcggactcctgtttattcctgcactgatgggagaaatgttctgggctgca

SEQ ID NO: 210987 - DNA, 120 bp, Artificial Sequence
  ENSG00000115665_6 (sequence is synthesized)
gcaattttctctgctttgggagccaccatcagcgtgatcatcgatgtggatatgcacatttctgtcatcatctctgcactcattgccactctgtacacactggtgggagggctctattct

SEQ ID NO: 210988 - DNA, 120 bp, Artificial Sequence
  ENSG00000115665_7 (sequence is synthesized)
gtggcctacactgatgtcgttcagctcttttgcatttttgtagggctgtggatcagcgtcccctttgcattgtcacatcctgcagtcgcagacatcgggttcactgctgtgcatgccaaa

SEQ ID NO: 210989 - DNA, 120 bp, Artificial Sequence
  ENSG00000115665_8 (sequence is synthesized)
taccaaaagccgtggctgggaactgttgactcatctgaagtctactcttggcttgatagttttctgttgttgatgctgggtggaatcccatggcaagcatactttcagagggttctctct

SEQ ID NO: 210990 - DNA, 120 bp, Artificial Sequence
  ENSG00000115665_9 (sequence is synthesized)
tcttcctcagccacctatgctcaagtgctgtccttcctggcagctttcgggtgcctggtgatggccatcccagccatactcattggggccattggagcatcaacagactggaaccagact

SEQ ID NO: 210991 - DNA, 120 bp, Artificial Sequence
  ENSG00000115665_10 (sequence is synthesized)
gcatatgggcttccagatcccaagactacagaagaggcagacatgattttaccaattgttctgcagtatctctgccctgtgtatatttctttctttggtcttggtgcagtttctgctgct

SEQ ID NO: 210992 - DNA, 120 bp, Artificial Sequence
  ENSG00000115665_11 (sequence is synthesized)
gttatgtcatcagcagattcttccatcttgtcagcaagttccatgtttgcacggaacatctaccagctttccttcagacaaaatgcttcggacaaagaaatcgtttgggttatgcgaatc

SEQ ID NO: 210993 - DNA, 120 bp, Artificial Sequence
  ENSG00000115665_12 (sequence is synthesized)
acagtgtttgtgtttggagcatctgcaacagccatggccttgctgacgaaaactgtgtatgggctctggtacctcagttctgaccttgtttacatcgttatcttcccccagctgctttgt

SEQ ID NO: 210994 - DNA, 120 bp, Artificial Sequence
  ENSG00000115665_13 (sequence is synthesized)
gtactctttgttaagggaaccaacacctatggggccgtggcaggttatgtttctggcctcttcctgagaataactggaggggagccatatctgtatcttcagcccttgatcttctaccct

SEQ ID NO: 210995 - DNA, 120 bp, Artificial Sequence
  ENSG00000115665_14 (sequence is synthesized)
ggctattaccctgatgataatggtatatataatcagaaatttccatttaaaacacttgccatggttacatcattcttaaccaacatttgcatctcctatctagccaagtatctatttgaa

SEQ ID NO: 210996 - DNA, 120 bp, Artificial Sequence
  ENSG00000115665_15 (sequence is synthesized)
agtggaaccttgccacctaaattagatgtatttgatgctgttgttgcaagacacagtgaagaaaacatggataagacaattcttgtcaaaaatgaaaatattaaattagatgaacttgca

SEQ ID NO: 210997 - DNA, 120 bp, Artificial Sequence
  ENSG00000115665_16 (sequence is synthesized)
cttgtgaagccacgacagagcatgaccctcagctcaactttcaccaataaagaggccttccttgatgttgattccagtccagaagggtctgggactgaagataatttacagtgaccccat

SEQ ID NO: 210998 - DNA, 120 bp, Artificial Sequence
  ENSG00000115665_17 (sequence is synthesized)
ctaaataaaatactgcttttgcaaacagaacactgtaatagggtagttctggagagatggtatgcagcatacaaaaatatattaaaaatataaacaatgttcaggagagtaaaaattcat

SEQ ID NO: 210999 - DNA, 120 bp, Artificial Sequence
  ENSG00000115665_18 (sequence is synthesized)
ataaagtgcaattgcacaaatacaagccaagctagaaggaagcacctatgaaagcaacaactttgtttctcatccatagtagtattgattttgatgctagatagttttgctaggtataaa

SEQ ID NO: 211000 - DNA, 120 bp, Artificial Sequence
  ENSG00000115665_19 (sequence is synthesized)
aaataagtaaagttccacttagagaacaaagggccaaatagagtttttatatttgttatgataaaaggaagtagatgtgaaaaagcctaagaaaaaggaaattggacagttttgatacaa

SEQ ID NO: 211001 - DNA, 120 bp, Artificial Sequence
  ENSG00000115665_20 (sequence is synthesized)
actttgtttgctaatgcactgatgagtctagtttcattatagcacgaagctatgagaataacttcagtcactcccttgaatggtgcaatgaattaaccagctgatttttcttagtgtgat

SEQ ID NO: 211002 - DNA, 120 bp, Artificial Sequence
  ENSG00000115665_21 (sequence is synthesized)
cccttctttcatgttctgagctataacatttgctgaatatgcaatttgttattcttttattaatggcatgtaatattctgagcacgggcaaagaaaacacacaaaagattatgtattggc

SEQ ID NO: 211003 - DNA, 120 bp, Artificial Sequence
  ENSG00000115665_22 (sequence is synthesized)
atttatttatgtgcaaggtgataggaaaactgaatccatctttgtagaagagcactgggctaatttgtatgtttccatagctactatatgcataaacaacagtacctgaaggattattaa

SEQ ID NO: 211004 - DNA, 120 bp, Artificial Sequence
  ENSG00000115665_23 (sequence is synthesized)
gcaaccttaaagcaataagttcattaaacagaaggtaataggaagaacagtacatttttgtctttatctcaagtatataaagttttgccccatgataaaataagtaacatataaattaat

SEQ ID NO: 211005 - DNA, 120 bp, Artificial Sequence
  ENSG00000115665_24 (sequence is synthesized)
acataagttaatattggaagtgaaattaggccttatgtaaggagaggtagctacacagcatctgttacggttaatgagaggcacactgctaaatttacgtatatttcattgaatacttta

SEQ ID NO: 211006 - DNA, 120 bp, Artificial Sequence
  ENSG00000115665_25 (sequence is synthesized)
tgggaagcctccacaacacctcctgatagtagtaaaattagaaaaaaacaaactctactaatttttagatattcattaataggaaagatttaatgttacagcatctactctttggcactt

SEQ ID NO: 211007 - DNA, 120 bp, Artificial Sequence
  ENSG00000115665_26 (sequence is synthesized)
tttcacataagccagccttagagactagacaaataactactgcaaaaagtacatagtgaattttaaaatgtagaagaaagcaaaaaataaaataagtcctaaagtgaagaagccatcaat

SEQ ID NO: 211008 - DNA, 120 bp, Artificial Sequence
  ENSG00000115665_27 (sequence is synthesized)
caattttaacatttgatgtctagataacattcatgagattggtcattaaatactattttgctccttttctggtgttacacatacacactcatacgtgtgtgtgtgtgtatgtgtgtgtgt

SEQ ID NO: 211009 - DNA, 120 bp, Artificial Sequence
  ENSG00000115665_28 (sequence is synthesized)
gtgtaatgatttgtgtccatttcaagtgttttcacaccagtcacacattatagaaattactggagccatgtctacaaaagcaaagtgaagtgatgagctgaaaagtgatcagggaatctg

SEQ ID NO: 211010 - DNA, 120 bp, Artificial Sequence
  ENSG00000115665_29 (sequence is synthesized)
atcccataaagaaagtgagtctgaattgttgaaactaaagcacttcttttccaaaaatacttctgcaactcatgaacaaaatgaagttaacttagtgtttagcattaaaaataaaagttg

SEQ ID NO: 211011 - DNA, 120 bp, Artificial Sequence
  ENSG00000115665_30 (sequence is synthesized)
taccttgaccctagaattccttttataagatttaattgtaattgtctcaaagcatcaaataatacatctttatcattaaacatgaatttaatgtctaggataatttttaaaagaggaaat

SEQ ID NO: 211012 - DNA, 120 bp, Artificial Sequence
  ENSG00000115665_31 (sequence is synthesized)
taaataattttacatgtctcatattttcagtgctttctcaaaatttgatggtgaatattacattgcattcaaaatcttcactgaatatcatatgtatctaaatgaaaagagaattactta

SEQ ID NO: 211013 - DNA, 120 bp, Artificial Sequence
  ENSG00000115665_32 (sequence is synthesized)
tattcatctattttctcagaatctattcagtaccctatggagtacatggaagaagtatatttttggaaccagtaagtatgggagtccacgattctcaggtattgattgaaaaaagagaaa

SEQ ID NO: 211014 - DNA, 120 bp, Artificial Sequence
  ENSG00000115665_33 (sequence is synthesized)
ggggcaagaaattcattaaagaaaaaccacagatactgaaacatttgacacataaaagtaattaattgctggagactacaattcctggcaaacaccattattccagatgcaccatgctac

SEQ ID NO: 211015 - DNA, 120 bp, Artificial Sequence
  ENSG00000115665_34 (sequence is synthesized)
ccagcatgctacctgaatggcggtttttatccatcctgtcaccctgagcatctgtctcaacctgctgaggcacagacttccaccatgtgcatcaggaaacacctcactcatactgtcata

SEQ ID NO: 211016 - DNA, 120 bp, Artificial Sequence
  ENSG00000115665_35 (sequence is synthesized)
taatgcaacagggaggcatagtctctctacaggtctctctctttacgttgtaccattctgttgggcaacaattgtcccaacaaccacacttaaatccagtggggaaaaaaaggttaacag

SEQ ID NO: 211017 - DNA, 120 bp, Artificial Sequence
  ENSG00000115665_36 (sequence is synthesized)
taaaaatttcttccacgtaattcaatttctcacaatagacagaaacagggggaaaatgtttgccctgttcaaagtactaaaactagataacttaaataatttaagccaataaataatatt

SEQ ID NO: 211018 - DNA, 120 bp, Artificial Sequence
  ENSG00000115665_37 (sequence is synthesized)
atattgtatttaacccattattcctcacctaccctcaaagtaggtatacaaaagactagtttgttattaatccacaaatatgctaaatgttagcaagatgatttttaagtacaaaaaagt

SEQ ID NO: 211019 - DNA, 120 bp, Artificial Sequence
  ENSG00000115665_38 (sequence is synthesized)
ttaagattgcaaggaaggaaacaatggtcacaaggtctttacttatgcacatttgtgcataaatttccacccaatttccaagacagttgtatcacaaagctgtgaaatgtgcaagagtat

SEQ ID NO: 211020 - DNA, 120 bp, Artificial Sequence
  ENSG00000115665_39 (sequence is synthesized)
actttgtacccatcatgtgctctgttttgacataatgagtaatgcagacatttacatgttcttccagcttcaatcagtagacctgattttcaaaatctgccctcagatgaaaataaaata

SEQ ID NO: 211021 - DNA, 120 bp, Artificial Sequence
  ENSG00000115665_40 (sequence is synthesized)
aacgaaacatttagacaatggctatattaatctgggaaggcaacacctgtggataaaacattagaagaaaacatatattttattttcatacttttgatatgattgtaacatatttcttga

SEQ ID NO: 211022 - DNA, 120 bp, Artificial Sequence
  ENSG00000115665_41 (sequence is synthesized)
gtaatttaaatgctttgttttcccacacatattcaaatcagcaagcttgtagctggactgcaatatcaacaacaagttgtttcaaacagcatcaaaatacaacttcattgctacacttac

SEQ ID NO: 211023 - DNA, 120 bp, Artificial Sequence
  ENSG00000115665_42 (sequence is synthesized)
acacttacaagtaatgaattttatgtgactatgaaacgaatataagcttaaaataagtgaatctaataaaatggctattcctctttttacttggaaataataaattaacattatatttta

SEQ ID NO: 211024 - DNA, 120 bp, Artificial Sequence
  ENSG00000115677_0 (sequence is synthesized)
aagcgtagcctcttctcctttaccaagatggcggcttgtccctgtttcgccacagttcctaccttatgagctcggttttcttatgcttataagagtggaacagcaaaagctggcaggctg

SEQ ID NO: 211025 - DNA, 120 bp, Artificial Sequence
  ENSG00000115677_1 (sequence is synthesized)
acagaggcggcctcaggacggaccttctggctactgaccgttttgctgtggttttcccggattgtgtgtaggtgtgagatcaaccatgagttccgttgcagttttgacccaagagagttt

SEQ ID NO: 211026 - DNA, 120 bp, Artificial Sequence
  ENSG00000115677_2 (sequence is synthesized)
tgctgaacaccgaagtgggctggttccgcaacaaatcaaagttgccactctaaattcagaagaggagagcgaccctccaacctacaaggatgccttccctccacttcctgagaaagctgc

SEQ ID NO: 211027 - DNA, 120 bp, Artificial Sequence
  ENSG00000115677_3 (sequence is synthesized)
ttgcctggaaagtgcccaggaacccgctggagcctgggggaacaagatccgacccatcaaggcttctgtcatcactcaggtgttccatgtacccctggaggagagaaaatacaaggatat

SEQ ID NO: 211028 - DNA, 120 bp, Artificial Sequence
  ENSG00000115677_4 (sequence is synthesized)
gaaccagtttggagaaggtgaacaagcaaaaatctgccttgagatcatgcagagaactggtgctcacttggagctgtctttggccaaagaccaaggcctctccatcatggtgtcaggaaa

SEQ ID NO: 211029 - DNA, 120 bp, Artificial Sequence
  ENSG00000115677_5 (sequence is synthesized)
gctggatgctgtcatgaaagctcggaaggacattgttgctagactgcagactcaggcctcagcaactgttgccattcccaaagaacaccatcgctttgttattggcaaaaatggagagaa

SEQ ID NO: 211030 - DNA, 120 bp, Artificial Sequence
  ENSG00000115677_6 (sequence is synthesized)
actgcaagacttggagctaaaaactgcaaccaaaatccagatcccacgcccagatgaccccagcaatcagatcaagatcactggcaccaaagagggcatcgagaaagctcgccatgaagt

SEQ ID NO: 211031 - DNA, 120 bp, Artificial Sequence
  ENSG00000115677_7 (sequence is synthesized)
cttactcatctctgccgagcaggacaaacgtgctgtggagaggctagaagtagaaaaggcattccaccccttcatcgctgggccgtataatagactggttggcgagatcatgcaggagac

SEQ ID NO: 211032 - DNA, 120 bp, Artificial Sequence
  ENSG00000115677_8 (sequence is synthesized)
aggcacgcgcatcaacatccccccacccagcgtgaaccggacagagattgtcttcactggagagaaggaacagttggctcaggctgtggctcgcatcaagaagatttatgaggagaagaa

SEQ ID NO: 211033 - DNA, 120 bp, Artificial Sequence
  ENSG00000115677_9 (sequence is synthesized)
aaagaagactacaaccattgcagtggaagtgaagaaatcccaacacaagtatgtcattgggcccaagggcaattcattgcaggagatccttgagagaactggagtttccgttgagatccc

SEQ ID NO: 211034 - DNA, 120 bp, Artificial Sequence
  ENSG00000115677_10 (sequence is synthesized)
accctcagacagcatctctgagactgtaatacttcgaggcgaacctgaaaagttaggtcaggcgttgactgaagtctatgccaaggccaatagcttcaccgtctcctctgtcgccgcccc

SEQ ID NO: 211035 - DNA, 120 bp, Artificial Sequence
  ENSG00000115677_11 (sequence is synthesized)
ttcctggcttcaccgtttcatcattggcaagaaagggcagaacctggccaaaatcactcagcagatgccaaaggttcacatcgagttcacagagggcgaagacaagatcaccctggaggg

SEQ ID NO: 211036 - DNA, 120 bp, Artificial Sequence
  ENSG00000115677_12 (sequence is synthesized)
ccctacagaggatgtcaatgtggcccaggaacagatagaaggcatggtcaaagatttgattaaccggatggactatgtggagatcaacatcgaccacaagttccacaggcacctcattgg

SEQ ID NO: 211037 - DNA, 120 bp, Artificial Sequence
  ENSG00000115677_13 (sequence is synthesized)
gaagagcggtgccaacataaacagaatcaaagaccagtacaaggtgtccgtgcgcatccctcctgacagtgagaagagcaatttgatccgcatcgagggggacccacagggcgtgcagca

SEQ ID NO: 211038 - DNA, 120 bp, Artificial Sequence
  ENSG00000115677_14 (sequence is synthesized)
ggccaagcgagagctgctggagcttgcatctcgcatggaaaatgagcgtaccaaggatctaatcattgagcaaagatttcatcgcacaatcattgggcagaagggtgaacggatccgtga

SEQ ID NO: 211039 - DNA, 120 bp, Artificial Sequence
  ENSG00000115677_15 (sequence is synthesized)
aattcgtgacaaattcccagaggtcatcattaactttccagacccagcacaaaaaagtgacattgtccagctcagaggacctaagaatgaggtggaaaaatgcacaaaatacatgcagaa

SEQ ID NO: 211040 - DNA, 120 bp, Artificial Sequence
  ENSG00000115677_16 (sequence is synthesized)
gatggtggcagatctggtggaaaatagctattcaatttctgttccgatcttcaaacagtttcacaagaatatcattgggaaaggaggcgcaaacattaaaaagattcgtgaagaaagcaa

SEQ ID NO: 211041 - DNA, 120 bp, Artificial Sequence
  ENSG00000115677_17 (sequence is synthesized)
caccaaaatcgaccttccagcagagaatagcaattcagagaccattatcatcacaggcaagcgagccaactgcgaagctgcccggagcaggattctgtctattcagaaagacctggccaa

SEQ ID NO: 211042 - DNA, 120 bp, Artificial Sequence
  ENSG00000115677_18 (sequence is synthesized)
catagccgaggtagaggtctccatccctgccaagctgcacaactccctcattggcaccaagggccgtctgatccgctccatcatggaggagtgcggcggggtccacattcactttcccgt

SEQ ID NO: 211043 - DNA, 120 bp, Artificial Sequence
  ENSG00000115677_19 (sequence is synthesized)
ggaaggttcaggaagcgacaccgttgttatcaggggcccttcctcggatgtggagaaggccaagaagcagctcctgcatctggcggaggagaagcaaaccaagagtttcactgttgacat

SEQ ID NO: 211044 - DNA, 120 bp, Artificial Sequence
  ENSG00000115677_20 (sequence is synthesized)
ccgcgccaagccagaataccacaaattcctcatcggcaaggggggcggcaaaattcgcaaggtgcgcgacagcactggagcacgtgtcatcttccctgcggctgaggacaaggaccagga

SEQ ID NO: 211045 - DNA, 120 bp, Artificial Sequence
  ENSG00000115677_21 (sequence is synthesized)
cctgatcaccatcattggaaaggaggacgccgtccgagaggcacagaaggagctggaggccttgatccaaaacctggataatgtggtggaagactccatgctggtggaccccaagcacca

SEQ ID NO: 211046 - DNA, 120 bp, Artificial Sequence
  ENSG00000115677_22 (sequence is synthesized)
ccgccacttcgtcatccgcagaggccaggtcttgcgggagattgctgaagagtatggcggggtgatggtcagcttcccacgctctggcacacagagcgacaaagtcaccctcaagggcgc

SEQ ID NO: 211047 - DNA, 120 bp, Artificial Sequence
  ENSG00000115677_23 (sequence is synthesized)
caaggactgtgtggaggcagccaagaaacgcattcaggagatcattgaggacctggaagctcaggtgacattagaatgtgctataccccagaaattccatcgatctgtcatgggccccaa

SEQ ID NO: 211048 - DNA, 120 bp, Artificial Sequence
  ENSG00000115677_24 (sequence is synthesized)
aggttccagaatccagcagattactcgggatttcagtgttcaaattaaattcccagacagagaggagaacgcagttcacagtacagagccagttgtccaggagaatggggacgaagctgg

SEQ ID NO: 211049 - DNA, 120 bp, Artificial Sequence
  ENSG00000115677_25 (sequence is synthesized)
ggaggggagagaggctaaagattgtgaccccggctctccaaggaggtgtgacatcatcatcatctctggccggaaagaaaagtgtgaggctgccaaggaagctctggaggcattggttcc

SEQ ID NO: 211050 - DNA, 120 bp, Artificial Sequence
  ENSG00000115677_26 (sequence is synthesized)
ccggcacctgagctgcagtctgacatcatcgccatcacgggcctcgctgcaaatttggaccgggccaaggctggactgctggagcgtgtgaaggagctacaggccgagcaggaggaccgg

SEQ ID NO: 211051 - DNA, 120 bp, Artificial Sequence
  ENSG00000115677_27 (sequence is synthesized)
gctttaaggagttttaagctgagtgtcactgtagaccccaaataccatcccaagattatcgggagaaagggggcagtaattacccaaatccggttggagcatgacgtgaacatccagttt

SEQ ID NO: 211052 - DNA, 120 bp, Artificial Sequence
  ENSG00000115677_28 (sequence is synthesized)
cctgataaggacgatgggaaccagccccaggaccaaattaccatcacagggtacgaaaagaacacagaagctgccagggatgctatactgagaattgtgggtgaacttgagcagatggtt

SEQ ID NO: 211053 - DNA, 120 bp, Artificial Sequence
  ENSG00000115677_29 (sequence is synthesized)
tctgaggacgtcccgctggaccaccgcgttcacgcccgcatcattggtgcccgcggcaaagccattcgcaaaatcatggacgaattcaaggtggacattcgcttcccacagagcggagcc

SEQ ID NO: 211054 - DNA, 120 bp, Artificial Sequence
  ENSG00000115677_30 (sequence is synthesized)
ccagaccccaactgcgtcactgtgacggggctcccagagaatgtggaggaagccatcgaccacatcctcaatctggaggaggaatacctagctgacgtggtggacagtgaggcgctgcag

SEQ ID NO: 211055 - DNA, 120 bp, Artificial Sequence
  ENSG00000115677_31 (sequence is synthesized)
gtatacatgaaacccccagcacacgaagaggccaaggcaccttccagaggctttgtggtgcgggacgcaccctggaccgccagcagcagtgagaaggctcctgacatgagcagctctgag

SEQ ID NO: 211056 - DNA, 120 bp, Artificial Sequence
  ENSG00000115677_32 (sequence is synthesized)
gaatttcccagctttggggctcaggtggctcccaagaccctcccttggggccccaaacgataatgatcaaaaagaacagaaccctctccagcctgctgacccaaacccaaccacacaatg

SEQ ID NO: 211057 - DNA, 120 bp, Artificial Sequence
  ENSG00000115677_33 (sequence is synthesized)
gtttgtctcaatctgacccagcggctggaccctccgtaaattgttgacgctcttcccccttcccgaggtcccgcagggagcctagcgcctggctgtgtgtgcggccgctcctccaggcct

SEQ ID NO: 211058 - DNA, 120 bp, Artificial Sequence
  ENSG00000115677_34 (sequence is synthesized)
ggccgtgcccgctcaggacctgctccactgtttaacactaaaccaaggtcatgagcattcgtgctaagataacagactccagctcctggtccacccggcatgtcagtcagcactctggcc

SEQ ID NO: 211059 - DNA, 120 bp, Artificial Sequence
  ENSG00000115677_35 (sequence is synthesized)
ttcatcacgagagctccgcagccgtggctaggattccacttcctgtgtcatgacctcaggaaataaacgtccttgactttataaaagccaaacgtttgccctcttcctttcccacctccc

SEQ ID NO: 211060 - DNA, 120 bp, Artificial Sequence
  ENSG00000115677_36 (sequence is synthesized)
tcctgccagtttcccttggtccagacagtcctgtttgtggagtgcaatcagcctcctccagctgccagagcgcctcagcacaggtgtcagggtgcaaggaagacctggcaatggacagca

SEQ ID NO: 211061 - DNA, 120 bp, Artificial Sequence
  ENSG00000115677_37 (sequence is synthesized)
ggaggcaggttcctggagctggggggtgacctgagaggcagagggtgacgggttctcaggcagtcctgattttacctgccgtggggtctgaaagcaccaagggtccctgcccctacctcc

SEQ ID NO: 211062 - DNA, 120 bp, Artificial Sequence
  ENSG00000115677_38 (sequence is synthesized)
actgccagaccctcagcctgaggtctggtgagtggagcctggaggcaaggtggtaggcaccatctgggtcccctgtggccgtcacagtgtctgctgtgattgagatgcgcacaggttggg

SEQ ID NO: 211063 - DNA, 120 bp, Artificial Sequence
  ENSG00000115677_39 (sequence is synthesized)
ggaggtagggccttacgcttgtcctcagtgggggcagtttgccttagatgacagctgggctcttcttcacaccacctgcagcccctccctgcccctgccctagctgctgtgtgttcagtt

SEQ ID NO: 211064 - DNA, 120 bp, Artificial Sequence
  ENSG00000115677_40 (sequence is synthesized)
gccttctttctacctcagccggcgtggagtggtctctgtgcagttagtgccaccccacacacccgtctcttgattgagatgtttctggtggttatgggtttcccgtggagctgggggtgg

SEQ ID NO: 211065 - DNA, 120 bp, Artificial Sequence
  ENSG00000115677_41 (sequence is synthesized)
gcgccgtgtacctaagctggaggctggcgctctccctcagcacaggtgggtcagtggccagcaggcccatctggagtgggagtgggcacttccaccccgcccacaggccatccggctgtg

SEQ ID NO: 211066 - DNA, 120 bp, Artificial Sequence
  ENSG00000115677_42 (sequence is synthesized)
caggccagcccctaggagcaggtcccgggtgactggcagttttcacggtctagggccgagacgatggcatggggcctagagcatgaggtagagcagaatgcagaccacgccgctggatgc

SEQ ID NO: 211067 - DNA, 120 bp, Artificial Sequence
  ENSG00000115677_43 (sequence is synthesized)
cgagagaccctgctctccgagggaggcatctgtgtcatgctgtgagggctgaggacggggccctagtctctggttttctggtcttaacatccttatctgtgtccgccacggaggtgactg

SEQ ID NO: 211068 - DNA, 120 bp, Artificial Sequence
  ENSG00000115677_44 (sequence is synthesized)
agctgctagcgagttgtcctgtcccaggtacttgagttttggaaaagctgactcacgcccatccatctcacagcccttccctggggacagtcgcttccgccttgacacctcactctcagt

SEQ ID NO: 211069 - DNA, 120 bp, Artificial Sequence
  ENSG00000115677_45 (sequence is synthesized)
tgaataactcaagcttggtcatcttcagactcgaattcttgagtagacccagacggcttagcccaagtctagttgcagctgcctcggcaagtccccatttgctcaggcagccctgaatgg

SEQ ID NO: 211070 - DNA, 120 bp, Artificial Sequence
  ENSG00000115677_46 (sequence is synthesized)
gcctgtttacaggaatggtaaattgggattggaaggaatatagcttccagcttcataggctagggtgaccacggcttaggaaacagggaaagaaagcaaggcccttttcctgcctttccc

SEQ ID NO: 211071 - DNA, 120 bp, Artificial Sequence
  ENSG00000115677_47 (sequence is synthesized)
gggatctgtctactccacctccacgggggaggccagtggggaagggctgtcacctcttccccatctgcatgagttctggaactctgtcctgttggctgcttgcttccagctccccccaat

SEQ ID NO: 211072 - DNA, 120 bp, Artificial Sequence
  ENSG00000115677_48 (sequence is synthesized)
ctccatcgcagcgggttcctcctgtcttttctacagtgtcataaaacatcctgcccctaccctctcccaaaggtcaattttaattctcaccaagttttgcacatctctgtatgtcgcttg

SEQ ID NO: 211073 - DNA, 120 bp, Artificial Sequence
  ENSG00000115677_49 (sequence is synthesized)
atgtcttagacgcgagccctttcctaaactgttcagcgctctcttttcctttgggtggttgttgcaagggtgatgacatgactgtccccaggcctgtctccctgaagcgtctgtgctgtc

SEQ ID NO: 211074 - DNA, 120 bp, Artificial Sequence
  ENSG00000115677_50 (sequence is synthesized)
aggacagccctgggcagagatgaggcaggggtgaggcgtgcgtgtgcttttcctccttgttggatgtcttccatatcatctgtttccatagctacaatccatcccttggccttaactttg

SEQ ID NO: 211075 - DNA, 120 bp, Artificial Sequence
  ENSG00000115677_51 (sequence is synthesized)
gaatttggagattatatgcaaacatgtgtaaaggctcatgaatatggatgacactggaattttataaattctaaaataaaacccgaaaccagatgtagcatgctgggactcattttgtca

SEQ ID NO: 211076 - DNA, 120 bp, Artificial Sequence
  ENSG00000115677_52 (sequence is synthesized)
gccgccgccctatatagcagccggggcccgggcgccgcgcctcggagcgtcccggcttctcccgcgcggggggcgagtaagccagcggcaggaccagcgggcgggggcccacgacaaaag

SEQ ID NO: 211077 - DNA, 120 bp, Artificial Sequence
  ENSG00000115677_53 (sequence is synthesized)
gatcggggggcctctctgggattggctgcgcgcacgtcacgtggggccgacgggccctgcgcagaccatcgagtcgggcgtccctccccggggacgtggccttcctgtgcccgggctggg

SEQ ID NO: 211078 - DNA, 120 bp, Artificial Sequence
  ENSG00000115677_54 (sequence is synthesized)
ggccaggcatgaggaaatgaatcaagtacagtgagatttaacatgtgggcagctttctggaaagccagcgaatttgaccattgttgccactctaaattcagaagaggagagcgaccctcc

SEQ ID NO: 211079 - DNA, 120 bp, Artificial Sequence
  ENSG00000115677_55 (sequence is synthesized)
gaaataccaccagtccacatcctctgctggaaaggcgagaccctttaatccagtctactggatgctcccccattgccatgaaccgccttctcagctccggacccatgtgtcgtaagggca

SEQ ID NO: 211080 - DNA, 120 bp, Artificial Sequence
  ENSG00000115677_56 (sequence is synthesized)
agattattgtcacgcaaaagctggcaggctgacagaggcggcctcaggacggaccttctggctactgaccgttttgctgtggttttcccggattgtgtgtaggtgtgagatcaaccatga

SEQ ID NO: 211081 - DNA, 120 bp, Artificial Sequence
  ENSG00000115677_57 (sequence is synthesized)
agcctggggttgagtcacgcagggtcattgggccagcgcaggctgatgtggaagattgcacctttcaatccaggctactgatgagttggtcagcagttttctgcctttgtctctcacgat

SEQ ID NO: 211082 - DNA, 120 bp, Artificial Sequence
  ENSG00000115677_58 (sequence is synthesized)
gcttctgccctcctgggtcccagggagggtgggcgggcaggcgggcttggtgtcctgagggtggcaactgcgtcggaagctgcttgcgagttggggagcatcccctcctgaagccgtgtc

SEQ ID NO: 211083 - DNA, 120 bp, Artificial Sequence
  ENSG00000115677_59 (sequence is synthesized)
agaaagttgaaactgctgaggacggttctggaccaggctccgactgagctgcaggcactgtttcctggtgtctgagctgtaggtactataccaggccccgactgagctgcaggcactgtt

SEQ ID NO: 211084 - DNA, 120 bp, Artificial Sequence
  ENSG00000115677_60 (sequence is synthesized)
gtcaagcgtagcctcttctcctttaccaagatggcggcttgtccctgtttcgccacagttcctaccttatgagctcggttttcttatgcttataagagtggaacagcagttccacctttt

SEQ ID NO: 211085 - DNA, 120 bp, Artificial Sequence
  ENSG00000115677_61 (sequence is synthesized)
catggttgaggagcacatgtggtcgccagcctcccatctccagagtcccctaaggcaagatccccagtggattagaaaggactgaaggacttttacaggctaacagcaagaagaacaaag

SEQ ID NO: 211086 - DNA, 120 bp, Artificial Sequence
  ENSG00000115677_62 (sequence is synthesized)
agtgcgacctggccttcttcccctcccccatgcggccggcttccgagtgcgcaagcccagagtcgtccgcgttgtccgcctctgcgcaagcgccgtgctcctcccacggcagttggccat

SEQ ID NO: 211087 - DNA, 120 bp, Artificial Sequence
  ENSG00000115677_63 (sequence is synthesized)
gtgcccaggtttggggagagcgtgcctctgagccccaggtgagcagcctggctttcactgtgacacgaccttgagctctgcaaacccatggctgttctcccattttcttaggccaatagc

SEQ ID NO: 211088 - DNA, 120 bp, Artificial Sequence
  ENSG00000115677_64 (sequence is synthesized)
actgaccgttttgctgctaccacttataaccacctggttaagtcgagatttggaggtggtttagtttggggcctggatgcaccttgcagagagagaccgctggctttttgtagcaactgt

SEQ ID NO: 211089 - DNA, 120 bp, Artificial Sequence
  ENSG00000115677_65 (sequence is synthesized)
agaaacttgcctgagtattggtgttagtaaccaaagcataaatatcttgaccttttctgattttgaggtaaaaagatctgagttgtaaaatgtagataagtaacttttctctggtttcct

SEQ ID NO: 211090 - DNA, 120 bp, Artificial Sequence
  ENSG00000115677_66 (sequence is synthesized)
ctggtttctgcccccgagaaattgcagaatgtagcttagtcagtcatgtctgttctgttttcttctcatgcagttcctaactcttgtcttctttcgtaatctaaaaaaacctgctgccca

SEQ ID NO: 211091 - DNA, 120 bp, Artificial Sequence
  ENSG00000115677_67 (sequence is synthesized)
gctcccatgtcctctgcttctcttgtcttgtgttgcttcacctggcacagctgcatgtccatgttcccccctcagtgcatcgcctcgttgctgcctctgcgtgtgcatgtgtttgggatg

SEQ ID NO: 211092 - DNA, 120 bp, Artificial Sequence
  ENSG00000115677_68 (sequence is synthesized)
gacgcacaaaaagccctcctcgtggtccttccagcaagctgggcttccctttactgcacagtgggcaagattcctgccttgtttcctgatgatacggcttctccagagtttggggggcct

SEQ ID NO: 211093 - DNA, 120 bp, Artificial Sequence
  ENSG00000115677_69 (sequence is synthesized)
ggaactcttaacttgggggtactgggttctatccagagaggttgacagcaggagggtttgcaacagcacttgtcttgcagacacagtgaagtgctcagtgtgaatctgagccaacagtag

SEQ ID NO: 211094 - DNA, 120 bp, Artificial Sequence
  ENSG00000115677_70 (sequence is synthesized)
atggggtctctgggcagcagcatgggccccacaaggctcttaggcgtcagtgagtgcttttgtgtggagttaatgtgtgtggtttttttaacttgagaatagtagttcccaaacttactg

SEQ ID NO: 211095 - DNA, 120 bp, Artificial Sequence
  ENSG00000115677_71 (sequence is synthesized)
cacattagaaacacctggaatccttcaactattctgaagccctggccaataccccagacgagctaaatcccagactgagtggccccaaccgtcagttatttgaaggtctcggggcatttc

SEQ ID NO: 211096 - DNA, 120 bp, Artificial Sequence
  ENSG00000115677_72 (sequence is synthesized)
cagcttctggtccaggctgagagcctgtcctccagaacccttgtgatccaggtgaagatcataactggcccccattctagacaatggagatttttgtttgggaagctaagcatcgttttt

SEQ ID NO: 211097 - DNA, 120 bp, Artificial Sequence
  ENSG00000115677_73 (sequence is synthesized)
ggtgatgggaatcacagataaggttatttagcgctttagcgctgtcctgcccagttatgtcattggcagaatgttgttggtctgtgtcctaaatgtgtttccttttgtgttcctaagtaa

SEQ ID NO: 211098 - DNA, 120 bp, Artificial Sequence
  ENSG00000115677_74 (sequence is synthesized)
ttacgttattgggcagaaaggaagtgggatccgcaagatgatggatgagtttgaggtagacccctttcccgggaggccatgtcacaggagtggcctgtcgcatcctctcccgagtgccag

SEQ ID NO: 211099 - DNA, 120 bp, Artificial Sequence
  ENSG00000115677_75 (sequence is synthesized)
tgtcctttctcaacttcctgttgactctgcctcctcctgctcggactgggcactgacttcccttcacggcgggtggccttccctctcaccacttctgggtcccagggccaatggactctt

SEQ ID NO: 211100 - DNA, 120 bp, Artificial Sequence
  ENSG00000115677_76 (sequence is synthesized)
cgaccacatcctcaatctggaggaggaatacgtgagtctctgtgggccttggagccctgaggcgccctggcacgtccaccggcctgaggcccagccaggagcttcaggggacaaggtggc

SEQ ID NO: 211101 - DNA, 120 bp, Artificial Sequence
  ENSG00000115677_77 (sequence is synthesized)
acttgtgtttccagaggcaggcgaggtgcaggggtgagcaggcgggcgggatgctgggggtgctgggcagactgaccctgtcttcctgtcttctgcctgcagctagctgacgtggtggac

SEQ ID NO: 211102 - DNA, 120 bp, Artificial Sequence
  ENSG00000115677_78 (sequence is synthesized)
caggcgttgactgaagtctatgccaaggtaactgcctccgagcatgaagtgtgtctcctttgagtggagtccgcggggccttcatggatgagctctcgatttgtaaatcctggggcctgg

SEQ ID NO: 211103 - DNA, 120 bp, Artificial Sequence
  ENSG00000115677_79 (sequence is synthesized)
gattcaaaaagtatttgagaacctactaggtgctagacaccaaccgaggcaatgagtatgggtgacaacatgtgccctgccctcacagcaccaatagtccactggacaaataccatctgg

SEQ ID NO: 211104 - DNA, 120 bp, Artificial Sequence
  ENSG00000115677_80 (sequence is synthesized)
gccagcctcccatctccagagtcccctaaggcaaggtgactcaccctcctacttcacagagttcttggtcctccccagacagcctttgaaggttcctttcaatcctgcgatttcatgacc

SEQ ID NO: 211105 - DNA, 120 bp, Artificial Sequence
  ENSG00000115677_81 (sequence is synthesized)
gcaggtgggtcccccattagccctgctctgcttgttaatagtggcgcctcccatgtgagaggcggggctgtcgcacatactggtgaggctctttcctgtctctgctggaaaaccatctat

SEQ ID NO: 211106 - DNA, 120 bp, Artificial Sequence
  ENSG00000115677_82 (sequence is synthesized)
gtattctgggggcttccagaggttcagggtcactccctggcctttaaaagatggaccacgtcagttactgacagagtgaccaggtgaccttcataggtcctagagacacacaaggtagcc

SEQ ID NO: 211107 - DNA, 120 bp, Artificial Sequence
  ENSG00000115677_83 (sequence is synthesized)
agtcccaaggcgatgaggagcgtgcagcctcatcctcgggtgtcccgagttcagtcccagtgattctcatgacatcgtttggatcgcatgagccccgtcgtagagcttcctcctccacat

SEQ ID NO: 211108 - DNA, 120 bp, Artificial Sequence
  ENSG00000115677_84 (sequence is synthesized)
tccatcttctctcctgagctgttttcctcagcagtgggggccggctcttgcccctgacgggaatcccagtaaggcatccccttttctgactacattctccttttttagccccaggaccaa

SEQ ID NO: 211109 - DNA, 120 bp, Artificial Sequence
  ENSG00000115677_85 (sequence is synthesized)
ttctgagccccttccttaaccagctctgatcctggcatgggacatgaactctctcttagccaaaaagtagacttgcatcgattgactgtaatttgcaacgtaagttagttgttggacaaa

SEQ ID NO: 211110 - DNA, 120 bp, Artificial Sequence
  ENSG00000115677_86 (sequence is synthesized)
tgatctatctcacttaccctcatgacaaacctctgaaggtttgtttgcaaataccagtgctctgtcgtgttcatgctacccttaggggtagaagggatactgtattttactctctagcac

SEQ ID NO: 211111 - DNA, 120 bp, Artificial Sequence
  ENSG00000115677_87 (sequence is synthesized)
ggggacgtggccttcctgtgcccgggctggggcccgccgccccgcgggggagggcggagctggcgcggcccctagctttctccttctggtgtggggcccgaggtcagagcccagcacaac

SEQ ID NO: 211112 - DNA, 120 bp, Artificial Sequence
  ENSG00000115677_88 (sequence is synthesized)
aacccttcttctggttcagccgcccagcggttatgtggggtacgggaaagatgatccagccatgcaggagagcaccagtggttctgtgaggattttacttcaaaatacaaaagctggcag

SEQ ID NO: 211113 - DNA, 120 bp, Artificial Sequence
  ENSG00000115677_89 (sequence is synthesized)
gacggttgcccaagcggcagtggcagtggaggtagccctcttgctcctaccgtgtgcgcacgggctgtgcttctcggctggacacagagtttggggaggccacttcccttcaccaaggct

SEQ ID NO: 211114 - DNA, 120 bp, Artificial Sequence
  ENSG00000115677_90 (sequence is synthesized)
cggggttctatagcccctttctgggacagctgcatgggatccggcctctcaggcccacggtgggtgcgggggctgtggaagggtctcagctgcagggggatgaatgtgacctccagttgc

SEQ ID NO: 211115 - DNA, 120 bp, Artificial Sequence
  ENSG00000115677_91 (sequence is synthesized)
aacgtctccccccgcgtgagtggggttatcaggcctagctcaccttgtgtgcagtcagtgtcgagtgccacctgcgtactggatgctgctctcagtgctgcggtgccacagcacacaaaa

SEQ ID NO: 211116 - DNA, 120 bp, Artificial Sequence
  ENSG00000115677_92 (sequence is synthesized)
atagttctcacgttgccgtggagagacaagcagtcaacgcagatatatcctgtggcaagtgatggcattggttcctgtcaccattgaagtagaggtgccctttgaccttcaccgttacgt

SEQ ID NO: 211117 - DNA, 120 bp, Artificial Sequence
  ENSG00000115685_0 (sequence is synthesized)
agattccggaaaggggaagagcagccaacatggcggcggaacgcggcgcggggcagcaacagtcgcaggagatgatggaggttgacaggcgggtcgagtctgaagaatccggcgatgaag

SEQ ID NO: 211118 - DNA, 120 bp, Artificial Sequence
  ENSG00000115685_1 (sequence is synthesized)
aagggaagaaacacagcagtggcatcgtggccgacctcagtgaacagagcctgaaggatggggaggagcggggggaggaggacccagaagaagaacatgagctgcctgtggacatggaaa

SEQ ID NO: 211119 - DNA, 120 bp, Artificial Sequence
  ENSG00000115685_2 (sequence is synthesized)
ccatcaacctggacagagatgcagaggatgttgatttgaatcactatcgcatagggaagattgaaggatttgaggtactgaagaaagtgaagactctctgcctccgccaaaatttaatta

SEQ ID NO: 211120 - DNA, 120 bp, Artificial Sequence
  ENSG00000115685_3 (sequence is synthesized)
aatgcattgagaatctggaggagctacagagtcttcgagagctggatctttacgacaaccagatcaagaagattgagaatctggaggcgctaacagagctggagattctagatatttctt

SEQ ID NO: 211121 - DNA, 120 bp, Artificial Sequence
  ENSG00000115685_4 (sequence is synthesized)
ttaatctgctgagaaacatcgaaggggttgacaagttgacacgactgaaaaaactcttcttggtcaacaataaaatcagtaaaattgagaacttaagcaacttacatcaactacagatgc

SEQ ID NO: 211122 - DNA, 120 bp, Artificial Sequence
  ENSG00000115685_5 (sequence is synthesized)
tagagctgggatctaaccgcatccgggcaatcgaaaatatcgacaccttaaccaacctggagagtttgtttttggggaaaaacaaaattactaaacttcagaacctggatgcgctcacca

SEQ ID NO: 211123 - DNA, 120 bp, Artificial Sequence
  ENSG00000115685_6 (sequence is synthesized)
acctgacagtcctcagtatgcagagcaaccggctgaccaagatcgagggtctgcagaacctggtgaacctgcgggagctgtaccttagccacaatggcatcgaggtcatcgagggcctgg

SEQ ID NO: 211124 - DNA, 120 bp, Artificial Sequence
  ENSG00000115685_7 (sequence is synthesized)
agaacaataacaaactcacgatgttggacattgcatcaaatagaatcaaaaagattgaaaatatcagccatctaacagagctgcaagagttctggatgaacgacaatctccttgagagct

SEQ ID NO: 211125 - DNA, 120 bp, Artificial Sequence
  ENSG00000115685_8 (sequence is synthesized)
agggagccaggagcctggagacagtgtacctggagcggaaccccttgcagaaggacccccagtaccggcggaaggtcatgctcgccctcccctccgtgcggcagatcgatgccacgttcg

SEQ ID NO: 211126 - DNA, 120 bp, Artificial Sequence
  ENSG00000115685_9 (sequence is synthesized)
tcaggttctgagtccttcttggctcctcatgtggtccctctcctcggaagaactgcccagccacgggtttttaacccacctgttgctcctgaggtcgtcactatatcaacagtcacaaac

SEQ ID NO: 211127 - DNA, 120 bp, Artificial Sequence
  ENSG00000115685_10 (sequence is synthesized)
ccaatggcaataaaggcactgacgatagctggcgcgcgcgacgtcacacaccattttcagatgccgttgcaattaaatcttgccacactgtcctcctgggtgattgttgacagttattgt

SEQ ID NO: 211128 - DNA, 120 bp, Artificial Sequence
  ENSG00000115685_11 (sequence is synthesized)
agccacagagagaacataagacacgttgcgttcattcgctagaaatccctgtttccttctctcagaaggcagtcacagtccctacctgagtcgtgtgaaacacagggcctgagagtgctt

SEQ ID NO: 211129 - DNA, 120 bp, Artificial Sequence
  ENSG00000115685_12 (sequence is synthesized)
tacaggcattcacgtgctgtccgagtggcattcgggggctggcctagctggccctagtcctggtgtgcagggttcaggcagtcttgacctgcaacaaccgaggttttttagtcttttaac

SEQ ID NO: 211130 - DNA, 120 bp, Artificial Sequence
  ENSG00000115685_13 (sequence is synthesized)
ccagccattttcaattttttaaaaattaggtaagttaaaaaagctgggtaaaagctgactcagccctgtgtgcttgtgttccttagagctctccttcaaagagcgccgggcagggctgac

SEQ ID NO: 211131 - DNA, 120 bp, Artificial Sequence
  ENSG00000115685_14 (sequence is synthesized)
tgttttcacgtgtgcccgtcagttctcgccacatcccttgcctgtgggtgaaagctcaggtgtggggagggtgtcctgtgtcccacacggtgctgtgctgctgccagaatacgagtccca

SEQ ID NO: 211132 - DNA, 120 bp, Artificial Sequence
  ENSG00000115685_15 (sequence is synthesized)
ttgagcctctccaaagacggcctccaaggatctgaactcttggccactggtatagtggcctcctgttctcaccccattgttattttggcttttttaatataaaatgtacattgacagaca

SEQ ID NO: 211133 - DNA, 120 bp, Artificial Sequence
  ENSG00000115685_16 (sequence is synthesized)
aaaggaataatgggcgcctccgcccccgggccgggcagatgcggtttcctcccgactcgcgatcaaaatggcttctcgcctccagactgttccggctccgccgcctgaaattacctgctc

SEQ ID NO: 211134 - DNA, 120 bp, Artificial Sequence
  ENSG00000115685_17 (sequence is synthesized)
tgggggaggcgcggcgcgcggcctcatgacggaactacaactcccatgaggcgctgggcccacgcaggcgcggcgcggctgaagtcgccgcgccggaatcccattggcagggccggctct

SEQ ID NO: 211135 - DNA, 120 bp, Artificial Sequence
  ENSG00000115685_18 (sequence is synthesized)
ggcctttctttactgggagcacagcaggtgtgagacagcagtcgagggacttgaggcacagccctggggctggctctcctgagcccaggcagccagtgacctgtgactctggcctgcctc

SEQ ID NO: 211136 - DNA, 120 bp, Artificial Sequence
  ENSG00000115685_19 (sequence is synthesized)
ggtttctgtgcctgtgttcaattaggcactcgctgacttttacagtcctccgtgcctctcattggaatttgtcaaaattgagcccaccaaaggttcttatgttctgccaggaagtggcag

SEQ ID NO: 211137 - DNA, 120 bp, Artificial Sequence
  ENSG00000115685_20 (sequence is synthesized)
gcctcacgtactgaggggaagtgtgctcacagagcccccaccctcctcagctgcctccagctcaccctgctctgccccagtgcggtgttcaagacaaataaaagactttttctcattcaa

SEQ ID NO: 211138 - DNA, 120 bp, Artificial Sequence
  ENSG00000115685_21 (sequence is synthesized)
gatagatggaagcttccgtcatcgcctgacttagtcaccaacagtggagcggtaggagcccccgctatcctcagatgggtgctgctgagacattgggtgtttatggaggacttgagagtt

SEQ ID NO: 211139 - DNA, 120 bp, Artificial Sequence
  ENSG00000115685_22 (sequence is synthesized)
cgcccccgggccgggcagatgcggtttcctcccgactcgcgatcaaaatgggtgagtagcgcagagctcgcctcttggaggcctctttctgaaggcggaggacgcggggcggctcgttca

SEQ ID NO: 211140 - DNA, 120 bp, Artificial Sequence
  ENSG00000115685_23 (sequence is synthesized)
tgggccgggtggctccgcagggtagacgaaggctgcagcgtccgcactgggctgggaacgacttgcaaggggagcccagctggcgccccggagccagccagctggctagcggccccacca

SEQ ID NO: 211141 - DNA, 120 bp, Artificial Sequence
  ENSG00000115685_24 (sequence is synthesized)
gcgcaagtgccccgcacctgcccgcctgctccgagcgtcaagagaaggcggcatttcgcatgggtaaaatccgcgcggggacgccgggagaatgttgttgctcttgccgttcggcccatt

SEQ ID NO: 211142 - DNA, 120 bp, Artificial Sequence
  ENSG00000115685_25 (sequence is synthesized)
gtacagacgcagccagcgaggctcgcagaggtcagggatgcacgtaggactggcccgcaccttgcagccacggaaagatccgcctggcccgcggcccctccacgcctccgaggtcgagac

SEQ ID NO: 211143 - DNA, 120 bp, Artificial Sequence
  ENSG00000115685_26 (sequence is synthesized)
agtgacataagtcaactctcaagcccagggcgtctctccactctgcctagacgtccactccgtctgcctgcagctacggctctgtgcgtcccgcttcgactccctctgctttccttccca

SEQ ID NO: 211144 - DNA, 120 bp, Artificial Sequence
  ENSG00000115685_27 (sequence is synthesized)
acccctacggcgcttcggaggagccaaaggaataatgggcgcctccgcccccgggccgggcagatgcggtttcctcccgactcgcgatcaaaatggaagaacatgagctgcctgtggaca

SEQ ID NO: 211145 - DNA, 120 bp, Artificial Sequence
  ENSG00000115685_28 (sequence is synthesized)
agggactcttatgaggggactatgacgctcacccataggatgtggataagtccagaatcgagcagtcagtcctgagttgtggtccttgtcccagcctgtgggcggcgtggctgcctccac

SEQ ID NO: 211146 - DNA, 120 bp, Artificial Sequence
  ENSG00000115685_29 (sequence is synthesized)
gaagcccgcgctaagggttgctagggacgcaccaaacacccctacggcgcttcggaggagccaaaggaataatgggcgcctccgcccccgggccgggcagatgcggtttcctcccgactc

SEQ ID NO: 211147 - DNA, 120 bp, Artificial Sequence
  ENSG00000115687_0 (sequence is synthesized)
gtcgctgtgcgattggtcggtgggataaaagcgcggaagggctcctttccgtggtgtgtagccggcttggcgtgaccctcgcctgatccagttgttagagttggaagcttggcagttggc

SEQ ID NO: 211148 - DNA, 120 bp, Artificial Sequence
  ENSG00000115687_1 (sequence is synthesized)
ctcccttcttcccatggaggacgggggcttaacagcctttgaagaggaccagagatgcctttcccagagcctccccttgccagtgtcagcagagggcccagctgcacagaccactgctga

SEQ ID NO: 211149 - DNA, 120 bp, Artificial Sequence
  ENSG00000115687_2 (sequence is synthesized)
gcccagcaggtcgttttcctcagcccacagacacctgagcagaaggaatgggctttccagactctgccagagcaggacagcgctctctgaagacagatggagctcctattgtctatcatc

SEQ ID NO: 211150 - DNA, 120 bp, Artificial Sequence
  ENSG00000115687_3 (sequence is synthesized)
actggctgcccagaatatttgtacaagtaaactgcactgccctgctgcccctgagcacacggacccgtccgaaccgcggggcagtgtgtcctgctgctccctgctgcggggactgtcctc

SEQ ID NO: 211151 - DNA, 120 bp, Artificial Sequence
  ENSG00000115687_4 (sequence is synthesized)
agggtggtcctcacctctgcttccggcccctgtgtgcaaccctaacaaggccatcttcacggtggatgccaagaccacagagatcctggttgctaacgacaaagcttgcgggctcctggg

SEQ ID NO: 211152 - DNA, 120 bp, Artificial Sequence
  ENSG00000115687_5 (sequence is synthesized)
gtacagcagccaggacctgattggccagaagctcacgcagttctttctgaggtcagattctgatgtggtggaggccctcagcgaggagcacatggaggccgacggccacgctgcggtggt

SEQ ID NO: 211153 - DNA, 120 bp, Artificial Sequence
  ENSG00000115687_6 (sequence is synthesized)
gtttggcacggtggtggacatcatcagccgtagtggggagaagattccagtgtctgtgtggatgaagaggatgcggcaggagcgccgcctatgctgcgtggtggtcctggagcccgtgga

SEQ ID NO: 211154 - DNA, 120 bp, Artificial Sequence
  ENSG00000115687_7 (sequence is synthesized)
gagggtctcgacctgggtcgctttccagagcgatggcaccgtcacgtcatgtgacagtctctttgctcatcttcacgggtacgtgtctggggaggacgtggctgggcagcatatcacaga

SEQ ID NO: 211155 - DNA, 120 bp, Artificial Sequence
  ENSG00000115687_8 (sequence is synthesized)
cctgatcccttctgtgcagctccctccttctggccagcacatcccaaagaatctcaagattcagaggtctgttggaagagccagggacggtaccaccttccctctgagcttaaagctgaa

SEQ ID NO: 211156 - DNA, 120 bp, Artificial Sequence
  ENSG00000115687_9 (sequence is synthesized)
atcccaacccagcagcgaggaggcgaccaccggtgaggcggcccctgtgagcggctaccgggcatctgtctgggtgttctgcaccatcagtggcctcatcaccctcctgccggatgggac

SEQ ID NO: 211157 - DNA, 120 bp, Artificial Sequence
  ENSG00000115687_10 (sequence is synthesized)
catccacggcatcaaccacagcttcgcgctgacactgtttggttacggaaagacggagctcctgggcaagaatatcactttcctgattcctggtttctacagctacatggaccttgcgta

SEQ ID NO: 211158 - DNA, 120 bp, Artificial Sequence
  ENSG00000115687_11 (sequence is synthesized)
caacagctcattacagctcccagacctggccagctgcctggacgtcggcaatgagagtgggtgtggggagagaaccttggacccgtggcagggccaggacccagctgaggggggccagga

SEQ ID NO: 211159 - DNA, 120 bp, Artificial Sequence
  ENSG00000115687_12 (sequence is synthesized)
tccaaggattaatgtcgtgcttgctggtggccacgttgtgccccgagatgagatccggaagctgatggaaagccaagacatcttcaccgggactcagactgagctgattgctggaggcca

SEQ ID NO: 211160 - DNA, 120 bp, Artificial Sequence
  ENSG00000115687_13 (sequence is synthesized)
gctcctttcctgcctctcacctcagcctgctccaggggtggacaatgtcccagaaggaagcctgccagtgcacggtgaacaggcgctgcccaaggaccagcaaatcactgccttggggag

SEQ ID NO: 211161 - DNA, 120 bp, Artificial Sequence
  ENSG00000115687_14 (sequence is synthesized)
agaggaacctgtggcaatagagagccccggacaggatcttctgggagaaagcaggtctgaaccagtggatgtgaagccatttgcttcctgcgaagattctgaagctccagtcccagctga

SEQ ID NO: 211162 - DNA, 120 bp, Artificial Sequence
  ENSG00000115687_15 (sequence is synthesized)
ggatgggggcagtgatgctggcatgtgtggcctgtgtcagaaggcccagctagagcggatgggagtcagtggtcccagcggttcagacctttgggctggggctgccgtggccaagcccca

SEQ ID NO: 211163 - DNA, 120 bp, Artificial Sequence
  ENSG00000115687_16 (sequence is synthesized)
ggccaagggtcagctggcggggggcagcctcctgatgcactgcccttgctatgggagtgaatggggcttgtggtggcgaagccaggacttggcccccagcccctctgggatggcaggcct

SEQ ID NO: 211164 - DNA, 120 bp, Artificial Sequence
  ENSG00000115687_17 (sequence is synthesized)
ctcgtttgggacacctactctagatgagccgtggctgggagtggaaaacgaccgagaagagctgcagacctgcttgattaaggagcagctgtcccagttgagccttgcaggagccctgga

SEQ ID NO: 211165 - DNA, 120 bp, Artificial Sequence
  ENSG00000115687_18 (sequence is synthesized)
tgtcccccacgccgaactcgttccgacagagtgccaggctgtcaccgctcctgtgtcgtcctgcgatctgggaggcagagacctgtgcggtggctgcacgggcagctcctcagcctgcta

SEQ ID NO: 211166 - DNA, 120 bp, Artificial Sequence
  ENSG00000115687_19 (sequence is synthesized)
ggacctccctgggggcctggaagcagtggaggcccaggaggttgatgtgaattcgttttcctggaacctcaaggaactctttttcagtgaccagacagaccaaacgtcatcaaattgttc

SEQ ID NO: 211167 - DNA, 120 bp, Artificial Sequence
  ENSG00000115687_20 (sequence is synthesized)
ctgtgctacgtctgaactcagagagacaccctcttccttggcagtgggctccgatccagatgtaggcagtctccaggaacaggggtcgtgtgtcctggatgacagggagctgttactact

SEQ ID NO: 211168 - DNA, 120 bp, Artificial Sequence
  ENSG00000115687_21 (sequence is synthesized)
gaccggcacctgtgttgaccttggccaaggccgacggttccgggagagctgtgtgggacatgatccaacagaaccgcttgaggtttgtttggtgtcctctgagcattatgcagcaagcga

SEQ ID NO: 211169 - DNA, 120 bp, Artificial Sequence
  ENSG00000115687_22 (sequence is synthesized)
cagagaaagcccaggacacgttccttccacgttggatgctggccctgaggacacgtgcccatcagcagaggagccaaggctgaacgtccaggtcacctccacgcccgtgatcgtgatgcg

SEQ ID NO: 211170 - DNA, 120 bp, Artificial Sequence
  ENSG00000115687_23 (sequence is synthesized)
cggggctgctggcctgcagcgggagatccaggagggtgcctactccgggagctgctaccatcgagatggcttacggctgagtatacagtttgaggtgaggcgggtggagctccagggccc

SEQ ID NO: 211171 - DNA, 120 bp, Artificial Sequence
  ENSG00000115687_24 (sequence is synthesized)
cacacctctgttctgctgctggctggtgaaagacctcctccacagccaacgcgactcagccgccaggacccgcctgttccttgccagcctgcccggctccacccactctaccgctgctga

SEQ ID NO: 211172 - DNA, 120 bp, Artificial Sequence
  ENSG00000115687_25 (sequence is synthesized)
gctcaccggacccagcctggtggaagtgctcagagccagaccctggtttgaggagccccccaaggctgtggaactggaggggttggcggcctgtgagggcgagtactcccaaaagtacag

SEQ ID NO: 211173 - DNA, 120 bp, Artificial Sequence
  ENSG00000115687_26 (sequence is synthesized)
taccatgagcccgctgggcagtggggccttcggcttcgtgtggactgctgtggacaaggaaaaaaacaaggaggtggtggtgaagtttattaagaaggagaaggtcttggaggattgttg

SEQ ID NO: 211174 - DNA, 120 bp, Artificial Sequence
  ENSG00000115687_27 (sequence is synthesized)
gattgaggatcccaaacttgggaaagttactttagagatcgcaattctatccagggtggagcacgccaatatcatcaaggtattggatatatttgaaaaccaagggttcttccagcttgt

SEQ ID NO: 211175 - DNA, 120 bp, Artificial Sequence
  ENSG00000115687_28 (sequence is synthesized)
gatggagaagcacggctccggcctagacctcttcgctttcatcgaccgccaccccaggctggatgagcccctggcgagctacatcttccgacaactagtgtcagcagtgggatacctgcg

SEQ ID NO: 211176 - DNA, 120 bp, Artificial Sequence
  ENSG00000115687_29 (sequence is synthesized)
cttgaaggacatcatccaccgtgacatcaaggatgagaacatcgtgatcgccgaggacttcacaatcaagctgatagactttggctcggccgcctacttggaaaggggaaaattatttta

SEQ ID NO: 211177 - DNA, 120 bp, Artificial Sequence
  ENSG00000115687_30 (sequence is synthesized)
tactttttgtgggaccatcgagtactgtgcaccggaagttctcatggggaatccctacagagggccggagctggagatgtggtctctgggagtcactctgtacacgctggtctttgagga

SEQ ID NO: 211178 - DNA, 120 bp, Artificial Sequence
  ENSG00000115687_31 (sequence is synthesized)
gaaccccttctgtgagctggaggagaccgtggaggctgccatacacccgccatacctggtgtccaaagaactcatgagccttgtgtctgggctgctgcagccagtccctgagagacgcac

SEQ ID NO: 211179 - DNA, 120 bp, Artificial Sequence
  ENSG00000115687_32 (sequence is synthesized)
caccttggagaagctggtgacagacccgtgggtaacacagcctgtgaatcttgctgactatacatgggaagaggtgtttcgagtaaacaagccagaaagtggagttctgtccgctgcgag

SEQ ID NO: 211180 - DNA, 120 bp, Artificial Sequence
  ENSG00000115687_33 (sequence is synthesized)
cctggagatggggaacaggagcctgagtgatgtggcccaggctcaggagctttgtgggggccccgttccaggcgaggctcctaatggccaaggctgtttgcatcccggggatccccgtct

SEQ ID NO: 211181 - DNA, 120 bp, Artificial Sequence
  ENSG00000115687_34 (sequence is synthesized)
gctgaccagctaaacaccaatttcttcctgcttttctccacttggtttggaaaatcacacagttttcaggctccatctgtttggagaaaatacattctgaagcatccccaattcaccttc

SEQ ID NO: 211182 - DNA, 120 bp, Artificial Sequence
  ENSG00000115687_35 (sequence is synthesized)
taaaaactcatgtgcaggtttgataaacaccagaacagaagacagtgatgctgtattattttagatttattacatagatttggaattcacttttttcatgacctagaaaaaaacattcca

SEQ ID NO: 211183 - DNA, 120 bp, Artificial Sequence
  ENSG00000115687_36 (sequence is synthesized)
gtgttcaactgttttatattattaaagggcttttaatttgtgaacttctgaaggcatgagtgttttctctttctacttttgtatatgtgcatgttttgtttcctctgacttggtatatgc

SEQ ID NO: 211184 - DNA, 120 bp, Artificial Sequence
  ENSG00000115687_37 (sequence is synthesized)
tcatctgagtgacggatatgtgaaatttgtagaactggttagtcaaatggccagactatttcattaatttatttcctcaaatgcttttcaaattaaagcacctttgttagtaaacagtta

SEQ ID NO: 211185 - DNA, 120 bp, Artificial Sequence
  ENSG00000115687_38 (sequence is synthesized)
gagaagctgggaaggaaagcagagggagtcgaagcgggacgcacagagccgtagctgcaggcagacggagtggacgtctaggcagagtggagagacgccctgggcttgagagttgactta

SEQ ID NO: 211186 - DNA, 120 bp, Artificial Sequence
  ENSG00000115687_39 (sequence is synthesized)
tgtcactgtctcgacctcggaggcgtggaggggccgcgggccaggcggatctttccgtggctgcaaggtgcgggccagtcctacgtgcatccctgacctctgcgagcctcgctggctgcg

SEQ ID NO: 211187 - DNA, 120 bp, Artificial Sequence
  ENSG00000115687_40 (sequence is synthesized)
tctgtacaatgggccgaacggcaagagcaacaacattctcccggcgtccccgcgcggattttacccatgcgaaatgccgccttctcttgacgctcggagcaggcgggcaggtgcggggca

SEQ ID NO: 211188 - DNA, 120 bp, Artificial Sequence
  ENSG00000115687_41 (sequence is synthesized)
cttgcgctggtggggccgctagccagctggctggctccggggcgccagctgggctccccttgcaagtcgttcccagcccagtgcggacgctgcagccttcgtctaccctgcggagccacc

SEQ ID NO: 211189 - DNA, 120 bp, Artificial Sequence
  ENSG00000115687_42 (sequence is synthesized)
cggcccatgaacgagccgccccgcgtcctccgccttcagaaagaggcctccaagaggcgagctctgcgctactcacccattttgatcgcgagtcgggaggaaaccgcatctgcccggccc

SEQ ID NO: 211190 - DNA, 120 bp, Artificial Sequence
  ENSG00000115687_43 (sequence is synthesized)
tccttagatctttttgcaggagttgagggcaagggctgtgtgctttgcctgtttcagaaggtggactctggcagctgtgtgaagtctaaagcttcgcttcgcttctcttttcagaagaca

SEQ ID NO: 211191 - DNA, 79 bp, Artificial Sequence
  ENSG00000115687_44 (sequence is synthesized)
gtgtagccggcttggcgtgaccctcgcctgatccaggttgtgtcgccaggctggagggcagtggtgtcatctcggctca

SEQ ID NO: 211192 - DNA, 120 bp, Artificial Sequence
  ENSG00000115687_45 (sequence is synthesized)
ggggtgagagagagagagtggccagtgctggcagaaagcacagccacctcggggctctgcatcgtggtggggccaggcgggtcggcaggtgctggcttgcgaggttgtcctgcatgcggt

SEQ ID NO: 211193 - DNA, 120 bp, Artificial Sequence
  ENSG00000115687_46 (sequence is synthesized)
cactcgggtatcgaatgagtgcgaaagtggatttaatacagtcactgagaaaaactacagcttcacgagactgaccagcctggtgagataaacatttaccgtcagacactctttagctgt

SEQ ID NO: 211194 - DNA, 120 bp, Artificial Sequence
  ENSG00000115687_47 (sequence is synthesized)
ctgggcattgtgtgagttctttggcacatgcgcccagcctccttccccacagggtctcgcctggggcattagaagctggattgtaacatttgttttaaaagatactttgttaggctgttg

SEQ ID NO: 211195 - DNA, 120 bp, Artificial Sequence
  ENSG00000115687_48 (sequence is synthesized)
gttctccttacaatcccggctttccttagcatgtggttcccttcattgtatctgggtttttctatctcagtctgtcctttatacaagctttttcctctagcactaattatattccccttc

SEQ ID NO: 211196 - DNA, 120 bp, Artificial Sequence
  ENSG00000115687_49 (sequence is synthesized)
ccctttttccagaattccaaattctgacctgtgcatgcatgcctgtgttgagtacatgctgtttgtcggatatttggtggtggggggaggggatcacatttctgttactctcgcattgtt

SEQ ID NO: 211197 - DNA, 120 bp, Artificial Sequence
  ENSG00000115687_50 (sequence is synthesized)
tccttaggatgaattcttagaagtggaacttctggattcagggaatgaacacgtttgctagttactgtcaaaaatgcctcttggagaagttatgccgaaccacccaactgtcctggtcac

SEQ ID NO: 211198 - DNA, 86 bp, Artificial Sequence
  ENSG00000115687_51 (sequence is synthesized)
ttggagaagttatgccgaaccacccaactgtcctggtcacagagcaggcttctctcggcttggggctagggttctttctggggtcg

SEQ ID NO: 211199 - DNA, 76 bp, Artificial Sequence
  ENSG00000115687_52 (sequence is synthesized)
ggcaccatctctcccagccttccgagtagctgggattacagggatgtagcaccatgcctggctaattttgtgtttt

SEQ ID NO: 211200 - DNA, 120 bp, Artificial Sequence
  ENSG00000115687_53 (sequence is synthesized)
ttcctaatgcaggctgctttctctcatgtaaccaagagacatacattcatcccctaccacgtgccaggctgcactgcgtgcagatgcccctgcgctcacggggactggagggagccaggt

SEQ ID NO: 211201 - DNA, 120 bp, Artificial Sequence
  ENSG00000115687_54 (sequence is synthesized)
gacatggagcccaggaagtggccagagctcgggaggaaggcaaagaggggaagagggcatgcagtcttaggcttggggtcccaggaggcctagggaagccttgtagatacccaggtacag

SEQ ID NO: 211202 - DNA, 120 bp, Artificial Sequence
  ENSG00000115687_55 (sequence is synthesized)
catttctgggatcaggagccatgatcccaaggcctctaatacttcagatatggcagggaggccaggtggagagacctggaggagtgaggccacagagttggggggccatggccgagactt

SEQ ID NO: 211203 - DNA, 120 bp, Artificial Sequence
  ENSG00000115687_56 (sequence is synthesized)
cggcttctatccagagtcagatgggagctgttggagggttgtcagcaggtgagtgccgtgctctgacttgggtgttaataggatcatggtagctggctgcaggtgtcctgggccaaggag

SEQ ID NO: 211204 - DNA, 120 bp, Artificial Sequence
  ENSG00000115687_57 (sequence is synthesized)
cagggagacaggaggcagagaagagggcgctgggttggacctgggacgcctggggtggtgagaggtggtcgatgctggtcatgctgtgaagcagtctcagtgagttccaggcgaatgagc

SEQ ID NO: 211205 - DNA, 120 bp, Artificial Sequence
  ENSG00000115687_58 (sequence is synthesized)
tctctctctgagctggatctagccttctgtgtggggatttcatggagtaggatatatattttgagaagaaaattctatgattgaagtagagaaagtgaggttgggaaggaaggatgaggc

SEQ ID NO: 211206 - DNA, 120 bp, Artificial Sequence
  ENSG00000115687_59 (sequence is synthesized)
cagatacagtcctggaatgactgagaaagtatgtttaatggttaaggtttatttacatacataaaatatccacaacaatcataaaaattaaccagtaagggttaggatgcagccagagag

SEQ ID NO: 211207 - DNA, 120 bp, Artificial Sequence
  ENSG00000115687_60 (sequence is synthesized)
cgtctcaaaggcatgtgtgcggcacagcggcctgcaggttgtaagtgcccactaaatggtggctgttgaggtaattaaccagcaaaactgagatcctgacattctcacttttcagtaagt

SEQ ID NO: 211208 - DNA, 120 bp, Artificial Sequence
  ENSG00000115687_61 (sequence is synthesized)
atttgtcttgatctgtttcgtgtctaattacatattgaacttcggccattattttattggaatgggagagtgatgatccaaataggaaggcaccctagcagagggacagggggaagaaac

SEQ ID NO: 211209 - DNA, 120 bp, Artificial Sequence
  ENSG00000115687_62 (sequence is synthesized)
ggtaactcgtgttgggttttaaggagagggtggcggttccatcctgtactgctcccagctcccccagaagaactggagaaataccagcaaagggctgtgtagacaactcacatttgctct

SEQ ID NO: 211210 - DNA, 120 bp, Artificial Sequence
  ENSG00000115687_63 (sequence is synthesized)
tggattgtttgctggggacaactcgatttctaatgacagcttccgtgaatcaacatttcttccttaaagctacacactctcgggttgttgggtttccgaagtttagtttctcaggctcct

SEQ ID NO: 211211 - DNA, 120 bp, Artificial Sequence
  ENSG00000115687_64 (sequence is synthesized)
acttgtaagtttcagatattatggttctgcaaaaaagggtcacctctctccctcttcctgtgttggaaggtgacgtcctccctttagtttgtggccaacacttgtttctgaaacttttta

SEQ ID NO: 211212 - DNA, 120 bp, Artificial Sequence
  ENSG00000115687_65 (sequence is synthesized)
cagcaaacagagtatctgtatgaggttatgttgagggtcgcttgttaaaagctgctgcctgacagctgttaattctggggctagtgagacacataattatggtgtttatactctaaaatt

SEQ ID NO: 211213 - DNA, 120 bp, Artificial Sequence
  ENSG00000115687_66 (sequence is synthesized)
tttgccaaaagaatctctaccccttttgtaaatatatagacataaatgttattctatgtaaatacagatgcacaattttataaagtatatgatcgcacatcaatgtatgtaggaatcatg

SEQ ID NO: 211214 - DNA, 120 bp, Artificial Sequence
  ENSG00000115687_67 (sequence is synthesized)
ctggttctcagggcattgcctgtcagctccagattcatcaggacctgctcagcagcggggtcggggagctgggcctgggaacagccctggcttggttcaggccgctccagggcagcatgg

SEQ ID NO: 211215 - DNA, 120 bp, Artificial Sequence
  ENSG00000115687_68 (sequence is synthesized)
ccagtccagggcacagaagcatctgcaggaagagcagctttcttcaagtcgctctttagccctttgtggttaatctctcagtactagttaataaatcttaatgaaactttccatgttcaa

SEQ ID NO: 211216 - DNA, 120 bp, Artificial Sequence
  ENSG00000115687_69 (sequence is synthesized)
cagctcccgtggccctcagcaaagccaatggacgtgtactctgcttcctccaggaagccctccccccgctcccccctctggtagacacgtcttgtggttggtgtccacaaggaagttcct

SEQ ID NO: 211217 - DNA, 120 bp, Artificial Sequence
  ENSG00000115687_70 (sequence is synthesized)
gattagcctcggagctgcccgatggcctctccactcctggcacatggcctgctggctggcctggggcagaactacagagggccggagctggagatgtggtctctgggagtcactctgtac

SEQ ID NO: 211218 - DNA, 120 bp, Artificial Sequence
  ENSG00000115687_71 (sequence is synthesized)
ggctttgtggcctgtctttcctcctgaaataggcatggtgtgcgttggtgggggcgagtgtctgctgggaagcttttctcagcagcaaacagaactcacgagtctcattgatgttgccac

SEQ ID NO: 211219 - DNA, 120 bp, Artificial Sequence
  ENSG00000115687_72 (sequence is synthesized)
cttgccggctaacgtggccatccccagtgaacacgcctcctgaagggctttgtttcctgtttgcttccaatcatatcttcagcattgaaaaatctttcctgtccccagttcattatgagt

SEQ ID NO: 211220 - DNA, 120 bp, Artificial Sequence
  ENSG00000115687_73 (sequence is synthesized)
cggaggtttattttttctttgtgtttttttttgttccagtttattttaaatgcatattttagttgaattgcttttttaaaaagccccctctggcctcctgattccagctagtgtcagcag

SEQ ID NO: 211221 - DNA, 120 bp, Artificial Sequence
  ENSG00000115687_74 (sequence is synthesized)
gtatatgtgtatttatgtgtgtacctatgtacaagtatatgttatgtgtataggtatgcacacgtgtgtatgcaggtgtgtatatatgtgcacatgtatgtatctaaatgtatgtataaa

SEQ ID NO: 211222 - DNA, 120 bp, Artificial Sequence
  ENSG00000115687_75 (sequence is synthesized)
tatgcaggtatgtatatataaatatgcaggtatgtatatataaatatgcaggtatgtatatgtttgtatatatgtgtataaatatgcgtatatttattaaatgtaagttaatcgggctta

SEQ ID NO: 211223 - DNA, 120 bp, Artificial Sequence
  ENSG00000115687_76 (sequence is synthesized)
tctaaacatcttgaaatctctctaaaaaacagaaacaacacaaaaacaaaaactgctgaaactgattttcttgctctagcccctacagctctcatccgtccgctcagcttccctgcggtc

SEQ ID NO: 211224 - DNA, 120 bp, Artificial Sequence
  ENSG00000115687_77 (sequence is synthesized)
tgtgctagccaccccaccaccctgctgactcagcctgggggcccgactttcacccacgctgctgctctggcctctgtgatctgccctcttgagccctcccctcccctcccctcccctccc

SEQ ID NO: 211225 - DNA, 120 bp, Artificial Sequence
  ENSG00000115687_78 (sequence is synthesized)
tcccagcccctcttctccgagtccagcccggggctctgtccgtgccactcttctcactgctgtggtttctcttggctcccttgtctaattctggttctgagaacaggctgctgcttccca

SEQ ID NO: 211226 - DNA, 120 bp, Artificial Sequence
  ENSG00000115687_79 (sequence is synthesized)
gacctcttctggggacagacccccagctgcggacctggagacgcatggccttggccagtgcaggggcagggctgtgggtgctggtgacctggctctggtgcgtgcttggcagcaacttca

SEQ ID NO: 211227 - DNA, 120 bp, Artificial Sequence
  ENSG00000115687_80 (sequence is synthesized)
cctcaccaagccttgctcttctgtgcaaaatgaaagtcatatttatcttgctaggttgttgtgaggatttgggttaagccatgtaaaatgctggtacagcattggcatctctaggtaccc

SEQ ID NO: 211228 - DNA, 120 bp, Artificial Sequence
  ENSG00000115687_81 (sequence is synthesized)
aatagatggtagcatggatgaggatgtttacggtgacaggaaataaatggtagcatggatgaggatgtttacggtgacaggaaataaatggtagcgtggatgaggatgtttacggcgaca

SEQ ID NO: 211229 - DNA, 120 bp, Artificial Sequence
  ENSG00000115687_82 (sequence is synthesized)
ggaaataaatggtagcgtggatgaggatgtttacggtgacaggaaataaatggtagcgtggatgaggatgtttacggtgacaggaaataaatggtagcgtggatgaggatgtttacggcg

SEQ ID NO: 211230 - DNA, 120 bp, Artificial Sequence
  ENSG00000115687_83 (sequence is synthesized)
acaggaagtaacaatagtcctttgggtgtcttctccctgaagcttgctcctccatttggcccactgtgtgaacacccaccttcaccacgtccttcttgtttgctttcatccttcggtgtt

SEQ ID NO: 211231 - DNA, 120 bp, Artificial Sequence
  ENSG00000115694_0 (sequence is synthesized)
gctttctccggtcgctgccgccaccaccgttgcttcgcgggctgggaggcccggggtccccgggcgaacagaggctgcgggtgggagccttcgcgggcgctgcagagcgggccgggggag

SEQ ID NO: 211232 - DNA, 120 bp, Artificial Sequence
  ENSG00000115694_1 (sequence is synthesized)
gccgggatggagccccgcggagtggactgacgccgcaggggcgagctagccggctccgcgcctctccgcgggatccagacgcctcctggggctgctggcggagggtctgaggcggcgcgg

SEQ ID NO: 211233 - DNA, 120 bp, Artificial Sequence
  ENSG00000115694_2 (sequence is synthesized)
ccatggctcacctccggggatttgccaaccagcactctcgagtggaccctgaggagctcttcaccaagctcgaccgcattggcaagggctcgtttggggaggtctacaagggcatcgata

SEQ ID NO: 211234 - DNA, 120 bp, Artificial Sequence
  ENSG00000115694_3 (sequence is synthesized)
accacacaaaggaggtggtggccatcaagatcatcgacctggaggaggccgaggatgagatcgaggacatccagcaggagatcactgtcctcagtcagtgcgacagcccctacatcaccc

SEQ ID NO: 211235 - DNA, 120 bp, Artificial Sequence
  ENSG00000115694_4 (sequence is synthesized)
gctactttggctcctacctaaagagcaccaagctatggatcatcatggagtacctgggcggcggctcagcactggacttgcttaaaccaggtcccctggaggagacatacattgccacga

SEQ ID NO: 211236 - DNA, 120 bp, Artificial Sequence
  ENSG00000115694_5 (sequence is synthesized)
tcctgcgggagattctgaagggcctggattatctgcactccgaacgcaagatccaccgagacatcaaagctgccaacgtgctactctcggagcagggtgacgtgaagctggcggactttg

SEQ ID NO: 211237 - DNA, 120 bp, Artificial Sequence
  ENSG00000115694_6 (sequence is synthesized)
gggtagcagggcagctcacagacacgcagattaagaggaacacattcgtgggcacccccttctggatggcacctgaggtcatcaagcagtcggcctacgacttcaaggctgacatctggt

SEQ ID NO: 211238 - DNA, 120 bp, Artificial Sequence
  ENSG00000115694_7 (sequence is synthesized)
ccctggggatcacagccatcgagctggccaagggggagcctccaaactctgacctccaccccatgcgcgtcctgttcctgattcccaagaacagcccacccacactggagggccagcaca

SEQ ID NO: 211239 - DNA, 120 bp, Artificial Sequence
  ENSG00000115694_8 (sequence is synthesized)
gcaagcccttcaaggagttcgtggaggcctgcctcaacaaagacccccgattccggcccacggccaaggagctcctgaagcacaagttcatcacacgctacaccaagaagacctccttcc

SEQ ID NO: 211240 - DNA, 120 bp, Artificial Sequence
  ENSG00000115694_9 (sequence is synthesized)
tcacggagctcatcgaccgctataagcgctggaagtcagaggggcatggcgaggagtccagctctgaggactctgacattgatggcgaggcggaggacggggagcagggccccatctgga

SEQ ID NO: 211241 - DNA, 120 bp, Artificial Sequence
  ENSG00000115694_10 (sequence is synthesized)
cgttcccccctaccatccggccgagtccacacagcaagcttcacaaggggacggccctgcacagttcacagaagcctgcggagcccgtcaagaggcagccgaggtcccagtgcctgtcca

SEQ ID NO: 211242 - DNA, 120 bp, Artificial Sequence
  ENSG00000115694_11 (sequence is synthesized)
cgctggtccggcccgtcttcggagagctcaaagagaagcacaagcagagcggcgggagcgtgggtgcgctggaggagctggagaacgccttcagcctggccgaggagtcctgccccggca

SEQ ID NO: 211243 - DNA, 120 bp, Artificial Sequence
  ENSG00000115694_12 (sequence is synthesized)
tctcagacaagctgatggtgcacctggtggagcgagtgcagaggttttcacacaacagaaaccacctgacatccacccgctgaagcgcactgctgttcagataggggacggaaggtcgtt

SEQ ID NO: 211244 - DNA, 120 bp, Artificial Sequence
  ENSG00000115694_13 (sequence is synthesized)
tgtttttgttctgagctccataagaactgtgctgacttggaaggtgccctgtgctatgtcgtgcctgcagggacacgtcggatcccgtgggcctcacatgccaggtcaccaggtcaccgt

SEQ ID NO: 211245 - DNA, 120 bp, Artificial Sequence
  ENSG00000115694_14 (sequence is synthesized)
ctccttccacccctgcagtgtgctgttgtgcacgtcagggacgctgttctctatgcccactgccctcctccctctcctggcccagcagtattgctcacgggggctccagccgccggcgtg

SEQ ID NO: 211246 - DNA, 120 bp, Artificial Sequence
  ENSG00000115694_15 (sequence is synthesized)
gccctcatgagctacgcctgggtcttctgcagactcatgcagccctatggccgctcagaccaaggcgcagagcaactatcagggcagctctgcctcctcctcccatgaggtggggagagg

SEQ ID NO: 211247 - DNA, 120 bp, Artificial Sequence
  ENSG00000115694_16 (sequence is synthesized)
caacagggcagcccccagaggagtgtcctggccgctgtcctcccggggcccatgatggccatagatttgccttgtggtgttggatcaggtactgtgtctgctcataagtacttgtgtcat

SEQ ID NO: 211248 - DNA, 120 bp, Artificial Sequence
  ENSG00000115694_17 (sequence is synthesized)
ccagaatgttttgttttttaagaaaattgaattacttgtttcctgaaatattctgaggttaatatgttagttttcatagaacattgagaggcccctgccactttcaataaagacctgact

SEQ ID NO: 211249 - DNA, 120 bp, Artificial Sequence
  ENSG00000115694_18 (sequence is synthesized)
cagcacgcagagacggcagcccagccccccttcgaaacttccctgtgacggattcctgggctctgcttggcccaccggaagaacagagcaggcagaggagaatgcaggtggggagatgct

SEQ ID NO: 211250 - DNA, 120 bp, Artificial Sequence
  ENSG00000115694_19 (sequence is synthesized)
gtttgtttatttttaatcaaatgtgtgtgaacaaagcagtcgcccatctacttcccgttggaaggaatgctgggcagtaataaattagacggccccaccctcccagggcacagggggact

SEQ ID NO: 211251 - DNA, 120 bp, Artificial Sequence
  ENSG00000115694_20 (sequence is synthesized)
ttggtttctgcttctctagaggtacatggggaacaagcgtggcttctgccagacttgtttagctgtgacctgcagggcaggcccctggggctgccacttggttcaccagatggaaggtca

SEQ ID NO: 211252 - DNA, 120 bp, Artificial Sequence
  ENSG00000115694_21 (sequence is synthesized)
gcatggctgtgccacgcttgtctgagagggtcctggcagtgggtacgcagggtgtatggcagggcctcttttccagtgcttgctctaggccagtcctcggcagggaccctgctctgggga

SEQ ID NO: 211253 - DNA, 120 bp, Artificial Sequence
  ENSG00000115694_22 (sequence is synthesized)
gagaggcagggtgtgcccaggctttggtccgatgccgagagcactgctcaggccttgtctgcgtctttgagccaggggcctgggagctgtggcttgagcggctccgcgctcaagactcgc

SEQ ID NO: 211254 - DNA, 120 bp, Artificial Sequence
  ENSG00000115694_23 (sequence is synthesized)
acatttttcccagggccccagatagctgctggcatgcactaggtcctgggtggggggatgaagcccctcccagatgttacatgaggcccacccacactgctggtgccagtggggatccag

SEQ ID NO: 211255 - DNA, 120 bp, Artificial Sequence
  ENSG00000115694_24 (sequence is synthesized)
tgagaccacagccacttcccatctgttgagaagcctcaggacagaggtcacctctgtgtcctgctgttctttgtagttgtgtccaaacctgggcaggttgagcgtcattcctccttcccc

SEQ ID NO: 211256 - DNA, 120 bp, Artificial Sequence
  ENSG00000115694_25 (sequence is synthesized)
ctgaccatcccctccagccctgaggagggttgggggccatcctgcacgatgcttggggccctcccggctgagctgctggccccctggatcacctccatccacctggaggagagggcggcc

SEQ ID NO: 211257 - DNA, 120 bp, Artificial Sequence
  ENSG00000115694_26 (sequence is synthesized)
atcagaccagtgagccatcttgtgctcagacactgtcccaagaacaacccaggatatgggacaagcaggacaaaagaagggttaaaaacctggggccgggtgcggtggctcatgcctata

SEQ ID NO: 211258 - DNA, 120 bp, Artificial Sequence
  ENSG00000115694_27 (sequence is synthesized)
ggcagaagaatcgcttgaaccctggaggtgcaggttatagtgagccaagattgtatcactgcactccagcctgagtgacagagggagacgccatctccaaaaaaaaaaaaaacaaagcat

SEQ ID NO: 211259 - DNA, 120 bp, Artificial Sequence
  ENSG00000115694_28 (sequence is synthesized)
gagggagacgccatctccaaaaaaaaaaaaaacaaagcattgctgttttttggaaatgctggaagcattgctcagcccttcctttccagggcccagaaaacttgcctccaccaccatgag

SEQ ID NO: 211260 - DNA, 120 bp, Artificial Sequence
  ENSG00000115694_29 (sequence is synthesized)
tagaaatgggagctgagcggacatcgaaatgggcagctgaccagggctgcctcctgcaaaattacctttcaaatgtgtacttgctctcagcccggaagaagtagacgtgggatttgaact

SEQ ID NO: 211261 - DNA, 120 bp, Artificial Sequence
  ENSG00000115694_30 (sequence is synthesized)
ggagcttgaaaacatagtctttgtgtatgccatcggcctccctggggatgctcacgctgtagcccagcagcgggaggctggccagtgggtagtcatcctgcaagacagcatagggacacg

SEQ ID NO: 211262 - DNA, 120 bp, Artificial Sequence
  ENSG00000115694_31 (sequence is synthesized)
ggttccaggggctgggttgccacagggaatgcccattcctctgctacctgcacaacggtggcacgtacaaatgcccacgggccaagggagccagtttccctgttcacacagcacagggtg

SEQ ID NO: 211263 - DNA, 120 bp, Artificial Sequence
  ENSG00000115694_32 (sequence is synthesized)
tgtgggcaaagcatgggagggcagaaccaaaatacaaaagggacacaggtgagcagggttaagtgtctgtctgctagcatcacctgcattgggctccagtgaaactccagtacctgatga

SEQ ID NO: 211264 - DNA, 120 bp, Artificial Sequence
  ENSG00000115694_33 (sequence is synthesized)
gttttgtagaagaacaaacagaagttggtaaagacgacccagagcttctgccagccatgactgtttttgaactttcttagcagatatcctgaaagctggttctgtcaataaaggaaaaat

SEQ ID NO: 211265 - DNA, 120 bp, Artificial Sequence
  ENSG00000115694_34 (sequence is synthesized)
gcaggtgcattaaccagcacccaggaccccttgtgggagtgggtttgctccccaagactaagcctctgcatgctttctccagctgaggccttggttttacctctggactgctatgaacag

SEQ ID NO: 211266 - DNA, 120 bp, Artificial Sequence
  ENSG00000115694_35 (sequence is synthesized)
cagctttatcagtacttaagtccaacagaagcatgttaaaaacctagagtgacattccaggcaccaagtaaagtgagttccctttccctgtgcacaataaagtcagtgttcagtaaccaa

SEQ ID NO: 211267 - DNA, 80 bp, Artificial Sequence
  ENSG00000115694_36 (sequence is synthesized)
gggacaccggggcgggggcaccgggaggaagctgccttggaagaggtgggggcggcgacgggaggggcggcgagcccccg

SEQ ID NO: 211268 - DNA, 120 bp, Artificial Sequence
  ENSG00000115694_37 (sequence is synthesized)
ggcctggggggtctcctgggcccccccccacccatggagcccgccgccccggaggtcggtctcagatgactgaactgggcaccgagcgcccctggtgtccctcgcagtggactgacgccg

SEQ ID NO: 211269 - DNA, 120 bp, Artificial Sequence
  ENSG00000115694_38 (sequence is synthesized)
ctgggggtggatgtggctcttgtaacgtcctgagccccactgaccttagagaggccggggcctgtgaggggcaagtggctagtggtgcccagggtctggagtatagagaaccttgtggcc

SEQ ID NO: 211270 - DNA, 120 bp, Artificial Sequence
  ENSG00000115694_39 (sequence is synthesized)
acggcttccagcagcagtcactgtcctgggcgcgtcccgcgctctagcccaggtgggtcccacaacggtgtgaccaaggacgtcctatgaccaccccttgacagcactctcgagtggacc

SEQ ID NO: 211271 - DNA, 120 bp, Artificial Sequence
  ENSG00000115694_40 (sequence is synthesized)
aaggctgtgacactgttgcacggagatgtctccctcacagcactgtggggtggtttcagcttctagctttcctgcagctgattgtgggctgggttttctgagtggaaggagcagaatctg

SEQ ID NO: 211272 - DNA, 120 bp, Artificial Sequence
  ENSG00000115694_41 (sequence is synthesized)
ctgcaatgactccttttgtactcccagacctgccaaggttctctgggttcctagggtgacttttttttcttcaggtgcaaacacagatgatccttctatagagaaagcagagaaggttta

SEQ ID NO: 211273 - DNA, 120 bp, Artificial Sequence
  ENSG00000115694_42 (sequence is synthesized)
gtcttcggagaggtgcaaacacagatgatccttctatagagaaagcagagaaggtttagtcggggtccatccccgggcaggtgccgccctggttagtcacgtgaccctgcatcaacgtca

SEQ ID NO: 211274 - DNA, 120 bp, Artificial Sequence
  ENSG00000115694_43 (sequence is synthesized)
gaaggagggatgtgaggaggtcaggatagtcacctgtgctgagccatcatggagagtgagggcctgtaagggtggacacagtatgcaggagggacaaatcttcctcaccggacaggtggg

SEQ ID NO: 211275 - DNA, 120 bp, Artificial Sequence
  ENSG00000115694_44 (sequence is synthesized)
gatccctgcggtgcactaggggaatgcacacagggggcactatgacctggcggcccacggggcacggggacgcaccaggtagccttgggatctgcaagtccctcccggaccctggggagt

SEQ ID NO: 211276 - DNA, 120 bp, Artificial Sequence
  ENSG00000115694_45 (sequence is synthesized)
tgcctgttgtggggaggcggggaccctgctggtgctgtgcccggctctcttccatgtcagagggactgagtgacatgccagagggtgcaaggcggtcttgacggttcagtgcatgccctc

SEQ ID NO: 211277 - DNA, 120 bp, Artificial Sequence
  ENSG00000115694_46 (sequence is synthesized)
tggtttatcctcatggtgaccctaggtgctgtgacgtgggtggtccccactccagaagcaggggcgtgggccctgggggtgagggtgaccagatatagtgttgggcagggaccccctcaa

SEQ ID NO: 211278 - DNA, 120 bp, Artificial Sequence
  ENSG00000115694_47 (sequence is synthesized)
tcgctccctttccagaagatactacttgtaacggtttccttgtacgctgaggaaaccagctgtggactgagtgtaggaaagggccacacttggctggagttgttggttccctgtggtgca

SEQ ID NO: 211279 - DNA, 120 bp, Artificial Sequence
  ENSG00000115694_48 (sequence is synthesized)
gtcgcctccgggctttctccggtcgctgccgccaccaccgttgcttcgcgggctgggaggcccggggtccccgggcgaacagaggctgcggcactctcgagtggaccctgaggagctctt

SEQ ID NO: 211280 - DNA, 120 bp, Artificial Sequence
  ENSG00000115694_49 (sequence is synthesized)
gtagaattgagtagccccagcgtgtggtctggccctgctgagagcagacgggaggctgggccagcccatggggagggacttgccactggcaacgagccatctctgtcatgtaggggacga

SEQ ID NO: 211281 - DNA, 120 bp, Artificial Sequence
  ENSG00000115694_50 (sequence is synthesized)
ttctggtggagcagggggcttcctggcaggcccgtgttggctacacccttggtcagggtcacctctgcggtagcccccagtgggcgaagtcgcttgtcgttgggatttgtcgtaaaagcc

SEQ ID NO: 211282 - DNA, 120 bp, Artificial Sequence
  ENSG00000115694_51 (sequence is synthesized)
aaatgcaggaagagccctggagctcggagtggagccgttgggctcctgctggcagtgcccctgtggccctaggtggccctgggtttgagagtggcaaggagggctgaggtcctgaggaca

SEQ ID NO: 211283 - DNA, 120 bp, Artificial Sequence
  ENSG00000115694_52 (sequence is synthesized)
gccctgctgtgccctaggaggccaggtggatggtaccctggcccttctcagggggcccggggtggagccacgtggagcctgggatgacgcctgcctgtcctgtgtcaagcagctgccaac

SEQ ID NO: 211284 - DNA, 120 bp, Artificial Sequence
  ENSG00000115694_53 (sequence is synthesized)
gtaaagaagcaggggtgatgagagatgcggacccaggaggggttcaaggggctgtcctggacgcatgacagggaagcatagcttcttaaaggactcggcagtgcaccatgagaagacacg

SEQ ID NO: 211285 - DNA, 120 bp, Artificial Sequence
  ENSG00000115694_54 (sequence is synthesized)
tgctgaggcatcagctggaccccgtggcctggcagagccccgtctggtacctcgggtttcccttggccgtgaggtgtgccctgaggccctcatgcctcctggccctctccccactggccc

SEQ ID NO: 211286 - DNA, 120 bp, Artificial Sequence
  ENSG00000115694_55 (sequence is synthesized)
tcagtgcgacagcccctacatcacccgctactttggctcctacctaaagccctgtaggactggatcagcagcctggtttttgatggggtcttggtgaagtggagtcagccactgctgtgt

SEQ ID NO: 211287 - DNA, 120 bp, Artificial Sequence
  ENSG00000115694_56 (sequence is synthesized)
gtactcaacctgtcctctgagcatctgtagcagtagtgtggcaggaggggaagatgggcaaggccgagagagccctttcctgttcagggttcttggcagggatgggaccggtggggcctg

SEQ ID NO: 211288 - DNA, 120 bp, Artificial Sequence
  ENSG00000115705_0 (sequence is synthesized)
aggcaattaaggcgcccatttcagaagagttacagccgtgaaaattactcagcagtgcagttggctgagaagaggaaaaaagaatgagagcgctcgctgtgctgtctgtcacgctggtta

SEQ ID NO: 211289 - DNA, 120 bp, Artificial Sequence
  ENSG00000115705_1 (sequence is synthesized)
tggcctgcacagaagccttcttccccttcatctcgagagggaaagaactcctttggggaaagcctgaggagtctcgtgtctctagcgtcttggaggaaagcaagcgcctggtggacaccg

SEQ ID NO: 211290 - DNA, 120 bp, Artificial Sequence
  ENSG00000115705_2 (sequence is synthesized)
ccatgtacgccacgatgcagagaaacctcaagaaaagaggaatcctttctccagctcagcttctgtctttttccaaacttcctgagccaacaagcggagtgattgcccgagcagcagaga

SEQ ID NO: 211291 - DNA, 120 bp, Artificial Sequence
  ENSG00000115705_3 (sequence is synthesized)
taatggaaacatcaatacaagcgatgaaaagaaaagtcaacctgaaaactcaacaatcacagcatccaacggatgctttatcagaagatctgctgagcatcattgcaaacatgtctggat

SEQ ID NO: 211292 - DNA, 120 bp, Artificial Sequence
  ENSG00000115705_4 (sequence is synthesized)
gtctcccttacatgctgcccccaaaatgcccaaacacttgcctggcgaacaaatacaggcccatcacaggagcttgcaacaacagagaccaccccagatggggcgcctccaacacggccc

SEQ ID NO: 211293 - DNA, 120 bp, Artificial Sequence
  ENSG00000115705_5 (sequence is synthesized)
tggcacgatggctccctccagtctatgaggacggcttcagtcagccccgaggctggaaccccggcttcttgtacaacgggttcccactgcccccggtccgggaggtgacaagacatgtca

SEQ ID NO: 211294 - DNA, 120 bp, Artificial Sequence
  ENSG00000115705_6 (sequence is synthesized)
ttcaagtttcaaatgaggttgtcacagatgatgaccgctattctgacctcctgatggcatggggacaatacatcgaccacgacatcgcgttcacaccacagagcaccagcaaagctgcct

SEQ ID NO: 211295 - DNA, 120 bp, Artificial Sequence
  ENSG00000115705_7 (sequence is synthesized)
tcgggggaggggctgactgccagatgacttgtgagaaccaaaacccatgttttcccatacaactcccggaggaggcccggccggccgcgggcaccgcctgtctgcccttctaccgctctt

SEQ ID NO: 211296 - DNA, 120 bp, Artificial Sequence
  ENSG00000115705_8 (sequence is synthesized)
cggccgcctgcggcaccggggaccaaggcgcgctctttgggaacctgtccacggccaacccgcggcagcagatgaacgggttgacctcgttcctggacgcgtccaccgtgtatggcagct

SEQ ID NO: 211297 - DNA, 120 bp, Artificial Sequence
  ENSG00000115705_9 (sequence is synthesized)
ccccggccctagagaggcagctgcggaactggaccagtgccgaagggctgctccgcgtccacgcgcgcctccgggactccggccgcgcctacctgcccttcgtgccgccacgcgcgcctg

SEQ ID NO: 211298 - DNA, 120 bp, Artificial Sequence
  ENSG00000115705_10 (sequence is synthesized)
cggcctgtgcgcccgagcccggcatccccggagagacccgcgggccctgcttcctggccggagacggccgcgccagcgaggtcccctccctgacggcactgcacacgctgtggctgcgcg

SEQ ID NO: 211299 - DNA, 120 bp, Artificial Sequence
  ENSG00000115705_11 (sequence is synthesized)
agcacaaccgcctggccgcggcgctcaaggccctcaatgcgcactggagcgcggacgccgtgtaccaggaggcgcgcaaggtcgtgggcgctctgcaccagatcatcaccctgagggatt

SEQ ID NO: 211300 - DNA, 120 bp, Artificial Sequence
  ENSG00000115705_12 (sequence is synthesized)
acatccccaggatcctgggacccgaggccttccagcagtacgtgggtccctatgaaggctatgactccaccgccaaccccactgtgtccaacgtgttctccacagccgccttccgcttcg

SEQ ID NO: 211301 - DNA, 120 bp, Artificial Sequence
  ENSG00000115705_13 (sequence is synthesized)
cgctggtgaggaggctggacgccagcttccaggagcaccccgacctgcccgggctgtggctgcaccaggctttcttcagcccatggacattactccgtggaggtggtttggacccactaa

SEQ ID NO: 211302 - DNA, 120 bp, Artificial Sequence
  ENSG00000115705_14 (sequence is synthesized)
tacgaggccttcttgcaagaccagccaaactgcaggtgcaggatcagctgatgaacgaggagctgacggaaaggctctttgtgctgtccaattccagcaccttggatctggcgtccatca

SEQ ID NO: 211303 - DNA, 120 bp, Artificial Sequence
  ENSG00000115705_15 (sequence is synthesized)
acctgcagaggggccgggaccacgggctgccaggttacaatgagtggagggagttctgcggcctgcctcgcctggagacccccgctgacctgagcacagccatcgccagcaggagcgtgg

SEQ ID NO: 211304 - DNA, 120 bp, Artificial Sequence
  ENSG00000115705_16 (sequence is synthesized)
ccgacaagatcctggacttgtacaagcatcctgacaacatcgatgtctggctgggaggcttagctgaaaacttcctccccagggctcggacagggcccctgtttgcctgtctcattggga

SEQ ID NO: 211305 - DNA, 120 bp, Artificial Sequence
  ENSG00000115705_17 (sequence is synthesized)
agcagatgaaggctctgcgggacggtgactggttttggtgggagaacagccacgtcttcacggatgcacagaggcgtgagctggagaagcactccctgtctcgggtcatctgtgacaaca

SEQ ID NO: 211306 - DNA, 120 bp, Artificial Sequence
  ENSG00000115705_18 (sequence is synthesized)
ctggcctcaccagggtgcccatggatgccttccaagtcggcaaattccccgaagactttgagtcttgtgacagcatcactggcatgaacctggaggcctggagggaaacctttcctcaag

SEQ ID NO: 211307 - DNA, 120 bp, Artificial Sequence
  ENSG00000115705_19 (sequence is synthesized)
acgacaagtgtggcttcccagagagcgtggagaatggggactttgtgcactgtgaggagtctgggaggcgcgtgctggtgtattcctgccggcacgggtatgagctccaaggccgggagc

SEQ ID NO: 211308 - DNA, 120 bp, Artificial Sequence
  ENSG00000115705_20 (sequence is synthesized)
agctcacttgcacccaggaaggatgggatttccagcctcccctctgcaaagatgtgaacgagtgtgcagacggtgcccaccccccctgccacgcctctgcgaggtgcagaaacaccaaag

SEQ ID NO: 211309 - DNA, 120 bp, Artificial Sequence
  ENSG00000115705_21 (sequence is synthesized)
gcggcttccagtgtctctgcgcggacccctacgagttaggagacgatgggagaacctgcgtagactccgggaggctccctcgggtgacttggatctccatgtcgctggctgctctgctga

SEQ ID NO: 211310 - DNA, 120 bp, Artificial Sequence
  ENSG00000115705_22 (sequence is synthesized)
tcggaggcttcgcaggtctcacctcgacggtgatttgcaggtggacacgcactggcactaaatccacactgcccatctcggagacaggcggaggaactcccgagctgagatgcggaaagc

SEQ ID NO: 211311 - DNA, 120 bp, Artificial Sequence
  ENSG00000115705_23 (sequence is synthesized)
accaggccgtagggacctcaccgcagcgggccgcagctcaggactcggagcaggagagtgctgggatggaaggccgggatactcacaggctgccgagagccctctgagggcaaagtggca

SEQ ID NO: 211312 - DNA, 120 bp, Artificial Sequence
  ENSG00000115705_24 (sequence is synthesized)
ggacactgcagaacagcttcatgttcccaaaatcaccgtacgactcttttccaaacacaggcaaatccgaaatcagcaggacgactgttttcccaacacgggtaaatctagtaccatgtc

SEQ ID NO: 211313 - DNA, 120 bp, Artificial Sequence
  ENSG00000115705_25 (sequence is synthesized)
gtagttactctcaggcatggatgaataaatgttatagctgcatttgtctggccttttcttgtaaacattgcctgatttgttccttctggggctttgccattaaaatgtatttacagatta

SEQ ID NO: 211314 - DNA, 120 bp, Artificial Sequence
  ENSG00000115705_26 (sequence is synthesized)
ggaaggcaattaaggcgcccatttcagaagagttacagccgtgaaaattactcagcagtgcagttggctgagaagaggaaaaaaggtcagaatgagagcgctcgctgtgctgtctgtcac

SEQ ID NO: 211315 - DNA, 120 bp, Artificial Sequence
  ENSG00000115705_27 (sequence is synthesized)
aaacaagagagatggtcacggcggccaagtctgcagttcacctctgtggccacttccctctggatgaagccctcagccatggtctcctcttcacgagattataaggaaagataattcaga

SEQ ID NO: 211316 - DNA, 120 bp, Artificial Sequence
  ENSG00000115705_28 (sequence is synthesized)
tggaaatcttttttacccagcctgctggaaatgcaatgattgttgctacaaggattgaaggcaatgggctggaaacacgcacccagctcagaccctgccttcggtcggtgccggaatcct

SEQ ID NO: 211317 - DNA, 120 bp, Artificial Sequence
  ENSG00000115705_29 (sequence is synthesized)
tccttgaccccagcctcaccgtgagacaccgggcccttcactcagaaagggctccgtcagtcagcaccttggcggcccactacccaccgtccacctgttttggatatatgcaatcttgcg

SEQ ID NO: 211318 - DNA, 120 bp, Artificial Sequence
  ENSG00000115705_30 (sequence is synthesized)
tgaacttatgcatggagcggagaatctaatgtacccatagctatggatctcccgagcacagatcatgccaaaggtggaggttgagaggcagacacaggcactggacattgatggagaagt

SEQ ID NO: 211319 - DNA, 120 bp, Artificial Sequence
  ENSG00000115705_31 (sequence is synthesized)
gagggaaggtgagcaatgaatgtgatgtggactgacacgtaatttggaaactactagaaggctcttgaatggaaccagggattcttcacacttcatagagcagctgaaagggacttgagc

SEQ ID NO: 211320 - DNA, 120 bp, Artificial Sequence
  ENSG00000115705_32 (sequence is synthesized)
actacttgggccttctgacgccagagttacagaatgctcttttgccaaatcatggatggccactcgagcacacagatattcaggatcctcttgtccccgtgtgcagagaggcctggtgct

SEQ ID NO: 211321 - DNA, 120 bp, Artificial Sequence
  ENSG00000115705_33 (sequence is synthesized)
ggatatcgtttatgtgagttgagcggatagctgaggctatgtggatgcatgtaactagttagagcattttactaagttaatgaccgaaatcagagctctcaggtcactactggaatcagc

SEQ ID NO: 211322 - DNA, 120 bp, Artificial Sequence
  ENSG00000115705_34 (sequence is synthesized)
aagcactgacattcgagttgtgcgtgggctgctgatgaatcctggttcagtgagcttagctgcctaggcagggtggtaattagagtacggagttttacaggagaatctactgcataattc

SEQ ID NO: 211323 - DNA, 120 bp, Artificial Sequence
  ENSG00000115705_35 (sequence is synthesized)
atgaggaaactgaaacgcaaaaaagatgtgtagttaaagccatgtgctcctgtgagtgggtgggcacgtgcagtcactctgcctgcaatagcagaggcggaagagccgcagagacccgtg

SEQ ID NO: 211324 - DNA, 120 bp, Artificial Sequence
  ENSG00000115705_36 (sequence is synthesized)
ggctcaagaaaagtacattcattaattaattaatcttataacataaaaacttttgatgttcaatcggcctactcagacattcctcaccaaatagaagtaggaaggacacggggaaatgca

SEQ ID NO: 211325 - DNA, 120 bp, Artificial Sequence
  ENSG00000115705_37 (sequence is synthesized)
acttttcaatgaagcatccatcagcaatttaatgccttgttttgtccacttttccttcttgtgaagagtgtaatgtcgaagttagagccacatctccacctttagaaagacgtggctgaa

SEQ ID NO: 211326 - DNA, 120 bp, Artificial Sequence
  ENSG00000115705_38 (sequence is synthesized)
atgtctgaagggcaggagaggtgacccttggtgagaagatggctctttgctgatataagtcacccccgatggcatgggtccctggtcaggaggctgttttacatccttagcttgtagaaa

SEQ ID NO: 211327 - DNA, 120 bp, Artificial Sequence
  ENSG00000115705_39 (sequence is synthesized)
cgcaaagcacaggggaatggtgtccccagagtccatgagaggagcttcgcacagggacagactgcggtccccagagtccatgagaggagcctcacatggggacagactgccgtccccaga

SEQ ID NO: 211328 - DNA, 120 bp, Artificial Sequence
  ENSG00000115705_40 (sequence is synthesized)
gtccatgagaggagcctcgcacggggacgtgactgctgtccccagattccagactcctacctcctactcagaaaaactggagccattaaaatggttactgctgaatgtggagctttttgt

SEQ ID NO: 211329 - DNA, 120 bp, Artificial Sequence
  ENSG00000115705_41 (sequence is synthesized)
caggtgggccacaccatgccgcatgtttccagctgccaccgcagtggttggacaggatctgggtgtcggagcagctctgctggggctccctgcatatttctgtttactccgtgtttccta

SEQ ID NO: 211330 - DNA, 120 bp, Artificial Sequence
  ENSG00000115705_42 (sequence is synthesized)
gtccgttctgcaccttcctccgggaggttttatttacaagctaatgacagtgagccagaatgtgagcctgcttagtgagaggaatgaagatgccttccatttgtacaaaccggttccaaa

SEQ ID NO: 211331 - DNA, 120 bp, Artificial Sequence
  ENSG00000115705_43 (sequence is synthesized)
taagtggaatagttataatcagtgtggaaaaatgtgtatgtttatgttttacccccttaccttgtatgcagaaccccaagggaggccatatcaaaaactcacttgtgtaagtctgacttt

SEQ ID NO: 211332 - DNA, 120 bp, Artificial Sequence
  ENSG00000115705_44 (sequence is synthesized)
tgaactgagagaagcagagagcagaacagtggcctccagaggggagtggggaggtgctggtcacaggcacaaagtctcaggcaggaggagggcgcctcaggtctgctgcacggcatgggg

SEQ ID NO: 211333 - DNA, 90 bp, Artificial Sequence
  ENSG00000115705_45 (sequence is synthesized)
gcaggaggagggcgcctcaggtctgctgcacggcatggggcgcacgcttcctcataatgatcgcatgtttcaaaattgctaaaacaatag

SEQ ID NO: 211334 - DNA, 120 bp, Artificial Sequence
  ENSG00000115705_46 (sequence is synthesized)
ggcacaaacatagctcactgcagcttcgaccctcctgctcaagcaatcctcttgcctcagcctcttgcgtggctgggtctacaggcgctcaccaccatgcctggctaatttttaaatttt

SEQ ID NO: 211335 - DNA, 120 bp, Artificial Sequence
  ENSG00000115705_47 (sequence is synthesized)
tcgctatgctgcccaggctggtgttgagcccttaggcccaagagatcctccagtctgaaactcccaaagtgctgggaccacagccacccactaaaataatagattttaaatgttctaact

SEQ ID NO: 211336 - DNA, 120 bp, Artificial Sequence
  ENSG00000115705_48 (sequence is synthesized)
gccaaaaaaagatgtgaggtgatatgttaattaatttgatataatctctccacaatgtaaaggtatcaaaaccatgtttaaaacataaatatatgcagttagtatttgtcaactaaaaat

SEQ ID NO: 211337 - DNA, 120 bp, Artificial Sequence
  ENSG00000115705_49 (sequence is synthesized)
acaaattttaatttaaacaaagtcacttacttgcatacaggaggggggcattgccaacatgatcggtctcccttctgaaattcagtgtgagattagatcctgtcctcggagataagcaga

SEQ ID NO: 211338 - DNA, 120 bp, Artificial Sequence
  ENSG00000115705_50 (sequence is synthesized)
gcccagggtcgttctgctgagagcacattcgtctttgcacctggctcccacgcatggaaccaaaaggacctggcctggaagtgaggctctttgtgaatttaaatagcttttccagccaca

SEQ ID NO: 211339 - DNA, 120 bp, Artificial Sequence
  ENSG00000115705_51 (sequence is synthesized)
gcaagggcagtgccagcaagtcccctgggcccctaattagtctgactgacaccaggggcaaggccaggcgttctgttcatctgtggtcgcagggacctgtgtgctcagcacggcttcttc

SEQ ID NO: 211340 - DNA, 120 bp, Artificial Sequence
  ENSG00000115705_52 (sequence is synthesized)
ctgaaggaccctgcctgcggattgcagatcccactctgtgagtaggaacctttgccacgtggatcctctgtggcctcctgcaaacaagcatttgtccggaagccagaaacttccctccag

SEQ ID NO: 211341 - DNA, 120 bp, Artificial Sequence
  ENSG00000115705_53 (sequence is synthesized)
catgacaagcaagaaggatggctcatctcgccagcggtcctttgtgaaaagagctcctgtccaggcccttctgtcttgtatcaagtgtgtgctgttactggagcagtcagaattcagacg

SEQ ID NO: 211342 - DNA, 120 bp, Artificial Sequence
  ENSG00000115705_54 (sequence is synthesized)
gaaacaccactcttgcaatcctcctgtctccaccttctggcatctctgatgccgtgctcgtctgcactctgccccggcggtccctccagcactggtttttccacaccccctgcccatcac

SEQ ID NO: 211343 - DNA, 120 bp, Artificial Sequence
  ENSG00000115705_55 (sequence is synthesized)
caggtgtccacagggcctacatctggcttccctcttctcctgggaagagcactcctggcttcctgcagggccggtgggaggaggaaagtgattctgagggagaggctggagccttaagga

SEQ ID NO: 211344 - DNA, 120 bp, Artificial Sequence
  ENSG00000115705_56 (sequence is synthesized)
ccaacaaggcaaagtgacttgtctcatcctccagagattcaccaacacatgagcctcagaccccaggcttctgcctccagcagccgccctgccgcacactgctcttactcctccttatac

SEQ ID NO: 211345 - DNA, 120 bp, Artificial Sequence
  ENSG00000115705_57 (sequence is synthesized)
cctcactcacggggaacacagcccagtgatcccggaggaaactcactccctccctgactcaacaaggcagtctcgggggcaccgttagccacgcgaccctgtaaagctgccgtcctcatt

SEQ ID NO: 211346 - DNA, 120 bp, Artificial Sequence
  ENSG00000115705_58 (sequence is synthesized)
tcacatgtgaagcagctgaattccagagtgctgggtcccagcccaggcagccctcagcctcacgcaaggcaatagttaggagtccttcggcattgaaagcaaactcagacacatctgacc

SEQ ID NO: 211347 - DNA, 120 bp, Artificial Sequence
  ENSG00000115705_59 (sequence is synthesized)
tggagttctacctgcactaagagaagagagtggtaactaattcatggataaaacagaccatcgaggcagcactgaatgatctcacccacgaatgacaacagtggcacaggagggctatga

SEQ ID NO: 211348 - DNA, 120 bp, Artificial Sequence
  ENSG00000115705_60 (sequence is synthesized)
acattttgcttcaggatgttttatttcgctctactgttatgtagagaaagcatggtttgctttttataacttttgtgacccaaaaataccagactgttgttttccctaggtgccaggcca

SEQ ID NO: 211349 - DNA, 120 bp, Artificial Sequence
  ENSG00000115705_61 (sequence is synthesized)
tcctgttctgtgtgttcccaaactcttagttttgttcatgtaaaactcatgatttcataattaaaacaatattaaaataaaactcatgaatgatttcataattaaaacaatattaaaaat

SEQ ID NO: 211350 - DNA, 120 bp, Artificial Sequence
  ENSG00000115705_62 (sequence is synthesized)
tccgtcctcacagtgactcacagacaaggatgccaaggcctggaagatgaggcatggctgtgagaggagctcacactcccctggcctgcgagagctctggccccggccagcccgtgtgct

SEQ ID NO: 211351 - DNA, 120 bp, Artificial Sequence
  ENSG00000115705_63 (sequence is synthesized)
gctctgcgggacggtgactgactccgggaggctccctcgggtgacttggatctccatgtcgctggctgctctgctgatcggaggcttcgcaggtctcacctcgacggtgatttgcaggtg

SEQ ID NO: 211352 - DNA, 120 bp, Artificial Sequence
  ENSG00000115705_64 (sequence is synthesized)
gagcttgcaacaacagaaaaatgaaatataagcccgaccattccgaaactgccaactaacctgtttaactaggaaccttccagcaggacagaccaaataatgcgaaactgaagccagtca

SEQ ID NO: 211353 - DNA, 120 bp, Artificial Sequence
  ENSG00000115705_65 (sequence is synthesized)
aagcttttctccaatgacgtctacatccacctgcaaagcctgcccctgggtcctgcagtagagcctgaacctttctttggtttgatgcttcctgattcataaatcatgatcactcaaaaa

SEQ ID NO: 211354 - DNA, 120 bp, Artificial Sequence
  ENSG00000115705_66 (sequence is synthesized)
aaactctttaaaaaatgtattgtgcctaagtttacattttaacaacctcaagaccagggcctcagccggcagcagtgagttcctgctcggcccttctgaaaggccctgctgctgtcttgg

SEQ ID NO: 211355 - DNA, 120 bp, Artificial Sequence
  ENSG00000115705_67 (sequence is synthesized)
gcgcctctgccccagctgctgggcgggctccactgacgctcctgggagaatctctgctgaccacacaatgacattggcactgggagctgtgatctggggacacttagatctgagctggtt

SEQ ID NO: 211356 - DNA, 120 bp, Artificial Sequence
  ENSG00000115705_68 (sequence is synthesized)
tctctccttctgtggtaacagctacagttttcattaagaattcacagcatctggatctaaaatctcctacgttcaaggcttcacacattgtattccaccaaaaataaaacatctgctcag

SEQ ID NO: 211357 - DNA, 120 bp, Artificial Sequence
  ENSG00000115718_0 (sequence is synthesized)
aactcgaactccaggctgtcatggcggcaggacggcgaacttgcagtatctccacgacccgcccctacaggtgccagtgcctccagaatgtggcagctcacaagcctcctgctgttcgtg

SEQ ID NO: 211358 - DNA, 120 bp, Artificial Sequence
  ENSG00000115718_1 (sequence is synthesized)
gccacctggggaatttccggcacaccagctcctcttgactcagtgttctccagcagcgagcgtgcccaccaggtgctgcggatccgcaaacgtgccaactccttcctggaggagctccgt

SEQ ID NO: 211359 - DNA, 120 bp, Artificial Sequence
  ENSG00000115718_2 (sequence is synthesized)
cacagcagcctggagcgggagtgcatagaggagatctgtgacttcgaggaggccaaggaaattttccaaaatgtggatgacacactggccttctggtccaagcacgtcgacggtgaccag

SEQ ID NO: 211360 - DNA, 120 bp, Artificial Sequence
  ENSG00000115718_3 (sequence is synthesized)
tgcttggtcttgcccttggagcacccgtgcgccagcctgtgctgcgggcacggcacgtgcatcgacggcatcggcagcttcagctgcgactgccgcagcggctgggagggccgcttctgc

SEQ ID NO: 211361 - DNA, 120 bp, Artificial Sequence
  ENSG00000115718_4 (sequence is synthesized)
cagcgcgaggtgagcttcctcaattgctcgctggacaacggcggctgcacgcattactgcctagaggaggtgggctggcggcgctgtagctgtgcgcctggctacaagctgggggacgac

SEQ ID NO: 211362 - DNA, 120 bp, Artificial Sequence
  ENSG00000115718_5 (sequence is synthesized)
ctcctgcagtgtcaccccgcagtgaagttcccttgtgggaggccctggaagcggatggagaagaagcgcagtcacctgaaacgagacacagaagaccaagaagaccaagtagatccgcgg

SEQ ID NO: 211363 - DNA, 120 bp, Artificial Sequence
  ENSG00000115718_6 (sequence is synthesized)
ctcattgatgggaagatgaccaggcggggagacagcccctggcaggtggtcctgctggactcaaagaagaagctggcctgcggggcagtgctcatccacccctcctgggtgctgacagcg

SEQ ID NO: 211364 - DNA, 120 bp, Artificial Sequence
  ENSG00000115718_7 (sequence is synthesized)
aaggaggtcttcgtccaccccaactacagcaagagcaccaccgacaatgacatcgcactgctgcacctggcccagcccgccaccctctcgcagaccatagtgcccatctgcctcccggac

SEQ ID NO: 211365 - DNA, 120 bp, Artificial Sequence
  ENSG00000115718_8 (sequence is synthesized)
agcggccttgcagagcgcgagctcaatcaggccggccaggagaccctcgtgacgggctggggctaccacagcagccgagagaaggaggccaagagaaaccgcaccttcgtcctcaacttc

SEQ ID NO: 211366 - DNA, 120 bp, Artificial Sequence
  ENSG00000115718_9 (sequence is synthesized)
atcaagattcccgtggtcccgcacaatgagtgcagcgaggtcatgagcaacatggtgtctgagaacatgctgtgtgcgggcatcctcggggaccggcaggatgcctgcgagggcgacagt

SEQ ID NO: 211367 - DNA, 120 bp, Artificial Sequence
  ENSG00000115718_10 (sequence is synthesized)
ggggggcccatggtcgcctccttccacggcacctggttcctggtgggcctggtgagctggggtgagggctgtgggctccttcacaactacggcgtttacaccaaagtcagccgctacctc

SEQ ID NO: 211368 - DNA, 120 bp, Artificial Sequence
  ENSG00000115718_11 (sequence is synthesized)
gactggatccatgggcacatcagagacaaggaagccccccagaagagctgggcaccttagcgaccctccctgcagggctgggcttttgcatggcaatggatgggacattaaagggacatg

SEQ ID NO: 211369 - DNA, 120 bp, Artificial Sequence
  ENSG00000115718_12 (sequence is synthesized)
taacaagcacaccggcctgctgttctgtccttccatccctcttttgggctcttctggagggaagtaacatttactgagcacctgttgtatgtcacatgccttatgaatagaatcttaact

SEQ ID NO: 211370 - DNA, 120 bp, Artificial Sequence
  ENSG00000115718_13 (sequence is synthesized)
cctagagcaactctgtggggtggggaggagcagatccaagttttgcggggtctaaagctgtgtgtgttgagggggatactctgtttatgaaaaagaataaaaaacacaaccacgaagcca

SEQ ID NO: 211371 - DNA, 120 bp, Artificial Sequence
  ENSG00000115718_14 (sequence is synthesized)
gcccgcgcccctcgggatctctggccgctgaccccctaccccgccttgtgtcgcagacggtgaccagtgcttggtcttgcccttggagcacccgtgcgccagcctgtgctgcgggcacgg

SEQ ID NO: 211372 - DNA, 120 bp, Artificial Sequence
  ENSG00000115718_15 (sequence is synthesized)
actcgaactccaggctgtcatggcggcaggacggcgaacttgcagtatctccacgacccgcccctcttccgccctgacggccagcacacagggacagccctttcattccgcttccacctg

SEQ ID NO: 211373 - DNA, 120 bp, Artificial Sequence
  ENSG00000115718_16 (sequence is synthesized)
ctgcattctggagctgctttctaggcaggcagtgtgagctcagccccacgtagagcgggcagccgaggccttctgaggctatgtctctagcgaacaaggaccctcaatcccagcttccgc

SEQ ID NO: 211374 - DNA, 120 bp, Artificial Sequence
  ENSG00000115718_17 (sequence is synthesized)
ctggcagctatgctcagggtgcagaaaccgagagggaagcgctgccattgcgtttgggggatgatgaaggtgggggatgcttcagggaaagatggacgcaacctgaggggagaggagcag

SEQ ID NO: 211375 - DNA, 120 bp, Artificial Sequence
  ENSG00000115718_18 (sequence is synthesized)
ccagggtgggtgaggggaggggcatgggggcatggaggggtctgcaggagggagggttacagtttctaaaaagagctggaaagacactgctctgctggcgggattttaggcagaagccct

SEQ ID NO: 211376 - DNA, 120 bp, Artificial Sequence
  ENSG00000115738_0 (sequence is synthesized)
gcgcgctgagtgacggcgcggttgccatggcagccgcctgagcggcgccgcgaggacaaggctgcagggcggcgtgaatgggcggcgtcacgcgcctggcgccagagagtctgctccggg

SEQ ID NO: 211377 - DNA, 120 bp, Artificial Sequence
  ENSG00000115738_1 (sequence is synthesized)
gctccggctccggccccgccgcggcctggcccgcgcgccgccgccgccgccaccgccgccgccaattcatcacctgtcagggatcactcgcggggtcacgggcggaatggacacagctgt

SEQ ID NO: 211378 - DNA, 120 bp, Artificial Sequence
  ENSG00000115738_2 (sequence is synthesized)
gagaacaaaacccgggaaagaaaggcgaacgctccccattgcgccagatgtgcagggaggaccttgagacgcgccccccgcccccgcaggctcctcccgccccccggcgcatcacgcggg

SEQ ID NO: 211379 - DNA, 120 bp, Artificial Sequence
  ENSG00000115738_3 (sequence is synthesized)
ggtggcaaaggcggcctggccagcgcggagctcccggcccggagctgcttctgattaccgcgaggggcccggacgcgagagccgccgcggggcctgccctagaggcggagtgatgaactg

SEQ ID NO: 211380 - DNA, 120 bp, Artificial Sequence
  ENSG00000115738_4 (sequence is synthesized)
tggcttcccccctgcggtgctgaactcgcccgtgtagctgtgattttagagctgccgacagctctaagctgggctcgcgccccgcccaccccgcggggattggctgcgaacgcggaagaa

SEQ ID NO: 211381 - DNA, 120 bp, Artificial Sequence
  ENSG00000115738_5 (sequence is synthesized)
ccaagcccacgccccgcgcccgcgcccaccaatggaagcgcccgctcgtcttgatagacgtgccaccttccgccaatggggacgaagggaagctccagcgtgtggccccggcgagtgcgg

SEQ ID NO: 211382 - DNA, 120 bp, Artificial Sequence
  ENSG00000115738_6 (sequence is synthesized)
ataaaagccgccccgccgggctcgggcttcattctgagccgagcccggtgccaagcgcagctagctcagcaggcggcagcggcggcctgagcttcagggcagccagctccctcccggtct

SEQ ID NO: 211383 - DNA, 120 bp, Artificial Sequence
  ENSG00000115738_7 (sequence is synthesized)
cgccttccctcgcggtcagcatgaaagccttcagtcccgtgaggtccgttaggaaaaacagcctgtcggaccacagcctgggcatctcccggagcaaaacccctgtggacgacccgatga

SEQ ID NO: 211384 - DNA, 120 bp, Artificial Sequence
  ENSG00000115738_8 (sequence is synthesized)
cctgctatacaacatgaacgactgctactccaagctcaaggagctggtgcccagcatcccccagaacaagaaggtgagcaagatggaaatcctgcagcacgtcatcgactacatcttgga

SEQ ID NO: 211385 - DNA, 120 bp, Artificial Sequence
  ENSG00000115738_9 (sequence is synthesized)
cctgcagatcgccctggactcgcatcccactattgtcagcctgcatcaccagagacccgggcagaaccaggcgtccaggacgccgctgaccaccctcaacacggatatcagcatcctgtc

SEQ ID NO: 211386 - DNA, 120 bp, Artificial Sequence
  ENSG00000115738_10 (sequence is synthesized)
cttgcaggcttctgaattcccttctgagttaatgtcaaatgacagcaaagcactgtgtggctgaataagcggtgttcatgatttcttttattctttgcacaacaacaacaacaacaaatt

SEQ ID NO: 211387 - DNA, 120 bp, Artificial Sequence
  ENSG00000115738_11 (sequence is synthesized)
cacggaatcttttaagtgctgaacttatttttcaaccatttcacaaggaggacaagttgaatggacctttttaaaaagaaaaaaaaaatggaaggaaaactaagaatgatcatcttccca

SEQ ID NO: 211388 - DNA, 120 bp, Artificial Sequence
  ENSG00000115738_12 (sequence is synthesized)
gggtgttctcttacttggactgtgatattcgttatttatgaaaaagacttttaaatgccctttctgcagttggaaggttttctttatatactattcccaccatggggagcgaaaacgtta

SEQ ID NO: 211389 - DNA, 120 bp, Artificial Sequence
  ENSG00000115738_13 (sequence is synthesized)
aaatcacaaggaattgcccaatctaagcagactttgccttttttcaaaggtggagcgtgaataccagaaggatccagtattcagtcacttaaatgaagtcttttggtcagaaattacctt

SEQ ID NO: 211390 - DNA, 120 bp, Artificial Sequence
  ENSG00000115738_14 (sequence is synthesized)
tttgacacaagcctactgaatgctgtgtatatatttatatataaatatatctatttgagtgaaaccttgtgaactctttaattagagttttcttgtatagtggcagagatgtctatttct

SEQ ID NO: 211391 - DNA, 120 bp, Artificial Sequence
  ENSG00000115738_15 (sequence is synthesized)
gcattcaaaagtgtaatgatgtacttattcatgctaaactttttataaaagtttagttgtaaacttaacccttttatacaaaataaatcaagtgtgtttattgaatggtgattgcctgct

SEQ ID NO: 211392 - DNA, 120 bp, Artificial Sequence
  ENSG00000115738_16 (sequence is synthesized)
ttatttcagaggaccagtgctttgatttttattatgctatgttataactgaacccaaataaatacaagttcaaatttatgtagactgtataagattataataaaacatgtctgaagtcaa

SEQ ID NO: 211393 - DNA, 120 bp, Artificial Sequence
  ENSG00000115738_17 (sequence is synthesized)
ctgtgtggctgaataagcggtgagtgtttgcttgtgccacccgtgggtaaactgcccctcggtgtgtgtgcgcgcgcgcgcatgtgtttttgcttgtgtatctataaaatgtctgatttg

SEQ ID NO: 211394 - DNA, 120 bp, Artificial Sequence
  ENSG00000115750_0 (sequence is synthesized)
ctttcccggaagctgcgctcgctacccgggtaacgggtcccggctgtggaagctcccgcggcgccgcgatggacctcgaggaggcggaagagtttaaagaacgctgtactcagtgtgctg

SEQ ID NO: 211395 - DNA, 120 bp, Artificial Sequence
  ENSG00000115750_1 (sequence is synthesized)
ctgtctcatggggtcttactgatgaaggcaaatattattgcacttcttgccacaatgttacagagagatatcaggaagttacaaacactgatcttattcctaatacccaaataaaagccc

SEQ ID NO: 211396 - DNA, 120 bp, Artificial Sequence
  ENSG00000115750_2 (sequence is synthesized)
tcaaccgggggcttaaaaaaaaaaacaatactgaaaaaggctgggattggtatgtgtgtgaaggtttccagtatattctttatcaacaagcagaagccttaaagaaccttggagtaggcc

SEQ ID NO: 211397 - DNA, 120 bp, Artificial Sequence
  ENSG00000115750_3 (sequence is synthesized)
cagagttaaagaacgatgttttacataatttttggaagcgctaccttcagaagagcaagcaggcatattgtaagaacccagtttataccactggaaggaaacctacggtattagaagata

SEQ ID NO: 211398 - DNA, 120 bp, Artificial Sequence
  ENSG00000115750_4 (sequence is synthesized)
atctaagtcattcagactgggctagtgagcctgagctgctaagtgatgtcagctgtcctccttttcttgaaagtggagcggagtctcagtctgacatccacactcgaaaacctttccccg

SEQ ID NO: 211399 - DNA, 120 bp, Artificial Sequence
  ENSG00000115750_5 (sequence is synthesized)
tcagcaaagcatcacaatcagaaacgtctgtctgctctggatctctggatggagttgaatactcacaacgaaaggagaagggaatcgtgaagatgaccatgccacagacacttgccttct

SEQ ID NO: 211400 - DNA, 120 bp, Artificial Sequence
  ENSG00000115750_6 (sequence is synthesized)
gttatctgtccttactttggcagagagaagcaataacactttcagatcttttgaggtttgttgaagaggaccatattccttacataaatgcttttcagcattttccagaacagatgaaat

SEQ ID NO: 211401 - DNA, 120 bp, Artificial Sequence
  ENSG00000115750_7 (sequence is synthesized)
tatatggacgtgacagaggaatctttggtatagagtcttggcctgactacgaggacatctacaaaaaaacagtagaagttggaacatttttagatttgcctcgttttccagacataactg

SEQ ID NO: 211402 - DNA, 120 bp, Artificial Sequence
  ENSG00000115750_8 (sequence is synthesized)
aagactgctatcttcatcccaacatactgtgtatgaaatacttgatggaagtcaacctccctgatgaaatgcatagcttaacttgccacgtggtaaaaatgactggaatgggagaagtgg

SEQ ID NO: 211403 - DNA, 120 bp, Artificial Sequence
  ENSG00000115750_9 (sequence is synthesized)
gacagtttcgagtggtctttgtctaatcttgctgaaaagcataatgaaaagaacaaaaaagataagccatggtttgatttcagaaagtggtaccaaattatgaagaaagcttttgatgag

SEQ ID NO: 211404 - DNA, 120 bp, Artificial Sequence
  ENSG00000115750_10 (sequence is synthesized)
aaaaaacaaaaatgggaagaagcaagggccaagtacctgtggaaaagtgaaaagccactctactactcatttgtcgacaaaccagtagcatataaaaaaagagaaatggtggtgaatcta

SEQ ID NO: 211405 - DNA, 120 bp, Artificial Sequence
  ENSG00000115750_11 (sequence is synthesized)
cagaaacaatttagcacactggtcgagtcaacagcaactgctggaaaaaaaagcccttcaagttttcagttcaactggactgaagaggacactgatagaacgtgtttccatggacacagc

SEQ ID NO: 211406 - DNA, 120 bp, Artificial Sequence
  ENSG00000115750_12 (sequence is synthesized)
cttcagggagtcctgaaagagaaaggccaatcactgctgactaagaattcattatattggcttagtacacagaaattctgcagatgctattgtacacatgtgacaacctatgaagaatca

SEQ ID NO: 211407 - DNA, 120 bp, Artificial Sequence
  ENSG00000115750_13 (sequence is synthesized)
aattattctctgagttatcagtttatactaaatctcttctccttcctgctcagaataaagacttcccttctccatgaagaagtgagcttagttgagaagaaactttttgagaaaaaatac

SEQ ID NO: 211408 - DNA, 120 bp, Artificial Sequence
  ENSG00000115750_14 (sequence is synthesized)
agtgtaaaaagaaagaaatcaagatccaagaaagtgagacgacattgagaaaatgaaatagaaactttctggaaaaatattttaatagtgataataacatcagattttaatataacattc

SEQ ID NO: 211409 - DNA, 120 bp, Artificial Sequence
  ENSG00000115750_15 (sequence is synthesized)
cagagaattgtggaaaatactgcatatatatgtatagactctgacacatatttacatatatatcaagtgtgcttagaaaaatgtatattgtaaagcaggtgagcttcatttgattttatt

SEQ ID NO: 211410 - DNA, 120 bp, Artificial Sequence
  ENSG00000115750_16 (sequence is synthesized)
tttcagagtatgaacattctaagagaaagttaaaacaatagcaaattgtataattgtatccagaaatgtatactcatcgtattttaaagctaaatttattttttaaactagatcccttca

SEQ ID NO: 211411 - DNA, 120 bp, Artificial Sequence
  ENSG00000115750_17 (sequence is synthesized)
ttattctttatgccccagagtaaatcccagatggatcaaagatctaaacataatctttcatatgtaaaaatataaaagtattagtagaaaacaaatatgaatgctttgatgatcttggaa

SEQ ID NO: 211412 - DNA, 120 bp, Artificial Sequence
  ENSG00000115750_18 (sequence is synthesized)
atcgtttggtgtatgtacataacgtccatcaggacttgagttccacagaatgcactttggacagcgatatgctaaaccagtcgttcacctgagtgcatcagaatcacctggagtgcttga

SEQ ID NO: 211413 - DNA, 120 bp, Artificial Sequence
  ENSG00000115750_19 (sequence is synthesized)
ccgcatgcgcgcgcggctttggtaaagaggctggagtttctggctcggcgaggggcaggggtctcgctatgttgtccagactggtattgaactcctgggctcaggcgatcttcctgcctc

SEQ ID NO: 211414 - DNA, 120 bp, Artificial Sequence
  ENSG00000115750_20 (sequence is synthesized)
cttgccacaatgttacagaggtaagtaacaaatatcatttatgaatttgcttatgttttaaaaattgccatttcagcctgatatgtagtctaagtcccaaagaattgggttgatttttgt

SEQ ID NO: 211415 - DNA, 120 bp, Artificial Sequence
  ENSG00000115750_21 (sequence is synthesized)
ggtacttacacataggttaagggatttgtgaattagattgaggatgagtttttgaaattatgttgggccacatttataaatgatttcttattcagagtatgtggttgagggaaataatta

SEQ ID NO: 211416 - DNA, 120 bp, Artificial Sequence
  ENSG00000115750_22 (sequence is synthesized)
aaattgtacttagaagatgatgcatttctttttatcagttagtacttatttacatttttttaaatgtgtcatggtggcttagaggtttggaagatggaatgttagaaaacttgaggactg

SEQ ID NO: 211417 - DNA, 120 bp, Artificial Sequence
  ENSG00000115750_23 (sequence is synthesized)
gcaaagcatcacaatcagggacataaagttcaagtggatccagaaagaaggaggctgcttcagaaagatctatatgtgtgggctcagcgtcttcaaagaaaagttgtagcagaaaaatgt

SEQ ID NO: 211418 - DNA, 120 bp, Artificial Sequence
  ENSG00000115750_24 (sequence is synthesized)
cctcatcactaactgtgagagcctattgatagggctcagaagttgagtgagtttgccaaagttacccaagtaccaggacttgaatagatatcaggaagttacaaacactgatcttattcc

SEQ ID NO: 211419 - DNA, 120 bp, Artificial Sequence
  ENSG00000115750_25 (sequence is synthesized)
ccacgatcgccggggccggaggagagagaagctgaggaggagcggcggaggacgccgcgggttggggcggcgacgccaccggctggaggaaggcggggcggagggctgcagggcgggcta

SEQ ID NO: 211420 - DNA, 120 bp, Artificial Sequence
  ENSG00000115750_26 (sequence is synthesized)
tgggaagaagcaagggccaagtatgttctccttcctggtttagatgcacctgccttacttctgtgtctgttactttacatttgaaagctgaagcttcatcagtatacacttatctacatt

SEQ ID NO: 211421 - DNA, 120 bp, Artificial Sequence
  ENSG00000115750_27 (sequence is synthesized)
gtgacttttttttctggaaatattagccctacactctaattaacttttctcttttttacattactattaatcaaagtttagatttgatgtggatttcaccagtgtttttattaatgtcct

SEQ ID NO: 211422 - DNA, 120 bp, Artificial Sequence
  ENSG00000115750_28 (sequence is synthesized)
ctttctgttccatgatccaatgcaggataccacagtatactttttataatttaactttttataatttgcatgagacttgcctatatttctaatactcctccctcttcccctttctcaaat

SEQ ID NO: 211423 - DNA, 120 bp, Artificial Sequence
  ENSG00000115750_29 (sequence is synthesized)
ttagtcatttctcatctatgcttcccaatattaaaaagattacaaatgttaccttgcaacatatgtaattggaatgttcccccaaaataaagatccctgtgaaaattaaaacaaaggaaa

SEQ ID NO: 211424 - DNA, 120 bp, Artificial Sequence
  ENSG00000115756_0 (sequence is synthesized)
aggcgggccgcggcggcggcgggcagcggacgggcggactgacgggcgcctccaccttgctccctccctggctgccggcttccttttgtctttctgggcggcgatgagcgcagggccggc

SEQ ID NO: 211425 - DNA, 120 bp, Artificial Sequence
  ENSG00000115756_1 (sequence is synthesized)
tttgtctttctgggcggcgatgagcgcagggccggcgcagcagctgcgggcgcacggaggcccgcgctgctagtcactcctcccggcctcggcgcgcttgtcccgggcagcggcccgggc

SEQ ID NO: 211426 - DNA, 120 bp, Artificial Sequence
  ENSG00000115756_2 (sequence is synthesized)
ggaagccggcggaccgcgtcctgcgccggagcaggggcatggtctagtggcccagtcaggacgcggaaacactccctggaggttctgacccactccctctcagcctccgcctggtctctg

SEQ ID NO: 211427 - DNA, 120 bp, Artificial Sequence
  ENSG00000115756_3 (sequence is synthesized)
gtgtagtcgccgccgccagccgccatgggcaaacagaacagcaagctgcggcccgaggtgctgcaggacctgcgggagaacacggagttcaccgaccacgagctgcaggagtggtacaag

SEQ ID NO: 211428 - DNA, 120 bp, Artificial Sequence
  ENSG00000115756_4 (sequence is synthesized)
ggcttcctcaaggactgccccaccggccacctgaccgtggacgagttcaagaagatctacgccaacttcttcccctacggcgacgcttccaagttcgccgagcacgtcttccgcaccttc

SEQ ID NO: 211429 - DNA, 120 bp, Artificial Sequence
  ENSG00000115756_5 (sequence is synthesized)
gacaccaacggcgacggcaccatcgacttccgggagttcatcattgcgctgagcgtgacctcgcggggcaagctggagcagaagctcaagtgggccttcagcatgtacgacctggacggc

SEQ ID NO: 211430 - DNA, 120 bp, Artificial Sequence
  ENSG00000115756_6 (sequence is synthesized)
aacggctacatcagccgcagcgagatgctggagatcgtgcaggccatctacaagatggtgtcgtctgtgatgaagatgccggaggatgagtccaccccggagaagcgcacagacaagatc

SEQ ID NO: 211431 - DNA, 120 bp, Artificial Sequence
  ENSG00000115756_7 (sequence is synthesized)
gacccctccatcgtccgcctgctgcagtgcgaccccagcagtgccagtcagttctgagcgagcggcccctggacagttgcagagaaacacaggcttgtcgtgccgtttaagctttgcttg

SEQ ID NO: 211432 - DNA, 120 bp, Artificial Sequence
  ENSG00000115756_8 (sequence is synthesized)
caagagtggatgccccgcaatcgttcctgctctcccgggccccgggcctggggcatgcgttgcacctgcccagcccggtggctgcgcctccctcctccacctgaccaacgcgacattcct

SEQ ID NO: 211433 - DNA, 120 bp, Artificial Sequence
  ENSG00000115756_9 (sequence is synthesized)
cccctcacgcctggcccggtcccttccagggcaactcccagggatgtggtgacatgcagggttcaagtgttcttggttccaggcacctcccggctcacggggagctcagaggtccatgcc

SEQ ID NO: 211434 - DNA, 120 bp, Artificial Sequence
  ENSG00000115756_10 (sequence is synthesized)
gaggagaccaggcaggacctcccgaggctgcgccccggccggcccatgcgttttgtgatcccaagtgactctgtgggaagggtggggacgaggcgtcgggagggtatacagggagcccct

SEQ ID NO: 211435 - DNA, 120 bp, Artificial Sequence
  ENSG00000115756_11 (sequence is synthesized)
cccgtgcatggctgcccccccgttcattttctccaccacagccgcttgcacgtatagatactgtggtcccctttcttttaatatataaattatgtatggtgaagtggagtgtattgtgta

SEQ ID NO: 211436 - DNA, 120 bp, Artificial Sequence
  ENSG00000115756_12 (sequence is synthesized)
ggtcccgtatttaatgcctctgactgcctttgaagcgcagccctctgtggcccgcagccccctgagcctggctgttgtgtggtatttatgctctctttgtctgcctgtttctaaggaaat

SEQ ID NO: 211437 - DNA, 120 bp, Artificial Sequence
  ENSG00000115756_13 (sequence is synthesized)
gcatgtgtgccctgagccgtgatgatcctcccatccgtgttgtgagcacaggcatttgtgtctggtctgtcctccctgttgattggtctggcatttccggtattaaaatgataaaataaa

SEQ ID NO: 211438 - DNA, 120 bp, Artificial Sequence
  ENSG00000115756_14 (sequence is synthesized)
agcttctgccaagggtgggggcccacgcggaggcgatccgctcgttcctcccagggccatggggcgacgaggagagccctggcctccccgcgacccgcactgcgacctgggccagacgcg

SEQ ID NO: 211439 - DNA, 120 bp, Artificial Sequence
  ENSG00000115756_15 (sequence is synthesized)
ccaccttccccggtcgcggtttgcttctctttaaaatgaggacagctcctcccttgggggctgtggtgacaggtgaaatgagaacgcactgaagacagctcttggtccaaagccccgcac

SEQ ID NO: 211440 - DNA, 120 bp, Artificial Sequence
  ENSG00000115756_16 (sequence is synthesized)
acagggcatggtctagtggcccagtcaggacgcggaaacactccctggaggttctgacccactccctctcagcctccgcctggtctctgggttggctgttccagctccaaagagaaggag

SEQ ID NO: 211441 - DNA, 120 bp, Artificial Sequence
  ENSG00000115756_17 (sequence is synthesized)
gaaccttttccttctgcagcccctccccaccagcctcattccttagctggggtcagacctggggtcctcactgcagctggcctctggcagcgttctcaggctagccctccctgctgaaaa

SEQ ID NO: 211442 - DNA, 120 bp, Artificial Sequence
  ENSG00000115756_18 (sequence is synthesized)
actgatgtgtgtgtttactgagctttctccgcagcctgctccggcagctccaaaatggcatttcaggaattgaattaccgacatttcagtacttgcggaatccaggaatagattatttga

SEQ ID NO: 211443 - DNA, 120 bp, Artificial Sequence
  ENSG00000115756_19 (sequence is synthesized)
ttgtatctgttggaagtcattgccgtaactggcttcgttttcttcaccaacatctaaaccgagtggggagggaccgcaggagaatgctgtggtgacttgattttcccaaaagcacatctc

SEQ ID NO: 211444 - DNA, 120 bp, Artificial Sequence
  ENSG00000115756_20 (sequence is synthesized)
ccaagctggcggcagccgatggcgttgccctgtgactgggggaagcctgaggactcacggtcgcctcaggctggccaccttcgcactggaacctgcccatcacatcaaggagccctctca

SEQ ID NO: 211445 - DNA, 120 bp, Artificial Sequence
  ENSG00000115756_21 (sequence is synthesized)
ggctgaaaaccctgtgccggggtggctgcagcaacacaaggattcccctccagctctgtgatgtggggagcagagggccactgagtcctgccatgggcatggtctagtggcccagtcagg

SEQ ID NO: 211446 - DNA, 120 bp, Artificial Sequence
  ENSG00000115756_22 (sequence is synthesized)
gcccacgtgtagtcgccgccgccagccgccatgggcaaacagaacagcaagctgcggcccgaggtgctgcaggacctgcgggagaacacggagttcaccgaccacgagctgcaggagtgg

SEQ ID NO: 211447 - DNA, 120 bp, Artificial Sequence
  ENSG00000115756_23 (sequence is synthesized)
agggaaggggacggagttctctggagtcaggtctggggccaggagacctggcccagcagaagtcctctctgtcttctccaggcgcagcccttcagccatgcaatcctgcgtgtcctcgtt

SEQ ID NO: 211448 - DNA, 120 bp, Artificial Sequence
  ENSG00000115756_24 (sequence is synthesized)
gcagatggacaccaacaatgacggtagtgcggggtgggggcggggctgcatgtgtacgccacggtaggggcaaaaccatgtggtttggggcaccccctcccctctgcagcttcttggtct

SEQ ID NO: 211449 - DNA, 120 bp, Artificial Sequence
  ENSG00000115756_25 (sequence is synthesized)
cctgagggccacccccgcccgccacctgcctggcgcctgccatgcccagggaagagcgggatgcagtcagggacacccgtgctgtatcctggctcctctgtgcagctttgtgatgctggg

SEQ ID NO: 211450 - DNA, 120 bp, Artificial Sequence
  ENSG00000115756_26 (sequence is synthesized)
catgttgtggcctctctgagccactgtctccccacttatagaatcgggcatacccatattcccgtgggtacaatgtttaggggcagggaggcaagcatgctggtggccctgaacctggag

SEQ ID NO: 211451 - DNA, 120 bp, Artificial Sequence
  ENSG00000115756_27 (sequence is synthesized)
gggttgagatcaaaggatcccagatgttggggtcctggggtgctggccatgcctctcttgctgccatcctgagagaagaagctgcccagatggccccagtgtccaaggggaactgtcagg

SEQ ID NO: 211452 - DNA, 120 bp, Artificial Sequence
  ENSG00000115756_28 (sequence is synthesized)
atgtacgctgccaccttgtccacctacagcagctctgtggagactcagccccactgcagaagtgcaagtctcacgatggtgggtggcagcagtggtgacagggctgtgcctcgagtgccc

SEQ ID NO: 211453 - DNA, 120 bp, Artificial Sequence
  ENSG00000115756_29 (sequence is synthesized)
tcctctgcattggctgtgaggtgagggcggctgtgcggccctcccattctgctcttcttgccggctttgtcaagagcagccacagcaccaggtttgctttgcttttgagcaataaagaaa

SEQ ID NO: 211454 - DNA, 61 bp, Artificial Sequence
  ENSG00000115756_30 (sequence is synthesized)
cacagcaccaggtttgctttgcttttgagcaataaagaaacacgaccttaagaagagaaaa

SEQ ID NO: 211455 - DNA, 86 bp, Artificial Sequence
  ENSG00000115756_31 (sequence is synthesized)
taaagaggaaatactccctgggttgtgctggggattaaacgataagctaatgcccaagaagctgctctgcgaagtctggagtgcag

SEQ ID NO: 211456 - DNA, 120 bp, Artificial Sequence
  ENSG00000115756_32 (sequence is synthesized)
ctaatgcccaagaagctgctctgcgaagtctggagtgcagccctcgggtgagttaagcatggccccagcgggagacgggatgtgggggagctgtaagcagcaaagagcattccaggcagc

SEQ ID NO: 211457 - DNA, 120 bp, Artificial Sequence
  ENSG00000115756_33 (sequence is synthesized)
caggtcacagtttcaaaacacacacacacagaaaacaaggctgcctggtgcctggcgttgcctttgggctgatgggaaatgtgtgttccaccctccagcctagcagggcacctgctgccg

SEQ ID NO: 211458 - DNA, 120 bp, Artificial Sequence
  ENSG00000115756_34 (sequence is synthesized)
cactccacaaataatggctgttgttcccaacttcacagtgtccctggggaagccacccatggtcactcgctgcccgaatctgcctcctggcttggccctgcccacctcttcagagggcat

SEQ ID NO: 211459 - DNA, 120 bp, Artificial Sequence
  ENSG00000115756_35 (sequence is synthesized)
cttctaggttggttgggaatttggatggcatggtcgttgctaatgtgcctgctgggatggagcacttcctcctgtgagcccaggggacccgcctgtccctggagcttggggcaaggaggg

SEQ ID NO: 211460 - DNA, 120 bp, Artificial Sequence
  ENSG00000115756_36 (sequence is synthesized)
aagagtgataccaggaaggtggggctgcagccaggggccagagtcagttcagggagtggtcctcggccctcaaagctcctccggggactgctcaggagtgatggtgccctggagtttgcc

SEQ ID NO: 211461 - DNA, 120 bp, Artificial Sequence
  ENSG00000115756_37 (sequence is synthesized)
ccaacttccctggccaccctggaaggtgcctggctgctccaggcctctaggctgggctgatgggtttctccaggacacaagtatcattaaagccaccctctcctcagcttgtcaggccgc

SEQ ID NO: 211462 - DNA, 120 bp, Artificial Sequence
  ENSG00000115756_38 (sequence is synthesized)
acatgtgggacaggctgtgctcagcaaccccctcgcctgccctgccctccatcaggaggagccagtggaaccttcggaagctcccagcatctcagcagccctcagagtcgtcctggggca

SEQ ID NO: 211463 - DNA, 120 bp, Artificial Sequence
  ENSG00000115756_39 (sequence is synthesized)
gctctggttctcctgactggaggtccatctgggctggcctgctctctctcggcctgagacaggagggcctggggtcaggaactggaagtggggaggctggggccgtggactctgaggccc

SEQ ID NO: 211464 - DNA, 120 bp, Artificial Sequence
  ENSG00000115756_40 (sequence is synthesized)
cacacctagccaaggagatgaccacacagctggctgccctgagtggtcagaggtggagggtggggagccactctctccattggcagaggttcctggggactgtctgctgagggcctggct

SEQ ID NO: 211465 - DNA, 120 bp, Artificial Sequence
  ENSG00000115756_41 (sequence is synthesized)
gtccctccctctccctacccaccccttagcccgggcattgtttgggctctcttggggccagcaggctgcccaggccccagaggcatcaagttcgtgccctggaagaagccagcctgccca

SEQ ID NO: 211466 - DNA, 120 bp, Artificial Sequence
  ENSG00000115756_42 (sequence is synthesized)
agcctgggccagagtcccatgaggacaggtgtccctgcctgccagtgggctggaggggctgaattcccagcagggccctactgtgcaggggcatcctccgtcctggtgctggtctgagtc

SEQ ID NO: 211467 - DNA, 120 bp, Artificial Sequence
  ENSG00000115756_43 (sequence is synthesized)
ctcaaatgcatcctcccaggtgcctttgagatgggtgttcccattatcccaccttcgagacgaagatcctgagacctggaaacgttggtggcttgccatgcgccagagccgagagcccct

SEQ ID NO: 211468 - DNA, 120 bp, Artificial Sequence
  ENSG00000115756_44 (sequence is synthesized)
cctgcatgccttcccctgtgctgggcctggctgcatgcgtctgtgttgcctgcacagacattttgcagggtgccctagtgattccagctgacagcacagagcctcaaacagacacatgga

SEQ ID NO: 211469 - DNA, 120 bp, Artificial Sequence
  ENSG00000115756_45 (sequence is synthesized)
ggggctgccccaggaccaggccgccaggacgcagccaacctcaaacctcatccttccccaccagctggagccagagggaccgcctcctgcccttgaggccatgtctgaacgggcagaatc

SEQ ID NO: 211470 - DNA, 120 bp, Artificial Sequence
  ENSG00000115756_46 (sequence is synthesized)
cttacagcctatcctgcttgtggactagcagagccagggctatagtgaccacagtgttttcctctcaccgcatggggccaaaacagtacagagcatgagtttggtaccccaagcctgagc

SEQ ID NO: 211471 - DNA, 120 bp, Artificial Sequence
  ENSG00000115756_47 (sequence is synthesized)
agcgggtctacgctgatgccagggaggatccggaccgtgcttccgggggcccccaaccagcatggccttctcagcctggattctgtatgggttagaggcaaatgcttcatttttctgcac

SEQ ID NO: 211472 - DNA, 120 bp, Artificial Sequence
  ENSG00000115756_48 (sequence is synthesized)
agtgtacacgttccttaataagcgaagtgtggggtgatttctaaaaggatttaaatggccctcatcagccacgtcctgctgagcttgctgggcaaactgtccttggaagaattcatcaga

SEQ ID NO: 211473 - DNA, 80 bp, Artificial Sequence
  ENSG00000115758_0 (sequence is synthesized)
gtcagtccctcctgtagccgccgccgccgccgcccgccgcccctctgccagcagctccggcgccacctcgggccggcgtc

SEQ ID NO: 211474 - DNA, 120 bp, Artificial Sequence
  ENSG00000115758_1 (sequence is synthesized)
gcggccgagcgctcctgcggctgcgactcaggctccggcgtctgcgcttccccatggggctggcctgcggcgcctgggcgctctgagattgtcactgctgttccaagggcacacgcagag

SEQ ID NO: 211475 - DNA, 120 bp, Artificial Sequence
  ENSG00000115758_2 (sequence is synthesized)
ggatttggaattcctggagagttgcctttgtgagaagctggaaatatttctttcaattccatctcttagttttccataggaacatcaagaaatcatgaacaactttggtaatgaagagtt

SEQ ID NO: 211476 - DNA, 120 bp, Artificial Sequence
  ENSG00000115758_3 (sequence is synthesized)
tgactgccacttcctcgatgaaggttttactgccaaggacattctggaccagaaaattaatgaagtttcttcttctgatgataaggatgccttctatgtggcagacctgggagacattct

SEQ ID NO: 211477 - DNA, 120 bp, Artificial Sequence
  ENSG00000115758_4 (sequence is synthesized)
aaagaaacatctgaggtggttaaaagctctccctcgtgtcacccccttttatgcagtcaaatgtaatgatagcaaagccatcgtgaagacccttgctgctaccgggacaggatttgactg

SEQ ID NO: 211478 - DNA, 120 bp, Artificial Sequence
  ENSG00000115758_5 (sequence is synthesized)
tgctagcaagactgaaatacagttggtgcagagtctgggggtgcctccagagaggattatctatgcaaatccttgtaaacaagtatctcaaattaagtatgctgctaataatggagtcca

SEQ ID NO: 211479 - DNA, 120 bp, Artificial Sequence
  ENSG00000115758_6 (sequence is synthesized)
gatgatgacttttgatagtgaagttgagttgatgaaagttgccagagcacatcccaaagcaaagttggttttgcggattgccactgatgattccaaagcagtctgtcgtctcagtgtgaa

SEQ ID NO: 211480 - DNA, 120 bp, Artificial Sequence
  ENSG00000115758_7 (sequence is synthesized)
attcggtgccacgctcagaaccagcaggctccttttggaacgggcgaaagagctaaatatcgatgttgttggtgtcagcttccatgtaggaagcggctgtaccgatcctgagaccttcgt

SEQ ID NO: 211481 - DNA, 120 bp, Artificial Sequence
  ENSG00000115758_8 (sequence is synthesized)
gcaggcaatctctgatgcccgctgtgtttttgacatgggggctgaggttggtttcagcatgtatctgcttgatattggcggtggctttcctggatctgaggatgtgaaacttaaatttga

SEQ ID NO: 211482 - DNA, 120 bp, Artificial Sequence
  ENSG00000115758_9 (sequence is synthesized)
agagatcaccggcgtaatcaacccagcgttggacaaatactttccgtcagactctggagtgagaatcatagctgagcccggcagatactatgttgcatcagctttcacgcttgcagttaa

SEQ ID NO: 211483 - DNA, 120 bp, Artificial Sequence
  ENSG00000115758_10 (sequence is synthesized)
atgtattatgtgaatgatggcgtctatggatcatttaattgcatactctatgaccacgcacatgtaaagccccttctgcaaaagagacctaaaccagatgagaagtattattcatccagc

SEQ ID NO: 211484 - DNA, 120 bp, Artificial Sequence
  ENSG00000115758_11 (sequence is synthesized)
atatggggaccaacatgtgatggcctcgatcggattgttgagcgctgtgacctgcctgaaatgcatgtgggtgattggatgctctttgaaaacatgggcgcttacactgttgctgctgcc

SEQ ID NO: 211485 - DNA, 120 bp, Artificial Sequence
  ENSG00000115758_12 (sequence is synthesized)
tctacgttcaatggcttccagaggccgacgatctactatgtgatgtcagggcctgcgtggcaactcatgcagcaattccagaaccccgacttcccacccgaagtagaggaacaggatgcc

SEQ ID NO: 211486 - DNA, 120 bp, Artificial Sequence
  ENSG00000115758_13 (sequence is synthesized)
agcaccctgcctgtgtcttgtgcctgggagagtgggatgaaacgccacagagcagcctgtgcttcggctagtattaatgtgtagatagcactctggtagctgttaactgcaagtttagct

SEQ ID NO: 211487 - DNA, 120 bp, Artificial Sequence
  ENSG00000115758_14 (sequence is synthesized)
tgaattaagggatttggggggaccatgtaacttaattactgctagttttgaaatgtctttgtaagagtagggtcgccatgatgcagccatatggaagactaggatatgggtcacacttat

SEQ ID NO: 211488 - DNA, 120 bp, Artificial Sequence
  ENSG00000115758_15 (sequence is synthesized)
ctgtgttcctatggaaactatttgaatatttgttttatatggatttttattcactcttcagacacgctactcaagagtgcccctcagctgctgaacaagcatttgtagcttgtacaatgg

SEQ ID NO: 211489 - DNA, 120 bp, Artificial Sequence
  ENSG00000115758_16 (sequence is synthesized)
cagaatgggccaaaagcttagtgttgtgacctgtttttaaaataaagtatcttgaaataattaggcattgggacgtttttatggtgtgttcattccagacagttcacgaatcccgtatag

SEQ ID NO: 211490 - DNA, 120 bp, Artificial Sequence
  ENSG00000115758_17 (sequence is synthesized)
ctcgctctgattctcagagaacaatgagtgggtccacccacacacaggtaggaggacaggtgagacggaagccccatcctcccatgtggacggtgcacatctgctcagcccaccccacat

SEQ ID NO: 211491 - DNA, 120 bp, Artificial Sequence
  ENSG00000115758_18 (sequence is synthesized)
gtccagagttggctgcaaactccttgtccagagcctctggtggtgggacctacttaagtctgacggacctgtcctgtccaggccagtgcccagggaaggtgtgggaggccctttgagcct

SEQ ID NO: 211492 - DNA, 120 bp, Artificial Sequence
  ENSG00000115758_19 (sequence is synthesized)
ggcctgcagagaccatccgtgtcccctcccaccttcatgcctgtgagaagttaggaatgtatacggtaccacatttggcagtcagcttattttaataaattcagcaacagcaagtcccta

SEQ ID NO: 211493 - DNA, 120 bp, Artificial Sequence
  ENSG00000115758_20 (sequence is synthesized)
cctggcggccgcgcagcaggtgcaggggcgcagagcccgggctcgccttggtacagacgagcgggccccggccttggcgccttcagtttccttccagtttttattttcgctgtgtctaca

SEQ ID NO: 211494 - DNA, 120 bp, Artificial Sequence
  ENSG00000115758_21 (sequence is synthesized)
gagcagatgacaccaatttggaaacccgcgagagtgggtagagctaagatagtcttgctgtagtagctgtgatattagatgctcggccatgacttagaggtgtttatttaaggactgtga

SEQ ID NO: 211495 - DNA, 120 bp, Artificial Sequence
  ENSG00000115760_0 (sequence is synthesized)
tccctgcttctccccctctcccgtcagcctccctccgagtttggcccctccggccgggcgatcgacgttccgcgtgcgtgcgggcgcctgacttcacttccggctaacgcgctcggcttg

SEQ ID NO: 211496 - DNA, 120 bp, Artificial Sequence
  ENSG00000115760_1 (sequence is synthesized)
ccccctggccccggatggtgactggtggtggtgctgcacctcccgggactgtcactgagccgcttcccagtgtgattgtgctgagcgcaggccggaagatggcggctgcggctgcggcgg

SEQ ID NO: 211497 - DNA, 120 bp, Artificial Sequence
  ENSG00000115760_2 (sequence is synthesized)
cctcgggccccggctgctcctcggcggcgggggcgggggcggccggggtctcagagtggctggtgctgcgggacggctgcatgcactgcgacgccgacgggctgcacagcctgtcctacc

SEQ ID NO: 211498 - DNA, 120 bp, Artificial Sequence
  ENSG00000115760_3 (sequence is synthesized)
accctgcgctcaacgccatcctggccgtcactagccgcgggaccatcaaagtcatcgacggcacctcgggggccacactgcaggcctccgcgctcagtgctaaaccaggtggacaggtga

SEQ ID NO: 211499 - DNA, 120 bp, Artificial Sequence
  ENSG00000115760_4 (sequence is synthesized)
aatgtcagtatatctctgctgtggataaagttatatttgtggatgattatgcagtagggtgtaggaaggaccttaatggaatcttgttgttagacactgctctgcaaactccagtttcaa

SEQ ID NO: 211500 - DNA, 120 bp, Artificial Sequence
  ENSG00000115760_5 (sequence is synthesized)
agcaggatgatgtggttcagcttgaattacccgttacagaggcacagcagctcttatcagcatgtttagaaaaggtagatatttctagtacagagggttatgatttgttcatcacacagc

SEQ ID NO: 211501 - DNA, 120 bp, Artificial Sequence
  ENSG00000115760_6 (sequence is synthesized)
tcaaagatggtttaaaaaatacatctcatgagactgcagcaaaccacaaagttgctaagtgggccacagttacatttcatcttcctcatcatgtgttgaagtccattgccagtgccattg

SEQ ID NO: 211502 - DNA, 120 bp, Artificial Sequence
  ENSG00000115760_7 (sequence is synthesized)
taaatgaactcaagaaaataaatcaaaatgttgctgccttacctgtggcgtcctcagtgatggacagattgtcttacctcttacctagtgcacgtccagaactcggagtggggccaggcc

SEQ ID NO: 211503 - DNA, 120 bp, Artificial Sequence
  ENSG00000115760_8 (sequence is synthesized)
gttctgtagacagatcactgatgtatagtgaagctaacagacgggagacatttacctcatggcctcatgtaggctataggtgggcacaaccagatcccatggctcaagctggattttatc

SEQ ID NO: 211504 - DNA, 120 bp, Artificial Sequence
  ENSG00000115760_9 (sequence is synthesized)
atcagcctgcctcatctggagatgatagagccatgtgttttacttgtagtgtatgcctcgtttgttgggaacctactgatgaaccttggtctgaacacgaaagacattccccaaactgcc

SEQ ID NO: 211505 - DNA, 120 bp, Artificial Sequence
  ENSG00000115760_10 (sequence is synthesized)
catttgtgaaaggtgagcacacacagaatgtgccattgtcagtcactcttgcaacaagtcctgcacagtttccttgtacggatggaactgacagaatatcttgctttgggtcggggagct

SEQ ID NO: 211506 - DNA, 120 bp, Artificial Sequence
  ENSG00000115760_11 (sequence is synthesized)
gccctcattttctagctgctgcaactaaacgaggaaagatctgcatatgggatgtttccaaacttatgaaggtgcacttaaagtttgaaattaatgcctatgatccagcaattgtacaac

SEQ ID NO: 211507 - DNA, 120 bp, Artificial Sequence
  ENSG00000115760_12 (sequence is synthesized)
agcttattctatcaggagacccaagctcaggagttgattcaaggagaccaactttggcgtggctggaggactcctctagttgctcagatataccaaaattggaaggagatagtgatgatt

SEQ ID NO: 211508 - DNA, 120 bp, Artificial Sequence
  ENSG00000115760_13 (sequence is synthesized)
tactggaggattcagacagtgaagagcattccagatcagattctgtgacagggcatacatcacagaaggaagccatggaagtaagccttgatataacagcactcagcattctccaacagc

SEQ ID NO: 211509 - DNA, 120 bp, Artificial Sequence
  ENSG00000115760_14 (sequence is synthesized)
cagaaaaacttcagtgggagattgttgcaaatgtgcttgaagatactgttaaggatcttgaagaacttggggcaaatccttgtttaacaaactctaagagtgaaaagacaaaggaaaagc

SEQ ID NO: 211510 - DNA, 120 bp, Artificial Sequence
  ENSG00000115760_15 (sequence is synthesized)
accaggagcaacacaacattccttttccatgtttattagctggaggtttattaacatataaatctcctgctacctcacccattagtagtaattctcacaggtcactggatggtttaagca

SEQ ID NO: 211511 - DNA, 120 bp, Artificial Sequence
  ENSG00000115760_16 (sequence is synthesized)
gaactcagggtgaaagtatatcagaacaagggtcaactgacaatgaatcctgcactaattcagaactaaattctcctctggtaaggaggactttaccggttttgcttctttatagcatca

SEQ ID NO: 211512 - DNA, 120 bp, Artificial Sequence
  ENSG00000115760_17 (sequence is synthesized)
aggaatctgatgagaaagcaggaaagatcttttcacagatgaacaatattatgagtaaaagtttgcatgatgatggttttactgttccacagattattgaaatggagctggatagtcagg

SEQ ID NO: 211513 - DNA, 120 bp, Artificial Sequence
  ENSG00000115760_18 (sequence is synthesized)
agcagttgttattgcaggatcctcctgtgacttacattcagcaatttgcagatgcagcagccaaccttacctctccggattctgagaagtggaactctgtgtttcccaagcctgggactt

SEQ ID NO: 211514 - DNA, 120 bp, Artificial Sequence
  ENSG00000115760_19 (sequence is synthesized)
tggttcagtgcttgaggctgccaaagtttgcagaggaggagaatctttgtatagactcaataactccttgtgctgacggaattcatttgttggtaggactgcggacatgccctgttgaat

SEQ ID NO: 211515 - DNA, 120 bp, Artificial Sequence
  ENSG00000115760_20 (sequence is synthesized)
ccttgagtgcaataaatcaagtagaggccttgaataatttaaataaattaaactctgcactatgtaatagacggaaaggtgagctggaatcaaatcttgctgtagtgaatggtgcaaata

SEQ ID NO: 211516 - DNA, 120 bp, Artificial Sequence
  ENSG00000115760_21 (sequence is synthesized)
ttagtgtaatccaacatgaatcaccagcagatgtacagactcctttaataattcagcctgagcagaggaatgttagtggtggatatttagtgctttataaaatgaattatgccactcgga

SEQ ID NO: 211517 - DNA, 120 bp, Artificial Sequence
  ENSG00000115760_22 (sequence is synthesized)
tagtgactttagaagaggagccaataaaaatacaacatatcaaagatccccaggacacaattacctcgctcattttgcttccacccgatatattggataatcgagaggatgactgtgagg

SEQ ID NO: 211518 - DNA, 120 bp, Artificial Sequence
  ENSG00000115760_23 (sequence is synthesized)
aacctattgaggacatgcagttaacctcaaagaatggttttgagagagaaaaaacgtctgacatttctactcttggacacctggtaataaccactcagggaggatatgtaaaaatactag

SEQ ID NO: 211519 - DNA, 120 bp, Artificial Sequence
  ENSG00000115760_24 (sequence is synthesized)
atctttcaaactttgaaattttggccaaagtggagcctcccaaaaaggagggcactgaggaacaggacacatttgtttctgtgatttactgttctggcacagacaggctgtgtgcatgca

SEQ ID NO: 211520 - DNA, 120 bp, Artificial Sequence
  ENSG00000115760_25 (sequence is synthesized)
ccaaaggtggtgagcttcattttctccaaattggaggaacctgtgatgatattgatgaagctgatatactagtggatggatctctttctaaaggaatagaaccatcttcagaaggttcca

SEQ ID NO: 211521 - DNA, 120 bp, Artificial Sequence
  ENSG00000115760_26 (sequence is synthesized)
aacctttatcaaatccttcaagtcctggcatttcaggagttgatttattggtggaccagccattcacccttgaaatcttgacatccctagtggagctaacccgctttgagactttgactc

SEQ ID NO: 211522 - DNA, 120 bp, Artificial Sequence
  ENSG00000115760_27 (sequence is synthesized)
caaggttttcagcgactgttcctccatgctgggtagaagttcaacaagaacagcagcaaaggaggcatcctcaacatttgcatcagcaacaccatggtgatgctgctcagcatactcgaa

SEQ ID NO: 211523 - DNA, 120 bp, Artificial Sequence
  ENSG00000115760_28 (sequence is synthesized)
cttggaaactacagaccgacagcaacagctgggatgaacatgtatttgaattagtactacctaaagcttgtatggttggacatgtggacttcaaattcgttttgaactcaaacatcacca

SEQ ID NO: 211524 - DNA, 120 bp, Artificial Sequence
  ENSG00000115760_29 (sequence is synthesized)
atattccacagatacaagtgacactgctgaaaaataaagctccaggattagggaaagtcaatgctcttaacattgaagtggaacaaaatgggaaaccgtccctggttgatttgaatgaag

SEQ ID NO: 211525 - DNA, 120 bp, Artificial Sequence
  ENSG00000115760_30 (sequence is synthesized)
aaatgcagcacatggatgtagaggaatcacagtgtcttagattatgtccatttttggaggatcataaagaagacattctatgtgggccagtatggcttgctagtggccttgatctatcag

SEQ ID NO: 211526 - DNA, 120 bp, Artificial Sequence
  ENSG00000115760_31 (sequence is synthesized)
ggcatgctggaatgttgacgttaacaagccccaaacttgttaaaggtatggcaggaggaaaatatcgttcgtttttaatccatgtcaaggcagtgaatgaaagaggaacagaagagattt

SEQ ID NO: 211527 - DNA, 120 bp, Artificial Sequence
  ENSG00000115760_32 (sequence is synthesized)
gtaatggtggtatgcgtcctgtagtaaggcttccatccctaaaacaccagagtaacaagggttattcacttgcttcacttttggctaaagttgcagcaggcaaggaaaaatcatctaatg

SEQ ID NO: 211528 - DNA, 120 bp, Artificial Sequence
  ENSG00000115760_33 (sequence is synthesized)
ttaagaatgaaaatacaagtggcacccgtaaatctgaaaacctccggggctgtgatttacttcaagaggtctcagtcaccattcgaagatttaagaaaacctcaatttctaaggaaagag

SEQ ID NO: 211529 - DNA, 120 bp, Artificial Sequence
  ENSG00000115760_34 (sequence is synthesized)
tgcaacgatgtgccatgttacagttttcagaatttcatgagaagcttcttaatactctttgcagaaaaacagatgatggccagatcacagaacatgcccagagccttgtgttggatactc

SEQ ID NO: 211530 - DNA, 120 bp, Artificial Sequence
  ENSG00000115760_35 (sequence is synthesized)
tctgttggttagctggagttcattcaaatggacccggaagctcaaaggaaggaaatgagaacctactttcaaaaacacgaaaatttctgtcagacatcgtacgtgtttgcttctttgagg

SEQ ID NO: 211531 - DNA, 120 bp, Artificial Sequence
  ENSG00000115760_36 (sequence is synthesized)
caggacgaagtatagcccataagtgtgcccgatttctagccttgtgcattagtaatggcaaatgtgacccatgtcaaccagcatttggacctgttctgttgaaggctttacttgataata

SEQ ID NO: 211532 - DNA, 120 bp, Artificial Sequence
  ENSG00000115760_37 (sequence is synthesized)
tgtcatttttacctgcagcaacaactggtggttctgtctattggtattttgtcttactgaattatgtgaaagatgaagatctggctggatgcagtacagcttgtgcatctttgcttactg

SEQ ID NO: 211533 - DNA, 120 bp, Artificial Sequence
  ENSG00000115760_38 (sequence is synthesized)
cagtgtccagacagttacaggacaggctaacaccaatggaggctttacttcagacaagatatggattatatagctcaccatttgatccagtcctctttgatttggagatgagtggctctt

SEQ ID NO: 211534 - DNA, 120 bp, Artificial Sequence
  ENSG00000115760_39 (sequence is synthesized)
cttgtaaaaatgtttataacagcagcattggtgtccagtcagatgaaattgatttatcagatgtcctttcaggaaatggaaaggtcagtagttgcacagctgctgagggtagtttcacat

SEQ ID NO: 211535 - DNA, 120 bp, Artificial Sequence
  ENSG00000115760_40 (sequence is synthesized)
ctctcactggacttttggaagttgaacctctgcactttacttgtgtgtcaactagtgatggaaccagaatagaaagggatgatgcaatgagttccttcggggttactcctgcagtaggtg

SEQ ID NO: 211536 - DNA, 120 bp, Artificial Sequence
  ENSG00000115760_41 (sequence is synthesized)
gactatcatctgggacagttggggaagcctcgacagccctgagttcagcagcccaggtagctttgcagtctctctctcatgcaatggcttcagccgagcaacagctacaggtgctgcaag

SEQ ID NO: 211537 - DNA, 120 bp, Artificial Sequence
  ENSG00000115760_42 (sequence is synthesized)
agaaacagcagcagcttttgaagcttcagcaacagaaagcaaagctggaagccaagttacatcagacaacagctgcagcagctgcagcagcatcagcagtaggtcctgttcacaactctg

SEQ ID NO: 211538 - DNA, 120 bp, Artificial Sequence
  ENSG00000115760_43 (sequence is synthesized)
tgccttccaacccagtggctgcccctggattcttcattcatccatctgatgttattccacccactccaaaaacaacacctctttttatgactccaccactcactccacccaatgaagcag

SEQ ID NO: 211539 - DNA, 120 bp, Artificial Sequence
  ENSG00000115760_44 (sequence is synthesized)
tttccgttgtgattaatgccgaacttgcacagcttttcccaggctcagtcattgatcccccagcagtcaatcttgctgcacataacaaaaattccaacaagtccagaatgaatccacttg

SEQ ID NO: 211540 - DNA, 120 bp, Artificial Sequence
  ENSG00000115760_45 (sequence is synthesized)
gttctggtctagcccttgcaatttctcatgcttcacattttcttcaacctccgcctcaccagtccattattatagagcgaatgcattcaggagcaagaagatttgtgaccttggattttg

SEQ ID NO: 211541 - DNA, 120 bp, Artificial Sequence
  ENSG00000115760_46 (sequence is synthesized)
ggaggcctatattgttgactgatgtattgattcccacttgtggagacttggcctctttgtcaattgacatttggacattaggagaagaggtggatggaaggcggttggtagtggcaactg

SEQ ID NO: 211542 - DNA, 120 bp, Artificial Sequence
  ENSG00000115760_47 (sequence is synthesized)
atataagcactcattcactaattcttcatgacttaataccacctcccgtgtgcagattcatgaagatcactgttattggacgttacgggagtacaaatgccagagccaaaatcccattag

SEQ ID NO: 211543 - DNA, 120 bp, Artificial Sequence
  ENSG00000115760_48 (sequence is synthesized)
gattttactatggtcatacctacatcttgccttgggaaagtgaactgaagttaatgcatgatcctctaaagggagagggagaatctgcaaaccagccagaaattgaccagcatttagcaa

SEQ ID NO: 211544 - DNA, 120 bp, Artificial Sequence
  ENSG00000115760_49 (sequence is synthesized)
tgatggttgctttgcaggaggatatacagtgcaggtataacttggcttgtcatcgtctggaaacccttttgcaaagtattgatcttcctcctctaaacagtgctaacaatgcacagtact

SEQ ID NO: 211545 - DNA, 120 bp, Artificial Sequence
  ENSG00000115760_50 (sequence is synthesized)
ttttacgaaaaccagataaggcagttgaggaagacagtagggttttttctgcttatcaagattgtattcagctacagcttcaactaaatttggctcataatgcagtgcagaggctcaaag

SEQ ID NO: 211546 - DNA, 120 bp, Artificial Sequence
  ENSG00000115760_51 (sequence is synthesized)
tggcgctaggtgcaagccggaagatgttgagtgaaacatcaaatccagaagatttaattcagacatcttccacagagcagttacgtactatcatcagatatttactggacactttgctca

SEQ ID NO: 211547 - DNA, 120 bp, Artificial Sequence
  ENSG00000115760_52 (sequence is synthesized)
gcctgcttcatgcttctaatggacactctgttcctgcagttttgcagagcacatttcatgcccaggcctgtgaagagctctttaaacacttgtgcatcagtggaaccccaaagatacggt

SEQ ID NO: 211548 - DNA, 120 bp, Artificial Sequence
  ENSG00000115760_53 (sequence is synthesized)
tacatactggtcttcttcttgttcaactgtgtggtggtgaaaggtggtggggtcaatttctttctaatgtccttcaggaattgtacaattcggaacagcttctcatctttccacaggata

SEQ ID NO: 211549 - DNA, 120 bp, Artificial Sequence
  ENSG00000115760_54 (sequence is synthesized)
gggtcttcatgttactttcctgcattggtcaaagatcacttagtaatagtggagtattagaaagcttacttaatctcttggataatttattgtcacctcttcagccacagttacccatgc

SEQ ID NO: 211550 - DNA, 120 bp, Artificial Sequence
  ENSG00000115760_55 (sequence is synthesized)
ataggaggacagaaggagtactagatattcccatgatcagttgggttgttatgctggtgtccaggttgctggattatgtggcaactgttgaagatgaagcagcagctgcaaagaaacctt

SEQ ID NO: 211551 - DNA, 120 bp, Artificial Sequence
  ENSG00000115760_56 (sequence is synthesized)
tgaatggtaatcagtggagttttattaacaataatctacacactcagagcttaaatagatcttctaaaggcagcagtagccttgatagattatattccagaaaaatcagaaagcagcttg

SEQ ID NO: 211552 - DNA, 120 bp, Artificial Sequence
  ENSG00000115760_57 (sequence is synthesized)
ttcatcataaacagcaacttaacctactaaaagcaaagcagaaggcattggtagaacagatggaaaaagaaaaaatacaaagtaacaaaggatcatcatataaactcctggtagaacaag

SEQ ID NO: 211553 - DNA, 120 bp, Artificial Sequence
  ENSG00000115760_58 (sequence is synthesized)
caaaactaaagcaggccacttcaaagcactttaaggatttaattcgtttacgtcggacagcagaatggtcccgttctaatttagacacagaagttacaacagcaaaagaaagtcctgaga

SEQ ID NO: 211554 - DNA, 120 bp, Artificial Sequence
  ENSG00000115760_59 (sequence is synthesized)
tagaaccacttccatttactctggcccatgagcgttgtatctcagtagtccagaaacttgttctgtttcttctctccatggactttacatgtcatgcagatctcttattgtttgtttgta

SEQ ID NO: 211555 - DNA, 120 bp, Artificial Sequence
  ENSG00000115760_60 (sequence is synthesized)
aggttcttgcacgcattgcaaatgccacgaggccaactattcatctgtgtgagattgtgaacgaaccccagctggaaagactgctgttacttttggttggaactgacttcaatagaggag

SEQ ID NO: 211556 - DNA, 120 bp, Artificial Sequence
  ENSG00000115760_61 (sequence is synthesized)
atatatcttggggtggtgcttgggctcagtattccttaacttgcatgctacaagatattttagcaggagaattactggctccagtagccgcagaagccatggaggaaggaacagtgggtg

SEQ ID NO: 211557 - DNA, 120 bp, Artificial Sequence
  ENSG00000115760_62 (sequence is synthesized)
atgatgtaggtgcgacagctggtgactctgatgactcccttcaacagtcctcagttcagttgctggaaactatagatgaacctttgacacatgacataacaggtgcacctcctctgtcct

SEQ ID NO: 211558 - DNA, 120 bp, Artificial Sequence
  ENSG00000115760_63 (sequence is synthesized)
ctttggaaaaagataaagaaattgaccttgagttacttcaggatctaatggaagttgacattgatcctttagatattgatttggaaaaggaccctcttgcagccaaggtttttaagccaa

SEQ ID NO: 211559 - DNA, 120 bp, Artificial Sequence
  ENSG00000115760_64 (sequence is synthesized)
taagcagtacatggtatgattattggggtgctgattatgggacctacaattacaacccttacattggaggtctgggaattcctgtagcaaagccaccagcaaacacggagaagaacggat

SEQ ID NO: 211560 - DNA, 120 bp, Artificial Sequence
  ENSG00000115760_65 (sequence is synthesized)
ggcagattccattttacaggcattaacaaatacatctcctacattatcacagtctcccactggaacagatgattcacttctagggggtttacaagcagcaaaccaaaccagccagcttat

SEQ ID NO: 211561 - DNA, 120 bp, Artificial Sequence
  ENSG00000115760_66 (sequence is synthesized)
tatacagttatcatctgtcccaatgttaaatgtttgtttcaacaaacttttttccatgcttcaagtccatcatgttcagttggagtcacttctccaattgtggctcacactgagcctgaa

SEQ ID NO: 211562 - DNA, 120 bp, Artificial Sequence
  ENSG00000115760_67 (sequence is synthesized)
ttctagttcaactggaaacaaagaaaatggagcagacatatttttatataatgctaataggatacctgttatttcattaaatcaagcatcaataactagctttctcacagtgttagcttg

SEQ ID NO: 211563 - DNA, 120 bp, Artificial Sequence
  ENSG00000115760_68 (sequence is synthesized)
gtatcccaatactttgctccggacatggtgccttgtgcttcatagcctaacactcatgacaaacatgcagcttaattctggttccagcagtgccattggaactcaggagagtactgctca

SEQ ID NO: 211564 - DNA, 120 bp, Artificial Sequence
  ENSG00000115760_69 (sequence is synthesized)
tttgttggtttcagatccaaacctaattcatgtattagtgaaatttctttctggcaccagtccacatggaacaaatcaacacagtccacaggttggtcctacagctacacaagctatgca

SEQ ID NO: 211565 - DNA, 120 bp, Artificial Sequence
  ENSG00000115760_70 (sequence is synthesized)
agaatttcttactcgattacaagtgcatctttcttcaacatgtcctcagatattcagtgaatttttgctcaagctaattcatatactttcaactgaaaggggtgctttccagacaggcca

SEQ ID NO: 211566 - DNA, 120 bp, Artificial Sequence
  ENSG00000115760_71 (sequence is synthesized)
aggacctctcgatgcccaagtgaagctcttagaattcactctggagcagaattttgaagtcgtttcagttagtactatttctgccgtgatagaatcggttacatttttagtgcaccacta

SEQ ID NO: 211567 - DNA, 120 bp, Artificial Sequence
  ENSG00000115760_72 (sequence is synthesized)
tatcacttgctcagacaaagtaatgtcaagaagtggatcagatagctccgtgggtgctcgagcatgctttgggggactctttgccaatcttattcgtccgggtgatgcaaaagcagtttg

SEQ ID NO: 211568 - DNA, 120 bp, Artificial Sequence
  ENSG00000115760_73 (sequence is synthesized)
tggcgaaatgacaagagatcaactcatgtttgatttgttaaaacttgttaacattttagtgcagctgcctctttcaggcaatagggaatacagtgcaagagtgtctgtgaccacaaatac

SEQ ID NO: 211569 - DNA, 120 bp, Artificial Sequence
  ENSG00000115760_74 (sequence is synthesized)
aacagatagtgtttcagatgaagaaaaagtctcaggaggcaaagatggcaatggaagcagtaccagtgttcaaggatcgcctgcatatgttgctgacttagtcttagccaaccaacaaat

SEQ ID NO: 211570 - DNA, 120 bp, Artificial Sequence
  ENSG00000115760_75 (sequence is synthesized)
tatgagccagattttgtctgctctgggcctgtgtaatagcagtgccatggcaatgataattggagcaagtggattacatctcactaaacatgaaaactttcatggtgggttggatgccat

SEQ ID NO: 211571 - DNA, 120 bp, Artificial Sequence
  ENSG00000115760_76 (sequence is synthesized)
atcagttggggatggattatttaccatactgacaacccttagtaaaaaagcttctacagtccacatgatgctgcagccaattttaacatacatggcctgtggatatatgggcagacaagg

SEQ ID NO: 211572 - DNA, 120 bp, Artificial Sequence
  ENSG00000115760_77 (sequence is synthesized)
ctctcttgctacttgccagttatctgagccattattgtggttcattttgagagtattggatactagtgatgccttgaaagcatttcatgatatgggtggtgttcagctcatatgcaataa

SEQ ID NO: 211573 - DNA, 120 bp, Artificial Sequence
  ENSG00000115760_78 (sequence is synthesized)
tatggttactagtacaagggctattgtgaacactgcaagaagtatggtatcaactattatgaaatttcttgactctggtccaaataaagctgttgacagcacattgaaaacaagaatact

SEQ ID NO: 211574 - DNA, 120 bp, Artificial Sequence
  ENSG00000115760_79 (sequence is synthesized)
agcttctgagcctgacaatgctgaagggattcataactttgcacccctcggtacaatcacatctagcagtcctactgcccaaccagctgaagtgctattgcaggccacacctcctcacag

SEQ ID NO: 211575 - DNA, 120 bp, Artificial Sequence
  ENSG00000115760_80 (sequence is synthesized)
aagagctcgctctgctgcttggtcctacatctttcttccagaggaggcttggtgtgaccttaccattcaccttcctgcagcagtgctgcttaaggagatacatatccagcctcatcttgc

SEQ ID NO: 211576 - DNA, 120 bp, Artificial Sequence
  ENSG00000115760_81 (sequence is synthesized)
atctcttgcaacctgcccttcctcagtgtctgttgaagtaagtgcagatggggtaaatatgctacctttgtccactcctgttgtcacaagtggcctcacctacataaaaattcagcttgt

SEQ ID NO: 211577 - DNA, 120 bp, Artificial Sequence
  ENSG00000115760_82 (sequence is synthesized)
aaaagccgaagtagcttctgctgtctgccttagactacatcgtccacgggatgccagcacattaggcctttcacaaattaaattattggggctcactgcttttggtaccacctcttctgc

SEQ ID NO: 211578 - DNA, 120 bp, Artificial Sequence
  ENSG00000115760_83 (sequence is synthesized)
aacagttaataatccattccttccatctgaagatcaggtatccaaaacaagtattggatggttacggttattacatcattgccttactcacataagtgatctagaaggaatgatggcaag

SEQ ID NO: 211579 - DNA, 120 bp, Artificial Sequence
  ENSG00000115760_84 (sequence is synthesized)
tgcagctgcacctactgctaatctgctgcagacttgtgcggccttattgatgtcaccttactgtggaatgcattcacccaacatcgaggttgtgcttgtaaagataggactgcagtctac

SEQ ID NO: 211580 - DNA, 120 bp, Artificial Sequence
  ENSG00000115760_85 (sequence is synthesized)
tagaattggcctgaagctcatagacattctcctgagaaattgtgcagcatcaggcagtgatcctacagatttgaatagtcctttactttttggaagactaaatggactctcttctgactc

SEQ ID NO: 211581 - DNA, 120 bp, Artificial Sequence
  ENSG00000115760_86 (sequence is synthesized)
tacgatagatattctttaccagcttggaacaactcaggatcctggtacaaaagacagaattcaggccttgttaaaatgggttagtgattctgcaagagtggctgctatgaagagaagtgg

SEQ ID NO: 211582 - DNA, 120 bp, Artificial Sequence
  ENSG00000115760_87 (sequence is synthesized)
caggatgaactacatgtgtcctaactcctcaacagtagagtatggtcttctgatgccatctccttctcatttgcactgtgtagcagccattctgtggcatagttatgagctgcttgtaga

SEQ ID NO: 211583 - DNA, 120 bp, Artificial Sequence
  ENSG00000115760_88 (sequence is synthesized)
atatgacttaccagcactcctggaccaagagctctttgagttactttttaattggtccatgtctcttccctgcaatatggttttgaagaaagctgttgacagtctactttgctcaatgtg

SEQ ID NO: 211584 - DNA, 120 bp, Artificial Sequence
  ENSG00000115760_89 (sequence is synthesized)
tcacgtacacccaaactatttttctttgctcatgggctggatgggaattacccctcctccagtgcaatgtcatcatagactgtccatgacagatgatagcaaaaagcaggatcttagttc

SEQ ID NO: 211585 - DNA, 120 bp, Artificial Sequence
  ENSG00000115760_90 (sequence is synthesized)
atctttaacagatgactctaaaaatgcacaagcacctctcgcattaactgaatcacatttggctacccttgcttcctcttctcaatctcctgaagctattaaacaattactagactcagg

SEQ ID NO: 211586 - DNA, 120 bp, Artificial Sequence
  ENSG00000115760_91 (sequence is synthesized)
tttgccttctcttcttgtgaggagtctggctagtttctgctttagccacatttctagctcagaaagcattgcccagtcaatagatatttcccaggacaaactcaggcgccatcatgtccc

SEQ ID NO: 211587 - DNA, 120 bp, Artificial Sequence
  ENSG00000115760_92 (sequence is synthesized)
acaacaatgtaataagatgcctatcacagccgacctagttgctcctattcttaggtttttgacagaagttggcaatagccatattatgaaagattggcttggtggttctgaagtcaatcc

SEQ ID NO: 211588 - DNA, 120 bp, Artificial Sequence
  ENSG00000115760_93 (sequence is synthesized)
actatggacagcacttctgtttttattgtgtcactctgggtccacttctggaagccataatttaggtgcacaacagaccagtgcaagatcagcttctctttcttcagctgctacaacagg

SEQ ID NO: 211589 - DNA, 120 bp, Artificial Sequence
  ENSG00000115760_94 (sequence is synthesized)
actgactactcaacagcgcacagcaattgagaatgcaactgttgcgttctttctacagtgcatttcatgccatcctaataatcaaaagctgatggcacaggttctttgtgaactatttca

SEQ ID NO: 211590 - DNA, 120 bp, Artificial Sequence
  ENSG00000115760_95 (sequence is synthesized)
gacatctcctcaaagagggaaccttccaacatctgggaacatttcagggtttatacgaagattatttttacagttgatgctggaagatgagaaagtgacaatgtttcttcagtctccatg

SEQ ID NO: 211591 - DNA, 120 bp, Artificial Sequence
  ENSG00000115760_96 (sequence is synthesized)
tccactgtacaaaggtagaattaatgctactagccacgtcatccagcatccaatgtatggagcaggccacaaattccgtactcttcatttgccagtctcaacaacattatcagatgttct

SEQ ID NO: 211592 - DNA, 120 bp, Artificial Sequence
  ENSG00000115760_97 (sequence is synthesized)
tgacagagtgtcagatactccaagtatcacagctaaattaattagtgaacaaaaagatgacaaagaaaagaaaaaccatgaagagaaagaaaaagttaaagcggaaaatggatttcaaga

SEQ ID NO: 211593 - DNA, 120 bp, Artificial Sequence
  ENSG00000115760_98 (sequence is synthesized)
caattacagtgttgttgttgcctctgggctgaagtctcaatctaaacgtgctgtgtcagctacaccacctcgcccaccatccaggagggggaggacaatacctgataaaataggaagtac

SEQ ID NO: 211594 - DNA, 120 bp, Artificial Sequence
  ENSG00000115760_99 (sequence is synthesized)
ttcaggagcagaggctgccaacaaaataattactgtcccagtgtttcacctgtttcacaaactcttggcaggccagccattgccagctgaaatgacacttgcccagcttttaactctcct

SEQ ID NO: 211595 - DNA, 120 bp, Artificial Sequence
  ENSG00000115760_100 (sequence is synthesized)
atatgaccgaaaacttcctcagggttaccgctcaatagatctgactgttaaattgggatcaagagttataacagaccccagtctatcaaaaacagattcttataaaagactacaccctga

SEQ ID NO: 211596 - DNA, 120 bp, Artificial Sequence
  ENSG00000115760_101 (sequence is synthesized)
aaaagatcatggagacttacttgctagctgtccagaagatgaggctctcactccaggtgatgaatgcatggatgggatactggatgaatctttgcttgaaacctgtccaattcagtcacc

SEQ ID NO: 211597 - DNA, 120 bp, Artificial Sequence
  ENSG00000115760_102 (sequence is synthesized)
attacaagtttttgcaggaatgggtggactggctcttattgctgaaagactacccatgctatatccagaagtaattcaacaggtgagtgctccagttgtaacatctaccactcaggaaaa

SEQ ID NO: 211598 - DNA, 120 bp, Artificial Sequence
  ENSG00000115760_103 (sequence is synthesized)
gccgaaggatagcgatcagtttgaatgggtgaccattgaacagtcaggggagttagtttatgaagcaccagaaactgttgcggctgaacctccacctatcaagtcagcagtacagaccat

SEQ ID NO: 211599 - DNA, 120 bp, Artificial Sequence
  ENSG00000115760_104 (sequence is synthesized)
gtctcccatacctgcccattctttggctgcttttggattatttcttcgtcttccgggctatgcggaagtgctactgaaagagagaaaacatgcccagtgccttcttcgattggtattggg

SEQ ID NO: 211600 - DNA, 120 bp, Artificial Sequence
  ENSG00000115760_105 (sequence is synthesized)
agtgacagatgatggagaaggaagtcatattcttcaatctccatcagccaatgtgcttccaacccttcctttccacgtccttcgtagcttgtttagcactacacctttgacaactgatga

SEQ ID NO: 211601 - DNA, 120 bp, Artificial Sequence
  ENSG00000115760_106 (sequence is synthesized)
tggtgtacttctaaggcggatggcattggaaattggagccttacacctcattcttgtctgtctctctgctttgagccaccattccccacgagttccaaactctagcgtgaatcaaactga

SEQ ID NO: 211602 - DNA, 120 bp, Artificial Sequence
  ENSG00000115760_107 (sequence is synthesized)
gccacaggtgtcaagctctcataaccctacatcaacagaagaacaacagttatattgggccaaagggactggctttggaacaggctctacagcttctgggtgggatgtggaacaagcctt

SEQ ID NO: 211603 - DNA, 120 bp, Artificial Sequence
  ENSG00000115760_108 (sequence is synthesized)
aactaagcaaaggctggaagaggaacatgttacctgccttctgcaggttcttgccagttacataaatcccgtcagtagtgcggtaaatggagaagctcagtcatctcatgagactagagg

SEQ ID NO: 211604 - DNA, 120 bp, Artificial Sequence
  ENSG00000115760_109 (sequence is synthesized)
gcagaacagtaatgcccttccttctgtacttctcgagcttctcagtcagtcctgcctcatcccagccatgtcatcttatctacgaaatgattcagttctggacatggcaagacatgtgcc

SEQ ID NO: 211605 - DNA, 120 bp, Artificial Sequence
  ENSG00000115760_110 (sequence is synthesized)
actctatcgggcactgctggaattgcttcgggccattgcttcttgtgctgccatggtgcccctattgttgcccctttctacagagaacggtgaagaggaagaagaacagtcagaatgtca

SEQ ID NO: 211606 - DNA, 120 bp, Artificial Sequence
  ENSG00000115760_111 (sequence is synthesized)
aacttctgttggtacattgttagccaaaatgaagacctgtgttgatacctataccaaccgtttaagatctaaaagggaaaatgttaaaacaggagtaaaaccagatgcgtctgatcaaga

SEQ ID NO: 211607 - DNA, 120 bp, Artificial Sequence
  ENSG00000115760_112 (sequence is synthesized)
accagaaggacttactcttttggtaccagacatccaaaagactgctgagatagtttatgcagccaccaccagtttgcggcaagcaaatcaggaaaaaaaactgggtgaatactccaagaa

SEQ ID NO: 211608 - DNA, 120 bp, Artificial Sequence
  ENSG00000115760_113 (sequence is synthesized)
ggcggctatgaaacccaaacctttgtcagtattaaagtcacttgaagaaaaatatgtggctgttatgaagaaattacagtttgatacgtttgaaatggtttctgaagatgaagatgggaa

SEQ ID NO: 211609 - DNA, 120 bp, Artificial Sequence
  ENSG00000115760_114 (sequence is synthesized)
attgggatttaaagtaaattaccactacatgtctcaggtgaaaaatgctaatgatgcgaacagtgctgccagagctcgccgccttgcccaggaagctgtgacgctttcaacctcactgcc

SEQ ID NO: 211610 - DNA, 120 bp, Artificial Sequence
  ENSG00000115760_115 (sequence is synthesized)
tctgtcttcatcctctagtgtgtttgtacgctgtgatgaggagcgacttgatatcatgaaggttctaataactggtccagcggacaccccttatgcaaatggctgctttgagtttgatgt

SEQ ID NO: 211611 - DNA, 120 bp, Artificial Sequence
  ENSG00000115760_116 (sequence is synthesized)
gtattttcctcaagattatcccagttcaccccctcttgtgaatctagagacaactggtggtcatagcgtgcgattcaatccaaacctttataatgatggcaaggtttgtttaagcatctt

SEQ ID NO: 211612 - DNA, 120 bp, Artificial Sequence
  ENSG00000115760_117 (sequence is synthesized)
aaacacgtggcatggaagaccagaagagaagtggaatcctcagacctcaagctttttgcaagtgttggtgtctgtccagtcccttatattagtagctgagccttattttaatgaaccggg

SEQ ID NO: 211613 - DNA, 120 bp, Artificial Sequence
  ENSG00000115760_118 (sequence is synthesized)
atatgaacggtctagaggcactcccagtggcacacagagttctcgagaatatgatggaaacattcgacaagcaacagttaagtgggcaatgctagaacaaatcagaaacccttcaccatg

SEQ ID NO: 211614 - DNA, 120 bp, Artificial Sequence
  ENSG00000115760_119 (sequence is synthesized)
ttttaaagaggtaatacacaaacatttttacttgaaaagagttgagataatggcccaatgtgaggagtggattgcggatatccagcagtacagcagtgataagcgggtaggcaggactat

SEQ ID NO: 211615 - DNA, 120 bp, Artificial Sequence
  ENSG00000115760_120 (sequence is synthesized)
gtctcaccatgcagcagctctcaagcgtcacactgctcagctccgcgaagagttgctgaaacttccctgccctgaaggcttggatcctgacactgacgatgccccagaggtgtgcagagc

SEQ ID NO: 211616 - DNA, 120 bp, Artificial Sequence
  ENSG00000115760_121 (sequence is synthesized)
cacaacaggtgctgaggagactctaatgcatgatcaggttaaacccagcagcagcaaagaactccccagtgacttccagttatgagctgcattgatgtggacttcatagacacaaaggct

SEQ ID NO: 211617 - DNA, 120 bp, Artificial Sequence
  ENSG00000115760_122 (sequence is synthesized)
tcgaagcacaagccaaatatgtcaatatttgtatgtaagaaactaattatgtaataggtaatgaaactgaaactatactatgcccttaaggagatccagtttaattcaaggtgatctttt

SEQ ID NO: 211618 - DNA, 120 bp, Artificial Sequence
  ENSG00000115760_123 (sequence is synthesized)
atttacctgtacaggagtgtaaacttttttgtgcttttatttttcaattgtgagaaccactgattggtatgttcaacaaatttgtgtatacaaagaaatggataaatcactgctatataa

SEQ ID NO: 211619 - DNA, 120 bp, Artificial Sequence
  ENSG00000115760_124 (sequence is synthesized)
gggaaactaccttaggaaagaatgtttactgaatgtttattttattttattttttttttactatagagtgaggggttgttaacaaagaatatatattggtcattcttacaactactattt

SEQ ID NO: 211620 - DNA, 120 bp, Artificial Sequence
  ENSG00000115760_125 (sequence is synthesized)
aaagtcagcaacttttcactgaatttgatagattttatgtttggccatatcttcatgctcacatttgatttctgaagacctcctacatacacttcaataaaagttaaatggacatactcc

SEQ ID NO: 211621 - DNA, 120 bp, Artificial Sequence
  ENSG00000115760_126 (sequence is synthesized)
ctcttttttgatttactggtacatttttaaaataataaatctgccataaaatgcattatatctggagacttgcacttgtatggatgaatttattacattcaacatatttaattttatgcc

SEQ ID NO: 211622 - DNA, 120 bp, Artificial Sequence
  ENSG00000115760_127 (sequence is synthesized)
ttctaattctaagatgcagaaaaaaataaatgaacatgattttattctatgccaacatttgggcctctgaatgtatctgttatttgaatttaagtatttgaaaaggaatggtcaatttga

SEQ ID NO: 211623 - DNA, 120 bp, Artificial Sequence
  ENSG00000115760_128 (sequence is synthesized)
aagtcattctaaactgattttttttttctaaagggctccttttttcctggactatgtggttttatgactaaagtcacatgtatgtattaaacattgaggctctgtagaggagagaggatg

SEQ ID NO: 211624 - DNA, 120 bp, Artificial Sequence
  ENSG00000115760_129 (sequence is synthesized)
tacctctctggtgctgttacagtacattctgtacctgccatacaggctcattttcatgcaaattcttcctagagccaaataaataaagacttaggtgaattagtatgtcttgtttctaaa

SEQ ID NO: 211625 - DNA, 120 bp, Artificial Sequence
  ENSG00000115760_130 (sequence is synthesized)
ctttatgtttgatgtatatggaggtttattgtttttataactttattttctgcatccactttgcaaccattgatgactaggaaagttcaagacatctttatagtttgaagcataagaagc

SEQ ID NO: 211626 - DNA, 120 bp, Artificial Sequence
  ENSG00000115760_131 (sequence is synthesized)
cagtcaagtggacaaaatgtaaaatacttttaggcacccctaattttttggtttattgtgtcacagtgagaaatgggcagctagaaatacagacaaataattgatggcatgttctcacaa

SEQ ID NO: 211627 - DNA, 120 bp, Artificial Sequence
  ENSG00000115760_132 (sequence is synthesized)
attaaaactgcttttcatgattgacacatgtataactgtgttttttgttttctgggtaggaaaggtactttaaaatcacatttaacagaattattaatacaagttttccttcgcctgtag

SEQ ID NO: 211628 - DNA, 120 bp, Artificial Sequence
  ENSG00000115760_133 (sequence is synthesized)
agaacaagctttaatttagaaatatttgaaaataaaaatgtttagtaagcggaaatacacttaggtgtgattaccagagagtgtaacttctgaacagtttttattgaaataattaatact

SEQ ID NO: 211629 - DNA, 120 bp, Artificial Sequence
  ENSG00000115760_134 (sequence is synthesized)
tttcctattatgccacttttcatttgatgtaaagatgtttcatttacttactgaaacctgcctttgtgtttttgctttatgttaatgattttaaagcaagttcatttacctaaaaatttt

SEQ ID NO: 211630 - DNA, 120 bp, Artificial Sequence
  ENSG00000115760_135 (sequence is synthesized)
gttctctgttagattttgttctttatctgatttcaatcatgtatagtctaatttttaaacatttctactatatatgattgctaaatttagtaggctgagaacatacattataaatatttc

SEQ ID NO: 211631 - DNA, 77 bp, Artificial Sequence
  ENSG00000115760_136 (sequence is synthesized)
ccagtctcaacaacattatcagatgttcttgacagagtgtcagtagagatggggttttgtcatattggccatgctga

SEQ ID NO: 211632 - DNA, 120 bp, Artificial Sequence
  ENSG00000115760_137 (sequence is synthesized)
taaaggaaattctgaatgttgtatcttggatttaagttgccatttgacttaatagattatagtcatgatgttttgtctttagaaaactaaaattccttagaacttatcatatgaattatt

SEQ ID NO: 211633 - DNA, 120 bp, Artificial Sequence
  ENSG00000115760_138 (sequence is synthesized)
aaaatgtttcctagaagttcttaacttcctctttccctctgaagaaaatcccagtatattaaagtcatatttgaaagggttgtgactttaattttttgtttttgttatgcatttcatttc

SEQ ID NO: 211634 - DNA, 120 bp, Artificial Sequence
  ENSG00000115760_139 (sequence is synthesized)
ggaataggttctgttgttgtatagcacagtagggtgactgtagtaaataaaaattgtattttgtcaaacagctagaagagaggatgttgaatgttaccaacactcaaaggtttgaggcgg

SEQ ID NO: 211635 - DNA, 120 bp, Artificial Sequence
  ENSG00000115760_140 (sequence is synthesized)
tggatacaataattaccctattttgatcattacacattgtatacacatattgaaataccacactataccccataaatatgtacaactatgtgctaattaaaaatgttttgctttttaaat

SEQ ID NO: 211636 - DNA, 120 bp, Artificial Sequence
  ENSG00000115760_141 (sequence is synthesized)
aatttagttttcattaaaatgttatttgtgttgacatataataggtgctggtctgttttgcattatgaaaaagttataatgcctcacaaatttgaatcacatctgaagatgccaatttgt

SEQ ID NO: 211637 - DNA, 120 bp, Artificial Sequence
  ENSG00000115760_142 (sequence is synthesized)
cctaaattcctttatattgccttagtattaaggataatattatcttgcataatctccctctgaaacatatattacttctcttcttaatgatttggaaaagcagtgtattttagataatat

SEQ ID NO: 211638 - DNA, 120 bp, Artificial Sequence
  ENSG00000115760_143 (sequence is synthesized)
ccgtcgctgattgcttttaccatgttggatccattgtcagtctcaaagacctacttccagctaggtgccttgaactcaaatagcttttcacacagacttcaggatgtgagctaagatcta

SEQ ID NO: 211639 - DNA, 120 bp, Artificial Sequence
  ENSG00000115761_0 (sequence is synthesized)
agtcggcgccagcggccgcacgccgcggagcaggggctcggaggtcccgggattacggtgctcgagcacgctggtgggaaaggacccgggacttgaacagtgttgtgcggcgccatgcag

SEQ ID NO: 211640 - DNA, 120 bp, Artificial Sequence
  ENSG00000115761_1 (sequence is synthesized)
gtctccagcctcaatgaggtgaagatttacagcctcagctgcggcaagtcccttcctgagtggctttctgataggaagaagagagcgctacagaagaaagatgtagatgtccgtaggaga

SEQ ID NO: 211641 - DNA, 120 bp, Artificial Sequence
  ENSG00000115761_2 (sequence is synthesized)
attgaacttattcaggactttgaaatgcctactgtgtgtaccactattaaggtgtcaaaagatggacagtacattttagcaactggaacatataaacctcgggttcgatgttatgacacc

SEQ ID NO: 211642 - DNA, 120 bp, Artificial Sequence
  ENSG00000115761_3 (sequence is synthesized)
tatcaattatccttgaagtttgaaaggtgtttagattcagaagttgtcacctttgaaattttgtctgatgactactcaaagattgtcttcttacataatgatagatacattgaatttcat

SEQ ID NO: 211643 - DNA, 120 bp, Artificial Sequence
  ENSG00000115761_4 (sequence is synthesized)
tcgcaatcaggtttttactacaaaaccagaataccaaagtttgggagagatttctcttaccactatccatcctgtgacttgtactttgttggtgcaagttctgaagtttataggttaaac

SEQ ID NO: 211644 - DNA, 120 bp, Artificial Sequence
  ENSG00000115761_5 (sequence is synthesized)
ttagaacaaggacgatacctgaatcctctacaaactgatgctgcggagaataatgtttgtgacataaattcagtgcatggcttgtttgccacaggaaccatagagggtagagtggagtgc

SEQ ID NO: 211645 - DNA, 120 bp, Artificial Sequence
  ENSG00000115761_6 (sequence is synthesized)
tgggacccaagaactcgaaacagagttggcctgttagactgcgccttaaacagtgtcacagcagattcagagataaacagtttaccaacaatctctgctttgaaatttaatggtgccttg

SEQ ID NO: 211646 - DNA, 120 bp, Artificial Sequence
  ENSG00000115761_7 (sequence is synthesized)
accatggcagttggaacaaccacagggcaggttttattatatgaccttcgatctgataagccattgctagttaaagatcaccagtatgggctgcccattaagtccgttcatttccaggat

SEQ ID NO: 211647 - DNA, 120 bp, Artificial Sequence
  ENSG00000115761_8 (sequence is synthesized)
tcattagatctgattttgtctgctgactctcgaattgtcaagatgtggaataagaactccggaaaaatatttacttccttggagccagagcatgaccttaatgatgtttgtctctacccc

SEQ ID NO: 211648 - DNA, 120 bp, Artificial Sequence
  ENSG00000115761_9 (sequence is synthesized)
aactcaggcatgcttctgacggccaatgaaacccccaagatgggcatctattacattccagttttgggtcctgctcctcggtggtgttccttcttagacaacttgaccgaagaattagaa

SEQ ID NO: 211649 - DNA, 120 bp, Artificial Sequence
  ENSG00000115761_10 (sequence is synthesized)
gagaatccagaaagcacagtctatgatgattataaatttgtcaccaagaaagaccttgaaaatttagggctcacccacctcattggatctcctttcctccgggcatatatgcatgggttt

SEQ ID NO: 211650 - DNA, 120 bp, Artificial Sequence
  ENSG00000115761_11 (sequence is synthesized)
ttcatggatataagactctatcacaaggtgaaactgatggtaaatccatttgcttatgaagaatataggaaagataaaatacgacagaaaatagaagaaacacgtgcacagagagtccag

SEQ ID NO: 211651 - DNA, 120 bp, Artificial Sequence
  ENSG00000115761_12 (sequence is synthesized)
ttaaagaaattgccaaaagttaacaaagagctggcacttaaattaattgaggaagaagaggagaagcagaaatctacatggaaaaagaaagttaagagtcttcctaatattctcaccgat

SEQ ID NO: 211652 - DNA, 120 bp, Artificial Sequence
  ENSG00000115761_13 (sequence is synthesized)
gatcgatttaaagttatgtttgagaaccctgacttccaagtagatgaagagagtgaagaatttaggcttctgaatccacttgtttcaaaaattagtgaaaaaaggaagaagaaactaaga

SEQ ID NO: 211653 - DNA, 120 bp, Artificial Sequence
  ENSG00000115761_14 (sequence is synthesized)
cttcgtgaaaaagaagaggaggaagagccggaaggaaaaccaagtgatgcagaaagttcggagagttcagatgatgaaaaagcctgggttgaagaggtcaggaagcaacgcagactcctc

SEQ ID NO: 211654 - DNA, 120 bp, Artificial Sequence
  ENSG00000115761_15 (sequence is synthesized)
cagcaggaggaaaaagtgaagcggcaggaacgactcaaggaggaccagcagacagtcctaaagccccagttttatgagatcaaagcaggagaagaatttagaagcttcaaagattctgcc

SEQ ID NO: 211655 - DNA, 120 bp, Artificial Sequence
  ENSG00000115761_16 (sequence is synthesized)
acaaagcagaaactgatgaacaaaacccttgaagatcgtttgaaaattgaagcaaaaaatgggacattgagtgtatccgacaccaccgttggcagcaaacaattgacattcacgttaaag

SEQ ID NO: 211656 - DNA, 120 bp, Artificial Sequence
  ENSG00000115761_17 (sequence is synthesized)
aggtctgaacagcagaagaagcaacaggaggctgagaaactgcatcgacaagaaaggaaaagactccgtcgttcggccggacacctgaagtcaagacacaaaagaggacggtcgtttcat

SEQ ID NO: 211657 - DNA, 120 bp, Artificial Sequence
  ENSG00000115761_18 (sequence is synthesized)
tgatttgggaagtggtcctacctgtgattagggaggggtacgtctcccccaaactgatcatcgttagggtgttaaacacagacgaggaaacacacgtttttaaagttcatgtacgttctt

SEQ ID NO: 211658 - DNA, 120 bp, Artificial Sequence
  ENSG00000115761_19 (sequence is synthesized)
gtacacagaggtaaagatttgaaaacctgtgccttgtgggttggactttgaagctggccccgccgacggccaccgcacagccccaggggtgtgcttgcgagtcgttgctccctggaaaca

SEQ ID NO: 211659 - DNA, 120 bp, Artificial Sequence
  ENSG00000115761_20 (sequence is synthesized)
ttgtcctttccccacggcgttaatcatgaaaaccaggctggggtttttttaatattgtgaaatgtacaccatgaaatgaaaggtttatcctgtgccagaaaccaaggtttatcatgctct

SEQ ID NO: 211660 - DNA, 120 bp, Artificial Sequence
  ENSG00000115761_21 (sequence is synthesized)
aggaacttttttcttacactgcctaccgccattcatgattaaaccatccagaaataccatccctgttttacctggtgtctgtgtattgcctgtgtttgtgtttataagtttatgctgata

SEQ ID NO: 211661 - DNA, 120 bp, Artificial Sequence
  ENSG00000115761_22 (sequence is synthesized)
ggtttgttcggcttgtttatgtattagtttgggatttgtttttaaataatttataccaagagagtataatctaatggtgcaggttgagagcatcccaaatccgaaaatctaaaactgttt

SEQ ID NO: 211662 - DNA, 84 bp, Artificial Sequence
  ENSG00000115761_23 (sequence is synthesized)
aggttgagagcatcccaaatccgaaaatctaaaactgtttgagcactgtatttatctgttcttgcactgtaaagaaaagaggtt

SEQ ID NO: 211663 - DNA, 120 bp, Artificial Sequence
  ENSG00000115761_24 (sequence is synthesized)
ctgtggaggccctgggaagcttacaatcgtggcagaaggtgaagcggaagcaggtatgtcctgcgtggctagagccagaggaggagggcaaaggggcagatgctgcacactttcaaacac

SEQ ID NO: 211664 - DNA, 120 bp, Artificial Sequence
  ENSG00000115761_25 (sequence is synthesized)
cagatctccaagaactcactaacacagaatagcaagggggaagtctgcccccatgtttcagtcacctccctccaggcccctcctccaacaccgaagattacaatttgacatgagatttgt

SEQ ID NO: 211665 - DNA, 120 bp, Artificial Sequence
  ENSG00000115761_26 (sequence is synthesized)
gtggggacacagagcaaaaccatatcaagcactgacatgacattggaggaaaatgctcattagagcttttcaggttttggattttcagatttgggatacttgactagtaaatataataca

SEQ ID NO: 211666 - DNA, 120 bp, Artificial Sequence
  ENSG00000115761_27 (sequence is synthesized)
gatattccaaaacacacaaaaaaaccaaagtctaaaagacttctggtcccaagcatttcagataagggatacccaacctgtaataatgggaaacaagcagtagaggctgttggttaatct

SEQ ID NO: 211667 - DNA, 120 bp, Artificial Sequence
  ENSG00000115761_28 (sequence is synthesized)
tggcacaagtttaattacaggttttttttttttcctgtttcttaagtacagtcaaacataaacttactggaggaaacatttataaaaataaatatactttcatttgaatagcttctttga

SEQ ID NO: 211668 - DNA, 120 bp, Artificial Sequence
  ENSG00000115761_29 (sequence is synthesized)
ttataatatttttattgttaaactaaaatggctgtgtagttctattgttaaacaaaaatggctgtgtagtaaaatgtaacccatcattttttattaatattaatacagtgatacggatag

SEQ ID NO: 211669 - DNA, 120 bp, Artificial Sequence
  ENSG00000115761_30 (sequence is synthesized)
accagtgctgtccagttctctaaaccaaagtctgccaccagcgtttctgtgatgacggacacgttctatatctgctgtgtcctgtgtggtagccattagtcacatgtagctgttgagcac

SEQ ID NO: 211670 - DNA, 120 bp, Artificial Sequence
  ENSG00000115762_0 (sequence is synthesized)
cttggacgcccggtccttcagttttttgagcacctcaagcttctggcctacaaaacgctcccggctcagctggagctttctgcgcccgggtcctagagtcgcccatttctctaaggcgcc

SEQ ID NO: 211671 - DNA, 120 bp, Artificial Sequence
  ENSG00000115762_1 (sequence is synthesized)
ttggccctatttttagagagcggtatttagaaaccaagattagggtgctaacaatttttttttaaatttttatatttttaagacaggatctcactttgtaacacttccttttagtggaag

SEQ ID NO: 211672 - DNA, 120 bp, Artificial Sequence
  ENSG00000115762_2 (sequence is synthesized)
cgccgacctcctgggagacccacgccccctgccgccttccgtcccgtttctcagaaaaccacccagacaccccgccccaccggccggggcccgccgcgcatgcgcgccgaggcgtgacgt

SEQ ID NO: 211673 - DNA, 120 bp, Artificial Sequence
  ENSG00000115762_3 (sequence is synthesized)
cagaacggcggccaggacgccggacgtgcggcagttgcaggcgagcaggcgaggaatcgccgtggcgtcttggtgttctccacgctggttcgcaggtgaagagatggcgtttgtgaagag

SEQ ID NO: 211674 - DNA, 120 bp, Artificial Sequence
  ENSG00000115762_4 (sequence is synthesized)
tggctggttgctgcgacagagtactattttgaagcgctggaagaagaactggtttgatctgtggtcggatggtcacctgatctattatgatgaccagactcggcagaatatcgaggataa

SEQ ID NO: 211675 - DNA, 120 bp, Artificial Sequence
  ENSG00000115762_5 (sequence is synthesized)
ggtccacatgccaatggactgcatcaacatccgcacggggcaggaatgtcgggatactcagcccccggatggaaagtcaaaagactgcatgctccagattgtttgtcgagatgggaaaac

SEQ ID NO: 211676 - DNA, 120 bp, Artificial Sequence
  ENSG00000115762_6 (sequence is synthesized)
aattagtctttgtgcagaaagcacagatgattgcttggcctggaaatttacactccaagattctaggacaaacacagcgtatgtgggctctgcagtcatgaccgatgagacatccgtggt

SEQ ID NO: 211677 - DNA, 120 bp, Artificial Sequence
  ENSG00000115762_7 (sequence is synthesized)
ttcctcacctccaccatacacggcctatgctgcaccggcccctgaggcttatggctatgggccatacggtggtgcgtacccgccaggaactcaagttgtctacgctgcgaatgggcaggc

SEQ ID NO: 211678 - DNA, 120 bp, Artificial Sequence
  ENSG00000115762_8 (sequence is synthesized)
gtatgccgtgccctaccagtacccatatgcaggactttatggacagcagcctgctaaccaagtcatcattcgagagcgctatcgagacaacgacagcgacctggcactgggcatgctggc

SEQ ID NO: 211679 - DNA, 120 bp, Artificial Sequence
  ENSG00000115762_9 (sequence is synthesized)
aggagcagccacgggcatggccttagggtctctattttgggtcttctaggggcctcaaggtcttgatgtgcatagcttctgataaccctgtgtgcaataatatgatttgcagggcatttc

SEQ ID NO: 211680 - DNA, 120 bp, Artificial Sequence
  ENSG00000115762_10 (sequence is synthesized)
tgtttgtgacaaaagtttttaataatagttttaatcattcctttgaaagtagtgatgtcataattgtactaatccacataagtaccacagagaagggtttgaactgtgctattttgttca

SEQ ID NO: 211681 - DNA, 120 bp, Artificial Sequence
  ENSG00000115762_11 (sequence is synthesized)
aatgttgactctccgggggcactggctcattccaagactgttcttgtgcaactctcagaataccttatttgagcatacctgttttgaaaggcattttctttttagagttaggtgtagtgc

SEQ ID NO: 211682 - DNA, 120 bp, Artificial Sequence
  ENSG00000115762_12 (sequence is synthesized)
ttaagggttaatttattttcatgttatgccagtaatatagtgttgtatgcctattgagtgattgtggcaagaaaagctacagcttctttgcgtttaactttttcaaaccacagaccagaa

SEQ ID NO: 211683 - DNA, 120 bp, Artificial Sequence
  ENSG00000115762_13 (sequence is synthesized)
ctggttgcatgttactttaggagttgtgggttggtaagctcccaggtacttcccgaggctatggtgtgagagcccccgtcctgccctctggggctccacaggcccctggcaaggccgatg

SEQ ID NO: 211684 - DNA, 120 bp, Artificial Sequence
  ENSG00000115762_14 (sequence is synthesized)
gctcaggatgatggggcacagcccgcctttgaacaatcatgcttcagaaatctgcctgaccctagctgctgctgctgctcactttattcttgtatggctttggtaggcatacttggagaa

SEQ ID NO: 211685 - DNA, 120 bp, Artificial Sequence
  ENSG00000115762_15 (sequence is synthesized)
gctttggtaggcatacttggagaacatatcccacattaggaattgatttaagcctgagagtttgagggctttaatcctttaaaacttggagaagctggctgggcgcggtggctcacgcct

SEQ ID NO: 211686 - DNA, 120 bp, Artificial Sequence
  ENSG00000115762_16 (sequence is synthesized)
atcctggagaagccagaacaatatacaaacaagtatgtggaggcagatttgctttattccaagaggctgtttgagtgtgtgtctgcctaagcctccttatagcctatttttctacttgct

SEQ ID NO: 211687 - DNA, 120 bp, Artificial Sequence
  ENSG00000115762_17 (sequence is synthesized)
gagagagtaatattaaaggaacagtgagggagtggaaggagagccttagttagagcgttcccatttctggcctttgggggtttgcactgtgcgggagatgctctctcatcactctgaagg

SEQ ID NO: 211688 - DNA, 120 bp, Artificial Sequence
  ENSG00000115762_18 (sequence is synthesized)
cccatcctgtgcagaagtgggactctgtggctgttcactgagcaccagggcagactgtagctgagcagacttgggttatggatgggatatggggcccagggaccctcaggacacagggac

SEQ ID NO: 211689 - DNA, 120 bp, Artificial Sequence
  ENSG00000115762_19 (sequence is synthesized)
cggctcaaggtaccactcagcctggccaggacccccagctttgcttttgttcttgatctctttgtgatagagaagcttagaacattgaatttggaaccccaaaatgtgtgagtctttgga

SEQ ID NO: 211690 - DNA, 120 bp, Artificial Sequence
  ENSG00000115762_20 (sequence is synthesized)
aaacccattccagcctttcttcaaatgctcttattttcagtatatgaagtgtgtatttgaaatattcatatttctgttatttcttgttttcaagctctgaattattgcagttttctgtcc

SEQ ID NO: 211691 - DNA, 120 bp, Artificial Sequence
  ENSG00000115762_21 (sequence is synthesized)
tgcatgctttcaacagtgtgcttttacagtggcagtttagcacagcgaatgtccctgccccacactccatatggtcctgttttcctgaaaatacactccaggtagcacagacttgttatt

SEQ ID NO: 211692 - DNA, 120 bp, Artificial Sequence
  ENSG00000115762_22 (sequence is synthesized)
ttgcctggctggttacacacatgctgtcttgctttgctgctcagccacctccctctgaggccaacttaggccaacctacataggactccatctttagcgagacaccagagacacctagtg

SEQ ID NO: 211693 - DNA, 120 bp, Artificial Sequence
  ENSG00000115762_23 (sequence is synthesized)
atgaccacgggtctgcttttctctctgatcctaggggacttgttgacatgggagtgtctgtttccacatggaaggatgtctgtttatctctcatctctgaatagatgtatgacaactcta

SEQ ID NO: 211694 - DNA, 120 bp, Artificial Sequence
  ENSG00000115762_24 (sequence is synthesized)
gtgtccatggtttaaaatgttgctttgaggattttccatcctgtataagaagaatggctttcttcagattataatcgttattaaagctgtatgtacactttacttaaaaactattaacag

SEQ ID NO: 211695 - DNA, 120 bp, Artificial Sequence
  ENSG00000115762_25 (sequence is synthesized)
tttttcatgttgcactggtggtaattttgaacttggaattactgggtgggaattccaggaaccacagagtattgatttttgctgccaaaatgctcttgaagcagatgtccctgtgctccc

SEQ ID NO: 211696 - DNA, 120 bp, Artificial Sequence
  ENSG00000115762_26 (sequence is synthesized)
ctggctgcttctggctgaaggggggaggtgtagactgaagcttgggcactcatgtgtgtcccctccccagtccccatcctagtggggccagtctcattaggcagccatagataagcctgg

SEQ ID NO: 211697 - DNA, 120 bp, Artificial Sequence
  ENSG00000115762_27 (sequence is synthesized)
aacttggctgtcattagtgacttgatcctggtatgaaatgcatactgggtataaggttgctcaggtattttatttccttggccacaactcccatagatgccaatgttttgatagcctcag

SEQ ID NO: 211698 - DNA, 120 bp, Artificial Sequence
  ENSG00000115762_28 (sequence is synthesized)
tttctcaacgatgtcttttgtttacagtgctacacttagtgtgagtcaagaagtgcttgagttacaagaaacttcttattcaggtttgagtaagcattttacttccatgtgtacttttaa

SEQ ID NO: 211699 - DNA, 120 bp, Artificial Sequence
  ENSG00000115762_29 (sequence is synthesized)
ataatccataccttgaagaagttggccaatgatattatatacatgctgatctgattgttcttttcattccttgagtcaacttcagggtcttggatactaaagagaaggagaactgtggtt

SEQ ID NO: 211700 - DNA, 120 bp, Artificial Sequence
  ENSG00000115762_30 (sequence is synthesized)
aatgttttggatcatcatttgtgaacaaggccagactttgcccattttaggctatccaggacttaaggtagccatctggatcataagaaggtcctgcagttgagacaaaatgacccaagt

SEQ ID NO: 211701 - DNA, 120 bp, Artificial Sequence
  ENSG00000115762_31 (sequence is synthesized)
gtattttccacaagttttgatcctgtgtaatatttctttttccttccctagtgtatgtagatacaaggcatggaatgcagttccactttctccccagagttgatctttttgtgattgctt

SEQ ID NO: 211702 - DNA, 120 bp, Artificial Sequence
  ENSG00000115762_32 (sequence is synthesized)
tcccgtctctagtagtattctgttgtgtctagagaactgattttttcctacatacgcaaattgtacatttgtaagtgaaaatgtcaatacattaaagcattaaccttaaagcatgtttca

SEQ ID NO: 211703 - DNA, 90 bp, Artificial Sequence
  ENSG00000115762_33 (sequence is synthesized)
aaaaaaaagctaaagcagaaaacaaaagtggcccatggtctcagcttccagataataactattgatttcaaaaaataaaatggcggccaa

SEQ ID NO: 211704 - DNA, 70 bp, Artificial Sequence
  ENSG00000115762_34 (sequence is synthesized)
gagccaccgtgcccagccgtgactgtttcttctaatttatcacttttaaagtctcatttaactttttttc

SEQ ID NO: 211705 - DNA, 120 bp, Artificial Sequence
  ENSG00000115762_35 (sequence is synthesized)
tctaatttatcacttttaaagtctcatttaactttttttccatacagaagatttaaatttttatggagttgactttatgaacctttttcttgatgacttttgtttttttgccctgacctg

SEQ ID NO: 211706 - DNA, 120 bp, Artificial Sequence
  ENSG00000115762_36 (sequence is synthesized)
gccactccacgtcactcactgctgacaccagtgcagcacccctgcctgggccatgtggaccccactgggaacgccaaatgtaggcacctcagggctccagcaagccacgagaatccccca

SEQ ID NO: 211707 - DNA, 120 bp, Artificial Sequence
  ENSG00000115762_37 (sequence is synthesized)
tgtccttgacagagctaaatcctgtgtccctggggctgctttatgtttgttgagtggtgttagactcggtcaggtgggctgggtggtgaggctgaaggcgagtgtgggaggaagggaggg

SEQ ID NO: 211708 - DNA, 120 bp, Artificial Sequence
  ENSG00000115762_38 (sequence is synthesized)
ggtacagagtgcggggcacatgaaccccaatgaggaggtgtttgttaaatgccaggggggcactgagctaaaatggccttgggcccttcctcagctgatgctgaaggggataaggataga

SEQ ID NO: 211709 - DNA, 120 bp, Artificial Sequence
  ENSG00000115762_39 (sequence is synthesized)
gaaagagagctggagaactgggatatcatgaggagttgtagacagttaaacctgaattctagcttttggaacaaaatagtaatgtaattgtagcagttctcacttttttattttttattt

SEQ ID NO: 211710 - DNA, 75 bp, Artificial Sequence
  ENSG00000115762_40 (sequence is synthesized)
tattttttatttttttgagacggagtttcactcctgttgcttaggctggagtgcgaggagtcccctgcctctgcc

SEQ ID NO: 211711 - DNA, 120 bp, Artificial Sequence
  ENSG00000115762_41 (sequence is synthesized)
aaagtgttgggattataggcgtgagccaacgcgcctggccaattctcacttttggaccatctactacagggctgtttggacatacctcctttaattgtcacagtaaccccatgacgtaat

SEQ ID NO: 211712 - DNA, 120 bp, Artificial Sequence
  ENSG00000115762_42 (sequence is synthesized)
gtgcggcagttgcaggcgagcaggcgaggaatcgccgtggcgtcttggtgttctccacgctggttcgcagaatgtacctgtgacatctctttgactctccactgttgcccttgaagaaca

SEQ ID NO: 211713 - DNA, 120 bp, Artificial Sequence
  ENSG00000115762_43 (sequence is synthesized)
tctccgataagaaggtctgtgcagatttctgtgctcctacctgcagtaaatattcgtagacgtataaagctaacttttccccagcctgcccgtccgagggcaccaaggagcctttgcctt

SEQ ID NO: 211714 - DNA, 120 bp, Artificial Sequence
  ENSG00000115762_44 (sequence is synthesized)
tggcaaacatggtttgcagggaagagggcgcccagcctccccacagccgccaccgctccggctctcccgagctgcccctcgcccccggccccctcccaggcgctccctccctctctcgct

SEQ ID NO: 211715 - DNA, 120 bp, Artificial Sequence
  ENSG00000115762_45 (sequence is synthesized)
ggctggcgctctcctagcagcgctcccctccctcccgagcaggcgctggctccgcgctctttccagctgtcaaagcatcaggcccggccgcggccccatcgccctggaactcctcccgtg

SEQ ID NO: 211716 - DNA, 120 bp, Artificial Sequence
  ENSG00000115762_46 (sequence is synthesized)
catcgccctggaactcctcccgtgccggcttggcctggggtgccgccgccgcctcccgcaaggccgcccgctctccggtagctcgcgtgctcgcccggttccgcttgcgcggccctctgc

SEQ ID NO: 211717 - DNA, 120 bp, Artificial Sequence
  ENSG00000115762_47 (sequence is synthesized)
ccagcaccgctgccgccgccgccggcgctggcctcatgtgtcacattttcttaatccagtctatggctgatggatatttgggttggttccaactttttgctattgtgaatagtgccgcaa

SEQ ID NO: 211718 - DNA, 120 bp, Artificial Sequence
  ENSG00000115762_48 (sequence is synthesized)
aagtattttctattttaacttctgattaccaaaaaatgaaaagaaagggcgtggagttttctttcaggcatcagaataagggactcagtggatgtatgagagaaatgcaagagtcgcttt

SEQ ID NO: 211719 - DNA, 120 bp, Artificial Sequence
  ENSG00000115762_49 (sequence is synthesized)
tccaattctagtttctgcctctctcagactgcctaggccgatcccattgtggtgaaaatggcagaaaggaatagcagtctcatcatgctgtctttcattattagattcacagtgggtaac

SEQ ID NO: 211720 - DNA, 120 bp, Artificial Sequence
  ENSG00000115806_0 (sequence is synthesized)
aagtgctacgcggaggattagagcaggcggtgcgctgggggcgggagcagcgcggagcccggctcggccacaccgatcgcccgccgccatgggctcctcgcaaagcgtcgagatcccggg

SEQ ID NO: 211721 - DNA, 120 bp, Artificial Sequence
  ENSG00000115806_1 (sequence is synthesized)
cgggggcaccgagggctaccacgttctgcgggtacaagaaaattccccaggacacagagctggtttggagcctttctttgattttattgtttctattaatggttcaagattaaataaaga

SEQ ID NO: 211722 - DNA, 120 bp, Artificial Sequence
  ENSG00000115806_2 (sequence is synthesized)
caatgacactcttaaggatctgctgaaagcaaacgttgaaaagcctgtaaagatgcttatctatagcagcaaaacattggaactgcgagagacctcagtcacaccaagtaacctgtgggg

SEQ ID NO: 211723 - DNA, 120 bp, Artificial Sequence
  ENSG00000115806_3 (sequence is synthesized)
cggccagggcttattgggagtgagcattcgtttctgcagctttgatggggcaaatgaaaatgtttggcatgtgctggaggtggaatcaaattctcctgcagcactggcaggtcttagacc

SEQ ID NO: 211724 - DNA, 120 bp, Artificial Sequence
  ENSG00000115806_4 (sequence is synthesized)
acacagtgattatataattggagcagatacagtcatgaatgagtctgaagatctattcagccttatcgaaacacatgaagcaaaaccattgaaactgtatgtgtacaacacagacactga

SEQ ID NO: 211725 - DNA, 120 bp, Artificial Sequence
  ENSG00000115806_5 (sequence is synthesized)
taactgtcgagaagtgattattacaccaaattctgcatggggtggagaaggcagcctaggatgtggcattggatatggttatttgcatcgaatacctacacgcccatttgaggaaggaaa

SEQ ID NO: 211726 - DNA, 120 bp, Artificial Sequence
  ENSG00000115806_6 (sequence is synthesized)
gaaaatttctcttccaggacaaatggctggtacacctattacacctcttaaagatgggtttacagaggtccagctgtcctcagttaatcccccgtctttgtcaccaccaggaactacagg

SEQ ID NO: 211727 - DNA, 120 bp, Artificial Sequence
  ENSG00000115806_7 (sequence is synthesized)
aattgaacagagtctgactggactttctattagctcaactccaccagctgtcagtagtgttctcagtacaggtgtaccaacagtaccgttattgccaccacaagtaaaccagtccctcac

SEQ ID NO: 211728 - DNA, 120 bp, Artificial Sequence
  ENSG00000115806_8 (sequence is synthesized)
ttctgtgccaccaatgaatccagctactacattaccaggtctgatgcctttaccagcaggactgcccaacctccccaacctcaacctcaacctcccagcaccacacatcatgccaggggt

SEQ ID NO: 211729 - DNA, 120 bp, Artificial Sequence
  ENSG00000115806_9 (sequence is synthesized)
tggcttaccagaacttgtaaacccaggtctgccacctcttccttccatgcctccccgaaacttacctggcattgcacctctccccctgccatccgagttcctcccgtcattccccttggt

SEQ ID NO: 211730 - DNA, 120 bp, Artificial Sequence
  ENSG00000115806_10 (sequence is synthesized)
tcccgcccaccagcaacgcaccctccgaccctgccacaactactgcaaaggcagacgctgcctcctcactcactgtggatgtgacgccccccactgccaaggcccccaccaccgttgagg

SEQ ID NO: 211731 - DNA, 120 bp, Artificial Sequence
  ENSG00000115806_11 (sequence is synthesized)
acagagtcggcgactccaccccagtcagcgagaagcctgtttctgcggctgtggatgccaatgcttctgagtcaccttaactttgaaccattctttggaattggcgtggtatatttaacc

SEQ ID NO: 211732 - DNA, 120 bp, Artificial Sequence
  ENSG00000115806_12 (sequence is synthesized)
acgggagcgtgtctggaaacgcaaactatcattaatttcatactagtttgtaccgtatctgtaggcatcctgtaaataattccaaggggaaaactaaacgaggacgtgggttgtatcctg

SEQ ID NO: 211733 - DNA, 120 bp, Artificial Sequence
  ENSG00000115806_13 (sequence is synthesized)
ccaggttgagtggggctcacacgctagggtgagatgtcagaaagcgcttgtattttaaacaaccaaaaagaattgtaagggtggcttgctgccaggcttgcactgccgttcctgggggtg

SEQ ID NO: 211734 - DNA, 120 bp, Artificial Sequence
  ENSG00000115806_14 (sequence is synthesized)
tgcatcttcgggaaaggtggtggcggggcgtccactaggtttcctgtcccctgctgctccttccgtaagaaaatgaaatattctatgcctaatactcacacgcaacatttcttgtacttt

SEQ ID NO: 211735 - DNA, 120 bp, Artificial Sequence
  ENSG00000115806_15 (sequence is synthesized)
gtaagtcgtttgcgagaatgcagaccacctcactaaactgtaaacggtaaagagatttttacttttggtctccgtgagtcgcatctctactaaggtttacacaggaattccacctgaaga

SEQ ID NO: 211736 - DNA, 120 bp, Artificial Sequence
  ENSG00000115806_16 (sequence is synthesized)
cttgtgttaaagttctacagcgcgcactgttaactgaacgtctttttcttcagcctatacgcggatccttgttttgagctctcagaatcactcagacaacattttgtaactgctgctgtt

SEQ ID NO: 211737 - DNA, 120 bp, Artificial Sequence
  ENSG00000115806_17 (sequence is synthesized)
gctttctacatacaccttataaagtgacatttcaaaagaaataaggtgccacagttttaaaccagaaggtggcactctgtggctccttgtagtattatagctatactgggaaagcataga

SEQ ID NO: 211738 - DNA, 120 bp, Artificial Sequence
  ENSG00000115806_18 (sequence is synthesized)
tacagcaataaagtacagtaattttactttttttcttgtgttacatctaaattacaacccttaattgccacgtgtgcacttactactctccagtatgtcttattactctccagtatgtca

SEQ ID NO: 211739 - DNA, 120 bp, Artificial Sequence
  ENSG00000115806_19 (sequence is synthesized)
cgcatctttaacttttcacgtcctatgtttgctttctcccatttttaagagatggtaagttaactggaattgatttactgaatgaaattaaatgcagatatccctgtttttgaaataaga

SEQ ID NO: 211740 - DNA, 120 bp, Artificial Sequence
  ENSG00000115806_20 (sequence is synthesized)
gccgcggggaggcggaggcccccatgggctccttcacggggcagccaggcccgatcccgcgaaggagcggcggtcgcgggcgctgccttggtcgaggctggttccggaggccgctcgcat

SEQ ID NO: 211741 - DNA, 120 bp, Artificial Sequence
  ENSG00000115806_21 (sequence is synthesized)
gttccggaggccgctcgcatcccacctccgcggagcgccctgggcacggggtccgcggctgtaggaggacgggctggagctggaggcggctgccggcgactcggccagggggcggccctg

SEQ ID NO: 211742 - DNA, 120 bp, Artificial Sequence
  ENSG00000115806_22 (sequence is synthesized)
gtgactgtgaaggcagcctttgcgctttcctaggagagggatccggacccgcagtccggaggcggggcctgcggcggcaggtgttaaatcacctcggcgccggccgagtggcctgaaaga

SEQ ID NO: 211743 - DNA, 120 bp, Artificial Sequence
  ENSG00000115806_23 (sequence is synthesized)
ttttatgctcagaagtttaaaatatattctgtagtttctgacatctgacacatctctagcaagacagaagtatacagatttaaaaaatcaacataattaaaaattggactataaaccttg

SEQ ID NO: 211744 - DNA, 120 bp, Artificial Sequence
  ENSG00000115806_24 (sequence is synthesized)
aacataccagtcagatatgttgcagacattgattgtttttattttgaaagaaattactggtttattttaagactcctcttaaaaaaaagggaagagctagtctagaatattgaaaccaat

SEQ ID NO: 211745 - DNA, 120 bp, Artificial Sequence
  ENSG00000115806_25 (sequence is synthesized)
attcattctactaaacccatttttgttttttctctgactcccaaggtttgcagccatgggcaagagaaattggcctggctttgaccatgagccattcccttggtttgggcagggcagaca

SEQ ID NO: 211746 - DNA, 120 bp, Artificial Sequence
  ENSG00000115806_26 (sequence is synthesized)
ctctgattgacaatcctaccagcactgcacacaacagcagagaagtaattccccaaagggaggaaagagaaaggaatgttgagaagacatcagactagaaagaagcaatgtgatcacatc

SEQ ID NO: 211747 - DNA, 120 bp, Artificial Sequence
  ENSG00000115806_27 (sequence is synthesized)
ttactagaaaaatgcctctggtggcagtgggaggatgaaatagaagagatctgggttgaacatacatgactgatttgtgtcaggttctgaaagagaactatggaatgtgtaaatgatgtc

SEQ ID NO: 211748 - DNA, 120 bp, Artificial Sequence
  ENSG00000115806_28 (sequence is synthesized)
atcatacagacgtgcttagagctcttcagtggaaaggctgtatcgatgtcatttgtttagcgagtaatcatcaaatgtctgccatgtgccggcagctatgaaggcagtaaacagacaagg

SEQ ID NO: 211749 - DNA, 120 bp, Artificial Sequence
  ENSG00000115806_29 (sequence is synthesized)
tctctgcccttcaggaccttaacattttgttgggggagatagatagtaaataaatatgcagtgtgttggatggtgatgaattcttgaaaaataaaggagtaagggtgatatccacagtgg

SEQ ID NO: 211750 - DNA, 120 bp, Artificial Sequence
  ENSG00000115806_30 (sequence is synthesized)
agggcagggtgttgttttctgtggggtggtctgggagacctctgcttagatgacattatctaaaagaatagaaatttgtttgtttttatcttttaaaatctcaaagaagggagtgcatgt

SEQ ID NO: 211751 - DNA, 120 bp, Artificial Sequence
  ENSG00000115806_31 (sequence is synthesized)
tcagggcaacttgaatctatgctcttgggttacccgccccccccaaaaaaaacacctcaaagaaatacaagctgtgatagataacaacgttaagaaaaaaatgtttttatagcctaggat

SEQ ID NO: 211752 - DNA, 120 bp, Artificial Sequence
  ENSG00000115806_32 (sequence is synthesized)
tacaatcattatgtgtagtatgccaatttatagaaataatcatgtattaataaacattgaaatatctataatattataccttatgctccactgattatcttagggaagtctctagaatca

SEQ ID NO: 211753 - DNA, 120 bp, Artificial Sequence
  ENSG00000115806_33 (sequence is synthesized)
gtggagtcttttatatgttaaatatttaatttttataagcagaaagaaataattaagatgtaaaagattgctttttaaagatgtcagacttctgttggttgttgacaaatggattactag

SEQ ID NO: 211754 - DNA, 120 bp, Artificial Sequence
  ENSG00000115806_34 (sequence is synthesized)
aactaggggtttcagagggagtacacgtaaggggcaaaagcagcaacggaatacgacaacggaataagcatgaatacgacctggctacctgaaggaggtacaagaaaattccccaggaca

SEQ ID NO: 211755 - DNA, 120 bp, Artificial Sequence
  ENSG00000115806_35 (sequence is synthesized)
cacaccgatcgcccgccgccatgggctcctcgcaaagcgtcgagatcccgggcgggggcaccgagggctaccacgttctgcggcatcaatgagagaaggctcaagcacattgtcagaaat

SEQ ID NO: 211756 - DNA, 120 bp, Artificial Sequence
  ENSG00000115808_0 (sequence is synthesized)
gaggcgctgcttgccgccgctgttgcctccgctgctgggcgccggggcagctccccgggtatctgcggccgccatggacgagcaggcgggtcccggcgtcttcttcagcaacaaccaccc

SEQ ID NO: 211757 - DNA, 120 bp, Artificial Sequence
  ENSG00000115808_1 (sequence is synthesized)
tgccaaggggctcgggcctctggcggaggctgccgcggccggcgacggggcggctgcggcgggggcggcccgagcccagtacagtctcccggggatcctgcacttcctgcagcacgagtg

SEQ ID NO: 211758 - DNA, 120 bp, Artificial Sequence
  ENSG00000115808_2 (sequence is synthesized)
gcagcacgagtgggcccgcttcgaggtggagagagcccagtgggaggtggagcgggcggagctgcaggcccagattgccttcctgcagggagaaaggaagggccaagaaaatttgaagaa

SEQ ID NO: 211759 - DNA, 120 bp, Artificial Sequence
  ENSG00000115808_3 (sequence is synthesized)
ggatcttgtgaggaggatcaaaatgttggagtatgctcttaaacaggaaagagccaaataccacaagttgaaatacgggacagaattgaatcagggagatatgaagcctccaagctatga

SEQ ID NO: 211760 - DNA, 120 bp, Artificial Sequence
  ENSG00000115808_4 (sequence is synthesized)
ttctgatgaaggtaatgaaacagaagtgcagccacaacaaaacagccagttaatgtggaaacaaggtcgacaactactcagacagtatctacaggaggtgggttatacagatactattct

SEQ ID NO: 211761 - DNA, 120 bp, Artificial Sequence
  ENSG00000115808_5 (sequence is synthesized)
agatgtgaaatctaaacgagtgcgagctttgttgggcttttcaagtgatgtcacggacagggaagatgacaaaaatcaggactcagttgtaaatggcacagaggctgaagttaaagagac

SEQ ID NO: 211762 - DNA, 120 bp, Artificial Sequence
  ENSG00000115808_6 (sequence is synthesized)
agcaatgattgcaaaatctgagttaacagattctgcctccgtgctggataatttcaaattccttgaaagtgcagctgcagatttcagtgatgaagatgaagatgatgatgttgatggaag

SEQ ID NO: 211763 - DNA, 120 bp, Artificial Sequence
  ENSG00000115808_7 (sequence is synthesized)
agagaaaagcgtcattgatacttcaacaattgttaggaaaaaagcattgcctgacagcggtgaagatcgagatacaaaagaagctctaaaggagtttgacttcttggttacatcagagga

SEQ ID NO: 211764 - DNA, 120 bp, Artificial Sequence
  ENSG00000115808_8 (sequence is synthesized)
aggagacaatgaatctagaagtgcaggcgatggaacagactgggaaaaggaagaccagtgtctcatgcctgaagcctggaatgtggaccagggagtaattaccaaactcaaggaacaata

SEQ ID NO: 211765 - DNA, 120 bp, Artificial Sequence
  ENSG00000115808_9 (sequence is synthesized)
caaaaaggagagaaaggggaaaaagggggtgaagaggcccaataggtcaaaactacaagatatgcttgctaatttgagagatgttgatgaacttccttcattgcagccatctgtgggttc

SEQ ID NO: 211766 - DNA, 120 bp, Artificial Sequence
  ENSG00000115808_10 (sequence is synthesized)
accttccagacccagcagctccaggcttcctgaacatgaaattaatagggcagatgaagtggaagcattgacatttcctccttcttctggaaagtcattcatcatgggagcagatgaagc

SEQ ID NO: 211767 - DNA, 120 bp, Artificial Sequence
  ENSG00000115808_11 (sequence is synthesized)
ccttgaaagtgaactgggacttggagaactagcaggccttacggtggccaatgaagcagactcactaacttatgatatagcaaacaataaagatgcattgaggaagacatggaaccctaa

SEQ ID NO: 211768 - DNA, 120 bp, Artificial Sequence
  ENSG00000115808_12 (sequence is synthesized)
gtttacattgagaagtcactttgatggcatccgagcccttgctttccatcccattgagcctgttttgataacagcatcagaggatcacacattaaaaatgtggaatttacagaaaacagc

SEQ ID NO: 211769 - DNA, 120 bp, Artificial Sequence
  ENSG00000115808_13 (sequence is synthesized)
cccagccaaaaagagcacttctcttgatgtagaacctatctatacattcagagcccataaaggtccagtgctttgtgtggtaatgagcagcaatggtgagcagtgttacagtggtggtac

SEQ ID NO: 211770 - DNA, 120 bp, Artificial Sequence
  ENSG00000115808_14 (sequence is synthesized)
tgatggactgatccagggctggaataccactaatcccaacatcgacccctatgattcttatgatccttctgttttacgaggccctctgctaggccacacggatgcagtctggggtttggc

SEQ ID NO: 211771 - DNA, 120 bp, Artificial Sequence
  ENSG00000115808_15 (sequence is synthesized)
ttatagtgcagcacatcagcgtttgttgtcctgttcagcagatggcactctgcgtttatggaatacaactgaggttgctccagcactaagtgtatttaatgatactaaagaactgggaat

SEQ ID NO: 211772 - DNA, 120 bp, Artificial Sequence
  ENSG00000115808_16 (sequence is synthesized)
ccctgcctctgtggatctagtgagcagtgacccgagccatatggtagcatcattcagcaagggatatacaagcatttttaacatggaaacacaacaacgcattctcactttagaatccaa

SEQ ID NO: 211773 - DNA, 120 bp, Artificial Sequence
  ENSG00000115808_17 (sequence is synthesized)
tgtagatacaacagccaactcttcctgccaaataaatagagtcatcagtcatcctactcttccgatcagcatcactgctcatgaagacaggcacatcaaattctatgataacaatacagg

SEQ ID NO: 211774 - DNA, 120 bp, Artificial Sequence
  ENSG00000115808_18 (sequence is synthesized)
caaactgatccactcgatggtagcccacctagaagctgttacaagtttagcagttgatcccaatggcctttacttgatgtctggcagtcatgactgttcaatacgtttatggaatctaga

SEQ ID NO: 211775 - DNA, 120 bp, Artificial Sequence
  ENSG00000115808_19 (sequence is synthesized)
aagtaagacgtgtatccaagaattcacagctcatcgaaaaaagtttgaagaatcgattcatgatgtagctttccacccatccaaatgctatatagccagtgctggagctgacgcactggc

SEQ ID NO: 211776 - DNA, 120 bp, Artificial Sequence
  ENSG00000115808_20 (sequence is synthesized)
taaagtctttgtatgacgcaatgcatcatcttcaccttctagctgtttataagtaatcaactgcacacaagagatacagaagacgagggcaagaatcatctcgtcctgcccttttgttct

SEQ ID NO: 211777 - DNA, 120 bp, Artificial Sequence
  ENSG00000115808_21 (sequence is synthesized)
gctgaaggagcacagagaacatttgttgaagtatagttttgcaattcatatactgttttctaaaactaaggtttgttcaggttgctgcaagctcagctgaatctgtgagcctgaggtctg

SEQ ID NO: 211778 - DNA, 120 bp, Artificial Sequence
  ENSG00000115808_22 (sequence is synthesized)
tttcaaatttctccccaataggcgcctttatttctgaggtggttctaattcgctaggcaggcctgagcgaatacaagtttagcttgtccctgttgagtaagtagggcatgctacaatgga

SEQ ID NO: 211779 - DNA, 120 bp, Artificial Sequence
  ENSG00000115808_23 (sequence is synthesized)
taatttaaaagcttgatagctgggactgaatagaagaaaacgggaaacttagaccaagttctcccctgagaaatcttgttaaaacacattaagtagtcaaaatagtaatctttatcatat

SEQ ID NO: 211780 - DNA, 120 bp, Artificial Sequence
  ENSG00000115808_24 (sequence is synthesized)
ctgccatattaacccctttgtgtataatgaccaggcagtgttaaactgagtttttaatttgactctcctttcagctgttcacataaagcacctggcaaagcattttacctgttaggggga

SEQ ID NO: 211781 - DNA, 120 bp, Artificial Sequence
  ENSG00000115808_25 (sequence is synthesized)
gaaaaatgcaataatatgttaaatatattattattcagaaatgctagacaaatagtttgcaagcagatttctatattgtattacagttttgaaaacagatttggtatcattctaaagttt

SEQ ID NO: 211782 - DNA, 120 bp, Artificial Sequence
  ENSG00000115808_26 (sequence is synthesized)
agctatcaagcactcaccattgtgaagaatagttgatcgactctgcttttactaacagatttaacttattcaggtttgaaattctgtttatttttaagggtaaacagggcatatctcttt

SEQ ID NO: 211783 - DNA, 120 bp, Artificial Sequence
  ENSG00000115808_27 (sequence is synthesized)
aataatttctattttaaaattcactttattcatgtgacatttatagtaccagagtgattatttcataccaatgaaatcttacttttcagtgactgaaaagatagaatttatttgctaata

SEQ ID NO: 211784 - DNA, 120 bp, Artificial Sequence
  ENSG00000115808_28 (sequence is synthesized)
atcatttatcaacacccacctaatcatgcttcagatgatctgtgctctttcttctttgtcacgttcaagttatctgacatctaccaagaacagttcataattattaatagcccaaagagt

SEQ ID NO: 211785 - DNA, 120 bp, Artificial Sequence
  ENSG00000115808_29 (sequence is synthesized)
atggttaacttcacgcagctgcttttgcagaagcactaataaaaacaaatattttgtaccctagaagtcctctattaatccctgtaagaatctcctggaaacctggatgaaagagtttaa

SEQ ID NO: 211786 - DNA, 120 bp, Artificial Sequence
  ENSG00000115808_30 (sequence is synthesized)
tgccaaatattggctaaaaagttctgtctttctctctccctattcctcccccattgtttaattgagatatacatgttttaatgggcagtggatcagtattgtttctggggaaatccacac

SEQ ID NO: 211787 - DNA, 120 bp, Artificial Sequence
  ENSG00000115808_31 (sequence is synthesized)
cttaaaaggccaggcttccccagcccaacttacctgtgacccacctacatgtgttcaccttttgggattctgaagaccctgctatctagacctagtctcctgtcataaagacattatttc

SEQ ID NO: 211788 - DNA, 120 bp, Artificial Sequence
  ENSG00000115808_32 (sequence is synthesized)
tatagtggtttatgtctctcttactctttgtcccaaatgacagagaccaatctagaaattggaaataaattattaacgtccaactttccaccaaaaaacatataaataggctcttagatt

SEQ ID NO: 211789 - DNA, 120 bp, Artificial Sequence
  ENSG00000115808_33 (sequence is synthesized)
ttaaaaatattaaatctatagatattttaaccaattaaaacaatttctacatattccattccccacattttccatcgtcataacaatgatgcttctcatgatacgtacatctactccttg

SEQ ID NO: 211790 - DNA, 120 bp, Artificial Sequence
  ENSG00000115808_34 (sequence is synthesized)
aaaaagtattctggtggtggtgtggctaatgattgacaaatatttctgtaaaatttctgcctgtttgcctctagaattctgcattatacaggcaaattttctttaaagctagagacttgt

SEQ ID NO: 211791 - DNA, 120 bp, Artificial Sequence
  ENSG00000115808_35 (sequence is synthesized)
gctaaatttgcctgattttcatacagatatgctgtagtaatacagctaccttttcatttcatctttgtgctttggttaacaagcaggctcaagagactgctttgtgtaattaaatgaatt

SEQ ID NO: 211792 - DNA, 120 bp, Artificial Sequence
  ENSG00000115808_36 (sequence is synthesized)
gacctaaacatgagctgtcaggtgaatacttaatatttccatgcagatacagaattccatattgtgttcagtaaatttcttttggttcttcacagtgaagaaagaatgtttctaacctaa

SEQ ID NO: 211793 - DNA, 120 bp, Artificial Sequence
  ENSG00000115808_37 (sequence is synthesized)
catttgtagaaggatactggaaaattccttccaggaaggaaggaaggaagatgccattacttggtgtatttatgatggatgaccacaaagctattgttctaccagttattaattaccttc

SEQ ID NO: 211794 - DNA, 120 bp, Artificial Sequence
  ENSG00000115808_38 (sequence is synthesized)
taagatcttcagttactgctttattaatgtcactgaaattctaaaaaccaggacattcttcccccgttcattttatgcttcatggttgaaatttttctgtcagtgagtggaaaataacca

SEQ ID NO: 211795 - DNA, 120 bp, Artificial Sequence
  ENSG00000115808_39 (sequence is synthesized)
tgagatacatagactgtagcgcaaatggaactgttgaaagttccttagaaagccagtgctgtggcattggagactacggagagagtcttctctaccagcactgcatgatctcagcctaga

SEQ ID NO: 211796 - DNA, 120 bp, Artificial Sequence
  ENSG00000115808_40 (sequence is synthesized)
aatgagccaaagctgtcttccaaccagagtagcatatacatgtgtctgacttttcccctagcctgttgaacattcaatgaaaattcacagaatgaacaaattcaatgtttaaacagccat

SEQ ID NO: 211797 - DNA, 120 bp, Artificial Sequence
  ENSG00000115808_41 (sequence is synthesized)
tgaaatgctttcatagtgcttcatttgtaaatattttgtttgaaatgtattggaatagtatgaaaattagcgggaggtttggatccctgccttattttcatatgctgtggatacatctct

SEQ ID NO: 211798 - DNA, 120 bp, Artificial Sequence
  ENSG00000115808_42 (sequence is synthesized)
gggagcttgcagcacccttctcaaaactcaactgtcatatggagctcatttgctactcaaaccatagacagattatttaacaaaagtgatataatgaccttcagtatttttctattgaac

SEQ ID NO: 211799 - DNA, 120 bp, Artificial Sequence
  ENSG00000115808_43 (sequence is synthesized)
aagtttaacaacttttgccattaaacaaatacttagttatgcaaaatatttcgcttttataatcattttagttatgactaaaacgggggaaattgagctgcatcactgatgatgaacttt

SEQ ID NO: 211800 - DNA, 120 bp, Artificial Sequence
  ENSG00000115808_44 (sequence is synthesized)
gtgagaaattttttttttaatctgactttcattccttcagtattcttgctataaatttcttttggagataatgatgaagatttatttgaaaatgtctaaaatgtatgtatattttataaa

SEQ ID NO: 211801 - DNA, 80 bp, Artificial Sequence
  ENSG00000115808_45 (sequence is synthesized)
tatatatatataaaccataggtgcattttactgttttgtattttcatttttggaggtagtatacacagcagataatgatg

SEQ ID NO: 211802 - DNA, 120 bp, Artificial Sequence
  ENSG00000115808_46 (sequence is synthesized)
tttggaggtagtatacacagcagataatgatgagtatgatgagtgttgtgctgtttgcttttgcagtataatatatagttctaagtgtttaaattactgtatatacaatattcattatag

SEQ ID NO: 211803 - DNA, 120 bp, Artificial Sequence
  ENSG00000115808_47 (sequence is synthesized)
gctagcatgcttgttttaaagactgtcattctagtgtattaaaatctgaatgtaagaaaacctggctattcaaatgtgaattgaaaaatattttattctcagtactgaactatttccatt

SEQ ID NO: 211804 - DNA, 120 bp, Artificial Sequence
  ENSG00000115808_48 (sequence is synthesized)
gaacattcagactttttaacaaaaacaaatatcatcaagaaggcaatagctagaaaatgagaggtgcctttaaaaaaaaaaatgcagccttacagtgaggatgaagattgagtttgggga

SEQ ID NO: 211805 - DNA, 74 bp, Artificial Sequence
  ENSG00000115808_49 (sequence is synthesized)
aatgcagccttacagtgaggatgaagattgagtttggggagggggtgggagggggggcacagagagagagagag

SEQ ID NO: 211806 - DNA, 120 bp, Artificial Sequence
  ENSG00000115808_50 (sequence is synthesized)
aaggtcctgatttgtgaccatcaatgtctttttaatgtatctgctcaacttctaggacttcaggggacatttcatgcgctttgtgctcttctgagcaccatatatactttccaagaattt

SEQ ID NO: 211807 - DNA, 120 bp, Artificial Sequence
  ENSG00000115808_51 (sequence is synthesized)
tgaatgtgaattcctagaaatttcagtagagaaaacaatagctattctttaattatagtaaagttcaggtagaaggagaaattatttgttcaccaaaattatgggatctcattaatgttg

SEQ ID NO: 211808 - DNA, 120 bp, Artificial Sequence
  ENSG00000115808_52 (sequence is synthesized)
gctaagtaaatgtaattttttaaaggctcactttttaatacttcatatatttccctcttacaaaacagcatgtcatgaagttcttatgtggtaaagattcaactagtaaatatttttagg

SEQ ID NO: 211809 - DNA, 120 bp, Artificial Sequence
  ENSG00000115808_53 (sequence is synthesized)
ttaaatacctgaactagttaaaattccacctaagaatagtcttaaaatatttaaaaagcatctctcatatctacctctttgtcattgctgccattttaactgaagcaaatctttatgaca

SEQ ID NO: 211810 - DNA, 120 bp, Artificial Sequence
  ENSG00000115808_54 (sequence is synthesized)
tctgaaatgatggttggatgcaattaaaaaaaaatctatgttggtgcttttctcaggctttgtcatttaagttatattgtattaagatgtcacaaatcagactgaaaggcttagaattaa

SEQ ID NO: 211811 - DNA, 120 bp, Artificial Sequence
  ENSG00000115808_55 (sequence is synthesized)
ttttgtttttctttgaaagaattgcttaaaattaaccatcaatgtttttagcgagtggagataatgaatctttggttggtgtctgtctgtgtgatgttttcaaccaatagccaaataatt

SEQ ID NO: 211812 - DNA, 120 bp, Artificial Sequence
  ENSG00000115808_56 (sequence is synthesized)
attgaacttacatgaaaaagagtgctaagtataattttatttagattactttattctttgaaagtgactacaaggctattaagtacataatcattcattttatttactcagaagttgcct

SEQ ID NO: 211813 - DNA, 120 bp, Artificial Sequence
  ENSG00000115808_57 (sequence is synthesized)
ctccattactgttaacttgtttagtaatttatataattgcagtacttttaagtgttggacactgggattcaggttgtatacaaagtagtagctgacgaaaaatatgtatatttttgtgaa

SEQ ID NO: 211814 - DNA, 120 bp, Artificial Sequence
  ENSG00000115808_58 (sequence is synthesized)
atgtatcaagccctaaagttcattttagagaaaggcccagaaaaacgtatctgtgtttaaaaacaaaggacaggtcattcgtcaatttgaatcatttttacttttgccactacaaacttt

SEQ ID NO: 211815 - DNA, 120 bp, Artificial Sequence
  ENSG00000115808_59 (sequence is synthesized)
ccatcatccaactggatcttcatgtcagtgtcagggatgccaggttgacaaagtatttaacagatcctttcagtttttgttttgtttttttaattctaaaaaaaacaaatgttaggccaa

SEQ ID NO: 211816 - DNA, 120 bp, Artificial Sequence
  ENSG00000115808_60 (sequence is synthesized)
acagatccctagatcccactcattgattctggcggtattcctaaagtggtgcttagggggtcagaattttctggatctttgctaatccaagctttagatttaatttaaccaggaccacat

SEQ ID NO: 211817 - DNA, 120 bp, Artificial Sequence
  ENSG00000115808_61 (sequence is synthesized)
gcttgtcatctctctgatgcaaattttcaaaatcattttaatttagattctaatgtctgcctgggtttttaacaggctgtgaaccagtgagtgccttgttaatgtagaatgatttttccc

SEQ ID NO: 211818 - DNA, 120 bp, Artificial Sequence
  ENSG00000115808_62 (sequence is synthesized)
ccctgggtgggtgttagttagctcctctctgaaaatgtctcagagaatggtattttaattgacttgtagagagctgctaaatttgttattatcagcaatcagaaagtctttggtctacca

SEQ ID NO: 211819 - DNA, 120 bp, Artificial Sequence
  ENSG00000115808_63 (sequence is synthesized)
cacatctccctccctactatctcttcattgtttggctgaagtttgcctcttgtgagaaaacaatacaactccccttctccacacactttttttccagcccagattaataggtatccccta

SEQ ID NO: 211820 - DNA, 120 bp, Artificial Sequence
  ENSG00000115808_64 (sequence is synthesized)
ccctaatcccaactctatgatctaataccttttttaggaggaaccacttctttttaatattgaaatctgctggttactttatgttttctcaagttcagttgactagagctgaccacaggg

SEQ ID NO: 211821 - DNA, 120 bp, Artificial Sequence
  ENSG00000115808_65 (sequence is synthesized)
tgtcatcaattcagattcctaaataaccctttctctccacacccagtcctccagctggtgagccctgggccagattgtttgatcttcaggtattttaaattttagttacatcaattaatg

SEQ ID NO: 211822 - DNA, 120 bp, Artificial Sequence
  ENSG00000115808_66 (sequence is synthesized)
taaattaatccaaatgctaatttttgtggtgcaagaagtttcttatgtaaattcagggtatggataagctaattaagatatccatctttggtggctctaagtgtattatttgtttttaaa

SEQ ID NO: 211823 - DNA, 120 bp, Artificial Sequence
  ENSG00000115808_67 (sequence is synthesized)
taaagtgtacaaatatagataacatgctataggtgtctcatgaattggaatatttgtcagatttgggatctagctgtggctttacagtaatcagttaaattaacatagtctgatttgggg

SEQ ID NO: 211824 - DNA, 120 bp, Artificial Sequence
  ENSG00000115808_68 (sequence is synthesized)
cttttgggggaggagttgtagaggggtgcagagaaataaaaggatattagacaaagtatacatgagtccaaaattaatgaaccagtcttaattactgattgtgaggaaggagaagtttat

SEQ ID NO: 211825 - DNA, 120 bp, Artificial Sequence
  ENSG00000115808_69 (sequence is synthesized)
agagaatttgggcctctgaaaagccaaattaaaatagcttctaggattgggtcagtggtactttcagagacacatatgtttaatgaataggttttatgtttttcaaatgttcagtttaaa

SEQ ID NO: 211826 - DNA, 120 bp, Artificial Sequence
  ENSG00000115808_70 (sequence is synthesized)
tggcttttaaaatttatacacatatataaatacaatgtttttattttttgtttcgctacttaacagacatacacaagccttccacactccctgccccttcaaatcaacattatttttcaa

SEQ ID NO: 211827 - DNA, 120 bp, Artificial Sequence
  ENSG00000115808_71 (sequence is synthesized)
ggcctttggcctgcccagaactcacagtctttttgttccaatcaggatccacaatacaatatgaaatttaaaaggcatctcttctgatatccttgaaactatccaccattgtttggtgtt

SEQ ID NO: 211828 - DNA, 120 bp, Artificial Sequence
  ENSG00000115808_72 (sequence is synthesized)
ctgtatgctggtatactaatgagtattatatcctttggtatgtacacacattttcagtagtgttggaaacacctcttttatctttttaatgagaactgagacatgattagcttgagtaat

SEQ ID NO: 211829 - DNA, 120 bp, Artificial Sequence
  ENSG00000115808_73 (sequence is synthesized)
tttggagatctatctcaggaggtcattaaaactccaaaaattattcacggattgatgaacctcctggggtcagcctaagattgccaggtagtattctgacctcctctgggtttcccaaga

SEQ ID NO: 211830 - DNA, 120 bp, Artificial Sequence
  ENSG00000115808_74 (sequence is synthesized)
tcactgatgttttgcagggccccagcattgtcctggcacataaaatattcccagaacaccttgggagtcaagcataccttttaacctaaacattataatcatggagcatccctccgcctg

SEQ ID NO: 211831 - DNA, 120 bp, Artificial Sequence
  ENSG00000115808_75 (sequence is synthesized)
ttacttctcaggatgaccagaacactccagttctctaaggaagcactgacatacggctctgaaaattggaatccgttttctgaaacacaaattttaactcagtaagttttgtatatcaaa

SEQ ID NO: 211832 - DNA, 120 bp, Artificial Sequence
  ENSG00000115808_76 (sequence is synthesized)
tgattcaaaacccaccaaacataaaatgactcgcttctaagtatcactcaaaccctacaaaacctaaccctttccttattcctaattgatatttcactaaaggtaatggtagtttcagtt

SEQ ID NO: 211833 - DNA, 120 bp, Artificial Sequence
  ENSG00000115808_77 (sequence is synthesized)
agattggaagtcattatttgggtgagcaaagtctgcaataacctactgataggaaggacctatttcatagaaaagtatcttgtccttggtgatttagccattcaccttacgtgaagagtg

SEQ ID NO: 211834 - DNA, 120 bp, Artificial Sequence
  ENSG00000115808_78 (sequence is synthesized)
gtccagatgccagctccacattgactttttctgtgtccctctttaggtaattaacccagtgatgtaaaggagagcccacagtaaaacatctgttaaacagcacttggagtactatagtgt

SEQ ID NO: 211835 - DNA, 120 bp, Artificial Sequence
  ENSG00000115808_79 (sequence is synthesized)
tattaatttatgtgctataatttcttatgccatcataaaatctagtgtatgtaccaggttcccaattcattgcctcaaacaaaagatttttaaaaattctaatagcatcaaattaagggt

SEQ ID NO: 211836 - DNA, 120 bp, Artificial Sequence
  ENSG00000115808_80 (sequence is synthesized)
aatggtagggaaacccatcatccacaattaaatatgcccaaactgaaaactttaagaaaaaaaagcacatggaaagcaacgttttacattaatcgtgagttgtagaaataaacagcttgt

SEQ ID NO: 211837 - DNA, 120 bp, Artificial Sequence
  ENSG00000115808_81 (sequence is synthesized)
ggtttgtatatgtgccgaaatgttaaagtatgctggcatccaactacttccctttggaaatgggaccaagacaataatttttcatgcataaacaaaattaacttagagcaaaagtaattt

SEQ ID NO: 211838 - DNA, 120 bp, Artificial Sequence
  ENSG00000115808_82 (sequence is synthesized)
tatcagaaacagtttattttgggggctggataacttgggtgagagtgtggggaaagaagtaccttaccaaaaaggagaagcaactgaccctgtggcctgagccacattgtcttccatttc

SEQ ID NO: 211839 - DNA, 120 bp, Artificial Sequence
  ENSG00000115808_83 (sequence is synthesized)
aacttcaatgggctggcagtataccacttctgacctcaaagaatgaatggttccaattctggcttgtcattggtccttgttatctaaattaaatatttttaggaaatatatcaaaagtat

SEQ ID NO: 211840 - DNA, 120 bp, Artificial Sequence
  ENSG00000115808_84 (sequence is synthesized)
cctagagccccatggcaaagtgtcagaggaaatagttttcattatattttaggaagctgtaaaaatataagcccaagtattttgtgtcatctgcatatgtcaggatgaagaccaggcatg

SEQ ID NO: 211841 - DNA, 120 bp, Artificial Sequence
  ENSG00000115808_85 (sequence is synthesized)
taagaaatatcctaaagtagccaagtgataatctcatgaaaaaatatgagaatcgtttttacagagtgagttctcttttgaatggttttgactatgcttttaaaaacatttttaaaatgt

SEQ ID NO: 211842 - DNA, 120 bp, Artificial Sequence
  ENSG00000115808_86 (sequence is synthesized)
acttacatctttttcgatagcccacgtatttcagaatatcctcttgatagaataatatcactcagtgtgatttttagaaaaagaaaaactcggtggtctcatatcttttgacagttgttt

SEQ ID NO: 211843 - DNA, 120 bp, Artificial Sequence
  ENSG00000115808_87 (sequence is synthesized)
gtgaataataccctccccaacaaccttcccagtactcaactgctatgtaagaatgctttcttatgtggtaaatgtctcagtattttgctgcctggtatttgttcagtttccttgtatatc

SEQ ID NO: 211844 - DNA, 120 bp, Artificial Sequence
  ENSG00000115808_88 (sequence is synthesized)
tcagggtcagaaggaatcaggctttctcccaactctgaaacattcagacttactttctttttggtcagccttttaacaagcaagacaataaactccttttgtcagaatcgatttgattaa

SEQ ID NO: 211845 - DNA, 120 bp, Artificial Sequence
  ENSG00000115808_89 (sequence is synthesized)
aaaaaaaaaaaaagaatgtgctccttatttctcattgctgtagaatacgtaggaatacacatctactaatcacaattaaaaaataagagaatctttagaaacatcattgctttctggagg

SEQ ID NO: 211846 - DNA, 120 bp, Artificial Sequence
  ENSG00000115808_90 (sequence is synthesized)
tagaaattttgaacttgaaggttgtagttccaggcaattttgtgcccttgaggtgtccaattgatagtatagcttgcctctgctaataaatacacaaaagttttctttcctgtgattttc

SEQ ID NO: 211847 - DNA, 120 bp, Artificial Sequence
  ENSG00000115808_91 (sequence is synthesized)
agaaattatttttggaatacaaagattaataaggaatatgtgatgtttatctcctgcatttcaaaatcttctggattttttttgaggcatgaggagcaggtaatgagattttttttctga

SEQ ID NO: 211848 - DNA, 120 bp, Artificial Sequence
  ENSG00000115808_92 (sequence is synthesized)
atatcttgattctctcccttaacccagattttgcatattatgcattgctcatttgtcacctacaaaaataaaggttaatgattatttgtttgcttttgtctatataagctccctaaggca

SEQ ID NO: 211849 - DNA, 120 bp, Artificial Sequence
  ENSG00000115808_93 (sequence is synthesized)
cagaccatgttcgtttttcttatgttcctcttagcactgtgcctggtgccttgccatataaaaggtaccctataaatatttgttggctgagtaatcagagagcccatttcaaaatctaaa

SEQ ID NO: 211850 - DNA, 120 bp, Artificial Sequence
  ENSG00000115808_94 (sequence is synthesized)
ttatacaaatcatcaaagaccaaaaaaaaaaaaaaaaaatctcttgacagttgatgctcaaatgcatttggttctgtggagcttatcctgagattgaggtctgcaccttgactggagagg

SEQ ID NO: 211851 - DNA, 120 bp, Artificial Sequence
  ENSG00000115808_95 (sequence is synthesized)
aatttggactttacctcacaggtagcaacaaaatgcctgagtagcaacgtctttatactgcacagttccagtcctgcctgcgtgaaaactgagcagagcatggtggggacaggaaggtgt

SEQ ID NO: 211852 - DNA, 120 bp, Artificial Sequence
  ENSG00000115808_96 (sequence is synthesized)
ccctaaaccctgttgatgacctcccatctatccccggacccccatatctcctctgctcatcccctgttccccactggcctctgatcagttgaaagggagcttttctagcctggaacctga

SEQ ID NO: 211853 - DNA, 120 bp, Artificial Sequence
  ENSG00000115808_97 (sequence is synthesized)
gcctgccttgattatcctgggctcagaacaggtccacttccacactctttccttgcaacctacagatggccctactgactgctgttgtccaggagaaagacgaacctcccagtggaatct

SEQ ID NO: 211854 - DNA, 120 bp, Artificial Sequence
  ENSG00000115808_98 (sequence is synthesized)
tgtcaggaaaggcatccctctggggagctttctttggagaggaaaattctgggacaaagttcctcaggatgctctcaggctggtttttgtcttgaagattttatagtaattgtaccaatg

SEQ ID NO: 211855 - DNA, 120 bp, Artificial Sequence
  ENSG00000115808_99 (sequence is synthesized)
tttattaactctcctaggaacatctctgtctttggttttctgacagcactccagcagggcccagggctttagctgaacagtgcaattgttttaggaataaaacagtcaacaagttagaga

SEQ ID NO: 211856 - DNA, 120 bp, Artificial Sequence
  ENSG00000115808_100 (sequence is synthesized)
ccaactatttatatttaatattcaaatgactttaaatcattaaaagaatcagcaaattacatatgaaatattcaacgaataatctcaacattaaacatataccatgtaagaactgtcatt

SEQ ID NO: 211857 - DNA, 120 bp, Artificial Sequence
  ENSG00000115808_101 (sequence is synthesized)
aaaattactaaaaatatgattcctttaagatcagttcaacacagaagaaagcaggaatttggcctggacaataggacatttattgtctgttagattttagacaagtcaactcttctaaat

SEQ ID NO: 211858 - DNA, 120 bp, Artificial Sequence
  ENSG00000115808_102 (sequence is synthesized)
tggcttctcatctatgaaatggggataatagatctgcctaattaggttgatttgagataacggatgtaaaacacctaataaaataagcatccagcaaatgacttgttcactctctgaata

SEQ ID NO: 211859 - DNA, 120 bp, Artificial Sequence
  ENSG00000115808_103 (sequence is synthesized)
cagacttctggtcatgtagttcggtcacactcctgatagcttctagaacatcagggttttaggagaaataggttaaaatgaacatcaagagtagcagaagactactttccttaatatttg

SEQ ID NO: 211860 - DNA, 120 bp, Artificial Sequence
  ENSG00000115808_104 (sequence is synthesized)
agtgccagctatatgccacacagttctagttgctggcagtcagcagtaaacaaaaacttcacctgatgcagcacattccaggtgggggaacaagtgaaaatatagggaatattagtgata

SEQ ID NO: 211861 - DNA, 120 bp, Artificial Sequence
  ENSG00000115808_105 (sequence is synthesized)
agtgcagagggaaaaaaaatagagcagggaagggggatgatttgatgtttttcaggttaagaaagtgacagaaatgaatttaaatgcaaaaaacaatgcataaagattcataatggcaaa

SEQ ID NO: 211862 - DNA, 120 bp, Artificial Sequence
  ENSG00000115808_106 (sequence is synthesized)
acgaagcatgtcccatcataccccttcattcctacctccctgatatgtatctttctaattattcatacaaatgtgtatacccagttattacatatggggttttattctacatattatgct

SEQ ID NO: 211863 - DNA, 120 bp, Artificial Sequence
  ENSG00000115808_107 (sequence is synthesized)
gcacttgctttttctaatataatgtgtatcatgagcaccttacaaatttttaaaggtctctcaaatttatcagtaaacatatacagtctaacgttaatgagaagatattttggtgggcag

SEQ ID NO: 211864 - DNA, 120 bp, Artificial Sequence
  ENSG00000115808_108 (sequence is synthesized)
tttgctttaaataaatgggatcatgtacgttctctgcatctcacatttctcatttaacaatgtaggatgagaatttctctaagtctatcatagctcttatttcctttttattattacaat

SEQ ID NO: 211865 - DNA, 120 bp, Artificial Sequence
  ENSG00000115808_109 (sequence is synthesized)
aaacattcctgtgtatatgtttgtcaccatgatggttttacgtctgcggaatagattccctggagtaggattgctgcattgaggagtatgtatatttaaatttttaaataaatattgaca

SEQ ID NO: 211866 - DNA, 120 bp, Artificial Sequence
  ENSG00000115808_110 (sequence is synthesized)
gattgtttcccaaagtggccggaacagtttttatttccatcagtaaatgtataaaaacacttttcccttaatactcatggcaataactattgtaacattaaaaaatacgtagaaaaaaga

SEQ ID NO: 211867 - DNA, 120 bp, Artificial Sequence
  ENSG00000115808_111 (sequence is synthesized)
aaaaaatcctggtggatgtagtgatttttcagtgttattttaatttccattttcctgactactataaatgtagacatcttttcaaatgttttggtcatctggattgcactcagaactgaa

SEQ ID NO: 211868 - DNA, 120 bp, Artificial Sequence
  ENSG00000115808_112 (sequence is synthesized)
ttatctattcaaagttctgtaggttagaactccagggaaactcaactgggctgtctgttcaaggcccaacaaggctgaaatgaaagtgtcttccagggtgggtactcaactaaagctctg

SEQ ID NO: 211869 - DNA, 120 bp, Artificial Sequence
  ENSG00000115808_113 (sequence is synthesized)
aggaggaattcgcttccagcctcattaaagtcagaggatggaggtccctgtctcctagctgactgtcaaatctgatcctttagaggttgctccgtggtccttgcacgtggtcccttccac

SEQ ID NO: 211870 - DNA, 120 bp, Artificial Sequence
  ENSG00000115808_114 (sequence is synthesized)
cttcaaagcttgccagggtgcatcaaattatttttatactttgactctacttctaccagccagagaaaactgcttttaaagggctcttgtgactagtttaagcacacccagattgttaag

SEQ ID NO: 211871 - DNA, 120 bp, Artificial Sequence
  ENSG00000115808_115 (sequence is synthesized)
gtcaactgattagtagctttaattacatctgccaagtccctctgccctgcaatgtaacatcaaccatggaagtaacatgaggggcagagttcatgggggccatcttagaattctgcctac

SEQ ID NO: 211872 - DNA, 120 bp, Artificial Sequence
  ENSG00000115808_116 (sequence is synthesized)
cacaaatattcgtagttatacttttatatacatttttaaatttttcttatttttggtccatatgtttgtaccgtttgtctttttagttaactagtttgtgaaagcattttgtatgttgta

SEQ ID NO: 211873 - DNA, 120 bp, Artificial Sequence
  ENSG00000115808_117 (sequence is synthesized)
caatatatgttcagattttcttatcttggatgcaaacatttttttccaactcttgtaagttgtctgttgaccacattcaaaagtactttttccaaataaaactttgccttttgaatttca

SEQ ID NO: 211874 - DNA, 120 bp, Artificial Sequence
  ENSG00000115808_118 (sequence is synthesized)
cggccgccatggacgagcaggcgggtcccggcgtcttcttcagcaacaaccacccgggcgccggcggtgccaaggggctcgggcctctggcgggggcggcccgagcccagtacagtctcc

SEQ ID NO: 211875 - DNA, 120 bp, Artificial Sequence
  ENSG00000115808_119 (sequence is synthesized)
gcaagagacagctccatctgcagctggaagattatttattaacaagtcttactagcatagtactgtactgttaagtcttatgcaggcaatgagtttaaataaatacttttatttacatat

SEQ ID NO: 211876 - DNA, 120 bp, Artificial Sequence
  ENSG00000115816_0 (sequence is synthesized)
gagtttcacgcgcgtatgctttgcccgccatggccgcagtcaaggagcctttggagttccatgccaagcggccttggcgccccgaggaggcagtagaagatccggacgaggaggatgagg

SEQ ID NO: 211877 - DNA, 120 bp, Artificial Sequence
  ENSG00000115816_1 (sequence is synthesized)
ataatactagtgaagccgagaatgggttctccctggaggaagtgttacggctcggaggcaccaagcaagattaccttatgctggctactttggatgagaatgaggaagtgatagatggag

SEQ ID NO: 211878 - DNA, 120 bp, Artificial Sequence
  ENSG00000115816_2 (sequence is synthesized)
gcaaaaaaggagcaatcgatgaccttcagcaaggtgaattggaagcatttattcaaaatcttaatttggcgaagtatacaaaagcttccttagttgaagaagatgaaccagctgaaaaag

SEQ ID NO: 211879 - DNA, 120 bp, Artificial Sequence
  ENSG00000115816_3 (sequence is synthesized)
aaaattccagcaaaaaagaagtaaaaatacctaaaataaataataaaaatacagcagaaagtcaaaggacatcagttaataaggtgaaaaataagaataggccagaaccacattctgatg

SEQ ID NO: 211880 - DNA, 120 bp, Artificial Sequence
  ENSG00000115816_4 (sequence is synthesized)
agaatggcagtaccacaccgaaagtaaagaaagataaacagaacatctttgaattttttgagagacagactttgttacttaggcctggaggcaaatggtatgatctggagtacagcaatg

SEQ ID NO: 211881 - DNA, 120 bp, Artificial Sequence
  ENSG00000115816_5 (sequence is synthesized)
aatattctttgaaaccccagcctcaggatgttgtatctaagtacaaaacccttgctcagaagctgtatcagcatgaaatcaacttattcaaaagtaagacgaatagtcaaaagggagcct

SEQ ID NO: 211882 - DNA, 120 bp, Artificial Sequence
  ENSG00000115816_6 (sequence is synthesized)
cttctacctggatgaaggcaattgtgtcatcggggacactaggtgacaggatggcagccatgattcttcttattcaggatgatgccgttcacacacttcagtttgtagaaactcttgtga

SEQ ID NO: 211883 - DNA, 120 bp, Artificial Sequence
  ENSG00000115816_7 (sequence is synthesized)
accttgttaaaaagaagggcagcaaacagcagtgccttatggccttggatactttcaaagagttgcttatcacagaccttttgccagacaatcggaagctgaggattttcagccagcgtc

SEQ ID NO: 211884 - DNA, 120 bp, Artificial Sequence
  ENSG00000115816_8 (sequence is synthesized)
cttttgacaaactggaacagttgtccagtggcaacaaggactcaagagatagaagactgatattatggtattttgaacaccagctgaaacacttagtggctgaatttgtgcaggtcttag

SEQ ID NO: 211885 - DNA, 120 bp, Artificial Sequence
  ENSG00000115816_9 (sequence is synthesized)
aaactttaagtcatgatacattagtaaccactaaaactcgagcccttaccgtggctcatgagctgctttgtaacaagcctgaggaagaaaaggctcttcttgtgcaagtggtaaataaac

SEQ ID NO: 211886 - DNA, 120 bp, Artificial Sequence
  ENSG00000115816_10 (sequence is synthesized)
tgggagatcctcagaacagaattgccacaaaagcatcccatctgttagagacattactttgtaaacatcccaatatgaaaggagttgtgtctggtgaagtagaaaggctactcttccgct

SEQ ID NO: 211887 - DNA, 120 bp, Artificial Sequence
  ENSG00000115816_11 (sequence is synthesized)
caaatatcagctccaaagctcaatattatgcaatttgctttttaaatcaaatggctctgtcccatgaagaaagtgaattggctaacaaattaataactgtttacttttgcttttttcgga

SEQ ID NO: 211888 - DNA, 120 bp, Artificial Sequence
  ENSG00000115816_12 (sequence is synthesized)
cttgtgtcaaaaaaaaagatgttgaatcaaaaatgcttagcgcccttttaacaggtgtgaatagggcatacccttattcccagactggtgatgacaaagtaagggagcagattgacacac

SEQ ID NO: 211889 - DNA, 120 bp, Artificial Sequence
  ENSG00000115816_13 (sequence is synthesized)
agcattatacaggaagatgttggatccagggttgatgacgtgttccaagcaagctatgtttcttaaccttgtctacaaatctctgaaagctgacattgtgttgcgccgggtgaaggcttt

SEQ ID NO: 211890 - DNA, 120 bp, Artificial Sequence
  ENSG00000115816_14 (sequence is synthesized)
tgtgaagaggttacttcaagttacttgtcaacagatgccaccatttatatgtggagctttatatcttgtgtctgagatccttaaagcaaaaccaggtttaagaagccaactagatgatca

SEQ ID NO: 211891 - DNA, 120 bp, Artificial Sequence
  ENSG00000115816_15 (sequence is synthesized)
tccggagtctgatgatgaagaaaattttattgatgcaaatgatgatgaagacatggaaaaattcactgatgcagacaaagaaacagagatagtgaaaaaacttgagacagaggaaacagt

SEQ ID NO: 211892 - DNA, 120 bp, Artificial Sequence
  ENSG00000115816_16 (sequence is synthesized)
tcctgaaactgatgtagaaaccaaaaaaccagaggttgcttcctgggtgcactttgataatttgaaaggtgggaaacagttaaataaatacgatccattcagtagaaaccctctgttctg

SEQ ID NO: 211893 - DNA, 120 bp, Artificial Sequence
  ENSG00000115816_17 (sequence is synthesized)
tggagctgaaaatacaagtctttgggaactcaaaaagttatctgtgcattttcatccctccgtggccctttttgcaaagaccatccttcagggaaactatattcagtattcaggggaccc

SEQ ID NO: 211894 - DNA, 120 bp, Artificial Sequence
  ENSG00000115816_18 (sequence is synthesized)
actgcaggatttcactctaatgagatttttggatcgatttgtataccgaaatccaaagccccataaaggcaaagaaaacacagatagtgttgtgatgcagccgaaaagaaaacattttat

SEQ ID NO: 211895 - DNA, 120 bp, Artificial Sequence
  ENSG00000115816_19 (sequence is synthesized)
taaggatattcgtcatcttcctgtgaacagtaaggagttccttgcaaaagaagaaagccaaataccagtggatgaagtgtttttccacaggtattataaaaaagttgctgttaaagagaa

SEQ ID NO: 211896 - DNA, 120 bp, Artificial Sequence
  ENSG00000115816_20 (sequence is synthesized)
acaaaaacgggatgcagatgaagaaagtatagaagacgtggatgatgaagaatttgaagagctgattgacacatttgaagatgataactgtttcagctctggaaaggatgatatggattt

SEQ ID NO: 211897 - DNA, 120 bp, Artificial Sequence
  ENSG00000115816_21 (sequence is synthesized)
tgctggaaacgtgaaaaagagaacaaaaggagctaaggataacacattagatgaagattcagaaggtagtgatgatgaacttggtaacctggatgacgatgaagtttctttaggaagtat

SEQ ID NO: 211898 - DNA, 120 bp, Artificial Sequence
  ENSG00000115816_22 (sequence is synthesized)
ggatgatgaagaatttgctgaagttgatgaagatggaggaacattcatggatgtgttagatgatgaaagtgagagcgttccagaacttgaagtccactccaaagtcagtactaagaaaag

SEQ ID NO: 211899 - DNA, 120 bp, Artificial Sequence
  ENSG00000115816_23 (sequence is synthesized)
caagagaaaaggtacagatgattttgactttgctggctcatttcaagggccaagaaaaaagaaaagaaacttaaatgattccagcctatttgtatctgctgaagagtttggccatctatt

SEQ ID NO: 211900 - DNA, 120 bp, Artificial Sequence
  ENSG00000115816_24 (sequence is synthesized)
ggatgaaaatatgggatccaagtttgataacattggcatgaatgccatggctaacaaagataatgcaagtctcaaacagcttagatgggaggctgaacgtgatgactggctacacaacag

SEQ ID NO: 211901 - DNA, 120 bp, Artificial Sequence
  ENSG00000115816_25 (sequence is synthesized)
agatgcaaaaagtatcatcaagaaaaagaaacattttaaaaagaagaggattaaaaccactcaaaaaactaaaaaacaaaggaaatgagttattaatgtaaattatagattaaaattcta

SEQ ID NO: 211902 - DNA, 120 bp, Artificial Sequence
  ENSG00000115816_26 (sequence is synthesized)
cttacatctaatttttgctgttcaaccatgttttttgatctagctctctgattccatacattccagacttctcagtggatttgtaataaactataaataaaaatagctctcatttataaa

SEQ ID NO: 211903 - DNA, 120 bp, Artificial Sequence
  ENSG00000115816_27 (sequence is synthesized)
gttccgaaggtggctaggctgactgccccgccgcttccgcgctgcgtagagcgcgggcgtccaggaccgagatcccagcctctgaagcatgtgttcgcaagattaccttatgctggctac

SEQ ID NO: 211904 - DNA, 120 bp, Artificial Sequence
  ENSG00000115825_0 (sequence is synthesized)
atagaaaagttcatccccccagaatgaaaatgaggacatttgagaaggtgatttaaggtgtggacatttgagaaggtgtcctatcaaattagtaaaccaaaggaaaagtactgaatagat

SEQ ID NO: 211905 - DNA, 120 bp, Artificial Sequence
  ENSG00000115825_1 (sequence is synthesized)
taatccaaaacacttactgttttttaaacgaagaggatttcaccttgacagaaaaacaacttttattcaatatgtatttcctgaaattaaagagacaagtacagactgaaaggaaaatag

SEQ ID NO: 211906 - DNA, 120 bp, Artificial Sequence
  ENSG00000115825_2 (sequence is synthesized)
attcgtaaataagctacgtcaactctatcctgctgaggatagctcagtgatgttaaatcctttacaaatccctggttgtcttcctacagacaagactgctttttgatgggactgatatta

SEQ ID NO: 211907 - DNA, 120 bp, Artificial Sequence
  ENSG00000115825_3 (sequence is synthesized)
agagaaataggacctttggggcattcaactccttgataaaacttaaaagtatcggcatgagtggcttaacagaggaaataaagaagttttcaactaaatccaaaagtgcggtcattttct

SEQ ID NO: 211908 - DNA, 120 bp, Artificial Sequence
  ENSG00000115825_4 (sequence is synthesized)
ttactgctgttattttaaaaacctcttcataaccattgaaaaagaatcgacaactattttaaaagattaaagaaaggcagatgtctgcaaataattcccctccatcagcccagaagtctg

SEQ ID NO: 211909 - DNA, 120 bp, Artificial Sequence
  ENSG00000115825_5 (sequence is synthesized)
tattacccacagctattcctgctgtgcttccagctgcttctccgtgttcaagtcctaagacgggactctctgcccgactctctaatggaagcttcagtgcaccatcactcaccaactcca

SEQ ID NO: 211910 - DNA, 120 bp, Artificial Sequence
  ENSG00000115825_6 (sequence is synthesized)
gaggctcagtgcatacagtttcatttctactgcaaattggcctcacacgggagagtgttaccattgaagcccaggaactgtctttatctgctgtcaaggatcttgtgtgctccatagttt

SEQ ID NO: 211911 - DNA, 120 bp, Artificial Sequence
  ENSG00000115825_7 (sequence is synthesized)
atcaaaagtttccagagtgtggattctttggcatgtatgacaaaattcttctctttcgccatgacatgaactcagaaaacattttgcagctgattacctcagcagatgaaatacatgaag

SEQ ID NO: 211912 - DNA, 120 bp, Artificial Sequence
  ENSG00000115825_8 (sequence is synthesized)
gagacctagtggaagtggttctttcagctttagccacagtagaagacttccagattcgtccacatactctctatgtacattcttacaaagctcctactttctgtgattactgtggtgaga

SEQ ID NO: 211913 - DNA, 120 bp, Artificial Sequence
  ENSG00000115825_9 (sequence is synthesized)
tgctctggggattggtacgtcaaggactgaaatgtgaaggctgtggattaaattaccataaacgatgtgccttcaagattccaaataactgtagtggagtaagaaagagacgtctgtcaa

SEQ ID NO: 211914 - DNA, 120 bp, Artificial Sequence
  ENSG00000115825_10 (sequence is synthesized)
atgtatctttaccaggacccggcctctcagttccaagacccctacagcctgaatatgtagcccttcccagtgaagagtcacatgtccaccaggaaccaagtaagagaattccttcttgga

SEQ ID NO: 211915 - DNA, 120 bp, Artificial Sequence
  ENSG00000115825_11 (sequence is synthesized)
gtggtcgcccaatctggatggaaaagatggtaatgtgcagagtgaaagttccacacacatttgctgttcactcttacacccgtcccacgatatgtcagtactgcaagcggttactgaaag

SEQ ID NO: 211916 - DNA, 120 bp, Artificial Sequence
  ENSG00000115825_12 (sequence is synthesized)
gcctctttcgccaaggaatgcagtgtaaagattgcaaattcaactgccataaacgctgtgcatcaaaagtaccaagagactgccttggagaggttactttcaatggagaaccttccagtc

SEQ ID NO: 211917 - DNA, 120 bp, Artificial Sequence
  ENSG00000115825_13 (sequence is synthesized)
tgggaacagatacagatataccaatggatattgacaataatgacataaatagtgatagtagtcggggtttggatgacacagaagagccatcacccccagaagataagatgttcttcttgg

SEQ ID NO: 211918 - DNA, 120 bp, Artificial Sequence
  ENSG00000115825_14 (sequence is synthesized)
atccatctgatctcgatgtggaaagagatgaagaagccgttaaaacaatcagtccatcaacaagcaataatattccgctaatgagggttgtacaatccatcaagcacacaaagaggaaga

SEQ ID NO: 211919 - DNA, 120 bp, Artificial Sequence
  ENSG00000115825_15 (sequence is synthesized)
gcagcacaatggtgaaggaagggtggatggtccattacaccagcagggataacctgagaaagaggcattattggagacttgacagcaaatgtctaacattatttcagaatgaatctggat

SEQ ID NO: 211920 - DNA, 120 bp, Artificial Sequence
  ENSG00000115825_16 (sequence is synthesized)
caaagtattataaggaaattccactttcagaaattctccgcatatcttcaccacgagatttcacaaacatttcacaaggcagcaatccacactgttttgaaatcattactgatactatgg

SEQ ID NO: 211921 - DNA, 120 bp, Artificial Sequence
  ENSG00000115825_17 (sequence is synthesized)
tatacttcgttggtgagaacaatggggacagctctcataatcctgttcttgctgccactggagttggacttgatgtagcacagagctgggaaaaagcaattcgccaagccctcatgcctg

SEQ ID NO: 211922 - DNA, 120 bp, Artificial Sequence
  ENSG00000115825_18 (sequence is synthesized)
ttactcctcaagcaagtgtttgcacttctccagggcaagggaaagatcacaaagatttgtctacaagtatctctgtatctaattgtcagattcaggagaatgtggatatcagtactgttt

SEQ ID NO: 211923 - DNA, 120 bp, Artificial Sequence
  ENSG00000115825_19 (sequence is synthesized)
accagatctttgcagatgaggtgcttggttcaggccagtttggcatcgtttatggaggaaaacatagaaagactgggagggatgtggctattaaagtaattgataagatgagattcccca

SEQ ID NO: 211924 - DNA, 120 bp, Artificial Sequence
  ENSG00000115825_20 (sequence is synthesized)
caaaacaagaaagtcaactccgtaatgaagtggctattttacagaatttgcaccatcctgggattgtaaacctggaatgtatgtttgaaaccccagaacgagtctttgtagtaatggaaa

SEQ ID NO: 211925 - DNA, 120 bp, Artificial Sequence
  ENSG00000115825_21 (sequence is synthesized)
agctgcatggagatatgttggaaatgattctatccagtgagaaaagtcggcttccagaacgaattactaaattcatggtcacacagatacttgttgctttgaggaatctgcattttaaga

SEQ ID NO: 211926 - DNA, 120 bp, Artificial Sequence
  ENSG00000115825_22 (sequence is synthesized)
atattgtgcactgtgatttaaagccagaaaatgtgctgcttgcatcagcagagccatttcctcaggtgaagctgtgtgactttggatttgcacgcatcattggtgaaaagtcattcagga

SEQ ID NO: 211927 - DNA, 120 bp, Artificial Sequence
  ENSG00000115825_23 (sequence is synthesized)
gatctgtggtaggaactccagcatacttagcccctgaagttctccggagcaaaggttacaaccgttccctagatatgtggtcagtgggagttatcatctatgtgagcctcagtggcacat

SEQ ID NO: 211928 - DNA, 120 bp, Artificial Sequence
  ENSG00000115825_24 (sequence is synthesized)
tgaccaaatccaaaatgctgcatttatgtacccaccaaatccatggagagaaatttctggtgaagcaattgatctgataaacaatctgcttcaagtgaagatgagaaaacgttacagtgt

SEQ ID NO: 211929 - DNA, 120 bp, Artificial Sequence
  ENSG00000115825_25 (sequence is synthesized)
tgacaaatctcttagtcatccctggctacaggactatcagacttggcttgaccttagagaatttgaaactcgcattggagaacgttacattacacatgaaagtgatgatgctcgctggga

SEQ ID NO: 211930 - DNA, 120 bp, Artificial Sequence
  ENSG00000115825_26 (sequence is synthesized)
aatacatgcatacacacataaccttgtatacccaaagcacttcattatggctcctaatccagatgatatggaagaagatccttaatcactgagctaacctaaataaggaaggatttcatt

SEQ ID NO: 211931 - DNA, 120 bp, Artificial Sequence
  ENSG00000115825_27 (sequence is synthesized)
ttatggactgatattttgctgtgtaacttgttctttgtagattgtcatctgcagtgctgcaaagatatgaagaaatatgataacgaataagtgacaccagtactgtagttcataatgagt

SEQ ID NO: 211932 - DNA, 120 bp, Artificial Sequence
  ENSG00000115825_28 (sequence is synthesized)
aggtacaggcgggaaactgaataataagaagtcataatggaatcaaggtgaagctttttataaacttttttagcctaagcaataactggttttgtattttttcttaatccttcactttaa

SEQ ID NO: 211933 - DNA, 120 bp, Artificial Sequence
  ENSG00000115825_29 (sequence is synthesized)
tacaataggctcacttaatttgtcttcccatttctctttatatatatatatataaatataaatatatgtttgtttgtttttttaatgaaaaacaagtcaagctagcatccagttactata

SEQ ID NO: 211934 - DNA, 120 bp, Artificial Sequence
  ENSG00000115825_30 (sequence is synthesized)
tagcttggctaaattatacaagacttacaagattgattactcgacaggcttgtatttaagaggtaactgtgaggttaccattatgtgatgttactataaggacttttaacattggtttaa

SEQ ID NO: 211935 - DNA, 120 bp, Artificial Sequence
  ENSG00000115825_31 (sequence is synthesized)
caaaccatagaggcattgaagggtttttcttagatgcctagaaaaagcgcactgggctgttttacctttcttttttaggtcaatcaagactccaaaatagtgattcctaacctttttgga

SEQ ID NO: 211936 - DNA, 120 bp, Artificial Sequence
  ENSG00000115825_32 (sequence is synthesized)
gttgctctgctactctgaatatgttctatacagcataaggattgtcaccttctgtgtgttgcaacagcttctaagataattagggacaaatgatgttacaaaaggaagagtactgctggt

SEQ ID NO: 211937 - DNA, 120 bp, Artificial Sequence
  ENSG00000115825_33 (sequence is synthesized)
ctaagtgctgagttgtatgtctttgcatagctccactctgctgctaaatatgcatgttctgactgacaccatcttgatgccagtactggattccagcattcagcaggtgcagatctcggc

SEQ ID NO: 211938 - DNA, 120 bp, Artificial Sequence
  ENSG00000115825_34 (sequence is synthesized)
tttacacaatttatctttacctagggttcagtcagtaatttctgctttttagcagggccagtgcagggtcagttaatgctacagttactgtatagcaaacagtatccttttttctccttc

SEQ ID NO: 211939 - DNA, 120 bp, Artificial Sequence
  ENSG00000115825_35 (sequence is synthesized)
ccctagcctattgggctttgcagatatctggagtgttttaaagtcaattattttaagcagtttgaggggatgtgtaggagtggagcatgaaacagtttataaggctggggctgtattatc

SEQ ID NO: 211940 - DNA, 120 bp, Artificial Sequence
  ENSG00000115825_36 (sequence is synthesized)
agcacagcaaattaaagaatgaaagaagtacttctttttacatttcagctccagcagccagctatttaaaaaatatttttaaatatcttccccaaagtttaagatgtgggaccatctact

SEQ ID NO: 211941 - DNA, 120 bp, Artificial Sequence
  ENSG00000115825_37 (sequence is synthesized)
tgtaagaaacagtggcttatttcttcatttctcagtaatcattgtaaacctttttttttttcttctccactctaacaaaagtaaaagaacaaaacttttgctgaggtcttggactccact

SEQ ID NO: 211942 - DNA, 120 bp, Artificial Sequence
  ENSG00000115825_38 (sequence is synthesized)
acttgttagttatgttggcctggacagatggcaggtctgtcggcagttcctcagtctgtaaaatgaagattatcattcttgcctctccctttgtcacagtgttgtcgtgaagatcagata

SEQ ID NO: 211943 - DNA, 120 bp, Artificial Sequence
  ENSG00000115825_39 (sequence is synthesized)
tgtatgaatgcagtcaaataaactaaaaactaggaaagtgttaactatcgttgcccaccgaatttgaggtagcaaaaaaaaaaaagaatgttctggtacatgaacagactgagaaggcct

SEQ ID NO: 211944 - DNA, 120 bp, Artificial Sequence
  ENSG00000115825_40 (sequence is synthesized)
ttcgacatccctgaagctagtctcctgtctagactaaaaatatccttgaaagaatagtagcaaacagtatgcagtactcctgtgttctaagttcttttatgttttagtttaccctcacag

SEQ ID NO: 211945 - DNA, 120 bp, Artificial Sequence
  ENSG00000115825_41 (sequence is synthesized)
cagccatagtgttaagtcattatgagcttcatcttaaagataagaaaactgaggcaaggggagattaacttactgccaaatttcaaacagttagtagtatttgagaccagtagtatggct

SEQ ID NO: 211946 - DNA, 120 bp, Artificial Sequence
  ENSG00000115825_42 (sequence is synthesized)
ctaatcttacccttagccctcccaaccattatgctgtactatctacccataaatacctccaggaaacattcccctcttggtaatttgtccttctatagaagcttcaaagattaaatcaaa

SEQ ID NO: 211947 - DNA, 120 bp, Artificial Sequence
  ENSG00000115825_43 (sequence is synthesized)
ttaattttcaaaaaaaatttttttttagaaatgttattttccctgtgatagaggatgacttcccagtttcaccaaagtctgtttatatcaacacacacaaaatggaataattctgagtca

SEQ ID NO: 211948 - DNA, 120 bp, Artificial Sequence
  ENSG00000115825_44 (sequence is synthesized)
ctaggcaatcaatctactgtggttttactatgtaaggtgaaaattaactggaacgatgtttgtttgctatacttacatagtcaaactttacaagccatgaaattaattgcactctttgta

SEQ ID NO: 211949 - DNA, 120 bp, Artificial Sequence
  ENSG00000115825_45 (sequence is synthesized)
tttgttgttaaatgcctaagaagttttctaaaaattttgtaaaggcactgtcagagaatctggagttgaatgattattccagatactgtataacctgcataactttttgtctttaagtcg

SEQ ID NO: 211950 - DNA, 120 bp, Artificial Sequence
  ENSG00000115825_46 (sequence is synthesized)
tgtttgtaaaagaagtaattgctagaaacatttgataatgtacaaagtagtctataatgactgttcagtacatttttaatatttttttggttatatccaactttttgtaaatatactgga

SEQ ID NO: 211951 - DNA, 120 bp, Artificial Sequence
  ENSG00000115825_47 (sequence is synthesized)
agcttgataataaaatgtatttcctatcaccatacttttccatgtgaaaacctgagcctatttctagtataagtatccaaagaaaagtttgacctggttgtgttattttaccagaccttg

SEQ ID NO: 211952 - DNA, 120 bp, Artificial Sequence
  ENSG00000115825_48 (sequence is synthesized)
gtaaaagaactattttggaaacagtatttgtaaatggaactaatgctatatttaaaaacactgatttttttttaacctgccaaaaataaaaaaaagctcattttataattttctactaaa

SEQ ID NO: 211953 - DNA, 120 bp, Artificial Sequence
  ENSG00000115825_49 (sequence is synthesized)
ctttgtggtctacagccacaccaccccaaatgtgcctgatcttgtctgatcttggaagctaagcattgttgggcctagttaggacctggataggagaaatcccttatggctaactatatg

SEQ ID NO: 211954 - DNA, 120 bp, Artificial Sequence
  ENSG00000115825_50 (sequence is synthesized)
agctttaactggtagtagaaatggcaataaagaatatactcatgaagatgttgcacaaggataatggtgatgaagtttagggcagttttcatattgccacagttaatccgactattagca

SEQ ID NO: 211955 - DNA, 120 bp, Artificial Sequence
  ENSG00000115825_51 (sequence is synthesized)
ttttgtaaaaatactattagactgtaaaaccattctaaatatgccactatgttcatagaaattcaatttttgtagcctaaatgatatactaccttgtagcaaaatgtccccattttggca

SEQ ID NO: 211956 - DNA, 120 bp, Artificial Sequence
  ENSG00000115825_52 (sequence is synthesized)
ggttttgtttttcattggaaacaaagagttacttaaagaaaatgagtcatttatttcagtctcaggtggctgagttgtcatttattcagtttggcttatcattaaataacagttattact

SEQ ID NO: 211957 - DNA, 120 bp, Artificial Sequence
  ENSG00000115825_53 (sequence is synthesized)
acagttattactatcattaacattattaacaaaatctttgtttagccattttggagactattccagaacccagctagttggtttttggtttctgttttttttttttttgagacagagtct

SEQ ID NO: 211958 - DNA, 62 bp, Artificial Sequence
  ENSG00000115825_54 (sequence is synthesized)
ttttgagacagagtctcgccctgtcgccaggctgtagtgcagtggcacaatctccactcact

SEQ ID NO: 211959 - DNA, 120 bp, Artificial Sequence
  ENSG00000115825_55 (sequence is synthesized)
cactgcgcccggtgaacctagctagtttcttaatcatgaatacttcatagtttaaaaaagaaagtatttaactgtttgaggttcacatttcaaaacagtgtattttatgcatacatccca

SEQ ID NO: 211960 - DNA, 120 bp, Artificial Sequence
  ENSG00000115825_56 (sequence is synthesized)
aattttattgagccatgtttcagtgctgatttgacttgttacattttcttaattagtatctgtaaatcattttcctttaaataccttctagtagaagtacattttgctaacaacatgatt

SEQ ID NO: 211961 - DNA, 120 bp, Artificial Sequence
  ENSG00000115825_57 (sequence is synthesized)
aactggatttgatatttgagccatgtgaattcgagttatatatatagttgtattttgccttgttgtggatttgctagtccatcatgctgcctagggcaggaaaactcttcaacagcaagc

SEQ ID NO: 211962 - DNA, 120 bp, Artificial Sequence
  ENSG00000115825_58 (sequence is synthesized)
ccaaatgagaacctctcctgggctccaaatattccagtttgggagggtactttctattccgctcattgtttttaatttttttttttgtggccctccagaaaacattcatgacaagtaaat

SEQ ID NO: 211963 - DNA, 120 bp, Artificial Sequence
  ENSG00000115825_59 (sequence is synthesized)
aggatttaaaatattagcttaaaatagaatcttttatgtatcatcataacaggattaatttttcttcagccattgtttattttactaagatattttgaaaaattttagctcagttgtctt

SEQ ID NO: 211964 - DNA, 120 bp, Artificial Sequence
  ENSG00000115825_60 (sequence is synthesized)
aaaaggcttcatgttcctacagtatttatatgattttttaaaaatctacacaaacttacaaattttaaatattttttagtccatcaacaagcaataatattccgctaatgagggttgtac

SEQ ID NO: 211965 - DNA, 120 bp, Artificial Sequence
  ENSG00000115825_61 (sequence is synthesized)
ggaggtaaaattatttttcttaatttttgtgaaagatcagaaaaggccatgattctttggtgtattatctttggataaggttctgttttcctgatttattttgtttcttaaagattttct

SEQ ID NO: 211966 - DNA, 120 bp, Artificial Sequence
  ENSG00000115825_62 (sequence is synthesized)
tctgatttaataatcaaacaaaatacacagaccactgacagtatacatttattagtaatcacgccttcccgtctttcctctggccacctgttactttgtagtctaatatagccagtggta

SEQ ID NO: 211967 - DNA, 120 bp, Artificial Sequence
  ENSG00000115825_63 (sequence is synthesized)
ttgccttttcccctcaaagagcctaattttctgtactaaatgctgcaattcgattatatttagtctttgtattattgttacttaatttctttcatctctaataatggtcaccatatgatt

SEQ ID NO: 211968 - DNA, 120 bp, Artificial Sequence
  ENSG00000115825_64 (sequence is synthesized)
aacttgggttcgcgctccgctggagaccaccgcgcccggcccatcggaggcgatccgttcccgggtctcccaaactagttcccgaagccagacccgcggcgctcgcagtgccgaattttg

SEQ ID NO: 211969 - DNA, 120 bp, Artificial Sequence
  ENSG00000115825_65 (sequence is synthesized)
gaccagctttttcgtttcatttcctcactttgcgttgtagtcgtctcaaaggggctaactatatgtcagaaagcatcagcttttctcgatggacccattcatctaatgaaatatgcctgt

SEQ ID NO: 211970 - DNA, 120 bp, Artificial Sequence
  ENSG00000115825_66 (sequence is synthesized)
tggttcaggccagtttggcatcgtttatggagatttgtcagttttaagagtagttacatctctggaggacttcctgtcatcagaggaacaaagaactgtccgaggaaaacatagaaagac

SEQ ID NO: 211971 - DNA, 120 bp, Artificial Sequence
  ENSG00000115825_67 (sequence is synthesized)
ggagggagggaggaaggggcgccggaggcgggcgggatcctgcgaggcgcgtgaagcctcgctggcgcctcgtccggtactcagacgctggcgggcgcagtttctcacgacgggccgagc

SEQ ID NO: 211972 - DNA, 120 bp, Artificial Sequence
  ENSG00000115825_68 (sequence is synthesized)
acagccgtttgcatattgtacacattattttaaaaactggaaaatgtaaaacatctgccagctgttttgtcatctcatagttttgtccagtgccttttttttaaaggctgacttgttatc

SEQ ID NO: 211973 - DNA, 120 bp, Artificial Sequence
  ENSG00000115825_69 (sequence is synthesized)
tttcagctaaatccttctcactgtaatttgagtattcttcccttaatgtcattgcaaactttaaaaattaacagaatcagaaaattttacagtgtgttttatctcttcttgtagctcaca

SEQ ID NO: 211974 - DNA, 120 bp, Artificial Sequence
  ENSG00000115825_70 (sequence is synthesized)
catacagatgtttgtcggaggcagggggggagatggtttgaagtttatgttgggctgagtgggcttattcattgaagtatattccctactagttttccaacacaaatggcaccatttgtc

SEQ ID NO: 211975 - DNA, 120 bp, Artificial Sequence
  ENSG00000115825_71 (sequence is synthesized)
tactgttggcatgattgttctattaagtctgaaaacctgaacctgaaatccaactttgcgatttaggatattgatgaagtcatttaaccttactgtgcgttagcatcttcaactgtttaa

SEQ ID NO: 211976 - DNA, 120 bp, Artificial Sequence
  ENSG00000115825_72 (sequence is synthesized)
tggaactaataaaacctgacctgtgtagctcatagggcttaaatattaattaaacttaatatatgtaaaggtactaagaaagaaatgttaaacccttgttatcccttgctaagacttggt

SEQ ID NO: 211977 - DNA, 120 bp, Artificial Sequence
  ENSG00000115825_73 (sequence is synthesized)
acagtagtttcctagttggctgttctgcctccattcttaccttcttttcatacaactcttagagtcaatctttcagaaaattcacatctgatattagtattacctcacatagaaccctta

SEQ ID NO: 211978 - DNA, 120 bp, Artificial Sequence
  ENSG00000115825_74 (sequence is synthesized)
agtggttcacagtcatctacagattcatagccagttttcttagcagaggatttcaaggctgctgtaatttatccctgcttctctagcctcagatctaattgcagcttcctctttgctttc

SEQ ID NO: 211979 - DNA, 120 bp, Artificial Sequence
  ENSG00000115825_75 (sequence is synthesized)
tatctttcagtcctgtttacatgcctccataccctttgcctctctgctccttctccatccctttgtctcttctagtgcacattttttcatacttcagggctcaactaaagggctttctct

SEQ ID NO: 211980 - DNA, 120 bp, Artificial Sequence
  ENSG00000115825_76 (sequence is synthesized)
gtggaaatttcttgtccccgtacctatttctccatcaaataaaaacatggttcccctttggtactcctgctacccaacatacttctctcacaatatctattaccctttgggtttacatta

SEQ ID NO: 211981 - DNA, 120 bp, Artificial Sequence
  ENSG00000115825_77 (sequence is synthesized)
ttgtcttcccactgaactttattggagcgttggctgtgagatgtctggatcttctttgtattcctagcacctagtattgtgacataaagcagtcgcctagaaaatgtgttgactctgcat

SEQ ID NO: 211982 - DNA, 120 bp, Artificial Sequence
  ENSG00000115825_78 (sequence is synthesized)
gcatatataatatctatggtttgcaacttcagatttgtcagttttaagagtagttacatctctggaggacttcctgtcatcagaggaacaaagaactgtccgaggtacctttggcttctt

SEQ ID NO: 211983 - DNA, 120 bp, Artificial Sequence
  ENSG00000115825_79 (sequence is synthesized)
accaaaaatgcacacatttgttcagtcttttcaagtagacttacgattgtgccattgagacaaatgagttaatctaaaataaatagctatgtagagaagagcaagtcagatacatatttg

SEQ ID NO: 211984 - DNA, 120 bp, Artificial Sequence
  ENSG00000115825_80 (sequence is synthesized)
aagaacaaataccaaaaatatacctgtcattttcactgcttaatctgtagcatctaaaggcatacctagtacataataggtataactagttaatttgaattaataaatgagggaatgact

SEQ ID NO: 211985 - DNA, 120 bp, Artificial Sequence
  ENSG00000115825_81 (sequence is synthesized)
gttcattataataaacttctacctttttttaatatctagattctagaatatagagacaaatataaattttttatatctagattctagaatatagagacacccagagtttgtgggtacatg

SEQ ID NO: 211986 - DNA, 120 bp, Artificial Sequence
  ENSG00000115825_82 (sequence is synthesized)
gttaaatcactctgtgctgactcattgaatctagaataaaattgattcattcatacagtatttccatcttgacagagtctctgaaggactaggtcagggtaattaactatcattgattta

SEQ ID NO: 211987 - DNA, 120 bp, Artificial Sequence
  ENSG00000115825_83 (sequence is synthesized)
acaaggtagattacttttcagcaacaagttcattcaaattttctcctgtttagataatgcagctgactttattaggggcaaatattatgtatggaggggaaaacaattttttcctaaatt

SEQ ID NO: 211988 - DNA, 120 bp, Artificial Sequence
  ENSG00000115825_84 (sequence is synthesized)
aaaggtgagtgaaggagtgtggagaaagaacaaaaatgagccaaaaagaaaattcaagagtaaatacatataaatttcagtctgtggacaactccctaataaagctgtcagtttgcttca

SEQ ID NO: 211989 - DNA, 120 bp, Artificial Sequence
  ENSG00000115827_0 (sequence is synthesized)
gagaagccgggctgcctcacgaggcactaggaactacatttcccggtgagagagcggctccggccggccgcgcggtaccggagcgtcgcactgtcagcggccagagagcctggggcagat

SEQ ID NO: 211990 - DNA, 120 bp, Artificial Sequence
  ENSG00000115827_1 (sequence is synthesized)
cgaaaagggagtgcttcttcccttctctccgcgctctggcggtgcaagcggctctgctttccctcgccccgccgtcgggtgctccctgcccgcctccccgtgtcagctttccctgggccc

SEQ ID NO: 211991 - DNA, 120 bp, Artificial Sequence
  ENSG00000115827_2 (sequence is synthesized)
cgccgggaaagtctgggcctcgaaattcgaaggcagcggcggctgcccagcacgggagtgtggggcgcgccactcggcggcccagcctacccagggcccggcccgcgcctccatgggccc

SEQ ID NO: 211992 - DNA, 120 bp, Artificial Sequence
  ENSG00000115827_3 (sequence is synthesized)
gacccggaagcccaacgtgtgcagccggctgagtcgccgggcgctgggctgcttctcgcgcgacgcaggcgtggtgcagaggaccaacctgggcatcctgcgggcgctggtgtgccagga

SEQ ID NO: 211993 - DNA, 120 bp, Artificial Sequence
  ENSG00000115827_4 (sequence is synthesized)
aagtactaaatttaagaatgtctggacaactcattccaggtcacctatagcctatgagagaggaagaatatattttgacaattatcggcgctgtgtcagcagtgttgcatctgagccaag

SEQ ID NO: 211994 - DNA, 120 bp, Artificial Sequence
  ENSG00000115827_5 (sequence is synthesized)
aaaactttatgaaatgccaaaatgttccaaatcagaaaaaatagaggatgctttattatgggaatgcccagtgggagatatacttcccaattcatcagattataagtcctcactcatagc

SEQ ID NO: 211995 - DNA, 120 bp, Artificial Sequence
  ENSG00000115827_6 (sequence is synthesized)
actgactgctcataattggctacttcgtatatcagcaactacgggaaaaatccttgagaaaatatatcttgcaccttattgcaaattcagatacttgagctgggacactcctcaagaagt

SEQ ID NO: 211996 - DNA, 120 bp, Artificial Sequence
  ENSG00000115827_7 (sequence is synthesized)
cattgcagttaagtcagctcagaacagaggctcagcagtggcccggcaggcaggcattcaacaacatgttttgctgtaccttgcagtgttccgagttctacctttttcacttgtagggat

SEQ ID NO: 211997 - DNA, 120 bp, Artificial Sequence
  ENSG00000115827_8 (sequence is synthesized)
tctagagatcaacaaaaagatttttgggaacgttacagatgctaccttgtctcatggaatactgattgtgatgtacagctcaggactggtcagactctatagcttccaaaccatcgctga

SEQ ID NO: 211998 - DNA, 120 bp, Artificial Sequence
  ENSG00000115827_9 (sequence is synthesized)
acagttcatgcaacagaaacttgacttagggtgtgcatgcagatggggtgggactactggaactgtaggagaggctccttttggcattccttgtaatattaaaatcacagacatgccacc

SEQ ID NO: 211999 - DNA, 120 bp, Artificial Sequence
  ENSG00000115827_10 (sequence is synthesized)
actgctctttgaggtgtcatccctggagaatgcttttcagattggaggccatccttggcactacatcgtcacacctaataagaagaaacagaaaggagttttccatatttgtgccctaaa

SEQ ID NO: 212000 - DNA, 120 bp, Artificial Sequence
  ENSG00000115827_11 (sequence is synthesized)
agacaattccctggcaaaaaatgggatccaagaaatggattgttgttctctagaatctgactggatctatttccatcctgatgcttctggtagaataatacatgttggtccaaatcaagt

SEQ ID NO: 212001 - DNA, 120 bp, Artificial Sequence
  ENSG00000115827_12 (sequence is synthesized)
caaagttttgaagctaactgaaatagaaaataatagttctcagcatcagatctctgaagattttgtcattttggccaacagggagaaccataaaaatgaaaatgtactcactgttacagc

SEQ ID NO: 212002 - DNA, 120 bp, Artificial Sequence
  ENSG00000115827_13 (sequence is synthesized)
ttctggacgggtggtaaaaaaaagttttaaccttctggatgatgacccagaacaagagactttcaaaattgtggactatgaagatgagttagatttgctttctgtggtagctgttactca

SEQ ID NO: 212003 - DNA, 120 bp, Artificial Sequence
  ENSG00000115827_14 (sequence is synthesized)
aatagatgctgaaggaaaagctcacctggatttccactgtaatgaatatggaactttacttaaaagcattccactagtggagtcatgggatgtgacatatagccatgaagtctactttga

SEQ ID NO: 212004 - DNA, 120 bp, Artificial Sequence
  ENSG00000115827_15 (sequence is synthesized)
cagagacttggtgctacacatagagcagaaacccaacagagtcttcagctgctatgtttaccagatgatatgtgacactggggaagaagaagaaaccataaacagaagctgttaaaaaga

SEQ ID NO: 212005 - DNA, 120 bp, Artificial Sequence
  ENSG00000115827_16 (sequence is synthesized)
gtgagataattgtaacctaagagacttttagccaaacaccccagcagctgcgtccaatccattttattatctgcatggcacattctccagtattttccaaaaaagtcttgtgttgacttc

SEQ ID NO: 212006 - DNA, 120 bp, Artificial Sequence
  ENSG00000115827_17 (sequence is synthesized)
agatgactatgacttcttttttaaactcttgctgtaaaagatggtgaggacttcattttttttaaaggttttttagaatactgttccaagaagtttagtgttttgcagctttgagctagg

SEQ ID NO: 212007 - DNA, 120 bp, Artificial Sequence
  ENSG00000115827_18 (sequence is synthesized)
tggtaatgcaaatataaaatgctgggaacagaaaaggacaggttaattccaattgttgaggagttaagtcattgatggggtgggtcattgatgagttcttaaaggatggtatggaatttt

SEQ ID NO: 212008 - DNA, 120 bp, Artificial Sequence
  ENSG00000115827_19 (sequence is synthesized)
gtttgttaaggctaggaaagacagggagagacaaaagtaaacatgcagaaagaaatcttatatcctctataccaaactttgcttaaggatgagaaatgagatgtgttatgtgagaacatt

SEQ ID NO: 212009 - DNA, 120 bp, Artificial Sequence
  ENSG00000115827_20 (sequence is synthesized)
attttgagcccaaaatgtgtcatcacagtttttaaaaatcttatatatgtatttatatgtgtttcgtatttgtatatagtatcaggaattggttctagttcccaaattatcttttcttcc

SEQ ID NO: 212010 - DNA, 120 bp, Artificial Sequence
  ENSG00000115827_21 (sequence is synthesized)
ttggttttgttctcttggcttgatgttcacattgaatatttgtgtttctatataggctaatgtaaaagattccaagcaaaccttaagtgaaattgttttctgatttgcatcctgtttagc

SEQ ID NO: 212011 - DNA, 120 bp, Artificial Sequence
  ENSG00000115827_22 (sequence is synthesized)
tcttaatgtatctaaggatgttctcatctcaccattctactcatttagtgagttttctgatcttgtttaggcaatatttgcatacttatgcaataagataaaggtacccttgcctgcagt

SEQ ID NO: 212012 - DNA, 120 bp, Artificial Sequence
  ENSG00000115827_23 (sequence is synthesized)
agttctgtttcctgtagaaaagtggataaagagtcccagaagaagttcttactagcttgggagttacctgattaaccagagaaaatttttggcttacttatggaacaagcattatttctt

SEQ ID NO: 212013 - DNA, 120 bp, Artificial Sequence
  ENSG00000115827_24 (sequence is synthesized)
tttctttgtgcttcctgtttgagaaattcagttgcttccatttcgcatgttctgcacatttatccgatgtaacctcaaaagaataactggtaataagggaaggaaacagcagcaacaatc

SEQ ID NO: 212014 - DNA, 120 bp, Artificial Sequence
  ENSG00000115827_25 (sequence is synthesized)
attgctgattcaagtttaaggttaaaatatggaatttttagcttggatgatttatattaaaatctttccattttttttttcagttttggcttgatgccatgttaagaatgatgtgaattc

SEQ ID NO: 212015 - DNA, 120 bp, Artificial Sequence
  ENSG00000115827_26 (sequence is synthesized)
ttcccagttctgccctggtgctagacattgccccatactttcaattagacactagctgtatctaaatagtcccactcagtaaacttacatcttgaaaaacaagaccagtaagaggccagt

SEQ ID NO: 212016 - DNA, 120 bp, Artificial Sequence
  ENSG00000115827_27 (sequence is synthesized)
gaaagtactaaagaaagaaaccaatgttgtgtgagtttcaaagcagctgcaatgctgtgtaaaagtagagtgttcattctccatttccaagagtgtttcagaataggatgtcttaagact

SEQ ID NO: 212017 - DNA, 120 bp, Artificial Sequence
  ENSG00000115827_28 (sequence is synthesized)
tcagtcatgtcagagatttttttttttaggtgattattgagtttctccttctcctttaagtcatcaccttccttttatgaaatgatagtaaggaactcgtctattctgaaaggcatttga

SEQ ID NO: 212018 - DNA, 120 bp, Artificial Sequence
  ENSG00000115827_29 (sequence is synthesized)
gaaatagctgaattcctggctgcttttttgctgggggtagatggtggaatacttctggtctagatataacttaccactaagaaacccccagtatgtcaccactgcctaaatctaactaga

SEQ ID NO: 212019 - DNA, 120 bp, Artificial Sequence
  ENSG00000115827_30 (sequence is synthesized)
ccagggtccaaatgccatccaggccaggcaggaaatatacctcatgtgaaagacagtaaggagttgtgggcagtgtaacaaacaggagagctatgccccaactaaaaggagcagctgcta

SEQ ID NO: 212020 - DNA, 120 bp, Artificial Sequence
  ENSG00000115827_31 (sequence is synthesized)
ctgcttagtttcagccagttgcaacagtatgtgggaatgtaggctgcatggttgttaacaagatagatggtaaaaagatgccagaagatacagaagatagcaaagaatgtggggaatttg

SEQ ID NO: 212021 - DNA, 120 bp, Artificial Sequence
  ENSG00000115827_32 (sequence is synthesized)
gataccacacatagcgagagacaatgaagcatgcttcccagctcgccagagtgtcacacagctgctcattctgccacctgccagacattaatgtcttcctgccctacctaaaccccctct

SEQ ID NO: 212022 - DNA, 120 bp, Artificial Sequence
  ENSG00000115827_33 (sequence is synthesized)
ttacctgatattttaattcgagactctagctacatgcccacctacttaacaggtactagtgacaggtacaaaacattatgggtaacaattctgagtgtttaatgcaagcccaggtgaagc

SEQ ID NO: 212023 - DNA, 120 bp, Artificial Sequence
  ENSG00000115827_34 (sequence is synthesized)
agggtagcttccatcagcaggtacagacgttacgctgaaaagaggtgcattctgcattgcactcctggatctaagtttctgcattctcagagcatcaatgcagcaagcttattgttcctc

SEQ ID NO: 212024 - DNA, 120 bp, Artificial Sequence
  ENSG00000115827_35 (sequence is synthesized)
aattttttacaatatttatcacaactctgggagaaaacaaaacaaatcctatcctatttactatttgtgctacctagtgaggagataccgctctgtttagacaaattaaggcacttcaca

SEQ ID NO: 212025 - DNA, 120 bp, Artificial Sequence
  ENSG00000115827_36 (sequence is synthesized)
ttcttccaccaattgaaagttttgtatcttacagttctttttttaaataatatatttattgagcactttctatctactagtcactgtgatacagtataagtaaagtgggttgtctcattt

SEQ ID NO: 212026 - DNA, 120 bp, Artificial Sequence
  ENSG00000115827_37 (sequence is synthesized)
aatattcagaataaccacatgaagtatgaactgccattatctttcccctttgtacaaatgaggaaagtgaggctcacagaagttaattggcccagggtcccacaactagtcagtgcagag

SEQ ID NO: 212027 - DNA, 120 bp, Artificial Sequence
  ENSG00000115827_38 (sequence is synthesized)
gtgggaaacataaccagatttgttcggcatgaacttgtgccaaatttcctccaaagttctcaaaaggcaaggcatgttattttatcccaatttagcataccaacaactataatactagat

SEQ ID NO: 212028 - DNA, 120 bp, Artificial Sequence
  ENSG00000115827_39 (sequence is synthesized)
atgtaggaaagtgcttaataatcgttttttactgatgattcagtgtctaaattttgaacaaatttgggtaagatacaagtcacacataaattgacagaaaatgtagttcttcattcaatg

SEQ ID NO: 212029 - DNA, 120 bp, Artificial Sequence
  ENSG00000115827_40 (sequence is synthesized)
gttagcagtcattaaaaggtactttccctttgtttgtggtgataatcagtattagtagttttcatattatttggcttccatattaatcatttttatattttcttctccttcttaccatgt

SEQ ID NO: 212030 - DNA, 120 bp, Artificial Sequence
  ENSG00000115827_41 (sequence is synthesized)
ttacttatatcatccatcttttagaatcccagggagctaatttctggtccctgtgttgctatcaaatctgtatcttgcagaaagaataatttatttcaaacaagggacatacaatagaaa

SEQ ID NO: 212031 - DNA, 120 bp, Artificial Sequence
  ENSG00000115827_42 (sequence is synthesized)
gataagacctactgaggtctttttcccatcattttattatgaaaaatgttcaaacatacagtaaaattgaaagaattttatagtaaatactgaccacggggattctacatcttactctac

SEQ ID NO: 212032 - DNA, 120 bp, Artificial Sequence
  ENSG00000115827_43 (sequence is synthesized)
ttgttttattattttcctatccagcgtactttttgatggatttcaaaataaattgcagttgctgatatacttccccctagtacttcaactgcagattattaactagagtttagtatttat

SEQ ID NO: 212033 - DNA, 120 bp, Artificial Sequence
  ENSG00000115827_44 (sequence is synthesized)
ttagtttttaaatttttttgatttaagatttacctgcaataaaatgtacaaatcttaagtataaatttactgagttcttgcagacatatacacctgtgtaacccaaaccctttccaaaat

SEQ ID NO: 212034 - DNA, 120 bp, Artificial Sequence
  ENSG00000115827_45 (sequence is synthesized)
ttagaccattgcaatcatcttcagaaagtttcctaaatccctctcccagtctatcccctccccacccctcaggtataactactgttctcattcttttatatcaaaggttaaatttacctg

SEQ ID NO: 212035 - DNA, 120 bp, Artificial Sequence
  ENSG00000115827_46 (sequence is synthesized)
ttctaaacttcatatgagtgaaattatacaaaatgtaatgcttctttcacttagcataatgtttttgagatttattcatgttgttgcatgtgtcagtgattcatttctttttattgctga

SEQ ID NO: 212036 - DNA, 120 bp, Artificial Sequence
  ENSG00000115827_47 (sequence is synthesized)
gtattctttcgtatgaatatatcacagtttgtttttttatctttctgttgatggacactgggctctttctgcttgttttttactgttatgaataaagctgctatgaacattcttagacaa

SEQ ID NO: 212037 - DNA, 120 bp, Artificial Sequence
  ENSG00000115827_48 (sequence is synthesized)
cagaaccgagcttcatgtgtttagtcctgtccaggaatcagcaaacacacttgtgagaggcagcagttgaatactcttttaaatttagagaatctctgatttgctgtcactgtggagaat

SEQ ID NO: 212038 - DNA, 120 bp, Artificial Sequence
  ENSG00000115827_49 (sequence is synthesized)
ttcaattatactttgagatctacatagacttggttttgtttatcaaatctgtaggatactgcttaactcttgaaaatcttggagctgatgttttactaggcatataaacagatacatttc

SEQ ID NO: 212039 - DNA, 120 bp, Artificial Sequence
  ENSG00000115827_50 (sequence is synthesized)
aggtgaccgccagccggccggggcgggacggagggccgcgggcgcgcggcggccgagcctcctgcggggatgcggttttaacgcgctggggcctccctttatagggtcacatgtgatggg

SEQ ID NO: 212040 - DNA, 120 bp, Artificial Sequence
  ENSG00000115827_51 (sequence is synthesized)
gaggaggatacaagcccggaatctgggataggtggtaatagggccaccagctgcttttagttttacgcttcttatgtcttacctggaaacaattattctaaaagttggtcacctcattaa

SEQ ID NO: 212041 - DNA, 120 bp, Artificial Sequence
  ENSG00000115827_52 (sequence is synthesized)
ctcaacattactgtttgtaaatattaaatttgaaaacgttatttgatggatgatatgcaagtaaaagggaattacagactggccctttctcatcaggtcttagttaattctatagggtta

SEQ ID NO: 212042 - DNA, 120 bp, Artificial Sequence
  ENSG00000115827_53 (sequence is synthesized)
ataagaaagaagagtatttgtctttgttctgaaaggcagcctagacacaggaaaggaagtagattgtttgaagtaaatcttgttttattttgattggtttcagggcacacacaactccca

SEQ ID NO: 212043 - DNA, 120 bp, Artificial Sequence
  ENSG00000115827_54 (sequence is synthesized)
aaatatcagaacaatagtttttgatcttgatggaattcaacagagatattcttagtaaatgttcagaggtaaagaaagaatttaatatgaaccatttttggaaaacaacgtccaggtacg

SEQ ID NO: 212044 - DNA, 120 bp, Artificial Sequence
  ENSG00000115827_55 (sequence is synthesized)
tatatgtatataaaccagaaggaaatgaaccaaaatgttaataagggttatttttggcagttttatggtattgtaaactattttaatcttgtttttttttatatgaattatgtgatcaga

SEQ ID NO: 212045 - DNA, 120 bp, Artificial Sequence
  ENSG00000115827_56 (sequence is synthesized)
aaaaaatattaatatttagttaagaggaaagcaaataaattgtgccttggtatttcacatctctgaataaaaatagtctctcaaacctgaacaaatactgtcttggttatcaagaataat

SEQ ID NO: 212046 - DNA, 120 bp, Artificial Sequence
  ENSG00000115827_57 (sequence is synthesized)
aggtatacatatttaaacattcaataaaatgaagactctttttcataggaatttgtctgcagatttgttatgaaaaatctaatgatcttttatttctgaagcatgctgtaaaagatagga

SEQ ID NO: 212047 - DNA, 120 bp, Artificial Sequence
  ENSG00000115828_0 (sequence is synthesized)
agtcgacccaagggtggagaagagggaaggcgaaggacgcgcgttcccgggctcgtgaccgccagcggcccggggaacccgctcccagacagactcggagagatggcaggcggaagacac

SEQ ID NO: 212048 - DNA, 120 bp, Artificial Sequence
  ENSG00000115828_1 (sequence is synthesized)
cggcgcgtcgtgggcaccctccacctgctgctgctggtggccgccctgccctgggcatccaggggggtcagtccgagtgcctcagcctggccagaggagaagaattaccaccagccagcc

SEQ ID NO: 212049 - DNA, 120 bp, Artificial Sequence
  ENSG00000115828_2 (sequence is synthesized)
attttgaattcatcggctcttcggcaaattgcagaaggcaccagtatctctgaaatgtggcaaaatgacttacagccattgctgatagagcgatacccgggatcccctggaagctatgct

SEQ ID NO: 212050 - DNA, 120 bp, Artificial Sequence
  ENSG00000115828_3 (sequence is synthesized)
gctcgtcagcacatcatgcagcgaattcagaggcttcaggctgactgggtcttggaaatagacaccttcttgagtcagacaccctatgggtaccggtctttctcaaatatcatcagcacc

SEQ ID NO: 212051 - DNA, 120 bp, Artificial Sequence
  ENSG00000115828_4 (sequence is synthesized)
ctcaatcccactgctaaacgacatttggtcctcgcctgccactatgactccaagtatttttcccactggaacaacagagtgtttgtaggagccactgattcagccgtgccatgtgcaatg

SEQ ID NO: 212052 - DNA, 120 bp, Artificial Sequence
  ENSG00000115828_5 (sequence is synthesized)
atgttggaacttgctcgtgccttagacaagaaactcctttccttaaagactgtttcagactccaagccagatttgtcactccagctgatcttctttgatggtgaagaggcttttcttcac

SEQ ID NO: 212053 - DNA, 120 bp, Artificial Sequence
  ENSG00000115828_6 (sequence is synthesized)
tggtctcctcaagattctctctatgggtctcgacacttagctgcaaagatggcatcgaccccgcacccacctggagcgagaggcaccagccaactgcatggcatggatttattggtctta

SEQ ID NO: 212054 - DNA, 120 bp, Artificial Sequence
  ENSG00000115828_7 (sequence is synthesized)
gatttgattggagctccaaacccaacgtttcccaatttttttccaaactcagccaggtggttcgaaagacttcaagcaattgaacatgaacttcatgaattgggtttgctcaaggatcac

SEQ ID NO: 212055 - DNA, 120 bp, Artificial Sequence
  ENSG00000115828_8 (sequence is synthesized)
tctttggaggggcggtatttccagaattacagttatggaggtgtgattcaggatgaccatattccatttttaagaagaggtgttccagttctgcatctgataccgtctcctttccctgaa

SEQ ID NO: 212056 - DNA, 120 bp, Artificial Sequence
  ENSG00000115828_9 (sequence is synthesized)
gtctggcacaccatggatgacaatgaagaaaatttggatgaatcaaccattgacaatctaaacaaaatcctacaagtctttgtgttggaatatcttcatttgtaatactctgatttagtt

SEQ ID NO: 212057 - DNA, 120 bp, Artificial Sequence
  ENSG00000115828_10 (sequence is synthesized)
taggataattggttctagaattgaattcaaaagtcaaggcatcatttaaaataatctgatttcagacaaatgctgtgtggaaacatctatcctatagatcatcctattcttatgtgtctt

SEQ ID NO: 212058 - DNA, 120 bp, Artificial Sequence
  ENSG00000115828_11 (sequence is synthesized)
tggttatcagatcaattacagaataattgtgttgtgatattgtgtcctaaattgctcattaatttttatttacagattgaaaaagagggaccgtgtaaagaaaatggaaaataaatatct

SEQ ID NO: 212059 - DNA, 120 bp, Artificial Sequence
  ENSG00000115828_12 (sequence is synthesized)
ttcaaagactcttttagataaacacgatgaggcaaaatcaggttcattcattcaacgatagtttctcaacagtacttaaatagcggttggaaaacgtagccttcattttatgattttttc

SEQ ID NO: 212060 - DNA, 120 bp, Artificial Sequence
  ENSG00000115828_13 (sequence is synthesized)
atatgtggaaatctattacatgtaatacaaaacaaacatgtagtttgaaggcggtcagatttctttgagaaatctttgtagagttaattttatggaaattaaaatcagaattaaatgcta

SEQ ID NO: 212061 - DNA, 120 bp, Artificial Sequence
  ENSG00000115828_14 (sequence is synthesized)
cccattcctgggcccacactccatccctaatccctcccccgacccctgcatcttctcctgactctgactctcttcccatatttgatcttctttctgtccccacgtcttcactaaccccag

SEQ ID NO: 212062 - DNA, 120 bp, Artificial Sequence
  ENSG00000115828_15 (sequence is synthesized)
cttggaacctcatgctacccttgagacttcactagccccggtgccttcatccctccctgacgctcaccccatctgtgaactgatagcttattcccagcacccccgcttattcctatccat

SEQ ID NO: 212063 - DNA, 120 bp, Artificial Sequence
  ENSG00000115828_16 (sequence is synthesized)
ctcttttatatttgccagcatttgcagtgcgtctcaacctgccttgggtgcagagggaaagctgcttgatatgttattatggttcagggttgcttattaattcttacagtgagcggaggt

SEQ ID NO: 212064 - DNA, 120 bp, Artificial Sequence
  ENSG00000115828_17 (sequence is synthesized)
ttggaacttgctcgtgccttagacaagaaactcctttccttaaaggtatctgttttctgcttattgattcctaggataaagtacattaacagtaactcagagtgaattctagaatccttg

SEQ ID NO: 212065 - DNA, 120 bp, Artificial Sequence
  ENSG00000115828_18 (sequence is synthesized)
gaggaatgagaaggccatttagaaatggagacttttggtacatttttattatgaacattaattgtaagattgcatgattgggaatatcaaccatgggcaataaacctaagatacgtgaca

SEQ ID NO: 212066 - DNA, 120 bp, Artificial Sequence
  ENSG00000115828_19 (sequence is synthesized)
cttcctttctttatggcacatctatctttttgcccaattaatagaaaatcatgctatttttcatcatcacagtatttttttgctatgtttttattgttgtttttaccagactgtttcaga

SEQ ID NO: 212067 - DNA, 120 bp, Artificial Sequence
  ENSG00000115839_0 (sequence is synthesized)
cttcttcccggcagccttagcgccaggcccggcgctcctcaagatggctgccgacagtgagcccgaatccgaggtatttgagatcacggacttcaccactgcctcggaatgggaaaggtt

SEQ ID NO: 212068 - DNA, 120 bp, Artificial Sequence
  ENSG00000115839_1 (sequence is synthesized)
tatttccaaagttgaagaagtcttgaatgactggaaactgattggaaactctttgggaaagccactcgaaaagggtatatttacttctggcacatgggaagagaaatcagatgaaatttc

SEQ ID NO: 212069 - DNA, 120 bp, Artificial Sequence
  ENSG00000115839_2 (sequence is synthesized)
ctttgctgacttcaagttctcagtcactcatcattatcttgtacaagagtccactgataaagaaggaaaggatgagttattagaggatgttgttccacaatctatgcaagatttgctggg

SEQ ID NO: 212070 - DNA, 120 bp, Artificial Sequence
  ENSG00000115839_3 (sequence is synthesized)
tatgaataatgactttcctccaagagcacattgcctggtaagatggtatgggctacgtgagttcgtggtgattgcccctgctgcacacagtgacgctgttctcagcgaatctaagtgcaa

SEQ ID NO: 212071 - DNA, 120 bp, Artificial Sequence
  ENSG00000115839_4 (sequence is synthesized)
ccttcttctgagttctgtttctattgccttgggaaacactggctgtcaggtgccactctttgtgcaaattcaccacaaatggcgaagaatgtatgtaggagaatgtcaaggtcctggtgt

SEQ ID NO: 212072 - DNA, 120 bp, Artificial Sequence
  ENSG00000115839_5 (sequence is synthesized)
acgaactgatttcgaaatggttcatcttagaaaagtgccaaatcagtacactcacttatcaggtctgctggatatcttcaaatcaaagattggatgtcctttaactccattgcctccagt

SEQ ID NO: 212073 - DNA, 120 bp, Artificial Sequence
  ENSG00000115839_6 (sequence is synthesized)
tagtattgctattcgatttacctatgtacttcaagattggcagcagtatttttggcctcagcaacctccagacatagatgcccttgtaggaggagaagttggaggcttggagtttggcaa

SEQ ID NO: 212074 - DNA, 120 bp, Artificial Sequence
  ENSG00000115839_7 (sequence is synthesized)
gttaccatttggtgcctgcgaagatcctattagtgaactccatttagctactacatggcctcatctgaccgaagggatcattgtggataatgatgtttattctgatttggatcctattca

SEQ ID NO: 212075 - DNA, 120 bp, Artificial Sequence
  ENSG00000115839_8 (sequence is synthesized)
agctccacattggtctgttagagttcgaaaagctgagaatcctcagtgtttgctaggtgattttgtcactgaattttttaaaatttgccgtcgaaaggagtcaactgatgagattcttgg

SEQ ID NO: 212076 - DNA, 120 bp, Artificial Sequence
  ENSG00000115839_9 (sequence is synthesized)
acgatctgcatttgaggaagaaggcaaagaaactgctgatataactcatgctttgtcaaaattgacagagccggcatcagttccaattcataaattatcagtttcaaatatggtacacac

SEQ ID NO: 212077 - DNA, 120 bp, Artificial Sequence
  ENSG00000115839_10 (sequence is synthesized)
tgcaaagaagaaaatccgaaaacacagaggtgtagaggagtcaccgctaaataatgatgttcttaatactattctcctgttcttattccctgatgctgtttctgagaaaccattagatgg

SEQ ID NO: 212078 - DNA, 120 bp, Artificial Sequence
  ENSG00000115839_11 (sequence is synthesized)
aactacttcaacagataataataatcctccatcagagagtgaagactataatctctacaatcagttcaagtctgcaccatctgacagtttaacatacaaactggctttgtgtctctgtat

SEQ ID NO: 212079 - DNA, 120 bp, Artificial Sequence
  ENSG00000115839_12 (sequence is synthesized)
gatcaatttttaccatggagggttgaaaggagtggcacacctctggcaggaatttgttcttgaaatgcgtttccgatgggaaaacaactttctgattccaggattagcaagtggaccccc

SEQ ID NO: 212080 - DNA, 120 bp, Artificial Sequence
  ENSG00000115839_13 (sequence is synthesized)
agatctgaggtgttgtttactgcatcagaaactacagatgttaaattgttgtattgaaagaaagaaggcacgtgatgaggggaaaaagacaagtgcttcagatgtcactaatatatatcc

SEQ ID NO: 212081 - DNA, 120 bp, Artificial Sequence
  ENSG00000115839_14 (sequence is synthesized)
aggggatgctggaaaagcaggagaccagttggtgccagataatctaaaagaaacagataaggaaaagggagaggtaggaaaatcttgggattcctggagtgacagcgaagaagaattttt

SEQ ID NO: 212082 - DNA, 120 bp, Artificial Sequence
  ENSG00000115839_15 (sequence is synthesized)
tgaatgcctaagtgatactgaagaacttaaaggaaatggacaagagagtggcaagaaaggaggacctaaggagatggcaaatttaaggccggaaggacggctctatcagcatgggaaact

SEQ ID NO: 212083 - DNA, 120 bp, Artificial Sequence
  ENSG00000115839_16 (sequence is synthesized)
tacactgctgcataatggagaacctctctacattccagtaacccaggaaccagcacctatgacagaagatctgctagaagagcagtctgaagttttagctaaattaggtacatcggcaga

SEQ ID NO: 212084 - DNA, 120 bp, Artificial Sequence
  ENSG00000115839_17 (sequence is synthesized)
gggggctcaccttcgagcacgcatgcagagtgcctgtctgctctcagatatggagtcttttaaggcagctaatccaggttgctccctggaagattttgtgaggtggtattcaccccggga

SEQ ID NO: 212085 - DNA, 120 bp, Artificial Sequence
  ENSG00000115839_18 (sequence is synthesized)
ttatattgaagaggaggtgattgatgaaaagggcaatgtggtgctgaaaggagaactgagtgcccggatgaagattccaagcaatatgtgggtagaagcctgggaaacagctaagccaat

SEQ ID NO: 212086 - DNA, 120 bp, Artificial Sequence
  ENSG00000115839_19 (sequence is synthesized)
tcctgctagaaggcaaaggagactctttgatgatacacgggaagcagaaaaggtgctgcactatctggcaatccagaaacctgcagaccttgctcggcacctgttaccttgtgtgattca

SEQ ID NO: 212087 - DNA, 120 bp, Artificial Sequence
  ENSG00000115839_20 (sequence is synthesized)
agaagacaagaaattggaagaaatcattcaccagattactaatgtggaagctctcattgccagagctcggtcactaaaagccaagtttggaactgagaaatgtgaacaggaggaggaaaa

SEQ ID NO: 212088 - DNA, 120 bp, Artificial Sequence
  ENSG00000115839_21 (sequence is synthesized)
ggaagatcttgaaaggtttgtgagttgcctgctggagcagcctgaagtgttagtcaccggtgcaggaagaggacatgctggcaggatcattcacaagctgtttgtgaatgcccagagggc

SEQ ID NO: 212089 - DNA, 120 bp, Artificial Sequence
  ENSG00000115839_22 (sequence is synthesized)
tgcagctatgactccaccagaggaggaattgaagagaatgggctccccagaggaaagaaggcagaactccgtgtcagacttcccaccccctgctggccgggaattcattttgcgcaccac

SEQ ID NO: 212090 - DNA, 120 bp, Artificial Sequence
  ENSG00000115839_23 (sequence is synthesized)
tgtgccgcgccctgctccctactccaaagctctgcctcagcggatgtacagtgttctcaccaaagaggactttagacttgcaggtgccttttcatcagatacttccttcttctgattctt

SEQ ID NO: 212091 - DNA, 120 bp, Artificial Sequence
  ENSG00000115839_24 (sequence is synthesized)
ctagcattactcgttggtggcttcagagacagtgctgcctcctcctgagggagggaaggtaccagggagaacctgggaggtcctggagagggccctgtccagttgggtgatcaggaatca

SEQ ID NO: 212092 - DNA, 120 bp, Artificial Sequence
  ENSG00000115839_25 (sequence is synthesized)
aaccagcatcggaaagacttcccagcaccaagcttgagctgtgtcgtttcgtggagggggcagcgaggatgggcttgagctgttgagagatttctgccctagagatggcctttgtatatg

SEQ ID NO: 212093 - DNA, 120 bp, Artificial Sequence
  ENSG00000115839_26 (sequence is synthesized)
ggggggtggtggggggacacaaacacatcagacactccgtcctcacactggcaggacggtgttcatcgcattctcttctgtgaccagcctctaggctagcggctgcattcgtggtctgtg

SEQ ID NO: 212094 - DNA, 120 bp, Artificial Sequence
  ENSG00000115839_27 (sequence is synthesized)
caaacacttcgtggttctatatatcagcagcaagtgtgcaaaataaaggacctgttaactcagatttctggatattttggtggtagcttctagtcccagaatctgtgtttttaaaatact

SEQ ID NO: 212095 - DNA, 120 bp, Artificial Sequence
  ENSG00000115839_28 (sequence is synthesized)
acatgacattctgtctattcaatcacctggtggtcatctttcttgtactaattaactgttgatgagcattttggatattctaggagaaagcctataatttcacatagtttctctttttca

SEQ ID NO: 212096 - DNA, 120 bp, Artificial Sequence
  ENSG00000115839_29 (sequence is synthesized)
tgtaactgtaacctaaatgtattacttctgataaaactatatatcaaatgtcactgcaaattagttttatatctgtcatgtgagatttgtcttacttatttttcttttggttgccatgga

SEQ ID NO: 212097 - DNA, 120 bp, Artificial Sequence
  ENSG00000115839_30 (sequence is synthesized)
agttatggccctgaaaatcgtctccctccccttctcttgctgtacagcatgcgttctctttttgtggttgctggctgggtactgtatttaatgaagtagagaatagcacttgcaaaaata

SEQ ID NO: 212098 - DNA, 120 bp, Artificial Sequence
  ENSG00000115839_31 (sequence is synthesized)
cagtcttggtacctagagactgtcatgcagatagtataatttggtatatgtgctaatgcattgagtagaggattattttaacacactattttgcttttgtattttagttaaaataatcga

SEQ ID NO: 212099 - DNA, 120 bp, Artificial Sequence
  ENSG00000115839_32 (sequence is synthesized)
tggggatgtgtagcccccccgtgtgaggatgacatcaccacatttctagtttcatggagctcaagatgtcttgtgtctgtgtggctagatggcctctgcttggtaatcttatttttaggc

SEQ ID NO: 212100 - DNA, 120 bp, Artificial Sequence
  ENSG00000115839_33 (sequence is synthesized)
ctaaaattcccacttaaatccaaagtaaaaatggttatactgaagcataaaccttgcctgtgtaattttaaaaaattaatagagctgtgcaaaccctgttatttttgtaaaaaaaaaaaa

SEQ ID NO: 212101 - DNA, 120 bp, Artificial Sequence
  ENSG00000115839_34 (sequence is synthesized)
aaatacatatctatatataatatgtgtgtgtgtgtgacatatgcacacgtctctgtgtatgtgaagtaggggaggccctgggggatgacctcccagcctttatgatgcttttctctatgc

SEQ ID NO: 212102 - DNA, 120 bp, Artificial Sequence
  ENSG00000115839_35 (sequence is synthesized)
tgctggacttcattcttactggtccacgcagatgcaggcggcctgaggccagtgctgtaccaagtagaagacggttcctaaggacagagtttgtctgttttctaacaaagaaaaattcta

SEQ ID NO: 212103 - DNA, 120 bp, Artificial Sequence
  ENSG00000115839_36 (sequence is synthesized)
caaaggagaggttgggcgttacaaaggcattgtgaatctaataaaaggaaagtgtcgctttctgtggcgttttctttcattttctcccgctgaggcatttcagtctaatttcatgtggtt

SEQ ID NO: 212104 - DNA, 120 bp, Artificial Sequence
  ENSG00000115839_37 (sequence is synthesized)
ttgtgctgtctcagctctaatgtttgcagcctgctgagcctaacaaggcagtggtctcaagaacattctttgtgcctttttaaagtactccattttatttttatgatagttatgtattta

SEQ ID NO: 212105 - DNA, 120 bp, Artificial Sequence
  ENSG00000115839_38 (sequence is synthesized)
tttcacagatatatttaagtacccactttgtgtcaggtacagtacaagcaatgaagataaaacagaaaccaaaacacactcccttacagggaaaactgacaccacgttgccacaaaatgt

SEQ ID NO: 212106 - DNA, 120 bp, Artificial Sequence
  ENSG00000115839_39 (sequence is synthesized)
tgagtatagtcaactctgctgtgtggatcggagggcctgcatttatcctacaaataattgaatgtaatcctacattcatgtattcattggcagtacggagtaataaatgcagcaatgtca

SEQ ID NO: 212107 - DNA, 120 bp, Artificial Sequence
  ENSG00000115839_40 (sequence is synthesized)
aactgctcccaggagctggcatagaagcaaacctgcaggaaaagccaacccactccaggtgtgtggaagctgctggcaggaacccagcaaggatccagctgggttgtaatggaaacaatg

SEQ ID NO: 212108 - DNA, 120 bp, Artificial Sequence
  ENSG00000115839_41 (sequence is synthesized)
caaccaacaatccttgagcgagccgggatagatgtggcctcatcactgaagatttcatctgagacctctgcaaatatccaaattgtatatgctcttagagcagatcattttctcacaggt

SEQ ID NO: 212109 - DNA, 120 bp, Artificial Sequence
  ENSG00000115839_42 (sequence is synthesized)
aagctatgatattccaaagggcttaactagattagactcttctttattttttcccaaatgatggaaaaatatttcttttgtttagacatagatgcccttgtaggaggagaagttggaggc

SEQ ID NO: 212110 - DNA, 120 bp, Artificial Sequence
  ENSG00000115839_43 (sequence is synthesized)
atgaagctggaaaccatcattctcagcactcttaacacgggaacagaaaaccaaatgctgcatgttctcactcataagtggtatatttacttctggcacatgggaagagaaatcagatga

SEQ ID NO: 212111 - DNA, 90 bp, Artificial Sequence
  ENSG00000115839_44 (sequence is synthesized)
agcgattgcagcactgttcacaacagccaagatgtggaatcaaccagagtgtccattggcagatgaatggattaaaaatgtggtgcatgg

SEQ ID NO: 212112 - DNA, 120 bp, Artificial Sequence
  ENSG00000115839_45 (sequence is synthesized)
aaactgattggaaactctttgggaaagccactcgaaaaggtcagatctatttgctggtgtctctaaatgactatttactttgaaacctctattttccagccctttgctgcatttggcaca

SEQ ID NO: 212113 - DNA, 120 bp, Artificial Sequence
  ENSG00000115839_46 (sequence is synthesized)
tttgaattaaatgttttttaaagttacgtataatctataaacatcaaatagcatttggaagaatttggatttaaatctgtggcaaatgatatatgtaagacatttgtgaaatgtttaata

SEQ ID NO: 212114 - DNA, 120 bp, Artificial Sequence
  ENSG00000115839_47 (sequence is synthesized)
tgtgtgtgtgtatatatatatatataaaatgtcattctttgtgagtgattctttgtgagtgaagtttgcttctcttttgccttctcccttggaatgttaaaacatgtttttaaaagtttt

SEQ ID NO: 212115 - DNA, 120 bp, Artificial Sequence
  ENSG00000115839_48 (sequence is synthesized)
attttgcttactaatgaggaaaattctagtacttaccattgacttactgtagttaacaactatttcactcagtttttgtattttataatatcactaataacatcccccttcccttttaag

SEQ ID NO: 212116 - DNA, 120 bp, Artificial Sequence
  ENSG00000115839_49 (sequence is synthesized)
ctttttaacttatggatgttttaaggattttatttaagaatgaaaaaattactctttgaaattgaggtagaaatcaaattctaatctaaagtattggtagttttattcataaaccacacc

SEQ ID NO: 212117 - DNA, 120 bp, Artificial Sequence
  ENSG00000115839_50 (sequence is synthesized)
ccaaatgtttactgaagaatgtactctgagaacaaacctggattcactgtgaagggatctaacaatttgattttaagtttatgtagatgcttagtttgttagataaattcttttgaaata

SEQ ID NO: 212118 - DNA, 120 bp, Artificial Sequence
  ENSG00000115839_51 (sequence is synthesized)
aaatttatggttggttttattacaactcaatattactaactcagtgataacttattaactcagtaattattaattcaatagtaatttaattataatttaccctgtgttaggaactttgag

SEQ ID NO: 212119 - DNA, 120 bp, Artificial Sequence
  ENSG00000115839_52 (sequence is synthesized)
ttctcaatatttgctaggggttttcagctttgtgatggtgatactatcaaaaaagagactgtcaaaatgcattaggaagccaggcaacatggtgagaccctgtctcttaaggaaaaaaaa

SEQ ID NO: 212120 - DNA, 120 bp, Artificial Sequence
  ENSG00000115840_0 (sequence is synthesized)
actcgctcgtccccggcttccgagcacagcatggcggtcaaggtgcagacaactaagcgaggggatcctcatgagttaagaaacatatttctacagtatgccagtactgaggttgatgga

SEQ ID NO: 212121 - DNA, 120 bp, Artificial Sequence
  ENSG00000115840_1 (sequence is synthesized)
gagcgttatatgaccccagaagactttgttcagcgctatcttggactgtataatgatccaaatagtaacccaaagatcgtgcagctcttggcaggagtagctgatcaaaccaaggatggg

SEQ ID NO: 212122 - DNA, 120 bp, Artificial Sequence
  ENSG00000115840_2 (sequence is synthesized)
ttgatctcctatcaagagtttttggcatttgaatctgttttatgtgctccagattccatgttcatagtggctttccagttgtttgacaagagtggaaatggagaggtgacatttgaaaat

SEQ ID NO: 212123 - DNA, 120 bp, Artificial Sequence
  ENSG00000115840_3 (sequence is synthesized)
gtcaaagaaatttttggacagactattattcatcatcatatcccttttaactgggattgtgaatttatccgactgcattttgggcataaccggaagaagcatcttaactacacagaattc

SEQ ID NO: 212124 - DNA, 120 bp, Artificial Sequence
  ENSG00000115840_4 (sequence is synthesized)
acgcagtttctccaggagctgcaattggaacatgcaagacaagcctttgcactcaaagacaaaagcaaaagtggcatgatttctggtctggatttcagtgacatcatggttaccattaga

SEQ ID NO: 212125 - DNA, 120 bp, Artificial Sequence
  ENSG00000115840_5 (sequence is synthesized)
tctcacatgcttactccttttgtggaggagaacttagtttcagcagctggaggaagtatctcacaccaggttagcttctcctacttcaatgcatttaactcgttactgaataacatggag

SEQ ID NO: 212126 - DNA, 120 bp, Artificial Sequence
  ENSG00000115840_6 (sequence is synthesized)
cttgttcgtaagatatatagcactctagctggcacaaggaaagatgttgaagtcacaaaggaggaatttgcccagagtgccatacgctatggacaagtcacaccactagaaattgatatt

SEQ ID NO: 212127 - DNA, 120 bp, Artificial Sequence
  ENSG00000115840_7 (sequence is synthesized)
ctatatcagcttgcagacttatataatgcttcagggcgcttgactttggcagatattgagagaatagccccattggctgagggggccttaccttacaacctggcagaacttcagagacag

SEQ ID NO: 212128 - DNA, 120 bp, Artificial Sequence
  ENSG00000115840_8 (sequence is synthesized)
cagtctcctgggttaggcaggcctatctggctccagattgccgagtctgcttacagattcactctgggctcagttgctggagctgtgggagccactgcagtgtatcctatagatctggtg

SEQ ID NO: 212129 - DNA, 120 bp, Artificial Sequence
  ENSG00000115840_9 (sequence is synthesized)
aagacccgaatgcaaaaccagcgtggctctggctctgttgttggggagctaatgtacaaaaacagctttgactgttttaagaaagtcttgcgttatgagggcttctttggactctacagg

SEQ ID NO: 212130 - DNA, 120 bp, Artificial Sequence
  ENSG00000115840_10 (sequence is synthesized)
ggtctgataccacaacttataggggttgctccagaaaaggccattaaactgactgttaatgattttgttcgggacaaatttaccagaagagatggctctgttccacttccagcagaagtt

SEQ ID NO: 212131 - DNA, 120 bp, Artificial Sequence
  ENSG00000115840_11 (sequence is synthesized)
cttgctggaggctgtgctggaggctctcaggtcatttttaccaacccattggagatagtgaagattcgtctgcaagtagctggagagatcaccacgggacccagagtcagcgccctgaat

SEQ ID NO: 212132 - DNA, 120 bp, Artificial Sequence
  ENSG00000115840_12 (sequence is synthesized)
gtgctccgggacttgggaatttttggtctgtataagggtgccaaagcgtgtttcctccgagacattcccttctctgcaatctattttcctgtttatgctcattgcaaactacttctggct

SEQ ID NO: 212133 - DNA, 120 bp, Artificial Sequence
  ENSG00000115840_13 (sequence is synthesized)
gatgaaaatggacacgtgggaggtttaaatcttcttgcagctggagccatggcaggtgtcccagctgcatctctggtgacccctgctgatgtcatcaagacaagactgcaggtggctgcc

SEQ ID NO: 212134 - DNA, 120 bp, Artificial Sequence
  ENSG00000115840_14 (sequence is synthesized)
cgcgctggccagacgacatacagtggtgtcatcgactgtttcaggaagattctccgggaagaagggccctcagcattttggaaagggactgcagctcgagtgtttcgatcctctccccag

SEQ ID NO: 212135 - DNA, 120 bp, Artificial Sequence
  ENSG00000115840_15 (sequence is synthesized)
tttggtgttaccttggtcacttatgaacttctccagcggtggttttacattgattttggaggcctcaaacccgctggttcagaaccaacacctaagtcacgcattgcagaccttcctcct

SEQ ID NO: 212136 - DNA, 120 bp, Artificial Sequence
  ENSG00000115840_16 (sequence is synthesized)
cctagtgttgctgtggttcagccaaaggcagcagtggcagccactcagtgatgagacaactgttgagtgtggcaaaatggcgccttgaagaaagaggcctaggagagcagccctgtaatg

SEQ ID NO: 212137 - DNA, 120 bp, Artificial Sequence
  ENSG00000115840_17 (sequence is synthesized)
tatccagtcagctgcatggtactgactgagctgaggagtcaaactcttctttctgtatgacatatacatatacttgtttataaaataatcatttgcccagggaaaaaaccacaacgctgt

SEQ ID NO: 212138 - DNA, 120 bp, Artificial Sequence
  ENSG00000115840_18 (sequence is synthesized)
ttcaagctttagtcttatgtgttgaaatgtttttgtaagccttggcatgaattagtgttctagactctgctttgcacagcttgcacttacagtgattgtacatattgtacatctttgtac

SEQ ID NO: 212139 - DNA, 120 bp, Artificial Sequence
  ENSG00000115840_19 (sequence is synthesized)
agagacatcttggcacctcatcccaacaaatcacatttgtagaaatgtaatgcggttctgagtggcttgaaatgtacagaatgttttgaaagtgttttattaagaatcacacaaaaataa

SEQ ID NO: 212140 - DNA, 120 bp, Artificial Sequence
  ENSG00000115840_20 (sequence is synthesized)
atgtattaaaattaaattcattctcttattggtgacttatggaaataaagcatcaatattggatgtatttaattcctagtttgttttccattctggaataaaaaggtatttgctgataaa

SEQ ID NO: 212141 - DNA, 120 bp, Artificial Sequence
  ENSG00000115840_21 (sequence is synthesized)
aggcataacgagacatagtgctgctaccactgaataagtgatactttggaaagatgcatgccagtggatgccagaggaccaggctaatgacttgtgtgtgctgatgtgtttccatttgta

SEQ ID NO: 212142 - DNA, 120 bp, Artificial Sequence
  ENSG00000115840_22 (sequence is synthesized)
tttaatgtgtgtagaccctcctctgttcatcaatcaaaaagcatttcctaggcagctcctcgcctgtcagtgtgcatatggaaacagggacatctccatcattactggcttagttttgct

SEQ ID NO: 212143 - DNA, 120 bp, Artificial Sequence
  ENSG00000115840_23 (sequence is synthesized)
ttcctttgacacagtaaggcaaaggccaagctttcaaaagagtaaaggatactttcacaatttcccttcatatggatatgattccagtcaaaaataaaatgcacaccaaaatgtatacat

SEQ ID NO: 212144 - DNA, 120 bp, Artificial Sequence
  ENSG00000115840_24 (sequence is synthesized)
gtagttggatttttctttgtaaatatactgataatactttttgttctgattgactactgattgcaaataactcatgatcgggttcgccctttcttccacctttatagaaaacagaaaaat

SEQ ID NO: 212145 - DNA, 120 bp, Artificial Sequence
  ENSG00000115840_25 (sequence is synthesized)
tagttttagaaagggctagcgcagagtgaagggagggaagaagaaagagaagaaaagctctatatggtgatttagtggggtctaggttcttactttggaatccaaatgcaaactgttcta

SEQ ID NO: 212146 - DNA, 120 bp, Artificial Sequence
  ENSG00000115840_26 (sequence is synthesized)
aaagtcactcatcaagggcgtgattactaatttggatctaaacatagatcttgacagccacatctacactttgatatggatgtgatttgatgtgcagtatcagaatttatttaccttacc

SEQ ID NO: 212147 - DNA, 120 bp, Artificial Sequence
  ENSG00000115840_27 (sequence is synthesized)
aaagtgctctgggaagacattattgctactgccagtaagctgggatatgagaatgtatgcaaatattttcaagaggcgagcctggagacagaccaagttacttagtatcctgcacagtgc

SEQ ID NO: 212148 - DNA, 120 bp, Artificial Sequence
  ENSG00000115840_28 (sequence is synthesized)
tcctcgattgatggctgacagccctgtgactgcaactgtaggctccctggaggccctccaggaacaaaagaattagctttgaaagcaagttattttcaaatgtattagattggtctcatg

SEQ ID NO: 212149 - DNA, 120 bp, Artificial Sequence
  ENSG00000115840_29 (sequence is synthesized)
ggagtggaacaaataataatacagttgttttgctactaccacttgttagaaatatataagtagtccatggatatgtgattacaaaagaatcctatgtatgtatctagagtgagatgggaa

SEQ ID NO: 212150 - DNA, 120 bp, Artificial Sequence
  ENSG00000115840_30 (sequence is synthesized)
agtgtcccgcttaccctccttctacctccaccacttcctggcccagaggtaatcactgctaacaggttacagcatgaatatgtagtctgtttttcataactctatagaaatatatgtaca

SEQ ID NO: 212151 - DNA, 120 bp, Artificial Sequence
  ENSG00000115840_31 (sequence is synthesized)
tatttatattttagaaacaggattatgttatgtgtgtgttattctgtgtcttgcttttgttcacttaatgtgttttggatatctttccatgtcagtttataaagttttatttttaatggc

SEQ ID NO: 212152 - DNA, 120 bp, Artificial Sequence
  ENSG00000115840_32 (sequence is synthesized)
gaataagcaagataagaggagattctaaagagattgttttattcttgaagttaattcatctgttttgctgttttatcatcttaacattttatcttttaccagccttcagaaatgcatatt

SEQ ID NO: 212153 - DNA, 120 bp, Artificial Sequence
  ENSG00000115840_33 (sequence is synthesized)
tgcatattcttgtatagttgaacttaaatatttaaattcaattttagattttaaaaatgatactaaaatgcctatagctttcaggttatattatagttggtgaaggtagaactttgttat

SEQ ID NO: 212154 - DNA, 120 bp, Artificial Sequence
  ENSG00000115840_34 (sequence is synthesized)
agttttcagaatgagattattttttctaatttttaccagtcaagctttgctagcaggaactgagaacattcagaagtctgcctccaaaggcaggaagtttacctagtttcatctgaatag

SEQ ID NO: 212155 - DNA, 120 bp, Artificial Sequence
  ENSG00000115840_35 (sequence is synthesized)
ggtgcaaggccatgccaaggggaagtatttgcattattccctagcagaacctcgtacaaggctgccaactccatccgcctagtgaggatacagtgatattcaggccaaattgaatttctt

SEQ ID NO: 212156 - DNA, 120 bp, Artificial Sequence
  ENSG00000115840_36 (sequence is synthesized)
cccccggggaagattattttgctcctttgctctctgttttgttttataagtaaaaggtgtggttgtgaaatccatcttttgtgtcctgctgctgatcaatctcaacatgaccccagggag

SEQ ID NO: 212157 - DNA, 120 bp, Artificial Sequence
  ENSG00000115840_37 (sequence is synthesized)
ctcgggcacaggggcctttccctgaccagctcccctgttgtttcttaactggctgcctggccacctcttgctccagttgtaatgacttttgtcatgtaagcatgtctgaaaggagtcaca

SEQ ID NO: 212158 - DNA, 120 bp, Artificial Sequence
  ENSG00000115840_38 (sequence is synthesized)
gtcaactctcaaggtagcccttcaaacaagcgagtgattataagtattgatattcacttcccacactacgacaagaatcagcaaaaacagtagtttggtgtcagatacatttagtgactc

SEQ ID NO: 212159 - DNA, 120 bp, Artificial Sequence
  ENSG00000115840_39 (sequence is synthesized)
actaagatgacattatcatttttttatacataaaaatacttgtatcttatttaagaaaaaaaggaggtaaaataattgaaactgaaagggaacgcttgggaattgtcttattaatattgc

SEQ ID NO: 212160 - DNA, 120 bp, Artificial Sequence
  ENSG00000115840_40 (sequence is synthesized)
tactttttttttctctctcacagttatttgggatcatgcaatgtagagtgattttttttttaattcaggaaaaaataataataattttcccctgatcacactgcaacagctaataggctt

SEQ ID NO: 212161 - DNA, 120 bp, Artificial Sequence
  ENSG00000115840_41 (sequence is synthesized)
gtgcgcgcgcggggctgactgcgggagccctggctgggaagcggctagggcacccgggcaagcagcagaacccgcggccggctgagtcctctccagccgcgagaggcgggctccagccgc

SEQ ID NO: 212162 - DNA, 120 bp, Artificial Sequence
  ENSG00000115840_42 (sequence is synthesized)
agcagaacccgcggccggctgagtcctctccagccgcgagaggcgggctccagccgcggctcgcgcgctcgctctgagcccccgcgcccaggtgggatggaagaagcctgtcaggttgtc

SEQ ID NO: 212163 - DNA, 120 bp, Artificial Sequence
  ENSG00000115840_43 (sequence is synthesized)
tgtgttttcccctgtgaaagcattcaggatcttaattttatgctgtggattctgaacttaataatttggcctgtgagtcgatctttttaggtgcagacaactaagcgaggggatcctcat

SEQ ID NO: 212164 - DNA, 120 bp, Artificial Sequence
  ENSG00000115840_44 (sequence is synthesized)
tataatagatatcttagtggcatttctcttgaactcaagggattctaagcaggttttctcaataatcatatggaataagttttaaattttattgtaaaagctaacgggttttgagtgtag

SEQ ID NO: 212165 - DNA, 120 bp, Artificial Sequence
  ENSG00000115841_0 (sequence is synthesized)
atctgggtcaggacgcgacggccgcggcgcgggaccttaggacccgcgggctccagggctactgtccgtccgccactgcgcgccagcaggtcctggtctccgctctccaacagctgaaag

SEQ ID NO: 212166 - DNA, 120 bp, Artificial Sequence
  ENSG00000115841_1 (sequence is synthesized)
gccggcgcagtgaacacagaaacgaaaaccaagaaatgccttattccacaaacaaagagttgatacttggcatcatggtgggcactgctggaatcagcttgctgctcttgtggtaccaca

SEQ ID NO: 212167 - DNA, 120 bp, Artificial Sequence
  ENSG00000115841_2 (sequence is synthesized)
aggtccgtaaaccagggatagcaatgaagttacctgaatttctttctctgggtaatacatttaattcaataactttgcaagatgaaatacatgatgaccaaggaacaacagtaatctttc

SEQ ID NO: 212168 - DNA, 120 bp, Artificial Sequence
  ENSG00000115841_3 (sequence is synthesized)
aagaaaggcaacttcagatactggagaagttaaacgaattactgacaaatatggaagaactcaaagaggaaatcagatttcttaaagaagctattccaaagctggaggaatatatacaag

SEQ ID NO: 212169 - DNA, 120 bp, Artificial Sequence
  ENSG00000115841_4 (sequence is synthesized)
atgaacttggagggaaaataactgttcataagataagccctcagcacagagcgagaaaaagaagactccccacaattcaaagttcagcaacaagtaatagttcagaggaagcagaaagtg

SEQ ID NO: 212170 - DNA, 120 bp, Artificial Sequence
  ENSG00000115841_5 (sequence is synthesized)
aaggagggtatattacagctaatactgacacagaagaacagagttttccagtccctaaggcatttaacacacgtgtagaggaattaaatttagatgtccttcttcagaaggtagatcatt

SEQ ID NO: 212171 - DNA, 120 bp, Artificial Sequence
  ENSG00000115841_6 (sequence is synthesized)
tacgtatgagtgagtctggcaagtcggagagttttgaactacttcgtgaccacaaagaaaagtttagagatgaaatagagtttatgtggcgatttgctcgtgcttatggagacatgtatg

SEQ ID NO: 212172 - DNA, 120 bp, Artificial Sequence
  ENSG00000115841_7 (sequence is synthesized)
ctacaaacacacaagaaaagaaacattatgctaatattggaaaaactttaagtgaaagagctattaatagagcacccatgaatggacattgtcatctgtggtatgcagttttgtgtggct

SEQ ID NO: 212173 - DNA, 120 bp, Artificial Sequence
  ENSG00000115841_8 (sequence is synthesized)
atgtatctgagtttgagggtttacaaaacaaaatcaactatgggcacctcttcaaggaacatctagatatagcaatcaaacttttaccagaggaaccctttctatattacctcaaaggga

SEQ ID NO: 212174 - DNA, 120 bp, Artificial Sequence
  ENSG00000115841_9 (sequence is synthesized)
gatactgctatactgtctcaaaactgagctggattgagaaaaaaatggctgctactctgtttggaaaaataccatcttcaactgtacaagaagctttacacaatttccttaaggctgaag

SEQ ID NO: 212175 - DNA, 120 bp, Artificial Sequence
  ENSG00000115841_10 (sequence is synthesized)
aactatgccctggttattctaatcccaattacatgtacttagcaaagtgttatactgatcttgaggaaaaccagaatgctttgaagttctgtaatttggctttattgcttcctactgtta

SEQ ID NO: 212176 - DNA, 120 bp, Artificial Sequence
  ENSG00000115841_11 (sequence is synthesized)
ccaaagaggataaagaggcacagaaagagatgcaaaaaataatgacttccttgaagaggtaaataaacgaatttactcttcaacaaatcagatgtggtctaccaaaatttaaatgaatca

SEQ ID NO: 212177 - DNA, 120 bp, Artificial Sequence
  ENSG00000115841_12 (sequence is synthesized)
aagttgtgcttttattatccttcatttttgatgtaagggtattgtgcttagatttgaaggtaaagccatgtttctgcagaatgcattccactagtagcactacaaaattaattatgttat

SEQ ID NO: 212178 - DNA, 120 bp, Artificial Sequence
  ENSG00000115841_13 (sequence is synthesized)
agtagcactacaaaattaattatgttatttggagaatctatatactataatgtcaatacataatctataaacatgtatgctttatatttttcttatcaataaactgcagccttaagaata

SEQ ID NO: 212179 - DNA, 120 bp, Artificial Sequence
  ENSG00000115841_14 (sequence is synthesized)
tacttcatcaatttttcttttctttttatggactcttttctgttggcaaaaaaaacctgttatttcttgatcttttggcaccattttcgcacttaataatggcgtaatttctcttctatt

SEQ ID NO: 212180 - DNA, 120 bp, Artificial Sequence
  ENSG00000115841_15 (sequence is synthesized)
actcagcaaaggacatgaacaagttgttggcagaagaggaaaaacaaacaaatgtagtattgtaactggtaatcaaaagatgtgaataaaattacaataaaatactgttttaccatcaaa

SEQ ID NO: 212181 - DNA, 120 bp, Artificial Sequence
  ENSG00000115841_16 (sequence is synthesized)
atgttaactccacatgcagcttgagcattcagtcttctgacctgttccacctctacagggcattttatggcttaaggatgacggcctagaagggaagggagagacttactttggattaaa

SEQ ID NO: 212182 - DNA, 120 bp, Artificial Sequence
  ENSG00000115841_17 (sequence is synthesized)
tcccatggagaaataaatctctatttgtctgaggatttagcaactctaaacacattgtctaaaacttgatagctctccaggattatatttaggtaatttgagtaaaaaaagtgactgctc

SEQ ID NO: 212183 - DNA, 120 bp, Artificial Sequence
  ENSG00000115841_18 (sequence is synthesized)
ttttgagtatatgcattttcaatttacagatattaactgagatgctcattatattgataatagataacttggaaaggaaaagaagaaaaggatgccacagctcaggaagaatttctagat

SEQ ID NO: 212184 - DNA, 120 bp, Artificial Sequence
  ENSG00000115841_19 (sequence is synthesized)
tttggtgcctatcaaatctcttctctgcatagatggagctagtgtctggataatattaattggttttaagatccaaatgtaacactacattaggtcatatttcttagccatgagtatttg

SEQ ID NO: 212185 - DNA, 120 bp, Artificial Sequence
  ENSG00000115841_20 (sequence is synthesized)
tagattcaataatctataaataccagtttacctgcctaagtttttaaaaagttgcagtagaaaacaagaatagaatagacaagttaccaagttaatttaacaggcaactccatcttttct

SEQ ID NO: 212186 - DNA, 120 bp, Artificial Sequence
  ENSG00000115841_21 (sequence is synthesized)
agttacagctttgccaaggtcaatggttgtcactgtccctgagtttctacctttcagataatttttactcatcaaggaatagaaacaaatgtattggaaaggagcaagtgtgacatagtc

SEQ ID NO: 212187 - DNA, 120 bp, Artificial Sequence
  ENSG00000115841_22 (sequence is synthesized)
gtgtatccattattttagtgtcagactgattaccatctgcaccaatccctgctgccgttgtcaaggaaatcttttctccatgtggagcctcagtttgaatcctggttttggcatgttctg

SEQ ID NO: 212188 - DNA, 120 bp, Artificial Sequence
  ENSG00000115841_23 (sequence is synthesized)
ttttaagcccctcataatgcaagttattaatatgttttaagtctaaactccttagaacaactagttatgccctaggttctaggaattacaaactactttttaaaaataacccagcagcct

SEQ ID NO: 212189 - DNA, 120 bp, Artificial Sequence
  ENSG00000115841_24 (sequence is synthesized)
aaatgaaggtttaggtttgacagctcttactgctaagtccaagaacagctctctgagtcacttgagcatgtgcagaaacagtcacgccctgatggttaaacttagtcccagtcctcctga

SEQ ID NO: 212190 - DNA, 120 bp, Artificial Sequence
  ENSG00000115841_25 (sequence is synthesized)
ttagcctaacatagaaccagtttaatcttaaggaaataaaagtgctaaaggaagagttattttaaaagctaactcctaaagttgcagacatttctctggaagattcttggggtatcagac

SEQ ID NO: 212191 - DNA, 120 bp, Artificial Sequence
  ENSG00000115841_26 (sequence is synthesized)
caaatcagtattctcaatcctgtcttaaaatgtataatcgctgtactatacaactctaagcagtaatatatgtgtgtgtgagctcacatgtaaatgtataatatagccacccatataatc

SEQ ID NO: 212192 - DNA, 120 bp, Artificial Sequence
  ENSG00000115841_27 (sequence is synthesized)
aacttcctgtgggggtaataatccctttacctttctctggaaccagtttcaaaattttatagttactaaatgtgttttccttcccaacctacctacttcaagtttacaaaaatacagaca

SEQ ID NO: 212193 - DNA, 63 bp, Artificial Sequence
  ENSG00000115841_28 (sequence is synthesized)
ttcccaacctacctacttcaagtttacaaaaatacagacaaggctgcatgcagtggctcacct

SEQ ID NO: 212194 - DNA, 120 bp, Artificial Sequence
  ENSG00000115841_29 (sequence is synthesized)
caacgatgttctccagaagatcaagttagtacagacgcccagcatcgtggagcctcttctatttcacaaccaagtatatctcttggtcataaaacatcttattcccctgtaacacataaa

SEQ ID NO: 212195 - DNA, 120 bp, Artificial Sequence
  ENSG00000115841_30 (sequence is synthesized)
gtcaatgcagccaaagcaagtagaaggttattatctgtatcaagtccatctttctctgaaagaagatattctttatttgttggatttcaaaaaagaaatgcttccccttactggcaacaa

SEQ ID NO: 212196 - DNA, 120 bp, Artificial Sequence
  ENSG00000115841_31 (sequence is synthesized)
agtagagctaactttgattctgaagaagacacaggcttcactgatataaaatcttcctcagaccattgtggtagctttatttcccgcagaagacgtttctcatcccgtaaactaagtata

SEQ ID NO: 212197 - DNA, 120 bp, Artificial Sequence
  ENSG00000115841_32 (sequence is synthesized)
gtttcctattacaagagtgccattttttttgatcctcaagcaagtggccagaatgtgtttaatctaaatgaaatcgaaatcttttctaaaacttcaagtaatactgatgctaaaaaacat

SEQ ID NO: 212198 - DNA, 120 bp, Artificial Sequence
  ENSG00000115841_33 (sequence is synthesized)
ataaccatctctgctcctgaatataacactaaaaattttaagaattttgaaacaaacactacttctccagcctttgggaacactattgatacagcctcctatcaacaaagcacatcatcc

SEQ ID NO: 212199 - DNA, 120 bp, Artificial Sequence
  ENSG00000115841_34 (sequence is synthesized)
ttcttttctcttgcaagtgatatttcctctcccgatcaacaaaatggaattgccaatgatattcaacaaaggggccaattatgtaaagatttaaaagatttccttcatcctcgtcctgaa

SEQ ID NO: 212200 - DNA, 120 bp, Artificial Sequence
  ENSG00000115841_35 (sequence is synthesized)
agttacagcacagatcattctccaatcatgattccacagcatccctctcaaagtggaactttcccattcctccataaagctggattttcttcatcttataaaaattctggttgctttatc

SEQ ID NO: 212201 - DNA, 120 bp, Artificial Sequence
  ENSG00000115841_36 (sequence is synthesized)
cttgtttcaagatgaagacagatcttcacctattgaaattcctaaaataaggtcacctcagactttaccctctcttagaagggcacctcaaatagttttcccaccagtcactttcatagc

SEQ ID NO: 212202 - DNA, 120 bp, Artificial Sequence
  ENSG00000115841_37 (sequence is synthesized)
ctgtagaattcatttctcataactcccctttcctcacaaagcttcactgcattttctgaagaagattcctacattgcagtgtaaatttaattgctgtagttttgaaagttagtttactga

SEQ ID NO: 212203 - DNA, 120 bp, Artificial Sequence
  ENSG00000115841_38 (sequence is synthesized)
tgttattggagtatggaagtcaaagatgattttgtttcaagcttttttcagatttactgcttaaagatgggctaatctcagatttctgagtgactattataatacttttgtggtctgaaa

SEQ ID NO: 212204 - DNA, 120 bp, Artificial Sequence
  ENSG00000115841_39 (sequence is synthesized)
ataacatcaagccttgatgtatggactttctaaaagtaatacattctttgagagtttagtatccccttttatcatactctaatcattagaaatagtattcttacataatcattagagcta

SEQ ID NO: 212205 - DNA, 120 bp, Artificial Sequence
  ENSG00000115841_40 (sequence is synthesized)
ttttcatcaattcacacattttcatatatatcagccttgctagctatatttctcatgcctgatgttccactgacagataatgtttttattaacacaagaatcaaattagaagttaaaaat

SEQ ID NO: 212206 - DNA, 120 bp, Artificial Sequence
  ENSG00000115841_41 (sequence is synthesized)
attatagcggaatatgtagaatatttagaaaccagatattttaactaagtaattttaatacacattcatgtatgtgcaaatctgggcattcaaggaattctgaaatcaggaaaaagtatg

SEQ ID NO: 212207 - DNA, 120 bp, Artificial Sequence
  ENSG00000115841_42 (sequence is synthesized)
ttagtctcccaaaattttatttttaaaaatgaatatttttcatttttttccgattgtattaacaaagactgttataaagtatttatcaaagtagctaatgaataaaaatgcatgtaagca

SEQ ID NO: 212208 - DNA, 120 bp, Artificial Sequence
  ENSG00000115841_43 (sequence is synthesized)
agcaattgaaaacatttaagttagaatacaattagattttgtagaggaaaggaatttgcattatttctaattatcctaataaaatgtcccccaaatttatttcatggggctaagatgtta

SEQ ID NO: 212209 - DNA, 120 bp, Artificial Sequence
  ENSG00000115841_44 (sequence is synthesized)
gcaagccctgtcatctgtgagtgtggcacagtgaaggcctggagagtcatgacctaggccctgtgaagtcaagtatttttaccaagtaaaaagattggcaataaaacatttccacatagt

SEQ ID NO: 212210 - DNA, 120 bp, Artificial Sequence
  ENSG00000115841_45 (sequence is synthesized)
cctctagggtggagactccaggttgtaagcttgcttgcctgggccttcaaaacagcgaaagctgactctgaagcaagactgacttaggttctaagaagagctgtctagtgacaataccat

SEQ ID NO: 212211 - DNA, 120 bp, Artificial Sequence
  ENSG00000115844_0 (sequence is synthesized)
agacaatcgtaaagccgctcggggccgctcacctgctcccgcctcccagagccccgacccggcccagccacccctgccccctccactgcccgccccccgccagagcccgcgctcgcgctg

SEQ ID NO: 212212 - DNA, 120 bp, Artificial Sequence
  ENSG00000115844_1 (sequence is synthesized)
ggcaaggagccgagcgggcccagaggccgaaagaggatgcgaccagaggcagctgtcccgagcagcgcacggtgatcgcctcccccggaggaggaggcgcctagacggttgcctcctttc

SEQ ID NO: 212213 - DNA, 120 bp, Artificial Sequence
  ENSG00000115844_2 (sequence is synthesized)
ttgtttccccaccaccacccccgtaattacattggctgctggaggggaccgggagagacagaggaggcgcctggcttcccccgcacgcccgccacctctgctctttcccgtctcgggcca

SEQ ID NO: 212214 - DNA, 120 bp, Artificial Sequence
  ENSG00000115844_3 (sequence is synthesized)
ggatgactggagtctttgacagtctagtggctgatatgcactcgacccagatcgccgcctccagcacgtaccaccagcaccagcagcccccgagcggcggcggcgccggcccgggtggca

SEQ ID NO: 212215 - DNA, 120 bp, Artificial Sequence
  ENSG00000115844_4 (sequence is synthesized)
acagcagcagcagcagcagcctccacaagccccaggagtcgcccacccttccggtgtccaccgccaccgacagcagctactacaccaaccagcagcacccggcgggcggcggcggcggcg

SEQ ID NO: 212216 - DNA, 120 bp, Artificial Sequence
  ENSG00000115844_5 (sequence is synthesized)
ggggctcgccctacgcgcacatgggttcctaccagtaccaagccagcggcctcaacaacgtcccttactccgccaagagcagctatgacctgggctacaccgccgcctacacctcctacg

SEQ ID NO: 212217 - DNA, 120 bp, Artificial Sequence
  ENSG00000115844_6 (sequence is synthesized)
ctccctatggaaccagttcgtccccagccaacaacgagcctgagaaggaggaccttgagcctgaaattcggatagtgaacgggaagccaaagaaagtccggaaaccccgcaccatctact

SEQ ID NO: 212218 - DNA, 120 bp, Artificial Sequence
  ENSG00000115844_7 (sequence is synthesized)
ccagtttccagctggcggctcttcagcggcgtttccaaaagactcaatacttggccttgccggagcgagccgagctggcggcctctctgggcctcacccagactcaggtcaaaatctggt

SEQ ID NO: 212219 - DNA, 120 bp, Artificial Sequence
  ENSG00000115844_8 (sequence is synthesized)
tccagaaccgccggtccaagttcaagaagatgtggaaaagtggtgagatcccctcggagcagcaccctggggccagcgcttctccaccttgtgcttcgccgccagtctcagcgccggcct

SEQ ID NO: 212220 - DNA, 120 bp, Artificial Sequence
  ENSG00000115844_9 (sequence is synthesized)
cctgggactttggtgtgccgcagcggatggcgggcggcggtggtccgggcagtggcggcagcggcgccggcagctcgggctccagcccgagcagcgcggcctcggcttttctgggcaact

SEQ ID NO: 212221 - DNA, 120 bp, Artificial Sequence
  ENSG00000115844_10 (sequence is synthesized)
cgctgctgcaccccactcagaccccgcagccgcatcaccaccaccaccatcacggcggcgggggcgccccggtgagcgcggggacgattttctaaccccagggagaactcgccagagact

SEQ ID NO: 212222 - DNA, 120 bp, Artificial Sequence
  ENSG00000115844_11 (sequence is synthesized)
gagagcagagaccacttatcctcattgcttaccccgagccggggttccctcctcccggcccgctgccgccacccacctctcctgcaggctgcgacctgcagtggcccgtctcaggccctg

SEQ ID NO: 212223 - DNA, 120 bp, Artificial Sequence
  ENSG00000115844_12 (sequence is synthesized)
ctcactcccggggccaccaaacgggcccctctctcgggggaaccggacagcagcttggcaaaggcctccctaaaaggccgcatttctgacctgagccccgggtctcggctgtttcgagcc

SEQ ID NO: 212224 - DNA, 120 bp, Artificial Sequence
  ENSG00000115844_13 (sequence is synthesized)
ccgcctcggacttgccttccctcccctccgggtgagcctgtctggcgccttcctcgccccgggctgagagctgggtcccgggagatggaagcctcccaggcgcgcgaggcttcccgggcg

SEQ ID NO: 212225 - DNA, 120 bp, Artificial Sequence
  ENSG00000115844_14 (sequence is synthesized)
ctctgaggcttctttctcctcgcccgctcccctgggctcagctcggacgctgcagttattgacctcccggtcccgcctgcccgccctcccccacgtggccccttgacccgggcggccccg

SEQ ID NO: 212226 - DNA, 120 bp, Artificial Sequence
  ENSG00000115844_15 (sequence is synthesized)
ccgcttctttccttcctgcagttcccagccctcggagcccccatcccttatcttacccccaccgcgctcccccaggagcgctccctcagctctctcctcatccatcaccagtggagtttt

SEQ ID NO: 212227 - DNA, 120 bp, Artificial Sequence
  ENSG00000115844_16 (sequence is synthesized)
tttatttgttatttttttaaaagtttaggtgcctttgcggatgacctcattttgacgttgaaaaaatgattttttaatatgtgaacactgcaaaaatgtgtttaaattatcttttttaaa

SEQ ID NO: 212228 - DNA, 120 bp, Artificial Sequence
  ENSG00000115844_17 (sequence is synthesized)
acctattcaggattattagcctggacttggacacagagtttgtaaataaaggtgtctgtgcagattttcccactgatttatttgtataaaaatactcatcttttcagacttttttgtaaa

SEQ ID NO: 212229 - DNA, 120 bp, Artificial Sequence
  ENSG00000115844_18 (sequence is synthesized)
cccccagttgtgaaaactgcagtttagcagtgacctcagcaacccctcctttttattttttcctttaaaaacatttcagttaaattaagctactgatttggatttgttttatcgtatcct

SEQ ID NO: 212230 - DNA, 120 bp, Artificial Sequence
  ENSG00000115844_19 (sequence is synthesized)
aaagtctttgttgttgaaatgaaaggtattttggggttatttattatgaaaacaacatgctcttaatgttgattttacaatatgaagagattatttaaataaattattgttttcattgga

SEQ ID NO: 212231 - DNA, 120 bp, Artificial Sequence
  ENSG00000115844_20 (sequence is synthesized)
ttaggacaatgctttttaaagttcattttaagtacttttaaggatttccaggcctgcgcctcgagcggccctaagtaagcttctaggcccaaagctggaaacccccaaggggccgccgtg

SEQ ID NO: 212232 - DNA, 120 bp, Artificial Sequence
  ENSG00000115844_21 (sequence is synthesized)
ggagggaaggaaagggaccgggtggacagaaatcccgtacctctcgctactgattaagcgggtgaaataactggccctcctcaccctcccgctgtcaccatcatcacagtgcacgtacac

SEQ ID NO: 212233 - DNA, 120 bp, Artificial Sequence
  ENSG00000115844_22 (sequence is synthesized)
cagcagtcctggccttttggcaattacctccccagggagcaggaaccggcagagcctcgaaggccgccgcccgtgatcctcttatctccccagggcgctcgctgcccaccgctagccagc

SEQ ID NO: 212234 - DNA, 120 bp, Artificial Sequence
  ENSG00000115850_0 (sequence is synthesized)
aacagttcctagaaaatggagctgtcttggcatgtagtctttattgccctgctaagtttttcatgctgggggtcagactgggagtctgatagaaatttcatttccaccgctggtcctcta

SEQ ID NO: 212235 - DNA, 120 bp, Artificial Sequence
  ENSG00000115850_1 (sequence is synthesized)
accaatgacttgctgcacaacctgagtggtctcctgggagaccagagttctaactttgtagcaggggacaaagacatgtatgtttgtcaccagccactgcccactttcctgccagaatac

SEQ ID NO: 212236 - DNA, 120 bp, Artificial Sequence
  ENSG00000115850_2 (sequence is synthesized)
ttcagcagtctccatgccagtcagatcacccattataaggtatttctgtcatgggcacagctcctcccagcaggaagcacccagaatccagacgagaaaacagtgcagtgctaccggcga

SEQ ID NO: 212237 - DNA, 120 bp, Artificial Sequence
  ENSG00000115850_3 (sequence is synthesized)
ctcctcaaggccctcaagactgcacggcttcagcccatggtcatcctgcaccaccagaccctccctgccagcaccctccggagaaccgaagcctttgctgacctcttcgccgactatgcc

SEQ ID NO: 212238 - DNA, 120 bp, Artificial Sequence
  ENSG00000115850_4 (sequence is synthesized)
acattcgccttccactccttcggggacctagttgggatctggttcaccttcagtgacttggaggaagtgatcaaggagcttccccaccaggaatcaagagcgtcacaactccagaccctc

SEQ ID NO: 212239 - DNA, 120 bp, Artificial Sequence
  ENSG00000115850_5 (sequence is synthesized)
agtgatgcccacagaaaagcctatgagatttaccacgaaagctatgcttttcagggcggaaaactctctgttgtcctgcgagctgaagatatcccggagctcctgctagaaccacccata

SEQ ID NO: 212240 - DNA, 120 bp, Artificial Sequence
  ENSG00000115850_6 (sequence is synthesized)
tctgcgcttgcccaggacacggtcgatttcctctctcttgatttgtcttatgaatgccaaaatgaggcaagtctgcggcagaagctgagtaaattgcagaccattgagccaaaagtgaaa

SEQ ID NO: 212241 - DNA, 120 bp, Artificial Sequence
  ENSG00000115850_7 (sequence is synthesized)
gttttcatcttcaacctaaaactcccagactgcccctccaccatgaagaacccagccagtctgctcttcagcctttttgaagccataaataaagaccaagtgctcaccattgggtttgat

SEQ ID NO: 212242 - DNA, 120 bp, Artificial Sequence
  ENSG00000115850_8 (sequence is synthesized)
attaatgagtttctgagttgttcatcaagttccaagaaaagcatgtcttgttctctgactggcagcctggcccttcagcctgaccagcagcaggaccacgagaccacggactcctctcct

SEQ ID NO: 212243 - DNA, 120 bp, Artificial Sequence
  ENSG00000115850_9 (sequence is synthesized)
gcctctgcctatcagagaatctgggaagcatttgccaatcagtccagggcggaaagggatgccttcctgcaggatactttccctgaaggcttcctctggggtgcctccacaggagccttt

SEQ ID NO: 212244 - DNA, 120 bp, Artificial Sequence
  ENSG00000115850_10 (sequence is synthesized)
aacgtggaaggaggctgggccgagggtgggagaggggtgagcatctgggatccacgcaggcccctgaacaccactgagggccaagcgacgctggaggtggccagcgacagttaccacaag

SEQ ID NO: 212245 - DNA, 120 bp, Artificial Sequence
  ENSG00000115850_11 (sequence is synthesized)
gtagcctctgacgtcgccctgctttgcggcctccgggctcaggtgtacaagttctccatctcctggtcccggatcttccccatggggcacgggagcagccccagcctcccaggcgttgcc

SEQ ID NO: 212246 - DNA, 120 bp, Artificial Sequence
  ENSG00000115850_12 (sequence is synthesized)
tactacaacaagctgattgacaggctacaggatgcgggcatcgagcccatggccacgctgttccactgggacctgcctcaggccctgcaggatcatggtggatggcagaatgagagcgtg

SEQ ID NO: 212247 - DNA, 120 bp, Artificial Sequence
  ENSG00000115850_13 (sequence is synthesized)
gtggatgccttcctggactatgcggccttctgcttctccacatttggggaccgtgtgaagctgtgggtgaccttccatgagccgtgggtgatgagctacgcaggctatggcaccggccag

SEQ ID NO: 212248 - DNA, 120 bp, Artificial Sequence
  ENSG00000115850_14 (sequence is synthesized)
caccctcccggcatctctgacccaggagtggcctcttttaaggtggctcacttggtcctcaaggctcatgccagaacttggcaccactacaacagccatcatcgcccacagcagcagggg

SEQ ID NO: 212249 - DNA, 120 bp, Artificial Sequence
  ENSG00000115850_15 (sequence is synthesized)
cacgtgggcattgtgctgaactcagactgggcagaacccctgtctccagagaggcctgaggacctgagagcctctgagcgcttcttgcacttcatgctgggctggtttgcacaccccgtc

SEQ ID NO: 212250 - DNA, 120 bp, Artificial Sequence
  ENSG00000115850_16 (sequence is synthesized)
tttgtggatggagactacccagccaccctgaggacccagatccaacagatgaacagacagtgctcccatcctgtggctcaactccccgagttcacagaggcagagaagcagctcctgaaa

SEQ ID NO: 212251 - DNA, 120 bp, Artificial Sequence
  ENSG00000115850_17 (sequence is synthesized)
ggctctgctgattttctgggtctgtcgcattacacctcccgcctcatcagcaacgccccacaaaacacctgcatccctagctatgataccattggaggcttctcccaacacgtgaaccat

SEQ ID NO: 212252 - DNA, 120 bp, Artificial Sequence
  ENSG00000115850_18 (sequence is synthesized)
gtgtggccccagacctcatcctcttggattcgtgtggtgccctgggggataaggaggctgttgcagtttgtatccctggaatacacaagaggaaaagttccaatataccttgccgggaat

SEQ ID NO: 212253 - DNA, 120 bp, Artificial Sequence
  ENSG00000115850_19 (sequence is synthesized)
ggcatgcccataggggaaagtgaaaatctctttgatgattccttaagagtagactacttcaatcaatatatcaatgaggtgctcaaggctatcaaggaagactctgtggatgttcgttcc

SEQ ID NO: 212254 - DNA, 120 bp, Artificial Sequence
  ENSG00000115850_20 (sequence is synthesized)
tacattgctcgttccctcattgatggcttcgaaggcccttctggttacagccagcggtttggcctgcaccacgtcaacttcagcgacagcagcaagtcaaggactcccaggaaatctgcc

SEQ ID NO: 212255 - DNA, 120 bp, Artificial Sequence
  ENSG00000115850_21 (sequence is synthesized)
tactttttcactagcatcatagaaaagaacggtttcctcaccaagggggcaaaaagactgctaccacctaatacagtaaacctcccctccaaagtcagagccttcacttttccatctgag

SEQ ID NO: 212256 - DNA, 120 bp, Artificial Sequence
  ENSG00000115850_22 (sequence is synthesized)
gtgccctccaaggctaaagtcgtttgggaaaagttctccagccaacccaagttcgaaagagatttgttctaccacgggacgtttcgggatgactttctgtggggcgtgtcctcttccgct

SEQ ID NO: 212257 - DNA, 120 bp, Artificial Sequence
  ENSG00000115850_23 (sequence is synthesized)
tatcagattgaaggcgcgtgggatgccgatggcaaaggccccagcatctgggataactttacccacacaccagggagcaatgtgaaagacaatgccactggagacatcgcctgtgacagc

SEQ ID NO: 212258 - DNA, 120 bp, Artificial Sequence
  ENSG00000115850_24 (sequence is synthesized)
tatcaccagctggatgccgatctgaatatgctccgagctttgaaggtgaaggcctaccgcttctctatctcctggtctcggattttcccaactgggagaaacagctctatcaacagtcat

SEQ ID NO: 212259 - DNA, 120 bp, Artificial Sequence
  ENSG00000115850_25 (sequence is synthesized)
ggggttgattattacaacaggctgatcaatggcttggtggcaagcaacatctttcccatggtgacattgttccattgggacctgccccaggccctccaggatatcggaggctgggagaat

SEQ ID NO: 212260 - DNA, 120 bp, Artificial Sequence
  ENSG00000115850_26 (sequence is synthesized)
gacttttgtttccagacctttggtgatagagtcaagttttggatgacttttaatgagcccatgtacctggcatggctaggttatggctcaggggaatttcccccaggggtgaaggaccca

SEQ ID NO: 212261 - DNA, 120 bp, Artificial Sequence
  ENSG00000115850_27 (sequence is synthesized)
ggctgggcaccatataggatagcccacgccgtcatcaaagcccatgccagagtctatcacacgtacgatgagaaatacaggcaggagcagaagggggtcatctcgctgagcctcagtaca

SEQ ID NO: 212262 - DNA, 120 bp, Artificial Sequence
  ENSG00000115850_28 (sequence is synthesized)
cactgggcagagcccaagtcaccaggggtccccagagatgtggaagccgctgaccgaatgctgcagttctccctgggctggtttgctcaccccatttttagaaacggagactatcctgac

SEQ ID NO: 212263 - DNA, 120 bp, Artificial Sequence
  ENSG00000115850_29 (sequence is synthesized)
accatgaagtggaaagtggggaacaggagtgaactgcagcacttagccacctcccgcctgccaagcttcactgaggaagagaagaggttcatcagggcgacggccgacgtcttctgcctc

SEQ ID NO: 212264 - DNA, 120 bp, Artificial Sequence
  ENSG00000115850_30 (sequence is synthesized)
aacacgtactactccagaatcgtgcagcacaaaacacccaggctaaacccaccctcctacgaagacgaccaggagatggctgaggaggaggacccttcgtggccttccacggcaatgaac

SEQ ID NO: 212265 - DNA, 120 bp, Artificial Sequence
  ENSG00000115850_31 (sequence is synthesized)
agagctgcgccctgggggacgcgaaggctgctgaactggatcaaggaagagtatggtgacatccccatttacatcaccgaaaacggagtggggctgaccaatccgaacacggaggatact

SEQ ID NO: 212266 - DNA, 120 bp, Artificial Sequence
  ENSG00000115850_32 (sequence is synthesized)
gataggatattttaccacaaaacctacatcaatgaggctttgaaagcctacaggctcgatggtatagaccttcgagggtatgtcgcctggtctctgatggacaactttgagtggctaaat

SEQ ID NO: 212267 - DNA, 120 bp, Artificial Sequence
  ENSG00000115850_33 (sequence is synthesized)
ggctacacggtcaagtttggactgtaccatgttgatttcaacaacacgaacaggcctcgcacagcaagagcctccgccaggtactacacagaggtcattaccaacaacggcatgccactg

SEQ ID NO: 212268 - DNA, 120 bp, Artificial Sequence
  ENSG00000115850_34 (sequence is synthesized)
gccagggaggatgagtttctgtacggacggtttcctgagggcttcatctggagtgcagcttctgctgcatatcagattgaaggtgcgtggagagcagatggcaaaggactcagcatttgg

SEQ ID NO: 212269 - DNA, 120 bp, Artificial Sequence
  ENSG00000115850_35 (sequence is synthesized)
gacacgttttctcacacaccactgagggttgagaacgatgccattggagacgtggcctgtgacagttatcacaagattgctgaggatctggtcaccctgcagaacctgggcgtgtcccac

SEQ ID NO: 212270 - DNA, 120 bp, Artificial Sequence
  ENSG00000115850_36 (sequence is synthesized)
taccgtttttccatctcctggtctcgcatcctccctgatggaaccaccaggtacatcaatgaagcgggcctgaactactacgtgaggctcatcgatacactgctggccgccagcatccag

SEQ ID NO: 212271 - DNA, 120 bp, Artificial Sequence
  ENSG00000115850_37 (sequence is synthesized)
ccccaggtgaccatttaccactgggacctaccacagacgctccaagatgtaggaggctgggagaatgagaccatcgtgcagcggtttaaggagtatgcagatgtgctcttccagaggctg

SEQ ID NO: 212272 - DNA, 120 bp, Artificial Sequence
  ENSG00000115850_38 (sequence is synthesized)
ggagacaaggtgaagttttggatcacgctgaatgagccctttgtcattgcttaccagggctatggctacggaacagcagctccaggagtctccaataggcctggcactgccccctacatt

SEQ ID NO: 212273 - DNA, 120 bp, Artificial Sequence
  ENSG00000115850_39 (sequence is synthesized)
gttggccacaatctaataaaggctcatgctgaggcctggcatctgtacaacgatgtgtaccgcgccagtcaaggtggcgtgatttccatcaccatcagcagtgactgggctgaacccaga

SEQ ID NO: 212274 - DNA, 120 bp, Artificial Sequence
  ENSG00000115850_40 (sequence is synthesized)
gatccctctaaccaggaggatgtggaggcagccaggagatatgttcagttcatgggaggctggtttgcacatcctattttcaagaatggagattacaatgaggtgatgaagacgcggatc

SEQ ID NO: 212275 - DNA, 120 bp, Artificial Sequence
  ENSG00000115850_41 (sequence is synthesized)
cgtgacaggagcttggctgcaggcctcaacaagtctcggctgccagaatttacagagagtgagaagaggaggatcaacggcacctatgacttttttgggttcaatcactacaccactgtc

SEQ ID NO: 212276 - DNA, 120 bp, Artificial Sequence
  ENSG00000115850_42 (sequence is synthesized)
ctcgcctacaacctcaactatgccactgccatctcttcttttgatgcagacagaggagttgcttccatcgcagatcgctcgtggccagactctggctccttctggctgaagatgacgcct

SEQ ID NO: 212277 - DNA, 120 bp, Artificial Sequence
  ENSG00000115850_43 (sequence is synthesized)
tttggcttcaggaggatcctgaactggttaaaggaggaatacaatgaccctccaatttatgtcacagagaatggagtgtcccagcgggaagaaacagacctcaatgacactgcaaggatc

SEQ ID NO: 212278 - DNA, 120 bp, Artificial Sequence
  ENSG00000115850_44 (sequence is synthesized)
tactaccttcggacttacatcaatgaggccctcaaagctgtgcaggacaaggtggaccttcgaggatacacagtttggagtgcgatggacaattttgagtgggccacaggcttttcagag

SEQ ID NO: 212279 - DNA, 120 bp, Artificial Sequence
  ENSG00000115850_45 (sequence is synthesized)
agatttggtctgcattttgtgaactacagtgacccttctctgccaaggatccccaaagcatcagcgaagttctacgcctctgtggtccgatgcaatggcttccctgaccccgctacaggg

SEQ ID NO: 212280 - DNA, 120 bp, Artificial Sequence
  ENSG00000115850_46 (sequence is synthesized)
cctcacgcttgtctccaccagccagatgctggacccaccatcagccccgtgagacaggaggaggtgcagttcctggggctaatgctcggcaccacagaagcacagacagctttgtacgtt

SEQ ID NO: 212281 - DNA, 120 bp, Artificial Sequence
  ENSG00000115850_47 (sequence is synthesized)
ctcttttctcttgtgcttcttggagtctgtggcttggcatttctgtcatacaagtactgcaagcgctctaagcaagggaaaacacaacgaagccaacaggaattgagcccggtgtcttca

SEQ ID NO: 212282 - DNA, 120 bp, Artificial Sequence
  ENSG00000115850_48 (sequence is synthesized)
ttctgatgagttaccacctcaagttctatgaagcaggcctagtttcttcatctatgtttaccggccaccaaacaccttagggtcttagactctgctgatactggacttctccataaagtc

SEQ ID NO: 212283 - DNA, 120 bp, Artificial Sequence
  ENSG00000115850_49 (sequence is synthesized)
ctgctgcaccgttagagatgactttaatcttgaatgatttcgacttgctgagtaaaatggaaatatctccatcttgctccagtatcagagttcatttgggcatttgagaagcaagtagct

SEQ ID NO: 212284 - DNA, 120 bp, Artificial Sequence
  ENSG00000115850_50 (sequence is synthesized)
cttgcggaaacgtgtagatactggtctagtgggtctgtgaaccacttaattgaacttaacagggctgttttaagtttcagagttgttaagggttgttaagggagcaaaaaccgtaaaaat

SEQ ID NO: 212285 - DNA, 120 bp, Artificial Sequence
  ENSG00000115850_51 (sequence is synthesized)
ccttcctataagaagaaatcaactccattgcatagactgcaatatcatctcctgcccttctgcaagctctccctagcttcacatcttgtgttttccagaaaataaaaacagcagactgtc

SEQ ID NO: 212286 - DNA, 120 bp, Artificial Sequence
  ENSG00000115850_52 (sequence is synthesized)
gctctctgaggcctgcccagcctcaaaacagggcctccaacgccgaatgtgccggggtttgcaagatgctcgccaccccacagatcccaaggaaatctccagcaagcaagagggagagaa

SEQ ID NO: 212287 - DNA, 120 bp, Artificial Sequence
  ENSG00000115850_53 (sequence is synthesized)
ggccggggtctccagggcacctcccattagggcacatgtgcttggctttttgtttttttatttcatttttaaaatttatttattttgcgttctttttcacaggctgcttaactctaaaaa

SEQ ID NO: 212288 - DNA, 120 bp, Artificial Sequence
  ENSG00000115866_0 (sequence is synthesized)
atctttctggagccgcacctccacgcggagtccgagcgcgtgtgctgagaccccagggtcgggagggcggagactgggagggagggagaagcccctttggcctgccttacggaagcctgc

SEQ ID NO: 212289 - DNA, 120 bp, Artificial Sequence
  ENSG00000115866_1 (sequence is synthesized)
gagggagggtggtgtccactgcccagttccgtgtcccgatgcccagcgccagcgccagccgcaagagtcaggagaagccgcgggagatcatggacgcggcggaagattatgctaaagaga

SEQ ID NO: 212290 - DNA, 120 bp, Artificial Sequence
  ENSG00000115866_2 (sequence is synthesized)
gatatggaatatcttcaatgatacaatcacaagaaaaaccagatcgagttttggttcgggttagagacttgacaatacaaaaagctgatgaagttgtttgggtacgtgcaagagttcata

SEQ ID NO: 212291 - DNA, 120 bp, Artificial Sequence
  ENSG00000115866_3 (sequence is synthesized)
caagcagagctaaagggaaacagtgcttcttagtcctacgtcagcagcagtttaatgtccaggctcttgtggcggtgggagaccatgcaagcaagcagatggttaaatttgctgccaaca

SEQ ID NO: 212292 - DNA, 120 bp, Artificial Sequence
  ENSG00000115866_4 (sequence is synthesized)
tcaacaaagagagcattgtggatgtagaaggtgttgtgagaaaagtgaatcagaaaattggaagctgtacacagcaagacgttgagttacatgttcagaagatttatgtgatcagtttgg

SEQ ID NO: 212293 - DNA, 120 bp, Artificial Sequence
  ENSG00000115866_5 (sequence is synthesized)
ctgaaccccgtctgcccctgcagctggatgatgctgttcggcctgaggcagaaggagaagaggaaggaagagctactgttaaccaggatacaagattagacaacagagtcattgatctta

SEQ ID NO: 212294 - DNA, 120 bp, Artificial Sequence
  ENSG00000115866_6 (sequence is synthesized)
ggacatcaactagtcaggcagtcttccgtctccagtctggcatctgccatctcttccgagaaactttaattaacaaaggttttgtggaaatccaaactcctaaaattatttcagctgcca

SEQ ID NO: 212295 - DNA, 120 bp, Artificial Sequence
  ENSG00000115866_7 (sequence is synthesized)
gtgaaggaggagccaatgtttttactgtgtcatattttaaaaataatgcatacctggctcagtccccacagctatataagcaaatgtgcatttgtgctgattttgagaaggttttctcta

SEQ ID NO: 212296 - DNA, 120 bp, Artificial Sequence
  ENSG00000115866_8 (sequence is synthesized)
ttggaccagtattcagagcggaagactctaatacccatagacatctaactgagtttgttggtttggacattgaaatggcttttaattaccattaccacgaagttatggaagaaattgctg

SEQ ID NO: 212297 - DNA, 120 bp, Artificial Sequence
  ENSG00000115866_9 (sequence is synthesized)
acaccatggtacaaatattcaaaggacttcaagaaaggtttcagactgaaattcaaacagtgaataaacagttcccatgtgagccattcaaatttttggagccaactctaagactagaat

SEQ ID NO: 212298 - DNA, 120 bp, Artificial Sequence
  ENSG00000115866_10 (sequence is synthesized)
attgtgaagcattggctatgcttagggaagctggagtcgaaatgggagatgaagacgatctgagcacaccaaatgaaaagctgttgggtcatttggtaaaggaaaagtatgatacagatt

SEQ ID NO: 212299 - DNA, 120 bp, Artificial Sequence
  ENSG00000115866_11 (sequence is synthesized)
tttatattcttgataaatatccattggctgtaagacctttctataccatgcctgacccaagaaatcccaaacagtccaactcttacgatatgttcatgagaggagaagaaatattgtcag

SEQ ID NO: 212300 - DNA, 120 bp, Artificial Sequence
  ENSG00000115866_12 (sequence is synthesized)
ttggagcccctcctcatgctggtggaggcattggattggaacgagttactatgctgtttctgggattgcataatgttcgtcagacctccatgttccctcgtgatcccaaacgactcactc

SEQ ID NO: 212301 - DNA, 82 bp, Artificial Sequence
  ENSG00000115866_13 (sequence is synthesized)
gaaagccacacttattcttttcagtaacctgctagtgcacaggctgtactttaggtacttaaaatatgcactagaataaatt

SEQ ID NO: 212302 - DNA, 120 bp, Artificial Sequence
  ENSG00000115866_14 (sequence is synthesized)
gctgtactttaggtacttaaaatatgcactagaataaatttgcaaggccctaaaatatcactgttatttttggagtaattcagtataggttcgtttaaaagagatttttataacttcaga

SEQ ID NO: 212303 - DNA, 120 bp, Artificial Sequence
  ENSG00000115866_15 (sequence is synthesized)
catgcatcagtaggaaataacttgagaaattcatatggttatgttacaaattcatattctgttactacagtaaacgttaagagttttaaacagttaagattgtacaatttttcttctttt

SEQ ID NO: 212304 - DNA, 120 bp, Artificial Sequence
  ENSG00000115866_16 (sequence is synthesized)
ctatattacaagggccccagtgttaatgtcttagattttcagtatttgaacttatttttttaaattctgtcattgagataagaataattcaggtagcatctgaaattttaatgaatgtat

SEQ ID NO: 212305 - DNA, 120 bp, Artificial Sequence
  ENSG00000115866_17 (sequence is synthesized)
aattggcatatcatggaaaattaaccagaaagtatcagttcttaaaagttatgcctagaaattatgtaaagctaaactactggttagaaagtattcagtgtaatattgtattaatttgtt

SEQ ID NO: 212306 - DNA, 120 bp, Artificial Sequence
  ENSG00000115866_18 (sequence is synthesized)
aaattctaaacttgaatttcaataaaattttaaagctaattgtagtttttgtgtaactttgtggccaactgattttgtaagtggtgctaggcattcataatttggtaaaagaaaaaatac

SEQ ID NO: 212307 - DNA, 120 bp, Artificial Sequence
  ENSG00000115866_19 (sequence is synthesized)
acaactagtttatataaataaagactaatatgttgtcaacatgtattcatttcaggatattagtttagatgggcgtagggatagagctcttaaagttgacagcttgggtcggttgacaga

SEQ ID NO: 212308 - DNA, 120 bp, Artificial Sequence
  ENSG00000115866_20 (sequence is synthesized)
gttcatttcacatgggttaaaatatattgcagaattttgtttgatttttaactggaatggtactgatacttagtgaatgtcagtaaaatccagtcccatcttatccgtcaaaaagaaatt

SEQ ID NO: 212309 - DNA, 120 bp, Artificial Sequence
  ENSG00000115866_21 (sequence is synthesized)
tttgtgtaagaattagttagaaacactttccctctagattattacaaatgttgatgctaatgttaattttacatgaccacaaatattggggaggaacaaaacataacatatttttgtaca

SEQ ID NO: 212310 - DNA, 120 bp, Artificial Sequence
  ENSG00000115866_22 (sequence is synthesized)
ggaagaaaaaattacatgcagaaaaatatgagggtcaaaaagttaggaagttacccctggaccacgaacatctgcccattatgtttgaaagttaaagggggtgtttaccatctatattgt

SEQ ID NO: 212311 - DNA, 120 bp, Artificial Sequence
  ENSG00000115866_23 (sequence is synthesized)
acagtctttgaaagtttagattcagttcttatttttttctttcatatcctaccagaataccttaaatatagaaggcaccccaaaagtatttcataatttaatccacagcaagaataaaat

SEQ ID NO: 212312 - DNA, 120 bp, Artificial Sequence
  ENSG00000115866_24 (sequence is synthesized)
atccatcttctatagtgtgtaattgctagaccctaaaatagtacaataatattggccctagagctgttcttaatttcatgtaattatagcttgtttcaaaataaagtttgtaaagtctta

SEQ ID NO: 212313 - DNA, 120 bp, Artificial Sequence
  ENSG00000115866_25 (sequence is synthesized)
tttttgtcttacatattcctcacagaccaaagtaaatctttaaaaacaaaacaaaaacatgtaacttttctttcttaaaagtcactgtaaagtattaacccatggttaatcaattttaga

SEQ ID NO: 212314 - DNA, 120 bp, Artificial Sequence
  ENSG00000115866_26 (sequence is synthesized)
ttcctgtaaaacatccttacaaataatttgaccctaaagactgatgaaatctaagacttcaagctacttttctagcatcgctctaaagtttaattattttcagctggagaaggagtagct

SEQ ID NO: 212315 - DNA, 120 bp, Artificial Sequence
  ENSG00000115866_27 (sequence is synthesized)
ggaagattatttcatggcaagactagcccatattagtatagcgaacttttattatgtgtaattgtaggaaattacttcatccatgatatttctgaatcaatgaattgctatattctgttt

SEQ ID NO: 212316 - DNA, 120 bp, Artificial Sequence
  ENSG00000115866_28 (sequence is synthesized)
attgctttaattaaatatttgagcagcatctactaagcactgagtcactgtaccaaggtatactcataagtgattttcagtagtacttgccttttaagaaaagagcagaatagacaactg

SEQ ID NO: 212317 - DNA, 120 bp, Artificial Sequence
  ENSG00000115866_29 (sequence is synthesized)
cgtgttctggccaaattttgtaatcccttgagaaactcaaatagaagaagttccttattaatgtttttaagttgccatttgatcttcaaacactgatttcacgtttctttttcagcacac

SEQ ID NO: 212318 - DNA, 120 bp, Artificial Sequence
  ENSG00000115866_30 (sequence is synthesized)
gccgagcggagttgaaagggctgttagaagaatggagcagaagtcgcagttgggacgaagctgaagagagctggcattcgcccaggtctacagccagccacctggattatgctaaagaga

SEQ ID NO: 212319 - DNA, 120 bp, Artificial Sequence
  ENSG00000115866_31 (sequence is synthesized)
agattgcattgttaattgtaggaaaaaatgaacttgctcttcatgcagcagagatttttttccgtatatatgtaatagaaataggatggtagtcacttgaggactggtgttttttctctt

SEQ ID NO: 212320 - DNA, 120 bp, Artificial Sequence
  ENSG00000115866_32 (sequence is synthesized)
tttcattctctttgcttttggctatgagaaccgtgttatttattctcctgtaaatcagattctctctgcagctgcatcttttcttcaataggcaaattataaatacatttagaaaaattc

SEQ ID NO: 212321 - DNA, 120 bp, Artificial Sequence
  ENSG00000115866_33 (sequence is synthesized)
acagggactggtaacccatgctgccttggcaagccaactgcactcctctgtcccaacaagcagggcaatggattgcgaagaggcctcctccgtccccaagcagctacgtcgcccagggga

SEQ ID NO: 212322 - DNA, 120 bp, Artificial Sequence
  ENSG00000115866_34 (sequence is synthesized)
ttactaattaatgtaaaatactgaggtttataaattagttactgaatcaattagcttttgttatataacaaatcaccccagtacttagtgacttgaaacaacaaacatttatttgcttac

SEQ ID NO: 212323 - DNA, 120 bp, Artificial Sequence
  ENSG00000115866_35 (sequence is synthesized)
caaatttgaattacaagaatttttaaaagtgaattacgacataagtgaaaatttgatttccaagaaacaaaataaacagctaacttgtgtgttataaaatattattgtcataaagttcta

SEQ ID NO: 212324 - DNA, 120 bp, Artificial Sequence
  ENSG00000115866_36 (sequence is synthesized)
gccattttttttctcttaagaatttagaagccaaatgtcttgtaagtggagtatcctgttttctctctgctgctgtgagttcattcgcattagcacaaattaaagctctaccttaaaata

SEQ ID NO: 212325 - DNA, 120 bp, Artificial Sequence
  ENSG00000115875_0 (sequence is synthesized)
gtagtgccgccgggactcttggcgggtgaaggtgtgtgtcagcttttgcgtcactcgagccctgggcgctgcttgctaaagagccgagcacgcgggtctgtcatcatgtcgcgttacggg

SEQ ID NO: 212326 - DNA, 120 bp, Artificial Sequence
  ENSG00000115875_1 (sequence is synthesized)
cggtacggaggagaaaccaaggtgtatgttggtaacctgggaactggcgctggcaaaggagagttagaaagggctttcagttattatggtcctttaagaactgtatggattgcgagaaat

SEQ ID NO: 212327 - DNA, 120 bp, Artificial Sequence
  ENSG00000115875_2 (sequence is synthesized)
cctccaggatttgcctttgtggaattcgaagatcctagagatgcagaagatgcagtacgaggactggatggaaaggtgatttgtggctcccgagtgagggttgaactatcgacaggcatg

SEQ ID NO: 212328 - DNA, 120 bp, Artificial Sequence
  ENSG00000115875_3 (sequence is synthesized)
cctcggagatcacgttttgatagaccacctgcccgacgtccctttgatccaaatgatagatgctatgagtgtggcgaaaagggacattatgcttatgattgtcatcgttacagccggcga

SEQ ID NO: 212329 - DNA, 120 bp, Artificial Sequence
  ENSG00000115875_4 (sequence is synthesized)
agaagaagcaggtcacggtctagatcacattctcgatccagaggaaggcgatactctcgctcacgcagcaggagcaggggacgaaggtcaaggtcagcatctcctcgacgatcaagatct

SEQ ID NO: 212330 - DNA, 120 bp, Artificial Sequence
  ENSG00000115875_5 (sequence is synthesized)
atctctcttcgtagatcaagatcagcttcactcagaagatctaggtctggttctataaaaggatcgaggtatttccaatccccgtcgaggtcaagatcaagatccaggtctatttcacga

SEQ ID NO: 212331 - DNA, 120 bp, Artificial Sequence
  ENSG00000115875_6 (sequence is synthesized)
ccaagaagcagccgatcaaagtccagatctccatctccaaaaagaagtcgttccccatcaggaagtcctcgcagaagtgcaagtcctgaaagaatggactgaagctctcaagttcaccct

SEQ ID NO: 212332 - DNA, 120 bp, Artificial Sequence
  ENSG00000115875_7 (sequence is synthesized)
ttagggaaaagttattttgtttacattattataagggatttgtgatgtctgtaaagtgtaacctaggaaagataattcaaccatctaatcaaaatggatctggattactatgtaaattca

SEQ ID NO: 212333 - DNA, 120 bp, Artificial Sequence
  ENSG00000115875_8 (sequence is synthesized)
cagcagtaagataatataaattttgttgaatgtattaacatcatatggtctgaaaatgtgggtttttatttggcacatttaaataaaatgtttctaactagatttttgatttgtgttcaa

SEQ ID NO: 212334 - DNA, 120 bp, Artificial Sequence
  ENSG00000115875_9 (sequence is synthesized)
cagaattgaaaggtgttggttaagtcttgaacatcactattctatgcataaaacttggccaggatcttaagggactttgaaaattccatcttacccttgtagctctgggtaagatgacct

SEQ ID NO: 212335 - DNA, 120 bp, Artificial Sequence
  ENSG00000115875_10 (sequence is synthesized)
gagtcccttatgatacagcctgaatgcatcatgacagatccttaagttagctaatccgtttgaagttggtgttagtaggtattgtatgatcagtggtgaagcaagtaggaccactgatgt

SEQ ID NO: 212336 - DNA, 120 bp, Artificial Sequence
  ENSG00000115875_11 (sequence is synthesized)
gtctaaatgagcatgacaggaactaaacgaaactgattaaatgtatgagaaatagaaacatttctggatgatctttatactaattgcagctttcaggctactaggtggcatagtgttaat

SEQ ID NO: 212337 - DNA, 120 bp, Artificial Sequence
  ENSG00000115875_12 (sequence is synthesized)
taggactccccaagatatggggagttctactctcaatggtcttgtttctttgctttctacattagttaaccagttttataccaaaaaatgcatgtttgaggaattgtctgaaattgggac

SEQ ID NO: 212338 - DNA, 120 bp, Artificial Sequence
  ENSG00000115875_13 (sequence is synthesized)
aaaacaccttcatgtaaaccagctttgcaaaattttccagcccagatactcttcatctattcaaatggattgtcttattctgagcaaagacctgttgttaatcttcaagctaggttttgc

SEQ ID NO: 212339 - DNA, 120 bp, Artificial Sequence
  ENSG00000115875_14 (sequence is synthesized)
agttcccaaccacaacattcttctattttgccaggctggtgcaaagtaattaaagatgtcaatcagaaatgtcaatgagactaaagtggttttgtaaatctcagctatatttagcaacac

SEQ ID NO: 212340 - DNA, 120 bp, Artificial Sequence
  ENSG00000115875_15 (sequence is synthesized)
tccatgtagctaatattttttggtagcatctggtagaccttagaatgttacatagccagtaggttctttattcaaattttaagtatcttaagaatagtagggcagtaacagttacttttg

SEQ ID NO: 212341 - DNA, 120 bp, Artificial Sequence
  ENSG00000115875_16 (sequence is synthesized)
agagttttctggtcaagcttttaccaggcattctctagccttggtacaaaaaaaaaaaaacctgctggttgcgcagatacctaggcttgtccattttatgcatttcagcaaagtcattgg

SEQ ID NO: 212342 - DNA, 120 bp, Artificial Sequence
  ENSG00000115875_17 (sequence is synthesized)
atactattgcaacttgggaatactggtctgcatcaagtttattcggtagtttgaccgctagtatgttggaagttatttggattgtttttggaattttgactggctgaattatggttggta

SEQ ID NO: 212343 - DNA, 120 bp, Artificial Sequence
  ENSG00000115875_18 (sequence is synthesized)
taaagttatgtgtataactggcaggcttatttatctgttgcacttggttagctttaattgttctgtattatttaaagataagtttactcaacaataaatctgcagagattgaacaaataa

SEQ ID NO: 212344 - DNA, 120 bp, Artificial Sequence
  ENSG00000115875_19 (sequence is synthesized)
agtctcttcagttccttccgcgtcgtttcttggctgtttccgcccagctcctttgtgccgcgcagaacaacgagatgacgcatgcgcaaagcgcagcggccgcatatataaacgcgaacc

SEQ ID NO: 212345 - DNA, 120 bp, Artificial Sequence
  ENSG00000115875_20 (sequence is synthesized)
cataccagtctcatcaaatgaaaaccatgtatttcccttggatattacacagtgtttgagaatgttatacctgtacagaaactaaccaattgagtgatagaaacaagtaattgaaatggg

SEQ ID NO: 212346 - DNA, 120 bp, Artificial Sequence
  ENSG00000115875_21 (sequence is synthesized)
ggttccttatgtctggtaacactttgtttgacagtgtgttagacagaataaggcaagtgttgcatcttgtttagttttagcttctttatgcctgaccaacctaatacagtgttgagtagt

SEQ ID NO: 212347 - DNA, 120 bp, Artificial Sequence
  ENSG00000115875_22 (sequence is synthesized)
ggttctataaaaggatcgaggtatttccacctcctgagtagctgggactgccattgtgtaccacagtgcccagctgagggatctgtgccttaagtgagatccccgtcgaggtcaagatca

SEQ ID NO: 212348 - DNA, 120 bp, Artificial Sequence
  ENSG00000115875_23 (sequence is synthesized)
attccgcgtgcgtaatggcggcttaggagcacgccagacgaagccggaggcagcggaggcggggtgctgaagggagacgggatggcgggtgtacatctctgccgagttccgtactcttgg

SEQ ID NO: 212349 - DNA, 120 bp, Artificial Sequence
  ENSG00000115875_24 (sequence is synthesized)
gcatttttgtggcccaatccagcctaaagcagggttgagatgacggttttcgcgttgcctttctcggagctgcccgccggcccccctccccccccgccctcggcggcggctgccattttg

SEQ ID NO: 212350 - DNA, 120 bp, Artificial Sequence
  ENSG00000115875_25 (sequence is synthesized)
aactagaaaaatcttcttgcgtcaatcaagcctcacctggctcatttggctgtcagtttgatcgtcgttagattgaagaaaacatctagatgcagcgatcggctatagatacttctagat

SEQ ID NO: 212351 - DNA, 120 bp, Artificial Sequence
  ENSG00000115875_26 (sequence is synthesized)
catgctgaggcgccttgcaaatccgacaattaagatcctcctagaccttgaggtgatcagcataagaggccagatcccctcgagtcatctacacctagcttcaccttattctttaaaggg

SEQ ID NO: 212352 - DNA, 120 bp, Artificial Sequence
  ENSG00000115875_27 (sequence is synthesized)
aaactagtgtttttctataaacttgaatgttaattgtacaggtgtattttacaatttttgtttaattaaaaaaatgttactatattaataatcaacctggtcaaaacctttcaggtttct

SEQ ID NO: 212353 - DNA, 120 bp, Artificial Sequence
  ENSG00000115875_28 (sequence is synthesized)
catgggccaaagagggtcgacctgcaaacttgcaaggtttattttaaatacacattacagtgttttatattatgtaatgctaagttgtaattcagcttttaacaaatctttttttaggta

SEQ ID NO: 212354 - DNA, 120 bp, Artificial Sequence
  ENSG00000115875_29 (sequence is synthesized)
gtaaaaaaaaaaatactcaacaactaataggcccagagtttatttccaaatgagacactaaatttaaatagttttgagatttgatttcagcagaggcacacaaactcttaaaaacgagtt

SEQ ID NO: 212355 - DNA, 120 bp, Artificial Sequence
  ENSG00000115884_0 (sequence is synthesized)
agtttttgcaacggctaaggaagggcctgtgggtttattataaggcggagctcggcgggagaggtgcgggccgaatccgagccgagcggagaggaatccggcagtagagagcggactcca

SEQ ID NO: 212356 - DNA, 120 bp, Artificial Sequence
  ENSG00000115884_1 (sequence is synthesized)
gcggaccctgcagccctcgcctgggacagcggcgcgctgggcaggcgcccaagagagcatcgagcagcggaacccgcgaagccggcccgcagccgcgacccgcgcagcctgccgctctcc

SEQ ID NO: 212357 - DNA, 120 bp, Artificial Sequence
  ENSG00000115884_2 (sequence is synthesized)
ctcccgccgccggtccgggcagcatgaggcgcgcggcgctctggctctggctgtgcgcgctggcgctgagcctgcagccggccctgccgcaaattgtggctactaatttgccccctgaag

SEQ ID NO: 212358 - DNA, 120 bp, Artificial Sequence
  ENSG00000115884_3 (sequence is synthesized)
atcaagatggctctggggatgactctgacaacttctccggctcaggtgcaggtgctttgcaagatatcaccttgtcacagcagaccccctccacttggaaggacacgcagctcctgacgg

SEQ ID NO: 212359 - DNA, 120 bp, Artificial Sequence
  ENSG00000115884_4 (sequence is synthesized)
ctattcccacgtctccagaacccaccggcctggaggctacagctgcctccacctccaccctgccggctggagaggggcccaaggagggagaggctgtagtcctgccagaagtggagcctg

SEQ ID NO: 212360 - DNA, 120 bp, Artificial Sequence
  ENSG00000115884_5 (sequence is synthesized)
gcctcaccgcccgggagcaggaggccaccccccgacccagggagaccacacagctcccgaccactcatctggcctcaacgaccacagccaccacggcccaggagcccgccacctcccacc

SEQ ID NO: 212361 - DNA, 120 bp, Artificial Sequence
  ENSG00000115884_6 (sequence is synthesized)
cccacagggacatgcagcctggccaccatgagacctcaacccctgcaggacccagccaagctgaccttcacactccccacacagaggatggaggtccttctgccaccgagagggctgctg

SEQ ID NO: 212362 - DNA, 120 bp, Artificial Sequence
  ENSG00000115884_7 (sequence is synthesized)
aggatggagcctccagtcagctcccagcagcagagggctctggggagcaggacttcacctttgaaacctcgggggagaatacggctgtagtggccgtggagcctgaccgccggaaccagt

SEQ ID NO: 212363 - DNA, 120 bp, Artificial Sequence
  ENSG00000115884_8 (sequence is synthesized)
ccccagtggatcagggggccacgggggcctcacagggcctcctggacaggaaagaggtgctgggaggggtcattgccggaggcctcgtggggctcatctttgctgtgtgcctggtgggtt

SEQ ID NO: 212364 - DNA, 120 bp, Artificial Sequence
  ENSG00000115884_9 (sequence is synthesized)
tcatgctgtaccgcatgaagaagaaggacgaaggcagctactccttggaggagccgaaacaagccaacggcggggcctaccagaagcccaccaaacaggaggaattctatgcctgacgcg

SEQ ID NO: 212365 - DNA, 120 bp, Artificial Sequence
  ENSG00000115884_10 (sequence is synthesized)
ggagccatgcgccccctccgccctgccactcactaggcccccacttgcctcttccttgaagaactgcaggccctggcctcccctgccaccaggccacctccccagcattccagcccctct

SEQ ID NO: 212366 - DNA, 120 bp, Artificial Sequence
  ENSG00000115884_11 (sequence is synthesized)
ggtcgctcctgcccacggagtcgtggggtgtgctgggagctccactctgcttctctgacttctgcctggagacttagggcaccaggggtttctcgcataggacctttccaccacagccag

SEQ ID NO: 212367 - DNA, 120 bp, Artificial Sequence
  ENSG00000115884_12 (sequence is synthesized)
cacctggcatcgcaccattctgactcggtttctccaaactgaagcagcctctccccaggtccagctctggaggggagggggatccgactgctttggacctaaatggcctcatgtggctgg

SEQ ID NO: 212368 - DNA, 120 bp, Artificial Sequence
  ENSG00000115884_13 (sequence is synthesized)
actggtaggaccaagcatcttgggggggtggccgctgagtggcaggggacaggagtccactttgtttcgtggggaggtctaatctagatatcgacttgtttttgcacatgtttcctctag

SEQ ID NO: 212369 - DNA, 120 bp, Artificial Sequence
  ENSG00000115884_14 (sequence is synthesized)
ttctttgttcatagcccagtagaccttgttacttctgaggtaagttaagtaagttgattcggtatccccccatcttgcttccctaatctatggtcgggagacagcatcagggttaagaag

SEQ ID NO: 212370 - DNA, 120 bp, Artificial Sequence
  ENSG00000115884_15 (sequence is synthesized)
actttttttttttttttttaaactaggagaaccaaatctggaagccaaaatgtaggcttagtttgtgtgttgtctcttgagtttgtcgctcatgtgtgcaacagggtatggactatctgt

SEQ ID NO: 212371 - DNA, 120 bp, Artificial Sequence
  ENSG00000115884_16 (sequence is synthesized)
ctggtggccccgtttctggtggtctgttggcaggctggccagtccaggctgccgtggggccgccgcctctttcaagcagtcgtgcctgtgtccatgcgctcagggccatgctgaggcctg

SEQ ID NO: 212372 - DNA, 120 bp, Artificial Sequence
  ENSG00000115884_17 (sequence is synthesized)
ggccgctgccacgttggagaagcccgtgtgagaagtgaatgctgggactcagccttcagacagagaggactgtagggagggcggcaggggcctggagatcctcctgcagaccacgcccgt

SEQ ID NO: 212373 - DNA, 120 bp, Artificial Sequence
  ENSG00000115884_18 (sequence is synthesized)
cctgcctgtggcgccgtctccaggggctgcttcctcctggaaattgacgaggggtgtcttgggcagagctggctctgagcgcctccatccaaggccaggttctccgttagctcctgtggc

SEQ ID NO: 212374 - DNA, 120 bp, Artificial Sequence
  ENSG00000115884_19 (sequence is synthesized)
cccaccctgggccctgggctggaatcaggaatattttccaaagagtgatagtcttttgcttttggcaaaactctacttaatccaatgggtttttccctgtacagtagattttccaaatgt

SEQ ID NO: 212375 - DNA, 120 bp, Artificial Sequence
  ENSG00000115884_20 (sequence is synthesized)
aataaactttaatataaagtagtcctgtgaatgccactgccttcgcttcttgcctctgtgctgtgtgtgacgtgaccggacttttctgcaaacaccaacatgttgggaaacttggctcga

SEQ ID NO: 212376 - DNA, 120 bp, Artificial Sequence
  ENSG00000115884_21 (sequence is synthesized)
atctctgtgccttcgtctttcccatggggagggattctggttccagggtccctctgtgtatttgcttttttgttttggctgaaattctcctggaggtcggtaggttcagccaaggtttta

SEQ ID NO: 212377 - DNA, 120 bp, Artificial Sequence
  ENSG00000115884_22 (sequence is synthesized)
taaggctgatgtcaatttctgtgttgccaagctccaagccccatcttctaaatggcaaaggaaggtggatggccccagcacagcttgacctgaggctgtggtcacagcggaggtgtggag

SEQ ID NO: 212378 - DNA, 120 bp, Artificial Sequence
  ENSG00000115884_23 (sequence is synthesized)
ccgaggcctaccccgcagacaccttggacatcctcctcccacccggctgcagaggccagaggcccccagcccagggctcctgcacttacttgcttatttgacaacgtttcagcgactccg

SEQ ID NO: 212379 - DNA, 120 bp, Artificial Sequence
  ENSG00000115884_24 (sequence is synthesized)
ttggccactccgagaggtgggccagtctgtggatcagagatgcaccaccaagccaagggaacctgtgtccggtattcgatactgcgactttctgcctggagtgtatgactgcacatgact

SEQ ID NO: 212380 - DNA, 120 bp, Artificial Sequence
  ENSG00000115884_25 (sequence is synthesized)
cgggggtggggaaaggggtcggctgaccatgctcatctgctggtccgtgggacggtgcccaagccagaggctgggttcatttgtgtaacgacaataaacggtacttgtcatttcgggcaa

SEQ ID NO: 212381 - DNA, 120 bp, Artificial Sequence
  ENSG00000115884_26 (sequence is synthesized)
ttcagcccctctcccgggctgcgcctccgcactccgggcccgggcagaagggggtgcgcctcggccccaccacccagggagcagccgagctgaaaggccgggaaccgcggcttgcgggga

SEQ ID NO: 212382 - DNA, 120 bp, Artificial Sequence
  ENSG00000115884_27 (sequence is synthesized)
actgctaatgtggcatctggacaagtctcagcagcgctgaccctccgtaagcgttgcctcgtgtagtagctgccagttattgagcgctttggttttttttttctttacagagtctgtctc

SEQ ID NO: 212383 - DNA, 120 bp, Artificial Sequence
  ENSG00000115884_28 (sequence is synthesized)
ccgcgttggcccggggagccgggccagggctgcgtggggggcgcgggcgagcgtctgcagggccctcgggcttgccgtgggcggctcgagcaaattgtggctactaatttgccccctgaa

SEQ ID NO: 212384 - DNA, 80 bp, Artificial Sequence
  ENSG00000115896_0 (sequence is synthesized)
agagctgagtggaggccgccgccgccgccgcacttcctgggaccgctgcgccgcagtccgcgggcaggtggcgggtgcgc

SEQ ID NO: 212385 - DNA, 120 bp, Artificial Sequence
  ENSG00000115896_1 (sequence is synthesized)
ggcgtccgggctccagaggccgcctggctgggcgcccggtgccttttgtctggcgcagggccggcgtttgcatcacatttcggatacctccctctctttttcgcctctccttctgcctcc

SEQ ID NO: 212386 - DNA, 120 bp, Artificial Sequence
  ENSG00000115896_2 (sequence is synthesized)
cgctcacatcgcctccccactcccgccaccgtcccccgccggactgctagcctcctagaccgaagcccgaggacgtctctgcccgagcgatgtcccctctccagaaagttgccgccgccg

SEQ ID NO: 212387 - DNA, 120 bp, Artificial Sequence
  ENSG00000115896_3 (sequence is synthesized)
ccgccgccgccgccactgccgccgctgggcggtgaaacaaagtctggcggggccgcctcccggtgcaggagcgcaccggtgcctagcggctggactccgctgccgggcgtcccgctttcc

SEQ ID NO: 212388 - DNA, 80 bp, Artificial Sequence
  ENSG00000115896_4 (sequence is synthesized)
cccggggagccctaaacgctccaggccatggccgagggcgcggccggcagggaggatccggcgccgcccgacgcggcggg

SEQ ID NO: 212389 - DNA, 120 bp, Artificial Sequence
  ENSG00000115896_5 (sequence is synthesized)
gactgcgtgacggcggcctctgggggccggatgagggaccgtcgcagcggggtcgcactgccaggcgccgcggggaccccagcggacagcgaggcgggcctcctggaggcagcacgggcg

SEQ ID NO: 212390 - DNA, 120 bp, Artificial Sequence
  ENSG00000115896_6 (sequence is synthesized)
accccccggcgcagcagcatcatcaaggatccttcaaaccaaaaatgtggtggaagaaagaaaaccgtgtctttcagcagcatgccatcggaaaagaaaattagcagtgcaaatgactgc

SEQ ID NO: 212391 - DNA, 120 bp, Artificial Sequence
  ENSG00000115896_7 (sequence is synthesized)
atcagcttcatgcaagctggctgtgagttgaagaaagtccggccaaattctcgcatttacaaccgttttttcactctggacacagaccttcaagctcttcgctgggaaccttcaaagaaa

SEQ ID NO: 212392 - DNA, 120 bp, Artificial Sequence
  ENSG00000115896_8 (sequence is synthesized)
gacctcgagaaagccaagcttgatatttctgccataaaagagatcagactggggaaaaacacggaaacatttagaaacaatggccttgctgaccagatctgtgaggactgtgccttttcc

SEQ ID NO: 212393 - DNA, 120 bp, Artificial Sequence
  ENSG00000115896_9 (sequence is synthesized)
atactccacggggaaaactatgagtctctggacctagttgccaattcagcagatgtggcaaacatctgggtgtctgggttacggtacctggtttctcgaagtaagcagcctcttgatttt

SEQ ID NO: 212394 - DNA, 120 bp, Artificial Sequence
  ENSG00000115896_10 (sequence is synthesized)
atggagggcaaccagaacacaccacggttcatgtggttgaaaacagtgtttgaagcagcagatgttgatgggaatgggattatgttggaagacacctctgtagagttaataaaacaactc

SEQ ID NO: 212395 - DNA, 120 bp, Artificial Sequence
  ENSG00000115896_11 (sequence is synthesized)
aaccctactctgaaggaagccaagatcaggttaaagtttaaagaaatccagaagagcaaggaaaaactaaccacccgcgtgaccgaagaggaattttgtgaagctttttgtgaactttgc

SEQ ID NO: 212396 - DNA, 120 bp, Artificial Sequence
  ENSG00000115896_12 (sequence is synthesized)
accaggccagaagtgtatttcttacttgtacagatatctaaaaacaaagaatatttggatgccaatgatctcatgctctttttagaagctgagcaaggagtcacccatatcaccgaggat

SEQ ID NO: 212397 - DNA, 120 bp, Artificial Sequence
  ENSG00000115896_13 (sequence is synthesized)
atatgcttagacatcataaggagatacgaactttctgaagagggacgtcaaaaagggtttcttgcaattgatggctttacccagtatttattgtcatcagaatgtgacatttttgatcct

SEQ ID NO: 212398 - DNA, 120 bp, Artificial Sequence
  ENSG00000115896_14 (sequence is synthesized)
gagcaaaagaaggttgcccaagatatgacccagccattatctcactactatatcaatgcctctcataacacctatctaatagaagaccagttcagggggccagctgacatcaatgggtac

SEQ ID NO: 212399 - DNA, 120 bp, Artificial Sequence
  ENSG00000115896_15 (sequence is synthesized)
attagagctttgaaaatgggctgtcgaagcgttgaactcgatgtaagtgatggttcagataatgaaccaatcctttgtaatcgaaataacatgacaacccatgtttcctttcgaagtgtc

SEQ ID NO: 212400 - DNA, 120 bp, Artificial Sequence
  ENSG00000115896_16 (sequence is synthesized)
atagaggtaataaataaatttgcctttgttgcttctgaatacccactcattctttgcttgggaaatcactgctccttgccgcagcagaaggtaatggctcaacagatgaaaaaggtcttt

SEQ ID NO: 212401 - DNA, 120 bp, Artificial Sequence
  ENSG00000115896_17 (sequence is synthesized)
ggcaataaactctatactgaagcacctttgccctcagaatcctacctcccatcaccagaaaaattaaaaagaatgatcattgtgaaaggaaagaagttgccttctgatccagatgtgtta

SEQ ID NO: 212402 - DNA, 120 bp, Artificial Sequence
  ENSG00000115896_18 (sequence is synthesized)
gaaggagaagtaacagatgaagatgaagaagctgaaatgtctcgaaggatgtcggtagattacaatggtgagcagaagcaaatccgactctgtagggagctctctgatttggtgtctatt

SEQ ID NO: 212403 - DNA, 120 bp, Artificial Sequence
  ENSG00000115896_19 (sequence is synthesized)
tgtaaatctgttcaatacagggattttgaactatctatgaaaagccaaaactattgggaaatgtgttcatttagtgaaacagaggccagccgcattgcaaatgagtacccagaggatttt

SEQ ID NO: 212404 - DNA, 120 bp, Artificial Sequence
  ENSG00000115896_20 (sequence is synthesized)
gttaattataataagaagttcttatcaagaatctatccaagtgccatgaggatcgattccagtaacttgaatccacaggacttttggaattgtggctgtcagattgtagcaatgaatttt

SEQ ID NO: 212405 - DNA, 120 bp, Artificial Sequence
  ENSG00000115896_21 (sequence is synthesized)
cagactccgggtccaatgatggaccttcacacgggctggtttcttcaaaacgggggatgtggttatgttctaaggccgtctataatgcgagatgaagtttcttacttcagcgcaaataca

SEQ ID NO: 212406 - DNA, 120 bp, Artificial Sequence
  ENSG00000115896_22 (sequence is synthesized)
aagggcattctacctggggtgtctcctctagctcttcatatcaagatcatcagtggtcagaatttcccaaagcccaagggagcttgtgccaaaggggatgtcatagatccctatgtttgt

SEQ ID NO: 212407 - DNA, 120 bp, Artificial Sequence
  ENSG00000115896_23 (sequence is synthesized)
atagagatacacggaattccagcggattgttcggaacaaagaactaaaactgtacagcaaaacagtgataatcctatttttgatgaaacttttgagttccaagtaaacctacctgagctg

SEQ ID NO: 212408 - DNA, 120 bp, Artificial Sequence
  ENSG00000115896_24 (sequence is synthesized)
gccatgatccgttttgttgttctggatgatgactacattggggatgagtttatagggcaatatacgataccatttgaatgtttgcagcctggatatcggcatgttcccctgcgttctttt

SEQ ID NO: 212409 - DNA, 120 bp, Artificial Sequence
  ENSG00000115896_25 (sequence is synthesized)
gtgggtgacatcatggagcacgtaaccctttttgtccacatagcaataactaatcgaagtggaggaggaaaggcacagaagcgcagtctttcagtgagaatggggaagaaagttcgggaa

SEQ ID NO: 212410 - DNA, 120 bp, Artificial Sequence
  ENSG00000115896_26 (sequence is synthesized)
tataccatgctcaggaatatcggtcttaaaaccattgatgacatctttaaaatagcggttcatccattacgagaagccatagatatgagagaaaatatgcagaatgcaatcgtgtctatt

SEQ ID NO: 212411 - DNA, 120 bp, Artificial Sequence
  ENSG00000115896_27 (sequence is synthesized)
tcacttgtgatgaaagacagctttccttacctggagcctctgggtgcaattccagatgtgcagaaaaagatgctgactgcttatgatctgatgattcaagagagccggtttctcatagaa

SEQ ID NO: 212412 - DNA, 120 bp, Artificial Sequence
  ENSG00000115896_28 (sequence is synthesized)
atggcggacacagtccaggaaaagattgtacagtgtcagaaagcagggatggagttccatgaagaacttcataatttgggggcaaaagaaggcttgaagggaagaaaactcaacaaagca

SEQ ID NO: 212413 - DNA, 120 bp, Artificial Sequence
  ENSG00000115896_29 (sequence is synthesized)
actgagagctttgcttggaacattacagtattgaagggccaaggagatctgttgaagaatgccaagaatgaagctatagaaaacatgaagcagatccagctggcatgcctgtcctgtgga

SEQ ID NO: 212414 - DNA, 120 bp, Artificial Sequence
  ENSG00000115896_30 (sequence is synthesized)
ctgagtaaagcccccagcagcagtgctgaggccaagagcaagcgcagcctggaagccatagaggagaaggaaagtagtgaggagaatgggaagctgtgactctgggcattatcgacacgt

SEQ ID NO: 212415 - DNA, 120 bp, Artificial Sequence
  ENSG00000115896_31 (sequence is synthesized)
tcacccatcttatcaaggactctggtttctcattcttgttttctttctttaaatgttttataagttcacaaaatggtgccctatatggggtattggacatagatattttcacaatgtcag

SEQ ID NO: 212416 - DNA, 120 bp, Artificial Sequence
  ENSG00000115896_32 (sequence is synthesized)
tatttcagtgtagttaatttatctaaattaaagcctttagtatcagtgttttaaattctgagacatgtgtcaacacccctgtgtggatgcctgtggaagagtgtgtgtgtgtgtgtgtgt

SEQ ID NO: 212417 - DNA, 120 bp, Artificial Sequence
  ENSG00000115896_33 (sequence is synthesized)
gtgtgtgtgtggcagagagagagaaagagagagagagagagaaattctgttaaaatctattctgtgttgcattattcatttagtgagttattccttgatcattttgggacaattgtttta

SEQ ID NO: 212418 - DNA, 120 bp, Artificial Sequence
  ENSG00000115896_34 (sequence is synthesized)
atctgaaattctaaagagcacttactgtaacctgttgctgtgtttaatttgacttctctgcctttgacatttaatttagtgatcttagcatagcttattattgaaggaagccaaatttat

SEQ ID NO: 212419 - DNA, 120 bp, Artificial Sequence
  ENSG00000115896_35 (sequence is synthesized)
caaagcatagatgttttggtagattaaatatagattagaaaaattcctaagaatcagagtagaaataaaagtgaatgaaagattaaacagatgatgagaatttctaaaaagattagcaag

SEQ ID NO: 212420 - DNA, 120 bp, Artificial Sequence
  ENSG00000115896_36 (sequence is synthesized)
gtcatttcttcagtcagaaaactttaaaaaatatttattaaataaaatcaatttttaggaagttttctgtagtcatttactaaacatatgatttcactagaaaagctgatcataagtgaa

SEQ ID NO: 212421 - DNA, 120 bp, Artificial Sequence
  ENSG00000115896_37 (sequence is synthesized)
tttatacctacctgtgtggtactctgaaacacactgaaagctctgttgcaattaggattttgatgtgacaataatattgttgtataatttcgagatttgtaggaaggtctcattcttcca

SEQ ID NO: 212422 - DNA, 120 bp, Artificial Sequence
  ENSG00000115896_38 (sequence is synthesized)
agctgagagtctagcactcattttctataacagatatggcagcttagaggtgttggctttgtttggatgtaatttagggtactaaatttaaatttaaagatattgttcaaacaatatcat

SEQ ID NO: 212423 - DNA, 120 bp, Artificial Sequence
  ENSG00000115896_39 (sequence is synthesized)
atcatcacattgagctgatataaattctgtgggtccgataatatctttgtgataatttaagagctaaccagttaccacacatctatgatataaccctaacacacacagaaaagcatacat

SEQ ID NO: 212424 - DNA, 120 bp, Artificial Sequence
  ENSG00000115896_40 (sequence is synthesized)
gcaaaaagaaatgactaattagggtacatttataattgcatctaggtaatttttaccctaatgtcttcataaagtacttgagtgtaatgtttgttacctccaacagaactaaatgttcta

SEQ ID NO: 212425 - DNA, 120 bp, Artificial Sequence
  ENSG00000115896_41 (sequence is synthesized)
tggttatgaaagaatatatttatttaaagcattgcttttattttgaaaagcttcttaattaatttgattaacaaatatgctaatttggggaaacctagagaagataattgttgaaatttt

SEQ ID NO: 212426 - DNA, 120 bp, Artificial Sequence
  ENSG00000115896_42 (sequence is synthesized)
gcaaatataaacatctcctatagcttctgtgttatttctgacttcttaacactattatgtttatgttgcacattactgaaagagtaaagatatgaaaaaaacacttattgttttctttta

SEQ ID NO: 212427 - DNA, 120 bp, Artificial Sequence
  ENSG00000115896_43 (sequence is synthesized)
ttgtgaattgaaaaagcaaagctaatgaaaatgggttactacatcaaaaatatcttaaagagtttgctatttccatggaccagatatgatgaaattattccctgggtttaaaactgggca

SEQ ID NO: 212428 - DNA, 120 bp, Artificial Sequence
  ENSG00000115896_44 (sequence is synthesized)
ctcgaggaggaggtacctgaagtcatttgaaggcaagtttccaatgatgctacaatggcctgaaaaaatttctttaccctctgttatatttaacttgctggtaggaggaatagtggaatg

SEQ ID NO: 212429 - DNA, 120 bp, Artificial Sequence
  ENSG00000115896_45 (sequence is synthesized)
caggtgttaagccctttgtggtgaaaaagaggttctatagacagaaacaaaacccaccttacatcagctgattggttgattttactagtgtacctcttcatctacttgaattctatttgg

SEQ ID NO: 212430 - DNA, 120 bp, Artificial Sequence
  ENSG00000115896_46 (sequence is synthesized)
taaatccatgtctttactggatatacagttaggtgggaagaggagataaaggatgacaaactctcaaacaatatttatacatttatttactccagggtcaaatccaatccttggaagtag

SEQ ID NO: 212431 - DNA, 120 bp, Artificial Sequence
  ENSG00000115896_47 (sequence is synthesized)
cttctctagtttattttatttgtcccagagctctactcacacttaggacccacccaaaaattctcaaaaacgtaatatggattctgcctcatctgatgctatttctggcagtgggttgtc

SEQ ID NO: 212432 - DNA, 120 bp, Artificial Sequence
  ENSG00000115896_48 (sequence is synthesized)
agccatactctgcttcattccactgggtgtccttgctagatggggagtgagatgtggagcagggaggagctttggattctgggagtggaggtggcaagggaaaagtctcctagtctcctg

SEQ ID NO: 212433 - DNA, 120 bp, Artificial Sequence
  ENSG00000115896_49 (sequence is synthesized)
tgatgttcctgcctccagatagaatagcaaaaacaaacaatttttttttgtgtattatgcctccatgacattgttacattctatgaggagcatctgtctcctttctagacttgaactgtg

SEQ ID NO: 212434 - DNA, 120 bp, Artificial Sequence
  ENSG00000115896_50 (sequence is synthesized)
gtagaaaaagcccccttctctcttctatctacttagatttggtgatgctaggaatgtagtgttttagatattaattctatttttatttattcatttttacatcaccaataggatctgagg

SEQ ID NO: 212435 - DNA, 120 bp, Artificial Sequence
  ENSG00000115896_51 (sequence is synthesized)
tggagatggcgggtattatcactggcattttacaggtgagaaagcccaaagccactgaggtaattaatggaataattgattttgaacttgggtctgtctgatttcatgtgcaagattata

SEQ ID NO: 212436 - DNA, 120 bp, Artificial Sequence
  ENSG00000115896_52 (sequence is synthesized)
tagtgattttgattttaagtttattcttaacattttaaaccagactattaactcttacctttataaccacagatacaaagaactgtatcatttattttctgaatataaaatattaatggt

SEQ ID NO: 212437 - DNA, 120 bp, Artificial Sequence
  ENSG00000115896_53 (sequence is synthesized)
tggtcaatataaaaatacaaaaatagagaactatatacaacagaaaagcaaaattacccactaataacattttgatttatatccctttagacactgtttagagtttatacatatatgtaa

SEQ ID NO: 212438 - DNA, 120 bp, Artificial Sequence
  ENSG00000115896_54 (sequence is synthesized)
atatgcttgtattttaacaaaattgagatattatataaactgtttgtagcagggtgtttaaaattttaacaatatgttatggatatctttctgtgtcaataaatgtgtatttacattaga

SEQ ID NO: 212439 - DNA, 120 bp, Artificial Sequence
  ENSG00000115896_55 (sequence is synthesized)
atggcacttgctgcattggaatgaaagataatctgcagaaggtaaatggacaggagagattttcatcattttaaatgtatttgcaatgaccatgatttatattaaagtttctcttctctg

SEQ ID NO: 212440 - DNA, 120 bp, Artificial Sequence
  ENSG00000115896_56 (sequence is synthesized)
tgagaaggaacagtcaaagatattgcaggaagaccagtagtacatggaagtcaaaggagagagcatcaagaaagagatgcgatgagtcaacaagaagtttacagcactgagaaagacgag

SEQ ID NO: 212441 - DNA, 120 bp, Artificial Sequence
  ENSG00000115896_57 (sequence is synthesized)
tcaacaacagaaggaaaaaaatccagagaaaatggcacttgctgcattggaatgaaagataatctgcagaaggacctgctcagtggcaataaacattggcattcttggaaacagtgtttg

SEQ ID NO: 212442 - DNA, 120 bp, Artificial Sequence
  ENSG00000115896_58 (sequence is synthesized)
cctaagaatcttctgtctgcctttgttgctttggccatattatgataagggcatgactggatttaccaaaatgggcatgattggatctacttattctcttatcagacaccttttcctaga

SEQ ID NO: 212443 - DNA, 120 bp, Artificial Sequence
  ENSG00000115896_59 (sequence is synthesized)
caacatcctgaaacataagaataagcacaaaaatgaacatattacatcaaacgtaccactgagaagaatggtaagtttaacagtttcccacgtgggaggcatattgacgattacaatttt

SEQ ID NO: 212444 - DNA, 120 bp, Artificial Sequence
  ENSG00000115896_60 (sequence is synthesized)
aagatattgtaagataacaatccttgagtggaacctgaattctttctaaacactgcatgtaggaaaacaagaggcagttcacacaatcacttaacacctcttcttaaaagtgaatccttg

SEQ ID NO: 212445 - DNA, 120 bp, Artificial Sequence
  ENSG00000115896_61 (sequence is synthesized)
aaggagtggtgttcaaatatttaagtacattagatactttatacacgccacatccaaaatgctcagtattcctaatacatttcattttctcccaagttttaatggttgatgcacaatcac

SEQ ID NO: 212446 - DNA, 120 bp, Artificial Sequence
  ENSG00000115896_62 (sequence is synthesized)
attaatttcctattaatttctaggaatatgtacacagtagccttaggagaaagaagataactattactttacatttttaactgttttgttttcatgtccatgagagaaaaattaaagtaa

SEQ ID NO: 212447 - DNA, 120 bp, Artificial Sequence
  ENSG00000115896_63 (sequence is synthesized)
gttaaaaaattaactcagacactctatttatttttaggaagacatacaccccccacagggagacttttacatgttgtaataatgttcacaaacagctactctttaagtgtaacactattc

SEQ ID NO: 212448 - DNA, 120 bp, Artificial Sequence
  ENSG00000115896_64 (sequence is synthesized)
taagcctcttttcctccattttatttcatatacatttatgcatctgcatgcatatataaccacatgtatttatatttagtaggtatagtttattacacataaatctaaatatctatcata

SEQ ID NO: 212449 - DNA, 120 bp, Artificial Sequence
  ENSG00000115902_0 (sequence is synthesized)
atctccagccggcggctgctccagggaggctgggcgcgatcctctccgcccgcggctccaacccgcactctgcgcctctcctcgcctttctcgcacctgctcctgcgccaggcccggaga

SEQ ID NO: 212450 - DNA, 120 bp, Artificial Sequence
  ENSG00000115902_1 (sequence is synthesized)
cccccggggcggcttcccagaacctgcggagcacaactggccgaccgacccattcattgggaaccccgtcttttgccagagcccacgtcccctgccacctctagctcggagcggcgtgta

SEQ ID NO: 212451 - DNA, 120 bp, Artificial Sequence
  ENSG00000115902_2 (sequence is synthesized)
gcgccatggagaagagcaacgagaccaacggctaccttgacagcgctcaggcggggcctgcggccgggcccggagctccggggaccgcggcgggacgcgcacggcgttgcgcgggcttcc

SEQ ID NO: 212452 - DNA, 120 bp, Artificial Sequence
  ENSG00000115902_3 (sequence is synthesized)
tgcggcgccaagcgctggtgctgctcaccgtgtccggggtgctggcgggcgcgggcctgggcgcggcgttgcgcgggctcagcctgagccgcacgcaggtcacctacctggccttccccg

SEQ ID NO: 212453 - DNA, 120 bp, Artificial Sequence
  ENSG00000115902_4 (sequence is synthesized)
gcgagatgctgctccgcatgctgcgcatgatcatcctgccgctggtggtctgcagcctggtgtcgggcgccgcctcgctcgatgccagctgcctcgggcgtctgggcggcatcgctgtcg

SEQ ID NO: 212454 - DNA, 120 bp, Artificial Sequence
  ENSG00000115902_5 (sequence is synthesized)
cctactttggcctcaccacactgagtgcctcggcgctcgccgtggccttggcgttcatcatcaagccaggatccggtgcgcagacccttcagtccagcgacctggggctggaggactcgg

SEQ ID NO: 212455 - DNA, 120 bp, Artificial Sequence
  ENSG00000115902_6 (sequence is synthesized)
ggcctcctcctgtccccaaagagacggtggactctttcctcgacctggccagaaacctgtttccctccaatcttgtggttgcagctttccgtacgtatgcaaccgattataaagtcgtga

SEQ ID NO: 212456 - DNA, 120 bp, Artificial Sequence
  ENSG00000115902_7 (sequence is synthesized)
cccagaacagcagctctggaaatgtaacccatgaaaagatccccataggcactgagatagaagggatgaacattttaggattggtcctgtttgctctggtgttaggagtggccttaaaga

SEQ ID NO: 212457 - DNA, 120 bp, Artificial Sequence
  ENSG00000115902_8 (sequence is synthesized)
aactaggctccgaaggagaagacctcatccgtttcttcaattccctcaacgaggcgacgatggtgctggtgtcctggattatgtggtacgtacctgtgggcatcatgttccttgttggaa

SEQ ID NO: 212458 - DNA, 120 bp, Artificial Sequence
  ENSG00000115902_9 (sequence is synthesized)
gcaagatcgtggaaatgaaagacatcatcgtgctggtgaccagcctggggaaatacatcttcgcatctatattgggccatgttattcatggaggaattgttctgccacttatttattttg

SEQ ID NO: 212459 - DNA, 120 bp, Artificial Sequence
  ENSG00000115902_10 (sequence is synthesized)
ttttcacacgaaaaaacccattcagattcctcctgggcctcctcgccccatttgcgacagcatttgctacctgctccagctcagcgacccttccctctatgatgaagtgcattgaagaga

SEQ ID NO: 212460 - DNA, 120 bp, Artificial Sequence
  ENSG00000115902_11 (sequence is synthesized)
acaatggtgtggacaagaggatcagcaggtttattctccccatcggggccaccgtgaacatggacggagcagccatcttccagtgtgtggccgcggtgttcattgcgcaactcaacaacg

SEQ ID NO: 212461 - DNA, 120 bp, Artificial Sequence
  ENSG00000115902_12 (sequence is synthesized)
tagagctcaacgcaggacagattttcaccattctagtgactgccacagcgtccagtgttggagcagcaggcgtgccagctggaggggtcctcaccattgccattatcctggaggccattg

SEQ ID NO: 212462 - DNA, 120 bp, Artificial Sequence
  ENSG00000115902_13 (sequence is synthesized)
ggctgcctactcatgacctgcctctgatcctggctgtggactggattgtggaccggaccaccacggtggtgaatgtggaaggggatgccctgggtgcaggcattctccaccacctgaatc

SEQ ID NO: 212463 - DNA, 120 bp, Artificial Sequence
  ENSG00000115902_14 (sequence is synthesized)
agaaggcaacaaagaaaggcgagcaggaacttgctgaggtgaaagtggaagccatccccaactgcaagtctgaggaggagacatcgcccctggtgacacaccagaaccccgctggccccg

SEQ ID NO: 212464 - DNA, 120 bp, Artificial Sequence
  ENSG00000115902_15 (sequence is synthesized)
tggccagtgccccagaactggaatccaaggagtcggttctgtgatggggctgggctttgggcttgcctgccagcagtgatgtcccaccctgttcacccagccgccagtcatggacacagg

SEQ ID NO: 212465 - DNA, 120 bp, Artificial Sequence
  ENSG00000115902_16 (sequence is synthesized)
gcactgcccttgccaacttttaccctcccaagcaatgctttggcccagtcgctggcctgaggcttacctctcggcactggcattgggctccccagccggaactggttaccaaggacaagg

SEQ ID NO: 212466 - DNA, 120 bp, Artificial Sequence
  ENSG00000115902_17 (sequence is synthesized)
acactctgacattcggcttgatccatgtccaggtgcaactgtgtgtacaccagggatctgtttggaaacaaccccttgagctgccaggctcaagaaatcatggactcacagggtcctgtg

SEQ ID NO: 212467 - DNA, 120 bp, Artificial Sequence
  ENSG00000115902_18 (sequence is synthesized)
tggttacatcttggaaaaaatgcagatgtatttcactctccccggtcagctctgcatcaggtgttttctgagcaaaccaagggggtttatagtcatctgtcgcattgcctcgagttgcag

SEQ ID NO: 212468 - DNA, 120 bp, Artificial Sequence
  ENSG00000115902_19 (sequence is synthesized)
ttgaaaaaatgctcaaattcttagccatggctggcctttgctgagctgggactcaggtgtttaaagagtttgtgctatagctaggtgtggatagcttctgatccctgggttctgggagac

SEQ ID NO: 212469 - DNA, 120 bp, Artificial Sequence
  ENSG00000115902_20 (sequence is synthesized)
tgcaggtgccgcacattgtcaagttagaaatactccaggtgggtgttagcactgtggtggtctctggtccacagccttaggtaaacaacttagattctgaggtcaaagaaaaaaggagag

SEQ ID NO: 212470 - DNA, 120 bp, Artificial Sequence
  ENSG00000115902_21 (sequence is synthesized)
ggaatgcagccttgtgggggagaagcggggcagagggttctctaatctaatcaggacaggacaggtttcacatacaattgtcccagttcgcatcccagccctggggcacttttctgcttc

SEQ ID NO: 212471 - DNA, 120 bp, Artificial Sequence
  ENSG00000115902_22 (sequence is synthesized)
cttccagaggcctgggcctctgataacactttggctttttctccattcacgctgatttggcaaaaggccagagatgggcctccttccctggggaggtgtgatgtagttatcacattcagg

SEQ ID NO: 212472 - DNA, 120 bp, Artificial Sequence
  ENSG00000115902_23 (sequence is synthesized)
acccttgttgatttatcatctattatttgaattcaactggacactctgtaaaatgctgcactgcagcaaaaacaaaaccaccaccaccccagagaaaaccatgtactaattggagtgggg

SEQ ID NO: 212473 - DNA, 120 bp, Artificial Sequence
  ENSG00000115902_24 (sequence is synthesized)
tacccccattcacaggttcccaggtcccctggctttggctgatttcaaaatatagagccctttcttgccagtacatccaagtttaaaattatcagcgaaatggtccatgtttttccaatt

SEQ ID NO: 212474 - DNA, 120 bp, Artificial Sequence
  ENSG00000115902_25 (sequence is synthesized)
acctgctgacacggttctaagctaagtgaaggggaagatctgagagcgtgctgtttgtggctgttgatgcatattcgtgatgtaacaggtcctggggcctcactttaccccatttgtaaa

SEQ ID NO: 212475 - DNA, 120 bp, Artificial Sequence
  ENSG00000115902_26 (sequence is synthesized)
atggggctaatgtcacctgcctcttacctacctcagagggatttggtgaagcaaactgttaatcttcgaaaacgaccatttcacttcttggatatcaagtgctaacccagtatgttcttc

SEQ ID NO: 212476 - DNA, 120 bp, Artificial Sequence
  ENSG00000115902_27 (sequence is synthesized)
ttttttatgtaagggacagctttctccacagagtcctttctgctggtgaggacagcatttctgagcagggctttgttctctatgtgcattaggacttttatcatgcccttgttctgtgtg

SEQ ID NO: 212477 - DNA, 120 bp, Artificial Sequence
  ENSG00000115902_28 (sequence is synthesized)
tagttacttgacagcatcaaatgccgcctcttcctaatgtccttcaagttttcatgaactagcaaccccaccttccaccatggttctgggcgcctgattttgctgtgactcccagaccca

SEQ ID NO: 212478 - DNA, 120 bp, Artificial Sequence
  ENSG00000115902_29 (sequence is synthesized)
gccactgtttctgccaccctgtaacaggccattaaagctccccagtgttcagcctccttcactcccttgttttccctgttgctatgtgtcacctgggccctacagacaggggcacacgct

SEQ ID NO: 212479 - DNA, 120 bp, Artificial Sequence
  ENSG00000115902_30 (sequence is synthesized)
tatggatgtgtgtaccattgagatgagaatgggtagatggaacggagaccatcaagccacacccccttcttaaaactggggacatgagcctgagcagaaagggtgaagaagagccatggg

SEQ ID NO: 212480 - DNA, 120 bp, Artificial Sequence
  ENSG00000115902_31 (sequence is synthesized)
acacagagttgacccagccagggggaaagcccagctctctttaaaccagctaagccattccagtctcctgtgaagccaaaagggaccaggaaccgtgcaaaggaaactggaaacttttcc

SEQ ID NO: 212481 - DNA, 120 bp, Artificial Sequence
  ENSG00000115902_32 (sequence is synthesized)
ccgctgggtagagcatgttgctgatactcttctgttttcaagggaaacaatcacattgtttgattccaaatggtaaatgaacactcactattcttcaggcttcagtaaatctttttttct

SEQ ID NO: 212482 - DNA, 120 bp, Artificial Sequence
  ENSG00000115902_33 (sequence is synthesized)
tccttcatatatatatacacaacacacacacacatatgtatatctatacacacatgtgtgttgtgtatatgcatgtgtgtgtgtgcgtgtgtgtatagttttagctccaagccaagcaag

SEQ ID NO: 212483 - DNA, 120 bp, Artificial Sequence
  ENSG00000115902_34 (sequence is synthesized)
tttgtgtttggatagaggggaacttaactattaactacaagttgtatgtctgtggtatcttgattttcccatttctaaagatgaatttcacaaagccataaagcgtgaaattagagctgg

SEQ ID NO: 212484 - DNA, 120 bp, Artificial Sequence
  ENSG00000115902_35 (sequence is synthesized)
acttaagactcattggccgaccatcctgtgtcctggcctggccctgcagtaagaagcgtgtctgggtctggagaagggtgcttccgagagtgtgcaggtggcccttccccttggaggcga

SEQ ID NO: 212485 - DNA, 120 bp, Artificial Sequence
  ENSG00000115902_36 (sequence is synthesized)
gaagagagaatgtgctgtctatcttcctggttttcagtccacagagtcggtagaccaggggttacgtgactggggaaaatctcacatctccttgtctgaaaacatttcccctgctgttct

SEQ ID NO: 212486 - DNA, 120 bp, Artificial Sequence
  ENSG00000115902_37 (sequence is synthesized)
ctttctaacatgttgtggtaaatctgttcagatactgctcatctgactgttttgtacatgtgacaattgccttaaaacctagcacagtcctcagaaatgaataccgtgtttccactggaa

SEQ ID NO: 212487 - DNA, 120 bp, Artificial Sequence
  ENSG00000115902_38 (sequence is synthesized)
gcctggcgggcgacccagccccatcctgatggccccaggacacaagcccaggagcgccccggtgcgcgcggttccgcggcccaggggcgccgggtttggtggcacagcgagccccctttc

SEQ ID NO: 212488 - DNA, 81 bp, Artificial Sequence
  ENSG00000115902_39 (sequence is synthesized)
cttcaattccctcaacgaggcgacgatggtgctggtgtcctggattatgtggatggagtacagcggcgcgatctcggctcc

SEQ ID NO: 212489 - DNA, 120 bp, Artificial Sequence
  ENSG00000115902_40 (sequence is synthesized)
tacaggtacgtacctgtgggcatcatgttccttgttggaagcaagatcgtggaaatgaaagacatcatcgtgctggtgaccagcctggggaaatacatcttcgcatctatattgggccat

SEQ ID NO: 212490 - DNA, 120 bp, Artificial Sequence
  ENSG00000115902_41 (sequence is synthesized)
atacattgctgcataacaaactactacacatttaacagcttaaacagcttaaaatctcacatatttactatcctacagtctctctggggtcaggaatcttgggacagtttagttaggtcc

SEQ ID NO: 212491 - DNA, 120 bp, Artificial Sequence
  ENSG00000115902_42 (sequence is synthesized)
tctgcttcagagtctcttacaaggctgcaatcggaggtgttggtcagggctaggttcttacccacaggtccacctggggagagattcacctctgaggtcatgttgttgttggcagaattc

SEQ ID NO: 212492 - DNA, 120 bp, Artificial Sequence
  ENSG00000115902_43 (sequence is synthesized)
agttccttgaagtttggactgggagcctcagttggctcttggctggagaccacctgcagtttctagtctcgtgggcctttctaacatagcagcttgcttcatcaaagtatgcaagcagaa

SEQ ID NO: 212493 - DNA, 120 bp, Artificial Sequence
  ENSG00000115902_44 (sequence is synthesized)
gacaataagaagagtcagctagcacaatggaagctacaaccttatgtaaccaaatcgtggatgtgacatcccatcacctttgctgcatttgttcattagaagcaagtcataggtccaccc

SEQ ID NO: 212494 - DNA, 120 bp, Artificial Sequence
  ENSG00000115902_45 (sequence is synthesized)
agactaaagggattacccaaaggtgtgaataccaggaggccatcttagactctgcctgccacagctgggttgcagccagacctgcctacctctgaaacccaatgcactgcaaatagttgc

SEQ ID NO: 212495 - DNA, 120 bp, Artificial Sequence
  ENSG00000115902_46 (sequence is synthesized)
ctggagatcctggtgagcaacccagcttcttacagaagtaagaattagtggataagtttgacacaaattgttaagaatgatccagagtcttttgctcttctagacttactcttcttgcag

SEQ ID NO: 212496 - DNA, 120 bp, Artificial Sequence
  ENSG00000115902_47 (sequence is synthesized)
gaagtgagaacaaatggactgtcagctggaatagaatttcttgtatatcaagaccagcatcctacacagagccctcagtaaaactatttgcatgaacagattttgggctccatcagctcg

SEQ ID NO: 212497 - DNA, 120 bp, Artificial Sequence
  ENSG00000115902_48 (sequence is synthesized)
attgccctacttttataacaaatgtttataatatccttaattctaagatgaaatccataaataaaatgtccctgcccacataatttcaaaatatcaatatgatgtaactgtaatatacaa

SEQ ID NO: 212498 - DNA, 120 bp, Artificial Sequence
  ENSG00000115902_49 (sequence is synthesized)
aaggaaaataattataacaaaaacaatgtgtctcaatatatacatgctctaaaataaagtggttgaatgcttactcctgaactcagaatcactgctaatgaaatagttataaatgcagac

SEQ ID NO: 212499 - DNA, 120 bp, Artificial Sequence
  ENSG00000115902_50 (sequence is synthesized)
tgttacttgacactgggtgtggaattagggactcagattctacaatttgcactggtggtgtgattttccaggaagacaaataatatttggaaacattctgaacaaagcaaaacaaaaacc

SEQ ID NO: 212500 - DNA, 120 bp, Artificial Sequence
  ENSG00000115902_51 (sequence is synthesized)
accccataatttacaaggagttacacttctggaaaattcagcgtatgttcaaattgtgaaaaacagaaccttgttttggaattagtttagtcttgagtaattatagataaggtttttatc

SEQ ID NO: 212501 - DNA, 120 bp, Artificial Sequence
  ENSG00000115902_52 (sequence is synthesized)
tacacgtatgtcatgcaagacattggagggccttgagataattcattatacaggactctactgcatttaacaggacaaatgtgtgggacctggcatttctccctacacactccccccaat

SEQ ID NO: 212502 - DNA, 120 bp, Artificial Sequence
  ENSG00000115902_53 (sequence is synthesized)
tggggaatgcctcaattttgcaacaacaaaaacgcccttggatttcactagtgagcagtgacacttgacattgcaaaccactgcaatggtgcctaacctctaggtgagaggaaagcaatg

SEQ ID NO: 212503 - DNA, 120 bp, Artificial Sequence
  ENSG00000115902_54 (sequence is synthesized)
cagttatagacttggttggacaccattaagttcagatatcaaggagtaccatgagagagatggaaatgaaaatcagtggcttcaaagtatctactgtggcccagcagcgcaggcacagtt

SEQ ID NO: 212504 - DNA, 120 bp, Artificial Sequence
  ENSG00000115902_55 (sequence is synthesized)
agggtgcttaaatcaagcaaaaggtgcagtgtcagctaggggtggagagagaacactgtgttagggttttagaagtggacatctcaaagcagatactttgcacactgaattttaagaata

SEQ ID NO: 212505 - DNA, 120 bp, Artificial Sequence
  ENSG00000115902_56 (sequence is synthesized)
ctccagcctgggcaacagggacctcatctctaaaaaattgttttaaaagaatactgacagaatgctttcttttccaacagaaacctgtttccctccaatcttgtggttgcagctttccgt

SEQ ID NO: 212506 - DNA, 120 bp, Artificial Sequence
  ENSG00000115904_0 (sequence is synthesized)
ccgccgcccctctccccgcccagaggcgccccgggggcaccatgcaggcgcagcagctgccctacgagtttttcagcgaagagaacgcgcccaagtggcggggactactggtgcctgcgc

SEQ ID NO: 212507 - DNA, 120 bp, Artificial Sequence
  ENSG00000115904_1 (sequence is synthesized)
tgaaaaaggtccaggggcaagttcatcctactctcgagtctaatgatgatgctcttcagtatgttgaagaattaattttgcaattattaaatatgctatgccaagctcagccccgaagtg

SEQ ID NO: 212508 - DNA, 120 bp, Artificial Sequence
  ENSG00000115904_2 (sequence is synthesized)
cttcagatgtagaggaacgtgttcaaaaaagtttccctcatccaattgataaatgggcaatagctgatgcccaatcagctattgaaaagaggaagcgaagaaaccctttatctctcccag

SEQ ID NO: 212509 - DNA, 120 bp, Artificial Sequence
  ENSG00000115904_3 (sequence is synthesized)
tagaaaaaattcatcctttattaaaggaggtcctaggttataaaattgaccaccaggtttctgtttacatagtagcagtcttagaatacatttctgcagacattttaaagctggttggga

SEQ ID NO: 212510 - DNA, 120 bp, Artificial Sequence
  ENSG00000115904_4 (sequence is synthesized)
attatgtaagaaatatacggcattatgaaattacaaaacaagatattaaagtggcaatgtgtgctgacaaggtattgatggatatgtttcatcaagatgtagaagatattaatatattat

SEQ ID NO: 212511 - DNA, 120 bp, Artificial Sequence
  ENSG00000115904_5 (sequence is synthesized)
ctttaactgacgaagagccttccacctcaggagaacaaacttactatgatttggtaaaagcatttatggcagaaattcgacaatatataagggaactaaatctaattataaaagttttta

SEQ ID NO: 212512 - DNA, 120 bp, Artificial Sequence
  ENSG00000115904_6 (sequence is synthesized)
gagagccctttgtctccaattcaaaattgttttcagctaatgatgtagaaaatatatttagtcgcatagtagatatacatgaacttagtgtaaagttactgggccatatagaagatacag

SEQ ID NO: 212513 - DNA, 120 bp, Artificial Sequence
  ENSG00000115904_7 (sequence is synthesized)
tagaaatgacagatgaaggcagtccccatccactagtaggaagctgctttgaagacttagcagaggaactggcatttgatccatatgaatcgtatgctcgagatattttgcgacctggtt

SEQ ID NO: 212514 - DNA, 120 bp, Artificial Sequence
  ENSG00000115904_8 (sequence is synthesized)
ttcatgatcgtttccttagtcagttatcaaagcctggggcagcactttatttgcagtcaataggcgaaggtttcaaagaagctgttcaatatgttttacccaggctgcttctggcccctg

SEQ ID NO: 212515 - DNA, 120 bp, Artificial Sequence
  ENSG00000115904_9 (sequence is synthesized)
tttaccactgtctccattactttgaacttttgaagcagttagaagaaaaaagtgaagatcaagaagacaaggaatgtttaaaacaagcaataacagctttgcttaatgttcagagtggta

SEQ ID NO: 212516 - DNA, 120 bp, Artificial Sequence
  ENSG00000115904_10 (sequence is synthesized)
tggaaaaaatatgttctaaaagtcttgcaaaacgaagactgagtgaatctgcatgtcggttttatagtcagcaaatgaaggggaaacaactagcaatcaagaagatgaacgagattcaga

SEQ ID NO: 212517 - DNA, 120 bp, Artificial Sequence
  ENSG00000115904_11 (sequence is synthesized)
agaatattgatggttgggagggaaaagacattggacagtgttgtaatgaatttataatggaaggaactcttacacgtgtaggagccaaacatgagagacacatatttctctttgatggct

SEQ ID NO: 212518 - DNA, 120 bp, Artificial Sequence
  ENSG00000115904_12 (sequence is synthesized)
taatgatttgctgtaaatcaaatcatgggcagccaagacttcctggtgctagcaatgcagaatatcgtcttaaagaaaagttttttatgcgaaaggtacaaattaatgataaagatgaca

SEQ ID NO: 212519 - DNA, 120 bp, Artificial Sequence
  ENSG00000115904_13 (sequence is synthesized)
ccaatgaatacaagcatgcttttgaaataattttaaaagatgaaaatagtgttatattttctgccaagtcagctgaagagaaaaacaattggatggcagcattgatatctttacagtacc

SEQ ID NO: 212520 - DNA, 120 bp, Artificial Sequence
  ENSG00000115904_14 (sequence is synthesized)
ggagtacactggaaaggatgcttgatgtaacaatgctacaggaagagaaagaggagcagatgaggctgcctagtgctgatgtttatagatttgcagagcctgactctgaagagaatatta

SEQ ID NO: 212521 - DNA, 120 bp, Artificial Sequence
  ENSG00000115904_15 (sequence is synthesized)
tatttgaagagaacatgcagcccaaggctggaattccaattatcaaagcaggaactgttattaaacttatagagaggcttacgtaccatatgtacgcagatcccaattttgttcggacat

SEQ ID NO: 212522 - DNA, 120 bp, Artificial Sequence
  ENSG00000115904_16 (sequence is synthesized)
ttcttacaacatacagatccttttgcaaacctcaagaactactgagtcttataatagaaaggtttgaaattccagagcctgagccaacagaagctgatcgcatagctatagagaatggag

SEQ ID NO: 212523 - DNA, 120 bp, Artificial Sequence
  ENSG00000115904_17 (sequence is synthesized)
atcaacccttgagtgcagaactgaaaagatttagaaaagaatatatacagcctgtgcaactgcgagtattaaatgtatgtcggcactgggtagagcaccacttctatgattttgaaagag

SEQ ID NO: 212524 - DNA, 120 bp, Artificial Sequence
  ENSG00000115904_18 (sequence is synthesized)
atgcatatcttttgcaacgaatggaagaatttattggaacagtaagaggtaaagcaatgaaaaaatgggttgaatccatcactaaaataatccaaaggaaaaaaattgcaagagacaatg

SEQ ID NO: 212525 - DNA, 120 bp, Artificial Sequence
  ENSG00000115904_19 (sequence is synthesized)
gaccaggtcataatattacatttcagagttcacctcccacagttgagtggcatataagcagacctgggcacatagagacttttgacctgctcaccttacacccaatagaaattgctcgac

SEQ ID NO: 212526 - DNA, 120 bp, Artificial Sequence
  ENSG00000115904_20 (sequence is synthesized)
aactcactttacttgaatcagatctataccgagctgtacagccatcagaattagttggaagtgtgtggacaaaagaagacaaagaaattaactctcctaatcttctgaaaatgattcgac

SEQ ID NO: 212527 - DNA, 120 bp, Artificial Sequence
  ENSG00000115904_21 (sequence is synthesized)
ataccaccaacctcactctgtggtttgagaaatgtattgtagaaactgaaaatttagaagaaagagtagctgtggtgagtcgaattattgagattctacaagtctttcaagagttgaaca

SEQ ID NO: 212528 - DNA, 120 bp, Artificial Sequence
  ENSG00000115904_22 (sequence is synthesized)
actttaatggtgtccttgaggttgtcagtgctatgaattcatcacctgtttacagactagaccacacatttgagcaaataccaagtcgccagaagaaaattttagaagaagctcatgaat

SEQ ID NO: 212529 - DNA, 120 bp, Artificial Sequence
  ENSG00000115904_23 (sequence is synthesized)
tgagtgaagatcactataagaaatatttggcaaaactcaggtctattaatccaccatgtgtgcctttctttggaatttatctcactaatatcttgaaaacagaagaaggcaaccctgagg

SEQ ID NO: 212530 - DNA, 120 bp, Artificial Sequence
  ENSG00000115904_24 (sequence is synthesized)
tcctaaaaagacatggaaaagagcttataaactttagcaaaaggaggaaagtagcagaaataacaggagagatccagcagtaccaaaatcagccttactgtttacgagtagaatcagata

SEQ ID NO: 212531 - DNA, 120 bp, Artificial Sequence
  ENSG00000115904_25 (sequence is synthesized)
tcaaaaggttctttgaaaacttgaatccgatgggaaatagcatggagaaggaatttacagattatcttttcaacaaatccctagaaatagaaccacgaaaccctaagcctctcccaagat

SEQ ID NO: 212532 - DNA, 120 bp, Artificial Sequence
  ENSG00000115904_26 (sequence is synthesized)
ttccaaaaaaatatagctatcccctaaaatctcctggtgttcgtccatcaaacccaagaccaggtaccatgaggcatcccacacctctgcagcaggagccaaggaaaattagttatagta

SEQ ID NO: 212533 - DNA, 120 bp, Artificial Sequence
  ENSG00000115904_27 (sequence is synthesized)
ggatccctgaaagtgaaacagaaagtacagcatctgcaccaaattctccaagaacaccgttaacacctccgcctgcttctggtgcttccagtaccacagatgtttgcagtgtatttgatt

SEQ ID NO: 212534 - DNA, 120 bp, Artificial Sequence
  ENSG00000115904_28 (sequence is synthesized)
ccgatcattcgagcccttttcactcaagcaatgataccgtctttatccaagttactctgccccatggcccaagatctgcttctgtatcatctataagtttaaccaaaggcactgatgaag

SEQ ID NO: 212535 - DNA, 120 bp, Artificial Sequence
  ENSG00000115904_29 (sequence is synthesized)
tgcctgtccctcctcctgttcctccacgaagacgaccagaatctgccccagcagaatcttcaccatctaagattatgtctaagcatttggacagtcccccagccattcctcctaggcaac

SEQ ID NO: 212536 - DNA, 120 bp, Artificial Sequence
  ENSG00000115904_30 (sequence is synthesized)
ccacatcaaaagcctattcaccacgatattcaatatcagaccggacctctatctcagaccctcctgaaagccctcccttattaccaccacgagaacctgtgaggacacctgatgttttct

SEQ ID NO: 212537 - DNA, 120 bp, Artificial Sequence
  ENSG00000115904_31 (sequence is synthesized)
caagctcaccactacatctccaacctccccctttgggcaaaaaaagtgaccatggcaatgccttcttcccaaacagcccttccccctttacaccacctcctcctcaaacaccttctcctc

SEQ ID NO: 212538 - DNA, 120 bp, Artificial Sequence
  ENSG00000115904_32 (sequence is synthesized)
acggcacaagaaggcatctgccatcaccaccattgacacaagaagtggaccttcattccattgctgggccgcctgttcctccacgacaaagcacttctcaacatatccctaaactccctc

SEQ ID NO: 212539 - DNA, 120 bp, Artificial Sequence
  ENSG00000115904_33 (sequence is synthesized)
caaaaacttacaaaagggagcacacacacccatccatgcacagagatggaccaccactgttggagaatgcccattcttcctgagttcctctgtactgggatgtatattttcctagcccca

SEQ ID NO: 212540 - DNA, 120 bp, Artificial Sequence
  ENSG00000115904_34 (sequence is synthesized)
cagcactgaggagttaaaatgagaactccaaacactaacgactcttcttcaagatgcagtataagacaatgaattttaacctagatgtaattatacaatggaaatggtattccagtttag

SEQ ID NO: 212541 - DNA, 120 bp, Artificial Sequence
  ENSG00000115904_35 (sequence is synthesized)
aatatggaaagaccgacctagaggaattggacaactgattgcacctgaaaatcataaagggactttttctggccaataggcaggagtcctctttttgtgaagtgatcttttgtgaagtga

SEQ ID NO: 212542 - DNA, 120 bp, Artificial Sequence
  ENSG00000115904_36 (sequence is synthesized)
tcattaaagggatggaaaacacagtctagtgtccagcaggcccacatgacagtttttgtaattcaaattatgcacttttaaaaaaaaaaacttaaacagggatcttaatatcttcctttg

SEQ ID NO: 212543 - DNA, 120 bp, Artificial Sequence
  ENSG00000115904_37 (sequence is synthesized)
ttttcctttgctttactcttctactttagaatattttcttaaaaatcactcaaaggactgtgaggaaaggctgtggtacctgaccttgttgaaatcaaggcccggcactgtactacaggc

SEQ ID NO: 212544 - DNA, 120 bp, Artificial Sequence
  ENSG00000115904_38 (sequence is synthesized)
ctgtttacagattattacggtgaactgaatgggtaccgaggcttcaccaaagaggtacttttttgttgttgttgttgttttaggaataattgtaccaattttaagagcattccccccacc

SEQ ID NO: 212545 - DNA, 120 bp, Artificial Sequence
  ENSG00000115904_39 (sequence is synthesized)
tgtccccacacacccaaacaaaatgtggtggtgttgccttcaaaaaagagaagttttgtgtcattaacatgacagaagaactttttaaaaaaaaataactgtcaactattctatttgcat

SEQ ID NO: 212546 - DNA, 120 bp, Artificial Sequence
  ENSG00000115904_40 (sequence is synthesized)
ttaggagactgttcatctatgctagattgtcattttccctccttctcccacagaagtttactggtagtccatgtcatggctcgtagctatccctctaaccataccatggaaatgcaggca

SEQ ID NO: 212547 - DNA, 120 bp, Artificial Sequence
  ENSG00000115904_41 (sequence is synthesized)
cccaatgtgaaaaggagcacttgctgggcatcactgacaccgctcatgttttacacatagttgagtaatcagcatatctagaattatcttgcattgcctaaatcatatgtatatagtgaa

SEQ ID NO: 212548 - DNA, 120 bp, Artificial Sequence
  ENSG00000115904_42 (sequence is synthesized)
tgttatataatatacctggcaggtctgttttaatttaattgaataaagatacaaatactttgtttggctggcatatattaaattattatatgaagaaaatggttgattcttatttctttt

SEQ ID NO: 212549 - DNA, 120 bp, Artificial Sequence
  ENSG00000115904_43 (sequence is synthesized)
agttgaaaaacacacaaaaacactaaacataaaagcacgttttgtggtacgccttggtttctagttctggatatatgtattaatcttaaagaatgatctaaagtcacagcttggcatata

SEQ ID NO: 212550 - DNA, 120 bp, Artificial Sequence
  ENSG00000115904_44 (sequence is synthesized)
ggaagatacttggttagaataggatgggtatcttttaagcagaactttgtaagtaagttttaagttcctaagcaacaagtatacagtttgttaaggtttatattgaacattctaccttgc

SEQ ID NO: 212551 - DNA, 120 bp, Artificial Sequence
  ENSG00000115904_45 (sequence is synthesized)
ttgaggttttctgctttatcaaaactattcataatagaacatctacctgcatcattactatcataatatggattattcataaagcgtatgtactgttcttctgagtctaacaaatactgt

SEQ ID NO: 212552 - DNA, 120 bp, Artificial Sequence
  ENSG00000115904_46 (sequence is synthesized)
gactgaaatgcatgcaccttgttgaagagaaaacattttattaatctccactataatgtctgtgaaatgtgcagtattccatccttagagagtttatctggttcatcagcatctgcatgt

SEQ ID NO: 212553 - DNA, 120 bp, Artificial Sequence
  ENSG00000115904_47 (sequence is synthesized)
atcctctgaataatgaagcaacatttcagcaattctgttaaccacaccattagagacatttttagaagtgctgcaacatggtgggaacctagtactttaataatttcctatgatatttat

SEQ ID NO: 212554 - DNA, 120 bp, Artificial Sequence
  ENSG00000115904_48 (sequence is synthesized)
tagagcataaaatgtacatcacgatagtacagtatgtagtcctttaagaccagaaggtatgttaactgcaccatcattaagcagtctatcctattttcttatttatttgttagaattgaa

SEQ ID NO: 212555 - DNA, 120 bp, Artificial Sequence
  ENSG00000115904_49 (sequence is synthesized)
tcctttctcaatatctgtaccattcctatgatggtagccattcttctctttataaaatatttcctctttgaaaagcgtcctaaaacattaatttcaaatcccctcttggatgcaaagtgt

SEQ ID NO: 212556 - DNA, 120 bp, Artificial Sequence
  ENSG00000115904_50 (sequence is synthesized)
ccctaagaccatccattcaacagtatttatgtgagccaacttactagagccgctacaactaatcatgatagacagtccagaatctccctggactttatactgggccagcctcattgtccc

SEQ ID NO: 212557 - DNA, 120 bp, Artificial Sequence
  ENSG00000115904_51 (sequence is synthesized)
taagatttctctttttatgtctcatggattacttctctttttaattgccccaggcacattccaaatgagaacctggtaaaagtcacattggacccccttcagtatgtcttcggctaatgt

SEQ ID NO: 212558 - DNA, 120 bp, Artificial Sequence
  ENSG00000115904_52 (sequence is synthesized)
gttagccttcaataaggtgataaccccttttcaacctatctagtctataaagaggaaaaattcagatttggagttctaatcctatttctcccaaagggaactattcttctaccccatggt

SEQ ID NO: 212559 - DNA, 120 bp, Artificial Sequence
  ENSG00000115904_53 (sequence is synthesized)
tctaggagaccacttcactgtgcaacagttttacatgcattgtggatggaggatatttttattctgaactgttacatttaggtaaaaatattttctgcagtggtaactgattagaaaaat

SEQ ID NO: 212560 - DNA, 120 bp, Artificial Sequence
  ENSG00000115904_54 (sequence is synthesized)
gccaattggatgcccttaggtggaggtgagaaaatggcatccttgccttcttctcaatatgaaacattaactagttgacaaatttatccttgtagtaatgaaaatctatttaatcaggga

SEQ ID NO: 212561 - DNA, 120 bp, Artificial Sequence
  ENSG00000115904_55 (sequence is synthesized)
ccagaaatggctgaggagataaatgcatcattacaaaattctgcttttgaatcctggacattacaagggggtaaatgcagcatgactttttgttaaccacattccaaaatgtggaacatt

SEQ ID NO: 212562 - DNA, 120 bp, Artificial Sequence
  ENSG00000115904_56 (sequence is synthesized)
tcttttagaaatgaaaatatttcaaggctgatgtattttaagactacacattatcaggaaacatacattgagagttcgcttaattaaaggttgttgggcatcaaattatgtttagtaggt

SEQ ID NO: 212563 - DNA, 120 bp, Artificial Sequence
  ENSG00000115904_57 (sequence is synthesized)
tactattctctaacaactcaaggatgctttaatggatctgaatttgacaaagagcatgccacactaatactacagtcaacaacagcccagagaacaattactatgtcagctggaggctat

SEQ ID NO: 212564 - DNA, 120 bp, Artificial Sequence
  ENSG00000115904_58 (sequence is synthesized)
attatgattctaaattcttaaaggtttttttccctccataaatcaaaaattaccttatgtaaaccaaaaattagttggtatttatggtcatgatcttaattctcaagtttagcttaatct

SEQ ID NO: 212565 - DNA, 120 bp, Artificial Sequence
  ENSG00000115904_59 (sequence is synthesized)
tgtatttcattgtttgtcttctaatatgacagcttaaattcagatttttaagtgactcagcaaaataggaggagtgtcccaatttattagtgttgtacatattgaagaaaacctttttgt

SEQ ID NO: 212566 - DNA, 120 bp, Artificial Sequence
  ENSG00000115904_60 (sequence is synthesized)
tccttcagatttagaaagaaacagtttaaccatttatttcttggtattctgctgctgtgaataggtttacttattcttttaacatatattgtgtgactacgcaagtataggtcctgttgt

SEQ ID NO: 212567 - DNA, 120 bp, Artificial Sequence
  ENSG00000115904_61 (sequence is synthesized)
attgcattaatctttaccagtaactaaacatcacaaggttaatattggtttggctgaaagaattatgcagtaaagttatttataagggaacatgatgactttattcaatatttttcttct

SEQ ID NO: 212568 - DNA, 120 bp, Artificial Sequence
  ENSG00000115904_62 (sequence is synthesized)
ttgaaacatctcattactaacttttaagattatttcataatcccttatacatgagccaatgaaatattttgagctctacttaagaagcatgaagtctatattataaatctaaacaacaaa

SEQ ID NO: 212569 - DNA, 120 bp, Artificial Sequence
  ENSG00000115904_63 (sequence is synthesized)
agcacttgtaacttgtttagtaaattccatgccttattttccatttttgacaccgtaaagtgcattttctgtcgactgtgagcaaatttcccttttgcctttaatgaaaatagtgcatta

SEQ ID NO: 212570 - DNA, 120 bp, Artificial Sequence
  ENSG00000115904_64 (sequence is synthesized)
agtagccaattgctgcagaattataaagcaaattagctaacagtgggtcacattggactaccactcaaagaaacaagatgcataacagatgatggaaggtacatgtggtgtggcttaggg

SEQ ID NO: 212571 - DNA, 120 bp, Artificial Sequence
  ENSG00000115904_65 (sequence is synthesized)
agagcgcacctgtgccagatgcatgccactttcagtagctgccaaatgtgcctttaattaagaacatctctaatttttttcttcagatcaagtcagcatttggggtcgggatttgggcag

SEQ ID NO: 212572 - DNA, 120 bp, Artificial Sequence
  ENSG00000115904_66 (sequence is synthesized)
ggaactttggggtgcaaatatctggtgaaaccaccagagaatttgtttgtcaaagtgacatgtataattttagttgagacgtgtttgtgtatatatgtgtatttgcctttgtttagtagc

SEQ ID NO: 212573 - DNA, 120 bp, Artificial Sequence
  ENSG00000115904_67 (sequence is synthesized)
acggttatttgctaaaataattgtcaaaaaattgctctgtcggtcggtctttgatgtaagaacaaagtgtggtctatacatctaatatggcctttgtacctaaccatgttcataggtaat

SEQ ID NO: 212574 - DNA, 120 bp, Artificial Sequence
  ENSG00000115904_68 (sequence is synthesized)
ctttgtactctgtgtgcagcagtatttggtttgcatttaaagtgaaaataacggctgttatttttctggcattactaagataaactgaaaaataataaagaaaaatgccttacatagccc

SEQ ID NO: 212575 - DNA, 120 bp, Artificial Sequence
  ENSG00000115904_69 (sequence is synthesized)
gcagtatttttgaaatcattagtgattctcatttagctcatatatgccatatagaaatattttgcatttttattgtggtctttctttggaggcacttttttcctgtatcaagttataaaa

SEQ ID NO: 212576 - DNA, 120 bp, Artificial Sequence
  ENSG00000115904_70 (sequence is synthesized)
tggtttattgaacagcttttggtatttctacacattacttttaattataagcaatttccagctaagacttttcaaggtaaataaatgaaataaaattcctgtggactttttcttaaaaat

SEQ ID NO: 212577 - DNA, 120 bp, Artificial Sequence
  ENSG00000115904_71 (sequence is synthesized)
aaagacctccatacattccacaagatagtggcctcaccagttaattctgatgctaatagaggatgcaccaaatatagtaggaaaatgattgtttgactgtaccagtctagaagacgggaa

SEQ ID NO: 212578 - DNA, 120 bp, Artificial Sequence
  ENSG00000115904_72 (sequence is synthesized)
agagcagtatgcctgactggaggcactgccttccttctatcagtcaccctgaatgtgtcttctctatagtagttatactatcgccacccccctactctctacattattttatttactaaa

SEQ ID NO: 212579 - DNA, 120 bp, Artificial Sequence
  ENSG00000115904_73 (sequence is synthesized)
aagaagcctctgcgcctgcgccagggcgcacccgtcggcggtaaaagctgaggggctggcgcgggggattggtgggcgacacttttacgtctacacgtgcctacccgtctgcacgtttct

SEQ ID NO: 212580 - DNA, 120 bp, Artificial Sequence
  ENSG00000115919_0 (sequence is synthesized)
acattttcaaggaattcttgagaggttcttggagagattctgggagccaaacactccattgggatcctagctgttttagagaacaacttgtaatggagccttcatctcttgagctgccgg

SEQ ID NO: 212581 - DNA, 120 bp, Artificial Sequence
  ENSG00000115919_1 (sequence is synthesized)
ctgacacagtgcagcgcattgcggctgaactcaaatgccacccaacggatgagagggtggctctccacctagatgaggaagataagctgaggcacttcagggagtgcttttatattccca

SEQ ID NO: 212582 - DNA, 120 bp, Artificial Sequence
  ENSG00000115919_2 (sequence is synthesized)
aaatacaggatctgcctccagttgatttatcattagtgaataaagatgaaaatgccatctatttcttgggaaattctcttggccttcaaccaaaaatggttaaaacatatcttgaagaag

SEQ ID NO: 212583 - DNA, 120 bp, Artificial Sequence
  ENSG00000115919_3 (sequence is synthesized)
aactagataagtgggccaaaatagcagcctatggtcatgaagtggggaagcgtccttggattacaggagatgagagtattgtaggccttatgaaggacattgtaggagccaatgagaaag

SEQ ID NO: 212584 - DNA, 120 bp, Artificial Sequence
  ENSG00000115919_4 (sequence is synthesized)
aaatagccctaatgaatgctttgactgtaaatttacatcttctaatgttatcattttttaagcctacgccaaaacgatataaaattcttctagaagccaaagccttcccttctgatcatt

SEQ ID NO: 212585 - DNA, 120 bp, Artificial Sequence
  ENSG00000115919_5 (sequence is synthesized)
atgctattgagtcacaactacaacttcacggacttaacattgaagaaagtatgcggatgataaagccaagagagggggaagaaaccttaagaatagaggatatccttgaagtaattgaga

SEQ ID NO: 212586 - DNA, 120 bp, Artificial Sequence
  ENSG00000115919_6 (sequence is synthesized)
aggaaggagactcaattgcagtgatcctgttcagtggggtgcatttttacactggacagcactttaatattcctgccatcacaaaagctggacaagcgaagggttgttatgttggctttg

SEQ ID NO: 212587 - DNA, 120 bp, Artificial Sequence
  ENSG00000115919_7 (sequence is synthesized)
atctagcacatgcagttggaaatgttgaactctacttacatgactggggagttgattttgcctgctggtgttcctacaagtatttaaatgcaggagcaggaggaattgctggtgccttca

SEQ ID NO: 212588 - DNA, 120 bp, Artificial Sequence
  ENSG00000115919_8 (sequence is synthesized)
ttcatgaaaagcatgcccatacgattaaacctgcattagtgggatggtttggccatgaactcagcaccagatttaagatggataacaaactgcagttaatccctggggtctgtggattcc

SEQ ID NO: 212589 - DNA, 120 bp, Artificial Sequence
  ENSG00000115919_9 (sequence is synthesized)
gaatttcaaatcctcccattttgttggtctgttccttgcatgctagtttagagatctttaagcaagcgacaatgaaggcattgcggaaaaaatctgttttgctaactggctatctggaat

SEQ ID NO: 212590 - DNA, 120 bp, Artificial Sequence
  ENSG00000115919_10 (sequence is synthesized)
acctgatcaagcataactatggcaaagataaagcagcaaccaagaaaccagttgtgaacataattactccgtctcatgtagaggagcgggggtgccagctaacaataacattttctgttc

SEQ ID NO: 212591 - DNA, 120 bp, Artificial Sequence
  ENSG00000115919_11 (sequence is synthesized)
caaacaaagatgttttccaagaactagaaaaaagaggagtggtttgtgacaagcggaatccaaatggcattcgagtggctccagttcctctctataattctttccatgatgtttataaat

SEQ ID NO: 212592 - DNA, 120 bp, Artificial Sequence
  ENSG00000115919_12 (sequence is synthesized)
ttaccaatctgctcacttctatacttgactctgcagaaacaaaaaattagcagtgttttctagaacaacttaagcaaattatactgaaagctgctgtggttatttcagtattattcgatt

SEQ ID NO: 212593 - DNA, 120 bp, Artificial Sequence
  ENSG00000115919_13 (sequence is synthesized)
tttaattattgaaagtatgtcaccattgaccacatgtaactaacaataaataatataccttacagaaaatctgatataatttttcagagtctgtggcactaaggagtccacagggctgcc

SEQ ID NO: 212594 - DNA, 120 bp, Artificial Sequence
  ENSG00000115919_14 (sequence is synthesized)
taggtgctttgtgtttgggggaccaaaactgtgttggttcaagtattatctatacagtctctataagctgtcacatttcatggtcattgaaatgttttatgttggtttaatttctgattt

SEQ ID NO: 212595 - DNA, 120 bp, Artificial Sequence
  ENSG00000115919_15 (sequence is synthesized)
aactgacaacttcataatgtatgtgcaattattgtgtcaaatttagaaatattactttagcttcaatttaccaaggagtttctttgaagcattgtagtctgatatatatatatatatata

SEQ ID NO: 212596 - DNA, 120 bp, Artificial Sequence
  ENSG00000115919_16 (sequence is synthesized)
tgtgtgtatatatatatatatatatcatatatatatgatagtggctttcaaatttttttgggtacaatccacattgctcctgctgatctgtaatatcagaaaccagtatttatgtgaata

SEQ ID NO: 212597 - DNA, 120 bp, Artificial Sequence
  ENSG00000115919_17 (sequence is synthesized)
tgctgatctgtaatatcagaaaccagtatttatgtgaatatatgagaaatattattgattctaagatattttatcatattttaacatctttgaaagaggacccatctttcaattttcgat

SEQ ID NO: 212598 - DNA, 120 bp, Artificial Sequence
  ENSG00000115919_18 (sequence is synthesized)
caatagtttcttacagtcaccattggccatctttctcgttaccatctatgaaattagcatgcatctcaaataaacagttaccatcttctatttgataaaatagtctaaatagcaaaaata

SEQ ID NO: 212599 - DNA, 120 bp, Artificial Sequence
  ENSG00000115919_19 (sequence is synthesized)
aaagtttttacaattatttgcctgtgctctaataggtactattctattttatctcataagaaatgttggaaactcattatattgatttccttacccactcatgggccctaattcacactt

SEQ ID NO: 212600 - DNA, 120 bp, Artificial Sequence
  ENSG00000115919_20 (sequence is synthesized)
tttaagaatgtttctttctttaatgttatcataatctcttactttttaaatgagaacttcccctaatataagagcttagatattatattactatgtttccatagtaaataaataacccca

SEQ ID NO: 212601 - DNA, 120 bp, Artificial Sequence
  ENSG00000115919_21 (sequence is synthesized)
agatctttttggggattagagatataagaaatatgtgctccatctcttgacatctttatctcaaatctatggacctttcttacccactgtgaaaaacctaaagttacacttagccctgtt

SEQ ID NO: 212602 - DNA, 120 bp, Artificial Sequence
  ENSG00000115919_22 (sequence is synthesized)
ggacttacctagttttcaattgttgatgccacaatcattatttataagttgacaaaatagtgtagatttgtatacatagtcaacaaaaagagtgacataattattgcctccaattaaaca

SEQ ID NO: 212603 - DNA, 120 bp, Artificial Sequence
  ENSG00000115919_23 (sequence is synthesized)
agtttgaatgaaataaacaaacttagataaacacttcggatggtagacgtaaacaataatatgtggaactccaacatcaacacctaccaataccagtaactactgatatttatcatgtac

SEQ ID NO: 212604 - DNA, 120 bp, Artificial Sequence
  ENSG00000115919_24 (sequence is synthesized)
ttaccatgtaccatgtattgtgctacattactcatgttatctcccttaattgagtggctacatactgctttagcaaatcttcctactgtaactaatcctcatagatggaagagttctcaa

SEQ ID NO: 212605 - DNA, 80 bp, Artificial Sequence
  ENSG00000115919_25 (sequence is synthesized)
taactaatcctcatagatggaagagttctcaaaaccttaaaactcatgcataagtggattcatatacatatataaaaata

SEQ ID NO: 212606 - DNA, 120 bp, Artificial Sequence
  ENSG00000115919_26 (sequence is synthesized)
tctacatcaggtatttctcctaatgctcaccctcctcttatccccaactacccaaaaggacctggtgtgtgatgttcccctccctgtgttcatatgttctcattgttcaactctcactta

SEQ ID NO: 212607 - DNA, 70 bp, Artificial Sequence
  ENSG00000115919_27 (sequence is synthesized)
aggacctggtgtgtgatgttcccctccctgtgttcatatgttctcattgttcaactctcacttatgggta

SEQ ID NO: 212608 - DNA, 74 bp, Artificial Sequence
  ENSG00000115919_28 (sequence is synthesized)
ccttcacccactttttgatggggttgtgtttttcttgtaaatttatttaagtcccttgtagattctggatattt

SEQ ID NO: 212609 - DNA, 80 bp, Artificial Sequence
  ENSG00000115919_29 (sequence is synthesized)
gcctatgtcctgaatggtattgcctagatattcttctagggttttttttttggctttaggtcttgcaatataagaaaggg

SEQ ID NO: 212610 - DNA, 60 bp, Artificial Sequence
  ENSG00000115919_30 (sequence is synthesized)
tctttttgcttaggattgtcttggcaatacacaatggtagcttgatggaaatagcattga

SEQ ID NO: 212611 - DNA, 79 bp, Artificial Sequence
  ENSG00000115919_31 (sequence is synthesized)
agttttttctaattctgtgaagaaagacaatcagcaatatggccattttcaggatattgattcttcctatctatgagca

SEQ ID NO: 212612 - DNA, 66 bp, Artificial Sequence
  ENSG00000115919_32 (sequence is synthesized)
gtatccttgagcagtggtttgtagttctcattgaagtagtccttcacatcccttgtaagttgtatt

SEQ ID NO: 212613 - DNA, 120 bp, Artificial Sequence
  ENSG00000115919_33 (sequence is synthesized)
actcatgatttggttctctgtttgtcctatatacatatgttggtatataggaatgcttttattttaaagatggaagatgatgtctctctatgtaactcaggcaggtctcaaactcctggg

SEQ ID NO: 212614 - DNA, 120 bp, Artificial Sequence
  ENSG00000115919_34 (sequence is synthesized)
ctcctgggctcaaatgatcctcctaccttaacctcctgagtagctgagactttagtcacacaccaccatgcctgaccaggaattgtttttcaacttcatagtggtaaacaaaacatatgt

SEQ ID NO: 212615 - DNA, 120 bp, Artificial Sequence
  ENSG00000115919_35 (sequence is synthesized)
gttttcagttctcatggaacaagcagcttagtaggagaaacatatgttgaacttgtaagcagagaagtaaatctataatgacaaatcataatttctgaagggtattaattagatgtttga

SEQ ID NO: 212616 - DNA, 120 bp, Artificial Sequence
  ENSG00000115919_36 (sequence is synthesized)
gtgaggggaaatattggaaggtgctcataagtttataaatgttctaaaatatttcatgctaatcacattaaaattatatcaaagtatataaacatatcatggaaaacataatcagcacca

SEQ ID NO: 212617 - DNA, 120 bp, Artificial Sequence
  ENSG00000115919_37 (sequence is synthesized)
tgtactcaacacctaggttaaaaaatagcattaaaaattctctttccagctcacattctgctccctccccaaatccacagataaccatcgaattatattttgttttcttcattcccttac

SEQ ID NO: 212618 - DNA, 120 bp, Artificial Sequence
  ENSG00000115919_38 (sequence is synthesized)
tttctttaagttttacacccatgtatgtacccataaaaatctattagctaattttggttgtgcatgaatattgtatcaatgcaattatactgtatatattctgcttttgcacatattttt

SEQ ID NO: 212619 - DNA, 120 bp, Artificial Sequence
  ENSG00000115919_39 (sequence is synthesized)
agattcatccatttgtggcatgtagctttccattcattttcactgctgctcagtattgtattacaaattttacatttgttttagggaagagtcataaaccatctttaagttctcctatgt

SEQ ID NO: 212620 - DNA, 120 bp, Artificial Sequence
  ENSG00000115919_40 (sequence is synthesized)
tacaagtaattttgtaaatgatgtgaggtggtgattctatttcattttttcccatatagataatttatattattaataattccttctatttcataagccaggtttctatatatctatata

SEQ ID NO: 212621 - DNA, 120 bp, Artificial Sequence
  ENSG00000115919_41 (sequence is synthesized)
aatatagatatgtagatatatgaaagcaatatatatatggatgtctttctgggctatctgtactttcacactggctaatttgcttgttttttcatcaatacttcacttccttaattacta

SEQ ID NO: 212622 - DNA, 120 bp, Artificial Sequence
  ENSG00000115919_42 (sequence is synthesized)
caacatagcagggcctggcatctgctagattaaatctctcagcttctttttattaagattgccctgaattgtcctggttatcctgggccccctactttttttatatttttgaatacatct

SEQ ID NO: 212623 - DNA, 120 bp, Artificial Sequence
  ENSG00000115919_43 (sequence is synthesized)
aaataaatttagaataaatctattgtgttccataaaacccctgttgggatttcaattgaactgcaattaaattttagatcagttttggaagaattgactcaatagtgagccttcctaccc

SEQ ID NO: 212624 - DNA, 120 bp, Artificial Sequence
  ENSG00000115919_44 (sequence is synthesized)
aagaccatggcatttattttcatttatttatgatttctttaatgcttctcaaaattttttattttctctattatggaaacgcacatttatagtttgacaaattcctaagtacttctaatt

SEQ ID NO: 212625 - DNA, 85 bp, Artificial Sequence
  ENSG00000115919_45 (sequence is synthesized)
gcacatttatagtttgacaaattcctaagtacttctaattttattgtcattccacattatcttttttgttgttgttttaaatact

SEQ ID NO: 212626 - DNA, 120 bp, Artificial Sequence
  ENSG00000115919_46 (sequence is synthesized)
caagtgatcctcccacgtcagcctgtggagtagctaggactacaggcatgtgccacaatgcctggctcatttttaagtgttaagttaaaaaaagttgtagaaacagtgttttgctacatt

SEQ ID NO: 212627 - DNA, 120 bp, Artificial Sequence
  ENSG00000115919_47 (sequence is synthesized)
aggctggtctcaaactcctggccccaagcaatcttcctgcctcagcttcccatattcggattatacgcatgaggcattgcaccagccccatgtgttatcttttataaaatttaacattta

SEQ ID NO: 212628 - DNA, 120 bp, Artificial Sequence
  ENSG00000115919_48 (sequence is synthesized)
tttaactgataattgatactgtatatacatgaattcaattggtatctatttttaatatgggaaattttatgcaaatgagcacatttttctcccttccttccttccttctttccttgttct

SEQ ID NO: 212629 - DNA, 120 bp, Artificial Sequence
  ENSG00000115919_49 (sequence is synthesized)
ctctctttctttctttctttctttctcacagggtgtcactctgttgcccaggcggagtgcagtggcacatgatcatagctcactgcaacctccaactcaaacacttgagtgatcctctgt

SEQ ID NO: 212630 - DNA, 120 bp, Artificial Sequence
  ENSG00000115919_50 (sequence is synthesized)
tcaaacacttgagtgatcctctgtcccccgtttcccaagcagctgggactacaggcacatgccacgatgccaagctaatttttaaaaataattttttttgtagattcagagtcttgctat

SEQ ID NO: 212631 - DNA, 89 bp, Artificial Sequence
  ENSG00000115919_51 (sequence is synthesized)
cttgctatgttgcccaggctaatcctcagcctcccattacaggcataagctgccactcctggacctctttttttttttttttttttttt

SEQ ID NO: 212632 - DNA, 89 bp, Artificial Sequence
  ENSG00000115919_52 (sequence is synthesized)
ccatgttggctaggctggtatttgaccttccaaaatgctgggattacgtgtgagccaccaaacccagcccctcattttctttttgattt

SEQ ID NO: 212633 - DNA, 120 bp, Artificial Sequence
  ENSG00000115919_53 (sequence is synthesized)
gtgagccaccaaacccagcccctcattttctttttgatttttatttattttcctctgtttttcttcttttggatttagggatgtgtgtgtggaggtgtattgagtccgttttttctttct

SEQ ID NO: 212634 - DNA, 120 bp, Artificial Sequence
  ENSG00000115919_54 (sequence is synthesized)
ttattttagcaattactctggctattttaacatgcaaatataatgaagtttagaattagccattttttataactctccttctgactagttgaagaaatgagaatgctttaacatcaaaca

SEQ ID NO: 212635 - DNA, 120 bp, Artificial Sequence
  ENSG00000115919_55 (sequence is synthesized)
atgagaatgctttaacatcaaacagccaactctttacttatacactattgctattcattatagcatttttagtctagcttcctccctcctctttctctctctctctctctgtctctctct

SEQ ID NO: 212636 - DNA, 120 bp, Artificial Sequence
  ENSG00000115919_56 (sequence is synthesized)
ccctacaattcagaattttatttatggatgaagtacatatataatttattacaattcattttaatgaaaaacttttagtggtaaattgtattagtctttgggaaaaaacatttattgata

SEQ ID NO: 212637 - DNA, 120 bp, Artificial Sequence
  ENSG00000115919_57 (sequence is synthesized)
ccattttctcattacttaaaaatagtttcacttcatatagaattctatgtcgacagtaattttctttcaggaagtagaaaatattaagttacagtattttggcttccattactgctgtta

SEQ ID NO: 212638 - DNA, 90 bp, Artificial Sequence
  ENSG00000115919_58 (sequence is synthesized)
atattaagttacagtattttggcttccattactgctgttaagcattcagatcatcagccatctcatgccagtcagaatggcaatcattaa

SEQ ID NO: 212639 - DNA, 120 bp, Artificial Sequence
  ENSG00000115919_59 (sequence is synthesized)
tgggaatgtaaattagttcaaccattgctcttaagggctctttgtctttaatgatccgcatttttattatgatgtgtctaggcagttattattgtgtttattctatttctttatttgctg

SEQ ID NO: 212640 - DNA, 120 bp, Artificial Sequence
  ENSG00000115919_60 (sequence is synthesized)
ggcagttattattgtgtttattctatttctttatttgctgtctatccaagatttgaggattaattttttaatttctagaaaattcagaagtattatttatttattcaattattacctctt

SEQ ID NO: 212641 - DNA, 120 bp, Artificial Sequence
  ENSG00000115919_61 (sequence is synthesized)
taaaataaaagggtatatgttagaatttttcactctctcctttatgcctttaacttcatattttctatttctttgaatttctgggctgcattcttaagaattctaaaacatatattttag

SEQ ID NO: 212642 - DNA, 120 bp, Artificial Sequence
  ENSG00000115919_62 (sequence is synthesized)
tttctaaaagtttcattagatttctgttcaaaattccttccatttgtgatctttcgaatgtgcttctgctttaggcattagtagtggacattctggttccccattgagcttccctgcatc

SEQ ID NO: 212643 - DNA, 120 bp, Artificial Sequence
  ENSG00000115919_63 (sequence is synthesized)
agctgttttgcctggtggctgccaccaacgcttttagctacctccctcctcaaactttggggtcaggccacacactataaaggattggaaaaaaaaatgaaaatatgaaaaacttacact

SEQ ID NO: 212644 - DNA, 120 bp, Artificial Sequence
  ENSG00000115919_64 (sequence is synthesized)
ttgtatcagtcaggagaaggataatcttcacactacagtttatgcttcagaagccaccccttctctgtggattagaccatgactagaagtttcctgagaccatcccttgcccagctcttt

SEQ ID NO: 212645 - DNA, 120 bp, Artificial Sequence
  ENSG00000115919_65 (sequence is synthesized)
tggtgatccccttcacttcctctgttacaggtttccctgatgagcactccttcaataaaacatagtcatccaaatcccaatctcaagcacggtgtcacgggaacctgatctaagtcagca

SEQ ID NO: 212646 - DNA, 120 bp, Artificial Sequence
  ENSG00000115919_66 (sequence is synthesized)
ttttctttattcttaatcacaactagttgatagtccatatctaatatataatgaatgtacagttgtttctgttggagttcacatatgatgccttgtttcctttgtagttttgtgattgat

SEQ ID NO: 212647 - DNA, 120 bp, Artificial Sequence
  ENSG00000115919_67 (sequence is synthesized)
agcttcgaactgctcatttaccttgaccttttgaattctttgaaaactgagttaagtctgattttccagagtttttatgtttgcttctgtcagttgcagagaatcaatgagaagaacact

SEQ ID NO: 212648 - DNA, 120 bp, Artificial Sequence
  ENSG00000115919_68 (sequence is synthesized)
gtcagttgcagagaatcaatgagaagaacactttaaattcttgttttcggtttttttccaatcacataagtaggatttacctgaatatatatataatatataaacatatatttatataaa

SEQ ID NO: 212649 - DNA, 80 bp, Artificial Sequence
  ENSG00000115919_69 (sequence is synthesized)
aaatataataaatatttgaagcaattgtattttttaaaaatttcttctaaagaaaaccaggatacatgtgcagaacctgc

SEQ ID NO: 212650 - DNA, 85 bp, Artificial Sequence
  ENSG00000115919_70 (sequence is synthesized)
gtgtgttgttcccctctctgtgtccatgtattctcgcctcccacttatgagtgagaacacgcgagatgatagcttccagcttcat

SEQ ID NO: 212651 - DNA, 75 bp, Artificial Sequence
  ENSG00000115919_71 (sequence is synthesized)
ctcattcctcaataccatccagtcatgcaaatttatatgaatgtcaattcttttatagtgatcttctggggctat

SEQ ID NO: 212652 - DNA, 120 bp, Artificial Sequence
  ENSG00000115919_72 (sequence is synthesized)
tatgaatgtcaattcttttatagtgatcttctggggctattacaatatatagggctgtttttttaaaactaattatatttatttcatgttgctttaacttattaaaaaacagactgaaga

SEQ ID NO: 212653 - DNA, 120 bp, Artificial Sequence
  ENSG00000115919_73 (sequence is synthesized)
aagactgggtgtgaagtcagtaaattaatttcaaattaaataaacttttctacagctattttatgctcaataactttctacttattcttgagttcaaaactatatgggttcacatttaaa

SEQ ID NO: 212654 - DNA, 120 bp, Artificial Sequence
  ENSG00000115919_74 (sequence is synthesized)
ttatatagtgtattttctccataaactgaagttgttagaacattgatttttttaagtaaatggatttttgcaccacttcaagaaagaaaccttcaaacagcctggaaatatcacatcaat

SEQ ID NO: 212655 - DNA, 120 bp, Artificial Sequence
  ENSG00000115919_75 (sequence is synthesized)
aaagcacaacctgggaatcaaagtattagggtaccttgttactgagattatggatgtgatgcttctgtgggccattagcatgtgcactgtgtgtatgatatgctctatgttctcttccca

SEQ ID NO: 212656 - DNA, 120 bp, Artificial Sequence
  ENSG00000115919_76 (sequence is synthesized)
ctaataattttatttttaatttcagcaagatttagtctcaaataacacaataataatggaggtcattgtgaagtagtggatgtaaatagatctgatgtggttttggtttattgcagtaat

SEQ ID NO: 212657 - DNA, 120 bp, Artificial Sequence
  ENSG00000115919_77 (sequence is synthesized)
tgttttgactaattctctagtttttcaacttttgattgtttaagatggttcttgagtccttttgacatgaccctatctatttttgataacttcatagcctttagtataaaaacaggtagg

SEQ ID NO: 212658 - DNA, 120 bp, Artificial Sequence
  ENSG00000115919_78 (sequence is synthesized)
cttatattacatatttccaacttcaaacttgttatttatttatctaagactatacagttcttttcagagaaaaaccttctttataaaccagaatcttaacaggaagagtgctcattttaa

SEQ ID NO: 212659 - DNA, 120 bp, Artificial Sequence
  ENSG00000115919_79 (sequence is synthesized)
tgctcattttaattgagctgatcatgtttctaggattttttagttaaaagaaaatacatattttaaaaatataaattatatttttatttcatagtggtattttcaattttgtctgggata

SEQ ID NO: 212660 - DNA, 120 bp, Artificial Sequence
  ENSG00000115919_80 (sequence is synthesized)
atttaacttgtttgattttgtagttttatctttgtgggaaggacctggtaagaggtaattgaatcatgggggcaggactttcccatgatgttctcatgataatgaataagtttcatgaga

SEQ ID NO: 212661 - DNA, 120 bp, Artificial Sequence
  ENSG00000115919_81 (sequence is synthesized)
tctgttggtttcataatgtggagtttccctgcaaaggctcttgtcctgtctgtgccatttgagacatgcctttcaacttctgccctgattgtgaggcctcccccgccatgtggaattggg

SEQ ID NO: 212662 - DNA, 120 bp, Artificial Sequence
  ENSG00000115919_82 (sequence is synthesized)
cagtctcaggtatgtctttatcagcagcctgaaaactgactaatatagtaagttggcaccagtagagaggggcactgctgaaaaggtacccgaatatgtggaagcaactttaaactgggt

SEQ ID NO: 212663 - DNA, 120 bp, Artificial Sequence
  ENSG00000115919_83 (sequence is synthesized)
cccgaatatgtggaagcaactttaaactgggtaacaggcagaggttggaatggtttggagggctcataagaagacaggaaagtgtgggaaatttggaactccctagagacttgttgaatg

SEQ ID NO: 212664 - DNA, 72 bp, Artificial Sequence
  ENSG00000115919_84 (sequence is synthesized)
aatgaagtccaggctgaggtggtctcagacaaagataacataaagcaaagagactggaggcattttgcccct

SEQ ID NO: 212665 - DNA, 120 bp, Artificial Sequence
  ENSG00000115919_85 (sequence is synthesized)
cattttgcccctgccctagagatttgtgggacattaaacttgagacagattatttagggtatctggaggaagaaatttttatgcagcaaagcattcaagaggtgacttggttgctattaa

SEQ ID NO: 212666 - DNA, 120 bp, Artificial Sequence
  ENSG00000115919_86 (sequence is synthesized)
gctattaaaggcattcagttttaaaagggaaatacagcataaaagttcagaaaattttcagcctgacaatgcagtagaaaaggaaaaccaattttctgaggagaaatttaagctggctgc

SEQ ID NO: 212667 - DNA, 80 bp, Artificial Sequence
  ENSG00000115919_87 (sequence is synthesized)
aggaaaaccaattttctgaggagaaatttaagctggctgcagacatttacataagtaacaagaagctgaatgttaatcac

SEQ ID NO: 212668 - DNA, 67 bp, Artificial Sequence
  ENSG00000115919_88 (sequence is synthesized)
ctttgtggcagcccctcccatcacagaccaggagctttagaaggaaaaatggcttcgtgggctggtc

SEQ ID NO: 212669 - DNA, 90 bp, Artificial Sequence
  ENSG00000115919_89 (sequence is synthesized)
tggcttcagagggtggaagccccaagtcttggcagcttccatatggtgttgagcctgggttttacaccaagatttcagaggatgtatgga

SEQ ID NO: 212670 - DNA, 77 bp, Artificial Sequence
  ENSG00000115919_90 (sequence is synthesized)
gcaaagtatggtgggagcccccatacagagtccctactgaggcaccacctagtggagctttgagaagagggccactg

SEQ ID NO: 212671 - DNA, 120 bp, Artificial Sequence
  ENSG00000115919_91 (sequence is synthesized)
tgaggcaccacctagtggagctttgagaagagggccactgtcctccagaactcaggatggtaaatccaccacgcacctggaaaagctgcagacaattccagcctgttaaagcagccagga

SEQ ID NO: 212672 - DNA, 120 bp, Artificial Sequence
  ENSG00000115919_92 (sequence is synthesized)
aaaagctgcagacaattccagcctgttaaagcagccaggagggggctataccctgcaaagccacaggggcggacctgctcaaggctgtgggagaccacctcttgcatcagtgtgacctgg

SEQ ID NO: 212673 - DNA, 76 bp, Artificial Sequence
  ENSG00000115919_93 (sequence is synthesized)
tttgactgccccactggatttcagactttcatggggcctgtagccccttcgttttggccaatgcctcccatttgga

SEQ ID NO: 212674 - DNA, 120 bp, Artificial Sequence
  ENSG00000115919_94 (sequence is synthesized)
actaacttgcttttgattttacaggcccataggtggaagggcgatgtttctttctggaggctccagggagaactctgttttcttaccttttctggattctagaggcttcccacaatcctt

SEQ ID NO: 212675 - DNA, 120 bp, Artificial Sequence
  ENSG00000115919_95 (sequence is synthesized)
gttttcttaccttttctggattctagaggcttcccacaatccttggcttaaggtccatctttaagctttgtctctgatgagactttggactgcggacttttgagttaatgctgaaatgag

SEQ ID NO: 212676 - DNA, 120 bp, Artificial Sequence
  ENSG00000115919_96 (sequence is synthesized)
ggccaggggcagaatgatatggtttgactttgtccgcagtcaaatctcatcttgaatttctatgtgtttggagaggtacccggtgggaggtaattgaatcatgagggcaggtcttttctg

SEQ ID NO: 212677 - DNA, 83 bp, Artificial Sequence
  ENSG00000115919_97 (sequence is synthesized)
tgaatttctatgtgtttggagaggtacccggtgggaggtaattgaatcatgagggcaggtcttttctgtgctgttctcatgat

SEQ ID NO: 212678 - DNA, 86 bp, Artificial Sequence
  ENSG00000115919_98 (sequence is synthesized)
ggggagtttccctgcccaagttcttctcttgtctgccatcatgtgcgatgtgcctttcacctctgccatgattatgaggcctccct

SEQ ID NO: 212679 - DNA, 120 bp, Artificial Sequence
  ENSG00000115919_99 (sequence is synthesized)
cagtgggaaaacggattaatatactaatttatagctagtaggtaaaaagccagggacttgccattagcgttggaagtggggttgtgggggcagtcttgtggaactgagcccttaacctgt

SEQ ID NO: 212680 - DNA, 120 bp, Artificial Sequence
  ENSG00000115919_100 (sequence is synthesized)
ggggttgaatgatatctccaggtatatcatgtcagaattgaattcaattagaggatacctagcttgcgttcaatgcagaattgcttgctggtgaggagaaatccctatacacattttggt

SEQ ID NO: 212681 - DNA, 120 bp, Artificial Sequence
  ENSG00000115919_101 (sequence is synthesized)
gaccagaggtaaagcattttatgttgattcttgagtgagagagtagaaataacactggttttttccctatgtccttacaaccaccaattggatacattgtttcagtattttgaaattttt

SEQ ID NO: 212682 - DNA, 120 bp, Artificial Sequence
  ENSG00000115919_102 (sequence is synthesized)
ttttcatttaatttttataaattttctttttaaattttagattctacaatatctccaattcttcagtttattccctcttactatgtataagtatttccccaagtttcactttatctttct

SEQ ID NO: 212683 - DNA, 120 bp, Artificial Sequence
  ENSG00000115919_103 (sequence is synthesized)
aatagagctataaaggcaattcacaattctctcttttctcatatataatatagagcatattataaatactctactttggaaaattattctttataggaaattacagataatatttgatga

SEQ ID NO: 212684 - DNA, 120 bp, Artificial Sequence
  ENSG00000115919_104 (sequence is synthesized)
aatatttgatgaagaaaatcgaatataatcatttttcaatacttaggataacagattcaggcaaagataaaacattaaaggaaaagttagtgaaaactattaatatatagtggaggcatc

SEQ ID NO: 212685 - DNA, 120 bp, Artificial Sequence
  ENSG00000115919_105 (sequence is synthesized)
acgttgttatgaacttcattgatcaatactgataccactaaaaatggaacaacatgtaattatgtgctcaatgtgatgaatatgaagtagactgcaccactctgcagtacagtcaggaaa

SEQ ID NO: 212686 - DNA, 120 bp, Artificial Sequence
  ENSG00000115919_106 (sequence is synthesized)
taagaaaccaagtccaatcaaaatagccctaaagctaccttccagtttataaaaagtatgaagaatagaggggcaattaaatgataccataaagagtcaaatacagggcatgcaacatag

SEQ ID NO: 212687 - DNA, 120 bp, Artificial Sequence
  ENSG00000115919_107 (sequence is synthesized)
ctgctgattggatttattcaacatgtcagtggcatgaatacaataggaggcaggtagggagaaggcactaccctgaattatgagactgaagagatataataaacaaatgcaatgtgtgga

SEQ ID NO: 212688 - DNA, 120 bp, Artificial Sequence
  ENSG00000115919_108 (sequence is synthesized)
cttggttgggatcttcattcaaagaccaactataaaaagacattgttgtgagaattgaggaaatttgaatgagaaatgtatttttatctaatttgttagctgtgataatagtattgtggg

SEQ ID NO: 212689 - DNA, 120 bp, Artificial Sequence
  ENSG00000115919_109 (sequence is synthesized)
agtaagaagctattcatatttctatatatatataccaagtacataggagtgaaataatacaaaatctggaatttgccttaaaattcctctgcaaaattataaaaaagaacgatgacaaac

SEQ ID NO: 212690 - DNA, 120 bp, Artificial Sequence
  ENSG00000115919_110 (sequence is synthesized)
taaaaaggtgtagtattcttctatggctgctataacaaatgaccaaaaaacatagtgactgaaaataacccacatttattatcttacagttccataggttagaagttcaacatgggtctc

SEQ ID NO: 212691 - DNA, 120 bp, Artificial Sequence
  ENSG00000115919_111 (sequence is synthesized)
atgagatcaaaagcaaggccttggcagggtgacgtttctttctggaggttccagggggaactctgttttcttactttttttagattctagaggcttcccacaatccttggcttaaggtcc

SEQ ID NO: 212692 - DNA, 120 bp, Artificial Sequence
  ENSG00000115919_112 (sequence is synthesized)
atctttaaagacagcaacgtttcatctctctacctattctttcatccttacatctttctctaactattccttttcttctgtcttccacttttaagagcctttttgagtctattgaggcca

SEQ ID NO: 212693 - DNA, 120 bp, Artificial Sequence
  ENSG00000115919_113 (sequence is synthesized)
actggacaatcaaggattatctccctatgttaaggtcaattgattagtgacctaattccatctacaatcacaattcctctttgccatataatgtaaaatattcatacctctaaggattag

SEQ ID NO: 212694 - DNA, 76 bp, Artificial Sequence
  ENSG00000115919_114 (sequence is synthesized)
ttgccatataatgtaaaatattcatacctctaaggattaggacatggacatctttgagggtcattagtcatcttac

SEQ ID NO: 212695 - DNA, 120 bp, Artificial Sequence
  ENSG00000115919_115 (sequence is synthesized)
ggaagaagaaaaaaatagtatgaaaaaatcttgataaatttgaaaactgggtgaataatatgtggaattctctctatttttgttaatgttggaaaatttaataaaaacaatgaacagtga

SEQ ID NO: 212696 - DNA, 120 bp, Artificial Sequence
  ENSG00000115919_116 (sequence is synthesized)
acattttcaaggaattcttgagaggttcttggagagattctgggagccaaacactccattgggatcctagctggaatataaagaatggcttatcagtggagaccatcgacagttgagaaa

SEQ ID NO: 212697 - DNA, 120 bp, Artificial Sequence
  ENSG00000115919_117 (sequence is synthesized)
attgttttattagcttctacttctttgtgtgccatatgatgctttgtttgggtgcaaacgtctcacatctcttagactcaatcataagctgtttaaattattaaaaaataataatcacaa

SEQ ID NO: 212698 - DNA, 120 bp, Artificial Sequence
  ENSG00000115919_118 (sequence is synthesized)
aaggacaagagctttagagagaccaaagagtttttcactgttaaagtgtccagtatgtagccgagaaccatatggagaacatcaaatacagtggaacaaatgtaactgctattgatgtca

SEQ ID NO: 212699 - DNA, 120 bp, Artificial Sequence
  ENSG00000115919_119 (sequence is synthesized)
cactttgtgaagtagtctttgttgcttaaaaagggtgacatctagtggctaaacatgttatttcaaataaataatatcgaaataacatttcttctcatggtccactcattcactctttaa

SEQ ID NO: 212700 - DNA, 120 bp, Artificial Sequence
  ENSG00000115919_120 (sequence is synthesized)
caagtattttgaagtatatatgtttgaattatgtgttcttctttttgacaatttgactatatgttgatagtgcaataattgtgcagtttaagccttcaataaagaggtagaatgtgatga

SEQ ID NO: 212701 - DNA, 120 bp, Artificial Sequence
  ENSG00000115919_121 (sequence is synthesized)
aaattggaaggaaacctgagggggcattcttagtgcttggttaaacagaaagcttaacagttcatgaaggctggtctaagaaaggaattataagcatgggtgacccacctggtgtagaga

SEQ ID NO: 212702 - DNA, 120 bp, Artificial Sequence
  ENSG00000115919_122 (sequence is synthesized)
gtgtatccccagatatataacattgcattttagaagtctaatatttggtatataatttttgaaatagtcctttatgtgatgtttccattagcaaacagcaaattgcatctgtaccaagag

SEQ ID NO: 212703 - DNA, 120 bp, Artificial Sequence
  ENSG00000115919_123 (sequence is synthesized)
atttcacttccttttttgtttaaatatgcattttggacattgttcaaaacctatgacctaaggcttttccaagagccctttgcccataaagagaatgaataaattagaggccagagtcaa

SEQ ID NO: 212704 - DNA, 120 bp, Artificial Sequence
  ENSG00000115919_124 (sequence is synthesized)
aagctggacaagcgaaggtggcaacactgggtagcagctctgtcccttagatggggcttaagctcttcgacacaacatccatgtttacccactgagcccaccattgaagccaagtcatcg

SEQ ID NO: 212705 - DNA, 83 bp, Artificial Sequence
  ENSG00000115919_125 (sequence is synthesized)
atgtttacccactgagcccaccattgaagccaagtcatcgctggtgaatatatctatatgaataccacagcttatgatattct

SEQ ID NO: 212706 - DNA, 120 bp, Artificial Sequence
  ENSG00000115919_126 (sequence is synthesized)
agaggttcttggagagattctgggagccaaacactccattgggatcctagctgcttaagtgtaggactgaaaaaagaagccaaagaaaaagggaatgagctgaagaaatacacacacgta

SEQ ID NO: 212707 - DNA, 120 bp, Artificial Sequence
  ENSG00000115919_127 (sequence is synthesized)
cacacacacatcaggaagcaacaggcaaggaaaaataaagtgagaggttcaaggcttcgaggaggaattgagctctgtgcattccattcatgggctttgccaaagaccagcacaatggac

SEQ ID NO: 212708 - DNA, 120 bp, Artificial Sequence
  ENSG00000115919_128 (sequence is synthesized)
aggacattgtaggtctaattgccttgaagaaacatcataaggactcaaaacatggaaggagccaatgagaaagaaatagccctaatgaatgctttgactgtaaatttacatcttctaatg

SEQ ID NO: 212709 - DNA, 120 bp, Artificial Sequence
  ENSG00000115919_129 (sequence is synthesized)
acgcagacacctctgaggttcccaagaaaacttcagtggagttctctaaactgaaaccttgagagaggaagattttcaagtaggaaccagacaaattcacttaaaactcaccactacaca

SEQ ID NO: 212710 - DNA, 120 bp, Artificial Sequence
  ENSG00000115919_130 (sequence is synthesized)
cctgtgtcatagaagcattccattttttctattgcagatgggatttcctcttcaagcttactgtactgtgtctttttaaaaaatagttgaagacatcggaataaaagctaatgtcccaaa

SEQ ID NO: 212711 - DNA, 120 bp, Artificial Sequence
  ENSG00000115919_131 (sequence is synthesized)
gtatatgagaaagaaagaaatatttgtcatgctttgtttagtattgatttttttcttcattttcctcaaaagtttattaaaatcttcattactttaatggaactttcaagaaagcatgaa

SEQ ID NO: 212712 - DNA, 120 bp, Artificial Sequence
  ENSG00000115919_132 (sequence is synthesized)
ggacctatacttctgttactattagatcattttgcttaaaatagagaataactcagatgtgtatttattttcatttttcaagggctagccatatggcaagcaaactatttttctgttaat

SEQ ID NO: 212713 - DNA, 120 bp, Artificial Sequence
  ENSG00000115919_133 (sequence is synthesized)
accactggattctgccatattcttcaatgggatgggaaaagggtgacaaatttagtatatcattttcaattccaaatgtcatgcccatgggtgccattaaaatcatgctaaagaccagaa

SEQ ID NO: 212714 - DNA, 120 bp, Artificial Sequence
  ENSG00000115935_0 (sequence is synthesized)
gagcgcttttcctgcccgcccggctcagccctgcggaccccgggagaagtttcccagaaaaaatgcccagcgcggcgcggggctgcggagtcgtccggagccgctgcgcgatttatcagc

SEQ ID NO: 212715 - DNA, 120 bp, Artificial Sequence
  ENSG00000115935_1 (sequence is synthesized)
aagactgttgaacgcataactgcccaagatgcctgtccctccccctccagcacccccgccgcccccgacgtttgcactggccaatacagagaagcctaccttgaataagacagagcaggc

SEQ ID NO: 212716 - DNA, 120 bp, Artificial Sequence
  ENSG00000115935_2 (sequence is synthesized)
tgggagaaatgctctcctttctgatatcagcaaagggaagaaactaaagaagacggtcaccaatgacagaagtgcaccaatactggacaaacctaaaggagctggtgctggaggcggtgg

SEQ ID NO: 212717 - DNA, 120 bp, Artificial Sequence
  ENSG00000115935_3 (sequence is synthesized)
tggtggctttggtggaggcggcggatttggcggaggaggtggtggcggaggcggtggaagttttggagggggcggacctccaggtctgggaggattgttccaggctggaatgccgaagct

SEQ ID NO: 212718 - DNA, 120 bp, Artificial Sequence
  ENSG00000115935_4 (sequence is synthesized)
gagatccacggccaacagggataatgattctggaggaagccgaccaccattgttgccaccgggaggaagatccacatctgcgaaacccttttcacccccaagtggcccagggaggtttcc

SEQ ID NO: 212719 - DNA, 120 bp, Artificial Sequence
  ENSG00000115935_5 (sequence is synthesized)
tgtgccttctccaggccacagaagtggtcccccagagcctcagaggaaccgaatgccgcccccaaggcccgacgtgggctcaaagcctgatagcattcctcctccagtacctagtactcc

SEQ ID NO: 212720 - DNA, 120 bp, Artificial Sequence
  ENSG00000115935_6 (sequence is synthesized)
aagacccattcaatcaagtccgcacaaccgggggtccccaccagtgcccggaggccccaggcagcccagccccgggcccactcctccccctttccctggaaaccgcggcactgctttggg

SEQ ID NO: 212721 - DNA, 120 bp, Artificial Sequence
  ENSG00000115935_7 (sequence is synthesized)
aggaggctcaatacgtcagtcccccttgagctcctcctcgcccttctccaaccggcctcccctgccgcctacccccagcagggccttggatgacaaaccccctccaccacctcctccagt

SEQ ID NO: 212722 - DNA, 120 bp, Artificial Sequence
  ENSG00000115935_8 (sequence is synthesized)
ggccttcggcctcctcacaggccccacctccgccgccacctcccagcaggcccgggccgcctcctctgcctccaagttccagcggcaatgacgaaaccccaagactcccacagcggaatc

SEQ ID NO: 212723 - DNA, 120 bp, Artificial Sequence
  ENSG00000115935_9 (sequence is synthesized)
tgtccctcagttcgtccacgcccccgttaccttcgccaggacgttcaggtcctcttcctcccccgcccagtgagagacccccacctccagtgagggacccgccaggccgatcaggccccc

SEQ ID NO: 212724 - DNA, 120 bp, Artificial Sequence
  ENSG00000115935_10 (sequence is synthesized)
tcccaccacctcctccagtaagcagaaacggcagcacatctcgggccctgcctgctacccctcagttgccatccaggagtggagtagacagtcccaggagtggacccaggcctccccttc

SEQ ID NO: 212725 - DNA, 120 bp, Artificial Sequence
  ENSG00000115935_11 (sequence is synthesized)
ctcctgataggcccagtgctggggcacctcccccacctccaccatcaacatctattagaaatggcttccaagactctccatgtgaagatgagtgggaaagcagattctacttccatccga

SEQ ID NO: 212726 - DNA, 120 bp, Artificial Sequence
  ENSG00000115935_12 (sequence is synthesized)
tttccgatttgccacctccagagccatatgtacaaacgaccaaaagttatcccagcaaactggcaagaaacgaaagccggagtggatccaaccgaagagaaaggggtgctccaccactcc

SEQ ID NO: 212727 - DNA, 120 bp, Artificial Sequence
  ENSG00000115935_13 (sequence is synthesized)
ctcccatcccgaggtgatctttgcctgctcttctctacccaagctcaagagctgcttctgttgctatctaagaactgcataccctcctccctgcttcttcccttgtgcctcatgtatggg

SEQ ID NO: 212728 - DNA, 120 bp, Artificial Sequence
  ENSG00000115935_14 (sequence is synthesized)
caggaggaaaggtgggagggggagtgggaatatgcgtgtgtgggtgggaatcggtaagaaatgcacctagcttttcatattgtgtttattctccaggctattgcttgcttcagctgcagc

SEQ ID NO: 212729 - DNA, 120 bp, Artificial Sequence
  ENSG00000115935_15 (sequence is synthesized)
ctgcctgtgctggctgctggggtcgataggcttttgtcgtaataggcagagatgacttgcatcccagctttccaccaaccaaattcaaacattcactgcttatttgttacagactgtaat

SEQ ID NO: 212730 - DNA, 120 bp, Artificial Sequence
  ENSG00000115935_16 (sequence is synthesized)
gaagaagcccttagcctaatgaagcgataaggtaagcaaaggaggaaggaacaacaaacaacaaattaatcagacaggaagcgaataaccacagaaggacgtctgcctctgactcagtat

SEQ ID NO: 212731 - DNA, 120 bp, Artificial Sequence
  ENSG00000115935_17 (sequence is synthesized)
gtcacatttaacaagaggccagagcttgtccaaaatggctgtccaaaaacgaccccacacttgcgttagaagatgatacctttttcagggacagttttctctcttggctcctgtcccgct

SEQ ID NO: 212732 - DNA, 120 bp, Artificial Sequence
  ENSG00000115935_18 (sequence is synthesized)
aagcaagctgctgagtaagggctcactggaaacttgcagtcacaggatgtccaatctttggcagtccgagcttggctctaggacagagctgtccaatagaaatataatgtgagccccata

SEQ ID NO: 212733 - DNA, 120 bp, Artificial Sequence
  ENSG00000115935_19 (sequence is synthesized)
gtgagccccatatacaatttttacatttctaatatattttaaacaagtgaagttaatatgcatccaaaatatttcaacctgtaatcaacataaaattttaatgagatattttatattatt

SEQ ID NO: 212734 - DNA, 120 bp, Artificial Sequence
  ENSG00000115935_20 (sequence is synthesized)
acttaccgcacatctccattcagactagtcacatttttaagtgctcagtagccacatgtggctggtggctactggattagacagcacgagtctggaagatggaagctagtgcagaaacct

SEQ ID NO: 212735 - DNA, 120 bp, Artificial Sequence
  ENSG00000115935_21 (sequence is synthesized)
cttgtttaaaaaacaaaaaaggcaagatgggcttgagcgattcaagaggcaactaaaaataaaattaggacccagcaccttgtttgacacacagtttgaccttcgattttcctcccttaa

SEQ ID NO: 212736 - DNA, 120 bp, Artificial Sequence
  ENSG00000115935_22 (sequence is synthesized)
cttccctcttcccttaatatctgtatacaagtgttgcttcaaagtaccaaggtcagaaattgattgagtacggtttactaaagtcatgtggaataaagccattggaaacaaatggaaagc

SEQ ID NO: 212737 - DNA, 120 bp, Artificial Sequence
  ENSG00000115935_23 (sequence is synthesized)
ctgtcgggacttctgggctcagaaccagctggctcacgcactccacttgtcagctggacttctgccttgtgaaatggaagcagcctttgttcctttctggctgagcaagctcctgaggct

SEQ ID NO: 212738 - DNA, 120 bp, Artificial Sequence
  ENSG00000115935_24 (sequence is synthesized)
gggagagactaggaaggcttggtaggaggggaaaaaagtcaggaaaatatatcaaatcagaaacatggaagaagaagggaaccgatttgagttggtgggcaaaactctaaaaatctaaat

SEQ ID NO: 212739 - DNA, 120 bp, Artificial Sequence
  ENSG00000115935_25 (sequence is synthesized)
ctgatgcttatgtaagggttgagcgaattagggagattgctagtggaaattggagggaatttgttttgcatcatttgtctaggatctatgcaaatatagctccactaaaggaccataggg

SEQ ID NO: 212740 - DNA, 120 bp, Artificial Sequence
  ENSG00000115935_26 (sequence is synthesized)
aagagccagccttgccttttcttatatgattttgtttacaaaattttactgggacttttaaatctagctatagagttgggaaaaaatatttccacttagatattttacatggttttgttt

SEQ ID NO: 212741 - DNA, 120 bp, Artificial Sequence
  ENSG00000115935_27 (sequence is synthesized)
aaaattaccattacttgttttttaaaaacacatgaccacatatgtatatgtatatctacctaaacattgtatcatggtttcagtatgttattcatgtattactgggagatgctaccaaga

SEQ ID NO: 212742 - DNA, 120 bp, Artificial Sequence
  ENSG00000115935_28 (sequence is synthesized)
aaccaacccaaagaaaattctgaaaaatacatttctatttatagaataaatgtttcatttatataaaagcaaaagaacttagagttctaataaatgggatgtctaataaattatgaagtt

SEQ ID NO: 212743 - DNA, 120 bp, Artificial Sequence
  ENSG00000115935_29 (sequence is synthesized)
actgatttgaatatattatatttctataacttccttgccaaagtcctgatttagtacattagagaacctgtgtttcctctctcctctaccattcatctctcttccatacagtcatttggg

SEQ ID NO: 212744 - DNA, 120 bp, Artificial Sequence
  ENSG00000115935_30 (sequence is synthesized)
ctttttactcaaagagaatcaagaaataataaggtataacaagcttggcaaagtgttggctttttaaaaaaaaatttttttaatctctagcagtttggtaatttagcagcatcatttatt

SEQ ID NO: 212745 - DNA, 120 bp, Artificial Sequence
  ENSG00000115935_31 (sequence is synthesized)
tgggattcttttatctgatttcaacagtgaaaaacatccctatgataaagcctaatgacccatttcacaaaagatggaatttgcccttcctagaaaatatgacggagaaaagtctgactc

SEQ ID NO: 212746 - DNA, 120 bp, Artificial Sequence
  ENSG00000115935_32 (sequence is synthesized)
agagaaagtgggtctgaattttataaggggtagtaagaattggacaattcctttgcatatctgaacttggcaggtaccgttctaaatctgaaacagggtgatagctcaaagttgccattc

SEQ ID NO: 212747 - DNA, 120 bp, Artificial Sequence
  ENSG00000115935_33 (sequence is synthesized)
atccagaatagattgttttagaatgtagtgtttaagtgactgtttcattaatacacctacaccctttctttgaaagtttgcaacctaattgcatctaaaactatgaataagttctgtggt

SEQ ID NO: 212748 - DNA, 120 bp, Artificial Sequence
  ENSG00000115935_34 (sequence is synthesized)
aaaatcttaaactatggaaaattacaaaaatgaatttttcttccctgaaatcagagcttacatgtgtgtttttttataacattttcagataaatgtattcaacatgtaatacagtatttt

SEQ ID NO: 212749 - DNA, 120 bp, Artificial Sequence
  ENSG00000115935_35 (sequence is synthesized)
aacattcacctcttattttatattgaaatgtattacagtattaaaactcagtgttcagtatttatttcactatgcattttatttagtaaaagccaggagaaatgtttaatccaatggtgc

SEQ ID NO: 212750 - DNA, 120 bp, Artificial Sequence
  ENSG00000115935_36 (sequence is synthesized)
cttactttgtgatttaaaagaaatcaacttttttttatgtctaagtagtagattatttgcatatttgtaaaaactgttaggtctttatattttaaagtgtaataccagttttgttatttt

SEQ ID NO: 212751 - DNA, 120 bp, Artificial Sequence
  ENSG00000115935_37 (sequence is synthesized)
agtagcagaaatgggatgattgttaaagttccccaaaaatgttggcatgaaattaatttttccctccttatagtcaaggaccgtagaggaagaaaaacttttttttcataccatgcacta

SEQ ID NO: 212752 - DNA, 120 bp, Artificial Sequence
  ENSG00000115935_38 (sequence is synthesized)
tgtaaacagacacattttgctatctgtgtcatcaggatagtgtaagtggtagggtagagactaccctagacatctgcatctttgtaagttagccagacaataaagaaaagcagaatgata

SEQ ID NO: 212753 - DNA, 120 bp, Artificial Sequence
  ENSG00000115935_39 (sequence is synthesized)
aaagtccaggcttcttgcctggagtggggtagagaaccctttggagccatctacattctagtaaattccccttccacaggcagtgaggaaattgcagatgcccagaatgcatatgagaaa

SEQ ID NO: 212754 - DNA, 120 bp, Artificial Sequence
  ENSG00000115935_40 (sequence is synthesized)
cagttattttaatgtgtcattacaagctcaaaataccgtggtttgctagtattaaattttattattttacttctttggacgtcttcctctgttttcatcttcctgagacagcacaagtag

SEQ ID NO: 212755 - DNA, 120 bp, Artificial Sequence
  ENSG00000115935_41 (sequence is synthesized)
agccatcttctattccttctagttttgaaattggcataatgtctgattaattataacaaaaactccctttaactgccttgatcttttaaacgtattgtaatcatagctttacagagcatt

SEQ ID NO: 212756 - DNA, 120 bp, Artificial Sequence
  ENSG00000115935_42 (sequence is synthesized)
acatgaaaatgtaaatatatccataatctctccacataatagatattttcattttaccagattctcatccaattttttatccatataattctgtttttttatgtagttataatgacgatg

SEQ ID NO: 212757 - DNA, 120 bp, Artificial Sequence
  ENSG00000115935_43 (sequence is synthesized)
tacagttttttggcggggtttacataacattgcttagtaaatagtgcccatgttatcacatggtttttatttcagcatatagtaatttaccattaccatggacatttaaattatttctgt

SEQ ID NO: 212758 - DNA, 120 bp, Artificial Sequence
  ENSG00000115935_44 (sequence is synthesized)
tgttctgctaatgtaggtaatgctaccataaagaactaaattgcttttcctccattgaagaagaatgtcaacaagaaaggaaaaatagacaaactggaattttataacagtaaatgtata

SEQ ID NO: 212759 - DNA, 120 bp, Artificial Sequence
  ENSG00000115935_45 (sequence is synthesized)
tataggaagtgttacagctctttgagaatttgtctagcaggctttccagggttttgctggaaagcctctgaaatttacttttaaaaaaacacaatagctgggcatggtggctcacgcctg

SEQ ID NO: 212760 - DNA, 120 bp, Artificial Sequence
  ENSG00000115935_46 (sequence is synthesized)
gcactttgggaggccaaggtgagaggatggcttgagtccaggagttcaagaacagcctgagcagcatggcaaaaccccatctctacacaaaatacaaaaattagctggacgtcgtggtgc

SEQ ID NO: 212761 - DNA, 75 bp, Artificial Sequence
  ENSG00000115935_47 (sequence is synthesized)
ttagctggacgtatcactcaagcctagggaagtggaactgtgattacaccactgcactccatcctgggcaacaga

SEQ ID NO: 212762 - DNA, 120 bp, Artificial Sequence
  ENSG00000115935_48 (sequence is synthesized)
aagaggcatctgttcccagcttatacaacatccagtaccagttccacagccaacaatggatagatttggtcgtccttgaagcatttagagacctgtagaatgaacttaacttctgaaaac

SEQ ID NO: 212763 - DNA, 120 bp, Artificial Sequence
  ENSG00000115935_49 (sequence is synthesized)
tgggtgcggggccaatagaggggctgctcaatacctcaccagcctgctacgcggaaggctagatggagggctgctaaaggaagagaactgctgttccacctccgcctcctccctgcagtg

SEQ ID NO: 212764 - DNA, 120 bp, Artificial Sequence
  ENSG00000115935_50 (sequence is synthesized)
caggaaggagaaccctgagttcttctgggttggatctaagcatgtaagactattgagttacatttgacttctgaagtcactttttgtctttactttttagtcagcttgtgaaagcaaaaa

SEQ ID NO: 212765 - DNA, 120 bp, Artificial Sequence
  ENSG00000115935_51 (sequence is synthesized)
gcatcttatttttaaaatacctatgttagtaccctggaataacactggcatttcctagcccaaactgagactaaaagttttgaattaatctttccctcaacttacaagaaaacagttatc

SEQ ID NO: 212766 - DNA, 120 bp, Artificial Sequence
  ENSG00000115935_52 (sequence is synthesized)
ggagtctctggcataattggtctggggtgcagactgggaatcaggatatttaaaagctccctggtgattatagtgtgcagcagaatgtgagaaccacaccttgaaaccattgtgccatgg

SEQ ID NO: 212767 - DNA, 120 bp, Artificial Sequence
  ENSG00000115935_53 (sequence is synthesized)
ccctaccaaatggatgagtcagcagattaaatcttccccaaaatatgacaggcattgacatataacatttattatttcttttgattactttttcctggcagcagtgctgtgagacaggtg

SEQ ID NO: 212768 - DNA, 120 bp, Artificial Sequence
  ENSG00000115935_54 (sequence is synthesized)
accatctggcactcttttacagctaggaaaccaagttccatagggtaccagcttgctcagggtcaagattcacattagcatttatagccatggatgttgattagctgtttgtcactccct

SEQ ID NO: 212769 - DNA, 120 bp, Artificial Sequence
  ENSG00000115935_55 (sequence is synthesized)
taatcaaccctaccctcaccactcaatttttattttattttattttttggttaacaacagctgcaaagctagcaaaataagggactgtatcactccctgtaggccgcagctttggcttgg

SEQ ID NO: 212770 - DNA, 120 bp, Artificial Sequence
  ENSG00000115935_56 (sequence is synthesized)
ggctagaagacagcaggggaactcgagaagttggttgttttcagcagattaaaacaatacagtcagaaggttggtgctgtttaaaggggaaaaaaaagctctaagtgtccccttctccca

SEQ ID NO: 212771 - DNA, 120 bp, Artificial Sequence
  ENSG00000115935_57 (sequence is synthesized)
aaaaaaggaaccagaaaatgacaagaagagttgcatttgtctatgaaagtgcatagaaagcttttcctggaaaagaataaactgggaaaagatgagtccttgaagtagaaccctgtcata

SEQ ID NO: 212772 - DNA, 120 bp, Artificial Sequence
  ENSG00000115935_58 (sequence is synthesized)
tgaggtagcccagctgtctagtagagtaaatacttgtgagccgcttttcaaacacgatggagcacatcttgtggaatatgattacaaatctcactaaatctgaaaaagtgttttgcatga

SEQ ID NO: 212773 - DNA, 120 bp, Artificial Sequence
  ENSG00000115935_59 (sequence is synthesized)
tccaaaacccagcctgcccaaatgtaccaataatcctgtcagtcaagatagtctaacaaaagcaggcataagtaaactcagactgctttgtgcttttaagtggcacacgacacgtgtgat

SEQ ID NO: 212774 - DNA, 120 bp, Artificial Sequence
  ENSG00000115935_60 (sequence is synthesized)
cgtgacctcgtgtaaaccccgggggaaagtgggaccaatatttctgttggtgttttagagatgaggacactgagtagctaataaagttaaatggtcacgagctagttaataaagaagagg

SEQ ID NO: 212775 - DNA, 120 bp, Artificial Sequence
  ENSG00000115935_61 (sequence is synthesized)
caagaactttcatcttccatctctgaagtgtacttgccagtccactaccctgcctccctagagagaatttcggcggtcttaattgggaaaataagtccccacctcccgcaggagggctct

SEQ ID NO: 212776 - DNA, 120 bp, Artificial Sequence
  ENSG00000115935_62 (sequence is synthesized)
gttattccaacaagaggggaagttcttcaagagctaatgaacttctcctgtacttctctcttcattcgccaggctttgaggccatttccctattcattaaagactaatgtttaaaaagtc

SEQ ID NO: 212777 - DNA, 120 bp, Artificial Sequence
  ENSG00000115935_63 (sequence is synthesized)
accccgggagaagtttcccagaaaaaatgcccagcgcggcgcggggctgcggagtcgtccggagccgctgcgcgtgttttcaaagttaggaagattcacaaaaggaagtcctgttttaaa

SEQ ID NO: 212778 - DNA, 120 bp, Artificial Sequence
  ENSG00000115935_64 (sequence is synthesized)
aagaatgtatcagagttttaccctctatgggctgggtcccttgaatgagggtgaattgtccagatcagtgtcccctgaaagataagtgcgtacattctgccaaacgtccaggatagaaac

SEQ ID NO: 212779 - DNA, 120 bp, Artificial Sequence
  ENSG00000115935_65 (sequence is synthesized)
gaacgccacagaccaggcaggcaaatggatgtccctgactagcgggagctgcgctgaatcagggagaagacagaagttcccaagcaagactgaggctgaagttccgacacagcatggtca

SEQ ID NO: 212780 - DNA, 120 bp, Artificial Sequence
  ENSG00000115935_66 (sequence is synthesized)
aaggagttcctcgagatgatgtgtccttatgcagaacccagaggtccatgggggctgaatgagtttatggaatgaagccctgttgtatagctctaagcaggcagtgttgcggagacttca

SEQ ID NO: 212781 - DNA, 120 bp, Artificial Sequence
  ENSG00000115935_67 (sequence is synthesized)
gtacaatgcgacaggaggtctgatgagaaaaggaaaatctctagaccctgagtccccatatgggacccaatcctaagggaccctgaactctccaccacttgaaaataacaggtgggttac

SEQ ID NO: 212782 - DNA, 120 bp, Artificial Sequence
  ENSG00000115935_68 (sequence is synthesized)
gcagattaaaacaatacagggaagggattgcctatgtgcctgattgattttttactctgccatttcaatttccctctatttcgtcatcagtcagaaggttggtgctgtttaaaggggaaa

SEQ ID NO: 212783 - DNA, 120 bp, Artificial Sequence
  ENSG00000115942_0 (sequence is synthesized)
atcccccagctggcctccggtgctccttacctccccggtggtcgggcgcgaattactggaaattggcttttcccgttggggccgaaggtaccttccctgcggcggcgactcagcggggtg

SEQ ID NO: 212784 - DNA, 120 bp, Artificial Sequence
  ENSG00000115942_1 (sequence is synthesized)
tcgttcggccggcgtgacgcagccggatcggcgccagacggaaacctagcggtgactgtatctgaattttgcagctgcagaatgtgtagtaccttaaaaggttggcaacaatgagtaaac

SEQ ID NO: 212785 - DNA, 120 bp, Artificial Sequence
  ENSG00000115942_2 (sequence is synthesized)
cagaattaaaggaagacaagatgctggaggttcactttgtgggagatgatgatgttcttaatcacattctagatagagaaggaggagctaaattgaagaaggagcgagcgcagcttttgg

SEQ ID NO: 212786 - DNA, 120 bp, Artificial Sequence
  ENSG00000115942_3 (sequence is synthesized)
tcaaccccaaaaaaataataaagaagccagaatatgatttggaggaagatgaccaggaggtcttaaaagatcagaactatgtggaaattatgggaagagatgttcaagaatcattgaaaa

SEQ ID NO: 212787 - DNA, 120 bp, Artificial Sequence
  ENSG00000115942_4 (sequence is synthesized)
atggctctgctacaggtggtggaaataaagtttattcttttcagaatagaaaacactctgaaaagatggctaaattagcttcagaactagcaaaaacaccacaaaaaagtgtttcattca

SEQ ID NO: 212788 - DNA, 120 bp, Artificial Sequence
  ENSG00000115942_5 (sequence is synthesized)
gtttgaagaatgatcctgagattacgataaacgttcctcaaagtagcaagggccattctgcttcagacaaggttcaaccgaagaacaatgacaaaagtgaatttctgtcaacagcacctc

SEQ ID NO: 212789 - DNA, 120 bp, Artificial Sequence
  ENSG00000115942_6 (sequence is synthesized)
gtagtctaagaaaaagattaatagttccaaggtctcattctgacagtgaaagcgaatattctgcttccaactcagaggatgatgaaggggttgcacaggaacatgaagaggacactaatg

SEQ ID NO: 212790 - DNA, 120 bp, Artificial Sequence
  ENSG00000115942_7 (sequence is synthesized)
cagtcatattcagccaaaagattcaagctcagaatagagtagtttcagctcctgttggcaaagaaacaccttctaagagaatgaaaagagataaaacaagtgacttagtagaagaatatt

SEQ ID NO: 212791 - DNA, 120 bp, Artificial Sequence
  ENSG00000115942_8 (sequence is synthesized)
ttgaagctcacagcagttcaaaagttttaacctctgatagaacactgcagaagctaaagagagctaaactggatcagcaaactttgcgtaacttattgagcaaggtttccccttcctttt

SEQ ID NO: 212792 - DNA, 120 bp, Artificial Sequence
  ENSG00000115942_9 (sequence is synthesized)
ctgccgaacttaaacaactaaatcaacagtatgaaaaattatttcataaatggatgctgcaattacaccttgggttcaacattgtgctttatggtttgggttctaagagagatttactag

SEQ ID NO: 212793 - DNA, 120 bp, Artificial Sequence
  ENSG00000115942_10 (sequence is synthesized)
aaaggtttcgaaccactatgctgcaagattccattcacgttgtcatcaatggcttctttcctggaatcagtgtgaaatcagtcctgaattctataacagaagaagtcctcgatcatatgg

SEQ ID NO: 212794 - DNA, 120 bp, Artificial Sequence
  ENSG00000115942_11 (sequence is synthesized)
gtactttccgcagtatactggatcagctagactggatagtaaacaaatttaaagaagattcttctttagaactcttccttctcatccacaatttggatagccagatgttgagaggagaga

SEQ ID NO: 212795 - DNA, 120 bp, Artificial Sequence
  ENSG00000115942_12 (sequence is synthesized)
agagccagcaaatcattggtcagttgtcatctttgcataacatttaccttatagcatccattgaccacctcaatgctcctctcatgtgggatcatgcaaagcagagtctttttaactggc

SEQ ID NO: 212796 - DNA, 120 bp, Artificial Sequence
  ENSG00000115942_13 (sequence is synthesized)
tctggtatgaaactactacatacagtccttatactgaagaaacctcctatgagaactctcttctggtaaagcagtctggatccctgccacttagctcccttactcatgtcttacgaagcc

SEQ ID NO: 212797 - DNA, 120 bp, Artificial Sequence
  ENSG00000115942_14 (sequence is synthesized)
ttacccctaatgcaaggggaattttcaggctactaataaaataccagctggacaaccaggataacccttcttacattggcctttcttttcaagatttttaccagcagtgtcgggaggcat

SEQ ID NO: 212798 - DNA, 120 bp, Artificial Sequence
  ENSG00000115942_15 (sequence is synthesized)
tcctcgtcaatagtgatctgacactccgggcccagttaactgaatttagggaccacaagcttataagaacaaagaagggaactgatggagtagagtatttattaattcctgttgataatg

SEQ ID NO: 212799 - DNA, 120 bp, Artificial Sequence
  ENSG00000115942_16 (sequence is synthesized)
gaacattgactgatttcttggaaaaggaagaagaggaggcttgaagctttcctttattcttgaatctcccatggaagggttgtaccccagctgccactcctctagttgaaagtgttgtgt

SEQ ID NO: 212800 - DNA, 120 bp, Artificial Sequence
  ENSG00000115942_17 (sequence is synthesized)
ctggctggtaccgtctagtactatgcagcggtcctcaagttggagaaaatgtgcctttcattcattacctctctggagacttcttgctggaatgaacagtgtgctcagggactatttgga

SEQ ID NO: 212801 - DNA, 120 bp, Artificial Sequence
  ENSG00000115942_18 (sequence is synthesized)
actggatgtttttgaattattttatacttagagatattctgaattttttgagggccttttaacactccccgagctgattgtttgcaagtgtgtttgttccagagtgtggaagtataaaga

SEQ ID NO: 212802 - DNA, 120 bp, Artificial Sequence
  ENSG00000115942_19 (sequence is synthesized)
catgggcatcacgtaaattggttttgtttgctattctgtgtgtcagaaccaacgagtgtaatggagagggcaggtcatctcttattgtttctaaaacaacttaaaaggtgtagattggga

SEQ ID NO: 212803 - DNA, 120 bp, Artificial Sequence
  ENSG00000115942_20 (sequence is synthesized)
agaggtgagtgatccagctttctccttttggattgaggctatgtacttggtgggggcaggggagggaatatattataatactattcagttgggataatgggaaaaacagagtatataggg

SEQ ID NO: 212804 - DNA, 120 bp, Artificial Sequence
  ENSG00000115942_21 (sequence is synthesized)
tatctacccagcctagaaagcacaggaacaatacgtcatatatttggaacagttattgtctgtgccatgaccttcatgataccagtgagaagccaggctagagaaataaaatcctgaatt

SEQ ID NO: 212805 - DNA, 120 bp, Artificial Sequence
  ENSG00000115942_22 (sequence is synthesized)
acattttagtaattgttttcaagacaacaaaaaataaaacatttcattattcttgtatattgacatatttttcttttcttgaacaacatgcaggtgagtagcatattaatggctggctgt

SEQ ID NO: 212806 - DNA, 120 bp, Artificial Sequence
  ENSG00000115942_23 (sequence is synthesized)
aaattaattttgattcctctgtcaagtagacctaaaactcactgtaagatatttcagttttttccttaaagtgatgatttcaaacctcctgaatatttgcgcgagacttttttcttagga

SEQ ID NO: 212807 - DNA, 120 bp, Artificial Sequence
  ENSG00000115942_24 (sequence is synthesized)
aagaaaaaaggctcaccttggctactgttgtcagcttacagtcatcacataccccctgaaatatttgacacttggaaatgaagttcttcctgaaaatatcactgcaataaaatacgtact

SEQ ID NO: 212808 - DNA, 120 bp, Artificial Sequence
  ENSG00000115942_25 (sequence is synthesized)
acgtcagcatttctcactcatttcttatcttgtaaacctctttcatgaaaatatttccaaaaatccttggaatttttaaataatttttcttgtggcatataattaagtaattttggccag

SEQ ID NO: 212809 - DNA, 86 bp, Artificial Sequence
  ENSG00000115942_26 (sequence is synthesized)
taatttttcttgtggcatataattaagtaattttggccaggcataatggcttatgcctgtaatcaggagcccaggagtttaagaac

SEQ ID NO: 212810 - DNA, 86 bp, Artificial Sequence
  ENSG00000115942_27 (sequence is synthesized)
accttgtctctacaaaaaatttaaaaaatcatccgggcatggtggcccatgcctatagtcctagctgctgtggttcaagattacag

SEQ ID NO: 212811 - DNA, 120 bp, Artificial Sequence
  ENSG00000115942_28 (sequence is synthesized)
cactgcacttcagtctgggtgcagagcaagaccttgtctttttttttttttaaatcatttttttaaaaagtaattttatgttaagtccatgggcttagtctttttttttttttttttttt

SEQ ID NO: 212812 - DNA, 82 bp, Artificial Sequence
  ENSG00000115942_29 (sequence is synthesized)
atggattgcactgtcatccagtctagagtgcagtggcgtgatctaagcttacagcagcctccacctcctgggttcaagtgat

SEQ ID NO: 212813 - DNA, 120 bp, Artificial Sequence
  ENSG00000115942_30 (sequence is synthesized)
gggatcaggggtgagccactatgcctggccaagggcttagtcttaaatataacctctagtcaaaatgtttaaacaaatttgtacataaatgtgatttaaaaaaatttttttaatagtacc

SEQ ID NO: 212814 - DNA, 120 bp, Artificial Sequence
  ENSG00000115942_31 (sequence is synthesized)
aaaggatattcagtgaaagtgagtttcctgcccactccctgatccacccagttctttaggcaaccactgatagcattttcttaagtattcttccagatatcgtctatgcatatgtaaaag

SEQ ID NO: 212815 - DNA, 120 bp, Artificial Sequence
  ENSG00000115942_32 (sequence is synthesized)
tatctgtctttctccttttaaaaacacaattggtaatatatcatacttgctggtttgcaccttgctttttttgcttaatatatctagtttataatgacctaatgtgcaaatttttgcatc

SEQ ID NO: 212816 - DNA, 120 bp, Artificial Sequence
  ENSG00000115942_33 (sequence is synthesized)
tgccctaaatatctactggtttatttttataatttttgtgtctatactatttgcaagcagtatgtgtcagtagactttattattaataaataaaaagccaatttggatagaatcacttta

SEQ ID NO: 212817 - DNA, 120 bp, Artificial Sequence
  ENSG00000115942_34 (sequence is synthesized)
agaggctggaggcgcaggccaaagtcctttaagacttgaggtgagaggctcactctgggaggacctttcgttagtctgccccgcagttataggccttttgtgcaagggacgcctgatact

SEQ ID NO: 212818 - DNA, 120 bp, Artificial Sequence
  ENSG00000115942_35 (sequence is synthesized)
aacctacctgattcccagcttacgaagccctctggttggaaaaggagaactgtgaagatgtgtaacgacagtggtaaagtgccctgtgaggtgactgtatctgaattttgcagctgcaga

SEQ ID NO: 212819 - DNA, 120 bp, Artificial Sequence
  ENSG00000115942_36 (sequence is synthesized)
cagtgagctgagatcaccccactgcactctagcctggacaacagagccagaacttgtcttaaaaaacaaaacaaaacaaaaagctgctttctgtagggcctgacttcagtgctaatcatg

SEQ ID NO: 212820 - DNA, 120 bp, Artificial Sequence
  ENSG00000115942_37 (sequence is synthesized)
ggcctgacttcagtgctaatcatgtctattttatgagtaaatgacatatcttctcaaataaattacatacccctaagcaatcattattttatcctatactactttattttttaataccta

SEQ ID NO: 212821 - DNA, 120 bp, Artificial Sequence
  ENSG00000115942_38 (sequence is synthesized)
ggcattgtgtatggtagaggaaataatcactgaaatatcactaaaaataataattgcagctggacatggtggttcacgtctgtgatcctagcactttgggaggccaagttgagtccagga

SEQ ID NO: 212822 - DNA, 74 bp, Artificial Sequence
  ENSG00000115942_39 (sequence is synthesized)
tgagttagcctaggcaacagagtgagaccctctaaaaataataataataataattggatttcttttctttttag

SEQ ID NO: 212823 - DNA, 120 bp, Artificial Sequence
  ENSG00000115942_40 (sequence is synthesized)
aagtcgcgcatctcaggactttccctcggcacttggggcatggtctttgcgcctcgctgccccccgcaggctgcccgggggctcgagaacccttactggtggagcgcagccaactggcca

SEQ ID NO: 212824 - DNA, 120 bp, Artificial Sequence
  ENSG00000115942_41 (sequence is synthesized)
acccttcttacattggtatccaatatttatgacattcaattgtgtaatttttgttttaccctgtacatttcctgtctctggaatttaatgacagcagtgcagtttttcacagcagtgagt

SEQ ID NO: 212825 - DNA, 120 bp, Artificial Sequence
  ENSG00000115942_42 (sequence is synthesized)
aagtggtcactcatgatgggtatgtctgccacatagcaaattttcaagcagctctacagatccactgctgagcaaggtgtttgccaacacaaattgaaagacaaacccagcttactttta

SEQ ID NO: 212826 - DNA, 120 bp, Artificial Sequence
  ENSG00000115942_43 (sequence is synthesized)
aaattttctgtgctaactatggatgtgtatctgccaagtacatatttttcatattctaggcatcttaggagattttcttcccctttggcaaaaatgatttcaacaaacattttaataatt

SEQ ID NO: 212827 - DNA, 120 bp, Artificial Sequence
  ENSG00000115942_44 (sequence is synthesized)
gttctgctctcatgacttacttgttccttctttaaaagtcctatcaatacttgttcactgctctgggataacatgcaaatagcacttttattctgttcttttgtatgggtgtttgtatat

SEQ ID NO: 212828 - DNA, 120 bp, Artificial Sequence
  ENSG00000115944_0 (sequence is synthesized)
ccttctctggggcggtcgcgttggcagcggatgcgggaagccggactctgggcgtcatgtactacaagtttagtggcttcacgcagaagttggcaggagcatgggcttcggaggcctata

SEQ ID NO: 212829 - DNA, 120 bp, Artificial Sequence
  ENSG00000115944_1 (sequence is synthesized)
gcccgcagggattaaagcctgtggtttccacagaagcaccacctatcatatttgccacaccaactaaactgacctccgattccacagtgtatgattatgctgggaaaaacaaagttccag

SEQ ID NO: 212830 - DNA, 120 bp, Artificial Sequence
  ENSG00000115944_2 (sequence is synthesized)
agctacaaaagtttttccagaaagctgatggtgtgcccgtctacctgaaacgaggcctgcctgaccaaatgctttaccggaccaccatggcgctgactgtgggagggaccatctactgcc

SEQ ID NO: 212831 - DNA, 120 bp, Artificial Sequence
  ENSG00000115944_3 (sequence is synthesized)
tgatcgccctctacatggcttcgcagcccaaaaacaaatgagttaggctgcagaggactggtttgttttttggcataaaccctttgaagttcctttttcattgttaaattaaaatttttt

SEQ ID NO: 212832 - DNA, 120 bp, Artificial Sequence
  ENSG00000115944_4 (sequence is synthesized)
tttttacttggatggcttaacatttttgcaagaaaaataggaagatatgaagatgatgttttggtttgtttatgaaatgcatatggcttgtcagagctcattcgacagttaaagccattg

SEQ ID NO: 212833 - DNA, 120 bp, Artificial Sequence
  ENSG00000115944_5 (sequence is synthesized)
tttaaagaaatggtgctttgctctgtgtttgtgctcctgatttccctggaggttctggatgaaggctgaacacaggcttgttaatgtcagtctgtgctgaggacctcagggacttgaggt

SEQ ID NO: 212834 - DNA, 120 bp, Artificial Sequence
  ENSG00000115944_6 (sequence is synthesized)
tgcatttttgagcatggggtgcaggagcctttctggatttggatgtggctatggaaagaacacagaagccaaggtcatgtgcatgaaatgaggagtttgagttagtcacctcggggattt

SEQ ID NO: 212835 - DNA, 120 bp, Artificial Sequence
  ENSG00000115944_7 (sequence is synthesized)
tttccattttgcagtaaaatgttaaattaatgtagcctgcctctatttgttgggcaggtaatttcaaagggttatttgcctcatctcctatctttagtgaaatcttatgtgtaattattc

SEQ ID NO: 212836 - DNA, 120 bp, Artificial Sequence
  ENSG00000115944_8 (sequence is synthesized)
caccgtgggaacagagaatacctgtttagtgttgcactttagactggtgtctgttttgttaatgcagctgtgccacaaattctcctttatcttttaaaaatgttatagctttaaattttg

SEQ ID NO: 212837 - DNA, 120 bp, Artificial Sequence
  ENSG00000115944_9 (sequence is synthesized)
ttattttgactgtggaataaatacatgaatgaaaaattttaagtttgaagttctttgaatgacctttcagagtaatttcagaacaccagcagcatcttaaacctgagtctaatttctttc

SEQ ID NO: 212838 - DNA, 120 bp, Artificial Sequence
  ENSG00000115944_10 (sequence is synthesized)
ttgttaattaggcaccagataatctttataaaatggttcttaaaagtctagtaataggagtcttaatggcatattgatgattaccacatggttttttataaaaacctgcctgccccttag

SEQ ID NO: 212839 - DNA, 120 bp, Artificial Sequence
  ENSG00000115944_11 (sequence is synthesized)
tgaaaggtacctgtaactcacagttcatttagacactaatttcctttgctgtcatgattggtagacttcacttaccctatattaattttgaaaaaaggtggaattttattatatatgaag

SEQ ID NO: 212840 - DNA, 120 bp, Artificial Sequence
  ENSG00000115944_12 (sequence is synthesized)
gaatagtttgtatcttaccatagcacagaacagtgacctcttgctcaggataagatgtggtgatttgaaaatactcaatagtagccttgcagtgatatctctctctctctctctctgcaa

SEQ ID NO: 212841 - DNA, 120 bp, Artificial Sequence
  ENSG00000115944_13 (sequence is synthesized)
atctaaattttattctctggtatttcctccaagtttttattttgaaaattttcagactacagaaggactaagcatagtacaatatacacctgtatatccttcacttagatcaccagttat

SEQ ID NO: 212842 - DNA, 120 bp, Artificial Sequence
  ENSG00000115944_14 (sequence is synthesized)
caatatattggcacctttgctttttcttgttctctcacacaggcacacacaatgcatatatgcacacacacatagatctgttttttgttgagtcatttaagattgttagggaattatgat

SEQ ID NO: 212843 - DNA, 120 bp, Artificial Sequence
  ENSG00000115944_15 (sequence is synthesized)
aaatcagccatagtactttagcaggtatcttctgagtaaggacatgtgttcctttataaccataatgcagttgtcagactcaataaagttaacatttataacaatactaccatctaatac

SEQ ID NO: 212844 - DNA, 120 bp, Artificial Sequence
  ENSG00000115944_16 (sequence is synthesized)
atagtttactttcagatttccccaggtgttctaataatgagttcttcatagttgtgtttttaaaaaataacagctttattgggatataatttacatactgtacagttcacctcaagtgta

SEQ ID NO: 212845 - DNA, 120 bp, Artificial Sequence
  ENSG00000115944_17 (sequence is synthesized)
caattcattggtttttactgtatttggagttgtacagccaccatgagaatcaattttagaacacttatatcaccctaaaaagaaaccccatacccattagcaatcacttgccttccctcc

SEQ ID NO: 212846 - DNA, 120 bp, Artificial Sequence
  ENSG00000115944_18 (sequence is synthesized)
caccatcccaactcccacctcctagcccaaagcaagcactcatctactttcagtctctatggatttgtctttcctggacatttcatataaatataatcatatgatgtgtgatgtacgtga

SEQ ID NO: 212847 - DNA, 120 bp, Artificial Sequence
  ENSG00000115944_19 (sequence is synthesized)
agaatggtaaacacagcagcagagctaccacacacttcccttctgggagcggtggggaaagcagccagggaggtcgggagatggacggaaactgctggggatgtgagaagcctggggcac

SEQ ID NO: 212848 - DNA, 120 bp, Artificial Sequence
  ENSG00000115944_20 (sequence is synthesized)
taactggagttgttattgacttggttgccaggggaagcttggccgacaagtctatactcctgggcagactgagcaacagcaggtggtggcttctggataagaggtgctctaggtcggaag

SEQ ID NO: 212849 - DNA, 120 bp, Artificial Sequence
  ENSG00000115944_21 (sequence is synthesized)
gaaataaatgagactacgatcagttaaagttcggtaaagcaagagacgccttcaacccgacgaccagacggtggctccgcagcacagactctctcggatggtggaattcccaaccggctt

SEQ ID NO: 212850 - DNA, 120 bp, Artificial Sequence
  ENSG00000115944_22 (sequence is synthesized)
cgatgtagccccgcccctacccagaccacgcccaccaatcaccgccctctcccccccaggccccgcctggagcccgcccctcctaaagcatgctccacctgactccgacactgccgggct

SEQ ID NO: 212851 - DNA, 120 bp, Artificial Sequence
  ENSG00000115944_23 (sequence is synthesized)
tagtccgccgggcttagtccgtggagcgcttgcgcatttcttgagttgtcgtggcactgcccaaatctgaatgggggaaagagggaacttcatatttcctacagactccgccacagcgac

SEQ ID NO: 212852 - DNA, 120 bp, Artificial Sequence
  ENSG00000115944_24 (sequence is synthesized)
tttgcgtgctctcttagagctggttttgcctttcgtggtcctgagaaccctggcttttggttccccaatgcggcttaagtgtgcaggttttaagttaggcgatcttcgggcagccctagt

SEQ ID NO: 212853 - DNA, 120 bp, Artificial Sequence
  ENSG00000115944_25 (sequence is synthesized)
aacagcatggcggttgcatccccaggaagcaggcccgcagcgccaggagggggtttcctgaggacagaggcccttgtcctgattgtcgcagcaggccctgtcgatggacttaactgtgaa

SEQ ID NO: 212854 - DNA, 120 bp, Artificial Sequence
  ENSG00000115944_26 (sequence is synthesized)
aatcaccctttcaggggtggatgcaaggacttctgagggcggagaagtagataccttcctggatagctgtggagccggggtcctgcatttccctctggcgtctctgctgactgagatgtg

SEQ ID NO: 212855 - DNA, 120 bp, Artificial Sequence
  ENSG00000115944_27 (sequence is synthesized)
aagcagtcggcccatgtcccgagaagaggttggccacaactctgtgccacatcctcttcattttagaatccaggatgaaggatatgcccttatctgggcacttctccttgctgctgccat

SEQ ID NO: 212856 - DNA, 120 bp, Artificial Sequence
  ENSG00000115944_28 (sequence is synthesized)
accgaggaaaagccatgtgagcacacagcgaaaaggcagccgagcccacaagccaggaagagagccctgcaccccagaactcaactgtgagaacatacattcctgttgtttaagccacca

SEQ ID NO: 212857 - DNA, 120 bp, Artificial Sequence
  ENSG00000115944_29 (sequence is synthesized)
gtctgtggtattttatggcagcccaagctaagacacgctaggaagaagaaccactatagtgttaactgtaatgggcagaatggccctttagtcacccttcctgtggcctaacacttggac

SEQ ID NO: 212858 - DNA, 120 bp, Artificial Sequence
  ENSG00000115944_30 (sequence is synthesized)
actgtcacttaagaggcccctcacatctacgcaggaggtgattaaagaacattctaaattacctggtaatttgggggtgtaagtacatgaaagcatttttaaaattctaatttgtatgtt

SEQ ID NO: 212859 - DNA, 120 bp, Artificial Sequence
  ENSG00000115944_31 (sequence is synthesized)
tactacccaccctccttctttttctttaagtagtattctcttgattttagtttgagccataaacgaatagaactttatataggtagatactgataaaagaggggagggtggttaatttcc

SEQ ID NO: 212860 - DNA, 120 bp, Artificial Sequence
  ENSG00000115944_32 (sequence is synthesized)
tcattagtatttaagggtgtgagggttttgaaatggcatgaatagctcttgatcatttattgcatggaagaagcaatagcctcaataactgagtagcctgtataactgaatgacccaata

SEQ ID NO: 212861 - DNA, 120 bp, Artificial Sequence
  ENSG00000115944_33 (sequence is synthesized)
gggcttcagtgatggtgatacagatgtgcggcactgctgtgtcgtggactcacctcgtcccagactgaggaccaagactgacacagactctcttctgtttcccttatctcctttccaaag

SEQ ID NO: 212862 - DNA, 120 bp, Artificial Sequence
  ENSG00000115944_34 (sequence is synthesized)
taagtctgtgaatctaccctggtcctttccttctatgtctaatgaatgtctttctcctagtgtagtggaggaagtacaaattttgaagttctagaacataaagtctcagcatggccatga

SEQ ID NO: 212863 - DNA, 87 bp, Artificial Sequence
  ENSG00000115944_35 (sequence is synthesized)
aagaaagatttcaggtctggtaccgtggctcacgcctgtaaatcacagcactttggaaggccgaggccgagggtccaacatagtgag

SEQ ID NO: 212864 - DNA, 120 bp, Artificial Sequence
  ENSG00000115944_36 (sequence is synthesized)
accctgtctctaaaaacaaaaacagatgattctaatctcagataagaagggcaagttttttttttttttttcgggggttagtgggggagttgcggtgggaacgggaaggaagagtttagg

SEQ ID NO: 212865 - DNA, 120 bp, Artificial Sequence
  ENSG00000115944_37 (sequence is synthesized)
gtttataaatgttgagtttgtgatatgtcatgcttggtagcagctagatttttgaatatggagtttaataaacttgggtgtcttcagcccataggtggtaatttgtagggaagaaaggtt

SEQ ID NO: 212866 - DNA, 120 bp, Artificial Sequence
  ENSG00000115944_38 (sequence is synthesized)
ggattatagttagagtatagaaacatgagggaagggtggagaaggagaatgtgtttaaagaatagtccggatgagaagggaaaccagtgtggtctcactgaaaccgaattggtaatgact

SEQ ID NO: 212867 - DNA, 120 bp, Artificial Sequence
  ENSG00000115944_39 (sequence is synthesized)
tgtaaggaaggaatagtcagcagtgttgcacttcttttacagattatgtgagaaaatggccatttctatcatctgcttctatgaaatgtattctccagtgtatggatattaaatgttaca

SEQ ID NO: 212868 - DNA, 120 bp, Artificial Sequence
  ENSG00000115944_40 (sequence is synthesized)
gtttgatgagtttggacaaacccatgtactgtataaccacacctccctcaatatgcaagatgttacatcatcccaggaagttcccttgtaccctctgtcaatccctgccaccttcttatt

SEQ ID NO: 212869 - DNA, 120 bp, Artificial Sequence
  ENSG00000115944_41 (sequence is synthesized)
ctgacttttatcatcataaatagatagttttgcctttttttgaacttcatgtaaatggaaccagctctgacccaggctggagtgcaatggcacagtcacagttcactgtagactcactcc

SEQ ID NO: 212870 - DNA, 120 bp, Artificial Sequence
  ENSG00000115944_42 (sequence is synthesized)
agcggatgcgggaagccggactctgggcgtcatgtactacaagtttagtggcttcacgcagaagttggcaggagcatgggcttcggaggcctatagcccgcaggtacgagtggcgcctgg

SEQ ID NO: 212871 - DNA, 120 bp, Artificial Sequence
  ENSG00000115944_43 (sequence is synthesized)
ccagctcggacatgagaagtggcggccctagcctcggcgacaggcagtcgcggcgttggagccaggggaggcttctgcccgcggtcgagttcgtctctgttctccttgcacctcccgggg

SEQ ID NO: 212872 - DNA, 120 bp, Artificial Sequence
  ENSG00000115946_0 (sequence is synthesized)
gcagctgcgcacgtgtttcagccggcagcgctttaagatttccggggatggaatccgaaatggaaacgcagagcgccagggcagaggagggctttacccaggtcacccgcaagggtggcc

SEQ ID NO: 212873 - DNA, 120 bp, Artificial Sequence
  ENSG00000115946_1 (sequence is synthesized)
gacgggcgaagaaacgacaggctgaacagctgtccgcagcaggagagggcggggatgcgggccgcatggacacagaggaggccaggccggcgaagaggcccgtcttcccacccctctgtg

SEQ ID NO: 212874 - DNA, 120 bp, Artificial Sequence
  ENSG00000115946_2 (sequence is synthesized)
gggacgggctcctgagtgggaaagaagaaacaaggaaaattccagtcccagctaacagatacacaccattgaaagaaaactggatgaagatatttactcctattgtggaacatttgggac

SEQ ID NO: 212875 - DNA, 120 bp, Artificial Sequence
  ENSG00000115946_3 (sequence is synthesized)
ttcagatacgctttaacttgaaatcaaggaatgtagaaatcaggacttgtaaagaaaccaaggatgttagtgctctgacaaaagcagctgattttgtgaaagcttttattctcggctttc

SEQ ID NO: 212876 - DNA, 120 bp, Artificial Sequence
  ENSG00000115946_4 (sequence is synthesized)
aggtggaggatgcacttgccctcatcaggttggatgacctcttcctagagtcttttgaaattacagatgttaaacccctaaagggagaccatctatccagggcaataggaagaatcgctg

SEQ ID NO: 212877 - DNA, 120 bp, Artificial Sequence
  ENSG00000115946_5 (sequence is synthesized)
gcaaaggaggaaaaaccaaattcaccatagagaatgtgacacggacaaggatagttttggctgatgtgaaagttcacatccttggctccttccaaaatatcaagatggcaagaactgcca

SEQ ID NO: 212878 - DNA, 120 bp, Artificial Sequence
  ENSG00000115946_6 (sequence is synthesized)
tttgcaacctaatcttgggaaatcctccttccaaggtttatggcaatattcgagctgtggctagcagatcagcagatcgattctgatttcaagtcagagactttttatcttgcctttgga

SEQ ID NO: 212879 - DNA, 120 bp, Artificial Sequence
  ENSG00000115946_7 (sequence is synthesized)
ctctggtgaaaaatactttacagtggtcggtcacaagaaaccagctgaacaatttcagtcatttgaagcctccgtcccttcttccattctcagccagaagcataaacagaaaagaaagat

SEQ ID NO: 212880 - DNA, 120 bp, Artificial Sequence
  ENSG00000115946_8 (sequence is synthesized)
ttaagaggattcacactcaacaggttttaggataatttaaatatcaaaaattgattgttatacttaacacattaggtataatttatcatttatctgaaatcacatgtagcagattgcata

SEQ ID NO: 212881 - DNA, 120 bp, Artificial Sequence
  ENSG00000115946_9 (sequence is synthesized)
tcatacaaatttataaacatttctttataaattgtaatttaatagattatctcagaaaaacctctctgaatgatgacccttccttaatactgggtgatgtgtgaatatttgtttgttggc

SEQ ID NO: 212882 - DNA, 120 bp, Artificial Sequence
  ENSG00000115946_10 (sequence is synthesized)
acaggcataagccactgcgcctggccttgatgtgtgaatatttgagaggtcataagcagtggttttggccataccgtattataccatatacatcagtaagagctcatcttggaacctgtt

SEQ ID NO: 212883 - DNA, 120 bp, Artificial Sequence
  ENSG00000115946_11 (sequence is synthesized)
catcttggaacctgttttgcagtttcttgcagtttcaaaaattaaagacctacatcacagggttaatgtgaagaaagctttatttttcaaatgagtatttaatgaaagtatacataacca

SEQ ID NO: 212884 - DNA, 120 bp, Artificial Sequence
  ENSG00000115946_12 (sequence is synthesized)
atgttgggtatacagatgcttctcaacttatgatgggtttaggtccagataagcccactgtgagttgaaaataccaaaagtcaaacatcatagcttagcctaccttaaaagggctccgaa

SEQ ID NO: 212885 - DNA, 120 bp, Artificial Sequence
  ENSG00000115946_13 (sequence is synthesized)
cactacattagcctacagttgggcaaaatcgtctaatacaaagcctattttataataaagtatgttgaatatctcatgtaatttttgaagattacattgaaagtgaaaaacagaatggtt

SEQ ID NO: 212886 - DNA, 120 bp, Artificial Sequence
  ENSG00000115946_14 (sequence is synthesized)
gggtacttgaaatacagcttctactgaatgaataattctaaagttgaaaaataatagtaagaaccatcataagtctgtttcttctagtaaaggtgaaatgatgaaagaatgcttttttcc

SEQ ID NO: 212887 - DNA, 120 bp, Artificial Sequence
  ENSG00000115946_15 (sequence is synthesized)
cacccaaaaaactatgctctataaatgcagattagctagtttctgcctgtttaaatggtattattttatacattacaaaatggaaggaacttactttattaaacttaactttgatacttc

SEQ ID NO: 212888 - DNA, 120 bp, Artificial Sequence
  ENSG00000115946_16 (sequence is synthesized)
taagagagagggttttggtctgtcactcaggttggcatgttgcactctacaggcacgtgctactacacccagctaactgttgaatttttttgtagagatggcgtctcattatgctgtcca

SEQ ID NO: 212889 - DNA, 81 bp, Artificial Sequence
  ENSG00000115946_17 (sequence is synthesized)
tgcatcccagccactaatttgtctcattttatttctttcaggaaagttcacatccttggctccttccaaaatatcaagatg

SEQ ID NO: 212890 - DNA, 120 bp, Artificial Sequence
  ENSG00000115946_18 (sequence is synthesized)
gcatgcaggtagttaggcctggagctgttggtttaagaaacatcagcatataaatgataactaagaagattaagtcaggaatcccagggaagactgccttgagagagaagagaagaggac

SEQ ID NO: 212891 - DNA, 120 bp, Artificial Sequence
  ENSG00000115946_19 (sequence is synthesized)
attgggcattgaagggatggacagaagacttgtaaagaaaccaaggatgttagtgctctgacaaaagcagctgattttgtgaaagcttttattctcggctttcaggtggaggatgcactt

SEQ ID NO: 212892 - DNA, 120 bp, Artificial Sequence
  ENSG00000115947_0 (sequence is synthesized)
gaggaggaggcgaaggaggaggaggagagctggggaagtggctgctcctgggtgtagtgagatgtctccagccagggccaagcagcagcagtagcagcagcagcagtagcagcagcagca

SEQ ID NO: 212893 - DNA, 120 bp, Artificial Sequence
  ENSG00000115947_1 (sequence is synthesized)
gcaacagcagcagcagcagcaacagcagcagcaaagggatttgaatttgttgaaatgagcagtcgtaaatcaaagagtaacagcttaattcacacagagtgcctttcacaggtacaaaga

SEQ ID NO: 212894 - DNA, 120 bp, Artificial Sequence
  ENSG00000115947_2 (sequence is synthesized)
attttacgtgaaagattttgtcgtcagagtccacatagtaacctatttggagtgcaagtacaatacaaacacttaagtgagctgctgaaaagaactgctctccatggagagagtaactct

SEQ ID NO: 212895 - DNA, 120 bp, Artificial Sequence
  ENSG00000115947_3 (sequence is synthesized)
gtccttattatcggaccccgaggatcaggaaaaactatgttaataaatcatgctttgaaagaactcatggaaatagaagaagtgagtgaaaatgtattacaagttcacttaaatggactg

SEQ ID NO: 212896 - DNA, 120 bp, Artificial Sequence
  ENSG00000115947_4 (sequence is synthesized)
ctgcagatcaatgacaaaatcgccctaaaggaaatcacaaggcagttaaatctggaaaatgtagttggagataaagtttttggaagctttgctgaaaacctttcatttcttctggaagct

SEQ ID NO: 212897 - DNA, 120 bp, Artificial Sequence
  ENSG00000115947_5 (sequence is synthesized)
ttaaaaaaaggtgaccgaactagcagttgcccagtgatcttcatattagatgaatttgatctttttgctcatcataaaaaccaaacacttctctataatctttttgacatttctcagtct

SEQ ID NO: 212898 - DNA, 120 bp, Artificial Sequence
  ENSG00000115947_6 (sequence is synthesized)
gcacagaccccaatagcagttattggtcttacatgtagattggatattttggaactcttagaaaaaagagtgaagtcaagattttctcaccggcagatacacttaatgaattcatttggt

SEQ ID NO: 212899 - DNA, 120 bp, Artificial Sequence
  ENSG00000115947_7 (sequence is synthesized)
tttccacagtatgttaaaatatttaaagaacagttatctctacctgcagagtttccagacaaggtttttgctgagaagtggaatgaaaatgttcagtatctctcagaagatagaagtgtg

SEQ ID NO: 212900 - DNA, 120 bp, Artificial Sequence
  ENSG00000115947_8 (sequence is synthesized)
caagaagtactacagaagcatttcaatatcagcaaaaacctgcggtcattacacatgctattgatgcttgctttaaatcgagtaacagcatcgcacccatttatgactgccgtagatcta

SEQ ID NO: 212901 - DNA, 120 bp, Artificial Sequence
  ENSG00000115947_9 (sequence is synthesized)
atggaagcaagccaactgtgtagcatggactcgaaagcaaatattgtacatggtctatcagtcttggaaatctgtcttataatagcaatgaaacatttaaatgacatctatgaggaagag

SEQ ID NO: 212902 - DNA, 120 bp, Artificial Sequence
  ENSG00000115947_10 (sequence is synthesized)
ccatttaattttcaaatggtctataatgagtttcagaagtttgttcaaaggaaagcacattccgtttataattttgaaaaacctgttgtcatgaaggcttttgaacacttgcagcaatta

SEQ ID NO: 212903 - DNA, 120 bp, Artificial Sequence
  ENSG00000115947_11 (sequence is synthesized)
gaattaataaagcccatggaaagaacttcaggaaattcacagagagagtaccagctgatgaaactgcttttggataatactcaaattatgaatgctctgcagaaatatcccaactgtcct

SEQ ID NO: 212904 - DNA, 120 bp, Artificial Sequence
  ENSG00000115947_12 (sequence is synthesized)
acagatgtgaggcagtgggcaacatcctcactaagctggttatgaatataaccagtgacttcaactttggcatttcattcatacttctgtagagaacggaaaactattgtccattaacat

SEQ ID NO: 212905 - DNA, 120 bp, Artificial Sequence
  ENSG00000115947_13 (sequence is synthesized)
gatatgctaaacattctataaacattcttgtatttatgtgagacttgcccatctactgtcttggctgtgtcttgccttttaatcatgaacagttacatgatttataatttcactgattga

SEQ ID NO: 212906 - DNA, 120 bp, Artificial Sequence
  ENSG00000115947_14 (sequence is synthesized)
gattactttgtaagtagctgttcagaagaataaaatatgactgttttagggactagaccatgtgcttttttaacacttatatatataatggtctatttgaagagctcacttcaacctaac

SEQ ID NO: 212907 - DNA, 120 bp, Artificial Sequence
  ENSG00000115947_15 (sequence is synthesized)
agctagatgtctttacaaaccttaaaccaaaggagtaaaaaaaacaatggtaagcactgaagtataataagtaacctttggtacagcaggtttgctgcagtgtttttttctgtccacatg

SEQ ID NO: 212908 - DNA, 120 bp, Artificial Sequence
  ENSG00000115947_16 (sequence is synthesized)
caaattttggattctatcccagacccaggttttctagttcagaagactaaccagcttagtcagaagatggttccatggaagaaaaaggccaaggagtttgaagatttttcttctagacat

SEQ ID NO: 212909 - DNA, 120 bp, Artificial Sequence
  ENSG00000115947_17 (sequence is synthesized)
ctcaaaatgtggtactcataccatccacatcagaatcccttgtaggattttctaaaattacagattgttgagcctaccataggtcaaaaggactggaattttccttcttaacaagtatag

SEQ ID NO: 212910 - DNA, 120 bp, Artificial Sequence
  ENSG00000115947_18 (sequence is synthesized)
tcatggcaccacgtaacattttggtcaatgacattgtataaagggtggtctcataagattataccatatttttactgtaccttttctatgtctaaatatacaaatgttttaccattgtgt

SEQ ID NO: 212911 - DNA, 120 bp, Artificial Sequence
  ENSG00000115947_19 (sequence is synthesized)
tacagttgcctacagtatgattacagtaacattctgtacagtgctatagctgaagagtaataggctaggctatctgtatagcctaagtgtgtaacaggctatatacatatcatcagggtc

SEQ ID NO: 212912 - DNA, 120 bp, Artificial Sequence
  ENSG00000115947_20 (sequence is synthesized)
tgtgtaagtatactctgtgatgttcatacagtgatgaaatcacccaaagacacatttctcagaacgtagccccatcatgaagtgacgtgactaccagagatttctggaaaagcactccca

SEQ ID NO: 212913 - DNA, 120 bp, Artificial Sequence
  ENSG00000115947_21 (sequence is synthesized)
aaagtaatgagatgtgtatggcaatgttaactgaacctgtttgtattaaaaagtaaatccctatgaggaatgtggaaatgtccgtcaaagcattgtcttttaagtaagttccaagatcca

SEQ ID NO: 212914 - DNA, 120 bp, Artificial Sequence
  ENSG00000115947_22 (sequence is synthesized)
tgaattaacagaggcatatatttaaaatgaaatttaatgagcacttagtgacttcatttgttcaagaatatttgatttcctattgtgtgcatgggaggtttacaaaagacagactgtccc

SEQ ID NO: 212915 - DNA, 120 bp, Artificial Sequence
  ENSG00000115947_23 (sequence is synthesized)
tatgcttgtgcagcttacaatctatttaactattagaggccctgtgagatgtaggcagttatttacagatgagaaaactaacacagcagtggcaatgctgggaatggccaacaggcttgg

SEQ ID NO: 212916 - DNA, 120 bp, Artificial Sequence
  ENSG00000115947_24 (sequence is synthesized)
aattcaactcagtttagcaccaaagccagtgctattaagacctgaagttcaacagtggattccttaccaaatagtttttaaagtatgctctaaggaacaatgttttaatgaaatcttgga

SEQ ID NO: 212917 - DNA, 120 bp, Artificial Sequence
  ENSG00000115947_25 (sequence is synthesized)
tacaaagtggaataaaaggtttctgagcataaagtagctcttcagtagttacaacctattcttttgcatacatagcctttccttccctgcaaaaagttaagcctgctaagtattcagatc

SEQ ID NO: 212918 - DNA, 120 bp, Artificial Sequence
  ENSG00000115947_26 (sequence is synthesized)
cctgtcatttacttctcagcagtctcattcaagctaaggcttgcatactcaatctgtgccgtagtctacacatttttaggggatatttcaccaaaatacttgacatggtaacatcactat

SEQ ID NO: 212919 - DNA, 120 bp, Artificial Sequence
  ENSG00000115947_27 (sequence is synthesized)
gaggattccaatttcttattagcttaagatgtcacttaaaagctgacagccctcatctgtctcattggctacataagagctgcagaagatccatcaataaccaagtataaagaaagattt

SEQ ID NO: 212920 - DNA, 120 bp, Artificial Sequence
  ENSG00000115947_28 (sequence is synthesized)
taagactaagtaccaattgaggtaaacatgaaaccgttataaagcaaattaaaaaaaaatacattaggaaaagttacacaaatgaagtgtacgcctattatattcccaaggcatttttgt

SEQ ID NO: 212921 - DNA, 120 bp, Artificial Sequence
  ENSG00000115947_29 (sequence is synthesized)
ggggaggaacagtgctgcttgttggcctttccatattccctcatacaaaaatgctaaaatctattcgcaagagttttgagctaacttcgtctcttaaattgctttaattgtcatcaataa

SEQ ID NO: 212922 - DNA, 120 bp, Artificial Sequence
  ENSG00000115947_30 (sequence is synthesized)
aaacaaatatgaaaaaccctagtttaaaaagcggttcaagaataatgtaaacttatacatatagcttattttcttcatttactagaggaggaaaaatagaaccaaaaaatgcatgaactc

SEQ ID NO: 212923 - DNA, 120 bp, Artificial Sequence
  ENSG00000115947_31 (sequence is synthesized)
ctgcttttcaatctgattacctcaaactgaaaagcaggtgaaaggaggaatatttcagtgtgtttttacatctgaatccaagggatccaagtggcccagcagaaacggaattcttgttaa

SEQ ID NO: 212924 - DNA, 120 bp, Artificial Sequence
  ENSG00000115947_32 (sequence is synthesized)
aatgactgattctcgtgcatgtgaaaggctctggggaatgaatacctgtttggtccaaacttactgtatcataatgctgtatatgttgaaaacgtaatacctgttaatgtcctaatgaat

SEQ ID NO: 212925 - DNA, 120 bp, Artificial Sequence
  ENSG00000115947_33 (sequence is synthesized)
cacgttttgcagaaaacaccgtaagaaacacttcagtctttctgtagtttccatgcatatttcaccatggttcgcactctgatcctcatctggtttagaaagcaattcagtttctttcaa

SEQ ID NO: 212926 - DNA, 120 bp, Artificial Sequence
  ENSG00000115947_34 (sequence is synthesized)
accaccataacctaagtgctgccccatccttcacctttaccctagaaaatctgagaatccattggtgtgtactgtgtgacacaatgccaacaagcctctggtttctaatactggcaggac

SEQ ID NO: 212927 - DNA, 120 bp, Artificial Sequence
  ENSG00000115947_35 (sequence is synthesized)
caacacacatactttagtgggaatataatctgtttagacgataatagagggaaatgccataattaacaaatctcccttcactcaccactatcctcattcttgcagttgtcaaggtgtaag

SEQ ID NO: 212928 - DNA, 87 bp, Artificial Sequence
  ENSG00000115947_36 (sequence is synthesized)
ctcaccactatcctcattcttgcagttgtcaaggtgtaagcctcactgtaagttacaaagctaccactcccctctttaagaacacat

SEQ ID NO: 212929 - DNA, 120 bp, Artificial Sequence
  ENSG00000115947_37 (sequence is synthesized)
agtataaaaaaaaaaaaaaacatagctaaagaaaaactgcatatgcaaatcataccgtattcatttttttatttaacttggggatggaatggggatagcatacattttatttgtacaata

SEQ ID NO: 212930 - DNA, 120 bp, Artificial Sequence
  ENSG00000115947_38 (sequence is synthesized)
tttaacaatcacttatccaaggtggggttttatggggattttaagctttctgttaaatacttgcagaaaaaatagcaagtacgatttgacagtagtacaataacctgtgcccaaaacaca

SEQ ID NO: 212931 - DNA, 120 bp, Artificial Sequence
  ENSG00000115947_39 (sequence is synthesized)
agaaatacagagtaaagcgaaaataactgcttaccaatattctgagaggtaacaaatgggatatgggttgagactgcataaaaaacgtactgctggttgaatatctgaggtaaatgatgt

SEQ ID NO: 212932 - DNA, 120 bp, Artificial Sequence
  ENSG00000115947_40 (sequence is synthesized)
tcaatcaagatgctacttgtatcattttgcccataaatggataaataattttatgcatatcataccaaatgttcctaaaaagtaatctttcaaaaaagtataaaagagaaactggaaagt

SEQ ID NO: 212933 - DNA, 120 bp, Artificial Sequence
  ENSG00000115947_41 (sequence is synthesized)
gtccgcagcggcaggtgaagtctagcagaggacgcggccaggcgattcggtgaagcgattcctgcaggcgttggttcccctctttgacctggatttgaatttgttgaaatgagcagtcgt

SEQ ID NO: 212934 - DNA, 120 bp, Artificial Sequence
  ENSG00000115947_42 (sequence is synthesized)
gcatgccgggagtggttgtgtacggtccgcagcggcaggtgaagtctagcagaggacgcggccaggcgattcggtgaagcgattcctgcaggcgttggttcccctctttgacctggaagc

SEQ ID NO: 212935 - DNA, 120 bp, Artificial Sequence
  ENSG00000115947_43 (sequence is synthesized)
ctggagccagaggacttttggtggctgaggccttagctacctggcttacacattaaggaggacacagatttgcttgctgtctgtctgtcaaggcctggctcagctaaggacctgttaaca

SEQ ID NO: 212936 - DNA, 120 bp, Artificial Sequence
  ENSG00000115947_44 (sequence is synthesized)
ttttaatagttagattttgaaaactagatccatgttttacttagcacaccatatgcagtatttttagaaattaaaataataataatgaaggagtcgcagaaggactctggtttttgtggg

SEQ ID NO: 212937 - DNA, 120 bp, Artificial Sequence
  ENSG00000115947_45 (sequence is synthesized)
tggaaggtcaaatggggaaccgaaatgtgcaaaaacgaaccagataggagttggaacctcaatttataacaactcactgtctcaagaactaatctatccccatgagaacaagaactcact

SEQ ID NO: 212938 - DNA, 120 bp, Artificial Sequence
  ENSG00000115947_46 (sequence is synthesized)
gtgcgtgcgcggggcatgccgggagtggttgtgtacggtccgcagcggcaggtgaagtctagcagaggacgcggccaggcgattcggtgaagcgattcctgcaggcgttggttcccctct

SEQ ID NO: 212939 - DNA, 120 bp, Artificial Sequence
  ENSG00000115947_47 (sequence is synthesized)
aatatttcgccaatctttgtgacatttctaaaagtttaaaaatatccttattttgcagataggaaaaaaactaagctcagggaggttaagtaacttaaatttatatagataattgaaaca

SEQ ID NO: 212940 - DNA, 120 bp, Artificial Sequence
  ENSG00000115947_48 (sequence is synthesized)
cattgaaatctagaagaatcttgaccttcttcacccctcagaaccatagatctttcactatattgtattctttggagaacagttatttcagtcttatatgtcattaaactgatagttttt

SEQ ID NO: 212941 - DNA, 120 bp, Artificial Sequence
  ENSG00000115947_49 (sequence is synthesized)
tgctgtcatttttctacagacaagtatattttttacatccaatttgattatgtattaaaattgcactttcatttttaaacattaagtattatagagatttttttcaaaacaagaaaatta

SEQ ID NO: 212942 - DNA, 80 bp, Artificial Sequence
  ENSG00000115947_50 (sequence is synthesized)
ccgtttataattttgaaaaacctgttgtcatgaagatggagtctcctgtcgcctacgctggagtacagtggcgaagcgat

SEQ ID NO: 212943 - DNA, 63 bp, Artificial Sequence
  ENSG00000115947_51 (sequence is synthesized)
tgcctcccaagtatgcccatctaatttttgtattcttagtagagacagtgtttcaccatgttg

SEQ ID NO: 212944 - DNA, 120 bp, Artificial Sequence
  ENSG00000115947_52 (sequence is synthesized)
atttagaaatgttttaaatctgcacagttctattcagctcttaacacctgcagcctccagtattttctcatgttcagatatgaaggtatctgagctgtttctctatcagaagaatttatg

SEQ ID NO: 212945 - DNA, 120 bp, Artificial Sequence
  ENSG00000115947_53 (sequence is synthesized)
tgatacatagagaatatgttccagtgatgttttttacagtgagttgtaagaatataatagaatcctcaggaatctatttcagtgtatcattatttaatggttagtatatcatgatttaat

SEQ ID NO: 212946 - DNA, 120 bp, Artificial Sequence
  ENSG00000115947_54 (sequence is synthesized)
ggttttttttttcataacctaataacgtacctaacacaacactcaaggttagaaaagatataataggtgaatattaaggataagaggaagtagacaagaaagagccctattaagatgggg

SEQ ID NO: 212947 - DNA, 120 bp, Artificial Sequence
  ENSG00000115947_55 (sequence is synthesized)
taaagctaaatgttccttgctatatgatttaaagcaattaaaacacaaattttagaaattagtaaattaacacaaagtttctaatattgctgaaggataatgctgcagtaatacaaatta

SEQ ID NO: 212948 - DNA, 120 bp, Artificial Sequence
  ENSG00000115947_56 (sequence is synthesized)
tatactttttaaaaattttcttcttagacagttgaaatgtcatttctcctaaattctatctcaaaagaacatcacagttaagctttaggatttatgttattagtttgaagtaaactttaa

SEQ ID NO: 212949 - DNA, 120 bp, Artificial Sequence
  ENSG00000115956_0 (sequence is synthesized)
atgcagaggaggcccagctgctgagaggagttgcctgagagtgacctttgcatctgcctgtccagccagcatggaaccaaagcggatcagagagggctaccttgtgaagaaggggagcgt

SEQ ID NO: 212950 - DNA, 120 bp, Artificial Sequence
  ENSG00000115956_1 (sequence is synthesized)
gttcaatacgtggaaacccatgtgggttgtattgttagaagatggaattgaattctataagaagaaaagtgacaacagccccaaaggaatgatcccgctgaaagggagcactctgactag

SEQ ID NO: 212951 - DNA, 120 bp, Artificial Sequence
  ENSG00000115956_2 (sequence is synthesized)
cccttgtcaagactttggcaaaaggatgtttgtgtttaagatcactacgaccaaacagcaggaccacttcttccaggcagccttcctggaggagagagatgcctgggttcgggatatcaa

SEQ ID NO: 212952 - DNA, 120 bp, Artificial Sequence
  ENSG00000115956_3 (sequence is synthesized)
gaaggccattaaatgcattgaaggaggccagaaatttgccaggaaatctaccaggaggtccattcgactgccagaaaccattgacttaggtgccttatatttgtccatgaaagacactga

SEQ ID NO: 212953 - DNA, 120 bp, Artificial Sequence
  ENSG00000115956_4 (sequence is synthesized)
aaaaggaataaaagaactgaatctagagaaggacaagaagatttttaatcactgcttcacaggtaactgcgtcattgattggctggtatccaaccagtctgttaggaatcgccaggaagg

SEQ ID NO: 212954 - DNA, 120 bp, Artificial Sequence
  ENSG00000115956_5 (sequence is synthesized)
cctcatgattgcttcatcgctgctcaatgaggggtatctgcagcctgctggagacatgtccaagagtgcagtggatggaactgctgaaaaccctttcctggacaaccctgatgccttcta

SEQ ID NO: 212955 - DNA, 120 bp, Artificial Sequence
  ENSG00000115956_6 (sequence is synthesized)
ctactttccagacagtgggttcttctgtgaagagaattccagtgatgatgatgtgattctgaaagaagaattcagaggggtcattatcaagcagggatgtttactgaagcaggggcatag

SEQ ID NO: 212956 - DNA, 120 bp, Artificial Sequence
  ENSG00000115956_7 (sequence is synthesized)
aaggaaaaactggaaagtgaggaagttcatcttgagagaagaccctgcctacctgcactactatgaccctgctggggcagaagatcccctgggagcaattcacttgagaggctgtgtggt

SEQ ID NO: 212957 - DNA, 120 bp, Artificial Sequence
  ENSG00000115956_8 (sequence is synthesized)
gacttcagtggagagcaactcaaatggcaggaagagtgaggaagagaacctttttgagatcatcacagcagatgaagtgcactatttcttgcaagcagccacccccaaggagcgcacaga

SEQ ID NO: 212958 - DNA, 120 bp, Artificial Sequence
  ENSG00000115956_9 (sequence is synthesized)
gtggatcagagccatccagatggcctcccgaactgggaagtaaagagactcctgcattcctcctcccctcctgagggaagcccatggacaagctcagtccaggacctgtccacttctgtg

SEQ ID NO: 212959 - DNA, 120 bp, Artificial Sequence
  ENSG00000115956_10 (sequence is synthesized)
acaaatcaacgggaaacagcccaggggtgggaagttttcatttgcaggggggtctgaatgtaactcaccatgtggtgtgcaaggttcccctgcattgtattgctcactgcagcccctctg

SEQ ID NO: 212960 - DNA, 120 bp, Artificial Sequence
  ENSG00000115956_11 (sequence is synthesized)
cccctatccatgacccccaagcagatataacaagctgtgcagcctcagtaggctgcttgccctctccaggcctcagggcctcttctggaaaatgaagaaattcaactagtagattcctga

SEQ ID NO: 212961 - DNA, 120 bp, Artificial Sequence
  ENSG00000115956_12 (sequence is synthesized)
ggtccccctagcttaaaaaaaaaaaaaatctgccccatgattctaacactcgcagtagtgatagtgtatctagttgttctgctggtgtccttccttggctaagtcttggccttcagttat

SEQ ID NO: 212962 - DNA, 120 bp, Artificial Sequence
  ENSG00000115956_13 (sequence is synthesized)
cttcaaatgtaccagaacctgagccaacgcctccctgtgaaactgttgctgatctgtagtacagtaccaggaagaaacctcttttgttctctttagacatcttctacttgctcttggcct

SEQ ID NO: 212963 - DNA, 120 bp, Artificial Sequence
  ENSG00000115956_14 (sequence is synthesized)
tgagatcgtgtaacaaaatgaaggagggctctcttctttcttcctcatcctactcaaaaacttcccgagagcagtggtggttttgagggttttgacttctattacttttggcagcctgga

SEQ ID NO: 212964 - DNA, 120 bp, Artificial Sequence
  ENSG00000115956_15 (sequence is synthesized)
aagttgtgtcttctgggaaagagacctggggaggccaggagtagctgagggtcctttctgtgcccttaaaccgcccagaggagccctattccactctggttttaggctgatctgagaggg

SEQ ID NO: 212965 - DNA, 120 bp, Artificial Sequence
  ENSG00000115956_16 (sequence is synthesized)
tctccctttgttcctttctggagcatttctctaacgtttattacaattaggagggggaccccacatctgtgagattctgtttcatttgaggtttacagaaaaaaaaaagtggccagatgt

SEQ ID NO: 212966 - DNA, 120 bp, Artificial Sequence
  ENSG00000115956_17 (sequence is synthesized)
gttccccccatgggtgagaggcctgggcaactgcctggtgaatgtgtcttgcggcagctgcagcaagtggaggggctgaactactggccagctcactggatgatgggttaatacaacaac

SEQ ID NO: 212967 - DNA, 120 bp, Artificial Sequence
  ENSG00000115956_18 (sequence is synthesized)
tgcactgtaaggactcagagccacacagaacttctgagaggggctgttagcattgcgcagcatcttcagttctccagtaaatgatattgcgttcgtgcctcagctttaagcacaagtagc

SEQ ID NO: 212968 - DNA, 120 bp, Artificial Sequence
  ENSG00000115956_19 (sequence is synthesized)
agcagctcctgcttgagttctgagggcatcatggccctatgattaaccagagtgatctaacctagactaaaattgggaacttatttgcaatttttgaccctgaccactaactagtgattc

SEQ ID NO: 212969 - DNA, 120 bp, Artificial Sequence
  ENSG00000115956_20 (sequence is synthesized)
ttctccaaaattgagaaagacagcacccattgaagcagatatgtgtgtgaaagtatatttttcaattccagatttttaattttaaggctccaggaaagaaaggagagtagaacatttttc

SEQ ID NO: 212970 - DNA, 120 bp, Artificial Sequence
  ENSG00000115956_21 (sequence is synthesized)
ctcattttatcaaatcctctcttgccctccctcaattcccctgtaacattcctgaagctgttcccactcccagatggttttatcaatagcctagaggtaaagaactgtctttttctctga

SEQ ID NO: 212971 - DNA, 120 bp, Artificial Sequence
  ENSG00000115956_22 (sequence is synthesized)
ttctttaataaattatctttatagaatatgcacaagtttttctacactcagtgttaaagtatttattaatgggaagtcaacttaatgttttgaaataaatatatgactctgtttaatgca

SEQ ID NO: 212972 - DNA, 120 bp, Artificial Sequence
  ENSG00000115956_23 (sequence is synthesized)
catgctgtcacttttctccaagagggggctcagtggcaaatgttgagctggtgatagtattgccaatgagaaattagcctgccctgctttcaaggatgtgaccatgatatcccaagagaa

SEQ ID NO: 212973 - DNA, 120 bp, Artificial Sequence
  ENSG00000115956_24 (sequence is synthesized)
ggaaggctttgaaggcagacatgtgcctggttaggaagatggagctaaagttaggatacagcttgggagaccctccagaataaaaggatattgacaagatcacacctgagtggagacaag

SEQ ID NO: 212974 - DNA, 120 bp, Artificial Sequence
  ENSG00000115956_25 (sequence is synthesized)
aaaggaacagccccggaagcaagtaaaaggaggaggagaaactcgctcatcaaggacctttgaagttcagattgggatgtacacaggaatggaggaaaaaggaggaggctgccctcatgg

SEQ ID NO: 212975 - DNA, 120 bp, Artificial Sequence
  ENSG00000115963_0 (sequence is synthesized)
aaagccgcgcagagagcgtgaaacaaagcagtcggctcggaattggacttgggaggcgcggtgaggagtcaggcttaaaacttgttggaggggagtaaccagcctgctcctctcgctctc

SEQ ID NO: 212976 - DNA, 120 bp, Artificial Sequence
  ENSG00000115963_1 (sequence is synthesized)
ctcctcgtctgcgccgcgtttcagagagaaaattcctgttccaagagaaaataaggcaacatcaatgaaggagagaagagccagccagaaattatccagcaaatctatcatggatcctaa

SEQ ID NO: 212977 - DNA, 120 bp, Artificial Sequence
  ENSG00000115963_2 (sequence is synthesized)
tcagaacgtgaaatgcaagatagttgtggtgggagacagtcagtgtggaaaaactgcgctgctccatgtcttcgccaaggactgcttccccgagaattacgttcctacagtgtttgagaa

SEQ ID NO: 212978 - DNA, 120 bp, Artificial Sequence
  ENSG00000115963_3 (sequence is synthesized)
ttacacggccagttttgaaatcgacacacaaagaatagagttgagcctgtgggacacttcgggttctccttactatgacaatgtccgccccctctcttaccctgattcggatgctgtgct

SEQ ID NO: 212979 - DNA, 120 bp, Artificial Sequence
  ENSG00000115963_4 (sequence is synthesized)
gatttgctttgacatcagtagaccagagaccctggacagtgtcctcaaaaagtggaaaggtgaaatccaggaattttgtccaaataccaaaatgctcttggtcggctgcaagtctgatct

SEQ ID NO: 212980 - DNA, 120 bp, Artificial Sequence
  ENSG00000115963_5 (sequence is synthesized)
gcggacagatgttagtacattagtagagctctccaatcacaggcagacgccagtgtcctatgaccagggggcaaatatggccaaacagattggagcagctacttatatcgaatgctcagc

SEQ ID NO: 212981 - DNA, 120 bp, Artificial Sequence
  ENSG00000115963_6 (sequence is synthesized)
tttacagtcggaaaatagcgtcagagacatttttcacgttgccaccttggcatgtgtaaataagacaaataaaaacgttaagcggaacaaatcacagagagccacaaagcggatttcaca

SEQ ID NO: 212982 - DNA, 120 bp, Artificial Sequence
  ENSG00000115963_7 (sequence is synthesized)
catgcctagcagaccagaactctcggcagttgctacggacttacgaaaggacaaagcgaagagctgcactgtgatgtgaatctttcattatctttaatgaagacaaaggaatctagtgta

SEQ ID NO: 212983 - DNA, 120 bp, Artificial Sequence
  ENSG00000115963_8 (sequence is synthesized)
aaaaacaacagcaaacaaaaaggtgaagtctaaatgaagtgcacagccaaagtcatgtataccagaggcttaggaggcgtttgagaggatactcatctttttggaatcctgaccttaggt

SEQ ID NO: 212984 - DNA, 120 bp, Artificial Sequence
  ENSG00000115963_9 (sequence is synthesized)
tcggcatgtagaccaagtgatgagaagtgaatacatggaagagtttttaagtgtgacttgaaaaatatgccaaaaaatgagagatacaaatgagctagaggaagatgaggggggatgcga

SEQ ID NO: 212985 - DNA, 120 bp, Artificial Sequence
  ENSG00000115963_10 (sequence is synthesized)
gtacctccaagaagaaaaatcacactctgaatggtgcttgcatttttgggttttttttttttgttataatctattcatggatctccactttgatttaatttttaaatgttttaatctcct

SEQ ID NO: 212986 - DNA, 120 bp, Artificial Sequence
  ENSG00000115963_11 (sequence is synthesized)
tagaggatgtgatctaatttctttctagctcatcattaaaaaggaaattgtatcaggacccatgggatatatccagaggcaaactttatgaggctttgaaatcttgccttcctgaagata

SEQ ID NO: 212987 - DNA, 120 bp, Artificial Sequence
  ENSG00000115963_12 (sequence is synthesized)
gctgagtaggatggttctaaggaaagcctttgcaatcttgcaagatttgtagaccagcactacaaagatcgcatagatcaaataggaaaaaaaatgtcgatttttattcagtctgatggt

SEQ ID NO: 212988 - DNA, 120 bp, Artificial Sequence
  ENSG00000115963_13 (sequence is synthesized)
tctgttcttcattgtgattgtcattaaaaagtggtaaattgctcaatgtaatatttttgtgcgctgtttagaagttgtgtgattttttgccatcgttgataaaaatgcaaagtcaaataa

SEQ ID NO: 212989 - DNA, 120 bp, Artificial Sequence
  ENSG00000115963_14 (sequence is synthesized)
aaggtgtcttggtttgatgtcatagaatgatccaaggagagaaaaaaggtagttactgttttcaccagaaaaggtaatgagtgaaggaaagaatagtagcagaaagcacagtttgtgagt

SEQ ID NO: 212990 - DNA, 120 bp, Artificial Sequence
  ENSG00000115963_15 (sequence is synthesized)
aaagctgtctggaattaagttaccaaaaatacaaagcaaaaggactattattttgggttgaagctccaaaactgacagcatctgataatctgttggtttatttcacttttcattaaatga

SEQ ID NO: 212991 - DNA, 120 bp, Artificial Sequence
  ENSG00000115963_16 (sequence is synthesized)
acattgatgagagaagatgccacttacccaagctttagagaatccctagtggaagattatatgataaactttcagtcctgacataacactagggcatttctagagtgtcattgctaaaac

SEQ ID NO: 212992 - DNA, 120 bp, Artificial Sequence
  ENSG00000115963_17 (sequence is synthesized)
ctcactgaacagatgcagccaaggtctgtgttcagcacttggtctctgttgttacgtaaaataataagcatttaaaatagtttacagatatttttgaccagttccttttagagattcttt

SEQ ID NO: 212993 - DNA, 120 bp, Artificial Sequence
  ENSG00000115963_18 (sequence is synthesized)
cagagaagaaaccagatctgacctgtttattgttggcgcttgttgaaaacgagctttctttcccatgatagtgcttcgtttttgaagtgttgaagctgtgctccccttaaatcgtggcag

SEQ ID NO: 212994 - DNA, 120 bp, Artificial Sequence
  ENSG00000115963_19 (sequence is synthesized)
gagagattaaggtaattacaacactcagttctatgtcttacaagcactttgtcttgtctctgcaagaaaattcgattccagtcatttcccataaaatacagacattttaccaacataata

SEQ ID NO: 212995 - DNA, 120 bp, Artificial Sequence
  ENSG00000115963_20 (sequence is synthesized)
tgctttgattgatgcagcattatgctttgggcagtattacaaaatagctggcgagtgctttctgtatttaaatattgtaaaaagaaaataagttataactgttataaagcagaacttttg

SEQ ID NO: 212996 - DNA, 120 bp, Artificial Sequence
  ENSG00000115963_21 (sequence is synthesized)
ttgcattttttaaactgttgaagtcactgtgtatgtttgtttggtcaatgtttccgcagtatttattaaaacatactttttttttcttcaaataaaaaagtaaccatgtctttgtctaaa

SEQ ID NO: 212997 - DNA, 120 bp, Artificial Sequence
  ENSG00000115963_22 (sequence is synthesized)
gcagtcggctcggaattggacttgggaggcgcggtgaggagtcaggcttaaaacttgttggaggggagtaaccagcctgctcctctcgctctcctcctcgtctgcgccgcgtttcagagg

SEQ ID NO: 212998 - DNA, 120 bp, Artificial Sequence
  ENSG00000115963_23 (sequence is synthesized)
ggaagtgggagttgggtcgtgatgtgacagtcaaaggacttagccggaaagggtagagttaatgcatgacagacaaggggactctcatctgaaaatttgtgtgtctttgtttcttctcag

SEQ ID NO: 212999 - DNA, 120 bp, Artificial Sequence
  ENSG00000115963_24 (sequence is synthesized)
gcttgaaccgctggagcccccgagggacgcgggggttcagagagcaagaggaaggaaccagactgacagggtcgccagaggcagtcccagcacaaaggttctccttactatgacaatgtc

SEQ ID NO: 213000 - DNA, 120 bp, Artificial Sequence
  ENSG00000115963_25 (sequence is synthesized)
aatgctgaaggcaaagcaaaagatggtgattttggataaatgagaaaaaggagagagtaataggaagacaagcaagaatcacaaaaggaagcacgctaggtaatatacgatcctcccaga

SEQ ID NO: 213001 - DNA, 120 bp, Artificial Sequence
  ENSG00000115963_26 (sequence is synthesized)
ctctaatgcttaaaaagtagtaaaacttcacatctgttcaggagataaatgcaaagtttgcttcttcatctcaagggacactccatttttaacatcttttctgagtttcattctaatgtc

SEQ ID NO: 213002 - DNA, 120 bp, Artificial Sequence
  ENSG00000115963_27 (sequence is synthesized)
gaaagtgcgctggaagcttttagggttgggacgcgcctgcacatgggctggttagctcctgaaacttgttcgttcctgtgtgcataacctggggttgggagattcgggtcagcagatctg

SEQ ID NO: 213003 - DNA, 120 bp, Artificial Sequence
  ENSG00000115966_0 (sequence is synthesized)
gtcagtccgatctcgcgagagaggacggaagcctgtgggagcccgtggcctttaaagtgccgttcagccttttcctccaggggtgctttgtaaacacggctgtgctcagggctcgcgggt

SEQ ID NO: 213004 - DNA, 120 bp, Artificial Sequence
  ENSG00000115966_1 (sequence is synthesized)
gaccgaaaggatcatgaactagtgacctggaaagggtactagatggaaacttgagaaaggactgcttattgataacagctaaggtattcctggaagcagagtaaataaagctcatggccc

SEQ ID NO: 213005 - DNA, 120 bp, Artificial Sequence
  ENSG00000115966_2 (sequence is synthesized)
accagctagaaagtattcttgccatgagaaaaagaatgtgataagttattcaacttatgaaattcaagttacatgtgaattctgccaggcaatacaaggacctgtggaatatgagtgatg

SEQ ID NO: 213006 - DNA, 120 bp, Artificial Sequence
  ENSG00000115966_3 (sequence is synthesized)
acaaaccctttctatgtactgcgcctggatgtggccagcgttttaccaacgaggatcatttggctgtccataaacataaacatgagatgacactgaaatttggtccagcacgtaatgaca

SEQ ID NO: 213007 - DNA, 120 bp, Artificial Sequence
  ENSG00000115966_4 (sequence is synthesized)
gtgtcattgtggctgatcagaccccaacaccaacaagattcttgaaaaactgtgaagaagtgggtttgtttaatgagttggcgagtccatttgagaatgaattcaagaaagcttcagaag

SEQ ID NO: 213008 - DNA, 120 bp, Artificial Sequence
  ENSG00000115966_5 (sequence is synthesized)
atgacattaaaaaaatgcctctagatttatcccctcttgcaacacctatcataagaagcaaaattgaggagccttctgttgtagaaacaactcaccaggatagtcctttacctcacccag

SEQ ID NO: 213009 - DNA, 120 bp, Artificial Sequence
  ENSG00000115966_6 (sequence is synthesized)
agtctactaccagtgatgagaaggaagtaccattggcacaaactgcacagcccacatcagctattgttcgtccagcatcattacaggttcccaatgtgctgcttacaagttctgactcaa

SEQ ID NO: 213010 - DNA, 120 bp, Artificial Sequence
  ENSG00000115966_7 (sequence is synthesized)
gtgtaattattcagcaggcagtaccttcaccaacctcaagtactgtaatcacccaggcaccatcctctaacaggccaattgtccctgtaccaggcccatttcctcttctgttacatcttc

SEQ ID NO: 213011 - DNA, 120 bp, Artificial Sequence
  ENSG00000115966_8 (sequence is synthesized)
ctaatggacaaaccatgcctgttgctattcctgcatcaattacaagttctaatgtgcatgttccagctgcagtcccactcgttcgaccagtcaccatggtgcctagtgttccaggaatcc

SEQ ID NO: 213012 - DNA, 120 bp, Artificial Sequence
  ENSG00000115966_9 (sequence is synthesized)
caggtccttcctctccccaaccagtacagtcagaagcaaaaatgagattaaaagctgctttgacccagcaacatcctccagttaccaatggtgatactgtcaaaggtcatggtagcggat

SEQ ID NO: 213013 - DNA, 120 bp, Artificial Sequence
  ENSG00000115966_10 (sequence is synthesized)
tggttaggactcagtcagaggaatctcgaccgcagtcattacaacagccagccacatccactacagaaactccggcttctccagctcacacaactccacagacccaaagtacaagtggtc

SEQ ID NO: 213014 - DNA, 120 bp, Artificial Sequence
  ENSG00000115966_11 (sequence is synthesized)
gtcggagaagagcagctaacgaagatcctgatgaaaaaaggagaaagtttttagagcgaaatagagcagcagcttcaagatgccgacaaaaaaggaaagtctgggttcagtctttagaga

SEQ ID NO: 213015 - DNA, 120 bp, Artificial Sequence
  ENSG00000115966_12 (sequence is synthesized)
agaaagctgaagacttgagttcattaaatggtcagctgcagagtgaagtcaccctgctgagaaatgaagtggcacagctgaaacagcttcttctggctcataaagattgccctgtaaccg

SEQ ID NO: 213016 - DNA, 120 bp, Artificial Sequence
  ENSG00000115966_13 (sequence is synthesized)
ccatgcagaagaaatctggctatcatactgctgataaagatgatagttcagaagacatttcagtgccgagtagtccacatacagaagctatacagcatagttcggtcagcacatccaatg

SEQ ID NO: 213017 - DNA, 120 bp, Artificial Sequence
  ENSG00000115966_14 (sequence is synthesized)
gagtcagttcaacctccaaggcagaagctgtagccacttcagtcctcacccagatggcggaccagagtacagagcctgctctttcacagatcgttatggctccttcctcccagtcacagc

SEQ ID NO: 213018 - DNA, 120 bp, Artificial Sequence
  ENSG00000115966_15 (sequence is synthesized)
cctcaggaagttgattaaaaacctgcagtacaacagttttagatactcattagtgacttcaaagggaaatcaaggaaagaccagtttccatttatgcgaaatctgtggttgtaaattttt

SEQ ID NO: 213019 - DNA, 120 bp, Artificial Sequence
  ENSG00000115966_16 (sequence is synthesized)
tttttttacttgaaattaaatttggctctaaagttggtgtagcagcagttgatcagactgaaaaacggtttttagtctctggaaaaagactgattttgctttttttataaatattattag

SEQ ID NO: 213020 - DNA, 120 bp, Artificial Sequence
  ENSG00000115966_17 (sequence is synthesized)
ataaatgggggtgttactgaatctttcttcccacttccatttcttttgaccaccccttaaccctcaactgtgacggtagtagtattatcatttataccaaagttttgcatagtccctgtt

SEQ ID NO: 213021 - DNA, 120 bp, Artificial Sequence
  ENSG00000115966_18 (sequence is synthesized)
gactttgtaatgttaacggagtcataaaagcactaggcaagagaaagatagaaatttgcttttaatctttttgccttttattttgcacattatgcaaaaggaaaaacattaaagaacact

SEQ ID NO: 213022 - DNA, 120 bp, Artificial Sequence
  ENSG00000115966_19 (sequence is synthesized)
tttttttaagtgagtgaaaacatggtaaagacatacagtgcttttatgcacattgttaagctaaatcaaggtcatttataatcattttccttttttatttaagattttaagtaaacaaat

SEQ ID NO: 213023 - DNA, 120 bp, Artificial Sequence
  ENSG00000115966_20 (sequence is synthesized)
tttagaattttcagcatttcaaaaatgattttatttttcaagtcttaaattcaatattttacacctatgttttgaggctaaaaatatgaaattatataatgtatgatacagggttatcaa

SEQ ID NO: 213024 - DNA, 120 bp, Artificial Sequence
  ENSG00000115966_21 (sequence is synthesized)
atatctaataatttttgaaattagctcttgtttttggtttttttgttgttgtttttacagatttcaggttacaaactgcaaagtttatgcataattaagtatggtatggttgccagaaaa

SEQ ID NO: 213025 - DNA, 120 bp, Artificial Sequence
  ENSG00000115966_22 (sequence is synthesized)
gcctaaaattactacttagaaaatttaagactgtttacccccattgtcttgtacttgcgagctaacttgtactattcttgtgaaagcactgtcatcttttagtagcaaattttgataatg

SEQ ID NO: 213026 - DNA, 120 bp, Artificial Sequence
  ENSG00000115966_23 (sequence is synthesized)
tttctcgtggaaaaaaaaatcagtatctatctttagaacaatgtaattataatgtgggaagtgtgcatgaatgagagagagtgtgtgtgtatctgtgtgtgtgtgcgcgtgtgtgtgtgt

SEQ ID NO: 213027 - DNA, 120 bp, Artificial Sequence
  ENSG00000115966_24 (sequence is synthesized)
cttttaatagtttatgccagcaatctttgcttgaatgtttaacgatgccttcagtgtgatgctggccaatagatgattgcagtttaaaatgtcattattgtgcaggcttggataactaac

SEQ ID NO: 213028 - DNA, 120 bp, Artificial Sequence
  ENSG00000115966_25 (sequence is synthesized)
attccatgatgtagcttgtttctgatgagatgattgtaggtacatttttctcattatccaatcatctgtgggatacttagttttctaatgtgccattatctatttttattctgcagttat

SEQ ID NO: 213029 - DNA, 120 bp, Artificial Sequence
  ENSG00000115966_26 (sequence is synthesized)
gttcaaaatacagtacatattttaaaatagaataaattgttaaacataaaattttaaaagtagtagatgtgcgtaagaaaactttgtaaaatagttatgagtcctacccagtagcaactt

SEQ ID NO: 213030 - DNA, 120 bp, Artificial Sequence
  ENSG00000115966_27 (sequence is synthesized)
ctggcattcaagcaggattccactatgtaaatatctgtaatgcatttataataagttgtgtagtttgtcctgcatccatactacactatttgctaaagtctcagtgccatctcctaatga

SEQ ID NO: 213031 - DNA, 120 bp, Artificial Sequence
  ENSG00000115966_28 (sequence is synthesized)
gactgacattttaaaagtctgtatggaatatccttgataattcaaggaaatatccctcctgcctaagttccaaactgggaaacattcaaattatataaatgacatttcaggactttaagt

SEQ ID NO: 213032 - DNA, 80 bp, Artificial Sequence
  ENSG00000115966_29 (sequence is synthesized)
gacatttcaggactttaagtatgaagataatgggaattttattgttttgctttttaaaatgagagcatttttatttgata

SEQ ID NO: 213033 - DNA, 120 bp, Artificial Sequence
  ENSG00000115966_30 (sequence is synthesized)
aatcatgattttgatatcattattctaaggagttatctcaaaggcacaaaatatgaattctgcaagaaggctattttttattgtagtttgaatgggttaggaaaagcctcaatttttcac

SEQ ID NO: 213034 - DNA, 120 bp, Artificial Sequence
  ENSG00000115966_31 (sequence is synthesized)
tcttaagtccttcagtacatttttctttcatcttattacttatgcaagttaaggttctttggtaacagaattcttgcaactgtaaaataaaactacatagatgtaagaagtcatgtaaac

SEQ ID NO: 213035 - DNA, 120 bp, Artificial Sequence
  ENSG00000115966_32 (sequence is synthesized)
ggttaacaagcttaccaaggttagcaaaactttcattgtaaatcagtctgtactgagcaaataaaaatcattattagttgtataaacacaaattccattttgactttcaggatgtcatac

SEQ ID NO: 213036 - DNA, 120 bp, Artificial Sequence
  ENSG00000115966_33 (sequence is synthesized)
tacttctgtacctagcattttcagtccttatatttgcaatgttacacaaactgtactattttcttttatgtgcagtttgcatgagtaaaccatcagagaataaattctatctttaaatta

SEQ ID NO: 213037 - DNA, 120 bp, Artificial Sequence
  ENSG00000115966_34 (sequence is synthesized)
gatgcccgtcccctctacccgccctgccgaagacccgccttcttctccttaagcctgacggaatcacctgactcggaggcgctccctcagaaggaagggtactagatggaaacttgagaa

SEQ ID NO: 213038 - DNA, 89 bp, Artificial Sequence
  ENSG00000115966_35 (sequence is synthesized)
actctgtcacccgggctggagtgcagtagcatgatcatgacacactgaagcctcaacctcctgggctcaggatctctcaatgttgtcat

SEQ ID NO: 213039 - DNA, 120 bp, Artificial Sequence
  ENSG00000115966_36 (sequence is synthesized)
cacccaggcaccatcctctaacaggccaattgtgtaagtgattcaggccaatcattgaacatatacatgaattaagtttgttttgtaatgatttttcctaagacatttgattattcaaac

SEQ ID NO: 213040 - DNA, 120 bp, Artificial Sequence
  ENSG00000115966_37 (sequence is synthesized)
taagatcttagttttgtatgtgtgtgcatgcttcgaattttggaaaaagtacttgcgtagtcttctttaatataaatattaactaacagagtgggagataaatacaactaaaaacaaata

SEQ ID NO: 213041 - DNA, 120 bp, Artificial Sequence
  ENSG00000115966_38 (sequence is synthesized)
tagaatgtgaatttaagatagtcttattttcatgctatttcacacaaaatataaaattactgcatcaccagattccatttctttcagttcttactggtagctcccaagagctctctgatg

SEQ ID NO: 213042 - DNA, 120 bp, Artificial Sequence
  ENSG00000115966_39 (sequence is synthesized)
acagtttttctcattttacaaattggagattgtcctaagtaaatccataacttttctcttcttttcaatactgctacacaggttatgcatttaagatgcaattaaaaataattaaatttt

SEQ ID NO: 213043 - DNA, 120 bp, Artificial Sequence
  ENSG00000115966_40 (sequence is synthesized)
tcagtgaaataccgtcagagtgaactgagctgctactttaaaaatggagactgtgcttctaatattcaagattaaatatcagaatttctgtaaggttattatagaatgcagtagagaggt

SEQ ID NO: 213044 - DNA, 120 bp, Artificial Sequence
  ENSG00000115966_41 (sequence is synthesized)
ataattttttagaatctagagagtttgagttttcctgtttctagcttttttcctaagcgttactatagatcaacaaaatggattagctaataatttaaaatatactgtaagtacttgatg

SEQ ID NO: 213045 - DNA, 120 bp, Artificial Sequence
  ENSG00000115966_42 (sequence is synthesized)
atattttgttcatcttctcaggataacactttgtcttagattgacagggtgaaacactacttttttcccagcctccgttcattaatgatgatatttttctttttaaaatcagctgactgc

SEQ ID NO: 213046 - DNA, 120 bp, Artificial Sequence
  ENSG00000115966_43 (sequence is synthesized)
cgccatgcagaagaaatctggctatcatacaaatatttcttcagctctattccataaggcagtgggcacccagatgtttccatatgcatggttgtgccttcttttgacctattgcaggaa

SEQ ID NO: 213047 - DNA, 120 bp, Artificial Sequence
  ENSG00000115966_44 (sequence is synthesized)
atgagagatagtattactcaaatcatccattttgctggcttggagtgaacaaacaacttgattctgtaatccctgaagtacagctaatgcaatatgtgtttctagggccagcctttggac

SEQ ID NO: 213048 - DNA, 120 bp, Artificial Sequence
  ENSG00000115970_0 (sequence is synthesized)
ggaccaggcgcctgcgactcttctcagacgccgacgtgcacgaggtttggctcccaggtgtcctgcctgccagacccgcggtagctcggctcggccagttttgctagggctgcctggcga

SEQ ID NO: 213049 - DNA, 120 bp, Artificial Sequence
  ENSG00000115970_1 (sequence is synthesized)
gccacaccaattcccatcctttggtatcgccaggattcggcggctgtgaaactgatttccggtcgctaaggtctccatggagacagcactttaaccactttctcccactgtcattcctcg

SEQ ID NO: 213050 - DNA, 120 bp, Artificial Sequence
  ENSG00000115970_2 (sequence is synthesized)
actccacgtggttcagaaatcgcccagagaatgtttgtgggagtcagccaggaaggtgtagagtgaagcagcgttctaaagggaagcatgactactattaattctatttaaaatgggtgt

SEQ ID NO: 213051 - DNA, 120 bp, Artificial Sequence
  ENSG00000115970_3 (sequence is synthesized)
aaagaagaagaaagaaatgcaagttgctgcgctgaccatttgccatcaggaccttgaaactttgaaatcttttgctgatgtggaagggaaaaatctagcttctttgctgttacattgtgt

SEQ ID NO: 213052 - DNA, 120 bp, Artificial Sequence
  ENSG00000115970_4 (sequence is synthesized)
gcaactcacggatggagtgtcacaaatccattatattaaacagattgtgcctctgctggagaaagcagataaaaatggcatgtgtgatcccactattcaaagttgtttggatatcttagc

SEQ ID NO: 213053 - DNA, 120 bp, Artificial Sequence
  ENSG00000115970_5 (sequence is synthesized)
aggcatttatctttctttgagtctaaagaatcccttgaagaaagtattggcaagctcactaaatagcctgcctgatttttttctacctgaggctatgcaccgttttacttctcgtcttca

SEQ ID NO: 213054 - DNA, 120 bp, Artificial Sequence
  ENSG00000115970_6 (sequence is synthesized)
ggaagaattgaatactactgacttatactcttacaggaaagttactgacaatatttcttcctgtatggagaactttaacttgggtagagcaagtgttaataatctgcttaaaaatgtgct

SEQ ID NO: 213055 - DNA, 120 bp, Artificial Sequence
  ENSG00000115970_7 (sequence is synthesized)
tcattttctgcagaagagtttaattgaaatcctggaagaaaatagaaaatgtgctggaaatcatattattcaaacacagttgatgaatgacttactggtaggcattagagtttcaatgat

SEQ ID NO: 213056 - DNA, 120 bp, Artificial Sequence
  ENSG00000115970_8 (sequence is synthesized)
gttagtacagaaagtacaagatttccagggaaatctttggaagacttccgattctcccatatggcaaaatatgtgtggattgctgagtatttttaccaaggttttaagcgatgatgatct

SEQ ID NO: 213057 - DNA, 120 bp, Artificial Sequence
  ENSG00000115970_9 (sequence is synthesized)
gttacagactgtacagagcacatctggattagctattattctttttattaagactatgtttcacccgtctgaaaagattcctcatttgattagcagtgtgctgcttcgttcagtggactg

SEQ ID NO: 213058 - DNA, 120 bp, Artificial Sequence
  ENSG00000115970_10 (sequence is synthesized)
caccagtgtccccgagtggtttatgagcagctgcaggagcctctgttgtggtgacatctctcagtcagctgtcttattcctctgtcaggggacacttgccatgttggactggcagaacgg

SEQ ID NO: 213059 - DNA, 120 bp, Artificial Sequence
  ENSG00000115970_11 (sequence is synthesized)
aagcatgggtcggagtggggaggccctgctcttggatactgcacatgttttgttcaccttgagttcacagattaaagagccaacgctggaaatgtttctgtctagaatcttagcatcctg

SEQ ID NO: 213060 - DNA, 120 bp, Artificial Sequence
  ENSG00000115970_12 (sequence is synthesized)
gactaattcagccatacaagtccttgaatcaagttccccgagcctaacggacagcctgaatgggaattcaagtatagttgggagacttttggaatatgtctatacccattgggaacatcc

SEQ ID NO: 213061 - DNA, 120 bp, Artificial Sequence
  ENSG00000115970_13 (sequence is synthesized)
attggatgctctgagacaccaaaccaaaatcatgttcaaaaaccttctccaaatgcaccggctcactgtggaaggtgcagatttcgtccctgatcctttctttgtggaattgactgagag

SEQ ID NO: 213062 - DNA, 120 bp, Artificial Sequence
  ENSG00000115970_14 (sequence is synthesized)
tcttttacgattggaatggcatattaaaggaaagtacacgtgccttggttgtttggtagagtgcataggagttgaacatattttggctatagataaaactattccatctcaaatcttaga

SEQ ID NO: 213063 - DNA, 120 bp, Artificial Sequence
  ENSG00000115970_15 (sequence is synthesized)
ggtgatgggagaccagtcattggtaccttatgcaagtgacctcttggaaaccatgtttagaaatcataagagtcatttgaaatcccagactgctgagagttcttggattgaccagtggca

SEQ ID NO: 213064 - DNA, 120 bp, Artificial Sequence
  ENSG00000115970_16 (sequence is synthesized)
tgagacttgggtttctcctctcctttttatattgtgtgaaggaaacttggatcaaaaatcttacgtgattgattattacttgccaaaattattaagttacagccctgaaagcttacagta

SEQ ID NO: 213065 - DNA, 120 bp, Artificial Sequence
  ENSG00000115970_17 (sequence is synthesized)
catggtaaagattcttcagacttctattgatgctaaaactggacaagagcaatctttcccatccttagggtcttgtaatagcaggggggctctgggagctttgatggcatgtctgcgaat

SEQ ID NO: 213066 - DNA, 120 bp, Artificial Sequence
  ENSG00000115970_18 (sequence is synthesized)
agctagagctcatggacatcttcagtctgcaactgatacctgggagaacctcgtgtctgatgcaagaataaagcaaggcttaattcatcagcattgccaagtaaggatagatacattagg

SEQ ID NO: 213067 - DNA, 120 bp, Artificial Sequence
  ENSG00000115970_19 (sequence is synthesized)
cttgctttgtgaaagtaatcggagcacagaaattgtttccatggaagaaatgcagtggattcagttctttattacatacaatcttaacagccagtctccaggagtgcggcaacagatctg

SEQ ID NO: 213068 - DNA, 120 bp, Artificial Sequence
  ENSG00000115970_20 (sequence is synthesized)
ttctcttcttaaaaagttgttttgtaggatacaggaaagttctcaggtactttataaattggagcagagtaaatccaaacgtgaaccagagaatgagttaaccaaacagcacccttctgt

SEQ ID NO: 213069 - DNA, 120 bp, Artificial Sequence
  ENSG00000115970_21 (sequence is synthesized)
ttctttacagcagtataagaatttcatgtcatccatttgtaacagtctttttgaagcattgtttcctggatcttcctactcgactagattttcagctttaaccattttaggttcaatagc

SEQ ID NO: 213070 - DNA, 120 bp, Artificial Sequence
  ENSG00000115970_22 (sequence is synthesized)
tgaagtttttcatgtcccagaaggcagaatttatacagtatatcagctgagtcatgatattgatgttggtcgtttccaaacactaatggaatgttttaccagcacttttgaagacgtgaa

SEQ ID NO: 213071 - DNA, 120 bp, Artificial Sequence
  ENSG00000115970_23 (sequence is synthesized)
aattttagcatttgatcttctgatgaagttatcaaaaacagctgtacattttcaggattcggggaaactgcaaggcttatttcaggcagcattggagctcagcacaagcaccaaaccata

SEQ ID NO: 213072 - DNA, 120 bp, Artificial Sequence
  ENSG00000115970_24 (sequence is synthesized)
cgactgtgtgacagcttcctacctgctgaacttcttaatctggcaggatgctctaccgtcatccttgtctgcctacttaactcagcaagttgcatgtgataatggagataggcctgctgc

SEQ ID NO: 213073 - DNA, 120 bp, Artificial Sequence
  ENSG00000115970_25 (sequence is synthesized)
tgtggtggaaaggaacacattaatggttatcaaatgcttgatggaaaatcttgaggaagaagtatctcaggctgaaaattctctgcttcaggcagcagcagcatttccaatgtatgggcg

SEQ ID NO: 213074 - DNA, 120 bp, Artificial Sequence
  ENSG00000115970_26 (sequence is synthesized)
cctgtggtagagaagctccttttgatgtcctacaggctttccactgtggtgtctccagtcattcagagctcatcccctgaaggcctcatcccaatggacactgattcagagtcagcaagc

SEQ ID NO: 213075 - DNA, 120 bp, Artificial Sequence
  ENSG00000115970_27 (sequence is synthesized)
cgcttacagatgattctgaatgagattcagcctcgagatactaatgattattttaaccaagccaaaatattgaaagaacatgatagctttgatatgaaggacttgaatgctagtgtggtg

SEQ ID NO: 213076 - DNA, 120 bp, Artificial Sequence
  ENSG00000115970_28 (sequence is synthesized)
aatattgatacttctacagaaatcaaaggtaaagaagtaaaaacatgtgatgtaactgcgcagatggtgctggtatgttgttggagaagtatgaaggaagttgctttacttttaggcatg

SEQ ID NO: 213077 - DNA, 120 bp, Artificial Sequence
  ENSG00000115970_29 (sequence is synthesized)
ttgtgccagcttctgcccatgcagcctgtgccagaatcttctgatggattattgacggtggagcaggtaaaagaaataggagattactttaaacaacaccttttgcagtccaggcacaga

SEQ ID NO: 213078 - DNA, 120 bp, Artificial Sequence
  ENSG00000115970_30 (sequence is synthesized)
ggagcatttgaattggcttatactggttttgtgaaactcactgaagtactaaacaggtgcccaaatgtgagtctgcaaaagctgccagaacagtggctatggagtgttttagaggaaatt

SEQ ID NO: 213079 - DNA, 120 bp, Artificial Sequence
  ENSG00000115970_31 (sequence is synthesized)
aaatgcagtgatccttcatctaaactctgtgctacaaggcgcagtgctggaattcctttctacatacaggcactgttggcatctgaaccaaagaaaggcagaatggatttgttgaaaata

SEQ ID NO: 213080 - DNA, 120 bp, Artificial Sequence
  ENSG00000115970_32 (sequence is synthesized)
acaatgaaagagttaatctctttggctgggcctacagatgacatacagagtacagtcccccaggttcatgctttaaatatccttagagcattgttcagagatacgcgcctgggagaaaat

SEQ ID NO: 213081 - DNA, 120 bp, Artificial Sequence
  ENSG00000115970_33 (sequence is synthesized)
attattccttatgttgctgatggagctaaggctgcaattctgggttttacatcaccggtctgggcagtgcgaaattcatccacacttctctttagtgccttgatcacaagaatttttgga

SEQ ID NO: 213082 - DNA, 120 bp, Artificial Sequence
  ENSG00000115970_34 (sequence is synthesized)
gttaaaagggcaaaggatgaacattccaaaacaaatagaatgacagggagagagtttttctctcgtttcccagaactctatccttttcttctcaaacagttggaaactgtagccaataca

SEQ ID NO: 213083 - DNA, 120 bp, Artificial Sequence
  ENSG00000115970_35 (sequence is synthesized)
gtagacagtgatatgggagaaccaaatcgtcatccaagcatgtttctcttacttttggtgttggagagactctacgcttccccgatggatggtacttcttctgctctcagcatgggacct

SEQ ID NO: 213084 - DNA, 120 bp, Artificial Sequence
  ENSG00000115970_36 (sequence is synthesized)
tttgttcccttcattatgaggtgtggtcactcacctgtctaccactcccgtgaaatggcagctcgtgccttggtcccatttgttatgatagatcacattcctaataccattcgaactctg

SEQ ID NO: 213085 - DNA, 120 bp, Artificial Sequence
  ENSG00000115970_37 (sequence is synthesized)
ttgtccacactccccagctgcactgaccagtgtttccggcaaaaccacattcatgggacacttctccaggtttttcatttgttgcaagcctactcagactccaaacacggaacgaattca

SEQ ID NO: 213086 - DNA, 120 bp, Artificial Sequence
  ENSG00000115970_38 (sequence is synthesized)
gacttccagcacgagctgactgacatcactgtttgtaccaaagccaaactctggctggccaagaggcaaaatccatgtttggtgaccagagctgtatatattgatattctcttcctattg

SEQ ID NO: 213087 - DNA, 120 bp, Artificial Sequence
  ENSG00000115970_39 (sequence is synthesized)
acttgctgcctcaacagatctgcaaaggacaaccagccagttctggagagtcttggcttctgggaggaagtcagagggattatctcaggatcagagctgataacgggattcccttgggcc

SEQ ID NO: 213088 - DNA, 120 bp, Artificial Sequence
  ENSG00000115970_40 (sequence is synthesized)
ttcaaggtgccaggcctgccccagtacctccagagcctcaccagactagccattgctgcagtgtgggccgcggcagccaagagtggagagcgggagacgaatgtccccatctctttctct

SEQ ID NO: 213089 - DNA, 120 bp, Artificial Sequence
  ENSG00000115970_41 (sequence is synthesized)
cagctgttagaatctgccttccctgaagtgcgctcactaacactggaagccctcttggaaaagttcttagcagcagcctctggacttggagagaagggcgtgccacccttgctgtgcaac

SEQ ID NO: 213090 - DNA, 120 bp, Artificial Sequence
  ENSG00000115970_42 (sequence is synthesized)
atgggagagaagttcttattgttggccatgaaggaaaatcacccagaatgcttctgcaagatactgaaaattctccactgcatggaccctggtgagtggcttccccagacggagcactgt

SEQ ID NO: 213091 - DNA, 120 bp, Artificial Sequence
  ENSG00000115970_43 (sequence is synthesized)
gtccatctgaccccaaaggagttcttgatctggacgatggatattgcttccaatgaaagatctgaaattcagagtgtagctctgagacttgcttccaaagtcatttcccaccacatgcag

SEQ ID NO: 213092 - DNA, 120 bp, Artificial Sequence
  ENSG00000115970_44 (sequence is synthesized)
acatgtgtggagaacagggaattgatagctgctgagctgaagcagtgggttcagctggtcatcttgtcatgtgaagaccatcttcctacagagtctaggctggccgtcgttgaagtcctc

SEQ ID NO: 213093 - DNA, 120 bp, Artificial Sequence
  ENSG00000115970_45 (sequence is synthesized)
accagtactacaccacttttcctcaccaacccccatcctattcttgagttgcaggatacacttgctctctggaagtgtgtccttacccttctgcagagtgaggagcaagctgttagagat

SEQ ID NO: 213094 - DNA, 120 bp, Artificial Sequence
  ENSG00000115970_46 (sequence is synthesized)
gcagccacggaaaccgtgacaactgccatgtcacaagaaaatacctgccagtcaacagagtttgccttctgccaggtggatgcctccatcgctctggccctggccctggccgtcctgtgt

SEQ ID NO: 213095 - DNA, 120 bp, Artificial Sequence
  ENSG00000115970_47 (sequence is synthesized)
gatctgctccagcagtgggaccagttggcccctggactgcccatcctgctgggatggctgttgggagagagtgatgacctcgtggcctgtgtggagagcatgcatcaggtggaagaagac

SEQ ID NO: 213096 - DNA, 120 bp, Artificial Sequence
  ENSG00000115970_48 (sequence is synthesized)
tacctgtttgaaaaagcagaagtcaacttttgggccgagaccctgatctttgtgaaatacctctgcaagcacctcttctgtctcctctcaaagtccggctggcgtcccccaagccctgag

SEQ ID NO: 213097 - DNA, 120 bp, Artificial Sequence
  ENSG00000115970_49 (sequence is synthesized)
atgctctgtcaccttcaaaggatggtgtcagagcagtgccacctcctgtctcagttcttcagagagcttccaccagctgctgagtttgtgaagacagtggagttcacaagactacgcatt

SEQ ID NO: 213098 - DNA, 120 bp, Artificial Sequence
  ENSG00000115970_50 (sequence is synthesized)
caagaggaaaggactttggcttgcttgaggctgctggcctttttggaaggaaaggaaggggaagacaccctagttctcagtgtttgggactcttatgcagaatcgaggcagttaactctt

SEQ ID NO: 213099 - DNA, 120 bp, Artificial Sequence
  ENSG00000115970_51 (sequence is synthesized)
ccaagaacagaagcggcatgttgaagaaaatctgggggattgggatgggggtatgtgtggatttttcctccactaaatctgcaggaaacatgttgaacataaattcaaaaattttatccc

SEQ ID NO: 213100 - DNA, 120 bp, Artificial Sequence
  ENSG00000115970_52 (sequence is synthesized)
gacccggtagtcgaccgtggaccgcgctgcgagcctcggagacgccgtagaaggagacctgcttccgggactggaccaggcgcctgcgactcttctcagacgccgacgtgcacgagtgac

SEQ ID NO: 213101 - DNA, 120 bp, Artificial Sequence
  ENSG00000115970_53 (sequence is synthesized)
ctattcccttcttccctaaaaaagtcattatgcttcatatttaagttttaagctaatgtttattgaaatgcatttttgtgtgatggaactaaatcttaggaattaaaaaaatatgaaatc

SEQ ID NO: 213102 - DNA, 120 bp, Artificial Sequence
  ENSG00000115970_54 (sequence is synthesized)
acttttcctgtgagcatttgagcttgtgactctaagggcattgctttcaggaagctgttttctaaatcttaacgttacttttagtgatctttctacttatattgctatttaacacaccat

SEQ ID NO: 213103 - DNA, 120 bp, Artificial Sequence
  ENSG00000115970_55 (sequence is synthesized)
gtggttatgtcacttacttaattagagtataaggtctgtaataccagtaagtatgtgttttctgtttctggatcttatccatggtgctggtatagggccttacacactgtagcaaggtgc

SEQ ID NO: 213104 - DNA, 120 bp, Artificial Sequence
  ENSG00000115970_56 (sequence is synthesized)
tgatggattattgacggtggagcaggtaaattttcgcaagcaacaggacagtaagatgacttgctactgaactttttcttaaatgattgattccctagagcacttcctgtgaagcagtgt

SEQ ID NO: 213105 - DNA, 120 bp, Artificial Sequence
  ENSG00000115970_57 (sequence is synthesized)
ctgcctcctgtctcagaaatccattcatttctgagctttaacctctggttggaatgtgtcctgggaaaggaatgcagtctattgctttgaataaaattgaaaatcagatttaaaaacata

SEQ ID NO: 213106 - DNA, 120 bp, Artificial Sequence
  ENSG00000115970_58 (sequence is synthesized)
agatttattctttctttttgaagacttgtgttagtgtgaaaggagaaaaatcttaagttgctagaaaggtccctagtccaagaagggttaaggcagagtttctccagtggcgtggctatg

SEQ ID NO: 213107 - DNA, 120 bp, Artificial Sequence
  ENSG00000115970_59 (sequence is synthesized)
gtttgctcttatcaaaacgaatagcttagtctcagtattcatttggttagaatatctaatggttaaacatatattttgtggttttttatttaaaagtttatcagcatataagagcaccat

SEQ ID NO: 213108 - DNA, 120 bp, Artificial Sequence
  ENSG00000115970_60 (sequence is synthesized)
gggttctcattatgcaaatgaacattttagtcagctataatacttttttctaaacagtggatttatgttgaataagtacatatacaaatatttattaataaagctcttttgaaatgagaa

SEQ ID NO: 213109 - DNA, 120 bp, Artificial Sequence
  ENSG00000115970_61 (sequence is synthesized)
agacgccgtagaaggagacctgcttccgggactggaccaggcgcctgcgactcttctcagacgccgacgtgcacgagaaatcaggacacggtagtacctcctcttagtctaatgagtcac

SEQ ID NO: 213110 - DNA, 120 bp, Artificial Sequence
  ENSG00000115970_62 (sequence is synthesized)
acattttgctttatttgaagtttcagttttgttgcctttctttgaggtttcattcttaccttataattcttgcttgtacataatgaaatttgctagtaaaggacagaagaggaagaaact

SEQ ID NO: 213111 - DNA, 120 bp, Artificial Sequence
  ENSG00000115970_63 (sequence is synthesized)
atctcccttttcattgatcattatttgccaaccccaaagtataattttcatggattatgcttattatggaaagagttccagctattacctcactaatttgtttgttgctgttttaagata

SEQ ID NO: 213112 - DNA, 120 bp, Artificial Sequence
  ENSG00000115970_64 (sequence is synthesized)
gtatccaatctgttctttaagttttaaaatttgaaataataatagcttctattatatttaatatttctcagtgagtctctgtggttaaaatgtggtttcctttacatgccgtctgtttca

SEQ ID NO: 213113 - DNA, 120 bp, Artificial Sequence
  ENSG00000115970_65 (sequence is synthesized)
tgtgcctcagtctggtttcggaaagacaatatgaggatgtaatttccaagtattctgatttaataataccctttgtttttccttctgtgtggttctcaagagggtcaaatttcagttccc

SEQ ID NO: 213114 - DNA, 120 bp, Artificial Sequence
  ENSG00000115970_66 (sequence is synthesized)
ttctcaagagggtcaaatttcagttccctctttgaatcttttttttttgtttcattttttcctttttgacaagaaatgattcctttttttttattttgagacagagtctagctctgttgc

SEQ ID NO: 213115 - DNA, 80 bp, Artificial Sequence
  ENSG00000115970_67 (sequence is synthesized)
agattacaggcgtgagccaccgtgtcctgctgaaatgattcttttttccctgtatatgtgtgtatatgtgttagaatgtg

SEQ ID NO: 213116 - DNA, 120 bp, Artificial Sequence
  ENSG00000115970_68 (sequence is synthesized)
gctgctccttcacagggaatggccaaagcatgagggagctttacactatcattggattcttttttattttaaattattgggcaaagtgtaattttttgacaggaggacagttagctaatg

SEQ ID NO: 213117 - DNA, 120 bp, Artificial Sequence
  ENSG00000115970_69 (sequence is synthesized)
taaaagaggcttgcttcatttggggaaaatcagtttttaaaagtttttattctgaaaaaatttaaatcagcagcaaagtttcaagactggttcaatgaatagctatttatgctctaccta

SEQ ID NO: 213118 - DNA, 63 bp, Artificial Sequence
  ENSG00000115970_70 (sequence is synthesized)
atgctctacctagattacagtggcatgatcaccgtgacctctgcctcctgggttcaagcagtt

SEQ ID NO: 213119 - DNA, 120 bp, Artificial Sequence
  ENSG00000115970_71 (sequence is synthesized)
gtgtgagccaccgcacctggccaattcatcagttattaatattttgcaatatttgctatatctgtgtcctttattaattctataaccataacacaatgatcaaattcaggaaattgaatg

SEQ ID NO: 213120 - DNA, 120 bp, Artificial Sequence
  ENSG00000115970_72 (sequence is synthesized)
tataaccataacacaatgatcaaattcaggaaattgaatgttgatacaatgctttaattgaatacgcaatccatatttaaattttgccaattgtcccaacaaatggccttttatattata

SEQ ID NO: 213121 - DNA, 120 bp, Artificial Sequence
  ENSG00000115970_73 (sequence is synthesized)
gaacaaaaagcttcctacaatctgggaagcaatcctagatcacgcattgcgttttgttattatgcctctttttagcttcctttaatctggaaagtttctaattttatgatattaacattt

SEQ ID NO: 213122 - DNA, 120 bp, Artificial Sequence
  ENSG00000115970_74 (sequence is synthesized)
tggaagaatatgtctcagggtttgtctcattgtttcctgatgatttgattcatgctgtacatttttgcaggaatgttgcataggtgataatggtgttcttcacagggcatcctattagag

SEQ ID NO: 213123 - DNA, 120 bp, Artificial Sequence
  ENSG00000115970_75 (sequence is synthesized)
tattgatgatactggcttgttccagtttttataataggaaatatgatcaccttattcacgtggggatggcaggctgaaaaatggtctctaaaacacatccacatcaaatctttagaagct

SEQ ID NO: 213124 - DNA, 120 bp, Artificial Sequence
  ENSG00000115970_76 (sequence is synthesized)
gtgaatgcaaaccttacatggaagaagggtccttgcagatattcttaagtttaggatcttgaggtgagataattctagattatcttgatggatcaaaaatgtcatcacaagtatccttac

SEQ ID NO: 213125 - DNA, 120 bp, Artificial Sequence
  ENSG00000115970_77 (sequence is synthesized)
aagacagaggcagagagagatttgacaaacaaaagaaagaggaggcagtgcgacagcgtaggtagagattggcatgagatggctacaggccatggaatgcctgcagctgctagaagctgg

SEQ ID NO: 213126 - DNA, 120 bp, Artificial Sequence
  ENSG00000115970_78 (sequence is synthesized)
aagaggcaaggaacagattttagagcctctggagtgcatggccctactgacaccttgattttgaacttctggcttccagaactatgagagaataggtttctgtggttttaagcaccaagt

SEQ ID NO: 213127 - DNA, 120 bp, Artificial Sequence
  ENSG00000115970_79 (sequence is synthesized)
atgtggtaatttgttacagcatccagtgaatgcgggagtctcccatcagttcatagaatttcaatagtacttcaacttaatttagaaaataagtttttaccttagagtgattgattactt

SEQ ID NO: 213128 - DNA, 120 bp, Artificial Sequence
  ENSG00000115970_80 (sequence is synthesized)
caaccatataacaaaaagttttctgcacatttaaagcagttgtagctgcatctaagtgtgtgggaaataaaactaggctgaagcgtacctataatttttcagtcaagagagtaatttaat

SEQ ID NO: 213129 - DNA, 120 bp, Artificial Sequence
  ENSG00000115970_81 (sequence is synthesized)
acatttaaatgtactttaaaaatgaaaaccctgagtcatctttctaatgaatgagttgcatgtaattgggcagtgacttaatgccatcgtaattatgttagacaactgggaggtaatgca

SEQ ID NO: 213130 - DNA, 120 bp, Artificial Sequence
  ENSG00000115970_82 (sequence is synthesized)
aatggagcaagccatactgcaggcattacttttaaaggaggcttaagaaccttgactatgaagtacaggatgggagatgtaaattcatccttcattatcatctcaagaacttcagtggta

SEQ ID NO: 213131 - DNA, 120 bp, Artificial Sequence
  ENSG00000115970_83 (sequence is synthesized)
ggactgatttgagattagtcaaatggtttctgcctttcctagaccaggaagaataagttgcatgcatctttcttatgtggaatcaaatgccacaatattgatggtaaaaaaaaatctaca

SEQ ID NO: 213132 - DNA, 120 bp, Artificial Sequence
  ENSG00000115970_84 (sequence is synthesized)
attagattaaaaggatttgttcagcaaatattaatttcgtgcttattatatgtcaagcagccgaggatattcacagtcccaaacaaggtgcttcttcctttggagcttatgtttcagtga

SEQ ID NO: 213133 - DNA, 120 bp, Artificial Sequence
  ENSG00000115970_85 (sequence is synthesized)
agggagatagtaatgaacaagtaatacatagaatttgtgtatattagtacattatgtagatacaagattatgtagattatttatgtacaagatgtagataagttctgtgaaaagtatttc

SEQ ID NO: 213134 - DNA, 120 bp, Artificial Sequence
  ENSG00000115970_86 (sequence is synthesized)
aagaagataagggggatatatagaagacctaggaggctggagagtgttagtggcttcatacagtggtgtcataaagggcttcacatttgaaaaaagctcttaaacaactgatggataaaa

SEQ ID NO: 213135 - DNA, 120 bp, Artificial Sequence
  ENSG00000115970_87 (sequence is synthesized)
gaataaatcatgaaggaagttagaaaatattttgagatgaatgaaagcaaaaatacaacgtacgaaaacttatgcattgcagcaaaagctgtgcttatagggaaagttatagctgtaaat

SEQ ID NO: 213136 - DNA, 120 bp, Artificial Sequence
  ENSG00000115970_88 (sequence is synthesized)
gcctacattaaaagatcttgaattaataaccaagttaactttccacctcaagcaattagaagagaagaacaaacttaaaaggaaggaaacaaaaagattagaacagagataaatgaaata

SEQ ID NO: 213137 - DNA, 120 bp, Artificial Sequence
  ENSG00000115970_89 (sequence is synthesized)
gaaaacagaaaaacaacacgaataatctacgaaaccagaagttgtgttttttaaagattaacaaatagacaaagtttgctaaactgactaagataaaagaaagacagtataaacaactaa

SEQ ID NO: 213138 - DNA, 120 bp, Artificial Sequence
  ENSG00000115970_90 (sequence is synthesized)
aatcagaaatgaaagtaggaacatttctattaagtttgcagaaataaaaatgattataagacagtacagtgaacaattgtaacaccaacaagttagataacctacatgaaatggacaagt

SEQ ID NO: 213139 - DNA, 120 bp, Artificial Sequence
  ENSG00000115970_91 (sequence is synthesized)
ttctagaaacatgacaattagtgacttgagaagaaatagaaaatgtgagcagacctataagagattgaatcagtattcaaaaggctcacagaggaagagaaggttcagggcaagtgactt

SEQ ID NO: 213140 - DNA, 120 bp, Artificial Sequence
  ENSG00000115970_92 (sequence is synthesized)
ctctggtgaaatctacaaagcatttaaagaagaattacaccagtccttctgagactctttcaaaaaattggagagaagggaacacctcctacctcattttataaggccatgattaccccg

SEQ ID NO: 213141 - DNA, 72 bp, Artificial Sequence
  ENSG00000115970_93 (sequence is synthesized)
aacacctcctacctcattttataaggccatgattaccccgataccaaaaccaaagacacttaaaagaaaacc

SEQ ID NO: 213142 - DNA, 71 bp, Artificial Sequence
  ENSG00000115970_94 (sequence is synthesized)
aggaggctgaggtttcaatggcatcaaagaaaagagaagaaaacagaggagaagagaaggaaaagaagaaa

SEQ ID NO: 213143 - DNA, 120 bp, Artificial Sequence
  ENSG00000115970_95 (sequence is synthesized)
taataccattcgaactctgttgtccacactccccagctgcactgaccagtgtttccggcaaaaccacattcatgggacacttctccagctgaccacacagtctttggagactactaagaa

SEQ ID NO: 213144 - DNA, 120 bp, Artificial Sequence
  ENSG00000115970_96 (sequence is synthesized)
agaagtttatattgtgaggaggtgacaacaggcagcccaaagatgggagaatatgtttggatgaatgatgacaaaaactcaacgcccaggaacgagttatcccaaccatcagaaatccag

SEQ ID NO: 213145 - DNA, 120 bp, Artificial Sequence
  ENSG00000115970_97 (sequence is synthesized)
ttcagtgctattcaggtttttcatttgttgcaagcctactcagactccaaacacggaacgaattcagacttccagcacgagctgactgacatcactgtttgtaccaaagccaaactctgg

SEQ ID NO: 213146 - DNA, 120 bp, Artificial Sequence
  ENSG00000115970_98 (sequence is synthesized)
ctggccaagagacgtctcaggaatgtctaaggtcatgatatctccggatgagatcctgtttgtgttttttaaatacaaaaggaaacattatcgtatttcaacccaagccagtgggacaag

SEQ ID NO: 213147 - DNA, 120 bp, Artificial Sequence
  ENSG00000115970_99 (sequence is synthesized)
aggaaatgaactgagcaaggcaggggcacttgcttgtgggatggctcagtgccaaggcccgatctccttctgcagagtttgccttctgccaggtggatgcctccatcgctctggccctgg

SEQ ID NO: 213148 - DNA, 120 bp, Artificial Sequence
  ENSG00000115970_100 (sequence is synthesized)
aaaacttattttttgtttgaatagatttctcgtgtgttcagattagtcttttcccagttagtttgttgtatgcacgttcttagacatttgccactgatgtttaaaaattgtttagctgac

SEQ ID NO: 213149 - DNA, 120 bp, Artificial Sequence
  ENSG00000115970_101 (sequence is synthesized)
gaggtttttcatttgttgcaagcctactcagactccaaacacggaacgaattcagacttccagcacgagctgactgacatcactgtttgtaccaaagccaaactctggctggccaagagg

SEQ ID NO: 213150 - DNA, 120 bp, Artificial Sequence
  ENSG00000115970_102 (sequence is synthesized)
gtaatcaggtatggggagagcagatgtgcagaataaacacatcttaagggaaccaagtctcaagagaaatcaagtaattatgaatgaacagctctaaaaaagagagagagaatattttct

SEQ ID NO: 213151 - DNA, 120 bp, Artificial Sequence
  ENSG00000115970_103 (sequence is synthesized)
taaatcaacttagttgctgttatgaccaaagaacagatgttgtggtgttcaccccagagaagcaagagattttcccttaaacctcagcttataatgaatggaagtgaatgacagggagag

SEQ ID NO: 213152 - DNA, 120 bp, Artificial Sequence
  ENSG00000115970_104 (sequence is synthesized)
ctaagagttctaaactcaagcaatagaatgatgtcagtgatttgcattaataaccaaaaggtaattgcttccggaggcatttttgtaaccaggaggtagagattttcagtattcacctct

SEQ ID NO: 213153 - DNA, 120 bp, Artificial Sequence
  ENSG00000115970_105 (sequence is synthesized)
gcatggattacagactatctgcaaaaaccggtgtatgaaatatgtctgattgtaattttgtgttgtttttttgtttgtttatttttctagatctgaaattcagagtgtagctctgagact

SEQ ID NO: 213154 - DNA, 120 bp, Artificial Sequence
  ENSG00000115970_106 (sequence is synthesized)
aggaatacatttgagaattgctgtttctagttgtggggagttttaaaagtcattggcatgagttttctaaacttattggagtatttatccttttagaactttgggttgtggtaaagaaag

SEQ ID NO: 213155 - DNA, 120 bp, Artificial Sequence
  ENSG00000115970_107 (sequence is synthesized)
aaaaatattttcttgacaatttttctaaaactgctaagtgactgaggggcatgtaatatggctttttgtctgcccaccaatcagcttgtttttgttgaaacctgctgcgtgcccagtcct

SEQ ID NO: 213156 - DNA, 120 bp, Artificial Sequence
  ENSG00000115970_108 (sequence is synthesized)
gtgttagatattataacaatgaaaggcagtaattgactaaatcatgtggtacagactcttaggtgccgtggcaactcagagattagagattgctgtaggcttgagcaggcactgagggac

SEQ ID NO: 213157 - DNA, 120 bp, Artificial Sequence
  ENSG00000115970_109 (sequence is synthesized)
agatagggtgtgaatagcaagaggggatggaagttgcctttcttaggtgggtagtaaggtagcttgaataagcaaggcaaaaaagaatagaaacatatttttcatccttgccattgttag

SEQ ID NO: 213158 - DNA, 120 bp, Artificial Sequence
  ENSG00000115970_110 (sequence is synthesized)
tttatcctggaacttagaacatttactgtgtgaaagatgaaggagtaaaaggaatttctcatgtaatatacagggagtcctctctgtaatgccatgttcaaaatctgtgttgcaggactc

SEQ ID NO: 213159 - DNA, 120 bp, Artificial Sequence
  ENSG00000115970_111 (sequence is synthesized)
tggtggtggtaggatagtgttaactgcaaaggccctccgtaggtcctctgtaagttccaccagagtagctccagaagaggcgcatgtgttagtgttactacctttcctgccatagtacac

SEQ ID NO: 213160 - DNA, 76 bp, Artificial Sequence
  ENSG00000115970_112 (sequence is synthesized)
cgcatgtgttagtgttactacctttcctgccatagtacacgcatttaattaagagtcagtttattggccagggcag

SEQ ID NO: 213161 - DNA, 79 bp, Artificial Sequence
  ENSG00000115970_113 (sequence is synthesized)
aaggattgcttgagcccaggagttcaagaacagcctggacaacataacgagaccccatctctacaaaacaacgacaaca

SEQ ID NO: 213162 - DNA, 69 bp, Artificial Sequence
  ENSG00000115970_114 (sequence is synthesized)
aactacttgggaggctaaggcaggaggatggtttgggcccaggagtttaaggctctcttgtttcaaaaa

SEQ ID NO: 213163 - DNA, 120 bp, Artificial Sequence
  ENSG00000115977_0 (sequence is synthesized)
gggatcagctggcgggcgggcgggagccgagcgcggccccggctctcgctgcagcgccgcctcttctctgcgtcgcaggccggcccggcggccgtgacaatgtcgcggggctggtagcag

SEQ ID NO: 213164 - DNA, 120 bp, Artificial Sequence
  ENSG00000115977_1 (sequence is synthesized)
tgtcgcggggctggtagcagggcgccggccgccgagccgtctcaagtttaaacttacacgaatcgctttctggaggaggaggggacccgctgcgcgattgacacgcatattcctataggc

SEQ ID NO: 213165 - DNA, 120 bp, Artificial Sequence
  ENSG00000115977_2 (sequence is synthesized)
aggcatcctccctcagcccccacccccacggccggattcgggtggctcctctccgaggtgaaatctgagaagaaatccttggatctcttttcttaaaaaaaaaaaaaaaaaaaaaaaatc

SEQ ID NO: 213166 - DNA, 120 bp, Artificial Sequence
  ENSG00000115977_3 (sequence is synthesized)
aaccatcggtattttgctttgctgctccctattcgcaagatgaagaagtttttcgactcccggcgagagcagggcggctctggcctgggctccggctccagcggaggagggggcagcacc

SEQ ID NO: 213167 - DNA, 120 bp, Artificial Sequence
  ENSG00000115977_4 (sequence is synthesized)
tcgggcctgggcagtggctacatcggaagagtcttcggcatcgggcgacagcaggtcacagtggacgaggtgttggcggaaggtggatttgctattgtatttctggtgaggacaagcaat

SEQ ID NO: 213168 - DNA, 120 bp, Artificial Sequence
  ENSG00000115977_5 (sequence is synthesized)
gggatgaaatgtgccttgaaacgcatgtttgtcaacaatgagcatgatctccaggtgtgcaagagagaaatccagataatgagggatctttcagggcacaagaatattgtgggttacatt

SEQ ID NO: 213169 - DNA, 120 bp, Artificial Sequence
  ENSG00000115977_6 (sequence is synthesized)
gattctagtatcaacaacgtgagtagcggtgatgtatgggaagtgctcattctgatggacttttgtagaggtggccaggtggtaaacctgatgaaccagcgcctgcaaacaggctttaca

SEQ ID NO: 213170 - DNA, 120 bp, Artificial Sequence
  ENSG00000115977_7 (sequence is synthesized)
gagaatgaagtgctccagatattttgtgatacctgtgaagctgttgcccgcctgcatcagtgcaaaactcctattatccaccgggacctgaaggttgaaaacatcctcttgcatgaccga

SEQ ID NO: 213171 - DNA, 120 bp, Artificial Sequence
  ENSG00000115977_8 (sequence is synthesized)
ggccactatgtcctgtgtgactttggaagcgccaccaacaaattccagaatccacaaactgagggagtcaatgcagtagaagatgagattaagaaatacacaacgctgtcctatcgagca

SEQ ID NO: 213172 - DNA, 120 bp, Artificial Sequence
  ENSG00000115977_9 (sequence is synthesized)
ccagaaatggtcaacctgtacagtggcaaaatcatcactacgaaggcagacatttgggctcttggatgtttgttgtataaattatgctacttcactttgccatttggggaaagtcaggtg

SEQ ID NO: 213173 - DNA, 120 bp, Artificial Sequence
  ENSG00000115977_10 (sequence is synthesized)
gcaatttgtgatggaaacttcacaattcctgataattctcgatattctcaagacatgcactgcctaattaggtatatgttggaaccagaccctgacaaaaggccggatatttaccaggtg

SEQ ID NO: 213174 - DNA, 120 bp, Artificial Sequence
  ENSG00000115977_11 (sequence is synthesized)
tcctacttctcatttaagctactcaagaaagagtgcccaattccaaatgtacagaactctcccattcctgcaaagcttcctgaaccagtgaaagccagtgaggcagctgcaaaaaagacc

SEQ ID NO: 213175 - DNA, 120 bp, Artificial Sequence
  ENSG00000115977_12 (sequence is synthesized)
cagccaaaggccagactgacagatcccattcccaccacagagacttcaattgcaccccgccagaggcctaaagctgggcagactcagccgaacccaggaatccttcccatccagccagcg

SEQ ID NO: 213176 - DNA, 120 bp, Artificial Sequence
  ENSG00000115977_13 (sequence is synthesized)
ctgacaccccggaagagggccactgttcagcccccacctcaggctgcaggatccagcaatcagcctggccttttagccagtgttccccaaccaaaaccccaagccccacccagccagcct

SEQ ID NO: 213177 - DNA, 120 bp, Artificial Sequence
  ENSG00000115977_14 (sequence is synthesized)
ctgccgcaaactcaggccaagcagccacaggctcctcccactccacagcagacgccttctactcaggcccagggtctgcccgctcaggcccaggccacaccccagcaccagcagcaactc

SEQ ID NO: 213178 - DNA, 120 bp, Artificial Sequence
  ENSG00000115977_15 (sequence is synthesized)
ttcctcaagcagcaacagcagcagcaacagccaccgccagcacagcagcagccggcaggcacgttttaccagcagcagcaggcccagactcagcagtttcaggcagtacatccagcaacc

SEQ ID NO: 213179 - DNA, 120 bp, Artificial Sequence
  ENSG00000115977_16 (sequence is synthesized)
cagaaaccagcaattgctcagttccctgtggtgtcccaaggaggctctcaacagcagctaatgcagaatttctaccagcagcagcagcagcagcaacaacaacagcaacagcaacagctg

SEQ ID NO: 213180 - DNA, 120 bp, Artificial Sequence
  ENSG00000115977_17 (sequence is synthesized)
gccacagccctgcatcaacaacagctgatgactcagcaggctgccttgcagcaaaagcccactatggcagcaggacagcagccccagccacagccagctgcagccccacagccagcccct

SEQ ID NO: 213181 - DNA, 120 bp, Artificial Sequence
  ENSG00000115977_18 (sequence is synthesized)
gcccaggagccagcgattcaagccccagtaagacaacagccaaaggttcagacaaccccacctcctgccgtccaggggcagaaagttggatctctcactccaccctcatcccccaaaacc

SEQ ID NO: 213182 - DNA, 120 bp, Artificial Sequence
  ENSG00000115977_19 (sequence is synthesized)
caacgtgctgggcacaggcgtattctcagtgacgtaacccacagtgcagtctttggggtccctgccagcaaatcaacccagctgctccaggcagctgcagctgaggccagtctcaataag

SEQ ID NO: 213183 - DNA, 120 bp, Artificial Sequence
  ENSG00000115977_20 (sequence is synthesized)
tccaagtctgcaaccaccactccatcaggctctcctcggacctctcaacaaaacgtttataatccttcagaagggtctacgtggaatccctttgatgacgataatttctccaaactcaca

SEQ ID NO: 213184 - DNA, 120 bp, Artificial Sequence
  ENSG00000115977_21 (sequence is synthesized)
gctgaagaactgctaaacaaggactttgccaagcttggggaaggcaaacatcccgagaagcttggaggctcagctgagagtttgatcccaggctttcaatcaacccaaggtgatgctttt

SEQ ID NO: 213185 - DNA, 120 bp, Artificial Sequence
  ENSG00000115977_22 (sequence is synthesized)
gctacgacctcattttctgctggaactgctgaaaaaaggaagggtgggcagactgtggactctggcctcccgcttctaagcgtgtctgatcctttcattcctcttcaagtacctgatgca

SEQ ID NO: 213186 - DNA, 120 bp, Artificial Sequence
  ENSG00000115977_23 (sequence is synthesized)
ccagaaaaactaattgagggactcaaatctcctgacacttctcttctgctccctgacctcttgcctatgacagatccttttggtagcacttctgatgctgtaattgaaaaagctgatgtt

SEQ ID NO: 213187 - DNA, 120 bp, Artificial Sequence
  ENSG00000115977_24 (sequence is synthesized)
gctgttgagagtctcataccaggactggagcccccagttccccagcgcctcccatctcagacggaatctgtgacctcgaatcgcacagattctctcaccggggaagattccctgcttgat

SEQ ID NO: 213188 - DNA, 120 bp, Artificial Sequence
  ENSG00000115977_25 (sequence is synthesized)
tgctctctgctctctaaccctactactgaccttctggaagagtttgcccccacagcaatctctgctccagtccataaagctgcagaagatagtaatctcatctcaggttttgatgtccct

SEQ ID NO: 213189 - DNA, 120 bp, Artificial Sequence
  ENSG00000115977_26 (sequence is synthesized)
gagggctcggacaaggtggctgaagatgagtttgaccctattcctgtattgataaccaaaaacccacaaggtgggcactctagaaacagcagtgggagctctgagtccagtcttcccaac

SEQ ID NO: 213190 - DNA, 120 bp, Artificial Sequence
  ENSG00000115977_27 (sequence is synthesized)
ctagccaggtctttactgctggtggatcagctcatagacctgtagccgtgacccagtagcagatgcagttctgtaaccttcataccgtaaaatacattttcattacggagttatgaaaaa

SEQ ID NO: 213191 - DNA, 120 bp, Artificial Sequence
  ENSG00000115977_28 (sequence is synthesized)
aatgatttttttaaaaaaatctgcaaataaggggccctccagcccttttctcctaccccttgccttctcctgtagaaatgataaggaaagaaaatcactttggccctccagatattcctt

SEQ ID NO: 213192 - DNA, 120 bp, Artificial Sequence
  ENSG00000115977_29 (sequence is synthesized)
ggccagttcctccttgttagtttgctgtgttttctcattacccttcttcaatagcattatcttaaatcaagcactagatgccatgagcttcacctctgctggaatcaactccaccaaaag

SEQ ID NO: 213193 - DNA, 120 bp, Artificial Sequence
  ENSG00000115977_30 (sequence is synthesized)
cttaactgtaactgaaactagtgaattgacacttttgtctcgttcttgctaggaatggcctcccagatcaattctcccaacccccgtctcctttggccagatgctgatgaatgtatttcc

SEQ ID NO: 213194 - DNA, 120 bp, Artificial Sequence
  ENSG00000115977_31 (sequence is synthesized)
ctgtttttgctttttatcctgatgcattatcatgaggacatggctacttcagttggtcttaactctaggcagtagcctggagatgggtgtgtggtttaagaaagggtaaaacttactgac

SEQ ID NO: 213195 - DNA, 120 bp, Artificial Sequence
  ENSG00000115977_32 (sequence is synthesized)
tggtagtatatatttgagaagagaaattgagcccagctctagccaaccaactttgaccttgtttgatcatagacttagccaagggattttacaccccatgcaacctgcccagcattcgtc

SEQ ID NO: 213196 - DNA, 120 bp, Artificial Sequence
  ENSG00000115977_33 (sequence is synthesized)
cagctttctggcttccattgaaccgtgatttctcagatctggagacgtgactgcaagtatttgagatccttggatacaatgtgtacgttatataaatcccaagtattgccattccttttc

SEQ ID NO: 213197 - DNA, 120 bp, Artificial Sequence
  ENSG00000115977_34 (sequence is synthesized)
atgttaactgttccaagtgggatctcagaattagaccaaaacaagacggtggtaatatgataccttttattagaagacttttcactggggcgggggtggggggaggatggggaggggaag

SEQ ID NO: 213198 - DNA, 120 bp, Artificial Sequence
  ENSG00000115977_35 (sequence is synthesized)
gaattgtagcagaaacagatgtatttttcttgtgatttttattttgaatcaaatattgtaaattgtgtataaatgaagatgctgaatagttctgtttccacttggcatttcaagtctgat

SEQ ID NO: 213199 - DNA, 120 bp, Artificial Sequence
  ENSG00000115977_36 (sequence is synthesized)
atcaggtgtctgtacagggttttgatttctttcccttgtataactacacaacaatcctacagtgtaacatatggaatcattttgaatagacttgtgtgctataagctttcagcaggtcct

SEQ ID NO: 213200 - DNA, 120 bp, Artificial Sequence
  ENSG00000115977_37 (sequence is synthesized)
ctgtctctagaataagcatgttgtttattttcagataatcagaaataagtgtgctgacaagctggacacaatctgggtgtgcccagcttacctttctttctgatgtttaaattgaaggct

SEQ ID NO: 213201 - DNA, 120 bp, Artificial Sequence
  ENSG00000115977_38 (sequence is synthesized)
gcagccaatggaatatgttcagctggttttccttggcttcctagattaaaaaaaaataataaagcatagttctttattaactttaggatattgttcataaaataaataaaggcccctgca

SEQ ID NO: 213202 - DNA, 120 bp, Artificial Sequence
  ENSG00000115977_39 (sequence is synthesized)
ctaacatgacaacatgcctcatggtcaccctctctatatgtacttactcattaaagtgtattttatttccttatgtggaaagcacttttataaaatcacccttttgaaaagaagtgggca

SEQ ID NO: 213203 - DNA, 120 bp, Artificial Sequence
  ENSG00000115977_40 (sequence is synthesized)
cagagaaccccactcctgttcttttcctctagtgccattgtccatcatcaaaagggaaactcttagttaatcagatctgtacaaataaaattccaagtccatttgcttgttttgctatct

SEQ ID NO: 213204 - DNA, 120 bp, Artificial Sequence
  ENSG00000115977_41 (sequence is synthesized)
agtacttttgtttcttcttcctcacatttgcactttatgggggaaaaaagtttaacagcaacaacagcctataaaacactgcattctggagggcaaggtttgaccctaggaatgtgcgag

SEQ ID NO: 213205 - DNA, 120 bp, Artificial Sequence
  ENSG00000115977_42 (sequence is synthesized)
tagcctttgaaaggcattggaggaaaagtctgaatcttccagccttccttctgtctttaaatacttcccgtgctggctgaaacaagatgagctaggtaaaggcctctagttgaataacag

SEQ ID NO: 213206 - DNA, 120 bp, Artificial Sequence
  ENSG00000115977_43 (sequence is synthesized)
accatttccaaaactgagagaggcacaagcttcctgccgaggattaaaaagcaaaagatatccacgaagggctctctgtggttggatagcagtgaaaataggacttggtttaccccttta

SEQ ID NO: 213207 - DNA, 120 bp, Artificial Sequence
  ENSG00000115977_44 (sequence is synthesized)
tggacaggaaaattgctgcaggtcagaattgtattctctttcctggacatagaaagaatgtataaattaatgaaggaaatgtttatttttaaataagaataatgtttgagttctatgttt

SEQ ID NO: 213208 - DNA, 120 bp, Artificial Sequence
  ENSG00000115977_45 (sequence is synthesized)
tcgtatatacatgttagaaatataatgaaatatctagtttctcaatttaattgaaactatgaagagtacagtttagaaattaggtatctctaaattgttcttttcatatattacccataa

SEQ ID NO: 213209 - DNA, 120 bp, Artificial Sequence
  ENSG00000115977_46 (sequence is synthesized)
catatattacccataattacattgaaatatattatctagtcatttggctcagtaaagcttaatggaggcagttaatgaaaatgagcagactagaagccagagacggcagtagaagcctaa

SEQ ID NO: 213210 - DNA, 120 bp, Artificial Sequence
  ENSG00000115977_47 (sequence is synthesized)
gggagataatgacaagaaattgtcttgggcttatttagagtaaggcctcctcaaaggggagaactatttttctgttaaggaacacatatgagtgctttggtaaacggagccttccttggt

SEQ ID NO: 213211 - DNA, 120 bp, Artificial Sequence
  ENSG00000115977_48 (sequence is synthesized)
ttagagcatcatccctgagctgaaagagtttatttgagttgagcatagtgtcctggtacctgtggaatcatagcctgagctacaaagggacctttgagaccatcctctagtccaccatcc

SEQ ID NO: 213212 - DNA, 120 bp, Artificial Sequence
  ENSG00000115977_49 (sequence is synthesized)
tcttcattttacaggtgtgggacctgagctggattgaacagggtcgggggagaagaggcctgggcaggacaggccacctgggatctcatcctggcccttgccagccactggctgagtgac

SEQ ID NO: 213213 - DNA, 120 bp, Artificial Sequence
  ENSG00000115977_50 (sequence is synthesized)
cttcagcaggcacttcacctctcagagttgctgttccttagagttatacgatgggtttggactagatggtctttaagattatagaagtatagggtcctaagtatatattattatattgag

SEQ ID NO: 213214 - DNA, 120 bp, Artificial Sequence
  ENSG00000115977_51 (sequence is synthesized)
aagggctatgaaggatttatataatcctgatgttcttcagttatcttctgtagttcctgctattacggtagcagtgtttacattttaaagaattataatgggcttttactaacttgctct

SEQ ID NO: 213215 - DNA, 120 bp, Artificial Sequence
  ENSG00000115977_52 (sequence is synthesized)
ttcttgattatctgaatagaagcctaaatcataatcttagagattttcctttttaagtattacagaaacacatgcgtggacacacacctacctattctaataaaatggtatcagaagatt

SEQ ID NO: 213216 - DNA, 120 bp, Artificial Sequence
  ENSG00000115977_53 (sequence is synthesized)
tctttttaaatgtataatcaggcatctaccagtttaaaacgggcaaatactataagcatatgtttctgatttgcttttattccagctatgtaagaggagtaactatagcagaaaacatga

SEQ ID NO: 213217 - DNA, 120 bp, Artificial Sequence
  ENSG00000115977_54 (sequence is synthesized)
caaattgatttttccctttacaacattcaaatgagtcccaatgttttcaaaaatacatacctcagaggagataaggcttaagtggacacttctaagtatgattataattattataattaa

SEQ ID NO: 213218 - DNA, 120 bp, Artificial Sequence
  ENSG00000115977_55 (sequence is synthesized)
tgatttctttagcagacatatcagaattttgacatctaattaagtgttgttcccctcaatgtcatctagttttacttaagaagttaatacttattctaatgatgctgccatccttaaagt

SEQ ID NO: 213219 - DNA, 120 bp, Artificial Sequence
  ENSG00000115977_56 (sequence is synthesized)
tatttttgaaactcctctccttagaaataatatcaaggaaggtaataaggtataagaaaatcagctatattatttaattagtatcactttgagaaagcacctggaagtatattctttctt

SEQ ID NO: 213220 - DNA, 120 bp, Artificial Sequence
  ENSG00000115977_57 (sequence is synthesized)
tgtctactttttctactactcttggttctgagtaacatttagccatttccagaaagcaaattcaaccctgtaagatgaagagtggttactgttgaagacagtaaaaaggataatccacaa

SEQ ID NO: 213221 - DNA, 120 bp, Artificial Sequence
  ENSG00000115977_58 (sequence is synthesized)
aaaattctcagagaggaccttataatagaaagtgaacatgattaagacttaatttctgtaattttctgaataaggaaacttctgtgattccttagtctttagaatggtttaaaacattga

SEQ ID NO: 213222 - DNA, 120 bp, Artificial Sequence
  ENSG00000115977_59 (sequence is synthesized)
aagatatgggtattaaaacacctctgaaagaagttgtcactttgttcagtgttatttgatattggacttcgctcttcctgaattagaattacacaacttggattgctaatacttgtggaa

SEQ ID NO: 213223 - DNA, 120 bp, Artificial Sequence
  ENSG00000115977_60 (sequence is synthesized)
aaacaaacccaagaaacgaactactttctcaagatgtaatatttgttttattattaatacttttggttgttttgattacttatttcctactctcctgacagataattgatcaaccaatat

SEQ ID NO: 213224 - DNA, 120 bp, Artificial Sequence
  ENSG00000115977_61 (sequence is synthesized)
aaccttccccaggttaggaacagttctgccttcagcagtgctgtgggaatgaagggatctttggggctgacagcctatgatgtggagggatctgcactcagctaaataaatacatgctat

SEQ ID NO: 213225 - DNA, 120 bp, Artificial Sequence
  ENSG00000115977_62 (sequence is synthesized)
agataccttgggccaaaataaagtctctcttgataaggtttttctgtgatttcccagagtccttaaccttctctgtctgcaagattatcaggctcccatagccactaactttgagctttg

SEQ ID NO: 213226 - DNA, 120 bp, Artificial Sequence
  ENSG00000115977_63 (sequence is synthesized)
ggatgaaaatgacaggattgcccagtgtgccgggttaagcaaattagaggctgcctggcagaacagaaaaactatcacatgaatatttagaatggaagctttcctgaaacactccagata

SEQ ID NO: 213227 - DNA, 120 bp, Artificial Sequence
  ENSG00000115977_64 (sequence is synthesized)
ctgcaaagctatctttattcctctctaaaggctataattttatcaacacaaagtcagccttttctttttccacattagtaatgtttctgaagttggatgtgcttagatttcttaaatcag

SEQ ID NO: 213228 - DNA, 120 bp, Artificial Sequence
  ENSG00000115977_65 (sequence is synthesized)
aatgagtgctaggaaatctataacaagaaacctcttttgcttctcccagatttcctttcactaatacgggatagggaggctccttgggtaatgctaacctatgcaaagaagttaccaaat

SEQ ID NO: 213229 - DNA, 120 bp, Artificial Sequence
  ENSG00000115977_66 (sequence is synthesized)
ggtggtagttgctagaattaaagacacgttcttggttcacactttgatgtagtgacctgaatttactcttttcctgtgagtattctactctgccctattgcactctcctttgtcatgtgg

SEQ ID NO: 213230 - DNA, 120 bp, Artificial Sequence
  ENSG00000115977_67 (sequence is synthesized)
atgtgtgtttatcataggtctttaacgcgtccttcccaagaagacaaagcatacagttgtacatgaagatatcttatgcagtaaaaacgtgaaatttgaacattgctgcacaagtattgt

SEQ ID NO: 213231 - DNA, 120 bp, Artificial Sequence
  ENSG00000115977_68 (sequence is synthesized)
ataaaaaaaagtctgtaaagaactttcttatgtaaacatacaggggaataaagacttttatctgttcaaatgggagcatgatgtttagagatgtaaataacttaaaataagttgctcttt

SEQ ID NO: 213232 - DNA, 120 bp, Artificial Sequence
  ENSG00000115977_69 (sequence is synthesized)
tcctgagctgaaaacccacttttttgcagaaaggatttaatcacagtattgagtgacaataagtacctgggcacaagaaaagtatagctacacactgaggacatattaatgaatcatggc

SEQ ID NO: 213233 - DNA, 120 bp, Artificial Sequence
  ENSG00000115977_70 (sequence is synthesized)
tacctgagagagtaaaacccctgttttagtctcaaggagaataagacgcctgccagcctacactggatatgaccagactcagggttgtaaaatggagcgcaggtttgcagcttccctcct

SEQ ID NO: 213234 - DNA, 120 bp, Artificial Sequence
  ENSG00000115977_71 (sequence is synthesized)
ctaacttaatccctaatatacccaggccaacttaattaaacattttgtgttggcaagaataattttatccccagtgagaaaactcactcatttaattgcctcattggcctgagaggcaca

SEQ ID NO: 213235 - DNA, 120 bp, Artificial Sequence
  ENSG00000115977_72 (sequence is synthesized)
gctggccatttttggcttccatgaggtccctcatttcccagtcgtgggttttaatgcagctacctaatatatggtggaaccaaatgcttaattttgttatgtgagctagaaggtcatggt

SEQ ID NO: 213236 - DNA, 120 bp, Artificial Sequence
  ENSG00000115977_73 (sequence is synthesized)
aattattagtttgatgtacgtctcttgatttccccagtttggttctaaaattttacgtttcaattgctgctgcatttccaagttcttgtgaagggatattttgctttctgtttactaact

SEQ ID NO: 213237 - DNA, 120 bp, Artificial Sequence
  ENSG00000115977_74 (sequence is synthesized)
atatgtgagaaggcttcttctcaatgctccaagtcttcgttttctgtttttggcaagaatcatatctttgatactccctgtaaccgttctttcagtttttggtatgaggaaaagtaaact

SEQ ID NO: 213238 - DNA, 120 bp, Artificial Sequence
  ENSG00000115977_75 (sequence is synthesized)
tctggtgttgtgtgatgtatttcattaaggaatatccagcctgacatttaagtcttcagattttaattctgtagggagcattctgatggccctcactatgtcaatcagatggagtttcca

SEQ ID NO: 213239 - DNA, 120 bp, Artificial Sequence
  ENSG00000115977_76 (sequence is synthesized)
ggggaaacccatcctaaatgattcagcactttgggttgctttggaagtgaatagggagctggtgaggatagttgccaagttgtcaggtattttaggaactccttctcttccctgaagcat

SEQ ID NO: 213240 - DNA, 120 bp, Artificial Sequence
  ENSG00000115977_77 (sequence is synthesized)
gtgagttcttgctgaaatctacataatttggagcctcaaaatagactaatatggagttacccatattgaaagtgtcaacgtgcctaacctggcacacagtcctacatcagagcaagaaaa

SEQ ID NO: 213241 - DNA, 120 bp, Artificial Sequence
  ENSG00000115977_78 (sequence is synthesized)
agaagtatgttttgacttcttgcttaattttatgtgtgaaaccaaaataaaaagaggcatgatccagtttgagggaattataacaaaaccctacgttaggctctatgataagtaagaccc

SEQ ID NO: 213242 - DNA, 120 bp, Artificial Sequence
  ENSG00000115977_79 (sequence is synthesized)
tgtgcagactatgaagccaggccctgggctttagcccctgaggtacaacaggcagtgtttactgagctctatggccacagggtatctgctatgacgtgccattggttaccaaaggaactg

SEQ ID NO: 213243 - DNA, 120 bp, Artificial Sequence
  ENSG00000115977_80 (sequence is synthesized)
ggtcaaggcatgtggttaggttagtataaatccttcaatgctagtaaagagactgcttcaaacacgttttcttgttgacacaatgctaccttcatataaaggaactgttcaccctgaaaa

SEQ ID NO: 213244 - DNA, 120 bp, Artificial Sequence
  ENSG00000115977_81 (sequence is synthesized)
cacattttccctgtaagaacacattcacatactcaaaaaaagacttttatctgccaacaagatttaatggttaccttctgtttctagtatatttggaatttatccttctctcgactacct

SEQ ID NO: 213245 - DNA, 120 bp, Artificial Sequence
  ENSG00000115977_82 (sequence is synthesized)
tgtttctggtgctgccaccaccagaattccttaagggaatgtggaggtctgggcttcccccatattctctggcatttctttgcccttcagagtgccaggcctggagagttgcaaagtgtg

SEQ ID NO: 213246 - DNA, 120 bp, Artificial Sequence
  ENSG00000115977_83 (sequence is synthesized)
gttgctctccgcctcagccacactgtacctcctctaacaagaatagaaaggttaagggacttggccttctcaggacaaccctttaaatgtacttttccattcctacaaagcctgttgatg

SEQ ID NO: 213247 - DNA, 120 bp, Artificial Sequence
  ENSG00000115977_84 (sequence is synthesized)
ctgaaagaaagataggaaatagctcttgtccttgttttgaaggacaggagactaattttcccttcaaacttgatattctggtgtttttgtgactgtttttgtaaattattcaaagttgtt

SEQ ID NO: 213248 - DNA, 120 bp, Artificial Sequence
  ENSG00000115977_85 (sequence is synthesized)
ggaattttaagtctgattttcccagtactcatcatgaaggtcatagaatatgctctgagttggaaggttttccaaatgggttctcgaccaaaaacccactttttaacaaataattttgat

SEQ ID NO: 213249 - DNA, 120 bp, Artificial Sequence
  ENSG00000115977_86 (sequence is synthesized)
gggttagacatgttcttccatcctctccaaccctgaatatgggcacatacacacaccccttggtacttcctagttctcaaaatgtaatctagcacttcaggcatccaaagtgcccctggt

SEQ ID NO: 213250 - DNA, 120 bp, Artificial Sequence
  ENSG00000115977_87 (sequence is synthesized)
tcaatagatagctgcttttttgccagtctctgtgcacaaattgttttaactgaattcagtttaaatttccaaaaaacactgactctgttcaaactagtgttcattggattattgacctgt

SEQ ID NO: 213251 - DNA, 120 bp, Artificial Sequence
  ENSG00000115977_88 (sequence is synthesized)
ccattttttttccctaagagatattttgctctcctgcagaacaagcttaataacatcaactttcaaggtagttttggaagatgagaaattgtgcttttgttttggcaactgaaaactttg

SEQ ID NO: 213252 - DNA, 120 bp, Artificial Sequence
  ENSG00000115977_89 (sequence is synthesized)
tccaactgatactatgtgaggaaggtggttcaaggagttttagggccctcttgtccttctttaaggctctgcaaaccttattttggaaaacttatttttctcccttttatttgaatttcc

SEQ ID NO: 213253 - DNA, 120 bp, Artificial Sequence
  ENSG00000115977_90 (sequence is synthesized)
tcccagaaattatcatcttggtatcactgagacaaatctaatatcaatttacttgcctgagaaattaggattatgtctgtccacataaatcgcaaggaagaaggtattctgtttatttcc

SEQ ID NO: 213254 - DNA, 120 bp, Artificial Sequence
  ENSG00000115977_91 (sequence is synthesized)
tgtccactgactgatgctttcgtatcaccatgtagctgcacatactaaaattataatacaaggaaaaatttattcttttcaaaatcttattcttcaaatactattctgaaagccatttgg

SEQ ID NO: 213255 - DNA, 120 bp, Artificial Sequence
  ENSG00000115977_92 (sequence is synthesized)
caccagtacagaatttaacttaacgccccaatctggaattcactgaacgcattcaaactgttagaaaggaaaataaaaatggaggacaaacacatttttgttctgtttctgaaaacaata

SEQ ID NO: 213256 - DNA, 120 bp, Artificial Sequence
  ENSG00000115977_93 (sequence is synthesized)
tttaaggtcagaactgtttaaaaagaagcactgctaaaaagttataggattcagagaaacatagtatttttgtacagtatcttataaaatgttcagacctctctctacattctctttaca

SEQ ID NO: 213257 - DNA, 120 bp, Artificial Sequence
  ENSG00000115977_94 (sequence is synthesized)
atgtaatgtctctaagtgactggtttcccaataaactgattttaatgcctcttctgctgtggtctgtgtgcttaattcatgcagaaactttagcaggggataatttttggcagaaatttc

SEQ ID NO: 213258 - DNA, 120 bp, Artificial Sequence
  ENSG00000115977_95 (sequence is synthesized)
tgctagctaatggtttgcataggaggggagagggtcagtatgggaaggggatcattgagttccatctctacagaggttctgggtcatctatggctccaaatcattgtatctaatattctt

SEQ ID NO: 213259 - DNA, 120 bp, Artificial Sequence
  ENSG00000115977_96 (sequence is synthesized)
atcctggtgggttgggaaactccagtagtatctctttactgagcccatgatgaaatgatacctttacccccaaccaccctttctctggattcttcttgcttagttacatatgcctttttc

SEQ ID NO: 213260 - DNA, 120 bp, Artificial Sequence
  ENSG00000115977_97 (sequence is synthesized)
ctgccctcttgctaacatgtgcccaatgacatacttctaacctgctaatatttcttggaaggtaagctctcttgcattctgataattgtctatttgattttaaaagccagagcaccctga

SEQ ID NO: 213261 - DNA, 120 bp, Artificial Sequence
  ENSG00000115977_98 (sequence is synthesized)
ggcacctctacctagatagaaatagactagtatattggagtttgctaatgcttctgtaatggcccatgcattttactccttctgcttaaagaactttatggcagattcatttaagcagag

SEQ ID NO: 213262 - DNA, 120 bp, Artificial Sequence
  ENSG00000115977_99 (sequence is synthesized)
gagatctttatgaacttagaagactgaaaacaaaattctggggcaactccagctgaaggtgatttatttggtctgattttgatgctgtatgctcccctcagaaggtaccttcagtattta

SEQ ID NO: 213263 - DNA, 120 bp, Artificial Sequence
  ENSG00000115977_100 (sequence is synthesized)
tattttgggcactcgtatgctctttgagtagtgcttgtgatgtaagtcatcaagtaaacttgcatttatcaagcagccacattctgcttcttttcagagagtttgtccctctgcatgtgg

SEQ ID NO: 213264 - DNA, 120 bp, Artificial Sequence
  ENSG00000115977_101 (sequence is synthesized)
cgcggatgaccacatgccagattctgaattgagtcatccccagacagtgtttctacataatccaaaactgtcatggtatatgtggagatgaatgactgggtttgttttcattccataatg

SEQ ID NO: 213265 - DNA, 120 bp, Artificial Sequence
  ENSG00000115977_102 (sequence is synthesized)
agccagtgccaggtagagcaggtgtccgtgcctggccctgtgtgtaggagcattgcatagttacgctgaatgtctgtgtgcctaacatcttcatctcctttcctgtacgtcgtgcctatc

SEQ ID NO: 213266 - DNA, 120 bp, Artificial Sequence
  ENSG00000115977_103 (sequence is synthesized)
atgttccaaaacgtgagacagtggttgattgtgttccagtttgtgtgcagtttccttgcctgacttttatttttatgtttttcctgttgcattttcaacatctattatttggtcccacaa

SEQ ID NO: 213267 - DNA, 120 bp, Artificial Sequence
  ENSG00000115977_104 (sequence is synthesized)
tgtttttgccgcgggttgaccattaaatgttccaaatagagttgaattgacctacacattaattctgcattttatgcttttctagatctccagagggagtccaatccctgtcctgtaata

SEQ ID NO: 213268 - DNA, 120 bp, Artificial Sequence
  ENSG00000115977_105 (sequence is synthesized)
actgtagagcactttaaagaatcactgggtgttaaaggccttccgctgtatccagacccctccagagtacctggcacaaagactcagaacaacttagaatctgactacttggccagagat

SEQ ID NO: 213269 - DNA, 120 bp, Artificial Sequence
  ENSG00000115977_106 (sequence is synthesized)
ggcccttcaagcaacagctcattccacagcagcgaagaggaagggactgaccttgaaggagacatgctggactgcagtgggtctcggcctctccttatggagtctgaagaagaagatgag

SEQ ID NO: 213270 - DNA, 120 bp, Artificial Sequence
  ENSG00000115977_107 (sequence is synthesized)
agctgcagaccccccccggggaagctgggaggagccgttccattcgctccaccagaagtctctcctgagcaagcaaagacagtgcaaggtggaagaaagaaccagtttcaagccttcaca

SEQ ID NO: 213271 - DNA, 120 bp, Artificial Sequence
  ENSG00000115977_108 (sequence is synthesized)
cagccagccactgatgggctcagtgagccagatgtttttgccatagctcccttcaggagctcaagggttccaaatgatgacatggacattttctccaaagccccatttgtctccaagagc

SEQ ID NO: 213272 - DNA, 120 bp, Artificial Sequence
  ENSG00000115977_109 (sequence is synthesized)
agtatggctccttcccagccagaggagtcagacgtgtttttgagagctcctttcactaagaagaaaagcatggaggagttaacagttatccaatgcacctcccaggagctgcctgcacag

SEQ ID NO: 213273 - DNA, 120 bp, Artificial Sequence
  ENSG00000115977_110 (sequence is synthesized)
accggtctcctcagtcagacaggtgatgtccccctgcccgcgggccgtgagagagctgtgtacacctctgtccaagctcagtattccacagctggttttgtgcaacagtctaacctcctg

SEQ ID NO: 213274 - DNA, 120 bp, Artificial Sequence
  ENSG00000115977_111 (sequence is synthesized)
tcccattctgtacaagcagcagaccatctggacagcatctctcccaggggatcctgcctggaatctgggggtcattctaatgacagaaacaaaggacctcagctccagaaagaagctgtc

SEQ ID NO: 213275 - DNA, 120 bp, Artificial Sequence
  ENSG00000115977_112 (sequence is synthesized)
tcaggccccatggctggcaaaccattccgcccccagtccttatccaagtattcccgtcactatagcccagaagacgagccaagtccagaagcccagcccattgctgcctacaaaattgtt

SEQ ID NO: 213276 - DNA, 120 bp, Artificial Sequence
  ENSG00000115977_113 (sequence is synthesized)
tcacaaaccaacaagcagtcgatagctgggtctgtttctatcacatccctttcctccaggactacggagctgccagctgctgatccatttgctctagcacccttcccttcaaaatcaggc

SEQ ID NO: 213277 - DNA, 120 bp, Artificial Sequence
  ENSG00000115977_114 (sequence is synthesized)
aagaaaccctaggagcaaaacctgagcctcaagcctcttgtctctatcccaccctcaatacccgccatggcactcccagcttagccttctgaagaagaaatattatcagttcttatattt

SEQ ID NO: 213278 - DNA, 120 bp, Artificial Sequence
  ENSG00000115977_115 (sequence is synthesized)
caattccctgcgtcagagcagaatttcttgagtcaacaaactcagttgcagtgatatttagttgaagcccctttaagttatgttcatttttgtttgtttgtttgtttgtttatattgatt

SEQ ID NO: 213279 - DNA, 120 bp, Artificial Sequence
  ENSG00000115977_116 (sequence is synthesized)
tctggacttggaggcattttcatctccttcacagaggtcatccacttccaccaagaactctgctttccccccgccccacccacagaaactgtttaaatcctgaaatacttcttcacccca

SEQ ID NO: 213280 - DNA, 120 bp, Artificial Sequence
  ENSG00000115977_117 (sequence is synthesized)
atcccaaaggggccctattgttgctagttttaattcctgtagctcctgttctaagtcatgcccatcgaagaatcaagattagtccctccactaaatcaagatttagtactcttgaaaagg

SEQ ID NO: 213281 - DNA, 120 bp, Artificial Sequence
  ENSG00000115977_118 (sequence is synthesized)
ggagatgtctggaaagaagagcaagataaaaaccctgcacatcaacaggaagtataatcctgcagttactaataattcctgtagaagcagcagctctaggagtctccagatctgattctc

SEQ ID NO: 213282 - DNA, 120 bp, Artificial Sequence
  ENSG00000115977_119 (sequence is synthesized)
agtctgtgtgcaagccaggctggctctcgtgcatgactgtctatgggtgtggaatgtacgtcagagcctgtgtagagatacaggcagatgggctaactcctcatgtctagtcatgctggc

SEQ ID NO: 213283 - DNA, 120 bp, Artificial Sequence
  ENSG00000115977_120 (sequence is synthesized)
agggctttccccacatccatgcttttgaaattagtgtgagtgtacaggtttgtgtgtgcatgtatacgtgtgtgtgcacaggaagcatttccacttgagggaaatcctgccccatcatgc

SEQ ID NO: 213284 - DNA, 120 bp, Artificial Sequence
  ENSG00000115977_121 (sequence is synthesized)
ctacctccacaatgaaatcactcgttttttggtgtttgctcgcctaactgacttgaaccccattttatttatttagtttttttctcatggcaaagtagaatacgttggaaggtgtaggga

SEQ ID NO: 213285 - DNA, 120 bp, Artificial Sequence
  ENSG00000115977_122 (sequence is synthesized)
aatcctgctggaactggtgtttcagagtaaatcttttttctctccggaatttcttgttttgctattaacaaattatatttacctgattatgaaaaattaattttccttatacattttccc

SEQ ID NO: 213286 - DNA, 120 bp, Artificial Sequence
  ENSG00000115977_123 (sequence is synthesized)
cttacaacactagaaaagagcaccttgttacagttccggcctctcagtatgtgggctaaatgccagcattagggaattcattaatcatgagactaggctacaaactaggcttgcttgttt

SEQ ID NO: 213287 - DNA, 120 bp, Artificial Sequence
  ENSG00000115977_124 (sequence is synthesized)
ttgttgttgttgttgttgttgttgtttccaaatctctactgccttttgaggaaatgtaaatctgagacatggaaataagtgtttgggagaatggaaaagagctgaatcaggtaggcatga

SEQ ID NO: 213288 - DNA, 120 bp, Artificial Sequence
  ENSG00000115977_125 (sequence is synthesized)
aatcaggtaggcatgaaaacttttacattctctatcctctttagatgttgaaataggccagacaggttaactgatgttttttaaaattgtcttttatttctggaaagatctgacttattc

SEQ ID NO: 213289 - DNA, 120 bp, Artificial Sequence
  ENSG00000115977_126 (sequence is synthesized)
ctagcttttttcataccctttattattagtgccttaaaataaagctggccaggtgcagtgccacacacctgtaataccagcattttggaaggctgaggcaggaggatcagttgagcccag

SEQ ID NO: 213290 - DNA, 120 bp, Artificial Sequence
  ENSG00000115977_127 (sequence is synthesized)
ttggaaggctgaggcaggaggatcagttgagcccaggaagttcaagaccaactctggcaacacagcgagaccctgtcccttcaaaaaataaataaaaaaataggctgggcatggtggctc

SEQ ID NO: 213291 - DNA, 84 bp, Artificial Sequence
  ENSG00000115977_128 (sequence is synthesized)
tggcctgggcgacagagcgagtctaaaaaataaaattaaataaaataatgaaaaaaattagctgggtatggtgacatatgcctg

SEQ ID NO: 213292 - DNA, 120 bp, Artificial Sequence
  ENSG00000115977_129 (sequence is synthesized)
cagagcgagtctaaaaaataaaattaaataaaataatgaaaaaaattagctgggtatggtgacatatgcctgtagctactcaggaggctgagctggaaggatcacttgagcccaggagtt

SEQ ID NO: 213293 - DNA, 120 bp, Artificial Sequence
  ENSG00000115977_130 (sequence is synthesized)
gtgacagagtgagacactgtctccaaaaatataataataaaaataaagcctgtatctcaatgggaagatttctgctaaggcagttcaactcactggaaagaactgctgcattaggtttca

SEQ ID NO: 213294 - DNA, 120 bp, Artificial Sequence
  ENSG00000115977_131 (sequence is synthesized)
actttaatgctttctgttacttctagtaaaggttaagtgatttttccattagctgtagaagtttggagagctatttaccaagccagatcaatgatttaaaaattattggaaattcatcta

SEQ ID NO: 213295 - DNA, 120 bp, Artificial Sequence
  ENSG00000115977_132 (sequence is synthesized)
agaatcaagtctgaatgcccaattctattgcggttgattaggtgtgatattctttaaagttcaggaatattggcagtaaaaaatgagcagctacttttcaatactttgtccttttttggt

SEQ ID NO: 213296 - DNA, 120 bp, Artificial Sequence
  ENSG00000115977_133 (sequence is synthesized)
ggtctctgcctatttcaaatgtcctgatcaaaagataaataattggcactgtgccaaggtttggttttccaactaaggtttcaactgtgccagaaacctatgtccttcactttggtggat

SEQ ID NO: 213297 - DNA, 120 bp, Artificial Sequence
  ENSG00000115977_134 (sequence is synthesized)
gctaaatgttattctaagaatatgctttttcccaattctcctttctgatttttatgtattagtggatgcaaaattgtctttctagttgaatgaataatttcggctaatgcacgtggaact

SEQ ID NO: 213298 - DNA, 120 bp, Artificial Sequence
  ENSG00000115977_135 (sequence is synthesized)
ttgcaccccagattcttcccatggtcattatcaagtgaagccctcaaaaacatgagcgaagagcctagaaatactcagggagatttctcaccccaactcagaaatttttttttttttttt

SEQ ID NO: 213299 - DNA, 80 bp, Artificial Sequence
  ENSG00000115977_136 (sequence is synthesized)
agatttctcaccccaactcagaaattttttttttttttttcaagacggcgtcttgctctgtcgctcaggcgtttccgagt

SEQ ID NO: 213300 - DNA, 86 bp, Artificial Sequence
  ENSG00000115977_137 (sequence is synthesized)
agaaattcttaaagtaagagatcattctaattcccctttccaaatattcaggattatctctgtaacagcccagcaaaatgtttttc

SEQ ID NO: 213301 - DNA, 120 bp, Artificial Sequence
  ENSG00000115977_138 (sequence is synthesized)
ttcaggattatctctgtaacagcccagcaaaatgtttttcctttggttatttgataattcccttctaatcaagtgactattttaattctcaaggtgcaaatcaggataaaatcatggtga

SEQ ID NO: 213302 - DNA, 120 bp, Artificial Sequence
  ENSG00000115977_139 (sequence is synthesized)
ggtgcaaatcaggataaaatcatggtgattttactacatagttgaatacttcgtcaagtatgagcttgtatcctttttaaatttttcactggaggccaggcgcggtggctcacgcttgta

SEQ ID NO: 213303 - DNA, 61 bp, Artificial Sequence
  ENSG00000115977_140 (sequence is synthesized)
tgggcgtgatggcacgcacctgtagtcccagttactagggaggctgaggcagaattgcttg

SEQ ID NO: 213304 - DNA, 120 bp, Artificial Sequence
  ENSG00000115977_141 (sequence is synthesized)
attgtcactggagacatgatgggtggagactctacataccttctttgaatacagaaacggatgcaaacacatgcaaattacttttttttttttttttggtgatgcatgaaaaaactttga

SEQ ID NO: 213305 - DNA, 120 bp, Artificial Sequence
  ENSG00000115977_142 (sequence is synthesized)
cttgtggattacattaattattagtaacagttagattctgccgacttgtattacagtagggtcttatttccttaaagagaaaaaaaaatacagtcatgccccacttaatgatgagggaga

SEQ ID NO: 213306 - DNA, 120 bp, Artificial Sequence
  ENSG00000115977_143 (sequence is synthesized)
cattcagagaaatgcatccttaggtgattttgtcattgtgtgaacatcacagagtgtacttaacacaaacctagatggcacggcctactacctacctaggctatatggtccagcctgttg

SEQ ID NO: 213307 - DNA, 84 bp, Artificial Sequence
  ENSG00000115977_144 (sequence is synthesized)
ctgtatccaaacattttagacatagaaaaggtacagtaaaaatatggtataatcttatgggaccatcatggtatatgtggtcca

SEQ ID NO: 213308 - DNA, 120 bp, Artificial Sequence
  ENSG00000115977_145 (sequence is synthesized)
tggtataatcttatgggaccatcatggtatatgtggtccatcattgatggaatcgtttttatgcagcacatgactgtatataatcaacaaacaactctactttcttgttttcgtttgttg

SEQ ID NO: 213309 - DNA, 120 bp, Artificial Sequence
  ENSG00000115977_146 (sequence is synthesized)
tgtttttgctttacacatttgatagggaacatagaagttgtgacctttcatttcagtggaaagcattgagccagaatatatttattcctaaaccatcgagccacacatgcattgatgaac

SEQ ID NO: 213310 - DNA, 120 bp, Artificial Sequence
  ENSG00000115977_147 (sequence is synthesized)
cctgaaagaatccacagtaattgactaacaggcagtactgaatgaaagatgtcatatgtggtgaaaaatatttaatatatcagtttcttgggctcacatacagccctttagttccaagtg

SEQ ID NO: 213311 - DNA, 120 bp, Artificial Sequence
  ENSG00000115977_148 (sequence is synthesized)
cttggttagattagaaaatgggatgaacacaatttgatgctgaagcagctgctgagcagcacccagggagtctaggtcatacgccctatattgttttcggcccacttattgttgagttga

SEQ ID NO: 213312 - DNA, 120 bp, Artificial Sequence
  ENSG00000115977_149 (sequence is synthesized)
aaagtctcatatttgtagactagagtgtatgtgtttagaggctcatgttgtatctgagttttctctggcaactaagatctctttctaaacgttctagaaagatactggtatcttactggc

SEQ ID NO: 213313 - DNA, 120 bp, Artificial Sequence
  ENSG00000115977_150 (sequence is synthesized)
ccattatttagtaagttttagaatacatgtacatcagtgttttcaactgcttggtggacatttcactgatgcataatcaaagtagcagattataatcatcagagtgatctgacaaggaaa

SEQ ID NO: 213314 - DNA, 120 bp, Artificial Sequence
  ENSG00000115977_151 (sequence is synthesized)
ttctgtatttgcttccataaagaaaaataatcaaaacatatatcagatataatatatatgcagtatatcacataggaaattttattgtaggaaattagagaaggatgctactcaattcat

SEQ ID NO: 213315 - DNA, 120 bp, Artificial Sequence
  ENSG00000115977_152 (sequence is synthesized)
tctctagcaggaagaatacagcttaaaaatcacttgggtccctttaataaagaaaagtgtgattctgtgttgtgtgtttggaactgaaattggagaacacgtgccagtcgactgtgaaat

SEQ ID NO: 213316 - DNA, 120 bp, Artificial Sequence
  ENSG00000115977_153 (sequence is synthesized)
ggttgctggataaaaccacagatgtggttttatccgagaaatgtgggactgaaattattttgatgagaggtacataagagagctgcagaaaagactgtagcttctgaggaggcaggagta

SEQ ID NO: 213317 - DNA, 120 bp, Artificial Sequence
  ENSG00000115977_154 (sequence is synthesized)
ccttgttaatatccaaaccacccctgagttctaatgttccaactccacctaaacgaggaattggaaactttaaatggaattatctaatttaaattcttagttttttctttgtctttctca

SEQ ID NO: 213318 - DNA, 120 bp, Artificial Sequence
  ENSG00000115977_155 (sequence is synthesized)
gctgatacttgtagttttgttttgttttttaaccaccaagaacacttgcaagtttgttactgaaaacatcactaaaggaaaagaagagtttcaaaatgcttgaaaagtagtatgtggttg

SEQ ID NO: 213319 - DNA, 120 bp, Artificial Sequence
  ENSG00000115977_156 (sequence is synthesized)
ggaattgtttttgttcaagtccctggaagtcctcttggcttagctcccttgttcctgttcccacttcatttccttacttaacattcccctattttgagcatgtcaataagtgcatgatga

SEQ ID NO: 213320 - DNA, 120 bp, Artificial Sequence
  ENSG00000115977_157 (sequence is synthesized)
atggcacagttgaatgatcatgttaactttaattgcttcctttgttgctgtaaacagtttcttgttaagtttcagccaagtctgtgacaatctcaccaaataagaatgaaatgggcgggg

SEQ ID NO: 213321 - DNA, 120 bp, Artificial Sequence
  ENSG00000115977_158 (sequence is synthesized)
caaataagaatgaaatgggcggggtgtggtggctcacacttggaatcccagcactctgggaggctgtgttgggccgatcgcttgagctcatgagttcaagaccaacctgggcaacatggc

SEQ ID NO: 213322 - DNA, 120 bp, Artificial Sequence
  ENSG00000115977_159 (sequence is synthesized)
agctacttgggaggcttaggtgggaggatggcttgagcacgggaggcagaggttgcactaagccaagatcgtgtcactgcactccagcccaggcaatagagccagaccctgtctcaaaaa

SEQ ID NO: 213323 - DNA, 120 bp, Artificial Sequence
  ENSG00000115977_160 (sequence is synthesized)
actccagcccaggcaatagagccagaccctgtctcaaaaaaacaaaacaaacaaaacatgaatgaatgaaatggctcaccttccctattatgaactagaagaaaggatgaaggaaggttg

SEQ ID NO: 213324 - DNA, 120 bp, Artificial Sequence
  ENSG00000115977_161 (sequence is synthesized)
gcaggaccccagccttactctgtagtgacaacccagaggtacttttcccggaatgcagggtcaagtttatgtgtgaagggactctagaatagctggtaaaaatggctacatggtaaccat

SEQ ID NO: 213325 - DNA, 120 bp, Artificial Sequence
  ENSG00000115977_162 (sequence is synthesized)
tcttgacttagtccagtattcccataatttgtaattccataaatttattctcagctgtcccccagccatttctaatagaaggatgtgtaccccagttttgacaatgttcttgaaatcaag

SEQ ID NO: 213326 - DNA, 120 bp, Artificial Sequence
  ENSG00000115977_163 (sequence is synthesized)
ttagtgttacctgcattgcattataatggaactatatgtacatgttaaagggatccgtttgattcctttcggcaaggaattgcaaaaatagtttttaccaataccagttaaaataggata

SEQ ID NO: 213327 - DNA, 120 bp, Artificial Sequence
  ENSG00000115977_164 (sequence is synthesized)
ggttagactttgggggcagggtgagacagtgcagccttttcactctgaaatggcaaatcagctgtactctttgagtctaccagagattcctatttgagtgtgaatggggtgtgtgtgtgt

SEQ ID NO: 213328 - DNA, 120 bp, Artificial Sequence
  ENSG00000115977_165 (sequence is synthesized)
gtgtgtgtgctcattcatcttcatgctttcttccatggtgttaattcaagctctcctaataaaggtatccaaagagtactgagaagtgaccataggtatttggcatgagtaaatgtagtt

SEQ ID NO: 213329 - DNA, 120 bp, Artificial Sequence
  ENSG00000115977_166 (sequence is synthesized)
ccttttgccaaaaaaactctcaaaagttacaactggagttcttcgcgataaaaggttggggaaatcagccatggctttagccttgttcccaagtacacatcttcttatccacaaggatga

SEQ ID NO: 213330 - DNA, 120 bp, Artificial Sequence
  ENSG00000115977_167 (sequence is synthesized)
aactctgtagggctcaccctgagggctcatgtgtggcattgagagggtagcagtgaccagaacaccacaaggcccacaagatgttttgaatgagggaacatttaatgtcatttgttagga

SEQ ID NO: 213331 - DNA, 120 bp, Artificial Sequence
  ENSG00000115977_168 (sequence is synthesized)
gatagaaaccaaataataaaggacaaggaccacgctcattccgtggagaagaggtgaactccctctgctgactatttggaatggactgaatgaggaggtctctccagccagaaggagtat

SEQ ID NO: 213332 - DNA, 120 bp, Artificial Sequence
  ENSG00000115977_169 (sequence is synthesized)
tgaggtcatcaggcctcagaaaacaatgtacacataatctcgggctgtgaacaagagaaaggagggggggaaacatgaaagtcaatcttaacaatttttgcaatacctcttatttgcaga

SEQ ID NO: 213333 - DNA, 120 bp, Artificial Sequence
  ENSG00000115977_170 (sequence is synthesized)
ccattggatttatgttattgcactctcggtgtgatttatcgtatgtatctgataggttttatgaattgttttgagttgtaaactcctataccctttattaaaatggacctaattaagtga

SEQ ID NO: 213334 - DNA, 120 bp, Artificial Sequence
  ENSG00000115977_171 (sequence is synthesized)
cctgccaccccagaagccaaggctatttaatctcacttgtatcactccaaatgaagtgttttccttgcttttcgggggtacaacgtctattttttgcctttcttgatatctggagatttc

SEQ ID NO: 213335 - DNA, 120 bp, Artificial Sequence
  ENSG00000115977_172 (sequence is synthesized)
tagagtggatctcttatgaatgaggaggaatgtggaaagtttcacatttagttagaagaactttaaaaaattggtttctaactagactacctttactgaacttaatgaaatttagcagat

SEQ ID NO: 213336 - DNA, 120 bp, Artificial Sequence
  ENSG00000115977_173 (sequence is synthesized)
acaggggtgagccaccatgcccagcccagattcttctttagaaggcccatgtacatccagctgcagtgggacgagcctgggaagcataggaagaccccatccctacaaaaaaaatgttgt

SEQ ID NO: 213337 - DNA, 120 bp, Artificial Sequence
  ENSG00000115977_174 (sequence is synthesized)
gaagcataggaagaccccatccctacaaaaaaaatgttgttagttagccaggtgtgggggtgcacacctgtgctaccagctctttgggaggctgagacggaagatcactttgagccaggg

SEQ ID NO: 213338 - DNA, 120 bp, Artificial Sequence
  ENSG00000115977_175 (sequence is synthesized)
gctgcagtgagccctgatcatgccactgccctccagcttaagtgacagagacccatcttaaacaaaattaaaaaatttaaaaaggtccatgtatataccaagtatcagtaactgagaaaa

SEQ ID NO: 213339 - DNA, 120 bp, Artificial Sequence
  ENSG00000115977_176 (sequence is synthesized)
tgagaaaacattttgcccactggttaagccccataaatagaatccagggcaggggcttggtctgcttcctctctcacattttcctatgttccaacagcaaggcaggcaagatttgcaaaa

SEQ ID NO: 213340 - DNA, 120 bp, Artificial Sequence
  ENSG00000115977_177 (sequence is synthesized)
tgtccaaggcccctgtactccaggagggtccaatcatgaggcacctaataatgcctttgggcagaaagtcctagaactcagaagtgccatgaccttgcataggggtaggcctgcagctga

SEQ ID NO: 213341 - DNA, 120 bp, Artificial Sequence
  ENSG00000115977_178 (sequence is synthesized)
ggggtgtcacgtggtgcaaaaggcctcccagctacatcctgggatggggtttgagatggattaatggcctttgcatggcacagaggatgtttgcccccaggtttatcccttaataaaagt

SEQ ID NO: 213342 - DNA, 120 bp, Artificial Sequence
  ENSG00000115977_179 (sequence is synthesized)
gaaattaccagaaaaaattaaggtgcctttcagcccatctcttctgacatggaagaggtttgctgagcggcttatgttctgaatttgtttatgagaactgatcattagtgagactggcca

SEQ ID NO: 213343 - DNA, 120 bp, Artificial Sequence
  ENSG00000115977_180 (sequence is synthesized)
cagtatttaaccttgcacatgcatgctcagtgaagcctagacattcagagcagcagaaataaagtaacttatttttctttccaccttgcctgagactggcattttagagacctgttaaaa

SEQ ID NO: 213344 - DNA, 120 bp, Artificial Sequence
  ENSG00000115977_181 (sequence is synthesized)
gaaagtcttcacatggctgggtgcagtggctcacacttgtaaccacaggactttgggaggccaaggtgggatagatcgcttgagctcaggagcaagacaccatctcaaaaaatgagaatt

SEQ ID NO: 213345 - DNA, 120 bp, Artificial Sequence
  ENSG00000115977_182 (sequence is synthesized)
ggggagagaatggtgatagtcagttgtccttcatctcagagcatcatgtttacagttgggttgtttgactttaagtgaagaatgaggagggggtttacaggcatacatcagagtaaaagg

SEQ ID NO: 213346 - DNA, 120 bp, Artificial Sequence
  ENSG00000115977_183 (sequence is synthesized)
aaggactcttagagcactttatcagtggtcctgtggtcattgtacatagatgttttgatttatgatgtcacagagcctataaaaagctgagaggtgcacacaccgtaaaagtactagcat

SEQ ID NO: 213347 - DNA, 120 bp, Artificial Sequence
  ENSG00000115977_184 (sequence is synthesized)
catttgctctcgtttgtacaaagggcaagatgacatcattttctataaattttctaactgaactcagactgtttacagattttaaaccttctgattgatcaaaggagaaactaagcagga

SEQ ID NO: 213348 - DNA, 120 bp, Artificial Sequence
  ENSG00000115977_185 (sequence is synthesized)
aatgtcataatgggttcgggaggatggcacggggctatattaaacatttgtatggtaaaagctgcaaaaatgacagactgtgtctatacattggaggagaaacaggcaaacatttaaaac

SEQ ID NO: 213349 - DNA, 120 bp, Artificial Sequence
  ENSG00000115977_186 (sequence is synthesized)
ttcacatggtgcctctttattttcatatgttttcctgtgtataatttacacatgttcatttataaaaatgtggagaaatgaataaggcccaaagtaaagaaaataaaatcttataacccc

SEQ ID NO: 213350 - DNA, 120 bp, Artificial Sequence
  ENSG00000115977_187 (sequence is synthesized)
ggtgatgtatgggaagtgctcattctgatggacttttgtagaggtatgtatatgaaccattcccttaagctgtcatttctctagcattttgattgtcatggttagggtggtcatttcact

SEQ ID NO: 213351 - DNA, 120 bp, Artificial Sequence
  ENSG00000115977_188 (sequence is synthesized)
taatgtgcactgcactctatgatatgttctggtttgacagatgagaaaactaaaagatacagtctgctgtcaactcttagttattcttataacggtacaaacgtagataatatagaactc

SEQ ID NO: 213352 - DNA, 120 bp, Artificial Sequence
  ENSG00000115977_189 (sequence is synthesized)
ttctcaggcccacatgtgtccttagaggggaaagaactaaacaacttttgaaagtttttcttatcaaaagtctttactagtgaagttttaaaactacctccttgtatggaaaacttgagt

SEQ ID NO: 213353 - DNA, 120 bp, Artificial Sequence
  ENSG00000115977_190 (sequence is synthesized)
gaaaacttgagtatctcctagatactgtgttataatacctctcagtgagaatatttactaagacttagacgaccggccagttgtggtagctcaggcctgcaatcccagcactttgggagg

SEQ ID NO: 213354 - DNA, 120 bp, Artificial Sequence
  ENSG00000115977_191 (sequence is synthesized)
gatcacttgagcctaggaatttgagaccagcctggacaacatacggagtctcagtctctacaaaaaaattttttaattagccagccatggcagcatgcaccggtggtaccagcttctcgg

SEQ ID NO: 213355 - DNA, 80 bp, Artificial Sequence
  ENSG00000115977_192 (sequence is synthesized)
ccagccatggcagcatgcaccggtggtaccagcttctcgggagactgaggtgggatgattgcttgaggcccggagggcaa

SEQ ID NO: 213356 - DNA, 120 bp, Artificial Sequence
  ENSG00000115977_193 (sequence is synthesized)
atcaacagtcttttccagaactctgtctgcactgagaccctcttcccccagtcctcttctcgcggtcgactccttcccatccgtggcgacagaacggcggttgcaggagaggccccggtc

SEQ ID NO: 213357 - DNA, 120 bp, Artificial Sequence
  ENSG00000115977_194 (sequence is synthesized)
ccgccccgaggggcacttccggcggcggttcacttcctggttgggtggatggagccgggcgggagcgcgcgcgggggaggggcggcgggtttaaacttacacgaatcgctttctggagga

SEQ ID NO: 213358 - DNA, 120 bp, Artificial Sequence
  ENSG00000115977_195 (sequence is synthesized)
aggaaaaaaacagcagaatctatttttcattgtgggagagcccaggttgtcctgcttatctgaaattaagcccaaatcctaaaatttctgaatacctgctgtcagcttcctgcaaacggg

SEQ ID NO: 213359 - DNA, 120 bp, Artificial Sequence
  ENSG00000115977_196 (sequence is synthesized)
ccaggttgcctaaggaatgtcatgagagagctggcagaggcaggggacaggacaggcaccagcaaacaccacttcaccatgcagctattttcatgtcctcccagcccactgaagtgctga

SEQ ID NO: 213360 - DNA, 120 bp, Artificial Sequence
  ENSG00000115993_0 (sequence is synthesized)
ggcagtgggagcagcggcagcagcttcggctgctgctttcaggctgccgctgcattaggggcttcctgaggaagcgcgggcggacgacagaggatgccgaaccactccagtcatgactgt

SEQ ID NO: 213361 - DNA, 120 bp, Artificial Sequence
  ENSG00000115993_1 (sequence is synthesized)
ccaaagtatgataatcacatgagagtgctcgttgctacggatgtcatttgactcatcagagaaaatctgtctaaaagaaaatatccatgtgaccaaatccatttcattattgaatggctt

SEQ ID NO: 213362 - DNA, 120 bp, Artificial Sequence
  ENSG00000115993_2 (sequence is synthesized)
gatggatttcctttactctgattcataccaaagctgtccttctcaaccaaagcaagaaaggatcctgcatgagtcaatcccagaatgcaatttttacatcaccaacaggtgaagaaaacc

SEQ ID NO: 213363 - DNA, 120 bp, Artificial Sequence
  ENSG00000115993_3 (sequence is synthesized)
tcatgaatagcaatcacagagactcggagagcatcactgatgtctgctccaatgaggatctccctgaagttgagctggtgagtctgctagaagaacaactaccacagtataggctaaaag

SEQ ID NO: 213364 - DNA, 120 bp, Artificial Sequence
  ENSG00000115993_4 (sequence is synthesized)
tagacactctctttctatatgaaaatcaagactggactcagtctccacaccagcggcagcatgcatctgatgctctctctccagtccttgctgaagagactttccgttacatgattctag

SEQ ID NO: 213365 - DNA, 120 bp, Artificial Sequence
  ENSG00000115993_5 (sequence is synthesized)
gcacagacagggtggagcagatgaccaaaacttacaatgacatcgacatggttacacatctcctggcagagagggatcgtgatctggaactcgctgctcgaattggacaagctctcttaa

SEQ ID NO: 213366 - DNA, 120 bp, Artificial Sequence
  ENSG00000115993_6 (sequence is synthesized)
agcggaaccatgtcttatctgagcagaacgaatccctggaggagcaattgggacaagcctttgatcaagttaatcagctgcagcatgagctatgcaagaaagatgagttacttcgaatcg

SEQ ID NO: 213367 - DNA, 120 bp, Artificial Sequence
  ENSG00000115993_7 (sequence is synthesized)
tctccattgcttctgaagaaagtgaaactgattccagctgttctacacctcttcggttcaatgagtcctttagcttatctcaagggttgctgcagttggaaatgctgcaagaaaagctca

SEQ ID NO: 213368 - DNA, 120 bp, Artificial Sequence
  ENSG00000115993_8 (sequence is synthesized)
aggaactggaagaagagaatatggctcttcgatccaaggcttgtcacataaagacagaaactgttacctatgaagaaaaggaacaacagcttgtcagcgactgtgttaaagaacttcgtg

SEQ ID NO: 213369 - DNA, 120 bp, Artificial Sequence
  ENSG00000115993_9 (sequence is synthesized)
aaacaaatgctcagatgtccagaatgactgaagaattgtcagggaagagtgatgagctgattcgataccaagaagagctttcctctcttttgtcacagattgtagaccttcagcacaaac

SEQ ID NO: 213370 - DNA, 120 bp, Artificial Sequence
  ENSG00000115993_10 (sequence is synthesized)
ttaaagaacatgtgattgagaaggaagaactaaaacttcacctgcaagcttccaaagatgcccaacggcaactgacaatggagctgcacgagttacaagacaggaatatggagtgtctag

SEQ ID NO: 213371 - DNA, 120 bp, Artificial Sequence
  ENSG00000115993_11 (sequence is synthesized)
gaatgttacatgaatcccaagaagaaataaaggaacttcgtagtagatctggccctactgctcatctctacttctcccaatcatatggagcttttactggggaatctttggcagctgaga

SEQ ID NO: 213372 - DNA, 120 bp, Artificial Sequence
  ENSG00000115993_12 (sequence is synthesized)
ttgaggggactatgcgtaaaaagctgagtttggatgaggaatcttctctctttaaacaaaaagcccaacagaagcgggtatttgataccgtcaggattgccaatgacacacggggccgct

SEQ ID NO: 213373 - DNA, 120 bp, Artificial Sequence
  ENSG00000115993_13 (sequence is synthesized)
ctatctcattcccagctctgttacccattccaggctccaaccgttcaagtgtcatcatgacagcaaaaccttttgagtctggtcttcagcaaacagaggacaaatcactcctgaaccagg

SEQ ID NO: 213374 - DNA, 120 bp, Artificial Sequence
  ENSG00000115993_14 (sequence is synthesized)
ggagcagctcagaggaggttgcagggagctcccagaagatgggccaaccaggaccctcaggagatagtgatttggctacagcactgcatcgccttagcttgcgtcgacaaaactatttaa

SEQ ID NO: 213375 - DNA, 120 bp, Artificial Sequence
  ENSG00000115993_15 (sequence is synthesized)
gtgagaagcagttctttgctgaagaatggcagcggaagatccaggttctggcagaccagaaggaaggagttagtggctgtgtcaccccgacagagagccttgcctctctctgcaccaccc

SEQ ID NO: 213376 - DNA, 120 bp, Artificial Sequence
  ENSG00000115993_16 (sequence is synthesized)
agtcagagatcacagacctcagcagtgccagttgccttcgaggttttatgccagaaaaattacaaattgtcaagccccttgaaggatcacaaactctgtatcactggcagcagcttgctc

SEQ ID NO: 213377 - DNA, 120 bp, Artificial Sequence
  ENSG00000115993_17 (sequence is synthesized)
aaccaaacttgggaaccatccttgatccacgaccaggtgtcattactaaaggctttacccagttgcccggggatgctatttatcacatctcagatttagaagaggatgaagaggagggta

SEQ ID NO: 213378 - DNA, 120 bp, Artificial Sequence
  ENSG00000115993_18 (sequence is synthesized)
ttacttttcaggttcagcaacctcttgaagtggaagagaaactttcaacatccaagccagtaacagggatcttcctgccacccattacttcagcaggtggaccagttacagttgcaaccg

SEQ ID NO: 213379 - DNA, 120 bp, Artificial Sequence
  ENSG00000115993_19 (sequence is synthesized)
ccaacccaggaaagtgcctgtcgtgcacaaactcaacattcactttcaccacctgtagaatattacatccctctgacatcactcaggttacccccagctctgggttcccttcattatcct

SEQ ID NO: 213380 - DNA, 120 bp, Artificial Sequence
  ENSG00000115993_20 (sequence is synthesized)
gtggaagtagcggtagcagttcatccaacacggctgtgaattctcctgccttgtcctatagactcagcattggtgagtccatcaccaaccgacgagattccactacaaccttcagtagca

SEQ ID NO: 213381 - DNA, 120 bp, Artificial Sequence
  ENSG00000115993_21 (sequence is synthesized)
ccatgagcttggccaaacttctacaagagcgaggcatctctgccaaagtgtaccacagcccaatttcagagaaccccctccagcctctccctaaatccctggctatcccttccacaccac

SEQ ID NO: 213382 - DNA, 120 bp, Artificial Sequence
  ENSG00000115993_22 (sequence is synthesized)
caaattcaccatctcactcaccttgcccttctcctttaccctttgagcctcgagtgcatctctctgaaaattttttggcctctcgaccagctgagacattcctccaggagatgtatggct

SEQ ID NO: 213383 - DNA, 120 bp, Artificial Sequence
  ENSG00000115993_23 (sequence is synthesized)
tgagaccctcccggaaccctcctgatgttggccagttgaagatgaacttagtggacaggctgaagagactggggatagccagagtggtcaagaaccctggtgcccaagagaatggaagat

SEQ ID NO: 213384 - DNA, 120 bp, Artificial Sequence
  ENSG00000115993_24 (sequence is synthesized)
gccaggaggcagaaattggtcctcaaaaaccagattctgctgtttatttaaattcaggtagcagtttattaggtggactaaggaggaatcagagtcttccagtcataatgggtagctttg

SEQ ID NO: 213385 - DNA, 120 bp, Artificial Sequence
  ENSG00000115993_25 (sequence is synthesized)
ctgccccagtttgcacatcctcacccaaaatgggtgtcctgaaggaggactgaggttcagcagttaactgaccttttatacaagttagcacatgaaggatagatatgcactgaaacatgt

SEQ ID NO: 213386 - DNA, 120 bp, Artificial Sequence
  ENSG00000115993_26 (sequence is synthesized)
gttgcacaagggttgtgaatgtgaaagggggaatggaggaatggaaataaaattgggatgagccctaatggaggaagtcgggcaaattgaaagtataaatgaatgggccatgagtgttca

SEQ ID NO: 213387 - DNA, 120 bp, Artificial Sequence
  ENSG00000115993_27 (sequence is synthesized)
gagggagaaaagaaaggtttaatatactccttcagttgagttttcttgtcttgaacataaaaagtgaatacaaataaattcagtaatactaaaacatacagagatactgaacttgctggc

SEQ ID NO: 213388 - DNA, 120 bp, Artificial Sequence
  ENSG00000115993_28 (sequence is synthesized)
acatttacttctggtaagcataaagcagagagaacccaggttagaaggatgggaagagaaaaggagcagttttattgcttatagaaagccgttctgaggggttggtggggtaagctcagt

SEQ ID NO: 213389 - DNA, 120 bp, Artificial Sequence
  ENSG00000115993_29 (sequence is synthesized)
ctattactgagacaatagtgagatggcttatatgtttcccctgttaatatctggttaaattatgtatccatcaaatggtatgctcgcagcattagcaaaattaggagtttcatctttttc

SEQ ID NO: 213390 - DNA, 120 bp, Artificial Sequence
  ENSG00000115993_30 (sequence is synthesized)
attgaatcacaggtggagactcctattttcctttctgttttcaggcctttgagcccctgggagcccaaataccactcaattattttgtatttatgattaataaaagttcattttttaaat

SEQ ID NO: 213391 - DNA, 120 bp, Artificial Sequence
  ENSG00000115993_31 (sequence is synthesized)
ttgtatttttatacaacctccaaaaaaaaaaacaactgggtagagggtgggagggatttacttttaagaggcaaaatgtgagtaaattgaaaccaagaaaacttgtttttagaatatttc

SEQ ID NO: 213392 - DNA, 120 bp, Artificial Sequence
  ENSG00000115993_32 (sequence is synthesized)
gtctgaataagtacagtagccaaggaatacaaacataattgcatgtttttaaaaattccttggaggctggaaggggttaagccagaagtgcaatcaataggaattagggaatgttgtata

SEQ ID NO: 213393 - DNA, 120 bp, Artificial Sequence
  ENSG00000115993_33 (sequence is synthesized)
tttatatatgtaaactttttttgtaagaaaagttggtgacaactaaaccaactttttccaaagtgcgctatgcatatttttaatgaaagatgacatgtatttgcacaaaaattctcaggc

SEQ ID NO: 213394 - DNA, 120 bp, Artificial Sequence
  ENSG00000115993_34 (sequence is synthesized)
acattaaattattgtaaactgaagtaaaacccgggtgcttgctttgagattgtggttttttcttcctaatgtaaaataaaataaaacacatctgccttcttgatatttatagaattagag

SEQ ID NO: 213395 - DNA, 120 bp, Artificial Sequence
  ENSG00000115993_35 (sequence is synthesized)
aataaactttttaatgggggagtcaaagctttttctttttctctaaggttctttttttttattcaaactgtatgaaatggcaaagtgaggctctggggttagatttcagcattcagcagt

SEQ ID NO: 213396 - DNA, 120 bp, Artificial Sequence
  ENSG00000115993_36 (sequence is synthesized)
tgacacaggctaagaaatggaaagaagtagatctgttttttctcaatgttgctgagcaaagtctgcttctcatcagatgacgtggctttgtctagacagcacgcagttcagaaagaaatg

SEQ ID NO: 213397 - DNA, 120 bp, Artificial Sequence
  ENSG00000115993_37 (sequence is synthesized)
tctttatacaaaagacatgatagagaaaagatgagagaggggactaattattttgtttatgaaaatggcaagtaaattacttgatctttttggtgcttaatttgcaaatgttttgttcct

SEQ ID NO: 213398 - DNA, 120 bp, Artificial Sequence
  ENSG00000115993_38 (sequence is synthesized)
ttgtcctgacttaaaggcagttttctgaagaactcttgactcttgctcctatggttcccataggcacacctattcccaggccaaggagagtccttcctctccccttttgaggcatccccg

SEQ ID NO: 213399 - DNA, 120 bp, Artificial Sequence
  ENSG00000115993_39 (sequence is synthesized)
ccatccccccacttagagctatgtgctcaaaaagccaacatgaatgcagtggtaaaaatttgttagtttcttatactttttagaatctctcaataaaatttttctaaataaattccacaa

SEQ ID NO: 213400 - DNA, 120 bp, Artificial Sequence
  ENSG00000115993_40 (sequence is synthesized)
aaacaaagggtgaagatggtctctccctttcgttccccttcactcagttgtgctgaggtcaatagagtgtagagtttcagaaaggattccagcaggtttatatgtgaatataagtgtccc

SEQ ID NO: 213401 - DNA, 120 bp, Artificial Sequence
  ENSG00000115993_41 (sequence is synthesized)
tgaatggggcaggcattaaatagaagaatccctgctgtttaaatttcccgcatattccaattcacttttaaaaaataccatttgaatttgtatttcataaagtgactctggggtgcttac

SEQ ID NO: 213402 - DNA, 120 bp, Artificial Sequence
  ENSG00000115993_42 (sequence is synthesized)
tttagtcaattcttaaaattttttatttgttccctaagaaagtaattactgtttctgttgcctggacagttacagtttccaggaaacatcaggaagtaggaaactgtagggccagagagt

SEQ ID NO: 213403 - DNA, 120 bp, Artificial Sequence
  ENSG00000115993_43 (sequence is synthesized)
agtacaacgttaaattgtccgatttatgtgtattacttaaagctataaattgaactagatcttgccgtgctctgtattgagtataatttgtatacttttttataattaatgactaaatga

SEQ ID NO: 213404 - DNA, 120 bp, Artificial Sequence
  ENSG00000115993_44 (sequence is synthesized)
tcactttggaggcagggtggtgggggtgtattagcagccaaataagcacatctgatcaaaaagaaccaggcttagattttttttaagtacattgatgttgatgttccaccagaaacacct

SEQ ID NO: 213405 - DNA, 120 bp, Artificial Sequence
  ENSG00000115993_45 (sequence is synthesized)
taagtgtatactgttgtgtaatgtctctagaaaggaatcctgtcttaaaactgggttttgctgttttttgaagtttctacctaaaatcatttttggtatatcctgataatctctataata

SEQ ID NO: 213406 - DNA, 120 bp, Artificial Sequence
  ENSG00000115993_46 (sequence is synthesized)
ctagaattgtctgcaaaatatagtaagaagaattggagcctaatagctgattcctcccaatttatctgttatgttttgtcactattcacattttagtcttttctacgataaaaattgtat

SEQ ID NO: 213407 - DNA, 120 bp, Artificial Sequence
  ENSG00000115993_47 (sequence is synthesized)
gtgtactttcatgccagtataggaaacctcaatcttttttttttttcgcctttaagaaggttttcagtgattatacctcaggtatttctgagtgtcctattgtctaataggagaaatatc

SEQ ID NO: 213408 - DNA, 120 bp, Artificial Sequence
  ENSG00000115993_48 (sequence is synthesized)
ttcccgagctcagaattaaaagttctcctaaattatgaagatcccaaatcttatgtaaataaccttaggcatgagtccttagggagaagttaatgaccattgttaaagtgcttttttaga

SEQ ID NO: 213409 - DNA, 120 bp, Artificial Sequence
  ENSG00000115993_49 (sequence is synthesized)
aaatgttgtgctgtatgttcttgatttgacataaatgaatagactttggcaagggaggaaataagttaaaaggcagcttacaagagcctattccctataaagggtataattttacacagt

SEQ ID NO: 213410 - DNA, 120 bp, Artificial Sequence
  ENSG00000115993_50 (sequence is synthesized)
actcaaagcttgttatcttttctgaccattttagtacagaattagtacttggtggttactaacatcaacttgtgacatctagaactagggctcttagtgtttagtgggccacttctctga

SEQ ID NO: 213411 - DNA, 120 bp, Artificial Sequence
  ENSG00000115993_51 (sequence is synthesized)
tgtcagatgcatgcagacctgtactccacatgcaacccaacagcagtgcagtgtgataactgagcggtcgcatggcagaggacatccccctcagagtgggcacaagtgccctctagggca

SEQ ID NO: 213412 - DNA, 120 bp, Artificial Sequence
  ENSG00000115993_52 (sequence is synthesized)
gccaggggaatactattgttcgatacctgggatttgactttgtcaaacagctctttgtgcccctatctttgttttgtcaaatgtagatcagttaataaacatgagtagcttgaattttca

SEQ ID NO: 213413 - DNA, 120 bp, Artificial Sequence
  ENSG00000115993_53 (sequence is synthesized)
gagatttatccacttgtgataagtatcagaagttgtttctttttattgctaagctggaacttactcatccctgctattgtagcagaaaagcagccttggacagtacatgaaaaaatgaat

SEQ ID NO: 213414 - DNA, 120 bp, Artificial Sequence
  ENSG00000115993_54 (sequence is synthesized)
gtgactgtgtttcaataaaacttgatttacaaaaacaggcggggcagcaagccgaagttggcctgtgggctgtcgtttgctgacctctactgtacatcaacacttggtaatgtcagtgat

SEQ ID NO: 213415 - DNA, 120 bp, Artificial Sequence
  ENSG00000115993_55 (sequence is synthesized)
gtactattgaggtgaaatatggcataagtaaggatttgctattggcattccaattagagagtcgtggacaaggagctgtatttttcttgccttccactgttcttagatcccactgaaaag

SEQ ID NO: 213416 - DNA, 120 bp, Artificial Sequence
  ENSG00000115993_56 (sequence is synthesized)
tggatagtagcaggttgacagtacaatagtgaaagtcacaggatagaaaatgtatcttgtggagtttacgcaagtaactaagtagttacaactgtgataacttttacacaagtaactaag

SEQ ID NO: 213417 - DNA, 120 bp, Artificial Sequence
  ENSG00000115993_57 (sequence is synthesized)
tagttacaactgtgataagaactatctcagaaaatcacaatattctgtgaacttgtatagtatgggcatcaaggaagtcctacttaagcaaggatcattttagccaaggccagggatgag

SEQ ID NO: 213418 - DNA, 120 bp, Artificial Sequence
  ENSG00000115993_58 (sequence is synthesized)
ccaggtagagatgtatgaacaggttgttgggttttttcctttgtaagtgatgaaatttagtcttcaaatgagaattaaaggtttttgtagttatttctataaaatcactagaaggtattg

SEQ ID NO: 213419 - DNA, 120 bp, Artificial Sequence
  ENSG00000115993_59 (sequence is synthesized)
gtgctagatacaataaacaaaataaacattgtccctgcccttttaaaatgccctaatctgattgctgttttaatcatctttatgtcatataagatatcatgaataaatactttcaagtca

SEQ ID NO: 213420 - DNA, 120 bp, Artificial Sequence
  ENSG00000115998_0 (sequence is synthesized)
acttgccgcgcgtgggcggctctgaccaataacgattgtcgttacagcgaacagtttggccccgtttgtaaaaggccgcggcaggcgaagagagaagagactatcaagatctccacttag

SEQ ID NO: 213421 - DNA, 120 bp, Artificial Sequence
  ENSG00000115998_1 (sequence is synthesized)
ggaagtgggaatcttatttgcggaacattgggcagaagctttgccattggctggtggagaaggaggaggcagaatgtctgcattgttacaccatacagctcaaacttcagaagattttgg

SEQ ID NO: 213422 - DNA, 120 bp, Artificial Sequence
  ENSG00000115998_2 (sequence is synthesized)
gttaagcagttatcattagtctgcaaatgatcgtgttttcacctgatcattagaaactaatgaaacaccttttaagtcttatgaattcaggttacactgttttccagatgccttggcagc

SEQ ID NO: 213423 - DNA, 120 bp, Artificial Sequence
  ENSG00000115998_3 (sequence is synthesized)
tggtacagggcctctgaaaaatggaaccaaattctctgaggactaaagtcccagctttcttatctgatttggggaaggccacattgaggggaatcagaaagtgtccccgatgtggcacat

SEQ ID NO: 213424 - DNA, 120 bp, Artificial Sequence
  ENSG00000115998_4 (sequence is synthesized)
acaatggaacccggggactgagctgtaagaacaagacatgtggaaccatattccgctacggtgcacgcaagcagcctagtgttgaagctgtcaaaatcattacaggctctgatcttcagg

SEQ ID NO: 213425 - DNA, 120 bp, Artificial Sequence
  ENSG00000115998_5 (sequence is synthesized)
tctactcagtgcggcaaagagaccggggccctgattaccgatgctttgtggagctcggggtttcagagacaacaatccagacagtggatgggacgatcatcactcagctgagctctggac

SEQ ID NO: 213426 - DNA, 120 bp, Artificial Sequence
  ENSG00000115998_6 (sequence is synthesized)
ggtgttatgtcccctcatgcctgaaagctgccactcaaggcgttgtggaaaaccagtgccagcacatcaagctggcggtgaactgccaggcagaggccacccctctgaccctgaagagct

SEQ ID NO: 213427 - DNA, 120 bp, Artificial Sequence
  ENSG00000115998_7 (sequence is synthesized)
cggtcctgaatgcaatgcaggcctccccggaaaccaaacagaccatctggcagttggccacggaacccacaggtcctctggtgcagagaattactaaaaacatcttggtggtgaaatgca

SEQ ID NO: 213428 - DNA, 120 bp, Artificial Sequence
  ENSG00000115998_8 (sequence is synthesized)
aggcaagccagaagcacagtttggggtatttgcatacatcttttgtgcagaaagtcagtggcaaaagcttgcctgagcgccgcttcttctgctcctgtcagactctgaaatcgcacaagt

SEQ ID NO: 213429 - DNA, 120 bp, Artificial Sequence
  ENSG00000115998_9 (sequence is synthesized)
caaatgcctccaaggatgagacagcccagagatgcattcatttctttgcttgcatctgtgcctttgccagtgatgagacactggctcaggaattctcagacttcctaaattttgattcca

SEQ ID NO: 213430 - DNA, 120 bp, Artificial Sequence
  ENSG00000115998_10 (sequence is synthesized)
ttgtgagtctactgcctctaagtcaaagaagaggagaaaggatgaagtatctggtgcacagatgaacagttcactactgcctcaagatgcagtgagcagtaatctaaggaaaagtggcct

SEQ ID NO: 213431 - DNA, 120 bp, Artificial Sequence
  ENSG00000115998_11 (sequence is synthesized)
gaaaaagcctgtggttgcttcctcgttaaaaaggcaggcctgtggtcagctgttagatgaggcacaagtgactttatccttccaagactggctggccagtgtcacagaacgcatccatca

SEQ ID NO: 213432 - DNA, 120 bp, Artificial Sequence
  ENSG00000115998_12 (sequence is synthesized)
aaccatgcactatcagtttgatggcaaaccagaaccattggtgttccacattcctcagtcattttttgatgccctgcaacaaagaatatctataggaagtgcaaaaaaacggctccccaa

SEQ ID NO: 213433 - DNA, 120 bp, Artificial Sequence
  ENSG00000115998_13 (sequence is synthesized)
ctccaccacagcttttgttcggaaagatgccttgccactgggaaccttttccaagtatacttggcatatcactaatatcctgcaagttaaacaaatcttagataccccagagatgccctt

SEQ ID NO: 213434 - DNA, 120 bp, Artificial Sequence
  ENSG00000115998_14 (sequence is synthesized)
ggaaatcacccgtagctttatccagaaccgagatgggacttatgagctatttaaatgccctaaagtggaagtagaaagcatagcagaaacctacggtcgtatagaaaaacaaccagtgct

SEQ ID NO: 213435 - DNA, 120 bp, Artificial Sequence
  ENSG00000115998_15 (sequence is synthesized)
gcgacccttggaactaaaaacttttctcaaagttggcaacacttccccagatcaaaaggagccaacacctttcatcatcgagtggatcccagatatccttccccaatctaagattggcga

SEQ ID NO: 213436 - DNA, 120 bp, Artificial Sequence
  ENSG00000115998_16 (sequence is synthesized)
gctgcggatcaagtttgagtatggccaccaccggaatgggcatgtggcggagtaccaagaccagcggccccccttggaccagcccttggaactggcccctctgaccactattactttccc

SEQ ID NO: 213437 - DNA, 120 bp, Artificial Sequence
  ENSG00000115998_17 (sequence is synthesized)
ttaaagcaaaacaagataataatcttttgctgcttaatttgcacatccccaccccttgacaactttaaatgctagttaggcacttagatggccctgttccttggtaaactgctcttagct

SEQ ID NO: 213438 - DNA, 120 bp, Artificial Sequence
  ENSG00000115998_18 (sequence is synthesized)
aagatgcaaattctcagtgctttcaagtggattctgttgaagaaaatctcttgtaaatagcctttttgatgctgctgtgtacagtcttcattatgcattgggcagtatttctggctagag

SEQ ID NO: 213439 - DNA, 120 bp, Artificial Sequence
  ENSG00000115998_19 (sequence is synthesized)
ttttaaaaggaacagaaagaaaaccagcttattttccttcttacggactcatctttagcgtttatttcaaccttttgctaattctctgagaaatctgcagcactcagccatacaccaaca

SEQ ID NO: 213440 - DNA, 120 bp, Artificial Sequence
  ENSG00000115998_20 (sequence is synthesized)
gtgttggaaagttaacaccctggttagggcagaatgttaaagaccatcttggcagagttccagccacgctctttattctgttctcaaataaagcagtgtcactagtttttcctaattata

SEQ ID NO: 213441 - DNA, 120 bp, Artificial Sequence
  ENSG00000115998_21 (sequence is synthesized)
aaaaggccgcggcaggcgaagagagaagagacccatcccggaagccggccgggaggtgagcgtcccggagtcgggcggccgctccgttgactgcagggccccggcggtcttcctccgctg

SEQ ID NO: 213442 - DNA, 120 bp, Artificial Sequence
  ENSG00000115998_22 (sequence is synthesized)
attggggtttcattgttcccgctgggccgggcggtttagtgtaattgccgccggaggaggaggcggagtaacctctggtcagccgagaaaccccactatcctgtagccataaccgcttaa

SEQ ID NO: 213443 - DNA, 120 bp, Artificial Sequence
  ENSG00000115998_23 (sequence is synthesized)
agcaaggaccggggcggcggtggggcaggggtgtagagctcgggttcccagcggaaagcatgtccaaggagcggctgccggcgaggtgatgcttctgcctgggcctacttgggaccggaa

SEQ ID NO: 213444 - DNA, 120 bp, Artificial Sequence
  ENSG00000115998_24 (sequence is synthesized)
gctgtgacgcttccgtcaaatctgaactatcaagatctccacttagggaagtgggaatcttatttgcggaacattgggcagaagctttgccattggctggtggagaaggaggaggcagaa

SEQ ID NO: 213445 - DNA, 120 bp, Artificial Sequence
  ENSG00000115998_25 (sequence is synthesized)
tttggcaagccatccagccgactacaaacccacgtttgtgagttacctgctggctgtgacgcttccgtcaaatctgagtaacagtttcctcatctctaagatgggtaacatagtatctac

SEQ ID NO: 213446 - DNA, 120 bp, Artificial Sequence
  ENSG00000115998_26 (sequence is synthesized)
ctcacaggatcgtgtgggcagtacatgcatagaaaggatttaacacgcagtgtactcagctagttttattatttatccgtaatgatcatttgttcttttcccctaactgtgcctcacaag

SEQ ID NO: 213447 - DNA, 120 bp, Artificial Sequence
  ENSG00000115998_27 (sequence is synthesized)
catgaaacagaatccaccaaacatttaggtctgggtagtggttggatggaaacccatcgcgggttaacgcttccaacaccagtcccttgacactctcccgccgaggaggctgatttgtaa

SEQ ID NO: 213448 - DNA, 120 bp, Artificial Sequence
  ENSG00000116001_0 (sequence is synthesized)
gccgccatcttgtattggggtttcattgttcccgctgggccgggcggtttagtgtaattgccgccggaggaggaggcggagtaacctctggtcagccgagaaaccccactatcctgtagc

SEQ ID NO: 213449 - DNA, 120 bp, Artificial Sequence
  ENSG00000116001_1 (sequence is synthesized)
cataaccgcttaaacgatttgggaggtagtgaagggcagggagctggacctggaggcgccgccgcgacagcagcagccatggaggacgagatgcccaagactctatacgtcggtaacctt

SEQ ID NO: 213450 - DNA, 120 bp, Artificial Sequence
  ENSG00000116001_2 (sequence is synthesized)
tccagagatgtgacagaagctctaattctgcaactctttagccagattggaccttgtaaaaactgcaaaatgattatggatacagctggaaatgatccctattgttttgtggagtttcat

SEQ ID NO: 213451 - DNA, 120 bp, Artificial Sequence
  ENSG00000116001_3 (sequence is synthesized)
gagcatcgtcatgcagctgcagcattagctgctatgaatggacggaagataatgggtaaggaagtcaaagtgaattgggcaacaacccctagcagtcaaaagaaagatacaagcagtagt

SEQ ID NO: 213452 - DNA, 120 bp, Artificial Sequence
  ENSG00000116001_4 (sequence is synthesized)
accgttgtcagcacacagcgttcacaagatcatttccatgtctttgttggtgatctcagcccagaaattacaactgaagatataaaagctgcttttgcaccatttggaagaatatcagat

SEQ ID NO: 213453 - DNA, 120 bp, Artificial Sequence
  ENSG00000116001_5 (sequence is synthesized)
gcccgagtggtaaaagacatggcaacaggaaagtctaagggatatggctttgtctcctttttcaacaaatgggatgctgaaaacgccattcaacagatgggtggccagtggcttggtgga

SEQ ID NO: 213454 - DNA, 120 bp, Artificial Sequence
  ENSG00000116001_6 (sequence is synthesized)
agacaaatcagaactaactgggcaacccgaaagcctcccgctccaaagagtacatatgagtcaaataccaaacagctatcatatgatgaggttgtaaatcagtctagtccaagcaactgt

SEQ ID NO: 213455 - DNA, 120 bp, Artificial Sequence
  ENSG00000116001_7 (sequence is synthesized)
actgtatactgtggaggtgttacttctgggctaacagaacaactaatgcgtcagactttttcaccatttggacaaataatggaaattcgagtctttccagataaaggatattcatttgtt

SEQ ID NO: 213456 - DNA, 120 bp, Artificial Sequence
  ENSG00000116001_8 (sequence is synthesized)
cggttcaattcccatgaaagtgcagcacatgcaattgtttctgttaatggtactaccattgaaggtcatgttgtgaaatgctattggggcaaagaaactcttgatatgataaatcccgtg

SEQ ID NO: 213457 - DNA, 120 bp, Artificial Sequence
  ENSG00000116001_9 (sequence is synthesized)
caacagcagaatcaaattggatatccccaaccttatggccagtggggccagtggtatggaaatgcacaacaaattggccagtatatgcctaatggttggcaagttcctgcatatggaatg

SEQ ID NO: 213458 - DNA, 120 bp, Artificial Sequence
  ENSG00000116001_10 (sequence is synthesized)
tatggccaggcatggaaccagcaaggatttaatcagacacagtcttctgcaccatggatgggaccaaattatggagtgcaaccgcctcaagggcaaaatggcagcatgttgcccaatcag

SEQ ID NO: 213459 - DNA, 120 bp, Artificial Sequence
  ENSG00000116001_11 (sequence is synthesized)
ccttctgggtatcgagtggcagggtatgaaacccagtgaataaggactccagaatctaaagccagtggcttgaggctacagggagtgtagtaaagccgttgtttacttaaagatttatca

SEQ ID NO: 213460 - DNA, 120 bp, Artificial Sequence
  ENSG00000116001_12 (sequence is synthesized)
aatcagtcagtgcaaatgtcagatacaatgtatttatttaaaagattcatttttaatcatgaaattacttatcatccacattgttttaaaaagaaacaagatgctggatgtctgccaatt

SEQ ID NO: 213461 - DNA, 120 bp, Artificial Sequence
  ENSG00000116001_13 (sequence is synthesized)
tttgccttcattaccttttttgataaagtttctcagatccttgtttcaaacacaaatgcagggattgctgccactttttaactattaagaggcagaaaattgcacaatattgaacttttt

SEQ ID NO: 213462 - DNA, 120 bp, Artificial Sequence
  ENSG00000116001_14 (sequence is synthesized)
tccactgaagtagtgtgcagttctagtttgcattcctgatatgatttaaaacatgtaatataaagatgttaaaaaaaaaaaccaaaactgtgcagagtctagaagttgtttgtcatcttc

SEQ ID NO: 213463 - DNA, 120 bp, Artificial Sequence
  ENSG00000116001_15 (sequence is synthesized)
agcttgtgcacaattctgttttaggttaaaaaaaggcattgtttgagctgtcccatctccactgttatccctttggggttttttaatataaattattagtttacatcatttttgtatcta

SEQ ID NO: 213464 - DNA, 120 bp, Artificial Sequence
  ENSG00000116001_16 (sequence is synthesized)
catcttttttcacaaatttgtcttgccttattaaagttctgtaaaatatacttaaatggaaaaaatgatgttcatttagattgaaaacttttctcagatggattgataattgcattcatc

SEQ ID NO: 213465 - DNA, 120 bp, Artificial Sequence
  ENSG00000116001_17 (sequence is synthesized)
ttgtgttttatatgagaaggtgcctcaagaatttcctgttggatttgtttaaaaggatttttatctttcgtgataaactttgctgtgtaccaggaactataaaaacaaaaacttgttact

SEQ ID NO: 213466 - DNA, 120 bp, Artificial Sequence
  ENSG00000116001_18 (sequence is synthesized)
aaagaaaatatctgaaatgtgataagttcttatgccatgttaatttcatgtgtcaacttcaacatttacatgtattatttcattatgtaaaatgttttagcaatttaatattttgcacag

SEQ ID NO: 213467 - DNA, 120 bp, Artificial Sequence
  ENSG00000116001_19 (sequence is synthesized)
tttgcatgtgaaaatcaaatacatactttggtagtctttgaatacaaagtcatctgctcttgtttttcaagaattttgagacacaaagttgtatgtaaaggaatatattaatttgccgtt

SEQ ID NO: 213468 - DNA, 120 bp, Artificial Sequence
  ENSG00000116001_20 (sequence is synthesized)
ttctaggtagatttgctcaaaaagagtgaatcaacttaatatgtacaaatgatagctgtgaaactgtagaatatctttgtgtcaggcttggagttcattgtgacctccaaattttgcctg

SEQ ID NO: 213469 - DNA, 120 bp, Artificial Sequence
  ENSG00000116001_21 (sequence is synthesized)
aaggaccagctgggcaaagcatcttttaaatgttcagaggccaaaagataaacaaaaaaaaaaccttaaaatcctacctctttaaacagccttcagataagagaatcctcagtgcaatca

SEQ ID NO: 213470 - DNA, 120 bp, Artificial Sequence
  ENSG00000116001_22 (sequence is synthesized)
ttattttgattcgtttggtacctgttttcctggagttcccgattttattattttggggtggctccaagcattaagaggtttaatctttgatggcattgttctagttttgaaatttctagt

SEQ ID NO: 213471 - DNA, 120 bp, Artificial Sequence
  ENSG00000116001_23 (sequence is synthesized)
atatttcagagtctcttagaagacttgtgtgggaagtttcactttgttttcagtgaagatcacaaacctccttcttcctttactcaagaggaaaggtcccagtatacatatttgaatggt

SEQ ID NO: 213472 - DNA, 120 bp, Artificial Sequence
  ENSG00000116001_24 (sequence is synthesized)
tgatggttttcaagaccttcagggagctccctgcattttacctagaaacagaaaaggcccgcaaaatcttaagtttcctggcctgcatttcccgggtaggggcaaatgactccaagctgg

SEQ ID NO: 213473 - DNA, 120 bp, Artificial Sequence
  ENSG00000116001_25 (sequence is synthesized)
tctctaagccaatacccttataaaccagagcccaggaaagacagctcgagtgtataattctctggagctcaattctatgcagttgtgctgatatttcattaagtcactgtgtatttttaa

SEQ ID NO: 213474 - DNA, 120 bp, Artificial Sequence
  ENSG00000116001_26 (sequence is synthesized)
gtgttgatacattaaaagtcgctttatggaagatgagtaaattttttaaatacttggaaattttatttccttgttaacttctacagatcagggcatgcaaccaaaagcagcttaaatgaa

SEQ ID NO: 213475 - DNA, 120 bp, Artificial Sequence
  ENSG00000116001_27 (sequence is synthesized)
atattttaaaataaaatatcaggaagctatttttagatttcttctggcttatgtttctactttaggaccctcattgttctcttattaaaaaaaattatttcctgtgcatctcatggactg

SEQ ID NO: 213476 - DNA, 120 bp, Artificial Sequence
  ENSG00000116001_28 (sequence is synthesized)
cagggtaaattatttgggcataaataatttaaatagttttctttcattttgactatctccagtaataacagtttttattatccagcatattggcttattgcacaaatcttaaaatgtaca

SEQ ID NO: 213477 - DNA, 120 bp, Artificial Sequence
  ENSG00000116001_29 (sequence is synthesized)
ttgactactttctgagaagaaagtggtatcagtactcatgatgaaaaggttactactgaacaaattcacatttcaggaacacctctatctttggtttaaatcttactcttagtttttccg

SEQ ID NO: 213478 - DNA, 120 bp, Artificial Sequence
  ENSG00000116001_30 (sequence is synthesized)
tctaaaaatcatactggtattagtatcaggtaaggaaattaaagtttttaaaatggtttcattctctgcaatatgcaaaatttagattttactttctggtactgtaaagaacctgaagtg

SEQ ID NO: 213479 - DNA, 120 bp, Artificial Sequence
  ENSG00000116001_31 (sequence is synthesized)
atttacacttaatgggtgattaatccagtattctttaccctgaatgtttggatattaaagttcctttatgttttctataacctgtgggatcttcttgcagtgattattgtgtgtgagatt

SEQ ID NO: 213480 - DNA, 120 bp, Artificial Sequence
  ENSG00000116001_32 (sequence is synthesized)
ttttttctttttggtctatccatattgttatattcactcaggtattttttttttaatcttattccagaatcagtggtttatattgggttactgtttaacaccaaatggaattggcattct

SEQ ID NO: 213481 - DNA, 120 bp, Artificial Sequence
  ENSG00000116001_33 (sequence is synthesized)
gcagatttaattaattatgaaaccagggtctcattttccttgctgatacttgttgaaaatgagattcacattctagtctttattttcctcctgttttgtccctgtgcttgtacatcttcc

SEQ ID NO: 213482 - DNA, 120 bp, Artificial Sequence
  ENSG00000116001_34 (sequence is synthesized)
ttttatttgtgtgttatagttctattccatttgagaaggcagttggtaagaactagattgcatgtacaaagacaggtttactaagtgctgtacagtggtcctgaggttacagttgaatta

SEQ ID NO: 213483 - DNA, 120 bp, Artificial Sequence
  ENSG00000116001_35 (sequence is synthesized)
gaaaaacgaaatgtacttacaggaaataagaaagcaaacctttcaaatgagagtgatgatttctttaaaaaaaatcagtttttttctctcaaataatgttctttatttcacgaaatcgtc

SEQ ID NO: 213484 - DNA, 120 bp, Artificial Sequence
  ENSG00000116001_36 (sequence is synthesized)
aatcttaagcatgagcagggataaacaactcctagaaggaactcaattcattcttcctggattttctctgttgttaaatcacaaaaatgatagtccccaatcgtttctttataggaggtt

SEQ ID NO: 213485 - DNA, 120 bp, Artificial Sequence
  ENSG00000116001_37 (sequence is synthesized)
attacatttcattacagtcactgcattttgactgttgtgtttagaatttgaatgtacatccaaaatgatgagtttcaatttaagagccttaataaaatgtgtgagtgtgtctcaattgaa

SEQ ID NO: 213486 - DNA, 120 bp, Artificial Sequence
  ENSG00000116001_38 (sequence is synthesized)
agtgagaagtgcatggataatgcttaaagagtaaagaatggaaacactccgttttaattactaatctttttttcgtctgctgtttattttactgatgattaaaataaaccctcactagaa

SEQ ID NO: 213487 - DNA, 120 bp, Artificial Sequence
  ENSG00000116001_39 (sequence is synthesized)
gaaaaatacgctagattttaaatgttagagctgttcccggagacttattgcagaaatagatgagaagcaaatcaagactactattcaaaaatcaaataccaaacagctatcatatgatga

SEQ ID NO: 213488 - DNA, 120 bp, Artificial Sequence
  ENSG00000116001_40 (sequence is synthesized)
atattttatgctctttgaacatttgtttttattgtacccagtagttttattgtaaagcctataaacatcatacatgtttgcagtaatgttttgatcgttatcctaagatatgattgaatg

SEQ ID NO: 213489 - DNA, 120 bp, Artificial Sequence
  ENSG00000116001_41 (sequence is synthesized)
tgtttgtgttaataaatttaagaacaaatctaatctttgtcatcaggtagtaccgttgtcagcacacagcgttcacaaggtaattgtatcttcttaaacataaaatgaaatctcttgaaa

SEQ ID NO: 213490 - DNA, 120 bp, Artificial Sequence
  ENSG00000116001_42 (sequence is synthesized)
gggtattcactaaccacctgaagtttttttgtttgatatttgggggaggggggcgggaggagatattatttctatttgtctctctagcaatacttttctcccttctcagtgttgaccaag

SEQ ID NO: 213491 - DNA, 120 bp, Artificial Sequence
  ENSG00000116001_43 (sequence is synthesized)
ataaaaagcaccattgcattttaggaaagctatcatatgttgtgtatttcatagagcattttcacttaaacatttgtgaaaagcaccaagttttctctactgctaagagttgtttaacat

SEQ ID NO: 213492 - DNA, 120 bp, Artificial Sequence
  ENSG00000116001_44 (sequence is synthesized)
acaagttgccccagaactacaagatctttgaaaaaaatagcaaagaaaatatgccatgttacgcaaactgttttacctcagactcaccttgatttttaaaaataggttttattcataaat

SEQ ID NO: 213493 - DNA, 120 bp, Artificial Sequence
  ENSG00000116001_45 (sequence is synthesized)
gaagtcaaagtgaattgggcaacaacccctagcagtcaaaagaaagatacaagcagtagtaccgttgtcagcacacagcgttcacaagcccagaaattacaactgaagatataaaagctg

SEQ ID NO: 213494 - DNA, 120 bp, Artificial Sequence
  ENSG00000116001_46 (sequence is synthesized)
ttttcattcttttggtttccagttttctatttttttttaatgattaggtagaatatagtgtcaaataagttataaattgcatggttaaagaaagccattcatctaatgtcctgtgaactt

SEQ ID NO: 213495 - DNA, 120 bp, Artificial Sequence
  ENSG00000116001_47 (sequence is synthesized)
tataagtggttaagtagttcatgtgagtagctgctttcaccatgcttaatatttaaaagtttaaaaagttttttgaagagagaggcaatttctgtacaatataaatatacatatatactt

SEQ ID NO: 213496 - DNA, 120 bp, Artificial Sequence
  ENSG00000116001_48 (sequence is synthesized)
attttaaggtgaagattgttgataatccttgttaataagtttctagctaaaatgatagtatataagggctcttcctacatgtattatagttccagaatggtgtttcatggattgcagtgg

SEQ ID NO: 213497 - DNA, 120 bp, Artificial Sequence
  ENSG00000116005_0 (sequence is synthesized)
gaggccagctgcagagcttgtggaggccatggggcgcgtcgtcgcggagctcgtctcctcgctgctggggttgtggctgttgctgtgcagctgcggatgccccgagggcgccgagctgcg

SEQ ID NO: 213498 - DNA, 120 bp, Artificial Sequence
  ENSG00000116005_1 (sequence is synthesized)
tgctccgccagataaaatcgcgattattggagccggaattggtggcacttcagcagcctattacctgcggcagaaatttgggaaagatgtgaagatagacctgtttgaaagagaagaggt

SEQ ID NO: 213499 - DNA, 120 bp, Artificial Sequence
  ENSG00000116005_2 (sequence is synthesized)
cgggggccgcctggctaccatgatggtgcaggggcaagaatacgaggcaggaggttctgtcatccatcctttaaatctgcacatgaaacgttttgtcaaagacctgggtctctctgctgt

SEQ ID NO: 213500 - DNA, 120 bp, Artificial Sequence
  ENSG00000116005_3 (sequence is synthesized)
tcaggcctctggtggcctactggggatatataatggagagactctggtatttgaggagagcaactggttcataattaacgtgattaaattagtttggcgctatggatttcaatccctccg

SEQ ID NO: 213501 - DNA, 120 bp, Artificial Sequence
  ENSG00000116005_4 (sequence is synthesized)
tatgcacatgtgggtagaggacgtgttagacaagttcatgaggatctaccgctaccagtctcatgactatgccttcagtagtgtcgaaaaattacttcatgctctaggaggagatgactt

SEQ ID NO: 213502 - DNA, 120 bp, Artificial Sequence
  ENSG00000116005_5 (sequence is synthesized)
ccttggaatgcttaatcgaacacttcttgaaaccttgcaaaaggccggcttttctgagaagttcctcaatgaaatgattgctcctgttatgagggtcaattatggccaaagcacggacat

SEQ ID NO: 213503 - DNA, 120 bp, Artificial Sequence
  ENSG00000116005_6 (sequence is synthesized)
caatgcctttgtgggggcggtgtcactgtcctgttctgattctggcctttgggcagtagaaggtggcaataaacttgtttgctcagggcttctgcaggcatccaaaagcaatcttatatc

SEQ ID NO: 213504 - DNA, 120 bp, Artificial Sequence
  ENSG00000116005_7 (sequence is synthesized)
tggctcagtaatgtacatcgaggagaaaacaaagaccaagtacacaggaaatccaacaaagatgtatgaagtggtctaccaaattggaactgagactcgttcagacttctatgacatcgt

SEQ ID NO: 213505 - DNA, 120 bp, Artificial Sequence
  ENSG00000116005_8 (sequence is synthesized)
cttggtggccactccgttgaatcgaaaaatgtcgaatattacttttctcaactttgatcctccaattgaggaattccatcaatattatcaacatatagtgacaactttagttaaggggga

SEQ ID NO: 213506 - DNA, 120 bp, Artificial Sequence
  ENSG00000116005_9 (sequence is synthesized)
attgaatacatctatctttagctctagacccatagataaatttggccttaatacagttttaaccactgataattcagatttgttcattaacagtattgggattgtgccctctgtgagaga

SEQ ID NO: 213507 - DNA, 120 bp, Artificial Sequence
  ENSG00000116005_10 (sequence is synthesized)
aaaggaagatcctgagccatcaacagatggaacatatgtttggaagatcttttcccaagaaactcttactaaagcacaaattttaaagctctttctgtcctatgattatgctgtgaagaa

SEQ ID NO: 213508 - DNA, 120 bp, Artificial Sequence
  ENSG00000116005_11 (sequence is synthesized)
gccatggcttgcatatcctcactataagcccccggagaaatgcccctctatcattctccatgatcgactttattacctcaatggcatagagtgtgcagcaagtgccatggagatgagtgc

SEQ ID NO: 213509 - DNA, 120 bp, Artificial Sequence
  ENSG00000116005_12 (sequence is synthesized)
cattgcagcccacaacgctgcactccttgcctatcaccgctggaacgggcacacagacatgattgatcaggatggcttatatgagaaacttaaaactgaactatgaagtgacacactcct

SEQ ID NO: 213510 - DNA, 120 bp, Artificial Sequence
  ENSG00000116005_13 (sequence is synthesized)
ttttcccctcctagttccaaatgactatcagtggcaaaaaagaacaaaatctgagcagagatgattttgaaccagatattttgccattatcattgtttaataaaagtaatccctgctggt

SEQ ID NO: 213511 - DNA, 120 bp, Artificial Sequence
  ENSG00000116005_14 (sequence is synthesized)
cataggaaaacacacggttctaattaagtgtgaaggtatagctattgcacttatgccatctccaaaatttcttaagtattctttcactatccattaggagtttttcttaaacttgtctga

SEQ ID NO: 213512 - DNA, 120 bp, Artificial Sequence
  ENSG00000116005_15 (sequence is synthesized)
taataagaatcacctggagttaggaggtggtggttgcagtgagccaatctcaccattgcacttcagcctgagcaacacgagcaaaactccgtctcaaaagtaaataaaaataatcacctg

SEQ ID NO: 213513 - DNA, 120 bp, Artificial Sequence
  ENSG00000116005_16 (sequence is synthesized)
gagtttgttaaaccatatggattctcaagctcctctcttgaagattctgattcagtaggtctgggagtggcgcgctggattttgatcaaaattgtagagcattttaaggtgagtacctga

SEQ ID NO: 213514 - DNA, 120 bp, Artificial Sequence
  ENSG00000116005_17 (sequence is synthesized)
gggagaacttaaagacatcttagttggggagtagtccttttgaattttacagctagatataatcttcagtcagataaaatttatgggagctggtgtcttatgcctgactcttagtaattt

SEQ ID NO: 213515 - DNA, 120 bp, Artificial Sequence
  ENSG00000116005_18 (sequence is synthesized)
cataccggtttgaagtacgtgtgcccatgcctaaagccttgactttcagaatgttgtcttttgattcttctgtcttgatttgattaggggtgaaatttagaagtcttagtaatgtaactt

SEQ ID NO: 213516 - DNA, 120 bp, Artificial Sequence
  ENSG00000116005_19 (sequence is synthesized)
gaagatgttaaacaaaaatctcaagtaaaatgaaaagcaaatatgggctactgaattaagaaactggcattctagtattaaatcctcacttcaggagcttttaaaaatactgagaccccc

SEQ ID NO: 213517 - DNA, 120 bp, Artificial Sequence
  ENSG00000116005_20 (sequence is synthesized)
ccataaccagagattcagattcaaagactgaggataggaccttagcattgtagctatttaaagtttctaatgtgcacccagggttgggaatcaccaatgtgggtgtgaaaatgcctacaa

SEQ ID NO: 213518 - DNA, 120 bp, Artificial Sequence
  ENSG00000116005_21 (sequence is synthesized)
agggttttagtgccttagaagtcctaagaagcccaatctgtatcaaagcagatccattttgcaaggatctttcttttagaactttctcagttctcttagtaagaactttagaagtaatct

SEQ ID NO: 213519 - DNA, 120 bp, Artificial Sequence
  ENSG00000116005_22 (sequence is synthesized)
gcactagaacagaatacttggaatgacaccaaagttaaccaagtccagcatatgtccaaagagttaagtgtttcatttactgtagcattctgggtgagaaattggttgctgaaatcttaa

SEQ ID NO: 213520 - DNA, 120 bp, Artificial Sequence
  ENSG00000116005_23 (sequence is synthesized)
gacagtggtctcaaccttggctgcacattggaatcacctgtagggttttaaagcatccaaatggtaattaacaggcagcaaaacttcagaactagttctgcatctactgtgcaaagatca

SEQ ID NO: 213521 - DNA, 120 bp, Artificial Sequence
  ENSG00000116005_24 (sequence is synthesized)
tgattaactgtcaagacactggtagaacagaacaagcaaaagattaagagttcaaaagtaaatgcaaccaatttaacatgtagtgttattaaaaaattacaaaggcctagaccagcctgg

SEQ ID NO: 213522 - DNA, 74 bp, Artificial Sequence
  ENSG00000116005_25 (sequence is synthesized)
aaaattacaaaggccttttaaaaagttggccaggcatggtaatgcgcgcctgtggtcccagctgctcgggaggc

SEQ ID NO: 213523 - DNA, 120 bp, Artificial Sequence
  ENSG00000116005_26 (sequence is synthesized)
actgtactccagcctgggcaacagagaccatcttaaaaaaaaaaaatccttccattgaatagaaacttcaaagtccttcatcagatcatggcattagctactttagcaaaatagtgtaaa

SEQ ID NO: 213524 - DNA, 120 bp, Artificial Sequence
  ENSG00000116005_27 (sequence is synthesized)
tggcattagctactttagcaaaatagtgtaaactttggttctgagtaaaaatgacttcttccctaccacagttgtgaatgttaatatgctgataaaactgccaagatatatttgataggt

SEQ ID NO: 213525 - DNA, 120 bp, Artificial Sequence
  ENSG00000116005_28 (sequence is synthesized)
aggggattaaactcatggtttgtcaaaagagtgtttttttctagttttattcttaacagatatgttgaggtattcatatttgtttccttttgtggttttaatgaagacaatttgtaaagt

SEQ ID NO: 213526 - DNA, 120 bp, Artificial Sequence
  ENSG00000116005_29 (sequence is synthesized)
aatactgttatgtatatgctaaatgttggtaaatactaattaatttccatcatttgtagacttgttttgcaatgggatatatttttacttataataccaatttaggctgggcgcagtggc

SEQ ID NO: 213527 - DNA, 77 bp, Artificial Sequence
  ENSG00000116005_30 (sequence is synthesized)
gagcgagactctgtctcagaaaaaaaaaacaaaaaccagtttaggctgggtatggtggctcgggagtttgagaccag

SEQ ID NO: 213528 - DNA, 75 bp, Artificial Sequence
  ENSG00000116005_31 (sequence is synthesized)
gtgtctcaaaaggaaaaaaaaaaaattaaaaatgttgctggtattacatcaaacctactctggataaattttcca

SEQ ID NO: 213529 - DNA, 120 bp, Artificial Sequence
  ENSG00000116005_32 (sequence is synthesized)
tgctggtattacatcaaacctactctggataaattttccagtagggcatctgaaattgctttggcaaaagcaaaacaggttatcaatacaccaaggacatcaagtagttttaatgcaact

SEQ ID NO: 213530 - DNA, 120 bp, Artificial Sequence
  ENSG00000116005_33 (sequence is synthesized)
acagtgttgagtgcttttttactgggagaaaaatcctagcagaacctgctactctgggcgcattaggtagttttatgcaactatagtattaagagttttattggaagaaaaaacactgtc

SEQ ID NO: 213531 - DNA, 120 bp, Artificial Sequence
  ENSG00000116005_34 (sequence is synthesized)
agagcttactgctccagacctttttttttaatagaagagactggtaaaaatgatgcaggggctgaatgaaagccagctctgctccagtggctctctgagttgagcatgcatcagttacct

SEQ ID NO: 213532 - DNA, 120 bp, Artificial Sequence
  ENSG00000116005_35 (sequence is synthesized)
taagggcttgttaaaacatcgctaggctccaccctgtttattcaataagtttgttatgggatataagaagatgcattttattaagttccccagtgatgctgctgttctactataggaacc

SEQ ID NO: 213533 - DNA, 120 bp, Artificial Sequence
  ENSG00000116005_36 (sequence is synthesized)
acacttgaagaactagttctacaattcagctgtatgttgtaaaggagtcaagtcaatgaaggagttataaagagttgctgaaaaatggagtaacagtgtatgggacttcacatcagttct

SEQ ID NO: 213534 - DNA, 120 bp, Artificial Sequence
  ENSG00000116005_37 (sequence is synthesized)
ccttattgattgttagtttgatccctcttgttcttttgttgtaaacattttctataattaggaaatgccatttaagagtgagagaggtatatatctatgagccattgtgtttggtgtttt

SEQ ID NO: 213535 - DNA, 120 bp, Artificial Sequence
  ENSG00000116005_38 (sequence is synthesized)
acaagaactttaccatactggtgtgtagtccattctgtacagtttaaaagtgattcacgatttgcaggctttttatcagatcacaaaaaaatcagtctttaagcatttgcttggtaaggt

SEQ ID NO: 213536 - DNA, 120 bp, Artificial Sequence
  ENSG00000116005_39 (sequence is synthesized)
ttcttaagattaggtttataatacaaccatctgtaatgtatctctcgtttgagcttgtgggccatacaattcattaactagatgaatacattgtggacagcatcctcactacccctctct

SEQ ID NO: 213537 - DNA, 120 bp, Artificial Sequence
  ENSG00000116005_40 (sequence is synthesized)
actcactcacaaagaaccatgatacactggaatgtttttctctggaatcctctttctactcttgtattaaaatttttccccacttcatgattatattcaaaataaacaactacatcatta

SEQ ID NO: 213538 - DNA, 120 bp, Artificial Sequence
  ENSG00000116005_41 (sequence is synthesized)
ctgacctcaggtgacctgcccacctctgcctcccaaagtgtggggattataggcgtgagccactgcacctagatgtcagtttgattcttatgacgccacttcccttctttatacatcccc

SEQ ID NO: 213539 - DNA, 120 bp, Artificial Sequence
  ENSG00000116014_0 (sequence is synthesized)
gagcccagcacagctgccctctggaccctgcggaccccagccgagccccttcctgagttccacaggcgcagcccccgggcggtcgggcggaggggtccccggggcggtgccagggcgcaa

SEQ ID NO: 213540 - DNA, 120 bp, Artificial Sequence
  ENSG00000116014_1 (sequence is synthesized)
gccagggcgcaatcctggagggcggccgggaggaggaggtgcgcgcggccatgcacaccgtggctacgtccggacccaacgcgtcctggggggcaccggccaacgcctccggctgcccgg

SEQ ID NO: 213541 - DNA, 120 bp, Artificial Sequence
  ENSG00000116014_2 (sequence is synthesized)
gctgtggcgccaacgcctcggacggcccagtcccttcgccgcgggccgtggacgcctggctcgtgccgctcttcttcgcggcgctgatgctgctgggcctggtggggaactcgctggtca

SEQ ID NO: 213542 - DNA, 120 bp, Artificial Sequence
  ENSG00000116014_3 (sequence is synthesized)
tctacgtcatctgccgccacaagccgatgcggaccgtgaccaacttctacatcgccaacctggcggccacggacgtgaccttcctcctgtgctgcgtccccttcacggccctgctgtacc

SEQ ID NO: 213543 - DNA, 120 bp, Artificial Sequence
  ENSG00000116014_4 (sequence is synthesized)
cgctgcccggctgggtgctgggcgacttcatgtgcaagttcgtcaactacatccagcaggtctcggtgcaggccacgtgtgccactctgaccgccatgagtgtggaccgctggtacgtga

SEQ ID NO: 213544 - DNA, 120 bp, Artificial Sequence
  ENSG00000116014_5 (sequence is synthesized)
cggtgttcccgttgcgcgccctgcaccgccgcacgccccgcctggcgctggctgtcagcctcagcatctgggtaggctctgcggcggtgtctgcgccggtgctcgccctgcaccgcctgt

SEQ ID NO: 213545 - DNA, 120 bp, Artificial Sequence
  ENSG00000116014_6 (sequence is synthesized)
actgtacaacctgctggcgctgtacctgctgccgctgctcgccacctgcgcctgctatgcggccatgctgcgccacctgggccgggtcgccgtgcgccccgcgcccgccgatagcgccct

SEQ ID NO: 213546 - DNA, 120 bp, Artificial Sequence
  ENSG00000116014_7 (sequence is synthesized)
gcaggggcaggtgctggcagagcgcgcaggcgccgtgcgggccaaggtctcgcggctggtggcggccgtggtcctgctcttcgccgcctgctggggccccatccagctgttcctggtgct

SEQ ID NO: 213547 - DNA, 120 bp, Artificial Sequence
  ENSG00000116014_8 (sequence is synthesized)
gcaggcgctgggccccgcgggctcctggcacccacgcagctacgccgcctacgcgcttaagacctgggctcactgcatgtcctacagcaactccgcgctgaacccgctgctctacgcctt

SEQ ID NO: 213548 - DNA, 120 bp, Artificial Sequence
  ENSG00000116014_9 (sequence is synthesized)
cctacagcaactccgcgctgaacccgctgctctacgccttcctgggctcgcacttccgacaggccttccgccgcgtctgcccctgcgcgccgcgccgcccccgccgcccccgccggcccg

SEQ ID NO: 213549 - DNA, 120 bp, Artificial Sequence
  ENSG00000116014_10 (sequence is synthesized)
cctggggtcccacccggcccccgccagggcgcagaagccagggagcagtgggctggccgcgcgcgggctgtgcgtcctgggggaggacaacgcccctctctgagcggacccggtgggaat

SEQ ID NO: 213550 - DNA, 120 bp, Artificial Sequence
  ENSG00000116014_11 (sequence is synthesized)
ccgagcggctccctcgggagcggggactgctggaacagcggctattcttctgttattagtatttttcttactgtccaagatcaactgtggaaatattttggtctcttgtgacgttcggtg

SEQ ID NO: 213551 - DNA, 120 bp, Artificial Sequence
  ENSG00000116014_12 (sequence is synthesized)
cagtttcgttgtgaagtttgctattgatattgaaattatgacttctgtgtttcctgaaattaaacatgtgtcaacacaggactttctggatcattccagaaagtgtcagacgttttctca

SEQ ID NO: 213552 - DNA, 120 bp, Artificial Sequence
  ENSG00000116016_0 (sequence is synthesized)
acactcgcgagcggaccgccacacgggtccggtgcccgctgcgcttccgccccagcgctcctgaggcggccgtacaatcctcggcagtgtcctgagactgtatggtcagctcagcccggc

SEQ ID NO: 213553 - DNA, 120 bp, Artificial Sequence
  ENSG00000116016_1 (sequence is synthesized)
ctccgactccttccgactcccagcattcgagccacttttttttttctttgaaaactcagaaaagtgactccttttccagggaaaaaggaacttgggttcccttctctccgtcctcttttc

SEQ ID NO: 213554 - DNA, 120 bp, Artificial Sequence
  ENSG00000116016_2 (sequence is synthesized)
gggtctgacagcctccacccactccttccccggaccccgcctccgcgcgcaggttcctcccagtcacctttctccacccccgcccccgcacctagcccgccgcgcgccaccttccacctg

SEQ ID NO: 213555 - DNA, 120 bp, Artificial Sequence
  ENSG00000116016_3 (sequence is synthesized)
gggcgctcgggacctgcgcgcacctcggaccttcaccacccgcccgggccgcggggagcggacgagggccacagccccccacccgccagggagcccaggtgctcggcgtctgaacgtctc

SEQ ID NO: 213556 - DNA, 120 bp, Artificial Sequence
  ENSG00000116016_4 (sequence is synthesized)
aacgtctcaaagggccacagcgacaatgacagctgacaaggagaagaaaaggagtagctcggagaggaggaaggagaagtcccgggatgctgcgcggtgccggcggagcaaggagacgga

SEQ ID NO: 213557 - DNA, 120 bp, Artificial Sequence
  ENSG00000116016_5 (sequence is synthesized)
ggtgttctatgagctggcccatgagctgcctctgccccacagtgtgagctcccatctggacaaggcctccatcatgcgactggcaatcagcttcctgcgaacacacaagctcctctcctc

SEQ ID NO: 213558 - DNA, 120 bp, Artificial Sequence
  ENSG00000116016_6 (sequence is synthesized)
agtttgctctgaaaacgagtccgaagccgaagctgaccagcagatggacaacttgtacctgaaagccttggagggtttcattgccgtggtgacccaagatggcgacatgatctttctgtc

SEQ ID NO: 213559 - DNA, 120 bp, Artificial Sequence
  ENSG00000116016_7 (sequence is synthesized)
agaaaacatcagcaagttcatgggacttacacaggtggagctaacaggacatagtatctttgacttcactcatccctgcgaccatgaggagattcgtgagaacctgagtctcaaaaatgg

SEQ ID NO: 213560 - DNA, 120 bp, Artificial Sequence
  ENSG00000116016_8 (sequence is synthesized)
ctctggttttgggaaaaaaagcaaagacatgtccacagagcgggacttcttcatgaggatgaagtgcacggtcaccaacagaggccgtactgtcaacctcaagtcagccacctggaaggt

SEQ ID NO: 213561 - DNA, 120 bp, Artificial Sequence
  ENSG00000116016_9 (sequence is synthesized)
cttgcactgcacgggccaggtgaaagtctacaacaactgccctcctcacaatagtctgtgtggctacaaggagcccctgctgtcctgcctcatcatcatgtgtgaaccaatccagcaccc

SEQ ID NO: 213562 - DNA, 120 bp, Artificial Sequence
  ENSG00000116016_10 (sequence is synthesized)
atcccacatggacatccccctggatagcaagaccttcctgagccgccacagcatggacatgaagttcacctactgtgatgacagaatcacagaactgattggttaccaccctgaggagct

SEQ ID NO: 213563 - DNA, 120 bp, Artificial Sequence
  ENSG00000116016_11 (sequence is synthesized)
gcttggccgctcagcctatgaattctaccatgcgctagactccgagaacatgaccaagagtcaccagaacttgtgcaccaagggtcaggtagtaagtggccagtaccggatgctcgcaaa

SEQ ID NO: 213564 - DNA, 120 bp, Artificial Sequence
  ENSG00000116016_12 (sequence is synthesized)
gcatgggggctacgtgtggctggagacccaggggacggtcatctacaaccctcgcaacctgcagccccagtgcatcatgtgtgtcaactacgtcctgagtgagattgagaagaatgacgt

SEQ ID NO: 213565 - DNA, 120 bp, Artificial Sequence
  ENSG00000116016_13 (sequence is synthesized)
ggtgttctccatggaccagactgaatccctgttcaagccccacctgatggccatgaacagcatctttgatagcagtggcaagggggctgtgtctgagaagagtaacttcctattcaccaa

SEQ ID NO: 213566 - DNA, 120 bp, Artificial Sequence
  ENSG00000116016_14 (sequence is synthesized)
gctaaaggaggagcccgaggagctggcccagctggctcccaccccaggagacgccatcatctctctggatttcgggaatcagaacttcgaggagtcctcagcctatggcaaggccatcct

SEQ ID NO: 213567 - DNA, 120 bp, Artificial Sequence
  ENSG00000116016_15 (sequence is synthesized)
gcccccgagccagccatgggccacggagttgaggagccacagcacccagagcgaggctgggagcctgcctgccttcaccgtgccccaggcagctgccccgggcagcaccacccccagtgc

SEQ ID NO: 213568 - DNA, 120 bp, Artificial Sequence
  ENSG00000116016_16 (sequence is synthesized)
caccagcagcagcagcagctgctccacgcccaatagccctgaagactattacacatctttggataacgacctgaagattgaagtgattgagaagctcttcgccatggacacagaggccaa

SEQ ID NO: 213569 - DNA, 120 bp, Artificial Sequence
  ENSG00000116016_17 (sequence is synthesized)
ggaccaatgcagtacccagacggatttcaatgagctggacttggagacactggcaccctatatccccatggacggggaagacttccagctaagccccatctgccccgaggagcggctctt

SEQ ID NO: 213570 - DNA, 120 bp, Artificial Sequence
  ENSG00000116016_18 (sequence is synthesized)
ggcggagaacccacagtccaccccccagcactgcttcagtgccatgacaaacatcttccagccactggcccctgtagccccgcacagtcccttcctcctggacaagtttcagcagcagct

SEQ ID NO: 213571 - DNA, 120 bp, Artificial Sequence
  ENSG00000116016_19 (sequence is synthesized)
ggagagcaagaagacagagcccgagcaccggcccatgtcctccatcttctttgatgccggaagcaaagcatccctgccaccgtgctgtggccaggccagcacccctctctcttccatggg

SEQ ID NO: 213572 - DNA, 120 bp, Artificial Sequence
  ENSG00000116016_20 (sequence is synthesized)
gggcagatccaatacccagtggcccccagatccaccattacattttgggcccacaaagtgggccgtcggggatcagcgcacagagttcttgggagcagcgccgttggggccccctgtctc

SEQ ID NO: 213573 - DNA, 120 bp, Artificial Sequence
  ENSG00000116016_21 (sequence is synthesized)
cagctggagtatgaagagcaagccttccaggacctgagcgggggggacccacctggtggcagcacctcacatttgatgtggaaacggatgaagaacctcaggggtgggagctgccctttg

SEQ ID NO: 213574 - DNA, 120 bp, Artificial Sequence
  ENSG00000116016_22 (sequence is synthesized)
atgccggacaagccactgagcgcaaatgtacccaatgataagttcacccaaaaccccatgaggggcctgggccatcccctgagacatctgccgctgccacagcctccatctgccatcagt

SEQ ID NO: 213575 - DNA, 120 bp, Artificial Sequence
  ENSG00000116016_23 (sequence is synthesized)
cccggggagaacagcaagagcaggttccccccacagtgctacgccacccagtaccaggactacagcctgtcgtcagcccacaaggtgtcaggcatggcaagccggctgctcgggccctca

SEQ ID NO: 213576 - DNA, 120 bp, Artificial Sequence
  ENSG00000116016_24 (sequence is synthesized)
tttgagtcctacctgctgcccgaactgaccagatatgactgtgaggtgaacgtgcccgtgctgggaagctccacgctcctgcaaggaggggacctcctcagagccctggaccaggccacc

SEQ ID NO: 213577 - DNA, 120 bp, Artificial Sequence
  ENSG00000116016_25 (sequence is synthesized)
tgagccaggccttctacctgggcagcacctctgccgacgccgtcccaccagcttcactctctccgtctgtttttgcaactaggtatttctaacgccagcacactatttacaagatggact

SEQ ID NO: 213578 - DNA, 120 bp, Artificial Sequence
  ENSG00000116016_26 (sequence is synthesized)
tacctggcagacttgcccaggtcaccaagcagtggcctttttctgagatgctcactttattatccctatttttaaagtacacaattgttttacctgttctgaaatgttcttaaattttgt

SEQ ID NO: 213579 - DNA, 120 bp, Artificial Sequence
  ENSG00000116016_27 (sequence is synthesized)
aggatttttttcctccccaccttcaatgacttctaatttatattatccataggtttctctccctccttctccttctcacacacaactgtccatactaacaagtttggtgcatgtctgttc

SEQ ID NO: 213580 - DNA, 120 bp, Artificial Sequence
  ENSG00000116016_28 (sequence is synthesized)
ttctgtagggagaagctttagcttcattttactaaaaagattcctcgttattgttgttgccaaagagaaacaaaaatgattttgctttccaagcttggtttgtggcgtctccctcgcaga

SEQ ID NO: 213581 - DNA, 120 bp, Artificial Sequence
  ENSG00000116016_29 (sequence is synthesized)
gcccttctcgtttcttttttaaactaatcaccatattgtaaatttcagggtttttttttttttgtttaagctgactctttgctctaattttggaaaaaaagaaatgtgaagggtcaactc

SEQ ID NO: 213582 - DNA, 120 bp, Artificial Sequence
  ENSG00000116016_30 (sequence is synthesized)
caacgtatgtggttatctgtgaaagttgcacagcgtggcttttcctaaactggtgtttttcccccgcatttggtggattttttattattattcaaaaacataactgagttttttaaaaga

SEQ ID NO: 213583 - DNA, 120 bp, Artificial Sequence
  ENSG00000116016_31 (sequence is synthesized)
ggagaaaatttatatctgggttaagtgtttatcatatatatgggtactttgtaatatctaaaaacttagaaacggaaatggaatcctgctcacaaaatcactttaagatcttttcgaagc

SEQ ID NO: 213584 - DNA, 120 bp, Artificial Sequence
  ENSG00000116016_32 (sequence is synthesized)
tgttaatttttcttagtgttgtggacactgcagacttgtccagtgctcccacggcctgtacggacactgtggaaggcctccctctgtcggctttttgccatctgtgatatgccataggtg

SEQ ID NO: 213585 - DNA, 120 bp, Artificial Sequence
  ENSG00000116016_33 (sequence is synthesized)
tgacaatccgagcagtggagtcattcagcgggagcactgcgcgctatcccctcacattctctatgtactatgtatgtatgtattattattattgctgccaagagggtctgatggcacgtt

SEQ ID NO: 213586 - DNA, 120 bp, Artificial Sequence
  ENSG00000116016_34 (sequence is synthesized)
gtggggtcggggggtggggcggggaagtgctctaacttttcttaaggttttgttgctagcccttcaagtgcactgagctatgtgactcggatggtctttcacacggcacatttggacatt

SEQ ID NO: 213587 - DNA, 120 bp, Artificial Sequence
  ENSG00000116016_35 (sequence is synthesized)
tccagaactaccatgagatggtttagacgggaattcatgcaaatgaggggtcaaaaatggtatagtgaccccgtccacgtcctccaagctcacgaccttggagccccgtggagctggact

SEQ ID NO: 213588 - DNA, 120 bp, Artificial Sequence
  ENSG00000116016_36 (sequence is synthesized)
gaggaggaggctgcacagcgggagagcagctggtccagaccagccctgcagcccccactcagccggcagccagatggccccgcaaggcctccagggatggcccctagccacaggccctgg

SEQ ID NO: 213589 - DNA, 120 bp, Artificial Sequence
  ENSG00000116016_37 (sequence is synthesized)
ctgaggtctctgggtcggtcagtgacatgtaggtaggaagcactgaaaatagtgttcccagagcactttgcaactccctgggtaagagggacgacacctctggtttttcaataccaatta

SEQ ID NO: 213590 - DNA, 120 bp, Artificial Sequence
  ENSG00000116016_38 (sequence is synthesized)
catggaacttttctgtaatgggtacaatgaagaagtttctaaaaacacacacaaagcacattgggccaactatttagtaagcccggatagacttattgccaaaaacaaaaaatagctttc

SEQ ID NO: 213591 - DNA, 120 bp, Artificial Sequence
  ENSG00000116016_39 (sequence is synthesized)
aaaagaaatttaagttctatgagaaattccttagtcatggtgttgcgtaaatcatattttagctgcacggcattaccccacacagggtggcagaacttgaagggttactgacgtgtaaat

SEQ ID NO: 213592 - DNA, 120 bp, Artificial Sequence
  ENSG00000116016_40 (sequence is synthesized)
gctggtatttgatttcctgtgtgtgttgccctggcattaagggcattttacccttgcagttttactaaaacactgaaaaatattccaagcttcatattaaccctacctgtcaacgtaacg

SEQ ID NO: 213593 - DNA, 120 bp, Artificial Sequence
  ENSG00000116016_41 (sequence is synthesized)
atttcatgaacgttattatattgtcgaattcctactgacaacattataactgtatgggagcttaactttataaggaaatgtattttgacactggtatcttattaaagtattctgatccta

SEQ ID NO: 213594 - DNA, 120 bp, Artificial Sequence
  ENSG00000116016_42 (sequence is synthesized)
catgggcacccagaggctgtggagaacacgggctgggagaaccaaggacggcttttgctgacttctcaatttgttgccatctggccataagacccatcctccacactagattgagtccgc

SEQ ID NO: 213595 - DNA, 120 bp, Artificial Sequence
  ENSG00000116016_43 (sequence is synthesized)
aggaagcattctaatccttaacttccagtgccttctccagaacagcaagaaggtgtgcccggatgatcttttccctctgagaagccagttaggccaagtaaatcatttagtctctctgaa

SEQ ID NO: 213596 - DNA, 120 bp, Artificial Sequence
  ENSG00000116016_44 (sequence is synthesized)
tccgaagcgccccacccccaccttaagaggagccggagaggtcctctcacgccctgctcatgaaagagcttgctttcaccagctctgtgctcaccattcatcctttctgccggcgggctt

SEQ ID NO: 213597 - DNA, 120 bp, Artificial Sequence
  ENSG00000116016_45 (sequence is synthesized)
gaggatatggatatccagaggtgacgctgggggctgcacctcggggatggcatcttaatgacttgacttggcgggtgttagaacagccccattcagagagtagctcggagaggaggaagg

SEQ ID NO: 213598 - DNA, 120 bp, Artificial Sequence
  ENSG00000116016_46 (sequence is synthesized)
gctcatttcaccagctgcgagctcactgggctaaggcacaggggttggtacatgacctgccactcccaggggccgctggtacttgccctttatagagcagccaaactagttttcagtggg

SEQ ID NO: 213599 - DNA, 120 bp, Artificial Sequence
  ENSG00000116016_47 (sequence is synthesized)
agcaaaaggcagaggagagacatgggcagaagaaaccctcctaaggactaacattgcccagccaggcagccatcccccagaccaggaggcttgagcccttcagcatcttatagctgagga

SEQ ID NO: 213600 - DNA, 120 bp, Artificial Sequence
  ENSG00000116016_48 (sequence is synthesized)
aggagacagagctcgagctcggcctgcaggtgcacagcctgcctctgagactctgccttttgggtctttgagtcatcacaggcatcagcattgggactggaagggcccctaagatgagaa

SEQ ID NO: 213601 - DNA, 120 bp, Artificial Sequence
  ENSG00000116016_49 (sequence is synthesized)
ccagactccctcatagcctgctctctcgggcttggcaggtctgcaaagggttttggggctcgaggcccagacgtgctgagtccggccatggtagccctctccaacaagctgaagctgaag

SEQ ID NO: 213602 - DNA, 120 bp, Artificial Sequence
  ENSG00000116016_50 (sequence is synthesized)
ggaaccaaagtctctgtccctggggtctggctgttaggctgttactctgcgagagtccacagatggacctgggcacttactgcttgcttaggcccgtgccagcttacaggagggagaaga

SEQ ID NO: 213603 - DNA, 120 bp, Artificial Sequence
  ENSG00000116016_51 (sequence is synthesized)
ggacaaaaaaaagccacagtgtgcaccacaggcctaagcattgtaggacaaggataaccaccacaggctggagtaggcagggctgactctgtggaagaggggctgcctcggcttcaagag

SEQ ID NO: 213604 - DNA, 120 bp, Artificial Sequence
  ENSG00000116016_52 (sequence is synthesized)
agaaggcgggctccggacaggtgggatggggagaggagaacatttctcaatgtgcagggtgaagaggggataaacatgggggaaggctggtacatgatacaaggtcgtgtacatgacaca

SEQ ID NO: 213605 - DNA, 120 bp, Artificial Sequence
  ENSG00000116016_53 (sequence is synthesized)
gccaagtctgaggttttcctgataggccctcgggagccagtggaggcgtttgagcagcactgtgaaacagtgcttgagatgaatggctctgcaggagctgagttggaatagtgtttgtga

SEQ ID NO: 213606 - DNA, 120 bp, Artificial Sequence
  ENSG00000116016_54 (sequence is synthesized)
gtgtgagggaaggagtgactcaggcaaggcttttcatagagaaagagtctctgccagcttgtcctctctcccatctctgctccttacctcccctgctctctccaccccgaaaccaactaa

SEQ ID NO: 213607 - DNA, 120 bp, Artificial Sequence
  ENSG00000116016_55 (sequence is synthesized)
atagccagacaagggtcagatgggtattacgtgagataaggcatgtggcaggacagaggccagtgtacttgcatgactcttaaaggcctcttttgcctcaccctggtcccaactccaata

SEQ ID NO: 213608 - DNA, 120 bp, Artificial Sequence
  ENSG00000116016_56 (sequence is synthesized)
cattccaacctaatttccaactgcatcctggaacatactgttacttcgatgggagtactgaggccatctttcttccaccagcccactgcatcccaggtgcctgctctctgccaggagtag

SEQ ID NO: 213609 - DNA, 120 bp, Artificial Sequence
  ENSG00000116016_57 (sequence is synthesized)
agatcacactggggaaccagactgacttctccaattctgaactcgccccggcctcgggcggctcaaagggcctcctctgccgcatccccgccaaaaccaaaccgcctggcacaagccgcc

SEQ ID NO: 213610 - DNA, 120 bp, Artificial Sequence
  ENSG00000116017_0 (sequence is synthesized)
agacgcggacgcggctggcggctcggtttctgcaaatgcgtgaatgagccggatgccagcctctgtcccctggagcccagcgtgaggaagaggcatgccccatcagccttcagcttgagc

SEQ ID NO: 213611 - DNA, 80 bp, Artificial Sequence
  ENSG00000116017_1 (sequence is synthesized)
gcatgccccatcagccttcagcttgagcccggcggcccccgcccccgccccctgccaccctgcactgccccggctccccc

SEQ ID NO: 213612 - DNA, 120 bp, Artificial Sequence
  ENSG00000116017_2 (sequence is synthesized)
gtggtggtggtggtggtggtggtggtggcccgggccgcagggccatgaaactacaggccgtgatggagacgctgttgcagcggcagcagcgggcgcgccaggagctggaggcccggcagc

SEQ ID NO: 213613 - DNA, 120 bp, Artificial Sequence
  ENSG00000116017_3 (sequence is synthesized)
ccggcagcagctgccccccgatccccctgctgcaccccccggccgggcccgggctgcccccgacgaggacagagagcccgagagtgcccggatgcagcgggctcagatggccgcactggc

SEQ ID NO: 213614 - DNA, 120 bp, Artificial Sequence
  ENSG00000116017_4 (sequence is synthesized)
tggcagccatgcgggctgcagctgcgggcctgggacacccagccagccccggcggctctgaggatgggcccccaggctcggaggaggaggacgcggcccgggaggggacaccgggctcac

SEQ ID NO: 213615 - DNA, 120 bp, Artificial Sequence
  ENSG00000116017_5 (sequence is synthesized)
gcgaggcagagaagggccaggagaggagcactttgaggacatggcctccgacgaggacatgaagcccaaatgggaggaggaggagatggaggaagacctcggggaggatgaggaggagga

SEQ ID NO: 213616 - DNA, 120 bp, Artificial Sequence
  ENSG00000116017_6 (sequence is synthesized)
ggaggaggattacgaggatgaggaggaggaggaggacgaggaggggctgggccccccaggccctgccagcttgggcaccacggcactgttcccccgaaaggcccagccaccccaggcctt

SEQ ID NO: 213617 - DNA, 120 bp, Artificial Sequence
  ENSG00000116017_7 (sequence is synthesized)
cgttcccagggtgctggggggccaggagcggccggggcctggccctgcccaccccggaggggccgcccacgtagccccgcagctgcagccgcctgaccacggcgactggacttacgagga

SEQ ID NO: 213618 - DNA, 120 bp, Artificial Sequence
  ENSG00000116017_8 (sequence is synthesized)
gacttacgaggagcagtttaagcagctctacgaactcgacggggaccccaagaggaaggaattcctggatgacttgttcagcttcatgcagaagcgagggacacctgtgaaccgcatccc

SEQ ID NO: 213619 - DNA, 120 bp, Artificial Sequence
  ENSG00000116017_9 (sequence is synthesized)
catcatggccaaacaggtccttgacctgttcatgctgtacgtgctggtgacggagaagggcggcctcgtggaggtcatcaacaagaagctgtggcgtgagatcaccaagggcctcaacct

SEQ ID NO: 213620 - DNA, 120 bp, Artificial Sequence
  ENSG00000116017_10 (sequence is synthesized)
gcccacgtccatcaccagtgcagccttcaccctgcggacccaatacatgaagtacctgtacccctacgagtgtgagaagcggggcctcagtaaccccaatgagctccaggcagccataga

SEQ ID NO: 213621 - DNA, 120 bp, Artificial Sequence
  ENSG00000116017_11 (sequence is synthesized)
cagcaaccgacgggagggccggcgccagagctttggtggctccctctttgcctactcgccaggcggggcacacggcatgctctcctcacccaagctacccgtgtcctccctgggcctggc

SEQ ID NO: 213622 - DNA, 120 bp, Artificial Sequence
  ENSG00000116017_12 (sequence is synthesized)
cgcaagcaccaatggcagctccatcacccccgcccctaagatcaagaaagaggaggactcagccatccccatcacagtccctggccgcctgcctgtgtccctggcgggccaccctgtggt

SEQ ID NO: 213623 - DNA, 120 bp, Artificial Sequence
  ENSG00000116017_13 (sequence is synthesized)
ggcagcccaggcagcagctgtgcaagcagcagccgcccaagcagctgtggccgcacaggcagctgccctggaacagctgcgggagaagctggagtctgcagagcctccggagaagaagat

SEQ ID NO: 213624 - DNA, 120 bp, Artificial Sequence
  ENSG00000116017_14 (sequence is synthesized)
ggccctggtggccgatgagcagcaacggctgatgcaacgtgcactccagcagaacttcctggccatggcggcccagctgcccatgagcattcggatcaacagccaagcctccgaaagccg

SEQ ID NO: 213625 - DNA, 120 bp, Artificial Sequence
  ENSG00000116017_15 (sequence is synthesized)
ccaggactctgctgtgaacctgacgggcaccaacggcagcaacagcatcagcatgtcggtggagatcaacggcatcatgtacacaggagttctgtttgctcagccgccggcccccacgcc

SEQ ID NO: 213626 - DNA, 120 bp, Artificial Sequence
  ENSG00000116017_16 (sequence is synthesized)
aacctctgctcccaacaaaggaggcggcggcggcggcggcagcagcagcaacgcaggcggccggggaggaaacaccggaaccagcggcggccaggctgggccagcggggctgtccacacc

SEQ ID NO: 213627 - DNA, 120 bp, Artificial Sequence
  ENSG00000116017_17 (sequence is synthesized)
ctccacatctacctcaaataactcgttgccttaaccgcatcactccccacccgccacccaccctggagcccgccggcctgggcagggggtccaggtgggccacacaggggccaggatggc

SEQ ID NO: 213628 - DNA, 120 bp, Artificial Sequence
  ENSG00000116017_18 (sequence is synthesized)
ggaagatacgggtggggagggaagatatccagaaaggagccacagctgacgccaaaaagaaaagaaaaaagatatatatatatatatatatatatacacgtatatatataaagagaattt

SEQ ID NO: 213629 - DNA, 120 bp, Artificial Sequence
  ENSG00000116017_19 (sequence is synthesized)
aataaaacaggggaaaaccaaggaacacttgaatttctcaggttttggacattcagagagatgaattgtgagaacagcaaagaaatccatcagaaaaacagaaagaggcagacgtttccc

SEQ ID NO: 213630 - DNA, 120 bp, Artificial Sequence
  ENSG00000116017_20 (sequence is synthesized)
agggcgttcaggcagccctgatggaccgaaggctctggtgtctggtttggccccacagcagtgtgggccgatcctgtttacctcatacatccctgcactgtgtgttttcatttttgtctg

SEQ ID NO: 213631 - DNA, 120 bp, Artificial Sequence
  ENSG00000116017_21 (sequence is synthesized)
ctttagttctcttttattttctattcaccacacactcaccactcccagcttctcgtgtccagtgaaacccctgaaccaagatcactgaatttttgtttttttcttgttgctttgggaaat

SEQ ID NO: 213632 - DNA, 120 bp, Artificial Sequence
  ENSG00000116017_22 (sequence is synthesized)
ttttttttctctgtagggtttttaagaggtttcgggggttttgttgtgtaaatattctattttattcttggggggatcaaaccttaggaaaaggatatctatatatctatatagctatat

SEQ ID NO: 213633 - DNA, 74 bp, Artificial Sequence
  ENSG00000116017_23 (sequence is synthesized)
tttttatttttcccatgaccaatttgggtccctttgtccatttctgggggtgcgttgggcagctgtgagcccag

SEQ ID NO: 213634 - DNA, 120 bp, Artificial Sequence
  ENSG00000116017_24 (sequence is synthesized)
ggagccaatgaactcaggtgctatgggccgggctggggcagagggtgcatgctggggtcccaccggccaggggcccctgacagtgaattgctgactgtgatattccacgatgcttttgct

SEQ ID NO: 213635 - DNA, 83 bp, Artificial Sequence
  ENSG00000116017_25 (sequence is synthesized)
cagtgaattgctgactgtgatattccacgatgcttttgcttgtgccgtgcttgtctgctgggctctcgagtcaggggcctgga

SEQ ID NO: 213636 - DNA, 120 bp, Artificial Sequence
  ENSG00000116017_26 (sequence is synthesized)
gaaatcttatctaaaaagtagcaagtgctggaaaaagggcctggggggcgggggtggttcttgtcgaagcccccaggctcctgtctcagggatgaatgtggcgtctcattgggattcttc

SEQ ID NO: 213637 - DNA, 120 bp, Artificial Sequence
  ENSG00000116017_27 (sequence is synthesized)
tcttgcccgaaagggctgcttttgaggactatcaatactggggagtgggggtgaagccggacctcactcagggtgaggatttcagggccccggcatcctgaacaccccccacaccccaac

SEQ ID NO: 213638 - DNA, 120 bp, Artificial Sequence
  ENSG00000116017_28 (sequence is synthesized)
attctcctcgctctgtcccttcctcttctcccaaccccttttgtgctggggctgcgagctccccgagttctgcggtgactaaatcgaggccgagaagggaggctgccccccaccaccctg

SEQ ID NO: 213639 - DNA, 120 bp, Artificial Sequence
  ENSG00000116017_29 (sequence is synthesized)
tgggtcagtacccctccccctggcttggagaaagtggggtcaccgcagctgagctggggggttattttggctggagctgctggagcagaaaggctgggtctgaaatgcccagcagggtct

SEQ ID NO: 213640 - DNA, 120 bp, Artificial Sequence
  ENSG00000116017_30 (sequence is synthesized)
ggggacttcgttggacccgcgtggtgttgggcggggctgtcgtgtcctacacgggagctctgggctttcatttctcttggggtgcagtggggattaactcagctattcccagggtaagcc

SEQ ID NO: 213641 - DNA, 120 bp, Artificial Sequence
  ENSG00000116017_31 (sequence is synthesized)
tgggtctctaattgggccctgggagccctgttaggccaccggcatgggggcttggtgaggaaggggactccccagctccccccactcccaaccacctccccattgccttggagacccctg

SEQ ID NO: 213642 - DNA, 120 bp, Artificial Sequence
  ENSG00000116017_32 (sequence is synthesized)
gggagggggctggggggcttctgagcccctgagtctaggttcactttcccgtcgggctgtgggaggggactgtcactttcctgtgtctttggggaggggacccccacttccttctcggat

SEQ ID NO: 213643 - DNA, 120 bp, Artificial Sequence
  ENSG00000116017_33 (sequence is synthesized)
ctcagggccgtggacacacaccccctttccaggagggggtggtgggcgtctaggttttccttgtcccttcctggggccagcaccgtagcagcacaatcaccccgggaagggggtgtctgt

SEQ ID NO: 213644 - DNA, 120 bp, Artificial Sequence
  ENSG00000116017_34 (sequence is synthesized)
ttgcctccagacacaatcgggccccactcgcagaaccacctggactctgtccgtgtctgtcccccggcctccagggctcctctcccgggacccccgtcccacgcctgggccccgcgccgg

SEQ ID NO: 213645 - DNA, 120 bp, Artificial Sequence
  ENSG00000116017_35 (sequence is synthesized)
gggaagcgcctgctgcctatctctgtctacctcaggtctgacttttgatgccaaaatctgagcccctggggtgcctctcccccgcctcccgtgcaccagggtctgcagcagccactgggg

SEQ ID NO: 213646 - DNA, 120 bp, Artificial Sequence
  ENSG00000116017_36 (sequence is synthesized)
cctggctgcctgctgcatctggcggccctggacccctggggcccccgtgcacctgcccacctcggagcctggggaggggccgtgcagggtcgagggctgggtcgtctccctcgggctgcg

SEQ ID NO: 213647 - DNA, 120 bp, Artificial Sequence
  ENSG00000116017_37 (sequence is synthesized)
tgtgtgtgtcgggaatcctgcgtgtcgtgtctgtgggcgatccggcctcccggcggtgggtggacctggattctaactcagaggacttgagcctgctgttaactccgatgattgtaggga

SEQ ID NO: 213648 - DNA, 120 bp, Artificial Sequence
  ENSG00000116017_38 (sequence is synthesized)
caggcggggtgggtggggggtgggcgcgaggctgggtcccggcccaggagaaggaagtcgctgaaggcagtggccatgctggccgtggaaatgggaggcggttgcagagggtctatgggg

SEQ ID NO: 213649 - DNA, 120 bp, Artificial Sequence
  ENSG00000116017_39 (sequence is synthesized)
cccggtcctggatactcggcaggaagccgtgtctgcagaggctcctccctgcctcaggtggccccgttcaaccccagccgtgcccatctcctgccaccgcctgtcggtgggggtttaaat

SEQ ID NO: 213650 - DNA, 120 bp, Artificial Sequence
  ENSG00000116017_40 (sequence is synthesized)
tcggtgtggctttctggggtgcagctcagcacccccccttatgcagactgggagggggtcgggcagtcccctcagccacgaggaccctggatgggttctagttcacttgggaccgtgggg

SEQ ID NO: 213651 - DNA, 120 bp, Artificial Sequence
  ENSG00000116017_41 (sequence is synthesized)
cctggctgcgtactgagtgggtgccccacagtcaaggccaacgggggctccccctgctctgagatgttgggagaaaggcggcttctggaaccttccgtgggacccgtaagtggctgtcca

SEQ ID NO: 213652 - DNA, 120 bp, Artificial Sequence
  ENSG00000116017_42 (sequence is synthesized)
gaaaggcgggagggtgggcacggggcacggggggcagctggggtcgttgttaagggtcacgcatctgtacagttgaatttcctttctcttatcatgttttacccaccttgtccctttttt

SEQ ID NO: 213653 - DNA, 120 bp, Artificial Sequence
  ENSG00000116017_43 (sequence is synthesized)
ccccaattgtgcttttgcatttttttccttggcaaatgtaaactcagcctttcattcatgacgtgtgaaatttcagtttctctggagtttgtcagacggcgtgggaaccacgcctgaaac

SEQ ID NO: 213654 - DNA, 120 bp, Artificial Sequence
  ENSG00000116017_44 (sequence is synthesized)
tcaggtaataggaggaaaaaaaaaaaaacttaaaaaaatttttaaaaaacataaaactactctctacctctggctgggcccagcctgtctcgccctggccgcggcagggtggcctgtaac

SEQ ID NO: 213655 - DNA, 72 bp, Artificial Sequence
  ENSG00000116017_45 (sequence is synthesized)
cagcctgtctcgccctggccgcggcagggtggcctgtaacaatttcagttttcgcagaacattcaggtatgt

SEQ ID NO: 213656 - DNA, 120 bp, Artificial Sequence
  ENSG00000116017_46 (sequence is synthesized)
tatagtaacattattatgcagattgtatttaaacttcagaaatatttaagacgattgtaaccctgtaaagctgatgagatattaaaacgagacaaaacacttctgacttttaacagaaaa

SEQ ID NO: 213657 - DNA, 120 bp, Artificial Sequence
  ENSG00000116017_47 (sequence is synthesized)
ccctccttgagtgccatgggttgggggggtactgttacccacactgttttgcaggtagggaacctgaggtccagagaagttgtggcttgggcgttgctgttgagttgtgtgatgggggga

SEQ ID NO: 213658 - DNA, 120 bp, Artificial Sequence
  ENSG00000116017_48 (sequence is synthesized)
gggttagcccagggcccgtatacaacaggcgctcaatctccagtctggcctgagatgggaggatacctagatacctggaggccaggctgggccgctccaacagggactcaggcagcgact

SEQ ID NO: 213659 - DNA, 120 bp, Artificial Sequence
  ENSG00000116017_49 (sequence is synthesized)
aagcaataatccaagatctcctggggcagacagtctggccacagcgtgtttctctgtggccccgtgcggggcgaccttgctacccaggcccacagtaggctgtatgcgaagagcctgcgc

SEQ ID NO: 213660 - DNA, 120 bp, Artificial Sequence
  ENSG00000116017_50 (sequence is synthesized)
ctctgcctccaagaaggcctccaggtttctgcaaatgcgtgaatgagccggatgccagcctctgtcccctggagcccagcgtgaggaagaggcatgccccatcagccttcagcttgagcc

SEQ ID NO: 213661 - DNA, 120 bp, Artificial Sequence
  ENSG00000116017_51 (sequence is synthesized)
gggctggttgcgcgtcgtcagaccgcgggaggggggcgagggggcgtgcggggaaaagtggggagccctggcgaggccctcccgcgcccgggccgcggcgctgaatcaccggccaggttt

SEQ ID NO: 213662 - DNA, 89 bp, Artificial Sequence
  ENSG00000116017_52 (sequence is synthesized)
agtgagccgagattgcagcccccgtctcaaacaaacaaaaagcaggcatgggacacctgtgaaccgcatccccatcatggccaaacagg

SEQ ID NO: 213663 - DNA, 120 bp, Artificial Sequence
  ENSG00000116017_53 (sequence is synthesized)
cgcaagcaccaatggcagctccatcacccccgcccctaagatcaagaaaggtaagggcctgtatggggcctggggcgtgttcccaactgagcttcagcctggctgtctgaccttggggga

SEQ ID NO: 213664 - DNA, 120 bp, Artificial Sequence
  ENSG00000116017_54 (sequence is synthesized)
tacctcttcccctctctgggtaaccaggatgaaaaaccctatagttggcatggaaaagggcttccaatctaccagtcctctgcctatggcagacattaccaatccatcaccattttctaa

SEQ ID NO: 213665 - DNA, 120 bp, Artificial Sequence
  ENSG00000116017_55 (sequence is synthesized)
gaactcaggaccctgagttgcgcctggtcccacctgcttgaacctaggtgtgcgggcgagcagggcacggccaggggctttgcaggacaaacagtcaagactgatggagaggataccatc

SEQ ID NO: 213666 - DNA, 120 bp, Artificial Sequence
  ENSG00000116017_56 (sequence is synthesized)
gttcacccggtaccacgctcagcccagagggggtcgtccacagatacatattcagtgtgacgttggatggttcacattcctagttttttgttttaatgagacggagtcttgcacagacat

SEQ ID NO: 213667 - DNA, 120 bp, Artificial Sequence
  ENSG00000116030_0 (sequence is synthesized)
gcggaagtgacgcgaggcgtagcggaagttactgcagccgcggtgttgtgctgtggggaagggagaaggatttgtaaaccccggagcgaggttctgcttacccgaggccgctgctgtgcg

SEQ ID NO: 213668 - DNA, 120 bp, Artificial Sequence
  ENSG00000116030_1 (sequence is synthesized)
gagacccccgggtgaagccaccgtcatcatgtctgaccaggaggcaaaaccttcaactgaggacttgggggataagaaggaaggtgaatatattaaactcaaagtcattggacaggatag

SEQ ID NO: 213669 - DNA, 120 bp, Artificial Sequence
  ENSG00000116030_2 (sequence is synthesized)
cagtgagattcacttcaaagtgaaaatgacaacacatctcaagaaactcaaagaatcatactgtcaaagacagggtgttccaatgaattcactcaggtttctctttgagggtcagagaat

SEQ ID NO: 213670 - DNA, 120 bp, Artificial Sequence
  ENSG00000116030_3 (sequence is synthesized)
tgctgataatcatactccaaaagaactgggaatggaggaagaagatgtgattgaagtttatcaggaacaaacggggggtcattcaacagtttagttttaaaatttgagggtctggaccaa

SEQ ID NO: 213671 - DNA, 120 bp, Artificial Sequence
  ENSG00000116030_4 (sequence is synthesized)
tgtcagaagatcccagaaaagttctaattttcattagcaattaataaagctatacatgcagaaatgaatacaacagaacactgctctttttgattttatttgtactttttggcctgggat

SEQ ID NO: 213672 - DNA, 120 bp, Artificial Sequence
  ENSG00000116030_5 (sequence is synthesized)
atgggttttaaatggacattgtctgtaccagcttcattaaaataaacaatatttgtaaaaatcatactaatgcttattttattttaattgtatagaaagaaaaaaatgcctaaaataagg

SEQ ID NO: 213673 - DNA, 120 bp, Artificial Sequence
  ENSG00000116030_6 (sequence is synthesized)
ttttcttgcataaatactggaaattgcacatggtacaaattttttcttcattactgtacagtgatgatgttaatgactttgaagcactgaaagttactgaagtgccttctgaatcaagga

SEQ ID NO: 213674 - DNA, 120 bp, Artificial Sequence
  ENSG00000116030_7 (sequence is synthesized)
tttaattaaggccacaatacctttttaatactcagtgttctgtttttttaaaaacttgatattcctgtatggtgcatatatgatacagttacctaatcatgttgaataaatgggcatgcc

SEQ ID NO: 213675 - DNA, 120 bp, Artificial Sequence
  ENSG00000116030_8 (sequence is synthesized)
tttcttttccctcaatccttttttatttttaaaaatagttcttttgtaatgtggtgttcaaaacggaattgaaaactggcaccccatctctttgaaacatctggtaatttgaattctagt

SEQ ID NO: 213676 - DNA, 120 bp, Artificial Sequence
  ENSG00000116030_9 (sequence is synthesized)
gctcattattcattattgtttgttttcattgtgctgatttttggtgatcaagcctcagtccccttcatattaccctctcctttttaaaaattacgtgtgcacagagaggtcacctttttc

SEQ ID NO: 213677 - DNA, 120 bp, Artificial Sequence
  ENSG00000116030_10 (sequence is synthesized)
attacttcactcctggactgtgactttcagtgggagatggaagtttttcagagaactgaactgtggaaaaatgacctttccttaacttgaagctacttttaaaatttgagggtctggacc

SEQ ID NO: 213678 - DNA, 120 bp, Artificial Sequence
  ENSG00000116030_11 (sequence is synthesized)
ctttgtggtaacttaaacaaagcttcttaaggcctcctctccttccagttacagaggactcagggcttggttgctgtttattgcccttcactgcatggaataagctctttgccttctaga

SEQ ID NO: 213679 - DNA, 120 bp, Artificial Sequence
  ENSG00000116030_12 (sequence is synthesized)
tacttagaggaagaagcagctgtttactatgaatataaattcatagaaatgtggagagactatatttgaagacagtcttctagttttcaggaggcaaaaccttcaactgaggacttgggg

SEQ ID NO: 213680 - DNA, 120 bp, Artificial Sequence
  ENSG00000116030_13 (sequence is synthesized)
tgaccaggaatcacttaaccctgaaagtcttgtgagaagacatggcgagaagtggagtcaagcacacaccatgatggcagataaaggaagagaggccgataatcttttttttttgagacg

SEQ ID NO: 213681 - DNA, 120 bp, Artificial Sequence
  ENSG00000116030_14 (sequence is synthesized)
gaagccaccgtcatcatgtctgaccaggctctgtggattagactcacctctgcttcttggtgtgtggggcctcagctgagatgactcaagtggctgggggctggaacagctagttgtcag

SEQ ID NO: 213682 - DNA, 84 bp, Artificial Sequence
  ENSG00000116030_15 (sequence is synthesized)
aattcactcaggtttctctttgagggtcagagaattgctgataatcatactccaaaagaagcacagtggcccacgtggatcact

SEQ ID NO: 213683 - DNA, 120 bp, Artificial Sequence
  ENSG00000116031_0 (sequence is synthesized)
agaagcacctgtgctcccaggataagggtgagcactcaggatgactgtggagaaggaggcccctgatgcgcacttcactgtggacaaacagaacatctccctctggccccgagagcctcc

SEQ ID NO: 213684 - DNA, 120 bp, Artificial Sequence
  ENSG00000116031_1 (sequence is synthesized)
tcccaagtccggtccatctctggtcccggggaaaacacccacagtccgtgctgcattaatctgcctgacgctggtcctggtcgcctccgtcctgctgcaggccgtcctttatccccggtt

SEQ ID NO: 213685 - DNA, 120 bp, Artificial Sequence
  ENSG00000116031_2 (sequence is synthesized)
tatgggcaccatatcagatgtaaagaccaatgtccagttgctgaaaggtcgtgtggacaacatcagcaccctggattctgaaattaaaaagaatagtgacggcatggaggcagctggcgt

SEQ ID NO: 213686 - DNA, 120 bp, Artificial Sequence
  ENSG00000116031_3 (sequence is synthesized)
tcagatccagatggtgaatgagagcctgggttatgtgcgttctcagttcctgaagttaaaaaccagtgtggagaaggccaacgcacagatccagatcttaacaagaagttgggaagaagt

SEQ ID NO: 213687 - DNA, 120 bp, Artificial Sequence
  ENSG00000116031_4 (sequence is synthesized)
cagtaccttaaatgcccaaatcccagagttaaaaagtgatttggagaaagccagtgctttaaatacaaagatccgggcactccagggcagcttggagaatatgagcaagttgctcaaacg

SEQ ID NO: 213688 - DNA, 120 bp, Artificial Sequence
  ENSG00000116031_5 (sequence is synthesized)
acaaaatgatattctacaggtggtttctcaaggctggaagtacttcaaggggaacttctattacttttctctcattccaaagacctggtatagtgccgagcagttctgtgtgtccaggaa

SEQ ID NO: 213689 - DNA, 120 bp, Artificial Sequence
  ENSG00000116031_6 (sequence is synthesized)
ttcacacctgacctcggtgacctcagagagtgagcaggagtttctgtataaaacagcggggggactcatctactggattggcctgactaaagcagggatggaaggggactggtcctgggt

SEQ ID NO: 213690 - DNA, 120 bp, Artificial Sequence
  ENSG00000116031_7 (sequence is synthesized)
tgggaacaatgaacactgtggcaatataaaggctccctcacttcaggcctggaatgatgccccatgtgacaaaacgtttcttttcatttgtaagcgaccctatgtcccatcagaaccgtg

SEQ ID NO: 213691 - DNA, 120 bp, Artificial Sequence
  ENSG00000116031_8 (sequence is synthesized)
acaggacaggctcccaagctcactctttgagctccaacgcttgttaaacatgaggaaatgcctctttcttccccagactccaggatgactttgcacgttaatttttcttgcttcaaaatt

SEQ ID NO: 213692 - DNA, 120 bp, Artificial Sequence
  ENSG00000116031_9 (sequence is synthesized)
gtcccacagtggcattctggagtccgtctgtcttggctggaaattctctgacgtcttggaggcagctggaatggaaaggagaattcaggttaaagtgggaggggtgggtagagaggattt

SEQ ID NO: 213693 - DNA, 120 bp, Artificial Sequence
  ENSG00000116031_10 (sequence is synthesized)
agaagttccaattgccctgctaaggaggatcaagacccgtaatccggcataacaccctggggttttccactctttcagagaaacctcagcttcatcacatcaaagttactccagagcaac

SEQ ID NO: 213694 - DNA, 120 bp, Artificial Sequence
  ENSG00000116031_11 (sequence is synthesized)
caagcaattctcctgatattgtcatccagggcttttcttggccaaaccccctagaatttccatgtctctgcttagctgtgctggcagctagcagctggctgtgtttgcagtgcaaatagc

SEQ ID NO: 213695 - DNA, 120 bp, Artificial Sequence
  ENSG00000116031_12 (sequence is synthesized)
tctgttcttggaaatcctgctcatggtatgtccccagtggtttcttcatccacatcatctaaagcctgaacccgttcttctctggttcaagtcagtggctgacacggacttgtatctcct

SEQ ID NO: 213696 - DNA, 120 bp, Artificial Sequence
  ENSG00000116031_13 (sequence is synthesized)
tcagagctcggctggcacccagcctcccttctccttccactcccttagtacactggagtgccgagccctgccttccacccagcgtccatccagcccctgtcctcacctctccggcacctc

SEQ ID NO: 213697 - DNA, 120 bp, Artificial Sequence
  ENSG00000116031_14 (sequence is synthesized)
ctcctccttctgcatttcctatcttcctgtgtcttgtgcatgggaagcagccttcagtgccttcatgaattcaccttccagcttcctcagaataaaatgctgcctgggtcaaggactcac

SEQ ID NO: 213698 - DNA, 120 bp, Artificial Sequence
  ENSG00000116032_0 (sequence is synthesized)
cgacgccgacaactttgcgatggagtttgtgcgggcgctgtggctgggcctggcgctggcgctggggccggggtccgcggggggccaccctcagccgtgcggcgtcctggcgcgcctcgg

SEQ ID NO: 213699 - DNA, 80 bp, Artificial Sequence
  ENSG00000116032_1 (sequence is synthesized)
gccgccctggcgccgcggctgccgcacaacctgagcttggagctggtggtcgccgcgccccccgcccgcgaccccgcctc

SEQ ID NO: 213700 - DNA, 120 bp, Artificial Sequence
  ENSG00000116032_2 (sequence is synthesized)
cccgcccgcgaccccgcctcgctgacccgcggcctgtgccaggcgctggtgcctccgggcgtggcggccctgctcgcctttcccgaggctcggcccgagctgctgcagctgcacttcctg

SEQ ID NO: 213701 - DNA, 120 bp, Artificial Sequence
  ENSG00000116032_3 (sequence is synthesized)
gcagctgcacttcctggcggcggccaccgagacccccgtgctcagcctgctgcggcgggaggcgcgcgcgcccctcggagccccgaacccattccacctgcagctgcactgggccagccc

SEQ ID NO: 213702 - DNA, 120 bp, Artificial Sequence
  ENSG00000116032_4 (sequence is synthesized)
cctggagacgctgctggatgtgctggtggcggtgctgcaggcgcacgcctgggaagacgtcggcctggccctgtgccgcactcaggaccccggcggcctggtggccctctggacaagccg

SEQ ID NO: 213703 - DNA, 120 bp, Artificial Sequence
  ENSG00000116032_5 (sequence is synthesized)
ggctggccggcccccacagctggtcctggacctaagccggcgggacacgggagatgcaggactgcgggcacgcctggccccgatggcggcgccagtggggggtgaagcaccggtacccgc

SEQ ID NO: 213704 - DNA, 120 bp, Artificial Sequence
  ENSG00000116032_6 (sequence is synthesized)
ggcggtcctcctcggctgtgacatcgcccgtgcccgtcgggtgctggaggccgtacctcccggcccccactggctgttggggacaccactgccgcccaaggccctgcccaccgcggggct

SEQ ID NO: 213705 - DNA, 120 bp, Artificial Sequence
  ENSG00000116032_7 (sequence is synthesized)
gccaccagggctgctggcgctgggcgaggtggcacgacccccgctggaggccgccatccatgacattgtgcaactggtggcccgggcgctgggcagtgcggcccaggtgcagccgaagcg

SEQ ID NO: 213706 - DNA, 120 bp, Artificial Sequence
  ENSG00000116032_8 (sequence is synthesized)
agccctcctccccgccccggtcaactgcggggacctgcagccggccgggcccgagtccccggggcgcttcttggcacggttcctggccaacacgtccttccagggccgcacgggccccgt

SEQ ID NO: 213707 - DNA, 120 bp, Artificial Sequence
  ENSG00000116032_9 (sequence is synthesized)
gtgggtgacaggcagctcccaggtacacatgtctcggcactttaaggtgtggagccttcgccgggacccacggggcgccccggcctgggccacggtgggcagctggcgggacggccagct

SEQ ID NO: 213708 - DNA, 120 bp, Artificial Sequence
  ENSG00000116032_10 (sequence is synthesized)
ggacttggaaccgggaggtgcctctgcacggcccccgcccccacagggtgcccaggtctggcccaagctgcgtgtggtaacgctgttggaacacccatttgtgtttgcccgtgatccaga

SEQ ID NO: 213709 - DNA, 120 bp, Artificial Sequence
  ENSG00000116032_11 (sequence is synthesized)
cgaagacgggcagtgcccagcggggcagctgtgcctggaccctggcaccaacgactcggccaccctggacgcactgttcgccgcgctggccaacggctcagcgccccgtgccctgcgcaa

SEQ ID NO: 213710 - DNA, 120 bp, Artificial Sequence
  ENSG00000116032_12 (sequence is synthesized)
gtgctgctacggctactgcattgacctgctggagcggctggcggaggacacgcccttcgacttcgagctgtacctcgtgggtgacggcaagtacggcgccctgcgggacggccgctggac

SEQ ID NO: 213711 - DNA, 120 bp, Artificial Sequence
  ENSG00000116032_13 (sequence is synthesized)
cggtcaccagcttcagtatcaactccgcccgctcacaggtggtggacttcaccagccccttcttctccaccagcctgggcatcatggtgcgggcacgggacacggcctcacccatcggtg

SEQ ID NO: 213712 - DNA, 120 bp, Artificial Sequence
  ENSG00000116032_14 (sequence is synthesized)
cctttatgtggcccctgcactggtccacgtggctgggcgtctttgcggccctgcacctcaccgcgctcttcctcaccgtgtacgagtggcgtagcccctacggcctcacgccacgtggcc

SEQ ID NO: 213713 - DNA, 120 bp, Artificial Sequence
  ENSG00000116032_15 (sequence is synthesized)
gcaaccgcagcaccgtcttctcctactcctcagccctcaacctgtgctacgccatcctcttcagacgcaccgtgtccagcaagacgcccaagtgccccacgggccgcctgctcatgaacc

SEQ ID NO: 213714 - DNA, 120 bp, Artificial Sequence
  ENSG00000116032_16 (sequence is synthesized)
tctgggccatcttctgcctgctggtgctgtccagctacacggccaacctggctgccgtcatggtcggggacaagaccttcgaggagctgtcggggatccacgaccccaagctgcaccacc

SEQ ID NO: 213715 - DNA, 120 bp, Artificial Sequence
  ENSG00000116032_17 (sequence is synthesized)
cggcgcagggcttccgcttcggcaccgtgtgggagagcagcgccgaggcgtacatcaagaagagcttccccgacatgcacgcacacatgcggcgccacagcgcgcccaccacgccccgcg

SEQ ID NO: 213716 - DNA, 120 bp, Artificial Sequence
  ENSG00000116032_18 (sequence is synthesized)
gcgtcgccatgctcacgagcgacccccccaagctcaacgccttcatcatggacaagtcgctcctggactacgaggtctccatcgacgccgactgcaaactgctgaccgtgggaaagccct

SEQ ID NO: 213717 - DNA, 120 bp, Artificial Sequence
  ENSG00000116032_19 (sequence is synthesized)
tcgccattgagggctatgggatcggactgccccagaactcgccgctcacctccaacctgtccgagttcatcagccgctacaagtcctccggcttcatcgacctgctccacgacaagtggt

SEQ ID NO: 213718 - DNA, 120 bp, Artificial Sequence
  ENSG00000116032_20 (sequence is synthesized)
acaagatggtgccttgcggcaagcgggtctttgcggttacagagaccctgcagatgagcatctaccacttcgcgggcctcttcgtgttgctgtgcctgggcctgggcagcgctctgctca

SEQ ID NO: 213719 - DNA, 120 bp, Artificial Sequence
  ENSG00000116032_21 (sequence is synthesized)
gctcgctgggcgagcacgccttcttccgcctggcgctgccgcgcatccgcaaggggagcaggctgcagtactggctgcacaccagccagaaaatccaccgcgccctcaacacggagccac

SEQ ID NO: 213720 - DNA, 120 bp, Artificial Sequence
  ENSG00000116032_22 (sequence is synthesized)
cagaggggtcgaaggaggagacggcagaggcggagcccagcggccccgaggtggagcagcagcagcagcagcaggaccagccaacggctccggagggctggaaacgggcgcgccgggccg

SEQ ID NO: 213721 - DNA, 120 bp, Artificial Sequence
  ENSG00000116032_23 (sequence is synthesized)
tggacaaggagcgccgcgtgcgcttcctgctggagcccgccgtggttgtggcacccgaagcggacgcggaggcggaggctgcgccgcgagagggccccgtctggctgtgctcctacggcc

SEQ ID NO: 213722 - DNA, 120 bp, Artificial Sequence
  ENSG00000116032_24 (sequence is synthesized)
caaggcccacgggggccccccagcccggggagctgcaggagctggagcgccgcatcgaagtcgcgcgtgagcggctccgccaggccctggtgcggcgcggccagctcctggcacagctcg

SEQ ID NO: 213723 - DNA, 120 bp, Artificial Sequence
  ENSG00000116032_25 (sequence is synthesized)
tggcacagctcggggacagcgcacgtcaccggcctcggcgcttgcttcaggccagagcggcccccgcggaggccccaccacactctggccgaccggggagccaggaatgaggcggcagcc

SEQ ID NO: 213724 - DNA, 120 bp, Artificial Sequence
  ENSG00000116032_26 (sequence is synthesized)
gggccgtttgggctcaagacacacacacagcgcagtgagccgctgtcaacagacagtttattctatatacaaacacaattttgtacactgcaattaaatagaatggaatgagcgctcctc

SEQ ID NO: 213725 - DNA, 80 bp, Artificial Sequence
  ENSG00000116035_0 (sequence is synthesized)
agcgtaggctggctccgccgtagaggggttggcagtggcggtcagcatgggcgatgggggcgccgagcgcgaccggggcc

SEQ ID NO: 213726 - DNA, 120 bp, Artificial Sequence
  ENSG00000116035_1 (sequence is synthesized)
cggagaccgcagcggagcgggggacttgcgagctgatggcggtggccacagcccaacggaggtggccgggacctcagcctccagtcccgcaggctccagggagagtggagccgacagcga

SEQ ID NO: 213727 - DNA, 120 bp, Artificial Sequence
  ENSG00000116035_2 (sequence is synthesized)
cgggcagcccgggcccggcgaggcagaccactgccgccgcatactggtgcgagatgccaaagggacaattcgggaaattgtcctgcctaagggcctggacctggaccggcccaagcggac

SEQ ID NO: 213728 - DNA, 120 bp, Artificial Sequence
  ENSG00000116035_3 (sequence is synthesized)
acgtacatccttcactgccgagcagctgtaccgcctggagatggagttccagcgctgccagtatgtggtgggccgcgagcgcactgagctggcccgccagctgaacctctccgagaccca

SEQ ID NO: 213729 - DNA, 120 bp, Artificial Sequence
  ENSG00000116035_4 (sequence is synthesized)
agcctccgaggcctttgccacctccaacattctgcggctgctggagcagggccggctgctctctgtgcccagggcccctagcctcctggcgctgacccctagcctgccaggcctacctgc

SEQ ID NO: 213730 - DNA, 120 bp, Artificial Sequence
  ENSG00000116035_5 (sequence is synthesized)
cagccacaggggcacctccttaggtgaccccaggaactcctccccacgcctcaacccgctgtcctcggcctcagcgtcccccccactgccgccccctctgccagctgtctgcttttcctc

SEQ ID NO: 213731 - DNA, 120 bp, Artificial Sequence
  ENSG00000116035_6 (sequence is synthesized)
ggccccgctcctggatctgcctgccggctacgaactgggttcctcggccttcgagccatacagctggctagaacggaaagtgggcagcgccagcagctgcaagaaagctaacacttaaga

SEQ ID NO: 213732 - DNA, 120 bp, Artificial Sequence
  ENSG00000116035_7 (sequence is synthesized)
ctcccaccctgtgacactgagtcccgagcacagcaccttcccagtctcctgtgccccagcggacagcactgagcaggccccggagaggaggggctgcagccacacactcttccccacctg

SEQ ID NO: 213733 - DNA, 120 bp, Artificial Sequence
  ENSG00000116035_8 (sequence is synthesized)
ccccccagctcagagactcgtgaccaaatggccttggtcccgcagcttgtgtgcgtgagtgcagtgtgagtgtgtgtgtctctcactgaaataaaaggaaaacaatgacaagaagggaaa

SEQ ID NO: 213734 - DNA, 120 bp, Artificial Sequence
  ENSG00000116035_9 (sequence is synthesized)
gtgctggaccgggtcaagtttgcccagtatgcggagatcgtccacttcaccctcccagatgggactcagaggagcgggcaggtgcttgaggtggctggcaccaaggcgattgttcaggtg

SEQ ID NO: 213735 - DNA, 120 bp, Artificial Sequence
  ENSG00000116035_10 (sequence is synthesized)
tttgaagggacatcagggatcgatgccaggaagaccacttgcgaatttacaggggacatcctacgaactccggtgtcagaggacatgctgggtcgggttttcaatggctccggcaagccc

SEQ ID NO: 213736 - DNA, 120 bp, Artificial Sequence
  ENSG00000116035_11 (sequence is synthesized)
attgacaaggggccagtggtcatggcggaggactttctggatatcaatggccagcccatcaacccgcactcccgcatctaccccgaggagatgattcagacgggcatttctcctattgac

SEQ ID NO: 213737 - DNA, 120 bp, Artificial Sequence
  ENSG00000116035_12 (sequence is synthesized)
gtcatgaacagcattgcccgcggccagaagatccccatcttctcagcagccgggctcccccacaatgagattgccgctcagatctgccgccaggcggggctggtgaagaagtccaaggct

SEQ ID NO: 213738 - DNA, 120 bp, Artificial Sequence
  ENSG00000116035_13 (sequence is synthesized)
gggggtgaacatggagacagccagattcttcaagtctgactttgagcagaatggaaccatggggaacgtctgcctcttcctgaacttggccaatgaccccacgatcgagcggatcatcac

SEQ ID NO: 213739 - DNA, 120 bp, Artificial Sequence
  ENSG00000116035_14 (sequence is synthesized)
cccgcgcctggcgctgaccactgctgaattccttgcctaccagtgtgagaagcatgtgctggtcatactgacggacatgagttcctatgcagaggccttgcgggagatatcacccaccct

SEQ ID NO: 213740 - DNA, 120 bp, Artificial Sequence
  ENSG00000116035_15 (sequence is synthesized)
atcccagacttgacgggcttcatcacagagggacagatctacgtggacagacagcttcacaacagacagatctacccccccatcaacgtgctcccttccctgtcgcggctgatgaagtca

SEQ ID NO: 213741 - DNA, 120 bp, Artificial Sequence
  ENSG00000116035_16 (sequence is synthesized)
gccattggggaaggcatgacaagaaaggaccatggagatgtctccaaccagctgtacgcctgctatgccatcgggaaggacgtgcaggccatgaaggcagtagttggggaggaggcgctc

SEQ ID NO: 213742 - DNA, 120 bp, Artificial Sequence
  ENSG00000116035_17 (sequence is synthesized)
acctctgaggacctgctctacctggaattcctgcagaagtttgagaagaacttcatcaatcagggcccctacgagaaccgctcggtgttcgagtcgctggacctgggctggaagctgctg

SEQ ID NO: 213743 - DNA, 120 bp, Artificial Sequence
  ENSG00000116035_18 (sequence is synthesized)
cgcatcttccccaaggagatgctgaagcgcattccgcaggccgtgatcgacgagttctattcccgcgagggggcgctgcaggacctcgcgcctgacactgcgctctagccccgcgcgccg

SEQ ID NO: 213744 - DNA, 120 bp, Artificial Sequence
  ENSG00000116035_19 (sequence is synthesized)
tggcaccccaacaccggcagggaacctaccctcggctcccgggtctcccctccctcgccaccccaaccagcggcttctgcgccgccctccgccctccgctggctccgaggtggtgggggc

SEQ ID NO: 213745 - DNA, 120 bp, Artificial Sequence
  ENSG00000116035_20 (sequence is synthesized)
gccgcacgctccatccctttccctcgctcgattccttttcccgcgctccatgcctccccctcgactcccggtgctgcggaagaactgaaggttgcgatgccttactctgacgggagcatc

SEQ ID NO: 213746 - DNA, 120 bp, Artificial Sequence
  ENSG00000116035_21 (sequence is synthesized)
ggagttccagcgctgccagtatgtggtgggccgcgagcgcactgagctggcccgccagctgaacctctccgagacccagggtcaaggcgaacatcccagggttgcagagtgggccataat

SEQ ID NO: 213747 - DNA, 120 bp, Artificial Sequence
  ENSG00000116035_22 (sequence is synthesized)
gaggaggtgcctgggcgccgagggtttcctggatatatgtacacagacctggccaccatctacgagcgggcgggccgcgtggagggtcggggaggatccatcacacagatccccatcctc

SEQ ID NO: 213748 - DNA, 120 bp, Artificial Sequence
  ENSG00000116035_23 (sequence is synthesized)
accatgcccaacgacgatatcacccaccctatcccagacttgacgggcttcatcacagagggacagatctacgtggacagacagcttcacaacagacagatctacccccccatcaacgtg

SEQ ID NO: 213749 - DNA, 120 bp, Artificial Sequence
  ENSG00000116039_0 (sequence is synthesized)
agagctgccaccagcagcaggctcagacactgggctcccagctggggactgctccatggccatggagatagacagcaggcctggggggctccccggcagtagctgcaacctaggtgcagc

SEQ ID NO: 213750 - DNA, 120 bp, Artificial Sequence
  ENSG00000116039_1 (sequence is synthesized)
ccgagaacacatgcaggcggtcacccgaaactacatcacccacccccgtgtcacctacaggactgtgtgcagcgtgaacgggcccctggtggtgctggaccgggtcaagtttgcccagta

SEQ ID NO: 213751 - DNA, 120 bp, Artificial Sequence
  ENSG00000116039_2 (sequence is synthesized)
tgcggagatcgtccacttcaccctcccagatgggactcagaggagcgggcaggtgcttgaggtggctggcaccaaggcgattgttcaggtgtttgaagggacatcagggatcgatgccag

SEQ ID NO: 213752 - DNA, 120 bp, Artificial Sequence
  ENSG00000116039_3 (sequence is synthesized)
gaagaccacttgcgaatttacaggggacatcctacgaactccggtgtcagaggacatgctgggtcgggttttcaatggctccggcaagcccattgacaaggggccagtggtcatggcgga

SEQ ID NO: 213753 - DNA, 120 bp, Artificial Sequence
  ENSG00000116039_4 (sequence is synthesized)
ggactttctggatatcaatggccagcccatcaacccgcactcccgcatctaccccgaggagatgattcagacgggcatttctcctattgacgtcatgaacagcattgcccgcggccagaa

SEQ ID NO: 213754 - DNA, 120 bp, Artificial Sequence
  ENSG00000116039_5 (sequence is synthesized)
gatccccatcttctcagcagccgggctcccccacaatgagattgccgctcagatctgccgccaggcggggctggtgaagaagtccaaggctgtgctggattaccatgacgacaacttcgc

SEQ ID NO: 213755 - DNA, 120 bp, Artificial Sequence
  ENSG00000116039_6 (sequence is synthesized)
catcgtctttgcagccatgggggtgaacatggagacagccagattcttcaagtctgactttgagcagaatggaaccatggggaacgtctgcctcttcctgaacttggccaatgaccccac

SEQ ID NO: 213756 - DNA, 120 bp, Artificial Sequence
  ENSG00000116039_7 (sequence is synthesized)
cagaggccttgcgggaggtctctgctgctagagaggaggtgcctgggcgccgagggtttcctggatatatgtacacagacctggccaccatctacgagcgggcgggccgcgtggagggtc

SEQ ID NO: 213757 - DNA, 120 bp, Artificial Sequence
  ENSG00000116039_8 (sequence is synthesized)
ggggaggatccatcacacagatccccatcctcaccatgcccaacgacgatatcacccaccctatcccagacttgacgggcttcatcacagagggacagatctacgtggacagacagcttc

SEQ ID NO: 213758 - DNA, 120 bp, Artificial Sequence
  ENSG00000116039_9 (sequence is synthesized)
acaacagacagatctacccccccatcaacgtgctcccttccctgtcgcggctgatgaagtcagccattggggaaggcatgacaagaaaggaccatggagatgtctccaaccagctgtacg

SEQ ID NO: 213759 - DNA, 120 bp, Artificial Sequence
  ENSG00000116039_10 (sequence is synthesized)
cctgctatgccatcgggaaggacgtgcaggccatgaaggcagtagttggggaggaggcgctcacctctgaggacctgctctacctggaattcctgcagaagtttgagaagaacttcatca

SEQ ID NO: 213760 - DNA, 120 bp, Artificial Sequence
  ENSG00000116039_11 (sequence is synthesized)
atcagggcccctacgagaaccgctcggtgttcgagtcgctggacctgggctggaagctgctgcgcatcttccccaaggagatgctgaagcgcattccgcaggccgtgatcgacgagttct

SEQ ID NO: 213761 - DNA, 120 bp, Artificial Sequence
  ENSG00000116039_12 (sequence is synthesized)
attcccgcgagggggcgctgcaggacctcgcgcctgacactgcgctctagccccgcgcgccgtggcaccccaacaccggcagggaacctaccctcggctcccgggtctcccctccctcgc

SEQ ID NO: 213762 - DNA, 120 bp, Artificial Sequence
  ENSG00000116039_13 (sequence is synthesized)
caccccaaccagcggcttctgcgccgccctccgccctccgctggctccgaggtggtgggggcgccgcacgctccatccctttccctcgctcgattccttttcccgcgctccatgcctccc

SEQ ID NO: 213763 - DNA, 120 bp, Artificial Sequence
  ENSG00000116039_14 (sequence is synthesized)
cctcgactcccggtgctgcggaagaactgaaggttgcgatgccttactctgacgggagcatctgtatttttatgttaaaagcccacaaaataaaaataaaaagtaactgagatgaattta

SEQ ID NO: 213764 - DNA, 120 bp, Artificial Sequence
  ENSG00000116039_15 (sequence is synthesized)
ttccctgatgcccaaactgccctcaggtgggcagaccccgtccccttccaagacctacagtaccagggctccagggcatcccagaactacagccatacgccagagctgggagaacaaccc

SEQ ID NO: 213765 - DNA, 120 bp, Artificial Sequence
  ENSG00000116039_16 (sequence is synthesized)
ggatgagaggcctctgtgtggtgggggcggactctgaggaggcctctgccctctgcctggccctcccccagcctcctgcaggtgtccgagcagcaggggccctgcgggcaggggcatgac

SEQ ID NO: 213766 - DNA, 120 bp, Artificial Sequence
  ENSG00000116039_17 (sequence is synthesized)
ccttacagcaatggtggctggccctgtcacagctaatgaccctgacggcccaggctgggaaggaggtggggtgtggagagaggaagggaaggcagaggatgcctctgtgtgtgtgagcag

SEQ ID NO: 213767 - DNA, 120 bp, Artificial Sequence
  ENSG00000116039_18 (sequence is synthesized)
agttactgaaatcgtaaagtaacttccacaaggtcaggcagctactaagcttcagagtttcagctgtaacctggtcttgcaactctgaagtgggtgcaactgcctcccaaacagaattca

SEQ ID NO: 213768 - DNA, 120 bp, Artificial Sequence
  ENSG00000116039_19 (sequence is synthesized)
aactttcacttcccagccccttgagttcatttccacaagtgtctggacactagaggggagagaacagtttgggactgggtcagggagggccggaggaggagaagggactttgcctccagt

SEQ ID NO: 213769 - DNA, 120 bp, Artificial Sequence
  ENSG00000116044_0 (sequence is synthesized)
acgcagccgccaccgccgccgccgccgccaccagagccgccctgtccgcgccgcgcctcggcagccggaacagggccgccgtcggggagccccaacacacggtccacagctcatcatgat

SEQ ID NO: 213770 - DNA, 120 bp, Artificial Sequence
  ENSG00000116044_1 (sequence is synthesized)
gggagccccaacacacggtccacagctcatcatgatggacttggagctgccgccgccgggactcccgtcccagcaggacatggatttgattgacatactttggaggcaagatatagatct

SEQ ID NO: 213771 - DNA, 120 bp, Artificial Sequence
  ENSG00000116044_2 (sequence is synthesized)
tggagtaagtcgagaagtatttgacttcagtcagcgacggaaagagtatgagctggaaaaacagaaaaaacttgaaaaggaaagacaagaacaactccaaaaggagcaagagaaagcctt

SEQ ID NO: 213772 - DNA, 120 bp, Artificial Sequence
  ENSG00000116044_3 (sequence is synthesized)
tttcgctcagttacaactagatgaagagacaggtgaatttctcccaattcagccagcccagcacatccagtcagaaaccagtggatctgccaactactcccaggttgcccacattcccaa

SEQ ID NO: 213773 - DNA, 120 bp, Artificial Sequence
  ENSG00000116044_4 (sequence is synthesized)
atcagatgctttgtactttgatgactgcatgcagcttttggcgcagacattcccgtttgtagatgacaatgaggtttcttcggctacgtttcagtcacttgttcctgatattcccggtca

SEQ ID NO: 213774 - DNA, 120 bp, Artificial Sequence
  ENSG00000116044_5 (sequence is synthesized)
catcgagagcccagtcttcattgctactaatcaggctcagtcacctgaaacttctgttgctcaggtagcccctgttgatttagacggtatgcaacaggacattgagcaagtttgggagga

SEQ ID NO: 213775 - DNA, 120 bp, Artificial Sequence
  ENSG00000116044_6 (sequence is synthesized)
gctattatccattcctgagttacagtgtcttaatattgaaaatgacaagctggttgagactaccatggttccaagtccagaagccaaactgacagaagttgacaattatcatttttactc

SEQ ID NO: 213776 - DNA, 120 bp, Artificial Sequence
  ENSG00000116044_7 (sequence is synthesized)
atctataccctcaatggaaaaagaagtaggtaactgtagtccacattttcttaatgcttttgaggattccttcagcagcatcctctccacagaagaccccaaccagttgacagtgaactc

SEQ ID NO: 213777 - DNA, 120 bp, Artificial Sequence
  ENSG00000116044_8 (sequence is synthesized)
attaaattcagatgccacagtcaacacagattttggtgatgaattttattctgctttcatagctgagcccagtatcagcaacagcatgccctcacctgctactttaagccattcactctc

SEQ ID NO: 213778 - DNA, 120 bp, Artificial Sequence
  ENSG00000116044_9 (sequence is synthesized)
tgaacttctaaatgggcccattgatgtttctgatctatcactttgcaaagctttcaaccaaaaccaccctgaaagcacagcagaattcaatgattctgactccggcatttcactaaacac

SEQ ID NO: 213779 - DNA, 120 bp, Artificial Sequence
  ENSG00000116044_10 (sequence is synthesized)
tatggagacacactacttggcctcagtgattctgaagtggaagagctagatagtgcccctggaagtgtcaaacagaatggtcctaaaacaccagtacattcttctggggatatggtacaa

SEQ ID NO: 213780 - DNA, 120 bp, Artificial Sequence
  ENSG00000116044_11 (sequence is synthesized)
cccttgtcaccatctcaggggcagagcactcacgtgcatgatgcccaatgtgagaacacaccagagaaagaattgcctgtaagtcctggtcatcggaaaaccccattcacaaaagacaaa

SEQ ID NO: 213781 - DNA, 120 bp, Artificial Sequence
  ENSG00000116044_12 (sequence is synthesized)
cattcaagccgcttggaggctcatctcacaagagatgaacttagggcaaaagctctccatatcccattccctgtagaaaaaatcattaacctccctgttgttgacttcaacgaaatgatg

SEQ ID NO: 213782 - DNA, 120 bp, Artificial Sequence
  ENSG00000116044_13 (sequence is synthesized)
tccaaagagcagttcaatgaagctcaacttgcattaattcgggatatacgtaggaggggtaagaataaagtggctgctcagaattgcagaaaaagaaaactggaaaatatagtagaacta

SEQ ID NO: 213783 - DNA, 120 bp, Artificial Sequence
  ENSG00000116044_14 (sequence is synthesized)
gagcaagatttagatcatttgaaagatgaaaaagaaaaattgctcaaagaaaaaggagaaaatgacaaaagccttcacctactgaaaaaacaactcagcaccttatatctcgaagttttc

SEQ ID NO: 213784 - DNA, 120 bp, Artificial Sequence
  ENSG00000116044_15 (sequence is synthesized)
agcatgctacgtgatgaagatggaaaaccttattctcctagtgaatactccctgcagcaaacaagagatggcaatgttttccttgttcccaaaagtaagaagccagatgttaagaaaaac

SEQ ID NO: 213785 - DNA, 120 bp, Artificial Sequence
  ENSG00000116044_16 (sequence is synthesized)
tagatttaggaggatttgaccttttctgagctagtttttttgtactattatactaaaagctcctactgtgatgtgaaatgctcatactttataagtaattctatgcaaaatcatagccaa

SEQ ID NO: 213786 - DNA, 120 bp, Artificial Sequence
  ENSG00000116044_17 (sequence is synthesized)
aactagtatagaaaataatacgaaactttaaaaagcattggagtgtcagtatgttgaatcagtagtttcactttaactgtaaacaatttcttaggacaccatttgggctagtttctgtgt

SEQ ID NO: 213787 - DNA, 120 bp, Artificial Sequence
  ENSG00000116044_18 (sequence is synthesized)
aagtgtaaatactacaaaaacttatttatactgttcttatgtcatttgttatattcatagatttatatgatgatatgacatctggctaaaaagaaattattgcaaaactaaccactatgt

SEQ ID NO: 213788 - DNA, 120 bp, Artificial Sequence
  ENSG00000116044_19 (sequence is synthesized)
acttttttataaatactgtatggacaaaaaatggcattttttatattaaattgtttagctctggcaaaaaaaaaaaattttaagagctggtactaataaaggattattatgactgttaaa

SEQ ID NO: 213789 - DNA, 120 bp, Artificial Sequence
  ENSG00000116044_20 (sequence is synthesized)
actttctcggccggggaggggttcgggctcgggcacccggagttggcccctcgtaacgccgcgggaaagtgcgggcgagggcagtggactctgaggccggagtcggcggcacccggggct

SEQ ID NO: 213790 - DNA, 120 bp, Artificial Sequence
  ENSG00000116044_21 (sequence is synthesized)
tctagttcggacgcggtgccccctggtggcgctcaccgcgcgcgtggccttggcttccgtgacagcgctcggttggccgtcacagcagccctcggttggccctttcctgctttatagcgt

SEQ ID NO: 213791 - DNA, 120 bp, Artificial Sequence
  ENSG00000116044_22 (sequence is synthesized)
gcaaacctcgccgcgccagggccaagggacaggttggagctgttgatctgttgcgcaattgctattttccccagagcggctttgtctttggatttagcgtttcagaattgcaattccaaa

SEQ ID NO: 213792 - DNA, 120 bp, Artificial Sequence
  ENSG00000116044_23 (sequence is synthesized)
cccggcagccaccgcggcgacttggcggcgggtgccatgcgtctggagcttcacattctctgccccccacccaccgcgccggcgctcccttgtcacgcctcgggaagcgcgcacctgcca

SEQ ID NO: 213793 - DNA, 120 bp, Artificial Sequence
  ENSG00000116044_24 (sequence is synthesized)
agcaggatgaataatctgatatcatgtgaaatgaggaaataagaagctttctgctgacttcattttgacccagggtccaaaaggtgatgtaatcctgtggcaagaagattcaaaactgtg

SEQ ID NO: 213794 - DNA, 120 bp, Artificial Sequence
  ENSG00000116044_25 (sequence is synthesized)
gactatcttgcaaaaaatacaagaagatattgaaagttttcatgagtgcctaccacctaatctcaaacactatcattcatatgtgcctcattgagcaaatctttaatgaggatctatatg

SEQ ID NO: 213795 - DNA, 120 bp, Artificial Sequence
  ENSG00000116044_26 (sequence is synthesized)
ccagaaacagaaagtacatgatggacttcattgaaggatggagatttggaagacatgaatggatgaagaaccaagtgcgtgagggcacctatcaggattattgctgaaatccttatggag

SEQ ID NO: 213796 - DNA, 120 bp, Artificial Sequence
  ENSG00000116044_27 (sequence is synthesized)
agtcccgtcaatgaatctccatttaaaagaataaaaacatttttaggaggaaattttttaaccaaggaaatactcttgtcaaggaaaccttagcctataaataactttacaattaagaaa

SEQ ID NO: 213797 - DNA, 120 bp, Artificial Sequence
  ENSG00000116044_28 (sequence is synthesized)
gacagcataaccatggaaacaaataacccatttgctgcaagtatctaagaggtttggtgagtaaagagccagctgggcaataaacgaagacttgttcagttaacaattttaataaatctg

SEQ ID NO: 213798 - DNA, 120 bp, Artificial Sequence
  ENSG00000116044_29 (sequence is synthesized)
ttttatctagtaccactgtgctagatattatataaactaaatcctaaagattgtacttacgcattttaaagtttactttcaaatgcttaagctgaaacagaccagcaaattataaatttg

SEQ ID NO: 213799 - DNA, 120 bp, Artificial Sequence
  ENSG00000116044_30 (sequence is synthesized)
agtcagtggggtaggaaaaaaagatttgttatttacaaacggggtcatgactggttagtaagtagagagacacagaactgcagctgattccattttgttttgtagtggtgccttagagct

SEQ ID NO: 213800 - DNA, 120 bp, Artificial Sequence
  ENSG00000116044_31 (sequence is synthesized)
tacaggtaactaaaatagaatgtaatactggagattttttttatattcagtgcctttagtcattctgattatttatataccacctatttataggaaggattggagggtgctattaactta

SEQ ID NO: 213801 - DNA, 120 bp, Artificial Sequence
  ENSG00000116044_32 (sequence is synthesized)
agtactcagttcttgggaaagttatggcaggtttaaggaaacactgagcaaggaattaaaatatctggatttgagttccagctttgcctttcttttacttaaccttgtcaaatctacttt

SEQ ID NO: 213802 - DNA, 120 bp, Artificial Sequence
  ENSG00000116044_33 (sequence is synthesized)
cagtacccaacctattgatcttaacagtgttattgtgaggattgggaagacttaagttacaccaaagagttttgtaaagtatagaaacatcctgtaaggatcaagtagcagcaacagaag

SEQ ID NO: 213803 - DNA, 120 bp, Artificial Sequence
  ENSG00000116044_34 (sequence is synthesized)
tagtagcaggagaaccaagtagcagggattactggcgttactgtgtgtggcaagcactgttttaagaacatatactgactgatttaattaacacaactatattaattagttaccattatc

SEQ ID NO: 213804 - DNA, 120 bp, Artificial Sequence
  ENSG00000116044_35 (sequence is synthesized)
cctgttttatctacgatgagcaactgaagctcacaaaggttaaataatttgcccagatcactcagaaaattggaggagctaagatctgaacccatgtggtctagttcaaattgtgcatca

SEQ ID NO: 213805 - DNA, 120 bp, Artificial Sequence
  ENSG00000116044_36 (sequence is synthesized)
acttctgttgctcaggtagcccctgttgatttagacggtatgcaacaggacattgagcaagtttgggaggagctattatccattcctgagttacagtggagacagggtttcaccatgttg

SEQ ID NO: 213806 - DNA, 120 bp, Artificial Sequence
  ENSG00000116044_37 (sequence is synthesized)
tgtgaagatttggggtcctgaatatttttcacgtgctatcaaggaacttccttcctctgatggtgtggtgatggggaatctcgggagaagacatcacttttccaaactcagaacataatc

SEQ ID NO: 213807 - DNA, 120 bp, Artificial Sequence
  ENSG00000116044_38 (sequence is synthesized)
ccaggtcttgaacaaactgtctattcttagaccaaattgtgagtgcagagatggtggcaagaatctcagcagcagctatctggagcacctaacattgactgatatttgaagggggaagag

SEQ ID NO: 213808 - DNA, 120 bp, Artificial Sequence
  ENSG00000116044_39 (sequence is synthesized)
atactgaatgtccatggagagtttaacataaggaagaagaggcctgtctcccagctgaaactggtgcagcagatcatgcaaagtaaaacctcagcagctgtgatgaagtagagcagaggg

SEQ ID NO: 213809 - DNA, 120 bp, Artificial Sequence
  ENSG00000116044_40 (sequence is synthesized)
cctgggtgtctgtcagctccaagcggaagatttccccagctttctagatttctgacttcatatctgtgggatccacacaatggggaggtactggccttggaatccatggttccccagcta

SEQ ID NO: 213810 - DNA, 120 bp, Artificial Sequence
  ENSG00000116044_41 (sequence is synthesized)
tcattttactttagaattacagtgttctctgttagtgtcaagggaatgaacctgacgagaaaagaccaaacataggactgttacagggaagaaaaatatgaaaagacctaaagatgcacg

SEQ ID NO: 213811 - DNA, 120 bp, Artificial Sequence
  ENSG00000116062_0 (sequence is synthesized)
ggcgaggcgcctgttgattggccactggggcccgggttcctccggcggagcgcgcctccccccagatttcccgccagcaggagccgcgcggtagatgcggtgcttttaggagctccgtcc

SEQ ID NO: 213812 - DNA, 120 bp, Artificial Sequence
  ENSG00000116062_1 (sequence is synthesized)
gacagaacggttgggccttgccggctgtcggtatgtcgcgacagagcaccctgtacagcttcttccccaagtctccggcgctgagtgatgccaacaaggcctcggccagggcctcacgcg

SEQ ID NO: 213813 - DNA, 120 bp, Artificial Sequence
  ENSG00000116062_2 (sequence is synthesized)
ccgccgctgcccccggggcctctccttccccaggcggggatgcggcctggagcgaggctgggcctgggcccaggcccttggcgcgctccgcgtcaccgcccaaggcgaagaacctcaacg

SEQ ID NO: 213814 - DNA, 120 bp, Artificial Sequence
  ENSG00000116062_3 (sequence is synthesized)
agaacctcaacggagggctgcggagatcggtagcgcctgctgcccccaccagttgtgacttctcaccaggagatttggtttgggccaagatggagggttacccctggtggccttgtctgg

SEQ ID NO: 213815 - DNA, 120 bp, Artificial Sequence
  ENSG00000116062_4 (sequence is synthesized)
tttacaaccacccctttgatggaacattcatccgcgagaaagggaaatcagtccgtgttcatgtacagttttttgatgacagcccaacaaggggctgggttagcaaaaggcttttaaagc

SEQ ID NO: 213816 - DNA, 120 bp, Artificial Sequence
  ENSG00000116062_5 (sequence is synthesized)
catatacaggttcaaaatcaaaggaagcccagaagggaggtcatttttacagtgcaaagcctgaaatactgagagcaatgcaacgtgcagatgaagccttaaataaagacaagattaaga

SEQ ID NO: 213817 - DNA, 120 bp, Artificial Sequence
  ENSG00000116062_6 (sequence is synthesized)
ggcttgaattggcagtttgtgatgagccctcagagccagaagaggaagaagagatggaggtaggcacaacttacgtaacagataagagtgaagaagataatgaaattgagagtgaagagg

SEQ ID NO: 213818 - DNA, 120 bp, Artificial Sequence
  ENSG00000116062_7 (sequence is synthesized)
aagtacagcctaagacacaaggatctaggcgaagtagccgccaaataaaaaaacgaagggtcatatcagattctgagagtgacattggtggctctgatgtggaatttaagccagacacta

SEQ ID NO: 213819 - DNA, 120 bp, Artificial Sequence
  ENSG00000116062_8 (sequence is synthesized)
aggaggaaggaagcagtgatgaaataagcagtggagtgggggatagtgagagtgaaggcctgaacagccctgtcaaagttgctcgaaagcggaagagaatggtgactggaaatggctctc

SEQ ID NO: 213820 - DNA, 120 bp, Artificial Sequence
  ENSG00000116062_9 (sequence is synthesized)
ttaaaaggaaaagctctaggaaggaaacgccctcagccaccaaacaagcaactagcatttcatcagaaaccaagaatactttgagagctttctctgcccctcaaaattctgaatcccaag

SEQ ID NO: 213821 - DNA, 120 bp, Artificial Sequence
  ENSG00000116062_10 (sequence is synthesized)
cccacgttagtggaggtggtgatgacagtagtcgccctactgtttggtatcatgaaactttagaatggcttaaggaggaaaagagaagagatgagcacaggaggaggcctgatcaccccg

SEQ ID NO: 213822 - DNA, 120 bp, Artificial Sequence
  ENSG00000116062_11 (sequence is synthesized)
attttgatgcatctacactctatgtgcctgaggatttcctcaattcttgtactcctgggatgaggaagtggtggcagattaagtctcagaactttgatcttgtcatctgttacaaggtgg

SEQ ID NO: 213823 - DNA, 120 bp, Artificial Sequence
  ENSG00000116062_12 (sequence is synthesized)
ggaaattttatgagctgtaccacatggatgctcttattggagtcagtgaactggggctggtattcatgaaaggcaactgggcccattctggctttcctgaaattgcatttggccgttatt

SEQ ID NO: 213824 - DNA, 120 bp, Artificial Sequence
  ENSG00000116062_13 (sequence is synthesized)
cagattccctggtgcagaagggctataaagtagcacgagtggaacagactgagactccagaaatgatggaggcacgatgtagaaagatggcacatatatccaagtatgatagagtggtga

SEQ ID NO: 213825 - DNA, 120 bp, Artificial Sequence
  ENSG00000116062_14 (sequence is synthesized)
ggagggagatctgtaggatcattaccaagggtacacagacttacagtgtgctggaaggtgatccctctgagaactacagtaagtatcttcttagcctcaaagaaaaagaggaagattctt

SEQ ID NO: 213826 - DNA, 120 bp, Artificial Sequence
  ENSG00000116062_15 (sequence is synthesized)
ctggccatactcgtgcatatggtgtgtgctttgttgatacttcactgggaaagtttttcataggtcagttttcagatgatcgccattgttcgagatttaggactctagtggcacactatc

SEQ ID NO: 213827 - DNA, 120 bp, Artificial Sequence
  ENSG00000116062_16 (sequence is synthesized)
ccccagtacaagttttatttgaaaaaggaaatctctcaaaggaaactaaaacaattctaaagagttcattgtcctgttctcttcaggaaggtctgatacccggctcccagttttgggatg

SEQ ID NO: 213828 - DNA, 120 bp, Artificial Sequence
  ENSG00000116062_17 (sequence is synthesized)
catccaaaactttgagaactctccttgaggaagaatattttagggaaaagctaagtgatggcattggggtgatgttaccccaggtgcttaaaggtatgacttcagagtctgattccattg

SEQ ID NO: 213829 - DNA, 120 bp, Artificial Sequence
  ENSG00000116062_18 (sequence is synthesized)
ggttgacaccaggagagaaaagtgaattggccctctctgctctaggtggttgtgtcttctacctcaaaaaatgccttattgatcaggagcttttatcaatggctaattttgaagaatata

SEQ ID NO: 213830 - DNA, 120 bp, Artificial Sequence
  ENSG00000116062_19 (sequence is synthesized)
ttcccttggattctgacacagtcagcactacaagatctggtgctatcttcaccaaagcctatcaacgaatggtgctagatgcagtgacattaaacaacttggagatttttctgaatggaa

SEQ ID NO: 213831 - DNA, 120 bp, Artificial Sequence
  ENSG00000116062_20 (sequence is synthesized)
caaatggttctactgaaggaaccctactagagagggttgatacttgccatactccttttggtaagcggctcctaaagcaatggctttgtgccccactctgtaaccattatgctattaatg

SEQ ID NO: 213832 - DNA, 120 bp, Artificial Sequence
  ENSG00000116062_21 (sequence is synthesized)
atcgtctagatgccatagaagacctcatggttgtgcctgacaaaatctccgaagttgtagagcttctaaagaagcttccagatcttgagaggctactcagtaaaattcataatgttgggt

SEQ ID NO: 213833 - DNA, 120 bp, Artificial Sequence
  ENSG00000116062_22 (sequence is synthesized)
ctcccctgaagagtcagaaccacccagacagcagggctataatgtatgaagaaactacatacagcaagaagaagattattgattttctttctgctctggaaggattcaaagtaatgtgta

SEQ ID NO: 213834 - DNA, 120 bp, Artificial Sequence
  ENSG00000116062_23 (sequence is synthesized)
aaattatagggatcatggaagaagttgctgatggttttaagtctaaaatccttaagcaggtcatctctctgcagacaaaaaatcctgaaggtcgttttcctgatttgactgtagaattga

SEQ ID NO: 213835 - DNA, 120 bp, Artificial Sequence
  ENSG00000116062_24 (sequence is synthesized)
accgatgggatacagcctttgaccatgaaaaggctcgaaagactggacttattactcccaaagcaggctttgactctgattatgaccaagctcttgctgacataagagaaaatgaacaga

SEQ ID NO: 213836 - DNA, 120 bp, Artificial Sequence
  ENSG00000116062_25 (sequence is synthesized)
gcctcctggaatacctagagaaacagcgcaacagaattggctgtaggaccatagtctattgggggattggtaggaaccgttaccagctggaaattcctgagaatttcaccactcgcaatt

SEQ ID NO: 213837 - DNA, 120 bp, Artificial Sequence
  ENSG00000116062_26 (sequence is synthesized)
tgccagaagaatacgagttgaaatctaccaagaagggctgtaaacgatactggaccaaaactattgaaaagaagttggctaatctcataaatgctgaagaacggagggatgtatcattga

SEQ ID NO: 213838 - DNA, 120 bp, Artificial Sequence
  ENSG00000116062_27 (sequence is synthesized)
aggactgcatgcggcgactgttctataactttgataaaaattacaaggactggcagtctgctgtagagtgtatcgcagtgttggatgttttactgtgcctggctaactatagtcgagggg

SEQ ID NO: 213839 - DNA, 120 bp, Artificial Sequence
  ENSG00000116062_28 (sequence is synthesized)
gtgatggtcctatgtgtcgcccagtaattctgttgccggaagataccccccccttcttagagcttaaaggatcacgccatccttgcattacgaagactttttttggagatgattttattc

SEQ ID NO: 213840 - DNA, 120 bp, Artificial Sequence
  ENSG00000116062_29 (sequence is synthesized)
ctaatgacattctaataggctgtgaggaagaggagcaggaaaatggcaaagcctattgtgtgcttgttactggaccaaatatggggggcaagtctacgcttatgagacaggctggcttat

SEQ ID NO: 213841 - DNA, 120 bp, Artificial Sequence
  ENSG00000116062_30 (sequence is synthesized)
tagctgtaatggcccagatgggttgttacgtccctgctgaagtgtgcaggctcacaccaattgatagagtgtttactagacttggtgcctcagacagaataatgtcaggtgaaagtacat

SEQ ID NO: 213842 - DNA, 120 bp, Artificial Sequence
  ENSG00000116062_31 (sequence is synthesized)
tgcatgcaacagcacattctctggtgcttgtggatgaattaggaagaggtactgcaacatttgatgggacggcaatagcaaatgcagttgttaaagaacttgctgagactataaaatgtc

SEQ ID NO: 213843 - DNA, 120 bp, Artificial Sequence
  ENSG00000116062_32 (sequence is synthesized)
gtacattattttcaactcactaccattcattagtagaagattattctcaaaatgttgctgtgcgcctaggacatatggcatgcatggtagaaaatgaatgtgaagaccccagccaggaga

SEQ ID NO: 213844 - DNA, 120 bp, Artificial Sequence
  ENSG00000116062_33 (sequence is synthesized)
ctattacgttcctctataaattcattaagggagcttgtcctaaaagctatggctttaatgcagcaaggcttgctaatctcccagaggaagttattcaaaagggacatagaaaagcaagag

SEQ ID NO: 213845 - DNA, 120 bp, Artificial Sequence
  ENSG00000116062_34 (sequence is synthesized)
aatttgagaagatgaatcagtcactacgattatttcgggaagtttgcctggctagtgaaaggtcaactgtagatgctgaagctgtccataaattgctgactttgattaaggaattataga

SEQ ID NO: 213846 - DNA, 120 bp, Artificial Sequence
  ENSG00000116062_35 (sequence is synthesized)
ctgactacattggaagctttgagttgacttctgacaaaggtggtaaattcagacaacattatgatctaataaactttattttttaaaaatgaccatttttccattttctttctaggaaat

SEQ ID NO: 213847 - DNA, 120 bp, Artificial Sequence
  ENSG00000116062_36 (sequence is synthesized)
taaacccttttaattcttatctaccttctacataatggttattgaatactccacaatatattaagtctagatgttatggtacatgcatacactttcaggctgttttatacccactgtcac

SEQ ID NO: 213848 - DNA, 120 bp, Artificial Sequence
  ENSG00000116062_37 (sequence is synthesized)
caatacacataaatgggggaggaaaagctatgaaactgtatagggctgtatatatacttgtctcagcttaatgcaggaaattggtttaatttccagcagttttgtctaaactgttcaaaa

SEQ ID NO: 213849 - DNA, 120 bp, Artificial Sequence
  ENSG00000116062_38 (sequence is synthesized)
aaaaactatgaacagagttcaaatacaggactgtttgttttgaagagactttctaaagtgtacttaaaacatagtagttttttacctttcacaaaactgagttacaagaatacttttgtt

SEQ ID NO: 213850 - DNA, 120 bp, Artificial Sequence
  ENSG00000116062_39 (sequence is synthesized)
ttacagtgcatcccttcctaggaagtctcattaaaacactcactttttctaggggtgattttgaatgctgcacagggaagggaaggaaataatagtcttaacttttcttaaaggatacca

SEQ ID NO: 213851 - DNA, 120 bp, Artificial Sequence
  ENSG00000116062_40 (sequence is synthesized)
gaaacattgctggatataatttaagattagtgttttctctttcatagaaagaacgtacatactgggacatgagtacagttacagcaagtctaggtgtgctaacaaaacagggcacattca

SEQ ID NO: 213852 - DNA, 120 bp, Artificial Sequence
  ENSG00000116062_41 (sequence is synthesized)
agtacagtaagattttgcttgaaattaaaaacaaactacatgagattaaagcattaaaatcatatttctcaatctgaatacatgttaaaaaaaaaaaatcaaaaggaacgcagaagtgct

SEQ ID NO: 213853 - DNA, 120 bp, Artificial Sequence
  ENSG00000116062_42 (sequence is synthesized)
agctcacatttttaccatattacaaaagcaattggtacccatgtccataaaggcagcaacaaagctgcttgtctattgaagattactactgcaaattggactgcattcaatgctagttgt

SEQ ID NO: 213854 - DNA, 120 bp, Artificial Sequence
  ENSG00000116062_43 (sequence is synthesized)
aaaaacaccagcttttcagaagttggtatctgtacaaaattgcagcttattttcttcacttctgtcccttcaagtctttacacagtaatgctaaaacacccagctttgagatcctgagtc

SEQ ID NO: 213855 - DNA, 120 bp, Artificial Sequence
  ENSG00000116062_44 (sequence is synthesized)
aatatattgccactttctttttggtagcttgagcttcatagtgtcaactgaccttgtgtatccatttttaatacagtctcttcctgtagcatgggcaaatattttaaatcttcttccaaa

SEQ ID NO: 213856 - DNA, 120 bp, Artificial Sequence
  ENSG00000116062_45 (sequence is synthesized)
aaagtgttttaagttatgatgttacaatggcaggactttttctttagggaaggaattcagttgtgctgcaatgtattagattctataggtggagcagagtcatatagtgtatctgtatca

SEQ ID NO: 213857 - DNA, 120 bp, Artificial Sequence
  ENSG00000116062_46 (sequence is synthesized)
tgtgtaggctcaccagctaatgtacaaggattagacagtgttccagcaccacagtcacagaaaaacctaaagcaaaatgaaacccaaatattagaaaagtgagggggaaagtaattgggt

SEQ ID NO: 213858 - DNA, 120 bp, Artificial Sequence
  ENSG00000116062_47 (sequence is synthesized)
aatatatcaagcaagtgtgctacatacctatcatgtctaataaactctacatcatgtccctgatggcacttcttaatgcagttcacacatatggcatttcgatctgtggtgttacaagta

SEQ ID NO: 213859 - DNA, 120 bp, Artificial Sequence
  ENSG00000116062_48 (sequence is synthesized)
tgacatctaaaaagcaaaagcttaaattacttttctcaaacatgtcattaatgcaaaacattccattctgtttatatattactatgacctttggctttaagaggaccaaaacaaaattct

SEQ ID NO: 213860 - DNA, 120 bp, Artificial Sequence
  ENSG00000116062_49 (sequence is synthesized)
ttgtggctccagcccagattaattctgaaaaggaactttaatggagtaagtgattttcctgtcatctgtgtcttcggagggaagagaaatgatttgtaaattgtataaaggcagttcttt

SEQ ID NO: 213861 - DNA, 120 bp, Artificial Sequence
  ENSG00000116062_50 (sequence is synthesized)
ccactttaaaagcctctcaaatgtttctgggctgaaaacaatttttggaggcgtgaagagtcaaaactgtcacagtgactgggatatatcaaacacttaaccccgacatctttaccttga

SEQ ID NO: 213862 - DNA, 120 bp, Artificial Sequence
  ENSG00000116062_51 (sequence is synthesized)
aatttctaggaaaacattacacaacatgagttacatgaatgacatcagttactgtagcattaggtttttccatagttatggtctttgttttgttttgtagagacagggtctccctatgtt

SEQ ID NO: 213863 - DNA, 70 bp, Artificial Sequence
  ENSG00000116062_52 (sequence is synthesized)
tacccacagttacagtcttaaacacgatcttcaagtagattgatgataaaattttcagttagttatagtc

SEQ ID NO: 213864 - DNA, 120 bp, Artificial Sequence
  ENSG00000116062_53 (sequence is synthesized)
tcaagtagattgatgataaaattttcagttagttatagtctcaacaccggcaaatagccaaaaatgctaggcattgctaatttaaaaaggaaatcagtcttcctcttttcaggactcaaa

SEQ ID NO: 213865 - DNA, 120 bp, Artificial Sequence
  ENSG00000116062_54 (sequence is synthesized)
tatatttctaagttacctgtagaaatcatgcatgggatagctggtataacttgatattttatataaacattggcctctactaacagccttttctatggcatcttgattgttcattatttt

SEQ ID NO: 213866 - DNA, 120 bp, Artificial Sequence
  ENSG00000116062_55 (sequence is synthesized)
gttatctgtaataaaagaaagaataagtaaaaattcagaggaatgttaatattttaaaaaccaaagattataggattattctaacagaagagccactatttttaagagctttaaatgaag

SEQ ID NO: 213867 - DNA, 120 bp, Artificial Sequence
  ENSG00000116062_56 (sequence is synthesized)
ctaaccaatgaagtaattgtaagaaatcagctaagaatagaattttccttgtataagatactccaaccatttagaaccaaagctctgtttctttcaaaatctatcttaaactgttgctaa

SEQ ID NO: 213868 - DNA, 120 bp, Artificial Sequence
  ENSG00000116062_57 (sequence is synthesized)
cttggagagtgacataaggaatcaagttataaaacggcttctgattatctttcatggcatattgcatatatttataggtatagcagactccaacatacctttcattgtcacattaacacc

SEQ ID NO: 213869 - DNA, 120 bp, Artificial Sequence
  ENSG00000116062_58 (sequence is synthesized)
agatgctaaaaataagcctccaaaccggttgttaaaaatctgattgccttctagtgttgcagttgcgtgatttgtaatttcaatacctgaagtaaaatttacaaacaagtagatacatca

SEQ ID NO: 213870 - DNA, 120 bp, Artificial Sequence
  ENSG00000116062_59 (sequence is synthesized)
ctttatactgcttcttaaaaacctgaaattagcaagcaaatgtaaactgcttcttttatagaagtacattaaccctcttaatgtctactgaataaaatgtagatacctatttcaaccacc

SEQ ID NO: 213871 - DNA, 120 bp, Artificial Sequence
  ENSG00000116062_60 (sequence is synthesized)
aacagtaacattcacttatcaatgactatggtcaaaactgcaattaactttcgcaccaacctaactgtcttaaagtttaaatacatgatacttggatttcatttgcatccattttaacat

SEQ ID NO: 213872 - DNA, 120 bp, Artificial Sequence
  ENSG00000116062_61 (sequence is synthesized)
ctctttttctgttgcagatttaaactggtaaattcatctgaggaattgaatctatctgtattcctagtggtaatacaagcctgcatttattctatcccaataaatgtttcataatcacga

SEQ ID NO: 213873 - DNA, 69 bp, Artificial Sequence
  ENSG00000116062_62 (sequence is synthesized)
cccgcctcagcatgatttttttaggccgttcttttgtttgaaagaattcaactaaggatccactctgcc

SEQ ID NO: 213874 - DNA, 120 bp, Artificial Sequence
  ENSG00000116062_63 (sequence is synthesized)
tcttttgtttgaaagaattcaactaaggatccactctgcctgcctgaccggtttcttcctttcttctctctcatcgggtcccgagttcccatgactgcagcttccagaagagcagagctt

SEQ ID NO: 213875 - DNA, 120 bp, Artificial Sequence
  ENSG00000116062_64 (sequence is synthesized)
tggtatcctactcacagcgccaaaactgcaggggccaaggaaagatacaaaattcttgtgtgcagcctcttttggactccagctcttgttctctcgctgaatcccaccgccaccccttca

SEQ ID NO: 213876 - DNA, 120 bp, Artificial Sequence
  ENSG00000116062_65 (sequence is synthesized)
agtcatcggctgtgattcacctgtgggtttctgaaggctagaagcttccacaatgagccaggaaacaagttctgattggctgggaacagacctctgctccaagattcagggctggcagta

SEQ ID NO: 213877 - DNA, 90 bp, Artificial Sequence
  ENSG00000116062_66 (sequence is synthesized)
tgggaacagacctctgctccaagattcagggctggcagtattccttctgttctggtggctcgatcttcattgctttcctctggacttaaa

SEQ ID NO: 213878 - DNA, 120 bp, Artificial Sequence
  ENSG00000116062_67 (sequence is synthesized)
gagtccggtggtgtggggtgcgaaaggaggttcctcggccggcgcggagatagtgagttggggctccagtagtcgatcgaggtagacacttagaggtagttaagagccgcggtcgccgag

SEQ ID NO: 213879 - DNA, 120 bp, Artificial Sequence
  ENSG00000116062_68 (sequence is synthesized)
gtgcacggcctggccctgggctcggaggaggcggggccgcagagttggcttgaatgagtgcaggggtcgagtctggagcatttgggggtgtagcttgtaaacagggtcggaggagagagg

SEQ ID NO: 213880 - DNA, 120 bp, Artificial Sequence
  ENSG00000116062_69 (sequence is synthesized)
tagctgggattacagaaactcctcctacccatggaatctgccagcagttggattcttgactatctttaggacttttcctaatctcaccttctccatctgtgaaatggaaataatcaaagg

SEQ ID NO: 213881 - DNA, 81 bp, Artificial Sequence
  ENSG00000116062_70 (sequence is synthesized)
tctccatgttggtcaggctagtctcgaagtgctgggattacaggcgctagccaccgcgcccggtctgtttagggcttttta

SEQ ID NO: 213882 - DNA, 120 bp, Artificial Sequence
  ENSG00000116062_71 (sequence is synthesized)
aggcgctagccaccgcgcccggtctgtttagggctttttatccgggcagctggcgacattttgaaaagcttgcttttgctgtttgccagatacatatatatgtattttgagacagagtct

SEQ ID NO: 213883 - DNA, 120 bp, Artificial Sequence
  ENSG00000116062_72 (sequence is synthesized)
catatatatgtattttgagacagagtcttgctcttttgtccaggctagagtgcagtggcgcgttcttggctcaccacaacctctgtctctggatcaagagattatcctgcctcagcctcc

SEQ ID NO: 213884 - DNA, 68 bp, Artificial Sequence
  ENSG00000116062_73 (sequence is synthesized)
cggcagtgggcatgtcttagggaagcccctctgtatgagttcccttatctgtgcctgcagcatgcagc

SEQ ID NO: 213885 - DNA, 120 bp, Artificial Sequence
  ENSG00000116062_74 (sequence is synthesized)
ctgctctgcagtgaaatgttccaaataattaatatttctgcaggaattaccttgtaaaagatatgtgcttttaagtatttggttattgtgcaaatgtttttgactaccttttgtggccaa

SEQ ID NO: 213886 - DNA, 120 bp, Artificial Sequence
  ENSG00000116062_75 (sequence is synthesized)
ttttctccttcagcgggctcatgtataattttagataaaagtacaaggaaattatgattccataatcataagtctactttcagcaatacacgtatcttcagagaatctcagcctccctgc

SEQ ID NO: 213887 - DNA, 120 bp, Artificial Sequence
  ENSG00000116062_76 (sequence is synthesized)
gacgggtgaccatctcaggccggagatatgcccaaccaactggaaaagcagagacagccatggacagatctgctgacgctaaagtttatagacagctgaggtgcaacccatataatcacc

SEQ ID NO: 213888 - DNA, 120 bp, Artificial Sequence
  ENSG00000116062_77 (sequence is synthesized)
cagatgttattaggccatgatcattctgtagtaagctacctcccttctgtgtttcctctcacctgacagcctattgtgggcactttcaaggccccactgtgtccaaatcacaccaccacc

SEQ ID NO: 213889 - DNA, 120 bp, Artificial Sequence
  ENSG00000116062_78 (sequence is synthesized)
aaagctcacagaagcacgctggtagatttctcctctttggtggtttcccatgaccagccaagggaaatacccaacaatcattctcagtgtgcacagatttaccttcagcttttttggtta

SEQ ID NO: 213890 - DNA, 120 bp, Artificial Sequence
  ENSG00000116062_79 (sequence is synthesized)
tattgtcattattattttctttgtccagtgggagagttaaggggcctgctatggactgaactctgtccccctcaaattcatatgttgaagccccaaccttcaacatgactatatttgaaa

SEQ ID NO: 213891 - DNA, 120 bp, Artificial Sequence
  ENSG00000116062_80 (sequence is synthesized)
acagtccctttatggaggtaaagttaaatgagatcataagagtggggcccttgttcgatagaactggtgtccttacaagaagaggaagaggctgagtgcagtggctcaagcctataatcc

SEQ ID NO: 213892 - DNA, 90 bp, Artificial Sequence
  ENSG00000116062_81 (sequence is synthesized)
acaagaccctatctctacagaaaaaaattaaaaattaaccaggtgtgatggcatgtgcttgtggtaccagctactcaggaggctgagatg

SEQ ID NO: 213893 - DNA, 120 bp, Artificial Sequence
  ENSG00000116062_82 (sequence is synthesized)
gatggcatgtgcttgtggtaccagctactcaggaggctgagatgggtggatggcttgagcctgggaggtcaaggttgcagtgagctgtgatagcactgcactccagcctgggtaacagag

SEQ ID NO: 213894 - DNA, 120 bp, Artificial Sequence
  ENSG00000116062_83 (sequence is synthesized)
accctgtccctccccacaccaccccaactccccccaaaaaggaagagataccagagtgcactctctcgatctctctctctctcttccacgtgaggacacagaagaaaaaaaaaaaagccc

SEQ ID NO: 213895 - DNA, 120 bp, Artificial Sequence
  ENSG00000116062_84 (sequence is synthesized)
atctgcaaggcaggaagacggccttcaacagcaacgaaatcagtcagcaccttggtttggactgcttggtctccagaacgagggaaaataaattaaaataaatgtctgtagaattaagcc

SEQ ID NO: 213896 - DNA, 120 bp, Artificial Sequence
  ENSG00000116062_85 (sequence is synthesized)
gtatattatccctaaaaataagtaataaggtatatatggtacatattttgacatgcatatacatatttgcatcctgactaggctgcccacagcaatttaagttacttgaaactcgctttt

SEQ ID NO: 213897 - DNA, 120 bp, Artificial Sequence
  ENSG00000116095_0 (sequence is synthesized)
atccaggaagtgaaatcgacgtcggggtcaatgaaaacaaacggggagcccagggggaaggaaggcaggcgaggaagaggcagcgccggggcgccggagggagcagccgggctgcggaag

SEQ ID NO: 213898 - DNA, 120 bp, Artificial Sequence
  ENSG00000116095_1 (sequence is synthesized)
cgcgagcaggaggccggtcgcgggcgcatttttgccgttgtcgcggccgccgccgccgaggcttacccgggaatgtctgggcccgcgcctcgcggcccccaagctccacgctgcgcccgc

SEQ ID NO: 213899 - DNA, 80 bp, Artificial Sequence
  ENSG00000116095_2 (sequence is synthesized)
tgtcccggcctctaaaggccgccacgtccctgcggcgcgcgcaggcagaaagcggcttcgtgccggcggagggggcccgg

SEQ ID NO: 213900 - DNA, 120 bp, Artificial Sequence
  ENSG00000116095_3 (sequence is synthesized)
atcaccgcggccggcgccgggccgggaggatgcgcggtgtggggctctgaagcatggagggggtgttgtacaagtggaccaactatctcacaggctggcagcctcgttggtttgttttag

SEQ ID NO: 213901 - DNA, 120 bp, Artificial Sequence
  ENSG00000116095_4 (sequence is synthesized)
ataatggaatcttatcctactatgattcacaagatgatgtttgcaaagggagcaaaggaagcataaagatggcagtttgtgaaattaaagttcattcagcagacaacacaagaatggaat

SEQ ID NO: 213902 - DNA, 120 bp, Artificial Sequence
  ENSG00000116095_5 (sequence is synthesized)
taatcattcctggagagcagcatttctacatgaaggcagtgaatgcagctgaaagacagaggtggctggtcgctctggggagctccaaagcatgtttgactgatacaaggactaaaaaag

SEQ ID NO: 213903 - DNA, 120 bp, Artificial Sequence
  ENSG00000116095_6 (sequence is synthesized)
aaaaagaaataagtgaaaccagtgaatcgctgaaaaccaaaatgtctgaacttcgcctctactgtgacctcttaatgcagcaagttcatacaatacaggaatttgttcaccatgatgaga

SEQ ID NO: 213904 - DNA, 120 bp, Artificial Sequence
  ENSG00000116095_7 (sequence is synthesized)
atcattcatctcctagtgcagagaacatgaatgaagcctcttctctgcttagtgccacgtgtaacacattcatcacaacgcttgaggaatgtgtgaagatagccaatgccaagtttaaac

SEQ ID NO: 213905 - DNA, 120 bp, Artificial Sequence
  ENSG00000116095_8 (sequence is synthesized)
ctgagatgtttcaactgcaccatccggatcccttagtttctcctgtgtcaccttctcctgttcaaatgatgaagcgttctgtcagccaccctggttcttgcagttcagagaggagtagcc

SEQ ID NO: 213906 - DNA, 120 bp, Artificial Sequence
  ENSG00000116095_9 (sequence is synthesized)
actctataaaagaaccagtatctacacttcaccgactctcccagcgacgccgaagaacctactcagatacagattcttgtagtgatattcctcttgaagacccagatagacctgttcact

SEQ ID NO: 213907 - DNA, 120 bp, Artificial Sequence
  ENSG00000116095_10 (sequence is synthesized)
gttcaaaaaatacacttaatggagatttggcatcagcaaccattcctgaagaaagcagacttatggccaaaaaacaatctgaatcagaagatactcttccatccttctcttcctgaagaa

SEQ ID NO: 213908 - DNA, 120 bp, Artificial Sequence
  ENSG00000116095_11 (sequence is synthesized)
actgaagtgtccaacttcctctaagtattgctatgcaaaagctgctgtaattaaactattgttatagggagtagttttttcccttaggactctgcactttatagaatgttgtaaaacaga

SEQ ID NO: 213909 - DNA, 120 bp, Artificial Sequence
  ENSG00000116095_12 (sequence is synthesized)
caaacaagaaaacaaaccacatacttttgaagtgtattttatctttatatagtttgtttgcaagagtattttcctaataacttcacagtatgaatgtgcatcttttttttttgaacaaat

SEQ ID NO: 213910 - DNA, 120 bp, Artificial Sequence
  ENSG00000116095_13 (sequence is synthesized)
gatggtgtaacattttgacatccataaggacaaatgtagatatttttcttaaaaactctgaggggactgacagcatggtcagggtgtattgtagcttataaacatgaaatcttataaggt

SEQ ID NO: 213911 - DNA, 120 bp, Artificial Sequence
  ENSG00000116095_14 (sequence is synthesized)
ttcagtttgacagaagtgtgatatatgtaacttgtgccatggaccaaatggtcactttaccacagctaaaaatgagttacgatagcagcttgatggtgattgtattgtattcctttaatc

SEQ ID NO: 213912 - DNA, 120 bp, Artificial Sequence
  ENSG00000116095_15 (sequence is synthesized)
aaaaaggaaacacaatattctaagtatctttagcccaaataccatgacatattgagcatctttaaataaccagactgtattgtccttcatatgtgaagttgacactactgatttgtcaat

SEQ ID NO: 213913 - DNA, 120 bp, Artificial Sequence
  ENSG00000116095_16 (sequence is synthesized)
accaaattttgggttaaagtgtttaatttttatgtatttattttcttgttgcctcaaaagatgattgcattctaacttttgtgacctaccaaatttaagatgtgtatacgttgttcttta

SEQ ID NO: 213914 - DNA, 120 bp, Artificial Sequence
  ENSG00000116095_17 (sequence is synthesized)
cgttgttctagaaaagagattttaatgctgtagtgactttgctcacttacactagagaaataaacaactttcaatggaagagaattttagtgctttttttttcctaaaatagatattaag

SEQ ID NO: 213915 - DNA, 120 bp, Artificial Sequence
  ENSG00000116095_18 (sequence is synthesized)
ctgctgttgtaaagtattgtttgcagctctttccaatatctagagacatttttatttatgaatatttatacaaaaaggaattctgtcaagatgactgctctatatcacttgagaatggca

SEQ ID NO: 213916 - DNA, 120 bp, Artificial Sequence
  ENSG00000116095_19 (sequence is synthesized)
ttatttaattaaagaacaaatagcattttttggtagtgcctgtccatacctattgtcattgtttgccttgtaatctgtttttttgaattcattttgggctgatagttttgtttaaggttt

SEQ ID NO: 213917 - DNA, 120 bp, Artificial Sequence
  ENSG00000116095_20 (sequence is synthesized)
tggataaggagcactttaaaacaaactggtgtgttgtttttaagttaatcatatgtttaataaatgcgtggtttttgcattcaaacacatcatataatacattgtattttttacattcat

SEQ ID NO: 213918 - DNA, 120 bp, Artificial Sequence
  ENSG00000116095_21 (sequence is synthesized)
tgatattctgtctaatctttattaggcactaatataattctaatggatttgagtttgtttgtatatttaggcctgctggtgaagacacaaatgaagcataatttttgttgcctgtgagct

SEQ ID NO: 213919 - DNA, 120 bp, Artificial Sequence
  ENSG00000116095_22 (sequence is synthesized)
tagaatggtgtgacctatttcattttatttcaatttatcttgtaagtttatgtgggatattttaaaataattaatatttggtatttgtttaaaaaactgtaattataggccttccatctt

SEQ ID NO: 213920 - DNA, 120 bp, Artificial Sequence
  ENSG00000116095_23 (sequence is synthesized)
aagtttaagatggacataaacagtctatacattaatatgtgtttgggtaaactgtatgctacttgaagtgtttgtaattttaaataacacacaggtcatcagactactctatattcagtg

SEQ ID NO: 213921 - DNA, 120 bp, Artificial Sequence
  ENSG00000116095_24 (sequence is synthesized)
gagtctttgcctgctcataagttgtacttcatatgtctaatttgaaaaaaaaagtttgataatgtagtaagttatgacgttgagcaggtaatcaggtttttcttgttttttttttttttt

SEQ ID NO: 213922 - DNA, 120 bp, Artificial Sequence
  ENSG00000116095_25 (sequence is synthesized)
taaattttgtagtaagaacttgcacagtattaagaccatgaaggtcagggtgctattgattgggagttttttctggtagtgagtttttttgcagtaataggtttataaggaaaacaccgt

SEQ ID NO: 213923 - DNA, 120 bp, Artificial Sequence
  ENSG00000116095_26 (sequence is synthesized)
aacaagcttttgaacttatagaaaataatcacatccattttctattgctttacccaaatagatgggttcgtgaagagttttctgtgaatattttaaaaatacaatgcaattatttctggt

SEQ ID NO: 213924 - DNA, 120 bp, Artificial Sequence
  ENSG00000116095_27 (sequence is synthesized)
ttgtatcattttttcccccttaaaacaggtccttgaacaggtttgcggtatccctaagtatgtcttttgttatgacttggagccactttttgttgttattgttaggaaccaaacacatct

SEQ ID NO: 213925 - DNA, 120 bp, Artificial Sequence
  ENSG00000116095_28 (sequence is synthesized)
gtgaaatcattttttttgtgggagtataaatatatcttgaattatatccaggttttgatcagtgaattagtagcatgaagaaacctataaagcttaagggaaccttgcattttgaggagt

SEQ ID NO: 213926 - DNA, 120 bp, Artificial Sequence
  ENSG00000116095_29 (sequence is synthesized)
cctttattttcaagtgtgcctgacttttttgaattttaagaaaaagatgaaccatataacaattctgtaagaattttagcttgtcaagttgttctatactttatagaaaaattattggtt

SEQ ID NO: 213927 - DNA, 120 bp, Artificial Sequence
  ENSG00000116095_30 (sequence is synthesized)
attattagttattagtagtcccttttttttgctttgtctaggtcatggggttattgagaaacatgaaaagttattgagaaatttggaggttctcttggcagcctatcagtgatcttctaa

SEQ ID NO: 213928 - DNA, 120 bp, Artificial Sequence
  ENSG00000116095_31 (sequence is synthesized)
gcaaaagcagtgcttgtttttcatttcaagtgcttgctcactattctttgggaatcgcaggcctccatgactaaagggattttgatacaattcttttataaatgagctgaatttgaattt

SEQ ID NO: 213929 - DNA, 120 bp, Artificial Sequence
  ENSG00000116095_32 (sequence is synthesized)
tcttacatcatatgggattattgcatgatcttcagtcaggaaaaatccagaaatggatgctattgcttaaacttaaattccaaggcagaagatagagtatcttcatttccacagatgccc

SEQ ID NO: 213930 - DNA, 120 bp, Artificial Sequence
  ENSG00000116095_33 (sequence is synthesized)
tagaacctttgaccttgaattgtagtttttcagtatgtattatcacatttagaaatgtaaaaatcacaagatctcaggaaatgcgcccttgtgatatgttaataccagattgctgtttac

SEQ ID NO: 213931 - DNA, 120 bp, Artificial Sequence
  ENSG00000116095_34 (sequence is synthesized)
actaattccatatacatgataataccactaatttggactctgctagttcttttatttaataaggcacctctaggtctgtactttgagccttgatctgggtacttggtacagagggagtgt

SEQ ID NO: 213932 - DNA, 120 bp, Artificial Sequence
  ENSG00000116095_35 (sequence is synthesized)
cctggcctgaaagaaagccagattaggctgcaggagttcctttgaggaggtctgtcttttaataaccctggcgggtaaatgaatggtaggtagctggtaggtaggccttcttgttcatgt

SEQ ID NO: 213933 - DNA, 120 bp, Artificial Sequence
  ENSG00000116095_36 (sequence is synthesized)
ctttctgtctccccaatccactctttgaattcatgttgaattcttaacttgaaattctgttgttttttttttaattttagctttctttttattaaactagttaatgtacatagtttgaaa

SEQ ID NO: 213934 - DNA, 120 bp, Artificial Sequence
  ENSG00000116095_37 (sequence is synthesized)
aaatcaaatagaactaaaaggtttatagtgaaaaagtgtagttccctcttccccagtttagcattccaaagacaaacacttggaactcttagtggtttgtgttagtatttaccttcctgt

SEQ ID NO: 213935 - DNA, 120 bp, Artificial Sequence
  ENSG00000116095_38 (sequence is synthesized)
ttgaaaatgttatactactttttgttgacttatcaatttcagaaacagtttctcgaataccttttatggtagacaggatttactttacttaaactctccacctcccacatttttcttccc

SEQ ID NO: 213936 - DNA, 120 bp, Artificial Sequence
  ENSG00000116095_39 (sequence is synthesized)
ccacccctcccaaaatagatttatattcacacaacttttagttagaacaaactttttgtgaaatagatagacataaatgtagttcactgatgtaccacatggttaactatcattatttcc

SEQ ID NO: 213937 - DNA, 120 bp, Artificial Sequence
  ENSG00000116095_40 (sequence is synthesized)
tttttactagaatgttattttttctggggttggtattgcctgattttcaaatttgcttagtttttaatgtacctgtcacaatgactatccaaaggcttaaatgctgaaaaacatcagata

SEQ ID NO: 213938 - DNA, 120 bp, Artificial Sequence
  ENSG00000116095_41 (sequence is synthesized)
atcgtatcaattctcttaaaaaagtttttaaaaatattttgtcatcctttagggacatttcttccacagtccttcatcttctgccatttgtactgttgccctccaggcctgttctatggt

SEQ ID NO: 213939 - DNA, 80 bp, Artificial Sequence
  ENSG00000116095_42 (sequence is synthesized)
ctgccatttgtactgttgccctccaggcctgttctatggttcagcagtcattctgaaactccctttagtttttagtctca

SEQ ID NO: 213940 - DNA, 120 bp, Artificial Sequence
  ENSG00000116095_43 (sequence is synthesized)
tgcatagaaagtaaagattttaaggctttacaggtctgaaaatgtctctactcttgattggtagtttggagtctggaaaataacatgccttcagaattttaagggcaacatttcattgtc

SEQ ID NO: 213941 - DNA, 120 bp, Artificial Sequence
  ENSG00000116095_44 (sequence is synthesized)
ttaaggcatttagtttttctgtgagaattctgataccgttcctttacctgggatctgtttttacactctgtaagcttttaggaacttctcattacttctgatgtttcataataatatgtg

SEQ ID NO: 213942 - DNA, 120 bp, Artificial Sequence
  ENSG00000116095_45 (sequence is synthesized)
atgtttcataataatatgtgggtctttattcattcatcttgatggctacttgacttggtggaatctttcaatttagagatttgtctgcttcagttctgggtgtgtgtgtgtgtgtgtgtg

SEQ ID NO: 213943 - DNA, 120 bp, Artificial Sequence
  ENSG00000116095_46 (sequence is synthesized)
ctttttgacagttttctctcttccattttctttgttctatctttctagaatttctgttatttgaatgttggacctcccagagttggaccgcctctaaatttaaaaagctttttctctcta

SEQ ID NO: 213944 - DNA, 120 bp, Artificial Sequence
  ENSG00000116095_47 (sequence is synthesized)
gttgttccttaagttatattatctttgttctttttgttatcctccagctcttctgttgaattttctttatatatatattttaatttctaagaggtcttttttttctgtttcatttcataa

SEQ ID NO: 213945 - DNA, 120 bp, Artificial Sequence
  ENSG00000116095_48 (sequence is synthesized)
aaacctatttttattttatagattaactgtttccccatatctccctgaggataaaattaagatttttttcttacatctttcctgtttcttgaatggttctccccctcccccaccatgttt

SEQ ID NO: 213946 - DNA, 120 bp, Artificial Sequence
  ENSG00000116095_49 (sequence is synthesized)
ctgctttctatttatttgttttgggctctttcattctgaagcctttcttagaaatcatctattcatattagtcatgtattaaaaagctaatgtcataggtctttatatgtgggcagggtt

SEQ ID NO: 213947 - DNA, 120 bp, Artificial Sequence
  ENSG00000116095_50 (sequence is synthesized)
tataagttgtctaaagggccatcaggtagagttggccttttctgttgaggtcccctaaatttcagtggaggtcttctctttggggccagtttctctagaaaactgggtcctgatagtagg

SEQ ID NO: 213948 - DNA, 120 bp, Artificial Sequence
  ENSG00000116095_51 (sequence is synthesized)
gtaagaaaagacagctgaggaccccaagatttgtatgatgacttttacttaatccctctatcttcatcctctctcatgcccatccggccccaccccccaaatcctcctctggctgctgac

SEQ ID NO: 213949 - DNA, 120 bp, Artificial Sequence
  ENSG00000116095_52 (sequence is synthesized)
cctcaggttcagtttttcctgtcagtggaggttgagggtggggcgtaggctggctgtggagagtaggggagaggacctgggttccagttgctctttatacagacttctagtcctgatttc

SEQ ID NO: 213950 - DNA, 120 bp, Artificial Sequence
  ENSG00000116095_53 (sequence is synthesized)
agccctatacctcactctcatcttctacaatacctagtgcttccaagtcctgaacttagtagaggtttggtggggtgtgtttttgggcttctcccttttgggtacttaggctttaacttc

SEQ ID NO: 213951 - DNA, 120 bp, Artificial Sequence
  ENSG00000116095_54 (sequence is synthesized)
ctccactctgctaggttaggtattgcacttcctcctggtttttatctgtataaactttgttaaaatctcatggctttgtcgtctgtgcttttttgtggattaatactatttatattcctt

SEQ ID NO: 213952 - DNA, 120 bp, Artificial Sequence
  ENSG00000116095_55 (sequence is synthesized)
taatatcttttggtggtttggaggtagaggaaataaattcatgtggttggtttgtatgtttcactgaaagtctagatttaaattctaatagtgtataaaaaataaaaattctttagtatt

SEQ ID NO: 213953 - DNA, 120 bp, Artificial Sequence
  ENSG00000116095_56 (sequence is synthesized)
aatttgtaattcattctagtgatttttaattcatatggttttactgtactacctacctcatagggttgtgaggattagaagaatcaattcataaaaagcagttagaaaagtgctgggcac

SEQ ID NO: 213954 - DNA, 120 bp, Artificial Sequence
  ENSG00000116095_57 (sequence is synthesized)
gtctcactctttcacccagtcttgagtatagtggagtgatctcagctcactgcagtctcgacctcccaggctcaaatgatccttttacctcagcctcccgaataactaggactacaggca

SEQ ID NO: 213955 - DNA, 120 bp, Artificial Sequence
  ENSG00000116095_58 (sequence is synthesized)
tgcaccactactcctggctaatttttgtatttttttgtagcagcagggttttgccatgctgttcagactgatctcaaactcctgggctcaagggatctgcctgccttgactttccaaaat

SEQ ID NO: 213956 - DNA, 120 bp, Artificial Sequence
  ENSG00000116095_59 (sequence is synthesized)
tctcggattacaggcatgagccacactgcactctcctatctctctcaattcagtaacctgtttattcttgagtgaaaatgtttcaccataggaagaattactaatatatgggaaaatcta

SEQ ID NO: 213957 - DNA, 84 bp, Artificial Sequence
  ENSG00000116095_60 (sequence is synthesized)
tttcaccataggaagaattactaatatatgggaaaatctagtgtttgataatgttgaccctacattttttttggacagtctctg

SEQ ID NO: 213958 - DNA, 89 bp, Artificial Sequence
  ENSG00000116095_61 (sequence is synthesized)
gaccctgcatttaactagacttcatatgaaatgttcaggtgttaggtgttatctttctaagaaacattcaagccttaagaaatccaatc

SEQ ID NO: 213959 - DNA, 120 bp, Artificial Sequence
  ENSG00000116095_62 (sequence is synthesized)
tatctttctaagaaacattcaagccttaagaaatccaatcagttatagttactttaaaagttttaaaaagagtataacaattttgatgtgcttttaagctttattggtattatattttgt

SEQ ID NO: 213960 - DNA, 120 bp, Artificial Sequence
  ENSG00000116095_63 (sequence is synthesized)
ttttatcatataaatatgaagtataggagataagataatgcagatgatgtttgttatgccttacctaccgccagtagatgtaatactcttaatacatggagtacagaaatagtagattcc

SEQ ID NO: 213961 - DNA, 120 bp, Artificial Sequence
  ENSG00000116095_64 (sequence is synthesized)
cttcattcccagtgcaacagtgttgggaggtggggcctaccaggaggtgtttaggtcatgtgggtaccaccctcatgaatagattaatgccgccgtgtaaagggcttgtgggcgtgggtg

SEQ ID NO: 213962 - DNA, 120 bp, Artificial Sequence
  ENSG00000116095_65 (sequence is synthesized)
aacactctcctgctcttctgccaaatgtctctcccttccaaaggacgtagtgctctacatagtgttggaagcgagagactgagccctaacatgccagtgccttatcttggatttctcagc

SEQ ID NO: 213963 - DNA, 120 bp, Artificial Sequence
  ENSG00000116095_66 (sequence is synthesized)
ctccaaaactgtgaaaaaataaattttcattctttatggtaaattcccatcactgtatccataacctcttgtaaatagttgtacacctttcagaaaatgttgtggacttacataagcaaa

SEQ ID NO: 213964 - DNA, 120 bp, Artificial Sequence
  ENSG00000116095_67 (sequence is synthesized)
atgcctgcatttatttcataggtaaaattttaatctattttctaatcaaagtgttttggggaacatttaatttaaatactatgttcaatttttttaatggtctgcttcagatttttttta

SEQ ID NO: 213965 - DNA, 120 bp, Artificial Sequence
  ENSG00000116095_68 (sequence is synthesized)
taagttaatgttttaaaacaaaataattgtgttctaggtagaagctactctgagtttaggtttttaaatctctttcagatattttaagtatcttttttgtgtctggattcagagaggtat

SEQ ID NO: 213966 - DNA, 120 bp, Artificial Sequence
  ENSG00000116095_69 (sequence is synthesized)
gataatgagattctcttctagaggggaagtgggagtaggtaaccatactactctttctacggctacagagccgcatactcgaaggagggagatttttatttgtaaggacatttgtattat

SEQ ID NO: 213967 - DNA, 120 bp, Artificial Sequence
  ENSG00000116095_70 (sequence is synthesized)
ctttcattaaagtagagtcccatgggcgtggcaaatggctgtaaataaagtaaaagtggctaaagaaaacagtgcctgctattagcttgatgctggcattttcttctttccctggatgtg

SEQ ID NO: 213968 - DNA, 120 bp, Artificial Sequence
  ENSG00000116095_71 (sequence is synthesized)
ctggcattttcttctttccctggatgtgactgttattgtctttattgggtccccttattatctgctttgatatccatctctggaactttgatctctaattttttttttttttttttgaga

SEQ ID NO: 213969 - DNA, 120 bp, Artificial Sequence
  ENSG00000116095_72 (sequence is synthesized)
gctcactgcaacctccacctccggggctcaagcaattctcgtgactcaacatcccaaatagctgggactgtaggcacgcaccaccatgcccagctgatgttttgtatttttacaaaaatt

SEQ ID NO: 213970 - DNA, 85 bp, Artificial Sequence
  ENSG00000116095_73 (sequence is synthesized)
atgttttgtatttttacaaaaattaagctcaggagatccgcctgcctcagcctttgaaagtgctgggattacaggcgggagccac

SEQ ID NO: 213971 - DNA, 120 bp, Artificial Sequence
  ENSG00000116095_74 (sequence is synthesized)
cccgacctgacctctccatctttggcgtccttatgctgcctcttctccaaatacatgttggccagggtggtctcaaactcctaagctcaggagatccgcctgcctcagcctctgaaagtg

SEQ ID NO: 213972 - DNA, 120 bp, Artificial Sequence
  ENSG00000116095_75 (sequence is synthesized)
gattacaggcgggagccaccgtgcctgacctgacctctccatctttggcgtccttatgctgcctcttctccaaatacagtaactaatctagtatattttcataggatagaatttgccctt

SEQ ID NO: 213973 - DNA, 120 bp, Artificial Sequence
  ENSG00000116095_76 (sequence is synthesized)
cctttctgtcccataatatgttcctcttccccaaaaagttttttgttggtctctttggtaataaaacatttagagcatttactgtgggccaggtgctttacctcatgttagccttataac

SEQ ID NO: 213974 - DNA, 120 bp, Artificial Sequence
  ENSG00000116095_77 (sequence is synthesized)
agagatgcggaagtacaggactaccagtgcagccaagatgcacagcaccaggattaactcatgagactgattagaatgatgaatatcttattgtatcctgaaacattaagcctttaagtt

SEQ ID NO: 213975 - DNA, 120 bp, Artificial Sequence
  ENSG00000116095_78 (sequence is synthesized)
atccctttatttagtatttaaattcacatgcttcttgatttttttggactagcattagttgttgaataaataaataattcagaatgtatccacaaaacctagaatatatgacagggtgga

SEQ ID NO: 213976 - DNA, 120 bp, Artificial Sequence
  ENSG00000116095_79 (sequence is synthesized)
ttcagttttgcttagttactgtagataaaccaaataaattaatgtaaagggatattaatgcattaagcaattttttttgacataaatgaagggttgtttccatgggtaatatattcagaa

SEQ ID NO: 213977 - DNA, 120 bp, Artificial Sequence
  ENSG00000116095_80 (sequence is synthesized)
tattaaagatgagtaaaatgtatgactataatgaattccttcttcacttttactctggcaaggtgggaggagggtgctgttgataatctctgtgcttttgcaagtttggcacaaagactt

SEQ ID NO: 213978 - DNA, 120 bp, Artificial Sequence
  ENSG00000116095_81 (sequence is synthesized)
ttactcacttaaatctcaatataaagtatattgccagatctggcagcatggggacaattaggaacaaaggagagagaatagaatcagccatcaggagctataaccacactcttctttctc

SEQ ID NO: 213979 - DNA, 120 bp, Artificial Sequence
  ENSG00000116095_82 (sequence is synthesized)
aaccttttctggtattagtaggcagaactccttttggatgcggtgaagcattttatgagtgaacaatggtgagtcatgtaatgaaaggagatgttctaggaaaacttttcagtcccgctc

SEQ ID NO: 213980 - DNA, 120 bp, Artificial Sequence
  ENSG00000116095_83 (sequence is synthesized)
agtgctgccatctttttctcccagcactctggacttaaaattctgagagaacagggtatttcccacccttcctcttactttttgaaagcaatacctgagttattaagcaatcatttagac

SEQ ID NO: 213981 - DNA, 120 bp, Artificial Sequence
  ENSG00000116095_84 (sequence is synthesized)
agtatgaataaaccaaaattcaccttgacactccatcccctagaggtaaccattcttttctagtatatattcttccagacctttttcctgtgtattgacttttaaatagatgtacattgc

SEQ ID NO: 213982 - DNA, 120 bp, Artificial Sequence
  ENSG00000116095_85 (sequence is synthesized)
ctttttcctgtgtattgacttttaaatagatgtacattgcaatagtttggattagctcatccatagcagggtggttaaataaacagtggcacttttttttttttgagacagagtctcacc

SEQ ID NO: 213983 - DNA, 120 bp, Artificial Sequence
  ENSG00000116095_86 (sequence is synthesized)
ccttgtgatctgcctgccttggcctcccagtgtcaggatcctggccccagtggcacatttttatgatgcatctggtactaaagaaggagctggctttatgacctttacttgagtattttt

SEQ ID NO: 213984 - DNA, 120 bp, Artificial Sequence
  ENSG00000116095_87 (sequence is synthesized)
aggagctggctttatgacctttacttgagtatttttttgtgtgtgacagttgaacaattctgacccctattattgttggctggacaggcattttctttttaattcctctatgcaaggaac

SEQ ID NO: 213985 - DNA, 120 bp, Artificial Sequence
  ENSG00000116095_88 (sequence is synthesized)
tgtggattgcttttttctggatagctagaacgaggccattttctttcaaaagacagtcctagagtttccagtggttttctttaattgtgtatgcgtgagtgtgacagtgtgtgtgcctgt

SEQ ID NO: 213986 - DNA, 120 bp, Artificial Sequence
  ENSG00000116095_89 (sequence is synthesized)
gtctctatctgtgcatgcatctgtatgcacagtttcttagttgtggacaatgcaacttggaatcattttagttttccaattgattttaaaagtttatctatagaagatgagacaaatttg

SEQ ID NO: 213987 - DNA, 120 bp, Artificial Sequence
  ENSG00000116095_90 (sequence is synthesized)
ctgtagaagttaccactacttggtcaaaatagagagttgtgggtttttttttttgtttgacaacaatcaaaagtatggcctacagatagtaagggttaaccacccagatttttgtcagat

SEQ ID NO: 213988 - DNA, 120 bp, Artificial Sequence
  ENSG00000116095_91 (sequence is synthesized)
aatatatacatgtccatgtaattaaaagtcttcatttgacaaatttatatggtaaatgagcataaaatgaatatcttttcagtattagaacatttctgtttatgccctattccagtggta

SEQ ID NO: 213989 - DNA, 120 bp, Artificial Sequence
  ENSG00000116095_92 (sequence is synthesized)
tttgtggtcgctaggggttgctgggttatccaagtgattcagcatgccttcagaattggcatcctcgggtgattgtccatagcctcttgcaatggtgcctcatcttggggaggctttaga

SEQ ID NO: 213990 - DNA, 120 bp, Artificial Sequence
  ENSG00000116095_93 (sequence is synthesized)
acacagctctcatttagcttattattgatttttttttcttgttttgcagttgttggctagagaaaagtgtgtagcaataagtacgcacacttactgtggtttaccatcatgaccatggat

SEQ ID NO: 213991 - DNA, 120 bp, Artificial Sequence
  ENSG00000116095_94 (sequence is synthesized)
agcaaactgcctttttttttttttttaactcctgtgtcatctctgatgttgtggctaattttaagactttgatttttcagctaggattagcggagaatgacctacctacttgattaatga

SEQ ID NO: 213992 - DNA, 120 bp, Artificial Sequence
  ENSG00000116095_95 (sequence is synthesized)
tgtctgcatgggcttactaagagggtgtggggaatggtggcaggggtaactatcatcgagaatatagggcaatgggtatattctaactttgcataactttgctagattatatatatcttt

SEQ ID NO: 213993 - DNA, 120 bp, Artificial Sequence
  ENSG00000116095_96 (sequence is synthesized)
actcacaataagcaaagttgaacaacttaaaattgattccctgttttctgttttcactatccaactaggatgaactcttaagttcatacatatactttaaaatgggaacaaacatagcct

SEQ ID NO: 213994 - DNA, 120 bp, Artificial Sequence
  ENSG00000116095_97 (sequence is synthesized)
gtcatgtctttatttaggctaagtgcatatgtatgtataagtaatgtgtatatccttcacttattaatagtgccttcatgaattcaaagacccttgtcacatggtgctcaggaaaaaaaa

SEQ ID NO: 213995 - DNA, 120 bp, Artificial Sequence
  ENSG00000116095_98 (sequence is synthesized)
agtgccaatattctttttttttttttctctaagaagtactagtttaggtaagtgaaattcaatagcatatcagtgctttaccttagtcactttttgtgttttgatcacccttagtcatca

SEQ ID NO: 213996 - DNA, 120 bp, Artificial Sequence
  ENSG00000116095_99 (sequence is synthesized)
ctggagagaagagtttgaattcatttgtggttttgctttagtggcaaacctccttacagggatgagttgccctccattctccttgccatatttggttaatctaggccatgacctttgagg

SEQ ID NO: 213997 - DNA, 120 bp, Artificial Sequence
  ENSG00000116095_100 (sequence is synthesized)
ggaaaaggcacagattgcaacttttctttcctgcttttgtgaatcaggccatgttcacgcagggtccttgaaggtgacttgagtgaggaagctatataccgatgacttaccaatttttgg

SEQ ID NO: 213998 - DNA, 120 bp, Artificial Sequence
  ENSG00000116095_101 (sequence is synthesized)
ctctctctttttttttttttttttttgtagcatatggcttcctctactgtatgttggcatttgccacttttggggatttgactcctgcaggtatttttttttttttcttttgggggagtg

SEQ ID NO: 213999 - DNA, 120 bp, Artificial Sequence
  ENSG00000116095_102 (sequence is synthesized)
tttgggggagtgtgacggcagtggatatagtcttagatgatgtttttaatagttcaagtccattagtgtcttactctagagaaaacgaaagactcactgtgtgagttttcttgccctctg

SEQ ID NO: 214000 - DNA, 120 bp, Artificial Sequence
  ENSG00000116095_103 (sequence is synthesized)
gttttcagaattctgtgtagtttctcaacatttcctttctacctgtcctgaagagctcttatggaaatcatggttgaatgttagtaaatttctaagagctttccaatgttgtctataatt

SEQ ID NO: 214001 - DNA, 120 bp, Artificial Sequence
  ENSG00000116095_104 (sequence is synthesized)
agccaaaaaaagacatatgaacttttctcattctgtctacctttttaaaattttattcactttatctttttctccagttttgatagatgattatagagttccccaaaatggccttcttac

SEQ ID NO: 214002 - DNA, 120 bp, Artificial Sequence
  ENSG00000116095_105 (sequence is synthesized)
tatttctatattaggtatattatttcagaaaagaaaataatcacttgggaatggcggtgagttcagggggtctgttaaccatttaatttaggattgtttatacatttatttacctctttt

SEQ ID NO: 214003 - DNA, 120 bp, Artificial Sequence
  ENSG00000116095_106 (sequence is synthesized)
aaaaaatttcttcagttaatattcattgaccactcactaagtgttatgttgctagtatttatctttgctttctaattatttttttgtaatttttttgctttctaattcttgagtgaattt

SEQ ID NO: 214004 - DNA, 120 bp, Artificial Sequence
  ENSG00000116095_107 (sequence is synthesized)
aaaactcactgctttattatttaatatcttagatacaatgactatcttaattataattggctttccaaaattttcactttttttcagttaactagttgaatagtatttatcattcacatt

SEQ ID NO: 214005 - DNA, 120 bp, Artificial Sequence
  ENSG00000116095_108 (sequence is synthesized)
tgcaccctaactattgttttaacctaaacataaataagcaagcattagaaagtagcataattgctgttaaaatagtcttttctttgcgtgtttaaatattgttagaaacataagcacatg

SEQ ID NO: 214006 - DNA, 120 bp, Artificial Sequence
  ENSG00000116095_109 (sequence is synthesized)
tgcgtgtttaaatattgttagaaacataagcacatgaatttttttggccttttaaatgtctttattgtagctagttataagatgtatatatagcttatatatgtgtatatacacatacat

SEQ ID NO: 214007 - DNA, 120 bp, Artificial Sequence
  ENSG00000116095_110 (sequence is synthesized)
tcttgcaaaagtagttatgggtatttaagtgaaaaatttgtaagtttagaagttaagaaattggaaataatggaattggtttaaaaagctagtctctaaattaacttagaaacctaatag

SEQ ID NO: 214008 - DNA, 120 bp, Artificial Sequence
  ENSG00000116095_111 (sequence is synthesized)
caaatacagattttgattgctataactaaacactttaattttgaaaaagtttcagaatagaatttctattcccaggggaaaataaacttcatttaaaaatatatgtatacttattttgtg

SEQ ID NO: 214009 - DNA, 120 bp, Artificial Sequence
  ENSG00000116095_112 (sequence is synthesized)
agtatttttttcttttccaaattccaaaaggtgtatactctatatttttgtcataaaaattctgcttgtcgaaaatattgtagtaattttataaattcaataaaacctgagtgatgtgaa

SEQ ID NO: 214010 - DNA, 120 bp, Artificial Sequence
  ENSG00000116095_113 (sequence is synthesized)
ataataggcaaatcatgacttgctgcccacttcttcgctctgccaaaagtatcacatccctcagtaattgtgtggtactctcgacttgtgtccacctgatcttgtgcaaaatgtgcaggc

SEQ ID NO: 214011 - DNA, 120 bp, Artificial Sequence
  ENSG00000116096_0 (sequence is synthesized)
agcgccgccggcggagaacaggagcatggagggcgggctggggcgtgctgtgtgcttgctgaccggggcctcccgcggcttcggccggacgctggccccgctcctggcctcgctgctgtc

SEQ ID NO: 214012 - DNA, 120 bp, Artificial Sequence
  ENSG00000116096_1 (sequence is synthesized)
gcccggctccgtgcttgtccttagcgcccgcaacgacgaggcactgcgccagctggaggccgagctgggcgccgagcggtctggcctgcgcgtggtgcgggtgcccgccgacctgggcgc

SEQ ID NO: 214013 - DNA, 120 bp, Artificial Sequence
  ENSG00000116096_2 (sequence is synthesized)
cgaggccggcttgcagcagctgctcggcgccctgcgcgagctcccccggcccaaggggctgcagcgactgctgcttatcaacaacgcgggctctcttggggatgtgtccaaaggcttcgt

SEQ ID NO: 214014 - DNA, 120 bp, Artificial Sequence
  ENSG00000116096_3 (sequence is synthesized)
ggacctgagtgactccactcaagtgaacaactactgggcactgaacttgacctccatgctctgcctgacttccagcgtcctgaaggccttcccggacagtcctggcctcaacagaaccgt

SEQ ID NO: 214015 - DNA, 120 bp, Artificial Sequence
  ENSG00000116096_4 (sequence is synthesized)
ggttaacatctcgtccctctgtgccctgcaacctttcaaaggctgggcgctgtactgtgcaggaaaggctgctcgtgatatgctgttccaggtcctggcgctggaggaacctaatgtgag

SEQ ID NO: 214016 - DNA, 120 bp, Artificial Sequence
  ENSG00000116096_5 (sequence is synthesized)
aagctggtggattgcaaggtgtcagcccagaaactgctgagcttactggaaaaggacgagttcaagtctggagcccacgtggacttctatgacaaataagcccatgtttttggcttcctg

SEQ ID NO: 214017 - DNA, 120 bp, Artificial Sequence
  ENSG00000116096_6 (sequence is synthesized)
aacctttttgcccccacttttagacataccccagagccctgtggctccccacaccctgccataggggcagtcctgccttacacatagaagcattcatgcctgctgccctgccctcaggca

SEQ ID NO: 214018 - DNA, 120 bp, Artificial Sequence
  ENSG00000116096_7 (sequence is synthesized)
cagccagctgtgagctcccaggtcattggccttaccagttgtcaggagtctgtgctgtgcaccctgggttataaggaggcttaggagagaggttatgggtattggtgtctctatccccag

SEQ ID NO: 214019 - DNA, 120 bp, Artificial Sequence
  ENSG00000116096_8 (sequence is synthesized)
gaatagaacttaaggggtgggaagaacaggaaaagaagctggaacacagaagagaggaggttgtgtctcttgctcatagcaagcctgtgggtagaggaaagagtgatctggtgtcgaata

SEQ ID NO: 214020 - DNA, 120 bp, Artificial Sequence
  ENSG00000116096_9 (sequence is synthesized)
ggaggacccatgtagattcgcagatggcctggatgggaggaagggcagacggtacatgtcccagcccacatagatgccccttgctgagggtagcaggaccttctgttgaactttgtgtcc

SEQ ID NO: 214021 - DNA, 120 bp, Artificial Sequence
  ENSG00000116096_10 (sequence is synthesized)
tcactctgatgtctccttccttcagaatctaccacccctcccccaggctgggagaaggggctcctgggtgtctgtatacacgccaaaggcagatacaaataaaatacagattgtcctttc

SEQ ID NO: 214022 - DNA, 120 bp, Artificial Sequence
  ENSG00000116106_0 (sequence is synthesized)
aagcatttattccactgggatagaagcggcaggagcagcgttggcaccggcgaaccatggctgggattttctatttcgccctattttcgtgtctcttcgggatttgcgacgctgtcacag

SEQ ID NO: 214023 - DNA, 120 bp, Artificial Sequence
  ENSG00000116106_1 (sequence is synthesized)
gttccagggtataccccgcgaatgaagttaccttattggattccagatctgttcagggagaacttgggtggatagcaagccctctggaaggagggtgggaggaagtgagtatcatggatg

SEQ ID NO: 214024 - DNA, 120 bp, Artificial Sequence
  ENSG00000116106_2 (sequence is synthesized)
aaaaaaatacaccaatccgaacctaccaagtgtgcaatgtgatggaacccagccagaataactggctacgaactgattggatcacccgagaaggggctcagagggtgtatattgagatta

SEQ ID NO: 214025 - DNA, 120 bp, Artificial Sequence
  ENSG00000116106_3 (sequence is synthesized)
aattcaccttgagggactgcaatagtcttccgggcgtcatggggacttgcaaggagacgtttaacctgtactactatgaatcagacaacgacaaagagcgtttcatcagagagaaccagt

SEQ ID NO: 214026 - DNA, 120 bp, Artificial Sequence
  ENSG00000116106_4 (sequence is synthesized)
ttgtcaaaattgacaccattgctgctgatgagagcttcacccaagtggacattggtgacagaatcatgaagctgaacaccgagatccgggatgtagggccattaagcaaaaaggggtttt

SEQ ID NO: 214027 - DNA, 120 bp, Artificial Sequence
  ENSG00000116106_5 (sequence is synthesized)
acctggcttttcaggatgtgggggcctgcatcgccctggtatcagtccgtgtgttctataaaaagtgtccactcacagtccgcaatctggcccagtttcctgacaccatcacaggggctg

SEQ ID NO: 214028 - DNA, 120 bp, Artificial Sequence
  ENSG00000116106_6 (sequence is synthesized)
atacgtcttccctggtggaagttcgaggctcctgtgtcaacaactcagaagagaaagatgtgccaaaaatgtactgtggggcagatggtgaatggctggtacccattggcaactgcctat

SEQ ID NO: 214029 - DNA, 120 bp, Artificial Sequence
  ENSG00000116106_7 (sequence is synthesized)
gcaacgctgggcatgaggagcggagcggagaatgccaagcttgcaaaattggatattacaaggctctctccacggatgccacctgtgccaagtgcccaccccacagctactctgtctggg

SEQ ID NO: 214030 - DNA, 120 bp, Artificial Sequence
  ENSG00000116106_8 (sequence is synthesized)
aaggagccacctcgtgcacctgtgaccgaggctttttcagagctgacaacgatgctgcctctatgccctgcacccgtccaccatctgctcccctgaacttgatttcaaatgtcaacgaga

SEQ ID NO: 214031 - DNA, 120 bp, Artificial Sequence
  ENSG00000116106_9 (sequence is synthesized)
catctgtgaacttggaatggagtagccctcagaatacaggtggccgccaggacatttcctataatgtggtatgcaagaaatgtggagctggtgaccccagcaagtgccgaccctgtggaa

SEQ ID NO: 214032 - DNA, 120 bp, Artificial Sequence
  ENSG00000116106_10 (sequence is synthesized)
gtggggtccactacaccccacagcagaatggcttgaagaccaccaaagtctccatcactgacctcctagctcataccaattacacctttgaaatctgggctgtgaatggagtgtccaaat

SEQ ID NO: 214033 - DNA, 120 bp, Artificial Sequence
  ENSG00000116106_11 (sequence is synthesized)
ataaccctaacccagaccaatcagtttctgtcactgtgaccaccaaccaagcagcaccatcatccattgctttggtccaggctaaagaagtcacaagatacagtgtggcactggcttggc

SEQ ID NO: 214034 - DNA, 120 bp, Artificial Sequence
  ENSG00000116106_12 (sequence is synthesized)
tggaaccagatcggcccaatggggtaatcctggaatatgaagtcaagtattatgagaaggatcagaatgagcgaagctatcgtatagttcggacagctgccaggaacacagatatcaaag

SEQ ID NO: 214035 - DNA, 120 bp, Artificial Sequence
  ENSG00000116106_13 (sequence is synthesized)
gcctgaaccctctcacttcctatgttttccacgtgcgagccaggacagcagctggctatggagacttcagtgagcccttggaggttacaaccaacacagtgccttcccggatcattggag

SEQ ID NO: 214036 - DNA, 120 bp, Artificial Sequence
  ENSG00000116106_14 (sequence is synthesized)
atggggctaactccacagtccttctggtctctgtctcgggcagtgtggtgctggtggtaattctcattgcagcttttgtcatcagccggagacggagtaaatacagtaaagccaaacaag

SEQ ID NO: 214037 - DNA, 120 bp, Artificial Sequence
  ENSG00000116106_15 (sequence is synthesized)
aagcggatgaagagaaacatttgaatcaaggtgtaagaacatatgtggacccctttacgtacgaagatcccaaccaagcagtgcgagagtttgccaaagaaattgacgcatcctgcatta

SEQ ID NO: 214038 - DNA, 120 bp, Artificial Sequence
  ENSG00000116106_16 (sequence is synthesized)
agattgaaaaagttataggagttggtgaatttggtgaggtatgcagtgggcgtctcaaagtgcctggcaagagagagatctgtgtggctatcaagactctgaaagctggttatacagaca

SEQ ID NO: 214039 - DNA, 120 bp, Artificial Sequence
  ENSG00000116106_17 (sequence is synthesized)
aacagaggagagacttcctgagtgaggccagcatcatgggacagtttgaccatccgaacatcattcacttggaaggcgtggtcactaaatgtaaaccagtaatgatcataacagagtaca

SEQ ID NO: 214040 - DNA, 120 bp, Artificial Sequence
  ENSG00000116106_18 (sequence is synthesized)
tggagaatggctccttggatgcattcctcaggaaaaatgatggcagatttacagtcattcagctggtgggcatgcttcgtggcattgggtctgggatgaagtatttatctgatatgagct

SEQ ID NO: 214041 - DNA, 120 bp, Artificial Sequence
  ENSG00000116106_19 (sequence is synthesized)
atgtgcatcgtgatctggccgcacggaacatcctggtgaacagcaacttggtctgcaaagtgtctgattttggcatgtcccgagtgcttgaggatgatccggaagcagcttacaccacca

SEQ ID NO: 214042 - DNA, 120 bp, Artificial Sequence
  ENSG00000116106_20 (sequence is synthesized)
ggggtggcaagattcctatccggtggactgcgccagaagcaattgcctatcgtaaattcacatcagcaagtgatgtatggagctatggaatcgttatgtgggaagtgatgtcgtacgggg

SEQ ID NO: 214043 - DNA, 120 bp, Artificial Sequence
  ENSG00000116106_21 (sequence is synthesized)
agaggccctattgggatatgtccaatcaagatgtgattaaagccattgaggaaggctatcggttaccccctccaatggactgccccattgcgctccaccagctgatgctagactgctggc

SEQ ID NO: 214044 - DNA, 120 bp, Artificial Sequence
  ENSG00000116106_22 (sequence is synthesized)
agaaggagaggagcgacaggcctaaatttgggcagattgtcaacatgttggacaaactcatccgcaaccccaacagcttgaagaggacagggacggagagctccagacctaacactgcct

SEQ ID NO: 214045 - DNA, 120 bp, Artificial Sequence
  ENSG00000116106_23 (sequence is synthesized)
tgttggatccaagctcccctgaattctctgctgtggtatcagtgggcgattggctccaggccattaaaatggaccggtataaggataacttcacagctgctggttataccacactagagg

SEQ ID NO: 214046 - DNA, 120 bp, Artificial Sequence
  ENSG00000116106_24 (sequence is synthesized)
ctgtggtgcacgtgaaccaggaggacctggcaagaattggtatcacagccatcacgcaccagaataagattttgagcagtgtccaggcaatgcgaacccaaatgcagcagatgcacggca

SEQ ID NO: 214047 - DNA, 120 bp, Artificial Sequence
  ENSG00000116106_25 (sequence is synthesized)
gaatggttcccgtctgagccagtactgaataaactcaaaactcttgaaattagtttacctcatccatgcactttaattgaagaactgcactttttttacttcgtcttcgccctctgaaat

SEQ ID NO: 214048 - DNA, 120 bp, Artificial Sequence
  ENSG00000116106_26 (sequence is synthesized)
aagaaatgaaaaaaaaaaacaatatctgcagcgttgcttggtgcacagattgctgaaactgtggggcttacagaaatgactgccggtcatttgaatgagacctggaacaaatcgtttctc

SEQ ID NO: 214049 - DNA, 120 bp, Artificial Sequence
  ENSG00000116106_27 (sequence is synthesized)
agaagtacttttctgttcatcaccagtctgtaaaatacatgtacctatagaaatagaacactgcctctgagttttgatgctgtatttgctgccagacactgagcttctgagacatccctg

SEQ ID NO: 214050 - DNA, 120 bp, Artificial Sequence
  ENSG00000116106_28 (sequence is synthesized)
attctctctccatttggaattacaaccattgtattttgtttgtggcataaattacagtcatctgtctttcactggaatgaagaccatgcctaggaacattttttaaggactcagctgtgg

SEQ ID NO: 214051 - DNA, 120 bp, Artificial Sequence
  ENSG00000116106_29 (sequence is synthesized)
cttttagggcttggttcataccatgggggaaaaaaaagtcctaggagaaagcgacgtggctcattagtgttgcctcttcagtgctcaagccgcctggtggattcctatgacacagggggc

SEQ ID NO: 214052 - DNA, 120 bp, Artificial Sequence
  ENSG00000116106_30 (sequence is synthesized)
ctggaaagaaagggaaagtggatttaaaatatatatatacgtaacccaagccccataacccctaactggacaaatgaggtctgtttctttgggcctgaggctgtgccatataaagtctta

SEQ ID NO: 214053 - DNA, 120 bp, Artificial Sequence
  ENSG00000116106_31 (sequence is synthesized)
ttttgggactttacaaacttgtcctaactatcttgtggatagtgggctgtgacaatctggaatagagaacgttcacacttcgctcctttaaagaagcgaccccagatctgcaagggagta

SEQ ID NO: 214054 - DNA, 120 bp, Artificial Sequence
  ENSG00000116106_32 (sequence is synthesized)
gattctgctatcttggcctcacagcccttcctgttgattacaaagcccgtggaagaaaacagaacacaccctcctcagttccgtctaaatgtgtttcttctgcttcaattacaccagttc

SEQ ID NO: 214055 - DNA, 120 bp, Artificial Sequence
  ENSG00000116106_33 (sequence is synthesized)
tggggcaaagacactgatgaaacaacacccatacctgaaaagaataaatgtgtgactttcaaatcccctttcgcagtgaaagaaacagcaaacacttaagattcagcatctgttctccag

SEQ ID NO: 214056 - DNA, 120 bp, Artificial Sequence
  ENSG00000116106_34 (sequence is synthesized)
ttgcactgaggaatgcactgtctcgcagcaccagctctgcagagcccttgccccagactctttgcggttttatttatatgtatttccatatttcattcctgtgtgtcactgctgcattgg

SEQ ID NO: 214057 - DNA, 120 bp, Artificial Sequence
  ENSG00000116106_35 (sequence is synthesized)
tgtggcagcaagtgaccaaatgctacaggtcttactatggacaccaggtcaggtgcaaccacacaaaacaaagccagttccatgagctgcctatgatatgcattgcggaagtaacatttt

SEQ ID NO: 214058 - DNA, 120 bp, Artificial Sequence
  ENSG00000116106_36 (sequence is synthesized)
acccagggtgtgccattgcagtgatataaatatatttttttcttagactaaatatgagctgactatctcttttgatgtgtgtacataggtgtgagtgtgtctgtatgcgtgcctgtctgt

SEQ ID NO: 214059 - DNA, 120 bp, Artificial Sequence
  ENSG00000116106_37 (sequence is synthesized)
gtgcgggtgtgtgtatgtgcgtagcctcatgcttaggactacccatgaatgttgtggaatgctacacctggagagttctggttttccaccagtttcaagatgaagaactacatgatacag

SEQ ID NO: 214060 - DNA, 120 bp, Artificial Sequence
  ENSG00000116106_38 (sequence is synthesized)
tggacctggagaccatccccttggaaagacaacccagagatgttcagcatcctgtatctacacgcatcctgtatctacacgtgtattttgtagctgtcacactaaccttaataagaattc

SEQ ID NO: 214061 - DNA, 120 bp, Artificial Sequence
  ENSG00000116106_39 (sequence is synthesized)
tacagctttggacagaggcattttcaccttaatggtgaagtaatttaaaatataaatccattcaggtgacaacccatcatcaaaattacaaattttctgattgaactcatctgaatcatc

SEQ ID NO: 214062 - DNA, 120 bp, Artificial Sequence
  ENSG00000116106_40 (sequence is synthesized)
agttccttgatggagagagagaaggagatggaatgtgtctggtaaccccaaatggagtacaagtagcctttgttttcctgcataaatggacttgttgaatgcgaacgaatatatgcaatt

SEQ ID NO: 214063 - DNA, 120 bp, Artificial Sequence
  ENSG00000116106_41 (sequence is synthesized)
catatacttttggagatgaacgtagatatgtgtgtcagctttgagatggtgtgtcctggattaatactttgtctcccaatatcacagaaaaatacatgccagtgactcttgaggttaagg

SEQ ID NO: 214064 - DNA, 120 bp, Artificial Sequence
  ENSG00000116106_42 (sequence is synthesized)
tagttgggatgaaatggcctcaggcaatttcacattccctaattacctggaaagttctacagtaattaatatgcagctaactcctgttgccctcacaagagcatcagccttctagaatcg

SEQ ID NO: 214065 - DNA, 120 bp, Artificial Sequence
  ENSG00000116106_43 (sequence is synthesized)
gagctccggagtgtgaagattcagtattgatatgatatgtataccaaactccagccaacttactgccatttttcataatctgagtggctgccttgcttatcctaagctgtggttgcagaa

SEQ ID NO: 214066 - DNA, 120 bp, Artificial Sequence
  ENSG00000116106_44 (sequence is synthesized)
accgtggccatttatataagctataacatcaaatcagggaaaaatgaggaaaaaaaatagattctgaaccatttattgttgaataagtagagaaaatcatcaataaatatttattacatt

SEQ ID NO: 214067 - DNA, 120 bp, Artificial Sequence
  ENSG00000116106_45 (sequence is synthesized)
ctgacagggtgtgtggcattgtgttctatgccagagtgacaaagttgattcacccctttttggggaccttaatatattttttaagggatgtgcctatgcattgatgcctgaaaaatatgt

SEQ ID NO: 214068 - DNA, 120 bp, Artificial Sequence
  ENSG00000116106_46 (sequence is synthesized)
ataaagaaatgaggttgactcttctgagcagttcatcttttccagaggtaagggtaggaggccaacttcagggtctgggtctgagcccgtgggcaagccctggccgagtgagctccaatg

SEQ ID NO: 214069 - DNA, 120 bp, Artificial Sequence
  ENSG00000116106_47 (sequence is synthesized)
ctaactcatgtgccgatctctagagcagtgggaaactaccccgctgcaccaaatcaagtagcttcaccttgtgtatgcaggccccaagttattttttagcaatcttacgagtgaaatgtt

SEQ ID NO: 214070 - DNA, 120 bp, Artificial Sequence
  ENSG00000116106_48 (sequence is synthesized)
ctggtgggttgaaaaacgttcttattttaaagaaaggttgtgctcgctacactgctggtgtgtgcattctgagacctcttgtattcaatctgtgaaggatatgtgtattaatccgtacac

SEQ ID NO: 214071 - DNA, 120 bp, Artificial Sequence
  ENSG00000116106_49 (sequence is synthesized)
ccgtatagcctcaatatttgtctgaagacacttaaattctgacccataaaggaaagttctagaagcaatattttcacttatttaacattctccaaacaacatcaagcattgatacacact

SEQ ID NO: 214072 - DNA, 120 bp, Artificial Sequence
  ENSG00000116106_50 (sequence is synthesized)
gaagagtgcgtttattttttgtatcactctaagtatgttggaatatgcaaggactgtggttcaaattagaatgtataaggcatattataatttagttcatactgaataagaaattaacag

SEQ ID NO: 214073 - DNA, 120 bp, Artificial Sequence
  ENSG00000116106_51 (sequence is synthesized)
aacattgttcggttcacacgttccaaactttgagtgatttctggagttagacatagattttctattttgttttaatttgtcaaggtatttttcttcccttcatgaactttaggtacacat

SEQ ID NO: 214074 - DNA, 120 bp, Artificial Sequence
  ENSG00000116106_52 (sequence is synthesized)
aacttatgtcatttatttatggtcttttatacctagtttgtaaaattgtaaaatagcaaactaaatgcaaagagtttgcatttgaaaataataaagtagttgccgtatacaaccctgcaa

SEQ ID NO: 214075 - DNA, 120 bp, Artificial Sequence
  ENSG00000116106_53 (sequence is synthesized)
acgcgtgctcatcttgtgtaaaagtaaaagttgctcatgtcattagctcggctctgagtttgcatgagaaaccagcgcagctctcgagccacgggagaaaacacgatctgctgcggagcc

SEQ ID NO: 214076 - DNA, 120 bp, Artificial Sequence
  ENSG00000116106_54 (sequence is synthesized)
cagtgacctgaaactgtagcagtgactcgagacctgtcctctcctcgacgtcgccctataaccctcccgctttatttaggatccgcttttccgagagcagccactcaggcaacccccgga

SEQ ID NO: 214077 - DNA, 120 bp, Artificial Sequence
  ENSG00000116106_55 (sequence is synthesized)
gcctatcgtaaattcacatcagcaagtgatgtatggagctatggaatcgttatgtgggaagtgatgtcgtacggggagaggccctattgggatatgtccaatcaagatacctaacactgc

SEQ ID NO: 214078 - DNA, 120 bp, Artificial Sequence
  ENSG00000116106_56 (sequence is synthesized)
gaggacaaaataaattaattatcctaaagattatttctgcattgaaacaggcctccccatttatcattttccccttttgcttgagagagcaattatccattcatatgctccctggatacc

SEQ ID NO: 214079 - DNA, 120 bp, Artificial Sequence
  ENSG00000116106_57 (sequence is synthesized)
agaggccactttagttaaagaccttgtcaacaagccacccaaaggtttaactatccagatggaatttaaacctactcgtccttttaatatttcattcctagctccccacagctgaggcat

SEQ ID NO: 214080 - DNA, 120 bp, Artificial Sequence
  ENSG00000116106_58 (sequence is synthesized)
ctggaattacagggagtagattctgctatcttggcctcacagcccttcctgttgattacaaagcccgtggaagaaaacagaacacaccctcctcagttccgtctaaatgtgtttcttctg

SEQ ID NO: 214081 - DNA, 120 bp, Artificial Sequence
  ENSG00000116106_59 (sequence is synthesized)
gactatactcaatgaatgcttttggttgcatgacctgcatttcaagccacatgatcgctaatgattagcaagaacgtctcccttcttctgaaacaaggaggtggctttgcatttttgctt

SEQ ID NO: 214082 - DNA, 120 bp, Artificial Sequence
  ENSG00000116117_0 (sequence is synthesized)
accgcaggagcccagagcgcgggcgccgcagaggagttgggagccggcgcaaaagtttcctcccaactctggccccgtgcgccgccgccgccgccgcccactccagcccccggcttgggg

SEQ ID NO: 214083 - DNA, 120 bp, Artificial Sequence
  ENSG00000116117_1 (sequence is synthesized)
ccggccctgccaacgccgccagggccagggccagggccaggaccagcgacagggcagggccggcagtttcgctttggtgggcgcggagcagccgcctgggccgggcaggagtaggagcgg

SEQ ID NO: 214084 - DNA, 120 bp, Artificial Sequence
  ENSG00000116117_2 (sequence is synthesized)
aggagcgggaggaggaggaggaggagccggtgccgcggagctgccgcgtcccgggccgccgggcacctgggaggtaacccctttccgcggccgcccctccccgattcccgccacctgccg

SEQ ID NO: 214085 - DNA, 80 bp, Artificial Sequence
  ENSG00000116117_3 (sequence is synthesized)
ggtggaaggggcgctgccgcgagcctccgggcctcagggtgttccggggagcggcgccccgggtctctgggcccacccgc

SEQ ID NO: 214086 - DNA, 120 bp, Artificial Sequence
  ENSG00000116117_4 (sequence is synthesized)
cagacacctgttcggcccggcccggcgtggtcgccgggggccaggatgaaagtgaccgtgtgcttcggcaggacgggcatcgtggtgccctgcaaggagggccagctgcgcgtcggcgag

SEQ ID NO: 214087 - DNA, 120 bp, Artificial Sequence
  ENSG00000116117_5 (sequence is synthesized)
ctcacccagcaggcgctgcagcggtacctgaagacccgggagaagggtcctggttactgggtgaagattcatcacttagaatatacagatggaggaatcctggatccagatgatgtcttg

SEQ ID NO: 214088 - DNA, 120 bp, Artificial Sequence
  ENSG00000116117_6 (sequence is synthesized)
gcagatgttgttgaagataaagacaagctgattgctgtgtttgaagaacaagaaccactccacaagattgagagccccagtggaaaccctgcagatcggcagagcccagatgcttttgag

SEQ ID NO: 214089 - DNA, 120 bp, Artificial Sequence
  ENSG00000116117_7 (sequence is synthesized)
acagaagtggccgcccaactggccgcatttaagccaattggtggggagattgaagtaaccccttctgctctaaaactaggcactccactgctggtgaggagaagcagtgacccagtgcca

SEQ ID NO: 214090 - DNA, 120 bp, Artificial Sequence
  ENSG00000116117_8 (sequence is synthesized)
ggcccacctgctgatacccagccaagcgcttcacaccctggtggccagagtctgaaactggttgttccagattccacgcagaacttggaagacagagaagttttgaatggtgtacagaca

SEQ ID NO: 214091 - DNA, 120 bp, Artificial Sequence
  ENSG00000116117_9 (sequence is synthesized)
gaactactaacttcgccaagaactaaggacacattgagtgatatgacaagaacagtggagatttctggggaaggaggcccattgggaatacatgtagtgcccttcttttcatctctgagt

SEQ ID NO: 214092 - DNA, 120 bp, Artificial Sequence
  ENSG00000116117_10 (sequence is synthesized)
ggaaggattctaggactcttcatccgaggcattgaagacaacagcaggtccaagcgggagggactatttcacgaaaatgaatgtattgtaaaaatcaacaatgtggatctcgtagacaaa

SEQ ID NO: 214093 - DNA, 120 bp, Artificial Sequence
  ENSG00000116117_11 (sequence is synthesized)
acctttgctcaggctcaagatgtcttccgccaggcaatgaaatctccaagtgtgctcctccacgtgcttcctccacaaaaccgtgaacagtatgaaaagtcagtcattggctctcttaac

SEQ ID NO: 214094 - DNA, 120 bp, Artificial Sequence
  ENSG00000116117_12 (sequence is synthesized)
atttttggtaataatgatggcgttttgaaaaccaaagtgccgcctcctgtccatggaaaatcgggactaaagacagcaaatctcacaggaaccgatagtcctgaaacagatgcatcagct

SEQ ID NO: 214095 - DNA, 120 bp, Artificial Sequence
  ENSG00000116117_13 (sequence is synthesized)
tccctgcaacaaaacaagagtccccgagtaccaaggctgggaggaaaaccatcctctccctcactctcgcctctcatgggatttggcagcaataaaaatgcaaagaaaattaagattgac

SEQ ID NO: 214096 - DNA, 120 bp, Artificial Sequence
  ENSG00000116117_14 (sequence is synthesized)
ctaaagaaaggccctgaaggacttggtttcactgtggttaccagagactcttccatacatggtcccggtcccatttttgtaaaaaacattttaccaaagggagcagcaataaaagatggc

SEQ ID NO: 214097 - DNA, 120 bp, Artificial Sequence
  ENSG00000116117_15 (sequence is synthesized)
cgcctacaatcaggggacagaattttggaggtaaatgggagagatgtcaccggacgaacccaggaagagcttgtggccatgctcaggagcaccaagcagggggagacagcatcgctggtc

SEQ ID NO: 214098 - DNA, 120 bp, Artificial Sequence
  ENSG00000116117_16 (sequence is synthesized)
attgcccgccaagaaggacattttctgccccgagagttgaaaggagaacctgactgctgtgcactctctctggagacaagcgagcagctcacctttgagatccccctgaatgattcaggt

SEQ ID NO: 214099 - DNA, 120 bp, Artificial Sequence
  ENSG00000116117_17 (sequence is synthesized)
tctgctggcctcggggtgagcttaaaagggaacaaatccagagaaactggaacagacttggggatttttatcaaatccatcattcatggaggcgctgcttttaaggatggtcgtctgcga

SEQ ID NO: 214100 - DNA, 120 bp, Artificial Sequence
  ENSG00000116117_18 (sequence is synthesized)
atgaatgaccagctgattgcagttaatggggaatctcttttgggaaagtccaaccacgaagctatggaaacacttaggcggtcaatgtccatggagggaaacatccgagggatgatccag

SEQ ID NO: 214101 - DNA, 120 bp, Artificial Sequence
  ENSG00000116117_19 (sequence is synthesized)
ttggtgattctgaggaggccagagagaccaatggaggatcctgcagagtgtggggcattttccaagccatgctttgagaactgtcaaaatgctgtaaccacctctaggcgaaatgataat

SEQ ID NO: 214102 - DNA, 120 bp, Artificial Sequence
  ENSG00000116117_20 (sequence is synthesized)
agtatcctgcatccacttggcacttgcagtccacaagacaaacagaaaggtctattgctgcccaatgacggatgggccgagagtgaagttccaccttctccaacaccacattctgctctg

SEQ ID NO: 214103 - DNA, 120 bp, Artificial Sequence
  ENSG00000116117_21 (sequence is synthesized)
ggattgggcctcgaagattacagccacagctctggggtggattcagcagtatattttccagatcagcacatcaacttcagatctgtgacaccggccaggcagcctgaatcaattaatttg

SEQ ID NO: 214104 - DNA, 120 bp, Artificial Sequence
  ENSG00000116117_22 (sequence is synthesized)
aaagcctcgaagagcatggaccttgtgccagatgaaagcaaggttcactcattggctggacaaaaatcggaatctccaagcaaagattttggtccaactctgggtttgaaaaagtccagc

SEQ ID NO: 214105 - DNA, 120 bp, Artificial Sequence
  ENSG00000116117_23 (sequence is synthesized)
tccttggagagtctgcagactgcagtggccgaggtcaggaagaatgaccttccctttcacaggccccggccgcacatggttcgaggccgaggctgcaatgagagctttagagcagccatt

SEQ ID NO: 214106 - DNA, 120 bp, Artificial Sequence
  ENSG00000116117_24 (sequence is synthesized)
gacaaatcctacgatggacctgaagaaatagaagctgacggtctgtctgataagagctctcactctggccaaggagctctgaattgtgagtctgcccctcaggggaattcggagctagag

SEQ ID NO: 214107 - DNA, 120 bp, Artificial Sequence
  ENSG00000116117_25 (sequence is synthesized)
gacatggaaaataaagccaggaaagtcaaaaaaacgaaagagaaggagaagaaaaaggaaaagggcaaattgaaagtcaaggagaaaaagcgcaaagaggagaatgaagatccagaaagg

SEQ ID NO: 214108 - DNA, 120 bp, Artificial Sequence
  ENSG00000116117_26 (sequence is synthesized)
aaaataaagaagaagggcttcggcgccatgctgagatttggaaagaagaaagaggataagggtggaaaggctgagcagaaaggtactctgaaacatggtggcctgagagaagaagagctg

SEQ ID NO: 214109 - DNA, 120 bp, Artificial Sequence
  ENSG00000116117_27 (sequence is synthesized)
gagaaaatgaaagaagagcgtgaaaggattggagcaaaacatcaggagctaagggaaaagcaggcaagaggtcttcttgattatgctactggtgcaattggatcagtgtatgatatggat

SEQ ID NO: 214110 - DNA, 120 bp, Artificial Sequence
  ENSG00000116117_28 (sequence is synthesized)
gatgatgaaatggaccccaattatgccagagtgaaccactttcgggaaccatgcacatcagcaaatgtctttagatctccatctccccctcgagctggaccatttggttaccctcgggat

SEQ ID NO: 214111 - DNA, 120 bp, Artificial Sequence
  ENSG00000116117_29 (sequence is synthesized)
ggccatccactgtctccagaaagagaccacttagagggtctctatgccaaggtcaacaagccataccatccactggttccagctgacagtggccgtcctacgggtggaagcactgaccgt

SEQ ID NO: 214112 - DNA, 120 bp, Artificial Sequence
  ENSG00000116117_30 (sequence is synthesized)
atccagaagttgcggaaagagtattatcaggctcggagggaaggtttccctttatatgaagacgacgaaggaagagcaaggccatctgagtatgacctactctgggtgcctggaaggggt

SEQ ID NO: 214113 - DNA, 120 bp, Artificial Sequence
  ENSG00000116117_31 (sequence is synthesized)
ccagatgggaatgcacacaacctccgctttgaagggatggagaggcagtacgcatccttacccaggggaggacccgcagatcctgtagactatctgccagcagcacctcgggggctctac

SEQ ID NO: 214114 - DNA, 120 bp, Artificial Sequence
  ENSG00000116117_32 (sequence is synthesized)
aaggaaagggagcttccctattatccaggggctcatcctatgcaccctcccaaagggagctatccccgccccacagagctcagggtggcagatctccggtatcctcagcactacccaccc

SEQ ID NO: 214115 - DNA, 120 bp, Artificial Sequence
  ENSG00000116117_33 (sequence is synthesized)
ccgccagctccccagcacaaaggaccctttcgacaagacgttccgccttcccctccccagcaccaaagaatgccagcctatcaggaaacaggcagaccagggccccgtgggggcagccca

SEQ ID NO: 214116 - DNA, 120 bp, Artificial Sequence
  ENSG00000116117_34 (sequence is synthesized)
gaccagtacccttaccgaacccaggattcccggcagaagaaccccatgactgcagccgtatagctgagtgccaccgaggccagcccggtccagaaaggaaggtgtctactctacctttgc

SEQ ID NO: 214117 - DNA, 120 bp, Artificial Sequence
  ENSG00000116117_35 (sequence is synthesized)
tcagagagaaaaagaaggggaagggaattggggaggaaaaaaaatcagaaggaagacgaaagatggggctataaaaacaaaactacctgatagttgaaacgctttcagagttgttcaaat

SEQ ID NO: 214118 - DNA, 120 bp, Artificial Sequence
  ENSG00000116117_36 (sequence is synthesized)
cagtgagagtggcaacggaacacacaaacaactaattatggaactctactctggggatcctctctggctagataacctgtgctgatgtgcagacacgtggacatccccctctgagactgg

SEQ ID NO: 214119 - DNA, 120 bp, Artificial Sequence
  ENSG00000116117_37 (sequence is synthesized)
cggtccagaggcagtctctgccaggcagcattacccgctccgaggtggagcctcagcccccttcttagagctgttaagtctaaggtgtggcagagcagacagagatagaggcatctgaag

SEQ ID NO: 214120 - DNA, 120 bp, Artificial Sequence
  ENSG00000116117_38 (sequence is synthesized)
tgagtataggttttttgactaagaaaaaaaacaacagcaaacatgactagtgatcttgaaatattttgtaccgagagaaagactgcatttatttgtagaatttatcaggtttctgatacc

SEQ ID NO: 214121 - DNA, 120 bp, Artificial Sequence
  ENSG00000116117_39 (sequence is synthesized)
actcattggatgtaaacatttcatgtttcctcacttttgatatgaaagtcggtaaaatgcagtattagtcccgggaggatgtgcacagctggtcagagcttccagaaggaatatcttccg

SEQ ID NO: 214122 - DNA, 120 bp, Artificial Sequence
  ENSG00000116117_40 (sequence is synthesized)
aggactaaggtgatcaggttaagagggttcaacatcccacggccctcaccttcctccctcccacattccaggcatggagatatctggtttcagagtcagccccaaatctcctgcctataa

SEQ ID NO: 214123 - DNA, 120 bp, Artificial Sequence
  ENSG00000116117_41 (sequence is synthesized)
ttactttaactggggtctctaaggttcccacttgagggctaaaatgtagttgggaaagagggcctactggggaggtctcacaggaggcagtgccctgggaaatgccaagtccagactcag

SEQ ID NO: 214124 - DNA, 120 bp, Artificial Sequence
  ENSG00000116117_42 (sequence is synthesized)
tgccaagcagtaaccatctgcactcggggacagcgaggagctgaccatggcctctgatgaccagcaggtattagatggaagtgaatgagagagagagagagagagagtatgtgtgtgtgt

SEQ ID NO: 214125 - DNA, 120 bp, Artificial Sequence
  ENSG00000116117_43 (sequence is synthesized)
gtgtatgtgtgtgttcgaacacatatgattgccagtatggagaatgaaagattaataatgctttctggagagtttgatgcaaaagtgggggaaacggagaaaaggcgctaaggctaaatc

SEQ ID NO: 214126 - DNA, 120 bp, Artificial Sequence
  ENSG00000116117_44 (sequence is synthesized)
catctgcatttgctatatttcattagctaaagtcaggtcagggcagggccaaggcctccaattggcaaaggacagtgttatggctttaaaaagctgaaaccccaacctctaagtagatca

SEQ ID NO: 214127 - DNA, 120 bp, Artificial Sequence
  ENSG00000116117_45 (sequence is synthesized)
caatgttttctgagctttgcagtaattttctatggaaactaaaacctctaaaacatacaagctggcccaaatgagaacacaagcaaaagatgtggaagacagcaaaacctgagcactggt

SEQ ID NO: 214128 - DNA, 120 bp, Artificial Sequence
  ENSG00000116117_46 (sequence is synthesized)
ttgaaccaggcactgacatttgaaatgctttaagccttttcacattccttctttattccctccaaaaaaaaaagtcttgagtttaatttaggtctattttggctgagattagcatacctc

SEQ ID NO: 214129 - DNA, 120 bp, Artificial Sequence
  ENSG00000116117_47 (sequence is synthesized)
tgactcacaggatttaataaattatagtattattgaatacataggacatccctctaccccagcttactcttatctttttaatttaaaatagtattctgctaccaagaaggatgcaactgc

SEQ ID NO: 214130 - DNA, 120 bp, Artificial Sequence
  ENSG00000116117_48 (sequence is synthesized)
tagttttagatgtaaatagtgttatttactggactttgtgatattattttcttaactacactttactatggccctgttgaaaacagactatcaagttttttgtctctgttctgtcatctc

SEQ ID NO: 214131 - DNA, 120 bp, Artificial Sequence
  ENSG00000116117_49 (sequence is synthesized)
tcttaagccaggcacctttagagtgtttgcaatttgttcgaagtggttgaggatctcaggccctgctcacgtgaggtggagtgcaggggagctaccggtttccctgctgacctgctgaat

SEQ ID NO: 214132 - DNA, 120 bp, Artificial Sequence
  ENSG00000116117_50 (sequence is synthesized)
gctaccttcccctcgagttgaatacaccttaaggaaaatgataacacgagggacgtgtaacttgttttgaagcattaaaaaccagcagctcttcactatgttccatattttaaccaaact

SEQ ID NO: 214133 - DNA, 120 bp, Artificial Sequence
  ENSG00000116117_51 (sequence is synthesized)
actgtagactactaaacatagccaagccagaacattccttctggattaagcctaggccacttgaggggcagccaggggtgatggtgtcaggtgagaatcctgtgtcttgaaggagtggcc

SEQ ID NO: 214134 - DNA, 120 bp, Artificial Sequence
  ENSG00000116117_52 (sequence is synthesized)
tttacaggaagagtgcccatgttttcacctgcagcgttgccaccagagtgtgcaatacctcctgcacacaggctcagggtaaactgctccaaagctgggttttgtgttgcatacaaagtc

SEQ ID NO: 214135 - DNA, 120 bp, Artificial Sequence
  ENSG00000116117_53 (sequence is synthesized)
aataaaatagttgctaatcctgaatggcagccagtgatgtgaaggtactattaaagtgaacaaaaactagattgcaacagttttctttccttgcttgaagtataacacacgctccatttg

SEQ ID NO: 214136 - DNA, 120 bp, Artificial Sequence
  ENSG00000116117_54 (sequence is synthesized)
atcctgcctgaaagaagctaacattatatttgtgacagacagaggctccatcaagccaagcaacaattaacagctcaagtgtaagatttataaatgcccgtgtactcacccttcaattgt

SEQ ID NO: 214137 - DNA, 120 bp, Artificial Sequence
  ENSG00000116117_55 (sequence is synthesized)
taccacccagaggttacaggactctttcccagcatttaggggaacaggcttttagagtatttagaagaccaggctataatcagtaatgtgcctgggagcaggaaatagctcccaatttat

SEQ ID NO: 214138 - DNA, 120 bp, Artificial Sequence
  ENSG00000116117_56 (sequence is synthesized)
ttatggccttgggaaaactcaatccggtgtctccttgtagctcagaacactaatagcccccctggaagagagtggcacattgagctccaaacccaatcaacatacatccacttggctgca

SEQ ID NO: 214139 - DNA, 120 bp, Artificial Sequence
  ENSG00000116117_57 (sequence is synthesized)
gatctgactgctgggtcatgaaggccgtgaaatgatgtttgccctcaagtcactagatattttaagaagccctatttttctccctttttgcaggagtagagagatgaaagaggacagacc

SEQ ID NO: 214140 - DNA, 120 bp, Artificial Sequence
  ENSG00000116117_58 (sequence is synthesized)
attgaaaacttttagatgcaggagaattgagacttccacaagggagagaaacacagcctccccagaatccattatgccatcgggttgtggcactctcacccttgccataataccgtttcc

SEQ ID NO: 214141 - DNA, 120 bp, Artificial Sequence
  ENSG00000116117_59 (sequence is synthesized)
taacaatatcaaatcagtggatgaaatacaagctcagaaacaggaacattttcctaaatcataacctaatagcaaacaaaaattgaaaaaacaattattctgaagctcattattcttaga

SEQ ID NO: 214142 - DNA, 120 bp, Artificial Sequence
  ENSG00000116117_60 (sequence is synthesized)
tctgtagatatatatgtgttgactcccacaggatggcaccaagtaaagatcttaagagcatagtaggggttctgagaccgactgtcacccgtggatcctgatggggaagaacagaggctt

SEQ ID NO: 214143 - DNA, 120 bp, Artificial Sequence
  ENSG00000116117_61 (sequence is synthesized)
cactgtagctatagttttccaccaagtcaatcaaattaaaacatgactcattgtcccctccaaagattcataaaattcttgagctaaagtgatcttctgaagaaaagccacctaacaatg

SEQ ID NO: 214144 - DNA, 120 bp, Artificial Sequence
  ENSG00000116117_62 (sequence is synthesized)
ttaggaggctcataaagctcatttctcttttccctggtatgcacaaatatcaagcctataaaaaagtaattatttccccaaacctgtaaccactgcattcgttttctttggaggaacatt

SEQ ID NO: 214145 - DNA, 120 bp, Artificial Sequence
  ENSG00000116117_63 (sequence is synthesized)
gtagcatttcaggagggtcgagagatctaaagagtttggtctgaatgtgtgtctgtacaattccctttggcattaaactctgaaacctacaatcaatggccttcaaattggtgttaaatt

SEQ ID NO: 214146 - DNA, 120 bp, Artificial Sequence
  ENSG00000116117_64 (sequence is synthesized)
gggagaacaccctactgctttctgagtctacgagcaacagaaagactggtcttagtgcaattaggcaggagggatttggactcagaaacagccacagaagtatttctcagcactcccagt

SEQ ID NO: 214147 - DNA, 120 bp, Artificial Sequence
  ENSG00000116117_65 (sequence is synthesized)
tcctgccaacttagctggaaacgatgccacagcgagaccagaaagaggagtcgccttaaggtatccctacaaagtcacctttctgataaaaaggagggaaaaaaaagttagatatctaaa

SEQ ID NO: 214148 - DNA, 120 bp, Artificial Sequence
  ENSG00000116117_66 (sequence is synthesized)
ataagcctagaatctcacacacagctgtgacttctaagtgaaactcttttctccctcatgtccttaaatagtcacagaatcacacacagcctgacttttaaagacaagcttggctacagg

SEQ ID NO: 214149 - DNA, 120 bp, Artificial Sequence
  ENSG00000116117_67 (sequence is synthesized)
aaatgaaccaaccccaaagactcttctaacctgtctcctgactgggctccttcagaaagtgttctcctgttccatctgtagggctgcttactactggaacctaaaacaaaacctgttgtt

SEQ ID NO: 214150 - DNA, 120 bp, Artificial Sequence
  ENSG00000116117_68 (sequence is synthesized)
tgtaccatcactttttctggtgtttcctgtgcttttgtgattccaagtctgttcataagttctgaagataaattatgtgaaatcatattttggcatatgggggtggaggatgaattcttt

SEQ ID NO: 214151 - DNA, 120 bp, Artificial Sequence
  ENSG00000116117_69 (sequence is synthesized)
acagactttttaagatgatccatttgtaccacagaaaacattttggaagttgttatatatgagtatataaatttttcttttcatattttacattaaaataaagctttattcagtcattaa

SEQ ID NO: 214152 - DNA, 120 bp, Artificial Sequence
  ENSG00000116117_70 (sequence is synthesized)
cacgcttttcctcgtcttcagccaaatgcatacggctctcaattctgtgctcgttctctttctgcagaggcagaggagctttttggggaaagttacagtgatgacaggacactgtcttaa

SEQ ID NO: 214153 - DNA, 120 bp, Artificial Sequence
  ENSG00000116117_71 (sequence is synthesized)
actttgcagttttaaacacattgataactagatagagatcttttgatagtatatatagtattagttatactaatagctagtatgggctattacttgtatatagttatagcgatagctatt

SEQ ID NO: 214154 - DNA, 120 bp, Artificial Sequence
  ENSG00000116117_72 (sequence is synthesized)
acgtatatggcactgattatgtgccaagtactattttacctgttttatattaagtcatctaaacttccacatcaaggtaagcacatgtttttatctccatttaactgataatgaaattga

SEQ ID NO: 214155 - DNA, 120 bp, Artificial Sequence
  ENSG00000116117_73 (sequence is synthesized)
ggcagaggaaggtttagtaatttgtttaaggtcacatagctaataagtggcaaagcaaggaatttcacccaggtgttctggctccaaaatccttgcttctggccagtacactatactgtt

SEQ ID NO: 214156 - DNA, 120 bp, Artificial Sequence
  ENSG00000116117_74 (sequence is synthesized)
acatttccttcatcttccagtttcgtaatgtccaaggatatcattatatttttgttgtgttaacccaatgctttgcaaaaccataccatgtgagtggtgtacattttcaagctcccaata

SEQ ID NO: 214157 - DNA, 120 bp, Artificial Sequence
  ENSG00000116117_75 (sequence is synthesized)
tcacgaaaatgtggtgccaggattggatgtgtagaactcagcattcagattgaagaaaaacaaaatcattgaccaaaagtgcttataaccagatatacttataactaataggttaagtgg

SEQ ID NO: 214158 - DNA, 120 bp, Artificial Sequence
  ENSG00000116117_76 (sequence is synthesized)
agaataatttcctgaagagatgatattctccttccatataggactgtgggatcttcctgctaaatcctcagttgctttgaagagctgtaattgtgaataatcctctcagatagcctgaga

SEQ ID NO: 214159 - DNA, 120 bp, Artificial Sequence
  ENSG00000116117_77 (sequence is synthesized)
attcaattttggctaatgactatataccattgcaataggtaatcttcgataacatagccatattaaaaattccctaaaagcaagactctttctcactttaagtctcactgtctataacgc

SEQ ID NO: 214160 - DNA, 120 bp, Artificial Sequence
  ENSG00000116117_78 (sequence is synthesized)
atctttggggcctccccaggcgggggtggggggcattgtatatccacacctgtgctgacaagggcagtgggggcctgatttgcatagcagcaggataaaaaccagcctctggcaccactg

SEQ ID NO: 214161 - DNA, 120 bp, Artificial Sequence
  ENSG00000116117_79 (sequence is synthesized)
gagccctaatgtcttctgtaaggaagcagcagcatcaggcgtgctttctagaatccatcctctcctctgcttctctgggattccacgcagaacttggaagacagagaagttttgaatggt

SEQ ID NO: 214162 - DNA, 120 bp, Artificial Sequence
  ENSG00000116117_80 (sequence is synthesized)
atttgtaaacaaaggaagcttttcagaagtgggtaacagtagccagagtttgctggttggatcttccaggaagcaggagctgagaaataggagtgcaaaagttttgttgaggggcatacc

SEQ ID NO: 214163 - DNA, 120 bp, Artificial Sequence
  ENSG00000116117_81 (sequence is synthesized)
tggggaagataaaaaagggaggaagcaggattaggcagagagccctcaatcacagggcaaatctgctgagtcttggccagctcaacaggagctcccgaccaaagatcccctgttctagga

SEQ ID NO: 214164 - DNA, 120 bp, Artificial Sequence
  ENSG00000116117_82 (sequence is synthesized)
cttggcagtaggtaaaattaagactatttaaagcacacatgaggtggaaatggcagaaaacattaatattacaaagataagttaagcaaaaggaacaactagtatgcaaagaaaggcaaa

SEQ ID NO: 214165 - DNA, 120 bp, Artificial Sequence
  ENSG00000116117_83 (sequence is synthesized)
atacagagatgaatgaataattatgggtagggcagtaattattaaatcattgaaagtatgtaaaagaacctaagggttgtattaacaaagaagaggaagctgtatgtgggctttgaggaa

SEQ ID NO: 214166 - DNA, 120 bp, Artificial Sequence
  ENSG00000116117_84 (sequence is synthesized)
cctgttgctgaactctcgttttttggattgcaatgtggtggaattgcaggatatcaagacaggccggttaaaaaggttttctctcagtttagtctctatcagatgcagtgccaagtatct

SEQ ID NO: 214167 - DNA, 120 bp, Artificial Sequence
  ENSG00000116120_0 (sequence is synthesized)
gcagtgagttcgacacaccatgccgactgtcagcgtgaagcgtgatctgctcttccaagccctgggccgcacctacactgacgaagaatttgatgaactatgttttgaatttggtctgga

SEQ ID NO: 214168 - DNA, 120 bp, Artificial Sequence
  ENSG00000116120_1 (sequence is synthesized)
gcttgatgaaattacatctgagaaggaaataataagtaaagaacaaggtaatgtaaaggcagcaggagcctctgatgttgttctttacaaaattgacgtccctgccaatagatatgatct

SEQ ID NO: 214169 - DNA, 120 bp, Artificial Sequence
  ENSG00000116120_2 (sequence is synthesized)
cctgtgtctggaaggattggttcgaggacttcaggtcttcaaagaaaggataaaggctccagtgtataaacgggtaatgcctgatggaaaaatccagaaattgattatcacagaagagac

SEQ ID NO: 214170 - DNA, 120 bp, Artificial Sequence
  ENSG00000116120_3 (sequence is synthesized)
agctaagatacgtccttttgcggtagcagcagttctccgtaatataaagtttactaaagatcgatatgacagcttcattgaacttcaggagaaattacatcagaatatttgcaggaaaag

SEQ ID NO: 214171 - DNA, 120 bp, Artificial Sequence
  ENSG00000116120_4 (sequence is synthesized)
agcactggttgccattggtacccatgatttggacactttgtcgggcccatttacttatactgcaaagcgtccttcagatatcaaattcaagcctctaaataagaccaaggagtatacagc

SEQ ID NO: 214172 - DNA, 120 bp, Artificial Sequence
  ENSG00000116120_5 (sequence is synthesized)
ctgtgaactgatgaacatatacaagactgacaatcacctgaaacattatttacatatcattgaaaacaaacccctgtatccagttatctatgatagcaatggtgtcgtcctttcaatgcc

SEQ ID NO: 214173 - DNA, 120 bp, Artificial Sequence
  ENSG00000116120_6 (sequence is synthesized)
tcccatcatcaatggggatcattccagaataacagtaaatactagaaatatttttattgaatgcacgggaactgactttactaaggcaaaaatagttcttgatattattgtcaccatgtt

SEQ ID NO: 214174 - DNA, 120 bp, Artificial Sequence
  ENSG00000116120_7 (sequence is synthesized)
cagtgaatattgtgagaatcaatttacggtcgaagctgctgaagtggtttttcctaatggaaaatcacatacctttccagaattagcttaccgaaaggagatggtgagagctgacctaat

SEQ ID NO: 214175 - DNA, 120 bp, Artificial Sequence
  ENSG00000116120_8 (sequence is synthesized)
taacaaaaaagttggaatcagagaaactccagaaaatcttgccaaacttctgaccaggatgtatttaaaatcagaagtcataggtgatgggaatcagattgagattgaaatccctccaac

SEQ ID NO: 214176 - DNA, 120 bp, Artificial Sequence
  ENSG00000116120_9 (sequence is synthesized)
cagagctgacattatccatgcatgtgatattgtagaagatgcagctattgcttatggatataacaacattcagatgactctcccgaaaacttacaccatagctaatcaatttcctcttaa

SEQ ID NO: 214177 - DNA, 120 bp, Artificial Sequence
  ENSG00000116120_10 (sequence is synthesized)
taagctcactgaacttctccgacatgacatggcagccgctggcttcactgaagcacttacctttgccctgtgctcccaagaagatattgctgataaactaggtgtggatatctctgcaac

SEQ ID NO: 214178 - DNA, 120 bp, Artificial Sequence
  ENSG00000116120_11 (sequence is synthesized)
aaaggcagtccacataagtaatcctaaaacagctgaatttcaggtggcacgcactacccttcttcctggcctcctgaagaccatagcagcaaatcgtaagatgccccttccactgaaact

SEQ ID NO: 214179 - DNA, 120 bp, Artificial Sequence
  ENSG00000116120_12 (sequence is synthesized)
gtttgaaatctctgacattgtaataaaagattctaatacagatgtaggtgcaaaaaactacagacatctctgtgctgtttattacaacaagaatcctgggtttgagatcattcatgggct

SEQ ID NO: 214180 - DNA, 120 bp, Artificial Sequence
  ENSG00000116120_13 (sequence is synthesized)
gctggacagaattatgcagttgctcgatgtgcctcctggtgaagacaaggggggatatgtgatcaaagcatcagaagggcctgctttcttccccgggcgatgtgcagagatctttgccag

SEQ ID NO: 214181 - DNA, 120 bp, Artificial Sequence
  ENSG00000116120_14 (sequence is synthesized)
gggtcaaagcgtcgggaagcttggggtccttcatcctgacgttatcaccaaatttgagctgaccatgccctgctcctccctagaaatcaatgttggaccctttttgtgaagattggtctc

SEQ ID NO: 214182 - DNA, 120 bp, Artificial Sequence
  ENSG00000116120_15 (sequence is synthesized)
tgtggtgtgattctcttcccaggtgtccctttctcctcccctagtgtccttaagtcctcctccacagggaacatctatttgggctttgatgtttaataaagtagaaagcactgtctggct

SEQ ID NO: 214183 - DNA, 120 bp, Artificial Sequence
  ENSG00000116120_16 (sequence is synthesized)
gtgtgggtagagaccatcctttccctgcatattaggccagcttgtgccatataccagtgtggtgtctgtgtgtgaagctgcattgttgggtaaaagccccgtggagtgctggagaaatgc

SEQ ID NO: 214184 - DNA, 120 bp, Artificial Sequence
  ENSG00000116120_17 (sequence is synthesized)
actagcagagtgcaggatctgttctgaaaggcagacgtgctcctcagacatcagaacatcacattggaacggattactcctgcataacaagatcccatttctttccttattgataaaaca

SEQ ID NO: 214185 - DNA, 120 bp, Artificial Sequence
  ENSG00000116120_18 (sequence is synthesized)
agataatcgatgagaattcatgttgcatgagttcgagataactgaggggtttagctttgattttctacatttgacatgtattcatcattgagaaacactaaaataacaatatttttagaa

SEQ ID NO: 214186 - DNA, 120 bp, Artificial Sequence
  ENSG00000116120_19 (sequence is synthesized)
aacgtttaagaatcaattatggtccaacaattatagcttctgaggtcagtttaaagtgaaagaaaaatctgtaatacaaggattcaaaatatgtgagggtgcataggtattttttactct

SEQ ID NO: 214187 - DNA, 120 bp, Artificial Sequence
  ENSG00000116120_20 (sequence is synthesized)
atctgtgatactctaagatagagtacatgcaacaaagatctgttctgctgtaagagttaaaatggacaagtattgatatcaatgcagtatgaacattaggaaacaatgagaagcttattt

SEQ ID NO: 214188 - DNA, 120 bp, Artificial Sequence
  ENSG00000116120_21 (sequence is synthesized)
ttgccataggccatacatgttactgtaatcagtcagttataaaatcatggttttaaatacttaattgagctactagtttctctattgtcccagggagatattagacctctctttttctga

SEQ ID NO: 214189 - DNA, 120 bp, Artificial Sequence
  ENSG00000116120_22 (sequence is synthesized)
agctaagcttcagccaatcctccttgttttatatcctaatttcctttcttacttcaatctagaattctccagtaggtaccatctctggaaaaaagctgggtctcatgtttgagacaagtt

SEQ ID NO: 214190 - DNA, 120 bp, Artificial Sequence
  ENSG00000116120_23 (sequence is synthesized)
ttgagacaagttcccaggtactattgaagtaataagaaatatgataaaatataatactttaaagtcccagtagaaatagctaacaaaggctgggtgcgctgtggctcatgcctgtaatcc

SEQ ID NO: 214191 - DNA, 80 bp, Artificial Sequence
  ENSG00000116120_24 (sequence is synthesized)
atcagcctgaccaacatggtgaaatgccatgggcctgcagtcccagctacctgggaggctgagtcaggaaaatctcttga

SEQ ID NO: 214192 - DNA, 120 bp, Artificial Sequence
  ENSG00000116120_25 (sequence is synthesized)
aggcatggtggtgtgggcctgcagtcccagctacctgggaggctgagtcaggaaaatctcttgaaccaggaggtggacgttgcagtgatcccagattgtgccactgccctccagcctggg

SEQ ID NO: 214193 - DNA, 120 bp, Artificial Sequence
  ENSG00000116120_26 (sequence is synthesized)
aaaaaaaaaaagaagaagtagctaacaaagatagtgaaataagaattatgtttatggatcttttgctgagtctactactaggagaaaacctgaccatattacaaccttgaattggggcag

SEQ ID NO: 214194 - DNA, 120 bp, Artificial Sequence
  ENSG00000116120_27 (sequence is synthesized)
cagtgtctaactctgtaagatttgtgaacacacacacttccagctgacccttcacagctctgttataagcagatccttacaacattttaaaaatgaaatatgccctctaaaaataatgca

SEQ ID NO: 214195 - DNA, 120 bp, Artificial Sequence
  ENSG00000116120_28 (sequence is synthesized)
aaacttaataataaaacttaatagtaaaaataaaacaactgttttttaaaaatgtgcaagagttgagcaaacatttcccaaaagatgacatatgaatgagcacttgaaaagatcctcaac

SEQ ID NO: 214196 - DNA, 120 bp, Artificial Sequence
  ENSG00000116120_29 (sequence is synthesized)
atcgttagtcatcagggaaatgcaactaaaattcacaatgacaaactgcatacccattaaaatggctaaaatttaagattcataaatcaaatactgctgagactggagcaagtggaactt

SEQ ID NO: 214197 - DNA, 120 bp, Artificial Sequence
  ENSG00000116120_30 (sequence is synthesized)
tcatgcactgctggtgagtcacaatgtaaaatgttacattgtgactttagaaaacagcttggcagtctcttgaaacatacacctaccatctagccattctattcctaggtttacccatat

SEQ ID NO: 214198 - DNA, 120 bp, Artificial Sequence
  ENSG00000116120_31 (sequence is synthesized)
ggccaaagatttttatgcaagtgttcacagtgttacttatagtagttacaaattgcagtatatccatactatgaaatacttctcagcaataagaaggaatgaactactgatcctcaaaac

SEQ ID NO: 214199 - DNA, 120 bp, Artificial Sequence
  ENSG00000116120_32 (sequence is synthesized)
aacatgaatgaatttcaaaacagtatgctaagtgaaagcaagagacacaaaagactctatttaattctatttacctgagagtctaaaaaagtcaaaagcaggtggtcggcaggacctcag

SEQ ID NO: 214200 - DNA, 120 bp, Artificial Sequence
  ENSG00000116120_33 (sequence is synthesized)
gaaagagaactgactgcagtgggttaagagaaaactttttggggtgatggaaattttatcttaattgaggtggtaggtgtacttcaggtgtaggttatacctttgtaaagctgggagaaa

SEQ ID NO: 214201 - DNA, 120 bp, Artificial Sequence
  ENSG00000116120_34 (sequence is synthesized)
aagaatgtaatgtaacatgtagtattttactgattttaactacataacaccagttgataaatgcctagagaaatagcctgaactgtagaattggcagttgtgctcaaggtggctcactgg

SEQ ID NO: 214202 - DNA, 120 bp, Artificial Sequence
  ENSG00000116120_35 (sequence is synthesized)
tccacagctattaatgatatattctcccttagtttcaggttcgctctagttaaaatcatggcttatggatcatcatatgatagcccttgttgaagtaggtggaaccatttgttctgtcag

SEQ ID NO: 214203 - DNA, 120 bp, Artificial Sequence
  ENSG00000116120_36 (sequence is synthesized)
cagctacccacctggatatttttgggggtggccaaaattacttgtaatgaaaaacccactaatgcctaattgtatatcccagcatgaaaggggaaagatcaactccatgcatcatgtaga

SEQ ID NO: 214204 - DNA, 120 bp, Artificial Sequence
  ENSG00000116120_37 (sequence is synthesized)
tgtttctgccctcggaagcaggaaatggtaggcagaaaaacagtgtcggctgcattggaagaagcgaatccagctcatgagtcgaggctctgcagccagatcatcttacacttgtccctg

SEQ ID NO: 214205 - DNA, 120 bp, Artificial Sequence
  ENSG00000116120_38 (sequence is synthesized)
gtgaagcatttgaactggagccagggcagtctgtgagtactgccaaaagcctttattacagaagatgcacaccttcttagtaaaaactgggagctctagtattaaagtgaaaattaaatg

SEQ ID NO: 214206 - DNA, 120 bp, Artificial Sequence
  ENSG00000116120_39 (sequence is synthesized)
gaattgatttttgttctagcttagaaaaaacttaaattctaccactacagcctcacagtcctgcagtgctcttctagttttgtttgttttttgtttttttagacggagtctcgctctgtc

SEQ ID NO: 214207 - DNA, 84 bp, Artificial Sequence
  ENSG00000116120_40 (sequence is synthesized)
tagtagagacggggtttcaccacgttagctaggctggtctcgaacttctgacctcaggcgatctgtcccagcctgctcttctgt

SEQ ID NO: 214208 - DNA, 120 bp, Artificial Sequence
  ENSG00000116120_41 (sequence is synthesized)
cgcccagcctgctcttctgtttttaaattatttttgaattgatcttttttcacattttaatttttttggtttaataacggtatgagagtaggaattctccctgatgtgtagggtgaaaac

SEQ ID NO: 214209 - DNA, 120 bp, Artificial Sequence
  ENSG00000116120_42 (sequence is synthesized)
agttgagtttcagagagatcaataacttactcagaagtcacatagccaataaatgagtttgagacactataaaagagtgacttggagtccacagaccactcactgatttgcattatttac

SEQ ID NO: 214210 - DNA, 120 bp, Artificial Sequence
  ENSG00000116120_43 (sequence is synthesized)
ttatttatgcgaaagtaaataatgggactttctacactttttaaaaatataaaaataatgggagacaaaaagttaaaaattgttaagtccaatactttaaaaaaactctgcaaactgtgg

SEQ ID NO: 214211 - DNA, 120 bp, Artificial Sequence
  ENSG00000116120_44 (sequence is synthesized)
ccttactgagttaatctacctttcttcctcctgattccctgaagtaactaactgctgttaacaatttagcctgtattgttccttagtttggacattttccttgatttgtacagtcagcca

SEQ ID NO: 214212 - DNA, 120 bp, Artificial Sequence
  ENSG00000116120_45 (sequence is synthesized)
cacacacctgctcacatttttgggggtcatgctctacttactggtttgcaacaagttttgttttttattttacatatatctcatgacatttcacttaatatgccccattttttcaggtca

SEQ ID NO: 214213 - DNA, 120 bp, Artificial Sequence
  ENSG00000116120_46 (sequence is synthesized)
gtgcctatagacctatctcattcttttaaatgaggtaatattctattgtacagatgtccgtaattgttcaattattcccttgttggtggacattcagttgtttccaactgtttgcaatta

SEQ ID NO: 214214 - DNA, 120 bp, Artificial Sequence
  ENSG00000116120_47 (sequence is synthesized)
taaacactgctccaatgaaccccctatcctgctaaatagcactggcttaggaccccaaggaaaaccagtcctaatgggtgcaagactgtataaatatccacatttgacagacacattcag

SEQ ID NO: 214215 - DNA, 120 bp, Artificial Sequence
  ENSG00000116120_48 (sequence is synthesized)
agatgcatagagttcattagatatttctttgatgtgacgtttgtacttgaactatatattattccagtaccttacatcttagatgtagaagtcgctaggtcaaaggatgtgttttgaatt

SEQ ID NO: 214216 - DNA, 120 bp, Artificial Sequence
  ENSG00000116120_49 (sequence is synthesized)
taaaacatgttgaatgactgttctcacattttaaacaggagtaatctactacaaaccagccagcctaaccactgcccctgctctcagcaatgatgggctcatcagcttggtaagagagaa

SEQ ID NO: 214217 - DNA, 120 bp, Artificial Sequence
  ENSG00000116120_50 (sequence is synthesized)
cattactcacaatcttgcttctcaatcttaatctatttgtgcttggtgttttatataacatcactaaccctaatacttgagtatttactttggcccttctgtccattttatccaaaagca

SEQ ID NO: 214218 - DNA, 120 bp, Artificial Sequence
  ENSG00000116120_51 (sequence is synthesized)
aacagatagccttcaagggacaccattgccttaagcagaatatgcctcctaagcattgaaagcctttgacccatctgatatccaagttctggcttattatgttattagggccttgaataa

SEQ ID NO: 214219 - DNA, 120 bp, Artificial Sequence
  ENSG00000116120_52 (sequence is synthesized)
ctttatgtatattattatggactgaatgtatccccacaaattcatgttgaccctctgacctccagtgtgatggtctttggagatgaggcctttggcaggtgattagagctagatgaggtc

SEQ ID NO: 214220 - DNA, 120 bp, Artificial Sequence
  ENSG00000116120_53 (sequence is synthesized)
atgagagggaggccctcatgaaaggctcagtggcctgataagaagaaacaccagagagcttgctctgtttctctgcctacctggcgcacacatacagaagaggtgatatgaccacacagc

SEQ ID NO: 214221 - DNA, 120 bp, Artificial Sequence
  ENSG00000116120_54 (sequence is synthesized)
aacatggtggccaccagcaagctaggagagggatcagaatgaaacctattttgctggcaccttgatcttgaaattctagcctccagaactgtgagaaataaaattcttttattgaagcca

SEQ ID NO: 214222 - DNA, 69 bp, Artificial Sequence
  ENSG00000116127_0 (sequence is synthesized)
ctcctcctctgccgcccagagcgagacaccaacatggagcccgaggatctgccatggccgggcgagcct

SEQ ID NO: 214223 - DNA, 120 bp, Artificial Sequence
  ENSG00000116127_1 (sequence is synthesized)
gcagcggcggcggcggcgaacgtggacgacgtagtggtcgtggaggaggtggaggaagaggcggggcgggagttggactccgactctcactacgggccccagcatctggaaagtatagac

SEQ ID NO: 214224 - DNA, 120 bp, Artificial Sequence
  ENSG00000116127_2 (sequence is synthesized)
gacgaggaggacgaggaggccaaggcctggctgcaggcgcaccccggcaggattttgcctccgctgtcgcccccgcagcaccgctactcggagggcgagcggacctccctggagaagatt

SEQ ID NO: 214225 - DNA, 120 bp, Artificial Sequence
  ENSG00000116127_3 (sequence is synthesized)
gttccattgacctgtcatgtatggcaacagatagtatatcaaggcaatagtagaacacaaatttctgatactaatgtggtctgtttggaaacaacagctcagcggggttctggggatgat

SEQ ID NO: 214226 - DNA, 120 bp, Artificial Sequence
  ENSG00000116127_4 (sequence is synthesized)
cagaaaacagaatcttggcattgtcttcctcaagaaatggactcttcccaaaccttggatacatcccagactaggtttaatgtgagaacggaagatactgaagtgacagacttcccctct

SEQ ID NO: 214227 - DNA, 120 bp, Artificial Sequence
  ENSG00000116127_5 (sequence is synthesized)
ctggaggagggcatattgacgcaatcagaaaatcaagtaaaggaacccaacagagatctcttctgttctccactgctagtcatacaagatagctttgcttctcctgatttgcctttgctg

SEQ ID NO: 214228 - DNA, 120 bp, Artificial Sequence
  ENSG00000116127_6 (sequence is synthesized)
acctgtttgacacaagaccaagaatttgcgcctgattctttatttcatcaaagtgaactaagttttgcacctctgaggggaattcctgataagtctgaagatactgaatggtcttctcga

SEQ ID NO: 214229 - DNA, 120 bp, Artificial Sequence
  ENSG00000116127_7 (sequence is synthesized)
ccatcggaagttagtgaagctttattccaggctactgcagaagtagcttcagacttagcaagcagtcgctttagtgtatctcagcacccgcttataggcagcacagctgttgggtctcag

SEQ ID NO: 214230 - DNA, 120 bp, Artificial Sequence
  ENSG00000116127_8 (sequence is synthesized)
tgcccttttttaccttctgaacaagggaataatgaagagactatttcgtctgttgatgaactgaaaattcccaaagactgtgatcgttatgatgatctttgttcatatatgtcatggaag

SEQ ID NO: 214231 - DNA, 120 bp, Artificial Sequence
  ENSG00000116127_9 (sequence is synthesized)
acacgaaaagatacacagtggcctgaaaacaatttagctgataaagatcaagtttcagttgcaacttcatttgacataactgatgaaaacatagctactaaaagaagtgaccattttgat

SEQ ID NO: 214232 - DNA, 120 bp, Artificial Sequence
  ENSG00000116127_10 (sequence is synthesized)
gctgctcgttcatatgggcagtattggacacaggaagattcatctaagcaggcagaaacatatttaaccaagggcctgcaggggaaggttgagtctgacgtcattactctggatggccta

SEQ ID NO: 214233 - DNA, 120 bp, Artificial Sequence
  ENSG00000116127_11 (sequence is synthesized)
aatgaaaatgctgttgtatgcagtgaaagagttgctgaactacaaagaaagccaacaagagagtcggaatatcactcttcagatctcagaatgttgaggatgtctcctgacactgtgcca

SEQ ID NO: 214234 - DNA, 120 bp, Artificial Sequence
  ENSG00000116127_12 (sequence is synthesized)
aaggctcctaaacatttaaaagcaggagacacttctaaaggaggcatagctaaagttactcaatccaacttgaagtcaggcatcactaccactcctgttgattcagacattggatctcat

SEQ ID NO: 214235 - DNA, 120 bp, Artificial Sequence
  ENSG00000116127_13 (sequence is synthesized)
ttatccttgtcccttgaggacctgtctcagttggctgtaagttctcctctagaaactactactggtcaacacactgatactctcaaccaaaagacattagcagatactcatctaactgaa

SEQ ID NO: 214236 - DNA, 120 bp, Artificial Sequence
  ENSG00000116127_14 (sequence is synthesized)
gagactctgaaagtcacagctattcctgaaccagctgaccagaagactgcaacaccaacagtactctctagttcccactcacatagggggaagcccagcattttctaccagcagggcttg

SEQ ID NO: 214237 - DNA, 120 bp, Artificial Sequence
  ENSG00000116127_15 (sequence is synthesized)
ccagacagtcatctaactgaagaggctttgaaagtttcagctgctcctggactagctgaccagacaactggcatgtcaactctaacctctacttcctactcacatagagagaagcctggt

SEQ ID NO: 214238 - DNA, 120 bp, Artificial Sequence
  ENSG00000116127_16 (sequence is synthesized)
actttttaccaacaagagttaccagagagtaacttaaccgaagagcctttggaagtttcagctgctcctggcccagtggagcagaagacgggaatacctacagtatcctctacatcccac

SEQ ID NO: 214239 - DNA, 120 bp, Artificial Sequence
  ENSG00000116127_17 (sequence is synthesized)
tcacatgtagaggacctcctctttttctatcgacagaccttgccagatggtcatctaactgatcaggctctgaaagtctcagctgtgtctggaccagctgaccagaagactgggacagca

SEQ ID NO: 214240 - DNA, 120 bp, Artificial Sequence
  ENSG00000116127_18 (sequence is synthesized)
acagtactctctactccccactcacatagagagaagcctggtattttttaccaacaagagttcgcagacagtcatcaaactgaagagactcttactaaagtttcagccactcctggacca

SEQ ID NO: 214241 - DNA, 120 bp, Artificial Sequence
  ENSG00000116127_19 (sequence is synthesized)
gctgaccagaagactgagataccagcagtacagtctagttcttactcacaaagagaaaagcctagtattttgtacccacaggacttagcagacagtcatctacctgaagagggtctgaaa

SEQ ID NO: 214242 - DNA, 120 bp, Artificial Sequence
  ENSG00000116127_20 (sequence is synthesized)
gtttcagctgttgctggaccagctgaccagaagactggcctaccaacagtaccctctagtgcatactcacacagagagaagctccttgttttctaccaacaggccttgctggacagccat

SEQ ID NO: 214243 - DNA, 120 bp, Artificial Sequence
  ENSG00000116127_21 (sequence is synthesized)
ctacccgaagaggctctgaaagtttcagctgtttctggaccagctgacggaaagactgggacaccagctgtaacctctacttcctctgcgtcctcttcacttggagaaaagcccagtgct

SEQ ID NO: 214244 - DNA, 120 bp, Artificial Sequence
  ENSG00000116127_22 (sequence is synthesized)
ttctatcagcagaccttacccaatagtcatctaactgaagaggctctgaaagtatcaattgttcctggaccaggtgatcagaagactgggataccctcagcaccatctagtttctactca

SEQ ID NO: 214245 - DNA, 120 bp, Artificial Sequence
  ENSG00000116127_23 (sequence is synthesized)
cacagagagaagcccattattttttcccagcagaccctgccagactttcttttccctgaagaagctctgaaggtttcagctgtttctgtattggctgcccagaagactgggacaccaaca

SEQ ID NO: 214246 - DNA, 120 bp, Artificial Sequence
  ENSG00000116127_24 (sequence is synthesized)
gtgtcctctaattctcactcacatagcgagaaatctagtgttttctaccagcaagagttgccagacagtgatctacctagagaatctctgaaaatgtctgctattcctggactgactgac

SEQ ID NO: 214247 - DNA, 120 bp, Artificial Sequence
  ENSG00000116127_25 (sequence is synthesized)
cagaagactgtcccaacaccaacagtaccttcaggttccttctcacatagagagaagcccagtattttctatcaacaggagtggccagatagttatgcaactgaaaaggctctgaaagtt

SEQ ID NO: 214248 - DNA, 120 bp, Artificial Sequence
  ENSG00000116127_26 (sequence is synthesized)
tcaactggccctggaccagctgaccagaagactgagataccagcagtacagtctagttcttacccacagagggagaagcctagtgttttgtacccacaggtgttatcagacagtcatcta

SEQ ID NO: 214249 - DNA, 120 bp, Artificial Sequence
  ENSG00000116127_27 (sequence is synthesized)
cctgaagagagtctgaaagtttcagccttccctggaccagctgaccagatgactgacacaccagcagtaccgtctactttctactcacaaagagagaagcctggtattttctaccaacag

SEQ ID NO: 214250 - DNA, 120 bp, Artificial Sequence
  ENSG00000116127_28 (sequence is synthesized)
accttgccagagagtcatctgcctaaagaggctctgaaaatttcagtagctcctggactagcagaccagaagactggcacaccaactgtaacctcaacttcctactcacaacatagagaa

SEQ ID NO: 214251 - DNA, 120 bp, Artificial Sequence
  ENSG00000116127_29 (sequence is synthesized)
aagcccagcattttccaccagcaggccttgccaggtactcatatacctgaagaggctcagaaagtttcagctgttactggaccaggtaaccagaagacttggataccaagagtactttct

SEQ ID NO: 214252 - DNA, 120 bp, Artificial Sequence
  ENSG00000116127_30 (sequence is synthesized)
accttctactcacaaagagagaaacctggtattttctatcaacagaccttgccaggtagtcacatacctgaagaggcacagaaagtttcacctgttcttggaccagctgaccagaagact

SEQ ID NO: 214253 - DNA, 120 bp, Artificial Sequence
  ENSG00000116127_31 (sequence is synthesized)
gggacaccaactccaacctctgcttcttactcacacacagagaagcctggtattttctaccaacaggtcttgccagataatcatccaactgaagaggctctgaaaatttcagttgcctct

SEQ ID NO: 214254 - DNA, 120 bp, Artificial Sequence
  ENSG00000116127_32 (sequence is synthesized)
gaaccagttgaccagacaactggcacaccagctgtaacctctacttcctactcacaatatagagagaagcccagcattttctaccaacagtcgttgccaagtagtcatctaactgaagag

SEQ ID NO: 214255 - DNA, 120 bp, Artificial Sequence
  ENSG00000116127_33 (sequence is synthesized)
gctaagaatgtttcagcggttcctggaccagctgaccagaagactgtgataccaattttaccctctactttctactcacacacagagaagcctggtgttttctaccaacaggtcttgcca

SEQ ID NO: 214256 - DNA, 120 bp, Artificial Sequence
  ENSG00000116127_34 (sequence is synthesized)
catagtcatccaactgaagaggctctgaaaatttcagttgcctctgaaccagttgaccagacaactggcacaccaactgtaacctctacttcttactcacaacatacagagaagccgagt

SEQ ID NO: 214257 - DNA, 120 bp, Artificial Sequence
  ENSG00000116127_35 (sequence is synthesized)
attttctaccaacagtcgttgccaggtagtcatctaactgaagaggctaagaacgtttcagcggttcctggaccaggtgaccggaagactgggataccaactttaccctctactttctac

SEQ ID NO: 214258 - DNA, 120 bp, Artificial Sequence
  ENSG00000116127_36 (sequence is synthesized)
tcacacacagagaagcctggtagtttctaccaacaggtcttgccacatagtcatctacctgaagaggctttggaagtttcagttgctcctggaccagttgaccagacgattggcacacca

SEQ ID NO: 214259 - DNA, 120 bp, Artificial Sequence
  ENSG00000116127_37 (sequence is synthesized)
actgtaacctccccttccagctcatttggagagaagcccattgttatctacaaacaggcctttccagagggtcatctacctgaagagtctctgaaagtttcagttgctcctggaccagtt

SEQ ID NO: 214260 - DNA, 120 bp, Artificial Sequence
  ENSG00000116127_38 (sequence is synthesized)
ggccagacaactggcgcaccaactataacctctccttcctactcacaacatagagcaaagtctggcagtttctaccaactggcattgctaggtagtcaaatacctgaagaggctctcaga

SEQ ID NO: 214261 - DNA, 120 bp, Artificial Sequence
  ENSG00000116127_39 (sequence is synthesized)
gtttcttctgctcctggaccagctgaccagacaactggcataccaaccataacctctacttcctactcatttggagagaagccgattgttaactacaaacaggcctttccagatggtcat

SEQ ID NO: 214262 - DNA, 120 bp, Artificial Sequence
  ENSG00000116127_40 (sequence is synthesized)
ctacctgaagaggctctgaaagtttccattgtttctggacctactgaaaaaaagactgacataccagcaggacctttaggttccagtgcacttggagagaagcccattactttctaccgg

SEQ ID NO: 214263 - DNA, 120 bp, Artificial Sequence
  ENSG00000116127_41 (sequence is synthesized)
caggctctgctagacagtcctctaaataaagaggttgtgaaagtttcagctgctcctggaccagctgaccagaagactgagacattaccagtacattctactagctactcaaataggggg

SEQ ID NO: 214264 - DNA, 120 bp, Artificial Sequence
  ENSG00000116127_42 (sequence is synthesized)
aagcctgtcattttctaccagcagaccctatcagacagtcatttacctgaagaagctctgaaagttccacctgttcctggaccagatgcccagaagactgagacaccatcagtatcctct

SEQ ID NO: 214265 - DNA, 120 bp, Artificial Sequence
  ENSG00000116127_43 (sequence is synthesized)
agtttatactcatatagagagaagcccattgtcttctaccaacaggccctgccagacagtgagctaactcaagaagctctgaaagtttcagctgttcctcaaccagctgaccagaagact

SEQ ID NO: 214266 - DNA, 120 bp, Artificial Sequence
  ENSG00000116127_44 (sequence is synthesized)
gggttatctactgtaacttcctctttctattcacatacagagaagcctaatatttcttaccagcaagagttgccagatagtcatctaactgaagaggctctgaaagtttcaaatgttcct

SEQ ID NO: 214267 - DNA, 120 bp, Artificial Sequence
  ENSG00000116127_45 (sequence is synthesized)
ggaccagctgaccagaagactggggtatcaacagtaacctctacttcctactcacacagagagaagcccattgtttcctaccagcgagagttgccgcattttactgaagcaggtttgaaa

SEQ ID NO: 214268 - DNA, 120 bp, Artificial Sequence
  ENSG00000116127_46 (sequence is synthesized)
attttaagagttcctggaccagctgaccagaagactggaataaacatcctgccctctaattcctacccacagagagagcactctgtcatttcttatgagcaggagttgccagatcttact

SEQ ID NO: 214269 - DNA, 120 bp, Artificial Sequence
  ENSG00000116127_47 (sequence is synthesized)
gaagtaactttgaaagcaataggggttcctgggcctgctgaccagaagactgggatacaaatagcatcctctagttcctactcaaatagagagaaggccagtatttttcatcagcaggag

SEQ ID NO: 214270 - DNA, 120 bp, Artificial Sequence
  ENSG00000116127_48 (sequence is synthesized)
ttgccagatgttactgaagaagctttaaatgtttttgttgttcctggacaaggtgaccggaagactgagataccaacagtacctttaagttactactcacgtagagagaagcccagtgtt

SEQ ID NO: 214271 - DNA, 120 bp, Artificial Sequence
  ENSG00000116127_49 (sequence is synthesized)
atctctcaacaggagttgccagacagtcatctcacagaagaggctctgaaagtttcacctgtttctataccagcagagcagaagactgggataccaataggactgtctagttcctactca

SEQ ID NO: 214272 - DNA, 120 bp, Artificial Sequence
  ENSG00000116127_50 (sequence is synthesized)
cattcacataaagagaaactcaagatttcaactgtgcatataccagatgaccagaaaactgagtttccagcagctacccttagttcctactcacaaatagagaagcccaagatttcaact

SEQ ID NO: 214273 - DNA, 120 bp, Artificial Sequence
  ENSG00000116127_51 (sequence is synthesized)
gtgattggaccaaatgaccagaagactccatcccagacagcttttcatagttcctattctcaaacagtaaagcccaatattttatttcaacagcagttgccagatagagatcaaagtaaa

SEQ ID NO: 214274 - DNA, 120 bp, Artificial Sequence
  ENSG00000116127_52 (sequence is synthesized)
ggtattctaaagatttcagctgtccctgaactaactgatgtgaatactggaaaaccagtatctctctctagttcttattttcacagagagaaatcgaatattttcagtccacaggaattg

SEQ ID NO: 214275 - DNA, 120 bp, Artificial Sequence
  ENSG00000116127_53 (sequence is synthesized)
tcatgtaactgaagatgtgctgaaggtttcaacaattcctggaccagctggccagaaaacagtattaccaacagctcttcctagttccttttcacatcgagagaaaccagatattttcta

SEQ ID NO: 214276 - DNA, 120 bp, Artificial Sequence
  ENSG00000116127_54 (sequence is synthesized)
tcaaaaggatttgccagatagacatctaactgaagatgctctaaagatctcaagtgctcttgggcaagctgatcaaattaccggattacaaacagttccctctggtacttactcacatgg

SEQ ID NO: 214277 - DNA, 120 bp, Artificial Sequence
  ENSG00000116127_55 (sequence is synthesized)
tgagaatcacaagcttgtttcagaacatgtccaaaggctaatagataatttgaattcttctgactccagtgttagctcaaataatgtgcttttaaattctcaggctgatgacagagttgt

SEQ ID NO: 214278 - DNA, 120 bp, Artificial Sequence
  ENSG00000116127_56 (sequence is synthesized)
aataaataaaccagaatctgcaggttttagagatgttggctctgaagaaatccaggatgcagaaaatagtgctaaaactcttaaggaaattcggacacttttgatggaggcagaaaatat

SEQ ID NO: 214279 - DNA, 120 bp, Artificial Sequence
  ENSG00000116127_57 (sequence is synthesized)
ggcactgaaacgatgcaattttcctgctccccttgcccgtttcagagatattagtgatatttcatttatacaatctaagaaggtggtttgcttcaaagaaccctcttccacgggtgtatc

SEQ ID NO: 214280 - DNA, 120 bp, Artificial Sequence
  ENSG00000116127_58 (sequence is synthesized)
taatggtgatttgcttcacagacagccattcacagaggaaagcccaagcagcaggtgcatacagaaggatattggcacacagacgaatttgaaatgccggagaggcattgaaaattggga

SEQ ID NO: 214281 - DNA, 120 bp, Artificial Sequence
  ENSG00000116127_59 (sequence is synthesized)
gtttattagttcaactacagttagaagtcctctacaggaagcagagagcaaagtcagtatggcattagaagaaactcttaggcaatatcaagcagccaaatctgtaatgaggtctgaacc

SEQ ID NO: 214282 - DNA, 120 bp, Artificial Sequence
  ENSG00000116127_60 (sequence is synthesized)
tgaagggtgtagtggaaccattgggaataaaattattatccctatgatgactgtcataaaaagtgattcaagtagtgatgccagtgatggaaatggttcctgctcgtgggacagtaattt

SEQ ID NO: 214283 - DNA, 120 bp, Artificial Sequence
  ENSG00000116127_61 (sequence is synthesized)
accagagtctttggaatcagtttctgatgttcttctaaacttctttccatatgtttcacccaagacaagtataacagatagcagggaggaagagggtgtgtcagagagtgaggatggtgg

SEQ ID NO: 214284 - DNA, 120 bp, Artificial Sequence
  ENSG00000116127_62 (sequence is synthesized)
tggtagcagtgtagattcactggctgcacatgtgaaaaaccttctgcaatgtgaatcctcactgaatcatgctaaagaaatactcagaaatgcagaggaagaggaaagccgggtacgagc

SEQ ID NO: 214285 - DNA, 120 bp, Artificial Sequence
  ENSG00000116127_63 (sequence is synthesized)
acatgcctggaatatgaagttcaatttagcacatgattgtggatactccatttcagaattaaatgaagatgacaggaggaaagtagaagagatcaaggcagagttatttggtcatggaag

SEQ ID NO: 214286 - DNA, 120 bp, Artificial Sequence
  ENSG00000116127_64 (sequence is synthesized)
aacaactgacttgtccaagggtttacagagtccacggggaatgggatgcaagccagaagctgtatgtagtcacattattattgagagccatgaaaagggatgtttccggactctaacttc

SEQ ID NO: 214287 - DNA, 120 bp, Artificial Sequence
  ENSG00000116127_65 (sequence is synthesized)
tgaacatccacaactagatagacacccttgtgctttcagatctgctggaccctcagaaatgaccagaggacggcagaacccatcatcatgcagagccaagcatgtcaacctttctgcatc

SEQ ID NO: 214288 - DNA, 120 bp, Artificial Sequence
  ENSG00000116127_66 (sequence is synthesized)
cttagaccagaacaactcccatttcaaagtttggaattccttgcagttaaaaagtcattccccatttcagaactttatacctgatgaattcaaaatcagcaaaggtcttcgaatgccatt

SEQ ID NO: 214289 - DNA, 120 bp, Artificial Sequence
  ENSG00000116127_67 (sequence is synthesized)
cgatgaaaagatggacccttggctgtcagaattagtagaacctgcttttgtgccacctaaagaagtggattttcattcttcatcacaaatgccgtccccagaacccatgaaaaagtttac

SEQ ID NO: 214290 - DNA, 120 bp, Artificial Sequence
  ENSG00000116127_68 (sequence is synthesized)
tacctccatcactttttcatctcaccgacattctaaatgcatttccaattcctctgttgttaaggttggtgttactgaaggtagccagtgtactggagcatctgtgggggtatttaattc

SEQ ID NO: 214291 - DNA, 120 bp, Artificial Sequence
  ENSG00000116127_69 (sequence is synthesized)
tcatttcactgaagaacaaaatcctcccagagatcttaaacagaaaacctcttccccttcatcatttaaaatgcatagtaattcacaagataaagaagtgactattttagcagaaggtag

SEQ ID NO: 214292 - DNA, 120 bp, Artificial Sequence
  ENSG00000116127_70 (sequence is synthesized)
aaggcaaagccaaaaattacctgttgattttgagcgttcttttcaagaagaaaaacccttagaaagatcagattttacaggcagtcattctgagcccagtaccagggcaaattgtagcaa

SEQ ID NO: 214293 - DNA, 120 bp, Artificial Sequence
  ENSG00000116127_71 (sequence is synthesized)
tttcaaggaaattcagatttctgataaccatacccttattagcatgggcagaccaagttccaccctaggagtaaacagatcgagttccagactaggagtaaaagagaagaatgtaactat

SEQ ID NO: 214294 - DNA, 120 bp, Artificial Sequence
  ENSG00000116127_72 (sequence is synthesized)
aactccagatcttccttcttgcatttttcttgaacaacgagagctctttgaacaaagcaaagccccacgtgcagatgaccatgtgaggaaacaccattctccctctcctcaacatcagga

SEQ ID NO: 214295 - DNA, 120 bp, Artificial Sequence
  ENSG00000116127_73 (sequence is synthesized)
ttatgtagctccagaccttccttcttgcatttttcttgaacaacgagaactctttgaacagtgcaaagccccatatgtagatcatcaaatgagagaaaaccattctccccttcctcaagg

SEQ ID NO: 214296 - DNA, 120 bp, Artificial Sequence
  ENSG00000116127_74 (sequence is synthesized)
tcaggattctatagcttcagaccttccgtctcccatttctcttgaacaatgccaaagcaaagcgccaggtgtagatgaccaaatgaataaacaccattttccccttcctcaaggtcagga

SEQ ID NO: 214297 - DNA, 120 bp, Artificial Sequence
  ENSG00000116127_75 (sequence is synthesized)
ttgtgtagtggaaaagaataatcaacataagcctaaatcacacatttctaatataaatgttgaagccaagttcaatactgtggtctcccagtcagccccaaatcactgtacattagcagc

SEQ ID NO: 214298 - DNA, 120 bp, Artificial Sequence
  ENSG00000116127_76 (sequence is synthesized)
atctgcatctactcctccttcaaatagaaaagcactttcttgtgttcatataactctttgtcccaagacttcttccaagttggatagtggaactttagatgaaagattccattcattgga

SEQ ID NO: 214299 - DNA, 120 bp, Artificial Sequence
  ENSG00000116127_77 (sequence is synthesized)
tgctgcttctaaagcgaggatgaatagtgagtttaactttgacttacatactgtatcttcgagatcactggaaccaacctccaaattattgaccagtaaacctgtagcacaggatcaaga

SEQ ID NO: 214300 - DNA, 120 bp, Artificial Sequence
  ENSG00000116127_78 (sequence is synthesized)
atctttaggttttctaggacctaaatcttcactggatttccaagtcgtacagccttctcttccagacagtaacactattactcaggacttgaaaaccataccttctcagaatagccagat

SEQ ID NO: 214301 - DNA, 120 bp, Artificial Sequence
  ENSG00000116127_79 (sequence is synthesized)
agtaacctccaggcaaatacaagtgaacatttcagatttcgaaggacattccaatccagaggggaccccagtatttgcagatcgattaccagagaagatgaagaccccactttctgcttt

SEQ ID NO: 214302 - DNA, 120 bp, Artificial Sequence
  ENSG00000116127_80 (sequence is synthesized)
ctctgaaaaattgtcatctgatgcagtcactcagataacaacagaaagtccagaaaagaccctattttcatctgagatttttattaatgctgaagatcgtggacatgaaattatagagcc

SEQ ID NO: 214303 - DNA, 120 bp, Artificial Sequence
  ENSG00000116127_81 (sequence is synthesized)
tggtaaccagaagctacgcaaagctcctgtcaagtttgcctcatcatcttcagtccaacaggttactttttctcgcggcacagatggccagcctttattattgccatataagccttctgg

SEQ ID NO: 214304 - DNA, 120 bp, Artificial Sequence
  ENSG00000116127_82 (sequence is synthesized)
tagtaccaagatgtattatgttccacaattaagacaaattcctccatctccggattccaaatcagataccaccgttgaaagctcccattcaggatccaatgatgccattgctccagactt

SEQ ID NO: 214305 - DNA, 120 bp, Artificial Sequence
  ENSG00000116127_83 (sequence is synthesized)
cccagctcaggtgctaggcacaagagatgatgacctctcagccactgttaacattaaacataaagaaggaatctacagtaagagggtagtgactaaggcatccttgccagtgggagaaaa

SEQ ID NO: 214306 - DNA, 120 bp, Artificial Sequence
  ENSG00000116127_84 (sequence is synthesized)
acccttgcagaatgaaaatgcagatgcctcagttcaagtgctaatcactggggatgagaacctctcagacaaaaaacagcaagagattcacagtacaagggcagtgactgaggctgccca

SEQ ID NO: 214307 - DNA, 120 bp, Artificial Sequence
  ENSG00000116127_85 (sequence is synthesized)
ggctaaagaaaaagaatctttgcagaaagatactgcagattccagtgctgctgctgctgcagagcactcagctcaagtaggagacccagaaatgaagaacttgccagacactaaagccat

SEQ ID NO: 214308 - DNA, 120 bp, Artificial Sequence
  ENSG00000116127_86 (sequence is synthesized)
tacacagaaagaggagatccataggaagaagacagttcccgaggaagcctggccaaacaataaagaatccctacagatcaatattgaagagtccgaatgtcattcagaatttgaaaatac

SEQ ID NO: 214309 - DNA, 120 bp, Artificial Sequence
  ENSG00000116127_87 (sequence is synthesized)
tacccgttctgtcttcaggtcagcaaagttttacattcatcatcccgtacacctaccaagtgatcaagatatttgccatgaatctttgggaaagagtgttttcatgagacattcttggaa

SEQ ID NO: 214310 - DNA, 120 bp, Artificial Sequence
  ENSG00000116127_88 (sequence is synthesized)
agatttctttcagcatcatccagacaaacatagagaacacatgtgtcttcctcttccttatcaaaacatggacaagactaagacagattataccagaataaagagcctcagcatcaatgt

SEQ ID NO: 214311 - DNA, 120 bp, Artificial Sequence
  ENSG00000116127_89 (sequence is synthesized)
gaatttgggaaacaaagaagtgatggatactactaaaagtcaagttagagattatccaaaacataatggacaaattagtgatccacaaagggatcagaaggtcaccccagagcaaacaac

SEQ ID NO: 214312 - DNA, 120 bp, Artificial Sequence
  ENSG00000116127_90 (sequence is synthesized)
tcagcacactgtgagtttgaatgaactgtggaacaagtatcgggagcgacagaggcaacagagacagcctgagttgggtgacaggaaagaactgtccttggtggaccgacttgatcgttt

SEQ ID NO: 214313 - DNA, 120 bp, Artificial Sequence
  ENSG00000116127_91 (sequence is synthesized)
ggctaaaattcttcagaatccaatcacacattctctccaggtctcagaaagtacacatgatgatagcagaggggaacgaagtgtgaaggaatggagtggtagacaacagcagagaaataa

SEQ ID NO: 214314 - DNA, 120 bp, Artificial Sequence
  ENSG00000116127_92 (sequence is synthesized)
gcttcagaaaaagaagcggtttaaaagcctagagaaaagccataaaaatacaggcgagcttaaaaaaagcaaggtgctttctcatcatcgagctgggaggtctaatcaaattaaaattga

SEQ ID NO: 214315 - DNA, 120 bp, Artificial Sequence
  ENSG00000116127_93 (sequence is synthesized)
acagattaaatttgataaatatattctgagtaaacagccaggttttaattatataagcaacacttcttcggattgtcggccctcagaggagagtgagctgctcacagatactaccaccaa

SEQ ID NO: 214316 - DNA, 120 bp, Artificial Sequence
  ENSG00000116127_94 (sequence is synthesized)
catcctttccggcaccacttctactgtcgaatcagatatattgacccaaacagatagagaggtggctctgcacgaaaggagtagctctgtttccactattgacactgcccggctgattca

SEQ ID NO: 214317 - DNA, 120 bp, Artificial Sequence
  ENSG00000116127_95 (sequence is synthesized)
agcttttggccatgaaagagtatgcttgtcacccagacgaattaaattatatagcagcatcaccaaccaacagaggagataccttgagaagcggagcaaacacagcaagaaagtgctgaa

SEQ ID NO: 214318 - DNA, 120 bp, Artificial Sequence
  ENSG00000116127_96 (sequence is synthesized)
tacaggtcatcccctagtgacttctgagcacaccagaaggagacacatccaggtagcaaaccatgtgatttcttctgactctatttcctcttctgccagtagtttcctgagctcaaactc

SEQ ID NO: 214319 - DNA, 120 bp, Artificial Sequence
  ENSG00000116127_97 (sequence is synthesized)
tactttttgcaacaagcagaatgtacacatgttaaacaagggcatacaagcaggtaacttggagattgtgaacggtgccaaaaaacacactcgagatgttgggataactttcccaactcc

SEQ ID NO: 214320 - DNA, 120 bp, Artificial Sequence
  ENSG00000116127_98 (sequence is synthesized)
aagttccagcgaggctaaattggaagagaacagtgatgtgacttcttggtcagaagaaaaacgtgaagagaaaatgctctttaccggttatcctgaggacagaaagttaaaaaagaacaa

SEQ ID NO: 214321 - DNA, 120 bp, Artificial Sequence
  ENSG00000116127_99 (sequence is synthesized)
gaagaattcccatgaaggagtttcctggtttgttcctgtggaaaatgtggagtctagatcaaagaaggaaaacgtgcctaacacttgtggccctggcatctcctggtttgaaccaataac

SEQ ID NO: 214322 - DNA, 120 bp, Artificial Sequence
  ENSG00000116127_100 (sequence is synthesized)
caagaccagaccctggagggagccactgcgggagcagaactgtcaggggcagcacctggacggtcggggctacctggcaggcccaggcagagaggctggcagagacctactgaggccatt

SEQ ID NO: 214323 - DNA, 120 bp, Artificial Sequence
  ENSG00000116127_101 (sequence is synthesized)
tgtgagagcaacccttcaggaatcgcttcagtttcacagacctgacttcatctcccgctctggggagcggataaagcgcctgaagttaatagtccaggagaggaagctgcagagcatgtt

SEQ ID NO: 214324 - DNA, 120 bp, Artificial Sequence
  ENSG00000116127_102 (sequence is synthesized)
acagaccgagcgggatgcactattcaacattgacagggaacggcagggccaccagaatcgcatgtgcccgctgcccaagagagtcttcctggctatccagaagaacaagcctatcagcaa

SEQ ID NO: 214325 - DNA, 120 bp, Artificial Sequence
  ENSG00000116127_103 (sequence is synthesized)
gaaggaaatgattcagaggtccaaacggatttatgagcagcttccagaagtacagaaaaagagagaagaagagaagagaaaatcagaatataagtcataccggctgcgagcccagctata

SEQ ID NO: 214326 - DNA, 120 bp, Artificial Sequence
  ENSG00000116127_104 (sequence is synthesized)
taaaaagagagtgaccaatcaacttctggggagaaaagttccctgggactgacacaagtttattttcctcagagccttggaattctattttatgaacctagagaagcagaatccttactt

SEQ ID NO: 214327 - DNA, 120 bp, Artificial Sequence
  ENSG00000116127_105 (sequence is synthesized)
ttgtgagtctggttgaataaagcttattctttgtccatgtgtattttagaaatagtaacttctaaagagtctggaacaaagtggtgattaaaattcctaatggtttgggagcaatacttt

SEQ ID NO: 214328 - DNA, 120 bp, Artificial Sequence
  ENSG00000116127_106 (sequence is synthesized)
ctgcatagtggccttgtccaatggcctgtgtgttacaatgatatgatcatttctcaagaataagtccctttttgtatgtgtttttatacttttagaaaataaaaactttagattaactca

SEQ ID NO: 214329 - DNA, 120 bp, Artificial Sequence
  ENSG00000116127_107 (sequence is synthesized)
attcagaggtccaaacgcaatcccatttctaggaattgatcccatagggtgagaaagaacagtgttctccagaacacagatttatgagcagcttccagaagtacagaaaaagagagaaga

SEQ ID NO: 214330 - DNA, 120 bp, Artificial Sequence
  ENSG00000116127_108 (sequence is synthesized)
atccaagagcaggccctgccctcaagcacggttcagagctttcagatcctgccccctgggctccctgccatgaagaggacactgggaaaagaacccatggtgcatgaggtcaactcatag

SEQ ID NO: 214331 - DNA, 120 bp, Artificial Sequence
  ENSG00000116127_109 (sequence is synthesized)
ttcttccctttcttgctgggcaaggtaatgaagcacttttggccaatttacctgtaaaatgagagggttaatacctctaagcccctctttacataaactctaaaacaatgtgactatttc

SEQ ID NO: 214332 - DNA, 120 bp, Artificial Sequence
  ENSG00000116127_110 (sequence is synthesized)
ccagaataaatgtattatactcaagtttaaacattatgagaaagttgtgagagtcatttctcacttatggcactgaaaaaaaaaaaagcacatcatggtatgaatgactcatatgcaaaa

SEQ ID NO: 214333 - DNA, 120 bp, Artificial Sequence
  ENSG00000116127_111 (sequence is synthesized)
tgactcatatgcaaaagatgaaaaacttctcactaatttgcatgtcttaggctcctctttattagaaacctaaatgtaaataaagaatattttaggccaggtacggtggctcatgcctgt

SEQ ID NO: 214334 - DNA, 82 bp, Artificial Sequence
  ENSG00000116127_112 (sequence is synthesized)
atcccagctactcagtaggctgagccgggaggagatggtgccactgtactccagtctgggcgacagaacgagactccatctc

SEQ ID NO: 214335 - DNA, 120 bp, Artificial Sequence
  ENSG00000116127_113 (sequence is synthesized)
ccctcttcatggactttttagttaagctttgcacacaggtgaaaaaaacaagccatttgccctttcctctctataccatttcttaccaactggaaaagagtgagaaagtgtagtacagtg

SEQ ID NO: 214336 - DNA, 120 bp, Artificial Sequence
  ENSG00000116127_114 (sequence is synthesized)
agtgacttctgagcacaccagaaggagacacatccagatacaaggcagcaagttcacagtatctcaagcttcctccaaatgcatctcaacagtttgaattggattagaaagaggacttgt

SEQ ID NO: 214337 - DNA, 120 bp, Artificial Sequence
  ENSG00000116127_115 (sequence is synthesized)
ctggggcctccagtctgcatgtagtctccatttgatttccaaggcagagaataccccctggctaactttggaaatgaaggcagctccattgtcactctggatcaatcaaggacacacgca

SEQ ID NO: 214338 - DNA, 120 bp, Artificial Sequence
  ENSG00000116127_116 (sequence is synthesized)
ggaggaacagtagcacaaaggcttcccggtgccttgtgggtgaaagaaaggcttccagggaaaggagagaaacacccagggatcccggtgacgtcgggaagcagcacccagaccatgtaa

SEQ ID NO: 214339 - DNA, 120 bp, Artificial Sequence
  ENSG00000116127_117 (sequence is synthesized)
ggacaccgcctgcagggggagactcaaggcctgggaagattttctaatctgtgccttgagtcgggtggggggattttctgggaaaagaaaaccagacacagtaggacaaatattgtatag

SEQ ID NO: 214340 - DNA, 120 bp, Artificial Sequence
  ENSG00000116127_118 (sequence is synthesized)
tttcacttatatgaaattgtcagaataggcaagttcgtagagacagaatgtagaacagggctttccgggggctagaggagaagacaaggagttcttgcctagtgggtacagagtttctgt

SEQ ID NO: 214341 - DNA, 120 bp, Artificial Sequence
  ENSG00000116127_119 (sequence is synthesized)
ttgaaatgatgaaaaacttctggaaatagattgtggtgacagttacacaccattgtgaacataattagtaccactgaactgtacacgttaaaatggttgtatgttatatatattttacca

SEQ ID NO: 214342 - DNA, 120 bp, Artificial Sequence
  ENSG00000116128_0 (sequence is synthesized)
agaccagagcagacaataggcccctaaagtgttccccctaagttgctttgatgttgtcctggtgtcttgataccaggaggccagggattgcgggaaaagggtcttttttgtcttcattca

SEQ ID NO: 214343 - DNA, 120 bp, Artificial Sequence
  ENSG00000116128_1 (sequence is synthesized)
ctttcccccctcagtttctgaaatgattctccagaatttctcctcataaaaaaggactgaatgtgggcccagttggcgtcattctgctttgacctaaacattcccatctgattgggtggc

SEQ ID NO: 214344 - DNA, 120 bp, Artificial Sequence
  ENSG00000116128_2 (sequence is synthesized)
agagatcatttttggaaagttcttccgtgtcccgatgtagaagaaatagcaaattggacatattgaaagacaagggtcatctttgagaagggggttcctggactcctcacctccaggatg

SEQ ID NO: 214345 - DNA, 120 bp, Artificial Sequence
  ENSG00000116128_3 (sequence is synthesized)
agcactgcagtgtcgtgacccttggggttttgtatgccctggagatgcgagattttcctctggcagcaggaggcacgcacccagagaatgctggagctgcaaggggaaaggacccacttc

SEQ ID NO: 214346 - DNA, 120 bp, Artificial Sequence
  ENSG00000116128_4 (sequence is synthesized)
cacagcagagaaaaacaaagaggaaaaaggcatacaggcagcgagcgctaagggacgcacccagcaagcagtgggccagtgccactgcccccagcagctgtttctgctgcaacccgagag

SEQ ID NO: 214347 - DNA, 120 bp, Artificial Sequence
  ENSG00000116128_5 (sequence is synthesized)
gaactcggtgagcctgtcccgtttgtgactgcaagctcaggatttcaatcaatgcattccagtaaccctaaagtgaggagctctccatcaggaaacacacagagtagccctaagtcaaag

SEQ ID NO: 214348 - DNA, 120 bp, Artificial Sequence
  ENSG00000116128_6 (sequence is synthesized)
caggaggtgatggtccgtccccctacagtgatgtccccatctggaaacccccagctggattccaaattctccaatcagggtaaacaggggggctcagccagccaatcccagccatccccc

SEQ ID NO: 214349 - DNA, 120 bp, Artificial Sequence
  ENSG00000116128_7 (sequence is synthesized)
tgtgactccaagagtgggggccatacccctaaagcactccctggcccaggtgggagcatggggctgaagaatggggctggaaatggtgccaagggcaaggggaaaagggagcgaagtatt

SEQ ID NO: 214350 - DNA, 120 bp, Artificial Sequence
  ENSG00000116128_8 (sequence is synthesized)
tccgccgactcctttgatcagagagatcctgggactccaaacgatgactctgacattaaagaatgtaattctgctgaccacataaagtcccaggattcccagcacacaccacactcgatg

SEQ ID NO: 214351 - DNA, 120 bp, Artificial Sequence
  ENSG00000116128_9 (sequence is synthesized)
accccatcaaatgctacagcccccaggtcttctaccccctcccatggccaaactactgccacagagcccacacctgctcagaagactccagccaaagtggtgtacgtgttttctactgag

SEQ ID NO: 214352 - DNA, 120 bp, Artificial Sequence
  ENSG00000116128_10 (sequence is synthesized)
atggccaataaagctgcagaagctgttttgaagggccaggttgaaactatcgtctctttccacatccagaacatttctaacaacaagacagagagaagcacagcgcctctgaacacacag

SEQ ID NO: 214353 - DNA, 120 bp, Artificial Sequence
  ENSG00000116128_11 (sequence is synthesized)
atatctgcccttcggaatgatccgaaacctctcccacaacagcccccagctccggccaaccaggaccagaattcttcccagaataccagactgcagccaactccacccattccggcacca

SEQ ID NO: 214354 - DNA, 120 bp, Artificial Sequence
  ENSG00000116128_12 (sequence is synthesized)
gcacccaagcctgccgcacccccacgtcccctggaccgggagagtcctggggtagaaaacaaactgattccttctgtaggaagtcctgccagctccactccactgcccccagatggtact

SEQ ID NO: 214355 - DNA, 120 bp, Artificial Sequence
  ENSG00000116128_13 (sequence is synthesized)
gggcccaactcaactcccaacaatagggcagtgacccctgtctcccaggggagcaatagctcttcagcagatcccaaagcccctccgcctccaccagtgtccagtggcgagccccccaca

SEQ ID NO: 214356 - DNA, 120 bp, Artificial Sequence
  ENSG00000116128_14 (sequence is synthesized)
ctgggagagaatcccgatggcctatctcaggagcagctggagcaccgggagcgctccttacaaactctcagagatatccagcgcatgctttttcctgatgagaaagaattcacaggagca

SEQ ID NO: 214357 - DNA, 120 bp, Artificial Sequence
  ENSG00000116128_15 (sequence is synthesized)
caaagtgggggaccgcagcagaatcctggggtattagatgggcctcagaaaaaaccagaagggccaatacaggccatgatggcccaatcccaaagcctaggtaagggacctgggccccgg

SEQ ID NO: 214358 - DNA, 120 bp, Artificial Sequence
  ENSG00000116128_16 (sequence is synthesized)
acagacgtgggagctccatttggccctcaaggacatagagatgtacccttttctccagatgaaatggttccaccttctatgaactcccagtctgggaccataggacccgaccaccttgac

SEQ ID NO: 214359 - DNA, 120 bp, Artificial Sequence
  ENSG00000116128_17 (sequence is synthesized)
catatgactcccgagcagatagcgtggctgaaactgcagcaggagttttatgaagagaagaggaggaagcaggaacaagtggttgtccagcagtgttccctccaggacatgatggtccat

SEQ ID NO: 214360 - DNA, 120 bp, Artificial Sequence
  ENSG00000116128_18 (sequence is synthesized)
cagcacgggcctcggggagtggtccgaggacccccccctccataccagatgacccctagtgaaggctgggcacctgggggtacagagccattttctgatggtatcaacatgccacattct

SEQ ID NO: 214361 - DNA, 120 bp, Artificial Sequence
  ENSG00000116128_19 (sequence is synthesized)
ctgcccccgaggggcatggctccccaccccaacatgccagggagccagatgcgcctccctggatttgcaggcatgataaactctgaaatggaagggccgaatgtccccaaccctgcatct

SEQ ID NO: 214362 - DNA, 120 bp, Artificial Sequence
  ENSG00000116128_20 (sequence is synthesized)
agaccaggtctttctggagtcagttggccagatgatgtgccaaaaatcccagatggtcgaaattttcctcctggccagggcattttcagcggtcctggccgaggggaacgcttcccaaac

SEQ ID NO: 214363 - DNA, 120 bp, Artificial Sequence
  ENSG00000116128_21 (sequence is synthesized)
ccccaaggattgtctgaagagatgtttcagcagcagctggcagagaaacagctgggtctccccccagggatggccatggaaggcatcaggcccagcatggagatgaacaggatgattcca

SEQ ID NO: 214364 - DNA, 120 bp, Artificial Sequence
  ENSG00000116128_22 (sequence is synthesized)
ggctcccagcgccacatggagcctgggaataaccccattttccctcgaataccagttgagggccctctgagtccttctaggggtgactttccaaaaggaattcccccacagatgggccct

SEQ ID NO: 214365 - DNA, 120 bp, Artificial Sequence
  ENSG00000116128_23 (sequence is synthesized)
ggtcgggaacttgagtttgggatggttcctagtgggatgaagggagatgtcaatctaaatgtcaacatgggatccaactctcagatgatacctcagaagatgagagaggctggggcgggc

SEQ ID NO: 214366 - DNA, 120 bp, Artificial Sequence
  ENSG00000116128_24 (sequence is synthesized)
cctgaggagatgctgaaattacgcccaggtggctcagacatgctgcctgctcagcagaagatggtgccactgccatttggtgagcacccccagcaggagtatggcatgggccccagacca

SEQ ID NO: 214367 - DNA, 120 bp, Artificial Sequence
  ENSG00000116128_25 (sequence is synthesized)
gaccagaggactaacagccggctcagtcatatgccaccactacctctcaacccttccagtaaccccaccagcctcaacacagctcctccagttcagcgcggcctggggcggaagcccttg

SEQ ID NO: 214368 - DNA, 120 bp, Artificial Sequence
  ENSG00000116128_26 (sequence is synthesized)
gatatatctgtggcaggcagccaggtgcattccccaggcattaaccctctgaagtctcccacgatgcaccaagtccagtcaccaatgctgggctcgccctcggggaacctcaagtccccc

SEQ ID NO: 214369 - DNA, 120 bp, Artificial Sequence
  ENSG00000116128_27 (sequence is synthesized)
cagactccatcgcagctggcaggcatgctggcgggcccagctgctgctgcttccattaagtccccccctgttttggggtctgctgctgcttcacctgtccacctcaagtctccatcactt

SEQ ID NO: 214370 - DNA, 120 bp, Artificial Sequence
  ENSG00000116128_28 (sequence is synthesized)
cctgccccgtcacctggatggacctcttctccaaaacctccccttcagagtcctgggatccctccaaaccataaagcacccctcaccatggcctccccagccatgctgggaaatgtagag

SEQ ID NO: 214371 - DNA, 120 bp, Artificial Sequence
  ENSG00000116128_29 (sequence is synthesized)
tcaggtggccccccacctcctacagccagccagcctgcctctgtgaatatccctggaagtcttccctctagtacaccttataccatgcctccagagccaaccctttcccagaacccactc

SEQ ID NO: 214372 - DNA, 120 bp, Artificial Sequence
  ENSG00000116128_30 (sequence is synthesized)
tctattatgatgtctcgaatgtccaagtttgcaatgcccagttccaccccgttataccatgatgctatcaagactgtggccagctcagatgacgactcccctccagctcgttctcccaac

SEQ ID NO: 214373 - DNA, 120 bp, Artificial Sequence
  ENSG00000116128_31 (sequence is synthesized)
ttgccatcaatgaataatatgccaggaatgggcattaatacacagaatcctcgaatttcaggtccaaaccccgtggttccgatgccaaccctcagcccaatgggaatgacccagccactt

SEQ ID NO: 214374 - DNA, 120 bp, Artificial Sequence
  ENSG00000116128_32 (sequence is synthesized)
tctcactccaatcagatgccctctccaaatgccgtgggacccaacatacctcctcatggggtcccaatggggcctggcttgatgtcacacaatcctatcatggggcatgggtcccaggag

SEQ ID NO: 214375 - DNA, 120 bp, Artificial Sequence
  ENSG00000116128_33 (sequence is synthesized)
ccaccgatggtacctcaaggacggatgggcttcccccagggcttccctccagtacagtctcccccacagcaggttccattccctcacaatggccccagtggggggcagggcagcttccca

SEQ ID NO: 214376 - DNA, 120 bp, Artificial Sequence
  ENSG00000116128_34 (sequence is synthesized)
ggagggatgggtttcccaggagaaggcccccttggccgccccagcaacctgccccaaagttcagcagatgcagcactttgcaagcctggaggccccgggggtcctgactccttcactgtc

SEQ ID NO: 214377 - DNA, 120 bp, Artificial Sequence
  ENSG00000116128_35 (sequence is synthesized)
ctggggaacagcatgccttcggtgtttacagacccagatctgcaggaggtcatccgacctggagccaccggaatacctgagtttgatctatcccgcattattccatctgagaagcccagc

SEQ ID NO: 214378 - DNA, 120 bp, Artificial Sequence
  ENSG00000116128_36 (sequence is synthesized)
cagacgctgcaatatttccctcgaggggaagttccaggccgtaaacagccccagggtcctggacctgggttttcacacatgcaggggatgatgggcgaacaagcccccagaatgggacta

SEQ ID NO: 214379 - DNA, 120 bp, Artificial Sequence
  ENSG00000116128_37 (sequence is synthesized)
gcattacctggcatgggaggtccagggccagtgggaactccggacatccctcttggtacagctccatccatgccaggccacaaccccatgagaccaccagcctttctccaacaaggcatg

SEQ ID NO: 214380 - DNA, 120 bp, Artificial Sequence
  ENSG00000116128_38 (sequence is synthesized)
atgggacctcaccatcggatgatgtcaccagcacaatctacaatgcccggccagcccaccctgatgagcaatccagctgctgccgtgggcatgattcctggcaaggatcgggggcctgcc

SEQ ID NO: 214381 - DNA, 120 bp, Artificial Sequence
  ENSG00000116128_39 (sequence is synthesized)
gggctctacacccaccctgggcctgtgggctctccaggcatgatgatgtccatgcagggcatgatgggaccccaacagaacatcatgatccccccacagatgaggccccggggcatggct

SEQ ID NO: 214382 - DNA, 120 bp, Artificial Sequence
  ENSG00000116128_40 (sequence is synthesized)
gctgacgtgggcatgggtggatttagccaaggacctggcaacccaggaaacatgatgttttaagctgctaagatgggatgtgccgatccttgtcaagatgagattccaggtcctgagagc

SEQ ID NO: 214383 - DNA, 120 bp, Artificial Sequence
  ENSG00000116128_41 (sequence is synthesized)
tgctttgagggagttccaggagtacttactattggtcatgcaataggagaacagagacccgagggctgctttgggggaggggggaactcgagaatgtatggatttacctgaaaacaaatt

SEQ ID NO: 214384 - DNA, 120 bp, Artificial Sequence
  ENSG00000116128_42 (sequence is synthesized)
attcatttaatcaacaggtgtgttttttttaagatttattttttaaaaattatttttgtggacttgggtatcaatgatggcacctacttttgggaatctgtagctgtgctttgagaattg

SEQ ID NO: 214385 - DNA, 120 bp, Artificial Sequence
  ENSG00000116128_43 (sequence is synthesized)
ccatcggtcatgtgttgcaccgttctctgtatgtttacgtcctttggactggcttctcccaggattcttttctgtttttgtttttttgatttgggctttatttttttctgtgtactgtac

SEQ ID NO: 214386 - DNA, 120 bp, Artificial Sequence
  ENSG00000116128_44 (sequence is synthesized)
tatattgtaaaagggattttagcagagactttagtctttggggcaagaggagaacaggaatgctgggctgtttactttaggtggagaatccatcttcagacctttggactattttctttc

SEQ ID NO: 214387 - DNA, 120 bp, Artificial Sequence
  ENSG00000116128_45 (sequence is synthesized)
aactgcagtgtatagaaaaaccaaactacgacctcagagcagagtattaatgaaaagcacaaaaaaaggaactaagttcagcgaggggtggggggaggggggagatttttcttttgaaaa

SEQ ID NO: 214388 - DNA, 120 bp, Artificial Sequence
  ENSG00000116128_46 (sequence is synthesized)
ataatgactcttaggacatttgtttttcagttcaagtgctcttcagcactgtcttgtctcccaatataccaacccactggcacatttttctcttgttttctctctccgattttgctctgt

SEQ ID NO: 214389 - DNA, 120 bp, Artificial Sequence
  ENSG00000116128_47 (sequence is synthesized)
ctcctcagttaagtgtttccttcctttgtgccccccgctggtgaccctctgcttccctctctctttccctttggcagctgcaatacacagtgttattttggggaaataaatctagcaaag

SEQ ID NO: 214390 - DNA, 120 bp, Artificial Sequence
  ENSG00000116128_48 (sequence is synthesized)
cctcgccttccatgccgagcgtcctcttggctctgagagggaaaggtctgtccttgggatgctctctggtcttttttccccctaagtctttctctttcccatcatacccttccctgccca

SEQ ID NO: 214391 - DNA, 120 bp, Artificial Sequence
  ENSG00000116128_49 (sequence is synthesized)
ccttgttttctgttctccttttattaggaattcccaagtgaattttattaatgtgggagtggaacagatgctaaaagctatccaggattttgtttctgtttgttttaaattttgtggttc

SEQ ID NO: 214392 - DNA, 120 bp, Artificial Sequence
  ENSG00000116128_50 (sequence is synthesized)
cttccctttcctccccctcccatgcgtaagacgttctgtgtaacctccattaaatttggtacaaaaccactcgccagagctgtggtgtcagaaaaataaaatatattgtttcttacaaaa

SEQ ID NO: 214393 - DNA, 120 bp, Artificial Sequence
  ENSG00000116128_51 (sequence is synthesized)
gcgccgccgctgccgctggccccggccccgcggggctgagagccgccccggacccaagcctctttccctgctccgcacctcctctcccctcccccactcctgcctccggggactgaatgt

SEQ ID NO: 214394 - DNA, 120 bp, Artificial Sequence
  ENSG00000116132_0 (sequence is synthesized)
actcggctcctctcccccctcgcgcccacagcgtttggtgttgattcgagcgggaagaggggggtgggtgggatcggtgggggagaccatgacctccagctacgggcacgttctggagcg

SEQ ID NO: 214395 - DNA, 120 bp, Artificial Sequence
  ENSG00000116132_1 (sequence is synthesized)
gcaaccggcgctgggcggccgcttggacagcccgggcaacctcgacaccctgcaggcgaaaaagaacttctccgtcagtcacctgctagacctggaggaagccggggacatggtggcggc

SEQ ID NO: 214396 - DNA, 120 bp, Artificial Sequence
  ENSG00000116132_2 (sequence is synthesized)
acaggcggatgagaacgtgggcgaggctggccggagcctgctggagtcgccgggactcaccagcggcagcgacaccccgcagcaggacaatgaccagctgaactcagaagaaaaaaagaa

SEQ ID NO: 214397 - DNA, 120 bp, Artificial Sequence
  ENSG00000116132_3 (sequence is synthesized)
gagaaagcagcgaaggaataggacaaccttcaatagcagccagctgcaggctttggagcgtgtctttgagcggacacactatcctgatgcttttgtgcgagaagaccttgcccgccgggt

SEQ ID NO: 214398 - DNA, 120 bp, Artificial Sequence
  ENSG00000116132_4 (sequence is synthesized)
gaacctcaccgaggcgagagtgcaggtgtggtttcagaaccgaagagccaagttccgcaggaatgagagagccatgctagccaataaaaacgcttccctcctcaaatcctactcaggaga

SEQ ID NO: 214399 - DNA, 120 bp, Artificial Sequence
  ENSG00000116132_5 (sequence is synthesized)
cgtgactgctgtggagcagcccatcgtacctcgtcctgctccgagacccaccgattatctctcctgggggacagcgtctccgtacagcgccatggctacttattctgccacatgtgccaa

SEQ ID NO: 214400 - DNA, 120 bp, Artificial Sequence
  ENSG00000116132_6 (sequence is synthesized)
caatagccctgcacagggcatcaacatggccaacagcattgccaacctgagactgaaggccaaggaatatagtttacagaggaaccaggtgccaacagtcaactgaggaaaaaaaataat

SEQ ID NO: 214401 - DNA, 120 bp, Artificial Sequence
  ENSG00000116132_7 (sequence is synthesized)
taaacaggcctaagaagaaatcaaaaaccataagacacctatcctgctctgttatttcttcatctgctggggggaaaaagtaaattacaaacaaacaaacaaagcagaactaaaatattg

SEQ ID NO: 214402 - DNA, 120 bp, Artificial Sequence
  ENSG00000116132_8 (sequence is synthesized)
ggaccatggcagagaaaagcaggagaggagcaaaatgaaaattagttaacaaatgttcctcctccctctgggataccaccaccacttgtttctgtgtgtgtttattttgtttttctttca

SEQ ID NO: 214403 - DNA, 120 bp, Artificial Sequence
  ENSG00000116132_9 (sequence is synthesized)
ttcatgctttgcttaatgtactccaggcttcttcagctaggttcagcccacccacccccatgattgtatgaagttttaaaaaaaactacagcagccaaagaaactatatatatatatata

SEQ ID NO: 214404 - DNA, 120 bp, Artificial Sequence
  ENSG00000116132_10 (sequence is synthesized)
tatatatatatccagaatgattgcctctactgtcctcattgacttgtttgaaccttagtgccttaccctgtcctcttcccagttctctttatagaagctctaggagctttcgaaaagcca

SEQ ID NO: 214405 - DNA, 120 bp, Artificial Sequence
  ENSG00000116132_11 (sequence is synthesized)
aagtctttctgaagaatctgtgctggacagacataattccctttctcattgtctccatctttgttggtcatggtaaggtttttccatcagcctctgaaaaaatagttgtgcacaacatct

SEQ ID NO: 214406 - DNA, 120 bp, Artificial Sequence
  ENSG00000116132_12 (sequence is synthesized)
gctcactggactgtctgatccaatgtaattggctgcgtctggctaattctaagcactaaagtctacatctaagctatagatttaagcttgaagctacagattatatcactatcaccacca

SEQ ID NO: 214407 - DNA, 120 bp, Artificial Sequence
  ENSG00000116132_13 (sequence is synthesized)
cccctcaccctatgcaatcaatcaatcaatcatcttaagttaaagatatttgttgtctttgaatgatttgctgtcacagactatttggtagaagaaatatttttcacctgagagaggaag

SEQ ID NO: 214408 - DNA, 120 bp, Artificial Sequence
  ENSG00000116132_14 (sequence is synthesized)
agaaatttctctagtaacacaaagagtgagttctaaaaggcatgcccacatctctttcgtgccttaaggatagtgagatgcacacttatatatatactgtatatatttatatatttatat

SEQ ID NO: 214409 - DNA, 120 bp, Artificial Sequence
  ENSG00000116132_15 (sequence is synthesized)
atatatttcatatatatatataatattgcaagcttaagtttgcaatttcccaaacaatacaaaaagcaaattacacaccctcaccactgttcttatctctatagtgatgaaacattaatt

SEQ ID NO: 214410 - DNA, 120 bp, Artificial Sequence
  ENSG00000116132_16 (sequence is synthesized)
ggctttaaatgaattagaaactatttgaggctataaaaatgtccttgagtttggagcctgagctctggtgaaatgctgatacatctgatctatcatgggaattgcagttagagagagtaa

SEQ ID NO: 214411 - DNA, 120 bp, Artificial Sequence
  ENSG00000116132_17 (sequence is synthesized)
ggaataccatttagtcatctatccgttcttcacttagcaggaatatgaaagaaaggcacatgtttaagaggaatacctaaaggtttttctaaattccaacatttaaaaggcaattgtggg

SEQ ID NO: 214412 - DNA, 120 bp, Artificial Sequence
  ENSG00000116132_18 (sequence is synthesized)
ctatttttattttttaatattttgaaataaagtttagtgtctagggctgggagccaggactgatcttccatttctttttctttgttcccagccatgcttttgtaacttgccaggtggact

SEQ ID NO: 214413 - DNA, 120 bp, Artificial Sequence
  ENSG00000116132_19 (sequence is synthesized)
tgaccaactacattaccatgctgtgcctcagtttacccatttgtaaaatgggattaataatacttacctacctcacaggggtgttgtgaggctctattcatttgctcctttattctttcc

SEQ ID NO: 214414 - DNA, 120 bp, Artificial Sequence
  ENSG00000116132_20 (sequence is synthesized)
tgtattctctgtatgtccagcactttgtagccatgggaggaaagggactataaaagtgtacaatgttaatggaatgatacggtacctgaaagccttgttttctagtaagaaaatgctacc

SEQ ID NO: 214415 - DNA, 120 bp, Artificial Sequence
  ENSG00000116132_21 (sequence is synthesized)
ttgctgtacatacttataaccttgtatttggaaatgagaaataggtttatattttcagatctctcaaaaatcacatcatttgaccaaagaataatttaagacacatagaacagatttttt

SEQ ID NO: 214416 - DNA, 120 bp, Artificial Sequence
  ENSG00000116132_22 (sequence is synthesized)
taatttatattttcatcctgaccagcttagttctaataatttttagttgtgagtgattaaaaaactttggatcaattttggtcaaacatgccaactttgtagtctgagtgacaggcaagg

SEQ ID NO: 214417 - DNA, 120 bp, Artificial Sequence
  ENSG00000116132_23 (sequence is synthesized)
atttttgggtttaagatgcacttttagcacacatttgtatttcccttggcatatcagattgagctaatggtgatgttatttcaatctaacagccaccaatctgaaattgtatttcaaatg

SEQ ID NO: 214418 - DNA, 120 bp, Artificial Sequence
  ENSG00000116132_24 (sequence is synthesized)
ttgattctgtagttctttaaataataatgaagctcatcttatacattttgctttcaccaattgattccttcttcttttagcccactattaaaacatttcttactgaatggttcatgtagg

SEQ ID NO: 214419 - DNA, 120 bp, Artificial Sequence
  ENSG00000116132_25 (sequence is synthesized)
cttgctgaacagcacgcattacttgcttcctgaagagttcccccattcatccatttgtcccattagttgctgtggattatcaagttttgaaggaactgtacatcccaacagactgaaaca

SEQ ID NO: 214420 - DNA, 120 bp, Artificial Sequence
  ENSG00000116132_26 (sequence is synthesized)
ttctaagtgaaatgagtataatccaagtaactggtgaactttggaggtttggagcttgaagagaatggctaagaagatttgaattatagggagggaacagaaatcatacatgaaaaggtt

SEQ ID NO: 214421 - DNA, 120 bp, Artificial Sequence
  ENSG00000116132_27 (sequence is synthesized)
ttactgagaaggggaaaaccttagatagagggacatgtgaaacaaaatcatttgaaattttgattcagacatccatttccagtggcaaacagcaaagcctgaacccataaacccaaatga

SEQ ID NO: 214422 - DNA, 120 bp, Artificial Sequence
  ENSG00000116132_28 (sequence is synthesized)
taggtgaagttgggtggttttatccaatgtctcaagcaagcaatgtctgggaatatcatagagtaacaagtgctggtcagccaaagaaacattcactgctggtgaaccaataccataagc

SEQ ID NO: 214423 - DNA, 120 bp, Artificial Sequence
  ENSG00000116132_29 (sequence is synthesized)
atgtattatctaagcacttgatcaagaaatatacatgttgtacaagctctcaattttgttcatttattatcaaatttttaaaatacaagtttggtatgtgatttggaaaagatgccttct

SEQ ID NO: 214424 - DNA, 120 bp, Artificial Sequence
  ENSG00000116132_30 (sequence is synthesized)
ggatcttaagccagttgtcagtggaggtcctcagggctgcaaatgtcaagacataaccctgttcctcaccatcatgataccagatacaggtgaatacataggaactatctgcctgtgtcc

SEQ ID NO: 214425 - DNA, 120 bp, Artificial Sequence
  ENSG00000116132_31 (sequence is synthesized)
tcaatctcccttcaaacaagatgctgatttgtagggtacttggcaggttaaattaaaccagaagaggtgacttaataaaaaagggaatgacatttagggtataaagatctcataagaaat

SEQ ID NO: 214426 - DNA, 120 bp, Artificial Sequence
  ENSG00000116132_32 (sequence is synthesized)
gtaatatgtaaattatatcttgctttatgttgtaaaatatacattgtttgcgctagaatagaaatgatttcttttcaataaaaagaaagaaggactctaccatgtcttttgttatataca

SEQ ID NO: 214427 - DNA, 120 bp, Artificial Sequence
  ENSG00000116132_33 (sequence is synthesized)
agaaaatttttttttgggggggggcggtttgggggaaggcagaaggagaagaaaatttgattgtgatggtggtggattttttccaaatttccccacagctgttatcaaaacatgcaaatg

SEQ ID NO: 214428 - DNA, 120 bp, Artificial Sequence
  ENSG00000116132_34 (sequence is synthesized)
agattttccaacaggatcttaaacaaatctggaggagttaatgccgaagcaaaataatcagcacgtttgaagtgactgcgaaaaagaacttctccgtcagtcacctgctagacctggagg

SEQ ID NO: 214429 - DNA, 120 bp, Artificial Sequence
  ENSG00000116132_35 (sequence is synthesized)
tggtcatggtgctgcctgacatctgctgaacgcatttggcttatttctccctttcacactttcaaaaatagatcctcgtccctcccaagatgttgtttacacgaggggcttcataacgga

SEQ ID NO: 214430 - DNA, 120 bp, Artificial Sequence
  ENSG00000116132_36 (sequence is synthesized)
gatgttggcaaagggggttttcttaatcagactgttttttggtcccagggaaaggaggaagaaggagattgtgatggagaaagggggtctgtgaaacgtcaggcacagcacaaaggcttt

SEQ ID NO: 214431 - DNA, 120 bp, Artificial Sequence
  ENSG00000116132_37 (sequence is synthesized)
gccacgtaattacaggctcctattaagtcgagatctgccctcccaggggtctccaattttcttgtattccctacaaagcctcctctgcatgccagtttgtgccttttgaagtgccagaga

SEQ ID NO: 214432 - DNA, 120 bp, Artificial Sequence
  ENSG00000116132_38 (sequence is synthesized)
gcttcttgatccaactgagaaggaaaaaggagcccagcaagaagagggggagagagagaaggggaaaggggggaacccaccagcaccctccgtcggactcttgaagccttttttttttaa

SEQ ID NO: 214433 - DNA, 120 bp, Artificial Sequence
  ENSG00000116132_39 (sequence is synthesized)
ttcttaatttttttttttactctttacaaaaagtaaagtgagaatcctgctctctaatacatctgcaagacatcaccctctcctcctgaaactttagtcactcctgagaatccacaggag

SEQ ID NO: 214434 - DNA, 120 bp, Artificial Sequence
  ENSG00000116132_40 (sequence is synthesized)
tgcagagaggggggaacacgttttcttgaagatgttttaaagctggaacaagccttcttctgttggtgcttgaactcttgcctgggaataacttttttaacctttaaaaaaaccattcac

SEQ ID NO: 214435 - DNA, 120 bp, Artificial Sequence
  ENSG00000116132_41 (sequence is synthesized)
tttgattcttctctcccaccccttcttctctcttcttctgtttgcctaactcccccgccctgctggcctccgctttcctctctcccccttgttattatttttagtctgtgcgtgtggaca

SEQ ID NO: 214436 - DNA, 120 bp, Artificial Sequence
  ENSG00000116132_42 (sequence is synthesized)
cttttggagagttggaagggatttttttctcctgacttgaacatagggtgactttttaatattgtattttactgtggattatctctttggaccgcgccggacttggcctcaggaaatcaa

SEQ ID NO: 214437 - DNA, 120 bp, Artificial Sequence
  ENSG00000116132_43 (sequence is synthesized)
ccaatgctgcggaaggcggctggtgcacaacgctctgctctacagaagggggtcccccaccctcttttccaattttttttttttggccttcctctccttccctccctcttcctccctctc

SEQ ID NO: 214438 - DNA, 120 bp, Artificial Sequence
  ENSG00000116132_44 (sequence is synthesized)
tcagcagtgaagtcctcaagtgaggaatattattggtaaccagagctgcaagaaagcatgtccactaaatgaagcatagtgtgatactaatctagagcagggctcttcagagattgctgt

SEQ ID NO: 214439 - DNA, 120 bp, Artificial Sequence
  ENSG00000116132_45 (sequence is synthesized)
gctcaccgacatttcttactgggttaatctcttcagagacattcaacttgctgacatccccacattttcccaggagattataagctgccccagcagcagggtttggggcagaagtgagag

SEQ ID NO: 214440 - DNA, 120 bp, Artificial Sequence
  ENSG00000116132_46 (sequence is synthesized)
gggcaggctatctcaccaatctcctcttggactcaggaactcttgcaaaggtttcaaagatgaggaagaatctaaaagaaaagatcattaagctgtgcccagtgttcctcttgcaacaat

SEQ ID NO: 214441 - DNA, 120 bp, Artificial Sequence
  ENSG00000116132_47 (sequence is synthesized)
tctggaacaaaactttaccctgtttccaaatttaagctaaattcgttgtattatgcaaatgtagggacgtaacttgtaaaactccaagtatagggccaaaggcaaactttgcagtaaaac

SEQ ID NO: 214442 - DNA, 120 bp, Artificial Sequence
  ENSG00000116132_48 (sequence is synthesized)
tggctttgaattaaaaaaaggaagaaggaaggaaggaagaaagaaaggaaagaaggaaggaaggagagagacgagagggactatgacagagagaggaggaaagaaaagccaagttcattc

SEQ ID NO: 214443 - DNA, 120 bp, Artificial Sequence
  ENSG00000116132_49 (sequence is synthesized)
tgatcactttcatggccaaggttctttgttagtaggtgtgaatttcttataatgccaaatgccttcctaatctattgctaattcttgtctacttgtctgaagttttctctggggatcagt

SEQ ID NO: 214444 - DNA, 120 bp, Artificial Sequence
  ENSG00000116132_50 (sequence is synthesized)
ttgtgtgtatttgtgtgtgtgcgtgtgtgtgtgtgtctgtgtgtgtttcttttaaataaaaaaggaatgtataatttacactaaacttttatattaaaaagttgaacatttttaaagaaa

SEQ ID NO: 214445 - DNA, 120 bp, Artificial Sequence
  ENSG00000116132_51 (sequence is synthesized)
aatctcataaagaggcttttaacctcccattattatgctgttcagaaaatataggctgccagaagggaagctgagacacaaattcctaacccattggattagtctagagtgactttcttt

SEQ ID NO: 214446 - DNA, 120 bp, Artificial Sequence
  ENSG00000116132_52 (sequence is synthesized)
gaaaatatacctgagtactctgagaaaccaggccaagcctacgtgttctccctggctgatttcagtggaggaagaactattcaaaaattcatttattatgcttttgtttacctttttatt

SEQ ID NO: 214447 - DNA, 120 bp, Artificial Sequence
  ENSG00000116132_53 (sequence is synthesized)
gtcaaggttaattattggtttaaggagaggttttaaatgaaatataggagattatgtctcagatgaagttgaatttctgacatgaaatgctacatttttgaaatgcaagtgtttttcaaa

SEQ ID NO: 214448 - DNA, 120 bp, Artificial Sequence
  ENSG00000116132_54 (sequence is synthesized)
ggttcttagctttaatcaaagcaaaaagcctcatctaaaagtttctttctgttccaaatcagttcctttagagaaacatggtaaatgcacttggaaatttgttttaatcccctgttataa

SEQ ID NO: 214449 - DNA, 120 bp, Artificial Sequence
  ENSG00000116132_55 (sequence is synthesized)
aattagcctgaattctttttgtcttagcacatagagaccctacatctaggaaagtcttattctgggccctattgcactcagatgtggtgtgccttactgatcttgaaacattagttatat

SEQ ID NO: 214450 - DNA, 120 bp, Artificial Sequence
  ENSG00000116132_56 (sequence is synthesized)
ctgtgtgccctattttaaatttaaactcctctcctataagatttactacaaatacattttttgaagaccactgtaaaatcacatattctctaatattttaaataaatgaaaggctgcttt

SEQ ID NO: 214451 - DNA, 120 bp, Artificial Sequence
  ENSG00000116132_57 (sequence is synthesized)
atttctcttataaacattggtataagagaaatttggtgtgttcatgaacacgctaaatggcttggaaaatgggtgtggttcaaagcctgatgcttcaagatctctggtttgaatttggtc

SEQ ID NO: 214452 - DNA, 120 bp, Artificial Sequence
  ENSG00000116132_58 (sequence is synthesized)
acaaccaggaagtattgcccctttttctgtctgggtcctccataggaacttttcataccagccataaacaatccagatggctgccacgtggtccttaccagtgagaggcgtcacacagca

SEQ ID NO: 214453 - DNA, 120 bp, Artificial Sequence
  ENSG00000116132_59 (sequence is synthesized)
cacactgcatgaatggggatgaaatcattcctgaattaatatagggttatattacttggacctcagccatttgagcctcagtgtctgcatcatatgtgtttagtatatggacatctaact

SEQ ID NO: 214454 - DNA, 120 bp, Artificial Sequence
  ENSG00000116132_60 (sequence is synthesized)
gaaattattaacgtggcaatttatgcgtgccttttttggaaatattctattttaatggaaagaattatgtagaaatactggatacatttttaaaaacatccataattcaccatcttgaca

SEQ ID NO: 214455 - DNA, 120 bp, Artificial Sequence
  ENSG00000116132_61 (sequence is synthesized)
taactagtatattcatttttgtgattagagttcaatgttttatatagatgtagctttagtgtatatattattttgtattctgctcttttcacttaaagtcatatgacctagtacatttta

SEQ ID NO: 214456 - DNA, 120 bp, Artificial Sequence
  ENSG00000116132_62 (sequence is synthesized)
ctcatttcttggtatgcttttatatcatttctctcttagaaattggatttgtaaaaattaatttagaaaatcataaaatctgttcatattctgtatgaagaataaattaatcttcagata

SEQ ID NO: 214457 - DNA, 120 bp, Artificial Sequence
  ENSG00000116132_63 (sequence is synthesized)
taagcagaaaagtgatgttaaaacaataatttaatcaataataatgttttttgatccaatgttgactgaagtgtttatattttggttgatttctaaaagtagcaaaaagctattctgtta

SEQ ID NO: 214458 - DNA, 120 bp, Artificial Sequence
  ENSG00000116132_64 (sequence is synthesized)
tttggagaattttctgctatgtttagaaccaaactatgttatgatttcacactttgaagcttgataggaaatattgttaaggaaataaaaaagaaaaacaagtgatccaaagcaaaggaa

SEQ ID NO: 214459 - DNA, 120 bp, Artificial Sequence
  ENSG00000116132_65 (sequence is synthesized)
atgatagacttttgtgttatgaaaaattaactcactgttcttgttggtactattatgtcaagttagttatctcacatgtgacactcattaaaaggcatttctcttggttaattcttggaa

SEQ ID NO: 214460 - DNA, 120 bp, Artificial Sequence
  ENSG00000116133_0 (sequence is synthesized)
agagcgggccaggcgcggagctggcggcagtgacaggaggcgcgaacccgcagcgcttaccgcgcggcgccgcaccatggagcccgccgtgtcgctggccgtgtgcgcgctgctcttcct

SEQ ID NO: 214461 - DNA, 120 bp, Artificial Sequence
  ENSG00000116133_1 (sequence is synthesized)
gctgtgggtgcgcctgaaggggctggagttcgtgctcatccaccagcgctgggtgttcgtgtgcctcttcctcctgccgctctcgcttatcttcgatatctactactacgtgcgcgcctg

SEQ ID NO: 214462 - DNA, 120 bp, Artificial Sequence
  ENSG00000116133_2 (sequence is synthesized)
ggtggtgttcaagctcagcagcgctccgcgcctgcacgagcagcgcgtgcgggacatccagaagcaggtgcgggaatggaaggagcagggtagcaagaccttcatgtgcacggggcgccc

SEQ ID NO: 214463 - DNA, 120 bp, Artificial Sequence
  ENSG00000116133_3 (sequence is synthesized)
tggctggctcactgtctcactacgtgtcgggaagtacaagaagacacacaaaaacatcatgatcaacctgatggacattctggaagtggacaccaagaaacagattgtccgtgtggagcc

SEQ ID NO: 214464 - DNA, 120 bp, Artificial Sequence
  ENSG00000116133_4 (sequence is synthesized)
cttggtgaccatgggccaggtgactgccctgctgacctccattggctggactctccccgtgttgcctgagcttgatgacctcacagtggggggcttgatcatgggcacaggcatcgagtc

SEQ ID NO: 214465 - DNA, 120 bp, Artificial Sequence
  ENSG00000116133_5 (sequence is synthesized)
atcatcccacaagtacggcctgttccaacacatctgcactgcttacgagctggtcctggctgatggcagctttgtgcgatgcactccgtccgaaaactcagacctgttctatgccgtacc

SEQ ID NO: 214466 - DNA, 120 bp, Artificial Sequence
  ENSG00000116133_6 (sequence is synthesized)
ctggtcctgtgggacgctgggtttcctggtggccgctgagatccgcatcatccctgccaagaagtacgtcaagctgcgtttcgagccagtgcggggcctggaggctatctgtgccaagtt

SEQ ID NO: 214467 - DNA, 120 bp, Artificial Sequence
  ENSG00000116133_7 (sequence is synthesized)
cacccacgagtcccagcggcaggagaaccacttcgtggaagggctgctctactccctggatgaggctgtcattatgacaggggtcatgacagatgaggcagagcccagcaagctgaatag

SEQ ID NO: 214468 - DNA, 120 bp, Artificial Sequence
  ENSG00000116133_8 (sequence is synthesized)
cattggcaattactacaagccgtggttctttaagcatgtggagaactatctgaagacaaaccgagagggcctggagtacattcccttgagacactactaccaccgccacacgcgcagcat

SEQ ID NO: 214469 - DNA, 120 bp, Artificial Sequence
  ENSG00000116133_9 (sequence is synthesized)
cttctgggagctccaggacattatcccctttggcaacaaccccatcttccgctacctctttggctggatggtgcctcccaagatctccctcctgaagctgacccagggtgagaccctgcg

SEQ ID NO: 214470 - DNA, 120 bp, Artificial Sequence
  ENSG00000116133_10 (sequence is synthesized)
caagctgtacgagcagcaccacgtggtgcaggacatgctggtgcccatgaagtgcctgcagcaggccctgcacaccttccaaaacgacatccacgtctaccccatctggctgtgtccgtt

SEQ ID NO: 214471 - DNA, 120 bp, Artificial Sequence
  ENSG00000116133_11 (sequence is synthesized)
catcctgcccagccagccaggcctagtgcaccccaaaggaaatgaggcagagctctacatcgacattggagcatatggggagccgcgtgtgaaacactttgaagccaggtcctgcatgag

SEQ ID NO: 214472 - DNA, 120 bp, Artificial Sequence
  ENSG00000116133_12 (sequence is synthesized)
gcagctggagaagtttgtccgcagcgtgcatggcttccagatgctgtatgccgactgctacatgaaccgggaggagttctgggagatgtttgatggctccttgtaccacaagctgcgaga

SEQ ID NO: 214473 - DNA, 120 bp, Artificial Sequence
  ENSG00000116133_13 (sequence is synthesized)
gaagctgggttgccaggacgccttccccgaggtgtacgacaagatctgcaaggccgccaggcactgagctggagcccgcctggagagacagacacgtgtgagtggtcaggcatcttccct

SEQ ID NO: 214474 - DNA, 120 bp, Artificial Sequence
  ENSG00000116133_14 (sequence is synthesized)
tcactcaagcttggctgctttcctagatccacactttcaaagagaaacccctccagaactcccaccctgacagcccaacaccaccttcctcctggcttccagggggcagcccagtggaat

SEQ ID NO: 214475 - DNA, 120 bp, Artificial Sequence
  ENSG00000116133_15 (sequence is synthesized)
ggaaagaatgtgggatttggagtcagacaagcctgagtccagttccccgtttagaactcattagctgtgtgactctgggtgagtcccttaacccctctgagcccgggtctcttcattagt

SEQ ID NO: 214476 - DNA, 120 bp, Artificial Sequence
  ENSG00000116133_16 (sequence is synthesized)
tgaaagggatagtaatacctacttgcaggttgttgtcatctgagttgagcactggtcacattgaaggtgctgggtaagtggtagctcttgttgcttcccgttcagcgtcacatctgcagt

SEQ ID NO: 214477 - DNA, 120 bp, Artificial Sequence
  ENSG00000116133_17 (sequence is synthesized)
tgcacagccatggctggaatgatgaaggggatacgctggagttgccctgccatcgcctccatcagccagacgaggtcctcacaggagaaggacagctcttccccaccctgggatctcagg

SEQ ID NO: 214478 - DNA, 120 bp, Artificial Sequence
  ENSG00000116133_18 (sequence is synthesized)
agggcagccacggagtggggaggccccagatgcgctgtgccaaagccaggtccgaggccaaagttctccctgccatccttggtgccgtcctgccccttcctccttcatgcctgggcctgc

SEQ ID NO: 214479 - DNA, 120 bp, Artificial Sequence
  ENSG00000116133_19 (sequence is synthesized)
aggcccaccccagccaccactgagtccactcggagtgccctgtgttcctggagaaggcattccagggttgaatcttgtcccagcctcagcctgggacacctaggtggagagagtggtctc

SEQ ID NO: 214480 - DNA, 120 bp, Artificial Sequence
  ENSG00000116133_20 (sequence is synthesized)
cgctctgaattggatccaggggacctgggctcattcttcttggctcaccaaccctgcaggcctcatctttcccaaaacccactttgtcttggtgggagtgggtccgcgctgctctgcagc

SEQ ID NO: 214481 - DNA, 120 bp, Artificial Sequence
  ENSG00000116133_21 (sequence is synthesized)
aggggctggggagtggacagcatcaggtgggaaagtggagtccaccctcatgtttctgtaggattctcaccgtggggctggaagaaaagagcatcgacttgatttctccaaccactcatc

SEQ ID NO: 214482 - DNA, 120 bp, Artificial Sequence
  ENSG00000116133_22 (sequence is synthesized)
cctctttttctttcttccaccactccccaccccagctgtagttaatttcagtgccttacaaatcctaagctcagagaaagttccatttccgttccagagggaagggaacctccctaggtc

SEQ ID NO: 214483 - DNA, 120 bp, Artificial Sequence
  ENSG00000116133_23 (sequence is synthesized)
cttccctggcttgttataacgcaaagcttggttgtttatgcaactctatcttaagaactgcccagcctcagctgaaaacccgaatctgagaaggaattgcgtcatgtaagggaagctgga

SEQ ID NO: 214484 - DNA, 120 bp, Artificial Sequence
  ENSG00000116133_24 (sequence is synthesized)
attaagggagctgagccagtcatggttgtggcgtgtgagtcaggagacctaggtttcagcccctctctactgtcagcgagctgtgcaacgtgggcaagtcattgtcctctgagctgcagt

SEQ ID NO: 214485 - DNA, 120 bp, Artificial Sequence
  ENSG00000116133_25 (sequence is synthesized)
ttcctcatctgtcacatcgctacagacaagacctccctggaacccttctgattgtcttagacactgtggttgcaaaacccacggaaagcctcatttgtgtggaaagtcagaggaaaaatg

SEQ ID NO: 214486 - DNA, 120 bp, Artificial Sequence
  ENSG00000116133_26 (sequence is synthesized)
atccagtggacacttggggattatctgtcattcaagatccttccttcaaccccaaggtcagctcccatctcatttccagaaaggctcatacctggcttgcagggaagcatctgtcttgtc

SEQ ID NO: 214487 - DNA, 120 bp, Artificial Sequence
  ENSG00000116133_27 (sequence is synthesized)
attccaggtgccagaatcctctcagagtcattgaagggtgttcacccatcccacccaaggcttggcacactgccagtgtcttagcagggtcttgtgagggctgggggcatccaggcactc

SEQ ID NO: 214488 - DNA, 120 bp, Artificial Sequence
  ENSG00000116133_28 (sequence is synthesized)
agaaggcaaaggaaccaccctacccatttggcctctggagggggcagaagaaagaaataaacctcatcctatattttacaaagcatgtgaattctggcattagctctcataggagaccca

SEQ ID NO: 214489 - DNA, 120 bp, Artificial Sequence
  ENSG00000116133_29 (sequence is synthesized)
tgtgcttccttgctcagtgcaaaactgatgattctacttgctgtagatgaatggttaacacgagctagttaaacagtgccattgttttgccagtgaagcctccaaccctaagccactggg

SEQ ID NO: 214490 - DNA, 120 bp, Artificial Sequence
  ENSG00000116133_30 (sequence is synthesized)
acggtggccagagatgccagcagcctctgtcgcccttagtcatataaccaaaatccagaccttatccacaacccggggcttggaaaggaaggtattttggaatcacaccctccggttatg

SEQ ID NO: 214491 - DNA, 120 bp, Artificial Sequence
  ENSG00000116133_31 (sequence is synthesized)
ttgctccagtaaaatcttgcctggaaagaggcagtcttcttagcatggtgagctgagttcatggcttttttttgtagccagtcctgtccctggccatccatgtgatggttttggatggag

SEQ ID NO: 214492 - DNA, 120 bp, Artificial Sequence
  ENSG00000116133_32 (sequence is synthesized)
ttaaacttgatgccagtgggcagtgcatgtggaaagtatcagagtaaggctctcccctccagagccctgagtttcttggctgcatgaaggttttctttagaatcagaattgtagccagtt

SEQ ID NO: 214493 - DNA, 120 bp, Artificial Sequence
  ENSG00000116133_33 (sequence is synthesized)
tctttggccagaaggatgaatacttggatattactgaaagggaggggtggagatgggtgtggcagtgtatggtgtgtgatttttattttcttctttggtcatgggggccaaggagaaagg

SEQ ID NO: 214494 - DNA, 120 bp, Artificial Sequence
  ENSG00000116133_34 (sequence is synthesized)
catgaatcttccctgtcaggctcttacagccacaggcactgtgtctactgtctggaagacatgtccccatggctgtggggccgctgcttctgtttaaataaaagtggcctggaagctggc

SEQ ID NO: 214495 - DNA, 120 bp, Artificial Sequence
  ENSG00000116133_35 (sequence is synthesized)
agctgcggtgcgggggcggccaggacttcctgggggggtggggagctggcgttggagaggggttggaacgaaacaaaaatgtgatgggggcgggggaacagaacaggcaaagtgcccact

SEQ ID NO: 214496 - DNA, 120 bp, Artificial Sequence
  ENSG00000116133_36 (sequence is synthesized)
gtgtgcagggcatatgcgggtacctggagggagatgaagaaggggaagagggggaggtgcgaagcactcaggtgcgggaatggaaggagcagggtagcaagaccttcatgtgcacggggc

SEQ ID NO: 214497 - DNA, 120 bp, Artificial Sequence
  ENSG00000116133_37 (sequence is synthesized)
aggtgagcggcgccgggtgcggccgggactcagggccggaggcggcgtgcgcggggatagcgggacgcgaggtggcgacgggagctgcggtgcgggaatggaaggagcagggtagcaaga

SEQ ID NO: 214498 - DNA, 79 bp, Artificial Sequence
  ENSG00000116133_38 (sequence is synthesized)
atgatcaacctgatggacattctggaagtggacaccaagaaacagatggagtcttgctctgtcctccaggttggactgg

SEQ ID NO: 214499 - DNA, 120 bp, Artificial Sequence
  ENSG00000116133_39 (sequence is synthesized)
tggctaatttttttgtatttttagtagacggagtttcgccatgttggctaggctggtttcaactcctgatctcaggtgatctgcctggcttggcctcccaaagcactgggattacagatt

SEQ ID NO: 214500 - DNA, 120 bp, Artificial Sequence
  ENSG00000116133_40 (sequence is synthesized)
gcctctttcactcaacatctttatttggagattcatccatgttgaaagattgtccgtgtggagcccttggtgaccatgggccaggtgactgccctgctgacctccattggctggactctc

SEQ ID NO: 214501 - DNA, 120 bp, Artificial Sequence
  ENSG00000116133_41 (sequence is synthesized)
ctagctgacagccccagggtactgctccaggggaatgaggccagctctatggagaaccaggagccccaagcctatcaactggttccttagggcccctgcagctgtggcagcctctgggtc

SEQ ID NO: 214502 - DNA, 120 bp, Artificial Sequence
  ENSG00000116133_42 (sequence is synthesized)
aggaggtaagctgtgaaagatgggcagggggtgggcttgcaggactacttgccctcttctccctgcaccccctcctccagtgaacatgtcacacccccccagcagccccagccagaaacc

SEQ ID NO: 214503 - DNA, 120 bp, Artificial Sequence
  ENSG00000116133_43 (sequence is synthesized)
tgggagtcaccccactcctccccacggaacagatgatgggtgtgggcttagctgggtccaggggcaactgctccagatggaaaggccaaagctaaggagagagggattcctgtctatgaa

SEQ ID NO: 214504 - DNA, 120 bp, Artificial Sequence
  ENSG00000116133_44 (sequence is synthesized)
aaccacggagaggcccaggacagaggattgctcagaaaacagcctggataaactattgagtggaacatggacaaagccaggaaaaaacaatgccatatgattcctttcatataaaattcc

SEQ ID NO: 214505 - DNA, 120 bp, Artificial Sequence
  ENSG00000116133_45 (sequence is synthesized)
caaaaacacacatgaatccatactgatagcgcatcagtagttgcctggggatggcagagggcaacggataactaaggggcatggggaaagtttggggctgatggttatagccacgatctg

SEQ ID NO: 214506 - DNA, 120 bp, Artificial Sequence
  ENSG00000116133_46 (sequence is synthesized)
gactgcagtgattggagtccttggttgcatgcatgtgtcaagcttatccaattgtgtactttaaattatgtctagtttattgaaagtcaataacagattaaaggaaaacaaccccactgc

SEQ ID NO: 214507 - DNA, 120 bp, Artificial Sequence
  ENSG00000116133_47 (sequence is synthesized)
tccattagggaaggcagctgtgcctctggccaagcagaggggcagaagcccagcagtctgagctctactcctgactctacctccactgctaagctacctaacccccaagccccaattccc

SEQ ID NO: 214508 - DNA, 120 bp, Artificial Sequence
  ENSG00000116133_48 (sequence is synthesized)
tacctgcaaaagggggataagaatacctgcaccatcttcttcaccaggttaacggggttaaacaagagaaatcctccaaaagccttttctgggctgcagaatgagcagttgggtttctct

SEQ ID NO: 214509 - DNA, 120 bp, Artificial Sequence
  ENSG00000116133_49 (sequence is synthesized)
aaatgctgggaagccgacaagtgcagggcaggggcgggagaacgtcggaaaagtccgtttggtgctaggctggagaggggccttgatgccaaggccgagtttggactttattttgtacag

SEQ ID NO: 214510 - DNA, 120 bp, Artificial Sequence
  ENSG00000116133_50 (sequence is synthesized)
agaagcaggtgagcggcgccgggtgcggccgggactcagggccggaggcggcgtgcgcggggatagcgggacgcgaggtgcgggaatggaaggagcagggtagcaagaccttcatgtgca

SEQ ID NO: 214511 - DNA, 120 bp, Artificial Sequence
  ENSG00000116138_0 (sequence is synthesized)
ctctttcccctccccaggcccaggcgagcgctggtgtggacgggaagctcccggcccggcgaactaactggagcacggagctgcagccggttgggccggtgtactttcccgctctggaaa

SEQ ID NO: 214512 - DNA, 120 bp, Artificial Sequence
  ENSG00000116138_1 (sequence is synthesized)
ggaagagaaatggaagtgagaaagttgagcatttcctggcagttcttgatagttctggttctgatcctgcaaattctgtctgcgttggattttgacccatacagagtcctaggggtcagc

SEQ ID NO: 214513 - DNA, 120 bp, Artificial Sequence
  ENSG00000116138_2 (sequence is synthesized)
cgaacagccagtcaggctgatattaaaaaggcttataagaagctcgcccgggaatggcatcctgacaaaaacaaagatcctggagcagaagacaagttcattcaaatcagtaaggcttac

SEQ ID NO: 214514 - DNA, 120 bp, Artificial Sequence
  ENSG00000116138_3 (sequence is synthesized)
gagattctttcaaatgaagaaaagagatcaaattatgatcaatatggagacgctggagagaaccagggctaccagaagcagcaacagcagcgagagtatcgcttccgccatttccatgaa

SEQ ID NO: 214515 - DNA, 120 bp, Artificial Sequence
  ENSG00000116138_4 (sequence is synthesized)
aatttttattttgatgaatccttttttcacttcccttttaattctgaacggcgggactcaattgacgaaaagtatttattgcacttttcacattatgtgaatgaagtggttccagatagc

SEQ ID NO: 214516 - DNA, 120 bp, Artificial Sequence
  ENSG00000116138_5 (sequence is synthesized)
ttcaagaaaccctacctcatcaagatcacctccgattggtgctttagctgcattcatatcgagcctgtgtggaaagaagtcattcaagaactggaagaattgggtgtaggaattggcgtg

SEQ ID NO: 214517 - DNA, 120 bp, Artificial Sequence
  ENSG00000116138_6 (sequence is synthesized)
gtccatgctgggtatgagagacgcctggcccatcacctaggggcacacagcacgccctctatcctaggaatcattaacgggaaaatctccttcttccacaatgcagttgtccgtgaaaat

SEQ ID NO: 214518 - DNA, 120 bp, Artificial Sequence
  ENSG00000116138_7 (sequence is synthesized)
ctgcgacaatttgtagaaagtcttcttccagggaacttggtggagaaagttacaaataaaaattacgtcagattcctctctggctggcagcaagagaataagcctcatgtccttctgttt

SEQ ID NO: 214519 - DNA, 120 bp, Artificial Sequence
  ENSG00000116138_8 (sequence is synthesized)
gaccaaacgcccattgtgccactgttatacaagttgactgcctttgcatacaaagattatttatcatttggatatgtatatgtgggtttgagagggacggaagagatgacaaggcggtac

SEQ ID NO: 214520 - DNA, 120 bp, Artificial Sequence
  ENSG00000116138_9 (sequence is synthesized)
aacatcaatatctacgcccctaccctcttggtctttaaagaacatataaacaggcctgccgatgttatccaggcccgaggtatgaagaagcaaatcattgacgacttcatcacccgaaac

SEQ ID NO: 214521 - DNA, 120 bp, Artificial Sequence
  ENSG00000116138_10 (sequence is synthesized)
aaatatctattggcagccaggctcaccagccagaagttgttccatgaactctgccctgtgaaacggtcgcatcgacagaggaagtactgtgtggttttattgactgctgagactaccaag

SEQ ID NO: 214522 - DNA, 120 bp, Artificial Sequence
  ENSG00000116138_11 (sequence is synthesized)
ttgagcaaaccctttgaggctttcctgtcctttgccctggcaaacactcaagacacagtgagatttgtgcatgtctacagcaatcggcagcaggagtttgccgacaccttactaccagac

SEQ ID NO: 214523 - DNA, 120 bp, Artificial Sequence
  ENSG00000116138_12 (sequence is synthesized)
agtgaggcgtttcaagggaaatcagcggtgtctattttagaaaggcgcaacacagcaggaagggtggtgtataaaaccctggaagacccttggattgggagtgagagtgacaaatttatc

SEQ ID NO: 214524 - DNA, 120 bp, Artificial Sequence
  ENSG00000116138_13 (sequence is synthesized)
ctcttgggctatctcgaccagctgcgtaaagatccagctcttctgtcctctgaagcagtgcttcctgacctgaccgatgaacttgcccctgtttttctccttcgatggttctactctgct

SEQ ID NO: 214525 - DNA, 120 bp, Artificial Sequence
  ENSG00000116138_14 (sequence is synthesized)
tctgactacatctcagactgctgggatagcatttttcacaacaactggagggaaatgatgcccctgctgtccctgatcttctctgccctcttcatcctcttcggcactgtcatcgttcag

SEQ ID NO: 214526 - DNA, 120 bp, Artificial Sequence
  ENSG00000116138_15 (sequence is synthesized)
gctttcagcgactctaatgatgagcgagagtcaagccctccagaaaaagaggaagcccaagagaagactgggaaaactgagccaagcttcaccaaagaaaacagcagcaagattcctaaa

SEQ ID NO: 214527 - DNA, 120 bp, Artificial Sequence
  ENSG00000116138_16 (sequence is synthesized)
aaaggctttgtggaggtaactgaactcacagatgtaacatacaccagtaacttggtacgtctgaggccaggccacatgaatgtggtcctcatcctgtcgaattctaccaagaccagccta

SEQ ID NO: 214528 - DNA, 120 bp, Artificial Sequence
  ENSG00000116138_17 (sequence is synthesized)
ctacagaaatttgctttggaggtctacacatttactgggagcagctgcctacacttctccttcctgagtctagataaacacagagaatggctagaatacttactagaatttgctcaagat

SEQ ID NO: 214529 - DNA, 120 bp, Artificial Sequence
  ENSG00000116138_18 (sequence is synthesized)
gcagctccaatcccaaaccaatatgataagcatttcatggagcgtgactacactggttatgtactggctctgaatggccacaagaaatacttctgcctcttcaagccccaaaagacagtc

SEQ ID NO: 214530 - DNA, 120 bp, Artificial Sequence
  ENSG00000116138_19 (sequence is synthesized)
gaagaggaggaagccatagggtcgtgcagtgatgttgactcttccctctacctgggtgaatctcgagggaaaccttcctgtggccttggatccaggcccatcaaaggaaagttgagcaag

SEQ ID NO: 214531 - DNA, 120 bp, Artificial Sequence
  ENSG00000116138_20 (sequence is synthesized)
ctctctttatggatggaacgcctgctggagggctccttacagaggttttatatcccatcatggcctgaactagactgagaggattttccaaagagatttgaactcttcagactttttaac

SEQ ID NO: 214532 - DNA, 120 bp, Artificial Sequence
  ENSG00000116138_21 (sequence is synthesized)
atgcccctgtgaacaggtattttcaggactcaaactaccacaatgaacagagtatagattttagattgctcttctagaaccatggctagaagaatctttcctttgtcctgttctaaccta

SEQ ID NO: 214533 - DNA, 120 bp, Artificial Sequence
  ENSG00000116138_22 (sequence is synthesized)
ggaatgaaaaacaccaccagtttgaatcgcctagatgaaaatcttttcctctgggtgttatttttccccactgaatgccacaccattgaaaatagactgctcatcccctcttcctttctt

SEQ ID NO: 214534 - DNA, 120 bp, Artificial Sequence
  ENSG00000116138_23 (sequence is synthesized)
gtccttgtcccatgctcaccccaccctcctgtcctgtgtcttggagaagcacagggctccaccctgcaagcggcatctggcggaccctcatgagcctgtcgtgcaggccaggtcattggc

SEQ ID NO: 214535 - DNA, 120 bp, Artificial Sequence
  ENSG00000116138_24 (sequence is synthesized)
cccttccccaatcccggccctgctgtgctgctgccatggcgcatgctcctaactctgaacaacccacggcagcttctagccccgcatctggaaaaaggcccctttccaagcaatctcacg

SEQ ID NO: 214536 - DNA, 120 bp, Artificial Sequence
  ENSG00000116138_25 (sequence is synthesized)
tatattttgggggtatcccccaacaacagtttgttggccacaggttgaaaaggaaaggaataaacgggagttctgcatgtgagttctcaagaaaaggaaagggaggctgagcagtggctg

SEQ ID NO: 214537 - DNA, 120 bp, Artificial Sequence
  ENSG00000116138_26 (sequence is synthesized)
aagcgatgcagccttgagacacgctgtgagcatcccatccgccgccccagcgctgctggtagccaggggaggggtctgcacagcgagaagtactgtgatgactttgagccgttgacatgt

SEQ ID NO: 214538 - DNA, 120 bp, Artificial Sequence
  ENSG00000116138_27 (sequence is synthesized)
atgtcttcagatgcctttctgcctctgtcgattttagggtatggatattaggagccataacttgtaatcttgttctctgaacgtagagataagctgctataaagccagtagatgttaaac

SEQ ID NO: 214539 - DNA, 120 bp, Artificial Sequence
  ENSG00000116138_28 (sequence is synthesized)
tgaagagaaattattcccacctgctatgagtcaggcttaaggaatctcttcaatagtgtctctttagtaaaataccaaacatgtctttgtatcaaggaacttaaaatttctcaacaattg

SEQ ID NO: 214540 - DNA, 120 bp, Artificial Sequence
  ENSG00000116138_29 (sequence is synthesized)
tattttgaacactgttaccctaaaagtgctgtctcttcaagtcatcttttgcaggaagtgagccaagatttgttctagactcccattttgcaaaaggcttactttccacttctgggctgt

SEQ ID NO: 214541 - DNA, 120 bp, Artificial Sequence
  ENSG00000116138_30 (sequence is synthesized)
attttgatgtctcatcttcattgttttcactcttaacttagagctgcttcaccagtattggggtcagactggccatcagcacctgagcgtgctgagctccaggtatagtggaccccaggg

SEQ ID NO: 214542 - DNA, 120 bp, Artificial Sequence
  ENSG00000116138_31 (sequence is synthesized)
tgcctcataccagccagttagagagcataccttttatttttcagggcagaatgaccagtggttctgagtttgagtttggacagcttcaaagagtggtccgttcaaatgtcaaagcaaggt

SEQ ID NO: 214543 - DNA, 120 bp, Artificial Sequence
  ENSG00000116138_32 (sequence is synthesized)
cagcttcaaagagtggtccgttcaaatgtcaaagcaaggtgcctttggtggctttgtgaagggtgaaaatcagtgatgggacatttactaagtatttctttttttttttttttttttagt

SEQ ID NO: 214544 - DNA, 120 bp, Artificial Sequence
  ENSG00000116138_33 (sequence is synthesized)
gccaccactcccggctaagttagtatttctttaatcttaatgctttaaactaagccacttggatcctgaataatttaaatcttgagctacattggtaagtaataaattatttaaggccag

SEQ ID NO: 214545 - DNA, 120 bp, Artificial Sequence
  ENSG00000116138_34 (sequence is synthesized)
gaattcctgtagttttcatggagtctgtagctttattaaaaaataaatcactgccaggcttcattcttccatatgatcctctaaaaatggacacttcctctgaatgctgtatctcatggc

SEQ ID NO: 214546 - DNA, 120 bp, Artificial Sequence
  ENSG00000116138_35 (sequence is synthesized)
acctggtccaactagaaatggtcaaggaattcatttggctccttgatacatcagtcctcaatattactttctaggtattttatggccagattgcttatatgagtggtcttttggtttggt

SEQ ID NO: 214547 - DNA, 120 bp, Artificial Sequence
  ENSG00000116138_36 (sequence is synthesized)
agtaggtttttatttttaatttctgtactaatgaaattcctgactttaatttctgaaaaccaaaaactctccaagtgtatttatttatattttttttaatagagacgaggtcttgctatg

SEQ ID NO: 214548 - DNA, 87 bp, Artificial Sequence
  ENSG00000116138_37 (sequence is synthesized)
caatatgagccaccatgccagatttgttcatttttaaacatttttatctcttcaagtcatcttttgatcttttaaaaagcaccttca

SEQ ID NO: 214549 - DNA, 120 bp, Artificial Sequence
  ENSG00000116138_38 (sequence is synthesized)
ctcttcaagtcatcttttgatcttttaaaaagcaccttcaaacagctgcaccttccatttgcactaggaaatgaaggtagtgatgggattggcaatgttcctggcagatgtttcagccca

SEQ ID NO: 214550 - DNA, 120 bp, Artificial Sequence
  ENSG00000116138_39 (sequence is synthesized)
aaagctcttctacagaccggtttagagctggtgccctatgagaatattagggagcttttattttaaattgaactttacccttgtccatgcaaggcattcctcctgaatgcatccatgaat

SEQ ID NO: 214551 - DNA, 120 bp, Artificial Sequence
  ENSG00000116138_40 (sequence is synthesized)
ttgtttacttttgcgtcaaacatatgagccattgtcatgctcagcctgtgccaccattgctctgtctgatgtatgtaatcatacaagacctgattttggttctaacacagtggtctttga

SEQ ID NO: 214552 - DNA, 120 bp, Artificial Sequence
  ENSG00000116138_41 (sequence is synthesized)
ctatcaacattgatgtttttagagatgggttcttctggttgatacagactatgcattgcgtttagcagatggggtaaaactggcctaaaacaagtctttgcagaatacatgccaatttcc

SEQ ID NO: 214553 - DNA, 120 bp, Artificial Sequence
  ENSG00000116138_42 (sequence is synthesized)
aaaaaaaaaaaaaaatttgttgctcaggtgttgcacaatttttatctaacactgaggctatcagctccaactaaacaacatttcagtgggtgaggctgccctaacttccattaggggcca

SEQ ID NO: 214554 - DNA, 120 bp, Artificial Sequence
  ENSG00000116138_43 (sequence is synthesized)
tggtctcactgccatcacttattagccatgagaatttggttgtagttttcaggtaggttggtttcttcctcatttgcagcttgttgatacttgttcctttttatttattaacatcccaat

SEQ ID NO: 214555 - DNA, 120 bp, Artificial Sequence
  ENSG00000116138_44 (sequence is synthesized)
caatttgcagctgccatcattacataaatatttttctgttataaaaagaagtgtgatctgtttttttagtgatttcctttgtttgggaatagagattggaagcacatactcagacctgtt

SEQ ID NO: 214556 - DNA, 120 bp, Artificial Sequence
  ENSG00000116138_45 (sequence is synthesized)
ttgttaactagaattctttaaaagctgatgccaaacatctttacagaggaactgtagttcacatccacctgtctgacattgtcccctaaaaacaagtgcagtgtggcagctgctgaatct

SEQ ID NO: 214557 - DNA, 120 bp, Artificial Sequence
  ENSG00000116138_46 (sequence is synthesized)
gtctgttcagtttgtcaaggaggataattatgcttgggagagatctgaaaagaaggtgaatattttgcacttttgatactcttaggaacaaataacttatttggcaaattgtttcttttt

SEQ ID NO: 214558 - DNA, 120 bp, Artificial Sequence
  ENSG00000116138_47 (sequence is synthesized)
tatgttttgggtgttgtttttgttttttgactttttttgtattgtgaacaggcactgaagctgatgttattttaagattacagaatggaaaaagaaataaactattttaatgtctgataa

SEQ ID NO: 214559 - DNA, 77 bp, Artificial Sequence
  ENSG00000116138_48 (sequence is synthesized)
atggcctgaactagactgagaggattttccaaagagatttgaactcttcagactttttaacatgcccctgtgaacaa

SEQ ID NO: 214560 - DNA, 120 bp, Artificial Sequence
  ENSG00000116138_49 (sequence is synthesized)
ttggtgtgaagagtttttggtttgggatttttattttatctttttttagctggagagaagaaattttaacttgagctaatagtttgttaatttggttttaggagggaaatgatgcccctg

SEQ ID NO: 214561 - DNA, 120 bp, Artificial Sequence
  ENSG00000116138_50 (sequence is synthesized)
gaaaacagcaggtttctctaacaaaacaccagactcacctccccggcacctgccccccagatcctgtcatctgataacgcagcattggaacatagagtgtagagaagaactctcatgcac

SEQ ID NO: 214562 - DNA, 120 bp, Artificial Sequence
  ENSG00000116138_51 (sequence is synthesized)
ctcctcccatgtaaactgtggctacagggaaaagtcactgtgatttgtgtttactaagaccctgtaggtgtttagatgccttagatttcataatgaaggcagaaggaaagaagcctatca

SEQ ID NO: 214563 - DNA, 120 bp, Artificial Sequence
  ENSG00000116138_52 (sequence is synthesized)
agttgttccatgaactctgccctgtgaaacggtcgcatcgacagaggaatccagggcactttagcaccaaattgtcagatgtgccagcctgtcctagtggtcagagaagatttccctaag

SEQ ID NO: 214564 - DNA, 120 bp, Artificial Sequence
  ENSG00000116138_53 (sequence is synthesized)
atgtaacatttcagctgagacctgaaggatgagcacagtttagccaggcgtctgggatagactgggtcactttacagaagcacagaatatggaagagtgactgtccctactaaagcattc

SEQ ID NO: 214565 - DNA, 120 bp, Artificial Sequence
  ENSG00000116138_54 (sequence is synthesized)
ggcagcagagcctgggactgtctcttcatcagggaacctctggtgcccagcacagggcctgacacacgtggagtccagtgtatagatgtaaaaggaatgagtgaattaacctcaagaggg

SEQ ID NO: 214566 - DNA, 120 bp, Artificial Sequence
  ENSG00000116138_55 (sequence is synthesized)
atacccactcccacctactgatgagaccatgagcccctgaaggacagaaccacatctcattcgtgtttgtgattcctggcacccaacacagcacctgacaaatgacagcctttgatgggt

SEQ ID NO: 214567 - DNA, 120 bp, Artificial Sequence
  ENSG00000116138_56 (sequence is synthesized)
caggccttgacaacccctgatgatctccagagcctattcaagatcaagactgagttgtccacagtggtaatcatttacagtgaaaagcacccagtagagcttttcccagcccacgccacc

SEQ ID NO: 214568 - DNA, 120 bp, Artificial Sequence
  ENSG00000116138_57 (sequence is synthesized)
ctttgacttggaattggctttccctccataaacatttgttgactgccaggcacactggcaggcctcccagagaaacagataatgcgtacacagtccctgctcctcagggctgcatggtgt

SEQ ID NO: 214569 - DNA, 120 bp, Artificial Sequence
  ENSG00000116138_58 (sequence is synthesized)
ggtgatggagacaaggaaaccaatcgtttcaatgtcatgcaccaagggcttcaaggaaagcaagcccagaatggtatcagcataggtaatagcctggagaggtgaaaagcccagaaggtt

SEQ ID NO: 214570 - DNA, 120 bp, Artificial Sequence
  ENSG00000116138_59 (sequence is synthesized)
gctaagcagagggatgaggaatgtgtttcagaaatccctcatgagaagagaggatggttacagccatttcaagagagagagttatggccaccctcctttaagatcttagaggatgtaagg

SEQ ID NO: 214571 - DNA, 120 bp, Artificial Sequence
  ENSG00000116138_60 (sequence is synthesized)
aagaaggttgagaagtacccatctagtaaactataatttccaatatctacttcaaccttttgggtgtcctccaagggcagtaccttgtaaaacacaaggaataaatgttttgtgagtgaa

SEQ ID NO: 214572 - DNA, 120 bp, Artificial Sequence
  ENSG00000116138_61 (sequence is synthesized)
gtcttgtgcgcacacacacccagcagcaagaggccagggtctccgagacaaagaacatagactgaatgatagttgtcttcttcattctgtcctagagcaacttctgcacctgaaaagcag

SEQ ID NO: 214573 - DNA, 120 bp, Artificial Sequence
  ENSG00000116138_62 (sequence is synthesized)
agtcttcattcatttactctcaaatgtctttgagtgcctactatttgtattaggcactgtcctaggctccaaggacaaggtagggaacaatacataggtcctgcccttggggagattcta

SEQ ID NO: 214574 - DNA, 120 bp, Artificial Sequence
  ENSG00000116138_63 (sequence is synthesized)
gtcataaccattctgcccccgtgcatttactcccagcacacattattggagctttatttgggtgtttctaaaactcttgagcttaccttggcaggtaattgtgccatcacatgcactttt

SEQ ID NO: 214575 - DNA, 120 bp, Artificial Sequence
  ENSG00000116138_64 (sequence is synthesized)
atttatttatttttgagacagggtctctgtcacccgggctatagtgcagtggtatgatcacggctcactgaaggcttgacctgccaggctcagttgatcctcctgccccagcctccctag

SEQ ID NO: 214576 - DNA, 89 bp, Artificial Sequence
  ENSG00000116138_65 (sequence is synthesized)
ctccctagtagctgggactacaggtgcacactagcacaccagactaatttttatttttatttttagtaagctgaaactcctgggctcaa

SEQ ID NO: 214577 - DNA, 120 bp, Artificial Sequence
  ENSG00000116138_66 (sequence is synthesized)
gctgaaactcctgggctcaaacgatccatccaccctggcctcccaaagtgctgaggatagtgcctgagccaccgcgcctggcccgttgtatgcacttttatttaaatttaaccctaaaaa

SEQ ID NO: 214578 - DNA, 120 bp, Artificial Sequence
  ENSG00000116141_0 (sequence is synthesized)
cgggcaaccgcctcgcccgaagccctccctcgttactgtccgcataccccggcggcgccgccgcgggaagcggctccccctcctcttcctccgcgtcctcttccctctttcccccgccgg

SEQ ID NO: 214579 - DNA, 120 bp, Artificial Sequence
  ENSG00000116141_1 (sequence is synthesized)
ctccgcgtcctcttccctctttcccccgccggggccgcttgttgcaccgccccgcggcctgcgggagccgctcgccccggccttgtgctcgcgtccgcacccctttcctgtcgccccccg

SEQ ID NO: 214580 - DNA, 120 bp, Artificial Sequence
  ENSG00000116141_2 (sequence is synthesized)
cggccagaccccgctgcccgcacaaaatgtcggcccggacgccattgccgacggtgaacgagcgggacacggaaaatcatacatctgtggatggatatactgaaccacacatccagccta

SEQ ID NO: 214581 - DNA, 120 bp, Artificial Sequence
  ENSG00000116141_3 (sequence is synthesized)
ccaagtcgagtagcagacagaacatcccccggtgtagaaactccattacgtcagcaacagatgaacagcctcacattggaaattaccgtttacaaaaaacaatagggaagggaaattttg

SEQ ID NO: 214582 - DNA, 120 bp, Artificial Sequence
  ENSG00000116141_4 (sequence is synthesized)
ccaaagtcaaattggcaagacacgttctaactggtagagaggttgctgtgaaaataatagacaaaactcagctaaatcctaccagtctacaaaagttatttcgagaagtacgaataatga

SEQ ID NO: 214583 - DNA, 120 bp, Artificial Sequence
  ENSG00000116141_5 (sequence is synthesized)
agatactgaatcatcctaatatagtaaaattgtttgaagttattgaaacagagaagactctctatttagtcatggaatacgcgagtgggggtgaagtatttgattacttagttgcccatg

SEQ ID NO: 214584 - DNA, 120 bp, Artificial Sequence
  ENSG00000116141_6 (sequence is synthesized)
gaagaatgaaagagaaagaggcccgtgcaaaatttaggcagattgtatctgctgtacagtattgtcatcaaaagtacattgttcaccgtgatcttaaggctgaaaaccttctccttgatg

SEQ ID NO: 214585 - DNA, 120 bp, Artificial Sequence
  ENSG00000116141_7 (sequence is synthesized)
gtgatatgaatattaaaattgctgactttggttttagtaatgaatttacagttgggaacaaattggacacattttgtggaagcccaccctatgctgctcccgagcttttccaaggaaaga

SEQ ID NO: 214586 - DNA, 120 bp, Artificial Sequence
  ENSG00000116141_8 (sequence is synthesized)
agtatgatgggcctgaagtggatgtgtggagtctgggcgtcattctctatacattagtcagtggctccttgcctttcgatggccagaatttaaaggaactgcgagagcgagttttacgag

SEQ ID NO: 214587 - DNA, 120 bp, Artificial Sequence
  ENSG00000116141_9 (sequence is synthesized)
ggaagtaccgtattcccttctatatgtccacagactgtgaaaatcttctgaagaaattattagtcctgaatccaataaagagaggcagcttggaacaaataatgaaagatcgatggatga

SEQ ID NO: 214588 - DNA, 120 bp, Artificial Sequence
  ENSG00000116141_10 (sequence is synthesized)
atgttggtcatgaagaggaagaactaaagccatatactgagcctgatccggatttcaatgacacaaaaagaatagacattatggtcaccatgggctttgcacgagatgaaataaatgatg

SEQ ID NO: 214589 - DNA, 120 bp, Artificial Sequence
  ENSG00000116141_11 (sequence is synthesized)
ccttaataaatcagaagtatgatgaagttatggctacttatattcttctaggtagaaaaccacctgaatttgaaggtggtgaatcgttatccagtggaaacttgtgtcagaggtcccggc

SEQ ID NO: 214590 - DNA, 120 bp, Artificial Sequence
  ENSG00000116141_12 (sequence is synthesized)
cagcaaatcagaagcagcggcgtttcagtgatcatgctggtccatccattcctcctgctgtatcatataccaaaagacctcaggctaacagtgtggaaagtgaacagaaagaggagtggg

SEQ ID NO: 214591 - DNA, 120 bp, Artificial Sequence
  ENSG00000116141_13 (sequence is synthesized)
acaaagatgtggctcgaaaacttggcagcacaacagttggatcaaaaagcgagatgactgcaagccctcttgtagggccagagaggaaaaaatcttcaactattccaagtaacaatgtgt

SEQ ID NO: 214592 - DNA, 120 bp, Artificial Sequence
  ENSG00000116141_14 (sequence is synthesized)
attctggaggtagcatggcaagaaggaatacatatgtctgtgaaaggaccacagatcgatacgtagcattgcagaatggaaaagacagcagccttacggagatgtctgtgagtagcatat

SEQ ID NO: 214593 - DNA, 120 bp, Artificial Sequence
  ENSG00000116141_15 (sequence is synthesized)
cttctgcaggctcttctgtggcctctgctgtcccctcagcacgaccccgccaccagaagtccatgtccacttctggtcatcctattaaagtcacactgccaaccattaaagacggctctg

SEQ ID NO: 214594 - DNA, 120 bp, Artificial Sequence
  ENSG00000116141_16 (sequence is synthesized)
aagcttaccggcctggtacaacccagagagtgcctgctgcttccccatctgctcacagtattagtactgcgactccagaccggacccgttttccccgagggagctcaagccgaagcactt

SEQ ID NO: 214595 - DNA, 120 bp, Artificial Sequence
  ENSG00000116141_17 (sequence is synthesized)
tccatggtgaacagctccgggagcgacgcagcgttgcttataatgggccacctgcttcaccatcccatgaaacgggtgcatttgcacatgccagaaggggaacgtcaactggtataataa

SEQ ID NO: 214596 - DNA, 120 bp, Artificial Sequence
  ENSG00000116141_18 (sequence is synthesized)
gcaaaatcacatccaaatttgttcgcagggatccaagtgaaggcgaagccagtggcagaaccgacacctcaagaagtacatcaggggaaccaaaagaaagagacaaggaagagggtaaag

SEQ ID NO: 214597 - DNA, 120 bp, Artificial Sequence
  ENSG00000116141_19 (sequence is synthesized)
attctaagccgcgttctttgcggttcacatggagtatgaagaccactagttcaatggaccctaatgacatgatgagagaaatccgaaaagtgttagatgcaaataactgtgattatgagc

SEQ ID NO: 214598 - DNA, 120 bp, Artificial Sequence
  ENSG00000116141_20 (sequence is synthesized)
aaaaagagagatttttgcttttctgtgtccatggagacgctagacaggatagcctcgtgcagtgggagatggaagtctgcaagttgccacgactgtcacttaatggggttcgcttcaagc

SEQ ID NO: 214599 - DNA, 120 bp, Artificial Sequence
  ENSG00000116141_21 (sequence is synthesized)
gaatatctgggacatctattgcctttaagaacattgcatcaaaaatagcaaatgagcttaagctgtaaagaagtccaaatttacaggttcagggaagatacatacatatatgaggtacag

SEQ ID NO: 214600 - DNA, 120 bp, Artificial Sequence
  ENSG00000116141_22 (sequence is synthesized)
tttttgaatgtactggtaatgcctaatgtggtctgcctgtgaatctccccatgtagaatttgcccttaatgcaataaggttatacatagttatgaactgtaaaattaaagtcagtatgaa

SEQ ID NO: 214601 - DNA, 120 bp, Artificial Sequence
  ENSG00000116141_23 (sequence is synthesized)
ctataataaatatctgtagcttaaaaagtaggttcacatgtacaggtaagtatattgtgtatttctgttcattttctgttcatagagttgtataataaaacatgattgcttaaaaacttg

SEQ ID NO: 214602 - DNA, 80 bp, Artificial Sequence
  ENSG00000116141_24 (sequence is synthesized)
gctgctccgcgcgcagccggctcgggccgctcctcctgactgaggcgcggcggcggcggtggctgtgaccgcgcggaccg

SEQ ID NO: 214603 - DNA, 120 bp, Artificial Sequence
  ENSG00000116141_25 (sequence is synthesized)
cgggcgcgtggatgcggctgggtcgggcggcgccgtacacctgaggcggagaacggggcgcggcgcgggtgacgctgtcagggccgcggttcctgacgcccaggcgctcgccaggacgag

SEQ ID NO: 214604 - DNA, 120 bp, Artificial Sequence
  ENSG00000116141_26 (sequence is synthesized)
aggacgagccaggcagtgatttgaggcaccggcttcaccttcacccatggtccggagagcctagcggggctcgccaccgcctcccggctccccttccacgcctcatcctgccagcctcgc

SEQ ID NO: 214605 - DNA, 120 bp, Artificial Sequence
  ENSG00000116141_27 (sequence is synthesized)
ctggtgggtttttaaaattcttacctccatcatgcaattttgaaaattgtgtccagaattaaaagtgcatagaaatagcctttacaattgtagcatggacctttaaaaattgttttaaaa

SEQ ID NO: 214606 - DNA, 120 bp, Artificial Sequence
  ENSG00000116141_28 (sequence is synthesized)
tcttatttaaatttaaaccagaagctgaaaaatagatcagctttattatacacaaaattattactgcttatctttgctcttttccttgttatcccgcaaggtttagttgagaagatacaa

SEQ ID NO: 214607 - DNA, 120 bp, Artificial Sequence
  ENSG00000116141_29 (sequence is synthesized)
aatgtttacagtgttggcacttagagtttttaaattcaagtacatgaaattcagtaatagcattgccttgagctaactaggaagtaccgggaaaaaagttaaatctacatcaagtttctt

SEQ ID NO: 214608 - DNA, 120 bp, Artificial Sequence
  ENSG00000116141_30 (sequence is synthesized)
ttgaactttgaagtgttttctgacccactgctaactgtagcaacaaaatttaaaagaaaaaaaacatactttatctggctattataacataaactgtcacgtaggtttgctgccttcaga

SEQ ID NO: 214609 - DNA, 120 bp, Artificial Sequence
  ENSG00000116141_31 (sequence is synthesized)
ataccgcaatttaattgcgggaatataataatattgggactgtttcacagcacaaactcatctttacagtgttgatcaatgcatcagttaagaaataatgccacctcaggaattaactgg

SEQ ID NO: 214610 - DNA, 120 bp, Artificial Sequence
  ENSG00000116141_32 (sequence is synthesized)
cattgggaacatttgcctcattctcctgctatcctcttcattcacccctgccactgtaatatctataagtacttaagagacttgtgagcaaaacatactatttataacagtatatgattg

SEQ ID NO: 214611 - DNA, 120 bp, Artificial Sequence
  ENSG00000116141_33 (sequence is synthesized)
atttatgcttatgtggttgttcagtttgttcccatgtaactcgtttgttttaaatattttgccagatttcttgtatttattccacatcattatgcctataatgtgccgctttgtgattgg

SEQ ID NO: 214612 - DNA, 120 bp, Artificial Sequence
  ENSG00000116141_34 (sequence is synthesized)
gcatttgcctacttttctttcataattagtgatatatgcgatgtaaaaccactagtaaaggtacattttaatacttgttattttatactgaattagccttggaggttgactgtgcaatgt

SEQ ID NO: 214613 - DNA, 120 bp, Artificial Sequence
  ENSG00000116141_35 (sequence is synthesized)
tatttactgttgtaattactgtaataccaacatatgggccccatctgcacactcctgaaaaacagaaagtgtattcaaattttatcagtttaaagaaaataaagctgtgataaatactgt

SEQ ID NO: 214614 - DNA, 120 bp, Artificial Sequence
  ENSG00000116141_36 (sequence is synthesized)
aattccaacctacattagaaggtctaagtgtaggtgatgtgccattccataatggcttccagactagggtgaattttatgttctgtactgtactgtgatgtagctttcttctgtaacagt

SEQ ID NO: 214615 - DNA, 120 bp, Artificial Sequence
  ENSG00000116141_37 (sequence is synthesized)
tatgttttaaaattaagtgagttttttttttgccttagcaaagggtggtgtttgaaaaaaaaaatgtgtagcccctttttaacctagtgttcattcaaaaaaaaattgatgcaaatcttt

SEQ ID NO: 214616 - DNA, 120 bp, Artificial Sequence
  ENSG00000116141_38 (sequence is synthesized)
attcactttcactggtgcacactgaaattttacttgaacagttctcataataaagcacttgtcttttgctctttatcagaatgtgaattacctgttttctggtacaaaagtattctgtat

SEQ ID NO: 214617 - DNA, 120 bp, Artificial Sequence
  ENSG00000116141_39 (sequence is synthesized)
gaggagtttattgtatgtgttctaaatttagttggcaaagggtgaagctgtgaaggttttcaagattattgaaactatgaaggtttcttgtcattatgacaagaaagtttaatcttttta

SEQ ID NO: 214618 - DNA, 120 bp, Artificial Sequence
  ENSG00000116141_40 (sequence is synthesized)
taggaattcctgtcactgaaatacgtttttaaaaaaatagactcatgtgttttccacggtagaaactgatatttttttacattttctcactgtggccaactcttctgtgtttgtagaaag

SEQ ID NO: 214619 - DNA, 120 bp, Artificial Sequence
  ENSG00000116141_41 (sequence is synthesized)
gaatttgacttcaatatcttttatgaactaaaaatgaaatcttgatactcactttagatttttcattttatgtgttcatgacaacataaatatttttcaaagatttagaggaattttgca

SEQ ID NO: 214620 - DNA, 120 bp, Artificial Sequence
  ENSG00000116141_42 (sequence is synthesized)
atgtgtttgcataaataaataccagtttatgttcaccggctatgtgataccaggatttccttggcttctgttgaaatattatttgatatgacatcccttatattaaattaattattttgt

SEQ ID NO: 214621 - DNA, 120 bp, Artificial Sequence
  ENSG00000116141_43 (sequence is synthesized)
gtgaacgagcgggacacggaaaatcaaagatctggacagcatggacttactcctcagaagtcattctataagggtaccaggagtatgaggatcctaaatcccttcaatttagttacatac

SEQ ID NO: 214622 - DNA, 120 bp, Artificial Sequence
  ENSG00000116147_0 (sequence is synthesized)
ccaggcttcctcctctctttcacgtcagaggcaggaaccgactgtgctaaggctgttggctcaacacccagaggagacgggcagacccagggagagtgagagaagggggtcctctctgac

SEQ ID NO: 214623 - DNA, 120 bp, Artificial Sequence
  ENSG00000116147_1 (sequence is synthesized)
ccaaggaattaccactagtggagtgaagccacctgactttttgatcttattttggttgcctcctcattctccttccacccgtagccctgacagcttgggtttcatttctttcgtggagcc

SEQ ID NO: 214624 - DNA, 120 bp, Artificial Sequence
  ENSG00000116147_2 (sequence is synthesized)
ttgtctcttcctcccagaataggaggaagggaagagaagggaaagaggagggctctctaggtgagcgcatcagctggctccagcctgagcaagcaagaattttcttcccaggaagctcct

SEQ ID NO: 214625 - DNA, 120 bp, Artificial Sequence
  ENSG00000116147_3 (sequence is synthesized)
ctcgctccccggccgcccacccccagcctgggtggctgtatcgttttaactgcatagagggcaggtctcttttggaattaggattaaagaaagtgcagtaaagagaaagcatcgaagaca

SEQ ID NO: 214626 - DNA, 120 bp, Artificial Sequence
  ENSG00000116147_4 (sequence is synthesized)
ccatcacaaaagattcccacaactccatgctgtgtgctgcaggctggtcctgaacccagatctctggctgagaggatgggggcagatggggaaacagtggttctgaagaacatgctcatt

SEQ ID NO: 214627 - DNA, 120 bp, Artificial Sequence
  ENSG00000116147_5 (sequence is synthesized)
ggcatcaacctgatccttctgggctccatgatcaagccttcagagtgtcagctggaggtcaccacagaaagggtccagagacagtcagtggaggaggagggaggcattgccaactacaac

SEQ ID NO: 214628 - DNA, 120 bp, Artificial Sequence
  ENSG00000116147_6 (sequence is synthesized)
acatccagcaaagagcagcctgtggtcttcaaccacgtgtacaacattaacgtgcccttggacaacctctgctcctcagggctagaggcctctgctgagcaggaggtgagtgcagaagac

SEQ ID NO: 214629 - DNA, 120 bp, Artificial Sequence
  ENSG00000116147_7 (sequence is synthesized)
gagactctggcagagtacatgggccagacctcagaccacgagagccaggtcacctttacacacaggatcaacttccccaaaaaggcctgtccatgtgccagttcagcccaggtgctgcag

SEQ ID NO: 214630 - DNA, 120 bp, Artificial Sequence
  ENSG00000116147_8 (sequence is synthesized)
gagctgctgagccggatcgagatgctggagagggaggtgtcggtgctgcgagaccagtgcaacgccaactgctgccaagaaagtgctgccacaggacaactggactatatccctcactgc

SEQ ID NO: 214631 - DNA, 120 bp, Artificial Sequence
  ENSG00000116147_9 (sequence is synthesized)
agtggccacggcaactttagctttgagtcctgtggctgcatctgcaacgaaggctggtttggcaagaattgctcggagccctactgcccgctgggttgctccagccggggggtgtgtgtg

SEQ ID NO: 214632 - DNA, 120 bp, Artificial Sequence
  ENSG00000116147_10 (sequence is synthesized)
gatggccagtgcatctgtgacagcgagtacagcggggatgactgttccgaactccggtgcccaacagactgcagctcccgggggctctgcgtggacggggagtgtgtctgtgaagagccc

SEQ ID NO: 214633 - DNA, 120 bp, Artificial Sequence
  ENSG00000116147_11 (sequence is synthesized)
tacactggcgaggactgcagggaactgaggtgccctggggactgttcggggaaggggagatgtgccaacggtacctgtttatgcgaggagggctacgttggtgaggactgcggccagcgg

SEQ ID NO: 214634 - DNA, 120 bp, Artificial Sequence
  ENSG00000116147_12 (sequence is synthesized)
cagtgtctgaatgcctgcagtgggcgaggacaatgtgaggaggggctctgcgtctgtgaagagggctaccagggccctgactgctcagcagttgcccctccagaggacttgcgagtggct

SEQ ID NO: 214635 - DNA, 120 bp, Artificial Sequence
  ENSG00000116147_13 (sequence is synthesized)
ggtatcagcgacaggtccattgagctggaatgggacgggccgatggcagtgacggaatatgtgatctcttaccagccgacggccctggggggcctccagctccagcagcgggtgcctgga

SEQ ID NO: 214636 - DNA, 120 bp, Artificial Sequence
  ENSG00000116147_14 (sequence is synthesized)
gattggagtggtgtcaccatcacggagctggagccaggtctcacctacaacatcagcgtctacgctgtcattagcaacatcctcagccttcccatcactgccaaggtggccacccatctc

SEQ ID NO: 214637 - DNA, 120 bp, Artificial Sequence
  ENSG00000116147_15 (sequence is synthesized)
tccactcctcaagggctacaatttaagacgatcacagagaccaccgtggaggtgcagtgggagcccttctcattttccttcgatgggtgggaaatcagcttcattccaaagaacaatgaa

SEQ ID NO: 214638 - DNA, 120 bp, Artificial Sequence
  ENSG00000116147_16 (sequence is synthesized)
gggggagtgattgctcaggtccccagcgatgttacgtcctttaaccagacaggactaaagcctggggaggaatacattgtcaatgtggtggctctgaaagaacaggcccgcagcccccct

SEQ ID NO: 214639 - DNA, 120 bp, Artificial Sequence
  ENSG00000116147_17 (sequence is synthesized)
acctcggccagcgtctccacagtcattgacggccccacgcagatcctggttcgcgatgtctcggacactgtggcttttgtggagtggattccccctcgagccaaagtcgatttcattctt

SEQ ID NO: 214640 - DNA, 120 bp, Artificial Sequence
  ENSG00000116147_18 (sequence is synthesized)
ttgaaatatggcctggtgggcggggaaggtgggaggaccaccttccggctgcagcctcccctgagccaatactcagtgcaggccctgcggcctggctcccgatacgaggtgtcagtcagt

SEQ ID NO: 214641 - DNA, 120 bp, Artificial Sequence
  ENSG00000116147_19 (sequence is synthesized)
gccgtccgagggaccaacgagagcgattctgccaccactcagttcacaacagagatcgatgcccccaagaacttgcgagttggttctcgcacagcaaccagccttgacctcgagtgggat

SEQ ID NO: 214642 - DNA, 120 bp, Artificial Sequence
  ENSG00000116147_20 (sequence is synthesized)
aacagtgaagccgaagttcaggagtacaaggttgtgtacagcaccctggcgggtgagcaatatcatgaggtactggtccccaggggcattggtccaaccaccagggccaccctgacagat

SEQ ID NO: 214643 - DNA, 120 bp, Artificial Sequence
  ENSG00000116147_21 (sequence is synthesized)
atatctgccgtcatgaactcacagcaaagcgtgccagccaccatgaatgccaggactgaacttgacagtccccgagacctcatggtgacagcctcctcggagacctccatctccctcatc

SEQ ID NO: 214644 - DNA, 120 bp, Artificial Sequence
  ENSG00000116147_22 (sequence is synthesized)
tggaccaaggccagtggccccattgaccactaccgaattacctttaccccatcctctgggattgcctcagaagtcaccgtacccaaggacaggacctcatacacactaacagatctagag

SEQ ID NO: 214645 - DNA, 120 bp, Artificial Sequence
  ENSG00000116147_23 (sequence is synthesized)
cctggggcagagtacatcatttccgtcactgctgagaggggtcggcagcagagcttggagtccactgtggatgctttcacaggcttccgtcccatctctcatctgcacttttctcatgtg

SEQ ID NO: 214646 - DNA, 120 bp, Artificial Sequence
  ENSG00000116147_24 (sequence is synthesized)
acctcctccagtgtgaacatcacttggagtgatccatctcccccagcagacagactcattcttaactacagccccagggatgaggaggaagagatgatggaggtctccctggatgccacc

SEQ ID NO: 214647 - DNA, 120 bp, Artificial Sequence
  ENSG00000116147_25 (sequence is synthesized)
aagaggcatgctgtcctgatgggcctgcaaccagccacagagtatattgtgaaccttgtggctgtccatggcacagtgacctctgagcccattgtgggctccatcaccacaggaattgat

SEQ ID NO: 214648 - DNA, 120 bp, Artificial Sequence
  ENSG00000116147_26 (sequence is synthesized)
cccccaaaagacatcacaattagcaatgtgaccaaggactcagtgatggtctcctggagccctcctgttgcatctttcgattactaccgagtatcatatcgacccacccaagtgggacga

SEQ ID NO: 214649 - DNA, 120 bp, Artificial Sequence
  ENSG00000116147_27 (sequence is synthesized)
ctagacagctcagtggtgcccaacactgtgacagaattcaccatcaccagactgaacccagctaccgaatacgaaatcagcctcaacagcgtgcggggcagggaggaaagcgagcgcatc

SEQ ID NO: 214650 - DNA, 120 bp, Artificial Sequence
  ENSG00000116147_28 (sequence is synthesized)
tgtactcttgtgcacacagccatggacaaccctgtggatctgattgctaccaatatcactccaacagaagccctgctgcagtggaaggcaccagtgggtgaggtggagaactacgtcatt

SEQ ID NO: 214651 - DNA, 120 bp, Artificial Sequence
  ENSG00000116147_29 (sequence is synthesized)
gttcttacacactttgcagtcgctggagagaccatccttgttgacggagtcagtgaggaatttcggcttgttgacctgcttcctagcacccactatactgccaccatgtatgccaccaat

SEQ ID NO: 214652 - DNA, 120 bp, Artificial Sequence
  ENSG00000116147_30 (sequence is synthesized)
ggacctctcaccagtggcaccatcagcaccaacttttctactctcctggaccctccggcaaacctgacagccagtgaagtcaccagacaaagtgccctgatctcctggcagcctcccagg

SEQ ID NO: 214653 - DNA, 120 bp, Artificial Sequence
  ENSG00000116147_31 (sequence is synthesized)
gcagagattgaaaattatgtcttgacctacaaatccaccgatggaagccgcaaggagctgattgtggatgcagaagacacctggattcgactggagggcctgttggagaacacagactac

SEQ ID NO: 214654 - DNA, 120 bp, Artificial Sequence
  ENSG00000116147_32 (sequence is synthesized)
acggtgctcctgcaggcagcacaggacaccacgtggagcagcatcacctccaccgctttcaccacaggaggccgggtgttccctcatccccaagactgtgcccagcatttgatgaatgga

SEQ ID NO: 214655 - DNA, 120 bp, Artificial Sequence
  ENSG00000116147_33 (sequence is synthesized)
gacactttgagtggggtttaccccatcttcctcaatggggagctgagccagaaattacaagtgtactgtgatatgaccaccgacgggggcggctggattgtattccagaggcggcagaat

SEQ ID NO: 214656 - DNA, 120 bp, Artificial Sequence
  ENSG00000116147_34 (sequence is synthesized)
ggccaaactgattttttccggaaatgggctgattaccgtgttggcttcgggaacgtggaggatgagttctggctggggctggacaatatacacaggatcacatcccagggccgctatgag

SEQ ID NO: 214657 - DNA, 120 bp, Artificial Sequence
  ENSG00000116147_35 (sequence is synthesized)
ctgcgcgtggacatgcgggatggccaagaggccgccttcgcctcctacgacaggttctctgtcgaggacagcagaaacctgtacaaactccgcataggaagctacaacggcactgcgggg

SEQ ID NO: 214658 - DNA, 120 bp, Artificial Sequence
  ENSG00000116147_36 (sequence is synthesized)
gactccctcagctatcatcaaggacgccctttctccacagaggatagagacaatgatgttgcagtgactaactgtgccatgtcgtacaagggagcatggtggtataagaactgccaccgg

SEQ ID NO: 214659 - DNA, 120 bp, Artificial Sequence
  ENSG00000116147_37 (sequence is synthesized)
accaacctcaatgggaagtacggggagtccaggcacagtcagggcatcaactggtaccattggaaaggccatgagttctccatcccctttgtggaaatgaagatgcgcccctacaaccac

SEQ ID NO: 214660 - DNA, 120 bp, Artificial Sequence
  ENSG00000116147_38 (sequence is synthesized)
cgtctcatggcagggagaaaacggcagtccttacagttctgagcagtgggcggctgcaagccaaccaatattttctgtcatttgtttgtattttataatatgaaacaaggggggagggta

SEQ ID NO: 214661 - DNA, 120 bp, Artificial Sequence
  ENSG00000116147_39 (sequence is synthesized)
atagcaatgtgttttgcaacatattaagagtatgtgaaggaagcagggatgtcgcaggaatccgctggctaacatctgctcttggtttctgctgccctggagcctgaccctcagtctcca

SEQ ID NO: 214662 - DNA, 120 bp, Artificial Sequence
  ENSG00000116147_40 (sequence is synthesized)
ttctccctcctacccaggcctcctcaaccttcacctcctttcccaccaaggaggagaagtaggaagttttcttaaagggccaattcaaagccaagtcgtggggtgcagattgttatggtg

SEQ ID NO: 214663 - DNA, 120 bp, Artificial Sequence
  ENSG00000116147_41 (sequence is synthesized)
acaggcacacacatttttctacccttcttctgagatgtcctctgccttccaggtatttgtgattttgtcacagcctgacatggccaggttctcacactggcccagagaaaagagcctcag

SEQ ID NO: 214664 - DNA, 120 bp, Artificial Sequence
  ENSG00000116147_42 (sequence is synthesized)
caagagagttttgccaacaattccccttaaaaggaaacagatcaactacaccgcatcccaacaacccaggttcttttccttccttccttccttcctcccttccttctttcctgccttccc

SEQ ID NO: 214665 - DNA, 89 bp, Artificial Sequence
  ENSG00000116147_43 (sequence is synthesized)
agccaccatacctggctgatttttcgtgttgtccaggctggtcacaaactcctggccttgaacaatcctcccacctcagcctcccaaaa

SEQ ID NO: 214666 - DNA, 120 bp, Artificial Sequence
  ENSG00000116147_44 (sequence is synthesized)
agcctcccaaaatgctgggattacaggctacagccactgcatccagccccaagtcctttataatgggccaaagattctcatcttctgacactcttattataccagccacatgtcctgtta

SEQ ID NO: 214667 - DNA, 120 bp, Artificial Sequence
  ENSG00000116147_45 (sequence is synthesized)
ttataccagccacatgtcctgttacctttcaagaacagtggctcttttctggccctgatggagtcttttgcctaatcccatcctgtcttagaccccagagcctcaaaagcccaaccagca

SEQ ID NO: 214668 - DNA, 120 bp, Artificial Sequence
  ENSG00000116147_46 (sequence is synthesized)
ttttggaatctagttcccaaggcattgcctgctcctggccctgggtggcacagtggctatgtgcctgtgagtcatcagccactgcccccaccctcaggtcagacagacagtcactttctg

SEQ ID NO: 214669 - DNA, 120 bp, Artificial Sequence
  ENSG00000116147_47 (sequence is synthesized)
caaaggtaggagggggagatggttgtagtttttagcacttttgggtcaagcattgaggaaaggactgaagaagtcaaaatcagggcactgccatagagattatagtttccatgggaaaca

SEQ ID NO: 214670 - DNA, 120 bp, Artificial Sequence
  ENSG00000116147_48 (sequence is synthesized)
cagatcttccctagccctgttttctccatttctggtcctatttgtcacagattctttttttctgaattgcaaaccgaaggcctcatatctatcttcacccaagccctccttagtgtaggt

SEQ ID NO: 214671 - DNA, 120 bp, Artificial Sequence
  ENSG00000116147_49 (sequence is synthesized)
ggcttaataagagtcaggagaagaaggtatatgcccagagagctatacccctgactgataatcctggaaagaggttgattttttttttcttttttggtcctatgggaaacaggaatgacc

SEQ ID NO: 214672 - DNA, 120 bp, Artificial Sequence
  ENSG00000116147_50 (sequence is synthesized)
ttcttaatgaggtgagatcatgagaagcctttccatcttcttttattattctgccttgcaaaggaaaaatgacaatagccaaaggaaattacatccagaaatccaaaggtgaataggtga

SEQ ID NO: 214673 - DNA, 120 bp, Artificial Sequence
  ENSG00000116147_51 (sequence is synthesized)
taactgtgggcctacttcccattttatgagatgcactgtcttcactagcacaatttgatcttaagcccaagagagctagatgctctagaagccgtgacctttcaatttctcctccaaatc

SEQ ID NO: 214674 - DNA, 120 bp, Artificial Sequence
  ENSG00000116147_52 (sequence is synthesized)
agctgtcttctccctttcctctcccattcctcaaggcccagcaccattttctgtagtgcctatgtttgtctgaccagagcagtgtgtacctttgccaaccagttactggatgagccttag

SEQ ID NO: 214675 - DNA, 120 bp, Artificial Sequence
  ENSG00000116147_53 (sequence is synthesized)
tgtcggcaattttctaatggaaatatcctcactcttaccaagctttgagaaccaagatgaaaagtcccttgggctgaccatcaggcctcggacctcatggggatgcagccagccaccatt

SEQ ID NO: 214676 - DNA, 120 bp, Artificial Sequence
  ENSG00000116147_54 (sequence is synthesized)
gaatggaggcgcttcccttgccgcaggcttctaggctttgttcactgcggcagtgtggatgtgacaggcataaccctgaaaaacctaggcaccacttgcatttctcagttaaccatgggc

SEQ ID NO: 214677 - DNA, 120 bp, Artificial Sequence
  ENSG00000116147_55 (sequence is synthesized)
ttcaacaaactgggaggaggaaaaaacagaaacagatcctttcaacaagcatgtaaattacagaagacttacctagagacggggcaacaatgaatagtaggaagcacattgcatgggaaa

SEQ ID NO: 214678 - DNA, 120 bp, Artificial Sequence
  ENSG00000116147_56 (sequence is synthesized)
cttgagggccgaggtacaggccaacagctgtcatcttagctacgacatgacatcggctgggttgtttcacctctctgggccagtttcttcatctgtcagatgagagattagactagaatg

SEQ ID NO: 214679 - DNA, 120 bp, Artificial Sequence
  ENSG00000116147_57 (sequence is synthesized)
agttctaatttccctttcagttttgacggtcaatgatgctaatctgtgatctgaaaacctaagtagaaattggcatggtgggacagcacaattaggtaatgaaaattcactagactccct

SEQ ID NO: 214680 - DNA, 82 bp, Artificial Sequence
  ENSG00000116147_58 (sequence is synthesized)
aggaaggaaggaaggaaagaaggaaggggagggagggagggaaagaaaagagagagattgattcaggagtcataatactgca

SEQ ID NO: 214681 - DNA, 120 bp, Artificial Sequence
  ENSG00000116147_59 (sequence is synthesized)
acacacacacacacacgaaaatactgcagaaaagatcatgccgagtgagaggctgaactctttttgtccataaaaacagagaccaggtacctgggtggtgccagcacgcccacttcatca

SEQ ID NO: 214682 - DNA, 120 bp, Artificial Sequence
  ENSG00000116147_60 (sequence is synthesized)
aggaagttgaaatggaaaaagattatgtgttgtcaattcaggtgaaagtcaagaaacatcagtggaaacaaaaatcttccttttattgaaaccattctacactatggaacatttttataa

SEQ ID NO: 214683 - DNA, 120 bp, Artificial Sequence
  ENSG00000116147_61 (sequence is synthesized)
atagtaccagcggcattgcatagctttattttgaagcaagaaagagacttcaaagatcagcttattcaaccctctataaaaggatttatagattccttttatttaatagggtgattttct

SEQ ID NO: 214684 - DNA, 120 bp, Artificial Sequence
  ENSG00000116147_62 (sequence is synthesized)
catgagttttcaccatgtttaaaagacactgtgccccactctcatcccaaggtctatggtcaacttgactcaatgctcataactttcctcgctgattcctgcttatcctgctcctccaag

SEQ ID NO: 214685 - DNA, 120 bp, Artificial Sequence
  ENSG00000116147_63 (sequence is synthesized)
cacaactgcatttcccaaaggtagatccagtaagcaatactctcaaagcacccaccctatgcacaccagtttccctcaagggactcaaaaggaatcgaggtagacccttctcagaggctg

SEQ ID NO: 214686 - DNA, 120 bp, Artificial Sequence
  ENSG00000116147_64 (sequence is synthesized)
tttaactacagacacatcaggatatgtactaatacccaaaaccaaaaccaccaccaatgactgcaatagattcactgtctagacccaaggtccaggcagtttcccttttttgcatttccc

SEQ ID NO: 214687 - DNA, 120 bp, Artificial Sequence
  ENSG00000116147_65 (sequence is synthesized)
caacatataaagataatttccaacatatcagatgcacattcaccagggttatttctggaaggtgaaggggtcaggtgtagaagaggtggcaagaatgacaagtctgtggaaaactgttgg

SEQ ID NO: 214688 - DNA, 120 bp, Artificial Sequence
  ENSG00000116147_66 (sequence is synthesized)
ccttgagaccacagtgaactggtggaaggggacttgctaagtgtggccacaaggtggcagtcacctcctgaaaccccgtgtgaaacgtcagcggggttgagaaaggccacgtctccaagt

SEQ ID NO: 214689 - DNA, 120 bp, Artificial Sequence
  ENSG00000116147_67 (sequence is synthesized)
ttccaggagagccaaaccaggactcaggaaaaccggccagctgatttgtatgggagattgatttgtaaaagaacaacaacaacatatggcagcaaggaaatgcaaagcaaacatctacaa

SEQ ID NO: 214690 - DNA, 120 bp, Artificial Sequence
  ENSG00000116147_68 (sequence is synthesized)
atatttgaatccacctgtccctcacctaccaacttccccctctactactcataaagtggtaggactcctaatgccccgcttccttccacctgagaaccaaccagcaccctgatatttcaa

SEQ ID NO: 214691 - DNA, 120 bp, Artificial Sequence
  ENSG00000116147_69 (sequence is synthesized)
agccagacctaaagaaccatggttgccaataacctcaatgccaaaccaaacaatcctaatcacatttttacttttcaaatccagtctcagagcagagctgtagattaagggacaaaaagt

SEQ ID NO: 214692 - DNA, 120 bp, Artificial Sequence
  ENSG00000116147_70 (sequence is synthesized)
cattgtggaatcttttcaaatagctcttgtaaaagcatcagttgggaaagagtttatgagttcctctttgtcctctcctctggagaaaagacagaacatgcaagaacactagatacacca

SEQ ID NO: 214693 - DNA, 120 bp, Artificial Sequence
  ENSG00000116147_71 (sequence is synthesized)
agctatgggtgttgaaatagactagctggtgacctggatttgcaaataccctagggacatgaaaacattttttctttttctttttcttttttgtaacctccacccagaatttcaggaaag

SEQ ID NO: 214694 - DNA, 120 bp, Artificial Sequence
  ENSG00000116147_72 (sequence is synthesized)
gtggggccacatgcccaggatatatggtattctactgcttgctttcttatcaccagaatactagtcaatctgatttcttagttccatgtcttttcttccaaggaggtagggcatggggtt

SEQ ID NO: 214695 - DNA, 120 bp, Artificial Sequence
  ENSG00000116147_73 (sequence is synthesized)
gggggacactttccgccttccttgcatctcactgtccactcttaaatttttattaagaaacctctgaaagattcaaaattcagttcagtttcaataatcccaaagaagttgggataattt

SEQ ID NO: 214696 - DNA, 120 bp, Artificial Sequence
  ENSG00000116147_74 (sequence is synthesized)
gttttcacttgcttcaaacttgccacggctgcaggaggagtctcaggacctcagaggaatggggcagatgtgtgaagtctgggagtctgcctcccacccagatgccaggagctgcatact

SEQ ID NO: 214697 - DNA, 120 bp, Artificial Sequence
  ENSG00000116147_75 (sequence is synthesized)
cagctctgcctcacttccctgatggtctgctttcatccaggttaccatgacagagagggtctatcctctaaagaaagctgagttacaggctggcccctggggttgttcctgtagcctctc

SEQ ID NO: 214698 - DNA, 120 bp, Artificial Sequence
  ENSG00000116147_76 (sequence is synthesized)
tttgaccacattcctgaagatgtttagctgaatgcctcctcaaacctttgcttcttccataacccaatcctacacatatgtgataaagctttcttcaacaatactgggtcatttggacac

SEQ ID NO: 214699 - DNA, 120 bp, Artificial Sequence
  ENSG00000116147_77 (sequence is synthesized)
taccagtccagatgagaactcacagaccaaatgaaaactttcaaaagcaagcagggaaagtaactcctatatgctttaagatgatgtattggtgtagattcaggtccaatttgaaaaaat

SEQ ID NO: 214700 - DNA, 120 bp, Artificial Sequence
  ENSG00000116147_78 (sequence is synthesized)
gtctctggttctttctaattgtatccactctggatttgtttatgccagttctacattcatcaagccttgagaaacaggtggaaagaagaaaaatataaaattaagaagaagctgatggat

SEQ ID NO: 214701 - DNA, 120 bp, Artificial Sequence
  ENSG00000116147_79 (sequence is synthesized)
cattggagattcaaaacaagccttctaccggtggcaccacactgaaaggcagagacaaggcaggagcggccatgggagaggaagcagcattggcttctcacgttctggcctccagcctcc

SEQ ID NO: 214702 - DNA, 120 bp, Artificial Sequence
  ENSG00000116147_80 (sequence is synthesized)
caccagagcttctgccattcacccacttaacttgaggagaaactaaggcaccaaggcctgtcactgcaccgaaaaccagaagcagaaggactttctttctttgctcaaccagttctgcct

SEQ ID NO: 214703 - DNA, 120 bp, Artificial Sequence
  ENSG00000116147_81 (sequence is synthesized)
ggatctgacttttgcgtcaccagtagtcacaagcctgatttgtcatctccagcattctgtttatttttttaaggtcaatctttgcctgaaacatgacttcattgcacctgcagcacttca

SEQ ID NO: 214704 - DNA, 120 bp, Artificial Sequence
  ENSG00000116147_82 (sequence is synthesized)
ttgtccaaatgtccttggcaaacctcacagtctttggacagtgttgcattttctccaaaggggaaatcctctctccttcctcaagcttaataaggctcttgcagtgcatccaaataacac

SEQ ID NO: 214705 - DNA, 120 bp, Artificial Sequence
  ENSG00000116147_83 (sequence is synthesized)
agctcttgttcctcagacacactcagccccctctgataacttcataaaacagctccttattgtctgggccatgaagccaggctaatgctaaagttccagttcaaaaacatttaactctat

SEQ ID NO: 214706 - DNA, 120 bp, Artificial Sequence
  ENSG00000116147_84 (sequence is synthesized)
tatccttatgaggccagctctcctgggtactggcactcactcactggcaccatggattcaggtcaggtggtgcaaacatcttccctgagaagcaagccatacacccaacaggtctagaac

SEQ ID NO: 214707 - DNA, 120 bp, Artificial Sequence
  ENSG00000116147_85 (sequence is synthesized)
acctaggtcacaagaaagggtttcagtccagatgcactgtcagtaagtgaacacaaggacaagaatgcatgaactgttattttcttcccatcactggtttagcagcccctagggagaccc

SEQ ID NO: 214708 - DNA, 120 bp, Artificial Sequence
  ENSG00000116147_86 (sequence is synthesized)
tgtgttgctctttaatattctgacatggagcactaatatgctcaacactgcctccaacaggcaaatgttggaaatacactttcagagctggatgggactcaagatcatctaatataatcc

SEQ ID NO: 214709 - DNA, 120 bp, Artificial Sequence
  ENSG00000116147_87 (sequence is synthesized)
tctcattttatttcctctcaaggaaaccaagggcaagaaagtttaggcaatttgctcacattcacacaggcaattagtaacagagctgagttcgggtctggtataggctttttaatttga

SEQ ID NO: 214710 - DNA, 120 bp, Artificial Sequence
  ENSG00000116147_88 (sequence is synthesized)
ttctccacaaatgaacactaagataaatagcatttattgcatacccactatttaccagatactgtgcaaagggctttacatatattactttactaaatcctcaccataaactttaagtca

SEQ ID NO: 214711 - DNA, 120 bp, Artificial Sequence
  ENSG00000116147_89 (sequence is synthesized)
ggtttaaccattttatagaagagggaagggagggccaggaaggttaagtaacatgctcaaagtcacacagctactaaatagagccataatctgaacctttgtctaattttgaagcccttg

SEQ ID NO: 214712 - DNA, 120 bp, Artificial Sequence
  ENSG00000116147_90 (sequence is synthesized)
atttttccacttcatgaggctgctctttatatttatttagctgagtgaccaccatcttggattttactaatattcttacaagggggctttgatgccacttcttctgacttttaagaaaag

SEQ ID NO: 214713 - DNA, 120 bp, Artificial Sequence
  ENSG00000116147_91 (sequence is synthesized)
gaaattcttgcattatttttgccatgtactccaggggaccctcaatctcatcatcatggggaataagaaacattctgacatctctttccttttctttctttttaaatttggtagacgagg

SEQ ID NO: 214714 - DNA, 120 bp, Artificial Sequence
  ENSG00000116147_92 (sequence is synthesized)
gagagggtccccaacagaatgagagggggaagataagaaccagaacataaacccaataccccccaccccactcttttgggaacatcccaacattagaagagtgggatatccagtcatttt

SEQ ID NO: 214715 - DNA, 120 bp, Artificial Sequence
  ENSG00000116147_93 (sequence is synthesized)
tttcaagctggagcaggcagtgtagccaggattgaggaaggagaagccacagaataaacatggcacatgttctcagagcatcaattttactccagaatttgggaagaaaggattatatta

SEQ ID NO: 214716 - DNA, 120 bp, Artificial Sequence
  ENSG00000116147_94 (sequence is synthesized)
ttagtgtattcaaaccagtatggatagcacaaatgcagatatcctataaattttgaggctaactccagcaggttgtagactgatttaggctacctccttccagactcccaggggtacaaa

SEQ ID NO: 214717 - DNA, 120 bp, Artificial Sequence
  ENSG00000116147_95 (sequence is synthesized)
caccttcacagtcccctgcgggagtacatcagtggaaatatttggggaatgaggctagaaggcaggagatacattcagtttacttatccccctggtttcttttccccactccttacctgc

SEQ ID NO: 214718 - DNA, 120 bp, Artificial Sequence
  ENSG00000116147_96 (sequence is synthesized)
cccacatccctagtgggtgggaaggcatcagaagacagttggctacaatatcagctttctctgctactttggggaatttagaaggaaatcagtacttggcaacctggtatttttagctgc

SEQ ID NO: 214719 - DNA, 120 bp, Artificial Sequence
  ENSG00000116147_97 (sequence is synthesized)
caggccaaaactccagacataaaccccttccctttaattgaatgatgtttatatataaaggaatagatctccccaagaaagaaccccagaacactggttccattccagtgtgggggctgc

SEQ ID NO: 214720 - DNA, 120 bp, Artificial Sequence
  ENSG00000116147_98 (sequence is synthesized)
ttgggcagcagtgacacctgtgcattagatgcaatagacacttcaattcctgcaaaaatgtcggccaactaagtgctcctttaccaactgcggaggcccagactcacaccatggtcccac

SEQ ID NO: 214721 - DNA, 120 bp, Artificial Sequence
  ENSG00000116147_99 (sequence is synthesized)
tgcggaggcccagactcacaccatggtcccacagactcaaggtttagaatctatgtgagtctattttggttaacacacaggctcctccttccaatcattcacacacacacacacacacac

SEQ ID NO: 214722 - DNA, 120 bp, Artificial Sequence
  ENSG00000116147_100 (sequence is synthesized)
gcacacatacacaggtgcacatgcacaaacacacacatctaatgattccaacctcgaatactccccaggcccatggggatgcccaagtaccctaagcaaatcactgtgacactgaggggg

SEQ ID NO: 214723 - DNA, 120 bp, Artificial Sequence
  ENSG00000116147_101 (sequence is synthesized)
tcattaactggggctccgagcagctgaaacccaccctggtggtctctagattgttgttctgagaaatcataaacaccaaatcctccaatccctttgaatttgagtttgtcattttaacct

SEQ ID NO: 214724 - DNA, 120 bp, Artificial Sequence
  ENSG00000116147_102 (sequence is synthesized)
ttaacagccttttcaggtaaaaataacaaagaccaatttattgactttgtagctacaatgagcttgaaaaagcgcttacttaaaagaaagactggaaggaagaaaaaaaaaagaaaatgg

SEQ ID NO: 214725 - DNA, 120 bp, Artificial Sequence
  ENSG00000116147_103 (sequence is synthesized)
agtacatactcctcagacgatgcacactttaattagctaaaataaaaataaaaatgtacagaggaagggagaggaaaaaccaacttctctgatcctttcatggcactgtagctcaaagac

SEQ ID NO: 214726 - DNA, 120 bp, Artificial Sequence
  ENSG00000116147_104 (sequence is synthesized)
tggaatctctgcttgttaaccattgttaactagtatttttagtcctggttgcttttagcctctgtatagttccttttttaaacacattttctatacgttaataaaagatcctgaaagaaa

SEQ ID NO: 214727 - DNA, 120 bp, Artificial Sequence
  ENSG00000116151_0 (sequence is synthesized)
aagagaaccctcggcggcaagatggcagcggcgggcgagggcaccccgagctcccgcgggccgcgtcgggacccgcctaggcggccgccccggaacggttatggtgtctacgtataccca

SEQ ID NO: 214728 - DNA, 120 bp, Artificial Sequence
  ENSG00000116151_1 (sequence is synthesized)
aattccttctttcgatatgaaggagaatggaaagcagggaggaagcacggtcacgggaagttgttatttaaagatggcagttattacgaaggggcgtttgtggacggagagatcacggga

SEQ ID NO: 214729 - DNA, 120 bp, Artificial Sequence
  ENSG00000116151_2 (sequence is synthesized)
gaaggccgccggcactgggcctggtcaggagacaccttctctggacagtttgttctgggagagcctcaaggctacggcgtcatggagtacaaagccggcggatgttatgaaggggaggtc

SEQ ID NO: 214730 - DNA, 120 bp, Artificial Sequence
  ENSG00000116151_3 (sequence is synthesized)
tcccacggcatgcgggaaggacacgggtttctggtggaccgggatggacaagtgtaccagggctccttccatgacaacaagaggcacggccctgggcagatgctctttcagaacggtgac

SEQ ID NO: 214731 - DNA, 120 bp, Artificial Sequence
  ENSG00000116151_4 (sequence is synthesized)
aagtacgacggcgactgggtccgggaccggcgtcagggacacggggtgctgcgctgcgccgacggctccacctacaagggacagtggcacagcgacgtcttcagtggactgggcagcatg

SEQ ID NO: 214732 - DNA, 120 bp, Artificial Sequence
  ENSG00000116151_5 (sequence is synthesized)
gcccactgctcaggggtcacctattatgggttgtggatcaatggccacccagcagaacaagctacgaggatcgtgatcttgggtccggaggtgatggaagtggcccaagggtctcccttc

SEQ ID NO: 214733 - DNA, 120 bp, Artificial Sequence
  ENSG00000116151_6 (sequence is synthesized)
gatacgtgcagctgtcagcctactctgaggtcaactttttcaaagtggacagagacaaccaagagacactcatccagaccccatttgggttcgaatgcatcccttatcctgtgtccagcc

SEQ ID NO: 214734 - DNA, 120 bp, Artificial Sequence
  ENSG00000116151_7 (sequence is synthesized)
ccgcagctggggtgccggggcccagagctgccaagggaggggcagaagccgacgtgcccctgcccaggggagacctggagctgcatttgggtgccctccatggccaggaggacacccctg

SEQ ID NO: 214735 - DNA, 120 bp, Artificial Sequence
  ENSG00000116151_8 (sequence is synthesized)
gtggcctgcttgccaggggacatgcgccccattgtcccggggcctgtcagcgagtggagcagggctgtgccgagttcacagatgtcctcctggggccgcccccgcctgggtaccacccct

SEQ ID NO: 214736 - DNA, 120 bp, Artificial Sequence
  ENSG00000116151_9 (sequence is synthesized)
tcctgttcctggacagcctccacaagaaggcaggcggcagatccagaggcggcctgcaccccagggggacaccacccacggcacaggagcctcctggaggcagcaggcctgaggggagag

SEQ ID NO: 214737 - DNA, 120 bp, Artificial Sequence
  ENSG00000116151_10 (sequence is synthesized)
ccacggaggagcaggctgcggcagcacacctaggggagtacgtgctcatgatccgcgacgtgaccaccccgccgttcctggggcgcaggctgcccccggccttcaaacacctgcgggtcg

SEQ ID NO: 214738 - DNA, 120 bp, Artificial Sequence
  ENSG00000116151_11 (sequence is synthesized)
tagcgaagagggctggccagccaccccatgtcctggaagaaggccctgaagcctcaagcagctggcaggccgcccacagctgcaccccagagccgccagcgcctcggtgaggccccgtgt

SEQ ID NO: 214739 - DNA, 120 bp, Artificial Sequence
  ENSG00000116151_12 (sequence is synthesized)
ccacaggaggccacctcggtgtgaatggaaggaaacgctgcctctgcttgcgtgactctgctccccgattctccagagccccgtggttgctggcttgaataaaatgctcagtggcggcta

SEQ ID NO: 214740 - DNA, 120 bp, Artificial Sequence
  ENSG00000116151_13 (sequence is synthesized)
gacagcggcggaaacgcgcacaggcgcagctgcgtcctctggctccgggcccggctagcttcgctccagagattgcgcgggctcagggactaggcccgtggccacacccccccttgcgac

SEQ ID NO: 214741 - DNA, 120 bp, Artificial Sequence
  ENSG00000116151_14 (sequence is synthesized)
gagaggaccagcaagcgcaggcgtcattcatcatataaaagagcatgcaggcatcccaggtggggcagcagggcccggcgccactccacgggaggccaaggcggccaagcctcaggccaa

SEQ ID NO: 214742 - DNA, 120 bp, Artificial Sequence
  ENSG00000116151_15 (sequence is synthesized)
caggcccacggggggcccggcccgcgcccccttgtctgccttcacctcagttgatagaagcagttccacaccgcataggtggaatagctctcatatttctgcataaaaatacttactggg

SEQ ID NO: 214743 - DNA, 120 bp, Artificial Sequence
  ENSG00000116151_16 (sequence is synthesized)
atttttgagaacatttttttatttttaaatacatgtatagcatgagtgatggagccaaacacaagttttgaagccaagctcttggttctgagaaacaggcccaacactgcacagtgtcat

SEQ ID NO: 214744 - DNA, 120 bp, Artificial Sequence
  ENSG00000116151_17 (sequence is synthesized)
cgtgtagacgggaagctttgtgccgtgagaggcctggcctaccgagaagccctggggacctgactgaggctctgtggtcaccgctgagagcaactcaggcttccggagacacttttctag

SEQ ID NO: 214745 - DNA, 120 bp, Artificial Sequence
  ENSG00000116151_18 (sequence is synthesized)
aataaagatttatctgtcccaagttacactatttcttttttatttaaagctatttcagccacattgtatccctagatgggaaaccagctctggggattcgttgccgggagctgtgtgtcc

SEQ ID NO: 214746 - DNA, 120 bp, Artificial Sequence
  ENSG00000116151_19 (sequence is synthesized)
aggaacctcagaccctcacgccagaggggtcggtgggttctcagtggaggtgttttctctcaggcttggctttcagtttttaaagagccagggaaaaacctcacccttcaccctgcaaac

SEQ ID NO: 214747 - DNA, 120 bp, Artificial Sequence
  ENSG00000116151_20 (sequence is synthesized)
cgaccagagggtcctttgccctcgggatagatgcccaaagagagtgtctgcctggggctgtctgcatgcccagctgttggggagaccagacctgcttaccatgttttccctcatgaagca

SEQ ID NO: 214748 - DNA, 120 bp, Artificial Sequence
  ENSG00000116151_21 (sequence is synthesized)
gactgagtagtatgatggaggcagggacgtccattctggaatggttcctgcgtgtcatgggccagggacagaggagagccgactggggccgcagccctgaactgaacctcctgtctcccc

SEQ ID NO: 214749 - DNA, 120 bp, Artificial Sequence
  ENSG00000116151_22 (sequence is synthesized)
catgcgggaaggtctggcgcccacaggagccgggtgctgtgagggtgggcgctttcaggacatggaatcctacgtccacttgggttcaggaacctctgagagggcctgcctgacttcaga

SEQ ID NO: 214750 - DNA, 120 bp, Artificial Sequence
  ENSG00000116151_23 (sequence is synthesized)
gggttggaaaggaggtagggggcccatgccctcttctccgcaccaccaggccatgtcctatgcccggcatacaccagtatgcccagcgggtcctgcggcgcttgatgcagctctgtcatc

SEQ ID NO: 214751 - DNA, 120 bp, Artificial Sequence
  ENSG00000116151_24 (sequence is synthesized)
cgctaccgcggaacagacgcccgtggcttaggggttaaaatggccactgctttattaactgctcctgatcctggggtcagtaggttggcctgggccctgcagggaggggcttctggtctg

SEQ ID NO: 214752 - DNA, 120 bp, Artificial Sequence
  ENSG00000116151_25 (sequence is synthesized)
gtctatgtggggtcactaaatggctatagtcacagcaactctgccaggcctgagggtccctgaggtcctcataggcctgggaagcccagctccttgcccagtagtcttggacagcttagc

SEQ ID NO: 214753 - DNA, 120 bp, Artificial Sequence
  ENSG00000116151_26 (sequence is synthesized)
ttggcccaagcaagtcaggaggccagactcaagccaggagggggctgtgccctgtccctctacccagccaagccaggcccagcacgggccgtagtcccacagccaaaaggccacccgcac

SEQ ID NO: 214754 - DNA, 120 bp, Artificial Sequence
  ENSG00000116151_27 (sequence is synthesized)
ccgagacaggagtcaagcacataataccctccaccacagacggagcttctttttccagtgttttccttatgttaagaagcagaggccaggcgtggtagctcacgcttgtaatcccagcac

SEQ ID NO: 214755 - DNA, 90 bp, Artificial Sequence
  ENSG00000116151_28 (sequence is synthesized)
gaggagtttgagaccagccttggcaaaatggtgaaactccgactctactaaaaatacaaaaatggctgggcatggtggcacacacctgta

SEQ ID NO: 214756 - DNA, 120 bp, Artificial Sequence
  ENSG00000116151_29 (sequence is synthesized)
ctcaaaagcaaagcaacgacaacaaaaaaaacaaaagaagcagaaatactctcaaatttctgagttgtccaaaatctgaaaatgccgcagtttacgaacccccatcctcttttgagtttc

SEQ ID NO: 214757 - DNA, 120 bp, Artificial Sequence
  ENSG00000116151_30 (sequence is synthesized)
tcctcgttcaggtcaagccctgccctcctcactgtgaacttgaagtttcttgtgaaaacaaacgacaggcccaaactgcacccatcctcaccccagcagcacgcagagcctgtgcagcct

SEQ ID NO: 214758 - DNA, 120 bp, Artificial Sequence
  ENSG00000116151_31 (sequence is synthesized)
cagatggcagtccgcagggcccctcaaccgcacctttcagaactggaccccagggccatttttgctgccctgtcagctcaccgacctgtcccaaagcacatctgcccttcccgttcagag

SEQ ID NO: 214759 - DNA, 120 bp, Artificial Sequence
  ENSG00000116151_32 (sequence is synthesized)
cctcaccgagccgtgctgaggcctctgtgtagccaggtctggagggtctgtcatgttcctggggggccctgagccccatgcctcctagacttgctactttgctcctgcccgccctccaag

SEQ ID NO: 214760 - DNA, 120 bp, Artificial Sequence
  ENSG00000116151_33 (sequence is synthesized)
gagcggagggcagatcccttctcagatgcaggaggaggcacaaagccaagtctgtctctcggtcccttctccaggacacgggtttctggtggaccgggatggacaagtgtaccagggctc

SEQ ID NO: 214761 - DNA, 120 bp, Artificial Sequence
  ENSG00000116151_34 (sequence is synthesized)
cttccatgacaacaagaggcacggccctgggcagatgctctttcagtgagtatgagtcttgtgggtactgcctggcgcatgacagatacacagggcaggtgtgaggccatgtggcctggg

SEQ ID NO: 214762 - DNA, 120 bp, Artificial Sequence
  ENSG00000116151_35 (sequence is synthesized)
ggtgtagacaggactgccatgggacaccccgggcctgttccggcccctgctgtctacccgccacccccccagtgccaagttgttgaaccacattctgtggtttcggtgttattctgtaat

SEQ ID NO: 214763 - DNA, 120 bp, Artificial Sequence
  ENSG00000116151_36 (sequence is synthesized)
tttccccttgtttattgaaattgaccaattgtgtgtttagataaaacatcccccccccccccgattaaaatacctcctgagaacgtcaggctggcggcaaagtggcaccacaggagcgtc

SEQ ID NO: 214764 - DNA, 120 bp, Artificial Sequence
  ENSG00000116151_37 (sequence is synthesized)
tccaggtctaaatgaggatgggggtgctctccggccagcagagcctcccgcctccgcctcccaagtgctaggcatcttcagcccgtgtggaaattcccacggcggagtctcagcctcact

SEQ ID NO: 214765 - DNA, 120 bp, Artificial Sequence
  ENSG00000116151_38 (sequence is synthesized)
aagctctgatccacccatctatagtaggagaaactcaaggagacatcggctgctacccaggcaccatgagctcagggttggtgaggcccctccgggagacctgttctccctctcgacagc

SEQ ID NO: 214766 - DNA, 120 bp, Artificial Sequence
  ENSG00000116151_39 (sequence is synthesized)
ggtcccggaagccacagaggtcctgggccacgagcacccccaccagcctgtgacgcctcagccatctccgtcccccacactcctagtttacagcttactgctcgacctcccaggacccga

SEQ ID NO: 214767 - DNA, 120 bp, Artificial Sequence
  ENSG00000116151_40 (sequence is synthesized)
gggcttgggcaggccccacacgtcctccagaacatcctcggtgggagacggagcagacagagtagaggccacacgtgtgtgtgcacatcagagtgtctcctacccatgttggcagcagcg

SEQ ID NO: 214768 - DNA, 120 bp, Artificial Sequence
  ENSG00000116151_41 (sequence is synthesized)
cggccctccgggcatccctggctgtatcagctgcgccgtgagtgttggctgtctcacacgccagctttcccggagttgccgctgggtgccgagcacctgctcactgcacggagcaggtgg

SEQ ID NO: 214769 - DNA, 120 bp, Artificial Sequence
  ENSG00000116151_42 (sequence is synthesized)
ctccttctgggcggctttgcctgccgcagtccccgagcctcctctcctcagctgggcgtgtgtgggaatgcccaaccgggggcctccacggggcctatagcctccacgtttgggcctact

SEQ ID NO: 214770 - DNA, 120 bp, Artificial Sequence
  ENSG00000116151_43 (sequence is synthesized)
gcccttggacccaggggtcacagtccaggaagcctgggccagtgggggactcctggggtgcatgtaacactgagaatcatgtagataatttggggtgtttgagcacgcatggcctgtggg

SEQ ID NO: 214771 - DNA, 120 bp, Artificial Sequence
  ENSG00000116151_44 (sequence is synthesized)
gagtctggccggcttgcctcatgtggaccccccaccaccctggggcagaggagggggccggctgttggggccgtcatggaagcactagggttacactagggcaggccccatgtcccctct

SEQ ID NO: 214772 - DNA, 120 bp, Artificial Sequence
  ENSG00000116151_45 (sequence is synthesized)
ggaactcctcacagttcacaccttgaagcccaggcacttgcgatgggaccagcgaggtcaaatgcaggacccctggtcctcactgttaccatgaagtgatgcaaatggccggtcttcaga

SEQ ID NO: 214773 - DNA, 120 bp, Artificial Sequence
  ENSG00000116151_46 (sequence is synthesized)
tccagggggagatgacctaacgtttccaaaagagaaacaggcagcaggttcttaagcagtgaagatgcggacgagatgttgcatgtggctcctgaggcacagcagtgacttcgtgcccag

SEQ ID NO: 214774 - DNA, 120 bp, Artificial Sequence
  ENSG00000116151_47 (sequence is synthesized)
agcctggcagagaggtcgcaggtgtgccagcttccctgccagtcagggcagccttgggtgtgtgtgcaagcatgtgtgcacatattgtgtgatgtgcgtgctcctgtatgtgtgtgcata

SEQ ID NO: 214775 - DNA, 120 bp, Artificial Sequence
  ENSG00000116151_48 (sequence is synthesized)
tccattctagtgaggggctactttctgcttccccactcatccgctgctggccatcgcagttgtttgtaccttgggctgttatgaatagtgctgctgtggacatgtgtatacaagtttttg

SEQ ID NO: 214776 - DNA, 120 bp, Artificial Sequence
  ENSG00000116151_49 (sequence is synthesized)
tgtatacaagtttttgtgtgaatgtgttttcatttctcatgggtatgcacctatgaatggaattgctggatcacatggtagatttatgtttgaactttttttttttttttttgagatgga

SEQ ID NO: 214777 - DNA, 87 bp, Artificial Sequence
  ENSG00000116151_50 (sequence is synthesized)
ttttgagatggagtttcactcttgctgttccgcaacctccgcctcccgcgttcaagtgattctgccttggcctcctgagtagctggg

SEQ ID NO: 214778 - DNA, 120 bp, Artificial Sequence
  ENSG00000116151_51 (sequence is synthesized)
ccaccgcgcctggcctaaacttttaaagaaactgctaaactgtttttccaaaattgctgcagcattttacagtcccaccagtaatgcatgaaggttcagatttctctgcgtcttcccaac

SEQ ID NO: 214779 - DNA, 120 bp, Artificial Sequence
  ENSG00000116151_52 (sequence is synthesized)
acttggaattgtgtctttttgtaatagctgccctgtgggtgtgaagtgatagctcctcgtgattttgattcgcatttccctaacgagtgatgacgatgagtggctctcgctgtgttgatt

SEQ ID NO: 214780 - DNA, 120 bp, Artificial Sequence
  ENSG00000116151_53 (sequence is synthesized)
ggctgtttgtttatcttctttggagaaatgtctattcaaatattgtacccattttttaaaaattagactatcagtcaggcacagtggctcacacctaaaatcccagcacttcgggaggct

SEQ ID NO: 214781 - DNA, 120 bp, Artificial Sequence
  ENSG00000116151_54 (sequence is synthesized)
gaggtgcgaggatcactagagcccaggagatctttcttcttggtgttgttgttgttgtggttgttgttgttgtttggagacagagtctcgctgtgtcacccgggctggagtgcggtggca

SEQ ID NO: 214782 - DNA, 120 bp, Artificial Sequence
  ENSG00000116151_55 (sequence is synthesized)
agtggtgcgctcagcttggaacactgcaggaatgcagccgggtgggtgctggctgggatcttggggtctgggagctggaggaacaagagcctcaggagcaagggccctgtccagacagca

SEQ ID NO: 214783 - DNA, 120 bp, Artificial Sequence
  ENSG00000116151_56 (sequence is synthesized)
gccgggcctctgcccacctggcaccccgagctggctgcccagcctctcctgaagctgagagctgcctttttgctgcctccgggcacccacgcgggctgccagttgtctcggatcggagcc

SEQ ID NO: 214784 - DNA, 120 bp, Artificial Sequence
  ENSG00000116151_57 (sequence is synthesized)
tcctggctgctccaaatctcgaggcacagacgagattctgcagtgtggacaacaggagaccaagtgagacgggagtgtgaccccttccatgtccagacgccacgtcgcgccctcctggcc

SEQ ID NO: 214785 - DNA, 120 bp, Artificial Sequence
  ENSG00000116151_58 (sequence is synthesized)
cccaacctgggcctgtgccggaggtctgccgtgcccctcacagcactgcccattcccccatcatagaagcccaggtcctagcggcctgcgtggggtcgatgtcaagacagaactgccgag

SEQ ID NO: 214786 - DNA, 120 bp, Artificial Sequence
  ENSG00000116151_59 (sequence is synthesized)
ggggacaatgggagaagcagtgagtccggggccaggggtcgcccatcccactggaagaacctgagtgtggaccaaggacagggagcattccttccgatgctggagtccgtgagcaacagt

SEQ ID NO: 214787 - DNA, 120 bp, Artificial Sequence
  ENSG00000116151_60 (sequence is synthesized)
cagggtggccgggctatgctcaccagggtgtgctgagaccggggctctaggggagccccctgtccctcagaacagccacatctgtgtccccttcgtgcagctgcacaacaggagctcctc

SEQ ID NO: 214788 - DNA, 120 bp, Artificial Sequence
  ENSG00000116151_61 (sequence is synthesized)
tcagcatccactgggggacgccggtgccctcaggaggacaggcagccccgctgggcacctggtgagcgtggggtcacctggtgcaccccccaccggttggctccctcaaagcccacatca

SEQ ID NO: 214789 - DNA, 120 bp, Artificial Sequence
  ENSG00000116151_62 (sequence is synthesized)
gaaaaaaatgcattcctgaaaataaacgtgttacagcttcttctgacggaaaataagaacagcggatcccaaagcagagaaggctcctcttccacagggacaggagccacgcggctcagg

SEQ ID NO: 214790 - DNA, 120 bp, Artificial Sequence
  ENSG00000116151_63 (sequence is synthesized)
gctggtcctcggagcccccacctggtgcaccaggccgtgaacctcagcaaaggccccgtctcttgatgcccaaggtttggcaatggttgggggttactttctccagaccacagcaccctc

SEQ ID NO: 214791 - DNA, 120 bp, Artificial Sequence
  ENSG00000116151_64 (sequence is synthesized)
gaggccaacactggggaaagctggagcccctgctcttcacccccacctcccagggctgttgaaccccaaggagcaccagacccaggacccccccaggagggccagaggcaggaagtgcct

SEQ ID NO: 214792 - DNA, 120 bp, Artificial Sequence
  ENSG00000116151_65 (sequence is synthesized)
gatggtgccaggggagggtggatgcctgactagggcctgaaaacagagggcatagcttccaataaagcatggaaagaaaacagcatgaatggaccagaagtgcttcccattgggagaaag

SEQ ID NO: 214793 - DNA, 120 bp, Artificial Sequence
  ENSG00000116151_66 (sequence is synthesized)
aagagcactcacaacctcttctgccccaggctgcttggagtgggccagcgccagagcagtccctgcaccagccgagccgtccgagcttgtcgactatcagggaaggtgtgagccttcggc

SEQ ID NO: 214794 - DNA, 120 bp, Artificial Sequence
  ENSG00000116151_67 (sequence is synthesized)
tgagtggtgctgggagctggggagagccgagcactgcccggggcctcctgagtgctctgccacccggctgggcagggaagggagggcccctcacagaggacacccttgtggtcctggggt

SEQ ID NO: 214795 - DNA, 120 bp, Artificial Sequence
  ENSG00000116151_68 (sequence is synthesized)
gtgttttgggtgtggacctggaccccagtggcccttccccaaaggtcgtgtgaccaccaccaccttcccgtgtcccgtaccgcacacctgtgctcacctgggtgccaggcagtggcccag

SEQ ID NO: 214796 - DNA, 120 bp, Artificial Sequence
  ENSG00000116151_69 (sequence is synthesized)
cagggaggaggagggtgagcaggtggcaaaatgcccattcctcggtcccagcctgtgtgtggctgaggccccgcacgtaactctccacgctgggcatcggcctggactgtgcctgggtgc

SEQ ID NO: 214797 - DNA, 120 bp, Artificial Sequence
  ENSG00000116151_70 (sequence is synthesized)
tccctgaggcccgggtgggaggcagctgctccaggactctcagtgtcccagtctgtgccgtcagcaggaggatcaggagcctcccctgcaccctatttaataagctcttgctcgttcctg

SEQ ID NO: 214798 - DNA, 120 bp, Artificial Sequence
  ENSG00000116151_71 (sequence is synthesized)
cttggggtacatgaaacagaaacagccgaattgtcaaaggtgtgattgataacgtgaattagacaagaccgggctattggatcagttgaattgatcactcaaatgtgcttggactgacca

SEQ ID NO: 214799 - DNA, 120 bp, Artificial Sequence
  ENSG00000116151_72 (sequence is synthesized)
agtgctgcatgaaagcttgcctggctcagccctcccacccggacaccagcggtgggtaccgaggatgccaagccctgacctgattgctgcgcacccagggagggggatgccaggcaggct

SEQ ID NO: 214800 - DNA, 120 bp, Artificial Sequence
  ENSG00000116151_73 (sequence is synthesized)
cgtgccacatacgtgagccgcagccccagaccaaccatgggaggagccactcaccccaaaggcgggctctgcacctctgcatttctcatgactcgagtgtgtctggcttcccctgcccag

SEQ ID NO: 214801 - DNA, 120 bp, Artificial Sequence
  ENSG00000116151_74 (sequence is synthesized)
ccacagcctcactgggtactcaccctggacgccatattgcagctggtgtcagccctgccccgcagctccacctccctcctcctgaaagcccggggcaccttccagaggccgagcaggtgg

SEQ ID NO: 214802 - DNA, 120 bp, Artificial Sequence
  ENSG00000116151_75 (sequence is synthesized)
aagggggcagagaccagacatcgccattctcatcactgacggtgacgggggccccggacgccctgaagagccctcagctgtgcgctgactcgcgcctctccccgtccagcgtgaatgaga

SEQ ID NO: 214803 - DNA, 120 bp, Artificial Sequence
  ENSG00000116151_76 (sequence is synthesized)
tgagagacagtgaggacaatggtcccaggaagggaccctcaagagatgccaatcaaatgcgttggactctcacccagtttggtgggaacgtctggagtcataggacagagagctgagggg

SEQ ID NO: 214804 - DNA, 120 bp, Artificial Sequence
  ENSG00000116151_77 (sequence is synthesized)
gcaaggctgaggggaggtgctctgtggatgcaagggtgcccacggcctccaacagggcatggcatggcctccaggcatgccgtgcagcagcagtcagggcagcccatggactctgcgcca

SEQ ID NO: 214805 - DNA, 120 bp, Artificial Sequence
  ENSG00000116151_78 (sequence is synthesized)
gtccttggtagctgaagcccagaaccactctcacctgaccccacatgtggtcagctctggggcccccatccactgtagttgccagtgtggatggtgcttgcccagagcccagggtggcac

SEQ ID NO: 214806 - DNA, 120 bp, Artificial Sequence
  ENSG00000116151_79 (sequence is synthesized)
ccttcatgtactgtggctctccctggcctttggggcaatccagtcgccttcaggactgtctgcagaggccctgtctccctgcagccagagagagctccagcgccatccacttgtccctga

SEQ ID NO: 214807 - DNA, 120 bp, Artificial Sequence
  ENSG00000116151_80 (sequence is synthesized)
tctgccacactcctcagccctggccctcggccctcgctgtctcttcccacacatcccagggcccaggatccgtggagaagccccagaaggcacacgctgcgccctgcagacctgccaccg

SEQ ID NO: 214808 - DNA, 120 bp, Artificial Sequence
  ENSG00000116151_81 (sequence is synthesized)
ctgcctcggggttcccctgggaaaggcacccagggagggccgggcagggaagcaggagcccacttggctcctgccagagagtgaacagaagcaaaacgtgcctttggttaatttttcttc

SEQ ID NO: 214809 - DNA, 120 bp, Artificial Sequence
  ENSG00000116151_82 (sequence is synthesized)
taatagaagtaattcagagtcaaatgaaataccatttaaattttccatgaaaataatcaccctgctatttcacatgattttcccaggctttgttgtatgacttggaaaccaggcttgtta

SEQ ID NO: 214810 - DNA, 120 bp, Artificial Sequence
  ENSG00000116151_83 (sequence is synthesized)
tgaaggaggcagagttggggtgtacagcgaacaggcatttctcccaagctcacgggcacattttttcaaactgtgttttttaattggcctcttcatgtataaatgaacagtgtaacggac

SEQ ID NO: 214811 - DNA, 120 bp, Artificial Sequence
  ENSG00000116151_84 (sequence is synthesized)
aagcagggcaccttaatcccaacgccacagtcggccagtttgcgggttcaggcctcctttatgatacatgccacaaacacaatatctttgtattaaaaggattttttttttttgctgaaa

SEQ ID NO: 214812 - DNA, 120 bp, Artificial Sequence
  ENSG00000116157_0 (sequence is synthesized)
gtctttgccctcgcgacgccgccacctccggaacaagccatggtggcggcgacggtggcagcggcgtggctgctcctgtgggctgcggcctgcgcgcagcaggagcaggacttctacgac

SEQ ID NO: 214813 - DNA, 120 bp, Artificial Sequence
  ENSG00000116157_1 (sequence is synthesized)
ttcaaggcggtcaacatccggggcaaactggtgtcgctggagaagtaccgcggatcggtgtccctggtggtgaatgtggccagcgagtgcggcttcacagaccagcactaccgagccctg

SEQ ID NO: 214814 - DNA, 120 bp, Artificial Sequence
  ENSG00000116157_2 (sequence is synthesized)
cagcagctgcagcgagacctgggcccccaccactttaacgtgctcgccttcccctgcaaccagtttggccaacaggagcctgacagcaacaaggagattgagagctttgcccgccgcacc

SEQ ID NO: 214815 - DNA, 120 bp, Artificial Sequence
  ENSG00000116157_3 (sequence is synthesized)
tacagtgtctcattccccatgtttagcaagattgcagtcaccggtactggtgcccatcctgccttcaagtacctggcccagacttctgggaaggagcccacctggaacttctggaagtac

SEQ ID NO: 214816 - DNA, 120 bp, Artificial Sequence
  ENSG00000116157_4 (sequence is synthesized)
ctagtagccccagatggaaaggtggtaggggcttgggacccaactgtgtcagtggaggaggtcagaccccagatcacagcgctcgtgaggaagctcatcctactgaagcgagaagactta

SEQ ID NO: 214817 - DNA, 120 bp, Artificial Sequence
  ENSG00000116157_5 (sequence is synthesized)
catcccgcccacctgtgtggggctgaccaatgcaaactcaaatggtgcttcaaagggagagacccactgactctccttcctttactcttatgccattggtcccatcattcttgtggggga

SEQ ID NO: 214818 - DNA, 120 bp, Artificial Sequence
  ENSG00000116157_6 (sequence is synthesized)
aaaattctagtattttgattatttgaatcttacagcaacaaataggaactcctggccaatgagagctcttgaccagtgaatcaccagccgatacgaacgtcttgccaacaaaaatgtgtg

SEQ ID NO: 214819 - DNA, 120 bp, Artificial Sequence
  ENSG00000116157_7 (sequence is synthesized)
gcaaatagaagtatatcaagcaataatctcccacccaaggcttctgtaaactgggaccaatgattacctcatagggctgttgtgaggattaggatgaaatacctgtgaaagtgcctaggc

SEQ ID NO: 214820 - DNA, 120 bp, Artificial Sequence
  ENSG00000116157_8 (sequence is synthesized)
agtgccagccaaataggaggcattcaatgaacattttttgcatataaaccaaaaaataacttgttatcaataaaaacttgcatccaacatgaatttccagccgatgataatccaggccaa

SEQ ID NO: 214821 - DNA, 120 bp, Artificial Sequence
  ENSG00000116157_9 (sequence is synthesized)
aggtttagttgttgttatttcctctgtattattttcttcattacaaaagaaatgcaagttcattgtaacaatccaaacaatacctcacgatataaaataaaaatgaaagtatcctcctca

SEQ ID NO: 214822 - DNA, 120 bp, Artificial Sequence
  ENSG00000116157_10 (sequence is synthesized)
cttcaagtacctggcccgtaagtcctggtctcttcatcccctcacacctcccttagctggctgaggccatggctccctgggcagcagaagccactggctggttgggtgacctggggcccc

SEQ ID NO: 214823 - DNA, 120 bp, Artificial Sequence
  ENSG00000116157_11 (sequence is synthesized)
ttccccttcctgatcatctcaggtggactgatgctttgttccagcactaatctttgaggagagtggaggcaggtagaagctgaggggtattcctgcctaagaatatctccatacctgctg

SEQ ID NO: 214824 - DNA, 120 bp, Artificial Sequence
  ENSG00000116157_12 (sequence is synthesized)
cctctcacttgtccctcagaagtcactcttttggacttttctgggatcctgttttcacattcaggggctcctagaaggagacatttaagtcagtgtgaactagatgagtttatggacata

SEQ ID NO: 214825 - DNA, 120 bp, Artificial Sequence
  ENSG00000116157_13 (sequence is synthesized)
tgatggagaaaccaaggcatagacaggggaggccacctgcttggagaaagctgaccaagatagtagacaggcatcttcaccctgagtcagtggcggagtctgtaggccatggagggagac

SEQ ID NO: 214826 - DNA, 120 bp, Artificial Sequence
  ENSG00000116161_0 (sequence is synthesized)
ggcgggctgtgcgtgctcgcggtgggcggtggcggcggctgcctcgcgaaggttcgagatccgtcgcgtgcgggaggcgggccgcgatcttgcgcagggtcggtgtgggcgcaggctgca

SEQ ID NO: 214827 - DNA, 120 bp, Artificial Sequence
  ENSG00000116161_1 (sequence is synthesized)
gcgccgcgactcgtgcgggtaggcgtctgcgctcggtttgagggctcggcgcggggtttcctgttcctccttctgcgcggctgcagctcgggacttcggcctgacccagcccccatggct

SEQ ID NO: 214828 - DNA, 120 bp, Artificial Sequence
  ENSG00000116161_2 (sequence is synthesized)
tcagaagagctacagaaagatctagaagaggtaaaggtgttgctggaaaaggctactaggaaaagagtacgtgatgcccttacagctgaaaaatccaagattgagacagaaatcaagaac

SEQ ID NO: 214829 - DNA, 120 bp, Artificial Sequence
  ENSG00000116161_3 (sequence is synthesized)
aagatgcaacagaaatcacagaagaaagcagaacttcttgataatgaaaaaccagctgctgtggttgctcccattacaacgggctatacggtgaaaatcagtaattatggatgggatcag

SEQ ID NO: 214830 - DNA, 120 bp, Artificial Sequence
  ENSG00000116161_4 (sequence is synthesized)
tcagataagtttgtgaaaatctacattaccttaactggagttcatcaagttcccactgagaatgtgcaggtgcatttcacagagaggtcatttgatcttttggtaaagaatctaaatggg

SEQ ID NO: 214831 - DNA, 120 bp, Artificial Sequence
  ENSG00000116161_5 (sequence is synthesized)
aagagttactccatgattgtgaacaatctcttgaaacccatctctgtggaaggcagttcaaaaaaagtcaagactgatacagttcttatattgtgtagaaagaaagtggaaaacacaagg

SEQ ID NO: 214832 - DNA, 120 bp, Artificial Sequence
  ENSG00000116161_6 (sequence is synthesized)
tgggattacctgacccaggttgaaaaggagtgcaaagaaaaagagaagccctcctatgacactgaaacagatcctagtgagggattgatgaatgttctaaagaaaatttatgaagatgga

SEQ ID NO: 214833 - DNA, 120 bp, Artificial Sequence
  ENSG00000116161_7 (sequence is synthesized)
gacgatgatatgaagcgaaccattaataaagcctgggtggaatcaagagagaagcaagccaaaggagacacggaattttgagactttaaagtcgttttgggaactgtgatgtgatgtgga

SEQ ID NO: 214834 - DNA, 120 bp, Artificial Sequence
  ENSG00000116161_8 (sequence is synthesized)
aatactgatgtttccagtaagggaatattggtgagctgcatatataaatttgacagatagctatttacatagccttctaagtaaaggcaatgaattctccatttcctactggaggattta

SEQ ID NO: 214835 - DNA, 120 bp, Artificial Sequence
  ENSG00000116161_9 (sequence is synthesized)
tttaaataaaatatgcttattaaacactcctgcaaagatggttttattagtaccctggtcattttgttcaaggaagggttatattgcattctcacgtgaaatataaaaagcaagtcttgc

SEQ ID NO: 214836 - DNA, 120 bp, Artificial Sequence
  ENSG00000116161_10 (sequence is synthesized)
ccaataaaaacgctacattgtgtgtattttttgttcagctaagaattggaaaagtatttgcttgccttttaagttactgacatcagcttccaccagtgtaaaaattgagtaaaacctgaa

SEQ ID NO: 214837 - DNA, 120 bp, Artificial Sequence
  ENSG00000116161_11 (sequence is synthesized)
ttcaatcacaggtgtttctatctagatttaaatatatttgtcaatgaatgtggaatagaaaatctaaacatgacaataatagacatatctttgtatggtaccagttagttttgccgtgga

SEQ ID NO: 214838 - DNA, 120 bp, Artificial Sequence
  ENSG00000116161_12 (sequence is synthesized)
tcagatggtttataaaagtaataaccataaagcaaaaaataatttgaaagcccgtctattcctatgctcaataaagttaagtttttcttcattagaacagttttatgatttatttgtcta

SEQ ID NO: 214839 - DNA, 120 bp, Artificial Sequence
  ENSG00000116161_13 (sequence is synthesized)
ggagtatgtcagaaaaatcaggcttttagtaggaattactcctattccccctgaagtcaggaccagtgcctgtgatctccattactttattttcctggaggtattagccaacacagttag

SEQ ID NO: 214840 - DNA, 120 bp, Artificial Sequence
  ENSG00000116161_14 (sequence is synthesized)
atcagagaaagcaattgaagccaggcatgaaggctggcgcccgtaatcccagctactaaggctggaggatcacttcagcccaggagtttaaggctgcagtgagctatgatgatgccactg

SEQ ID NO: 214841 - DNA, 120 bp, Artificial Sequence
  ENSG00000116161_15 (sequence is synthesized)
tctcattaaaaaaaaaaaaaaaaaaaaagccgttagacacacaggaaaaatccagaagggtaaactaaactaaagctacaattaatatgggaatttggaagaagtggtaggatttaaaat

SEQ ID NO: 214842 - DNA, 120 bp, Artificial Sequence
  ENSG00000116161_16 (sequence is synthesized)
gggaatttggaagaagtggtaggatttaaaatacagaaacagtttatgtataggatagctataagtaaatactgaaacacattatgcctctgtaattggggttgacacatgaacagaata

SEQ ID NO: 214843 - DNA, 120 bp, Artificial Sequence
  ENSG00000116161_17 (sequence is synthesized)
gcagacacaatgcatatgaaagttacagaatatggtaaaagtggggtaaagatgggtttttaatgatactaagataactgaaaataggcatatagatatattccaagccgcctgacgatc

SEQ ID NO: 214844 - DNA, 120 bp, Artificial Sequence
  ENSG00000116161_18 (sequence is synthesized)
taattgtaaaaagtaaagcatacaaatactagaagaaaatggaggaaaacgacattatatgtgacttaaaacctagaagaaataaataaaactattgatcaattttaactacataaaaat

SEQ ID NO: 214845 - DNA, 120 bp, Artificial Sequence
  ENSG00000116161_19 (sequence is synthesized)
gtttataggacaagaaaaaccccaccataacccaaggcaaacaatgtattgacaggattccaataattaagaatacttcatacaaaaagaaatgtaaatgacctttaacatgtaaagatg

SEQ ID NO: 214846 - DNA, 120 bp, Artificial Sequence
  ENSG00000116161_20 (sequence is synthesized)
ctcaccttgttcagaagagaataaaccagtgtttttacctttcacttgaaaaagaagtataaaaacaactgtattgagttgaggctgtggagaaataaggacacatatatgggaatggaa

SEQ ID NO: 214847 - DNA, 84 bp, Artificial Sequence
  ENSG00000116161_21 (sequence is synthesized)
gaggctgtggagaaataaggacacatatatgggaatggaatgcaaaagttaaactttggttaacaagaatatttgcttgggagg

SEQ ID NO: 214848 - DNA, 80 bp, Artificial Sequence
  ENSG00000116161_22 (sequence is synthesized)
aaaaaaactagctgggcatggtggcagatgcctgtaactccagctactcgggagactgaaggacaagaatcacttgaacc

SEQ ID NO: 214849 - DNA, 120 bp, Artificial Sequence
  ENSG00000116161_23 (sequence is synthesized)
tttggtggtttggagcaagacccatcagtttttatttaataaaacttttttaagatataaataggaaaggatgcgttctagaagctgttaacaagagtaaggtgattcactacaaaatgt

SEQ ID NO: 214850 - DNA, 120 bp, Artificial Sequence
  ENSG00000116161_24 (sequence is synthesized)
agaccgcggtgacgtctccaccgcgccaaactcactgaaaatcaaaccgctaccattaggagccctccacgcttaacatatccgttctttctcgtttgaaagtaaccaggctgctcctcc

SEQ ID NO: 214851 - DNA, 120 bp, Artificial Sequence
  ENSG00000116161_25 (sequence is synthesized)
ccatttttcgccttcttctcgcggaggctgagagactaaccttacacaacatggcggcctggtgtgtctggtgtcctagagcggacgaaagcaggtgactctctagtcaacttccgactt

SEQ ID NO: 214852 - DNA, 120 bp, Artificial Sequence
  ENSG00000116161_26 (sequence is synthesized)
cattttctttgatggtaaacaggctcacttataccgaatccaaacccaggcgagaactacggactcttgaaatggtcggtgaaaggggcgaaagcaccaggaaatcgtgcttcaacagtc

SEQ ID NO: 214853 - DNA, 120 bp, Artificial Sequence
  ENSG00000116161_27 (sequence is synthesized)
catgactgaaaggagggcctgaaactgtggccataggcgggcccttttgttagggccttgacctgggcttccgctacagggcccggtcacgaggccaacgtagctccacctcctacggcg

SEQ ID NO: 214854 - DNA, 120 bp, Artificial Sequence
  ENSG00000116161_28 (sequence is synthesized)
catttctcaacctagaaaatttcttatatttcaaattttttcatgtttatatgactggattttcataattttactttcctgacttatgagccatgtgcatttgctgttctaaagatagtt

SEQ ID NO: 214855 - DNA, 120 bp, Artificial Sequence
  ENSG00000116161_29 (sequence is synthesized)
tcagaggcttacttacgtcccatcttttgttgtcgttgccaggatgggatcagtcagataagtttgtgaaaatctacattaccttaactggagttcatcaagttcccactgagaatgtgc

SEQ ID NO: 214856 - DNA, 120 bp, Artificial Sequence
  ENSG00000116161_30 (sequence is synthesized)
aggtgcatttcacagagaggtgagttctcattataatgggaaagacagtgaattaacagtcaacattgccttatcttgagactctcttctttgcagtttttaaaattcttaaatttagaa

SEQ ID NO: 214857 - DNA, 120 bp, Artificial Sequence
  ENSG00000116161_31 (sequence is synthesized)
taaagccagcagcttttttcccacaagaactatggagtaagggtacctttcatagaactagaaagatgatgtattcaccattgtgttgcaggtcatttgatcttttggtaaagaatctaa

SEQ ID NO: 214858 - DNA, 120 bp, Artificial Sequence
  ENSG00000116161_32 (sequence is synthesized)
tttatggataatgtatttctgctttcaactgtcaaactacctgaagagggcacgtccagcaagttgctttttaaggtctttgtagttaagggttggctctttagtgtggttcttaaccct

SEQ ID NO: 214859 - DNA, 120 bp, Artificial Sequence
  ENSG00000116161_33 (sequence is synthesized)
atattccttatgccccccggctggagctgcagcgccagcctcccgccctaccgccgtttccgtgggctgagccgccctgcggccacccggtcccgcgccagtcagtgcgccgccttcccg

SEQ ID NO: 214860 - DNA, 120 bp, Artificial Sequence
  ENSG00000116161_34 (sequence is synthesized)
ggggacacctcactcgccccttgctgcgccgtcggctccccagcgcttccactcgacctcgcaccccactcgcctgctgggctcgagcgggggtgtgcggcgattatccgtgcaggcggt

SEQ ID NO: 214861 - DNA, 120 bp, Artificial Sequence
  ENSG00000116161_35 (sequence is synthesized)
gcggggagtgggtctgggagagcggccctttgcgcgtgttcctcaggccctttctgccctggtttcccagccagtggacaggaagcttcattcaagcaaagctgggtgcaaacatgagtg

SEQ ID NO: 214862 - DNA, 120 bp, Artificial Sequence
  ENSG00000116171_0 (sequence is synthesized)
acgcgcctgtgttgccgcccgcggccctggcttcgggcttcagggagctctggtgcagtctccgcctgtcagtgccggcagtcgtccgcggcgcccgccccggtcccgcactggtgcagc

SEQ ID NO: 214863 - DNA, 120 bp, Artificial Sequence
  ENSG00000116171_1 (sequence is synthesized)
catgtcctcttccccgtgggagcctgcgaccctgcgccgggtgttcgtggtgggggttggcatgaccaagtttgtgaagcctggagctgagaattcaagagactaccctgacttggcaga

SEQ ID NO: 214864 - DNA, 120 bp, Artificial Sequence
  ENSG00000116171_2 (sequence is synthesized)
agaagcaggcaagaaggctttagctgatgcacagatcccttattcagcagtggaccaggcatgtgttggctatgtttttggtgactctacctgtgggcagagggctatctatcacagttt

SEQ ID NO: 214865 - DNA, 120 bp, Artificial Sequence
  ENSG00000116171_3 (sequence is synthesized)
gggaatgactggaattcctataatcaatgtcaacaataactgtgctactggttctactgctttgtttatggcccgccagctgattcagggtggtgtggcagaatgtgtcttggctcttgg

SEQ ID NO: 214866 - DNA, 120 bp, Artificial Sequence
  ENSG00000116171_4 (sequence is synthesized)
gtttgagaagatgagtaagggaagccttggaataaaattttcagatagaaccattcccactgataagcatgttgacctcctgatcaataagtatggattgtctgctcacccagttgctcc

SEQ ID NO: 214867 - DNA, 120 bp, Artificial Sequence
  ENSG00000116171_5 (sequence is synthesized)
tcagatgtttgggtatgctggaaaagaacatatggaaaaatatggaacaaaaattgaacactttgcaaaaattggatggaaaaatcataaacattcagttaataacccgtattcccagtt

SEQ ID NO: 214868 - DNA, 120 bp, Artificial Sequence
  ENSG00000116171_6 (sequence is synthesized)
ccaagatgaatacagtttagatgaagtgatggcatctaaagaagtttttgattttttgactatcttacaatgttgtcccacttcagatggtgctgcagcagcaattttggccagtgaagc

SEQ ID NO: 214869 - DNA, 120 bp, Artificial Sequence
  ENSG00000116171_7 (sequence is synthesized)
atttgtacagaagtatggcctgcaatccaaagctgtggaaattttggcacaagaaatgatgactgatttgccaagctcgtttgaagaaaaaagcattattaaaatggttggctttgatat

SEQ ID NO: 214870 - DNA, 120 bp, Artificial Sequence
  ENSG00000116171_8 (sequence is synthesized)
gagtaaagaagctgcaagaaaatgctatgagaaatctggcctgacaccaaatgatattgacgtaatagaacttcacgattgcttttctaccaacgaactccttacttatgaagcactggg

SEQ ID NO: 214871 - DNA, 120 bp, Artificial Sequence
  ENSG00000116171_9 (sequence is synthesized)
actctgtccagaaggacaaggtgcaacgctggttgatagaggagataatacatatggaggaaagtgggtcataaatcctagtggtggactgatttcaaagggacacccactaggcgctac

SEQ ID NO: 214872 - DNA, 120 bp, Artificial Sequence
  ENSG00000116171_10 (sequence is synthesized)
aggtcttgctcagtgtgcagaactctgctggcagctgagaggggaagccggaaagaggcaagttcctggtgcaaaggtggctctgcagcataatttaggcattggaggagctgtggttgt

SEQ ID NO: 214873 - DNA, 120 bp, Artificial Sequence
  ENSG00000116171_11 (sequence is synthesized)
ttgagaagaaacttgaagaggaaggggaacagtttgtgaagaaaatcggtggtatttttgccttcaaggtgaaagatggccctgggggtaaagaggccacctgggtggtggatgtgaaga

SEQ ID NO: 214874 - DNA, 120 bp, Artificial Sequence
  ENSG00000116171_12 (sequence is synthesized)
atggcaaaggatcagtgcttcctaactcagataagaaggctgactgcacaatcacaatggctgactcagacttcctggctttaatgactggtaaaatgaatcctcagtcggccttctttc

SEQ ID NO: 214875 - DNA, 120 bp, Artificial Sequence
  ENSG00000116171_13 (sequence is synthesized)
aaggcaaattgaaaatcactggcaacatgggtctcgctatgaagttacaaaatcttcagcttcagccaggcaacgctaagctctgaagaactccctttggctacttttgaaaatcaagat

SEQ ID NO: 214876 - DNA, 120 bp, Artificial Sequence
  ENSG00000116171_14 (sequence is synthesized)
gagatatatagatatatatccatacattttattgtcagaatttagactgaaactacacattggcaaatagcgtgggatagatttgtttcttaatgggtgtgaccaatcctgtttttccta

SEQ ID NO: 214877 - DNA, 120 bp, Artificial Sequence
  ENSG00000116171_15 (sequence is synthesized)
tgctctgggtgaatagagcctgatggtatactactgctttgcggaattgcatacaactgtgcattacaaagttaatatggtaattatggtctggggtaaaattgagtttcagaataaaat

SEQ ID NO: 214878 - DNA, 120 bp, Artificial Sequence
  ENSG00000116171_16 (sequence is synthesized)
taggaacagtaaaatccaaagaactatgtaaacaaaaaagcttttgttttgcttacaaagtatatttaaggattattctgctgaagattcagtttaagagttttccttgggagaactaag

SEQ ID NO: 214879 - DNA, 120 bp, Artificial Sequence
  ENSG00000116171_17 (sequence is synthesized)
taagaaacacaatgccaacagctggccagtaattagtgttgtgcacttcatgtcattaatcaatttctcaatagttcttaaaattagtgagattaaaaatctaaaaattttgcatttcat

SEQ ID NO: 214880 - DNA, 120 bp, Artificial Sequence
  ENSG00000116171_18 (sequence is synthesized)
gctatcagaaacagtattttcttcccaaatcaaaataaaagaaatatgatcagagcttgaacacaggcttatttttaaaataaaaatatttttaacatgggtttccttattgaaaaatca

SEQ ID NO: 214881 - DNA, 120 bp, Artificial Sequence
  ENSG00000116171_19 (sequence is synthesized)
gtgtattagtcataaaacaccatcattaagaataattgaacaataaagtttgctttcagatgcagttttcaaattataatctcatttcaatttataacgttctcagtcctttgttataat

SEQ ID NO: 214882 - DNA, 120 bp, Artificial Sequence
  ENSG00000116171_20 (sequence is synthesized)
tttcctttttcatgtaagtttaattatctgcatttatcttttttcctagtttttctaatactaatgttatttcttaaaattcagtgagatataggataaaataatgctttgagaagaatg

SEQ ID NO: 214883 - DNA, 120 bp, Artificial Sequence
  ENSG00000116171_21 (sequence is synthesized)
tttaatagaaaattaaaataactttttctggcctctcttgtttttactgtgtatgttcttgctcagggctctctagataatgcagaataaagagaaacgttgggggatttataaactgaa

SEQ ID NO: 214884 - DNA, 120 bp, Artificial Sequence
  ENSG00000116171_22 (sequence is synthesized)
agtaatagtagctgctctttgttgcgtgcctcacacatcttagatattttacacaccaaatataacaactattttaagaggaacaaaaattgaacactttgcaaaaattggatggaaaaa

SEQ ID NO: 214885 - DNA, 120 bp, Artificial Sequence
  ENSG00000116171_23 (sequence is synthesized)
ggaggacattcctgctcttgaaatttcctgataacccggacaagttcatggaaagcttgatctacattcatcctaatctttgctgatgcctccatgtatgttaccttaagttgccgtgct

SEQ ID NO: 214886 - DNA, 120 bp, Artificial Sequence
  ENSG00000116171_24 (sequence is synthesized)
aactgccgtccttcttcctgtgttacctgtctttgatgatccagatctgctttattaccaattaaaatcattgggaactcatcacgatcctttactctgagaatctgtctttgaaactta

SEQ ID NO: 214887 - DNA, 120 bp, Artificial Sequence
  ENSG00000116171_25 (sequence is synthesized)
tagatttcttcaaaactgcctctatctgtgactgaaaagaccaacaggaagccctcgccagtcctcatatactgttctctcatggctccaagctcttcttgtcctgctgtatccaaaata

SEQ ID NO: 214888 - DNA, 120 bp, Artificial Sequence
  ENSG00000116171_26 (sequence is synthesized)
tctagccgggctgctctgtcatctatcacacactgctttgtgtaagaatcttcattggttggatcataatccgttacaaaataggactcccaacttaggaaacaaaacatttgtaatatg

SEQ ID NO: 214889 - DNA, 120 bp, Artificial Sequence
  ENSG00000116171_27 (sequence is synthesized)
attgaagactcctgcatgcctcctcaataatattcccctctctcctcccccagcaccaagaggtaatcaatatcctgaatttggtatctgtcattctcatgcatttatacaacattagta

SEQ ID NO: 214890 - DNA, 120 bp, Artificial Sequence
  ENSG00000116171_28 (sequence is synthesized)
atcatatgatagtattcctaagctatgttttggagaggacaccactgcaaatcttcagccctatactagcttttatcggtagccatcaattgcagttttaatagaaatacaaatacatca

SEQ ID NO: 214891 - DNA, 120 bp, Artificial Sequence
  ENSG00000116171_29 (sequence is synthesized)
agtgtctgttctttaatttgtaaagaaaatttgttttctagcgtgacaccctcaaggtaccgtatctgtatgtaaatgttgtgcccaatgctacacagacattattttaaaactattttc

SEQ ID NO: 214892 - DNA, 120 bp, Artificial Sequence
  ENSG00000116171_30 (sequence is synthesized)
tgcctttggtaaatagactaaactgttttctttattcctcaaaagaattagatcatacttcagtgttgattttgttgctaatgggacatggagatgtctggatgataataaatattcctg

SEQ ID NO: 214893 - DNA, 120 bp, Artificial Sequence
  ENSG00000116171_31 (sequence is synthesized)
tggtatggtcactgaagcctttaagagttatgctgtagtttgtgtgtaaagaagtgacttaaatcctcctttcagacagcttccttacgcatataggaaacctctgtttcattaggagat

SEQ ID NO: 214894 - DNA, 120 bp, Artificial Sequence
  ENSG00000116171_32 (sequence is synthesized)
gaatatgatatttcattttagttgttcttgttgacatacaacttttttctcttctgaaatagcatgtttttattataatttgcttgattgccattattagatatttttgtcatgccatcc

SEQ ID NO: 214895 - DNA, 120 bp, Artificial Sequence
  ENSG00000116171_33 (sequence is synthesized)
actgaaatactcagaaatcatgctttatagtaacaatataatttttcatatctatatttgttattaaaatttagatctaatttttatacaataaaatgcacagttctgcctctcagaacc

SEQ ID NO: 214896 - DNA, 120 bp, Artificial Sequence
  ENSG00000116171_34 (sequence is synthesized)
gcattccatcctttcagcctgcaactagcagagaaaaaaagttacatattttcttgccccatgcataccttgaggcgagcaaaaaaattaaaataaattttaaccatgagggaaatcgtg

SEQ ID NO: 214897 - DNA, 120 bp, Artificial Sequence
  ENSG00000116171_35 (sequence is synthesized)
cacatccaggcctgtcagtgtggcaaccggatgggtgccaagtgctgggatgtgatcagtgatgaacgtgaaatcgaccccaccagcacctaacatggggacagcgacctgcagctggac

SEQ ID NO: 214898 - DNA, 120 bp, Artificial Sequence
  ENSG00000116171_36 (sequence is synthesized)
tgtgtctccatgtactacagtgaagccatagatggcaaatatgttccttgtgctaacctggtggatctagaacctgggaccatggactctgctagctcaggcccttttggccaggtgctt

SEQ ID NO: 214899 - DNA, 120 bp, Artificial Sequence
  ENSG00000116171_37 (sequence is synthesized)
aaaccagacaactttgtttttggtcaatctggggcaggcaacaactgggccaaaggccactacatagagggggccaagctggttgattcagttgtagatgtggtgcaggaggagtaagag

SEQ ID NO: 214900 - DNA, 120 bp, Artificial Sequence
  ENSG00000116171_38 (sequence is synthesized)
agctgtgactgcctgcagggcttgcagctgacccactcaatgggctctggaatgggtactctctttatcagcaagatccgagaagagtgccctgattgcatcatgaacaccctcagtgtg

SEQ ID NO: 214901 - DNA, 120 bp, Artificial Sequence
  ENSG00000116171_39 (sequence is synthesized)
gtgcctccacccaaagtgtctgacaccgtggtcgagccctacaacatcaccctctccatccatcagtcggtagagaacactgatgagacctactgcattgacaatgaggccctctatgac

SEQ ID NO: 214902 - DNA, 120 bp, Artificial Sequence
  ENSG00000116171_40 (sequence is synthesized)
atctgctcccgcactttgaagctgaccacaccaaactatggggacttgaaccaccttgtctcagccaccacaagcagtgttaccacctgtctccacttccctggccagctcaatgctgac

SEQ ID NO: 214903 - DNA, 120 bp, Artificial Sequence
  ENSG00000116171_41 (sequence is synthesized)
ctccgcaagttggcagtcaaactggtgcccttaccacatctccactacttcatggctggctttgccctctcaccagctgtggaagctagcagcatcgagctttcacagtgcccaaactca

SEQ ID NO: 214904 - DNA, 120 bp, Artificial Sequence
  ENSG00000116171_42 (sequence is synthesized)
tcaggtaggatttcaatgccaagaacataatgagacccctgccacagcttatatctcaccgtggctgctgtctttgtggatggatgtccatgagcagttgctcaacgtgcagaaccagaa

SEQ ID NO: 214905 - DNA, 120 bp, Artificial Sequence
  ENSG00000116171_43 (sequence is synthesized)
cagcagctactttgtggagtggatccccaacaacatcaagacagctgtctgtgacatcccacctcatggcttcaagatggcggtcaccttaatcggcagcagcacggccatccaggagct

SEQ ID NO: 214906 - DNA, 120 bp, Artificial Sequence
  ENSG00000116171_44 (sequence is synthesized)
cttcaggtgcatcttggagcagttcactgccatgttcccctggaaggccttcctccactggtacacagctgagggcatggatgagacgagagttcaacaaggctgagagcaacatgaacg

SEQ ID NO: 214907 - DNA, 120 bp, Artificial Sequence
  ENSG00000116171_45 (sequence is synthesized)
tcacaaaactcagtgttccccaaacagttgacagacgtctgtggagcaagctgtgtgccacacactgtcttgtgtgctggaagtgcccagaagagtaagaaagttcccacgctcagggca

SEQ ID NO: 214908 - DNA, 120 bp, Artificial Sequence
  ENSG00000116171_46 (sequence is synthesized)
tccacagatgtgtaaaagagtcagtgcagccagagatccaaggtgccacacctggcttgtggtcaggggaggatgaaggcaggagcagccatatctctctgggccatcagggagagcacc

SEQ ID NO: 214909 - DNA, 120 bp, Artificial Sequence
  ENSG00000116171_47 (sequence is synthesized)
acagaggaagcagctcttgagcttagtacccaggcggaaagtaggagtgttccaggaggagggaggggtggcatgaacaaaggcctgaccttttacattccatttatttgcccatgctct

SEQ ID NO: 214910 - DNA, 120 bp, Artificial Sequence
  ENSG00000116171_48 (sequence is synthesized)
tctttttgcctgacctgtccttacctgacaaatgacttgtctttcaaaattagctcagatattatctccaaggacctctttccaagttgctggggagctgtaaccagtccctctcctgag

SEQ ID NO: 214911 - DNA, 120 bp, Artificial Sequence
  ENSG00000116171_49 (sequence is synthesized)
ggactgccagcttagtgcctgttgtgttatgttagtcataatatgcctctctctcttccctgttaggctgtgagtgtctcaaagcatcaaagcacatcttatttgtctttatgtttccag

SEQ ID NO: 214912 - DNA, 120 bp, Artificial Sequence
  ENSG00000116171_50 (sequence is synthesized)
aatttagcacagtatctgatgtttttaggtattctgtaaacaactgttggactaaattgcatttgtctaaagtgtgtttatgccttgtatagattttcctagtccccaaattgtcaaggg

SEQ ID NO: 214913 - DNA, 120 bp, Artificial Sequence
  ENSG00000116171_51 (sequence is synthesized)
tcctcttaggctcttcagctgcagtgttgaatggacttgatatagtgagctttctgtcaacttgatatatactgagctttccattaataaaaaagaaactaagacgtttctttccaatgt

SEQ ID NO: 214914 - DNA, 120 bp, Artificial Sequence
  ENSG00000116171_52 (sequence is synthesized)
aacttaattttttctgttgtctcagtctggtttgttttaggttttattcctgtggttctctggtaatttccaagattggataaaacaactaaatctcactcccacttgcttttttaaaat

SEQ ID NO: 214915 - DNA, 120 bp, Artificial Sequence
  ENSG00000116171_53 (sequence is synthesized)
gctttttctacgtaaccaagcacattttagttgatgccatgacaagtgagaaatttgcatctgtgatgtttcagctgaatacacaccattggcactgacatttccactgagcctgctcca

SEQ ID NO: 214916 - DNA, 120 bp, Artificial Sequence
  ENSG00000116171_54 (sequence is synthesized)
gaaatctggacagaacagaggccaccagtataggagctggctgtcatcctccttcccacccactgcacatgccatgcacagctttggcaggctgttcagacttcacacatcagctgcctt

SEQ ID NO: 214917 - DNA, 120 bp, Artificial Sequence
  ENSG00000116171_55 (sequence is synthesized)
cattctctcaatttatctttgtactgcccattttgggggcaaggtgtcagcttattttccttcagcacctgttaacacccaaaggaattaaagataaaaatagcagacctttctattaat

SEQ ID NO: 214918 - DNA, 120 bp, Artificial Sequence
  ENSG00000116171_56 (sequence is synthesized)
gtgctaatggacttcccttatgctcagaggatttccagaggatttgactggaaatcgttaaatgcagtggaaattctaatttcagtgtttggctccagcagcaagcgtacatgaagaaca

SEQ ID NO: 214919 - DNA, 120 bp, Artificial Sequence
  ENSG00000116171_57 (sequence is synthesized)
cctaggggccagattaaaatcatctttatgtatggactctctgaagggtgaagattcatgttttctctattgttagtaaataaaaagtgattttctttgttaacttacaaaggagaaagg

SEQ ID NO: 214920 - DNA, 120 bp, Artificial Sequence
  ENSG00000116171_58 (sequence is synthesized)
catcagacagaaggctttgtgccatatagaaaggaaatatttagtttgtccagacagaggaaggggaaaaaaaggaattagtcacccttaccaggaggtacagaaaaaaacagagctcct

SEQ ID NO: 214921 - DNA, 120 bp, Artificial Sequence
  ENSG00000116171_59 (sequence is synthesized)
tacattcccatggatgatgtagaagagctcctagcttcttaatgtactgttaaaaacctaggactaccagaagctttttttttaaatctagcccttccttattttaagcattcagttaaa

SEQ ID NO: 214922 - DNA, 120 bp, Artificial Sequence
  ENSG00000116171_60 (sequence is synthesized)
atactgagatcatggcagggaaattatgctacgttcccaattttgctgtttctcttaagttttcctgggattttgttacatggtaaatttagcaaacatcatgtgatctaatcccaggca

SEQ ID NO: 214923 - DNA, 120 bp, Artificial Sequence
  ENSG00000116171_61 (sequence is synthesized)
gttgttaaatggaacaaattgtggctctgcacttcagattggtttgatttttcttgttgagccaaagagtaacacaagcacctcattctcagcaggctctgtgccctctgtagggataag

SEQ ID NO: 214924 - DNA, 120 bp, Artificial Sequence
  ENSG00000116171_62 (sequence is synthesized)
tcctttatcattggtggcatttcattcacatgcatgttggattgaatcccaagagtttctgtgttttttgtgtatgctttttctctcagcagcctgctaaaaatttcagttcatatttcc

SEQ ID NO: 214925 - DNA, 120 bp, Artificial Sequence
  ENSG00000116171_63 (sequence is synthesized)
cacctacatggaatgttttaaaacataatcagtgtagtatgaacccactttgaggaggacaggtgaaaacaggctcaatttctatgagaaatttgggaaagctgctcctttctgctgatc

SEQ ID NO: 214926 - DNA, 120 bp, Artificial Sequence
  ENSG00000116171_64 (sequence is synthesized)
tgcaaaaagtgtggcctttacaaattcttccttttgaagaatgtggttccaaatctattccagaaagccaagtttcatattttagagaaagtcatgtgacctggataaataaatgatctc

SEQ ID NO: 214927 - DNA, 120 bp, Artificial Sequence
  ENSG00000116171_65 (sequence is synthesized)
ggggaagccggaaagaggcaagttcctggtgcaaaggtggctctgcagcataatttaggcattggaggagctgtggttgtaacactctacaagatgggttttccggaagccgccagaact

SEQ ID NO: 214928 - DNA, 120 bp, Artificial Sequence
  ENSG00000116176_0 (sequence is synthesized)
acaccatggcccttggggcctgtggcctcctgctgctcctggctgtgcccggtgtgtccctcaggactttgcagccagggtgtggccggccgcaggtttcggatgcaggcggccggatcg

SEQ ID NO: 214929 - DNA, 120 bp, Artificial Sequence
  ENSG00000116176_1 (sequence is synthesized)
tggggggtcacgctgccccggccggcgcatggccatggcaggccagcctccgcctgcggagggtgcacgtgtgcggcgggtcactgctcagcccccagtgggtgctcacagctgcccact

SEQ ID NO: 214930 - DNA, 120 bp, Artificial Sequence
  ENSG00000116176_2 (sequence is synthesized)
gcttctccgggtccctgaactcatccgactaccaggtgcacctgggggaactggagatcactctgtctccccacttctccaccgtgaggcagatcatcctgcactccagcccctcaggac

SEQ ID NO: 214931 - DNA, 120 bp, Artificial Sequence
  ENSG00000116176_3 (sequence is synthesized)
agccggggaccagcggggacatcgccctggtggagctcagtgtccccgtgaccctctccagccggatcctgcccgtctgcctcccggaggcctcagatgacttctgccctgggatccggt

SEQ ID NO: 214932 - DNA, 120 bp, Artificial Sequence
  ENSG00000116176_4 (sequence is synthesized)
ggagggagagcctctgccacccccgtacagcctgcgggaggtgaaagtctccgtggtggacacagagacctgccgccgggactatcccggccccgggggcagcatccttcagcccgacat

SEQ ID NO: 214933 - DNA, 120 bp, Artificial Sequence
  ENSG00000116176_5 (sequence is synthesized)
gctgtgtgcccggggccccggggatgcctgccaggacgactccggggggcctctggtctgccaggtgaacggtgcctgggtgcaggctggcactgtgagctggggtgagggctgcggccg

SEQ ID NO: 214934 - DNA, 120 bp, Artificial Sequence
  ENSG00000116176_6 (sequence is synthesized)
ccccaacaggccgggagtctacactcgtgtccctgcctacgtgaactggatccgccgccacatcacagcatcagggggctcagagtctgggtaccccaggctccccctcctggctggctt

SEQ ID NO: 214935 - DNA, 120 bp, Artificial Sequence
  ENSG00000116176_7 (sequence is synthesized)
cttcctccccggcctcttccttctgctagtctcctgtgtcctgctggccaagtgcctgctgcacccatctgcggatggtactcccttccccgcccctgactgatggcaggaatccaagtg

SEQ ID NO: 214936 - DNA, 120 bp, Artificial Sequence
  ENSG00000116176_8 (sequence is synthesized)
catttcttaaataagttactatttattccgctccgccccctccctctcccttgagaagctgagtcttctgcatcagattattgcaacatttaacctgaatttaaaagcacacgaaacaaa

SEQ ID NO: 214937 - DNA, 120 bp, Artificial Sequence
  ENSG00000116176_9 (sequence is synthesized)
ttgacccagcctcaccaggccgggcccctctgctcaggaccaggccccaccccagtgccgccctgaggcctggcaggggcctctggagcccgcacacccctctccttggcagccccctcc

SEQ ID NO: 214938 - DNA, 120 bp, Artificial Sequence
  ENSG00000116183_0 (sequence is synthesized)
atgactctctctcttgagtaggcacacactcccttttctcgggtgtgtactttttgctttgtgatacatctctgcactttcagtattttccaactcatccttaaattccttctcacaaca

SEQ ID NO: 214939 - DNA, 120 bp, Artificial Sequence
  ENSG00000116183_1 (sequence is synthesized)
gtgtcaagagcctggacgccagccaggattgaggtcctacgggtgtttggggacctccccaagcccacgagtatcaatggcagtatcaattgtctgtgacagtgattaaggagcaaaaca

SEQ ID NO: 214940 - DNA, 120 bp, Artificial Sequence
  ENSG00000116183_2 (sequence is synthesized)
cttggaacccacaagactcccagaaggtgaagttaagagctcccagactcataaggttattagaacagcaaactggcaccccaaagaactttacggagacttgcaacctatcaacaagtt

SEQ ID NO: 214941 - DNA, 120 bp, Artificial Sequence
  ENSG00000116183_3 (sequence is synthesized)
ggatgagggattaaaagccttcaacaaccaacaaccccaagcatcaaactgaaggaaacattctaaccttcacagacagactggaggctggatggggacctggctgaagacatctggaga

SEQ ID NO: 214942 - DNA, 120 bp, Artificial Sequence
  ENSG00000116183_4 (sequence is synthesized)
atgaaagttaagtaccagcttgcatttttgtgcccctagattatttttgcattttaaaataagaagcatcaaattgcgtgtctctgtgtaaaagttctagcaatttgttttaaggtgaac

SEQ ID NO: 214943 - DNA, 120 bp, Artificial Sequence
  ENSG00000116183_5 (sequence is synthesized)
ttattttggcttagggactacaaaaagagaaggtaattcctagggaaggaagaagagaaagaaatgaaaattagagaataagattattttgaatgacttcaggtagcgaggagtgtgtgt

SEQ ID NO: 214944 - DNA, 120 bp, Artificial Sequence
  ENSG00000116183_6 (sequence is synthesized)
ttgtgagtgtgtatttgagagacttggctcatgcctgtgggtcttctcttctagtatcagtgaggggagggattactgaagaagaaggggggaaaaaaaaagaaagaaatctgagctttc

SEQ ID NO: 214945 - DNA, 120 bp, Artificial Sequence
  ENSG00000116183_7 (sequence is synthesized)
tgggaggaaattcaaaggaaccaagagaaattaacttcgttctgcaaggactaaagtacagcaagaggagagaggtcaagcgagaagcgtgcgggaagcacatgccctggggaggcatag

SEQ ID NO: 214946 - DNA, 120 bp, Artificial Sequence
  ENSG00000116183_8 (sequence is synthesized)
aagccacactggcagagcggccagcacaggtagccagcagaggcattcttggggctatttgaaaaagtttggtctgtgaacaaaacagtttccctggtgactgcaaatccattgctagct

SEQ ID NO: 214947 - DNA, 120 bp, Artificial Sequence
  ENSG00000116183_9 (sequence is synthesized)
gcctctttctcgtctgcccatcactctggtgtggtacccagaagttgacttctggttctgtagaaagagctaggggaggtatgatgtgcttaaagatcctaagaataagcctggcgattt

SEQ ID NO: 214948 - DNA, 120 bp, Artificial Sequence
  ENSG00000116183_10 (sequence is synthesized)
tggctgggtgggcactctgttctgccaactctgagctgggctggacacgcaagaaatccttggttgagagggaacacctgaatcaggtgctgttggaaggagaacgttgttggctggggg

SEQ ID NO: 214949 - DNA, 120 bp, Artificial Sequence
  ENSG00000116183_11 (sequence is synthesized)
ccaaggttcgaagacccagagcttctccacagcatcacctctttggagtctaccccagcagggctgggaactacctaaggccctaccccgtgggggagcaagaaatccatcatacaggac

SEQ ID NO: 214950 - DNA, 120 bp, Artificial Sequence
  ENSG00000116183_12 (sequence is synthesized)
gcagcaaaccagacactgaaggaaatgctgtgagccttgttcccccagacctgactgaaaatccagcaggactgaggggtgcagttgaagagccggctgccccatgggtaggggatagtc

SEQ ID NO: 214951 - DNA, 120 bp, Artificial Sequence
  ENSG00000116183_13 (sequence is synthesized)
ctattgggcaatctgagctgctgggagatgatgacgcttatctcggcaatcaaagatccaaggagtctctaggtgaggccgggattcagaaaggctcagccatggctgccactactacca

SEQ ID NO: 214952 - DNA, 120 bp, Artificial Sequence
  ENSG00000116183_14 (sequence is synthesized)
ccgccattttcacaaccctgaacgaacccaaaccagagacccaaaggaggggctgggccaagtccaggcagcgtcgccaagtgtggaagaggcgggcggaagatgggcagggagactccg

SEQ ID NO: 214953 - DNA, 120 bp, Artificial Sequence
  ENSG00000116183_15 (sequence is synthesized)
gtatctcttcacatttccaaccttggcccaagcattcccttaaacacagggtcaaaaagagtccaccggaggaaagcaaccaaaatggtggagagggctcctaccgagaagcagagacct

SEQ ID NO: 214954 - DNA, 120 bp, Artificial Sequence
  ENSG00000116183_16 (sequence is synthesized)
ttaactcccaagtaggactgcccatcttatacttctctgggaggcgggagcggctgctgctgcgtccagaagtgctggctgagattccccgggaggcgttcacagtggaagcctgggtta

SEQ ID NO: 214955 - DNA, 120 bp, Artificial Sequence
  ENSG00000116183_17 (sequence is synthesized)
aaccggagggaggacagaacaacccagccatcatcgcaggtgtgtttgataactgctcccacactgtcagtgacaaaggctgggccctggggatccgctcagggaaggacaagggaaagc

SEQ ID NO: 214956 - DNA, 120 bp, Artificial Sequence
  ENSG00000116183_18 (sequence is synthesized)
gggatgctcgcttcttcttctccctctgcaccgaccgcgtgaagaaagccaccatcttgattagccacagtcgctaccaaccaggcacatggacccatgtggcagccacttacgatggac

SEQ ID NO: 214957 - DNA, 120 bp, Artificial Sequence
  ENSG00000116183_19 (sequence is synthesized)
ggcacatggccctgtatgtggatggcactcaggtggctagcagtctagaccagtctggtcccctgaacagccccttcatggcatcttgccgctctttgctcctggggggagacagctctg

SEQ ID NO: 214958 - DNA, 120 bp, Artificial Sequence
  ENSG00000116183_20 (sequence is synthesized)
aggatgggcactatttccgtggacacctgggcacactggttttctggtcgaccgccctgccacaaagccattttcagcacagttctcagcattcaagtggggaggaggaagcgactgact

SEQ ID NO: 214959 - DNA, 120 bp, Artificial Sequence
  ENSG00000116183_21 (sequence is synthesized)
tggtcctgacagcgagctttgagcctgtgaacacagagtgggttccctttagagatgagaagtacccacgacttgaggttctccagggctttgagccagagcctgagattctgtcgcctt

SEQ ID NO: 214960 - DNA, 120 bp, Artificial Sequence
  ENSG00000116183_22 (sequence is synthesized)
tgcagcccccactctgtgggcaaacagtctgtgacaatgtggaattgatctcccagtacaatggatactggccccttcggggagagaaggtgatacgctaccaggtggtgaacatctgtg

SEQ ID NO: 214961 - DNA, 120 bp, Artificial Sequence
  ENSG00000116183_23 (sequence is synthesized)
atgatgagggcctaaaccccattgtgagtgaggagcagattcgtctgcagcacgaggcactgaatgaggccttcagccgctacaacatcagctggcagctgagcgtccaccaggtccaca

SEQ ID NO: 214962 - DNA, 120 bp, Artificial Sequence
  ENSG00000116183_24 (sequence is synthesized)
attccaccctgcgacaccgggttgtgcttgtgaactgtgagcccagcaagattggcaatgaccattgtgaccccgagtgtgagcacccactcacaggctatgatgggggtgactgccgcc

SEQ ID NO: 214963 - DNA, 120 bp, Artificial Sequence
  ENSG00000116183_25 (sequence is synthesized)
tgcagggccgctgctactcctggaaccgcagggatgggctctgtcacgtggagtgtaacaacatgctgaacgactttgacgacggagactgctgcgacccccaggtggctgatgtgcgca

SEQ ID NO: 214964 - DNA, 120 bp, Artificial Sequence
  ENSG00000116183_26 (sequence is synthesized)
agacctgctttgaccctgactcacccaagagggcatacatgagtgtgaaggagctgaaggaggccctgcagctgaacagtactcacttcctcaacatctactttgccagctcagtgcggg

SEQ ID NO: 214965 - DNA, 120 bp, Artificial Sequence
  ENSG00000116183_27 (sequence is synthesized)
aagaccttgcaggtgctgccacctggccttgggacaaggacgctgtcactcacctgggtggcattgtcctcagcccagcatattatgggatgcctggccacaccgacaccatgatccatg

SEQ ID NO: 214966 - DNA, 120 bp, Artificial Sequence
  ENSG00000116183_28 (sequence is synthesized)
aagtgggacatgttctgggactctaccatgtctttaaaggagtcagtgaaagagaatcctgcaatgacccctgcaaggagacagtgccatccatggaaacgggagacctctgtgccgaca

SEQ ID NO: 214967 - DNA, 120 bp, Artificial Sequence
  ENSG00000116183_29 (sequence is synthesized)
ccgcccccactcccaagagtgagctgtgccgggaaccagagcccactagtgacacctgtggcttcactcgcttcccaggggctccgttcaccaactacatgagctacacggatgataact

SEQ ID NO: 214968 - DNA, 120 bp, Artificial Sequence
  ENSG00000116183_30 (sequence is synthesized)
gcactgacaacttcactcctaaccaagtggcccgaatgcattgctatttggacctagtctatcagcagtggactgaaagcagaaagcccacccccatccccattccacctatggtcatcg

SEQ ID NO: 214969 - DNA, 120 bp, Artificial Sequence
  ENSG00000116183_31 (sequence is synthesized)
gacagaccaacaagtccctcactatccactggctgcctcctattagtggagttgtatatgacagggcctcaggcagcttgtgtggcgcttgcactgaagatgggacctttcgtcagtatg

SEQ ID NO: 214970 - DNA, 120 bp, Artificial Sequence
  ENSG00000116183_32 (sequence is synthesized)
tgcacacagcttcctcccggcgggtgtgtgactcctcaggttattggaccccagaggaggctgtggggcctcctgatgtggatcagccctgcgagccaagcttacaggcctggagccctg

SEQ ID NO: 214971 - DNA, 120 bp, Artificial Sequence
  ENSG00000116183_33 (sequence is synthesized)
aggtccacctgtaccacatgaacatgacggtcccctgccccacagaaggctgtagcttggagctgctcttccaacacccggtccaagccgacaccctcaccctgtgggtcacttccttct

SEQ ID NO: 214972 - DNA, 120 bp, Artificial Sequence
  ENSG00000116183_34 (sequence is synthesized)
tcatggagtcctcgcaggtcctctttgacacagagatcttgctggaaaacaaggagtcagtgcacctgggccccttagacactttctgtgacatcccactcaccatcaaactgcacgtgg

SEQ ID NO: 214973 - DNA, 120 bp, Artificial Sequence
  ENSG00000116183_35 (sequence is synthesized)
atgggaaggtgtcgggggtgaaagtctacacctttgatgagaggatagagattgatgcagcactcctgacttctcagccccacagtcccttgtgctctggctgcaggcctgtgaggtacc

SEQ ID NO: 214974 - DNA, 120 bp, Artificial Sequence
  ENSG00000116183_36 (sequence is synthesized)
aggttctccgcgatcccccatttgccagtggtttgcccgtggtggtgacacattctcacaggaagttcacggacgtggaggtcacacctggacagatgtatcagtaccaagttctagctg

SEQ ID NO: 214975 - DNA, 120 bp, Artificial Sequence
  ENSG00000116183_37 (sequence is synthesized)
aagctggaggagaactgggagaagcttcgcctcctctgaaccacattcatggagctccttattgtggagatgggaaggtgtcagagagactgggagaagagtgtgatgatggagaccttg

SEQ ID NO: 214976 - DNA, 120 bp, Artificial Sequence
  ENSG00000116183_38 (sequence is synthesized)
tgagcggagatggctgctccaaggtgtgtgagctggaggaaggtttcaactgtgtaggagagccaagcctttgctacatgtatgagggagatggcatatgtgaaccttttgagagaaaaa

SEQ ID NO: 214977 - DNA, 120 bp, Artificial Sequence
  ENSG00000116183_39 (sequence is synthesized)
ccagcattgtagactgtggcatctacactcccaaaggatacttggatcaatgggctacccgggcttactcctctcatgaagacaagaagaagtgtcctgtttccttggtaactggagaac

SEQ ID NO: 214978 - DNA, 120 bp, Artificial Sequence
  ENSG00000116183_40 (sequence is synthesized)
gaaaatgaaactcaggatgacaggagtgaacagccagaaggtagcctgaagaaagaggatgaggtttggctcaaagtgtgtttcaatagaccaggagaggccagagcaatttttattttt

SEQ ID NO: 214979 - DNA, 120 bp, Artificial Sequence
  ENSG00000116183_41 (sequence is synthesized)
ttgacaactgatggcctagttcccggagagcatcagcagccgacagtgactctctacctgaccgatgtccgtggaagcaaccactctcttggaacctatggactgtcatgccagcataat

SEQ ID NO: 214980 - DNA, 120 bp, Artificial Sequence
  ENSG00000116183_42 (sequence is synthesized)
ccactgattatcaatgtgacccatcaccagaatgtccttttccaccataccacctcagtgctgctgaatttctcatccccacgggtcggcatctcagctgtggctctaaggacatcctcc

SEQ ID NO: 214981 - DNA, 120 bp, Artificial Sequence
  ENSG00000116183_43 (sequence is synthesized)
cgcattggtctttcggctcccagtaactgcatctcagaggacgaggggcagaatcatcagggacagagctgtatccatcggccctgtgggaagcaggacagctgtccgtcattgctgctt

SEQ ID NO: 214982 - DNA, 120 bp, Artificial Sequence
  ENSG00000116183_44 (sequence is synthesized)
gatcatgctgatgtggtgaactgtacctctataggcccaggtctcatgaagtgtgctatcacttgtcaaaggggatttgcccttcaggccagcagtgggcagtacatcaggcccatgcag

SEQ ID NO: 214983 - DNA, 120 bp, Artificial Sequence
  ENSG00000116183_45 (sequence is synthesized)
aaggaaattctgctcacatgttcttctgggcactgggaccagaatgtgagctgccttcccgtggactgcggtgttcccgacccgtctttggtgaactatgcaaacttctcctgctcagag

SEQ ID NO: 214984 - DNA, 120 bp, Artificial Sequence
  ENSG00000116183_46 (sequence is synthesized)
ggaaccaaatttctgaaacgctgctcaatctcttgtgtcccaccagccaagctgcaaggactgagcccatggctgacatgtcttgaagatggtctctggtctctccctgaagtctactgc

SEQ ID NO: 214985 - DNA, 120 bp, Artificial Sequence
  ENSG00000116183_47 (sequence is synthesized)
aagttggagtgtgatgctccccctattattctgaatgccaacttgctcctgcctcactgcctccaggacaaccacgacgtgggcaccatctgcaaatatgaatgcaaaccagggtactat

SEQ ID NO: 214986 - DNA, 120 bp, Artificial Sequence
  ENSG00000116183_48 (sequence is synthesized)
gtggcagaaagtgcagagggtaaagtcaggaacaagctcctgaagatacaatgcctggaaggtggaatctgggagcaaggcagctgcattcctgtggtgtgtgagccaccccctcctgtg

SEQ ID NO: 214987 - DNA, 120 bp, Artificial Sequence
  ENSG00000116183_49 (sequence is synthesized)
tttgaaggcatgtatgaatgtaccaatggcttcagcctggacagccagtgtgtgctcaactgtaaccaggaacgtgaaaagcttcccatcctctgcactaaagagggcctgtggacccag

SEQ ID NO: 214988 - DNA, 120 bp, Artificial Sequence
  ENSG00000116183_50 (sequence is synthesized)
gagtttaagttgtgtgagaatctgcaaggagaatgcccaccacccccctcagagctgaattctgtggagtacaaatgtgaacaaggatatgggattggtgcagtgtgttccccattgtgt

SEQ ID NO: 214989 - DNA, 120 bp, Artificial Sequence
  ENSG00000116183_51 (sequence is synthesized)
gtaatcccccccagtgaccccgtgatgctacctgagaatatcactgctgacactctggagcactggatggaacctgtcaaagtccagagcattgtgtgcactggccggcgtcaatggcac

SEQ ID NO: 214990 - DNA, 120 bp, Artificial Sequence
  ENSG00000116183_52 (sequence is synthesized)
ccagaccccgtcttagtccactgcatccagtcatgtgagcccttccaagcagatggttggtgtgacactatcaacaaccgagcctactgccactatgacgggggagactgctgctcttcc

SEQ ID NO: 214991 - DNA, 120 bp, Artificial Sequence
  ENSG00000116183_53 (sequence is synthesized)
acactctcctccaagaaggtcattccatttgctgctgactgtgacctggatgagtgcacctgccgggaccccaaggcagaagaaaatcagtaactgtgggaacaagcccctccctccact

SEQ ID NO: 214992 - DNA, 120 bp, Artificial Sequence
  ENSG00000116183_54 (sequence is synthesized)
gcctcagaggcagtaagaaagagaggccgacccaggaggaaacaaagggtgaatgaagaagaacaatcatgaaatggaagaaggaggaagagcatgaaggatcttataagaaatgcaaga

SEQ ID NO: 214993 - DNA, 120 bp, Artificial Sequence
  ENSG00000116183_55 (sequence is synthesized)
ggatattgataggtgtgaactagttcatcaagtagcccaagtaggagagaatcataggcaaaagtttctttaaagtggcagttgattaacatggaaggggaaatatgatagatatataag

SEQ ID NO: 214994 - DNA, 120 bp, Artificial Sequence
  ENSG00000116183_56 (sequence is synthesized)
gaccctcctccctcacttatattctattaaatcctatcctcaactcttgccctgctctccgctccaccccctgccaactactcagtcccacccaacttgtaaaccaataccaaaatacta

SEQ ID NO: 214995 - DNA, 120 bp, Artificial Sequence
  ENSG00000116183_57 (sequence is synthesized)
gaggagaagttggcagggatactgttaatacccattttgaatggattgccatctttcagagcttgtctgctctcaactggctctttttctttttgtgtagtttcccttaaataatgaagt

SEQ ID NO: 214996 - DNA, 120 bp, Artificial Sequence
  ENSG00000116183_58 (sequence is synthesized)
ataagtatttaaacataattatataaatatattatatatattatattttttgctgtttactaagctaaaaattattcattgttccacacatgctgctgtgaagttcacattcaagatgaa

SEQ ID NO: 214997 - DNA, 120 bp, Artificial Sequence
  ENSG00000116183_59 (sequence is synthesized)
tcacattcaagatgaatgttgagactttgaggacagaaaggcaacttattttcccatctttctatggatgcggattggcaggttgaatgggaagtacagaaggagagagagtaattagat

SEQ ID NO: 214998 - DNA, 120 bp, Artificial Sequence
  ENSG00000116183_60 (sequence is synthesized)
ggaattctggatgctagcatgtaaagctaatcatctttttttttatgacctgggagctgggcccattttatgaccaaggagatggggagttggaatggtggtactaagaggcataggaag

SEQ ID NO: 214999 - DNA, 120 bp, Artificial Sequence
  ENSG00000116183_61 (sequence is synthesized)
ttgagtgtgaataccattggtgatgggtccaggagaactagactatggttcttgaatatctgtccacaaagaatatactaacttttgtcaacttctcagaactcccaactggagtcggtg

SEQ ID NO: 215000 - DNA, 120 bp, Artificial Sequence
  ENSG00000116183_62 (sequence is synthesized)
agacctaggattttctgcacttccacacatgcctgttccaagtgtggctgtcagccagtcaacaagtttgtactatggcccattctctgatcaccaggattacaggaactcacacactcc

SEQ ID NO: 215001 - DNA, 120 bp, Artificial Sequence
  ENSG00000116183_63 (sequence is synthesized)
tcatacttggcctgtagtcctacttcttgttagaagtctccaagtctggccagtcacatgaccaagtgttgatttttctggaggaaaaattttatggaaatgatataggggaaaggtggg

SEQ ID NO: 215002 - DNA, 120 bp, Artificial Sequence
  ENSG00000116183_64 (sequence is synthesized)
aggagatgaaagaacaggcaagagctgtcagggttaaatccaggcccgggcatgagaatggaagtgatcagggagactcggtccttgttccaagtctccaaagaagaccaaagtgggtcc

SEQ ID NO: 215003 - DNA, 120 bp, Artificial Sequence
  ENSG00000116183_65 (sequence is synthesized)
cttgagcaatgaagaatctgagataaattctcttcaagtatcatgtacaaaatctgtgagccagagattttgacttgagcaagccatggaaatgcatggagcaagggtgacactctgtgg

SEQ ID NO: 215004 - DNA, 120 bp, Artificial Sequence
  ENSG00000116183_66 (sequence is synthesized)
ggagacagaagaatttcaactatttaatgtccattttgttgtttttaccctttcttatccaatagatggaatgcacatgaaatgaccatattaagcctctctctatttacatcccaggct

SEQ ID NO: 215005 - DNA, 120 bp, Artificial Sequence
  ENSG00000116183_67 (sequence is synthesized)
cactgggatgtgatctactgcagttacattttcttgtaacggtttctggattagaccctagggaaagtgagtaaggagccagtttctgtttaacattctagttttactcattttaggaag

SEQ ID NO: 215006 - DNA, 120 bp, Artificial Sequence
  ENSG00000116183_68 (sequence is synthesized)
gctgtgagtgaggcttgtctcctttaaagtttcttctccaatggaaaccaagaacagacaaaatttagagctcagctgtggtctcttctcatcttctgctcttttgctttgaccacagtt

SEQ ID NO: 215007 - DNA, 120 bp, Artificial Sequence
  ENSG00000116183_69 (sequence is synthesized)
tttctactcttcccatcaacactagagcaatggctgtgcaaataggaataggaaatactaccacaatgatagaaatattatccacactatcacgtagggaagaacaatatcctgaaagag

SEQ ID NO: 215008 - DNA, 120 bp, Artificial Sequence
  ENSG00000116183_70 (sequence is synthesized)
aataaaacacgaataaggtgatgtacccacattaatctgtgggtttgtggaatgagggttgcaaagttattgggaaaaggaaagagcagagttcacccattcaaaaaaaaccttttgtct

SEQ ID NO: 215009 - DNA, 120 bp, Artificial Sequence
  ENSG00000116183_71 (sequence is synthesized)
actaatctctagtgtaaagaaaatgtagttcagataccattcattgtcttgggtcatgcttagtgcccccaagaagacaaacatatttattcttgggattctgataggcttcaatatgca

SEQ ID NO: 215010 - DNA, 120 bp, Artificial Sequence
  ENSG00000116183_72 (sequence is synthesized)
aaggacaatggaaaagtttagacactctattttcaaaattttataaacttgttttattggggaaaatgtccaaattgctagacacattctaagttctgccttggagaatcctactttgtc

SEQ ID NO: 215011 - DNA, 120 bp, Artificial Sequence
  ENSG00000116183_73 (sequence is synthesized)
tgagattgaggcagaggaattgttatcctgggcattactcagctcaggaacatggagcctgtggttcatgccagtgtgtgtcttcatgcagtctctccacaagagcaacagtaagaacat

SEQ ID NO: 215012 - DNA, 120 bp, Artificial Sequence
  ENSG00000116183_74 (sequence is synthesized)
ttctgttttaaatttcattttaaaatattttattatctgcaattcaccactgctctgggaaagcaaaaggaaagttcctgttgtgtgtgaagagcctcttaggctataaggcttcccagc

SEQ ID NO: 215013 - DNA, 120 bp, Artificial Sequence
  ENSG00000116183_75 (sequence is synthesized)
catagtcagctatagctattcagagacagcaggttcttccagtctttgttcctgggacctgatgttttgagcaactcaggtcactgataaagtggaaggactaagacactgtggtcacag

SEQ ID NO: 215014 - DNA, 120 bp, Artificial Sequence
  ENSG00000116183_76 (sequence is synthesized)
atcccagcaacatcaactcacactcaatccatgtggtggtccacattctgctactcttatccacccatgtggtcattgagagcctttctcagagactcttctgtgtgtttgattgtgccc

SEQ ID NO: 215015 - DNA, 120 bp, Artificial Sequence
  ENSG00000116183_77 (sequence is synthesized)
aggtggcccagggctagctggctctaacaactagcatgacagcctccaatcagaaaggcaggtaaggggacagggtgaggagaatgggcagatactgacagaaattaaagtaaagggatt

SEQ ID NO: 215016 - DNA, 120 bp, Artificial Sequence
  ENSG00000116183_78 (sequence is synthesized)
gtgaaagtaaagagctcttcctgattctcatcttctcttttttctattacaaggcattgaacttggcacttcctgtattctttgtgatcactattgagtgcattagttaacacccaaggg

SEQ ID NO: 215017 - DNA, 120 bp, Artificial Sequence
  ENSG00000116183_79 (sequence is synthesized)
gatggcttgattgggaatgtagtgaaaggagctgatctactgtattgtaatgtaaaacagctacagccagttattttgtaagattataagttgttcattaaaaaatcagcacacaaaata

SEQ ID NO: 215018 - DNA, 120 bp, Artificial Sequence
  ENSG00000116183_80 (sequence is synthesized)
agctgggagggtggaggtgtgggagctgatgggagaatgattaagtggtcatttgtgtcggagagttgaagtgtatttattataaggtattattattttttcatgtctttgaagaacttg

SEQ ID NO: 215019 - DNA, 120 bp, Artificial Sequence
  ENSG00000116183_81 (sequence is synthesized)
aagaaatactgacatattaaggtactttgttcactgaattctcctctactagatattttaaaatatacttctatcctcgatagtaaaaaaggcacagagccaaaagccctcttgtgatcc

SEQ ID NO: 215020 - DNA, 120 bp, Artificial Sequence
  ENSG00000116183_82 (sequence is synthesized)
ccttgacttctagaatgtggttattcttatttttgcccgcattcttagacatttactctgaagaagagtccaatggaaataaaggaaaagagtttatgggtcaaggtggcccattgtact

SEQ ID NO: 215021 - DNA, 120 bp, Artificial Sequence
  ENSG00000116183_83 (sequence is synthesized)
gtttttgaagttggtcaacaaggtggcttggttaatttaggctcagcatgttttactgtatgttactaaaaaaaaaaaaaaaaaaaatcagattctctttttccagcactagtcaagcac

SEQ ID NO: 215022 - DNA, 120 bp, Artificial Sequence
  ENSG00000116183_84 (sequence is synthesized)
aaattcttagctgcctaccaccctttccccaccaaaaggtgacatctaattttaaaaaaatggcatcttcctggccctcggaaaaacttgtcatctggtctttcttgccttaattcagct

SEQ ID NO: 215023 - DNA, 120 bp, Artificial Sequence
  ENSG00000116183_85 (sequence is synthesized)
tctgtattattcttcgctgtctctcacgccttccttgtttcttgtgaaaagtaatagtgactggtttcctataatggactcaaagttatccctaaaattaaagacttatttgatgaccta

SEQ ID NO: 215024 - DNA, 120 bp, Artificial Sequence
  ENSG00000116183_86 (sequence is synthesized)
tttttttttaacttgggactgccaagagctgaaggagagtggtgagcaaaggaatgaagggagagagagagaaactaaactggaagcttgagttttgtgtagcttcttgaaaccttatga

SEQ ID NO: 215025 - DNA, 120 bp, Artificial Sequence
  ENSG00000116183_87 (sequence is synthesized)
atggattactagaagctgagagccaggagagacctataggggatgcaagatccctacacattaaaagggggagaaaagcaggcggaattcttcttcctggctgtgttatccctccttcct

SEQ ID NO: 215026 - DNA, 120 bp, Artificial Sequence
  ENSG00000116183_88 (sequence is synthesized)
atggggcctagatgttgtggagccagctcctaaaagcagatttccctcacccccaaaatctggattaggtatttaactcctgttcacatcttgatgctacactgaactatcacatgagct

SEQ ID NO: 215027 - DNA, 120 bp, Artificial Sequence
  ENSG00000116191_0 (sequence is synthesized)
ccgccaggtccgctctcgtcccccacccctggcgcggacggggtggttccagctcactctcctcccccgagcggcagcggcggcggcggcggcggctgctgcgggcgctgaatgagagac

SEQ ID NO: 215028 - DNA, 120 bp, Artificial Sequence
  ENSG00000116191_1 (sequence is synthesized)
tgctgcgggcgctgaatgagagacggtgactgttcgggtcgacgagtgctactctaggcggcggcggccgtggcggtgaagcgtgaggccggcatcgtctttccgtcctctgaggcgacg

SEQ ID NO: 215029 - DNA, 120 bp, Artificial Sequence
  ENSG00000116191_2 (sequence is synthesized)
gccgcggctgcacaggaataatgtatttgtggccttggacatgaggcagtcagtcctctgttgctgttaacataaggtcagggactgatgaggaaagcatggacctaatgaacgggcagg

SEQ ID NO: 215030 - DNA, 120 bp, Artificial Sequence
  ENSG00000116191_3 (sequence is synthesized)
caagcagtgtcaatattgcagctactgcttctgagaaaagtagcagctctgaatccttaagtgacaaaggctctgaattgaagaaaagctttgatgctgtggtattcgatgttcttaagg

SEQ ID NO: 215031 - DNA, 120 bp, Artificial Sequence
  ENSG00000116191_4 (sequence is synthesized)
ttacaccagaagaatatgcgggtcagataacattaatggatgttccagtatttaaagctattcaaccagatgagctttcaagttgtggatggaataaaaaagaaaaatatagttctgcac

SEQ ID NO: 215032 - DNA, 120 bp, Artificial Sequence
  ENSG00000116191_5 (sequence is synthesized)
caaatgcagttgccttcacaagaagattcaatcatgtaagcttttgggttgttagagagattcttcatgctcaaacattaaaaattagagcagaagttttgagccactatattaaaactg

SEQ ID NO: 215033 - DNA, 120 bp, Artificial Sequence
  ENSG00000116191_6 (sequence is synthesized)
ctaagaaactgtatgagctgaataaccttcatgcacttatggcagtggtttctggcctacagagtgccccaattttcaggttgactaaaacatgggcgttattaagtcgaaaagacaaaa

SEQ ID NO: 215034 - DNA, 120 bp, Artificial Sequence
  ENSG00000116191_7 (sequence is synthesized)
ctacctttgaaaaattagaatatgtaatgagtaaagaagataactacaaaagactcagagactatataagtagcttaaagatgacaccttgcattccctatttaggtatctatttgtcag

SEQ ID NO: 215035 - DNA, 120 bp, Artificial Sequence
  ENSG00000116191_8 (sequence is synthesized)
atttaacatacatcgattcagcatacccatcaactggcagcattctagaaaatgagcaaagatcaaatttaatgaataatatccttcgaataatttctgatttacagcagtcttgtgaat

SEQ ID NO: 215036 - DNA, 120 bp, Artificial Sequence
  ENSG00000116191_9 (sequence is synthesized)
atgatattcccatgttgcctcatgtccaaaaatatctcaactctgttcagtatatagaagaactacaaaaatttgtggaagacgataattacaagctttcattaaagatagaaccaggga

SEQ ID NO: 215037 - DNA, 120 bp, Artificial Sequence
  ENSG00000116191_10 (sequence is synthesized)
caagcaccccacgttctgctgcttccagagaagatttagtaggtcctgaagtaggagcgtctccacagagtggacgaaaaagtgtggcagctgaaggagccttgctcccacagacaccgc

SEQ ID NO: 215038 - DNA, 120 bp, Artificial Sequence
  ENSG00000116191_11 (sequence is synthesized)
catcccctcggaatctgattccacatggacataggaagtgccatagtttgggttataatttcattcataaaatgaacacagcagaatttaagagtgcaacgtttccaaatgcaggaccaa

SEQ ID NO: 215039 - DNA, 120 bp, Artificial Sequence
  ENSG00000116191_12 (sequence is synthesized)
gacatctgttagatgatagcgtcatggagccccatgcgccatctcgaggccaagctgaaagttctactctttctagtggaatatcaataggtagcagcgatggttctgaactaagtgaag

SEQ ID NO: 215040 - DNA, 120 bp, Artificial Sequence
  ENSG00000116191_13 (sequence is synthesized)
agacctcatggcctgcttttgaaaggaacagattataccattctctcggcccggtgacaagagtggcacgaaatggctatcgaagtcacatgaaggccagcagttctgcagaatcagaag

SEQ ID NO: 215041 - DNA, 120 bp, Artificial Sequence
  ENSG00000116191_14 (sequence is synthesized)
atttggcagtacatttatatccaggagctgttactattcaaggtgttctcaggagaaaaactttgttaaaagaaggcaaaaagcctacagtagcatcttggacaaaatattgggcagctt

SEQ ID NO: 215042 - DNA, 120 bp, Artificial Sequence
  ENSG00000116191_15 (sequence is synthesized)
tgtgtgggacacagcttttttactatgctgccaaatctctaaaggctaccgaaagaaaacatttcaaatcaacatccaataagaacgtatctgtgataggatggatggtgatgatggctg

SEQ ID NO: 215043 - DNA, 120 bp, Artificial Sequence
  ENSG00000116191_16 (sequence is synthesized)
atgaccctgaacatcctgatctcttcctgctgactgactctgagaaaggaaattcgtacaagtttcaagctggcaatagaatgaatgcaatgttatggtttaagcatttgagtgcagcct

SEQ ID NO: 215044 - DNA, 120 bp, Artificial Sequence
  ENSG00000116191_17 (sequence is synthesized)
gccaaagtaacaaacaacaggttcctacaaacttgatgacttttgagtagaagcctgagaaaaaaagagaggtgaactgttgcttctacgtgagcatgaggacctgataaaagagcgcca

SEQ ID NO: 215045 - DNA, 120 bp, Artificial Sequence
  ENSG00000116191_18 (sequence is synthesized)
gctataaaccatcctgtgccaggaagagcccagaggctctgtctcagtcgttggagttctcaaccaaaaaagcactaatttcagggaatgatttgagatattcccagagaacaaattgga

SEQ ID NO: 215046 - DNA, 120 bp, Artificial Sequence
  ENSG00000116191_19 (sequence is synthesized)
gttgcaaaacaaactgccatgaaccatgcttcttatctcagaactgacctgtggaaaccactgccttaaaagaatgaaaggaaaaccaacatgaaacaccaaatagtgtgtgtgaatctt

SEQ ID NO: 215047 - DNA, 120 bp, Artificial Sequence
  ENSG00000116191_20 (sequence is synthesized)
ctggcggtgctgtgcttggaatagatcgtagctaatttgcatttcttttaactttgtaataattttagaggggggaattgccttttttagatatgctttaaaaaggaaaaacatactctt

SEQ ID NO: 215048 - DNA, 120 bp, Artificial Sequence
  ENSG00000116191_21 (sequence is synthesized)
gtggattccatcaggagctggttttgaaccgaggtgaagagacttagcagggattgtaccagcagcccacctgcaaggtttgttctccctctagtagtctgcaacctcactggctttctc

SEQ ID NO: 215049 - DNA, 120 bp, Artificial Sequence
  ENSG00000116191_22 (sequence is synthesized)
acagcaagagtgtaggaatgagaaatgttagtcatgtgagttcttgggtttgtttgggattgggtgggggtgtttgttttgttttggatgaggggagaatttttttaaacactaaacttc

SEQ ID NO: 215050 - DNA, 120 bp, Artificial Sequence
  ENSG00000116191_23 (sequence is synthesized)
tgaaatgtagtactgtaaggggaacattatttcctgcaggaggtacaaaggctgtgtgttcatttgccagacgctttttttttaaataggttccagaaaacatggttgtttctaactagg

SEQ ID NO: 215051 - DNA, 120 bp, Artificial Sequence
  ENSG00000116191_24 (sequence is synthesized)
ctaaacttttctgagattttacaataattagatctttttccaagttaattgggttttcccttctcccagtcataggtggtttttatcatcaagacagactgatattttgtcaggatattt

SEQ ID NO: 215052 - DNA, 120 bp, Artificial Sequence
  ENSG00000116191_25 (sequence is synthesized)
tcttttacagtgtttgatgtgcataatgccagagttatttttttattattcattttctctctttttgttcaatatgagattcaggatcatatttgtttaaaaggtaacacatagagatgt

SEQ ID NO: 215053 - DNA, 120 bp, Artificial Sequence
  ENSG00000116191_26 (sequence is synthesized)
atatattttgttataagacatacaaaataattttaagagggataaaggtgaaaatatcagattctggaaattttaagtatctaaactttatacttgtatgatttaccataaacataccaa

SEQ ID NO: 215054 - DNA, 120 bp, Artificial Sequence
  ENSG00000116191_27 (sequence is synthesized)
ccaaaacatttttctgaaaatttactgtcggtctctgacatgaaaccgtattttgtcagtagttgaccaagcagttttatgagaactcttctatgcaatgatgcatttaatttctaaagt

SEQ ID NO: 215055 - DNA, 120 bp, Artificial Sequence
  ENSG00000116191_28 (sequence is synthesized)
aaatgttgaattattaaaaaaaaagtttgaaggtaagatgccttagaattttaatgaaaaatgacactcaaacaaaggctatatgtcgaatgttataaactcttgagacataatgaattt

SEQ ID NO: 215056 - DNA, 120 bp, Artificial Sequence
  ENSG00000116191_29 (sequence is synthesized)
tagcagtggcctagagtaaggtaatgctttgtgactgatatctactaatagacttctgttactttgggcctcacataaaatttctcacattcgtattcttagagaattttatactttttt

SEQ ID NO: 215057 - DNA, 120 bp, Artificial Sequence
  ENSG00000116191_30 (sequence is synthesized)
attataagtattttgcccttgagtccatgaaacttcaatagaaaatattgcttatacaataattagcttaaaatccatccaaaggaaaagagaagagctttttttgagtgttaagttttt

SEQ ID NO: 215058 - DNA, 120 bp, Artificial Sequence
  ENSG00000116191_31 (sequence is synthesized)
taatttagtattctgtttggaaaagatgttaagagttcaaatatgcttcttatgtaacagaaataccattatttctggggtttagtgacacaggctggagaggacaaaagtttcctgtcc

SEQ ID NO: 215059 - DNA, 120 bp, Artificial Sequence
  ENSG00000116191_32 (sequence is synthesized)
tgaatgatttttcaattaatgctctaagcttaacccatgttgggtaatagaaagacatagccagcagtattactacgtagaccttgcacatcttacttttgttttgcatttttaaaaatt

SEQ ID NO: 215060 - DNA, 120 bp, Artificial Sequence
  ENSG00000116191_33 (sequence is synthesized)
tcttaatttgtttatttctcttcagaaatagcgtttttaacagtgtatgtgcttttttaaaaagtattgtgaatgagaaccctgtggattttttttatttcatttgtttgtcataataag

SEQ ID NO: 215061 - DNA, 120 bp, Artificial Sequence
  ENSG00000116191_34 (sequence is synthesized)
ctaacgtagaaatgttgtaggttaaccatatctgtggaaatatgcagttggaagtcagagcctgacatcacatagttttgccaaagggagagagctaagctggaagatgtttttgatact

SEQ ID NO: 215062 - DNA, 120 bp, Artificial Sequence
  ENSG00000116191_35 (sequence is synthesized)
ttcggctctaaacattaatggatgtttgcgtagagtaagatagcgttcaaatttggttaatagtttatagatagacttgtggcctctgactgactaaatttcttaacagcacagaagtcg

SEQ ID NO: 215063 - DNA, 120 bp, Artificial Sequence
  ENSG00000116191_36 (sequence is synthesized)
ttgtttttctgtctttaaaatttattcattcagaaaattagtcattgctttttaagattattttagcatttgaagcaaattgaaaacagaaaagtgacttaaaatagtgtaggtgaattt

SEQ ID NO: 215064 - DNA, 120 bp, Artificial Sequence
  ENSG00000116191_37 (sequence is synthesized)
tttatctataatttaccaaataatacctgataataattcaaagaaaatatgttaccaaaatatattaaatatataggtagttcattcgtgggaagatgaatcttcttattaagcctgccc

SEQ ID NO: 215065 - DNA, 120 bp, Artificial Sequence
  ENSG00000116191_38 (sequence is synthesized)
tcaattgtaaataagtgactcaaaaactcaaaatgttcatcagcattcaggtcatttgtttcacccttagccaagaagaactcattagaaattcagttataatttcaatttaagcctgtt

SEQ ID NO: 215066 - DNA, 120 bp, Artificial Sequence
  ENSG00000116191_39 (sequence is synthesized)
tatgataagcataatgattggcatgttatatagcctgttgaaaataactacagaatgaccttccagagcactgtttttggcctcgtgcccgctctgttcaggctctgcttgtttttcaga

SEQ ID NO: 215067 - DNA, 120 bp, Artificial Sequence
  ENSG00000116191_40 (sequence is synthesized)
atatgatttttacctccagacagtaagaattgaacaagaactgatcaaacacaccttcctattttgttttcttcactatgtaaatattatttgggcaaacattacaaaaagggatccaaa

SEQ ID NO: 215068 - DNA, 120 bp, Artificial Sequence
  ENSG00000116191_41 (sequence is synthesized)
caatttgagtttcagtatttttttctccctaggcatgtgcttcaatttcaaatatttttttctgtgtggaaaatgccatgtaactattgcactaccttctgtgtggactgtgttggtatt

SEQ ID NO: 215069 - DNA, 120 bp, Artificial Sequence
  ENSG00000116191_42 (sequence is synthesized)
ggttctttctgtatatcaaaagtcagggtgtttataactgcaaagtttgtataagtggctttattcctcttctagaagatttatgaggagcctaggaagcactattggtacaggaggaaa

SEQ ID NO: 215070 - DNA, 120 bp, Artificial Sequence
  ENSG00000116191_43 (sequence is synthesized)
aaagaatggaaaacatgtttacagactctagctttccttattagcttaaactggggccctcaaagagcagcctgttgatcttttggccaaatgacttgagcataagtcttttatttcttt

SEQ ID NO: 215071 - DNA, 120 bp, Artificial Sequence
  ENSG00000116191_44 (sequence is synthesized)
ttaaggttaaatcgtaaactgtatacctttactactgaaaacaaaactatagggcatcatactaattgaaaatcaatagtaatgggttccatccattagctttttaaatgaatagatctg

SEQ ID NO: 215072 - DNA, 120 bp, Artificial Sequence
  ENSG00000116191_45 (sequence is synthesized)
gtattgatttccttcctgtttttttgaggcacattcctttacaaccagtgtttaaaccaccacgtaatcatcttctgcaaacaaggggtgccagtgttgcctaacagaagataatcttta

SEQ ID NO: 215073 - DNA, 120 bp, Artificial Sequence
  ENSG00000116191_46 (sequence is synthesized)
ataaagcaaatcctctgcttcaaaggtttttgaaataattggatccctttttgaaaaggaagatgagtttaactgtgtccaggtggagtaatagtactgctgttgcatgaatagatgata

SEQ ID NO: 215074 - DNA, 120 bp, Artificial Sequence
  ENSG00000116191_47 (sequence is synthesized)
caaagcaagtgatgaggttggtatgacttctttagtgaccttttagggtttgcttttattttcctctcttttttgtattatttctttcaaacatagtaaatatatgattttacagccaaa

SEQ ID NO: 215075 - DNA, 120 bp, Artificial Sequence
  ENSG00000116191_48 (sequence is synthesized)
tgatgaattactttccatgtgaaccttctcaaaatgatttaagtacctttgattttgctcccctaaaaatggcttgtgtctaaagtgacatttttttccctatttggagggttctaatga

SEQ ID NO: 215076 - DNA, 120 bp, Artificial Sequence
  ENSG00000116191_49 (sequence is synthesized)
aagagatccaggcataaaaactcttttgcttattgaaagcaatttgattacacctatgtttcaggttatagtggggagaaaatttggtcagtgccttattatttgaagagcaattttagg

SEQ ID NO: 215077 - DNA, 120 bp, Artificial Sequence
  ENSG00000116191_50 (sequence is synthesized)
gcatcaagtatgacaataatcatgtgccctcttgctcctcttatttcaggagtgtgtgctatccctctctccaccagcttaatctttctcaccccaagtctaacaaagtctttacagaaa

SEQ ID NO: 215078 - DNA, 120 bp, Artificial Sequence
  ENSG00000116191_51 (sequence is synthesized)
cctctgtaggtgattgttgcagtcttccttggtttttgagtctttttaaacaagctcctaccctgcttctatccttttagagtaggagattaaaaataaacccaccccagtcaaccttta

SEQ ID NO: 215079 - DNA, 120 bp, Artificial Sequence
  ENSG00000116191_52 (sequence is synthesized)
gataagcactcttaaaaacaaatttgaagagcactcttcagccaagttcatttttattttgttgttgatgttttgagcatacatttaattgtaaggccttttggaaaagccctaaaagaa

SEQ ID NO: 215080 - DNA, 120 bp, Artificial Sequence
  ENSG00000116191_53 (sequence is synthesized)
taagatacaaccagaaatatttgagttttgttaaatgtactgaaatcttgtaatgaaaatccctttggccagaaatgagatttatttccatttatttttacatttaagtaacactcaaaa

SEQ ID NO: 215081 - DNA, 120 bp, Artificial Sequence
  ENSG00000116191_54 (sequence is synthesized)
caaacaagtagtcacttaacctgccagttattattttcttgaaaatatacaagaaagtaaaaatatctctaatatataagttaaaggaaagttaagagactaagctagttttttcagtga

SEQ ID NO: 215082 - DNA, 120 bp, Artificial Sequence
  ENSG00000116191_55 (sequence is synthesized)
aagcaaagttggaaatattttgcttctctcagattattggaagacctagagctactggatgttaacctgaatcaagatgttcttttcacatttttttaaagggctagtatgttccagagt

SEQ ID NO: 215083 - DNA, 120 bp, Artificial Sequence
  ENSG00000116191_56 (sequence is synthesized)
aggcaagtagtcattcaagccaaatgaaagagttaactggtccttgaggagtgttagcaaaatttaaattttgaccctggccatttgtactacagaagtgattatgggattaaaagaata

SEQ ID NO: 215084 - DNA, 120 bp, Artificial Sequence
  ENSG00000116191_57 (sequence is synthesized)
cataattacagtgttttgggattgggctcttttttttcttaatagaaaagcagaaacttcataaataatagctgtgctttagataccagataacaaatattgtttcccctgaagatatga

SEQ ID NO: 215085 - DNA, 120 bp, Artificial Sequence
  ENSG00000116191_58 (sequence is synthesized)
cctactagaactactcacatatatagtccaataattactgacttaataggtatggtaaaatagctgataataagtcagactctcaagagtttctgtaccttgattattgacaaattcatt

SEQ ID NO: 215086 - DNA, 120 bp, Artificial Sequence
  ENSG00000116191_59 (sequence is synthesized)
gttttacatcctactaaagaacatgtgtgtggggagggggtggggaactggttcacaacataatctgaaggagatcaaacatctgtaaggacaggtacccagtgatgataatatatctga

SEQ ID NO: 215087 - DNA, 120 bp, Artificial Sequence
  ENSG00000116191_60 (sequence is synthesized)
aaacacaagccatttttattctttatcccaattaacttgaggtactctaatgatgaagcactcgattgcactatgacctccttgagtgatgtgcagcttggttcctctctcactttttgt

SEQ ID NO: 215088 - DNA, 120 bp, Artificial Sequence
  ENSG00000116191_61 (sequence is synthesized)
ttctttttaatatgcaaatgtgagtgtgcgatcttcagtgtgtctgcataagctaacttaagatgaatttaagtacagttttctgaaatatttctattgaaataaattacttaaaattat

SEQ ID NO: 215089 - DNA, 120 bp, Artificial Sequence
  ENSG00000116191_62 (sequence is synthesized)
atttattgtcgatttattagttcagtagaaaatggtatccttgaatagttttcttttttcttaatagctgttttctgattcagtaaaatgccttgtttgcctaaaagcttttatttctta

SEQ ID NO: 215090 - DNA, 120 bp, Artificial Sequence
  ENSG00000116191_63 (sequence is synthesized)
ctttacctgaatttggaaatgggattttgtcaacaatgcatttatatttggggacgataaatgaacattacagagggccatcataaataaaatcaggatagcaatatacctttttaaaag

SEQ ID NO: 215091 - DNA, 120 bp, Artificial Sequence
  ENSG00000116191_64 (sequence is synthesized)
agttacaacctttatatcaagacagtcattgtttgtcttaaccaaaataagtcaaaaataacagctataaaaattattttctttattcctaaatataaagaaaactgactttttgtttaa

SEQ ID NO: 215092 - DNA, 120 bp, Artificial Sequence
  ENSG00000116191_65 (sequence is synthesized)
tgtaaaagtactaaaacaattaaaataaaacctgattatagtagacttgaaataatattaaataaggtcctcccctcttatccttgggtcatccattccaagatcccccggggatgactg

SEQ ID NO: 215093 - DNA, 120 bp, Artificial Sequence
  ENSG00000116191_66 (sequence is synthesized)
aaacctcagatagtaccaaaccaaattaccatcatttggaacatgtttctgttcatgtcttccattcacaaatataataccttttctatcttaactaagcacttaagcccacacagtaac

SEQ ID NO: 215094 - DNA, 120 bp, Artificial Sequence
  ENSG00000116191_67 (sequence is synthesized)
ctaaatcctacatggtatcatacaaaggactaatccagtggtttacagcagtaaaggtactaacatgtattacttcttaatcacttgttatgattgagccaatatacaaatacctcatct

SEQ ID NO: 215095 - DNA, 120 bp, Artificial Sequence
  ENSG00000116191_68 (sequence is synthesized)
gttctttttaatattttatctctgtttgtagagagctaacgtttgatagttctaatttaaatttcttcctttcccccatattcaatcattgaatccttatagaatttgtcttttaataga

SEQ ID NO: 215096 - DNA, 120 bp, Artificial Sequence
  ENSG00000116191_69 (sequence is synthesized)
cagaaaaattaatgaaactttttaaaatagaaaaattactcttctttaatgctaagtattgacacatcgttgtttgtttttcattgtttttgcggattgagagacttggtccatcttgtc

SEQ ID NO: 215097 - DNA, 120 bp, Artificial Sequence
  ENSG00000116191_70 (sequence is synthesized)
tcaggagaagaaacctttctccaatgtagcagaattatcctcttccctgtattatagcaagttctttattaaagatttttgaggccgggcacagtgactcacgcctgtaaccccagcact

SEQ ID NO: 215098 - DNA, 62 bp, Artificial Sequence
  ENSG00000116191_71 (sequence is synthesized)
actgtctgtactaaaaatacagaattagccgggcatggtgcatgcctgtaatcccagctgct

SEQ ID NO: 215099 - DNA, 120 bp, Artificial Sequence
  ENSG00000116194_0 (sequence is synthesized)
actgtatatacaatctgggtcagctgcagctggttactgcatttctccatgtggcagacagagcaaagccacaacgctttctctgctggattaaagacggcccacagaccagaacttcca

SEQ ID NO: 215100 - DNA, 120 bp, Artificial Sequence
  ENSG00000116194_1 (sequence is synthesized)
ctatactacttaaaattacataggtggcttgtcaaattcaattgattagtattgtaaaaggaaaaagaagttccttcttacagcttggattcaacggtccaaaacaaaaatgcagctgcc

SEQ ID NO: 215101 - DNA, 120 bp, Artificial Sequence
  ENSG00000116194_2 (sequence is synthesized)
attaaagtcacagatgaacaaacttctacactgatttttaaaatcaagaataagggcagcaagtttctggattcactgaatcaacagacacaaaaagctggcaatatagcaactatgaag

SEQ ID NO: 215102 - DNA, 120 bp, Artificial Sequence
  ENSG00000116194_3 (sequence is synthesized)
agaaaagctactaataaaattaacccaacgcatagaagacttttttttctcttctaaaaacaactaagtaaagacttaaatttaaacacatcattttacaacctcatttcaaaatgaaga

SEQ ID NO: 215103 - DNA, 120 bp, Artificial Sequence
  ENSG00000116194_4 (sequence is synthesized)
cttttacctggaccctaggtgtgctattcttcctactagtggacactggacattgcagaggtggacaattcaaaattaaaaaaataaaccagagaagataccctcgtgccacagatggta

SEQ ID NO: 215104 - DNA, 120 bp, Artificial Sequence
  ENSG00000116194_5 (sequence is synthesized)
aagaggaagcaaagaaatgtgcatacacattcctggtacctgaacaaagaataacagggccaatctgtgtcaacaccaaggggcaagatgcaagtaccattaaagacatgatcaccagga

SEQ ID NO: 215105 - DNA, 120 bp, Artificial Sequence
  ENSG00000116194_6 (sequence is synthesized)
tggaccttgaaaacctgaaggatgtgctctccaggcagaagcgggagatagatgttctgcaactggtggtggatgtagatggaaacattgtgaatgaggtaaagctgctgagaaaggaaa

SEQ ID NO: 215106 - DNA, 120 bp, Artificial Sequence
  ENSG00000116194_7 (sequence is synthesized)
gccgtaacatgaactctcgtgttactcaactctatatgcaattattacatgagattatccgtaagagggataattcacttgaactttcccaactggaaaacaaaatcctcaatgtcacca

SEQ ID NO: 215107 - DNA, 120 bp, Artificial Sequence
  ENSG00000116194_8 (sequence is synthesized)
cagaaatgttgaagatggcaacaagatacagggaactagaggtgaaatacgcttccttgactgatcttgtcaataaccaatctgtgatgatcactttgttggaagaacagtgcttgagga

SEQ ID NO: 215108 - DNA, 120 bp, Artificial Sequence
  ENSG00000116194_9 (sequence is synthesized)
tattttcccgacaagacacccatgtgtctcccccacttgtccaggtggtgccacaacatattcctaacagccaacagtatactcctggtctgctgggaggtaacgagattcagagggatc

SEQ ID NO: 215109 - DNA, 120 bp, Artificial Sequence
  ENSG00000116194_10 (sequence is synthesized)
caggttatcccagagatttaatgccaccacctgatctggcaacttctcccaccaaaagccctttcaagataccaccggtaactttcatcaatgaaggaccattcaaagactgtcagcaag

SEQ ID NO: 215110 - DNA, 120 bp, Artificial Sequence
  ENSG00000116194_11 (sequence is synthesized)
caaaagaagctgggcattcggtcagtgggatttatatgattaaacctgaaaacagcaatggaccaatgcagttatggtgtgaaaacagtttggaccctgggggttggactgttattcaga

SEQ ID NO: 215111 - DNA, 120 bp, Artificial Sequence
  ENSG00000116194_12 (sequence is synthesized)
aaagaacagacggctctgtcaacttcttcagaaattgggaaaattataagaaagggtttggaaacattgacggagaatactggcttggactggaaaatatctatatgcttagcaatcaag

SEQ ID NO: 215112 - DNA, 120 bp, Artificial Sequence
  ENSG00000116194_13 (sequence is synthesized)
ataattacaagttattgattgaattagaagactggagtgataaaaaagtctatgcagaatacagcagctttcgtctggaacctgaaagtgaattctatagactgcgcctgggaacttacc

SEQ ID NO: 215113 - DNA, 120 bp, Artificial Sequence
  ENSG00000116194_14 (sequence is synthesized)
ataaagatatgtatgcaggaaactgcgcccactttcataaaggaggctggtggtacaatgcctgtgcacattctaacctaaatggagtatggtacagaggaggccattacagaagcaagc

SEQ ID NO: 215114 - DNA, 120 bp, Artificial Sequence
  ENSG00000116194_15 (sequence is synthesized)
accaagatggaattttctgggccgaatacagaggcgggtcatactccttaagagcagttcagatgatgatcaagcctattgactgaagagagacactcgccaatttaaatgacacagaac

SEQ ID NO: 215115 - DNA, 120 bp, Artificial Sequence
  ENSG00000116194_16 (sequence is synthesized)
tttgtacttttcagctcttaaaaatgtaaatgttacatgtatattacttggcacaatttatttctacacagaaagtttttaaaatgaattttaccgtaactataaaagggaacctataaa

SEQ ID NO: 215116 - DNA, 120 bp, Artificial Sequence
  ENSG00000116194_17 (sequence is synthesized)
tgtagtttcatctgtcgtcaattactgcagaaaattatgtgtatccacaacctagttattttaaaaattatgttgactaaatacaaagtttgttttctaaaatgtaaatatttgccacaa

SEQ ID NO: 215117 - DNA, 120 bp, Artificial Sequence
  ENSG00000116194_18 (sequence is synthesized)
aagcaaatcttagctatattttaaatcataaataacatgttcaagatacttaacaatttatttaaaatctaagattgctctaacgtctagtgaaaaaaatatttttaaaatttcagccaa

SEQ ID NO: 215118 - DNA, 120 bp, Artificial Sequence
  ENSG00000116194_19 (sequence is synthesized)
ccaaataatgcattttatttataaaaatacagacagaaaattagggagaaacctctagttttgccaatagaaaatgcttcttccattgaataaaagttatttcaaattgaatttgtgcct

SEQ ID NO: 215119 - DNA, 120 bp, Artificial Sequence
  ENSG00000116194_20 (sequence is synthesized)
ttcacacgtaatgattaaatctgaattcttaataatatatcctatgctgattttcccaaaacatgacccatagtattaaatacatatcatttttaaaaataaaaaaaaacccaaaaataa

SEQ ID NO: 215120 - DNA, 120 bp, Artificial Sequence
  ENSG00000116194_21 (sequence is synthesized)
tgcatgcataatttaaatggtcaatttataaagacaaatctatgaatgaatttttcagtgttatcttcatatgatatgctgaacaccaaaatctccagaaatgcattttatgtagttcta

SEQ ID NO: 215121 - DNA, 120 bp, Artificial Sequence
  ENSG00000116194_22 (sequence is synthesized)
aaatcagcaaaatattggtattacaaaaatgcagaatatttagtgtgctacagatctgaattatagttctaatttattattactttttttctaatttactgatcttactactacaaagaa

SEQ ID NO: 215122 - DNA, 120 bp, Artificial Sequence
  ENSG00000116194_23 (sequence is synthesized)
aaaaaaacccaaccaatctgcaattcaaatcagaaagtttggacagctttacaagtattagtgcatgctcagaacaggtgggactaaaacaaactcaaggaactgttggctgttttcccg

SEQ ID NO: 215123 - DNA, 120 bp, Artificial Sequence
  ENSG00000116194_24 (sequence is synthesized)
atactgagaattcaacagctccagagcagaagccacaggggcatagcttagtccaaactgctaatttcattttacagtgtatgtaacgcttagtctcacagtgtctttaactcatctttg

SEQ ID NO: 215124 - DNA, 120 bp, Artificial Sequence
  ENSG00000116194_25 (sequence is synthesized)
caatcaacaactttactagtgactttctggaacaatttcctttcaggaatacatattcactgcttagaggtgaccttgccttaatatatttgtgaagttaaaattttaaagatagctcat

SEQ ID NO: 215125 - DNA, 120 bp, Artificial Sequence
  ENSG00000116194_26 (sequence is synthesized)
gaaacttttgcttaagcaaaaagaaaacctcgaattgaaatgtgtgaggcaaactatgcatgggaatagcttaatgtgaagataatcatttggacaactcaaatccatcaacatgaccaa

SEQ ID NO: 215126 - DNA, 120 bp, Artificial Sequence
  ENSG00000116194_27 (sequence is synthesized)
tgtttttcatctgccacatctcaaaataaaacttctggtgaaacaaattaaacaaaatatccaaacctcatagtggtattattctttgttttacctgtggtcatcttaaactggtttttc

SEQ ID NO: 215127 - DNA, 120 bp, Artificial Sequence
  ENSG00000116194_28 (sequence is synthesized)
agtccctctccacttccttcagaaccaaagaatctgttataagattcctggaaggaactgggcatctaactgttacaccaaatcttaagtgaataaaactttaccaaggcttctcagtta

SEQ ID NO: 215128 - DNA, 120 bp, Artificial Sequence
  ENSG00000116198_0 (sequence is synthesized)
agggctgggcttggttgtcatgagagtggaggctgcggccggggctatgggcagaggtggccgggtctgcttcttccctgtcactgccgcagcagcttggggtgcaaggcggcctggggc

SEQ ID NO: 215129 - DNA, 120 bp, Artificial Sequence
  ENSG00000116198_1 (sequence is synthesized)
ggcggaaggggcgccccccgagttccgtctgaggaagcggcggctgccgaggaagtccacgagagccgggtcccgcacgcccctggggtccgggtgctgaggcgccgcctggccgcctcc

SEQ ID NO: 215130 - DNA, 120 bp, Artificial Sequence
  ENSG00000116198_2 (sequence is synthesized)
ccgggccgcggcaccgctccgacccagccgccctctccaccggggccgcggcagcgccagtcggggcccttccctctaagcagcccaaacgtgcagaatgccccacaagattggatttgt

SEQ ID NO: 215131 - DNA, 120 bp, Artificial Sequence
  ENSG00000116198_3 (sequence is synthesized)
agtcgtcagctcatctggacacgaagacggcttcagtgcccgggagctcatgatccacgcgccaactgtcagtgggtggcggtcacctagattttgccagtttccacaagaaattgtcct

SEQ ID NO: 215132 - DNA, 120 bp, Artificial Sequence
  ENSG00000116198_4 (sequence is synthesized)
tcaaatggtggagagatgtcgaataaggaaactgcagttacttgctcaccagtatatgatttcaagtaaaattgagttctacattagtgaaagcttgcctgaatattttgcaccctatca

SEQ ID NO: 215133 - DNA, 120 bp, Artificial Sequence
  ENSG00000116198_5 (sequence is synthesized)
agcagagcggtttcgaagacttggctacgtgtctctctgtgataatgaaaagacaggttgcaaagcccgggaactaaaatcagtttatgtggatgcagtaggacaatttcttaaactgat

SEQ ID NO: 215134 - DNA, 120 bp, Artificial Sequence
  ENSG00000116198_6 (sequence is synthesized)
ttttcaccaaaaccatgtcaacaaatacaacatatataatcaggttgctttggttgccataaatatcattggagaccctgcagatttcagtgatgaaagcaatactgcctctcgagagaa

SEQ ID NO: 215135 - DNA, 120 bp, Artificial Sequence
  ENSG00000116198_7 (sequence is synthesized)
gttgattgaccactaccttgggcacaacagcgaggaccctgctctagaaggaacgtacgccaggaaatctgactatatctctccgctagatgacttagcttttgatatgtaccaagatcc

SEQ ID NO: 215136 - DNA, 120 bp, Artificial Sequence
  ENSG00000116198_8 (sequence is synthesized)
agaagttgcacagatcatacgaaaattagatgaaagaaaacgggaagctgtccaaaaggaacgctatgattatgccaagaaactaaaacaagccattgctgatttgcaaaaggttggtga

SEQ ID NO: 215137 - DNA, 120 bp, Artificial Sequence
  ENSG00000116198_9 (sequence is synthesized)
acgccttgggaggtatgaggtagagaaacgctgtgccgtggagaaggaagactacgatctcgccaaggagaagaagcagcagatggagcagtatcgtgccgaggtgtacgagcagctgga

SEQ ID NO: 215138 - DNA, 120 bp, Artificial Sequence
  ENSG00000116198_10 (sequence is synthesized)
gctgcacagcctcctggatgccgagctgatgcgaagaccttttgatttgcccctccagcccctcgctcgttctggcagtccttgccaccaaaagccaatgccctcactaccacaactgga

SEQ ID NO: 215139 - DNA, 120 bp, Artificial Sequence
  ENSG00000116198_11 (sequence is synthesized)
agaaagaggaacagaaaaccagtttgcagaacctttccttcaggaaaagccttcatcatattctctaactatttctcctcagcattctgcagtagacccgttactccctgccacagatcc

SEQ ID NO: 215140 - DNA, 120 bp, Artificial Sequence
  ENSG00000116198_12 (sequence is synthesized)
tcatccaaagatcaatgcagagtccctgccctacgatgagcggcctcttccagctattcgtaagcattatggggaggcagtggtggagccggaaatgagtaatgcagacatcagcgatgc

SEQ ID NO: 215141 - DNA, 120 bp, Artificial Sequence
  ENSG00000116198_13 (sequence is synthesized)
tcggaggggaggcatgttaggggagccagagcccttaaccgagaaggccttgagagaagccagctctgccatcgatgtgttgggagaaaccttggttgctgaggcctattgtaagacgtg

SEQ ID NO: 215142 - DNA, 120 bp, Artificial Sequence
  ENSG00000116198_14 (sequence is synthesized)
gtcctaccgagaggatgcactgcttgccttgtctaagaagttaatggaaatgcctgttggaaccccaaaagaagatttaaagaacacactgagagcatccgtctttctcgttagaagagc

SEQ ID NO: 215143 - DNA, 120 bp, Artificial Sequence
  ENSG00000116198_15 (sequence is synthesized)
cataaaggacattgtgacctccgtttttcaggcttctttgaaattgttgaaaatgatcattacacaatatattcctaaacataaactgagtaaacttgaaacagctcactgtgtggagag

SEQ ID NO: 215144 - DNA, 120 bp, Artificial Sequence
  ENSG00000116198_16 (sequence is synthesized)
gaccattcccgttttgctcaccagaactggagattcttctgcccgcctccgcgtcacagctgcaaattttattcaggaaatggccttgtttaaagaagttaagtctctccaaattattcc

SEQ ID NO: 215145 - DNA, 120 bp, Artificial Sequence
  ENSG00000116198_17 (sequence is synthesized)
atcctacctggtgcagccattgaaagcaaactcttcagttcacctggcaatgagtcagatgggcctcctggcccggctgctgaaagacctgggcactggcagctcgggcttcaccattga

SEQ ID NO: 215146 - DNA, 120 bp, Artificial Sequence
  ENSG00000116198_18 (sequence is synthesized)
caacgtgatgaagttttcagtgagtgccctggagcatagagtgtatgaggtccgcgagacggcggttcgaattattttggacatgtacagacagcaccaggcttccatcctggagtacct

SEQ ID NO: 215147 - DNA, 120 bp, Artificial Sequence
  ENSG00000116198_19 (sequence is synthesized)
tcctccagacgacagcaacacacgcaggaacattctctacaaaacaatttttgagggatttgctaaaatagatggcagagctacagatgctgagatgagggcacggagaaaagcggctac

SEQ ID NO: 215148 - DNA, 120 bp, Artificial Sequence
  ENSG00000116198_20 (sequence is synthesized)
agaagaagcagaaaaacaaaagaaagaagaaataaaagctttacaagggcagctggcagcactgaaagaaattcaggctgaagttcaggaaaaagaaagtgatgctgtgaagccaaagaa

SEQ ID NO: 215149 - DNA, 120 bp, Artificial Sequence
  ENSG00000116198_21 (sequence is synthesized)
tcaggacattcaaggagggaaagcagcccctgctgaagctctgggaatcccggatgagcactatctagataatttgtgtattttttgtggggaaaggagtgaatccttcacagaggaagg

SEQ ID NO: 215150 - DNA, 120 bp, Artificial Sequence
  ENSG00000116198_22 (sequence is synthesized)
tctggatctccactactggaagcactgtctcatgctgacaagatgtgaccactgcaaacaggtggtcgagatatccagtctgacggagcacttgctgacggaatgtgacaaaaaagacgg

SEQ ID NO: 215151 - DNA, 120 bp, Artificial Sequence
  ENSG00000116198_23 (sequence is synthesized)
gtttggaaagtgttaccgttgcagtgaggctgttttcaaggaagagctgcccagacacataaaacacaaggattgcaaccctgccaaaccggagaagctggcaaaccggtgtcccctgtg

SEQ ID NO: 215152 - DNA, 120 bp, Artificial Sequence
  ENSG00000116198_24 (sequence is synthesized)
tcatgagaacttcagccctggagaagaggcatggaaagctcacctgatgggcccagccggctgcacgatgaacctgcgcaagacacacattctgcagaaggccccggcactgcagccagg

SEQ ID NO: 215153 - DNA, 120 bp, Artificial Sequence
  ENSG00000116198_25 (sequence is synthesized)
gaaaagctcagctgtggccgcatcaggccccttggggtcaaaggccggaagcaagatccccaccccgaagggcggactgagcaagagctccagcaggacgtacgccaagcgctgacgcgg

SEQ ID NO: 215154 - DNA, 120 bp, Artificial Sequence
  ENSG00000116198_26 (sequence is synthesized)
ctggccttggtggccccatgctctggctgctgtccccagctccccgccgtgcacgcctcttacgcgtctgtgccgtcagctctcgtgcaaacgatatggatgcagctaaccaaagatcct

SEQ ID NO: 215155 - DNA, 120 bp, Artificial Sequence
  ENSG00000116198_27 (sequence is synthesized)
gcgtgcagtgccaggacctggccgcactgtacattaagccttcagggctgtctcaggccttccttagaatcagagaaggaagcgtcctgtttggagagagccagagagcaccgccgggag

SEQ ID NO: 215156 - DNA, 120 bp, Artificial Sequence
  ENSG00000116198_28 (sequence is synthesized)
gcgctcgcgcaaggccacggtcagcacaggcacggtcccgctttccttagtgcttggagcaatttccataaaacattcaccagaaaccttttgcacatcggtctctgccacacgcagtag

SEQ ID NO: 215157 - DNA, 120 bp, Artificial Sequence
  ENSG00000116198_29 (sequence is synthesized)
aatttccgcagggctgtggctcggccagcagcggttccaggagagtggcggtgcgcacgggcctccagccgtgccttccccctgcaggccccgtctgctgggcctgctgcccagtgcact

SEQ ID NO: 215158 - DNA, 120 bp, Artificial Sequence
  ENSG00000116198_30 (sequence is synthesized)
cagccccaggtagcagaactcacgttcccactatagcaagaaataaaggcaaaagagaacatcttttttttaatcgtagtttttttgagaattggtcccacctcagccgcaccttgctgg

SEQ ID NO: 215159 - DNA, 120 bp, Artificial Sequence
  ENSG00000116198_31 (sequence is synthesized)
atgcttctccagtagtgctgcccctgtgacaggcatcagctccctgctggaactgaggtagacacaggtgtgggcccttcccgtgcctttgctcagaggcgcttcactttctccacactt

SEQ ID NO: 215160 - DNA, 120 bp, Artificial Sequence
  ENSG00000116198_32 (sequence is synthesized)
tcgaattcctaaagacatgtggaggaagtcactgttaaatgaatttccacctgatcaccctgtgttcacagcaggcagaagcccactggtatgggcctcccgccccttccacatccatgt

SEQ ID NO: 215161 - DNA, 120 bp, Artificial Sequence
  ENSG00000116198_33 (sequence is synthesized)
tgtgattggatccataagtttactttcttcaaagagttgataggatgtttaaaacatcaacacattgcttaaaatgatgaaaccaaccctcaaaaaacagtctcctaaccagccatcccc

SEQ ID NO: 215162 - DNA, 120 bp, Artificial Sequence
  ENSG00000116198_34 (sequence is synthesized)
tcctgtgggagtgagctgggggttttgtccatagctttggttgggcctgtgtcacatccaggcagccatgtggagggagtcagggtctgtctggaagcatccaccctctcgctgccccag

SEQ ID NO: 215163 - DNA, 120 bp, Artificial Sequence
  ENSG00000116198_35 (sequence is synthesized)
cctgtgctcccaggggcctaggctaccatggactgaagggcagtcccctcccacctggtgcccagggcttctgcttgcctcgctgatgttgcatgggcagacttcaaaaaggatagttag

SEQ ID NO: 215164 - DNA, 120 bp, Artificial Sequence
  ENSG00000116198_36 (sequence is synthesized)
aaaggtttgggttgatggagtttgcattaatgcaattagtgtataaatatgttttaattgccaaccgtgtgaaacaacaaaatatctaaaaactaatcccgatttgaacaatgtactccc

SEQ ID NO: 215165 - DNA, 120 bp, Artificial Sequence
  ENSG00000116198_37 (sequence is synthesized)
tggcctggatacattaataaccataaatttgcatgaattaatctccacgtttggtaaactaatacctctggttgactgagaatactgagtaagatataagacctaccaggaacctttaag

SEQ ID NO: 215166 - DNA, 120 bp, Artificial Sequence
  ENSG00000116198_38 (sequence is synthesized)
aatatgctctgctcagtgttgtttgtctgcttgtttgcgacggagtctcactgtgtcgcccgggctgcagtgcaatggcgtgatcttggctcacagtaacctccacctcctgggttcaag

SEQ ID NO: 215167 - DNA, 61 bp, Artificial Sequence
  ENSG00000116198_39 (sequence is synthesized)
ttgagcccacatcatgccattgcactccagcccaggcgacagagcgagactccgtctcgaa

SEQ ID NO: 215168 - DNA, 120 bp, Artificial Sequence
  ENSG00000116198_40 (sequence is synthesized)
gagactccgtctcgaaaaaaaaaaaaagtataaggagagaaataactttaaagtttattagacaaaacagagtatagatgccaagatgtctgtaaaatgattttttctggttttaaagag

SEQ ID NO: 215169 - DNA, 120 bp, Artificial Sequence
  ENSG00000116198_41 (sequence is synthesized)
agagatgttggccattattttctaatccatttttaaaatacagacaaaacacttctttaaacagaacaagaatgagaaaagttaaccaaggaattattcttttctcaccaatcaacactt

SEQ ID NO: 215170 - DNA, 120 bp, Artificial Sequence
  ENSG00000116198_42 (sequence is synthesized)
ttaagaaatatatatatatatatacacacatatacacatgccttctatatattgtaacttaaagaaaatacttataaaaagacttcatttttagtgattgacaagcaaacgggttcattt

SEQ ID NO: 215171 - DNA, 84 bp, Artificial Sequence
  ENSG00000116198_43 (sequence is synthesized)
gacttcatttttagtgattgacaagcaaacgggttcatttaaaacaggttcctcttttgttagttacagggggcgggggtggtg

SEQ ID NO: 215172 - DNA, 120 bp, Artificial Sequence
  ENSG00000116198_44 (sequence is synthesized)
gcccggcccaatcatgtgtttttgttgaaatgatcctaccagtgattagtggctattgagagttttacagggttatacattgttaagggaccaagaatcaagtacaaaaaattaaaaagg

SEQ ID NO: 215173 - DNA, 120 bp, Artificial Sequence
  ENSG00000116198_45 (sequence is synthesized)
agtacaaaaaattaaaaaggaactgtaaaatcccttggtcattcataaataaatatctaaattaggaatactaattaattgaattttcactcatgagtatgttctgaatatttaatattt

SEQ ID NO: 215174 - DNA, 120 bp, Artificial Sequence
  ENSG00000116198_46 (sequence is synthesized)
ttccattaaatctaacttaaaagaattgtatgtataaattggcattaggatacaaatgtaaatgtttttaatgaaattttgcaactttttaatattttaacatagttttctatttgtctt

SEQ ID NO: 215175 - DNA, 120 bp, Artificial Sequence
  ENSG00000116198_47 (sequence is synthesized)
tttgtctttatttcaagtaccagaattacaaaatatctaagtaatatatttttgttgtcgttttagggcttaagggttaattcacccagagtatattaatataataaaaagatcactaaa

SEQ ID NO: 215176 - DNA, 120 bp, Artificial Sequence
  ENSG00000116198_48 (sequence is synthesized)
caccttttacaagattctgtctctactcagttaacattattctcagggattcaccatcacactttccttatgctctaaaaggtcagttttgtcttagacataaacttcagttaaaatcta

SEQ ID NO: 215177 - DNA, 120 bp, Artificial Sequence
  ENSG00000116198_49 (sequence is synthesized)
ctgctctagaaggaacgtacgccagcagtgtaagaaccgggggtgaatccacttttggggagctaaagggccccgctgtgccatcctcggtcaccctctctgtcctgggcacctctttgg

SEQ ID NO: 215178 - DNA, 120 bp, Artificial Sequence
  ENSG00000116198_50 (sequence is synthesized)
gacagtggttcccttgccacctgcctgctgtggatgacaatgaggggactccattccagaggtgcctggtctaaaggaaagaagggaagggctgccatagttgccgcagtgagaaaaaaa

SEQ ID NO: 215179 - DNA, 120 bp, Artificial Sequence
  ENSG00000116198_51 (sequence is synthesized)
cgccgctgagcaggtgtagtctgcatccctccattttgacttattcaaaaaagcatccccgtccagggcaacatggcaagaccccatccctttaaaagcaaaataaagcatccaagcctg

SEQ ID NO: 215180 - DNA, 120 bp, Artificial Sequence
  ENSG00000116198_52 (sequence is synthesized)
acacacctgtggatggcagtggtggtgacagtggtggtgtcagtgcgggaccatagccacagagtacagtacatgagtgttcagggaggggacagcgtctagtgagccctgtctgagcag

SEQ ID NO: 215181 - DNA, 120 bp, Artificial Sequence
  ENSG00000116198_53 (sequence is synthesized)
tcgttccgtttacctacgtgttcacatgatttccttccgtacatttatgaatggtttatcgaggagcctcaactcactgaggcccagcctgtgtcactgggatacagcatgaaatggttt

SEQ ID NO: 215182 - DNA, 120 bp, Artificial Sequence
  ENSG00000116198_54 (sequence is synthesized)
tattttgttctggtcattgcctttatccagataatgagaccctcagtgacatcttgcccagattctgtaacactgcggtcccttttgcctaataaaacccagccctatttggttaaacga

SEQ ID NO: 215183 - DNA, 120 bp, Artificial Sequence
  ENSG00000116198_55 (sequence is synthesized)
gcatagccacataaggaataggcctaatgacaccttgtgagcatgtttattaaaatcaggcttgatgcttatttctaagcaataaactaagaaaatatcagagatcttgtcagaaaaaaa

SEQ ID NO: 215184 - DNA, 120 bp, Artificial Sequence
  ENSG00000116198_56 (sequence is synthesized)
gatgtaatagcctttactttagtagtctccatgtcagttgaactgaaattgctaccagtaaacagtcattgaggtggaatctaccttgcttttttttattaggttgctgaggcctattgt

SEQ ID NO: 215185 - DNA, 80 bp, Artificial Sequence
  ENSG00000116199_0 (sequence is synthesized)
gggtgtgggactgccgctctgcgcggcgagaggtggcctgggaatggccgggccgggggtgggccggagccgctgtggcg

SEQ ID NO: 215186 - DNA, 120 bp, Artificial Sequence
  ENSG00000116199_1 (sequence is synthesized)
ccctccccggaggcggcgggggcggccggggccgcgccgcaccgcaccgcgcgggcggccatggagcgagcctagggcccgacaggaactgtggaaggtgcatcagtgaagaaatggacc

SEQ ID NO: 215187 - DNA, 120 bp, Artificial Sequence
  ENSG00000116199_2 (sequence is synthesized)
aatgtgtataatcatggaatctccttgctaaccatcaccaccagctctccttaatacatgagcaagagtgggtcaggggagaaggaaaagaggtcaacatgaagctaaagcagcgagtcg

SEQ ID NO: 215188 - DNA, 120 bp, Artificial Sequence
  ENSG00000116199_3 (sequence is synthesized)
tgctgttagcaattctccttgtcatttttatcttcaccaaagttttcctgattgacaacttagatacatcagctgccaaccgggaggaccagagggcctttcaccgaatgatgactggct

SEQ ID NO: 215189 - DNA, 120 bp, Artificial Sequence
  ENSG00000116199_4 (sequence is synthesized)
tgcgggtggagctggcacccaagctggaccataccttgcagtctccctgggagattgcagcccagtgggtggttccccgggaagtgtaccctgaagagacaccagagctgggggcagtca

SEQ ID NO: 215190 - DNA, 120 bp, Artificial Sequence
  ENSG00000116199_5 (sequence is synthesized)
tgcatgccatggccaccaagaaaatcattaaagctgatgtgggttataaagggacacagctgaaagccttactgatacttgaaggaggccagaaagttgttttcaaacctaagcggtata

SEQ ID NO: 215191 - DNA, 120 bp, Artificial Sequence
  ENSG00000116199_6 (sequence is synthesized)
gccgagaccatgtggtggaaggggaaccgtatgctggttatgatagacacaatgcagaggtagcagcctttcacttggacaggattctgggtttccaccgagcccccttggtagttggca

SEQ ID NO: 215192 - DNA, 120 bp, Artificial Sequence
  ENSG00000116199_7 (sequence is synthesized)
gatttgttaatcttcggacagagatcaaacctgtcgccacagagcagctgttgagcaccttcctaactgtaggaaacaatacttgtttttatgggaagtgctattactgccgagaaacag

SEQ ID NO: 215193 - DNA, 120 bp, Artificial Sequence
  ENSG00000116199_8 (sequence is synthesized)
aaccagcttgtgctgatggagacataatggagggatctgtcacactttggcttccagatgtgtggcctctgcagaagcaccgtcacccatggggcaggacttaccgagaaggcaaattgg

SEQ ID NO: 215194 - DNA, 120 bp, Artificial Sequence
  ENSG00000116199_9 (sequence is synthesized)
ccaggtgggagtatgatgagagctactgtgatgctgtgaagaaaacgtccccttatgactctggcccgcgcctcttggacatcattgacacagctgtctttgattacctgattggcaatg

SEQ ID NO: 215195 - DNA, 120 bp, Artificial Sequence
  ENSG00000116199_10 (sequence is synthesized)
ctgaccgccatcactatgagagctttcaagatgatgaaggcgctagtatgctcatccttcttgataatgccaaaagctttgggaacccctcgctggatgaaagaagcattcttgcccctc

SEQ ID NO: 215196 - DNA, 120 bp, Artificial Sequence
  ENSG00000116199_11 (sequence is synthesized)
tctatcagtgttgcatcattcgggtgtccacctggaacagactgaactacctaaagaatggtgtgctaaagtctgccttaaaatctgccatggcccatgaccccatctccccagtgctct

SEQ ID NO: 215197 - DNA, 120 bp, Artificial Sequence
  ENSG00000116199_12 (sequence is synthesized)
ctgatcctcatctggacgccgtggaccagcggctcctgagtgtcctggccaccgtgaagcagtgcaccgaccagtttgggatggacacagtactggtggaagacaggatgcctctctcac

SEQ ID NO: 215198 - DNA, 120 bp, Artificial Sequence
  ENSG00000116199_13 (sequence is synthesized)
acttgtaattctcgacacaaaataagtgaaacttctttttacaaagatagagaaacagcacaatcaattccaaatggtatgagatggattggaagtggccagcagcaagttctggtgacg

SEQ ID NO: 215199 - DNA, 120 bp, Artificial Sequence
  ENSG00000116199_14 (sequence is synthesized)
ggacagagtggccttggatgtctttggtattttctgtagtagaaactaaagcaaagaccacaagtttcagagcatggagacattcctgctgaatcgccttctcacctcctcggcaattgc

SEQ ID NO: 215200 - DNA, 120 bp, Artificial Sequence
  ENSG00000116199_15 (sequence is synthesized)
tcattctagggttgggcatcatagttggtcagtcttaattcccatgccaaaggacaaacaggtgtgacatttggatagatgaatactgggattggctctggagcatgtgttttgagttga

SEQ ID NO: 215201 - DNA, 120 bp, Artificial Sequence
  ENSG00000116199_16 (sequence is synthesized)
accttgcagtcctttctctacgcccgtggattttgtggaaacactttgcaatctctttgtcttttttttttttaccagaactagttacattggaatgcttactgtcctacagagtggcag

SEQ ID NO: 215202 - DNA, 120 bp, Artificial Sequence
  ENSG00000116199_17 (sequence is synthesized)
caaataaaaccttgcattccatcaagccaaaatagcacactctgttagaggagatacatgtttaagatagaattggagggaaggacaaaaacagaaaaatgtttgggcttttaagccatt

SEQ ID NO: 215203 - DNA, 120 bp, Artificial Sequence
  ENSG00000116199_18 (sequence is synthesized)
gggtagtattgttttgatgatcttagaggagggaagaagagagagagacccaatggtagaaccagaatcagggagatgactgaactactgaaaaacaggttcccttgtatttaggatctt

SEQ ID NO: 215204 - DNA, 120 bp, Artificial Sequence
  ENSG00000116199_19 (sequence is synthesized)
aaggtgtataaaaagcaaacatgactttgcacctaagtaaattctgcattctcatagttgtgtcccaattaaccaaaaagttgtctctagagaaaatactattacaatctaagcatgatt

SEQ ID NO: 215205 - DNA, 120 bp, Artificial Sequence
  ENSG00000116199_20 (sequence is synthesized)
ctctgtggagactaattttttccccttttgccaaaagcagtccttcccaaattaacaaagcaaactgaaataataccttgaataacaggttgcctgtggtctctgtcatcctcgtttctc

SEQ ID NO: 215206 - DNA, 120 bp, Artificial Sequence
  ENSG00000116199_21 (sequence is synthesized)
ttctgaaatgaatttccacctctgcctttaaggcatttttgtcactgaagctgctgttcccaagagatcggcaacctttttgtccctttctcataagaaagggacactcctacaggtgag

SEQ ID NO: 215207 - DNA, 120 bp, Artificial Sequence
  ENSG00000116199_22 (sequence is synthesized)
caggtgagagtgtataccttactctctcagataagtggctggacttatcttgtgatttggggccatggaagattggaaacaaagattttaagccttcttctttttttcttttttcttttt

SEQ ID NO: 215208 - DNA, 120 bp, Artificial Sequence
  ENSG00000116199_23 (sequence is synthesized)
gctgggattacaggcatgagccaccgtggccggccaagattttaagccttctgagccttgaaattgaggaggttaaaaggaagagccttaagattttgatttatgtcaaatcctaattct

SEQ ID NO: 215209 - DNA, 120 bp, Artificial Sequence
  ENSG00000116199_24 (sequence is synthesized)
ttatgtcaaatcctaattctatcattcagtcttgtttggagttctgaacccatgatgttgtattatgcttctttctcctcttagcactctcaaatttcaggtttgtaaaacacagttttt

SEQ ID NO: 215210 - DNA, 120 bp, Artificial Sequence
  ENSG00000116199_25 (sequence is synthesized)
gttttgtgttctggcaaagtgatctcaacatgtaagtagttgcagtaaaacacaggggcaaaggaagacaggcctgatgtgcccactcatctatggactcagagctgtgtgctttgctcc

SEQ ID NO: 215211 - DNA, 120 bp, Artificial Sequence
  ENSG00000116199_26 (sequence is synthesized)
tgcatcttgttgaggtgctgttccagctttgcatttctgtcaagtagaggcgaatatataaacagtgtggttgaatacatttaatgccagccattggaaactagttttaggcaaccactc

SEQ ID NO: 215212 - DNA, 120 bp, Artificial Sequence
  ENSG00000116199_27 (sequence is synthesized)
tcaaaaacagctttagaatttatgcccagttttcttgcattgaaagataactgagtaataacctgtaactatttttaaatggcatgaaattaggaaacttttgtacattttatatacatt

SEQ ID NO: 215213 - DNA, 120 bp, Artificial Sequence
  ENSG00000116199_28 (sequence is synthesized)
ttgagatgaacagaacaatgggctgagttataaaaagcgtgtattgaatttaagaagacagactagcacaaaacacagaattcgtgttaaccaaaggaggcattgatttcagttttaagg

SEQ ID NO: 215214 - DNA, 120 bp, Artificial Sequence
  ENSG00000116199_29 (sequence is synthesized)
ctactcagtgttgtgtgtccagggaaattcacagctcagtatgagaataccttggttagtgctcacccacaagcttccaggagccagctgggaggagacaataggaagagatgtcatctc

SEQ ID NO: 215215 - DNA, 120 bp, Artificial Sequence
  ENSG00000116199_30 (sequence is synthesized)
tgctctccctgtaaatgttagttgaactaagttatggatttgtggtctttcaaatacatgacgcctttagtatgccacactgaaatgaataagaagtcttctgaaactgggaacttcata

SEQ ID NO: 215216 - DNA, 120 bp, Artificial Sequence
  ENSG00000116199_31 (sequence is synthesized)
acattgaaggcagaagattctgctaaggaaaaaagcaggcaggaaagaaaatgtctcatcctttcttgaaagcatttgcagaaaatatatcatttcattttattcccatctgttttcaaa

SEQ ID NO: 215217 - DNA, 120 bp, Artificial Sequence
  ENSG00000116199_32 (sequence is synthesized)
ctcgtgatcttaaaaggcattctgatgataaatttagaattttcatctataaaatttagaactctaatccataaagttagaattgagctaatagagtggtatgacatggcactaaaaata

SEQ ID NO: 215218 - DNA, 120 bp, Artificial Sequence
  ENSG00000116199_33 (sequence is synthesized)
taaatttttgttgtaagtcaggattggagtaagctggaaaagtatgtttaggcaaatcttggagaaaaccaaccataaacttacagctctaaaattcagaaagccctaaaatttcaaaca

SEQ ID NO: 215219 - DNA, 120 bp, Artificial Sequence
  ENSG00000116199_34 (sequence is synthesized)
agctctaaaattcagaaagccctaaaatttcaaacactgtttgaaagaagaggtgggggccgggtgccgtggctcatgcctgtcatcccagcatttgggaggctgaggcaggcagatcac

SEQ ID NO: 215220 - DNA, 79 bp, Artificial Sequence
  ENSG00000116199_35 (sequence is synthesized)
ggccaggagttcgagaccagcctggctggctagcatggtgagaccgtctctactaaaaatgcaaaaattaacagggcac

SEQ ID NO: 215221 - DNA, 86 bp, Artificial Sequence
  ENSG00000116199_36 (sequence is synthesized)
ggaggaggtgaatttttttttaagttttgtaacactgtcctactttatttattagaatctaaggctgttacaatcaagtcgttgca

SEQ ID NO: 215222 - DNA, 120 bp, Artificial Sequence
  ENSG00000116199_37 (sequence is synthesized)
atttattagaatctaaggctgttacaatcaagtcgttgcagggtttggatcagctgtaagttaggtatgcctaccaaacatccaaaggtagacgtggagacattttaatactacaaaact

SEQ ID NO: 215223 - DNA, 120 bp, Artificial Sequence
  ENSG00000116199_38 (sequence is synthesized)
aggaaaatcagaactcatggccatttcctgccctcctccaacttgttaaaacatgtttattctaaagttcgaatggataaatttgagtataaaggttttgttataaaactgttctttagt

SEQ ID NO: 215224 - DNA, 120 bp, Artificial Sequence
  ENSG00000116199_39 (sequence is synthesized)
gtaaggctgcattgtgggtttgggggaaatgtaaataattttctgtgtaaaacaaattcataggatctgatttgctcagagtattattcaagaatgtattaataaggcattgccccctgt

SEQ ID NO: 215225 - DNA, 120 bp, Artificial Sequence
  ENSG00000116199_40 (sequence is synthesized)
ttgcactcagggttaatatgtcaaatgaaatttaagaaggaaatggaagaattcaggtacattaattgcatattattttgggaaagatgagtcctatacgtggcaatttttcaatgtcat

SEQ ID NO: 215226 - DNA, 120 bp, Artificial Sequence
  ENSG00000116199_41 (sequence is synthesized)
ctgaagccagcattatcttccaaagaaatcgatcttttttttctaaaaaaaaaaaatgcttttgccttcccttcccttcccatccgccatatttcttcagcctttcttctcgatcacccg

SEQ ID NO: 215227 - DNA, 120 bp, Artificial Sequence
  ENSG00000116199_42 (sequence is synthesized)
tgtattctttgaccagtaaatgaccacacctcaatgatggtaaaacagcatcatcagtaagctatcttatatgcctcatcctgtgagtttgagcttcaggaaacatgagtaaaagtatat

SEQ ID NO: 215228 - DNA, 120 bp, Artificial Sequence
  ENSG00000116199_43 (sequence is synthesized)
gtaatgtatatagtcgtatatgtattctagcaagaaaaacatatttattttgacaaaggggaacactgactttctgaaggattcagaaagaaccttagtgaaaggttctcagtctctgag

SEQ ID NO: 215229 - DNA, 120 bp, Artificial Sequence
  ENSG00000116199_44 (sequence is synthesized)
agtggaccctaattaacataaagaccattcatcagcgaataactactgagcaactctagtgtgccagcacaggccagacatactagtgagccaggcacatctggccttgggaaactcatc

SEQ ID NO: 215230 - DNA, 120 bp, Artificial Sequence
  ENSG00000116199_45 (sequence is synthesized)
ctacaggggaaggccagtttttttcccttcaattcctcaagtctgggtggtgacaaggtaggggctaggtactggactaccacaggtttttaggaactaaggtgtttctcataaacacaa

SEQ ID NO: 215231 - DNA, 120 bp, Artificial Sequence
  ENSG00000116199_46 (sequence is synthesized)
aatgttgggtgaaactgggaacaactactcagaagctcatttatttgcttaaatggaaagtgtgggagccactaccctctcttttgatctgccaaggatttcctctcagagctgttgcac

SEQ ID NO: 215232 - DNA, 120 bp, Artificial Sequence
  ENSG00000116199_47 (sequence is synthesized)
agacagagattgtacttggtaagataccaaacaagacagatatggatctaaatttctaatgtgttctatgggtttcaattctgaaaaaagaaaatgaataaagattttaataaatattga

SEQ ID NO: 215233 - DNA, 120 bp, Artificial Sequence
  ENSG00000116205_0 (sequence is synthesized)
agaggcgcgagggccggcggagtttcttcagaggaactaccgccctgggaggaagcgtctgtttagtttcaacacagacgactgggcttgggagcctacgaggttgcagtctggagggcg

SEQ ID NO: 215234 - DNA, 120 bp, Artificial Sequence
  ENSG00000116205_1 (sequence is synthesized)
ccaacagcagctaccagggctgcttttcctgaacacgctgcaagcacgtcaaggtagtcggagtcccctaacaatggataaattcgtcattcgaacgcctagaatccagaatagccctca

SEQ ID NO: 215235 - DNA, 120 bp, Artificial Sequence
  ENSG00000116205_2 (sequence is synthesized)
gaagaaagattctggaggaaaggtttacaagcaggccacgattgaatctctgaagagagttgtggttgtagaagacataaaaagatggaaaactatgctggagcttcctgatcaaaccaa

SEQ ID NO: 215236 - DNA, 120 bp, Artificial Sequence
  ENSG00000116205_3 (sequence is synthesized)
agagaatcttgttgaagccttacaagaattaaagaagaaaataccctccagggaagtgttaaaatcaacaaggataggtcacactgtgaacaagatgcgtaaacactcagattcagaagt

SEQ ID NO: 215237 - DNA, 120 bp, Artificial Sequence
  ENSG00000116205_4 (sequence is synthesized)
ggcttctcttgccagagaagtttacactgagtggaaaactttcactgaaaaacattcaaatagaccttctattgaagttagaagtgatcccaaaaccgagtcgttgaggaaaaatgctca

SEQ ID NO: 215238 - DNA, 120 bp, Artificial Sequence
  ENSG00000116205_5 (sequence is synthesized)
gaaattactctcagaagccttggaattaaagatggatcacctactggttgaaaatattgaacgggaaacgtttcatctctgctcccgcctcattaatgggccgtaccggcggacggtgag

SEQ ID NO: 215239 - DNA, 120 bp, Artificial Sequence
  ENSG00000116205_6 (sequence is synthesized)
agccctggtcttcacattaaagcaccgagctgaaatccgggctcaggtgaagagcggctcgctgccagtcggcacgtttgtacagacccacaaaaagtgacctgaggacggttccagccc

SEQ ID NO: 215240 - DNA, 120 bp, Artificial Sequence
  ENSG00000116205_7 (sequence is synthesized)
tgggccaggcagagaggaaaatgggcctgtctctgccgttcaaagacgcttttgagtttgggtgatggctgatgctggctgtgctagattttcccatggtgccgttcctttgcagacaga

SEQ ID NO: 215241 - DNA, 120 bp, Artificial Sequence
  ENSG00000116205_8 (sequence is synthesized)
ggattcggagagccctaggagacaggcctgcaggaatgtgcttcattagctgcagtgcgctggtgctgcctaacagaacgcacactggctgtcactaggaagcgccatacggttgctatc

SEQ ID NO: 215242 - DNA, 120 bp, Artificial Sequence
  ENSG00000116205_9 (sequence is synthesized)
acccaacatggtgaaagggtgatggatttcactgtgaatatgccaaggacacctctaaacttcccccatgtcagtcagatgaagttactactatatttcaccaccctgcaggtaactgaa

SEQ ID NO: 215243 - DNA, 120 bp, Artificial Sequence
  ENSG00000116205_10 (sequence is synthesized)
actcaattaccgctgccgctcactcggttccatccccctgagtttagatagctctggtgcctctcagaactcccctgtctgttctctttgctctatcccaggggtgagcctgcgagagcc

SEQ ID NO: 215244 - DNA, 120 bp, Artificial Sequence
  ENSG00000116205_11 (sequence is synthesized)
agccaactaccccttcttcccagagctcacttatctgaacgtttcagctctccctggaagaccttctgcgttggtctccagagcccccatgctgaggctactaatgaggaactggcccga

SEQ ID NO: 215245 - DNA, 120 bp, Artificial Sequence
  ENSG00000116205_12 (sequence is synthesized)
agcctcccacacctcagggtttatttgaatacgctggcgctctcagtttagggctctgtagaagatacataatgaaatttctcttgaaatgaattactgcagtagaaaaaagtacataca

SEQ ID NO: 215246 - DNA, 120 bp, Artificial Sequence
  ENSG00000116205_13 (sequence is synthesized)
tatatatgttaaaatgaaatatctctacacaggcctgttttaacaattacgtaaataatacttgtttttttaaaagtaatagtaagctgggaacttttttttctaaaacaaaaggtggag

SEQ ID NO: 215247 - DNA, 120 bp, Artificial Sequence
  ENSG00000116205_14 (sequence is synthesized)
ttcgttcactgaaaagtgttttgagttgagaaggggtacagttggtgaaatttaaaaatgatggaacaaggatttgaggaatgtagaagactcaaggaagtggggattagattaggggag

SEQ ID NO: 215248 - DNA, 120 bp, Artificial Sequence
  ENSG00000116205_15 (sequence is synthesized)
actggagcacgtttgtaatctgaaaggaaagagctggtagaaggggagagatttaaaatccaaaaaaaaggaagatgagttgaaaagcaaggggagaagggacgggactaacattattgc

SEQ ID NO: 215249 - DNA, 120 bp, Artificial Sequence
  ENSG00000116205_16 (sequence is synthesized)
ctaccttctaaatactaggcacttttcctaagacagtttattaacctttacctggatctttatatagttttgtaaaaatattgcttacttctctcacccattgtattaagtaggtattgt

SEQ ID NO: 215250 - DNA, 120 bp, Artificial Sequence
  ENSG00000116205_17 (sequence is synthesized)
tgttttcattttttagatttattcgtttatttagcaaccatttcctgagcatccattctgtggggtaggtgtatactgagcagtagttacaaatgggagcctgaggctcactgaacagaa

SEQ ID NO: 215251 - DNA, 120 bp, Artificial Sequence
  ENSG00000116205_18 (sequence is synthesized)
acatcaccttcaatttcctactgctagtaactattggagctagaataataataatcgagcgtttaccctgggcccagcactgtggtaaccattttacaaaaagaaaatacccagttaaac

SEQ ID NO: 215252 - DNA, 120 bp, Artificial Sequence
  ENSG00000116205_19 (sequence is synthesized)
atgagaaaagtgaggctcagaaaggtatagtaacttactcaaggtcacgcagatagtgaatgacagatctaagattcaaaatccgggtctatttgattgtatatggttgccttggatgat

SEQ ID NO: 215253 - DNA, 120 bp, Artificial Sequence
  ENSG00000116205_20 (sequence is synthesized)
ttcatctactctcatgttttcaagcatcatttacatgctgatgacattccagtttgtatcgtcagcccagacctgtcccctgactttcagatgatatttcctagatgccccatagacatc

SEQ ID NO: 215254 - DNA, 120 bp, Artificial Sequence
  ENSG00000116205_21 (sequence is synthesized)
tcagatataacatgtcttctttccattggcagtaccagcaagccagacactccagctaggaactcaaggagtcagcctagaccccacatctcccaccctcagccaaccaagtcctggtgg

SEQ ID NO: 215255 - DNA, 120 bp, Artificial Sequence
  ENSG00000116205_22 (sequence is synthesized)
agtaattgtggtttttgccattacttctaatatattacttctttgcatttgctgttccagttgcaatgctctttccccagacatctgcatgttcttgtcctcacttgctttaggtctctc

SEQ ID NO: 215256 - DNA, 120 bp, Artificial Sequence
  ENSG00000116205_23 (sequence is synthesized)
tcacttgctttaggtctctctttcccttatcaaaaaggcttttgctgactatcctaaatacaatagcactccctcccaactattctttaatgctgtacctagctttatttttcttcagaa

SEQ ID NO: 215257 - DNA, 120 bp, Artificial Sequence
  ENSG00000116205_24 (sequence is synthesized)
tatttattactctttaacatagttatttctttattgtctatctccccactcccagaatgtaagcttcatgaaagcagagtctctgttctgttccctgttatatctccagcatctggaaca

SEQ ID NO: 215258 - DNA, 120 bp, Artificial Sequence
  ENSG00000116205_25 (sequence is synthesized)
gagcctgggacaagctaggtctccataactatttattggatagttgagtgactggttgtggatgtacagtataagcatctaattcaatcagggagtgcttcctggaggagctgatacctg

SEQ ID NO: 215259 - DNA, 120 bp, Artificial Sequence
  ENSG00000116205_26 (sequence is synthesized)
tgttcagtcttaaagggcaggagtttggataggggaatgttagttaatagaatgaaaatttcaaaattaaagggcaggagtaattaattgggtggttgagatgcatgcctggcagagcaa

SEQ ID NO: 215260 - DNA, 120 bp, Artificial Sequence
  ENSG00000116205_27 (sequence is synthesized)
gcagagtatggaaaaacccagaagtggagatatctggaaggtgattggtatggctggagtagaggacactggcaggagagtagctggagatgaggcaggagaggaaggcaaggaccagga

SEQ ID NO: 215261 - DNA, 120 bp, Artificial Sequence
  ENSG00000116205_28 (sequence is synthesized)
tcaggtttgaagggtcttgagcatcaggtgaaggcgttagactgatttgaagcaggaactggtcacttttgtgttaataggctatgtggaagagaagctggggtagggagacaggaagta

SEQ ID NO: 215262 - DNA, 120 bp, Artificial Sequence
  ENSG00000116205_29 (sequence is synthesized)
gcaagcttcatgtttaaagaaccaaagagttctgctaacttaggaacccagagtaagttgaaaacaaattgctctctggctgaaagccttcagtggtgatagttggaaagtagaatgatt

SEQ ID NO: 215263 - DNA, 120 bp, Artificial Sequence
  ENSG00000116205_30 (sequence is synthesized)
gcagagatgtgctttggagatttggaaagcaggctgtgttatttgtggctgttttctccttgatgcatgtgcagaatttccatgaacgctaatggagctattctgagcatttgctgaagg

SEQ ID NO: 215264 - DNA, 120 bp, Artificial Sequence
  ENSG00000116205_31 (sequence is synthesized)
gaaggaagcttgcagacatccctcccaatcttgcccacacactgagaagtaactcggagctacagtctgttaaaaatgaaaaggttgaggccgggtgcattggttcatgcctataatccc

SEQ ID NO: 215265 - DNA, 120 bp, Artificial Sequence
  ENSG00000116205_32 (sequence is synthesized)
aaaaaaaaaaagagaaaaagaaaaaagttgcccctgaaatggggtgagagtagttcctgagacctctgagttacctgtaagtcaaggtgtgaatatgtcttataagcaagttcagttgct

SEQ ID NO: 215266 - DNA, 120 bp, Artificial Sequence
  ENSG00000116205_33 (sequence is synthesized)
agcaagttcagttgctaggggaaatgtgggaaagtaaataccatttgtgtctgctctaatagcttattgatgcttttcttgtagtggttaatttggaggtcctggttgggcatggtagct

SEQ ID NO: 215267 - DNA, 65 bp, Artificial Sequence
  ENSG00000116205_34 (sequence is synthesized)
cctgtactaaaaatacaaaaattagccagatctggtggcaggcacctgtaatcccagcactcgat

SEQ ID NO: 215268 - DNA, 79 bp, Artificial Sequence
  ENSG00000116205_35 (sequence is synthesized)
catggtgaaaccttgcctgtactaaaaatacaaaaattagccagatctggtggcaggcacctgtaatcccagcactcga

SEQ ID NO: 215269 - DNA, 120 bp, Artificial Sequence
  ENSG00000116205_36 (sequence is synthesized)
ggcgacagagcaagactcacctcagtctcaaagataaaataaaataaaaataaataaataaaaattggaggtcttggtcctctgtgtagggactcagtctctgtattttcattcattcat

SEQ ID NO: 215270 - DNA, 120 bp, Artificial Sequence
  ENSG00000116205_37 (sequence is synthesized)
tcaacaaacaaatattgcccatcttctgtgtgccaaggactagactggcactggggacacagcaataaaggagagataatttcctctgagtctggtgaggcagatagacacataactaaa

SEQ ID NO: 215271 - DNA, 120 bp, Artificial Sequence
  ENSG00000116205_38 (sequence is synthesized)
taaatagagtatagcatattgggtgataactatagacatgaaaatattgagaagatggggaaaggaatgaataacaccactcagaggaagaatcttcacagaggagttcatgtttgaacc

SEQ ID NO: 215272 - DNA, 120 bp, Artificial Sequence
  ENSG00000116205_39 (sequence is synthesized)
aaagccagaaggataggtaggagttcttagcagagggctcagtctatgtgaaagcacagaagcgtgaggtgtatggctagtttcagtaaaggcaaataatatgaggtggctgaagcataa

SEQ ID NO: 215273 - DNA, 120 bp, Artificial Sequence
  ENSG00000116205_40 (sequence is synthesized)
ggttcttaggaatggtagtgagaaattgggcaaaaaaagtaaccaaggccttggaggccttatcaacgagtttggactttggccttcagataatgggataccatgggaagtttttgagga

SEQ ID NO: 215274 - DNA, 120 bp, Artificial Sequence
  ENSG00000116205_41 (sequence is synthesized)
caaaggaaagaaacacttgagattcagtcaattagaggttttttttttttgacaaatgaagtttaaagttgcccaaacagatatcattagagaatcccaggtttgaaaaatggcaggaga

SEQ ID NO: 215275 - DNA, 120 bp, Artificial Sequence
  ENSG00000116205_42 (sequence is synthesized)
cccagataatgcatttactgtgttctgtggtgaaggaacaggtagctggcctttttcatttatagaatatcaggttcttaaacttgtgcctgtcaaccttggttttcttttgctgtagcc

SEQ ID NO: 215276 - DNA, 120 bp, Artificial Sequence
  ENSG00000116205_43 (sequence is synthesized)
tcaggcctcagaaccttactctgagattggtaatgtgttttgaatgtgtttatcacagccagatggggcaaaggctcagtttgttactgcccattattgcaagggaagggagtccatcca

SEQ ID NO: 215277 - DNA, 120 bp, Artificial Sequence
  ENSG00000116205_44 (sequence is synthesized)
gaaaacaaagctttgggagtttcagttagttgggtgacactaccctggtatcaaaggaaagatggtttgattggatgacattgtattttctttaaatcaatcaaaatgatacaattactg

SEQ ID NO: 215278 - DNA, 120 bp, Artificial Sequence
  ENSG00000116205_45 (sequence is synthesized)
tcagggatggacttactcataacctggggaggttggtttcaagatccaagaagatcaagacatccaatcaaatgctggtttttaatgttgataaaatcattctttcaatacatatttgtt

SEQ ID NO: 215279 - DNA, 120 bp, Artificial Sequence
  ENSG00000116205_46 (sequence is synthesized)
gagttcttacgtgtcaggtattagggtcacagggatagagaagacataatctttggcctcaagaagcttacagtctagtgaagactgtaaacagacaataaacagacaatttttactatt

SEQ ID NO: 215280 - DNA, 120 bp, Artificial Sequence
  ENSG00000116205_47 (sequence is synthesized)
tatttttattttgggagggggtcagggtctcactctgtcgcccagggtgcagtacagtggtgcaattacagctcactgcagctttgacctcccaggttcaagcaagcctcctacctcaag

SEQ ID NO: 215281 - DNA, 120 bp, Artificial Sequence
  ENSG00000116205_48 (sequence is synthesized)
cctcccaagtgtctgggaccataggtatgtgccatcatacctggctgattttttattagccagattgtcaccatgttgatcaggcttgtcttggactcctggcctcaagtgagcctcctg

SEQ ID NO: 215282 - DNA, 120 bp, Artificial Sequence
  ENSG00000116205_49 (sequence is synthesized)
tgttgggattacaggcatgagtcactttgccttgcccagaccatttttgaaaacacaaatgggcagggtgcagtgagatttttaggggccaatggtctgggatgtggcagggacattctc

SEQ ID NO: 215283 - DNA, 120 bp, Artificial Sequence
  ENSG00000116205_50 (sequence is synthesized)
tggcagggacattctcttgaaagtaaaagacaattattgcatctcactccaaccattaagaaggaagcacaatgcctgggagccctctttaggttttggagacagcatatcccacaccta

SEQ ID NO: 215284 - DNA, 120 bp, Artificial Sequence
  ENSG00000116205_51 (sequence is synthesized)
ggaatatgctccatccatgtaccggatgacacagaaagttgtgttttgattggggcccagagcaggaaagggctcagcagaagctccaggctacaacacaagtggccatgcggtgtggga

SEQ ID NO: 215285 - DNA, 120 bp, Artificial Sequence
  ENSG00000116205_52 (sequence is synthesized)
cagatgagctggcagagcccaaagtacccgaggtatctgtggtgggaacagatgcctgtgaagtttatgacaagaccctacaggagaatcacaatgtagacacctggggttctggagcag

SEQ ID NO: 215286 - DNA, 120 bp, Artificial Sequence
  ENSG00000116205_53 (sequence is synthesized)
ggccatgccatctgtagccaagaattttatacttcttaagaaacaactcttgatgctacagggttctggtagagacagatcatcagaccatggatcatcaagttgaccatgtgaccaaag

SEQ ID NO: 215287 - DNA, 120 bp, Artificial Sequence
  ENSG00000116205_54 (sequence is synthesized)
ctgttcatcatgagctggattctgccatatccaccaagtcataaggtcaggcaaagccagcagcaattcctaagatagaaataatacaactggggttgggcatagcagggccagagggca

SEQ ID NO: 215288 - DNA, 120 bp, Artificial Sequence
  ENSG00000116205_55 (sequence is synthesized)
gaagatagttacgtgagcaggtggcccagacatctatgtcatccactacctttgcaccagtacctgcctgttcctcatttcacacctttggctgcctggggagctctttataatatccag

SEQ ID NO: 215289 - DNA, 120 bp, Artificial Sequence
  ENSG00000116205_56 (sequence is synthesized)
ctgatagaagagaaaaaaagccatgccttatccttagataggtcagctcagtgtgtgtgagcaagacaaaaaaagaccgtggctgcactgcagccccacacaggggcatccttgaaagac

SEQ ID NO: 215290 - DNA, 120 bp, Artificial Sequence
  ENSG00000116205_57 (sequence is synthesized)
agcagagtggggagtccttctagtgggcataggttgtgcatcatgcacctagccatccactgtatgtggaaagagaaggagcctgagcttagactatacatggatctcatgggcagtggt

SEQ ID NO: 215291 - DNA, 120 bp, Artificial Sequence
  ENSG00000116205_58 (sequence is synthesized)
gaatggcttggctggttggtaaggggtctgaaaggaataagattggaaaattggaaacaaggagacctgtggtggaggcatgtagttggacctataggagtgggcaccaagtgtgaagat

SEQ ID NO: 215292 - DNA, 120 bp, Artificial Sequence
  ENSG00000116205_59 (sequence is synthesized)
cattgtattccatgtaaacacccaccagagagcacataccatggagaagcactaaacaacaatgtacacacagttgacatcaaccagtctctgaggccaccccagagctgacacaatggg

SEQ ID NO: 215293 - DNA, 68 bp, Artificial Sequence
  ENSG00000116205_60 (sequence is synthesized)
caaccagtctctgaggccaccccagagctgacacaatgggtgtataaacagcaaccatggtggtgtaa

SEQ ID NO: 215294 - DNA, 120 bp, Artificial Sequence
  ENSG00000116205_61 (sequence is synthesized)
ggaaacttacaatcatggcagaaggcaaggggaagcaggcatcttcttcacaagacagcaggggagagagagagtgcaaagggggaactgccaaacactttgaaaccatcggatctcttg

SEQ ID NO: 215295 - DNA, 120 bp, Artificial Sequence
  ENSG00000116205_62 (sequence is synthesized)
tcggatctcttgagaagtcactcactatcatgacaacagcatgggggaaaccggctccgtgatccaatcacttcccaccatgtccctccctcaacacgtggggattataattcgagttaa

SEQ ID NO: 215296 - DNA, 120 bp, Artificial Sequence
  ENSG00000116205_63 (sequence is synthesized)
gatttgtgtggagacacagagccaaaccatatcagatggtatggcatggctcccactcaccaagactgatctagctattgctgctgctgagtgttcggcctgccagtaacagagaccaac

SEQ ID NO: 215297 - DNA, 120 bp, Artificial Sequence
  ENSG00000116205_64 (sequence is synthesized)
tctgaacctagatatagctccatcccttgagaacaaccagcagccacttgggaagttggctatattaaaccctgtctaccctggaaagagctgtgattcattttcactggcatagatgta

SEQ ID NO: 215298 - DNA, 120 bp, Artificial Sequence
  ENSG00000116205_65 (sequence is synthesized)
tattccagatacgagttcatcttcactgcttgtagagcttcatccagcacaactctcaaagggcttatagaatgtttaatctactgggatagattatgggatctatagattatgggatag

SEQ ID NO: 215299 - DNA, 120 bp, Artificial Sequence
  ENSG00000116205_66 (sequence is synthesized)
tcatacaggatcccatatgattccacagcaaaggaggtgcagcagtgggcacatggtgacagggtccacttgtcctttcatctactgcgctatcctgaagctgccagcttgcaactgtgt

SEQ ID NO: 215300 - DNA, 120 bp, Artificial Sequence
  ENSG00000116205_67 (sequence is synthesized)
cgaaggcacagctggggcaccagctcagaaaccctgagagaagagctgccatcctccagggtgcagcacatgttcgaaatcaaagaccgttacgtgatgctttgtctccaataggtagaa

SEQ ID NO: 215301 - DNA, 120 bp, Artificial Sequence
  ENSG00000116205_68 (sequence is synthesized)
tacatgagtccaggaaccaagaaatgaaagcaggagtgctctcactcttaccatcacttctagtgacccacttggagtgcctcctgttctcatagttctgggctctgcaggtttagaggt

SEQ ID NO: 215302 - DNA, 120 bp, Artificial Sequence
  ENSG00000116205_69 (sequence is synthesized)
tttgagtcacaaaggaggaacacttccactaaaagaaacatcaagattactatgaactattagctgtgactgcacccgggcacttgagctcctcatatcaggagactactaggcaagaac

SEQ ID NO: 215303 - DNA, 120 bp, Artificial Sequence
  ENSG00000116205_70 (sequence is synthesized)
agtcaccattctttgagggataattaatcctgatcatcaggaggaggtacagctgctgttaagcaatggagggaagggaggtatatctttggtactcagttgattcacgtggagacttct

SEQ ID NO: 215304 - DNA, 85 bp, Artificial Sequence
  ENSG00000116205_71 (sequence is synthesized)
gtatatctttggtactcagttgattcacgtggagacttcttggtattcctttgcccaatttttttttctttttctttttcagagg

SEQ ID NO: 215305 - DNA, 77 bp, Artificial Sequence
  ENSG00000116205_72 (sequence is synthesized)
gcccaatatttataaaataattatacaagtgcccagaccgtgacctgagcaggatatgctgacttcaggctcagccc

SEQ ID NO: 215306 - DNA, 120 bp, Artificial Sequence
  ENSG00000116205_73 (sequence is synthesized)
ccgtgacctgagcaggatatgctgacttcaggctcagccccctcagggctgagggtctaaatcatgcctccgtggaagtgacggagaccggaacacgtgctggctgagggtaaggaggat

SEQ ID NO: 215307 - DNA, 120 bp, Artificial Sequence
  ENSG00000116205_74 (sequence is synthesized)
ctagaatggatagtagaagagggagatgatgagtatcagttgtggcctcaagaccagtcagtgatggaggttgtagtttgtccaacttactttcctaagtttcccccaggaaaggaggtc

SEQ ID NO: 215308 - DNA, 120 bp, Artificial Sequence
  ENSG00000116205_75 (sequence is synthesized)
caccagaacttaaaccaaaaagtagagctgagcagcacaaatgtgggctgtagtggacaccatcctgtgctgcccagaccccccagccaccatgcttcctgggcctcttcccacagctac

SEQ ID NO: 215309 - DNA, 120 bp, Artificial Sequence
  ENSG00000116205_76 (sequence is synthesized)
tgggagtgctctcagccagcagccttcagctgtcagccccctgggaattttcctcaatggaagagttacctcactgacatacccctttcccaggcaggtcagttcaaggttatgaaggcc

SEQ ID NO: 215310 - DNA, 120 bp, Artificial Sequence
  ENSG00000116205_77 (sequence is synthesized)
tggccccactgcctcaacttgacaacttggaagggccatctcagcttcaagaccctcccatgagactggctgaggtcttcatacagcatcggagcccaatttatctctctgagcaatcct

SEQ ID NO: 215311 - DNA, 120 bp, Artificial Sequence
  ENSG00000116205_78 (sequence is synthesized)
gcttcctttcctgcccccttcccaagagcaatccctgataaacttcccgcatgctaatctccatctcagagtctactttccaaggaagtgggcctataacatagctcttccagtttttgt

SEQ ID NO: 215312 - DNA, 120 bp, Artificial Sequence
  ENSG00000116205_79 (sequence is synthesized)
tgggcctataacatagctcttccagtttttgttaacaattctagaacaggggtcagcaaactttttttttttttcgagacggagtctcactccgtcaccaggctggagtgcagtggcgcg

SEQ ID NO: 215313 - DNA, 120 bp, Artificial Sequence
  ENSG00000116205_80 (sequence is synthesized)
tcccaaagtgctgggattatagacatgaatcaccacacccggccagcaaacttttttaaaggaacagatagtaaatattttaagctttgtgagccacatggtctctgtcacaactattca

SEQ ID NO: 215314 - DNA, 120 bp, Artificial Sequence
  ENSG00000116205_81 (sequence is synthesized)
taagctttgtgagccacatggtctctgtcacaactattcagctctgctattgtaatacaaaagcagctgtggacagtatgtaaatgaatgaatgtggctgtgttccaataaaactttatt

SEQ ID NO: 215315 - DNA, 120 bp, Artificial Sequence
  ENSG00000116205_82 (sequence is synthesized)
gggagcagcgaccttgtccgtctctccttcactggacctccagtccttggcatagggcttggccccatgcagggctccatgcatatgtgctcatgaatggatggcaccgcccccgtgcct

SEQ ID NO: 215316 - DNA, 120 bp, Artificial Sequence
  ENSG00000116205_83 (sequence is synthesized)
gtccacgcagccgagcagacagtctgggctccatgggaagagctaatcccaagcgtgtggaccgacagatggtgtggaacccagagcggaggcgcagcttttattagtttgagttgcttt

SEQ ID NO: 215317 - DNA, 120 bp, Artificial Sequence
  ENSG00000116205_84 (sequence is synthesized)
tgcttggaataggattagcataagtaccatcccaggcaagtggataaggtaaagctgtgttagttacattcagattttgtttctcggccacaatcctgggccaaacttctgctgggtcag

SEQ ID NO: 215318 - DNA, 120 bp, Artificial Sequence
  ENSG00000116205_85 (sequence is synthesized)
tccaattcatgcctaagggtactactcaggaaggtcaactggagtggccagtcccctctccacattgacctctagagtggcctgtccaactcctaagtccaaccttcccacaccgggcag

SEQ ID NO: 215319 - DNA, 120 bp, Artificial Sequence
  ENSG00000116205_86 (sequence is synthesized)
aaagctttttactggccccgttgctcccgggtgaggcctaaacacttgatgatgatgaagatgaagatgtgatgatggtagccatcacacagctctcccatgtaaccctcacgacaaccc

SEQ ID NO: 215320 - DNA, 120 bp, Artificial Sequence
  ENSG00000116205_87 (sequence is synthesized)
tgcaaggcagatagtatcaccatcctcatttggcaaatgaaaagctgatggctcagagaagttaaatgacttgcccaaggtgactgagccagtaggccacagacaggctccaaatcccag

SEQ ID NO: 215321 - DNA, 120 bp, Artificial Sequence
  ENSG00000116205_88 (sequence is synthesized)
tctggaccgattggatgggcattcctgggtgggccggcctccctctctggcaaggctgtcatgctcccccagtgccctggcttcagctttggctggatcagtaaagagccaagtcaaaga

SEQ ID NO: 215322 - DNA, 120 bp, Artificial Sequence
  ENSG00000116205_89 (sequence is synthesized)
tcaagtcagggaaactcatgttttgtggctaagaagtattgctacccttaatctcttcactttctcttcagctccatgaaggagcatttaacttttggaaggagtcattttccacaaaga

SEQ ID NO: 215323 - DNA, 120 bp, Artificial Sequence
  ENSG00000116205_90 (sequence is synthesized)
aacagttcttaaaaatcactgtgggttgggctcactggctcacacctgtattcccagcacttcaggaggccaagatgcagatcactcgagcttaagagttcaagaccagcccgggtaacg

SEQ ID NO: 215324 - DNA, 79 bp, Artificial Sequence
  ENSG00000116205_91 (sequence is synthesized)
atcactcgagcttaagagttcaagaccagcccgggtaacgtggcaaaaccccaattctagccaggcatggtggcgtgca

SEQ ID NO: 215325 - DNA, 89 bp, Artificial Sequence
  ENSG00000116205_92 (sequence is synthesized)
accctgtctcaaacaacaacaaaatcactgtgtaataatgtgtataataacaataaaagctaacatttatggagtatttattaactgcc

SEQ ID NO: 215326 - DNA, 120 bp, Artificial Sequence
  ENSG00000116205_93 (sequence is synthesized)
acaataaaagctaacatttatggagtatttattaactgccaagactatgctcagtgcttttcatgcattatctcattgtttgaaatttcaataatttacgtgaataaaggaattctgcat

SEQ ID NO: 215327 - DNA, 120 bp, Artificial Sequence
  ENSG00000116205_94 (sequence is synthesized)
tcctcgctagagcgtgcacttctggaagctaggaacctcctaactcaggacgtagactgatgattgattacagtttcaattcttcggaagatctttcttttaaagagaaaatcttacttc

SEQ ID NO: 215328 - DNA, 120 bp, Artificial Sequence
  ENSG00000116205_95 (sequence is synthesized)
ctgtcaattccactcgaggccccataattcatgaattcttccagagaactcaattgtgttactttggggaaaaaatatcatggcagtctttagtggggttttagaatctgccctctttct

SEQ ID NO: 215329 - DNA, 120 bp, Artificial Sequence
  ENSG00000116209_0 (sequence is synthesized)
gacagaggggaacaagatggcggcgccgaaggggagcctctgggtgaggacccaactggggctcccgccgctgctgctgctgaccatggccttggccggaggttcggggaccgcttcggc

SEQ ID NO: 215330 - DNA, 120 bp, Artificial Sequence
  ENSG00000116209_1 (sequence is synthesized)
tgaagcatttgactcggtcttgggtgatacggcgtcttgccaccgggcctgtcagttgacctaccccttgcacacctaccctaaggaagaggagttgtacgcatgtcagagaggttgcag

SEQ ID NO: 215331 - DNA, 120 bp, Artificial Sequence
  ENSG00000116209_2 (sequence is synthesized)
gctgttttcaatttgtcagtttgtggatgatggaattgacttaaatcgaactaaattggaatgtgaatctgcatgtacagaagcatattcccaatctgatgagcaatatgcttgccatct

SEQ ID NO: 215332 - DNA, 120 bp, Artificial Sequence
  ENSG00000116209_3 (sequence is synthesized)
tggttgccagaatcagctgccattcgctgaactgagacaagaacaacttatgtccctgatgccaaaaatgcacctactctttcctctaactctggtgaggtcattctggagtgacatgat

SEQ ID NO: 215333 - DNA, 120 bp, Artificial Sequence
  ENSG00000116209_4 (sequence is synthesized)
ggactccgcacagagcttcataacctcttcatggactttttatcttcaagccgatgacggaaaaatagttatattccagtctaagccagaaatccagtacgcaccacatttggagcagga

SEQ ID NO: 215334 - DNA, 120 bp, Artificial Sequence
  ENSG00000116209_5 (sequence is synthesized)
gcctacaaatttgagagaatcatctctaagcaaaatgtcctatctgcaaatgagaaattcacaagcgcacaggaattttcttgaagatggagaaagtgatggctttttaagatgcctctc

SEQ ID NO: 215335 - DNA, 120 bp, Artificial Sequence
  ENSG00000116209_6 (sequence is synthesized)
tcttaactctgggtggattttaactacaactcttgtcctctcggtgatggtattgctttggatttgttgtgcaactgttgctacagctgtggagcagtatgttccctctgagaagctgag

SEQ ID NO: 215336 - DNA, 120 bp, Artificial Sequence
  ENSG00000116209_7 (sequence is synthesized)
tatctatggtgacttggagtttatgaatgaacaaaagctaaacagatatccagcttcttctcttgtggttgttagatctaaaactgaagatcatgaagaagcagggcctctacctacaaa

SEQ ID NO: 215337 - DNA, 120 bp, Artificial Sequence
  ENSG00000116209_8 (sequence is synthesized)
agtgaatcttgctcattctgaaatttaagcatttttcttttaaaagacaagtgtaatagacatctaaaattccactcctcatagagcttttaaaatggtttcattggatataggccttaa

SEQ ID NO: 215338 - DNA, 120 bp, Artificial Sequence
  ENSG00000116209_9 (sequence is synthesized)
gaaatcactataaaatgcaaataaagttactcaaatctgtgaagactgtatttgctataactttattggtattgtttttgtagtaatttaagaggtggatgtttgggattgtattattat

SEQ ID NO: 215339 - DNA, 120 bp, Artificial Sequence
  ENSG00000116209_10 (sequence is synthesized)
tttactaatatctgtagctattttgttttttgctttggttattgtttttttcccttttcttagctatgagctgatcattgctccttctcacctcctgccatgatactgtcagttacctta

SEQ ID NO: 215340 - DNA, 120 bp, Artificial Sequence
  ENSG00000116209_11 (sequence is synthesized)
gttaacaagctgaatatttagtagaaatgatgcttctgctcaggaatggcccacaaatctgtaatttgaaatttagcaggaaatgacctttaatgacactacattttcaggaactgaaat

SEQ ID NO: 215341 - DNA, 120 bp, Artificial Sequence
  ENSG00000116209_12 (sequence is synthesized)
cattaaaattttatttgaataattatgtgctgaaatttgagtatctgatttttctagaccttccctcctattcctgcccaacctagataagaattatgaaatgttctgtgtttattgcta

SEQ ID NO: 215342 - DNA, 120 bp, Artificial Sequence
  ENSG00000116209_13 (sequence is synthesized)
ttgctttataatgtgatggtcagggaccattttgatgcaaaactgatctctcagcagtacatttgatgttattttgcacaggctataggtttttgtttgatgagtgtttccaaagaacta

SEQ ID NO: 215343 - DNA, 120 bp, Artificial Sequence
  ENSG00000116209_14 (sequence is synthesized)
tttttctctgttagatagcatatcaagtataaggtaaacatattttcagagaaaacttcattttaacactaaaaattagactcttgtgatacagaattaagtataaattttacttggcaa

SEQ ID NO: 215344 - DNA, 120 bp, Artificial Sequence
  ENSG00000116209_15 (sequence is synthesized)
aaactcgttttatttttacctgcaataatacagagcttaatattagaatgatatcaggtcataataataatacaccagaatcttttgagatggaattttgctcttgttgctgaggctgga

SEQ ID NO: 215345 - DNA, 120 bp, Artificial Sequence
  ENSG00000116209_16 (sequence is synthesized)
gcccagcctacaccagaattctaatatgattcactgttattatgccataaaatattaaaaactttgtaaaacaatactttcctcagtcacaggggcattgctgacaactgcatcagtgct

SEQ ID NO: 215346 - DNA, 120 bp, Artificial Sequence
  ENSG00000116209_17 (sequence is synthesized)
gtttgactaaagaataagttagtcactcctcctatggcctagtctttagccttcctgagtccaaatgaaaagcagttaacagctaatcaaggaagactttggtcacaaagtgtaggtttt

SEQ ID NO: 215347 - DNA, 120 bp, Artificial Sequence
  ENSG00000116209_18 (sequence is synthesized)
tatttttagtttgtctagatttggatgatagaaagttgtgaacacatccagatggggaagaaaggaggaattagccgtcattgtcaagcagtcattgtttctttcttctttttgttagaa

SEQ ID NO: 215348 - DNA, 61 bp, Artificial Sequence
  ENSG00000116209_19 (sequence is synthesized)
ttgtcaagcagtcattgtttctttcttctttttgttagaaaacatgggataaaacgtgggg

SEQ ID NO: 215349 - DNA, 120 bp, Artificial Sequence
  ENSG00000116209_20 (sequence is synthesized)
aacatagcaagaccctctctgtacaaaaaaatacaaacaaacatggggactatataaaacatgggtagtggataggagttaccattaaaaaaaaataaaaagccctgttgtttcgtctcc

SEQ ID NO: 215350 - DNA, 120 bp, Artificial Sequence
  ENSG00000116209_21 (sequence is synthesized)
catcattagtgcatacttagtttccttagtcaggcacaggtttaattgtaatgcatccaatgaagcaaacagagaaacacaaaatgctgctgtctcacaggaatcaaagagcccactgtt

SEQ ID NO: 215351 - DNA, 120 bp, Artificial Sequence
  ENSG00000116209_22 (sequence is synthesized)
agaaaagaccctcccttataaaaacaaaacaaagaattatctagatcacttggggccaggagttcaacaccatcctgggcaatataatgagaatcccatctttttttttttttttaaagc

SEQ ID NO: 215352 - DNA, 120 bp, Artificial Sequence
  ENSG00000116209_23 (sequence is synthesized)
aactgtacagttgtcctatattctccaccttcccttggtttcatttctcttcgcttcctgaatgagaagtgcctgagataccttcatttctcttgaaagtattgatccaagtttagacaa

SEQ ID NO: 215353 - DNA, 120 bp, Artificial Sequence
  ENSG00000116209_24 (sequence is synthesized)
gcataattaagccagactgatgtttgcatttgagtatcatcagcatgagtaaccattttaatctctcttcccttaactacttgttctacactagagtctagggtcagggtacgtacagtg

SEQ ID NO: 215354 - DNA, 120 bp, Artificial Sequence
  ENSG00000116209_25 (sequence is synthesized)
ataaagattgagataatgggaaatatagtcttctgtttgggaagctggattgtagtgttgattttctgactccttgtggtaattaaattctgaagcacagaatctacttttgagaagaaa

SEQ ID NO: 215355 - DNA, 120 bp, Artificial Sequence
  ENSG00000116209_26 (sequence is synthesized)
tattttacttttgaaaaaaaatccccaaaatatatacagcataaaaatgtttccgatcttgaaaatcccaaccaaagcaacaaaactgagcttccaagccccttctcctaaagtaacagt

SEQ ID NO: 215356 - DNA, 120 bp, Artificial Sequence
  ENSG00000116209_27 (sequence is synthesized)
tttgcccttcttggatgtgcctaactttacttagctccttgtttccataaaacagtcataatcttatttcctaccacacagaaagcatcttgagaatctggtcttggtcctaggcaaatt

SEQ ID NO: 215357 - DNA, 120 bp, Artificial Sequence
  ENSG00000116209_28 (sequence is synthesized)
ctcaagaccgttgggtctctggttcaaacctcccagacttctaaggtctttcttggctcaggtccctcatctaagagacatgctaattcaggcaattacaaaagcagtactaatcaccat

SEQ ID NO: 215358 - DNA, 120 bp, Artificial Sequence
  ENSG00000116209_29 (sequence is synthesized)
aatgaatgatctgggcctaggttccaagttttctcacaaaacttcatgggcacctttcatttgtgatatgttttgtagtaaatcagaaattactagatgatctggtcaatcttatctcag

SEQ ID NO: 215359 - DNA, 120 bp, Artificial Sequence
  ENSG00000116209_30 (sequence is synthesized)
aaatccctgtggtgcatcatgaggcaatctgagctgctgatcagcagaaaaccctgcactgtctgagcttatcttccagccaaaggcaaacaatttaccctttgttattagtctgtctgg

SEQ ID NO: 215360 - DNA, 120 bp, Artificial Sequence
  ENSG00000116209_31 (sequence is synthesized)
atttgtcttagataaatgagccatttttgttacaagttttttaaagatatacagtagttccattataatttttgtggactcaaatatcaagtccacatgtagggaatcattgacagagat

SEQ ID NO: 215361 - DNA, 120 bp, Artificial Sequence
  ENSG00000116209_32 (sequence is synthesized)
ttccagttactgtcaccaccacaccaaggcagtaattttgctcagttctgcctttatagatccacaatttaaccattcaacaaccacctgagatcctgagtggcaggccctatgctaaat

SEQ ID NO: 215362 - DNA, 120 bp, Artificial Sequence
  ENSG00000116209_33 (sequence is synthesized)
gctaggaccacagtaagacccagtgcctgaccccaattgctgagactctgaaggagactattattaatgtgataagtgctatgaccaagcacagagcacataggaggagctgtatgcatt

SEQ ID NO: 215363 - DNA, 120 bp, Artificial Sequence
  ENSG00000116209_34 (sequence is synthesized)
atgggagcacacaggaggacttctgggagaaagtgatagccaagcttaaacctggagaaaaagggaacgccaaacacaatatagagagcagtgtaccagacagtggggacactgtgctca

SEQ ID NO: 215364 - DNA, 120 bp, Artificial Sequence
  ENSG00000116209_35 (sequence is synthesized)
aagacctagaggccagagggtgaggcactgcagattgttgagtaggccgagatagagcatacaaaagcataacaaaagatggggctaggcagaccaggtaataaacctgcactttaaacc

SEQ ID NO: 215365 - DNA, 120 bp, Artificial Sequence
  ENSG00000116209_36 (sequence is synthesized)
tgcacttgatcctgagcacagtagagagccactgaaagattttaagcaagagagtgccatacagtgttggaatgattcactcggacagcaatgtggaagatagaccagaaagggcaagtc

SEQ ID NO: 215366 - DNA, 120 bp, Artificial Sequence
  ENSG00000116209_37 (sequence is synthesized)
cagaggccaacaataatcttagcctcagagttctttttttaatacccaagaatactatttcattttacttatatttttaaacttttctctataacgctctctctgctcccccacattgtt

SEQ ID NO: 215367 - DNA, 120 bp, Artificial Sequence
  ENSG00000116209_38 (sequence is synthesized)
gtctggatggtaaacctaggactggtctctgagtcctggtcacagcctggcaacagaatgtttgagcaaactgggaaggctgccccatggatccctggtttcttatcaccatcctcttaa

SEQ ID NO: 215368 - DNA, 120 bp, Artificial Sequence
  ENSG00000116209_39 (sequence is synthesized)
ttctacgtttgccaaccagtctctaggaagccagcgtgctcttgcgcccctcccaccaggtttccagttgctaagcgtgtcatgtttgcatttgggtatcatctgcatgagtgaccattt

SEQ ID NO: 215369 - DNA, 120 bp, Artificial Sequence
  ENSG00000116209_40 (sequence is synthesized)
taatctctctttccttgactacttgttctacactagagtctagggtgggggtgagtacagtggtaaagacagggatagcgggaaatttagtcttctgtttaggaagctggatggtagtgt

SEQ ID NO: 215370 - DNA, 120 bp, Artificial Sequence
  ENSG00000116209_41 (sequence is synthesized)
ggattttctaactccttgtggtaattaaattctggagcacagtttttagaccttttctgaaatctgttactgttgaagtcagcttcatatatttcactttttttttttttgagacagagt

SEQ ID NO: 215371 - DNA, 84 bp, Artificial Sequence
  ENSG00000116209_42 (sequence is synthesized)
atatttcactcaggctggagtgcactggtacaatcttgactcactgcaacctccacagctcccaggttcaagcgattctcgtgc

SEQ ID NO: 215372 - DNA, 120 bp, Artificial Sequence
  ENSG00000116209_43 (sequence is synthesized)
tttggattgcaggcatgagccactgcacccaccctatttcactattaagtactctcttcctgtgatattaatgacttatttgtttcaaacttttttgtgccattgagctttttagtgatc

SEQ ID NO: 215373 - DNA, 120 bp, Artificial Sequence
  ENSG00000116209_44 (sequence is synthesized)
cagtgaagcctgtggaccccctctcatagtaatgttttcaaagcataaaactaaatataaaggatcgcaaaggaaactgatcatgttaaaataaagttgatattttcaaagttttatgat

SEQ ID NO: 215374 - DNA, 120 bp, Artificial Sequence
  ENSG00000116209_45 (sequence is synthesized)
ccagtaacatacatattctgttaacacaaaataagactgcatggtggttctaaaattactataattcaaattcatatcttgaaatatctaacaactgtaatatatctaaatgtctcattt

SEQ ID NO: 215375 - DNA, 120 bp, Artificial Sequence
  ENSG00000116209_46 (sequence is synthesized)
ctattggtgacaaagtcacaggtactctgatcctactgtggactgtttcctatattcgtaattgaaggaaatgttatatttcagttagaagttggtgaaaagaaagatttaaaatttttc

SEQ ID NO: 215376 - DNA, 120 bp, Artificial Sequence
  ENSG00000116209_47 (sequence is synthesized)
ccatccaagttcaccagacccctggtttagaggttgtcttaattttacttttgtcattttaagagtaaattattttgttttcttgttcaattctcaattatttgggcttattttactgcc

SEQ ID NO: 215377 - DNA, 120 bp, Artificial Sequence
  ENSG00000116209_48 (sequence is synthesized)
tcttgcatgcttttttatgcttgaatggtttttgcagtgttagaacagtaataattgaagacttgggtggaaaaaaatcagcacctgattgaaaatgaaaggtttcaacaaaagctcttg

SEQ ID NO: 215378 - DNA, 120 bp, Artificial Sequence
  ENSG00000116209_49 (sequence is synthesized)
ataatgttacctccaggtgtaccatcatgccaccattattggtgctacaaatctgttaatttatttatgcttaagtatgtaaactttaataaaacttggatcatctgcattaaaaaataa

SEQ ID NO: 215379 - DNA, 120 bp, Artificial Sequence
  ENSG00000116209_50 (sequence is synthesized)
gatggttgaattcccctcctcacgccagcctaggagaagaagttcgtagtcccagaggtgtctgccagtttgtacacagtggatcacatagaagaggagttgtacgcatgtcagagaggt

SEQ ID NO: 215380 - DNA, 120 bp, Artificial Sequence
  ENSG00000116209_51 (sequence is synthesized)
tcagctgccattcgctgaactgagacaagaacaagtacgaaacaatactgcctttcaaactagcctgcttagatggcactgacttgtattgcttgaagtgtttatcacccacttgatcct

SEQ ID NO: 215381 - DNA, 120 bp, Artificial Sequence
  ENSG00000116209_52 (sequence is synthesized)
attttagtgttatattttatatttggctttcagcaaacaaaattagtttgcaaatagaaaagtcagttgaataattgcttttgtataatgctttactattaaaagttatgcttacgttca

SEQ ID NO: 215382 - DNA, 120 bp, Artificial Sequence
  ENSG00000116209_53 (sequence is synthesized)
aggaggccccgcttcgcgctaacgcttgcgatggttgaattcccctcctcacgccagcctaggagaagaagttcgtagtcccagagcatgtacagaagcatattcccaatctgatgagca

SEQ ID NO: 215383 - DNA, 120 bp, Artificial Sequence
  ENSG00000116209_54 (sequence is synthesized)
ttctagttatatcaccgttgtgttttttgttgttgttgttttttaagcaacagggtctcactttgtaccccaagctggagtacagtggtgtgattatagctcactgtaccctcaaactcc

SEQ ID NO: 215384 - DNA, 120 bp, Artificial Sequence
  ENSG00000116209_55 (sequence is synthesized)
tgggctcaaacaatcctcacacctcagcctactgagtactaggacaacaagtgtgcactaccatacccagttatttttgtgtgtgtgtttgttttggtacagatggggtctcgctatata

SEQ ID NO: 215385 - DNA, 120 bp, Artificial Sequence
  ENSG00000116209_56 (sequence is synthesized)
ttgttttggtacagatggggtctcgctatatagtccaggctggcctcaaactgttggcctcaagcagtcctcccacctcagcttcccaaagccctgggattacaggtgtgagccactgca

SEQ ID NO: 215386 - DNA, 120 bp, Artificial Sequence
  ENSG00000116209_57 (sequence is synthesized)
ttttcccccccacagattgtaaccaaagaaaatggaaaaagggtggtggttttacctactaggcttttttcttcgtatcacttttaaaataaggaactaaaacctctatatggcaaaggt

SEQ ID NO: 215387 - DNA, 120 bp, Artificial Sequence
  ENSG00000116209_58 (sequence is synthesized)
cttgagtatcaactggctcctatcatttttttctttcagttatgaaacttactggacgatttgtaataaactttactaactgctttcttcctaacctgttttcccctgaggaaaaaaaaa

SEQ ID NO: 215388 - DNA, 120 bp, Artificial Sequence
  ENSG00000116209_59 (sequence is synthesized)
aatgtagccaaggttactaatgcatagatatgttatgcgtatacaaggatgtacacatatattttgtaaatataagtatacataaagagcttctactaatttttttctactacataatat

SEQ ID NO: 215389 - DNA, 120 bp, Artificial Sequence
  ENSG00000116209_60 (sequence is synthesized)
tctgtgtagatatattataattttttaggcagtcccttatttgtgaacatgtaggttgttcctaatctttttcttttgtaaatgatacctattttgcacatttgtgagtatacctgtaga

SEQ ID NO: 215390 - DNA, 120 bp, Artificial Sequence
  ENSG00000116209_61 (sequence is synthesized)
ataaaatcatagggctagaattgctgagttaagaggtatatgcattttttatttttatgttttttagagatgaggatctcactatattacccaggctggcctcaagcttctgggcccaag

SEQ ID NO: 215391 - DNA, 70 bp, Artificial Sequence
  ENSG00000116209_62 (sequence is synthesized)
caaagcagaaccaaagctatccctagagtttagtaaatggcatcccacacttgtgctttagagaggccca

SEQ ID NO: 215392 - DNA, 120 bp, Artificial Sequence
  ENSG00000116209_63 (sequence is synthesized)
tagtaaatggcatcccacacttgtgctttagagaggcccagtgctgctaaagaagtcaagaaatcagaattggaggaaagatgatatcatttgtcaaaatcctttttttttttttttttt

SEQ ID NO: 215393 - DNA, 120 bp, Artificial Sequence
  ENSG00000116209_64 (sequence is synthesized)
ctgggattaccggtgtgagccaccacgctgggccattaaaatcttatcagtagcttactacatatattcagcccataaatactcccttcaccctgtcgtgttgtcagatgtctaccattt

SEQ ID NO: 215394 - DNA, 120 bp, Artificial Sequence
  ENSG00000116209_65 (sequence is synthesized)
taccattttatgtatatattcttctgattgattttttccgttctcttttccattgatgttcattatagcatgatttattcttgatgaaagcattaaagatgagaatgatacgatttgtcc

SEQ ID NO: 215395 - DNA, 120 bp, Artificial Sequence
  ENSG00000116209_66 (sequence is synthesized)
cttcccgttctacccttaaggccttgctggtccttatttaattacatcttaagagtcttcttatttttggacttaattcaaaagcctgttattctgatagaggtgacaggtagctagtaa

SEQ ID NO: 215396 - DNA, 120 bp, Artificial Sequence
  ENSG00000116209_67 (sequence is synthesized)
tactctaatgctattgattatggtagatgtatttaattgtttgtatcctgtcccaataaggattggagtaatcttgattatattgttcttttgaatatacatatataaaaataatatatt

SEQ ID NO: 215397 - DNA, 120 bp, Artificial Sequence
  ENSG00000116209_68 (sequence is synthesized)
accgtgcgcctcccgcctacggagaactacatgccccagcctgccccgcgaagggaagaagtcaggaggccccgcttcgcgctaacgcttgcgatggttgaattcccctcctcacgccag

SEQ ID NO: 215398 - DNA, 120 bp, Artificial Sequence
  ENSG00000116209_69 (sequence is synthesized)
gaattcccctcctcacgccagcctaggagaagaagttcgtagtcccagaggtgaggcaggaggcggcagtttctggcgggtgagggcggagctgaagtgacagcggaggcggaagcaacg

SEQ ID NO: 215399 - DNA, 120 bp, Artificial Sequence
  ENSG00000116212_0 (sequence is synthesized)
cttgctcccgcccccgccggtcccgcggtcccacggcgcctggttgcccccagccccctccctcctcccaccttcactgtgtcccacccttcctagctttgtgcccggggtgctgagccc

SEQ ID NO: 215400 - DNA, 120 bp, Artificial Sequence
  ENSG00000116212_1 (sequence is synthesized)
ttccccgtcagccgggccgcgggaggagggagccgtcaccgaggagctgccgctcgctgccccgggcaggggcacagttgcaaccaaggcaatgtcttactacctcagctcagaaaacca

SEQ ID NO: 215401 - DNA, 120 bp, Artificial Sequence
  ENSG00000116212_2 (sequence is synthesized)
cctggacccagggcccatctacatgcgagaaaatgggcagctgcacatggtcaatctggctctggatggtgtcaggagtagcctgcagaagccaaggcctttcagactgttccccaaagg

SEQ ID NO: 215402 - DNA, 120 bp, Artificial Sequence
  ENSG00000116212_3 (sequence is synthesized)
cttttctgtggagctttgcatgaacagggaagacgacactgcacggaaagagaagactgatcatttcatcttcacatacacccgagaggggaatcttcggtactccgccaaatccctctt

SEQ ID NO: 215403 - DNA, 120 bp, Artificial Sequence
  ENSG00000116212_4 (sequence is synthesized)
cagccttgtcctgggtttcatctccgacaatgtggatcacattgattcccttattggctttcctgagcagattgctgaaaagctgttctctgctgctgaagccagacagaaattcactga

SEQ ID NO: 215404 - DNA, 120 bp, Artificial Sequence
  ENSG00000116212_5 (sequence is synthesized)
gccaggtgcagggctgagggctttacagaaattcactgaggcctatggaagtttggtgctttgctccctgtgtttgcgaaacaggtatctcgtgatttcagaaaagcttgaggagattaa

SEQ ID NO: 215405 - DNA, 120 bp, Artificial Sequence
  ENSG00000116212_6 (sequence is synthesized)
gtctttccgggagctgacctgcctggatctttcctgttgcaagcttggagatgagcatgaacttctagaacatctcaccaatgaagccctgtctagtgtaactcagctccacctgaagga

SEQ ID NO: 215406 - DNA, 120 bp, Artificial Sequence
  ENSG00000116212_7 (sequence is synthesized)
gagtgatgaaaagaggccttgagaatctaacattattagacttatcatgtaaccctgagatcacagatgcaggcattggatacctcttttcttttaggaaactaaactgcttagatatct

SEQ ID NO: 215407 - DNA, 120 bp, Artificial Sequence
  ENSG00000116212_8 (sequence is synthesized)
ctgggacagggctcaaggacatcaaaaccgtcaagcacaagctccagacccacataggccttgttcactccaaagtgcctttgaaggaatttgatcatagtaactgcaagacagagggct

SEQ ID NO: 215408 - DNA, 120 bp, Artificial Sequence
  ENSG00000116212_9 (sequence is synthesized)
gggctgaccagatcgttctgcagtgggagcgtgtgactgcggaagctgtgaagccacgggagacctcggagcctagagcagcagctcagcgcttctatgggaagcggtctcgagcagaag

SEQ ID NO: 215409 - DNA, 120 bp, Artificial Sequence
  ENSG00000116212_10 (sequence is synthesized)
ccccactgaagtgtcccctggcagacacccacatgaactcttccgagaaactccagttctataaagagaaagccccagattgccatgggccagtgttgaaacacgaagctatctcaagcc

SEQ ID NO: 215410 - DNA, 120 bp, Artificial Sequence
  ENSG00000116212_11 (sequence is synthesized)
aggagtcaaagaagagcaagaagagaccttttgaggagtcagagacagaacagaataactcttcacaaccttcaaagcagaaatatgtatgtcttgctgtggaagactgggacttgttaa

SEQ ID NO: 215411 - DNA, 120 bp, Artificial Sequence
  ENSG00000116212_12 (sequence is synthesized)
attcctattgattagtagatacaagttgacctttctctggcccccagctctagtgtttgagtaaaggagactgaggatgatttactttttgtttgaatttacctatggcattagcatagt

SEQ ID NO: 215412 - DNA, 120 bp, Artificial Sequence
  ENSG00000116212_13 (sequence is synthesized)
aagcagatatttctacttttgtggtgtgggaggggaatgctatggaagtatgtaataatttctaatgtatattttcaatacatagtaattttttcaaataaacatttttgctgtccttaa

SEQ ID NO: 215413 - DNA, 120 bp, Artificial Sequence
  ENSG00000116212_14 (sequence is synthesized)
ggcacaggttgatgtcatatttttagtcttgagaaacagcatcatgccaaggaaagagcttgagctttggagtaatgcggccctgagattgaattctggctctgccacttattagctctg

SEQ ID NO: 215414 - DNA, 120 bp, Artificial Sequence
  ENSG00000116212_15 (sequence is synthesized)
cgtttttctgagcttatttttggttgtcattttaacagcatttatattgtgacagaatgctacgttgtttttgacatctaggtaaccctgagatcacagatgcaggcattggatacctct

SEQ ID NO: 215415 - DNA, 120 bp, Artificial Sequence
  ENSG00000116212_16 (sequence is synthesized)
tttcttttaggaaactaaactgcttagatatctctgggacagggctcaaggtaagacttttggttccttctctcatttttctagactcaacaatttgatattttgcctgtgctaattggt

SEQ ID NO: 215416 - DNA, 120 bp, Artificial Sequence
  ENSG00000116213_0 (sequence is synthesized)
gacttccggcctcggaggccggcgtcggctgttgcagcctgctgcgcgcccaggggtcccgcgggttttcgggcgcagggtggcgcccgcggcaggcggcggccatgaacttctccgagg

SEQ ID NO: 215417 - DNA, 120 bp, Artificial Sequence
  ENSG00000116213_1 (sequence is synthesized)
tattcaagctctccagcttactctgcaagttctccccggacggcaagtacctggcttcctgtgtccagtaccggttagtggtccgggatgtgaacacccttcagatccttcagctgtaca

SEQ ID NO: 215418 - DNA, 120 bp, Artificial Sequence
  ENSG00000116213_2 (sequence is synthesized)
cgtgcctagaccagatccagcacatcgagtggtcggcagactcgctcttcatcctgtgcgccatgtacaagcgagggctggtgcaggtctggtctttagagcagcccgaatggcactgca

SEQ ID NO: 215419 - DNA, 120 bp, Artificial Sequence
  ENSG00000116213_3 (sequence is synthesized)
aaatagacgagggctcagccgggctggtggcctcgtgctggagcccggacgggcgccacattctcaacaccacggaattccatctgcggataaccgtctggtccttgtgcacaaaatccg

SEQ ID NO: 215420 - DNA, 120 bp, Artificial Sequence
  ENSG00000116213_4 (sequence is synthesized)
tgtcttacatcaaatacccgaaagcttgtctgcagggaatcaccttcaccagggacggccgctacatggcgctggcagaacggcgcgactgcaaagattacgtgagcatcttcgtctgca

SEQ ID NO: 215421 - DNA, 120 bp, Artificial Sequence
  ENSG00000116213_5 (sequence is synthesized)
gtgattggcagctcctgcggcattttgatacggacacccaggatctcacagggattgagtgggccccaaacggctgtgtgctggcagtgtgggacacctgcttggagtacaagattctgc

SEQ ID NO: 215422 - DNA, 120 bp, Artificial Sequence
  ENSG00000116213_6 (sequence is synthesized)
tgtactcattggatggccggttgttgtccacgtacagcgcttacgagtggtccctgggcatcaagtctgtggcctggagccccagcagtcagttcctggcagttgggagctatgatggaa

SEQ ID NO: 215423 - DNA, 120 bp, Artificial Sequence
  ENSG00000116213_7 (sequence is synthesized)
ttaatcacgtgacttggaaaatgatcacggagtttgggcatcctgcagccattaatgatcccaagatagtggtgtataaggaggccgagaagagcccacagctgggactgggctgcctct

SEQ ID NO: 215424 - DNA, 120 bp, Artificial Sequence
  ENSG00000116213_8 (sequence is synthesized)
ccttcccgccgccccgggccggggccggccctctcccgagctcagagagtaaatatgagatcgcctctgtcccagtctccttacagacactgaaacctgttaccgacagagcaaacccga

SEQ ID NO: 215425 - DNA, 120 bp, Artificial Sequence
  ENSG00000116213_9 (sequence is synthesized)
aaatcggcataggaatgctggcatttagtcctgacagctacttcctggcgacaaggaacgacaacattcccaatgccgtctgggtctgggacattcagaagctgaggctgttcgcggtgc

SEQ ID NO: 215426 - DNA, 120 bp, Artificial Sequence
  ENSG00000116213_10 (sequence is synthesized)
tcgagcagctgtccccagtgcgcgcatttcagtgggacccgcagcagccgcggctggccatctgcacgggaggcagcaggctctacctgtggtccccagcgggctgcatgtcggtgcagg

SEQ ID NO: 215427 - DNA, 120 bp, Artificial Sequence
  ENSG00000116213_11 (sequence is synthesized)
tgcctggggaaggcgactttgcagtgctctctctgtgctggcatttaagcggagactcgatggccctcctcagcaaggatcacttctgcctctgcttcctggagacagaggcagtggtcg

SEQ ID NO: 215428 - DNA, 120 bp, Artificial Sequence
  ENSG00000116213_12 (sequence is synthesized)
gcacagcctgcagacagctgggcggccacacgtagcagcggtgcactaacgtgtgcagaaacagggctactctgtgtttccagtgtgggaaaaaacacagcttcaccaggaggttctcca

SEQ ID NO: 215429 - DNA, 120 bp, Artificial Sequence
  ENSG00000116213_13 (sequence is synthesized)
ctgtggtggtctggattcagtgattgattctatttttctatagcaaagcatttttgtaaatatgtatggtataaaactgtagttttattatttaaaataaatacttgctgatttatacaa

SEQ ID NO: 215430 - DNA, 120 bp, Artificial Sequence
  ENSG00000116213_14 (sequence is synthesized)
ttttttaatgcaagattcctcgttgtccagataaacttcggatgttccttatgtttaaaaaaaaaaactttttttcccttccatgcttccagccagtgtgcccctcagcctgttggctgg

SEQ ID NO: 215431 - DNA, 120 bp, Artificial Sequence
  ENSG00000116213_15 (sequence is synthesized)
aggttgactagggtctgaattgcgcagtgggccgtgaaggtgcggcttctgttactgaatatgagccctggagacccggatctgacagcgggagctccgaggggatgtttttccggagct

SEQ ID NO: 215432 - DNA, 120 bp, Artificial Sequence
  ENSG00000116213_16 (sequence is synthesized)
ccgagaatgatgtttttcaaagaaacacttttccgtgggtggcgctcagagtgggtctggaacccggcggtgctcccgagcgctgtctccggcttgaggcccggttctgatgcagcctct

SEQ ID NO: 215433 - DNA, 120 bp, Artificial Sequence
  ENSG00000116213_17 (sequence is synthesized)
tgactctgggcatttcctatgtgtctgtttcctcatcgctgaaatgggcatagtaaaagcacccatcccacaggggcatgagggcatctgaaggttgcaggtagaggaagcggtgcccca

SEQ ID NO: 215434 - DNA, 120 bp, Artificial Sequence
  ENSG00000116213_18 (sequence is synthesized)
agtgccgacgggcccaccccggggctcggtgtgtgctcaggatgggggtcaggacaggtgcagcctggcacacaggaggcgctccccaggagcccaggggcgtccttgttccacagcccc

SEQ ID NO: 215435 - DNA, 120 bp, Artificial Sequence
  ENSG00000116213_19 (sequence is synthesized)
cactccagggaaactgccctcagagtctttgcgtaaacctcaagacggacacacaggggacccgctgccctcagctttatgggctagaagcagcctctccctgacttgaggcagctctgg

SEQ ID NO: 215436 - DNA, 120 bp, Artificial Sequence
  ENSG00000116213_20 (sequence is synthesized)
ggctccaccctggctctgcctatgtgggtcactccaggcactgtgctggcctgcaggacaagggggtgcccatcccccagaatctgggcctcccctgctgtaatcctctggccacctgtc

SEQ ID NO: 215437 - DNA, 120 bp, Artificial Sequence
  ENSG00000116213_21 (sequence is synthesized)
ggcccctgggaaggaggggttttgttctgtgcctttctagtttgaaaaaaaagtccgtgcagctcaaagccagttttcttttgaaattataacgttctctaaagtttaagaacatttaaa

SEQ ID NO: 215438 - DNA, 120 bp, Artificial Sequence
  ENSG00000116213_22 (sequence is synthesized)
gtgggaagcaagatgattccctggtaggctccacggggtctcagtgggaaatgcaggtggagggacacagcagccctggaagtcccgcggcgctgccacggggagggctggaccacccac

SEQ ID NO: 215439 - DNA, 120 bp, Artificial Sequence
  ENSG00000116213_23 (sequence is synthesized)
tgcggtgcctctccctcagcaggcacgccctcgtcggcctggttagaaaatcatcttttggcctcactgtgccagcctagtcagctctcagctccctgagtcagggaaaggggtggaaaa

SEQ ID NO: 215440 - DNA, 120 bp, Artificial Sequence
  ENSG00000116213_24 (sequence is synthesized)
gtggacagtccagcagcgcatgttctagaaccctctgcagatgcagccaggccagcgagcacacgcaggaggcagacggacaccttcttgggtgttgagtggctgctcctgcctcagggc

SEQ ID NO: 215441 - DNA, 120 bp, Artificial Sequence
  ENSG00000116213_25 (sequence is synthesized)
tgcagatgcaggctcacagccccctggtgagtcccggagtggctgcatccaatctccagatcctctgtcttcccataaaggagactgaacccgtggtggtttctagatcaagatttttct

SEQ ID NO: 215442 - DNA, 120 bp, Artificial Sequence
  ENSG00000116213_26 (sequence is synthesized)
ctgagtaactcagggttattataacatgcaacctatggtcactttgaaaaagctaatgaaaaagcacttggatttaactttgtgtcactcaattttggtataaaacaacaacaacagaaa

SEQ ID NO: 215443 - DNA, 120 bp, Artificial Sequence
  ENSG00000116213_27 (sequence is synthesized)
accaagaacaccaaatttaccgtaaccacagtaaaatacgcatttgaatattccggtaggagggcaggcatcccccaggtcctgatagatccactccagcagtcaggcctgtgcttgggg

SEQ ID NO: 215444 - DNA, 120 bp, Artificial Sequence
  ENSG00000116213_28 (sequence is synthesized)
acgcgtgggcgggttgaggattgagacggtctctgatgatgctaaagaagtgtttcctttctctttcccctttcccccaacagctgcggataaccgtctggtccttgtgcacaaaatccg

SEQ ID NO: 215445 - DNA, 120 bp, Artificial Sequence
  ENSG00000116213_29 (sequence is synthesized)
gtgattggcagctcctgcgggtaaggcgtcccccagactggaataaagttgtcctgctgactgtggagggatcgagtgaagtagatccttccagattccaggggatctttggtaggatat

SEQ ID NO: 215446 - DNA, 120 bp, Artificial Sequence
  ENSG00000116213_30 (sequence is synthesized)
ggagcaaggtgatgttgtattaacaaagggcaggtgcgctgcgaatcacttccagtggcacccggttgtgtgttcaggagacttggtgaaaaggacgcgtgcccaggtgttttaaaagtg

SEQ ID NO: 215447 - DNA, 120 bp, Artificial Sequence
  ENSG00000116213_31 (sequence is synthesized)
aatatgctgtcacatttgagcccttttccttgtcctgtgtgatggtgtttgcgcatgtgtgtgccacgtcgggagttggggggacgtggaagttcaccttgactgagggcctgcattagg

SEQ ID NO: 215448 - DNA, 120 bp, Artificial Sequence
  ENSG00000116213_32 (sequence is synthesized)
cagggcgctctgccaggtgcccaggcacagagggcactgcccccacagcagacatatgaacacgattccagcacaatccatcattaaggtagagcaacctctggaatgctgtcagagtgc

SEQ ID NO: 215449 - DNA, 120 bp, Artificial Sequence
  ENSG00000116213_33 (sequence is synthesized)
agaacccgggatccaggcagtgctctggaagggacttgtctgagctgggtctaaaggagtgagcctggccaggcaaggaaaggtgagggggagagtgtgcacatgagtgcaggtgcgggg

SEQ ID NO: 215450 - DNA, 120 bp, Artificial Sequence
  ENSG00000116213_34 (sequence is synthesized)
agaccaagccaccttcgggggctggccaggcaaggaaaggtgagggggagagtgtgcacacgagtgcaggcgcggggagaccaagccgccctcgggggctggccaggcaaggaaaggtga

SEQ ID NO: 215451 - DNA, 120 bp, Artificial Sequence
  ENSG00000116213_35 (sequence is synthesized)
gggggagagtgtgcacacgagtgcaggcgcggggagaccaagccgcccttgggggctggccaggcactgacgctggcatctgtggcggtgcagccccagcagcagctctacagggatttc

SEQ ID NO: 215452 - DNA, 120 bp, Artificial Sequence
  ENSG00000116213_36 (sequence is synthesized)
atgcatttccaggatagagctgttgagattttgtcaatttctatataaggaaattaagtgcgttaagaacatcagtcataaatgcaattatttatttacgaaaatattttccaaatttaa

SEQ ID NO: 215453 - DNA, 120 bp, Artificial Sequence
  ENSG00000116213_37 (sequence is synthesized)
tgtttcccccccttcctttggaagcattttgatacggacacccaggatctcacagggattgagtgggccccaaacggctgtgtgctggcagtgtgggacacctgcttggaggtatgaaga

SEQ ID NO: 215454 - DNA, 120 bp, Artificial Sequence
  ENSG00000116213_38 (sequence is synthesized)
tgaccaggtgacatgtttgctttcgagagcttttcccggaatttcatgctttctgaatgctgcaatatagtttgctttatcttatttcagataacaagttgagctttgttttaaaagaca

SEQ ID NO: 215455 - DNA, 69 bp, Artificial Sequence
  ENSG00000116213_39 (sequence is synthesized)
ggctggagtgcagtggtgtgatcacggcccactgcagcctcgacctcctggtgcaccaccacgcccggc

SEQ ID NO: 215456 - DNA, 90 bp, Artificial Sequence
  ENSG00000116213_40 (sequence is synthesized)
accacgcccggctaatttttgtattctttactgctcttgaacttctgtgttcaagtgatctgccagcttcggcctcccaaagtgctggga

SEQ ID NO: 215457 - DNA, 120 bp, Artificial Sequence
  ENSG00000116213_41 (sequence is synthesized)
ttacaggcgtgagccacagtgcccggccgagttgaacttttatcagcgagccattaggttgacctcccaatttcccctttttcctcatgctctcactgcctctccgtgactatctcagta

SEQ ID NO: 215458 - DNA, 120 bp, Artificial Sequence
  ENSG00000116213_42 (sequence is synthesized)
tctcagtactagctggcagttccagcttttccacggccacgcggacagtcctgccagctttgtgctatctgcaccaatgtcactctgcagcacccgcgtctgtggtgtgttcctggcgac

SEQ ID NO: 215459 - DNA, 120 bp, Artificial Sequence
  ENSG00000116213_43 (sequence is synthesized)
catcaccgtaaacttgctactgtgacatttcacgcgtctggccctgccctggcctttgttcttcctcctccacgctgcccaaagggtctgaagtgggccttgccctggcctgtcctctgc

SEQ ID NO: 215460 - DNA, 120 bp, Artificial Sequence
  ENSG00000116213_44 (sequence is synthesized)
cgctgccaccccagtccagttttctcctttgtggtctgtctggatgcagatccctgtgctgtacagagtggccagggtctcctgcccccaaacactgggcatctgctgtcgtgccaggca

SEQ ID NO: 215461 - DNA, 120 bp, Artificial Sequence
  ENSG00000116213_45 (sequence is synthesized)
ctgtgctctgggccgcagccagagaagaagagacagacccctgcacttgcagagtgcggctggagagacagggaaggggctggagagctgggtgtctccacggggtggcagggagtggcc

SEQ ID NO: 215462 - DNA, 120 bp, Artificial Sequence
  ENSG00000116213_46 (sequence is synthesized)
accagcgagggatcgcaggcacagatgctgcaccagtgatcagggactcggggagggagcgttccaggccaagggaacaggaaatgcaaaggccccgaggagtgggccacgcatccatgt

SEQ ID NO: 215463 - DNA, 120 bp, Artificial Sequence
  ENSG00000116213_47 (sequence is synthesized)
gtgcagcgggcactgcgctgggagccagagacaaatgctgccctcctggtgttgacctgtaaccgacagagctgagtgaaaggcggcttggattcgatgaagaggccagtgagtggctgg

SEQ ID NO: 215464 - DNA, 120 bp, Artificial Sequence
  ENSG00000116213_48 (sequence is synthesized)
ggctgcgcatgccagatcagccactgccggggatgcatcctggaggggtgtttaagtgaagaccaggaggaggagctgcgcggtgtctgggcagaaagggtgtttcaggcagaggggcct

SEQ ID NO: 215465 - DNA, 120 bp, Artificial Sequence
  ENSG00000116213_49 (sequence is synthesized)
cctgacgtggccagtggcttgtgtggctggaggccagggtgtctggacaggtgagcccgagcagggctggccacacaggtcctgaaggtttgcctgtgattcctgcattctccaaatccc

SEQ ID NO: 215466 - DNA, 120 bp, Artificial Sequence
  ENSG00000116213_50 (sequence is synthesized)
ttcgccacacagcagcagagcatgctttaaaggcatgaaccaggccaggtgactcccttacctggggctcttcaggggcgtaggggctgcccgccttccactgagcctgggccgctgtcc

SEQ ID NO: 215467 - DNA, 120 bp, Artificial Sequence
  ENSG00000116213_51 (sequence is synthesized)
tttgcttgccaggctctcgggcacagatgcccccacctcgggtctgtgtctgctgctcccggggcctctgctgtgttggtgcaagtgttctctgtatcctcttatcacggagggaaggct

SEQ ID NO: 215468 - DNA, 120 bp, Artificial Sequence
  ENSG00000116213_52 (sequence is synthesized)
gagcccactcccttgctggatgatggtggctgcagtggtctcccgtctgtaatcacagggcacacatttgctgcctgtgtctcaaagggtgggctcctcagcaggacacgagagagggtg

SEQ ID NO: 215469 - DNA, 120 bp, Artificial Sequence
  ENSG00000116213_53 (sequence is synthesized)
gctgggtgatctcagctctcgggactgcggggttcgtgcttccgtctctcccggtggcagcaggaccagctgtcatggcaggcacacctgttgaccatgcgctgtcatgggcatttgcca

SEQ ID NO: 215470 - DNA, 120 bp, Artificial Sequence
  ENSG00000116213_54 (sequence is synthesized)
cgtccatccttggcttccgggtccctgtcctgagccgggcgtggccaccttgtgtctttcaggtggtgtataaggaggccgagaagagcccacagctgggactgggctgcctctccttcc

SEQ ID NO: 215471 - DNA, 120 bp, Artificial Sequence
  ENSG00000116213_55 (sequence is synthesized)
ctaagggtactgacgctgaggtggaagggattgtgaactcagatgctggtagtcgacagaaaagtgctgaggagttggagctgctgagattgcagctaggacctgtccatgtccctctcc

SEQ ID NO: 215472 - DNA, 120 bp, Artificial Sequence
  ENSG00000116213_56 (sequence is synthesized)
agtcagcccctggcacgtggggtccaccccccacctagtcgggcctggcaggtgatggtgccactctcatccggggcacttgcgggcaggcccctcgctgcggctgccaggctttgctta

SEQ ID NO: 215473 - DNA, 120 bp, Artificial Sequence
  ENSG00000116213_57 (sequence is synthesized)
gctcttcctgcccttgggccgcactttcctcccctttgaacagaggagctgggttcgcgatgcccgatgcaggcacagcagcctctcagccgcgtgcgtacttcccgaaagggtgacaat

SEQ ID NO: 215474 - DNA, 120 bp, Artificial Sequence
  ENSG00000116213_58 (sequence is synthesized)
gtcctgacagctacttcctggcgacaaggaacggtcagttgtgctgacgcaggtgctgtctcaccctttactgtgtcctgtggccccaggtgtagaagcgactggaaaagaaaatgaagt

SEQ ID NO: 215475 - DNA, 120 bp, Artificial Sequence
  ENSG00000116213_59 (sequence is synthesized)
tgggggtttccgacacgtcacctcctttcacgtttctgcagtagccgaggtgctcacagaagctccttggaggcgctgggcctttgtcctgcagcagccgcaggtccgcgcatgagtcag

SEQ ID NO: 215476 - DNA, 120 bp, Artificial Sequence
  ENSG00000116213_60 (sequence is synthesized)
gaggcctccaccctgctcacttgctccactctgctgagtagaaagcagggctgggcacactgcagcccgccttttgttaagggtttctccatttgtaaagggctaaaaaaaaaaaaaaaa

SEQ ID NO: 215477 - DNA, 120 bp, Artificial Sequence
  ENSG00000116213_61 (sequence is synthesized)
gagtttgggcatcctgcagccattaatgatcccaagatagtaagtctggaacacgtgtttctgcctgagcaggctgttggggagggcggtgggaaactgctccttcactttgctttcttg

SEQ ID NO: 215478 - DNA, 120 bp, Artificial Sequence
  ENSG00000116218_0 (sequence is synthesized)
cacagggactgcgctcccgtgcccctagcgctcccgcgctgctgctccagccgcccggcagctctgaggatggagaggagggcgcggagctcctccagggagtcccgcgggcgaggcggc

SEQ ID NO: 215479 - DNA, 120 bp, Artificial Sequence
  ENSG00000116218_1 (sequence is synthesized)
aggactccgcacaaggagaacaagagggcaaaggccgagaggagcggcggaggccgcgggcgccaggaggctgggcccgagccgtcgggctccggacgggcggggaccccgggggagccc

SEQ ID NO: 215480 - DNA, 120 bp, Artificial Sequence
  ENSG00000116218_2 (sequence is synthesized)
cgagcgcccgccgccacggtggtggacgtggatgaggtccgaggctccggcgaggagggcaccgaggtggtggcgctgttggagagcgagcggcccgaggaaggtaccaaatcctccggc

SEQ ID NO: 215481 - DNA, 120 bp, Artificial Sequence
  ENSG00000116218_3 (sequence is synthesized)
ttaggggcctgtgagtggcttcttgtcctcatttccctgctcttcatcatcatgaccttccctttttccatctggttctgcgtaaaggttgtacaagagtatgaaagagtaattatattc

SEQ ID NO: 215482 - DNA, 120 bp, Artificial Sequence
  ENSG00000116218_4 (sequence is synthesized)
cgactgggacatctgcttcctggaagagccaaaggccctggtcttttcttttttttgccctgcctggatacctaccacaaggttgaccttcgtctccaaactctggagataccttttcat

SEQ ID NO: 215483 - DNA, 120 bp, Artificial Sequence
  ENSG00000116218_5 (sequence is synthesized)
gagatcgtgaccaaagacatgtttataatggagatagatgccatttgctactaccgaatggaaaatgcctctcttctcctaagcagtcttgctcatgtatctaaagctgtgcaattcctt

SEQ ID NO: 215484 - DNA, 120 bp, Artificial Sequence
  ENSG00000116218_6 (sequence is synthesized)
gtgcaaaccactatgaagcgtctcctagcacatcgatccctcactgaaattcttctagagaggaagagcatcgcccaagatgcaaaggttgccttggattcagtgacctgtatttgggga

SEQ ID NO: 215485 - DNA, 120 bp, Artificial Sequence
  ENSG00000116218_7 (sequence is synthesized)
actcactggctgtggaggctgaagcgcaaagacaagccaaagtgcggatgattgctgcagaagcggaaaaggctgcttctgagtccctgaggatggcagctgagattctgtcaggcaccc

SEQ ID NO: 215486 - DNA, 120 bp, Artificial Sequence
  ENSG00000116218_8 (sequence is synthesized)
ctgctgccgttcagcttcgatacctccacacccttcagtctctgtccacagagaagccttccactgtggttttacctttgccatttgacctactgaattgcctgtcttctcccagcaaca

SEQ ID NO: 215487 - DNA, 120 bp, Artificial Sequence
  ENSG00000116218_9 (sequence is synthesized)
gaactcagggaagcctccccttcccaagtccttccaaacctgttgagccactaaatcctaaaaagaaagactctcccatgttataggaaggatggggcataatgtgactgtaaaggggcc

SEQ ID NO: 215488 - DNA, 120 bp, Artificial Sequence
  ENSG00000116218_10 (sequence is synthesized)
tgccatagaaaagtcacatgcctgagggagacactctgtcctcattccctgcccttcctttggttgccatatggaatggccatggaatgcacgaagtcacaatgcaccatccatgagaag

SEQ ID NO: 215489 - DNA, 120 bp, Artificial Sequence
  ENSG00000116218_11 (sequence is synthesized)
acggtgaaatgatgtaatgacagagaaggcagacaacatgtttccgtgactcatctagtcagagcaattatgggaaacagctttggtcaacattctactttggaaagaattttgagtcta

SEQ ID NO: 215490 - DNA, 120 bp, Artificial Sequence
  ENSG00000116218_12 (sequence is synthesized)
gatgtggttaaattttgacttctgggaacttggttcagatgtccctttcactgtatgtcctctgacccctttggcaaggttgccacagctcccacagcccttcctacaagcacctatcat

SEQ ID NO: 215491 - DNA, 120 bp, Artificial Sequence
  ENSG00000116218_13 (sequence is synthesized)
tgggcttgtcacactctattgctcttctgtcccaaagatgcagtcttctctccaatgatactaccaagtcttagttttcctcaaccacactcaatctttttgctccaccctgaattcctc

SEQ ID NO: 215492 - DNA, 120 bp, Artificial Sequence
  ENSG00000116218_14 (sequence is synthesized)
acacctaaccctgatagttacctaaagtgacacttaaatgtttcagagtgaatgcaaaaaagagagatgtacttggagtcggatatacaatttatccctaattaaagcatttaaaaggaa

SEQ ID NO: 215493 - DNA, 120 bp, Artificial Sequence
  ENSG00000116221_0 (sequence is synthesized)
ctcattcgttcccagcaggccctgcgcgcggcaacatggcggggtccaggtggaggtcttgaggctatcagatcggtatggcattggcgtccgggcccgcaaggcgggcgctagctggct

SEQ ID NO: 215494 - DNA, 120 bp, Artificial Sequence
  ENSG00000116221_1 (sequence is synthesized)
ccgggcagctcggccttgggggcttcggggccccgagacgcggggcgtatgagtggggcgtgcgctccacgcggaagtcggagcctcctcccctggatagggtgtacgagatccctggac

SEQ ID NO: 215495 - DNA, 120 bp, Artificial Sequence
  ENSG00000116221_2 (sequence is synthesized)
tggagcccatcacctttgcggggaagatgcacttcgtgccctggctggcgcggccgatctttccgccctgggaccgcggctacaaggacccaaggttctaccgctcgccccctcttcacg

SEQ ID NO: 215496 - DNA, 120 bp, Artificial Sequence
  ENSG00000116221_3 (sequence is synthesized)
agcatccgctgtacaaagaccaggcctgctatatctttcaccaccgttgccgccttctcgagggtgtaaagcaggccctctggctcaccaagaccaagttaatagaaggccttcccgaga

SEQ ID NO: 215497 - DNA, 120 bp, Artificial Sequence
  ENSG00000116221_4 (sequence is synthesized)
aagtgcttagccttgttgatgatccaaggaaccacatagagaaccaagacgagtgcgttctgaatgtgatctctcacgcccgtctctggcagaccactgaggaaatccccaagagagaga

SEQ ID NO: 215498 - DNA, 120 bp, Artificial Sequence
  ENSG00000116221_5 (sequence is synthesized)
cctactgcccggtcatcgtggacaacctaatacagctgtgtaaatctcagattctcaagcatccttctctggccaggaggatctgtgtccaaaactccacgttttctgctacctggaacc

SEQ ID NO: 215499 - DNA, 120 bp, Artificial Sequence
  ENSG00000116221_6 (sequence is synthesized)
actgagcactaaggatcctctgcccaccatcgcctccagagaggagattgaagctactaagaatcatgttctagagaccttctaccccatatcacccatcatcgatcttcatgaatgcaa

SEQ ID NO: 215500 - DNA, 120 bp, Artificial Sequence
  ENSG00000116221_7 (sequence is synthesized)
tatttatgatgtgaaaaatgacacaggattccaggaaggctatccttacccctatccccataccctgtacttactggacaaagccaatttacgaccacaccgccttcaaccagatcagct

SEQ ID NO: 215501 - DNA, 120 bp, Artificial Sequence
  ENSG00000116221_8 (sequence is synthesized)
gcgggccaagatgatcctgtttgcttttggcagtgccctggctcaggcccggctcctctatgggaatgatgccaaggtcttggagcagcccgtggtggtgcagagcgtgggcacggatgg

SEQ ID NO: 215502 - DNA, 120 bp, Artificial Sequence
  ENSG00000116221_9 (sequence is synthesized)
acgtgtcttccatttcctagtgtttcaactgaataccacagacctggactgtaacgagggtgtcaagaatttggcctgggtggactcagaccagctcctctatcagcatttttggtgtct

SEQ ID NO: 215503 - DNA, 120 bp, Artificial Sequence
  ENSG00000116221_10 (sequence is synthesized)
cccagtgatcaaaaagagagtggttgtggaacctgttggcccagttggtttcaagccagagacattcagaaagtttttagctctatatttgcatggtgctgcgtgagcggaggacccctc

SEQ ID NO: 215504 - DNA, 120 bp, Artificial Sequence
  ENSG00000116221_11 (sequence is synthesized)
tgaatcctgaaacccctcttgcctctcttccacggaagagggcctgggccccgtggagcctcagtgcccgtttggcctgctgctctcgctgacaataaagagcccttgcgttgcactgaa

SEQ ID NO: 215505 - DNA, 120 bp, Artificial Sequence
  ENSG00000116221_12 (sequence is synthesized)
aggatacacctgggattgtgtttgagctcaaggagaatggcacagtgagatgctatgggccgaaacatgaaaaccacagtcaacagggatctcctgaagatttaaggtgctggcactgac

SEQ ID NO: 215506 - DNA, 120 bp, Artificial Sequence
  ENSG00000116221_13 (sequence is synthesized)
ctggtttggtttatagaagaaatctccgaaaggtcctcgccagaaagctgtgtctcctactctccaggactcaacataccgggacatcagccccatctggtagcactggaagcaaacaca

SEQ ID NO: 215507 - DNA, 120 bp, Artificial Sequence
  ENSG00000116221_14 (sequence is synthesized)
tcaaaaagagagtggttgtgaaaaataaaagacattccagcggaccaaaatgtgtttgcaagacaagaaatggaaaatggcttttagacggcccccaaatatttaaagtgagatggatac

SEQ ID NO: 215508 - DNA, 120 bp, Artificial Sequence
  ENSG00000116221_15 (sequence is synthesized)
cttccctcccaacccaccttccgccaaggccatcgcgactccacaagaacacagaatttgcaggcccaggaaaagaaggcagacgcctcaaacacaaaacatcttgttatgcaccaggaa

SEQ ID NO: 215509 - DNA, 120 bp, Artificial Sequence
  ENSG00000116221_16 (sequence is synthesized)
caaaaactgtgcccaagaagtcaccttgcattttgtaatcagtgtaataaactccaacccacattccccaaacatgtcaggaagggctgcggaaaaaagatgtccctttaataaaacgtt

SEQ ID NO: 215510 - DNA, 120 bp, Artificial Sequence
  ENSG00000116221_17 (sequence is synthesized)
gcagcggaacttgagggcctcagccagcctcccgcccagtacaggctccccagccagtgagctggtgaaggagcaggagcacgctgcagggagagtgctgcgccgggtcatgctggatag

SEQ ID NO: 215511 - DNA, 120 bp, Artificial Sequence
  ENSG00000116221_18 (sequence is synthesized)
cgaaaccccacgagaggaacttccagcagcagacttttggaaatgaaatggtgacattcccattgtgaacgtatttctcactgtctcatatatttaaattcctggttgttccattcaaaa

SEQ ID NO: 215512 - DNA, 80 bp, Artificial Sequence
  ENSG00000116237_0 (sequence is synthesized)
gccgcccggcgccatggcgggctgcgcggcgcgggctccgccgggctctgaggcgcgtctcagcctcgccaccttcctgc

SEQ ID NO: 215513 - DNA, 120 bp, Artificial Sequence
  ENSG00000116237_1 (sequence is synthesized)
tgggcgcctcggtgctcgcgctgccgctgctcacgcgcgccggcctgcagggccgcaccgggctggcgctctacgtggccgggctcaacgcgctgctgctgctgctctatcggccgcctc

SEQ ID NO: 215514 - DNA, 120 bp, Artificial Sequence
  ENSG00000116237_2 (sequence is synthesized)
gctaccagatagccatccgagcttgtttcctggggtttgtgttcggctgcggcacgctgctaagttttagccagtcttcttggagtcactttggctggtacatgtgctccctgtcattgt

SEQ ID NO: 215515 - DNA, 120 bp, Artificial Sequence
  ENSG00000116237_3 (sequence is synthesized)
tccactattctgaatacttggtgacagcagtcaataatcccaaaagtctgtccttggattcctttctcctgaatcacagcctggagtatacagtagctgctctttcttcttggttagagt

SEQ ID NO: 215516 - DNA, 120 bp, Artificial Sequence
  ENSG00000116237_4 (sequence is synthesized)
tcacacttgaaaatatcttttggccagaactgaagcagattacctggctcagtgtcacagggctgctgatggtggtcttcggagaatgtctgaggaaggcggccatgtttacagctggct

SEQ ID NO: 215517 - DNA, 120 bp, Artificial Sequence
  ENSG00000116237_5 (sequence is synthesized)
ccaatttcaaccacgtggtacagaatgaaaaatcagatacacatactctggtgaccagtggagtgtacgcttggtttcggcatccttcttacgtcgggtggttttactggagtattggaa

SEQ ID NO: 215518 - DNA, 120 bp, Artificial Sequence
  ENSG00000116237_6 (sequence is synthesized)
ctcaggtgatgctgtgtaaccccatctgcggcgtcagctatgccctgacagtgtggcgattcttccgcgatcgaacagaagaagaagaaatctcactaattcacttttttggagaggagt

SEQ ID NO: 215519 - DNA, 120 bp, Artificial Sequence
  ENSG00000116237_7 (sequence is synthesized)
acctggagtataagaagagggtgcccacgggcctgcctttcataaagggggtcaaggtggacctgtgacgggcagtggccccggtgaccttggggcctccgaccctgtgcagcctgggac

SEQ ID NO: 215520 - DNA, 120 bp, Artificial Sequence
  ENSG00000116237_8 (sequence is synthesized)
aaaactgtttccggttggccgctgccacatggattttcttaatcgttttatgtcattagtcactcttctggaatgtcactcaagaccaagcggtcagaaggcctgaggacccaaggcccc

SEQ ID NO: 215521 - DNA, 120 bp, Artificial Sequence
  ENSG00000116237_9 (sequence is synthesized)
actggagcagtctgtccttatgccgaatcaaggcggaacatgggtgaaagacgagtaaggggcaaatcacagcaatattccacagcgccctccagagttacctggggaggaccgaggcca

SEQ ID NO: 215522 - DNA, 120 bp, Artificial Sequence
  ENSG00000116237_10 (sequence is synthesized)
cacgccactgcccccgaggccagagtgtaagtaaaggataaccaggactcgctgggagagatggactctgtcctcagcaacactccacagcagaaaggggtagcaggtaccccttcttat

SEQ ID NO: 215523 - DNA, 120 bp, Artificial Sequence
  ENSG00000116237_11 (sequence is synthesized)
cagcggtaaaaatgcatttacaacctttcatttaaccgaaaaacacagaccgctttaacctctttatttctgtcccccactgcatgaacatctatacaattttaaaaatacttcctcata

SEQ ID NO: 215524 - DNA, 120 bp, Artificial Sequence
  ENSG00000116237_12 (sequence is synthesized)
ggatgctttggcccttcatctatttaatcatagctacatacctattttttataagtagcagtacacattcaaaggggtattcctagctcaatgcttggtgttctagttcaacttttatcc

SEQ ID NO: 215525 - DNA, 120 bp, Artificial Sequence
  ENSG00000116237_13 (sequence is synthesized)
tgcagcaagtaagcctagataactctacacgatttggctgagtggctttgtgtgaccgtggccccaggccaaggggatcatggccctggctggctttcccgggggtctcagctcctgttg

SEQ ID NO: 215526 - DNA, 120 bp, Artificial Sequence
  ENSG00000116237_14 (sequence is synthesized)
tcagtgataggcggctcaaaggagcatcagtttcttttgatccaagaagtgcttactgaatgcctgccctgtgcgtggccttaaacattgagaagtgctgctctccgtttatttgggatt

SEQ ID NO: 215527 - DNA, 120 bp, Artificial Sequence
  ENSG00000116237_15 (sequence is synthesized)
tgattctcattttaccatagcttatattctcaatttcaatgccagtctcagaactcttgttttctgtgttctgttctcaaaattacattgtccctcatgtcatttcaaactgttttccaa

SEQ ID NO: 215528 - DNA, 120 bp, Artificial Sequence
  ENSG00000116237_16 (sequence is synthesized)
agggatttgagcatatacaactacaaatccaagcagattgactctcaaaaataatcttaaatactgcaaatagtcccaactaagattcagtcagtatgtttgttttgcaagtttgggaga

SEQ ID NO: 215529 - DNA, 120 bp, Artificial Sequence
  ENSG00000116237_17 (sequence is synthesized)
gtaagttggctttgagtcacacatcgaagctttaagaggtgagacgctggcttcattctggactagacaggaacttggcctcagcgtgagatcctgccatgcagtgttgcggtggcactg

SEQ ID NO: 215530 - DNA, 120 bp, Artificial Sequence
  ENSG00000116237_18 (sequence is synthesized)
aagaagtgtgaatgtgaaggcggcgtcggcgcggggccagagcaccactctgctgccccaccacgcggcctgtgaggagccactaaacctttccgtgcctagacctccccatctgtggaa

SEQ ID NO: 215531 - DNA, 120 bp, Artificial Sequence
  ENSG00000116237_19 (sequence is synthesized)
gctacacaaaaatgggcagacatttggttaattgtgccagatacctaaaatgtatgttcagaaaagcattttatcaactcagaaatatgacttatttctagatttcatggcttaatgaat

SEQ ID NO: 215532 - DNA, 120 bp, Artificial Sequence
  ENSG00000116237_20 (sequence is synthesized)
gacttatttctagatttcatggcttaatgaattttttcattgttatatataccaaagaggcttacgggttcattgattggtttgaaaaccagacagacggccgggcgcggtggctcacgc

SEQ ID NO: 215533 - DNA, 120 bp, Artificial Sequence
  ENSG00000116237_21 (sequence is synthesized)
ggcggaggttgcagtgagttgagatcgggcctttgcacttcagtctgggcaacagggcgagactccatctcaaaaaacaacaacaacaacaaaaaaaaccggacggacttgcccatcggc

SEQ ID NO: 215534 - DNA, 120 bp, Artificial Sequence
  ENSG00000116237_22 (sequence is synthesized)
aacaacaaaaaaaaccggacggacttgcccatcggccctcacgacacgcgtgcagtgggactctagccaaggcggtggccgagccatcattacaatttttctggagtaaaggatccacgg

SEQ ID NO: 215535 - DNA, 120 bp, Artificial Sequence
  ENSG00000116237_23 (sequence is synthesized)
tgggacatcaactggcacttactctgtttaggaacttgagttgaatcatttctaaacttgtcctttagaccacgcctagggcagcaaattccacttcctagaactgcaaaccgggagagg

SEQ ID NO: 215536 - DNA, 120 bp, Artificial Sequence
  ENSG00000116237_24 (sequence is synthesized)
atgtagttagattctggcatcctgccccggctctttgagggaaaagttctttcccctgctctaagtagggcgggcccagcctccattcccattgggagccatgaagttgtcttgttgata

SEQ ID NO: 215537 - DNA, 120 bp, Artificial Sequence
  ENSG00000116237_25 (sequence is synthesized)
ggtctagggcagctgttggcagctgctggccttgtggatggtaagctgactgtgttggcatttaatgccatcctccatctgccagaggcccaggaagcccaccttcacaccaggcccacc

SEQ ID NO: 215538 - DNA, 120 bp, Artificial Sequence
  ENSG00000116237_26 (sequence is synthesized)
agctggaaggagcccaggaggcaggtcttagggtttcatggtgaaatgctgtctgacaccagggaaaacttgacgtactctgctttggagaggaattccaggggtagggatggtgggaga

SEQ ID NO: 215539 - DNA, 120 bp, Artificial Sequence
  ENSG00000116237_27 (sequence is synthesized)
acattcccaccctgtttataatcccagagcagaagtcagcaattacttagggataaaagatgaactccattttttttattttcttaagacagtcttgctctgtggcccaggctggaggct

SEQ ID NO: 215540 - DNA, 120 bp, Artificial Sequence
  ENSG00000116237_28 (sequence is synthesized)
caccacgcccagccaagatgaactccttaaggacaggatttggtaagtgattgacttctttttagttccatgatcttgagattatttttagctttataaatttagcagtggcagggcccg

SEQ ID NO: 215541 - DNA, 120 bp, Artificial Sequence
  ENSG00000116237_29 (sequence is synthesized)
tggagaatcaggttaatgaggtaaaggctttctgggtatttgctgccaaggccacatcaccaattttctcgatttaaaaaactgtcaagagatttatttttccattgcaggttttaaagt

SEQ ID NO: 215542 - DNA, 120 bp, Artificial Sequence
  ENSG00000116237_30 (sequence is synthesized)
ggagattctgaagtggaaaataggtactgtcagaacaaagctacctggaaacagcatagagtgaagcctttcgtgagggcttgcaggccgctgctgagtggcagtttacagaagaggtcg

SEQ ID NO: 215543 - DNA, 120 bp, Artificial Sequence
  ENSG00000116237_31 (sequence is synthesized)
cggggtgagcctcttagcaggacagaaaacaaggcagcagcgcacctgccaccccttcacgagctgctccttgagcctaaaaagtaggctttattcatcccttctgttcatttaccaacc

SEQ ID NO: 215544 - DNA, 120 bp, Artificial Sequence
  ENSG00000116237_32 (sequence is synthesized)
tgggggattgatacgaccggggaaaatgttcctaaaccaggaagctgcgttagccgatcaggctttgtaagatctcgccaacagctagctgcttaggagtacccccacgatacgcacagc

SEQ ID NO: 215545 - DNA, 120 bp, Artificial Sequence
  ENSG00000116237_33 (sequence is synthesized)
acaccactgtcccttcactgcactttcttcctgccttaggtagttgggcttgcccaccctagtttgcttttgtagtggtttggcaaggttagaaggcctcggcctctctgtcatgctggg

SEQ ID NO: 215546 - DNA, 120 bp, Artificial Sequence
  ENSG00000116237_34 (sequence is synthesized)
aagtgcctactctctgggccactgctgcagaggccgtggcacttgtcatgggtttggaagacccagccatctgcagcagaggcagcctatcccattgcaaggagaggaactgaacggagt

SEQ ID NO: 215547 - DNA, 120 bp, Artificial Sequence
  ENSG00000116237_35 (sequence is synthesized)
aattattctactcttctttttacataaatgtttatttaaatattctaaattggattttctttcacagatactgattattctttccagttcttaaataaaactgcacttgatttcactcaa

SEQ ID NO: 215548 - DNA, 120 bp, Artificial Sequence
  ENSG00000116251_0 (sequence is synthesized)
cctttctaactccgctgccgccatggctcctgtgaaaaagcttgtggtgaaggggggcaaaaaaaagaagcaagttctgaagttcactcttgattgcacccaccctgtagaagatggaat

SEQ ID NO: 215549 - DNA, 120 bp, Artificial Sequence
  ENSG00000116251_1 (sequence is synthesized)
catggatgctgccaattttgagcagtttttgcaagaaaggatcaaagtgaacggaaaagctgggaaccttggtggaggggtggtgaccatcgaaaggagcaagagcaagatcaccgtgac

SEQ ID NO: 215550 - DNA, 120 bp, Artificial Sequence
  ENSG00000116251_2 (sequence is synthesized)
atccgaggtgcctttctccaaaaggtatttgaaatatctcaccaaaaaatatttgaagaagaataatctacgtgactggttgcgcgtagttgctaacagcaaagagagttacgaattacg

SEQ ID NO: 215551 - DNA, 120 bp, Artificial Sequence
  ENSG00000116251_3 (sequence is synthesized)
ttacttccagattaaccaggacgaagaagaggaggaagacgaggattaaatttcatttatctggaaaattttgtatgagttcttgaataaaacttgggaaccaaaatggtggtttatcct

SEQ ID NO: 215552 - DNA, 120 bp, Artificial Sequence
  ENSG00000116251_4 (sequence is synthesized)
tgtatctctgcagtgtggattgaacagaaaattggaaatcatagtcaaagggcttcccttggttcgccactcatttatttgtaacttgacttctttttttttctgcttaaaaatttcaat

SEQ ID NO: 215553 - DNA, 120 bp, Artificial Sequence
  ENSG00000116251_5 (sequence is synthesized)
tctcgtggtaataccagagtagaaggagagggtgactttaccgaactgacagccattggggaggcagatgcgggtgtggaggtgtgggctgaaggtagtgactgtttgattttaaaaagt

SEQ ID NO: 215554 - DNA, 120 bp, Artificial Sequence
  ENSG00000116251_6 (sequence is synthesized)
gtgactgtcagttgtatctgttgcttttctcaatgattcagggatacaaatgggcttctctcattcattaaaagaaaacgcgacatctttctaagattctctgtgggaaaatgactgtca

SEQ ID NO: 215555 - DNA, 120 bp, Artificial Sequence
  ENSG00000116251_7 (sequence is synthesized)
ataaaatgcgggtttctgggccattcgtcttactttcattttttgattacaaatttctcttgacgcacacaattatgtctgctaatcctcttcttcctagagagagaaactgtgctcctt

SEQ ID NO: 215556 - DNA, 120 bp, Artificial Sequence
  ENSG00000116251_8 (sequence is synthesized)
gtttggggaatcgattgtaaaagtcccaggttctaaattaactaaatgtgtacagaaatgaacgtgtaagtaatgtttctacaggtctttgcaacaaactgtcactttcgtctccagcag

SEQ ID NO: 215557 - DNA, 120 bp, Artificial Sequence
  ENSG00000116251_9 (sequence is synthesized)
agggagctgtaggaatagtgcttccagatgtggtctcccgtgtggggcccagcaatgggggcccctgatgccaagagctctggaggttcttgaaagaggggacacgaaggaggagtgact

SEQ ID NO: 215558 - DNA, 120 bp, Artificial Sequence
  ENSG00000116251_10 (sequence is synthesized)
gggaagcctcccatgccaaggaggtgggaggtgccctggaaatagctgcctcatgccacttaggccatgactggatttaatgtcagtggtgtgccacagtgcagaggctagacaactgaa

SEQ ID NO: 215559 - DNA, 120 bp, Artificial Sequence
  ENSG00000116251_11 (sequence is synthesized)
aggggctaccaaggctgggaaaaaaatgcaattgttgctgtgagtgactttgaaagactctggtgccttgtggtgcccttctgaaattcaaacagtaatgcaaaagtgtctgcattagaa

SEQ ID NO: 215560 - DNA, 120 bp, Artificial Sequence
  ENSG00000116251_12 (sequence is synthesized)
tttacggtgtctaaaattcatgtttttaaaagagcttgcctacagatggtttccacacttgaaattgtgccctgcgagttgcatagctggaagttcaatgctcagtcctaccttggctcc

SEQ ID NO: 215561 - DNA, 120 bp, Artificial Sequence
  ENSG00000116251_13 (sequence is synthesized)
cattaaacatttggtgctctgtggattgagttgaacgtgttgaggctttgcaatttcacttgtgttaaaggctctggcatttttccatttctatgcaaatttctttgaagcagaattgct

SEQ ID NO: 215562 - DNA, 120 bp, Artificial Sequence
  ENSG00000116251_14 (sequence is synthesized)
tgcatatttcttctctgccgtcacagaaagcagagtttctttcaaacttcactgaggcatcagttgctctttggcaatgtcccttaaccatgattattaactaagtttgtggcttgagtt

SEQ ID NO: 215563 - DNA, 120 bp, Artificial Sequence
  ENSG00000116251_15 (sequence is synthesized)
tacaaattctacttgttgcattgatgttcccatgtagtaagtcatttttagtttggttgtgaaaaaaccctgggctgaagttggcatttcagttaaaagaaaaaaagaaactagtcccag

SEQ ID NO: 215564 - DNA, 120 bp, Artificial Sequence
  ENSG00000116251_16 (sequence is synthesized)
atttgaaaacttgtaataaaattgaaactcactggttttctatgtctttttgaactcttgtaatcgagttttgatcatattttctattaaagtggctaacacctggctactcttactgta

SEQ ID NO: 215565 - DNA, 120 bp, Artificial Sequence
  ENSG00000116251_17 (sequence is synthesized)
attaactcatttaatctggagaacactcttaaaaagtagaaaatattaccccagaaagtggtggagctggtatacaaaaccgcgtaggtgctttgttaaggaatgatgcattagtttccc

SEQ ID NO: 215566 - DNA, 120 bp, Artificial Sequence
  ENSG00000116251_18 (sequence is synthesized)
ggtaggaggataaagaagcaagagtggatgacaccagacaggacaggagcaagcaggaagcaaagccccctattgatagagccaaaccgggatcagctggaaagcagaagtgtttgcaga

SEQ ID NO: 215567 - DNA, 120 bp, Artificial Sequence
  ENSG00000116251_19 (sequence is synthesized)
ggcccagcctgatcattatagagccaagaacagcagctggctttggagcttggtcaaccggcttgaggcctgagttgaaagctagacccatcagcacagtctcttctggtgattggactt

SEQ ID NO: 215568 - DNA, 120 bp, Artificial Sequence
  ENSG00000116251_20 (sequence is synthesized)
cgcgatcgccgccgcgcggccccgcgcgccaggcccctgcgctcaccagcaccgcctgctccagccgctcgcagccctgcacgtaagccgattccaggtccacgcagtgtgcccggctct

SEQ ID NO: 215569 - DNA, 120 bp, Artificial Sequence
  ENSG00000116251_21 (sequence is synthesized)
ccctgcagaaggcggcgggtgaggcccgctccagcggcccccagccccctcccctcgcgtcccctgtacgcacttctgcatgtcgcggaagcagcggatgcacaacagcaacttcttgtc

SEQ ID NO: 215570 - DNA, 120 bp, Artificial Sequence
  ENSG00000116251_22 (sequence is synthesized)
ggctccgcgtgaggcctcggctccaggggaggcacgtgggcctcgccgagcccggcatctacccaggctcgctggggacggcgccctgcagcgtcctgctggggtgggctggcaggtcgg

SEQ ID NO: 215571 - DNA, 120 bp, Artificial Sequence
  ENSG00000116251_23 (sequence is synthesized)
taggggctagcggggagctggagcctggagactgcggtctgggccggccactggtcctcggaccccggccgggggcctgattacctgggtggagggcggggaagaagaacgggacctgct

SEQ ID NO: 215572 - DNA, 120 bp, Artificial Sequence
  ENSG00000116251_24 (sequence is synthesized)
accctggggagccgcgcattcggaagtccacggccaagactcggggacgaatccgcggaagggcggcttggtcggcgtgctttcggagaggaggcctgggtttgaggagctttttagcgt

SEQ ID NO: 215573 - DNA, 120 bp, Artificial Sequence
  ENSG00000116251_25 (sequence is synthesized)
ccccagaggaaattagtttatcagggcgcactgtacagacccaaacgggtgttgcagtggtgtagggagaaggctctcattgcattctcctttagctatgctgggactgggctgtgcggc

SEQ ID NO: 215574 - DNA, 120 bp, Artificial Sequence
  ENSG00000116251_26 (sequence is synthesized)
gccctcctcctaggttatttgagaaagttgtttttccgtgttcttcgtcccaagatcctacttttcctcttttgttgggactccctggttaacatttccggttcttctgctctttctgtc

SEQ ID NO: 215575 - DNA, 120 bp, Artificial Sequence
  ENSG00000116251_27 (sequence is synthesized)
tggttgggcttttgaatgccttttggtttaaaaccttgatggagaagtatcaagcccgttgtgggtaggtctcttgattgattgtgtgtgttcggaatagatcttaaagtacccctctta

SEQ ID NO: 215576 - DNA, 120 bp, Artificial Sequence
  ENSG00000116251_28 (sequence is synthesized)
gattattactgcgaagagacgttgtaaaaaataaatcagtgatttttgtagtggccaaatgtttgaaaagttgatccagttaacacaagttttagatgaagttcttttaaacatgaaggg

SEQ ID NO: 215577 - DNA, 120 bp, Artificial Sequence
  ENSG00000116251_29 (sequence is synthesized)
aggtaagatgtgtttttggaaaagtctatttagttctgcagagcttttaaacgtgaaagtacaggttggtacgatgcacaagtgcattaatggtgtcaagtttgtagagagataagatta

SEQ ID NO: 215578 - DNA, 120 bp, Artificial Sequence
  ENSG00000116251_30 (sequence is synthesized)
agtgttgtaataagattctaggttttagccttaaccttgtccaagctggagtggacaggcacctagaatactttgcaactcccttcatgagaaggtggatgagacaggattaagggagat

SEQ ID NO: 215579 - DNA, 120 bp, Artificial Sequence
  ENSG00000116251_31 (sequence is synthesized)
gagctaagacggatcaggaccctactctgaacatgtaggacaaggattgatttcatatgaaaattgtgggtatgcaaggcattttgtatgcctgcactctaattttggaaaaatagtatt

SEQ ID NO: 215580 - DNA, 120 bp, Artificial Sequence
  ENSG00000116251_32 (sequence is synthesized)
tttttgaaattgggaatgttagggcaaacaaaaggaagtgttcattttattgtggttcataaactaagagaccttcatgcctgtagagattggggagactggaaagtttgagtgagtcaa

SEQ ID NO: 215581 - DNA, 120 bp, Artificial Sequence
  ENSG00000116251_33 (sequence is synthesized)
gagtgctagaatgatttccccatcaaaagggcatgaccccaggccccaagcttgtacagcagcatctgccccattatacctctggcactcaggcagtgatgcctcttggccctctggcaa

SEQ ID NO: 215582 - DNA, 120 bp, Artificial Sequence
  ENSG00000116251_34 (sequence is synthesized)
agggagcacacttccgttagttttgtatttgtatggacttttatacctatgacgtttctggttctgttaatcttgtttttccgactgactgaaacttcatctctgttatcatttgtgtat

SEQ ID NO: 215583 - DNA, 120 bp, Artificial Sequence
  ENSG00000116254_0 (sequence is synthesized)
gccaccctcggccggctgcgggactcgggctgcggggcgcggtgggaggagcgcccgggctttgcggggagcaggctaaggcggccgagagaaaggggggtcgagacgggggggtggagg

SEQ ID NO: 215584 - DNA, 120 bp, Artificial Sequence
  ENSG00000116254_1 (sequence is synthesized)
gagcaggctaaggcggccgagagaaaggggggtcgagacgggggggtggaggtttgggggggtgggggggcaggcggccgccatcttctcgccgaggccgcctcgcccgccgcgcgcgcc

SEQ ID NO: 215585 - DNA, 120 bp, Artificial Sequence
  ENSG00000116254_2 (sequence is synthesized)
caccgcgcccggcgggagggggggcgcccacctcccctcctccccgcgccgggcatgcggggcccagtgggcaccgaggaggagctgccgcggctgttcgccgaggagatggagaatgag

SEQ ID NO: 215586 - DNA, 120 bp, Artificial Sequence
  ENSG00000116254_3 (sequence is synthesized)
tgaggacgagatgtcagaagaagaagatggtggtcttgaagccttcgatgactttttccctgtggagcccgtgagccttcctaagaagaagaaacccaagaagctcaaggaaaacaagtg

SEQ ID NO: 215587 - DNA, 120 bp, Artificial Sequence
  ENSG00000116254_4 (sequence is synthesized)
taaagggaagcggaagaagaaagaggggagcaatgatgagctatcagagaatgaagaggatctggaagagaagtcggagagtgaaggcagtgactactccccgaataaaaagaagaagaa

SEQ ID NO: 215588 - DNA, 120 bp, Artificial Sequence
  ENSG00000116254_5 (sequence is synthesized)
gaaactcaaggacaagaaggagaaaaaagccaagcgaaaaaagaaggatgaggatgaggatgataatgatgatggatgcttaaaggagcccaagtcctcggggcagctcatggccgagtg

SEQ ID NO: 215589 - DNA, 120 bp, Artificial Sequence
  ENSG00000116254_6 (sequence is synthesized)
gggcctggacgacgtggactacctgttctcggaggaggattaccacacgctgaccaactacaaggccttcagccagttcctcaggccactcattgccaagaagaacccgaagatccccat

SEQ ID NO: 215590 - DNA, 120 bp, Artificial Sequence
  ENSG00000116254_7 (sequence is synthesized)
gtccaaaatgatgaccgtcctgggtgccaagtggcgggagttcagcgccaacaaccccttcaagggcagctccgcggcagcagcggcggcggcggtggctgcggctgtagagacggtcac

SEQ ID NO: 215591 - DNA, 120 bp, Artificial Sequence
  ENSG00000116254_8 (sequence is synthesized)
catctcccctccgctagccgtcagccccccgcaggtgccccagcctgtgcctatccgcaaggccaagaccaaggagggcaaagggcctggagtgaggaagaagatcaaaggctccaaaga

SEQ ID NO: 215592 - DNA, 120 bp, Artificial Sequence
  ENSG00000116254_9 (sequence is synthesized)
tgggaagaaaaagggcaaagggaaaaagacggccgggctcaagttccgcttcggggggatcagcaacaagaggaagaaaggctcctcgagtgaagaagatgagagggaggagtcggactt

SEQ ID NO: 215593 - DNA, 120 bp, Artificial Sequence
  ENSG00000116254_10 (sequence is synthesized)
cgacagcgccagcatccacagtgcctccgtgcgctccgaatgctctgcagccctgggcaagaagagcaagaggaggcgcaagaagaagaggattgatgatggtgacggctatgagacaga

SEQ ID NO: 215594 - DNA, 120 bp, Artificial Sequence
  ENSG00000116254_11 (sequence is synthesized)
ccaccaggattactgtgaggtgtgccagcagggtggggagatcatcctgtgcgacacctgcccgagggcctaccatctcgtatgcctggacccagagctggagaaggctcccgagggcaa

SEQ ID NO: 215595 - DNA, 120 bp, Artificial Sequence
  ENSG00000116254_12 (sequence is synthesized)
gtggagctgcccccactgtgagaaggaggggatccagtgggagccgaaggacgacgacgatgaagaggaggagggcggctgcgaggaggaggaggacgaccacatggagttctgccgcgt

SEQ ID NO: 215596 - DNA, 120 bp, Artificial Sequence
  ENSG00000116254_13 (sequence is synthesized)
gtgcaaggacgggggcgagctgctctgctgcgacgcctgcccctcctcctaccacctgcattgcctcaacccgccgctgcccgagatcccaaacggtgaatggctctgcccgcgctgtac

SEQ ID NO: 215597 - DNA, 120 bp, Artificial Sequence
  ENSG00000116254_14 (sequence is synthesized)
ttgccccccactgaagggcaaagtccagcggattctacactggaggtggacggagccccctgcccccttcatggtggggctgccggggcctgacgtggagcccagcctccctccacctaa

SEQ ID NO: 215598 - DNA, 120 bp, Artificial Sequence
  ENSG00000116254_15 (sequence is synthesized)
gcccctggagggcatccctgagagagagttctttgtcaagtgggcagggctgtcctactggcattgctcctgggtgaaggagctacagctggagctgtaccacacggtgatgtatcgcaa

SEQ ID NO: 215599 - DNA, 120 bp, Artificial Sequence
  ENSG00000116254_16 (sequence is synthesized)
ctaccaaagaaagaacgacatggatgagccgcccccctttgactacggctctggggatgaagacggcaagagcgagaagaggaagaacaaggaccccctctatgccaagatggaggagcg

SEQ ID NO: 215600 - DNA, 120 bp, Artificial Sequence
  ENSG00000116254_17 (sequence is synthesized)
cttctaccgctatggcatcaagccagagtggatgatgattcaccgaatcctgaaccatagctttgacaagaagggggatgtgcactacctgatcaagtggaaagacctgccctacgacca

SEQ ID NO: 215601 - DNA, 120 bp, Artificial Sequence
  ENSG00000116254_18 (sequence is synthesized)
gtgcacctgggagatcgatgacatcgacatcccctactacgacaacctcaagcaggcctactggggccacagggagctgatgctgggagaagacaccaggctgcccaagaggctgctcaa

SEQ ID NO: 215602 - DNA, 120 bp, Artificial Sequence
  ENSG00000116254_19 (sequence is synthesized)
gaagggcaagaagctgagggacgacaagcaggagaagccgccggacacgcccattgtggaccccacggtcaagttcgacaagcagccatggtacatcgactccacaggcggcacactgca

SEQ ID NO: 215603 - DNA, 120 bp, Artificial Sequence
  ENSG00000116254_20 (sequence is synthesized)
cccgtaccagctggagggcctcaactggctgcgcttctcttgggcccagggcactgacaccatcctggccgatgagatgggtctgggcaagacggtgcagaccatcgtgttcctttactc

SEQ ID NO: 215604 - DNA, 120 bp, Artificial Sequence
  ENSG00000116254_21 (sequence is synthesized)
cctctacaaggagggccactccaaagggccctacctggttagcgcgcccctctccaccatcatcaactgggaacgcgagtttgagatgtgggcgcccgacttctacgtggtcacctacac

SEQ ID NO: 215605 - DNA, 120 bp, Artificial Sequence
  ENSG00000116254_22 (sequence is synthesized)
gggggacaaggagagccgctcggtgattcgggagaacgagttttcctttgaggacaacgccattcggagtgggaagaaggtattccgtatgaagaaagaagtgcagatcaaattccacgt

SEQ ID NO: 215606 - DNA, 120 bp, Artificial Sequence
  ENSG00000116254_23 (sequence is synthesized)
gctgctcacctcctatgagctcatcaccattgaccaggccatcctgggctccatcgagtgggcctgcctggtggtagatgaggcccaccgcctcaagaacaaccagtccaagttttttag

SEQ ID NO: 215607 - DNA, 120 bp, Artificial Sequence
  ENSG00000116254_24 (sequence is synthesized)
ggtcttaaacagctacaagattgattacaagctgctgctgacagggaccccccttcagaacaacctggaggagctgttccatctcctcaacttcctgactccagagaggttcaacaacct

SEQ ID NO: 215608 - DNA, 120 bp, Artificial Sequence
  ENSG00000116254_25 (sequence is synthesized)
ggagggcttcctggaggagtttgctgacatctccaaggaagaccagatcaagaagctgcatgacctgctggggccgcacatgctcaggcggctcaaggctgacgtgttcaagaacatgcc

SEQ ID NO: 215609 - DNA, 120 bp, Artificial Sequence
  ENSG00000116254_26 (sequence is synthesized)
ggccaagaccgagctcattgtccgggtggagctgagccagatgcagaagaagtactacaagttcatcctcacacggaactttgaggcactgaactccaaggggggcgggaaccaagtatc

SEQ ID NO: 215610 - DNA, 120 bp, Artificial Sequence
  ENSG00000116254_27 (sequence is synthesized)
gctgctcaacatcatgatggacctgaaaaagtgctgcaaccacccctacctcttccctgtggctgccgtggaggcccctgtcttgcccaatggctcctacgatggaagctccctggtcaa

SEQ ID NO: 215611 - DNA, 120 bp, Artificial Sequence
  ENSG00000116254_28 (sequence is synthesized)
gtcttcagggaagctcatgctgctacagaagatgctgaagaaactgcgggatgaggggcaccgtgtgctcatcttctcccagatgaccaagatgctggacctcctggaggacttcctgga

SEQ ID NO: 215612 - DNA, 120 bp, Artificial Sequence
  ENSG00000116254_29 (sequence is synthesized)
gtacgaaggctacaagtatgagcggattgatggtggcatcaccgggggcctccggcaggaggcaatcgacagattcaatgcccccggggcccagcagttctgcttcctcctctcaacccg

SEQ ID NO: 215613 - DNA, 120 bp, Artificial Sequence
  ENSG00000116254_30 (sequence is synthesized)
ggcaggtggtctgggcatcaacctggccacggcggacactgtcatcatctacgactcggactggaacccgcacaatgacatccaggccttcagccgcgcccaccgcatcggccagaacaa

SEQ ID NO: 215614 - DNA, 120 bp, Artificial Sequence
  ENSG00000116254_31 (sequence is synthesized)
gaaggtgatgatctaccgcttcgtgactcgggcctcggtggaggagcgcatcacgcaggtggccaagcgcaagatgatgctcacccacctggtggtgcggcccggcctcggctccaagtc

SEQ ID NO: 215615 - DNA, 120 bp, Artificial Sequence
  ENSG00000116254_32 (sequence is synthesized)
ggggtccatgaccaagcaggagctggacgacatcctcaagttcggcacggaggaactcttcaaggacgacgtggagggcatgatgtctcagggccagaggccggtcacacccatccctga

SEQ ID NO: 215616 - DNA, 120 bp, Artificial Sequence
  ENSG00000116254_33 (sequence is synthesized)
tgtccagtcctccaaaggggggaacttggccgccagtgcaaagaagaagcacggtagcaccccgccaggtgacaacaaggacgtggaggacagcagtgtgatccactatgacgatgcggc

SEQ ID NO: 215617 - DNA, 120 bp, Artificial Sequence
  ENSG00000116254_34 (sequence is synthesized)
catctccaagctgctggaccggaaccaggacgctacagatgacacggagctacagaacatgaacgagtacctgagctccttcaaggtggcgcagtacgtggtgcgcgaggaggacggcgt

SEQ ID NO: 215618 - DNA, 120 bp, Artificial Sequence
  ENSG00000116254_35 (sequence is synthesized)
ggaggaggtggagcgggaaatcatcaagcaggaggagaacgtggaccccgactactgggagaagctgctgcggcaccactatgagcagcagcaggaggacctggcccgcaacctgggcaa

SEQ ID NO: 215619 - DNA, 120 bp, Artificial Sequence
  ENSG00000116254_36 (sequence is synthesized)
gggcaagcgcatccgcaagcaggtcaactacaacgatgcctcccaggaggaccaggagtggcaggatgagctctctgataaccagtcagaatattccattggctctgaggatgaggatga

SEQ ID NO: 215620 - DNA, 120 bp, Artificial Sequence
  ENSG00000116254_37 (sequence is synthesized)
ggactttgaagagaggccggaagggcagagtggacgacgacaatcccggaggcagctgaagagtgacagggacaagcccctgcccccgcttctcgcccgagttggtggcaacatcgaggt

SEQ ID NO: 215621 - DNA, 120 bp, Artificial Sequence
  ENSG00000116254_38 (sequence is synthesized)
gctgggcttcaatgcccgacagcggaaggcctttctgaacgccatcatgcgctggggcatgcccccgcaggacgccttcaactcccactggctggtgcgggaccttcgagggaagagcga

SEQ ID NO: 215622 - DNA, 120 bp, Artificial Sequence
  ENSG00000116254_39 (sequence is synthesized)
gaaggagtttagagcctatgtgtccctcttcatgcggcacctgtgtgagccgggggcggatggtgcagagaccttcgcagacggcgtgccccgggagggcctctccaggcagcacgtgct

SEQ ID NO: 215623 - DNA, 120 bp, Artificial Sequence
  ENSG00000116254_40 (sequence is synthesized)
gacccgcatcggggtcatgtcactagttaggaagaaggttcaggagtttgagcatgtcaacgggaagtacagcaccccagacttgatccctgaggggcccgaggggaagaagtcgggcga

SEQ ID NO: 215624 - DNA, 120 bp, Artificial Sequence
  ENSG00000116254_41 (sequence is synthesized)
tcggaccccaacacaccagtgcccgccagccctgcccacctcctgccagccccgctgggcctgccagacaaaatggaagcccagctgggctacatggatgagaaagaccccggggcacag

SEQ ID NO: 215625 - DNA, 120 bp, Artificial Sequence
  ENSG00000116254_42 (sequence is synthesized)
aagccaaggcagcccctggaagtccaggcccttccagccgccttggatagagtggagagtgaggacaagcacgagagcccagccagcaaggagagagcccgagaggagcggccagaggag

SEQ ID NO: 215626 - DNA, 120 bp, Artificial Sequence
  ENSG00000116254_43 (sequence is synthesized)
acggagaaggccccgccctccccggagcagctgccgagagaggaggtgcttcctgagaaggagaagatcctggacaagctggagctgagcttgatccacagcagaggggacagttccgaa

SEQ ID NO: 215627 - DNA, 120 bp, Artificial Sequence
  ENSG00000116254_44 (sequence is synthesized)
ctcaggccagatgacaccaaggctgaggagaaggagcccattgaaacacagcaaaatggtgacaaagaggaagatgacgaggggaagaaggaggacaagaaggggaaattcaagttcatg

SEQ ID NO: 215628 - DNA, 120 bp, Artificial Sequence
  ENSG00000116254_45 (sequence is synthesized)
ttcaacatcgcggacgggggcttcacggagttgcacacgctgtggcagaacgaggagcgggctgctgtatcctctgggaaaatctacgacatctggcaccggcgccatgactactggctg

SEQ ID NO: 215629 - DNA, 120 bp, Artificial Sequence
  ENSG00000116254_46 (sequence is synthesized)
ctggcgggcatcgtgacgcacggctacgcccgctggcaggacatccagaatgacccacggtacatgatcctcaacgagcccttcaagtctgaggtccacaagggcaactacctggagatg

SEQ ID NO: 215630 - DNA, 120 bp, Artificial Sequence
  ENSG00000116254_47 (sequence is synthesized)
aagaacaagttcctggcccgcaggtttaagctgctggagcaggcgttggtcattgaggagcagctccggagggccgcgtacctgaacatgacgcaggaccccaaccaccccgccatggcc

SEQ ID NO: 215631 - DNA, 120 bp, Artificial Sequence
  ENSG00000116254_48 (sequence is synthesized)
ctcaacgcccgcctggctgaagtggagtgcctcgccgagagccaccagcacctgtccaaggagtcccttgctgggaacaagcctgccaatgccgtcctgcacaaggtcctgaaccagctg

SEQ ID NO: 215632 - DNA, 120 bp, Artificial Sequence
  ENSG00000116254_49 (sequence is synthesized)
gaggagctgctgagcgacatgaaggccgacgtgacccggctgccatccatgctgtcccgcatccccccggtggccgcccggctgcagatgtcggagcgcagcatcctgagccgcctgacc

SEQ ID NO: 215633 - DNA, 120 bp, Artificial Sequence
  ENSG00000116254_50 (sequence is synthesized)
aaccgcgccggggaccccaccatccagcagggcgctttcggctcctcccagatgtacagcaacaactttgggcccaacttccggggccctggaccgggagggattgtcaactacaaccag

SEQ ID NO: 215634 - DNA, 120 bp, Artificial Sequence
  ENSG00000116254_51 (sequence is synthesized)
atgcccctggggccctatgtgaccgatatctagccgtcctcgagacttccctgtgttgcagcgctcatttccagctgagccacgcctgccgggccacctgcccgacccacatgggagaga

SEQ ID NO: 215635 - DNA, 120 bp, Artificial Sequence
  ENSG00000116254_52 (sequence is synthesized)
aaagctgccacctttttaggagccagcgccaccttgggacaaaaagggaaacctagtaatgccatcacatggaggacgaggcccagctcagctgggccagagcccagaagtgccacctca

SEQ ID NO: 215636 - DNA, 120 bp, Artificial Sequence
  ENSG00000116254_53 (sequence is synthesized)
tcataattcaagtgttcttccacacagcgttgcccccacaaccacgccggacgtgccccctcgccaccttttccagacgacttcttagaagagatttcatttatttgtacatcttttgca

SEQ ID NO: 215637 - DNA, 120 bp, Artificial Sequence
  ENSG00000116254_54 (sequence is synthesized)
ctttcctattgaagacttgaacacgtttgtcttgataaaagttggatgacgtatggaagattcgaacctgcagcactgatgtctctttaccgatgggttccagacccaaggtagtcctgg

SEQ ID NO: 215638 - DNA, 120 bp, Artificial Sequence
  ENSG00000116254_55 (sequence is synthesized)
cactgccctgtggactcagcccagctggggaggacatggcgcccggtgccctaggagccctcagtgtcccctacctgacctgtctgcacctgtgtgacagccccttctgatttggccccc

SEQ ID NO: 215639 - DNA, 120 bp, Artificial Sequence
  ENSG00000116254_56 (sequence is synthesized)
tgcccgcttggagcctcccagcaccagacagggcaggtttggggagccgctgtccagccctatggtgagaccctggctgacatttcccctccttcctgccaaggctggaggccgccaggt

SEQ ID NO: 215640 - DNA, 120 bp, Artificial Sequence
  ENSG00000116254_57 (sequence is synthesized)
gtttgctctctccttgtggggaggtggatcctctgccagcaggtgtctgtccccggcccagcgcatcttgaaggccctggactctgttaccagtggggggcctgtggccccggctcttca

SEQ ID NO: 215641 - DNA, 120 bp, Artificial Sequence
  ENSG00000116254_58 (sequence is synthesized)
cagcaggcagaagcgtatgatcccagggagggtgggctggggggggggcagcacttgcctcggagccactgctgcgttgggtttgccttctgccagaggtgtggttaagggcagtgatag

SEQ ID NO: 215642 - DNA, 120 bp, Artificial Sequence
  ENSG00000116254_59 (sequence is synthesized)
ctgcgccccagcaaggagggtcatgggccctgagctggcccaggagaccctggccctgccctgtgccctgggatgcctaccctgcccacctccggaggtggaaccgggctgcccctgggg

SEQ ID NO: 215643 - DNA, 120 bp, Artificial Sequence
  ENSG00000116254_60 (sequence is synthesized)
gcctggacttgtcccattcccctgtccctggaaaggccttcccgggggctttttgcctgaggctgcactcttggaaggcgtggggagagttctgcctggagggggactggacccagtgcc

SEQ ID NO: 215644 - DNA, 120 bp, Artificial Sequence
  ENSG00000116254_61 (sequence is synthesized)
ctctgcagacccctcccagccgcagcaccaagggcttgctgccttgtttcctgccaggagcgccctgacatcccaaaaccatcttcccacatgtgggttgttggaatcccacccactccc

SEQ ID NO: 215645 - DNA, 120 bp, Artificial Sequence
  ENSG00000116254_62 (sequence is synthesized)
ccggaccctgcccctccaagttggggacggagatggggagcaggtcaggccctccctaggcctgtttgtgtgtgatccttctcctggccccaggtcgacctggaaggcgtttctgagtct

SEQ ID NO: 215646 - DNA, 120 bp, Artificial Sequence
  ENSG00000116254_63 (sequence is synthesized)
tgtactgggaccttcccagggaaggtgccttggggtgcagaatcctgggaatgttaggaaagggctgcgtgaaaaacccagctgggcctggggtggaggtgcacacgggctggggctcag

SEQ ID NO: 215647 - DNA, 120 bp, Artificial Sequence
  ENSG00000116254_64 (sequence is synthesized)
ctccttggagagggcctgcctgggactgagggggccagggctgggtcaggattcaccagcttgtgttgcagacactggagcgattgcctggccctccctaagccctatatgcctcactca

SEQ ID NO: 215648 - DNA, 120 bp, Artificial Sequence
  ENSG00000116254_65 (sequence is synthesized)
taatgaggctgtctctgaaccccggagggcgggacctacaagtccttcctcttggcgcattcccacactccagtctggatccaggtctgcaaggccagcccgaccctgacactgcacgtg

SEQ ID NO: 215649 - DNA, 120 bp, Artificial Sequence
  ENSG00000116254_66 (sequence is synthesized)
ggcgtagtggggagcaccctggagtggagatgattgtcagcgggctcacatgttatggttcatccacatgcgtgttgtgtgctctgcggtgcctcctggcaaagggtcctggctcgggtc

SEQ ID NO: 215650 - DNA, 120 bp, Artificial Sequence
  ENSG00000116254_67 (sequence is synthesized)
agaagctcactcccgtgccctcgtccccaaacaagcagtggcaagcactggggttggccctcgttgggagcagtgcccaccttccttggcccacagcagataggtcccgagcagcaggac

SEQ ID NO: 215651 - DNA, 120 bp, Artificial Sequence
  ENSG00000116254_68 (sequence is synthesized)
tggaggcctgtggcggtcagggcaggggtctgtgtctccaccccaagggctgatggtccctcccctgtgcgccttcctctcaggcaggcttgctctgtcccttcctctctgcttccctcc

SEQ ID NO: 215652 - DNA, 120 bp, Artificial Sequence
  ENSG00000116254_69 (sequence is synthesized)
caggcctcgccagggctcccttctcctctgcctggttagactcgggcacccaggaaagcctggccagggctcctttgggcctgggccccctgcactgcctggtccagaaggggtggtgct

SEQ ID NO: 215653 - DNA, 120 bp, Artificial Sequence
  ENSG00000116254_70 (sequence is synthesized)
gtccgtggccagcaccccggggcccgggaggggtgggctactagagtcagagcgggtttggggctgaccagtttgggagaggagaaaagatctgagaatgtccttcttggtttgtcagtc

SEQ ID NO: 215654 - DNA, 120 bp, Artificial Sequence
  ENSG00000116254_71 (sequence is synthesized)
atctctgccaaaagtggtgatggtggtgtccgtatgtttggcgtctttgggctgggtttggtttttgctgctggtagaatcagggtcctcgggcatgaacgcgagcccaaagtgccagtc

SEQ ID NO: 215655 - DNA, 120 bp, Artificial Sequence
  ENSG00000116254_72 (sequence is synthesized)
tgcgattggaaatttccagccactttaagccagtgctgagtagggcttctgcagagccatgtttgagccaaggtcttggaaggcattgccccatgggctcaggtgactcggggtggagtg

SEQ ID NO: 215656 - DNA, 120 bp, Artificial Sequence
  ENSG00000116254_73 (sequence is synthesized)
agcacgtctgcagggccctctcatacacgcctgaggcagaagcagcgtcccccgtgaaagccaccttccgaagctcctgcgttttttgcaaacttggcttcccccaggggcaggctggac

SEQ ID NO: 215657 - DNA, 120 bp, Artificial Sequence
  ENSG00000116254_74 (sequence is synthesized)
tttccctgccccctatgattgaagtcctcctgcttttgggggctgccttcccagagtcccccgggtgctcccctgccgaggtcaggagctgaccaagccttggcccggtgacacctgcag

SEQ ID NO: 215658 - DNA, 120 bp, Artificial Sequence
  ENSG00000116254_75 (sequence is synthesized)
ccctcactcctgtcatcccaggacacttgaggcccaaggaggtggagtggagagtgggctcgggtacatgggagccagaagccagatggacttggtcaagtgtcggtcacttggagcctc

SEQ ID NO: 215659 - DNA, 120 bp, Artificial Sequence
  ENSG00000116254_76 (sequence is synthesized)
cagtgtgcgtcagggtctgtgggcaggggacagggcgtgggtgggggccgaggctggcacgcccctctgccctcaccgtcttggtgacctggcctcggcccctcccccaagtctcttctg

SEQ ID NO: 215660 - DNA, 120 bp, Artificial Sequence
  ENSG00000116254_77 (sequence is synthesized)
tgcaaggcccgcctcggcctcggcagctggttcctgtcctgttttctgtgtctgaaagtttacaggttgtggtgcatcagcccaaactcactggcgttgtgttttttttttctttaattt

SEQ ID NO: 215661 - DNA, 120 bp, Artificial Sequence
  ENSG00000116254_78 (sequence is synthesized)
tcagattttttttttaaacaaagtatttttttaggtgcgataacccagaaagggcccgttgggtgtgtgtgtgtgtcctgaactcctcaagcagcgattggagcccaagcacccctggag

SEQ ID NO: 215662 - DNA, 120 bp, Artificial Sequence
  ENSG00000116254_79 (sequence is synthesized)
aggaagggagggtccccactggcccgtggggtctgagttcaggggtgtggagggagcagactccaccggcccaggcccagctaagagggggccgacccctttccccaggcacagccccag

SEQ ID NO: 215663 - DNA, 120 bp, Artificial Sequence
  ENSG00000116254_80 (sequence is synthesized)
gctggcaaagggagggccctgggctgggtgcaaggcgcgccaggagtcccagccagggtggccccggcgggggcgggtccagctttggaagccaggctcccctgtgagccgtggcttgtc

SEQ ID NO: 215664 - DNA, 120 bp, Artificial Sequence
  ENSG00000116254_81 (sequence is synthesized)
tggtcttcgcccacgggaggctggacagaggctgtagccaacacaatcacctttactttgtactctgtgtgtatgttttggttttctgtgttttaataaatcctttgggaaaggatttaa

SEQ ID NO: 215665 - DNA, 120 bp, Artificial Sequence
  ENSG00000116254_82 (sequence is synthesized)
ctggagtgcagtggcgccatctcggctcatgggagcctttatctcctcggctcaagcgaccctcccacctcagcttcctgaacagaggaggtgcttcctgagaaggagaagatcctggac

SEQ ID NO: 215666 - DNA, 120 bp, Artificial Sequence
  ENSG00000116260_0 (sequence is synthesized)
atccggtgcttgcgtgtggtggtgagcgcagcgccgaggatgaggaggtgcaacagcggctccgggccgccgccgtcgctgctgctgctgctgctgtggctgctcgcggttcccggcgct

SEQ ID NO: 215667 - DNA, 120 bp, Artificial Sequence
  ENSG00000116260_1 (sequence is synthesized)
aacgcggccccgcggtcggcgctctattcgccttccgacccgctgacgctgctgcaggcggacacggtgcgcggcgcggtgctgggctcccgcagcgcctgggccgtggagttcttcgcc

SEQ ID NO: 215668 - DNA, 120 bp, Artificial Sequence
  ENSG00000116260_2 (sequence is synthesized)
tcctggtgcggccactgcatcgccttcgccccgacgtggaaggcgctggccgaagacgtcaaagcctggaggccggccctgtatctcgccgccctggactgtgctgaggagaccaacagt

SEQ ID NO: 215669 - DNA, 120 bp, Artificial Sequence
  ENSG00000116260_3 (sequence is synthesized)
gcagtctgcagagacttcaacatccctggcttcccgactgtgaggttcttcaaggcctttaccaagaacggctcgggagcagtatttccagtggctggtgctgacgtgcagacactgcgg

SEQ ID NO: 215670 - DNA, 120 bp, Artificial Sequence
  ENSG00000116260_4 (sequence is synthesized)
gagaggctcattgacgccctggagtcccatcatgacacgtggcccccagcctgtcccccactggagcctgccaagctggaggagattgatggattctttgcgagaaataacgaagagtac

SEQ ID NO: 215671 - DNA, 120 bp, Artificial Sequence
  ENSG00000116260_5 (sequence is synthesized)
ctggctctgatctttgaaaagggaggctcctacctgggtagagaggtggctctggacctgtcccagcacaaaggcgtggcggtgcgcagggtgctgaacacagaggccaatgtggtgaga

SEQ ID NO: 215672 - DNA, 120 bp, Artificial Sequence
  ENSG00000116260_6 (sequence is synthesized)
aagtttggtgtcaccgacttcccctcttgctacctgctgttccggaatggctctgtctcccgagtccccgtgctcatggaatccaggtccttctataccgcttacctgcagagactctct

SEQ ID NO: 215673 - DNA, 120 bp, Artificial Sequence
  ENSG00000116260_7 (sequence is synthesized)
gggctcaccagggaggctgcccagaccacagttgcaccaaccactgctaacaagatagctcccactgtttggaaattggcagatcgctccaagatctacatggctgacctggaatctgca

SEQ ID NO: 215674 - DNA, 120 bp, Artificial Sequence
  ENSG00000116260_8 (sequence is synthesized)
ctgcactacatcctgcggatagaagtgggcaggttcccggtcctggaagggcagcgcctggtggccctgaaaaagtttgtggcagtgctggccaagtatttccctggccggcccttagtc

SEQ ID NO: 215675 - DNA, 120 bp, Artificial Sequence
  ENSG00000116260_9 (sequence is synthesized)
cagaacttcctgcactccgtgaatgaatggctcaagaggcagaagagaaataaaattccctacagtttctttaaaactgccctggacgacaggaaagagggtgccgttcttgccaagaag

SEQ ID NO: 215676 - DNA, 120 bp, Artificial Sequence
  ENSG00000116260_10 (sequence is synthesized)
gtgaactggattggctgccaggggagtgagccgcatttccggggctttccctgctccctgtgggtcctcttccacttcttgactgtgcaggcagctcggcaaaatgtagaccactcacag

SEQ ID NO: 215677 - DNA, 120 bp, Artificial Sequence
  ENSG00000116260_11 (sequence is synthesized)
gaagcagccaaggccaaggaggtcctcccagccatccgaggctacgtgcactacttcttcggctgccgagactgcgctagccacttcgagcagatggctgctgcctccatgcaccgggtg

SEQ ID NO: 215678 - DNA, 120 bp, Artificial Sequence
  ENSG00000116260_12 (sequence is synthesized)
gggagtcccaacgccgctgtcctctggctctggtctagccacaacagggtcaatgctcgccttgcaggtgcccccagcgaggacccccagttccccaaggtgcagtggccaccccgtgaa

SEQ ID NO: 215679 - DNA, 120 bp, Artificial Sequence
  ENSG00000116260_13 (sequence is synthesized)
ctttgttctgcctgccacaatgaacgcctggatgtgcccgtgtgggacgtggaagccaccctcaacttcctcaaggcccacttctccccaagcaacatcatcctggacttccctgcagct

SEQ ID NO: 215680 - DNA, 120 bp, Artificial Sequence
  ENSG00000116260_14 (sequence is synthesized)
gggtcagctgcccggagggatgtgcagaatgtggcagccgccccagagctggcgatgggagccctggagctggaaagccggaattcaactctggaccctgggaagcctgagatgatgaag

SEQ ID NO: 215681 - DNA, 120 bp, Artificial Sequence
  ENSG00000116260_15 (sequence is synthesized)
tcccccacaaacaccaccccacatgtgccggctgagggacctgaggcaagtcgacccccgaagctgcaccctggcctcagagctgcaccaggccaggagcctcctgagcacatggcagag

SEQ ID NO: 215682 - DNA, 120 bp, Artificial Sequence
  ENSG00000116260_16 (sequence is synthesized)
cttcagaggaatgagcaggagcagccgcttgggcagtggcacttgagcaagcgagacacaggggctgcattgctggctgagtccagggctgagaagaaccgcctctggggccctttggag

SEQ ID NO: 215683 - DNA, 120 bp, Artificial Sequence
  ENSG00000116260_17 (sequence is synthesized)
gtcaggcgcgtgggccgcagctccaagcagctggtcgacatccctgagggccagctggaggcccgagctggacggggccgaggccagtggctgcaggtgctgggagggggcttctcttac

SEQ ID NO: 215684 - DNA, 120 bp, Artificial Sequence
  ENSG00000116260_18 (sequence is synthesized)
ctggacatcagcctctgtgtggggctctattccctgtccttcatgggcctgctggccatgtacacctacttccaggccaagataagggccctgaagggccatgctggccaccctgcagcc

SEQ ID NO: 215685 - DNA, 120 bp, Artificial Sequence
  ENSG00000116260_19 (sequence is synthesized)
tgaaccacctggggaggaggcgggagagggagctgccatctctaggcacctcaagccccctgaccccattccctcccctcccaccccttgctccttgtctggcctagaagtgtgggaaat

SEQ ID NO: 215686 - DNA, 120 bp, Artificial Sequence
  ENSG00000116260_20 (sequence is synthesized)
tcaggaaaacgagttgctccagtgaagcttcttggggttgctaggacagagagctcctttgacacaaaagacaggagcagggtccaggttcccctgctgtgcagggagggcagccccggg

SEQ ID NO: 215687 - DNA, 120 bp, Artificial Sequence
  ENSG00000116260_21 (sequence is synthesized)
cagtgggcatagggcagctcagtccctggcctcttagcaccacattcctgtttttcagcttatttgaagtcctgcctcattctcactggagcctcagtctctcctgcttggtcttggccc

SEQ ID NO: 215688 - DNA, 120 bp, Artificial Sequence
  ENSG00000116260_22 (sequence is synthesized)
tcaactggggcaagtgaagccagaggagggtcccccagctgggtgggctggaatggaactcctcactagctgctggggctccgcccaccctgctcccttccggacaatgaagaagccttt

SEQ ID NO: 215689 - DNA, 120 bp, Artificial Sequence
  ENSG00000116260_23 (sequence is synthesized)
gcaccctgggaggaaggaccaccccgggccctctatgcctggccagcctccagctcctcagacctcctgggtggggtttggcttcagggtggggtttggaagcttctggaagtcgtgctg

SEQ ID NO: 215690 - DNA, 120 bp, Artificial Sequence
  ENSG00000116260_24 (sequence is synthesized)
gtctcccaggtgaggcaagccatggttgctgggctgtagggtgagtggcttgcttggtgggacctgacgagttggtggcatgggaaggatgtgggtctctagtgccttgccctggcttag

SEQ ID NO: 215691 - DNA, 120 bp, Artificial Sequence
  ENSG00000116260_25 (sequence is synthesized)
ctgcaggagaagatggctgctttcacttccccccattgagctctgctccctctgagcctggtcttttgtccttttttattttggtctccaagatgaatgctcatctttggagggtgccag

SEQ ID NO: 215692 - DNA, 120 bp, Artificial Sequence
  ENSG00000116260_26 (sequence is synthesized)
gtagaagctagggaggggagtgtcttctctctccaggtttcaccttccagtgtgcagaagttagaagggtctggcgggggcagtgccttacacatgcttgattcccacgctaccccctgc

SEQ ID NO: 215693 - DNA, 120 bp, Artificial Sequence
  ENSG00000116260_27 (sequence is synthesized)
cttgggaggtgtgtggaataaattatttttgttaaggcaagcattggtgtgttctttaacttgctacttggagacctagtgtccagtctggacagaatgcacagagaccagcctcacctg

SEQ ID NO: 215694 - DNA, 120 bp, Artificial Sequence
  ENSG00000116260_28 (sequence is synthesized)
gaatgcagccagactcgatgtccctcagcacacacagctcctggccacagactgcccatagaactgtctgcacccaaaccccatggccttttcatgcacggagacaggcctctggatgtg

SEQ ID NO: 215695 - DNA, 120 bp, Artificial Sequence
  ENSG00000116260_29 (sequence is synthesized)
cagccttgccaccccctgccccaatcctccctgagagctcctgcctcagtgccctgggctggtgagggagaagcctgtctgcacctgcctaattccagctcctccaggaagcaagggctt

SEQ ID NO: 215696 - DNA, 120 bp, Artificial Sequence
  ENSG00000116260_30 (sequence is synthesized)
gtttgtcagagctgcagggttggccactcggtggggaggagtcagccaggattagagagcctgcccctaatccggcctgctgggttttacaaggatcagagctgctgataatgaacctca

SEQ ID NO: 215697 - DNA, 120 bp, Artificial Sequence
  ENSG00000116260_31 (sequence is synthesized)
ttaagggggagcaggagcctcaatccgatttggttttctctttgacatcttcactctgctcagatggcctgggtgctatgtggagcaggtgggatgccaaggccactcctgctatggggc

SEQ ID NO: 215698 - DNA, 120 bp, Artificial Sequence
  ENSG00000116260_32 (sequence is synthesized)
agctggggctggggagggatggcagtctccctgcatgtttccctcgacctctttagctgcagcgccttgctgggctcctgggttggactccctctctgtgcccctgctccaggcacccat

SEQ ID NO: 215699 - DNA, 120 bp, Artificial Sequence
  ENSG00000116260_33 (sequence is synthesized)
tggctccatcctcctggttgtgctctgcaccccctgctcccttgggctggccctggctgggggcctgagagacagacaggaacccacaatcaggaggcaaccctggcctgcaagaggaag

SEQ ID NO: 215700 - DNA, 120 bp, Artificial Sequence
  ENSG00000116260_34 (sequence is synthesized)
acagaggctcccagggccggtgccctgtgtgcccactgcaccaaggccgctgaataagcctgcccttcaccccctaagggctccttgcccaatgccaagtgctggggatttctgtcagca

SEQ ID NO: 215701 - DNA, 120 bp, Artificial Sequence
  ENSG00000116260_35 (sequence is synthesized)
agccctgtggctccagtgacggtatttctaaagccaaacttagttacctagaattagcgccatgttggaaacactgtcgcagcagcccgggctgcacagtgtgtagcccagcctccaggt

SEQ ID NO: 215702 - DNA, 120 bp, Artificial Sequence
  ENSG00000116260_36 (sequence is synthesized)
ccacggagtggtgtggacctcccacctcacagctgcctctggcagccaagcctcttttcgcccggccccagcccctctggttgataaacgggtgggcctcctcagcagcgtggctgcctt

SEQ ID NO: 215703 - DNA, 120 bp, Artificial Sequence
  ENSG00000116260_37 (sequence is synthesized)
tcaccttgatttccccagggctctcggcaacatcgataaaccagcctcgcccaccagctgggccctcccccacccagtctgccaggctgggagctggagcttgctgagtcttgaatgccc

SEQ ID NO: 215704 - DNA, 120 bp, Artificial Sequence
  ENSG00000116260_38 (sequence is synthesized)
gagggtcccaaggggagccctgcaaagcaaaggctccttgtctggggcgggatagagaatctcgcctctgtctggtgtgttacctactgggggcacaggaacaatttcctcaaggagaca

SEQ ID NO: 215705 - DNA, 120 bp, Artificial Sequence
  ENSG00000116260_39 (sequence is synthesized)
gtggcatggagctttgaaagacgagtaggtgttagcaaggaaataaggaggaacgggggttacgggcagaggagaaagcacatgccaagtcagcaaagaaaagtagaattcgaaaacttt

SEQ ID NO: 215706 - DNA, 120 bp, Artificial Sequence
  ENSG00000116260_40 (sequence is synthesized)
ttaaaaatattactaaggattttcacaatgctgcactgggctagaaactgaagctaaaacagatacgtggtccctgctgctatggggcttccgttctagaggcaaggacaggttgtgatg

SEQ ID NO: 215707 - DNA, 120 bp, Artificial Sequence
  ENSG00000116260_41 (sequence is synthesized)
agggttctgaaggatagagaccaagcagggagggtgttgaggaggcttctgcgagacctgaaggatgggaagccaggaagtgggaggggtgggggtccaggctggaggggcccaatgtag

SEQ ID NO: 215708 - DNA, 120 bp, Artificial Sequence
  ENSG00000116260_42 (sequence is synthesized)
gtgtagagggactacagccctgaggggctgctccatgcggcattcttggaggtccaagaggggcagcgccaccttgggccaggctcctctccagcagccttggtatggggtgggggtggg

SEQ ID NO: 215709 - DNA, 120 bp, Artificial Sequence
  ENSG00000116260_43 (sequence is synthesized)
aagacccctgatgcagcctgtcctctgggtgtgggggtggaggagagggctccaggggacccagccagccttgaccctggaggaaagtcaggtgggctcagagagagccctcaaatctgg

SEQ ID NO: 215710 - DNA, 120 bp, Artificial Sequence
  ENSG00000116260_44 (sequence is synthesized)
gccctgggtcagggtggggtcaagtccagccttgaagagaatggactctggaatctgacgtctgggtttgaatccagcttccaacactcactggctgtgtgactttgggcaagataactt

SEQ ID NO: 215711 - DNA, 120 bp, Artificial Sequence
  ENSG00000116260_45 (sequence is synthesized)
atccccttgtccccatgtgtcattggagataaactacccacctaccagattgttgtaccatgctgggcaaacactaagtgcttaataatggtagcccactgctcatgtcgtgtcgtctcc

SEQ ID NO: 215712 - DNA, 120 bp, Artificial Sequence
  ENSG00000116260_46 (sequence is synthesized)
tgtcttgatacctgaaaactcaaggggccctgttgtgcttggaggggggtgccgttcccacaggatattctgtgaagggtgtccctggagctgggcctccaggtggcaagccccaagcca

SEQ ID NO: 215713 - DNA, 120 bp, Artificial Sequence
  ENSG00000116260_47 (sequence is synthesized)
ccccggcaggtgccactggccagagttgaactgaggtgttgagtggaaagtgcctccccacccccatctgccacagtagtatggatttccttcatgagatggggctcctaaaatgcctga

SEQ ID NO: 215714 - DNA, 120 bp, Artificial Sequence
  ENSG00000116260_48 (sequence is synthesized)
aatgtgtatgctgttggagaattgatgtgtatgatttattgaactttgcactcatttaaatctcatttaatcctccaacaacgcaagatgaagaagctgaggcttaaagagattaagaaa

SEQ ID NO: 215715 - DNA, 120 bp, Artificial Sequence
  ENSG00000116260_49 (sequence is synthesized)
catcctatcccctttactcccaccaaaataaatacatttgccctattctcccaaatggtgagaggtagatccaggacttgaccccagatcccacccactcaaccctggagctgcagtctc

SEQ ID NO: 215716 - DNA, 120 bp, Artificial Sequence
  ENSG00000116260_50 (sequence is synthesized)
taccccttctaacacatgtgattctgtttcatgtcctgttccatcggtagagttacacactttcctgagactttatatggtggtgctgctgggtgccagcccttcttccctccaacagtg

SEQ ID NO: 215717 - DNA, 120 bp, Artificial Sequence
  ENSG00000116260_51 (sequence is synthesized)
gcagtaaccactgttgtgtgttggtgtcaaggagtggggacaccctgaaggaatccgccttttctagagctctcgctccattccctacatcgaggctgaagtgccctgtctcgggtcctt

SEQ ID NO: 215718 - DNA, 120 bp, Artificial Sequence
  ENSG00000116260_52 (sequence is synthesized)
gtttttaggcctcgtttgaaggaggggaagaaaccaggttcgttgggcgtgaccttggctcagctcgtctgtgaaattggggccgcagacttagtttgcgggtccctgctaaattcctct

SEQ ID NO: 215719 - DNA, 120 bp, Artificial Sequence
  ENSG00000116260_53 (sequence is synthesized)
ccctcttcctgggattcccatccatgtattgccagctacatgtagagtggagaggagaggtttttcctgcagggccttccagagaaaggattcttggccagaggaaatcacagcctataa

SEQ ID NO: 215720 - DNA, 120 bp, Artificial Sequence
  ENSG00000116260_54 (sequence is synthesized)
gatcaatatcctgatagaatcccgggccaggtgtgagaggggagagctcactcacaccagcctgacagtcttggggcagagcgccccataggcctctgcagccccatcactgcctcattc

SEQ ID NO: 215721 - DNA, 120 bp, Artificial Sequence
  ENSG00000116260_55 (sequence is synthesized)
tccctcaggtgccaaggaagctccagggtgggcccagtatccttccacagcatccctcctcttccccttcaacacccctttcacccctccctccaccacctctgaaaggtgctccttggg

SEQ ID NO: 215722 - DNA, 120 bp, Artificial Sequence
  ENSG00000116260_56 (sequence is synthesized)
cagggcgataggattcccacccctagctttaagaactaaaccaaacttcaagaggagcaatttaatcttcatacctgactccttgtccctcctcaggcatgctgttgtgcaggacagagc

SEQ ID NO: 215723 - DNA, 120 bp, Artificial Sequence
  ENSG00000116260_57 (sequence is synthesized)
cctggcttctcctggatgtcacacctggcctgtctctgacccttgctttccctttctctgctgccctcaagggtcattcacacccaagagggtaagaagctgccctctcatcccttcctc

SEQ ID NO: 215724 - DNA, 120 bp, Artificial Sequence
  ENSG00000116260_58 (sequence is synthesized)
tcccaccctgggcctctgccctctgcctggccccagcagcacagtcttctccatagagaggggctgggccatgggaccccagttcctggggtctcggtgacacagttcactgtttgctgc

SEQ ID NO: 215725 - DNA, 120 bp, Artificial Sequence
  ENSG00000116260_59 (sequence is synthesized)
agaggaggccccactcgcagccttggcctctgccctgcagaagaattccctgtaactcactcaccaatggccgtgggagccagtggcctcggcgagggtcagttggactgcatagctgcc

SEQ ID NO: 215726 - DNA, 120 bp, Artificial Sequence
  ENSG00000116260_60 (sequence is synthesized)
ggctgagtctctctggccaccctcactggccccatcactccaggttgcactgctgcccagggggtttgtgccaggcctgggtcacagtggaagagagtctggaaatcacaaggcagagga

SEQ ID NO: 215727 - DNA, 120 bp, Artificial Sequence
  ENSG00000116260_61 (sequence is synthesized)
ggagacctttgccaatgtgagagaacaaagttaaggggcagtccatgggggcattgaccttacttaggtgaggaggactcagggaacatctacagactctagggctagggtgagatcctc

SEQ ID NO: 215728 - DNA, 120 bp, Artificial Sequence
  ENSG00000116260_62 (sequence is synthesized)
ctgatagtgctggtagctccagctgctgctttggcaagacttggtcgtctctatactgagagagcaaaagctcttttcctggggctgcatgttcttccataggaaagtgggcttcaggtg

SEQ ID NO: 215729 - DNA, 120 bp, Artificial Sequence
  ENSG00000116260_63 (sequence is synthesized)
ctgcctattaaacctcctgcctcccctgctgcagtgctttgatgcctttcacctgtgtctacctgcgaacctctgcccaccacggaagagcagctcacatttggaaggggctaaaatttt

SEQ ID NO: 215730 - DNA, 120 bp, Artificial Sequence
  ENSG00000116260_64 (sequence is synthesized)
tacctagtttgaatctgctctgcaatgtccccatcaagttcttaaccatcccgggttccaatggttacagagttctgccctggggagggaggaattgcttagcaaatgatgttgagaata

SEQ ID NO: 215731 - DNA, 120 bp, Artificial Sequence
  ENSG00000116260_65 (sequence is synthesized)
gtgattatttgggggaaaattcaggtaagatctcaccttcataccatataccaaaatacatctcagtagattagtaagctaatgcaaaaaaaaaaaaaaaaggggaaatataattgaata

SEQ ID NO: 215732 - DNA, 120 bp, Artificial Sequence
  ENSG00000116260_66 (sequence is synthesized)
attgaatacttcactgtttttgaaagcatgaaaacaatggaaaatgcaactgatgtgagtaatccatctacttgacgtcacttttaagaaataaggccaggcacggtggctcacgcttgt

SEQ ID NO: 215733 - DNA, 120 bp, Artificial Sequence
  ENSG00000116260_67 (sequence is synthesized)
aaataaaaataaaaaaataaagtaaagctacatatttaaaagctggggaaatatatgctgtaaatatgacaaagggctgtgactcttctgcaacacaccattttaagaatgagctaggtc

SEQ ID NO: 215734 - DNA, 120 bp, Artificial Sequence
  ENSG00000116260_68 (sequence is synthesized)
atgagctaggtctgcatttattgacctgataaaatgtcccaagaaggacacatttttataaacataagttactattgttatatatatgctaacgtttgtctagaaaaagtctagaaaaat

SEQ ID NO: 215735 - DNA, 120 bp, Artificial Sequence
  ENSG00000116260_69 (sequence is synthesized)
acacactgaactgtgaatagcagttatatttagaaagcaacattaggatgaacttaagtcagggcttggactagagcaaggcaagtgaggtgccaggatgcaaaagttaaggagacacct

SEQ ID NO: 215736 - DNA, 120 bp, Artificial Sequence
  ENSG00000116260_70 (sequence is synthesized)
gacctcaggggcccacaactgcagagcccctgacagtgagtgtctcagtagcctcgccctagtcctggctttcacttaaatatgttttcgaatgtttgtaataaaatatttcttttggaa

SEQ ID NO: 215737 - DNA, 120 bp, Artificial Sequence
  ENSG00000116260_71 (sequence is synthesized)
ggcaaaaatagcaaggaaaataaataggattaaaggatactaaagcccattcaataaaatttgtaggaggccactgatttggcctaggctcctatgatgtaaccaacagaccaaaccaat

SEQ ID NO: 215738 - DNA, 120 bp, Artificial Sequence
  ENSG00000116260_72 (sequence is synthesized)
atggagtcattcatgctaaatgaaactagttaggagtatattcatataacaagtggctaagtgtcagttacagcctctgagctttagtcaattgtaggtggtcaatagattcagataagg

SEQ ID NO: 215739 - DNA, 120 bp, Artificial Sequence
  ENSG00000116260_73 (sequence is synthesized)
caatccagttaaactgtatatcccacttgctgttttctgtccctaaattctctctgagtacactgcagccctgaagttctttgaacctgttctgggttctgagggctgtccaattactga

SEQ ID NO: 215740 - DNA, 120 bp, Artificial Sequence
  ENSG00000116260_74 (sequence is synthesized)
atcatacataaaagccaagtaagattttaaaatttgttataattttggtttttaacaacttctgttgtaaataataaaagcactaaatccctactgaaaataaagggcctaaagactgaa

SEQ ID NO: 215741 - DNA, 120 bp, Artificial Sequence
  ENSG00000116266_0 (sequence is synthesized)
gcttctgcggccaaagtaggttgggagtggaaggtggtggctgctgctccgcagtgtcgggaagatggcgccgccggtggcagagagggggctaaagagcgtcgtgtggcagaagataaa

SEQ ID NO: 215742 - DNA, 120 bp, Artificial Sequence
  ENSG00000116266_1 (sequence is synthesized)
agcaacagtgtttgatgactgcaagaaagaaggcgaatggaagataatgcttttagatgaatttaccactaagcttttggcatcgtgttgcaaaatgacagatcttctagaagaaggtat

SEQ ID NO: 215743 - DNA, 120 bp, Artificial Sequence
  ENSG00000116266_2 (sequence is synthesized)
tactgttgtagagaatatttataagaaccgtgaacctgtcagacaaatgaaagctctttatttcatcactccgacatcaaagtctgtagattgtttcttacatgattttgcaagtaaatc

SEQ ID NO: 215744 - DNA, 120 bp, Artificial Sequence
  ENSG00000116266_3 (sequence is synthesized)
ggagaacaagtataaagcagcatatatttacttcactgacttttgccctgataatctctttaacaaaattaaggcttcttgctccaagtcaataagaagatgtaaagaaataaatatttc

SEQ ID NO: 215745 - DNA, 120 bp, Artificial Sequence
  ENSG00000116266_4 (sequence is synthesized)
cttcattccacatgaatctcaggtgtatactcttgatgtaccagatgcattctattactgttatagtccagaccctggtaatgcaaagggaaaagatgccattatggaaacaatggctga

SEQ ID NO: 215746 - DNA, 120 bp, Artificial Sequence
  ENSG00000116266_5 (sequence is synthesized)
ccagatagttacagtgtgtgccaccttggatgaaaatcccggagtaagatataaaagtaaacctctagataatgccagtaagcttgcacagcttgttgaaaaaaagcttgaagactacta

SEQ ID NO: 215747 - DNA, 120 bp, Artificial Sequence
  ENSG00000116266_6 (sequence is synthesized)
caagattgatgaaaagagcctaataaagggtaaaactcattcacagctcttaataattgatcgtggctttgatcctgtgtccactgtcctgcatgaactgacctttcaggcaatggcata

SEQ ID NO: 215748 - DNA, 120 bp, Artificial Sequence
  ENSG00000116266_7 (sequence is synthesized)
tgatctactaccaattgagaatgatacatacaaatataaaacagatggaaaagaaaaggaggccatccttgaagaagaagatgacctctgggttagaattcgacatcgacatattgcggt

SEQ ID NO: 215749 - DNA, 120 bp, Artificial Sequence
  ENSG00000116266_8 (sequence is synthesized)
tgtgttagaggaaattcccaagcttatgaaagaaatttcatcaacaaagaaagcaacagaaggaaagacatcacttagtgctcttacccagctgatgaaaaagatgccccatttccgaaa

SEQ ID NO: 215750 - DNA, 120 bp, Artificial Sequence
  ENSG00000116266_9 (sequence is synthesized)
acagattactaagcaagttgtccatcttaacttagcagaagattgcatgaataagttcaagcttaatatagaaaagctctgcaaaactgaacaggacctggcacttggaactgatgcaga

SEQ ID NO: 215751 - DNA, 120 bp, Artificial Sequence
  ENSG00000116266_10 (sequence is synthesized)
tactttatatcttcagtattaatggaactacggaagaaaatttggacaggttgatccagaatgtaaagatagaaaatgagagtgacatgattcgtaactggagttaccttggtgttccca

SEQ ID NO: 215752 - DNA, 120 bp, Artificial Sequence
  ENSG00000116266_11 (sequence is synthesized)
ttgttccccaatctcaacaaggcaaaccgttaagaaaggatcggtctgcagaagaaacttttcagctctctcggtggacaccttttatcaaagatattatggaggatgctattgataata

SEQ ID NO: 215753 - DNA, 120 bp, Artificial Sequence
  ENSG00000116266_12 (sequence is synthesized)
gattagattcaaaagaatggccatattgttcccagtgtccagcagtatggaatggttcaggagctgtaagtgctcgccagaaacccagagctaattatttagaagaccgaaaaaatgggt

SEQ ID NO: 215754 - DNA, 120 bp, Artificial Sequence
  ENSG00000116266_13 (sequence is synthesized)
caaagctgattgtttttgtaattggagggatcacatactctgaagtgcgttgtgcttatgaagtttctcaggcacataaatcctgtgaagttattattggttctacacatgttttaacac

SEQ ID NO: 215755 - DNA, 120 bp, Artificial Sequence
  ENSG00000116266_14 (sequence is synthesized)
ccaaaaagctgttggatgatataaagatgctgaataaacccaaggataaagtctccttaattaaagatgaatagcatttctttttggagggtttagagattcttactaatatgttgaact

SEQ ID NO: 215756 - DNA, 120 bp, Artificial Sequence
  ENSG00000116266_15 (sequence is synthesized)
aaaatagaaagaaaatgttgctgtcatgtaatttaaacaatgtaaatattttatggaataatggcttttcaaatacatttcttaaggaactgtttatgattattactggatttgtcattt

SEQ ID NO: 215757 - DNA, 120 bp, Artificial Sequence
  ENSG00000116266_16 (sequence is synthesized)
ttgataatttaaatattgctgctgctttgtagatgatgagaagaaatgttaaagtgctttctaaaaggaaattttttcacctttggaggagaatatattagagttgtgggtaatttttca

SEQ ID NO: 215758 - DNA, 120 bp, Artificial Sequence
  ENSG00000116266_17 (sequence is synthesized)
cagccacctatgtacatactaattacccattggatacttatatctaaaagtctcatgctgaagtatagtttttgggaaagaatgattttaaataaagagattgtaaaagtaaaaaactgt

SEQ ID NO: 215759 - DNA, 120 bp, Artificial Sequence
  ENSG00000116266_18 (sequence is synthesized)
aaatgtatatgtatgatagaattgtttcctctaagtgtagtttttctttcaactaaaattcagtttatgtgtaaaataattcagtcattaatagaaatggagtgatttcacagtgtgtac

SEQ ID NO: 215760 - DNA, 120 bp, Artificial Sequence
  ENSG00000116266_19 (sequence is synthesized)
gtactgttttgccacatacttctaaagaacacaattttatataattttgaaatcatgtatgtttaaattagaaaaccaaaaatcatgaacattctaagagaaaataaatatagaatttaa

SEQ ID NO: 215761 - DNA, 120 bp, Artificial Sequence
  ENSG00000116266_20 (sequence is synthesized)
actctgccatatgatcacatagaaaactggtaactaaagaatcacagagaagtccaaagacacatacaattctgtcttatgttacatgttatataatatacttcaaaataaaaatatcat

SEQ ID NO: 215762 - DNA, 120 bp, Artificial Sequence
  ENSG00000116266_21 (sequence is synthesized)
atatcttcagtattaatggtaatggagataatcactttttaataagtattttactattgatcataaaagaatctttgaaaactgaaagatagttgctgaacttggttaagataaaaggga

SEQ ID NO: 215763 - DNA, 120 bp, Artificial Sequence
  ENSG00000116266_22 (sequence is synthesized)
aaatatgaaatcgagagaagactgaaggagatataatttgactgttttttattttaaaagcttcattcatgggtactacctaaagccttgaaattattttggtagcaattgtgtgattgt

SEQ ID NO: 215764 - DNA, 120 bp, Artificial Sequence
  ENSG00000116266_23 (sequence is synthesized)
caccagaaatctgaaagcccctataaccttttctattcagagactttatccttctcttattcctacagttatagtctttgacagataatgttgaccttgtaaattaaagtgtaatttgat

SEQ ID NO: 215765 - DNA, 120 bp, Artificial Sequence
  ENSG00000116266_24 (sequence is synthesized)
tgctttggagcatttttggtgtgtttgcttccttaactgtgtgtacagtagagctacatttaaacacagggaatttggcccttttgcttttaaaagtaaataccaggctcactatcattg

SEQ ID NO: 215766 - DNA, 120 bp, Artificial Sequence
  ENSG00000116266_25 (sequence is synthesized)
aaggagaaaccatattcaaaattgttaggctataattgttctgaatcatacattcaaaagtgtatgtgtcttatcaacataaagtattttaaaagattggaacactagaaaactaaatag

SEQ ID NO: 215767 - DNA, 120 bp, Artificial Sequence
  ENSG00000116266_26 (sequence is synthesized)
gatggctattgaggacaacaggcatagttttaccattttggtaccttctactgagttaatcttggtataaacatatttactttaaaagtaatgtcaaataaaaacctaaatgaaaaatga

SEQ ID NO: 215768 - DNA, 120 bp, Artificial Sequence
  ENSG00000116266_27 (sequence is synthesized)
aatagttttctatcaaggaatcatcttactgtatctctgtatcatttatggtgtatgtgttacatacattacaaatgttatttgatgtcatgatttctgaatccaaactggtatttgtca

SEQ ID NO: 215769 - DNA, 120 bp, Artificial Sequence
  ENSG00000116266_28 (sequence is synthesized)
gctaagatttactgcttgagtacagtaataaaaatgaaaatagttttctgaaattttatgtttaaactaatttgttagttttaagatacagacacttgtgatagttatgatactgttttt

SEQ ID NO: 215770 - DNA, 120 bp, Artificial Sequence
  ENSG00000116266_29 (sequence is synthesized)
aaaatttgtattttctattgtatttttatttgcattctggtcaaatcttggtttctgagtttttctctgtattatctgtattaatgttagataacatagctatttttctaatataaaagt

SEQ ID NO: 215771 - DNA, 120 bp, Artificial Sequence
  ENSG00000116266_30 (sequence is synthesized)
tattttaagcagtttattcagaggggatattatttacctctgttaccctgtaggtctctaaacttttaagtagacttattttttaaaaagctactatactcccttctttctgaatcaaaa

SEQ ID NO: 215772 - DNA, 120 bp, Artificial Sequence
  ENSG00000116266_31 (sequence is synthesized)
ttttaaaaagctactatactcccttctttctgaatcaaaaacattcagagataagaattagatggaagtaaagctccctgtggtttgtgctccatcacaatttttttttttttttttttt

SEQ ID NO: 215773 - DNA, 83 bp, Artificial Sequence
  ENSG00000116266_32 (sequence is synthesized)
cgcccagccttcatcacagttttttatggaaacagaatacaaagcagcaggaagctctaagtgtccagattcaagttttcatg

SEQ ID NO: 215774 - DNA, 120 bp, Artificial Sequence
  ENSG00000116266_33 (sequence is synthesized)
ttatggaaacagaatacaaagcagcaggaagctctaagtgtccagattcaagttttcatgttggtgccttctttaaatttacttttttttttttttctttttttgagacagagtcttact

SEQ ID NO: 215775 - DNA, 89 bp, Artificial Sequence
  ENSG00000116266_34 (sequence is synthesized)
agttcaaatgattcccagtgtgcaccactgcgcctggctcatttttgtgtttttagtagaaatggggttttgctgtgttggccaggctg

SEQ ID NO: 215776 - DNA, 120 bp, Artificial Sequence
  ENSG00000116266_35 (sequence is synthesized)
ccaggctggtctcgaactcctggcctcacatgatccacccacctcggcctcccaactaaatttacttttaaaatgggatattcatcacctgagtattgtcaggcttgttactcttatctc

SEQ ID NO: 215777 - DNA, 120 bp, Artificial Sequence
  ENSG00000116266_36 (sequence is synthesized)
ctgagtattgtcaggcttgttactcttatctctgtttacagatcacttataagtcaaaggtattgtgtaagaacaaagtggtattttaaatgacaaaagggctttcatccttagtgcagc

SEQ ID NO: 215778 - DNA, 120 bp, Artificial Sequence
  ENSG00000116266_37 (sequence is synthesized)
cttatataattgagcacagtgattctgtctttggtcatctgtaatccacacaggtggatggttttatagattgatgtgtaatttgtgggggttatagaaacgattatattcatatagcaa

SEQ ID NO: 215779 - DNA, 120 bp, Artificial Sequence
  ENSG00000116266_38 (sequence is synthesized)
agtctatatgtattatttgtagttcagagctaggaaaactcaatgcagtccttcctgatcttgactcaggaaatcagtagttccaaggatgattcagtcttgtctagttccacaaatgga

SEQ ID NO: 215780 - DNA, 120 bp, Artificial Sequence
  ENSG00000116266_39 (sequence is synthesized)
aggagggtgtctgcataaaaagataaggggaatcagtcaggaagcccattttgaatagcttcatgaatcccttaaattgttgctcacttcagcagaactcattaaagctatcacaatttt

SEQ ID NO: 215781 - DNA, 120 bp, Artificial Sequence
  ENSG00000116266_40 (sequence is synthesized)
acaggcgtgagccactgcacctggccgatattcctgttcttaatggaaatttgataattgtactgtgggttattagcacatcaaaacaatgttgtagggaattagaacacaaagcgttag

SEQ ID NO: 215782 - DNA, 120 bp, Artificial Sequence
  ENSG00000116266_41 (sequence is synthesized)
ttagtatattgagtcttgttcttaaagttaactgtaggacgttgaattttttttataaagtacaattttgctgaactaaaactctaataatggcacctaaactgaatatttgaaaatgtc

SEQ ID NO: 215783 - DNA, 120 bp, Artificial Sequence
  ENSG00000116266_42 (sequence is synthesized)
cttagttttgagtaggtattcattacccccctaaaatagtggattttacttttcagtttcttgagttgtgtcttgaaattattgtttgtaaaaatgtttcttttgattttggagggaaaa

SEQ ID NO: 215784 - DNA, 120 bp, Artificial Sequence
  ENSG00000116266_43 (sequence is synthesized)
ggtgagtattttgagaccttaaaaagcaggttcatcaatatttcaccattgttatggtttactaacagaaaattcaaagtaataaagtacactttagtagaaaaatattgccataaacta

SEQ ID NO: 215785 - DNA, 120 bp, Artificial Sequence
  ENSG00000116266_44 (sequence is synthesized)
gtttgcttaggaaagtttttttctgtgttagaagattatttgcattcttccgaatgagaatgtataagtaaaaggattccttttttccccatatatgaaagcagaattaaattgtataaa

SEQ ID NO: 215786 - DNA, 120 bp, Artificial Sequence
  ENSG00000116273_0 (sequence is synthesized)
gccctccctcccgagacacgagccgaactgggcgtcaggtcggggagccggtcgggttcccgctcaccgccgccgccgccgccccctgcagccactctcccgcctctaccgccgcgggag

SEQ ID NO: 215787 - DNA, 120 bp, Artificial Sequence
  ENSG00000116273_1 (sequence is synthesized)
ctgcatcgtccactccggtcggcggtggaaccgccagtccggggtcacagagcttgagaagcgacgcgctgagccccccatcacctccagcccgggcgacccctcccgggtccgccctcg

SEQ ID NO: 215788 - DNA, 120 bp, Artificial Sequence
  ENSG00000116273_2 (sequence is synthesized)
ctcgccctgcgcagccgcccgagcccccagccccgggcggccccgctccagcatcccagctcctgcactctcgcagccgccgccgccccccgcccggaacatggactctgactcttgcgc

SEQ ID NO: 215789 - DNA, 120 bp, Artificial Sequence
  ENSG00000116273_3 (sequence is synthesized)
gccttccacccggaggaatactcccccagttgcaagaggcgcaggaccgtggaagacttcaacaaattctgcacctttgtcttggcctatgctggctacatcccttatccgaaggaggaa

SEQ ID NO: 215790 - DNA, 120 bp, Artificial Sequence
  ENSG00000116273_4 (sequence is synthesized)
ctccctttaaggagcagccccagccctgctaacagcactgctggtaccattgacagcgacggctgggacgcgggtttctcagacatcgcgtcctcagtgcccttgccagtctctgaccgc

SEQ ID NO: 215791 - DNA, 120 bp, Artificial Sequence
  ENSG00000116273_5 (sequence is synthesized)
tgctttagccacctgcagcctactctcttgcagcgagccaagcccagtaacttcctgctggacagaaagaaaacggacaagctgaagaagaagaagaagaggaagcgcagggacagtgat

SEQ ID NO: 215792 - DNA, 120 bp, Artificial Sequence
  ENSG00000116273_6 (sequence is synthesized)
gcgcctgggaaagaggggtacagggggggcttgctgaagctggaagccgctgacccctacgtggagacccccacgagtcccaccttgcaggatatcccccaggctcccagcgacccctgc

SEQ ID NO: 215793 - DNA, 120 bp, Artificial Sequence
  ENSG00000116273_7 (sequence is synthesized)
tcgggctgggactccgatactccctcgagtggatcttgtgccactgtgtcacctgatcaggtcaaagaaataaaaactgaaggcaaacggactatcgtccggcagggaaagcaggtggtg

SEQ ID NO: 215794 - DNA, 120 bp, Artificial Sequence
  ENSG00000116273_8 (sequence is synthesized)
ttccgagatgaggacagcactggcaatgatgaggacatcatggtggactcagatgacgattcctgggacctcgtgacctgcttctgcatgaagccatttgccggccgccccatgatcgag

SEQ ID NO: 215795 - DNA, 120 bp, Artificial Sequence
  ENSG00000116273_9 (sequence is synthesized)
tgtaatgagtgccacacctggattcacctgtcctgtgcgaaaatccggaaatccaatgttccagaagtgtttgtctgccaaaagtgccgggactccaagtttgacatccgccgttccaac

SEQ ID NO: 215796 - DNA, 120 bp, Artificial Sequence
  ENSG00000116273_10 (sequence is synthesized)
cgctcgcggacgggctcccggaagctgttcctggactgactgctggctggcgaggaggctgcgagcgtggaatcggaagcgaccgcgggcttttttgcccttctcttagttgagcacaga

SEQ ID NO: 215797 - DNA, 120 bp, Artificial Sequence
  ENSG00000116273_11 (sequence is synthesized)
accctcagctctggtgcgggcagatccctgccatttaggtgcctaagcaaaaggacaggctgtccaaggtagaaactgtacatagccggtgaccgaatgcgacctttgccagccagagct

SEQ ID NO: 215798 - DNA, 120 bp, Artificial Sequence
  ENSG00000116273_12 (sequence is synthesized)
gctgccagagctgcgttccctgcagtggaggtggactggacacccacgtgcagcgggtttggctcatttgaaaatgagggtccgtggtagctgtgcgttttgctatcattgctaagagat

SEQ ID NO: 215799 - DNA, 120 bp, Artificial Sequence
  ENSG00000116273_13 (sequence is synthesized)
tcccgctgattgggctcagtgccagctgttattctgcttccactgtgttggggagaggtgttcggtttccccagcctgttaatgaacagccatacgtgtaagctttttcttgagtgttaa

SEQ ID NO: 215800 - DNA, 120 bp, Artificial Sequence
  ENSG00000116273_14 (sequence is synthesized)
gtcttttaccaaaagtgtctgtacagcagccatccaagttgcccctacttagtggcttgccctctgcctgcctcagctgctgcctgaccggctgggggaggcactggcgggaggcctcgg

SEQ ID NO: 215801 - DNA, 120 bp, Artificial Sequence
  ENSG00000116273_15 (sequence is synthesized)
agctggtggttcttaggtttccttctgtttgttaaaagggacaatgtggccacttctctgtggaaagggagttggttggggggttgagatggcccgtgttcataactcagtttcctgttt

SEQ ID NO: 215802 - DNA, 120 bp, Artificial Sequence
  ENSG00000116273_16 (sequence is synthesized)
tgcacgatgtaaaaaccctgtctttttgcacgatacagccaaaagtattggctgatttcttgctgagtgccctcttagttggtgtgtgaggtcttggtgggctcaggccagctgtttgcg

SEQ ID NO: 215803 - DNA, 120 bp, Artificial Sequence
  ENSG00000116273_17 (sequence is synthesized)
agtgtgggaactcataggttctgtctttgtctcttcctttcacctcattctggtagcagcataaaggttaggcaatcactgggacccgcatggtgttcctccaaagaatagggtaaagga

SEQ ID NO: 215804 - DNA, 120 bp, Artificial Sequence
  ENSG00000116273_18 (sequence is synthesized)
gagctgggagggagccctctccgttgggtgactcttgtgtgccctttagacaggctggcctgccggttccacagggtacagttaggacttgagtctttctttttctgttttgagttggtg

SEQ ID NO: 215805 - DNA, 120 bp, Artificial Sequence
  ENSG00000116273_19 (sequence is synthesized)
agtgagtgatagggtaacatgggccttcaggatgaccccttggaactgtgccgagttccttaaatctcagctgggatcctggacctgggaggcccctgtgagggccagctctggaaaaac

SEQ ID NO: 215806 - DNA, 120 bp, Artificial Sequence
  ENSG00000116273_20 (sequence is synthesized)
ctgggagttgatgccggaggctgtggaagaactctgctcgagggcagggtgccctggaacactggtagttctggggctgggagggagaggggctccggctttctctgaaatgaacactgc

SEQ ID NO: 215807 - DNA, 120 bp, Artificial Sequence
  ENSG00000116273_21 (sequence is synthesized)
tcttcagcagttcaagtacttgttctcaaaacattttctaattgattggtaggttttcataagcattgtttctttaaggcatggaaagggaagaatgctcaagcaagtcatgtttgtttt

SEQ ID NO: 215808 - DNA, 120 bp, Artificial Sequence
  ENSG00000116273_22 (sequence is synthesized)
cagtgggatgggcccgcgttctcactgctgggggcttccccttcatgtggcacctttgtgccaggccaccaggcagactcttcccaccttctcccactgaagcaccaaggggcttgaacc

SEQ ID NO: 215809 - DNA, 120 bp, Artificial Sequence
  ENSG00000116273_23 (sequence is synthesized)
gtaatttggctaatcagaggcattttttttgtcctagtatctttcacacttgtccaaccgtcttatttttttaaaagttctgttgcttgtattaacacgaaactagagagaaatagtttc

SEQ ID NO: 215810 - DNA, 120 bp, Artificial Sequence
  ENSG00000116273_24 (sequence is synthesized)
tgaagccagtttattgtgaagatccccaagggggaggttcggtagagaaaaatagtaagctggtttagaaactgacgagggcaaacagccaggacgcattggagaggaatttgccaaaga

SEQ ID NO: 215811 - DNA, 120 bp, Artificial Sequence
  ENSG00000116273_25 (sequence is synthesized)
tctaccctgagataacgcctgtccagtgtcttcaccacgtgaataaccagcgctccaaagtgtttttctgctttgaaaaaaaaaaattccacaagcttttaaaggtgcatttaagaatcc

SEQ ID NO: 215812 - DNA, 120 bp, Artificial Sequence
  ENSG00000116273_26 (sequence is synthesized)
atgtgactttagaatggaactgccggccctggcaactgtcacgtgtgctagaaggttcgatgcctctggaatgcatgtgatactcatctccattttgtttccttgattgcatttttgttc

SEQ ID NO: 215813 - DNA, 120 bp, Artificial Sequence
  ENSG00000116273_27 (sequence is synthesized)
ttttagcagatctgtccctgtgggtggtgtctaagaagtcggacaccttggtttttgtgttagattgagctgggcagctgcaatcagcttctttatatgcaaattaggcacgacccatct

SEQ ID NO: 215814 - DNA, 120 bp, Artificial Sequence
  ENSG00000116273_28 (sequence is synthesized)
gtggttcctggttggtggctaatgaagtgaggggagggagggatgtcaccccaaaagtaggccctcccattggctttggccaggccagacacttcacatcgtttacatggttctgtgtaa

SEQ ID NO: 215815 - DNA, 120 bp, Artificial Sequence
  ENSG00000116273_29 (sequence is synthesized)
ttttaaagtttatgtgtataaagcgaagctgtttctgtgaaactgtatattttgtaaataaatatattgctactttgaggttcatgattcaaggttcaggcgattgcgttctgtgctgaa

SEQ ID NO: 215816 - DNA, 120 bp, Artificial Sequence
  ENSG00000116285_0 (sequence is synthesized)
gacggcggtccggtgcgaggcagagtgctagcgggagcgcgagccagcaagaggcgcctgcgcgatgtccgggcccctgagcccgcggcgctgagccagccgggacggacatgcgcggga

SEQ ID NO: 215817 - DNA, 120 bp, Artificial Sequence
  ENSG00000116285_1 (sequence is synthesized)
gggcgccgcggggcagccgccgctcctccgggggaatgaaagctactggttgattttaaagtgcctgggcctcacaggtttggagatgtcccagaataaggcacaatgtcaatagcagga

SEQ ID NO: 215818 - DNA, 120 bp, Artificial Sequence
  ENSG00000116285_2 (sequence is synthesized)
gttgctgctcaggagatcagagtcccattaaaaactggatttctacataatggccgagccatggggaatatgaggaagacctactggagcagtcgcagtgagtttaaaaacaacttttta

SEQ ID NO: 215819 - DNA, 120 bp, Artificial Sequence
  ENSG00000116285_3 (sequence is synthesized)
aatattgacccgataaccatggcctacagtctgaactcttctgctcaggagcgcctaataccacttgggcatgcttccaaatctgctccgatgaatggccactgctttgcagaaaatggt

SEQ ID NO: 215820 - DNA, 120 bp, Artificial Sequence
  ENSG00000116285_4 (sequence is synthesized)
ccatctcaaaagtccagcttgccccctcttcttattcccccaagtgaaaacttgggaccacatgaagaggatcaagttgtatgtggttttaagaaactcacagtgaatggggtttgtgct

SEQ ID NO: 215821 - DNA, 120 bp, Artificial Sequence
  ENSG00000116285_5 (sequence is synthesized)
tccacccctccactgacacccataaaaaactccccttcccttttcccctgtgcccctctttgtgaacggggttctaggcctcttccaccgttgccaatctctgaagccctctctctggat

SEQ ID NO: 215822 - DNA, 120 bp, Artificial Sequence
  ENSG00000116285_6 (sequence is synthesized)
gacacagactgtgaggtggaattcctaactagctcagatacagacttccttttagaagactctacactttctgatttcaaatatgatgttcctggcaggcgaagcttccgtgggtgtgga

SEQ ID NO: 215823 - DNA, 120 bp, Artificial Sequence
  ENSG00000116285_7 (sequence is synthesized)
caaatcaactatgcatattttgataccccagctgtttctgcagcagatctcagctatgtgtctgaccaaaatggaggtgtcccagatccaaatcctcctccacctcagacccaccgaaga

SEQ ID NO: 215824 - DNA, 120 bp, Artificial Sequence
  ENSG00000116285_8 (sequence is synthesized)
ttaagaaggtctcattcgggaccagctggctcctttaacaagccagccataaggatatccaactgttgtatacacagagcttctcctaactccgatgaagacaaacctgaggttcccccc

SEQ ID NO: 215825 - DNA, 120 bp, Artificial Sequence
  ENSG00000116285_9 (sequence is synthesized)
agagttcccatacctcctagaccagtaaagccagattatagaagatggtcagcagaagttacttcgagcacctatagtgatgaagacaggcctcccaaagtaccgccaagagaacctttg

SEQ ID NO: 215826 - DNA, 120 bp, Artificial Sequence
  ENSG00000116285_10 (sequence is synthesized)
tcaccgagtaactcgcgcacaccgagtcccaaaagccttccgtcttacctcaatggggtcatgcccccgacacagagctttgcccctgatcccaagtatgtcagcagcaaagcactgcaa

SEQ ID NO: 215827 - DNA, 120 bp, Artificial Sequence
  ENSG00000116285_11 (sequence is synthesized)
agacagaacagcgaaggatctgccagtaaggttccttgcattctgcccattattgaaaatgggaagaaggttagttcaacacattattacctactacctgaacgaccaccatacctggac

SEQ ID NO: 215828 - DNA, 120 bp, Artificial Sequence
  ENSG00000116285_12 (sequence is synthesized)
agccagactcaaaaacaaaaatggatctgggtggccacgtgaagcgtaaacatttatcctatgtggtttctccttagaccttggggtcatggttcagcagaggttacataggagcaaatg

SEQ ID NO: 215829 - DNA, 120 bp, Artificial Sequence
  ENSG00000116285_13 (sequence is synthesized)
gttctcaattttccagtttgattgaagtgcagagaaaaatcccttagattgcaaaataaaatagttgaactctctgtcttcatgtggaaggtttagagcagttgtgagatgctgttatgc

SEQ ID NO: 215830 - DNA, 120 bp, Artificial Sequence
  ENSG00000116285_14 (sequence is synthesized)
tgagaaaccctgactttgttagtgttggaaaaaagtcttacaagtctataatttaaagatgtgatggtggggaggggaggatggggaagctttttatatatgcatacattacatacctat

SEQ ID NO: 215831 - DNA, 120 bp, Artificial Sequence
  ENSG00000116285_15 (sequence is synthesized)
atataaacttgtggtataaccatagaccatagctgcaggttaaccaattagttactatcgtagagtaatatatattcagaataataaactcaagctggagaaatgagtcctgatagactg

SEQ ID NO: 215832 - DNA, 120 bp, Artificial Sequence
  ENSG00000116285_16 (sequence is synthesized)
aaaattgagcaaatggaagaagatacagtattgtttagatcagaatcattaaaaaatatttttgtttagtaagtttgaagatttctggcttttaggccttttctattttgttccatttat

SEQ ID NO: 215833 - DNA, 120 bp, Artificial Sequence
  ENSG00000116285_17 (sequence is synthesized)
ttttgcaggcaatcttttccatggagggcagggtatccattctttaccatgggtgtacctgcttaggttaaaaatcataccaaggcctcatacttccaggtttcatgttgcgtcttgttg

SEQ ID NO: 215834 - DNA, 120 bp, Artificial Sequence
  ENSG00000116285_18 (sequence is synthesized)
agggagggagagcaggttacttggcaaccatattgtcacctgtacctgtcacacatcttgaaaaataaaacgataatagaactagtgactaattttcccttacagttcctgcttggtccc

SEQ ID NO: 215835 - DNA, 120 bp, Artificial Sequence
  ENSG00000116285_19 (sequence is synthesized)
acccactgaagtagctcatcgtagtgcgggccgtattagaggcagtggggtacgttagactcagatggaaaagtattctaggtgccagtgttaggatgtcagttttacaaaataatgaag

SEQ ID NO: 215836 - DNA, 120 bp, Artificial Sequence
  ENSG00000116285_20 (sequence is synthesized)
caattagctatgtgattgagagttattgtttggggatgtgtgttgtggttttgctttttttttttagactgtattaataaacatacaacacaagctggccttgtgttgctggttcctatt

SEQ ID NO: 215837 - DNA, 120 bp, Artificial Sequence
  ENSG00000116285_21 (sequence is synthesized)
cagtatttcctggggattgtttgctttttaagtaaaacacttctgacccatagctcagtatgtctgaattccagaggtcacatcagcatctttctgctttgaaaactctcacagctgtgg

SEQ ID NO: 215838 - DNA, 120 bp, Artificial Sequence
  ENSG00000116285_22 (sequence is synthesized)
ctgcttcacttagatgcagtgagacacatagttggtgttccgattttcacatccttccatgtatttatcttgaagagataagcacagaagagaaggtgctcactaacagaggtacattac

SEQ ID NO: 215839 - DNA, 120 bp, Artificial Sequence
  ENSG00000116285_23 (sequence is synthesized)
tgcaatgttctcttaacagttaaacaagctgtttacagtttaaactgctgaatattatttgagctatttaaagcttattatattttagtatgaactaaatgaaggttaaaacatgcttaa

SEQ ID NO: 215840 - DNA, 120 bp, Artificial Sequence
  ENSG00000116285_24 (sequence is synthesized)
gaaaaatgcactgatttctgcattatgtgtacagtattggacaaaggattttattcattttgttgcattattttgaatattgtcttttcattttaataaagttataatacttatttatga

SEQ ID NO: 215841 - DNA, 120 bp, Artificial Sequence
  ENSG00000116285_25 (sequence is synthesized)
cagtaagcatttgagaagaacagtctggattcgggttagcttgtcctccagcattattttttaaatgaggaaacctgaactatttccaacaacagcctgacccctagtggcaacagattc

SEQ ID NO: 215842 - DNA, 120 bp, Artificial Sequence
  ENSG00000116285_26 (sequence is synthesized)
agaagataactgtgtttttctcaagctattgtactcgactgccttcattctgagtcactgattgctaagtaggactgttcatggacgtgggatcttctaaaatcaagaattagttctcat

SEQ ID NO: 215843 - DNA, 120 bp, Artificial Sequence
  ENSG00000116285_27 (sequence is synthesized)
tccagctctgatgcatactttacttcatgaaaccttaggcgagatttcccacctttcttactagtatcgaatgcatgtttgacagtaatagatgaaaatagtataaatgttcctcaaaac

SEQ ID NO: 215844 - DNA, 120 bp, Artificial Sequence
  ENSG00000116285_28 (sequence is synthesized)
ttaaaaaatagtatttttaatgtgaatattctgttccttggatctttgtcaagagctgtgtgtgaactgaacacattgcaggcaagtccattcactcacaatattatgatgtgccagcaa

SEQ ID NO: 215845 - DNA, 120 bp, Artificial Sequence
  ENSG00000116285_29 (sequence is synthesized)
taaggactttgtcttatctcattggtaccctacgtgcctagtatggtcgcatgtcttaaatggcaaggctggtacagtatggtattcatgtaaattatatgctattcatcttccgcgaat

SEQ ID NO: 215846 - DNA, 120 bp, Artificial Sequence
  ENSG00000116285_30 (sequence is synthesized)
tttacacacgtcacaaaacttgcctgtgatgtgtgggtgtgcgctgtgcacatgtccaagggagatagaggagatagtttgttctttgaaccacaccatgtgcgttaagaatcttctgct

SEQ ID NO: 215847 - DNA, 120 bp, Artificial Sequence
  ENSG00000116285_31 (sequence is synthesized)
tttcactcaggaagaaagctgtggaagcataggtagctggggtgctctctccctcacacaggtggagagaggattgttgatcttttattaatatctctcgttcattccagggcatgcttc

SEQ ID NO: 215848 - DNA, 120 bp, Artificial Sequence
  ENSG00000116285_32 (sequence is synthesized)
gagtataggagaaagcaggatgacgatgggcctgaatggtggtgtgttttcctccacacaatgtggctttgtcctccaaggtgtctcacgtgatggaagctggctgatctgacttgcttg

SEQ ID NO: 215849 - DNA, 120 bp, Artificial Sequence
  ENSG00000116288_0 (sequence is synthesized)
gcgttcattttcagcctggtgtggggtgagtggtacccaacgggccggggcgccgcgtccgcaggaagaggcgcggggtgcaggcttgtaaacatataacataaaaatggcttccaaaag

SEQ ID NO: 215850 - DNA, 120 bp, Artificial Sequence
  ENSG00000116288_1 (sequence is synthesized)
agctctggtcatcctggctaaaggagcagaggaaatggagacggtcatccctgtagatgtcatgaggcgagctgggattaaggtcaccgttgcaggcctggctggaaaagacccagtaca

SEQ ID NO: 215851 - DNA, 120 bp, Artificial Sequence
  ENSG00000116288_2 (sequence is synthesized)
gtgtagccgtgatgtggtcatttgtcctgatgccagccttgaagatgcaaaaaaagagggaccatatgatgtggtggttctaccaggaggtaatctgggcgcacagaatttatctgagtc

SEQ ID NO: 215852 - DNA, 120 bp, Artificial Sequence
  ENSG00000116288_3 (sequence is synthesized)
tgctgctgtgaaggagatactgaaggagcaggaaaaccggaagggcctgatagccgccatctgtgcaggtcctactgctctgttggctcatgaaataggttttggaagtaaagttacaac

SEQ ID NO: 215853 - DNA, 120 bp, Artificial Sequence
  ENSG00000116288_4 (sequence is synthesized)
actctgagaatcgtgtggaaaaagacggcctgattcttacaagccgggggcctgggaccagcttcgagtttgcgcttgcaattgttgaagccctgaatggcaaggaggtggcggctcaag

SEQ ID NO: 215854 - DNA, 120 bp, Artificial Sequence
  ENSG00000116288_5 (sequence is synthesized)
tgaaggctccacttgttcttaaagactagagcagcgaactgcgacgatcacttagagaaacaggccgttaggaatccattctcactgtgttcgctctaaacaaaacagtggtaggttaat

SEQ ID NO: 215855 - DNA, 120 bp, Artificial Sequence
  ENSG00000116288_6 (sequence is synthesized)
gtgttcagaagtcgctgtccttactacttttgcggaagtatggaagtcacaactacacagagatttctcagcctacaaattgtgtctatacatttctaagccttgtttgcagaataaaca

SEQ ID NO: 215856 - DNA, 120 bp, Artificial Sequence
  ENSG00000116288_7 (sequence is synthesized)
gggcatttagcaaactactgattgtttcttgttttgtctctcatttcttttgtgaaattaaattccgtatcaccttcatttgcagctcttaactgtccatatggcactgaaataaaagaa

SEQ ID NO: 215857 - DNA, 120 bp, Artificial Sequence
  ENSG00000116288_8 (sequence is synthesized)
cagtgaccacattttacacagcaaggaggaaaggcatacaaacagaatttaagaggcttgtgattttctctgcttattagctgtgtgtttttaatgtgctattaaaaaataccaatgagg

SEQ ID NO: 215858 - DNA, 120 bp, Artificial Sequence
  ENSG00000116288_9 (sequence is synthesized)
tttgactgaccgccagcgtggtggcaacgctgaagcgtccagaatcttctgcctaacctctcgccggcatggaactggctagccgttttattaaactctgttttgcgtggacggtaaacc

SEQ ID NO: 215859 - DNA, 120 bp, Artificial Sequence
  ENSG00000116288_10 (sequence is synthesized)
agaaccggcgcggggcctgggtcggggccgccctcgcttccggcctcccagtcgggccctgtcgctggcgttggatttgactgaccgccagcgtggtggcaacgctgaagcgtccagaat

SEQ ID NO: 215860 - DNA, 88 bp, Artificial Sequence
  ENSG00000116288_11 (sequence is synthesized)
gtctgctgctgtgaaggagatactgaaggagcaggaaaaccggaagggcctgatagccgccatctgtgcaggtcttcattaaatattt

SEQ ID NO: 215861 - DNA, 120 bp, Artificial Sequence
  ENSG00000116288_12 (sequence is synthesized)
aaaccggaagggcctgatagccgccatctgtgcaggtgacgtgcaggggcagcctgtgttgcagcgtcattggtgggtggggtagcctttcattcgatggtttgattccaaatagctctt

SEQ ID NO: 215862 - DNA, 120 bp, Artificial Sequence
  ENSG00000116288_13 (sequence is synthesized)
tttggtctacatgctgtgaaacttagtgttttccgtgtttggttgacctcggaggaaaataaggccctctggaattcagtaaacagcttgttacagcaagtctctgtgccagaaagtctt

SEQ ID NO: 215863 - DNA, 120 bp, Artificial Sequence
  ENSG00000116288_14 (sequence is synthesized)
tgtgccagcacacaatcagcaaaatccatcaaacatcaacacagcagctctgtcctgtgcttgccctgcaaattcagaagcccccatggtgctttccgctggcttctcgggcgtttctga

SEQ ID NO: 215864 - DNA, 120 bp, Artificial Sequence
  ENSG00000116288_15 (sequence is synthesized)
ttgtctcagtaccgagtgatcttgggcaccgcattatctgccacataatttagaacaaggacatttggtgcttcgcagatgtcctcttctctttgtaccttagtaatattttattttctc

SEQ ID NO: 215865 - DNA, 120 bp, Artificial Sequence
  ENSG00000116299_0 (sequence is synthesized)
cgccttctgccagcagaagcagcagccgcagcacctgagccgctactgccgctcactcaggacaacgctatggctgagcctgggcacagccaccatctctccgccagagtcaggggaaga

SEQ ID NO: 215866 - DNA, 120 bp, Artificial Sequence
  ENSG00000116299_1 (sequence is synthesized)
actgagaggcgcataccccggctgtggcggctgctgctctgggctgggaccgccttccaggtgacccagggaacgggaccggagcttcatgcctgcaaagagtctgagtaccactatgag

SEQ ID NO: 215867 - DNA, 120 bp, Artificial Sequence
  ENSG00000116299_2 (sequence is synthesized)
tacacggcgtgtgacagcacgggttccaggtggagggtcgccgtgccgcataccccgggcctgtgcaccagcctgcctgaccccatcaagggcaccgagtgctccttctcctgcaacgcc

SEQ ID NO: 215868 - DNA, 120 bp, Artificial Sequence
  ENSG00000116299_3 (sequence is synthesized)
ggggagtttctggatatgaaggaccagtcatgtaagccatgcgctgagggccgctactccctcggcacaggcattcggtttgatgagtgggatgagctgccccatggctttgccagcctc

SEQ ID NO: 215869 - DNA, 120 bp, Artificial Sequence
  ENSG00000116299_4 (sequence is synthesized)
tcagccaacatggagctggatgacagtgctgctgagtccaccgggaactgtacttcgtccaagtgggttccccggggcgactacatcgcctccaacacggacgaatgcacagccacactg

SEQ ID NO: 215870 - DNA, 120 bp, Artificial Sequence
  ENSG00000116299_5 (sequence is synthesized)
atgtacgccgtcaacctgaagcaatctggcaccgttaacttcgaatactactatccagactccagcatcatctttgagtttttcgttcagaatgaccagtgccagcccaatgcagatgac

SEQ ID NO: 215871 - DNA, 120 bp, Artificial Sequence
  ENSG00000116299_6 (sequence is synthesized)
tccaggtggatgaagaccacagagaaaggatgggaattccacagtgtggagctaaatcgaggcaataatgtcctctattggagaaccacagccttctcagtatggaccaaagtacccaag

SEQ ID NO: 215872 - DNA, 120 bp, Artificial Sequence
  ENSG00000116299_7 (sequence is synthesized)
cctgtgctggtgagaaacattgccataacaggggtggcctacacttcagaatgcttcccctgcaaacctggcacgtatgcagacaagcagggctcctctttctgcaaactttgcccagcc

SEQ ID NO: 215873 - DNA, 120 bp, Artificial Sequence
  ENSG00000116299_8 (sequence is synthesized)
aactcttattcaaataaaggagaaacttcttgccaccagtgtgaccctgacaaatactcagagaaaggatcttcttcctgtaacgtgcgcccagcttgcacagacaaagattatttctac

SEQ ID NO: 215874 - DNA, 120 bp, Artificial Sequence
  ENSG00000116299_9 (sequence is synthesized)
acacacacggcctgcgatgccaacggagagacacaactcatgtacaaatgggccaagccgaaaatctgtagcgaggaccttgagggggcagtgaagctgcctgcctctggtgtgaagacc

SEQ ID NO: 215875 - DNA, 120 bp, Artificial Sequence
  ENSG00000116299_10 (sequence is synthesized)
cactgcccaccctgcaacccaggcttcttcaaaaccaacaacagcacctgccagccctgcccatatggttcctactccaatggctcagactgtacccgctgccctgcagggactgaacct

SEQ ID NO: 215876 - DNA, 120 bp, Artificial Sequence
  ENSG00000116299_11 (sequence is synthesized)
gctgtgggatttgaatacaaatggtggaacacgctgcccacaaacatggaaacgaccgttctcagtgggatcaacttcgagtacaagggcatgacaggctgggaggtggctggtgatcac

SEQ ID NO: 215877 - DNA, 120 bp, Artificial Sequence
  ENSG00000116299_12 (sequence is synthesized)
atttacacagctgctggagcctcagacaatgacttcatgattctcactctggttgtgccaggatttagacctccgcagtcggtgatggcagacacagagaataaagaggtggccagaatc

SEQ ID NO: 215878 - DNA, 120 bp, Artificial Sequence
  ENSG00000116299_13 (sequence is synthesized)
acatttgtctttgagaccctctgttctgtgaactgtgagctctacttcatggtgggtgtgaattctaggaccaacactcctgtggagacgtggaaaggttccaaaggcaaacagtcctat

SEQ ID NO: 215879 - DNA, 120 bp, Artificial Sequence
  ENSG00000116299_14 (sequence is synthesized)
acctacatcattgaggagaacactaccacgagcttcacctgggccttccagaggaccacttttcatgaggcaagcaggaagtacaccaatgacgttgccaagatctactccatcaatgtc

SEQ ID NO: 215880 - DNA, 120 bp, Artificial Sequence
  ENSG00000116299_15 (sequence is synthesized)
accaatgttatgaatggtgtggcctcctactgccgtccctgtgccctagaagcctctgatgtgggctcctcctgcacctcttgtcctgctggttactatattgaccgagattcaggaacc

SEQ ID NO: 215881 - DNA, 120 bp, Artificial Sequence
  ENSG00000116299_16 (sequence is synthesized)
tgccactcctgccccactaacacaattctgaaagcccaccagccttatggtgtccaggcctgtgtgccctgtggtccagggaccaagaacaacaagatccactctctgtgctacaacgat

SEQ ID NO: 215882 - DNA, 120 bp, Artificial Sequence
  ENSG00000116299_17 (sequence is synthesized)
tgcaccttctcacgcaacactccgaccaggactttcaactacaacttctccgctttggcaaacactgtcactcttgctggagggccaagcttcacttccaaagggctgaaatacttccat

SEQ ID NO: 215883 - DNA, 120 bp, Artificial Sequence
  ENSG00000116299_18 (sequence is synthesized)
cactttaccctcagtctctgtggaaaccagggtaggaaaatgtctgtgtgcaccgacaatgtcactgacctccggattcctgagggtgagtcagggttctccaaatctatcacagcctac

SEQ ID NO: 215884 - DNA, 120 bp, Artificial Sequence
  ENSG00000116299_19 (sequence is synthesized)
gtctgccaggcagtcatcatccccccagaggtgacaggctacaaggccggggtttcctcacagcctgtcagccttgctgatcgacttattggggtgacaacagatatgactctggatgga

SEQ ID NO: 215885 - DNA, 120 bp, Artificial Sequence
  ENSG00000116299_20 (sequence is synthesized)
atcacctccccagctgaacttttccacctggagtccttgggaataccggacgtgatcttcttttataggtccaatgatgtgacccagtcctgcagttctgggagatcaaccaccatccgc

SEQ ID NO: 215886 - DNA, 120 bp, Artificial Sequence
  ENSG00000116299_21 (sequence is synthesized)
gtcaggtgcagtccacagaaaactgtccctggaagtttgctgctgccaggaacgtgctcggatgggacctgtgatggctgcaacttccacttcctgtgggagagcgcggctgcttgcccg

SEQ ID NO: 215887 - DNA, 120 bp, Artificial Sequence
  ENSG00000116299_22 (sequence is synthesized)
ctctgctcagtggctgactaccatgctatcgtcagcagctgtgtggctgggatccagaagactacttacgtgtggcgagaacccaagctatgctctggtggcatttctctgcctgagcag

SEQ ID NO: 215888 - DNA, 120 bp, Artificial Sequence
  ENSG00000116299_23 (sequence is synthesized)
agagtcaccatctgcaaaaccatagatttctggctgaaagtgggcatctctgcaggcacctgtactgccatcctgctcaccgtcttgacctgctacttttggaaaaagaatcaaaaacta

SEQ ID NO: 215889 - DNA, 120 bp, Artificial Sequence
  ENSG00000116299_24 (sequence is synthesized)
gagtacaagtactccaagctggtgatgaatgctactctcaaggactgtgacctgccagcagctgacagctgcgccatcatggaaggcgaggatgtagaggacgacctcatctttaccagc

SEQ ID NO: 215890 - DNA, 120 bp, Artificial Sequence
  ENSG00000116299_25 (sequence is synthesized)
aagaagtcactctttgggaagatcaaatcatttacctccaagaggactcctgatggatttgactcagtgccgctgaagacatcctcaggaggcctagacatggacctgtgagaggcactg

SEQ ID NO: 215891 - DNA, 120 bp, Artificial Sequence
  ENSG00000116299_26 (sequence is synthesized)
cctgcctcacctgcctcctcaccttgcatagcacctttgcaagcctgcggcgatttgggtgccagcatcctgcaacacccactgctggaaatctcttcattgtggccttatcagatgttt

SEQ ID NO: 215892 - DNA, 120 bp, Artificial Sequence
  ENSG00000116299_27 (sequence is synthesized)
gaatttcagatctttttttatagagtacccaaaccctcctttctgcttgcctcaaacctgccaaatatacccacactttgtttgtaaattatgcccttgcttgtatcttgtttcccaaaa

SEQ ID NO: 215893 - DNA, 120 bp, Artificial Sequence
  ENSG00000116299_28 (sequence is synthesized)
tcttatagctttggaatgaaaatatttctatcttcttaagtatagaaactatttcctctgtcctctaacttaagggcagaaacagctgggagttttcctcgcatgccctcagctcatgat

SEQ ID NO: 215894 - DNA, 120 bp, Artificial Sequence
  ENSG00000116299_29 (sequence is synthesized)
ctcttcaggagagaggctgggtgaggagggtgtcggggttccctggtggataatcttcatagcagcctggatccatttcccctggataaccagctcaaagggagtgaaaatggtagtctg

SEQ ID NO: 215895 - DNA, 85 bp, Artificial Sequence
  ENSG00000116299_30 (sequence is synthesized)
cctggataaccagctcaaagggagtgaaaatggtagtctgagggcaaggggagcaaggcctgggtaagaaaagccttgaaaagca

SEQ ID NO: 215896 - DNA, 80 bp, Artificial Sequence
  ENSG00000116299_31 (sequence is synthesized)
gagacaggcactgttcagtgcagcctcaagctcttgggctcaagctatcctcccatctcaacctctcaagtagctaggac

SEQ ID NO: 215897 - DNA, 120 bp, Artificial Sequence
  ENSG00000116299_32 (sequence is synthesized)
ctcaagctcttgggctcaagctatcctcccatctcaacctctcaagtagctaggactacaagtgtgcaccaccaggctcactaatttttatattttttgtagacacagggtttcaccatg

SEQ ID NO: 215898 - DNA, 84 bp, Artificial Sequence
  ENSG00000116299_33 (sequence is synthesized)
cagccttttatttgttttttaaaccacgtagctcattgccttctcttaagtaaatgatagatattctcactgaagccaaaggaa

SEQ ID NO: 215899 - DNA, 120 bp, Artificial Sequence
  ENSG00000116299_34 (sequence is synthesized)
cttaagtaaatgatagatattctcactgaagccaaaggaataagttcatcaagaaaatgcccaaagccctggtggatacatcctccctatcttttttttaaaccttccactatcactcta

SEQ ID NO: 215900 - DNA, 120 bp, Artificial Sequence
  ENSG00000116299_35 (sequence is synthesized)
tgacactgaaaagaaccaggtaagccccaaacccagatgttccagccttatcctctgttgggtttacccacagacatagcaaaccctgtcagtgaggaaaattccccatccttgagtgcc

SEQ ID NO: 215901 - DNA, 120 bp, Artificial Sequence
  ENSG00000116299_36 (sequence is synthesized)
cccgtcctagaagtttgggccatattatggaacaggggtctcttatttgaaaagagcacaaggaggccaagattttaatggggcactttaggggatacagcccacaatggcatgggcctg

SEQ ID NO: 215902 - DNA, 120 bp, Artificial Sequence
  ENSG00000116299_37 (sequence is synthesized)
aggtggccgtgatgtctgcttctaagcttaacgcatctgctcaggcacagaataaacgtctaggctggccaaaaaaggaactgaatcccaggcccatacgccagcaccagaatcaaacca

SEQ ID NO: 215903 - DNA, 89 bp, Artificial Sequence
  ENSG00000116299_38 (sequence is synthesized)
ctgaatcccaggcccatacgccagcaccagaatcaaaccagtcttcaaggaaggaaggctaggagagtttaacaagattttcactggga

SEQ ID NO: 215904 - DNA, 120 bp, Artificial Sequence
  ENSG00000116299_39 (sequence is synthesized)
caacacagtgagaccctgtctctaaaaaatttaaaaataaacaaggtgttcaccaagctgggatacttctcactattaagcccctatctttctctttttttcattctcaattgctttgtg

SEQ ID NO: 215905 - DNA, 120 bp, Artificial Sequence
  ENSG00000116299_40 (sequence is synthesized)
tgtgtgataaaaaactaaagagacttctggtccaatttctggcaacatcccttctgaaaggtgagtagagtgggtgtcttctatgcccattttccccaattttacacaaactattatcaa

SEQ ID NO: 215906 - DNA, 120 bp, Artificial Sequence
  ENSG00000116299_41 (sequence is synthesized)
tgaacttttaagtacctagaatgggtaaaaccagagcaagactttaaattaccttcttctttcttctactggcagttctgcctccatcactatcaggctagggtgaccttcccttggtca

SEQ ID NO: 215907 - DNA, 120 bp, Artificial Sequence
  ENSG00000116299_42 (sequence is synthesized)
agccccaattgcccatgatttgtgcctgtgccctttctccagtgaccatttggtgaccagatggtagatatagaaaggggatggcatttgcaagtgactagtctgccacaaaatgctcat

SEQ ID NO: 215908 - DNA, 120 bp, Artificial Sequence
  ENSG00000116299_43 (sequence is synthesized)
ctgattagccactgctgccctggcaatggctttgtaagagtcaatgagaactagagccaggctgtggtccctggccatcaacagtgttggtgacggcagggagtccctttggtttaataa

SEQ ID NO: 215909 - DNA, 120 bp, Artificial Sequence
  ENSG00000116299_44 (sequence is synthesized)
atccagtttttctttgggtatccaaattctcccctccttttgtaggagtcaggctctcagaacctgtgtccatgttggaacttcccccagtgtggatgcagatacgcagctcctgagctc

SEQ ID NO: 215910 - DNA, 120 bp, Artificial Sequence
  ENSG00000116299_45 (sequence is synthesized)
cagcctaaagtcttctgtagcctcagcaatacttgggcacctgctgtctcactgaatagctttcttttgtgacaaaggccacagacagcccttagactattccggaaacagtaggaaaaa

SEQ ID NO: 215911 - DNA, 120 bp, Artificial Sequence
  ENSG00000116299_46 (sequence is synthesized)
ttacatatgtctttgacttctttattctgactccactgattttagccataatactttaaggagctactttttactaccccttaccgtgctgacttctgcaggtctgccctgtgacctgtc

SEQ ID NO: 215912 - DNA, 120 bp, Artificial Sequence
  ENSG00000116299_47 (sequence is synthesized)
aggaactcctgagttacgctactggggtcacctgttgctcccctagcaagttaggcatgtcatatatttttaacagctttattgagatataattcacatattacacaattcacctttaaa

SEQ ID NO: 215913 - DNA, 120 bp, Artificial Sequence
  ENSG00000116299_48 (sequence is synthesized)
acatacgattcaatggttttcagcaaactcacagagttgtccgcccacttgagagcaaacacatgttcaattttcttttcctttttttttttgagacagagtcagctttgttgcccaggc

SEQ ID NO: 215914 - DNA, 79 bp, Artificial Sequence
  ENSG00000116299_49 (sequence is synthesized)
gagacagagtcagctttgttgcctccccatcctgggttcaagtgatccttctgcttcagcctccccagtagctgggatt

SEQ ID NO: 215915 - DNA, 120 bp, Artificial Sequence
  ENSG00000116299_50 (sequence is synthesized)
accgtgcctggcctacatgttcaattttctatgaacaaaggctttagtccttgacccagggctaaagtggtctgtccaagctgttgttggtagagggagtatgataaaatgtttaaatct

SEQ ID NO: 215916 - DNA, 120 bp, Artificial Sequence
  ENSG00000116299_51 (sequence is synthesized)
catttggttaccttgagtcctggaacatgcagtaactgtcatgctatagacatcatctgtatttggctgggaatacaaatgaagattgtggtgtattcaagcagtagggtttttgctttt

SEQ ID NO: 215917 - DNA, 120 bp, Artificial Sequence
  ENSG00000116299_52 (sequence is synthesized)
gtttttgttttagtgccaacaaaacttttttttgtctgactacattaaagataagactgactatatttatacaacagaaactttgtaatagattttttcagctttgtgaaatcgaatttt

SEQ ID NO: 215918 - DNA, 120 bp, Artificial Sequence
  ENSG00000116299_53 (sequence is synthesized)
ttttcatcagggctggttggatttcctttttaccctgtaatccaagcgttaatagtttgttagaagatgggttattgcatgtcactttttttttttgtaaaataaaaacataccttacaa

SEQ ID NO: 215919 - DNA, 120 bp, Artificial Sequence
  ENSG00000116299_54 (sequence is synthesized)
attgaacacaaccatgactcaggcactgggctaggtgcttgggatacatccgtgagccacacaaagttccccaccccagaggagctcttacctggcccagaatctggatctctgccccca

SEQ ID NO: 215920 - DNA, 120 bp, Artificial Sequence
  ENSG00000116299_55 (sequence is synthesized)
ctttgcccgctagagggcctccaggggagggttagccccatctgccccattggtgtgtccacgtgactgacacccccccttgtagtgattccacagaggaaaggcccagactgaccagca

SEQ ID NO: 215921 - DNA, 120 bp, Artificial Sequence
  ENSG00000116299_56 (sequence is synthesized)
ttctttctctcggttcacacgccacgtgtgcaacatcggagatgctcataaaataacccctggcccgaaagggcagtagaaaacggaaatttgttggctggcttggaggatgcttccact

SEQ ID NO: 215922 - DNA, 120 bp, Artificial Sequence
  ENSG00000116299_57 (sequence is synthesized)
cttccactgtgttcttcacacgagccccgggcctgcctgttgggccggttgcgcaccccgggcgcgcgctctcccgcgcccacgccgcgcgcaccagcggcggcggctgccatggcgacc

SEQ ID NO: 215923 - DNA, 120 bp, Artificial Sequence
  ENSG00000116299_58 (sequence is synthesized)
tttcccacgttcctctgctccataaggacactacttaaacataacaacaaagagagtcacacacaaaaatgatttctagggactagaccatggctgggtggaagggaatgatccaaatca

SEQ ID NO: 215924 - DNA, 120 bp, Artificial Sequence
  ENSG00000116299_59 (sequence is synthesized)
ttgtagttcttgtactcggttcataatcatcagctccctgcccggggtcccagggcccatttctgagaggatgagcatcagtagccatggtgctgggaagtgggtgggaagctgttaatg

SEQ ID NO: 215925 - DNA, 120 bp, Artificial Sequence
  ENSG00000116299_60 (sequence is synthesized)
ttggggcatcatccccttctccagcagccaagagagaatggctgtgtcttgtcagttgcaccttagactcagttctgtggtgtctggtattctgtatgaccttgtgaacatttattttca

SEQ ID NO: 215926 - DNA, 120 bp, Artificial Sequence
  ENSG00000116299_61 (sequence is synthesized)
ttttcttggtctcagccaactcactaataaaaggcagacaattaatcctgctgctcttctccctcctgttcataacatgtgactgaatgtggctgtctttcctcccttctgccccattct

SEQ ID NO: 215927 - DNA, 120 bp, Artificial Sequence
  ENSG00000116299_62 (sequence is synthesized)
cttccctccctgggctcacgccaaggccttctgggtcagtaccgtgcttgctgcctgaaagcccgggtgtctgccttggcctgaccactgccggggcctttagatgctgggtcagaccaa

SEQ ID NO: 215928 - DNA, 120 bp, Artificial Sequence
  ENSG00000116299_63 (sequence is synthesized)
agcctgtgttcccgccttgcagcacagccaaggcccagctcagaggaggagcactgaagcgtgtgctttcaggagtgcgcatgaacatgcattccccagctgttccttgcagacttctgc

SEQ ID NO: 215929 - DNA, 120 bp, Artificial Sequence
  ENSG00000116299_64 (sequence is synthesized)
tttgtgcctcattcccgcactggttctgctcagtctggtgattgagtttgtcttctgaacagtattttaaaatcaagggacacacctcgagctggctcctatgattacatttctgacctt

SEQ ID NO: 215930 - DNA, 120 bp, Artificial Sequence
  ENSG00000116299_65 (sequence is synthesized)
ggctgtgcctcagttgtttctcagggaccaggatggcccatccattggggtcagtgaatgtgctgctccaagagctggcccgagacagtttgccagctcctaggactctcctctccctga

SEQ ID NO: 215931 - DNA, 120 bp, Artificial Sequence
  ENSG00000116299_66 (sequence is synthesized)
gactcacaggaggcaggtgaggttcaagcctggggctctggctgtcgcagccctccgcagggaagagggccgagctgagcaggggaaggaggagcccagggctccccatcagttaaggca

SEQ ID NO: 215932 - DNA, 120 bp, Artificial Sequence
  ENSG00000116299_67 (sequence is synthesized)
gtctgtgtccctccttaaggacttgtttcttatcttgaaaaatatggacagaggccttattcatccttcttttcatatgtatggtatctgcacagatcatgttcatcaacccctcagttc

SEQ ID NO: 215933 - DNA, 120 bp, Artificial Sequence
  ENSG00000116299_68 (sequence is synthesized)
aacctataagggcacgtttttgtctgtgactcgatctgagggccacatgggaagaatggagctgcccaccttcacccctgactcagccggggtctcctgcgggtcatctccacttctgta

SEQ ID NO: 215934 - DNA, 80 bp, Artificial Sequence
  ENSG00000116329_0 (sequence is synthesized)
cgctccgggcgaggagagcgggcggacgccgggggctgggccggtgcgggcggcgaggcaggcggacgaggcgcagagac

SEQ ID NO: 215935 - DNA, 80 bp, Artificial Sequence
  ENSG00000116329_1 (sequence is synthesized)
gggccgcggcctctgccttgccgctcccctcgcgtcggatccccgcgcccagggcgcacggtggagagggacgcggcgga

SEQ ID NO: 215936 - DNA, 120 bp, Artificial Sequence
  ENSG00000116329_2 (sequence is synthesized)
cgagctgcagcccccgctcttcgccaacgcctcggacgcctaccctagcgcctgccccagcgctggcgccaatgcgtcggggccgccaggcgcgcggagcgcctcgtccctcgccctggc

SEQ ID NO: 215937 - DNA, 120 bp, Artificial Sequence
  ENSG00000116329_3 (sequence is synthesized)
aatcgccatcaccgcgctctactcggccgtgtgcgccgtggggctgctgggcaacgtgcttgtcatgttcggcatcgtccggtacactaagatgaagacggccaccaacatctacatctt

SEQ ID NO: 215938 - DNA, 120 bp, Artificial Sequence
  ENSG00000116329_4 (sequence is synthesized)
caacctggccttagccgatgcgctggccaccagcacgctgcctttccagagtgccaagtacctgatggagacgtggcccttcggcgagctgctctgcaaggctgtgctctccatcgacta

SEQ ID NO: 215939 - DNA, 120 bp, Artificial Sequence
  ENSG00000116329_5 (sequence is synthesized)
ctacaatatgttcaccagcatcttcacgctcaccatgatgagtgttgaccgctacatcgctgtctgccaccctgtcaaggccctggacttccgcacgcctgccaaggccaagctgatcaa

SEQ ID NO: 215940 - DNA, 120 bp, Artificial Sequence
  ENSG00000116329_6 (sequence is synthesized)
catctgtatctgggtcctggcctcaggcgttggcgtgcccatcatggtcatggctgtgacccgtccccgggacggggcagtggtgtgcatgctccagttccccagccccagctggtactg

SEQ ID NO: 215941 - DNA, 120 bp, Artificial Sequence
  ENSG00000116329_7 (sequence is synthesized)
ggacacggtgaccaagatctgcgtgttcctcttcgccttcgtggtgcccatcctcatcatcaccgtgtgctatggcctcatgctgctgcgcctgcgcagtgtgcgcctgctgtcgggctc

SEQ ID NO: 215942 - DNA, 120 bp, Artificial Sequence
  ENSG00000116329_8 (sequence is synthesized)
caaggagaaggaccgcagcctgcggcgcatcacgcgcatggtgctggtggttgtgggcgccttcgtggtgtgttgggcgcccatccacatcttcgtcatcgtctggacgctggtggacat

SEQ ID NO: 215943 - DNA, 120 bp, Artificial Sequence
  ENSG00000116329_9 (sequence is synthesized)
cgaccggcgcgacccgctggtggtggctgcgctgcacctgtgcatcgcgctgggctacgccaatagcagcctcaaccccgtgctctacgctttcctcgacgagaacttcaagcgctgctt

SEQ ID NO: 215944 - DNA, 120 bp, Artificial Sequence
  ENSG00000116329_10 (sequence is synthesized)
ccgccagctctgccgcaagccctgcggccgcccagaccccagcagcttcagccgcgcccgcgaagccacggcccgcgagcgtgtcaccgcctgcaccccgtccgatggtcccggcggtgg

SEQ ID NO: 215945 - DNA, 120 bp, Artificial Sequence
  ENSG00000116329_11 (sequence is synthesized)
cgctgccgcctgaccaggccatccggcccccagagcgcccctccctagtgacccggaggccacatgagtcccagtgggaggcgcgagccatgatgtggagtggggcagtagaaggtcgga

SEQ ID NO: 215946 - DNA, 120 bp, Artificial Sequence
  ENSG00000116329_12 (sequence is synthesized)
ggcttgggaccgccagatggggcctctgtttcggagacgggaccgggccgctagatgggcatggggtgggcctctggtttggggcgaggcagaggacagatcaatggcgcagtgcctctg

SEQ ID NO: 215947 - DNA, 120 bp, Artificial Sequence
  ENSG00000116329_13 (sequence is synthesized)
gtctgggtgccccgtccacggctctaggtggggcgggaaagccagtgactccaggagaggagcgggacctgtggctctacaactgagtccttaaacagggcatctccaggaaggcggggc

SEQ ID NO: 215948 - DNA, 120 bp, Artificial Sequence
  ENSG00000116329_14 (sequence is synthesized)
ttcaaccttgagacagcttcggtttctaacttggagccggactttcggagttgggggtccgggcccaggacccagaaagggcagtggtggggacagttgcttgaaaactgagctgcaaga

SEQ ID NO: 215949 - DNA, 120 bp, Artificial Sequence
  ENSG00000116329_15 (sequence is synthesized)
ctgggcctctgtgtagtagggaggagcctcctgtgaggggagacccagagacaggacagctgggtgtggctacagctgaagatttggtcaccagatagggcgcctgtgcaaagggcctgt

SEQ ID NO: 215950 - DNA, 120 bp, Artificial Sequence
  ENSG00000116329_16 (sequence is synthesized)
ggcctcatctttggatacgggatacagtcccagccctgagttctagcaaggggcaaggctcgctgaggtccaggtccgacttgacacctttataaatagaatataaaagactgaggggcc

SEQ ID NO: 215951 - DNA, 88 bp, Artificial Sequence
  ENSG00000116329_17 (sequence is synthesized)
ctttgggaggccgaggcaggtggatggacatgagcccaggagttcgagactagtctgggcaacatgggagaccctgtcgctactgtac

SEQ ID NO: 215952 - DNA, 120 bp, Artificial Sequence
  ENSG00000116329_18 (sequence is synthesized)
atacaaaattagccaggcatggtggtgtgtacctgcaggcctagctccttggaaggtgagaggatcacttgatcccaggagtttgaagctgcagtgagctatggtggtgccactgcactc

SEQ ID NO: 215953 - DNA, 120 bp, Artificial Sequence
  ENSG00000116329_19 (sequence is synthesized)
ctgggggacagagtaagactctgtctctcaaaaaggagagagagggagaatgagggaagaagagataggaagagagagaaacagtataccttttatctctttgacaggcatgtatttcct

SEQ ID NO: 215954 - DNA, 120 bp, Artificial Sequence
  ENSG00000116329_20 (sequence is synthesized)
tccttggaatgggcaggaatccctcagaatcggtggccacagtggggcttgggacaggacagcagagcggggggcagccactccaggatagggtaataagacaggaccttggttggagta

SEQ ID NO: 215955 - DNA, 120 bp, Artificial Sequence
  ENSG00000116329_21 (sequence is synthesized)
gggtccccagaactgagtactaatgggggcccagaggcttgggaaggagaaggcttccaaaaccagttcgaaaacccagacccggagtggacctccgtgccaaggggtggtggtgggtgg

SEQ ID NO: 215956 - DNA, 120 bp, Artificial Sequence
  ENSG00000116329_22 (sequence is synthesized)
gtggaggaagaggtgggctcctgcttcaaggttaggtcttccagtggaaggtggatgctttctgtgagtccccagggccctagtttctctggcccagatactggaggacagaggaccacc

SEQ ID NO: 215957 - DNA, 120 bp, Artificial Sequence
  ENSG00000116329_23 (sequence is synthesized)
tacttagatcccgtagatggtaagtggtgcctgggactcttgagggcggggggcggggtatgagaagcatcagttcgcacttggtgctgggtcctgggccctgataagaacctggatgaa

SEQ ID NO: 215958 - DNA, 120 bp, Artificial Sequence
  ENSG00000116329_24 (sequence is synthesized)
atcctcttccattctcccaacatctggctgcatccatgtgtctggtgtcaatgactccagtgaactggaactgcccatatggggacctgaccttgaaggaactggggggagaagcttttg

SEQ ID NO: 215959 - DNA, 120 bp, Artificial Sequence
  ENSG00000116329_25 (sequence is synthesized)
taactgcaatgccggcatcagtgtgtgtccccctctgcctttccccccaggctccccaggtcccccacctgctccagcccagctgtccccttcacgctgctgagagtgatatccacctgg

SEQ ID NO: 215960 - DNA, 120 bp, Artificial Sequence
  ENSG00000116329_26 (sequence is synthesized)
agttgggtgtagaagtttttcttttcattggttcggcattttattcaggcactcctggatctttgcttcccagaatatcagtgtctgtccttgttctctgtacctcccccgtgcctcatc

SEQ ID NO: 215961 - DNA, 120 bp, Artificial Sequence
  ENSG00000116329_27 (sequence is synthesized)
tcctctccctccgctgctgtcccctccctcaccaacactgcctcagtaatgcacccctgactccctattgaagcagtgtgctgacatccttgtaaaaacaaatttaattttcttcctttt

SEQ ID NO: 215962 - DNA, 120 bp, Artificial Sequence
  ENSG00000116329_28 (sequence is synthesized)
ttgggacagatggaaagaaattgacgtctttgtctcaaacaaaagaaaaaagaaaaagaaacaatatacttcttttccctttgacagccatgtctttggaacaaaagctgggaggctgtc

SEQ ID NO: 215963 - DNA, 120 bp, Artificial Sequence
  ENSG00000116329_29 (sequence is synthesized)
actccagcagggactgaatagcatgcagggggctggggacttaggcaccaagaggggctttgggcacattagggggaagggatgctctcagagggcaaagcacagcccccttctcagggt

SEQ ID NO: 215964 - DNA, 120 bp, Artificial Sequence
  ENSG00000116329_30 (sequence is synthesized)
gaggctcccagcagccccagacccggggatgtgcctcctttgggaaatggctaccccgggtcctggaaagatgtggggccatgcccagcactcacatccagcctgccaagccattgtgac

SEQ ID NO: 215965 - DNA, 120 bp, Artificial Sequence
  ENSG00000116329_31 (sequence is synthesized)
ctggggtcccaagccacctagatcactctcactaccttgtgaccacagagacccctgtgtctgagggtgggaggtcgtcagcatggcaggagacacttctcctcatcaggggtcctcctg

SEQ ID NO: 215966 - DNA, 120 bp, Artificial Sequence
  ENSG00000116329_32 (sequence is synthesized)
tgaatgctttgggggtatggcagaaaaagggacaatctaggaactggggaagactcctgaaggaggtgacattggagccaggctgtttactctccctgcaggacctgtgtcccctcccag

SEQ ID NO: 215967 - DNA, 120 bp, Artificial Sequence
  ENSG00000116329_33 (sequence is synthesized)
gataggcctgtttcaaggctgcttgaagcccactcactgccatctcctgtgtctgtaacagatctggctgttttttgccccttctgatatgtaaatctgtcctgaggtcagcagggcccg

SEQ ID NO: 215968 - DNA, 120 bp, Artificial Sequence
  ENSG00000116329_34 (sequence is synthesized)
ggtccggaccacgtgtgtttaaggtagtgcaaacttgtattgaaatctacttcatgccaagcatgcactctgggcatcaggactcggaatgagtcagccttggccctgccctcagaaagc

SEQ ID NO: 215969 - DNA, 120 bp, Artificial Sequence
  ENSG00000116329_35 (sequence is synthesized)
ctgagccagtgttgggagataaagcatcaacagatgattgcacctcagtgtgatgagtgcggtgacagggagccccagggagggtgtcacagggaagtgccttttctagcttttcactaa

SEQ ID NO: 215970 - DNA, 120 bp, Artificial Sequence
  ENSG00000116329_36 (sequence is synthesized)
aacacatgtttgtcgcagttctgtaagaggtggaaaagggtcggggaccctgaaggatgaataggagttggccaccaaaaagaggaaatagcgtgtgcggaggcatggggatgtttaaat

SEQ ID NO: 215971 - DNA, 120 bp, Artificial Sequence
  ENSG00000116329_37 (sequence is synthesized)
gcttggcaaacccaacaagttgggtgcagctggagcatggggcttaactaagctcttctgtgtgccaggctctctgccaggtgtcttgtgtgcatcagcccacctgatcctcaggacagc

SEQ ID NO: 215972 - DNA, 120 bp, Artificial Sequence
  ENSG00000116329_38 (sequence is synthesized)
gtcacagggcctgttcgtagtggcagaacttgggtccctggaattccagggtccatgtttccagttaattccaggcatcagtgaagtagaaaggccttagaagctggaaccccagaatga

SEQ ID NO: 215973 - DNA, 120 bp, Artificial Sequence
  ENSG00000116329_39 (sequence is synthesized)
ggttttgaagacctaaaaccaaatggaaaaatctaaaggaaacgagcaattttccatgaacttttgttcctcctgaagctctccaaatcttcacgtttcagaatgtactgtgcatggtgc

SEQ ID NO: 215974 - DNA, 120 bp, Artificial Sequence
  ENSG00000116329_40 (sequence is synthesized)
attttaaagctctaaattgacagtgtaattctagatcgtcacagggttctcaaaactgcagagtaggtctgtttcccccaaaatttccatttatctccctccaggaggagggagggaagt

SEQ ID NO: 215975 - DNA, 120 bp, Artificial Sequence
  ENSG00000116329_41 (sequence is synthesized)
agggagggaagtttttgcccctgatttcaaaatgtcctactgtttcagatctcttcttcttcatcatcttttttttttttttttcagccagtgtcttgctctgttgcccagtctggagtg

SEQ ID NO: 215976 - DNA, 120 bp, Artificial Sequence
  ENSG00000116329_42 (sequence is synthesized)
agtgatcttcccacctcagcctcctgagaatctgggacgacgggtgtgtgacaccatgcccagcaattttatttttatttttattcatttattttgtttgggtttttttttttctgagac

SEQ ID NO: 215977 - DNA, 120 bp, Artificial Sequence
  ENSG00000116329_43 (sequence is synthesized)
tgacaccatgcccagcaattttatttttatttttattcatttattttgtttgggtttttttttttctgagacagggtctccctctgtcgcataggctggagtgcagtggcaccatctcgg

SEQ ID NO: 215978 - DNA, 65 bp, Artificial Sequence
  ENSG00000116329_44 (sequence is synthesized)
aacctccgcctcctgggttcaagtacccagctaatatttttatttttagtagagacggggtttca

SEQ ID NO: 215979 - DNA, 81 bp, Artificial Sequence
  ENSG00000116329_45 (sequence is synthesized)
tttttttttttttcaatagagaccagagtgtctctgtgttgcccagactggtcttgaacttctgtcctcaagcaattctcc

SEQ ID NO: 215980 - DNA, 120 bp, Artificial Sequence
  ENSG00000116329_46 (sequence is synthesized)
aattctcctgccttggcctcccaaagtactgggtttacaggtgtgagccactgtgcccagctctcatacctcgtcttgatgcagtagaagtagtggttaagcctggaatcagatcttggt

SEQ ID NO: 215981 - DNA, 120 bp, Artificial Sequence
  ENSG00000116329_47 (sequence is synthesized)
agtagtggttaagcctggaatcagatcttggttttccctctctgagcctcagtttcctcatctgtagagtagacttccttcacgggtggttgtgaggatttaatgtatgtatagggataa

SEQ ID NO: 215982 - DNA, 120 bp, Artificial Sequence
  ENSG00000116329_48 (sequence is synthesized)
ggcccagaacgtaagtaaactctaagtacatggtaagtggcagtcactgcttacaagtggagccagggttcagggtcagagctagagacctacagggaagagtaggtgagctgtcggggc

SEQ ID NO: 215983 - DNA, 120 bp, Artificial Sequence
  ENSG00000116329_49 (sequence is synthesized)
tagtgatggagagagagaagagactggagatccagcttggggatccccttgcttcctggcccaggagccaccatggagagtgagaagctgccagagaagcaggaggaggatggagagaat

SEQ ID NO: 215984 - DNA, 120 bp, Artificial Sequence
  ENSG00000116329_50 (sequence is synthesized)
gtgctaccatggaaactggaggaggagggcgttcccaggaggagggagtgatggataatgtcaagtgtcataagagaggatgcgagtagggagggcaggagggtgatgggagctctccaa

SEQ ID NO: 215985 - DNA, 120 bp, Artificial Sequence
  ENSG00000116329_51 (sequence is synthesized)
tttagttttttacatggcccaggcagcccccaagcctggatcaaatcccagctctcaagctaactggctgtgtgacctagacaagggatttgccttctctgagcttcagtttccttctag

SEQ ID NO: 215986 - DNA, 120 bp, Artificial Sequence
  ENSG00000116329_52 (sequence is synthesized)
agttgagatgtgggaattggtccatctctaatacgatcatcagcctcacttaataagagtcctagctttgccgaattcttggccacgtgctagcagtgtgatcttaggcaagtcacttca

SEQ ID NO: 215987 - DNA, 120 bp, Artificial Sequence
  ENSG00000116329_53 (sequence is synthesized)
cctccacgagagcactctctgaaagctagagatatggtaagcaaagtgccaccaaagtgcctggcacatagtggggcctcgatacaggcttattctctgataattacacgtgtgccagag

SEQ ID NO: 215988 - DNA, 89 bp, Artificial Sequence
  ENSG00000116329_54 (sequence is synthesized)
gatacaggcttattctctgataattacacgtgtgccagaggcagctgctctaaggaggcttgctgggcttggaattagaaatgctcctc

SEQ ID NO: 215989 - DNA, 67 bp, Artificial Sequence
  ENSG00000116329_55 (sequence is synthesized)
tactcaggaggctgaggcgggagaatcgcctgaacccaggaagcagaggttacagtgagccaagatc

SEQ ID NO: 215990 - DNA, 120 bp, Artificial Sequence
  ENSG00000116329_56 (sequence is synthesized)
tcctcaagttggagagggcccactagcatcctgagaggacttggaagaacaacagtccaggctgggcacctgctgggtctctgtccaaaggccagccctctctttgtgtcagccgcagat

SEQ ID NO: 215991 - DNA, 120 bp, Artificial Sequence
  ENSG00000116329_57 (sequence is synthesized)
ccctcacctagggcatgactactggctgccagctcccactaacacctgctgcagatccagactgaagccggccccagcggccccaaagcccctaggaagtgaccaccccccatccctggc

SEQ ID NO: 215992 - DNA, 120 bp, Artificial Sequence
  ENSG00000116329_58 (sequence is synthesized)
acccagatcctggcccctgcactcacacacaaaacacatacagatgcctctctttcatcatgtatttattcctttatttctgggagccgggaggagtgacgggagcaaatcaggacctgg

SEQ ID NO: 215993 - DNA, 120 bp, Artificial Sequence
  ENSG00000116329_59 (sequence is synthesized)
ccgccccacgctgagcttgcagatattgagagttgggtgacagatggctgtgtggttcaggctgcaggcagcttgggaattcaaaatggggcttagagaggagctggagggggccctcga

SEQ ID NO: 215994 - DNA, 120 bp, Artificial Sequence
  ENSG00000116329_60 (sequence is synthesized)
ggtggacgtagtgatgcagtagggcatggcactgcgaggttgcccgggttctagtcccagcaccatcaccggggatgagccgtttcagagtgtggcactctgtcacactccatttcattg

SEQ ID NO: 215995 - DNA, 120 bp, Artificial Sequence
  ENSG00000116329_61 (sequence is synthesized)
agaggccactgagacattatcaatgggtaatgtacagcacttccatggcataactcatttaatcttcacagcatgatgatgaggtaggcatagtatcattacctccattttacagatggg

SEQ ID NO: 215996 - DNA, 120 bp, Artificial Sequence
  ENSG00000116329_62 (sequence is synthesized)
gaaactgaggctcagagaagggaatgacttgcccaagaccacatggcttctcagtgattggctcagctaggatcccacctttggtccttcaagtccacttcctctgctttcctcttcctg

SEQ ID NO: 215997 - DNA, 120 bp, Artificial Sequence
  ENSG00000116329_63 (sequence is synthesized)
caccctgagaggaaatgctctgagtataccgagggtcctcaggagactctcacatccagctcacagtcacaggctgagcattccctgtgctgggttctgtacctcatcatgttggcagca

SEQ ID NO: 215998 - DNA, 120 bp, Artificial Sequence
  ENSG00000116329_64 (sequence is synthesized)
gaggcacgtgccagctgctcaaaaaactgctgtaaccttggtagatccctctccccatccatttcttccttgccttggaagtcctgcttgtttgataattttctgactgactgccatgtt

SEQ ID NO: 215999 - DNA, 120 bp, Artificial Sequence
  ENSG00000116329_65 (sequence is synthesized)
gttgccttgtgaccttgggcatgtcatttcactctgagccatttctcagtcatggatgacagcacttagctgatgagaagttgagaagattcagaaagaggctatgagtgaaggaccttg

SEQ ID NO: 216000 - DNA, 120 bp, Artificial Sequence
  ENSG00000116329_66 (sequence is synthesized)
tctgttttggtcatgaaagtgttcccaggaaatgcaaatggacacacagtagttatctactgagctaatgaacaatgtccctggtgcatagtaagtgcccaataaaatgcagcttttttc

SEQ ID NO: 216001 - DNA, 82 bp, Artificial Sequence
  ENSG00000116329_67 (sequence is synthesized)
ctggtgcatagtaagtgcccaataaaatgcagcttttttcatattatctaatgttttaggccatgcctgcaccaacccatgc

SEQ ID NO: 216002 - DNA, 120 bp, Artificial Sequence
  ENSG00000116329_68 (sequence is synthesized)
catggttcttaatgctgcaggtgggtccggagaaaggcttttctcttttaaccatctccttgaatttcagaaggtgggacaacatgtgctggaaagcagttcttaagaggacatcttttc

SEQ ID NO: 216003 - DNA, 120 bp, Artificial Sequence
  ENSG00000116329_69 (sequence is synthesized)
ccaagctccttagccttagctgtcctctcctgccctcaccaggactgccctctcagggacccaagaggaagggacagcctggaaaggaagaaggtcccgggccatctgcgtcatggggat

SEQ ID NO: 216004 - DNA, 120 bp, Artificial Sequence
  ENSG00000116329_70 (sequence is synthesized)
ggagtcccttggcgtgtgccggtgcaaatacactcctgtaacggggctcatctagaatctcctctcggaatgaggagaccgcaaatgtggttttgaatcttcattgtccacttcattgct

SEQ ID NO: 216005 - DNA, 120 bp, Artificial Sequence
  ENSG00000116329_71 (sequence is synthesized)
gtggtgttgggcaggtctctgtccctctctgggcctctgcacgatggaggggtaggagttgatggttctgaaggctctgccatcctggaaaagaactgagacacttccctcatgttcctg

SEQ ID NO: 216006 - DNA, 120 bp, Artificial Sequence
  ENSG00000116329_72 (sequence is synthesized)
ggtcccagaaacagacatctgttggtaaaatctactgggcatttgcccagagacagggaaaagaatgcctgggggtctgtaataggagctgccccaattaggggcagggaggcgggcatg

SEQ ID NO: 216007 - DNA, 120 bp, Artificial Sequence
  ENSG00000116329_73 (sequence is synthesized)
taaaaaaggaagcttaaagctttgttttcaggctttttgcctaccccaggctccatcttggtaccaagtactcaaccttctgttttctcaataaagtgagccctcttctcggtgtctgca

SEQ ID NO: 216008 - DNA, 120 bp, Artificial Sequence
  ENSG00000116337_0 (sequence is synthesized)
gggtgctgggttttcacggagtatgcctgccctgccccgggaggactgtgtttgagcttggactcgctcgctgctgaattcctgtttgttattcttttttcttccaggctagctggaagg

SEQ ID NO: 216009 - DNA, 120 bp, Artificial Sequence
  ENSG00000116337_1 (sequence is synthesized)
accagctagcctggactttggcttctttgcccgggagccctggcatgatggggtgagggctcttggtgggttagtggagagctgggggctggcccttccccatcttcttttctacccacc

SEQ ID NO: 216010 - DNA, 120 bp, Artificial Sequence
  ENSG00000116337_2 (sequence is synthesized)
ccctccccgccccccgccaggcccagccaccatcagtcacgtcactcctgggactgaggaggcaggggagggataaggggcagagatggaggccccactccccgaggttgcctagacaac

SEQ ID NO: 216011 - DNA, 120 bp, Artificial Sequence
  ENSG00000116337_3 (sequence is synthesized)
atgagaaatcgtggccagggcctcttccgcctgcggagccgctgcttcctgcatcagtcactcccgctgggggcggggcggaggaaggggttggatgtggcagagccaggccccagccgg

SEQ ID NO: 216012 - DNA, 120 bp, Artificial Sequence
  ENSG00000116337_4 (sequence is synthesized)
tgccgctcagactcccccgctgtcgccgccgtggtcccagccatggcatcctatccatctggctctggcaagcccaaggccaaatatccctttaagaagcgggccagcctgcaggcctcc

SEQ ID NO: 216013 - DNA, 120 bp, Artificial Sequence
  ENSG00000116337_5 (sequence is synthesized)
actgcagctccagaggctcggggtggtctgggggcccctccgctgcagtctgcccgatccctgccgggccccgccccctgcctcaagcacttcccgctcgacctgcgcacgtctatggat

SEQ ID NO: 216014 - DNA, 120 bp, Artificial Sequence
  ENSG00000116337_6 (sequence is synthesized)
ggcaaatgcaaggagatcgccgaggagctgttcacccgctcactggctgagagcgagctccgtagtgccccgtatgagttccccgaggagagccccattgaacagctggaggagcggcgg

SEQ ID NO: 216015 - DNA, 120 bp, Artificial Sequence
  ENSG00000116337_7 (sequence is synthesized)
cagcggctggagcggcagatcagccaggatgtcaagctggagccagacatcctgcttcgggccaagcaagatttcctgaagacggacagtgactcggacctacagctctacaaggaacag

SEQ ID NO: 216016 - DNA, 120 bp, Artificial Sequence
  ENSG00000116337_8 (sequence is synthesized)
ggtgaggggcagggtgaccggagcctgcgggagcgtgatgtgctggaacgggagtttcagcgggtcaccatctctggggaggagaagtgtggggtgccgttcacagacctgctggatgca

SEQ ID NO: 216017 - DNA, 120 bp, Artificial Sequence
  ENSG00000116337_9 (sequence is synthesized)
gccaagagtgtggtgcgggcgctcttcatccgggagaagtacatggccctgtccctgcagagcttctgccccaccacccgccgctacctgcagcagctggctgaaaagcctctggagacc

SEQ ID NO: 216018 - DNA, 120 bp, Artificial Sequence
  ENSG00000116337_10 (sequence is synthesized)
cggacctatgaacagggccccgacacccctgtgtctgctgatgccccggtgcacccccctgcgctggagcagcacccgtatgagcactgtgagccaagcaccatgcctggggacctgggc

SEQ ID NO: 216019 - DNA, 120 bp, Artificial Sequence
  ENSG00000116337_11 (sequence is synthesized)
ttgggtctgcgcatggtgcggggtgtggtgcacgtctacacccgcagggaacccgacgagcattgctcagaggtggagctgccataccctgacctgcaggaatttgtggctgacgtcaat

SEQ ID NO: 216020 - DNA, 120 bp, Artificial Sequence
  ENSG00000116337_12 (sequence is synthesized)
gtgctgatggccctgattatcaatggccccataaagtcattctgctaccgccggctgcagtacctgagctccaagttccagatgcatgtgctactcaatgagatgaaggagctggccgcc

SEQ ID NO: 216021 - DNA, 120 bp, Artificial Sequence
  ENSG00000116337_13 (sequence is synthesized)
cagaagaaagtgccacaccgagatttctacaacatccgcaaggtggacacccacatccatgcctcgtcctgcatgaaccagaagcatctgctgcgcttcatcaagcgggcaatgaagcgg

SEQ ID NO: 216022 - DNA, 120 bp, Artificial Sequence
  ENSG00000116337_14 (sequence is synthesized)
cacctggaggagatcgtgcacgtggagcagggccgtgaacagacgctgcgggaggtctttgagagcatgaatctcacggcctacgacctgagtgtggacacgctggatgtgcatgcggac

SEQ ID NO: 216023 - DNA, 120 bp, Artificial Sequence
  ENSG00000116337_15 (sequence is synthesized)
aggaacactttccatcgctttgacaagtttaatgccaaatacaaccctattggggagtccgtcctccgagagatcttcatcaagacggacaacagggtatctgggaagtactttgctcac

SEQ ID NO: 216024 - DNA, 120 bp, Artificial Sequence
  ENSG00000116337_16 (sequence is synthesized)
gctctccatttacgggcgctcgagggatgagtgggacaagctggcgcgctgggccgtcatgcaccgcgtgcactcccccaacgtgcgctggctggtgcaggtgccccgcctctttgatgt

SEQ ID NO: 216025 - DNA, 120 bp, Artificial Sequence
  ENSG00000116337_17 (sequence is synthesized)
gtaccgtaccaagggccagctggccaacttccaggagatgctggagaacatcttcctgccactgttcgaggccactgtgcaccctgccagccacccggaactgcatctcttcttagagca

SEQ ID NO: 216026 - DNA, 120 bp, Artificial Sequence
  ENSG00000116337_18 (sequence is synthesized)
cgtggatggttttgacagcgtggatgatgagtccaagcctgaaaaccatgtcttcaacctggagagccccctgcctgaggcgtgggtggaggaggacaacccaccctatgcctactacct

SEQ ID NO: 216027 - DNA, 120 bp, Artificial Sequence
  ENSG00000116337_19 (sequence is synthesized)
gtactacacctttgccaacatggccatgttgaaccacctgcgcaggcagaggggcttccacacgtttgtgctgaggccacactgtggggaggctgggcccatccaccacctggtgtcagc

SEQ ID NO: 216028 - DNA, 120 bp, Artificial Sequence
  ENSG00000116337_20 (sequence is synthesized)
cttcatgctggctgagaacatttcccacgggctccttctgcgcaaggcccccgtcctgcagtacctgtactacctggcccagatcggcatcgccatgtctccgctcagcaacaacagcct

SEQ ID NO: 216029 - DNA, 120 bp, Artificial Sequence
  ENSG00000116337_21 (sequence is synthesized)
cttcctcagctatcaccggaatccgctaccggagtacctgtcccgcggcctcatggtctccctgtccactgatgatcccttgcagttccacttcaccaaggagccgctgatggaggagta

SEQ ID NO: 216030 - DNA, 120 bp, Artificial Sequence
  ENSG00000116337_22 (sequence is synthesized)
cagcatcgccacccaggtgtggaagctcagctcctgcgatatgtgtgagctggcccgcaacagcgtgctcatgagcggcttctcgcacaaggtaaagagccactggctgggacccaacta

SEQ ID NO: 216031 - DNA, 120 bp, Artificial Sequence
  ENSG00000116337_23 (sequence is synthesized)
taccaaggaaggccctgaggggaatgacatccgccggaccaatgtgccagacatccgcgtgggctaccgctacgagaccctgtgccaggagctggcgctcatcacgcaggcagtccagag

SEQ ID NO: 216032 - DNA, 120 bp, Artificial Sequence
  ENSG00000116337_24 (sequence is synthesized)
tgagatgctggagaccattccagaggaggcgggtatcaccatgagcccagggcctcaatgagcctggtccatgaagtgcccaccacatcgcagcacttttaccacgttttgtcctcagac

SEQ ID NO: 216033 - DNA, 120 bp, Artificial Sequence
  ENSG00000116337_25 (sequence is synthesized)
cccgcccatgctgtgtggtctctgcatgtctccattcttctctgtctctgtcttgcatgtctcctaccatgtcactgtccctgggccacccagtgaaagcaaagcctgggaatctgctca

SEQ ID NO: 216034 - DNA, 120 bp, Artificial Sequence
  ENSG00000116337_26 (sequence is synthesized)
ttgttgtttgggctcaggtattgagcctgatggcccaggtattgagggcctcccctgctggtggccctgtcctgggatcctcagaagcctgactgtcctatgggcttctccagtgtccac

SEQ ID NO: 216035 - DNA, 120 bp, Artificial Sequence
  ENSG00000116337_27 (sequence is synthesized)
aggggcttgggatggttgtggggggctggcccctctagcctttccggtccttcctgggcaaatctaagccttggccagggccgaagtttaggcccctgtcttgttcatgtagccgagggg

SEQ ID NO: 216036 - DNA, 120 bp, Artificial Sequence
  ENSG00000116337_28 (sequence is synthesized)
caggcgggggacctctacacctctgctgtgggcacggggctgctgagggtctgtggaactccagcagctctgcactgggtagagctgggcctagagctcagtcacaggcctgggcttcct

SEQ ID NO: 216037 - DNA, 120 bp, Artificial Sequence
  ENSG00000116337_29 (sequence is synthesized)
ggcctgagtgggtagacgcaggcggcagaggtgctggaccacatctccgccaagtcactgcccagcagccttctccgtcctgtccccagcccacgtgctccttgggtgtcagcttcctgt

SEQ ID NO: 216038 - DNA, 120 bp, Artificial Sequence
  ENSG00000116337_30 (sequence is synthesized)
gcctctgtgggagagggcagctgccttgtgttatgtctggggccacagttgctgcaaagtcctggatctgccactcaaccccgggagtggtgttcccagtgtggctcccagagctttgac

SEQ ID NO: 216039 - DNA, 120 bp, Artificial Sequence
  ENSG00000116337_31 (sequence is synthesized)
cagattgtgatcccagctggcccctatgttgtgttctggactgaggcctttgctgtgaactgcagtgtttcatacgaaccatctttcctagtgcatgagaaataaagattatttaagtaa

SEQ ID NO: 216040 - DNA, 120 bp, Artificial Sequence
  ENSG00000116337_32 (sequence is synthesized)
aagggccgcagagcctggcgcggagccggcgagattttggtggggtctcacctgttgcgtgactcccccacagtccggccgcgggagtccgaccctgaatgcccagggagtgttgagaga

SEQ ID NO: 216041 - DNA, 120 bp, Artificial Sequence
  ENSG00000116337_33 (sequence is synthesized)
aatctggacgagtttcgggtcccgctcccttgggagcacgtggcctaccagcctctcgattgcagggttgggtggtcgcgacaccggggtcgccttgaggccagtccggctgccgaggtc

SEQ ID NO: 216042 - DNA, 120 bp, Artificial Sequence
  ENSG00000116337_34 (sequence is synthesized)
tgcgggagtccacctccggccagctggcaattttgaaagactgccttactttccccatctcagtgccagggcaggggcccttggagtgacttggctggggtctgtggcccgatccccctg

SEQ ID NO: 216043 - DNA, 120 bp, Artificial Sequence
  ENSG00000116337_35 (sequence is synthesized)
gagggatgagtgggacaagctggcgcgctgggccgtcatgcaccgcgtgcactcccccaacgtgcgctggctggtgcaggtgccccgcctcttgtgagtgtccctggagtgggaggggaa

SEQ ID NO: 216044 - DNA, 120 bp, Artificial Sequence
  ENSG00000116337_36 (sequence is synthesized)
cctgcggggtcatattcaaggggtcagggcctgcctcctgccctcctaggatggctgagcctcccttgtccctgccaacccctctgagtgcaaggaagggcttcctggtcccatccatgg

SEQ ID NO: 216045 - DNA, 120 bp, Artificial Sequence
  ENSG00000116337_37 (sequence is synthesized)
gagctgggctaccccgggagctgagggtcagatgtggaaggaaaatgactggtgcaaggtctctactgtcctgagggtgttctctgtgcccaggtctgtgccatccagaaagggtgtccc

SEQ ID NO: 216046 - DNA, 120 bp, Artificial Sequence
  ENSG00000116337_38 (sequence is synthesized)
atgtgcacagcacctagtgcggtgctgggacctgggagcaagggccgtccctcgggatctgcctgacttctcacccctcttgcctctaggctggagccagacatcctgcttcgggccaag

SEQ ID NO: 216047 - DNA, 120 bp, Artificial Sequence
  ENSG00000116337_39 (sequence is synthesized)
gagtgtgtgcttcctggcctcaggatagatgctgggctctgtcttgccacctctcgcccaaggtgctggtcccctcagagggggccacctcctccggcatcctctctgtggtggtgcccc

SEQ ID NO: 216048 - DNA, 120 bp, Artificial Sequence
  ENSG00000116337_40 (sequence is synthesized)
actgtagaggtggaggccctcttcagttctggagttcgtcttatctcccaactctgatgctccttcccttggtttctgggctcccttgaactcccctagctccgtgctcacggccatctc

SEQ ID NO: 216049 - DNA, 120 bp, Artificial Sequence
  ENSG00000116337_41 (sequence is synthesized)
agggtctcccctgcttgcagctgcacttggtacagcctgtgccagcccctgagggaccggctgcagcttcactggcaaacaggcgggcaaggggcacagggctgctggccggagctgcct

SEQ ID NO: 216050 - DNA, 120 bp, Artificial Sequence
  ENSG00000116337_42 (sequence is synthesized)
attactgtgcatacatcatcctgatgtctgtgacctcctgcctctgcctctatcgtcagttcctgtgcctttcctgtggctgtcccactttatgatcacatttacgaacagtttcctgat

SEQ ID NO: 216051 - DNA, 120 bp, Artificial Sequence
  ENSG00000116337_43 (sequence is synthesized)
agacgaccaagtgagattgcaggggcaggacttctgcttaaaatgaatcctgggacaatgataacagctacctttcactgggccctcacttcgtgccaggcactgtgtaaagggacttta

SEQ ID NO: 216052 - DNA, 120 bp, Artificial Sequence
  ENSG00000116337_44 (sequence is synthesized)
acctttgccaacatggccatgttgaaccacctgcgcaggtgcctgcaccaccctgtgtctgcttgctatgccatctctcgcccaacaaacctcactcttggcaccttgggccagggccac

SEQ ID NO: 216053 - DNA, 120 bp, Artificial Sequence
  ENSG00000116337_45 (sequence is synthesized)
tagacctctgacccacctgttgcctggactggatgggttctttctctgcccttggagctacatctgtcacccctcacagccagtaatctacccctgtcccccttatcccaggcctgcata

SEQ ID NO: 216054 - DNA, 120 bp, Artificial Sequence
  ENSG00000116337_46 (sequence is synthesized)
gctgtcgccgccgtggtcccagccatggcatcctatccatctggctctggcaagcccaaggccaaatatccctttaagaagcgggccagcctgcaggcctccactgcagctccagatgac

SEQ ID NO: 216055 - DNA, 120 bp, Artificial Sequence
  ENSG00000116337_47 (sequence is synthesized)
ccatctctgccccatgccatgtgccctagcctcctgggcttctcagcctggtgcctgggcacctctgccctgcctgcctctccctacaacccaggctcattccaacctcttggggtacag

SEQ ID NO: 216056 - DNA, 120 bp, Artificial Sequence
  ENSG00000116337_48 (sequence is synthesized)
gggtggaggttgggcaggagctgtctgacctactgggtcttcaacatctcttgccctctgtggggcctttgggttgggcagtgggtggcttggaagagccctgctctgactttaccctcc

SEQ ID NO: 216057 - DNA, 120 bp, Artificial Sequence
  ENSG00000116337_49 (sequence is synthesized)
ttgcgttggcttgggagaggccacagggctcggcttgctctcctcacccaagctcccctccatgccagttgctcagaggtggagctgccataccctgacctgcaggaatttgtggctgac

SEQ ID NO: 216058 - DNA, 120 bp, Artificial Sequence
  ENSG00000116337_50 (sequence is synthesized)
tgggcagcctcccctcggaactcgggcatcatggcctcagggcctcttccgcctgcggagccgctgcttcctgcatcagtcactcccgctgggggcggggcggaggaaggggttggatgt

SEQ ID NO: 216059 - DNA, 120 bp, Artificial Sequence
  ENSG00000116337_51 (sequence is synthesized)
ggatctgggggcttttagggggtgagactcaaggagggtaggcagatgaccccctgaagagctctgactcagctcacctcatgtctgactcagctcacctcatgtctaggaggtgatgtc

SEQ ID NO: 216060 - DNA, 80 bp, Artificial Sequence
  ENSG00000116350_0 (sequence is synthesized)
gcgtgctcgcgtacgtcgccggggttcggctgcgtccgtcccgccgcccgcccgttgccgccgccgccgctgccgccgtg

SEQ ID NO: 216061 - DNA, 120 bp, Artificial Sequence
  ENSG00000116350_1 (sequence is synthesized)
ggggccagccatcactgccgttgccgggatgccgcgggtgtacatcggccgcctgagctaccaggcccgggagcgcgatgtggagcgcttctttaagggctacgggaagatcctggaggt

SEQ ID NO: 216062 - DNA, 120 bp, Artificial Sequence
  ENSG00000116350_2 (sequence is synthesized)
ggatctgaagaacggatatggttttgtggagtttgatgatctgcgtgatgcagatgatgctgtttatgaactgaatggcaaagacctttgtggtgagcgagtaattgttgagcatgcccg

SEQ ID NO: 216063 - DNA, 120 bp, Artificial Sequence
  ENSG00000116350_3 (sequence is synthesized)
cggcccacggcgagatggcagttacggttctggacgcagtggatatggttatagaagaagtggccgagataaatatggccctcctactcgcacagagtacagacttattgtggagaattt

SEQ ID NO: 216064 - DNA, 120 bp, Artificial Sequence
  ENSG00000116350_4 (sequence is synthesized)
gtcaagtcggtgcagctggcaagacctaaaggattatatgcgtcaggcaggagaagtgacttatgcagatgctcacaagggacgcaaaaatgaaggggtgattgaatttgtatcttattc

SEQ ID NO: 216065 - DNA, 120 bp, Artificial Sequence
  ENSG00000116350_5 (sequence is synthesized)
tgatatgaaaagagctttggaaaagttggatggaactgaagtcaatgggagaaaaatcagattagttgaagacaagccaggttccagacgacgccggtcctactccagaagccggagtca

SEQ ID NO: 216066 - DNA, 120 bp, Artificial Sequence
  ENSG00000116350_6 (sequence is synthesized)
ttcaaggtctcgctctcgaagcagacattcccgtaagagcagaagccgaagtggcagcagcaaaagcagtcattctaagagtagatctcggtccaggtcgggctcccgctcccggagcaa

SEQ ID NO: 216067 - DNA, 120 bp, Artificial Sequence
  ENSG00000116350_7 (sequence is synthesized)
gagccggagccggagccagagtcggagccggagcaagaaagagaaaagcaggagccccagcaaggaaaagagccgcagccgcagccatagcgctggcaagagccgcagcaagagcaaaga

SEQ ID NO: 216068 - DNA, 120 bp, Artificial Sequence
  ENSG00000116350_8 (sequence is synthesized)
ccaagctgaagagaagatccaaaacaatgacaatgtcgggaaacccaagagccggagtcctagcaggcataaaagtaagagcaaaagtcggagcaggagtcaggagaggagagtggagga

SEQ ID NO: 216069 - DNA, 120 bp, Artificial Sequence
  ENSG00000116350_9 (sequence is synthesized)
gcaggggcaggagccaggagaagagcctccgccagagtcggagccggagcaggagcaaagggggcagcaggagccggagcaggagccgcagcaagagcaaggacaagaggaagggcagga

SEQ ID NO: 216070 - DNA, 120 bp, Artificial Sequence
  ENSG00000116350_10 (sequence is synthesized)
agagaagcagagaggagagccgcagtcgcagtcgcagccgcagcaagagtgagaggagcagaaagcgaggcagcaagcgagacagcaaggcgggcagcagcaagaagaagaagaaggaag

SEQ ID NO: 216071 - DNA, 120 bp, Artificial Sequence
  ENSG00000116350_11 (sequence is synthesized)
acactgaccgctcccagtccagatctccatcccgctccgtgtcaaaggagcgggaacatgccaagtctgaatccagccagagggaaggtcgaggagagagtgagaatgctggcaccaatc

SEQ ID NO: 216072 - DNA, 120 bp, Artificial Sequence
  ENSG00000116350_12 (sequence is synthesized)
aggagacccggtccaggtcgagatccaattccaaatcgaaaccaaaccttccatcagaatcacgctccagatcaaagtcagcttcaaaaacccgatctcggtccaagtctagatccaggt

SEQ ID NO: 216073 - DNA, 120 bp, Artificial Sequence
  ENSG00000116350_13 (sequence is synthesized)
ctgcttccagatcgccctcccgatctagatctaggtcccactcaaggtcctaactggctatggccacagctggaactacccgagaagtcttttgtacatgtttggtagccgtagcacaag

SEQ ID NO: 216074 - DNA, 120 bp, Artificial Sequence
  ENSG00000116350_14 (sequence is synthesized)
tgattggagtagaacatgtcactgctgtacatttttaactcccctaatggtgtgtctataattgttaaatctaagtgcttcctctcagtaaagcctcctggcaccaggccttcctgctcg

SEQ ID NO: 216075 - DNA, 120 bp, Artificial Sequence
  ENSG00000116350_15 (sequence is synthesized)
actgaaaaaaattttctctttgaaaatccccttttactcatggcccacagtagaatatccaaaacgccttggctttcaggcctggcctttcctacagggagctcagtaacctggacggct

SEQ ID NO: 216076 - DNA, 120 bp, Artificial Sequence
  ENSG00000116350_16 (sequence is synthesized)
ctaaggctggaatgaccacataggtaggtatggtgagttcaaccatttttgctcttgaattgatgcccttcgatgtatgccatttagtgaaagtgctaagtcttaagtttcctaccactt

SEQ ID NO: 216077 - DNA, 120 bp, Artificial Sequence
  ENSG00000116350_17 (sequence is synthesized)
tggtttcatatttttggacttaacaaagttgtgaatagcacagtcgaggaaaattgatacctgcagtaacccataggaaataaactgtagagttccatattctggtattgtgattatatt

SEQ ID NO: 216078 - DNA, 120 bp, Artificial Sequence
  ENSG00000116350_18 (sequence is synthesized)
gttttatattaaaaaagaaaagaaaagaattttttttaattttatttttccccgtcttgcaaagtatagtgacccctgtttccattaaatttgaataaagactatttttgcttgacaaaa

SEQ ID NO: 216079 - DNA, 120 bp, Artificial Sequence
  ENSG00000116350_19 (sequence is synthesized)
aacggtctgttatgttctgaacccacacatgttttcggaaggaccagatggctgacactggctaatgggaaccaaaagacgagtgaaagtaacctggttgtcacatacccccagcttaga

SEQ ID NO: 216080 - DNA, 120 bp, Artificial Sequence
  ENSG00000116350_20 (sequence is synthesized)
ggtgcttcaccctgccccaaggtggggaaagatcaagtgcagactgagctgtggccaacgtttgcagaccaggaatccacactagctctaatcagagagcccttggtgtgcgggaactgc

SEQ ID NO: 216081 - DNA, 120 bp, Artificial Sequence
  ENSG00000116350_21 (sequence is synthesized)
cagtttgccgacgtgaaaagagtcccagactgggtaatggtgagccctgaagtcgcaccccagctctgccactcagtgagcacggcaacatccctaatcctgaccagccatggagaggtt

SEQ ID NO: 216082 - DNA, 120 bp, Artificial Sequence
  ENSG00000116350_22 (sequence is synthesized)
cctttgaggctaagatgactgcctgttccatttgctgaccttgggttacctttccatgcgtggctctttgaaccattgtggcccttggctgaccaaaaacaggaagccatgtgacgaccg

SEQ ID NO: 216083 - DNA, 86 bp, Artificial Sequence
  ENSG00000116350_23 (sequence is synthesized)
tggtgaaaccctatctctactaaaaaaaaaatacaaaaaaaattagccgggcctgttggccttaggagaatggcgtgaacccggga

SEQ ID NO: 216084 - DNA, 120 bp, Artificial Sequence
  ENSG00000116350_24 (sequence is synthesized)
aaaagcctttttgactcattagagaataaatgtaggttaattgtagatcatttagatattatgaaagcataaagtgaaaagtatcattaagcatccttttaagatgggtgaggttttacg

SEQ ID NO: 216085 - DNA, 120 bp, Artificial Sequence
  ENSG00000116350_25 (sequence is synthesized)
tgcaattttgtgtcacgctttttttacttaatttatctcatgtattttctattacattaaaatcttccttattaatggcttcataaaatccattgtatggcaatattatgacttacccaa

SEQ ID NO: 216086 - DNA, 120 bp, Artificial Sequence
  ENSG00000116350_26 (sequence is synthesized)
ccattcctcttatattgtctaccttttttttggtctcctaattcttgctgttataagtaaccctgtgatgggtattatgtgcataaaactttgtttgcatttttattatccctgagtaca

SEQ ID NO: 216087 - DNA, 120 bp, Artificial Sequence
  ENSG00000116350_27 (sequence is synthesized)
tatggattccatgaaataaaattcatgtgtcacagcaggagtgaacatattcaagtatctcagtgcatataaccaaataactttccagaaaagctacaccagttacacttaacacccgca

SEQ ID NO: 216088 - DNA, 120 bp, Artificial Sequence
  ENSG00000116350_28 (sequence is synthesized)
cacccgcagtgtatgagcatgcccgtgtgatgggcacttcaacagcatggagtacccctgttgtgtttgctggccaggcgtggtggctcacgtctgtaattccagcactttaggaggcca

SEQ ID NO: 216089 - DNA, 74 bp, Artificial Sequence
  ENSG00000116350_29 (sequence is synthesized)
agttgcagtgtgagatcacaccattaaataaaaataaaagatgctaatttaccaagtgaaaaataatcaggaag

SEQ ID NO: 216090 - DNA, 120 bp, Artificial Sequence
  ENSG00000116350_30 (sequence is synthesized)
taaaagatgctaatttaccaagtgaaaaataatcaggaagtttttcttgaatgaataataaatagagataggactatgaattaagtagcattctgtcattgttttattagtaatataact

SEQ ID NO: 216091 - DNA, 120 bp, Artificial Sequence
  ENSG00000116350_31 (sequence is synthesized)
attacaaatgtgatcaaatttttttttattaaaagtcactttttaaagtcaacttaccccccaaaaaagtgtattatttttttcccccaatatatggggaatttaatttttttctgtcat

SEQ ID NO: 216092 - DNA, 120 bp, Artificial Sequence
  ENSG00000116350_32 (sequence is synthesized)
tttgaaaaatcaatgccaagagataataccatattgagatttttgaccaaatgttaacagcgtaaattgccctggttcaagacctccactccttggttcttggtcccttcagtttgtggt

SEQ ID NO: 216093 - DNA, 120 bp, Artificial Sequence
  ENSG00000116350_33 (sequence is synthesized)
atgaataaacatcatttgtaattatttgactaagtcatttaaaatccctgttcttcagtttaatatactgttttgctcctcctttctcattgaggtactgtatgaatttaagggccatac

SEQ ID NO: 216094 - DNA, 120 bp, Artificial Sequence
  ENSG00000116350_34 (sequence is synthesized)
gaagtatttgtcccttcttaaaagataggcacaggatatagactcggtaataaaatgtggtttgggtttctagtatttttttatgcttccaggtacccagaaccgcaaattttactttga

SEQ ID NO: 216095 - DNA, 120 bp, Artificial Sequence
  ENSG00000116350_35 (sequence is synthesized)
gctcctcagaagaaaggtgctccaggcatctgagagaataccgttggggtgatacttacaaatttgtaagctaacactgaaatcttaaaacttccgaaaatattaatgcatttgtatgac

SEQ ID NO: 216096 - DNA, 120 bp, Artificial Sequence
  ENSG00000116350_36 (sequence is synthesized)
ttatttttcaactgagtatgtcaaagtactttatgaacaagtgttgtccctagtttgtactgatggggaaactgaggcatggggtgataaggtgactggcccaaggttacaaaatgagtt

SEQ ID NO: 216097 - DNA, 120 bp, Artificial Sequence
  ENSG00000116350_37 (sequence is synthesized)
attgacaactccggaaatagaagattttttaaattcccatactagatacatgtgggcattgacattcaaagcttccctcatgctatttcctttagtcctgtcctttggggattgcctctg

SEQ ID NO: 216098 - DNA, 120 bp, Artificial Sequence
  ENSG00000116350_38 (sequence is synthesized)
agggtgagagggtagttcaggtttccgggcttgttcagcctttagtctctgtagaggcttccagcaagctgacaagttactgccaaaagtgagacagatggtattttttatgatgttgtc

SEQ ID NO: 216099 - DNA, 120 bp, Artificial Sequence
  ENSG00000116350_39 (sequence is synthesized)
cttagttggagactgctagtgattctcctcctcaggctactctttgaaaagctgtaaggtggtatcagctttatcgtggttggctgaggaaggatttgtacaagtaaatgttctctgcct

SEQ ID NO: 216100 - DNA, 120 bp, Artificial Sequence
  ENSG00000116350_40 (sequence is synthesized)
tattgtcattcctagggccgtctggtcttatagtaccctgaaggtgagggattagattatgctctgaatttgtatgcccatagtttgaggaaatgttttacttgagttttctgtgtgttg

SEQ ID NO: 216101 - DNA, 120 bp, Artificial Sequence
  ENSG00000116350_41 (sequence is synthesized)
agatgaaagtctcccaggctaaagatttctgaactgcacgcaatgtctgaagaagcgcttgaaaggcactttatttctcccaggtccccaaccatgggtttaggtttttatgccagaaag

SEQ ID NO: 216102 - DNA, 120 bp, Artificial Sequence
  ENSG00000116350_42 (sequence is synthesized)
gggaccttcatgaacaaagacccccaagacctagagagaagaggaagtctgaaagagggaggtttgaattcagccttcaggaatgaagagggcagacagagcaggaggctcaggcaaggg

SEQ ID NO: 216103 - DNA, 120 bp, Artificial Sequence
  ENSG00000116350_43 (sequence is synthesized)
agtcaggaaccacagaccagaaacatggacttggaaaggttttcatgtaattgaaatgaagctattgatccatccattttaaaagaatttgaaaaattcattaaaatacttaattagtgg

SEQ ID NO: 216104 - DNA, 120 bp, Artificial Sequence
  ENSG00000116350_44 (sequence is synthesized)
catccactaattaataaaagcatagggagtggcatctttaaccaaaaatgaaaatgaagaaacagactccagcccagggaccaggggcgattatgagggacatggtgcctcatacagcca

SEQ ID NO: 216105 - DNA, 120 bp, Artificial Sequence
  ENSG00000116350_45 (sequence is synthesized)
agatgatccaagaggcatcatctttaatgaagctttaacacctggcagcctgctcattgtgttgtttaagaggtaagtatgaactggttttgtttgtagcttttgtgtggaatcaggtag

SEQ ID NO: 216106 - DNA, 120 bp, Artificial Sequence
  ENSG00000116350_46 (sequence is synthesized)
tgctgtctgcagagtgtaaacctttatttctttaagtaggaataacagataaagtaattctatattaaatcccaagagttttattctaaattggtaatgtgactttcatctctcgagttt

SEQ ID NO: 216107 - DNA, 120 bp, Artificial Sequence
  ENSG00000116350_47 (sequence is synthesized)
tttcaaatcgtttttaatttgtggttgagtcttcacgaacttcttgtcatcaggcaatagttgattccccttttttgaaagctttcaatttcatttatccttagtgttgaaaagtgtcag

SEQ ID NO: 216108 - DNA, 120 bp, Artificial Sequence
  ENSG00000116350_48 (sequence is synthesized)
aaaattgaaatggacacagatgattgtatctgccctccctttcaggaaagccatgttgactttaaaatatcaaaaaagaaagttcagttatgattgcagggggtaatgatagtttgatcc

SEQ ID NO: 216109 - DNA, 120 bp, Artificial Sequence
  ENSG00000116350_49 (sequence is synthesized)
acaaactatttgcagtgtaaaagtgaaataccttagctgacttagttcatttttgaaagttttgaatagctaaaacaaagttggcaaataggctcatagagtagttacagagtaagacta

SEQ ID NO: 216110 - DNA, 120 bp, Artificial Sequence
  ENSG00000116350_50 (sequence is synthesized)
aattcatatttgatgcagattcctctctacctcccattctgggaggatttagttttactgtttggtgtttaggataatgattgttctgtttttctcaccctactatgtgaatatatattc

SEQ ID NO: 216111 - DNA, 120 bp, Artificial Sequence
  ENSG00000116350_51 (sequence is synthesized)
tgttagagatgggctgttatctgcaatgtggactcaataccatgggcttgagtttggttagttcatcattagagattttttttcagcagttggtttactttatgagaaaggatcatgagt

SEQ ID NO: 216112 - DNA, 120 bp, Artificial Sequence
  ENSG00000116350_52 (sequence is synthesized)
ttaattttcccactgatatatttgtgttctcattgctgagatataagtttcttaatgatttgttacctttttctattttcctagactagtattaaaattttgatggcatatgggtttggt

SEQ ID NO: 216113 - DNA, 120 bp, Artificial Sequence
  ENSG00000116350_53 (sequence is synthesized)
tttctcataagatgcttatattcctgtgggcatttgtcttccacactacagcacataatttgatgaaactgattttctgtgcaagagcttgtgtttctccaactctggttttatggacca

SEQ ID NO: 216114 - DNA, 120 bp, Artificial Sequence
  ENSG00000116350_54 (sequence is synthesized)
cttttcattggtatataggaggcggttaaaacgtggtggtagaatgcaggttttaggttagctgggtgtgaagaatcccaggtctttgggatagtcttggcaagttactcaactcctcta

SEQ ID NO: 216115 - DNA, 120 bp, Artificial Sequence
  ENSG00000116350_55 (sequence is synthesized)
agttagtttcttgatctgtcagatgacagtaaacctcagagttgtgaaaattaaatggatataatgtgtgtaaagcacttagcataatgctttatacatcgtaaaactttcaaaaatagg

SEQ ID NO: 216116 - DNA, 120 bp, Artificial Sequence
  ENSG00000116350_56 (sequence is synthesized)
agtagtaattattacaaagaaatgtgaagaagagtcctagtgggctgcatgttaaaaatagtttttagttaatgaaaattaaatcacatcttagatgtttatcatctgcatggtactttt

SEQ ID NO: 216117 - DNA, 120 bp, Artificial Sequence
  ENSG00000116350_57 (sequence is synthesized)
ctggttgctgctttaacctttgtatagttgaaagtctgtaaactttctagtattctttgatttctggcccatttccctcctaccattcacgcttatattttttggttcaagtcaccattc

SEQ ID NO: 216118 - DNA, 120 bp, Artificial Sequence
  ENSG00000116350_58 (sequence is synthesized)
cttgcaaaactaattaaatacattcctaaatacataatattgccaatattcattcacatccaccacgtctagatccaagtcttcatcttctttatgctggtctaatttttgctgagcctt

SEQ ID NO: 216119 - DNA, 120 bp, Artificial Sequence
  ENSG00000116350_59 (sequence is synthesized)
agggcatacttttatcagtaacgtgcttttgttatcatgctaatttttaaagtaattaattgatattacatttaaacgtattgatgtttaagctattttgtaaattatgtatctttttta

SEQ ID NO: 216120 - DNA, 120 bp, Artificial Sequence
  ENSG00000116350_60 (sequence is synthesized)
ataatgtttaattttaattaaactaatgacaatttcttgtttataatactttataaatatgtttaatgatgtgtgtttgtgttgttgttgtttttttctctgtaatgcaattgtttaaca

SEQ ID NO: 216121 - DNA, 120 bp, Artificial Sequence
  ENSG00000116350_61 (sequence is synthesized)
aatctttttttttccatataaaatattcacaaaatgtttaatcactgtgagtaacaccagtaactgatttagtaatttggttacttatttctaaattgttaaattgttaatagttttaaa

SEQ ID NO: 216122 - DNA, 120 bp, Artificial Sequence
  ENSG00000116350_62 (sequence is synthesized)
tgcatgttaatcttaaatgcaaatattaatgaatatgtatacttacaactttttaaattaaatgtttatatttagctgattgcttctttaaaaatctattttagaattaagggtgggaat

SEQ ID NO: 216123 - DNA, 120 bp, Artificial Sequence
  ENSG00000116350_63 (sequence is synthesized)
gaatagagttaaaacgtgctattgtttggggtgggggtaaataatatatttaagggggggtgtgtgctgtgtcattttttttccttttcttccactgaaataatcttatttatttgaacc

SEQ ID NO: 216124 - DNA, 120 bp, Artificial Sequence
  ENSG00000116350_64 (sequence is synthesized)
ttccatctggttcaataacttagaattttgaactgaacatttatttgtaaaactcttgaactcttaggtcatgagtacaaatagaagtcccttctcttagaaatcagaggccttgctcac

SEQ ID NO: 216125 - DNA, 120 bp, Artificial Sequence
  ENSG00000116353_0 (sequence is synthesized)
gtgttggttggagcgagcatgtgggtctgcagtaccctgtggcgggtgcgaacccccgcccggcagtggcgggggctgctcccagcttctggctgtcacggacctgccgcctcctcctac

SEQ ID NO: 216126 - DNA, 120 bp, Artificial Sequence
  ENSG00000116353_1 (sequence is synthesized)
tccgcatccgccgagcctgcccgggtccgggcgcttgtctatgggcaccacggggatccagccaaggtcgtcgaaaccgtaattcctgggcacacatggcagctcagaaatgttgcctga

SEQ ID NO: 216127 - DNA, 120 bp, Artificial Sequence
  ENSG00000116353_2 (sequence is synthesized)
cctactttgaggagatgatttgagcgaaacacccattctagcctggatgacatgaacatctccgtttggctttgtgcttagactcaagaacctggagctagctgctgtgagaggatcaga

SEQ ID NO: 216128 - DNA, 120 bp, Artificial Sequence
  ENSG00000116353_3 (sequence is synthesized)
tgtccgtgtgaagatgctggcggcccctatcaatccatctgacataaatatgatccaaggaaactacggattccttcctgaactgcctgctgttggagggaacgaaggtgttgcacaggt

SEQ ID NO: 216129 - DNA, 120 bp, Artificial Sequence
  ENSG00000116353_4 (sequence is synthesized)
ggtagcggtgggcagcaatgtgaccgggctgaagccaggagactgggtgattccagcaaatgctggtttaggaacctggcggaccgaggctgtgttcagcgaggaagcactgatccaagt

SEQ ID NO: 216130 - DNA, 120 bp, Artificial Sequence
  ENSG00000116353_5 (sequence is synthesized)
tccgagtgacatccctcttcagagcgctgccaccctgggtgtcaatccctgcacagcctacaggatgttgatggacttcgagcaactgcagccaggggattctgtcatccagaatgcatc

SEQ ID NO: 216131 - DNA, 120 bp, Artificial Sequence
  ENSG00000116353_6 (sequence is synthesized)
caacagcggagtggggcaagcagtcatccagatcgccgcagccctgggcctaagaaccatcaatgtggtccgagacagacctgatatccagaagctgagtgacagactgaagagtctggg

SEQ ID NO: 216132 - DNA, 120 bp, Artificial Sequence
  ENSG00000116353_7 (sequence is synthesized)
ggctgagcatgtcatcacagaagaggagctaagaaggcccgaaatgaaaaacttctttaaggacatgccccagccacggcttgctctcaactgtgttggtgggaaaagctccacagagct

SEQ ID NO: 216133 - DNA, 120 bp, Artificial Sequence
  ENSG00000116353_8 (sequence is synthesized)
gctgcggcagttagcgcgtggaggaaccatggtaacctatggggggatggccaagcagcccgtcgtagcctctgtgagcctgctcatttttaaggatctcaaacttcgaggcttttggtt

SEQ ID NO: 216134 - DNA, 120 bp, Artificial Sequence
  ENSG00000116353_9 (sequence is synthesized)
gtcccagtggaagaaggatcacagtccagaccagttcaaggagctgatcctcacactgtgcgatctcatccgccgaggccagctcacagcccctgcctgctcccaggtcccgctgcagga

SEQ ID NO: 216135 - DNA, 120 bp, Artificial Sequence
  ENSG00000116353_10 (sequence is synthesized)
gaagcctccatgaagcccttcatatcttcaaagcagattctcaccatgtgatcatcccaaaagagctggagtgacatgggaggggaggcggatctgaggggctgggtgcaggcccctcag

SEQ ID NO: 216136 - DNA, 120 bp, Artificial Sequence
  ENSG00000116353_11 (sequence is synthesized)
ttggggctcccaccttccccagactactgttctcctcactgcctcttcctattaggaggatggtgaagccagccacggttttccccagggccagccttaaggtatctaataaagtctgaa

SEQ ID NO: 216137 - DNA, 120 bp, Artificial Sequence
  ENSG00000116353_12 (sequence is synthesized)
ctctcccttccaaaaagtagaagtcatccctgtcgagaaggaccaacactgtgcactggtcagctcacagcaccaagaggcccccttcctgcttttctgtcatgtgttcccccagtaatc

SEQ ID NO: 216138 - DNA, 120 bp, Artificial Sequence
  ENSG00000116353_13 (sequence is synthesized)
attttctgaccaccctgaaagcaaagcctgggtgggtactggcagtgcaaaggccagtaggccaccatccctggccccaagctgcacaagcccacagacgagggtcctgtagaacaaacg

SEQ ID NO: 216139 - DNA, 120 bp, Artificial Sequence
  ENSG00000116353_14 (sequence is synthesized)
ctttgatgtgcttctcaggtagcctgcggcccagtccagggcttggggaggatcagctgcatggaagagtgaatgccaggctgaggtcatcagggccctgaggaacttggacgtggggtc

SEQ ID NO: 216140 - DNA, 120 bp, Artificial Sequence
  ENSG00000116353_15 (sequence is synthesized)
ttcactctcatggaactgcccttctaactggagacatagacaatataccagtggttctcaaccagaggcaattttacccccaggagacatttgacaatgtctggggatatttctggctat

SEQ ID NO: 216141 - DNA, 120 bp, Artificial Sequence
  ENSG00000116353_16 (sequence is synthesized)
cacagcttatgaaggaggttgctactggcatctagcaggcagagtgagtgctgctgttaaacccaccacaggacacagaacagtctactgcaacaaagaattacccaaggcctggcgcgg

SEQ ID NO: 216142 - DNA, 120 bp, Artificial Sequence
  ENSG00000116353_17 (sequence is synthesized)
tcccagcactttgggaagccaaggcaagcggatcacttgagcccaggagttcaaggtcaacctaggtaacgtggtgaaacaccatctctacaaaaaatacaaacattagccaggtatggt

SEQ ID NO: 216143 - DNA, 120 bp, Artificial Sequence
  ENSG00000116353_18 (sequence is synthesized)
agcctaggcaacagagcaagaccctatatcaaaaaaaaaaaaaaaatctagccccaaatgttcaatgttcatgaggtcgttgataaaccgtgcattaaacaatctcacagtaattaccat

SEQ ID NO: 216144 - DNA, 120 bp, Artificial Sequence
  ENSG00000116353_19 (sequence is synthesized)
actgagtcccatcgccagttcgagccaagtccaggtcagcacaatgttgagtggaaactaggaccaaagtcatccagctatttgggcactggtttctcagccttcccctttgcagatgac

SEQ ID NO: 216145 - DNA, 120 bp, Artificial Sequence
  ENSG00000116353_20 (sequence is synthesized)
tggcatcccctcgagttgcatggcgccattacattcacggaggacgtgaacgaggtataaccagggaattgttccagaggtttccttggatattcctacaactgataacagctgtcattt

SEQ ID NO: 216146 - DNA, 120 bp, Artificial Sequence
  ENSG00000116353_21 (sequence is synthesized)
cttctttaagattaggaaactaagactcagaaaagaggaaatgcttaaccaaaatcatatagtttataagggctccagagagtcagagctggcctcagtctctccgaactcaaagcctct

SEQ ID NO: 216147 - DNA, 120 bp, Artificial Sequence
  ENSG00000116353_22 (sequence is synthesized)
cctcagccaggccacatcccctggcacgacagctgtctaagcttaggcaatgccccgttcctggaggggagtctgtacccttaagcggtacctgaagttcttgccctcagagcccagcat

SEQ ID NO: 216148 - DNA, 84 bp, Artificial Sequence
  ENSG00000116353_23 (sequence is synthesized)
cctgttgcccaggctagagtgcagtggtcattcacaggtgtgatgatggtacacaatagccttgaactcctgagcacaagcaac

SEQ ID NO: 216149 - DNA, 120 bp, Artificial Sequence
  ENSG00000116353_24 (sequence is synthesized)
tgaagtttgaaggtgggctctcacaaatgagtgagctttattcaggccgagagaagagcttgacgtgactttttggtatttgcttcacgattcatttgctcaaagcaaagaacagaggct

SEQ ID NO: 216150 - DNA, 120 bp, Artificial Sequence
  ENSG00000116353_25 (sequence is synthesized)
gtagacgagaaagtctctggccagtgacaatttctccctacctcttcttcctgctcaaaatgatattgaccgtttgatgtgattgagtaaaagatgaaagataagtacaaatgattgcta

SEQ ID NO: 216151 - DNA, 120 bp, Artificial Sequence
  ENSG00000116353_26 (sequence is synthesized)
attaaatgtggaacgcaggaaagatatctcagcagagctagctaatgcccaccttacacagcaagtataactgtgccagtccccagggtactggcctcttttcccccctctcaaaaggct

SEQ ID NO: 216152 - DNA, 120 bp, Artificial Sequence
  ENSG00000116353_27 (sequence is synthesized)
cttgtctatgggcaccacggggatccagccaaggtcgtcgaatgaaaactgaggcagaagaggtaaaatcactcgtccaaggtcacacagccaaggtataaccagggaattgttccagag

SEQ ID NO: 216153 - DNA, 120 bp, Artificial Sequence
  ENSG00000116396_0 (sequence is synthesized)
atgatcagctcggtgtgtgtctcctcctaccgcgggcgcaagtcggggaacaagcctccgtccaaaacatgtctgaaggaggagatggccaagggcgaggcgtcggagaagatcatcatc

SEQ ID NO: 216154 - DNA, 120 bp, Artificial Sequence
  ENSG00000116396_1 (sequence is synthesized)
aacgtgggcggcacgcgacatgagacctaccgcagcaccctgcgcaccctaccgggaacccgcctcgcctggctggccgaccccgacggcgggggccggcccgagaccgatggcggcggt

SEQ ID NO: 216155 - DNA, 120 bp, Artificial Sequence
  ENSG00000116396_2 (sequence is synthesized)
gtgggtagcagcggcagcagcggcggcgggggctgcgagttcttcttcgacaggcacccgggcgtcttcgcctacgtgctcaactactaccgcaccggcaagctgcactgccccgcggac

SEQ ID NO: 216156 - DNA, 120 bp, Artificial Sequence
  ENSG00000116396_3 (sequence is synthesized)
gtgtgcgggccgctcttcgaagaggagctcaccttctggggcatcgacgagaccgacgtggaaccctgctgctggatgacctaccggcagcaccgcgacgccgaggaggcgctcgacatc

SEQ ID NO: 216157 - DNA, 120 bp, Artificial Sequence
  ENSG00000116396_4 (sequence is synthesized)
catcttcgagagcccggacggaggcggcagcggcgcggggcccagcgacgaggccggcgacgatgagcgggagctggccctgcagcgactgggcccccacgagggaggcgcgggccatgg

SEQ ID NO: 216158 - DNA, 120 bp, Artificial Sequence
  ENSG00000116396_5 (sequence is synthesized)
gggtctgggggctgccgcggctggcagccccgcatgtgggcgctcttcgaggatccctactcctcccgggccgctagggtagtggcctttgcctctctcttcttcatcctggtctccatc

SEQ ID NO: 216159 - DNA, 120 bp, Artificial Sequence
  ENSG00000116396_6 (sequence is synthesized)
accactttctgcctggagacccatgaggcctttaatatcgaccgcaacgtgacagagatcctccgcgtagggaacatcaccagcgtgcacttccggcgggaggtagagacagagcccatc

SEQ ID NO: 216160 - DNA, 120 bp, Artificial Sequence
  ENSG00000116396_7 (sequence is synthesized)
ctgacctacatcgagggcgtatgtgtgctgtggttcacactggagttcctggtgcgcatcgtgtgctgccccgacacgctggacttcgtcaagaacctgctcaacatcatcgactttgtg

SEQ ID NO: 216161 - DNA, 120 bp, Artificial Sequence
  ENSG00000116396_8 (sequence is synthesized)
gccatcctgcccttctacctggaggtggggctgagcggcctgtcatccaaggcggcccgcgacgtgctgggcttcctgcgcgtggtgcgcttcgtgcgcatcctgcgtatcttcaagctc

SEQ ID NO: 216162 - DNA, 120 bp, Artificial Sequence
  ENSG00000116396_9 (sequence is synthesized)
acacgccacttcgtggggctacgcgtgctgggccacaccctgagggccagcaccaatgagttcctgctgcttatcatcttcctggccctgggtgtgctcatctttgccaccatgatctac

SEQ ID NO: 216163 - DNA, 120 bp, Artificial Sequence
  ENSG00000116396_10 (sequence is synthesized)
tacgctgagcgcattggggccaggccctccgaccctcggggtaatgaccacaccgacttcaagaacatccccattggcttctggtgggctgtggtcaccatgacgacactgggctacgga

SEQ ID NO: 216164 - DNA, 120 bp, Artificial Sequence
  ENSG00000116396_11 (sequence is synthesized)
gacatgtaccccaagacgtggtcaggcatgctggtaggggcactgtgtgcactggctggcgtgctcaccatcgccatgccggtgcctgtcatcgtcaacaacttcggcatgtactactcc

SEQ ID NO: 216165 - DNA, 120 bp, Artificial Sequence
  ENSG00000116396_12 (sequence is synthesized)
ccatgtactgcaagtctgaggagacttccccccgggacagcacctgcagtgataccagcccccctgcccgggaagagggtatgatcgagaggaaacgggcagactctaagcagaatggcg

SEQ ID NO: 216166 - DNA, 120 bp, Artificial Sequence
  ENSG00000116396_13 (sequence is synthesized)
atgccaacgcagtgctgtctgatgaggagggagctggcctcacccaacccctggcctcctccccgacccccgaggagcgccgggccctgcgacgctccaccactcgagacagaaacaaga

SEQ ID NO: 216167 - DNA, 120 bp, Artificial Sequence
  ENSG00000116396_14 (sequence is synthesized)
aggcagctgcctgcttcctgctcagcactggggactatgcctgcgccgatggtagtgtccggaaagagacctgccaagacgccctctcgtccaactatgcccaggctgaagtcctcaccc

SEQ ID NO: 216168 - DNA, 120 bp, Artificial Sequence
  ENSG00000116396_15 (sequence is synthesized)
tctcttaaagcggcaccaacgtgagagagacaggcagacagacagaaagccagaggcttagggaaactctggaacccagacaagaatcttttcgctgggaaagactcagatatccttgtt

SEQ ID NO: 216169 - DNA, 120 bp, Artificial Sequence
  ENSG00000116396_16 (sequence is synthesized)
tgcacaggactggtggaaaatctcccatgcgaccctcggggcccagagccatctgggtctgatgttctgttccattgtacatcgaagagatatatatgcacatatagtatctatattcat

SEQ ID NO: 216170 - DNA, 120 bp, Artificial Sequence
  ENSG00000116396_17 (sequence is synthesized)
acatattatactcttgtgtgtagtgcacgtgctattggtggtttgtcttctttgttaggctgtgtctccctaagcccttgccccacccagagtttcccgtccccttcactgatttctgtt

SEQ ID NO: 216171 - DNA, 120 bp, Artificial Sequence
  ENSG00000116396_18 (sequence is synthesized)
gtttctgctgactgtgtgggtggaatgtcccaagaaaagtgcatctgggaattgccagtccagctgggtagtcccaggctcctgtcttggggatgtttcccctgtcagcaagtaacctgg

SEQ ID NO: 216172 - DNA, 120 bp, Artificial Sequence
  ENSG00000116396_19 (sequence is synthesized)
tgaagtctattgaaggccagactgccccctagggtcactgcttcactagccgcaccccaccccagattggggttctacctcccaccccacatcctcgttgtggggggacttccaggggct

SEQ ID NO: 216173 - DNA, 120 bp, Artificial Sequence
  ENSG00000116396_20 (sequence is synthesized)
cctctgcagcctcctccactacttcctccaccccatctatgtccttgacttaggggggcattttgtcttttttagatttgattttgttctctctcctttgtctgtttgttgtcaaagatg

SEQ ID NO: 216174 - DNA, 120 bp, Artificial Sequence
  ENSG00000116396_21 (sequence is synthesized)
ctgctgggcagacaggcagggaaaggatctgtctgcccatctggcccagggggtccgagaagggaagccttgggcaagaggagaccagttgcaatactgtacttcctggtcagtggccag

SEQ ID NO: 216175 - DNA, 120 bp, Artificial Sequence
  ENSG00000116396_22 (sequence is synthesized)
aggatgcgtgcaatagcagaggccaggtgaccccttcagccttggcctctgcccctcccttggccctccctccctgctcctccctggtgttggtcagtccttttctaaagctgtcccctc

SEQ ID NO: 216176 - DNA, 120 bp, Artificial Sequence
  ENSG00000116396_23 (sequence is synthesized)
gtgtgtgtctggggcatgcccaggctgggccctgtgccctgtctgcatgcctccaactgtcatgctgtgctcgagccccaataaagacatctggagcatcctgctgctcctgctgtgtga

SEQ ID NO: 216177 - DNA, 120 bp, Artificial Sequence
  ENSG00000116396_24 (sequence is synthesized)
tccggaaagaaggcaatgttgagccgaaagcgtgcgtcccagtgtctcacacctgtgctctttaaacacagagacctgccaagacgccctctcgtccaactatgcccaggctgaagtcct

SEQ ID NO: 216178 - DNA, 120 bp, Artificial Sequence
  ENSG00000116396_25 (sequence is synthesized)
gggagctgtgtatccctgcccacagggatacacagtggatacacagtgtggacaggtgaaaaggcctggtgaaaagcaccatttgcaagcagggtcaaccacttatgaaataattcagtt

SEQ ID NO: 216179 - DNA, 120 bp, Artificial Sequence
  ENSG00000116396_26 (sequence is synthesized)
tggggagcaacatagggcagaaaggaataatttgggccctgaaggggaacctgtaacctcaggacccacctggagcaaggtgccacagctcaggccgcatctctgtctccttggggagtg

SEQ ID NO: 216180 - DNA, 120 bp, Artificial Sequence
  ENSG00000116396_27 (sequence is synthesized)
agggcttcttggggcctgctgagtgcctgctgccccagccctggagaggccacagtggagattgaggccccaccaaggtttcaacaaaggaggaggggattatacctacctgctcggtca

SEQ ID NO: 216181 - DNA, 120 bp, Artificial Sequence
  ENSG00000116396_28 (sequence is synthesized)
gaggggccaattggaaagagctttgagctgagagtcaggagacttggcctcagtgtgatcctgagcaaatcatctgccctctcttgtgcctctatttcacttaaaaaatgggcacacatg

SEQ ID NO: 216182 - DNA, 120 bp, Artificial Sequence
  ENSG00000116396_29 (sequence is synthesized)
accactctttagctcccctcctcttctcagggtggaggtgaggggtagcagttaatagtagatggaacagttctgtgttttgaaaaaaagcaaaggtgaatggacagacaggaatccagg

SEQ ID NO: 216183 - DNA, 120 bp, Artificial Sequence
  ENSG00000116396_30 (sequence is synthesized)
gggttgttccctaatccaggatgtggctggtgcccacggggcctgaaggactctcttgcctgctgcagaatgagcccatggtggtggcagttgaggagggtagcaaggcaggctccctgg

SEQ ID NO: 216184 - DNA, 120 bp, Artificial Sequence
  ENSG00000116396_31 (sequence is synthesized)
ccctgctatgagaggatggccggggccatgccgccctccctccctccctccctctgctcaccctcttggcagctcttcctgaacttgtttttccaagtcactaattaacttcacgctcag

SEQ ID NO: 216185 - DNA, 120 bp, Artificial Sequence
  ENSG00000116396_32 (sequence is synthesized)
tttcccaggtgggcctactctcctggctaacttttcctcagagagccagcttctgcttcccatggttcctggcagaattgggatatgctgtccctgccccttacctcaaccactctgttt

SEQ ID NO: 216186 - DNA, 120 bp, Artificial Sequence
  ENSG00000116396_33 (sequence is synthesized)
ttcaggagagagggtggtgccaggactggactcctggcatggccacggccacggacaggcacttttgccagcccacctagggatggccatggagagcccacaggctggagccatttactt

SEQ ID NO: 216187 - DNA, 120 bp, Artificial Sequence
  ENSG00000116396_34 (sequence is synthesized)
aatgcccatatcagcctgtattgacttggcagcccctttctcagaggaggaagaatgaggctagaaaaggaacttaaatttaccttcacaggggagaagcaagcaggaaaaactccagca

SEQ ID NO: 216188 - DNA, 120 bp, Artificial Sequence
  ENSG00000116396_35 (sequence is synthesized)
gtgtcgtaaaattgggaaagtgtgtctgtgtaattgttattacacatgcatttcatctccattcaccccctggacctagccttctccttccatgctgtttctgatcaacccatccaagtt

SEQ ID NO: 216189 - DNA, 120 bp, Artificial Sequence
  ENSG00000116396_36 (sequence is synthesized)
aaagtgcgaatgaggtacagtgaggtgtgtgatgggggacctgtcctaagcctgaggcacactttcccacgggtgaaatagcagtcatcagggagctaactgggaacaggatcagtgatt

SEQ ID NO: 216190 - DNA, 120 bp, Artificial Sequence
  ENSG00000116396_37 (sequence is synthesized)
cagagatggctttcccaggcctgtgaattgaccctgcctgggaggtggtgaaaacactgtggtatgacgaaaaggtacagcctttgaagttaaacagttctgagttcaaatctggttttc

SEQ ID NO: 216191 - DNA, 120 bp, Artificial Sequence
  ENSG00000116396_38 (sequence is synthesized)
atcccttccaggctgtgtgaccttaagcaagtatgtaacgtctctgatgttcagttcatcctgcataaaatgggatgatgaggcgtgcctcacagggtcattgggaggattgaaggcgat

SEQ ID NO: 216192 - DNA, 120 bp, Artificial Sequence
  ENSG00000116396_39 (sequence is synthesized)
tgaagcatatacagagtgcttaacagtaccaggcacagaagagacagctgataactgttcattcccagattttccccctcaaacttgctcctgctccagtagccctggaggtgctgctgc

SEQ ID NO: 216193 - DNA, 120 bp, Artificial Sequence
  ENSG00000116396_40 (sequence is synthesized)
ttgcttcattttcccaggtccccttgtattcttcattggtgttttgcagtactaagaacaaggtatgccctccccatcccagtgcagactcccagggaggaaaacctctctgagtcctca

SEQ ID NO: 216194 - DNA, 120 bp, Artificial Sequence
  ENSG00000116396_41 (sequence is synthesized)
ctggacaggggacgggcacatgccagtgcctgtccacacagccaggtggaagtcagggtaggtcaggcaggcatggggattaccaaatggtaccatgaggccacagacctcccttaccca

SEQ ID NO: 216195 - DNA, 120 bp, Artificial Sequence
  ENSG00000116396_42 (sequence is synthesized)
cctatttaggctcagccgtctggtcaaggaggaagcccagtccagccatcgtgcaggacaggcggcagcaggaggcatgagactggaccccatcagtgggcatcctgacagtggtggatg

SEQ ID NO: 216196 - DNA, 120 bp, Artificial Sequence
  ENSG00000116396_43 (sequence is synthesized)
gcacggcatgaataacacatgaagcctccataattggtgttattacacatgcatttcatctccattcataatgattggacacttaaacccagccgccgttcctctgccgagtgctgctgt

SEQ ID NO: 216197 - DNA, 120 bp, Artificial Sequence
  ENSG00000116396_44 (sequence is synthesized)
catccttctagccgagatcccagcagctgtcgagatcagcccctgccactctgatgctgatgcgtatggttcctttttctttggagctcagagttccaggaaatgtcagtttgtgggaag

SEQ ID NO: 216198 - DNA, 120 bp, Artificial Sequence
  ENSG00000116396_45 (sequence is synthesized)
gagtgagactggttcttctgaccagaccaccctctcaactgccatggtgcatgttgtctgcctttaggggcttcctcaccatctaggcagtcagcggggacatcctaaggtgagaggcag

SEQ ID NO: 216199 - DNA, 120 bp, Artificial Sequence
  ENSG00000116396_46 (sequence is synthesized)
gagaagagactatggataataggctcagccagcagaaagtggtccagggtcattccttgcagcaacctgcctcggagcattccttcatacagtggacttcaaactagtgtgcattaggat

SEQ ID NO: 216200 - DNA, 120 bp, Artificial Sequence
  ENSG00000116396_47 (sequence is synthesized)
tacttagaaggtttgttaaaacattgctggatcttacccttggcatttctcactcagtagctttaggtcaagtttgaaatttgtgtttctaaccaaaggaccagagacctaatgcttctg

SEQ ID NO: 216201 - DNA, 120 bp, Artificial Sequence
  ENSG00000116396_48 (sequence is synthesized)
gtccaggaccatactttgaggaccattgccttaaagcccagttactgcaactgtggtgcatggacagagcctcacctgagtgcttattacaaatgcagaatcacaggacctgccccaagc

SEQ ID NO: 216202 - DNA, 120 bp, Artificial Sequence
  ENSG00000116396_49 (sequence is synthesized)
ctctggatcaggaatgcattgtaacaagattcccattgcagcttgagaagccttaaaatgcaaatgggtcagaggtgggcagagctatcaaaggcaggtctagcagctgtagatacctga

SEQ ID NO: 216203 - DNA, 120 bp, Artificial Sequence
  ENSG00000116396_50 (sequence is synthesized)
ccagtgtttccagccaagagcagcttctatcttttgtgacaaagattgggaaacattgcccgagagcccccaagcatatggataaagaccctctgaggagggacttccagccctgactcc

SEQ ID NO: 216204 - DNA, 120 bp, Artificial Sequence
  ENSG00000116396_51 (sequence is synthesized)
atacgttaatcccacctctcactctggaatgcccttcctggtaaccttcatgcagaagtccacgtccccagctgggcccatccatccctgtctgacagctgccccctgctctcctcccct

SEQ ID NO: 216205 - DNA, 120 bp, Artificial Sequence
  ENSG00000116396_52 (sequence is synthesized)
gtttccaaatggacctcagaccttgggatttggcatgtgttttgtgtggggcttccctaagcataaagatgtgcctttatgagggcaaagtgttgaggccgaatttctctgtcctctggc

SEQ ID NO: 216206 - DNA, 120 bp, Artificial Sequence
  ENSG00000116396_53 (sequence is synthesized)
tgggtctccgatagcttcccgaacatcagatctttggagtgagtattccacccagggtagggtgtgatgggcagtacatggggctgtatattagatgccctggttttaaatccaatcttg

SEQ ID NO: 216207 - DNA, 120 bp, Artificial Sequence
  ENSG00000116396_54 (sequence is synthesized)
gccactgtgctgtgtgccctgaggccagtcactcaccctctctaggcacctgtaaaatgggaataatatcatatcctaccctcaagactttgagagacccaaatgaatgacagatatgaa

SEQ ID NO: 216208 - DNA, 120 bp, Artificial Sequence
  ENSG00000116396_55 (sequence is synthesized)
agtactttgggaagtcagaaccacattacaaatgtcaggtactgtcaatattagccagtgagcagggcagctgttcttccaaggtacatcaacacatgaatcacttctttgcaaacgttc

SEQ ID NO: 216209 - DNA, 120 bp, Artificial Sequence
  ENSG00000116396_56 (sequence is synthesized)
gagtctggtatcttggcctaataaatgtgataacgtaatagcagtgggaggctgccttctgttcagcacaagctagattgagtcctgggctcagggtttgacatgggatggaaaggaact

SEQ ID NO: 216210 - DNA, 120 bp, Artificial Sequence
  ENSG00000116396_57 (sequence is synthesized)
gaggaaggagtggcccagacagtgttgggaaggggaggaacatggaagaaactgatatctgtgccctggaaggggagagcctgggcatctgaatcctgtccctcaaggatgggaaaggcc

SEQ ID NO: 216211 - DNA, 120 bp, Artificial Sequence
  ENSG00000116396_58 (sequence is synthesized)
atcccaagaaagctcatctccgcccctgaatcaggagttgggaaatggaaaactgcttaatccccagcaatgtgaacttcggttggagagagggaaaggcatcctgactgttatgtgtag

SEQ ID NO: 216212 - DNA, 120 bp, Artificial Sequence
  ENSG00000116396_59 (sequence is synthesized)
gctgggctcctgggaaaggtatggaattcctggtatggggaggtggactggagccaggagactaaggctaagctctggggcaaagtgggactgaccctgcaggagaggcgcctagcttgg

SEQ ID NO: 216213 - DNA, 120 bp, Artificial Sequence
  ENSG00000116396_60 (sequence is synthesized)
gacactcacctatggcctttggcatgtgcctatcatacatgcccgggtccactcattcccgggggtcatgtcaggggcctgggtcttccgaaggccttgatagaagagcatccatcaggc

SEQ ID NO: 216214 - DNA, 120 bp, Artificial Sequence
  ENSG00000116396_61 (sequence is synthesized)
ttcccatttctcccccaccaaagtggcactgcttcctaatttgtgaatattaatttcccggggaatttcagctgcactctgaggcccattcagggtataaagagaatcccagtattaaaa

SEQ ID NO: 216215 - DNA, 120 bp, Artificial Sequence
  ENSG00000116396_62 (sequence is synthesized)
cgtagaagtccttaggtcagctcctcaaggtacacttaactgtggccctatcagccttgcccttagcctgaccctgagagcagccacagtaagggcatgcctggccaatggcagggccac

SEQ ID NO: 216216 - DNA, 120 bp, Artificial Sequence
  ENSG00000116396_63 (sequence is synthesized)
tgtcttcagatagagtagcacccccttctccagatccaagggcccagcttcacctgtgctactgcctgacagaggcaaggggtggagactaagcccacagcacttgagagctgcgtcgga

SEQ ID NO: 216217 - DNA, 120 bp, Artificial Sequence
  ENSG00000116396_64 (sequence is synthesized)
gcttttctcatggtatcctccccagacaaaggtcagccctaattgcggagggctctaggtcttttgggcacaggactctggcctagatgcctagtgaacaagaattactgtcacccaggg

SEQ ID NO: 216218 - DNA, 120 bp, Artificial Sequence
  ENSG00000116396_65 (sequence is synthesized)
agaaagcatggacgccactttataggtttaacccttgccgtgccacccctcaccgctagcaagccaggtattctccacgggaaagcagactcatccaagagtcagcctgagccagaccca

SEQ ID NO: 216219 - DNA, 120 bp, Artificial Sequence
  ENSG00000116396_66 (sequence is synthesized)
aggaggaagtagagtctgcggactgctttgggctgatctcctggggcagccgtcagcaggcagatttggggagtcactgctgtagggcatctgcactgtggcttcatccctgaggagaga

SEQ ID NO: 216220 - DNA, 120 bp, Artificial Sequence
  ENSG00000116396_67 (sequence is synthesized)
ccctaagctgaggctgggagggaagtcagtcttcacaccaagtgtagcatccctgccttttgccctctgctccccggctctggcaatgctgcctctcaggtagatgctaggcccctccca

SEQ ID NO: 216221 - DNA, 120 bp, Artificial Sequence
  ENSG00000116396_68 (sequence is synthesized)
aggttgaggaagtaacactctgggtctgggagaccccagatgacccatgagcaaggctcaggtcgcccctcatgcagcctcctttctgtgtgcccccttcagactctaagcagaatggcg

SEQ ID NO: 216222 - DNA, 120 bp, Artificial Sequence
  ENSG00000116396_69 (sequence is synthesized)
gaggatccctactcctcccgggccgctaggctctcagttctgctgaggaagcactgtgctcccactgaagtgacctgtgaacaccactctgctctgcaggcatgtggccagaggctggag

SEQ ID NO: 216223 - DNA, 120 bp, Artificial Sequence
  ENSG00000116396_70 (sequence is synthesized)
ctcattacaggcatctgtgggctgggaggttcaagaagcatggtgctggcatctgcttggcttctgtgtgggctttcttgctgcattaagacatggtggaagatcaaaggggaagtggac

SEQ ID NO: 216224 - DNA, 120 bp, Artificial Sequence
  ENSG00000116396_71 (sequence is synthesized)
ggactatgcctgcgccgatggtagtgtccggaaaggctgtggaaagtcccggagtctaaacaacatagttggagcagctggaaccagcctggggctgtctccactggcatcgcgttacag

SEQ ID NO: 216225 - DNA, 120 bp, Artificial Sequence
  ENSG00000116396_72 (sequence is synthesized)
cccaccccctggtcactctgccccttagctgcaccttcccctctgggcacacgcgcacaaacaggcacccttccatgccctcagcgctcactccccagggcccacgcgggcagcaggagg

SEQ ID NO: 216226 - DNA, 120 bp, Artificial Sequence
  ENSG00000116396_73 (sequence is synthesized)
gagcaggggggagcagtcaggacagaggagaacttaggcccccgagcctgccctccatagctccaagcttcccaaaaggttcagctctggaaccggagagcaaaggggaaagcaatccca

SEQ ID NO: 216227 - DNA, 120 bp, Artificial Sequence
  ENSG00000116396_74 (sequence is synthesized)
gagcttctccccatattggcctcttcctgggctgtaggtgcacaccccggacctgtctttcggccttgccttcctctcggggtcccaccagggccagtctcagccaccaggcgtttatgt

SEQ ID NO: 216228 - DNA, 120 bp, Artificial Sequence
  ENSG00000116396_75 (sequence is synthesized)
gtgcacagagcgcctggggccagtcagccttgttggggagccacgcctatgttaatatctttaatcactgtgaatgtatttccattcctcatagcctttaaccagtagccgaacagcctg

SEQ ID NO: 216229 - DNA, 120 bp, Artificial Sequence
  ENSG00000116396_76 (sequence is synthesized)
gggggataggcaggggcaagcccaagccgcagagggggccgccaccgcctcctgcctcctcttcgtctcctccccctcccccgtctgacgctgcctcctcgggaagggtgtttggagggc

SEQ ID NO: 216230 - DNA, 120 bp, Artificial Sequence
  ENSG00000116396_77 (sequence is synthesized)
ctgctcagcactggggactatgcctgcgccgatggtagtgtccggaaaggcacattcgtcctccgtgaccttccccttcagcattcacctgaggctgcatgccctccaactgctgggact

SEQ ID NO: 216231 - DNA, 120 bp, Artificial Sequence
  ENSG00000116396_78 (sequence is synthesized)
ctgttcctgccacattgaggaagggggctgggcacgacatggcatcatactcaggagccttcttcaccagctccttgggacaatggaatatcccagggtggtgacagcagatggagctac

SEQ ID NO: 216232 - DNA, 120 bp, Artificial Sequence
  ENSG00000116396_79 (sequence is synthesized)
ttgggggagagctcaagttggtcaggcaacagctggggtgatggcctgtgagccacaggccacatcaggaactttccccactgcctccatgcaaggctgcagagctatggtccctttctc

SEQ ID NO: 216233 - DNA, 120 bp, Artificial Sequence
  ENSG00000116396_80 (sequence is synthesized)
cactgcactggagctttgaagacctaagaggctagtggttcctggagctagtggttacctgaacagagacctgccaagacgccctctcgtccaactatgcccaggctgaagtcctcaccc

SEQ ID NO: 216234 - DNA, 120 bp, Artificial Sequence
  ENSG00000116396_81 (sequence is synthesized)
gaagggttcaccccattccctgacccatccatgctcttcctggccttttagccctgggttcctcatgccttccagctctgctcctggtctactccttagcccacaccctgtgggtcagca

SEQ ID NO: 216235 - DNA, 120 bp, Artificial Sequence
  ENSG00000116396_82 (sequence is synthesized)
ggggctctcacccctgacacctgaggagtgcacacactcagcataaccccactccagcaggaatcatcagtgtggcctgacccctgcattttacagggagagactagtgctcagagaggg

SEQ ID NO: 216236 - DNA, 120 bp, Artificial Sequence
  ENSG00000116396_83 (sequence is synthesized)
caagtcatctgcccaaagccacacaaagaggactaacccaggaccccgagacccaaacagtgttctaatatccactgctgtccccaagcccctgccataacatggaagaaaagactgttc

SEQ ID NO: 216237 - DNA, 120 bp, Artificial Sequence
  ENSG00000116396_84 (sequence is synthesized)
tttgtttaaggaattccactgcattccgtttgtgcagggggcctcccctcctccctgcaattgtaccagttctaaatgggccaagaccctggggacgccaaagttattggctggatggct

SEQ ID NO: 216238 - DNA, 120 bp, Artificial Sequence
  ENSG00000116396_85 (sequence is synthesized)
gatgaactgaggccaactagagactggtggcacaactggggaccacttagggatggagagtgaacacatcctgggcctggataggacggggagatggtgagtgatggtcagacgtggccc

SEQ ID NO: 216239 - DNA, 120 bp, Artificial Sequence
  ENSG00000116396_86 (sequence is synthesized)
ttggctctcactgttgttatccctctcacgttcacataggggcacacgcagggccagcttcatgggtgtgcaacctgtgcagccactcagaagggccccatgctgggtttaatgcttggc

SEQ ID NO: 216240 - DNA, 120 bp, Artificial Sequence
  ENSG00000116396_87 (sequence is synthesized)
tgtcaccatcatgaaattaataatggttgaacaggggccctgcgtttccatcttgcaccaggctctggcgggtctggttgcctgcttgcctctccttattcttgtcttactcctcactct

SEQ ID NO: 216241 - DNA, 120 bp, Artificial Sequence
  ENSG00000116396_88 (sequence is synthesized)
tactctgggcatctgtgtaggaccataggggcctcaattcaaagtcttgctttgctgcttgctagctgggtgacttgggggtgactcaccgaaatggtttccctgtttgttagggaataa

SEQ ID NO: 216242 - DNA, 120 bp, Artificial Sequence
  ENSG00000116396_89 (sequence is synthesized)
tgatggcccctgtttcagagacagagtgaagagcctggcctggtgtcatgtgtctacctgtgatatgacatatagtagcggcacagtgtcagctccctccctgccctgttcctgtcactc

SEQ ID NO: 216243 - DNA, 120 bp, Artificial Sequence
  ENSG00000116396_90 (sequence is synthesized)
tcagacttttctccacagacttctgagatctccgtgtccagctgcaccaagaaaggacaagaacacacccgggagctgtcttgggcagtgtagaacagcagggtgaggacggaatggccg

SEQ ID NO: 216244 - DNA, 120 bp, Artificial Sequence
  ENSG00000116396_91 (sequence is synthesized)
aggagagggaagaagccaggggaagcctgttcctgaagtgtaaggaaagatcgggcttggagcctgggccagccgaggcaagggggtggcaggcagccagtgtcaattaaagataaaatt

SEQ ID NO: 216245 - DNA, 120 bp, Artificial Sequence
  ENSG00000116396_92 (sequence is synthesized)
tctcctccggtagtggagggcaaacagtggctgtggcccccctagacaggagaaagccatttgcagccaggctggccttggaaaagcttggccaggcgataatgggacgggatgcgctgc

SEQ ID NO: 216246 - DNA, 120 bp, Artificial Sequence
  ENSG00000116396_93 (sequence is synthesized)
tgactccataatgatattacgcatcagggcccacggccaaagtggctgttttttctgtagatcgatgtggaaccatttcatggtcaggggctgagaacccagccagcagcaggggtacta

SEQ ID NO: 216247 - DNA, 120 bp, Artificial Sequence
  ENSG00000116396_94 (sequence is synthesized)
gatgccagagtggtcctgaggggactgaaggggtggcaactggggtccccagtgaccgtttcaggctgctggaagaggagggggcagtgtgcaggagggtggaggggtggacgagagaag

SEQ ID NO: 216248 - DNA, 120 bp, Artificial Sequence
  ENSG00000116396_95 (sequence is synthesized)
cagcagactgcccctcctccccacctcacagaaacagcaggccgtgctgtcaaggaagaaagggctctggcttcctcctgttccccaaagctggagtcgagcccaaggtagggagctggt

SEQ ID NO: 216249 - DNA, 120 bp, Artificial Sequence
  ENSG00000116396_96 (sequence is synthesized)
taaaagaacaggacattgtttaaaagaataagacagacttttgaagtcaggcagacttgggtttgagtcctgactccatcacttccttgttgtgtgaccctgggcaagttactcagcctc

SEQ ID NO: 216250 - DNA, 120 bp, Artificial Sequence
  ENSG00000116396_97 (sequence is synthesized)
tgtgaacgtctatttcctcatcttttaaatgtagtatctgcctgaggccgtgtctctctcattgagccatgaggagaaatgagtcggcgcctgtaaagcctcgcgcacagtgcctagcac

SEQ ID NO: 216251 - DNA, 120 bp, Artificial Sequence
  ENSG00000116396_98 (sequence is synthesized)
ataaccattgctagagggagaggggagtattttggggcaactcactccagtaacagatgaccagtttggtttgatgacctcacttttcagtgaatcagcctcatttcactgaagtcctta

SEQ ID NO: 216252 - DNA, 120 bp, Artificial Sequence
  ENSG00000116396_99 (sequence is synthesized)
gtccttatctccttgtgaaggaataagaggggatgattatacctaacagcgaacatttattgagtgctgggcagtacatttcatgcttataaagatgcattccaagattgatgttatcct

SEQ ID NO: 216253 - DNA, 120 bp, Artificial Sequence
  ENSG00000116396_100 (sequence is synthesized)
tacctttgttttacgaggagaaaaccaacacaacaatgtcaggtcatttctccaaagtcacacagccattaagtagcaaagctgggattcaaactcagtctggctctgtgggtccaatgc

SEQ ID NO: 216254 - DNA, 120 bp, Artificial Sequence
  ENSG00000116396_101 (sequence is synthesized)
ttagccactctctgaactgagtggggcttgtgagtcataacctccagtgtaggagtttgtgcttttagtgttatttccttaactgcaattgattctcatagcaaaggtattgttttcccc

SEQ ID NO: 216255 - DNA, 120 bp, Artificial Sequence
  ENSG00000116396_102 (sequence is synthesized)
ttttacagataagaaaccaaggcttggagaagtgaatcattaaactcactctcccttttacgtgtatgtaccccaccccacacacacataaagcgaggaggaatgtcctcttgggattca

SEQ ID NO: 216256 - DNA, 120 bp, Artificial Sequence
  ENSG00000116396_103 (sequence is synthesized)
ttcattaattagcagcaggcaacacccagctcagtgactgcttggttccttccctctgcgaccccactggagttttattctctgacgcacagaagtgggtaagtgggggtaggactgctc

SEQ ID NO: 216257 - DNA, 120 bp, Artificial Sequence
  ENSG00000116396_104 (sequence is synthesized)
tggaacccaagttacatgaggagtggctcaagctggagaagtcttggaaacctgatcccaactaccaggtgtttaaagggtacctgtggggaagtgggtttagattcttctctgattgca

SEQ ID NO: 216258 - DNA, 120 bp, Artificial Sequence
  ENSG00000116396_105 (sequence is synthesized)
gagagcagatccggaaataataggtggaaatgttaggagggcagattgggtttaaattttaaaaaatctttttttaatgaaatttttgatttgtaatttttgtgggtacatagtaggtat

SEQ ID NO: 216259 - DNA, 120 bp, Artificial Sequence
  ENSG00000116396_106 (sequence is synthesized)
atttgtaatttttgtgggtacatagtaggtatatataagaaccttattttctgttgtttcccttgctattataaatttattactgccagtcatggtggctcatgcctgtaatcctaacac

SEQ ID NO: 216260 - DNA, 120 bp, Artificial Sequence
  ENSG00000116396_107 (sequence is synthesized)
gccagaagtttgagaccagcctggataacatagtgagaccccatctctacacaaaaaaaaagaaaaagaaaaattagccaggtgtgatggcatgtgcctgtagccccagcttctcgggag

SEQ ID NO: 216261 - DNA, 79 bp, Artificial Sequence
  ENSG00000116396_108 (sequence is synthesized)
cctgtctcaaacaaacatttatttaatacaaggtattggaaaccatccccataccaaatcaacagggaatcccctgtca

SEQ ID NO: 216262 - DNA, 120 bp, Artificial Sequence
  ENSG00000116396_109 (sequence is synthesized)
aaaccatccccataccaaatcaacagggaatcccctgtcacccttcctcagtcccactttcctccccagaggtgacatggttaacatctggtgtgggtcctcccaggctttttggaaaaa

SEQ ID NO: 216263 - DNA, 120 bp, Artificial Sequence
  ENSG00000116396_110 (sequence is synthesized)
aaaaaaactttctaacaaaattaccaaatcaaaatgggtttccctgcggggtagtgaagttcccttccctgaaaatgtttggagacacagtggatgatcatgtgctgcaccagggttcgt

SEQ ID NO: 216264 - DNA, 120 bp, Artificial Sequence
  ENSG00000116396_111 (sequence is synthesized)
gggaagtatttctgctcggcgtgggaggtggaattagaagactgtttccaatcctaagactttctgactcacgtggcacacacagctagttagtggtggaggcaggtccagaacacaggt

SEQ ID NO: 216265 - DNA, 120 bp, Artificial Sequence
  ENSG00000116396_112 (sequence is synthesized)
attcagatggggttcagatgaactcctttcctagcaagattttccttaaattcttctctgcctcttcccagcccatcagggatatagggcagggcagagagacatctgtgtctcctctag

SEQ ID NO: 216266 - DNA, 120 bp, Artificial Sequence
  ENSG00000116396_113 (sequence is synthesized)
tctggagcgaggggagtgtcctgggcctgggttgtgatgccatccagtgcccaccctcgtggggctcctgtggcattattgcagtgagcactttctttccgttcctggctccaagccctg

SEQ ID NO: 216267 - DNA, 120 bp, Artificial Sequence
  ENSG00000116396_114 (sequence is synthesized)
tgtgtgcatacactggtacccacacaagaggtagcacgtgagctggctcagtcacttggggctgtggtaaccgcattcaaaatgcagcatcatgctaaagagccgctggggactctgggg

SEQ ID NO: 216268 - DNA, 120 bp, Artificial Sequence
  ENSG00000116396_115 (sequence is synthesized)
acaaggctgtctccgacccagctttagggggtgaggagagggagccaaacggctacagctgcaagtcaaagaggtcagaggccttctgatgttggcactggaagcctctcctttctttcc

SEQ ID NO: 216269 - DNA, 120 bp, Artificial Sequence
  ENSG00000116396_116 (sequence is synthesized)
ccacaggttatgggggcttctccactccccgctcttacttgcctgcttctccagggatccctagaagagcagtggttagcaagcatatgctatagccatcaaatacgagtctacagaaat

SEQ ID NO: 216270 - DNA, 120 bp, Artificial Sequence
  ENSG00000116396_117 (sequence is synthesized)
gtaggcttccccttggggctgagttagggcctctgcttctgaaatgagcaacctctggttgctggtgggggctagggcttgctccctttctctcctcacatactctttcctgggtgacct

SEQ ID NO: 216271 - DNA, 120 bp, Artificial Sequence
  ENSG00000116396_118 (sequence is synthesized)
catcccctcccattgccttaaacatcttccaggtactggtgtcatccacttgtgtagttccagttcagaaatcccgtcagctccattcattcatttgttcattcattcagcaaacatatg

SEQ ID NO: 216272 - DNA, 120 bp, Artificial Sequence
  ENSG00000116396_119 (sequence is synthesized)
tggcatctctgtcccaggtactgctctacaacctgggtgtacaatagggacccaaacagacactcccttccccatgcactccctgctcacagacacacctgcgtggcagtgcctgggtgt

SEQ ID NO: 216273 - DNA, 120 bp, Artificial Sequence
  ENSG00000116396_120 (sequence is synthesized)
cttcacagctccctgatgccgagctgtgatcccacccttctgcctccctggtccccctcagcgtgctgccaccattcaccttgaggctgagatagatgttgtcaaaaccaccctctcatt

SEQ ID NO: 216274 - DNA, 120 bp, Artificial Sequence
  ENSG00000116396_121 (sequence is synthesized)
ccttaattcactcactcatttttcgtgcattaaatctttattaaacacctgtgaactctgtcctcagggaaacaatggtgaacaagaccaacaggatccctgccctcatgggacttacat

SEQ ID NO: 216275 - DNA, 120 bp, Artificial Sequence
  ENSG00000116396_122 (sequence is synthesized)
tctaatcagggagagaggccagaagaccaatagataaaaaatatctcccacccgtattccaacctattaccaagttctacatttctagctctgcaggagcctcctcccaggtctccctgg

SEQ ID NO: 216276 - DNA, 120 bp, Artificial Sequence
  ENSG00000116396_123 (sequence is synthesized)
gtcccatctgcccttctgccaccagtctccacccagtcaccagagagagagcttcttaaaatggaaactggatcagatcatgtcacccctgcttagaaccctgtcaatggctgggttccc

SEQ ID NO: 216277 - DNA, 120 bp, Artificial Sequence
  ENSG00000116396_124 (sequence is synthesized)
acttcgtgtacaatccagactccttaggagggcctgtgatgccctgctgctcctcatggccttcctgcctccgcagacctattcatgcccctgctctcagcccctgagaccagcagctca

SEQ ID NO: 216278 - DNA, 120 bp, Artificial Sequence
  ENSG00000116396_125 (sequence is synthesized)
ctttcctgtcagtttcccacacatccccagctctctcaccttcagtgtttttccacttgcttttccctcacggggaccacttcaccccagtccagccccaccccacctccttctcttggc

SEQ ID NO: 216279 - DNA, 120 bp, Artificial Sequence
  ENSG00000116396_126 (sequence is synthesized)
tgagaaggcctggctgtaaatttcactttcttggtgaggcgttttcccctcacacatccacgcccctctgcctctgtcagtttccatcactgcagccagtgcattttcttcatggtactt

SEQ ID NO: 216280 - DNA, 120 bp, Artificial Sequence
  ENSG00000116396_127 (sequence is synthesized)
acagtcctttgtaactatgaattgtgtattgcctgcttccctgtaagttgctagggcctataggggctcggtaaatattttatgaacaaatgaatgaatgggctggagataggcctggca

SEQ ID NO: 216281 - DNA, 120 bp, Artificial Sequence
  ENSG00000116396_128 (sequence is synthesized)
tgagcagctgctgaactccatcctctcttattcctcgcaagctgtctccagctggcttttgcacctcatttctagggcattcctgggagtccttggggaataacatgaacgctcttcttt

SEQ ID NO: 216282 - DNA, 120 bp, Artificial Sequence
  ENSG00000116396_129 (sequence is synthesized)
gtcagaataatgaggaagccttggagagagagttcccatagcccttcctctctcttccttttagaacctaccattttctacctggtactttttggtacttgtcaaattccccttcccaca

SEQ ID NO: 216283 - DNA, 120 bp, Artificial Sequence
  ENSG00000116396_130 (sequence is synthesized)
gtggcgagttgctcagaggtgctggttcatcccagctcccactcgagggcctagcttagtggtccatgcagagtaggtgctcagcgaaatgttgaagtgaatgaaggatatggtgagaaa

SEQ ID NO: 216284 - DNA, 120 bp, Artificial Sequence
  ENSG00000116396_131 (sequence is synthesized)
ggaagcaatgagtaagaaggaagagtgagaaagaaggaaagaggaagaggagggaggggcaaaggggttgatgaagagtgaagaagcagagggagggaagtgaggtcagggagtgggaaa

SEQ ID NO: 216285 - DNA, 120 bp, Artificial Sequence
  ENSG00000116396_132 (sequence is synthesized)
cggggaaagagaaccctggcccggtgtccacctcaagccagcaccctaccccactccttccagtcttcctggactcggagcctcccaggcctgccccagccttaggtgggacagcagggt

SEQ ID NO: 216286 - DNA, 120 bp, Artificial Sequence
  ENSG00000116396_133 (sequence is synthesized)
tcctccagcctgccactgacaccaagggcaccctgaactcagctcagaccccaggctgcccggagcaggagagactgctcctgaagagacttctgcagggacgagagcccaggattcctt

SEQ ID NO: 216287 - DNA, 120 bp, Artificial Sequence
  ENSG00000116396_134 (sequence is synthesized)
aacctgaggcccagctccatccctgagatccctagagactcccctcagctcccctcccctcagctcctcatattgagcccctgatccaaggacgattaactccaaatccagcatcagtga

SEQ ID NO: 216288 - DNA, 120 bp, Artificial Sequence
  ENSG00000116396_135 (sequence is synthesized)
tcaaatgttcatagcaaacaaaggaaaacaaacaccacctttcctccttgcctcagccctggggccccagaggcttggctcagagacaggtgccctgcctcctccccacgcccggcacag

SEQ ID NO: 216289 - DNA, 120 bp, Artificial Sequence
  ENSG00000116396_136 (sequence is synthesized)
gcctgccagctgcccctcgagaagaccaggggccagcctcagaggcccggaggatctgttcccagagtagctgttgccacagtgaccctccctggggtggtggctcctaagctgccatgg

SEQ ID NO: 216290 - DNA, 120 bp, Artificial Sequence
  ENSG00000116396_137 (sequence is synthesized)
gaggcagagctgtgccactaccacgacgaccaccaccaccaccagggctgccaccacagcaaagctgctcctggggcctccctcctagttaggctgccgagagaccagtctgtgctatcc

SEQ ID NO: 216291 - DNA, 120 bp, Artificial Sequence
  ENSG00000116396_138 (sequence is synthesized)
tctcaccatgccaggcagccacagtaccagggaacaggagtcacaatcagcccccttccaacaccccggcagcatcccgctgtctgccccaggacccgctcttcccctgaggggatgaca

SEQ ID NO: 216292 - DNA, 120 bp, Artificial Sequence
  ENSG00000116396_139 (sequence is synthesized)
ctgcccccctggaaaattgattagggacctcatttctgtcagcaccccactagagatggcaaccagctcccagggcgcctgggggcgggatgttgagggcagcagggaggtaagaaggct

SEQ ID NO: 216293 - DNA, 120 bp, Artificial Sequence
  ENSG00000116396_140 (sequence is synthesized)
ccagtgataccaggctccctctgggcctcggtgctaggtggtgacaagctgggtttccctggacaggactggaaagttgctctctaatactctctatctttctgcttgggttctttccca

SEQ ID NO: 216294 - DNA, 120 bp, Artificial Sequence
  ENSG00000116396_141 (sequence is synthesized)
cccctgccagaggctcttgctaactactgtccccttacatactggcacctaaacataaacacacatttccagagtcgtcctgctctcttcattttctgacctatgcacaagaaagtattt

SEQ ID NO: 216295 - DNA, 120 bp, Artificial Sequence
  ENSG00000116396_142 (sequence is synthesized)
tgtgtcagtcatcagcactctagtatgaatttagggtccatgtatattttatttcccaggagataggactgttgaccttctctcaacttgtggagtgacagccttgttctctgtgatagg

SEQ ID NO: 216296 - DNA, 120 bp, Artificial Sequence
  ENSG00000116396_143 (sequence is synthesized)
aagtcctagcaccagagagctccaagcaggatagataattttttcgattaggagaggaagaaatccaaaacttcctgtgtgggtcaaattaggggccagagctctacaaggaattctggc

SEQ ID NO: 216297 - DNA, 120 bp, Artificial Sequence
  ENSG00000116396_144 (sequence is synthesized)
ctgactccaattaacaaagaaggacgtggagcgcaaaagagaaatccaaagtgatatgcaatggaggctgcctctgtctggaagatcttcctgctccttgtgctcccctcttacattcta

SEQ ID NO: 216298 - DNA, 120 bp, Artificial Sequence
  ENSG00000116396_145 (sequence is synthesized)
ctattgtgtcctcagcctggcaaactcttactcatccctcaaggcccactcaactgtcacctctgagaatccttcctgggctctcccaggtagaattcctctgtcctttatgctctcaca

SEQ ID NO: 216299 - DNA, 120 bp, Artificial Sequence
  ENSG00000116396_146 (sequence is synthesized)
gaaccttgaatattcctccattatagcacttactgcagtgataacttgttgcttgtttactcatttatggatgctttccttattaatgtttttacctccagcccctgctcagtggtcagg

SEQ ID NO: 216300 - DNA, 120 bp, Artificial Sequence
  ENSG00000116396_147 (sequence is synthesized)
agctcaaaggtgaacaaaggaatgagtgaatgagtaaggagtgaatgaattagctgccctctgctgacttctgcccttcacccctgtcattctagtccatggttgggttgtaagatttgt

SEQ ID NO: 216301 - DNA, 120 bp, Artificial Sequence
  ENSG00000116396_148 (sequence is synthesized)
ccagaataattatccgggatgctggacctctcactctgccatcccaccaccatgtgccagccaagtctcctctcacccacgccaccctcaccatcagtactcccttccaaagttccccat

SEQ ID NO: 216302 - DNA, 120 bp, Artificial Sequence
  ENSG00000116396_149 (sequence is synthesized)
ttcccctcaactctccaggcttcagccatctgggcctttctttcctgatgttagtagcttcaatttacatcacagttaacttggaacagcggggggggctatatcctgggtcctttctcc

SEQ ID NO: 216303 - DNA, 120 bp, Artificial Sequence
  ENSG00000116396_150 (sequence is synthesized)
ctccgtctgcttccttctcagtcttcattagtggtgttctgtgagcctcccacccaccccaactctccgagtgctagttaggtgctcaggtttgtgctcttggatgaaactcctgctaca

SEQ ID NO: 216304 - DNA, 120 bp, Artificial Sequence
  ENSG00000116396_151 (sequence is synthesized)
taagtggacatagaaaaagaggctggcaagggttgtttccagaggggtctgagccaatcccacgctgttgctgggcttgaggttccacatctgtgaatgggaattaagcttcccctgcct

SEQ ID NO: 216305 - DNA, 120 bp, Artificial Sequence
  ENSG00000116396_152 (sequence is synthesized)
tcatccaaggtgggatgataattaaatgagagtggatggatgggtcctttggaactcctgaagcaccactggaggcaagggattatcattcttctggctttctctctgtcgaggacttgg

SEQ ID NO: 216306 - DNA, 120 bp, Artificial Sequence
  ENSG00000116396_153 (sequence is synthesized)
gtgttcctccagagtcagagggcaggtgcctctggaaggtataatagctaacgtggattgagtgtttacgaccagcccaagccccctacatggcttaatggatcagagcagccccaggag

SEQ ID NO: 216307 - DNA, 120 bp, Artificial Sequence
  ENSG00000116396_154 (sequence is synthesized)
gtaagggctctttttatcactcacattttacaggtgaggaaactggagagtaatttgatggagatctcacagatagatttcacaggcgattttgaccatgcttctacactggctctgtgg

SEQ ID NO: 216308 - DNA, 120 bp, Artificial Sequence
  ENSG00000116396_155 (sequence is synthesized)
ccagccccttggcaccagcaccaccactgccatcgatttctggtccacggccagattgctaattctggctccactggctttgccacttgtgagctgcgtgaccttgggcaaatgacttaa

SEQ ID NO: 216309 - DNA, 120 bp, Artificial Sequence
  ENSG00000116396_156 (sequence is synthesized)
cctttctaagcatggtctgtgaaatggagagaaggaaacatctccagattttgcccagaggagtaaatggaggtgggatatgtgaagtggctctagacccaggcagtaaacagtgctcag

SEQ ID NO: 216310 - DNA, 120 bp, Artificial Sequence
  ENSG00000116396_157 (sequence is synthesized)
tgtgtgtccttccctattgacactgacagaccctgcctggcaggcctgagcacaacagaagcactagaagtccttttccagaaattccttgctagggcctctcactgtggactgagagga

SEQ ID NO: 216311 - DNA, 120 bp, Artificial Sequence
  ENSG00000116396_158 (sequence is synthesized)
tggaggcaggtccaactcgaggcagggccttgggacaccagtgctcatgagacaactcactgtcatgaccatttccgccttagcgacccagaagtggtgacacctgtgtgcttgcttccc

SEQ ID NO: 216312 - DNA, 120 bp, Artificial Sequence
  ENSG00000116396_159 (sequence is synthesized)
gaagcagtgagaagccagacggagacccacacagctgctggctctaaaggctgctccctgcacgtgggcacctcagccccaccttccattcctctctctaacctgcttcccggacctgct

SEQ ID NO: 216313 - DNA, 120 bp, Artificial Sequence
  ENSG00000116396_160 (sequence is synthesized)
ggggccaggagctgccccaagtcctttccacacacacctgtgagctcctgggaatgagattaaaggaggcagggaggtgagaggaagcacaggggaagactgaaagcagatctcagaagc

SEQ ID NO: 216314 - DNA, 120 bp, Artificial Sequence
  ENSG00000116396_161 (sequence is synthesized)
tgagaagaggaagatgaagaggaggaagagggagaagggagagtggcagagagaggagcagtagcccgcggagcagggagagaaaaagcaggtagggaagggggaggggcagaggagggg

SEQ ID NO: 216315 - DNA, 120 bp, Artificial Sequence
  ENSG00000116396_162 (sequence is synthesized)
aaggaggagggcctgcacccggctgtgggcagaggctgcggggcctaaaatgaaccgaacaggctggaaatagaacagctgggcaaaccccaaacgctttgtttgggtgtctgctgagca

SEQ ID NO: 216316 - DNA, 120 bp, Artificial Sequence
  ENSG00000116396_163 (sequence is synthesized)
agcacgtgaatgagaagaaaggggcaacaatgcaaggcagaagtggctcatttcactctggaggcaggtcagaacaagaggcatgtgttccagtccagcacagattagtcggggttcttt

SEQ ID NO: 216317 - DNA, 120 bp, Artificial Sequence
  ENSG00000116396_164 (sequence is synthesized)
ttccgggatgttttctttacgtaatcattatttttcacaggctggcttggtggcgggattagcctgacgccaccccatccttggcaggtggaaggtttgggttactttgagaccaagacc

SEQ ID NO: 216318 - DNA, 120 bp, Artificial Sequence
  ENSG00000116396_165 (sequence is synthesized)
actctgggttcttattctaactgtggatgccaccggcttcgggagaagagatcttaatccactttctaaatggaggtttaggaatctaagctgtgtaatggaatactatttcccttatta

SEQ ID NO: 216319 - DNA, 120 bp, Artificial Sequence
  ENSG00000116396_166 (sequence is synthesized)
gtgtaatggaatactatttcccttattagaacaaaccctaactcgggtgcggtggcacacgtctgtagtcccagctactcagcaggctgagatgggaggatggcttgagcccaggagttt

SEQ ID NO: 216320 - DNA, 120 bp, Artificial Sequence
  ENSG00000116396_167 (sequence is synthesized)
taaattagtcacggcactgcagcctgggcaacatagcgagactctgtctaaaaataataataataaataacaaaacccagttccaggatggatcaggactagcctgaggggccctgcctg

SEQ ID NO: 216321 - DNA, 120 bp, Artificial Sequence
  ENSG00000116396_168 (sequence is synthesized)
tctcagctcaaagaactgcaccatgcctcacacacaccagcacacttcgccctgggaggtgcccaggccacctgaggttctgccatgggctggttccttccctgatcaccagcagcgcca

SEQ ID NO: 216322 - DNA, 120 bp, Artificial Sequence
  ENSG00000116396_169 (sequence is synthesized)
cctctgtgtttttcccctcctctccccacaacccccaacacacaatatgaagaaccttcagtccagaaattagacatgggaccagcagaggctatgaaggtaactggagccaagtggccc

SEQ ID NO: 216323 - DNA, 120 bp, Artificial Sequence
  ENSG00000116396_170 (sequence is synthesized)
ccagagctgccatttagcccaatccaaggtgtctgcactgtggggcatttgcttcatcactgacttctctagaattcaggtcagctctacttgggcctgaatgtggacaggaattagggg

SEQ ID NO: 216324 - DNA, 120 bp, Artificial Sequence
  ENSG00000116396_171 (sequence is synthesized)
gcccgaactccagcctcgcttccaccatgggccgtgcagtctttggcaacttgcttaacttggctgagcttcagttccccgtttgcaaaattggggataatactgcccacctcagcgggt

SEQ ID NO: 216325 - DNA, 120 bp, Artificial Sequence
  ENSG00000116396_172 (sequence is synthesized)
tctcataaagctccaatgagatcctgtgtgcctcctacttagctcaataacttgacattctataaggtttaatttccttccttcctctctcccttcttttctgaatgagctctaagaacc

SEQ ID NO: 216326 - DNA, 120 bp, Artificial Sequence
  ENSG00000116396_173 (sequence is synthesized)
ttccccaattcactagagaacctttgaggaaagctaaattgaggagaaaaggaacacagcccagcccacagcctccccatgaggggctggggctggaggggtaggtctggcggaggaggg

SEQ ID NO: 216327 - DNA, 120 bp, Artificial Sequence
  ENSG00000116396_174 (sequence is synthesized)
aaggggagacatgagtgatcagaaggtctcaacctaagtgctggcggcttctgtgacagagaggcaactgaacctgtatatggtatttggatcacagctggaaatccggctggattttgg

SEQ ID NO: 216328 - DNA, 120 bp, Artificial Sequence
  ENSG00000116396_175 (sequence is synthesized)
ctttaataaaatatttgacattttgtggagctcagttttaaacatggggccgagagctggcagacctaggtccattcctcaagttctaactcagttcaccctgctgctctgggcttcagt

SEQ ID NO: 216329 - DNA, 120 bp, Artificial Sequence
  ENSG00000116396_176 (sequence is synthesized)
attctctgctctccctgtcgtcagatggcattcacatgaagacccagctggtgatcaattcgtggcaaaaagtgtcagaagctagaagacttatctccggtcagtgttttcaacatggta

SEQ ID NO: 216330 - DNA, 120 bp, Artificial Sequence
  ENSG00000116396_177 (sequence is synthesized)
gttatcctgcacgtggtgattgtacaaccctaagtggaaataggaccctaaagtccactctcttccaagactagccacttagaaacataccagcaaccataaggaagctgatttaagacc

SEQ ID NO: 216331 - DNA, 120 bp, Artificial Sequence
  ENSG00000116396_178 (sequence is synthesized)
ccttggccccgctcccataacacacgcccaacagagttggcttgactatggaaccatcccaaaatctctcctccacactgcctcttctcttcctcttctcttctcttggcctgaagaagc

SEQ ID NO: 216332 - DNA, 120 bp, Artificial Sequence
  ENSG00000116396_179 (sequence is synthesized)
ttgctcagtgcacgtatcttgtcttcaggtagaactagaagttgaacaagtcagtttcctctttctgacattgagagggtgggtatcaaggaggatgtttcagagaacgaagaggttctt

SEQ ID NO: 216333 - DNA, 120 bp, Artificial Sequence
  ENSG00000116396_180 (sequence is synthesized)
ggctctttgtactatctgtgcctgttccagctctagctgcccttgtttgacctgcttcttgcaggaggtagtggccagcatcgtagggaatgcccatgaagtactctgggcttctccgat

SEQ ID NO: 216334 - DNA, 120 bp, Artificial Sequence
  ENSG00000116396_181 (sequence is synthesized)
gtaaagggtgagaaaaatcaaagccagctcttatctccatccagatggtggggataaaaacagtccaagcccgtttcttgcctcacttgtccagtggctaagctaatgccaaactgggat

SEQ ID NO: 216335 - DNA, 120 bp, Artificial Sequence
  ENSG00000116396_182 (sequence is synthesized)
ttctctgacctcatgttaacccgacctcaaggctgccagagtatcagctactaaatcaccaatctataaaagtcatcttgcagccttttccagatcccagaaggagtctttactccatcc

SEQ ID NO: 216336 - DNA, 120 bp, Artificial Sequence
  ENSG00000116396_183 (sequence is synthesized)
tgacctcagaagccaccttgcatcctctgccaatgctttcttcttcctgtatttaggaatcacatctatcacttggggtccagaaaacatttttagctaccaaccatgagtcagacttca

SEQ ID NO: 216337 - DNA, 120 bp, Artificial Sequence
  ENSG00000116396_184 (sequence is synthesized)
tccccatttacaaccgtgtgactagagggtagggagttggagaagattcctccagccacagaacagctccttgaacaagcttttgctaaaagacaagtctcctcatgcccttccttttcc

SEQ ID NO: 216338 - DNA, 120 bp, Artificial Sequence
  ENSG00000116396_185 (sequence is synthesized)
gaaaagtcttctctgactccctgctggataaaggttagaagcttgagcgtggcttccccagaaccttcaccgtctggtcccagcctctcttttgggcctcagtcagtccctgccctccct

SEQ ID NO: 216339 - DNA, 120 bp, Artificial Sequence
  ENSG00000116396_186 (sequence is synthesized)
cccacacactcgcactccaatcccatgcacatagaagtgtttgaatgtatgtactttcctgctttgggttacacgcttccctttgcttggagtgtcccctggctttcctccacctgtgaa

SEQ ID NO: 216340 - DNA, 120 bp, Artificial Sequence
  ENSG00000116396_187 (sequence is synthesized)
ttttcttttctttttttttttttggtacacatttattgggtacaagtgcaattttgccacatgcctagttgcacagtagttatatcagggcttttagagtatcggtcactcaaataacat

SEQ ID NO: 216341 - DNA, 120 bp, Artificial Sequence
  ENSG00000116396_188 (sequence is synthesized)
ggcttttagagtatcggtcactcaaataacatacattgtacccattaagtaatttctcattgtccacccctctcccaccctctctccctctgagtctccattgtccgtcattccactctc

SEQ ID NO: 216342 - DNA, 120 bp, Artificial Sequence
  ENSG00000116396_189 (sequence is synthesized)
tacatccatgtgtacacatttttaagctcctacttatgagtgagaacatacttgtctttctgtgtctaacgtatttcacctcttgttccggctgtgttgctgtaaacgacataatttcat

SEQ ID NO: 216343 - DNA, 120 bp, Artificial Sequence
  ENSG00000116396_190 (sequence is synthesized)
aacgacataatttcattctttttatggctgaatagtattccacgtgtatgtgtatcacattttctttatctactaatcatctattggtgggcagggcatttaggttgattccatgtcttt

SEQ ID NO: 216344 - DNA, 120 bp, Artificial Sequence
  ENSG00000116396_191 (sequence is synthesized)
ctgcagtaaacatacgagtgcaggtactttttttttttttttaggcaagatctagctctgtcaccgagactggagtgcaatgataccatcacagctcactgcagccttgacctctcaggc

SEQ ID NO: 216345 - DNA, 120 bp, Artificial Sequence
  ENSG00000116396_192 (sequence is synthesized)
accatcacagctcactgcagccttgacctctcaggcccaagtgatcctcctctgagtagctgggaccacatgccatcatgcctggctaagttttaattttttgtagagatggggtcttgc

SEQ ID NO: 216346 - DNA, 120 bp, Artificial Sequence
  ENSG00000116396_193 (sequence is synthesized)
ggcagtcctcccgcctcagcctcccaaagtgtagggattataggtgggagccaccaggcctggctttcttctagatatattgatttcttctgtgaagtcttttcttttttcttttttttt

SEQ ID NO: 216347 - DNA, 120 bp, Artificial Sequence
  ENSG00000116396_194 (sequence is synthesized)
acaggcatgagccaccgcacctggccttgtgaagtcttttctaatccaccctgtcccactggcagaatgtttcgccccttagccagtgatatgcctttacaagagcatatgttgcactag

SEQ ID NO: 216348 - DNA, 120 bp, Artificial Sequence
  ENSG00000116396_195 (sequence is synthesized)
aagagcatatgttgcactagatgtttactcggctgctttccacaggccctttcaaaggccatagattagacccacctttcctgtagccctggccaattagatcacagagacctatgtaga

SEQ ID NO: 216349 - DNA, 120 bp, Artificial Sequence
  ENSG00000116396_196 (sequence is synthesized)
tatggtaggaaaaatgatccagaatgtagctgtgacctggaggatgcctgcatgttccttcaatatcatactaaggctttgtctgtcatgaagattattaattctctagaagtgtgctat

SEQ ID NO: 216350 - DNA, 120 bp, Artificial Sequence
  ENSG00000116396_197 (sequence is synthesized)
caacagatggctattgaacacttgaaatgtggctagtgcctcatgtcaaaatgacaatattttgaatgtgttaaataaattattaaaatgaatttctcctgtttgtttttactttttaat

SEQ ID NO: 216351 - DNA, 120 bp, Artificial Sequence
  ENSG00000116396_198 (sequence is synthesized)
gtggctactagaaaaatttaaattatacccctggttcacattatatatccactggaaagtgctgcagtagcagacaataattgtttgactttgtcatttgctattattaattaagggctc

SEQ ID NO: 216352 - DNA, 120 bp, Artificial Sequence
  ENSG00000116396_199 (sequence is synthesized)
ttttgtttttgtttttgtttttttttggcctgttagagattcaagtgatttgtatccagtaggaaaaataaccccagttttatttttctgtaggacattaactagatttgtattttttaa

SEQ ID NO: 216353 - DNA, 120 bp, Artificial Sequence
  ENSG00000116396_200 (sequence is synthesized)
tgtaggacattaactagatttgtattttttaaaaaattattttggcgtgccttttaaatcccagttcctcaaatgctctttgaatcaactttattatcgtattgtttcccttgtcagtta

SEQ ID NO: 216354 - DNA, 120 bp, Artificial Sequence
  ENSG00000116396_201 (sequence is synthesized)
atgagttcaataaaatctttgatacatattcatactttaactgtatgagacttgtgtttctaactttttggaaattatactttgacatatctctgtctcctgttcggcttgatggcagag

SEQ ID NO: 216355 - DNA, 120 bp, Artificial Sequence
  ENSG00000116396_202 (sequence is synthesized)
actcaattattaacatacctagtattaagtagggactcagtaaatgttgaatgaataagaagcacttgtttagaattgaggtcgaaagtttaaactgccagccaaactttgtggtgggat

SEQ ID NO: 216356 - DNA, 120 bp, Artificial Sequence
  ENSG00000116396_203 (sequence is synthesized)
ccctatcagccacatgtctggagagtggcagatgcaggaaagatgagacgttttcaggatcctgaactatttgggtggtttcccagtttggggggcctgtgatcccaagggaatgctggc

SEQ ID NO: 216357 - DNA, 120 bp, Artificial Sequence
  ENSG00000116396_204 (sequence is synthesized)
caaagcaagtcccttctgtcagctcaagggtgaggtcctctcaggctccccgcccttcccacccacctggggtgctgcaggaagtatggagcccagataggactcttgtcccttcctgcc

SEQ ID NO: 216358 - DNA, 120 bp, Artificial Sequence
  ENSG00000116406_0 (sequence is synthesized)
gctccgggatactgagggcggagggcggtggcagcgctggcgctggggaccggcttggtggcttcgggaaacagtttggcgccggcggccgtccgtgttactccgcatcccgccccgtct

SEQ ID NO: 216359 - DNA, 120 bp, Artificial Sequence
  ENSG00000116406_1 (sequence is synthesized)
cggcacggctagcagccccctggccaccagcgtccagcaatgtgtctcaccggccgggcgtagcagctgcgcgtgcgcggaaccgcggggccatgagcgaagccggcggccggggctgtg

SEQ ID NO: 216360 - DNA, 120 bp, Artificial Sequence
  ENSG00000116406_2 (sequence is synthesized)
ggtccccggttccccagcgagcgcgatggagactagtggcggcgacggccgcgttctgcctggtgtcggccacctccgtgtggacggcgggggccgagcccatgagtagggaggagaaac

SEQ ID NO: 216361 - DNA, 120 bp, Artificial Sequence
  ENSG00000116406_3 (sequence is synthesized)
agaagcttgggaatcaagtactggaaatgtttgatcatgcttatggtaactatatggaacatgcttaccctgctgatgaactcatgcctttaacctgtagaggtcgagttagaggccaag

SEQ ID NO: 216362 - DNA, 120 bp, Artificial Sequence
  ENSG00000116406_4 (sequence is synthesized)
agccaagtcgcggtgacgttgatgatgccttgggaaaattttctctgacactgattgattctttggacactcttgtggttttaaataaaactaaagaatttgaagatgcagtgagaaaag

SEQ ID NO: 216363 - DNA, 120 bp, Artificial Sequence
  ENSG00000116406_5 (sequence is synthesized)
ttttaagagatgttaatttagataacgatgtagtcgtatcagtctttgaaacaaacatcagagttcttgggggtcttttgggtgggcactccctggcaatcatgctgaaagaaaaaggtg

SEQ ID NO: 216364 - DNA, 120 bp, Artificial Sequence
  ENSG00000116406_6 (sequence is synthesized)
aatatatgcagtggtacaatgatgaacttctccaaatggcaaagcagttaggttacaaacttttaccggctttcaacactaccagtggccttccttatccaagaattaatttaaagtttg

SEQ ID NO: 216365 - DNA, 120 bp, Artificial Sequence
  ENSG00000116406_7 (sequence is synthesized)
gcatcagaaaaccagaagctcggacaggaactgagacagatacctgtacagcttgtgcaggtaccttgatccttgaatttgctgctttaagtcgattcacaggagcaacaatatttgagg

SEQ ID NO: 216366 - DNA, 120 bp, Artificial Sequence
  ENSG00000116406_8 (sequence is synthesized)
aatatgccagaaaagctcttgattttctctgggaaaaaagacagcgaagtagtaatttagtgggcgtgactataaatattcatactggagattgggtacgaaaagatagtggagttggag

SEQ ID NO: 216367 - DNA, 120 bp, Artificial Sequence
  ENSG00000116406_9 (sequence is synthesized)
cagggattgattcatattatgaatatctgttgaaagcctatgtcttgcttggagatgacagttttctggaaagatttaacacacactatgatgccataatgaggtatattagccagccac

SEQ ID NO: 216368 - DNA, 120 bp, Artificial Sequence
  ENSG00000116406_10 (sequence is synthesized)
ctcttctacttgatgtgcatatccacaaaccaatgctgaatgctcggacttggatggatgctttgcttgccttcttcccaggcttgcaggtgttaaagggggatattagacctgctattg

SEQ ID NO: 216369 - DNA, 120 bp, Artificial Sequence
  ENSG00000116406_11 (sequence is synthesized)
aaactcatgaaatgttatatcaggtgattaaaaaacacaattttctaccagaggcatttaccacagatttcagagtacactgggctcaacatcctttaaggccagaatttgcagaaagta

SEQ ID NO: 216370 - DNA, 120 bp, Artificial Sequence
  ENSG00000116406_12 (sequence is synthesized)
cctacttcttatataaagctacaggagatccttactaccttgaagtagggaagacacttattgaaaatttaaataaatatgctagagtgccttgcggatttgctgccatgaaggatgttc

SEQ ID NO: 216371 - DNA, 120 bp, Artificial Sequence
  ENSG00000116406_13 (sequence is synthesized)
gtactggaagtcatgaggacagaatggattctttcttcttggctgaaatgtttaaatatctttacctgttatttgctgataaagaagacattatttttgacatagaagattacatcttta

SEQ ID NO: 216372 - DNA, 120 bp, Artificial Sequence
  ENSG00000116406_14 (sequence is synthesized)
caacagaagctcatctgttacctctttggctctctactacaaatcaaagcatctctaaaaagaacacaacctcggaatatacagaactggatgacagtaacttcgattggacttgtccaa

SEQ ID NO: 216373 - DNA, 120 bp, Artificial Sequence
  ENSG00000116406_15 (sequence is synthesized)
atactcagatcctctttcctaatgacccattgtatgctcaaagtattcgtgagcccttgaaaaatgtggtggataagagctgtcctagaggcatcatcagagtagaggagagtttcagga

SEQ ID NO: 216374 - DNA, 120 bp, Artificial Sequence
  ENSG00000116406_16 (sequence is synthesized)
gtggagctaaaccccctctgagagccagagatttcatggccactaaccctgagcatttagaaatcctgaagaagatgggggtgagtttgattcacctcaaagatgggagagtccagttgg

SEQ ID NO: 216375 - DNA, 120 bp, Artificial Sequence
  ENSG00000116406_17 (sequence is synthesized)
tccaacatgcaatccaagctgctagttcaatcgacgctgaagatgggttgaggttcatgcaggagatgattgaattgtcaagtcagcaacaaaaagaacagcagctgcctccacgagctg

SEQ ID NO: 216376 - DNA, 120 bp, Artificial Sequence
  ENSG00000116406_18 (sequence is synthesized)
tacaaattgtttcccacccattttttggcagggtagtattgactgctggaccagctcagtttgggctggatctgtctaaacataaagagacaagaggatttgttgcaagcagtaaaccat

SEQ ID NO: 216377 - DNA, 120 bp, Artificial Sequence
  ENSG00000116406_19 (sequence is synthesized)
ccaatggttgttcagagcttactaacccagaggcagtgatgggaaaaatcgcactgatacaaagaggacagtgcatgtttgcagaaaaggcacgcaacatccagaatgctggagccattg

SEQ ID NO: 216378 - DNA, 120 bp, Artificial Sequence
  ENSG00000116406_20 (sequence is synthesized)
gtggcattgttattgatgacaatgaggggagcagcagtgatactgcccctctgttccagatggcaggtgatggaaaggatacagatgacatcaagatccccatgctgttcttattcagca

SEQ ID NO: 216379 - DNA, 120 bp, Artificial Sequence
  ENSG00000116406_21 (sequence is synthesized)
aagaaggaagtatcatactggatgccatccgggaatatgaggaggtagaagtgctcctctctgataaagcaaaagatcgagatcctgaaatggaaaatgaagaacaaccatcctctgaaa

SEQ ID NO: 216380 - DNA, 120 bp, Artificial Sequence
  ENSG00000116406_22 (sequence is synthesized)
atgattctcagaatcagagtggtgaacagatttcatcaagttctcaggaggttgatttggttgatcaagagtcttctgaggaaaattctctaaattctcacccagaatcattatctctag

SEQ ID NO: 216381 - DNA, 120 bp, Artificial Sequence
  ENSG00000116406_23 (sequence is synthesized)
cagatatggacaatgctgcaagcatttccccttctgaacagacttctaatcccacagaaaaccatgagactacaaatcttaatggtgaatgtacagatttagataaccagcttcaagaac

SEQ ID NO: 216382 - DNA, 120 bp, Artificial Sequence
  ENSG00000116406_24 (sequence is synthesized)
aatcagaaactgaggaagattccaatcctaatgttagctggggtaaaaaggtccagcctatagactccatattagcagactggaatgaagatatagaagcatttgaaatgatggagaagg

SEQ ID NO: 216383 - DNA, 120 bp, Artificial Sequence
  ENSG00000116406_25 (sequence is synthesized)
atgagctatgacttgctaaacaatctgttggtaggtatttaaaaagaaaaggtaaactgtgtgtggttaatagacatcctaatactaagcaggctttctaatgggaggctttaagtatgg

SEQ ID NO: 216384 - DNA, 120 bp, Artificial Sequence
  ENSG00000116406_26 (sequence is synthesized)
tgatgaacaaccacgttctgactggcgtagttatcgtaggaatctggagcatgctgtgttagaattgaccttgtttaaaactgtcccatcaaaaatggaaatccacagttcccccttcaa

SEQ ID NO: 216385 - DNA, 120 bp, Artificial Sequence
  ENSG00000116406_27 (sequence is synthesized)
atgcagcactgcaccaccctgcaacacctcaggccagggaaagattactgagcattcctgcgaaccagatttctgttgtctctggatagacaagaaacaaaattcatttagtagtggagt

SEQ ID NO: 216386 - DNA, 120 bp, Artificial Sequence
  ENSG00000116406_28 (sequence is synthesized)
ccttcacaaaacactctaagtgacctaagtggttatgaagcaaatgcatttatggtgaaaacagtctttgctcattgctttctcttgtttcatttagtgacaaatgatcaagatgacttg

SEQ ID NO: 216387 - DNA, 120 bp, Artificial Sequence
  ENSG00000116406_29 (sequence is synthesized)
attttttttccttcttaacaatgtcttttttatttaaaccaaaggtgaagccagtgtactttctcagtgagttctctgcataaagactaatcagtgggaccaggtaaaaaggtcatataa

SEQ ID NO: 216388 - DNA, 120 bp, Artificial Sequence
  ENSG00000116406_30 (sequence is synthesized)
tacattgtggagattgcttacttaatacttctgaaaaatggagtaagggagaaactgtaatgttgcaatatgaacctcccattgggccttccatagggaaagctgtgactactctgaaat

SEQ ID NO: 216389 - DNA, 120 bp, Artificial Sequence
  ENSG00000116406_31 (sequence is synthesized)
ggaacctagcattatatccttgtagggtagattataaatcatttccagttcatttctcttagaggtgattacctctagccatcagccttactccatcccatgtttggtatgcaatttgag

SEQ ID NO: 216390 - DNA, 120 bp, Artificial Sequence
  ENSG00000116406_32 (sequence is synthesized)
ccacaaggctcgtatcgccaacagctatatacattttgttccatttttctgtcttacagagccatgatagaactgtggttagtgagttaaaattcctggagtaactactgtttttctcct

SEQ ID NO: 216391 - DNA, 120 bp, Artificial Sequence
  ENSG00000116406_33 (sequence is synthesized)
ttgaaacttaggtttctaaagttgcacctaaggaatctgtcacattttctgttgaatcatggtttttgtttttgtttttaacagatattccttctgatacggacttgaaaattagtgtat

SEQ ID NO: 216392 - DNA, 120 bp, Artificial Sequence
  ENSG00000116406_34 (sequence is synthesized)
ggtgacctgtgtttaaaaaaaaaagtacaatacaactacatatagctatatagcttaatgagacttccaccccccccctttttttttttggtttgttgttgttgtagtagtctggtgctg

SEQ ID NO: 216393 - DNA, 120 bp, Artificial Sequence
  ENSG00000116406_35 (sequence is synthesized)
gccacatttaagtcttaaaaatttttaaattttgttgttgatgtttgtagacagccctgttgttgaaatcatggctttattcattttatttattttttaaacttgcctgaatttgttcta

SEQ ID NO: 216394 - DNA, 120 bp, Artificial Sequence
  ENSG00000116406_36 (sequence is synthesized)
aaggaatatttaagagacataattttcttctctttaccataacattacacaaaactttttcctaaaacacggttgtgaggtactgatgaggtgtaagtggagctgttaaaaacagcagtg

SEQ ID NO: 216395 - DNA, 120 bp, Artificial Sequence
  ENSG00000116406_37 (sequence is synthesized)
ctgtattgcagttatgtatattcgtgtacagtatgtttagatcccaggtaaacatattcttttctgagaggataaatacctgcattcagatattccaggtaaatataattgagtcaggga

SEQ ID NO: 216396 - DNA, 120 bp, Artificial Sequence
  ENSG00000116406_38 (sequence is synthesized)
gtagtaaatctgatggagaattcactttggggaggggaaaaagaatagtatgcaagacccttattggcttttaattatacctgaaaccaaaatggatatttttagtctctctgcatgtga

SEQ ID NO: 216397 - DNA, 120 bp, Artificial Sequence
  ENSG00000116406_39 (sequence is synthesized)
gatttggtgtaacaagatagaactataatatatacagtatatggaaggatagatatagtgctttgttcattttaattgcaaagctgccaaaatagttgaagcttaattacttgacttgcc

SEQ ID NO: 216398 - DNA, 120 bp, Artificial Sequence
  ENSG00000116406_40 (sequence is synthesized)
ttgatttataggactggggcttggagaaaatgagcagatgttcctctaagacatcgattacagaagccttatatacatggatttgattttgtatttgtagctgaaagtcactgttgtcta

SEQ ID NO: 216399 - DNA, 120 bp, Artificial Sequence
  ENSG00000116406_41 (sequence is synthesized)
aaactaacttttctaagttatcaaaacaacctaatttcttttccaacaaggagaacttaatggcatgaaggattgtgtgacacattggaaaagccagcttactgccactctcttcctttg

SEQ ID NO: 216400 - DNA, 120 bp, Artificial Sequence
  ENSG00000116406_42 (sequence is synthesized)
gccattagagggaggtgttgcctttcattgacgcttagaagcaaattgttcacttgttaagaaaagtaaatccttaaaaaaagaaaaggaaaaaatttaaccaatttttcttaataccca

SEQ ID NO: 216401 - DNA, 120 bp, Artificial Sequence
  ENSG00000116406_43 (sequence is synthesized)
gaaggaattatactcaatatttccctagttaagaaaagaggagataatgttcgtctaaaaaactccaacgttgtaattacaactctacattcatttacttacttgacatactgccacaaa

SEQ ID NO: 216402 - DNA, 89 bp, Artificial Sequence
  ENSG00000116406_44 (sequence is synthesized)
gttaacttttatagacattttagtaacttgctaaagattcaggggattctatgaaaccccgaatttagaaacatctggtctacctcagt

SEQ ID NO: 216403 - DNA, 120 bp, Artificial Sequence
  ENSG00000116406_45 (sequence is synthesized)
tatgaaaccccgaatttagaaacatctggtctacctcagttaaatgttgactgcttagaaatatagctgaagtgatcaccacagccataaaattgtttaagaaagatttatataatgttt

SEQ ID NO: 216404 - DNA, 120 bp, Artificial Sequence
  ENSG00000116406_46 (sequence is synthesized)
acaaatctggaatcaaggattttagctgaaatcctttaagagatattagagcaagtatttaattcaggtattttcaagttttaaaacttaacctgtttacctactaaaaataaaatagct

SEQ ID NO: 216405 - DNA, 120 bp, Artificial Sequence
  ENSG00000116406_47 (sequence is synthesized)
agtttttttctgcatataaaagttcattgaaatgatatgcccttatttgcaatacttttcccataaagttttaagtgtgaaagaattgtaatttactagatatgtttggtatgggatatt

SEQ ID NO: 216406 - DNA, 120 bp, Artificial Sequence
  ENSG00000116406_48 (sequence is synthesized)
ttgttaggcaagttttcttttttcttcttaaattgcaataggcttccaaaaagagtataattgtttcagaacaaattaactcttggcattatacgtctccctttttctttacagtattag

SEQ ID NO: 216407 - DNA, 120 bp, Artificial Sequence
  ENSG00000116406_49 (sequence is synthesized)
taaaaagaaaaattgtacactttctgattttaacttcactaatgtaattactctctcaagaagcttttaaaatttaaattaccatcacacaaccttttttatagtaaagccaacatttgt

SEQ ID NO: 216408 - DNA, 120 bp, Artificial Sequence
  ENSG00000116406_50 (sequence is synthesized)
tctctcaccaaaccccatgccaaattcatcatgaagaaagctcagcataagtaattcaaatactgcttataattttagaggggggtagaatttagtaaatattccagccggtcgttttat

SEQ ID NO: 216409 - DNA, 120 bp, Artificial Sequence
  ENSG00000116406_51 (sequence is synthesized)
gcacaaggcttcagtcagaacatagaaaaaaaaaacattctgtgaatgaaatattgtatgttcagattttataaaagacatttttaaaagcccaatttacagccgtatattttcttatga

SEQ ID NO: 216410 - DNA, 120 bp, Artificial Sequence
  ENSG00000116406_52 (sequence is synthesized)
tgtaatttatgaaaaagatgtctgtactaacaggtgctgtaacactactgttgttggattttattgtttggtgataaatgtatacaatatttctaagggaaactatgtactgtgatgtaa

SEQ ID NO: 216411 - DNA, 120 bp, Artificial Sequence
  ENSG00000116406_53 (sequence is synthesized)
gggaaactatgtactgtgatgtaaaagtctgggcaaaatgtatataatcctgtatataattatgtatttgattataattactgattgtaaagatttaataaaatatgtaaatattccagt

SEQ ID NO: 216412 - DNA, 120 bp, Artificial Sequence
  ENSG00000116406_54 (sequence is synthesized)
atcactgtgcatatcctcatacttttatgtcttgatgtttatcactctgttttccttttttttttaaactcattttatcctccggggattgaattctggggacattttaggctgtagaaa

SEQ ID NO: 216413 - DNA, 120 bp, Artificial Sequence
  ENSG00000116406_55 (sequence is synthesized)
cccaagcttgtgggctaaagtaaggattttgttctaagaaatcactgaaagtttttcaacaagtcagtagcatgcacaaaggtaatgctaagtgaataaaactctagaattgtgtataaa

SEQ ID NO: 216414 - DNA, 120 bp, Artificial Sequence
  ENSG00000116406_56 (sequence is synthesized)
aaactccattacctgaatgacattgtaaaaataatttttaaaatgtgtagtggttttgtgtcagtatttcctgatgatgttgaacagggacagcgtaaaaagtgatatacattccaaaaa

SEQ ID NO: 216415 - DNA, 120 bp, Artificial Sequence
  ENSG00000116406_57 (sequence is synthesized)
atcagttgataaagtagttttattttcaccttttatcagaaactttgcagatctgccaataagagatgtaatagatttgagttttacctaatcttgtttgtacaaggataagaattattg

SEQ ID NO: 216416 - DNA, 120 bp, Artificial Sequence
  ENSG00000116406_58 (sequence is synthesized)
aaatatgttactagttagctttttcctttgtatttcaattctttttgaaatcttggaagtttggcttagtctttgattacaccaaggatacagggctttgaagacctggagaaactagtg

SEQ ID NO: 216417 - DNA, 120 bp, Artificial Sequence
  ENSG00000116406_59 (sequence is synthesized)
agtattcatttcaaaagcaagtcttaagactggttcagaaccacaagcatgtttttttgggaaaagtgggaggattattgaacccaattgaatcacctttttaactgaagcaaactgaaa

SEQ ID NO: 216418 - DNA, 120 bp, Artificial Sequence
  ENSG00000116406_60 (sequence is synthesized)
tgaatatagcaaactcatcagttatatcactatattctttttaaactaatctaccatttccttgctcacctatcagttcatccatgttgtatgtatgagacagtatgacatggtgattaa

SEQ ID NO: 216419 - DNA, 120 bp, Artificial Sequence
  ENSG00000116455_0 (sequence is synthesized)
agaggtgcaccacgtggggtttgctgccggagcggagtctccggccggcgtccagtttgagtctaggttggagttggaaccgtggagatgcggaaggaaaccccaccccccctagtgccc

SEQ ID NO: 216420 - DNA, 120 bp, Artificial Sequence
  ENSG00000116455_1 (sequence is synthesized)
ccggcggcccgggagtggaatcttcccccaaatgcgcccgcctgcatggaacggcagttggaggctgcgcggtaccggtccgatggggcgcttctcctcggggcctccagcctgagtggg

SEQ ID NO: 216421 - DNA, 120 bp, Artificial Sequence
  ENSG00000116455_2 (sequence is synthesized)
cgctgctgggccggctccctctggctttttaaggacccctgtgccgcccccaacgaaggcttctgctccgccggagtccaaacggaggctggagtggctgacctcacttgggttggggag

SEQ ID NO: 216422 - DNA, 120 bp, Artificial Sequence
  ENSG00000116455_3 (sequence is synthesized)
agaggtattctagtggcctccgattcaggtgctgttgaattgtgggaactagatgagaatgagacacttattgtcagcaagttctgcaagtatgagcatgatgacattgtgtctacagtc

SEQ ID NO: 216423 - DNA, 120 bp, Artificial Sequence
  ENSG00000116455_4 (sequence is synthesized)
agtgtcttgagctctggcacacaagctgtcagtggtagcaaagacatctgcatcaaggtttgggaccttgctcagcaggtggtactgagttcataccgagctcatgctgctcaggtcact

SEQ ID NO: 216424 - DNA, 120 bp, Artificial Sequence
  ENSG00000116455_5 (sequence is synthesized)
tgtgttgctgcctctcctcacaaggactctgtgtttctttcatgcagcgaggacaatagaattttactctgggatacccgctgtcccaagccagcatcacagattggctgcagtgcgcct

SEQ ID NO: 216425 - DNA, 120 bp, Artificial Sequence
  ENSG00000116455_6 (sequence is synthesized)
ggctaccttcctacctcgctggcttggcatcctcagcaaagtgaagtctttgtctttggtgatgagaatgggacagtctcccttgtggacaccaagagtacaagctgtgtcctgagctca

SEQ ID NO: 216426 - DNA, 120 bp, Artificial Sequence
  ENSG00000116455_7 (sequence is synthesized)
gctgtacactcccagtgtgtcactgggctggtgttctccccacacagtgttcccttcctggcctctctcagtgaagactgctcacttgctgtgctggactcaagcctttctgagttgttt

SEQ ID NO: 216427 - DNA, 120 bp, Artificial Sequence
  ENSG00000116455_8 (sequence is synthesized)
agaagccaagcccacagagactttgtgagagatgcgacttggtccccgctcaatcactccctgcttaccacagtgggctgggaccatcaggtcgtccaccacgttgtgcccacagaacct

SEQ ID NO: 216428 - DNA, 120 bp, Artificial Sequence
  ENSG00000116455_9 (sequence is synthesized)
ctcccagcccctggacctgcaagtgttactgagtagattggatttaagacaaaaagcaagtcccccatgagtgtccacttctttgccctgccctctcagcttgtgagacaacacaggagc

SEQ ID NO: 216429 - DNA, 120 bp, Artificial Sequence
  ENSG00000116455_10 (sequence is synthesized)
cctgagggaggctggattctgggttcctgtagtcacagggaggaaaagctttcttaaaaatggacatgtatgtgcgtgtgagtgtgtgtgtagatttatagtttttggtagtggcaggaa

SEQ ID NO: 216430 - DNA, 120 bp, Artificial Sequence
  ENSG00000116455_11 (sequence is synthesized)
taaaaaaaatccatcctacatcttccctaagcactgcctctctctcaccccccaaaacaagttgacgaaagggttttatgtagctgtctatgaggaattggccgtgtctgggtgggttat

SEQ ID NO: 216431 - DNA, 120 bp, Artificial Sequence
  ENSG00000116455_12 (sequence is synthesized)
gggatgtgggcatccctgggttcttggaagcagctcttatgctactcatagagatgggattgactttatttttttatagtgcttaattcaccattatgagaaatgcttccagtcacaaaa

SEQ ID NO: 216432 - DNA, 120 bp, Artificial Sequence
  ENSG00000116455_13 (sequence is synthesized)
atgcagcccagctcactctgaggaagaagcaggacttggtacggttttacacaactccttaccattaaactgaatcagaaatccattttctggctgaataaaaagtttggcttgcctgtg

SEQ ID NO: 216433 - DNA, 120 bp, Artificial Sequence
  ENSG00000116455_14 (sequence is synthesized)
taatgcccactcccttccccctggctccctagtgatgggacatatatgagagagaagtgtttttctatcatagacaccataggggaaagtttggggatgaaggagagcttaaaggtgttt

SEQ ID NO: 216434 - DNA, 120 bp, Artificial Sequence
  ENSG00000116455_15 (sequence is synthesized)
caattaagttagaaaactgacacaggctgttgagaattctttgccacttttcccaccccaaaacagcatggggcctgacatcttctgccctggtcccctttctcttgatgtggaaagtct

SEQ ID NO: 216435 - DNA, 120 bp, Artificial Sequence
  ENSG00000116455_16 (sequence is synthesized)
gaatgcagtatttatagacttctaaggttttaaaatccagtatcaagaagaaaatcagaaatactggttggtgaaataaagagtttaggcattgttggcctgtcttttttgaagcatgtg

SEQ ID NO: 216436 - DNA, 120 bp, Artificial Sequence
  ENSG00000116455_17 (sequence is synthesized)
tgttatgtgtagttagatatatttcacttatgtgagtcatcatggtgttggtcttgtagcccattatttttcctgtgcttccccagcttcccaaagtagctagttagaacttaaggtaaa

SEQ ID NO: 216437 - DNA, 120 bp, Artificial Sequence
  ENSG00000116455_18 (sequence is synthesized)
tatttattcttgggttggtggagtggatattgccagttaggagtcatggatcaattactgattatattgaaagtaaatataatcaattatgtacttttgagctttgcaggttcaatttag

SEQ ID NO: 216438 - DNA, 120 bp, Artificial Sequence
  ENSG00000116455_19 (sequence is synthesized)
gtaaaaatcacattatgaaactgggaaagtctgaaggaatatgggcaaaatatttctcagtaaagcttccatgcttcacccttgacatgattacccttgagtaaaacatgggaatttgta

SEQ ID NO: 216439 - DNA, 120 bp, Artificial Sequence
  ENSG00000116455_20 (sequence is synthesized)
ggcgatgaggccatacagttggtgaaatgtttagaagccaagcccacagagactttgtgagagatgcgacttggtccccgctcaatcactccctgcttaccacagtgggctgggaccatc

SEQ ID NO: 216440 - DNA, 120 bp, Artificial Sequence
  ENSG00000116455_21 (sequence is synthesized)
agacccggccggaacgctgttctgtgcggtctccatggaggcgaacccttctacccttcacgcgctgacagcttgtaccccccgtagatggggcgcttctcctcggggcctccagcctga

SEQ ID NO: 216441 - DNA, 120 bp, Artificial Sequence
  ENSG00000116459_0 (sequence is synthesized)
catcttggtcctgccctgacagattctcctatcggggtcacagggacgctaagattgctacctggactttcgttgaccatgctgtcccgggtggtactttccgccgccgccacagcggcc

SEQ ID NO: 216442 - DNA, 120 bp, Artificial Sequence
  ENSG00000116459_1 (sequence is synthesized)
ccctctctgaagaatgcagccttcctaggtccaggggtattgcaggcaacaaggacctttcatacagggcagccacaccttgtccctgtaccacctcttcctgaatacggaggaaaagtt

SEQ ID NO: 216443 - DNA, 120 bp, Artificial Sequence
  ENSG00000116459_2 (sequence is synthesized)
cgttatggactgatccctgaggaattcttccagtttctttatcctaaaactggtgtaacaggaccctatgtactcggaactgggcttatcttgtacgctttatccaaagaaatatatgtg

SEQ ID NO: 216444 - DNA, 120 bp, Artificial Sequence
  ENSG00000116459_3 (sequence is synthesized)
attagcgcagagaccttcactgccctatcagtactaggtgtaatggtctatggaattaaaaaatatggtccctttgttgcagactttgctgataaactcaatgagcaaaaacttgcccaa

SEQ ID NO: 216445 - DNA, 120 bp, Artificial Sequence
  ENSG00000116459_4 (sequence is synthesized)
ctagaagaggcgaagcaggcttccatccaacacatccagaatgcaattgatacggagaagtcacaacaggcactggttcagaagcgccattacctttttgatgtgcaaaggaataacatt

SEQ ID NO: 216446 - DNA, 120 bp, Artificial Sequence
  ENSG00000116459_5 (sequence is synthesized)
gctatggctttggaagttacttaccgggaacgactgtatagagtatataaggaagtaaagaatcgcctggactatcatatatctgtgcagaacatgatgcgtcgaaaggaacaagaacac

SEQ ID NO: 216447 - DNA, 120 bp, Artificial Sequence
  ENSG00000116459_6 (sequence is synthesized)
atgataaattgggtggagaagcacgtggtgcaaagcatctccacacagcaggaaaaggagacaattgccaagtgcattgcggacctaaagctgctggcaaagaaggctcaagcacagcca

SEQ ID NO: 216448 - DNA, 120 bp, Artificial Sequence
  ENSG00000116459_7 (sequence is synthesized)
gttatgtaaatgtatctatcccaattgagacagctagaaacagttgactgactaaatggaaactagtctatttgacaaagtctttctgtgttggtgtctactgaagttatagtttaccct

SEQ ID NO: 216449 - DNA, 120 bp, Artificial Sequence
  ENSG00000116459_8 (sequence is synthesized)
tcctaaaaatgaaaagtttgtttcatatagtgagagaacgaaatctctatcggccagtcagatgtttctcatccttcttgctctgcctttgagttgttccgtgatcacttctgaataagc

SEQ ID NO: 216450 - DNA, 120 bp, Artificial Sequence
  ENSG00000116459_9 (sequence is synthesized)
agtttgcctttataaaaacttgctgcctgactaaagattaacaggttatagtttaaatttgtaattaattctaccatcttgcaataaagtgacaattgaatgaaacagggtttttcaagt

SEQ ID NO: 216451 - DNA, 120 bp, Artificial Sequence
  ENSG00000116459_10 (sequence is synthesized)
tggctgataggttatgagatatgtaaagctttctagtactcttaaaataactaaatggagtattatatatcaattcatatcattgactttattattttagtagtatgcctatagaaaata

SEQ ID NO: 216452 - DNA, 89 bp, Artificial Sequence
  ENSG00000116459_11 (sequence is synthesized)
gactttattattttagtagtatgcctatagaaaatattatggactcagagtgtcataaaatcactcttaagaatccatgcaggcctgca

SEQ ID NO: 216453 - DNA, 86 bp, Artificial Sequence
  ENSG00000116459_12 (sequence is synthesized)
tcgactccatctagaaaaaaaaaaaaaaaaatccagcagacacctatcaggaacatagaaaataacaagtgttggcaaggaagtgg

SEQ ID NO: 216454 - DNA, 120 bp, Artificial Sequence
  ENSG00000116459_13 (sequence is synthesized)
tcaggaacatagaaaataacaagtgttggcaaggaagtggagaagttggaacacttgtgcactgttcgtagaaatatgaaatggtacagccattatggaaaagtgtggtgattcctcata

SEQ ID NO: 216455 - DNA, 120 bp, Artificial Sequence
  ENSG00000116459_14 (sequence is synthesized)
aaattaaaatggaaataccatgatccagcaatcccagtcgacatatatactcaaaaaaattaaaagcagggtcttgaagagatacttgtgttccatggtgatagcagccattgttcacaa

SEQ ID NO: 216456 - DNA, 120 bp, Artificial Sequence
  ENSG00000116459_15 (sequence is synthesized)
tagctaaaacatagaagcagcccaatcggccatcagtagatgaatggataagcaaaatgtagtatatccatgcaatggaatattattccacttcaaggaagaaaattctgacactggcta

SEQ ID NO: 216457 - DNA, 120 bp, Artificial Sequence
  ENSG00000116459_16 (sequence is synthesized)
cagcatgaatgaaccttgaggacgttatgcagttttacaggatgagttatggagctggatagtggtgatggtggcacattaaggatgtatttaatactgttcttaaatggtacacttaaa

SEQ ID NO: 216458 - DNA, 120 bp, Artificial Sequence
  ENSG00000116459_17 (sequence is synthesized)
aatggtaaattttatgtgtattttacaatctttttttaaattgaagaaaaatcctgtagataaattagaaaattcttcccttcataggtttatctgcatttgattctcccatacttgtac

SEQ ID NO: 216459 - DNA, 120 bp, Artificial Sequence
  ENSG00000116459_18 (sequence is synthesized)
aaggatttatttgtattcaaatggacaaattacgcaataggaaatatttgaaaatatttatcatgggtaattgctattttcattgacttcctaagattttatgtaataatcatttgagtc

SEQ ID NO: 216460 - DNA, 120 bp, Artificial Sequence
  ENSG00000116459_19 (sequence is synthesized)
aatattggtagctaatgtactaatctaatattgaaatcagattgatatctttgttacttaaagataatttgattggatcagcagttatttcaaattgattaaacaaaaaattataaaaca

SEQ ID NO: 216461 - DNA, 120 bp, Artificial Sequence
  ENSG00000116459_20 (sequence is synthesized)
agattctcctatcggggtcacagggacgctaagattgctacctggactttcgttgaccatgctgtcccgggtggtactttccgccgccgccacagcgggaccctatgtactcggaactgg

SEQ ID NO: 216462 - DNA, 120 bp, Artificial Sequence
  ENSG00000116459_21 (sequence is synthesized)
cgcacagaacagcgttccggccgggtctggatctgagctcaggaacgcggggcagggctggggacagctcggtgacgcgacccaggactcaaactggacgccggccggagactccgctcc

SEQ ID NO: 216463 - DNA, 120 bp, Artificial Sequence
  ENSG00000116459_22 (sequence is synthesized)
ggcagcaaaccccacgtggtgcacctctgagcctccgcccctctcccgagggaaccgcaactctacttctcgcgagaattgcttctatggctccatcctgctttccggctgtcgccctca

SEQ ID NO: 216464 - DNA, 120 bp, Artificial Sequence
  ENSG00000116459_23 (sequence is synthesized)
gaggcgagtggtcagtgcagttcggaagggagcgtggggtcttgagggacgggaaagaggggtacataggcttagtgatagagcctggcgggggtaaggaaagggcaaaccagatttcat

SEQ ID NO: 216465 - DNA, 120 bp, Artificial Sequence
  ENSG00000116473_0 (sequence is synthesized)
atccttcgcgtactgacggaaacactggcggcacatattgaggccgtatttcaggatcagacctgccggttcgaacacacgcgacaagagcaaagaagttaaaagagaagtgtctgtgtg

SEQ ID NO: 216466 - DNA, 120 bp, Artificial Sequence
  ENSG00000116473_1 (sequence is synthesized)
gctccttccacgtgggtgaaggactgtgccagctgagaggtggtagagcaggaagctgcctgaggacctccatttatttggtgaaaaactgggctccgcccttaagagagcaagtcgagg

SEQ ID NO: 216467 - DNA, 120 bp, Artificial Sequence
  ENSG00000116473_2 (sequence is synthesized)
gccgtgtaggagttggaggagagaaatgaaattttggaagagtcagcagaagatcgtcagtatttaaacagatcacatcatgcgtgagtacaagctagtggtccttggttcaggaggcgt

SEQ ID NO: 216468 - DNA, 120 bp, Artificial Sequence
  ENSG00000116473_3 (sequence is synthesized)
tgggaagtctgctctgacagttcagtttgttcagggaatttttgttgaaaaatatgacccaacgatagaagattcctacagaaagcaagttgaagtcgattgccaacagtgtatgctcga

SEQ ID NO: 216469 - DNA, 120 bp, Artificial Sequence
  ENSG00000116473_4 (sequence is synthesized)
aatcctggatactgcagggacagagcaatttacagcaatgagggatttgtatatgaagaacggccaaggttttgcactagtatattctattacagctcagtccacgtttaacgacttaca

SEQ ID NO: 216470 - DNA, 120 bp, Artificial Sequence
  ENSG00000116473_5 (sequence is synthesized)
ggacctgagggaacagattttacgggttaaggacacggaagatgttccaatgattttggttggcaataaatgtgacctggaagatgagcgagtagttggcaaagagcagggccagaattt

SEQ ID NO: 216471 - DNA, 120 bp, Artificial Sequence
  ENSG00000116473_6 (sequence is synthesized)
ttttagaatcttctgcaaagtcaaagatcaatgttaatgagatattttatgacctggtcagacagataaataggaaaacaccagtggaaaagaagaagcctaaaaagaaatcatgtctgc

SEQ ID NO: 216472 - DNA, 120 bp, Artificial Sequence
  ENSG00000116473_7 (sequence is synthesized)
tgctctaggcccatagtcagcagcagctctgagccagattacaggaatgaagaactgttgcctaattggaaagtgccagcattccagacttcaaaaataaaaaatctgaagaggcttctc

SEQ ID NO: 216473 - DNA, 120 bp, Artificial Sequence
  ENSG00000116473_8 (sequence is synthesized)
ctgttttatatattatgtgaagaatttagatcttatattggtttgcacaagttccctggagaaaaaaattgctctgtgtatatctcttggaaaataagacaatagtatttctcctttgca

SEQ ID NO: 216474 - DNA, 120 bp, Artificial Sequence
  ENSG00000116473_9 (sequence is synthesized)
atagcagttataacagatgtgaaaatatacttgactctaatatgattatacaaaagagcatggatgcatttcaaatgttagatattgctactataatcaaatgatttcatattgatcttt

SEQ ID NO: 216475 - DNA, 120 bp, Artificial Sequence
  ENSG00000116473_10 (sequence is synthesized)
ttatcatgatcctccctatcaagcactaaaaagttgaaccattatactttatatctgtaatgatactgattatgaaatgtcccctcaaactcattgcagcagataacttttttgagtcat

SEQ ID NO: 216476 - DNA, 120 bp, Artificial Sequence
  ENSG00000116473_11 (sequence is synthesized)
tgacttcattttatatttaaaaaattatggaatatcatctgtcattatattctaattaaaattgtgcataatgctttggaaaaatgggtcttttataggaaaaaaactgggataactgat

SEQ ID NO: 216477 - DNA, 120 bp, Artificial Sequence
  ENSG00000116473_12 (sequence is synthesized)
ttctatggctttcaaagctaaaatatataatatactaaaccaactctaatattgcttcttgtgttttactgtcagattaaattacagcttttatggatgattaaattttagtacattttc

SEQ ID NO: 216478 - DNA, 120 bp, Artificial Sequence
  ENSG00000116473_13 (sequence is synthesized)
ggcgccgccgccgctcccgaggcccctgccgccgccgctcccgctgctgtcgccgcgcagagccggagcaggagccacggccgagaggagggaggaggaggaggaggaggtggaggaggt

SEQ ID NO: 216479 - DNA, 120 bp, Artificial Sequence
  ENSG00000116473_14 (sequence is synthesized)
gctttaaactatactaagtaactggtgatttctctaggaacagacctcgcactttctgttctaaatatatttattcctactatacagtaaaatacatcagacaacatagaatagttttgt

SEQ ID NO: 216480 - DNA, 120 bp, Artificial Sequence
  ENSG00000116473_15 (sequence is synthesized)
atattctctcttgatcttaaagattgtatcttattgaatatcccactgtatattatttttatatgtaaaaagataagtttaatactgtatcagggtttaacttttactatttcagatctt

SEQ ID NO: 216481 - DNA, 120 bp, Artificial Sequence
  ENSG00000116473_16 (sequence is synthesized)
ccacagcttgtaatttcatcaagggaatccttttgcattgttaatttgttgggtgtgagtccaccaatgaagtgttatgtgaaaaatttcaaacttgctttataatagattgaagaattt

SEQ ID NO: 216482 - DNA, 120 bp, Artificial Sequence
  ENSG00000116473_17 (sequence is synthesized)
gagagaagtgagagaaagttaaaacacataaaaggaatgtgttacttttgcttaaactacttatgaaatagtatggtagtagtaatatggaagagattgctaagttaaaattgtagcttc

SEQ ID NO: 216483 - DNA, 120 bp, Artificial Sequence
  ENSG00000116473_18 (sequence is synthesized)
ctatatagtggtgctttttcttttccttcccagttattttcctctttacaaaagatagggcttaagtaagacatggacccagggtgatactacttatgtagtctctataaagagaggtag

SEQ ID NO: 216484 - DNA, 120 bp, Artificial Sequence
  ENSG00000116473_19 (sequence is synthesized)
aacaaaaagcttgttagccaattaagttctggaaaaggaaagaaacaagcttagaaaaccctgtgccttgtcctcaaatattaaggaggagacagaccagtcctagaaagtctaagtcat

SEQ ID NO: 216485 - DNA, 120 bp, Artificial Sequence
  ENSG00000116473_20 (sequence is synthesized)
tgctcagggatctctagatactgtctctttgcaactaggtatgaagaagtgttcatgccttgctgagattttccaggcatgtggtcagcctgtcacttactaaactgaaattttaaaatc

SEQ ID NO: 216486 - DNA, 120 bp, Artificial Sequence
  ENSG00000116473_21 (sequence is synthesized)
aacttagttaccttacacttcccttctacttatccaattatgcatatgtctgggattgaggggccaaaactatagcgaacttgaatgaagtattagggccagttgtcaggtcagggtggc

SEQ ID NO: 216487 - DNA, 120 bp, Artificial Sequence
  ENSG00000116473_22 (sequence is synthesized)
atcttttattttaaggtcctctaaagtcattctgctttaaaacacccctcaaacatacctttaaacttaagatcatagacagacatctcatcaaccagtaaaactttctaaatactacct

SEQ ID NO: 216488 - DNA, 120 bp, Artificial Sequence
  ENSG00000116473_23 (sequence is synthesized)
tgtcacatctattgtgtagttatttaacagattaaatagaagtcatttaataagactccaagtctcagtctgcttgactagtagcataaactcagtctattctattttagaatgtggtgg

SEQ ID NO: 216489 - DNA, 120 bp, Artificial Sequence
  ENSG00000116473_24 (sequence is synthesized)
agaaagatgatagttattagattcctttgtcacatcttatacagtccacttgggttaaaggtggaactgtcaagaaaaacgcctttctggcacacagtgatatgcagagcaggaccagct

SEQ ID NO: 216490 - DNA, 120 bp, Artificial Sequence
  ENSG00000116473_25 (sequence is synthesized)
gaagtcagatgtgcaaggaaatctgtggttgctgagcaggatgaaaagtatcctgttagaaagtgagataggtgtgtttttatattgtcctaatgtgaactccttagtcttggttccaaa

SEQ ID NO: 216491 - DNA, 120 bp, Artificial Sequence
  ENSG00000116473_26 (sequence is synthesized)
gggaagggtacctgaaaataaatgtatttttatagctgaaaaatcaagagtttctaggatattgtgtgaatgtcaaatgataaatatctagaaactgatttcatattagtatgtgtggct

SEQ ID NO: 216492 - DNA, 120 bp, Artificial Sequence
  ENSG00000116473_27 (sequence is synthesized)
atttaaagtataatgactttggtttggttatatgagtgacacagaatttaaggaggcttcatgccatagttcatagtttgctctaatggcttggtggtatccctgaacagtctactttta

SEQ ID NO: 216493 - DNA, 120 bp, Artificial Sequence
  ENSG00000116473_28 (sequence is synthesized)
ccctgaacagtctacttttagaaattaacagtaaatacacaatccagctgtaatcttaccctccaccagggggagcttcaacatcggttaatactttttttttttttgagatggagtctc

SEQ ID NO: 216494 - DNA, 120 bp, Artificial Sequence
  ENSG00000116473_29 (sequence is synthesized)
ctggcccggttaatactttcataagcattgaagtaactatttaagtcctagtacataaacactgtgtggttcacaaaaaggcatagagacattctctcaagagtttacaatctaattggg

SEQ ID NO: 216495 - DNA, 120 bp, Artificial Sequence
  ENSG00000116473_30 (sequence is synthesized)
cagggaagatactacagttcatcaaagatatgaataacaccctagttttctgaactgcagctgcatgggtaattatcttaagaacttttggcaaaatatggatgttggtgtgttactctc

SEQ ID NO: 216496 - DNA, 120 bp, Artificial Sequence
  ENSG00000116473_31 (sequence is synthesized)
ttctccctacaactctgaactaatctgtgtttggcaccttgatttgccatcataaatggccaccatttactcctcactgaaatattcttcttctttgaggttataatgtacttggaaaag

SEQ ID NO: 216497 - DNA, 120 bp, Artificial Sequence
  ENSG00000116473_32 (sequence is synthesized)
ttaatacttatagaaaataatgatctttattaccaactttattaaaacaggcttggaacatttttctccatagaagaatagtaataagacattctacatttcctggacatggccagttta

SEQ ID NO: 216498 - DNA, 120 bp, Artificial Sequence
  ENSG00000116473_33 (sequence is synthesized)
aaatattttgccccattacccttgtagatacacatgtatttgtcagtttatgtgcctcagttttgtcttaggcactgagggacagaaagagaaataaggaataccttggtattttccttt

SEQ ID NO: 216499 - DNA, 120 bp, Artificial Sequence
  ENSG00000116473_34 (sequence is synthesized)
gcaagcaatcacagcagaatgctagaaaacataaaatatactcttataaattgtatgtgtgttgaaaccaaagtgtgaagaaattgtcaggtatttggaggaggaaaataatttgtaaaa

SEQ ID NO: 216500 - DNA, 120 bp, Artificial Sequence
  ENSG00000116473_35 (sequence is synthesized)
taacctttttaagaatttggattttgtacttatttaaggtgctaaatatgtgttaaaatatcccctcttgaatcagctccaggcttaaaagggcagagtggtttggattcttgtccaggg

SEQ ID NO: 216501 - DNA, 120 bp, Artificial Sequence
  ENSG00000116473_36 (sequence is synthesized)
tctggaaagagctcatcttgccgagagggaaataaatgtgagctttgaggcggtctaactacccagcttttagtatttatgttccccaaaatgtaaaaactgtaagttattcttgaaaat

SEQ ID NO: 216502 - DNA, 120 bp, Artificial Sequence
  ENSG00000116473_37 (sequence is synthesized)
gtagtccagacatttctttgatcctggattttactgcagtttcatcatgggtttgttgaatgtgcagtccatttattgccctgtcttgcttaaatattcttgttgagaacagctggaggc

SEQ ID NO: 216503 - DNA, 120 bp, Artificial Sequence
  ENSG00000116473_38 (sequence is synthesized)
tttgactgggttcctagttctgttttctgggaaggcaacgtggattctgttttgtagacattaatgagctttaaatgggaattggggatgatgtatgttcgttgggcatgctgagaagcg

SEQ ID NO: 216504 - DNA, 120 bp, Artificial Sequence
  ENSG00000116473_39 (sequence is synthesized)
gcctcctgtggttctgggcccaaggtgtgacatacatttcccactaattgcttctctcaagaagcaagagattggctgttcctcttgaggaaaaaccttaataaaccttcccattttaaa

SEQ ID NO: 216505 - DNA, 120 bp, Artificial Sequence
  ENSG00000116473_40 (sequence is synthesized)
ggatagattcccagaagtgggataactggatcagagggtgattaccctgtgtataagagtatgtgtctcactgcaccttcaatggcattgaatcgtcagtatttaaacagatcacatcat

SEQ ID NO: 216506 - DNA, 120 bp, Artificial Sequence
  ENSG00000116473_41 (sequence is synthesized)
agagatgaggaagaacctaggctggggcctttcagcatttctaaccaaatattatagttcgaacttgccctcatcactgaaccatctgctgctgtgagatattttatgacctggtcagac

SEQ ID NO: 216507 - DNA, 120 bp, Artificial Sequence
  ENSG00000116478_0 (sequence is synthesized)
cccctcccccctgggtcggacgctgagcggagccgcgggcgggagggcggacggaccgactgacggtagggacgggaggcgagcaagatggcgcagacgcagggcacccggaggaaagtc

SEQ ID NO: 216508 - DNA, 120 bp, Artificial Sequence
  ENSG00000116478_1 (sequence is synthesized)
tgttactactacgacggggatgttggaaattactattatggacaaggccacccaatgaagcctcaccgaatccgcatgactcataatttgctgctcaactatggtctctaccgaaaaatg

SEQ ID NO: 216509 - DNA, 120 bp, Artificial Sequence
  ENSG00000116478_2 (sequence is synthesized)
gaaatctatcgccctcacaaagccaatgctgaggagatgaccaagtaccacagcgatgactacattaaattcttgcgctccatccgtccagataacatgtcggagtacagcaagcagatg

SEQ ID NO: 216510 - DNA, 120 bp, Artificial Sequence
  ENSG00000116478_3 (sequence is synthesized)
cagagattcaacgttggtgaggactgtccagtattcgatggcctgtttgagttctgtcagttgtctactggtggttctgtggcaagtgctgtgaaacttaataagcagcagacggacatc

SEQ ID NO: 216511 - DNA, 120 bp, Artificial Sequence
  ENSG00000116478_4 (sequence is synthesized)
gctgtgaattgggctgggggcctgcaccatgcaaagaagtccgaggcatctggcttctgttacgtcaatgatatcgtcttggccatcctggaactgctaaagtatcaccagagggtgctg

SEQ ID NO: 216512 - DNA, 120 bp, Artificial Sequence
  ENSG00000116478_5 (sequence is synthesized)
tacattgacattgatattcaccatggtgacggcgtggaagaggccttctacaccacggaccgggtcatgactgtgtcctttcataagtatggagagtacttcccaggaactggggaccta

SEQ ID NO: 216513 - DNA, 120 bp, Artificial Sequence
  ENSG00000116478_6 (sequence is synthesized)
cgggatatcggggctggcaaaggcaagtattatgctgttaactacccgctccgagacgggattgatgacgagtcctatgaggccattttcaagccggtcatgtccaaagtaatggagatg

SEQ ID NO: 216514 - DNA, 120 bp, Artificial Sequence
  ENSG00000116478_7 (sequence is synthesized)
ttccagcctagtgcggtggtcttacagtgtggctcagactccctatctggggatcggttaggttgcttcaatctaactatcaaaggacacgccaagtgtgtggaatttgtcaagagcttt

SEQ ID NO: 216515 - DNA, 120 bp, Artificial Sequence
  ENSG00000116478_8 (sequence is synthesized)
gtggccctggatacggagatccctaatgagcttccatacaatgactactttgaatactttggaccagatttcaagctccacatcagtccttccaatatgactaaccagaacacgaatgag

SEQ ID NO: 216516 - DNA, 120 bp, Artificial Sequence
  ENSG00000116478_9 (sequence is synthesized)
tacctggagaagatcaaacagcgactgtttgagaaccttagaatgctgccgcacgcacctggggtccaaatgcaggcgattcctgaggacgccatccctgaggagagtggcgatgaggac

SEQ ID NO: 216517 - DNA, 120 bp, Artificial Sequence
  ENSG00000116478_10 (sequence is synthesized)
gaagacgaccctgacaagcgcatctcgatctgctcctctgacaaacgaattgcctgtgaggaagagttctccgattctgaagaggagggagaggggggccgcaagaactcttccaacttc

SEQ ID NO: 216518 - DNA, 120 bp, Artificial Sequence
  ENSG00000116478_11 (sequence is synthesized)
aaaaaagccaagagagtcaaaacagaggatgaaaaagagaaagacccagaggagaagaaagaagtcaccgaagaggagaaaaccaaggaggagaagccagaagccaaaggggtcaaggag

SEQ ID NO: 216519 - DNA, 120 bp, Artificial Sequence
  ENSG00000116478_12 (sequence is synthesized)
gaggtcaagttggcctgaatggacctctccagctctggcttcctgctgagtccctcacgtttcttccccaacccctcagattttatattttctatttctctgtgtatttatataaaaatt

SEQ ID NO: 216520 - DNA, 120 bp, Artificial Sequence
  ENSG00000116478_13 (sequence is synthesized)
tattaaatataaatatccccagggacagaaaccaaggccccgagctcagggcagctgtgctgggtgagctcttccaggagccaccttgccacccattcttcccgttcttaactttgaacc

SEQ ID NO: 216521 - DNA, 120 bp, Artificial Sequence
  ENSG00000116478_14 (sequence is synthesized)
ataaagggtgccaggtctgggtgaaagggatacttttatgcaaccataagacaaactcctgaaatgccaagtgcctgcttagtagctttggaaaggtgcccttattgaacattctagaag

SEQ ID NO: 216522 - DNA, 120 bp, Artificial Sequence
  ENSG00000116478_15 (sequence is synthesized)
gggtggctgggtcttcaaggatctcctgtttttttcaggctcctaaagtaacatcagccatttttagattggttctgttttcgtaccttcccactggcctcaagtgagccaagaaacact

SEQ ID NO: 216523 - DNA, 120 bp, Artificial Sequence
  ENSG00000116478_16 (sequence is synthesized)
gcctgccctctgtctgtcttctcctaattctgcaggtggaggttgctagtctagtttcctttttgagatactattttcatttttgtgagcctctttgtaataaaatggtacatttctata

SEQ ID NO: 216524 - DNA, 120 bp, Artificial Sequence
  ENSG00000116478_17 (sequence is synthesized)
gcctggccttgtctcttggaagagcaccttaggccaggttcccatttccctcttcccctgggcttgcctccctagtttgcttttcctaccgatgtgctggctaggatgtgctcggtgagt

SEQ ID NO: 216525 - DNA, 120 bp, Artificial Sequence
  ENSG00000116478_18 (sequence is synthesized)
gtctctggccatcatctccttgatggggtcttggtttgatctgagccacggcatgatcaggggcagatgctgctcagatcctgcctccagagtgtccctgtgtggctggagttgaccctg

SEQ ID NO: 216526 - DNA, 120 bp, Artificial Sequence
  ENSG00000116478_19 (sequence is synthesized)
gctgtagagtaggaagatcggacttggtcggcttggtcaggcctctggagacacccggccgctcttccaccttccttcagccagtttccacgtctctggtgcttagagatacctgaggga

SEQ ID NO: 216527 - DNA, 120 bp, Artificial Sequence
  ENSG00000116478_20 (sequence is synthesized)
gggctgctgggagattattgtgttcttttggtagtggtatgtctccttggttttttgtgttcctcattgccttacattgatgtctgcacattagaagaagtagggacttactccagtctt

SEQ ID NO: 216528 - DNA, 120 bp, Artificial Sequence
  ENSG00000116478_21 (sequence is synthesized)
tgcagactggctttgtctgggaaagccctttgccagtcagcccatccagagattctggaaaggctgtgtggcatgttccatgggtaggctggcctagtgcctgtgtttttgagggatgat

SEQ ID NO: 216529 - DNA, 120 bp, Artificial Sequence
  ENSG00000116478_22 (sequence is synthesized)
cagaggaatgagagacaaactactgcctgggctggcaggagggtagccagggatgatttcacagaggtgctgatgtttaagctggactttggaaaatgaggaggtgcccatgtgaagaag

SEQ ID NO: 216530 - DNA, 120 bp, Artificial Sequence
  ENSG00000116478_23 (sequence is synthesized)
gaggtgatggcagtaagggtggcatttagtagaaggaatggcactagcagaagtgcagaggtgccagtgtggcagcatgtaggccagtgtggtgtatgggaggagtgctgaaggaggcgg

SEQ ID NO: 216531 - DNA, 120 bp, Artificial Sequence
  ENSG00000116478_24 (sequence is synthesized)
tgggaagtgtatgctgggctcagtatttcaaagggagccttgaatgccatgccaaggagttaaatcttcacttataaacagtaagaaactgcttaacctaataaggtcaggtagtcattc

SEQ ID NO: 216532 - DNA, 120 bp, Artificial Sequence
  ENSG00000116478_25 (sequence is synthesized)
agcaaacactgactgcccactatgtgcctagtatttaataagggctacagaagtgggagttgtggtctcggtctcagtaacgttagactctgcttgtgagaataagataaactaaaagtg

SEQ ID NO: 216533 - DNA, 120 bp, Artificial Sequence
  ENSG00000116478_26 (sequence is synthesized)
cttgctcataatgtaaggcttcaagtctgtaagaccgaatgagtagagtagatgcagctaaaggtcaggaaggcttcctggaggaagtggcactagagcttgggcaacagaagagactta

SEQ ID NO: 216534 - DNA, 120 bp, Artificial Sequence
  ENSG00000116478_27 (sequence is synthesized)
gggagttgagagggaggccattctaggttcagtgttactagagtgttagaagggtcttagagaactttttaaattggaaaattgaaatcccaagtgggcaagcaagggctccagcctagc

SEQ ID NO: 216535 - DNA, 120 bp, Artificial Sequence
  ENSG00000116478_28 (sequence is synthesized)
actcccttttctctcccacatagcatgagggagagtggaaaggtaggagtgggtgggaaagtgttgcacccagcctttccactccaaacctcgtattgctttcttgaggttggtggtgac

SEQ ID NO: 216536 - DNA, 120 bp, Artificial Sequence
  ENSG00000116478_29 (sequence is synthesized)
attcctggctgcacactccctccaagctccccacctgtagagaaatctgttttcgagttccagtgcctgtaggaacaggttagggagcccgagttcctccctcttctggttccctttccc

SEQ ID NO: 216537 - DNA, 120 bp, Artificial Sequence
  ENSG00000116478_30 (sequence is synthesized)
tctcttggaggacacgcagggaagcactgggcatagatgctgagctaaatcagcacccgcctgccctctcacccatgcttcccactccctcccagtctgctcctctgacaaacgaattgc

SEQ ID NO: 216538 - DNA, 120 bp, Artificial Sequence
  ENSG00000116489_0 (sequence is synthesized)
agaacagcccaagatggccgacttcgatgatcgtgtgtcggatgaggagaaggtacgcatagctgctaaattcatcactcatgcacccccaggggaatttaatgaagtattcaatgacgt

SEQ ID NO: 216539 - DNA, 120 bp, Artificial Sequence
  ENSG00000116489_1 (sequence is synthesized)
tcggctactacttaataatgacaatctcctcagggaaggggcagcacatgcatttgcccagtataacatggatcagttcacgcctgtgaagatagaaggatatgaagatcaggtcttaat

SEQ ID NO: 216540 - DNA, 120 bp, Artificial Sequence
  ENSG00000116489_2 (sequence is synthesized)
tacagagcacggtgacctgggtaatagcagatttttagatccaagaaacaaaatttcctttaaatttgaccacttacggaaagaagcaagtgacccccagccagaagaagcagatggagg

SEQ ID NO: 216541 - DNA, 120 bp, Artificial Sequence
  ENSG00000116489_3 (sequence is synthesized)
tctgaagtcttggagagaatcctgtgacagtgctttaagagcctatgtgaaagaccattattccaacggcttctgtactgtttatgctaaaactatcgatgggcaacagactattattgc

SEQ ID NO: 216542 - DNA, 120 bp, Artificial Sequence
  ENSG00000116489_4 (sequence is synthesized)
atgtattgaaagccaccagtttcagcctaaaaacttctggaatggtcgttggagatcagagtggaagttcaccatcacaccacctacagcccaggtggttggcgtgcttaagattcaggt

SEQ ID NO: 216543 - DNA, 120 bp, Artificial Sequence
  ENSG00000116489_5 (sequence is synthesized)
tcactattatgaagatggcaatgttcagttggttagtcataaagatgtacaggattcactaactgtttcgaatgaagcccaaactgccaaggagtttattaaaatcatagagaatgcaga

SEQ ID NO: 216544 - DNA, 120 bp, Artificial Sequence
  ENSG00000116489_6 (sequence is synthesized)
aaatgagtatcagacagcaattagtgaaaactatcaaacaatgtcagataccacattcaaggccttgcgccggcagcttccagttacccgcaccaaaatcgactggaacaagatactcag

SEQ ID NO: 216545 - DNA, 120 bp, Artificial Sequence
  ENSG00000116489_7 (sequence is synthesized)
ctacaagattggcaaagaaatgcagaatgcttaaaggctgaatgtaggattcttcagtatgtggaaagacaaggattcaacgtgtggtcatatgataaataagtgatttataaacaagag

SEQ ID NO: 216546 - DNA, 120 bp, Artificial Sequence
  ENSG00000116489_8 (sequence is synthesized)
tgatattttgctagggctttcaaagttaaccggttttctagcctcatggaatactgttgaacctatagcgttgtcttgattcttttgtgttctctgccttgtaattttctgttactgcta

SEQ ID NO: 216547 - DNA, 120 bp, Artificial Sequence
  ENSG00000116489_9 (sequence is synthesized)
tgatctatcctaatgacattttactgtttaaaaaagtttcctagccatgaagccctgctactgatttagacaaggtattatggtcattactttgtacccctatccttccaagcacttctg

SEQ ID NO: 216548 - DNA, 120 bp, Artificial Sequence
  ENSG00000116489_10 (sequence is synthesized)
gtacttcagtcgtttttactgatccaccaacacctaaagaggctatgctacagtctctagctaaatggaagacacattcatccttctccctctgactgctttgatcatcatttattgcat

SEQ ID NO: 216549 - DNA, 120 bp, Artificial Sequence
  ENSG00000116489_11 (sequence is synthesized)
ctcataactaattttctaaagtttggattgggacttttcaggtcctttttggagggcaaaggaagtgccagcttctctggggaacttgtttttaaatccaaagacttgaaccacattccc

SEQ ID NO: 216550 - DNA, 120 bp, Artificial Sequence
  ENSG00000116489_12 (sequence is synthesized)
tgcacatgaacatgtttgcttttatcccttctctcattgtctccttcccatcttagtaccattgtagttataaacatctgcattttttagaagcattttacccatttatttttttaaaca

SEQ ID NO: 216551 - DNA, 120 bp, Artificial Sequence
  ENSG00000116489_13 (sequence is synthesized)
ttcaagaactgctgacgtactgtggatgtagagtataaaacttgaaaaatgcagatgttgaaggaataataggtatcttgtgctttaatactttatggcaggattgtactataagcaaat

SEQ ID NO: 216552 - DNA, 120 bp, Artificial Sequence
  ENSG00000116489_14 (sequence is synthesized)
gaattaaacagctatgtaaatcataaagaaaaactaaaaatgaaccaaagtgaaaggataacttccaggcagtatctttctattgtaacctgttatttaaggaaatactagtgatttctt

SEQ ID NO: 216553 - DNA, 120 bp, Artificial Sequence
  ENSG00000116489_15 (sequence is synthesized)
ctaaataggatgtaaaacttctttcaaattactcttcctcagtcctgcctgccaagaactcaagtgtaactgtgataaaataacctttcccaggtatattggcaggtatgtgtgtaatct

SEQ ID NO: 216554 - DNA, 120 bp, Artificial Sequence
  ENSG00000116489_16 (sequence is synthesized)
cagaatacacaggtgacatagatatgatatgacaactggtaatggtggattcatttacattgtttacacttctatgaccaggccttaagggaaggtcagttttttaaaaaaccaagtagt

SEQ ID NO: 216555 - DNA, 120 bp, Artificial Sequence
  ENSG00000116489_17 (sequence is synthesized)
gtcttcctacctatctccagatacatgtcaaaaaaagaaaggtgtttgtgcttccgttttgtttctgctcagtaatatagtcaagcaagtttgttccaggtgacccattgagctgtgtat

SEQ ID NO: 216556 - DNA, 120 bp, Artificial Sequence
  ENSG00000116489_18 (sequence is synthesized)
gcatttttgtttatttcaataaaatatatttgtattatttgtccttcatactatccatccataccacactatcttctgtatcaggtagtctaatagaaatatacctgttttgttctaaaa

SEQ ID NO: 216557 - DNA, 120 bp, Artificial Sequence
  ENSG00000116489_19 (sequence is synthesized)
agaacagcccaagatggccgacttcgatgatcgtgtgtcggatgaggagaagcatgagttgagatgatcacatggttttggtcttttaatttgtacgcatagctgctaaattcatcactc

SEQ ID NO: 216558 - DNA, 120 bp, Artificial Sequence
  ENSG00000116489_20 (sequence is synthesized)
ataaactatgttgacagtaaactagcaccctgaaaacaaagtttaaaatacttcaaagtaaagcagttggttttagcaattttcgttgttttttttaattggagaaaacatgttccccca

SEQ ID NO: 216559 - DNA, 120 bp, Artificial Sequence
  ENSG00000116489_21 (sequence is synthesized)
aagcttactataatatatgaactagtttttatttctgcccacatttgcccgattaaagcagagtttaatgttagctgttaggttttcctttatagttgttctagttcgtgttgaattttt

SEQ ID NO: 216560 - DNA, 120 bp, Artificial Sequence
  ENSG00000116489_22 (sequence is synthesized)
ttaaacagctagctatacataggaatgatctgccagtgaggaatgataatgtttaagaatagcaaatattaataaagtgccttaatagttaaaattaaccataagataaaagcatgatta

SEQ ID NO: 216561 - DNA, 120 bp, Artificial Sequence
  ENSG00000116489_23 (sequence is synthesized)
gcttacctagtcattgactccttaccactctgaagctaattaatctttctaaaatattttcattgtgtccttgccttcaaaaatattacggtggtgcctctttttttttttgatatcttc

SEQ ID NO: 216562 - DNA, 120 bp, Artificial Sequence
  ENSG00000116489_24 (sequence is synthesized)
cattgtgaattaccactgcttatattaattatttgttcagagttggtaaaatggctcatcaacttaaagatagcttaaagcatggatttgtgtcctaaataacaggtttctctatgaact

SEQ ID NO: 216563 - DNA, 120 bp, Artificial Sequence
  ENSG00000116489_25 (sequence is synthesized)
gaaaatctgagttttacttggcttagggttactgctacttgagttaattgtgtaactcagcagcctattcatctgattttggaagagcctcccatgagcagaataggcatggttttccat

SEQ ID NO: 216564 - DNA, 120 bp, Artificial Sequence
  ENSG00000116489_26 (sequence is synthesized)
ttcaagggaaaaaaggaaaaatgaaagacaaaataacttagaaaaggcttatggtcaggccacttagatccagacttacatttgagtagacagagctttgggtttgccaaactggaaatg

SEQ ID NO: 216565 - DNA, 120 bp, Artificial Sequence
  ENSG00000116489_27 (sequence is synthesized)
acagtttctctctctctctttttttttttctttttttgcacccctctttcccaacttctgtacctcagtggcaaatcacctctttcttgtgcttattgctaattctgcaatgttgtgtgt

SEQ ID NO: 216566 - DNA, 120 bp, Artificial Sequence
  ENSG00000116497_0 (sequence is synthesized)
gcagtcgttcgcccaggctttggcccggcttccggaggaaggtgggagtcaatcattttgacaagtctcctgaaaggaacagctagcaggaactgaaacctttttccatttggtctcgtg

SEQ ID NO: 216567 - DNA, 120 bp, Artificial Sequence
  ENSG00000116497_1 (sequence is synthesized)
gcaaaggcagagattgctccagcagctccacacaaaatgatgtgctcacgggtgccctctgaacagtcttctggtacctctctcttgcctaaagacggtgccccattttcttgggattcc

SEQ ID NO: 216568 - DNA, 120 bp, Artificial Sequence
  ENSG00000116497_2 (sequence is synthesized)
ttggatgaggatggattggatgactccttgctggagctgtcagagggagaagaagatgatggtgatgtaaattacacagaggaagagattgatgcactgttgaaggaagatgacccatca

SEQ ID NO: 216569 - DNA, 120 bp, Artificial Sequence
  ENSG00000116497_3 (sequence is synthesized)
tatgagcagtcttctggggaagatgatggtgggcatgttgagaagggagaaagagggagtcaaattctacttgatactccccgagagaaaaattcatcgtacagcctgggaccagtagct

SEQ ID NO: 216570 - DNA, 120 bp, Artificial Sequence
  ENSG00000116497_4 (sequence is synthesized)
gagactcctgacctcttcaaactacctcagctaagtacatcaagtggtcatggaccagctcatactaaaccattaaacagacgctctgtactagaaaagaatcttataaaagtaactgtt

SEQ ID NO: 216571 - DNA, 120 bp, Artificial Sequence
  ENSG00000116497_5 (sequence is synthesized)
gcaccatttaatccaacagtttgtgatgctctgcttgataaggacgagactgattcgtccaaagatactgaaaaactctcttcccttggagaagagatgagagaagatggtcttagccca

SEQ ID NO: 216572 - DNA, 120 bp, Artificial Sequence
  ENSG00000116497_6 (sequence is synthesized)
aatgaaagcaaactttgtactgaatctgaagggatcagccccaataactctgcctggaatgggccccagctctcttcttcaaacaataactttcaacagactgtctctgataaaaatatg

SEQ ID NO: 216573 - DNA, 120 bp, Artificial Sequence
  ENSG00000116497_7 (sequence is synthesized)
cctgacagtgagaaccctacgtctgtattctctcggatctcagaccattcagagactcctaatatggagttatcctgcagaaatggtggttcacacaagtcaagttgtgaaatgagatct

SEQ ID NO: 216574 - DNA, 120 bp, Artificial Sequence
  ENSG00000116497_8 (sequence is synthesized)
ctggttgtttccacctcatcaaacaaacaggatgttcttaacaaggattctgggaagatgaaaggccatgagagaagactaggcaaagtcattcctgttctacaaactaagaccaggact

SEQ ID NO: 216575 - DNA, 120 bp, Artificial Sequence
  ENSG00000116497_9 (sequence is synthesized)
aatgttccgacgttttcacagtcaaatctagaacagcagaagcagctttatctcaggagtgtcattgctcatatagaagacccagaggacactaaccaaggtatctcgggggagctttgt

SEQ ID NO: 216576 - DNA, 120 bp, Artificial Sequence
  ENSG00000116497_10 (sequence is synthesized)
gccttgatggatcaagttcatcatatgcagcactcaaaatggcagcatccttcggacctcaccacgcgaaactacgcccgccgacagaaacatctgcaaagatacagtctgactcagtgg

SEQ ID NO: 216577 - DNA, 120 bp, Artificial Sequence
  ENSG00000116497_11 (sequence is synthesized)
gttgacaggaacatgcgaagccaccatcggttccagcgtctcccagacttctcgtacagttaatttgtgtcatcccatcagcaatgaaggtccctatccagggtcctgcttggagcagca

SEQ ID NO: 216578 - DNA, 120 bp, Artificial Sequence
  ENSG00000116497_12 (sequence is synthesized)
tttcatgttcttttgctgttttgtgctttgccgattttggattttatttttcacaaaatttttatttaaaaaactcgtcaccttttggaaatgcccattgccgacttgaatttttttgta

SEQ ID NO: 216579 - DNA, 120 bp, Artificial Sequence
  ENSG00000116497_13 (sequence is synthesized)
tgaagtccctcctgattttgtgtgtgtgtgtctgtgtttaagcaagcgttcggttggtatagtttttttttgtttttttaatttaaattgaaggtagctgcctcctgaaagccagcatta

SEQ ID NO: 216580 - DNA, 120 bp, Artificial Sequence
  ENSG00000116497_14 (sequence is synthesized)
agccagaacacccaggttcaagcaaaagacccacctctctgcagaggcaaagtctactttctggtacctcaaagaaatcattgttcaatcttccataaggaagagattctttaccaggct

SEQ ID NO: 216581 - DNA, 120 bp, Artificial Sequence
  ENSG00000116497_15 (sequence is synthesized)
gtgagccagtgttagataacttgtgaatggatataagttacttttaacaacccctcttacttttttatttgaatcctctgaatacctgtcagtattttaaagttggcaatccaggacatt

SEQ ID NO: 216582 - DNA, 120 bp, Artificial Sequence
  ENSG00000116497_16 (sequence is synthesized)
ataagtaggatggagcaggagaagaatcctattgaaaggacaaattaaaatagtaaatcctctcctctcccttctgtaggtactagctgccttgatttttttttgtgggtgggggggatt

SEQ ID NO: 216583 - DNA, 120 bp, Artificial Sequence
  ENSG00000116497_17 (sequence is synthesized)
tattttgcacaatagtgtttacaaatcttatacatcttactttgacagaagacttataataccttgtggtcttgagactggttgtctcctttgcctttcttcaaggattttcctttttct

SEQ ID NO: 216584 - DNA, 120 bp, Artificial Sequence
  ENSG00000116497_18 (sequence is synthesized)
ttttaccccccagtgaccactctgctctttaggattctagtggcagtattcttgtaacctgttagacgtggatatacctcttcaggatggcctccttgctgtctttattgaagagctgcc

SEQ ID NO: 216585 - DNA, 120 bp, Artificial Sequence
  ENSG00000116497_19 (sequence is synthesized)
cacccagagtcttgactctagggcaggctagtgctattgtggtgtcagttgatatttagtttcatttgctgaaccccaaatttgagtgttagttagggagcctccattctgtgggagagt

SEQ ID NO: 216586 - DNA, 120 bp, Artificial Sequence
  ENSG00000116497_20 (sequence is synthesized)
gtggaaaggcactcttttttctccatattagttaacaagaggtgtctttaggccctggatgttaccatctcatttggtcaagcccctgatacctagtttcacatggatgctaacgtggat

SEQ ID NO: 216587 - DNA, 120 bp, Artificial Sequence
  ENSG00000116497_21 (sequence is synthesized)
gtaatatagttgtgacagcctatgcacaaaagcattacctgatcttaaggtttggtattctaaccaaagttgacagactgtgcgtctgtcttaatggatgtcttaggagttggttattct

SEQ ID NO: 216588 - DNA, 62 bp, Artificial Sequence
  ENSG00000116497_22 (sequence is synthesized)
tgcgtctgtcttaatggatgtcttaggagttggttattctcttctccactcaccacaacctc

SEQ ID NO: 216589 - DNA, 120 bp, Artificial Sequence
  ENSG00000116497_23 (sequence is synthesized)
tacaggcatgagccactgcacctggccggttattctctctttacagatagctatagacatcattttaggaagtgttgcagtctggcatttgtgctattgttcattctctgtgaaggctgt

SEQ ID NO: 216590 - DNA, 120 bp, Artificial Sequence
  ENSG00000116497_24 (sequence is synthesized)
gctattgttcattctctgtgaaggctgttcatagttgctatagcctgtgtttagttttgtgatttcatcaatcccatctttctgtgtgagtaatgcattctaaacatcctaccccacttt

SEQ ID NO: 216591 - DNA, 120 bp, Artificial Sequence
  ENSG00000116497_25 (sequence is synthesized)
agaaacggacgtggggaacgcttggtcatttaagccaacaataaatttaggtgaatgtccctaagtgtttactgtttttatccagtcaaggatttgcttttccttgaacatttgttttaa

SEQ ID NO: 216592 - DNA, 120 bp, Artificial Sequence
  ENSG00000116497_26 (sequence is synthesized)
attctggggccaaaatgcaaaggagaagttctattcaaaggcagtagttgaaatctattattttagttagcctacttggcatttactacatcggtcacttctccaggctgccctaaatta

SEQ ID NO: 216593 - DNA, 120 bp, Artificial Sequence
  ENSG00000116497_27 (sequence is synthesized)
ggttgatggagtgagacatgccaaacatccacctttgggaccatagcatagttaaaattaaatgtagttggaatagctagcattgcagctacagtagggaactgtagtctagttccctac

SEQ ID NO: 216594 - DNA, 120 bp, Artificial Sequence
  ENSG00000116497_28 (sequence is synthesized)
agaaaacccaaggagtgaagggacaggattttgcctaggcaaaaatctaagactcgtgccctcctggtacatggggttttaagactgaatgtgtaataggagcactgcctttgccaaatc

SEQ ID NO: 216595 - DNA, 120 bp, Artificial Sequence
  ENSG00000116497_29 (sequence is synthesized)
aaatgagtgacaggttaactagaaaatgtgacaatcacatttcctcttagctcaaataattctgtttttccaaagctttagcagcttaattaaatctgttggactgggggaggagagagc

SEQ ID NO: 216596 - DNA, 120 bp, Artificial Sequence
  ENSG00000116497_30 (sequence is synthesized)
tgttctctagtggttaacatggtattctttaagaagaaaaaacaaagccaaagaaaactcattatctggcatgttcgccttaaagatggtactgggtagaatctggagttttcatctctt

SEQ ID NO: 216597 - DNA, 120 bp, Artificial Sequence
  ENSG00000116497_31 (sequence is synthesized)
ttcaaagctgcatatctcttatatttggtattggcctctaagtctaatattgcagttggaattcttgctgtattattttttaagcaagtgttaggtgcatttaactgctttcttcatcca

SEQ ID NO: 216598 - DNA, 120 bp, Artificial Sequence
  ENSG00000116497_32 (sequence is synthesized)
tgacgacattcccaccatgggggtcttgacaaagcagagtaaaaatatgctgtttacattgtttacttacaagtaaggagcctgaaataacctgtagtttcgaatgcaggccctgattta

SEQ ID NO: 216599 - DNA, 120 bp, Artificial Sequence
  ENSG00000116497_33 (sequence is synthesized)
ctggcgttgtcagtttcaattatgaaactgaagtttggtgcctcctctttatcatgttttttcccttgtagcagttgtgtttaatgtcattaaaaagaaataaaagttctttgtcagtga

SEQ ID NO: 216600 - DNA, 120 bp, Artificial Sequence
  ENSG00000116497_34 (sequence is synthesized)
gatgagacgggaaaaggtggagccagtgggcacggtgggcggtgcggagggcggggctgaggcgcctgagcggggcacaaccctcctagaggcgggacggtttcctgccaatcactgctg

SEQ ID NO: 216601 - DNA, 120 bp, Artificial Sequence
  ENSG00000116497_35 (sequence is synthesized)
tcaagtgatcagccctcctcagcctcccaaagtgctgagattacgggtgtgagcccccgcgcctgactgagaattaacattttaatattgagtgttttgattaaagtcttctctaatttc

SEQ ID NO: 216602 - DNA, 120 bp, Artificial Sequence
  ENSG00000116497_36 (sequence is synthesized)
cttcataaatgttttgtagcttttgtacagtcttgcacatcttttatccaatttatcccggagtgtttcatattgtgatgcttttgtaaaatgatttagtttttaaaatttcagtatctg

SEQ ID NO: 216603 - DNA, 120 bp, Artificial Sequence
  ENSG00000116497_37 (sequence is synthesized)
ttcattgctattatatagaaatgtaattgatttttgtgtcttggtcttacattctataaccttcctaaattcttttattagttttagtaactttttaatagatttcatcaggttttccct

SEQ ID NO: 216604 - DNA, 120 bp, Artificial Sequence
  ENSG00000116497_38 (sequence is synthesized)
cttagacattgcctagcaccccttttccatccctttcccattttgtaaatgaggaaacaagtctaaatggtcaagtggcatacccaagttattggagctggctagtgatacaaccaggac

SEQ ID NO: 216605 - DNA, 120 bp, Artificial Sequence
  ENSG00000116497_39 (sequence is synthesized)
tacaccccaggtctttggactcccatgccagtattcatcctactaaagtagatgatagtcttaagaaagtacaaattgttgggaggaacaaaactagtttgcttagttgcataatttttt

SEQ ID NO: 216606 - DNA, 120 bp, Artificial Sequence
  ENSG00000116497_40 (sequence is synthesized)
attaaaattaatacatcgagcaccttaaagcataatacagttgactttgtaattagcagagttgaaagtgatgagaagatcctctaattttctttttgcctgcaggaaggtgggagtcaa

SEQ ID NO: 216607 - DNA, 120 bp, Artificial Sequence
  ENSG00000116497_41 (sequence is synthesized)
ctctctttccctttaaagctcccagtatagcatcttccagtacttacttgaaccgtaatgggtcatttttaacgtctgatccccttcagacaagctctggcaggcccttgacgtatcccc

SEQ ID NO: 216608 - DNA, 120 bp, Artificial Sequence
  ENSG00000116497_42 (sequence is synthesized)
agcgactaagcaccacgtctggcacttaataggggggtggaatgggagtcctggattcaaagtttggctccaacacaagacaactggacgcaagaggaaggtgggagtcaatcattttga

SEQ ID NO: 216609 - DNA, 120 bp, Artificial Sequence
  ENSG00000116497_43 (sequence is synthesized)
gtctcctgtataaacttcattgaggtagtgtcttgttcactgccatattcctagggacaagtaaagttccctgtatattgtaggagctaagtgttgaatgaatgaatggtggctgctatt

SEQ ID NO: 216610 - DNA, 120 bp, Artificial Sequence
  ENSG00000116497_44 (sequence is synthesized)
attgcttcaccttcaccctccaagagtaatctccccattctggtttatagtttctgtgctcactgcttgtgataattgtaagtatatattgttgagaacagtgcctgttttctctttccc

SEQ ID NO: 216611 - DNA, 88 bp, Artificial Sequence
  ENSG00000116497_45 (sequence is synthesized)
aggaaaatcagtcaagatttctactagatcatcgcagttttgttgacctagaggtatctcgggggagctttgtgccttgatggatcaa

SEQ ID NO: 216612 - DNA, 120 bp, Artificial Sequence
  ENSG00000116497_46 (sequence is synthesized)
tgctggtttgccctccccctggtgttggcccggctgactcggggtaggggaggtcggggagggggcgataaaatggcgcagggggcggagtgaggcgcagtcgttcgcccaggctttggc

SEQ ID NO: 216613 - DNA, 120 bp, Artificial Sequence
  ENSG00000116497_47 (sequence is synthesized)
gggagggacgagggggtcggcgttacccggcttggagggggatgggggcgcctgttgcttctccagggggttgcgcacgccgtccgccccttggagggattgggaggcccacgccctgct

SEQ ID NO: 216614 - DNA, 120 bp, Artificial Sequence
  ENSG00000116497_48 (sequence is synthesized)
gcaaaggcagagattgctccagcagctccacacagtatggaagacagttatttaccttcttgtgttctcgaattttgttttatttcaaaaaaatgatgtgctcacgggtgccctctgaac

SEQ ID NO: 216615 - DNA, 90 bp, Artificial Sequence
  ENSG00000116497_49 (sequence is synthesized)
gttgtagtgagcgaacgagcaaaattccatctcaaaagaaaaaaatgttcattttctaaatatataatttcttctacagttattaactag

SEQ ID NO: 216616 - DNA, 120 bp, Artificial Sequence
  ENSG00000116497_50 (sequence is synthesized)
atttcttctacagttattaactagcattcttttgtaaagattttctattactttactattactataacctcatggatttttttaaagaatcaatatgttgtaatcaattatagctactgt

SEQ ID NO: 216617 - DNA, 120 bp, Artificial Sequence
  ENSG00000116497_51 (sequence is synthesized)
tcccattaatctttttttttaattgtggtaaaaaaaatacatctaacataaaattaccatcttaaccatttttaagtgcacaattcagtaatgttacatatattcacattgttgtgaaac

SEQ ID NO: 216618 - DNA, 120 bp, Artificial Sequence
  ENSG00000116497_52 (sequence is synthesized)
atatctccagaacctcttcatcttgcaaatctaaaactctatacctacacaacagttccccctctctcccttcagtctctggtaaccaccattctactttctttttttttaaatatgact

SEQ ID NO: 216619 - DNA, 120 bp, Artificial Sequence
  ENSG00000116497_53 (sequence is synthesized)
actttagataccttttataagtggaatcatacaatatttatctttttgtgactggcttatttcgtttagtataatgtcttcaagatttacccattgtggcatgtgacaggatttccttcc

SEQ ID NO: 216620 - DNA, 78 bp, Artificial Sequence
  ENSG00000116497_54 (sequence is synthesized)
caccactatatacacaccattttgtttaatccattcatctgtcagtagacatttgggttgcttccacttcttggctat

SEQ ID NO: 216621 - DNA, 120 bp, Artificial Sequence
  ENSG00000116497_55 (sequence is synthesized)
ctgtcagtagacatttgggttgcttccacttcttggctattgtgaattgtgccactatgaacatgggtctacagatatctctttaagaccctatttttaattcttctggatatatatgca

SEQ ID NO: 216622 - DNA, 120 bp, Artificial Sequence
  ENSG00000116497_56 (sequence is synthesized)
gaagtgggattgctggaccatatggtaggtctgtttttaattttttgaggaacttcatactgtttttcatagcagttgcaccattttgcagtcctaccaacagtgcacaagagttctaat

SEQ ID NO: 216623 - DNA, 89 bp, Artificial Sequence
  ENSG00000116497_57 (sequence is synthesized)
ccattttgcagtcctaccaacagtgcacaagagttctaatttttccccatccttgccagcaaggctggagtctcgccctgtcatccagg

SEQ ID NO: 216624 - DNA, 65 bp, Artificial Sequence
  ENSG00000116497_58 (sequence is synthesized)
cagtggtacagtcttggctcactgcaacccctacctcccatccaccacgtctggctaatttttgt

SEQ ID NO: 216625 - DNA, 120 bp, Artificial Sequence
  ENSG00000116497_59 (sequence is synthesized)
ttatagtagctatcctaaagggtgttaaatcagtattcattgtttttgtgtcccaactaagtattgttcactgaaaagccaagtagtatattatggcttcattttctttcttgaattgtt

SEQ ID NO: 216626 - DNA, 120 bp, Artificial Sequence
  ENSG00000116497_60 (sequence is synthesized)
tatttttgtagagttgttaattgcttcagtttctttcattaaattttttttttgggagagctttttcctagagccttctgttctactgctccaatttgcactgcttgttctttagccctg

SEQ ID NO: 216627 - DNA, 120 bp, Artificial Sequence
  ENSG00000116497_61 (sequence is synthesized)
caacagagctgtcatcccaggattttcctctgctgccctcctgggttgaatcctgtttcttggatcctatatcttcctctttcttatttttggttttagtagaggacatcctctgagaat

SEQ ID NO: 216628 - DNA, 120 bp, Artificial Sequence
  ENSG00000116497_62 (sequence is synthesized)
atctaagaaagggtgcatagatgttttctttgtgtttacatatctgaacatgtctttattctatcctcatacttgattgatagtttgatataaaattctaaatttaaaatcaatttttgc

SEQ ID NO: 216629 - DNA, 120 bp, Artificial Sequence
  ENSG00000116497_63 (sequence is synthesized)
aactttttattttgaaaaattatagacttataagaagtttcaagactcacctcagttgtttctctttcctcggggatcacaattttcagtagtctgaaagcacttgtttcataattttgc

SEQ ID NO: 216630 - DNA, 120 bp, Artificial Sequence
  ENSG00000116497_64 (sequence is synthesized)
ctagtttctagtagcttacagtgagaggttaagtcccccattcatcttagctacaagtggaaatatctgctttgatttttattgaagatcataaacagcaatggttatataaattctgat

SEQ ID NO: 216631 - DNA, 120 bp, Artificial Sequence
  ENSG00000116497_65 (sequence is synthesized)
tgtatcacttcataagtgaattacataataactcctgtttcttctactttttcccttgcctgcaaggaaaatcagtcaagatttctactagatcatcgcagttttgttgacctagaggta

SEQ ID NO: 216632 - DNA, 120 bp, Artificial Sequence
  ENSG00000116497_66 (sequence is synthesized)
ggatgggggcgcctgttgcttctccagggggttgcgcacgccgtccgccccttggagggattgggaggcccacgccctgctgcgagaagggcgcgttctagctcctgagggactccaagc

SEQ ID NO: 216633 - DNA, 120 bp, Artificial Sequence
  ENSG00000116497_67 (sequence is synthesized)
ttgctgcagcttagcgcatctgttctctgtgtccatgtgggaggagaatcctggcaccctcatctagtgaaatgttacctaaagcaaagatttgcagccctgggttgttttttccgtcct

SEQ ID NO: 216634 - DNA, 120 bp, Artificial Sequence
  ENSG00000116497_68 (sequence is synthesized)
gcagtgtttttagttacttcgaaggaatttgcaaaactgttacagataatttcagttctttttgattttttgtaaatgttgtgcctattttttatggagtgataaagcctgctgagtgcg

SEQ ID NO: 216635 - DNA, 120 bp, Artificial Sequence
  ENSG00000116514_0 (sequence is synthesized)
atgggctccgagaaggactccgagtcgccgcgctccacatcgctacatgcggccgcacccgaccctaagtgccgcagcggcggccggcgccggcgcctcaccttgcacagcgtcttctct

SEQ ID NO: 216636 - DNA, 80 bp, Artificial Sequence
  ENSG00000116514_1 (sequence is synthesized)
ctcaccttgcacagcgtcttctctgcctcggcccgcggccgccgcgcccgggccaagccgcaggccgagccgccgccccc

SEQ ID NO: 216637 - DNA, 80 bp, Artificial Sequence
  ENSG00000116514_2 (sequence is synthesized)
cggcggcggcggagcctgggttcgacgatgaggaggcggcggagggcggtggcccgggcgcggaggaggtggagtgtccg

SEQ ID NO: 216638 - DNA, 120 bp, Artificial Sequence
  ENSG00000116514_3 (sequence is synthesized)
ctgtgcctggtgcggctgccgcctgagcgggccccgcgcctcctcagctgtccgcaccgctcgtgccgggactgcctccgccactacctgcgcctggagataagcgagagcagggtgccc

SEQ ID NO: 216639 - DNA, 120 bp, Artificial Sequence
  ENSG00000116514_4 (sequence is synthesized)
atcagctgccccgagtgcagcgagcgactcaacccgcacgacatccgcttgctgctcgccgacccgccgcttatgcacaagtacgaggagttcatgctgcgccgctacctagcctcggac

SEQ ID NO: 216640 - DNA, 120 bp, Artificial Sequence
  ENSG00000116514_5 (sequence is synthesized)
cccgactgccgctggtgcccggccccggactgcggttatgctgttattgcctatggctgtgccagctgcccgaagctaacttgtgagagggaaggttgccagactgagttctgctaccac

SEQ ID NO: 216641 - DNA, 120 bp, Artificial Sequence
  ENSG00000116514_6 (sequence is synthesized)
tgcaagcagatatggcatccaaatcagacatgcgatatggcccgtcaacagagggcccagactttacgagttcggaccaaacacacttcaggtctcagttatgggcaagaatctggacca

SEQ ID NO: 216642 - DNA, 120 bp, Artificial Sequence
  ENSG00000116514_7 (sequence is synthesized)
gcagatgacatcaagccatgcccacgatgcagtgcatacattatcaagatgaatgatggaagctgtaatcacatgacctgtgcagtgtgtggctgtgaattctgttggctttgtatgaaa

SEQ ID NO: 216643 - DNA, 120 bp, Artificial Sequence
  ENSG00000116514_8 (sequence is synthesized)
gagatctcagacttgcattacctcagcccctctggctgtacattctggggcaagaagccatggagccgtaagaagaaaattctttggcagctgggcacgttgattggtgctccagtgggg

SEQ ID NO: 216644 - DNA, 120 bp, Artificial Sequence
  ENSG00000116514_9 (sequence is synthesized)
atttctctcattgctggcattgccattcctgccatggtcattggcattcctgtttatgttggaaggaagattcacagcaggtatgagggaaggaaaacctccaaacacaagaggaatttg

SEQ ID NO: 216645 - DNA, 120 bp, Artificial Sequence
  ENSG00000116514_10 (sequence is synthesized)
cagttattgctgcagttagtgttggtattggtgtccccattatgctggcatatgtttatggggttgtgcccatttctctttgtcgtggaggcggctgtggagttagcacagccaacggaa

SEQ ID NO: 216646 - DNA, 120 bp, Artificial Sequence
  ENSG00000116514_11 (sequence is synthesized)
aaggagtgaaaattgaatttgatgaagatgatggtccaatcacagtggcagatgcctggagagccctcaagaatcccagcattggggaaagcagcattgaaggcctgactagtgtattga

SEQ ID NO: 216647 - DNA, 120 bp, Artificial Sequence
  ENSG00000116514_12 (sequence is synthesized)
gcactagtggaagccctacagatggacttagtgttatgcaaggtccttacagcgaaacggccagctttgcagccctctcagggggcacgctgagtggcggcattctctccagtggcaagg

SEQ ID NO: 216648 - DNA, 120 bp, Artificial Sequence
  ENSG00000116514_13 (sequence is synthesized)
gaaaatatagcaggttagaagttcaagccgatgtccaaaaggaaattttccccaaagacacagccagtcttggtgcaattagtgacaacgcaagcactcgtgctatggccggttccataa

SEQ ID NO: 216649 - DNA, 120 bp, Artificial Sequence
  ENSG00000116514_14 (sequence is synthesized)
tcagttcctacaacccacaggacagagaatgcaacaatatggaaatccaagtggacattgaagccaaaccaagccactatcagctggtgagtggaagcagcacggaggactcgctccatg

SEQ ID NO: 216650 - DNA, 120 bp, Artificial Sequence
  ENSG00000116514_15 (sequence is synthesized)
ttcatgctcagatggcagagaatgaagaagaaggtagtggtggcggaggcagtgaagaggatcccccctgcagacaccaaagctgtgaacagaaagactgcctggccagcaaaccttggg

SEQ ID NO: 216651 - DNA, 120 bp, Artificial Sequence
  ENSG00000116514_16 (sequence is synthesized)
acatcagcctggcccagcctgaaagcatccgcagtgacctagagagttctgatgcacagtcagacgatgtgccagacatcacctcagatgagtgtggctccccccgctcccatactgcag

SEQ ID NO: 216652 - DNA, 120 bp, Artificial Sequence
  ENSG00000116514_17 (sequence is synthesized)
cctgcccctcgacccccagagcccaaggtgcaccgagcccaagtgcccatatgaacctctctgccctagccgagggacaaactgtcttgaagccagaaggtggagaagccagagtatgaa

SEQ ID NO: 216653 - DNA, 120 bp, Artificial Sequence
  ENSG00000116514_18 (sequence is synthesized)
gtggaatgaatgctcctgttctgagaagcacacttgtaactgcatcttttggaatttttttttttttttttccaaggggtagagatttatgtattttatttcacagattctctggtcaca

SEQ ID NO: 216654 - DNA, 120 bp, Artificial Sequence
  ENSG00000116514_19 (sequence is synthesized)
ggtttttgcccagggaaattctgagaaattcacaatttcttaccagataaaacatgaaaagtttgccgttagttcccctcccctcccctccctctttttagttttaatttattggttaaa

SEQ ID NO: 216655 - DNA, 120 bp, Artificial Sequence
  ENSG00000116514_20 (sequence is synthesized)
ctgatggcagcaatccatgaggtgtgtcaaagagtgtacatatgtatgtgtgtatattgaatgctaaacatattactgaaagacacattttaataaagatttctgtcataattcaactta

SEQ ID NO: 216656 - DNA, 120 bp, Artificial Sequence
  ENSG00000116521_0 (sequence is synthesized)
actttcgtcttagcttttggacaagacgcaggcgcaacccacggctgctgcggggatccttgtggcccttccggtcggtggaaccaatccgtgcacagagaagcggggcgaactgaggcg

SEQ ID NO: 216657 - DNA, 120 bp, Artificial Sequence
  ENSG00000116521_1 (sequence is synthesized)
agtgaagtggactctgagggctaccgctaccgccactgctgcggcaggggcgtggagggcagagggccgcggaggccgcagttgcaaacatggctcagagcagagacggcggaaacccgt

SEQ ID NO: 216658 - DNA, 120 bp, Artificial Sequence
  ENSG00000116521_2 (sequence is synthesized)
tcgccgagcccagcgagcttgacaacccctttcaggacccagctgtgatccagcaccgacccagccggcagtatgccacgcttgacgtctacaacccttttgagacccgggagccaccac

SEQ ID NO: 216659 - DNA, 120 bp, Artificial Sequence
  ENSG00000116521_3 (sequence is synthesized)
cagcctatgagcctccagcccctgccccattgcctccaccctcagctccctccttgcagccctcgagaaagctcagccccacagaacctaagaactatggctcatacagcactcaggcct

SEQ ID NO: 216660 - DNA, 120 bp, Artificial Sequence
  ENSG00000116521_4 (sequence is synthesized)
cagctgcagcagccacagctgagctgctgaagaaacaggaggagctcaaccggaaggcagaggagttggaccgaagggagcgagagctgcagcatgctgccctggggggcacagctactc

SEQ ID NO: 216661 - DNA, 120 bp, Artificial Sequence
  ENSG00000116521_5 (sequence is synthesized)
gacagaacaattggccccctctaccttctttttgtccagttcagccctgctttttccaggacatctccatggagatcccccaagaatttcagaagactgtatccaccatgtactacctct

SEQ ID NO: 216662 - DNA, 120 bp, Artificial Sequence
  ENSG00000116521_6 (sequence is synthesized)
tcctccttttcactccctgctcctttgtctgctggtaccgccccatgtataaggctttccggagtgacagttcattcaatttcttcgttttcttcttcattttcttcgtccaggatgtgc

SEQ ID NO: 216663 - DNA, 120 bp, Artificial Sequence
  ENSG00000116521_7 (sequence is synthesized)
tctttgtcctccaggccattggtatcccaggttggggattcagtggctggatctctgctctggtggtgccgaagggcaacacagcagtatccgtgctcatgctgctggtcgccctgctct

SEQ ID NO: 216664 - DNA, 120 bp, Artificial Sequence
  ENSG00000116521_8 (sequence is synthesized)
tcactggcattgctgtgctaggaattgtcatgctgaaacggatccactccttataccgccgcacaggtgccagctttcagaaggcccagcaagaatttgctgctggtgtcttctccaacc

SEQ ID NO: 216665 - DNA, 120 bp, Artificial Sequence
  ENSG00000116521_9 (sequence is synthesized)
ctgcggtgcgaaccgcagctgccaatgcagccgctggggctgctgaaaatgccttccgggccccgtgacccctgactgggatgccctggccctgctacttgagggagctgacttagctcc

SEQ ID NO: 216666 - DNA, 120 bp, Artificial Sequence
  ENSG00000116521_10 (sequence is synthesized)
cgtccctaaggtctctgggacttggagagacatcactaactgatggctcctccgtagtgctcccaatcctatggccatgactgctgaacctgacaggcgtgtggggagttcactgtgacc

SEQ ID NO: 216667 - DNA, 120 bp, Artificial Sequence
  ENSG00000116521_11 (sequence is synthesized)
tagtccccccatcaggccacactgctgccacctctcacacgccccaacccagcttccctctgctgtgccacggctgttgcttcggttatttaaataaaaagaaagtggaactggaactga

SEQ ID NO: 216668 - DNA, 120 bp, Artificial Sequence
  ENSG00000116521_12 (sequence is synthesized)
cagttcagccctgctttttccaggacatctccatggagatcccccaagaatttcagaagactgtatccaccatgtactacctctggatgttggctggatctctgctctggtggtgccgaa

SEQ ID NO: 216669 - DNA, 120 bp, Artificial Sequence
  ENSG00000116521_13 (sequence is synthesized)
caggggacttttctgcatgcacaggaaggaagaggcactgtgatcttagttccctgagagaggctagtcagccatgggatgcctcatccttctagggccaccagggccaccaacccaaat

SEQ ID NO: 216670 - DNA, 120 bp, Artificial Sequence
  ENSG00000116521_14 (sequence is synthesized)
ggtttgagctctaaaagtcagtcctgggaagatctggaggctggcaaggccttaaccaatgttctgtatgggaaggctttcttgaagaaaataaaggttggggctggttggagtttaggt

SEQ ID NO: 216671 - DNA, 120 bp, Artificial Sequence
  ENSG00000116521_15 (sequence is synthesized)
taggtgtgcagtttgaaagcaaggaatgaggaggactacacctgtttgtcccactggattagaagatggtgagttgtaagaatttaaggggttttcatggtacttaaaacttaaaaaaaa

SEQ ID NO: 216672 - DNA, 120 bp, Artificial Sequence
  ENSG00000116521_16 (sequence is synthesized)
cagcctatgagcctccagcccctgccccattgcctccaccctcagctccctccttgcagccctcgagaaagctcagccccacagaacctaagaactatggctcatacagcactcaggtac

SEQ ID NO: 216673 - DNA, 120 bp, Artificial Sequence
  ENSG00000116521_17 (sequence is synthesized)
acaacccctttcaggtgacttgcgccagtcggcctcttttgggcggtcaggttgattcttcccggttctgtagggtcgggctaacttgtatccccatttgtgacatttgatcctgggaag

SEQ ID NO: 216674 - DNA, 120 bp, Artificial Sequence
  ENSG00000116521_18 (sequence is synthesized)
gttgtcccagtcctgggacaacggcgtggccccgaaggtgcagtacttggagccacaggcagtttgggaatggtccctgggaattcccctaggtggcactgggtgccagctgagacccgg

SEQ ID NO: 216675 - DNA, 120 bp, Artificial Sequence
  ENSG00000116521_19 (sequence is synthesized)
atctccatggagatcccccaagaatttcagaagactgtatccaccatgtactacctctggatgtgtgagtagtgagaagccttttggaggaagttacaggcagcacgctggctcttctcc

SEQ ID NO: 216676 - DNA, 120 bp, Artificial Sequence
  ENSG00000116525_0 (sequence is synthesized)
gggttgagaggctgcgctggaccgaagcggtggctgctaagctcgcgggggtaaggggtcgcgctgggccagggtttggggccgggatccggcagctgagcgggccggcacccctcctct

SEQ ID NO: 216677 - DNA, 120 bp, Artificial Sequence
  ENSG00000116525_1 (sequence is synthesized)
tctctgccggtcacagccaatgtacggctcggcctggctgccccctcccccaggattccccatccccagcttctcgccctccccgcaccgcccccaccccgggatttcgacccccttaag

SEQ ID NO: 216678 - DNA, 120 bp, Artificial Sequence
  ENSG00000116525_2 (sequence is synthesized)
ggctccaccccgctccgggatccccttctcccagctcctatcccttaggactgccccgccccctagaacctccccgtcaggatctccgtccctcagccgctcacagcctcctcccagcgc

SEQ ID NO: 216679 - DNA, 120 bp, Artificial Sequence
  ENSG00000116525_3 (sequence is synthesized)
ccatcgccttgagctgcccactacctctagactgccctcccgggctggcgtcccacggagtctcagccgcgcaccccttcctcgcgttaccctccttccggacagcaccccctcccttct

SEQ ID NO: 216680 - DNA, 120 bp, Artificial Sequence
  ENSG00000116525_4 (sequence is synthesized)
ccggtagctcctacccctgcctgtgcgggcctcgtccccgcgcccagccctcggtgctgcctccgacagcgccgcgctctctcagccgcccccctgcccctcgggcccccctctctgctg

SEQ ID NO: 216681 - DNA, 120 bp, Artificial Sequence
  ENSG00000116525_5 (sequence is synthesized)
cccctggcgccatggcgtgcagcctcaaggacgagctgctgtgctccatctgcctgagcatctaccaggacccggtgagcctgggctgcgagcattacttctgccgccgctgcatcacgg

SEQ ID NO: 216682 - DNA, 120 bp, Artificial Sequence
  ENSG00000116525_6 (sequence is synthesized)
agcactgggtgcggcaggaggcgcagggcgcccgcgactgccccgagtgccggcgcacgttcgccgagcccgcgctggcgcccagcctcaagctggccaacatcgtggagcgctacagct

SEQ ID NO: 216683 - DNA, 120 bp, Artificial Sequence
  ENSG00000116525_7 (sequence is synthesized)
ccttcccgctggacgccatcctcaacgcgcgccgcgccgcgcgaccctgccaggcgcacgacaaggtcaagctcttctgcctcacggaccgcgcgcttctctgcttcttctgcgacgagc

SEQ ID NO: 216684 - DNA, 120 bp, Artificial Sequence
  ENSG00000116525_8 (sequence is synthesized)
ctgcactgcacgagcagcatcaggtcaccggcatcgacgacgccttcgacgagctgcagagggagctgaaggaccaacttcaggcccttcaagacagcgagcgggaacacaccgaagcgc

SEQ ID NO: 216685 - DNA, 120 bp, Artificial Sequence
  ENSG00000116525_9 (sequence is synthesized)
tgcagctgctcaagcgacaactggcggagaccaagtcttccaccaagagcctgcggaccactatcggcgaggccttcgagcggctgcaccggctgctgcgtgaacgccagaaggccatgc

SEQ ID NO: 216686 - DNA, 120 bp, Artificial Sequence
  ENSG00000116525_10 (sequence is synthesized)
tagaggagctggaggcggacacggcccgcacgctgaccgacatcgagcagaaagtccagcgctacagccagcagctgcgcaaggtccaggagggagcccagatcctgcaggagcggctgg

SEQ ID NO: 216687 - DNA, 120 bp, Artificial Sequence
  ENSG00000116525_11 (sequence is synthesized)
ctgaaaccgaccggcacaccttcctggctggggtggcctcactgtccgagcggctcaagggaaaaatccatgagaccaacctcacatatgaagacttcccgacctccaagtacacaggcc

SEQ ID NO: 216688 - DNA, 120 bp, Artificial Sequence
  ENSG00000116525_12 (sequence is synthesized)
ccctgcagtacaccatctggaagtccctgttccaggacatccacccagtgccagccgccctaaccctggacccgggcacagcccaccagcgcctgatcctgtcggacgactgcaccattg

SEQ ID NO: 216689 - DNA, 120 bp, Artificial Sequence
  ENSG00000116525_13 (sequence is synthesized)
tggcttacggcaacttgcacccacagccactgcaggactcgccaaagcgcttcgatgtggaggtgtcggtgctgggttctgaagccttcagtagtggcgtccactactgggaggtggtgg

SEQ ID NO: 216690 - DNA, 120 bp, Artificial Sequence
  ENSG00000116525_14 (sequence is synthesized)
tggcggagaagacccagtgggtgatcgggctggcacacgaagccgcaagccgcaagggcagcatccagatccagcccagccgcggcttctactgcatcgtgatgcacgatggcaaccagt

SEQ ID NO: 216691 - DNA, 120 bp, Artificial Sequence
  ENSG00000116525_15 (sequence is synthesized)
ctacaatgctgatgacatgtcctggctctacaccttccgcgagaagttccctggcaagctctgctcttacttcagccctggccagagccacgccaatggcaagaacgttcagccgctgcg

SEQ ID NO: 216692 - DNA, 120 bp, Artificial Sequence
  ENSG00000116525_16 (sequence is synthesized)
gatcaacaccgtccgcatctagtccaggcagaaggagaccacaacctcctgggaccactgccacctgcaagagccctgcccaggagatagaagacctggactccagcccaccgtggccac

SEQ ID NO: 216693 - DNA, 120 bp, Artificial Sequence
  ENSG00000116525_17 (sequence is synthesized)
tggagacctcaggccagttgtttaccctccagcctccagtctgtaaaatggaggttgcattccctacttcctaaactctcttccagcatcgatgttctgtagctctgaccttgataggga

SEQ ID NO: 216694 - DNA, 120 bp, Artificial Sequence
  ENSG00000116525_18 (sequence is synthesized)
tacagctttgatccaaggatgtgacatggcttctcctcagggcaacccctgcccaaccctcatccccatcttctcaggggcaggggactaccttccagtgtctccctccagcccagccct

SEQ ID NO: 216695 - DNA, 120 bp, Artificial Sequence
  ENSG00000116525_19 (sequence is synthesized)
gacctcaggaagtgtcagagcatggccagtagttggcagcccgaaagacacacagcaccctcttatgtcccatggcctaagacttacccctgaccaagctagtgatgggccatttaccct

SEQ ID NO: 216696 - DNA, 120 bp, Artificial Sequence
  ENSG00000116525_20 (sequence is synthesized)
tgaccccagtccacagtggtcacaggtagtacctggtcctagggttgcctgagagccaacctctcctgccacccccacaccaagaactatatggttcctacttctcccactgatctgctg

SEQ ID NO: 216697 - DNA, 120 bp, Artificial Sequence
  ENSG00000116525_21 (sequence is synthesized)
gtcagtgatgatgctgtggcctgtggaaggcacctggtagttgagtccacacattatagtcatgtgccaccaccttcctgcccacaggccgagggacagggtgagggtatacccaaagct

SEQ ID NO: 216698 - DNA, 120 bp, Artificial Sequence
  ENSG00000116525_22 (sequence is synthesized)
gatgcagagcccattagcctaaaagcaactgcaggacaagcctccctggatgatcgaggtccccagtagctctgaacaagagtccagccaaccctcttcagccaggcctctgtgacctgc

SEQ ID NO: 216699 - DNA, 120 bp, Artificial Sequence
  ENSG00000116525_23 (sequence is synthesized)
tagggtgcaggaggcttccagaagcagttgttgtaattaggacccaagcactgggaggggctgttggctggaccccttgtcagacttggcatctatctcagttaggatcctgctgcagaa

SEQ ID NO: 216700 - DNA, 120 bp, Artificial Sequence
  ENSG00000116525_24 (sequence is synthesized)
aacaagagccacttgtagctggtttaattagacaaggatttactacctggcccctggtggcttgcaaaattgttggaagagctggagaagcagactctgctgaatttccaggaactccca

SEQ ID NO: 216701 - DNA, 120 bp, Artificial Sequence
  ENSG00000116525_25 (sequence is synthesized)
gcgccagattcatcatgtctgttgtgaccaggaaagctgcccccatctgcaggaagccactatgccagaaagctgctgactgcagaactaggctccctctgccacggtccgtgccagcca

SEQ ID NO: 216702 - DNA, 120 bp, Artificial Sequence
  ENSG00000116525_26 (sequence is synthesized)
atagatgtcctgaggcctgcccctctcccacttcactcagttcccaaatctaaatttttacaagagattctgtttgggggaacttaagtcagatccagaaccttggctgcaagggagtct

SEQ ID NO: 216703 - DNA, 120 bp, Artificial Sequence
  ENSG00000116525_27 (sequence is synthesized)
gggaaatgtcatttccctagaaggaagttagggtgggtggagcaagccccacctgcgtttttctgccacagcatccaatcgtgaagaactcgggagagggtggagtccacatctagggtt

SEQ ID NO: 216704 - DNA, 120 bp, Artificial Sequence
  ENSG00000116525_28 (sequence is synthesized)
gtcctgccccttggctctatccctgcccagaggtgggaactggaggagtgggctgcaagactgagcctaaatgtctccccggccttgacttttctttctagtcctggggcctagattctg

SEQ ID NO: 216705 - DNA, 120 bp, Artificial Sequence
  ENSG00000116525_29 (sequence is synthesized)
cacttggggtctctgacacaacacaccatcccaaagtagccggaagagctaaacacagggggttcttaaaatggctgcccccgccacccgggcctcccttgggcaaaaggaattgtcagc

SEQ ID NO: 216706 - DNA, 120 bp, Artificial Sequence
  ENSG00000116525_30 (sequence is synthesized)
cctaccccaacccttcaactaccagaatctgggccaccccagcagtatttttatttaaaatgttgcccattttatgagttatgatcaatttgtattaaattaaagttacagatgtcagta

SEQ ID NO: 216707 - DNA, 120 bp, Artificial Sequence
  ENSG00000116525_31 (sequence is synthesized)
tctcaggttcctaacccccagagaggggatccgattcagtctcagccgccccctccaggcctcatgtgaccattggagcccttcccaaggcttccttcatgccagagaagacagcagtgg

SEQ ID NO: 216708 - DNA, 120 bp, Artificial Sequence
  ENSG00000116539_0 (sequence is synthesized)
gaggcttgggcttgcgccgttgaaggtacgcgtgagggcctgcgccggcgccggcttgacagggcctgaggggtagtgagggactggacgagggggttcctgtgggtgagcgcgtacggg

SEQ ID NO: 216709 - DNA, 120 bp, Artificial Sequence
  ENSG00000116539_1 (sequence is synthesized)
ctggctggcgcgcggggcggccgaaggtggtggttggtgggagcagccagcgacgagcccgtagacactcgtacgcgtgcgggcgggcgtgcgcgctacgcggacggagtcgggcggagc

SEQ ID NO: 216710 - DNA, 120 bp, Artificial Sequence
  ENSG00000116539_2 (sequence is synthesized)
gggggacggtgggaaagaacgcaaggaggaaggagtggaaggttgaggggggcgctaggcgcccttcgctccctccctctggaggagctgccgccgccaccgccgccactctgctgctgc

SEQ ID NO: 216711 - DNA, 120 bp, Artificial Sequence
  ENSG00000116539_3 (sequence is synthesized)
cgccgccgccgccgccgctcccgccgccattttgggttcgctttgcggaggggagacgatcccagtctcggttgcgggacccgcctcccctcagtttgccccctttagccttccaccttt

SEQ ID NO: 216712 - DNA, 120 bp, Artificial Sequence
  ENSG00000116539_4 (sequence is synthesized)
cccttctcctctctcgcatttccgccagtcagcttacccgctggccgcctcctgacaagcgggagggatccgccgtggacccagggaagcggaggagcctggcggccaccccctcttccc

SEQ ID NO: 216713 - DNA, 120 bp, Artificial Sequence
  ENSG00000116539_5 (sequence is synthesized)
cacttccctgcactctcatcgctctcggcctcggcctcggcctccgacacgagaaagatgctggtttcgagttttggagatccttgttttttatggaacacagttctgtaaaattttcat

SEQ ID NO: 216714 - DNA, 120 bp, Artificial Sequence
  ENSG00000116539_6 (sequence is synthesized)
aagattccttggcaataacatacgcttgtgatggaccctagaaatactgctatgttaggattgggttctgattccgaaggtttttcaagaaagagtccttctgccatcagtactggcaca

SEQ ID NO: 216715 - DNA, 120 bp, Artificial Sequence
  ENSG00000116539_7 (sequence is synthesized)
ttggtcagtaagagagaagtagagctagaaaaaaacacaaaggaggaagaggaccttcgcaaacggaatcgagaaagaaacatcgaagctgggaaagatgatggtttgactgatgcacag

SEQ ID NO: 216716 - DNA, 120 bp, Artificial Sequence
  ENSG00000116539_8 (sequence is synthesized)
caacagttttcagtgaaagaaacaaacttttcagagggaaatttaaaattgaaaattggcctccaggctaagagaactaaaaaacctccaaagaacttggagaactatgtatgtcgacct

SEQ ID NO: 216717 - DNA, 120 bp, Artificial Sequence
  ENSG00000116539_9 (sequence is synthesized)
gccataaaaacaactattaagcacccaaggaaagcacttaaaagtggaaagatgacggatgaaaagaatgaacactgtccttcaaaacgagacccttcaaagttgtacaagaaagcagat

SEQ ID NO: 216718 - DNA, 120 bp, Artificial Sequence
  ENSG00000116539_10 (sequence is synthesized)
gatgttgcagccattgaatgccagtctgaagaagtcatccgtcttcattcacagggagaaaacaatcctttgtctaagaagctgtctccagtacactcagaaatggcagattatattaat

SEQ ID NO: 216719 - DNA, 120 bp, Artificial Sequence
  ENSG00000116539_11 (sequence is synthesized)
gcaacgccatctactcttcttggtagccgggatcctgatttaaaggacagagcattacttaatggaggaactagtgtaacagaaaagttggcacagctgattgctacctgtcctccttcc

SEQ ID NO: 216720 - DNA, 120 bp, Artificial Sequence
  ENSG00000116539_12 (sequence is synthesized)
aagtcttccaagacaaaaccgaagaagttaggaactggcactacagcaggattggttagcaaggatttgatcaggaaagcaggtgttggctctgtagctggaataatacataaggactta

SEQ ID NO: 216721 - DNA, 120 bp, Artificial Sequence
  ENSG00000116539_13 (sequence is synthesized)
ataaaaaagccaaccatcagcacagcagttggattggtaactaaagatcctgggaaaaagccagtgtttaatgcagcagtaggattggtcaataaggactctgtgaaaaaactgggaact

SEQ ID NO: 216722 - DNA, 120 bp, Artificial Sequence
  ENSG00000116539_14 (sequence is synthesized)
ggcactacagcggtattcattaataaaaacttaggcaaaaagccaggaactatcactacagtaggactgctaagcaaagattcaggaaagaagctaggaattggtattgttccaggttta

SEQ ID NO: 216723 - DNA, 120 bp, Artificial Sequence
  ENSG00000116539_15 (sequence is synthesized)
gtgcataaagagtctggcaagaagttaggacttggcactgtggttggactggttaataaagatttgggaaagaaattgggttctactgttggcctagtggccaaggactgtgcaaagaag

SEQ ID NO: 216724 - DNA, 120 bp, Artificial Sequence
  ENSG00000116539_16 (sequence is synthesized)
attgtagcaagttcagcaatgggattggttaataaggacattggaaagaaactaatgagttgtcctttggcaggtctgatcagtaaagatgccataaaccttaaagccgaagcactgctc

SEQ ID NO: 216725 - DNA, 120 bp, Artificial Sequence
  ENSG00000116539_17 (sequence is synthesized)
cccactcaggaaccgcttaaggcttcttgtagtacaaacatcaataatcaggaaagtcaggaactttctgaatccctgaaagatagtgccaccagcaaaacttttgaaaagaatgttgta

SEQ ID NO: 216726 - DNA, 120 bp, Artificial Sequence
  ENSG00000116539_18 (sequence is synthesized)
cggcagaataaagaaagcatattggaaaagttctcagtacgaaaagaaatcattaatttggagaaagaaatgtttaatgaaggaacatgcattcagcaagacagtttctcatccagtgaa

SEQ ID NO: 216727 - DNA, 120 bp, Artificial Sequence
  ENSG00000116539_19 (sequence is synthesized)
aagggatcttatgaaacctcaaagcatgaaaagcagcctcctgtatattgcacttctccggactttaaaatgggaggtgcttctgatgtatctaccgctaaatccccattcagtgcagta

SEQ ID NO: 216728 - DNA, 120 bp, Artificial Sequence
  ENSG00000116539_20 (sequence is synthesized)
ggagaaagcaatctcccttccccatcacctactgtatctgttaatcctttaaccagaagtccccctgaaacttcttcacagttggctcctaatccattacttttaagttctactacagaa

SEQ ID NO: 216729 - DNA, 120 bp, Artificial Sequence
  ENSG00000116539_21 (sequence is synthesized)
ctaatcgaagaaatttctgaatctgttggaaagaaccagtttacttctgaaagtacccacttgaacgttggtcataggtcagttggtcatagtataagtattgaatgtaaagggattgat

SEQ ID NO: 216730 - DNA, 120 bp, Artificial Sequence
  ENSG00000116539_22 (sequence is synthesized)
aaagaggtaaatgattcaaaaactacccatatagatattccaagaataagctcttcccttggaaaaaagccaagtttgacttctgaatccagcattcatactattactccttcagttgtt

SEQ ID NO: 216731 - DNA, 120 bp, Artificial Sequence
  ENSG00000116539_23 (sequence is synthesized)
aacttcactagtttatttagtaataagccttttttaaaactgggtgcagtatctgcatcagacaaacactgccaagttgctgaaagcctaagtactagtttgcagtccaaaccattaaaa

SEQ ID NO: 216732 - DNA, 120 bp, Artificial Sequence
  ENSG00000116539_24 (sequence is synthesized)
aaaagaaaaggaagaaaacctcggtggactaaagtggtggcaagaagcacatgccggtctccaaaagggctagaattagaaagatcagagctttttaaaaacgtttcatgtagctcacta

SEQ ID NO: 216733 - DNA, 120 bp, Artificial Sequence
  ENSG00000116539_25 (sequence is synthesized)
tcaaatagtaattctgagccagccaagtttatgaaaaacattggacccccttcatttgtagatcatgacttccttaaacgccgattgccaaagttgagcaaatccacagctccatctctt

SEQ ID NO: 216734 - DNA, 120 bp, Artificial Sequence
  ENSG00000116539_26 (sequence is synthesized)
gctctcttagctgatagtgaaaaaccatctcataagtcttttgctactcacaaactatcctccagtatgtgtgtctctagtgaccttttgtctgatatttataagcccaaaagaggaagg

SEQ ID NO: 216735 - DNA, 120 bp, Artificial Sequence
  ENSG00000116539_27 (sequence is synthesized)
cctaaatctaaggagatgcctcaactggaagggccacctaaaaggactttaaaaatccctgcttctaaagtgttttctttacagtctaaggaagaacaagaacccccaattttacagcca

SEQ ID NO: 216736 - DNA, 120 bp, Artificial Sequence
  ENSG00000116539_28 (sequence is synthesized)
gaaattgaaatcccttccttcaaacaaggtctgtctgtgtctccttttccaaaaaagagaggcaggcctaagaggcaaatgaggtcaccagtcaagatgaagccacctgtactgtcagtg

SEQ ID NO: 216737 - DNA, 120 bp, Artificial Sequence
  ENSG00000116539_29 (sequence is synthesized)
gctccatttgttgccactgaaagtccaagcaagctagaatctgaaagtgacaaccatagaagtagcagtgatttctttgagagcgaggatcaacttcaggatccagatgacctagatgac

SEQ ID NO: 216738 - DNA, 120 bp, Artificial Sequence
  ENSG00000116539_30 (sequence is synthesized)
agtcataggccaagtgtctgtagtatgagtgaccttgagatggaaccagataaaaaaattaccaagagaaacaatggacaattaatgaaaacaattatccgcaaaataaataaaatgaag

SEQ ID NO: 216739 - DNA, 120 bp, Artificial Sequence
  ENSG00000116539_31 (sequence is synthesized)
actttaaagagaaagaaactgttgaatcagattctttcaagttctgtagaatcaagtaataaagggaaagtgcaatccaaactccataatacggtatcaagtcttgctgccacatttggc

SEQ ID NO: 216740 - DNA, 120 bp, Artificial Sequence
  ENSG00000116539_32 (sequence is synthesized)
tctaaattgggccaacagataaatgtcagcaagaaaggaaccatttatataggaaagagaagaggtcgcaaaccaaaaactgtcttaaatggtattctttctggtagtcctactagcctt

SEQ ID NO: 216741 - DNA, 120 bp, Artificial Sequence
  ENSG00000116539_33 (sequence is synthesized)
gctgttcttgagcaaacagctcaacaggcagctgggtcagcattaggacagattcttcccccattactgccttcatctgctagtagttctgagattcttccatcacctatttgctctcag

SEQ ID NO: 216742 - DNA, 120 bp, Artificial Sequence
  ENSG00000116539_34 (sequence is synthesized)
tcttctgggactagtggaggtcagagccctgtaagtagtgatgcaggttttgttgaacccagttcagtgccatatttgcatttacactccagacagggcagtatgattcagactcttgca

SEQ ID NO: 216743 - DNA, 120 bp, Artificial Sequence
  ENSG00000116539_35 (sequence is synthesized)
atgaagaaggcctcaaaggggaggaggcggttatctcctcctactttgttgccaaattctccttcgcacttgagtgaactcacatctctaaaagaagctactccttccccaatcagtgag

SEQ ID NO: 216744 - DNA, 120 bp, Artificial Sequence
  ENSG00000116539_36 (sequence is synthesized)
tctcatagtgatgagaccattcccagtgatagtggaattggaacagataataacagcacatcagacagggcagagaaattttgtgggcaaaaaaagaggaggcattcttttgagcatgtt

SEQ ID NO: 216745 - DNA, 120 bp, Artificial Sequence
  ENSG00000116539_37 (sequence is synthesized)
tctctgattccccctgaaacctctacagtgctaagcagtcttaaagaaaaacataaacacaaatgtaagcgcaggaatcatgattacctcagctatgacaagatgaaaaggcagaaacga

SEQ ID NO: 216746 - DNA, 120 bp, Artificial Sequence
  ENSG00000116539_38 (sequence is synthesized)
aaacggaaaaagaaatatccccagcttcgaaatagacaggatccagactttattgcagagctggaggaactaataagtcgcctaagtgaaattcggatcactcatcgaagtcatcatttt

SEQ ID NO: 216747 - DNA, 120 bp, Artificial Sequence
  ENSG00000116539_39 (sequence is synthesized)
atcccccgagatcttctgccaactatctttcgaatcaactttaatagtttctatacacatccttctttccccttagaccctttgcactacattcgaaaacctgacttaaaaaagaaaaga

SEQ ID NO: 216748 - DNA, 120 bp, Artificial Sequence
  ENSG00000116539_40 (sequence is synthesized)
gggagaccccctaagatgagggaggcaatggctgaaatgccttttatgcacagccttagttttcctctttctagtactggattctatccatcttatggtatgccttactctccttcaccc

SEQ ID NO: 216749 - DNA, 120 bp, Artificial Sequence
  ENSG00000116539_41 (sequence is synthesized)
cttacagctgctcccataggattaggttactatggaaggtatcctcccactctttatccacctcctccatctccttctttcaccacgccacttccacctccttcctatatgcatgctggt

SEQ ID NO: 216750 - DNA, 120 bp, Artificial Sequence
  ENSG00000116539_42 (sequence is synthesized)
catttacttctcaatcctgccaaataccataagaaaaagcataagctacttcgacaggaggcctttcttacaaccagcaggactcccctcctttccatgagtacctaccccagtgttcct

SEQ ID NO: 216751 - DNA, 120 bp, Artificial Sequence
  ENSG00000116539_43 (sequence is synthesized)
cctgagatggcctatggttggatggttgagcacaaacacaggcaccgtcacaaacacagagaacaccgttcttctgaacaaccccaggtttctatggacactggctcttcccgatctgtc

SEQ ID NO: 216752 - DNA, 120 bp, Artificial Sequence
  ENSG00000116539_44 (sequence is synthesized)
ctggaatctttgaagcgctatagatttggaaaggatgctgttggagagcgatataagcataaggaaaagcaccgttgtcacatgtcctgccctcatctctctccttcaaaaagcttaata

SEQ ID NO: 216753 - DNA, 120 bp, Artificial Sequence
  ENSG00000116539_45 (sequence is synthesized)
aacagagaggaacagtgggtccaccgagagccttcagaatctagtccattggccttgggattgcagacacctttacagattgactgttcagaaagttctccaagcttatcccttggagga

SEQ ID NO: 216754 - DNA, 120 bp, Artificial Sequence
  ENSG00000116539_46 (sequence is synthesized)
ttcactcccaactctgagccagccagcagtgatgaacatacaaaccttttcacaagtgcaataggcagctgcagagtttcaaaccctaactccagtggccggaagaaattaactgacagc

SEQ ID NO: 216755 - DNA, 120 bp, Artificial Sequence
  ENSG00000116539_47 (sequence is synthesized)
cctggactcttttctgcacaggacacttcactaaatcggcttcacagaaaggagtcactgccttctaacgaaagggcagtacagactttggcaggctcccagccaacctctgataaaccc

SEQ ID NO: 216756 - DNA, 120 bp, Artificial Sequence
  ENSG00000116539_48 (sequence is synthesized)
tcccagcggccatcagagagcacaaattgtagccctacccggaaaaggtcttcatctgagagtacttcttcaacagtaaacggagttccctctcgaagtccaagattagttgcttctggg

SEQ ID NO: 216757 - DNA, 120 bp, Artificial Sequence
  ENSG00000116539_49 (sequence is synthesized)
gatgactctgtggatagtctgctgcagcggatggtacaaaatgaggaccaagagcccatggagaaaagtattgatgctgtgattgcaactgcctctgcaccaccttcttccagtccaggc

SEQ ID NO: 216758 - DNA, 120 bp, Artificial Sequence
  ENSG00000116539_50 (sequence is synthesized)
acagccttttagtgcctgcagtcacaagtgactcttgcaataatagcatctcactcctatctgaaaagttgacaagcagctgttccccccatcatatcaagagaagtgtagtggaagcta

SEQ ID NO: 216759 - DNA, 120 bp, Artificial Sequence
  ENSG00000116539_51 (sequence is synthesized)
tgcaacgccaagctcggaaaatgtgcaattacgacaaaatcttggccacaaagaaaaacctagaccatgtcaataaaatcttaaaagccaaaaaacttcaaaggcaggccaggacaggga

SEQ ID NO: 216760 - DNA, 120 bp, Artificial Sequence
  ENSG00000116539_52 (sequence is synthesized)
ataactttgtgaaacgtaggccaggtcgacctcggaaatgtccccttcaggctgtcgtatcaatgcaagcattccaggctgctcagtttgtcaacccagaattgaacagagacgaggaag

SEQ ID NO: 216761 - DNA, 120 bp, Artificial Sequence
  ENSG00000116539_53 (sequence is synthesized)
gagcagcactgcacctcagtcctgacacagttacagatgtaattgaggctgttgttcagagtgtaaatctgaacccagaacataaaaaggggttgaagagaaaaggttggctattggaag

SEQ ID NO: 216762 - DNA, 120 bp, Artificial Sequence
  ENSG00000116539_54 (sequence is synthesized)
aacagaccagaaaaaagcagaagccattaccagaggaagaagagcaagagaataataaaagctttaatgaagcaccagttgagattcccagtccttctgaaaccccagctaaaccttctg

SEQ ID NO: 216763 - DNA, 120 bp, Artificial Sequence
  ENSG00000116539_55 (sequence is synthesized)
aacctgaaagtaccttgcagcctgtgctttctctcatcccaagggaaaagaagcccccacgtcccccaaagaagaagtatcagaaagcagggctgtattctgacgtttacaaaactacag

SEQ ID NO: 216764 - DNA, 120 bp, Artificial Sequence
  ENSG00000116539_56 (sequence is synthesized)
acccaaagagtcgattgatccaattaaagaaagagaagctggagtatactccaggagagcatgaatatggattatttccagcgcccattcatgttggaaagtatctaagacaaaagagaa

SEQ ID NO: 216765 - DNA, 120 bp, Artificial Sequence
  ENSG00000116539_57 (sequence is synthesized)
ttgacttccagcttccttatgatatcctttggcagtggaaacacaatcagctatacaaaaagccagatgtcccactatataagaaaattcgttcaaatgtctacgttgatgtcaaacccc

SEQ ID NO: 216766 - DNA, 120 bp, Artificial Sequence
  ENSG00000116539_58 (sequence is synthesized)
tttctggttacgaagctaccacctgtaactgtaagaagccagatgatgacaccaggaagggctgtgttgatgactgcctcaatagaatgatctttgctgagtgttcccccaacacttgcc

SEQ ID NO: 216767 - DNA, 120 bp, Artificial Sequence
  ENSG00000116539_59 (sequence is synthesized)
catgtggcgagcaatgctgtaaccagaggatacagaggcatgaatgggtgcaatgtctagaacgatttcgagctgaggaaaaaggttggggaatcagaaccaaagagcccctaaaagctg

SEQ ID NO: 216768 - DNA, 120 bp, Artificial Sequence
  ENSG00000116539_60 (sequence is synthesized)
ggcagttcatcattgaatacctaggggaggtcgtcagtgaacaggagttcaggaacaggatgattgagcagtatcataatcacagtgaccactactgcctgaacctggatagtgggatgg

SEQ ID NO: 216769 - DNA, 120 bp, Artificial Sequence
  ENSG00000116539_61 (sequence is synthesized)
tgattgacagttaccgcatgggaaatgaggcccgattcatcaaccatagctgtgacccaaattgtgaaatgcagaaatggtctgttaatggagtataccggattggactctatgctctta

SEQ ID NO: 216770 - DNA, 120 bp, Artificial Sequence
  ENSG00000116539_62 (sequence is synthesized)
aagacatgccagctgggactgaactcacttatgattataactttcattccttcaatgtggaaaaacagcaactttgtaagtgtggctttgagaaatgtcgaggaatcatcggaggcaaga

SEQ ID NO: 216771 - DNA, 120 bp, Artificial Sequence
  ENSG00000116539_63 (sequence is synthesized)
gtcagcgtgtgaatggactcaccagcagcaaaaacagccagcccatggccacacacaaaaaatctggacggtcaaaagagaagagaaagtctaagcacaagctgaagaaaaggagaggcc

SEQ ID NO: 216772 - DNA, 120 bp, Artificial Sequence
  ENSG00000116539_64 (sequence is synthesized)
atctctctgaggaacccagtgaaaatatcaacaccccaactagattgaccccccaattacagatgaagccaatgtccaatcgtgaaaggaactttgtgttaaagcatcatgtattcttgg

SEQ ID NO: 216773 - DNA, 120 bp, Artificial Sequence
  ENSG00000116539_65 (sequence is synthesized)
tccgaaactgggagaagattcgtcaaaaacaggaggaagtaaagcacaccagtgataatattcactcagcatcattatatacccgttggaatgggatctgccgagatgatgggaatatca

SEQ ID NO: 216774 - DNA, 120 bp, Artificial Sequence
  ENSG00000116539_66 (sequence is synthesized)
agtctgatgtcttcatgacccagttctctgccctgcagacagctcgatctgttcgaacaagacggttggcagctgcagaggaaaatattgaagtggctcgggcagcccgcctagcccaga

SEQ ID NO: 216775 - DNA, 120 bp, Artificial Sequence
  ENSG00000116539_67 (sequence is synthesized)
tcttcaaagaaatttgtgatggtatcatctcttataaagattcttcccggcaagcactggcagctccacttttgaaccttcccccaaagaaaaagaatgctgattattatgagaagatct

SEQ ID NO: 216776 - DNA, 120 bp, Artificial Sequence
  ENSG00000116539_68 (sequence is synthesized)
ctgatcccctagatcttatcaccatagagaagcagatcctcactggttactataagacagtggaagcttttgatgctgacatgctcaaagtctttcggaatgctgagaagtactatgggc

SEQ ID NO: 216777 - DNA, 120 bp, Artificial Sequence
  ENSG00000116539_69 (sequence is synthesized)
gtaaatccccagttgggagagatgtttgtcgtctacgaaaggcctattacaatgcccggcatgaggcatcagcccagattgatgagattgtgggagagacagcaagtgaggcagacagca

SEQ ID NO: 216778 - DNA, 120 bp, Artificial Sequence
  ENSG00000116539_70 (sequence is synthesized)
gtgagacctcagtctctgaaaaggagaatgggcatgagaaggacgacgatgttattcgctgtatctgtggcctctacaaggatgaaggtctcatgatccagtgtgacaagtgcatggtat

SEQ ID NO: 216779 - DNA, 120 bp, Artificial Sequence
  ENSG00000116539_71 (sequence is synthesized)
ggcagcactgtgattgtatgggagtgaactcagatgtggagcactacctttgtgagcagtgtgacccaaggcctgtggacagggaggttcccatgatccctcggccccactatgcccaac

SEQ ID NO: 216780 - DNA, 120 bp, Artificial Sequence
  ENSG00000116539_72 (sequence is synthesized)
ctggctgtgtctacttcatctgtttgctccgagatgacttgctgcttcgtcagggtgactgtgtgtatctgatgagggatagtcggcgcacccctgatggccacccggtccgtcagtcct

SEQ ID NO: 216781 - DNA, 120 bp, Artificial Sequence
  ENSG00000116539_73 (sequence is synthesized)
atcgactgttatctcacattaaccgagataaacttgacatctttcgcattgagaagctttggaagaatgaaaaagaggaacggtttgcctttggtcaccattatttccgtccccacgaaa

SEQ ID NO: 216782 - DNA, 120 bp, Artificial Sequence
  ENSG00000116539_74 (sequence is synthesized)
cacaccactctccatcccgtcggttctatcataatgaactatttcgggtgccactctatgagatcattcccttggaggctgtagtggggacctgctgtgtgttggacctttatacgtatt

SEQ ID NO: 216783 - DNA, 120 bp, Artificial Sequence
  ENSG00000116539_75 (sequence is synthesized)
gtaaagggagacccaaaggagtaaaggagcaagatgtgtacatctgtgattatcggcttgacaagtcagcacacctgttttacaagatccaccggaaccgctatcctgtctgcaccaaac

SEQ ID NO: 216784 - DNA, 120 bp, Artificial Sequence
  ENSG00000116539_76 (sequence is synthesized)
cctatgcttttgatcacttccccaagaagctcactcccaaaaaagatttctcgcctcattacgtcccagacaactacaagaggaatggaggacgatcatcctggaagtctgagcgctcaa

SEQ ID NO: 216785 - DNA, 120 bp, Artificial Sequence
  ENSG00000116539_77 (sequence is synthesized)
agccacccctaaaagacttgggccaggaggatgatgctctacccttgattgaagaggttctagccagtcaagagcaagcagccaatgagatacccagcctggaggagccagaacgggaag

SEQ ID NO: 216786 - DNA, 120 bp, Artificial Sequence
  ENSG00000116539_78 (sequence is synthesized)
gggccactgctaacgtcagtgagggtgaaaaaaaaacagaggaaagtagtcaagaaccccagtcaacctgtacccctgaggaacgacggcataaccaacgggaacgactcaaccagatct

SEQ ID NO: 216787 - DNA, 120 bp, Artificial Sequence
  ENSG00000116539_79 (sequence is synthesized)
tgctcaatctccttgaaaaaatccctggaaaaaatgccattgatgtgacctacttgctggaggaaggatcaggcaggaaactgcgaaggcgtactttgtttatcccagaaaacagctttc

SEQ ID NO: 216788 - DNA, 120 bp, Artificial Sequence
  ENSG00000116539_80 (sequence is synthesized)
gaaagtgaccctcaaagaatgagaacctcaagcatctgggatccagtggagctaatcagtcctgcctcctgctctctgggtatagacaggggtgggaagggtccatctgggcaaggggaa

SEQ ID NO: 216789 - DNA, 120 bp, Artificial Sequence
  ENSG00000116539_81 (sequence is synthesized)
tggggccatgttgttgacattaggtacttaataagccttggagctagtggagagggagaggaaagggttctgtccaagacagttcaggttaattaattttcttctccattgcttcacctt

SEQ ID NO: 216790 - DNA, 120 bp, Artificial Sequence
  ENSG00000116539_82 (sequence is synthesized)
aagggttaataatgtagagaggagggaggaccacattgatgaccagaacctactggtactttatagcatttgccccaccccacagcttaggtttttctgtcatcctcagatcccacaggc

SEQ ID NO: 216791 - DNA, 120 bp, Artificial Sequence
  ENSG00000116539_83 (sequence is synthesized)
attgcgaagaagctgcttcctatacccaggtataactcaaaatccaaagggatagggccaggatccctattcctaccccatctattctctgttggctccaagagctaccccagagacctt

SEQ ID NO: 216792 - DNA, 120 bp, Artificial Sequence
  ENSG00000116539_84 (sequence is synthesized)
aaacagaaacagtagctgaggcttcttcctagatacctgactagggaagtttgtctctcctttcttgcccaaccaggtcaaagtaaaatgtgagttgacagctcaaagcacttgtaactg

SEQ ID NO: 216793 - DNA, 120 bp, Artificial Sequence
  ENSG00000116539_85 (sequence is synthesized)
ctgccccctccctacctctactccccaaaatggaatcatgggatagggaaggcccccatggggtcagaagggcacggtagttcttgcaattatttttgttttacccttcataacctgtca

SEQ ID NO: 216794 - DNA, 120 bp, Artificial Sequence
  ENSG00000116539_86 (sequence is synthesized)
aacatatttttttctaatgagaaagccaggcccccgccagcacacatgctgtttttaatgcgctgtagttcttgtgtgtctgctgtgctgtgcaaatggagattcagttcaaaataaaat

SEQ ID NO: 216795 - DNA, 120 bp, Artificial Sequence
  ENSG00000116539_87 (sequence is synthesized)
catttaaaaacctacataaaaagaactctaaacccacccctgcaacaaaagtcactacataaactgttcagcagtattcacctatcagagtatttgttgtgagtatagattatcaattga

SEQ ID NO: 216796 - DNA, 120 bp, Artificial Sequence
  ENSG00000116539_88 (sequence is synthesized)
aaacactactcttgttttcttaattgtacagttttcaatgtccctttcttaaagagacagtatatttctcttcacccctagcccatcttccctcaccctcctgaatgacatcaggaggta

SEQ ID NO: 216797 - DNA, 120 bp, Artificial Sequence
  ENSG00000116539_89 (sequence is synthesized)
tatccagggtgtctccttccttcctactctcttgaccagaagttaacagactatactgtctctttaaaaataaaatttaaaaagctttgttgtcttttcagacatacatatgcatatatg

SEQ ID NO: 216798 - DNA, 120 bp, Artificial Sequence
  ENSG00000116539_90 (sequence is synthesized)
tacatatgcatatatgttttagatgttcttataagagaaaagatggtttttaaatgtgccaagttgtgtgtgtgtgtgtatatatatgtgtgtatgtgtgtgtatatatatatgtgtgtg

SEQ ID NO: 216799 - DNA, 120 bp, Artificial Sequence
  ENSG00000116539_91 (sequence is synthesized)
cacacacacacacctgctgtgtgattggtaagcaatacaatagtaaacatgtccccattacttttttctaatattggaccaatgctgtcctaattgtacatttccccttatggtgacgat

SEQ ID NO: 216800 - DNA, 120 bp, Artificial Sequence
  ENSG00000116539_92 (sequence is synthesized)
gctctgactcgtttaggtagacacattgaccaccttccattccattaaatattttttcctttttcccctttctgtgtcattcttgaggaaaaaacaaaagagagaggggatgccaatgat

SEQ ID NO: 216801 - DNA, 120 bp, Artificial Sequence
  ENSG00000116539_93 (sequence is synthesized)
ccccttgagcagagaaaaagcaaaataaatattttattaaagaaaaaagagaattaagaaaatagtttggagtattttcttactgtagagaagcactgtacattactaagagacctgggt

SEQ ID NO: 216802 - DNA, 120 bp, Artificial Sequence
  ENSG00000116539_94 (sequence is synthesized)
ataagatactcacatgtggagctggaaaaatcgcatgtccaagcccgtttgagtggtttcttttgtttttcattgcagggagtgggtgggagggaggtgggactaggggcactttggggg

SEQ ID NO: 216803 - DNA, 120 bp, Artificial Sequence
  ENSG00000116539_95 (sequence is synthesized)
tctccttttagtcaaaagcgagaaaatgacaagaaagagattaaaattcaatgtttcctttatagtgttaaacactaaaattttaaaaaagatgaaaaagaaaaaaaaactttgtaaaat

SEQ ID NO: 216804 - DNA, 120 bp, Artificial Sequence
  ENSG00000116539_96 (sequence is synthesized)
gcgagaacagaagcaaaagacactacgctctgtcattttatctttcttttgttgaaagactaaaaaaaaactgaaatgttttttagacaatcaaatgttaggtaagtgcaaaaacttgtt

SEQ ID NO: 216805 - DNA, 120 bp, Artificial Sequence
  ENSG00000116539_97 (sequence is synthesized)
ttttcttactggtgtagaaattaatgcctttttttatttttcagttattttataataacgaaataaaaagaaccccccagctgccaggcgggttttggtgtttgaaatgcggggcaaagc

SEQ ID NO: 216806 - DNA, 120 bp, Artificial Sequence
  ENSG00000116539_98 (sequence is synthesized)
actacatcactgcaaatagatacagagttagtctgcatgtctgtaggctgtgtgattgcggaaaatataaatgctgctaatatatttcctttttacaaaagcatatctaaatagatgatt

SEQ ID NO: 216807 - DNA, 120 bp, Artificial Sequence
  ENSG00000116539_99 (sequence is synthesized)
gttttgatgttaatctttgtaaattatgtattaccaattttaacattggatgtaattgcatacaaagcttgcatctcaatccttgaaagtctagtattaaatggaaaaaacttttcctaa

SEQ ID NO: 216808 - DNA, 120 bp, Artificial Sequence
  ENSG00000116539_100 (sequence is synthesized)
ggccaagtgcagtggctcacgctgataatcccagcggtgtgggaggccgaggcaggcagattgcttaagcccaggagtgtgagaccagcctggccaacgtggcaaaactctgcctctgta

SEQ ID NO: 216809 - DNA, 88 bp, Artificial Sequence
  ENSG00000116539_101 (sequence is synthesized)
gagaccagcctggccaacgtggcaaaactctgcctctgtagctgggcatggcagtgtaggcctgtagtcccaactactgggaggattg

SEQ ID NO: 216810 - DNA, 120 bp, Artificial Sequence
  ENSG00000116539_102 (sequence is synthesized)
ttaccccagatcccacgggcagagtaagctgcttcgttttcaccctaacttctcactcccagacagatatttttgtttttatttgtgttctgtttttttgttttgcttttttggtttttt

SEQ ID NO: 216811 - DNA, 120 bp, Artificial Sequence
  ENSG00000116539_103 (sequence is synthesized)
tgtttggcatgcaagtagtttcaggatctatgtcctagaaaaatataataatgatgatgatgatagccagggtggtggtacacacctgtagtcccagctatttgagaggttgaggtgaga

SEQ ID NO: 216812 - DNA, 75 bp, Artificial Sequence
  ENSG00000116539_104 (sequence is synthesized)
cctgggttcaagcgattctcctcttcaaagttgtacaagaaagcagatgatgttgcagccattgaatgccagtct

SEQ ID NO: 216813 - DNA, 120 bp, Artificial Sequence
  ENSG00000116539_105 (sequence is synthesized)
taaataccagtagcataccccaatcattgtaataattagtctcccttcacacattttcatatggcccctagattacgtagagcaactacacaattagtgcttcataaaacatagattgag

SEQ ID NO: 216814 - DNA, 120 bp, Artificial Sequence
  ENSG00000116539_106 (sequence is synthesized)
atacttagcctatcagttttgtcctctaccttcacttttccaggtttaacagctctagttgctttcatcttttttgtatatctgtggtatattgaaatgactaaacagtaagttttgatt

SEQ ID NO: 216815 - DNA, 120 bp, Artificial Sequence
  ENSG00000116539_107 (sequence is synthesized)
tggaaggaatggcactatataaaactaaggtttttggccgggcacggtcgctcatgcctgtaatcctagcacactgggaggctaaggcggatggattgcctgagctcaggagttcgagac

SEQ ID NO: 216816 - DNA, 120 bp, Artificial Sequence
  ENSG00000116544_0 (sequence is synthesized)
atgaggggttaccatggcgaccgaggcagccatccccgcccagcccgctttgctgaccaacagcatatggacgtgggccctgctgccagggccccatacctgctgggctccagggaggcc

SEQ ID NO: 216817 - DNA, 120 bp, Artificial Sequence
  ENSG00000116544_1 (sequence is synthesized)
ttctccaccgagccccgcttctgtgccccgagagctggcctgggacacatttctcctgaagggcccctgagcctgagtgaggggccgtcggtaggccctgagggagggccagcgggggcc

SEQ ID NO: 216818 - DNA, 120 bp, Artificial Sequence
  ENSG00000116544_2 (sequence is synthesized)
ggggttggggggggtagcagcaccttccccaggatgtaccctggccagggccccttcgacacctgtgaagactgtgtgggccacccacagggcaagggtgccccccgcctgcctcctaca

SEQ ID NO: 216819 - DNA, 120 bp, Artificial Sequence
  ENSG00000116544_3 (sequence is synthesized)
ctcctggatcagtttgaaaagcagttgccagttcaacaagatggcttccacacactaccataccagcgagggccagcaggggcagggcccgggccagcgccagggacgggcactgcccca

SEQ ID NO: 216820 - DNA, 120 bp, Artificial Sequence
  ENSG00000116544_4 (sequence is synthesized)
gagccccgcagtgagagccctagccgcatccggcacctggttcattctgtgcagaagctctttgccaagtcccactctctggaggcgccggggaagcgggactataatgggcccaaggct

SEQ ID NO: 216821 - DNA, 120 bp, Artificial Sequence
  ENSG00000116544_5 (sequence is synthesized)
gagggaagaggtggctctggaggagacagctaccccggcccgggctctggaggcccccacacctcccatcaccaccatcaccaccaccatcaccaccaccaccagtcccggcacggcaag

SEQ ID NO: 216822 - DNA, 120 bp, Artificial Sequence
  ENSG00000116544_6 (sequence is synthesized)
aggagcaagagcaaggaccgcaagggggatgggcggcaccaggccaagtccacaggctggtggagttccgatgacaacttggacagtgatagcggcttcctggcgggtgggaggccccct

SEQ ID NO: 216823 - DNA, 120 bp, Artificial Sequence
  ENSG00000116544_7 (sequence is synthesized)
ggggagcctggtggtcccttctgcctggagggtccagatgggtcctaccgggacttgagcttcaaggggcgctcgggcgggtcggaaggccgctgccttgcctgcactggcatgtccatg

SEQ ID NO: 216824 - DNA, 120 bp, Artificial Sequence
  ENSG00000116544_8 (sequence is synthesized)
tcactggatggacagtcggtcaagcgaagtgcctggcataccatgatggtcagccagggccgggatggatacccgggggccgggccaggcaaggggctcctgggtccggagaccaaggcc

SEQ ID NO: 216825 - DNA, 120 bp, Artificial Sequence
  ENSG00000116544_9 (sequence is synthesized)
aaagccaggacttatcactatctgcaggtgccgcaagatgactgggggggttaccccaccggtggcaaggatggggagatcccctgccgcaggatgcggagcggcagctacatcaaagcc

SEQ ID NO: 216826 - DNA, 120 bp, Artificial Sequence
  ENSG00000116544_10 (sequence is synthesized)
atgggggatgaggagagcggagactcagacggcagccccaagacatctcccaaagcagtcgcccgacgcttcaccacccgtcgctcctccagcgtggaccaggccaggatcaactgctgt

SEQ ID NO: 216827 - DNA, 120 bp, Artificial Sequence
  ENSG00000116544_11 (sequence is synthesized)
gtcccaccccggatccacccccggagctccatccctggctacagccgttccctcaccactggacagctcagcgatgagttgaaccagcagctggaggccgtgtgcgggtcggtgtttggg

SEQ ID NO: 216828 - DNA, 120 bp, Artificial Sequence
  ENSG00000116544_12 (sequence is synthesized)
gagctggagtcccaggccgtggacgccctggacctgcccggctgtttccgcatgcggagccacagctacctccgggccatccaggccggctgctctcaagacgacgactgcctgcccctc

SEQ ID NO: 216829 - DNA, 120 bp, Artificial Sequence
  ENSG00000116544_13 (sequence is synthesized)
ctcgctacccctgccgctgtctcagggaggcccggctcctccttcaacttcagaaaggccccgccccccatcccgccgggaagccaggccccgccccgcatctccatcaccgcccagagc

SEQ ID NO: 216830 - DNA, 120 bp, Artificial Sequence
  ENSG00000116544_14 (sequence is synthesized)
gttggcgccggtgccgccccgggccagccccaagccccccacactcatcatcaagaccatccctggcagggaggagctgcggagcctggcgcggcagcggaagtggcggccgtccattgg

SEQ ID NO: 216831 - DNA, 120 bp, Artificial Sequence
  ENSG00000116544_15 (sequence is synthesized)
ggtgcaggtggagacgatctcagattcggacaccgagaacaggagccggagggagttccactctattggcgtgcaggtggaagaggacaagaggcgagcaaggttcaagcgctccaatag

SEQ ID NO: 216832 - DNA, 120 bp, Artificial Sequence
  ENSG00000116544_16 (sequence is synthesized)
tgtgacggctggcgtgcaggcagacctggagctggagggcctggcaggcctggccacggtggccacagaagacaaggccctgcagtttggacgctccttccagaggcacgcctctgagcc

SEQ ID NO: 216833 - DNA, 120 bp, Artificial Sequence
  ENSG00000116544_17 (sequence is synthesized)
ccagcctgggccccgggcccccacctactcagtcttccgcacggtccacacgcagggccagtgggcctaccgcgagggctacccactgccgtacgagccgccggccaccgatgggtcgcc

SEQ ID NO: 216834 - DNA, 120 bp, Artificial Sequence
  ENSG00000116544_18 (sequence is synthesized)
cctgcccccgcccccacccccggccctggggccggccgccgtgactcctggatagagcgcggttcacgtagcctccccgactcaggccgcgcatccccctgcccacgcgacggcgagtgg

SEQ ID NO: 216835 - DNA, 120 bp, Artificial Sequence
  ENSG00000116544_19 (sequence is synthesized)
gtggttcatcaagatgctgcgggcagaggtggagaagctggagcactggtgccagcagatggagcgtgaggcggaggactatgagctacccgaggagatcctggagaagatccgcagtgc

SEQ ID NO: 216836 - DNA, 120 bp, Artificial Sequence
  ENSG00000116544_20 (sequence is synthesized)
tgtgggcagcacacaacttctcctgtcccagaaggttcagcagttcttccggctgtgtcagcaaagcatggatcccactgcgttccctgtgcccaccttccaggacctggcgggtttctg

SEQ ID NO: 216837 - DNA, 120 bp, Artificial Sequence
  ENSG00000116544_21 (sequence is synthesized)
ggacctcctacagctctccatcgaggatgtgaccctcaagttcctggagctacagcaactcaaggccaacagctggaaactcctggagcctaaggaggagaagaaggtccctccgccgat

SEQ ID NO: 216838 - DNA, 120 bp, Artificial Sequence
  ENSG00000116544_22 (sequence is synthesized)
accaaagaagcccctgcggggccggggcgtgccggtgaaggagcgctccctggactccgtggaccggcagcggcaggaagcgcgcaagcggctcctggcggccaagcgcgccgcttcctt

SEQ ID NO: 216839 - DNA, 120 bp, Artificial Sequence
  ENSG00000116544_23 (sequence is synthesized)
ccgccacagctcggccaccgagagcgccgacagcatcgagatctacatccccgaggcccagaccaggctgtgaccggtccggcccgcccagcccggcccgggcccgcggttctccacccg

SEQ ID NO: 216840 - DNA, 120 bp, Artificial Sequence
  ENSG00000116544_24 (sequence is synthesized)
tactgtacacccagcgtcgaggtcactgtgaacgcgggccgccccgtgcgcccgccccaccggcaccggacgccccggcccccgggcccgtcacactctcgtgggttttttaccttcctg

SEQ ID NO: 216841 - DNA, 120 bp, Artificial Sequence
  ENSG00000116544_25 (sequence is synthesized)
atcccacgcgaaggcgcccgggctgggcagggggccgtgcctctccgccctgcgcccctcacctggatcccctgcccacctggtccgacgctttgtccccacctcctccccatgggcacc

SEQ ID NO: 216842 - DNA, 120 bp, Artificial Sequence
  ENSG00000116544_26 (sequence is synthesized)
atctctgccattctttcccccacgggccaggccgggccgggtccctcatctgggctctgcgtccccccctcccccaccccgcggggctgggcttcgtggggatcaagcttcgtggctttt

SEQ ID NO: 216843 - DNA, 120 bp, Artificial Sequence
  ENSG00000116544_27 (sequence is synthesized)
tatgaagaatcccgaaccctgcctaggagcccgccccaccctcccaggggctccatcctcagccctctgcccactgggcccagggaccacagtggctggaccaacccaggaccagggcgc

SEQ ID NO: 216844 - DNA, 120 bp, Artificial Sequence
  ENSG00000116544_28 (sequence is synthesized)
ctgggcctctcccctttcccagcggctggggaggggagatgggggcttcccctcaccacacctgtggctgttcccacatccccttgaatatcccaggaaaaataaaacggcagaactgca

SEQ ID NO: 216845 - DNA, 120 bp, Artificial Sequence
  ENSG00000116544_29 (sequence is synthesized)
gcccgcctgcccaacgccgcagcgcccccggcccgggccgccggcaccatgtaacccggccggagcccgagccgggccaggattcagtggtcctgagccttctgaagttaggcttctgcc

SEQ ID NO: 216846 - DNA, 120 bp, Artificial Sequence
  ENSG00000116544_30 (sequence is synthesized)
tcctccccccagtccagatgggagctggctccttcagaaagggggctcagaacagggtgtggggagctacctctctctgcctccccccaccacatctgtctgcagggctgggagccccca

SEQ ID NO: 216847 - DNA, 120 bp, Artificial Sequence
  ENSG00000116560_0 (sequence is synthesized)
gcctgtgtcatccgccattttgtgagaagcaaggtggcctccacgtttcctgagcgtcttcttcgcttttgcctcgaccgccccttgaccacagacatgtctcgggatcggttccggagt

SEQ ID NO: 216848 - DNA, 120 bp, Artificial Sequence
  ENSG00000116560_1 (sequence is synthesized)
cgtggcggtggcggtggtggcttccacaggcgtggaggaggcggcggccgcggcggcctccacgacttccgttctccgccgcccggcatgggcctcaatcagaatcgcggccccatgggt

SEQ ID NO: 216849 - DNA, 120 bp, Artificial Sequence
  ENSG00000116560_2 (sequence is synthesized)
cctggcccgggccagagcggccctaagcctccgatcccgccaccgcctccacaccaacagcagcaacagccaccaccgcagcagccaccgccgcagcagccgccaccgcatcagccgccg

SEQ ID NO: 216850 - DNA, 120 bp, Artificial Sequence
  ENSG00000116560_3 (sequence is synthesized)
ccgcatccacagccgcatcagcagcagcagccgccgccaccgccgcaggactcttccaagcccgtcgttgctcagggacccggccccgctcccggagtaggcagcgcaccaccagcctcc

SEQ ID NO: 216851 - DNA, 120 bp, Artificial Sequence
  ENSG00000116560_4 (sequence is synthesized)
cggagtaggcagcgcaccaccagcctccagctcggccccgcccgccactccaccaacctcgggggccccgccagggtccgggccaggcccgactccgaccccgccgcctgcagtcacctc

SEQ ID NO: 216852 - DNA, 120 bp, Artificial Sequence
  ENSG00000116560_5 (sequence is synthesized)
ccgccaagcagcggggtccctaccacacctcctcaggccggaggcccgccgcctccgcccgcggcagtcccgggcccgggtccagggcctaagcagggcccaggtccgggtggtcccaaa

SEQ ID NO: 216853 - DNA, 120 bp, Artificial Sequence
  ENSG00000116560_6 (sequence is synthesized)
tccgggtggtcccaaaggcggcaaaatgcctggcgggccgaagccaggtggcggcccgggcctaagtacgcctggcggccaccccaagccgccgcatcgaggcggcggggagccccgcgg

SEQ ID NO: 216854 - DNA, 120 bp, Artificial Sequence
  ENSG00000116560_7 (sequence is synthesized)
ccgccctaccaccagcagcatcaccaggggcccccgcccggcgggcccggcggccgcagcgaggagaagatctcggactcggaggggtttaaagccaatttgtctctcttgaggaggcct

SEQ ID NO: 216855 - DNA, 120 bp, Artificial Sequence
  ENSG00000116560_8 (sequence is synthesized)
ggagagaaaacttacacacagcgatgtcggttgtttgttgggaatctacctgctgatatcacggaggatgaattcaaaagactatttgctaaatatggagaaccaggagaagtttttatc

SEQ ID NO: 216856 - DNA, 120 bp, Artificial Sequence
  ENSG00000116560_9 (sequence is synthesized)
aacaaaggcaaaggattcggatttattaagcttgaatctagagctttggctgaaattgccaaagccgaactggatgatacacccatgagaggtagacagcttcgagttcgctttgccaca

SEQ ID NO: 216857 - DNA, 120 bp, Artificial Sequence
  ENSG00000116560_10 (sequence is synthesized)
catgctgctgccctttctgttcgtaatctttcaccttatgtttccaatgaactgttggaagaagcctttagccaatttggtcctattgaaagggctgttgtaatagtggatgatcgtgga

SEQ ID NO: 216858 - DNA, 120 bp, Artificial Sequence
  ENSG00000116560_11 (sequence is synthesized)
agatctacagggaaaggcattgttgaatttgcttctaagccagcagcaagaaaggcatttgaacgatgcagtgaaggtgttttcttactgacgacaactcctcgtccagtcattgtggaa

SEQ ID NO: 216859 - DNA, 120 bp, Artificial Sequence
  ENSG00000116560_12 (sequence is synthesized)
ccacttgaacaactagatgatgaagatggtcttcctgaaaaacttgcccagaagaatccaatgtatcaaaaggagagagaaacccctcctcgttttgcccagcatggcacgtttgagtac

SEQ ID NO: 216860 - DNA, 120 bp, Artificial Sequence
  ENSG00000116560_13 (sequence is synthesized)
gaatattctcagcgatggaagtctttggatgaaatggaaaaacagcaaagggaacaagttgaaaaaaacatgaaagatgcaaaagacaaattggaaagtgaaatggaagatgcctatcat

SEQ ID NO: 216861 - DNA, 120 bp, Artificial Sequence
  ENSG00000116560_14 (sequence is synthesized)
gaacatcaggcaaatcttttgcgccaagatctgatgagacgacaggaagaattaagacgcatggaagaacttcacaatcaagaaatgcagaaacgtaaagaaatgcaattgaggcaagag

SEQ ID NO: 216862 - DNA, 120 bp, Artificial Sequence
  ENSG00000116560_15 (sequence is synthesized)
ggaagagatgatgattcgtcaacgtgagatggaagaacaaatgaggcgccaaagagaggaaagttacagccgaatgggctacatggatccacgggaaagagacatgcgaatgggtggcgg

SEQ ID NO: 216863 - DNA, 120 bp, Artificial Sequence
  ENSG00000116560_16 (sequence is synthesized)
aggagcaatgaacatgggagatccctatggttcaggaggccagaaatttccacctctaggaggtggtggtggcataggttatgaagctaatcctggcgttccaccagcaaccatgagtgg

SEQ ID NO: 216864 - DNA, 120 bp, Artificial Sequence
  ENSG00000116560_17 (sequence is synthesized)
ttccatgatgggaagtgacatgcgtactgagcgctttgggcagggaggtgcggggcctgtgggtggacagggtcctagaggaatggggcctggaactccagcaggatatggtagagggag

SEQ ID NO: 216865 - DNA, 120 bp, Artificial Sequence
  ENSG00000116560_18 (sequence is synthesized)
agaagagtacgaaggcccaaacaaaaaaccccgattttagatgtgatatttaggctttcattccagtttgttttgtttttttgtttagataccaatcttttaaattcttgcattttagta

SEQ ID NO: 216866 - DNA, 120 bp, Artificial Sequence
  ENSG00000116560_19 (sequence is synthesized)
agaaagctatctttttatggatgttagcagtttattgacctaatatttgtaaatggtctgtttgggcaggtaaaattatgtaatgcagtgtttggaacaggagaatttttttttcctttt

SEQ ID NO: 216867 - DNA, 120 bp, Artificial Sequence
  ENSG00000116560_20 (sequence is synthesized)
tatttctttattttttcttttttactgtataatgtccctcaagtttatggcagtgtaccttgtgccactgaatttccaaagtgtaccaatttttttttttttactgtgcttcaaataaat

SEQ ID NO: 216868 - DNA, 120 bp, Artificial Sequence
  ENSG00000116560_21 (sequence is synthesized)
agaaaaatagttataatattgatcttcaactttgccattcatgcttctatgcatattaggctacgtattccacattgaaagcatgagagtgtctaggcctttgaatggcatatgccattt

SEQ ID NO: 216869 - DNA, 120 bp, Artificial Sequence
  ENSG00000116560_22 (sequence is synthesized)
ctgggaaatgcatctggaggctaagtattgctttctacaaataattgccccctttgttttaaaaagaagaaatgcatattgaagtagtttgatgatttgtttggcatataggaagcacgc

SEQ ID NO: 216870 - DNA, 120 bp, Artificial Sequence
  ENSG00000116560_23 (sequence is synthesized)
tggtgctaagtattttttaaatggttatgtaagcaaagctgaactgtaaatcttcaggaatatgtattaagattgtggaatgggtgtaagacaattggtagggggtgaaagtgggtttga

SEQ ID NO: 216871 - DNA, 120 bp, Artificial Sequence
  ENSG00000116560_24 (sequence is synthesized)
ttaaatggatcttttatggccctatgatctatcctttacttgaaagcttttgaaaagtggaaaggtcattttgttgcatttccccatttcttgtttttaaaagaccaacaaatctcaagc

SEQ ID NO: 216872 - DNA, 120 bp, Artificial Sequence
  ENSG00000116560_25 (sequence is synthesized)
cctataaatggcttgtattgaacttttacatttgaattaaagatgttaaacatgaagtcttttcatgtattcaagtgatttataaagatggggtgtagtctaaaaaacaaaacttgaaag

SEQ ID NO: 216873 - DNA, 89 bp, Artificial Sequence
  ENSG00000116560_26 (sequence is synthesized)
gtttagtactgaagtaggtttagttatatatacatttgtactctgtaacttttacatctccttgtgctacttctgttgggcaaaatcta

SEQ ID NO: 216874 - DNA, 120 bp, Artificial Sequence
  ENSG00000116560_27 (sequence is synthesized)
ttttacatctccttgtgctacttctgttgggcaaaatctataggactataaaaatctattggttctcttctaagagctagtggtgattgttaacaaatagggttgcagataatcattctt

SEQ ID NO: 216875 - DNA, 120 bp, Artificial Sequence
  ENSG00000116560_28 (sequence is synthesized)
attgtaaatttaacttgttttcacatagtttcgttttcatgtagcactaaatctggagaaagttgctcatgctacacagtacaaatatcccttcctcccaccataaaggcttggaatgtt

SEQ ID NO: 216876 - DNA, 120 bp, Artificial Sequence
  ENSG00000116560_29 (sequence is synthesized)
tgttttagtgatgtcagctagtgcagttctcaaatggctgcctattagggaaagaattcagaggatttgactgctcctaatcatctgtcattgctgctagataatgattggcaattttta

SEQ ID NO: 216877 - DNA, 120 bp, Artificial Sequence
  ENSG00000116560_30 (sequence is synthesized)
agactcaactggaaatctcaacagttgctggtaaaccattaaccataaaaacgttgcttttgaacaccagtgctgaaaaaaatatttttttttttttttttgagagtgaaaagggcttgg

SEQ ID NO: 216878 - DNA, 120 bp, Artificial Sequence
  ENSG00000116560_31 (sequence is synthesized)
ggatggtacatgtgcaacagggaactcttacttcatataccctttgcagtaatcattcagggaggaagaaaaacctggaacttgaatgaaggctgatctttgttttgtgcactgtggccc

SEQ ID NO: 216879 - DNA, 120 bp, Artificial Sequence
  ENSG00000116560_32 (sequence is synthesized)
tgccaggcatatagtgaaggtaagaatgattgatgttggctgatattggagtgctcattcacatgaagtggatagatacttctcaagacatcacacagcgtgagtcaatcaaggagggaa

SEQ ID NO: 216880 - DNA, 120 bp, Artificial Sequence
  ENSG00000116560_33 (sequence is synthesized)
gccacaagcagactgacaacgtttctaggatcaggtgagctgtgtccagaaaaccaacgagaaggagtggaaggaggaatgaacgtttcattctcgttaataaaggcattatcctaatta

SEQ ID NO: 216881 - DNA, 120 bp, Artificial Sequence
  ENSG00000116560_34 (sequence is synthesized)
tcctattgttaatcattgtcagctgcagtgacatgatccacagtcctgcatttactgcctttcacttaatgattttggacaggttttagagagccaggatgttggtctgggcctttattt

SEQ ID NO: 216882 - DNA, 120 bp, Artificial Sequence
  ENSG00000116560_35 (sequence is synthesized)
aggacaacaactacagcgttgtgtactgtgggaaggggagttgggcactcttggaggactcctgctgaaggtggtcagcctgcctgacaatggaagacatacttgaatggggagcagggt

SEQ ID NO: 216883 - DNA, 120 bp, Artificial Sequence
  ENSG00000116560_36 (sequence is synthesized)
atgtgctttcatatgaaaaaagagctgatgttaaaactcatttggtgaggtcaacgttgtcacataccttcacataagggatagtatattttgggttgcagtcaaacttgtgctcagact

SEQ ID NO: 216884 - DNA, 120 bp, Artificial Sequence
  ENSG00000116560_37 (sequence is synthesized)
ggtgaaactgagagtcaggcttttacattttaaagaaaatacagttttcattctaattcaggtgtctacttattttatgtaagaataattttagatttcccccccaccatgaagtttctt

SEQ ID NO: 216885 - DNA, 120 bp, Artificial Sequence
  ENSG00000116560_38 (sequence is synthesized)
cctatttttttatgctgtaacttacccccaatctttatctctggatttttactctttaaattttgaagttgactagcattttcaaacctttattttatacccttgtcttttatattaact

SEQ ID NO: 216886 - DNA, 120 bp, Artificial Sequence
  ENSG00000116560_39 (sequence is synthesized)
ttttttgtaatgcgatttaaaatttttaaaaacatgggcttcatgaaaacaccattgttactaacttgggcttagatgggaatctaatgtgaatagttcaagttatgggacttgtctaaa

SEQ ID NO: 216887 - DNA, 120 bp, Artificial Sequence
  ENSG00000116560_40 (sequence is synthesized)
tgtgtctatactctaaacctgggggaaggtggtgtggaacattgacttgactacagtcgaatacatgttgggaatcattcccaatcataagacatcgtcgtttctgtaggatgactgcat

SEQ ID NO: 216888 - DNA, 120 bp, Artificial Sequence
  ENSG00000116560_41 (sequence is synthesized)
atgttcagagtagctttttgaatttggttcccttagctttagggatgtgatgttatagtccaaaatgtttacaagaaaacctaagtcttcaaaagcacaacttttgttgcttaggacttt

SEQ ID NO: 216889 - DNA, 120 bp, Artificial Sequence
  ENSG00000116560_42 (sequence is synthesized)
gcatcaactgttgttccagacctcacttcaacttcttggtctctgaactggttttagctagcatgcatgagagacagttttcatgtataatgtttctgctctgtaactggaaagtggttt

SEQ ID NO: 216890 - DNA, 120 bp, Artificial Sequence
  ENSG00000116560_43 (sequence is synthesized)
actttgcataaatgctgatgaaaacttcatgactatgagacttttcttctgtgtatcaagaaaaagcttgctcgttggcaagcaattcacaaggtggggacagacttgtactttaacatg

SEQ ID NO: 216891 - DNA, 120 bp, Artificial Sequence
  ENSG00000116560_44 (sequence is synthesized)
tagtccattcaagcaaacaactttggactctactgatagatgaaagagcaaatgatgactagtttagcctctgcatatcaacaatataatgcagatcaagtataatgctcaatattagtg

SEQ ID NO: 216892 - DNA, 120 bp, Artificial Sequence
  ENSG00000116560_45 (sequence is synthesized)
acatgagtatcactaaattacatagaaccctgatggggtttcctgtgtcgtaatccattaaatcggtggccagtgcttgctgccgtggtttagtgattgggtgttagaaataaaaactca

SEQ ID NO: 216893 - DNA, 120 bp, Artificial Sequence
  ENSG00000116560_46 (sequence is synthesized)
ggtctatttcttaccagtcagtaacaatttttagagaatgtacttggtatataatatatggacttcaggaactttattggggtggggggttaattttgccttaccctgttcactttcaga

SEQ ID NO: 216894 - DNA, 120 bp, Artificial Sequence
  ENSG00000116560_47 (sequence is synthesized)
tgattaggcttttgcactttagaatgagaaacttgtgacgttagtgtgttcttactagctttaatttgtatgtagcaatgaattgtgaatcttagtgcagtgggtttttttaaaaaactc

SEQ ID NO: 216895 - DNA, 120 bp, Artificial Sequence
  ENSG00000116560_48 (sequence is synthesized)
aaaaagctgggaattaagtggtttcagtaataatgctataccgaggtgcttgcattgtatttcataattttgttacaaaccaaaattatttttaatgagaacagtcttgggttcagaggt

SEQ ID NO: 216896 - DNA, 120 bp, Artificial Sequence
  ENSG00000116560_49 (sequence is synthesized)
gtgatgccagaatgtattttcgtactgttaggcccttggaacagataccggtgctttctgaaagatgaaagaaatgcaatgggtgctcttcatgcaaggttgcaaacctaccaagaatgc

SEQ ID NO: 216897 - DNA, 120 bp, Artificial Sequence
  ENSG00000116560_50 (sequence is synthesized)
aagcagactgacaacgtttctagcaggatcaggtgagctgtgtccagaaaaccaacgagaaggagtggaaggaggaatgaacgtttcattctcgttaataaaggcattatcctaattatc

SEQ ID NO: 216898 - DNA, 120 bp, Artificial Sequence
  ENSG00000116560_51 (sequence is synthesized)
actgcatattgttaagaccccagtgtatttaataggtattttataagcatagcccattggctcatgttagtgaaaccataatcctctttgcttagaacattaaactcataagaagtacta

SEQ ID NO: 216899 - DNA, 120 bp, Artificial Sequence
  ENSG00000116560_52 (sequence is synthesized)
caaaccccaccactctttatagatgtattgtaccactaatataaacagctaaaaaatggggaaattgtaatgttacgcctgtgcaatttttaagtggcatattatggcagattaaaattt

SEQ ID NO: 216900 - DNA, 120 bp, Artificial Sequence
  ENSG00000116560_53 (sequence is synthesized)
ctgctacataactgcatttagccagcatttctgcagtgcgtaactgtgaggaacgtagtaccgcaaatggcaatggacattaggacccggatgtagtattcctgcttgctccaagattct

SEQ ID NO: 216901 - DNA, 120 bp, Artificial Sequence
  ENSG00000116560_54 (sequence is synthesized)
acgtttctaggtaagttaaatgattcttagtctgttaaactgtcttcagaaaggcccttgggtggtacaaaaataacaatactaatgtgggaaccattaattttttattttttgagatgg

SEQ ID NO: 216902 - DNA, 120 bp, Artificial Sequence
  ENSG00000116560_55 (sequence is synthesized)
tttttacttaagaaaatgtaggagaaggtcaggcatggtggctttacacctatattcctagcactttgggaggcagaagtgggaggattgcttgagcccagcctgggcaaaatagtgaga

SEQ ID NO: 216903 - DNA, 120 bp, Artificial Sequence
  ENSG00000116560_56 (sequence is synthesized)
agggatcgcttgatcctgggaggttgaggctgcagtgagcaagttaacattttttgttacaggtggatagatacttctcaagacatcacacagcgtgagtcaatcaaggagggaagccac

SEQ ID NO: 216904 - DNA, 120 bp, Artificial Sequence
  ENSG00000116574_0 (sequence is synthesized)
agagcgcttgggatccacggcgctcggaccgctgtcctccaacagcgcagggcagagcggctggcgccgccggagcgcggagccacgaccctccctggccgcctttgtctactggccgtg

SEQ ID NO: 216905 - DNA, 120 bp, Artificial Sequence
  ENSG00000116574_1 (sequence is synthesized)
cgtgcggcccggaaccgccactctccagggccggggacgcgcccgcagctgtcggtgacagctcctccctaccgcaaccctccggggcggaggggcggtcgggccgggccctgctagccc

SEQ ID NO: 216906 - DNA, 80 bp, Artificial Sequence
  ENSG00000116574_2 (sequence is synthesized)
ccgcaagcccgcgctcgcggatcgatgcccccgcagcagggggaccccgcgttccccgaccgctgcgaggcgcctccggt

SEQ ID NO: 216907 - DNA, 120 bp, Artificial Sequence
  ENSG00000116574_3 (sequence is synthesized)
cctggggagccggggggccgggggcgtgcggggggtgccgaggggcgcggcgtcaagtgcgtgctggtcggcgacggcgcggtgggcaagacgagcctggtggtgagctacaccaccaac

SEQ ID NO: 216908 - DNA, 120 bp, Artificial Sequence
  ENSG00000116574_4 (sequence is synthesized)
ggctaccccaccgagtacatccctactgccttcgacaacttctccgcggtggtgtctgtggatgggcggcccgtgagactccaactctgtgacactgccggacaggatgaatttgacaag

SEQ ID NO: 216909 - DNA, 120 bp, Artificial Sequence
  ENSG00000116574_5 (sequence is synthesized)
ctgaggcctctctgctacaccaacacagacatcttcctgctctgcttcagtgtcgtgagcccctcatccttccagaacgtcagtgagaaatgggtgccggagattcgatgccactgtccc

SEQ ID NO: 216910 - DNA, 120 bp, Artificial Sequence
  ENSG00000116574_6 (sequence is synthesized)
aaagcccccatcatcctagttggaacgcagtcggatctcagagaagatgtcaaagtcctcattgagttggacaaatgcaaagaaaagccagtgcctgaagaggcggctaagctgtgcgcc

SEQ ID NO: 216911 - DNA, 120 bp, Artificial Sequence
  ENSG00000116574_7 (sequence is synthesized)
gaggaaatcaaagccgcctcctacatcgagtgttcagccttgactcaaaaaaacctcaaagaggtctttgatgcagccatcgtcgctggcattcaatactcggacactcagcaacagcca

SEQ ID NO: 216912 - DNA, 120 bp, Artificial Sequence
  ENSG00000116574_8 (sequence is synthesized)
aagaagtctaaaagcaggactccagataaaatgaaaaacctctccaagtcctggtggaagaagtactgctgtttcgtatgatgctggcaagacacccagaaaggctattttcagatgaaa

SEQ ID NO: 216913 - DNA, 120 bp, Artificial Sequence
  ENSG00000116574_9 (sequence is synthesized)
tcgatattagaagctatattagctgaaacaactccttttactgcgtagaacctatatcgagagtgtgtgtatatgtattataggaggagctctcaattttatgtattctttctgccttta

SEQ ID NO: 216914 - DNA, 120 bp, Artificial Sequence
  ENSG00000116574_10 (sequence is synthesized)
attttcttgtttgtttgagcttagggatgagatacttatgcaagatatttttgaagtaaattaaacatttttcacatctctggaaatttagagttctagacctctggttaatttatatct

SEQ ID NO: 216915 - DNA, 120 bp, Artificial Sequence
  ENSG00000116574_11 (sequence is synthesized)
aatatgaagaagacacctctaatctggatgttaagaatgaagttctgctacattataatgtacagaagagcaaaagggaggaacactatggttaaccctctcttgattaagggctactta

SEQ ID NO: 216916 - DNA, 120 bp, Artificial Sequence
  ENSG00000116574_12 (sequence is synthesized)
atgcacagtgcattatgtacacaggtcaaccatggtaacaatagttcttagctttgaaactccatgcaaaccatgccttttttttaaggagcaaaaatctgagaaaaaaagtgagagacc

SEQ ID NO: 216917 - DNA, 120 bp, Artificial Sequence
  ENSG00000116574_13 (sequence is synthesized)
tctgcctacaaaacctcaaaccagtcacttttgtcaattgctaatacccagttacttatgatttaaaaacaaccaacagaaaacatcccactgactgtatggcactctgtagtcaaaaaa

SEQ ID NO: 216918 - DNA, 120 bp, Artificial Sequence
  ENSG00000116574_14 (sequence is synthesized)
ggaaacttccttattgggacttttctttcttagtccagttgtgttgacacatatgaacacagacaaagtgctatgcggaggaaagcaagtgttggtcagtagtttcatgttttagggagt

SEQ ID NO: 216919 - DNA, 120 bp, Artificial Sequence
  ENSG00000116574_15 (sequence is synthesized)
ggttcctgtggagatcagaaagtgacatttgctttcggtactgtaatacgtgcaccaaactgcctcaatcctaggtaacgagggcaacagggagcacctgtctggattgtttttaaacct

SEQ ID NO: 216920 - DNA, 120 bp, Artificial Sequence
  ENSG00000116574_16 (sequence is synthesized)
ctcaagctgtctcttcggcagggaggtgaatactcttgaaaggccaacagcaagtgtttgtgggacacaacacagataattttttcttaagtcggccaagatgtacttctctgtgtgcac

SEQ ID NO: 216921 - DNA, 120 bp, Artificial Sequence
  ENSG00000116574_17 (sequence is synthesized)
acccatgcacactcatgcacacagatacataggtctgtatggctgtatttgctgttgattcagactttcacaccattaatggggaaaagcgtggccacaaaaacagatgctaggaagctt

SEQ ID NO: 216922 - DNA, 120 bp, Artificial Sequence
  ENSG00000116574_18 (sequence is synthesized)
ggcttcctcttcttgttgacccttttttgaaccaacatcttttttattatattcagagtatgtttttaagtgtatcttaatatatacattttttaggacatcttaaatctaaacaaaaaa

SEQ ID NO: 216923 - DNA, 120 bp, Artificial Sequence
  ENSG00000116574_19 (sequence is synthesized)
taaaatgaacatctcttgaaacctgttaaaacaaccagttaaagccacagatggctttcagggcagtagcagcagaggccagtggactctgaggactcctgaggggcggggcgtgtagcc

SEQ ID NO: 216924 - DNA, 120 bp, Artificial Sequence
  ENSG00000116574_20 (sequence is synthesized)
agccaggtgcatgccgggaccatggcccccatacttggctgcttcctgtgacagtgaaatacatccttcaaggtggcagctgttagggctgaatcttctggagaaaaaggtgccatctca

SEQ ID NO: 216925 - DNA, 120 bp, Artificial Sequence
  ENSG00000116574_21 (sequence is synthesized)
ggagaatagcttttactctggtaggaatgcttccgagacaccacaaggcagcctgaacactcagttgcagggtcgggcttgcggtgggtgacccagagccaccaaagtcacatccacaac

SEQ ID NO: 216926 - DNA, 120 bp, Artificial Sequence
  ENSG00000116574_22 (sequence is synthesized)
taatgagggaaatctgtaaagccagttagatagaagaattttatttttctgtgggttttgtgttgtcttttttatgttaaaaagaaatccagtttgtgtttttctatagaaaaagtaaaa

SEQ ID NO: 216927 - DNA, 120 bp, Artificial Sequence
  ENSG00000116574_23 (sequence is synthesized)
gatcaggttatactttaggttaggggttctatttattcctgttagtaaataaaattaacaaatttctttgtttaacaaaagattaatctttaaaccactaaaatacatagactgattgat

SEQ ID NO: 216928 - DNA, 120 bp, Artificial Sequence
  ENSG00000116574_24 (sequence is synthesized)
tattcaacacattggaattgatgtcggtcatagtttcctgaagcatttagttacaacctgaaggaataaaatgatttgtggaaatgcttaaaatagacctaactgaatacagtctcatct

SEQ ID NO: 216929 - DNA, 120 bp, Artificial Sequence
  ENSG00000116574_25 (sequence is synthesized)
tgccgcgcctggcttacctatctgtggaaagctaggcttcccaggctgggctctgcctgtctggtgcctggaggtgtgggagggaagatgagttatttaactggtaagcgatttgaaaca

SEQ ID NO: 216930 - DNA, 120 bp, Artificial Sequence
  ENSG00000116574_26 (sequence is synthesized)
ctatttttatattaaagtaaatggcatggagtatagtgcaaattcatttttaagatagaacacaaaacttgaaagaagttttatgcgtgtgacagtgtatggggctgcagttggtctccc

SEQ ID NO: 216931 - DNA, 120 bp, Artificial Sequence
  ENSG00000116574_27 (sequence is synthesized)
tggaggggacttccacacctcctgcctttaggccatgggtggaaagtgctcagtgaagtacacctgtgtggcccagttctgaaagctttatacagttgaattttaagtggggttgataac

SEQ ID NO: 216932 - DNA, 120 bp, Artificial Sequence
  ENSG00000116574_28 (sequence is synthesized)
accttggactgttagtgttaaaaatctagtgggttgacctttaaatgcaacagtttttaaaatatattgctgcattttatagaatagtaaaggtacgattatacttgagattttcctcca

SEQ ID NO: 216933 - DNA, 120 bp, Artificial Sequence
  ENSG00000116574_29 (sequence is synthesized)
tttttatttcttcgtgaacatagagtttggggccgaaaatgtttttaaagtatgtgtttgagttaaatataaagttggttcacttcaaagctaaaaaattgttaaacttgcagcttggta

SEQ ID NO: 216934 - DNA, 120 bp, Artificial Sequence
  ENSG00000116574_30 (sequence is synthesized)
ttgcagagaagattttataagaattttgctttagagaatgccactttggctgaactacaagtgtaggccaccattataatttataaatacagcatacttcaaaactgtttgttatctctt

SEQ ID NO: 216935 - DNA, 120 bp, Artificial Sequence
  ENSG00000116574_31 (sequence is synthesized)
gttaccatgtatgtataaatggaccttttataaccttgttctctgcttgacagactcaagagaaactacccaggtattacacaagccaaaatgggagcaaggccttctctccagactatc

SEQ ID NO: 216936 - DNA, 120 bp, Artificial Sequence
  ENSG00000116574_32 (sequence is synthesized)
gtaacctggtgccttaccaagttgtgcttttctgttttcaagtgtaaatgatgttgagcagaatgttgtacttgaaaatgctataagtgagatggtatgaaataaattctgacttatgaa

SEQ ID NO: 216937 - DNA, 120 bp, Artificial Sequence
  ENSG00000116580_0 (sequence is synthesized)
tggcgcatagtgttaggcgcatgctccttgatgcactgcggcgcggcgctccgaggctcggggacgcgcacgcaattcgctgttgttggctgacttccggtggtgccaaagccgtttccg

SEQ ID NO: 216938 - DNA, 120 bp, Artificial Sequence
  ENSG00000116580_1 (sequence is synthesized)
tggaatcaggccggctgaatggaacaaaagtgggacttttaaaatgttgccctgtaagaagagaagaactacagtgacagagtccctacagcataaaggcaatcaagaggaaaacaacgt

SEQ ID NO: 216939 - DNA, 120 bp, Artificial Sequence
  ENSG00000116580_2 (sequence is synthesized)
agacctagaatcagccgttaaaccagaatctgaccaggttaaggacttgagttcggtgtcactatcctgggatccaagtcatggcagagtagctggcttcgaagtacagtctttgcagga

SEQ ID NO: 216940 - DNA, 120 bp, Artificial Sequence
  ENSG00000116580_3 (sequence is synthesized)
tgcaggaaatcagcttggtatggaggatacatctctgagctctggaatgctcacccagaacacaaatgtaccaattctagaaggtgttgatgtggccatctctcagggaatcaccctacc

SEQ ID NO: 216941 - DNA, 120 bp, Artificial Sequence
  ENSG00000116580_4 (sequence is synthesized)
ttccttggagtcttttcacccccttaatatacacattggtaaaggaaaactccacgctactggctcaaagagagggaaaaaaatgacactcaggcctgggccagttacccaagaagacag

SEQ ID NO: 216942 - DNA, 120 bp, Artificial Sequence
  ENSG00000116580_5 (sequence is synthesized)
atgtgatcatcttaccctaaaggagcctttttcaggagagcctagtgaagaagtcaaggaagaaggagggaaacctcaaatgaattctgaaggggagataccttccctgccatcaggcag

SEQ ID NO: 216943 - DNA, 120 bp, Artificial Sequence
  ENSG00000116580_6 (sequence is synthesized)
ccaatctgcaaaaccagtaagccagcccaggaaatcaacccagccagatgtttgtgcctctcctcaagaaaagccactcaggactctgtttcaccaacctgaggaagagatagaagatgg

SEQ ID NO: 216944 - DNA, 120 bp, Artificial Sequence
  ENSG00000116580_7 (sequence is synthesized)
tggactcttcattccaatggaagaacaagacaatgaagaaagtgagaaaaggagaaaaaagaaaaagggtaccaagaggaaacgagatggaaggggtcaagaagggaccttggcatatga

SEQ ID NO: 216945 - DNA, 120 bp, Artificial Sequence
  ENSG00000116580_8 (sequence is synthesized)
cctgaaactggatgacatgcttgaccgtaccttggaggatggtgccaagcagcacaatctaacagcagtcaatgtccgaaacatccttcatgaagtaatcacaaatgaacacgtggtagc

SEQ ID NO: 216946 - DNA, 120 bp, Artificial Sequence
  ENSG00000116580_9 (sequence is synthesized)
tatgatgaaagcagccatcagtgagacggaagatatgccaatgtttgagcctaaaatgacacgctctaaactgaaggaagtagtggaaaaaggagtggtaattccaacatggaatatttc

SEQ ID NO: 216947 - DNA, 120 bp, Artificial Sequence
  ENSG00000116580_10 (sequence is synthesized)
accaattaagaaggccaatgaaattaagcctcctcagtttgtggatatccaccttgaagaagatgattcctcagatgaagaataccagccggatgatgaagaagaagatgaaactgctga

SEQ ID NO: 216948 - DNA, 120 bp, Artificial Sequence
  ENSG00000116580_11 (sequence is synthesized)
agagagcttattggaaagtgatgttgaaagcactgcttcatctccacgtggggcaaagaaatccagattgaggcagtcttctgagatgactgaaacagatgaggagagtggcatattatc

SEQ ID NO: 216949 - DNA, 120 bp, Artificial Sequence
  ENSG00000116580_12 (sequence is synthesized)
agaggctgagaaagtcaccacaccagccatcaggcacatcagtgctgaggtagtgcccatggggcccccgccccctccaaagccgaaacagaccagagatagtactttcatggagaagtt

SEQ ID NO: 216950 - DNA, 120 bp, Artificial Sequence
  ENSG00000116580_13 (sequence is synthesized)
acatgcggtagatgaggagctggcttccagtccagtctgcatggattctttccagcccatggatgacagtctcattgcatttcgaacgcgttctaagatgcccctgaaagatgttcccct

SEQ ID NO: 216951 - DNA, 120 bp, Artificial Sequence
  ENSG00000116580_14 (sequence is synthesized)
gggccaattagaggcagagctccaagctccagacatcactccagatatgtatgaccccaatacggcagatgatgaggactggaagatgtggctggggggacttatgaatgatgatgtggg

SEQ ID NO: 216952 - DNA, 120 bp, Artificial Sequence
  ENSG00000116580_15 (sequence is synthesized)
gaatgaagatgaagcagatgatgatgatgatccagaatataatttcctggaagacctcgatgaaccagacacagaggatttccggactgaccgggcagtgagaatcaccaaaaaggaagt

SEQ ID NO: 216953 - DNA, 120 bp, Artificial Sequence
  ENSG00000116580_16 (sequence is synthesized)
aaatgagctgatggaagagctgtttgaaactttccaagatgagatgggattctccaacatggaagatgatggcccagaagaggaggagtgtgtagctgagcctcgtcctaactttaacac

SEQ ID NO: 216954 - DNA, 120 bp, Artificial Sequence
  ENSG00000116580_17 (sequence is synthesized)
ccctcaagctctacggtttgaggaaccactggccaacctgttaaatgaacaacatcggacagtgaaggagctatttgaacagctgaagatgaagaaatcttcagccaaacagctgcagga

SEQ ID NO: 216955 - DNA, 120 bp, Artificial Sequence
  ENSG00000116580_18 (sequence is synthesized)
agtagagaaggttaaaccccagagtgagaaagttcatcagactctgattctggacccagcacagaggaagagactccagcagcagatgcagcagcacgttcagctcttgacccaaatcca

SEQ ID NO: 216956 - DNA, 120 bp, Artificial Sequence
  ENSG00000116580_19 (sequence is synthesized)
ccttcttgccacctgcaaccccaacctcaatccggaggccactaccaccaggatatttcttaaagagctgggaacctttgctcaaagctccatcgcccttcaccatcagtacaaccccaa

SEQ ID NO: 216957 - DNA, 120 bp, Artificial Sequence
  ENSG00000116580_20 (sequence is synthesized)
gtttcagaccctgttccaaccctgtaacttgatgggagctatgcagctgattgaagacttcagcacacatgtcagcattgactgcagccctcataaaactgtcaagaagactgcgaatga

SEQ ID NO: 216958 - DNA, 120 bp, Artificial Sequence
  ENSG00000116580_21 (sequence is synthesized)
atttccctgtttgccaaagcaagtggcttggattctggccacaagcaaggttttcatgtatccagagttacttccagtgtgttccctgaaggcaaagaatccccaggataagatcgtctt

SEQ ID NO: 216959 - DNA, 120 bp, Artificial Sequence
  ENSG00000116580_22 (sequence is synthesized)
caccaaggctgaggacaatttgttagctttaggactgaagcattttgaaggaactgagtttcctaatcctctaatcagcaagtaccttctaacctgcaaaactgcccaccaactgacagt

SEQ ID NO: 216960 - DNA, 120 bp, Artificial Sequence
  ENSG00000116580_23 (sequence is synthesized)
gagaatcaagaacctcaacatgaacagagctcctgacaacatcattaaattttataagaagaccaaacagctgccagtcctaggaaaatgctgtgaagagatccagccacatcagtggaa

SEQ ID NO: 216961 - DNA, 120 bp, Artificial Sequence
  ENSG00000116580_24 (sequence is synthesized)
gccacctatagagagagaagaacaccggctcccattctggttaaaggccagtctgccatccatccaggaagaactgcggcacatggctgatggtgctagagaggtaggaaatatgactgg

SEQ ID NO: 216962 - DNA, 120 bp, Artificial Sequence
  ENSG00000116580_25 (sequence is synthesized)
aaccactgagatcaactcagatcgaagcctagaaaaagacaatttggagttggggagtgaatctcggtacccactgctattgcctaagggtgtagtcctgaaactgaagccagttgccac

SEQ ID NO: 216963 - DNA, 120 bp, Artificial Sequence
  ENSG00000116580_26 (sequence is synthesized)
ccgtttccccaggaaggcttggagacagaagcgttcatcagtcctgaagcccctccttatccaacccagcccctctctccagcccagcttcaaccctgggaaaacaccagcccgatcaac

SEQ ID NO: 216964 - DNA, 120 bp, Artificial Sequence
  ENSG00000116580_27 (sequence is synthesized)
tcattcagaagcccctccgagcaaaatggtgctccggattcctcacccaatacagccagccactgttttacagacagttccaggtgtccctccactgggggtcagtggaggtgagagttt

SEQ ID NO: 216965 - DNA, 120 bp, Artificial Sequence
  ENSG00000116580_28 (sequence is synthesized)
tgagtctcctgcagcactgcctgctgtgccccctgaggccaggacaagcttccctctgtctgagtcccagactttgctctcttctgcccctgtgcccaaggtaatgctgccctcccttgc

SEQ ID NO: 216966 - DNA, 120 bp, Artificial Sequence
  ENSG00000116580_29 (sequence is synthesized)
aaggcctctccctgtatgaaacctgcccctgttatccaccaccctgcatctgttatcttcactgttcctgctaccactgtgaagattgtgagccttggcggtggctgtaacatgatccag

SEQ ID NO: 216967 - DNA, 120 bp, Artificial Sequence
  ENSG00000116580_30 (sequence is synthesized)
cctgtcaatgcggctgtggcccagagtccccagactattcccatcactaccctcttggttaaccctacttccttcccctgtccattgaaccagtcccttgtggcctcctctgtctcaccc

SEQ ID NO: 216968 - DNA, 120 bp, Artificial Sequence
  ENSG00000116580_31 (sequence is synthesized)
ttaattgtttctggcaattctgtgaatcttcctataccatccacccctgaagataaggcccacgtgaatgtggacattgcttgtgctgtggctgatggggaaaatgcctttcagggccta

SEQ ID NO: 216969 - DNA, 120 bp, Artificial Sequence
  ENSG00000116580_32 (sequence is synthesized)
gaacccaaattagagccccaggaactatctcctctctctgctactgttttcccgaaagtggaacatagcccagggcctccactagcagatgcagagtgccaagaaggattgtcagagaat

SEQ ID NO: 216970 - DNA, 120 bp, Artificial Sequence
  ENSG00000116580_33 (sequence is synthesized)
agtgcctgtcgctggaccgttgtgaaaacagaggaggggaggcaagctctggagccgctccctcagggcatccaggagtctctaaacaaccctacccctggggatttagaggaaattgtc

SEQ ID NO: 216971 - DNA, 120 bp, Artificial Sequence
  ENSG00000116580_34 (sequence is synthesized)
aagatggaacctgaagaagctagagaggaaatcagtggatcccctgagcgtgatatttgtgatgacatcaaagtggaacatgctgtggaattggacactggtgccccaagcgaggagttg

SEQ ID NO: 216972 - DNA, 120 bp, Artificial Sequence
  ENSG00000116580_35 (sequence is synthesized)
agcagtgctggagaagtaacgaaacagacagtcttacagaaggaagaggagaggagtcagccaactaaaaccccttcatcttctcaagagccccctgatgaaggaacctcagggacagat

SEQ ID NO: 216973 - DNA, 120 bp, Artificial Sequence
  ENSG00000116580_36 (sequence is synthesized)
gtgaacaaaggatcatcaaagaatgctttgtcctcaatggatcctgaagtgaggcttagtagccccccagggaagccagaagattcatccagtgttgatggtcagtcagtggggactcca

SEQ ID NO: 216974 - DNA, 120 bp, Artificial Sequence
  ENSG00000116580_37 (sequence is synthesized)
gttgggccagaaactggaggagagaagaatgggccagaagaagaggaagaagaggactttgatgacctcacccaagatgaggaagatgaaatgtcatcagcttctgaggaatctgtgctt

SEQ ID NO: 216975 - DNA, 120 bp, Artificial Sequence
  ENSG00000116580_38 (sequence is synthesized)
tctgtcccagaactccaggaaacaatggagaaactgacttggctggcatctgaaaggcgcatgagtcaggagggtgagtctgaagaagagaattctcaggaggagaactctgagccagaa

SEQ ID NO: 216976 - DNA, 120 bp, Artificial Sequence
  ENSG00000116580_39 (sequence is synthesized)
gaagaggaggaagaagaagcagaaggaatggaaagcctgcagaaagaggatgaaatgacggatgaagcagttggagactctgctgagaagcctcctacttttgcttcacctgagactgct

SEQ ID NO: 216977 - DNA, 120 bp, Artificial Sequence
  ENSG00000116580_40 (sequence is synthesized)
ccagaagtggagaccagcagaactccaccaggagagagcatcaaagctgctggaaaaggccggaacaatcatcgagctcgcaacaagcggggaagtcgggctcgggccagcaaggacacc

SEQ ID NO: 216978 - DNA, 120 bp, Artificial Sequence
  ENSG00000116580_41 (sequence is synthesized)
tccaagctgctgttgctgtatgatgaggacattctcgagcgagatccactcagggagcagaaggacttggcctttgcccaagcttatctgaccagggtgcgagaagccctacaacatatc

SEQ ID NO: 216979 - DNA, 120 bp, Artificial Sequence
  ENSG00000116580_42 (sequence is synthesized)
cctggcaagtatgaagacttccttcaagtcatctatgaatttgagtcaagtacccagagacggacggctgtagatctctacaaaagcctgcaaattctgctccaagactggcctcagctg

SEQ ID NO: 216980 - DNA, 120 bp, Artificial Sequence
  ENSG00000116580_43 (sequence is synthesized)
ttgaaagactttgctgctttcctgttacctgagcaagctctggcctgtggattatttgaggagcagcaggcttttgagaagagccgcaagttccttcggcagctggagatttgctttgca

SEQ ID NO: 216981 - DNA, 120 bp, Artificial Sequence
  ENSG00000116580_44 (sequence is synthesized)
gagaacccctcacaccaccagaagattatcaaggtcctccaaggctgtgcagactgccttccccaggagatcaccgagctcaagacacagatgtggcagctcctcaagggccacgaccac

SEQ ID NO: 216982 - DNA, 120 bp, Artificial Sequence
  ENSG00000116580_45 (sequence is synthesized)
ctgcaggatgagttttctatcttctttgaccacttgcgcccagcagctagccggatgggtgactttgaagagatcaattggactgaggaaaaggagtatgagtttgatggctttgaagaa

SEQ ID NO: 216983 - DNA, 120 bp, Artificial Sequence
  ENSG00000116580_46 (sequence is synthesized)
gtggccctgcctgatgtggaagaagaggaggagcctcccaagatacccacagcctcaaagaacaagaggaaaaaagagatcggggtccaaaatcatgataaggagactgaatggccagat

SEQ ID NO: 216984 - DNA, 120 bp, Artificial Sequence
  ENSG00000116580_47 (sequence is synthesized)
ggggccaaggactgtgcctgctcctgccatgaaggaggtccagattccaagctgaagaagagcaaaaggcggagctgtagccactgtagcagcaaggtctgtgacagcaaatcctacaag

SEQ ID NO: 216985 - DNA, 120 bp, Artificial Sequence
  ENSG00000116580_48 (sequence is synthesized)
agcaaggagccccatgagttggtgggcagcagcccccaccgagaggctagtcctatgcctggtgctaaggaagctgggcagggcaaggatatgatggaagaggaagccccagaggagcgg

SEQ ID NO: 216986 - DNA, 120 bp, Artificial Sequence
  ENSG00000116580_49 (sequence is synthesized)
gagagcactgaggccacccagagcaggactgtcaggaccaccagaaagggagagatgcctgtttcaggattggcagtggggagcactttgccatcccctcgagaagtgactgttacagaa

SEQ ID NO: 216987 - DNA, 120 bp, Artificial Sequence
  ENSG00000116580_50 (sequence is synthesized)
cggctcctcctggatggcccaccacctcattcaccagagactcctcaatttccccccacaactggagctgtactgtacactgttaagagaaaccaggttgggcctgaggttcgctcctgc

SEQ ID NO: 216988 - DNA, 120 bp, Artificial Sequence
  ENSG00000116580_51 (sequence is synthesized)
cccaaggcatcccccagacttcagaaagagagggagggccaaaaggcagtgagtgagtcagaggctttgatgctggtctgggatgcatcagaaactgagaaattgcctggtaccgtggaa

SEQ ID NO: 216989 - DNA, 120 bp, Artificial Sequence
  ENSG00000116580_52 (sequence is synthesized)
ccccctgcttccttcctgagtcctgtttcctcaaagaccagagatgcagggagaagacatgtgtccgggaaaccagacactcaagagagatggctgccctcaagcagagctcgggtgaag

SEQ ID NO: 216990 - DNA, 120 bp, Artificial Sequence
  ENSG00000116580_53 (sequence is synthesized)
acaagagacaggacgtgccctgtccatgaatctccatcaggaattgacacctcagagacttctcccaaagcccctagagggggtttggctaaagacagtggaacacaggccaagggtcca

SEQ ID NO: 216991 - DNA, 120 bp, Artificial Sequence
  ENSG00000116580_54 (sequence is synthesized)
gagggggagcagcagccaaaggccgcagaagctacggtgtgtgccaacaacagcaaggtcagctccactggggaaaaggttgtcctgtggacaagggaagctgaccgtgtgatcctcacc

SEQ ID NO: 216992 - DNA, 120 bp, Artificial Sequence
  ENSG00000116580_55 (sequence is synthesized)
atgtgccaggagcaaggggcacagccacagaccttcaacatcatctcccagcagctgggaaataagacccctgctgaggtttcccaccgttttcgagaactcatgcagctcttccacact

SEQ ID NO: 216993 - DNA, 120 bp, Artificial Sequence
  ENSG00000116580_56 (sequence is synthesized)
gcctgtgaagccagctctgaggatgaggatgatgcaaccagtaccagcaatgcagaccagctgtctgaccatggggaccttctgtctgaagaggagctggatgaatgagactctgggaat

SEQ ID NO: 216994 - DNA, 120 bp, Artificial Sequence
  ENSG00000116580_57 (sequence is synthesized)
catctacacaggaccaaacccaacaggcgccctggcaccggggagggggtagttgtactctgcttgtacagtccttgagcccagtttacagatctggagagcaggaggccaggacaagga

SEQ ID NO: 216995 - DNA, 120 bp, Artificial Sequence
  ENSG00000116580_58 (sequence is synthesized)
caaaggctggaggatggagtaggacccaggggctctgccatcctaggcatcattcaaggtcttttatgaagactttacagatgtcctctgtaaatagcatcgagagtggagttcagctcc

SEQ ID NO: 216996 - DNA, 120 bp, Artificial Sequence
  ENSG00000116580_59 (sequence is synthesized)
ttggtctgatggcacatatttattgttctgtggtctaatcacagtgtttctaaatgtaaaaagtgcatatgttggtgtagctagtcccgcgacattgagctcctctgcatgaagacactg

SEQ ID NO: 216997 - DNA, 120 bp, Artificial Sequence
  ENSG00000116580_60 (sequence is synthesized)
ggctcctgcatccagctgtttttattgcaaactagctcctttctcccacactgggaactttagtccacgaggctgtcaccaccctggtagcactgggccaggctttgtagctcctgcagc

SEQ ID NO: 216998 - DNA, 120 bp, Artificial Sequence
  ENSG00000116580_61 (sequence is synthesized)
agctctgctacgtcatcgtgctccactccagcatccatgaagctggcccagcgccgcaagtcgagtttggtgaggtctctggccaaggcttccagggtctggtgcagggacgaagaggaa

SEQ ID NO: 216999 - DNA, 120 bp, Artificial Sequence
  ENSG00000116580_62 (sequence is synthesized)
cacagtgccccaaacactgggatgctctccactgctgtggagggagaggaaacagagacctgtagatggatgattattctgccctgggactcgccaaactgataaggaagtccaacctta

SEQ ID NO: 217000 - DNA, 120 bp, Artificial Sequence
  ENSG00000116580_63 (sequence is synthesized)
gtagacttgattgtaaactcaacaaatttggtgtattgtccccttagtacaccagtactccagaggaagaatgcttttcttgggagccatagggtgaataaaggaatgtttaactgtgga

SEQ ID NO: 217001 - DNA, 120 bp, Artificial Sequence
  ENSG00000116580_64 (sequence is synthesized)
tgtgagtaatgatcctcgagtgagaacacgggattttaagtcagttctccagcaagatgtgtcatttggtctctgtgatgctccctctaggagagggggtctgactgaaccaattctcct

SEQ ID NO: 217002 - DNA, 120 bp, Artificial Sequence
  ENSG00000116580_65 (sequence is synthesized)
tttagtctacctgggaaagaatataatgacaagggaattttgctaactactagactcttgattatatacatgtatgttgttcttattaacattttccttgaaacttctttttgtttgagg

SEQ ID NO: 217003 - DNA, 120 bp, Artificial Sequence
  ENSG00000116580_66 (sequence is synthesized)
gggttcttgctccatcacccaagccagagtgcagtggtgaaattacagctcacagcagccttgaccttctaggctcaagcagtccttcgtctaagcctcctgagtagctgggacatacca

SEQ ID NO: 217004 - DNA, 120 bp, Artificial Sequence
  ENSG00000116580_67 (sequence is synthesized)
acacacccagctaattattttatttgtagagacagggtcttaccacattgctcaggttgttctggaacttctgggctcaagcaattttcctgccttgggcctcccagtgctggaattata

SEQ ID NO: 217005 - DNA, 120 bp, Artificial Sequence
  ENSG00000116580_68 (sequence is synthesized)
ggtgtgagccagcatgcctggcccctggaaaacttttgatgacttcccctactgtcatttggtgtgtccttaaagattgtcaactagttttaaactactttgtgtacaaataattacctt

SEQ ID NO: 217006 - DNA, 120 bp, Artificial Sequence
  ENSG00000116580_69 (sequence is synthesized)
caactagttttaaactactttgtgtacaaataattacctttttcataaatttgtttcaaaagatttttcattttaagagattgatcattttgaggctgggtgcagtggctcacgcttgta

SEQ ID NO: 217007 - DNA, 62 bp, Artificial Sequence
  ENSG00000116580_70 (sequence is synthesized)
gcatggtggcgggcacctgtagtcacggttactgcagaggctgaggcaggaaaattgcttga

SEQ ID NO: 217008 - DNA, 120 bp, Artificial Sequence
  ENSG00000116580_71 (sequence is synthesized)
gaactaggactttagaaatcttcctgattcacctttcttcccttacttttctgcccttctctgggtgattctacagcattttcaaaataataggtaaaataataatttgctaaaggaaat

SEQ ID NO: 217009 - DNA, 120 bp, Artificial Sequence
  ENSG00000116580_72 (sequence is synthesized)
tcacagaagtttctaaagtgtataattagaatgtggtctttgtagatttgatatgcagagagacccttcttggaaagatgccttgagactgtctaaggtctctaaaacctagaaagccct

SEQ ID NO: 217010 - DNA, 120 bp, Artificial Sequence
  ENSG00000116580_73 (sequence is synthesized)
gtctcataattcactgcaacctacaattcctggccttaaatgatcctgctgcttcagccttctaaagtgctgggcttacagggaaacctcaaatgaattctgaaggggagataccttccc

SEQ ID NO: 217011 - DNA, 120 bp, Artificial Sequence
  ENSG00000116580_74 (sequence is synthesized)
agtcctaaaatcatttgtatttgatttgtgaatgcattatgggacatgattgtggagttgaggtgaaatgagatggaaaggatgaaattttacttattatattaaactcgtttacacatt

SEQ ID NO: 217012 - DNA, 120 bp, Artificial Sequence
  ENSG00000116580_75 (sequence is synthesized)
ttatattaaactcgtttacacattaaattgaatcacctgaccatactttaaatgccttaaaaaatagtaataggctgggcttggtggctcactcctgtagtcccagcactttgggaggct

SEQ ID NO: 217013 - DNA, 77 bp, Artificial Sequence
  ENSG00000116580_76 (sequence is synthesized)
gggaggctgaggtgggtggatcacaaggccaggagtttcagactggcctggccgacgtggtaaaaccccatctatat

SEQ ID NO: 217014 - DNA, 120 bp, Artificial Sequence
  ENSG00000116580_77 (sequence is synthesized)
gagccactacgcctggcctaaaatcatgataaggtatgccaagttattgaaaattatctatgtttcatgaatcaagccttgcgttttctcactgaacatttctgtggcttactatggccc

SEQ ID NO: 217015 - DNA, 120 bp, Artificial Sequence
  ENSG00000116580_78 (sequence is synthesized)
aaaaaaaaaaaaaaaaaaaggagagagagattgataattttgagttatccacgctctgtccttactgttacaagttgactggttgaatgacttctttcttggcataatagccatcccaag

SEQ ID NO: 217016 - DNA, 120 bp, Artificial Sequence
  ENSG00000116580_79 (sequence is synthesized)
agccatcccaagtgtgggtttgtgggaatcctgaagtgagaaagttctgacattggctctttctgggtgccagcattattatagtcttgtaatctatagttttcactcttccttcccaat

SEQ ID NO: 217017 - DNA, 120 bp, Artificial Sequence
  ENSG00000116580_80 (sequence is synthesized)
aaggatacttgcctaggaatggaggacacaggacatttgtaatttcttccttctctcttttatcctccctttgtactcattatccaagttctagaattacatgataatctctgggcctgg

SEQ ID NO: 217018 - DNA, 120 bp, Artificial Sequence
  ENSG00000116580_81 (sequence is synthesized)
agacttcatcggttttgaaacttaagtacttcctctttaacttttcttgatcaatctttgttttaattccagctttgtttttttccattctattactcttaggtttgtatctcatggaat

SEQ ID NO: 217019 - DNA, 120 bp, Artificial Sequence
  ENSG00000116580_82 (sequence is synthesized)
tcactttaacctctgcctcgtgttatttgctttagctgtacattatgctcttaggattttttttttttctgccctgcttcttccccttattttccaaatacgtatgatttgtgtttccca

SEQ ID NO: 217020 - DNA, 120 bp, Artificial Sequence
  ENSG00000116580_83 (sequence is synthesized)
ggactcagtaatatgtatcacttattgatatgccacctgcttgcttgctgcactatggatagtcctaaaatcatttgtatttttgtgaatgcattatgggacatgattgtggagttgagg

SEQ ID NO: 217021 - DNA, 120 bp, Artificial Sequence
  ENSG00000116580_84 (sequence is synthesized)
tcaacttttattgccattgaatgggactccctttagatataatgttagcttaagaaagactggaaacttttggggggatggtgggcagatgggagggaatcaagttaggtaaggatagct

SEQ ID NO: 217022 - DNA, 120 bp, Artificial Sequence
  ENSG00000116580_85 (sequence is synthesized)
aggtgaggaaagtatcaagggtcccgagggtatcagagctgctgggggattgtttgctaccaagaattgtaccttactgaattcctaaaaaggcacatatataaataacattcagtatac

SEQ ID NO: 217023 - DNA, 120 bp, Artificial Sequence
  ENSG00000116580_86 (sequence is synthesized)
acatatgtgtacatatgcaaaataaatggaatctgctagaaatacgtgatagattttgttttttaaagagaattctgtgagtaaagcttttggaattggaaaaacaaaataccagttaaa

SEQ ID NO: 217024 - DNA, 120 bp, Artificial Sequence
  ENSG00000116580_87 (sequence is synthesized)
atatttccctcagatattagaaaatgaaataaacctctgtcgtgaaaatagtctctacaagtaatcctggttctctagaatggagttggttggcaggaaaaacacagttcttggtgagag

SEQ ID NO: 217025 - DNA, 120 bp, Artificial Sequence
  ENSG00000116584_0 (sequence is synthesized)
gggatcccgggagggagcggagcggacctgggcttggtcgcctccaagccggcgggaccgagtgctttaggccgcttgaaagaaagttgctccgacccgggaaaaggagaagatgaagga

SEQ ID NO: 217026 - DNA, 120 bp, Artificial Sequence
  ENSG00000116584_1 (sequence is synthesized)
agccaaggatgcccgctataccaatgggcacctcttcaccaccatttcagtttcaggcatgaccatgtgctatgcctgtaacaagagcatcacagccaaggaagccctcatctgcccaac

SEQ ID NO: 217027 - DNA, 120 bp, Artificial Sequence
  ENSG00000116584_2 (sequence is synthesized)
ctgcaatgtgactatccacaaccgctgtaaagacaccctcgccaactgtaccaaggtcaagcagaagcaacagaaagcggccctgctgaagaacaacaccgccttgcagtccgtttctct

SEQ ID NO: 217028 - DNA, 120 bp, Artificial Sequence
  ENSG00000116584_3 (sequence is synthesized)
tcgaagtaagacaaccatccgggagcggccaagctcggccatctacccctccgacagcttccggcagtccctcctgggctcccgccgtggccgctcctccttgtctttagccaagagtgt

SEQ ID NO: 217029 - DNA, 120 bp, Artificial Sequence
  ENSG00000116584_4 (sequence is synthesized)
ttctaccaccaacattgctggacatttcaatgatgagtctcccctggggctgcgccggatcctctcacagtccacagactccctcaacatgcggaaccgaaccctatccgtggaatccct

SEQ ID NO: 217030 - DNA, 120 bp, Artificial Sequence
  ENSG00000116584_5 (sequence is synthesized)
cattgacgaagaggtaatctacagtgagctgatgagtgactttgagatggatgagaaggactttgcagctgactcttggagtcttgctgtggacagcagcttcctgcagcagcataaaaa

SEQ ID NO: 217031 - DNA, 120 bp, Artificial Sequence
  ENSG00000116584_6 (sequence is synthesized)
ggaggtgatgaagcagcaagatgtcatctatgagctaatccagacagagctgcaccatgtgaggacactgaagatcatgacccgcctcttccgcacggggatgctggaagagctacactt

SEQ ID NO: 217032 - DNA, 120 bp, Artificial Sequence
  ENSG00000116584_7 (sequence is synthesized)
ggagccaggagtggtccagggcctgttcccctgcgtggacgagctcagtgacatccatacacgcttcctcagccagctattagaacgccgacgccaggccctgtgccctggcagcacccg

SEQ ID NO: 217033 - DNA, 120 bp, Artificial Sequence
  ENSG00000116584_8 (sequence is synthesized)
gaactttgtcatccatcgcttgggtgatctgctcatcagccagttctcaggtcctagtgcggagcagatgtgtaagacctactcggagttctgcagccgccacagcaaggccttaaagct

SEQ ID NO: 217034 - DNA, 120 bp, Artificial Sequence
  ENSG00000116584_9 (sequence is synthesized)
ctataaggagctgtacgcccgagacaaacgcttccagcaattcatccggaaagtgacccgccccgccgtgctcaagcggcacggggtacaggagtgcatcctgctggtgactcagcgcat

SEQ ID NO: 217035 - DNA, 120 bp, Artificial Sequence
  ENSG00000116584_10 (sequence is synthesized)
caccaagtacccgttactcatcagccgcatcctgcagcattcccacgggatcgaggaggagcgccaggacctgaccacagcactggggctagtgaaggagctgctgtccaatgtggacga

SEQ ID NO: 217036 - DNA, 120 bp, Artificial Sequence
  ENSG00000116584_11 (sequence is synthesized)
gggtatttatcagctggagaaaggggcccgtctgcaggagatctacaaccgcatggaccctcgggcccaaaccccagtgcctggcaagggcccctttggccgagaggaacttctgaggcg

SEQ ID NO: 217037 - DNA, 120 bp, Artificial Sequence
  ENSG00000116584_12 (sequence is synthesized)
caaactcatccacgatggctgcctgctctggaagacagcgacggggcgcttcaaagatgtgctagtgctgctgatgacagatgtactggtgtttctccaggaaaaggaccagaagtacat

SEQ ID NO: 217038 - DNA, 120 bp, Artificial Sequence
  ENSG00000116584_13 (sequence is synthesized)
ctttcctaccctggacaagccttcagtggtatcgctgcagaatctaatcgtacgagacattgccaaccaggagaaagggatgtttctgatcagcgcagccccacctgagatgtacgaggt

SEQ ID NO: 217039 - DNA, 120 bp, Artificial Sequence
  ENSG00000116584_14 (sequence is synthesized)
gcacacagcatcccgggatgaccggagcacctggatccgggtcattcagcagagcgtgcgcacatgcccatccagggaggacttccccctgattgagacagaggatgaggcttacctgcg

SEQ ID NO: 217040 - DNA, 120 bp, Artificial Sequence
  ENSG00000116584_15 (sequence is synthesized)
gcgaattaagatggagttgcagcagaaggaccgggcactggtggagctgctgcgagagaaggtcgggctgtttgctgagatgacccatttccaggccgaagaggatggtggcagtgggat

SEQ ID NO: 217041 - DNA, 120 bp, Artificial Sequence
  ENSG00000116584_16 (sequence is synthesized)
ggccctgcccaccctgcccaggggccttttccgctctgagtcccttgagtcccctcgtggcgagcggctgctgcaggatgccatccgtgaggtggagggtctgaaagacctgctggtggg

SEQ ID NO: 217042 - DNA, 120 bp, Artificial Sequence
  ENSG00000116584_17 (sequence is synthesized)
gccaggagtggaactgctcttgacaccccgagagccagccctgcccttggaaccagacagcggtggtaacacgagtcctggggtcactgccaatggtgaggccagaaccttcaatggctc

SEQ ID NO: 217043 - DNA, 120 bp, Artificial Sequence
  ENSG00000116584_18 (sequence is synthesized)
cattgaactctgcagagctgactcagactctagccagagggatcgaaatggaaatcagctgagatcaccgcaagaggaggcgttacagcgattggtcaatctctatggacttctacatgg

SEQ ID NO: 217044 - DNA, 120 bp, Artificial Sequence
  ENSG00000116584_19 (sequence is synthesized)
cctacaggcagctgtggcccagcaggacactctgatggaagcccggttccctgagggccctgagcggcgggagaagctgtgccgagccaactctcgggatggggaggctggcagggctgg

SEQ ID NO: 217045 - DNA, 120 bp, Artificial Sequence
  ENSG00000116584_20 (sequence is synthesized)
ggctgcccctgtggcccctgaaaagcaggccacggaactggcattactgcagcggcaacatgcgctgctgcaggaggagctacggcgctgccggcggctaggtgaagaacgggcaaccga

SEQ ID NO: 217046 - DNA, 120 bp, Artificial Sequence
  ENSG00000116584_21 (sequence is synthesized)
agctggcagcctggaggcccggctccgggagagtgagcaggcccgggcactgctggagcgtgaggccgaagaggctcgaaggcagctggccgccctgggccagaccgagccactcccagc

SEQ ID NO: 217047 - DNA, 120 bp, Artificial Sequence
  ENSG00000116584_22 (sequence is synthesized)
tgaggccccctgggcccgcagacctgtggatcctcggcggcgcagcctccccgcaggcgatgccctgtacttgagtttcaaccccccacagcccagccgaggcactgaccgcctggatct

SEQ ID NO: 217048 - DNA, 120 bp, Artificial Sequence
  ENSG00000116584_23 (sequence is synthesized)
acctgtcactactcgctctgtccatcgaaactttgaggaccgagagaggcaggaactggggagccccgaagagcggctgcaagacagcagtgaccctgacactggcagcgaggaggaagg

SEQ ID NO: 217049 - DNA, 120 bp, Artificial Sequence
  ENSG00000116584_24 (sequence is synthesized)
tagcagccgtctgtctccgccccacagtccacgagactttaccagaatgcaggacatcccggaggagacggagagccgcgacggggaggctgtagcctccgagagctaagggggcccctc

SEQ ID NO: 217050 - DNA, 120 bp, Artificial Sequence
  ENSG00000116584_25 (sequence is synthesized)
ccccctgccccgtgccccactgaagaacattactgagggggctaaccttggggactccaatttgccaatgatgagggaacatttgaaagaactgcaaattgtccttgccagctcttggga

SEQ ID NO: 217051 - DNA, 120 bp, Artificial Sequence
  ENSG00000116584_26 (sequence is synthesized)
tccttggatacctggggccatttaagaagctaggggaattaggccacaacaccccctgggacatccgaaagctacaccacagatgccagtggttcatgccttcttcccgcaactttagga

SEQ ID NO: 217052 - DNA, 120 bp, Artificial Sequence
  ENSG00000116584_27 (sequence is synthesized)
aaatttatttatttattgtttattagttatggggggagaggggagatttaaaggaccagggacatgggaaccaagccatagggatcagagggccttgtccttgaacactactggggtata

SEQ ID NO: 217053 - DNA, 120 bp, Artificial Sequence
  ENSG00000116584_28 (sequence is synthesized)
ttcaggctcatccacgcagctgctgggttcttgccctaacggccctcccctgcaacatccgtcttggaggagaggctgcagccacagcaccctactgccctttaaataaaggagggctgt

SEQ ID NO: 217054 - DNA, 120 bp, Artificial Sequence
  ENSG00000116584_29 (sequence is synthesized)
gggcagggccatgtccctttctcctctcccctcaacctcttactgctgttctccctttctccgtccttcatggaagccctgggagataacctggcttcctggagttgatggaataaaggt

SEQ ID NO: 217055 - DNA, 120 bp, Artificial Sequence
  ENSG00000116584_30 (sequence is synthesized)
tggggtggccataatggtttgttgggggtgagggaaaaaacccacagggaccagaatgttttgttgttcttttgttttcttttttgtaccaaagtcaactgcacgtgttttatattttta

SEQ ID NO: 217056 - DNA, 120 bp, Artificial Sequence
  ENSG00000116584_31 (sequence is synthesized)
agagatcgtaggcaattagagatcgaagcctcctatctccacatctctgaagaagttgaggggtgggggagagaatgacttctgccttcatctgcagtaacggggggacctatactgacc

SEQ ID NO: 217057 - DNA, 120 bp, Artificial Sequence
  ENSG00000116584_32 (sequence is synthesized)
tcttccccagccatttagaaacaagttctagggtgggttggaaaatctccaagagccctgacctcatcttccacctcagcaaccatgacctgaaacctcagcgtgaatttgggggatttt

SEQ ID NO: 217058 - DNA, 120 bp, Artificial Sequence
  ENSG00000116584_33 (sequence is synthesized)
tcagtggaacccttgcccccaaatgtcgaccagcccccaaatgtcgaagaattttcttcttgccaattttgttgtttaaaaaaaaaattcagggaaaattaaaaacctggaactccataa

SEQ ID NO: 217059 - DNA, 120 bp, Artificial Sequence
  ENSG00000116584_34 (sequence is synthesized)
gagtcagacttcctgtccccgagaccaacgcgtgcgggccgaacccctccccccgccttcccccaacaatacaggacgccggggtccgcgccgcgtcctccctggtccccccgtccgatt

SEQ ID NO: 217060 - DNA, 120 bp, Artificial Sequence
  ENSG00000116584_35 (sequence is synthesized)
acattgtaggggctgctggccatggaagggcactgtctctctgctttgacaatggtccccttgaacaagttcctttagctctggaggagactgcaagcatcgggatgcccaggccccaag

SEQ ID NO: 217061 - DNA, 120 bp, Artificial Sequence
  ENSG00000116584_36 (sequence is synthesized)
gaggccctcttcctgcagatccgagaaggactggacacctttctgggactgcagcaccagggtggctacgcctcccggctggatcaggattcctgtcatccatctgctggccctttggac

SEQ ID NO: 217062 - DNA, 120 bp, Artificial Sequence
  ENSG00000116584_37 (sequence is synthesized)
cactcggccactggcatgctttccaagtctgtacccgtgagtggcatcaactgtctcttggaccgttcggatacagatgggaatgtatcccagtcctctgccattgacctcaggaaacgc

SEQ ID NO: 217063 - DNA, 120 bp, Artificial Sequence
  ENSG00000116584_38 (sequence is synthesized)
gtcattcagcagagcgtgcgcactggagttgcagcagaaggaccgggcactggtggagctgctgcgagagaaggtcgggctgtttgctgagatgacccatttccaggccgaagaggatgg

SEQ ID NO: 217064 - DNA, 120 bp, Artificial Sequence
  ENSG00000116584_39 (sequence is synthesized)
aggagaacagtggcggagaagcaaggctgagaaagggaaggcagagcgggaggagcctaggagggagaccctgagaagagaagggaggacatagagagagcaggagacaggaggaggatg

SEQ ID NO: 217065 - DNA, 120 bp, Artificial Sequence
  ENSG00000116584_40 (sequence is synthesized)
cgaaaaatggatgattggggatggggaggatgcatgaggggagaagggattgaccccaagacctctgggctctggacatcatcaggcaaacctggagcttgggaagagaggcaggaaaga

SEQ ID NO: 217066 - DNA, 120 bp, Artificial Sequence
  ENSG00000116584_41 (sequence is synthesized)
gaaggatcttgggcccaggcactgcagccccatgccctctgtccctgcactgttgactcagcccctccacacttcccctttctttctaccattttctgccccaagcaccaggcccgtgca

SEQ ID NO: 217067 - DNA, 120 bp, Artificial Sequence
  ENSG00000116584_42 (sequence is synthesized)
tctcttcccctcctccacctctcagctgctggcgtggcctcgtggcctcggctgagtcagtactggtctcctagagtccgggctgagtgcttcccgctgaactgtaatcctctgtcccca

SEQ ID NO: 217068 - DNA, 120 bp, Artificial Sequence
  ENSG00000116584_43 (sequence is synthesized)
gtccaggtcctctgacttggggcttctaccctcagccatctggatcctgatttttgatttctgagagcctgggaaaccttggagggagtggtcttctcagcttctagtcctgctccaaga

SEQ ID NO: 217069 - DNA, 120 bp, Artificial Sequence
  ENSG00000116584_44 (sequence is synthesized)
gcggagggaaaatccagagatcagagtcacaactaaggaaggtcctagaatagtgggaagagtgatatccccctcttctcaccttctcaggctttttgggaatcacaggggcttgaagag

SEQ ID NO: 217070 - DNA, 120 bp, Artificial Sequence
  ENSG00000116584_45 (sequence is synthesized)
ggacagattggaggtcagggagaatgacttgacttgcagaggcaggggcactgggggaaatgggagacagcagagatggaaaatgcggctcagaggctccgaggaaggtgtgcgccatct

SEQ ID NO: 217071 - DNA, 120 bp, Artificial Sequence
  ENSG00000116584_46 (sequence is synthesized)
gcggagatcaacactgaaggatggagggtagatgtcagaaaggacttcctaggatgggagagaccagttgggtaaggagcaatagaggaaactctcctaggttttaactctggaaagtag

SEQ ID NO: 217072 - DNA, 120 bp, Artificial Sequence
  ENSG00000116584_47 (sequence is synthesized)
tatgagagggataaaagttagactgcaggagagattttccgctggaagcaaccaagatggctggctgagcttccttacttaaagatcccagagtggaagagtgacccaaaggcagctagc

SEQ ID NO: 217073 - DNA, 120 bp, Artificial Sequence
  ENSG00000116584_48 (sequence is synthesized)
ttctctctgatccccagctgggcccaaatgccagggccagttgcttgatcccttgctccctgtcctcactctgaggggtggtggctgttggaatatggcataagccggactatctgggaa

SEQ ID NO: 217074 - DNA, 120 bp, Artificial Sequence
  ENSG00000116584_49 (sequence is synthesized)
tgtgggggaggggaggctgtgctggctcctcttgcagctgtcatccaccaggcaccccccttgctccccgaacagctgctaagggttaggggaactgattggagaaggagcaggaatgtt

SEQ ID NO: 217075 - DNA, 120 bp, Artificial Sequence
  ENSG00000116584_50 (sequence is synthesized)
gtatgtgtggagggggtggggtggggggtgacagaggaactgggtggaaagctgccagccttgcagctggctctgcctgtcttcctgcgcagagctgggcattcaggacttcacagtccc

SEQ ID NO: 217076 - DNA, 120 bp, Artificial Sequence
  ENSG00000116584_51 (sequence is synthesized)
cttgcccctttctttctattgactatgggtggagcctgaaatctctgctgtttcaagcagaagatgtgattaggacccttcatctcaaatttctagtgagaaagagggaatgtagcaggg

SEQ ID NO: 217077 - DNA, 120 bp, Artificial Sequence
  ENSG00000116584_52 (sequence is synthesized)
atgtgtgtgttgaggggcaggggttagaattcctgcccttcatccacatctgagtgtagtcctgtctttagggagtataagccaggaattctttccttccccagtacacagagggctcct

SEQ ID NO: 217078 - DNA, 120 bp, Artificial Sequence
  ENSG00000116584_53 (sequence is synthesized)
gctgccccctctccctcaattcctcctgaagttatggcagagatgcctctgattagagcaggattgaaggtattgtgacctgctactgaatagcggacaaaagctctagcctgtaaatcc

SEQ ID NO: 217079 - DNA, 120 bp, Artificial Sequence
  ENSG00000116584_54 (sequence is synthesized)
ctatgaaacttggggaaggaacccccagaaaggaccagtgatgggcaacccgctcgggtccccttctacgctgtgggagctttgtcattttgctcttcacaataaagcttgctaccgctc

SEQ ID NO: 217080 - DNA, 120 bp, Artificial Sequence
  ENSG00000116584_55 (sequence is synthesized)
agtttgggtctgggctgtgcttatgccaacaggaagggctgggctgggggcaagcaacagggctgggctgaggcgaggcagtgttcctccctggtgcccgtcactggccactggatacag

SEQ ID NO: 217081 - DNA, 120 bp, Artificial Sequence
  ENSG00000116584_56 (sequence is synthesized)
tcccgtgtactgaagatccagcgtttagttctcctttgatttcctctccctctggccacccctgcccccaatcgtaaaaggggtcagtctgctcaggcctgctttgatgggaccccgaag

SEQ ID NO: 217082 - DNA, 120 bp, Artificial Sequence
  ENSG00000116584_57 (sequence is synthesized)
taaggagctgtacgcccgagacaaacgcttccagcaattcatccgggtgagcggacctctccagatcccatgctcatggcccaaacccaccctccccaactcatgggggtagtgcctgtg

SEQ ID NO: 217083 - DNA, 120 bp, Artificial Sequence
  ENSG00000116584_58 (sequence is synthesized)
agctgcacccacatggaggtcaggcattcgccacccgtgcagaccatccatacacagatcctgtcagcagtaacccctcagaatgctagagcacgttgtggtagtttcccaagtactttt

SEQ ID NO: 217084 - DNA, 120 bp, Artificial Sequence
  ENSG00000116584_59 (sequence is synthesized)
ccagcaccagagctcaggccccaggcctttctgttgccctcccctctggccctgagccctgcctcctcccttgtagaaagtgacccgccccgccgtgctcaagcggcacggggtacagga

SEQ ID NO: 217085 - DNA, 120 bp, Artificial Sequence
  ENSG00000116584_60 (sequence is synthesized)
gggtgaggaaaggctcggtatgaccacaggaagggtggggtcgggtgtgaaaccctgggcagcctctaaaggtggaatcaagacacgatgggaactggggtgtgagtgaaactggttgag

SEQ ID NO: 217086 - DNA, 120 bp, Artificial Sequence
  ENSG00000116584_61 (sequence is synthesized)
cccagcaatcagagcctccaggcccaggaggatgaaaagaacatggagacgagaggctccaaatggagtagccctctgccagctcacatccctctttcaggggctgcagcttggacatcc

SEQ ID NO: 217087 - DNA, 120 bp, Artificial Sequence
  ENSG00000116584_62 (sequence is synthesized)
cccccaccaaagtgctggactgggttcttaaaggggccacctgaagcaggactttttcccacactgaagtcaccaactgacagcagaaacaggtcccccatctttgggatatctcccagt

SEQ ID NO: 217088 - DNA, 120 bp, Artificial Sequence
  ENSG00000116584_63 (sequence is synthesized)
tctgctcccagtagaatgtctaagaaatctttgatgaccagtgcaatctgtggaggttatacacttggaggaagggacagcacacgctgatggtttgcagtggtgggaagaccatctgat

SEQ ID NO: 217089 - DNA, 120 bp, Artificial Sequence
  ENSG00000116584_64 (sequence is synthesized)
ccagaggcaggaagataagtaaaatgacttcttagagccccttcctgctttcccagctcccctcccccatctcaagcatctgatcccagacctatttcagaatctcctatctctttgctc

SEQ ID NO: 217090 - DNA, 120 bp, Artificial Sequence
  ENSG00000116584_65 (sequence is synthesized)
taaataaagccattgtgtgagacccagccctggcctctcccctgcaccatttcctgagctcaagaggctaagggaaaatgggaggggggctaggagagttaatctaatggaaaaagaagc

SEQ ID NO: 217091 - DNA, 120 bp, Artificial Sequence
  ENSG00000116584_66 (sequence is synthesized)
aacacgatgatgggacccccagtttgaatttcagacagtggaggagggaatattgctaggagggagttgaggaagccttgttaaacctcatctctttgagggacagaataaaaagtattg

SEQ ID NO: 217092 - DNA, 120 bp, Artificial Sequence
  ENSG00000116584_67 (sequence is synthesized)
ggcactcctaagtccagctgactgtgacacacttctagtcccaaggtttcagagttctagaaccctgctcactcttatttcctgctgacgcagactggtctgtgtgtgtctcccacgaac

SEQ ID NO: 217093 - DNA, 120 bp, Artificial Sequence
  ENSG00000116584_68 (sequence is synthesized)
agagccgtcccagacgtgttctgagcaggtggagacaaggtgcccgtgaggccacactggcctctgcctttctgcagttgaatccagagaacaactggaggaagaagagatggggaaata

SEQ ID NO: 217094 - DNA, 120 bp, Artificial Sequence
  ENSG00000116584_69 (sequence is synthesized)
aaggaggggaatggctcgcatgctgtacccctccaaaggtcaggggctttccgggcccacggccgaaaacaaagacgtcttcagaagacatagttgggggcctggcagggagctcgaggg

SEQ ID NO: 217095 - DNA, 120 bp, Artificial Sequence
  ENSG00000116584_70 (sequence is synthesized)
aaagcgctggtgagctggcaccctccgcttcgcctgctctcccctcctctctgcgcatcttccccctagcacagagaagagagtacagcagctcgggggtgagcagagctagggctggga

SEQ ID NO: 217096 - DNA, 120 bp, Artificial Sequence
  ENSG00000116586_0 (sequence is synthesized)
caatagccaggcgaagaaactacaactcccagggcgtcccggagcaggccaacgggactacgggaagcagcgggcagcggcccgcgggaggcacctcggagatctgggtgcaaaagccca

SEQ ID NO: 217097 - DNA, 120 bp, Artificial Sequence
  ENSG00000116586_1 (sequence is synthesized)
gggttaggaaccgtaggcatgctgcgccccaaggctttgacccaggtgctaagccaagccaacactggaggcgtccagagcaccctgctgctgaataacgagggatcactgctggcctac

SEQ ID NO: 217098 - DNA, 120 bp, Artificial Sequence
  ENSG00000116586_2 (sequence is synthesized)
gggccgcctacgaccggaacgggaaccaagcgtttaatgaagacaatctcaaattcatcctcatggactgcatggagggccgtgtagccatcacccgagtggccaaccttctgctgtgta

SEQ ID NO: 217099 - DNA, 120 bp, Artificial Sequence
  ENSG00000116586_3 (sequence is synthesized)
tgtatgccaaggagaccgtgggctttggaatgctcaaggccaaggcccaggctttggtgcagtacctggaggagcccctcacccaagtggcggcatcttaacggcattggtggaagctgg

SEQ ID NO: 217100 - DNA, 120 bp, Artificial Sequence
  ENSG00000116586_4 (sequence is synthesized)
ggtcagaaaagagaaatgaccatttggaggggcggggcctcctagaagaaccttcttagacaatggggggaggatgggactttgttttttccaagaataaacttcaactcctgtcatgtg

SEQ ID NO: 217101 - DNA, 120 bp, Artificial Sequence
  ENSG00000116586_5 (sequence is synthesized)
cggccgggaggtcccctgtcgaaaagggaagccggtgtgctgggtgcttagggcatgttccgggacacgctcaggccagagccttgctggatgtgcccttggtgggacttgggatggaaa

SEQ ID NO: 217102 - DNA, 120 bp, Artificial Sequence
  ENSG00000116586_6 (sequence is synthesized)
cccagacgttttactccccgctctgagcacatcgctatccctccccgcccctcaccaggctgctgaataacgagggatcactgctggcctactctggttacggggacactgacgcccggg

SEQ ID NO: 217103 - DNA, 120 bp, Artificial Sequence
  ENSG00000116586_7 (sequence is synthesized)
agggacaggatctccggaagattactaagagttggtctgcagcagcatttgtaataggcaggaccctattcatcaagtggtggtgaggaaggatccctggacctgagaggtctgacttgg

SEQ ID NO: 217104 - DNA, 120 bp, Artificial Sequence
  ENSG00000116586_8 (sequence is synthesized)
gttctggtctcagccatccacttatcagttgtggaaccttgggtaagtcgcttaacctctctcagcttccttacctcatgtttaaggagaagacaataatttccctctccccgctcccct

SEQ ID NO: 217105 - DNA, 120 bp, Artificial Sequence
  ENSG00000116586_9 (sequence is synthesized)
catgggttgttgtgaaggtcagatgaaataatgggtataaacagtagaatgacgtgcaaacacaaagtgttgtcatcccagtttcaccgactcacagaaccatggcagtctccagaccct

SEQ ID NO: 217106 - DNA, 120 bp, Artificial Sequence
  ENSG00000116586_10 (sequence is synthesized)
agtccaaccccttaagctttcaaagaaaggaaaatgaagtccagaaaggggaagtcaccattagattgtgaacttcttagtatctgttcggtcgacaagtatttaggtccttgcagtatt

SEQ ID NO: 217107 - DNA, 120 bp, Artificial Sequence
  ENSG00000116604_0 (sequence is synthesized)
gaggctgtgcagaaggtatcctgcagaccatgaactgagcactgttcccagaccgttcatgagcacagtgtaaggtgtgccgagacccaccacccagcgagcccctcccctccgtagcac

SEQ ID NO: 217108 - DNA, 120 bp, Artificial Sequence
  ENSG00000116604_1 (sequence is synthesized)
tgaggacccccggagaagatggggaggaaaaagattcagatccagcgaatcaccgacgagcggaaccgacaggtgactttcaccaagcggaagtttggcctgatgaagaaggcgtatgag

SEQ ID NO: 217109 - DNA, 120 bp, Artificial Sequence
  ENSG00000116604_2 (sequence is synthesized)
ctgagcgtgctatgtgactgcgagatcgcactcatcatcttcaaccactccaacaagctgttccagtacgccagcaccgacatggacaaggtgctgctcaagtacacggagtacaatgag

SEQ ID NO: 217110 - DNA, 120 bp, Artificial Sequence
  ENSG00000116604_3 (sequence is synthesized)
ccacacgagagccgcaccaacgccgacatcatcgaggcgctgcacaagaagcacagggaatgtgagagccctgaggtggacgaggtgtttgccctgaccccccagacggaagagaaatat

SEQ ID NO: 217111 - DNA, 120 bp, Artificial Sequence
  ENSG00000116604_4 (sequence is synthesized)
aaaaagatagacgaggagtttgataaaatgatgcagagttatagactggcctcaactgtcccggcccccaactttgccatgcctgtcacggtgcccgtgtccaatcagagctcactgcag

SEQ ID NO: 217112 - DNA, 120 bp, Artificial Sequence
  ENSG00000116604_5 (sequence is synthesized)
ttcagcaatcccagcggctccctggtcaccccttccctggtgacatcatccctcacggacccgcggctcctgtccccccagcagccagcactacagaggaacagtgtgtctcctggcctg

SEQ ID NO: 217113 - DNA, 120 bp, Artificial Sequence
  ENSG00000116604_6 (sequence is synthesized)
ccccagcggccagctagtgcgggggccatgctggggggtgacctgaacagtgctaacggagcctgccccagccctgttgggaatggctacgtcagtgctcgggcttcccctggcctcctc

SEQ ID NO: 217114 - DNA, 120 bp, Artificial Sequence
  ENSG00000116604_7 (sequence is synthesized)
cctgtggccaatggcaacagcctaaacaaggtcatccctgccaagtctccacccccacctacccacagcacccagcttggagcccccagccgcaagcccgacctgcgagtcatcacttcc

SEQ ID NO: 217115 - DNA, 120 bp, Artificial Sequence
  ENSG00000116604_8 (sequence is synthesized)
caggcaggaaaggggttaatgcatcacttgaacaatgcccagcgccttggggtctcccagtctactcattcgctcaccaccccagtggtttctgtggcaacgccgagtttactcagccag

SEQ ID NO: 217116 - DNA, 120 bp, Artificial Sequence
  ENSG00000116604_9 (sequence is synthesized)
ggcctccccttctcttccatgcccactgcctacaacacagattaccagttgaccagtgcagagctctcctccttaccagcctttagttcacctggggggctgtcgctaggcaatgtcact

SEQ ID NO: 217117 - DNA, 120 bp, Artificial Sequence
  ENSG00000116604_10 (sequence is synthesized)
gcctggcaacagccacagcagccccagcagccgcagcagccacagcctccacagcagcagccaccgcagccacagcagccacagccacagcagcctcagcagccgcaacagccacctcag

SEQ ID NO: 217118 - DNA, 120 bp, Artificial Sequence
  ENSG00000116604_11 (sequence is synthesized)
caacagtcccacctggtccctgtatctctcagcaacctcatcccgggcagccccctgccccacgtgggtgctgccctcacagtcaccacccacccccacatcagcatcaagtcagaaccg

SEQ ID NO: 217119 - DNA, 120 bp, Artificial Sequence
  ENSG00000116604_12 (sequence is synthesized)
gtgtccccaagccgtgagcgcagccctgcgcctccccctccagctgtgttcccagctgcccgccctgagcctggcgatggtctcagcagcccagccgggggatcctatgagacgggagac

SEQ ID NO: 217120 - DNA, 120 bp, Artificial Sequence
  ENSG00000116604_13 (sequence is synthesized)
cgggatgacggacggggggacttcgggcccacactgggcctgctgcgcccagccccagagcctgaggctgagggctcagctgtgaagaggatgcggcttgatacctggacattaaagtga

SEQ ID NO: 217121 - DNA, 120 bp, Artificial Sequence
  ENSG00000116604_14 (sequence is synthesized)
cgattcccactcccctcctctcagcctccctgatgaagagttgacaatctcaccgcccgcccttccctgccccgggctcctcccgctcgacccccacttcctttcttgtgcttcgtgtcc

SEQ ID NO: 217122 - DNA, 120 bp, Artificial Sequence
  ENSG00000116604_15 (sequence is synthesized)
tgttgacggttacatttgtgtataattattatattattattattattattatattttttttaatttggattctcgctttggagagggggatgctctcatcccctctttctgtacccccca

SEQ ID NO: 217123 - DNA, 120 bp, Artificial Sequence
  ENSG00000116604_16 (sequence is synthesized)
ccattttcactggctggggggctctctttttcgcgggaaggggggacactttgcacgttgtacacatatgctgcaggaagggggtggggggcccaataaggcctttgggaaaggacaggt

SEQ ID NO: 217124 - DNA, 120 bp, Artificial Sequence
  ENSG00000116604_17 (sequence is synthesized)
gccgagccctgcatgtggagccctcccaccccacccccagatagagggaaataaccaaaaaactaccaaacaacagaaacccacactctagactgaaaccccaaagtgggcttgatgggt

SEQ ID NO: 217125 - DNA, 120 bp, Artificial Sequence
  ENSG00000116604_18 (sequence is synthesized)
gggtttgtgtttcaaggggaaagtgaggcagaggttctgaaaagggtctctgtttttgtgttcatgtagccataggcacatggagcagaatacttaagcctggcccccaaatgcccctgc

SEQ ID NO: 217126 - DNA, 120 bp, Artificial Sequence
  ENSG00000116604_19 (sequence is synthesized)
acacacacgtgccacacctgcgctgattcttgtgtgtgctgcacccccaaggtgtgtgggtgctggctgagctttgggccgggaaggcagcctgggaatctgaggctggagacaggggtt

SEQ ID NO: 217127 - DNA, 120 bp, Artificial Sequence
  ENSG00000116604_20 (sequence is synthesized)
tgaggtgggggcctctctggaagcacatttggagggaaagacaagagagccatgaggagagggctgaggagggcagaagggctaggcagggggcaaattgagcccctcccttccccagtt

SEQ ID NO: 217128 - DNA, 120 bp, Artificial Sequence
  ENSG00000116604_21 (sequence is synthesized)
tttctctaagatatacagtgcaatagctccccacccctcagttgacgccagccctgtaaagctggccacagtgtgcagggagaatggggagagggtcttcagtgaggtggctggggcgag

SEQ ID NO: 217129 - DNA, 120 bp, Artificial Sequence
  ENSG00000116604_22 (sequence is synthesized)
agtcggcctggacttccctggggtgctccaggccagagctctttcattggggcgagtgtggtgaggggacgtccttggtcttgcacgcacactacctgggggagtcaacactgggatggt

SEQ ID NO: 217130 - DNA, 120 bp, Artificial Sequence
  ENSG00000116604_23 (sequence is synthesized)
tctcctgttagctccttctgctcctgaccccacctccttgctcttggcgcccctattgtctctggctacctccttgtcccaccacctccaggctgcatcccaccttccctcttggctact

SEQ ID NO: 217131 - DNA, 120 bp, Artificial Sequence
  ENSG00000116604_24 (sequence is synthesized)
gtaattgtaaatagcgacctttggaaaacgttagcggtgtaacagtccaggaaactgtttttttttgttgttgttgtattgatatgaaatgagattctatttttgtcaaagtatattgta

SEQ ID NO: 217132 - DNA, 120 bp, Artificial Sequence
  ENSG00000116604_25 (sequence is synthesized)
ataataatgactcaaacggcccgtactgtacagacgagattcttctgctgttgttcttgctcccctcccctcctctgagtccgcccctccctgctgcctcctcagtggggcagtgggcaa

SEQ ID NO: 217133 - DNA, 120 bp, Artificial Sequence
  ENSG00000116604_26 (sequence is synthesized)
ggggcccaggggcagccgaagcacggggtcctgagacctcaggcaggattggagatcaaaccagagggggcaggcccccagcctgctctctaggatcaccccccgccctaaggggcctgg

SEQ ID NO: 217134 - DNA, 120 bp, Artificial Sequence
  ENSG00000116604_27 (sequence is synthesized)
cctggggtgacgtggccaggcagactgtctgccccactccttcacacaagcccagctcctctgcccaaggggtgcggcgcccccttggggtttcctcccagttggagagtagagttaaga

SEQ ID NO: 217135 - DNA, 120 bp, Artificial Sequence
  ENSG00000116604_28 (sequence is synthesized)
caaggcccagttttgtgttagccgaccgtctttgcccacctctatgacccagcctcttgcagtattcccatacttgatgcagggaaggaaccagaagcagaggggcctctacgcaggtac

SEQ ID NO: 217136 - DNA, 120 bp, Artificial Sequence
  ENSG00000116604_29 (sequence is synthesized)
acacgtgtacctgagtgtgttcatgagggcatctggtgtttatgtgtctgagtgtagctttgtatttatgtgtgtgtgtgtgtgtatgtctgattgcacgggtgtacttttgtatttatg

SEQ ID NO: 217137 - DNA, 120 bp, Artificial Sequence
  ENSG00000116604_30 (sequence is synthesized)
tgtgtgtgtggttgcacgggtgtgcctctgtgtgtctctgaccctggctgggtgtgtgtgcaaatctgtgtgactggagctctaggggcatctctgtgtctgagtgtgcctggtgtgtgt

SEQ ID NO: 217138 - DNA, 120 bp, Artificial Sequence
  ENSG00000116604_31 (sequence is synthesized)
ttacaaagggagagttggctgctccagctccacagccctgggaccccaactcctgtcttccctgctcctttccctgtgttcaccctcagctctgacacattgaactgcagttggggggat

SEQ ID NO: 217139 - DNA, 120 bp, Artificial Sequence
  ENSG00000116604_32 (sequence is synthesized)
tggcagttagccctctgtgcttctccctgcagccctacctctgccaaggtctctccctccagggacctctgcttccacccacatatgtccacttagtcacccacacttgacacagttcct

SEQ ID NO: 217140 - DNA, 120 bp, Artificial Sequence
  ENSG00000116604_33 (sequence is synthesized)
ggagtaccctcttcccccaaccccagacctgctttcagagcaaaactcaagtccctcttcctccgtgaagcttctccctcagctgagcagtgatcacttactcactcttaaccccaatcc

SEQ ID NO: 217141 - DNA, 120 bp, Artificial Sequence
  ENSG00000116604_34 (sequence is synthesized)
gctgactgggtggggacagcacgtccagccttcccacctctcctgcaggcttctagacggagtttcaaaaactgatgagcctcgatccagggcttgaaagaagccagggtgtaatcttgt

SEQ ID NO: 217142 - DNA, 120 bp, Artificial Sequence
  ENSG00000116604_35 (sequence is synthesized)
tcatgcatgcgtccccagagcctcgcccagtgcctggcacatagtaggcactcaataaatgctgaatgggtgaatagttgaatgataggtgctcaataaatgaatgaatggccttccctt

SEQ ID NO: 217143 - DNA, 120 bp, Artificial Sequence
  ENSG00000116604_36 (sequence is synthesized)
ctcaggctattcccaccattagtctgcccacctttctaggctgggcttggccaccattaaacacggggtgggggtgagggcccctgcaattcacggtgcaatattcaccagttttgccct

SEQ ID NO: 217144 - DNA, 120 bp, Artificial Sequence
  ENSG00000116604_37 (sequence is synthesized)
ctgcctcataaaggcaaacctggcttttgattaccatgtgtggatgtttcagtgtcctttcttctctgtccctggggatggggtggtctgtgaatatgtgacatttctgcagttcagtat

SEQ ID NO: 217145 - DNA, 120 bp, Artificial Sequence
  ENSG00000116604_38 (sequence is synthesized)
ccgaaggtttctcttgggggtaggggctcctgggcggccagatgaatgggtccctgggaacccagacctcagatgaggacttaatgtcttcttcctctcaagccaaattcgcctccaccc

SEQ ID NO: 217146 - DNA, 120 bp, Artificial Sequence
  ENSG00000116604_39 (sequence is synthesized)
actccctctgaagaactgggcatttgccaaagtaaccactggagtcatctaatggccctccccctccccaggtttcccacagctttcagggacagtgggcaagaggacacccccccccac

SEQ ID NO: 217147 - DNA, 120 bp, Artificial Sequence
  ENSG00000116604_40 (sequence is synthesized)
cacctcagtggaacacaccattctccccccctcaacagcacactcagtgcagcaagactgacccctgaccccctcccagccctccctaccttggacaggaaggaagtaatgcaccttctc

SEQ ID NO: 217148 - DNA, 120 bp, Artificial Sequence
  ENSG00000116604_41 (sequence is synthesized)
ttgctgattatttatttgtttggagagacagaaatgtaaaagtgtatctagaaatatctatatctctatatatttttaactgactctttggaatcccctggggtggggtgaggggtaagt

SEQ ID NO: 217149 - DNA, 120 bp, Artificial Sequence
  ENSG00000116604_42 (sequence is synthesized)
ttaggctttcgcggaggggaggagacatggagcctgggaactccttgttctcccctctgctgcctctccccaccccttaaagcagttggtagaaggaatggtatttgtatggggggaggg

SEQ ID NO: 217150 - DNA, 120 bp, Artificial Sequence
  ENSG00000116604_43 (sequence is synthesized)
aggctggaatggagaatctggattctctcctcttccccattctccagagggagggaggtggtgaggaagaggaagggaggggcaggatgggccatggaggtgccccacccccacacctga

SEQ ID NO: 217151 - DNA, 120 bp, Artificial Sequence
  ENSG00000116604_44 (sequence is synthesized)
caatcacccacactcctggggctcttcctgggtcctggggcagggcgagtccaagtgtgaggctgttgatttgttttcaatatttcttttcgtgctgtatggtgatgctttcttagtatt

SEQ ID NO: 217152 - DNA, 120 bp, Artificial Sequence
  ENSG00000116604_45 (sequence is synthesized)
ctacacaataagaaaagacaaagtcctcgagattcttatgagttttgtttgaaaactctttcactatatttgttgtaaagaggtttactattaaaagaaaaagaatacacgtttctgata

SEQ ID NO: 217153 - DNA, 120 bp, Artificial Sequence
  ENSG00000116604_46 (sequence is synthesized)
gagttacctttggagcccgaaaggaggaaggaagcaaaatatcaacaacagccgaggcggctcaggcgctcggccccggttccccgcttgcctgccgcccgcctgctggcccccgcgccc

SEQ ID NO: 217154 - DNA, 120 bp, Artificial Sequence
  ENSG00000116604_47 (sequence is synthesized)
acgacgggggcccaggcctcacggcgccgcccagggcccgcgcggacgccggcctcatttattattctccccgcccggagctgcggcttcccggtgttgaagatcccccggaccaggggc

SEQ ID NO: 217155 - DNA, 120 bp, Artificial Sequence
  ENSG00000116604_48 (sequence is synthesized)
gccccgagcccgacggggaggactcgctggaacagagccccctgctggaggacaagtaccgacgcgccagcgaggagctcgacgggctcttccggcgctatgggtcaactgtcccggccc

SEQ ID NO: 217156 - DNA, 120 bp, Artificial Sequence
  ENSG00000116641_0 (sequence is synthesized)
atggccgagcgccgcgccttcgcccagaagatcagcagaacggtggcagccgaagttaggaagcagatctccggacaatatagtggttctccccaactgctcaaaaaccttaatattgtt

SEQ ID NO: 217157 - DNA, 120 bp, Artificial Sequence
  ENSG00000116641_1 (sequence is synthesized)
ggcaatatatcccatcacaccacagtgccccttaccgaagcagtagatccagtggatttggaagattacctcattactcatcctttggctgtggattctgggcctttacgggatttgatt

SEQ ID NO: 217158 - DNA, 120 bp, Artificial Sequence
  ENSG00000116641_2 (sequence is synthesized)
gaatttcctccagatgatattgaagttgtttatagtcctcgggactgcagaactcttgtttcagctgtacctgaagaaagtgaaatggatccacatgttagagactgtataagaagttat

SEQ ID NO: 217159 - DNA, 120 bp, Artificial Sequence
  ENSG00000116641_3 (sequence is synthesized)
acagaagactgggcaattgtcatcagaaaatatcataaattgggaacaggatttaatcccaatacattagataaacagaaagaaaggcaaaaaggtttgccaaaacaagtttttgaatct

SEQ ID NO: 217160 - DNA, 120 bp, Artificial Sequence
  ENSG00000116641_4 (sequence is synthesized)
gatgaagctccagatggcaacagctaccaggatgatcaagatgaccttaaaagacgttcaatgtcaatagatgataccccaaggggtagctgggcctgtagtatctttgacttgaaaaat

SEQ ID NO: 217161 - DNA, 120 bp, Artificial Sequence
  ENSG00000116641_5 (sequence is synthesized)
tcacttcctgatgctttgcttcccaatttacttgatcgaactccaaatgaagaaatagaccgtcagaatgatgaccaaaggaaatcaaaccgtcacaaagaactttttgctttgcatcca

SEQ ID NO: 217162 - DNA, 120 bp, Artificial Sequence
  ENSG00000116641_6 (sequence is synthesized)
tcaccagatgaggaagaaccaatagaacggcttagtgttcctgatatacccaaagaacattttggtcaaagacttcttgtaaaatgcttatcactcaagtttgaaattgaaattgaaccc

SEQ ID NO: 217163 - DNA, 120 bp, Artificial Sequence
  ENSG00000116641_7 (sequence is synthesized)
atttttgcaagtttggctttatatgatgtcaaggaaaagaaaaagatttcagaaaacttttattttgaccttaattctgagcagatgaaagggttgttacgtccacatgtaccacctgct

SEQ ID NO: 217164 - DNA, 120 bp, Artificial Sequence
  ENSG00000116641_8 (sequence is synthesized)
gccattactaccctggcaagatcagcaattttttctatcacttatccttcccaagatgtttttcttgtaataaagctagaaaaagtcctacagcaaggagacattggagagtgtgcagaa

SEQ ID NO: 217165 - DNA, 120 bp, Artificial Sequence
  ENSG00000116641_9 (sequence is synthesized)
ccatatatgattttcaaagaagcagatgccaccaagaataaagaaaaactggagaaactgaagagtcaagcagatcagttttgccaaagacttgggaaatatcgcatgccttttgcttgg

SEQ ID NO: 217166 - DNA, 120 bp, Artificial Sequence
  ENSG00000116641_10 (sequence is synthesized)
actgcaatccatttaatgaatattgttagcagtgctgggagtttggaaagagattctacagaagtagaaatcagtactggagaacgaaaagggtcttggtcagagaggaggaattctagt

SEQ ID NO: 217167 - DNA, 120 bp, Artificial Sequence
  ENSG00000116641_11 (sequence is synthesized)
attgttggcagacgatcacttgaaaggacaacaagtggagatgatgcttgtaacttgacgagctttcgaccagctactctcacagtgacaaatttttttaagcaggaaggagaccgctta

SEQ ID NO: 217168 - DNA, 120 bp, Artificial Sequence
  ENSG00000116641_12 (sequence is synthesized)
agtgatgaagatctctacaaattccttgctgatatgagaaggccatcttctgtcttacggcgactaagacctattacagctcagctcaagatagacatttctcccgcacctgaaaatccc

SEQ ID NO: 217169 - DNA, 120 bp, Artificial Sequence
  ENSG00000116641_13 (sequence is synthesized)
cattattgcctaactccggagctgcttcaagtgaagctttaccctgacagtagagttagacctaccagagaaatcttagagtttcccgcaagggatgtttatgttccaaacactacttac

SEQ ID NO: 217170 - DNA, 120 bp, Artificial Sequence
  ENSG00000116641_14 (sequence is synthesized)
agaaatcttctctacatataccctcagagtcttaattttgccaatcgtcaaggttctgctagaaatataacagtgaaagtccagtttatgtatggagaggatccaagcaatgccatgccg

SEQ ID NO: 217171 - DNA, 120 bp, Artificial Sequence
  ENSG00000116641_15 (sequence is synthesized)
gtaatctttggtaaatctagctgttcagaattttcaaaggaagcctatacagccgtagtatatcataacaggtctcctgattttcatgaagaaatcaaggttaagcttcctgctacttta

SEQ ID NO: 217172 - DNA, 120 bp, Artificial Sequence
  ENSG00000116641_16 (sequence is synthesized)
actgaccatcatcacttgctttttactttttatcatgttagttgtcaacaaaaacaaaatactcctcttgaaacaccagttggatatacatggataccaatgcttcagaatggacggttg

SEQ ID NO: 217173 - DNA, 120 bp, Artificial Sequence
  ENSG00000116641_17 (sequence is synthesized)
aagactggccagttttgcttgccagtctcattggaaaaaccaccacaggcttattctgtactgtctcctgaggttcctctacctggcatgaaatgggtagataatcacaaaggtgttttt

SEQ ID NO: 217174 - DNA, 120 bp, Artificial Sequence
  ENSG00000116641_18 (sequence is synthesized)
aatgttgaagttgttgctgtttcgtctatccatacacaagatccttatcttgacaaattttttgctctggtcaatgctctggatgaacacctgttcccagtccgaattggggacatgcga

SEQ ID NO: 217175 - DNA, 120 bp, Artificial Sequence
  ENSG00000116641_19 (sequence is synthesized)
atcatggaaaataacttagaaaatgaattgaagagcagtatttcagcactgaattcatcccagctggaaccagtggtccgatttcttcatcttctgctagataaactgatacttttagtt

SEQ ID NO: 217176 - DNA, 120 bp, Artificial Sequence
  ENSG00000116641_20 (sequence is synthesized)
attagacctcctgtcattgctggccaaatagttaacctaggtcaagcatcttttgaagccatggcatcaattataaatcgacttcacaaaaacttggaaggaaatcatgaccagcatggc

SEQ ID NO: 217177 - DNA, 120 bp, Artificial Sequence
  ENSG00000116641_21 (sequence is synthesized)
agaaacagccttcttgcatcatatattcattatgttttccgcctaccaaatacttaccctaattcatcatcaccaggtcctgggggtttgggaggatcagtgcattatgccacaatggct

SEQ ID NO: 217178 - DNA, 120 bp, Artificial Sequence
  ENSG00000116641_22 (sequence is synthesized)
agatctgcggtgagacctgcaagccttaatttaaatcgttctcgaagccttagtaatagcaatccagatatatctgggactcccacgtcaccagatgatgaagttcgatcaatcatcggg

SEQ ID NO: 217179 - DNA, 120 bp, Artificial Sequence
  ENSG00000116641_23 (sequence is synthesized)
agtaaggctatggatcgaagttgtaatcgtatgtcttcgcacacagagacgtcaagtttcttacaaacattaacgggacgcttaccaactaaaaagctttttcacgaggagctggctttg

SEQ ID NO: 217180 - DNA, 120 bp, Artificial Sequence
  ENSG00000116641_24 (sequence is synthesized)
cagtgggttgtttgcagtggcagcgttcgggaatcagctttgcaacaagcctggttcttttttgaattaatggtaaagagcatggtgcaccatttatactttaatgataaacttgaggct

SEQ ID NO: 217181 - DNA, 120 bp, Artificial Sequence
  ENSG00000116641_25 (sequence is synthesized)
ccaaggaaaagtcgttttccagaacgtttcatggatgacattgcagctcttgtcagcacgattgctagtgatatagtttcacgatttcagaaggacacagaaatggttgagagactcaat

SEQ ID NO: 217182 - DNA, 120 bp, Artificial Sequence
  ENSG00000116641_26 (sequence is synthesized)
acaagccttgcattctttctcaatgatctgttgtctgttatggacagaggatttgtttttagccttataaagtcctgctataaacaggtgtcttcaaagctttactcattaccgaatccc

SEQ ID NO: 217183 - DNA, 120 bp, Artificial Sequence
  ENSG00000116641_27 (sequence is synthesized)
agtgttctggtgtccttgaggctggattttctacgaatcatctgcagtcatgagcactatgttacattaaacttaccctgcagcttacttactccacctgcatctccatcaccttctgtt

SEQ ID NO: 217184 - DNA, 120 bp, Artificial Sequence
  ENSG00000116641_28 (sequence is synthesized)
atctcagagttctggattttctacgaatgtacaagaccaaaagattgcaaatatgtttgaattatccgtgcctttccgccaacagcattatttggcaggacttgtgttaacagagctggc

SEQ ID NO: 217185 - DNA, 120 bp, Artificial Sequence
  ENSG00000116641_29 (sequence is synthesized)
tgtcattttagaccctgatgctgaaggactgtttggattgcataagaaagtcatcaatatggtacacaatttactctccagtcacgactcagacccgcggtactctgaccctcagataaa

SEQ ID NO: 217186 - DNA, 120 bp, Artificial Sequence
  ENSG00000116641_30 (sequence is synthesized)
ggctcgagtggccatgttgtatctacctctgattggtattatcatggaaactgtacctcagctgtatgattttacagaaactcacaatcaacgaggaagaccaatttgtatagccactga

SEQ ID NO: 217187 - DNA, 120 bp, Artificial Sequence
  ENSG00000116641_31 (sequence is synthesized)
tgattatgaaagtgagagcggaagtatgataagccagaccgttgccatggcaatcgcagggacatcggtccctcaactaacaaggcctggcagtttcctcctcacgtcaacgagtggcag

SEQ ID NO: 217188 - DNA, 120 bp, Artificial Sequence
  ENSG00000116641_32 (sequence is synthesized)
gcaacacactaccttttcagcagaatcaagtcgaagccttttgatctgtctactttgggttctcaaaaatgcagatgaaacagttctacagaagtggtttacagatctctcagtcttgca

SEQ ID NO: 217189 - DNA, 120 bp, Artificial Sequence
  ENSG00000116641_33 (sequence is synthesized)
gctaaaccggctattagatctgctttatctctgtgtgtcttgctttgagtataaagggaaaaaagtgtttgaacgaatgaatagcttgacctttaagaaatcaaaagacatgagagcaaa

SEQ ID NO: 217190 - DNA, 120 bp, Artificial Sequence
  ENSG00000116641_34 (sequence is synthesized)
gcttgaagaagctattcttgggagcataggtgccaggcaagaaatggtacggcgaagccgaggacagctcggtacgtacacaatagcttctcctcctgagagaagcccatctggaagtgc

SEQ ID NO: 217191 - DNA, 120 bp, Artificial Sequence
  ENSG00000116641_35 (sequence is synthesized)
ctttggaagtcaagaaaatttgaggtggaggaaagatatgactcactggcgtcaaaacacagagaagcttgacaaatcaagagcagagattgaacacgaagcactgattgatggaaacct

SEQ ID NO: 217192 - DNA, 120 bp, Artificial Sequence
  ENSG00000116641_36 (sequence is synthesized)
ggctacagaagcaaacctaatcattttagatacattagagattgttgttcagaccgtttctgtaacggaatccaaagagagcattcttggtggagtgctaaaagtgctactacacagcat

SEQ ID NO: 217193 - DNA, 120 bp, Artificial Sequence
  ENSG00000116641_37 (sequence is synthesized)
ggcctgtaaccaaagtgcagtttatctacaacactgttttgctacacagagagccttggtttcaaagtttcctgaactcttatttgaagaagagacagagcagtgtgctgatttatgcct

SEQ ID NO: 217194 - DNA, 120 bp, Artificial Sequence
  ENSG00000116641_38 (sequence is synthesized)
caggcttctccgacactgtagcagtagcatcggtacaatacggtcacacgccagtgcctccctttacctactaatgaggcaaaactttgagattgggaataactttgccagggttaaaat

SEQ ID NO: 217195 - DNA, 120 bp, Artificial Sequence
  ENSG00000116641_39 (sequence is synthesized)
gcaggtaacaatgtcactatcctccttggtgggcacatctcagaattttaatgaagaattcttaagacgttctctaaagactatattgacatatgctgaagaagatctggaattgaggga

SEQ ID NO: 217196 - DNA, 120 bp, Artificial Sequence
  ENSG00000116641_40 (sequence is synthesized)
aacaacatttcctgatcaggtccaggatctggttttcaatctccatatgattctttctgatactgtgaaaatgaaggaacaccaggaggatcctgaaatgttgattgatctaatgtacag

SEQ ID NO: 217197 - DNA, 120 bp, Artificial Sequence
  ENSG00000116641_41 (sequence is synthesized)
aattgccaagggttaccagacctctccagatctgcgattgacctggttgcagaacatggcaggcaagcactcagaacgaagcaatcatgctgaagctgcacagtgtctagtccactcagc

SEQ ID NO: 217198 - DNA, 120 bp, Artificial Sequence
  ENSG00000116641_42 (sequence is synthesized)
agcacttgttgctgaatatttgagcatgctggaggaccggaaatatcttcctgtgggatgtgtaacatttcagaatatttcatctaatgttttagaagaatctgcggtctcagatgatgt

SEQ ID NO: 217199 - DNA, 120 bp, Artificial Sequence
  ENSG00000116641_43 (sequence is synthesized)
ggtatctccagatgaagaaggtatctgctctggaaaatactttactgagtcaggacttgtgggattactggaacaagcagctgcttccttctctatggctggcatgtatgaagcagttaa

SEQ ID NO: 217200 - DNA, 120 bp, Artificial Sequence
  ENSG00000116641_44 (sequence is synthesized)
tgaagtttacaaagtacttattcctattcatgaagctaatcgggatgcaaagaaactatccacaattcatggtaaacttcaagaagcattcagcaaaattgttcatcagagtactggctg

SEQ ID NO: 217201 - DNA, 120 bp, Artificial Sequence
  ENSG00000116641_45 (sequence is synthesized)
ggagcggatgtttggcacctattttcgtgttggtttttatggaaccaagttcggggatttggatgaacaagaatttgtttacaaggagcctgcaataaccaaacttgcagagatatctca

SEQ ID NO: 217202 - DNA, 120 bp, Artificial Sequence
  ENSG00000116641_46 (sequence is synthesized)
cagattggagggattttacggagaaagatttggagaggatgtggttgaagtaatcaaagactctaatcctgtagacaagtgtaaattagatcctaacaaggcatatattcagattaccta

SEQ ID NO: 217203 - DNA, 120 bp, Artificial Sequence
  ENSG00000116641_47 (sequence is synthesized)
tgtggagccatactttgacacatatgagatgaaggacagaatcacctatttcgacaaaaattacaatcttcgtcgattcatgtactgtacaccctttactttagatggccgtgcccatgg

SEQ ID NO: 217204 - DNA, 120 bp, Artificial Sequence
  ENSG00000116641_48 (sequence is synthesized)
ggaacttcatgaacaattcaaaaggaagaccattctgactacgtctcatgcctttccttatattaaaacaagggtcaatgtcactcataaagaagagatcatcttaacaccaattgaagt

SEQ ID NO: 217205 - DNA, 120 bp, Artificial Sequence
  ENSG00000116641_49 (sequence is synthesized)
tgctattgaggacatgcagaaaaagacacaggagttggcatttgcaacacatcaggatcccgcagaccccaaaatgcttcagatggtactccagggatctgtaggcaccacagtgaatca

SEQ ID NO: 217206 - DNA, 120 bp, Artificial Sequence
  ENSG00000116641_50 (sequence is synthesized)
ggggcctttggaagttgcccaggtttttctgtctgaaatacctagtgacccaaagctcttcagacatcataataaactgcgactctgctttaaagattttactaaaaggtgtgaagatgc

SEQ ID NO: 217207 - DNA, 120 bp, Artificial Sequence
  ENSG00000116641_51 (sequence is synthesized)
cttaagaaaaaataagagcttaattgggccggatcaaaaggagtatcaaagggaactggagagaaactatcatcgccttaaagaggccctacagccactgatcaacagaaagatccctca

SEQ ID NO: 217208 - DNA, 120 bp, Artificial Sequence
  ENSG00000116641_52 (sequence is synthesized)
gttatacaaggcagtattgcctgtcacctgccacagagattccttcagtcgaatgagccttcgcaaaatggatctctaaactgaatgcacttgttttattcatctgcaaagagccatgta

SEQ ID NO: 217209 - DNA, 120 bp, Artificial Sequence
  ENSG00000116641_53 (sequence is synthesized)
ttcaacatcgagtgtgaaaagatctattggaaaacaacatggaatggaattctggaaattattattcattgaagaatgcagtggccaagaaaatatcaaatgtagattgttaacgcttga

SEQ ID NO: 217210 - DNA, 120 bp, Artificial Sequence
  ENSG00000116641_54 (sequence is synthesized)
gaatcatggctatggtttctaatgttctggtaacaagctgttatcttttaagacattttaatgactcaaaggtacactatacatttaccattatttataccatagctaaggttaaaaatt

SEQ ID NO: 217211 - DNA, 120 bp, Artificial Sequence
  ENSG00000116641_55 (sequence is synthesized)
ataccatagctaaggttaaaaatttattcactttaagttcgtattttttaatttatattaccatttatagattcattttggaaccattttaaatgtagtaatgcttattttaaaggtact

SEQ ID NO: 217212 - DNA, 120 bp, Artificial Sequence
  ENSG00000116641_56 (sequence is synthesized)
agaacaattaaagggttgactcaagaactagttccaaacctagcagaataaaaatcatagatagccccaaattaatgagtttggtaactgtttcaaagttattttccatttacataccca

SEQ ID NO: 217213 - DNA, 120 bp, Artificial Sequence
  ENSG00000116641_57 (sequence is synthesized)
aaacaggaatttagaattgcagaactttacttagtaaaacctttgtgtaaaataatttaaatacggggataactaataccagtgacaacaccttaacttgattaaatcttattacaccaa

SEQ ID NO: 217214 - DNA, 80 bp, Artificial Sequence
  ENSG00000116641_58 (sequence is synthesized)
aggtccggagcccggactggcggaggccgcgagggagggagcacgagcgaggaggcacgcgcccgccggtccgcacccgg

SEQ ID NO: 217215 - DNA, 120 bp, Artificial Sequence
  ENSG00000116641_59 (sequence is synthesized)
atttctttaatggaattctgctctagcaacttttatttgctaactcgaaactgctgggatattattcataaatttttttaaaagtcactttggaatccatcatctcaatgataatttctt

SEQ ID NO: 217216 - DNA, 120 bp, Artificial Sequence
  ENSG00000116641_60 (sequence is synthesized)
tcactttggaatccatcatctcaatgataatttctttgtatactttattagaggttacttttttttttttttgagattgagtcttgctcttttgccaggctggagtgtagtggcgcgatc

SEQ ID NO: 217217 - DNA, 66 bp, Artificial Sequence
  ENSG00000116641_61 (sequence is synthesized)
cccattttggccaggatgatctcaatctcctgaccttgatcccctcacctctaattaaaagaattt

SEQ ID NO: 217218 - DNA, 120 bp, Artificial Sequence
  ENSG00000116641_62 (sequence is synthesized)
ctcctgaccttgatcccctcacctctaattaaaagaatttggaatatggttgtttagaatatgcttattatgttttccaaatagcttgtttactttttttactttgatttaggtatgtaa

SEQ ID NO: 217219 - DNA, 120 bp, Artificial Sequence
  ENSG00000116641_63 (sequence is synthesized)
tgatttaggtatgtaaagattggtctcagtgaaatataaactttacatgagagtataatatcctactatctgtagataaataagtaatttttttgagaattatttaacatgaatgttttt

SEQ ID NO: 217220 - DNA, 120 bp, Artificial Sequence
  ENSG00000116641_64 (sequence is synthesized)
gtgtctgtatacttgtctgtcagtattataaacttttcaagggcaaagatttgacctttacatatttttttcatcttgatattctttaacacaatattggacatacacagtaggtgctac

SEQ ID NO: 217221 - DNA, 120 bp, Artificial Sequence
  ENSG00000116641_65 (sequence is synthesized)
tttttcttgaactctttattagaattctccagtgaaacagaactaataggaattatatatatatcttagatctgttttgattattgtagtttataaatacattttcatatcaggaagtat

SEQ ID NO: 217222 - DNA, 120 bp, Artificial Sequence
  ENSG00000116641_66 (sequence is synthesized)
gtatgagactttcaactttcttcttttttccctaaatttgttttgattattcagggtctcttgaatttccctatgaattctaggatgggtttttctatttctgcaaaaaaaaaaaaaaaa

SEQ ID NO: 217223 - DNA, 120 bp, Artificial Sequence
  ENSG00000116641_67 (sequence is synthesized)
tgaatcaaagtctgcattttaacaagatccccagggattttacggagaaagatttggagaggatgtggttgaagtaatcaaagactctaatcctgtagacaagtgtaaattagatcctaa

SEQ ID NO: 217224 - DNA, 120 bp, Artificial Sequence
  ENSG00000116641_68 (sequence is synthesized)
tttgtttacaaggagcctgcaataaccaaacttgcagagatatctcacagattggagtgtagtggatggaccggaagcattgggttcacctgggagattgtttgaaatgcagaacctcag

SEQ ID NO: 217225 - DNA, 120 bp, Artificial Sequence
  ENSG00000116641_69 (sequence is synthesized)
ttctaatggtagattgaaagtccaaatgcactttttccaggtggcatctttggatcttctgtgtctcttcttttaagaacaatgcaaatgtacttattgattatcaaaaacgaggatttt

SEQ ID NO: 217226 - DNA, 120 bp, Artificial Sequence
  ENSG00000116641_70 (sequence is synthesized)
tttaagtattcataacacacatttaacaccttggtgtcctgggccccagagttcctttgaaggcccataccaatattttcagtgtaaaactcagtcttttcagaagaaaatacagtatat

SEQ ID NO: 217227 - DNA, 120 bp, Artificial Sequence
  ENSG00000116641_71 (sequence is synthesized)
gaatgttttacgataacattaattacctgattttcaatacagttatgactgaagaatgatatttctaagggcacattttgaaaactccataaatcgtattgtattaacaccttaatagat

SEQ ID NO: 217228 - DNA, 120 bp, Artificial Sequence
  ENSG00000116641_72 (sequence is synthesized)
acaatagtaaaacttaagaatttttctctgtcatatgaccctctgttcctgcagttttggggttcattaaaagcacaaataaaacaatttaatctctttgaaataaagtaataaaagtac

SEQ ID NO: 217229 - DNA, 120 bp, Artificial Sequence
  ENSG00000116641_73 (sequence is synthesized)
cttttagaagttttctttttcccttgtgtataaaacttctctatgtttctgtaatgaacacataaatttccatactttttcccttaactggttattttcttaaaagtcagaatttaatat

SEQ ID NO: 217230 - DNA, 120 bp, Artificial Sequence
  ENSG00000116641_74 (sequence is synthesized)
ggcgtatttcttttttgcccctcctgccccccccaccaactgatattatccattccataggccacagttatttctctaggcctgcatagcgacattttcatactactttaaaactaagta

SEQ ID NO: 217231 - DNA, 120 bp, Artificial Sequence
  ENSG00000116641_75 (sequence is synthesized)
agtttcatacctctaattatcaatgacatgtgtatttattctctctggcttatgaccctacttttctttaaagataatttattctggacccagtatggtggctcatgcctgtaatctcag

SEQ ID NO: 217232 - DNA, 120 bp, Artificial Sequence
  ENSG00000116641_76 (sequence is synthesized)
gaggctaagacgggaggattgcttgaatccaggagttcaagaccagcatggggaacatagtgagataccgtctctacaaaaaattaaaaattcaccaggcatggtggctcatgcctgtgg

SEQ ID NO: 217233 - DNA, 120 bp, Artificial Sequence
  ENSG00000116641_77 (sequence is synthesized)
cgtcgccgcagcagccatggccgagcgccgcgccttcgcccagaagatcagcaggttcaaagtggacttgtgcgtccaggattgaaaacgtgtggacagaatgaaaagttgagagctgcg

SEQ ID NO: 217234 - DNA, 120 bp, Artificial Sequence
  ENSG00000116641_78 (sequence is synthesized)
gaccctgtcttttaaaaagaaagaaaaatatggacagcaaatatttactatgtagatgatattagatgtggtttctttttttcggactgggacataaaatggtcagatatgtccttctga

SEQ ID NO: 217235 - DNA, 120 bp, Artificial Sequence
  ENSG00000116641_79 (sequence is synthesized)
taagaaatggagtacaatatatcttggaagaatgtgttttgtcagtaagccaccaacctgatttttatgctgaagtataaaggatatgcaagcatgcaaaaataattgcagtagaggatg

SEQ ID NO: 217236 - DNA, 120 bp, Artificial Sequence
  ENSG00000116641_80 (sequence is synthesized)
aaatatagaggaaaacaacatagggaaggaggtaatcctcaaaagaatttcttgaggaaatttgtaagaattctcaagaaaacaccagagaagtggatgatagttcaggggttatgctaa

SEQ ID NO: 217237 - DNA, 120 bp, Artificial Sequence
  ENSG00000116641_81 (sequence is synthesized)
atgatagttcaggggttatgctaatgtcctggtgtttataccagtatatatagaatatggggaacataaagcttaattaagagcttgaggccgagcgtggtggctcatgtctgtaatccc

SEQ ID NO: 217238 - DNA, 72 bp, Artificial Sequence
  ENSG00000116641_82 (sequence is synthesized)
cactcttgcttagagtcgggtgtcaaatatattagagtttaacttcccactccaccacttactaacagcgtg

SEQ ID NO: 217239 - DNA, 120 bp, Artificial Sequence
  ENSG00000116641_83 (sequence is synthesized)
tagagtttaacttcccactccaccacttactaacagcgtgaccttgggcaagatacttttcctcctctataaaatgagggtgaaaataatttaatctatcacataaagttgtgataagga

SEQ ID NO: 217240 - DNA, 120 bp, Artificial Sequence
  ENSG00000116641_84 (sequence is synthesized)
ttgatataatacatgtaaagtggttaaccagtgtctagcacatagtaagtactcaaaaaatgttgaaagttgttatttttgttgttaatatgatttaatcataattactattagaaatct

SEQ ID NO: 217241 - DNA, 120 bp, Artificial Sequence
  ENSG00000116641_85 (sequence is synthesized)
taacactagttaataaaatctaagaggttttatatttcccagttgagatctgcatctagaagtgaactggtaaatgctctttaagaggaataaacctagtagaaggaaagaaagatcacc

SEQ ID NO: 217242 - DNA, 120 bp, Artificial Sequence
  ENSG00000116641_86 (sequence is synthesized)
attgtgtgaaatactggtatgcctatatggaaatcagttaacttaaaggaagcattgtggaaaacaactgggagaggataaaagaagttagagaaatgatgtcactgtggaaatatacaa

SEQ ID NO: 217243 - DNA, 120 bp, Artificial Sequence
  ENSG00000116641_87 (sequence is synthesized)
ctagtccatcggaatgtttcttgctaaataaagacaacaaaactaaaatagatttatgatatatttgtcataagaggtttgaaccatttagaaacatggtagatggatttcttcgtcccg

SEQ ID NO: 217244 - DNA, 120 bp, Artificial Sequence
  ENSG00000116641_88 (sequence is synthesized)
gacatagtcttatcacccagaggattgtggaagcagtaagtagaatcgctaaggaagaataagctgtattgtgaggagtgatagaaagttcagaaaggattcataacagtaaagaaaggt

SEQ ID NO: 217245 - DNA, 120 bp, Artificial Sequence
  ENSG00000116641_89 (sequence is synthesized)
aatgctagaaaaacagcctaatttataggaaagttttttgtttttgttttttttttaattcaaaagaaaaacaggtatcatcctgtggtccaaagctctgaagaagaaataaagatgaag

SEQ ID NO: 217246 - DNA, 120 bp, Artificial Sequence
  ENSG00000116641_90 (sequence is synthesized)
cagccatcagtttttgacgatgtaaaccagtaaattagaatctacttaaagctatcttgtagcaccatgaaggtaacacagctggagtttgagaaattacctattttctgacacttgtaa

SEQ ID NO: 217247 - DNA, 120 bp, Artificial Sequence
  ENSG00000116641_91 (sequence is synthesized)
agtttagaagcatataaaaagtaaaattaggtgctttaattcatctaaaattatatgcaagtcatacagaaaaaaaatttgagaagtaacattttaattcttggcaagtttttccaaaac

SEQ ID NO: 217248 - DNA, 120 bp, Artificial Sequence
  ENSG00000116641_92 (sequence is synthesized)
gatgcatagtaatgatttccagaacagtttagaacaatggtttttgggtagtagtgcagtttacagaatggcatcatttataatccttttcttctactgaccagttacatgaatcactta

SEQ ID NO: 217249 - DNA, 120 bp, Artificial Sequence
  ENSG00000116641_93 (sequence is synthesized)
taccatagcatcttctcacttctttcatgggactttatcacttgatgattctatatttcttaatttcacccattagattgtgagctccttgagggcagggacgatgtcttactcatgtct

SEQ ID NO: 217250 - DNA, 120 bp, Artificial Sequence
  ENSG00000116641_94 (sequence is synthesized)
atatcttgactcctgtcacatttttggataaataattaatgctcaatccatattgctaaatgattaaaagtacatgtcaaatggtcaaaaaaggaacactgtctgctttatgtcatatta

SEQ ID NO: 217251 - DNA, 120 bp, Artificial Sequence
  ENSG00000116641_95 (sequence is synthesized)
tgaaaataaacaagttattttgtgaaaagtgatagcttctcagagggaaaaaaggtattgcatttcttttacttgtgtgttattagtcatatgaaaatacaatgtttttatgtatgaaat

SEQ ID NO: 217252 - DNA, 120 bp, Artificial Sequence
  ENSG00000116641_96 (sequence is synthesized)
ggctgatttgaaagagtatataaacatagacatactgtgtttgccttttttaaaaaaagggctgtttaaatgggtcctaagataactttttgataatgtaatattgacatgataaaattg

SEQ ID NO: 217253 - DNA, 120 bp, Artificial Sequence
  ENSG00000116641_97 (sequence is synthesized)
taaacttcataattctggcacaggaacaatttatgaaaacatactaaggtatttgtaaattgatgaaataatatatatcttaggaaagtcataattattacacttgtacatacccttaaa

SEQ ID NO: 217254 - DNA, 120 bp, Artificial Sequence
  ENSG00000116641_98 (sequence is synthesized)
ataaaagagcctgcttgaaatgttgcaaaaagaaacagaaatacctgctaatatgcccttctaattaaggatgatgccaattaatctctttatataaataataaactttgagttgtttta

SEQ ID NO: 217255 - DNA, 120 bp, Artificial Sequence
  ENSG00000116641_99 (sequence is synthesized)
ctttatgttccattttaaatttctggtaggggatatttgacctctttcatttaatcttgccagagcttagtttgtttttttagttttttcaaagaaccaacttttgcaatttttgatact

SEQ ID NO: 217256 - DNA, 120 bp, Artificial Sequence
  ENSG00000116641_100 (sequence is synthesized)
ctattttaaaatcttatttcctttctaatactttaagttgcttaactcttcagttttagccttctaatataagcatttgatgctatgtgttttctactaagcatcactttagtggcattc

SEQ ID NO: 217257 - DNA, 120 bp, Artificial Sequence
  ENSG00000116641_101 (sequence is synthesized)
cacaaatatgtagagatatatatattatttgtaaatatcctttccttcattgtctgtcagggtccagatacttttctcaaatacttgaattaacttggataaaggactgtcatcaaaatc

SEQ ID NO: 217258 - DNA, 67 bp, Artificial Sequence
  ENSG00000116641_102 (sequence is synthesized)
agaccagcctggctaagatggtgaaacccgtctctactaaaaataagttgaggtaggagaatcgctt

SEQ ID NO: 217259 - DNA, 120 bp, Artificial Sequence
  ENSG00000116641_103 (sequence is synthesized)
ctccatctcaaaaaaaaaaaaaaacaaaacctattaagaaatatttgaacacaggcagacactgtgccagatgacattggtgccacataaatgagcatgattacatccctgaaagagctt

SEQ ID NO: 217260 - DNA, 120 bp, Artificial Sequence
  ENSG00000116641_104 (sequence is synthesized)
tgccacataaatgagcatgattacatccctgaaagagcttctagtcaagtggtgatgtgaaaaaaatgccttcagataattttcaatttaatgacactggaagtaaatagtagattttac

SEQ ID NO: 217261 - DNA, 120 bp, Artificial Sequence
  ENSG00000116641_105 (sequence is synthesized)
aggaactcagttgattatctgttccctgccttaaacctaaaacaaaagatgattatttaacattcagctgaaaaactaaatgtcctcatcatggtgaatacacacacatttgtttcagat

SEQ ID NO: 217262 - DNA, 82 bp, Artificial Sequence
  ENSG00000116641_106 (sequence is synthesized)
tctcagcgcgtttgagacagtcccactctgttgccctggctggattgcagtggtacaatctcagctcactgcattctccact

SEQ ID NO: 217263 - DNA, 86 bp, Artificial Sequence
  ENSG00000116641_107 (sequence is synthesized)
gctcactgcattctccacttcctgggctgaagcatcctcccacttcagcctcatgaatagctggggctacaggagttgtagagacg

SEQ ID NO: 217264 - DNA, 89 bp, Artificial Sequence
  ENSG00000116641_108 (sequence is synthesized)
tatatttttgtgtgtatgtgtgtgtgattaggcccacatatatagtctgtgttgtgtgtcattaagcccacatatatatgtatatgtat

SEQ ID NO: 217265 - DNA, 120 bp, Artificial Sequence
  ENSG00000116641_109 (sequence is synthesized)
tgttgtgtgtcattaagcccacatatatatgtatatgtattttgcgtgtgtatggcattaaacccacaaactatgccagaagtaatatcttgataacatcctgtttttcctaggtgtgaa

SEQ ID NO: 217266 - DNA, 120 bp, Artificial Sequence
  ENSG00000116641_110 (sequence is synthesized)
atgaaaacttcagtaattttgttttttctaaaagcaatgtttcctagctaattttctagtattctggtagatctttcactggattgaagtccagtaaggataatctgtgcattgtagaaa

SEQ ID NO: 217267 - DNA, 120 bp, Artificial Sequence
  ENSG00000116641_111 (sequence is synthesized)
ggctctttgaattgataacttgctccccaacttacaggaaaaccccatctgggcttatatattagtcacatgtttcatttttttattgtgctccttgatttagtgcaaattatttgagtt

SEQ ID NO: 217268 - DNA, 120 bp, Artificial Sequence
  ENSG00000116641_112 (sequence is synthesized)
ggcaaagctttttagaagggtgtgtgtgtgtgtgtgtgaaagataactctaaaacttagtatttcagtaaagtctttaccatgcaaaataataaatcatgaacctttcgggagtcatgtg

SEQ ID NO: 217269 - DNA, 120 bp, Artificial Sequence
  ENSG00000116641_113 (sequence is synthesized)
gctgttatctcctctggtagtttcagttctttaatggctgtttagtgttcacttttatttttacttttccctcgaaatagtaggaagtaaaagcatgtttgttgtcttttaaaatttttg

SEQ ID NO: 217270 - DNA, 77 bp, Artificial Sequence
  ENSG00000116641_114 (sequence is synthesized)
taggaagtaaaagcatgtttgttgtcttttaaaatttttgtttatgagatggggtctcactctgtaattcagacctc

SEQ ID NO: 217271 - DNA, 120 bp, Artificial Sequence
  ENSG00000116641_115 (sequence is synthesized)
ctaggactgtaggcgcatgccaccagctaattttttgtatttttgtagagacagggttgtgccatgttgctcaggttgatctcaaactcctggccccaagcaatccacctgcctcagcct

SEQ ID NO: 217272 - DNA, 120 bp, Artificial Sequence
  ENSG00000116641_116 (sequence is synthesized)
cccaaagtgctaggattataggaataagccaccatgcccagcctaaaagcatgttttgaactcttctttttttatgattcatatttaattatttttagcagaaagagaaatgttaaattt

SEQ ID NO: 217273 - DNA, 120 bp, Artificial Sequence
  ENSG00000116641_117 (sequence is synthesized)
ctgtatgaaaatttttataaccactttctatgttatgtatgtatatatacatatatatttttgtaattatgtttgtaccagcctggacaacatagtgagaccatctctacagaaaattag

SEQ ID NO: 217274 - DNA, 90 bp, Artificial Sequence
  ENSG00000116641_118 (sequence is synthesized)
gcctggacaacatagtgagaccatctctacagaaaattagaaaaattggccaggtatggtgttgtgcatatgtacgattgcttcacccca

SEQ ID NO: 217275 - DNA, 120 bp, Artificial Sequence
  ENSG00000116641_119 (sequence is synthesized)
tctagcctggatgacagagtgagaccctatcttagggtcagggttaaaaaagaaaagtttgttcagttatcaaatagtgacgaatttgtattcagaagtacactaatacaagtttaaatt

SEQ ID NO: 217276 - DNA, 120 bp, Artificial Sequence
  ENSG00000116641_120 (sequence is synthesized)
tttcagaaaaatcaatccccagtgataacatagtcatgtgatacttttttttccattcaaagatcacaacatatttctttaaagaacaccactactctagtaaagtatatcttacatttt

SEQ ID NO: 217277 - DNA, 120 bp, Artificial Sequence
  ENSG00000116641_121 (sequence is synthesized)
ctggaaaggctagagaagatctctactagatccctaaggaaatatagattaccctaacttttgagattgacagatgcaaattgactatatcttaactctcattattggactgaatggaca

SEQ ID NO: 217278 - DNA, 120 bp, Artificial Sequence
  ENSG00000116641_122 (sequence is synthesized)
tgaatgtgagccagtattttggtttttatatgttcagaaatactggccatagttctggctcagtggcttctgttggatttttattttcttcaatccacactaaagctgagtgacataaag

SEQ ID NO: 217279 - DNA, 120 bp, Artificial Sequence
  ENSG00000116641_123 (sequence is synthesized)
taacacatccaagcagttaaaagatagaacaggattagaaacagcaaattataatgagcagggcgatcaactctgaaagagggaaatgaaataaaaattcaagaatagagcatagtgaaa

SEQ ID NO: 217280 - DNA, 120 bp, Artificial Sequence
  ENSG00000116641_124 (sequence is synthesized)
aaaaattcaagaatagagcatagtgaaaacaagtacttttgggtagtcaagtgggtaaatgtgacactctaaaggagaaagtaaaacaggtcaggcacagtggcccacacctgtaatccc

SEQ ID NO: 217281 - DNA, 120 bp, Artificial Sequence
  ENSG00000116641_125 (sequence is synthesized)
tcgctttagttcaggagtttaagaccagcatggtcaacatggcaaaacccatgtctctaccaaaaagaaacaaaaaaaattgctggggcatgtacctgtggtctcagctacttggaaggc

SEQ ID NO: 217282 - DNA, 90 bp, Artificial Sequence
  ENSG00000116641_126 (sequence is synthesized)
aggctgaggtgggaggattgcttgagccgggaaggtagagtttgcagtgcgctgagaccatgctactatgctccagcctgggcaacaaga

SEQ ID NO: 217283 - DNA, 120 bp, Artificial Sequence
  ENSG00000116641_127 (sequence is synthesized)
agaacattgtaggtataaaacatccatgagcctttacctcagaaaggtaaagttagatatgaagaaagttaaggaaaacatagtaaatgggaagaatcttagtatctctaagaggagata

SEQ ID NO: 217284 - DNA, 120 bp, Artificial Sequence
  ENSG00000116641_128 (sequence is synthesized)
ctttctggtagttagtgactccctgatgactggtatagacccataactgagcacctgataatatatcccataccactgattttttttctgccccttatgctacttttgagaagaaaaaga

SEQ ID NO: 217285 - DNA, 120 bp, Artificial Sequence
  ENSG00000116641_129 (sequence is synthesized)
aagatatgaaagcccagcatggtggctgacacctgtaatcccaacattatgggaggccaaggcgcgatcctcgcttgaggcctgaagtttgaaaccagtctgggcaacactgagatctca

SEQ ID NO: 217286 - DNA, 120 bp, Artificial Sequence
  ENSG00000116641_130 (sequence is synthesized)
aaaaaattagctgggcatggtggtgtgtacctgtggtcctagctacttgggagactgaagcaggaagatcacttaggcccaagagtttgaggttacagtgaactatgatcaccactgcac

SEQ ID NO: 217287 - DNA, 120 bp, Artificial Sequence
  ENSG00000116641_131 (sequence is synthesized)
ggcaaacagcattagtgaagcaaatacattcaagccatgtaacaacaactcagatgtaccagaagatatgtaccatcccttataccataacatattagaactttacccatttttgagtcc

SEQ ID NO: 217288 - DNA, 120 bp, Artificial Sequence
  ENSG00000116641_132 (sequence is synthesized)
tcaattttttacttcttttctaagaccctaattcacccccagctttttctttaaaaggttgattttttttttttcatttaggaatccaagtttggaattttattgttacatgaaagttta

SEQ ID NO: 217289 - DNA, 120 bp, Artificial Sequence
  ENSG00000116641_133 (sequence is synthesized)
caattgatcttttttttttctaatttcagttgattatacataaagttcattaaatagttttcagtcagtacactgatttaacagatgctcttttactcagatcatcttaacaccaattga

SEQ ID NO: 217290 - DNA, 120 bp, Artificial Sequence
  ENSG00000116641_134 (sequence is synthesized)
ggatttgtatgaatcatttctattgctgccaccccttaaaggaacccatacatgcagtctgccttcaaacctagaaaccactttatcagcctagacataacatgcttggacaaagtacat

SEQ ID NO: 217291 - DNA, 120 bp, Artificial Sequence
  ENSG00000116641_135 (sequence is synthesized)
atcatttctgttcttaaggagcttatatacttgtggtcctaagtgttatggaaaggaacaaagcaaaagaaaaggaaaaggaggtattggagagtgggaggcctttctaaggaggcgata

SEQ ID NO: 217292 - DNA, 120 bp, Artificial Sequence
  ENSG00000116641_136 (sequence is synthesized)
aaggaaaatttgtgagaagaacaattaggaaaaaggaacaacaaccattgcacaggttgtaagtcagaagcgtagtcagagtatatactgatagattcgcaaggataacagaaagcggta

SEQ ID NO: 217293 - DNA, 120 bp, Artificial Sequence
  ENSG00000116641_137 (sequence is synthesized)
agcaagaggaagaatggtaggaaataaagtcatatcatgtaaggccttataagccatggttaagattttaagcaaaccaatgttagaacatttgcttatttaagtgggtattgttttaaa

SEQ ID NO: 217294 - DNA, 120 bp, Artificial Sequence
  ENSG00000116641_138 (sequence is synthesized)
gaaaagatactgcatatagcaagtacatttcttctgaaattattgtgaaaatttttaataaaaagcaccattgtcaggtttttcaacttgtactgaggataaaatggcttgtacaaatta

SEQ ID NO: 217295 - DNA, 120 bp, Artificial Sequence
  ENSG00000116641_139 (sequence is synthesized)
tagcttcactataaagggaaaaaactgtctgaaagcattaatgttgttttgcactgatgtcaaactagatcccgtgaaatgaccattttaatcagactacaaatgagcggtcaaaatgat

SEQ ID NO: 217296 - DNA, 120 bp, Artificial Sequence
  ENSG00000116641_140 (sequence is synthesized)
agttcatggccaaagcaaagctcattaacaataaaaatgaattcacctaaagtaaatggtgatcatcataaactttctgcatagcttttttttttcatttttgaattattaattagcaag

SEQ ID NO: 217297 - DNA, 120 bp, Artificial Sequence
  ENSG00000116641_141 (sequence is synthesized)
tttttaaaaattgtgattttctgtttcacaaggtagatcatagttgtgaatctcattttaaaattgatacctattcctttgctgtgaaaatgaagtttttatatttcagttttttaaatt

SEQ ID NO: 217298 - DNA, 120 bp, Artificial Sequence
  ENSG00000116641_142 (sequence is synthesized)
aaactactaatatttttaatgactgcaactgaactttatttttcctagatgtttacaatcatcctttgatatatttctaatacaaaaatattattttgtgaaaataatgaataaaatggt

SEQ ID NO: 217299 - DNA, 120 bp, Artificial Sequence
  ENSG00000116641_143 (sequence is synthesized)
taattctaatagtatttcattacttaatctttgtagttcattatggaatctacatattatcactaaaattagcatcaaattaaacttaattttaaaatgaagtacactactagcagttga

SEQ ID NO: 217300 - DNA, 120 bp, Artificial Sequence
  ENSG00000116641_144 (sequence is synthesized)
taaacttaattttaaaatgaagtacactactagcagttgatttctttgaaactaaatccttggcttcattgaaatactgcaaaatatcctatcgagtctcctcctcctccacttttctgt

SEQ ID NO: 217301 - DNA, 120 bp, Artificial Sequence
  ENSG00000116641_145 (sequence is synthesized)
tcccttccccgtgctaccctactgttacctactgctgctagtgtcaaaggagttggagtatgactatccacttttgtattcagtattagtcctactttgttacctatcagcttgacctct

SEQ ID NO: 217302 - DNA, 120 bp, Artificial Sequence
  ENSG00000116641_146 (sequence is synthesized)
tcttttttgcaatgaattaagctgttctaaatgaactgattaatctgaaaagcctttgacagtctaaaaatagggctgctatcctgttaagtcaggattttattgtcatctattaaaatg

SEQ ID NO: 217303 - DNA, 120 bp, Artificial Sequence
  ENSG00000116641_147 (sequence is synthesized)
ttaaagttgaaaaatattgattaggtttcatgaccatgacaggtaggtcttttaataatcagttgtatatatactatcacaggaacctcaagccagtttctagagctgtaaattgcaaat

SEQ ID NO: 217304 - DNA, 120 bp, Artificial Sequence
  ENSG00000116641_148 (sequence is synthesized)
tataaatgttaggtctggaacatttagagctagtcgtttctgagaaacttttagccatttgtgtcgttggcatttgagcagagttgcagtttgtattttaatttatcctggatacttggt

SEQ ID NO: 217305 - DNA, 120 bp, Artificial Sequence
  ENSG00000116641_149 (sequence is synthesized)
gaagtgcagctcaccttagttagagatcttacttaaacatgtaaatggaacaagctgctggctctctttccctaaaatttgtactttcacttaaagtttttaaaaggcaaaattttagcc

SEQ ID NO: 217306 - DNA, 120 bp, Artificial Sequence
  ENSG00000116641_150 (sequence is synthesized)
aaattattgcaggtcttaagtaaatgaatatgctgtttaaaatatcctgctgtcttctgtttgtggagaagaatttatggtatatggtgcctttggccttttttgttctttcaaacagtt

SEQ ID NO: 217307 - DNA, 120 bp, Artificial Sequence
  ENSG00000116641_151 (sequence is synthesized)
tttttatgacttgcccttttttactttttattatacagagtactggctgggaggtaggtaatgttttagttagttaaagacactaatagattgattttatcagatttcttatgccaatgc

SEQ ID NO: 217308 - DNA, 120 bp, Artificial Sequence
  ENSG00000116641_152 (sequence is synthesized)
tttgcccacatgtgctagctgtgggcattctgttgctatctgctatcaactgaattcattaaccaaagaaattttgttaaaatattgtaagttattttaagaaatatcttattatgaggt

SEQ ID NO: 217309 - DNA, 120 bp, Artificial Sequence
  ENSG00000116641_153 (sequence is synthesized)
cgtaggcagtgcatggaaatccatatgttacactaatgagattctttggtaaatgagccactttgtcatcactttagtttttaccctttgaagcatttctctcatcaacatttatacaca

SEQ ID NO: 217310 - DNA, 120 bp, Artificial Sequence
  ENSG00000116641_154 (sequence is synthesized)
gatttctttttttaaccatattgtttcacctcattttacagaggtcgatttatgtgttattgctcagaggtgtaaataaaaaatactctatttcatctgatctcagatggcatcaattac

SEQ ID NO: 217311 - DNA, 120 bp, Artificial Sequence
  ENSG00000116641_155 (sequence is synthesized)
aaaacatactagtattttatatgcctttaagaaaggaaaaaaaaaatccctgtgtattaaaccaggatatcctattagttgaaagatgaataccaactacaaaaacattaaaatgtgagc

SEQ ID NO: 217312 - DNA, 120 bp, Artificial Sequence
  ENSG00000116641_156 (sequence is synthesized)
aaaaaaagtacattttagaattgatgagatactgtgttaatttgatcttgagtcacttcaccttgactatgagcactactgaggaaagaaattcacttttgtcatttaatttttgttggg

SEQ ID NO: 217313 - DNA, 120 bp, Artificial Sequence
  ENSG00000116641_157 (sequence is synthesized)
gaaagggataaagaaattaagagaacttataatttaatttgacctcgtattctgacagcatttgatatattgtttgataagactacacatgcttccttttatgtagtagttaagactcac

SEQ ID NO: 217314 - DNA, 120 bp, Artificial Sequence
  ENSG00000116641_158 (sequence is synthesized)
aaaaagttatatgtaaatacaatcttacccgaaaaaaatgccaggaagaattgattaccattattttaaacgtttctgcaaaggaaataattctataaaatatgccctaatttattttga

SEQ ID NO: 217315 - DNA, 120 bp, Artificial Sequence
  ENSG00000116641_159 (sequence is synthesized)
tgaggtaaagcaaggtagtaataagtcaggtttatttaaagctaggtatatttgtaaagttgtgtgctttgcctctcacttgttgtcagatttatgttgatcgaacacttaggcttctct

SEQ ID NO: 217316 - DNA, 120 bp, Artificial Sequence
  ENSG00000116641_160 (sequence is synthesized)
ttttgggtttgcattgcaatccttgttttaagacccaaatagaaaaccttgggaataaatattactactgagttttcctctatttctgaaatagtacccaagtcttgtttttctttagat

SEQ ID NO: 217317 - DNA, 120 bp, Artificial Sequence
  ENSG00000116641_161 (sequence is synthesized)
gaagccagtacttttataaatctaccttaattctctagattaaatgtatatgactgtatcaatactcaaaatataatcctcattcctatggctcagttaagacatacataaagagacttg

SEQ ID NO: 217318 - DNA, 120 bp, Artificial Sequence
  ENSG00000116641_162 (sequence is synthesized)
ccatggttatctatgaatgataaaactccttataaatttcctaacattaaatagaattagttgaaaattaggcataaaataataaattgaaacctctgagcagtttattactagtttccg

SEQ ID NO: 217319 - DNA, 120 bp, Artificial Sequence
  ENSG00000116641_163 (sequence is synthesized)
tgatgctaaatcgacccctgaaaggtataattttcactggttatgacattaatatcattctgtcatcatgtttattgcatggtaaaagtctcacagactttattttcttgttatatactt

SEQ ID NO: 217320 - DNA, 120 bp, Artificial Sequence
  ENSG00000116641_164 (sequence is synthesized)
gtcactaccttttactggacctttagctttgtagctgctaaatttgttgcacgtttgttttttgcttttcctttgtaaaacttaaatggatgcctgcatttaaaaaatgtgttttctacc

SEQ ID NO: 217321 - DNA, 120 bp, Artificial Sequence
  ENSG00000116641_165 (sequence is synthesized)
atttgctgcttatttgttttgaaatttctgtaattaaaatgctttctgttttctcttctctcttgtccctggttgctgaccctactccccacttttactattgtctattgtggatggtaa

SEQ ID NO: 217322 - DNA, 120 bp, Artificial Sequence
  ENSG00000116641_166 (sequence is synthesized)
ctgaggtgacacttttttaaaaaaaattgtaaaaattgcatagaaagtgtccaaatatttatctttattgaaagaatttgtcttctgatatgctgtgtgagagttaaggtgatcttaatg

SEQ ID NO: 217323 - DNA, 120 bp, Artificial Sequence
  ENSG00000116641_167 (sequence is synthesized)
tactttgtacctgacatgaatgtgtagttaatgcatgccaatgggtggtttgggtgatttagaataaccaactcatctcaaaaattttttacttattatctttcactcatagattttttt

SEQ ID NO: 217324 - DNA, 120 bp, Artificial Sequence
  ENSG00000116641_168 (sequence is synthesized)
ttttttacttattatctttcactcatagatttttttttccttttctgttccatttttagtaactcttctacataaaaattttttactgggctgggtgcggtggctcacgcctataatctc

SEQ ID NO: 217325 - DNA, 75 bp, Artificial Sequence
  ENSG00000116641_169 (sequence is synthesized)
gccatctaaataataataataataataatttattggcacagggctgctaattgtagaatttttgcattagtgctt

SEQ ID NO: 217326 - DNA, 120 bp, Artificial Sequence
  ENSG00000116641_170 (sequence is synthesized)
gcacagggctgctaattgtagaatttttgcattagtgcttctggagggtcttgacatttacattgcctgctctatgccaggtgctatctttgactcctaacttttacaatctcatttaat

SEQ ID NO: 217327 - DNA, 120 bp, Artificial Sequence
  ENSG00000116641_171 (sequence is synthesized)
acgtgaagaggttatataaaggctaatgctaatttaaaaatatgtaagtgttgttttaaaatttaacttgacctagtatgctctagtatcagtacaattaagacagtttatatcaagcat

SEQ ID NO: 217328 - DNA, 120 bp, Artificial Sequence
  ENSG00000116641_172 (sequence is synthesized)
aacatagaccaatgtgatagaggcacttcgtacaaactccgaaaaatattatatgtgatttagtcacttgttagtagccctatttgcatacttatttgttagaaataatgaaaaaggaaa

SEQ ID NO: 217329 - DNA, 120 bp, Artificial Sequence
  ENSG00000116641_173 (sequence is synthesized)
gactgtttactttgtttaaaccttcatttaaaatattataattttgaattaaaactttttgcaatgttttggaaattttatgctgtaacaatctaaacataatgtgaaaaacaggaagat

SEQ ID NO: 217330 - DNA, 120 bp, Artificial Sequence
  ENSG00000116641_174 (sequence is synthesized)
caaaagctgccccatggggatccaaccccagtccaagtgcagaatcaacacagctttttcacgaggagctggctttgcagtgggttgtttgcagtggcagcgttcgggaatcagctttgc

SEQ ID NO: 217331 - DNA, 120 bp, Artificial Sequence
  ENSG00000116641_175 (sequence is synthesized)
agtagaaatcagtactggagggttctgcaaccactgctacagaatacttctgtatccatcttggaacacttttgtacccattagcagtggtcactcctcattcccccagagtcttgcaac

SEQ ID NO: 217332 - DNA, 120 bp, Artificial Sequence
  ENSG00000116641_176 (sequence is synthesized)
ctgtccctaaacaacctttaatatatattctgtctctatagatttgtctatgccagacatttcatacatattgacttgtataatatgtagtcttttgtggctagcttctttcacttgcca

SEQ ID NO: 217333 - DNA, 120 bp, Artificial Sequence
  ENSG00000116641_177 (sequence is synthesized)
taatgtttttcaggttcatccatgtcgtagcatgtattggtattatttatttttattgccaaatgatagtctgttgtattgatatactatatttatttatcagttgatttgggttttcta

SEQ ID NO: 217334 - DNA, 120 bp, Artificial Sequence
  ENSG00000116641_178 (sequence is synthesized)
gctaggagtgaaattgctgggtcatatgataattctgtgcttaatcttttgaaggactgccacactgttttccaatttggctgcaccttcaaaaattccactagcattccactagtgtgt

SEQ ID NO: 217335 - DNA, 120 bp, Artificial Sequence
  ENSG00000116641_179 (sequence is synthesized)
gaaggttccagtttcagcatatctttaccagtgtaacatattatctgctctttgattgtagtcattctagtgcaagtgaagtggtactcattgtaggttggatttaccttttcttaaaag

SEQ ID NO: 217336 - DNA, 120 bp, Artificial Sequence
  ENSG00000116641_180 (sequence is synthesized)
ctagcgatattaagcatcattttgtgtgtattggctatttgtgtatctttcttggagtaataggtatttttaacctttgctcattttttaatggctttggtctttttattatttattaat

SEQ ID NO: 217337 - DNA, 120 bp, Artificial Sequence
  ENSG00000116641_181 (sequence is synthesized)
agttgatgcctattttttaaatggggttttaaccttcttggcattgagttgtaggagttctttatatgttcaagatgcaaattccttgcctaatatatgatagcaaattttctcctagtc

SEQ ID NO: 217338 - DNA, 120 bp, Artificial Sequence
  ENSG00000116641_182 (sequence is synthesized)
tgtgagttcacttttcttgatggtattgttcgtagcacagaagttttaaattttgaggaagttacatttttctatttttttcttttgtcactgtgcttttggtgttttatctaagaaacc

SEQ ID NO: 217339 - DNA, 120 bp, Artificial Sequence
  ENSG00000116641_183 (sequence is synthesized)
attatgtaatatgaatcaaaatttacttgtatgtattcttgtaagagttttatagtttcagctgttacatttaggtttataataatccattttgagttaatatttgtatgttgtgaggta

SEQ ID NO: 217340 - DNA, 120 bp, Artificial Sequence
  ENSG00000116641_184 (sequence is synthesized)
gtccaatttcattctttttatgtggatatccagttgtttcagcaccatttattaaaaaggctattcttttcccattgaattttcttagatcccttattgaaagtcaattgaccattcatg

SEQ ID NO: 217341 - DNA, 120 bp, Artificial Sequence
  ENSG00000116641_185 (sequence is synthesized)
tgggatttatttctggactctccatcccattccactgatctgtatgccagtgctttactgcaggggttcctaatccccaggtggcggacaggtacctgtcctgcctgttaggatccgggc

SEQ ID NO: 217342 - DNA, 120 bp, Artificial Sequence
  ENSG00000116641_186 (sequence is synthesized)
cgtagagcagtaggtgagcagcagctgagctagcattatcgcctgagctctgcctcctctcagatcagtagtggcattagattctggtaggagcatgaaccctattgtgagctgcacatg

SEQ ID NO: 217343 - DNA, 120 bp, Artificial Sequence
  ENSG00000116641_187 (sequence is synthesized)
caggggatctaggttacgtgcaccttatgggactctaatgataaatgtaatgcgctttaatcatcctgaaacgatccccacaaccccatctgtggaaaaatttttttccatgaaaccagt

SEQ ID NO: 217344 - DNA, 120 bp, Artificial Sequence
  ENSG00000116641_188 (sequence is synthesized)
ccttggtgccagaaaggttggggaccgctgctataccaaattactttacctttgaaggctaagttttgaaattgagaagagtgggtcttccagcttttatcctgtttcaagatttgtttt

SEQ ID NO: 217345 - DNA, 120 bp, Artificial Sequence
  ENSG00000116641_189 (sequence is synthesized)
ggcaattttgggtttcttttatttccatataaatttaggaccagctgtcagtttgtgcacaaaggcatctgggattttgatagggctgacattgaatctctaagtcaatttatagattgt

SEQ ID NO: 217346 - DNA, 120 bp, Artificial Sequence
  ENSG00000116641_190 (sequence is synthesized)
tgccattttaacaattttaaatctttgaatctatgaacatgaaatttttttcatttatttaaatctttttcatttttttcagtgttgtgtcattttcagtgtacaagtccttctcttgtt

SEQ ID NO: 217347 - DNA, 120 bp, Artificial Sequence
  ENSG00000116641_191 (sequence is synthesized)
aaatttataccgtagtattttatcgtttcttgataatattttaaatggaattgttttcttaattctgtctttagaaagtccatttctagtgtatagaaataaaattggcttttgtatatt

SEQ ID NO: 217348 - DNA, 120 bp, Artificial Sequence
  ENSG00000116641_192 (sequence is synthesized)
cataaatttttttaatttcagaaaggtagtgattgtactatacatgtatgggagggtgattccaagaaacttaaaaactttaagaataaaaataataaaagcaactataagaatgagaaa

SEQ ID NO: 217349 - DNA, 80 bp, Artificial Sequence
  ENSG00000116649_0 (sequence is synthesized)
gccatggagcccggccccgacggccccgccgcctccggccccgccgccatccgcgagggctggttccgcgagacctgcag

SEQ ID NO: 217350 - DNA, 120 bp, Artificial Sequence
  ENSG00000116649_1 (sequence is synthesized)
atccgcgagggctggttccgcgagacctgcagcctgtggcccggccaggccctgtcactgcaggtggagcagctgctccaccaccggcgctcgcgctaccaggacatcctcgtcttccgc

SEQ ID NO: 217351 - DNA, 120 bp, Artificial Sequence
  ENSG00000116649_2 (sequence is synthesized)
agtaagacctatggcaacgtgctggtgttggacggtgtcatccagtgcacggagagagacgagttctcctaccaggagatgatcgccaacctgcctctctgcagccaccccaacccgcga

SEQ ID NO: 217352 - DNA, 120 bp, Artificial Sequence
  ENSG00000116649_3 (sequence is synthesized)
aaggtgctgatcatcgggggcggagatggaggtgtcctgcgggaggtggtgaagcacccctccgtggagtccgtggtccagtgtgagatcgacgaggatgtcatccaagtctccaagaag

SEQ ID NO: 217353 - DNA, 120 bp, Artificial Sequence
  ENSG00000116649_4 (sequence is synthesized)
ttcctgccaggcatggccattggctactctagctcgaagctgaccctacatgtgggtgacggttttgagttcatgaaacagaatcaggatgccttcgacgtgatcatcactgactcctca

SEQ ID NO: 217354 - DNA, 120 bp, Artificial Sequence
  ENSG00000116649_5 (sequence is synthesized)
gccctcaaggaagatggtgtcctctgctgccagggcgagtgccagtggctgcacctggacctcatcaaggagatgcggcagttctgccagtccctgttccccgtggtggcctatgcctac

SEQ ID NO: 217355 - DNA, 120 bp, Artificial Sequence
  ENSG00000116649_6 (sequence is synthesized)
tgcaccatccccacctaccccagcggccagatcggcttcatgctgtgcagcaagaacccgagcacgaacttccaggagccggtgcagccgctgacacagcagcaggtggcgcagatgcag

SEQ ID NO: 217356 - DNA, 120 bp, Artificial Sequence
  ENSG00000116649_7 (sequence is synthesized)
ctgaagtactacaactccgacgtgcaccgcgccgcctttgtgctgcccgagtttgcccgcaaggccctgaatgatgtgagctgagcccaggcgccaccactgatgccacccaggacctcg

SEQ ID NO: 217357 - DNA, 120 bp, Artificial Sequence
  ENSG00000116649_8 (sequence is synthesized)
gaccttggagcctgcggggtgcctcggcccctccagccccgggccggacctcctgctggctctcgcccaccaaccaagtgttacaagccccagaatgctgcccggcctgccctgctgggc

SEQ ID NO: 217358 - DNA, 120 bp, Artificial Sequence
  ENSG00000116649_9 (sequence is synthesized)
ggactgtctgtgtgtctgtctctctggcgttccacctccaagcctataccagctgtgtacagcgccatctctctgccttctgttgcccctcactcaccaaacacgtgtatttatagcaaa

SEQ ID NO: 217359 - DNA, 76 bp, Artificial Sequence
  ENSG00000116649_10 (sequence is synthesized)
gcgccccccctgatgtgcccctggcccggtccccagagcacgaacttccaggagccggtgcagccgctgacacagc

SEQ ID NO: 217360 - DNA, 120 bp, Artificial Sequence
  ENSG00000116649_11 (sequence is synthesized)
gcgggctggacctcgtcctgccctggccccctcgccacccctcacaccgcctccctgggctggggctgggactgcgggctggcctcttgggtgggggagtcggagtctgcgccccgctcc

SEQ ID NO: 217361 - DNA, 120 bp, Artificial Sequence
  ENSG00000116649_12 (sequence is synthesized)
acgtgtcagccctcaggacacgtcagagcccgaggagaccccgggtcccaccccggcctccacccggcggcccgcctgccgttcctcgccacgtgtcaccatcgctcctcatccctggga

SEQ ID NO: 217362 - DNA, 120 bp, Artificial Sequence
  ENSG00000116649_13 (sequence is synthesized)
gagatggaggtgtcctgcgggaggtggtgaagcacccctccgtggagtccgtggtccagtgtgagatcgacgaggtgagtgccggcgtagagccaggtttgagtcctggttctcccagcg

SEQ ID NO: 217363 - DNA, 120 bp, Artificial Sequence
  ENSG00000116661_0 (sequence is synthesized)
agacgcggacagcgccgggactcgccgccccgggactcgcgcagcccgcagcgctccggctcctcctctcgcgaccgccctccgcagcgatggacggagacggtgacccagagagcgtgg

SEQ ID NO: 217364 - DNA, 120 bp, Artificial Sequence
  ENSG00000116661_1 (sequence is synthesized)
gccagcccgaggaggcaagcccggaggagcagccagaggaggcgagtgctgaggaggagcggccggaggaccagcaggaggaggaggcggcggccgccgccgcgtacctggacgagctgc

SEQ ID NO: 217365 - DNA, 120 bp, Artificial Sequence
  ENSG00000116661_2 (sequence is synthesized)
ccgagccgctgctgctgcgcgtgctggccgcactgccggccgccgagctggtgcaggcctgccgcctggtgtgcctgcgctggaaggagctggtggacggcgccccgctgtggctgctca

SEQ ID NO: 217366 - DNA, 120 bp, Artificial Sequence
  ENSG00000116661_3 (sequence is synthesized)
agtgccagcaggaggggctggtgcccgagggcggcgtggaggaggagcgcgaccactggcagcagttctacttcctgagcaagcggcgccgcaaccttctgcgtaacccgtgtggggaag

SEQ ID NO: 217367 - DNA, 120 bp, Artificial Sequence
  ENSG00000116661_4 (sequence is synthesized)
aggacttggaaggctggtgtgacgtggagcatggtggggacggctggagggtggaggagctgcctggagacagtggggtggagttcacccacgatgagagcgtcaagaagtacttcgcct

SEQ ID NO: 217368 - DNA, 120 bp, Artificial Sequence
  ENSG00000116661_5 (sequence is synthesized)
ccatcgtggtgaaggactggtactcgggccgcagcgacgctggttgcctctacgagctcaccgttaagctactgtccgagcacgagaacgtgctggctgagttcagcagcgggcaggtgg

SEQ ID NO: 217369 - DNA, 120 bp, Artificial Sequence
  ENSG00000116661_6 (sequence is synthesized)
cagtgccccaagacagtgacggcgggggctggatggagatctcccacaccttcaccgactacgggccgggcgtccgcttcgtccgcttcgagcacggggggcaggactccgtctactgga

SEQ ID NO: 217370 - DNA, 120 bp, Artificial Sequence
  ENSG00000116661_7 (sequence is synthesized)
agggctggttcggggcccgggtgaccaacagcagcgtgtgggtagaaccctgagcgaccctgcctccactctcccccagctgcctggaggggcaaaggtcgagggtagataggccttaac

SEQ ID NO: 217371 - DNA, 120 bp, Artificial Sequence
  ENSG00000116661_8 (sequence is synthesized)
ttagtccatagcgtcctcaccttccccaagccacacatcctcctcccatcccttgctccgatcccagcccctgagcagggagagagaagttttgttggcataggtttgcttaggtagccg

SEQ ID NO: 217372 - DNA, 120 bp, Artificial Sequence
  ENSG00000116661_9 (sequence is synthesized)
gcttctagaatgtagatccgtgagggcgtgagcttggactggacccactgctgattccctgcacctagcacagtgcttgccacaaagtgggctctcaataaatattatttgtccaaggaa

SEQ ID NO: 217373 - DNA, 120 bp, Artificial Sequence
  ENSG00000116661_10 (sequence is synthesized)
acactgctcccttcccatccttttctgtctcctgagggcccccggcatagcctggaaaaatacttggtagggctccagctgctctggtttccagcggaccttgggccagtatggagtcag

SEQ ID NO: 217374 - DNA, 120 bp, Artificial Sequence
  ENSG00000116661_11 (sequence is synthesized)
ctgggcccggccttgccagggaggacaaagctgggattgtgagaccaaggaaggttgagctgagcctggcgcctgaccgacacccaagctgcccagaggccagaatagggcatgttggcg

SEQ ID NO: 217375 - DNA, 82 bp, Artificial Sequence
  ENSG00000116661_12 (sequence is synthesized)
cacccaagctgcccagaggccagaatagggcatgttggcgggggggctgccctccaggcctctcttggtccaatgagaaaat

SEQ ID NO: 217376 - DNA, 120 bp, Artificial Sequence
  ENSG00000116661_13 (sequence is synthesized)
tctctactaaaaatacacaaaaattagcctgggtctcgacatggaagaattcaccatggtgcttgccacagggcaagtgctcagccagccacagctctgctgacagtgactccttctgtt

SEQ ID NO: 217377 - DNA, 120 bp, Artificial Sequence
  ENSG00000116661_14 (sequence is synthesized)
ccagccacagctctgctgacagtgactccttctgtttccactaagggggctgccacgtcctcctgggcagggtgtgaggggccctccctggacttcctcggcctccctcatggcctctca

SEQ ID NO: 217378 - DNA, 120 bp, Artificial Sequence
  ENSG00000116661_15 (sequence is synthesized)
ctgcctctactcccatctccaggccaggtaccaggcatcggccctctgcctggccaaaagtccccagggaaggggaggcattcctcaccccacacaccctgggagctgcagagactgcaa

SEQ ID NO: 217379 - DNA, 120 bp, Artificial Sequence
  ENSG00000116661_16 (sequence is synthesized)
tttcactaatgatgtggggaagagaggaaaaggctagcccaagagggagatattttagctgaaaaacctccccctggatttgggcaggtttttcagggctaatgagctggggccaaggga

SEQ ID NO: 217380 - DNA, 120 bp, Artificial Sequence
  ENSG00000116661_17 (sequence is synthesized)
gtttccagggagggaggtggctgtgtctggtccaggctctggttctagaggggctggaggtctggccagtgagagaggagctgggggccgggaagggtgcaatggggggccctgtgcccc

SEQ ID NO: 217381 - DNA, 120 bp, Artificial Sequence
  ENSG00000116661_18 (sequence is synthesized)
aagctgagaagcgctcactggctcaccccatagatgcactgctcactctgtgttacccccgttctcctcatgtaggaaagatccccaatggccaagttgatcttgccaagctttattatc

SEQ ID NO: 217382 - DNA, 120 bp, Artificial Sequence
  ENSG00000116661_19 (sequence is synthesized)
gccagcgaagccctagaggcggtctccaaagagcacgtctctctgctatcttggtctggcgggaggccttgagaggcgactggcaaggagagagaactcctgggtcccatttagccagga

SEQ ID NO: 217383 - DNA, 120 bp, Artificial Sequence
  ENSG00000116661_20 (sequence is synthesized)
aggcctcatccctgctctgccatttatctcgggagagcatggtgcctctcccagcctgtttccttctctgtaaatggatgccttacctccaggggtcactggggcggtccaaggagcttg

SEQ ID NO: 217384 - DNA, 120 bp, Artificial Sequence
  ENSG00000116661_21 (sequence is synthesized)
ctggggtggcatggggctgggaggagcggggtaaggcagaggggagagccagctggggaaccccccgcctgggggtgctgcctccccactgcaggggttgaggccacgtgggccacgggt

SEQ ID NO: 217385 - DNA, 120 bp, Artificial Sequence
  ENSG00000116661_22 (sequence is synthesized)
ctgcaaaggttgacaacttccgtgtttgcaggagaacctggaaacccacctcccctcctgagttttaaatgttggcaaatatatgcacatatatatgtttgtatatatgtaatgtatata

SEQ ID NO: 217386 - DNA, 120 bp, Artificial Sequence
  ENSG00000116663_0 (sequence is synthesized)
gagacagcttcaggacacgcaggccgcagcgagggcccgggccctggggatcccaggccatggatgctccccactccaaagcagccctggacagcattaacgagctgcccgagaacatcc

SEQ ID NO: 217387 - DNA, 120 bp, Artificial Sequence
  ENSG00000116663_1 (sequence is synthesized)
tgctggagctgttcacgcacgtgcccgcccgccagctgctgctgaactgccgcctggtctgcagcctctggcgggacctcatcgacctcatgaccctctggaaacgcaagtgcctgcgag

SEQ ID NO: 217388 - DNA, 120 bp, Artificial Sequence
  ENSG00000116663_2 (sequence is synthesized)
agggcttcatcaccaaggactgggaccagcccgtggccgactggaaaatcttctacttcctacggagcctgcataggaacctcctgcgcaacccgtgtgctgaagaggatatgtttgcat

SEQ ID NO: 217389 - DNA, 120 bp, Artificial Sequence
  ENSG00000116663_3 (sequence is synthesized)
ggcaaattgatttcaatggtggggaccgctggaaggtggagagcctccctggagcccacgggacagattttcctgaccccaaagtcaagaagtattttgtcacatcctacgaaatgtgcc

SEQ ID NO: 217390 - DNA, 120 bp, Artificial Sequence
  ENSG00000116663_4 (sequence is synthesized)
tcaagtcccagctggtggaccttgtagccgagggctactgggaggagctactagacacattccggccggacatcgtggttaaggactggtttgctgccagagccgactgtggctgcacct

SEQ ID NO: 217391 - DNA, 120 bp, Artificial Sequence
  ENSG00000116663_5 (sequence is synthesized)
accaactcaaagtgcagctggcctcggctgactacttcgtgttggcctccttcgagcccccacctgtgaccatccaacagtggaacaatgccacatggacagaggtctcctacaccttct

SEQ ID NO: 217392 - DNA, 120 bp, Artificial Sequence
  ENSG00000116663_6 (sequence is synthesized)
ctacccccggggtgtccgctacatcctcttccagcatgggggcagggacacccagtactgggcaggctggtatgggccccgagtcaccaacagcagcattgtcgtcagccccaagatgac

SEQ ID NO: 217393 - DNA, 120 bp, Artificial Sequence
  ENSG00000116663_7 (sequence is synthesized)
caggaaccaggcctcctccgaggctcagcctgggcagaagcatggacaggaggaggctgcccaatcgccctaccgagctgttgtccagattttctgacagctgtccatcctgtgtctggg

SEQ ID NO: 217394 - DNA, 120 bp, Artificial Sequence
  ENSG00000116663_8 (sequence is synthesized)
tcagccagaggttcctccaggcaggagctgagcatggggtgggcagtgaggtccctgtaccagcgactcctgccccggttcaaccctaccagcttgtggtaacttactgtcacatagctc

SEQ ID NO: 217395 - DNA, 66 bp, Artificial Sequence
  ENSG00000116663_9 (sequence is synthesized)
caaccctaccagcttgtggtaacttactgtcacatagctctgacgttttgttgtaataaatgtttt

SEQ ID NO: 217396 - DNA, 80 bp, Artificial Sequence
  ENSG00000116663_10 (sequence is synthesized)
gttcacggagcctgcgggcgctggtccgggcggccaggggtggggggcgcgggcggctgggcccggacttcgactggggg

SEQ ID NO: 217397 - DNA, 120 bp, Artificial Sequence
  ENSG00000116663_11 (sequence is synthesized)
ctccaccccggccacatcccgaggccggcgccgggttcggagaactgtcaagggacctccaggcccccacacgcctgcgagatccggcgcttgccttgccccagccacagtttctgtttc

SEQ ID NO: 217398 - DNA, 120 bp, Artificial Sequence
  ENSG00000116667_0 (sequence is synthesized)
gctcctcgcaagctcccgctcgctccctgcccactcccggggggacgttccgtgccgcggccgccgcggccgctgcttctttcacactttagttgggagctgcgcgccgcgctcagttac

SEQ ID NO: 217399 - DNA, 120 bp, Artificial Sequence
  ENSG00000116667_1 (sequence is synthesized)
tggagagctggccgcgcgccgccgcctcccgcacgcttgcacgcgggcccggcttcggggttttgggttcttactccaagcggcggggaggagggggagccccggacacactgtggggag

SEQ ID NO: 217400 - DNA, 120 bp, Artificial Sequence
  ENSG00000116667_2 (sequence is synthesized)
gaggaggaagaagaggaggagggaggaagaaaaaagacgaggaggacaggggcggggggcgggaggcttgccaccttcagcccccccgcgaacgcccaaggtgcacacatcttgaccaac

SEQ ID NO: 217401 - DNA, 120 bp, Artificial Sequence
  ENSG00000116667_3 (sequence is synthesized)
tcagcagcaaggtggattttctttgtgtttaaagaaaaaaaatgtccctgtgtctgtagagatgatttgcagttcagcccggctgaagctgaccgaatgagactatgggctgtgcctccg

SEQ ID NO: 217402 - DNA, 120 bp, Artificial Sequence
  ENSG00000116667_4 (sequence is synthesized)
ccaagcatgttgccactgttcaaaatgaagaggaagcccagaaagggaaaaactaccagaacggagatgtgtttggcgatgagtataggatcaaaccagtggaagaggtcaaatacatga

SEQ ID NO: 217403 - DNA, 120 bp, Artificial Sequence
  ENSG00000116667_5 (sequence is synthesized)
aaaatggggcagaagaagagcagaaaatagcagccaggaaccaagaaaacttggaaaaaagtgccagctcaaatgtaagacttaaaactaataaagaggttccgggattagttcatcaac

SEQ ID NO: 217404 - DNA, 120 bp, Artificial Sequence
  ENSG00000116667_6 (sequence is synthesized)
ccagagcaaacatgcacatctctgaaagccaacaagaattcttcagaatgctggatgaaaaaattgaaaagggtcgggattactgttcggaagaagaggatatcacatagcaccaatttt

SEQ ID NO: 217405 - DNA, 120 bp, Artificial Sequence
  ENSG00000116667_7 (sequence is synthesized)
accactcaaaccaggagctactactgtgtaaataggttacaccccagttgaaatctttgcaaaggtcggttctattcagcgaacagcactatagcaaaagaagatcgttccatattgtac

SEQ ID NO: 217406 - DNA, 120 bp, Artificial Sequence
  ENSG00000116667_8 (sequence is synthesized)
gccccattaaattacagtgtttcttaatgaacttgcaaaggaatattgctaaaaacaaacaaaaaaaactgttatcgaactttctttgttgctgctagttaaaacttgttgcaacttttc

SEQ ID NO: 217407 - DNA, 120 bp, Artificial Sequence
  ENSG00000116667_9 (sequence is synthesized)
acttctcttgtgtccaggtatgcagcaaaattctgcaatttcaccttaaagatactgttggttttacagatgctctccaacctattttctataagatgaggtagtggtgaactcagataa

SEQ ID NO: 217408 - DNA, 120 bp, Artificial Sequence
  ENSG00000116667_10 (sequence is synthesized)
caaacttctcttctaaactggttctgcttctaagacaagcatctcctgccctctctccttcctccccatctctcgcacgcagtctagagatggactgagccttgcttctcactggcagtg

SEQ ID NO: 217409 - DNA, 120 bp, Artificial Sequence
  ENSG00000116667_11 (sequence is synthesized)
ttgagctttggagatgggatggttgctatgccaagccttgtttctctgctcagaagaagtagagaagctattatcaattaaaagcatgctgtgatgtgactcctggaagtgacgtaggag

SEQ ID NO: 217410 - DNA, 120 bp, Artificial Sequence
  ENSG00000116667_12 (sequence is synthesized)
tgagtggcaggttgtttgatttaataggtatcttaatcaagaattaagcttgcaacattggctttgctcagatgcagatggaagtgtgatcacaatcattttgaatccctcttcctcact

SEQ ID NO: 217411 - DNA, 120 bp, Artificial Sequence
  ENSG00000116667_13 (sequence is synthesized)
tttttttctaagaaaataaacattttactgtttttatggatccttgtcttctcccattcatccagctcagtgttttaagatgatcctgggtgcagaagttgagccctcctttgcattgac

SEQ ID NO: 217412 - DNA, 120 bp, Artificial Sequence
  ENSG00000116667_14 (sequence is synthesized)
actgataattagcctatagggctccctacccttccattaagaatctaccaagcattagcaaggctgaaagtggtctaagaggtgaggggacatcctatgactttttaggaaggcctgaaa

SEQ ID NO: 217413 - DNA, 120 bp, Artificial Sequence
  ENSG00000116667_15 (sequence is synthesized)
ccaccttgttacctttcattttgttagcaaataaaccatcctattttgtaactctcccccttcaaaatgctacatgagccttgccacttcctttttctcttacttccagcacactagaca

SEQ ID NO: 217414 - DNA, 120 bp, Artificial Sequence
  ENSG00000116667_16 (sequence is synthesized)
tagcaaaagtgtttgcctactcaaaaacataatacttttatgctgatgatggtatttggagatgtgaaagccaaaagcccctggcagtggtggggaatgttgactgagtgttcagcagag

SEQ ID NO: 217415 - DNA, 120 bp, Artificial Sequence
  ENSG00000116667_17 (sequence is synthesized)
tttatttttccatactatatgaagagaatgatctcttctcaaagacagaagtgatatttttaacaaatattgtcacaagtaaatagcaatcaaaaggagaaaataacttttgtatttttt

SEQ ID NO: 217416 - DNA, 120 bp, Artificial Sequence
  ENSG00000116667_18 (sequence is synthesized)
taatgtgtttgatagctttgacgagggttctctttgttactttcaggggagggcatcctattaaatgccacgccagcagtccgggtctgggtttgtcccacaaaatcacaggagcactgt

SEQ ID NO: 217417 - DNA, 120 bp, Artificial Sequence
  ENSG00000116667_19 (sequence is synthesized)
atgttcctctcttttggagttgtgactttgaagggcctcaatattagccacactgccgcctgcagaaggtggagagttaagatgttctatgtcaatttgctcttgccgaaaagatgagcc

SEQ ID NO: 217418 - DNA, 120 bp, Artificial Sequence
  ENSG00000116667_20 (sequence is synthesized)
tcgattttaaaatctatccacatccaactgatggcaccattgatgtgcaaataatgagattccctatctccttttagacctgggacggcaaaagggaagggaaggaaacttagcagagtg

SEQ ID NO: 217419 - DNA, 120 bp, Artificial Sequence
  ENSG00000116667_21 (sequence is synthesized)
ctattgactatagattcacatattagcaacaaaatcccgtaattcttttggccaacagcagctattttggggagcagctgtggctgttacataaatagagatgcagccaaaattttaggc

SEQ ID NO: 217420 - DNA, 120 bp, Artificial Sequence
  ENSG00000116667_22 (sequence is synthesized)
cttttatcctgcttctagcagaaaaatgcagggagagtcaagtagtctagggtttcaggttgcctcccctcatatggtttttggccaagtgactaaaacagttttccacaactgtaaaca

SEQ ID NO: 217421 - DNA, 120 bp, Artificial Sequence
  ENSG00000116667_23 (sequence is synthesized)
aactgctaagccccacctcaaacttgttcactggggactttgcttaccgttctgtgggtgaccttttccgggatttcttgttcttatcaagcaagaattaagcacatgctaaacgtcttc

SEQ ID NO: 217422 - DNA, 120 bp, Artificial Sequence
  ENSG00000116667_24 (sequence is synthesized)
catttgacttctctactcggtgtctcagacagtgtcttcccagaaaaccaccaccctctacccaaagatgaaacatgctcatgtcatttttctcatggtcacatttaacagttttgacat

SEQ ID NO: 217423 - DNA, 120 bp, Artificial Sequence
  ENSG00000116667_25 (sequence is synthesized)
gttatacttgcgcatagatccaagcgtttcttgggaacctgacttttgagtgtttaataaagccggaagtggtgttgccctgaaccagcagattttcacctgggttctggctccggtgtt

SEQ ID NO: 217424 - DNA, 120 bp, Artificial Sequence
  ENSG00000116667_26 (sequence is synthesized)
taacactggatacatctttgatgtgcgaaagtgagttcatcttcagacacatttggtacatccagaaatagatccaagaaatggggtggttgagtgggtccgcacgaaatgcttgattat

SEQ ID NO: 217425 - DNA, 120 bp, Artificial Sequence
  ENSG00000116667_27 (sequence is synthesized)
gtcagcaacacccaacactgtctgttttccatttgttggttttaatcataaaattgtcaagtgattcgtgtttgtactttatttttttgtgccttctgaaaggatctaaaacaaaaatat

SEQ ID NO: 217426 - DNA, 120 bp, Artificial Sequence
  ENSG00000116667_28 (sequence is synthesized)
tttgcctttttttccccacgtgtatctgaacattaagcagattggctcagacacaatgaaaaggataatccaatgtacgtgctggtgcactctgctagttgttatctctgtagggctcag

SEQ ID NO: 217427 - DNA, 120 bp, Artificial Sequence
  ENSG00000116667_29 (sequence is synthesized)
gaagctggaaggaggaagggagggtaagtggcctggtgagtggaggtagaaaaatgatgagaaatgaactgagagcattaagcagagagggttgataggctggccgtgtccggggtgaaa

SEQ ID NO: 217428 - DNA, 120 bp, Artificial Sequence
  ENSG00000116667_30 (sequence is synthesized)
ttggaaatccagctgcctagtggccagtgggtggggcaagactgtcaacgagatttacagctggcttacacatgccttatgtcctctgagttgtagagttgtaaaagttcagcagtgtgt

SEQ ID NO: 217429 - DNA, 120 bp, Artificial Sequence
  ENSG00000116667_31 (sequence is synthesized)
gcacagctttcttttggttggcagagattcaggatcatggagtactgctctcataattgaagacgtgtttgttattggcagagaaccttaaaaaaggcctttacctcagcgatgcttcct

SEQ ID NO: 217430 - DNA, 120 bp, Artificial Sequence
  ENSG00000116667_32 (sequence is synthesized)
agccccaggcttgcagagaacacagagtggtgttgtggtctatttagggacaaagaaggtataaagtccagagatgagaaaactgggtcagccctcagaaactgcagcagccacgcacac

SEQ ID NO: 217431 - DNA, 120 bp, Artificial Sequence
  ENSG00000116667_33 (sequence is synthesized)
agaagcctgctggaagacaggtctctctccgtccacagtgcccatcatctgagcctgggctgggatgactcaacttagcaaagacggacccaggaggagtgctggttcttcagtctttgt

SEQ ID NO: 217432 - DNA, 120 bp, Artificial Sequence
  ENSG00000116667_34 (sequence is synthesized)
actggccccatcctctcctcactgtaatgtgaggaagcacctctgtgtcagggctcacctgggcatccaaagcggccacgcccacaatccgacagcccccaggagcaggtccagggatga

SEQ ID NO: 217433 - DNA, 120 bp, Artificial Sequence
  ENSG00000116667_35 (sequence is synthesized)
tgcagcccccttcttggtcccatgtgatgtcatcctgctttgttatcttcttataactttatcctgctataactttatcctcttcccagcctcatccctgtttttctgttagggcaagac

SEQ ID NO: 217434 - DNA, 120 bp, Artificial Sequence
  ENSG00000116667_36 (sequence is synthesized)
tcttccataagcctgctaaaaaacagagatgatacctcttacaaactttacctcatagcctgtgaagcaggttggcatgtggattacaagtcctgctttgacactgggcaagaatttaag

SEQ ID NO: 217435 - DNA, 120 bp, Artificial Sequence
  ENSG00000116667_37 (sequence is synthesized)
attgttctatctctactagtcatagaaaagaaacattgttaaacatgttgagttttaaaggaagaaatattttcaaattcttaatccaagaaaatactgagttggaatcttagacttcgg

SEQ ID NO: 217436 - DNA, 120 bp, Artificial Sequence
  ENSG00000116667_38 (sequence is synthesized)
gactctgacacgttctttatgaaaggcaaaataattggtatctaaagttctctccttcctgcctcccctaaagaaaaaggatattagattgcacactataattttacataagatctgcct

SEQ ID NO: 217437 - DNA, 120 bp, Artificial Sequence
  ENSG00000116667_39 (sequence is synthesized)
tccacacttccctgctggaaggcattctcagagctttatgtcttcgtacctctcagagattggactttttcttgtttaaaaccccaaccaaaaaaaataataaggcatgattggtgggga

SEQ ID NO: 217438 - DNA, 120 bp, Artificial Sequence
  ENSG00000116667_40 (sequence is synthesized)
gggaatgtgtatttaggggcataataaaaaggtggctcgaagcaggaactttggcctcatggtgtcatgggtggatgcctggactccagtgtgcctgtgaggggctgggttaggcagtcg

SEQ ID NO: 217439 - DNA, 120 bp, Artificial Sequence
  ENSG00000116667_41 (sequence is synthesized)
gctgtcacactcacatgtgcctgcaataaaccttttggaatttcatgaacgaggtctatgaattgccttttgccaatgaatggatgtatttttccaaggggggaatagtatccttgactt

SEQ ID NO: 217440 - DNA, 120 bp, Artificial Sequence
  ENSG00000116667_42 (sequence is synthesized)
gactcacaagctatgccatgtttttcaggagactcttgtaccttatctggaatctaatcttgggagaagaggaaaaaggagctaatatttgtcatttatactcactctgtgccagatact

SEQ ID NO: 217441 - DNA, 120 bp, Artificial Sequence
  ENSG00000116667_43 (sequence is synthesized)
gtgctaggcattttataattgttttgtgtcatcctcatgataatcctgtgaagtagatctattacccccgtgttctaaataatagatcttaagtgtggaatgcatctatccaacataaat

SEQ ID NO: 217442 - DNA, 120 bp, Artificial Sequence
  ENSG00000116667_44 (sequence is synthesized)
gcccatgttgaaagaaggaaagatgtcattcaagtatttttcaaattctttttattatgactatgcccttcgcaacactgtgaaaacaacccctgggggcatctgccttccagaatctct

SEQ ID NO: 217443 - DNA, 120 bp, Artificial Sequence
  ENSG00000116667_45 (sequence is synthesized)
ctctggcttctcaccagcttggtttcctcatggggagtgttttatttggcctcccctatctgagctgcacacacaccaggggaggccactggctaacagtaggacttcagtgccctgagg

SEQ ID NO: 217444 - DNA, 120 bp, Artificial Sequence
  ENSG00000116667_46 (sequence is synthesized)
aaaaggctttgggaatttaggcacacgtttctctccttggaatccttctagcatctggaaaaggaacctggtatttctgcagttagataccagatgcaaccagaacaggctttcgagtgc

SEQ ID NO: 217445 - DNA, 120 bp, Artificial Sequence
  ENSG00000116667_47 (sequence is synthesized)
tgtgatttctttcctgggttcccaagtcttgttgtttcatcacaaactgtatctttttaaggttaaaagtcttgaccttcatgggggtctgggacaatccgatctccaagcatggaggaa

SEQ ID NO: 217446 - DNA, 120 bp, Artificial Sequence
  ENSG00000116667_48 (sequence is synthesized)
aggcaatgcctggaccactgacttgcattgaaatcctttcttgtgggctagggtttgatgtctctttttcatctttggactggggatctgcatcttccaggtccatttaagcactgaaac

SEQ ID NO: 217447 - DNA, 120 bp, Artificial Sequence
  ENSG00000116667_49 (sequence is synthesized)
tagatgcaaatctctttcgagaccttacatgttttagatagtcatgtaatgacttggatagacatttaaataacttgttccaaggtcggaagagcccaagaactcctcagagttcctctt

SEQ ID NO: 217448 - DNA, 120 bp, Artificial Sequence
  ENSG00000116667_50 (sequence is synthesized)
cttgcttcttgaatcacatcctctaaagatgactcatgtctccatagcaactgttaaaggtgctgcctagacgggacccgctcccacctttacttactttgctcgaaggaaccaaaacaa

SEQ ID NO: 217449 - DNA, 120 bp, Artificial Sequence
  ENSG00000116667_51 (sequence is synthesized)
tgtccttgtgtaaaggggctgtcatatccagttttcctttgaaatctggcccccaagatcctgcttctttctaacctggcagctgtcatgtcccttcaagatgatgtgggaaatggccct

SEQ ID NO: 217450 - DNA, 120 bp, Artificial Sequence
  ENSG00000116667_52 (sequence is synthesized)
tacaacttgggaaccacagaaattgctgtatttcgggaagattcacctctaaactgaaggcttcattctgatagtgtctgccctctctaccctgatttcgcccttctttgcttccatttt

SEQ ID NO: 217451 - DNA, 120 bp, Artificial Sequence
  ENSG00000116667_53 (sequence is synthesized)
tagcccaaggctttgaatttgattgagtaagacttagaggcagtataaagaacaccataaacttaggcagaggtcccttagggtctctagagttgaaaataattctacagccttaggggg

SEQ ID NO: 217452 - DNA, 120 bp, Artificial Sequence
  ENSG00000116667_54 (sequence is synthesized)
acctcttggcattgactctaaagggagagaatagcccctgtgtcctggcatttcagtctagaccttcaaggactgttctctcttgacaggcaagcaagcaaagaaagttttgcaatagat

SEQ ID NO: 217453 - DNA, 120 bp, Artificial Sequence
  ENSG00000116667_55 (sequence is synthesized)
ttcaagccagtttttccattcaaaccaagatgcaaattcataaaattactcttttcctggaatagatccaggcagctgccttattagaactttagattcggatctattttcttaacacac

SEQ ID NO: 217454 - DNA, 120 bp, Artificial Sequence
  ENSG00000116667_56 (sequence is synthesized)
atacacatacacgcgcatacatacatatacagagagatacgtggagaaaggaaatttactctatcattgcaatacttcaagaaagagctgtattttgcctttctgtaatctccaagatag

SEQ ID NO: 217455 - DNA, 120 bp, Artificial Sequence
  ENSG00000116667_57 (sequence is synthesized)
tgtctaggaaagtaatagtataactatagggataccgaaacaggaaaaaccagccatcactcttgagaaagtttgagttcgactcacatgggagaatcgaggtctgctactcgtcttgct

SEQ ID NO: 217456 - DNA, 120 bp, Artificial Sequence
  ENSG00000116667_58 (sequence is synthesized)
ttgtgccccatctgtgcctggatgccctactacatctgcttgactcgtctgggctgctagccggggtgttgtggctgacatcctttcctggccttacacacataatagacacatccctaa

SEQ ID NO: 217457 - DNA, 120 bp, Artificial Sequence
  ENSG00000116667_59 (sequence is synthesized)
cggcgtgtgcctggtccagccacatacagccaccacatgtgtcacacactgtccccctcatccatgtggacttgactggcatttcagcagctccactgggatgctctaaccccagtgtgt

SEQ ID NO: 217458 - DNA, 120 bp, Artificial Sequence
  ENSG00000116667_60 (sequence is synthesized)
ggagttggggtcccttcatctaggttgacccaggtatagcatttttagcattgcctttccagtcttgatgattcattcattgaactcatttatttctggagcccctggtacactccaggc

SEQ ID NO: 217459 - DNA, 120 bp, Artificial Sequence
  ENSG00000116667_61 (sequence is synthesized)
actgcgctaattgccagcaaagcacaactgaactaaatccaccttcaaggaacctagccataacgagggaggcagcatggaagtaccctacaggggaaagtcctgagtgctgtgggagca

SEQ ID NO: 217460 - DNA, 120 bp, Artificial Sequence
  ENSG00000116667_62 (sequence is synthesized)
tctcaccgtggcagccagcccagttttggcaatcaggggcttcctgaaagaggtgacatcaaagcccggatgtgtcagaggactgagggagagtgttactaaaggactttcaggctgaga

SEQ ID NO: 217461 - DNA, 120 bp, Artificial Sequence
  ENSG00000116667_63 (sequence is synthesized)
ggatagcacaggactcagcccaaaggagggccagtgtggactgtccagggccagcctgcagtacagaggctggagcttggacttgtagagggagagagaagagcaagggacgtggacggg

SEQ ID NO: 217462 - DNA, 120 bp, Artificial Sequence
  ENSG00000116667_64 (sequence is synthesized)
gcagtgagccaggctagccacagagggttcccggggctttgctggggattcagggagcataaataagagctttaggtggtgctgtgtcctctgcagcccactgctgaggtcctccagaca

SEQ ID NO: 217463 - DNA, 120 bp, Artificial Sequence
  ENSG00000116667_65 (sequence is synthesized)
ggtaaggtgtggtcacaatcagggccggggtttccctgctcactgcggcagtgcaggggtgcttgctgagatgattcatcccagggtgtcctctgtcccttacccagccccaactcctct

SEQ ID NO: 217464 - DNA, 120 bp, Artificial Sequence
  ENSG00000116667_66 (sequence is synthesized)
tcctctgccaaaagctatttgaattcaaggactttaacctgggccggatctggtttggagacaaaggggacagctctgggtcagcatgaccttctttagagccactaaggcgaaaaatac

SEQ ID NO: 217465 - DNA, 120 bp, Artificial Sequence
  ENSG00000116667_67 (sequence is synthesized)
cgtttgggaccaggctggcctagacccagggatgagaatgcaccctaaaataaatatacgggaagcagcagagggcttccctgtctagtgtgtgatcctaactaaaggcagctctcttgg

SEQ ID NO: 217466 - DNA, 120 bp, Artificial Sequence
  ENSG00000116667_68 (sequence is synthesized)
acagccttcccctggattaggtcacatacacctggtggccaagcctctgctgggtcccaaatacacacccgagtcctgccaaagaaaggagatttttaaaaagcacagacaaattgtatg

SEQ ID NO: 217467 - DNA, 120 bp, Artificial Sequence
  ENSG00000116667_69 (sequence is synthesized)
caagtggaaaatacccataggcctagacagctgtggagggaagacctcgtgggtacctggaggctgccagagctgggagctctgcaggtatgagtcagggaaggctcagagacaagcaga

SEQ ID NO: 217468 - DNA, 120 bp, Artificial Sequence
  ENSG00000116667_70 (sequence is synthesized)
atctctctatggagacaacttgcagtgccttttaggttttccaaataacctcggagttcagagcattgggtttttttctcccctccccacccccagaaaaataattagaaaaatgtttag

SEQ ID NO: 217469 - DNA, 120 bp, Artificial Sequence
  ENSG00000116667_71 (sequence is synthesized)
gagaaaggaaaagaattagatgcatcagaataccagctataagccaacactgtttccagaaactcaagaaaaagctcaaacagaagacagttcccctgagaggctggaggcgttggtgct

SEQ ID NO: 217470 - DNA, 120 bp, Artificial Sequence
  ENSG00000116667_72 (sequence is synthesized)
gaaggcaattttcctagctaaggggcactgggccttgctgcaccttggggctgaccttttttgcaaaacacccacccctgccctcctggcatactcaacagcaacgccagctttctggac

SEQ ID NO: 217471 - DNA, 120 bp, Artificial Sequence
  ENSG00000116667_73 (sequence is synthesized)
ccttggaaagatgttagctcaaacacccactttttccagatcttcctcttgctcttcactgaggaatttgtaattctgaggctagcgatgcccactcggatattccgcaggcccaggtgt

SEQ ID NO: 217472 - DNA, 120 bp, Artificial Sequence
  ENSG00000116667_74 (sequence is synthesized)
ttagattagaatttgtccagcggtaatcctgatgctggaaaccaacaaacatttggcctcatattcacccatttaaaaactagagcccctggcaggtccccttagggccatgtgttcatg

SEQ ID NO: 217473 - DNA, 120 bp, Artificial Sequence
  ENSG00000116667_75 (sequence is synthesized)
gaatataagccaagtttgccttaggcttgttcatggaatataagccaagtttacctctccccattttctgccctggcccacttcccactcacctccacctcattgccaggaagggatcaa

SEQ ID NO: 217474 - DNA, 120 bp, Artificial Sequence
  ENSG00000116667_76 (sequence is synthesized)
aatgcctccatgccagttgttaatggctacatatttgcccttcccaagggtatttgcattttatttaggaacatggccttatattcaaggaaaatctagcatcaagattacgaggcatca

SEQ ID NO: 217475 - DNA, 120 bp, Artificial Sequence
  ENSG00000116667_77 (sequence is synthesized)
cctctcaatcaggtctgggaggtatcttggggcattgctcttctgaacacctgcagaggcttcctcaggtgagtgtgggagcccggaagggtggcctccctaaccactctgcctgcacat

SEQ ID NO: 217476 - DNA, 120 bp, Artificial Sequence
  ENSG00000116667_78 (sequence is synthesized)
gaattctccaaagcagtgggcccccatctgtttcaattacacatgcctgtcagcaaaaacttcgtgagatgcactctctctgtgtgtttattaatttatttaaagcatatatccctttac

SEQ ID NO: 217477 - DNA, 120 bp, Artificial Sequence
  ENSG00000116667_79 (sequence is synthesized)
ttttgtactactatattaggcacattataaaaagtatacagcatagaaactttaaatgaataagacacaaaatattataaacagaggttctggcattttctctctgaactcctgaggggg

SEQ ID NO: 217478 - DNA, 120 bp, Artificial Sequence
  ENSG00000116667_80 (sequence is synthesized)
accttgggcacctcctggtatgtgcacaccccactttgaacacccttgctttagtgcaaatcagcacgcctaaatagcatcccaaaccactgtgcgacatttggcctgcagaataagaaa

SEQ ID NO: 217479 - DNA, 120 bp, Artificial Sequence
  ENSG00000116667_81 (sequence is synthesized)
gtcctaaggcagaatccccaggaacttcaaatctgggagatgaggaaagaaaactcactcacaaacaacataaatgtaaataattcaaaaccctaaaggagagctgtccctagacagtag

SEQ ID NO: 217480 - DNA, 120 bp, Artificial Sequence
  ENSG00000116667_82 (sequence is synthesized)
tggctacaggtgctaagcaaaagtcaggtacactggacagagccatgcgattgattgttcatcttccctctctgggtctccagaaaaggacactggcaatatccccagctctctcctgat

SEQ ID NO: 217481 - DNA, 120 bp, Artificial Sequence
  ENSG00000116667_83 (sequence is synthesized)
tggaattctttgaaccctcgaagtgctccagcagtactaccccccacgtagcagtgggcccatgtcgcttgaatattatttttgatttgaccaccaagatgtaatgatgattctattcca

SEQ ID NO: 217482 - DNA, 120 bp, Artificial Sequence
  ENSG00000116667_84 (sequence is synthesized)
ttttgaaaagggtctgagaaagtgtacaggtctaattatatatacatatttatacatgtgtatttttgtttattgttacattttgacattggactttctattaaataatttttaagagtt

SEQ ID NO: 217483 - DNA, 120 bp, Artificial Sequence
  ENSG00000116667_85 (sequence is synthesized)
tatatcactcaacagaagataatgaagaaggtcttaaattcattagtattatttagcagcagatcccactttgacatggaccctctgagagaataattgtatcatcttctaagccaccat

SEQ ID NO: 217484 - DNA, 120 bp, Artificial Sequence
  ENSG00000116667_86 (sequence is synthesized)
taaaagaccagcaaaggtcaccaatgcgaaaaatagagatggataatgaattaaaatgagagttaaatctataatgttccctggatgtaaataaataaatacttgttaaagtataataat

SEQ ID NO: 217485 - DNA, 120 bp, Artificial Sequence
  ENSG00000116667_87 (sequence is synthesized)
agaaataaacccttgttgttttaagccattctgttttggggatgtttgttactacaacataaccaaactaaaatacctcacctatggataatgagtggtaacatgtcaggttgtagatga

SEQ ID NO: 217486 - DNA, 120 bp, Artificial Sequence
  ENSG00000116667_88 (sequence is synthesized)
ctttctccttcctacatggagaggtgccctagggtgaaatgcttcagtggaaattctccttcgattatgaagttgcaaagtctgtccttcggtctgccaacttttccttcttactatctg

SEQ ID NO: 217487 - DNA, 120 bp, Artificial Sequence
  ENSG00000116667_89 (sequence is synthesized)
tcaaatcctgatttattcagaaaaaagtgccagctcaaatgtaagacttaaaactaataaagaggttccgggattagttcatcaacccagagcaaagtacatcacaattggaaagttaaa

SEQ ID NO: 217488 - DNA, 120 bp, Artificial Sequence
  ENSG00000116667_90 (sequence is synthesized)
actggcaaccaccattctactttctgtctccatgaatttgactactccaggctgctgtgcattttagagaagttcttatgtgatactgaaaaaagtgccagctcaaatgtaagacttaaa

SEQ ID NO: 217489 - DNA, 120 bp, Artificial Sequence
  ENSG00000116668_0 (sequence is synthesized)
gagtaggtagtgcggatgcgggcgcagaactacgtttcccagcaggcatacagttggtggggcggggtgtgtgtgtgtgttgggaggcgggggtccctctcctttggcttggggctccgg

SEQ ID NO: 217490 - DNA, 120 bp, Artificial Sequence
  ENSG00000116668_1 (sequence is synthesized)
agttgccactgccgccggcgctggtaagcttttcaggatgtccagcaaagaatcctgtgggaaaaaagagacatctcagaggaaagacaccaccacctcatcacccaattttggtgaaaa

SEQ ID NO: 217491 - DNA, 120 bp, Artificial Sequence
  ENSG00000116668_2 (sequence is synthesized)
agacaagaaagagagaaaaaccccagcaagttctactagttcatcttctataagatcagtttcatcagaaaagagaaaactgaaatcagatcatacagatgttctgtactataatataaa

SEQ ID NO: 217492 - DNA, 120 bp, Artificial Sequence
  ENSG00000116668_3 (sequence is synthesized)
aagaagacaaggactgaaaagattgagtgtagaaattgacactctcagaaggagaccaaaaatcggttcttcatcccaaagacctattaaactcaaagaagcatcatattcaaatgataa

SEQ ID NO: 217493 - DNA, 120 bp, Artificial Sequence
  ENSG00000116668_4 (sequence is synthesized)
tcaaattattttgcagagtccttcttcaaatggaactaaaaaagacatacataaatgtgtagactttaaacctaaagatatcaaattgacaaatgctgggagcaagcttgaccatggaat

SEQ ID NO: 217494 - DNA, 120 bp, Artificial Sequence
  ENSG00000116668_5 (sequence is synthesized)
taaaagccttagtagtcctaagattgccagtgatgtgaaacctaaagccgaaggccaggcaagtgaaaataaatggtctcatttacttgttcagagagagaagatgaaagaactcaagaa

SEQ ID NO: 217495 - DNA, 120 bp, Artificial Sequence
  ENSG00000116668_6 (sequence is synthesized)
aggaagaaacagtaaatttagagacaattctgaaaaatgtgtcttagagaaatggaagagaaatcaattttctcaggattataactccaacaagataattaaggaacccttgggatctag

SEQ ID NO: 217496 - DNA, 120 bp, Artificial Sequence
  ENSG00000116668_7 (sequence is synthesized)
aagacagaagatcagtttcaaaatccctataaaatcccgtgacaccctccagaaacttgtagaagaaaatgtcttcaacatagattctaataattcgaagactaagcaggaagaaagaga

SEQ ID NO: 217497 - DNA, 120 bp, Artificial Sequence
  ENSG00000116668_8 (sequence is synthesized)
atacctggaaagctcccaggtttcattaaatgtgactaggcagaaaactgaacatttactttcagattttacatataagcggactgttcatgagtggaaacgaaaacatcattatgacca

SEQ ID NO: 217498 - DNA, 120 bp, Artificial Sequence
  ENSG00000116668_9 (sequence is synthesized)
tcaagaaagtaatgattcacattctagggaaaacctaacccagagttttgaagcaccatgttgttccgtgtcatctgaaagtatccaggatgcagatcaagagatgcagatagtagaaga

SEQ ID NO: 217499 - DNA, 120 bp, Artificial Sequence
  ENSG00000116668_10 (sequence is synthesized)
gcttcatgctgcacgtgtgggaaaaagtgtggatttacctggagagttaatgagtatggaaattgacttagaagatgatgtacattcctcctctgcaaataatacttcagacagaaagct

SEQ ID NO: 217500 - DNA, 120 bp, Artificial Sequence
  ENSG00000116668_11 (sequence is synthesized)
tctaattgttattgacacaaatattctgatgaatcatctcaaatttgttagaattttgaagacaacagaagtaccaggttttgacaaacttgtgttaataattccctgggtcgttatgca

SEQ ID NO: 217501 - DNA, 120 bp, Artificial Sequence
  ENSG00000116668_12 (sequence is synthesized)
agagctagatcgtatgaaggaaggaaaactactaaaacgtgcccagcacaaagctatacctgcagttcatttcatcaacgacagtctcaaaaatcaagatagaaagctatggggtcagtc

SEQ ID NO: 217502 - DNA, 120 bp, Artificial Sequence
  ENSG00000116668_13 (sequence is synthesized)
aatacaacttgcatcccaaaaacattatggattgagtgatgagaacaatgatgatcgagtactaaaatgctgtctccagcaccaggaattattcccttgttcttttgttattctgtgcac

SEQ ID NO: 217503 - DNA, 120 bp, Artificial Sequence
  ENSG00000116668_14 (sequence is synthesized)
ggatgatagaaacttaagaaacaaaggcctaataagtggtgtgaagtcactcagtaaagaagaattgagtgcagagttattacacttatctctgaacacagatgtgtgtcatcagccttg

SEQ ID NO: 217504 - DNA, 120 bp, Artificial Sequence
  ENSG00000116668_15 (sequence is synthesized)
tctcttggaacaggtttatcttcaatattagaaacagaaatgaaaattgcttttggaaacctttggatggagatcctgtacctgaaaccaccatggactctactacatttactacagtgc

SEQ ID NO: 217505 - DNA, 120 bp, Artificial Sequence
  ENSG00000116668_16 (sequence is synthesized)
tttaaaaaacattggttggctgtatttggattagttatggaaaagaacttgcttttaactattgagagcctatacaaaaatctccgtaaagctaataaggcagtggattttacaacagtc

SEQ ID NO: 217506 - DNA, 120 bp, Artificial Sequence
  ENSG00000116668_17 (sequence is synthesized)
aaattcttgcttcaggattctagaagtttgttacatgctttcagtacaaggtcaaattatgatggtattcttccacagacctttgctcaagtaaacaacctccttcagacatttgcagag

SEQ ID NO: 217507 - DNA, 120 bp, Artificial Sequence
  ENSG00000116668_18 (sequence is synthesized)
gtcaagacaaaacttaagccaaattcttcagaaaacacagtgactaaaaagcaggaaggtacttcattgaagaattctcataatcaagaaatcactgttttctcgagttctcatcttccc

SEQ ID NO: 217508 - DNA, 120 bp, Artificial Sequence
  ENSG00000116668_19 (sequence is synthesized)
caacccagcaggcatcaagaaatctggtctatcctagagagtgtttggattacaatatatcagaacagcacggatgtatttcaaagattgggctcaaattcagctctgactacttcaaat

SEQ ID NO: 217509 - DNA, 120 bp, Artificial Sequence
  ENSG00000116668_20 (sequence is synthesized)
atagcatcatttgaagaagcatttatatgtcttcaaaagttaatggcagctgtgagggatattcttgaaggaattcaaaggattttggccccaaacagtaattatcaagatgttgagacc

SEQ ID NO: 217510 - DNA, 120 bp, Artificial Sequence
  ENSG00000116668_21 (sequence is synthesized)
ctctataacttcctaatcaagtatgaggtaaataaaaatgtcaaatttactgcccaggaaatttatgattgtgtttctcagactgagtatagggaaaagttaaccattggatgccgccag

SEQ ID NO: 217511 - DNA, 120 bp, Artificial Sequence
  ENSG00000116668_22 (sequence is synthesized)
ctggttgagatggaatataccatgcagcagtgcaatgcatctgtttatatggaggccaaaaacaggggatggtgtgaagacatgctcaactataggatataagtactgatttgtaacttt

SEQ ID NO: 217512 - DNA, 120 bp, Artificial Sequence
  ENSG00000116668_23 (sequence is synthesized)
aaaggaattgcatttgtccttaagaataacagagtagttttcaatctggtcactcttttgggccaaacccaagagaattttaagaaatgtttcataggtataaaaaggtgatcgcctatt

SEQ ID NO: 217513 - DNA, 120 bp, Artificial Sequence
  ENSG00000116668_24 (sequence is synthesized)
actgacagtctcattgtagctctaaaaagcctaatgtatccactgtggaataaactccatagactcaactcttctggagttcacaatgcctccctacctctattcttgatagtgagccag

SEQ ID NO: 217514 - DNA, 120 bp, Artificial Sequence
  ENSG00000116668_25 (sequence is synthesized)
tatctctaaggaaaggagagccgtatttttagtcatcctagggcaggagccactgtggcatctgaggaagacccagggtacagtattagcatttctttcaaccctaagtatgggcatgtg

SEQ ID NO: 217515 - DNA, 120 bp, Artificial Sequence
  ENSG00000116668_26 (sequence is synthesized)
accagagacactgccaaaccctaagaaatcattagggcatgatcatgctcaccatatttcacaaatgaaatcttaatgtgggctgttttttatgatcaaactgtcatccatgttgacctg

SEQ ID NO: 217516 - DNA, 120 bp, Artificial Sequence
  ENSG00000116668_27 (sequence is synthesized)
atgaaaataacaccctccttcacctccctcagggtaatgaaagtagaaatttgactgaagctcctacttccttatacagcctttccttctgtgggcttgtcacttttcagtacatttcta

SEQ ID NO: 217517 - DNA, 120 bp, Artificial Sequence
  ENSG00000116668_28 (sequence is synthesized)
gtggggaagagcagggcgacccctctgctgggtttctccttaaatgtgaagcaaaataaatttatataatggaatttggtggcagtgactgatgtttgtctctagctaaaaccaactgtt

SEQ ID NO: 217518 - DNA, 120 bp, Artificial Sequence
  ENSG00000116668_29 (sequence is synthesized)
tagttgactttttagttataggataagttggaagtccttgtttactggaatatattatgcttttgttaacacattagattaaatagaatttggtattctattataaatgtttatttttta

SEQ ID NO: 217519 - DNA, 120 bp, Artificial Sequence
  ENSG00000116668_30 (sequence is synthesized)
aagcaataaataacttatttttggtaagatttggctttttacttccaaattgtttctgatatgtacataaggtatgattataaaagtgactgtctgcaataaaagagaacttgttcagga

SEQ ID NO: 217520 - DNA, 120 bp, Artificial Sequence
  ENSG00000116668_31 (sequence is synthesized)
gggtgtggttctggcccggcttgcctccggggctgccccttgcccggtgttggggtctggtcggttcgtgcggagcccgcgggcccgcggcggtttactagcagctgacgagcttgcctg

SEQ ID NO: 217521 - DNA, 80 bp, Artificial Sequence
  ENSG00000116670_0 (sequence is synthesized)
cggggccgggcccggcgcgcacccggccagcgcgccctcgccagctgcgctctgagttctgggccagctccccagaggcc

SEQ ID NO: 217522 - DNA, 120 bp, Artificial Sequence
  ENSG00000116670_1 (sequence is synthesized)
tccccagaggcctaggcgccgccgccgcgagggcgcggggcagacaaaggaggcagacaaaggcgggcgcagcccagcagccgtgcgggcaccgggcgaggcaggcccactcctcccgta

SEQ ID NO: 217523 - DNA, 120 bp, Artificial Sequence
  ENSG00000116670_2 (sequence is synthesized)
atatcatctctgagggcccttacaggacttccagaccgagtccacgcccctgggggacttgggagcagtaaaatgtagtggcaggaggcacctcggccatcgcccaccccaccagctggg

SEQ ID NO: 217524 - DNA, 120 bp, Artificial Sequence
  ENSG00000116670_3 (sequence is synthesized)
agactcgggcaggttattcacccttctgcacctcgcttgacttatctgtataaagagaacagtcacagtaactgcctcatggagttactcccaggactgagataatccacggacacactt

SEQ ID NO: 217525 - DNA, 120 bp, Artificial Sequence
  ENSG00000116670_4 (sequence is synthesized)
agcccagtgcccagcactcggctggagctccaaaaagccctcttccggcgcctgctaaagcgagagaaatgccctcgggggaagatatgtagcgatccaatggaacgtggagatcaacgt

SEQ ID NO: 217526 - DNA, 120 bp, Artificial Sequence
  ENSG00000116670_5 (sequence is synthesized)
tgtgttttcttcgcgcccacccgaagttgaagggaggtggcgcggcgggtctcagcccctcccggacgccgaggcccggcccccgcccctcggagacccgcccccgcatgcggaaccgcc

SEQ ID NO: 217527 - DNA, 120 bp, Artificial Sequence
  ENSG00000116670_6 (sequence is synthesized)
ctctgcgaggcccggtttgggccgtgcgggaatgggcgtggcctgggcggggcgggcgctaggacccaccggagcgccgtgaacgtcaccgagcggcgccgaggccccgggttgagcggg

SEQ ID NO: 217528 - DNA, 120 bp, Artificial Sequence
  ENSG00000116670_7 (sequence is synthesized)
aaccgagcgcagagccggtagcgggaaggatgaccacgctcacacgacaagacctcaactttggccaagtggtggccgatgtgctctgcgagttcctggaggtggctgtgcatctcatcc

SEQ ID NO: 217529 - DNA, 120 bp, Artificial Sequence
  ENSG00000116670_8 (sequence is synthesized)
tctacgtgcgcgaggtctaccccgtgggcatcttccagaaacgcaagaagtacaacgtgccggtccagatgtcctgccacccggagctgaatcagtatatccaggacacgctgcactgcg

SEQ ID NO: 217530 - DNA, 120 bp, Artificial Sequence
  ENSG00000116670_9 (sequence is synthesized)
tcaagccactcctggagaagaatgatgtggagaaagtggtggtggtgattttggataaagagcaccgcccagtggagaaattcgtctttgagatcacccagcctccactgctgtccatca

SEQ ID NO: 217531 - DNA, 120 bp, Artificial Sequence
  ENSG00000116670_10 (sequence is synthesized)
gctcagactcgctgttgtctcatgtggagcagctgctccgggccttcatcctgaagatcagcgtgtgcgatgccgtcctggaccacaaccccccaggctgtaccttcacagtcctggtgc

SEQ ID NO: 217532 - DNA, 120 bp, Artificial Sequence
  ENSG00000116670_11 (sequence is synthesized)
acacgagagaagccgccactcgcaacatggagaagatccaggtcatcaaggatttcccctggatcctggcggatgagcaggatgtccacatgcatgacccccggctgataccactaaaaa

SEQ ID NO: 217533 - DNA, 120 bp, Artificial Sequence
  ENSG00000116670_12 (sequence is synthesized)
ccatgacgtcggacattttaaagatgcagctttacgtggaagagcgcgctcataaaggcagctgagggggcacctgccaccccactgatgcccaaactgtcagactttgggggatccccg

SEQ ID NO: 217534 - DNA, 120 bp, Artificial Sequence
  ENSG00000116670_13 (sequence is synthesized)
cctagggcagtgctgcatggctgccctgattccaagtgctcttatcgcctctgtgtgtggatcgcccgccccagcccggggccgctcaggtctgcttggaggatgcctcccccaggaggg

SEQ ID NO: 217535 - DNA, 120 bp, Artificial Sequence
  ENSG00000116670_14 (sequence is synthesized)
cagtgagggatgccgcaacctcgacttctcagcctcctggggttccgccggccaacactgtctgtctcaaatactgtgctgtgagttgtttcaataaaggggccccaagggctgggctga

SEQ ID NO: 217536 - DNA, 120 bp, Artificial Sequence
  ENSG00000116670_15 (sequence is synthesized)
ctctgggatggggtgaagctaggactctgtggggtcttcatggctccaatacccagaagcctgttccctgcactctggagaccatcccaacccaggggcaggccccaaggcatgcgggcc

SEQ ID NO: 217537 - DNA, 120 bp, Artificial Sequence
  ENSG00000116670_16 (sequence is synthesized)
atgttcagggtgccttgggcctgggagcccgggttggagctggctctaagtaggggctgccccagagggttcggggttcttctcacatccgtcccctgttctccacgctaaacgttctgt

SEQ ID NO: 217538 - DNA, 120 bp, Artificial Sequence
  ENSG00000116670_17 (sequence is synthesized)
ctgagctgagcccctcagggtttcttccccatctagtcctgatctcagacttcctgggaccttccctatggggcccgggcattctctcagcctacaccactcatgctggagggtgccggc

SEQ ID NO: 217539 - DNA, 120 bp, Artificial Sequence
  ENSG00000116670_18 (sequence is synthesized)
ttctcaaactcgctatctggcctcttggggacccccagcctagcagctgagcagggctgtgagtgggccgtttctcctccttccttgggcaagggggtggaggcagggtggtgtagtcgg

SEQ ID NO: 217540 - DNA, 120 bp, Artificial Sequence
  ENSG00000116670_19 (sequence is synthesized)
ggtggggtgcctggctctgcagtgggggttcctctctttgcagaatgatgtggagaaagtggtggtggtgattttggataaagagcaccgcccagtggagaaattcgtctttgagatcac

SEQ ID NO: 217541 - DNA, 120 bp, Artificial Sequence
  ENSG00000116670_20 (sequence is synthesized)
ccacaaccccccaggtgtgtccactccccaccctctcttcccttggcatttccatggttatctcgggttggtctgtgttcccaggtccatgtttggctgttctgagactcatctcttcct

SEQ ID NO: 217542 - DNA, 120 bp, Artificial Sequence
  ENSG00000116670_21 (sequence is synthesized)
aaccctgagagtccacctcctctgggaagcttccctgattgattctacctggcttccatctccctattgactggggcttttcttagcacttgctttgccatctgctctgggggtgctgct

SEQ ID NO: 217543 - DNA, 120 bp, Artificial Sequence
  ENSG00000116670_22 (sequence is synthesized)
gagccagcaagggaagtgggaagaggctgggcccagtggctggcaccagggcggtgggggagcctccaccaacctcttgcctctccaggctgtaccttcacagtcctggtgcacacgaga

SEQ ID NO: 217544 - DNA, 120 bp, Artificial Sequence
  ENSG00000116670_23 (sequence is synthesized)
ccaaggtagggaggctggacctgcgggcccgggggcgggggcgtctgggccggcgggcttcctcgagcgcgccaccggcttgtgcccccctgcagtggtggccgatgtgctctgcgagtt

SEQ ID NO: 217545 - DNA, 120 bp, Artificial Sequence
  ENSG00000116670_24 (sequence is synthesized)
gggttgagcgggaggcgcgatcggtccggtcggtggctccccgcggcggggccgggcccgatctcgggcgggaaccgagcgcagagccggtactgggggaggggagagggggcgggattc

SEQ ID NO: 217546 - DNA, 120 bp, Artificial Sequence
  ENSG00000116670_25 (sequence is synthesized)
attcccgccgggagggatccggcgtagcagggggcggagtcttattccaaccccgcttcgctttccgcatgtcccgctttgcgctcccggccctgggcatcccgctgtttccctctgcgt

SEQ ID NO: 217547 - DNA, 120 bp, Artificial Sequence
  ENSG00000116670_26 (sequence is synthesized)
ccgcggccctgcccttttcgggggcacagctgtggtctttccaccccgcgagacagcggggcgagggggcgcgggcggccagtggatagaggctgatgcccccaagcacggacgccagcg

SEQ ID NO: 217548 - DNA, 120 bp, Artificial Sequence
  ENSG00000116670_27 (sequence is synthesized)
tgggggtggaggttcttccagctgccctgagcctgtgcgaagcgggaggtccttccccagttcccacagactgtggggagggaagagacggtggaagcgagcgggttctgggctcctggg

SEQ ID NO: 217549 - DNA, 120 bp, Artificial Sequence
  ENSG00000116675_0 (sequence is synthesized)
cgcacaccgacttgcatgcaattatcatagcccgagtgctcctccgttgagagacttcgcccccgagaccgctgactgtgaatgacaaatcaaaagtcagggttgcagaatcagccggac

SEQ ID NO: 217550 - DNA, 120 bp, Artificial Sequence
  ENSG00000116675_1 (sequence is synthesized)
tttcctgctcatttgcagcagagggaggaagcagagaatgaaagattctgaaaataaaggtgcctcatctccagacatggagcccagctatgggggaggtctctttgacatggtaaaagg

SEQ ID NO: 217551 - DNA, 120 bp, Artificial Sequence
  ENSG00000116675_2 (sequence is synthesized)
aggtgcagggaggctctttagtaacctaaaggacaacttgaaagacaccctcaaagacacatcttctagagtgatacaatctgtgaccagctacacaaagggagatttagacttcactta

SEQ ID NO: 217552 - DNA, 120 bp, Artificial Sequence
  ENSG00000116675_3 (sequence is synthesized)
tgttacctccagaattattgtgatgtcctttcctctggacaatgttgacataggattcaggaatcaggttgatgacattcgaagctttttggattccagacatcttgaccactacacagt

SEQ ID NO: 217553 - DNA, 120 bp, Artificial Sequence
  ENSG00000116675_4 (sequence is synthesized)
atacaatctgtcacctaagtcttatcgaactgccaagtttcacagccgggtctcagaatgcagttggcccattaggcaggctcccagtctgcacaacctttttgctgtgtgtcggaatat

SEQ ID NO: 217554 - DNA, 120 bp, Artificial Sequence
  ENSG00000116675_5 (sequence is synthesized)
gtataactggctactgcagaatcccaaaaatgtctgtgttgtccactgcttggatggacgggcggcatcatcaattctggttggtgctatgttcattttctgtaatctctactctactcc

SEQ ID NO: 217555 - DNA, 120 bp, Artificial Sequence
  ENSG00000116675_6 (sequence is synthesized)
tggcccagccattcgattgctatatgcaaagcgaccaggaattggactttcaccatcccataggagatacctgggctatatgtgtgacctactggcagacaagccctaccgccctcactt

SEQ ID NO: 217556 - DNA, 120 bp, Artificial Sequence
  ENSG00000116675_7 (sequence is synthesized)
caagcctctcacaattaagtcgatcactgtcagtccaataccctttttcaacaaacagaggaatggatgtcgcccttactgtgatgtactcattggagaaaccaaaatatattcgacttg

SEQ ID NO: 217557 - DNA, 120 bp, Artificial Sequence
  ENSG00000116675_8 (sequence is synthesized)
cacagattttgaacgaatgaaagaatatcgtgtccaagatggaaaaatcttcattcccttgaacatcactgtgcaaggagacgtggttgtttccatgtatcacttgaggtcaaccattgg

SEQ ID NO: 217558 - DNA, 120 bp, Artificial Sequence
  ENSG00000116675_9 (sequence is synthesized)
gagccggctacaggctaaggtgaccaacacacagatattccagcttcagtttcacactggattcataccactggacacaacagttttaaagttcaccaagcctgagttagatgcatgtga

SEQ ID NO: 217559 - DNA, 120 bp, Artificial Sequence
  ENSG00000116675_10 (sequence is synthesized)
tgtaccagaaaaatatcctcagctatttcaggtgacactggatgtagaactacagccccatgacaaagtaatagacttaactccaccatgggaacattactgcacaaaagatgtcaatcc

SEQ ID NO: 217560 - DNA, 120 bp, Artificial Sequence
  ENSG00000116675_11 (sequence is synthesized)
cagcatcctcttctcttctcaccaggaacatcaagatacgctggccttaggaggacaggctccaatagatatccctccagacaaccccaggcattacggacaaagtggtttctttgcctc

SEQ ID NO: 217561 - DNA, 120 bp, Artificial Sequence
  ENSG00000116675_12 (sequence is synthesized)
tctctgttggcaagatcagaaatcggagaagtcattctgtgaggaggaccacgctgccctagtgaatcaggaaagtgagcaatcagatgatgaacttctgacactttccagtccgcatgg

SEQ ID NO: 217562 - DNA, 120 bp, Artificial Sequence
  ENSG00000116675_13 (sequence is synthesized)
caatgccaatggtgacaagcctcatggagtcaagaagcccagcaaaaagcagcaggagccagcagcccctccaccccctgaggatgtggaccttttgggcctggaagggtctgcaatgag

SEQ ID NO: 217563 - DNA, 120 bp, Artificial Sequence
  ENSG00000116675_14 (sequence is synthesized)
taacagcttctctccgccagcggctcctcccaccaattctgaactactgagtgacctgtttgggggtggaggtgcagctggtcccacccaggctggacagtcaggagtggaagatgtgtt

SEQ ID NO: 217564 - DNA, 120 bp, Artificial Sequence
  ENSG00000116675_15 (sequence is synthesized)
tcatcctagtggacctgcgtctacccagtcaacaccacgccgctctgccacctccacctctgcgtctccaaccctaagagtgggagaaggtgccacctttgacccatttggagcaccttc

SEQ ID NO: 217565 - DNA, 120 bp, Artificial Sequence
  ENSG00000116675_16 (sequence is synthesized)
taaaccatcaggtcaggatttgctgggttcttttctgaacacatccagtgcttccagtgacccctttctccagccaacaagaagtccttcgcccacagtacatgcttctagtacgcctgc

SEQ ID NO: 217566 - DNA, 120 bp, Artificial Sequence
  ENSG00000116675_17 (sequence is synthesized)
tgtgaacattcagccagatgtttctggaggttgggactggcatgctaaaccaggaggctttggaatgggaagcaagtcagctgccaccagcccaaccggatcctcgcatggtactcccac

SEQ ID NO: 217567 - DNA, 120 bp, Artificial Sequence
  ENSG00000116675_18 (sequence is synthesized)
ccatcaaagcaaaccccagactctggatccttttgccgaccttgggacactaggtagttcttcctttgccagcaaacccaccacaccaactggattgggtggaggattcccgcctctcag

SEQ ID NO: 217568 - DNA, 120 bp, Artificial Sequence
  ENSG00000116675_19 (sequence is synthesized)
ctcgccacagaaggcgtctccccagcctatgggtggcgggtggcagcagggaggtgcctacaactggcagcagccacagcctaagcctcagcccagcatgccccactcctctccccagaa

SEQ ID NO: 217569 - DNA, 120 bp, Artificial Sequence
  ENSG00000116675_20 (sequence is synthesized)
ccgacccaactacaacgtgagcttctcagccatgcctgggggccagaacgaacgtgggaaaggatcaagtaatttggaagggaaacaaaaagcagctgattttgaagacctactctctgg

SEQ ID NO: 217570 - DNA, 120 bp, Artificial Sequence
  ENSG00000116675_21 (sequence is synthesized)
tcaaggtttcaatgctcacaaagacaaaaaggggcctcggacaatagctgagatgagaaaggaggaaatggccaaggaaatggatcctgagaaattaaagattctggaatggattgaagg

SEQ ID NO: 217571 - DNA, 120 bp, Artificial Sequence
  ENSG00000116675_22 (sequence is synthesized)
caaagaaagaaatatcagagcccttctttccacgatgcataccgtactatgggctggggagaccaagtggaaaccagttggcatggcagacctggtaacaccagagcaggtgaagaaggt

SEQ ID NO: 217572 - DNA, 120 bp, Artificial Sequence
  ENSG00000116675_23 (sequence is synthesized)
gaatttgaaaaccaaggccaaaagcccttatattaatttatgagcttttccatctctgctgcagacctgtgctaatgcttagtgtgtgtcacaattctgaggttttcgcagatgaaccaa

SEQ ID NO: 217573 - DNA, 120 bp, Artificial Sequence
  ENSG00000116675_24 (sequence is synthesized)
aaactccagtaacatgttttcagtactaaaccgttaagttactcatgaattaatttctcattgataaggaatgtggatgtttggtttctccaaagttcccaccataaaagatccaaagca

SEQ ID NO: 217574 - DNA, 120 bp, Artificial Sequence
  ENSG00000116675_25 (sequence is synthesized)
tgagaggaacttctagtcagatgaccttgcagaaccaccgcattccaccctgccctttggggagcctactcagcattctacctggggaaatggaaaacagaggccaccacccatgaaggc

SEQ ID NO: 217575 - DNA, 120 bp, Artificial Sequence
  ENSG00000116675_26 (sequence is synthesized)
ataacacccatcacattgtctgagaataggattaatgagcaaaagttatgataatagagttatatgatggtttaatggtttctagatttttcttggaaagatataatttgagcagtggct

SEQ ID NO: 217576 - DNA, 120 bp, Artificial Sequence
  ENSG00000116675_27 (sequence is synthesized)
ttatgcagactccaagaacaaaaccaccaggtatttttttttaagtaaaaatttactaaggcctttagcataatactgtaaatgtcttttggtcaagagaactaacaaatataaaggaac

SEQ ID NO: 217577 - DNA, 120 bp, Artificial Sequence
  ENSG00000116675_28 (sequence is synthesized)
ttgaaatgtggggagtgataatagtccagtgattaaactacagtccagtgattaccaccaactttctgactaagctaaaaatgaatgaaaatggtggctaaagaaaatagggactctgaa

SEQ ID NO: 217578 - DNA, 120 bp, Artificial Sequence
  ENSG00000116675_29 (sequence is synthesized)
gatgtcgaaatctttattcctggttaggaaggtgggccgctacccttctttccctttagaaaactgtgattaattaaataaaaagtcttactactataacaactctaaacctggtttaaa

SEQ ID NO: 217579 - DNA, 120 bp, Artificial Sequence
  ENSG00000116675_30 (sequence is synthesized)
tgaaacatctaattttgctgtaaggcttaatgctcttcttttgtttagccaagaaaacattcttagttggaaacaggtggtaaagtagtttggcctgttcacaacttatcaggaccaata

SEQ ID NO: 217580 - DNA, 120 bp, Artificial Sequence
  ENSG00000116675_31 (sequence is synthesized)
tctagtgtggactcagtgttctctaggtttgtgagcagttgtggtaagagaatggaaggcaacactgaataggagttaagggaatggcacgatcacagtgagagagctgcactcacctgc

SEQ ID NO: 217581 - DNA, 120 bp, Artificial Sequence
  ENSG00000116675_32 (sequence is synthesized)
agacccagtcagatggcttgtcagtatctgctctgaggaaccaggtcccacctccccacaaggcaaatctagacccattaaattattacagtgggcttttttgttttaaaagtggttggg

SEQ ID NO: 217582 - DNA, 120 bp, Artificial Sequence
  ENSG00000116675_33 (sequence is synthesized)
gatccacaggaacgacattcatacagggacatttgtgaaagcaaagcaagaatgaatgctttcccgatctcagactggctggattcagatcagtgtgttggctggttctcattttaaggg

SEQ ID NO: 217583 - DNA, 120 bp, Artificial Sequence
  ENSG00000116675_34 (sequence is synthesized)
gtaagcagtttgctattctgtgactttagtagatctcttttgtgtgcacatatacaatgtgcattatacatatatattaaatatatccacaaagcagatgggcaaaaagattttcatgct

SEQ ID NO: 217584 - DNA, 120 bp, Artificial Sequence
  ENSG00000116675_35 (sequence is synthesized)
aatcttcaaaggttcatgctcaatattgtgaaaagcttttaaaagttgttttgaaaagacaatcattttttgtttttgttttaactttcttgtggcaagctataccggaaaagcggcatg

SEQ ID NO: 217585 - DNA, 120 bp, Artificial Sequence
  ENSG00000116675_36 (sequence is synthesized)
tcaaaaatactttaggttctacatagatctctttctctcttttgttttgtttgtttgtttgttaaagttcattatttattttaccttttactgacaatgtgaaactcgaagaaaatgttc

SEQ ID NO: 217586 - DNA, 120 bp, Artificial Sequence
  ENSG00000116675_37 (sequence is synthesized)
tctttttaaatatacagtcataaactgttcaaggtaaccataacaaactaggtgttatttattaacgtattataaaataatgtttgatccagtatgtgcttgtcttatttaaaattggaa

SEQ ID NO: 217587 - DNA, 120 bp, Artificial Sequence
  ENSG00000116675_38 (sequence is synthesized)
tgtgagacatgttgctgtgacctgtttttctttctcattcacatttgtagatattgtgtgaactacagtatataatgataacaattaaaaggatattctgtggatgtcacgtattttgaa

SEQ ID NO: 217588 - DNA, 120 bp, Artificial Sequence
  ENSG00000116675_39 (sequence is synthesized)
atgatagaactacattagctttgtatcatgtttggataattcatcaatgttcacagtttaaaacatcattaaacattatgtaattacaatgagaaagaatcttacttaaatttggagatt

SEQ ID NO: 217589 - DNA, 120 bp, Artificial Sequence
  ENSG00000116675_40 (sequence is synthesized)
ttcccccacatctcttttccggatacattataattctggacccctatttatctcaaaactcttaatatatgcagaccaacaggtctttgcattccttttaaataactggttgtgacaaag

SEQ ID NO: 217590 - DNA, 120 bp, Artificial Sequence
  ENSG00000116675_41 (sequence is synthesized)
cttgttgttgatcagattcactgtttcatcatatttattgtaatatattttttgttttgtaaatatgttacaacaaaatgtgattggtctaaaatatttgtaatgtatattaaaaggttc

SEQ ID NO: 217591 - DNA, 120 bp, Artificial Sequence
  ENSG00000116675_42 (sequence is synthesized)
aaaaatatttgtataaatctaagttatttgggtacttgtaggaatacaatgaggagcttgaatgccaccttctgacatgatttacttttaaggaaagttatgaggagagaatacaaaaag

SEQ ID NO: 217592 - DNA, 120 bp, Artificial Sequence
  ENSG00000116675_43 (sequence is synthesized)
tttacttttaaggaaagttatgaggagagaatacaaaaagcatgcaccaaaatgtaatctgacaggatttctggatttatacgtaatcactcctgccccaacacacacacacacacacac

SEQ ID NO: 217593 - DNA, 120 bp, Artificial Sequence
  ENSG00000116675_44 (sequence is synthesized)
atgctacatgatatatgtttcaaaaagaattagcatagaaatcctggtctcctagccaaaaaaatcaaaggattttcaaaaaaacgaatctgtatgttgaggcaaaaggattgaacctgg

SEQ ID NO: 217594 - DNA, 120 bp, Artificial Sequence
  ENSG00000116675_45 (sequence is synthesized)
aagtctgggactttatcatagaaacaaagtctcagatattttagttctttggaaacaaatgctgtaattcaaaagcatttgacctgtcactgtactatctacatgtggaagaatgttcaa

SEQ ID NO: 217595 - DNA, 120 bp, Artificial Sequence
  ENSG00000116675_46 (sequence is synthesized)
gttgaatcctaatgccgtgaatgaaacacagtctgtgtagggaatgagcaaaaaagttgaattccaattgctttttggccttttggctaaaataaatgtagcatctaattttatcagttt

SEQ ID NO: 217596 - DNA, 120 bp, Artificial Sequence
  ENSG00000116675_47 (sequence is synthesized)
gagccgagctcagcccagggcggcggcttcgcctcgcccggcgaagcttctctccggtggccgctccttcttttccctcctctttgcgtcatgtcgggcacttaattttttttttttttt

SEQ ID NO: 217597 - DNA, 120 bp, Artificial Sequence
  ENSG00000116675_48 (sequence is synthesized)
aattccttcttcagccctttccaccttccatctcccttttcgcttcccaggttgattattttctcttttctccgggcttgcccatgagcctcctcgggagctaccggaaaaagaccagca

SEQ ID NO: 217598 - DNA, 120 bp, Artificial Sequence
  ENSG00000116675_49 (sequence is synthesized)
acgatggttatgaatctttgcagctggtggacagtaacggggacttaagtgcgggaagcggcggggttggcggcaagcagagagtgaacgccggggcagcggcgcggagtcccgcccgac

SEQ ID NO: 217599 - DNA, 120 bp, Artificial Sequence
  ENSG00000116675_50 (sequence is synthesized)
agtggttattattgagtcgagaatttttgggaaaagtaacacgtggagagtcaatttttgagtggaaggagtctgaagagagggtaggaaccaacctcctactacccaccaggtgcctca

SEQ ID NO: 217600 - DNA, 120 bp, Artificial Sequence
  ENSG00000116675_51 (sequence is synthesized)
gtgatggtttggtttggtcaaatatggatgagcctgtacacaatggtagacaggtaacatttgagttcaataggatttactgagcccatatttaggaattgggtaatgtgagagttgtaa

SEQ ID NO: 217601 - DNA, 120 bp, Artificial Sequence
  ENSG00000116675_52 (sequence is synthesized)
aaataagaaagggatttattattcttgacttaaagcttgactactagtgggaaaggcagatgtatacacaactcacatagtgtggggactctagaatgtgctaagtattataaaggaggt

SEQ ID NO: 217602 - DNA, 120 bp, Artificial Sequence
  ENSG00000116675_53 (sequence is synthesized)
agacgcgcggcggcggcggcgagcggtggcgctcggctcgggcgaccgcggcgggggagggcgcggcgcaccgatgggcgccactgagaagggaggccagaagagccggaagctgttttc

SEQ ID NO: 217603 - DNA, 120 bp, Artificial Sequence
  ENSG00000116675_54 (sequence is synthesized)
cttgcggcggccgtggaaggcgacccggcggctgtggaggccacgctcagctcgccaggcggcgcagggtgcctcatctccagacatggagcccagctatgggggaggtctctttgacat

SEQ ID NO: 217604 - DNA, 120 bp, Artificial Sequence
  ENSG00000116675_55 (sequence is synthesized)
agaggatttctcctctctctgtctcttaattgcaaattctgccattttcaatggagaatggctgatttgatcatgttcataatgattttatgcattttctttgacaggatggacgggcgg

SEQ ID NO: 217605 - DNA, 120 bp, Artificial Sequence
  ENSG00000116678_0 (sequence is synthesized)
ccggtctggcttgggcaggctgcccgggccgtggcaggaagccggaagcagccgcggccccagttcgggagacatggcgggcgttaaagctctcgtggcattatccttcagtggggctat

SEQ ID NO: 217606 - DNA, 120 bp, Artificial Sequence
  ENSG00000116678_1 (sequence is synthesized)
tggactgacttttcttatgctgggatgtgccttagaggattatgggtgtacttctctgaagtaagatgatttgtcaaaaattctgtgtggttttgttacattgggaatttatttatgtga

SEQ ID NO: 217607 - DNA, 120 bp, Artificial Sequence
  ENSG00000116678_2 (sequence is synthesized)
taactgcgtttaacttgtcatatccaattactccttggagatttaagttgtcttgcatgccaccaaattcaacctatgactacttccttttgcctgctggactctcaaagaatacttcaa

SEQ ID NO: 217608 - DNA, 120 bp, Artificial Sequence
  ENSG00000116678_3 (sequence is synthesized)
attcgaatggacattatgagacagctgttgaacctaagtttaattcaagtggtactcacttttctaacttatccaaaacaactttccactgttgctttcggagtgagcaagatagaaact

SEQ ID NO: 217609 - DNA, 120 bp, Artificial Sequence
  ENSG00000116678_4 (sequence is synthesized)
gctccttatgtgcagacaacattgaaggaaagacatttgtttcaacagtaaattctttagtttttcaacaaatagatgcaaactggaacatacagtgctggctaaaaggagacttaaaat

SEQ ID NO: 217610 - DNA, 120 bp, Artificial Sequence
  ENSG00000116678_5 (sequence is synthesized)
tattcatctgttatgtggagtcattatttaagaatctattcaggaattataactataaggtccatcttttatatgttctgcctgaagtgttagaagattcacctctggttccccaaaaag

SEQ ID NO: 217611 - DNA, 120 bp, Artificial Sequence
  ENSG00000116678_6 (sequence is synthesized)
gcagttttcagatggttcactgcaattgcagtgttcatgaatgttgtgaatgtcttgtgcctgtgccaacagccaaactcaacgacactctccttatgtgtttgaaaatcacatctggtg

SEQ ID NO: 217612 - DNA, 120 bp, Artificial Sequence
  ENSG00000116678_7 (sequence is synthesized)
gagtaattttccagtcacctctaatgtcagttcagcccataaatatggtgaagcctgatccaccattaggtttgcatatggaaatcacagatgatggtaatttaaagatttcttggtcca

SEQ ID NO: 217613 - DNA, 120 bp, Artificial Sequence
  ENSG00000116678_8 (sequence is synthesized)
gcccaccattggtaccatttccacttcaatatcaagtgaaatattcagagaattctacaacagttatcagagaagctgacaagattgtctcagctacatccctgctagtagacagtatac

SEQ ID NO: 217614 - DNA, 120 bp, Artificial Sequence
  ENSG00000116678_9 (sequence is synthesized)
ttcctgggtcttcgtatgaggttcaggtgaggggcaagagactggatggcccaggaatctggagtgactggagtactcctcgtgtctttaccacacaagatgtcatatactttccaccta

SEQ ID NO: 217615 - DNA, 120 bp, Artificial Sequence
  ENSG00000116678_10 (sequence is synthesized)
aaattctgacaagtgttgggtctaatgtttcttttcactgcatctataagaaggaaaacaagattgttccctcaaaagagattgtttggtggatgaatttagctgagaaaattcctcaaa

SEQ ID NO: 217616 - DNA, 120 bp, Artificial Sequence
  ENSG00000116678_11 (sequence is synthesized)
gccagtatgatgttgtgagtgatcatgttagcaaagttacttttttcaatctgaatgaaaccaaacctcgaggaaagtttacctatgatgcagtgtactgctgcaatgaacatgaatgcc

SEQ ID NO: 217617 - DNA, 120 bp, Artificial Sequence
  ENSG00000116678_12 (sequence is synthesized)
atcatcgctatgctgaattatatgtgattgatgtcaatatcaatatctcatgtgaaactgatgggtacttaactaaaatgacttgcagatggtcaaccagtacaatccagtcacttgcgg

SEQ ID NO: 217618 - DNA, 120 bp, Artificial Sequence
  ENSG00000116678_13 (sequence is synthesized)
aaagcactttgcaattgaggtatcataggagcagcctttactgttctgatattccatctattcatcccatatctgagcccaaagattgctatttgcagagtgatggtttttatgaatgca

SEQ ID NO: 217619 - DNA, 120 bp, Artificial Sequence
  ENSG00000116678_14 (sequence is synthesized)
ttttccagccaatcttcctattatctggctacacaatgtggattaggatcaatcactctctaggttcacttgactctccaccaacatgtgtccttcctgattctgtggtgaagccactgc

SEQ ID NO: 217620 - DNA, 120 bp, Artificial Sequence
  ENSG00000116678_15 (sequence is synthesized)
ctccatccagtgtgaaagcagaaattactataaacattggattattgaaaatatcttgggaaaagccagtctttccagagaataaccttcaattccagattcgctatggtttaagtggaa

SEQ ID NO: 217621 - DNA, 120 bp, Artificial Sequence
  ENSG00000116678_16 (sequence is synthesized)
aagaagtacaatggaagatgtatgaggtttatgatgcaaaatcaaaatctgtcagtctcccagttccagacttgtgtgcagtctatgctgttcaggtgcgctgtaagaggctagatggac

SEQ ID NO: 217622 - DNA, 120 bp, Artificial Sequence
  ENSG00000116678_17 (sequence is synthesized)
tgggatattggagtaattggagcaatccagcctacacagttgtcatggatataaaagttcctatgagaggacctgaattttggagaataattaatggagatactatgaaaaaggagaaaa

SEQ ID NO: 217623 - DNA, 120 bp, Artificial Sequence
  ENSG00000116678_18 (sequence is synthesized)
atgtcactttactttggaagcccctgatgaaaaatgactcattgtgcagtgttcagagatatgtgataaaccatcatacttcctgcaatggaacatggtcagaagatgtgggaaatcaca

SEQ ID NO: 217624 - DNA, 120 bp, Artificial Sequence
  ENSG00000116678_19 (sequence is synthesized)
cgaaattcactttcctgtggacagagcaagcacatactgttacggttctggccatcaattcaattggtgcttctgttgcaaattttaatttaaccttttcatggcctatgagcaaagtaa

SEQ ID NO: 217625 - DNA, 120 bp, Artificial Sequence
  ENSG00000116678_20 (sequence is synthesized)
atatcgtgcagtcactcagtgcttatcctttaaacagcagttgtgtgattgtttcctggatactatcacccagtgattacaagctaatgtattttattattgagtggaaaaatcttaatg

SEQ ID NO: 217626 - DNA, 120 bp, Artificial Sequence
  ENSG00000116678_21 (sequence is synthesized)
aagatggtgaaataaaatggcttagaatctcttcatctgttaagaagtattatatccatgatcattttatccccattgagaagtaccagttcagtctttacccaatatttatggaaggag

SEQ ID NO: 217627 - DNA, 120 bp, Artificial Sequence
  ENSG00000116678_22 (sequence is synthesized)
tgggaaaaccaaagataattaatagtttcactcaagatgatattgaaaaacaccagagtgatgcaggtttatatgtaattgtgccagtaattatttcctcttccatcttattgcttggaa

SEQ ID NO: 217628 - DNA, 120 bp, Artificial Sequence
  ENSG00000116678_23 (sequence is synthesized)
cattattaatatcacaccaaagaatgaaaaagctattttgggaagatgttccgaaccccaagaattgttcctgggcacaaggacttaattttcagaagccagaaacgtttgagcatcttt

SEQ ID NO: 217629 - DNA, 120 bp, Artificial Sequence
  ENSG00000116678_24 (sequence is synthesized)
ttatcaagcatacagcatcagtgacatgtggtcctcttcttttggagcctgaaacaatttcagaagatatcagtgttgatacatcatggaaaaataaagatgagatgatgccaacaactg

SEQ ID NO: 217630 - DNA, 120 bp, Artificial Sequence
  ENSG00000116678_25 (sequence is synthesized)
tggtctctctactttcaacaacagatcttgaaaagggttctgtttgtattagtgaccagttcaacagtgttaacttctctgaggctgagggtactgaggtaacctatgaggacgaaagcc

SEQ ID NO: 217631 - DNA, 120 bp, Artificial Sequence
  ENSG00000116678_26 (sequence is synthesized)
agagacaaccctttgttaaatacgccacgctgatcagcaactctaaaccaagtgaaactggtgaagaacaagggcttataaatagttcagtcaccaagtgcttctctagcaaaaattctc

SEQ ID NO: 217632 - DNA, 120 bp, Artificial Sequence
  ENSG00000116678_27 (sequence is synthesized)
cgttgaaggattctttctctaatagctcatgggagatagaggcccaggcattttttatattatcagatcagcatcccaacataatttcaccacacctcacattctcagaaggattggatg

SEQ ID NO: 217633 - DNA, 120 bp, Artificial Sequence
  ENSG00000116678_28 (sequence is synthesized)
aacttttgaaattggagggaaatttccctgaagaaaataatgataaaaagtctatctattatttaggggtcacctcaatcaaaaagagagagagtggtgtgcttttgactgacaagtcaa

SEQ ID NO: 217634 - DNA, 120 bp, Artificial Sequence
  ENSG00000116678_29 (sequence is synthesized)
gggtatcgtgcccattcccagccccctgtttattcacggacatcagagttctccaggacagttgctcacactttgtagaaaataatatcaacttaggaacttctagtaagaagacttttg

SEQ ID NO: 217635 - DNA, 120 bp, Artificial Sequence
  ENSG00000116678_30 (sequence is synthesized)
catcttacatgcctcaattccaaacttgttctactcagactcataagatcatggaaaacaagatgtgtgacctaactgtgtaatttcactgaagaaaccttcagatttgtgttataatgg

SEQ ID NO: 217636 - DNA, 120 bp, Artificial Sequence
  ENSG00000116678_31 (sequence is synthesized)
gtaatataaagtgtaatagattatagttgtgggtgggagagagaaaagaaaccagagtcaaatttgaaaataattgttccaaatgaatgttgtctgtttgttctctcttagtaacataga

SEQ ID NO: 217637 - DNA, 120 bp, Artificial Sequence
  ENSG00000116678_32 (sequence is synthesized)
caaaaaatttgagaaagccttcataagcctaccaatgtagacacgctcttctattttattcccaagctctagtgggaaggtcccttgtttccagctagaaataagcccaacagacaccat

SEQ ID NO: 217638 - DNA, 120 bp, Artificial Sequence
  ENSG00000116678_33 (sequence is synthesized)
cttttgtgagatgtaattgttttttcagagggcgtgttgttttacctcaagtttttgttttgtaccaacacacacacacacacacattcttaacacatgtccttgtgtgttttgagagta

SEQ ID NO: 217639 - DNA, 120 bp, Artificial Sequence
  ENSG00000116678_34 (sequence is synthesized)
gataaacagaattcagccctggcctaaggggttatacttgtgaagactaatgagccaattgttatgtaccaaatctaagatatgtaccatagaatgaaataacctgcaagaatggtgatg

SEQ ID NO: 217640 - DNA, 120 bp, Artificial Sequence
  ENSG00000116678_35 (sequence is synthesized)
cccacaatcagtattttgatgacaacacaagcacttttgaaaacataatgtcagttttaattcttctctctgaaagatgttgaagtggtcactttctgataaagttagattgccaaatgt

SEQ ID NO: 217641 - DNA, 120 bp, Artificial Sequence
  ENSG00000116678_36 (sequence is synthesized)
cactgtatatctctccggaataattgtcttcccccatccccacctggacatatcctattttttcccctcactgagcattctgtctacataaaccaaccactgtgcagtactttacatacc

SEQ ID NO: 217642 - DNA, 120 bp, Artificial Sequence
  ENSG00000116678_37 (sequence is synthesized)
ttaacccagttaattattgaaataattgtatgagacatctgttactatgatactccttaaagatgaagacagtaaataatttgcccacagttacagtcagtgggtgatggaatcagagtt

SEQ ID NO: 217643 - DNA, 120 bp, Artificial Sequence
  ENSG00000116678_38 (sequence is synthesized)
cagatttaaatccagattttttaatgctaatgattatgtttttaacctataccctacatagccatcaatttaaaaaaactgacttgtaatcaaaatttattaagtagaggctggcacagt

SEQ ID NO: 217644 - DNA, 120 bp, Artificial Sequence
  ENSG00000116678_39 (sequence is synthesized)
gctgaggcgggtggatcgcttgagctcagaagtcttgaaactagccggggcaacatagtgaggcctcgtctctacaaaaaacacaaaaattagctgagtgtgacagaaaaaataaagatt

SEQ ID NO: 217645 - DNA, 120 bp, Artificial Sequence
  ENSG00000116678_40 (sequence is synthesized)
attagctgagtgtgacagaaaaaataaagattataaaatgtattaagtagaagtataatgctggatgagaaattaagtgagaattgcacagatctcatgtttgcctttaacaacttaaga

SEQ ID NO: 217646 - DNA, 120 bp, Artificial Sequence
  ENSG00000116678_41 (sequence is synthesized)
ttaatacataagtttattatttattcaacttttggtacggtaaaaaaattcaaagacagcatattgggcaacaaactaaattaagaaacctgcacatttggatgttcagtggcaagaaga

SEQ ID NO: 217647 - DNA, 120 bp, Artificial Sequence
  ENSG00000116678_42 (sequence is synthesized)
ccttcaagaatatcagtatcatcaaaataagtactttagtgttcaaaaatatgcctatgggtttttaaaaattatcagaatttcatatttagaccgagacaagagactcccaattttact

SEQ ID NO: 217648 - DNA, 120 bp, Artificial Sequence
  ENSG00000116678_43 (sequence is synthesized)
gttatcctaaataaatctctacattccatctctagtccagttgtggctatgaagtgagcagttctaaacaatgacaaagattccagaccccacttgatagatatttttcacactttataa

SEQ ID NO: 217649 - DNA, 120 bp, Artificial Sequence
  ENSG00000116678_44 (sequence is synthesized)
tcaatttccactcaggaatcaataaagttattccatgtcataagtatttttaagatgtctcaggatctcacatactcaactaatgacccccttacaagaaataggtaaagggctgatagc

SEQ ID NO: 217650 - DNA, 120 bp, Artificial Sequence
  ENSG00000116678_45 (sequence is synthesized)
aactcattacttgatgtggtacgagagccttagttctatgcaaagataaatggagaagcgtttttttcatggataattttacatggctttagagacacagaaacagataaattattacat

SEQ ID NO: 217651 - DNA, 120 bp, Artificial Sequence
  ENSG00000116678_46 (sequence is synthesized)
gtataaaaattttagtaaaattgacattttaaatacatgcttatagattattggtatttaattgaaggtacagtacagaagagatagaaaaataaattttgccccactctgaaattgaag

SEQ ID NO: 217652 - DNA, 120 bp, Artificial Sequence
  ENSG00000116678_47 (sequence is synthesized)
actgacctctgagcatgtccgctgagacacagtattctcctgtgatctgggacccagaataacaggaaagagaaactgatagatgttttcatcagcccaaggatgtatgtatcttacttg

SEQ ID NO: 217653 - DNA, 120 bp, Artificial Sequence
  ENSG00000116678_48 (sequence is synthesized)
agtgaattcaacagtcccaggaccactgtagtgctgtaggtctgtgtaaagaaatgtagtgacagcacattaacctgagatcattgataccatcttggttcagcctcagttccccagata

SEQ ID NO: 217654 - DNA, 120 bp, Artificial Sequence
  ENSG00000116678_49 (sequence is synthesized)
agtgaacaaatgaacaaaaatgcacttcagaaatattgaaattccaaggcactatttcatggacagtgctgaacaagtatagtttggcctattggtatgtatagacttagatcatattta

SEQ ID NO: 217655 - DNA, 120 bp, Artificial Sequence
  ENSG00000116678_50 (sequence is synthesized)
ttgtcaatgggcttgaattctgatttccacttttgaaagtttatttcactatgtatcattacattttattgggaccttgtgaaaactacctgccatgaaatactggattttcacataatt

SEQ ID NO: 217656 - DNA, 120 bp, Artificial Sequence
  ENSG00000116678_51 (sequence is synthesized)
tagaaaaaatttagaatgttttatgcctcagaatggtcaggaacttcccatttcttcccacagcttctataaaaaaaatttaaaaggaaggaggagctgaaataggggctatggtctttt

SEQ ID NO: 217657 - DNA, 120 bp, Artificial Sequence
  ENSG00000116678_52 (sequence is synthesized)
aaacttataaatctggaatttttaatatttcattttaaggccttaaaccgaaacacaagctactaatcagtctttctaaatctgaccttcattgaaagcaactcagaaattaataatttg

SEQ ID NO: 217658 - DNA, 120 bp, Artificial Sequence
  ENSG00000116678_53 (sequence is synthesized)
tgctgtggcttcaagtttaaatagattgtttgaagagaaatcatatgtcagggtttgcaggattacaggatttctaacttaaacccccaagaacaatgaaaaagttgacgtacatgtcac

SEQ ID NO: 217659 - DNA, 120 bp, Artificial Sequence
  ENSG00000116678_54 (sequence is synthesized)
tatgaataggcaccttctgttggatctctgtgtccatttagagatgagctacaagttgacaagaaaaataggagcagttttttttttctttttaaacctagtcaccaaatggtaaaagga

SEQ ID NO: 217660 - DNA, 120 bp, Artificial Sequence
  ENSG00000116678_55 (sequence is synthesized)
cttggatgaaattccaataccagtgtgagattctggatttagaataaggttttataaccttaggcatgtcattcttctacttctcatttttccctaataaaacttattctctcttccata

SEQ ID NO: 217661 - DNA, 120 bp, Artificial Sequence
  ENSG00000116678_56 (sequence is synthesized)
atatcatatatatggtcacattacttcaggaatatttatattacctcctccaaaactgaaagaaaataaactttaggctgtaagagttgagaattatgcatacagggctcacaggcggag

SEQ ID NO: 217662 - DNA, 120 bp, Artificial Sequence
  ENSG00000116678_57 (sequence is synthesized)
ttggacaatatgctgatggatcaagacatactgcaaccacaaagttccatctcacttagatgtggatgaaaaaagatctcttgctaaattattttctgtgaccttaaaagaaatttgttt

SEQ ID NO: 217663 - DNA, 120 bp, Artificial Sequence
  ENSG00000116678_58 (sequence is synthesized)
cacttttcatctttcaagggtcatcttgatagttaccttaacaaacctttctcagctatttattattgagaaagcccattcttaaattttaagtcacaaaattatagttgtccactctac

SEQ ID NO: 217664 - DNA, 120 bp, Artificial Sequence
  ENSG00000116678_59 (sequence is synthesized)
tatgactgaaagaagcagcattcaagaaaaaatttaaacatagttaccaagaaatgtgaagaagtatttataaaaggaagctacataagtaggtaattttactctttcttaaccagttta

SEQ ID NO: 217665 - DNA, 120 bp, Artificial Sequence
  ENSG00000116678_60 (sequence is synthesized)
aaacagtaaagcacacctgcatctaatcacaatgttaggcgaacaacttaaaacatgatcagcctgtatgagaactgggatattgttacatattcagcctgtatgagaactgggatattg

SEQ ID NO: 217666 - DNA, 120 bp, Artificial Sequence
  ENSG00000116678_61 (sequence is synthesized)
ggatattgttgttacatgtatttgtataaacattaggagatgatttccatggcttttttttttttttttttaggaagtcttgctctgttgcccagctggagtgcagtgatgtgatctcgg

SEQ ID NO: 217667 - DNA, 70 bp, Artificial Sequence
  ENSG00000116678_62 (sequence is synthesized)
acaccaccatgcccagcttttatttatttatttatttattttggatttttagtagagatggggttttgcc

SEQ ID NO: 217668 - DNA, 85 bp, Artificial Sequence
  ENSG00000116678_63 (sequence is synthesized)
tcctgacctcaagtgatccgccctcaagctgccgcgcctagcccttcatgaggttttatagtgaatgaattatttttctataaag

SEQ ID NO: 217669 - DNA, 120 bp, Artificial Sequence
  ENSG00000116678_64 (sequence is synthesized)
tcatgaggttttatagtgaatgaattatttttctataaagtttatcaatatttattttggaaagctgctgaaaatgtctttttcaaaattaattatgcttaagatgtatggcattaaatt

SEQ ID NO: 217670 - DNA, 120 bp, Artificial Sequence
  ENSG00000116678_65 (sequence is synthesized)
caattttatgaggctttctgacatatttactaaaaaaacctggaactgagactgaatttggaagacatttaattttgtagtgagatatctatattgtagatattgtacttttaaaacctg

SEQ ID NO: 217671 - DNA, 120 bp, Artificial Sequence
  ENSG00000116678_66 (sequence is synthesized)
tcattaagtgtttggcatgtggttaatactttctctttagtcacaactggtattttaataaatgttataaacgtaagtgccaagatatgcatcactaactgttctatgaaatttgtctac

SEQ ID NO: 217672 - DNA, 120 bp, Artificial Sequence
  ENSG00000116678_67 (sequence is synthesized)
ttctcctttatgttcccaaagtcacagagaaagcagtgtactttatgacagtatatttatctttttatcattatgaattataagcagtgttaattttgagaaataaaagtccaaaaagaa

SEQ ID NO: 217673 - DNA, 120 bp, Artificial Sequence
  ENSG00000116678_68 (sequence is synthesized)
aagagaacggacattctttgaagtctaatcatgatcactacagatgaacccaatgtgccaacttcccaacagtctatagagtattagaagatttttacattttgaagaaggggagcaaat

SEQ ID NO: 217674 - DNA, 120 bp, Artificial Sequence
  ENSG00000116678_69 (sequence is synthesized)
ctaaaaaaaattcagttgaacttctgagagttaacatatggtggattatgttgatttagaacttaaaatagatgtgtaaatttgggttcaaaatgtagatttgagtccagtttggatgtg

SEQ ID NO: 217675 - DNA, 120 bp, Artificial Sequence
  ENSG00000116678_70 (sequence is synthesized)
tgattaattttcaaatcatctaaagtttaaaagtagtattcatgatttctggcttttgatttgtcatattcctggtcataaaacattaagaaaattatggctgttgctgtcattacatat

SEQ ID NO: 217676 - DNA, 120 bp, Artificial Sequence
  ENSG00000116678_71 (sequence is synthesized)
ctattaaatgtcatcaaatatgtagtagacaatgctgtaattaggtgaactctaaaactgcaacatctgacaaatagctttaaaaatacaatgattataagtatggaatcagtgaaaata

SEQ ID NO: 217677 - DNA, 120 bp, Artificial Sequence
  ENSG00000116678_72 (sequence is synthesized)
tttagtttgtatttttatgtccaaacttttccattttagattcctttatagacacgtcagcctaaaaatcagcctattcgggtgttcttttgaatatctcctggcatttttgtatctaac

SEQ ID NO: 217678 - DNA, 120 bp, Artificial Sequence
  ENSG00000116678_73 (sequence is synthesized)
tttgttcaatctgggaatttcagttttcaatatccttgaaaatggcttaagtgataacttccgtttcagttaaaaggaagcccgaagttgtgtttgtgctgcccacaggacagtgggagt

SEQ ID NO: 217679 - DNA, 120 bp, Artificial Sequence
  ENSG00000116678_74 (sequence is synthesized)
tacagttcatatcaggatgaccctacatacccaggtcagattgacgggaccagaagggaacatcgacttctaatccagctttcttgtttaattatgacctaaatctaatttacttccact

SEQ ID NO: 217680 - DNA, 120 bp, Artificial Sequence
  ENSG00000116678_75 (sequence is synthesized)
gaaccatccaagacctctggcaggcagggaaatgggcagtgatgcaaaaaagggagactctttggagcttttatgaatagttcatggtgaggacagaacttttctactttcagacagact

SEQ ID NO: 217681 - DNA, 120 bp, Artificial Sequence
  ENSG00000116678_76 (sequence is synthesized)
gcttgctagttttatgaattcagcacacgaattatgctgcgttgctcacattcaaaccaaaccaacgactatgtttaatgaactcagtattcaaatttattatatatgcgtatatatgta

SEQ ID NO: 217682 - DNA, 120 bp, Artificial Sequence
  ENSG00000116678_77 (sequence is synthesized)
tatatggatcccttatatttagatttaactcgtagttttatttgaaagtagaaaagaactctacaaaaacgggaagaatgtgtctttcttcccttcttgacttctaataggtgtcattga

SEQ ID NO: 217683 - DNA, 120 bp, Artificial Sequence
  ENSG00000116678_78 (sequence is synthesized)
aatgtaaaatctaagtatgaaattatgaaaggacattctttaattactgcccactcaacacatatttaatatgtgcccagattattctaaaatcttaaaaaaagatgcatatagtgaaat

SEQ ID NO: 217684 - DNA, 120 bp, Artificial Sequence
  ENSG00000116678_79 (sequence is synthesized)
taaatggatatacttttaataaagttttataactcactgacaaaacatatttcaatagtatatgagtatgagatttcttatcaattatgagtgaaatattctatctgaatgcattggaag

SEQ ID NO: 217685 - DNA, 120 bp, Artificial Sequence
  ENSG00000116678_80 (sequence is synthesized)
gaaggcatttacagtatttgctttcaacagttactgagtatgacattttagcatgaaatatatcaaacacatcatttgaaggacatatgtaatcttgactatggttatggtttttttgta

SEQ ID NO: 217686 - DNA, 120 bp, Artificial Sequence
  ENSG00000116678_81 (sequence is synthesized)
tgtattccttgttttcatattgatagcatctaattcttttgacaatcttaatatgtaggttcatttaaattttaagacagttcagtgcatatatagtagaagccttaagaaaaaagaaaa

SEQ ID NO: 217687 - DNA, 120 bp, Artificial Sequence
  ENSG00000116678_82 (sequence is synthesized)
tgagcaagcaaatatttgaagaaatgtataaaaccatagatttctttcagaaaaaaaaaacaggcataggaacagttttctcttcatatattatgattatgaataataggaaagttgtat

SEQ ID NO: 217688 - DNA, 120 bp, Artificial Sequence
  ENSG00000116678_83 (sequence is synthesized)
taattcagtatttgtcattatgcagtattttaatacctacataagtctattccattattatattttgcgcttggcatatttattcctttatgcttttaatcactaacatattttacttaa

SEQ ID NO: 217689 - DNA, 120 bp, Artificial Sequence
  ENSG00000116678_84 (sequence is synthesized)
gagtataaaactatgctaaataaattgtattgtatatggaatatgcttgccattatgaagaacagctgggtataccattatttcaagtaataaatctgaattctattagtttaaaaattg

SEQ ID NO: 217690 - DNA, 120 bp, Artificial Sequence
  ENSG00000116678_85 (sequence is synthesized)
taaaattcaagttaaatgacgtgtatgatatataagctgaacacattttctatagcccttaatttagttgtgttaatttttcaaggtgatgtatcaacagctttttttattttgcatttg

SEQ ID NO: 217691 - DNA, 120 bp, Artificial Sequence
  ENSG00000116678_86 (sequence is synthesized)
ttttttcaatgtgtttacattgtatgaattgagctttttgcccacagattcttgatttgtagttgtttggcaggatttttctttgtgatataatcacttctataaaaaatatgatgtaca

SEQ ID NO: 217692 - DNA, 120 bp, Artificial Sequence
  ENSG00000116678_87 (sequence is synthesized)
accttgggcgaggagttcggagcggccccatcgcagagcccacggccagccgagcgcgcgcgacgcaggtgcccgagccccggcgccgccgccatctctgccttcggtcgagttggaccc

SEQ ID NO: 217693 - DNA, 120 bp, Artificial Sequence
  ENSG00000116678_88 (sequence is synthesized)
ttcagaagaaaatgcctggcacaaaggaactactgggtggaggttggttgacttaggaaatgcttgtagactacgtcctacctcgctgccgcacctgctctccctgaggtgtgcacaatg

SEQ ID NO: 217694 - DNA, 78 bp, Artificial Sequence
  ENSG00000116678_89 (sequence is synthesized)
gggaagatgttccgaaccccaagaattgttcctgggcacaaggacttaattttcagaagatgcttgaaggcagcatgt

SEQ ID NO: 217695 - DNA, 120 bp, Artificial Sequence
  ENSG00000116678_90 (sequence is synthesized)
aatctagacgccatatgacttatagagcattaagcatttttaagatttaaaaggtcatattttattcaattcatcttaatatatctgttattatatactttcaagaatagcaggatgcag

SEQ ID NO: 217696 - DNA, 120 bp, Artificial Sequence
  ENSG00000116678_91 (sequence is synthesized)
ggatttgaaatcaggaagaaacaaatttcagcgcatagtttatcgtatgagagttcacaatatacatatgttgcttctgtgtcacagtacataataaaataaatattagaaagttaaggg

SEQ ID NO: 217697 - DNA, 120 bp, Artificial Sequence
  ENSG00000116678_92 (sequence is synthesized)
tcaatctgatggagaacagatatttggatacactttttttggtataaactgtatttaggcaaaaggctggaatcaatatttttaatgtctataattatctccataattatttaaataaat

SEQ ID NO: 217698 - DNA, 120 bp, Artificial Sequence
  ENSG00000116679_0 (sequence is synthesized)
agtgtctcccggtcgcgcgtggaggtcggtcgctcagagctgctgggcgcagtttctccgcctgctgcttcggcgcggctgtatcggcgagcgagcgagttcccgcgagttctcggtggc

SEQ ID NO: 217699 - DNA, 120 bp, Artificial Sequence
  ENSG00000116679_1 (sequence is synthesized)
gctcccccttcctttcagtctccacggactggcccctcgtccttctacttgaccgctcccgtcttccgccgccttctggcgctttccgttgggccgattcccgcccgcttcctcctgctt

SEQ ID NO: 217700 - DNA, 120 bp, Artificial Sequence
  ENSG00000116679_2 (sequence is synthesized)
cccatcgaagctctagaaatgaatgtttccatctcttcagagatgaaccagattatgatgcatcattatcacagaagaaattcgtgtctatagcttttaaggacttgattacatcatttt

SEQ ID NO: 217701 - DNA, 120 bp, Artificial Sequence
  ENSG00000116679_3 (sequence is synthesized)
caagcctgatagttttggaatcaccattagagcttaagacacacctgccttcatttcaaccacctgtcttcataccctgacgaagtgcaccttttaacactcctttgtccttggattact

SEQ ID NO: 217702 - DNA, 120 bp, Artificial Sequence
  ENSG00000116679_4 (sequence is synthesized)
taagagttcccagaaatacatttgccaccaacagagtagccaaatttataaggaaaaatgattcccaatggatatttgatgtttgaggatgaaaattttattgagtcttctgttgccaaa

SEQ ID NO: 217703 - DNA, 120 bp, Artificial Sequence
  ENSG00000116679_5 (sequence is synthesized)
ttaaatgccctgaggaaaagtggccagttctgtgatgttcgacttcaggtctgtggccatgaaatgttagcacacagagcagtgctagcttgctgcagtccctatttatttgaaatcttt

SEQ ID NO: 217704 - DNA, 120 bp, Artificial Sequence
  ENSG00000116679_6 (sequence is synthesized)
aatagtgatagtgatcctcatggaatttctcacgttaaatttgatgatctcaatccagaagctgttgaagtcttgttgaattatgcctacactgctcagttgaaagcagataaggaattg

SEQ ID NO: 217705 - DNA, 120 bp, Artificial Sequence
  ENSG00000116679_7 (sequence is synthesized)
gtaaaagatgtttattctgcagcaaaaaagctgaagatggatcgagtaaagcaggtttgtggtgattatttactgtctagaatggatgttaccagctgcatctcttaccgaaattttgca

SEQ ID NO: 217706 - DNA, 120 bp, Artificial Sequence
  ENSG00000116679_8 (sequence is synthesized)
agttgtatgggagactcccgtttgttgaataaggttgatgcttatattcaggagcatttgttacaaatttctgaagaggaggagtttcttaagcttccaaggctaaagttggaggtaatg

SEQ ID NO: 217707 - DNA, 120 bp, Artificial Sequence
  ENSG00000116679_9 (sequence is synthesized)
cttgaagataatgtttgcttgcccagcaatggcaaattatatacaaaggtaatcaactgggtgcagcgtagcatctgggagaatggagacagtctggaagagctgatggaagaggttcaa

SEQ ID NO: 217708 - DNA, 120 bp, Artificial Sequence
  ENSG00000116679_10 (sequence is synthesized)
accttgtactactcagctgatcacaagctgcttgatgggaacctactagatggacaggctgaggtgtttggcagtgatgatgaccacattcagtttgtgcagaaaaagccaccacgtgag

SEQ ID NO: 217709 - DNA, 120 bp, Artificial Sequence
  ENSG00000116679_11 (sequence is synthesized)
aatggccataagcagataagtagcagttcaactggatgtctctcttctccaaatgctacagtacaaagccctaagcatgagtggaaaatcgttgcttcagaaaagacttcaaataacact

SEQ ID NO: 217710 - DNA, 120 bp, Artificial Sequence
  ENSG00000116679_12 (sequence is synthesized)
tacttgtgcctggctgtgctggatggtatattctgtgtcatttttcttcatgggagaaacagcccacagagctcaccaacaagtactccaaaactaagtaagagtttaagctttgagatg

SEQ ID NO: 217711 - DNA, 120 bp, Artificial Sequence
  ENSG00000116679_13 (sequence is synthesized)
caacaagatgagctaatcgaaaagcccatgtctcctatgcagtacgcacgatctggtctgggaacagcagagatgaatggcaaactcatagctgcaggtggctataacagagaggaatgt

SEQ ID NO: 217712 - DNA, 120 bp, Artificial Sequence
  ENSG00000116679_14 (sequence is synthesized)
cttcgaacagtcgaatgctataatccacatacagatcactggtcctttcttgctcccatgagaacaccaagagcccgatttcaaatggctgtactcatgggccagctctatgtggtaggt

SEQ ID NO: 217713 - DNA, 120 bp, Artificial Sequence
  ENSG00000116679_15 (sequence is synthesized)
ggatcaaatggccactcagatgacctgagttgtggagagatgtatgattcaaacatagatgactggattcctgttccagaattgagaactaaccgttgtaatgcaggagtgtgtgctctg

SEQ ID NO: 217714 - DNA, 120 bp, Artificial Sequence
  ENSG00000116679_16 (sequence is synthesized)
aatggaaagttatacatcgttggtggctctgatccatatggtcaaaaaggactgaaaaattgtgatgtatttgatcctgtaacaaagttgtggacaagctgtgcccctcttaacattcgg

SEQ ID NO: 217715 - DNA, 120 bp, Artificial Sequence
  ENSG00000116679_17 (sequence is synthesized)
tatttgtacataatcggaggtgcagaatcttggaattgtctgaacacagtagaacgatacaatcctgaaaataatacctggactttaattgcacccatgaatgtggctaggcgaggagct

SEQ ID NO: 217716 - DNA, 120 bp, Artificial Sequence
  ENSG00000116679_18 (sequence is synthesized)
ggagtggctgttcttaatggaaaactgtttgtatgtggtggctttgatggttctcatgccatcagttgtgtggaaatgtatgatccaactagaaatgaatggaagatgatgggaaatatg

SEQ ID NO: 217717 - DNA, 120 bp, Artificial Sequence
  ENSG00000116679_19 (sequence is synthesized)
acttcaccaaggagcaatgctgggattgcaactgtagggaacaccatttatgcagtgggaggattcgatggcaatgaatttctgaatacggtggaagtctataaccttgagtcaaatgaa

SEQ ID NO: 217718 - DNA, 120 bp, Artificial Sequence
  ENSG00000116679_20 (sequence is synthesized)
tggagcccctatacaaagattttccagttttaacaaatttaagaccctctcaaactaacaggcttagtgatgtaattatggttagtagaggtacacttgtgaataaagagggtgggtggg

SEQ ID NO: 217719 - DNA, 120 bp, Artificial Sequence
  ENSG00000116679_21 (sequence is synthesized)
tatagatgttgctaacagcaacacaaagcttttgcatattgcatactattaaacatgctgtacatactttttgggtttatttggaaaggaatgcaaagatgaaggtctgttttgtgtact

SEQ ID NO: 217720 - DNA, 120 bp, Artificial Sequence
  ENSG00000116679_22 (sequence is synthesized)
tttaagactttggttattttactttttggaaaagaataaaccaagaattgattgggcacatcatttcaagaagtcccctctcctccacatttgttttgccaatttgcacattaaatgact

SEQ ID NO: 217721 - DNA, 120 bp, Artificial Sequence
  ENSG00000116679_23 (sequence is synthesized)
cttccctcaaatgtgtactatggggtaaaaggggtagggtttaaagatgtagacagttgggttttttaagggccctttttcaataactggaacactctataacaaaggatacttatttaa

SEQ ID NO: 217722 - DNA, 120 bp, Artificial Sequence
  ENSG00000116679_24 (sequence is synthesized)
atagatgacattgactatttttgtttttattaaaaggaagcttacatgcctaccaatatttaatcttttatgattgcctttttataactttttatattctcagcagagtgctttaccaat

SEQ ID NO: 217723 - DNA, 120 bp, Artificial Sequence
  ENSG00000116679_25 (sequence is synthesized)
tgaagtaaaatgtggcaggctggagttattgaagcagagtggcagtcttcagtttgcagagtaggggtctgtcttttaaactctgagtgcaaacttcagagttcttgccttggctgcagt

SEQ ID NO: 217724 - DNA, 120 bp, Artificial Sequence
  ENSG00000116679_26 (sequence is synthesized)
ttttttccttcaagaatgcagtactaacatttatttgagtggagttactgaacagtaacatagctgtgatttttggtatttgaaacactggttttaaatattttgacttgttgagggtat

SEQ ID NO: 217725 - DNA, 120 bp, Artificial Sequence
  ENSG00000116679_27 (sequence is synthesized)
gttttatatagcaagacattatatagcagtaaaaaatggtgttttatcttctatataattcctgtttttattattaacaaaacagtcctaaatagcagccctcaattgtgaaaaaattta

SEQ ID NO: 217726 - DNA, 120 bp, Artificial Sequence
  ENSG00000116679_28 (sequence is synthesized)
ctttaaactacattaggttgtgaatgcaggttttatcagaactatgtttttgttcagtttatctgttcatatggataaatattggttgggatgacttggtgtctaatgtgtagtgctaca

SEQ ID NO: 217727 - DNA, 120 bp, Artificial Sequence
  ENSG00000116679_29 (sequence is synthesized)
cacctaacttatggggccaaaatagcatgtcctaatgcttgctgctgatttaaacacattaaaggtactttgcaggaaatccttgcaccatgggattaatatccaattgctgcttgtaca

SEQ ID NO: 217728 - DNA, 120 bp, Artificial Sequence
  ENSG00000116679_30 (sequence is synthesized)
ctcattcattactaaaagttttgagaaatttttttttccagtaatgagcttaagaaatttgtggaaaataactcacctggcatcttacatctgaaataaggaatgatataaggttttttt

SEQ ID NO: 217729 - DNA, 120 bp, Artificial Sequence
  ENSG00000116679_31 (sequence is synthesized)
ttctcacagaagatgaagcacacaggaacctaatgggccaactgggatgaggtgactattctgagatgactattcagtggctaacttgggttaggaagaaaataattaggtattttctcc

SEQ ID NO: 217730 - DNA, 120 bp, Artificial Sequence
  ENSG00000116679_32 (sequence is synthesized)
aaatgttcactggtactctgccactttatttctctcatctgttacacaaagaaccaccaggaaagcaaatcagtttggttggtaactctgtaattcctaactatcactggtttggttctg

SEQ ID NO: 217731 - DNA, 120 bp, Artificial Sequence
  ENSG00000116679_33 (sequence is synthesized)
gactaaaactacattgacagattgaatttgcctaatatgatgactgtttttaatatggatctgtatgtgttctattcagcacaaggaaataaaattttagttgaggattcagcactaaaa

SEQ ID NO: 217732 - DNA, 120 bp, Artificial Sequence
  ENSG00000116679_34 (sequence is synthesized)
gaagatggatcgagtaaagcagcatcttctctacttctgtctgcattcaacatcaacatcatctctcctgtagagcccagttcagatactgcgtttcatgaagccttaccaaattattct

SEQ ID NO: 217733 - DNA, 120 bp, Artificial Sequence
  ENSG00000116679_35 (sequence is synthesized)
acttgaaaatacttatgtgaacttacatagcatttcaatttgttgtacctctccttaaactaaaacttacatatctgtatggcataattagatgtttatcatttgtatacgtgttattac

SEQ ID NO: 217734 - DNA, 120 bp, Artificial Sequence
  ENSG00000116679_36 (sequence is synthesized)
cactattaacatttgttgtattaagacagtgatttttgattctttgtatcttcacatagtctttaccacactgaacattaaatatttgttgaataaaagatatgtaagtgttggcactca

SEQ ID NO: 217735 - DNA, 120 bp, Artificial Sequence
  ENSG00000116679_37 (sequence is synthesized)
atttggaaagtgttggcttgagttaaagttagtgtcctataaatgtcatatataggtgaaggatactcagtgttgtggaatagctcaggaacaaaggtacatcagatgtggtctttggct

SEQ ID NO: 217736 - DNA, 120 bp, Artificial Sequence
  ENSG00000116679_38 (sequence is synthesized)
attgactactcgaggaaaaaactcagaagcaattaaatttggaaaacgagagcagattgttccagtctgggatgtggagactggagtccaattcaggatcatatacacaaaccaaaagta

SEQ ID NO: 217737 - DNA, 120 bp, Artificial Sequence
  ENSG00000116679_39 (sequence is synthesized)
cgatgatgatttaatggtgtttactcctttacaggattcttgtctttaaagctgtgtgtttttcaatggtgttgttcatacatatagtcactcacttaacttgggctacttttaaaaaaa

SEQ ID NO: 217738 - DNA, 120 bp, Artificial Sequence
  ENSG00000116679_40 (sequence is synthesized)
atacacaagataaaattgatggagaaatggtgggaattgaaaacacgcaggtggagcagtggagtaaccttgagtttctctctccacttaaacctttcggagttcctttatgagggctta

SEQ ID NO: 217739 - DNA, 120 bp, Artificial Sequence
  ENSG00000116679_41 (sequence is synthesized)
ccaaatctgttaggcctgcagaaacactgtcatcattatggtctaaaagggctaacagattatctttaaattctatgattcccacttgaaagtcagatgcatttgccatgtatttgcatc

SEQ ID NO: 217740 - DNA, 120 bp, Artificial Sequence
  ENSG00000116679_42 (sequence is synthesized)
tgtctcaatggagatgactctacagcttgcttgaatttttgcatttgttttttctttgtttttcttgacattgcttacaggaaggaaatatgtttatgcaaaccagaccacttatctgca

SEQ ID NO: 217741 - DNA, 120 bp, Artificial Sequence
  ENSG00000116679_43 (sequence is synthesized)
tgcaaaggtgtaaactatattcagtattttattgtaaatatgtatattctttaagagtatatattgtactagtgctttttttcttactgttatatgatagaagctatgaaaaaaatgaag

SEQ ID NO: 217742 - DNA, 120 bp, Artificial Sequence
  ENSG00000116679_44 (sequence is synthesized)
ctttcaagccaatcaagccaacgactcttcagccagtattggaagattttgtatttgattttggttttttgtttttgttttttaatttttaccaccatgacatgtatttttctttacctc

SEQ ID NO: 217743 - DNA, 120 bp, Artificial Sequence
  ENSG00000116679_45 (sequence is synthesized)
cggatcctgccagagtaatatgtcaagaagctcaagaagcacactggaggttaccttgaggcgtttgtgtaatctgcatactagtggagtagccatggtgaccgtagccacatgggtgtt

SEQ ID NO: 217744 - DNA, 120 bp, Artificial Sequence
  ENSG00000116679_46 (sequence is synthesized)
atgcaaactttcaaagagagggtttaatatgccatctttcacggcaatccaataagatagggaaataacaatactattgaatatggctaaccttcagttcaatgtctgtatctaattttt

SEQ ID NO: 217745 - DNA, 120 bp, Artificial Sequence
  ENSG00000116679_47 (sequence is synthesized)
aaaaaaattatgtcatggctaaatttttctaatattcaagccaagactaagcagtttatttgtactgataatgcgatttttcagctattacaagcacttagttaaaagatcaactaaggc

SEQ ID NO: 217746 - DNA, 120 bp, Artificial Sequence
  ENSG00000116679_48 (sequence is synthesized)
caaccatttttaaaaattattttgctataacatgaaggattccctttcacttttattttataaccatgaccctaaagaatttaaattttgctataggtacccctaagctgagaaacaggg

SEQ ID NO: 217747 - DNA, 120 bp, Artificial Sequence
  ENSG00000116679_49 (sequence is synthesized)
ggggtgtccaggtgagctgaatgaactgttcagtttggtcttctgcttttctttttttatttctttgcttattatgtgctgttaactttctttaaagtagcatgtaatttgctttagaaa

SEQ ID NO: 217748 - DNA, 120 bp, Artificial Sequence
  ENSG00000116679_50 (sequence is synthesized)
tcatctctcacttttggcatagggccagctctatgtggtaggtggatcaaatggccactcagatgacctgagttgtggagagatgtatgattcaaacatagatgactggattcctgttcc

SEQ ID NO: 217749 - DNA, 120 bp, Artificial Sequence
  ENSG00000116679_51 (sequence is synthesized)
tggctgttcttaatggtgagtgttgggatttggagaggtgaagagtagatagtggcaagactttgttctaaaactctgagagaaaaggccaatgactatagttgtacagttaagaattca

SEQ ID NO: 217750 - DNA, 120 bp, Artificial Sequence
  ENSG00000116679_52 (sequence is synthesized)
gaagcagtcatctcttttgatgcaatggagattagggtgatttgtcctttagaaatatattttctaatcaaagacttataatacttgatatataacttaattcaccagtcttttgatggg

SEQ ID NO: 217751 - DNA, 120 bp, Artificial Sequence
  ENSG00000116679_53 (sequence is synthesized)
tgcactgagtgaatttccaagtcattttcttctataaaacatatccttaatgcatcatcttgaattttgagtttccccttctttacagccagaatttaaagaatctgatctgcaaaacaa

SEQ ID NO: 217752 - DNA, 120 bp, Artificial Sequence
  ENSG00000116679_54 (sequence is synthesized)
aggcaaatccctagtcttttccaactgtctactccatacctaattggaaatacaacctttagactattttaacaagtttccaaagtattaaactttttaaatgtagacatagctttcttt

SEQ ID NO: 217753 - DNA, 120 bp, Artificial Sequence
  ENSG00000116679_55 (sequence is synthesized)
ccacctccattttattgacttttaatgtctaattatataatcataatttaaaagttagcattgtttttggtaccaggctgaaccttagcaggcttatggctcaactggtgaaggcttaag

SEQ ID NO: 217754 - DNA, 120 bp, Artificial Sequence
  ENSG00000116679_56 (sequence is synthesized)
tgtagacacagcctgttggcctagagcattgtcagcgtgctttacagatacatagaatgcaagctggttaagtgatggtcaaatgaaaaaataatgaatttgagaatcagtaataaaatt

SEQ ID NO: 217755 - DNA, 120 bp, Artificial Sequence
  ENSG00000116679_57 (sequence is synthesized)
ttttctaagctacggagtatttattgctaacattttatctatttgaaaataatcataactctgtttccagaagaaatttctgtaccacaatcattttatttttttaattgagacatggtc

SEQ ID NO: 217756 - DNA, 120 bp, Artificial Sequence
  ENSG00000116679_58 (sequence is synthesized)
tcactgtgttgcccaggctggtctcgaacccctgggctcatgcagtcctcccacctcaggctcccatagtattgggattataggcatgagccaccgcatctggccccaaaatcattttat

SEQ ID NO: 217757 - DNA, 120 bp, Artificial Sequence
  ENSG00000116679_59 (sequence is synthesized)
acagttggaaagccctaagatatttttctgctttcctataatctcttctgagtcttaattctgtacattgggctgatataaagtccagtgcacagaactattctggtttgctacttagta

SEQ ID NO: 217758 - DNA, 120 bp, Artificial Sequence
  ENSG00000116679_60 (sequence is synthesized)
gctgcatctgtaggataattgtccagcttcttcctgcttttcttcttctctgaaataataatagtaactaccacagagttggtgaaaattgtacttatttagatgctgctactgcttcct

SEQ ID NO: 217759 - DNA, 120 bp, Artificial Sequence
  ENSG00000116679_61 (sequence is synthesized)
ctccctcccccttttaagttgcctaagttccacgtgggaatggtttttttattgatttgattcccagctcttagagagtatttgtcatattaggcatttaataaattctttttgacaaaa

SEQ ID NO: 217760 - DNA, 120 bp, Artificial Sequence
  ENSG00000116685_0 (sequence is synthesized)
gtcgtttgacggctggaggccaccgagaagaaggaggaagcaggggtggcggctgctgcggcggttgcggcgggggccggggtgggcgccgcggtccgggccgggcagtgaggcgcgggc

SEQ ID NO: 217761 - DNA, 120 bp, Artificial Sequence
  ENSG00000116685_1 (sequence is synthesized)
cggccgccctcgcacccttgcccgcgcctggcggcccgatgtggctgcagcagcggctcaaggggctgccgggactgctgtcgagcagctgggcccgccgcctcctctgcctgcttggcc

SEQ ID NO: 217762 - DNA, 120 bp, Artificial Sequence
  ENSG00000116685_2 (sequence is synthesized)
gctgtcgagcagctgggcccgccgcctcctctgcctgcttggcctcctgctgctgcttctgtggtttggggggtccggcgcgcggcgggcggcgggcggcctgcacctgctgccctggtc

SEQ ID NO: 217763 - DNA, 120 bp, Artificial Sequence
  ENSG00000116685_3 (sequence is synthesized)
gccgccgagccgtctgcctgcctggaggcggccacccgcgcctggcgcggcctgcgggagcgcggtgaggtggtaccgctgggtcctggagtgccggccctggtggccaacggcttcctg

SEQ ID NO: 217764 - DNA, 120 bp, Artificial Sequence
  ENSG00000116685_4 (sequence is synthesized)
cctggccctggacgtggctgccaatcggctgtgggtgactcccggggagcgggagcccgccgtggcgccggactttgtgcccttcgtgcagctgcgcccgctgagcgcgctggctgaagc

SEQ ID NO: 217765 - DNA, 120 bp, Artificial Sequence
  ENSG00000116685_5 (sequence is synthesized)
ctgagcgcgctggctgaagctggagaggcggtgctgctgctgcgggaggggcttctgcgccgcgtgcgttgcctgcagctggggtccccaggtcctggccccgtggccgccggccccggg

SEQ ID NO: 217766 - DNA, 120 bp, Artificial Sequence
  ENSG00000116685_6 (sequence is synthesized)
tgccgcggggtccggccgcgactgcgtgctgctgcaagaggactttctggcgcacaggggccgaccccacgtctacctgcagcgcatccagctcaacaaccccacggagcgcgtggccgc

SEQ ID NO: 217767 - DNA, 120 bp, Artificial Sequence
  ENSG00000116685_7 (sequence is synthesized)
gctgcagactgtggggcccactgccggcccagcccccaaggccttcaccagtaccctggagaaggtcggagaccatcagttcctcctctactcaggccggtccccgcctacgcccactgg

SEQ ID NO: 217768 - DNA, 120 bp, Artificial Sequence
  ENSG00000116685_8 (sequence is synthesized)
gttggtgcacctggtggtggtggccgccaagaagctggtgaaccgcctccaagtggctcccaagacgcagctggatgagacggtgctgtgggtggtgcacgtctctggccccattaaccc

SEQ ID NO: 217769 - DNA, 120 bp, Artificial Sequence
  ENSG00000116685_9 (sequence is synthesized)
ccaggtgctcaaaagcaaagcagccaaggagctcaaggcgctgcaggacttggcacggaaggaaatgctggagctcttggacatgccagcggcggagctgcttcaagaccaccagctcct

SEQ ID NO: 217770 - DNA, 120 bp, Artificial Sequence
  ENSG00000116685_10 (sequence is synthesized)
ctgggctcagctcttcagcccaggagtggaaatgaagaagatcactgacacccacacgccgtctggcctcaccgtgaacctgacgctctattacatgctctcctgctcgccagccccact

SEQ ID NO: 217771 - DNA, 120 bp, Artificial Sequence
  ENSG00000116685_11 (sequence is synthesized)
aagatcactgcttcagcgggcacgccaccatgcacgccgagaacctgtggccggggcggctgtcctccgtccagcagatcctgcagctctctgacctgtggaggctgaccctccagaagc

SEQ ID NO: 217772 - DNA, 120 bp, Artificial Sequence
  ENSG00000116685_12 (sequence is synthesized)
gtggctgcaaggggctggtgaaggtgggtgccccaggcatcctgcaggggatggtgctcagctttggggggctgcagttcacagagaaccacctccagttccaggccgaccccgacgtgc

SEQ ID NO: 217773 - DNA, 120 bp, Artificial Sequence
  ENSG00000116685_13 (sequence is synthesized)
tgcacaacagctatgcattgcatggcatccgctacaagaacgaccatatcaacctggccgtgctggcggatgccgagggcaagccctacctacacgtgtccgtggagtcccgtggccagc

SEQ ID NO: 217774 - DNA, 120 bp, Artificial Sequence
  ENSG00000116685_14 (sequence is synthesized)
ctgtcaagatctatgcctgcaaggcaggctgcctggacgagccagtggagctgacctcggcgcccacgggccacaccttctcggtcatggtgacacagcccatcacgccactgctctaca

SEQ ID NO: 217775 - DNA, 120 bp, Artificial Sequence
  ENSG00000116685_15 (sequence is synthesized)
tctccaccgacctcacacacctgcaggacctgcggcacacgctgcacctcaaggccatcctggcccatgatgagcacatggcccagcaggaccccgggctgcccttcctcttctggttca

SEQ ID NO: 217776 - DNA, 120 bp, Artificial Sequence
  ENSG00000116685_16 (sequence is synthesized)
gcgtggcctccctaatcaccctcttccacctcttcctcttcaagctcatctacaacgagtactgtgggcctggagccaagcccctcttcaggagtaaggaagatcccagtgtctgagtga

SEQ ID NO: 217777 - DNA, 120 bp, Artificial Sequence
  ENSG00000116685_17 (sequence is synthesized)
actaacagtcctgctttcagccaccatttgcacaagacacccagcactgaaagtcccgctgccaggagcaagggatcctttggaagcacccgccctttgtgccttgttgggggaaaccgg

SEQ ID NO: 217778 - DNA, 120 bp, Artificial Sequence
  ENSG00000116685_18 (sequence is synthesized)
tgacgcagaagtgagtgtggatacaccagagtttgcattggaaggaatgagtgtcacgtggggagggaaggggccagtggaccttttgtaagctttccactcaataaaatgaacctgtat

SEQ ID NO: 217779 - DNA, 120 bp, Artificial Sequence
  ENSG00000116685_19 (sequence is synthesized)
ggcaaatacttgaaatggaactcactccttccactttccccctttcttctgtcccaggaaatagatcatcttttgaaaagactcttgtctaggaaaagttgtgtccttttcctaatttaa

SEQ ID NO: 217780 - DNA, 120 bp, Artificial Sequence
  ENSG00000116685_20 (sequence is synthesized)
cgtgttctttcttaatgaagttttaatttatttttgttgagattttgctagatggcttttgcatcccctgtagatggtgagtgttggcggtgatgtccatctcggcgttcggaggcccca

SEQ ID NO: 217781 - DNA, 120 bp, Artificial Sequence
  ENSG00000116685_21 (sequence is synthesized)
cggtcccgaggctgggccggggccccccagggtggctgtgctgctgcctgtaggagggtgcgggttgtgctgtcatcctcgggtttgcacgcccttttttaggagcctgtggacatctgt

SEQ ID NO: 217782 - DNA, 120 bp, Artificial Sequence
  ENSG00000116685_22 (sequence is synthesized)
ggttttgtactttggggcttcaggggaggtgtttaactttctagtgattgatgattgtcaggttttgaaataccaaagcttttttgttctgtttttaaataaatatctttcaaactttca

SEQ ID NO: 217783 - DNA, 80 bp, Artificial Sequence
  ENSG00000116685_23 (sequence is synthesized)
gagaagaaggaggaagcaggggtggcggctgctgcggcggttgcggcgggggccggggtgggcgccgcggtccgggccgg

SEQ ID NO: 217784 - DNA, 120 bp, Artificial Sequence
  ENSG00000116685_24 (sequence is synthesized)
gcccctcttcaggagtaaggtaggaagccgccatctggtcgaaacccgaggccttggccttgctctcagccctgtgtctcggaaggggctagcctggcgagggggggtgaggcctgggca

SEQ ID NO: 217785 - DNA, 120 bp, Artificial Sequence
  ENSG00000116685_25 (sequence is synthesized)
ggaatgggtgtcctgatgccctcagcccttgacaccagagagcgcgcacaagtgttttgagaggagacgacgaggaagggaaagctggaaatccaggtgtgaattgatggtcttctggct

SEQ ID NO: 217786 - DNA, 120 bp, Artificial Sequence
  ENSG00000116685_26 (sequence is synthesized)
ccaggtgtgaattgatggtcttctggctttccagggcagccctcccctcctcccgcatcataaatctcagcatttaaaaataactgcaagctgggtgtggtggcttgtgcctgtagtccc

SEQ ID NO: 217787 - DNA, 120 bp, Artificial Sequence
  ENSG00000116688_0 (sequence is synthesized)
gtaggcggggcgagccggctgggctcagggtccaccagctcacccgggtcgaggggcaatctgaggcgactggtgacgcgcttatccacttccctcctcccgcctccccctggggtggcg

SEQ ID NO: 217788 - DNA, 120 bp, Artificial Sequence
  ENSG00000116688_1 (sequence is synthesized)
ctcgctggtgacgtagtgagtgtgatggccgccgcgaggccgggaaggtgaagtcaggactggtggagtcaacacagtcaatcaatagccaacctcaacctgagacaggacagaagagaa

SEQ ID NO: 217789 - DNA, 120 bp, Artificial Sequence
  ENSG00000116688_2 (sequence is synthesized)
ctcagaatctttttgtcttttggacttcagccatgtccatgatgcctaccctgtgaagatctctcaccatccaaaaaacgcaatgtccctgctcttctctcgatgcaactctatcgtcac

SEQ ID NO: 217790 - DNA, 120 bp, Artificial Sequence
  ENSG00000116688_3 (sequence is synthesized)
agtcaagaaaaataagagacacatggctgaggtgaatgcatccccacttaagcactttgtcactgccaagaagaagatcaatggcatttttgagcagctgggggcctacatccaggagag

SEQ ID NO: 217791 - DNA, 120 bp, Artificial Sequence
  ENSG00000116688_4 (sequence is synthesized)
cgccaccttccttgaagacacgtacaggaatgcagaactggaccccgttaccacagaagaacaggttctggacgtcaaaggttacctatccaaagtgagaggcatcagtgaggtgctggc

SEQ ID NO: 217792 - DNA, 120 bp, Artificial Sequence
  ENSG00000116688_5 (sequence is synthesized)
tcggaggcacatgaaagtggctttttttggccggacgagcaatgggaagagcaccgtgatcaatgccatgctctgggacaaagttctgccctctgggattggccacaccaccaattgctt

SEQ ID NO: 217793 - DNA, 120 bp, Artificial Sequence
  ENSG00000116688_6 (sequence is synthesized)
cctgcgggtagagggcacagatggccatgaggcctttctccttaccgagggctcagaggaaaagaggagtgccaagactgtgaaccagctggcccatgccctccaccaggacaagcagct

SEQ ID NO: 217794 - DNA, 120 bp, Artificial Sequence
  ENSG00000116688_7 (sequence is synthesized)
ccatgccggcagcctagtgagtgtgatgtggcccaactctaagtgcccacttctgaaggatgacctcgttttgatggacagccctggtattgatgtcaccacagagctggacagctggat

SEQ ID NO: 217795 - DNA, 120 bp, Artificial Sequence
  ENSG00000116688_8 (sequence is synthesized)
tgacaagttttgtctggatgctgatgtgtttgtgctggtggccaactcagagtccaccctgatgcagacggaaaagcacttcttccacaaggtgagtgagcgtctctcccggccaaacat

SEQ ID NO: 217796 - DNA, 120 bp, Artificial Sequence
  ENSG00000116688_9 (sequence is synthesized)
cttcatcctgaacaaccgctgggatgcatctgcctcagagcccgagtacatggaggaggtgcggcggcagcacatggagcgttgtaccagcttcctggtggatgagctgggcgtggtgga

SEQ ID NO: 217797 - DNA, 120 bp, Artificial Sequence
  ENSG00000116688_10 (sequence is synthesized)
tcgatcccaggccggggaccgcatcttctttgtgtctgctaaggaggtgctcaacgccaggattcagaaagcccagggcatgcctgaaggagggggcgctctcgcagaaggctttcaagt

SEQ ID NO: 217798 - DNA, 120 bp, Artificial Sequence
  ENSG00000116688_11 (sequence is synthesized)
gaggatgtttgagtttcagaattttgagaggagatttgaggagtgcatctcccagtctgcagtgaagaccaagtttgagcagcacacggtccgggccaagcagattgcagaggcggttcg

SEQ ID NO: 217799 - DNA, 120 bp, Artificial Sequence
  ENSG00000116688_12 (sequence is synthesized)
actcatcatggactccctgcacatggcggctcgggagcagcaggtttactgcgaggaaatgcgtgaagagcggcaagaccgactgaaatttattgacaaacagctggagctcttggctca

SEQ ID NO: 217800 - DNA, 120 bp, Artificial Sequence
  ENSG00000116688_13 (sequence is synthesized)
agactataagctgcgaattaagcagattacggaggaagtggagaggcaggtgtcgactgcaatggccgaggagatcaggcgcctctctgtactggtggacgattaccagatggacttcca

SEQ ID NO: 217801 - DNA, 120 bp, Artificial Sequence
  ENSG00000116688_14 (sequence is synthesized)
cccttctccagtagtcctcaaggtttataagaatgagctgcaccgccacatagaggaaggactgggtcgaaacatgtctgaccgctgctccacggccatcaccaactccctgcagaccat

SEQ ID NO: 217802 - DNA, 120 bp, Artificial Sequence
  ENSG00000116688_15 (sequence is synthesized)
gcagcaggacatgatagatggcttgaaacccctccttcctgtgtctgtgcggagtcagatagacatgctggtcccacgccagtgcttctccctcaactatgacctaaactgtgacaagct

SEQ ID NO: 217803 - DNA, 120 bp, Artificial Sequence
  ENSG00000116688_16 (sequence is synthesized)
gtgtgctgacttccaggaagacattgagttccatttctctctcggatggaccatgctggtgaataggttcctgggccccaagaacagccgtcgggccttgatgggctacaatgaccaggt

SEQ ID NO: 217804 - DNA, 120 bp, Artificial Sequence
  ENSG00000116688_17 (sequence is synthesized)
ccagcgtcccatccctctgacgccagccaaccccagcatgcccccactgccacagggctcgctcacccaggaggagttcatggtttccatggttaccggcctggcctccttgacatccag

SEQ ID NO: 217805 - DNA, 120 bp, Artificial Sequence
  ENSG00000116688_18 (sequence is synthesized)
ctatgagcgtctgacctggaccaccaaggccaaggagagggccttcaagcgccagtttgtggagcatgccagcgagaagctgcagcttgtcatcagctacactggctccaactgcagcca

SEQ ID NO: 217806 - DNA, 120 bp, Artificial Sequence
  ENSG00000116688_19 (sequence is synthesized)
ccaagtccagcaggaactgtctgggacctttgctcatctgtgtcagcaagttgacgtcacccgggagaacctggagcaggaaattgccgccatgaacaagaaaattgaggttcttgactc

SEQ ID NO: 217807 - DNA, 120 bp, Artificial Sequence
  ENSG00000116688_20 (sequence is synthesized)
acttcagagcaaagcaaagctgctcaggaataaagccggttggttggacagtgagctcaacatgttcacacaccagtacctgcagcccagcagatagtgggcacctgaggcggagtctgc

SEQ ID NO: 217808 - DNA, 120 bp, Artificial Sequence
  ENSG00000116688_21 (sequence is synthesized)
gtggagaggggcggtgctgccagccctaagtgccatgtgggctcccccaggggcacgtgtggctcctgccccctggccactgccaagagaatgaagcacccagtctcgtaccattttgag

SEQ ID NO: 217809 - DNA, 120 bp, Artificial Sequence
  ENSG00000116688_22 (sequence is synthesized)
ccctccagcactacttattttcccccacctttgcctgctgttgctggaagagctggctcatacccccaaaggacactttcagcgacagctatggacagcatggtaccaaggagttaagtt

SEQ ID NO: 217810 - DNA, 120 bp, Artificial Sequence
  ENSG00000116688_23 (sequence is synthesized)
gaggctttttccagctttctctggttcatttgattgcttgataaggcctcaggatctcagcattgcacaatgcctcatggaagcctttgagggtatcacacagacacccccaccttcctc

SEQ ID NO: 217811 - DNA, 120 bp, Artificial Sequence
  ENSG00000116688_24 (sequence is synthesized)
cagcctgtgcgcacctgccctccttgcagcccagcacacctgcaggtgtaagggacgattggagtttcttcccagagagtctgtcccagaaggactgtggcttgtgtgtgtccatctcgc

SEQ ID NO: 217812 - DNA, 120 bp, Artificial Sequence
  ENSG00000116688_25 (sequence is synthesized)
ctgttggctcagtgcttcatcccatttgcagagcctcagacacgtcttggtggtgaggctcagttacccctgggcttaggctgaggcgggccctgtgctgggggtggtagaaaggatgct

SEQ ID NO: 217813 - DNA, 120 bp, Artificial Sequence
  ENSG00000116688_26 (sequence is synthesized)
gctgaggcagctggaggagtgggagtagctcagaggggagggctgttggatgtatggggagctggcagagcaggtggcagtcactgggacaaggagggacttgcctctcttctcattatt

SEQ ID NO: 217814 - DNA, 120 bp, Artificial Sequence
  ENSG00000116688_27 (sequence is synthesized)
gtgtcctttgctttagtgtcagtcctggacttgtgcaggcctgttttgtgtagatctgttttggaagatggcatggtctaggtggttgaaggatgtagtagaaggatggatggtggaagg

SEQ ID NO: 217815 - DNA, 120 bp, Artificial Sequence
  ENSG00000116688_28 (sequence is synthesized)
tggggacgttggtggctggctgaggtgcatgggccccacacaggacagctggagaatgggccgtccacttggcctcgttctgcgaggggctcatgggtctgagagcccccacccactagg

SEQ ID NO: 217816 - DNA, 120 bp, Artificial Sequence
  ENSG00000116688_29 (sequence is synthesized)
cttgattgcatccctgttgtgccctttaagagacatgtttccaccccacccccaaccttgtcccaagtgccctggactaaatttcctgtgccagtgactgcagttggccaagggacaatg

SEQ ID NO: 217817 - DNA, 120 bp, Artificial Sequence
  ENSG00000116688_30 (sequence is synthesized)
tggaaaacccagtgtccatctttccaccctccctgatctccagaaccttcgactgacccccttgtctttatgctgatgttgagttttgggattgttactggttgaagtgggggcagatgc

SEQ ID NO: 217818 - DNA, 120 bp, Artificial Sequence
  ENSG00000116688_31 (sequence is synthesized)
ctgtcaccaaggtgttgactgtgtgagaaaagcagtttgggtgacaaatcctgtgtggcacaagttggatcgcttcctagaaataagcaacacctctcccaaaaagcagcccacaaggca

SEQ ID NO: 217819 - DNA, 120 bp, Artificial Sequence
  ENSG00000116688_32 (sequence is synthesized)
ggggcccagcagcccagccatcactcatctttgaggaaatgagttggtagcctctgtgcactgtttggtggccacatcacaggtgatgtcctgttcacatacctgcttgtatttaaagcc

SEQ ID NO: 217820 - DNA, 120 bp, Artificial Sequence
  ENSG00000116688_33 (sequence is synthesized)
ctcagtctgtcctgttgtgtggggcgaagtgatggactctgccaggtggacatgctgtgggtggatgttcccggcgtgtgccgggcctgaatggacaggggccacttcacagcatgtcag

SEQ ID NO: 217821 - DNA, 120 bp, Artificial Sequence
  ENSG00000116688_34 (sequence is synthesized)
ggaaaatcactgtcacacaattccaatggattttgtgctctttttgaaaaaaaaaaattctttagcgtaaacatgaattttttttcaatgtagcccctggggaatgaatgaaattttgag

SEQ ID NO: 217822 - DNA, 120 bp, Artificial Sequence
  ENSG00000116688_35 (sequence is synthesized)
cttcttcaatacgtaaaattaaatttataccactgagggagagaccctttctgaaagaagtatggccaaaagcactttaatgctgctgacattgttgtttttatgttcatttgctggagc

SEQ ID NO: 217823 - DNA, 120 bp, Artificial Sequence
  ENSG00000116688_36 (sequence is synthesized)
gcaagacgtgctgacacagtgagttttctctgatgtatttaaggtgatgtatttgcttgagttactcctgtatcattgctcataatattggaaactaaaataaaacctagttggaaatcc

SEQ ID NO: 217824 - DNA, 120 bp, Artificial Sequence
  ENSG00000116688_37 (sequence is synthesized)
atgatgcagtgggagtccgagcctctgcgtcgtccgcttgggacgcgccggcggaggagtggcgcgcggaggagtggcgcgctgagacgccgctcgaagcgccgagtcgcggggcagcag

SEQ ID NO: 217825 - DNA, 120 bp, Artificial Sequence
  ENSG00000116688_38 (sequence is synthesized)
gaggccacagagctagaaagtggtaagaaccagcttcagaaccaggcagtgttgctcctgagccatcttcttaaccaccacaccgtggggccaccatagaggatctggagctcagcctgt

SEQ ID NO: 217826 - DNA, 120 bp, Artificial Sequence
  ENSG00000116688_39 (sequence is synthesized)
cggctgcagggtgccagaggtggactcgtttaggacacgtacaggaatgcagaactggaccccgttaccacagaagaacaggttctggacgtcaaaggttacctatccaaagtgagaggc

SEQ ID NO: 217827 - DNA, 120 bp, Artificial Sequence
  ENSG00000116690_0 (sequence is synthesized)
atctatcctttacggcaagggtacctacggtacctgaaaacaacgatggcatggaaaacacttcccatttacctgttgttgctgctgtctgttttcgtgattcagcaagtttcatctcaa

SEQ ID NO: 217828 - DNA, 120 bp, Artificial Sequence
  ENSG00000116690_1 (sequence is synthesized)
gatttatcaagctgtgcagggagatgtggggaagggtattctagagatgccacctgcaactgtgattataactgtcaacactacatggagtgctgccctgatttcaagagagtctgcact

SEQ ID NO: 217829 - DNA, 120 bp, Artificial Sequence
  ENSG00000116690_2 (sequence is synthesized)
gcggagctttcctgtaaaggccgctgctttgagtccttcgagagagggagggagtgtgactgcgacgcccaatgtaagaagtatgacaagtgctgtcccgattatgagagtttctgtgca

SEQ ID NO: 217830 - DNA, 120 bp, Artificial Sequence
  ENSG00000116690_3 (sequence is synthesized)
gaagtaaaagataacaagaagaacagaactaaaaagaaacctacccccaaaccaccagttgtagatgaagctggaagtggattggacaatggtgacttcaaggtcacaactcctgacacg

SEQ ID NO: 217831 - DNA, 120 bp, Artificial Sequence
  ENSG00000116690_4 (sequence is synthesized)
tctaccacccaacacaataaagtcagcacatctcccaagatcacaacagcaaaaccaataaatcccagacccagtcttccacctaattctgatacatctaaagagacgtctttgacagtg

SEQ ID NO: 217832 - DNA, 120 bp, Artificial Sequence
  ENSG00000116690_5 (sequence is synthesized)
aataaagagacaacagttgaaactaaagaaactactacaacaaataaacagacttcaactgatggaaaagagaagactacttccgctaaagagacacaaagtatagagaaaacatctgct

SEQ ID NO: 217833 - DNA, 120 bp, Artificial Sequence
  ENSG00000116690_6 (sequence is synthesized)
aaagatttagcacccacatctaaagtgctggctaaacctacacccaaagctgaaactacaaccaaaggccctgctctcaccactcccaaggagcccacgcccaccactcccaaggagcct

SEQ ID NO: 217834 - DNA, 120 bp, Artificial Sequence
  ENSG00000116690_7 (sequence is synthesized)
gcatctaccacacccaaagagcccacacctaccaccatcaagtctgcacccaccacccccaaggagcctgcacccaccaccaccaagtctgcacccaccactcccaaggagcctgcaccc

SEQ ID NO: 217835 - DNA, 120 bp, Artificial Sequence
  ENSG00000116690_8 (sequence is synthesized)
accaccaccaaggagcctgcacccaccactcccaaggagcctgcacccaccaccaccaaggagcctgcacccaccaccaccaagtctgcacccaccactcccaaggagcctgcacccacc

SEQ ID NO: 217836 - DNA, 120 bp, Artificial Sequence
  ENSG00000116690_9 (sequence is synthesized)
acccccaagaagcctgccccaactacccccaaggagcctgcacccaccactcccaaggagcctacacccaccactcccaaggagcctgcacccaccaccaaggagcctgcacccaccact

SEQ ID NO: 217837 - DNA, 120 bp, Artificial Sequence
  ENSG00000116690_10 (sequence is synthesized)
cccaaagagcctgcacccactgcccccaagaagcctgccccaactacccccaaggagcctgcacccaccactcccaaggagcctgcacccaccaccaccaaggagccttcacccaccact

SEQ ID NO: 217838 - DNA, 120 bp, Artificial Sequence
  ENSG00000116690_11 (sequence is synthesized)
cccaaggagcctgcacccaccaccaccaagtctgcacccaccactaccaaggagcctgcacccaccactaccaagtctgcacccaccactcccaaggagccttcacccaccaccaccaag

SEQ ID NO: 217839 - DNA, 120 bp, Artificial Sequence
  ENSG00000116690_12 (sequence is synthesized)
gagcctgcacccaccactcccaaggagcctgcacccaccacccccaagaagcctgccccaactacccccaaggagcctgcacccaccactcccaaggaacctgcacccaccaccaccaag

SEQ ID NO: 217840 - DNA, 120 bp, Artificial Sequence
  ENSG00000116690_13 (sequence is synthesized)
aagcctgcacccaccactcccaaagagcctgccccaactacccccaaggagactgcacccaccacccccaagaagctcacgcccaccacccccgagaagctcgcacccaccacccctgag

SEQ ID NO: 217841 - DNA, 120 bp, Artificial Sequence
  ENSG00000116690_14 (sequence is synthesized)
aagcccgcacccaccacccctgaggagctcgcacccaccacccctgaggagcccacacccaccacccctgaggagcctgctcccaccactcccaaggcagcggctcccaacacccctaag

SEQ ID NO: 217842 - DNA, 120 bp, Artificial Sequence
  ENSG00000116690_15 (sequence is synthesized)
gagcctgctccaactacccctaaggagcctgctccaactacccctaaggagcctgctccaactacccctaaggagactgctccaactacccctaaagggactgctccaactaccctcaag

SEQ ID NO: 217843 - DNA, 120 bp, Artificial Sequence
  ENSG00000116690_16 (sequence is synthesized)
gaacctgcacccactactcccaagaagcctgcccccaaggagcttgcacccaccaccaccaaggagcccacatccaccacctctgacaagcccgctccaactacccctaaggggactgct

SEQ ID NO: 217844 - DNA, 120 bp, Artificial Sequence
  ENSG00000116690_17 (sequence is synthesized)
ccaactacccctaaggagcctgctccaactacccctaaggagcctgctccaactacccctaaggggactgctccaactaccctcaaggaacctgcacccactactcccaagaagcctgcc

SEQ ID NO: 217845 - DNA, 120 bp, Artificial Sequence
  ENSG00000116690_18 (sequence is synthesized)
cccaaggagcttgcacccaccaccaccaaggggcccacatccaccacctctgacaagcctgctccaactacacctaaggagactgctccaactacccccaaggagcctgcacccactacc

SEQ ID NO: 217846 - DNA, 120 bp, Artificial Sequence
  ENSG00000116690_19 (sequence is synthesized)
ccactatccacaaaagccctgatgaatcaactcctgagctttctgcagaacccacaccaaaagctcttgaaaacagtcccaaggaacctggtgtacctacaactaagactcctgcagcga

SEQ ID NO: 217847 - DNA, 120 bp, Artificial Sequence
  ENSG00000116690_20 (sequence is synthesized)
ctaaacctgaaatgactacaacagctaaagacaagacaacagaaagagacttacgtactacacctgaaactacaactgctgcacctaagatgacaaaagagacagcaactacaacagaaa

SEQ ID NO: 217848 - DNA, 120 bp, Artificial Sequence
  ENSG00000116690_21 (sequence is synthesized)
aaactaccgaatccaaaataacagctacaaccacacaagtaacatctaccacaactcaagataccacaccattcaaaattactactcttaaaacaactactcttgcacccaaagtaacta

SEQ ID NO: 217849 - DNA, 120 bp, Artificial Sequence
  ENSG00000116690_22 (sequence is synthesized)
caacaaaaaagacaattactaccactgagattatgaacaaacctgaagaaacagctaaaccaaaagacagagctactaattctaaagcgacaactcctaaacctcaaaagccaaccaaag

SEQ ID NO: 217850 - DNA, 120 bp, Artificial Sequence
  ENSG00000116690_23 (sequence is synthesized)
cacccaaaaaacccacttctaccaaaaagccaaaaacaatgcctagagtgagaaaaccaaagacgacaccaactccccgcaagatgacatcaacaatgccagaattgaaccctacctcaa

SEQ ID NO: 217851 - DNA, 120 bp, Artificial Sequence
  ENSG00000116690_24 (sequence is synthesized)
gaatagcagaagccatgctccaaaccaccaccagacctaaccaaactccaaactccaaactagttgaagtaaatccaaagagtgaagatgcaggtggtgctgaaggagaaacacctcata

SEQ ID NO: 217852 - DNA, 120 bp, Artificial Sequence
  ENSG00000116690_25 (sequence is synthesized)
tgcttctcaggccccatgtgttcatgcctgaagttactcccgacatggattacttaccgagagtacccaatcaaggcattatcatcaatcccatgctttccgatgagaccaatatatgca

SEQ ID NO: 217853 - DNA, 120 bp, Artificial Sequence
  ENSG00000116690_26 (sequence is synthesized)
atggtaagccagtagatggactgactactttgcgcaatgggacattagttgcattccgaggtcattatttctggatgctaagtccattcagtccaccatctccagctcgcagaattactg

SEQ ID NO: 217854 - DNA, 120 bp, Artificial Sequence
  ENSG00000116690_27 (sequence is synthesized)
aagtttggggtattccttcccccattgatactgtttttactaggtgcaactgtgaaggaaaaactttcttctttaaggattctcagtactggcgttttaccaatgatataaaagatgcag

SEQ ID NO: 217855 - DNA, 120 bp, Artificial Sequence
  ENSG00000116690_28 (sequence is synthesized)
ggtaccccaaaccaattttcaaaggatttggaggactaactggacaaatagtggcagcgctttcaacagctaaatataagaactggcctgaatctgtgtattttttcaagagaggtggca

SEQ ID NO: 217856 - DNA, 120 bp, Artificial Sequence
  ENSG00000116690_29 (sequence is synthesized)
gcattcagcagtatatttataaacaggaacctgtacagaagtgccctggaagaaggcctgctctaaattatccagtgtatggagaaacgacacaggttaggagacgtcgctttgaacgtg

SEQ ID NO: 217857 - DNA, 120 bp, Artificial Sequence
  ENSG00000116690_30 (sequence is synthesized)
ctataggaccttctcaaacacacaccatcagaattcaatattcacctgccagactggcttatcaagacaaaggtgtccttcataatgaagttaaagtgagtatactgtggagaggacttc

SEQ ID NO: 217858 - DNA, 120 bp, Artificial Sequence
  ENSG00000116690_31 (sequence is synthesized)
caaatgtggttacctcagctatatcactgcccaacatcagaaaacctgacggctatgattactatgccttttctaaagatcaatactataacattgatgtgcctagtagaacagcaagag

SEQ ID NO: 217859 - DNA, 120 bp, Artificial Sequence
  ENSG00000116690_32 (sequence is synthesized)
caattactactcgttctgggcagaccttatccaaagtctggtacaactgtccttagactgatgagcaaaggaggagtcaactaatgaagaaatgaataataaattttgacactgaaaaac

SEQ ID NO: 217860 - DNA, 120 bp, Artificial Sequence
  ENSG00000116690_33 (sequence is synthesized)
aataaagaatattgacatgagtataccagtttatatataaaaatgtttttaaacttgacaatcattacactaaaacagatttgataatcttattcacagttgttattgtttacagaccat

SEQ ID NO: 217861 - DNA, 120 bp, Artificial Sequence
  ENSG00000116690_34 (sequence is synthesized)
cagaccatttaattaatatttcctctgtttattcctcctctccctcccattgcatggctcacacctgtaaaagaaaaaagaatcaaattgaatatatcttttaagaattcaaaactagtg

SEQ ID NO: 217862 - DNA, 120 bp, Artificial Sequence
  ENSG00000116690_35 (sequence is synthesized)
tattcacttaccctagttcattataaaaaatatctaggcattgtggatataaaactgttgggtattctacaacttcaatggaaattattacaagcagattaatccctctttttgtgacac

SEQ ID NO: 217863 - DNA, 120 bp, Artificial Sequence
  ENSG00000116690_36 (sequence is synthesized)
aagtacaatctaaaagttatattggaaaacatggaaatattaaaattttacacttttactagctaaaacataatcacaaagctttatcgtgttgtataaaaaaattaacaatataatggc

SEQ ID NO: 217864 - DNA, 120 bp, Artificial Sequence
  ENSG00000116690_37 (sequence is synthesized)
tggcaataggtagagatacaacaaatgaatataacactataacacttcatattttccaaatcttaatttggatttaaggaagaaatcaataaatataaaatataagcacatatttattat

SEQ ID NO: 217865 - DNA, 120 bp, Artificial Sequence
  ENSG00000116690_38 (sequence is synthesized)
ctaaggtatacaaatctgtctacatgaagtttacagattggtaaatatcacctgctcaacatgtaattatttaataaaactttggaacattaaaaaaataaattggaggcttaaggatta

SEQ ID NO: 217866 - DNA, 120 bp, Artificial Sequence
  ENSG00000116690_39 (sequence is synthesized)
gaagtgcataatcccacatcaccaccatcttcaaagaaagcacctccaccttcaggagcatctcaaaccatcaaatcaacaaccaaacgttcacccaaaccaccaaacaagaagaagact

SEQ ID NO: 217867 - DNA, 120 bp, Artificial Sequence
  ENSG00000116690_40 (sequence is synthesized)
aagaaagttatagaatcagaggaaataacagaagaacattctgtttctgaaaatcaagagtcctcctcctcctcctcctcttcctcttcttcttcaacaattcggaaaatcaagtcttcc

SEQ ID NO: 217868 - DNA, 120 bp, Artificial Sequence
  ENSG00000116691_0 (sequence is synthesized)
aacggctcaggcggctgcggctgctacggcggcgcatgctaggggattctgccgggtagaagagctgggcctggaacccagccctgaggacatcctgcggcccaggggcaagtgacacct

SEQ ID NO: 217869 - DNA, 120 bp, Artificial Sequence
  ENSG00000116691_1 (sequence is synthesized)
gctgagagaggcccaggatggtggaggctgaggaactggcacagctgcggctgctcaatctggagctcctgaggcagctgtgggtggggcaggatgctgtgcggcggtcagtggccaggg

SEQ ID NO: 217870 - DNA, 120 bp, Artificial Sequence
  ENSG00000116691_2 (sequence is synthesized)
cagcctcggagtcaagcctggaatccagcagcagctacaactcagagactccatcgaccccagagacgtcctcaacttccttgagcacctcctgcccacggggccggtcctccgtgtggg

SEQ ID NO: 217871 - DNA, 120 bp, Artificial Sequence
  ENSG00000116691_3 (sequence is synthesized)
gcccaccagatgcctgtcgaggggacctccgtgatgtggccagatcgggggtggcctctctcccacctgccaaatgccagcaccaggagtccctgggccgaccgagaccccactcagcac

SEQ ID NO: 217872 - DNA, 120 bp, Artificial Sequence
  ENSG00000116691_4 (sequence is synthesized)
cctcgctgggcacctcaagcctgagggacccagagccctcagggaggctgggtgatccaggaccccaggaggcacagaccccgaggtccatcctggctcaacagagcaagctgtccaagc

SEQ ID NO: 217873 - DNA, 120 bp, Artificial Sequence
  ENSG00000116691_5 (sequence is synthesized)
ccagggtgaccttctctgaggagtctgcagttcctaagaggagctggcgcctcaggccatacctgggctatgactggattgcagggtctctggacaccagctcttccatcaccagccagc

SEQ ID NO: 217874 - DNA, 120 bp, Artificial Sequence
  ENSG00000116691_6 (sequence is synthesized)
agtggcagcggcgtggaggaagaccatgaatgcgtgtactgttaccgtgtcaaccggcgcctgttcccggtgcctgtggatcccggtaccccctgccgcctgtgcaggacaccgcgagac

SEQ ID NO: 217875 - DNA, 120 bp, Artificial Sequence
  ENSG00000116691_7 (sequence is synthesized)
cagcagggccctgggaccctggcgcagccagcgcacgtcagggtgagcatcccgctgtcgatcctggagcccccgcaccggtaccacatccaccggcgaaagagctttgacgcctctgac

SEQ ID NO: 217876 - DNA, 120 bp, Artificial Sequence
  ENSG00000116691_8 (sequence is synthesized)
acactggccctgccccggcactgcctgctgggctgggacatttttcctccgaagtctgagaaaagctcagcccccaggaacctggacctctggtcctctgtctccgctgaggcccagcac

SEQ ID NO: 217877 - DNA, 120 bp, Artificial Sequence
  ENSG00000116691_9 (sequence is synthesized)
cagaagctgtccggcaccagcagcccttttcacccggcctcaccaatgcagatgctgcccccgaccccgacctggtcagtgccccaggtccctcggccccacgtcccacggcagaagccc

SEQ ID NO: 217878 - DNA, 120 bp, Artificial Sequence
  ENSG00000116691_10 (sequence is synthesized)
tgaggactgactcctgggggagaacagcattcccgccgcctccagcctctcccctctggcaggcgcacccaggagatggaatcccctgcccgcccagctcaggcccagctgtcctaggtt

SEQ ID NO: 217879 - DNA, 120 bp, Artificial Sequence
  ENSG00000116691_11 (sequence is synthesized)
gggcaggtgggtggacccaagcttgtctgctgcctgagttccagagagggaggaccctggggtggagggtgagggattctgtggaagtttgtaaataaagctcagtgctctgcagctcaa

SEQ ID NO: 217880 - DNA, 120 bp, Artificial Sequence
  ENSG00000116691_12 (sequence is synthesized)
gtaagcctcattaaggccaggggctttgtctgtctagttcctggcacatgaaacagcatctagccctgtcataagggctctgtcgatattttttccatggatggttggctatgcatcagg

SEQ ID NO: 217881 - DNA, 120 bp, Artificial Sequence
  ENSG00000116691_13 (sequence is synthesized)
gtagacagacactgaaaccaaccaacagtcccagtgactggaggggccctcctggcctgtttgaggcacagtagggatgaagcaggtggcctggggtgccagggctgatcgtctctccaa

SEQ ID NO: 217882 - DNA, 120 bp, Artificial Sequence
  ENSG00000116691_14 (sequence is synthesized)
gccttggccggtggccacacagcagcccccagcccctctcccgtcagctgcctggtgctttgcccacaccagggtctctggacaccagctcttccatcaccagccagcctgaggccttct

SEQ ID NO: 217883 - DNA, 120 bp, Artificial Sequence
  ENSG00000116691_15 (sequence is synthesized)
agcagtggcagcggcgtggaggaagaccatgaatgtgagtgcgggccctcggctaggccgctgagtagtccagcctcgcgctgccctggcctcccctgccccagagcagtcccatttgag

SEQ ID NO: 217884 - DNA, 120 bp, Artificial Sequence
  ENSG00000116691_16 (sequence is synthesized)
gtttggggcctggggaggcccctgagatgttgagactcatggagggaggcctgcagtctggacagggtggccaagccctggtaggggtggagtgagctaaggcctggccaccgaattagg

SEQ ID NO: 217885 - DNA, 120 bp, Artificial Sequence
  ENSG00000116691_17 (sequence is synthesized)
ggctgccctgtgtggcaccatcccaccctccccagcagtgcccctgtgctggtgggactccatcccagctcctgagggccccaggaggatgtccctccccaccccttagggcgtgggccc

SEQ ID NO: 217886 - DNA, 120 bp, Artificial Sequence
  ENSG00000116691_18 (sequence is synthesized)
caccttgggggacagagcctgaaccactggttttaagaaaagatgggcctgggcgtgggcccccaaccgctgggaggctcctcaggggtcccccactgcccccctgcgcagggtgagcat

SEQ ID NO: 217887 - DNA, 120 bp, Artificial Sequence
  ENSG00000116691_19 (sequence is synthesized)
tcttgtgggtagacacaggccctgccttggtgggggcctccttcctaatggggggcacagttcctccctgatgggggtgtgcccagtcagcggggagcttgtcccaggtcaggcactttt

SEQ ID NO: 217888 - DNA, 120 bp, Artificial Sequence
  ENSG00000116691_20 (sequence is synthesized)
agccctccagccctgaccctagccatccctcggaactcctctgctccctgccgcctgccctgctccacccaggaaggccaccctgactgcaagatccaggagggaatgtggctggaactg

SEQ ID NO: 217889 - DNA, 120 bp, Artificial Sequence
  ENSG00000116698_0 (sequence is synthesized)
gagccggaggagaggaagatggcggcggccgccagcacccgcggtgccgcggggccgctccgaggagcctgagagacccacggaggcttcgcgggaagacgcggcggcggcggcggagga

SEQ ID NO: 217890 - DNA, 120 bp, Artificial Sequence
  ENSG00000116698_1 (sequence is synthesized)
tgagcctgcagagcgcgcagtacctccggcaggcagaagtcctgaaggctgacatgacagattctaagctgggtccagctgaagtctggacatccaggcaggctctgcaggacctgtacc

SEQ ID NO: 217891 - DNA, 120 bp, Artificial Sequence
  ENSG00000116698_2 (sequence is synthesized)
agaaaatgctagttaccgatttggaatacgctttagacaagaaagtagaacaggatctctggaatcacgcctttaagaatcagatcacaacactgcaaggccaggcaaagaatcgagcaa

SEQ ID NO: 217892 - DNA, 120 bp, Artificial Sequence
  ENSG00000116698_3 (sequence is synthesized)
atccgaatcggagtgaagttcaggcaaacctttctctgttcctagaggcagctagtggcttctatactcagttattacaagaactgtgtacagtatttaatgtagatttaccatgccgtg

SEQ ID NO: 217893 - DNA, 120 bp, Artificial Sequence
  ENSG00000116698_4 (sequence is synthesized)
tgaagtcttcccaattgggaattatcagcaataaacagacgcataccagcgccatagtgaagccacagtctagctcctgttcctatatctgccagcactgcctcgtccaccttggagaca

SEQ ID NO: 217894 - DNA, 120 bp, Artificial Sequence
  ENSG00000116698_5 (sequence is synthesized)
ttgctcgatacagaaaccagaccagccaggcagagtcctactataggcatgcagctcagcttgtcccctccaatggtcagccttataatcagttggctatcttagcttcttccaaaggag

SEQ ID NO: 217895 - DNA, 120 bp, Artificial Sequence
  ENSG00000116698_6 (sequence is synthesized)
accatctgaccacaattttctactactgcagaagcattgctgtgaagttccctttcccagctgcctccactaatctgcaaaaagcactttctaaagcactggaaagccgagatgaggtga

SEQ ID NO: 217896 - DNA, 120 bp, Artificial Sequence
  ENSG00000116698_7 (sequence is synthesized)
aaaccaagtggggtgtttctgacttcatcaaggcctttattaaattccacggtcatgtgtacctgagtaagagcttggaaaagttgagccctcttcgagagaaattggaagaacagttta

SEQ ID NO: 217897 - DNA, 120 bp, Artificial Sequence
  ENSG00000116698_8 (sequence is synthesized)
agaggctgctattccaaaaagctttcaactctcagcagttagttcatgtcactgtcattaacctgtttcaacttcatcaccttcgtgactttagcaatgaaaccgagcagcacacttata

SEQ ID NO: 217898 - DNA, 120 bp, Artificial Sequence
  ENSG00000116698_9 (sequence is synthesized)
gccaagatgagcagctatgttggacacagttgctggccctctttatgtcttttcttggcatcctgtgcaagtgtcctctacagaatgagtctcaggaggagtcctacaatgcctatcctc

SEQ ID NO: 217899 - DNA, 120 bp, Artificial Sequence
  ENSG00000116698_10 (sequence is synthesized)
ttccagcagtcaaggtctccatggactggctaagactcagacccagggtctttcaggaggcagtggtggatgaaagacagtacatttggccctggttgatttctcttctgaatagtttcc

SEQ ID NO: 217900 - DNA, 120 bp, Artificial Sequence
  ENSG00000116698_11 (sequence is synthesized)
atccccatgaagaggacctctcaagtattagtgcgacaccacttccagaggagtttgaattacaaggatttttggcattgagaccttctttcaggaacttggatttttccaaaggtcacc

SEQ ID NO: 217901 - DNA, 120 bp, Artificial Sequence
  ENSG00000116698_12 (sequence is synthesized)
agggtattacaggggacaaagaaggccagcaacgacgaatacgacagcaacgcttgatctctataggcaaatggattgctgataatcagccaaggctgattcagtgtgaaaatgaggtag

SEQ ID NO: 217902 - DNA, 120 bp, Artificial Sequence
  ENSG00000116698_13 (sequence is synthesized)
ggaaattgttgtttatcacagaaatcccagaattaatactggaagaccccagtgaagccaaagagaacctcattctgcaagaaacatctgtgatagagtcgctggctgcagatgggagcc

SEQ ID NO: 217903 - DNA, 120 bp, Artificial Sequence
  ENSG00000116698_14 (sequence is synthesized)
cagggctaaaatcagtgctatctacaagccgaaatttaagcaacaactgtgacacaggagagaagccagtggttaccttcaaagaaaacattaagacacgagaagtgaacagagaccaag

SEQ ID NO: 217904 - DNA, 120 bp, Artificial Sequence
  ENSG00000116698_15 (sequence is synthesized)
gaagaagttttcctcccaaagaggtgagaagggactatagcaaaggaataactgtaactaagaatgatggaaagaaggacaacaacaagaggaaaactgaaaccaagaaatgcaccttag

SEQ ID NO: 217905 - DNA, 120 bp, Artificial Sequence
  ENSG00000116698_16 (sequence is synthesized)
aaaagttacaggaaacaggaaagcagaatgtggcagtgcaggtaaaatcccagacagaactaagaaagactccagtgtctgaagccagaaaaacacctgtaactcaaaccccaactcaag

SEQ ID NO: 217906 - DNA, 120 bp, Artificial Sequence
  ENSG00000116698_17 (sequence is synthesized)
caagtaactcccagttcatccccattcatcaccctggagccttccctcctcttcccagcaggccagggtttccgcccccaacatatgttatccccccgcctgtggcattttctatgggct

SEQ ID NO: 217907 - DNA, 120 bp, Artificial Sequence
  ENSG00000116698_18 (sequence is synthesized)
caggttacaccttcccagctggtgtttctgtcccaggaacctttcttcagcctacagctcactctccagcaggaaaccaggtgcaagctgggaaacagtcccacattccttacagccagc

SEQ ID NO: 217908 - DNA, 120 bp, Artificial Sequence
  ENSG00000116698_19 (sequence is synthesized)
aacggccctctggaccagggccaatgaaccagggacctcaacaatcacagccaccttcccagcaaccccttacatctttaccagctcagccaacagcacagtctacaagccagctgcagg

SEQ ID NO: 217909 - DNA, 120 bp, Artificial Sequence
  ENSG00000116698_20 (sequence is synthesized)
ttcaagctctaactcagcaacaacaatcccctacaaaagctgtgccggctttggggaaaagcccgcctcaccactctggattccagcagtatcaacaggcagatgcctccaaacagctgt

SEQ ID NO: 217910 - DNA, 120 bp, Artificial Sequence
  ENSG00000116698_21 (sequence is synthesized)
ggaatccccctcaggttcaaggcccattagggaaaattatgcctgtgaaacagccctactaccttcagacccaagaccccataaaactgtttgagccgtcattgcaacctcctgtaatgc

SEQ ID NO: 217911 - DNA, 120 bp, Artificial Sequence
  ENSG00000116698_22 (sequence is synthesized)
agcagcagcctctagaaaaaaaaatgaagccttttcccatggagccatataaccataatccctcagaagtcaaggtcccagaattctactgggattcttcctacagcatggctgataaca

SEQ ID NO: 217912 - DNA, 120 bp, Artificial Sequence
  ENSG00000116698_23 (sequence is synthesized)
gatctgtaatggcacagcaagcaaacatagaccgcaggggcaaacggtcaccaggagtcttccgtccagagcaggatcctgtacccagaatgccgtttgagaaatccttattggagaagc

SEQ ID NO: 217913 - DNA, 120 bp, Artificial Sequence
  ENSG00000116698_24 (sequence is synthesized)
tttcctgtccctcaccggattctctctcaatcaggaaagatacccaaataatagtatgttcaatgaggtatatgggaaaaacctgacatccagctccaaagcagaactcagtccctcaat

SEQ ID NO: 217914 - DNA, 120 bp, Artificial Sequence
  ENSG00000116698_25 (sequence is synthesized)
ggccccccaggaaacatctctgtattccctttttgaagggactccgtggtctccatcacttcctgccagttcagatcattcaacaccagccagccagtctcctcattcctctaacccaag

SEQ ID NO: 217915 - DNA, 120 bp, Artificial Sequence
  ENSG00000116698_26 (sequence is synthesized)
cagcctacccagctctcctccaacacacaaccataattctgttccattctccaattttggacccattgggactccagataacagggatagaaggactgcagatcggtggaaaactgataa

SEQ ID NO: 217916 - DNA, 120 bp, Artificial Sequence
  ENSG00000116698_27 (sequence is synthesized)
gccagccatgggtgggtttggcattgattatctctcagcaacgtcatcctctgagagcagttggcatcaggccagcactccgagtggcacctggacaggccatggcccttccatggagga

SEQ ID NO: 217917 - DNA, 120 bp, Artificial Sequence
  ENSG00000116698_28 (sequence is synthesized)
ttcctctgctgtcctcatggaaagcctaaagtctatctggtccagttccatgatgcatcctggaccttctgctctggagcagctgttaatgcagcagaagcagaaacagcaacggggaca

SEQ ID NO: 217918 - DNA, 120 bp, Artificial Sequence
  ENSG00000116698_29 (sequence is synthesized)
aggcaccatgaaccctccacactgaggccaaagtggcaacctgggaatgaaggctccataaaccatggcatgttgggtttgcaggactggcccacacagtcccctgcaggtggcagccct

SEQ ID NO: 217919 - DNA, 120 bp, Artificial Sequence
  ENSG00000116698_30 (sequence is synthesized)
cttttctgtttctcgctgtcaagagggtgtaagtattccaccagcccgctgagtgtgcacgaaatgttcgcagtgcaacaaaaagaaaaatccatcaggaactctccgtccccccggggc

SEQ ID NO: 217920 - DNA, 120 bp, Artificial Sequence
  ENSG00000116698_31 (sequence is synthesized)
cctccggagggagagagagaggaactgctgtttatctcactcagttacttggtatcaccgcctctcaccttctccatcgtgcatgtccccagccacatgggaagtgaaagctgagaaggg

SEQ ID NO: 217921 - DNA, 120 bp, Artificial Sequence
  ENSG00000116698_32 (sequence is synthesized)
aaggcagatgggagaagccaatgggaacttctcagtccttttttcctctttggggaataaaataggaatccattaatgattgctttgctgactgagaatgtagttgaaattattcttaaa

SEQ ID NO: 217922 - DNA, 120 bp, Artificial Sequence
  ENSG00000116698_33 (sequence is synthesized)
catcttttattattattactctcagtagtaaaatatcacactgaattcttccatacacaggtgtgcttctagtcagtgtgtagcaaggaaagccccgttcactgctcctgtgagaggttg

SEQ ID NO: 217923 - DNA, 120 bp, Artificial Sequence
  ENSG00000116698_34 (sequence is synthesized)
gtggtgacaggatggggaaccgacctcttcagccagtggaaatgttccataagggagagttcaaggcctgtcagaaggctctggtaggccttcctctggccaggagactccagcagggaa

SEQ ID NO: 217924 - DNA, 120 bp, Artificial Sequence
  ENSG00000116698_35 (sequence is synthesized)
tgcccttcactctgtaggtgctcgagccccaatcgaggatacagtgtgggtggtggtgctgggctggactagcaggtagactgctgtaggatttcaaattacgtttttgattcctgtaca

SEQ ID NO: 217925 - DNA, 120 bp, Artificial Sequence
  ENSG00000116698_36 (sequence is synthesized)
ttttacagtcgcacagcaagcagtctcacagaaggcaggctagtccattcacagcctgacacgttctaataggtagaagctttcagtgtggttattttttctttggttggtttttgtgcc

SEQ ID NO: 217926 - DNA, 120 bp, Artificial Sequence
  ENSG00000116698_37 (sequence is synthesized)
cccattctacttcccaccctcctgccccatctccatcccttcttttacccaatgctgtatgctagtaattgtttttattcctaatgtgtgcaacatcacatctccccaagaagcaacagc

SEQ ID NO: 217927 - DNA, 120 bp, Artificial Sequence
  ENSG00000116698_38 (sequence is synthesized)
atggggtccagcagttggggcccaaaagacagtctgaagaggaaggaagcagcagtatctgcgtagcccacagagggcccaggcccctgcccagctgcagtctcccagcctccactttca

SEQ ID NO: 217928 - DNA, 120 bp, Artificial Sequence
  ENSG00000116698_39 (sequence is synthesized)
gagtgaaattcaaggcagcacggacatgtgcccatcaggcacagaagaaaacacgacgtcgtccattttggaagagacgaaagaaaggaaaataaactctttgtatgatatttattagga

SEQ ID NO: 217929 - DNA, 120 bp, Artificial Sequence
  ENSG00000116698_40 (sequence is synthesized)
ggaaagaggactgaaaatgttcttgtgtagaaacagaaggacagcatttctgttagtcatttcctggaaaagtaatattttaaggggaaattatggaaacaatctaattgttcaattgct

SEQ ID NO: 217930 - DNA, 120 bp, Artificial Sequence
  ENSG00000116698_41 (sequence is synthesized)
gtgctagtggtagggtttattttctgggaggtctctcctttgtgtgtctgtatgtttgtgtacacacacgtgcccatctgctgtcccagaggggaggggttgtgtgtgcgagtgtatgga

SEQ ID NO: 217931 - DNA, 120 bp, Artificial Sequence
  ENSG00000116698_42 (sequence is synthesized)
gttagtgtggaacttaagagctggaagacagctgtagagcaaagcacatccaggagccccagttgtcactgcagtctgggcaaccccagcaatgaaaaggggtgagataacgctcattgc

SEQ ID NO: 217932 - DNA, 120 bp, Artificial Sequence
  ENSG00000116698_43 (sequence is synthesized)
tcttcagagagagtggttggagccccccccgccccgtatgcttacattattgctcttttagtttgacatggtgtttgggttttgtttttttgaaaggtctgaaaaggtgaagccccctac

SEQ ID NO: 217933 - DNA, 120 bp, Artificial Sequence
  ENSG00000116698_44 (sequence is synthesized)
ccaatggcaatatgaaaccttttgtgcttctcttcagccccttccctgtgtccacctttctctcctcttcccaagcctttttcctactacctttacccagtttgtgtgtttgagctctgc

SEQ ID NO: 217934 - DNA, 120 bp, Artificial Sequence
  ENSG00000116698_45 (sequence is synthesized)
attcaggcagctgcaacattccagtgtttgaactgtcactgattcttgcgccctagacaagctaaccaggtttaccatctcactcccagtaatacccagctcctatctaaagccccattc

SEQ ID NO: 217935 - DNA, 120 bp, Artificial Sequence
  ENSG00000116698_46 (sequence is synthesized)
tgcatgagaatttggtgtttggaatgttttctgactcttggggcgggattcctcgccttatcatcctcactgtggagtaatgagggggaggagaatctttatcagaaactggttttgtgt

SEQ ID NO: 217936 - DNA, 120 bp, Artificial Sequence
  ENSG00000116698_47 (sequence is synthesized)
agtaaactttcttttgtggttttttgttttgttttctgggttttgttttttgtttttgtctgtgcaagacctgcagctgctgaaaatcagctttgcctttaattaaaccatgttctctcc

SEQ ID NO: 217937 - DNA, 120 bp, Artificial Sequence
  ENSG00000116698_48 (sequence is synthesized)
tagggatttaggactgagaggtgtataaacctaggagctgcagttctatcatgctgtgccctgaggccccggaaagcagaggaagccagactactcagagagaatggaacagatgcccag

SEQ ID NO: 217938 - DNA, 120 bp, Artificial Sequence
  ENSG00000116698_49 (sequence is synthesized)
cgaggagcagagacaagagacacagaaacttttcagtctccggttccagcctttcctgagccccatccaaattcctgccccaagcttagacccttgcaataaatttcagtgtttgcttaa

SEQ ID NO: 217939 - DNA, 120 bp, Artificial Sequence
  ENSG00000116698_50 (sequence is synthesized)
gattttttctaaccctcctgatctttacccggctctgctggggcctctcgcctctcttcctggacgaagcctttttaaatccttattggagaagccctcagagctcatgtcacattcatc

SEQ ID NO: 217940 - DNA, 120 bp, Artificial Sequence
  ENSG00000116698_51 (sequence is synthesized)
atgttcttgcagatagtcattgtgggagaaaacgtttcatttaagtcccagatgaggaccgaaaacttgaaatcagaggagcatctgaaatcaagtaatattaggcaggcagaagtcctg

SEQ ID NO: 217941 - DNA, 120 bp, Artificial Sequence
  ENSG00000116698_52 (sequence is synthesized)
aaggctgacatgacaggtattggctggcttatttctttttcacaacatattttatatattaaattaatggaaggatatcctctttcttatattatgcacagcactaaatcccatcttagt

SEQ ID NO: 217942 - DNA, 120 bp, Artificial Sequence
  ENSG00000116698_53 (sequence is synthesized)
atctgctttaaatatttattgtttatgtagtttgaattcttgcttaaataactgttgggaattgcatgtaatactaatatatggtatactgaattgaatgttacctaatttagtttatat

SEQ ID NO: 217943 - DNA, 120 bp, Artificial Sequence
  ENSG00000116698_54 (sequence is synthesized)
aatcacttaatttttatgaaactttttattaatgatttaagacatacagaaaaaataacataccccatataaaccaaaatatcttacagtgttaggctaatatctttctgggaaattttt

SEQ ID NO: 217944 - DNA, 120 bp, Artificial Sequence
  ENSG00000116698_55 (sequence is synthesized)
ttttctattaataattaaccaaactttagtaggtaaaccttcagaaaaaatatttatagaaaaattctattggaagtccttgaaattgagtgagctaccttgctgcctttcttttctccc

SEQ ID NO: 217945 - DNA, 120 bp, Artificial Sequence
  ENSG00000116698_56 (sequence is synthesized)
gaagccgcacaggcgccacacagctcgttgatcccaaaagggagcgctacagagaggcggaaatcactgagggacaggcgctgctgaaatctcgcgagagggaccccctccctcgcccgg

SEQ ID NO: 217946 - DNA, 120 bp, Artificial Sequence
  ENSG00000116698_57 (sequence is synthesized)
cgcccctcctccctccccctcccccccgggtcggagtgtccctgcgccccacgggccagagcagcagcgagagcagctttccccactccctccccctcgcctcattcacccccacccccc

SEQ ID NO: 217947 - DNA, 120 bp, Artificial Sequence
  ENSG00000116698_58 (sequence is synthesized)
agtgctgtttaccagggtctctggtccctgccagaatataatctctgactaggtttgatctaaaaggaggattctatgcacctgtggcaactggcacttaggcggtgtcttggtgttaac

SEQ ID NO: 217948 - DNA, 120 bp, Artificial Sequence
  ENSG00000116698_59 (sequence is synthesized)
agatttgaattcacatcttctgagcctcaaattgtactcagtgggcgaatacaggcatgcttttgctttggttccatagtatggtaagattaatattaagaaaatagaaggtataactta

SEQ ID NO: 217949 - DNA, 120 bp, Artificial Sequence
  ENSG00000116698_60 (sequence is synthesized)
tcagattgattaagggatagtgagattctgtaattacaaatatatcatttgttgggttatttttattttttgtttgtttgtttttgtaacttctgaaaggaaatagaaaaaaaaaaagaa

SEQ ID NO: 217950 - DNA, 120 bp, Artificial Sequence
  ENSG00000116698_61 (sequence is synthesized)
tagacaagaaagtagaacaggatctgtaagtattacctatcatttgagaagtccctgtaagatcaagaatttcaccgagactttaaaacagtttggttcgttatttatttttcaacctgt

SEQ ID NO: 217951 - DNA, 120 bp, Artificial Sequence
  ENSG00000116698_62 (sequence is synthesized)
gtttgctagcgaggggtggagagaaacgtccggggaggcggcggcgaccccgagtggaggagcagaactaagaaagggaggccttatggaaagatgttttttaaaaaattgtttcatacc

SEQ ID NO: 217952 - DNA, 120 bp, Artificial Sequence
  ENSG00000116698_63 (sequence is synthesized)
ttgcggaggagggagttggatgaggtggaagtctgaaatgagtggaaaagtcactttagctgtttagtgacatgaaagtattgacgtgtgtggatccctatatgtatattgcaagaggat

SEQ ID NO: 217953 - DNA, 120 bp, Artificial Sequence
  ENSG00000116701_0 (sequence is synthesized)
tctctctctgcttctttccttttctctctcatggtagggttatgagtcagttgccaaaaggtggggacatttcctgatgcatttgcaacactgagaagttatcttaagggaggctgggcc

SEQ ID NO: 217954 - DNA, 120 bp, Artificial Sequence
  ENSG00000116701_1 (sequence is synthesized)
ccattctactcatctggcccagaaagtgaacaccttgggggccactaaggcagccctgctaggggagacgctccaacctgtcttctctctgtctcctggcagctctcttggcctcctagt

SEQ ID NO: 217955 - DNA, 120 bp, Artificial Sequence
  ENSG00000116701_2 (sequence is synthesized)
ttctacctaatcatgtccctggtggaggccatcagcctctggaatgaaggggtgctggcagcggacaagaaggactggaagggagccctggatgccttcagtgccgtccaggacccccac

SEQ ID NO: 217956 - DNA, 120 bp, Artificial Sequence
  ENSG00000116701_3 (sequence is synthesized)
tcccggatttgcttcaacattggctgcatgtacactatcctgaagaacatgactgaagcagagaaggcctttaccagaagcattaaccgagacaagcacttggcagtggcttacttccaa

SEQ ID NO: 217957 - DNA, 120 bp, Artificial Sequence
  ENSG00000116701_4 (sequence is synthesized)
cgagggatgctctactaccagacagagaaatatgatttggctatcaaagaccttaaagaagccttgattcagcttcgagggaaccagctgatagactataagatcctggggctccagttc

SEQ ID NO: 217958 - DNA, 120 bp, Artificial Sequence
  ENSG00000116701_5 (sequence is synthesized)
aagctgtttgcctgtgaggtgttatataacattgctttcatgtatgccaagaaggaggaatggaaaaaagctgaagaacagttagcattggccacgagcatgaagtctgagcccagacat

SEQ ID NO: 217959 - DNA, 120 bp, Artificial Sequence
  ENSG00000116701_6 (sequence is synthesized)
tccaaaatcgacaaggcgatggagtgtgtctggaagcagaagctatatgagccagtggtgatccctgtgggcaagctgtttcgaccaaatgagagacaagtggctcagctggccaagaag

SEQ ID NO: 217960 - DNA, 120 bp, Artificial Sequence
  ENSG00000116701_7 (sequence is synthesized)
gattacctaggcaaggcgacggtcgtggcatctgtggtggatcaagacagtttctctgggtttgcccctctgcaaccacaggcagctgagcctccacccagaccgaaaaccccagagatc

SEQ ID NO: 217961 - DNA, 120 bp, Artificial Sequence
  ENSG00000116701_8 (sequence is synthesized)
ttcagggctctggaaggggaggctcaccgtgtgctatttgggtttgtgcctgagacaaaagaagagctccaggtcatgccagggaacattgtctttgtcttgaagaagggcaatgataac

SEQ ID NO: 217962 - DNA, 120 bp, Artificial Sequence
  ENSG00000116701_9 (sequence is synthesized)
ctgcggatccaccctcagcagcagccccaggaggaaagctctccgcagtccgacatcccagctcctcctagttccaaagcccctggaagaccccagctgtcaccaggccagaaacaaaaa

SEQ ID NO: 217963 - DNA, 120 bp, Artificial Sequence
  ENSG00000116701_10 (sequence is synthesized)
gaagagcctaaggaagtgaagctcagtgttcccatgccctacacactcaaggtgcactacaagtacacggtagtcatgaagactcagcccgggctcccctacagccaggtccgggacatg

SEQ ID NO: 217964 - DNA, 120 bp, Artificial Sequence
  ENSG00000116701_11 (sequence is synthesized)
gtgtctaagaaactggagctccggctggaacacactaagctgagctatcggcctcgggacagcaatgagctggtgcccctttcagaagacagcatgaaggatgcctggggccaggtgaaa

SEQ ID NO: 217965 - DNA, 120 bp, Artificial Sequence
  ENSG00000116701_12 (sequence is synthesized)
aactactgcctgactctgtggtgtgagaacacagtgggtgaccaaggctttccagatgaacccaaggaaagtgaaaaagctgatgctaataaccagacaacagaacctcagcttaagaaa

SEQ ID NO: 217966 - DNA, 120 bp, Artificial Sequence
  ENSG00000116701_13 (sequence is synthesized)
ggcagccaagtggaggcactcttcagttatgaggctacccaaccagaggacctggagtttcaggaaggggatataatcctggtgttatcaaaggtgaatgaagaatggctggaaggggag

SEQ ID NO: 217967 - DNA, 120 bp, Artificial Sequence
  ENSG00000116701_14 (sequence is synthesized)
tgcaaagggaaggtgggcattttccccaaagtttttgttgaagactgcgcaactacagatttggaaagcactcggagagaagtctaggatgtttcacaaactacaaagctgaagaaaatg

SEQ ID NO: 217968 - DNA, 120 bp, Artificial Sequence
  ENSG00000116701_15 (sequence is synthesized)
aagccctattacttgtttgtaagatttagcacccttctgctgtatactgtactgagacattacagtttggaagtgttaactatttattccctgttaaaatttaacctactagacaatgat

SEQ ID NO: 217969 - DNA, 120 bp, Artificial Sequence
  ENSG00000116701_16 (sequence is synthesized)
gtgagtacccaggatgatttcctggggcacagtgggtgaggagatggggacaggtgaatggaggagttaggggagaggaaaagtggatggaagtgtctggaaagggcacgagagagtctt

SEQ ID NO: 217970 - DNA, 120 bp, Artificial Sequence
  ENSG00000116701_17 (sequence is synthesized)
ccaggtactgatcctgtttcttgctctgagtgctagctagccagctgtgttcacactgtaaacattcatcaagctgtacatttggtgcacttttctgtgtcataccacaataaaaaaaaa

SEQ ID NO: 217971 - DNA, 120 bp, Artificial Sequence
  ENSG00000116701_18 (sequence is synthesized)
ggagtaagtacaaatattcctgtttctgaaccattactgtaattggctcttaaggcttgaagtaaccttataggttactcataaggcatatacaaataaacttgtttgttttcttttttc

SEQ ID NO: 217972 - DNA, 120 bp, Artificial Sequence
  ENSG00000116701_19 (sequence is synthesized)
ctccctactttttccattcaggccagaaacaaaaagaagagcctaaggtaacatttttccctcatactgtttcaagtggtagaagatgggatagcttgggctatcaaccacagacatgtc

SEQ ID NO: 217973 - DNA, 120 bp, Artificial Sequence
  ENSG00000116701_20 (sequence is synthesized)
tgtctggattataggaagagccccaaagggagggtcgaaccagttgctaccttacagagtccatgagctagggaccttcttaatagcctcctccactatcatgcacacacttcctactac
